United States Patent Application Publication US 2025/0154528 A1 - sequence listing, part 4

SEQ ID NO: 143857 - protein, 7 aa, synthetic construct
RKAYEVG

SEQ ID NO: 143858 - protein, 7 aa, synthetic construct
RKDAHMA

SEQ ID NO: 143859 - protein, 7 aa, synthetic construct
RKDAHMV

SEQ ID NO: 143860 - protein, 7 aa, synthetic construct
RKDANGY

SEQ ID NO: 143861 - protein, 7 aa, synthetic construct
RKDANNL

SEQ ID NO: 143862 - protein, 7 aa, synthetic construct
RKDANWN

SEQ ID NO: 143863 - protein, 7 aa, synthetic construct
RKDDKQY

SEQ ID NO: 143864 - protein, 7 aa, synthetic construct
RKDDPRN

SEQ ID NO: 143865 - protein, 7 aa, synthetic construct
RKDFPTN

SEQ ID NO: 143866 - protein, 7 aa, synthetic construct
RKDGGYQ

SEQ ID NO: 143867 - protein, 7 aa, synthetic construct
RKDGMTH

SEQ ID NO: 143868 - protein, 7 aa, synthetic construct
RKDGVTW

SEQ ID NO: 143869 - protein, 7 aa, synthetic construct
RKDGYVT

SEQ ID NO: 143870 - protein, 7 aa, synthetic construct
RKDHLVA

SEQ ID NO: 143871 - protein, 7 aa, synthetic construct
RKDHPTV

SEQ ID NO: 143872 - protein, 7 aa, synthetic construct
RKDHPYS

SEQ ID NO: 143873 - protein, 7 aa, synthetic construct
RKDKEMT

SEQ ID NO: 143874 - protein, 7 aa, synthetic construct
RKDLGNL

SEQ ID NO: 143875 - protein, 7 aa, synthetic construct
RKDLQPH

SEQ ID NO: 143876 - protein, 7 aa, synthetic construct
RKDLVHT

SEQ ID NO: 143877 - protein, 7 aa, synthetic construct
RKDMMHS

SEQ ID NO: 143878 - protein, 7 aa, synthetic construct
RKDMPTI

SEQ ID NO: 143879 - protein, 7 aa, synthetic construct
RKDNYTV

SEQ ID NO: 143880 - protein, 7 aa, synthetic construct
RKDPTFM

SEQ ID NO: 143881 - protein, 7 aa, synthetic construct
RKDPTQA

SEQ ID NO: 143882 - protein, 7 aa, synthetic construct
RKDQHTV

SEQ ID NO: 143883 - protein, 7 aa, synthetic construct
RKDQMGM

SEQ ID NO: 143884 - protein, 7 aa, synthetic construct
RKDQVFN

SEQ ID NO: 143885 - protein, 7 aa, synthetic construct
RKDSHAY

SEQ ID NO: 143886 - protein, 7 aa, synthetic construct
RKDSNNL

SEQ ID NO: 143887 - protein, 7 aa, synthetic construct
RKDTHVV

SEQ ID NO: 143888 - protein, 7 aa, synthetic construct
RKDTMHT

SEQ ID NO: 143889 - protein, 7 aa, synthetic construct
RKDTPKE

SEQ ID NO: 143890 - protein, 7 aa, synthetic construct
RKDVAGA

SEQ ID NO: 143891 - protein, 7 aa, synthetic construct
RKDVERA

SEQ ID NO: 143892 - protein, 7 aa, synthetic construct
RKDVNNQ

SEQ ID NO: 143893 - protein, 7 aa, synthetic construct
RKDYTGT

SEQ ID NO: 143894 - protein, 7 aa, synthetic construct
RKDYTQL

SEQ ID NO: 143895 - protein, 7 aa, synthetic construct
RKEADKT

SEQ ID NO: 143896 - protein, 7 aa, synthetic construct
RKEAHTP

SEQ ID NO: 143897 - protein, 7 aa, synthetic construct
RKEDFKM

SEQ ID NO: 143898 - protein, 7 aa, synthetic construct
RKEDKSA

SEQ ID NO: 143899 - protein, 7 aa, synthetic construct
RKEEIRT

SEQ ID NO: 143900 - protein, 7 aa, synthetic construct
RKEGGGQ

SEQ ID NO: 143901 - protein, 7 aa, synthetic construct
RKEGTNQ

SEQ ID NO: 143902 - protein, 7 aa, synthetic construct
RKEHNLP

SEQ ID NO: 143903 - protein, 7 aa, synthetic construct
RKEIGHY

SEQ ID NO: 143904 - protein, 7 aa, synthetic construct
RKEIHSI

SEQ ID NO: 143905 - protein, 7 aa, synthetic construct
RKEIHSP

SEQ ID NO: 143906 - protein, 7 aa, synthetic construct
RKEKPDF

SEQ ID NO: 143907 - protein, 7 aa, synthetic construct
RKELHER

SEQ ID NO: 143908 - protein, 7 aa, synthetic construct
RKELNII

SEQ ID NO: 143909 - protein, 7 aa, synthetic construct
RKEMHPI

SEQ ID NO: 143910 - protein, 7 aa, synthetic construct
RKEMNMM

SEQ ID NO: 143911 - protein, 7 aa, synthetic construct
RKEMQSL

SEQ ID NO: 143912 - protein, 7 aa, synthetic construct
RKEMTGN

SEQ ID NO: 143913 - protein, 7 aa, synthetic construct
RKENGGL

SEQ ID NO: 143914 - protein, 7 aa, synthetic construct
RKENVSL

SEQ ID NO: 143915 - protein, 7 aa, synthetic construct
RKEPFQN

SEQ ID NO: 143916 - protein, 7 aa, synthetic construct
RKEPLHA

SEQ ID NO: 143917 - protein, 7 aa, synthetic construct
RKEPMFS

SEQ ID NO: 143918 - protein, 7 aa, synthetic construct
RKEPMPY

SEQ ID NO: 143919 - protein, 7 aa, synthetic construct
RKEPSLQ

SEQ ID NO: 143920 - protein, 7 aa, synthetic construct
RKEQAQQ

SEQ ID NO: 143921 - protein, 7 aa, synthetic construct
RKEQTSQ

SEQ ID NO: 143922 - protein, 7 aa, synthetic construct
RKEREYI

SEQ ID NO: 143923 - protein, 7 aa, synthetic construct
RKERPEF

SEQ ID NO: 143924 - protein, 7 aa, synthetic construct
RKESQSF

SEQ ID NO: 143925 - protein, 7 aa, synthetic construct
RKETASF

SEQ ID NO: 143926 - protein, 7 aa, synthetic construct
RKETNQM

SEQ ID NO: 143927 - protein, 7 aa, synthetic construct
RKETNTH

SEQ ID NO: 143928 - protein, 7 aa, synthetic construct
RKETQMY

SEQ ID NO: 143929 - protein, 7 aa, synthetic construct
RKETYPT

SEQ ID NO: 143930 - protein, 7 aa, synthetic construct
RKETYSQ

SEQ ID NO: 143931 - protein, 7 aa, synthetic construct
RKEVHMN

SEQ ID NO: 143932 - protein, 7 aa, synthetic construct
RKEVPPY

SEQ ID NO: 143933 - protein, 7 aa, synthetic construct
RKEVVHY

SEQ ID NO: 143934 - protein, 7 aa, synthetic construct
RKEYATN

SEQ ID NO: 143935 - protein, 7 aa, synthetic construct
RKEYSTT

SEQ ID NO: 143936 - protein, 7 aa, synthetic construct
RKEYTPL

SEQ ID NO: 143937 - protein, 7 aa, synthetic construct
RKFDNGI

SEQ ID NO: 143938 - protein, 7 aa, synthetic construct
RKFETGT

SEQ ID NO: 143939 - protein, 7 aa, synthetic construct
RKFHEAD

SEQ ID NO: 143940 - protein, 7 aa, synthetic construct
RKFQIQE

SEQ ID NO: 143941 - protein, 7 aa, synthetic construct
RKGAEFL

SEQ ID NO: 143942 - protein, 7 aa, synthetic construct
RKGDFTQ

SEQ ID NO: 143943 - protein, 7 aa, synthetic construct
RKGDTIY

SEQ ID NO: 143944 - protein, 7 aa, synthetic construct
RKGDVMY

SEQ ID NO: 143945 - protein, 7 aa, synthetic construct
RKGEPFA

SEQ ID NO: 143946 - protein, 7 aa, synthetic construct
RKGETTM

SEQ ID NO: 143947 - protein, 7 aa, synthetic construct
RKGEYTM

SEQ ID NO: 143948 - protein, 7 aa, synthetic construct
RKGFPEA

SEQ ID NO: 143949 - protein, 7 aa, synthetic construct
RKGPEFQ

SEQ ID NO: 143950 - protein, 7 aa, synthetic construct
RKGQPTE

SEQ ID NO: 143951 - protein, 7 aa, synthetic construct
RKHVEEA

SEQ ID NO: 143952 - protein, 7 aa, synthetic construct
RKIQVDI

SEQ ID NO: 143953 - protein, 7 aa, synthetic construct
RKLDPQI

SEQ ID NO: 143954 - protein, 7 aa, synthetic construct
RKLMQND

SEQ ID NO: 143955 - protein, 7 aa, synthetic construct
RKMAPLD

SEQ ID NO: 143956 - protein, 7 aa, synthetic construct
RKMLPQD

SEQ ID NO: 143957 - protein, 7 aa, synthetic construct
RKMMDIS

SEQ ID NO: 143958 - protein, 7 aa, synthetic construct
RKMPVDN

SEQ ID NO: 143959 - protein, 7 aa, synthetic construct
RKMQDTT

SEQ ID NO: 143960 - protein, 7 aa, synthetic construct
RKMQNMD

SEQ ID NO: 143961 - protein, 7 aa, synthetic construct
RKMVSAD

SEQ ID NO: 143962 - protein, 7 aa, synthetic construct
RKMYEME

SEQ ID NO: 143963 - protein, 7 aa, synthetic construct
RKNDMYA

SEQ ID NO: 143964 - protein, 7 aa, synthetic construct
RKNDVPV

SEQ ID NO: 143965 - protein, 7 aa, synthetic construct
RKNGEIV

SEQ ID NO: 143966 - protein, 7 aa, synthetic construct
RKNPMSD

SEQ ID NO: 143967 - protein, 7 aa, synthetic construct
RKPDPFA

SEQ ID NO: 143968 - protein, 7 aa, synthetic construct
RKPELAT

SEQ ID NO: 143969 - protein, 7 aa, synthetic construct
RKPEMMY

SEQ ID NO: 143970 - protein, 7 aa, synthetic construct
RKPEMTT

SEQ ID NO: 143971 - protein, 7 aa, synthetic construct
RKPEPFN

SEQ ID NO: 143972 - protein, 7 aa, synthetic construct
RKPGPME

SEQ ID NO: 143973 - protein, 7 aa, synthetic construct
RKPMEML

SEQ ID NO: 143974 - protein, 7 aa, synthetic construct
RKPMSDF

SEQ ID NO: 143975 - protein, 7 aa, synthetic construct
RKPTEFL

SEQ ID NO: 143976 - protein, 7 aa, synthetic construct
RKQEVPA

SEQ ID NO: 143977 - protein, 7 aa, synthetic construct
RKQIEEQ

SEQ ID NO: 143978 - protein, 7 aa, synthetic construct
RKQPTDF

SEQ ID NO: 143979 - protein, 7 aa, synthetic construct
RKQVIID

SEQ ID NO: 143980 - protein, 7 aa, synthetic construct
RKSDYFQ

SEQ ID NO: 143981 - protein, 7 aa, synthetic construct
RKSPDVY

SEQ ID NO: 143982 - protein, 7 aa, synthetic construct
RKSPVDT

SEQ ID NO: 143983 - protein, 7 aa, synthetic construct
RKTAENY

SEQ ID NO: 143984 - protein, 7 aa, synthetic construct
RKTAPLE

SEQ ID NO: 143985 - protein, 7 aa, synthetic construct
RKTDNTA

SEQ ID NO: 143986 - protein, 7 aa, synthetic construct
RKTDNTM

SEQ ID NO: 143987 - protein, 7 aa, synthetic construct
RKTDNVV

SEQ ID NO: 143988 - protein, 7 aa, synthetic construct
RKTDQNV

SEQ ID NO: 143989 - protein, 7 aa, synthetic construct
RKTDSAA

SEQ ID NO: 143990 - protein, 7 aa, synthetic construct
RKTDSPL

SEQ ID NO: 143991 - protein, 7 aa, synthetic construct
RKTDTVN

SEQ ID NO: 143992 - protein, 7 aa, synthetic construct
RKTETGL

SEQ ID NO: 143993 - protein, 7 aa, synthetic construct
RKTQDNL

SEQ ID NO: 143994 - protein, 7 aa, synthetic construct
RKTVPEN

SEQ ID NO: 143995 - protein, 7 aa, synthetic construct
RKVEALA

SEQ ID NO: 143996 - protein, 7 aa, synthetic construct
RKVELAQ

SEQ ID NO: 143997 - protein, 7 aa, synthetic construct
RKVESMQ

SEQ ID NO: 143998 - protein, 7 aa, synthetic construct
RKVETSV

SEQ ID NO: 143999 - protein, 7 aa, synthetic construct
RKVQPVE

SEQ ID NO: 144000 - protein, 7 aa, synthetic construct
RKWETDA

SEQ ID NO: 144001 - protein, 7 aa, synthetic construct
RLADMSR

SEQ ID NO: 144002 - protein, 7 aa, synthetic construct
RLADRHV

SEQ ID NO: 144003 - protein, 7 aa, synthetic construct
RLAERQV

SEQ ID NO: 144004 - protein, 7 aa, synthetic construct
RLAGPLS

SEQ ID NO: 144005 - protein, 7 aa, synthetic construct
RLAHAVN

SEQ ID NO: 144006 - protein, 7 aa, synthetic construct
RLAHGGA

SEQ ID NO: 144007 - protein, 7 aa, synthetic construct
RLAHMNT

SEQ ID NO: 144008 - protein, 7 aa, synthetic construct
RLAHVNT

SEQ ID NO: 144009 - protein, 7 aa, synthetic construct
RLAKYSE

SEQ ID NO: 144010 - protein, 7 aa, synthetic construct
RLANAHN

SEQ ID NO: 144011 - protein, 7 aa, synthetic construct
RLASSGY

SEQ ID NO: 144012 - protein, 7 aa, synthetic construct
RLASSSY

SEQ ID NO: 144013 - protein, 7 aa, synthetic construct
RLATADK

SEQ ID NO: 144014 - protein, 7 aa, synthetic construct
RLATDIR

SEQ ID NO: 144015 - protein, 7 aa, synthetic construct
RLDARHS

SEQ ID NO: 144016 - protein, 7 aa, synthetic construct
RLDHSAK

SEQ ID NO: 144017 - protein, 7 aa, synthetic construct
RLDKAYM

SEQ ID NO: 144018 - protein, 7 aa, synthetic construct
RLDQTKQ

SEQ ID NO: 144019 - protein, 7 aa, synthetic construct
RLDRAAN

SEQ ID NO: 144020 - protein, 7 aa, synthetic construct
RLDRVRD

SEQ ID NO: 144021 - protein, 7 aa, synthetic construct
RLDSQKT

SEQ ID NO: 144022 - protein, 7 aa, synthetic construct
RLDTISK

SEQ ID NO: 144023 - protein, 7 aa, synthetic construct
RLEAVRS

SEQ ID NO: 144024 - protein, 7 aa, synthetic construct
RLENYKN

SEQ ID NO: 144025 - protein, 7 aa, synthetic construct
RLEPRVV

SEQ ID NO: 144026 - protein, 7 aa, synthetic construct
RLERADS

SEQ ID NO: 144027 - protein, 7 aa, synthetic construct
RLESVRP

SEQ ID NO: 144028 - protein, 7 aa, synthetic construct
RLEVKHP

SEQ ID NO: 144029 - protein, 7 aa, synthetic construct
RLEYKNP

SEQ ID NO: 144030 - protein, 7 aa, synthetic construct
RLGAGFN

SEQ ID NO: 144031 - protein, 7 aa, synthetic construct
RLGANQY

SEQ ID NO: 144032 - protein, 7 aa, synthetic construct
RLGAPIA

SEQ ID NO: 144033 - protein, 7 aa, synthetic construct
RLGEQGR

SEQ ID NO: 144034 - protein, 7 aa, synthetic construct
RLGGADK

SEQ ID NO: 144035 - protein, 7 aa, synthetic construct
RLGHAVA

SEQ ID NO: 144036 - protein, 7 aa, synthetic construct
RLGHLGA

SEQ ID NO: 144037 - protein, 7 aa, synthetic construct
RLGHNTV

SEQ ID NO: 144038 - protein, 7 aa, synthetic construct
RLGHPTN

SEQ ID NO: 144039 - protein, 7 aa, synthetic construct
RLGNTFA

SEQ ID NO: 144040 - protein, 7 aa, synthetic construct
RLGPNSH

SEQ ID NO: 144041 - protein, 7 aa, synthetic construct
RLGRELS

SEQ ID NO: 144042 - protein, 7 aa, synthetic construct
RLGSERS

SEQ ID NO: 144043 - protein, 7 aa, synthetic construct
RLGSHGA

SEQ ID NO: 144044 - protein, 7 aa, synthetic construct
RLHATGN

SEQ ID NO: 144045 - protein, 7 aa, synthetic construct
RLHGSSV

SEQ ID NO: 144046 - protein, 7 aa, synthetic construct
RLHLQST

SEQ ID NO: 144047 - protein, 7 aa, synthetic construct
RLHNMAA

SEQ ID NO: 144048 - protein, 7 aa, synthetic construct
RLHQNTP

SEQ ID NO: 144049 - protein, 7 aa, synthetic construct
RLHQSAA

SEQ ID NO: 144050 - protein, 7 aa, synthetic construct
RLHQTLT

SEQ ID NO: 144051 - protein, 7 aa, synthetic construct
RLHSVKD

SEQ ID NO: 144052 - protein, 7 aa, synthetic construct
RLHTKEI

SEQ ID NO: 144053 - protein, 7 aa, synthetic construct
RLHTNAV

SEQ ID NO: 144054 - protein, 7 aa, synthetic construct
RLHTVQS

SEQ ID NO: 144055 - protein, 7 aa, synthetic construct
RLIEGVE

SEQ ID NO: 144056 - protein, 7 aa, synthetic construct
RLIKHGE

SEQ ID NO: 144057 - protein, 7 aa, synthetic construct
RLKADVY

SEQ ID NO: 144058 - protein, 7 aa, synthetic construct
RLKASYE

SEQ ID NO: 144059 - protein, 7 aa, synthetic construct
RLKEFNN

SEQ ID NO: 144060 - protein, 7 aa, synthetic construct
RLKEPQN

SEQ ID NO: 144061 - protein, 7 aa, synthetic construct
RLKNAYE

SEQ ID NO: 144062 - protein, 7 aa, synthetic construct
RLKSDLL

SEQ ID NO: 144063 - protein, 7 aa, synthetic construct
RLKVMDV

SEQ ID NO: 144064 - protein, 7 aa, synthetic construct
RLLPGRE

SEQ ID NO: 144065 - protein, 7 aa, synthetic construct
RLMKDSM

SEQ ID NO: 144066 - protein, 7 aa, synthetic construct
RLNHNTV

SEQ ID NO: 144067 - protein, 7 aa, synthetic construct
RLNHVVV

SEQ ID NO: 144068 - protein, 7 aa, synthetic construct
RLNKDPM

SEQ ID NO: 144069 - protein, 7 aa, synthetic construct
RLNKGDN

SEQ ID NO: 144070 - protein, 7 aa, synthetic construct
RLNNMDK

SEQ ID NO: 144071 - protein, 7 aa, synthetic construct
RLNQGHL

SEQ ID NO: 144072 - protein, 7 aa, synthetic construct
RLNRIES

SEQ ID NO: 144073 - protein, 7 aa, synthetic construct
RLNTDGK

SEQ ID NO: 144074 - protein, 7 aa, synthetic construct
RLNTDLR

SEQ ID NO: 144075 - protein, 7 aa, synthetic construct
RLNTGER

SEQ ID NO: 144076 - protein, 7 aa, synthetic construct
RLPAQIP

SEQ ID NO: 144077 - protein, 7 aa, synthetic construct
RLPDLQK

SEQ ID NO: 144078 - protein, 7 aa, synthetic construct
RLPDMNK

SEQ ID NO: 144079 - protein, 7 aa, synthetic construct
RLPEISR

SEQ ID NO: 144080 - protein, 7 aa, synthetic construct
RLPGFTS

SEQ ID NO: 144081 - protein, 7 aa, synthetic construct
RLPGNVL

SEQ ID NO: 144082 - protein, 7 aa, synthetic construct
RLPHGVN

SEQ ID NO: 144083 - protein, 7 aa, synthetic construct
RLPHKFD

SEQ ID NO: 144084 - protein, 7 aa, synthetic construct
RLPHMNN

SEQ ID NO: 144085 - protein, 7 aa, synthetic construct
RLPHSVN

SEQ ID NO: 144086 - protein, 7 aa, synthetic construct
RLPHVMN

SEQ ID NO: 144087 - protein, 7 aa, synthetic construct
RLPMSEK

SEQ ID NO: 144088 - protein, 7 aa, synthetic construct
RLPNAYS

SEQ ID NO: 144089 - protein, 7 aa, synthetic construct
RLPPRDF

SEQ ID NO: 144090 - protein, 7 aa, synthetic construct
RLPQIGP

SEQ ID NO: 144091 - protein, 7 aa, synthetic construct
RLPRADL

SEQ ID NO: 144092 - protein, 7 aa, synthetic construct
RLPRDQL

SEQ ID NO: 144093 - protein, 7 aa, synthetic construct
RLPRGFE

SEQ ID NO: 144094 - protein, 7 aa, synthetic construct
RLPRPNE

SEQ ID NO: 144095 - protein, 7 aa, synthetic construct
RLPYKEV

SEQ ID NO: 144096 - protein, 7 aa, synthetic construct
RLQAHGM

SEQ ID NO: 144097 - protein, 7 aa, synthetic construct
RLQANTH

SEQ ID NO: 144098 - protein, 7 aa, synthetic construct
RLQDGMK

SEQ ID NO: 144099 - protein, 7 aa, synthetic construct
RLQDSMK

SEQ ID NO: 144100 - protein, 7 aa, synthetic construct
RLQDVQR

SEQ ID NO: 144101 - protein, 7 aa, synthetic construct
RLQEIPK

SEQ ID NO: 144102 - protein, 7 aa, synthetic construct
RLQENVR

SEQ ID NO: 144103 - protein, 7 aa, synthetic construct
RLQGAHQ

SEQ ID NO: 144104 - protein, 7 aa, synthetic construct
RLQGHLT

SEQ ID NO: 144105 - protein, 7 aa, synthetic construct
RLQHGMS

SEQ ID NO: 144106 - protein, 7 aa, synthetic construct
RLQHHGL

SEQ ID NO: 144107 - protein, 7 aa, synthetic construct
RLQPYKE

SEQ ID NO: 144108 - protein, 7 aa, synthetic construct
RLQQHKD

SEQ ID NO: 144109 - protein, 7 aa, synthetic construct
RLQQTAY

SEQ ID NO: 144110 - protein, 7 aa, synthetic construct
RLQTHVT

SEQ ID NO: 144111 - protein, 7 aa, synthetic construct
RLRTGEG

SEQ ID NO: 144112 - protein, 7 aa, synthetic construct
RLSGSIH

SEQ ID NO: 144113 - protein, 7 aa, synthetic construct
RLSGTSH

SEQ ID NO: 144114 - protein, 7 aa, synthetic construct
RLSHQNA

SEQ ID NO: 144115 - protein, 7 aa, synthetic construct
RLSKENY

SEQ ID NO: 144116 - protein, 7 aa, synthetic construct
RLSKEYI

SEQ ID NO: 144117 - protein, 7 aa, synthetic construct
RLSKSGD

SEQ ID NO: 144118 - protein, 7 aa, synthetic construct
RLSPMAS

SEQ ID NO: 144119 - protein, 7 aa, synthetic construct
RLSQGVH

SEQ ID NO: 144120 - protein, 7 aa, synthetic construct
RLSQNLH

SEQ ID NO: 144121 - protein, 7 aa, synthetic construct
RLSSGFS

SEQ ID NO: 144122 - protein, 7 aa, synthetic construct
RLSSTGF

SEQ ID NO: 144123 - protein, 7 aa, synthetic construct
RLTDRAL

SEQ ID NO: 144124 - protein, 7 aa, synthetic construct
RLTGIHP

SEQ ID NO: 144125 - protein, 7 aa, synthetic construct
RLTGVQH

SEQ ID NO: 144126 - protein, 7 aa, synthetic construct
RLTKGDQ

SEQ ID NO: 144127 - protein, 7 aa, synthetic construct
RLTNAHT

SEQ ID NO: 144128 - protein, 7 aa, synthetic construct
RLTNRET

SEQ ID NO: 144129 - protein, 7 aa, synthetic construct
RLTRETN

SEQ ID NO: 144130 - protein, 7 aa, synthetic construct
RLTREVP

SEQ ID NO: 144131 - protein, 7 aa, synthetic construct
RLTSKDF

SEQ ID NO: 144132 - protein, 7 aa, synthetic construct
RLTSNIH

SEQ ID NO: 144133 - protein, 7 aa, synthetic construct
RLTSSTH

SEQ ID NO: 144134 - protein, 7 aa, synthetic construct
RLTTMPH

SEQ ID NO: 144135 - protein, 7 aa, synthetic construct
RLVAGPP

SEQ ID NO: 144136 - protein, 7 aa, synthetic construct
RLVGSDK

SEQ ID NO: 144137 - protein, 7 aa, synthetic construct
RLVHTSV

SEQ ID NO: 144138 - protein, 7 aa, synthetic construct
RLVSNHQ

SEQ ID NO: 144139 - protein, 7 aa, synthetic construct
RLVTLEK

SEQ ID NO: 144140 - protein, 7 aa, synthetic construct
RMAAHTN

SEQ ID NO: 144141 - protein, 7 aa, synthetic construct
RMADKNM

SEQ ID NO: 144142 - protein, 7 aa, synthetic construct
RMADRQA

SEQ ID NO: 144143 - protein, 7 aa, synthetic construct
RMAKAVD

SEQ ID NO: 144144 - protein, 7 aa, synthetic construct
RMAKLDM

SEQ ID NO: 144145 - protein, 7 aa, synthetic construct
RMANMGI

SEQ ID NO: 144146 - protein, 7 aa, synthetic construct
RMAPPQP

SEQ ID NO: 144147 - protein, 7 aa, synthetic construct
RMAQHNP

SEQ ID NO: 144148 - protein, 7 aa, synthetic construct
RMAQRGE

SEQ ID NO: 144149 - protein, 7 aa, synthetic construct
RMAQTPV

SEQ ID NO: 144150 - protein, 7 aa, synthetic construct
RMAQTSF

SEQ ID NO: 144151 - protein, 7 aa, synthetic construct
RMARTEG

SEQ ID NO: 144152 - protein, 7 aa, synthetic construct
RMATHMA

SEQ ID NO: 144153 - protein, 7 aa, synthetic construct
RMATSMH

SEQ ID NO: 144154 - protein, 7 aa, synthetic construct
RMDGMRQ

SEQ ID NO: 144155 - protein, 7 aa, synthetic construct
RMDGQTR

SEQ ID NO: 144156 - protein, 7 aa, synthetic construct
RMDITRQ

SEQ ID NO: 144157 - protein, 7 aa, synthetic construct
RMDKEKI

SEQ ID NO: 144158 - protein, 7 aa, synthetic construct
RMDKFGS

SEQ ID NO: 144159 - protein, 7 aa, synthetic construct
RMDMVRA

SEQ ID NO: 144160 - protein, 7 aa, synthetic construct
RMDRANQ

SEQ ID NO: 144161 - protein, 7 aa, synthetic construct
RMDRETR

SEQ ID NO: 144162 - protein, 7 aa, synthetic construct
RMDRGMS

SEQ ID NO: 144163 - protein, 7 aa, synthetic construct
RMDRTVI

SEQ ID NO: 144164 - protein, 7 aa, synthetic construct
RMDRVAQ

SEQ ID NO: 144165 - protein, 7 aa, synthetic construct
RMDSVRA

SEQ ID NO: 144166 - protein, 7 aa, synthetic construct
RMDTNKN

SEQ ID NO: 144167 - protein, 7 aa, synthetic construct
RMDTRAM

SEQ ID NO: 144168 - protein, 7 aa, synthetic construct
RMDVKYG

SEQ ID NO: 144169 - protein, 7 aa, synthetic construct
RMDVTNK

SEQ ID NO: 144170 - protein, 7 aa, synthetic construct
RMEAKVT

SEQ ID NO: 144171 - protein, 7 aa, synthetic construct
RMEGLKT

SEQ ID NO: 144172 - protein, 7 aa, synthetic construct
RMEIHKP

SEQ ID NO: 144173 - protein, 7 aa, synthetic construct
RMEKHPY

SEQ ID NO: 144174 - protein, 7 aa, synthetic construct
RMEKIYG

SEQ ID NO: 144175 - protein, 7 aa, synthetic construct
RMEMKLQ

SEQ ID NO: 144176 - protein, 7 aa, synthetic construct
RMEPLRM

SEQ ID NO: 144177 - protein, 7 aa, synthetic construct
RMEPNSR

SEQ ID NO: 144178 - protein, 7 aa, synthetic construct
RMERKDS

SEQ ID NO: 144179 - protein, 7 aa, synthetic construct
RMETSKV

SEQ ID NO: 144180 - protein, 7 aa, synthetic construct
RMGAGGF

SEQ ID NO: 144181 - protein, 7 aa, synthetic construct
RMGASHV

SEQ ID NO: 144182 - protein, 7 aa, synthetic construct
RMGGHVP

SEQ ID NO: 144183 - protein, 7 aa, synthetic construct
RMGKDLI

SEQ ID NO: 144184 - protein, 7 aa, synthetic construct
RMGKVDL

SEQ ID NO: 144185 - protein, 7 aa, synthetic construct
RMGKYIE

SEQ ID NO: 144186 - protein, 7 aa, synthetic construct
RMGMDVK

SEQ ID NO: 144187 - protein, 7 aa, synthetic construct
RMGNLLN

SEQ ID NO: 144188 - protein, 7 aa, synthetic construct
RMGTSLM

SEQ ID NO: 144189 - protein, 7 aa, synthetic construct
RMGVRDV

SEQ ID NO: 144190 - protein, 7 aa, synthetic construct
RMHAISP

SEQ ID NO: 144191 - protein, 7 aa, synthetic construct
RMHGIKD

SEQ ID NO: 144192 - protein, 7 aa, synthetic construct
RMHNHQS

SEQ ID NO: 144193 - protein, 7 aa, synthetic construct
RMHNNGM

SEQ ID NO: 144194 - protein, 7 aa, synthetic construct
RMHNPVA

SEQ ID NO: 144195 - protein, 7 aa, synthetic construct
RMHNTVN

SEQ ID NO: 144196 - protein, 7 aa, synthetic construct
RMHPNQI

SEQ ID NO: 144197 - protein, 7 aa, synthetic construct
RMHQGDK

SEQ ID NO: 144198 - protein, 7 aa, synthetic construct
RMHTANS

SEQ ID NO: 144199 - protein, 7 aa, synthetic construct
RMHTITA

SEQ ID NO: 144200 - protein, 7 aa, synthetic construct
RMHTPTP

SEQ ID NO: 144201 - protein, 7 aa, synthetic construct
RMHTTLP

SEQ ID NO: 144202 - protein, 7 aa, synthetic construct
RMHYAAD

SEQ ID NO: 144203 - protein, 7 aa, synthetic construct
RMIAQNA

SEQ ID NO: 144204 - protein, 7 aa, synthetic construct
RMIDTAK

SEQ ID NO: 144205 - protein, 7 aa, synthetic construct
RMIEKAT

SEQ ID NO: 144206 - protein, 7 aa, synthetic construct
RMIHNSV

SEQ ID NO: 144207 - protein, 7 aa, synthetic construct
RMIKPDL

SEQ ID NO: 144208 - protein, 7 aa, synthetic construct
RMIKTDM

SEQ ID NO: 144209 - protein, 7 aa, synthetic construct
RMINMQS

SEQ ID NO: 144210 - protein, 7 aa, synthetic construct
RMIPSQS

SEQ ID NO: 144211 - protein, 7 aa, synthetic construct
RMKAEPM

SEQ ID NO: 144212 - protein, 7 aa, synthetic construct
RMKAESM

SEQ ID NO: 144213 - protein, 7 aa, synthetic construct
RMKAVID

SEQ ID NO: 144214 - protein, 7 aa, synthetic construct
RMKDGFN

SEQ ID NO: 144215 - protein, 7 aa, synthetic construct
RMKDISV

SEQ ID NO: 144216 - protein, 7 aa, synthetic construct
RMKDMAQ

SEQ ID NO: 144217 - protein, 7 aa, synthetic construct
RMKDRVD

SEQ ID NO: 144218 - protein, 7 aa, synthetic construct
RMKDSIL

SEQ ID NO: 144219 - protein, 7 aa, synthetic construct
RMKDYMP

SEQ ID NO: 144220 - protein, 7 aa, synthetic construct
RMKELAY

SEQ ID NO: 144221 - protein, 7 aa, synthetic construct
RMKENNP

SEQ ID NO: 144222 - protein, 7 aa, synthetic construct
RMKEPSN

SEQ ID NO: 144223 - protein, 7 aa, synthetic construct
RMKLPQE

SEQ ID NO: 144224 - protein, 7 aa, synthetic construct
RMKMEPL

SEQ ID NO: 144225 - protein, 7 aa, synthetic construct
RMKNEYS

SEQ ID NO: 144226 - protein, 7 aa, synthetic construct
RMKQGDT

SEQ ID NO: 144227 - protein, 7 aa, synthetic construct
RMKQHDV

SEQ ID NO: 144228 - protein, 7 aa, synthetic construct
RMKTDIQ

SEQ ID NO: 144229 - protein, 7 aa, synthetic construct
RMKYVGE

SEQ ID NO: 144230 - protein, 7 aa, synthetic construct
RMLDQTR

SEQ ID NO: 144231 - protein, 7 aa, synthetic construct
RMLDTNK

SEQ ID NO: 144232 - protein, 7 aa, synthetic construct
RMLEKGL

SEQ ID NO: 144233 - protein, 7 aa, synthetic construct
RMLEQKN

SEQ ID NO: 144234 - protein, 7 aa, synthetic construct
RMLGSVA

SEQ ID NO: 144235 - protein, 7 aa, synthetic construct
RMLHREG

SEQ ID NO: 144236 - protein, 7 aa, synthetic construct
RMLKEEK

SEQ ID NO: 144237 - protein, 7 aa, synthetic construct
RMLNLDK

SEQ ID NO: 144238 - protein, 7 aa, synthetic construct
RMLPPKD

SEQ ID NO: 144239 - protein, 7 aa, synthetic construct
RMMETKN

SEQ ID NO: 144240 - protein, 7 aa, synthetic construct
RMMGQDK

SEQ ID NO: 144241 - protein, 7 aa, synthetic construct
RMMHGTP

SEQ ID NO: 144242 - protein, 7 aa, synthetic construct
RMMNDRP

SEQ ID NO: 144243 - protein, 7 aa, synthetic construct
RMMPGTV

SEQ ID NO: 144244 - protein, 7 aa, synthetic construct
RMMPQEK

SEQ ID NO: 144245 - protein, 7 aa, synthetic construct
RMNANMH

SEQ ID NO: 144246 - protein, 7 aa, synthetic construct
RMNATIH

SEQ ID NO: 144247 - protein, 7 aa, synthetic construct
RMNDLAK

SEQ ID NO: 144248 - protein, 7 aa, synthetic construct
RMNGIHH

SEQ ID NO: 144249 - protein, 7 aa, synthetic construct
RMNHIGS

SEQ ID NO: 144250 - protein, 7 aa, synthetic construct
RMNHQPV

SEQ ID NO: 144251 - protein, 7 aa, synthetic construct
RMNITHA

SEQ ID NO: 144252 - protein, 7 aa, synthetic construct
RMNKVDL

SEQ ID NO: 144253 - protein, 7 aa, synthetic construct
RMNLLSG

SEQ ID NO: 144254 - protein, 7 aa, synthetic construct
RMNMSVS

SEQ ID NO: 144255 - protein, 7 aa, synthetic construct
RMNNENR

SEQ ID NO: 144256 - protein, 7 aa, synthetic construct
RMNNHQP

SEQ ID NO: 144257 - protein, 7 aa, synthetic construct
RMNNPTT

SEQ ID NO: 144258 - protein, 7 aa, synthetic construct
RMNNTSM

SEQ ID NO: 144259 - protein, 7 aa, synthetic construct
RMNNVNM

SEQ ID NO: 144260 - protein, 7 aa, synthetic construct
RMNTMER

SEQ ID NO: 144261 - protein, 7 aa, synthetic construct
RMNVGNQ

SEQ ID NO: 144262 - protein, 7 aa, synthetic construct
RMNVQGH

SEQ ID NO: 144263 - protein, 7 aa, synthetic construct
RMNVTDR

SEQ ID NO: 144264 - protein, 7 aa, synthetic construct
RMNVTPH

SEQ ID NO: 144265 - protein, 7 aa, synthetic construct
RMPHLGQ

SEQ ID NO: 144266 - protein, 7 aa, synthetic construct
RMPHTLS

SEQ ID NO: 144267 - protein, 7 aa, synthetic construct
RMPHVSQ

SEQ ID NO: 144268 - protein, 7 aa, synthetic construct
RMPMVER

SEQ ID NO: 144269 - protein, 7 aa, synthetic construct
RMPPREQ

SEQ ID NO: 144270 - protein, 7 aa, synthetic construct
RMPPTGV

SEQ ID NO: 144271 - protein, 7 aa, synthetic construct
RMPPTLP

SEQ ID NO: 144272 - protein, 7 aa, synthetic construct
RMPQAML

SEQ ID NO: 144273 - protein, 7 aa, synthetic construct
RMPQGLP

SEQ ID NO: 144274 - protein, 7 aa, synthetic construct
RMPRDVN

SEQ ID NO: 144275 - protein, 7 aa, synthetic construct
RMPRNES

SEQ ID NO: 144276 - protein, 7 aa, synthetic construct
RMPRNVE

SEQ ID NO: 144277 - protein, 7 aa, synthetic construct
RMPTHLA

SEQ ID NO: 144278 - protein, 7 aa, synthetic construct
RMPTKGD

SEQ ID NO: 144279 - protein, 7 aa, synthetic construct
RMPTLDK

SEQ ID NO: 144280 - protein, 7 aa, synthetic construct
RMPTMNH

SEQ ID NO: 144281 - protein, 7 aa, synthetic construct
RMPTQHM

SEQ ID NO: 144282 - protein, 7 aa, synthetic construct
RMPVMTA

SEQ ID NO: 144283 - protein, 7 aa, synthetic construct
RMPVPGV

SEQ ID NO: 144284 - protein, 7 aa, synthetic construct
RMPVSQV

SEQ ID NO: 144285 - protein, 7 aa, synthetic construct
RMQAGAQ

SEQ ID NO: 144286 - protein, 7 aa, synthetic construct
RMQAMQV

SEQ ID NO: 144287 - protein, 7 aa, synthetic construct
RMQAQSL

SEQ ID NO: 144288 - protein, 7 aa, synthetic construct
RMQDSKM

SEQ ID NO: 144289 - protein, 7 aa, synthetic construct
RMQETLK

SEQ ID NO: 144290 - protein, 7 aa, synthetic construct
RMQGIMQ

SEQ ID NO: 144291 - protein, 7 aa, synthetic construct
RMQKMYE

SEQ ID NO: 144292 - protein, 7 aa, synthetic construct
RMQLKET

SEQ ID NO: 144293 - protein, 7 aa, synthetic construct
RMQMPNT

SEQ ID NO: 144294 - protein, 7 aa, synthetic construct
RMQMQST

SEQ ID NO: 144295 - protein, 7 aa, synthetic construct
RMQNALT

SEQ ID NO: 144296 - protein, 7 aa, synthetic construct
RMQPQSI

SEQ ID NO: 144297 - protein, 7 aa, synthetic construct
RMQREAV

SEQ ID NO: 144298 - protein, 7 aa, synthetic construct
RMQSAGH

SEQ ID NO: 144299 - protein, 7 aa, synthetic construct
RMQTSLH

SEQ ID NO: 144300 - protein, 7 aa, synthetic construct
RMQVSAV

SEQ ID NO: 144301 - protein, 7 aa, synthetic construct
RMRELSN

SEQ ID NO: 144302 - protein, 7 aa, synthetic construct
RMRETIT

SEQ ID NO: 144303 - protein, 7 aa, synthetic construct
RMRGEIA

SEQ ID NO: 144304 - protein, 7 aa, synthetic construct
RMRGVEP

SEQ ID NO: 144305 - protein, 7 aa, synthetic construct
RMRNEGG

SEQ ID NO: 144306 - protein, 7 aa, synthetic construct
RMRYEDA

SEQ ID NO: 144307 - protein, 7 aa, synthetic construct
RMSAQGQ

SEQ ID NO: 144308 - protein, 7 aa, synthetic construct
RMSASVT

SEQ ID NO: 144309 - protein, 7 aa, synthetic construct
RMSEAKY

SEQ ID NO: 144310 - protein, 7 aa, synthetic construct
RMSEIRN

SEQ ID NO: 144311 - protein, 7 aa, synthetic construct
RMSGNMQ

SEQ ID NO: 144312 - protein, 7 aa, synthetic construct
RMSHIQA

SEQ ID NO: 144313 - protein, 7 aa, synthetic construct
RMSNASV

SEQ ID NO: 144314 - protein, 7 aa, synthetic construct
RMSPHTQ

SEQ ID NO: 144315 - protein, 7 aa, synthetic construct
RMSPIAT

SEQ ID NO: 144316 - protein, 7 aa, synthetic construct
RMSPKFD

SEQ ID NO: 144317 - protein, 7 aa, synthetic construct
RMSPNTH

SEQ ID NO: 144318 - protein, 7 aa, synthetic construct
RMSQNAY

SEQ ID NO: 144319 - protein, 7 aa, synthetic construct
RMSQNQV

SEQ ID NO: 144320 - protein, 7 aa, synthetic construct
RMSVQAQ

SEQ ID NO: 144321 - protein, 7 aa, synthetic construct
RMTDKNL

SEQ ID NO: 144322 - protein, 7 aa, synthetic construct
RMTERNP

SEQ ID NO: 144323 - protein, 7 aa, synthetic construct
RMTGAPI

SEQ ID NO: 144324 - protein, 7 aa, synthetic construct
RMTGNQF

SEQ ID NO: 144325 - protein, 7 aa, synthetic construct
RMTHMTA

SEQ ID NO: 144326 - protein, 7 aa, synthetic construct
RMTKPDS

SEQ ID NO: 144327 - protein, 7 aa, synthetic construct
RMTNPST

SEQ ID NO: 144328 - protein, 7 aa, synthetic construct
RMTNRDI

SEQ ID NO: 144329 - protein, 7 aa, synthetic construct
RMTPVVN

SEQ ID NO: 144330 - protein, 7 aa, synthetic construct
RMTQVMQ

SEQ ID NO: 144331 - protein, 7 aa, synthetic construct
RMTRDGG

SEQ ID NO: 144332 - protein, 7 aa, synthetic construct
RMTSMNN

SEQ ID NO: 144333 - protein, 7 aa, synthetic construct
RMTSPQT

SEQ ID NO: 144334 - protein, 7 aa, synthetic construct
RMTSQTH

SEQ ID NO: 144335 - protein, 7 aa, synthetic construct
RMTTLQM

SEQ ID NO: 144336 - protein, 7 aa, synthetic construct
RMVDKNM

SEQ ID NO: 144337 - protein, 7 aa, synthetic construct
RMVKQDT

SEQ ID NO: 144338 - protein, 7 aa, synthetic construct
RMVPQER

SEQ ID NO: 144339 - protein, 7 aa, synthetic construct
RMVQHKD

SEQ ID NO: 144340 - protein, 7 aa, synthetic construct
RMVSSSI

SEQ ID NO: 144341 - protein, 7 aa, synthetic construct
RMVSVAQ

SEQ ID NO: 144342 - protein, 7 aa, synthetic construct
RMVSVSQ

SEQ ID NO: 144343 - protein, 7 aa, synthetic construct
RMVTAEK

SEQ ID NO: 144344 - protein, 7 aa, synthetic construct
RMVVKQD

SEQ ID NO: 144345 - protein, 7 aa, synthetic construct
RMYKEPD

SEQ ID NO: 144346 - protein, 7 aa, synthetic construct
RNAAAKD

SEQ ID NO: 144347 - protein, 7 aa, synthetic construct
RNAAIQM

SEQ ID NO: 144348 - protein, 7 aa, synthetic construct
RNAAMSM

SEQ ID NO: 144349 - protein, 7 aa, synthetic construct
RNAANSM

SEQ ID NO: 144350 - protein, 7 aa, synthetic construct
RNAAVLH

SEQ ID NO: 144351 - protein, 7 aa, synthetic construct
RNADKQQ

SEQ ID NO: 144352 - protein, 7 aa, synthetic construct
RNADVKW

SEQ ID NO: 144353 - protein, 7 aa, synthetic construct
RNAEIKW

SEQ ID NO: 144354 - protein, 7 aa, synthetic construct
RNAEKSQ

SEQ ID NO: 144355 - protein, 7 aa, synthetic construct
RNAGADR

SEQ ID NO: 144356 - protein, 7 aa, synthetic construct
RNAGEKA

SEQ ID NO: 144357 - protein, 7 aa, synthetic construct
RNAGIAF

SEQ ID NO: 144358 - protein, 7 aa, synthetic construct
RNAGPVI

SEQ ID NO: 144359 - protein, 7 aa, synthetic construct
RNAHEKI

SEQ ID NO: 144360 - protein, 7 aa, synthetic construct
RNAHLGP

SEQ ID NO: 144361 - protein, 7 aa, synthetic construct
RNAKENY

SEQ ID NO: 144362 - protein, 7 aa, synthetic construct
RNAMHGT

SEQ ID NO: 144363 - protein, 7 aa, synthetic construct
RNANNMF

SEQ ID NO: 144364 - protein, 7 aa, synthetic construct
RNANQGM

SEQ ID NO: 144365 - protein, 7 aa, synthetic construct
RNANQQL

SEQ ID NO: 144366 - protein, 7 aa, synthetic construct
RNANSTM

SEQ ID NO: 144367 - protein, 7 aa, synthetic construct
RNAPLMN

SEQ ID NO: 144368 - protein, 7 aa, synthetic construct
RNAPMAV

SEQ ID NO: 144369 - protein, 7 aa, synthetic construct
RNAPQLV

SEQ ID NO: 144370 - protein, 7 aa, synthetic construct
RNAPQNV

SEQ ID NO: 144371 - protein, 7 aa, synthetic construct
RNAPQQS

SEQ ID NO: 144372 - protein, 7 aa, synthetic construct
RNAPTLM

SEQ ID NO: 144373 - protein, 7 aa, synthetic construct
RNAPVSM

SEQ ID NO: 144374 - protein, 7 aa, synthetic construct
RNAQANQ

SEQ ID NO: 144375 - protein, 7 aa, synthetic construct
RNAQDQK

SEQ ID NO: 144376 - protein, 7 aa, synthetic construct
RNAQIDR

SEQ ID NO: 144377 - protein, 7 aa, synthetic construct
RNAQPMH

SEQ ID NO: 144378 - protein, 7 aa, synthetic construct
RNAQPSD

SEQ ID NO: 144379 - protein, 7 aa, synthetic construct
RNAQYIS

SEQ ID NO: 144380 - protein, 7 aa, synthetic construct
RNAQYPQ

SEQ ID NO: 144381 - protein, 7 aa, synthetic construct
RNARESA

SEQ ID NO: 144382 - protein, 7 aa, synthetic construct
RNASNHY

SEQ ID NO: 144383 - protein, 7 aa, synthetic construct
RNATPHI

SEQ ID NO: 144384 - protein, 7 aa, synthetic construct
RNAVGHV

SEQ ID NO: 144385 - protein, 7 aa, synthetic construct
RNAVIQH

SEQ ID NO: 144386 - protein, 7 aa, synthetic construct
RNDGIRM

SEQ ID NO: 144387 - protein, 7 aa, synthetic construct
RNDGLDV

SEQ ID NO: 144388 - protein, 7 aa, synthetic construct
RNDIIQK

SEQ ID NO: 144389 - protein, 7 aa, synthetic construct
RNDKLGF

SEQ ID NO: 144390 - protein, 7 aa, synthetic construct
RNDKNVV

SEQ ID NO: 144391 - protein, 7 aa, synthetic construct
RNDKQDR

SEQ ID NO: 144392 - protein, 7 aa, synthetic construct
RNDKVHA

SEQ ID NO: 144393 - protein, 7 aa, synthetic construct
RNDKVSM

SEQ ID NO: 144394 - protein, 7 aa, synthetic construct
RNDNKSI

SEQ ID NO: 144395 - protein, 7 aa, synthetic construct
RNDPPRS

SEQ ID NO: 144396 - protein, 7 aa, synthetic construct
RNDRAGY

SEQ ID NO: 144397 - protein, 7 aa, synthetic construct
RNDRELK

SEQ ID NO: 144398 - protein, 7 aa, synthetic construct
RNDRTSY

SEQ ID NO: 144399 - protein, 7 aa, synthetic construct
RNDSGKL

SEQ ID NO: 144400 - protein, 7 aa, synthetic construct
RNDSKSM

SEQ ID NO: 144401 - protein, 7 aa, synthetic construct
RNDTARP

SEQ ID NO: 144402 - protein, 7 aa, synthetic construct
RNDTKIH

SEQ ID NO: 144403 - protein, 7 aa, synthetic construct
RNDTKQL

SEQ ID NO: 144404 - protein, 7 aa, synthetic construct
RNDTTPK

SEQ ID NO: 144405 - protein, 7 aa, synthetic construct
RNDVRVI

SEQ ID NO: 144406 - protein, 7 aa, synthetic construct
RNEAKFL

SEQ ID NO: 144407 - protein, 7 aa, synthetic construct
RNEARFS

SEQ ID NO: 144408 - protein, 7 aa, synthetic construct
RNEAYRN

SEQ ID NO: 144409 - protein, 7 aa, synthetic construct
RNEGMTK

SEQ ID NO: 144410 - protein, 7 aa, synthetic construct
RNEIKHI

SEQ ID NO: 144411 - protein, 7 aa, synthetic construct
RNEISRV

SEQ ID NO: 144412 - protein, 7 aa, synthetic construct
RNEKAGL

SEQ ID NO: 144413 - protein, 7 aa, synthetic construct
RNEKNTI

SEQ ID NO: 144414 - protein, 7 aa, synthetic construct
RNEKQNA

SEQ ID NO: 144415 - protein, 7 aa, synthetic construct
RNEKYIQ

SEQ ID NO: 144416 - protein, 7 aa, synthetic construct
RNEKYQT

SEQ ID NO: 144417 - protein, 7 aa, synthetic construct
RNELPPR

SEQ ID NO: 144418 - protein, 7 aa, synthetic construct
RNEMHKP

SEQ ID NO: 144419 - protein, 7 aa, synthetic construct
RNEPKVQ

SEQ ID NO: 144420 - protein, 7 aa, synthetic construct
RNERFVQ

SEQ ID NO: 144421 - protein, 7 aa, synthetic construct
RNERPIT

SEQ ID NO: 144422 - protein, 7 aa, synthetic construct
RNETKPQ

SEQ ID NO: 144423 - protein, 7 aa, synthetic construct
RNEVKAI

SEQ ID NO: 144424 - protein, 7 aa, synthetic construct
RNEVKII

SEQ ID NO: 144425 - protein, 7 aa, synthetic construct
RNEVRGY

SEQ ID NO: 144426 - protein, 7 aa, synthetic construct
RNEYAKI

SEQ ID NO: 144427 - protein, 7 aa, synthetic construct
RNFDMTK

SEQ ID NO: 144428 - protein, 7 aa, synthetic construct
RNFHIKE

SEQ ID NO: 144429 - protein, 7 aa, synthetic construct
RNFKIVE

SEQ ID NO: 144430 - protein, 7 aa, synthetic construct
RNFKVPE

SEQ ID NO: 144431 - protein, 7 aa, synthetic construct
RNFNHNA

SEQ ID NO: 144432 - protein, 7 aa, synthetic construct
RNFPTLQ

SEQ ID NO: 144433 - protein, 7 aa, synthetic construct
RNGDSTK

SEQ ID NO: 144434 - protein, 7 aa, synthetic construct
RNGEVRY

SEQ ID NO: 144435 - protein, 7 aa, synthetic construct
RNGGVMY

SEQ ID NO: 144436 - protein, 7 aa, synthetic construct
RNGHGGP

SEQ ID NO: 144437 - protein, 7 aa, synthetic construct
RNGHTAT

SEQ ID NO: 144438 - protein, 7 aa, synthetic construct
RNGISEK

SEQ ID NO: 144439 - protein, 7 aa, synthetic construct
RNGKQEL

SEQ ID NO: 144440 - protein, 7 aa, synthetic construct
RNGNDRT

SEQ ID NO: 144441 - protein, 7 aa, synthetic construct
RNGPALM

SEQ ID NO: 144442 - protein, 7 aa, synthetic construct
RNGPDGK

SEQ ID NO: 144443 - protein, 7 aa, synthetic construct
RNGPHQT

SEQ ID NO: 144444 - protein, 7 aa, synthetic construct
RNGPLAH

SEQ ID NO: 144445 - protein, 7 aa, synthetic construct
RNGPLHI

SEQ ID NO: 144446 - protein, 7 aa, synthetic construct
RNGSTGY

SEQ ID NO: 144447 - protein, 7 aa, synthetic construct
RNGVNSH

SEQ ID NO: 144448 - protein, 7 aa, synthetic construct
RNGVTDR

SEQ ID NO: 144449 - protein, 7 aa, synthetic construct
RNGYPGV

SEQ ID NO: 144450 - protein, 7 aa, synthetic construct
RNGYRLD

SEQ ID NO: 144451 - protein, 7 aa, synthetic construct
RNHAQVP

SEQ ID NO: 144452 - protein, 7 aa, synthetic construct
RNHATLT

SEQ ID NO: 144453 - protein, 7 aa, synthetic construct
RNHGVTM

SEQ ID NO: 144454 - protein, 7 aa, synthetic construct
RNHHMGS

SEQ ID NO: 144455 - protein, 7 aa, synthetic construct
RNHIPGS

SEQ ID NO: 144456 - protein, 7 aa, synthetic construct
RNHMMQA

SEQ ID NO: 144457 - protein, 7 aa, synthetic construct
RNHNSLH

SEQ ID NO: 144458 - protein, 7 aa, synthetic construct
RNHPPTT

SEQ ID NO: 144459 - protein, 7 aa, synthetic construct
RNHPSMT

SEQ ID NO: 144460 - protein, 7 aa, synthetic construct
RNHPTST

SEQ ID NO: 144461 - protein, 7 aa, synthetic construct
RNHQTTI

SEQ ID NO: 144462 - protein, 7 aa, synthetic construct
RNHSYAG

SEQ ID NO: 144463 - protein, 7 aa, synthetic construct
RNHTGAM

SEQ ID NO: 144464 - protein, 7 aa, synthetic construct
RNHTIPS

SEQ ID NO: 144465 - protein, 7 aa, synthetic construct
RNHTITV

SEQ ID NO: 144466 - protein, 7 aa, synthetic construct
RNHTLQT

SEQ ID NO: 144467 - protein, 7 aa, synthetic construct
RNHTMMS

SEQ ID NO: 144468 - protein, 7 aa, synthetic construct
RNHTTTL

SEQ ID NO: 144469 - protein, 7 aa, synthetic construct
RNHVDKM

SEQ ID NO: 144470 - protein, 7 aa, synthetic construct
RNHVPAT

SEQ ID NO: 144471 - protein, 7 aa, synthetic construct
RNIALVN

SEQ ID NO: 144472 - protein, 7 aa, synthetic construct
RNIANMN

SEQ ID NO: 144473 - protein, 7 aa, synthetic construct
RNIAQTL

SEQ ID NO: 144474 - protein, 7 aa, synthetic construct
RNIASAV

SEQ ID NO: 144475 - protein, 7 aa, synthetic construct
RNIATNL

SEQ ID NO: 144476 - protein, 7 aa, synthetic construct
RNIAVNN

SEQ ID NO: 144477 - protein, 7 aa, synthetic construct
RNIDKSV

SEQ ID NO: 144478 - protein, 7 aa, synthetic construct
RNIGSEK

SEQ ID NO: 144479 - protein, 7 aa, synthetic construct
RNIGSGL

SEQ ID NO: 144480 - protein, 7 aa, synthetic construct
RNIHTQI

SEQ ID NO: 144481 - protein, 7 aa, synthetic construct
RNIKEEK

SEQ ID NO: 144482 - protein, 7 aa, synthetic construct
RNINQMI

SEQ ID NO: 144483 - protein, 7 aa, synthetic construct
RNIPQER

SEQ ID NO: 144484 - protein, 7 aa, synthetic construct
RNIQLST

SEQ ID NO: 144485 - protein, 7 aa, synthetic construct
RNIQTGM

SEQ ID NO: 144486 - protein, 7 aa, synthetic construct
RNITTHL

SEQ ID NO: 144487 - protein, 7 aa, synthetic construct
RNKDATV

SEQ ID NO: 144488 - protein, 7 aa, synthetic construct
RNKDIMI

SEQ ID NO: 144489 - protein, 7 aa, synthetic construct
RNKDNGV

SEQ ID NO: 144490 - protein, 7 aa, synthetic construct
RNKETGV

SEQ ID NO: 144491 - protein, 7 aa, synthetic construct
RNKFPAE

SEQ ID NO: 144492 - protein, 7 aa, synthetic construct
RNKNPDI

SEQ ID NO: 144493 - protein, 7 aa, synthetic construct
RNKPDQL

SEQ ID NO: 144494 - protein, 7 aa, synthetic construct
RNKPQPD

SEQ ID NO: 144495 - protein, 7 aa, synthetic construct
RNKQMDV

SEQ ID NO: 144496 - protein, 7 aa, synthetic construct
RNKTEYT

SEQ ID NO: 144497 - protein, 7 aa, synthetic construct
RNKTPEI

SEQ ID NO: 144498 - protein, 7 aa, synthetic construct
RNLDKHV

SEQ ID NO: 144499 - protein, 7 aa, synthetic construct
RNLDPGK

SEQ ID NO: 144500 - protein, 7 aa, synthetic construct
RNLGLDK

SEQ ID NO: 144501 - protein, 7 aa, synthetic construct
RNLPNSM

SEQ ID NO: 144502 - protein, 7 aa, synthetic construct
RNLPPTS

SEQ ID NO: 144503 - protein, 7 aa, synthetic construct
RNLQDKY

SEQ ID NO: 144504 - protein, 7 aa, synthetic construct
RNLSPQQ

SEQ ID NO: 144505 - protein, 7 aa, synthetic construct
RNLSSGH

SEQ ID NO: 144506 - protein, 7 aa, synthetic construct
RNLSTSL

SEQ ID NO: 144507 - protein, 7 aa, synthetic construct
RNLTPSN

SEQ ID NO: 144508 - protein, 7 aa, synthetic construct
RNMAAQT

SEQ ID NO: 144509 - protein, 7 aa, synthetic construct
RNMGQTY

SEQ ID NO: 144510 - protein, 7 aa, synthetic construct
RNMKDLV

SEQ ID NO: 144511 - protein, 7 aa, synthetic construct
RNMKPID

SEQ ID NO: 144512 - protein, 7 aa, synthetic construct
RNMNHTM

SEQ ID NO: 144513 - protein, 7 aa, synthetic construct
RNMNNLS

SEQ ID NO: 144514 - protein, 7 aa, synthetic construct
RNMNTLA

SEQ ID NO: 144515 - protein, 7 aa, synthetic construct
RNMPATT

SEQ ID NO: 144516 - protein, 7 aa, synthetic construct
RNMPGGI

SEQ ID NO: 144517 - protein, 7 aa, synthetic construct
RNMPGMS

SEQ ID NO: 144518 - protein, 7 aa, synthetic construct
RNMPQTS

SEQ ID NO: 144519 - protein, 7 aa, synthetic construct
RNMPVSH

SEQ ID NO: 144520 - protein, 7 aa, synthetic construct
RNMQSSM

SEQ ID NO: 144521 - protein, 7 aa, synthetic construct
RNMVADR

SEQ ID NO: 144522 - protein, 7 aa, synthetic construct
RNMVTTH

SEQ ID NO: 144523 - protein, 7 aa, synthetic construct
RNNAAAQ

SEQ ID NO: 144524 - protein, 7 aa, synthetic construct
RNNAQQQ

SEQ ID NO: 144525 - protein, 7 aa, synthetic construct
RNNATLH

SEQ ID NO: 144526 - protein, 7 aa, synthetic construct
RNNAVHQ

SEQ ID NO: 144527 - protein, 7 aa, synthetic construct
RNNDKQL

SEQ ID NO: 144528 - protein, 7 aa, synthetic construct
RNNDKWT

SEQ ID NO: 144529 - protein, 7 aa, synthetic construct
RNNEQKL

SEQ ID NO: 144530 - protein, 7 aa, synthetic construct
RNNGAHF

SEQ ID NO: 144531 - protein, 7 aa, synthetic construct
RNNGDRP

SEQ ID NO: 144532 - protein, 7 aa, synthetic construct
RNNGRPE

SEQ ID NO: 144533 - protein, 7 aa, synthetic construct
RNNGSGW

SEQ ID NO: 144534 - protein, 7 aa, synthetic construct
RNNHNLT

SEQ ID NO: 144535 - protein, 7 aa, synthetic construct
RNNITLH

SEQ ID NO: 144536 - protein, 7 aa, synthetic construct
RNNNGIQ

SEQ ID NO: 144537 - protein, 7 aa, synthetic construct
RNNNSLN

SEQ ID NO: 144538 - protein, 7 aa, synthetic construct
RNNPAER

SEQ ID NO: 144539 - protein, 7 aa, synthetic construct
RNNPGNF

SEQ ID NO: 144540 - protein, 7 aa, synthetic construct
RNNPNPA

SEQ ID NO: 144541 - protein, 7 aa, synthetic construct
RNNPQAI

SEQ ID NO: 144542 - protein, 7 aa, synthetic construct
RNNQNLN

SEQ ID NO: 144543 - protein, 7 aa, synthetic construct
RNNQNVY

SEQ ID NO: 144544 - protein, 7 aa, synthetic construct
RNNQQNT

SEQ ID NO: 144545 - protein, 7 aa, synthetic construct
RNNQTQQ

SEQ ID NO: 144546 - protein, 7 aa, synthetic construct
RNNSHGM

SEQ ID NO: 144547 - protein, 7 aa, synthetic construct
RNNSTNF

SEQ ID NO: 144548 - protein, 7 aa, synthetic construct
RNNTPQV

SEQ ID NO: 144549 - protein, 7 aa, synthetic construct
RNNVGAM

SEQ ID NO: 144550 - protein, 7 aa, synthetic construct
RNNVTDK

SEQ ID NO: 144551 - protein, 7 aa, synthetic construct
RNPAERN

SEQ ID NO: 144552 - protein, 7 aa, synthetic construct
RNPAHAL

SEQ ID NO: 144553 - protein, 7 aa, synthetic construct
RNPAINY

SEQ ID NO: 144554 - protein, 7 aa, synthetic construct
RNPDLSK

SEQ ID NO: 144555 - protein, 7 aa, synthetic construct
RNPDTIR

SEQ ID NO: 144556 - protein, 7 aa, synthetic construct
RNPHISQ

SEQ ID NO: 144557 - protein, 7 aa, synthetic construct
RNPHPSN

SEQ ID NO: 144558 - protein, 7 aa, synthetic construct
RNPHTTS

SEQ ID NO: 144559 - protein, 7 aa, synthetic construct
RNPIPNL

SEQ ID NO: 144560 - protein, 7 aa, synthetic construct
RNPIQNL

SEQ ID NO: 144561 - protein, 7 aa, synthetic construct
RNPMTIT

SEQ ID NO: 144562 - protein, 7 aa, synthetic construct
RNPNNTL

SEQ ID NO: 144563 - protein, 7 aa, synthetic construct
RNPPERS

SEQ ID NO: 144564 - protein, 7 aa, synthetic construct
RNPPRDM

SEQ ID NO: 144565 - protein, 7 aa, synthetic construct
RNPPSQM

SEQ ID NO: 144566 - protein, 7 aa, synthetic construct
RNPTDIR

SEQ ID NO: 144567 - protein, 7 aa, synthetic construct
RNPVMGL

SEQ ID NO: 144568 - protein, 7 aa, synthetic construct
RNQAAPN

SEQ ID NO: 144569 - protein, 7 aa, synthetic construct
RNQAMAV

SEQ ID NO: 144570 - protein, 7 aa, synthetic construct
RNQAPAI

SEQ ID NO: 144571 - protein, 7 aa, synthetic construct
RNQASSL

SEQ ID NO: 144572 - protein, 7 aa, synthetic construct
RNQDITR

SEQ ID NO: 144573 - protein, 7 aa, synthetic construct
RNQGIGL

SEQ ID NO: 144574 - protein, 7 aa, synthetic construct
RNQGMVQ

SEQ ID NO: 144575 - protein, 7 aa, synthetic construct
RNQGQMM

SEQ ID NO: 144576 - protein, 7 aa, synthetic construct
RNQGSMI

SEQ ID NO: 144577 - protein, 7 aa, synthetic construct
RNQGTNL

SEQ ID NO: 144578 - protein, 7 aa, synthetic construct
RNQGTTL

SEQ ID NO: 144579 - protein, 7 aa, synthetic construct
RNQHINI

SEQ ID NO: 144580 - protein, 7 aa, synthetic construct
RNQIQGN

SEQ ID NO: 144581 - protein, 7 aa, synthetic construct
RNQKEGV

SEQ ID NO: 144582 - protein, 7 aa, synthetic construct
RNQKEMT

SEQ ID NO: 144583 - protein, 7 aa, synthetic construct
RNQLPMP

SEQ ID NO: 144584 - protein, 7 aa, synthetic construct
RNQLSQV

SEQ ID NO: 144585 - protein, 7 aa, synthetic construct
RNQLTAN

SEQ ID NO: 144586 - protein, 7 aa, synthetic construct
RNQMHPI

SEQ ID NO: 144587 - protein, 7 aa, synthetic construct
RNQMPHM

SEQ ID NO: 144588 - protein, 7 aa, synthetic construct
RNQMPIT

SEQ ID NO: 144589 - protein, 7 aa, synthetic construct
RNQMSTH

SEQ ID NO: 144590 - protein, 7 aa, synthetic construct
RNQMTNY

SEQ ID NO: 144591 - protein, 7 aa, synthetic construct
RNQNLSI

SEQ ID NO: 144592 - protein, 7 aa, synthetic construct
RNQNQAI

SEQ ID NO: 144593 - protein, 7 aa, synthetic construct
RNQNQSY

SEQ ID NO: 144594 - protein, 7 aa, synthetic construct
RNQPDWA

SEQ ID NO: 144595 - protein, 7 aa, synthetic construct
RNQPGMM

SEQ ID NO: 144596 - protein, 7 aa, synthetic construct
RNQPQGM

SEQ ID NO: 144597 - protein, 7 aa, synthetic construct
RNQPTQV

SEQ ID NO: 144598 - protein, 7 aa, synthetic construct
RNQPVSS

SEQ ID NO: 144599 - protein, 7 aa, synthetic construct
RNQQISL

SEQ ID NO: 144600 - protein, 7 aa, synthetic construct
RNQQLAM

SEQ ID NO: 144601 - protein, 7 aa, synthetic construct
RNQQNFV

SEQ ID NO: 144602 - protein, 7 aa, synthetic construct
RNQRTDI

SEQ ID NO: 144603 - protein, 7 aa, synthetic construct
RNQSNIV

SEQ ID NO: 144604 - protein, 7 aa, synthetic construct
RNQTPGD

SEQ ID NO: 144605 - protein, 7 aa, synthetic construct
RNQTPII

SEQ ID NO: 144606 - protein, 7 aa, synthetic construct
RNQTWSD

SEQ ID NO: 144607 - protein, 7 aa, synthetic construct
RNQVANV

SEQ ID NO: 144608 - protein, 7 aa, synthetic construct
RNQVGMQ

SEQ ID NO: 144609 - protein, 7 aa, synthetic construct
RNQVHHT

SEQ ID NO: 144610 - protein, 7 aa, synthetic construct
RNQVTQH

SEQ ID NO: 144611 - protein, 7 aa, synthetic construct
RNSDKAW

SEQ ID NO: 144612 - protein, 7 aa, synthetic construct
RNSDKVY

SEQ ID NO: 144613 - protein, 7 aa, synthetic construct
RNSFQGV

SEQ ID NO: 144614 - protein, 7 aa, synthetic construct
RNSGPTT

SEQ ID NO: 144615 - protein, 7 aa, synthetic construct
RNSHVVV

SEQ ID NO: 144616 - protein, 7 aa, synthetic construct
RNSIPPV

SEQ ID NO: 144617 - protein, 7 aa, synthetic construct
RNSMNMI

SEQ ID NO: 144618 - protein, 7 aa, synthetic construct
RNSNPTI

SEQ ID NO: 144619 - protein, 7 aa, synthetic construct
RNSPIMH

SEQ ID NO: 144620 - protein, 7 aa, synthetic construct
RNSPMWE

SEQ ID NO: 144621 - protein, 7 aa, synthetic construct
RNSQGPT

SEQ ID NO: 144622 - protein, 7 aa, synthetic construct
RNSQHMP

SEQ ID NO: 144623 - protein, 7 aa, synthetic construct
RNSQTSL

SEQ ID NO: 144624 - protein, 7 aa, synthetic construct
RNSQVGY

SEQ ID NO: 144625 - protein, 7 aa, synthetic construct
RNSSIAF

SEQ ID NO: 144626 - protein, 7 aa, synthetic construct
RNSSNFS

SEQ ID NO: 144627 - protein, 7 aa, synthetic construct
RNTAIMT

SEQ ID NO: 144628 - protein, 7 aa, synthetic construct
RNTAQHQ

SEQ ID NO: 144629 - protein, 7 aa, synthetic construct
RNTATSL

SEQ ID NO: 144630 - protein, 7 aa, synthetic construct
RNTGDGR

SEQ ID NO: 144631 - protein, 7 aa, synthetic construct
RNTGHMT

SEQ ID NO: 144632 - protein, 7 aa, synthetic construct
RNTGSFN

SEQ ID NO: 144633 - protein, 7 aa, synthetic construct
RNTHIGP

SEQ ID NO: 144634 - protein, 7 aa, synthetic construct
RNTISTL

SEQ ID NO: 144635 - protein, 7 aa, synthetic construct
RNTLALQ

SEQ ID NO: 144636 - protein, 7 aa, synthetic construct
RNTMNDK

SEQ ID NO: 144637 - protein, 7 aa, synthetic construct
RNTNPSV

SEQ ID NO: 144638 - protein, 7 aa, synthetic construct
RNTPLNH

SEQ ID NO: 144639 - protein, 7 aa, synthetic construct
RNTPQAV

SEQ ID NO: 144640 - protein, 7 aa, synthetic construct
RNTPQNM

SEQ ID NO: 144641 - protein, 7 aa, synthetic construct
RNTPTAV

SEQ ID NO: 144642 - protein, 7 aa, synthetic construct
RNTQMYQ

SEQ ID NO: 144643 - protein, 7 aa, synthetic construct
RNTSIMQ

SEQ ID NO: 144644 - protein, 7 aa, synthetic construct
RNTSIMT

SEQ ID NO: 144645 - protein, 7 aa, synthetic construct
RNTSNMQ

SEQ ID NO: 144646 - protein, 7 aa, synthetic construct
RNTTNMM

SEQ ID NO: 144647 - protein, 7 aa, synthetic construct
RNTTVMT

SEQ ID NO: 144648 - protein, 7 aa, synthetic construct
RNTVMER

SEQ ID NO: 144649 - protein, 7 aa, synthetic construct
RNTVMPY

SEQ ID NO: 144650 - protein, 7 aa, synthetic construct
RNTVSNH

SEQ ID NO: 144651 - protein, 7 aa, synthetic construct
RNTYGQT

SEQ ID NO: 144652 - protein, 7 aa, synthetic construct
RNVAAGQ

SEQ ID NO: 144653 - protein, 7 aa, synthetic construct
RNVAYGA

SEQ ID NO: 144654 - protein, 7 aa, synthetic construct
RNVGMNI

SEQ ID NO: 144655 - protein, 7 aa, synthetic construct
RNVGMSH

SEQ ID NO: 144656 - protein, 7 aa, synthetic construct
RNVGQNW

SEQ ID NO: 144657 - protein, 7 aa, synthetic construct
RNVHGMV

SEQ ID NO: 144658 - protein, 7 aa, synthetic construct
RNVHTQP

SEQ ID NO: 144659 - protein, 7 aa, synthetic construct
RNVHVVQ

SEQ ID NO: 144660 - protein, 7 aa, synthetic construct
RNVIPQI

SEQ ID NO: 144661 - protein, 7 aa, synthetic construct
RNVMHGT

SEQ ID NO: 144662 - protein, 7 aa, synthetic construct
RNVMVQV

SEQ ID NO: 144663 - protein, 7 aa, synthetic construct
RNVNAQL

SEQ ID NO: 144664 - protein, 7 aa, synthetic construct
RNVNAQV

SEQ ID NO: 144665 - protein, 7 aa, synthetic construct
RNVNATT

SEQ ID NO: 144666 - protein, 7 aa, synthetic construct
RNVNTQT

SEQ ID NO: 144667 - protein, 7 aa, synthetic construct
RNVPMPM

SEQ ID NO: 144668 - protein, 7 aa, synthetic construct
RNVPMTS

SEQ ID NO: 144669 - protein, 7 aa, synthetic construct
RNVQATI

SEQ ID NO: 144670 - protein, 7 aa, synthetic construct
RNVQNMV

SEQ ID NO: 144671 - protein, 7 aa, synthetic construct
RNVQPVV

SEQ ID NO: 144672 - protein, 7 aa, synthetic construct
RNVQTTL

SEQ ID NO: 144673 - protein, 7 aa, synthetic construct
RNVQVNT

SEQ ID NO: 144674 - protein, 7 aa, synthetic construct
RNVSTQN

SEQ ID NO: 144675 - protein, 7 aa, synthetic construct
RNVTMMA

SEQ ID NO: 144676 - protein, 7 aa, synthetic construct
RNVTQIH

SEQ ID NO: 144677 - protein, 7 aa, synthetic construct
RNVTQIQ

SEQ ID NO: 144678 - protein, 7 aa, synthetic construct
RNVTQNI

SEQ ID NO: 144679 - protein, 7 aa, synthetic construct
RNVVGPM

SEQ ID NO: 144680 - protein, 7 aa, synthetic construct
RNYKTDG

SEQ ID NO: 144681 - protein, 7 aa, synthetic construct
RNYNSGP

SEQ ID NO: 144682 - protein, 7 aa, synthetic construct
RNYSSGP

SEQ ID NO: 144683 - protein, 7 aa, synthetic construct
RPAAHQM

SEQ ID NO: 144684 - protein, 7 aa, synthetic construct
RPAEMTR

SEQ ID NO: 144685 - protein, 7 aa, synthetic construct
RPAENLR

SEQ ID NO: 144686 - protein, 7 aa, synthetic construct
RPAGMHS

SEQ ID NO: 144687 - protein, 7 aa, synthetic construct
RPAHHQG

SEQ ID NO: 144688 - protein, 7 aa, synthetic construct
RPAHNVQ

SEQ ID NO: 144689 - protein, 7 aa, synthetic construct
RPAIMAN

SEQ ID NO: 144690 - protein, 7 aa, synthetic construct
RPAKAVD

SEQ ID NO: 144691 - protein, 7 aa, synthetic construct
RPAKEYF

SEQ ID NO: 144692 - protein, 7 aa, synthetic construct
RPAMNHT

SEQ ID NO: 144693 - protein, 7 aa, synthetic construct
RPANLPI

SEQ ID NO: 144694 - protein, 7 aa, synthetic construct
RPAQMYA

SEQ ID NO: 144695 - protein, 7 aa, synthetic construct
RPASDNK

SEQ ID NO: 144696 - protein, 7 aa, synthetic construct
RPATGQY

SEQ ID NO: 144697 - protein, 7 aa, synthetic construct
RPAVHST

SEQ ID NO: 144698 - protein, 7 aa, synthetic construct
RPAVRDV

SEQ ID NO: 144699 - protein, 7 aa, synthetic construct
RPAVSNH

SEQ ID NO: 144700 - protein, 7 aa, synthetic construct
RPAYKEV

SEQ ID NO: 144701 - protein, 7 aa, synthetic construct
RPDANRQ

SEQ ID NO: 144702 - protein, 7 aa, synthetic construct
RPDGKQW

SEQ ID NO: 144703 - protein, 7 aa, synthetic construct
RPDGNRA

SEQ ID NO: 144704 - protein, 7 aa, synthetic construct
RPDHGRM

SEQ ID NO: 144705 - protein, 7 aa, synthetic construct
RPDHPKY

SEQ ID NO: 144706 - protein, 7 aa, synthetic construct
RPDRESK

SEQ ID NO: 144707 - protein, 7 aa, synthetic construct
RPDRSIQ

SEQ ID NO: 144708 - protein, 7 aa, synthetic construct
RPDRSTI

SEQ ID NO: 144709 - protein, 7 aa, synthetic construct
RPDSVRF

SEQ ID NO: 144710 - protein, 7 aa, synthetic construct
RPEAKYT

SEQ ID NO: 144711 - protein, 7 aa, synthetic construct
RPEHGKY

SEQ ID NO: 144712 - protein, 7 aa, synthetic construct
RPEKAPF

SEQ ID NO: 144713 - protein, 7 aa, synthetic construct
RPELVRG

SEQ ID NO: 144714 - protein, 7 aa, synthetic construct
RPERHIA

SEQ ID NO: 144715 - protein, 7 aa, synthetic construct
RPERHQP

SEQ ID NO: 144716 - protein, 7 aa, synthetic construct
RPETTSR

SEQ ID NO: 144717 - protein, 7 aa, synthetic construct
RPEVHRV

SEQ ID NO: 144718 - protein, 7 aa, synthetic construct
RPEYTKS

SEQ ID NO: 144719 - protein, 7 aa, synthetic construct
RPGGAYI

SEQ ID NO: 144720 - protein, 7 aa, synthetic construct
RPGHGTS

SEQ ID NO: 144721 - protein, 7 aa, synthetic construct
RPGIINP

SEQ ID NO: 144722 - protein, 7 aa, synthetic construct
RPGIRMD

SEQ ID NO: 144723 - protein, 7 aa, synthetic construct
RPGITPI

SEQ ID NO: 144724 - protein, 7 aa, synthetic construct
RPGKDIY

SEQ ID NO: 144725 - protein, 7 aa, synthetic construct
RPGLIGP

SEQ ID NO: 144726 - protein, 7 aa, synthetic construct
RPGPLHS

SEQ ID NO: 144727 - protein, 7 aa, synthetic construct
RPGPNVY

SEQ ID NO: 144728 - protein, 7 aa, synthetic construct
RPGPRTD

SEQ ID NO: 144729 - protein, 7 aa, synthetic construct
RPGPTYT

SEQ ID NO: 144730 - protein, 7 aa, synthetic construct
RPGRDTM

SEQ ID NO: 144731 - protein, 7 aa, synthetic construct
RPGRDVQ

SEQ ID NO: 144732 - protein, 7 aa, synthetic construct
RPGSSPY

SEQ ID NO: 144733 - protein, 7 aa, synthetic construct
RPGVSNF

SEQ ID NO: 144734 - protein, 7 aa, synthetic construct
RPHAGHA

SEQ ID NO: 144735 - protein, 7 aa, synthetic construct
RPHAPKD

SEQ ID NO: 144736 - protein, 7 aa, synthetic construct
RPHAPPA

SEQ ID NO: 144737 - protein, 7 aa, synthetic construct
RPHASPA

SEQ ID NO: 144738 - protein, 7 aa, synthetic construct
RPHDATR

SEQ ID NO: 144739 - protein, 7 aa, synthetic construct
RPHDRAS

SEQ ID NO: 144740 - protein, 7 aa, synthetic construct
RPHGGSS

SEQ ID NO: 144741 - protein, 7 aa, synthetic construct
RPHKLME

SEQ ID NO: 144742 - protein, 7 aa, synthetic construct
RPHNNAM

SEQ ID NO: 144743 - protein, 7 aa, synthetic construct
RPHNVTV

SEQ ID NO: 144744 - protein, 7 aa, synthetic construct
RPHQANM

SEQ ID NO: 144745 - protein, 7 aa, synthetic construct
RPHQPAI

SEQ ID NO: 144746 - protein, 7 aa, synthetic construct
RPHQSGQ

SEQ ID NO: 144747 - protein, 7 aa, synthetic construct
RPHREGI

SEQ ID NO: 144748 - protein, 7 aa, synthetic construct
RPHSANN

SEQ ID NO: 144749 - protein, 7 aa, synthetic construct
RPHSGPQ

SEQ ID NO: 144750 - protein, 7 aa, synthetic construct
RPHSTTL

SEQ ID NO: 144751 - protein, 7 aa, synthetic construct
RPHTGNQ

SEQ ID NO: 144752 - protein, 7 aa, synthetic construct
RPHTINN

SEQ ID NO: 144753 - protein, 7 aa, synthetic construct
RPHTNIV

SEQ ID NO: 144754 - protein, 7 aa, synthetic construct
RPHTVTT

SEQ ID NO: 144755 - protein, 7 aa, synthetic construct
RPHVVKD

SEQ ID NO: 144756 - protein, 7 aa, synthetic construct
RPIAAER

SEQ ID NO: 144757 - protein, 7 aa, synthetic construct
RPIKVQD

SEQ ID NO: 144758 - protein, 7 aa, synthetic construct
RPIPNMM

SEQ ID NO: 144759 - protein, 7 aa, synthetic construct
RPIPTQQ

SEQ ID NO: 144760 - protein, 7 aa, synthetic construct
RPIPVRD

SEQ ID NO: 144761 - protein, 7 aa, synthetic construct
RPIRIQE

SEQ ID NO: 144762 - protein, 7 aa, synthetic construct
RPISGMA

SEQ ID NO: 144763 - protein, 7 aa, synthetic construct
RPISHNS

SEQ ID NO: 144764 - protein, 7 aa, synthetic construct
RPKDPFM

SEQ ID NO: 144765 - protein, 7 aa, synthetic construct
RPKEPYN

SEQ ID NO: 144766 - protein, 7 aa, synthetic construct
RPKFIGD

SEQ ID NO: 144767 - protein, 7 aa, synthetic construct
RPKFPDQ

SEQ ID NO: 144768 - protein, 7 aa, synthetic construct
RPKLQDY

SEQ ID NO: 144769 - protein, 7 aa, synthetic construct
RPKPPTD

SEQ ID NO: 144770 - protein, 7 aa, synthetic construct
RPKSIAD

SEQ ID NO: 144771 - protein, 7 aa, synthetic construct
RPKSVEF

SEQ ID NO: 144772 - protein, 7 aa, synthetic construct
RPKTPDL

SEQ ID NO: 144773 - protein, 7 aa, synthetic construct
RPLAHAP

SEQ ID NO: 144774 - protein, 7 aa, synthetic construct
RPLARLE

SEQ ID NO: 144775 - protein, 7 aa, synthetic construct
RPLARTE

SEQ ID NO: 144776 - protein, 7 aa, synthetic construct
RPLHKAD

SEQ ID NO: 144777 - protein, 7 aa, synthetic construct
RPLPTMS

SEQ ID NO: 144778 - protein, 7 aa, synthetic construct
RPLQKYE

SEQ ID NO: 144779 - protein, 7 aa, synthetic construct
RPLRMPE

SEQ ID NO: 144780 - protein, 7 aa, synthetic construct
RPLRSEA

SEQ ID NO: 144781 - protein, 7 aa, synthetic construct
RPMAERM

SEQ ID NO: 144782 - protein, 7 aa, synthetic construct
RPMAHLA

SEQ ID NO: 144783 - protein, 7 aa, synthetic construct
RPMAQHV

SEQ ID NO: 144784 - protein, 7 aa, synthetic construct
RPMHGTN

SEQ ID NO: 144785 - protein, 7 aa, synthetic construct
RPMHTGV

SEQ ID NO: 144786 - protein, 7 aa, synthetic construct
RPMKADM

SEQ ID NO: 144787 - protein, 7 aa, synthetic construct
RPMREER

SEQ ID NO: 144788 - protein, 7 aa, synthetic construct
RPMRTEL

SEQ ID NO: 144789 - protein, 7 aa, synthetic construct
RPMTLSP

SEQ ID NO: 144790 - protein, 7 aa, synthetic construct
RPNAHQF

SEQ ID NO: 144791 - protein, 7 aa, synthetic construct
RPNAPYT

SEQ ID NO: 144792 - protein, 7 aa, synthetic construct
RPNAQFS

SEQ ID NO: 144793 - protein, 7 aa, synthetic construct
RPNGDYK

SEQ ID NO: 144794 - protein, 7 aa, synthetic construct
RPNGVPY

SEQ ID NO: 144795 - protein, 7 aa, synthetic construct
RPNHVTM

SEQ ID NO: 144796 - protein, 7 aa, synthetic construct
RPNINMH

SEQ ID NO: 144797 - protein, 7 aa, synthetic construct
RPNQFPS

SEQ ID NO: 144798 - protein, 7 aa, synthetic construct
RPNQISL

SEQ ID NO: 144799 - protein, 7 aa, synthetic construct
RPNQRSD

SEQ ID NO: 144800 - protein, 7 aa, synthetic construct
RPNRDTS

SEQ ID NO: 144801 - protein, 7 aa, synthetic construct
RPNSHPL

SEQ ID NO: 144802 - protein, 7 aa, synthetic construct
RPNSPFS

SEQ ID NO: 144803 - protein, 7 aa, synthetic construct
RPPADTR

SEQ ID NO: 144804 - protein, 7 aa, synthetic construct
RPPGFGP

SEQ ID NO: 144805 - protein, 7 aa, synthetic construct
RPPHTVH

SEQ ID NO: 144806 - protein, 7 aa, synthetic construct
RPPNAHM

SEQ ID NO: 144807 - protein, 7 aa, synthetic construct
RPPNFVN

SEQ ID NO: 144808 - protein, 7 aa, synthetic construct
RPPNHPM

SEQ ID NO: 144809 - protein, 7 aa, synthetic construct
RPPQAHM

SEQ ID NO: 144810 - protein, 7 aa, synthetic construct
RPPQYQV

SEQ ID NO: 144811 - protein, 7 aa, synthetic construct
RPPTGHM

SEQ ID NO: 144812 - protein, 7 aa, synthetic construct
RPPTRDY

SEQ ID NO: 144813 - protein, 7 aa, synthetic construct
RPPYKET

SEQ ID NO: 144814 - protein, 7 aa, synthetic construct
RPQALRD

SEQ ID NO: 144815 - protein, 7 aa, synthetic construct
RPQHPPS

SEQ ID NO: 144816 - protein, 7 aa, synthetic construct
RPQIRSD

SEQ ID NO: 144817 - protein, 7 aa, synthetic construct
RPQKEAY

SEQ ID NO: 144818 - protein, 7 aa, synthetic construct
RPQKNVD

SEQ ID NO: 144819 - protein, 7 aa, synthetic construct
RPQKTAD

SEQ ID NO: 144820 - protein, 7 aa, synthetic construct
RPQPHPI

SEQ ID NO: 144821 - protein, 7 aa, synthetic construct
RPQPSFV

SEQ ID NO: 144822 - protein, 7 aa, synthetic construct
RPQRQES

SEQ ID NO: 144823 - protein, 7 aa, synthetic construct
RPQSDRI

SEQ ID NO: 144824 - protein, 7 aa, synthetic construct
RPQTNFT

SEQ ID NO: 144825 - protein, 7 aa, synthetic construct
RPQTPMI

SEQ ID NO: 144826 - protein, 7 aa, synthetic construct
RPQTQNY

SEQ ID NO: 144827 - protein, 7 aa, synthetic construct
RPQVAHQ

SEQ ID NO: 144828 - protein, 7 aa, synthetic construct
RPRDIQV

SEQ ID NO: 144829 - protein, 7 aa, synthetic construct
RPRLEMS

SEQ ID NO: 144830 - protein, 7 aa, synthetic construct
RPRQDPP

SEQ ID NO: 144831 - protein, 7 aa, synthetic construct
RPRQELQ

SEQ ID NO: 144832 - protein, 7 aa, synthetic construct
RPRSTDP

SEQ ID NO: 144833 - protein, 7 aa, synthetic construct
RPRYEFE

SEQ ID NO: 144834 - protein, 7 aa, synthetic construct
RPSFTDK

SEQ ID NO: 144835 - protein, 7 aa, synthetic construct
RPSHMIN

SEQ ID NO: 144836 - protein, 7 aa, synthetic construct
RPSHNVA

SEQ ID NO: 144837 - protein, 7 aa, synthetic construct
RPSHVSM

SEQ ID NO: 144838 - protein, 7 aa, synthetic construct
RPSPENR

SEQ ID NO: 144839 - protein, 7 aa, synthetic construct
RPSSQGF

SEQ ID NO: 144840 - protein, 7 aa, synthetic construct
RPSTPHP

SEQ ID NO: 144841 - protein, 7 aa, synthetic construct
RPSVQDK

SEQ ID NO: 144842 - protein, 7 aa, synthetic construct
RPSVSGY

SEQ ID NO: 144843 - protein, 7 aa, synthetic construct
RPTAAGY

SEQ ID NO: 144844 - protein, 7 aa, synthetic construct
RPTEIRG

SEQ ID NO: 144845 - protein, 7 aa, synthetic construct
RPTHQGI

SEQ ID NO: 144846 - protein, 7 aa, synthetic construct
RPTHQNN

SEQ ID NO: 144847 - protein, 7 aa, synthetic construct
RPTHSAM

SEQ ID NO: 144848 - protein, 7 aa, synthetic construct
RPTNIHP

SEQ ID NO: 144849 - protein, 7 aa, synthetic construct
RPTPAMP

SEQ ID NO: 144850 - protein, 7 aa, synthetic construct
RPTPTNP

SEQ ID NO: 144851 - protein, 7 aa, synthetic construct
RPTRDGN

SEQ ID NO: 144852 - protein, 7 aa, synthetic construct
RPTRQEF

SEQ ID NO: 144853 - protein, 7 aa, synthetic construct
RPTSEIK

SEQ ID NO: 144854 - protein, 7 aa, synthetic construct
RPTVESR

SEQ ID NO: 144855 - protein, 7 aa, synthetic construct
RPTVRDS

SEQ ID NO: 144856 - protein, 7 aa, synthetic construct
RPTVRME

SEQ ID NO: 144857 - protein, 7 aa, synthetic construct
RPTVVHG

SEQ ID NO: 144858 - protein, 7 aa, synthetic construct
RPVAHRD

SEQ ID NO: 144859 - protein, 7 aa, synthetic construct
RPVARME

SEQ ID NO: 144860 - protein, 7 aa, synthetic construct
RPVASWE

SEQ ID NO: 144861 - protein, 7 aa, synthetic construct
RPVEVKT

SEQ ID NO: 144862 - protein, 7 aa, synthetic construct
RPVGEMR

SEQ ID NO: 144863 - protein, 7 aa, synthetic construct
RPVGGMQ

SEQ ID NO: 144864 - protein, 7 aa, synthetic construct
RPVHQNA

SEQ ID NO: 144865 - protein, 7 aa, synthetic construct
RPVIRGD

SEQ ID NO: 144866 - protein, 7 aa, synthetic construct
RPVKMPD

SEQ ID NO: 144867 - protein, 7 aa, synthetic construct
RPVMGAA

SEQ ID NO: 144868 - protein, 7 aa, synthetic construct
RPVNIGM

SEQ ID NO: 144869 - protein, 7 aa, synthetic construct
RPVNPQI

SEQ ID NO: 144870 - protein, 7 aa, synthetic construct
RPVRDTA

SEQ ID NO: 144871 - protein, 7 aa, synthetic construct
RPVSTIQ

SEQ ID NO: 144872 - protein, 7 aa, synthetic construct
RPVTNMM

SEQ ID NO: 144873 - protein, 7 aa, synthetic construct
RPWNEME

SEQ ID NO: 144874 - protein, 7 aa, synthetic construct
RPYAPAD

SEQ ID NO: 144875 - protein, 7 aa, synthetic construct
RPYDQTK

SEQ ID NO: 144876 - protein, 7 aa, synthetic construct
RPYKTEA

SEQ ID NO: 144877 - protein, 7 aa, synthetic construct
RQAAERT

SEQ ID NO: 144878 - protein, 7 aa, synthetic construct
RQAAIIQ

SEQ ID NO: 144879 - protein, 7 aa, synthetic construct
RQAANHP

SEQ ID NO: 144880 - protein, 7 aa, synthetic construct
RQAAQSY

SEQ ID NO: 144881 - protein, 7 aa, synthetic construct
RQAAVHA

SEQ ID NO: 144882 - protein, 7 aa, synthetic construct
RQADRTP

SEQ ID NO: 144883 - protein, 7 aa, synthetic construct
RQADTTR

SEQ ID NO: 144884 - protein, 7 aa, synthetic construct
RQAEKPL

SEQ ID NO: 144885 - protein, 7 aa, synthetic construct
RQAGKEL

SEQ ID NO: 144886 - protein, 7 aa, synthetic construct
RQAGLGM

SEQ ID NO: 144887 - protein, 7 aa, synthetic construct
RQAGNSM

SEQ ID NO: 144888 - protein, 7 aa, synthetic construct
RQAGVLH

SEQ ID NO: 144889 - protein, 7 aa, synthetic construct
RQAHPPN

SEQ ID NO: 144890 - protein, 7 aa, synthetic construct
RQAHYNP

SEQ ID NO: 144891 - protein, 7 aa, synthetic construct
RQAIANQ

SEQ ID NO: 144892 - protein, 7 aa, synthetic construct
RQAKDNL

SEQ ID NO: 144893 - protein, 7 aa, synthetic construct
RQAKDSM

SEQ ID NO: 144894 - protein, 7 aa, synthetic construct
RQAKMDV

SEQ ID NO: 144895 - protein, 7 aa, synthetic construct
RQAKSLD

SEQ ID NO: 144896 - protein, 7 aa, synthetic construct
RQALHDK

SEQ ID NO: 144897 - protein, 7 aa, synthetic construct
RQAMQMA

SEQ ID NO: 144898 - protein, 7 aa, synthetic construct
RQAMSAL

SEQ ID NO: 144899 - protein, 7 aa, synthetic construct
RQANQTL

SEQ ID NO: 144900 - protein, 7 aa, synthetic construct
RQANSGL

SEQ ID NO: 144901 - protein, 7 aa, synthetic construct
RQANYGA

SEQ ID NO: 144902 - protein, 7 aa, synthetic construct
RQAPPVS

SEQ ID NO: 144903 - protein, 7 aa, synthetic construct
RQAPVHV

SEQ ID NO: 144904 - protein, 7 aa, synthetic construct
RQAQAAN

SEQ ID NO: 144905 - protein, 7 aa, synthetic construct
RQAQGDR

SEQ ID NO: 144906 - protein, 7 aa, synthetic construct
RQARENV

SEQ ID NO: 144907 - protein, 7 aa, synthetic construct
RQARVDV

SEQ ID NO: 144908 - protein, 7 aa, synthetic construct
RQAVGSQ

SEQ ID NO: 144909 - protein, 7 aa, synthetic construct
RQDAKNL

SEQ ID NO: 144910 - protein, 7 aa, synthetic construct
RQDKASM

SEQ ID NO: 144911 - protein, 7 aa, synthetic construct
RQDKIPF

SEQ ID NO: 144912 - protein, 7 aa, synthetic construct
RQDKNGS

SEQ ID NO: 144913 - protein, 7 aa, synthetic construct
RQDKNML

SEQ ID NO: 144914 - protein, 7 aa, synthetic construct
RQDKNTL

SEQ ID NO: 144915 - protein, 7 aa, synthetic construct
RQDKREM

SEQ ID NO: 144916 - protein, 7 aa, synthetic construct
RQDKSNI

SEQ ID NO: 144917 - protein, 7 aa, synthetic construct
RQDLKLT

SEQ ID NO: 144918 - protein, 7 aa, synthetic construct
RQDNVRG

SEQ ID NO: 144919 - protein, 7 aa, synthetic construct
RQDPHKP

SEQ ID NO: 144920 - protein, 7 aa, synthetic construct
RQDQHAK

SEQ ID NO: 144921 - protein, 7 aa, synthetic construct
RQDQLKS

SEQ ID NO: 144922 - protein, 7 aa, synthetic construct
RQDQYKM

SEQ ID NO: 144923 - protein, 7 aa, synthetic construct
RQDRHQA

SEQ ID NO: 144924 - protein, 7 aa, synthetic construct
RQDRPMV

SEQ ID NO: 144925 - protein, 7 aa, synthetic construct
RQDSAKQ

SEQ ID NO: 144926 - protein, 7 aa, synthetic construct
RQDTVKF

SEQ ID NO: 144927 - protein, 7 aa, synthetic construct
RQDVKNQ

SEQ ID NO: 144928 - protein, 7 aa, synthetic construct
RQDVNRM

SEQ ID NO: 144929 - protein, 7 aa, synthetic construct
RQEAKIQ

SEQ ID NO: 144930 - protein, 7 aa, synthetic construct
RQEGKQV

SEQ ID NO: 144931 - protein, 7 aa, synthetic construct
RQEGRVV

SEQ ID NO: 144932 - protein, 7 aa, synthetic construct
RQEIKHA

SEQ ID NO: 144933 - protein, 7 aa, synthetic construct
RQEIKSY

SEQ ID NO: 144934 - protein, 7 aa, synthetic construct
RQEILRA

SEQ ID NO: 144935 - protein, 7 aa, synthetic construct
RQEIRNT

SEQ ID NO: 144936 - protein, 7 aa, synthetic construct
RQEKMSL

SEQ ID NO: 144937 - protein, 7 aa, synthetic construct
RQEKRDQ

SEQ ID NO: 144938 - protein, 7 aa, synthetic construct
RQEKTMT

SEQ ID NO: 144939 - protein, 7 aa, synthetic construct
RQEKTVN

SEQ ID NO: 144940 - protein, 7 aa, synthetic construct
RQEKVIQ

SEQ ID NO: 144941 - protein, 7 aa, synthetic construct
RQEMKLI

SEQ ID NO: 144942 - protein, 7 aa, synthetic construct
RQEMKPH

SEQ ID NO: 144943 - protein, 7 aa, synthetic construct
RQEPRPM

SEQ ID NO: 144944 - protein, 7 aa, synthetic construct
RQERQPI

SEQ ID NO: 144945 - protein, 7 aa, synthetic construct
RQFDKGI

SEQ ID NO: 144946 - protein, 7 aa, synthetic construct
RQFNNNQ

SEQ ID NO: 144947 - protein, 7 aa, synthetic construct
RQFQGGS

SEQ ID NO: 144948 - protein, 7 aa, synthetic construct
RQFREPD

SEQ ID NO: 144949 - protein, 7 aa, synthetic construct
RQGEIMR

SEQ ID NO: 144950 - protein, 7 aa, synthetic construct
RQGGHSN

SEQ ID NO: 144951 - protein, 7 aa, synthetic construct
RQGGLMM

SEQ ID NO: 144952 - protein, 7 aa, synthetic construct
RQGIERI

SEQ ID NO: 144953 - protein, 7 aa, synthetic construct
RQGIMPP

SEQ ID NO: 144954 - protein, 7 aa, synthetic construct
RQGITQY

SEQ ID NO: 144955 - protein, 7 aa, synthetic construct
RQGIYYE

SEQ ID NO: 144956 - protein, 7 aa, synthetic construct
RQGKPFD

SEQ ID NO: 144957 - protein, 7 aa, synthetic construct
RQGLDNK

SEQ ID NO: 144958 - protein, 7 aa, synthetic construct
RQGLDRV

SEQ ID NO: 144959 - protein, 7 aa, synthetic construct
RQGMPAM

SEQ ID NO: 144960 - protein, 7 aa, synthetic construct
RQGNFPQ

SEQ ID NO: 144961 - protein, 7 aa, synthetic construct
RQGPAAY

SEQ ID NO: 144962 - protein, 7 aa, synthetic construct
RQGPGNT

SEQ ID NO: 144963 - protein, 7 aa, synthetic construct
RQGPIQM

SEQ ID NO: 144964 - protein, 7 aa, synthetic construct
RQGRDLP

SEQ ID NO: 144965 - protein, 7 aa, synthetic construct
RQGREQS

SEQ ID NO: 144966 - protein, 7 aa, synthetic construct
RQGTSDK

SEQ ID NO: 144967 - protein, 7 aa, synthetic construct
RQGVAER

SEQ ID NO: 144968 - protein, 7 aa, synthetic construct
RQGVRSD

SEQ ID NO: 144969 - protein, 7 aa, synthetic construct
RQHAPNI

SEQ ID NO: 144970 - protein, 7 aa, synthetic construct
RQHGPMP

SEQ ID NO: 144971 - protein, 7 aa, synthetic construct
RQHGSVV

SEQ ID NO: 144972 - protein, 7 aa, synthetic construct
RQHGVSG

SEQ ID NO: 144973 - protein, 7 aa, synthetic construct
RQHKDAD

SEQ ID NO: 144974 - protein, 7 aa, synthetic construct
RQHLNKE

SEQ ID NO: 144975 - protein, 7 aa, synthetic construct
RQHLVNA

SEQ ID NO: 144976 - protein, 7 aa, synthetic construct
RQHPNPQ

SEQ ID NO: 144977 - protein, 7 aa, synthetic construct
RQHVQAA

SEQ ID NO: 144978 - protein, 7 aa, synthetic construct
RQHVQTP

SEQ ID NO: 144979 - protein, 7 aa, synthetic construct
RQHVSQI

SEQ ID NO: 144980 - protein, 7 aa, synthetic construct
RQHVSSA

SEQ ID NO: 144981 - protein, 7 aa, synthetic construct
RQIAASN

SEQ ID NO: 144982 - protein, 7 aa, synthetic construct
RQIAERA

SEQ ID NO: 144983 - protein, 7 aa, synthetic construct
RQIATST

SEQ ID NO: 144984 - protein, 7 aa, synthetic construct
RQIDKQM

SEQ ID NO: 144985 - protein, 7 aa, synthetic construct
RQIEKGA

SEQ ID NO: 144986 - protein, 7 aa, synthetic construct
RQIGNGM

SEQ ID NO: 144987 - protein, 7 aa, synthetic construct
RQIGNVQ

SEQ ID NO: 144988 - protein, 7 aa, synthetic construct
RQINAMT

SEQ ID NO: 144989 - protein, 7 aa, synthetic construct
RQINIEK

SEQ ID NO: 144990 - protein, 7 aa, synthetic construct
RQIPHSP

SEQ ID NO: 144991 - protein, 7 aa, synthetic construct
RQIPKDT

SEQ ID NO: 144992 - protein, 7 aa, synthetic construct
RQIPSMS

SEQ ID NO: 144993 - protein, 7 aa, synthetic construct
RQIPTIQ

SEQ ID NO: 144994 - protein, 7 aa, synthetic construct
RQIQMVA

SEQ ID NO: 144995 - protein, 7 aa, synthetic construct
RQIQTGH

SEQ ID NO: 144996 - protein, 7 aa, synthetic construct
RQIQTNL

SEQ ID NO: 144997 - protein, 7 aa, synthetic construct
RQISQSN

SEQ ID NO: 144998 - protein, 7 aa, synthetic construct
RQITPDR

SEQ ID NO: 144999 - protein, 7 aa, synthetic construct
RQKAVPD

SEQ ID NO: 145000 - protein, 7 aa, synthetic construct
RQKDAPI

SEQ ID NO: 145001 - protein, 7 aa, synthetic construct
RQKDELR

SEQ ID NO: 145002 - protein, 7 aa, synthetic construct
RQKDVAL

SEQ ID NO: 145003 - protein, 7 aa, synthetic construct
RQKDVNA

SEQ ID NO: 145004 - protein, 7 aa, synthetic construct
RQKDVVV

SEQ ID NO: 145005 - protein, 7 aa, synthetic construct
RQKEGQT

SEQ ID NO: 145006 - protein, 7 aa, synthetic construct
RQKEHPA

SEQ ID NO: 145007 - protein, 7 aa, synthetic construct
RQKEHPI

SEQ ID NO: 145008 - protein, 7 aa, synthetic construct
RQKESST

SEQ ID NO: 145009 - protein, 7 aa, synthetic construct
RQKNISD

SEQ ID NO: 145010 - protein, 7 aa, synthetic construct
RQKPSFD

SEQ ID NO: 145011 - protein, 7 aa, synthetic construct
RQKQEFQ

SEQ ID NO: 145012 - protein, 7 aa, synthetic construct
RQKQESQ

SEQ ID NO: 145013 - protein, 7 aa, synthetic construct
RQKQIDQ

SEQ ID NO: 145014 - protein, 7 aa, synthetic construct
RQKSPTD

SEQ ID NO: 145015 - protein, 7 aa, synthetic construct
RQKTEDR

SEQ ID NO: 145016 - protein, 7 aa, synthetic construct
RQKTPSE

SEQ ID NO: 145017 - protein, 7 aa, synthetic construct
RQKTSDF

SEQ ID NO: 145018 - protein, 7 aa, synthetic construct
RQKVPYE

SEQ ID NO: 145019 - protein, 7 aa, synthetic construct
RQLAHVA

SEQ ID NO: 145020 - protein, 7 aa, synthetic construct
RQLAQDK

SEQ ID NO: 145021 - protein, 7 aa, synthetic construct
RQLDALK

SEQ ID NO: 145022 - protein, 7 aa, synthetic construct
RQLDKAL

SEQ ID NO: 145023 - protein, 7 aa, synthetic construct
RQLDKAY

SEQ ID NO: 145024 - protein, 7 aa, synthetic construct
RQLDKSM

SEQ ID NO: 145025 - protein, 7 aa, synthetic construct
RQLEKVT

SEQ ID NO: 145026 - protein, 7 aa, synthetic construct
RQLGDAR

SEQ ID NO: 145027 - protein, 7 aa, synthetic construct
RQLGPAQ

SEQ ID NO: 145028 - protein, 7 aa, synthetic construct
RQLKENV

SEQ ID NO: 145029 - protein, 7 aa, synthetic construct
RQLKNFE

SEQ ID NO: 145030 - protein, 7 aa, synthetic construct
RQLNTHV

SEQ ID NO: 145031 - protein, 7 aa, synthetic construct
RQLPGHA

SEQ ID NO: 145032 - protein, 7 aa, synthetic construct
RQLPNPQ

SEQ ID NO: 145033 - protein, 7 aa, synthetic construct
RQLQYGS

SEQ ID NO: 145034 - protein, 7 aa, synthetic construct
RQLRGGE

SEQ ID NO: 145035 - protein, 7 aa, synthetic construct
RQLTAKE

SEQ ID NO: 145036 - protein, 7 aa, synthetic construct
RQLVADK

SEQ ID NO: 145037 - protein, 7 aa, synthetic construct
RQMAAQA

SEQ ID NO: 145038 - protein, 7 aa, synthetic construct
RQMAATA

SEQ ID NO: 145039 - protein, 7 aa, synthetic construct
RQMAQMA

SEQ ID NO: 145040 - protein, 7 aa, synthetic construct
RQMATLA

SEQ ID NO: 145041 - protein, 7 aa, synthetic construct
RQMATMT

SEQ ID NO: 145042 - protein, 7 aa, synthetic construct
RQMGNST

SEQ ID NO: 145043 - protein, 7 aa, synthetic construct
RQMGQTV

SEQ ID NO: 145044 - protein, 7 aa, synthetic construct
RQMGTMS

SEQ ID NO: 145045 - protein, 7 aa, synthetic construct
RQMIISA

SEQ ID NO: 145046 - protein, 7 aa, synthetic construct
RQMKDWD

SEQ ID NO: 145047 - protein, 7 aa, synthetic construct
RQMKEAI

SEQ ID NO: 145048 - protein, 7 aa, synthetic construct
RQMKPDT

SEQ ID NO: 145049 - protein, 7 aa, synthetic construct
RQMNKEY

SEQ ID NO: 145050 - protein, 7 aa, synthetic construct
RQMNTNA

SEQ ID NO: 145051 - protein, 7 aa, synthetic construct
RQMNVQN

SEQ ID NO: 145052 - protein, 7 aa, synthetic construct
RQMPASM

SEQ ID NO: 145053 - protein, 7 aa, synthetic construct
RQMPIAS

SEQ ID NO: 145054 - protein, 7 aa, synthetic construct
RQMPNPN

SEQ ID NO: 145055 - protein, 7 aa, synthetic construct
RQMPTAL

SEQ ID NO: 145056 - protein, 7 aa, synthetic construct
RQMPVAS

SEQ ID NO: 145057 - protein, 7 aa, synthetic construct
RQMPVGN

SEQ ID NO: 145058 - protein, 7 aa, synthetic construct
RQMQTQA

SEQ ID NO: 145059 - protein, 7 aa, synthetic construct
RQMSGVI

SEQ ID NO: 145060 - protein, 7 aa, synthetic construct
RQMSNAT

SEQ ID NO: 145061 - protein, 7 aa, synthetic construct
RQMSVAV

SEQ ID NO: 145062 - protein, 7 aa, synthetic construct
RQMTGSQ

SEQ ID NO: 145063 - protein, 7 aa, synthetic construct
RQMTTNT

SEQ ID NO: 145064 - protein, 7 aa, synthetic construct
RQMTTRD

SEQ ID NO: 145065 - protein, 7 aa, synthetic construct
RQNAAQG

SEQ ID NO: 145066 - protein, 7 aa, synthetic construct
RQNAIPY

SEQ ID NO: 145067 - protein, 7 aa, synthetic construct
RQNATIH

SEQ ID NO: 145068 - protein, 7 aa, synthetic construct
RQNAVKE

SEQ ID NO: 145069 - protein, 7 aa, synthetic construct
RQNESKT

SEQ ID NO: 145070 - protein, 7 aa, synthetic construct
RQNGAYH

SEQ ID NO: 145071 - protein, 7 aa, synthetic construct
RQNGNGQ

SEQ ID NO: 145072 - protein, 7 aa, synthetic construct
RQNHAPT

SEQ ID NO: 145073 - protein, 7 aa, synthetic construct
RQNIAHA

SEQ ID NO: 145074 - protein, 7 aa, synthetic construct
RQNIQPQ

SEQ ID NO: 145075 - protein, 7 aa, synthetic construct
RQNISPQ

SEQ ID NO: 145076 - protein, 7 aa, synthetic construct
RQNKEYN

SEQ ID NO: 145077 - protein, 7 aa, synthetic construct
RQNKEYQ

SEQ ID NO: 145078 - protein, 7 aa, synthetic construct
RQNLRLD

SEQ ID NO: 145079 - protein, 7 aa, synthetic construct
RQNNSYT

SEQ ID NO: 145080 - protein, 7 aa, synthetic construct
RQNPLGV

SEQ ID NO: 145081 - protein, 7 aa, synthetic construct
RQNPLSM

SEQ ID NO: 145082 - protein, 7 aa, synthetic construct
RQNRMLE

SEQ ID NO: 145083 - protein, 7 aa, synthetic construct
RQNTHVP

SEQ ID NO: 145084 - protein, 7 aa, synthetic construct
RQNVGSQ

SEQ ID NO: 145085 - protein, 7 aa, synthetic construct
RQPAAGY

SEQ ID NO: 145086 - protein, 7 aa, synthetic construct
RQPAHGP

SEQ ID NO: 145087 - protein, 7 aa, synthetic construct
RQPAQMY

SEQ ID NO: 145088 - protein, 7 aa, synthetic construct
RQPEHRQ

SEQ ID NO: 145089 - protein, 7 aa, synthetic construct
RQPGPVP

SEQ ID NO: 145090 - protein, 7 aa, synthetic construct
RQPGQNS

SEQ ID NO: 145091 - protein, 7 aa, synthetic construct
RQPHATI

SEQ ID NO: 145092 - protein, 7 aa, synthetic construct
RQPHERA

SEQ ID NO: 145093 - protein, 7 aa, synthetic construct
RQPHNMV

SEQ ID NO: 145094 - protein, 7 aa, synthetic construct
RQPHVRD

SEQ ID NO: 145095 - protein, 7 aa, synthetic construct
RQPMIAQ

SEQ ID NO: 145096 - protein, 7 aa, synthetic construct
RQPQILT

SEQ ID NO: 145097 - protein, 7 aa, synthetic construct
RQPREAV

SEQ ID NO: 145098 - protein, 7 aa, synthetic construct
RQPRIDV

SEQ ID NO: 145099 - protein, 7 aa, synthetic construct
RQPSQDK

SEQ ID NO: 145100 - protein, 7 aa, synthetic construct
RQPTTHV

SEQ ID NO: 145101 - protein, 7 aa, synthetic construct
RQPVQDR

SEQ ID NO: 145102 - protein, 7 aa, synthetic construct
RQPVQYP

SEQ ID NO: 145103 - protein, 7 aa, synthetic construct
RQQAAIA

SEQ ID NO: 145104 - protein, 7 aa, synthetic construct
RQQAIAV

SEQ ID NO: 145105 - protein, 7 aa, synthetic construct
RQQASGQ

SEQ ID NO: 145106 - protein, 7 aa, synthetic construct
RQQDKTQ

SEQ ID NO: 145107 - protein, 7 aa, synthetic construct
RQQEWDR

SEQ ID NO: 145108 - protein, 7 aa, synthetic construct
RQQGALV

SEQ ID NO: 145109 - protein, 7 aa, synthetic construct
RQQGGLN

SEQ ID NO: 145110 - protein, 7 aa, synthetic construct
RQQGGLS

SEQ ID NO: 145111 - protein, 7 aa, synthetic construct
RQQGMGI

SEQ ID NO: 145112 - protein, 7 aa, synthetic construct
RQQGMST

SEQ ID NO: 145113 - protein, 7 aa, synthetic construct
RQQGNVS

SEQ ID NO: 145114 - protein, 7 aa, synthetic construct
RQQGSGM

SEQ ID NO: 145115 - protein, 7 aa, synthetic construct
RQQGSVT

SEQ ID NO: 145116 - protein, 7 aa, synthetic construct
RQQHLNT

SEQ ID NO: 145117 - protein, 7 aa, synthetic construct
RQQHSLS

SEQ ID NO: 145118 - protein, 7 aa, synthetic construct
RQQINGQ

SEQ ID NO: 145119 - protein, 7 aa, synthetic construct
RQQIQGS

SEQ ID NO: 145120 - protein, 7 aa, synthetic construct
RQQISNA

SEQ ID NO: 145121 - protein, 7 aa, synthetic construct
RQQKSDT

SEQ ID NO: 145122 - protein, 7 aa, synthetic construct
RQQMNDK

SEQ ID NO: 145123 - protein, 7 aa, synthetic construct
RQQMQVS

SEQ ID NO: 145124 - protein, 7 aa, synthetic construct
RQQMTMN

SEQ ID NO: 145125 - protein, 7 aa, synthetic construct
RQQNAHS

SEQ ID NO: 145126 - protein, 7 aa, synthetic construct
RQQNPNL

SEQ ID NO: 145127 - protein, 7 aa, synthetic construct
RQQNPSN

SEQ ID NO: 145128 - protein, 7 aa, synthetic construct
RQQNSQS

SEQ ID NO: 145129 - protein, 7 aa, synthetic construct
RQQNSTA

SEQ ID NO: 145130 - protein, 7 aa, synthetic construct
RQQNTTY

SEQ ID NO: 145131 - protein, 7 aa, synthetic construct
RQQNVAT

SEQ ID NO: 145132 - protein, 7 aa, synthetic construct
RQQNWPS

SEQ ID NO: 145133 - protein, 7 aa, synthetic construct
RQQPGAN

SEQ ID NO: 145134 - protein, 7 aa, synthetic construct
RQQPIPH

SEQ ID NO: 145135 - protein, 7 aa, synthetic construct
RQQPNYL

SEQ ID NO: 145136 - protein, 7 aa, synthetic construct
RQQPQTH

SEQ ID NO: 145137 - protein, 7 aa, synthetic construct
RQQPSAN

SEQ ID NO: 145138 - protein, 7 aa, synthetic construct
RQQQLVV

SEQ ID NO: 145139 - protein, 7 aa, synthetic construct
RQQQSLN

SEQ ID NO: 145140 - protein, 7 aa, synthetic construct
RQQQSPL

SEQ ID NO: 145141 - protein, 7 aa, synthetic construct
RQQQSVM

SEQ ID NO: 145142 - protein, 7 aa, synthetic construct
RQQSDTK

SEQ ID NO: 145143 - protein, 7 aa, synthetic construct
RQQSSTI

SEQ ID NO: 145144 - protein, 7 aa, synthetic construct
RQQSVQT

SEQ ID NO: 145145 - protein, 7 aa, synthetic construct
RQQSWPG

SEQ ID NO: 145146 - protein, 7 aa, synthetic construct
RQQTAPN

SEQ ID NO: 145147 - protein, 7 aa, synthetic construct
RQQTGIQ

SEQ ID NO: 145148 - protein, 7 aa, synthetic construct
RQQTIQN

SEQ ID NO: 145149 - protein, 7 aa, synthetic construct
RQQTMTI

SEQ ID NO: 145150 - protein, 7 aa, synthetic construct
RQQTPGL

SEQ ID NO: 145151 - protein, 7 aa, synthetic construct
RQQTPSQ

SEQ ID NO: 145152 - protein, 7 aa, synthetic construct
RQQTSTQ

SEQ ID NO: 145153 - protein, 7 aa, synthetic construct
RQQVMFD

SEQ ID NO: 145154 - protein, 7 aa, synthetic construct
RQQVNVM

SEQ ID NO: 145155 - protein, 7 aa, synthetic construct
RQQVSQT

SEQ ID NO: 145156 - protein, 7 aa, synthetic construct
RQRAQDV

SEQ ID NO: 145157 - protein, 7 aa, synthetic construct
RQRDELM

SEQ ID NO: 145158 - protein, 7 aa, synthetic construct
RQRDWDA

SEQ ID NO: 145159 - protein, 7 aa, synthetic construct
RQREHIG

SEQ ID NO: 145160 - protein, 7 aa, synthetic construct
RQRGIDA

SEQ ID NO: 145161 - protein, 7 aa, synthetic construct
RQRGLEM

SEQ ID NO: 145162 - protein, 7 aa, synthetic construct
RQRPDTG

SEQ ID NO: 145163 - protein, 7 aa, synthetic construct
RQRPEPQ

SEQ ID NO: 145164 - protein, 7 aa, synthetic construct
RQRPIDA

SEQ ID NO: 145165 - protein, 7 aa, synthetic construct
RQRPQDV

SEQ ID NO: 145166 - protein, 7 aa, synthetic construct
RQRSLDP

SEQ ID NO: 145167 - protein, 7 aa, synthetic construct
RQRTNDG

SEQ ID NO: 145168 - protein, 7 aa, synthetic construct
RQSANPT

SEQ ID NO: 145169 - protein, 7 aa, synthetic construct
RQSANQA

SEQ ID NO: 145170 - protein, 7 aa, synthetic construct
RQSANST

SEQ ID NO: 145171 - protein, 7 aa, synthetic construct
RQSAQST

SEQ ID NO: 145172 - protein, 7 aa, synthetic construct
RQSAVMT

SEQ ID NO: 145173 - protein, 7 aa, synthetic construct
RQSDIRM

SEQ ID NO: 145174 - protein, 7 aa, synthetic construct
RQSDKGQ

SEQ ID NO: 145175 - protein, 7 aa, synthetic construct
RQSDKLT

SEQ ID NO: 145176 - protein, 7 aa, synthetic construct
RQSEKNL

SEQ ID NO: 145177 - protein, 7 aa, synthetic construct
RQSEKQM

SEQ ID NO: 145178 - protein, 7 aa, synthetic construct
RQSEPMK

SEQ ID NO: 145179 - protein, 7 aa, synthetic construct
RQSFGNG

SEQ ID NO: 145180 - protein, 7 aa, synthetic construct
RQSFKEQ

SEQ ID NO: 145181 - protein, 7 aa, synthetic construct
RQSGNLL

SEQ ID NO: 145182 - protein, 7 aa, synthetic construct
RQSGRDY

SEQ ID NO: 145183 - protein, 7 aa, synthetic construct
RQSGVQL

SEQ ID NO: 145184 - protein, 7 aa, synthetic construct
RQSHYPP

SEQ ID NO: 145185 - protein, 7 aa, synthetic construct
RQSIMPN

SEQ ID NO: 145186 - protein, 7 aa, synthetic construct
RQSLGVQ

SEQ ID NO: 145187 - protein, 7 aa, synthetic construct
RQSNNNF

SEQ ID NO: 145188 - protein, 7 aa, synthetic construct
RQSNTSV

SEQ ID NO: 145189 - protein, 7 aa, synthetic construct
RQSPNPS

SEQ ID NO: 145190 - protein, 7 aa, synthetic construct
RQSPTNM

SEQ ID NO: 145191 - protein, 7 aa, synthetic construct
RQSQMQT

SEQ ID NO: 145192 - protein, 7 aa, synthetic construct
RQSQSLQ

SEQ ID NO: 145193 - protein, 7 aa, synthetic construct
RQSQVVM

SEQ ID NO: 145194 - protein, 7 aa, synthetic construct
RQSSPPN

SEQ ID NO: 145195 - protein, 7 aa, synthetic construct
RQSTMNL

SEQ ID NO: 145196 - protein, 7 aa, synthetic construct
RQSVPHV

SEQ ID NO: 145197 - protein, 7 aa, synthetic construct
RQTAQII

SEQ ID NO: 145198 - protein, 7 aa, synthetic construct
RQTAQNH

SEQ ID NO: 145199 - protein, 7 aa, synthetic construct
RQTAQQL

SEQ ID NO: 145200 - protein, 7 aa, synthetic construct
RQTATQQ

SEQ ID NO: 145201 - protein, 7 aa, synthetic construct
RQTDKGW

SEQ ID NO: 145202 - protein, 7 aa, synthetic construct
RQTDTRN

SEQ ID NO: 145203 - protein, 7 aa, synthetic construct
RQTERTV

SEQ ID NO: 145204 - protein, 7 aa, synthetic construct
RQTEVRT

SEQ ID NO: 145205 - protein, 7 aa, synthetic construct
RQTGSIQ

SEQ ID NO: 145206 - protein, 7 aa, synthetic construct
RQTHVVS

SEQ ID NO: 145207 - protein, 7 aa, synthetic construct
RQTINSM

SEQ ID NO: 145208 - protein, 7 aa, synthetic construct
RQTISDR

SEQ ID NO: 145209 - protein, 7 aa, synthetic construct
RQTKMSD

SEQ ID NO: 145210 - protein, 7 aa, synthetic construct
RQTMANV

SEQ ID NO: 145211 - protein, 7 aa, synthetic construct
RQTMSTI

SEQ ID NO: 145212 - protein, 7 aa, synthetic construct
RQTNPGW

SEQ ID NO: 145213 - protein, 7 aa, synthetic construct
RQTNQAM

SEQ ID NO: 145214 - protein, 7 aa, synthetic construct
RQTNTQS

SEQ ID NO: 145215 - protein, 7 aa, synthetic construct
RQTNVNI

SEQ ID NO: 145216 - protein, 7 aa, synthetic construct
RQTPAHA

SEQ ID NO: 145217 - protein, 7 aa, synthetic construct
RQTPNLL

SEQ ID NO: 145218 - protein, 7 aa, synthetic construct
RQTPQSV

SEQ ID NO: 145219 - protein, 7 aa, synthetic construct
RQTPTPP

SEQ ID NO: 145220 - protein, 7 aa, synthetic construct
RQTPVMM

SEQ ID NO: 145221 - protein, 7 aa, synthetic construct
RQTPVTQ

SEQ ID NO: 145222 - protein, 7 aa, synthetic construct
RQTQAGQ

SEQ ID NO: 145223 - protein, 7 aa, synthetic construct
RQTQIAQ

SEQ ID NO: 145224 - protein, 7 aa, synthetic construct
RQTQSQF

SEQ ID NO: 145225 - protein, 7 aa, synthetic construct
RQTRDQN

SEQ ID NO: 145226 - protein, 7 aa, synthetic construct
RQTSPQI

SEQ ID NO: 145227 - protein, 7 aa, synthetic construct
RQTSSDK

SEQ ID NO: 145228 - protein, 7 aa, synthetic construct
RQTSVSN

SEQ ID NO: 145229 - protein, 7 aa, synthetic construct
RQTSYPH

SEQ ID NO: 145230 - protein, 7 aa, synthetic construct
RQTTAAF

SEQ ID NO: 145231 - protein, 7 aa, synthetic construct
RQTTFPN

SEQ ID NO: 145232 - protein, 7 aa, synthetic construct
RQTTHMP

SEQ ID NO: 145233 - protein, 7 aa, synthetic construct
RQTTNST

SEQ ID NO: 145234 - protein, 7 aa, synthetic construct
RQTVHSL

SEQ ID NO: 145235 - protein, 7 aa, synthetic construct
RQTWSEG

SEQ ID NO: 145236 - protein, 7 aa, synthetic construct
RQVAFPQ

SEQ ID NO: 145237 - protein, 7 aa, synthetic construct
RQVAPGM

SEQ ID NO: 145238 - protein, 7 aa, synthetic construct
RQVAQIQ

SEQ ID NO: 145239 - protein, 7 aa, synthetic construct
RQVDATE

SEQ ID NO: 145240 - protein, 7 aa, synthetic construct
RQVERVM

SEQ ID NO: 145241 - protein, 7 aa, synthetic construct
RQVGNQH

SEQ ID NO: 145242 - protein, 7 aa, synthetic construct
RQVGQIQ

SEQ ID NO: 145243 - protein, 7 aa, synthetic construct
RQVHKDT

SEQ ID NO: 145244 - protein, 7 aa, synthetic construct
RQVHPDK

SEQ ID NO: 145245 - protein, 7 aa, synthetic construct
RQVIISD

SEQ ID NO: 145246 - protein, 7 aa, synthetic construct
RQVMVGV

SEQ ID NO: 145247 - protein, 7 aa, synthetic construct
RQVNLGQ

SEQ ID NO: 145248 - protein, 7 aa, synthetic construct
RQVPMSP

SEQ ID NO: 145249 - protein, 7 aa, synthetic construct
RQVPSMN

SEQ ID NO: 145250 - protein, 7 aa, synthetic construct
RQVPSPT

SEQ ID NO: 145251 - protein, 7 aa, synthetic construct
RQVPTHP

SEQ ID NO: 145252 - protein, 7 aa, synthetic construct
RQVQKID

SEQ ID NO: 145253 - protein, 7 aa, synthetic construct
RQVQQSM

SEQ ID NO: 145254 - protein, 7 aa, synthetic construct
RQVQTHV

SEQ ID NO: 145255 - protein, 7 aa, synthetic construct
RQVSAMI

SEQ ID NO: 145256 - protein, 7 aa, synthetic construct
RQVSEKL

SEQ ID NO: 145257 - protein, 7 aa, synthetic construct
RQVSMPN

SEQ ID NO: 145258 - protein, 7 aa, synthetic construct
RQVSMPQ

SEQ ID NO: 145259 - protein, 7 aa, synthetic construct
RQVSQVS

SEQ ID NO: 145260 - protein, 7 aa, synthetic construct
RQVSRDT

SEQ ID NO: 145261 - protein, 7 aa, synthetic construct
RQVTLSN

SEQ ID NO: 145262 - protein, 7 aa, synthetic construct
RQVTMGA

SEQ ID NO: 145263 - protein, 7 aa, synthetic construct
RQVTRDT

SEQ ID NO: 145264 - protein, 7 aa, synthetic construct
RQVTTGY

SEQ ID NO: 145265 - protein, 7 aa, synthetic construct
RQVVSTT

SEQ ID NO: 145266 - protein, 7 aa, synthetic construct
RQYGGNI

SEQ ID NO: 145267 - protein, 7 aa, synthetic construct
RQYSDRP

SEQ ID NO: 145268 - protein, 7 aa, synthetic construct
RQYSVMD

SEQ ID NO: 145269 - protein, 7 aa, synthetic construct
RRADTST

SEQ ID NO: 145270 - protein, 7 aa, synthetic construct
RRAPVDS

SEQ ID NO: 145271 - protein, 7 aa, synthetic construct
RRDAHPI

SEQ ID NO: 145272 - protein, 7 aa, synthetic construct
RRDAHVP

SEQ ID NO: 145273 - protein, 7 aa, synthetic construct
RRDDVKS

SEQ ID NO: 145274 - protein, 7 aa, synthetic construct
RRDGRDI

SEQ ID NO: 145275 - protein, 7 aa, synthetic construct
RRDHTVS

SEQ ID NO: 145276 - protein, 7 aa, synthetic construct
RRDIKDV

SEQ ID NO: 145277 - protein, 7 aa, synthetic construct
RRDIVSN

SEQ ID NO: 145278 - protein, 7 aa, synthetic construct
RRDKPET

SEQ ID NO: 145279 - protein, 7 aa, synthetic construct
RRDLVLN

SEQ ID NO: 145280 - protein, 7 aa, synthetic construct
RRDMPLP

SEQ ID NO: 145281 - protein, 7 aa, synthetic construct
RRDNLTN

SEQ ID NO: 145282 - protein, 7 aa, synthetic construct
RRDNMPT

SEQ ID NO: 145283 - protein, 7 aa, synthetic construct
RRDNVIQ

SEQ ID NO: 145284 - protein, 7 aa, synthetic construct
RRDNVVS

SEQ ID NO: 145285 - protein, 7 aa, synthetic construct
RRDPARD

SEQ ID NO: 145286 - protein, 7 aa, synthetic construct
RRDPGPT

SEQ ID NO: 145287 - protein, 7 aa, synthetic construct
RRDQHNV

SEQ ID NO: 145288 - protein, 7 aa, synthetic construct
RRDQVPV

SEQ ID NO: 145289 - protein, 7 aa, synthetic construct
RRDSAFP

SEQ ID NO: 145290 - protein, 7 aa, synthetic construct
RRDSSNN

SEQ ID NO: 145291 - protein, 7 aa, synthetic construct
RRDTPNS

SEQ ID NO: 145292 - protein, 7 aa, synthetic construct
RRDTQIA

SEQ ID NO: 145293 - protein, 7 aa, synthetic construct
RRDVHAS

SEQ ID NO: 145294 - protein, 7 aa, synthetic construct
RRDVLNT

SEQ ID NO: 145295 - protein, 7 aa, synthetic construct
RRDVNST

SEQ ID NO: 145296 - protein, 7 aa, synthetic construct
RRDVQHS

SEQ ID NO: 145297 - protein, 7 aa, synthetic construct
RRDVTPI

SEQ ID NO: 145298 - protein, 7 aa, synthetic construct
RREGNAV

SEQ ID NO: 145299 - protein, 7 aa, synthetic construct
RREGTIV

SEQ ID NO: 145300 - protein, 7 aa, synthetic construct
RREKDVN

SEQ ID NO: 145301 - protein, 7 aa, synthetic construct
RRELNEK

SEQ ID NO: 145302 - protein, 7 aa, synthetic construct
RRELQQN

SEQ ID NO: 145303 - protein, 7 aa, synthetic construct
RRENILT

SEQ ID NO: 145304 - protein, 7 aa, synthetic construct
RRENTSI

SEQ ID NO: 145305 - protein, 7 aa, synthetic construct
RREPGSF

SEQ ID NO: 145306 - protein, 7 aa, synthetic construct
RREVVMP

SEQ ID NO: 145307 - protein, 7 aa, synthetic construct
RREVVQQ

SEQ ID NO: 145308 - protein, 7 aa, synthetic construct
RREYPGT

SEQ ID NO: 145309 - protein, 7 aa, synthetic construct
RRGDDFM

SEQ ID NO: 145310 - protein, 7 aa, synthetic construct
RRGDGNT

SEQ ID NO: 145311 - protein, 7 aa, synthetic construct
RRGDLPN

SEQ ID NO: 145312 - protein, 7 aa, synthetic construct
RRGDTQG

SEQ ID NO: 145313 - protein, 7 aa, synthetic construct
RRGDVSI

SEQ ID NO: 145314 - protein, 7 aa, synthetic construct
RRGELNT

SEQ ID NO: 145315 - protein, 7 aa, synthetic construct
RRHDQDQ

SEQ ID NO: 145316 - protein, 7 aa, synthetic construct
RRHENPE

SEQ ID NO: 145317 - protein, 7 aa, synthetic construct
RRHIGEE

SEQ ID NO: 145318 - protein, 7 aa, synthetic construct
RRHLELE

SEQ ID NO: 145319 - protein, 7 aa, synthetic construct
RRHSIED

SEQ ID NO: 145320 - protein, 7 aa, synthetic construct
RRIDEQW

SEQ ID NO: 145321 - protein, 7 aa, synthetic construct
RRIQAEE

SEQ ID NO: 145322 - protein, 7 aa, synthetic construct
RRIQEGV

SEQ ID NO: 145323 - protein, 7 aa, synthetic construct
RRLPQDG

SEQ ID NO: 145324 - protein, 7 aa, synthetic construct
RRNDSSD

SEQ ID NO: 145325 - protein, 7 aa, synthetic construct
RRNDTTI

SEQ ID NO: 145326 - protein, 7 aa, synthetic construct
RRNEVPS

SEQ ID NO: 145327 - protein, 7 aa, synthetic construct
RRNYEED

SEQ ID NO: 145328 - protein, 7 aa, synthetic construct
RRPDANY

SEQ ID NO: 145329 - protein, 7 aa, synthetic construct
RRPLGEA

SEQ ID NO: 145330 - protein, 7 aa, synthetic construct
RRPQDLP

SEQ ID NO: 145331 - protein, 7 aa, synthetic construct
RRQVEEV

SEQ ID NO: 145332 - protein, 7 aa, synthetic construct
RRSDTPS

SEQ ID NO: 145333 - protein, 7 aa, synthetic construct
RRTDNMV

SEQ ID NO: 145334 - protein, 7 aa, synthetic construct
RRTDQVQ

SEQ ID NO: 145335 - protein, 7 aa, synthetic construct
RRTDSIS

SEQ ID NO: 145336 - protein, 7 aa, synthetic construct
RRTEGII

SEQ ID NO: 145337 - protein, 7 aa, synthetic construct
RRTHDEI

SEQ ID NO: 145338 - protein, 7 aa, synthetic construct
RRTTDEM

SEQ ID NO: 145339 - protein, 7 aa, synthetic construct
RRVDQEH

SEQ ID NO: 145340 - protein, 7 aa, synthetic construct
RRVDTNT

SEQ ID NO: 145341 - protein, 7 aa, synthetic construct
RRYETNE

SEQ ID NO: 145342 - protein, 7 aa, synthetic construct
RRYSDGD

SEQ ID NO: 145343 - protein, 7 aa, synthetic construct
RSADRMY

SEQ ID NO: 145344 - protein, 7 aa, synthetic construct
RSAEKVL

SEQ ID NO: 145345 - protein, 7 aa, synthetic construct
RSAEVFK

SEQ ID NO: 145346 - protein, 7 aa, synthetic construct
RSAGHSM

SEQ ID NO: 145347 - protein, 7 aa, synthetic construct
RSAGSHV

SEQ ID NO: 145348 - protein, 7 aa, synthetic construct
RSAGTNY

SEQ ID NO: 145349 - protein, 7 aa, synthetic construct
RSAKESY

SEQ ID NO: 145350 - protein, 7 aa, synthetic construct
RSAKGDQ

SEQ ID NO: 145351 - protein, 7 aa, synthetic construct
RSAKPEH

SEQ ID NO: 145352 - protein, 7 aa, synthetic construct
RSANTMY

SEQ ID NO: 145353 - protein, 7 aa, synthetic construct
RSAQHTT

SEQ ID NO: 145354 - protein, 7 aa, synthetic construct
RSAQNNL

SEQ ID NO: 145355 - protein, 7 aa, synthetic construct
RSAREMI

SEQ ID NO: 145356 - protein, 7 aa, synthetic construct
RSATADR

SEQ ID NO: 145357 - protein, 7 aa, synthetic construct
RSATLPY

SEQ ID NO: 145358 - protein, 7 aa, synthetic construct
RSAVGAF

SEQ ID NO: 145359 - protein, 7 aa, synthetic construct
RSDAQRV

SEQ ID NO: 145360 - protein, 7 aa, synthetic construct
RSDGVKY

SEQ ID NO: 145361 - protein, 7 aa, synthetic construct
RSDHIRN

SEQ ID NO: 145362 - protein, 7 aa, synthetic construct
RSDKHFP

SEQ ID NO: 145363 - protein, 7 aa, synthetic construct
RSDKMHV

SEQ ID NO: 145364 - protein, 7 aa, synthetic construct
RSDNKYF

SEQ ID NO: 145365 - protein, 7 aa, synthetic construct
RSDPKHF

SEQ ID NO: 145366 - protein, 7 aa, synthetic construct
RSDPMVR

SEQ ID NO: 145367 - protein, 7 aa, synthetic construct
RSDPNRN

SEQ ID NO: 145368 - protein, 7 aa, synthetic construct
RSDPTIK

SEQ ID NO: 145369 - protein, 7 aa, synthetic construct
RSDQRNV

SEQ ID NO: 145370 - protein, 7 aa, synthetic construct
RSDQTRP

SEQ ID NO: 145371 - protein, 7 aa, synthetic construct
RSDRANI

SEQ ID NO: 145372 - protein, 7 aa, synthetic construct
RSDRPFV

SEQ ID NO: 145373 - protein, 7 aa, synthetic construct
RSDSTGR

SEQ ID NO: 145374 - protein, 7 aa, synthetic construct
RSDVKVT

SEQ ID NO: 145375 - protein, 7 aa, synthetic construct
RSEHKFP

SEQ ID NO: 145376 - protein, 7 aa, synthetic construct
RSEHRGG

SEQ ID NO: 145377 - protein, 7 aa, synthetic construct
RSEHTRS

SEQ ID NO: 145378 - protein, 7 aa, synthetic construct
RSEKLMI

SEQ ID NO: 145379 - protein, 7 aa, synthetic construct
RSENFKS

SEQ ID NO: 145380 - protein, 7 aa, synthetic construct
RSEPLIK

SEQ ID NO: 145381 - protein, 7 aa, synthetic construct
RSEQSGR

SEQ ID NO: 145382 - protein, 7 aa, synthetic construct
RSEREIR

SEQ ID NO: 145383 - protein, 7 aa, synthetic construct
RSERGAN

SEQ ID NO: 145384 - protein, 7 aa, synthetic construct
RSESRTF

SEQ ID NO: 145385 - protein, 7 aa, synthetic construct
RSETKLN

SEQ ID NO: 145386 - protein, 7 aa, synthetic construct
RSFPKES

SEQ ID NO: 145387 - protein, 7 aa, synthetic construct
RSGDSGR

SEQ ID NO: 145388 - protein, 7 aa, synthetic construct
RSGDSSK

SEQ ID NO: 145389 - protein, 7 aa, synthetic construct
RSGEGVR

SEQ ID NO: 145390 - protein, 7 aa, synthetic construct
RSGEHRP

SEQ ID NO: 145391 - protein, 7 aa, synthetic construct
RSGERLV

SEQ ID NO: 145392 - protein, 7 aa, synthetic construct
RSGHHPA

SEQ ID NO: 145393 - protein, 7 aa, synthetic construct
RSGHLVS

SEQ ID NO: 145394 - protein, 7 aa, synthetic construct
RSGHPMM

SEQ ID NO: 145395 - protein, 7 aa, synthetic construct
RSGHTMI

SEQ ID NO: 145396 - protein, 7 aa, synthetic construct
RSGHVLV

SEQ ID NO: 145397 - protein, 7 aa, synthetic construct
RSGHVNP

SEQ ID NO: 145398 - protein, 7 aa, synthetic construct
RSGIQPI

SEQ ID NO: 145399 - protein, 7 aa, synthetic construct
RSGKADS

SEQ ID NO: 145400 - protein, 7 aa, synthetic construct
RSGKNES

SEQ ID NO: 145401 - protein, 7 aa, synthetic construct
RSGLRET

SEQ ID NO: 145402 - protein, 7 aa, synthetic construct
RSGMHSA

SEQ ID NO: 145403 - protein, 7 aa, synthetic construct
RSGMQGF

SEQ ID NO: 145404 - protein, 7 aa, synthetic construct
RSGMSEK

SEQ ID NO: 145405 - protein, 7 aa, synthetic construct
RSGNKDQ

SEQ ID NO: 145406 - protein, 7 aa, synthetic construct
RSGQAER

SEQ ID NO: 145407 - protein, 7 aa, synthetic construct
RSGQESR

SEQ ID NO: 145408 - protein, 7 aa, synthetic construct
RSGQNDR

SEQ ID NO: 145409 - protein, 7 aa, synthetic construct
RSGRELN

SEQ ID NO: 145410 - protein, 7 aa, synthetic construct
RSGTPMY

SEQ ID NO: 145411 - protein, 7 aa, synthetic construct
RSGTREV

SEQ ID NO: 145412 - protein, 7 aa, synthetic construct
RSHAGTQ

SEQ ID NO: 145413 - protein, 7 aa, synthetic construct
RSHAISG

SEQ ID NO: 145414 - protein, 7 aa, synthetic construct
RSHANVL

SEQ ID NO: 145415 - protein, 7 aa, synthetic construct
RSHASQS

SEQ ID NO: 145416 - protein, 7 aa, synthetic construct
RSHAVPS

SEQ ID NO: 145417 - protein, 7 aa, synthetic construct
RSHERTP

SEQ ID NO: 145418 - protein, 7 aa, synthetic construct
RSHFHSE

SEQ ID NO: 145419 - protein, 7 aa, synthetic construct
RSHGNTN

SEQ ID NO: 145420 - protein, 7 aa, synthetic construct
RSHGVSN

SEQ ID NO: 145421 - protein, 7 aa, synthetic construct
RSHGVTP

SEQ ID NO: 145422 - protein, 7 aa, synthetic construct
RSHIGNV

SEQ ID NO: 145423 - protein, 7 aa, synthetic construct
RSHIVQA

SEQ ID NO: 145424 - protein, 7 aa, synthetic construct
RSHKELS

SEQ ID NO: 145425 - protein, 7 aa, synthetic construct
RSHLNKE

SEQ ID NO: 145426 - protein, 7 aa, synthetic construct
RSHNAAS

SEQ ID NO: 145427 - protein, 7 aa, synthetic construct
RSHNQGI

SEQ ID NO: 145428 - protein, 7 aa, synthetic construct
RSHPAAN

SEQ ID NO: 145429 - protein, 7 aa, synthetic construct
RSHPPIT

SEQ ID NO: 145430 - protein, 7 aa, synthetic construct
RSHPTAL

SEQ ID NO: 145431 - protein, 7 aa, synthetic construct
RSHPVPV

SEQ ID NO: 145432 - protein, 7 aa, synthetic construct
RSHQPAS

SEQ ID NO: 145433 - protein, 7 aa, synthetic construct
RSHQSIV

SEQ ID NO: 145434 - protein, 7 aa, synthetic construct
RSHQTQN

SEQ ID NO: 145435 - protein, 7 aa, synthetic construct
RSHSFQA

SEQ ID NO: 145436 - protein, 7 aa, synthetic construct
RSHTGPQ

SEQ ID NO: 145437 - protein, 7 aa, synthetic construct
RSHTISN

SEQ ID NO: 145438 - protein, 7 aa, synthetic construct
RSHTQNN

SEQ ID NO: 145439 - protein, 7 aa, synthetic construct
RSHVMGG

SEQ ID NO: 145440 - protein, 7 aa, synthetic construct
RSHVMNA

SEQ ID NO: 145441 - protein, 7 aa, synthetic construct
RSHVVSP

SEQ ID NO: 145442 - protein, 7 aa, synthetic construct
RSIGTHI

SEQ ID NO: 145443 - protein, 7 aa, synthetic construct
RSIKDAL

SEQ ID NO: 145444 - protein, 7 aa, synthetic construct
RSINNGH

SEQ ID NO: 145445 - protein, 7 aa, synthetic construct
RSINNTQ

SEQ ID NO: 145446 - protein, 7 aa, synthetic construct
RSIREVA

SEQ ID NO: 145447 - protein, 7 aa, synthetic construct
RSKDSLQ

SEQ ID NO: 145448 - protein, 7 aa, synthetic construct
RSKEIGQ

SEQ ID NO: 145449 - protein, 7 aa, synthetic construct
RSKEKEP

SEQ ID NO: 145450 - protein, 7 aa, synthetic construct
RSKEQTT

SEQ ID NO: 145451 - protein, 7 aa, synthetic construct
RSKESLY

SEQ ID NO: 145452 - protein, 7 aa, synthetic construct
RSKETTF

SEQ ID NO: 145453 - protein, 7 aa, synthetic construct
RSKEVSL

SEQ ID NO: 145454 - protein, 7 aa, synthetic construct
RSKEVTM

SEQ ID NO: 145455 - protein, 7 aa, synthetic construct
RSKMDII

SEQ ID NO: 145456 - protein, 7 aa, synthetic construct
RSKMDQL

SEQ ID NO: 145457 - protein, 7 aa, synthetic construct
RSKPDNQ

SEQ ID NO: 145458 - protein, 7 aa, synthetic construct
RSKPYVE

SEQ ID NO: 145459 - protein, 7 aa, synthetic construct
RSKQAQD

SEQ ID NO: 145460 - protein, 7 aa, synthetic construct
RSKQDSL

SEQ ID NO: 145461 - protein, 7 aa, synthetic construct
RSKSDNF

SEQ ID NO: 145462 - protein, 7 aa, synthetic construct
RSKSPTE

SEQ ID NO: 145463 - protein, 7 aa, synthetic construct
RSKVVPD

SEQ ID NO: 145464 - protein, 7 aa, synthetic construct
RSLAHNP

SEQ ID NO: 145465 - protein, 7 aa, synthetic construct
RSLERSI

SEQ ID NO: 145466 - protein, 7 aa, synthetic construct
RSLGGEK

SEQ ID NO: 145467 - protein, 7 aa, synthetic construct
RSLKDIV

SEQ ID NO: 145468 - protein, 7 aa, synthetic construct
RSLKDML

SEQ ID NO: 145469 - protein, 7 aa, synthetic construct
RSLNERN

SEQ ID NO: 145470 - protein, 7 aa, synthetic construct
RSLQNRD

SEQ ID NO: 145471 - protein, 7 aa, synthetic construct
RSLSQTY

SEQ ID NO: 145472 - protein, 7 aa, synthetic construct
RSMASVM

SEQ ID NO: 145473 - protein, 7 aa, synthetic construct
RSMDKMI

SEQ ID NO: 145474 - protein, 7 aa, synthetic construct
RSMDRSF

SEQ ID NO: 145475 - protein, 7 aa, synthetic construct
RSMEPFG

SEQ ID NO: 145476 - protein, 7 aa, synthetic construct
RSMGFPQ

SEQ ID NO: 145477 - protein, 7 aa, synthetic construct
RSMHPVP

SEQ ID NO: 145478 - protein, 7 aa, synthetic construct
RSMHSSS

SEQ ID NO: 145479 - protein, 7 aa, synthetic construct
RSMNQGV

SEQ ID NO: 145480 - protein, 7 aa, synthetic construct
RSMNTST

SEQ ID NO: 145481 - protein, 7 aa, synthetic construct
RSMPNMS

SEQ ID NO: 145482 - protein, 7 aa, synthetic construct
RSMRPDH

SEQ ID NO: 145483 - protein, 7 aa, synthetic construct
RSNAEKI

SEQ ID NO: 145484 - protein, 7 aa, synthetic construct
RSNALKD

SEQ ID NO: 145485 - protein, 7 aa, synthetic construct
RSNDLAK

SEQ ID NO: 145486 - protein, 7 aa, synthetic construct
RSNEVRN

SEQ ID NO: 145487 - protein, 7 aa, synthetic construct
RSNFKES

SEQ ID NO: 145488 - protein, 7 aa, synthetic construct
RSNIGQF

SEQ ID NO: 145489 - protein, 7 aa, synthetic construct
RSNINEK

SEQ ID NO: 145490 - protein, 7 aa, synthetic construct
RSNITEK

SEQ ID NO: 145491 - protein, 7 aa, synthetic construct
RSNKEMI

SEQ ID NO: 145492 - protein, 7 aa, synthetic construct
RSNKPFE

SEQ ID NO: 145493 - protein, 7 aa, synthetic construct
RSNMASY

SEQ ID NO: 145494 - protein, 7 aa, synthetic construct
RSNNPGF

SEQ ID NO: 145495 - protein, 7 aa, synthetic construct
RSNPDKF

SEQ ID NO: 145496 - protein, 7 aa, synthetic construct
RSNPMPM

SEQ ID NO: 145497 - protein, 7 aa, synthetic construct
RSNPQYV

SEQ ID NO: 145498 - protein, 7 aa, synthetic construct
RSNQWGP

SEQ ID NO: 145499 - protein, 7 aa, synthetic construct
RSNREMT

SEQ ID NO: 145500 - protein, 7 aa, synthetic construct
RSNTADR

SEQ ID NO: 145501 - protein, 7 aa, synthetic construct
RSNTALH

SEQ ID NO: 145502 - protein, 7 aa, synthetic construct
RSNVDAK

SEQ ID NO: 145503 - protein, 7 aa, synthetic construct
RSNYSAL

SEQ ID NO: 145504 - protein, 7 aa, synthetic construct
RSPAERQ

SEQ ID NO: 145505 - protein, 7 aa, synthetic construct
RSPAHNQ

SEQ ID NO: 145506 - protein, 7 aa, synthetic construct
RSPESNR

SEQ ID NO: 145507 - protein, 7 aa, synthetic construct
RSPGLNH

SEQ ID NO: 145508 - protein, 7 aa, synthetic construct
RSPGYSV

SEQ ID NO: 145509 - protein, 7 aa, synthetic construct
RSPHPAM

SEQ ID NO: 145510 - protein, 7 aa, synthetic construct
RSPHVPI

SEQ ID NO: 145511 - protein, 7 aa, synthetic construct
RSPMSNI

SEQ ID NO: 145512 - protein, 7 aa, synthetic construct
RSPNDPR

SEQ ID NO: 145513 - protein, 7 aa, synthetic construct
RSPPLGN

SEQ ID NO: 145514 - protein, 7 aa, synthetic construct
RSPPPIH

SEQ ID NO: 145515 - protein, 7 aa, synthetic construct
RSPQSFA

SEQ ID NO: 145516 - protein, 7 aa, synthetic construct
RSPRDAN

SEQ ID NO: 145517 - protein, 7 aa, synthetic construct
RSPREVI

SEQ ID NO: 145518 - protein, 7 aa, synthetic construct
RSPSQVF

SEQ ID NO: 145519 - protein, 7 aa, synthetic construct
RSPTGHL

SEQ ID NO: 145520 - protein, 7 aa, synthetic construct
RSPVAIM

SEQ ID NO: 145521 - protein, 7 aa, synthetic construct
RSQAQQT

SEQ ID NO: 145522 - protein, 7 aa, synthetic construct
RSQAVNL

SEQ ID NO: 145523 - protein, 7 aa, synthetic construct
RSQDLAK

SEQ ID NO: 145524 - protein, 7 aa, synthetic construct
RSQDQNK

SEQ ID NO: 145525 - protein, 7 aa, synthetic construct
RSQDQQK

SEQ ID NO: 145526 - protein, 7 aa, synthetic construct
RSQDSKM

SEQ ID NO: 145527 - protein, 7 aa, synthetic construct
RSQGDVK

SEQ ID NO: 145528 - protein, 7 aa, synthetic construct
RSQGIDK

SEQ ID NO: 145529 - protein, 7 aa, synthetic construct
RSQGPNV

SEQ ID NO: 145530 - protein, 7 aa, synthetic construct
RSQGQSQ

SEQ ID NO: 145531 - protein, 7 aa, synthetic construct
RSQGTGW

SEQ ID NO: 145532 - protein, 7 aa, synthetic construct
RSQHQVL

SEQ ID NO: 145533 - protein, 7 aa, synthetic construct
RSQKEYQ

SEQ ID NO: 145534 - protein, 7 aa, synthetic construct
RSQKPFD

SEQ ID NO: 145535 - protein, 7 aa, synthetic construct
RSQLAGL

SEQ ID NO: 145536 - protein, 7 aa, synthetic construct
RSQLAQT

SEQ ID NO: 145537 - protein, 7 aa, synthetic construct
RSQMNSL

SEQ ID NO: 145538 - protein, 7 aa, synthetic construct
RSQMPNL

SEQ ID NO: 145539 - protein, 7 aa, synthetic construct
RSQNALQ

SEQ ID NO: 145540 - protein, 7 aa, synthetic construct
RSQNASI

SEQ ID NO: 145541 - protein, 7 aa, synthetic construct
RSQNIST

SEQ ID NO: 145542 - protein, 7 aa, synthetic construct
RSQNVMI

SEQ ID NO: 145543 - protein, 7 aa, synthetic construct
RSQPHPN

SEQ ID NO: 145544 - protein, 7 aa, synthetic construct
RSQPTMY

SEQ ID NO: 145545 - protein, 7 aa, synthetic construct
RSQPVGL

SEQ ID NO: 145546 - protein, 7 aa, synthetic construct
RSQPVHA

SEQ ID NO: 145547 - protein, 7 aa, synthetic construct
RSQPVHP

SEQ ID NO: 145548 - protein, 7 aa, synthetic construct
RSQQGVQ

SEQ ID NO: 145549 - protein, 7 aa, synthetic construct
RSQQPAL

SEQ ID NO: 145550 - protein, 7 aa, synthetic construct
RSQSELK

SEQ ID NO: 145551 - protein, 7 aa, synthetic construct
RSQSIPF

SEQ ID NO: 145552 - protein, 7 aa, synthetic construct
RSQSVLM

SEQ ID NO: 145553 - protein, 7 aa, synthetic construct
RSQTAPF

SEQ ID NO: 145554 - protein, 7 aa, synthetic construct
RSQTTEK

SEQ ID NO: 145555 - protein, 7 aa, synthetic construct
RSQVAGY

SEQ ID NO: 145556 - protein, 7 aa, synthetic construct
RSQVHQM

SEQ ID NO: 145557 - protein, 7 aa, synthetic construct
RSQVKDY

SEQ ID NO: 145558 - protein, 7 aa, synthetic construct
RSQVSNF

SEQ ID NO: 145559 - protein, 7 aa, synthetic construct
RSQYPVT

SEQ ID NO: 145560 - protein, 7 aa, synthetic construct
RSRDNEN

SEQ ID NO: 145561 - protein, 7 aa, synthetic construct
RSREVMP

SEQ ID NO: 145562 - protein, 7 aa, synthetic construct
RSRIETG

SEQ ID NO: 145563 - protein, 7 aa, synthetic construct
RSRVEQP

SEQ ID NO: 145564 - protein, 7 aa, synthetic construct
RSSGAHN

SEQ ID NO: 145565 - protein, 7 aa, synthetic construct
RSSGHVT

SEQ ID NO: 145566 - protein, 7 aa, synthetic construct
RSSHNTV

SEQ ID NO: 145567 - protein, 7 aa, synthetic construct
RSSHQPV

SEQ ID NO: 145568 - protein, 7 aa, synthetic construct
RSSKLET

SEQ ID NO: 145569 - protein, 7 aa, synthetic construct
RSSPGQY

SEQ ID NO: 145570 - protein, 7 aa, synthetic construct
RSSPHQI

SEQ ID NO: 145571 - protein, 7 aa, synthetic construct
RSSQAML

SEQ ID NO: 145572 - protein, 7 aa, synthetic construct
RSSQVRD

SEQ ID NO: 145573 - protein, 7 aa, synthetic construct
RSSSLPY

SEQ ID NO: 145574 - protein, 7 aa, synthetic construct
RSSSYGM

SEQ ID NO: 145575 - protein, 7 aa, synthetic construct
RSSTWLE

SEQ ID NO: 145576 - protein, 7 aa, synthetic construct
RSSVDNK

SEQ ID NO: 145577 - protein, 7 aa, synthetic construct
RSTARDM

SEQ ID NO: 145578 - protein, 7 aa, synthetic construct
RSTAVGY

SEQ ID NO: 145579 - protein, 7 aa, synthetic construct
RSTDHRA

SEQ ID NO: 145580 - protein, 7 aa, synthetic construct
RSTELNK

SEQ ID NO: 145581 - protein, 7 aa, synthetic construct
RSTERQP

SEQ ID NO: 145582 - protein, 7 aa, synthetic construct
RSTETGR

SEQ ID NO: 145583 - protein, 7 aa, synthetic construct
RSTGGGF

SEQ ID NO: 145584 - protein, 7 aa, synthetic construct
RSTGGYI

SEQ ID NO: 145585 - protein, 7 aa, synthetic construct
RSTGPDR

SEQ ID NO: 145586 - protein, 7 aa, synthetic construct
RSTHAMV

SEQ ID NO: 145587 - protein, 7 aa, synthetic construct
RSTHTSS

SEQ ID NO: 145588 - protein, 7 aa, synthetic construct
RSTIPVS

SEQ ID NO: 145589 - protein, 7 aa, synthetic construct
RSTMRDS

SEQ ID NO: 145590 - protein, 7 aa, synthetic construct
RSTNEKY

SEQ ID NO: 145591 - protein, 7 aa, synthetic construct
RSTPNHA

SEQ ID NO: 145592 - protein, 7 aa, synthetic construct
RSTPNNH

SEQ ID NO: 145593 - protein, 7 aa, synthetic construct
RSTPQKD

SEQ ID NO: 145594 - protein, 7 aa, synthetic construct
RSTPTSH

SEQ ID NO: 145595 - protein, 7 aa, synthetic construct
RSTQHMH

SEQ ID NO: 145596 - protein, 7 aa, synthetic construct
RSTQLTY

SEQ ID NO: 145597 - protein, 7 aa, synthetic construct
RSTQSGN

SEQ ID NO: 145598 - protein, 7 aa, synthetic construct
RSTRQDA

SEQ ID NO: 145599 - protein, 7 aa, synthetic construct
RSTSEGR

SEQ ID NO: 145600 - protein, 7 aa, synthetic construct
RSTTDRQ

SEQ ID NO: 145601 - protein, 7 aa, synthetic construct
RSTTHGI

SEQ ID NO: 145602 - protein, 7 aa, synthetic construct
RSTTVDK

SEQ ID NO: 145603 - protein, 7 aa, synthetic construct
RSVAASI

SEQ ID NO: 145604 - protein, 7 aa, synthetic construct
RSVAHSN

SEQ ID NO: 145605 - protein, 7 aa, synthetic construct
RSVEIVR

SEQ ID NO: 145606 - protein, 7 aa, synthetic construct
RSVEVKW

SEQ ID NO: 145607 - protein, 7 aa, synthetic construct
RSVGHSS

SEQ ID NO: 145608 - protein, 7 aa, synthetic construct
RSVGHVS

SEQ ID NO: 145609 - protein, 7 aa, synthetic construct
RSVGVTH

SEQ ID NO: 145610 - protein, 7 aa, synthetic construct
RSVKAGD

SEQ ID NO: 145611 - protein, 7 aa, synthetic construct
RSVKDIQ

SEQ ID NO: 145612 - protein, 7 aa, synthetic construct
RSVPMNA

SEQ ID NO: 145613 - protein, 7 aa, synthetic construct
RSVPQDR

SEQ ID NO: 145614 - protein, 7 aa, synthetic construct
RSVPTGH

SEQ ID NO: 145615 - protein, 7 aa, synthetic construct
RSVPTSL

SEQ ID NO: 145616 - protein, 7 aa, synthetic construct
RSVPVNH

SEQ ID NO: 145617 - protein, 7 aa, synthetic construct
RSVQTHQ

SEQ ID NO: 145618 - protein, 7 aa, synthetic construct
RSVQVSM

SEQ ID NO: 145619 - protein, 7 aa, synthetic construct
RSVREMI

SEQ ID NO: 145620 - protein, 7 aa, synthetic construct
RSVSADR

SEQ ID NO: 145621 - protein, 7 aa, synthetic construct
RSVSAMI

SEQ ID NO: 145622 - protein, 7 aa, synthetic construct
RSVSFHA

SEQ ID NO: 145623 - protein, 7 aa, synthetic construct
RSVTDGR

SEQ ID NO: 145624 - protein, 7 aa, synthetic construct
RSVTGSH

SEQ ID NO: 145625 - protein, 7 aa, synthetic construct
RSYGPAA

SEQ ID NO: 145626 - protein, 7 aa, synthetic construct
RSYPATP

SEQ ID NO: 145627 - protein, 7 aa, synthetic construct
RSYPNNA

SEQ ID NO: 145628 - protein, 7 aa, synthetic construct
RSYQPLD

SEQ ID NO: 145629 - protein, 7 aa, synthetic construct
RSYTDQH

SEQ ID NO: 145630 - protein, 7 aa, synthetic construct
RTAAGEK

SEQ ID NO: 145631 - protein, 7 aa, synthetic construct
RTAANYN

SEQ ID NO: 145632 - protein, 7 aa, synthetic construct
RTADKHS

SEQ ID NO: 145633 - protein, 7 aa, synthetic construct
RTADMMR

SEQ ID NO: 145634 - protein, 7 aa, synthetic construct
RTADYAK

SEQ ID NO: 145635 - protein, 7 aa, synthetic construct
RTAGGYS

SEQ ID NO: 145636 - protein, 7 aa, synthetic construct
RTAGIGY

SEQ ID NO: 145637 - protein, 7 aa, synthetic construct
RTAHALS

SEQ ID NO: 145638 - protein, 7 aa, synthetic construct
RTAHHAP

SEQ ID NO: 145639 - protein, 7 aa, synthetic construct
RTAHPSV

SEQ ID NO: 145640 - protein, 7 aa, synthetic construct
RTAHSMA

SEQ ID NO: 145641 - protein, 7 aa, synthetic construct
RTAHTAL

SEQ ID NO: 145642 - protein, 7 aa, synthetic construct
RTAITHS

SEQ ID NO: 145643 - protein, 7 aa, synthetic construct
RTANEKQ

SEQ ID NO: 145644 - protein, 7 aa, synthetic construct
RTANLAY

SEQ ID NO: 145645 - protein, 7 aa, synthetic construct
RTAPADR

SEQ ID NO: 145646 - protein, 7 aa, synthetic construct
RTAPDSR

SEQ ID NO: 145647 - protein, 7 aa, synthetic construct
RTAQDQR

SEQ ID NO: 145648 - protein, 7 aa, synthetic construct
RTAQKEI

SEQ ID NO: 145649 - protein, 7 aa, synthetic construct
RTAQVDK

SEQ ID NO: 145650 - protein, 7 aa, synthetic construct
RTARGDV

SEQ ID NO: 145651 - protein, 7 aa, synthetic construct
RTASDAR

SEQ ID NO: 145652 - protein, 7 aa, synthetic construct
RTASREM

SEQ ID NO: 145653 - protein, 7 aa, synthetic construct
RTAVIAA

SEQ ID NO: 145654 - protein, 7 aa, synthetic construct
RTAVRET

SEQ ID NO: 145655 - protein, 7 aa, synthetic construct
RTDARQN

SEQ ID NO: 145656 - protein, 7 aa, synthetic construct
RTDGDKR

SEQ ID NO: 145657 - protein, 7 aa, synthetic construct
RTDGYKI

SEQ ID NO: 145658 - protein, 7 aa, synthetic construct
RTDKGPF

SEQ ID NO: 145659 - protein, 7 aa, synthetic construct
RTDKNIY

SEQ ID NO: 145660 - protein, 7 aa, synthetic construct
RTDKPYN

SEQ ID NO: 145661 - protein, 7 aa, synthetic construct
RTDLISK

SEQ ID NO: 145662 - protein, 7 aa, synthetic construct
RTDRATL

SEQ ID NO: 145663 - protein, 7 aa, synthetic construct
RTDRGFP

SEQ ID NO: 145664 - protein, 7 aa, synthetic construct
RTDRMAI

SEQ ID NO: 145665 - protein, 7 aa, synthetic construct
RTDRQTS

SEQ ID NO: 145666 - protein, 7 aa, synthetic construct
RTDRQVL

SEQ ID NO: 145667 - protein, 7 aa, synthetic construct
RTDRVNI

SEQ ID NO: 145668 - protein, 7 aa, synthetic construct
RTDSMKN

SEQ ID NO: 145669 - protein, 7 aa, synthetic construct
RTDTANR

SEQ ID NO: 145670 - protein, 7 aa, synthetic construct
RTDVGLR

SEQ ID NO: 145671 - protein, 7 aa, synthetic construct
RTEGIKQ

SEQ ID NO: 145672 - protein, 7 aa, synthetic construct
RTEIRAV

SEQ ID NO: 145673 - protein, 7 aa, synthetic construct
RTEKPNI

SEQ ID NO: 145674 - protein, 7 aa, synthetic construct
RTEKPSL

SEQ ID NO: 145675 - protein, 7 aa, synthetic construct
RTEKSQL

SEQ ID NO: 145676 - protein, 7 aa, synthetic construct
RTELQRA

SEQ ID NO: 145677 - protein, 7 aa, synthetic construct
RTENQTR

SEQ ID NO: 145678 - protein, 7 aa, synthetic construct
RTERNLV

SEQ ID NO: 145679 - protein, 7 aa, synthetic construct
RTERPPL

SEQ ID NO: 145680 - protein, 7 aa, synthetic construct
RTERTQL

SEQ ID NO: 145681 - protein, 7 aa, synthetic construct
RTERVQV

SEQ ID NO: 145682 - protein, 7 aa, synthetic construct
RTETGRS

SEQ ID NO: 145683 - protein, 7 aa, synthetic construct
RTETRQN

SEQ ID NO: 145684 - protein, 7 aa, synthetic construct
RTEVKQV

SEQ ID NO: 145685 - protein, 7 aa, synthetic construct
RTFKTES

SEQ ID NO: 145686 - protein, 7 aa, synthetic construct
RTFQKET

SEQ ID NO: 145687 - protein, 7 aa, synthetic construct
RTGDGRP

SEQ ID NO: 145688 - protein, 7 aa, synthetic construct
RTGDINK

SEQ ID NO: 145689 - protein, 7 aa, synthetic construct
RTGDMVR

SEQ ID NO: 145690 - protein, 7 aa, synthetic construct
RTGDVAR

SEQ ID NO: 145691 - protein, 7 aa, synthetic construct
RTGEGKQ

SEQ ID NO: 145692 - protein, 7 aa, synthetic construct
RTGERSI

SEQ ID NO: 145693 - protein, 7 aa, synthetic construct
RTGERYV

SEQ ID NO: 145694 - protein, 7 aa, synthetic construct
RTGGNMY

SEQ ID NO: 145695 - protein, 7 aa, synthetic construct
RTGGVPY

SEQ ID NO: 145696 - protein, 7 aa, synthetic construct
RTGHDVK

SEQ ID NO: 145697 - protein, 7 aa, synthetic construct
RTGMKYD

SEQ ID NO: 145698 - protein, 7 aa, synthetic construct
RTGMNDR

SEQ ID NO: 145699 - protein, 7 aa, synthetic construct
RTGNLDK

SEQ ID NO: 145700 - protein, 7 aa, synthetic construct
RTGPDRV

SEQ ID NO: 145701 - protein, 7 aa, synthetic construct
RTGQDQK

SEQ ID NO: 145702 - protein, 7 aa, synthetic construct
RTGQYKD

SEQ ID NO: 145703 - protein, 7 aa, synthetic construct
RTGRDAP

SEQ ID NO: 145704 - protein, 7 aa, synthetic construct
RTGSMHT

SEQ ID NO: 145705 - protein, 7 aa, synthetic construct
RTGTHNT

SEQ ID NO: 145706 - protein, 7 aa, synthetic construct
RTGTKYD

SEQ ID NO: 145707 - protein, 7 aa, synthetic construct
RTGVGDK

SEQ ID NO: 145708 - protein, 7 aa, synthetic construct
RTGVPGY

SEQ ID NO: 145709 - protein, 7 aa, synthetic construct
RTGVTDK

SEQ ID NO: 145710 - protein, 7 aa, synthetic construct
RTHALRE

SEQ ID NO: 145711 - protein, 7 aa, synthetic construct
RTHAPPV

SEQ ID NO: 145712 - protein, 7 aa, synthetic construct
RTHAREP

SEQ ID NO: 145713 - protein, 7 aa, synthetic construct
RTHDKPT

SEQ ID NO: 145714 - protein, 7 aa, synthetic construct
RTHERQV

SEQ ID NO: 145715 - protein, 7 aa, synthetic construct
RTHGGMP

SEQ ID NO: 145716 - protein, 7 aa, synthetic construct
RTHGSMS

SEQ ID NO: 145717 - protein, 7 aa, synthetic construct
RTHGTLT

SEQ ID NO: 145718 - protein, 7 aa, synthetic construct
RTHGTMT

SEQ ID NO: 145719 - protein, 7 aa, synthetic construct
RTHGTNV

SEQ ID NO: 145720 - protein, 7 aa, synthetic construct
RTHGVVM

SEQ ID NO: 145721 - protein, 7 aa, synthetic construct
RTHKELI

SEQ ID NO: 145722 - protein, 7 aa, synthetic construct
RTHMNNV

SEQ ID NO: 145723 - protein, 7 aa, synthetic construct
RTHPAAV

SEQ ID NO: 145724 - protein, 7 aa, synthetic construct
RTHQLPV

SEQ ID NO: 145725 - protein, 7 aa, synthetic construct
RTHQQNT

SEQ ID NO: 145726 - protein, 7 aa, synthetic construct
RTHSNMP

SEQ ID NO: 145727 - protein, 7 aa, synthetic construct
RTHTKDI

SEQ ID NO: 145728 - protein, 7 aa, synthetic construct
RTHTSPS

SEQ ID NO: 145729 - protein, 7 aa, synthetic construct
RTHVTRE

SEQ ID NO: 145730 - protein, 7 aa, synthetic construct
RTIANIP

SEQ ID NO: 145731 - protein, 7 aa, synthetic construct
RTIAQGH

SEQ ID NO: 145732 - protein, 7 aa, synthetic construct
RTIHQSA

SEQ ID NO: 145733 - protein, 7 aa, synthetic construct
RTISAYA

SEQ ID NO: 145734 - protein, 7 aa, synthetic construct
RTITVEK

SEQ ID NO: 145735 - protein, 7 aa, synthetic construct
RTKAGDT

SEQ ID NO: 145736 - protein, 7 aa, synthetic construct
RTKDAVY

SEQ ID NO: 145737 - protein, 7 aa, synthetic construct
RTKDIQF

SEQ ID NO: 145738 - protein, 7 aa, synthetic construct
RTKDMHT

SEQ ID NO: 145739 - protein, 7 aa, synthetic construct
RTKDVGW

SEQ ID NO: 145740 - protein, 7 aa, synthetic construct
RTKEDKS

SEQ ID NO: 145741 - protein, 7 aa, synthetic construct
RTKLPDA

SEQ ID NO: 145742 - protein, 7 aa, synthetic construct
RTKMPEF

SEQ ID NO: 145743 - protein, 7 aa, synthetic construct
RTKPDER

SEQ ID NO: 145744 - protein, 7 aa, synthetic construct
RTKSPGE

SEQ ID NO: 145745 - protein, 7 aa, synthetic construct
RTKSPIE

SEQ ID NO: 145746 - protein, 7 aa, synthetic construct
RTKVGDL

SEQ ID NO: 145747 - protein, 7 aa, synthetic construct
RTLGEKY

SEQ ID NO: 145748 - protein, 7 aa, synthetic construct
RTLSDSR

SEQ ID NO: 145749 - protein, 7 aa, synthetic construct
RTLSHTT

SEQ ID NO: 145750 - protein, 7 aa, synthetic construct
RTLSPGI

SEQ ID NO: 145751 - protein, 7 aa, synthetic construct
RTMERTV

SEQ ID NO: 145752 - protein, 7 aa, synthetic construct
RTMGEQK

SEQ ID NO: 145753 - protein, 7 aa, synthetic construct
RTMKDQY

SEQ ID NO: 145754 - protein, 7 aa, synthetic construct
RTMPGSL

SEQ ID NO: 145755 - protein, 7 aa, synthetic construct
RTMPSHP

SEQ ID NO: 145756 - protein, 7 aa, synthetic construct
RTMPVER

SEQ ID NO: 145757 - protein, 7 aa, synthetic construct
RTNAMDK

SEQ ID NO: 145758 - protein, 7 aa, synthetic construct
RTNDIIK

SEQ ID NO: 145759 - protein, 7 aa, synthetic construct
RTNDQRM

SEQ ID NO: 145760 - protein, 7 aa, synthetic construct
RTNGAAH

SEQ ID NO: 145761 - protein, 7 aa, synthetic construct
RTNGTHQ

SEQ ID NO: 145762 - protein, 7 aa, synthetic construct
RTNHGFS

SEQ ID NO: 145763 - protein, 7 aa, synthetic construct
RTNKADF

SEQ ID NO: 145764 - protein, 7 aa, synthetic construct
RTNKDDR

SEQ ID NO: 145765 - protein, 7 aa, synthetic construct
RTNLDRL

SEQ ID NO: 145766 - protein, 7 aa, synthetic construct
RTNMTPL

SEQ ID NO: 145767 - protein, 7 aa, synthetic construct
RTNNNQY

SEQ ID NO: 145768 - protein, 7 aa, synthetic construct
RTNNNVF

SEQ ID NO: 145769 - protein, 7 aa, synthetic construct
RTNPEKY

SEQ ID NO: 145770 - protein, 7 aa, synthetic construct
RTNPLPP

SEQ ID NO: 145771 - protein, 7 aa, synthetic construct
RTNQHGM

SEQ ID NO: 145772 - protein, 7 aa, synthetic construct
RTNQPGH

SEQ ID NO: 145773 - protein, 7 aa, synthetic construct
RTNRTIE

SEQ ID NO: 145774 - protein, 7 aa, synthetic construct
RTNSNLY

SEQ ID NO: 145775 - protein, 7 aa, synthetic construct
RTNTESR

SEQ ID NO: 145776 - protein, 7 aa, synthetic construct
RTNTGDK

SEQ ID NO: 145777 - protein, 7 aa, synthetic construct
RTNTGVH

SEQ ID NO: 145778 - protein, 7 aa, synthetic construct
RTNTNQY

SEQ ID NO: 145779 - protein, 7 aa, synthetic construct
RTNTNVY

SEQ ID NO: 145780 - protein, 7 aa, synthetic construct
RTNTVNY

SEQ ID NO: 145781 - protein, 7 aa, synthetic construct
RTNVHPP

SEQ ID NO: 145782 - protein, 7 aa, synthetic construct
RTPARDY

SEQ ID NO: 145783 - protein, 7 aa, synthetic construct
RTPETRS

SEQ ID NO: 145784 - protein, 7 aa, synthetic construct
RTPGPMH

SEQ ID NO: 145785 - protein, 7 aa, synthetic construct
RTPGYTA

SEQ ID NO: 145786 - protein, 7 aa, synthetic construct
RTPHNVM

SEQ ID NO: 145787 - protein, 7 aa, synthetic construct
RTPHQPQ

SEQ ID NO: 145788 - protein, 7 aa, synthetic construct
RTPHSPM

SEQ ID NO: 145789 - protein, 7 aa, synthetic construct
RTPIHSS

SEQ ID NO: 145790 - protein, 7 aa, synthetic construct
RTPLNLA

SEQ ID NO: 145791 - protein, 7 aa, synthetic construct
RTPNPQF

SEQ ID NO: 145792 - protein, 7 aa, synthetic construct
RTPPAQY

SEQ ID NO: 145793 - protein, 7 aa, synthetic construct
RTPPGIS

SEQ ID NO: 145794 - protein, 7 aa, synthetic construct
RTPPTQF

SEQ ID NO: 145795 - protein, 7 aa, synthetic construct
RTPQAIM

SEQ ID NO: 145796 - protein, 7 aa, synthetic construct
RTPQEVR

SEQ ID NO: 145797 - protein, 7 aa, synthetic construct
RTPQVVL

SEQ ID NO: 145798 - protein, 7 aa, synthetic construct
RTPRDQN

SEQ ID NO: 145799 - protein, 7 aa, synthetic construct
RTPRGDF

SEQ ID NO: 145800 - protein, 7 aa, synthetic construct
RTPSEGR

SEQ ID NO: 145801 - protein, 7 aa, synthetic construct
RTPSMQF

SEQ ID NO: 145802 - protein, 7 aa, synthetic construct
RTPTDRL

SEQ ID NO: 145803 - protein, 7 aa, synthetic construct
RTQDPRN

SEQ ID NO: 145804 - protein, 7 aa, synthetic construct
RTQERTA

SEQ ID NO: 145805 - protein, 7 aa, synthetic construct
RTQGHKD

SEQ ID NO: 145806 - protein, 7 aa, synthetic construct
RTQGSAQ

SEQ ID NO: 145807 - protein, 7 aa, synthetic construct
RTQHFPQ

SEQ ID NO: 145808 - protein, 7 aa, synthetic construct
RTQHVSM

SEQ ID NO: 145809 - protein, 7 aa, synthetic construct
RTQITER

SEQ ID NO: 145810 - protein, 7 aa, synthetic construct
RTQNAPF

SEQ ID NO: 145811 - protein, 7 aa, synthetic construct
RTQNEKS

SEQ ID NO: 145812 - protein, 7 aa, synthetic construct
RTQNMDK

SEQ ID NO: 145813 - protein, 7 aa, synthetic construct
RTQNNVH

SEQ ID NO: 145814 - protein, 7 aa, synthetic construct
RTQPAPF

SEQ ID NO: 145815 - protein, 7 aa, synthetic construct
RTQPLAI

SEQ ID NO: 145816 - protein, 7 aa, synthetic construct
RTQQMPL

SEQ ID NO: 145817 - protein, 7 aa, synthetic construct
RTQRDSG

SEQ ID NO: 145818 - protein, 7 aa, synthetic construct
RTQRDSI

SEQ ID NO: 145819 - protein, 7 aa, synthetic construct
RTQSAPF

SEQ ID NO: 145820 - protein, 7 aa, synthetic construct
RTQSKDV

SEQ ID NO: 145821 - protein, 7 aa, synthetic construct
RTQSNTH

SEQ ID NO: 145822 - protein, 7 aa, synthetic construct
RTQTDLR

SEQ ID NO: 145823 - protein, 7 aa, synthetic construct
RTQVSQH

SEQ ID NO: 145824 - protein, 7 aa, synthetic construct
RTRDLVS

SEQ ID NO: 145825 - protein, 7 aa, synthetic construct
RTRDQVS

SEQ ID NO: 145826 - protein, 7 aa, synthetic construct
RTREGIT

SEQ ID NO: 145827 - protein, 7 aa, synthetic construct
RTREGPT

SEQ ID NO: 145828 - protein, 7 aa, synthetic construct
RTRELSG

SEQ ID NO: 145829 - protein, 7 aa, synthetic construct
RTREQTQ

SEQ ID NO: 145830 - protein, 7 aa, synthetic construct
RTRSETP

SEQ ID NO: 145831 - protein, 7 aa, synthetic construct
RTSAEQR

SEQ ID NO: 145832 - protein, 7 aa, synthetic construct
RTSAHSL

SEQ ID NO: 145833 - protein, 7 aa, synthetic construct
RTSANNY

SEQ ID NO: 145834 - protein, 7 aa, synthetic construct
RTSDFSK

SEQ ID NO: 145835 - protein, 7 aa, synthetic construct
RTSDRDP

SEQ ID NO: 145836 - protein, 7 aa, synthetic construct
RTSEFKY

SEQ ID NO: 145837 - protein, 7 aa, synthetic construct
RTSEQKN

SEQ ID NO: 145838 - protein, 7 aa, synthetic construct
RTSGPLL

SEQ ID NO: 145839 - protein, 7 aa, synthetic construct
RTSGQPW

SEQ ID NO: 145840 - protein, 7 aa, synthetic construct
RTSHMGV

SEQ ID NO: 145841 - protein, 7 aa, synthetic construct
RTSHNVV

SEQ ID NO: 145842 - protein, 7 aa, synthetic construct
RTSHPDK

SEQ ID NO: 145843 - protein, 7 aa, synthetic construct
RTSHVSQ

SEQ ID NO: 145844 - protein, 7 aa, synthetic construct
RTSIDAK

SEQ ID NO: 145845 - protein, 7 aa, synthetic construct
RTSKIYE

SEQ ID NO: 145846 - protein, 7 aa, synthetic construct
RTSKMQD

SEQ ID NO: 145847 - protein, 7 aa, synthetic construct
RTSLERT

SEQ ID NO: 145848 - protein, 7 aa, synthetic construct
RTSMEVR

SEQ ID NO: 145849 - protein, 7 aa, synthetic construct
RTSNIHV

SEQ ID NO: 145850 - protein, 7 aa, synthetic construct
RTSNMMM

SEQ ID NO: 145851 - protein, 7 aa, synthetic construct
RTSPAGW

SEQ ID NO: 145852 - protein, 7 aa, synthetic construct
RTSPAIM

SEQ ID NO: 145853 - protein, 7 aa, synthetic construct
RTSRDPP

SEQ ID NO: 145854 - protein, 7 aa, synthetic construct
RTSRLAE

SEQ ID NO: 145855 - protein, 7 aa, synthetic construct
RTSVRDV

SEQ ID NO: 145856 - protein, 7 aa, synthetic construct
RTSVTRD

SEQ ID NO: 145857 - protein, 7 aa, synthetic construct
RTSVVRD

SEQ ID NO: 145858 - protein, 7 aa, synthetic construct
RTTAAMH

SEQ ID NO: 145859 - protein, 7 aa, synthetic construct
RTTANYV

SEQ ID NO: 145860 - protein, 7 aa, synthetic construct
RTTEHKV

SEQ ID NO: 145861 - protein, 7 aa, synthetic construct
RTTGDKY

SEQ ID NO: 145862 - protein, 7 aa, synthetic construct
RTTGVHN

SEQ ID NO: 145863 - protein, 7 aa, synthetic construct
RTTKADL

SEQ ID NO: 145864 - protein, 7 aa, synthetic construct
RTTKEMT

SEQ ID NO: 145865 - protein, 7 aa, synthetic construct
RTTLHRE

SEQ ID NO: 145866 - protein, 7 aa, synthetic construct
RTTNREV

SEQ ID NO: 145867 - protein, 7 aa, synthetic construct
RTTPIER

SEQ ID NO: 145868 - protein, 7 aa, synthetic construct
RTTPNAF

SEQ ID NO: 145869 - protein, 7 aa, synthetic construct
RTTPVSY

SEQ ID NO: 145870 - protein, 7 aa, synthetic construct
RTTQDMR

SEQ ID NO: 145871 - protein, 7 aa, synthetic construct
RTTQQGH

SEQ ID NO: 145872 - protein, 7 aa, synthetic construct
RTTQRDI

SEQ ID NO: 145873 - protein, 7 aa, synthetic construct
RTTQRES

SEQ ID NO: 145874 - protein, 7 aa, synthetic construct
RTTSHVI

SEQ ID NO: 145875 - protein, 7 aa, synthetic construct
RTTSRDG

SEQ ID NO: 145876 - protein, 7 aa, synthetic construct
RTTTHMS

SEQ ID NO: 145877 - protein, 7 aa, synthetic construct
RTTTSSH

SEQ ID NO: 145878 - protein, 7 aa, synthetic construct
RTVAHNS

SEQ ID NO: 145879 - protein, 7 aa, synthetic construct
RTVAYPQ

SEQ ID NO: 145880 - protein, 7 aa, synthetic construct
RTVDFKN

SEQ ID NO: 145881 - protein, 7 aa, synthetic construct
RTVDRAL

SEQ ID NO: 145882 - protein, 7 aa, synthetic construct
RTVDSVR

SEQ ID NO: 145883 - protein, 7 aa, synthetic construct
RTVGMQM

SEQ ID NO: 145884 - protein, 7 aa, synthetic construct
RTVHTTL

SEQ ID NO: 145885 - protein, 7 aa, synthetic construct
RTVNNDR

SEQ ID NO: 145886 - protein, 7 aa, synthetic construct
RTVNPLA

SEQ ID NO: 145887 - protein, 7 aa, synthetic construct
RTVPGNH

SEQ ID NO: 145888 - protein, 7 aa, synthetic construct
RTVPHPN

SEQ ID NO: 145889 - protein, 7 aa, synthetic construct
RTVQTAA

SEQ ID NO: 145890 - protein, 7 aa, synthetic construct
RTVSGSH

SEQ ID NO: 145891 - protein, 7 aa, synthetic construct
RTVTHNL

SEQ ID NO: 145892 - protein, 7 aa, synthetic construct
RTVVQER

SEQ ID NO: 145893 - protein, 7 aa, synthetic construct
RTYNDQK

SEQ ID NO: 145894 - protein, 7 aa, synthetic construct
RTYQELG

SEQ ID NO: 145895 - protein, 7 aa, synthetic construct
RVAASHA

SEQ ID NO: 145896 - protein, 7 aa, synthetic construct
RVADIAK

SEQ ID NO: 145897 - protein, 7 aa, synthetic construct
RVAGSSY

SEQ ID NO: 145898 - protein, 7 aa, synthetic construct
RVAHDMK

SEQ ID NO: 145899 - protein, 7 aa, synthetic construct
RVAHVGG

SEQ ID NO: 145900 - protein, 7 aa, synthetic construct
RVAKGAD

SEQ ID NO: 145901 - protein, 7 aa, synthetic construct
RVANGPH

SEQ ID NO: 145902 - protein, 7 aa, synthetic construct
RVANHHP

SEQ ID NO: 145903 - protein, 7 aa, synthetic construct
RVANLHA

SEQ ID NO: 145904 - protein, 7 aa, synthetic construct
RVANMLN

SEQ ID NO: 145905 - protein, 7 aa, synthetic construct
RVANSPY

SEQ ID NO: 145906 - protein, 7 aa, synthetic construct
RVAPTHN

SEQ ID NO: 145907 - protein, 7 aa, synthetic construct
RVAQNMI

SEQ ID NO: 145908 - protein, 7 aa, synthetic construct
RVAQRSE

SEQ ID NO: 145909 - protein, 7 aa, synthetic construct
RVAREAT

SEQ ID NO: 145910 - protein, 7 aa, synthetic construct
RVARQEM

SEQ ID NO: 145911 - protein, 7 aa, synthetic construct
RVDATAR

SEQ ID NO: 145912 - protein, 7 aa, synthetic construct
RVDGMKN

SEQ ID NO: 145913 - protein, 7 aa, synthetic construct
RVDGNKS

SEQ ID NO: 145914 - protein, 7 aa, synthetic construct
RVDGSKF

SEQ ID NO: 145915 - protein, 7 aa, synthetic construct
RVDIRHS

SEQ ID NO: 145916 - protein, 7 aa, synthetic construct
RVDKHYA

SEQ ID NO: 145917 - protein, 7 aa, synthetic construct
RVDKKDH

SEQ ID NO: 145918 - protein, 7 aa, synthetic construct
RVDMRAM

SEQ ID NO: 145919 - protein, 7 aa, synthetic construct
RVDNFKQ

SEQ ID NO: 145920 - protein, 7 aa, synthetic construct
RVDRQIT

SEQ ID NO: 145921 - protein, 7 aa, synthetic construct
RVDSAKQ

SEQ ID NO: 145922 - protein, 7 aa, synthetic construct
RVDSGKN

SEQ ID NO: 145923 - protein, 7 aa, synthetic construct
RVDSYAK

SEQ ID NO: 145924 - protein, 7 aa, synthetic construct
RVDTRHV

SEQ ID NO: 145925 - protein, 7 aa, synthetic construct
RVDYSKS

SEQ ID NO: 145926 - protein, 7 aa, synthetic construct
RVEARSV

SEQ ID NO: 145927 - protein, 7 aa, synthetic construct
RVEAVRA

SEQ ID NO: 145928 - protein, 7 aa, synthetic construct
RVEGTKP

SEQ ID NO: 145929 - protein, 7 aa, synthetic construct
RVEHARQ

SEQ ID NO: 145930 - protein, 7 aa, synthetic construct
RVEIRNS

SEQ ID NO: 145931 - protein, 7 aa, synthetic construct
RVEITAK

SEQ ID NO: 145932 - protein, 7 aa, synthetic construct
RVELARA

SEQ ID NO: 145933 - protein, 7 aa, synthetic construct
RVENQGR

SEQ ID NO: 145934 - protein, 7 aa, synthetic construct
RVENQQR

SEQ ID NO: 145935 - protein, 7 aa, synthetic construct
RVENRLM

SEQ ID NO: 145936 - protein, 7 aa, synthetic construct
RVENTKA

SEQ ID NO: 145937 - protein, 7 aa, synthetic construct
RVENTRI

SEQ ID NO: 145938 - protein, 7 aa, synthetic construct
RVEPTNK

SEQ ID NO: 145939 - protein, 7 aa, synthetic construct
RVERPTV

SEQ ID NO: 145940 - protein, 7 aa, synthetic construct
RVETKMQ

SEQ ID NO: 145941 - protein, 7 aa, synthetic construct
RVETTRA

SEQ ID NO: 145942 - protein, 7 aa, synthetic construct
RVEVRVQ

SEQ ID NO: 145943 - protein, 7 aa, synthetic construct
RVEYSMA

SEQ ID NO: 145944 - protein, 7 aa, synthetic construct
RVFKEEK

SEQ ID NO: 145945 - protein, 7 aa, synthetic construct
RVGEHKA

SEQ ID NO: 145946 - protein, 7 aa, synthetic construct
RVGERNV

SEQ ID NO: 145947 - protein, 7 aa, synthetic construct
RVGFNSA

SEQ ID NO: 145948 - protein, 7 aa, synthetic construct
RVGHAQV

SEQ ID NO: 145949 - protein, 7 aa, synthetic construct
RVGHTDK

SEQ ID NO: 145950 - protein, 7 aa, synthetic construct
RVGHTIP

SEQ ID NO: 145951 - protein, 7 aa, synthetic construct
RVGIHQP

SEQ ID NO: 145952 - protein, 7 aa, synthetic construct
RVGMHSA

SEQ ID NO: 145953 - protein, 7 aa, synthetic construct
RVGNMHS

SEQ ID NO: 145954 - protein, 7 aa, synthetic construct
RVGPHTM

SEQ ID NO: 145955 - protein, 7 aa, synthetic construct
RVGPIQP

SEQ ID NO: 145956 - protein, 7 aa, synthetic construct
RVGPQHT

SEQ ID NO: 145957 - protein, 7 aa, synthetic construct
RVGQMER

SEQ ID NO: 145958 - protein, 7 aa, synthetic construct
RVGRDMS

SEQ ID NO: 145959 - protein, 7 aa, synthetic construct
RVGSGDR

SEQ ID NO: 145960 - protein, 7 aa, synthetic construct
RVGSQDK

SEQ ID NO: 145961 - protein, 7 aa, synthetic construct
RVGTVPM

SEQ ID NO: 145962 - protein, 7 aa, synthetic construct
RVGVGER

SEQ ID NO: 145963 - protein, 7 aa, synthetic construct
RVGVSDK

SEQ ID NO: 145964 - protein, 7 aa, synthetic construct
RVHAAGI

SEQ ID NO: 145965 - protein, 7 aa, synthetic construct
RVHAGTT

SEQ ID NO: 145966 - protein, 7 aa, synthetic construct
RVHAIAP

SEQ ID NO: 145967 - protein, 7 aa, synthetic construct
RVHANNI

SEQ ID NO: 145968 - protein, 7 aa, synthetic construct
RVHDKLA

SEQ ID NO: 145969 - protein, 7 aa, synthetic construct
RVHGGGS

SEQ ID NO: 145970 - protein, 7 aa, synthetic construct
RVHGIQA

SEQ ID NO: 145971 - protein, 7 aa, synthetic construct
RVHGSTT

SEQ ID NO: 145972 - protein, 7 aa, synthetic construct
RVHGTMQ

SEQ ID NO: 145973 - protein, 7 aa, synthetic construct
RVHGTVM

SEQ ID NO: 145974 - protein, 7 aa, synthetic construct
RVHHKDP

SEQ ID NO: 145975 - protein, 7 aa, synthetic construct
RVHHTQP

SEQ ID NO: 145976 - protein, 7 aa, synthetic construct
RVHKQDG

SEQ ID NO: 145977 - protein, 7 aa, synthetic construct
RVHLKQE

SEQ ID NO: 145978 - protein, 7 aa, synthetic construct
RVHMTAA

SEQ ID NO: 145979 - protein, 7 aa, synthetic construct
RVHMTPS

SEQ ID NO: 145980 - protein, 7 aa, synthetic construct
RVHNQKE

SEQ ID NO: 145981 - protein, 7 aa, synthetic construct
RVHPANT

SEQ ID NO: 145982 - protein, 7 aa, synthetic construct
RVHPGQN

SEQ ID NO: 145983 - protein, 7 aa, synthetic construct
RVHPNAI

SEQ ID NO: 145984 - protein, 7 aa, synthetic construct
RVHQGVI

SEQ ID NO: 145985 - protein, 7 aa, synthetic construct
RVHQTPI

SEQ ID NO: 145986 - protein, 7 aa, synthetic construct
RVHQVQP

SEQ ID NO: 145987 - protein, 7 aa, synthetic construct
RVHQVSV

SEQ ID NO: 145988 - protein, 7 aa, synthetic construct
RVHSLNA

SEQ ID NO: 145989 - protein, 7 aa, synthetic construct
RVHSPLT

SEQ ID NO: 145990 - protein, 7 aa, synthetic construct
RVHSQGG

SEQ ID NO: 145991 - protein, 7 aa, synthetic construct
RVHSTGG

SEQ ID NO: 145992 - protein, 7 aa, synthetic construct
RVHSVTS

SEQ ID NO: 145993 - protein, 7 aa, synthetic construct
RVHTAMV

SEQ ID NO: 145994 - protein, 7 aa, synthetic construct
RVHVKPD

SEQ ID NO: 145995 - protein, 7 aa, synthetic construct
RVHVNSV

SEQ ID NO: 145996 - protein, 7 aa, synthetic construct
RVHVSQA

SEQ ID NO: 145997 - protein, 7 aa, synthetic construct
RVIGSMP

SEQ ID NO: 145998 - protein, 7 aa, synthetic construct
RVIKEAT

SEQ ID NO: 145999 - protein, 7 aa, synthetic construct
RVIKPQD

SEQ ID NO: 146000 - protein, 7 aa, synthetic construct
RVIPAGQ

SEQ ID NO: 146001 - protein, 7 aa, synthetic construct
RVIPTER

SEQ ID NO: 146002 - protein, 7 aa, synthetic construct
RVIQAAP

SEQ ID NO: 146003 - protein, 7 aa, synthetic construct
RVIQKDL

SEQ ID NO: 146004 - protein, 7 aa, synthetic construct
RVITSDK

SEQ ID NO: 146005 - protein, 7 aa, synthetic construct
RVKAYDA

SEQ ID NO: 146006 - protein, 7 aa, synthetic construct
RVKEIQL

SEQ ID NO: 146007 - protein, 7 aa, synthetic construct
RVKEPTY

SEQ ID NO: 146008 - protein, 7 aa, synthetic construct
RVKEQYN

SEQ ID NO: 146009 - protein, 7 aa, synthetic construct
RVKESAQ

SEQ ID NO: 146010 - protein, 7 aa, synthetic construct
RVKEVIH

SEQ ID NO: 146011 - protein, 7 aa, synthetic construct
RVKGDSF

SEQ ID NO: 146012 - protein, 7 aa, synthetic construct
RVKQMID

SEQ ID NO: 146013 - protein, 7 aa, synthetic construct
RVMAVGS

SEQ ID NO: 146014 - protein, 7 aa, synthetic construct
RVMPAHN

SEQ ID NO: 146015 - protein, 7 aa, synthetic construct
RVMPSAM

SEQ ID NO: 146016 - protein, 7 aa, synthetic construct
RVMSGGI

SEQ ID NO: 146017 - protein, 7 aa, synthetic construct
RVMSSHM

SEQ ID NO: 146018 - protein, 7 aa, synthetic construct
RVNEATK

SEQ ID NO: 146019 - protein, 7 aa, synthetic construct
RVNHPTI

SEQ ID NO: 146020 - protein, 7 aa, synthetic construct
RVNHPVG

SEQ ID NO: 146021 - protein, 7 aa, synthetic construct
RVNHTIV

SEQ ID NO: 146022 - protein, 7 aa, synthetic construct
RVNIDLR

SEQ ID NO: 146023 - protein, 7 aa, synthetic construct
RVNKMND

SEQ ID NO: 146024 - protein, 7 aa, synthetic construct
RVNPTHM

SEQ ID NO: 146025 - protein, 7 aa, synthetic construct
RVNPVSH

SEQ ID NO: 146026 - protein, 7 aa, synthetic construct
RVNREIV

SEQ ID NO: 146027 - protein, 7 aa, synthetic construct
RVNTNHT

SEQ ID NO: 146028 - protein, 7 aa, synthetic construct
RVNVRTD

SEQ ID NO: 146029 - protein, 7 aa, synthetic construct
RVNVTAH

SEQ ID NO: 146030 - protein, 7 aa, synthetic construct
RVPEHGR

SEQ ID NO: 146031 - protein, 7 aa, synthetic construct
RVPEIAR

SEQ ID NO: 146032 - protein, 7 aa, synthetic construct
RVPGGHP

SEQ ID NO: 146033 - protein, 7 aa, synthetic construct
RVPGMGM

SEQ ID NO: 146034 - protein, 7 aa, synthetic construct
RVPGVMS

SEQ ID NO: 146035 - protein, 7 aa, synthetic construct
RVPHGNI

SEQ ID NO: 146036 - protein, 7 aa, synthetic construct
RVPINVN

SEQ ID NO: 146037 - protein, 7 aa, synthetic construct
RVPISHA

SEQ ID NO: 146038 - protein, 7 aa, synthetic construct
RVPMNAA

SEQ ID NO: 146039 - protein, 7 aa, synthetic construct
RVPMPAQ

SEQ ID NO: 146040 - protein, 7 aa, synthetic construct
RVPNYTG

SEQ ID NO: 146041 - protein, 7 aa, synthetic construct
RVPPYTA

SEQ ID NO: 146042 - protein, 7 aa, synthetic construct
RVPQLDR

SEQ ID NO: 146043 - protein, 7 aa, synthetic construct
RVPQQHA

SEQ ID NO: 146044 - protein, 7 aa, synthetic construct
RVPRTDA

SEQ ID NO: 146045 - protein, 7 aa, synthetic construct
RVPSHRD

SEQ ID NO: 146046 - protein, 7 aa, synthetic construct
RVPSIHT

SEQ ID NO: 146047 - protein, 7 aa, synthetic construct
RVPSNNY

SEQ ID NO: 146048 - protein, 7 aa, synthetic construct
RVPSPMG

SEQ ID NO: 146049 - protein, 7 aa, synthetic construct
RVPSVAL

SEQ ID NO: 146050 - protein, 7 aa, synthetic construct
RVPSVGY

SEQ ID NO: 146051 - protein, 7 aa, synthetic construct
RVPTIVN

SEQ ID NO: 146052 - protein, 7 aa, synthetic construct
RVPTNDK

SEQ ID NO: 146053 - protein, 7 aa, synthetic construct
RVPVMGA

SEQ ID NO: 146054 - protein, 7 aa, synthetic construct
RVQASQH

SEQ ID NO: 146055 - protein, 7 aa, synthetic construct
RVQGEMR

SEQ ID NO: 146056 - protein, 7 aa, synthetic construct
RVQGSPY

SEQ ID NO: 146057 - protein, 7 aa, synthetic construct
RVQHHNN

SEQ ID NO: 146058 - protein, 7 aa, synthetic construct
RVQKADL

SEQ ID NO: 146059 - protein, 7 aa, synthetic construct
RVQKNEY

SEQ ID NO: 146060 - protein, 7 aa, synthetic construct
RVQKSDT

SEQ ID NO: 146061 - protein, 7 aa, synthetic construct
RVQLKGD

SEQ ID NO: 146062 - protein, 7 aa, synthetic construct
RVQMGMN

SEQ ID NO: 146063 - protein, 7 aa, synthetic construct
RVQNLQH

SEQ ID NO: 146064 - protein, 7 aa, synthetic construct
RVQNPKD

SEQ ID NO: 146065 - protein, 7 aa, synthetic construct
RVQQNPH

SEQ ID NO: 146066 - protein, 7 aa, synthetic construct
RVQTHGT

SEQ ID NO: 146067 - protein, 7 aa, synthetic construct
RVQTNSY

SEQ ID NO: 146068 - protein, 7 aa, synthetic construct
RVRAENI

SEQ ID NO: 146069 - protein, 7 aa, synthetic construct
RVRDEEK

SEQ ID NO: 146070 - protein, 7 aa, synthetic construct
RVRDKEG

SEQ ID NO: 146071 - protein, 7 aa, synthetic construct
RVRDLVQ

SEQ ID NO: 146072 - protein, 7 aa, synthetic construct
RVRDQAN

SEQ ID NO: 146073 - protein, 7 aa, synthetic construct
RVRDSNV

SEQ ID NO: 146074 - protein, 7 aa, synthetic construct
RVRDTLV

SEQ ID NO: 146075 - protein, 7 aa, synthetic construct
RVRESSA

SEQ ID NO: 146076 - protein, 7 aa, synthetic construct
RVRETSQ

SEQ ID NO: 146077 - protein, 7 aa, synthetic construct
RVREVAV

SEQ ID NO: 146078 - protein, 7 aa, synthetic construct
RVREVSI

SEQ ID NO: 146079 - protein, 7 aa, synthetic construct
RVRGAEG

SEQ ID NO: 146080 - protein, 7 aa, synthetic construct
RVRTEAS

SEQ ID NO: 146081 - protein, 7 aa, synthetic construct
RVSAAHS

SEQ ID NO: 146082 - protein, 7 aa, synthetic construct
RVSAMTH

SEQ ID NO: 146083 - protein, 7 aa, synthetic construct
RVSDRAQ

SEQ ID NO: 146084 - protein, 7 aa, synthetic construct
RVSEGRA

SEQ ID NO: 146085 - protein, 7 aa, synthetic construct
RVSEWEK

SEQ ID NO: 146086 - protein, 7 aa, synthetic construct
RVSGHGM

SEQ ID NO: 146087 - protein, 7 aa, synthetic construct
RVSGHNT

SEQ ID NO: 146088 - protein, 7 aa, synthetic construct
RVSHTGG

SEQ ID NO: 146089 - protein, 7 aa, synthetic construct
RVSKDAL

SEQ ID NO: 146090 - protein, 7 aa, synthetic construct
RVSLDAK

SEQ ID NO: 146091 - protein, 7 aa, synthetic construct
RVSMGNM

SEQ ID NO: 146092 - protein, 7 aa, synthetic construct
RVSMPGP

SEQ ID NO: 146093 - protein, 7 aa, synthetic construct
RVSPHRE

SEQ ID NO: 146094 - protein, 7 aa, synthetic construct
RVSPIDK

SEQ ID NO: 146095 - protein, 7 aa, synthetic construct
RVSSERN

SEQ ID NO: 146096 - protein, 7 aa, synthetic construct
RVSSRDM

SEQ ID NO: 146097 - protein, 7 aa, synthetic construct
RVSSTHQ

SEQ ID NO: 146098 - protein, 7 aa, synthetic construct
RVSTRDS

SEQ ID NO: 146099 - protein, 7 aa, synthetic construct
RVSVKGD

SEQ ID NO: 146100 - protein, 7 aa, synthetic construct
RVTAEMR

SEQ ID NO: 146101 - protein, 7 aa, synthetic construct
RVTAREI

SEQ ID NO: 146102 - protein, 7 aa, synthetic construct
RVTDKER

SEQ ID NO: 146103 - protein, 7 aa, synthetic construct
RVTESTR

SEQ ID NO: 146104 - protein, 7 aa, synthetic construct
RVTGDRN

SEQ ID NO: 146105 - protein, 7 aa, synthetic construct
RVTGYSG

SEQ ID NO: 146106 - protein, 7 aa, synthetic construct
RVTHAQI

SEQ ID NO: 146107 - protein, 7 aa, synthetic construct
RVTHATP

SEQ ID NO: 146108 - protein, 7 aa, synthetic construct
RVTHMNT

SEQ ID NO: 146109 - protein, 7 aa, synthetic construct
RVTHSTT

SEQ ID NO: 146110 - protein, 7 aa, synthetic construct
RVTHVNS

SEQ ID NO: 146111 - protein, 7 aa, synthetic construct
RVTKDVM

SEQ ID NO: 146112 - protein, 7 aa, synthetic construct
RVTNTNY

SEQ ID NO: 146113 - protein, 7 aa, synthetic construct
RVTPGHI

SEQ ID NO: 146114 - protein, 7 aa, synthetic construct
RVTPGLH

SEQ ID NO: 146115 - protein, 7 aa, synthetic construct
RVTPHNP

SEQ ID NO: 146116 - protein, 7 aa, synthetic construct
RVTPIEK

SEQ ID NO: 146117 - protein, 7 aa, synthetic construct
RVTPISH

SEQ ID NO: 146118 - protein, 7 aa, synthetic construct
RVTPSTH

SEQ ID NO: 146119 - protein, 7 aa, synthetic construct
RVTRDSG

SEQ ID NO: 146120 - protein, 7 aa, synthetic construct
RVTRIPE

SEQ ID NO: 146121 - protein, 7 aa, synthetic construct
RVTTRDN

SEQ ID NO: 146122 - protein, 7 aa, synthetic construct
RVTTSNH

SEQ ID NO: 146123 - protein, 7 aa, synthetic construct
RVVDSRN

SEQ ID NO: 146124 - protein, 7 aa, synthetic construct
RVVDSSK

SEQ ID NO: 146125 - protein, 7 aa, synthetic construct
RVVEARQ

SEQ ID NO: 146126 - protein, 7 aa, synthetic construct
RVVEKFA

SEQ ID NO: 146127 - protein, 7 aa, synthetic construct
RVVETKL

SEQ ID NO: 146128 - protein, 7 aa, synthetic construct
RVVGLDK

SEQ ID NO: 146129 - protein, 7 aa, synthetic construct
RVVGSIP

SEQ ID NO: 146130 - protein, 7 aa, synthetic construct
RVVKASE

SEQ ID NO: 146131 - protein, 7 aa, synthetic construct
RVVKDPQ

SEQ ID NO: 146132 - protein, 7 aa, synthetic construct
RVVKGDF

SEQ ID NO: 146133 - protein, 7 aa, synthetic construct
RVVKNQD

SEQ ID NO: 146134 - protein, 7 aa, synthetic construct
RVVPGAA

SEQ ID NO: 146135 - protein, 7 aa, synthetic construct
RVVPVAS

SEQ ID NO: 146136 - protein, 7 aa, synthetic construct
RVVQQGH

SEQ ID NO: 146137 - protein, 7 aa, synthetic construct
RVVTGPV

SEQ ID NO: 146138 - protein, 7 aa, synthetic construct
RVVTKDF

SEQ ID NO: 146139 - protein, 7 aa, synthetic construct
RVYANSN

SEQ ID NO: 146140 - protein, 7 aa, synthetic construct
RVYNGPA

SEQ ID NO: 146141 - protein, 7 aa, synthetic construct
RWDAKPQ

SEQ ID NO: 146142 - protein, 7 aa, synthetic construct
RWDNGKS

SEQ ID NO: 146143 - protein, 7 aa, synthetic construct
RWDNTIS

SEQ ID NO: 146144 - protein, 7 aa, synthetic construct
RWKDSYE

SEQ ID NO: 146145 - protein, 7 aa, synthetic construct
RWKTENL

SEQ ID NO: 146146 - protein, 7 aa, synthetic construct
RWQEKQG

SEQ ID NO: 146147 - protein, 7 aa, synthetic construct
RYAANHI

SEQ ID NO: 146148 - protein, 7 aa, synthetic construct
RYAEMKP

SEQ ID NO: 146149 - protein, 7 aa, synthetic construct
RYAMNSG

SEQ ID NO: 146150 - protein, 7 aa, synthetic construct
RYAPAGI

SEQ ID NO: 146151 - protein, 7 aa, synthetic construct
RYAPATA

SEQ ID NO: 146152 - protein, 7 aa, synthetic construct
RYDKLSL

SEQ ID NO: 146153 - protein, 7 aa, synthetic construct
RYDNSRQ

SEQ ID NO: 146154 - protein, 7 aa, synthetic construct
RYDNTLK

SEQ ID NO: 146155 - protein, 7 aa, synthetic construct
RYDQGQR

SEQ ID NO: 146156 - protein, 7 aa, synthetic construct
RYDQKPL

SEQ ID NO: 146157 - protein, 7 aa, synthetic construct
RYDSRPM

SEQ ID NO: 146158 - protein, 7 aa, synthetic construct
RYEAQKY

SEQ ID NO: 146159 - protein, 7 aa, synthetic construct
RYEGTQE

SEQ ID NO: 146160 - protein, 7 aa, synthetic construct
RYEKIHS

SEQ ID NO: 146161 - protein, 7 aa, synthetic construct
RYENRLP

SEQ ID NO: 146162 - protein, 7 aa, synthetic construct
RYEQKGL

SEQ ID NO: 146163 - protein, 7 aa, synthetic construct
RYGANMA

SEQ ID NO: 146164 - protein, 7 aa, synthetic construct
RYGKADG

SEQ ID NO: 146165 - protein, 7 aa, synthetic construct
RYGKQEG

SEQ ID NO: 146166 - protein, 7 aa, synthetic construct
RYGNHQA

SEQ ID NO: 146167 - protein, 7 aa, synthetic construct
RYGNIAQ

SEQ ID NO: 146168 - protein, 7 aa, synthetic construct
RYGSGAV

SEQ ID NO: 146169 - protein, 7 aa, synthetic construct
RYGSNTQ

SEQ ID NO: 146170 - protein, 7 aa, synthetic construct
RYGTAFD

SEQ ID NO: 146171 - protein, 7 aa, synthetic construct
RYGTGVY

SEQ ID NO: 146172 - protein, 7 aa, synthetic construct
RYIGNGT

SEQ ID NO: 146173 - protein, 7 aa, synthetic construct
RYKDLQL

SEQ ID NO: 146174 - protein, 7 aa, synthetic construct
RYKELPQ

SEQ ID NO: 146175 - protein, 7 aa, synthetic construct
RYKEMTT

SEQ ID NO: 146176 - protein, 7 aa, synthetic construct
RYKENNT

SEQ ID NO: 146177 - protein, 7 aa, synthetic construct
RYKEVTT

SEQ ID NO: 146178 - protein, 7 aa, synthetic construct
RYKFEHE

SEQ ID NO: 146179 - protein, 7 aa, synthetic construct
RYKMNDP

SEQ ID NO: 146180 - protein, 7 aa, synthetic construct
RYKPEAS

SEQ ID NO: 146181 - protein, 7 aa, synthetic construct
RYKPLEG

SEQ ID NO: 146182 - protein, 7 aa, synthetic construct
RYMNGQS

SEQ ID NO: 146183 - protein, 7 aa, synthetic construct
RYNANAP

SEQ ID NO: 146184 - protein, 7 aa, synthetic construct
RYNERPV

SEQ ID NO: 146185 - protein, 7 aa, synthetic construct
RYPATIA

SEQ ID NO: 146186 - protein, 7 aa, synthetic construct
RYPDSMR

SEQ ID NO: 146187 - protein, 7 aa, synthetic construct
RYPPTSA

SEQ ID NO: 146188 - protein, 7 aa, synthetic construct
RYPQQAH

SEQ ID NO: 146189 - protein, 7 aa, synthetic construct
RYPTTSV

SEQ ID NO: 146190 - protein, 7 aa, synthetic construct
RYQHAMG

SEQ ID NO: 146191 - protein, 7 aa, synthetic construct
RYQSAPH

SEQ ID NO: 146192 - protein, 7 aa, synthetic construct
RYQTSNI

SEQ ID NO: 146193 - protein, 7 aa, synthetic construct
RYRDEVQ

SEQ ID NO: 146194 - protein, 7 aa, synthetic construct
RYSAEKQ

SEQ ID NO: 146195 - protein, 7 aa, synthetic construct
RYSANHN

SEQ ID NO: 146196 - protein, 7 aa, synthetic construct
RYSDAYT

SEQ ID NO: 146197 - protein, 7 aa, synthetic construct
RYSKPDP

SEQ ID NO: 146198 - protein, 7 aa, synthetic construct
RYSPNTA

SEQ ID NO: 146199 - protein, 7 aa, synthetic construct
RYSQHNG

SEQ ID NO: 146200 - protein, 7 aa, synthetic construct
RYSQSSG

SEQ ID NO: 146201 - protein, 7 aa, synthetic construct
RYSSGSG

SEQ ID NO: 146202 - protein, 7 aa, synthetic construct
RYTANAV

SEQ ID NO: 146203 - protein, 7 aa, synthetic construct
RYTNGGH

SEQ ID NO: 146204 - protein, 7 aa, synthetic construct
RYTQKDG

SEQ ID NO: 146205 - protein, 7 aa, synthetic construct
RYVKTDG

SEQ ID NO: 146206 - protein, 7 aa, synthetic construct
RYVNNNM

SEQ ID NO: 146207 - protein, 7 aa, synthetic construct
SAAHPPR

SEQ ID NO: 146208 - protein, 7 aa, synthetic construct
SAAHVRN

SEQ ID NO: 146209 - protein, 7 aa, synthetic construct
SAAKYRE

SEQ ID NO: 146210 - protein, 7 aa, synthetic construct
SAAQYGR

SEQ ID NO: 146211 - protein, 7 aa, synthetic construct
SAARKDN

SEQ ID NO: 146212 - protein, 7 aa, synthetic construct
SAARMPI

SEQ ID NO: 146213 - protein, 7 aa, synthetic construct
SAATPRI

SEQ ID NO: 146214 - protein, 7 aa, synthetic construct
SAAYQHM

SEQ ID NO: 146215 - protein, 7 aa, synthetic construct
SADKERR

SEQ ID NO: 146216 - protein, 7 aa, synthetic construct
SADMRKM

SEQ ID NO: 146217 - protein, 7 aa, synthetic construct
SADNKRM

SEQ ID NO: 146218 - protein, 7 aa, synthetic construct
SADNMKR

SEQ ID NO: 146219 - protein, 7 aa, synthetic construct
SADPRKS

SEQ ID NO: 146220 - protein, 7 aa, synthetic construct
SADRAIR

SEQ ID NO: 146221 - protein, 7 aa, synthetic construct
SAEKNYK

SEQ ID NO: 146222 - protein, 7 aa, synthetic construct
SAERNIR

SEQ ID NO: 146223 - protein, 7 aa, synthetic construct
SAFISDA

SEQ ID NO: 146224 - protein, 7 aa, synthetic construct
SAFKAPM

SEQ ID NO: 146225 - protein, 7 aa, synthetic construct
SAFKMGP

SEQ ID NO: 146226 - protein, 7 aa, synthetic construct
SAFKRDS

SEQ ID NO: 146227 - protein, 7 aa, synthetic construct
SAFSQHK

SEQ ID NO: 146228 - protein, 7 aa, synthetic construct
SAGAKFH

SEQ ID NO: 146229 - protein, 7 aa, synthetic construct
SAGFGKS

SEQ ID NO: 146230 - protein, 7 aa, synthetic construct
SAGIHKQ

SEQ ID NO: 146231 - protein, 7 aa, synthetic construct
SAGIRNL

SEQ ID NO: 146232 - protein, 7 aa, synthetic construct
SAGKTIF

SEQ ID NO: 146233 - protein, 7 aa, synthetic construct
SAGRSMM

SEQ ID NO: 146234 - protein, 7 aa, synthetic construct
SAGRSNL

SEQ ID NO: 146235 - protein, 7 aa, synthetic construct
SAGSGFR

SEQ ID NO: 146236 - protein, 7 aa, synthetic construct
SAHARTV

SEQ ID NO: 146237 - protein, 7 aa, synthetic construct
SAHGGKY

SEQ ID NO: 146238 - protein, 7 aa, synthetic construct
SAHGMSK

SEQ ID NO: 146239 - protein, 7 aa, synthetic construct
SAHGSKL

SEQ ID NO: 146240 - protein, 7 aa, synthetic construct
SAHHKSI

SEQ ID NO: 146241 - protein, 7 aa, synthetic construct
SAHIKPN

SEQ ID NO: 146242 - protein, 7 aa, synthetic construct
SAHKAIM

SEQ ID NO: 146243 - protein, 7 aa, synthetic construct
SAHKALL

SEQ ID NO: 146244 - protein, 7 aa, synthetic construct
SAHKISV

SEQ ID NO: 146245 - protein, 7 aa, synthetic construct
SAHPKIY

SEQ ID NO: 146246 - protein, 7 aa, synthetic construct
SAHPRVT

SEQ ID NO: 146247 - protein, 7 aa, synthetic construct
SAHPVWE

SEQ ID NO: 146248 - protein, 7 aa, synthetic construct
SAHRIAG

SEQ ID NO: 146249 - protein, 7 aa, synthetic construct
SAHRIGV

SEQ ID NO: 146250 - protein, 7 aa, synthetic construct
SAHRIPV

SEQ ID NO: 146251 - protein, 7 aa, synthetic construct
SAHRVMG

SEQ ID NO: 146252 - protein, 7 aa, synthetic construct
SAHSAMR

SEQ ID NO: 146253 - protein, 7 aa, synthetic construct
SAHSANR

SEQ ID NO: 146254 - protein, 7 aa, synthetic construct
SAHSQPK

SEQ ID NO: 146255 - protein, 7 aa, synthetic construct
SAHTNAK

SEQ ID NO: 146256 - protein, 7 aa, synthetic construct
SAHTSNK

SEQ ID NO: 146257 - protein, 7 aa, synthetic construct
SAHTTRL

SEQ ID NO: 146258 - protein, 7 aa, synthetic construct
SAHTVRM

SEQ ID NO: 146259 - protein, 7 aa, synthetic construct
SAHVIRS

SEQ ID NO: 146260 - protein, 7 aa, synthetic construct
SAHVRNM

SEQ ID NO: 146261 - protein, 7 aa, synthetic construct
SAIDRKM

SEQ ID NO: 146262 - protein, 7 aa, synthetic construct
SAITRNH

SEQ ID NO: 146263 - protein, 7 aa, synthetic construct
SAKDPYR

SEQ ID NO: 146264 - protein, 7 aa, synthetic construct
SAKERHL

SEQ ID NO: 146265 - protein, 7 aa, synthetic construct
SAKGNGW

SEQ ID NO: 146266 - protein, 7 aa, synthetic construct
SAKHFRE

SEQ ID NO: 146267 - protein, 7 aa, synthetic construct
SAKHIPF

SEQ ID NO: 146268 - protein, 7 aa, synthetic construct
SAKIVPH

SEQ ID NO: 146269 - protein, 7 aa, synthetic construct
SAKPRLD

SEQ ID NO: 146270 - protein, 7 aa, synthetic construct
SAKRMDM

SEQ ID NO: 146271 - protein, 7 aa, synthetic construct
SAKSIPY

SEQ ID NO: 146272 - protein, 7 aa, synthetic construct
SAKTNQW

SEQ ID NO: 146273 - protein, 7 aa, synthetic construct
SAKVKYD

SEQ ID NO: 146274 - protein, 7 aa, synthetic construct
SAKVLAY

SEQ ID NO: 146275 - protein, 7 aa, synthetic construct
SAKYERM

SEQ ID NO: 146276 - protein, 7 aa, synthetic construct
SAKYISS

SEQ ID NO: 146277 - protein, 7 aa, synthetic construct
SAKYNTA

SEQ ID NO: 146278 - protein, 7 aa, synthetic construct
SAKYTSI

SEQ ID NO: 146279 - protein, 7 aa, synthetic construct
SALLATK

SEQ ID NO: 146280 - protein, 7 aa, synthetic construct
SAMAPRV

SEQ ID NO: 146281 - protein, 7 aa, synthetic construct
SAMASKY

SEQ ID NO: 146282 - protein, 7 aa, synthetic construct
SAMKDGR

SEQ ID NO: 146283 - protein, 7 aa, synthetic construct
SAMNGMT

SEQ ID NO: 146284 - protein, 7 aa, synthetic construct
SAMPSRI

SEQ ID NO: 146285 - protein, 7 aa, synthetic construct
SAMQQSR

SEQ ID NO: 146286 - protein, 7 aa, synthetic construct
SAMRAPV

SEQ ID NO: 146287 - protein, 7 aa, synthetic construct
SANAHSK

SEQ ID NO: 146288 - protein, 7 aa, synthetic construct
SANEYKK

SEQ ID NO: 146289 - protein, 7 aa, synthetic construct
SANGFHK

SEQ ID NO: 146290 - protein, 7 aa, synthetic construct
SANHNFK

SEQ ID NO: 146291 - protein, 7 aa, synthetic construct
SANHQVW

SEQ ID NO: 146292 - protein, 7 aa, synthetic construct
SANIRKD

SEQ ID NO: 146293 - protein, 7 aa, synthetic construct
SANKGPW

SEQ ID NO: 146294 - protein, 7 aa, synthetic construct
SANLSGR

SEQ ID NO: 146295 - protein, 7 aa, synthetic construct
SANMKHQ

SEQ ID NO: 146296 - protein, 7 aa, synthetic construct
SANMYKA

SEQ ID NO: 146297 - protein, 7 aa, synthetic construct
SANPRRE

SEQ ID NO: 146298 - protein, 7 aa, synthetic construct
SANPYTK

SEQ ID NO: 146299 - protein, 7 aa, synthetic construct
SANSYPR

SEQ ID NO: 146300 - protein, 7 aa, synthetic construct
SANTKSW

SEQ ID NO: 146301 - protein, 7 aa, synthetic construct
SANYGSN

SEQ ID NO: 146302 - protein, 7 aa, synthetic construct
SAPAHNK

SEQ ID NO: 146303 - protein, 7 aa, synthetic construct
SAPHIGK

SEQ ID NO: 146304 - protein, 7 aa, synthetic construct
SAPHYKG

SEQ ID NO: 146305 - protein, 7 aa, synthetic construct
SAPISSR

SEQ ID NO: 146306 - protein, 7 aa, synthetic construct
SAPKVMY

SEQ ID NO: 146307 - protein, 7 aa, synthetic construct
SAPPRGL

SEQ ID NO: 146308 - protein, 7 aa, synthetic construct
SAPQHRN

SEQ ID NO: 146309 - protein, 7 aa, synthetic construct
SAPTMHM

SEQ ID NO: 146310 - protein, 7 aa, synthetic construct
SAPVARY

SEQ ID NO: 146311 - protein, 7 aa, synthetic construct
SAQARTF

SEQ ID NO: 146312 - protein, 7 aa, synthetic construct
SAQFMNK

SEQ ID NO: 146313 - protein, 7 aa, synthetic construct
SAQGIKW

SEQ ID NO: 146314 - protein, 7 aa, synthetic construct
SAQHMKY

SEQ ID NO: 146315 - protein, 7 aa, synthetic construct
SAQHSMK

SEQ ID NO: 146316 - protein, 7 aa, synthetic construct
SAQKGYL

SEQ ID NO: 146317 - protein, 7 aa, synthetic construct
SAQKRDM

SEQ ID NO: 146318 - protein, 7 aa, synthetic construct
SAQMRAM

SEQ ID NO: 146319 - protein, 7 aa, synthetic construct
SAQPRQL

SEQ ID NO: 146320 - protein, 7 aa, synthetic construct
SAQPYPR

SEQ ID NO: 146321 - protein, 7 aa, synthetic construct
SAQQTYR

SEQ ID NO: 146322 - protein, 7 aa, synthetic construct
SAQTYLK

SEQ ID NO: 146323 - protein, 7 aa, synthetic construct
SAQWQGV

SEQ ID NO: 146324 - protein, 7 aa, synthetic construct
SAQYAQR

SEQ ID NO: 146325 - protein, 7 aa, synthetic construct
SAQYGAS

SEQ ID NO: 146326 - protein, 7 aa, synthetic construct
SAQYPKA

SEQ ID NO: 146327 - protein, 7 aa, synthetic construct
SARANRE

SEQ ID NO: 146328 - protein, 7 aa, synthetic construct
SARDMAR

SEQ ID NO: 146329 - protein, 7 aa, synthetic construct
SARDSTR

SEQ ID NO: 146330 - protein, 7 aa, synthetic construct
SARFQSV

SEQ ID NO: 146331 - protein, 7 aa, synthetic construct
SARGLRE

SEQ ID NO: 146332 - protein, 7 aa, synthetic construct
SARGSIM

SEQ ID NO: 146333 - protein, 7 aa, synthetic construct
SARHDMN

SEQ ID NO: 146334 - protein, 7 aa, synthetic construct
SARIKDI

SEQ ID NO: 146335 - protein, 7 aa, synthetic construct
SARIKDT

SEQ ID NO: 146336 - protein, 7 aa, synthetic construct
SARMADK

SEQ ID NO: 146337 - protein, 7 aa, synthetic construct
SARMKEQ

SEQ ID NO: 146338 - protein, 7 aa, synthetic construct
SARMTRD

SEQ ID NO: 146339 - protein, 7 aa, synthetic construct
SARNHLV

SEQ ID NO: 146340 - protein, 7 aa, synthetic construct
SARNQML

SEQ ID NO: 146341 - protein, 7 aa, synthetic construct
SARPFKE

SEQ ID NO: 146342 - protein, 7 aa, synthetic construct
SARPNHM

SEQ ID NO: 146343 - protein, 7 aa, synthetic construct
SARPQDR

SEQ ID NO: 146344 - protein, 7 aa, synthetic construct
SARPQFA

SEQ ID NO: 146345 - protein, 7 aa, synthetic construct
SARQDRI

SEQ ID NO: 146346 - protein, 7 aa, synthetic construct
SARQIQL

SEQ ID NO: 146347 - protein, 7 aa, synthetic construct
SARQQRE

SEQ ID NO: 146348 - protein, 7 aa, synthetic construct
SARSELR

SEQ ID NO: 146349 - protein, 7 aa, synthetic construct
SARTNGF

SEQ ID NO: 146350 - protein, 7 aa, synthetic construct
SARVGMH

SEQ ID NO: 146351 - protein, 7 aa, synthetic construct
SARVPPT

SEQ ID NO: 146352 - protein, 7 aa, synthetic construct
SARVVGM

SEQ ID NO: 146353 - protein, 7 aa, synthetic construct
SARYGHA

SEQ ID NO: 146354 - protein, 7 aa, synthetic construct
SASGRPY

SEQ ID NO: 146355 - protein, 7 aa, synthetic construct
SASHANK

SEQ ID NO: 146356 - protein, 7 aa, synthetic construct
SASNGFR

SEQ ID NO: 146357 - protein, 7 aa, synthetic construct
SASQYKS

SEQ ID NO: 146358 - protein, 7 aa, synthetic construct
SASRDKM

SEQ ID NO: 146359 - protein, 7 aa, synthetic construct
SASRGML

SEQ ID NO: 146360 - protein, 7 aa, synthetic construct
SASRSNN

SEQ ID NO: 146361 - protein, 7 aa, synthetic construct
SASRVRE

SEQ ID NO: 146362 - protein, 7 aa, synthetic construct
SASSKIF

SEQ ID NO: 146363 - protein, 7 aa, synthetic construct
SASYTKS

SEQ ID NO: 146364 - protein, 7 aa, synthetic construct
SATATRY

SEQ ID NO: 146365 - protein, 7 aa, synthetic construct
SATDRSK

SEQ ID NO: 146366 - protein, 7 aa, synthetic construct
SATHIPR

SEQ ID NO: 146367 - protein, 7 aa, synthetic construct
SATIKAY

SEQ ID NO: 146368 - protein, 7 aa, synthetic construct
SATKRMD

SEQ ID NO: 146369 - protein, 7 aa, synthetic construct
SATTHNR

SEQ ID NO: 146370 - protein, 7 aa, synthetic construct
SATYIKA

SEQ ID NO: 146371 - protein, 7 aa, synthetic construct
SATYQKT

SEQ ID NO: 146372 - protein, 7 aa, synthetic construct
SATYTKA

SEQ ID NO: 146373 - protein, 7 aa, synthetic construct
SAVHHKA

SEQ ID NO: 146374 - protein, 7 aa, synthetic construct
SAVKNHF

SEQ ID NO: 146375 - protein, 7 aa, synthetic construct
SAVNRVT

SEQ ID NO: 146376 - protein, 7 aa, synthetic construct
SAVQQHR

SEQ ID NO: 146377 - protein, 7 aa, synthetic construct
SAVQRQH

SEQ ID NO: 146378 - protein, 7 aa, synthetic construct
SAVQTRF

SEQ ID NO: 146379 - protein, 7 aa, synthetic construct
SAVRFDK

SEQ ID NO: 146380 - protein, 7 aa, synthetic construct
SAVRQKD

SEQ ID NO: 146381 - protein, 7 aa, synthetic construct
SAWQPQQ

SEQ ID NO: 146382 - protein, 7 aa, synthetic construct
SAYHPAQ

SEQ ID NO: 146383 - protein, 7 aa, synthetic construct
SAYHQAM

SEQ ID NO: 146384 - protein, 7 aa, synthetic construct
SAYHQPV

SEQ ID NO: 146385 - protein, 7 aa, synthetic construct
SAYKGQM

SEQ ID NO: 146386 - protein, 7 aa, synthetic construct
SAYMGDK

SEQ ID NO: 146387 - protein, 7 aa, synthetic construct
SAYNASM

SEQ ID NO: 146388 - protein, 7 aa, synthetic construct
SAYNPKN

SEQ ID NO: 146389 - protein, 7 aa, synthetic construct
SAYNPRP

SEQ ID NO: 146390 - protein, 7 aa, synthetic construct
SAYNTPK

SEQ ID NO: 146391 - protein, 7 aa, synthetic construct
SAYPKPH

SEQ ID NO: 146392 - protein, 7 aa, synthetic construct
SAYPKTY

SEQ ID NO: 146393 - protein, 7 aa, synthetic construct
SAYQKNQ

SEQ ID NO: 146394 - protein, 7 aa, synthetic construct
SAYQQKQ

SEQ ID NO: 146395 - protein, 7 aa, synthetic construct
SAYQTKS

SEQ ID NO: 146396 - protein, 7 aa, synthetic construct
SAYRHDH

SEQ ID NO: 146397 - protein, 7 aa, synthetic construct
SAYRNQM

SEQ ID NO: 146398 - protein, 7 aa, synthetic construct
SAYTPKA

SEQ ID NO: 146399 - protein, 7 aa, synthetic construct
SAYTSGL

SEQ ID NO: 146400 - protein, 7 aa, synthetic construct
SAYTTKN

SEQ ID NO: 146401 - protein, 7 aa, synthetic construct
SDAAARK

SEQ ID NO: 146402 - protein, 7 aa, synthetic construct
SDAHQFR

SEQ ID NO: 146403 - protein, 7 aa, synthetic construct
SDAKARS

SEQ ID NO: 146404 - protein, 7 aa, synthetic construct
SDAKNNR

SEQ ID NO: 146405 - protein, 7 aa, synthetic construct
SDAMRRP

SEQ ID NO: 146406 - protein, 7 aa, synthetic construct
SDANLKR

SEQ ID NO: 146407 - protein, 7 aa, synthetic construct
SDAQKRL

SEQ ID NO: 146408 - protein, 7 aa, synthetic construct
SDARMNK

SEQ ID NO: 146409 - protein, 7 aa, synthetic construct
SDATRYM

SEQ ID NO: 146410 - protein, 7 aa, synthetic construct
SDDHRRF

SEQ ID NO: 146411 - protein, 7 aa, synthetic construct
SDGRNMK

SEQ ID NO: 146412 - protein, 7 aa, synthetic construct
SDHHLSE

SEQ ID NO: 146413 - protein, 7 aa, synthetic construct
SDHKRPI

SEQ ID NO: 146414 - protein, 7 aa, synthetic construct
SDIKNSR

SEQ ID NO: 146415 - protein, 7 aa, synthetic construct
SDIKQRA

SEQ ID NO: 146416 - protein, 7 aa, synthetic construct
SDIKSAK

SEQ ID NO: 146417 - protein, 7 aa, synthetic construct
SDINRKL

SEQ ID NO: 146418 - protein, 7 aa, synthetic construct
SDITKFK

SEQ ID NO: 146419 - protein, 7 aa, synthetic construct
SDKAIRT

SEQ ID NO: 146420 - protein, 7 aa, synthetic construct
SDKAKER

SEQ ID NO: 146421 - protein, 7 aa, synthetic construct
SDKGMNK

SEQ ID NO: 146422 - protein, 7 aa, synthetic construct
SDKGNRA

SEQ ID NO: 146423 - protein, 7 aa, synthetic construct
SDKGQGR

SEQ ID NO: 146424 - protein, 7 aa, synthetic construct
SDKGTRH

SEQ ID NO: 146425 - protein, 7 aa, synthetic construct
SDKHRTV

SEQ ID NO: 146426 - protein, 7 aa, synthetic construct
SDKKWAA

SEQ ID NO: 146427 - protein, 7 aa, synthetic construct
SDKLTRG

SEQ ID NO: 146428 - protein, 7 aa, synthetic construct
SDKMKYY

SEQ ID NO: 146429 - protein, 7 aa, synthetic construct
SDKPKSY

SEQ ID NO: 146430 - protein, 7 aa, synthetic construct
SDKPRVQ

SEQ ID NO: 146431 - protein, 7 aa, synthetic construct
SDKRAAM

SEQ ID NO: 146432 - protein, 7 aa, synthetic construct
SDKREFK

SEQ ID NO: 146433 - protein, 7 aa, synthetic construct
SDKREIR

SEQ ID NO: 146434 - protein, 7 aa, synthetic construct
SDKRPSQ

SEQ ID NO: 146435 - protein, 7 aa, synthetic construct
SDKTHRT

SEQ ID NO: 146436 - protein, 7 aa, synthetic construct
SDKTISR

SEQ ID NO: 146437 - protein, 7 aa, synthetic construct
SDKTRDK

SEQ ID NO: 146438 - protein, 7 aa, synthetic construct
SDLNKRS

SEQ ID NO: 146439 - protein, 7 aa, synthetic construct
SDLRNKT

SEQ ID NO: 146440 - protein, 7 aa, synthetic construct
SDMKPKF

SEQ ID NO: 146441 - protein, 7 aa, synthetic construct
SDMKQRG

SEQ ID NO: 146442 - protein, 7 aa, synthetic construct
SDMMKTK

SEQ ID NO: 146443 - protein, 7 aa, synthetic construct
SDMRVAK

SEQ ID NO: 146444 - protein, 7 aa, synthetic construct
SDNAKPK

SEQ ID NO: 146445 - protein, 7 aa, synthetic construct
SDNKGRN

SEQ ID NO: 146446 - protein, 7 aa, synthetic construct
SDNKMLR

SEQ ID NO: 146447 - protein, 7 aa, synthetic construct
SDNKSKW

SEQ ID NO: 146448 - protein, 7 aa, synthetic construct
SDNLKSR

SEQ ID NO: 146449 - protein, 7 aa, synthetic construct
SDNRTRA

SEQ ID NO: 146450 - protein, 7 aa, synthetic construct
SDPNAKR

SEQ ID NO: 146451 - protein, 7 aa, synthetic construct
SDPPKRF

SEQ ID NO: 146452 - protein, 7 aa, synthetic construct
SDPRPGR

SEQ ID NO: 146453 - protein, 7 aa, synthetic construct
SDQAAKK

SEQ ID NO: 146454 - protein, 7 aa, synthetic construct
SDQARKM

SEQ ID NO: 146455 - protein, 7 aa, synthetic construct
SDQKIKF

SEQ ID NO: 146456 - protein, 7 aa, synthetic construct
SDQKNGW

SEQ ID NO: 146457 - protein, 7 aa, synthetic construct
SDQNPKR

SEQ ID NO: 146458 - protein, 7 aa, synthetic construct
SDQTRRV

SEQ ID NO: 146459 - protein, 7 aa, synthetic construct
SDRHMKV

SEQ ID NO: 146460 - protein, 7 aa, synthetic construct
SDRHRTS

SEQ ID NO: 146461 - protein, 7 aa, synthetic construct
SDRIPKN

SEQ ID NO: 146462 - protein, 7 aa, synthetic construct
SDRISKT

SEQ ID NO: 146463 - protein, 7 aa, synthetic construct
SDRKATM

SEQ ID NO: 146464 - protein, 7 aa, synthetic construct
SDRKFQG

SEQ ID NO: 146465 - protein, 7 aa, synthetic construct
SDRKGNT

SEQ ID NO: 146466 - protein, 7 aa, synthetic construct
SDRKPNY

SEQ ID NO: 146467 - protein, 7 aa, synthetic construct
SDRKSKE

SEQ ID NO: 146468 - protein, 7 aa, synthetic construct
SDRLSKN

SEQ ID NO: 146469 - protein, 7 aa, synthetic construct
SDRMQKA

SEQ ID NO: 146470 - protein, 7 aa, synthetic construct
SDRPINR

SEQ ID NO: 146471 - protein, 7 aa, synthetic construct
SDRPKAI

SEQ ID NO: 146472 - protein, 7 aa, synthetic construct
SDRQMRN

SEQ ID NO: 146473 - protein, 7 aa, synthetic construct
SDRVYKP

SEQ ID NO: 146474 - protein, 7 aa, synthetic construct
SDRYMKA

SEQ ID NO: 146475 - protein, 7 aa, synthetic construct
SDSKMVR

SEQ ID NO: 146476 - protein, 7 aa, synthetic construct
SDTAYMV

SEQ ID NO: 146477 - protein, 7 aa, synthetic construct
SDVGHYR

SEQ ID NO: 146478 - protein, 7 aa, synthetic construct
SDVKPRT

SEQ ID NO: 146479 - protein, 7 aa, synthetic construct
SDYKIPK

SEQ ID NO: 146480 - protein, 7 aa, synthetic construct
SEAKNIR

SEQ ID NO: 146481 - protein, 7 aa, synthetic construct
SEAKRQN

SEQ ID NO: 146482 - protein, 7 aa, synthetic construct
SEAMKRN

SEQ ID NO: 146483 - protein, 7 aa, synthetic construct
SEAQKRT

SEQ ID NO: 146484 - protein, 7 aa, synthetic construct
SEFKGNK

SEQ ID NO: 146485 - protein, 7 aa, synthetic construct
SEIKPKM

SEQ ID NO: 146486 - protein, 7 aa, synthetic construct
SEIKVRQ

SEQ ID NO: 146487 - protein, 7 aa, synthetic construct
SEKFNNR

SEQ ID NO: 146488 - protein, 7 aa, synthetic construct
SEKILRS

SEQ ID NO: 146489 - protein, 7 aa, synthetic construct
SEKILRT

SEQ ID NO: 146490 - protein, 7 aa, synthetic construct
SEKKFNV

SEQ ID NO: 146491 - protein, 7 aa, synthetic construct
SEKMKTW

SEQ ID NO: 146492 - protein, 7 aa, synthetic construct
SEKPHKL

SEQ ID NO: 146493 - protein, 7 aa, synthetic construct
SEKREIR

SEQ ID NO: 146494 - protein, 7 aa, synthetic construct
SEKRPAV

SEQ ID NO: 146495 - protein, 7 aa, synthetic construct
SEKRVSS

SEQ ID NO: 146496 - protein, 7 aa, synthetic construct
SEKSRSM

SEQ ID NO: 146497 - protein, 7 aa, synthetic construct
SEKTLRL

SEQ ID NO: 146498 - protein, 7 aa, synthetic construct
SEKVKVL

SEQ ID NO: 146499 - protein, 7 aa, synthetic construct
SELKPKI

SEQ ID NO: 146500 - protein, 7 aa, synthetic construct
SENKFRS

SEQ ID NO: 146501 - protein, 7 aa, synthetic construct
SENPKRM

SEQ ID NO: 146502 - protein, 7 aa, synthetic construct
SENTTKR

SEQ ID NO: 146503 - protein, 7 aa, synthetic construct
SEPTKRS

SEQ ID NO: 146504 - protein, 7 aa, synthetic construct
SERASKS

SEQ ID NO: 146505 - protein, 7 aa, synthetic construct
SERFIKG

SEQ ID NO: 146506 - protein, 7 aa, synthetic construct
SERKAQN

SEQ ID NO: 146507 - protein, 7 aa, synthetic construct
SERKSTS

SEQ ID NO: 146508 - protein, 7 aa, synthetic construct
SERLNKA

SEQ ID NO: 146509 - protein, 7 aa, synthetic construct
SERPKMA

SEQ ID NO: 146510 - protein, 7 aa, synthetic construct
SERQSKS

SEQ ID NO: 146511 - protein, 7 aa, synthetic construct
SERVGRN

SEQ ID NO: 146512 - protein, 7 aa, synthetic construct
SERVLKT

SEQ ID NO: 146513 - protein, 7 aa, synthetic construct
SERVRTQ

SEQ ID NO: 146514 - protein, 7 aa, synthetic construct
SERVVTK

SEQ ID NO: 146515 - protein, 7 aa, synthetic construct
SETKFPR

SEQ ID NO: 146516 - protein, 7 aa, synthetic construct
SEVNRGR

SEQ ID NO: 146517 - protein, 7 aa, synthetic construct
SEVWQSK

SEQ ID NO: 146518 - protein, 7 aa, synthetic construct
SEWALRD

SEQ ID NO: 146519 - protein, 7 aa, synthetic construct
SFAKPSS

SEQ ID NO: 146520 - protein, 7 aa, synthetic construct
SFANIKA

SEQ ID NO: 146521 - protein, 7 aa, synthetic construct
SFANMKA

SEQ ID NO: 146522 - protein, 7 aa, synthetic construct
SFATKLT

SEQ ID NO: 146523 - protein, 7 aa, synthetic construct
SFFDGQS

SEQ ID NO: 146524 - protein, 7 aa, synthetic construct
SFGAVKS

SEQ ID NO: 146525 - protein, 7 aa, synthetic construct
SFGGLKG

SEQ ID NO: 146526 - protein, 7 aa, synthetic construct
SFGHMKS

SEQ ID NO: 146527 - protein, 7 aa, synthetic construct
SFGHPKP

SEQ ID NO: 146528 - protein, 7 aa, synthetic construct
SFGKKDS

SEQ ID NO: 146529 - protein, 7 aa, synthetic construct
SFGQIKG

SEQ ID NO: 146530 - protein, 7 aa, synthetic construct
SFGRAHV

SEQ ID NO: 146531 - protein, 7 aa, synthetic construct
SFGSTNR

SEQ ID NO: 146532 - protein, 7 aa, synthetic construct
SFGVKHS

SEQ ID NO: 146533 - protein, 7 aa, synthetic construct
SFHAVKA

SEQ ID NO: 146534 - protein, 7 aa, synthetic construct
SFHGGPM

SEQ ID NO: 146535 - protein, 7 aa, synthetic construct
SFHGPKQ

SEQ ID NO: 146536 - protein, 7 aa, synthetic construct
SFHIKGG

SEQ ID NO: 146537 - protein, 7 aa, synthetic construct
SFHKGPG

SEQ ID NO: 146538 - protein, 7 aa, synthetic construct
SFHNAAK

SEQ ID NO: 146539 - protein, 7 aa, synthetic construct
SFHPKSI

SEQ ID NO: 146540 - protein, 7 aa, synthetic construct
SFHQTKA

SEQ ID NO: 146541 - protein, 7 aa, synthetic construct
SFHTTKA

SEQ ID NO: 146542 - protein, 7 aa, synthetic construct
SFHVKQP

SEQ ID NO: 146543 - protein, 7 aa, synthetic construct
SFIKPKE

SEQ ID NO: 146544 - protein, 7 aa, synthetic construct
SFKADGR

SEQ ID NO: 146545 - protein, 7 aa, synthetic construct
SFKAQDR

SEQ ID NO: 146546 - protein, 7 aa, synthetic construct
SFKASQY

SEQ ID NO: 146547 - protein, 7 aa, synthetic construct
SFKAVNH

SEQ ID NO: 146548 - protein, 7 aa, synthetic construct
SFKELGK

SEQ ID NO: 146549 - protein, 7 aa, synthetic construct
SFKHQIG

SEQ ID NO: 146550 - protein, 7 aa, synthetic construct
SFKHQLA

SEQ ID NO: 146551 - protein, 7 aa, synthetic construct
SFKHSSG

SEQ ID NO: 146552 - protein, 7 aa, synthetic construct
SFKHTNV

SEQ ID NO: 146553 - protein, 7 aa, synthetic construct
SFKITAN

SEQ ID NO: 146554 - protein, 7 aa, synthetic construct
SFKKDFS

SEQ ID NO: 146555 - protein, 7 aa, synthetic construct
SFKKDHS

SEQ ID NO: 146556 - protein, 7 aa, synthetic construct
SFKLQAS

SEQ ID NO: 146557 - protein, 7 aa, synthetic construct
SFKMMNA

SEQ ID NO: 146558 - protein, 7 aa, synthetic construct
SFKNEVR

SEQ ID NO: 146559 - protein, 7 aa, synthetic construct
SFKNTDR

SEQ ID NO: 146560 - protein, 7 aa, synthetic construct
SFKPASM

SEQ ID NO: 146561 - protein, 7 aa, synthetic construct
SFKPFKD

SEQ ID NO: 146562 - protein, 7 aa, synthetic construct
SFKPREL

SEQ ID NO: 146563 - protein, 7 aa, synthetic construct
SFKRGLE

SEQ ID NO: 146564 - protein, 7 aa, synthetic construct
SFKRGTE

SEQ ID NO: 146565 - protein, 7 aa, synthetic construct
SFKSQMV

SEQ ID NO: 146566 - protein, 7 aa, synthetic construct
SFKTGML

SEQ ID NO: 146567 - protein, 7 aa, synthetic construct
SFKVTAH

SEQ ID NO: 146568 - protein, 7 aa, synthetic construct
SFKWEQG

SEQ ID NO: 146569 - protein, 7 aa, synthetic construct
SFKYMKD

SEQ ID NO: 146570 - protein, 7 aa, synthetic construct
SFMKPSP

SEQ ID NO: 146571 - protein, 7 aa, synthetic construct
SFMKSDK

SEQ ID NO: 146572 - protein, 7 aa, synthetic construct
SFNANSR

SEQ ID NO: 146573 - protein, 7 aa, synthetic construct
SFNGGYK

SEQ ID NO: 146574 - protein, 7 aa, synthetic construct
SFNGNRL

SEQ ID NO: 146575 - protein, 7 aa, synthetic construct
SFNKPIQ

SEQ ID NO: 146576 - protein, 7 aa, synthetic construct
SFNMHKP

SEQ ID NO: 146577 - protein, 7 aa, synthetic construct
SFNNVSK

SEQ ID NO: 146578 - protein, 7 aa, synthetic construct
SFNRGPL

SEQ ID NO: 146579 - protein, 7 aa, synthetic construct
SFNTNTR

SEQ ID NO: 146580 - protein, 7 aa, synthetic construct
SFNTQKF

SEQ ID NO: 146581 - protein, 7 aa, synthetic construct
SFPKAQM

SEQ ID NO: 146582 - protein, 7 aa, synthetic construct
SFPKPKD

SEQ ID NO: 146583 - protein, 7 aa, synthetic construct
SFQATGR

SEQ ID NO: 146584 - protein, 7 aa, synthetic construct
SFQGNKG

SEQ ID NO: 146585 - protein, 7 aa, synthetic construct
SFQMAGK

SEQ ID NO: 146586 - protein, 7 aa, synthetic construct
SFQRGHI

SEQ ID NO: 146587 - protein, 7 aa, synthetic construct
SFQSAKL

SEQ ID NO: 146588 - protein, 7 aa, synthetic construct
SFQTKQQ

SEQ ID NO: 146589 - protein, 7 aa, synthetic construct
SFRDLDW

SEQ ID NO: 146590 - protein, 7 aa, synthetic construct
SFRDRGI

SEQ ID NO: 146591 - protein, 7 aa, synthetic construct
SFRQTKD

SEQ ID NO: 146592 - protein, 7 aa, synthetic construct
SFRVSNP

SEQ ID NO: 146593 - protein, 7 aa, synthetic construct
SFSAVKH

SEQ ID NO: 146594 - protein, 7 aa, synthetic construct
SFSGSRQ

SEQ ID NO: 146595 - protein, 7 aa, synthetic construct
SFSKHTS

SEQ ID NO: 146596 - protein, 7 aa, synthetic construct
SFSKPPP

SEQ ID NO: 146597 - protein, 7 aa, synthetic construct
SFSMGGK

SEQ ID NO: 146598 - protein, 7 aa, synthetic construct
SFSNAKA

SEQ ID NO: 146599 - protein, 7 aa, synthetic construct
SFSNAKM

SEQ ID NO: 146600 - protein, 7 aa, synthetic construct
SFSPHHA

SEQ ID NO: 146601 - protein, 7 aa, synthetic construct
SFSQGPK

SEQ ID NO: 146602 - protein, 7 aa, synthetic construct
SFTGTRM

SEQ ID NO: 146603 - protein, 7 aa, synthetic construct
SFTKEKF

SEQ ID NO: 146604 - protein, 7 aa, synthetic construct
SFTKPAM

SEQ ID NO: 146605 - protein, 7 aa, synthetic construct
SFTNASK

SEQ ID NO: 146606 - protein, 7 aa, synthetic construct
SFTSHKG

SEQ ID NO: 146607 - protein, 7 aa, synthetic construct
SFTYVHE

SEQ ID NO: 146608 - protein, 7 aa, synthetic construct
SFVKAHS

SEQ ID NO: 146609 - protein, 7 aa, synthetic construct
SFVKAQQ

SEQ ID NO: 146610 - protein, 7 aa, synthetic construct
SFVKQDK

SEQ ID NO: 146611 - protein, 7 aa, synthetic construct
SGAAAGR

SEQ ID NO: 146612 - protein, 7 aa, synthetic construct
SGAANVR

SEQ ID NO: 146613 - protein, 7 aa, synthetic construct
SGAHIKI

SEQ ID NO: 146614 - protein, 7 aa, synthetic construct
SGAIKLT

SEQ ID NO: 146615 - protein, 7 aa, synthetic construct
SGAKAYI

SEQ ID NO: 146616 - protein, 7 aa, synthetic construct
SGAKHVL

SEQ ID NO: 146617 - protein, 7 aa, synthetic construct
SGAMKVI

SEQ ID NO: 146618 - protein, 7 aa, synthetic construct
SGANVQR

SEQ ID NO: 146619 - protein, 7 aa, synthetic construct
SGAQRHG

SEQ ID NO: 146620 - protein, 7 aa, synthetic construct
SGARAKE

SEQ ID NO: 146621 - protein, 7 aa, synthetic construct
SGAREKY

SEQ ID NO: 146622 - protein, 7 aa, synthetic construct
SGAYGQK

SEQ ID NO: 146623 - protein, 7 aa, synthetic construct
SGDKFGK

SEQ ID NO: 146624 - protein, 7 aa, synthetic construct
SGDQPLS

SEQ ID NO: 146625 - protein, 7 aa, synthetic construct
SGDRPVR

SEQ ID NO: 146626 - protein, 7 aa, synthetic construct
SGDVKRQ

SEQ ID NO: 146627 - protein, 7 aa, synthetic construct
SGFAPQK

SEQ ID NO: 146628 - protein, 7 aa, synthetic construct
SGFGMNK

SEQ ID NO: 146629 - protein, 7 aa, synthetic construct
SGFKNAQ

SEQ ID NO: 146630 - protein, 7 aa, synthetic construct
SGFKNSN

SEQ ID NO: 146631 - protein, 7 aa, synthetic construct
SGFNAKG

SEQ ID NO: 146632 - protein, 7 aa, synthetic construct
SGFTGQK

SEQ ID NO: 146633 - protein, 7 aa, synthetic construct
SGGAQSR

SEQ ID NO: 146634 - protein, 7 aa, synthetic construct
SGGGTFK

SEQ ID NO: 146635 - protein, 7 aa, synthetic construct
SGGGYAK

SEQ ID NO: 146636 - protein, 7 aa, synthetic construct
SGGMLHK

SEQ ID NO: 146637 - protein, 7 aa, synthetic construct
SGGMPYK

SEQ ID NO: 146638 - protein, 7 aa, synthetic construct
SGGNHLK

SEQ ID NO: 146639 - protein, 7 aa, synthetic construct
SGGNRTV

SEQ ID NO: 146640 - protein, 7 aa, synthetic construct
SGGRVMV

SEQ ID NO: 146641 - protein, 7 aa, synthetic construct
SGGSLHK

SEQ ID NO: 146642 - protein, 7 aa, synthetic construct
SGGYPTK

SEQ ID NO: 146643 - protein, 7 aa, synthetic construct
SGGYQLK

SEQ ID NO: 146644 - protein, 7 aa, synthetic construct
SGHAGKT

SEQ ID NO: 146645 - protein, 7 aa, synthetic construct
SGHAGKV

SEQ ID NO: 146646 - protein, 7 aa, synthetic construct
SGHGVAK

SEQ ID NO: 146647 - protein, 7 aa, synthetic construct
SGHKAGW

SEQ ID NO: 146648 - protein, 7 aa, synthetic construct
SGHKLNL

SEQ ID NO: 146649 - protein, 7 aa, synthetic construct
SGHKLQI

SEQ ID NO: 146650 - protein, 7 aa, synthetic construct
SGHKPNL

SEQ ID NO: 146651 - protein, 7 aa, synthetic construct
SGHPGGR

SEQ ID NO: 146652 - protein, 7 aa, synthetic construct
SGHQHKM

SEQ ID NO: 146653 - protein, 7 aa, synthetic construct
SGHQIKQ

SEQ ID NO: 146654 - protein, 7 aa, synthetic construct
SGHQMFK

SEQ ID NO: 146655 - protein, 7 aa, synthetic construct
SGHRNGT

SEQ ID NO: 146656 - protein, 7 aa, synthetic construct
SGHTPSK

SEQ ID NO: 146657 - protein, 7 aa, synthetic construct
SGHTTAK

SEQ ID NO: 146658 - protein, 7 aa, synthetic construct
SGHTWKA

SEQ ID NO: 146659 - protein, 7 aa, synthetic construct
SGIARPT

SEQ ID NO: 146660 - protein, 7 aa, synthetic construct
SGIHKSF

SEQ ID NO: 146661 - protein, 7 aa, synthetic construct
SGIHKSI

SEQ ID NO: 146662 - protein, 7 aa, synthetic construct
SGIKHSS

SEQ ID NO: 146663 - protein, 7 aa, synthetic construct
SGIRGQY

SEQ ID NO: 146664 - protein, 7 aa, synthetic construct
SGIVKVQ

SEQ ID NO: 146665 - protein, 7 aa, synthetic construct
SGKDQVR

SEQ ID NO: 146666 - protein, 7 aa, synthetic construct
SGKEKQW

SEQ ID NO: 146667 - protein, 7 aa, synthetic construct
SGKFRDS

SEQ ID NO: 146668 - protein, 7 aa, synthetic construct
SGKGAYN

SEQ ID NO: 146669 - protein, 7 aa, synthetic construct
SGKGYGQ

SEQ ID NO: 146670 - protein, 7 aa, synthetic construct
SGKHISL

SEQ ID NO: 146671 - protein, 7 aa, synthetic construct
SGKKQNE

SEQ ID NO: 146672 - protein, 7 aa, synthetic construct
SGKMMDR

SEQ ID NO: 146673 - protein, 7 aa, synthetic construct
SGKTDLR

SEQ ID NO: 146674 - protein, 7 aa, synthetic construct
SGKVIHI

SEQ ID NO: 146675 - protein, 7 aa, synthetic construct
SGKVSYQ

SEQ ID NO: 146676 - protein, 7 aa, synthetic construct
SGKYSMI

SEQ ID NO: 146677 - protein, 7 aa, synthetic construct
SGLGLQR

SEQ ID NO: 146678 - protein, 7 aa, synthetic construct
SGLGMNR

SEQ ID NO: 146679 - protein, 7 aa, synthetic construct
SGLKMPI

SEQ ID NO: 146680 - protein, 7 aa, synthetic construct
SGLKPVL

SEQ ID NO: 146681 - protein, 7 aa, synthetic construct
SGLNNSR

SEQ ID NO: 146682 - protein, 7 aa, synthetic construct
SGLQVSR

SEQ ID NO: 146683 - protein, 7 aa, synthetic construct
SGMAYGK

SEQ ID NO: 146684 - protein, 7 aa, synthetic construct
SGMGFQK

SEQ ID NO: 146685 - protein, 7 aa, synthetic construct
SGMGHTK

SEQ ID NO: 146686 - protein, 7 aa, synthetic construct
SGMHTTK

SEQ ID NO: 146687 - protein, 7 aa, synthetic construct
SGMKYGP

SEQ ID NO: 146688 - protein, 7 aa, synthetic construct
SGMNAFM

SEQ ID NO: 146689 - protein, 7 aa, synthetic construct
SGMNHAK

SEQ ID NO: 146690 - protein, 7 aa, synthetic construct
SGMNRSY

SEQ ID NO: 146691 - protein, 7 aa, synthetic construct
SGMNTQR

SEQ ID NO: 146692 - protein, 7 aa, synthetic construct
SGMQNIR

SEQ ID NO: 146693 - protein, 7 aa, synthetic construct
SGNGLSR

SEQ ID NO: 146694 - protein, 7 aa, synthetic construct
SGNGMTR

SEQ ID NO: 146695 - protein, 7 aa, synthetic construct
SGNHTSK

SEQ ID NO: 146696 - protein, 7 aa, synthetic construct
SGNNMFK

SEQ ID NO: 146697 - protein, 7 aa, synthetic construct
SGNNTSR

SEQ ID NO: 146698 - protein, 7 aa, synthetic construct
SGNQIIR

SEQ ID NO: 146699 - protein, 7 aa, synthetic construct
SGNSVRM

SEQ ID NO: 146700 - protein, 7 aa, synthetic construct
SGNVSSR

SEQ ID NO: 146701 - protein, 7 aa, synthetic construct
SGNYATK

SEQ ID NO: 146702 - protein, 7 aa, synthetic construct
SGNYAVK

SEQ ID NO: 146703 - protein, 7 aa, synthetic construct
SGPKLIT

SEQ ID NO: 146704 - protein, 7 aa, synthetic construct
SGPKMLV

SEQ ID NO: 146705 - protein, 7 aa, synthetic construct
SGPNQMR

SEQ ID NO: 146706 - protein, 7 aa, synthetic construct
SGPNVTR

SEQ ID NO: 146707 - protein, 7 aa, synthetic construct
SGPQITR

SEQ ID NO: 146708 - protein, 7 aa, synthetic construct
SGPQRTF

SEQ ID NO: 146709 - protein, 7 aa, synthetic construct
SGPREIR

SEQ ID NO: 146710 - protein, 7 aa, synthetic construct
SGPRPSM

SEQ ID NO: 146711 - protein, 7 aa, synthetic construct
SGPYKAV

SEQ ID NO: 146712 - protein, 7 aa, synthetic construct
SGQAFNK

SEQ ID NO: 146713 - protein, 7 aa, synthetic construct
SGQDRQK

SEQ ID NO: 146714 - protein, 7 aa, synthetic construct
SGQGKYV

SEQ ID NO: 146715 - protein, 7 aa, synthetic construct
SGQIHKQ

SEQ ID NO: 146716 - protein, 7 aa, synthetic construct
SGQIRIT

SEQ ID NO: 146717 - protein, 7 aa, synthetic construct
SGQKTEK

SEQ ID NO: 146718 - protein, 7 aa, synthetic construct
SGQLRAI

SEQ ID NO: 146719 - protein, 7 aa, synthetic construct
SGQNLLR

SEQ ID NO: 146720 - protein, 7 aa, synthetic construct
SGQRNLA

SEQ ID NO: 146721 - protein, 7 aa, synthetic construct
SGQSYVK

SEQ ID NO: 146722 - protein, 7 aa, synthetic construct
SGQTAHK

SEQ ID NO: 146723 - protein, 7 aa, synthetic construct
SGQVQTR

SEQ ID NO: 146724 - protein, 7 aa, synthetic construct
SGQVRNT

SEQ ID NO: 146725 - protein, 7 aa, synthetic construct
SGQWVRD

SEQ ID NO: 146726 - protein, 7 aa, synthetic construct
SGQYKPH

SEQ ID NO: 146727 - protein, 7 aa, synthetic construct
SGQYVLK

SEQ ID NO: 146728 - protein, 7 aa, synthetic construct
SGRAIPN

SEQ ID NO: 146729 - protein, 7 aa, synthetic construct
SGRAPIV

SEQ ID NO: 146730 - protein, 7 aa, synthetic construct
SGRETKI

SEQ ID NO: 146731 - protein, 7 aa, synthetic construct
SGRGLPM

SEQ ID NO: 146732 - protein, 7 aa, synthetic construct
SGRITHV

SEQ ID NO: 146733 - protein, 7 aa, synthetic construct
SGRLEKN

SEQ ID NO: 146734 - protein, 7 aa, synthetic construct
SGRPMAI

SEQ ID NO: 146735 - protein, 7 aa, synthetic construct
SGRPQPF

SEQ ID NO: 146736 - protein, 7 aa, synthetic construct
SGRQANT

SEQ ID NO: 146737 - protein, 7 aa, synthetic construct
SGRQSPA

SEQ ID NO: 146738 - protein, 7 aa, synthetic construct
SGRVHTM

SEQ ID NO: 146739 - protein, 7 aa, synthetic construct
SGSFASK

SEQ ID NO: 146740 - protein, 7 aa, synthetic construct
SGSGREK

SEQ ID NO: 146741 - protein, 7 aa, synthetic construct
SGSKKDY

SEQ ID NO: 146742 - protein, 7 aa, synthetic construct
SGSMMKH

SEQ ID NO: 146743 - protein, 7 aa, synthetic construct
SGSQWVK

SEQ ID NO: 146744 - protein, 7 aa, synthetic construct
SGSRNIG

SEQ ID NO: 146745 - protein, 7 aa, synthetic construct
SGSSMYK

SEQ ID NO: 146746 - protein, 7 aa, synthetic construct
SGTGFGK

SEQ ID NO: 146747 - protein, 7 aa, synthetic construct
SGTHFKG

SEQ ID NO: 146748 - protein, 7 aa, synthetic construct
SGTKAYI

SEQ ID NO: 146749 - protein, 7 aa, synthetic construct
SGTMHGK

SEQ ID NO: 146750 - protein, 7 aa, synthetic construct
SGTRHTG

SEQ ID NO: 146751 - protein, 7 aa, synthetic construct
SGTRPDR

SEQ ID NO: 146752 - protein, 7 aa, synthetic construct
SGTSNFR

SEQ ID NO: 146753 - protein, 7 aa, synthetic construct
SGTSNGR

SEQ ID NO: 146754 - protein, 7 aa, synthetic construct
SGTSRIY

SEQ ID NO: 146755 - protein, 7 aa, synthetic construct
SGTTHQR

SEQ ID NO: 146756 - protein, 7 aa, synthetic construct
SGTVMKY

SEQ ID NO: 146757 - protein, 7 aa, synthetic construct
SGVAEKR

SEQ ID NO: 146758 - protein, 7 aa, synthetic construct
SGVGNYK

SEQ ID NO: 146759 - protein, 7 aa, synthetic construct
SGVLRKE

SEQ ID NO: 146760 - protein, 7 aa, synthetic construct
SGVRYKE

SEQ ID NO: 146761 - protein, 7 aa, synthetic construct
SGVTPRM

SEQ ID NO: 146762 - protein, 7 aa, synthetic construct
SGYGIAK

SEQ ID NO: 146763 - protein, 7 aa, synthetic construct
SGYGSTL

SEQ ID NO: 146764 - protein, 7 aa, synthetic construct
SGYKFSD

SEQ ID NO: 146765 - protein, 7 aa, synthetic construct
SGYKSHP

SEQ ID NO: 146766 - protein, 7 aa, synthetic construct
SGYMLEK

SEQ ID NO: 146767 - protein, 7 aa, synthetic construct
SGYMMEK

SEQ ID NO: 146768 - protein, 7 aa, synthetic construct
SGYQKLG

SEQ ID NO: 146769 - protein, 7 aa, synthetic construct
SHAAAPK

SEQ ID NO: 146770 - protein, 7 aa, synthetic construct
SHAALPR

SEQ ID NO: 146771 - protein, 7 aa, synthetic construct
SHAAMSK

SEQ ID NO: 146772 - protein, 7 aa, synthetic construct
SHAGPKT

SEQ ID NO: 146773 - protein, 7 aa, synthetic construct
SHAKAPM

SEQ ID NO: 146774 - protein, 7 aa, synthetic construct
SHAKWME

SEQ ID NO: 146775 - protein, 7 aa, synthetic construct
SHALKTT

SEQ ID NO: 146776 - protein, 7 aa, synthetic construct
SHAQAPR

SEQ ID NO: 146777 - protein, 7 aa, synthetic construct
SHAQIRQ

SEQ ID NO: 146778 - protein, 7 aa, synthetic construct
SHAQMVR

SEQ ID NO: 146779 - protein, 7 aa, synthetic construct
SHAQSVK

SEQ ID NO: 146780 - protein, 7 aa, synthetic construct
SHASQLK

SEQ ID NO: 146781 - protein, 7 aa, synthetic construct
SHASSRF

SEQ ID NO: 146782 - protein, 7 aa, synthetic construct
SHASTGK

SEQ ID NO: 146783 - protein, 7 aa, synthetic construct
SHATKQW

SEQ ID NO: 146784 - protein, 7 aa, synthetic construct
SHATSQR

SEQ ID NO: 146785 - protein, 7 aa, synthetic construct
SHAVMSR

SEQ ID NO: 146786 - protein, 7 aa, synthetic construct
SHAVRQV

SEQ ID NO: 146787 - protein, 7 aa, synthetic construct
SHAVYKP

SEQ ID NO: 146788 - protein, 7 aa, synthetic construct
SHAYTNI

SEQ ID NO: 146789 - protein, 7 aa, synthetic construct
SHDGKKF

SEQ ID NO: 146790 - protein, 7 aa, synthetic construct
SHDKFRS

SEQ ID NO: 146791 - protein, 7 aa, synthetic construct
SHDKPGR

SEQ ID NO: 146792 - protein, 7 aa, synthetic construct
SHDTTKR

SEQ ID NO: 146793 - protein, 7 aa, synthetic construct
SHFAVKA

SEQ ID NO: 146794 - protein, 7 aa, synthetic construct
SHFKPNS

SEQ ID NO: 146795 - protein, 7 aa, synthetic construct
SHFQTSN

SEQ ID NO: 146796 - protein, 7 aa, synthetic construct
SHGAKTI

SEQ ID NO: 146797 - protein, 7 aa, synthetic construct
SHGANPR

SEQ ID NO: 146798 - protein, 7 aa, synthetic construct
SHGGMKS

SEQ ID NO: 146799 - protein, 7 aa, synthetic construct
SHGIKVV

SEQ ID NO: 146800 - protein, 7 aa, synthetic construct
SHGIPKY

SEQ ID NO: 146801 - protein, 7 aa, synthetic construct
SHGIRPL

SEQ ID NO: 146802 - protein, 7 aa, synthetic construct
SHGKQYP

SEQ ID NO: 146803 - protein, 7 aa, synthetic construct
SHGRMGV

SEQ ID NO: 146804 - protein, 7 aa, synthetic construct
SHGRPGI

SEQ ID NO: 146805 - protein, 7 aa, synthetic construct
SHGVRPL

SEQ ID NO: 146806 - protein, 7 aa, synthetic construct
SHGYTER

SEQ ID NO: 146807 - protein, 7 aa, synthetic construct
SHHPLES

SEQ ID NO: 146808 - protein, 7 aa, synthetic construct
SHHQVMK

SEQ ID NO: 146809 - protein, 7 aa, synthetic construct
SHHTRNN

SEQ ID NO: 146810 - protein, 7 aa, synthetic construct
SHKAFQP

SEQ ID NO: 146811 - protein, 7 aa, synthetic construct
SHKAKDT

SEQ ID NO: 146812 - protein, 7 aa, synthetic construct
SHKEIRT

SEQ ID NO: 146813 - protein, 7 aa, synthetic construct
SHKEQRS

SEQ ID NO: 146814 - protein, 7 aa, synthetic construct
SHKFMVA

SEQ ID NO: 146815 - protein, 7 aa, synthetic construct
SHKGADK

SEQ ID NO: 146816 - protein, 7 aa, synthetic construct
SHKGAPY

SEQ ID NO: 146817 - protein, 7 aa, synthetic construct
SHKGGYP

SEQ ID NO: 146818 - protein, 7 aa, synthetic construct
SHKGQYV

SEQ ID NO: 146819 - protein, 7 aa, synthetic construct
SHKGYPI

SEQ ID NO: 146820 - protein, 7 aa, synthetic construct
SHKGYTI

SEQ ID NO: 146821 - protein, 7 aa, synthetic construct
SHKGYVS

SEQ ID NO: 146822 - protein, 7 aa, synthetic construct
SHKIYPA

SEQ ID NO: 146823 - protein, 7 aa, synthetic construct
SHKLERQ

SEQ ID NO: 146824 - protein, 7 aa, synthetic construct
SHKLKFE

SEQ ID NO: 146825 - protein, 7 aa, synthetic construct
SHKLTSI

SEQ ID NO: 146826 - protein, 7 aa, synthetic construct
SHKMLQQ

SEQ ID NO: 146827 - protein, 7 aa, synthetic construct
SHKMSSL

SEQ ID NO: 146828 - protein, 7 aa, synthetic construct
SHKNVTF

SEQ ID NO: 146829 - protein, 7 aa, synthetic construct
SHKPANM

SEQ ID NO: 146830 - protein, 7 aa, synthetic construct
SHKPGFT

SEQ ID NO: 146831 - protein, 7 aa, synthetic construct
SHKPPGY

SEQ ID NO: 146832 - protein, 7 aa, synthetic construct
SHKQQLQ

SEQ ID NO: 146833 - protein, 7 aa, synthetic construct
SHKQSLL

SEQ ID NO: 146834 - protein, 7 aa, synthetic construct
SHKQVRD

SEQ ID NO: 146835 - protein, 7 aa, synthetic construct
SHKSPST

SEQ ID NO: 146836 - protein, 7 aa, synthetic construct
SHKSSLL

SEQ ID NO: 146837 - protein, 7 aa, synthetic construct
SHKVIPQ

SEQ ID NO: 146838 - protein, 7 aa, synthetic construct
SHKVPIT

SEQ ID NO: 146839 - protein, 7 aa, synthetic construct
SHKVSAF

SEQ ID NO: 146840 - protein, 7 aa, synthetic construct
SHKVTVT

SEQ ID NO: 146841 - protein, 7 aa, synthetic construct
SHKYVGV

SEQ ID NO: 146842 - protein, 7 aa, synthetic construct
SHLGPPR

SEQ ID NO: 146843 - protein, 7 aa, synthetic construct
SHLNGSR

SEQ ID NO: 146844 - protein, 7 aa, synthetic construct
SHLQGRT

SEQ ID NO: 146845 - protein, 7 aa, synthetic construct
SHMASIK

SEQ ID NO: 146846 - protein, 7 aa, synthetic construct
SHMASVR

SEQ ID NO: 146847 - protein, 7 aa, synthetic construct
SHMGGAK

SEQ ID NO: 146848 - protein, 7 aa, synthetic construct
SHMGHKV

SEQ ID NO: 146849 - protein, 7 aa, synthetic construct
SHMKMSV

SEQ ID NO: 146850 - protein, 7 aa, synthetic construct
SHMPHKI

SEQ ID NO: 146851 - protein, 7 aa, synthetic construct
SHMQIKN

SEQ ID NO: 146852 - protein, 7 aa, synthetic construct
SHMQKMT

SEQ ID NO: 146853 - protein, 7 aa, synthetic construct
SHMVART

SEQ ID NO: 146854 - protein, 7 aa, synthetic construct
SHNAATR

SEQ ID NO: 146855 - protein, 7 aa, synthetic construct
SHNATAK

SEQ ID NO: 146856 - protein, 7 aa, synthetic construct
SHNGAMR

SEQ ID NO: 146857 - protein, 7 aa, synthetic construct
SHNGRMV

SEQ ID NO: 146858 - protein, 7 aa, synthetic construct
SHNGTTR

SEQ ID NO: 146859 - protein, 7 aa, synthetic construct
SHNHTKI

SEQ ID NO: 146860 - protein, 7 aa, synthetic construct
SHNKPNL

SEQ ID NO: 146861 - protein, 7 aa, synthetic construct
SHNMVRM

SEQ ID NO: 146862 - protein, 7 aa, synthetic construct
SHNPGRM

SEQ ID NO: 146863 - protein, 7 aa, synthetic construct
SHNQMLR

SEQ ID NO: 146864 - protein, 7 aa, synthetic construct
SHNVGLR

SEQ ID NO: 146865 - protein, 7 aa, synthetic construct
SHNVMGK

SEQ ID NO: 146866 - protein, 7 aa, synthetic construct
SHNVSQK

SEQ ID NO: 146867 - protein, 7 aa, synthetic construct
SHNVVRV

SEQ ID NO: 146868 - protein, 7 aa, synthetic construct
SHPARQQ

SEQ ID NO: 146869 - protein, 7 aa, synthetic construct
SHPEKRM

SEQ ID NO: 146870 - protein, 7 aa, synthetic construct
SHPMRGG

SEQ ID NO: 146871 - protein, 7 aa, synthetic construct
SHPRQNI

SEQ ID NO: 146872 - protein, 7 aa, synthetic construct
SHPRQVN

SEQ ID NO: 146873 - protein, 7 aa, synthetic construct
SHPRVKE

SEQ ID NO: 146874 - protein, 7 aa, synthetic construct
SHPSANR

SEQ ID NO: 146875 - protein, 7 aa, synthetic construct
SHPTGTR

SEQ ID NO: 146876 - protein, 7 aa, synthetic construct
SHPTISR

SEQ ID NO: 146877 - protein, 7 aa, synthetic construct
SHPVRSV

SEQ ID NO: 146878 - protein, 7 aa, synthetic construct
SHQAGQK

SEQ ID NO: 146879 - protein, 7 aa, synthetic construct
SHQAMSR

SEQ ID NO: 146880 - protein, 7 aa, synthetic construct
SHQFPKL

SEQ ID NO: 146881 - protein, 7 aa, synthetic construct
SHQFPKN

SEQ ID NO: 146882 - protein, 7 aa, synthetic construct
SHQGQYR

SEQ ID NO: 146883 - protein, 7 aa, synthetic construct
SHQHTKG

SEQ ID NO: 146884 - protein, 7 aa, synthetic construct
SHQKIPH

SEQ ID NO: 146885 - protein, 7 aa, synthetic construct
SHQKSQL

SEQ ID NO: 146886 - protein, 7 aa, synthetic construct
SHQLAKT

SEQ ID NO: 146887 - protein, 7 aa, synthetic construct
SHQSARI

SEQ ID NO: 146888 - protein, 7 aa, synthetic construct
SHQSIKT

SEQ ID NO: 146889 - protein, 7 aa, synthetic construct
SHQTGVK

SEQ ID NO: 146890 - protein, 7 aa, synthetic construct
SHQTISK

SEQ ID NO: 146891 - protein, 7 aa, synthetic construct
SHQTKGL

SEQ ID NO: 146892 - protein, 7 aa, synthetic construct
SHQTMLK

SEQ ID NO: 146893 - protein, 7 aa, synthetic construct
SHQTTSR

SEQ ID NO: 146894 - protein, 7 aa, synthetic construct
SHRDLMK

SEQ ID NO: 146895 - protein, 7 aa, synthetic construct
SHREKPL

SEQ ID NO: 146896 - protein, 7 aa, synthetic construct
SHRIGNV

SEQ ID NO: 146897 - protein, 7 aa, synthetic construct
SHRITPS

SEQ ID NO: 146898 - protein, 7 aa, synthetic construct
SHRVTVA

SEQ ID NO: 146899 - protein, 7 aa, synthetic construct
SHSAKQL

SEQ ID NO: 146900 - protein, 7 aa, synthetic construct
SHSARSV

SEQ ID NO: 146901 - protein, 7 aa, synthetic construct
SHSGAKL

SEQ ID NO: 146902 - protein, 7 aa, synthetic construct
SHSGYKV

SEQ ID NO: 146903 - protein, 7 aa, synthetic construct
SHSISTK

SEQ ID NO: 146904 - protein, 7 aa, synthetic construct
SHSKILV

SEQ ID NO: 146905 - protein, 7 aa, synthetic construct
SHSKSFS

SEQ ID NO: 146906 - protein, 7 aa, synthetic construct
SHSKVAQ

SEQ ID NO: 146907 - protein, 7 aa, synthetic construct
SHSMAKL

SEQ ID NO: 146908 - protein, 7 aa, synthetic construct
SHSMASK

SEQ ID NO: 146909 - protein, 7 aa, synthetic construct
SHSNILR

SEQ ID NO: 146910 - protein, 7 aa, synthetic construct
SHSNIQR

SEQ ID NO: 146911 - protein, 7 aa, synthetic construct
SHSNVNK

SEQ ID NO: 146912 - protein, 7 aa, synthetic construct
SHSQKPT

SEQ ID NO: 146913 - protein, 7 aa, synthetic construct
SHSQTKF

SEQ ID NO: 146914 - protein, 7 aa, synthetic construct
SHSVHKI

SEQ ID NO: 146915 - protein, 7 aa, synthetic construct
SHTAQRM

SEQ ID NO: 146916 - protein, 7 aa, synthetic construct
SHTATPR

SEQ ID NO: 146917 - protein, 7 aa, synthetic construct
SHTGISR

SEQ ID NO: 146918 - protein, 7 aa, synthetic construct
SHTGNRV

SEQ ID NO: 146919 - protein, 7 aa, synthetic construct
SHTIATR

SEQ ID NO: 146920 - protein, 7 aa, synthetic construct
SHTIPKQ

SEQ ID NO: 146921 - protein, 7 aa, synthetic construct
SHTKYVP

SEQ ID NO: 146922 - protein, 7 aa, synthetic construct
SHTLKQM

SEQ ID NO: 146923 - protein, 7 aa, synthetic construct
SHTMKSM

SEQ ID NO: 146924 - protein, 7 aa, synthetic construct
SHTQIKY

SEQ ID NO: 146925 - protein, 7 aa, synthetic construct
SHTQIRN

SEQ ID NO: 146926 - protein, 7 aa, synthetic construct
SHTQKHI

SEQ ID NO: 146927 - protein, 7 aa, synthetic construct
SHTQKNL

SEQ ID NO: 146928 - protein, 7 aa, synthetic construct
SHTQKVM

SEQ ID NO: 146929 - protein, 7 aa, synthetic construct
SHTSTTR

SEQ ID NO: 146930 - protein, 7 aa, synthetic construct
SHTSVRL

SEQ ID NO: 146931 - protein, 7 aa, synthetic construct
SHVAGNR

SEQ ID NO: 146932 - protein, 7 aa, synthetic construct
SHVARMS

SEQ ID NO: 146933 - protein, 7 aa, synthetic construct
SHVQGIR

SEQ ID NO: 146934 - protein, 7 aa, synthetic construct
SHVQTSK

SEQ ID NO: 146935 - protein, 7 aa, synthetic construct
SHVRTSI

SEQ ID NO: 146936 - protein, 7 aa, synthetic construct
SHVTKHT

SEQ ID NO: 146937 - protein, 7 aa, synthetic construct
SIAGHTR

SEQ ID NO: 146938 - protein, 7 aa, synthetic construct
SIAGMGR

SEQ ID NO: 146939 - protein, 7 aa, synthetic construct
SIARSVV

SEQ ID NO: 146940 - protein, 7 aa, synthetic construct
SIASKYI

SEQ ID NO: 146941 - protein, 7 aa, synthetic construct
SIDLRKM

SEQ ID NO: 146942 - protein, 7 aa, synthetic construct
SIERSFK

SEQ ID NO: 146943 - protein, 7 aa, synthetic construct
SIGAQRG

SEQ ID NO: 146944 - protein, 7 aa, synthetic construct
SIGKHYA

SEQ ID NO: 146945 - protein, 7 aa, synthetic construct
SIGMKSY

SEQ ID NO: 146946 - protein, 7 aa, synthetic construct
SIGNSGR

SEQ ID NO: 146947 - protein, 7 aa, synthetic construct
SIGQKYN

SEQ ID NO: 146948 - protein, 7 aa, synthetic construct
SIGRDKQ

SEQ ID NO: 146949 - protein, 7 aa, synthetic construct
SIGRINV

SEQ ID NO: 146950 - protein, 7 aa, synthetic construct
SIGRNVT

SEQ ID NO: 146951 - protein, 7 aa, synthetic construct
SIGRQIV

SEQ ID NO: 146952 - protein, 7 aa, synthetic construct
SIGSRMM

SEQ ID NO: 146953 - protein, 7 aa, synthetic construct
SIGTHGR

SEQ ID NO: 146954 - protein, 7 aa, synthetic construct
SIGTRNF

SEQ ID NO: 146955 - protein, 7 aa, synthetic construct
SIHGGGR

SEQ ID NO: 146956 - protein, 7 aa, synthetic construct
SIHKLQV

SEQ ID NO: 146957 - protein, 7 aa, synthetic construct
SIHMAQK

SEQ ID NO: 146958 - protein, 7 aa, synthetic construct
SIHNTSR

SEQ ID NO: 146959 - protein, 7 aa, synthetic construct
SIHPRTS

SEQ ID NO: 146960 - protein, 7 aa, synthetic construct
SIHRQVP

SEQ ID NO: 146961 - protein, 7 aa, synthetic construct
SIHSTKL

SEQ ID NO: 146962 - protein, 7 aa, synthetic construct
SIHTTRG

SEQ ID NO: 146963 - protein, 7 aa, synthetic construct
SIIRNKD

SEQ ID NO: 146964 - protein, 7 aa, synthetic construct
SIKAHYG

SEQ ID NO: 146965 - protein, 7 aa, synthetic construct
SIKFSPN

SEQ ID NO: 146966 - protein, 7 aa, synthetic construct
SIKHSPY

SEQ ID NO: 146967 - protein, 7 aa, synthetic construct
SIKMLER

SEQ ID NO: 146968 - protein, 7 aa, synthetic construct
SIKMQER

SEQ ID NO: 146969 - protein, 7 aa, synthetic construct
SIKRLQE

SEQ ID NO: 146970 - protein, 7 aa, synthetic construct
SIKRPDI

SEQ ID NO: 146971 - protein, 7 aa, synthetic construct
SIKYIEK

SEQ ID NO: 146972 - protein, 7 aa, synthetic construct
SIKYTQN

SEQ ID NO: 146973 - protein, 7 aa, synthetic construct
SIMERRV

SEQ ID NO: 146974 - protein, 7 aa, synthetic construct
SIMKAHQ

SEQ ID NO: 146975 - protein, 7 aa, synthetic construct
SIMNGRM

SEQ ID NO: 146976 - protein, 7 aa, synthetic construct
SIMQRVP

SEQ ID NO: 146977 - protein, 7 aa, synthetic construct
SIMVRKE

SEQ ID NO: 146978 - protein, 7 aa, synthetic construct
SINAYKA

SEQ ID NO: 146979 - protein, 7 aa, synthetic construct
SINERMR

SEQ ID NO: 146980 - protein, 7 aa, synthetic construct
SINFTID

SEQ ID NO: 146981 - protein, 7 aa, synthetic construct
SINKHSY

SEQ ID NO: 146982 - protein, 7 aa, synthetic construct
SINMSKH

SEQ ID NO: 146983 - protein, 7 aa, synthetic construct
SINSPMR

SEQ ID NO: 146984 - protein, 7 aa, synthetic construct
SIPKANY

SEQ ID NO: 146985 - protein, 7 aa, synthetic construct
SIPKGHY

SEQ ID NO: 146986 - protein, 7 aa, synthetic construct
SIPKKYD

SEQ ID NO: 146987 - protein, 7 aa, synthetic construct
SIPMRGS

SEQ ID NO: 146988 - protein, 7 aa, synthetic construct
SIPMYQK

SEQ ID NO: 146989 - protein, 7 aa, synthetic construct
SIPRIGN

SEQ ID NO: 146990 - protein, 7 aa, synthetic construct
SIPSHAR

SEQ ID NO: 146991 - protein, 7 aa, synthetic construct
SIPVRNM

SEQ ID NO: 146992 - protein, 7 aa, synthetic construct
SIPVRRD

SEQ ID NO: 146993 - protein, 7 aa, synthetic construct
SIPVRTN

SEQ ID NO: 146994 - protein, 7 aa, synthetic construct
SIQERRV

SEQ ID NO: 146995 - protein, 7 aa, synthetic construct
SIQHAAK

SEQ ID NO: 146996 - protein, 7 aa, synthetic construct
SIQHGSR

SEQ ID NO: 146997 - protein, 7 aa, synthetic construct
SIQHSYK

SEQ ID NO: 146998 - protein, 7 aa, synthetic construct
SIQKTDR

SEQ ID NO: 146999 - protein, 7 aa, synthetic construct
SIQQTKY

SEQ ID NO: 147000 - protein, 7 aa, synthetic construct
SIQRQQQ

SEQ ID NO: 147001 - protein, 7 aa, synthetic construct
SIRDLAR

SEQ ID NO: 147002 - protein, 7 aa, synthetic construct
SIRDQTR

SEQ ID NO: 147003 - protein, 7 aa, synthetic construct
SIRGAPM

SEQ ID NO: 147004 - protein, 7 aa, synthetic construct
SIRGEAK

SEQ ID NO: 147005 - protein, 7 aa, synthetic construct
SIRKQQE

SEQ ID NO: 147006 - protein, 7 aa, synthetic construct
SIRMVKD

SEQ ID NO: 147007 - protein, 7 aa, synthetic construct
SIRNQHG

SEQ ID NO: 147008 - protein, 7 aa, synthetic construct
SIRPTAI

SEQ ID NO: 147009 - protein, 7 aa, synthetic construct
SIRQGTF

SEQ ID NO: 147010 - protein, 7 aa, synthetic construct
SIRSDKQ

SEQ ID NO: 147011 - protein, 7 aa, synthetic construct
SISHRIP

SEQ ID NO: 147012 - protein, 7 aa, synthetic construct
SISTYKG

SEQ ID NO: 147013 - protein, 7 aa, synthetic construct
SISYPKG

SEQ ID NO: 147014 - protein, 7 aa, synthetic construct
SITHRAM

SEQ ID NO: 147015 - protein, 7 aa, synthetic construct
SITHTRL

SEQ ID NO: 147016 - protein, 7 aa, synthetic construct
SITKERQ

SEQ ID NO: 147017 - protein, 7 aa, synthetic construct
SIVSRSQ

SEQ ID NO: 147018 - protein, 7 aa, synthetic construct
SIYKNNQ

SEQ ID NO: 147019 - protein, 7 aa, synthetic construct
SKADIPR

SEQ ID NO: 147020 - protein, 7 aa, synthetic construct
SKADQMR

SEQ ID NO: 147021 - protein, 7 aa, synthetic construct
SKAEGRA

SEQ ID NO: 147022 - protein, 7 aa, synthetic construct
SKAFAHS

SEQ ID NO: 147023 - protein, 7 aa, synthetic construct
SKAFHGV

SEQ ID NO: 147024 - protein, 7 aa, synthetic construct
SKAGHAF

SEQ ID NO: 147025 - protein, 7 aa, synthetic construct
SKAGNFH

SEQ ID NO: 147026 - protein, 7 aa, synthetic construct
SKAGNGW

SEQ ID NO: 147027 - protein, 7 aa, synthetic construct
SKAHAGF

SEQ ID NO: 147028 - protein, 7 aa, synthetic construct
SKAHFTS

SEQ ID NO: 147029 - protein, 7 aa, synthetic construct
SKAHSIL

SEQ ID NO: 147030 - protein, 7 aa, synthetic construct
SKAIYNS

SEQ ID NO: 147031 - protein, 7 aa, synthetic construct
SKALADR

SEQ ID NO: 147032 - protein, 7 aa, synthetic construct
SKALAER

SEQ ID NO: 147033 - protein, 7 aa, synthetic construct
SKAPVLI

SEQ ID NO: 147034 - protein, 7 aa, synthetic construct
SKAVHVT

SEQ ID NO: 147035 - protein, 7 aa, synthetic construct
SKAYASN

SEQ ID NO: 147036 - protein, 7 aa, synthetic construct
SKAYPSI

SEQ ID NO: 147037 - protein, 7 aa, synthetic construct
SKDHRVN

SEQ ID NO: 147038 - protein, 7 aa, synthetic construct
SKDILYR

SEQ ID NO: 147039 - protein, 7 aa, synthetic construct
SKDKALW

SEQ ID NO: 147040 - protein, 7 aa, synthetic construct
SKDLSSR

SEQ ID NO: 147041 - protein, 7 aa, synthetic construct
SKDMTGK

SEQ ID NO: 147042 - protein, 7 aa, synthetic construct
SKDNRSQ

SEQ ID NO: 147043 - protein, 7 aa, synthetic construct
SKDPYGR

SEQ ID NO: 147044 - protein, 7 aa, synthetic construct
SKDQLHR

SEQ ID NO: 147045 - protein, 7 aa, synthetic construct
SKDRAER

SEQ ID NO: 147046 - protein, 7 aa, synthetic construct
SKDRMPF

SEQ ID NO: 147047 - protein, 7 aa, synthetic construct
SKDWAKQ

SEQ ID NO: 147048 - protein, 7 aa, synthetic construct
SKEGRQT

SEQ ID NO: 147049 - protein, 7 aa, synthetic construct
SKEGWPK

SEQ ID NO: 147050 - protein, 7 aa, synthetic construct
SKEHMVR

SEQ ID NO: 147051 - protein, 7 aa, synthetic construct
SKEKSWQ

SEQ ID NO: 147052 - protein, 7 aa, synthetic construct
SKEMNTR

SEQ ID NO: 147053 - protein, 7 aa, synthetic construct
SKEMYAK

SEQ ID NO: 147054 - protein, 7 aa, synthetic construct
SKEPGSR

SEQ ID NO: 147055 - protein, 7 aa, synthetic construct
SKERGYF

SEQ ID NO: 147056 - protein, 7 aa, synthetic construct
SKERHGF

SEQ ID NO: 147057 - protein, 7 aa, synthetic construct
SKERIMM

SEQ ID NO: 147058 - protein, 7 aa, synthetic construct
SKERPYV

SEQ ID NO: 147059 - protein, 7 aa, synthetic construct
SKERTPH

SEQ ID NO: 147060 - protein, 7 aa, synthetic construct
SKESGRA

SEQ ID NO: 147061 - protein, 7 aa, synthetic construct
SKESQIR

SEQ ID NO: 147062 - protein, 7 aa, synthetic construct
SKESRSI

SEQ ID NO: 147063 - protein, 7 aa, synthetic construct
SKETFRS

SEQ ID NO: 147064 - protein, 7 aa, synthetic construct
SKETVRW

SEQ ID NO: 147065 - protein, 7 aa, synthetic construct
SKETYSK

SEQ ID NO: 147066 - protein, 7 aa, synthetic construct
SKEVRYP

SEQ ID NO: 147067 - protein, 7 aa, synthetic construct
SKEYNKQ

SEQ ID NO: 147068 - protein, 7 aa, synthetic construct
SKFAQMV

SEQ ID NO: 147069 - protein, 7 aa, synthetic construct
SKFAREN

SEQ ID NO: 147070 - protein, 7 aa, synthetic construct
SKFGHNV

SEQ ID NO: 147071 - protein, 7 aa, synthetic construct
SKFGPKD

SEQ ID NO: 147072 - protein, 7 aa, synthetic construct
SKFHEKS

SEQ ID NO: 147073 - protein, 7 aa, synthetic construct
SKFKYDG

SEQ ID NO: 147074 - protein, 7 aa, synthetic construct
SKFMTGS

SEQ ID NO: 147075 - protein, 7 aa, synthetic construct
SKFNLPP

SEQ ID NO: 147076 - protein, 7 aa, synthetic construct
SKFNMGH

SEQ ID NO: 147077 - protein, 7 aa, synthetic construct
SKFNVIN

SEQ ID NO: 147078 - protein, 7 aa, synthetic construct
SKFPHNA

SEQ ID NO: 147079 - protein, 7 aa, synthetic construct
SKFQAPA

SEQ ID NO: 147080 - protein, 7 aa, synthetic construct
SKFQISN

SEQ ID NO: 147081 - protein, 7 aa, synthetic construct
SKFQKYE

SEQ ID NO: 147082 - protein, 7 aa, synthetic construct
SKFQSSQ

SEQ ID NO: 147083 - protein, 7 aa, synthetic construct
SKFVVNS

SEQ ID NO: 147084 - protein, 7 aa, synthetic construct
SKGAHQL

SEQ ID NO: 147085 - protein, 7 aa, synthetic construct
SKGASDR

SEQ ID NO: 147086 - protein, 7 aa, synthetic construct
SKGASMY

SEQ ID NO: 147087 - protein, 7 aa, synthetic construct
SKGDGHR

SEQ ID NO: 147088 - protein, 7 aa, synthetic construct
SKGDPAR

SEQ ID NO: 147089 - protein, 7 aa, synthetic construct
SKGDRLF

SEQ ID NO: 147090 - protein, 7 aa, synthetic construct
SKGDWSK

SEQ ID NO: 147091 - protein, 7 aa, synthetic construct
SKGETFR

SEQ ID NO: 147092 - protein, 7 aa, synthetic construct
SKGEYPR

SEQ ID NO: 147093 - protein, 7 aa, synthetic construct
SKGFANT

SEQ ID NO: 147094 - protein, 7 aa, synthetic construct
SKGFNSQ

SEQ ID NO: 147095 - protein, 7 aa, synthetic construct
SKGGRDN

SEQ ID NO: 147096 - protein, 7 aa, synthetic construct
SKGGRDQ

SEQ ID NO: 147097 - protein, 7 aa, synthetic construct
SKGGTYS

SEQ ID NO: 147098 - protein, 7 aa, synthetic construct
SKGHISQ

SEQ ID NO: 147099 - protein, 7 aa, synthetic construct
SKGHLLT

SEQ ID NO: 147100 - protein, 7 aa, synthetic construct
SKGHPGT

SEQ ID NO: 147101 - protein, 7 aa, synthetic construct
SKGHVYA

SEQ ID NO: 147102 - protein, 7 aa, synthetic construct
SKGIDSR

SEQ ID NO: 147103 - protein, 7 aa, synthetic construct
SKGIPLT

SEQ ID NO: 147104 - protein, 7 aa, synthetic construct
SKGKDKD

SEQ ID NO: 147105 - protein, 7 aa, synthetic construct
SKGLQHY

SEQ ID NO: 147106 - protein, 7 aa, synthetic construct
SKGMHGY

SEQ ID NO: 147107 - protein, 7 aa, synthetic construct
SKGMQPY

SEQ ID NO: 147108 - protein, 7 aa, synthetic construct
SKGMSIL

SEQ ID NO: 147109 - protein, 7 aa, synthetic construct
SKGNQFY

SEQ ID NO: 147110 - protein, 7 aa, synthetic construct
SKGQLQF

SEQ ID NO: 147111 - protein, 7 aa, synthetic construct
SKGREIQ

SEQ ID NO: 147112 - protein, 7 aa, synthetic construct
SKGYIKE

SEQ ID NO: 147113 - protein, 7 aa, synthetic construct
SKGYPLP

SEQ ID NO: 147114 - protein, 7 aa, synthetic construct
SKGYTNP

SEQ ID NO: 147115 - protein, 7 aa, synthetic construct
SKHAAYV

SEQ ID NO: 147116 - protein, 7 aa, synthetic construct
SKHANGQ

SEQ ID NO: 147117 - protein, 7 aa, synthetic construct
SKHAPFN

SEQ ID NO: 147118 - protein, 7 aa, synthetic construct
SKHAQIQ

SEQ ID NO: 147119 - protein, 7 aa, synthetic construct
SKHATNL

SEQ ID NO: 147120 - protein, 7 aa, synthetic construct
SKHAYSG

SEQ ID NO: 147121 - protein, 7 aa, synthetic construct
SKHDLRT

SEQ ID NO: 147122 - protein, 7 aa, synthetic construct
SKHEGWV

SEQ ID NO: 147123 - protein, 7 aa, synthetic construct
SKHEKPV

SEQ ID NO: 147124 - protein, 7 aa, synthetic construct
SKHEVMR

SEQ ID NO: 147125 - protein, 7 aa, synthetic construct
SKHFTPG

SEQ ID NO: 147126 - protein, 7 aa, synthetic construct
SKHGAVV

SEQ ID NO: 147127 - protein, 7 aa, synthetic construct
SKHGNLA

SEQ ID NO: 147128 - protein, 7 aa, synthetic construct
SKHGPPM

SEQ ID NO: 147129 - protein, 7 aa, synthetic construct
SKHGQFP

SEQ ID NO: 147130 - protein, 7 aa, synthetic construct
SKHGSIL

SEQ ID NO: 147131 - protein, 7 aa, synthetic construct
SKHGVYG

SEQ ID NO: 147132 - protein, 7 aa, synthetic construct
SKHHPGT

SEQ ID NO: 147133 - protein, 7 aa, synthetic construct
SKHHPNV

SEQ ID NO: 147134 - protein, 7 aa, synthetic construct
SKHHPQY

SEQ ID NO: 147135 - protein, 7 aa, synthetic construct
SKHISLI

SEQ ID NO: 147136 - protein, 7 aa, synthetic construct
SKHITQM

SEQ ID NO: 147137 - protein, 7 aa, synthetic construct
SKHLQYP

SEQ ID NO: 147138 - protein, 7 aa, synthetic construct
SKHLSMS

SEQ ID NO: 147139 - protein, 7 aa, synthetic construct
SKHMGNL

SEQ ID NO: 147140 - protein, 7 aa, synthetic construct
SKHNVMM

SEQ ID NO: 147141 - protein, 7 aa, synthetic construct
SKHPGNL

SEQ ID NO: 147142 - protein, 7 aa, synthetic construct
SKHPTLS

SEQ ID NO: 147143 - protein, 7 aa, synthetic construct
SKHPVVP

SEQ ID NO: 147144 - protein, 7 aa, synthetic construct
SKHQGPV

SEQ ID NO: 147145 - protein, 7 aa, synthetic construct
SKHQILT

SEQ ID NO: 147146 - protein, 7 aa, synthetic construct
SKHQIMN

SEQ ID NO: 147147 - protein, 7 aa, synthetic construct
SKHQNLN

SEQ ID NO: 147148 - protein, 7 aa, synthetic construct
SKHQPYV

SEQ ID NO: 147149 - protein, 7 aa, synthetic construct
SKHQVPM

SEQ ID NO: 147150 - protein, 7 aa, synthetic construct
SKHSHFV

SEQ ID NO: 147151 - protein, 7 aa, synthetic construct
SKHSIAI

SEQ ID NO: 147152 - protein, 7 aa, synthetic construct
SKHSITQ

SEQ ID NO: 147153 - protein, 7 aa, synthetic construct
SKHSSYP

SEQ ID NO: 147154 - protein, 7 aa, synthetic construct
SKHTERG

SEQ ID NO: 147155 - protein, 7 aa, synthetic construct
SKHTPNM

SEQ ID NO: 147156 - protein, 7 aa, synthetic construct
SKHTPTT

SEQ ID NO: 147157 - protein, 7 aa, synthetic construct
SKHTYPS

SEQ ID NO: 147158 - protein, 7 aa, synthetic construct
SKHVDNK

SEQ ID NO: 147159 - protein, 7 aa, synthetic construct
SKHVPTS

SEQ ID NO: 147160 - protein, 7 aa, synthetic construct
SKHVSNT

SEQ ID NO: 147161 - protein, 7 aa, synthetic construct
SKHVVVN

SEQ ID NO: 147162 - protein, 7 aa, synthetic construct
SKIDKQW

SEQ ID NO: 147163 - protein, 7 aa, synthetic construct
SKIGSHF

SEQ ID NO: 147164 - protein, 7 aa, synthetic construct
SKIHYPG

SEQ ID NO: 147165 - protein, 7 aa, synthetic construct
SKIKDFN

SEQ ID NO: 147166 - protein, 7 aa, synthetic construct
SKIPHVA

SEQ ID NO: 147167 - protein, 7 aa, synthetic construct
SKIPRGD

SEQ ID NO: 147168 - protein, 7 aa, synthetic construct
SKIQESW

SEQ ID NO: 147169 - protein, 7 aa, synthetic construct
SKISHPV

SEQ ID NO: 147170 - protein, 7 aa, synthetic construct
SKIYKNE

SEQ ID NO: 147171 - protein, 7 aa, synthetic construct
SKIYMRE

SEQ ID NO: 147172 - protein, 7 aa, synthetic construct
SKIYQGH

SEQ ID NO: 147173 - protein, 7 aa, synthetic construct
SKKAEWG

SEQ ID NO: 147174 - protein, 7 aa, synthetic construct
SKKAPET

SEQ ID NO: 147175 - protein, 7 aa, synthetic construct
SKKDGLW

SEQ ID NO: 147176 - protein, 7 aa, synthetic construct
SKKEHLM

SEQ ID NO: 147177 - protein, 7 aa, synthetic construct
SKKEVMW

SEQ ID NO: 147178 - protein, 7 aa, synthetic construct
SKKLLDT

SEQ ID NO: 147179 - protein, 7 aa, synthetic construct
SKLEKPW

SEQ ID NO: 147180 - protein, 7 aa, synthetic construct
SKLEPSK

SEQ ID NO: 147181 - protein, 7 aa, synthetic construct
SKLHERM

SEQ ID NO: 147182 - protein, 7 aa, synthetic construct
SKLHLRD

SEQ ID NO: 147183 - protein, 7 aa, synthetic construct
SKLHMQV

SEQ ID NO: 147184 - protein, 7 aa, synthetic construct
SKLHMVS

SEQ ID NO: 147185 - protein, 7 aa, synthetic construct
SKLHQVQ

SEQ ID NO: 147186 - protein, 7 aa, synthetic construct
SKLHSAQ

SEQ ID NO: 147187 - protein, 7 aa, synthetic construct
SKLNDNW

SEQ ID NO: 147188 - protein, 7 aa, synthetic construct
SKLPIQM

SEQ ID NO: 147189 - protein, 7 aa, synthetic construct
SKLPREI

SEQ ID NO: 147190 - protein, 7 aa, synthetic construct
SKLRDDK

SEQ ID NO: 147191 - protein, 7 aa, synthetic construct
SKLRLLD

SEQ ID NO: 147192 - protein, 7 aa, synthetic construct
SKLVAER

SEQ ID NO: 147193 - protein, 7 aa, synthetic construct
SKMAASY

SEQ ID NO: 147194 - protein, 7 aa, synthetic construct
SKMASNY

SEQ ID NO: 147195 - protein, 7 aa, synthetic construct
SKMASPM

SEQ ID NO: 147196 - protein, 7 aa, synthetic construct
SKMDHPR

SEQ ID NO: 147197 - protein, 7 aa, synthetic construct
SKMDMAR

SEQ ID NO: 147198 - protein, 7 aa, synthetic construct
SKMERTQ

SEQ ID NO: 147199 - protein, 7 aa, synthetic construct
SKMHQAI

SEQ ID NO: 147200 - protein, 7 aa, synthetic construct
SKMHTAI

SEQ ID NO: 147201 - protein, 7 aa, synthetic construct
SKMHTIM

SEQ ID NO: 147202 - protein, 7 aa, synthetic construct
SKMHVLN

SEQ ID NO: 147203 - protein, 7 aa, synthetic construct
SKMIAER

SEQ ID NO: 147204 - protein, 7 aa, synthetic construct
SKMIDAK

SEQ ID NO: 147205 - protein, 7 aa, synthetic construct
SKMKDFH

SEQ ID NO: 147206 - protein, 7 aa, synthetic construct
SKMLEGR

SEQ ID NO: 147207 - protein, 7 aa, synthetic construct
SKMMATM

SEQ ID NO: 147208 - protein, 7 aa, synthetic construct
SKMMPNN

SEQ ID NO: 147209 - protein, 7 aa, synthetic construct
SKMNHNL

SEQ ID NO: 147210 - protein, 7 aa, synthetic construct
SKMNQHI

SEQ ID NO: 147211 - protein, 7 aa, synthetic construct
SKMPMSL

SEQ ID NO: 147212 - protein, 7 aa, synthetic construct
SKMRAID

SEQ ID NO: 147213 - protein, 7 aa, synthetic construct
SKMRGDM

SEQ ID NO: 147214 - protein, 7 aa, synthetic construct
SKMRGNE

SEQ ID NO: 147215 - protein, 7 aa, synthetic construct
SKMRIEN

SEQ ID NO: 147216 - protein, 7 aa, synthetic construct
SKMRLSE

SEQ ID NO: 147217 - protein, 7 aa, synthetic construct
SKMRMTE

SEQ ID NO: 147218 - protein, 7 aa, synthetic construct
SKMVQYG

SEQ ID NO: 147219 - protein, 7 aa, synthetic construct
SKMYAGV

SEQ ID NO: 147220 - protein, 7 aa, synthetic construct
SKNDNAR

SEQ ID NO: 147221 - protein, 7 aa, synthetic construct
SKNEMMR

SEQ ID NO: 147222 - protein, 7 aa, synthetic construct
SKNFAPM

SEQ ID NO: 147223 - protein, 7 aa, synthetic construct
SKNHAIL

SEQ ID NO: 147224 - protein, 7 aa, synthetic construct
SKNHPKD

SEQ ID NO: 147225 - protein, 7 aa, synthetic construct
SKNHPNN

SEQ ID NO: 147226 - protein, 7 aa, synthetic construct
SKNHPVT

SEQ ID NO: 147227 - protein, 7 aa, synthetic construct
SKNHQLN

SEQ ID NO: 147228 - protein, 7 aa, synthetic construct
SKNKEWG

SEQ ID NO: 147229 - protein, 7 aa, synthetic construct
SKNNNGH

SEQ ID NO: 147230 - protein, 7 aa, synthetic construct
SKNNSPH

SEQ ID NO: 147231 - protein, 7 aa, synthetic construct
SKNPTFI

SEQ ID NO: 147232 - protein, 7 aa, synthetic construct
SKNQAGH

SEQ ID NO: 147233 - protein, 7 aa, synthetic construct
SKNQSDK

SEQ ID NO: 147234 - protein, 7 aa, synthetic construct
SKNRELY

SEQ ID NO: 147235 - protein, 7 aa, synthetic construct
SKNREVF

SEQ ID NO: 147236 - protein, 7 aa, synthetic construct
SKNTPIN

SEQ ID NO: 147237 - protein, 7 aa, synthetic construct
SKNTQLF

SEQ ID NO: 147238 - protein, 7 aa, synthetic construct
SKNTSSP

SEQ ID NO: 147239 - protein, 7 aa, synthetic construct
SKNVRDH

SEQ ID NO: 147240 - protein, 7 aa, synthetic construct
SKNVYST

SEQ ID NO: 147241 - protein, 7 aa, synthetic construct
SKNYAQY

SEQ ID NO: 147242 - protein, 7 aa, synthetic construct
SKNYISQ

SEQ ID NO: 147243 - protein, 7 aa, synthetic construct
SKPAWQA

SEQ ID NO: 147244 - protein, 7 aa, synthetic construct
SKPDFMK

SEQ ID NO: 147245 - protein, 7 aa, synthetic construct
SKPDTRW

SEQ ID NO: 147246 - protein, 7 aa, synthetic construct
SKPFHQN

SEQ ID NO: 147247 - protein, 7 aa, synthetic construct
SKPFISN

SEQ ID NO: 147248 - protein, 7 aa, synthetic construct
SKPGHDR

SEQ ID NO: 147249 - protein, 7 aa, synthetic construct
SKPHMQH

SEQ ID NO: 147250 - protein, 7 aa, synthetic construct
SKPHYGA

SEQ ID NO: 147251 - protein, 7 aa, synthetic construct
SKPIHSS

SEQ ID NO: 147252 - protein, 7 aa, synthetic construct
SKPMGHL

SEQ ID NO: 147253 - protein, 7 aa, synthetic construct
SKPNYHA

SEQ ID NO: 147254 - protein, 7 aa, synthetic construct
SKPPITF

SEQ ID NO: 147255 - protein, 7 aa, synthetic construct
SKPPRYD

SEQ ID NO: 147256 - protein, 7 aa, synthetic construct
SKPQISY

SEQ ID NO: 147257 - protein, 7 aa, synthetic construct
SKPQLHY

SEQ ID NO: 147258 - protein, 7 aa, synthetic construct
SKPQMLY

SEQ ID NO: 147259 - protein, 7 aa, synthetic construct
SKPQTVF

SEQ ID NO: 147260 - protein, 7 aa, synthetic construct
SKPQYQY

SEQ ID NO: 147261 - protein, 7 aa, synthetic construct
SKPRTQD

SEQ ID NO: 147262 - protein, 7 aa, synthetic construct
SKPSPGW

SEQ ID NO: 147263 - protein, 7 aa, synthetic construct
SKPVGTW

SEQ ID NO: 147264 - protein, 7 aa, synthetic construct
SKPVMHQ

SEQ ID NO: 147265 - protein, 7 aa, synthetic construct
SKPVPTT

SEQ ID NO: 147266 - protein, 7 aa, synthetic construct
SKPYAVT

SEQ ID NO: 147267 - protein, 7 aa, synthetic construct
SKPYDKQ

SEQ ID NO: 147268 - protein, 7 aa, synthetic construct
SKPYDQK

SEQ ID NO: 147269 - protein, 7 aa, synthetic construct
SKPYSIA

SEQ ID NO: 147270 - protein, 7 aa, synthetic construct
SKPYSSS

SEQ ID NO: 147271 - protein, 7 aa, synthetic construct
SKPYTRE

SEQ ID NO: 147272 - protein, 7 aa, synthetic construct
SKQAPYY

SEQ ID NO: 147273 - protein, 7 aa, synthetic construct
SKQASQL

SEQ ID NO: 147274 - protein, 7 aa, synthetic construct
SKQAYLN

SEQ ID NO: 147275 - protein, 7 aa, synthetic construct
SKQDITK

SEQ ID NO: 147276 - protein, 7 aa, synthetic construct
SKQDNGK

SEQ ID NO: 147277 - protein, 7 aa, synthetic construct
SKQDPRY

SEQ ID NO: 147278 - protein, 7 aa, synthetic construct
SKQEKVF

SEQ ID NO: 147279 - protein, 7 aa, synthetic construct
SKQEQFK

SEQ ID NO: 147280 - protein, 7 aa, synthetic construct
SKQGLDK

SEQ ID NO: 147281 - protein, 7 aa, synthetic construct
SKQHMYA

SEQ ID NO: 147282 - protein, 7 aa, synthetic construct
SKQHVGQ

SEQ ID NO: 147283 - protein, 7 aa, synthetic construct
SKQKDLY

SEQ ID NO: 147284 - protein, 7 aa, synthetic construct
SKQLHLN

SEQ ID NO: 147285 - protein, 7 aa, synthetic construct
SKQLHSL

SEQ ID NO: 147286 - protein, 7 aa, synthetic construct
SKQLRFD

SEQ ID NO: 147287 - protein, 7 aa, synthetic construct
SKQMQFS

SEQ ID NO: 147288 - protein, 7 aa, synthetic construct
SKQNASH

SEQ ID NO: 147289 - protein, 7 aa, synthetic construct
SKQPGFV

SEQ ID NO: 147290 - protein, 7 aa, synthetic construct
SKQQHSM

SEQ ID NO: 147291 - protein, 7 aa, synthetic construct
SKQREYI

SEQ ID NO: 147292 - protein, 7 aa, synthetic construct
SKQSVHY

SEQ ID NO: 147293 - protein, 7 aa, synthetic construct
SKQTDRF

SEQ ID NO: 147294 - protein, 7 aa, synthetic construct
SKQTHGM

SEQ ID NO: 147295 - protein, 7 aa, synthetic construct
SKQTMHY

SEQ ID NO: 147296 - protein, 7 aa, synthetic construct
SKQTMLY

SEQ ID NO: 147297 - protein, 7 aa, synthetic construct
SKQVMNI

SEQ ID NO: 147298 - protein, 7 aa, synthetic construct
SKQYAGG

SEQ ID NO: 147299 - protein, 7 aa, synthetic construct
SKQYKES

SEQ ID NO: 147300 - protein, 7 aa, synthetic construct
SKRDIPY

SEQ ID NO: 147301 - protein, 7 aa, synthetic construct
SKRDSYV

SEQ ID NO: 147302 - protein, 7 aa, synthetic construct
SKRDYAG

SEQ ID NO: 147303 - protein, 7 aa, synthetic construct
SKRDYSA

SEQ ID NO: 147304 - protein, 7 aa, synthetic construct
SKREIMY

SEQ ID NO: 147305 - protein, 7 aa, synthetic construct
SKREKTE

SEQ ID NO: 147306 - protein, 7 aa, synthetic construct
SKREPNN

SEQ ID NO: 147307 - protein, 7 aa, synthetic construct
SKREVVY

SEQ ID NO: 147308 - protein, 7 aa, synthetic construct
SKREYQP

SEQ ID NO: 147309 - protein, 7 aa, synthetic construct
SKRFQDG

SEQ ID NO: 147310 - protein, 7 aa, synthetic construct
SKRGDQI

SEQ ID NO: 147311 - protein, 7 aa, synthetic construct
SKRQENT

SEQ ID NO: 147312 - protein, 7 aa, synthetic construct
SKRTMDF

SEQ ID NO: 147313 - protein, 7 aa, synthetic construct
SKRVDTA

SEQ ID NO: 147314 - protein, 7 aa, synthetic construct
SKRVEAS

SEQ ID NO: 147315 - protein, 7 aa, synthetic construct
SKSAQEK

SEQ ID NO: 147316 - protein, 7 aa, synthetic construct
SKSASSW

SEQ ID NO: 147317 - protein, 7 aa, synthetic construct
SKSDFNR

SEQ ID NO: 147318 - protein, 7 aa, synthetic construct
SKSDHRA

SEQ ID NO: 147319 - protein, 7 aa, synthetic construct
SKSDKAF

SEQ ID NO: 147320 - protein, 7 aa, synthetic construct
SKSDKWQ

SEQ ID NO: 147321 - protein, 7 aa, synthetic construct
SKSDNVR

SEQ ID NO: 147322 - protein, 7 aa, synthetic construct
SKSDRMY

SEQ ID NO: 147323 - protein, 7 aa, synthetic construct
SKSDRSM

SEQ ID NO: 147324 - protein, 7 aa, synthetic construct
SKSDSNK

SEQ ID NO: 147325 - protein, 7 aa, synthetic construct
SKSEKSW

SEQ ID NO: 147326 - protein, 7 aa, synthetic construct
SKSEKTY

SEQ ID NO: 147327 - protein, 7 aa, synthetic construct
SKSEWQK

SEQ ID NO: 147328 - protein, 7 aa, synthetic construct
SKSFAGM

SEQ ID NO: 147329 - protein, 7 aa, synthetic construct
SKSGEGR

SEQ ID NO: 147330 - protein, 7 aa, synthetic construct
SKSHERG

SEQ ID NO: 147331 - protein, 7 aa, synthetic construct
SKSHNIN

SEQ ID NO: 147332 - protein, 7 aa, synthetic construct
SKSHSMQ

SEQ ID NO: 147333 - protein, 7 aa, synthetic construct
SKSHTAQ

SEQ ID NO: 147334 - protein, 7 aa, synthetic construct
SKSISAY

SEQ ID NO: 147335 - protein, 7 aa, synthetic construct
SKSLMIP

SEQ ID NO: 147336 - protein, 7 aa, synthetic construct
SKSLTPY

SEQ ID NO: 147337 - protein, 7 aa, synthetic construct
SKSMMER

SEQ ID NO: 147338 - protein, 7 aa, synthetic construct
SKSNGIW

SEQ ID NO: 147339 - protein, 7 aa, synthetic construct
SKSNHIH

SEQ ID NO: 147340 - protein, 7 aa, synthetic construct
SKSNHLQ

SEQ ID NO: 147341 - protein, 7 aa, synthetic construct
SKSNINY

SEQ ID NO: 147342 - protein, 7 aa, synthetic construct
SKSNMNY

SEQ ID NO: 147343 - protein, 7 aa, synthetic construct
SKSNPYN

SEQ ID NO: 147344 - protein, 7 aa, synthetic construct
SKSRADM

SEQ ID NO: 147345 - protein, 7 aa, synthetic construct
SKSSSNW

SEQ ID NO: 147346 - protein, 7 aa, synthetic construct
SKSTESR

SEQ ID NO: 147347 - protein, 7 aa, synthetic construct
SKSVYAT

SEQ ID NO: 147348 - protein, 7 aa, synthetic construct
SKSYENK

SEQ ID NO: 147349 - protein, 7 aa, synthetic construct
SKSYTAQ

SEQ ID NO: 147350 - protein, 7 aa, synthetic construct
SKSYTIG

SEQ ID NO: 147351 - protein, 7 aa, synthetic construct
SKTANGW

SEQ ID NO: 147352 - protein, 7 aa, synthetic construct
SKTEKHL

SEQ ID NO: 147353 - protein, 7 aa, synthetic construct
SKTEKSF

SEQ ID NO: 147354 - protein, 7 aa, synthetic construct
SKTGHTY

SEQ ID NO: 147355 - protein, 7 aa, synthetic construct
SKTHGGF

SEQ ID NO: 147356 - protein, 7 aa, synthetic construct
SKTLTSY

SEQ ID NO: 147357 - protein, 7 aa, synthetic construct
SKTNHQQ

SEQ ID NO: 147358 - protein, 7 aa, synthetic construct
SKTNPYQ

SEQ ID NO: 147359 - protein, 7 aa, synthetic construct
SKTNSQP

SEQ ID NO: 147360 - protein, 7 aa, synthetic construct
SKTNYIV

SEQ ID NO: 147361 - protein, 7 aa, synthetic construct
SKTRDIV

SEQ ID NO: 147362 - protein, 7 aa, synthetic construct
SKTSVGW

SEQ ID NO: 147363 - protein, 7 aa, synthetic construct
SKTTGFL

SEQ ID NO: 147364 - protein, 7 aa, synthetic construct
SKTVEHR

SEQ ID NO: 147365 - protein, 7 aa, synthetic construct
SKVDRTQ

SEQ ID NO: 147366 - protein, 7 aa, synthetic construct
SKVDTVR

SEQ ID NO: 147367 - protein, 7 aa, synthetic construct
SKVEPRM

SEQ ID NO: 147368 - protein, 7 aa, synthetic construct
SKVFPER

SEQ ID NO: 147369 - protein, 7 aa, synthetic construct
SKVFPVA

SEQ ID NO: 147370 - protein, 7 aa, synthetic construct
SKVHERM

SEQ ID NO: 147371 - protein, 7 aa, synthetic construct
SKVHSGM

SEQ ID NO: 147372 - protein, 7 aa, synthetic construct
SKVIRQE

SEQ ID NO: 147373 - protein, 7 aa, synthetic construct
SKVMNAL

SEQ ID NO: 147374 - protein, 7 aa, synthetic construct
SKVMPQH

SEQ ID NO: 147375 - protein, 7 aa, synthetic construct
SKVPKEW

SEQ ID NO: 147376 - protein, 7 aa, synthetic construct
SKVPVVV

SEQ ID NO: 147377 - protein, 7 aa, synthetic construct
SKVQAYH

SEQ ID NO: 147378 - protein, 7 aa, synthetic construct
SKVSYQQ

SEQ ID NO: 147379 - protein, 7 aa, synthetic construct
SKVTHNY

SEQ ID NO: 147380 - protein, 7 aa, synthetic construct
SKVTPVY

SEQ ID NO: 147381 - protein, 7 aa, synthetic construct
SKVVMAH

SEQ ID NO: 147382 - protein, 7 aa, synthetic construct
SKVYVGP

SEQ ID NO: 147383 - protein, 7 aa, synthetic construct
SKWEKGV

SEQ ID NO: 147384 - protein, 7 aa, synthetic construct
SKWSQIP

SEQ ID NO: 147385 - protein, 7 aa, synthetic construct
SKYAMHP

SEQ ID NO: 147386 - protein, 7 aa, synthetic construct
SKYASLN

SEQ ID NO: 147387 - protein, 7 aa, synthetic construct
SKYDKNV

SEQ ID NO: 147388 - protein, 7 aa, synthetic construct
SKYDRGY

SEQ ID NO: 147389 - protein, 7 aa, synthetic construct
SKYDTQK

SEQ ID NO: 147390 - protein, 7 aa, synthetic construct
SKYESVR

SEQ ID NO: 147391 - protein, 7 aa, synthetic construct
SKYHGLG

SEQ ID NO: 147392 - protein, 7 aa, synthetic construct
SKYINNT

SEQ ID NO: 147393 - protein, 7 aa, synthetic construct
SKYLDSK

SEQ ID NO: 147394 - protein, 7 aa, synthetic construct
SKYPQGP

SEQ ID NO: 147395 - protein, 7 aa, synthetic construct
SKYPSAS

SEQ ID NO: 147396 - protein, 7 aa, synthetic construct
SKYQASL

SEQ ID NO: 147397 - protein, 7 aa, synthetic construct
SKYQDAK

SEQ ID NO: 147398 - protein, 7 aa, synthetic construct
SKYQISA

SEQ ID NO: 147399 - protein, 7 aa, synthetic construct
SKYQPGF

SEQ ID NO: 147400 - protein, 7 aa, synthetic construct
SKYSEKQ

SEQ ID NO: 147401 - protein, 7 aa, synthetic construct
SKYSGMT

SEQ ID NO: 147402 - protein, 7 aa, synthetic construct
SKYSIHA

SEQ ID NO: 147403 - protein, 7 aa, synthetic construct
SKYSLTT

SEQ ID NO: 147404 - protein, 7 aa, synthetic construct
SKYSMSQ

SEQ ID NO: 147405 - protein, 7 aa, synthetic construct
SKYSTQQ

SEQ ID NO: 147406 - protein, 7 aa, synthetic construct
SKYSVQV

SEQ ID NO: 147407 - protein, 7 aa, synthetic construct
SKYTAAV

SEQ ID NO: 147408 - protein, 7 aa, synthetic construct
SKYTLQV

SEQ ID NO: 147409 - protein, 7 aa, synthetic construct
SKYTPNL

SEQ ID NO: 147410 - protein, 7 aa, synthetic construct
SKYTVTT

SEQ ID NO: 147411 - protein, 7 aa, synthetic construct
SKYVKLE

SEQ ID NO: 147412 - protein, 7 aa, synthetic construct
SKYVNNI

SEQ ID NO: 147413 - protein, 7 aa, synthetic construct
SKYVVEK

SEQ ID NO: 147414 - protein, 7 aa, synthetic construct
SLAHVKQ

SEQ ID NO: 147415 - protein, 7 aa, synthetic construct
SLAQHNR

SEQ ID NO: 147416 - protein, 7 aa, synthetic construct
SLASHKS

SEQ ID NO: 147417 - protein, 7 aa, synthetic construct
SLAYKDK

SEQ ID NO: 147418 - protein, 7 aa, synthetic construct
SLDAKNR

SEQ ID NO: 147419 - protein, 7 aa, synthetic construct
SLDRSKH

SEQ ID NO: 147420 - protein, 7 aa, synthetic construct
SLDRVMK

SEQ ID NO: 147421 - protein, 7 aa, synthetic construct
SLEKFMK

SEQ ID NO: 147422 - protein, 7 aa, synthetic construct
SLGARRE

SEQ ID NO: 147423 - protein, 7 aa, synthetic construct
SLGERKA

SEQ ID NO: 147424 - protein, 7 aa, synthetic construct
SLGHLKN

SEQ ID NO: 147425 - protein, 7 aa, synthetic construct
SLGKHTY

SEQ ID NO: 147426 - protein, 7 aa, synthetic construct
SLGMGKH

SEQ ID NO: 147427 - protein, 7 aa, synthetic construct
SLGQHSR

SEQ ID NO: 147428 - protein, 7 aa, synthetic construct
SLGTHRT

SEQ ID NO: 147429 - protein, 7 aa, synthetic construct
SLHGTLR

SEQ ID NO: 147430 - protein, 7 aa, synthetic construct
SLHITKQ

SEQ ID NO: 147431 - protein, 7 aa, synthetic construct
SLHNLNK

SEQ ID NO: 147432 - protein, 7 aa, synthetic construct
SLHNMGK

SEQ ID NO: 147433 - protein, 7 aa, synthetic construct
SLHNNLK

SEQ ID NO: 147434 - protein, 7 aa, synthetic construct
SLHPIYE

SEQ ID NO: 147435 - protein, 7 aa, synthetic construct
SLHQYKP

SEQ ID NO: 147436 - protein, 7 aa, synthetic construct
SLHSPGK

SEQ ID NO: 147437 - protein, 7 aa, synthetic construct
SLHTSVK

SEQ ID NO: 147438 - protein, 7 aa, synthetic construct
SLKHATY

SEQ ID NO: 147439 - protein, 7 aa, synthetic construct
SLKHPAI

SEQ ID NO: 147440 - protein, 7 aa, synthetic construct
SLKPRLE

SEQ ID NO: 147441 - protein, 7 aa, synthetic construct
SLKYIAS

SEQ ID NO: 147442 - protein, 7 aa, synthetic construct
SLKYSIA

SEQ ID NO: 147443 - protein, 7 aa, synthetic construct
SLKYTSG

SEQ ID NO: 147444 - protein, 7 aa, synthetic construct
SLLKRDI

SEQ ID NO: 147445 - protein, 7 aa, synthetic construct
SLMKDGR

SEQ ID NO: 147446 - protein, 7 aa, synthetic construct
SLMNHNK

SEQ ID NO: 147447 - protein, 7 aa, synthetic construct
SLMQKRD

SEQ ID NO: 147448 - protein, 7 aa, synthetic construct
SLMRTKD

SEQ ID NO: 147449 - protein, 7 aa, synthetic construct
SLNERQK

SEQ ID NO: 147450 - protein, 7 aa, synthetic construct
SLNGYSK

SEQ ID NO: 147451 - protein, 7 aa, synthetic construct
SLNMRKD

SEQ ID NO: 147452 - protein, 7 aa, synthetic construct
SLNRPMP

SEQ ID NO: 147453 - protein, 7 aa, synthetic construct
SLNRSKE

SEQ ID NO: 147454 - protein, 7 aa, synthetic construct
SLNSHRG

SEQ ID NO: 147455 - protein, 7 aa, synthetic construct
SLNTNHR

SEQ ID NO: 147456 - protein, 7 aa, synthetic construct
SLPHAKY

SEQ ID NO: 147457 - protein, 7 aa, synthetic construct
SLPHQVR

SEQ ID NO: 147458 - protein, 7 aa, synthetic construct
SLPRMAV

SEQ ID NO: 147459 - protein, 7 aa, synthetic construct
SLPRTIS

SEQ ID NO: 147460 - protein, 7 aa, synthetic construct
SLPTIHK

SEQ ID NO: 147461 - protein, 7 aa, synthetic construct
SLQNRTH

SEQ ID NO: 147462 - protein, 7 aa, synthetic construct
SLQRTEK

SEQ ID NO: 147463 - protein, 7 aa, synthetic construct
SLQRVEK

SEQ ID NO: 147464 - protein, 7 aa, synthetic construct
SLREVHR

SEQ ID NO: 147465 - protein, 7 aa, synthetic construct
SLRHVAA

SEQ ID NO: 147466 - protein, 7 aa, synthetic construct
SLRIRTE

SEQ ID NO: 147467 - protein, 7 aa, synthetic construct
SLRNTNI

SEQ ID NO: 147468 - protein, 7 aa, synthetic construct
SLRQINV

SEQ ID NO: 147469 - protein, 7 aa, synthetic construct
SLRSNPL

SEQ ID NO: 147470 - protein, 7 aa, synthetic construct
SLRYTKE

SEQ ID NO: 147471 - protein, 7 aa, synthetic construct
SLSAKYI

SEQ ID NO: 147472 - protein, 7 aa, synthetic construct
SLSHIRN

SEQ ID NO: 147473 - protein, 7 aa, synthetic construct
SLSNHAR

SEQ ID NO: 147474 - protein, 7 aa, synthetic construct
SLSNHRI

SEQ ID NO: 147475 - protein, 7 aa, synthetic construct
SLSPGRM

SEQ ID NO: 147476 - protein, 7 aa, synthetic construct
SLSRERG

SEQ ID NO: 147477 - protein, 7 aa, synthetic construct
SLSRTRE

SEQ ID NO: 147478 - protein, 7 aa, synthetic construct
SLSTNHR

SEQ ID NO: 147479 - protein, 7 aa, synthetic construct
SLTHSRI

SEQ ID NO: 147480 - protein, 7 aa, synthetic construct
SLTQRDR

SEQ ID NO: 147481 - protein, 7 aa, synthetic construct
SLTREVK

SEQ ID NO: 147482 - protein, 7 aa, synthetic construct
SLVKYPV

SEQ ID NO: 147483 - protein, 7 aa, synthetic construct
SLVNPGR

SEQ ID NO: 147484 - protein, 7 aa, synthetic construct
SLYASGK

SEQ ID NO: 147485 - protein, 7 aa, synthetic construct
SLYHKSP

SEQ ID NO: 147486 - protein, 7 aa, synthetic construct
SLYKDKN

SEQ ID NO: 147487 - protein, 7 aa, synthetic construct
SLYKNPP

SEQ ID NO: 147488 - protein, 7 aa, synthetic construct
SMAGSHK

SEQ ID NO: 147489 - protein, 7 aa, synthetic construct
SMAHFPK

SEQ ID NO: 147490 - protein, 7 aa, synthetic construct
SMAQQYR

SEQ ID NO: 147491 - protein, 7 aa, synthetic construct
SMARIKD

SEQ ID NO: 147492 - protein, 7 aa, synthetic construct
SMARIRE

SEQ ID NO: 147493 - protein, 7 aa, synthetic construct
SMASPRI

SEQ ID NO: 147494 - protein, 7 aa, synthetic construct
SMAYKDK

SEQ ID NO: 147495 - protein, 7 aa, synthetic construct
SMAYLKG

SEQ ID NO: 147496 - protein, 7 aa, synthetic construct
SMDGRTK

SEQ ID NO: 147497 - protein, 7 aa, synthetic construct
SMDRQKN

SEQ ID NO: 147498 - protein, 7 aa, synthetic construct
SMDRVRL

SEQ ID NO: 147499 - protein, 7 aa, synthetic construct
SMEIRKV

SEQ ID NO: 147500 - protein, 7 aa, synthetic construct
SMEKVRH

SEQ ID NO: 147501 - protein, 7 aa, synthetic construct
SMESKRL

SEQ ID NO: 147502 - protein, 7 aa, synthetic construct
SMGFNKS

SEQ ID NO: 147503 - protein, 7 aa, synthetic construct
SMGGSRN

SEQ ID NO: 147504 - protein, 7 aa, synthetic construct
SMGKGVF

SEQ ID NO: 147505 - protein, 7 aa, synthetic construct
SMGKGYL

SEQ ID NO: 147506 - protein, 7 aa, synthetic construct
SMGKRFE

SEQ ID NO: 147507 - protein, 7 aa, synthetic construct
SMGQSAR

SEQ ID NO: 147508 - protein, 7 aa, synthetic construct
SMGREKF

SEQ ID NO: 147509 - protein, 7 aa, synthetic construct
SMGRIHA

SEQ ID NO: 147510 - protein, 7 aa, synthetic construct
SMGSQQR

SEQ ID NO: 147511 - protein, 7 aa, synthetic construct
SMGVRDK

SEQ ID NO: 147512 - protein, 7 aa, synthetic construct
SMHASKY

SEQ ID NO: 147513 - protein, 7 aa, synthetic construct
SMHAVPR

SEQ ID NO: 147514 - protein, 7 aa, synthetic construct
SMHDAST

SEQ ID NO: 147515 - protein, 7 aa, synthetic construct
SMHDKRA

SEQ ID NO: 147516 - protein, 7 aa, synthetic construct
SMHGYPK

SEQ ID NO: 147517 - protein, 7 aa, synthetic construct
SMHHTHL

SEQ ID NO: 147518 - protein, 7 aa, synthetic construct
SMHKEGR

SEQ ID NO: 147519 - protein, 7 aa, synthetic construct
SMHKISQ

SEQ ID NO: 147520 - protein, 7 aa, synthetic construct
SMHKQAL

SEQ ID NO: 147521 - protein, 7 aa, synthetic construct
SMHLRQA

SEQ ID NO: 147522 - protein, 7 aa, synthetic construct
SMHNVKN

SEQ ID NO: 147523 - protein, 7 aa, synthetic construct
SMHPKGM

SEQ ID NO: 147524 - protein, 7 aa, synthetic construct
SMHPRPM

SEQ ID NO: 147525 - protein, 7 aa, synthetic construct
SMHRGGA

SEQ ID NO: 147526 - protein, 7 aa, synthetic construct
SMHSAAR

SEQ ID NO: 147527 - protein, 7 aa, synthetic construct
SMHSKIM

SEQ ID NO: 147528 - protein, 7 aa, synthetic construct
SMHTNGR

SEQ ID NO: 147529 - protein, 7 aa, synthetic construct
SMHTPGK

SEQ ID NO: 147530 - protein, 7 aa, synthetic construct
SMHTVPK

SEQ ID NO: 147531 - protein, 7 aa, synthetic construct
SMHVDND

SEQ ID NO: 147532 - protein, 7 aa, synthetic construct
SMHVRTA

SEQ ID NO: 147533 - protein, 7 aa, synthetic construct
SMIGREK

SEQ ID NO: 147534 - protein, 7 aa, synthetic construct
SMKARSD

SEQ ID NO: 147535 - protein, 7 aa, synthetic construct
SMKITPM

SEQ ID NO: 147536 - protein, 7 aa, synthetic construct
SMKNRFE

SEQ ID NO: 147537 - protein, 7 aa, synthetic construct
SMKNVYV

SEQ ID NO: 147538 - protein, 7 aa, synthetic construct
SMKRLNE

SEQ ID NO: 147539 - protein, 7 aa, synthetic construct
SMKRTGE

SEQ ID NO: 147540 - protein, 7 aa, synthetic construct
SMKTAFV

SEQ ID NO: 147541 - protein, 7 aa, synthetic construct
SMKYTSA

SEQ ID NO: 147542 - protein, 7 aa, synthetic construct
SMLGRGM

SEQ ID NO: 147543 - protein, 7 aa, synthetic construct
SMLHPRD

SEQ ID NO: 147544 - protein, 7 aa, synthetic construct
SMLKGSY

SEQ ID NO: 147545 - protein, 7 aa, synthetic construct
SMMDRTK

SEQ ID NO: 147546 - protein, 7 aa, synthetic construct
SMMGGYK

SEQ ID NO: 147547 - protein, 7 aa, synthetic construct
SMMQGGR

SEQ ID NO: 147548 - protein, 7 aa, synthetic construct
SMMQKRE

SEQ ID NO: 147549 - protein, 7 aa, synthetic construct
SMMSHKM

SEQ ID NO: 147550 - protein, 7 aa, synthetic construct
SMMTRKE

SEQ ID NO: 147551 - protein, 7 aa, synthetic construct
SMNAAGR

SEQ ID NO: 147552 - protein, 7 aa, synthetic construct
SMNAHLR

SEQ ID NO: 147553 - protein, 7 aa, synthetic construct
SMNKAHY

SEQ ID NO: 147554 - protein, 7 aa, synthetic construct
SMNNGGR

SEQ ID NO: 147555 - protein, 7 aa, synthetic construct
SMNNHMK

SEQ ID NO: 147556 - protein, 7 aa, synthetic construct
SMNQHSR

SEQ ID NO: 147557 - protein, 7 aa, synthetic construct
SMNQMSR

SEQ ID NO: 147558 - protein, 7 aa, synthetic construct
SMNRMHA

SEQ ID NO: 147559 - protein, 7 aa, synthetic construct
SMNRQVH

SEQ ID NO: 147560 - protein, 7 aa, synthetic construct
SMPAMRM

SEQ ID NO: 147561 - protein, 7 aa, synthetic construct
SMPGDRK

SEQ ID NO: 147562 - protein, 7 aa, synthetic construct
SMPKPHS

SEQ ID NO: 147563 - protein, 7 aa, synthetic construct
SMPQWKP

SEQ ID NO: 147564 - protein, 7 aa, synthetic construct
SMPRHQQ

SEQ ID NO: 147565 - protein, 7 aa, synthetic construct
SMPRISH

SEQ ID NO: 147566 - protein, 7 aa, synthetic construct
SMPRKFD

SEQ ID NO: 147567 - protein, 7 aa, synthetic construct
SMPRMMA

SEQ ID NO: 147568 - protein, 7 aa, synthetic construct
SMPYTKA

SEQ ID NO: 147569 - protein, 7 aa, synthetic construct
SMQGQRM

SEQ ID NO: 147570 - protein, 7 aa, synthetic construct
SMQKHSL

SEQ ID NO: 147571 - protein, 7 aa, synthetic construct
SMQNHPK

SEQ ID NO: 147572 - protein, 7 aa, synthetic construct
SMQQRQM

SEQ ID NO: 147573 - protein, 7 aa, synthetic construct
SMQYVQK

SEQ ID NO: 147574 - protein, 7 aa, synthetic construct
SMRKDAN

SEQ ID NO: 147575 - protein, 7 aa, synthetic construct
SMRKDLN

SEQ ID NO: 147576 - protein, 7 aa, synthetic construct
SMRKSQE

SEQ ID NO: 147577 - protein, 7 aa, synthetic construct
SMRNSQF

SEQ ID NO: 147578 - protein, 7 aa, synthetic construct
SMRPPVM

SEQ ID NO: 147579 - protein, 7 aa, synthetic construct
SMRQITQ

SEQ ID NO: 147580 - protein, 7 aa, synthetic construct
SMRQVIP

SEQ ID NO: 147581 - protein, 7 aa, synthetic construct
SMRQVIS

SEQ ID NO: 147582 - protein, 7 aa, synthetic construct
SMRTTYP

SEQ ID NO: 147583 - protein, 7 aa, synthetic construct
SMRVHPA

SEQ ID NO: 147584 - protein, 7 aa, synthetic construct
SMSGKPY

SEQ ID NO: 147585 - protein, 7 aa, synthetic construct
SMSHATK

SEQ ID NO: 147586 - protein, 7 aa, synthetic construct
SMSIKVN

SEQ ID NO: 147587 - protein, 7 aa, synthetic construct
SMSKAYT

SEQ ID NO: 147588 - protein, 7 aa, synthetic construct
SMSNYNK

SEQ ID NO: 147589 - protein, 7 aa, synthetic construct
SMSQVRY

SEQ ID NO: 147590 - protein, 7 aa, synthetic construct
SMSREKI

SEQ ID NO: 147591 - protein, 7 aa, synthetic construct
SMSVKTT

SEQ ID NO: 147592 - protein, 7 aa, synthetic construct
SMTEKKW

SEQ ID NO: 147593 - protein, 7 aa, synthetic construct
SMTHQKM

SEQ ID NO: 147594 - protein, 7 aa, synthetic construct
SMTMSAR

SEQ ID NO: 147595 - protein, 7 aa, synthetic construct
SMTNARN

SEQ ID NO: 147596 - protein, 7 aa, synthetic construct
SMTQFPK

SEQ ID NO: 147597 - protein, 7 aa, synthetic construct
SMTRGII

SEQ ID NO: 147598 - protein, 7 aa, synthetic construct
SMTTRTY

SEQ ID NO: 147599 - protein, 7 aa, synthetic construct
SMTVRVA

SEQ ID NO: 147600 - protein, 7 aa, synthetic construct
SMTYAKS

SEQ ID NO: 147601 - protein, 7 aa, synthetic construct
SMVHSKM

SEQ ID NO: 147602 - protein, 7 aa, synthetic construct
SMVRMNA

SEQ ID NO: 147603 - protein, 7 aa, synthetic construct
SMVRSRE

SEQ ID NO: 147604 - protein, 7 aa, synthetic construct
SMVTRVP

SEQ ID NO: 147605 - protein, 7 aa, synthetic construct
SMWAAGE

SEQ ID NO: 147606 - protein, 7 aa, synthetic construct
SMYAVKG

SEQ ID NO: 147607 - protein, 7 aa, synthetic construct
SMYGSKA

SEQ ID NO: 147608 - protein, 7 aa, synthetic construct
SMYGTNK

SEQ ID NO: 147609 - protein, 7 aa, synthetic construct
SMYHDAK

SEQ ID NO: 147610 - protein, 7 aa, synthetic construct
SMYHRAD

SEQ ID NO: 147611 - protein, 7 aa, synthetic construct
SMYQEGR

SEQ ID NO: 147612 - protein, 7 aa, synthetic construct
SNAAYAR

SEQ ID NO: 147613 - protein, 7 aa, synthetic construct
SNAGHPK

SEQ ID NO: 147614 - protein, 7 aa, synthetic construct
SNAHNKS

SEQ ID NO: 147615 - protein, 7 aa, synthetic construct
SNAKHVY

SEQ ID NO: 147616 - protein, 7 aa, synthetic construct
SNAPRIM

SEQ ID NO: 147617 - protein, 7 aa, synthetic construct
SNAPRQQ

SEQ ID NO: 147618 - protein, 7 aa, synthetic construct
SNAQARM

SEQ ID NO: 147619 - protein, 7 aa, synthetic construct
SNAQVRY

SEQ ID NO: 147620 - protein, 7 aa, synthetic construct
SNASHKY

SEQ ID NO: 147621 - protein, 7 aa, synthetic construct
SNDHKPR

SEQ ID NO: 147622 - protein, 7 aa, synthetic construct
SNDSTRR

SEQ ID NO: 147623 - protein, 7 aa, synthetic construct
SNEHPYR

SEQ ID NO: 147624 - protein, 7 aa, synthetic construct
SNEKPRN

SEQ ID NO: 147625 - protein, 7 aa, synthetic construct
SNEKRFG

SEQ ID NO: 147626 - protein, 7 aa, synthetic construct
SNETKRG

SEQ ID NO: 147627 - protein, 7 aa, synthetic construct
SNEVKRQ

SEQ ID NO: 147628 - protein, 7 aa, synthetic construct
SNFKPSM

SEQ ID NO: 147629 - protein, 7 aa, synthetic construct
SNFTKTW

SEQ ID NO: 147630 - protein, 7 aa, synthetic construct
SNGAAGR

SEQ ID NO: 147631 - protein, 7 aa, synthetic construct
SNGAVYR

SEQ ID NO: 147632 - protein, 7 aa, synthetic construct
SNGGPSR

SEQ ID NO: 147633 - protein, 7 aa, synthetic construct
SNGIHVR

SEQ ID NO: 147634 - protein, 7 aa, synthetic construct
SNGISGR

SEQ ID NO: 147635 - protein, 7 aa, synthetic construct
SNGNRQY

SEQ ID NO: 147636 - protein, 7 aa, synthetic construct
SNGRVDK

SEQ ID NO: 147637 - protein, 7 aa, synthetic construct
SNGTHVR

SEQ ID NO: 147638 - protein, 7 aa, synthetic construct
SNGTNHR

SEQ ID NO: 147639 - protein, 7 aa, synthetic construct
SNGYNTK

SEQ ID NO: 147640 - protein, 7 aa, synthetic construct
SNHAKMM

SEQ ID NO: 147641 - protein, 7 aa, synthetic construct
SNHAKNQ

SEQ ID NO: 147642 - protein, 7 aa, synthetic construct
SNHGKVF

SEQ ID NO: 147643 - protein, 7 aa, synthetic construct
SNHGTRT

SEQ ID NO: 147644 - protein, 7 aa, synthetic construct
SNHKGTY

SEQ ID NO: 147645 - protein, 7 aa, synthetic construct
SNHKIPT

SEQ ID NO: 147646 - protein, 7 aa, synthetic construct
SNHKQLM

SEQ ID NO: 147647 - protein, 7 aa, synthetic construct
SNHKVNV

SEQ ID NO: 147648 - protein, 7 aa, synthetic construct
SNHLKTY

SEQ ID NO: 147649 - protein, 7 aa, synthetic construct
SNHLRGL

SEQ ID NO: 147650 - protein, 7 aa, synthetic construct
SNHNMLK

SEQ ID NO: 147651 - protein, 7 aa, synthetic construct
SNHPPKY

SEQ ID NO: 147652 - protein, 7 aa, synthetic construct
SNHQIRT

SEQ ID NO: 147653 - protein, 7 aa, synthetic construct
SNHSAIR

SEQ ID NO: 147654 - protein, 7 aa, synthetic construct
SNHSIRT

SEQ ID NO: 147655 - protein, 7 aa, synthetic construct
SNIAASR

SEQ ID NO: 147656 - protein, 7 aa, synthetic construct
SNIKQRD

SEQ ID NO: 147657 - protein, 7 aa, synthetic construct
SNIMPRA

SEQ ID NO: 147658 - protein, 7 aa, synthetic construct
SNIMRTV

SEQ ID NO: 147659 - protein, 7 aa, synthetic construct
SNIRPAY

SEQ ID NO: 147660 - protein, 7 aa, synthetic construct
SNIRSTY

SEQ ID NO: 147661 - protein, 7 aa, synthetic construct
SNISPQR

SEQ ID NO: 147662 - protein, 7 aa, synthetic construct
SNITQRQ

SEQ ID NO: 147663 - protein, 7 aa, synthetic construct
SNKDRIM

SEQ ID NO: 147664 - protein, 7 aa, synthetic construct
SNKDVRY

SEQ ID NO: 147665 - protein, 7 aa, synthetic construct
SNKFKDI

SEQ ID NO: 147666 - protein, 7 aa, synthetic construct
SNKFVSS

SEQ ID NO: 147667 - protein, 7 aa, synthetic construct
SNKIKEW

SEQ ID NO: 147668 - protein, 7 aa, synthetic construct
SNKIVAY

SEQ ID NO: 147669 - protein, 7 aa, synthetic construct
SNKMHPV

SEQ ID NO: 147670 - protein, 7 aa, synthetic construct
SNKRESF

SEQ ID NO: 147671 - protein, 7 aa, synthetic construct
SNKRPSE

SEQ ID NO: 147672 - protein, 7 aa, synthetic construct
SNKSIHY

SEQ ID NO: 147673 - protein, 7 aa, synthetic construct
SNKYHQH

SEQ ID NO: 147674 - protein, 7 aa, synthetic construct
SNKYIPH

SEQ ID NO: 147675 - protein, 7 aa, synthetic construct
SNKYSTH

SEQ ID NO: 147676 - protein, 7 aa, synthetic construct
SNLHGLK

SEQ ID NO: 147677 - protein, 7 aa, synthetic construct
SNLPSRI

SEQ ID NO: 147678 - protein, 7 aa, synthetic construct
SNLSHAR

SEQ ID NO: 147679 - protein, 7 aa, synthetic construct
SNLSNKW

SEQ ID NO: 147680 - protein, 7 aa, synthetic construct
SNLTRPY

SEQ ID NO: 147681 - protein, 7 aa, synthetic construct
SNMAKSY

SEQ ID NO: 147682 - protein, 7 aa, synthetic construct
SNMKYLH

SEQ ID NO: 147683 - protein, 7 aa, synthetic construct
SNMNHRM

SEQ ID NO: 147684 - protein, 7 aa, synthetic construct
SNMQVRN

SEQ ID NO: 147685 - protein, 7 aa, synthetic construct
SNMRMVP

SEQ ID NO: 147686 - protein, 7 aa, synthetic construct
SNMTARI

SEQ ID NO: 147687 - protein, 7 aa, synthetic construct
SNMTGKW

SEQ ID NO: 147688 - protein, 7 aa, synthetic construct
SNMTKSH

SEQ ID NO: 147689 - protein, 7 aa, synthetic construct
SNMVKPY

SEQ ID NO: 147690 - protein, 7 aa, synthetic construct
SNNARVY

SEQ ID NO: 147691 - protein, 7 aa, synthetic construct
SNNHKVL

SEQ ID NO: 147692 - protein, 7 aa, synthetic construct
SNNHMKH

SEQ ID NO: 147693 - protein, 7 aa, synthetic construct
SNNHVKQ

SEQ ID NO: 147694 - protein, 7 aa, synthetic construct
SNNHVVR

SEQ ID NO: 147695 - protein, 7 aa, synthetic construct
SNNNRPL

SEQ ID NO: 147696 - protein, 7 aa, synthetic construct
SNNPQRQ

SEQ ID NO: 147697 - protein, 7 aa, synthetic construct
SNNPRQN

SEQ ID NO: 147698 - protein, 7 aa, synthetic construct
SNNQAMR

SEQ ID NO: 147699 - protein, 7 aa, synthetic construct
SNNQSKY

SEQ ID NO: 147700 - protein, 7 aa, synthetic construct
SNNTKDR

SEQ ID NO: 147701 - protein, 7 aa, synthetic construct
SNNTPNR

SEQ ID NO: 147702 - protein, 7 aa, synthetic construct
SNNTRTT

SEQ ID NO: 147703 - protein, 7 aa, synthetic construct
SNNYGNK

SEQ ID NO: 147704 - protein, 7 aa, synthetic construct
SNPAMGR

SEQ ID NO: 147705 - protein, 7 aa, synthetic construct
SNPERKY

SEQ ID NO: 147706 - protein, 7 aa, synthetic construct
SNPGSRN

SEQ ID NO: 147707 - protein, 7 aa, synthetic construct
SNPHITK

SEQ ID NO: 147708 - protein, 7 aa, synthetic construct
SNPHYKG

SEQ ID NO: 147709 - protein, 7 aa, synthetic construct
SNPNKYQ

SEQ ID NO: 147710 - protein, 7 aa, synthetic construct
SNPPIKG

SEQ ID NO: 147711 - protein, 7 aa, synthetic construct
SNPQYLK

SEQ ID NO: 147712 - protein, 7 aa, synthetic construct
SNPSHSK

SEQ ID NO: 147713 - protein, 7 aa, synthetic construct
SNPSMNR

SEQ ID NO: 147714 - protein, 7 aa, synthetic construct
SNPTGHK

SEQ ID NO: 147715 - protein, 7 aa, synthetic construct
SNPVRDR

SEQ ID NO: 147716 - protein, 7 aa, synthetic construct
SNQAKGH

SEQ ID NO: 147717 - protein, 7 aa, synthetic construct
SNQARMV

SEQ ID NO: 147718 - protein, 7 aa, synthetic construct
SNQAYNK

SEQ ID NO: 147719 - protein, 7 aa, synthetic construct
SNQFPSR

SEQ ID NO: 147720 - protein, 7 aa, synthetic construct
SNQHTLR

SEQ ID NO: 147721 - protein, 7 aa, synthetic construct
SNQIKHM

SEQ ID NO: 147722 - protein, 7 aa, synthetic construct
SNQINKW

SEQ ID NO: 147723 - protein, 7 aa, synthetic construct
SNQIQGR

SEQ ID NO: 147724 - protein, 7 aa, synthetic construct
SNQIYGK

SEQ ID NO: 147725 - protein, 7 aa, synthetic construct
SNQKVDR

SEQ ID NO: 147726 - protein, 7 aa, synthetic construct
SNQMHNK

SEQ ID NO: 147727 - protein, 7 aa, synthetic construct
SNQNSIR

SEQ ID NO: 147728 - protein, 7 aa, synthetic construct
SNQPYTK

SEQ ID NO: 147729 - protein, 7 aa, synthetic construct
SNQQARA

SEQ ID NO: 147730 - protein, 7 aa, synthetic construct
SNQQREK

SEQ ID NO: 147731 - protein, 7 aa, synthetic construct
SNQQTRQ

SEQ ID NO: 147732 - protein, 7 aa, synthetic construct
SNQRMLN

SEQ ID NO: 147733 - protein, 7 aa, synthetic construct
SNQRPAW

SEQ ID NO: 147734 - protein, 7 aa, synthetic construct
SNQSPFR

SEQ ID NO: 147735 - protein, 7 aa, synthetic construct
SNQTARL

SEQ ID NO: 147736 - protein, 7 aa, synthetic construct
SNQTRNL

SEQ ID NO: 147737 - protein, 7 aa, synthetic construct
SNQVQKW

SEQ ID NO: 147738 - protein, 7 aa, synthetic construct
SNQVRIT

SEQ ID NO: 147739 - protein, 7 aa, synthetic construct
SNQYKSI

SEQ ID NO: 147740 - protein, 7 aa, synthetic construct
SNRAPGW

SEQ ID NO: 147741 - protein, 7 aa, synthetic construct
SNRDMAK

SEQ ID NO: 147742 - protein, 7 aa, synthetic construct
SNRHLMQ

SEQ ID NO: 147743 - protein, 7 aa, synthetic construct
SNRLRDG

SEQ ID NO: 147744 - protein, 7 aa, synthetic construct
SNRQERG

SEQ ID NO: 147745 - protein, 7 aa, synthetic construct
SNRQINI

SEQ ID NO: 147746 - protein, 7 aa, synthetic construct
SNRSKEW

SEQ ID NO: 147747 - protein, 7 aa, synthetic construct
SNRSMLM

SEQ ID NO: 147748 - protein, 7 aa, synthetic construct
SNRVIPM

SEQ ID NO: 147749 - protein, 7 aa, synthetic construct
SNRVSSF

SEQ ID NO: 147750 - protein, 7 aa, synthetic construct
SNRVVEK

SEQ ID NO: 147751 - protein, 7 aa, synthetic construct
SNSGPRL

SEQ ID NO: 147752 - protein, 7 aa, synthetic construct
SNSHKQV

SEQ ID NO: 147753 - protein, 7 aa, synthetic construct
SNSHVPR

SEQ ID NO: 147754 - protein, 7 aa, synthetic construct
SNSNMYK

SEQ ID NO: 147755 - protein, 7 aa, synthetic construct
SNSNRFL

SEQ ID NO: 147756 - protein, 7 aa, synthetic construct
SNSNSIR

SEQ ID NO: 147757 - protein, 7 aa, synthetic construct
SNSQVYR

SEQ ID NO: 147758 - protein, 7 aa, synthetic construct
SNSSYNK

SEQ ID NO: 147759 - protein, 7 aa, synthetic construct
SNTGNFR

SEQ ID NO: 147760 - protein, 7 aa, synthetic construct
SNTIRDK

SEQ ID NO: 147761 - protein, 7 aa, synthetic construct
SNTLKAY

SEQ ID NO: 147762 - protein, 7 aa, synthetic construct
SNTMRQI

SEQ ID NO: 147763 - protein, 7 aa, synthetic construct
SNTMSNR

SEQ ID NO: 147764 - protein, 7 aa, synthetic construct
SNTNGFR

SEQ ID NO: 147765 - protein, 7 aa, synthetic construct
SNTQQSR

SEQ ID NO: 147766 - protein, 7 aa, synthetic construct
SNTSAQR

SEQ ID NO: 147767 - protein, 7 aa, synthetic construct
SNTTRNN

SEQ ID NO: 147768 - protein, 7 aa, synthetic construct
SNTYAKT

SEQ ID NO: 147769 - protein, 7 aa, synthetic construct
SNVKVVT

SEQ ID NO: 147770 - protein, 7 aa, synthetic construct
SNVNLRQ

SEQ ID NO: 147771 - protein, 7 aa, synthetic construct
SNVRASL

SEQ ID NO: 147772 - protein, 7 aa, synthetic construct
SNVRPNW

SEQ ID NO: 147773 - protein, 7 aa, synthetic construct
SNVRQMM

SEQ ID NO: 147774 - protein, 7 aa, synthetic construct
SNVSAGR

SEQ ID NO: 147775 - protein, 7 aa, synthetic construct
SNVSQRS

SEQ ID NO: 147776 - protein, 7 aa, synthetic construct
SNVSREK

SEQ ID NO: 147777 - protein, 7 aa, synthetic construct
SNVSRFT

SEQ ID NO: 147778 - protein, 7 aa, synthetic construct
SNVVRGH

SEQ ID NO: 147779 - protein, 7 aa, synthetic construct
SNVVRLA

SEQ ID NO: 147780 - protein, 7 aa, synthetic construct
SNVVRPY

SEQ ID NO: 147781 - protein, 7 aa, synthetic construct
SNWGKQG

SEQ ID NO: 147782 - protein, 7 aa, synthetic construct
SNYAYDK

SEQ ID NO: 147783 - protein, 7 aa, synthetic construct
SNYGPMK

SEQ ID NO: 147784 - protein, 7 aa, synthetic construct
SNYKVGY

SEQ ID NO: 147785 - protein, 7 aa, synthetic construct
SNYLKGQ

SEQ ID NO: 147786 - protein, 7 aa, synthetic construct
SNYPNKH

SEQ ID NO: 147787 - protein, 7 aa, synthetic construct
SNYRSPA

SEQ ID NO: 147788 - protein, 7 aa, synthetic construct
SNYSQTK

SEQ ID NO: 147789 - protein, 7 aa, synthetic construct
SNYTIGK

SEQ ID NO: 147790 - protein, 7 aa, synthetic construct
SNYTIKS

SEQ ID NO: 147791 - protein, 7 aa, synthetic construct
SNYVQVK

SEQ ID NO: 147792 - protein, 7 aa, synthetic construct
SPAGRRE

SEQ ID NO: 147793 - protein, 7 aa, synthetic construct
SPAHIGR

SEQ ID NO: 147794 - protein, 7 aa, synthetic construct
SPAHKIS

SEQ ID NO: 147795 - protein, 7 aa, synthetic construct
SPAHRGL

SEQ ID NO: 147796 - protein, 7 aa, synthetic construct
SPAKYIN

SEQ ID NO: 147797 - protein, 7 aa, synthetic construct
SPANRER

SEQ ID NO: 147798 - protein, 7 aa, synthetic construct
SPAQRHQ

SEQ ID NO: 147799 - protein, 7 aa, synthetic construct
SPARLQH

SEQ ID NO: 147800 - protein, 7 aa, synthetic construct
SPARQRD

SEQ ID NO: 147801 - protein, 7 aa, synthetic construct
SPAYKLQ

SEQ ID NO: 147802 - protein, 7 aa, synthetic construct
SPDKPRY

SEQ ID NO: 147803 - protein, 7 aa, synthetic construct
SPDVRPR

SEQ ID NO: 147804 - protein, 7 aa, synthetic construct
SPFQNKN

SEQ ID NO: 147805 - protein, 7 aa, synthetic construct
SPGGRTF

SEQ ID NO: 147806 - protein, 7 aa, synthetic construct
SPGHMKA

SEQ ID NO: 147807 - protein, 7 aa, synthetic construct
SPGHVGK

SEQ ID NO: 147808 - protein, 7 aa, synthetic construct
SPGIHKY

SEQ ID NO: 147809 - protein, 7 aa, synthetic construct
SPGKGFY

SEQ ID NO: 147810 - protein, 7 aa, synthetic construct
SPGKHNT

SEQ ID NO: 147811 - protein, 7 aa, synthetic construct
SPGNQYR

SEQ ID NO: 147812 - protein, 7 aa, synthetic construct
SPGQQQR

SEQ ID NO: 147813 - protein, 7 aa, synthetic construct
SPHALRN

SEQ ID NO: 147814 - protein, 7 aa, synthetic construct
SPHASRG

SEQ ID NO: 147815 - protein, 7 aa, synthetic construct
SPHFGKG

SEQ ID NO: 147816 - protein, 7 aa, synthetic construct
SPHGKFS

SEQ ID NO: 147817 - protein, 7 aa, synthetic construct
SPHKIRD

SEQ ID NO: 147818 - protein, 7 aa, synthetic construct
SPHKREM

SEQ ID NO: 147819 - protein, 7 aa, synthetic construct
SPHKTQH

SEQ ID NO: 147820 - protein, 7 aa, synthetic construct
SPHKYGG

SEQ ID NO: 147821 - protein, 7 aa, synthetic construct
SPHNNSK

SEQ ID NO: 147822 - protein, 7 aa, synthetic construct
SPHNYRD

SEQ ID NO: 147823 - protein, 7 aa, synthetic construct
SPHTGAR

SEQ ID NO: 147824 - protein, 7 aa, synthetic construct
SPHTSLR

SEQ ID NO: 147825 - protein, 7 aa, synthetic construct
SPHTYAT

SEQ ID NO: 147826 - protein, 7 aa, synthetic construct
SPHVANR

SEQ ID NO: 147827 - protein, 7 aa, synthetic construct
SPHVIKA

SEQ ID NO: 147828 - protein, 7 aa, synthetic construct
SPIDRKF

SEQ ID NO: 147829 - protein, 7 aa, synthetic construct
SPIGVAR

SEQ ID NO: 147830 - protein, 7 aa, synthetic construct
SPIVTKN

SEQ ID NO: 147831 - protein, 7 aa, synthetic construct
SPKDPKW

SEQ ID NO: 147832 - protein, 7 aa, synthetic construct
SPKEVFR

SEQ ID NO: 147833 - protein, 7 aa, synthetic construct
SPKHPTQ

SEQ ID NO: 147834 - protein, 7 aa, synthetic construct
SPKHSVM

SEQ ID NO: 147835 - protein, 7 aa, synthetic construct
SPKIQQF

SEQ ID NO: 147836 - protein, 7 aa, synthetic construct
SPKLPPH

SEQ ID NO: 147837 - protein, 7 aa, synthetic construct
SPKNHMM

SEQ ID NO: 147838 - protein, 7 aa, synthetic construct
SPKPSTW

SEQ ID NO: 147839 - protein, 7 aa, synthetic construct
SPKQAMY

SEQ ID NO: 147840 - protein, 7 aa, synthetic construct
SPKTQHY

SEQ ID NO: 147841 - protein, 7 aa, synthetic construct
SPKYQER

SEQ ID NO: 147842 - protein, 7 aa, synthetic construct
SPLRPRE

SEQ ID NO: 147843 - protein, 7 aa, synthetic construct
SPLTTEK

SEQ ID NO: 147844 - protein, 7 aa, synthetic construct
SPMHPKQ

SEQ ID NO: 147845 - protein, 7 aa, synthetic construct
SPMKRFD

SEQ ID NO: 147846 - protein, 7 aa, synthetic construct
SPMMLSD

SEQ ID NO: 147847 - protein, 7 aa, synthetic construct
SPMRGPI

SEQ ID NO: 147848 - protein, 7 aa, synthetic construct
SPNNRQW

SEQ ID NO: 147849 - protein, 7 aa, synthetic construct
SPNRPYV

SEQ ID NO: 147850 - protein, 7 aa, synthetic construct
SPNYSGK

SEQ ID NO: 147851 - protein, 7 aa, synthetic construct
SPPHYDS

SEQ ID NO: 147852 - protein, 7 aa, synthetic construct
SPPRLGH

SEQ ID NO: 147853 - protein, 7 aa, synthetic construct
SPPRQIT

SEQ ID NO: 147854 - protein, 7 aa, synthetic construct
SPQAPYR

SEQ ID NO: 147855 - protein, 7 aa, synthetic construct
SPQARNH

SEQ ID NO: 147856 - protein, 7 aa, synthetic construct
SPQIRGL

SEQ ID NO: 147857 - protein, 7 aa, synthetic construct
SPQKIMI

SEQ ID NO: 147858 - protein, 7 aa, synthetic construct
SPQLRIS

SEQ ID NO: 147859 - protein, 7 aa, synthetic construct
SPQNTAR

SEQ ID NO: 147860 - protein, 7 aa, synthetic construct
SPQPRDR

SEQ ID NO: 147861 - protein, 7 aa, synthetic construct
SPQRKDT

SEQ ID NO: 147862 - protein, 7 aa, synthetic construct
SPRESGR

SEQ ID NO: 147863 - protein, 7 aa, synthetic construct
SPRFAKD

SEQ ID NO: 147864 - protein, 7 aa, synthetic construct
SPRHGIA

SEQ ID NO: 147865 - protein, 7 aa, synthetic construct
SPRHGSI

SEQ ID NO: 147866 - protein, 7 aa, synthetic construct
SPRLGHI

SEQ ID NO: 147867 - protein, 7 aa, synthetic construct
SPRNLPL

SEQ ID NO: 147868 - protein, 7 aa, synthetic construct
SPRPHTT

SEQ ID NO: 147869 - protein, 7 aa, synthetic construct
SPRTAHM

SEQ ID NO: 147870 - protein, 7 aa, synthetic construct
SPRTNEK

SEQ ID NO: 147871 - protein, 7 aa, synthetic construct
SPRVPPA

SEQ ID NO: 147872 - protein, 7 aa, synthetic construct
SPSNAGR

SEQ ID NO: 147873 - protein, 7 aa, synthetic construct
SPSNQHR

SEQ ID NO: 147874 - protein, 7 aa, synthetic construct
SPSQREK

SEQ ID NO: 147875 - protein, 7 aa, synthetic construct
SPSRGFT

SEQ ID NO: 147876 - protein, 7 aa, synthetic construct
SPSSQRQ

SEQ ID NO: 147877 - protein, 7 aa, synthetic construct
SPSTRII

SEQ ID NO: 147878 - protein, 7 aa, synthetic construct
SPSTWRE

SEQ ID NO: 147879 - protein, 7 aa, synthetic construct
SPSYGSK

SEQ ID NO: 147880 - protein, 7 aa, synthetic construct
SPTAGRF

SEQ ID NO: 147881 - protein, 7 aa, synthetic construct
SPTGINR

SEQ ID NO: 147882 - protein, 7 aa, synthetic construct
SPTGYKS

SEQ ID NO: 147883 - protein, 7 aa, synthetic construct
SPTHYKG

SEQ ID NO: 147884 - protein, 7 aa, synthetic construct
SPTRMPP

SEQ ID NO: 147885 - protein, 7 aa, synthetic construct
SPVMRMA

SEQ ID NO: 147886 - protein, 7 aa, synthetic construct
SPVNLHR

SEQ ID NO: 147887 - protein, 7 aa, synthetic construct
SPVNRDK

SEQ ID NO: 147888 - protein, 7 aa, synthetic construct
SPVRAHP

SEQ ID NO: 147889 - protein, 7 aa, synthetic construct
SPYQGRA

SEQ ID NO: 147890 - protein, 7 aa, synthetic construct
SPYQTKQ

SEQ ID NO: 147891 - protein, 7 aa, synthetic construct
SPYVNKQ

SEQ ID NO: 147892 - protein, 7 aa, synthetic construct
SQAGYAR

SEQ ID NO: 147893 - protein, 7 aa, synthetic construct
SQAHTAK

SEQ ID NO: 147894 - protein, 7 aa, synthetic construct
SQAMHRV

SEQ ID NO: 147895 - protein, 7 aa, synthetic construct
SQANYLM

SEQ ID NO: 147896 - protein, 7 aa, synthetic construct
SQAQHHK

SEQ ID NO: 147897 - protein, 7 aa, synthetic construct
SQARVRD

SEQ ID NO: 147898 - protein, 7 aa, synthetic construct
SQASSRF

SEQ ID NO: 147899 - protein, 7 aa, synthetic construct
SQASTKW

SEQ ID NO: 147900 - protein, 7 aa, synthetic construct
SQATRHL

SEQ ID NO: 147901 - protein, 7 aa, synthetic construct
SQAVHRV

SEQ ID NO: 147902 - protein, 7 aa, synthetic construct
SQAVPRM

SEQ ID NO: 147903 - protein, 7 aa, synthetic construct
SQAVRRD

SEQ ID NO: 147904 - protein, 7 aa, synthetic construct
SQAYKNI

SEQ ID NO: 147905 - protein, 7 aa, synthetic construct
SQAYMKV

SEQ ID NO: 147906 - protein, 7 aa, synthetic construct
SQDRPMK

SEQ ID NO: 147907 - protein, 7 aa, synthetic construct
SQDRSKV

SEQ ID NO: 147908 - protein, 7 aa, synthetic construct
SQDRVRG

SEQ ID NO: 147909 - protein, 7 aa, synthetic construct
SQEFKYA

SEQ ID NO: 147910 - protein, 7 aa, synthetic construct
SQEKRSN

SEQ ID NO: 147911 - protein, 7 aa, synthetic construct
SQEPRPK

SEQ ID NO: 147912 - protein, 7 aa, synthetic construct
SQERTRL

SEQ ID NO: 147913 - protein, 7 aa, synthetic construct
SQEVRMK

SEQ ID NO: 147914 - protein, 7 aa, synthetic construct
SQFKANQ

SEQ ID NO: 147915 - protein, 7 aa, synthetic construct
SQFKPAH

SEQ ID NO: 147916 - protein, 7 aa, synthetic construct
SQFQKTY

SEQ ID NO: 147917 - protein, 7 aa, synthetic construct
SQFQQPK

SEQ ID NO: 147918 - protein, 7 aa, synthetic construct
SQFQTKS

SEQ ID NO: 147919 - protein, 7 aa, synthetic construct
SQFTTRV

SEQ ID NO: 147920 - protein, 7 aa, synthetic construct
SQGHQAK

SEQ ID NO: 147921 - protein, 7 aa, synthetic construct
SQGIRKD

SEQ ID NO: 147922 - protein, 7 aa, synthetic construct
SQGKDSK

SEQ ID NO: 147923 - protein, 7 aa, synthetic construct
SQGQTRA

SEQ ID NO: 147924 - protein, 7 aa, synthetic construct
SQGREPK

SEQ ID NO: 147925 - protein, 7 aa, synthetic construct
SQGSKPW

SEQ ID NO: 147926 - protein, 7 aa, synthetic construct
SQGVASR

SEQ ID NO: 147927 - protein, 7 aa, synthetic construct
SQHGGKT

SEQ ID NO: 147928 - protein, 7 aa, synthetic construct
SQHGHPQ

SEQ ID NO: 147929 - protein, 7 aa, synthetic construct
SQHHLQK

SEQ ID NO: 147930 - protein, 7 aa, synthetic construct
SQHKNPN

SEQ ID NO: 147931 - protein, 7 aa, synthetic construct
SQHKQAT

SEQ ID NO: 147932 - protein, 7 aa, synthetic construct
SQHKQNM

SEQ ID NO: 147933 - protein, 7 aa, synthetic construct
SQHKTSQ

SEQ ID NO: 147934 - protein, 7 aa, synthetic construct
SQHPRVT

SEQ ID NO: 147935 - protein, 7 aa, synthetic construct
SQHRPAA

SEQ ID NO: 147936 - protein, 7 aa, synthetic construct
SQHTPPK

SEQ ID NO: 147937 - protein, 7 aa, synthetic construct
SQIKHSN

SEQ ID NO: 147938 - protein, 7 aa, synthetic construct
SQIKRLE

SEQ ID NO: 147939 - protein, 7 aa, synthetic construct
SQINSVR

SEQ ID NO: 147940 - protein, 7 aa, synthetic construct
SQIPRQQ

SEQ ID NO: 147941 - protein, 7 aa, synthetic construct
SQIQTRF

SEQ ID NO: 147942 - protein, 7 aa, synthetic construct
SQIQTRM

SEQ ID NO: 147943 - protein, 7 aa, synthetic construct
SQIRKQD

SEQ ID NO: 147944 - protein, 7 aa, synthetic construct
SQIRSQL

SEQ ID NO: 147945 - protein, 7 aa, synthetic construct
SQITRQQ

SEQ ID NO: 147946 - protein, 7 aa, synthetic construct
SQKATHY

SEQ ID NO: 147947 - protein, 7 aa, synthetic construct
SQKGPIF

SEQ ID NO: 147948 - protein, 7 aa, synthetic construct
SQKHPKD

SEQ ID NO: 147949 - protein, 7 aa, synthetic construct
SQKHQYS

SEQ ID NO: 147950 - protein, 7 aa, synthetic construct
SQKHTPQ

SEQ ID NO: 147951 - protein, 7 aa, synthetic construct
SQKIEVR

SEQ ID NO: 147952 - protein, 7 aa, synthetic construct
SQKKPDH

SEQ ID NO: 147953 - protein, 7 aa, synthetic construct
SQKPVMH

SEQ ID NO: 147954 - protein, 7 aa, synthetic construct
SQKQEVR

SEQ ID NO: 147955 - protein, 7 aa, synthetic construct
SQKRDGA

SEQ ID NO: 147956 - protein, 7 aa, synthetic construct
SQKREIL

SEQ ID NO: 147957 - protein, 7 aa, synthetic construct
SQKRIDN

SEQ ID NO: 147958 - protein, 7 aa, synthetic construct
SQKRLEI

SEQ ID NO: 147959 - protein, 7 aa, synthetic construct
SQKSVAW

SEQ ID NO: 147960 - protein, 7 aa, synthetic construct
SQKTSIF

SEQ ID NO: 147961 - protein, 7 aa, synthetic construct
SQKYGPI

SEQ ID NO: 147962 - protein, 7 aa, synthetic construct
SQKYTLM

SEQ ID NO: 147963 - protein, 7 aa, synthetic construct
SQKYTQG

SEQ ID NO: 147964 - protein, 7 aa, synthetic construct
SQLGYNK

SEQ ID NO: 147965 - protein, 7 aa, synthetic construct
SQLKRVD

SEQ ID NO: 147966 - protein, 7 aa, synthetic construct
SQLQRSI

SEQ ID NO: 147967 - protein, 7 aa, synthetic construct
SQLRPKD

SEQ ID NO: 147968 - protein, 7 aa, synthetic construct
SQLTHRG

SEQ ID NO: 147969 - protein, 7 aa, synthetic construct
SQLTRTH

SEQ ID NO: 147970 - protein, 7 aa, synthetic construct
SQMDKGR

SEQ ID NO: 147971 - protein, 7 aa, synthetic construct
SQMEKYR

SEQ ID NO: 147972 - protein, 7 aa, synthetic construct
SQMFPKN

SEQ ID NO: 147973 - protein, 7 aa, synthetic construct
SQMGMVR

SEQ ID NO: 147974 - protein, 7 aa, synthetic construct
SQMKGPY

SEQ ID NO: 147975 - protein, 7 aa, synthetic construct
SQMKRME

SEQ ID NO: 147976 - protein, 7 aa, synthetic construct
SQMKSGW

SEQ ID NO: 147977 - protein, 7 aa, synthetic construct
SQMPKTY

SEQ ID NO: 147978 - protein, 7 aa, synthetic construct
SQMPRNQ

SEQ ID NO: 147979 - protein, 7 aa, synthetic construct
SQMPVRV

SEQ ID NO: 147980 - protein, 7 aa, synthetic construct
SQMQKHF

SEQ ID NO: 147981 - protein, 7 aa, synthetic construct
SQMQRPF

SEQ ID NO: 147982 - protein, 7 aa, synthetic construct
SQMRTNM

SEQ ID NO: 147983 - protein, 7 aa, synthetic construct
SQMRTSH

SEQ ID NO: 147984 - protein, 7 aa, synthetic construct
SQMTQRQ

SEQ ID NO: 147985 - protein, 7 aa, synthetic construct
SQMVRKE

SEQ ID NO: 147986 - protein, 7 aa, synthetic construct
SQMVRSV

SEQ ID NO: 147987 - protein, 7 aa, synthetic construct
SQNHKTN

SEQ ID NO: 147988 - protein, 7 aa, synthetic construct
SQNSHTR

SEQ ID NO: 147989 - protein, 7 aa, synthetic construct
SQPHLSR

SEQ ID NO: 147990 - protein, 7 aa, synthetic construct
SQPHRST

SEQ ID NO: 147991 - protein, 7 aa, synthetic construct
SQPMINR

SEQ ID NO: 147992 - protein, 7 aa, synthetic construct
SQPRNEK

SEQ ID NO: 147993 - protein, 7 aa, synthetic construct
SQPYSKA

SEQ ID NO: 147994 - protein, 7 aa, synthetic construct
SQQAAFK

SEQ ID NO: 147995 - protein, 7 aa, synthetic construct
SQQGYKM

SEQ ID NO: 147996 - protein, 7 aa, synthetic construct
SQQLPHR

SEQ ID NO: 147997 - protein, 7 aa, synthetic construct
SQQLRGM

SEQ ID NO: 147998 - protein, 7 aa, synthetic construct
SQQMRPN

SEQ ID NO: 147999 - protein, 7 aa, synthetic construct
SQQMSKM

SEQ ID NO: 148000 - protein, 7 aa, synthetic construct
SQQQASR

SEQ ID NO: 148001 - protein, 7 aa, synthetic construct
SQQQGIR

SEQ ID NO: 148002 - protein, 7 aa, synthetic construct
SQQRGIY

SEQ ID NO: 148003 - protein, 7 aa, synthetic construct
SQQRLQL

SEQ ID NO: 148004 - protein, 7 aa, synthetic construct
SQQRQDK

SEQ ID NO: 148005 - protein, 7 aa, synthetic construct
SQQRQST

SEQ ID NO: 148006 - protein, 7 aa, synthetic construct
SQQSKYQ

SEQ ID NO: 148007 - protein, 7 aa, synthetic construct
SQQSNYM

SEQ ID NO: 148008 - protein, 7 aa, synthetic construct
SQQTIRQ

SEQ ID NO: 148009 - protein, 7 aa, synthetic construct
SQQTRPY

SEQ ID NO: 148010 - protein, 7 aa, synthetic construct
SQQTRQV

SEQ ID NO: 148011 - protein, 7 aa, synthetic construct
SQQVPSR

SEQ ID NO: 148012 - protein, 7 aa, synthetic construct
SQQYKNQ

SEQ ID NO: 148013 - protein, 7 aa, synthetic construct
SQQYKTM

SEQ ID NO: 148014 - protein, 7 aa, synthetic construct
SQRASTM

SEQ ID NO: 148015 - protein, 7 aa, synthetic construct
SQRDQPK

SEQ ID NO: 148016 - protein, 7 aa, synthetic construct
SQRGELK

SEQ ID NO: 148017 - protein, 7 aa, synthetic construct
SQRIQPQ

SEQ ID NO: 148018 - protein, 7 aa, synthetic construct
SQRIQQL

SEQ ID NO: 148019 - protein, 7 aa, synthetic construct
SQRMAIH

SEQ ID NO: 148020 - protein, 7 aa, synthetic construct
SQRMANF

SEQ ID NO: 148021 - protein, 7 aa, synthetic construct
SQRMNGH

SEQ ID NO: 148022 - protein, 7 aa, synthetic construct
SQRMQTM

SEQ ID NO: 148023 - protein, 7 aa, synthetic construct
SQRNYDR

SEQ ID NO: 148024 - protein, 7 aa, synthetic construct
SQRSMVI

SEQ ID NO: 148025 - protein, 7 aa, synthetic construct
SQRTWTE

SEQ ID NO: 148026 - protein, 7 aa, synthetic construct
SQRVHNN

SEQ ID NO: 148027 - protein, 7 aa, synthetic construct
SQSDRKM

SEQ ID NO: 148028 - protein, 7 aa, synthetic construct
SQSFQSK

SEQ ID NO: 148029 - protein, 7 aa, synthetic construct
SQSGIQR

SEQ ID NO: 148030 - protein, 7 aa, synthetic construct
SQSKASH

SEQ ID NO: 148031 - protein, 7 aa, synthetic construct
SQSKKFD

SEQ ID NO: 148032 - protein, 7 aa, synthetic construct
SQSMPQR

SEQ ID NO: 148033 - protein, 7 aa, synthetic construct
SQSNFSR

SEQ ID NO: 148034 - protein, 7 aa, synthetic construct
SQSQARM

SEQ ID NO: 148035 - protein, 7 aa, synthetic construct
SQSQRYM

SEQ ID NO: 148036 - protein, 7 aa, synthetic construct
SQSQVRF

SEQ ID NO: 148037 - protein, 7 aa, synthetic construct
SQSSGPR

SEQ ID NO: 148038 - protein, 7 aa, synthetic construct
SQTARML

SEQ ID NO: 148039 - protein, 7 aa, synthetic construct
SQTERIR

SEQ ID NO: 148040 - protein, 7 aa, synthetic construct
SQTFKLQ

SEQ ID NO: 148041 - protein, 7 aa, synthetic construct
SQTKAFM

SEQ ID NO: 148042 - protein, 7 aa, synthetic construct
SQTKGAQ

SEQ ID NO: 148043 - protein, 7 aa, synthetic construct
SQTKQYM

SEQ ID NO: 148044 - protein, 7 aa, synthetic construct
SQTLKQF

SEQ ID NO: 148045 - protein, 7 aa, synthetic construct
SQTLRLQ

SEQ ID NO: 148046 - protein, 7 aa, synthetic construct
SQTMAQR

SEQ ID NO: 148047 - protein, 7 aa, synthetic construct
SQTNQAR

SEQ ID NO: 148048 - protein, 7 aa, synthetic construct
SQTNQRM

SEQ ID NO: 148049 - protein, 7 aa, synthetic construct
SQTNSNR

SEQ ID NO: 148050 - protein, 7 aa, synthetic construct
SQTRKDF

SEQ ID NO: 148051 - protein, 7 aa, synthetic construct
SQTRNVH

SEQ ID NO: 148052 - protein, 7 aa, synthetic construct
SQTRQKE

SEQ ID NO: 148053 - protein, 7 aa, synthetic construct
SQTSHNR

SEQ ID NO: 148054 - protein, 7 aa, synthetic construct
SQTSKDR

SEQ ID NO: 148055 - protein, 7 aa, synthetic construct
SQTSNRQ

SEQ ID NO: 148056 - protein, 7 aa, synthetic construct
SQTTRGH

SEQ ID NO: 148057 - protein, 7 aa, synthetic construct
SQTTYQK

SEQ ID NO: 148058 - protein, 7 aa, synthetic construct
SQTVRHV

SEQ ID NO: 148059 - protein, 7 aa, synthetic construct
SQTVRVH

SEQ ID NO: 148060 - protein, 7 aa, synthetic construct
SQTVRVM

SEQ ID NO: 148061 - protein, 7 aa, synthetic construct
SQTYKDK

SEQ ID NO: 148062 - protein, 7 aa, synthetic construct
SQTYKNT

SEQ ID NO: 148063 - protein, 7 aa, synthetic construct
SQVGVGR

SEQ ID NO: 148064 - protein, 7 aa, synthetic construct
SQVLKGY

SEQ ID NO: 148065 - protein, 7 aa, synthetic construct
SQVLRTT

SEQ ID NO: 148066 - protein, 7 aa, synthetic construct
SQVMKQY

SEQ ID NO: 148067 - protein, 7 aa, synthetic construct
SQVNSTR

SEQ ID NO: 148068 - protein, 7 aa, synthetic construct
SQVRNHV

SEQ ID NO: 148069 - protein, 7 aa, synthetic construct
SQVRPAL

SEQ ID NO: 148070 - protein, 7 aa, synthetic construct
SQVRQSQ

SEQ ID NO: 148071 - protein, 7 aa, synthetic construct
SQVTRSF

SEQ ID NO: 148072 - protein, 7 aa, synthetic construct
SQYANLT

SEQ ID NO: 148073 - protein, 7 aa, synthetic construct
SQYGAKA

SEQ ID NO: 148074 - protein, 7 aa, synthetic construct
SQYKIQT

SEQ ID NO: 148075 - protein, 7 aa, synthetic construct
SQYKSTM

SEQ ID NO: 148076 - protein, 7 aa, synthetic construct
SQYMPKQ

SEQ ID NO: 148077 - protein, 7 aa, synthetic construct
SQYQKAV

SEQ ID NO: 148078 - protein, 7 aa, synthetic construct
SQYQQAK

SEQ ID NO: 148079 - protein, 7 aa, synthetic construct
SQYRASM

SEQ ID NO: 148080 - protein, 7 aa, synthetic construct
SQYTIKQ

SEQ ID NO: 148081 - protein, 7 aa, synthetic construct
SQYTKLH

SEQ ID NO: 148082 - protein, 7 aa, synthetic construct
SQYTMNT

SEQ ID NO: 148083 - protein, 7 aa, synthetic construct
SQYTVSH

SEQ ID NO: 148084 - protein, 7 aa, synthetic construct
SQYVNKM

SEQ ID NO: 148085 - protein, 7 aa, synthetic construct
SQYVQTK

SEQ ID NO: 148086 - protein, 7 aa, synthetic construct
SQYVTSQ

SEQ ID NO: 148087 - protein, 7 aa, synthetic construct
SRAAAVL

SEQ ID NO: 148088 - protein, 7 aa, synthetic construct
SRAATSY

SEQ ID NO: 148089 - protein, 7 aa, synthetic construct
SRADRLT

SEQ ID NO: 148090 - protein, 7 aa, synthetic construct
SRADRPL

SEQ ID NO: 148091 - protein, 7 aa, synthetic construct
SRADSRL

SEQ ID NO: 148092 - protein, 7 aa, synthetic construct
SRAEKDK

SEQ ID NO: 148093 - protein, 7 aa, synthetic construct
SRAELQK

SEQ ID NO: 148094 - protein, 7 aa, synthetic construct
SRAERGN

SEQ ID NO: 148095 - protein, 7 aa, synthetic construct
SRAGMDK

SEQ ID NO: 148096 - protein, 7 aa, synthetic construct
SRAHINN

SEQ ID NO: 148097 - protein, 7 aa, synthetic construct
SRALKDN

SEQ ID NO: 148098 - protein, 7 aa, synthetic construct
SRALLEK

SEQ ID NO: 148099 - protein, 7 aa, synthetic construct
SRALQDR

SEQ ID NO: 148100 - protein, 7 aa, synthetic construct
SRANDLR

SEQ ID NO: 148101 - protein, 7 aa, synthetic construct
SRANNGQ

SEQ ID NO: 148102 - protein, 7 aa, synthetic construct
SRAQHNN

SEQ ID NO: 148103 - protein, 7 aa, synthetic construct
SRAQHNP

SEQ ID NO: 148104 - protein, 7 aa, synthetic construct
SRAQHPN

SEQ ID NO: 148105 - protein, 7 aa, synthetic construct
SRAQSYV

SEQ ID NO: 148106 - protein, 7 aa, synthetic construct
SRAREMN

SEQ ID NO: 148107 - protein, 7 aa, synthetic construct
SRASDVR

SEQ ID NO: 148108 - protein, 7 aa, synthetic construct
SRAVIDK

SEQ ID NO: 148109 - protein, 7 aa, synthetic construct
SRAVMSH

SEQ ID NO: 148110 - protein, 7 aa, synthetic construct
SRAVSKD

SEQ ID NO: 148111 - protein, 7 aa, synthetic construct
SRDAAAK

SEQ ID NO: 148112 - protein, 7 aa, synthetic construct
SRDDRKP

SEQ ID NO: 148113 - protein, 7 aa, synthetic construct
SRDFNQK

SEQ ID NO: 148114 - protein, 7 aa, synthetic construct
SRDGYSK

SEQ ID NO: 148115 - protein, 7 aa, synthetic construct
SRDHRPP

SEQ ID NO: 148116 - protein, 7 aa, synthetic construct
SRDIAVR

SEQ ID NO: 148117 - protein, 7 aa, synthetic construct
SRDKAHV

SEQ ID NO: 148118 - protein, 7 aa, synthetic construct
SRDKKDQ

SEQ ID NO: 148119 - protein, 7 aa, synthetic construct
SRDKNNF

SEQ ID NO: 148120 - protein, 7 aa, synthetic construct
SRDKQYL

SEQ ID NO: 148121 - protein, 7 aa, synthetic construct
SRDKTFH

SEQ ID NO: 148122 - protein, 7 aa, synthetic construct
SRDKTIH

SEQ ID NO: 148123 - protein, 7 aa, synthetic construct
SRDMGKY

SEQ ID NO: 148124 - protein, 7 aa, synthetic construct
SRDMMPR

SEQ ID NO: 148125 - protein, 7 aa, synthetic construct
SRDMTAR

SEQ ID NO: 148126 - protein, 7 aa, synthetic construct
SRDNKGN

SEQ ID NO: 148127 - protein, 7 aa, synthetic construct
SRDQMVR

SEQ ID NO: 148128 - protein, 7 aa, synthetic construct
SRDQVAK

SEQ ID NO: 148129 - protein, 7 aa, synthetic construct
SRDSRAV

SEQ ID NO: 148130 - protein, 7 aa, synthetic construct
SRDVRQY

SEQ ID NO: 148131 - protein, 7 aa, synthetic construct
SRDVYNK

SEQ ID NO: 148132 - protein, 7 aa, synthetic construct
SREARNV

SEQ ID NO: 148133 - protein, 7 aa, synthetic construct
SREARTI

SEQ ID NO: 148134 - protein, 7 aa, synthetic construct
SREFKQM

SEQ ID NO: 148135 - protein, 7 aa, synthetic construct
SREGKSY

SEQ ID NO: 148136 - protein, 7 aa, synthetic construct
SREGSTK

SEQ ID NO: 148137 - protein, 7 aa, synthetic construct
SREHTKS

SEQ ID NO: 148138 - protein, 7 aa, synthetic construct
SREHTPR

SEQ ID NO: 148139 - protein, 7 aa, synthetic construct
SREIMGK

SEQ ID NO: 148140 - protein, 7 aa, synthetic construct
SREKPMN

SEQ ID NO: 148141 - protein, 7 aa, synthetic construct
SREKSNV

SEQ ID NO: 148142 - protein, 7 aa, synthetic construct
SREMPVK

SEQ ID NO: 148143 - protein, 7 aa, synthetic construct
SREMTLK

SEQ ID NO: 148144 - protein, 7 aa, synthetic construct
SRENSFK

SEQ ID NO: 148145 - protein, 7 aa, synthetic construct
SREPYKA

SEQ ID NO: 148146 - protein, 7 aa, synthetic construct
SREQKGL

SEQ ID NO: 148147 - protein, 7 aa, synthetic construct
SRERMSL

SEQ ID NO: 148148 - protein, 7 aa, synthetic construct
SRETKFQ

SEQ ID NO: 148149 - protein, 7 aa, synthetic construct
SRETVNR

SEQ ID NO: 148150 - protein, 7 aa, synthetic construct
SREVKNH

SEQ ID NO: 148151 - protein, 7 aa, synthetic construct
SREVPPR

SEQ ID NO: 148152 - protein, 7 aa, synthetic construct
SREVRFQ

SEQ ID NO: 148153 - protein, 7 aa, synthetic construct
SREVRVY

SEQ ID NO: 148154 - protein, 7 aa, synthetic construct
SREYIKA

SEQ ID NO: 148155 - protein, 7 aa, synthetic construct
SRGAGDK

SEQ ID NO: 148156 - protein, 7 aa, synthetic construct
SRGALHA

SEQ ID NO: 148157 - protein, 7 aa, synthetic construct
SRGDKST

SEQ ID NO: 148158 - protein, 7 aa, synthetic construct
SRGDLLK

SEQ ID NO: 148159 - protein, 7 aa, synthetic construct
SRGDRVT

SEQ ID NO: 148160 - protein, 7 aa, synthetic construct
SRGEMRV

SEQ ID NO: 148161 - protein, 7 aa, synthetic construct
SRGGHLG

SEQ ID NO: 148162 - protein, 7 aa, synthetic construct
SRGHGSG

SEQ ID NO: 148163 - protein, 7 aa, synthetic construct
SRGHISG

SEQ ID NO: 148164 - protein, 7 aa, synthetic construct
SRGHQPS

SEQ ID NO: 148165 - protein, 7 aa, synthetic construct
SRGIDKA

SEQ ID NO: 148166 - protein, 7 aa, synthetic construct
SRGKEQT

SEQ ID NO: 148167 - protein, 7 aa, synthetic construct
SRGKLPD

SEQ ID NO: 148168 - protein, 7 aa, synthetic construct
SRGKMIE

SEQ ID NO: 148169 - protein, 7 aa, synthetic construct
SRGLDKL

SEQ ID NO: 148170 - protein, 7 aa, synthetic construct
SRGLYKE

SEQ ID NO: 148171 - protein, 7 aa, synthetic construct
SRGMDKN

SEQ ID NO: 148172 - protein, 7 aa, synthetic construct
SRGMHTA

SEQ ID NO: 148173 - protein, 7 aa, synthetic construct
SRGMVSV

SEQ ID NO: 148174 - protein, 7 aa, synthetic construct
SRGNIIM

SEQ ID NO: 148175 - protein, 7 aa, synthetic construct
SRGPHGA

SEQ ID NO: 148176 - protein, 7 aa, synthetic construct
SRGPSLT

SEQ ID NO: 148177 - protein, 7 aa, synthetic construct
SRGPSYN

SEQ ID NO: 148178 - protein, 7 aa, synthetic construct
SRGQMLV

SEQ ID NO: 148179 - protein, 7 aa, synthetic construct
SRGQSHG

SEQ ID NO: 148180 - protein, 7 aa, synthetic construct
SRGSDRA

SEQ ID NO: 148181 - protein, 7 aa, synthetic construct
SRGSHQP

SEQ ID NO: 148182 - protein, 7 aa, synthetic construct
SRGSIQY

SEQ ID NO: 148183 - protein, 7 aa, synthetic construct
SRGSSHP

SEQ ID NO: 148184 - protein, 7 aa, synthetic construct
SRGSSMI

SEQ ID NO: 148185 - protein, 7 aa, synthetic construct
SRGTHQG

SEQ ID NO: 148186 - protein, 7 aa, synthetic construct
SRGTWEP

SEQ ID NO: 148187 - protein, 7 aa, synthetic construct
SRGTWQE

SEQ ID NO: 148188 - protein, 7 aa, synthetic construct
SRGVNQT

SEQ ID NO: 148189 - protein, 7 aa, synthetic construct
SRHIVTA

SEQ ID NO: 148190 - protein, 7 aa, synthetic construct
SRHNTTA

SEQ ID NO: 148191 - protein, 7 aa, synthetic construct
SRHPAGS

SEQ ID NO: 148192 - protein, 7 aa, synthetic construct
SRHPLNA

SEQ ID NO: 148193 - protein, 7 aa, synthetic construct
SRHPVPA

SEQ ID NO: 148194 - protein, 7 aa, synthetic construct
SRHSLKE

SEQ ID NO: 148195 - protein, 7 aa, synthetic construct
SRHTAWE

SEQ ID NO: 148196 - protein, 7 aa, synthetic construct
SRHVDFQ

SEQ ID NO: 148197 - protein, 7 aa, synthetic construct
SRHVTGQ

SEQ ID NO: 148198 - protein, 7 aa, synthetic construct
SRIGESR

SEQ ID NO: 148199 - protein, 7 aa, synthetic construct
SRIKAIE

SEQ ID NO: 148200 - protein, 7 aa, synthetic construct
SRIKDKE

SEQ ID NO: 148201 - protein, 7 aa, synthetic construct
SRIKDSV

SEQ ID NO: 148202 - protein, 7 aa, synthetic construct
SRIKDTS

SEQ ID NO: 148203 - protein, 7 aa, synthetic construct
SRIKEFS

SEQ ID NO: 148204 - protein, 7 aa, synthetic construct
SRIKSNE

SEQ ID NO: 148205 - protein, 7 aa, synthetic construct
SRIQNDR

SEQ ID NO: 148206 - protein, 7 aa, synthetic construct
SRISTDR

SEQ ID NO: 148207 - protein, 7 aa, synthetic construct
SRIVGDR

SEQ ID NO: 148208 - protein, 7 aa, synthetic construct
SRKDPMT

SEQ ID NO: 148209 - protein, 7 aa, synthetic construct
SRKEPAI

SEQ ID NO: 148210 - protein, 7 aa, synthetic construct
SRKEPIT

SEQ ID NO: 148211 - protein, 7 aa, synthetic construct
SRKIIGE

SEQ ID NO: 148212 - protein, 7 aa, synthetic construct
SRKLDNV

SEQ ID NO: 148213 - protein, 7 aa, synthetic construct
SRKNPDP

SEQ ID NO: 148214 - protein, 7 aa, synthetic construct
SRKPDIM

SEQ ID NO: 148215 - protein, 7 aa, synthetic construct
SRKQLQE

SEQ ID NO: 148216 - protein, 7 aa, synthetic construct
SRLAPIA

SEQ ID NO: 148217 - protein, 7 aa, synthetic construct
SRLDAVR

SEQ ID NO: 148218 - protein, 7 aa, synthetic construct
SRLDGTK

SEQ ID NO: 148219 - protein, 7 aa, synthetic construct
SRLEFKP

SEQ ID NO: 148220 - protein, 7 aa, synthetic construct
SRLHVTN

SEQ ID NO: 148221 - protein, 7 aa, synthetic construct
SRLLTDK

SEQ ID NO: 148222 - protein, 7 aa, synthetic construct
SRLPGQY

SEQ ID NO: 148223 - protein, 7 aa, synthetic construct
SRLPPQP

SEQ ID NO: 148224 - protein, 7 aa, synthetic construct
SRLQKDN

SEQ ID NO: 148225 - protein, 7 aa, synthetic construct
SRLQSRD

SEQ ID NO: 148226 - protein, 7 aa, synthetic construct
SRLSKGE

SEQ ID NO: 148227 - protein, 7 aa, synthetic construct
SRMAMAN

SEQ ID NO: 148228 - protein, 7 aa, synthetic construct
SRMERPT

SEQ ID NO: 148229 - protein, 7 aa, synthetic construct
SRMETKM

SEQ ID NO: 148230 - protein, 7 aa, synthetic construct
SRMGEKQ

SEQ ID NO: 148231 - protein, 7 aa, synthetic construct
SRMKDFS

SEQ ID NO: 148232 - protein, 7 aa, synthetic construct
SRMLKFE

SEQ ID NO: 148233 - protein, 7 aa, synthetic construct
SRMNNVT

SEQ ID NO: 148234 - protein, 7 aa, synthetic construct
SRMQADR

SEQ ID NO: 148235 - protein, 7 aa, synthetic construct
SRMQMGV

SEQ ID NO: 148236 - protein, 7 aa, synthetic construct
SRMQNHH

SEQ ID NO: 148237 - protein, 7 aa, synthetic construct
SRMQNSI

SEQ ID NO: 148238 - protein, 7 aa, synthetic construct
SRMQTST

SEQ ID NO: 148239 - protein, 7 aa, synthetic construct
SRMSAQT

SEQ ID NO: 148240 - protein, 7 aa, synthetic construct
SRMSSIV

SEQ ID NO: 148241 - protein, 7 aa, synthetic construct
SRMTANI

SEQ ID NO: 148242 - protein, 7 aa, synthetic construct
SRMTGNY

SEQ ID NO: 148243 - protein, 7 aa, synthetic construct
SRMTIQV

SEQ ID NO: 148244 - protein, 7 aa, synthetic construct
SRMTPNL

SEQ ID NO: 148245 - protein, 7 aa, synthetic construct
SRMVADR

SEQ ID NO: 148246 - protein, 7 aa, synthetic construct
SRMVIGP

SEQ ID NO: 148247 - protein, 7 aa, synthetic construct
SRMVQQI

SEQ ID NO: 148248 - protein, 7 aa, synthetic construct
SRNADSR

SEQ ID NO: 148249 - protein, 7 aa, synthetic construct
SRNAHSV

SEQ ID NO: 148250 - protein, 7 aa, synthetic construct
SRNAVPY

SEQ ID NO: 148251 - protein, 7 aa, synthetic construct
SRNAVQY

SEQ ID NO: 148252 - protein, 7 aa, synthetic construct
SRNDTVK

SEQ ID NO: 148253 - protein, 7 aa, synthetic construct
SRNEIRA

SEQ ID NO: 148254 - protein, 7 aa, synthetic construct
SRNEPKS

SEQ ID NO: 148255 - protein, 7 aa, synthetic construct
SRNESSR

SEQ ID NO: 148256 - protein, 7 aa, synthetic construct
SRNMNVL

SEQ ID NO: 148257 - protein, 7 aa, synthetic construct
SRNMPTV

SEQ ID NO: 148258 - protein, 7 aa, synthetic construct
SRNMVQM

SEQ ID NO: 148259 - protein, 7 aa, synthetic construct
SRNPKDM

SEQ ID NO: 148260 - protein, 7 aa, synthetic construct
SRNPMPP

SEQ ID NO: 148261 - protein, 7 aa, synthetic construct
SRNPQFS

SEQ ID NO: 148262 - protein, 7 aa, synthetic construct
SRNPTTY

SEQ ID NO: 148263 - protein, 7 aa, synthetic construct
SRNQVAN

SEQ ID NO: 148264 - protein, 7 aa, synthetic construct
SRNSHVI

SEQ ID NO: 148265 - protein, 7 aa, synthetic construct
SRNTFSP

SEQ ID NO: 148266 - protein, 7 aa, synthetic construct
SRNTIPT

SEQ ID NO: 148267 - protein, 7 aa, synthetic construct
SRNTPYS

SEQ ID NO: 148268 - protein, 7 aa, synthetic construct
SRNTQNW

SEQ ID NO: 148269 - protein, 7 aa, synthetic construct
SRNTQPY

SEQ ID NO: 148270 - protein, 7 aa, synthetic construct
SRNTSQH

SEQ ID NO: 148271 - protein, 7 aa, synthetic construct
SRNVHAA

SEQ ID NO: 148272 - protein, 7 aa, synthetic construct
SRNVNRE

SEQ ID NO: 148273 - protein, 7 aa, synthetic construct
SRNVREG

SEQ ID NO: 148274 - protein, 7 aa, synthetic construct
SRNYGAT

SEQ ID NO: 148275 - protein, 7 aa, synthetic construct
SRPAHPF

SEQ ID NO: 148276 - protein, 7 aa, synthetic construct
SRPAPNF

SEQ ID NO: 148277 - protein, 7 aa, synthetic construct
SRPAYTQ

SEQ ID NO: 148278 - protein, 7 aa, synthetic construct
SRPEGRN

SEQ ID NO: 148279 - protein, 7 aa, synthetic construct
SRPERLN

SEQ ID NO: 148280 - protein, 7 aa, synthetic construct
SRPERST

SEQ ID NO: 148281 - protein, 7 aa, synthetic construct
SRPGKYD

SEQ ID NO: 148282 - protein, 7 aa, synthetic construct
SRPGPML

SEQ ID NO: 148283 - protein, 7 aa, synthetic construct
SRPHLGQ

SEQ ID NO: 148284 - protein, 7 aa, synthetic construct
SRPHLGV

SEQ ID NO: 148285 - protein, 7 aa, synthetic construct
SRPHPMP

SEQ ID NO: 148286 - protein, 7 aa, synthetic construct
SRPHTHG

SEQ ID NO: 148287 - protein, 7 aa, synthetic construct
SRPHTVL

SEQ ID NO: 148288 - protein, 7 aa, synthetic construct
SRPIGLV

SEQ ID NO: 148289 - protein, 7 aa, synthetic construct
SRPMADK

SEQ ID NO: 148290 - protein, 7 aa, synthetic construct
SRPMHAN

SEQ ID NO: 148291 - protein, 7 aa, synthetic construct
SRPMKSD

SEQ ID NO: 148292 - protein, 7 aa, synthetic construct
SRPNERF

SEQ ID NO: 148293 - protein, 7 aa, synthetic construct
SRPNMVM

SEQ ID NO: 148294 - protein, 7 aa, synthetic construct
SRPPIGT

SEQ ID NO: 148295 - protein, 7 aa, synthetic construct
SRPPPAM

SEQ ID NO: 148296 - protein, 7 aa, synthetic construct
SRPQKDY

SEQ ID NO: 148297 - protein, 7 aa, synthetic construct
SRPQNQT

SEQ ID NO: 148298 - protein, 7 aa, synthetic construct
SRPSPII

SEQ ID NO: 148299 - protein, 7 aa, synthetic construct
SRPSQLL

SEQ ID NO: 148300 - protein, 7 aa, synthetic construct
SRPTAPI

SEQ ID NO: 148301 - protein, 7 aa, synthetic construct
SRPTPNF

SEQ ID NO: 148302 - protein, 7 aa, synthetic construct
SRPVQQF

SEQ ID NO: 148303 - protein, 7 aa, synthetic construct
SRPVRTE

SEQ ID NO: 148304 - protein, 7 aa, synthetic construct
SRPYSQD

SEQ ID NO: 148305 - protein, 7 aa, synthetic construct
SRQAKDM

SEQ ID NO: 148306 - protein, 7 aa, synthetic construct
SRQAKDV

SEQ ID NO: 148307 - protein, 7 aa, synthetic construct
SRQAQNV

SEQ ID NO: 148308 - protein, 7 aa, synthetic construct
SRQDARL

SEQ ID NO: 148309 - protein, 7 aa, synthetic construct
SRQDPLK

SEQ ID NO: 148310 - protein, 7 aa, synthetic construct
SRQEKPI

SEQ ID NO: 148311 - protein, 7 aa, synthetic construct
SRQEYVK

SEQ ID NO: 148312 - protein, 7 aa, synthetic construct
SRQFANA

SEQ ID NO: 148313 - protein, 7 aa, synthetic construct
SRQHIQV

SEQ ID NO: 148314 - protein, 7 aa, synthetic construct
SRQIGSL

SEQ ID NO: 148315 - protein, 7 aa, synthetic construct
SRQIQMS

SEQ ID NO: 148316 - protein, 7 aa, synthetic construct
SRQKAVD

SEQ ID NO: 148317 - protein, 7 aa, synthetic construct
SRQKLEQ

SEQ ID NO: 148318 - protein, 7 aa, synthetic construct
SRQKMDL

SEQ ID NO: 148319 - protein, 7 aa, synthetic construct
SRQKQVE

SEQ ID NO: 148320 - protein, 7 aa, synthetic construct
SRQKVEM

SEQ ID NO: 148321 - protein, 7 aa, synthetic construct
SRQLAQM

SEQ ID NO: 148322 - protein, 7 aa, synthetic construct
SRQLHMA

SEQ ID NO: 148323 - protein, 7 aa, synthetic construct
SRQMMLA

SEQ ID NO: 148324 - protein, 7 aa, synthetic construct
SRQMQLQ

SEQ ID NO: 148325 - protein, 7 aa, synthetic construct
SRQMTHM

SEQ ID NO: 148326 - protein, 7 aa, synthetic construct
SRQNALY

SEQ ID NO: 148327 - protein, 7 aa, synthetic construct
SRQNLAQ

SEQ ID NO: 148328 - protein, 7 aa, synthetic construct
SRQNNGW

SEQ ID NO: 148329 - protein, 7 aa, synthetic construct
SRQNQPY

SEQ ID NO: 148330 - protein, 7 aa, synthetic construct
SRQNVGI

SEQ ID NO: 148331 - protein, 7 aa, synthetic construct
SRQPANF

SEQ ID NO: 148332 - protein, 7 aa, synthetic construct
SRQPQIL

SEQ ID NO: 148333 - protein, 7 aa, synthetic construct
SRQQMVN

SEQ ID NO: 148334 - protein, 7 aa, synthetic construct
SRQQVMQ

SEQ ID NO: 148335 - protein, 7 aa, synthetic construct
SRQSLHM

SEQ ID NO: 148336 - protein, 7 aa, synthetic construct
SRQSNGW

SEQ ID NO: 148337 - protein, 7 aa, synthetic construct
SRQSVMV

SEQ ID NO: 148338 - protein, 7 aa, synthetic construct
SRQTNER

SEQ ID NO: 148339 - protein, 7 aa, synthetic construct
SRQTNNL

SEQ ID NO: 148340 - protein, 7 aa, synthetic construct
SRQTVLM

SEQ ID NO: 148341 - protein, 7 aa, synthetic construct
SRQVQNY

SEQ ID NO: 148342 - protein, 7 aa, synthetic construct
SRREVPS

SEQ ID NO: 148343 - protein, 7 aa, synthetic construct
SRRSDES

SEQ ID NO: 148344 - protein, 7 aa, synthetic construct
SRSADVR

SEQ ID NO: 148345 - protein, 7 aa, synthetic construct
SRSAMGH

SEQ ID NO: 148346 - protein, 7 aa, synthetic construct
SRSAPRD

SEQ ID NO: 148347 - protein, 7 aa, synthetic construct
SRSDKLI

SEQ ID NO: 148348 - protein, 7 aa, synthetic construct
SRSDKNQ

SEQ ID NO: 148349 - protein, 7 aa, synthetic construct
SRSDVPK

SEQ ID NO: 148350 - protein, 7 aa, synthetic construct
SRSEMKN

SEQ ID NO: 148351 - protein, 7 aa, synthetic construct
SRSETGR

SEQ ID NO: 148352 - protein, 7 aa, synthetic construct
SRSGDSK

SEQ ID NO: 148353 - protein, 7 aa, synthetic construct
SRSHNVI

SEQ ID NO: 148354 - protein, 7 aa, synthetic construct
SRSIAAT

SEQ ID NO: 148355 - protein, 7 aa, synthetic construct
SRSIKDV

SEQ ID NO: 148356 - protein, 7 aa, synthetic construct
SRSIPMA

SEQ ID NO: 148357 - protein, 7 aa, synthetic construct
SRSKGDT

SEQ ID NO: 148358 - protein, 7 aa, synthetic construct
SRSKQVE

SEQ ID NO: 148359 - protein, 7 aa, synthetic construct
SRSKVDM

SEQ ID NO: 148360 - protein, 7 aa, synthetic construct
SRSLQEK

SEQ ID NO: 148361 - protein, 7 aa, synthetic construct
SRSNIIT

SEQ ID NO: 148362 - protein, 7 aa, synthetic construct
SRSNNAL

SEQ ID NO: 148363 - protein, 7 aa, synthetic construct
SRSPKAD

SEQ ID NO: 148364 - protein, 7 aa, synthetic construct
SRSPPMN

SEQ ID NO: 148365 - protein, 7 aa, synthetic construct
SRSPPMS

SEQ ID NO: 148366 - protein, 7 aa, synthetic construct
SRSPVER

SEQ ID NO: 148367 - protein, 7 aa, synthetic construct
SRSPVMT

SEQ ID NO: 148368 - protein, 7 aa, synthetic construct
SRSQHYQ

SEQ ID NO: 148369 - protein, 7 aa, synthetic construct
SRSQIPQ

SEQ ID NO: 148370 - protein, 7 aa, synthetic construct
SRSQVSQ

SEQ ID NO: 148371 - protein, 7 aa, synthetic construct
SRSSMLT

SEQ ID NO: 148372 - protein, 7 aa, synthetic construct
SRSTAPF

SEQ ID NO: 148373 - protein, 7 aa, synthetic construct
SRSTGMY

SEQ ID NO: 148374 - protein, 7 aa, synthetic construct
SRSTINH

SEQ ID NO: 148375 - protein, 7 aa, synthetic construct
SRSVSMV

SEQ ID NO: 148376 - protein, 7 aa, synthetic construct
SRTAETR

SEQ ID NO: 148377 - protein, 7 aa, synthetic construct
SRTATTY

SEQ ID NO: 148378 - protein, 7 aa, synthetic construct
SRTEANK

SEQ ID NO: 148379 - protein, 7 aa, synthetic construct
SRTEKSF

SEQ ID NO: 148380 - protein, 7 aa, synthetic construct
SRTEPMR

SEQ ID NO: 148381 - protein, 7 aa, synthetic construct
SRTHQVI

SEQ ID NO: 148382 - protein, 7 aa, synthetic construct
SRTIDKS

SEQ ID NO: 148383 - protein, 7 aa, synthetic construct
SRTIQNM

SEQ ID NO: 148384 - protein, 7 aa, synthetic construct
SRTKDQT

SEQ ID NO: 148385 - protein, 7 aa, synthetic construct
SRTKEYI

SEQ ID NO: 148386 - protein, 7 aa, synthetic construct
SRTMKDS

SEQ ID NO: 148387 - protein, 7 aa, synthetic construct
SRTMKND

SEQ ID NO: 148388 - protein, 7 aa, synthetic construct
SRTMSPL

SEQ ID NO: 148389 - protein, 7 aa, synthetic construct
SRTNKLD

SEQ ID NO: 148390 - protein, 7 aa, synthetic construct
SRTPVAF

SEQ ID NO: 148391 - protein, 7 aa, synthetic construct
SRTQHPL

SEQ ID NO: 148392 - protein, 7 aa, synthetic construct
SRTQKTD

SEQ ID NO: 148393 - protein, 7 aa, synthetic construct
SRTQPPV

SEQ ID NO: 148394 - protein, 7 aa, synthetic construct
SRTQPSM

SEQ ID NO: 148395 - protein, 7 aa, synthetic construct
SRTRETI

SEQ ID NO: 148396 - protein, 7 aa, synthetic construct
SRTSENR

SEQ ID NO: 148397 - protein, 7 aa, synthetic construct
SRTTDQK

SEQ ID NO: 148398 - protein, 7 aa, synthetic construct
SRTTHPT

SEQ ID NO: 148399 - protein, 7 aa, synthetic construct
SRTTQTH

SEQ ID NO: 148400 - protein, 7 aa, synthetic construct
SRTVHAA

SEQ ID NO: 148401 - protein, 7 aa, synthetic construct
SRTVIEK

SEQ ID NO: 148402 - protein, 7 aa, synthetic construct
SRVDMSK

SEQ ID NO: 148403 - protein, 7 aa, synthetic construct
SRVGPHP

SEQ ID NO: 148404 - protein, 7 aa, synthetic construct
SRVGTDK

SEQ ID NO: 148405 - protein, 7 aa, synthetic construct
SRVKNLD

SEQ ID NO: 148406 - protein, 7 aa, synthetic construct
SRVLMAS

SEQ ID NO: 148407 - protein, 7 aa, synthetic construct
SRVMKYE

SEQ ID NO: 148408 - protein, 7 aa, synthetic construct
SRVPMSN

SEQ ID NO: 148409 - protein, 7 aa, synthetic construct
SRVPRDM

SEQ ID NO: 148410 - protein, 7 aa, synthetic construct
SRVQAGQ

SEQ ID NO: 148411 - protein, 7 aa, synthetic construct
SRVQLMA

SEQ ID NO: 148412 - protein, 7 aa, synthetic construct
SRVQPSM

SEQ ID NO: 148413 - protein, 7 aa, synthetic construct
SRVQQMQ

SEQ ID NO: 148414 - protein, 7 aa, synthetic construct
SRVRAVE

SEQ ID NO: 148415 - protein, 7 aa, synthetic construct
SRVRELV

SEQ ID NO: 148416 - protein, 7 aa, synthetic construct
SRVRIDA

SEQ ID NO: 148417 - protein, 7 aa, synthetic construct
SRVRMTE

SEQ ID NO: 148418 - protein, 7 aa, synthetic construct
SRVRTEP

SEQ ID NO: 148419 - protein, 7 aa, synthetic construct
SRVSIIQ

SEQ ID NO: 148420 - protein, 7 aa, synthetic construct
SRVSQPM

SEQ ID NO: 148421 - protein, 7 aa, synthetic construct
SRVSTVT

SEQ ID NO: 148422 - protein, 7 aa, synthetic construct
SRVVHKE

SEQ ID NO: 148423 - protein, 7 aa, synthetic construct
SRVVKEY

SEQ ID NO: 148424 - protein, 7 aa, synthetic construct
SRVVKME

SEQ ID NO: 148425 - protein, 7 aa, synthetic construct
SRVYKEG

SEQ ID NO: 148426 - protein, 7 aa, synthetic construct
SRWESRD

SEQ ID NO: 148427 - protein, 7 aa, synthetic construct
SRYFPDA

SEQ ID NO: 148428 - protein, 7 aa, synthetic construct
SSADIQG

SEQ ID NO: 148429 - protein, 7 aa, synthetic construct
SSAGSRQ

SEQ ID NO: 148430 - protein, 7 aa, synthetic construct
SSAHKTY

SEQ ID NO: 148431 - protein, 7 aa, synthetic construct
SSANKYQ

SEQ ID NO: 148432 - protein, 7 aa, synthetic construct
SSAVRAL

SEQ ID NO: 148433 - protein, 7 aa, synthetic construct
SSDITRK

SEQ ID NO: 148434 - protein, 7 aa, synthetic construct
SSDKRMF

SEQ ID NO: 148435 - protein, 7 aa, synthetic construct
SSDRVLR

SEQ ID NO: 148436 - protein, 7 aa, synthetic construct
SSDYTHR

SEQ ID NO: 148437 - protein, 7 aa, synthetic construct
SSEKRIQ

SEQ ID NO: 148438 - protein, 7 aa, synthetic construct
SSEMRKS

SEQ ID NO: 148439 - protein, 7 aa, synthetic construct
SSFDKGK

SEQ ID NO: 148440 - protein, 7 aa, synthetic construct
SSFHNKA

SEQ ID NO: 148441 - protein, 7 aa, synthetic construct
SSFKPVT

SEQ ID NO: 148442 - protein, 7 aa, synthetic construct
SSFQNTR

SEQ ID NO: 148443 - protein, 7 aa, synthetic construct
SSGAVMR

SEQ ID NO: 148444 - protein, 7 aa, synthetic construct
SSGEKRA

SEQ ID NO: 148445 - protein, 7 aa, synthetic construct
SSGEWRS

SEQ ID NO: 148446 - protein, 7 aa, synthetic construct
SSGGQPR

SEQ ID NO: 148447 - protein, 7 aa, synthetic construct
SSGHIVR

SEQ ID NO: 148448 - protein, 7 aa, synthetic construct
SSGHKAS

SEQ ID NO: 148449 - protein, 7 aa, synthetic construct
SSGKAFS

SEQ ID NO: 148450 - protein, 7 aa, synthetic construct
SSGKIYT

SEQ ID NO: 148451 - protein, 7 aa, synthetic construct
SSGKNFQ

SEQ ID NO: 148452 - protein, 7 aa, synthetic construct
SSGNVPR

SEQ ID NO: 148453 - protein, 7 aa, synthetic construct
SSGQAGK

SEQ ID NO: 148454 - protein, 7 aa, synthetic construct
SSGQYQR

SEQ ID NO: 148455 - protein, 7 aa, synthetic construct
SSGRQKE

SEQ ID NO: 148456 - protein, 7 aa, synthetic construct
SSGVSRS

SEQ ID NO: 148457 - protein, 7 aa, synthetic construct
SSGYQKI

SEQ ID NO: 148458 - protein, 7 aa, synthetic construct
SSGYQKP

SEQ ID NO: 148459 - protein, 7 aa, synthetic construct
SSHASSR

SEQ ID NO: 148460 - protein, 7 aa, synthetic construct
SSHGMKA

SEQ ID NO: 148461 - protein, 7 aa, synthetic construct
SSHGNIK

SEQ ID NO: 148462 - protein, 7 aa, synthetic construct
SSHGTMR

SEQ ID NO: 148463 - protein, 7 aa, synthetic construct
SSHKVGM

SEQ ID NO: 148464 - protein, 7 aa, synthetic construct
SSHNGKF

SEQ ID NO: 148465 - protein, 7 aa, synthetic construct
SSHNRVF

SEQ ID NO: 148466 - protein, 7 aa, synthetic construct
SSHPKGG

SEQ ID NO: 148467 - protein, 7 aa, synthetic construct
SSHQKPS

SEQ ID NO: 148468 - protein, 7 aa, synthetic construct
SSHQKTF

SEQ ID NO: 148469 - protein, 7 aa, synthetic construct
SSHRIGG

SEQ ID NO: 148470 - protein, 7 aa, synthetic construct
SSHRPNP

SEQ ID NO: 148471 - protein, 7 aa, synthetic construct
SSHSAKQ

SEQ ID NO: 148472 - protein, 7 aa, synthetic construct
SSHSSKT

SEQ ID NO: 148473 - protein, 7 aa, synthetic construct
SSHVAHK

SEQ ID NO: 148474 - protein, 7 aa, synthetic construct
SSHVVAK

SEQ ID NO: 148475 - protein, 7 aa, synthetic construct
SSIHAVR

SEQ ID NO: 148476 - protein, 7 aa, synthetic construct
SSIQGRY

SEQ ID NO: 148477 - protein, 7 aa, synthetic construct
SSKAHDR

SEQ ID NO: 148478 - protein, 7 aa, synthetic construct
SSKDSAR

SEQ ID NO: 148479 - protein, 7 aa, synthetic construct
SSKHTIM

SEQ ID NO: 148480 - protein, 7 aa, synthetic construct
SSKIHNY

SEQ ID NO: 148481 - protein, 7 aa, synthetic construct
SSKIMER

SEQ ID NO: 148482 - protein, 7 aa, synthetic construct
SSKIRGD

SEQ ID NO: 148483 - protein, 7 aa, synthetic construct
SSKKEER

SEQ ID NO: 148484 - protein, 7 aa, synthetic construct
SSKKEFL

SEQ ID NO: 148485 - protein, 7 aa, synthetic construct
SSKLRVD

SEQ ID NO: 148486 - protein, 7 aa, synthetic construct
SSKPHLY

SEQ ID NO: 148487 - protein, 7 aa, synthetic construct
SSKPLVF

SEQ ID NO: 148488 - protein, 7 aa, synthetic construct
SSKQDGK

SEQ ID NO: 148489 - protein, 7 aa, synthetic construct
SSKQHNL

SEQ ID NO: 148490 - protein, 7 aa, synthetic construct
SSKQIMY

SEQ ID NO: 148491 - protein, 7 aa, synthetic construct
SSKRESA

SEQ ID NO: 148492 - protein, 7 aa, synthetic construct
SSKTQER

SEQ ID NO: 148493 - protein, 7 aa, synthetic construct
SSKYAGI

SEQ ID NO: 148494 - protein, 7 aa, synthetic construct
SSKYATS

SEQ ID NO: 148495 - protein, 7 aa, synthetic construct
SSKYQSM

SEQ ID NO: 148496 - protein, 7 aa, synthetic construct
SSKYRDP

SEQ ID NO: 148497 - protein, 7 aa, synthetic construct
SSLHHKT

SEQ ID NO: 148498 - protein, 7 aa, synthetic construct
SSLKIAM

SEQ ID NO: 148499 - protein, 7 aa, synthetic construct
SSLKPRE

SEQ ID NO: 148500 - protein, 7 aa, synthetic construct
SSLRPKD

SEQ ID NO: 148501 - protein, 7 aa, synthetic construct
SSMGNAR

SEQ ID NO: 148502 - protein, 7 aa, synthetic construct
SSMGQGR

SEQ ID NO: 148503 - protein, 7 aa, synthetic construct
SSMHGMK

SEQ ID NO: 148504 - protein, 7 aa, synthetic construct
SSMKPLM

SEQ ID NO: 148505 - protein, 7 aa, synthetic construct
SSMKRDL

SEQ ID NO: 148506 - protein, 7 aa, synthetic construct
SSMNRQI

SEQ ID NO: 148507 - protein, 7 aa, synthetic construct
SSMPMLK

SEQ ID NO: 148508 - protein, 7 aa, synthetic construct
SSMQSAR

SEQ ID NO: 148509 - protein, 7 aa, synthetic construct
SSMRHTP

SEQ ID NO: 148510 - protein, 7 aa, synthetic construct
SSMRQQH

SEQ ID NO: 148511 - protein, 7 aa, synthetic construct
SSMRVRE

SEQ ID NO: 148512 - protein, 7 aa, synthetic construct
SSMSIAR

SEQ ID NO: 148513 - protein, 7 aa, synthetic construct
SSMSQSR

SEQ ID NO: 148514 - protein, 7 aa, synthetic construct
SSMTKQY

SEQ ID NO: 148515 - protein, 7 aa, synthetic construct
SSNAVYR

SEQ ID NO: 148516 - protein, 7 aa, synthetic construct
SSNGMSR

SEQ ID NO: 148517 - protein, 7 aa, synthetic construct
SSNGWPK

SEQ ID NO: 148518 - protein, 7 aa, synthetic construct
SSNHKSI

SEQ ID NO: 148519 - protein, 7 aa, synthetic construct
SSNHQQR

SEQ ID NO: 148520 - protein, 7 aa, synthetic construct
SSNHSLR

SEQ ID NO: 148521 - protein, 7 aa, synthetic construct
SSNKETR

SEQ ID NO: 148522 - protein, 7 aa, synthetic construct
SSNNTSR

SEQ ID NO: 148523 - protein, 7 aa, synthetic construct
SSNPRAL

SEQ ID NO: 148524 - protein, 7 aa, synthetic construct
SSNYLKA

SEQ ID NO: 148525 - protein, 7 aa, synthetic construct
SSPGIRN

SEQ ID NO: 148526 - protein, 7 aa, synthetic construct
SSPMEKR

SEQ ID NO: 148527 - protein, 7 aa, synthetic construct
SSPRPMP

SEQ ID NO: 148528 - protein, 7 aa, synthetic construct
SSPRVRE

SEQ ID NO: 148529 - protein, 7 aa, synthetic construct
SSQARMQ

SEQ ID NO: 148530 - protein, 7 aa, synthetic construct
SSQDRSR

SEQ ID NO: 148531 - protein, 7 aa, synthetic construct
SSQHKQF

SEQ ID NO: 148532 - protein, 7 aa, synthetic construct
SSQHQTK

SEQ ID NO: 148533 - protein, 7 aa, synthetic construct
SSQHRHL

SEQ ID NO: 148534 - protein, 7 aa, synthetic construct
SSQHTMK

SEQ ID NO: 148535 - protein, 7 aa, synthetic construct
SSQHVRV

SEQ ID NO: 148536 - protein, 7 aa, synthetic construct
SSQKHST

SEQ ID NO: 148537 - protein, 7 aa, synthetic construct
SSQLMAR

SEQ ID NO: 148538 - protein, 7 aa, synthetic construct
SSQMRNM

SEQ ID NO: 148539 - protein, 7 aa, synthetic construct
SSQNAKY

SEQ ID NO: 148540 - protein, 7 aa, synthetic construct
SSQNQIR

SEQ ID NO: 148541 - protein, 7 aa, synthetic construct
SSQNYKY

SEQ ID NO: 148542 - protein, 7 aa, synthetic construct
SSQQRGQ

SEQ ID NO: 148543 - protein, 7 aa, synthetic construct
SSQRNIM

SEQ ID NO: 148544 - protein, 7 aa, synthetic construct
SSQRTMM

SEQ ID NO: 148545 - protein, 7 aa, synthetic construct
SSQRVQL

SEQ ID NO: 148546 - protein, 7 aa, synthetic construct
SSQTHKN

SEQ ID NO: 148547 - protein, 7 aa, synthetic construct
SSQYVKQ

SEQ ID NO: 148548 - protein, 7 aa, synthetic construct
SSRAMDK

SEQ ID NO: 148549 - protein, 7 aa, synthetic construct
SSRAMKE

SEQ ID NO: 148550 - protein, 7 aa, synthetic construct
SSRAQML

SEQ ID NO: 148551 - protein, 7 aa, synthetic construct
SSREIAR

SEQ ID NO: 148552 - protein, 7 aa, synthetic construct
SSRELQR

SEQ ID NO: 148553 - protein, 7 aa, synthetic construct
SSRERFA

SEQ ID NO: 148554 - protein, 7 aa, synthetic construct
SSRGGLL

SEQ ID NO: 148555 - protein, 7 aa, synthetic construct
SSRGLER

SEQ ID NO: 148556 - protein, 7 aa, synthetic construct
SSRGVER

SEQ ID NO: 148557 - protein, 7 aa, synthetic construct
SSRINKD

SEQ ID NO: 148558 - protein, 7 aa, synthetic construct
SSRISMV

SEQ ID NO: 148559 - protein, 7 aa, synthetic construct
SSRKLFE

SEQ ID NO: 148560 - protein, 7 aa, synthetic construct
SSRLEKN

SEQ ID NO: 148561 - protein, 7 aa, synthetic construct
SSRMNDK

SEQ ID NO: 148562 - protein, 7 aa, synthetic construct
SSRMVRE

SEQ ID NO: 148563 - protein, 7 aa, synthetic construct
SSRPASI

SEQ ID NO: 148564 - protein, 7 aa, synthetic construct
SSRPNRE

SEQ ID NO: 148565 - protein, 7 aa, synthetic construct
SSRPYGP

SEQ ID NO: 148566 - protein, 7 aa, synthetic construct
SSRSHSV

SEQ ID NO: 148567 - protein, 7 aa, synthetic construct
SSRTLHA

SEQ ID NO: 148568 - protein, 7 aa, synthetic construct
SSSFTRA

SEQ ID NO: 148569 - protein, 7 aa, synthetic construct
SSSFTRG

SEQ ID NO: 148570 - protein, 7 aa, synthetic construct
SSSGANR

SEQ ID NO: 148571 - protein, 7 aa, synthetic construct
SSSGRPF

SEQ ID NO: 148572 - protein, 7 aa, synthetic construct
SSSHTRP

SEQ ID NO: 148573 - protein, 7 aa, synthetic construct
SSSKSYG

SEQ ID NO: 148574 - protein, 7 aa, synthetic construct
SSSLRER

SEQ ID NO: 148575 - protein, 7 aa, synthetic construct
SSSNLRG

SEQ ID NO: 148576 - protein, 7 aa, synthetic construct
SSSNTRN

SEQ ID NO: 148577 - protein, 7 aa, synthetic construct
SSSRASI

SEQ ID NO: 148578 - protein, 7 aa, synthetic construct
SSSRHAP

SEQ ID NO: 148579 - protein, 7 aa, synthetic construct
SSSRSLN

SEQ ID NO: 148580 - protein, 7 aa, synthetic construct
SSSRVER

SEQ ID NO: 148581 - protein, 7 aa, synthetic construct
SSSSYQK

SEQ ID NO: 148582 - protein, 7 aa, synthetic construct
SSSTHRP

SEQ ID NO: 148583 - protein, 7 aa, synthetic construct
SSSVKFL

SEQ ID NO: 148584 - protein, 7 aa, synthetic construct
SSSVYKQ

SEQ ID NO: 148585 - protein, 7 aa, synthetic construct
SSTKPKD

SEQ ID NO: 148586 - protein, 7 aa, synthetic construct
SSTKSMF

SEQ ID NO: 148587 - protein, 7 aa, synthetic construct
SSTKVVF

SEQ ID NO: 148588 - protein, 7 aa, synthetic construct
SSTMGNR

SEQ ID NO: 148589 - protein, 7 aa, synthetic construct
SSTNHNK

SEQ ID NO: 148590 - protein, 7 aa, synthetic construct
SSTQGRY

SEQ ID NO: 148591 - protein, 7 aa, synthetic construct
SSTQKYI

SEQ ID NO: 148592 - protein, 7 aa, synthetic construct
SSTRAER

SEQ ID NO: 148593 - protein, 7 aa, synthetic construct
SSTRMNL

SEQ ID NO: 148594 - protein, 7 aa, synthetic construct
SSTRQHI

SEQ ID NO: 148595 - protein, 7 aa, synthetic construct
SSTRQIM

SEQ ID NO: 148596 - protein, 7 aa, synthetic construct
SSTSRAN

SEQ ID NO: 148597 - protein, 7 aa, synthetic construct
SSTVKHY

SEQ ID NO: 148598 - protein, 7 aa, synthetic construct
SSTVRMN

SEQ ID NO: 148599 - protein, 7 aa, synthetic construct
SSTYTNP

SEQ ID NO: 148600 - protein, 7 aa, synthetic construct
SSVHKAT

SEQ ID NO: 148601 - protein, 7 aa, synthetic construct
SSVRPSH

SEQ ID NO: 148602 - protein, 7 aa, synthetic construct
SSVYKRE

SEQ ID NO: 148603 - protein, 7 aa, synthetic construct
SSVYYKA

SEQ ID NO: 148604 - protein, 7 aa, synthetic construct
SSYAMKS

SEQ ID NO: 148605 - protein, 7 aa, synthetic construct
SSYHPKA

SEQ ID NO: 148606 - protein, 7 aa, synthetic construct
SSYKFKE

SEQ ID NO: 148607 - protein, 7 aa, synthetic construct
SSYPGKS

SEQ ID NO: 148608 - protein, 7 aa, synthetic construct
SSYPKIS

SEQ ID NO: 148609 - protein, 7 aa, synthetic construct
SSYQHDR

SEQ ID NO: 148610 - protein, 7 aa, synthetic construct
SSYQNVK

SEQ ID NO: 148611 - protein, 7 aa, synthetic construct
SSYTGSH

SEQ ID NO: 148612 - protein, 7 aa, synthetic construct
SSYTKGG

SEQ ID NO: 148613 - protein, 7 aa, synthetic construct
STAERRV

SEQ ID NO: 148614 - protein, 7 aa, synthetic construct
STAGGKW

SEQ ID NO: 148615 - protein, 7 aa, synthetic construct
STAHAYK

SEQ ID NO: 148616 - protein, 7 aa, synthetic construct
STAHGVR

SEQ ID NO: 148617 - protein, 7 aa, synthetic construct
STAHIAK

SEQ ID NO: 148618 - protein, 7 aa, synthetic construct
STAHRAS

SEQ ID NO: 148619 - protein, 7 aa, synthetic construct
STAKQER

SEQ ID NO: 148620 - protein, 7 aa, synthetic construct
STANHIK

SEQ ID NO: 148621 - protein, 7 aa, synthetic construct
STANHPK

SEQ ID NO: 148622 - protein, 7 aa, synthetic construct
STANRHA

SEQ ID NO: 148623 - protein, 7 aa, synthetic construct
STAPQYR

SEQ ID NO: 148624 - protein, 7 aa, synthetic construct
STASRSF

SEQ ID NO: 148625 - protein, 7 aa, synthetic construct
STASSKY

SEQ ID NO: 148626 - protein, 7 aa, synthetic construct
STAVKAF

SEQ ID NO: 148627 - protein, 7 aa, synthetic construct
STAYHAM

SEQ ID NO: 148628 - protein, 7 aa, synthetic construct
STAYKQL

SEQ ID NO: 148629 - protein, 7 aa, synthetic construct
STDKRGG

SEQ ID NO: 148630 - protein, 7 aa, synthetic construct
STDRLGK

SEQ ID NO: 148631 - protein, 7 aa, synthetic construct
STDRPAK

SEQ ID NO: 148632 - protein, 7 aa, synthetic construct
STEGRKV

SEQ ID NO: 148633 - protein, 7 aa, synthetic construct
STEWQRA

SEQ ID NO: 148634 - protein, 7 aa, synthetic construct
STFKHSA

SEQ ID NO: 148635 - protein, 7 aa, synthetic construct
STFKKDL

SEQ ID NO: 148636 - protein, 7 aa, synthetic construct
STFNPKS

SEQ ID NO: 148637 - protein, 7 aa, synthetic construct
STFQNHK

SEQ ID NO: 148638 - protein, 7 aa, synthetic construct
STFQSQK

SEQ ID NO: 148639 - protein, 7 aa, synthetic construct
STFSSKQ

SEQ ID NO: 148640 - protein, 7 aa, synthetic construct
STGAKIY

SEQ ID NO: 148641 - protein, 7 aa, synthetic construct
STGDKGK

SEQ ID NO: 148642 - protein, 7 aa, synthetic construct
STGFAKN

SEQ ID NO: 148643 - protein, 7 aa, synthetic construct
STGHNKN

SEQ ID NO: 148644 - protein, 7 aa, synthetic construct
STGHTKL

SEQ ID NO: 148645 - protein, 7 aa, synthetic construct
STGKAFI

SEQ ID NO: 148646 - protein, 7 aa, synthetic construct
STGMKYI

SEQ ID NO: 148647 - protein, 7 aa, synthetic construct
STGMQYR

SEQ ID NO: 148648 - protein, 7 aa, synthetic construct
STGNVRG

SEQ ID NO: 148649 - protein, 7 aa, synthetic construct
STGQARY

SEQ ID NO: 148650 - protein, 7 aa, synthetic construct
STGQKYS

SEQ ID NO: 148651 - protein, 7 aa, synthetic construct
STGREAK

SEQ ID NO: 148652 - protein, 7 aa, synthetic construct
STGRVIT

SEQ ID NO: 148653 - protein, 7 aa, synthetic construct
STGTHPK

SEQ ID NO: 148654 - protein, 7 aa, synthetic construct
STGVNFR

SEQ ID NO: 148655 - protein, 7 aa, synthetic construct
STGYSHT

SEQ ID NO: 148656 - protein, 7 aa, synthetic construct
STHAASK

SEQ ID NO: 148657 - protein, 7 aa, synthetic construct
STHAVVR

SEQ ID NO: 148658 - protein, 7 aa, synthetic construct
STHDKGR

SEQ ID NO: 148659 - protein, 7 aa, synthetic construct
STHGPKI

SEQ ID NO: 148660 - protein, 7 aa, synthetic construct
STHGQYK

SEQ ID NO: 148661 - protein, 7 aa, synthetic construct
STHKLNF

SEQ ID NO: 148662 - protein, 7 aa, synthetic construct
STHKPFI

SEQ ID NO: 148663 - protein, 7 aa, synthetic construct
STHKSVY

SEQ ID NO: 148664 - protein, 7 aa, synthetic construct
STHLAKY

SEQ ID NO: 148665 - protein, 7 aa, synthetic construct
STHMRPQ

SEQ ID NO: 148666 - protein, 7 aa, synthetic construct
STHNNKM

SEQ ID NO: 148667 - protein, 7 aa, synthetic construct
STHNQTR

SEQ ID NO: 148668 - protein, 7 aa, synthetic construct
STHPGRG

SEQ ID NO: 148669 - protein, 7 aa, synthetic construct
STHPKHG

SEQ ID NO: 148670 - protein, 7 aa, synthetic construct
STHPQRG

SEQ ID NO: 148671 - protein, 7 aa, synthetic construct
STHQIQK

SEQ ID NO: 148672 - protein, 7 aa, synthetic construct
STHTKQF

SEQ ID NO: 148673 - protein, 7 aa, synthetic construct
STIHRNP

SEQ ID NO: 148674 - protein, 7 aa, synthetic construct
STIRSRE

SEQ ID NO: 148675 - protein, 7 aa, synthetic construct
STIYKGG

SEQ ID NO: 148676 - protein, 7 aa, synthetic construct
STKDYRG

SEQ ID NO: 148677 - protein, 7 aa, synthetic construct
STKDYRL

SEQ ID NO: 148678 - protein, 7 aa, synthetic construct
STKGAYQ

SEQ ID NO: 148679 - protein, 7 aa, synthetic construct
STKGFHA

SEQ ID NO: 148680 - protein, 7 aa, synthetic construct
STKHIAL

SEQ ID NO: 148681 - protein, 7 aa, synthetic construct
STKHYAA

SEQ ID NO: 148682 - protein, 7 aa, synthetic construct
STKIGAF

SEQ ID NO: 148683 - protein, 7 aa, synthetic construct
STKMYPS

SEQ ID NO: 148684 - protein, 7 aa, synthetic construct
STKNTAW

SEQ ID NO: 148685 - protein, 7 aa, synthetic construct
STKPADR

SEQ ID NO: 148686 - protein, 7 aa, synthetic construct
STKPASF

SEQ ID NO: 148687 - protein, 7 aa, synthetic construct
STKPIVH

SEQ ID NO: 148688 - protein, 7 aa, synthetic construct
STKPLPI

SEQ ID NO: 148689 - protein, 7 aa, synthetic construct
STKRDTI

SEQ ID NO: 148690 - protein, 7 aa, synthetic construct
STKYTHA

SEQ ID NO: 148691 - protein, 7 aa, synthetic construct
STLHVKY

SEQ ID NO: 148692 - protein, 7 aa, synthetic construct
STLRERV

SEQ ID NO: 148693 - protein, 7 aa, synthetic construct
STLRSDK

SEQ ID NO: 148694 - protein, 7 aa, synthetic construct
STLWREE

SEQ ID NO: 148695 - protein, 7 aa, synthetic construct
STMKNNW

SEQ ID NO: 148696 - protein, 7 aa, synthetic construct
STMNHVR

SEQ ID NO: 148697 - protein, 7 aa, synthetic construct
STMQRER

SEQ ID NO: 148698 - protein, 7 aa, synthetic construct
STNAHLR

SEQ ID NO: 148699 - protein, 7 aa, synthetic construct
STNAHQR

SEQ ID NO: 148700 - protein, 7 aa, synthetic construct
STNFKSY

SEQ ID NO: 148701 - protein, 7 aa, synthetic construct
STNLIRA

SEQ ID NO: 148702 - protein, 7 aa, synthetic construct
STNPHRL

SEQ ID NO: 148703 - protein, 7 aa, synthetic construct
STNPKTW

SEQ ID NO: 148704 - protein, 7 aa, synthetic construct
STNQRPY

SEQ ID NO: 148705 - protein, 7 aa, synthetic construct
STNREIR

SEQ ID NO: 148706 - protein, 7 aa, synthetic construct
STNRPTY

SEQ ID NO: 148707 - protein, 7 aa, synthetic construct
STNRQYV

SEQ ID NO: 148708 - protein, 7 aa, synthetic construct
STNSHAR

SEQ ID NO: 148709 - protein, 7 aa, synthetic construct
STNTRAF

SEQ ID NO: 148710 - protein, 7 aa, synthetic construct
STPARDR

SEQ ID NO: 148711 - protein, 7 aa, synthetic construct
STPQGHR

SEQ ID NO: 148712 - protein, 7 aa, synthetic construct
STPQMGR

SEQ ID NO: 148713 - protein, 7 aa, synthetic construct
STPQRQW

SEQ ID NO: 148714 - protein, 7 aa, synthetic construct
STPVREY

SEQ ID NO: 148715 - protein, 7 aa, synthetic construct
STQFSHQ

SEQ ID NO: 148716 - protein, 7 aa, synthetic construct
STQGYKQ

SEQ ID NO: 148717 - protein, 7 aa, synthetic construct
STQHNPK

SEQ ID NO: 148718 - protein, 7 aa, synthetic construct
STQHRAG

SEQ ID NO: 148719 - protein, 7 aa, synthetic construct
STQLHSR

SEQ ID NO: 148720 - protein, 7 aa, synthetic construct
STQSYPR

SEQ ID NO: 148721 - protein, 7 aa, synthetic construct
STQVKLT

SEQ ID NO: 148722 - protein, 7 aa, synthetic construct
STQYNNK

SEQ ID NO: 148723 - protein, 7 aa, synthetic construct
STRANAY

SEQ ID NO: 148724 - protein, 7 aa, synthetic construct
STRDSGK

SEQ ID NO: 148725 - protein, 7 aa, synthetic construct
STRERTV

SEQ ID NO: 148726 - protein, 7 aa, synthetic construct
STRESMK

SEQ ID NO: 148727 - protein, 7 aa, synthetic construct
STRESYK

SEQ ID NO: 148728 - protein, 7 aa, synthetic construct
STRIDQR

SEQ ID NO: 148729 - protein, 7 aa, synthetic construct
STRNVLV

SEQ ID NO: 148730 - protein, 7 aa, synthetic construct
STRPSPH

SEQ ID NO: 148731 - protein, 7 aa, synthetic construct
STRQIRE

SEQ ID NO: 148732 - protein, 7 aa, synthetic construct
STRQREG

SEQ ID NO: 148733 - protein, 7 aa, synthetic construct
STRTERQ

SEQ ID NO: 148734 - protein, 7 aa, synthetic construct
STRTHAV

SEQ ID NO: 148735 - protein, 7 aa, synthetic construct
STRVDKY

SEQ ID NO: 148736 - protein, 7 aa, synthetic construct
STSGHTR

SEQ ID NO: 148737 - protein, 7 aa, synthetic construct
STSGQHK

SEQ ID NO: 148738 - protein, 7 aa, synthetic construct
STSGYTK

SEQ ID NO: 148739 - protein, 7 aa, synthetic construct
STSHMNK

SEQ ID NO: 148740 - protein, 7 aa, synthetic construct
STSKPYQ

SEQ ID NO: 148741 - protein, 7 aa, synthetic construct
STSMKTF

SEQ ID NO: 148742 - protein, 7 aa, synthetic construct
STSNAHK

SEQ ID NO: 148743 - protein, 7 aa, synthetic construct
STSPKTW

SEQ ID NO: 148744 - protein, 7 aa, synthetic construct
STSQSKW

SEQ ID NO: 148745 - protein, 7 aa, synthetic construct
STSVIMK

SEQ ID NO: 148746 - protein, 7 aa, synthetic construct
STSVKQW

SEQ ID NO: 148747 - protein, 7 aa, synthetic construct
STSYSRV

SEQ ID NO: 148748 - protein, 7 aa, synthetic construct
STTGTHW

SEQ ID NO: 148749 - protein, 7 aa, synthetic construct
STTHAGR

SEQ ID NO: 148750 - protein, 7 aa, synthetic construct
STTHGRG

SEQ ID NO: 148751 - protein, 7 aa, synthetic construct
STTHSNR

SEQ ID NO: 148752 - protein, 7 aa, synthetic construct
STTKHYS

SEQ ID NO: 148753 - protein, 7 aa, synthetic construct
STTPDHF

SEQ ID NO: 148754 - protein, 7 aa, synthetic construct
STTSGRN

SEQ ID NO: 148755 - protein, 7 aa, synthetic construct
STTSSRH

SEQ ID NO: 148756 - protein, 7 aa, synthetic construct
STTVHTR

SEQ ID NO: 148757 - protein, 7 aa, synthetic construct
STVGRAF

SEQ ID NO: 148758 - protein, 7 aa, synthetic construct
STVHART

SEQ ID NO: 148759 - protein, 7 aa, synthetic construct
STVNGYR

SEQ ID NO: 148760 - protein, 7 aa, synthetic construct
STVNHMR

SEQ ID NO: 148761 - protein, 7 aa, synthetic construct
STVPRER

SEQ ID NO: 148762 - protein, 7 aa, synthetic construct
STVQRHG

SEQ ID NO: 148763 - protein, 7 aa, synthetic construct
STVRVRD

SEQ ID NO: 148764 - protein, 7 aa, synthetic construct
STYHKSG

SEQ ID NO: 148765 - protein, 7 aa, synthetic construct
STYHNTS

SEQ ID NO: 148766 - protein, 7 aa, synthetic construct
STYHTPL

SEQ ID NO: 148767 - protein, 7 aa, synthetic construct
STYKASQ

SEQ ID NO: 148768 - protein, 7 aa, synthetic construct
STYKAST

SEQ ID NO: 148769 - protein, 7 aa, synthetic construct
STYKLPQ

SEQ ID NO: 148770 - protein, 7 aa, synthetic construct
STYNLDR

SEQ ID NO: 148771 - protein, 7 aa, synthetic construct
STYPTMA

SEQ ID NO: 148772 - protein, 7 aa, synthetic construct
STYQANR

SEQ ID NO: 148773 - protein, 7 aa, synthetic construct
STYTKSN

SEQ ID NO: 148774 - protein, 7 aa, synthetic construct
SVAHPTR

SEQ ID NO: 148775 - protein, 7 aa, synthetic construct
SVAHRSN

SEQ ID NO: 148776 - protein, 7 aa, synthetic construct
SVAKKYD

SEQ ID NO: 148777 - protein, 7 aa, synthetic construct
SVAKYNV

SEQ ID NO: 148778 - protein, 7 aa, synthetic construct
SVAQHYK

SEQ ID NO: 148779 - protein, 7 aa, synthetic construct
SVARSVH

SEQ ID NO: 148780 - protein, 7 aa, synthetic construct
SVAYKPT

SEQ ID NO: 148781 - protein, 7 aa, synthetic construct
SVDRMQR

SEQ ID NO: 148782 - protein, 7 aa, synthetic construct
SVEQIKK

SEQ ID NO: 148783 - protein, 7 aa, synthetic construct
SVERRPL

SEQ ID NO: 148784 - protein, 7 aa, synthetic construct
SVFTSKA

SEQ ID NO: 148785 - protein, 7 aa, synthetic construct
SVGARIQ

SEQ ID NO: 148786 - protein, 7 aa, synthetic construct
SVGGHSK

SEQ ID NO: 148787 - protein, 7 aa, synthetic construct
SVGGHTK

SEQ ID NO: 148788 - protein, 7 aa, synthetic construct
SVGHLSR

SEQ ID NO: 148789 - protein, 7 aa, synthetic construct
SVGHNRG

SEQ ID NO: 148790 - protein, 7 aa, synthetic construct
SVGLKSF

SEQ ID NO: 148791 - protein, 7 aa, synthetic construct
SVGMHAK

SEQ ID NO: 148792 - protein, 7 aa, synthetic construct
SVGMSAR

SEQ ID NO: 148793 - protein, 7 aa, synthetic construct
SVGNHKM

SEQ ID NO: 148794 - protein, 7 aa, synthetic construct
SVGNQSR

SEQ ID NO: 148795 - protein, 7 aa, synthetic construct
SVGNYKG

SEQ ID NO: 148796 - protein, 7 aa, synthetic construct
SVGNYTR

SEQ ID NO: 148797 - protein, 7 aa, synthetic construct
SVGPQLR

SEQ ID NO: 148798 - protein, 7 aa, synthetic construct
SVGRPVI

SEQ ID NO: 148799 - protein, 7 aa, synthetic construct
SVGTARG

SEQ ID NO: 148800 - protein, 7 aa, synthetic construct
SVHARTM

SEQ ID NO: 148801 - protein, 7 aa, synthetic construct
SVHGLSR

SEQ ID NO: 148802 - protein, 7 aa, synthetic construct
SVHGMQR

SEQ ID NO: 148803 - protein, 7 aa, synthetic construct
SVHKPKD

SEQ ID NO: 148804 - protein, 7 aa, synthetic construct
SVHKYGG

SEQ ID NO: 148805 - protein, 7 aa, synthetic construct
SVHKYSV

SEQ ID NO: 148806 - protein, 7 aa, synthetic construct
SVHMKLS

SEQ ID NO: 148807 - protein, 7 aa, synthetic construct
SVHQSQK

SEQ ID NO: 148808 - protein, 7 aa, synthetic construct
SVHRNSF

SEQ ID NO: 148809 - protein, 7 aa, synthetic construct
SVHRPTS

SEQ ID NO: 148810 - protein, 7 aa, synthetic construct
SVHRTAG

SEQ ID NO: 148811 - protein, 7 aa, synthetic construct
SVITRHA

SEQ ID NO: 148812 - protein, 7 aa, synthetic construct
SVITRQH

SEQ ID NO: 148813 - protein, 7 aa, synthetic construct
SVKANTW

SEQ ID NO: 148814 - protein, 7 aa, synthetic construct
SVKDFNR

SEQ ID NO: 148815 - protein, 7 aa, synthetic construct
SVKFKSD

SEQ ID NO: 148816 - protein, 7 aa, synthetic construct
SVKMQHI

SEQ ID NO: 148817 - protein, 7 aa, synthetic construct
SVKRFDP

SEQ ID NO: 148818 - protein, 7 aa, synthetic construct
SVKSGYI

SEQ ID NO: 148819 - protein, 7 aa, synthetic construct
SVKVPMP

SEQ ID NO: 148820 - protein, 7 aa, synthetic construct
SVKYEGK

SEQ ID NO: 148821 - protein, 7 aa, synthetic construct
SVKYQTM

SEQ ID NO: 148822 - protein, 7 aa, synthetic construct
SVLERNR

SEQ ID NO: 148823 - protein, 7 aa, synthetic construct
SVMARQM

SEQ ID NO: 148824 - protein, 7 aa, synthetic construct
SVMHKTI

SEQ ID NO: 148825 - protein, 7 aa, synthetic construct
SVMHSTK

SEQ ID NO: 148826 - protein, 7 aa, synthetic construct
SVMQRQM

SEQ ID NO: 148827 - protein, 7 aa, synthetic construct
SVMQTRA

SEQ ID NO: 148828 - protein, 7 aa, synthetic construct
SVMSHQR

SEQ ID NO: 148829 - protein, 7 aa, synthetic construct
SVNHQAK

SEQ ID NO: 148830 - protein, 7 aa, synthetic construct
SVNHSSK

SEQ ID NO: 148831 - protein, 7 aa, synthetic construct
SVNPHRM

SEQ ID NO: 148832 - protein, 7 aa, synthetic construct
SVNRLGM

SEQ ID NO: 148833 - protein, 7 aa, synthetic construct
SVNYGGN

SEQ ID NO: 148834 - protein, 7 aa, synthetic construct
SVNYTKS

SEQ ID NO: 148835 - protein, 7 aa, synthetic construct
SVPGKIY

SEQ ID NO: 148836 - protein, 7 aa, synthetic construct
SVPGSRN

SEQ ID NO: 148837 - protein, 7 aa, synthetic construct
SVPHISR

SEQ ID NO: 148838 - protein, 7 aa, synthetic construct
SVPKGVY

SEQ ID NO: 148839 - protein, 7 aa, synthetic construct
SVPKPGY

SEQ ID NO: 148840 - protein, 7 aa, synthetic construct
SVPMPRS

SEQ ID NO: 148841 - protein, 7 aa, synthetic construct
SVPQSHK

SEQ ID NO: 148842 - protein, 7 aa, synthetic construct
SVPRPPT

SEQ ID NO: 148843 - protein, 7 aa, synthetic construct
SVPRRDN

SEQ ID NO: 148844 - protein, 7 aa, synthetic construct
SVPRSAI

SEQ ID NO: 148845 - protein, 7 aa, synthetic construct
SVPSQQR

SEQ ID NO: 148846 - protein, 7 aa, synthetic construct
SVPVTQR

SEQ ID NO: 148847 - protein, 7 aa, synthetic construct
SVQGRFS

SEQ ID NO: 148848 - protein, 7 aa, synthetic construct
SVQGYGK

SEQ ID NO: 148849 - protein, 7 aa, synthetic construct
SVQHKHP

SEQ ID NO: 148850 - protein, 7 aa, synthetic construct
SVQHTKF

SEQ ID NO: 148851 - protein, 7 aa, synthetic construct
SVQIRHG

SEQ ID NO: 148852 - protein, 7 aa, synthetic construct
SVQKSEK

SEQ ID NO: 148853 - protein, 7 aa, synthetic construct
SVQNSSR

SEQ ID NO: 148854 - protein, 7 aa, synthetic construct
SVRAGER

SEQ ID NO: 148855 - protein, 7 aa, synthetic construct
SVRDPRM

SEQ ID NO: 148856 - protein, 7 aa, synthetic construct
SVRDQAR

SEQ ID NO: 148857 - protein, 7 aa, synthetic construct
SVRESNR

SEQ ID NO: 148858 - protein, 7 aa, synthetic construct
SVRETQK

SEQ ID NO: 148859 - protein, 7 aa, synthetic construct
SVRGGFS

SEQ ID NO: 148860 - protein, 7 aa, synthetic construct
SVRGIHP

SEQ ID NO: 148861 - protein, 7 aa, synthetic construct
SVRGTAY

SEQ ID NO: 148862 - protein, 7 aa, synthetic construct
SVRIKNE

SEQ ID NO: 148863 - protein, 7 aa, synthetic construct
SVRIQEK

SEQ ID NO: 148864 - protein, 7 aa, synthetic construct
SVRKDTT

SEQ ID NO: 148865 - protein, 7 aa, synthetic construct
SVRPGYT

SEQ ID NO: 148866 - protein, 7 aa, synthetic construct
SVRPLPM

SEQ ID NO: 148867 - protein, 7 aa, synthetic construct
SVRPVRE

SEQ ID NO: 148868 - protein, 7 aa, synthetic construct
SVRQLPM

SEQ ID NO: 148869 - protein, 7 aa, synthetic construct
SVSHGVK

SEQ ID NO: 148870 - protein, 7 aa, synthetic construct
SVSNHQR

SEQ ID NO: 148871 - protein, 7 aa, synthetic construct
SVSRHAI

SEQ ID NO: 148872 - protein, 7 aa, synthetic construct
SVSVKLQ

SEQ ID NO: 148873 - protein, 7 aa, synthetic construct
SVSYDRL

SEQ ID NO: 148874 - protein, 7 aa, synthetic construct
SVSYNSH

SEQ ID NO: 148875 - protein, 7 aa, synthetic construct
SVTDRSK

SEQ ID NO: 148876 - protein, 7 aa, synthetic construct
SVTHKYS

SEQ ID NO: 148877 - protein, 7 aa, synthetic construct
SVTHNTR

SEQ ID NO: 148878 - protein, 7 aa, synthetic construct
SVTHQSK

SEQ ID NO: 148879 - protein, 7 aa, synthetic construct
SVTQPRH

SEQ ID NO: 148880 - protein, 7 aa, synthetic construct
SVYKSNL

SEQ ID NO: 148881 - protein, 7 aa, synthetic construct
SVYTQKN

SEQ ID NO: 148882 - protein, 7 aa, synthetic construct
SWGSNHS

SEQ ID NO: 148883 - protein, 7 aa, synthetic construct
SWGVEGI

SEQ ID NO: 148884 - protein, 7 aa, synthetic construct
SWKGDNK

SEQ ID NO: 148885 - protein, 7 aa, synthetic construct
SWKQAGA

SEQ ID NO: 148886 - protein, 7 aa, synthetic construct
SWKVKGE

SEQ ID NO: 148887 - protein, 7 aa, synthetic construct
SWRDKTS

SEQ ID NO: 148888 - protein, 7 aa, synthetic construct
SWSGQSK

SEQ ID NO: 148889 - protein, 7 aa, synthetic construct
SYAGNTK

SEQ ID NO: 148890 - protein, 7 aa, synthetic construct
SYANISK

SEQ ID NO: 148891 - protein, 7 aa, synthetic construct
SYASMKG

SEQ ID NO: 148892 - protein, 7 aa, synthetic construct
SYATYKA

SEQ ID NO: 148893 - protein, 7 aa, synthetic construct
SYDKFPK

SEQ ID NO: 148894 - protein, 7 aa, synthetic construct
SYDRGKA

SEQ ID NO: 148895 - protein, 7 aa, synthetic construct
SYDRIKG

SEQ ID NO: 148896 - protein, 7 aa, synthetic construct
SYDVKRM

SEQ ID NO: 148897 - protein, 7 aa, synthetic construct
SYEPKAR

SEQ ID NO: 148898 - protein, 7 aa, synthetic construct
SYETPKK

SEQ ID NO: 148899 - protein, 7 aa, synthetic construct
SYGAHSK

SEQ ID NO: 148900 - protein, 7 aa, synthetic construct
SYGGAGK

SEQ ID NO: 148901 - protein, 7 aa, synthetic construct
SYGGHKV

SEQ ID NO: 148902 - protein, 7 aa, synthetic construct
SYGGQVK

SEQ ID NO: 148903 - protein, 7 aa, synthetic construct
SYGHVKS

SEQ ID NO: 148904 - protein, 7 aa, synthetic construct
SYGIDYK

SEQ ID NO: 148905 - protein, 7 aa, synthetic construct
SYGMQGK

SEQ ID NO: 148906 - protein, 7 aa, synthetic construct
SYGNRTT

SEQ ID NO: 148907 - protein, 7 aa, synthetic construct
SYGPQSK

SEQ ID NO: 148908 - protein, 7 aa, synthetic construct
SYGRAVH

SEQ ID NO: 148909 - protein, 7 aa, synthetic construct
SYHETGR

SEQ ID NO: 148910 - protein, 7 aa, synthetic construct
SYHISQT

SEQ ID NO: 148911 - protein, 7 aa, synthetic construct
SYHKSVV

SEQ ID NO: 148912 - protein, 7 aa, synthetic construct
SYHNKAQ

SEQ ID NO: 148913 - protein, 7 aa, synthetic construct
SYHVATK

SEQ ID NO: 148914 - protein, 7 aa, synthetic construct
SYIKMKE

SEQ ID NO: 148915 - protein, 7 aa, synthetic construct
SYIQKKE

SEQ ID NO: 148916 - protein, 7 aa, synthetic construct
SYKAERA

SEQ ID NO: 148917 - protein, 7 aa, synthetic construct
SYKDFPK

SEQ ID NO: 148918 - protein, 7 aa, synthetic construct
SYKGAGV

SEQ ID NO: 148919 - protein, 7 aa, synthetic construct
SYKGEYM

SEQ ID NO: 148920 - protein, 7 aa, synthetic construct
SYKGHAQ

SEQ ID NO: 148921 - protein, 7 aa, synthetic construct
SYKGQLG

SEQ ID NO: 148922 - protein, 7 aa, synthetic construct
SYKGQMG

SEQ ID NO: 148923 - protein, 7 aa, synthetic construct
SYKGQNM

SEQ ID NO: 148924 - protein, 7 aa, synthetic construct
SYKHAPA

SEQ ID NO: 148925 - protein, 7 aa, synthetic construct
SYKIKEM

SEQ ID NO: 148926 - protein, 7 aa, synthetic construct
SYKKEPF

SEQ ID NO: 148927 - protein, 7 aa, synthetic construct
SYKLSGV

SEQ ID NO: 148928 - protein, 7 aa, synthetic construct
SYKLTRD

SEQ ID NO: 148929 - protein, 7 aa, synthetic construct
SYKMTDR

SEQ ID NO: 148930 - protein, 7 aa, synthetic construct
SYKNNPG

SEQ ID NO: 148931 - protein, 7 aa, synthetic construct
SYKNQAV

SEQ ID NO: 148932 - protein, 7 aa, synthetic construct
SYKNQKE

SEQ ID NO: 148933 - protein, 7 aa, synthetic construct
SYKPHVA

SEQ ID NO: 148934 - protein, 7 aa, synthetic construct
SYKPMQG

SEQ ID NO: 148935 - protein, 7 aa, synthetic construct
SYKPSMI

SEQ ID NO: 148936 - protein, 7 aa, synthetic construct
SYKPTTH

SEQ ID NO: 148937 - protein, 7 aa, synthetic construct
SYKQINQ

SEQ ID NO: 148938 - protein, 7 aa, synthetic construct
SYKQLHG

SEQ ID NO: 148939 - protein, 7 aa, synthetic construct
SYKQQTG

SEQ ID NO: 148940 - protein, 7 aa, synthetic construct
SYKREIA

SEQ ID NO: 148941 - protein, 7 aa, synthetic construct
SYKSQGA

SEQ ID NO: 148942 - protein, 7 aa, synthetic construct
SYKSQPQ

SEQ ID NO: 148943 - protein, 7 aa, synthetic construct
SYKSVVG

SEQ ID NO: 148944 - protein, 7 aa, synthetic construct
SYKTTER

SEQ ID NO: 148945 - protein, 7 aa, synthetic construct
SYKVGHS

SEQ ID NO: 148946 - protein, 7 aa, synthetic construct
SYKVSNA

SEQ ID NO: 148947 - protein, 7 aa, synthetic construct
SYLGNNK

SEQ ID NO: 148948 - protein, 7 aa, synthetic construct
SYLKEKG

SEQ ID NO: 148949 - protein, 7 aa, synthetic construct
SYMKAKE

SEQ ID NO: 148950 - protein, 7 aa, synthetic construct
SYMKESK

SEQ ID NO: 148951 - protein, 7 aa, synthetic construct
SYMKNVP

SEQ ID NO: 148952 - protein, 7 aa, synthetic construct
SYNAVNR

SEQ ID NO: 148953 - protein, 7 aa, synthetic construct
SYNDVRR

SEQ ID NO: 148954 - protein, 7 aa, synthetic construct
SYNMNNK

SEQ ID NO: 148955 - protein, 7 aa, synthetic construct
SYNQKAI

SEQ ID NO: 148956 - protein, 7 aa, synthetic construct
SYNQMSK

SEQ ID NO: 148957 - protein, 7 aa, synthetic construct
SYNQSPK

SEQ ID NO: 148958 - protein, 7 aa, synthetic construct
SYNSSKI

SEQ ID NO: 148959 - protein, 7 aa, synthetic construct
SYNSTYM

SEQ ID NO: 148960 - protein, 7 aa, synthetic construct
SYPGARA

SEQ ID NO: 148961 - protein, 7 aa, synthetic construct
SYPQGSK

SEQ ID NO: 148962 - protein, 7 aa, synthetic construct
SYQAGRI

SEQ ID NO: 148963 - protein, 7 aa, synthetic construct
SYQAIGK

SEQ ID NO: 148964 - protein, 7 aa, synthetic construct
SYQAMKV

SEQ ID NO: 148965 - protein, 7 aa, synthetic construct
SYQGKDK

SEQ ID NO: 148966 - protein, 7 aa, synthetic construct
SYQHKSA

SEQ ID NO: 148967 - protein, 7 aa, synthetic construct
SYQKEKM

SEQ ID NO: 148968 - protein, 7 aa, synthetic construct
SYQNGNR

SEQ ID NO: 148969 - protein, 7 aa, synthetic construct
SYQTAQK

SEQ ID NO: 148970 - protein, 7 aa, synthetic construct
SYQVATK

SEQ ID NO: 148971 - protein, 7 aa, synthetic construct
SYQVTKL

SEQ ID NO: 148972 - protein, 7 aa, synthetic construct
SYRATTL

SEQ ID NO: 148973 - protein, 7 aa, synthetic construct
SYRGTST

SEQ ID NO: 148974 - protein, 7 aa, synthetic construct
SYRQQNN

SEQ ID NO: 148975 - protein, 7 aa, synthetic construct
SYSGGTK

SEQ ID NO: 148976 - protein, 7 aa, synthetic construct
SYSGPKV

SEQ ID NO: 148977 - protein, 7 aa, synthetic construct
SYSKGKD

SEQ ID NO: 148978 - protein, 7 aa, synthetic construct
SYSQGMK

SEQ ID NO: 148979 - protein, 7 aa, synthetic construct
SYSQKMI

SEQ ID NO: 148980 - protein, 7 aa, synthetic construct
SYTKPNT

SEQ ID NO: 148981 - protein, 7 aa, synthetic construct
SYVKKFE

SEQ ID NO: 148982 - protein, 7 aa, synthetic construct
SYVKRGE

SEQ ID NO: 148983 - protein, 7 aa, synthetic construct
SYVKTST

SEQ ID NO: 148984 - protein, 7 aa, synthetic construct
SYVPKVA

SEQ ID NO: 148985 - protein, 7 aa, synthetic construct
SYVQANR

SEQ ID NO: 148986 - protein, 7 aa, synthetic construct
SYVQSAK

SEQ ID NO: 148987 - protein, 7 aa, synthetic construct
TAAGRPF

SEQ ID NO: 148988 - protein, 7 aa, synthetic construct
TAAMRHM

SEQ ID NO: 148989 - protein, 7 aa, synthetic construct
TAANAHR

SEQ ID NO: 148990 - protein, 7 aa, synthetic construct
TAANERR

SEQ ID NO: 148991 - protein, 7 aa, synthetic construct
TAANKFL

SEQ ID NO: 148992 - protein, 7 aa, synthetic construct
TAAQSHK

SEQ ID NO: 148993 - protein, 7 aa, synthetic construct
TAARHPI

SEQ ID NO: 148994 - protein, 7 aa, synthetic construct
TAARMGL

SEQ ID NO: 148995 - protein, 7 aa, synthetic construct
TAASKHY

SEQ ID NO: 148996 - protein, 7 aa, synthetic construct
TAATHSR

SEQ ID NO: 148997 - protein, 7 aa, synthetic construct
TAATSRF

SEQ ID NO: 148998 - protein, 7 aa, synthetic construct
TAAVKIT

SEQ ID NO: 148999 - protein, 7 aa, synthetic construct
TADGKIR

SEQ ID NO: 149000 - protein, 7 aa, synthetic construct
TADKHPR

SEQ ID NO: 149001 - protein, 7 aa, synthetic construct
TADKTRY

SEQ ID NO: 149002 - protein, 7 aa, synthetic construct
TADRTSR

SEQ ID NO: 149003 - protein, 7 aa, synthetic construct
TADYKAK

SEQ ID NO: 149004 - protein, 7 aa, synthetic construct
TAERQRI

SEQ ID NO: 149005 - protein, 7 aa, synthetic construct
TAFAHKN

SEQ ID NO: 149006 - protein, 7 aa, synthetic construct
TAFHKGM

SEQ ID NO: 149007 - protein, 7 aa, synthetic construct
TAFKNNI

SEQ ID NO: 149008 - protein, 7 aa, synthetic construct
TAFNSKQ

SEQ ID NO: 149009 - protein, 7 aa, synthetic construct
TAFQTKN

SEQ ID NO: 149010 - protein, 7 aa, synthetic construct
TAFRGGP

SEQ ID NO: 149011 - protein, 7 aa, synthetic construct
TAGARPY

SEQ ID NO: 149012 - protein, 7 aa, synthetic construct
TAGDTRK

SEQ ID NO: 149013 - protein, 7 aa, synthetic construct
TAGGEWS

SEQ ID NO: 149014 - protein, 7 aa, synthetic construct
TAGGPKW

SEQ ID NO: 149015 - protein, 7 aa, synthetic construct
TAGHIMK

SEQ ID NO: 149016 - protein, 7 aa, synthetic construct
TAGHKFN

SEQ ID NO: 149017 - protein, 7 aa, synthetic construct
TAGKHYP

SEQ ID NO: 149018 - protein, 7 aa, synthetic construct
TAGRLER

SEQ ID NO: 149019 - protein, 7 aa, synthetic construct
TAGRQER

SEQ ID NO: 149020 - protein, 7 aa, synthetic construct
TAGRQHA

SEQ ID NO: 149021 - protein, 7 aa, synthetic construct
TAGRQWE

SEQ ID NO: 149022 - protein, 7 aa, synthetic construct
TAGRSSS

SEQ ID NO: 149023 - protein, 7 aa, synthetic construct
TAGRTNL

SEQ ID NO: 149024 - protein, 7 aa, synthetic construct
TAGTPGR

SEQ ID NO: 149025 - protein, 7 aa, synthetic construct
TAHANYK

SEQ ID NO: 149026 - protein, 7 aa, synthetic construct
TAHGRAG

SEQ ID NO: 149027 - protein, 7 aa, synthetic construct
TAHISMR

SEQ ID NO: 149028 - protein, 7 aa, synthetic construct
TAHKAFI

SEQ ID NO: 149029 - protein, 7 aa, synthetic construct
TAHKIIT

SEQ ID NO: 149030 - protein, 7 aa, synthetic construct
TAHKIYA

SEQ ID NO: 149031 - protein, 7 aa, synthetic construct
TAHKVSF

SEQ ID NO: 149032 - protein, 7 aa, synthetic construct
TAHMPQR

SEQ ID NO: 149033 - protein, 7 aa, synthetic construct
TAHMPSK

SEQ ID NO: 149034 - protein, 7 aa, synthetic construct
TAHNRNT

SEQ ID NO: 149035 - protein, 7 aa, synthetic construct
TAHNVLR

SEQ ID NO: 149036 - protein, 7 aa, synthetic construct
TAHPTAR

SEQ ID NO: 149037 - protein, 7 aa, synthetic construct
TAHRPAS

SEQ ID NO: 149038 - protein, 7 aa, synthetic construct
TAHRSLG

SEQ ID NO: 149039 - protein, 7 aa, synthetic construct
TAHSNKN

SEQ ID NO: 149040 - protein, 7 aa, synthetic construct
TAHSPKF

SEQ ID NO: 149041 - protein, 7 aa, synthetic construct
TAHVARN

SEQ ID NO: 149042 - protein, 7 aa, synthetic construct
TAHVKVN

SEQ ID NO: 149043 - protein, 7 aa, synthetic construct
TAHVRMG

SEQ ID NO: 149044 - protein, 7 aa, synthetic construct
TAHVYQK

SEQ ID NO: 149045 - protein, 7 aa, synthetic construct
TAHYGQQ

SEQ ID NO: 149046 - protein, 7 aa, synthetic construct
TAIHGSK

SEQ ID NO: 149047 - protein, 7 aa, synthetic construct
TAIKRAD

SEQ ID NO: 149048 - protein, 7 aa, synthetic construct
TAKAYSS

SEQ ID NO: 149049 - protein, 7 aa, synthetic construct
TAKESWK

SEQ ID NO: 149050 - protein, 7 aa, synthetic construct
TAKGDNR

SEQ ID NO: 149051 - protein, 7 aa, synthetic construct
TAKGNYI

SEQ ID NO: 149052 - protein, 7 aa, synthetic construct
TAKISDW

SEQ ID NO: 149053 - protein, 7 aa, synthetic construct
TAKKPQD

SEQ ID NO: 149054 - protein, 7 aa, synthetic construct
TAKLTHY

SEQ ID NO: 149055 - protein, 7 aa, synthetic construct
TAKMHSF

SEQ ID NO: 149056 - protein, 7 aa, synthetic construct
TAKMNYP

SEQ ID NO: 149057 - protein, 7 aa, synthetic construct
TAKMPHI

SEQ ID NO: 149058 - protein, 7 aa, synthetic construct
TAKNFVT

SEQ ID NO: 149059 - protein, 7 aa, synthetic construct
TAKPTQW

SEQ ID NO: 149060 - protein, 7 aa, synthetic construct
TAKRIET

SEQ ID NO: 149061 - protein, 7 aa, synthetic construct
TAKRIYE

SEQ ID NO: 149062 - protein, 7 aa, synthetic construct
TAKSDSR

SEQ ID NO: 149063 - protein, 7 aa, synthetic construct
TAKSFAM

SEQ ID NO: 149064 - protein, 7 aa, synthetic construct
TAKSYSQ

SEQ ID NO: 149065 - protein, 7 aa, synthetic construct
TAKTSFH

SEQ ID NO: 149066 - protein, 7 aa, synthetic construct
TAKVSVF

SEQ ID NO: 149067 - protein, 7 aa, synthetic construct
TAKYAMT

SEQ ID NO: 149068 - protein, 7 aa, synthetic construct
TAKYEGK

SEQ ID NO: 149069 - protein, 7 aa, synthetic construct
TAKYERM

SEQ ID NO: 149070 - protein, 7 aa, synthetic construct
TAKYMNN

SEQ ID NO: 149071 - protein, 7 aa, synthetic construct
TAKYQHN

SEQ ID NO: 149072 - protein, 7 aa, synthetic construct
TAKYQVA

SEQ ID NO: 149073 - protein, 7 aa, synthetic construct
TALKRGE

SEQ ID NO: 149074 - protein, 7 aa, synthetic construct
TALTSRY

SEQ ID NO: 149075 - protein, 7 aa, synthetic construct
TAMGPMR

SEQ ID NO: 149076 - protein, 7 aa, synthetic construct
TAMHHKG

SEQ ID NO: 149077 - protein, 7 aa, synthetic construct
TAMNRAL

SEQ ID NO: 149078 - protein, 7 aa, synthetic construct
TAMQRTM

SEQ ID NO: 149079 - protein, 7 aa, synthetic construct
TAMQYSK

SEQ ID NO: 149080 - protein, 7 aa, synthetic construct
TAMRKDI

SEQ ID NO: 149081 - protein, 7 aa, synthetic construct
TAMRTRE

SEQ ID NO: 149082 - protein, 7 aa, synthetic construct
TAMSMRT

SEQ ID NO: 149083 - protein, 7 aa, synthetic construct
TAMTRVH

SEQ ID NO: 149084 - protein, 7 aa, synthetic construct
TANARIY

SEQ ID NO: 149085 - protein, 7 aa, synthetic construct
TANASRY

SEQ ID NO: 149086 - protein, 7 aa, synthetic construct
TANDRRV

SEQ ID NO: 149087 - protein, 7 aa, synthetic construct
TANFQRM

SEQ ID NO: 149088 - protein, 7 aa, synthetic construct
TANGRFL

SEQ ID NO: 149089 - protein, 7 aa, synthetic construct
TANNARF

SEQ ID NO: 149090 - protein, 7 aa, synthetic construct
TANRDKM

SEQ ID NO: 149091 - protein, 7 aa, synthetic construct
TANRIKD

SEQ ID NO: 149092 - protein, 7 aa, synthetic construct
TAPKNTW

SEQ ID NO: 149093 - protein, 7 aa, synthetic construct
TAPKTGW

SEQ ID NO: 149094 - protein, 7 aa, synthetic construct
TAPNYGM

SEQ ID NO: 149095 - protein, 7 aa, synthetic construct
TAPVRYG

SEQ ID NO: 149096 - protein, 7 aa, synthetic construct
TAPYSKN

SEQ ID NO: 149097 - protein, 7 aa, synthetic construct
TAPYVKH

SEQ ID NO: 149098 - protein, 7 aa, synthetic construct
TAQAHAR

SEQ ID NO: 149099 - protein, 7 aa, synthetic construct
TAQFNKH

SEQ ID NO: 149100 - protein, 7 aa, synthetic construct
TAQGAGR

SEQ ID NO: 149101 - protein, 7 aa, synthetic construct
TAQHVIR

SEQ ID NO: 149102 - protein, 7 aa, synthetic construct
TAQIGHR

SEQ ID NO: 149103 - protein, 7 aa, synthetic construct
TAQKHFL

SEQ ID NO: 149104 - protein, 7 aa, synthetic construct
TAQMAGR

SEQ ID NO: 149105 - protein, 7 aa, synthetic construct
TAQNNFR

SEQ ID NO: 149106 - protein, 7 aa, synthetic construct
TAQNNLR

SEQ ID NO: 149107 - protein, 7 aa, synthetic construct
TAQSVRY

SEQ ID NO: 149108 - protein, 7 aa, synthetic construct
TAQTHIR

SEQ ID NO: 149109 - protein, 7 aa, synthetic construct
TAQTRQM

SEQ ID NO: 149110 - protein, 7 aa, synthetic construct
TAQYASR

SEQ ID NO: 149111 - protein, 7 aa, synthetic construct
TAQYMKA

SEQ ID NO: 149112 - protein, 7 aa, synthetic construct
TARAENK

SEQ ID NO: 149113 - protein, 7 aa, synthetic construct
TARDIMR

SEQ ID NO: 149114 - protein, 7 aa, synthetic construct
TAREASK

SEQ ID NO: 149115 - protein, 7 aa, synthetic construct
TARERNY

SEQ ID NO: 149116 - protein, 7 aa, synthetic construct
TARHIVA

SEQ ID NO: 149117 - protein, 7 aa, synthetic construct
TARHQNI

SEQ ID NO: 149118 - protein, 7 aa, synthetic construct
TARHVGV

SEQ ID NO: 149119 - protein, 7 aa, synthetic construct
TARIKSE

SEQ ID NO: 149120 - protein, 7 aa, synthetic construct
TARITRD

SEQ ID NO: 149121 - protein, 7 aa, synthetic construct
TARKLDV

SEQ ID NO: 149122 - protein, 7 aa, synthetic construct
TARKVEF

SEQ ID NO: 149123 - protein, 7 aa, synthetic construct
TARLERT

SEQ ID NO: 149124 - protein, 7 aa, synthetic construct
TARMVDR

SEQ ID NO: 149125 - protein, 7 aa, synthetic construct
TARNDDA

SEQ ID NO: 149126 - protein, 7 aa, synthetic construct
TARPHNI

SEQ ID NO: 149127 - protein, 7 aa, synthetic construct
TARPIRD

SEQ ID NO: 149128 - protein, 7 aa, synthetic construct
TARPLQH

SEQ ID NO: 149129 - protein, 7 aa, synthetic construct
TARQNPT

SEQ ID NO: 149130 - protein, 7 aa, synthetic construct
TARSQQP

SEQ ID NO: 149131 - protein, 7 aa, synthetic construct
TARVPPT

SEQ ID NO: 149132 - protein, 7 aa, synthetic construct
TARWHTE

SEQ ID NO: 149133 - protein, 7 aa, synthetic construct
TASENKR

SEQ ID NO: 149134 - protein, 7 aa, synthetic construct
TASGFRM

SEQ ID NO: 149135 - protein, 7 aa, synthetic construct
TASHVAR

SEQ ID NO: 149136 - protein, 7 aa, synthetic construct
TASHYPK

SEQ ID NO: 149137 - protein, 7 aa, synthetic construct
TASIAIK

SEQ ID NO: 149138 - protein, 7 aa, synthetic construct
TASKGYG

SEQ ID NO: 149139 - protein, 7 aa, synthetic construct
TASKRDY

SEQ ID NO: 149140 - protein, 7 aa, synthetic construct
TASKSVW

SEQ ID NO: 149141 - protein, 7 aa, synthetic construct
TASLHGR

SEQ ID NO: 149142 - protein, 7 aa, synthetic construct
TASMRER

SEQ ID NO: 149143 - protein, 7 aa, synthetic construct
TASNKTW

SEQ ID NO: 149144 - protein, 7 aa, synthetic construct
TASQNRY

SEQ ID NO: 149145 - protein, 7 aa, synthetic construct
TASRGFP

SEQ ID NO: 149146 - protein, 7 aa, synthetic construct
TASYIKT

SEQ ID NO: 149147 - protein, 7 aa, synthetic construct
TASYKIQ

SEQ ID NO: 149148 - protein, 7 aa, synthetic construct
TATGPGR

SEQ ID NO: 149149 - protein, 7 aa, synthetic construct
TATIRHN

SEQ ID NO: 149150 - protein, 7 aa, synthetic construct
TATKYGM

SEQ ID NO: 149151 - protein, 7 aa, synthetic construct
TATPGRY

SEQ ID NO: 149152 - protein, 7 aa, synthetic construct
TATPVFG

SEQ ID NO: 149153 - protein, 7 aa, synthetic construct
TATRRGE

SEQ ID NO: 149154 - protein, 7 aa, synthetic construct
TATYNHK

SEQ ID NO: 149155 - protein, 7 aa, synthetic construct
TAVAKYM

SEQ ID NO: 149156 - protein, 7 aa, synthetic construct
TAVKDRY

SEQ ID NO: 149157 - protein, 7 aa, synthetic construct
TAVKYAQ

SEQ ID NO: 149158 - protein, 7 aa, synthetic construct
TAVKYGG

SEQ ID NO: 149159 - protein, 7 aa, synthetic construct
TAVRHQQ

SEQ ID NO: 149160 - protein, 7 aa, synthetic construct
TAVRLPT

SEQ ID NO: 149161 - protein, 7 aa, synthetic construct
TAVTHRG

SEQ ID NO: 149162 - protein, 7 aa, synthetic construct
TAYANLK

SEQ ID NO: 149163 - protein, 7 aa, synthetic construct
TAYANRV

SEQ ID NO: 149164 - protein, 7 aa, synthetic construct
TAYDNKK

SEQ ID NO: 149165 - protein, 7 aa, synthetic construct
TAYGGST

SEQ ID NO: 149166 - protein, 7 aa, synthetic construct
TAYGPAR

SEQ ID NO: 149167 - protein, 7 aa, synthetic construct
TAYHSGT

SEQ ID NO: 149168 - protein, 7 aa, synthetic construct
TAYKNSN

SEQ ID NO: 149169 - protein, 7 aa, synthetic construct
TAYMQER

SEQ ID NO: 149170 - protein, 7 aa, synthetic construct
TAYQIKP

SEQ ID NO: 149171 - protein, 7 aa, synthetic construct
TAYQQAF

SEQ ID NO: 149172 - protein, 7 aa, synthetic construct
TAYQQGK

SEQ ID NO: 149173 - protein, 7 aa, synthetic construct
TAYSNKA

SEQ ID NO: 149174 - protein, 7 aa, synthetic construct
TAYSQPL

SEQ ID NO: 149175 - protein, 7 aa, synthetic construct
TAYTTGY

SEQ ID NO: 149176 - protein, 7 aa, synthetic construct
TAYVQSK

SEQ ID NO: 149177 - protein, 7 aa, synthetic construct
TAYVRDK

SEQ ID NO: 149178 - protein, 7 aa, synthetic construct
TDAKQMR

SEQ ID NO: 149179 - protein, 7 aa, synthetic construct
TDAKSYK

SEQ ID NO: 149180 - protein, 7 aa, synthetic construct
TDALKRS

SEQ ID NO: 149181 - protein, 7 aa, synthetic construct
TDANLKK

SEQ ID NO: 149182 - protein, 7 aa, synthetic construct
TDARRQI

SEQ ID NO: 149183 - protein, 7 aa, synthetic construct
TDARVTK

SEQ ID NO: 149184 - protein, 7 aa, synthetic construct
TDASMRR

SEQ ID NO: 149185 - protein, 7 aa, synthetic construct
TDGKFLK

SEQ ID NO: 149186 - protein, 7 aa, synthetic construct
TDGRPPR

SEQ ID NO: 149187 - protein, 7 aa, synthetic construct
TDGWRAA

SEQ ID NO: 149188 - protein, 7 aa, synthetic construct
TDHGQYR

SEQ ID NO: 149189 - protein, 7 aa, synthetic construct
TDHKARI

SEQ ID NO: 149190 - protein, 7 aa, synthetic construct
TDHKRGL

SEQ ID NO: 149191 - protein, 7 aa, synthetic construct
TDHKSKF

SEQ ID NO: 149192 - protein, 7 aa, synthetic construct
TDIKGRT

SEQ ID NO: 149193 - protein, 7 aa, synthetic construct
TDIKKQW

SEQ ID NO: 149194 - protein, 7 aa, synthetic construct
TDIKRSF

SEQ ID NO: 149195 - protein, 7 aa, synthetic construct
TDIKRVL

SEQ ID NO: 149196 - protein, 7 aa, synthetic construct
TDIKVMR

SEQ ID NO: 149197 - protein, 7 aa, synthetic construct
TDKFTNK

SEQ ID NO: 149198 - protein, 7 aa, synthetic construct
TDKHRLT

SEQ ID NO: 149199 - protein, 7 aa, synthetic construct
TDKHRMN

SEQ ID NO: 149200 - protein, 7 aa, synthetic construct
TDKHRTF

SEQ ID NO: 149201 - protein, 7 aa, synthetic construct
TDKKFSH

SEQ ID NO: 149202 - protein, 7 aa, synthetic construct
TDKKNYM

SEQ ID NO: 149203 - protein, 7 aa, synthetic construct
TDKKSYH

SEQ ID NO: 149204 - protein, 7 aa, synthetic construct
TDKMHRT

SEQ ID NO: 149205 - protein, 7 aa, synthetic construct
TDKNMRY

SEQ ID NO: 149206 - protein, 7 aa, synthetic construct
TDKNYQK

SEQ ID NO: 149207 - protein, 7 aa, synthetic construct
TDKPARL

SEQ ID NO: 149208 - protein, 7 aa, synthetic construct
TDKRFNP

SEQ ID NO: 149209 - protein, 7 aa, synthetic construct
TDKRIML

SEQ ID NO: 149210 - protein, 7 aa, synthetic construct
TDKRRES

SEQ ID NO: 149211 - protein, 7 aa, synthetic construct
TDKRTMT

SEQ ID NO: 149212 - protein, 7 aa, synthetic construct
TDKRVFV

SEQ ID NO: 149213 - protein, 7 aa, synthetic construct
TDKSAQR

SEQ ID NO: 149214 - protein, 7 aa, synthetic construct
TDKTMKW

SEQ ID NO: 149215 - protein, 7 aa, synthetic construct
TDKTYNK

SEQ ID NO: 149216 - protein, 7 aa, synthetic construct
TDKVNYR

SEQ ID NO: 149217 - protein, 7 aa, synthetic construct
TDKVRFS

SEQ ID NO: 149218 - protein, 7 aa, synthetic construct
TDKWIKG

SEQ ID NO: 149219 - protein, 7 aa, synthetic construct
TDKYLRQ

SEQ ID NO: 149220 - protein, 7 aa, synthetic construct
TDKYQKF

SEQ ID NO: 149221 - protein, 7 aa, synthetic construct
TDLKHRT

SEQ ID NO: 149222 - protein, 7 aa, synthetic construct
TDLQKKY

SEQ ID NO: 149223 - protein, 7 aa, synthetic construct
TDLRPVK

SEQ ID NO: 149224 - protein, 7 aa, synthetic construct
TDLRVKY

SEQ ID NO: 149225 - protein, 7 aa, synthetic construct
TDLTKRV

SEQ ID NO: 149226 - protein, 7 aa, synthetic construct
TDMKRAL

SEQ ID NO: 149227 - protein, 7 aa, synthetic construct
TDMPRKI

SEQ ID NO: 149228 - protein, 7 aa, synthetic construct
TDNFKRS

SEQ ID NO: 149229 - protein, 7 aa, synthetic construct
TDNKFRG

SEQ ID NO: 149230 - protein, 7 aa, synthetic construct
TDNKRQV

SEQ ID NO: 149231 - protein, 7 aa, synthetic construct
TDNKSKW

SEQ ID NO: 149232 - protein, 7 aa, synthetic construct
TDNPKRV

SEQ ID NO: 149233 - protein, 7 aa, synthetic construct
TDNRTAK

SEQ ID NO: 149234 - protein, 7 aa, synthetic construct
TDPMRAR

SEQ ID NO: 149235 - protein, 7 aa, synthetic construct
TDPPKMR

SEQ ID NO: 149236 - protein, 7 aa, synthetic construct
TDPRPTK

SEQ ID NO: 149237 - protein, 7 aa, synthetic construct
TDPRRIQ

SEQ ID NO: 149238 - protein, 7 aa, synthetic construct
TDPVQKK

SEQ ID NO: 149239 - protein, 7 aa, synthetic construct
TDPYKRV

SEQ ID NO: 149240 - protein, 7 aa, synthetic construct
TDQFHRS

SEQ ID NO: 149241 - protein, 7 aa, synthetic construct
TDQKTRY

SEQ ID NO: 149242 - protein, 7 aa, synthetic construct
TDQRVLR

SEQ ID NO: 149243 - protein, 7 aa, synthetic construct
TDQTRMK

SEQ ID NO: 149244 - protein, 7 aa, synthetic construct
TDQTRQK

SEQ ID NO: 149245 - protein, 7 aa, synthetic construct
TDQTSKR

SEQ ID NO: 149246 - protein, 7 aa, synthetic construct
TDRAMKS

SEQ ID NO: 149247 - protein, 7 aa, synthetic construct
TDRAMRN

SEQ ID NO: 149248 - protein, 7 aa, synthetic construct
TDRAPKF

SEQ ID NO: 149249 - protein, 7 aa, synthetic construct
TDRAPNK

SEQ ID NO: 149250 - protein, 7 aa, synthetic construct
TDRARNI

SEQ ID NO: 149251 - protein, 7 aa, synthetic construct
TDRASRI

SEQ ID NO: 149252 - protein, 7 aa, synthetic construct
TDRGPIR

SEQ ID NO: 149253 - protein, 7 aa, synthetic construct
TDRGTRQ

SEQ ID NO: 149254 - protein, 7 aa, synthetic construct
TDRIPKL

SEQ ID NO: 149255 - protein, 7 aa, synthetic construct
TDRIRSL

SEQ ID NO: 149256 - protein, 7 aa, synthetic construct
TDRISKS

SEQ ID NO: 149257 - protein, 7 aa, synthetic construct
TDRKFSG

SEQ ID NO: 149258 - protein, 7 aa, synthetic construct
TDRKSLV

SEQ ID NO: 149259 - protein, 7 aa, synthetic construct
TDRLKSN

SEQ ID NO: 149260 - protein, 7 aa, synthetic construct
TDRLMRN

SEQ ID NO: 149261 - protein, 7 aa, synthetic construct
TDRMSKQ

SEQ ID NO: 149262 - protein, 7 aa, synthetic construct
TDRNKNS

SEQ ID NO: 149263 - protein, 7 aa, synthetic construct
TDRNQRL

SEQ ID NO: 149264 - protein, 7 aa, synthetic construct
TDRPHKA

SEQ ID NO: 149265 - protein, 7 aa, synthetic construct
TDRPPNR

SEQ ID NO: 149266 - protein, 7 aa, synthetic construct
TDRPYKA

SEQ ID NO: 149267 - protein, 7 aa, synthetic construct
TDRQKTF

SEQ ID NO: 149268 - protein, 7 aa, synthetic construct
TDRQLKV

SEQ ID NO: 149269 - protein, 7 aa, synthetic construct
TDRQQKM

SEQ ID NO: 149270 - protein, 7 aa, synthetic construct
TDRRGYS

SEQ ID NO: 149271 - protein, 7 aa, synthetic construct
TDRSKGN

SEQ ID NO: 149272 - protein, 7 aa, synthetic construct
TDRVGKW

SEQ ID NO: 149273 - protein, 7 aa, synthetic construct
TDRVRIQ

SEQ ID NO: 149274 - protein, 7 aa, synthetic construct
TDRVSKL

SEQ ID NO: 149275 - protein, 7 aa, synthetic construct
TDRWNRD

SEQ ID NO: 149276 - protein, 7 aa, synthetic construct
TDRYRTM

SEQ ID NO: 149277 - protein, 7 aa, synthetic construct
TDSKIRG

SEQ ID NO: 149278 - protein, 7 aa, synthetic construct
TDSKRGL

SEQ ID NO: 149279 - protein, 7 aa, synthetic construct
TDSLKRT

SEQ ID NO: 149280 - protein, 7 aa, synthetic construct
TDSNRKY

SEQ ID NO: 149281 - protein, 7 aa, synthetic construct
TDSRSNR

SEQ ID NO: 149282 - protein, 7 aa, synthetic construct
TDSTRKT

SEQ ID NO: 149283 - protein, 7 aa, synthetic construct
TDSVKKF

SEQ ID NO: 149284 - protein, 7 aa, synthetic construct
TDSVNKK

SEQ ID NO: 149285 - protein, 7 aa, synthetic construct
TDTKHRI

SEQ ID NO: 149286 - protein, 7 aa, synthetic construct
TDTRNNK

SEQ ID NO: 149287 - protein, 7 aa, synthetic construct
TDTRRVT

SEQ ID NO: 149288 - protein, 7 aa, synthetic construct
TDTVRTK

SEQ ID NO: 149289 - protein, 7 aa, synthetic construct
TDTYARM

SEQ ID NO: 149290 - protein, 7 aa, synthetic construct
TDTYHRS

SEQ ID NO: 149291 - protein, 7 aa, synthetic construct
TDVANRR

SEQ ID NO: 149292 - protein, 7 aa, synthetic construct
TDVKIRQ

SEQ ID NO: 149293 - protein, 7 aa, synthetic construct
TDVKMRH

SEQ ID NO: 149294 - protein, 7 aa, synthetic construct
TDVKRHF

SEQ ID NO: 149295 - protein, 7 aa, synthetic construct
TDVKRNV

SEQ ID NO: 149296 - protein, 7 aa, synthetic construct
TDVNMRK

SEQ ID NO: 149297 - protein, 7 aa, synthetic construct
TDVRRVQ

SEQ ID NO: 149298 - protein, 7 aa, synthetic construct
TDVRTRV

SEQ ID NO: 149299 - protein, 7 aa, synthetic construct
TDYKARA

SEQ ID NO: 149300 - protein, 7 aa, synthetic construct
TDYQRHY

SEQ ID NO: 149301 - protein, 7 aa, synthetic construct
TDYSHVR

SEQ ID NO: 149302 - protein, 7 aa, synthetic construct
TEARLGR

SEQ ID NO: 149303 - protein, 7 aa, synthetic construct
TEARVKV

SEQ ID NO: 149304 - protein, 7 aa, synthetic construct
TEATFMP

SEQ ID NO: 149305 - protein, 7 aa, synthetic construct
TEAVQKR

SEQ ID NO: 149306 - protein, 7 aa, synthetic construct
TEDKRRI

SEQ ID NO: 149307 - protein, 7 aa, synthetic construct
TEEKKQR

SEQ ID NO: 149308 - protein, 7 aa, synthetic construct
TEFKAGK

SEQ ID NO: 149309 - protein, 7 aa, synthetic construct
TEFKMRV

SEQ ID NO: 149310 - protein, 7 aa, synthetic construct
TEFKRSN

SEQ ID NO: 149311 - protein, 7 aa, synthetic construct
TEGKNRM

SEQ ID NO: 149312 - protein, 7 aa, synthetic construct
TEGRVKV

SEQ ID NO: 149313 - protein, 7 aa, synthetic construct
TEHFRGL

SEQ ID NO: 149314 - protein, 7 aa, synthetic construct
TEIKSRG

SEQ ID NO: 149315 - protein, 7 aa, synthetic construct
TEKAEKR

SEQ ID NO: 149316 - protein, 7 aa, synthetic construct
TEKAKWA

SEQ ID NO: 149317 - protein, 7 aa, synthetic construct
TEKARHS

SEQ ID NO: 149318 - protein, 7 aa, synthetic construct
TEKATWQ

SEQ ID NO: 149319 - protein, 7 aa, synthetic construct
TEKFKDR

SEQ ID NO: 149320 - protein, 7 aa, synthetic construct
TEKFNKY

SEQ ID NO: 149321 - protein, 7 aa, synthetic construct
TEKFYKG

SEQ ID NO: 149322 - protein, 7 aa, synthetic construct
TEKGIRH

SEQ ID NO: 149323 - protein, 7 aa, synthetic construct
TEKGRNY

SEQ ID NO: 149324 - protein, 7 aa, synthetic construct
TEKINKW

SEQ ID NO: 149325 - protein, 7 aa, synthetic construct
TEKKFPF

SEQ ID NO: 149326 - protein, 7 aa, synthetic construct
TEKKGTW

SEQ ID NO: 149327 - protein, 7 aa, synthetic construct
TEKLYRS

SEQ ID NO: 149328 - protein, 7 aa, synthetic construct
TEKNVKY

SEQ ID NO: 149329 - protein, 7 aa, synthetic construct
TEKPKDR

SEQ ID NO: 149330 - protein, 7 aa, synthetic construct
TEKPTAR

SEQ ID NO: 149331 - protein, 7 aa, synthetic construct
TEKRQLI

SEQ ID NO: 149332 - protein, 7 aa, synthetic construct
TEKRYGS

SEQ ID NO: 149333 - protein, 7 aa, synthetic construct
TEKSQRA

SEQ ID NO: 149334 - protein, 7 aa, synthetic construct
TEKTKQW

SEQ ID NO: 149335 - protein, 7 aa, synthetic construct
TEKVRLI

SEQ ID NO: 149336 - protein, 7 aa, synthetic construct
TEKYSKI

SEQ ID NO: 149337 - protein, 7 aa, synthetic construct
TELARKN

SEQ ID NO: 149338 - protein, 7 aa, synthetic construct
TEMKARI

SEQ ID NO: 149339 - protein, 7 aa, synthetic construct
TEMKMLR

SEQ ID NO: 149340 - protein, 7 aa, synthetic construct
TEMKQRN

SEQ ID NO: 149341 - protein, 7 aa, synthetic construct
TEMRTRV

SEQ ID NO: 149342 - protein, 7 aa, synthetic construct
TENKRLI

SEQ ID NO: 149343 - protein, 7 aa, synthetic construct
TENRMRV

SEQ ID NO: 149344 - protein, 7 aa, synthetic construct
TENVKRH

SEQ ID NO: 149345 - protein, 7 aa, synthetic construct
TEPGRKN

SEQ ID NO: 149346 - protein, 7 aa, synthetic construct
TEPHKRV

SEQ ID NO: 149347 - protein, 7 aa, synthetic construct
TEPLGKR

SEQ ID NO: 149348 - protein, 7 aa, synthetic construct
TEPQGKK

SEQ ID NO: 149349 - protein, 7 aa, synthetic construct
TEPRTTR

SEQ ID NO: 149350 - protein, 7 aa, synthetic construct
TEPYGSR

SEQ ID NO: 149351 - protein, 7 aa, synthetic construct
TEQAGRR

SEQ ID NO: 149352 - protein, 7 aa, synthetic construct
TEQIRAR

SEQ ID NO: 149353 - protein, 7 aa, synthetic construct
TEQKPRT

SEQ ID NO: 149354 - protein, 7 aa, synthetic construct
TEQMRKV

SEQ ID NO: 149355 - protein, 7 aa, synthetic construct
TERANRS

SEQ ID NO: 149356 - protein, 7 aa, synthetic construct
TERFKSG

SEQ ID NO: 149357 - protein, 7 aa, synthetic construct
TERIKSF

SEQ ID NO: 149358 - protein, 7 aa, synthetic construct
TERIPTK

SEQ ID NO: 149359 - protein, 7 aa, synthetic construct
TERKGPF

SEQ ID NO: 149360 - protein, 7 aa, synthetic construct
TERKIQQ

SEQ ID NO: 149361 - protein, 7 aa, synthetic construct
TERKIVL

SEQ ID NO: 149362 - protein, 7 aa, synthetic construct
TERKNAF

SEQ ID NO: 149363 - protein, 7 aa, synthetic construct
TERKNSI

SEQ ID NO: 149364 - protein, 7 aa, synthetic construct
TERLSRV

SEQ ID NO: 149365 - protein, 7 aa, synthetic construct
TERNNKM

SEQ ID NO: 149366 - protein, 7 aa, synthetic construct
TERPKMQ

SEQ ID NO: 149367 - protein, 7 aa, synthetic construct
TERPKTY

SEQ ID NO: 149368 - protein, 7 aa, synthetic construct
TERPPMR

SEQ ID NO: 149369 - protein, 7 aa, synthetic construct
TERVQFK

SEQ ID NO: 149370 - protein, 7 aa, synthetic construct
TESGKRI

SEQ ID NO: 149371 - protein, 7 aa, synthetic construct
TESKNRT

SEQ ID NO: 149372 - protein, 7 aa, synthetic construct
TESMRQK

SEQ ID NO: 149373 - protein, 7 aa, synthetic construct
TESRVGR

SEQ ID NO: 149374 - protein, 7 aa, synthetic construct
TESSQKK

SEQ ID NO: 149375 - protein, 7 aa, synthetic construct
TESTWKM

SEQ ID NO: 149376 - protein, 7 aa, synthetic construct
TESVKRN

SEQ ID NO: 149377 - protein, 7 aa, synthetic construct
TESVRGK

SEQ ID NO: 149378 - protein, 7 aa, synthetic construct
TETKYQK

SEQ ID NO: 149379 - protein, 7 aa, synthetic construct
TETMTKR

SEQ ID NO: 149380 - protein, 7 aa, synthetic construct
TEVKGRM

SEQ ID NO: 149381 - protein, 7 aa, synthetic construct
TEVPNKR

SEQ ID NO: 149382 - protein, 7 aa, synthetic construct
TEWKPPT

SEQ ID NO: 149383 - protein, 7 aa, synthetic construct
TEWKVKA

SEQ ID NO: 149384 - protein, 7 aa, synthetic construct
TEWRNAG

SEQ ID NO: 149385 - protein, 7 aa, synthetic construct
TFAHGTK

SEQ ID NO: 149386 - protein, 7 aa, synthetic construct
TFAHPKT

SEQ ID NO: 149387 - protein, 7 aa, synthetic construct
TFAKHVN

SEQ ID NO: 149388 - protein, 7 aa, synthetic construct
TFAKPDK

SEQ ID NO: 149389 - protein, 7 aa, synthetic construct
TFAKTER

SEQ ID NO: 149390 - protein, 7 aa, synthetic construct
TFANNKA

SEQ ID NO: 149391 - protein, 7 aa, synthetic construct
TFAQRPM

SEQ ID NO: 149392 - protein, 7 aa, synthetic construct
TFAQTRV

SEQ ID NO: 149393 - protein, 7 aa, synthetic construct
TFAQVAR

SEQ ID NO: 149394 - protein, 7 aa, synthetic construct
TFARNKE

SEQ ID NO: 149395 - protein, 7 aa, synthetic construct
TFASKRD

SEQ ID NO: 149396 - protein, 7 aa, synthetic construct
TFDAKMK

SEQ ID NO: 149397 - protein, 7 aa, synthetic construct
TFDAKRH

SEQ ID NO: 149398 - protein, 7 aa, synthetic construct
TFDKRAS

SEQ ID NO: 149399 - protein, 7 aa, synthetic construct
TFDKRIT

SEQ ID NO: 149400 - protein, 7 aa, synthetic construct
TFDRMKM

SEQ ID NO: 149401 - protein, 7 aa, synthetic construct
TFDRNKI

SEQ ID NO: 149402 - protein, 7 aa, synthetic construct
TFDRPKI

SEQ ID NO: 149403 - protein, 7 aa, synthetic construct
TFEDRLG

SEQ ID NO: 149404 - protein, 7 aa, synthetic construct
TFEKAKF

SEQ ID NO: 149405 - protein, 7 aa, synthetic construct
TFEKARQ

SEQ ID NO: 149406 - protein, 7 aa, synthetic construct
TFEKNKH

SEQ ID NO: 149407 - protein, 7 aa, synthetic construct
TFEKPMR

SEQ ID NO: 149408 - protein, 7 aa, synthetic construct
TFEKSKY

SEQ ID NO: 149409 - protein, 7 aa, synthetic construct
TFGGSKI

SEQ ID NO: 149410 - protein, 7 aa, synthetic construct
TFGHAKQ

SEQ ID NO: 149411 - protein, 7 aa, synthetic construct
TFGIKHG

SEQ ID NO: 149412 - protein, 7 aa, synthetic construct
TFGKIDR

SEQ ID NO: 149413 - protein, 7 aa, synthetic construct
TFGKQNI

SEQ ID NO: 149414 - protein, 7 aa, synthetic construct
TFGKTVL

SEQ ID NO: 149415 - protein, 7 aa, synthetic construct
TFGNNRM

SEQ ID NO: 149416 - protein, 7 aa, synthetic construct
TFGPNIK

SEQ ID NO: 149417 - protein, 7 aa, synthetic construct
TFGQARN

SEQ ID NO: 149418 - protein, 7 aa, synthetic construct
TFGSTHK

SEQ ID NO: 149419 - protein, 7 aa, synthetic construct
TFGTNTR

SEQ ID NO: 149420 - protein, 7 aa, synthetic construct
TFGVNRA

SEQ ID NO: 149421 - protein, 7 aa, synthetic construct
TFHAAKT

SEQ ID NO: 149422 - protein, 7 aa, synthetic construct
TFHANKV

SEQ ID NO: 149423 - protein, 7 aa, synthetic construct
TFHFSAE

SEQ ID NO: 149424 - protein, 7 aa, synthetic construct
TFHKPAS

SEQ ID NO: 149425 - protein, 7 aa, synthetic construct
TFHKVNN

SEQ ID NO: 149426 - protein, 7 aa, synthetic construct
TFHPKQS

SEQ ID NO: 149427 - protein, 7 aa, synthetic construct
TFKAMHS

SEQ ID NO: 149428 - protein, 7 aa, synthetic construct
TFKELDH

SEQ ID NO: 149429 - protein, 7 aa, synthetic construct
TFKGKDF

SEQ ID NO: 149430 - protein, 7 aa, synthetic construct
TFKGQHN

SEQ ID NO: 149431 - protein, 7 aa, synthetic construct
TFKGTFP

SEQ ID NO: 149432 - protein, 7 aa, synthetic construct
TFKIRTE

SEQ ID NO: 149433 - protein, 7 aa, synthetic construct
TFKKDYV

SEQ ID NO: 149434 - protein, 7 aa, synthetic construct
TFKMHAS

SEQ ID NO: 149435 - protein, 7 aa, synthetic construct
TFKNESK

SEQ ID NO: 149436 - protein, 7 aa, synthetic construct
TFKNHQM

SEQ ID NO: 149437 - protein, 7 aa, synthetic construct
TFKPINS

SEQ ID NO: 149438 - protein, 7 aa, synthetic construct
TFKPKGD

SEQ ID NO: 149439 - protein, 7 aa, synthetic construct
TFKPMSN

SEQ ID NO: 149440 - protein, 7 aa, synthetic construct
TFKPRTE

SEQ ID NO: 149441 - protein, 7 aa, synthetic construct
TFKQNMM

SEQ ID NO: 149442 - protein, 7 aa, synthetic construct
TFKRESS

SEQ ID NO: 149443 - protein, 7 aa, synthetic construct
TFKSDGK

SEQ ID NO: 149444 - protein, 7 aa, synthetic construct
TFKSLEK

SEQ ID NO: 149445 - protein, 7 aa, synthetic construct
TFKSREV

SEQ ID NO: 149446 - protein, 7 aa, synthetic construct
TFKTAHN

SEQ ID NO: 149447 - protein, 7 aa, synthetic construct
TFKTDRT

SEQ ID NO: 149448 - protein, 7 aa, synthetic construct
TFKTHAM

SEQ ID NO: 149449 - protein, 7 aa, synthetic construct
TFKVIPS

SEQ ID NO: 149450 - protein, 7 aa, synthetic construct
TFMQSKA

SEQ ID NO: 149451 - protein, 7 aa, synthetic construct
TFNAAAR

SEQ ID NO: 149452 - protein, 7 aa, synthetic construct
TFNAHGK

SEQ ID NO: 149453 - protein, 7 aa, synthetic construct
TFNAKFP

SEQ ID NO: 149454 - protein, 7 aa, synthetic construct
TFNKMGM

SEQ ID NO: 149455 - protein, 7 aa, synthetic construct
TFNKPHI

SEQ ID NO: 149456 - protein, 7 aa, synthetic construct
TFNNMSK

SEQ ID NO: 149457 - protein, 7 aa, synthetic construct
TFNVTTR

SEQ ID NO: 149458 - protein, 7 aa, synthetic construct
TFPNKQL

SEQ ID NO: 149459 - protein, 7 aa, synthetic construct
TFQGVKQ

SEQ ID NO: 149460 - protein, 7 aa, synthetic construct
TFQKMSQ

SEQ ID NO: 149461 - protein, 7 aa, synthetic construct
TFQQQPK

SEQ ID NO: 149462 - protein, 7 aa, synthetic construct
TFQRSQP

SEQ ID NO: 149463 - protein, 7 aa, synthetic construct
TFQTRDK

SEQ ID NO: 149464 - protein, 7 aa, synthetic construct
TFRPIKE

SEQ ID NO: 149465 - protein, 7 aa, synthetic construct
TFRQQGI

SEQ ID NO: 149466 - protein, 7 aa, synthetic construct
TFSKMER

SEQ ID NO: 149467 - protein, 7 aa, synthetic construct
TFSNANK

SEQ ID NO: 149468 - protein, 7 aa, synthetic construct
TFSNNKM

SEQ ID NO: 149469 - protein, 7 aa, synthetic construct
TFSSSNR

SEQ ID NO: 149470 - protein, 7 aa, synthetic construct
TFSSSSK

SEQ ID NO: 149471 - protein, 7 aa, synthetic construct
TFTAGSR

SEQ ID NO: 149472 - protein, 7 aa, synthetic construct
TFTGQRT

SEQ ID NO: 149473 - protein, 7 aa, synthetic construct
TFTHKQP

SEQ ID NO: 149474 - protein, 7 aa, synthetic construct
TFTKESK

SEQ ID NO: 149475 - protein, 7 aa, synthetic construct
TFTNNKQ

SEQ ID NO: 149476 - protein, 7 aa, synthetic construct
TGAGYQK

SEQ ID NO: 149477 - protein, 7 aa, synthetic construct
TGAHRNI

SEQ ID NO: 149478 - protein, 7 aa, synthetic construct
TGAIRKD

SEQ ID NO: 149479 - protein, 7 aa, synthetic construct
TGAKSPF

SEQ ID NO: 149480 - protein, 7 aa, synthetic construct
TGAMKIT

SEQ ID NO: 149481 - protein, 7 aa, synthetic construct
TGARIQH

SEQ ID NO: 149482 - protein, 7 aa, synthetic construct
TGASHNK

SEQ ID NO: 149483 - protein, 7 aa, synthetic construct
TGATKYT

SEQ ID NO: 149484 - protein, 7 aa, synthetic construct
TGATQFR

SEQ ID NO: 149485 - protein, 7 aa, synthetic construct
TGDKQYR

SEQ ID NO: 149486 - protein, 7 aa, synthetic construct
TGDKRFQ

SEQ ID NO: 149487 - protein, 7 aa, synthetic construct
TGDNSRK

SEQ ID NO: 149488 - protein, 7 aa, synthetic construct
TGDRMLR

SEQ ID NO: 149489 - protein, 7 aa, synthetic construct
TGDRPRM

SEQ ID NO: 149490 - protein, 7 aa, synthetic construct
TGDRSKL

SEQ ID NO: 149491 - protein, 7 aa, synthetic construct
TGDYGSR

SEQ ID NO: 149492 - protein, 7 aa, synthetic construct
TGEKRSN

SEQ ID NO: 149493 - protein, 7 aa, synthetic construct
TGEPMRR

SEQ ID NO: 149494 - protein, 7 aa, synthetic construct
TGERSNK

SEQ ID NO: 149495 - protein, 7 aa, synthetic construct
TGGAGKY

SEQ ID NO: 149496 - protein, 7 aa, synthetic construct
TGGAHVR

SEQ ID NO: 149497 - protein, 7 aa, synthetic construct
TGGAKYN

SEQ ID NO: 149498 - protein, 7 aa, synthetic construct
TGGGTNR

SEQ ID NO: 149499 - protein, 7 aa, synthetic construct
TGGGVRN

SEQ ID NO: 149500 - protein, 7 aa, synthetic construct
TGGHKFA

SEQ ID NO: 149501 - protein, 7 aa, synthetic construct
TGGIMRM

SEQ ID NO: 149502 - protein, 7 aa, synthetic construct
TGGKERA

SEQ ID NO: 149503 - protein, 7 aa, synthetic construct
TGGKLYQ

SEQ ID NO: 149504 - protein, 7 aa, synthetic construct
TGGMKNF

SEQ ID NO: 149505 - protein, 7 aa, synthetic construct
TGGPSAR

SEQ ID NO: 149506 - protein, 7 aa, synthetic construct
TGGPVTR

SEQ ID NO: 149507 - protein, 7 aa, synthetic construct
TGGSPSK

SEQ ID NO: 149508 - protein, 7 aa, synthetic construct
TGGTYRA

SEQ ID NO: 149509 - protein, 7 aa, synthetic construct
TGGYVVK

SEQ ID NO: 149510 - protein, 7 aa, synthetic construct
TGHAGMR

SEQ ID NO: 149511 - protein, 7 aa, synthetic construct
TGHFQKG

SEQ ID NO: 149512 - protein, 7 aa, synthetic construct
TGHKIER

SEQ ID NO: 149513 - protein, 7 aa, synthetic construct
TGHPQSK

SEQ ID NO: 149514 - protein, 7 aa, synthetic construct
TGHRITG

SEQ ID NO: 149515 - protein, 7 aa, synthetic construct
TGHRSPV

SEQ ID NO: 149516 - protein, 7 aa, synthetic construct
TGHTTPK

SEQ ID NO: 149517 - protein, 7 aa, synthetic construct
TGHVTVR

SEQ ID NO: 149518 - protein, 7 aa, synthetic construct
TGIAQAR

SEQ ID NO: 149519 - protein, 7 aa, synthetic construct
TGIGGAR

SEQ ID NO: 149520 - protein, 7 aa, synthetic construct
TGIGVYK

SEQ ID NO: 149521 - protein, 7 aa, synthetic construct
TGISRVT

SEQ ID NO: 149522 - protein, 7 aa, synthetic construct
TGKEQPR

SEQ ID NO: 149523 - protein, 7 aa, synthetic construct
TGKEWKM

SEQ ID NO: 149524 - protein, 7 aa, synthetic construct
TGKGYGQ

SEQ ID NO: 149525 - protein, 7 aa, synthetic construct
TGKHEMR

SEQ ID NO: 149526 - protein, 7 aa, synthetic construct
TGKIRMD

SEQ ID NO: 149527 - protein, 7 aa, synthetic construct
TGKIYSQ

SEQ ID NO: 149528 - protein, 7 aa, synthetic construct
TGKKMDM

SEQ ID NO: 149529 - protein, 7 aa, synthetic construct
TGKLHNV

SEQ ID NO: 149530 - protein, 7 aa, synthetic construct
TGKLKEW

SEQ ID NO: 149531 - protein, 7 aa, synthetic construct
TGKLYGA

SEQ ID NO: 149532 - protein, 7 aa, synthetic construct
TGKLYTQ

SEQ ID NO: 149533 - protein, 7 aa, synthetic construct
TGKNADR

SEQ ID NO: 149534 - protein, 7 aa, synthetic construct
TGKPQIY

SEQ ID NO: 149535 - protein, 7 aa, synthetic construct
TGKPREM

SEQ ID NO: 149536 - protein, 7 aa, synthetic construct
TGKQDFR

SEQ ID NO: 149537 - protein, 7 aa, synthetic construct
TGKQYTQ

SEQ ID NO: 149538 - protein, 7 aa, synthetic construct
TGKSHER

SEQ ID NO: 149539 - protein, 7 aa, synthetic construct
TGKSVYT

SEQ ID NO: 149540 - protein, 7 aa, synthetic construct
TGKTSYN

SEQ ID NO: 149541 - protein, 7 aa, synthetic construct
TGKVHFV

SEQ ID NO: 149542 - protein, 7 aa, synthetic construct
TGKVYIS

SEQ ID NO: 149543 - protein, 7 aa, synthetic construct
TGKVYQL

SEQ ID NO: 149544 - protein, 7 aa, synthetic construct
TGKYLTG

SEQ ID NO: 149545 - protein, 7 aa, synthetic construct
TGKYQSA

SEQ ID NO: 149546 - protein, 7 aa, synthetic construct
TGKYTHP

SEQ ID NO: 149547 - protein, 7 aa, synthetic construct
TGLHGNK

SEQ ID NO: 149548 - protein, 7 aa, synthetic construct
TGLHTRG

SEQ ID NO: 149549 - protein, 7 aa, synthetic construct
TGLPRVV

SEQ ID NO: 149550 - protein, 7 aa, synthetic construct
TGMAAKY

SEQ ID NO: 149551 - protein, 7 aa, synthetic construct
TGMAIVR

SEQ ID NO: 149552 - protein, 7 aa, synthetic construct
TGMHNLK

SEQ ID NO: 149553 - protein, 7 aa, synthetic construct
TGMHPTK

SEQ ID NO: 149554 - protein, 7 aa, synthetic construct
TGMKVHM

SEQ ID NO: 149555 - protein, 7 aa, synthetic construct
TGMQEKR

SEQ ID NO: 149556 - protein, 7 aa, synthetic construct
TGMRIVP

SEQ ID NO: 149557 - protein, 7 aa, synthetic construct
TGNAVRM

SEQ ID NO: 149558 - protein, 7 aa, synthetic construct
TGNAYQR

SEQ ID NO: 149559 - protein, 7 aa, synthetic construct
TGNGGQR

SEQ ID NO: 149560 - protein, 7 aa, synthetic construct
TGNGRYV

SEQ ID NO: 149561 - protein, 7 aa, synthetic construct
TGNHGKF

SEQ ID NO: 149562 - protein, 7 aa, synthetic construct
TGNHGLK

SEQ ID NO: 149563 - protein, 7 aa, synthetic construct
TGNHKQV

SEQ ID NO: 149564 - protein, 7 aa, synthetic construct
TGNKYMG

SEQ ID NO: 149565 - protein, 7 aa, synthetic construct
TGNKYTS

SEQ ID NO: 149566 - protein, 7 aa, synthetic construct
TGNMMMR

SEQ ID NO: 149567 - protein, 7 aa, synthetic construct
TGNNWKA

SEQ ID NO: 149568 - protein, 7 aa, synthetic construct
TGNPRMV

SEQ ID NO: 149569 - protein, 7 aa, synthetic construct
TGNPYKG

SEQ ID NO: 149570 - protein, 7 aa, synthetic construct
TGNSLHK

SEQ ID NO: 149571 - protein, 7 aa, synthetic construct
TGNSNIR

SEQ ID NO: 149572 - protein, 7 aa, synthetic construct
TGNTHVR

SEQ ID NO: 149573 - protein, 7 aa, synthetic construct
TGNTMAR

SEQ ID NO: 149574 - protein, 7 aa, synthetic construct
TGNYSKA

SEQ ID NO: 149575 - protein, 7 aa, synthetic construct
TGPAIRL

SEQ ID NO: 149576 - protein, 7 aa, synthetic construct
TGPHTMR

SEQ ID NO: 149577 - protein, 7 aa, synthetic construct
TGPKTFT

SEQ ID NO: 149578 - protein, 7 aa, synthetic construct
TGPRYQL

SEQ ID NO: 149579 - protein, 7 aa, synthetic construct
TGPSRVY

SEQ ID NO: 149580 - protein, 7 aa, synthetic construct
TGPVPLR

SEQ ID NO: 149581 - protein, 7 aa, synthetic construct
TGQARFS

SEQ ID NO: 149582 - protein, 7 aa, synthetic construct
TGQDTRK

SEQ ID NO: 149583 - protein, 7 aa, synthetic construct
TGQGGWH

SEQ ID NO: 149584 - protein, 7 aa, synthetic construct
TGQGGYK

SEQ ID NO: 149585 - protein, 7 aa, synthetic construct
TGQHQNK

SEQ ID NO: 149586 - protein, 7 aa, synthetic construct
TGQKYQL

SEQ ID NO: 149587 - protein, 7 aa, synthetic construct
TGQLSSR

SEQ ID NO: 149588 - protein, 7 aa, synthetic construct
TGQMPQR

SEQ ID NO: 149589 - protein, 7 aa, synthetic construct
TGQMQQR

SEQ ID NO: 149590 - protein, 7 aa, synthetic construct
TGQMSQK

SEQ ID NO: 149591 - protein, 7 aa, synthetic construct
TGQNHMK

SEQ ID NO: 149592 - protein, 7 aa, synthetic construct
TGQNKQW

SEQ ID NO: 149593 - protein, 7 aa, synthetic construct
TGQPNSR

SEQ ID NO: 149594 - protein, 7 aa, synthetic construct
TGQPQMR

SEQ ID NO: 149595 - protein, 7 aa, synthetic construct
TGQRLTM

SEQ ID NO: 149596 - protein, 7 aa, synthetic construct
TGQRSNF

SEQ ID NO: 149597 - protein, 7 aa, synthetic construct
TGQRTFV

SEQ ID NO: 149598 - protein, 7 aa, synthetic construct
TGQTKRD

SEQ ID NO: 149599 - protein, 7 aa, synthetic construct
TGQYMQK

SEQ ID NO: 149600 - protein, 7 aa, synthetic construct
TGRAQAI

SEQ ID NO: 149601 - protein, 7 aa, synthetic construct
TGRATNQ

SEQ ID NO: 149602 - protein, 7 aa, synthetic construct
TGRDWTQ

SEQ ID NO: 149603 - protein, 7 aa, synthetic construct
TGRGIAG

SEQ ID NO: 149604 - protein, 7 aa, synthetic construct
TGRIAHG

SEQ ID NO: 149605 - protein, 7 aa, synthetic construct
TGRIKQE

SEQ ID NO: 149606 - protein, 7 aa, synthetic construct
TGRKEMF

SEQ ID NO: 149607 - protein, 7 aa, synthetic construct
TGRLVRE

SEQ ID NO: 149608 - protein, 7 aa, synthetic construct
TGRMLPS

SEQ ID NO: 149609 - protein, 7 aa, synthetic construct
TGRMNLP

SEQ ID NO: 149610 - protein, 7 aa, synthetic construct
TGRMTVT

SEQ ID NO: 149611 - protein, 7 aa, synthetic construct
TGRNALT

SEQ ID NO: 149612 - protein, 7 aa, synthetic construct
TGRNMAV

SEQ ID NO: 149613 - protein, 7 aa, synthetic construct
TGRPHQQ

SEQ ID NO: 149614 - protein, 7 aa, synthetic construct
TGRPMTY

SEQ ID NO: 149615 - protein, 7 aa, synthetic construct
TGRPTPM

SEQ ID NO: 149616 - protein, 7 aa, synthetic construct
TGRQPMP

SEQ ID NO: 149617 - protein, 7 aa, synthetic construct
TGRQVNN

SEQ ID NO: 149618 - protein, 7 aa, synthetic construct
TGRTHLI

SEQ ID NO: 149619 - protein, 7 aa, synthetic construct
TGRVDSR

SEQ ID NO: 149620 - protein, 7 aa, synthetic construct
TGSFSGK

SEQ ID NO: 149621 - protein, 7 aa, synthetic construct
TGSHGAR

SEQ ID NO: 149622 - protein, 7 aa, synthetic construct
TGSIAMR

SEQ ID NO: 149623 - protein, 7 aa, synthetic construct
TGSKDRI

SEQ ID NO: 149624 - protein, 7 aa, synthetic construct
TGSKFAH

SEQ ID NO: 149625 - protein, 7 aa, synthetic construct
TGSNMMR

SEQ ID NO: 149626 - protein, 7 aa, synthetic construct
TGSPSSR

SEQ ID NO: 149627 - protein, 7 aa, synthetic construct
TGSQERR

SEQ ID NO: 149628 - protein, 7 aa, synthetic construct
TGSRGTF

SEQ ID NO: 149629 - protein, 7 aa, synthetic construct
TGSSAQR

SEQ ID NO: 149630 - protein, 7 aa, synthetic construct
TGSSIRQ

SEQ ID NO: 149631 - protein, 7 aa, synthetic construct
TGSSQWS

SEQ ID NO: 149632 - protein, 7 aa, synthetic construct
TGSTYPR

SEQ ID NO: 149633 - protein, 7 aa, synthetic construct
TGSVKML

SEQ ID NO: 149634 - protein, 7 aa, synthetic construct
TGSVKMM

SEQ ID NO: 149635 - protein, 7 aa, synthetic construct
TGSVRWE

SEQ ID NO: 149636 - protein, 7 aa, synthetic construct
TGSYIGK

SEQ ID NO: 149637 - protein, 7 aa, synthetic construct
TGTDKGR

SEQ ID NO: 149638 - protein, 7 aa, synthetic construct
TGTFRDK

SEQ ID NO: 149639 - protein, 7 aa, synthetic construct
TGTGKYF

SEQ ID NO: 149640 - protein, 7 aa, synthetic construct
TGTGWQK

SEQ ID NO: 149641 - protein, 7 aa, synthetic construct
TGTHVPR

SEQ ID NO: 149642 - protein, 7 aa, synthetic construct
TGTMYHK

SEQ ID NO: 149643 - protein, 7 aa, synthetic construct
TGTNHLR

SEQ ID NO: 149644 - protein, 7 aa, synthetic construct
TGTPMIK

SEQ ID NO: 149645 - protein, 7 aa, synthetic construct
TGTREGR

SEQ ID NO: 149646 - protein, 7 aa, synthetic construct
TGTREPK

SEQ ID NO: 149647 - protein, 7 aa, synthetic construct
TGTRGGG

SEQ ID NO: 149648 - protein, 7 aa, synthetic construct
TGTRIDR

SEQ ID NO: 149649 - protein, 7 aa, synthetic construct
TGVHISK

SEQ ID NO: 149650 - protein, 7 aa, synthetic construct
TGVHTNK

SEQ ID NO: 149651 - protein, 7 aa, synthetic construct
TGVKRTD

SEQ ID NO: 149652 - protein, 7 aa, synthetic construct
TGVNTNR

SEQ ID NO: 149653 - protein, 7 aa, synthetic construct
TGVQSGR

SEQ ID NO: 149654 - protein, 7 aa, synthetic construct
TGVTHRQ

SEQ ID NO: 149655 - protein, 7 aa, synthetic construct
TGVVKYA

SEQ ID NO: 149656 - protein, 7 aa, synthetic construct
TGVYNKT

SEQ ID NO: 149657 - protein, 7 aa, synthetic construct
TGWKSVE

SEQ ID NO: 149658 - protein, 7 aa, synthetic construct
TGYGQKA

SEQ ID NO: 149659 - protein, 7 aa, synthetic construct
TGYKPSI

SEQ ID NO: 149660 - protein, 7 aa, synthetic construct
TGYNINE

SEQ ID NO: 149661 - protein, 7 aa, synthetic construct
TGYPKHG

SEQ ID NO: 149662 - protein, 7 aa, synthetic construct
THAAPIR

SEQ ID NO: 149663 - protein, 7 aa, synthetic construct
THAAQNR

SEQ ID NO: 149664 - protein, 7 aa, synthetic construct
THAEVKR

SEQ ID NO: 149665 - protein, 7 aa, synthetic construct
THAGFNK

SEQ ID NO: 149666 - protein, 7 aa, synthetic construct
THAGMIR

SEQ ID NO: 149667 - protein, 7 aa, synthetic construct
THAGNGK

SEQ ID NO: 149668 - protein, 7 aa, synthetic construct
THAKMPL

SEQ ID NO: 149669 - protein, 7 aa, synthetic construct
THANANR

SEQ ID NO: 149670 - protein, 7 aa, synthetic construct
THAPTAK

SEQ ID NO: 149671 - protein, 7 aa, synthetic construct
THAQGQK

SEQ ID NO: 149672 - protein, 7 aa, synthetic construct
THAQMLK

SEQ ID NO: 149673 - protein, 7 aa, synthetic construct
THAQTTR

SEQ ID NO: 149674 - protein, 7 aa, synthetic construct
THARMKE

SEQ ID NO: 149675 - protein, 7 aa, synthetic construct
THARNNA

SEQ ID NO: 149676 - protein, 7 aa, synthetic construct
THARPQN

SEQ ID NO: 149677 - protein, 7 aa, synthetic construct
THARPSA

SEQ ID NO: 149678 - protein, 7 aa, synthetic construct
THAVQIR

SEQ ID NO: 149679 - protein, 7 aa, synthetic construct
THAYTAM

SEQ ID NO: 149680 - protein, 7 aa, synthetic construct
THDKMGK

SEQ ID NO: 149681 - protein, 7 aa, synthetic construct
THDKRGM

SEQ ID NO: 149682 - protein, 7 aa, synthetic construct
THDLKRI

SEQ ID NO: 149683 - protein, 7 aa, synthetic construct
THEKYHL

SEQ ID NO: 149684 - protein, 7 aa, synthetic construct
THFQSTK

SEQ ID NO: 149685 - protein, 7 aa, synthetic construct
THGFPSK

SEQ ID NO: 149686 - protein, 7 aa, synthetic construct
THGGKYG

SEQ ID NO: 149687 - protein, 7 aa, synthetic construct
THGGSRP

SEQ ID NO: 149688 - protein, 7 aa, synthetic construct
THGIGKQ

SEQ ID NO: 149689 - protein, 7 aa, synthetic construct
THGIPAK

SEQ ID NO: 149690 - protein, 7 aa, synthetic construct
THGKGIY

SEQ ID NO: 149691 - protein, 7 aa, synthetic construct
THGKLSM

SEQ ID NO: 149692 - protein, 7 aa, synthetic construct
THGKSAL

SEQ ID NO: 149693 - protein, 7 aa, synthetic construct
THGKSSL

SEQ ID NO: 149694 - protein, 7 aa, synthetic construct
THGLPKM

SEQ ID NO: 149695 - protein, 7 aa, synthetic construct
THGMQKQ

SEQ ID NO: 149696 - protein, 7 aa, synthetic construct
THGQIRS

SEQ ID NO: 149697 - protein, 7 aa, synthetic construct
THGRIIQ

SEQ ID NO: 149698 - protein, 7 aa, synthetic construct
THGRPPM

SEQ ID NO: 149699 - protein, 7 aa, synthetic construct
THGRVLA

SEQ ID NO: 149700 - protein, 7 aa, synthetic construct
THGTGQK

SEQ ID NO: 149701 - protein, 7 aa, synthetic construct
THGTLSR

SEQ ID NO: 149702 - protein, 7 aa, synthetic construct
THGTSRS

SEQ ID NO: 149703 - protein, 7 aa, synthetic construct
THGVNTK

SEQ ID NO: 149704 - protein, 7 aa, synthetic construct
THGVQRL

SEQ ID NO: 149705 - protein, 7 aa, synthetic construct
THGYTKA

SEQ ID NO: 149706 - protein, 7 aa, synthetic construct
THHGKAP

SEQ ID NO: 149707 - protein, 7 aa, synthetic construct
THHKMMP

SEQ ID NO: 149708 - protein, 7 aa, synthetic construct
THHQRLQ

SEQ ID NO: 149709 - protein, 7 aa, synthetic construct
THHTFPN

SEQ ID NO: 149710 - protein, 7 aa, synthetic construct
THIKEAR

SEQ ID NO: 149711 - protein, 7 aa, synthetic construct
THIRNLV

SEQ ID NO: 149712 - protein, 7 aa, synthetic construct
THISNPK

SEQ ID NO: 149713 - protein, 7 aa, synthetic construct
THISRQD

SEQ ID NO: 149714 - protein, 7 aa, synthetic construct
THKAISQ

SEQ ID NO: 149715 - protein, 7 aa, synthetic construct
THKAVAL

SEQ ID NO: 149716 - protein, 7 aa, synthetic construct
THKDNRI

SEQ ID NO: 149717 - protein, 7 aa, synthetic construct
THKDPMR

SEQ ID NO: 149718 - protein, 7 aa, synthetic construct
THKDSLK

SEQ ID NO: 149719 - protein, 7 aa, synthetic construct
THKFERP

SEQ ID NO: 149720 - protein, 7 aa, synthetic construct
THKFMSG

SEQ ID NO: 149721 - protein, 7 aa, synthetic construct
THKFNKE

SEQ ID NO: 149722 - protein, 7 aa, synthetic construct
THKFTPN

SEQ ID NO: 149723 - protein, 7 aa, synthetic construct
THKGATY

SEQ ID NO: 149724 - protein, 7 aa, synthetic construct
THKGMAM

SEQ ID NO: 149725 - protein, 7 aa, synthetic construct
THKIQNM

SEQ ID NO: 149726 - protein, 7 aa, synthetic construct
THKKQEI

SEQ ID NO: 149727 - protein, 7 aa, synthetic construct
THKLRES

SEQ ID NO: 149728 - protein, 7 aa, synthetic construct
THKMIST

SEQ ID NO: 149729 - protein, 7 aa, synthetic construct
THKNLMV

SEQ ID NO: 149730 - protein, 7 aa, synthetic construct
THKNYAV

SEQ ID NO: 149731 - protein, 7 aa, synthetic construct
THKPPHM

SEQ ID NO: 149732 - protein, 7 aa, synthetic construct
THKPSSY

SEQ ID NO: 149733 - protein, 7 aa, synthetic construct
THKQIGT

SEQ ID NO: 149734 - protein, 7 aa, synthetic construct
THKQPPL

SEQ ID NO: 149735 - protein, 7 aa, synthetic construct
THKQQLI

SEQ ID NO: 149736 - protein, 7 aa, synthetic construct
THKQQQI

SEQ ID NO: 149737 - protein, 7 aa, synthetic construct
THKQYSS

SEQ ID NO: 149738 - protein, 7 aa, synthetic construct
THKSIPY

SEQ ID NO: 149739 - protein, 7 aa, synthetic construct
THKTIPY

SEQ ID NO: 149740 - protein, 7 aa, synthetic construct
THKTNPL

SEQ ID NO: 149741 - protein, 7 aa, synthetic construct
THKTVPH

SEQ ID NO: 149742 - protein, 7 aa, synthetic construct
THKVNYA

SEQ ID NO: 149743 - protein, 7 aa, synthetic construct
THKVTPF

SEQ ID NO: 149744 - protein, 7 aa, synthetic construct
THLKGDR

SEQ ID NO: 149745 - protein, 7 aa, synthetic construct
THLNTRN

SEQ ID NO: 149746 - protein, 7 aa, synthetic construct
THLSHGK

SEQ ID NO: 149747 - protein, 7 aa, synthetic construct
THMHLQK

SEQ ID NO: 149748 - protein, 7 aa, synthetic construct
THMIKGV

SEQ ID NO: 149749 - protein, 7 aa, synthetic construct
THMKGHV

SEQ ID NO: 149750 - protein, 7 aa, synthetic construct
THMPKHG

SEQ ID NO: 149751 - protein, 7 aa, synthetic construct
THMVSKI

SEQ ID NO: 149752 - protein, 7 aa, synthetic construct
THNARFT

SEQ ID NO: 149753 - protein, 7 aa, synthetic construct
THNGGSR

SEQ ID NO: 149754 - protein, 7 aa, synthetic construct
THNGQLR

SEQ ID NO: 149755 - protein, 7 aa, synthetic construct
THNKFSA

SEQ ID NO: 149756 - protein, 7 aa, synthetic construct
THNLKGF

SEQ ID NO: 149757 - protein, 7 aa, synthetic construct
THNLRHT

SEQ ID NO: 149758 - protein, 7 aa, synthetic construct
THNNGMR

SEQ ID NO: 149759 - protein, 7 aa, synthetic construct
THNNTPK

SEQ ID NO: 149760 - protein, 7 aa, synthetic construct
THNPNRL

SEQ ID NO: 149761 - protein, 7 aa, synthetic construct
THNPRNT

SEQ ID NO: 149762 - protein, 7 aa, synthetic construct
THNPVNR

SEQ ID NO: 149763 - protein, 7 aa, synthetic construct
THNQGGK

SEQ ID NO: 149764 - protein, 7 aa, synthetic construct
THNRVNS

SEQ ID NO: 149765 - protein, 7 aa, synthetic construct
THNYTQQ

SEQ ID NO: 149766 - protein, 7 aa, synthetic construct
THPAQVK

SEQ ID NO: 149767 - protein, 7 aa, synthetic construct
THPARLT

SEQ ID NO: 149768 - protein, 7 aa, synthetic construct
THPGIRA

SEQ ID NO: 149769 - protein, 7 aa, synthetic construct
THPGPRT

SEQ ID NO: 149770 - protein, 7 aa, synthetic construct
THPHSKQ

SEQ ID NO: 149771 - protein, 7 aa, synthetic construct
THPNYAK

SEQ ID NO: 149772 - protein, 7 aa, synthetic construct
THPNYKM

SEQ ID NO: 149773 - protein, 7 aa, synthetic construct
THPPRGS

SEQ ID NO: 149774 - protein, 7 aa, synthetic construct
THPQSRA

SEQ ID NO: 149775 - protein, 7 aa, synthetic construct
THPRASI

SEQ ID NO: 149776 - protein, 7 aa, synthetic construct
THPRATN

SEQ ID NO: 149777 - protein, 7 aa, synthetic construct
THPRMAG

SEQ ID NO: 149778 - protein, 7 aa, synthetic construct
THPRSAQ

SEQ ID NO: 149779 - protein, 7 aa, synthetic construct
THPRVGM

SEQ ID NO: 149780 - protein, 7 aa, synthetic construct
THPRVSI

SEQ ID NO: 149781 - protein, 7 aa, synthetic construct
THPSMKY

SEQ ID NO: 149782 - protein, 7 aa, synthetic construct
THPSYKM

SEQ ID NO: 149783 - protein, 7 aa, synthetic construct
THPVGRQ

SEQ ID NO: 149784 - protein, 7 aa, synthetic construct
THPVKLQ

SEQ ID NO: 149785 - protein, 7 aa, synthetic construct
THPYNGK

SEQ ID NO: 149786 - protein, 7 aa, synthetic construct
THQAARI

SEQ ID NO: 149787 - protein, 7 aa, synthetic construct
THQAKLI

SEQ ID NO: 149788 - protein, 7 aa, synthetic construct
THQGSMK

SEQ ID NO: 149789 - protein, 7 aa, synthetic construct
THQHIPK

SEQ ID NO: 149790 - protein, 7 aa, synthetic construct
THQHRIV

SEQ ID NO: 149791 - protein, 7 aa, synthetic construct
THQILAK

SEQ ID NO: 149792 - protein, 7 aa, synthetic construct
THQLKEK

SEQ ID NO: 149793 - protein, 7 aa, synthetic construct
THQNLNK

SEQ ID NO: 149794 - protein, 7 aa, synthetic construct
THQQSFK

SEQ ID NO: 149795 - protein, 7 aa, synthetic construct
THQQSIR

SEQ ID NO: 149796 - protein, 7 aa, synthetic construct
THQRVPI

SEQ ID NO: 149797 - protein, 7 aa, synthetic construct
THQSTPK

SEQ ID NO: 149798 - protein, 7 aa, synthetic construct
THQTKPF

SEQ ID NO: 149799 - protein, 7 aa, synthetic construct
THQTSGK

SEQ ID NO: 149800 - protein, 7 aa, synthetic construct
THQTVKQ

SEQ ID NO: 149801 - protein, 7 aa, synthetic construct
THRGLPV

SEQ ID NO: 149802 - protein, 7 aa, synthetic construct
THRGMPV

SEQ ID NO: 149803 - protein, 7 aa, synthetic construct
THRGQVG

SEQ ID NO: 149804 - protein, 7 aa, synthetic construct
THRGTLS

SEQ ID NO: 149805 - protein, 7 aa, synthetic construct
THRGVPP

SEQ ID NO: 149806 - protein, 7 aa, synthetic construct
THRIMGP

SEQ ID NO: 149807 - protein, 7 aa, synthetic construct
THRPPNM

SEQ ID NO: 149808 - protein, 7 aa, synthetic construct
THRSGQQ

SEQ ID NO: 149809 - protein, 7 aa, synthetic construct
THSAKIQ

SEQ ID NO: 149810 - protein, 7 aa, synthetic construct
THSGLGK

SEQ ID NO: 149811 - protein, 7 aa, synthetic construct
THSGPPK

SEQ ID NO: 149812 - protein, 7 aa, synthetic construct
THSGTNK

SEQ ID NO: 149813 - protein, 7 aa, synthetic construct
THSNLTR

SEQ ID NO: 149814 - protein, 7 aa, synthetic construct
THSNVLR

SEQ ID NO: 149815 - protein, 7 aa, synthetic construct
THSQIGK

SEQ ID NO: 149816 - protein, 7 aa, synthetic construct
THSRTGN

SEQ ID NO: 149817 - protein, 7 aa, synthetic construct
THSSQPR

SEQ ID NO: 149818 - protein, 7 aa, synthetic construct
THSTGTR

SEQ ID NO: 149819 - protein, 7 aa, synthetic construct
THSTSTR

SEQ ID NO: 149820 - protein, 7 aa, synthetic construct
THSVPAR

SEQ ID NO: 149821 - protein, 7 aa, synthetic construct
THTANRL

SEQ ID NO: 149822 - protein, 7 aa, synthetic construct
THTGKHW

SEQ ID NO: 149823 - protein, 7 aa, synthetic construct
THTKAIL

SEQ ID NO: 149824 - protein, 7 aa, synthetic construct
THTKPGF

SEQ ID NO: 149825 - protein, 7 aa, synthetic construct
THTKVHL

SEQ ID NO: 149826 - protein, 7 aa, synthetic construct
THTLKQY

SEQ ID NO: 149827 - protein, 7 aa, synthetic construct
THTLKRD

SEQ ID NO: 149828 - protein, 7 aa, synthetic construct
THTMGNR

SEQ ID NO: 149829 - protein, 7 aa, synthetic construct
THTMTIR

SEQ ID NO: 149830 - protein, 7 aa, synthetic construct
THTNQAK

SEQ ID NO: 149831 - protein, 7 aa, synthetic construct
THTNSRA

SEQ ID NO: 149832 - protein, 7 aa, synthetic construct
THTPEQM

SEQ ID NO: 149833 - protein, 7 aa, synthetic construct
THTPRGS

SEQ ID NO: 149834 - protein, 7 aa, synthetic construct
THTSLAK

SEQ ID NO: 149835 - protein, 7 aa, synthetic construct
THTSTFK

SEQ ID NO: 149836 - protein, 7 aa, synthetic construct
THTVVRT

SEQ ID NO: 149837 - protein, 7 aa, synthetic construct
THTYGNK

SEQ ID NO: 149838 - protein, 7 aa, synthetic construct
THVGRLN

SEQ ID NO: 149839 - protein, 7 aa, synthetic construct
THVKEKI

SEQ ID NO: 149840 - protein, 7 aa, synthetic construct
THVKMTI

SEQ ID NO: 149841 - protein, 7 aa, synthetic construct
THVNLQR

SEQ ID NO: 149842 - protein, 7 aa, synthetic construct
THVSKMI

SEQ ID NO: 149843 - protein, 7 aa, synthetic construct
THVVRGS

SEQ ID NO: 149844 - protein, 7 aa, synthetic construct
THYAGST

SEQ ID NO: 149845 - protein, 7 aa, synthetic construct
THYGTVK

SEQ ID NO: 149846 - protein, 7 aa, synthetic construct
THYHGSI

SEQ ID NO: 149847 - protein, 7 aa, synthetic construct
THYNNKN

SEQ ID NO: 149848 - protein, 7 aa, synthetic construct
THYQARS

SEQ ID NO: 149849 - protein, 7 aa, synthetic construct
THYTEGK

SEQ ID NO: 149850 - protein, 7 aa, synthetic construct
TIADRRM

SEQ ID NO: 149851 - protein, 7 aa, synthetic construct
TIAHVKQ

SEQ ID NO: 149852 - protein, 7 aa, synthetic construct
TIASRHN

SEQ ID NO: 149853 - protein, 7 aa, synthetic construct
TIATSRN

SEQ ID NO: 149854 - protein, 7 aa, synthetic construct
TIAYGHT

SEQ ID NO: 149855 - protein, 7 aa, synthetic construct
TIDRQLK

SEQ ID NO: 149856 - protein, 7 aa, synthetic construct
TIDSRVR

SEQ ID NO: 149857 - protein, 7 aa, synthetic construct
TIEGRKY

SEQ ID NO: 149858 - protein, 7 aa, synthetic construct
TIENRKF

SEQ ID NO: 149859 - protein, 7 aa, synthetic construct
TIENVKK

SEQ ID NO: 149860 - protein, 7 aa, synthetic construct
TIGAHKY

SEQ ID NO: 149861 - protein, 7 aa, synthetic construct
TIGERAK

SEQ ID NO: 149862 - protein, 7 aa, synthetic construct
TIGGPGR

SEQ ID NO: 149863 - protein, 7 aa, synthetic construct
TIGGPQR

SEQ ID NO: 149864 - protein, 7 aa, synthetic construct
TIGGTHR

SEQ ID NO: 149865 - protein, 7 aa, synthetic construct
TIGHGRM

SEQ ID NO: 149866 - protein, 7 aa, synthetic construct
TIGHKIQ

SEQ ID NO: 149867 - protein, 7 aa, synthetic construct
TIGMMKM

SEQ ID NO: 149868 - protein, 7 aa, synthetic construct
TIGMRTH

SEQ ID NO: 149869 - protein, 7 aa, synthetic construct
TIGNRFN

SEQ ID NO: 149870 - protein, 7 aa, synthetic construct
TIGRASL

SEQ ID NO: 149871 - protein, 7 aa, synthetic construct
TIGRVHA

SEQ ID NO: 149872 - protein, 7 aa, synthetic construct
TIGTKFT

SEQ ID NO: 149873 - protein, 7 aa, synthetic construct
TIGVRKD

SEQ ID NO: 149874 - protein, 7 aa, synthetic construct
TIGYTKQ

SEQ ID NO: 149875 - protein, 7 aa, synthetic construct
TIHDGKR

SEQ ID NO: 149876 - protein, 7 aa, synthetic construct
TIHEKRV

SEQ ID NO: 149877 - protein, 7 aa, synthetic construct
TIHGAGK

SEQ ID NO: 149878 - protein, 7 aa, synthetic construct
TIHGPAR

SEQ ID NO: 149879 - protein, 7 aa, synthetic construct
TIHKQQY

SEQ ID NO: 149880 - protein, 7 aa, synthetic construct
TIHPHEH

SEQ ID NO: 149881 - protein, 7 aa, synthetic construct
TIHQKHV

SEQ ID NO: 149882 - protein, 7 aa, synthetic construct
TIHQSNK

SEQ ID NO: 149883 - protein, 7 aa, synthetic construct
TIHRASS

SEQ ID NO: 149884 - protein, 7 aa, synthetic construct
TIHREKG

SEQ ID NO: 149885 - protein, 7 aa, synthetic construct
TIHRGPP

SEQ ID NO: 149886 - protein, 7 aa, synthetic construct
TIHSSNR

SEQ ID NO: 149887 - protein, 7 aa, synthetic construct
TIINPRA

SEQ ID NO: 149888 - protein, 7 aa, synthetic construct
TIIRTKD

SEQ ID NO: 149889 - protein, 7 aa, synthetic construct
TIKAAHY

SEQ ID NO: 149890 - protein, 7 aa, synthetic construct
TIKAHSY

SEQ ID NO: 149891 - protein, 7 aa, synthetic construct
TIKAVYA

SEQ ID NO: 149892 - protein, 7 aa, synthetic construct
TIKGSFQ

SEQ ID NO: 149893 - protein, 7 aa, synthetic construct
TIKPAIH

SEQ ID NO: 149894 - protein, 7 aa, synthetic construct
TIKPMPV

SEQ ID NO: 149895 - protein, 7 aa, synthetic construct
TIKPYHA

SEQ ID NO: 149896 - protein, 7 aa, synthetic construct
TIKPYKD

SEQ ID NO: 149897 - protein, 7 aa, synthetic construct
TIKRAFE

SEQ ID NO: 149898 - protein, 7 aa, synthetic construct
TIKRDDR

SEQ ID NO: 149899 - protein, 7 aa, synthetic construct
TIKSRDL

SEQ ID NO: 149900 - protein, 7 aa, synthetic construct
TIKYGAG

SEQ ID NO: 149901 - protein, 7 aa, synthetic construct
TIKYTSV

SEQ ID NO: 149902 - protein, 7 aa, synthetic construct
TILRGQS

SEQ ID NO: 149903 - protein, 7 aa, synthetic construct
TILSAYA

SEQ ID NO: 149904 - protein, 7 aa, synthetic construct
TINHGRV

SEQ ID NO: 149905 - protein, 7 aa, synthetic construct
TINHRLG

SEQ ID NO: 149906 - protein, 7 aa, synthetic construct
TINNPRH

SEQ ID NO: 149907 - protein, 7 aa, synthetic construct
TINRPHA

SEQ ID NO: 149908 - protein, 7 aa, synthetic construct
TINRPHS

SEQ ID NO: 149909 - protein, 7 aa, synthetic construct
TINRSTY

SEQ ID NO: 149910 - protein, 7 aa, synthetic construct
TINVYKN

SEQ ID NO: 149911 - protein, 7 aa, synthetic construct
TINWTQD

SEQ ID NO: 149912 - protein, 7 aa, synthetic construct
TINYGNK

SEQ ID NO: 149913 - protein, 7 aa, synthetic construct
TIPAFKP

SEQ ID NO: 149914 - protein, 7 aa, synthetic construct
TIPAKSF

SEQ ID NO: 149915 - protein, 7 aa, synthetic construct
TIPGPRN

SEQ ID NO: 149916 - protein, 7 aa, synthetic construct
TIPGRYT

SEQ ID NO: 149917 - protein, 7 aa, synthetic construct
TIPHRLG

SEQ ID NO: 149918 - protein, 7 aa, synthetic construct
TIPIKHM

SEQ ID NO: 149919 - protein, 7 aa, synthetic construct
TIPKYMG

SEQ ID NO: 149920 - protein, 7 aa, synthetic construct
TIPNGYR

SEQ ID NO: 149921 - protein, 7 aa, synthetic construct
TIPPMRQ

SEQ ID NO: 149922 - protein, 7 aa, synthetic construct
TIPQRHG

SEQ ID NO: 149923 - protein, 7 aa, synthetic construct
TIPQSNR

SEQ ID NO: 149924 - protein, 7 aa, synthetic construct
TIPRQHT

SEQ ID NO: 149925 - protein, 7 aa, synthetic construct
TIPRSHQ

SEQ ID NO: 149926 - protein, 7 aa, synthetic construct
TIQFTKA

SEQ ID NO: 149927 - protein, 7 aa, synthetic construct
TIQGRHV

SEQ ID NO: 149928 - protein, 7 aa, synthetic construct
TIQGYKS

SEQ ID NO: 149929 - protein, 7 aa, synthetic construct
TIQIRDK

SEQ ID NO: 149930 - protein, 7 aa, synthetic construct
TIQNERR

SEQ ID NO: 149931 - protein, 7 aa, synthetic construct
TIQQKVV

SEQ ID NO: 149932 - protein, 7 aa, synthetic construct
TIQSHAR

SEQ ID NO: 149933 - protein, 7 aa, synthetic construct
TIRAPLP

SEQ ID NO: 149934 - protein, 7 aa, synthetic construct
TIRAPNI

SEQ ID NO: 149935 - protein, 7 aa, synthetic construct
TIRDEKR

SEQ ID NO: 149936 - protein, 7 aa, synthetic construct
TIRDMQK

SEQ ID NO: 149937 - protein, 7 aa, synthetic construct
TIRDPGK

SEQ ID NO: 149938 - protein, 7 aa, synthetic construct
TIREAKY

SEQ ID NO: 149939 - protein, 7 aa, synthetic construct
TIRHVSP

SEQ ID NO: 149940 - protein, 7 aa, synthetic construct
TIRKDQV

SEQ ID NO: 149941 - protein, 7 aa, synthetic construct
TIRKLQD

SEQ ID NO: 149942 - protein, 7 aa, synthetic construct
TIRKVEN

SEQ ID NO: 149943 - protein, 7 aa, synthetic construct
TIRMHTP

SEQ ID NO: 149944 - protein, 7 aa, synthetic construct
TIRPNPI

SEQ ID NO: 149945 - protein, 7 aa, synthetic construct
TIRPNVH

SEQ ID NO: 149946 - protein, 7 aa, synthetic construct
TIRQREV

SEQ ID NO: 149947 - protein, 7 aa, synthetic construct
TIRSELK

SEQ ID NO: 149948 - protein, 7 aa, synthetic construct
TISGHQR

SEQ ID NO: 149949 - protein, 7 aa, synthetic construct
TISGSYR

SEQ ID NO: 149950 - protein, 7 aa, synthetic construct
TISHGIK

SEQ ID NO: 149951 - protein, 7 aa, synthetic construct
TISQSRA

SEQ ID NO: 149952 - protein, 7 aa, synthetic construct
TITNSKW

SEQ ID NO: 149953 - protein, 7 aa, synthetic construct
TITPRHM

SEQ ID NO: 149954 - protein, 7 aa, synthetic construct
TITPRST

SEQ ID NO: 149955 - protein, 7 aa, synthetic construct
TITQSRQ

SEQ ID NO: 149956 - protein, 7 aa, synthetic construct
TIYGSNK

SEQ ID NO: 149957 - protein, 7 aa, synthetic construct
TIYNPTK

SEQ ID NO: 149958 - protein, 7 aa, synthetic construct
TIYQSTS

SEQ ID NO: 149959 - protein, 7 aa, synthetic construct
TIYTKDK

SEQ ID NO: 149960 - protein, 7 aa, synthetic construct
TKAAHDK

SEQ ID NO: 149961 - protein, 7 aa, synthetic construct
TKAAQPF

SEQ ID NO: 149962 - protein, 7 aa, synthetic construct
TKAAYSH

SEQ ID NO: 149963 - protein, 7 aa, synthetic construct
TKADKDR

SEQ ID NO: 149964 - protein, 7 aa, synthetic construct
TKADWNK

SEQ ID NO: 149965 - protein, 7 aa, synthetic construct
TKAESMR

SEQ ID NO: 149966 - protein, 7 aa, synthetic construct
TKAEYIR

SEQ ID NO: 149967 - protein, 7 aa, synthetic construct
TKAGLHM

SEQ ID NO: 149968 - protein, 7 aa, synthetic construct
TKAGYPL

SEQ ID NO: 149969 - protein, 7 aa, synthetic construct
TKAHNAF

SEQ ID NO: 149970 - protein, 7 aa, synthetic construct
TKAHPFM

SEQ ID NO: 149971 - protein, 7 aa, synthetic construct
TKAHSNY

SEQ ID NO: 149972 - protein, 7 aa, synthetic construct
TKAHSYL

SEQ ID NO: 149973 - protein, 7 aa, synthetic construct
TKAIENR

SEQ ID NO: 149974 - protein, 7 aa, synthetic construct
TKALGYQ

SEQ ID NO: 149975 - protein, 7 aa, synthetic construct
TKAMESK

SEQ ID NO: 149976 - protein, 7 aa, synthetic construct
TKAMHLT

SEQ ID NO: 149977 - protein, 7 aa, synthetic construct
TKAMIQI

SEQ ID NO: 149978 - protein, 7 aa, synthetic construct
TKAMPIL

SEQ ID NO: 149979 - protein, 7 aa, synthetic construct
TKAQYSQ

SEQ ID NO: 149980 - protein, 7 aa, synthetic construct
TKARFDP

SEQ ID NO: 149981 - protein, 7 aa, synthetic construct
TKATFER

SEQ ID NO: 149982 - protein, 7 aa, synthetic construct
TKATYGG

SEQ ID NO: 149983 - protein, 7 aa, synthetic construct
TKAVGPY

SEQ ID NO: 149984 - protein, 7 aa, synthetic construct
TKAYAMV

SEQ ID NO: 149985 - protein, 7 aa, synthetic construct
TKAYLHG

SEQ ID NO: 149986 - protein, 7 aa, synthetic construct
TKAYQVQ

SEQ ID NO: 149987 - protein, 7 aa, synthetic construct
TKAYTNP

SEQ ID NO: 149988 - protein, 7 aa, synthetic construct
TKAYVRE

SEQ ID NO: 149989 - protein, 7 aa, synthetic construct
TKDFSTR

SEQ ID NO: 149990 - protein, 7 aa, synthetic construct
TKDGKMW

SEQ ID NO: 149991 - protein, 7 aa, synthetic construct
TKDGKWS

SEQ ID NO: 149992 - protein, 7 aa, synthetic construct
TKDGNKW

SEQ ID NO: 149993 - protein, 7 aa, synthetic construct
TKDGPSR

SEQ ID NO: 149994 - protein, 7 aa, synthetic construct
TKDHLYK

SEQ ID NO: 149995 - protein, 7 aa, synthetic construct
TKDHRLQ

SEQ ID NO: 149996 - protein, 7 aa, synthetic construct
TKDHRMV

SEQ ID NO: 149997 - protein, 7 aa, synthetic construct
TKDLKFY

SEQ ID NO: 149998 - protein, 7 aa, synthetic construct
TKDLSGK

SEQ ID NO: 149999 - protein, 7 aa, synthetic construct
TKDNIHR

SEQ ID NO: 150000 - protein, 7 aa, synthetic construct
TKDPIPR

SEQ ID NO: 150001 - protein, 7 aa, synthetic construct
TKDSKHF

SEQ ID NO: 150002 - protein, 7 aa, synthetic construct
TKDTVGR

SEQ ID NO: 150003 - protein, 7 aa, synthetic construct
TKDTVKW

SEQ ID NO: 150004 - protein, 7 aa, synthetic construct
TKDVARY

SEQ ID NO: 150005 - protein, 7 aa, synthetic construct
TKDVRVY

SEQ ID NO: 150006 - protein, 7 aa, synthetic construct
TKDYIRS

SEQ ID NO: 150007 - protein, 7 aa, synthetic construct
TKDYTAK

SEQ ID NO: 150008 - protein, 7 aa, synthetic construct
TKEAAQR

SEQ ID NO: 150009 - protein, 7 aa, synthetic construct
TKEFRVM

SEQ ID NO: 150010 - protein, 7 aa, synthetic construct
TKEHVNW

SEQ ID NO: 150011 - protein, 7 aa, synthetic construct
TKEKHSW

SEQ ID NO: 150012 - protein, 7 aa, synthetic construct
TKELSGR

SEQ ID NO: 150013 - protein, 7 aa, synthetic construct
TKEMRYH

SEQ ID NO: 150014 - protein, 7 aa, synthetic construct
TKENARW

SEQ ID NO: 150015 - protein, 7 aa, synthetic construct
TKEQLGR

SEQ ID NO: 150016 - protein, 7 aa, synthetic construct
TKEQTRW

SEQ ID NO: 150017 - protein, 7 aa, synthetic construct
TKERLYT

SEQ ID NO: 150018 - protein, 7 aa, synthetic construct
TKERSSW

SEQ ID NO: 150019 - protein, 7 aa, synthetic construct
TKERYGG

SEQ ID NO: 150020 - protein, 7 aa, synthetic construct
TKESQRN

SEQ ID NO: 150021 - protein, 7 aa, synthetic construct
TKESRFN

SEQ ID NO: 150022 - protein, 7 aa, synthetic construct
TKESYRN

SEQ ID NO: 150023 - protein, 7 aa, synthetic construct
TKETFRN

SEQ ID NO: 150024 - protein, 7 aa, synthetic construct
TKETQQR

SEQ ID NO: 150025 - protein, 7 aa, synthetic construct
TKETRDK

SEQ ID NO: 150026 - protein, 7 aa, synthetic construct
TKETSKW

SEQ ID NO: 150027 - protein, 7 aa, synthetic construct
TKEVRYH

SEQ ID NO: 150028 - protein, 7 aa, synthetic construct
TKEYAVR

SEQ ID NO: 150029 - protein, 7 aa, synthetic construct
TKFAHTM

SEQ ID NO: 150030 - protein, 7 aa, synthetic construct
TKFDSVR

SEQ ID NO: 150031 - protein, 7 aa, synthetic construct
TKFEARQ

SEQ ID NO: 150032 - protein, 7 aa, synthetic construct
TKFEFKA

SEQ ID NO: 150033 - protein, 7 aa, synthetic construct
TKFHIGN

SEQ ID NO: 150034 - protein, 7 aa, synthetic construct
TKFKIDM

SEQ ID NO: 150035 - protein, 7 aa, synthetic construct
TKFKIND

SEQ ID NO: 150036 - protein, 7 aa, synthetic construct
TKFLGGN

SEQ ID NO: 150037 - protein, 7 aa, synthetic construct
TKFNSPA

SEQ ID NO: 150038 - protein, 7 aa, synthetic construct
TKFPARE

SEQ ID NO: 150039 - protein, 7 aa, synthetic construct
TKFPRAD

SEQ ID NO: 150040 - protein, 7 aa, synthetic construct
TKFQAAH

SEQ ID NO: 150041 - protein, 7 aa, synthetic construct
TKFQREI

SEQ ID NO: 150042 - protein, 7 aa, synthetic construct
TKFQSHN

SEQ ID NO: 150043 - protein, 7 aa, synthetic construct
TKFRMSE

SEQ ID NO: 150044 - protein, 7 aa, synthetic construct
TKFSRET

SEQ ID NO: 150045 - protein, 7 aa, synthetic construct
TKFSSNL

SEQ ID NO: 150046 - protein, 7 aa, synthetic construct
TKFTAHI

SEQ ID NO: 150047 - protein, 7 aa, synthetic construct
TKFTIHA

SEQ ID NO: 150048 - protein, 7 aa, synthetic construct
TKFTNAN

SEQ ID NO: 150049 - protein, 7 aa, synthetic construct
TKFTNDK

SEQ ID NO: 150050 - protein, 7 aa, synthetic construct
TKFVPTN

SEQ ID NO: 150051 - protein, 7 aa, synthetic construct
TKFVSQS

SEQ ID NO: 150052 - protein, 7 aa, synthetic construct
TKGADAR

SEQ ID NO: 150053 - protein, 7 aa, synthetic construct
TKGAHLT

SEQ ID NO: 150054 - protein, 7 aa, synthetic construct
TKGANYQ

SEQ ID NO: 150055 - protein, 7 aa, synthetic construct
TKGAYLP

SEQ ID NO: 150056 - protein, 7 aa, synthetic construct
TKGDLVR

SEQ ID NO: 150057 - protein, 7 aa, synthetic construct
TKGDRYI

SEQ ID NO: 150058 - protein, 7 aa, synthetic construct
TKGDTVR

SEQ ID NO: 150059 - protein, 7 aa, synthetic construct
TKGDVRH

SEQ ID NO: 150060 - protein, 7 aa, synthetic construct
TKGDYRI

SEQ ID NO: 150061 - protein, 7 aa, synthetic construct
TKGGDRA

SEQ ID NO: 150062 - protein, 7 aa, synthetic construct
TKGGTSW

SEQ ID NO: 150063 - protein, 7 aa, synthetic construct
TKGGYQV

SEQ ID NO: 150064 - protein, 7 aa, synthetic construct
TKGHAIY

SEQ ID NO: 150065 - protein, 7 aa, synthetic construct
TKGHINY

SEQ ID NO: 150066 - protein, 7 aa, synthetic construct
TKGHTNL

SEQ ID NO: 150067 - protein, 7 aa, synthetic construct
TKGIDRQ

SEQ ID NO: 150068 - protein, 7 aa, synthetic construct
TKGKSDT

SEQ ID NO: 150069 - protein, 7 aa, synthetic construct
TKGLTPF

SEQ ID NO: 150070 - protein, 7 aa, synthetic construct
TKGMAYT

SEQ ID NO: 150071 - protein, 7 aa, synthetic construct
TKGMVMH

SEQ ID NO: 150072 - protein, 7 aa, synthetic construct
TKGNHAF

SEQ ID NO: 150073 - protein, 7 aa, synthetic construct
TKGNLPF

SEQ ID NO: 150074 - protein, 7 aa, synthetic construct
TKGNPDR

SEQ ID NO: 150075 - protein, 7 aa, synthetic construct
TKGPAHL

SEQ ID NO: 150076 - protein, 7 aa, synthetic construct
TKGPLQH

SEQ ID NO: 150077 - protein, 7 aa, synthetic construct
TKGPVMF

SEQ ID NO: 150078 - protein, 7 aa, synthetic construct
TKGQLYH

SEQ ID NO: 150079 - protein, 7 aa, synthetic construct
TKGRETY

SEQ ID NO: 150080 - protein, 7 aa, synthetic construct
TKGRFPE

SEQ ID NO: 150081 - protein, 7 aa, synthetic construct
TKGRGES

SEQ ID NO: 150082 - protein, 7 aa, synthetic construct
TKGVNYA

SEQ ID NO: 150083 - protein, 7 aa, synthetic construct
TKGYIEK

SEQ ID NO: 150084 - protein, 7 aa, synthetic construct
TKGYSVV

SEQ ID NO: 150085 - protein, 7 aa, synthetic construct
TKGYTIS

SEQ ID NO: 150086 - protein, 7 aa, synthetic construct
TKGYTSN

SEQ ID NO: 150087 - protein, 7 aa, synthetic construct
TKGYVHS

SEQ ID NO: 150088 - protein, 7 aa, synthetic construct
TKHAIPH

SEQ ID NO: 150089 - protein, 7 aa, synthetic construct
TKHAITI

SEQ ID NO: 150090 - protein, 7 aa, synthetic construct
TKHALNV

SEQ ID NO: 150091 - protein, 7 aa, synthetic construct
TKHAMTM

SEQ ID NO: 150092 - protein, 7 aa, synthetic construct
TKHAPIF

SEQ ID NO: 150093 - protein, 7 aa, synthetic construct
TKHAVSV

SEQ ID NO: 150094 - protein, 7 aa, synthetic construct
TKHDSRM

SEQ ID NO: 150095 - protein, 7 aa, synthetic construct
TKHDSWS

SEQ ID NO: 150096 - protein, 7 aa, synthetic construct
TKHEHFT

SEQ ID NO: 150097 - protein, 7 aa, synthetic construct
TKHEQRV

SEQ ID NO: 150098 - protein, 7 aa, synthetic construct
TKHESKV

SEQ ID NO: 150099 - protein, 7 aa, synthetic construct
TKHFLTG

SEQ ID NO: 150100 - protein, 7 aa, synthetic construct
TKHFMTG

SEQ ID NO: 150101 - protein, 7 aa, synthetic construct
TKHGFAS

SEQ ID NO: 150102 - protein, 7 aa, synthetic construct
TKHGINV

SEQ ID NO: 150103 - protein, 7 aa, synthetic construct
TKHGIVI

SEQ ID NO: 150104 - protein, 7 aa, synthetic construct
TKHGMNI

SEQ ID NO: 150105 - protein, 7 aa, synthetic construct
TKHGNLF

SEQ ID NO: 150106 - protein, 7 aa, synthetic construct
TKHGTQL

SEQ ID NO: 150107 - protein, 7 aa, synthetic construct
TKHGVLL

SEQ ID NO: 150108 - protein, 7 aa, synthetic construct
TKHHPPP

SEQ ID NO: 150109 - protein, 7 aa, synthetic construct
TKHIDMR

SEQ ID NO: 150110 - protein, 7 aa, synthetic construct
TKHIGNP

SEQ ID NO: 150111 - protein, 7 aa, synthetic construct
TKHIPIS

SEQ ID NO: 150112 - protein, 7 aa, synthetic construct
TKHISSY

SEQ ID NO: 150113 - protein, 7 aa, synthetic construct
TKHISYA

SEQ ID NO: 150114 - protein, 7 aa, synthetic construct
TKHIYAA

SEQ ID NO: 150115 - protein, 7 aa, synthetic construct
TKHLGAV

SEQ ID NO: 150116 - protein, 7 aa, synthetic construct
TKHLNLQ

SEQ ID NO: 150117 - protein, 7 aa, synthetic construct
TKHLPSM

SEQ ID NO: 150118 - protein, 7 aa, synthetic construct
TKHLPSS

SEQ ID NO: 150119 - protein, 7 aa, synthetic construct
TKHMYPA

SEQ ID NO: 150120 - protein, 7 aa, synthetic construct
TKHNPGT

SEQ ID NO: 150121 - protein, 7 aa, synthetic construct
TKHPASF

SEQ ID NO: 150122 - protein, 7 aa, synthetic construct
TKHPIPF

SEQ ID NO: 150123 - protein, 7 aa, synthetic construct
TKHPQMH

SEQ ID NO: 150124 - protein, 7 aa, synthetic construct
TKHPSFS

SEQ ID NO: 150125 - protein, 7 aa, synthetic construct
TKHPVNF

SEQ ID NO: 150126 - protein, 7 aa, synthetic construct
TKHQIVH

SEQ ID NO: 150127 - protein, 7 aa, synthetic construct
TKHQLIV

SEQ ID NO: 150128 - protein, 7 aa, synthetic construct
TKHQQIQ

SEQ ID NO: 150129 - protein, 7 aa, synthetic construct
TKHQQSI

SEQ ID NO: 150130 - protein, 7 aa, synthetic construct
TKHQVAQ

SEQ ID NO: 150131 - protein, 7 aa, synthetic construct
TKHQVSI

SEQ ID NO: 150132 - protein, 7 aa, synthetic construct
TKHRLME

SEQ ID NO: 150133 - protein, 7 aa, synthetic construct
TKHSAYA

SEQ ID NO: 150134 - protein, 7 aa, synthetic construct
TKHSLSV

SEQ ID NO: 150135 - protein, 7 aa, synthetic construct
TKHSPRD

SEQ ID NO: 150136 - protein, 7 aa, synthetic construct
TKHTNAY

SEQ ID NO: 150137 - protein, 7 aa, synthetic construct
TKHTNFN

SEQ ID NO: 150138 - protein, 7 aa, synthetic construct
TKHTQVY

SEQ ID NO: 150139 - protein, 7 aa, synthetic construct
TKHTVNH

SEQ ID NO: 150140 - protein, 7 aa, synthetic construct
TKHTYGN

SEQ ID NO: 150141 - protein, 7 aa, synthetic construct
TKHTYSA

SEQ ID NO: 150142 - protein, 7 aa, synthetic construct
TKHVNQQ

SEQ ID NO: 150143 - protein, 7 aa, synthetic construct
TKHVPKD

SEQ ID NO: 150144 - protein, 7 aa, synthetic construct
TKHVVSY

SEQ ID NO: 150145 - protein, 7 aa, synthetic construct
TKHYIKD

SEQ ID NO: 150146 - protein, 7 aa, synthetic construct
TKHYIQS

SEQ ID NO: 150147 - protein, 7 aa, synthetic construct
TKHYTTM

SEQ ID NO: 150148 - protein, 7 aa, synthetic construct
TKIAMHP

SEQ ID NO: 150149 - protein, 7 aa, synthetic construct
TKIHAPF

SEQ ID NO: 150150 - protein, 7 aa, synthetic construct
TKIKESW

SEQ ID NO: 150151 - protein, 7 aa, synthetic construct
TKINEGR

SEQ ID NO: 150152 - protein, 7 aa, synthetic construct
TKINRDV

SEQ ID NO: 150153 - protein, 7 aa, synthetic construct
TKIPASF

SEQ ID NO: 150154 - protein, 7 aa, synthetic construct
TKIPSIV

SEQ ID NO: 150155 - protein, 7 aa, synthetic construct
TKIQHAF

SEQ ID NO: 150156 - protein, 7 aa, synthetic construct
TKIQNQY

SEQ ID NO: 150157 - protein, 7 aa, synthetic construct
TKKDTWL

SEQ ID NO: 150158 - protein, 7 aa, synthetic construct
TKKDTYY

SEQ ID NO: 150159 - protein, 7 aa, synthetic construct
TKKETYY

SEQ ID NO: 150160 - protein, 7 aa, synthetic construct
TKKMEFY

SEQ ID NO: 150161 - protein, 7 aa, synthetic construct
TKKTLDM

SEQ ID NO: 150162 - protein, 7 aa, synthetic construct
TKKVPDL

SEQ ID NO: 150163 - protein, 7 aa, synthetic construct
TKLDSHR

SEQ ID NO: 150164 - protein, 7 aa, synthetic construct
TKLGGVF

SEQ ID NO: 150165 - protein, 7 aa, synthetic construct
TKLHIST

SEQ ID NO: 150166 - protein, 7 aa, synthetic construct
TKLHTPF

SEQ ID NO: 150167 - protein, 7 aa, synthetic construct
TKLKLEL

SEQ ID NO: 150168 - protein, 7 aa, synthetic construct
TKLPGGL

SEQ ID NO: 150169 - protein, 7 aa, synthetic construct
TKLPQTL

SEQ ID NO: 150170 - protein, 7 aa, synthetic construct
TKLPSFN

SEQ ID NO: 150171 - protein, 7 aa, synthetic construct
TKLTRHD

SEQ ID NO: 150172 - protein, 7 aa, synthetic construct
TKLTRYD

SEQ ID NO: 150173 - protein, 7 aa, synthetic construct
TKLVSAY

SEQ ID NO: 150174 - protein, 7 aa, synthetic construct
TKLYDKT

SEQ ID NO: 150175 - protein, 7 aa, synthetic construct
TKMALYN

SEQ ID NO: 150176 - protein, 7 aa, synthetic construct
TKMERPT

SEQ ID NO: 150177 - protein, 7 aa, synthetic construct
TKMGHSL

SEQ ID NO: 150178 - protein, 7 aa, synthetic construct
TKMGHSQ

SEQ ID NO: 150179 - protein, 7 aa, synthetic construct
TKMGIHV

SEQ ID NO: 150180 - protein, 7 aa, synthetic construct
TKMHPTT

SEQ ID NO: 150181 - protein, 7 aa, synthetic construct
TKMHQQF

SEQ ID NO: 150182 - protein, 7 aa, synthetic construct
TKMMHER

SEQ ID NO: 150183 - protein, 7 aa, synthetic construct
TKMMPLS

SEQ ID NO: 150184 - protein, 7 aa, synthetic construct
TKMNRDQ

SEQ ID NO: 150185 - protein, 7 aa, synthetic construct
TKMPIVN

SEQ ID NO: 150186 - protein, 7 aa, synthetic construct
TKMPMAN

SEQ ID NO: 150187 - protein, 7 aa, synthetic construct
TKMPQIV

SEQ ID NO: 150188 - protein, 7 aa, synthetic construct
TKMQHTY

SEQ ID NO: 150189 - protein, 7 aa, synthetic construct
TKMRADT

SEQ ID NO: 150190 - protein, 7 aa, synthetic construct
TKMRESF

SEQ ID NO: 150191 - protein, 7 aa, synthetic construct
TKMRNEN

SEQ ID NO: 150192 - protein, 7 aa, synthetic construct
TKMRTDT

SEQ ID NO: 150193 - protein, 7 aa, synthetic construct
TKMRYEG

SEQ ID NO: 150194 - protein, 7 aa, synthetic construct
TKMSMHV

SEQ ID NO: 150195 - protein, 7 aa, synthetic construct
TKMVGNF

SEQ ID NO: 150196 - protein, 7 aa, synthetic construct
TKMVKVP

SEQ ID NO: 150197 - protein, 7 aa, synthetic construct
TKMYEKA

SEQ ID NO: 150198 - protein, 7 aa, synthetic construct
TKMYRAE

SEQ ID NO: 150199 - protein, 7 aa, synthetic construct
TKMYTSG

SEQ ID NO: 150200 - protein, 7 aa, synthetic construct
TKNAAFH

SEQ ID NO: 150201 - protein, 7 aa, synthetic construct
TKNAYPM

SEQ ID NO: 150202 - protein, 7 aa, synthetic construct
TKNDNSK

SEQ ID NO: 150203 - protein, 7 aa, synthetic construct
TKNDPKW

SEQ ID NO: 150204 - protein, 7 aa, synthetic construct
TKNDVMK

SEQ ID NO: 150205 - protein, 7 aa, synthetic construct
TKNEMVR

SEQ ID NO: 150206 - protein, 7 aa, synthetic construct
TKNERVV

SEQ ID NO: 150207 - protein, 7 aa, synthetic construct
TKNFEGR

SEQ ID NO: 150208 - protein, 7 aa, synthetic construct
TKNFKDL

SEQ ID NO: 150209 - protein, 7 aa, synthetic construct
TKNFSQI

SEQ ID NO: 150210 - protein, 7 aa, synthetic construct
TKNFTHA

SEQ ID NO: 150211 - protein, 7 aa, synthetic construct
TKNFVDK

SEQ ID NO: 150212 - protein, 7 aa, synthetic construct
TKNHVPT

SEQ ID NO: 150213 - protein, 7 aa, synthetic construct
TKNKDLF

SEQ ID NO: 150214 - protein, 7 aa, synthetic construct
TKNKGYD

SEQ ID NO: 150215 - protein, 7 aa, synthetic construct
TKNNYGL

SEQ ID NO: 150216 - protein, 7 aa, synthetic construct
TKNPNMF

SEQ ID NO: 150217 - protein, 7 aa, synthetic construct
TKNRTDT

SEQ ID NO: 150218 - protein, 7 aa, synthetic construct
TKNYAAA

SEQ ID NO: 150219 - protein, 7 aa, synthetic construct
TKNYETK

SEQ ID NO: 150220 - protein, 7 aa, synthetic construct
TKNYISS

SEQ ID NO: 150221 - protein, 7 aa, synthetic construct
TKNYQVI

SEQ ID NO: 150222 - protein, 7 aa, synthetic construct
TKNYVAT

SEQ ID NO: 150223 - protein, 7 aa, synthetic construct
TKNYVQN

SEQ ID NO: 150224 - protein, 7 aa, synthetic construct
TKPASYS

SEQ ID NO: 150225 - protein, 7 aa, synthetic construct
TKPDISR

SEQ ID NO: 150226 - protein, 7 aa, synthetic construct
TKPDMTR

SEQ ID NO: 150227 - protein, 7 aa, synthetic construct
TKPDQIR

SEQ ID NO: 150228 - protein, 7 aa, synthetic construct
TKPFNQL

SEQ ID NO: 150229 - protein, 7 aa, synthetic construct
TKPFPIA

SEQ ID NO: 150230 - protein, 7 aa, synthetic construct
TKPFQHQ

SEQ ID NO: 150231 - protein, 7 aa, synthetic construct
TKPFSVS

SEQ ID NO: 150232 - protein, 7 aa, synthetic construct
TKPGGLW

SEQ ID NO: 150233 - protein, 7 aa, synthetic construct
TKPGTFV

SEQ ID NO: 150234 - protein, 7 aa, synthetic construct
TKPGTPY

SEQ ID NO: 150235 - protein, 7 aa, synthetic construct
TKPHHGA

SEQ ID NO: 150236 - protein, 7 aa, synthetic construct
TKPHQMF

SEQ ID NO: 150237 - protein, 7 aa, synthetic construct
TKPHVNH

SEQ ID NO: 150238 - protein, 7 aa, synthetic construct
TKPIGPI

SEQ ID NO: 150239 - protein, 7 aa, synthetic construct
TKPISHN

SEQ ID NO: 150240 - protein, 7 aa, synthetic construct
TKPITIY

SEQ ID NO: 150241 - protein, 7 aa, synthetic construct
TKPIVYS

SEQ ID NO: 150242 - protein, 7 aa, synthetic construct
TKPLTAF

SEQ ID NO: 150243 - protein, 7 aa, synthetic construct
TKPMYGT

SEQ ID NO: 150244 - protein, 7 aa, synthetic construct
TKPNASW

SEQ ID NO: 150245 - protein, 7 aa, synthetic construct
TKPNNYI

SEQ ID NO: 150246 - protein, 7 aa, synthetic construct
TKPNTHY

SEQ ID NO: 150247 - protein, 7 aa, synthetic construct
TKPNVYN

SEQ ID NO: 150248 - protein, 7 aa, synthetic construct
TKPPTIH

SEQ ID NO: 150249 - protein, 7 aa, synthetic construct
TKPQIHM

SEQ ID NO: 150250 - protein, 7 aa, synthetic construct
TKPQLGW

SEQ ID NO: 150251 - protein, 7 aa, synthetic construct
TKPQLSY

SEQ ID NO: 150252 - protein, 7 aa, synthetic construct
TKPQMYN

SEQ ID NO: 150253 - protein, 7 aa, synthetic construct
TKPRMDT

SEQ ID NO: 150254 - protein, 7 aa, synthetic construct
TKPSHYP

SEQ ID NO: 150255 - protein, 7 aa, synthetic construct
TKPSTNY

SEQ ID NO: 150256 - protein, 7 aa, synthetic construct
TKPSYKD

SEQ ID NO: 150257 - protein, 7 aa, synthetic construct
TKPTHNL

SEQ ID NO: 150258 - protein, 7 aa, synthetic construct
TKPVHSY

SEQ ID NO: 150259 - protein, 7 aa, synthetic construct
TKPVMAY

SEQ ID NO: 150260 - protein, 7 aa, synthetic construct
TKPYNGY

SEQ ID NO: 150261 - protein, 7 aa, synthetic construct
TKPYQTM

SEQ ID NO: 150262 - protein, 7 aa, synthetic construct
TKPYTVS

SEQ ID NO: 150263 - protein, 7 aa, synthetic construct
TKQAMEK

SEQ ID NO: 150264 - protein, 7 aa, synthetic construct
TKQARND

SEQ ID NO: 150265 - protein, 7 aa, synthetic construct
TKQAVAW

SEQ ID NO: 150266 - protein, 7 aa, synthetic construct
TKQAVKP

SEQ ID NO: 150267 - protein, 7 aa, synthetic construct
TKQDAQR

SEQ ID NO: 150268 - protein, 7 aa, synthetic construct
TKQDASK

SEQ ID NO: 150269 - protein, 7 aa, synthetic construct
TKQDIVR

SEQ ID NO: 150270 - protein, 7 aa, synthetic construct
TKQDKAY

SEQ ID NO: 150271 - protein, 7 aa, synthetic construct
TKQDVTR

SEQ ID NO: 150272 - protein, 7 aa, synthetic construct
TKQEFNR

SEQ ID NO: 150273 - protein, 7 aa, synthetic construct
TKQEHRQ

SEQ ID NO: 150274 - protein, 7 aa, synthetic construct
TKQFEQR

SEQ ID NO: 150275 - protein, 7 aa, synthetic construct
TKQFPAN

SEQ ID NO: 150276 - protein, 7 aa, synthetic construct
TKQGHHL

SEQ ID NO: 150277 - protein, 7 aa, synthetic construct
TKQGQQW

SEQ ID NO: 150278 - protein, 7 aa, synthetic construct
TKQHAII

SEQ ID NO: 150279 - protein, 7 aa, synthetic construct
TKQHMLT

SEQ ID NO: 150280 - protein, 7 aa, synthetic construct
TKQHSLY

SEQ ID NO: 150281 - protein, 7 aa, synthetic construct
TKQHYKD

SEQ ID NO: 150282 - protein, 7 aa, synthetic construct
TKQINDR

SEQ ID NO: 150283 - protein, 7 aa, synthetic construct
TKQIYVN

SEQ ID NO: 150284 - protein, 7 aa, synthetic construct
TKQLGFV

SEQ ID NO: 150285 - protein, 7 aa, synthetic construct
TKQLGNY

SEQ ID NO: 150286 - protein, 7 aa, synthetic construct
TKQLPHP

SEQ ID NO: 150287 - protein, 7 aa, synthetic construct
TKQLSPM

SEQ ID NO: 150288 - protein, 7 aa, synthetic construct
TKQMMHV

SEQ ID NO: 150289 - protein, 7 aa, synthetic construct
TKQMQYA

SEQ ID NO: 150290 - protein, 7 aa, synthetic construct
TKQNHFS

SEQ ID NO: 150291 - protein, 7 aa, synthetic construct
TKQNPAY

SEQ ID NO: 150292 - protein, 7 aa, synthetic construct
TKQPEGK

SEQ ID NO: 150293 - protein, 7 aa, synthetic construct
TKQPHVV

SEQ ID NO: 150294 - protein, 7 aa, synthetic construct
TKQPIHV

SEQ ID NO: 150295 - protein, 7 aa, synthetic construct
TKQPQYH

SEQ ID NO: 150296 - protein, 7 aa, synthetic construct
TKQPVFI

SEQ ID NO: 150297 - protein, 7 aa, synthetic construct
TKQQYIV

SEQ ID NO: 150298 - protein, 7 aa, synthetic construct
TKQRDDR

SEQ ID NO: 150299 - protein, 7 aa, synthetic construct
TKQVYSP

SEQ ID NO: 150300 - protein, 7 aa, synthetic construct
TKQYAIP

SEQ ID NO: 150301 - protein, 7 aa, synthetic construct
TKQYINM

SEQ ID NO: 150302 - protein, 7 aa, synthetic construct
TKQYKSE

SEQ ID NO: 150303 - protein, 7 aa, synthetic construct
TKQYNLN

SEQ ID NO: 150304 - protein, 7 aa, synthetic construct
TKQYSLN

SEQ ID NO: 150305 - protein, 7 aa, synthetic construct
TKQYSSS

SEQ ID NO: 150306 - protein, 7 aa, synthetic construct
TKRDPYN

SEQ ID NO: 150307 - protein, 7 aa, synthetic construct
TKRDSFI

SEQ ID NO: 150308 - protein, 7 aa, synthetic construct
TKRDTHV

SEQ ID NO: 150309 - protein, 7 aa, synthetic construct
TKRDVAL

SEQ ID NO: 150310 - protein, 7 aa, synthetic construct
TKREDRS

SEQ ID NO: 150311 - protein, 7 aa, synthetic construct
TKRETYM

SEQ ID NO: 150312 - protein, 7 aa, synthetic construct
TKREVPH

SEQ ID NO: 150313 - protein, 7 aa, synthetic construct
TKRITAD

SEQ ID NO: 150314 - protein, 7 aa, synthetic construct
TKRLDWD

SEQ ID NO: 150315 - protein, 7 aa, synthetic construct
TKRLGDV

SEQ ID NO: 150316 - protein, 7 aa, synthetic construct
TKRLMSE

SEQ ID NO: 150317 - protein, 7 aa, synthetic construct
TKRNMSE

SEQ ID NO: 150318 - protein, 7 aa, synthetic construct
TKRPEPF

SEQ ID NO: 150319 - protein, 7 aa, synthetic construct
TKRPVSE

SEQ ID NO: 150320 - protein, 7 aa, synthetic construct
TKRQFQE

SEQ ID NO: 150321 - protein, 7 aa, synthetic construct
TKRTIEM

SEQ ID NO: 150322 - protein, 7 aa, synthetic construct
TKRVEYV

SEQ ID NO: 150323 - protein, 7 aa, synthetic construct
TKSDKHI

SEQ ID NO: 150324 - protein, 7 aa, synthetic construct
TKSFIQS

SEQ ID NO: 150325 - protein, 7 aa, synthetic construct
TKSGDWK

SEQ ID NO: 150326 - protein, 7 aa, synthetic construct
TKSGHIY

SEQ ID NO: 150327 - protein, 7 aa, synthetic construct
TKSHPTY

SEQ ID NO: 150328 - protein, 7 aa, synthetic construct
TKSHYSV

SEQ ID NO: 150329 - protein, 7 aa, synthetic construct
TKSIHFP

SEQ ID NO: 150330 - protein, 7 aa, synthetic construct
TKSLGAY

SEQ ID NO: 150331 - protein, 7 aa, synthetic construct
TKSPHIL

SEQ ID NO: 150332 - protein, 7 aa, synthetic construct
TKSQEAK

SEQ ID NO: 150333 - protein, 7 aa, synthetic construct
TKSQWND

SEQ ID NO: 150334 - protein, 7 aa, synthetic construct
TKSREYN

SEQ ID NO: 150335 - protein, 7 aa, synthetic construct
TKSSHVH

SEQ ID NO: 150336 - protein, 7 aa, synthetic construct
TKSTAYI

SEQ ID NO: 150337 - protein, 7 aa, synthetic construct
TKSTRSD

SEQ ID NO: 150338 - protein, 7 aa, synthetic construct
TKSTYAL

SEQ ID NO: 150339 - protein, 7 aa, synthetic construct
TKSVSHL

SEQ ID NO: 150340 - protein, 7 aa, synthetic construct
TKSYAAP

SEQ ID NO: 150341 - protein, 7 aa, synthetic construct
TKSYTMQ

SEQ ID NO: 150342 - protein, 7 aa, synthetic construct
TKSYTST

SEQ ID NO: 150343 - protein, 7 aa, synthetic construct
TKTADGR

SEQ ID NO: 150344 - protein, 7 aa, synthetic construct
TKTEQFG

SEQ ID NO: 150345 - protein, 7 aa, synthetic construct
TKTFEAR

SEQ ID NO: 150346 - protein, 7 aa, synthetic construct
TKTGTQW

SEQ ID NO: 150347 - protein, 7 aa, synthetic construct
TKTHAQF

SEQ ID NO: 150348 - protein, 7 aa, synthetic construct
TKTHESR

SEQ ID NO: 150349 - protein, 7 aa, synthetic construct
TKTHIGY

SEQ ID NO: 150350 - protein, 7 aa, synthetic construct
TKTHYAV

SEQ ID NO: 150351 - protein, 7 aa, synthetic construct
TKTLDRY

SEQ ID NO: 150352 - protein, 7 aa, synthetic construct
TKTLHHM

SEQ ID NO: 150353 - protein, 7 aa, synthetic construct
TKTLRGD

SEQ ID NO: 150354 - protein, 7 aa, synthetic construct
TKTMSFS

SEQ ID NO: 150355 - protein, 7 aa, synthetic construct
TKTNPFS

SEQ ID NO: 150356 - protein, 7 aa, synthetic construct
TKTNRYD

SEQ ID NO: 150357 - protein, 7 aa, synthetic construct
TKTQDQR

SEQ ID NO: 150358 - protein, 7 aa, synthetic construct
TKTVRHD

SEQ ID NO: 150359 - protein, 7 aa, synthetic construct
TKTVSNY

SEQ ID NO: 150360 - protein, 7 aa, synthetic construct
TKTYAST

SEQ ID NO: 150361 - protein, 7 aa, synthetic construct
TKTYISA

SEQ ID NO: 150362 - protein, 7 aa, synthetic construct
TKTYLTS

SEQ ID NO: 150363 - protein, 7 aa, synthetic construct
TKTYMRD

SEQ ID NO: 150364 - protein, 7 aa, synthetic construct
TKTYNAN

SEQ ID NO: 150365 - protein, 7 aa, synthetic construct
TKTYNIT

SEQ ID NO: 150366 - protein, 7 aa, synthetic construct
TKTYNTL

SEQ ID NO: 150367 - protein, 7 aa, synthetic construct
TKTYPST

SEQ ID NO: 150368 - protein, 7 aa, synthetic construct
TKTYTQH

SEQ ID NO: 150369 - protein, 7 aa, synthetic construct
TKVAPHF

SEQ ID NO: 150370 - protein, 7 aa, synthetic construct
TKVARYE

SEQ ID NO: 150371 - protein, 7 aa, synthetic construct
TKVENTR

SEQ ID NO: 150372 - protein, 7 aa, synthetic construct
TKVHNVH

SEQ ID NO: 150373 - protein, 7 aa, synthetic construct
TKVHPIS

SEQ ID NO: 150374 - protein, 7 aa, synthetic construct
TKVHQDR

SEQ ID NO: 150375 - protein, 7 aa, synthetic construct
TKVIGNY

SEQ ID NO: 150376 - protein, 7 aa, synthetic construct
TKVKLVP

SEQ ID NO: 150377 - protein, 7 aa, synthetic construct
TKVKNEY

SEQ ID NO: 150378 - protein, 7 aa, synthetic construct
TKVKNYE

SEQ ID NO: 150379 - protein, 7 aa, synthetic construct
TKVNQIF

SEQ ID NO: 150380 - protein, 7 aa, synthetic construct
TKVPMNI

SEQ ID NO: 150381 - protein, 7 aa, synthetic construct
TKVPYTT

SEQ ID NO: 150382 - protein, 7 aa, synthetic construct
TKVRFGE

SEQ ID NO: 150383 - protein, 7 aa, synthetic construct
TKVTEAR

SEQ ID NO: 150384 - protein, 7 aa, synthetic construct
TKVVQYS

SEQ ID NO: 150385 - protein, 7 aa, synthetic construct
TKVYDKN

SEQ ID NO: 150386 - protein, 7 aa, synthetic construct
TKVYVRD

SEQ ID NO: 150387 - protein, 7 aa, synthetic construct
TKWNNYD

SEQ ID NO: 150388 - protein, 7 aa, synthetic construct
TKWPSPD

SEQ ID NO: 150389 - protein, 7 aa, synthetic construct
TKWSLKE

SEQ ID NO: 150390 - protein, 7 aa, synthetic construct
TKWSQNA

SEQ ID NO: 150391 - protein, 7 aa, synthetic construct
TKYAGGV

SEQ ID NO: 150392 - protein, 7 aa, synthetic construct
TKYAPDR

SEQ ID NO: 150393 - protein, 7 aa, synthetic construct
TKYAPHN

SEQ ID NO: 150394 - protein, 7 aa, synthetic construct
TKYAQAN

SEQ ID NO: 150395 - protein, 7 aa, synthetic construct
TKYDPIK

SEQ ID NO: 150396 - protein, 7 aa, synthetic construct
TKYEKSQ

SEQ ID NO: 150397 - protein, 7 aa, synthetic construct
TKYEQTK

SEQ ID NO: 150398 - protein, 7 aa, synthetic construct
TKYGEKQ

SEQ ID NO: 150399 - protein, 7 aa, synthetic construct
TKYGLEK

SEQ ID NO: 150400 - protein, 7 aa, synthetic construct
TKYGPGS

SEQ ID NO: 150401 - protein, 7 aa, synthetic construct
TKYGPHS

SEQ ID NO: 150402 - protein, 7 aa, synthetic construct
TKYGPSI

SEQ ID NO: 150403 - protein, 7 aa, synthetic construct
TKYGTEK

SEQ ID NO: 150404 - protein, 7 aa, synthetic construct
TKYIQSN

SEQ ID NO: 150405 - protein, 7 aa, synthetic construct
TKYKADA

SEQ ID NO: 150406 - protein, 7 aa, synthetic construct
TKYKTSE

SEQ ID NO: 150407 - protein, 7 aa, synthetic construct
TKYLPDK

SEQ ID NO: 150408 - protein, 7 aa, synthetic construct
TKYLTGG

SEQ ID NO: 150409 - protein, 7 aa, synthetic construct
TKYNIHA

SEQ ID NO: 150410 - protein, 7 aa, synthetic construct
TKYNMGV

SEQ ID NO: 150411 - protein, 7 aa, synthetic construct
TKYNNVI

SEQ ID NO: 150412 - protein, 7 aa, synthetic construct
TKYNVIA

SEQ ID NO: 150413 - protein, 7 aa, synthetic construct
TKYPAER

SEQ ID NO: 150414 - protein, 7 aa, synthetic construct
TKYPANN

SEQ ID NO: 150415 - protein, 7 aa, synthetic construct
TKYPMIP

SEQ ID NO: 150416 - protein, 7 aa, synthetic construct
TKYPSIP

SEQ ID NO: 150417 - protein, 7 aa, synthetic construct
TKYPSLN

SEQ ID NO: 150418 - protein, 7 aa, synthetic construct
TKYPTMV

SEQ ID NO: 150419 - protein, 7 aa, synthetic construct
TKYQEKH

SEQ ID NO: 150420 - protein, 7 aa, synthetic construct
TKYQPSV

SEQ ID NO: 150421 - protein, 7 aa, synthetic construct
TKYQSAV

SEQ ID NO: 150422 - protein, 7 aa, synthetic construct
TKYQTSL

SEQ ID NO: 150423 - protein, 7 aa, synthetic construct
TKYSHGI

SEQ ID NO: 150424 - protein, 7 aa, synthetic construct
TKYSIGN

SEQ ID NO: 150425 - protein, 7 aa, synthetic construct
TKYSSIG

SEQ ID NO: 150426 - protein, 7 aa, synthetic construct
TKYTMSA

SEQ ID NO: 150427 - protein, 7 aa, synthetic construct
TKYTQAN

SEQ ID NO: 150428 - protein, 7 aa, synthetic construct
TKYTVAA

SEQ ID NO: 150429 - protein, 7 aa, synthetic construct
TKYTVPT

SEQ ID NO: 150430 - protein, 7 aa, synthetic construct
TKYVASA

SEQ ID NO: 150431 - protein, 7 aa, synthetic construct
TKYVHSA

SEQ ID NO: 150432 - protein, 7 aa, synthetic construct
TKYVNDK

SEQ ID NO: 150433 - protein, 7 aa, synthetic construct
TKYVPDK

SEQ ID NO: 150434 - protein, 7 aa, synthetic construct
TKYVQSI

SEQ ID NO: 150435 - protein, 7 aa, synthetic construct
TKYVSVN

SEQ ID NO: 150436 - protein, 7 aa, synthetic construct
TLAHRQG

SEQ ID NO: 150437 - protein, 7 aa, synthetic construct
TLAHYKN

SEQ ID NO: 150438 - protein, 7 aa, synthetic construct
TLARGHI

SEQ ID NO: 150439 - protein, 7 aa, synthetic construct
TLAYNKQ

SEQ ID NO: 150440 - protein, 7 aa, synthetic construct
TLDNRNK

SEQ ID NO: 150441 - protein, 7 aa, synthetic construct
TLDPRSR

SEQ ID NO: 150442 - protein, 7 aa, synthetic construct
TLDRAQR

SEQ ID NO: 150443 - protein, 7 aa, synthetic construct
TLDRGRQ

SEQ ID NO: 150444 - protein, 7 aa, synthetic construct
TLDRLKS

SEQ ID NO: 150445 - protein, 7 aa, synthetic construct
TLDRRNL

SEQ ID NO: 150446 - protein, 7 aa, synthetic construct
TLERAGK

SEQ ID NO: 150447 - protein, 7 aa, synthetic construct
TLERGIR

SEQ ID NO: 150448 - protein, 7 aa, synthetic construct
TLERTRL

SEQ ID NO: 150449 - protein, 7 aa, synthetic construct
TLGAHAR

SEQ ID NO: 150450 - protein, 7 aa, synthetic construct
TLGAYKN

SEQ ID NO: 150451 - protein, 7 aa, synthetic construct
TLGEKSR

SEQ ID NO: 150452 - protein, 7 aa, synthetic construct
TLGKPLH

SEQ ID NO: 150453 - protein, 7 aa, synthetic construct
TLGPGMK

SEQ ID NO: 150454 - protein, 7 aa, synthetic construct
TLGPRFQ

SEQ ID NO: 150455 - protein, 7 aa, synthetic construct
TLGPRSN

SEQ ID NO: 150456 - protein, 7 aa, synthetic construct
TLGQHRP

SEQ ID NO: 150457 - protein, 7 aa, synthetic construct
TLGRQIT

SEQ ID NO: 150458 - protein, 7 aa, synthetic construct
TLGTHRI

SEQ ID NO: 150459 - protein, 7 aa, synthetic construct
TLGYKLG

SEQ ID NO: 150460 - protein, 7 aa, synthetic construct
TLHGMTR

SEQ ID NO: 150461 - protein, 7 aa, synthetic construct
TLHKGMI

SEQ ID NO: 150462 - protein, 7 aa, synthetic construct
TLHNPMK

SEQ ID NO: 150463 - protein, 7 aa, synthetic construct
TLHNRQQ

SEQ ID NO: 150464 - protein, 7 aa, synthetic construct
TLHPRGV

SEQ ID NO: 150465 - protein, 7 aa, synthetic construct
TLHPRNA

SEQ ID NO: 150466 - protein, 7 aa, synthetic construct
TLHSAKN

SEQ ID NO: 150467 - protein, 7 aa, synthetic construct
TLHTIKM

SEQ ID NO: 150468 - protein, 7 aa, synthetic construct
TLIHPKP

SEQ ID NO: 150469 - protein, 7 aa, synthetic construct
TLKGYSQ

SEQ ID NO: 150470 - protein, 7 aa, synthetic construct
TLKHEAR

SEQ ID NO: 150471 - protein, 7 aa, synthetic construct
TLKHTFS

SEQ ID NO: 150472 - protein, 7 aa, synthetic construct
TLKQKWE

SEQ ID NO: 150473 - protein, 7 aa, synthetic construct
TLKWTKE

SEQ ID NO: 150474 - protein, 7 aa, synthetic construct
TLKYQAM

SEQ ID NO: 150475 - protein, 7 aa, synthetic construct
TLMARER

SEQ ID NO: 150476 - protein, 7 aa, synthetic construct
TLMSPGR

SEQ ID NO: 150477 - protein, 7 aa, synthetic construct
TLNAHRI

SEQ ID NO: 150478 - protein, 7 aa, synthetic construct
TLNGHSR

SEQ ID NO: 150479 - protein, 7 aa, synthetic construct
TLNNRGH

SEQ ID NO: 150480 - protein, 7 aa, synthetic construct
TLNPHRS

SEQ ID NO: 150481 - protein, 7 aa, synthetic construct
TLNYSKQ

SEQ ID NO: 150482 - protein, 7 aa, synthetic construct
TLPGKYI

SEQ ID NO: 150483 - protein, 7 aa, synthetic construct
TLPGTYM

SEQ ID NO: 150484 - protein, 7 aa, synthetic construct
TLPHQNK

SEQ ID NO: 150485 - protein, 7 aa, synthetic construct
TLPHSRT

SEQ ID NO: 150486 - protein, 7 aa, synthetic construct
TLPKNYT

SEQ ID NO: 150487 - protein, 7 aa, synthetic construct
TLPKSYQ

SEQ ID NO: 150488 - protein, 7 aa, synthetic construct
TLPKYSV

SEQ ID NO: 150489 - protein, 7 aa, synthetic construct
TLPLHKM

SEQ ID NO: 150490 - protein, 7 aa, synthetic construct
TLPPYSR

SEQ ID NO: 150491 - protein, 7 aa, synthetic construct
TLPRASQ

SEQ ID NO: 150492 - protein, 7 aa, synthetic construct
TLPRGLS

SEQ ID NO: 150493 - protein, 7 aa, synthetic construct
TLPRMGP

SEQ ID NO: 150494 - protein, 7 aa, synthetic construct
TLPVKYS

SEQ ID NO: 150495 - protein, 7 aa, synthetic construct
TLQHQSK

SEQ ID NO: 150496 - protein, 7 aa, synthetic construct
TLQKRQE

SEQ ID NO: 150497 - protein, 7 aa, synthetic construct
TLQNRAY

SEQ ID NO: 150498 - protein, 7 aa, synthetic construct
TLRATDR

SEQ ID NO: 150499 - protein, 7 aa, synthetic construct
TLRDSLR

SEQ ID NO: 150500 - protein, 7 aa, synthetic construct
TLRETPR

SEQ ID NO: 150501 - protein, 7 aa, synthetic construct
TLREYKQ

SEQ ID NO: 150502 - protein, 7 aa, synthetic construct
TLRGHAS

SEQ ID NO: 150503 - protein, 7 aa, synthetic construct
TLRGPPQ

SEQ ID NO: 150504 - protein, 7 aa, synthetic construct
TLRKAVD

SEQ ID NO: 150505 - protein, 7 aa, synthetic construct
TLRKEYV

SEQ ID NO: 150506 - protein, 7 aa, synthetic construct
TLRKQVE

SEQ ID NO: 150507 - protein, 7 aa, synthetic construct
TLRMKTD

SEQ ID NO: 150508 - protein, 7 aa, synthetic construct
TLRMRES

SEQ ID NO: 150509 - protein, 7 aa, synthetic construct
TLRNGYA

SEQ ID NO: 150510 - protein, 7 aa, synthetic construct
TLRPPIQ

SEQ ID NO: 150511 - protein, 7 aa, synthetic construct
TLRPTTM

SEQ ID NO: 150512 - protein, 7 aa, synthetic construct
TLRPVHS

SEQ ID NO: 150513 - protein, 7 aa, synthetic construct
TLRRIGE

SEQ ID NO: 150514 - protein, 7 aa, synthetic construct
TLRSHSG

SEQ ID NO: 150515 - protein, 7 aa, synthetic construct
TLRSSER

SEQ ID NO: 150516 - protein, 7 aa, synthetic construct
TLRSSTY

SEQ ID NO: 150517 - protein, 7 aa, synthetic construct
TLRSVGH

SEQ ID NO: 150518 - protein, 7 aa, synthetic construct
TLRTHVS

SEQ ID NO: 150519 - protein, 7 aa, synthetic construct
TLRTSKD

SEQ ID NO: 150520 - protein, 7 aa, synthetic construct
TLSARHV

SEQ ID NO: 150521 - protein, 7 aa, synthetic construct
TLSHQIR

SEQ ID NO: 150522 - protein, 7 aa, synthetic construct
TLSHRTV

SEQ ID NO: 150523 - protein, 7 aa, synthetic construct
TLSHVNR

SEQ ID NO: 150524 - protein, 7 aa, synthetic construct
TLSKYNS

SEQ ID NO: 150525 - protein, 7 aa, synthetic construct
TLSYGAD

SEQ ID NO: 150526 - protein, 7 aa, synthetic construct
TLTGTHR

SEQ ID NO: 150527 - protein, 7 aa, synthetic construct
TLTRPSL

SEQ ID NO: 150528 - protein, 7 aa, synthetic construct
TLTYKGG

SEQ ID NO: 150529 - protein, 7 aa, synthetic construct
TLVKRGE

SEQ ID NO: 150530 - protein, 7 aa, synthetic construct
TLYATKG

SEQ ID NO: 150531 - protein, 7 aa, synthetic construct
TLYNAKS

SEQ ID NO: 150532 - protein, 7 aa, synthetic construct
TLYQAKP

SEQ ID NO: 150533 - protein, 7 aa, synthetic construct
TMAGPRG

SEQ ID NO: 150534 - protein, 7 aa, synthetic construct
TMAGRHG

SEQ ID NO: 150535 - protein, 7 aa, synthetic construct
TMAGRMT

SEQ ID NO: 150536 - protein, 7 aa, synthetic construct
TMAGYAK

SEQ ID NO: 150537 - protein, 7 aa, synthetic construct
TMAHQNR

SEQ ID NO: 150538 - protein, 7 aa, synthetic construct
TMAHRAT

SEQ ID NO: 150539 - protein, 7 aa, synthetic construct
TMANPKN

SEQ ID NO: 150540 - protein, 7 aa, synthetic construct
TMARPHL

SEQ ID NO: 150541 - protein, 7 aa, synthetic construct
TMDAKRF

SEQ ID NO: 150542 - protein, 7 aa, synthetic construct
TMDKGGK

SEQ ID NO: 150543 - protein, 7 aa, synthetic construct
TMEKEKR

SEQ ID NO: 150544 - protein, 7 aa, synthetic construct
TMEKSSR

SEQ ID NO: 150545 - protein, 7 aa, synthetic construct
TMEKYNR

SEQ ID NO: 150546 - protein, 7 aa, synthetic construct
TMENQRK

SEQ ID NO: 150547 - protein, 7 aa, synthetic construct
TMERRQM

SEQ ID NO: 150548 - protein, 7 aa, synthetic construct
TMERSTR

SEQ ID NO: 150549 - protein, 7 aa, synthetic construct
TMETARK

SEQ ID NO: 150550 - protein, 7 aa, synthetic construct
TMEVKRM

SEQ ID NO: 150551 - protein, 7 aa, synthetic construct
TMGEMKR

SEQ ID NO: 150552 - protein, 7 aa, synthetic construct
TMGFHKA

SEQ ID NO: 150553 - protein, 7 aa, synthetic construct
TMGFKSN

SEQ ID NO: 150554 - protein, 7 aa, synthetic construct
TMGGGRN

SEQ ID NO: 150555 - protein, 7 aa, synthetic construct
TMGGMRN

SEQ ID NO: 150556 - protein, 7 aa, synthetic construct
TMGHKHS

SEQ ID NO: 150557 - protein, 7 aa, synthetic construct
TMGHRAS

SEQ ID NO: 150558 - protein, 7 aa, synthetic construct
TMGHSPK

SEQ ID NO: 150559 - protein, 7 aa, synthetic construct
TMGIRHS

SEQ ID NO: 150560 - protein, 7 aa, synthetic construct
TMGKPSW

SEQ ID NO: 150561 - protein, 7 aa, synthetic construct
TMGMAKH

SEQ ID NO: 150562 - protein, 7 aa, synthetic construct
TMGMREK

SEQ ID NO: 150563 - protein, 7 aa, synthetic construct
TMGNPKN

SEQ ID NO: 150564 - protein, 7 aa, synthetic construct
TMGRGSN

SEQ ID NO: 150565 - protein, 7 aa, synthetic construct
TMGRPHG

SEQ ID NO: 150566 - protein, 7 aa, synthetic construct
TMGRTRE

SEQ ID NO: 150567 - protein, 7 aa, synthetic construct
TMGSHNK

SEQ ID NO: 150568 - protein, 7 aa, synthetic construct
TMGTHPR

SEQ ID NO: 150569 - protein, 7 aa, synthetic construct
TMGTKFQ

SEQ ID NO: 150570 - protein, 7 aa, synthetic construct
TMGTKYM

SEQ ID NO: 150571 - protein, 7 aa, synthetic construct
TMGYSKQ

SEQ ID NO: 150572 - protein, 7 aa, synthetic construct
TMHASRG

SEQ ID NO: 150573 - protein, 7 aa, synthetic construct
TMHERNK

SEQ ID NO: 150574 - protein, 7 aa, synthetic construct
TMHMSNK

SEQ ID NO: 150575 - protein, 7 aa, synthetic construct
TMHPKQF

SEQ ID NO: 150576 - protein, 7 aa, synthetic construct
TMHQKPY

SEQ ID NO: 150577 - protein, 7 aa, synthetic construct
TMHRTKE

SEQ ID NO: 150578 - protein, 7 aa, synthetic construct
TMHSQQK

SEQ ID NO: 150579 - protein, 7 aa, synthetic construct
TMHSTRG

SEQ ID NO: 150580 - protein, 7 aa, synthetic construct
TMHTHLH

SEQ ID NO: 150581 - protein, 7 aa, synthetic construct
TMHTNRQ

SEQ ID NO: 150582 - protein, 7 aa, synthetic construct
TMHTRSN

SEQ ID NO: 150583 - protein, 7 aa, synthetic construct
TMHTSKM

SEQ ID NO: 150584 - protein, 7 aa, synthetic construct
TMIKRDI

SEQ ID NO: 150585 - protein, 7 aa, synthetic construct
TMIPRTG

SEQ ID NO: 150586 - protein, 7 aa, synthetic construct
TMISKYG

SEQ ID NO: 150587 - protein, 7 aa, synthetic construct
TMKAYNN

SEQ ID NO: 150588 - protein, 7 aa, synthetic construct
TMKDMAR

SEQ ID NO: 150589 - protein, 7 aa, synthetic construct
TMKENSW

SEQ ID NO: 150590 - protein, 7 aa, synthetic construct
TMKHLNV

SEQ ID NO: 150591 - protein, 7 aa, synthetic construct
TMKNPMY

SEQ ID NO: 150592 - protein, 7 aa, synthetic construct
TMKPGML

SEQ ID NO: 150593 - protein, 7 aa, synthetic construct
TMKPLPE

SEQ ID NO: 150594 - protein, 7 aa, synthetic construct
TMKPSAW

SEQ ID NO: 150595 - protein, 7 aa, synthetic construct
TMKSKYD

SEQ ID NO: 150596 - protein, 7 aa, synthetic construct
TMKTWPQ

SEQ ID NO: 150597 - protein, 7 aa, synthetic construct
TMKVEKW

SEQ ID NO: 150598 - protein, 7 aa, synthetic construct
TMKYASS

SEQ ID NO: 150599 - protein, 7 aa, synthetic construct
TMKYLRE

SEQ ID NO: 150600 - protein, 7 aa, synthetic construct
TMMGNRP

SEQ ID NO: 150601 - protein, 7 aa, synthetic construct
TMMHPKS

SEQ ID NO: 150602 - protein, 7 aa, synthetic construct
TMMIKSA

SEQ ID NO: 150603 - protein, 7 aa, synthetic construct
TMMKPKD

SEQ ID NO: 150604 - protein, 7 aa, synthetic construct
TMMKPQI

SEQ ID NO: 150605 - protein, 7 aa, synthetic construct
TMMNRHP

SEQ ID NO: 150606 - protein, 7 aa, synthetic construct
TMMQHQK

SEQ ID NO: 150607 - protein, 7 aa, synthetic construct
TMMQRGV

SEQ ID NO: 150608 - protein, 7 aa, synthetic construct
TMMVRRE

SEQ ID NO: 150609 - protein, 7 aa, synthetic construct
TMNHGAK

SEQ ID NO: 150610 - protein, 7 aa, synthetic construct
TMNKMEW

SEQ ID NO: 150611 - protein, 7 aa, synthetic construct
TMNPRQY

SEQ ID NO: 150612 - protein, 7 aa, synthetic construct
TMNQYQK

SEQ ID NO: 150613 - protein, 7 aa, synthetic construct
TMNRSSF

SEQ ID NO: 150614 - protein, 7 aa, synthetic construct
TMNVHTK

SEQ ID NO: 150615 - protein, 7 aa, synthetic construct
TMPKYNL

SEQ ID NO: 150616 - protein, 7 aa, synthetic construct
TMPRERV

SEQ ID NO: 150617 - protein, 7 aa, synthetic construct
TMPRTHS

SEQ ID NO: 150618 - protein, 7 aa, synthetic construct
TMPRTMT

SEQ ID NO: 150619 - protein, 7 aa, synthetic construct
TMQFTNQ

SEQ ID NO: 150620 - protein, 7 aa, synthetic construct
TMQGGPW

SEQ ID NO: 150621 - protein, 7 aa, synthetic construct
TMQGRSY

SEQ ID NO: 150622 - protein, 7 aa, synthetic construct
TMQHISK

SEQ ID NO: 150623 - protein, 7 aa, synthetic construct
TMQIRHG

SEQ ID NO: 150624 - protein, 7 aa, synthetic construct
TMQKHNF

SEQ ID NO: 150625 - protein, 7 aa, synthetic construct
TMQQVSR

SEQ ID NO: 150626 - protein, 7 aa, synthetic construct
TMQRMGV

SEQ ID NO: 150627 - protein, 7 aa, synthetic construct
TMQRPTY

SEQ ID NO: 150628 - protein, 7 aa, synthetic construct
TMQSAGR

SEQ ID NO: 150629 - protein, 7 aa, synthetic construct
TMQSHKM

SEQ ID NO: 150630 - protein, 7 aa, synthetic construct
TMRAHIA

SEQ ID NO: 150631 - protein, 7 aa, synthetic construct
TMRAIPP

SEQ ID NO: 150632 - protein, 7 aa, synthetic construct
TMRAMNT

SEQ ID NO: 150633 - protein, 7 aa, synthetic construct
TMRDNKM

SEQ ID NO: 150634 - protein, 7 aa, synthetic construct
TMRDVRL

SEQ ID NO: 150635 - protein, 7 aa, synthetic construct
TMREQFK

SEQ ID NO: 150636 - protein, 7 aa, synthetic construct
TMRGNEK

SEQ ID NO: 150637 - protein, 7 aa, synthetic construct
TMRHGTV

SEQ ID NO: 150638 - protein, 7 aa, synthetic construct
TMRKGQE

SEQ ID NO: 150639 - protein, 7 aa, synthetic construct
TMRKSES

SEQ ID NO: 150640 - protein, 7 aa, synthetic construct
TMRLKTD

SEQ ID NO: 150641 - protein, 7 aa, synthetic construct
TMRLRGE

SEQ ID NO: 150642 - protein, 7 aa, synthetic construct
TMRMKGD

SEQ ID NO: 150643 - protein, 7 aa, synthetic construct
TMRPGVI

SEQ ID NO: 150644 - protein, 7 aa, synthetic construct
TMRPMVN

SEQ ID NO: 150645 - protein, 7 aa, synthetic construct
TMRQDAK

SEQ ID NO: 150646 - protein, 7 aa, synthetic construct
TMRSHPT

SEQ ID NO: 150647 - protein, 7 aa, synthetic construct
TMSPKHY

SEQ ID NO: 150648 - protein, 7 aa, synthetic construct
TMSQHVR

SEQ ID NO: 150649 - protein, 7 aa, synthetic construct
TMSSHMK

SEQ ID NO: 150650 - protein, 7 aa, synthetic construct
TMTKRFE

SEQ ID NO: 150651 - protein, 7 aa, synthetic construct
TMTRGYP

SEQ ID NO: 150652 - protein, 7 aa, synthetic construct
TMTRHSV

SEQ ID NO: 150653 - protein, 7 aa, synthetic construct
TMTRPTH

SEQ ID NO: 150654 - protein, 7 aa, synthetic construct
TMTTNHR

SEQ ID NO: 150655 - protein, 7 aa, synthetic construct
TMTTRTY

SEQ ID NO: 150656 - protein, 7 aa, synthetic construct
TMVGMGR

SEQ ID NO: 150657 - protein, 7 aa, synthetic construct
TMVKKLE

SEQ ID NO: 150658 - protein, 7 aa, synthetic construct
TMVKYSG

SEQ ID NO: 150659 - protein, 7 aa, synthetic construct
TMVRKDT

SEQ ID NO: 150660 - protein, 7 aa, synthetic construct
TMYKDKN

SEQ ID NO: 150661 - protein, 7 aa, synthetic construct
TMYPNAK

SEQ ID NO: 150662 - protein, 7 aa, synthetic construct
TMYSAGK

SEQ ID NO: 150663 - protein, 7 aa, synthetic construct
TNADTRR

SEQ ID NO: 150664 - protein, 7 aa, synthetic construct
TNAIHSR

SEQ ID NO: 150665 - protein, 7 aa, synthetic construct
TNAMPRF

SEQ ID NO: 150666 - protein, 7 aa, synthetic construct
TNARPHI

SEQ ID NO: 150667 - protein, 7 aa, synthetic construct
TNAYGVN

SEQ ID NO: 150668 - protein, 7 aa, synthetic construct
TNAYNAT

SEQ ID NO: 150669 - protein, 7 aa, synthetic construct
TNAYVSK

SEQ ID NO: 150670 - protein, 7 aa, synthetic construct
TNDFKGK

SEQ ID NO: 150671 - protein, 7 aa, synthetic construct
TNDGRRM

SEQ ID NO: 150672 - protein, 7 aa, synthetic construct
TNDGRRS

SEQ ID NO: 150673 - protein, 7 aa, synthetic construct
TNDNKRM

SEQ ID NO: 150674 - protein, 7 aa, synthetic construct
TNDTRLR

SEQ ID NO: 150675 - protein, 7 aa, synthetic construct
TNDWKNN

SEQ ID NO: 150676 - protein, 7 aa, synthetic construct
TNEGKRG

SEQ ID NO: 150677 - protein, 7 aa, synthetic construct
TNEQMRK

SEQ ID NO: 150678 - protein, 7 aa, synthetic construct
TNEQRKQ

SEQ ID NO: 150679 - protein, 7 aa, synthetic construct
TNFGMAK

SEQ ID NO: 150680 - protein, 7 aa, synthetic construct
TNFNKPY

SEQ ID NO: 150681 - protein, 7 aa, synthetic construct
TNGDRPR

SEQ ID NO: 150682 - protein, 7 aa, synthetic construct
TNGHAGK

SEQ ID NO: 150683 - protein, 7 aa, synthetic construct
TNGHTRT

SEQ ID NO: 150684 - protein, 7 aa, synthetic construct
TNGMRTY

SEQ ID NO: 150685 - protein, 7 aa, synthetic construct
TNGMYSK

SEQ ID NO: 150686 - protein, 7 aa, synthetic construct
TNGNGFR

SEQ ID NO: 150687 - protein, 7 aa, synthetic construct
TNGNRSM

SEQ ID NO: 150688 - protein, 7 aa, synthetic construct
TNGPRMF

SEQ ID NO: 150689 - protein, 7 aa, synthetic construct
TNGQSMR

SEQ ID NO: 150690 - protein, 7 aa, synthetic construct
TNGREGK

SEQ ID NO: 150691 - protein, 7 aa, synthetic construct
TNGRIHY

SEQ ID NO: 150692 - protein, 7 aa, synthetic construct
TNGVRQW

SEQ ID NO: 150693 - protein, 7 aa, synthetic construct
TNGYAPK

SEQ ID NO: 150694 - protein, 7 aa, synthetic construct
TNGYNAK

SEQ ID NO: 150695 - protein, 7 aa, synthetic construct
TNHAMTK

SEQ ID NO: 150696 - protein, 7 aa, synthetic construct
TNHGDWK

SEQ ID NO: 150697 - protein, 7 aa, synthetic construct
TNHKQDR

SEQ ID NO: 150698 - protein, 7 aa, synthetic construct
TNHKQSI

SEQ ID NO: 150699 - protein, 7 aa, synthetic construct
TNHKTSL

SEQ ID NO: 150700 - protein, 7 aa, synthetic construct
TNHLSGK

SEQ ID NO: 150701 - protein, 7 aa, synthetic construct
TNHMNGK

SEQ ID NO: 150702 - protein, 7 aa, synthetic construct
TNHNQRT

SEQ ID NO: 150703 - protein, 7 aa, synthetic construct
TNHNVNK

SEQ ID NO: 150704 - protein, 7 aa, synthetic construct
TNHPKGT

SEQ ID NO: 150705 - protein, 7 aa, synthetic construct
TNHPQKF

SEQ ID NO: 150706 - protein, 7 aa, synthetic construct
TNHQRLI

SEQ ID NO: 150707 - protein, 7 aa, synthetic construct
TNHQTFK

SEQ ID NO: 150708 - protein, 7 aa, synthetic construct
TNHTHKV

SEQ ID NO: 150709 - protein, 7 aa, synthetic construct
TNHTMNR

SEQ ID NO: 150710 - protein, 7 aa, synthetic construct
TNHTRQV

SEQ ID NO: 150711 - protein, 7 aa, synthetic construct
TNHVQRF

SEQ ID NO: 150712 - protein, 7 aa, synthetic construct
TNHVQSK

SEQ ID NO: 150713 - protein, 7 aa, synthetic construct
TNIGSAR

SEQ ID NO: 150714 - protein, 7 aa, synthetic construct
TNIQVRQ

SEQ ID NO: 150715 - protein, 7 aa, synthetic construct
TNIRAGY

SEQ ID NO: 150716 - protein, 7 aa, synthetic construct
TNISARN

SEQ ID NO: 150717 - protein, 7 aa, synthetic construct
TNIYVKA

SEQ ID NO: 150718 - protein, 7 aa, synthetic construct
TNKDRDK

SEQ ID NO: 150719 - protein, 7 aa, synthetic construct
TNKDYTK

SEQ ID NO: 150720 - protein, 7 aa, synthetic construct
TNKFPQL

SEQ ID NO: 150721 - protein, 7 aa, synthetic construct
TNKFTHV

SEQ ID NO: 150722 - protein, 7 aa, synthetic construct
TNKIRDV

SEQ ID NO: 150723 - protein, 7 aa, synthetic construct
TNKMGYP

SEQ ID NO: 150724 - protein, 7 aa, synthetic construct
TNKMYPV

SEQ ID NO: 150725 - protein, 7 aa, synthetic construct
TNKNFHP

SEQ ID NO: 150726 - protein, 7 aa, synthetic construct
TNKNYEK

SEQ ID NO: 150727 - protein, 7 aa, synthetic construct
TNKPYIG

SEQ ID NO: 150728 - protein, 7 aa, synthetic construct
TNKQYMG

SEQ ID NO: 150729 - protein, 7 aa, synthetic construct
TNKYQAM

SEQ ID NO: 150730 - protein, 7 aa, synthetic construct
TNLDRKF

SEQ ID NO: 150731 - protein, 7 aa, synthetic construct
TNLKDRN

SEQ ID NO: 150732 - protein, 7 aa, synthetic construct
TNLRMDK

SEQ ID NO: 150733 - protein, 7 aa, synthetic construct
TNLSRIV

SEQ ID NO: 150734 - protein, 7 aa, synthetic construct
TNLSYKS

SEQ ID NO: 150735 - protein, 7 aa, synthetic construct
TNMGHRA

SEQ ID NO: 150736 - protein, 7 aa, synthetic construct
TNMHKQL

SEQ ID NO: 150737 - protein, 7 aa, synthetic construct
TNMNIRM

SEQ ID NO: 150738 - protein, 7 aa, synthetic construct
TNMPQRQ

SEQ ID NO: 150739 - protein, 7 aa, synthetic construct
TNNAMRF

SEQ ID NO: 150740 - protein, 7 aa, synthetic construct
TNNERIK

SEQ ID NO: 150741 - protein, 7 aa, synthetic construct
TNNGMGR

SEQ ID NO: 150742 - protein, 7 aa, synthetic construct
TNNKPFM

SEQ ID NO: 150743 - protein, 7 aa, synthetic construct
TNNMSPR

SEQ ID NO: 150744 - protein, 7 aa, synthetic construct
TNNNRPT

SEQ ID NO: 150745 - protein, 7 aa, synthetic construct
TNNPHAK

SEQ ID NO: 150746 - protein, 7 aa, synthetic construct
TNNSARN

SEQ ID NO: 150747 - protein, 7 aa, synthetic construct
TNNSVHR

SEQ ID NO: 150748 - protein, 7 aa, synthetic construct
TNNYNGK

SEQ ID NO: 150749 - protein, 7 aa, synthetic construct
TNNYVTK

SEQ ID NO: 150750 - protein, 7 aa, synthetic construct
TNPKPYI

SEQ ID NO: 150751 - protein, 7 aa, synthetic construct
TNPRGLM

SEQ ID NO: 150752 - protein, 7 aa, synthetic construct
TNPYVKN

SEQ ID NO: 150753 - protein, 7 aa, synthetic construct
TNQAIQR

SEQ ID NO: 150754 - protein, 7 aa, synthetic construct
TNQAKNY

SEQ ID NO: 150755 - protein, 7 aa, synthetic construct
TNQAQHK

SEQ ID NO: 150756 - protein, 7 aa, synthetic construct
TNQGARF

SEQ ID NO: 150757 - protein, 7 aa, synthetic construct
TNQHMSK

SEQ ID NO: 150758 - protein, 7 aa, synthetic construct
TNQHNGK

SEQ ID NO: 150759 - protein, 7 aa, synthetic construct
TNQHRGI

SEQ ID NO: 150760 - protein, 7 aa, synthetic construct
TNQIHPK

SEQ ID NO: 150761 - protein, 7 aa, synthetic construct
TNQKQDR

SEQ ID NO: 150762 - protein, 7 aa, synthetic construct
TNQMTPR

SEQ ID NO: 150763 - protein, 7 aa, synthetic construct
TNQPRII

SEQ ID NO: 150764 - protein, 7 aa, synthetic construct
TNQQART

SEQ ID NO: 150765 - protein, 7 aa, synthetic construct
TNQQIRH

SEQ ID NO: 150766 - protein, 7 aa, synthetic construct
TNQRPTY

SEQ ID NO: 150767 - protein, 7 aa, synthetic construct
TNQRTYS

SEQ ID NO: 150768 - protein, 7 aa, synthetic construct
TNQVRDR

SEQ ID NO: 150769 - protein, 7 aa, synthetic construct
TNQYKNM

SEQ ID NO: 150770 - protein, 7 aa, synthetic construct
TNRAAKD

SEQ ID NO: 150771 - protein, 7 aa, synthetic construct
TNRAKTD

SEQ ID NO: 150772 - protein, 7 aa, synthetic construct
TNRAPHH

SEQ ID NO: 150773 - protein, 7 aa, synthetic construct
TNRASHN

SEQ ID NO: 150774 - protein, 7 aa, synthetic construct
TNRASSW

SEQ ID NO: 150775 - protein, 7 aa, synthetic construct
TNRELTK

SEQ ID NO: 150776 - protein, 7 aa, synthetic construct
TNRGHGM

SEQ ID NO: 150777 - protein, 7 aa, synthetic construct
TNRIEKS

SEQ ID NO: 150778 - protein, 7 aa, synthetic construct
TNRIREQ

SEQ ID NO: 150779 - protein, 7 aa, synthetic construct
TNRMVRE

SEQ ID NO: 150780 - protein, 7 aa, synthetic construct
TNRPIQI

SEQ ID NO: 150781 - protein, 7 aa, synthetic construct
TNRQKPD

SEQ ID NO: 150782 - protein, 7 aa, synthetic construct
TNRQSEK

SEQ ID NO: 150783 - protein, 7 aa, synthetic construct
TNRSPTT

SEQ ID NO: 150784 - protein, 7 aa, synthetic construct
TNRVIST

SEQ ID NO: 150785 - protein, 7 aa, synthetic construct
TNSAMYR

SEQ ID NO: 150786 - protein, 7 aa, synthetic construct
TNSGPGR

SEQ ID NO: 150787 - protein, 7 aa, synthetic construct
TNSHIGK

SEQ ID NO: 150788 - protein, 7 aa, synthetic construct
TNSPTKW

SEQ ID NO: 150789 - protein, 7 aa, synthetic construct
TNSQHTR

SEQ ID NO: 150790 - protein, 7 aa, synthetic construct
TNSQRDR

SEQ ID NO: 150791 - protein, 7 aa, synthetic construct
TNSRPER

SEQ ID NO: 150792 - protein, 7 aa, synthetic construct
TNSTYSR

SEQ ID NO: 150793 - protein, 7 aa, synthetic construct
TNTHKGN

SEQ ID NO: 150794 - protein, 7 aa, synthetic construct
TNTHRHS

SEQ ID NO: 150795 - protein, 7 aa, synthetic construct
TNTHTQR

SEQ ID NO: 150796 - protein, 7 aa, synthetic construct
TNTKHVT

SEQ ID NO: 150797 - protein, 7 aa, synthetic construct
TNTMRTY

SEQ ID NO: 150798 - protein, 7 aa, synthetic construct
TNTNKPW

SEQ ID NO: 150799 - protein, 7 aa, synthetic construct
TNTPTRH

SEQ ID NO: 150800 - protein, 7 aa, synthetic construct
TNTSQHR

SEQ ID NO: 150801 - protein, 7 aa, synthetic construct
TNTYGAK

SEQ ID NO: 150802 - protein, 7 aa, synthetic construct
TNTYNVH

SEQ ID NO: 150803 - protein, 7 aa, synthetic construct
TNVHRVH

SEQ ID NO: 150804 - protein, 7 aa, synthetic construct
TNVMAHK

SEQ ID NO: 150805 - protein, 7 aa, synthetic construct
TNVMATR

SEQ ID NO: 150806 - protein, 7 aa, synthetic construct
TNVMHQR

SEQ ID NO: 150807 - protein, 7 aa, synthetic construct
TNVMRGH

SEQ ID NO: 150808 - protein, 7 aa, synthetic construct
TNVNRLQ

SEQ ID NO: 150809 - protein, 7 aa, synthetic construct
TNVQEKR

SEQ ID NO: 150810 - protein, 7 aa, synthetic construct
TNVQSHK

SEQ ID NO: 150811 - protein, 7 aa, synthetic construct
TNVRAHG

SEQ ID NO: 150812 - protein, 7 aa, synthetic construct
TNVSRIH

SEQ ID NO: 150813 - protein, 7 aa, synthetic construct
TNYGSKL

SEQ ID NO: 150814 - protein, 7 aa, synthetic construct
TNYKGYG

SEQ ID NO: 150815 - protein, 7 aa, synthetic construct
TNYKPAY

SEQ ID NO: 150816 - protein, 7 aa, synthetic construct
TNYKPGP

SEQ ID NO: 150817 - protein, 7 aa, synthetic construct
TNYPIKN

SEQ ID NO: 150818 - protein, 7 aa, synthetic construct
TNYRADH

SEQ ID NO: 150819 - protein, 7 aa, synthetic construct
TNYTAKM

SEQ ID NO: 150820 - protein, 7 aa, synthetic construct
TNYTHTT

SEQ ID NO: 150821 - protein, 7 aa, synthetic construct
TNYTKEK

SEQ ID NO: 150822 - protein, 7 aa, synthetic construct
TNYVATK

SEQ ID NO: 150823 - protein, 7 aa, synthetic construct
TNYVHKG

SEQ ID NO: 150824 - protein, 7 aa, synthetic construct
TPAHTRQ

SEQ ID NO: 150825 - protein, 7 aa, synthetic construct
TPANPGR

SEQ ID NO: 150826 - protein, 7 aa, synthetic construct
TPAQRHI

SEQ ID NO: 150827 - protein, 7 aa, synthetic construct
TPARSEK

SEQ ID NO: 150828 - protein, 7 aa, synthetic construct
TPDKHMR

SEQ ID NO: 150829 - protein, 7 aa, synthetic construct
TPDRGKN

SEQ ID NO: 150830 - protein, 7 aa, synthetic construct
TPEANKR

SEQ ID NO: 150831 - protein, 7 aa, synthetic construct
TPEKTRF

SEQ ID NO: 150832 - protein, 7 aa, synthetic construct
TPELRKN

SEQ ID NO: 150833 - protein, 7 aa, synthetic construct
TPEMRKF

SEQ ID NO: 150834 - protein, 7 aa, synthetic construct
TPERRIV

SEQ ID NO: 150835 - protein, 7 aa, synthetic construct
TPERYKQ

SEQ ID NO: 150836 - protein, 7 aa, synthetic construct
TPEVRKL

SEQ ID NO: 150837 - protein, 7 aa, synthetic construct
TPFGMKA

SEQ ID NO: 150838 - protein, 7 aa, synthetic construct
TPFGSKQ

SEQ ID NO: 150839 - protein, 7 aa, synthetic construct
TPFTARG

SEQ ID NO: 150840 - protein, 7 aa, synthetic construct
TPGAYNK

SEQ ID NO: 150841 - protein, 7 aa, synthetic construct
TPGDKRQ

SEQ ID NO: 150842 - protein, 7 aa, synthetic construct
TPGKEHR

SEQ ID NO: 150843 - protein, 7 aa, synthetic construct
TPGMNHF

SEQ ID NO: 150844 - protein, 7 aa, synthetic construct
TPGMNRN

SEQ ID NO: 150845 - protein, 7 aa, synthetic construct
TPGREFK

SEQ ID NO: 150846 - protein, 7 aa, synthetic construct
TPGTSWQ

SEQ ID NO: 150847 - protein, 7 aa, synthetic construct
TPHDKGR

SEQ ID NO: 150848 - protein, 7 aa, synthetic construct
TPHHKPP

SEQ ID NO: 150849 - protein, 7 aa, synthetic construct
TPHKQER

SEQ ID NO: 150850 - protein, 7 aa, synthetic construct
TPHKQPI

SEQ ID NO: 150851 - protein, 7 aa, synthetic construct
TPHLNGR

SEQ ID NO: 150852 - protein, 7 aa, synthetic construct
TPHMRIA

SEQ ID NO: 150853 - protein, 7 aa, synthetic construct
TPHQAPR

SEQ ID NO: 150854 - protein, 7 aa, synthetic construct
TPHRGTG

SEQ ID NO: 150855 - protein, 7 aa, synthetic construct
TPHRIPT

SEQ ID NO: 150856 - protein, 7 aa, synthetic construct
TPHRTLQ

SEQ ID NO: 150857 - protein, 7 aa, synthetic construct
TPHRVNM

SEQ ID NO: 150858 - protein, 7 aa, synthetic construct
TPHSQNR

SEQ ID NO: 150859 - protein, 7 aa, synthetic construct
TPHTQKF

SEQ ID NO: 150860 - protein, 7 aa, synthetic construct
TPHVAHK

SEQ ID NO: 150861 - protein, 7 aa, synthetic construct
TPHYKGA

SEQ ID NO: 150862 - protein, 7 aa, synthetic construct
TPIAAKF

SEQ ID NO: 150863 - protein, 7 aa, synthetic construct
TPIDRRV

SEQ ID NO: 150864 - protein, 7 aa, synthetic construct
TPIGAAR

SEQ ID NO: 150865 - protein, 7 aa, synthetic construct
TPIHQRG

SEQ ID NO: 150866 - protein, 7 aa, synthetic construct
TPINRKD

SEQ ID NO: 150867 - protein, 7 aa, synthetic construct
TPIPKHV

SEQ ID NO: 150868 - protein, 7 aa, synthetic construct
TPIPRSA

SEQ ID NO: 150869 - protein, 7 aa, synthetic construct
TPITKAH

SEQ ID NO: 150870 - protein, 7 aa, synthetic construct
TPKAYDR

SEQ ID NO: 150871 - protein, 7 aa, synthetic construct
TPKERFT

SEQ ID NO: 150872 - protein, 7 aa, synthetic construct
TPKFRQD

SEQ ID NO: 150873 - protein, 7 aa, synthetic construct
TPKHYSV

SEQ ID NO: 150874 - protein, 7 aa, synthetic construct
TPKLQYP

SEQ ID NO: 150875 - protein, 7 aa, synthetic construct
TPKLSSF

SEQ ID NO: 150876 - protein, 7 aa, synthetic construct
TPKMHLM

SEQ ID NO: 150877 - protein, 7 aa, synthetic construct
TPKSMPY

SEQ ID NO: 150878 - protein, 7 aa, synthetic construct
TPKTPFN

SEQ ID NO: 150879 - protein, 7 aa, synthetic construct
TPKYSSG

SEQ ID NO: 150880 - protein, 7 aa, synthetic construct
TPKYSSV

SEQ ID NO: 150881 - protein, 7 aa, synthetic construct
TPLHRTQ

SEQ ID NO: 150882 - protein, 7 aa, synthetic construct
TPLKGSN

SEQ ID NO: 150883 - protein, 7 aa, synthetic construct
TPLKTPM

SEQ ID NO: 150884 - protein, 7 aa, synthetic construct
TPLRQQI

SEQ ID NO: 150885 - protein, 7 aa, synthetic construct
TPLVRRE

SEQ ID NO: 150886 - protein, 7 aa, synthetic construct
TPMKHPV

SEQ ID NO: 150887 - protein, 7 aa, synthetic construct
TPMLGRP

SEQ ID NO: 150888 - protein, 7 aa, synthetic construct
TPMLRHG

SEQ ID NO: 150889 - protein, 7 aa, synthetic construct
TPMRATH

SEQ ID NO: 150890 - protein, 7 aa, synthetic construct
TPMRGIN

SEQ ID NO: 150891 - protein, 7 aa, synthetic construct
TPMTRHS

SEQ ID NO: 150892 - protein, 7 aa, synthetic construct
TPMVKTM

SEQ ID NO: 150893 - protein, 7 aa, synthetic construct
TPNAGYR

SEQ ID NO: 150894 - protein, 7 aa, synthetic construct
TPNDRFK

SEQ ID NO: 150895 - protein, 7 aa, synthetic construct
TPNKGSW

SEQ ID NO: 150896 - protein, 7 aa, synthetic construct
TPNNAHK

SEQ ID NO: 150897 - protein, 7 aa, synthetic construct
TPNNAPR

SEQ ID NO: 150898 - protein, 7 aa, synthetic construct
TPNYMKN

SEQ ID NO: 150899 - protein, 7 aa, synthetic construct
TPPAHRF

SEQ ID NO: 150900 - protein, 7 aa, synthetic construct
TPPHARN

SEQ ID NO: 150901 - protein, 7 aa, synthetic construct
TPPRQIT

SEQ ID NO: 150902 - protein, 7 aa, synthetic construct
TPPVMRH

SEQ ID NO: 150903 - protein, 7 aa, synthetic construct
TPQASRY

SEQ ID NO: 150904 - protein, 7 aa, synthetic construct
TPQDRSR

SEQ ID NO: 150905 - protein, 7 aa, synthetic construct
TPQHATR

SEQ ID NO: 150906 - protein, 7 aa, synthetic construct
TPQHKYN

SEQ ID NO: 150907 - protein, 7 aa, synthetic construct
TPQHQSR

SEQ ID NO: 150908 - protein, 7 aa, synthetic construct
TPQHRIS

SEQ ID NO: 150909 - protein, 7 aa, synthetic construct
TPQLRGY

SEQ ID NO: 150910 - protein, 7 aa, synthetic construct
TPRATSF

SEQ ID NO: 150911 - protein, 7 aa, synthetic construct
TPRAVNS

SEQ ID NO: 150912 - protein, 7 aa, synthetic construct
TPRGENK

SEQ ID NO: 150913 - protein, 7 aa, synthetic construct
TPRGTAY

SEQ ID NO: 150914 - protein, 7 aa, synthetic construct
TPRIPGS

SEQ ID NO: 150915 - protein, 7 aa, synthetic construct
TPRLHNS

SEQ ID NO: 150916 - protein, 7 aa, synthetic construct
TPRLRDS

SEQ ID NO: 150917 - protein, 7 aa, synthetic construct
TPRMMGN

SEQ ID NO: 150918 - protein, 7 aa, synthetic construct
TPRNKDQ

SEQ ID NO: 150919 - protein, 7 aa, synthetic construct
TPRNPHI

SEQ ID NO: 150920 - protein, 7 aa, synthetic construct
TPRPYSG

SEQ ID NO: 150921 - protein, 7 aa, synthetic construct
TPRQLHT

SEQ ID NO: 150922 - protein, 7 aa, synthetic construct
TPRSLDR

SEQ ID NO: 150923 - protein, 7 aa, synthetic construct
TPRTLAH

SEQ ID NO: 150924 - protein, 7 aa, synthetic construct
TPRVIAN

SEQ ID NO: 150925 - protein, 7 aa, synthetic construct
TPRVPMQ

SEQ ID NO: 150926 - protein, 7 aa, synthetic construct
TPRVRLE

SEQ ID NO: 150927 - protein, 7 aa, synthetic construct
TPSFHKA

SEQ ID NO: 150928 - protein, 7 aa, synthetic construct
TPSGRSF

SEQ ID NO: 150929 - protein, 7 aa, synthetic construct
TPSGYKH

SEQ ID NO: 150930 - protein, 7 aa, synthetic construct
TPSHVRA

SEQ ID NO: 150931 - protein, 7 aa, synthetic construct
TPSYKSL

SEQ ID NO: 150932 - protein, 7 aa, synthetic construct
TPSYRYD

SEQ ID NO: 150933 - protein, 7 aa, synthetic construct
TPTIKPY

SEQ ID NO: 150934 - protein, 7 aa, synthetic construct
TPTKVGW

SEQ ID NO: 150935 - protein, 7 aa, synthetic construct
TPTPHET

SEQ ID NO: 150936 - protein, 7 aa, synthetic construct
TPTRYKE

SEQ ID NO: 150937 - protein, 7 aa, synthetic construct
TPTSHGR

SEQ ID NO: 150938 - protein, 7 aa, synthetic construct
TPTTRIT

SEQ ID NO: 150939 - protein, 7 aa, synthetic construct
TPTYHAK

SEQ ID NO: 150940 - protein, 7 aa, synthetic construct
TPTYHGK

SEQ ID NO: 150941 - protein, 7 aa, synthetic construct
TPVARIP

SEQ ID NO: 150942 - protein, 7 aa, synthetic construct
TPVARNM

SEQ ID NO: 150943 - protein, 7 aa, synthetic construct
TPVDSRR

SEQ ID NO: 150944 - protein, 7 aa, synthetic construct
TPVHRPQ

SEQ ID NO: 150945 - protein, 7 aa, synthetic construct
TPVHRTG

SEQ ID NO: 150946 - protein, 7 aa, synthetic construct
TPVIRQS

SEQ ID NO: 150947 - protein, 7 aa, synthetic construct
TPVKERY

SEQ ID NO: 150948 - protein, 7 aa, synthetic construct
TPVNHTR

SEQ ID NO: 150949 - protein, 7 aa, synthetic construct
TPVNRPF

SEQ ID NO: 150950 - protein, 7 aa, synthetic construct
TPVPKVH

SEQ ID NO: 150951 - protein, 7 aa, synthetic construct
TPVRDRQ

SEQ ID NO: 150952 - protein, 7 aa, synthetic construct
TPVRINT

SEQ ID NO: 150953 - protein, 7 aa, synthetic construct
TPVTRAY

SEQ ID NO: 150954 - protein, 7 aa, synthetic construct
TPVVKHQ

SEQ ID NO: 150955 - protein, 7 aa, synthetic construct
TPVVKMG

SEQ ID NO: 150956 - protein, 7 aa, synthetic construct
TPVVRQI

SEQ ID NO: 150957 - protein, 7 aa, synthetic construct
TPVYSAK

SEQ ID NO: 150958 - protein, 7 aa, synthetic construct
TPYGGKN

SEQ ID NO: 150959 - protein, 7 aa, synthetic construct
TPYHIKG

SEQ ID NO: 150960 - protein, 7 aa, synthetic construct
TPYHVKA

SEQ ID NO: 150961 - protein, 7 aa, synthetic construct
TPYPTSR

SEQ ID NO: 150962 - protein, 7 aa, synthetic construct
TPYTKTN

SEQ ID NO: 150963 - protein, 7 aa, synthetic construct
TQAAARY

SEQ ID NO: 150964 - protein, 7 aa, synthetic construct
TQAANRY

SEQ ID NO: 150965 - protein, 7 aa, synthetic construct
TQAGHIR

SEQ ID NO: 150966 - protein, 7 aa, synthetic construct
TQAGPKW

SEQ ID NO: 150967 - protein, 7 aa, synthetic construct
TQAGSMR

SEQ ID NO: 150968 - protein, 7 aa, synthetic construct
TQAHARF

SEQ ID NO: 150969 - protein, 7 aa, synthetic construct
TQAHMLK

SEQ ID NO: 150970 - protein, 7 aa, synthetic construct
TQAHSAK

SEQ ID NO: 150971 - protein, 7 aa, synthetic construct
TQAHSLK

SEQ ID NO: 150972 - protein, 7 aa, synthetic construct
TQAKHLI

SEQ ID NO: 150973 - protein, 7 aa, synthetic construct
TQAKHYS

SEQ ID NO: 150974 - protein, 7 aa, synthetic construct
TQAMGAR

SEQ ID NO: 150975 - protein, 7 aa, synthetic construct
TQAMRGQ

SEQ ID NO: 150976 - protein, 7 aa, synthetic construct
TQAPRYA

SEQ ID NO: 150977 - protein, 7 aa, synthetic construct
TQAQRTH

SEQ ID NO: 150978 - protein, 7 aa, synthetic construct
TQATTRY

SEQ ID NO: 150979 - protein, 7 aa, synthetic construct
TQAYHDR

SEQ ID NO: 150980 - protein, 7 aa, synthetic construct
TQAYHNS

SEQ ID NO: 150981 - protein, 7 aa, synthetic construct
TQAYSHT

SEQ ID NO: 150982 - protein, 7 aa, synthetic construct
TQAYTHK

SEQ ID NO: 150983 - protein, 7 aa, synthetic construct
TQDVGKR

SEQ ID NO: 150984 - protein, 7 aa, synthetic construct
TQEKTRF

SEQ ID NO: 150985 - protein, 7 aa, synthetic construct
TQERVGK

SEQ ID NO: 150986 - protein, 7 aa, synthetic construct
TQETKKF

SEQ ID NO: 150987 - protein, 7 aa, synthetic construct
TQETPRW

SEQ ID NO: 150988 - protein, 7 aa, synthetic construct
TQETRRN

SEQ ID NO: 150989 - protein, 7 aa, synthetic construct
TQFEAKK

SEQ ID NO: 150990 - protein, 7 aa, synthetic construct
TQFHQKG

SEQ ID NO: 150991 - protein, 7 aa, synthetic construct
TQFKDNR

SEQ ID NO: 150992 - protein, 7 aa, synthetic construct
TQFPQRQ

SEQ ID NO: 150993 - protein, 7 aa, synthetic construct
TQGAGHH

SEQ ID NO: 150994 - protein, 7 aa, synthetic construct
TQGDKNR

SEQ ID NO: 150995 - protein, 7 aa, synthetic construct
TQGGIPR

SEQ ID NO: 150996 - protein, 7 aa, synthetic construct
TQGHQYT

SEQ ID NO: 150997 - protein, 7 aa, synthetic construct
TQGIRDK

SEQ ID NO: 150998 - protein, 7 aa, synthetic construct
TQGITRN

SEQ ID NO: 150999 - protein, 7 aa, synthetic construct
TQGKADR

SEQ ID NO: 151000 - protein, 7 aa, synthetic construct
TQGKHIL

SEQ ID NO: 151001 - protein, 7 aa, synthetic construct
TQGKTFY

SEQ ID NO: 151002 - protein, 7 aa, synthetic construct
TQGMHGK

SEQ ID NO: 151003 - protein, 7 aa, synthetic construct
TQGMHPK

SEQ ID NO: 151004 - protein, 7 aa, synthetic construct
TQGQAPR

SEQ ID NO: 151005 - protein, 7 aa, synthetic construct
TQGQQLR

SEQ ID NO: 151006 - protein, 7 aa, synthetic construct
TQGQYTK

SEQ ID NO: 151007 - protein, 7 aa, synthetic construct
TQGRSHV

SEQ ID NO: 151008 - protein, 7 aa, synthetic construct
TQGSQRF

SEQ ID NO: 151009 - protein, 7 aa, synthetic construct
TQGSSIR

SEQ ID NO: 151010 - protein, 7 aa, synthetic construct
TQGSTGR

SEQ ID NO: 151011 - protein, 7 aa, synthetic construct
TQGTHIK

SEQ ID NO: 151012 - protein, 7 aa, synthetic construct
TQGVRMH

SEQ ID NO: 151013 - protein, 7 aa, synthetic construct
TQGYQKS

SEQ ID NO: 151014 - protein, 7 aa, synthetic construct
TQGYTKL

SEQ ID NO: 151015 - protein, 7 aa, synthetic construct
TQGYVAK

SEQ ID NO: 151016 - protein, 7 aa, synthetic construct
TQHEMKR

SEQ ID NO: 151017 - protein, 7 aa, synthetic construct
TQHGTRS

SEQ ID NO: 151018 - protein, 7 aa, synthetic construct
TQHKSFT

SEQ ID NO: 151019 - protein, 7 aa, synthetic construct
TQHLTKY

SEQ ID NO: 151020 - protein, 7 aa, synthetic construct
TQHMQGR

SEQ ID NO: 151021 - protein, 7 aa, synthetic construct
TQHMRTI

SEQ ID NO: 151022 - protein, 7 aa, synthetic construct
TQHNGAR

SEQ ID NO: 151023 - protein, 7 aa, synthetic construct
TQHNGFK

SEQ ID NO: 151024 - protein, 7 aa, synthetic construct
TQHPVTR

SEQ ID NO: 151025 - protein, 7 aa, synthetic construct
TQHSWQD

SEQ ID NO: 151026 - protein, 7 aa, synthetic construct
TQIDRPR

SEQ ID NO: 151027 - protein, 7 aa, synthetic construct
TQIKALH

SEQ ID NO: 151028 - protein, 7 aa, synthetic construct
TQIQRMV

SEQ ID NO: 151029 - protein, 7 aa, synthetic construct
TQIVRRE

SEQ ID NO: 151030 - protein, 7 aa, synthetic construct
TQKEMFR

SEQ ID NO: 151031 - protein, 7 aa, synthetic construct
TQKETPR

SEQ ID NO: 151032 - protein, 7 aa, synthetic construct
TQKGSNW

SEQ ID NO: 151033 - protein, 7 aa, synthetic construct
TQKHLSI

SEQ ID NO: 151034 - protein, 7 aa, synthetic construct
TQKHPSN

SEQ ID NO: 151035 - protein, 7 aa, synthetic construct
TQKIETK

SEQ ID NO: 151036 - protein, 7 aa, synthetic construct
TQKLTHY

SEQ ID NO: 151037 - protein, 7 aa, synthetic construct
TQKPHNL

SEQ ID NO: 151038 - protein, 7 aa, synthetic construct
TQKTDKW

SEQ ID NO: 151039 - protein, 7 aa, synthetic construct
TQKWKTE

SEQ ID NO: 151040 - protein, 7 aa, synthetic construct
TQKYEKQ

SEQ ID NO: 151041 - protein, 7 aa, synthetic construct
TQKYIHA

SEQ ID NO: 151042 - protein, 7 aa, synthetic construct
TQKYITN

SEQ ID NO: 151043 - protein, 7 aa, synthetic construct
TQKYKDT

SEQ ID NO: 151044 - protein, 7 aa, synthetic construct
TQLKERM

SEQ ID NO: 151045 - protein, 7 aa, synthetic construct
TQLQGPR

SEQ ID NO: 151046 - protein, 7 aa, synthetic construct
TQLQRPY

SEQ ID NO: 151047 - protein, 7 aa, synthetic construct
TQLRHGI

SEQ ID NO: 151048 - protein, 7 aa, synthetic construct
TQLRMRD

SEQ ID NO: 151049 - protein, 7 aa, synthetic construct
TQMAQRT

SEQ ID NO: 151050 - protein, 7 aa, synthetic construct
TQMAQSR

SEQ ID NO: 151051 - protein, 7 aa, synthetic construct
TQMASRT

SEQ ID NO: 151052 - protein, 7 aa, synthetic construct
TQMEMSK

SEQ ID NO: 151053 - protein, 7 aa, synthetic construct
TQMHTKM

SEQ ID NO: 151054 - protein, 7 aa, synthetic construct
TQMKNHL

SEQ ID NO: 151055 - protein, 7 aa, synthetic construct
TQMLGGR

SEQ ID NO: 151056 - protein, 7 aa, synthetic construct
TQMLKHT

SEQ ID NO: 151057 - protein, 7 aa, synthetic construct
TQMRNST

SEQ ID NO: 151058 - protein, 7 aa, synthetic construct
TQMRPRE

SEQ ID NO: 151059 - protein, 7 aa, synthetic construct
TQMTKIY

SEQ ID NO: 151060 - protein, 7 aa, synthetic construct
TQNGRAY

SEQ ID NO: 151061 - protein, 7 aa, synthetic construct
TQNHGRV

SEQ ID NO: 151062 - protein, 7 aa, synthetic construct
TQNMRQM

SEQ ID NO: 151063 - protein, 7 aa, synthetic construct
TQNPRAL

SEQ ID NO: 151064 - protein, 7 aa, synthetic construct
TQNPRQQ

SEQ ID NO: 151065 - protein, 7 aa, synthetic construct
TQNSTKW

SEQ ID NO: 151066 - protein, 7 aa, synthetic construct
TQNYIKG

SEQ ID NO: 151067 - protein, 7 aa, synthetic construct
TQPEMRR

SEQ ID NO: 151068 - protein, 7 aa, synthetic construct
TQPGMGR

SEQ ID NO: 151069 - protein, 7 aa, synthetic construct
TQPHISR

SEQ ID NO: 151070 - protein, 7 aa, synthetic construct
TQPHYKQ

SEQ ID NO: 151071 - protein, 7 aa, synthetic construct
TQPKSMF

SEQ ID NO: 151072 - protein, 7 aa, synthetic construct
TQPRREF

SEQ ID NO: 151073 - protein, 7 aa, synthetic construct
TQPRREG

SEQ ID NO: 151074 - protein, 7 aa, synthetic construct
TQPVQQR

SEQ ID NO: 151075 - protein, 7 aa, synthetic construct
TQQARNM

SEQ ID NO: 151076 - protein, 7 aa, synthetic construct
TQQGNRS

SEQ ID NO: 151077 - protein, 7 aa, synthetic construct
TQQGPMR

SEQ ID NO: 151078 - protein, 7 aa, synthetic construct
TQQILDW

SEQ ID NO: 151079 - protein, 7 aa, synthetic construct
TQQIRDR

SEQ ID NO: 151080 - protein, 7 aa, synthetic construct
TQQIRSM

SEQ ID NO: 151081 - protein, 7 aa, synthetic construct
TQQKAYQ

SEQ ID NO: 151082 - protein, 7 aa, synthetic construct
TQQKFSI

SEQ ID NO: 151083 - protein, 7 aa, synthetic construct
TQQKQDK

SEQ ID NO: 151084 - protein, 7 aa, synthetic construct
TQQLRVS

SEQ ID NO: 151085 - protein, 7 aa, synthetic construct
TQQPHKY

SEQ ID NO: 151086 - protein, 7 aa, synthetic construct
TQQPSYK

SEQ ID NO: 151087 - protein, 7 aa, synthetic construct
TQQRATM

SEQ ID NO: 151088 - protein, 7 aa, synthetic construct
TQQRNFQ

SEQ ID NO: 151089 - protein, 7 aa, synthetic construct
TQQRPII

SEQ ID NO: 151090 - protein, 7 aa, synthetic construct
TQQSARM

SEQ ID NO: 151091 - protein, 7 aa, synthetic construct
TQQSNRN

SEQ ID NO: 151092 - protein, 7 aa, synthetic construct
TQQSSRS

SEQ ID NO: 151093 - protein, 7 aa, synthetic construct
TQQVTRF

SEQ ID NO: 151094 - protein, 7 aa, synthetic construct
TQQYGGK

SEQ ID NO: 151095 - protein, 7 aa, synthetic construct
TQQYKTL

SEQ ID NO: 151096 - protein, 7 aa, synthetic construct
TQRAVSQ

SEQ ID NO: 151097 - protein, 7 aa, synthetic construct
TQRDMRM

SEQ ID NO: 151098 - protein, 7 aa, synthetic construct
TQRDQRT

SEQ ID NO: 151099 - protein, 7 aa, synthetic construct
TQREITK

SEQ ID NO: 151100 - protein, 7 aa, synthetic construct
TQREVRM

SEQ ID NO: 151101 - protein, 7 aa, synthetic construct
TQRGLVL

SEQ ID NO: 151102 - protein, 7 aa, synthetic construct
TQRGYKE

SEQ ID NO: 151103 - protein, 7 aa, synthetic construct
TQRHHMN

SEQ ID NO: 151104 - protein, 7 aa, synthetic construct
TQRHPIV

SEQ ID NO: 151105 - protein, 7 aa, synthetic construct
TQRIADK

SEQ ID NO: 151106 - protein, 7 aa, synthetic construct
TQRITPL

SEQ ID NO: 151107 - protein, 7 aa, synthetic construct
TQRKDSG

SEQ ID NO: 151108 - protein, 7 aa, synthetic construct
TQRKLLD

SEQ ID NO: 151109 - protein, 7 aa, synthetic construct
TQRKMDA

SEQ ID NO: 151110 - protein, 7 aa, synthetic construct
TQRKQVE

SEQ ID NO: 151111 - protein, 7 aa, synthetic construct
TQRKSME

SEQ ID NO: 151112 - protein, 7 aa, synthetic construct
TQRLVGM

SEQ ID NO: 151113 - protein, 7 aa, synthetic construct
TQRMIPL

SEQ ID NO: 151114 - protein, 7 aa, synthetic construct
TQRMNEK

SEQ ID NO: 151115 - protein, 7 aa, synthetic construct
TQRPDRN

SEQ ID NO: 151116 - protein, 7 aa, synthetic construct
TQRQIVQ

SEQ ID NO: 151117 - protein, 7 aa, synthetic construct
TQRQKDN

SEQ ID NO: 151118 - protein, 7 aa, synthetic construct
TQRTPYH

SEQ ID NO: 151119 - protein, 7 aa, synthetic construct
TQRVMKD

SEQ ID NO: 151120 - protein, 7 aa, synthetic construct
TQRYGQA

SEQ ID NO: 151121 - protein, 7 aa, synthetic construct
TQRYGTS

SEQ ID NO: 151122 - protein, 7 aa, synthetic construct
TQSFSKS

SEQ ID NO: 151123 - protein, 7 aa, synthetic construct
TQSKAYF

SEQ ID NO: 151124 - protein, 7 aa, synthetic construct
TQSKKDT

SEQ ID NO: 151125 - protein, 7 aa, synthetic construct
TQSPRFP

SEQ ID NO: 151126 - protein, 7 aa, synthetic construct
TQSQGYR

SEQ ID NO: 151127 - protein, 7 aa, synthetic construct
TQSREAK

SEQ ID NO: 151128 - protein, 7 aa, synthetic construct
TQSRERQ

SEQ ID NO: 151129 - protein, 7 aa, synthetic construct
TQTANYR

SEQ ID NO: 151130 - protein, 7 aa, synthetic construct
TQTAYKM

SEQ ID NO: 151131 - protein, 7 aa, synthetic construct
TQTHATR

SEQ ID NO: 151132 - protein, 7 aa, synthetic construct
TQTHAVR

SEQ ID NO: 151133 - protein, 7 aa, synthetic construct
TQTQYKM

SEQ ID NO: 151134 - protein, 7 aa, synthetic construct
TQVIRKD

SEQ ID NO: 151135 - protein, 7 aa, synthetic construct
TQVNYNK

SEQ ID NO: 151136 - protein, 7 aa, synthetic construct
TQVPRQN

SEQ ID NO: 151137 - protein, 7 aa, synthetic construct
TQVQTKW

SEQ ID NO: 151138 - protein, 7 aa, synthetic construct
TQVVHTR

SEQ ID NO: 151139 - protein, 7 aa, synthetic construct
TQWRDAA

SEQ ID NO: 151140 - protein, 7 aa, synthetic construct
TQYAHAT

SEQ ID NO: 151141 - protein, 7 aa, synthetic construct
TQYASSK

SEQ ID NO: 151142 - protein, 7 aa, synthetic construct
TQYGVGN

SEQ ID NO: 151143 - protein, 7 aa, synthetic construct
TQYKELK

SEQ ID NO: 151144 - protein, 7 aa, synthetic construct
TQYKKET

SEQ ID NO: 151145 - protein, 7 aa, synthetic construct
TQYNNQK

SEQ ID NO: 151146 - protein, 7 aa, synthetic construct
TQYQKPI

SEQ ID NO: 151147 - protein, 7 aa, synthetic construct
TQYQNNK

SEQ ID NO: 151148 - protein, 7 aa, synthetic construct
TQYTVQH

SEQ ID NO: 151149 - protein, 7 aa, synthetic construct
TRAADMR

SEQ ID NO: 151150 - protein, 7 aa, synthetic construct
TRAAPSF

SEQ ID NO: 151151 - protein, 7 aa, synthetic construct
TRAEQRL

SEQ ID NO: 151152 - protein, 7 aa, synthetic construct
TRAGDMK

SEQ ID NO: 151153 - protein, 7 aa, synthetic construct
TRAGIQP

SEQ ID NO: 151154 - protein, 7 aa, synthetic construct
TRAHGAA

SEQ ID NO: 151155 - protein, 7 aa, synthetic construct
TRAHITT

SEQ ID NO: 151156 - protein, 7 aa, synthetic construct
TRAIHNP

SEQ ID NO: 151157 - protein, 7 aa, synthetic construct
TRAKPNE

SEQ ID NO: 151158 - protein, 7 aa, synthetic construct
TRALMGN

SEQ ID NO: 151159 - protein, 7 aa, synthetic construct
TRALRVE

SEQ ID NO: 151160 - protein, 7 aa, synthetic construct
TRAPHGI

SEQ ID NO: 151161 - protein, 7 aa, synthetic construct
TRAPSIM

SEQ ID NO: 151162 - protein, 7 aa, synthetic construct
TRAQSYT

SEQ ID NO: 151163 - protein, 7 aa, synthetic construct
TRAQTER

SEQ ID NO: 151164 - protein, 7 aa, synthetic construct
TRASSRE

SEQ ID NO: 151165 - protein, 7 aa, synthetic construct
TRATADK

SEQ ID NO: 151166 - protein, 7 aa, synthetic construct
TRATENR

SEQ ID NO: 151167 - protein, 7 aa, synthetic construct
TRAVHNL

SEQ ID NO: 151168 - protein, 7 aa, synthetic construct
TRAVMRD

SEQ ID NO: 151169 - protein, 7 aa, synthetic construct
TRAVQTH

SEQ ID NO: 151170 - protein, 7 aa, synthetic construct
TRAVSGF

SEQ ID NO: 151171 - protein, 7 aa, synthetic construct
TRDAHKP

SEQ ID NO: 151172 - protein, 7 aa, synthetic construct
TRDGTAR

SEQ ID NO: 151173 - protein, 7 aa, synthetic construct
TRDGTIR

SEQ ID NO: 151174 - protein, 7 aa, synthetic construct
TRDHRVQ

SEQ ID NO: 151175 - protein, 7 aa, synthetic construct
TRDIPPK

SEQ ID NO: 151176 - protein, 7 aa, synthetic construct
TRDKSNM

SEQ ID NO: 151177 - protein, 7 aa, synthetic construct
TRDNAVK

SEQ ID NO: 151178 - protein, 7 aa, synthetic construct
TRDNIRS

SEQ ID NO: 151179 - protein, 7 aa, synthetic construct
TRDNISK

SEQ ID NO: 151180 - protein, 7 aa, synthetic construct
TRDNKTY

SEQ ID NO: 151181 - protein, 7 aa, synthetic construct
TRDNLTR

SEQ ID NO: 151182 - protein, 7 aa, synthetic construct
TRDNNKQ

SEQ ID NO: 151183 - protein, 7 aa, synthetic construct
TRDNRGV

SEQ ID NO: 151184 - protein, 7 aa, synthetic construct
TRDPQFK

SEQ ID NO: 151185 - protein, 7 aa, synthetic construct
TRDQISK

SEQ ID NO: 151186 - protein, 7 aa, synthetic construct
TRDQMPK

SEQ ID NO: 151187 - protein, 7 aa, synthetic construct
TRDRSSI

SEQ ID NO: 151188 - protein, 7 aa, synthetic construct
TRDSGTK

SEQ ID NO: 151189 - protein, 7 aa, synthetic construct
TRDSLNR

SEQ ID NO: 151190 - protein, 7 aa, synthetic construct
TRDTSRS

SEQ ID NO: 151191 - protein, 7 aa, synthetic construct
TRDYKSA

SEQ ID NO: 151192 - protein, 7 aa, synthetic construct
TREAKFV

SEQ ID NO: 151193 - protein, 7 aa, synthetic construct
TREAKSY

SEQ ID NO: 151194 - protein, 7 aa, synthetic construct
TREFPTK

SEQ ID NO: 151195 - protein, 7 aa, synthetic construct
TREHIKL

SEQ ID NO: 151196 - protein, 7 aa, synthetic construct
TREIQKY

SEQ ID NO: 151197 - protein, 7 aa, synthetic construct
TREIRNI

SEQ ID NO: 151198 - protein, 7 aa, synthetic construct
TREISSR

SEQ ID NO: 151199 - protein, 7 aa, synthetic construct
TRELQRN

SEQ ID NO: 151200 - protein, 7 aa, synthetic construct
TRELTSR

SEQ ID NO: 151201 - protein, 7 aa, synthetic construct
TREMNKL

SEQ ID NO: 151202 - protein, 7 aa, synthetic construct
TREMPVR

SEQ ID NO: 151203 - protein, 7 aa, synthetic construct
TREMSSK

SEQ ID NO: 151204 - protein, 7 aa, synthetic construct
TREPKYN

SEQ ID NO: 151205 - protein, 7 aa, synthetic construct
TRERLAL

SEQ ID NO: 151206 - protein, 7 aa, synthetic construct
TRERPVY

SEQ ID NO: 151207 - protein, 7 aa, synthetic construct
TRERSSI

SEQ ID NO: 151208 - protein, 7 aa, synthetic construct
TRESGRG

SEQ ID NO: 151209 - protein, 7 aa, synthetic construct
TRESRAF

SEQ ID NO: 151210 - protein, 7 aa, synthetic construct
TRETKGW

SEQ ID NO: 151211 - protein, 7 aa, synthetic construct
TREVHKT

SEQ ID NO: 151212 - protein, 7 aa, synthetic construct
TREVLKY

SEQ ID NO: 151213 - protein, 7 aa, synthetic construct
TREVRGL

SEQ ID NO: 151214 - protein, 7 aa, synthetic construct
TREVRSI

SEQ ID NO: 151215 - protein, 7 aa, synthetic construct
TRFIKGE

SEQ ID NO: 151216 - protein, 7 aa, synthetic construct
TRFKEQS

SEQ ID NO: 151217 - protein, 7 aa, synthetic construct
TRFQIKE

SEQ ID NO: 151218 - protein, 7 aa, synthetic construct
TRGADMK

SEQ ID NO: 151219 - protein, 7 aa, synthetic construct
TRGAYPV

SEQ ID NO: 151220 - protein, 7 aa, synthetic construct
TRGDIKF

SEQ ID NO: 151221 - protein, 7 aa, synthetic construct
TRGDIRL

SEQ ID NO: 151222 - protein, 7 aa, synthetic construct
TRGEFGR

SEQ ID NO: 151223 - protein, 7 aa, synthetic construct
TRGEKYL

SEQ ID NO: 151224 - protein, 7 aa, synthetic construct
TRGESKI

SEQ ID NO: 151225 - protein, 7 aa, synthetic construct
TRGGTFS

SEQ ID NO: 151226 - protein, 7 aa, synthetic construct
TRGHLTS

SEQ ID NO: 151227 - protein, 7 aa, synthetic construct
TRGHMQA

SEQ ID NO: 151228 - protein, 7 aa, synthetic construct
TRGHTMV

SEQ ID NO: 151229 - protein, 7 aa, synthetic construct
TRGIINV

SEQ ID NO: 151230 - protein, 7 aa, synthetic construct
TRGIVGV

SEQ ID NO: 151231 - protein, 7 aa, synthetic construct
TRGKETL

SEQ ID NO: 151232 - protein, 7 aa, synthetic construct
TRGKMNE

SEQ ID NO: 151233 - protein, 7 aa, synthetic construct
TRGLVIP

SEQ ID NO: 151234 - protein, 7 aa, synthetic construct
TRGMDGH

SEQ ID NO: 151235 - protein, 7 aa, synthetic construct
TRGMPNH

SEQ ID NO: 151236 - protein, 7 aa, synthetic construct
TRGMQGY

SEQ ID NO: 151237 - protein, 7 aa, synthetic construct
TRGMSVV

SEQ ID NO: 151238 - protein, 7 aa, synthetic construct
TRGMTGL

SEQ ID NO: 151239 - protein, 7 aa, synthetic construct
TRGNGFP

SEQ ID NO: 151240 - protein, 7 aa, synthetic construct
TRGPATI

SEQ ID NO: 151241 - protein, 7 aa, synthetic construct
TRGPNLH

SEQ ID NO: 151242 - protein, 7 aa, synthetic construct
TRGPYGP

SEQ ID NO: 151243 - protein, 7 aa, synthetic construct
TRGQHSP

SEQ ID NO: 151244 - protein, 7 aa, synthetic construct
TRGQISI

SEQ ID NO: 151245 - protein, 7 aa, synthetic construct
TRGRETS

SEQ ID NO: 151246 - protein, 7 aa, synthetic construct
TRGSTGS

SEQ ID NO: 151247 - protein, 7 aa, synthetic construct
TRGTAML

SEQ ID NO: 151248 - protein, 7 aa, synthetic construct
TRGTAYI

SEQ ID NO: 151249 - protein, 7 aa, synthetic construct
TRGTDQK

SEQ ID NO: 151250 - protein, 7 aa, synthetic construct
TRGTDRI

SEQ ID NO: 151251 - protein, 7 aa, synthetic construct
TRGVHAA

SEQ ID NO: 151252 - protein, 7 aa, synthetic construct
TRHAQTA

SEQ ID NO: 151253 - protein, 7 aa, synthetic construct
TRHDNKP

SEQ ID NO: 151254 - protein, 7 aa, synthetic construct
TRHETAK

SEQ ID NO: 151255 - protein, 7 aa, synthetic construct
TRHGIPA

SEQ ID NO: 151256 - protein, 7 aa, synthetic construct
TRHGVMP

SEQ ID NO: 151257 - protein, 7 aa, synthetic construct
TRHIQAS

SEQ ID NO: 151258 - protein, 7 aa, synthetic construct
TRHITNP

SEQ ID NO: 151259 - protein, 7 aa, synthetic construct
TRHIVPP

SEQ ID NO: 151260 - protein, 7 aa, synthetic construct
TRHIVTS

SEQ ID NO: 151261 - protein, 7 aa, synthetic construct
TRHNAAA

SEQ ID NO: 151262 - protein, 7 aa, synthetic construct
TRHPEKN

SEQ ID NO: 151263 - protein, 7 aa, synthetic construct
TRHPLNA

SEQ ID NO: 151264 - protein, 7 aa, synthetic construct
TRHPNAV

SEQ ID NO: 151265 - protein, 7 aa, synthetic construct
TRHPVHA

SEQ ID NO: 151266 - protein, 7 aa, synthetic construct
TRHTTGS

SEQ ID NO: 151267 - protein, 7 aa, synthetic construct
TRHTVLS

SEQ ID NO: 151268 - protein, 7 aa, synthetic construct
TRHTVPT

SEQ ID NO: 151269 - protein, 7 aa, synthetic construct
TRHVAAS

SEQ ID NO: 151270 - protein, 7 aa, synthetic construct
TRIERDK

SEQ ID NO: 151271 - protein, 7 aa, synthetic construct
TRIGAAI

SEQ ID NO: 151272 - protein, 7 aa, synthetic construct
TRIGGPM

SEQ ID NO: 151273 - protein, 7 aa, synthetic construct
TRIGRTE

SEQ ID NO: 151274 - protein, 7 aa, synthetic construct
TRIMTDK

SEQ ID NO: 151275 - protein, 7 aa, synthetic construct
TRINPLA

SEQ ID NO: 151276 - protein, 7 aa, synthetic construct
TRIPMQS

SEQ ID NO: 151277 - protein, 7 aa, synthetic construct
TRITRDA

SEQ ID NO: 151278 - protein, 7 aa, synthetic construct
TRKDAYT

SEQ ID NO: 151279 - protein, 7 aa, synthetic construct
TRKDMNW

SEQ ID NO: 151280 - protein, 7 aa, synthetic construct
TRKELIY

SEQ ID NO: 151281 - protein, 7 aa, synthetic construct
TRKSDAI

SEQ ID NO: 151282 - protein, 7 aa, synthetic construct
TRKVQET

SEQ ID NO: 151283 - protein, 7 aa, synthetic construct
TRLASSH

SEQ ID NO: 151284 - protein, 7 aa, synthetic construct
TRLDLGK

SEQ ID NO: 151285 - protein, 7 aa, synthetic construct
TRLDLVR

SEQ ID NO: 151286 - protein, 7 aa, synthetic construct
TRLEIRS

SEQ ID NO: 151287 - protein, 7 aa, synthetic construct
TRLERSQ

SEQ ID NO: 151288 - protein, 7 aa, synthetic construct
TRLKEGF

SEQ ID NO: 151289 - protein, 7 aa, synthetic construct
TRLPALP

SEQ ID NO: 151290 - protein, 7 aa, synthetic construct
TRLPVAS

SEQ ID NO: 151291 - protein, 7 aa, synthetic construct
TRLRDGG

SEQ ID NO: 151292 - protein, 7 aa, synthetic construct
TRLSARE

SEQ ID NO: 151293 - protein, 7 aa, synthetic construct
TRLSQDK

SEQ ID NO: 151294 - protein, 7 aa, synthetic construct
TRLSQMM

SEQ ID NO: 151295 - protein, 7 aa, synthetic construct
TRLVRTE

SEQ ID NO: 151296 - protein, 7 aa, synthetic construct
TRMAATL

SEQ ID NO: 151297 - protein, 7 aa, synthetic construct
TRMATNL

SEQ ID NO: 151298 - protein, 7 aa, synthetic construct
TRMGPTH

SEQ ID NO: 151299 - protein, 7 aa, synthetic construct
TRMGSVM

SEQ ID NO: 151300 - protein, 7 aa, synthetic construct
TRMHNGY

SEQ ID NO: 151301 - protein, 7 aa, synthetic construct
TRMNSTI

SEQ ID NO: 151302 - protein, 7 aa, synthetic construct
TRMQALQ

SEQ ID NO: 151303 - protein, 7 aa, synthetic construct
TRMQALT

SEQ ID NO: 151304 - protein, 7 aa, synthetic construct
TRMSEKL

SEQ ID NO: 151305 - protein, 7 aa, synthetic construct
TRMTQIV

SEQ ID NO: 151306 - protein, 7 aa, synthetic construct
TRMVERS

SEQ ID NO: 151307 - protein, 7 aa, synthetic construct
TRNAIPQ

SEQ ID NO: 151308 - protein, 7 aa, synthetic construct
TRNAPIL

SEQ ID NO: 151309 - protein, 7 aa, synthetic construct
TRNDIRL

SEQ ID NO: 151310 - protein, 7 aa, synthetic construct
TRNDLKY

SEQ ID NO: 151311 - protein, 7 aa, synthetic construct
TRNELGK

SEQ ID NO: 151312 - protein, 7 aa, synthetic construct
TRNERQV

SEQ ID NO: 151313 - protein, 7 aa, synthetic construct
TRNFNST

SEQ ID NO: 151314 - protein, 7 aa, synthetic construct
TRNHTMV

SEQ ID NO: 151315 - protein, 7 aa, synthetic construct
TRNIIRD

SEQ ID NO: 151316 - protein, 7 aa, synthetic construct
TRNIMDK

SEQ ID NO: 151317 - protein, 7 aa, synthetic construct
TRNIQVM

SEQ ID NO: 151318 - protein, 7 aa, synthetic construct
TRNIRAD

SEQ ID NO: 151319 - protein, 7 aa, synthetic construct
TRNKNFE

SEQ ID NO: 151320 - protein, 7 aa, synthetic construct
TRNLMTN

SEQ ID NO: 151321 - protein, 7 aa, synthetic construct
TRNLPAI

SEQ ID NO: 151322 - protein, 7 aa, synthetic construct
TRNPDIR

SEQ ID NO: 151323 - protein, 7 aa, synthetic construct
TRNQGPL

SEQ ID NO: 151324 - protein, 7 aa, synthetic construct
TRNQPPM

SEQ ID NO: 151325 - protein, 7 aa, synthetic construct
TRNSSPL

SEQ ID NO: 151326 - protein, 7 aa, synthetic construct
TRNSVGF

SEQ ID NO: 151327 - protein, 7 aa, synthetic construct
TRNSYSD

SEQ ID NO: 151328 - protein, 7 aa, synthetic construct
TRNTNNL

SEQ ID NO: 151329 - protein, 7 aa, synthetic construct
TRPAHAL

SEQ ID NO: 151330 - protein, 7 aa, synthetic construct
TRPAKID

SEQ ID NO: 151331 - protein, 7 aa, synthetic construct
TRPARET

SEQ ID NO: 151332 - protein, 7 aa, synthetic construct
TRPGFPV

SEQ ID NO: 151333 - protein, 7 aa, synthetic construct
TRPHLNP

SEQ ID NO: 151334 - protein, 7 aa, synthetic construct
TRPIANQ

SEQ ID NO: 151335 - protein, 7 aa, synthetic construct
TRPIGNL

SEQ ID NO: 151336 - protein, 7 aa, synthetic construct
TRPIVQV

SEQ ID NO: 151337 - protein, 7 aa, synthetic construct
TRPMVNM

SEQ ID NO: 151338 - protein, 7 aa, synthetic construct
TRPNPNY

SEQ ID NO: 151339 - protein, 7 aa, synthetic construct
TRPNVWE

SEQ ID NO: 151340 - protein, 7 aa, synthetic construct
TRPQESK

SEQ ID NO: 151341 - protein, 7 aa, synthetic construct
TRPQHVL

SEQ ID NO: 151342 - protein, 7 aa, synthetic construct
TRPSERF

SEQ ID NO: 151343 - protein, 7 aa, synthetic construct
TRPVGAF

SEQ ID NO: 151344 - protein, 7 aa, synthetic construct
TRQDARA

SEQ ID NO: 151345 - protein, 7 aa, synthetic construct
TRQEALK

SEQ ID NO: 151346 - protein, 7 aa, synthetic construct
TRQEVIR

SEQ ID NO: 151347 - protein, 7 aa, synthetic construct
TRQGPPI

SEQ ID NO: 151348 - protein, 7 aa, synthetic construct
TRQHLKE

SEQ ID NO: 151349 - protein, 7 aa, synthetic construct
TRQHMHP

SEQ ID NO: 151350 - protein, 7 aa, synthetic construct
TRQHVNM

SEQ ID NO: 151351 - protein, 7 aa, synthetic construct
TRQHVVA

SEQ ID NO: 151352 - protein, 7 aa, synthetic construct
TRQIGYA

SEQ ID NO: 151353 - protein, 7 aa, synthetic construct
TRQIHNN

SEQ ID NO: 151354 - protein, 7 aa, synthetic construct
TRQIHSN

SEQ ID NO: 151355 - protein, 7 aa, synthetic construct
TRQIQSQ

SEQ ID NO: 151356 - protein, 7 aa, synthetic construct
TRQISTQ

SEQ ID NO: 151357 - protein, 7 aa, synthetic construct
TRQKDTV

SEQ ID NO: 151358 - protein, 7 aa, synthetic construct
TRQKFPE

SEQ ID NO: 151359 - protein, 7 aa, synthetic construct
TRQKSEM

SEQ ID NO: 151360 - protein, 7 aa, synthetic construct
TRQKSET

SEQ ID NO: 151361 - protein, 7 aa, synthetic construct
TRQMTIV

SEQ ID NO: 151362 - protein, 7 aa, synthetic construct
TRQMVSQ

SEQ ID NO: 151363 - protein, 7 aa, synthetic construct
TRQNSDR

SEQ ID NO: 151364 - protein, 7 aa, synthetic construct
TRQNTLT

SEQ ID NO: 151365 - protein, 7 aa, synthetic construct
TRQPHQM

SEQ ID NO: 151366 - protein, 7 aa, synthetic construct
TRQPPGP

SEQ ID NO: 151367 - protein, 7 aa, synthetic construct
TRQQDTR

SEQ ID NO: 151368 - protein, 7 aa, synthetic construct
TRQQIVL

SEQ ID NO: 151369 - protein, 7 aa, synthetic construct
TRQQKDM

SEQ ID NO: 151370 - protein, 7 aa, synthetic construct
TRQREAM

SEQ ID NO: 151371 - protein, 7 aa, synthetic construct
TRQREQV

SEQ ID NO: 151372 - protein, 7 aa, synthetic construct
TRQTAGW

SEQ ID NO: 151373 - protein, 7 aa, synthetic construct
TRQTEQR

SEQ ID NO: 151374 - protein, 7 aa, synthetic construct
TRQTLLH

SEQ ID NO: 151375 - protein, 7 aa, synthetic construct
TRQVPRD

SEQ ID NO: 151376 - protein, 7 aa, synthetic construct
TRRDGTF

SEQ ID NO: 151377 - protein, 7 aa, synthetic construct
TRREAPI

SEQ ID NO: 151378 - protein, 7 aa, synthetic construct
TRREHVP

SEQ ID NO: 151379 - protein, 7 aa, synthetic construct
TRREQLM

SEQ ID NO: 151380 - protein, 7 aa, synthetic construct
TRRESVA

SEQ ID NO: 151381 - protein, 7 aa, synthetic construct
TRRETPV

SEQ ID NO: 151382 - protein, 7 aa, synthetic construct
TRREVNM

SEQ ID NO: 151383 - protein, 7 aa, synthetic construct
TRRFGDD

SEQ ID NO: 151384 - protein, 7 aa, synthetic construct
TRSAADR

SEQ ID NO: 151385 - protein, 7 aa, synthetic construct
TRSDARN

SEQ ID NO: 151386 - protein, 7 aa, synthetic construct
TRSDKPH

SEQ ID NO: 151387 - protein, 7 aa, synthetic construct
TRSDLMR

SEQ ID NO: 151388 - protein, 7 aa, synthetic construct
TRSDQRQ

SEQ ID NO: 151389 - protein, 7 aa, synthetic construct
TRSEKMI

SEQ ID NO: 151390 - protein, 7 aa, synthetic construct
TRSETKY

SEQ ID NO: 151391 - protein, 7 aa, synthetic construct
TRSGNIY

SEQ ID NO: 151392 - protein, 7 aa, synthetic construct
TRSGQDR

SEQ ID NO: 151393 - protein, 7 aa, synthetic construct
TRSHPPP

SEQ ID NO: 151394 - protein, 7 aa, synthetic construct
TRSIGVM

SEQ ID NO: 151395 - protein, 7 aa, synthetic construct
TRSIPTI

SEQ ID NO: 151396 - protein, 7 aa, synthetic construct
TRSITHS

SEQ ID NO: 151397 - protein, 7 aa, synthetic construct
TRSKDVV

SEQ ID NO: 151398 - protein, 7 aa, synthetic construct
TRSLVRD

SEQ ID NO: 151399 - protein, 7 aa, synthetic construct
TRSMHAV

SEQ ID NO: 151400 - protein, 7 aa, synthetic construct
TRSMIGV

SEQ ID NO: 151401 - protein, 7 aa, synthetic construct
TRSMSAL

SEQ ID NO: 151402 - protein, 7 aa, synthetic construct
TRSNTMY

SEQ ID NO: 151403 - protein, 7 aa, synthetic construct
TRSPAMM

SEQ ID NO: 151404 - protein, 7 aa, synthetic construct
TRSRADP

SEQ ID NO: 151405 - protein, 7 aa, synthetic construct
TRSSMQF

SEQ ID NO: 151406 - protein, 7 aa, synthetic construct
TRSTSNI

SEQ ID NO: 151407 - protein, 7 aa, synthetic construct
TRSVYKE

SEQ ID NO: 151408 - protein, 7 aa, synthetic construct
TRSYATN

SEQ ID NO: 151409 - protein, 7 aa, synthetic construct
TRTAESK

SEQ ID NO: 151410 - protein, 7 aa, synthetic construct
TRTAVEK

SEQ ID NO: 151411 - protein, 7 aa, synthetic construct
TRTDLIR

SEQ ID NO: 151412 - protein, 7 aa, synthetic construct
TRTFSKD

SEQ ID NO: 151413 - protein, 7 aa, synthetic construct
TRTGFPV

SEQ ID NO: 151414 - protein, 7 aa, synthetic construct
TRTGITY

SEQ ID NO: 151415 - protein, 7 aa, synthetic construct
TRTHGIP

SEQ ID NO: 151416 - protein, 7 aa, synthetic construct
TRTHQAG

SEQ ID NO: 151417 - protein, 7 aa, synthetic construct
TRTHQPT

SEQ ID NO: 151418 - protein, 7 aa, synthetic construct
TRTHTGA

SEQ ID NO: 151419 - protein, 7 aa, synthetic construct
TRTHTTN

SEQ ID NO: 151420 - protein, 7 aa, synthetic construct
TRTIQQH

SEQ ID NO: 151421 - protein, 7 aa, synthetic construct
TRTIQRE

SEQ ID NO: 151422 - protein, 7 aa, synthetic construct
TRTIRPD

SEQ ID NO: 151423 - protein, 7 aa, synthetic construct
TRTMMTH

SEQ ID NO: 151424 - protein, 7 aa, synthetic construct
TRTMQQM

SEQ ID NO: 151425 - protein, 7 aa, synthetic construct
TRTNDSK

SEQ ID NO: 151426 - protein, 7 aa, synthetic construct
TRTPHDK

SEQ ID NO: 151427 - protein, 7 aa, synthetic construct
TRTPPNF

SEQ ID NO: 151428 - protein, 7 aa, synthetic construct
TRTREGF

SEQ ID NO: 151429 - protein, 7 aa, synthetic construct
TRTRIME

SEQ ID NO: 151430 - protein, 7 aa, synthetic construct
TRVDKYP

SEQ ID NO: 151431 - protein, 7 aa, synthetic construct
TRVDLKY

SEQ ID NO: 151432 - protein, 7 aa, synthetic construct
TRVELSK

SEQ ID NO: 151433 - protein, 7 aa, synthetic construct
TRVEMGK

SEQ ID NO: 151434 - protein, 7 aa, synthetic construct
TRVHISA

SEQ ID NO: 151435 - protein, 7 aa, synthetic construct
TRVHNSI

SEQ ID NO: 151436 - protein, 7 aa, synthetic construct
TRVIKYE

SEQ ID NO: 151437 - protein, 7 aa, synthetic construct
TRVKMEQ

SEQ ID NO: 151438 - protein, 7 aa, synthetic construct
TRVLANH

SEQ ID NO: 151439 - protein, 7 aa, synthetic construct
TRVMQEK

SEQ ID NO: 151440 - protein, 7 aa, synthetic construct
TRVPAIN

SEQ ID NO: 151441 - protein, 7 aa, synthetic construct
TRVPLNS

SEQ ID NO: 151442 - protein, 7 aa, synthetic construct
TRVQSGQ

SEQ ID NO: 151443 - protein, 7 aa, synthetic construct
TRVRETQ

SEQ ID NO: 151444 - protein, 7 aa, synthetic construct
TRVRQEP

SEQ ID NO: 151445 - protein, 7 aa, synthetic construct
TRVSASI

SEQ ID NO: 151446 - protein, 7 aa, synthetic construct
TRVSRDV

SEQ ID NO: 151447 - protein, 7 aa, synthetic construct
TRWKDTD

SEQ ID NO: 151448 - protein, 7 aa, synthetic construct
TRYGNQQ

SEQ ID NO: 151449 - protein, 7 aa, synthetic construct
TRYKEMG

SEQ ID NO: 151450 - protein, 7 aa, synthetic construct
TRYKENG

SEQ ID NO: 151451 - protein, 7 aa, synthetic construct
TRYPQGA

SEQ ID NO: 151452 - protein, 7 aa, synthetic construct
TRYQNAQ

SEQ ID NO: 151453 - protein, 7 aa, synthetic construct
TSAHRGG

SEQ ID NO: 151454 - protein, 7 aa, synthetic construct
TSAKENK

SEQ ID NO: 151455 - protein, 7 aa, synthetic construct
TSAKGYM

SEQ ID NO: 151456 - protein, 7 aa, synthetic construct
TSALHGK

SEQ ID NO: 151457 - protein, 7 aa, synthetic construct
TSAPHSR

SEQ ID NO: 151458 - protein, 7 aa, synthetic construct
TSASYKT

SEQ ID NO: 151459 - protein, 7 aa, synthetic construct
TSAYDRI

SEQ ID NO: 151460 - protein, 7 aa, synthetic construct
TSAYQVK

SEQ ID NO: 151461 - protein, 7 aa, synthetic construct
TSDARSM

SEQ ID NO: 151462 - protein, 7 aa, synthetic construct
TSDKRFQ

SEQ ID NO: 151463 - protein, 7 aa, synthetic construct
TSDKRNY

SEQ ID NO: 151464 - protein, 7 aa, synthetic construct
TSDRPSR

SEQ ID NO: 151465 - protein, 7 aa, synthetic construct
TSDTRRN

SEQ ID NO: 151466 - protein, 7 aa, synthetic construct
TSEKNSR

SEQ ID NO: 151467 - protein, 7 aa, synthetic construct
TSEQKPR

SEQ ID NO: 151468 - protein, 7 aa, synthetic construct
TSERGRV

SEQ ID NO: 151469 - protein, 7 aa, synthetic construct
TSEVRRT

SEQ ID NO: 151470 - protein, 7 aa, synthetic construct
TSEYHAR

SEQ ID NO: 151471 - protein, 7 aa, synthetic construct
TSFHAKG

SEQ ID NO: 151472 - protein, 7 aa, synthetic construct
TSFHPIE

SEQ ID NO: 151473 - protein, 7 aa, synthetic construct
TSFQKNL

SEQ ID NO: 151474 - protein, 7 aa, synthetic construct
TSFRGKE

SEQ ID NO: 151475 - protein, 7 aa, synthetic construct
TSFRSEK

SEQ ID NO: 151476 - protein, 7 aa, synthetic construct
TSGAHQR

SEQ ID NO: 151477 - protein, 7 aa, synthetic construct
TSGFKIV

SEQ ID NO: 151478 - protein, 7 aa, synthetic construct
TSGGPRY

SEQ ID NO: 151479 - protein, 7 aa, synthetic construct
TSGGTRN

SEQ ID NO: 151480 - protein, 7 aa, synthetic construct
TSGGYVK

SEQ ID NO: 151481 - protein, 7 aa, synthetic construct
TSGHIPK

SEQ ID NO: 151482 - protein, 7 aa, synthetic construct
TSGHQRA

SEQ ID NO: 151483 - protein, 7 aa, synthetic construct
TSGKLHY

SEQ ID NO: 151484 - protein, 7 aa, synthetic construct
TSGKPIW

SEQ ID NO: 151485 - protein, 7 aa, synthetic construct
TSGLKTY

SEQ ID NO: 151486 - protein, 7 aa, synthetic construct
TSGMHPR

SEQ ID NO: 151487 - protein, 7 aa, synthetic construct
TSGMQSR

SEQ ID NO: 151488 - protein, 7 aa, synthetic construct
TSGNKYG

SEQ ID NO: 151489 - protein, 7 aa, synthetic construct
TSGNYKP

SEQ ID NO: 151490 - protein, 7 aa, synthetic construct
TSGPARQ

SEQ ID NO: 151491 - protein, 7 aa, synthetic construct
TSGPMMK

SEQ ID NO: 151492 - protein, 7 aa, synthetic construct
TSGQMQR

SEQ ID NO: 151493 - protein, 7 aa, synthetic construct
TSGQRSL

SEQ ID NO: 151494 - protein, 7 aa, synthetic construct
TSGRAAQ

SEQ ID NO: 151495 - protein, 7 aa, synthetic construct
TSGRSLI

SEQ ID NO: 151496 - protein, 7 aa, synthetic construct
TSGYAKT

SEQ ID NO: 151497 - protein, 7 aa, synthetic construct
TSGYPMK

SEQ ID NO: 151498 - protein, 7 aa, synthetic construct
TSHGLRN

SEQ ID NO: 151499 - protein, 7 aa, synthetic construct
TSHGQNR

SEQ ID NO: 151500 - protein, 7 aa, synthetic construct
TSHGRGG

SEQ ID NO: 151501 - protein, 7 aa, synthetic construct
TSHKEPR

SEQ ID NO: 151502 - protein, 7 aa, synthetic construct
TSHKIHS

SEQ ID NO: 151503 - protein, 7 aa, synthetic construct
TSHKPIV

SEQ ID NO: 151504 - protein, 7 aa, synthetic construct
TSHKPLI

SEQ ID NO: 151505 - protein, 7 aa, synthetic construct
TSHKPNL

SEQ ID NO: 151506 - protein, 7 aa, synthetic construct
TSHLKQL

SEQ ID NO: 151507 - protein, 7 aa, synthetic construct
TSHLKYT

SEQ ID NO: 151508 - protein, 7 aa, synthetic construct
TSHNARA

SEQ ID NO: 151509 - protein, 7 aa, synthetic construct
TSHNITR

SEQ ID NO: 151510 - protein, 7 aa, synthetic construct
TSHNTKL

SEQ ID NO: 151511 - protein, 7 aa, synthetic construct
TSHPVVR

SEQ ID NO: 151512 - protein, 7 aa, synthetic construct
TSHRVVS

SEQ ID NO: 151513 - protein, 7 aa, synthetic construct
TSHSQRV

SEQ ID NO: 151514 - protein, 7 aa, synthetic construct
TSHSRPL

SEQ ID NO: 151515 - protein, 7 aa, synthetic construct
TSHSVRS

SEQ ID NO: 151516 - protein, 7 aa, synthetic construct
TSHTIRN

SEQ ID NO: 151517 - protein, 7 aa, synthetic construct
TSHTTRT

SEQ ID NO: 151518 - protein, 7 aa, synthetic construct
TSHVRAN

SEQ ID NO: 151519 - protein, 7 aa, synthetic construct
TSHVRSA

SEQ ID NO: 151520 - protein, 7 aa, synthetic construct
TSHVRTQ

SEQ ID NO: 151521 - protein, 7 aa, synthetic construct
TSHYVKG

SEQ ID NO: 151522 - protein, 7 aa, synthetic construct
TSIGQHK

SEQ ID NO: 151523 - protein, 7 aa, synthetic construct
TSIHMGK

SEQ ID NO: 151524 - protein, 7 aa, synthetic construct
TSIKYSG

SEQ ID NO: 151525 - protein, 7 aa, synthetic construct
TSIQRQM

SEQ ID NO: 151526 - protein, 7 aa, synthetic construct
TSIRHSS

SEQ ID NO: 151527 - protein, 7 aa, synthetic construct
TSIRPAQ

SEQ ID NO: 151528 - protein, 7 aa, synthetic construct
TSISSRA

SEQ ID NO: 151529 - protein, 7 aa, synthetic construct
TSKAFPI

SEQ ID NO: 151530 - protein, 7 aa, synthetic construct
TSKAWQA

SEQ ID NO: 151531 - protein, 7 aa, synthetic construct
TSKDRDR

SEQ ID NO: 151532 - protein, 7 aa, synthetic construct
TSKDRYG

SEQ ID NO: 151533 - protein, 7 aa, synthetic construct
TSKDWKM

SEQ ID NO: 151534 - protein, 7 aa, synthetic construct
TSKFLAN

SEQ ID NO: 151535 - protein, 7 aa, synthetic construct
TSKFRDA

SEQ ID NO: 151536 - protein, 7 aa, synthetic construct
TSKFSAI

SEQ ID NO: 151537 - protein, 7 aa, synthetic construct
TSKGVSY

SEQ ID NO: 151538 - protein, 7 aa, synthetic construct
TSKGYRD

SEQ ID NO: 151539 - protein, 7 aa, synthetic construct
TSKHEAR

SEQ ID NO: 151540 - protein, 7 aa, synthetic construct
TSKHHGS

SEQ ID NO: 151541 - protein, 7 aa, synthetic construct
TSKHLLV

SEQ ID NO: 151542 - protein, 7 aa, synthetic construct
TSKHPTI

SEQ ID NO: 151543 - protein, 7 aa, synthetic construct
TSKIDRN

SEQ ID NO: 151544 - protein, 7 aa, synthetic construct
TSKMHQY

SEQ ID NO: 151545 - protein, 7 aa, synthetic construct
TSKMSRD

SEQ ID NO: 151546 - protein, 7 aa, synthetic construct
TSKPFNQ

SEQ ID NO: 151547 - protein, 7 aa, synthetic construct
TSKRENT

SEQ ID NO: 151548 - protein, 7 aa, synthetic construct
TSKTDNR

SEQ ID NO: 151549 - protein, 7 aa, synthetic construct
TSKVQHH

SEQ ID NO: 151550 - protein, 7 aa, synthetic construct
TSKYAAQ

SEQ ID NO: 151551 - protein, 7 aa, synthetic construct
TSKYIIA

SEQ ID NO: 151552 - protein, 7 aa, synthetic construct
TSKYKEI

SEQ ID NO: 151553 - protein, 7 aa, synthetic construct
TSKYPNS

SEQ ID NO: 151554 - protein, 7 aa, synthetic construct
TSLHRNQ

SEQ ID NO: 151555 - protein, 7 aa, synthetic construct
TSLSYKN

SEQ ID NO: 151556 - protein, 7 aa, synthetic construct
TSMAKVL

SEQ ID NO: 151557 - protein, 7 aa, synthetic construct
TSMGHKA

SEQ ID NO: 151558 - protein, 7 aa, synthetic construct
TSMGQPR

SEQ ID NO: 151559 - protein, 7 aa, synthetic construct
TSMGRNY

SEQ ID NO: 151560 - protein, 7 aa, synthetic construct
TSMHMSK

SEQ ID NO: 151561 - protein, 7 aa, synthetic construct
TSMHPQR

SEQ ID NO: 151562 - protein, 7 aa, synthetic construct
TSMKRFE

SEQ ID NO: 151563 - protein, 7 aa, synthetic construct
TSMNIAR

SEQ ID NO: 151564 - protein, 7 aa, synthetic construct
TSMREKS

SEQ ID NO: 151565 - protein, 7 aa, synthetic construct
TSMRHGG

SEQ ID NO: 151566 - protein, 7 aa, synthetic construct
TSMRHQP

SEQ ID NO: 151567 - protein, 7 aa, synthetic construct
TSMYGAK

SEQ ID NO: 151568 - protein, 7 aa, synthetic construct
TSNFEKK

SEQ ID NO: 151569 - protein, 7 aa, synthetic construct
TSNGRFM

SEQ ID NO: 151570 - protein, 7 aa, synthetic construct
TSNGTYR

SEQ ID NO: 151571 - protein, 7 aa, synthetic construct
TSNHNIR

SEQ ID NO: 151572 - protein, 7 aa, synthetic construct
TSNQKSW

SEQ ID NO: 151573 - protein, 7 aa, synthetic construct
TSNQSSR

SEQ ID NO: 151574 - protein, 7 aa, synthetic construct
TSNRSFP

SEQ ID NO: 151575 - protein, 7 aa, synthetic construct
TSNYTFK

SEQ ID NO: 151576 - protein, 7 aa, synthetic construct
TSPAPRY

SEQ ID NO: 151577 - protein, 7 aa, synthetic construct
TSPGYNR

SEQ ID NO: 151578 - protein, 7 aa, synthetic construct
TSPHGYK

SEQ ID NO: 151579 - protein, 7 aa, synthetic construct
TSPHRNL

SEQ ID NO: 151580 - protein, 7 aa, synthetic construct
TSPIRHQ

SEQ ID NO: 151581 - protein, 7 aa, synthetic construct
TSPKYTL

SEQ ID NO: 151582 - protein, 7 aa, synthetic construct
TSPLRRD

SEQ ID NO: 151583 - protein, 7 aa, synthetic construct
TSPNSQR

SEQ ID NO: 151584 - protein, 7 aa, synthetic construct
TSPRGYV

SEQ ID NO: 151585 - protein, 7 aa, synthetic construct
TSPTFQR

SEQ ID NO: 151586 - protein, 7 aa, synthetic construct
TSPVPMR

SEQ ID NO: 151587 - protein, 7 aa, synthetic construct
TSPYHKT

SEQ ID NO: 151588 - protein, 7 aa, synthetic construct
TSQAMKW

SEQ ID NO: 151589 - protein, 7 aa, synthetic construct
TSQHLGR

SEQ ID NO: 151590 - protein, 7 aa, synthetic construct
TSQKDQR

SEQ ID NO: 151591 - protein, 7 aa, synthetic construct
TSQKQDR

SEQ ID NO: 151592 - protein, 7 aa, synthetic construct
TSQMQKY

SEQ ID NO: 151593 - protein, 7 aa, synthetic construct
TSQQQRF

SEQ ID NO: 151594 - protein, 7 aa, synthetic construct
TSQRSLL

SEQ ID NO: 151595 - protein, 7 aa, synthetic construct
TSQSSNR

SEQ ID NO: 151596 - protein, 7 aa, synthetic construct
TSQYIKG

SEQ ID NO: 151597 - protein, 7 aa, synthetic construct
TSRDIPR

SEQ ID NO: 151598 - protein, 7 aa, synthetic construct
TSRDQSK

SEQ ID NO: 151599 - protein, 7 aa, synthetic construct
TSRENNR

SEQ ID NO: 151600 - protein, 7 aa, synthetic construct
TSRESAR

SEQ ID NO: 151601 - protein, 7 aa, synthetic construct
TSRGTRE

SEQ ID NO: 151602 - protein, 7 aa, synthetic construct
TSRPAPI

SEQ ID NO: 151603 - protein, 7 aa, synthetic construct
TSRPIRE

SEQ ID NO: 151604 - protein, 7 aa, synthetic construct
TSRPSPL

SEQ ID NO: 151605 - protein, 7 aa, synthetic construct
TSRPVRE

SEQ ID NO: 151606 - protein, 7 aa, synthetic construct
TSRQGFM

SEQ ID NO: 151607 - protein, 7 aa, synthetic construct
TSRQIRE

SEQ ID NO: 151608 - protein, 7 aa, synthetic construct
TSRQLAL

SEQ ID NO: 151609 - protein, 7 aa, synthetic construct
TSRQSAL

SEQ ID NO: 151610 - protein, 7 aa, synthetic construct
TSRSSSS

SEQ ID NO: 151611 - protein, 7 aa, synthetic construct
TSRVKFD

SEQ ID NO: 151612 - protein, 7 aa, synthetic construct
TSRVQYA

SEQ ID NO: 151613 - protein, 7 aa, synthetic construct
TSRYNMS

SEQ ID NO: 151614 - protein, 7 aa, synthetic construct
TSSFHKS

SEQ ID NO: 151615 - protein, 7 aa, synthetic construct
TSSGHQR

SEQ ID NO: 151616 - protein, 7 aa, synthetic construct
TSSIKPY

SEQ ID NO: 151617 - protein, 7 aa, synthetic construct
TSSIPNR

SEQ ID NO: 151618 - protein, 7 aa, synthetic construct
TSSKGFL

SEQ ID NO: 151619 - protein, 7 aa, synthetic construct
TSSKISY

SEQ ID NO: 151620 - protein, 7 aa, synthetic construct
TSSKPMF

SEQ ID NO: 151621 - protein, 7 aa, synthetic construct
TSSMHAK

SEQ ID NO: 151622 - protein, 7 aa, synthetic construct
TSSPRPF

SEQ ID NO: 151623 - protein, 7 aa, synthetic construct
TSSRINM

SEQ ID NO: 151624 - protein, 7 aa, synthetic construct
TSSRPSN

SEQ ID NO: 151625 - protein, 7 aa, synthetic construct
TSSVHGR

SEQ ID NO: 151626 - protein, 7 aa, synthetic construct
TSSWQSS

SEQ ID NO: 151627 - protein, 7 aa, synthetic construct
TSTERRL

SEQ ID NO: 151628 - protein, 7 aa, synthetic construct
TSTGHRL

SEQ ID NO: 151629 - protein, 7 aa, synthetic construct
TSTGHYK

SEQ ID NO: 151630 - protein, 7 aa, synthetic construct
TSTNAHK

SEQ ID NO: 151631 - protein, 7 aa, synthetic construct
TSTNRRE

SEQ ID NO: 151632 - protein, 7 aa, synthetic construct
TSTRPSL

SEQ ID NO: 151633 - protein, 7 aa, synthetic construct
TSTRVRD

SEQ ID NO: 151634 - protein, 7 aa, synthetic construct
TSTTKYN

SEQ ID NO: 151635 - protein, 7 aa, synthetic construct
TSTVHRG

SEQ ID NO: 151636 - protein, 7 aa, synthetic construct
TSTVMGK

SEQ ID NO: 151637 - protein, 7 aa, synthetic construct
TSTYVKA

SEQ ID NO: 151638 - protein, 7 aa, synthetic construct
TSVGSRF

SEQ ID NO: 151639 - protein, 7 aa, synthetic construct
TSVKHVT

SEQ ID NO: 151640 - protein, 7 aa, synthetic construct
TSVKYLS

SEQ ID NO: 151641 - protein, 7 aa, synthetic construct
TSVNVHK

SEQ ID NO: 151642 - protein, 7 aa, synthetic construct
TSVQRNH

SEQ ID NO: 151643 - protein, 7 aa, synthetic construct
TSVRAHV

SEQ ID NO: 151644 - protein, 7 aa, synthetic construct
TSVRKQD

SEQ ID NO: 151645 - protein, 7 aa, synthetic construct
TSVSARM

SEQ ID NO: 151646 - protein, 7 aa, synthetic construct
TSYAANK

SEQ ID NO: 151647 - protein, 7 aa, synthetic construct
TSYALKG

SEQ ID NO: 151648 - protein, 7 aa, synthetic construct
TSYGIKV

SEQ ID NO: 151649 - protein, 7 aa, synthetic construct
TSYGQSY

SEQ ID NO: 151650 - protein, 7 aa, synthetic construct
TSYGTQK

SEQ ID NO: 151651 - protein, 7 aa, synthetic construct
TSYKESK

SEQ ID NO: 151652 - protein, 7 aa, synthetic construct
TSYKPLV

SEQ ID NO: 151653 - protein, 7 aa, synthetic construct
TSYKPNI

SEQ ID NO: 151654 - protein, 7 aa, synthetic construct
TSYPGKT

SEQ ID NO: 151655 - protein, 7 aa, synthetic construct
TSYPKHP

SEQ ID NO: 151656 - protein, 7 aa, synthetic construct
TSYQTKQ

SEQ ID NO: 151657 - protein, 7 aa, synthetic construct
TSYSTGK

SEQ ID NO: 151658 - protein, 7 aa, synthetic construct
TTAASFR

SEQ ID NO: 151659 - protein, 7 aa, synthetic construct
TTARRDM

SEQ ID NO: 151660 - protein, 7 aa, synthetic construct
TTATRYN

SEQ ID NO: 151661 - protein, 7 aa, synthetic construct
TTAYGAH

SEQ ID NO: 151662 - protein, 7 aa, synthetic construct
TTAYKNL

SEQ ID NO: 151663 - protein, 7 aa, synthetic construct
TTDQNRR

SEQ ID NO: 151664 - protein, 7 aa, synthetic construct
TTDRLKL

SEQ ID NO: 151665 - protein, 7 aa, synthetic construct
TTDRLKQ

SEQ ID NO: 151666 - protein, 7 aa, synthetic construct
TTDRRFS

SEQ ID NO: 151667 - protein, 7 aa, synthetic construct
TTDYKRS

SEQ ID NO: 151668 - protein, 7 aa, synthetic construct
TTEKKMW

SEQ ID NO: 151669 - protein, 7 aa, synthetic construct
TTERLRA

SEQ ID NO: 151670 - protein, 7 aa, synthetic construct
TTERMVK

SEQ ID NO: 151671 - protein, 7 aa, synthetic construct
TTETYKK

SEQ ID NO: 151672 - protein, 7 aa, synthetic construct
TTEVKRN

SEQ ID NO: 151673 - protein, 7 aa, synthetic construct
TTGAHRA

SEQ ID NO: 151674 - protein, 7 aa, synthetic construct
TTGGYGK

SEQ ID NO: 151675 - protein, 7 aa, synthetic construct
TTGHFPK

SEQ ID NO: 151676 - protein, 7 aa, synthetic construct
TTGHVAK

SEQ ID NO: 151677 - protein, 7 aa, synthetic construct
TTGKYNS

SEQ ID NO: 151678 - protein, 7 aa, synthetic construct
TTGPGLR

SEQ ID NO: 151679 - protein, 7 aa, synthetic construct
TTGRHAM

SEQ ID NO: 151680 - protein, 7 aa, synthetic construct
TTGRVDK

SEQ ID NO: 151681 - protein, 7 aa, synthetic construct
TTGSNHK

SEQ ID NO: 151682 - protein, 7 aa, synthetic construct
TTGSTYR

SEQ ID NO: 151683 - protein, 7 aa, synthetic construct
TTGVMHR

SEQ ID NO: 151684 - protein, 7 aa, synthetic construct
TTGYLKP

SEQ ID NO: 151685 - protein, 7 aa, synthetic construct
TTGYMGK

SEQ ID NO: 151686 - protein, 7 aa, synthetic construct
TTGYNPK

SEQ ID NO: 151687 - protein, 7 aa, synthetic construct
TTHARST

SEQ ID NO: 151688 - protein, 7 aa, synthetic construct
TTHGPRP

SEQ ID NO: 151689 - protein, 7 aa, synthetic construct
TTHHAKM

SEQ ID NO: 151690 - protein, 7 aa, synthetic construct
TTHIKAT

SEQ ID NO: 151691 - protein, 7 aa, synthetic construct
TTHKGFS

SEQ ID NO: 151692 - protein, 7 aa, synthetic construct
TTHKSLL

SEQ ID NO: 151693 - protein, 7 aa, synthetic construct
TTHNMGR

SEQ ID NO: 151694 - protein, 7 aa, synthetic construct
TTHQYKN

SEQ ID NO: 151695 - protein, 7 aa, synthetic construct
TTHRGAG

SEQ ID NO: 151696 - protein, 7 aa, synthetic construct
TTHRISG

SEQ ID NO: 151697 - protein, 7 aa, synthetic construct
TTHSHKT

SEQ ID NO: 151698 - protein, 7 aa, synthetic construct
TTHSKFI

SEQ ID NO: 151699 - protein, 7 aa, synthetic construct
TTHTKSY

SEQ ID NO: 151700 - protein, 7 aa, synthetic construct
TTHVRLN

SEQ ID NO: 151701 - protein, 7 aa, synthetic construct
TTHYGSS

SEQ ID NO: 151702 - protein, 7 aa, synthetic construct
TTISHKM

SEQ ID NO: 151703 - protein, 7 aa, synthetic construct
TTKAYIS

SEQ ID NO: 151704 - protein, 7 aa, synthetic construct
TTKFDFN

SEQ ID NO: 151705 - protein, 7 aa, synthetic construct
TTKFQSH

SEQ ID NO: 151706 - protein, 7 aa, synthetic construct
TTKHAQL

SEQ ID NO: 151707 - protein, 7 aa, synthetic construct
TTKHMGL

SEQ ID NO: 151708 - protein, 7 aa, synthetic construct
TTKLRDM

SEQ ID NO: 151709 - protein, 7 aa, synthetic construct
TTKNSFV

SEQ ID NO: 151710 - protein, 7 aa, synthetic construct
TTKNSYG

SEQ ID NO: 151711 - protein, 7 aa, synthetic construct
TTKPGTY

SEQ ID NO: 151712 - protein, 7 aa, synthetic construct
TTKPMAY

SEQ ID NO: 151713 - protein, 7 aa, synthetic construct
TTKQYDR

SEQ ID NO: 151714 - protein, 7 aa, synthetic construct
TTKWQQG

SEQ ID NO: 151715 - protein, 7 aa, synthetic construct
TTKYASV

SEQ ID NO: 151716 - protein, 7 aa, synthetic construct
TTKYKID

SEQ ID NO: 151717 - protein, 7 aa, synthetic construct
TTKYLAS

SEQ ID NO: 151718 - protein, 7 aa, synthetic construct
TTKYSMA

SEQ ID NO: 151719 - protein, 7 aa, synthetic construct
TTKYSNA

SEQ ID NO: 151720 - protein, 7 aa, synthetic construct
TTKYTAI

SEQ ID NO: 151721 - protein, 7 aa, synthetic construct
TTLAKRD

SEQ ID NO: 151722 - protein, 7 aa, synthetic construct
TTLGTHR

SEQ ID NO: 151723 - protein, 7 aa, synthetic construct
TTLGYKV

SEQ ID NO: 151724 - protein, 7 aa, synthetic construct
TTLRNQY

SEQ ID NO: 151725 - protein, 7 aa, synthetic construct
TTLRSKD

SEQ ID NO: 151726 - protein, 7 aa, synthetic construct
TTLRTKD

SEQ ID NO: 151727 - protein, 7 aa, synthetic construct
TTMGGSR

SEQ ID NO: 151728 - protein, 7 aa, synthetic construct
TTMPHGK

SEQ ID NO: 151729 - protein, 7 aa, synthetic construct
TTMPKFS

SEQ ID NO: 151730 - protein, 7 aa, synthetic construct
TTMPKHS

SEQ ID NO: 151731 - protein, 7 aa, synthetic construct
TTMRAIS

SEQ ID NO: 151732 - protein, 7 aa, synthetic construct
TTMSKYG

SEQ ID NO: 151733 - protein, 7 aa, synthetic construct
TTNHQAK

SEQ ID NO: 151734 - protein, 7 aa, synthetic construct
TTNKTDK

SEQ ID NO: 151735 - protein, 7 aa, synthetic construct
TTNNKYL

SEQ ID NO: 151736 - protein, 7 aa, synthetic construct
TTNRVRE

SEQ ID NO: 151737 - protein, 7 aa, synthetic construct
TTNYKSG

SEQ ID NO: 151738 - protein, 7 aa, synthetic construct
TTNYNKL

SEQ ID NO: 151739 - protein, 7 aa, synthetic construct
TTNYTAR

SEQ ID NO: 151740 - protein, 7 aa, synthetic construct
TTPGKAW

SEQ ID NO: 151741 - protein, 7 aa, synthetic construct
TTPHGRA

SEQ ID NO: 151742 - protein, 7 aa, synthetic construct
TTPHRNI

SEQ ID NO: 151743 - protein, 7 aa, synthetic construct
TTPHRVM

SEQ ID NO: 151744 - protein, 7 aa, synthetic construct
TTPNQPR

SEQ ID NO: 151745 - protein, 7 aa, synthetic construct
TTPREMK

SEQ ID NO: 151746 - protein, 7 aa, synthetic construct
TTPRERI

SEQ ID NO: 151747 - protein, 7 aa, synthetic construct
TTPRVHM

SEQ ID NO: 151748 - protein, 7 aa, synthetic construct
TTQDRRN

SEQ ID NO: 151749 - protein, 7 aa, synthetic construct
TTQERGK

SEQ ID NO: 151750 - protein, 7 aa, synthetic construct
TTQHHAN

SEQ ID NO: 151751 - protein, 7 aa, synthetic construct
TTQHQTR

SEQ ID NO: 151752 - protein, 7 aa, synthetic construct
TTQKQQW

SEQ ID NO: 151753 - protein, 7 aa, synthetic construct
TTQKSRD

SEQ ID NO: 151754 - protein, 7 aa, synthetic construct
TTQMRTF

SEQ ID NO: 151755 - protein, 7 aa, synthetic construct
TTQPIRM

SEQ ID NO: 151756 - protein, 7 aa, synthetic construct
TTQRPAF

SEQ ID NO: 151757 - protein, 7 aa, synthetic construct
TTQSQRW

SEQ ID NO: 151758 - protein, 7 aa, synthetic construct
TTQSSHK

SEQ ID NO: 151759 - protein, 7 aa, synthetic construct
TTQTRIH

SEQ ID NO: 151760 - protein, 7 aa, synthetic construct
TTRAFKD

SEQ ID NO: 151761 - protein, 7 aa, synthetic construct
TTRDAQK

SEQ ID NO: 151762 - protein, 7 aa, synthetic construct
TTRDKIY

SEQ ID NO: 151763 - protein, 7 aa, synthetic construct
TTRDMQR

SEQ ID NO: 151764 - protein, 7 aa, synthetic construct
TTRDRER

SEQ ID NO: 151765 - protein, 7 aa, synthetic construct
TTRDSRQ

SEQ ID NO: 151766 - protein, 7 aa, synthetic construct
TTREAGR

SEQ ID NO: 151767 - protein, 7 aa, synthetic construct
TTREKYQ

SEQ ID NO: 151768 - protein, 7 aa, synthetic construct
TTRENRI

SEQ ID NO: 151769 - protein, 7 aa, synthetic construct
TTRHINA

SEQ ID NO: 151770 - protein, 7 aa, synthetic construct
TTRIIRE

SEQ ID NO: 151771 - protein, 7 aa, synthetic construct
TTRKDAV

SEQ ID NO: 151772 - protein, 7 aa, synthetic construct
TTRMLTH

SEQ ID NO: 151773 - protein, 7 aa, synthetic construct
TTRPNLI

SEQ ID NO: 151774 - protein, 7 aa, synthetic construct
TTRPSHN

SEQ ID NO: 151775 - protein, 7 aa, synthetic construct
TTSGVKW

SEQ ID NO: 151776 - protein, 7 aa, synthetic construct
TTSHARN

SEQ ID NO: 151777 - protein, 7 aa, synthetic construct
TTSHQQR

SEQ ID NO: 151778 - protein, 7 aa, synthetic construct
TTSHVLK

SEQ ID NO: 151779 - protein, 7 aa, synthetic construct
TTSNHPR

SEQ ID NO: 151780 - protein, 7 aa, synthetic construct
TTSRNTF

SEQ ID NO: 151781 - protein, 7 aa, synthetic construct
TTSYKSS

SEQ ID NO: 151782 - protein, 7 aa, synthetic construct
TTTHGQR

SEQ ID NO: 151783 - protein, 7 aa, synthetic construct
TTTHGRT

SEQ ID NO: 151784 - protein, 7 aa, synthetic construct
TTTHRTQ

SEQ ID NO: 151785 - protein, 7 aa, synthetic construct
TTTKGYM

SEQ ID NO: 151786 - protein, 7 aa, synthetic construct
TTTKWKE

SEQ ID NO: 151787 - protein, 7 aa, synthetic construct
TTTQGHR

SEQ ID NO: 151788 - protein, 7 aa, synthetic construct
TTTSTRY

SEQ ID NO: 151789 - protein, 7 aa, synthetic construct
TTTYGGK

SEQ ID NO: 151790 - protein, 7 aa, synthetic construct
TTTYGQK

SEQ ID NO: 151791 - protein, 7 aa, synthetic construct
TTVHGRN

SEQ ID NO: 151792 - protein, 7 aa, synthetic construct
TTVHRNS

SEQ ID NO: 151793 - protein, 7 aa, synthetic construct
TTVHTKY

SEQ ID NO: 151794 - protein, 7 aa, synthetic construct
TTVRVHP

SEQ ID NO: 151795 - protein, 7 aa, synthetic construct
TTVTQRN

SEQ ID NO: 151796 - protein, 7 aa, synthetic construct
TTVYPGR

SEQ ID NO: 151797 - protein, 7 aa, synthetic construct
TTWGPER

SEQ ID NO: 151798 - protein, 7 aa, synthetic construct
TTYAPKM

SEQ ID NO: 151799 - protein, 7 aa, synthetic construct
TTYATSY

SEQ ID NO: 151800 - protein, 7 aa, synthetic construct
TTYESHR

SEQ ID NO: 151801 - protein, 7 aa, synthetic construct
TTYGGNQ

SEQ ID NO: 151802 - protein, 7 aa, synthetic construct
TTYHSAH

SEQ ID NO: 151803 - protein, 7 aa, synthetic construct
TTYKSHS

SEQ ID NO: 151804 - protein, 7 aa, synthetic construct
TTYQKHN

SEQ ID NO: 151805 - protein, 7 aa, synthetic construct
TTYREKI

SEQ ID NO: 151806 - protein, 7 aa, synthetic construct
TTYSGKA

SEQ ID NO: 151807 - protein, 7 aa, synthetic construct
TTYSPKL

SEQ ID NO: 151808 - protein, 7 aa, synthetic construct
TVAGHQR

SEQ ID NO: 151809 - protein, 7 aa, synthetic construct
TVAHGSR

SEQ ID NO: 151810 - protein, 7 aa, synthetic construct
TVAHTRA

SEQ ID NO: 151811 - protein, 7 aa, synthetic construct
TVAHYQK

SEQ ID NO: 151812 - protein, 7 aa, synthetic construct
TVAMRRD

SEQ ID NO: 151813 - protein, 7 aa, synthetic construct
TVANRIT

SEQ ID NO: 151814 - protein, 7 aa, synthetic construct
TVARADR

SEQ ID NO: 151815 - protein, 7 aa, synthetic construct
TVARGHQ

SEQ ID NO: 151816 - protein, 7 aa, synthetic construct
TVARHAA

SEQ ID NO: 151817 - protein, 7 aa, synthetic construct
TVARSAY

SEQ ID NO: 151818 - protein, 7 aa, synthetic construct
TVDKPIR

SEQ ID NO: 151819 - protein, 7 aa, synthetic construct
TVDRAKY

SEQ ID NO: 151820 - protein, 7 aa, synthetic construct
TVDRPKF

SEQ ID NO: 151821 - protein, 7 aa, synthetic construct
TVDRYQK

SEQ ID NO: 151822 - protein, 7 aa, synthetic construct
TVDSKRH

SEQ ID NO: 151823 - protein, 7 aa, synthetic construct
TVEARRM

SEQ ID NO: 151824 - protein, 7 aa, synthetic construct
TVEKPKW

SEQ ID NO: 151825 - protein, 7 aa, synthetic construct
TVEMRAK

SEQ ID NO: 151826 - protein, 7 aa, synthetic construct
TVEQVRK

SEQ ID NO: 151827 - protein, 7 aa, synthetic construct
TVERGKF

SEQ ID NO: 151828 - protein, 7 aa, synthetic construct
TVGAMRN

SEQ ID NO: 151829 - protein, 7 aa, synthetic construct
TVGARVH

SEQ ID NO: 151830 - protein, 7 aa, synthetic construct
TVGASRG

SEQ ID NO: 151831 - protein, 7 aa, synthetic construct
TVGAVHR

SEQ ID NO: 151832 - protein, 7 aa, synthetic construct
TVGERRM

SEQ ID NO: 151833 - protein, 7 aa, synthetic construct
TVGKFSM

SEQ ID NO: 151834 - protein, 7 aa, synthetic construct
TVGKHYS

SEQ ID NO: 151835 - protein, 7 aa, synthetic construct
TVGMVRA

SEQ ID NO: 151836 - protein, 7 aa, synthetic construct
TVGNEKR

SEQ ID NO: 151837 - protein, 7 aa, synthetic construct
TVGNHRN

SEQ ID NO: 151838 - protein, 7 aa, synthetic construct
TVGNSGR

SEQ ID NO: 151839 - protein, 7 aa, synthetic construct
TVGQSRA

SEQ ID NO: 151840 - protein, 7 aa, synthetic construct
TVGRITH

SEQ ID NO: 151841 - protein, 7 aa, synthetic construct
TVGSLKH

SEQ ID NO: 151842 - protein, 7 aa, synthetic construct
TVGTNWS

SEQ ID NO: 151843 - protein, 7 aa, synthetic construct
TVGYANK

SEQ ID NO: 151844 - protein, 7 aa, synthetic construct
TVHGKYI

SEQ ID NO: 151845 - protein, 7 aa, synthetic construct
TVHGPKY

SEQ ID NO: 151846 - protein, 7 aa, synthetic construct
TVHKTTY

SEQ ID NO: 151847 - protein, 7 aa, synthetic construct
TVHKYPP

SEQ ID NO: 151848 - protein, 7 aa, synthetic construct
TVHQGPK

SEQ ID NO: 151849 - protein, 7 aa, synthetic construct
TVHQQRG

SEQ ID NO: 151850 - protein, 7 aa, synthetic construct
TVHRLSN

SEQ ID NO: 151851 - protein, 7 aa, synthetic construct
TVHVQRN

SEQ ID NO: 151852 - protein, 7 aa, synthetic construct
TVHYQSN

SEQ ID NO: 151853 - protein, 7 aa, synthetic construct
TVKFSTH

SEQ ID NO: 151854 - protein, 7 aa, synthetic construct
TVKGGQW

SEQ ID NO: 151855 - protein, 7 aa, synthetic construct
TVKHMIP

SEQ ID NO: 151856 - protein, 7 aa, synthetic construct
TVKHSMM

SEQ ID NO: 151857 - protein, 7 aa, synthetic construct
TVKMDLK

SEQ ID NO: 151858 - protein, 7 aa, synthetic construct
TVKPPHH

SEQ ID NO: 151859 - protein, 7 aa, synthetic construct
TVKQKDW

SEQ ID NO: 151860 - protein, 7 aa, synthetic construct
TVKRAFE

SEQ ID NO: 151861 - protein, 7 aa, synthetic construct
TVKSGHF

SEQ ID NO: 151862 - protein, 7 aa, synthetic construct
TVKSGIF

SEQ ID NO: 151863 - protein, 7 aa, synthetic construct
TVLKRND

SEQ ID NO: 151864 - protein, 7 aa, synthetic construct
TVLKRVD

SEQ ID NO: 151865 - protein, 7 aa, synthetic construct
TVMARQM

SEQ ID NO: 151866 - protein, 7 aa, synthetic construct
TVMKAYA

SEQ ID NO: 151867 - protein, 7 aa, synthetic construct
TVMNTHK

SEQ ID NO: 151868 - protein, 7 aa, synthetic construct
TVMPRDR

SEQ ID NO: 151869 - protein, 7 aa, synthetic construct
TVMPRNA

SEQ ID NO: 151870 - protein, 7 aa, synthetic construct
TVMREKF

SEQ ID NO: 151871 - protein, 7 aa, synthetic construct
TVMRERN

SEQ ID NO: 151872 - protein, 7 aa, synthetic construct
TVNHRMN

SEQ ID NO: 151873 - protein, 7 aa, synthetic construct
TVNPHSH

SEQ ID NO: 151874 - protein, 7 aa, synthetic construct
TVNPRHG

SEQ ID NO: 151875 - protein, 7 aa, synthetic construct
TVNRENK

SEQ ID NO: 151876 - protein, 7 aa, synthetic construct
TVNSDKR

SEQ ID NO: 151877 - protein, 7 aa, synthetic construct
TVNTERR

SEQ ID NO: 151878 - protein, 7 aa, synthetic construct
TVNVPAR

SEQ ID NO: 151879 - protein, 7 aa, synthetic construct
TVPDRYR

SEQ ID NO: 151880 - protein, 7 aa, synthetic construct
TVPGRPF

SEQ ID NO: 151881 - protein, 7 aa, synthetic construct
TVPGYRG

SEQ ID NO: 151882 - protein, 7 aa, synthetic construct
TVPIQGR

SEQ ID NO: 151883 - protein, 7 aa, synthetic construct
TVPKHFQ

SEQ ID NO: 151884 - protein, 7 aa, synthetic construct
TVPKIHF

SEQ ID NO: 151885 - protein, 7 aa, synthetic construct
TVPMSRG

SEQ ID NO: 151886 - protein, 7 aa, synthetic construct
TVPRPHQ

SEQ ID NO: 151887 - protein, 7 aa, synthetic construct
TVPRTLV

SEQ ID NO: 151888 - protein, 7 aa, synthetic construct
TVPTYRA

SEQ ID NO: 151889 - protein, 7 aa, synthetic construct
TVPTYRG

SEQ ID NO: 151890 - protein, 7 aa, synthetic construct
TVPYNSK

SEQ ID NO: 151891 - protein, 7 aa, synthetic construct
TVQDRKM

SEQ ID NO: 151892 - protein, 7 aa, synthetic construct
TVQHPSR

SEQ ID NO: 151893 - protein, 7 aa, synthetic construct
TVQHYAK

SEQ ID NO: 151894 - protein, 7 aa, synthetic construct
TVQKPHY

SEQ ID NO: 151895 - protein, 7 aa, synthetic construct
TVQVRHS

SEQ ID NO: 151896 - protein, 7 aa, synthetic construct
TVRAHGM

SEQ ID NO: 151897 - protein, 7 aa, synthetic construct
TVRANGF

SEQ ID NO: 151898 - protein, 7 aa, synthetic construct
TVRDKYL

SEQ ID NO: 151899 - protein, 7 aa, synthetic construct
TVREKYT

SEQ ID NO: 151900 - protein, 7 aa, synthetic construct
TVRKLSD

SEQ ID NO: 151901 - protein, 7 aa, synthetic construct
TVRLKNE

SEQ ID NO: 151902 - protein, 7 aa, synthetic construct
TVRLQRD

SEQ ID NO: 151903 - protein, 7 aa, synthetic construct
TVRMIDK

SEQ ID NO: 151904 - protein, 7 aa, synthetic construct
TVRPHAN

SEQ ID NO: 151905 - protein, 7 aa, synthetic construct
TVRPYGA

SEQ ID NO: 151906 - protein, 7 aa, synthetic construct
TVRQKDV

SEQ ID NO: 151907 - protein, 7 aa, synthetic construct
TVRSISH

SEQ ID NO: 151908 - protein, 7 aa, synthetic construct
TVRSSDK

SEQ ID NO: 151909 - protein, 7 aa, synthetic construct
TVRTDRS

SEQ ID NO: 151910 - protein, 7 aa, synthetic construct
TVSHRSQ

SEQ ID NO: 151911 - protein, 7 aa, synthetic construct
TVSHVRP

SEQ ID NO: 151912 - protein, 7 aa, synthetic construct
TVSKPSW

SEQ ID NO: 151913 - protein, 7 aa, synthetic construct
TVSPHVK

SEQ ID NO: 151914 - protein, 7 aa, synthetic construct
TVSQYKN

SEQ ID NO: 151915 - protein, 7 aa, synthetic construct
TVSRLRD

SEQ ID NO: 151916 - protein, 7 aa, synthetic construct
TVSRNNQ

SEQ ID NO: 151917 - protein, 7 aa, synthetic construct
TVSRSSL

SEQ ID NO: 151918 - protein, 7 aa, synthetic construct
TVSSRNL

SEQ ID NO: 151919 - protein, 7 aa, synthetic construct
TVSSYKM

SEQ ID NO: 151920 - protein, 7 aa, synthetic construct
TVSVRTH

SEQ ID NO: 151921 - protein, 7 aa, synthetic construct
TVTGARN

SEQ ID NO: 151922 - protein, 7 aa, synthetic construct
TVTGVHR

SEQ ID NO: 151923 - protein, 7 aa, synthetic construct
TVTRHQN

SEQ ID NO: 151924 - protein, 7 aa, synthetic construct
TVTRHTG

SEQ ID NO: 151925 - protein, 7 aa, synthetic construct
TVVQRHV

SEQ ID NO: 151926 - protein, 7 aa, synthetic construct
TVVRGQG

SEQ ID NO: 151927 - protein, 7 aa, synthetic construct
TVYKTSA

SEQ ID NO: 151928 - protein, 7 aa, synthetic construct
TVYNPKM

SEQ ID NO: 151929 - protein, 7 aa, synthetic construct
TVYQNQK

SEQ ID NO: 151930 - protein, 7 aa, synthetic construct
TVYQQAK

SEQ ID NO: 151931 - protein, 7 aa, synthetic construct
TVYSSGK

SEQ ID NO: 151932 - protein, 7 aa, synthetic construct
TVYTSKT

SEQ ID NO: 151933 - protein, 7 aa, synthetic construct
TWHGGST

SEQ ID NO: 151934 - protein, 7 aa, synthetic construct
TWNLEVD

SEQ ID NO: 151935 - protein, 7 aa, synthetic construct
TWQTKYE

SEQ ID NO: 151936 - protein, 7 aa, synthetic construct
TYAAGRA

SEQ ID NO: 151937 - protein, 7 aa, synthetic construct
TYAAVKG

SEQ ID NO: 151938 - protein, 7 aa, synthetic construct
TYAHQTK

SEQ ID NO: 151939 - protein, 7 aa, synthetic construct
TYAKGQY

SEQ ID NO: 151940 - protein, 7 aa, synthetic construct
TYANLKA

SEQ ID NO: 151941 - protein, 7 aa, synthetic construct
TYANSHK

SEQ ID NO: 151942 - protein, 7 aa, synthetic construct
TYAPRTA

SEQ ID NO: 151943 - protein, 7 aa, synthetic construct
TYASPKQ

SEQ ID NO: 151944 - protein, 7 aa, synthetic construct
TYATKGN

SEQ ID NO: 151945 - protein, 7 aa, synthetic construct
TYATRPL

SEQ ID NO: 151946 - protein, 7 aa, synthetic construct
TYDKSAR

SEQ ID NO: 151947 - protein, 7 aa, synthetic construct
TYDKSRS

SEQ ID NO: 151948 - protein, 7 aa, synthetic construct
TYDRIKT

SEQ ID NO: 151949 - protein, 7 aa, synthetic construct
TYDRVKM

SEQ ID NO: 151950 - protein, 7 aa, synthetic construct
TYGAAGK

SEQ ID NO: 151951 - protein, 7 aa, synthetic construct
TYGAATK

SEQ ID NO: 151952 - protein, 7 aa, synthetic construct
TYGAKLQ

SEQ ID NO: 151953 - protein, 7 aa, synthetic construct
TYGAKYV

SEQ ID NO: 151954 - protein, 7 aa, synthetic construct
TYGANKA

SEQ ID NO: 151955 - protein, 7 aa, synthetic construct
TYGAPLK

SEQ ID NO: 151956 - protein, 7 aa, synthetic construct
TYGAQHK

SEQ ID NO: 151957 - protein, 7 aa, synthetic construct
TYGGLRA

SEQ ID NO: 151958 - protein, 7 aa, synthetic construct
TYGGMQK

SEQ ID NO: 151959 - protein, 7 aa, synthetic construct
TYGGQKS

SEQ ID NO: 151960 - protein, 7 aa, synthetic construct
TYGKNLI

SEQ ID NO: 151961 - protein, 7 aa, synthetic construct
TYGQMPK

SEQ ID NO: 151962 - protein, 7 aa, synthetic construct
TYGQRNT

SEQ ID NO: 151963 - protein, 7 aa, synthetic construct
TYGRNGH

SEQ ID NO: 151964 - protein, 7 aa, synthetic construct
TYGSVTR

SEQ ID NO: 151965 - protein, 7 aa, synthetic construct
TYGTIRG

SEQ ID NO: 151966 - protein, 7 aa, synthetic construct
TYGVNKQ

SEQ ID NO: 151967 - protein, 7 aa, synthetic construct
TYHAIKG

SEQ ID NO: 151968 - protein, 7 aa, synthetic construct
TYHAPPK

SEQ ID NO: 151969 - protein, 7 aa, synthetic construct
TYHGLTL

SEQ ID NO: 151970 - protein, 7 aa, synthetic construct
TYHKEKI

SEQ ID NO: 151971 - protein, 7 aa, synthetic construct
TYHKHQV

SEQ ID NO: 151972 - protein, 7 aa, synthetic construct
TYHKTLS

SEQ ID NO: 151973 - protein, 7 aa, synthetic construct
TYHTKGM

SEQ ID NO: 151974 - protein, 7 aa, synthetic construct
TYHVSKA

SEQ ID NO: 151975 - protein, 7 aa, synthetic construct
TYIGQKV

SEQ ID NO: 151976 - protein, 7 aa, synthetic construct
TYKADPR

SEQ ID NO: 151977 - protein, 7 aa, synthetic construct
TYKAERI

SEQ ID NO: 151978 - protein, 7 aa, synthetic construct
TYKAMAS

SEQ ID NO: 151979 - protein, 7 aa, synthetic construct
TYKAMNS

SEQ ID NO: 151980 - protein, 7 aa, synthetic construct
TYKAQTY

SEQ ID NO: 151981 - protein, 7 aa, synthetic construct
TYKASLH

SEQ ID NO: 151982 - protein, 7 aa, synthetic construct
TYKDISK

SEQ ID NO: 151983 - protein, 7 aa, synthetic construct
TYKDRSA

SEQ ID NO: 151984 - protein, 7 aa, synthetic construct
TYKEARG

SEQ ID NO: 151985 - protein, 7 aa, synthetic construct
TYKEGTR

SEQ ID NO: 151986 - protein, 7 aa, synthetic construct
TYKGHLS

SEQ ID NO: 151987 - protein, 7 aa, synthetic construct
TYKGQPT

SEQ ID NO: 151988 - protein, 7 aa, synthetic construct
TYKGSGN

SEQ ID NO: 151989 - protein, 7 aa, synthetic construct
TYKGSKE

SEQ ID NO: 151990 - protein, 7 aa, synthetic construct
TYKHVQT

SEQ ID NO: 151991 - protein, 7 aa, synthetic construct
TYKINKD

SEQ ID NO: 151992 - protein, 7 aa, synthetic construct
TYKISGQ

SEQ ID NO: 151993 - protein, 7 aa, synthetic construct
TYKKFAE

SEQ ID NO: 151994 - protein, 7 aa, synthetic construct
TYKKIDM

SEQ ID NO: 151995 - protein, 7 aa, synthetic construct
TYKMATG

SEQ ID NO: 151996 - protein, 7 aa, synthetic construct
TYKNITG

SEQ ID NO: 151997 - protein, 7 aa, synthetic construct
TYKNQTI

SEQ ID NO: 151998 - protein, 7 aa, synthetic construct
TYKNSSQ

SEQ ID NO: 151999 - protein, 7 aa, synthetic construct
TYKNVPA

SEQ ID NO: 152000 - protein, 7 aa, synthetic construct
TYKPHAQ

SEQ ID NO: 152001 - protein, 7 aa, synthetic construct
TYKPKAD

SEQ ID NO: 152002 - protein, 7 aa, synthetic construct
TYKPNIS

SEQ ID NO: 152003 - protein, 7 aa, synthetic construct
TYKPQYN

SEQ ID NO: 152004 - protein, 7 aa, synthetic construct
TYKPRSE

SEQ ID NO: 152005 - protein, 7 aa, synthetic construct
TYKPVQQ

SEQ ID NO: 152006 - protein, 7 aa, synthetic construct
TYKQSHI

SEQ ID NO: 152007 - protein, 7 aa, synthetic construct
TYKQTPL

SEQ ID NO: 152008 - protein, 7 aa, synthetic construct
TYKQVGS

SEQ ID NO: 152009 - protein, 7 aa, synthetic construct
TYKRVDG

SEQ ID NO: 152010 - protein, 7 aa, synthetic construct
TYKSAHM

SEQ ID NO: 152011 - protein, 7 aa, synthetic construct
TYKSEIR

SEQ ID NO: 152012 - protein, 7 aa, synthetic construct
TYKSSGN

SEQ ID NO: 152013 - protein, 7 aa, synthetic construct
TYKTLHG

SEQ ID NO: 152014 - protein, 7 aa, synthetic construct
TYKTSQN

SEQ ID NO: 152015 - protein, 7 aa, synthetic construct
TYKVKEM

SEQ ID NO: 152016 - protein, 7 aa, synthetic construct
TYKVNHG

SEQ ID NO: 152017 - protein, 7 aa, synthetic construct
TYKVSPN

SEQ ID NO: 152018 - protein, 7 aa, synthetic construct
TYLKVKE

SEQ ID NO: 152019 - protein, 7 aa, synthetic construct
TYLNNKT

SEQ ID NO: 152020 - protein, 7 aa, synthetic construct
TYMKESK

SEQ ID NO: 152021 - protein, 7 aa, synthetic construct
TYNAKNW

SEQ ID NO: 152022 - protein, 7 aa, synthetic construct
TYNDKRG

SEQ ID NO: 152023 - protein, 7 aa, synthetic construct
TYNGPRM

SEQ ID NO: 152024 - protein, 7 aa, synthetic construct
TYNGVRI

SEQ ID NO: 152025 - protein, 7 aa, synthetic construct
TYNKAAW

SEQ ID NO: 152026 - protein, 7 aa, synthetic construct
TYNKAKD

SEQ ID NO: 152027 - protein, 7 aa, synthetic construct
TYNKEKI

SEQ ID NO: 152028 - protein, 7 aa, synthetic construct
TYNLMKG

SEQ ID NO: 152029 - protein, 7 aa, synthetic construct
TYNLTNK

SEQ ID NO: 152030 - protein, 7 aa, synthetic construct
TYNQEKR

SEQ ID NO: 152031 - protein, 7 aa, synthetic construct
TYNQNQK

SEQ ID NO: 152032 - protein, 7 aa, synthetic construct
TYNSRNS

SEQ ID NO: 152033 - protein, 7 aa, synthetic construct
TYPAGRM

SEQ ID NO: 152034 - protein, 7 aa, synthetic construct
TYPGHKS

SEQ ID NO: 152035 - protein, 7 aa, synthetic construct
TYPKIHT

SEQ ID NO: 152036 - protein, 7 aa, synthetic construct
TYPPGMP

SEQ ID NO: 152037 - protein, 7 aa, synthetic construct
TYPPMKQ

SEQ ID NO: 152038 - protein, 7 aa, synthetic construct
TYPQMKL

SEQ ID NO: 152039 - protein, 7 aa, synthetic construct
TYPSGRQ

SEQ ID NO: 152040 - protein, 7 aa, synthetic construct
TYPSNKG

SEQ ID NO: 152041 - protein, 7 aa, synthetic construct
TYQGRAS

SEQ ID NO: 152042 - protein, 7 aa, synthetic construct
TYQHTQK

SEQ ID NO: 152043 - protein, 7 aa, synthetic construct
TYQKIQM

SEQ ID NO: 152044 - protein, 7 aa, synthetic construct
TYQPKVL

SEQ ID NO: 152045 - protein, 7 aa, synthetic construct
TYQPSGK

SEQ ID NO: 152046 - protein, 7 aa, synthetic construct
TYQQKQL

SEQ ID NO: 152047 - protein, 7 aa, synthetic construct
TYQRQIP

SEQ ID NO: 152048 - protein, 7 aa, synthetic construct
TYQSGTR

SEQ ID NO: 152049 - protein, 7 aa, synthetic construct
TYRAANP

SEQ ID NO: 152050 - protein, 7 aa, synthetic construct
TYRLEKA

SEQ ID NO: 152051 - protein, 7 aa, synthetic construct
TYSGPLK

SEQ ID NO: 152052 - protein, 7 aa, synthetic construct
TYSINKA

SEQ ID NO: 152053 - protein, 7 aa, synthetic construct
TYSKHSN

SEQ ID NO: 152054 - protein, 7 aa, synthetic construct
TYSKMDR

SEQ ID NO: 152055 - protein, 7 aa, synthetic construct
TYSKPSG

SEQ ID NO: 152056 - protein, 7 aa, synthetic construct
TYSKREG

SEQ ID NO: 152057 - protein, 7 aa, synthetic construct
TYSNSRA

SEQ ID NO: 152058 - protein, 7 aa, synthetic construct
TYSPAKN

SEQ ID NO: 152059 - protein, 7 aa, synthetic construct
TYSTKSN

SEQ ID NO: 152060 - protein, 7 aa, synthetic construct
TYSVNRG

SEQ ID NO: 152061 - protein, 7 aa, synthetic construct
TYTGASK

SEQ ID NO: 152062 - protein, 7 aa, synthetic construct
TYTGTYK

SEQ ID NO: 152063 - protein, 7 aa, synthetic construct
TYTKDAK

SEQ ID NO: 152064 - protein, 7 aa, synthetic construct
TYTKEKM

SEQ ID NO: 152065 - protein, 7 aa, synthetic construct
TYTKKEL

SEQ ID NO: 152066 - protein, 7 aa, synthetic construct
TYTKNSL

SEQ ID NO: 152067 - protein, 7 aa, synthetic construct
TYTPKNN

SEQ ID NO: 152068 - protein, 7 aa, synthetic construct
TYTSQPK

SEQ ID NO: 152069 - protein, 7 aa, synthetic construct
TYTTGRN

SEQ ID NO: 152070 - protein, 7 aa, synthetic construct
TYTVREI

SEQ ID NO: 152071 - protein, 7 aa, synthetic construct
TYVKPHA

SEQ ID NO: 152072 - protein, 7 aa, synthetic construct
TYVNNKG

SEQ ID NO: 152073 - protein, 7 aa, synthetic construct
TYVRGKE

SEQ ID NO: 152074 - protein, 7 aa, synthetic construct
TYVSHKG

SEQ ID NO: 152075 - protein, 7 aa, synthetic construct
TYVTSKN

SEQ ID NO: 152076 - protein, 7 aa, synthetic construct
VAAGFKM

SEQ ID NO: 152077 - protein, 7 aa, synthetic construct
VAAKSIY

SEQ ID NO: 152078 - protein, 7 aa, synthetic construct
VAANEKR

SEQ ID NO: 152079 - protein, 7 aa, synthetic construct
VAANRTF

SEQ ID NO: 152080 - protein, 7 aa, synthetic construct
VAARAHN

SEQ ID NO: 152081 - protein, 7 aa, synthetic construct
VADGKKW

SEQ ID NO: 152082 - protein, 7 aa, synthetic construct
VADKFGR

SEQ ID NO: 152083 - protein, 7 aa, synthetic construct
VAERPIK

SEQ ID NO: 152084 - protein, 7 aa, synthetic construct
VAERRPT

SEQ ID NO: 152085 - protein, 7 aa, synthetic construct
VAEVKRF

SEQ ID NO: 152086 - protein, 7 aa, synthetic construct
VAGAKYG

SEQ ID NO: 152087 - protein, 7 aa, synthetic construct
VAGGKYF

SEQ ID NO: 152088 - protein, 7 aa, synthetic construct
VAGHTLK

SEQ ID NO: 152089 - protein, 7 aa, synthetic construct
VAGIRPM

SEQ ID NO: 152090 - protein, 7 aa, synthetic construct
VAGKSYA

SEQ ID NO: 152091 - protein, 7 aa, synthetic construct
VAGMAMR

SEQ ID NO: 152092 - protein, 7 aa, synthetic construct
VAGMKYG

SEQ ID NO: 152093 - protein, 7 aa, synthetic construct
VAGMPRM

SEQ ID NO: 152094 - protein, 7 aa, synthetic construct
VAGPERK

SEQ ID NO: 152095 - protein, 7 aa, synthetic construct
VAGPSMR

SEQ ID NO: 152096 - protein, 7 aa, synthetic construct
VAGQTKW

SEQ ID NO: 152097 - protein, 7 aa, synthetic construct
VAGRVRD

SEQ ID NO: 152098 - protein, 7 aa, synthetic construct
VAGSYKS

SEQ ID NO: 152099 - protein, 7 aa, synthetic construct
VAGYTHK

SEQ ID NO: 152100 - protein, 7 aa, synthetic construct
VAHILKN

SEQ ID NO: 152101 - protein, 7 aa, synthetic construct
VAHKFTT

SEQ ID NO: 152102 - protein, 7 aa, synthetic construct
VAHKPIL

SEQ ID NO: 152103 - protein, 7 aa, synthetic construct
VAHKSYG

SEQ ID NO: 152104 - protein, 7 aa, synthetic construct
VAHKTVY

SEQ ID NO: 152105 - protein, 7 aa, synthetic construct
VAHKYNA

SEQ ID NO: 152106 - protein, 7 aa, synthetic construct
VAHLRTN

SEQ ID NO: 152107 - protein, 7 aa, synthetic construct
VAHMKMS

SEQ ID NO: 152108 - protein, 7 aa, synthetic construct
VAHMSKS

SEQ ID NO: 152109 - protein, 7 aa, synthetic construct
VAHNIKA

SEQ ID NO: 152110 - protein, 7 aa, synthetic construct
VAHNKGH

SEQ ID NO: 152111 - protein, 7 aa, synthetic construct
VAHNLQY

SEQ ID NO: 152112 - protein, 7 aa, synthetic construct
VAHNMMK

SEQ ID NO: 152113 - protein, 7 aa, synthetic construct
VAHNRQL

SEQ ID NO: 152114 - protein, 7 aa, synthetic construct
VAHRPLS

SEQ ID NO: 152115 - protein, 7 aa, synthetic construct
VAHRQVT

SEQ ID NO: 152116 - protein, 7 aa, synthetic construct
VAHRVST

SEQ ID NO: 152117 - protein, 7 aa, synthetic construct
VAHTGNR

SEQ ID NO: 152118 - protein, 7 aa, synthetic construct
VAHTQNR

SEQ ID NO: 152119 - protein, 7 aa, synthetic construct
VAIAQRQ

SEQ ID NO: 152120 - protein, 7 aa, synthetic construct
VAIRKDV

SEQ ID NO: 152121 - protein, 7 aa, synthetic construct
VAKAYMS

SEQ ID NO: 152122 - protein, 7 aa, synthetic construct
VAKEAYR

SEQ ID NO: 152123 - protein, 7 aa, synthetic construct
VAKEHVR

SEQ ID NO: 152124 - protein, 7 aa, synthetic construct
VAKEYMR

SEQ ID NO: 152125 - protein, 7 aa, synthetic construct
VAKFHSA

SEQ ID NO: 152126 - protein, 7 aa, synthetic construct
VAKFIPP

SEQ ID NO: 152127 - protein, 7 aa, synthetic construct
VAKFQPQ

SEQ ID NO: 152128 - protein, 7 aa, synthetic construct
VAKFQRD

SEQ ID NO: 152129 - protein, 7 aa, synthetic construct
VAKGLDW

SEQ ID NO: 152130 - protein, 7 aa, synthetic construct
VAKGLSY

SEQ ID NO: 152131 - protein, 7 aa, synthetic construct
VAKGPNN

SEQ ID NO: 152132 - protein, 7 aa, synthetic construct
VAKGYNI

SEQ ID NO: 152133 - protein, 7 aa, synthetic construct
VAKHDLR

SEQ ID NO: 152134 - protein, 7 aa, synthetic construct
VAKHTPY

SEQ ID NO: 152135 - protein, 7 aa, synthetic construct
VAKITHI

SEQ ID NO: 152136 - protein, 7 aa, synthetic construct
VAKKFAD

SEQ ID NO: 152137 - protein, 7 aa, synthetic construct
VAKNGSW

SEQ ID NO: 152138 - protein, 7 aa, synthetic construct
VAKPVSY

SEQ ID NO: 152139 - protein, 7 aa, synthetic construct
VAKQSYN

SEQ ID NO: 152140 - protein, 7 aa, synthetic construct
VAKRETG

SEQ ID NO: 152141 - protein, 7 aa, synthetic construct
VAKRMET

SEQ ID NO: 152142 - protein, 7 aa, synthetic construct
VAKRPVE

SEQ ID NO: 152143 - protein, 7 aa, synthetic construct
VAKRQEL

SEQ ID NO: 152144 - protein, 7 aa, synthetic construct
VAKRQGE

SEQ ID NO: 152145 - protein, 7 aa, synthetic construct
VAKSSPW

SEQ ID NO: 152146 - protein, 7 aa, synthetic construct
VAKTYSQ

SEQ ID NO: 152147 - protein, 7 aa, synthetic construct
VAKYSGH

SEQ ID NO: 152148 - protein, 7 aa, synthetic construct
VAKYSNS

SEQ ID NO: 152149 - protein, 7 aa, synthetic construct
VALRHSG

SEQ ID NO: 152150 - protein, 7 aa, synthetic construct
VAMGMHK

SEQ ID NO: 152151 - protein, 7 aa, synthetic construct
VAMHVSK

SEQ ID NO: 152152 - protein, 7 aa, synthetic construct
VAMKFRD

SEQ ID NO: 152153 - protein, 7 aa, synthetic construct
VAMKHNM

SEQ ID NO: 152154 - protein, 7 aa, synthetic construct
VAMRHNP

SEQ ID NO: 152155 - protein, 7 aa, synthetic construct
VANENKR

SEQ ID NO: 152156 - protein, 7 aa, synthetic construct
VANHGSR

SEQ ID NO: 152157 - protein, 7 aa, synthetic construct
VANIRTT

SEQ ID NO: 152158 - protein, 7 aa, synthetic construct
VANMPMD

SEQ ID NO: 152159 - protein, 7 aa, synthetic construct
VANNNAR

SEQ ID NO: 152160 - protein, 7 aa, synthetic construct
VANRHAA

SEQ ID NO: 152161 - protein, 7 aa, synthetic construct
VANRSDR

SEQ ID NO: 152162 - protein, 7 aa, synthetic construct
VANRSYV

SEQ ID NO: 152163 - protein, 7 aa, synthetic construct
VANSMHR

SEQ ID NO: 152164 - protein, 7 aa, synthetic construct
VANSNYR

SEQ ID NO: 152165 - protein, 7 aa, synthetic construct
VAPGYKN

SEQ ID NO: 152166 - protein, 7 aa, synthetic construct
VAPMRNL

SEQ ID NO: 152167 - protein, 7 aa, synthetic construct
VAPQHNR

SEQ ID NO: 152168 - protein, 7 aa, synthetic construct
VAPQRYN

SEQ ID NO: 152169 - protein, 7 aa, synthetic construct
VAQARLV

SEQ ID NO: 152170 - protein, 7 aa, synthetic construct
VAQKHMY

SEQ ID NO: 152171 - protein, 7 aa, synthetic construct
VAQKRNE

SEQ ID NO: 152172 - protein, 7 aa, synthetic construct
VAQMANR

SEQ ID NO: 152173 - protein, 7 aa, synthetic construct
VAQNIRY

SEQ ID NO: 152174 - protein, 7 aa, synthetic construct
VAQNMQR

SEQ ID NO: 152175 - protein, 7 aa, synthetic construct
VAQQSRM

SEQ ID NO: 152176 - protein, 7 aa, synthetic construct
VAQQYVK

SEQ ID NO: 152177 - protein, 7 aa, synthetic construct
VAQRMEW

SEQ ID NO: 152178 - protein, 7 aa, synthetic construct
VAQSIRA

SEQ ID NO: 152179 - protein, 7 aa, synthetic construct
VAQSYQK

SEQ ID NO: 152180 - protein, 7 aa, synthetic construct
VAQTIRQ

SEQ ID NO: 152181 - protein, 7 aa, synthetic construct
VAQTRNM

SEQ ID NO: 152182 - protein, 7 aa, synthetic construct
VAQTYPR

SEQ ID NO: 152183 - protein, 7 aa, synthetic construct
VARAPMH

SEQ ID NO: 152184 - protein, 7 aa, synthetic construct
VARDHKL

SEQ ID NO: 152185 - protein, 7 aa, synthetic construct
VARDRAL

SEQ ID NO: 152186 - protein, 7 aa, synthetic construct
VARDRQT

SEQ ID NO: 152187 - protein, 7 aa, synthetic construct
VARDSRT

SEQ ID NO: 152188 - protein, 7 aa, synthetic construct
VARDTFK

SEQ ID NO: 152189 - protein, 7 aa, synthetic construct
VARDTGK

SEQ ID NO: 152190 - protein, 7 aa, synthetic construct
VAREIAR

SEQ ID NO: 152191 - protein, 7 aa, synthetic construct
VAREINK

SEQ ID NO: 152192 - protein, 7 aa, synthetic construct
VARERQV

SEQ ID NO: 152193 - protein, 7 aa, synthetic construct
VARGEKI

SEQ ID NO: 152194 - protein, 7 aa, synthetic construct
VARGLDR

SEQ ID NO: 152195 - protein, 7 aa, synthetic construct
VARGLVA

SEQ ID NO: 152196 - protein, 7 aa, synthetic construct
VARGPTN

SEQ ID NO: 152197 - protein, 7 aa, synthetic construct
VARIIGS

SEQ ID NO: 152198 - protein, 7 aa, synthetic construct
VARIMRE

SEQ ID NO: 152199 - protein, 7 aa, synthetic construct
VARKLEM

SEQ ID NO: 152200 - protein, 7 aa, synthetic construct
VARLGRE

SEQ ID NO: 152201 - protein, 7 aa, synthetic construct
VARLHTG

SEQ ID NO: 152202 - protein, 7 aa, synthetic construct
VARLSPA

SEQ ID NO: 152203 - protein, 7 aa, synthetic construct
VARMKEI

SEQ ID NO: 152204 - protein, 7 aa, synthetic construct
VARMTVG

SEQ ID NO: 152205 - protein, 7 aa, synthetic construct
VARNANA

SEQ ID NO: 152206 - protein, 7 aa, synthetic construct
VARNPHA

SEQ ID NO: 152207 - protein, 7 aa, synthetic construct
VARNPTY

SEQ ID NO: 152208 - protein, 7 aa, synthetic construct
VARNSGA

SEQ ID NO: 152209 - protein, 7 aa, synthetic construct
VARNVQG

SEQ ID NO: 152210 - protein, 7 aa, synthetic construct
VARPMHN

SEQ ID NO: 152211 - protein, 7 aa, synthetic construct
VARPYPQ

SEQ ID NO: 152212 - protein, 7 aa, synthetic construct
VARQHLG

SEQ ID NO: 152213 - protein, 7 aa, synthetic construct
VARQQSI

SEQ ID NO: 152214 - protein, 7 aa, synthetic construct
VARQTPA

SEQ ID NO: 152215 - protein, 7 aa, synthetic construct
VARQVSM

SEQ ID NO: 152216 - protein, 7 aa, synthetic construct
VARSDAK

SEQ ID NO: 152217 - protein, 7 aa, synthetic construct
VARSHPA

SEQ ID NO: 152218 - protein, 7 aa, synthetic construct
VARSHSG

SEQ ID NO: 152219 - protein, 7 aa, synthetic construct
VARSINQ

SEQ ID NO: 152220 - protein, 7 aa, synthetic construct
VARSIVT

SEQ ID NO: 152221 - protein, 7 aa, synthetic construct
VARSLPS

SEQ ID NO: 152222 - protein, 7 aa, synthetic construct
VARSMNT

SEQ ID NO: 152223 - protein, 7 aa, synthetic construct
VARTIDK

SEQ ID NO: 152224 - protein, 7 aa, synthetic construct
VARTSIG

SEQ ID NO: 152225 - protein, 7 aa, synthetic construct
VARVSPT

SEQ ID NO: 152226 - protein, 7 aa, synthetic construct
VASARFN

SEQ ID NO: 152227 - protein, 7 aa, synthetic construct
VASHTIR

SEQ ID NO: 152228 - protein, 7 aa, synthetic construct
VASRGDK

SEQ ID NO: 152229 - protein, 7 aa, synthetic construct
VASRLPV

SEQ ID NO: 152230 - protein, 7 aa, synthetic construct
VASRNSG

SEQ ID NO: 152231 - protein, 7 aa, synthetic construct
VASRQGF

SEQ ID NO: 152232 - protein, 7 aa, synthetic construct
VASYHKG

SEQ ID NO: 152233 - protein, 7 aa, synthetic construct
VATGRFV

SEQ ID NO: 152234 - protein, 7 aa, synthetic construct
VATHASR

SEQ ID NO: 152235 - protein, 7 aa, synthetic construct
VATRPHA

SEQ ID NO: 152236 - protein, 7 aa, synthetic construct
VATSHPR

SEQ ID NO: 152237 - protein, 7 aa, synthetic construct
VATTRHI

SEQ ID NO: 152238 - protein, 7 aa, synthetic construct
VATVHRG

SEQ ID NO: 152239 - protein, 7 aa, synthetic construct
VATYHKA

SEQ ID NO: 152240 - protein, 7 aa, synthetic construct
VAVHSQK

SEQ ID NO: 152241 - protein, 7 aa, synthetic construct
VAVKRDT

SEQ ID NO: 152242 - protein, 7 aa, synthetic construct
VAVKYTM

SEQ ID NO: 152243 - protein, 7 aa, synthetic construct
VAVRENR

SEQ ID NO: 152244 - protein, 7 aa, synthetic construct
VAYGMKG

SEQ ID NO: 152245 - protein, 7 aa, synthetic construct
VAYKVNI

SEQ ID NO: 152246 - protein, 7 aa, synthetic construct
VAYNITT

SEQ ID NO: 152247 - protein, 7 aa, synthetic construct
VDAKHLR

SEQ ID NO: 152248 - protein, 7 aa, synthetic construct
VDAKRYG

SEQ ID NO: 152249 - protein, 7 aa, synthetic construct
VDARIVK

SEQ ID NO: 152250 - protein, 7 aa, synthetic construct
VDEAKKR

SEQ ID NO: 152251 - protein, 7 aa, synthetic construct
VDGHHQS

SEQ ID NO: 152252 - protein, 7 aa, synthetic construct
VDGRIMK

SEQ ID NO: 152253 - protein, 7 aa, synthetic construct
VDGRNLR

SEQ ID NO: 152254 - protein, 7 aa, synthetic construct
VDGRQKM

SEQ ID NO: 152255 - protein, 7 aa, synthetic construct
VDHGHVF

SEQ ID NO: 152256 - protein, 7 aa, synthetic construct
VDHQKAR

SEQ ID NO: 152257 - protein, 7 aa, synthetic construct
VDIARNR

SEQ ID NO: 152258 - protein, 7 aa, synthetic construct
VDIPKNR

SEQ ID NO: 152259 - protein, 7 aa, synthetic construct
VDIRTKH

SEQ ID NO: 152260 - protein, 7 aa, synthetic construct
VDKAWMK

SEQ ID NO: 152261 - protein, 7 aa, synthetic construct
VDKKFAY

SEQ ID NO: 152262 - protein, 7 aa, synthetic construct
VDKMSKW

SEQ ID NO: 152263 - protein, 7 aa, synthetic construct
VDKNPPR

SEQ ID NO: 152264 - protein, 7 aa, synthetic construct
VDKNSTR

SEQ ID NO: 152265 - protein, 7 aa, synthetic construct
VDKNVRY

SEQ ID NO: 152266 - protein, 7 aa, synthetic construct
VDKPAMK

SEQ ID NO: 152267 - protein, 7 aa, synthetic construct
VDKQAAR

SEQ ID NO: 152268 - protein, 7 aa, synthetic construct
VDKQHMR

SEQ ID NO: 152269 - protein, 7 aa, synthetic construct
VDKQYFK

SEQ ID NO: 152270 - protein, 7 aa, synthetic construct
VDKRFMG

SEQ ID NO: 152271 - protein, 7 aa, synthetic construct
VDKRNQT

SEQ ID NO: 152272 - protein, 7 aa, synthetic construct
VDKTPSR

SEQ ID NO: 152273 - protein, 7 aa, synthetic construct
VDKWGKA

SEQ ID NO: 152274 - protein, 7 aa, synthetic construct
VDKYGIR

SEQ ID NO: 152275 - protein, 7 aa, synthetic construct
VDLNKGR

SEQ ID NO: 152276 - protein, 7 aa, synthetic construct
VDLRNRA

SEQ ID NO: 152277 - protein, 7 aa, synthetic construct
VDMAARK

SEQ ID NO: 152278 - protein, 7 aa, synthetic construct
VDMIRKV

SEQ ID NO: 152279 - protein, 7 aa, synthetic construct
VDNKRFL

SEQ ID NO: 152280 - protein, 7 aa, synthetic construct
VDNMRMR

SEQ ID NO: 152281 - protein, 7 aa, synthetic construct
VDNNRRL

SEQ ID NO: 152282 - protein, 7 aa, synthetic construct
VDNNTRK

SEQ ID NO: 152283 - protein, 7 aa, synthetic construct
VDPRPRN

SEQ ID NO: 152284 - protein, 7 aa, synthetic construct
VDQKHGR

SEQ ID NO: 152285 - protein, 7 aa, synthetic construct
VDQNLRK

SEQ ID NO: 152286 - protein, 7 aa, synthetic construct
VDQRNKN

SEQ ID NO: 152287 - protein, 7 aa, synthetic construct
VDRGRFT

SEQ ID NO: 152288 - protein, 7 aa, synthetic construct
VDRIKHF

SEQ ID NO: 152289 - protein, 7 aa, synthetic construct
VDRIRAN

SEQ ID NO: 152290 - protein, 7 aa, synthetic construct
VDRKALL

SEQ ID NO: 152291 - protein, 7 aa, synthetic construct
VDRKGVT

SEQ ID NO: 152292 - protein, 7 aa, synthetic construct
VDRKPIY

SEQ ID NO: 152293 - protein, 7 aa, synthetic construct
VDRKVSI

SEQ ID NO: 152294 - protein, 7 aa, synthetic construct
VDRLAMK

SEQ ID NO: 152295 - protein, 7 aa, synthetic construct
VDRLGVK

SEQ ID NO: 152296 - protein, 7 aa, synthetic construct
VDRLTKM

SEQ ID NO: 152297 - protein, 7 aa, synthetic construct
VDRLVKI

SEQ ID NO: 152298 - protein, 7 aa, synthetic construct
VDRMASK

SEQ ID NO: 152299 - protein, 7 aa, synthetic construct
VDRMGRA

SEQ ID NO: 152300 - protein, 7 aa, synthetic construct
VDRMLNK

SEQ ID NO: 152301 - protein, 7 aa, synthetic construct
VDRNART

SEQ ID NO: 152302 - protein, 7 aa, synthetic construct
VDRPNYK

SEQ ID NO: 152303 - protein, 7 aa, synthetic construct
VDRPSKS

SEQ ID NO: 152304 - protein, 7 aa, synthetic construct
VDRPTKQ

SEQ ID NO: 152305 - protein, 7 aa, synthetic construct
VDRQMAK

SEQ ID NO: 152306 - protein, 7 aa, synthetic construct
VDRSKHA

SEQ ID NO: 152307 - protein, 7 aa, synthetic construct
VDRSLKL

SEQ ID NO: 152308 - protein, 7 aa, synthetic construct
VDRSMIK

SEQ ID NO: 152309 - protein, 7 aa, synthetic construct
VDRTLTR

SEQ ID NO: 152310 - protein, 7 aa, synthetic construct
VDRVRPI

SEQ ID NO: 152311 - protein, 7 aa, synthetic construct
VDRVRVV

SEQ ID NO: 152312 - protein, 7 aa, synthetic construct
VDRWHEK

SEQ ID NO: 152313 - protein, 7 aa, synthetic construct
VDRYKAG

SEQ ID NO: 152314 - protein, 7 aa, synthetic construct
VDRYKSG

SEQ ID NO: 152315 - protein, 7 aa, synthetic construct
VDSARRM

SEQ ID NO: 152316 - protein, 7 aa, synthetic construct
VDSKPRL

SEQ ID NO: 152317 - protein, 7 aa, synthetic construct
VDSLAKR

SEQ ID NO: 152318 - protein, 7 aa, synthetic construct
VDSRGTR

SEQ ID NO: 152319 - protein, 7 aa, synthetic construct
VDSVRLK

SEQ ID NO: 152320 - protein, 7 aa, synthetic construct
VDTRPTR

SEQ ID NO: 152321 - protein, 7 aa, synthetic construct
VDVKARY

SEQ ID NO: 152322 - protein, 7 aa, synthetic construct
VDVQPKR

SEQ ID NO: 152323 - protein, 7 aa, synthetic construct
VDVRAAK

SEQ ID NO: 152324 - protein, 7 aa, synthetic construct
VEARAKA

SEQ ID NO: 152325 - protein, 7 aa, synthetic construct
VEARIKN

SEQ ID NO: 152326 - protein, 7 aa, synthetic construct
VEARQLK

SEQ ID NO: 152327 - protein, 7 aa, synthetic construct
VEATLKR

SEQ ID NO: 152328 - protein, 7 aa, synthetic construct
VEAVTKR

SEQ ID NO: 152329 - protein, 7 aa, synthetic construct
VEDKFKR

SEQ ID NO: 152330 - protein, 7 aa, synthetic construct
VEFNKMK

SEQ ID NO: 152331 - protein, 7 aa, synthetic construct
VEGKGIR

SEQ ID NO: 152332 - protein, 7 aa, synthetic construct
VEGKMKF

SEQ ID NO: 152333 - protein, 7 aa, synthetic construct
VEGKPKL

SEQ ID NO: 152334 - protein, 7 aa, synthetic construct
VEGKPRM

SEQ ID NO: 152335 - protein, 7 aa, synthetic construct
VEGKQKF

SEQ ID NO: 152336 - protein, 7 aa, synthetic construct
VEIKLRN

SEQ ID NO: 152337 - protein, 7 aa, synthetic construct
VEIKRMN

SEQ ID NO: 152338 - protein, 7 aa, synthetic construct
VEIRAQK

SEQ ID NO: 152339 - protein, 7 aa, synthetic construct
VEKAIRY

SEQ ID NO: 152340 - protein, 7 aa, synthetic construct
VEKFAGR

SEQ ID NO: 152341 - protein, 7 aa, synthetic construct
VEKFVAK

SEQ ID NO: 152342 - protein, 7 aa, synthetic construct
VEKGYGK

SEQ ID NO: 152343 - protein, 7 aa, synthetic construct
VEKGYSK

SEQ ID NO: 152344 - protein, 7 aa, synthetic construct
VEKIHVD

SEQ ID NO: 152345 - protein, 7 aa, synthetic construct
VEKIRYA

SEQ ID NO: 152346 - protein, 7 aa, synthetic construct
VEKKMFM

SEQ ID NO: 152347 - protein, 7 aa, synthetic construct
VEKKMIM

SEQ ID NO: 152348 - protein, 7 aa, synthetic construct
VEKLHAR

SEQ ID NO: 152349 - protein, 7 aa, synthetic construct
VEKPKYY

SEQ ID NO: 152350 - protein, 7 aa, synthetic construct
VEKQKYH

SEQ ID NO: 152351 - protein, 7 aa, synthetic construct
VEKQQRM

SEQ ID NO: 152352 - protein, 7 aa, synthetic construct
VEKQRSY

SEQ ID NO: 152353 - protein, 7 aa, synthetic construct
VEKQWNK

SEQ ID NO: 152354 - protein, 7 aa, synthetic construct
VEKRMTN

SEQ ID NO: 152355 - protein, 7 aa, synthetic construct
VEKRPTN

SEQ ID NO: 152356 - protein, 7 aa, synthetic construct
VEKYQKQ

SEQ ID NO: 152357 - protein, 7 aa, synthetic construct
VELMKRG

SEQ ID NO: 152358 - protein, 7 aa, synthetic construct
VELQNKK

SEQ ID NO: 152359 - protein, 7 aa, synthetic construct
VELRSKI

SEQ ID NO: 152360 - protein, 7 aa, synthetic construct
VEMGVKK

SEQ ID NO: 152361 - protein, 7 aa, synthetic construct
VEMKSQR

SEQ ID NO: 152362 - protein, 7 aa, synthetic construct
VEMPRGK

SEQ ID NO: 152363 - protein, 7 aa, synthetic construct
VEMRVKA

SEQ ID NO: 152364 - protein, 7 aa, synthetic construct
VENARGK

SEQ ID NO: 152365 - protein, 7 aa, synthetic construct
VENLRKT

SEQ ID NO: 152366 - protein, 7 aa, synthetic construct
VENRAKM

SEQ ID NO: 152367 - protein, 7 aa, synthetic construct
VENRQAK

SEQ ID NO: 152368 - protein, 7 aa, synthetic construct
VEPKHRQ

SEQ ID NO: 152369 - protein, 7 aa, synthetic construct
VEPRTRL

SEQ ID NO: 152370 - protein, 7 aa, synthetic construct
VEQIRKS

SEQ ID NO: 152371 - protein, 7 aa, synthetic construct
VEQKIRY

SEQ ID NO: 152372 - protein, 7 aa, synthetic construct
VEQLRTK

SEQ ID NO: 152373 - protein, 7 aa, synthetic construct
VEQMRKA

SEQ ID NO: 152374 - protein, 7 aa, synthetic construct
VEQRAGR

SEQ ID NO: 152375 - protein, 7 aa, synthetic construct
VERANKT

SEQ ID NO: 152376 - protein, 7 aa, synthetic construct
VERAVLT

SEQ ID NO: 152377 - protein, 7 aa, synthetic construct
VERGIVR

SEQ ID NO: 152378 - protein, 7 aa, synthetic construct
VERGTAR

SEQ ID NO: 152379 - protein, 7 aa, synthetic construct
VERKAAV

SEQ ID NO: 152380 - protein, 7 aa, synthetic construct
VERKGAY

SEQ ID NO: 152381 - protein, 7 aa, synthetic construct
VERKSAT

SEQ ID NO: 152382 - protein, 7 aa, synthetic construct
VERKVTM

SEQ ID NO: 152383 - protein, 7 aa, synthetic construct
VERLKHS

SEQ ID NO: 152384 - protein, 7 aa, synthetic construct
VERLTTK

SEQ ID NO: 152385 - protein, 7 aa, synthetic construct
VERMNKS

SEQ ID NO: 152386 - protein, 7 aa, synthetic construct
VERMPKV

SEQ ID NO: 152387 - protein, 7 aa, synthetic construct
VERMVKG

SEQ ID NO: 152388 - protein, 7 aa, synthetic construct
VERMVVK

SEQ ID NO: 152389 - protein, 7 aa, synthetic construct
VERNKSG

SEQ ID NO: 152390 - protein, 7 aa, synthetic construct
VERNMMK

SEQ ID NO: 152391 - protein, 7 aa, synthetic construct
VERNTKV

SEQ ID NO: 152392 - protein, 7 aa, synthetic construct
VERQAFK

SEQ ID NO: 152393 - protein, 7 aa, synthetic construct
VERQFKN

SEQ ID NO: 152394 - protein, 7 aa, synthetic construct
VERVTAR

SEQ ID NO: 152395 - protein, 7 aa, synthetic construct
VETGTQY

SEQ ID NO: 152396 - protein, 7 aa, synthetic construct
VETKRFM

SEQ ID NO: 152397 - protein, 7 aa, synthetic construct
VETPKQR

SEQ ID NO: 152398 - protein, 7 aa, synthetic construct
VFAKDQR

SEQ ID NO: 152399 - protein, 7 aa, synthetic construct
VFASQNR

SEQ ID NO: 152400 - protein, 7 aa, synthetic construct
VFDKPRG

SEQ ID NO: 152401 - protein, 7 aa, synthetic construct
VFDKRAN

SEQ ID NO: 152402 - protein, 7 aa, synthetic construct
VFEKFNK

SEQ ID NO: 152403 - protein, 7 aa, synthetic construct
VFERTKG

SEQ ID NO: 152404 - protein, 7 aa, synthetic construct
VFHPKQT

SEQ ID NO: 152405 - protein, 7 aa, synthetic construct
VFIKEKA

SEQ ID NO: 152406 - protein, 7 aa, synthetic construct
VFKAEQR

SEQ ID NO: 152407 - protein, 7 aa, synthetic construct
VFKDKHW

SEQ ID NO: 152408 - protein, 7 aa, synthetic construct
VFKDVSR

SEQ ID NO: 152409 - protein, 7 aa, synthetic construct
VFKHDAK

SEQ ID NO: 152410 - protein, 7 aa, synthetic construct
VFKHGQM

SEQ ID NO: 152411 - protein, 7 aa, synthetic construct
VFKLQRD

SEQ ID NO: 152412 - protein, 7 aa, synthetic construct
VFKNDGR

SEQ ID NO: 152413 - protein, 7 aa, synthetic construct
VFKPIQG

SEQ ID NO: 152414 - protein, 7 aa, synthetic construct
VFKPNSI

SEQ ID NO: 152415 - protein, 7 aa, synthetic construct
VFKQDQR

SEQ ID NO: 152416 - protein, 7 aa, synthetic construct
VFKQHAI

SEQ ID NO: 152417 - protein, 7 aa, synthetic construct
VFKQSHM

SEQ ID NO: 152418 - protein, 7 aa, synthetic construct
VFKRQGE

SEQ ID NO: 152419 - protein, 7 aa, synthetic construct
VFKTLHA

SEQ ID NO: 152420 - protein, 7 aa, synthetic construct
VFKTPHA

SEQ ID NO: 152421 - protein, 7 aa, synthetic construct
VFPSANR

SEQ ID NO: 152422 - protein, 7 aa, synthetic construct
VFQKHQN

SEQ ID NO: 152423 - protein, 7 aa, synthetic construct
VFQRSTM

SEQ ID NO: 152424 - protein, 7 aa, synthetic construct
VFREMKS

SEQ ID NO: 152425 - protein, 7 aa, synthetic construct
VFREMPK

SEQ ID NO: 152426 - protein, 7 aa, synthetic construct
VFREQKS

SEQ ID NO: 152427 - protein, 7 aa, synthetic construct
VFRETPK

SEQ ID NO: 152428 - protein, 7 aa, synthetic construct
VFRSSKE

SEQ ID NO: 152429 - protein, 7 aa, synthetic construct
VFRTSKE

SEQ ID NO: 152430 - protein, 7 aa, synthetic construct
VFSNVKG

SEQ ID NO: 152431 - protein, 7 aa, synthetic construct
VFSTHKG

SEQ ID NO: 152432 - protein, 7 aa, synthetic construct
VGAGHTR

SEQ ID NO: 152433 - protein, 7 aa, synthetic construct
VGAHLMR

SEQ ID NO: 152434 - protein, 7 aa, synthetic construct
VGAIPMK

SEQ ID NO: 152435 - protein, 7 aa, synthetic construct
VGAREQR

SEQ ID NO: 152436 - protein, 7 aa, synthetic construct
VGARGPL

SEQ ID NO: 152437 - protein, 7 aa, synthetic construct
VGARPSM

SEQ ID NO: 152438 - protein, 7 aa, synthetic construct
VGASKYI

SEQ ID NO: 152439 - protein, 7 aa, synthetic construct
VGAYVKQ

SEQ ID NO: 152440 - protein, 7 aa, synthetic construct
VGDAQRK

SEQ ID NO: 152441 - protein, 7 aa, synthetic construct
VGDKSFR

SEQ ID NO: 152442 - protein, 7 aa, synthetic construct
VGDRDKK

SEQ ID NO: 152443 - protein, 7 aa, synthetic construct
VGDRFSK

SEQ ID NO: 152444 - protein, 7 aa, synthetic construct
VGEPIKR

SEQ ID NO: 152445 - protein, 7 aa, synthetic construct
VGFQMKN

SEQ ID NO: 152446 - protein, 7 aa, synthetic construct
VGFSSNK

SEQ ID NO: 152447 - protein, 7 aa, synthetic construct
VGGGKPF

SEQ ID NO: 152448 - protein, 7 aa, synthetic construct
VGGHKFI

SEQ ID NO: 152449 - protein, 7 aa, synthetic construct
VGGHKQN

SEQ ID NO: 152450 - protein, 7 aa, synthetic construct
VGGHPVR

SEQ ID NO: 152451 - protein, 7 aa, synthetic construct
VGGHSVR

SEQ ID NO: 152452 - protein, 7 aa, synthetic construct
VGGKFVQ

SEQ ID NO: 152453 - protein, 7 aa, synthetic construct
VGGKLMI

SEQ ID NO: 152454 - protein, 7 aa, synthetic construct
VGGKSFQ

SEQ ID NO: 152455 - protein, 7 aa, synthetic construct
VGGNHPK

SEQ ID NO: 152456 - protein, 7 aa, synthetic construct
VGGNPLR

SEQ ID NO: 152457 - protein, 7 aa, synthetic construct
VGGPNRY

SEQ ID NO: 152458 - protein, 7 aa, synthetic construct
VGGPQLR

SEQ ID NO: 152459 - protein, 7 aa, synthetic construct
VGGQSGR

SEQ ID NO: 152460 - protein, 7 aa, synthetic construct
VGGQYLK

SEQ ID NO: 152461 - protein, 7 aa, synthetic construct
VGGRGSI

SEQ ID NO: 152462 - protein, 7 aa, synthetic construct
VGGSWPK

SEQ ID NO: 152463 - protein, 7 aa, synthetic construct
VGGTQNR

SEQ ID NO: 152464 - protein, 7 aa, synthetic construct
VGGTRGT

SEQ ID NO: 152465 - protein, 7 aa, synthetic construct
VGGYKTL

SEQ ID NO: 152466 - protein, 7 aa, synthetic construct
VGGYPGK

SEQ ID NO: 152467 - protein, 7 aa, synthetic construct
VGHKEAR

SEQ ID NO: 152468 - protein, 7 aa, synthetic construct
VGHKFGS

SEQ ID NO: 152469 - protein, 7 aa, synthetic construct
VGHMKGI

SEQ ID NO: 152470 - protein, 7 aa, synthetic construct
VGHNVSK

SEQ ID NO: 152471 - protein, 7 aa, synthetic construct
VGHQIGR

SEQ ID NO: 152472 - protein, 7 aa, synthetic construct
VGHTGLR

SEQ ID NO: 152473 - protein, 7 aa, synthetic construct
VGHYKPQ

SEQ ID NO: 152474 - protein, 7 aa, synthetic construct
VGIHANK

SEQ ID NO: 152475 - protein, 7 aa, synthetic construct
VGIHTRV

SEQ ID NO: 152476 - protein, 7 aa, synthetic construct
VGIQAIR

SEQ ID NO: 152477 - protein, 7 aa, synthetic construct
VGKAFHS

SEQ ID NO: 152478 - protein, 7 aa, synthetic construct
VGKAYGM

SEQ ID NO: 152479 - protein, 7 aa, synthetic construct
VGKELRY

SEQ ID NO: 152480 - protein, 7 aa, synthetic construct
VGKFVAN

SEQ ID NO: 152481 - protein, 7 aa, synthetic construct
VGKGQYN

SEQ ID NO: 152482 - protein, 7 aa, synthetic construct
VGKGVYM

SEQ ID NO: 152483 - protein, 7 aa, synthetic construct
VGKGVYN

SEQ ID NO: 152484 - protein, 7 aa, synthetic construct
VGKHFAG

SEQ ID NO: 152485 - protein, 7 aa, synthetic construct
VGKIQYP

SEQ ID NO: 152486 - protein, 7 aa, synthetic construct
VGKIYGH

SEQ ID NO: 152487 - protein, 7 aa, synthetic construct
VGKKFND

SEQ ID NO: 152488 - protein, 7 aa, synthetic construct
VGKMPQF

SEQ ID NO: 152489 - protein, 7 aa, synthetic construct
VGKMTYS

SEQ ID NO: 152490 - protein, 7 aa, synthetic construct
VGKNNFI

SEQ ID NO: 152491 - protein, 7 aa, synthetic construct
VGKNSYN

SEQ ID NO: 152492 - protein, 7 aa, synthetic construct
VGKPLPH

SEQ ID NO: 152493 - protein, 7 aa, synthetic construct
VGKQPKD

SEQ ID NO: 152494 - protein, 7 aa, synthetic construct
VGKQTYQ

SEQ ID NO: 152495 - protein, 7 aa, synthetic construct
VGKQWDY

SEQ ID NO: 152496 - protein, 7 aa, synthetic construct
VGKREFM

SEQ ID NO: 152497 - protein, 7 aa, synthetic construct
VGKSQYL

SEQ ID NO: 152498 - protein, 7 aa, synthetic construct
VGKTMDW

SEQ ID NO: 152499 - protein, 7 aa, synthetic construct
VGKVSYL

SEQ ID NO: 152500 - protein, 7 aa, synthetic construct
VGKYAIV

SEQ ID NO: 152501 - protein, 7 aa, synthetic construct
VGKYISM

SEQ ID NO: 152502 - protein, 7 aa, synthetic construct
VGKYQLN

SEQ ID NO: 152503 - protein, 7 aa, synthetic construct
VGLQSHK

SEQ ID NO: 152504 - protein, 7 aa, synthetic construct
VGMGQFK

SEQ ID NO: 152505 - protein, 7 aa, synthetic construct
VGMNGSR

SEQ ID NO: 152506 - protein, 7 aa, synthetic construct
VGMNTGR

SEQ ID NO: 152507 - protein, 7 aa, synthetic construct
VGMRGLS

SEQ ID NO: 152508 - protein, 7 aa, synthetic construct
VGMRQLS

SEQ ID NO: 152509 - protein, 7 aa, synthetic construct
VGNDIKR

SEQ ID NO: 152510 - protein, 7 aa, synthetic construct
VGNGSYK

SEQ ID NO: 152511 - protein, 7 aa, synthetic construct
VGNHNKT

SEQ ID NO: 152512 - protein, 7 aa, synthetic construct
VGNHTRF

SEQ ID NO: 152513 - protein, 7 aa, synthetic construct
VGNKVYG

SEQ ID NO: 152514 - protein, 7 aa, synthetic construct
VGNLRAL

SEQ ID NO: 152515 - protein, 7 aa, synthetic construct
VGNPHKT

SEQ ID NO: 152516 - protein, 7 aa, synthetic construct
VGNPKLH

SEQ ID NO: 152517 - protein, 7 aa, synthetic construct
VGPAHRN

SEQ ID NO: 152518 - protein, 7 aa, synthetic construct
VGPFAKS

SEQ ID NO: 152519 - protein, 7 aa, synthetic construct
VGPKMMI

SEQ ID NO: 152520 - protein, 7 aa, synthetic construct
VGPKTYS

SEQ ID NO: 152521 - protein, 7 aa, synthetic construct
VGPQRAF

SEQ ID NO: 152522 - protein, 7 aa, synthetic construct
VGPRLMT

SEQ ID NO: 152523 - protein, 7 aa, synthetic construct
VGQHAMK

SEQ ID NO: 152524 - protein, 7 aa, synthetic construct
VGQKHYA

SEQ ID NO: 152525 - protein, 7 aa, synthetic construct
VGQKSFY

SEQ ID NO: 152526 - protein, 7 aa, synthetic construct
VGQMAGR

SEQ ID NO: 152527 - protein, 7 aa, synthetic construct
VGQNVNR

SEQ ID NO: 152528 - protein, 7 aa, synthetic construct
VGQTHNR

SEQ ID NO: 152529 - protein, 7 aa, synthetic construct
VGQTRFH

SEQ ID NO: 152530 - protein, 7 aa, synthetic construct
VGQYAGR

SEQ ID NO: 152531 - protein, 7 aa, synthetic construct
VGRANLA

SEQ ID NO: 152532 - protein, 7 aa, synthetic construct
VGRAQSV

SEQ ID NO: 152533 - protein, 7 aa, synthetic construct
VGRELMK

SEQ ID NO: 152534 - protein, 7 aa, synthetic construct
VGRGIQA

SEQ ID NO: 152535 - protein, 7 aa, synthetic construct
VGRGQIV

SEQ ID NO: 152536 - protein, 7 aa, synthetic construct
VGRGTGQ

SEQ ID NO: 152537 - protein, 7 aa, synthetic construct
VGRIGDK

SEQ ID NO: 152538 - protein, 7 aa, synthetic construct
VGRIIGS

SEQ ID NO: 152539 - protein, 7 aa, synthetic construct
VGRIRDA

SEQ ID NO: 152540 - protein, 7 aa, synthetic construct
VGRITVP

SEQ ID NO: 152541 - protein, 7 aa, synthetic construct
VGRLERP

SEQ ID NO: 152542 - protein, 7 aa, synthetic construct
VGRLHVS

SEQ ID NO: 152543 - protein, 7 aa, synthetic construct
VGRLSAG

SEQ ID NO: 152544 - protein, 7 aa, synthetic construct
VGRLSMA

SEQ ID NO: 152545 - protein, 7 aa, synthetic construct
VGRMDSK

SEQ ID NO: 152546 - protein, 7 aa, synthetic construct
VGRMIRE

SEQ ID NO: 152547 - protein, 7 aa, synthetic construct
VGRMVGV

SEQ ID NO: 152548 - protein, 7 aa, synthetic construct
VGRNLPL

SEQ ID NO: 152549 - protein, 7 aa, synthetic construct
VGRNPQT

SEQ ID NO: 152550 - protein, 7 aa, synthetic construct
VGRNVTV

SEQ ID NO: 152551 - protein, 7 aa, synthetic construct
VGRPMVA

SEQ ID NO: 152552 - protein, 7 aa, synthetic construct
VGRPQMV

SEQ ID NO: 152553 - protein, 7 aa, synthetic construct
VGRQLPN

SEQ ID NO: 152554 - protein, 7 aa, synthetic construct
VGRQVYG

SEQ ID NO: 152555 - protein, 7 aa, synthetic construct
VGRSDQK

SEQ ID NO: 152556 - protein, 7 aa, synthetic construct
VGRSLGI

SEQ ID NO: 152557 - protein, 7 aa, synthetic construct
VGRSSII

SEQ ID NO: 152558 - protein, 7 aa, synthetic construct
VGRSTPS

SEQ ID NO: 152559 - protein, 7 aa, synthetic construct
VGRTDKL

SEQ ID NO: 152560 - protein, 7 aa, synthetic construct
VGRTNLN

SEQ ID NO: 152561 - protein, 7 aa, synthetic construct
VGRVPRE

SEQ ID NO: 152562 - protein, 7 aa, synthetic construct
VGRVQPI

SEQ ID NO: 152563 - protein, 7 aa, synthetic construct
VGRWSAD

SEQ ID NO: 152564 - protein, 7 aa, synthetic construct
VGSDIRR

SEQ ID NO: 152565 - protein, 7 aa, synthetic construct
VGSKFLP

SEQ ID NO: 152566 - protein, 7 aa, synthetic construct
VGSKLYT

SEQ ID NO: 152567 - protein, 7 aa, synthetic construct
VGSKYTV

SEQ ID NO: 152568 - protein, 7 aa, synthetic construct
VGSLRMS

SEQ ID NO: 152569 - protein, 7 aa, synthetic construct
VGSLRQF

SEQ ID NO: 152570 - protein, 7 aa, synthetic construct
VGSMNYK

SEQ ID NO: 152571 - protein, 7 aa, synthetic construct
VGSNRFN

SEQ ID NO: 152572 - protein, 7 aa, synthetic construct
VGSPRHF

SEQ ID NO: 152573 - protein, 7 aa, synthetic construct
VGSPRLI

SEQ ID NO: 152574 - protein, 7 aa, synthetic construct
VGSTTYN

SEQ ID NO: 152575 - protein, 7 aa, synthetic construct
VGSVYKQ

SEQ ID NO: 152576 - protein, 7 aa, synthetic construct
VGTGMSR

SEQ ID NO: 152577 - protein, 7 aa, synthetic construct
VGTHNLR

SEQ ID NO: 152578 - protein, 7 aa, synthetic construct
VGTQSHR

SEQ ID NO: 152579 - protein, 7 aa, synthetic construct
VGTYMHK

SEQ ID NO: 152580 - protein, 7 aa, synthetic construct
VGTYPHK

SEQ ID NO: 152581 - protein, 7 aa, synthetic construct
VGVNERK

SEQ ID NO: 152582 - protein, 7 aa, synthetic construct
VGVPRLG

SEQ ID NO: 152583 - protein, 7 aa, synthetic construct
VGVRMGH

SEQ ID NO: 152584 - protein, 7 aa, synthetic construct
VGYGSNK

SEQ ID NO: 152585 - protein, 7 aa, synthetic construct
VGYGSTT

SEQ ID NO: 152586 - protein, 7 aa, synthetic construct
VGYKAPH

SEQ ID NO: 152587 - protein, 7 aa, synthetic construct
VGYSGVQ

SEQ ID NO: 152588 - protein, 7 aa, synthetic construct
VGYSTIT

SEQ ID NO: 152589 - protein, 7 aa, synthetic construct
VHAAGGR

SEQ ID NO: 152590 - protein, 7 aa, synthetic construct
VHAARQH

SEQ ID NO: 152591 - protein, 7 aa, synthetic construct
VHAKGML

SEQ ID NO: 152592 - protein, 7 aa, synthetic construct
VHAKMVQ

SEQ ID NO: 152593 - protein, 7 aa, synthetic construct
VHAMKQL

SEQ ID NO: 152594 - protein, 7 aa, synthetic construct
VHANLRA

SEQ ID NO: 152595 - protein, 7 aa, synthetic construct
VHANVAR

SEQ ID NO: 152596 - protein, 7 aa, synthetic construct
VHARSVN

SEQ ID NO: 152597 - protein, 7 aa, synthetic construct
VHARTTS

SEQ ID NO: 152598 - protein, 7 aa, synthetic construct
VHARVMG

SEQ ID NO: 152599 - protein, 7 aa, synthetic construct
VHDIKRN

SEQ ID NO: 152600 - protein, 7 aa, synthetic construct
VHDKFNK

SEQ ID NO: 152601 - protein, 7 aa, synthetic construct
VHDKMGK

SEQ ID NO: 152602 - protein, 7 aa, synthetic construct
VHFKGSV

SEQ ID NO: 152603 - protein, 7 aa, synthetic construct
VHGGKVF

SEQ ID NO: 152604 - protein, 7 aa, synthetic construct
VHGGMRM

SEQ ID NO: 152605 - protein, 7 aa, synthetic construct
VHGGVRA

SEQ ID NO: 152606 - protein, 7 aa, synthetic construct
VHGHIKV

SEQ ID NO: 152607 - protein, 7 aa, synthetic construct
VHGKYVG

SEQ ID NO: 152608 - protein, 7 aa, synthetic construct
VHGLGYK

SEQ ID NO: 152609 - protein, 7 aa, synthetic construct
VHGNMSK

SEQ ID NO: 152610 - protein, 7 aa, synthetic construct
VHGQARG

SEQ ID NO: 152611 - protein, 7 aa, synthetic construct
VHGRIAP

SEQ ID NO: 152612 - protein, 7 aa, synthetic construct
VHGRPIA

SEQ ID NO: 152613 - protein, 7 aa, synthetic construct
VHGRQNA

SEQ ID NO: 152614 - protein, 7 aa, synthetic construct
VHGRTQG

SEQ ID NO: 152615 - protein, 7 aa, synthetic construct
VHGRTSQ

SEQ ID NO: 152616 - protein, 7 aa, synthetic construct
VHGSGPR

SEQ ID NO: 152617 - protein, 7 aa, synthetic construct
VHGSSAR

SEQ ID NO: 152618 - protein, 7 aa, synthetic construct
VHGTPRT

SEQ ID NO: 152619 - protein, 7 aa, synthetic construct
VHGTRMM

SEQ ID NO: 152620 - protein, 7 aa, synthetic construct
VHGYTAK

SEQ ID NO: 152621 - protein, 7 aa, synthetic construct
VHHGSRP

SEQ ID NO: 152622 - protein, 7 aa, synthetic construct
VHHNLAY

SEQ ID NO: 152623 - protein, 7 aa, synthetic construct
VHHRGSI

SEQ ID NO: 152624 - protein, 7 aa, synthetic construct
VHHSGRT

SEQ ID NO: 152625 - protein, 7 aa, synthetic construct
VHIASLQ

SEQ ID NO: 152626 - protein, 7 aa, synthetic construct
VHIGPRV

SEQ ID NO: 152627 - protein, 7 aa, synthetic construct
VHINHGK

SEQ ID NO: 152628 - protein, 7 aa, synthetic construct
VHIPKPP

SEQ ID NO: 152629 - protein, 7 aa, synthetic construct
VHKAVMV

SEQ ID NO: 152630 - protein, 7 aa, synthetic construct
VHKFIKD

SEQ ID NO: 152631 - protein, 7 aa, synthetic construct
VHKFTSS

SEQ ID NO: 152632 - protein, 7 aa, synthetic construct
VHKHSQG

SEQ ID NO: 152633 - protein, 7 aa, synthetic construct
VHKIAHS

SEQ ID NO: 152634 - protein, 7 aa, synthetic construct
VHKKDFI

SEQ ID NO: 152635 - protein, 7 aa, synthetic construct
VHKMQMN

SEQ ID NO: 152636 - protein, 7 aa, synthetic construct
VHKPVSM

SEQ ID NO: 152637 - protein, 7 aa, synthetic construct
VHKQHFQ

SEQ ID NO: 152638 - protein, 7 aa, synthetic construct
VHKQHPP

SEQ ID NO: 152639 - protein, 7 aa, synthetic construct
VHKQIAV

SEQ ID NO: 152640 - protein, 7 aa, synthetic construct
VHKSVFA

SEQ ID NO: 152641 - protein, 7 aa, synthetic construct
VHKVKYE

SEQ ID NO: 152642 - protein, 7 aa, synthetic construct
VHKVQNL

SEQ ID NO: 152643 - protein, 7 aa, synthetic construct
VHKVRGD

SEQ ID NO: 152644 - protein, 7 aa, synthetic construct
VHKYSVG

SEQ ID NO: 152645 - protein, 7 aa, synthetic construct
VHMSQTK

SEQ ID NO: 152646 - protein, 7 aa, synthetic construct
VHMSSAK

SEQ ID NO: 152647 - protein, 7 aa, synthetic construct
VHNAVRV

SEQ ID NO: 152648 - protein, 7 aa, synthetic construct
VHNHKFA

SEQ ID NO: 152649 - protein, 7 aa, synthetic construct
VHNLSGK

SEQ ID NO: 152650 - protein, 7 aa, synthetic construct
VHNLSKM

SEQ ID NO: 152651 - protein, 7 aa, synthetic construct
VHNPRIQ

SEQ ID NO: 152652 - protein, 7 aa, synthetic construct
VHNRTAN

SEQ ID NO: 152653 - protein, 7 aa, synthetic construct
VHNVPRT

SEQ ID NO: 152654 - protein, 7 aa, synthetic construct
VHPNVRG

SEQ ID NO: 152655 - protein, 7 aa, synthetic construct
VHPRSTS

SEQ ID NO: 152656 - protein, 7 aa, synthetic construct
VHPTKVF

SEQ ID NO: 152657 - protein, 7 aa, synthetic construct
VHPVKRD

SEQ ID NO: 152658 - protein, 7 aa, synthetic construct
VHQGPTD

SEQ ID NO: 152659 - protein, 7 aa, synthetic construct
VHQHFKS

SEQ ID NO: 152660 - protein, 7 aa, synthetic construct
VHQKSVY

SEQ ID NO: 152661 - protein, 7 aa, synthetic construct
VHQLKHQ

SEQ ID NO: 152662 - protein, 7 aa, synthetic construct
VHQPRGF

SEQ ID NO: 152663 - protein, 7 aa, synthetic construct
VHQSAMR

SEQ ID NO: 152664 - protein, 7 aa, synthetic construct
VHQSYPK

SEQ ID NO: 152665 - protein, 7 aa, synthetic construct
VHQTFTK

SEQ ID NO: 152666 - protein, 7 aa, synthetic construct
VHQTRVI

SEQ ID NO: 152667 - protein, 7 aa, synthetic construct
VHRGSGF

SEQ ID NO: 152668 - protein, 7 aa, synthetic construct
VHRLVNP

SEQ ID NO: 152669 - protein, 7 aa, synthetic construct
VHRPQTI

SEQ ID NO: 152670 - protein, 7 aa, synthetic construct
VHRQQTA

SEQ ID NO: 152671 - protein, 7 aa, synthetic construct
VHSGSPR

SEQ ID NO: 152672 - protein, 7 aa, synthetic construct
VHSLNGR

SEQ ID NO: 152673 - protein, 7 aa, synthetic construct
VHSNTAK

SEQ ID NO: 152674 - protein, 7 aa, synthetic construct
VHSRGAA

SEQ ID NO: 152675 - protein, 7 aa, synthetic construct
VHSRPMA

SEQ ID NO: 152676 - protein, 7 aa, synthetic construct
VHSSQMR

SEQ ID NO: 152677 - protein, 7 aa, synthetic construct
VHSSQQR

SEQ ID NO: 152678 - protein, 7 aa, synthetic construct
VHSTQMR

SEQ ID NO: 152679 - protein, 7 aa, synthetic construct
VHSVGNR

SEQ ID NO: 152680 - protein, 7 aa, synthetic construct
VHSVTRQ

SEQ ID NO: 152681 - protein, 7 aa, synthetic construct
VHTKHNV

SEQ ID NO: 152682 - protein, 7 aa, synthetic construct
VHTNALR

SEQ ID NO: 152683 - protein, 7 aa, synthetic construct
VHTNIPR

SEQ ID NO: 152684 - protein, 7 aa, synthetic construct
VHTQAPK

SEQ ID NO: 152685 - protein, 7 aa, synthetic construct
VHTQYNK

SEQ ID NO: 152686 - protein, 7 aa, synthetic construct
VHTRQIP

SEQ ID NO: 152687 - protein, 7 aa, synthetic construct
VHTTNNR

SEQ ID NO: 152688 - protein, 7 aa, synthetic construct
VHVRVKE

SEQ ID NO: 152689 - protein, 7 aa, synthetic construct
VHVTSAK

SEQ ID NO: 152690 - protein, 7 aa, synthetic construct
VHYQKNS

SEQ ID NO: 152691 - protein, 7 aa, synthetic construct
VHYRQQD

SEQ ID NO: 152692 - protein, 7 aa, synthetic construct
VHYTAGS

SEQ ID NO: 152693 - protein, 7 aa, synthetic construct
VIARGAG

SEQ ID NO: 152694 - protein, 7 aa, synthetic construct
VIELRKN

SEQ ID NO: 152695 - protein, 7 aa, synthetic construct
VIENRKF

SEQ ID NO: 152696 - protein, 7 aa, synthetic construct
VIGAKHT

SEQ ID NO: 152697 - protein, 7 aa, synthetic construct
VIGGHNK

SEQ ID NO: 152698 - protein, 7 aa, synthetic construct
VIGGVAR

SEQ ID NO: 152699 - protein, 7 aa, synthetic construct
VIGGYKP

SEQ ID NO: 152700 - protein, 7 aa, synthetic construct
VIGMYKA

SEQ ID NO: 152701 - protein, 7 aa, synthetic construct
VIGRESR

SEQ ID NO: 152702 - protein, 7 aa, synthetic construct
VIHGPKM

SEQ ID NO: 152703 - protein, 7 aa, synthetic construct
VIHQVTK

SEQ ID NO: 152704 - protein, 7 aa, synthetic construct
VIHRANA

SEQ ID NO: 152705 - protein, 7 aa, synthetic construct
VIHRHPS

SEQ ID NO: 152706 - protein, 7 aa, synthetic construct
VIHTSRT

SEQ ID NO: 152707 - protein, 7 aa, synthetic construct
VIHVTAK

SEQ ID NO: 152708 - protein, 7 aa, synthetic construct
VIKGYGT

SEQ ID NO: 152709 - protein, 7 aa, synthetic construct
VIKIHNS

SEQ ID NO: 152710 - protein, 7 aa, synthetic construct
VIKMRHE

SEQ ID NO: 152711 - protein, 7 aa, synthetic construct
VIKMRIE

SEQ ID NO: 152712 - protein, 7 aa, synthetic construct
VIKQAHY

SEQ ID NO: 152713 - protein, 7 aa, synthetic construct
VIKQKVP

SEQ ID NO: 152714 - protein, 7 aa, synthetic construct
VIKREFN

SEQ ID NO: 152715 - protein, 7 aa, synthetic construct
VIKRELV

SEQ ID NO: 152716 - protein, 7 aa, synthetic construct
VIKREPL

SEQ ID NO: 152717 - protein, 7 aa, synthetic construct
VIKREQN

SEQ ID NO: 152718 - protein, 7 aa, synthetic construct
VIKRETQ

SEQ ID NO: 152719 - protein, 7 aa, synthetic construct
VIKYQTG

SEQ ID NO: 152720 - protein, 7 aa, synthetic construct
VIMKHNA

SEQ ID NO: 152721 - protein, 7 aa, synthetic construct
VINAAQP

SEQ ID NO: 152722 - protein, 7 aa, synthetic construct
VINQAHR

SEQ ID NO: 152723 - protein, 7 aa, synthetic construct
VINRHQA

SEQ ID NO: 152724 - protein, 7 aa, synthetic construct
VINVHKA

SEQ ID NO: 152725 - protein, 7 aa, synthetic construct
VIPAARH

SEQ ID NO: 152726 - protein, 7 aa, synthetic construct
VIPARMN

SEQ ID NO: 152727 - protein, 7 aa, synthetic construct
VIPERKY

SEQ ID NO: 152728 - protein, 7 aa, synthetic construct
VIPHQRM

SEQ ID NO: 152729 - protein, 7 aa, synthetic construct
VIPHRVQ

SEQ ID NO: 152730 - protein, 7 aa, synthetic construct
VIPNRNL

SEQ ID NO: 152731 - protein, 7 aa, synthetic construct
VIPNVRS

SEQ ID NO: 152732 - protein, 7 aa, synthetic construct
VIPQQRN

SEQ ID NO: 152733 - protein, 7 aa, synthetic construct
VIPQRIN

SEQ ID NO: 152734 - protein, 7 aa, synthetic construct
VIPRASI

SEQ ID NO: 152735 - protein, 7 aa, synthetic construct
VIPRINS

SEQ ID NO: 152736 - protein, 7 aa, synthetic construct
VIPRNYG

SEQ ID NO: 152737 - protein, 7 aa, synthetic construct
VIPSGYK

SEQ ID NO: 152738 - protein, 7 aa, synthetic construct
VIPSMRQ

SEQ ID NO: 152739 - protein, 7 aa, synthetic construct
VIQKPHQ

SEQ ID NO: 152740 - protein, 7 aa, synthetic construct
VIQNRNL

SEQ ID NO: 152741 - protein, 7 aa, synthetic construct
VIQTKYG

SEQ ID NO: 152742 - protein, 7 aa, synthetic construct
VIRDARQ

SEQ ID NO: 152743 - protein, 7 aa, synthetic construct
VIRDHRN

SEQ ID NO: 152744 - protein, 7 aa, synthetic construct
VIRDQRV

SEQ ID NO: 152745 - protein, 7 aa, synthetic construct
VIRDRNY

SEQ ID NO: 152746 - protein, 7 aa, synthetic construct
VIRGDKT

SEQ ID NO: 152747 - protein, 7 aa, synthetic construct
VIRGIQA

SEQ ID NO: 152748 - protein, 7 aa, synthetic construct
VIRGQPA

SEQ ID NO: 152749 - protein, 7 aa, synthetic construct
VIRGSAH

SEQ ID NO: 152750 - protein, 7 aa, synthetic construct
VIRGSSH

SEQ ID NO: 152751 - protein, 7 aa, synthetic construct
VIRGTHP

SEQ ID NO: 152752 - protein, 7 aa, synthetic construct
VIRNDRG

SEQ ID NO: 152753 - protein, 7 aa, synthetic construct
VIRNEGR

SEQ ID NO: 152754 - protein, 7 aa, synthetic construct
VIRNINN

SEQ ID NO: 152755 - protein, 7 aa, synthetic construct
VIRNVEK

SEQ ID NO: 152756 - protein, 7 aa, synthetic construct
VIRQFPA

SEQ ID NO: 152757 - protein, 7 aa, synthetic construct
VIRQHTG

SEQ ID NO: 152758 - protein, 7 aa, synthetic construct
VIRSAGG

SEQ ID NO: 152759 - protein, 7 aa, synthetic construct
VIRSAQG

SEQ ID NO: 152760 - protein, 7 aa, synthetic construct
VIRTQAG

SEQ ID NO: 152761 - protein, 7 aa, synthetic construct
VIRTQSG

SEQ ID NO: 152762 - protein, 7 aa, synthetic construct
VIRTSHP

SEQ ID NO: 152763 - protein, 7 aa, synthetic construct
VISGGYK

SEQ ID NO: 152764 - protein, 7 aa, synthetic construct
VISHGRP

SEQ ID NO: 152765 - protein, 7 aa, synthetic construct
VISNHRQ

SEQ ID NO: 152766 - protein, 7 aa, synthetic construct
VISNTRG

SEQ ID NO: 152767 - protein, 7 aa, synthetic construct
VISPKYT

SEQ ID NO: 152768 - protein, 7 aa, synthetic construct
VISRGSM

SEQ ID NO: 152769 - protein, 7 aa, synthetic construct
VISSRHV

SEQ ID NO: 152770 - protein, 7 aa, synthetic construct
VITGKYT

SEQ ID NO: 152771 - protein, 7 aa, synthetic construct
VITHSRA

SEQ ID NO: 152772 - protein, 7 aa, synthetic construct
VITKRGD

SEQ ID NO: 152773 - protein, 7 aa, synthetic construct
VITKSIM

SEQ ID NO: 152774 - protein, 7 aa, synthetic construct
VITNHNR

SEQ ID NO: 152775 - protein, 7 aa, synthetic construct
VITPRHA

SEQ ID NO: 152776 - protein, 7 aa, synthetic construct
VITQHRG

SEQ ID NO: 152777 - protein, 7 aa, synthetic construct
VITSRSN

SEQ ID NO: 152778 - protein, 7 aa, synthetic construct
VITTSRQ

SEQ ID NO: 152779 - protein, 7 aa, synthetic construct
VIVRNAG

SEQ ID NO: 152780 - protein, 7 aa, synthetic construct
VIYNQKA

SEQ ID NO: 152781 - protein, 7 aa, synthetic construct
VKADVAR

SEQ ID NO: 152782 - protein, 7 aa, synthetic construct
VKAHTIL

SEQ ID NO: 152783 - protein, 7 aa, synthetic construct
VKAHTPT

SEQ ID NO: 152784 - protein, 7 aa, synthetic construct
VKALSSY

SEQ ID NO: 152785 - protein, 7 aa, synthetic construct
VKAPFAS

SEQ ID NO: 152786 - protein, 7 aa, synthetic construct
VKAQTIF

SEQ ID NO: 152787 - protein, 7 aa, synthetic construct
VKASALF

SEQ ID NO: 152788 - protein, 7 aa, synthetic construct
VKASTFV

SEQ ID NO: 152789 - protein, 7 aa, synthetic construct
VKATLKP

SEQ ID NO: 152790 - protein, 7 aa, synthetic construct
VKATRYE

SEQ ID NO: 152791 - protein, 7 aa, synthetic construct
VKAYDKA

SEQ ID NO: 152792 - protein, 7 aa, synthetic construct
VKAYETR

SEQ ID NO: 152793 - protein, 7 aa, synthetic construct
VKDFIGK

SEQ ID NO: 152794 - protein, 7 aa, synthetic construct
VKDFTSR

SEQ ID NO: 152795 - protein, 7 aa, synthetic construct
VKDGYMR

SEQ ID NO: 152796 - protein, 7 aa, synthetic construct
VKDIRFP

SEQ ID NO: 152797 - protein, 7 aa, synthetic construct
VKDKVDR

SEQ ID NO: 152798 - protein, 7 aa, synthetic construct
VKDPISR

SEQ ID NO: 152799 - protein, 7 aa, synthetic construct
VKDQIHW

SEQ ID NO: 152800 - protein, 7 aa, synthetic construct
VKDQYPK

SEQ ID NO: 152801 - protein, 7 aa, synthetic construct
VKDRGNY

SEQ ID NO: 152802 - protein, 7 aa, synthetic construct
VKDSKHY

SEQ ID NO: 152803 - protein, 7 aa, synthetic construct
VKDSRSW

SEQ ID NO: 152804 - protein, 7 aa, synthetic construct
VKDYGVR

SEQ ID NO: 152805 - protein, 7 aa, synthetic construct
VKEAAGR

SEQ ID NO: 152806 - protein, 7 aa, synthetic construct
VKEAALN

SEQ ID NO: 152807 - protein, 7 aa, synthetic construct
VKEIRGY

SEQ ID NO: 152808 - protein, 7 aa, synthetic construct
VKEKLSW

SEQ ID NO: 152809 - protein, 7 aa, synthetic construct
VKEKWSN

SEQ ID NO: 152810 - protein, 7 aa, synthetic construct
VKEKYPF

SEQ ID NO: 152811 - protein, 7 aa, synthetic construct
VKEMNKW

SEQ ID NO: 152812 - protein, 7 aa, synthetic construct
VKEPRVF

SEQ ID NO: 152813 - protein, 7 aa, synthetic construct
VKERDRV

SEQ ID NO: 152814 - protein, 7 aa, synthetic construct
VKERQNM

SEQ ID NO: 152815 - protein, 7 aa, synthetic construct
VKEYSQK

SEQ ID NO: 152816 - protein, 7 aa, synthetic construct
VKFESVK

SEQ ID NO: 152817 - protein, 7 aa, synthetic construct
VKFGPIN

SEQ ID NO: 152818 - protein, 7 aa, synthetic construct
VKFHGAT

SEQ ID NO: 152819 - protein, 7 aa, synthetic construct
VKFHTQN

SEQ ID NO: 152820 - protein, 7 aa, synthetic construct
VKFKYTE

SEQ ID NO: 152821 - protein, 7 aa, synthetic construct
VKFNAMA

SEQ ID NO: 152822 - protein, 7 aa, synthetic construct
VKFNPRD

SEQ ID NO: 152823 - protein, 7 aa, synthetic construct
VKFPHNG

SEQ ID NO: 152824 - protein, 7 aa, synthetic construct
VKFSNNV

SEQ ID NO: 152825 - protein, 7 aa, synthetic construct
VKFSPHS

SEQ ID NO: 152826 - protein, 7 aa, synthetic construct
VKGAELR

SEQ ID NO: 152827 - protein, 7 aa, synthetic construct
VKGAGYM

SEQ ID NO: 152828 - protein, 7 aa, synthetic construct
VKGAYER

SEQ ID NO: 152829 - protein, 7 aa, synthetic construct
VKGDPSK

SEQ ID NO: 152830 - protein, 7 aa, synthetic construct
VKGDQAR

SEQ ID NO: 152831 - protein, 7 aa, synthetic construct
VKGDVSR

SEQ ID NO: 152832 - protein, 7 aa, synthetic construct
VKGEARM

SEQ ID NO: 152833 - protein, 7 aa, synthetic construct
VKGEMSR

SEQ ID NO: 152834 - protein, 7 aa, synthetic construct
VKGEPVK

SEQ ID NO: 152835 - protein, 7 aa, synthetic construct
VKGETRV

SEQ ID NO: 152836 - protein, 7 aa, synthetic construct
VKGFRIE

SEQ ID NO: 152837 - protein, 7 aa, synthetic construct
VKGGPMN

SEQ ID NO: 152838 - protein, 7 aa, synthetic construct
VKGHFPN

SEQ ID NO: 152839 - protein, 7 aa, synthetic construct
VKGHIMN

SEQ ID NO: 152840 - protein, 7 aa, synthetic construct
VKGHNLL

SEQ ID NO: 152841 - protein, 7 aa, synthetic construct
VKGHPAH

SEQ ID NO: 152842 - protein, 7 aa, synthetic construct
VKGHSFG

SEQ ID NO: 152843 - protein, 7 aa, synthetic construct
VKGIAHF

SEQ ID NO: 152844 - protein, 7 aa, synthetic construct
VKGIQSF

SEQ ID NO: 152845 - protein, 7 aa, synthetic construct
VKGNDQR

SEQ ID NO: 152846 - protein, 7 aa, synthetic construct
VKGNMLI

SEQ ID NO: 152847 - protein, 7 aa, synthetic construct
VKGPIAY

SEQ ID NO: 152848 - protein, 7 aa, synthetic construct
VKGRAET

SEQ ID NO: 152849 - protein, 7 aa, synthetic construct
VKGRDIG

SEQ ID NO: 152850 - protein, 7 aa, synthetic construct
VKGRDQY

SEQ ID NO: 152851 - protein, 7 aa, synthetic construct
VKGREAY

SEQ ID NO: 152852 - protein, 7 aa, synthetic construct
VKGRIDS

SEQ ID NO: 152853 - protein, 7 aa, synthetic construct
VKGSHVH

SEQ ID NO: 152854 - protein, 7 aa, synthetic construct
VKGTVYT

SEQ ID NO: 152855 - protein, 7 aa, synthetic construct
VKGVDNR

SEQ ID NO: 152856 - protein, 7 aa, synthetic construct
VKGVTMH

SEQ ID NO: 152857 - protein, 7 aa, synthetic construct
VKGYDLK

SEQ ID NO: 152858 - protein, 7 aa, synthetic construct
VKGYISV

SEQ ID NO: 152859 - protein, 7 aa, synthetic construct
VKGYPST

SEQ ID NO: 152860 - protein, 7 aa, synthetic construct
VKHAGYS

SEQ ID NO: 152861 - protein, 7 aa, synthetic construct
VKHAQVV

SEQ ID NO: 152862 - protein, 7 aa, synthetic construct
VKHDLRG

SEQ ID NO: 152863 - protein, 7 aa, synthetic construct
VKHDMPR

SEQ ID NO: 152864 - protein, 7 aa, synthetic construct
VKHGHIV

SEQ ID NO: 152865 - protein, 7 aa, synthetic construct
VKHGNIV

SEQ ID NO: 152866 - protein, 7 aa, synthetic construct
VKHGVSF

SEQ ID NO: 152867 - protein, 7 aa, synthetic construct
VKHIIAN

SEQ ID NO: 152868 - protein, 7 aa, synthetic construct
VKHIPTV

SEQ ID NO: 152869 - protein, 7 aa, synthetic construct
VKHISQY

SEQ ID NO: 152870 - protein, 7 aa, synthetic construct
VKHLEMK

SEQ ID NO: 152871 - protein, 7 aa, synthetic construct
VKHLIHA

SEQ ID NO: 152872 - protein, 7 aa, synthetic construct
VKHMGAL

SEQ ID NO: 152873 - protein, 7 aa, synthetic construct
VKHMVPG

SEQ ID NO: 152874 - protein, 7 aa, synthetic construct
VKHNVHG

SEQ ID NO: 152875 - protein, 7 aa, synthetic construct
VKHPPHA

SEQ ID NO: 152876 - protein, 7 aa, synthetic construct
VKHPTPY

SEQ ID NO: 152877 - protein, 7 aa, synthetic construct
VKHQAFN

SEQ ID NO: 152878 - protein, 7 aa, synthetic construct
VKHQPSS

SEQ ID NO: 152879 - protein, 7 aa, synthetic construct
VKHQQPS

SEQ ID NO: 152880 - protein, 7 aa, synthetic construct
VKHRDSD

SEQ ID NO: 152881 - protein, 7 aa, synthetic construct
VKHREAI

SEQ ID NO: 152882 - protein, 7 aa, synthetic construct
VKHRLDG

SEQ ID NO: 152883 - protein, 7 aa, synthetic construct
VKHRVGE

SEQ ID NO: 152884 - protein, 7 aa, synthetic construct
VKHSNYP

SEQ ID NO: 152885 - protein, 7 aa, synthetic construct
VKHSQSY

SEQ ID NO: 152886 - protein, 7 aa, synthetic construct
VKHTTQM

SEQ ID NO: 152887 - protein, 7 aa, synthetic construct
VKHVDQR

SEQ ID NO: 152888 - protein, 7 aa, synthetic construct
VKHVGPP

SEQ ID NO: 152889 - protein, 7 aa, synthetic construct
VKHVGVI

SEQ ID NO: 152890 - protein, 7 aa, synthetic construct
VKHVNQV

SEQ ID NO: 152891 - protein, 7 aa, synthetic construct
VKHVSPL

SEQ ID NO: 152892 - protein, 7 aa, synthetic construct
VKIDGHW

SEQ ID NO: 152893 - protein, 7 aa, synthetic construct
VKIGHQM

SEQ ID NO: 152894 - protein, 7 aa, synthetic construct
VKIPQMM

SEQ ID NO: 152895 - protein, 7 aa, synthetic construct
VKIQHPS

SEQ ID NO: 152896 - protein, 7 aa, synthetic construct
VKIRAAD

SEQ ID NO: 152897 - protein, 7 aa, synthetic construct
VKIRNSE

SEQ ID NO: 152898 - protein, 7 aa, synthetic construct
VKKADWA

SEQ ID NO: 152899 - protein, 7 aa, synthetic construct
VKKEPFP

SEQ ID NO: 152900 - protein, 7 aa, synthetic construct
VKKFQDL

SEQ ID NO: 152901 - protein, 7 aa, synthetic construct
VKKIHDT

SEQ ID NO: 152902 - protein, 7 aa, synthetic construct
VKKIYTE

SEQ ID NO: 152903 - protein, 7 aa, synthetic construct
VKKMPME

SEQ ID NO: 152904 - protein, 7 aa, synthetic construct
VKKMVDT

SEQ ID NO: 152905 - protein, 7 aa, synthetic construct
VKKNQDM

SEQ ID NO: 152906 - protein, 7 aa, synthetic construct
VKKQDRD

SEQ ID NO: 152907 - protein, 7 aa, synthetic construct
VKKTPSE

SEQ ID NO: 152908 - protein, 7 aa, synthetic construct
VKLGNVF

SEQ ID NO: 152909 - protein, 7 aa, synthetic construct
VKLGYGP

SEQ ID NO: 152910 - protein, 7 aa, synthetic construct
VKLKPEY

SEQ ID NO: 152911 - protein, 7 aa, synthetic construct
VKLPHNN

SEQ ID NO: 152912 - protein, 7 aa, synthetic construct
VKLQQGY

SEQ ID NO: 152913 - protein, 7 aa, synthetic construct
VKLRTAE

SEQ ID NO: 152914 - protein, 7 aa, synthetic construct
VKMAHNM

SEQ ID NO: 152915 - protein, 7 aa, synthetic construct
VKMELQR

SEQ ID NO: 152916 - protein, 7 aa, synthetic construct
VKMGTGY

SEQ ID NO: 152917 - protein, 7 aa, synthetic construct
VKMHNPG

SEQ ID NO: 152918 - protein, 7 aa, synthetic construct
VKMHRSE

SEQ ID NO: 152919 - protein, 7 aa, synthetic construct
VKMHSGY

SEQ ID NO: 152920 - protein, 7 aa, synthetic construct
VKMKFNE

SEQ ID NO: 152921 - protein, 7 aa, synthetic construct
VKMPQIQ

SEQ ID NO: 152922 - protein, 7 aa, synthetic construct
VKMPVLA

SEQ ID NO: 152923 - protein, 7 aa, synthetic construct
VKMRDTA

SEQ ID NO: 152924 - protein, 7 aa, synthetic construct
VKMRDYV

SEQ ID NO: 152925 - protein, 7 aa, synthetic construct
VKMTLQH

SEQ ID NO: 152926 - protein, 7 aa, synthetic construct
VKNAYGG

SEQ ID NO: 152927 - protein, 7 aa, synthetic construct
VKNERFY

SEQ ID NO: 152928 - protein, 7 aa, synthetic construct
VKNEYAR

SEQ ID NO: 152929 - protein, 7 aa, synthetic construct
VKNEYGK

SEQ ID NO: 152930 - protein, 7 aa, synthetic construct
VKNIAAF

SEQ ID NO: 152931 - protein, 7 aa, synthetic construct
VKNIHER

SEQ ID NO: 152932 - protein, 7 aa, synthetic construct
VKNIPPM

SEQ ID NO: 152933 - protein, 7 aa, synthetic construct
VKNLQVY

SEQ ID NO: 152934 - protein, 7 aa, synthetic construct
VKNNSIH

SEQ ID NO: 152935 - protein, 7 aa, synthetic construct
VKNPDNR

SEQ ID NO: 152936 - protein, 7 aa, synthetic construct
VKNPGPM

SEQ ID NO: 152937 - protein, 7 aa, synthetic construct
VKNPVPV

SEQ ID NO: 152938 - protein, 7 aa, synthetic construct
VKNQGYL

SEQ ID NO: 152939 - protein, 7 aa, synthetic construct
VKNQRDS

SEQ ID NO: 152940 - protein, 7 aa, synthetic construct
VKNQSMM

SEQ ID NO: 152941 - protein, 7 aa, synthetic construct
VKNRDHV

SEQ ID NO: 152942 - protein, 7 aa, synthetic construct
VKNRQFE

SEQ ID NO: 152943 - protein, 7 aa, synthetic construct
VKNTHPY

SEQ ID NO: 152944 - protein, 7 aa, synthetic construct
VKNTPKD

SEQ ID NO: 152945 - protein, 7 aa, synthetic construct
VKNYNMP

SEQ ID NO: 152946 - protein, 7 aa, synthetic construct
VKNYQIS

SEQ ID NO: 152947 - protein, 7 aa, synthetic construct
VKNYQNT

SEQ ID NO: 152948 - protein, 7 aa, synthetic construct
VKPDIQR

SEQ ID NO: 152949 - protein, 7 aa, synthetic construct
VKPFQVQ

SEQ ID NO: 152950 - protein, 7 aa, synthetic construct
VKPFSNS

SEQ ID NO: 152951 - protein, 7 aa, synthetic construct
VKPHQGW

SEQ ID NO: 152952 - protein, 7 aa, synthetic construct
VKPHQQF

SEQ ID NO: 152953 - protein, 7 aa, synthetic construct
VKPHQSQ

SEQ ID NO: 152954 - protein, 7 aa, synthetic construct
VKPHTVH

SEQ ID NO: 152955 - protein, 7 aa, synthetic construct
VKPIQVY

SEQ ID NO: 152956 - protein, 7 aa, synthetic construct
VKPITGF

SEQ ID NO: 152957 - protein, 7 aa, synthetic construct
VKPIYNA

SEQ ID NO: 152958 - protein, 7 aa, synthetic construct
VKPMFRD

SEQ ID NO: 152959 - protein, 7 aa, synthetic construct
VKPNERY

SEQ ID NO: 152960 - protein, 7 aa, synthetic construct
VKPQAYA

SEQ ID NO: 152961 - protein, 7 aa, synthetic construct
VKPRMAD

SEQ ID NO: 152962 - protein, 7 aa, synthetic construct
VKPRPEL

SEQ ID NO: 152963 - protein, 7 aa, synthetic construct
VKPTHGM

SEQ ID NO: 152964 - protein, 7 aa, synthetic construct
VKPTHSY

SEQ ID NO: 152965 - protein, 7 aa, synthetic construct
VKPVNSF

SEQ ID NO: 152966 - protein, 7 aa, synthetic construct
VKPVPGF

SEQ ID NO: 152967 - protein, 7 aa, synthetic construct
VKPVSII

SEQ ID NO: 152968 - protein, 7 aa, synthetic construct
VKPVYNN

SEQ ID NO: 152969 - protein, 7 aa, synthetic construct
VKPYAHQ

SEQ ID NO: 152970 - protein, 7 aa, synthetic construct
VKPYPAQ

SEQ ID NO: 152971 - protein, 7 aa, synthetic construct
VKQALQF

SEQ ID NO: 152972 - protein, 7 aa, synthetic construct
VKQAQWN

SEQ ID NO: 152973 - protein, 7 aa, synthetic construct
VKQDTRY

SEQ ID NO: 152974 - protein, 7 aa, synthetic construct
VKQETRA

SEQ ID NO: 152975 - protein, 7 aa, synthetic construct
VKQEVAK

SEQ ID NO: 152976 - protein, 7 aa, synthetic construct
VKQGLNF

SEQ ID NO: 152977 - protein, 7 aa, synthetic construct
VKQGVIF

SEQ ID NO: 152978 - protein, 7 aa, synthetic construct
VKQILAH

SEQ ID NO: 152979 - protein, 7 aa, synthetic construct
VKQIPAY

SEQ ID NO: 152980 - protein, 7 aa, synthetic construct
VKQIPTN

SEQ ID NO: 152981 - protein, 7 aa, synthetic construct
VKQKPEQ

SEQ ID NO: 152982 - protein, 7 aa, synthetic construct
VKQKQND

SEQ ID NO: 152983 - protein, 7 aa, synthetic construct
VKQMQMH

SEQ ID NO: 152984 - protein, 7 aa, synthetic construct
VKQPQER

SEQ ID NO: 152985 - protein, 7 aa, synthetic construct
VKQPYNA

SEQ ID NO: 152986 - protein, 7 aa, synthetic construct
VKQRERD

SEQ ID NO: 152987 - protein, 7 aa, synthetic construct
VKQRQTE

SEQ ID NO: 152988 - protein, 7 aa, synthetic construct
VKQRVSE

SEQ ID NO: 152989 - protein, 7 aa, synthetic construct
VKQSHRD

SEQ ID NO: 152990 - protein, 7 aa, synthetic construct
VKQTRDM

SEQ ID NO: 152991 - protein, 7 aa, synthetic construct
VKQVAHN

SEQ ID NO: 152992 - protein, 7 aa, synthetic construct
VKQVAHY

SEQ ID NO: 152993 - protein, 7 aa, synthetic construct
VKQVMGY

SEQ ID NO: 152994 - protein, 7 aa, synthetic construct
VKQVRDY

SEQ ID NO: 152995 - protein, 7 aa, synthetic construct
VKQYKGD

SEQ ID NO: 152996 - protein, 7 aa, synthetic construct
VKQYSAA

SEQ ID NO: 152997 - protein, 7 aa, synthetic construct
VKRAEYV

SEQ ID NO: 152998 - protein, 7 aa, synthetic construct
VKRDIAY

SEQ ID NO: 152999 - protein, 7 aa, synthetic construct
VKRDLPA

SEQ ID NO: 153000 - protein, 7 aa, synthetic construct
VKRDPIF

SEQ ID NO: 153001 - protein, 7 aa, synthetic construct
VKREHPM

SEQ ID NO: 153002 - protein, 7 aa, synthetic construct
VKREIPY

SEQ ID NO: 153003 - protein, 7 aa, synthetic construct
VKRENFQ

SEQ ID NO: 153004 - protein, 7 aa, synthetic construct
VKRESYN

SEQ ID NO: 153005 - protein, 7 aa, synthetic construct
VKRPNFE

SEQ ID NO: 153006 - protein, 7 aa, synthetic construct
VKRSNDP

SEQ ID NO: 153007 - protein, 7 aa, synthetic construct
VKRTDYV

SEQ ID NO: 153008 - protein, 7 aa, synthetic construct
VKRTELT

SEQ ID NO: 153009 - protein, 7 aa, synthetic construct
VKRVENL

SEQ ID NO: 153010 - protein, 7 aa, synthetic construct
VKSESFK

SEQ ID NO: 153011 - protein, 7 aa, synthetic construct
VKSFDKS

SEQ ID NO: 153012 - protein, 7 aa, synthetic construct
VKSFQNN

SEQ ID NO: 153013 - protein, 7 aa, synthetic construct
VKSHNFS

SEQ ID NO: 153014 - protein, 7 aa, synthetic construct
VKSHPHM

SEQ ID NO: 153015 - protein, 7 aa, synthetic construct
VKSHQML

SEQ ID NO: 153016 - protein, 7 aa, synthetic construct
VKSIQHY

SEQ ID NO: 153017 - protein, 7 aa, synthetic construct
VKSLIEK

SEQ ID NO: 153018 - protein, 7 aa, synthetic construct
VKSLQPM

SEQ ID NO: 153019 - protein, 7 aa, synthetic construct
VKSNNFM

SEQ ID NO: 153020 - protein, 7 aa, synthetic construct
VKSPMPF

SEQ ID NO: 153021 - protein, 7 aa, synthetic construct
VKSPYRE

SEQ ID NO: 153022 - protein, 7 aa, synthetic construct
VKSQHIH

SEQ ID NO: 153023 - protein, 7 aa, synthetic construct
VKSQPHN

SEQ ID NO: 153024 - protein, 7 aa, synthetic construct
VKSRAME

SEQ ID NO: 153025 - protein, 7 aa, synthetic construct
VKSRAPE

SEQ ID NO: 153026 - protein, 7 aa, synthetic construct
VKSRITD

SEQ ID NO: 153027 - protein, 7 aa, synthetic construct
VKSRMDA

SEQ ID NO: 153028 - protein, 7 aa, synthetic construct
VKSRMDV

SEQ ID NO: 153029 - protein, 7 aa, synthetic construct
VKSRMME

SEQ ID NO: 153030 - protein, 7 aa, synthetic construct
VKSVHGF

SEQ ID NO: 153031 - protein, 7 aa, synthetic construct
VKTEVSR

SEQ ID NO: 153032 - protein, 7 aa, synthetic construct
VKTGVER

SEQ ID NO: 153033 - protein, 7 aa, synthetic construct
VKTHLYA

SEQ ID NO: 153034 - protein, 7 aa, synthetic construct
VKTLPNH

SEQ ID NO: 153035 - protein, 7 aa, synthetic construct
VKTMHMP

SEQ ID NO: 153036 - protein, 7 aa, synthetic construct
VKTMHPP

SEQ ID NO: 153037 - protein, 7 aa, synthetic construct
VKTNYPI

SEQ ID NO: 153038 - protein, 7 aa, synthetic construct
VKTPTSY

SEQ ID NO: 153039 - protein, 7 aa, synthetic construct
VKTQAQW

SEQ ID NO: 153040 - protein, 7 aa, synthetic construct
VKTQLAY

SEQ ID NO: 153041 - protein, 7 aa, synthetic construct
VKTQYEK

SEQ ID NO: 153042 - protein, 7 aa, synthetic construct
VKTRAGD

SEQ ID NO: 153043 - protein, 7 aa, synthetic construct
VKTTGPY

SEQ ID NO: 153044 - protein, 7 aa, synthetic construct
VKTYANN

SEQ ID NO: 153045 - protein, 7 aa, synthetic construct
VKTYERV

SEQ ID NO: 153046 - protein, 7 aa, synthetic construct
VKTYMRE

SEQ ID NO: 153047 - protein, 7 aa, synthetic construct
VKTYRAE

SEQ ID NO: 153048 - protein, 7 aa, synthetic construct
VKTYVGS

SEQ ID NO: 153049 - protein, 7 aa, synthetic construct
VKVAHHA

SEQ ID NO: 153050 - protein, 7 aa, synthetic construct
VKVAVKP

SEQ ID NO: 153051 - protein, 7 aa, synthetic construct
VKVGHIN

SEQ ID NO: 153052 - protein, 7 aa, synthetic construct
VKVHDRS

SEQ ID NO: 153053 - protein, 7 aa, synthetic construct
VKVHQQM

SEQ ID NO: 153054 - protein, 7 aa, synthetic construct
VKVHSHA

SEQ ID NO: 153055 - protein, 7 aa, synthetic construct
VKVKAYE

SEQ ID NO: 153056 - protein, 7 aa, synthetic construct
VKVLARD

SEQ ID NO: 153057 - protein, 7 aa, synthetic construct
VKVMQAV

SEQ ID NO: 153058 - protein, 7 aa, synthetic construct
VKVNLQY

SEQ ID NO: 153059 - protein, 7 aa, synthetic construct
VKVPNPH

SEQ ID NO: 153060 - protein, 7 aa, synthetic construct
VKVQPMI

SEQ ID NO: 153061 - protein, 7 aa, synthetic construct
VKVSYSA

SEQ ID NO: 153062 - protein, 7 aa, synthetic construct
VKVTYQQ

SEQ ID NO: 153063 - protein, 7 aa, synthetic construct
VKVYVKE

SEQ ID NO: 153064 - protein, 7 aa, synthetic construct
VKWQPPE

SEQ ID NO: 153065 - protein, 7 aa, synthetic construct
VKWRNED

SEQ ID NO: 153066 - protein, 7 aa, synthetic construct
VKYAEGK

SEQ ID NO: 153067 - protein, 7 aa, synthetic construct
VKYAPSG

SEQ ID NO: 153068 - protein, 7 aa, synthetic construct
VKYGKLD

SEQ ID NO: 153069 - protein, 7 aa, synthetic construct
VKYGMRD

SEQ ID NO: 153070 - protein, 7 aa, synthetic construct
VKYIKDG

SEQ ID NO: 153071 - protein, 7 aa, synthetic construct
VKYIKGE

SEQ ID NO: 153072 - protein, 7 aa, synthetic construct
VKYITKE

SEQ ID NO: 153073 - protein, 7 aa, synthetic construct
VKYKDQV

SEQ ID NO: 153074 - protein, 7 aa, synthetic construct
VKYKEAF

SEQ ID NO: 153075 - protein, 7 aa, synthetic construct
VKYKQDS

SEQ ID NO: 153076 - protein, 7 aa, synthetic construct
VKYMPGS

SEQ ID NO: 153077 - protein, 7 aa, synthetic construct
VKYNMPV

SEQ ID NO: 153078 - protein, 7 aa, synthetic construct
VKYNVTA

SEQ ID NO: 153079 - protein, 7 aa, synthetic construct
VKYQRLE

SEQ ID NO: 153080 - protein, 7 aa, synthetic construct
VKYSAAS

SEQ ID NO: 153081 - protein, 7 aa, synthetic construct
VKYSIGP

SEQ ID NO: 153082 - protein, 7 aa, synthetic construct
VKYSVEK

SEQ ID NO: 153083 - protein, 7 aa, synthetic construct
VKYTPHV

SEQ ID NO: 153084 - protein, 7 aa, synthetic construct
VKYVNSA

SEQ ID NO: 153085 - protein, 7 aa, synthetic construct
VLARKDT

SEQ ID NO: 153086 - protein, 7 aa, synthetic construct
VLGGVRA

SEQ ID NO: 153087 - protein, 7 aa, synthetic construct
VLGHNGR

SEQ ID NO: 153088 - protein, 7 aa, synthetic construct
VLGHRIQ

SEQ ID NO: 153089 - protein, 7 aa, synthetic construct
VLGLRRE

SEQ ID NO: 153090 - protein, 7 aa, synthetic construct
VLGPAMK

SEQ ID NO: 153091 - protein, 7 aa, synthetic construct
VLGQYKV

SEQ ID NO: 153092 - protein, 7 aa, synthetic construct
VLGVASR

SEQ ID NO: 153093 - protein, 7 aa, synthetic construct
VLGVYKA

SEQ ID NO: 153094 - protein, 7 aa, synthetic construct
VLGYNKQ

SEQ ID NO: 153095 - protein, 7 aa, synthetic construct
VLHHKPV

SEQ ID NO: 153096 - protein, 7 aa, synthetic construct
VLHKQDR

SEQ ID NO: 153097 - protein, 7 aa, synthetic construct
VLHLSKS

SEQ ID NO: 153098 - protein, 7 aa, synthetic construct
VLHNSIR

SEQ ID NO: 153099 - protein, 7 aa, synthetic construct
VLHRAAG

SEQ ID NO: 153100 - protein, 7 aa, synthetic construct
VLKDSGR

SEQ ID NO: 153101 - protein, 7 aa, synthetic construct
VLKGPMP

SEQ ID NO: 153102 - protein, 7 aa, synthetic construct
VLKGQSY

SEQ ID NO: 153103 - protein, 7 aa, synthetic construct
VLKGYNN

SEQ ID NO: 153104 - protein, 7 aa, synthetic construct
VLKHHNI

SEQ ID NO: 153105 - protein, 7 aa, synthetic construct
VLKKFSD

SEQ ID NO: 153106 - protein, 7 aa, synthetic construct
VLKKHDL

SEQ ID NO: 153107 - protein, 7 aa, synthetic construct
VLKNAYN

SEQ ID NO: 153108 - protein, 7 aa, synthetic construct
VLKRAPD

SEQ ID NO: 153109 - protein, 7 aa, synthetic construct
VLMDKGR

SEQ ID NO: 153110 - protein, 7 aa, synthetic construct
VLNHIRA

SEQ ID NO: 153111 - protein, 7 aa, synthetic construct
VLNHTRL

SEQ ID NO: 153112 - protein, 7 aa, synthetic construct
VLNHVPR

SEQ ID NO: 153113 - protein, 7 aa, synthetic construct
VLPHIRA

SEQ ID NO: 153114 - protein, 7 aa, synthetic construct
VLPHRQM

SEQ ID NO: 153115 - protein, 7 aa, synthetic construct
VLPSEKR

SEQ ID NO: 153116 - protein, 7 aa, synthetic construct
VLQRGHI

SEQ ID NO: 153117 - protein, 7 aa, synthetic construct
VLQRQPM

SEQ ID NO: 153118 - protein, 7 aa, synthetic construct
VLRAHGP

SEQ ID NO: 153119 - protein, 7 aa, synthetic construct
VLRAVTG

SEQ ID NO: 153120 - protein, 7 aa, synthetic construct
VLRDMTR

SEQ ID NO: 153121 - protein, 7 aa, synthetic construct
VLRDSGR

SEQ ID NO: 153122 - protein, 7 aa, synthetic construct
VLRDTRY

SEQ ID NO: 153123 - protein, 7 aa, synthetic construct
VLREPNR

SEQ ID NO: 153124 - protein, 7 aa, synthetic construct
VLRGAHA

SEQ ID NO: 153125 - protein, 7 aa, synthetic construct
VLRGPAI

SEQ ID NO: 153126 - protein, 7 aa, synthetic construct
VLRKETL

SEQ ID NO: 153127 - protein, 7 aa, synthetic construct
VLRNHPP

SEQ ID NO: 153128 - protein, 7 aa, synthetic construct
VLRQNQQ

SEQ ID NO: 153129 - protein, 7 aa, synthetic construct
VLRSGGG

SEQ ID NO: 153130 - protein, 7 aa, synthetic construct
VLRSNIG

SEQ ID NO: 153131 - protein, 7 aa, synthetic construct
VLRSSTQ

SEQ ID NO: 153132 - protein, 7 aa, synthetic construct
VLRTASN

SEQ ID NO: 153133 - protein, 7 aa, synthetic construct
VLRTNAY

SEQ ID NO: 153134 - protein, 7 aa, synthetic construct
VLRVSQQ

SEQ ID NO: 153135 - protein, 7 aa, synthetic construct
VLSRVSG

SEQ ID NO: 153136 - protein, 7 aa, synthetic construct
VLTERRG

SEQ ID NO: 153137 - protein, 7 aa, synthetic construct
VLTERRQ

SEQ ID NO: 153138 - protein, 7 aa, synthetic construct
VLTQIRA

SEQ ID NO: 153139 - protein, 7 aa, synthetic construct
VLTRAQG

SEQ ID NO: 153140 - protein, 7 aa, synthetic construct
VLVQRKD

SEQ ID NO: 153141 - protein, 7 aa, synthetic construct
VMAKYHG

SEQ ID NO: 153142 - protein, 7 aa, synthetic construct
VMAMQTR

SEQ ID NO: 153143 - protein, 7 aa, synthetic construct
VMARGHN

SEQ ID NO: 153144 - protein, 7 aa, synthetic construct
VMDKPRY

SEQ ID NO: 153145 - protein, 7 aa, synthetic construct
VMDRARV

SEQ ID NO: 153146 - protein, 7 aa, synthetic construct
VMEKRMI

SEQ ID NO: 153147 - protein, 7 aa, synthetic construct
VMEKSRF

SEQ ID NO: 153148 - protein, 7 aa, synthetic construct
VMEKWQS

SEQ ID NO: 153149 - protein, 7 aa, synthetic construct
VMESSKR

SEQ ID NO: 153150 - protein, 7 aa, synthetic construct
VMGGRIS

SEQ ID NO: 153151 - protein, 7 aa, synthetic construct
VMGNKYV

SEQ ID NO: 153152 - protein, 7 aa, synthetic construct
VMGYTNK

SEQ ID NO: 153153 - protein, 7 aa, synthetic construct
VMHDKKN

SEQ ID NO: 153154 - protein, 7 aa, synthetic construct
VMHGRAN

SEQ ID NO: 153155 - protein, 7 aa, synthetic construct
VMHHPKS

SEQ ID NO: 153156 - protein, 7 aa, synthetic construct
VMHKGNF

SEQ ID NO: 153157 - protein, 7 aa, synthetic construct
VMHLASK

SEQ ID NO: 153158 - protein, 7 aa, synthetic construct
VMHSKFG

SEQ ID NO: 153159 - protein, 7 aa, synthetic construct
VMHTIPK

SEQ ID NO: 153160 - protein, 7 aa, synthetic construct
VMHTKTE

SEQ ID NO: 153161 - protein, 7 aa, synthetic construct
VMHVKQF

SEQ ID NO: 153162 - protein, 7 aa, synthetic construct
VMHVQSK

SEQ ID NO: 153163 - protein, 7 aa, synthetic construct
VMKFTAG

SEQ ID NO: 153164 - protein, 7 aa, synthetic construct
VMKHMPM

SEQ ID NO: 153165 - protein, 7 aa, synthetic construct
VMKQDRY

SEQ ID NO: 153166 - protein, 7 aa, synthetic construct
VMKQHYA

SEQ ID NO: 153167 - protein, 7 aa, synthetic construct
VMKRDAG

SEQ ID NO: 153168 - protein, 7 aa, synthetic construct
VMKRDDR

SEQ ID NO: 153169 - protein, 7 aa, synthetic construct
VMKSYDK

SEQ ID NO: 153170 - protein, 7 aa, synthetic construct
VMKVGPI

SEQ ID NO: 153171 - protein, 7 aa, synthetic construct
VMKYDKP

SEQ ID NO: 153172 - protein, 7 aa, synthetic construct
VMKYVQA

SEQ ID NO: 153173 - protein, 7 aa, synthetic construct
VMMGGGK

SEQ ID NO: 153174 - protein, 7 aa, synthetic construct
VMNGPPR

SEQ ID NO: 153175 - protein, 7 aa, synthetic construct
VMNRQGY

SEQ ID NO: 153176 - protein, 7 aa, synthetic construct
VMPHKPL

SEQ ID NO: 153177 - protein, 7 aa, synthetic construct
VMPMRNS

SEQ ID NO: 153178 - protein, 7 aa, synthetic construct
VMPQIRQ

SEQ ID NO: 153179 - protein, 7 aa, synthetic construct
VMPQSRA

SEQ ID NO: 153180 - protein, 7 aa, synthetic construct
VMPRIPS

SEQ ID NO: 153181 - protein, 7 aa, synthetic construct
VMPRMGH

SEQ ID NO: 153182 - protein, 7 aa, synthetic construct
VMPRTRE

SEQ ID NO: 153183 - protein, 7 aa, synthetic construct
VMPSIRQ

SEQ ID NO: 153184 - protein, 7 aa, synthetic construct
VMPTKNF

SEQ ID NO: 153185 - protein, 7 aa, synthetic construct
VMQGAQR

SEQ ID NO: 153186 - protein, 7 aa, synthetic construct
VMQHTAK

SEQ ID NO: 153187 - protein, 7 aa, synthetic construct
VMQMHAK

SEQ ID NO: 153188 - protein, 7 aa, synthetic construct
VMQNSGR

SEQ ID NO: 153189 - protein, 7 aa, synthetic construct
VMQNVGR

SEQ ID NO: 153190 - protein, 7 aa, synthetic construct
VMQPRNV

SEQ ID NO: 153191 - protein, 7 aa, synthetic construct
VMQYKTH

SEQ ID NO: 153192 - protein, 7 aa, synthetic construct
VMRASQI

SEQ ID NO: 153193 - protein, 7 aa, synthetic construct
VMRATHG

SEQ ID NO: 153194 - protein, 7 aa, synthetic construct
VMRDASK

SEQ ID NO: 153195 - protein, 7 aa, synthetic construct
VMRDKQF

SEQ ID NO: 153196 - protein, 7 aa, synthetic construct
VMREKVY

SEQ ID NO: 153197 - protein, 7 aa, synthetic construct
VMRESPR

SEQ ID NO: 153198 - protein, 7 aa, synthetic construct
VMRKQFE

SEQ ID NO: 153199 - protein, 7 aa, synthetic construct
VMRKVVD

SEQ ID NO: 153200 - protein, 7 aa, synthetic construct
VMRNEKN

SEQ ID NO: 153201 - protein, 7 aa, synthetic construct
VMRNQQF

SEQ ID NO: 153202 - protein, 7 aa, synthetic construct
VMRNTPG

SEQ ID NO: 153203 - protein, 7 aa, synthetic construct
VMRNTTG

SEQ ID NO: 153204 - protein, 7 aa, synthetic construct
VMRPIQG

SEQ ID NO: 153205 - protein, 7 aa, synthetic construct
VMRPVQT

SEQ ID NO: 153206 - protein, 7 aa, synthetic construct
VMRQAAG

SEQ ID NO: 153207 - protein, 7 aa, synthetic construct
VMRTIPA

SEQ ID NO: 153208 - protein, 7 aa, synthetic construct
VMRYQDS

SEQ ID NO: 153209 - protein, 7 aa, synthetic construct
VMSGSRA

SEQ ID NO: 153210 - protein, 7 aa, synthetic construct
VMSNRDK

SEQ ID NO: 153211 - protein, 7 aa, synthetic construct
VMSPRQL

SEQ ID NO: 153212 - protein, 7 aa, synthetic construct
VMSQYKG

SEQ ID NO: 153213 - protein, 7 aa, synthetic construct
VMSREKN

SEQ ID NO: 153214 - protein, 7 aa, synthetic construct
VMSRVHG

SEQ ID NO: 153215 - protein, 7 aa, synthetic construct
VMSVNKY

SEQ ID NO: 153216 - protein, 7 aa, synthetic construct
VMTASHR

SEQ ID NO: 153217 - protein, 7 aa, synthetic construct
VMTHHKG

SEQ ID NO: 153218 - protein, 7 aa, synthetic construct
VMTHKAI

SEQ ID NO: 153219 - protein, 7 aa, synthetic construct
VMTKHPI

SEQ ID NO: 153220 - protein, 7 aa, synthetic construct
VMTKRGD

SEQ ID NO: 153221 - protein, 7 aa, synthetic construct
VMTQRTM

SEQ ID NO: 153222 - protein, 7 aa, synthetic construct
VMVKMTS

SEQ ID NO: 153223 - protein, 7 aa, synthetic construct
VNAAMRH

SEQ ID NO: 153224 - protein, 7 aa, synthetic construct
VNAGHMR

SEQ ID NO: 153225 - protein, 7 aa, synthetic construct
VNAGTFR

SEQ ID NO: 153226 - protein, 7 aa, synthetic construct
VNAHSRL

SEQ ID NO: 153227 - protein, 7 aa, synthetic construct
VNAHVRM

SEQ ID NO: 153228 - protein, 7 aa, synthetic construct
VNAPRVI

SEQ ID NO: 153229 - protein, 7 aa, synthetic construct
VNAPRVQ

SEQ ID NO: 153230 - protein, 7 aa, synthetic construct
VNAQRNH

SEQ ID NO: 153231 - protein, 7 aa, synthetic construct
VNARVVM

SEQ ID NO: 153232 - protein, 7 aa, synthetic construct
VNAVHAR

SEQ ID NO: 153233 - protein, 7 aa, synthetic construct
VNDRMAR

SEQ ID NO: 153234 - protein, 7 aa, synthetic construct
VNDTRAR

SEQ ID NO: 153235 - protein, 7 aa, synthetic construct
VNENVRR

SEQ ID NO: 153236 - protein, 7 aa, synthetic construct
VNGAAHR

SEQ ID NO: 153237 - protein, 7 aa, synthetic construct
VNGAHRL

SEQ ID NO: 153238 - protein, 7 aa, synthetic construct
VNGASHR

SEQ ID NO: 153239 - protein, 7 aa, synthetic construct
VNGIYSR

SEQ ID NO: 153240 - protein, 7 aa, synthetic construct
VNGLYQR

SEQ ID NO: 153241 - protein, 7 aa, synthetic construct
VNGNWAK

SEQ ID NO: 153242 - protein, 7 aa, synthetic construct
VNGPMYK

SEQ ID NO: 153243 - protein, 7 aa, synthetic construct
VNGRDYK

SEQ ID NO: 153244 - protein, 7 aa, synthetic construct
VNGYMSK

SEQ ID NO: 153245 - protein, 7 aa, synthetic construct
VNHGAKQ

SEQ ID NO: 153246 - protein, 7 aa, synthetic construct
VNHHAKT

SEQ ID NO: 153247 - protein, 7 aa, synthetic construct
VNHHTGK

SEQ ID NO: 153248 - protein, 7 aa, synthetic construct
VNHHVGK

SEQ ID NO: 153249 - protein, 7 aa, synthetic construct
VNHIKHI

SEQ ID NO: 153250 - protein, 7 aa, synthetic construct
VNHKMMV

SEQ ID NO: 153251 - protein, 7 aa, synthetic construct
VNHQQIR

SEQ ID NO: 153252 - protein, 7 aa, synthetic construct
VNHRDRI

SEQ ID NO: 153253 - protein, 7 aa, synthetic construct
VNHTQQR

SEQ ID NO: 153254 - protein, 7 aa, synthetic construct
VNHTSRV

SEQ ID NO: 153255 - protein, 7 aa, synthetic construct
VNHTVRT

SEQ ID NO: 153256 - protein, 7 aa, synthetic construct
VNHVRST

SEQ ID NO: 153257 - protein, 7 aa, synthetic construct
VNHVSSR

SEQ ID NO: 153258 - protein, 7 aa, synthetic construct
VNIGQQR

SEQ ID NO: 153259 - protein, 7 aa, synthetic construct
VNISRSN

SEQ ID NO: 153260 - protein, 7 aa, synthetic construct
VNKFIPQ

SEQ ID NO: 153261 - protein, 7 aa, synthetic construct
VNKHGGF

SEQ ID NO: 153262 - protein, 7 aa, synthetic construct
VNKHTML

SEQ ID NO: 153263 - protein, 7 aa, synthetic construct
VNKHYIA

SEQ ID NO: 153264 - protein, 7 aa, synthetic construct
VNKKIFD

SEQ ID NO: 153265 - protein, 7 aa, synthetic construct
VNKKMEY

SEQ ID NO: 153266 - protein, 7 aa, synthetic construct
VNKLLGM

SEQ ID NO: 153267 - protein, 7 aa, synthetic construct
VNKLRYE

SEQ ID NO: 153268 - protein, 7 aa, synthetic construct
VNKMMDK

SEQ ID NO: 153269 - protein, 7 aa, synthetic construct
VNKSHHS

SEQ ID NO: 153270 - protein, 7 aa, synthetic construct
VNKYTSA

SEQ ID NO: 153271 - protein, 7 aa, synthetic construct
VNKYVTV

SEQ ID NO: 153272 - protein, 7 aa, synthetic construct
VNLGTRY

SEQ ID NO: 153273 - protein, 7 aa, synthetic construct
VNLHQVL

SEQ ID NO: 153274 - protein, 7 aa, synthetic construct
VNLKHGL

SEQ ID NO: 153275 - protein, 7 aa, synthetic construct
VNLSKVY

SEQ ID NO: 153276 - protein, 7 aa, synthetic construct
VNMGGVR

SEQ ID NO: 153277 - protein, 7 aa, synthetic construct
VNMGYGK

SEQ ID NO: 153278 - protein, 7 aa, synthetic construct
VNMNTRL

SEQ ID NO: 153279 - protein, 7 aa, synthetic construct
VNMQARV

SEQ ID NO: 153280 - protein, 7 aa, synthetic construct
VNMVRDR

SEQ ID NO: 153281 - protein, 7 aa, synthetic construct
VNNARER

SEQ ID NO: 153282 - protein, 7 aa, synthetic construct
VNNAVRY

SEQ ID NO: 153283 - protein, 7 aa, synthetic construct
VNNGIRY

SEQ ID NO: 153284 - protein, 7 aa, synthetic construct
VNNHMAK

SEQ ID NO: 153285 - protein, 7 aa, synthetic construct
VNNHTRL

SEQ ID NO: 153286 - protein, 7 aa, synthetic construct
VNNQNMG

SEQ ID NO: 153287 - protein, 7 aa, synthetic construct
VNNQRTM

SEQ ID NO: 153288 - protein, 7 aa, synthetic construct
VNPERTR

SEQ ID NO: 153289 - protein, 7 aa, synthetic construct
VNPNKGW

SEQ ID NO: 153290 - protein, 7 aa, synthetic construct
VNPQSTR

SEQ ID NO: 153291 - protein, 7 aa, synthetic construct
VNQAVRH

SEQ ID NO: 153292 - protein, 7 aa, synthetic construct
VNQGARL

SEQ ID NO: 153293 - protein, 7 aa, synthetic construct
VNQGARM

SEQ ID NO: 153294 - protein, 7 aa, synthetic construct
VNQGQAR

SEQ ID NO: 153295 - protein, 7 aa, synthetic construct
VNQHQRQ

SEQ ID NO: 153296 - protein, 7 aa, synthetic construct
VNQHRAY

SEQ ID NO: 153297 - protein, 7 aa, synthetic construct
VNQHRNM

SEQ ID NO: 153298 - protein, 7 aa, synthetic construct
VNQISSR

SEQ ID NO: 153299 - protein, 7 aa, synthetic construct
VNQLRMQ

SEQ ID NO: 153300 - protein, 7 aa, synthetic construct
VNQLRVV

SEQ ID NO: 153301 - protein, 7 aa, synthetic construct
VNQNTYK

SEQ ID NO: 153302 - protein, 7 aa, synthetic construct
VNQPKMH

SEQ ID NO: 153303 - protein, 7 aa, synthetic construct
VNQPRLT

SEQ ID NO: 153304 - protein, 7 aa, synthetic construct
VNQRALM

SEQ ID NO: 153305 - protein, 7 aa, synthetic construct
VNQRANI

SEQ ID NO: 153306 - protein, 7 aa, synthetic construct
VNQRQYI

SEQ ID NO: 153307 - protein, 7 aa, synthetic construct
VNQRYQH

SEQ ID NO: 153308 - protein, 7 aa, synthetic construct
VNQSRQW

SEQ ID NO: 153309 - protein, 7 aa, synthetic construct
VNQSWPK

SEQ ID NO: 153310 - protein, 7 aa, synthetic construct
VNQTARY

SEQ ID NO: 153311 - protein, 7 aa, synthetic construct
VNQTGFR

SEQ ID NO: 153312 - protein, 7 aa, synthetic construct
VNQTRTL

SEQ ID NO: 153313 - protein, 7 aa, synthetic construct
VNQWTNT

SEQ ID NO: 153314 - protein, 7 aa, synthetic construct
VNQYQTK

SEQ ID NO: 153315 - protein, 7 aa, synthetic construct
VNQYVTK

SEQ ID NO: 153316 - protein, 7 aa, synthetic construct
VNRADRS

SEQ ID NO: 153317 - protein, 7 aa, synthetic construct
VNRAILN

SEQ ID NO: 153318 - protein, 7 aa, synthetic construct
VNRDIRI

SEQ ID NO: 153319 - protein, 7 aa, synthetic construct
VNRDKGF

SEQ ID NO: 153320 - protein, 7 aa, synthetic construct
VNRDLFK

SEQ ID NO: 153321 - protein, 7 aa, synthetic construct
VNRDSLK

SEQ ID NO: 153322 - protein, 7 aa, synthetic construct
VNRDVSK

SEQ ID NO: 153323 - protein, 7 aa, synthetic construct
VNRGALL

SEQ ID NO: 153324 - protein, 7 aa, synthetic construct
VNRGILP

SEQ ID NO: 153325 - protein, 7 aa, synthetic construct
VNRGNYG

SEQ ID NO: 153326 - protein, 7 aa, synthetic construct
VNRILPS

SEQ ID NO: 153327 - protein, 7 aa, synthetic construct
VNRIPNM

SEQ ID NO: 153328 - protein, 7 aa, synthetic construct
VNRKVEL

SEQ ID NO: 153329 - protein, 7 aa, synthetic construct
VNRLSQA

SEQ ID NO: 153330 - protein, 7 aa, synthetic construct
VNRMDAR

SEQ ID NO: 153331 - protein, 7 aa, synthetic construct
VNRMKGD

SEQ ID NO: 153332 - protein, 7 aa, synthetic construct
VNRMSKE

SEQ ID NO: 153333 - protein, 7 aa, synthetic construct
VNRNIGG

SEQ ID NO: 153334 - protein, 7 aa, synthetic construct
VNRPIMQ

SEQ ID NO: 153335 - protein, 7 aa, synthetic construct
VNRPVQM

SEQ ID NO: 153336 - protein, 7 aa, synthetic construct
VNRPYGG

SEQ ID NO: 153337 - protein, 7 aa, synthetic construct
VNRQTVF

SEQ ID NO: 153338 - protein, 7 aa, synthetic construct
VNRSDNK

SEQ ID NO: 153339 - protein, 7 aa, synthetic construct
VNRSLGG

SEQ ID NO: 153340 - protein, 7 aa, synthetic construct
VNRTMRE

SEQ ID NO: 153341 - protein, 7 aa, synthetic construct
VNRVMHA

SEQ ID NO: 153342 - protein, 7 aa, synthetic construct
VNSFMKG

SEQ ID NO: 153343 - protein, 7 aa, synthetic construct
VNSGYER

SEQ ID NO: 153344 - protein, 7 aa, synthetic construct
VNSNAGR

SEQ ID NO: 153345 - protein, 7 aa, synthetic construct
VNSNNRM

SEQ ID NO: 153346 - protein, 7 aa, synthetic construct
VNSSKYY

SEQ ID NO: 153347 - protein, 7 aa, synthetic construct
VNSYQRM

SEQ ID NO: 153348 - protein, 7 aa, synthetic construct
VNTARQQ

SEQ ID NO: 153349 - protein, 7 aa, synthetic construct
VNTAVRY

SEQ ID NO: 153350 - protein, 7 aa, synthetic construct
VNTLHSR

SEQ ID NO: 153351 - protein, 7 aa, synthetic construct
VNTNRGM

SEQ ID NO: 153352 - protein, 7 aa, synthetic construct
VNTPRST

SEQ ID NO: 153353 - protein, 7 aa, synthetic construct
VNTRTNH

SEQ ID NO: 153354 - protein, 7 aa, synthetic construct
VNVPRDK

SEQ ID NO: 153355 - protein, 7 aa, synthetic construct
VNVRAMT

SEQ ID NO: 153356 - protein, 7 aa, synthetic construct
VNVTRNM

SEQ ID NO: 153357 - protein, 7 aa, synthetic construct
VNVTSRF

SEQ ID NO: 153358 - protein, 7 aa, synthetic construct
VNYARPA

SEQ ID NO: 153359 - protein, 7 aa, synthetic construct
VNYPISD

SEQ ID NO: 153360 - protein, 7 aa, synthetic construct
VNYPMQK

SEQ ID NO: 153361 - protein, 7 aa, synthetic construct
VNYTPTS

SEQ ID NO: 153362 - protein, 7 aa, synthetic construct
VPAQPMR

SEQ ID NO: 153363 - protein, 7 aa, synthetic construct
VPAQRHG

SEQ ID NO: 153364 - protein, 7 aa, synthetic construct
VPAWKGE

SEQ ID NO: 153365 - protein, 7 aa, synthetic construct
VPDINRK

SEQ ID NO: 153366 - protein, 7 aa, synthetic construct
VPELSVR

SEQ ID NO: 153367 - protein, 7 aa, synthetic construct
VPENSRK

SEQ ID NO: 153368 - protein, 7 aa, synthetic construct
VPERASK

SEQ ID NO: 153369 - protein, 7 aa, synthetic construct
VPERGRF

SEQ ID NO: 153370 - protein, 7 aa, synthetic construct
VPERLRG

SEQ ID NO: 153371 - protein, 7 aa, synthetic construct
VPERYKQ

SEQ ID NO: 153372 - protein, 7 aa, synthetic construct
VPGFHNE

SEQ ID NO: 153373 - protein, 7 aa, synthetic construct
VPGGMGR

SEQ ID NO: 153374 - protein, 7 aa, synthetic construct
VPGHIKS

SEQ ID NO: 153375 - protein, 7 aa, synthetic construct
VPGHTRV

SEQ ID NO: 153376 - protein, 7 aa, synthetic construct
VPGKHPQ

SEQ ID NO: 153377 - protein, 7 aa, synthetic construct
VPGNRYP

SEQ ID NO: 153378 - protein, 7 aa, synthetic construct
VPGRGLI

SEQ ID NO: 153379 - protein, 7 aa, synthetic construct
VPGRHSV

SEQ ID NO: 153380 - protein, 7 aa, synthetic construct
VPGSARG

SEQ ID NO: 153381 - protein, 7 aa, synthetic construct
VPGTRSF

SEQ ID NO: 153382 - protein, 7 aa, synthetic construct
VPGVGHK

SEQ ID NO: 153383 - protein, 7 aa, synthetic construct
VPHARIP

SEQ ID NO: 153384 - protein, 7 aa, synthetic construct
VPHGSVR

SEQ ID NO: 153385 - protein, 7 aa, synthetic construct
VPHKILA

SEQ ID NO: 153386 - protein, 7 aa, synthetic construct
VPHKMIM

SEQ ID NO: 153387 - protein, 7 aa, synthetic construct
VPHKQHQ

SEQ ID NO: 153388 - protein, 7 aa, synthetic construct
VPHKQYS

SEQ ID NO: 153389 - protein, 7 aa, synthetic construct
VPHNATR

SEQ ID NO: 153390 - protein, 7 aa, synthetic construct
VPHNRGL

SEQ ID NO: 153391 - protein, 7 aa, synthetic construct
VPHNVRV

SEQ ID NO: 153392 - protein, 7 aa, synthetic construct
VPHPSRA

SEQ ID NO: 153393 - protein, 7 aa, synthetic construct
VPHQAKQ

SEQ ID NO: 153394 - protein, 7 aa, synthetic construct
VPHRERP

SEQ ID NO: 153395 - protein, 7 aa, synthetic construct
VPHRNIG

SEQ ID NO: 153396 - protein, 7 aa, synthetic construct
VPHRNIV

SEQ ID NO: 153397 - protein, 7 aa, synthetic construct
VPHRTQS

SEQ ID NO: 153398 - protein, 7 aa, synthetic construct
VPHTFKG

SEQ ID NO: 153399 - protein, 7 aa, synthetic construct
VPHTQRQ

SEQ ID NO: 153400 - protein, 7 aa, synthetic construct
VPHTRAQ

SEQ ID NO: 153401 - protein, 7 aa, synthetic construct
VPHTRMS

SEQ ID NO: 153402 - protein, 7 aa, synthetic construct
VPKAIYT

SEQ ID NO: 153403 - protein, 7 aa, synthetic construct
VPKAYKD

SEQ ID NO: 153404 - protein, 7 aa, synthetic construct
VPKDRHQ

SEQ ID NO: 153405 - protein, 7 aa, synthetic construct
VPKDWKA

SEQ ID NO: 153406 - protein, 7 aa, synthetic construct
VPKHDRA

SEQ ID NO: 153407 - protein, 7 aa, synthetic construct
VPKHFQA

SEQ ID NO: 153408 - protein, 7 aa, synthetic construct
VPKHIHM

SEQ ID NO: 153409 - protein, 7 aa, synthetic construct
VPKHNFA

SEQ ID NO: 153410 - protein, 7 aa, synthetic construct
VPKHRIE

SEQ ID NO: 153411 - protein, 7 aa, synthetic construct
VPKHTYP

SEQ ID NO: 153412 - protein, 7 aa, synthetic construct
VPKHVAY

SEQ ID NO: 153413 - protein, 7 aa, synthetic construct
VPKIHAM

SEQ ID NO: 153414 - protein, 7 aa, synthetic construct
VPKIYSA

SEQ ID NO: 153415 - protein, 7 aa, synthetic construct
VPKNHHA

SEQ ID NO: 153416 - protein, 7 aa, synthetic construct
VPKNSYG

SEQ ID NO: 153417 - protein, 7 aa, synthetic construct
VPKPYTQ

SEQ ID NO: 153418 - protein, 7 aa, synthetic construct
VPKQVPL

SEQ ID NO: 153419 - protein, 7 aa, synthetic construct
VPKRADS

SEQ ID NO: 153420 - protein, 7 aa, synthetic construct
VPKREHM

SEQ ID NO: 153421 - protein, 7 aa, synthetic construct
VPKRENQ

SEQ ID NO: 153422 - protein, 7 aa, synthetic construct
VPKTQGW

SEQ ID NO: 153423 - protein, 7 aa, synthetic construct
VPKVSHQ

SEQ ID NO: 153424 - protein, 7 aa, synthetic construct
VPKVVHT

SEQ ID NO: 153425 - protein, 7 aa, synthetic construct
VPKYVPS

SEQ ID NO: 153426 - protein, 7 aa, synthetic construct
VPLKGYS

SEQ ID NO: 153427 - protein, 7 aa, synthetic construct
VPMAGTR

SEQ ID NO: 153428 - protein, 7 aa, synthetic construct
VPMERSW

SEQ ID NO: 153429 - protein, 7 aa, synthetic construct
VPMRINA

SEQ ID NO: 153430 - protein, 7 aa, synthetic construct
VPNASHK

SEQ ID NO: 153431 - protein, 7 aa, synthetic construct
VPNDPRK

SEQ ID NO: 153432 - protein, 7 aa, synthetic construct
VPNERTR

SEQ ID NO: 153433 - protein, 7 aa, synthetic construct
VPNISGN

SEQ ID NO: 153434 - protein, 7 aa, synthetic construct
VPNKPHH

SEQ ID NO: 153435 - protein, 7 aa, synthetic construct
VPNPHRA

SEQ ID NO: 153436 - protein, 7 aa, synthetic construct
VPNRQER

SEQ ID NO: 153437 - protein, 7 aa, synthetic construct
VPNSQRG

SEQ ID NO: 153438 - protein, 7 aa, synthetic construct
VPNTQLP

SEQ ID NO: 153439 - protein, 7 aa, synthetic construct
VPNTSYR

SEQ ID NO: 153440 - protein, 7 aa, synthetic construct
VPNYIQK

SEQ ID NO: 153441 - protein, 7 aa, synthetic construct
VPPHHRA

SEQ ID NO: 153442 - protein, 7 aa, synthetic construct
VPPHRQM

SEQ ID NO: 153443 - protein, 7 aa, synthetic construct
VPPKHPQ

SEQ ID NO: 153444 - protein, 7 aa, synthetic construct
VPPNNLR

SEQ ID NO: 153445 - protein, 7 aa, synthetic construct
VPPRNFG

SEQ ID NO: 153446 - protein, 7 aa, synthetic construct
VPPRTAM

SEQ ID NO: 153447 - protein, 7 aa, synthetic construct
VPPRVPT

SEQ ID NO: 153448 - protein, 7 aa, synthetic construct
VPPVRHT

SEQ ID NO: 153449 - protein, 7 aa, synthetic construct
VPQAQMR

SEQ ID NO: 153450 - protein, 7 aa, synthetic construct
VPQFARG

SEQ ID NO: 153451 - protein, 7 aa, synthetic construct
VPQFKHA

SEQ ID NO: 153452 - protein, 7 aa, synthetic construct
VPQGRHL

SEQ ID NO: 153453 - protein, 7 aa, synthetic construct
VPQHTVK

SEQ ID NO: 153454 - protein, 7 aa, synthetic construct
VPQKYGM

SEQ ID NO: 153455 - protein, 7 aa, synthetic construct
VPQMGPR

SEQ ID NO: 153456 - protein, 7 aa, synthetic construct
VPQMKHF

SEQ ID NO: 153457 - protein, 7 aa, synthetic construct
VPQNAAR

SEQ ID NO: 153458 - protein, 7 aa, synthetic construct
VPQQTPR

SEQ ID NO: 153459 - protein, 7 aa, synthetic construct
VPQRELK

SEQ ID NO: 153460 - protein, 7 aa, synthetic construct
VPQRHQQ

SEQ ID NO: 153461 - protein, 7 aa, synthetic construct
VPQRVMS

SEQ ID NO: 153462 - protein, 7 aa, synthetic construct
VPQTKYT

SEQ ID NO: 153463 - protein, 7 aa, synthetic construct
VPRAREA

SEQ ID NO: 153464 - protein, 7 aa, synthetic construct
VPRDHRI

SEQ ID NO: 153465 - protein, 7 aa, synthetic construct
VPRDIRN

SEQ ID NO: 153466 - protein, 7 aa, synthetic construct
VPRGIMS

SEQ ID NO: 153467 - protein, 7 aa, synthetic construct
VPRGSIG

SEQ ID NO: 153468 - protein, 7 aa, synthetic construct
VPRGSSA

SEQ ID NO: 153469 - protein, 7 aa, synthetic construct
VPRHAQG

SEQ ID NO: 153470 - protein, 7 aa, synthetic construct
VPRHETK

SEQ ID NO: 153471 - protein, 7 aa, synthetic construct
VPRHISG

SEQ ID NO: 153472 - protein, 7 aa, synthetic construct
VPRHNVG

SEQ ID NO: 153473 - protein, 7 aa, synthetic construct
VPRHPQV

SEQ ID NO: 153474 - protein, 7 aa, synthetic construct
VPRHSAV

SEQ ID NO: 153475 - protein, 7 aa, synthetic construct
VPRHTNT

SEQ ID NO: 153476 - protein, 7 aa, synthetic construct
VPRHVSV

SEQ ID NO: 153477 - protein, 7 aa, synthetic construct
VPRIATN

SEQ ID NO: 153478 - protein, 7 aa, synthetic construct
VPRIGNV

SEQ ID NO: 153479 - protein, 7 aa, synthetic construct
VPRIHVA

SEQ ID NO: 153480 - protein, 7 aa, synthetic construct
VPRKETN

SEQ ID NO: 153481 - protein, 7 aa, synthetic construct
VPRKGMD

SEQ ID NO: 153482 - protein, 7 aa, synthetic construct
VPRKSDA

SEQ ID NO: 153483 - protein, 7 aa, synthetic construct
VPRLKDL

SEQ ID NO: 153484 - protein, 7 aa, synthetic construct
VPRMHGS

SEQ ID NO: 153485 - protein, 7 aa, synthetic construct
VPRMHIG

SEQ ID NO: 153486 - protein, 7 aa, synthetic construct
VPRMLAN

SEQ ID NO: 153487 - protein, 7 aa, synthetic construct
VPRMQAG

SEQ ID NO: 153488 - protein, 7 aa, synthetic construct
VPRMYKE

SEQ ID NO: 153489 - protein, 7 aa, synthetic construct
VPRNQQM

SEQ ID NO: 153490 - protein, 7 aa, synthetic construct
VPRNVSQ

SEQ ID NO: 153491 - protein, 7 aa, synthetic construct
VPRPGHL

SEQ ID NO: 153492 - protein, 7 aa, synthetic construct
VPRPGRD

SEQ ID NO: 153493 - protein, 7 aa, synthetic construct
VPRPHPN

SEQ ID NO: 153494 - protein, 7 aa, synthetic construct
VPRPSVL

SEQ ID NO: 153495 - protein, 7 aa, synthetic construct
VPRQAGN

SEQ ID NO: 153496 - protein, 7 aa, synthetic construct
VPRQEKS

SEQ ID NO: 153497 - protein, 7 aa, synthetic construct
VPRQGLL

SEQ ID NO: 153498 - protein, 7 aa, synthetic construct
VPRQSLL

SEQ ID NO: 153499 - protein, 7 aa, synthetic construct
VPRSSAG

SEQ ID NO: 153500 - protein, 7 aa, synthetic construct
VPRTALM

SEQ ID NO: 153501 - protein, 7 aa, synthetic construct
VPRTHLG

SEQ ID NO: 153502 - protein, 7 aa, synthetic construct
VPRTHPN

SEQ ID NO: 153503 - protein, 7 aa, synthetic construct
VPRTHVG

SEQ ID NO: 153504 - protein, 7 aa, synthetic construct
VPRTVSH

SEQ ID NO: 153505 - protein, 7 aa, synthetic construct
VPRTVSY

SEQ ID NO: 153506 - protein, 7 aa, synthetic construct
VPRVNNQ

SEQ ID NO: 153507 - protein, 7 aa, synthetic construct
VPRVSNH

SEQ ID NO: 153508 - protein, 7 aa, synthetic construct
VPRVSQL

SEQ ID NO: 153509 - protein, 7 aa, synthetic construct
VPRVVPA

SEQ ID NO: 153510 - protein, 7 aa, synthetic construct
VPSAMYK

SEQ ID NO: 153511 - protein, 7 aa, synthetic construct
VPSERLR

SEQ ID NO: 153512 - protein, 7 aa, synthetic construct
VPSFTKA

SEQ ID NO: 153513 - protein, 7 aa, synthetic construct
VPSGKYM

SEQ ID NO: 153514 - protein, 7 aa, synthetic construct
VPSHKFA

SEQ ID NO: 153515 - protein, 7 aa, synthetic construct
VPSKHLT

SEQ ID NO: 153516 - protein, 7 aa, synthetic construct
VPSKMYQ

SEQ ID NO: 153517 - protein, 7 aa, synthetic construct
VPSQKYQ

SEQ ID NO: 153518 - protein, 7 aa, synthetic construct
VPSRGHG

SEQ ID NO: 153519 - protein, 7 aa, synthetic construct
VPSSHNR

SEQ ID NO: 153520 - protein, 7 aa, synthetic construct
VPSSVRQ

SEQ ID NO: 153521 - protein, 7 aa, synthetic construct
VPSTGHR

SEQ ID NO: 153522 - protein, 7 aa, synthetic construct
VPSTRMH

SEQ ID NO: 153523 - protein, 7 aa, synthetic construct
VPTNHQR

SEQ ID NO: 153524 - protein, 7 aa, synthetic construct
VPTNRHN

SEQ ID NO: 153525 - protein, 7 aa, synthetic construct
VPTRAYS

SEQ ID NO: 153526 - protein, 7 aa, synthetic construct
VPTSRER

SEQ ID NO: 153527 - protein, 7 aa, synthetic construct
VPTYNKM

SEQ ID NO: 153528 - protein, 7 aa, synthetic construct
VPVARQQ

SEQ ID NO: 153529 - protein, 7 aa, synthetic construct
VPVIQRS

SEQ ID NO: 153530 - protein, 7 aa, synthetic construct
VPVQLRN

SEQ ID NO: 153531 - protein, 7 aa, synthetic construct
VPVRSNM

SEQ ID NO: 153532 - protein, 7 aa, synthetic construct
VPVTYAK

SEQ ID NO: 153533 - protein, 7 aa, synthetic construct
VPYGAKS

SEQ ID NO: 153534 - protein, 7 aa, synthetic construct
VPYKGRD

SEQ ID NO: 153535 - protein, 7 aa, synthetic construct
VPYQGDK

SEQ ID NO: 153536 - protein, 7 aa, synthetic construct
VPYSSSK

SEQ ID NO: 153537 - protein, 7 aa, synthetic construct
VQAFAKA

SEQ ID NO: 153538 - protein, 7 aa, synthetic construct
VQAHNSK

SEQ ID NO: 153539 - protein, 7 aa, synthetic construct
VQAKWSG

SEQ ID NO: 153540 - protein, 7 aa, synthetic construct
VQANAAR

SEQ ID NO: 153541 - protein, 7 aa, synthetic construct
VQANNFR

SEQ ID NO: 153542 - protein, 7 aa, synthetic construct
VQAREQR

SEQ ID NO: 153543 - protein, 7 aa, synthetic construct
VQASHRN

SEQ ID NO: 153544 - protein, 7 aa, synthetic construct
VQDQQPQ

SEQ ID NO: 153545 - protein, 7 aa, synthetic construct
VQDRPKN

SEQ ID NO: 153546 - protein, 7 aa, synthetic construct
VQDRQLK

SEQ ID NO: 153547 - protein, 7 aa, synthetic construct
VQEGKTR

SEQ ID NO: 153548 - protein, 7 aa, synthetic construct
VQEKKSI

SEQ ID NO: 153549 - protein, 7 aa, synthetic construct
VQERLRG

SEQ ID NO: 153550 - protein, 7 aa, synthetic construct
VQERMAR

SEQ ID NO: 153551 - protein, 7 aa, synthetic construct
VQERPLK

SEQ ID NO: 153552 - protein, 7 aa, synthetic construct
VQESARK

SEQ ID NO: 153553 - protein, 7 aa, synthetic construct
VQFKNRD

SEQ ID NO: 153554 - protein, 7 aa, synthetic construct
VQFQTPN

SEQ ID NO: 153555 - protein, 7 aa, synthetic construct
VQGFIHK

SEQ ID NO: 153556 - protein, 7 aa, synthetic construct
VQGGNQR

SEQ ID NO: 153557 - protein, 7 aa, synthetic construct
VQGGSQR

SEQ ID NO: 153558 - protein, 7 aa, synthetic construct
VQGIIRA

SEQ ID NO: 153559 - protein, 7 aa, synthetic construct
VQGIRDK

SEQ ID NO: 153560 - protein, 7 aa, synthetic construct
VQGKSYT

SEQ ID NO: 153561 - protein, 7 aa, synthetic construct
VQGNFTR

SEQ ID NO: 153562 - protein, 7 aa, synthetic construct
VQGPRFA

SEQ ID NO: 153563 - protein, 7 aa, synthetic construct
VQGQHAK

SEQ ID NO: 153564 - protein, 7 aa, synthetic construct
VQGQHRN

SEQ ID NO: 153565 - protein, 7 aa, synthetic construct
VQGRDFK

SEQ ID NO: 153566 - protein, 7 aa, synthetic construct
VQGRYHS

SEQ ID NO: 153567 - protein, 7 aa, synthetic construct
VQGTWTK

SEQ ID NO: 153568 - protein, 7 aa, synthetic construct
VQGVIRG

SEQ ID NO: 153569 - protein, 7 aa, synthetic construct
VQGVKFT

SEQ ID NO: 153570 - protein, 7 aa, synthetic construct
VQGVYTK

SEQ ID NO: 153571 - protein, 7 aa, synthetic construct
VQHFKGG

SEQ ID NO: 153572 - protein, 7 aa, synthetic construct
VQHGAYK

SEQ ID NO: 153573 - protein, 7 aa, synthetic construct
VQHGRPV

SEQ ID NO: 153574 - protein, 7 aa, synthetic construct
VQHIRNG

SEQ ID NO: 153575 - protein, 7 aa, synthetic construct
VQHKILN

SEQ ID NO: 153576 - protein, 7 aa, synthetic construct
VQHRNTG

SEQ ID NO: 153577 - protein, 7 aa, synthetic construct
VQHVASK

SEQ ID NO: 153578 - protein, 7 aa, synthetic construct
VQHVKLT

SEQ ID NO: 153579 - protein, 7 aa, synthetic construct
VQHVTQK

SEQ ID NO: 153580 - protein, 7 aa, synthetic construct
VQIHSNK

SEQ ID NO: 153581 - protein, 7 aa, synthetic construct
VQINRPF

SEQ ID NO: 153582 - protein, 7 aa, synthetic construct
VQIRDAR

SEQ ID NO: 153583 - protein, 7 aa, synthetic construct
VQKAQQW

SEQ ID NO: 153584 - protein, 7 aa, synthetic construct
VQKGPFA

SEQ ID NO: 153585 - protein, 7 aa, synthetic construct
VQKHPMM

SEQ ID NO: 153586 - protein, 7 aa, synthetic construct
VQKISFA

SEQ ID NO: 153587 - protein, 7 aa, synthetic construct
VQKKDYF

SEQ ID NO: 153588 - protein, 7 aa, synthetic construct
VQKKEER

SEQ ID NO: 153589 - protein, 7 aa, synthetic construct
VQKKMEY

SEQ ID NO: 153590 - protein, 7 aa, synthetic construct
VQKMDRM

SEQ ID NO: 153591 - protein, 7 aa, synthetic construct
VQKMPNN

SEQ ID NO: 153592 - protein, 7 aa, synthetic construct
VQKNQYI

SEQ ID NO: 153593 - protein, 7 aa, synthetic construct
VQKRDMI

SEQ ID NO: 153594 - protein, 7 aa, synthetic construct
VQKRIES

SEQ ID NO: 153595 - protein, 7 aa, synthetic construct
VQKRMVD

SEQ ID NO: 153596 - protein, 7 aa, synthetic construct
VQKVSIY

SEQ ID NO: 153597 - protein, 7 aa, synthetic construct
VQKYISP

SEQ ID NO: 153598 - protein, 7 aa, synthetic construct
VQKYTRE

SEQ ID NO: 153599 - protein, 7 aa, synthetic construct
VQLAQSR

SEQ ID NO: 153600 - protein, 7 aa, synthetic construct
VQLHSMK

SEQ ID NO: 153601 - protein, 7 aa, synthetic construct
VQLRETR

SEQ ID NO: 153602 - protein, 7 aa, synthetic construct
VQLRNAM

SEQ ID NO: 153603 - protein, 7 aa, synthetic construct
VQLRQKE

SEQ ID NO: 153604 - protein, 7 aa, synthetic construct
VQMHQKF

SEQ ID NO: 153605 - protein, 7 aa, synthetic construct
VQMHTPK

SEQ ID NO: 153606 - protein, 7 aa, synthetic construct
VQMNREK

SEQ ID NO: 153607 - protein, 7 aa, synthetic construct
VQMRAHP

SEQ ID NO: 153608 - protein, 7 aa, synthetic construct
VQMRNKE

SEQ ID NO: 153609 - protein, 7 aa, synthetic construct
VQNGRQW

SEQ ID NO: 153610 - protein, 7 aa, synthetic construct
VQNLIRN

SEQ ID NO: 153611 - protein, 7 aa, synthetic construct
VQNLVRA

SEQ ID NO: 153612 - protein, 7 aa, synthetic construct
VQNNHTR

SEQ ID NO: 153613 - protein, 7 aa, synthetic construct
VQNPKRE

SEQ ID NO: 153614 - protein, 7 aa, synthetic construct
VQNQKYM

SEQ ID NO: 153615 - protein, 7 aa, synthetic construct
VQNYSRM

SEQ ID NO: 153616 - protein, 7 aa, synthetic construct
VQPHIRG

SEQ ID NO: 153617 - protein, 7 aa, synthetic construct
VQPHKFQ

SEQ ID NO: 153618 - protein, 7 aa, synthetic construct
VQPKTSW

SEQ ID NO: 153619 - protein, 7 aa, synthetic construct
VQPRVHG

SEQ ID NO: 153620 - protein, 7 aa, synthetic construct
VQQARVH

SEQ ID NO: 153621 - protein, 7 aa, synthetic construct
VQQGMSR

SEQ ID NO: 153622 - protein, 7 aa, synthetic construct
VQQGPNR

SEQ ID NO: 153623 - protein, 7 aa, synthetic construct
VQQGVKW

SEQ ID NO: 153624 - protein, 7 aa, synthetic construct
VQQHHRP

SEQ ID NO: 153625 - protein, 7 aa, synthetic construct
VQQKNWH

SEQ ID NO: 153626 - protein, 7 aa, synthetic construct
VQQKTYL

SEQ ID NO: 153627 - protein, 7 aa, synthetic construct
VQQLRAN

SEQ ID NO: 153628 - protein, 7 aa, synthetic construct
VQQMRAT

SEQ ID NO: 153629 - protein, 7 aa, synthetic construct
VQQNART

SEQ ID NO: 153630 - protein, 7 aa, synthetic construct
VQQQHKF

SEQ ID NO: 153631 - protein, 7 aa, synthetic construct
VQQQQRN

SEQ ID NO: 153632 - protein, 7 aa, synthetic construct
VQQRDGK

SEQ ID NO: 153633 - protein, 7 aa, synthetic construct
VQQRIVT

SEQ ID NO: 153634 - protein, 7 aa, synthetic construct
VQQRLGQ

SEQ ID NO: 153635 - protein, 7 aa, synthetic construct
VQQRPSA

SEQ ID NO: 153636 - protein, 7 aa, synthetic construct
VQQRQVI

SEQ ID NO: 153637 - protein, 7 aa, synthetic construct
VQQTASR

SEQ ID NO: 153638 - protein, 7 aa, synthetic construct
VQQTRTH

SEQ ID NO: 153639 - protein, 7 aa, synthetic construct
VQQYGRM

SEQ ID NO: 153640 - protein, 7 aa, synthetic construct
VQRAISN

SEQ ID NO: 153641 - protein, 7 aa, synthetic construct
VQRANKD

SEQ ID NO: 153642 - protein, 7 aa, synthetic construct
VQRDPPR

SEQ ID NO: 153643 - protein, 7 aa, synthetic construct
VQREIKS

SEQ ID NO: 153644 - protein, 7 aa, synthetic construct
VQRGVQG

SEQ ID NO: 153645 - protein, 7 aa, synthetic construct
VQRHMTV

SEQ ID NO: 153646 - protein, 7 aa, synthetic construct
VQRISAG

SEQ ID NO: 153647 - protein, 7 aa, synthetic construct
VQRISPG

SEQ ID NO: 153648 - protein, 7 aa, synthetic construct
VQRIVTQ

SEQ ID NO: 153649 - protein, 7 aa, synthetic construct
VQRKVEV

SEQ ID NO: 153650 - protein, 7 aa, synthetic construct
VQRKVPD

SEQ ID NO: 153651 - protein, 7 aa, synthetic construct
VQRLKME

SEQ ID NO: 153652 - protein, 7 aa, synthetic construct
VQRNIMA

SEQ ID NO: 153653 - protein, 7 aa, synthetic construct
VQRNPNY

SEQ ID NO: 153654 - protein, 7 aa, synthetic construct
VQRPGLV

SEQ ID NO: 153655 - protein, 7 aa, synthetic construct
VQRPHMT

SEQ ID NO: 153656 - protein, 7 aa, synthetic construct
VQRPHVS

SEQ ID NO: 153657 - protein, 7 aa, synthetic construct
VQRPIHN

SEQ ID NO: 153658 - protein, 7 aa, synthetic construct
VQRPVTM

SEQ ID NO: 153659 - protein, 7 aa, synthetic construct
VQRQLKE

SEQ ID NO: 153660 - protein, 7 aa, synthetic construct
VQRQSAG

SEQ ID NO: 153661 - protein, 7 aa, synthetic construct
VQRQSVG

SEQ ID NO: 153662 - protein, 7 aa, synthetic construct
VQRSAAM

SEQ ID NO: 153663 - protein, 7 aa, synthetic construct
VQRSTTA

SEQ ID NO: 153664 - protein, 7 aa, synthetic construct
VQRTAYP

SEQ ID NO: 153665 - protein, 7 aa, synthetic construct
VQRTIRE

SEQ ID NO: 153666 - protein, 7 aa, synthetic construct
VQRTNLM

SEQ ID NO: 153667 - protein, 7 aa, synthetic construct
VQRTTER

SEQ ID NO: 153668 - protein, 7 aa, synthetic construct
VQRTVPA

SEQ ID NO: 153669 - protein, 7 aa, synthetic construct
VQRVAQL

SEQ ID NO: 153670 - protein, 7 aa, synthetic construct
VQRVRQE

SEQ ID NO: 153671 - protein, 7 aa, synthetic construct
VQSFARA

SEQ ID NO: 153672 - protein, 7 aa, synthetic construct
VQSKPNW

SEQ ID NO: 153673 - protein, 7 aa, synthetic construct
VQSMSSR

SEQ ID NO: 153674 - protein, 7 aa, synthetic construct
VQSPHQR

SEQ ID NO: 153675 - protein, 7 aa, synthetic construct
VQSREQR

SEQ ID NO: 153676 - protein, 7 aa, synthetic construct
VQSSHGR

SEQ ID NO: 153677 - protein, 7 aa, synthetic construct
VQSYVAK

SEQ ID NO: 153678 - protein, 7 aa, synthetic construct
VQTMRLS

SEQ ID NO: 153679 - protein, 7 aa, synthetic construct
VQTNRHG

SEQ ID NO: 153680 - protein, 7 aa, synthetic construct
VQTNWPK

SEQ ID NO: 153681 - protein, 7 aa, synthetic construct
VQTRNLM

SEQ ID NO: 153682 - protein, 7 aa, synthetic construct
VQTSNRQ

SEQ ID NO: 153683 - protein, 7 aa, synthetic construct
VQTTKYH

SEQ ID NO: 153684 - protein, 7 aa, synthetic construct
VQTYSKT

SEQ ID NO: 153685 - protein, 7 aa, synthetic construct
VQVLARN

SEQ ID NO: 153686 - protein, 7 aa, synthetic construct
VQVNKYG

SEQ ID NO: 153687 - protein, 7 aa, synthetic construct
VQVRERI

SEQ ID NO: 153688 - protein, 7 aa, synthetic construct
VQVRGVM

SEQ ID NO: 153689 - protein, 7 aa, synthetic construct
VQVRNSV

SEQ ID NO: 153690 - protein, 7 aa, synthetic construct
VQVRPHN

SEQ ID NO: 153691 - protein, 7 aa, synthetic construct
VQVRSAT

SEQ ID NO: 153692 - protein, 7 aa, synthetic construct
VQVRVQN

SEQ ID NO: 153693 - protein, 7 aa, synthetic construct
VQVTAQR

SEQ ID NO: 153694 - protein, 7 aa, synthetic construct
VQYASKI

SEQ ID NO: 153695 - protein, 7 aa, synthetic construct
VQYAVKG

SEQ ID NO: 153696 - protein, 7 aa, synthetic construct
VQYHKGV

SEQ ID NO: 153697 - protein, 7 aa, synthetic construct
VQYPIKS

SEQ ID NO: 153698 - protein, 7 aa, synthetic construct
VRAALHG

SEQ ID NO: 153699 - protein, 7 aa, synthetic construct
VRAATTY

SEQ ID NO: 153700 - protein, 7 aa, synthetic construct
VRAAYGP

SEQ ID NO: 153701 - protein, 7 aa, synthetic construct
VRADHKN

SEQ ID NO: 153702 - protein, 7 aa, synthetic construct
VRADVIR

SEQ ID NO: 153703 - protein, 7 aa, synthetic construct
VRAEQRA

SEQ ID NO: 153704 - protein, 7 aa, synthetic construct
VRAEQRL

SEQ ID NO: 153705 - protein, 7 aa, synthetic construct
VRAHATN

SEQ ID NO: 153706 - protein, 7 aa, synthetic construct
VRAHMSP

SEQ ID NO: 153707 - protein, 7 aa, synthetic construct
VRAHSTA

SEQ ID NO: 153708 - protein, 7 aa, synthetic construct
VRAHTPS

SEQ ID NO: 153709 - protein, 7 aa, synthetic construct
VRAHTVI

SEQ ID NO: 153710 - protein, 7 aa, synthetic construct
VRAIIKE

SEQ ID NO: 153711 - protein, 7 aa, synthetic construct
VRAIKID

SEQ ID NO: 153712 - protein, 7 aa, synthetic construct
VRAIKPD

SEQ ID NO: 153713 - protein, 7 aa, synthetic construct
VRAKGQD

SEQ ID NO: 153714 - protein, 7 aa, synthetic construct
VRAKMSE

SEQ ID NO: 153715 - protein, 7 aa, synthetic construct
VRAKQEV

SEQ ID NO: 153716 - protein, 7 aa, synthetic construct
VRALSPQ

SEQ ID NO: 153717 - protein, 7 aa, synthetic construct
VRALVRD

SEQ ID NO: 153718 - protein, 7 aa, synthetic construct
VRAMAKD

SEQ ID NO: 153719 - protein, 7 aa, synthetic construct
VRAMVPS

SEQ ID NO: 153720 - protein, 7 aa, synthetic construct
VRANMIT

SEQ ID NO: 153721 - protein, 7 aa, synthetic construct
VRANPRE

SEQ ID NO: 153722 - protein, 7 aa, synthetic construct
VRAPAGL

SEQ ID NO: 153723 - protein, 7 aa, synthetic construct
VRAPISQ

SEQ ID NO: 153724 - protein, 7 aa, synthetic construct
VRAPKSE

SEQ ID NO: 153725 - protein, 7 aa, synthetic construct
VRAQAML

SEQ ID NO: 153726 - protein, 7 aa, synthetic construct
VRAQMHS

SEQ ID NO: 153727 - protein, 7 aa, synthetic construct
VRAQVAM

SEQ ID NO: 153728 - protein, 7 aa, synthetic construct
VRASHPG

SEQ ID NO: 153729 - protein, 7 aa, synthetic construct
VRASNMQ

SEQ ID NO: 153730 - protein, 7 aa, synthetic construct
VRASNYH

SEQ ID NO: 153731 - protein, 7 aa, synthetic construct
VRASQSF

SEQ ID NO: 153732 - protein, 7 aa, synthetic construct
VRAVQKD

SEQ ID NO: 153733 - protein, 7 aa, synthetic construct
VRAVQPL

SEQ ID NO: 153734 - protein, 7 aa, synthetic construct
VRAVSNH

SEQ ID NO: 153735 - protein, 7 aa, synthetic construct
VRAYKVE

SEQ ID NO: 153736 - protein, 7 aa, synthetic construct
VRDARLM

SEQ ID NO: 153737 - protein, 7 aa, synthetic construct
VRDFTKQ

SEQ ID NO: 153738 - protein, 7 aa, synthetic construct
VRDHQNR

SEQ ID NO: 153739 - protein, 7 aa, synthetic construct
VRDHRIG

SEQ ID NO: 153740 - protein, 7 aa, synthetic construct
VRDHRPM

SEQ ID NO: 153741 - protein, 7 aa, synthetic construct
VRDKGFF

SEQ ID NO: 153742 - protein, 7 aa, synthetic construct
VRDKVNY

SEQ ID NO: 153743 - protein, 7 aa, synthetic construct
VRDNKDK

SEQ ID NO: 153744 - protein, 7 aa, synthetic construct
VRDNPIR

SEQ ID NO: 153745 - protein, 7 aa, synthetic construct
VRDQRHA

SEQ ID NO: 153746 - protein, 7 aa, synthetic construct
VRDRMLV

SEQ ID NO: 153747 - protein, 7 aa, synthetic construct
VRDSAMK

SEQ ID NO: 153748 - protein, 7 aa, synthetic construct
VRDTGRM

SEQ ID NO: 153749 - protein, 7 aa, synthetic construct
VREDTRR

SEQ ID NO: 153750 - protein, 7 aa, synthetic construct
VREHPAR

SEQ ID NO: 153751 - protein, 7 aa, synthetic construct
VREIKGQ

SEQ ID NO: 153752 - protein, 7 aa, synthetic construct
VRELKSM

SEQ ID NO: 153753 - protein, 7 aa, synthetic construct
VREQART

SEQ ID NO: 153754 - protein, 7 aa, synthetic construct
VREQSMK

SEQ ID NO: 153755 - protein, 7 aa, synthetic construct
VRERLLQ

SEQ ID NO: 153756 - protein, 7 aa, synthetic construct
VRERNSV

SEQ ID NO: 153757 - protein, 7 aa, synthetic construct
VRERTVF

SEQ ID NO: 153758 - protein, 7 aa, synthetic construct
VRERVNL

SEQ ID NO: 153759 - protein, 7 aa, synthetic construct
VRERVVV

SEQ ID NO: 153760 - protein, 7 aa, synthetic construct
VRESLSR

SEQ ID NO: 153761 - protein, 7 aa, synthetic construct
VRESNSK

SEQ ID NO: 153762 - protein, 7 aa, synthetic construct
VRESRVT

SEQ ID NO: 153763 - protein, 7 aa, synthetic construct
VREVARS

SEQ ID NO: 153764 - protein, 7 aa, synthetic construct
VREVMRQ

SEQ ID NO: 153765 - protein, 7 aa, synthetic construct
VRGAIHQ

SEQ ID NO: 153766 - protein, 7 aa, synthetic construct
VRGAKDY

SEQ ID NO: 153767 - protein, 7 aa, synthetic construct
VRGALAQ

SEQ ID NO: 153768 - protein, 7 aa, synthetic construct
VRGAQTY

SEQ ID NO: 153769 - protein, 7 aa, synthetic construct
VRGDFKA

SEQ ID NO: 153770 - protein, 7 aa, synthetic construct
VRGDLQK

SEQ ID NO: 153771 - protein, 7 aa, synthetic construct
VRGDMKL

SEQ ID NO: 153772 - protein, 7 aa, synthetic construct
VRGDQTK

SEQ ID NO: 153773 - protein, 7 aa, synthetic construct
VRGDRLI

SEQ ID NO: 153774 - protein, 7 aa, synthetic construct
VRGEMTK

SEQ ID NO: 153775 - protein, 7 aa, synthetic construct
VRGEQKI

SEQ ID NO: 153776 - protein, 7 aa, synthetic construct
VRGGGHA

SEQ ID NO: 153777 - protein, 7 aa, synthetic construct
VRGGHTN

SEQ ID NO: 153778 - protein, 7 aa, synthetic construct
VRGHTLV

SEQ ID NO: 153779 - protein, 7 aa, synthetic construct
VRGIAAQ

SEQ ID NO: 153780 - protein, 7 aa, synthetic construct
VRGIATS

SEQ ID NO: 153781 - protein, 7 aa, synthetic construct
VRGISQM

SEQ ID NO: 153782 - protein, 7 aa, synthetic construct
VRGKSPE

SEQ ID NO: 153783 - protein, 7 aa, synthetic construct
VRGKTVD

SEQ ID NO: 153784 - protein, 7 aa, synthetic construct
VRGLPRD

SEQ ID NO: 153785 - protein, 7 aa, synthetic construct
VRGMARD

SEQ ID NO: 153786 - protein, 7 aa, synthetic construct
VRGMDIR

SEQ ID NO: 153787 - protein, 7 aa, synthetic construct
VRGMNQA

SEQ ID NO: 153788 - protein, 7 aa, synthetic construct
VRGMSHG

SEQ ID NO: 153789 - protein, 7 aa, synthetic construct
VRGMSNL

SEQ ID NO: 153790 - protein, 7 aa, synthetic construct
VRGMVNH

SEQ ID NO: 153791 - protein, 7 aa, synthetic construct
VRGNHPT

SEQ ID NO: 153792 - protein, 7 aa, synthetic construct
VRGNILA

SEQ ID NO: 153793 - protein, 7 aa, synthetic construct
VRGNPAA

SEQ ID NO: 153794 - protein, 7 aa, synthetic construct
VRGNPPM

SEQ ID NO: 153795 - protein, 7 aa, synthetic construct
VRGNSMY

SEQ ID NO: 153796 - protein, 7 aa, synthetic construct
VRGPLHT

SEQ ID NO: 153797 - protein, 7 aa, synthetic construct
VRGPPQI

SEQ ID NO: 153798 - protein, 7 aa, synthetic construct
VRGPTGM

SEQ ID NO: 153799 - protein, 7 aa, synthetic construct
VRGQSLN

SEQ ID NO: 153800 - protein, 7 aa, synthetic construct
VRGQSMF

SEQ ID NO: 153801 - protein, 7 aa, synthetic construct
VRGQVLA

SEQ ID NO: 153802 - protein, 7 aa, synthetic construct
VRGQVMI

SEQ ID NO: 153803 - protein, 7 aa, synthetic construct
VRGSAIQ

SEQ ID NO: 153804 - protein, 7 aa, synthetic construct
VRGSMQF

SEQ ID NO: 153805 - protein, 7 aa, synthetic construct
VRGSQLM

SEQ ID NO: 153806 - protein, 7 aa, synthetic construct
VRGTGDR

SEQ ID NO: 153807 - protein, 7 aa, synthetic construct
VRGTNDR

SEQ ID NO: 153808 - protein, 7 aa, synthetic construct
VRGTPTF

SEQ ID NO: 153809 - protein, 7 aa, synthetic construct
VRGTSTP

SEQ ID NO: 153810 - protein, 7 aa, synthetic construct
VRGTTTF

SEQ ID NO: 153811 - protein, 7 aa, synthetic construct
VRHAANS

SEQ ID NO: 153812 - protein, 7 aa, synthetic construct
VRHAKEI

SEQ ID NO: 153813 - protein, 7 aa, synthetic construct
VRHANTA

SEQ ID NO: 153814 - protein, 7 aa, synthetic construct
VRHDTNK

SEQ ID NO: 153815 - protein, 7 aa, synthetic construct
VRHFHTE

SEQ ID NO: 153816 - protein, 7 aa, synthetic construct
VRHGVPQ

SEQ ID NO: 153817 - protein, 7 aa, synthetic construct
VRHINAP

SEQ ID NO: 153818 - protein, 7 aa, synthetic construct
VRHIPTA

SEQ ID NO: 153819 - protein, 7 aa, synthetic construct
VRHNTVQ

SEQ ID NO: 153820 - protein, 7 aa, synthetic construct
VRHPAGN

SEQ ID NO: 153821 - protein, 7 aa, synthetic construct
VRHPNQS

SEQ ID NO: 153822 - protein, 7 aa, synthetic construct
VRHPQNQ

SEQ ID NO: 153823 - protein, 7 aa, synthetic construct
VRHPSNV

SEQ ID NO: 153824 - protein, 7 aa, synthetic construct
VRHQGTM

SEQ ID NO: 153825 - protein, 7 aa, synthetic construct
VRHSSIG

SEQ ID NO: 153826 - protein, 7 aa, synthetic construct
VRHTAVQ

SEQ ID NO: 153827 - protein, 7 aa, synthetic construct
VRHTLSG

SEQ ID NO: 153828 - protein, 7 aa, synthetic construct
VRHTMNP

SEQ ID NO: 153829 - protein, 7 aa, synthetic construct
VRHTTGA

SEQ ID NO: 153830 - protein, 7 aa, synthetic construct
VRHVVAP

SEQ ID NO: 153831 - protein, 7 aa, synthetic construct
VRIAAQN

SEQ ID NO: 153832 - protein, 7 aa, synthetic construct
VRIGTER

SEQ ID NO: 153833 - protein, 7 aa, synthetic construct
VRINKDV

SEQ ID NO: 153834 - protein, 7 aa, synthetic construct
VRIPPNG

SEQ ID NO: 153835 - protein, 7 aa, synthetic construct
VRIQSNV

SEQ ID NO: 153836 - protein, 7 aa, synthetic construct
VRITGHP

SEQ ID NO: 153837 - protein, 7 aa, synthetic construct
VRKDKSD

SEQ ID NO: 153838 - protein, 7 aa, synthetic construct
VRKDYLV

SEQ ID NO: 153839 - protein, 7 aa, synthetic construct
VRKEHFT

SEQ ID NO: 153840 - protein, 7 aa, synthetic construct
VRKITDV

SEQ ID NO: 153841 - protein, 7 aa, synthetic construct
VRKLDGF

SEQ ID NO: 153842 - protein, 7 aa, synthetic construct
VRKLEPM

SEQ ID NO: 153843 - protein, 7 aa, synthetic construct
VRKLETQ

SEQ ID NO: 153844 - protein, 7 aa, synthetic construct
VRKMEAN

SEQ ID NO: 153845 - protein, 7 aa, synthetic construct
VRKPPEF

SEQ ID NO: 153846 - protein, 7 aa, synthetic construct
VRKQDQA

SEQ ID NO: 153847 - protein, 7 aa, synthetic construct
VRKQEAS

SEQ ID NO: 153848 - protein, 7 aa, synthetic construct
VRKQLDM

SEQ ID NO: 153849 - protein, 7 aa, synthetic construct
VRKQPEV

SEQ ID NO: 153850 - protein, 7 aa, synthetic construct
VRKTDLS

SEQ ID NO: 153851 - protein, 7 aa, synthetic construct
VRKTDTS

SEQ ID NO: 153852 - protein, 7 aa, synthetic construct
VRKTEAM

SEQ ID NO: 153853 - protein, 7 aa, synthetic construct
VRKTEYT

SEQ ID NO: 153854 - protein, 7 aa, synthetic construct
VRKTVAE

SEQ ID NO: 153855 - protein, 7 aa, synthetic construct
VRKTVDL

SEQ ID NO: 153856 - protein, 7 aa, synthetic construct
VRKVPQE

SEQ ID NO: 153857 - protein, 7 aa, synthetic construct
VRLKAFE

SEQ ID NO: 153858 - protein, 7 aa, synthetic construct
VRLKDQL

SEQ ID NO: 153859 - protein, 7 aa, synthetic construct
VRLKPQD

SEQ ID NO: 153860 - protein, 7 aa, synthetic construct
VRLKQDS

SEQ ID NO: 153861 - protein, 7 aa, synthetic construct
VRLMKNE

SEQ ID NO: 153862 - protein, 7 aa, synthetic construct
VRMGQMP

SEQ ID NO: 153863 - protein, 7 aa, synthetic construct
VRMGQPL

SEQ ID NO: 153864 - protein, 7 aa, synthetic construct
VRMGQPM

SEQ ID NO: 153865 - protein, 7 aa, synthetic construct
VRMKDIA

SEQ ID NO: 153866 - protein, 7 aa, synthetic construct
VRMKVEL

SEQ ID NO: 153867 - protein, 7 aa, synthetic construct
VRMMKDN

SEQ ID NO: 153868 - protein, 7 aa, synthetic construct
VRMPAHS

SEQ ID NO: 153869 - protein, 7 aa, synthetic construct
VRMPAHV

SEQ ID NO: 153870 - protein, 7 aa, synthetic construct
VRMPVAQ

SEQ ID NO: 153871 - protein, 7 aa, synthetic construct
VRMQRSD

SEQ ID NO: 153872 - protein, 7 aa, synthetic construct
VRMSEKI

SEQ ID NO: 153873 - protein, 7 aa, synthetic construct
VRMSIDK

SEQ ID NO: 153874 - protein, 7 aa, synthetic construct
VRNAAMV

SEQ ID NO: 153875 - protein, 7 aa, synthetic construct
VRNANVN

SEQ ID NO: 153876 - protein, 7 aa, synthetic construct
VRNARSE

SEQ ID NO: 153877 - protein, 7 aa, synthetic construct
VRNASNT

SEQ ID NO: 153878 - protein, 7 aa, synthetic construct
VRNASTV

SEQ ID NO: 153879 - protein, 7 aa, synthetic construct
VRNASVL

SEQ ID NO: 153880 - protein, 7 aa, synthetic construct
VRNATMS

SEQ ID NO: 153881 - protein, 7 aa, synthetic construct
VRNEKYN

SEQ ID NO: 153882 - protein, 7 aa, synthetic construct
VRNEVMR

SEQ ID NO: 153883 - protein, 7 aa, synthetic construct
VRNGHTF

SEQ ID NO: 153884 - protein, 7 aa, synthetic construct
VRNGVLY

SEQ ID NO: 153885 - protein, 7 aa, synthetic construct
VRNIAKD

SEQ ID NO: 153886 - protein, 7 aa, synthetic construct
VRNINQY

SEQ ID NO: 153887 - protein, 7 aa, synthetic construct
VRNINTH

SEQ ID NO: 153888 - protein, 7 aa, synthetic construct
VRNLASH

SEQ ID NO: 153889 - protein, 7 aa, synthetic construct
VRNLRNE

SEQ ID NO: 153890 - protein, 7 aa, synthetic construct
VRNLVGQ

SEQ ID NO: 153891 - protein, 7 aa, synthetic construct
VRNNERN

SEQ ID NO: 153892 - protein, 7 aa, synthetic construct
VRNNGMH

SEQ ID NO: 153893 - protein, 7 aa, synthetic construct
VRNNPVV

SEQ ID NO: 153894 - protein, 7 aa, synthetic construct
VRNPAHG

SEQ ID NO: 153895 - protein, 7 aa, synthetic construct
VRNQAPV

SEQ ID NO: 153896 - protein, 7 aa, synthetic construct
VRNQATT

SEQ ID NO: 153897 - protein, 7 aa, synthetic construct
VRNQKDQ

SEQ ID NO: 153898 - protein, 7 aa, synthetic construct
VRNQNFT

SEQ ID NO: 153899 - protein, 7 aa, synthetic construct
VRNQNPL

SEQ ID NO: 153900 - protein, 7 aa, synthetic construct
VRNQSSA

SEQ ID NO: 153901 - protein, 7 aa, synthetic construct
VRNRDVA

SEQ ID NO: 153902 - protein, 7 aa, synthetic construct
VRNSQPT

SEQ ID NO: 153903 - protein, 7 aa, synthetic construct
VRNSTPI

SEQ ID NO: 153904 - protein, 7 aa, synthetic construct
VRNTAYP

SEQ ID NO: 153905 - protein, 7 aa, synthetic construct
VRNTMNL

SEQ ID NO: 153906 - protein, 7 aa, synthetic construct
VRNTQAI

SEQ ID NO: 153907 - protein, 7 aa, synthetic construct
VRNTQLV

SEQ ID NO: 153908 - protein, 7 aa, synthetic construct
VRNTSSI

SEQ ID NO: 153909 - protein, 7 aa, synthetic construct
VRNTTMS

SEQ ID NO: 153910 - protein, 7 aa, synthetic construct
VRNVLGQ

SEQ ID NO: 153911 - protein, 7 aa, synthetic construct
VRNVNRD

SEQ ID NO: 153912 - protein, 7 aa, synthetic construct
VRNVNVQ

SEQ ID NO: 153913 - protein, 7 aa, synthetic construct
VRNVPRE

SEQ ID NO: 153914 - protein, 7 aa, synthetic construct
VRNVQHP

SEQ ID NO: 153915 - protein, 7 aa, synthetic construct
VRNVSIT

SEQ ID NO: 153916 - protein, 7 aa, synthetic construct
VRNVTPA

SEQ ID NO: 153917 - protein, 7 aa, synthetic construct
VRPAAPL

SEQ ID NO: 153918 - protein, 7 aa, synthetic construct
VRPAHLN

SEQ ID NO: 153919 - protein, 7 aa, synthetic construct
VRPASSM

SEQ ID NO: 153920 - protein, 7 aa, synthetic construct
VRPATTY

SEQ ID NO: 153921 - protein, 7 aa, synthetic construct
VRPDTGK

SEQ ID NO: 153922 - protein, 7 aa, synthetic construct
VRPERER

SEQ ID NO: 153923 - protein, 7 aa, synthetic construct
VRPGASY

SEQ ID NO: 153924 - protein, 7 aa, synthetic construct
VRPGQHM

SEQ ID NO: 153925 - protein, 7 aa, synthetic construct
VRPHERS

SEQ ID NO: 153926 - protein, 7 aa, synthetic construct
VRPHPNA

SEQ ID NO: 153927 - protein, 7 aa, synthetic construct
VRPHPNM

SEQ ID NO: 153928 - protein, 7 aa, synthetic construct
VRPHQLN

SEQ ID NO: 153929 - protein, 7 aa, synthetic construct
VRPHTGL

SEQ ID NO: 153930 - protein, 7 aa, synthetic construct
VRPIAAH

SEQ ID NO: 153931 - protein, 7 aa, synthetic construct
VRPISMN

SEQ ID NO: 153932 - protein, 7 aa, synthetic construct
VRPISQH

SEQ ID NO: 153933 - protein, 7 aa, synthetic construct
VRPISVH

SEQ ID NO: 153934 - protein, 7 aa, synthetic construct
VRPIVHN

SEQ ID NO: 153935 - protein, 7 aa, synthetic construct
VRPKQAD

SEQ ID NO: 153936 - protein, 7 aa, synthetic construct
VRPKQDQ

SEQ ID NO: 153937 - protein, 7 aa, synthetic construct
VRPLRQD

SEQ ID NO: 153938 - protein, 7 aa, synthetic construct
VRPLRVE

SEQ ID NO: 153939 - protein, 7 aa, synthetic construct
VRPMPPS

SEQ ID NO: 153940 - protein, 7 aa, synthetic construct
VRPMVGQ

SEQ ID NO: 153941 - protein, 7 aa, synthetic construct
VRPMVHQ

SEQ ID NO: 153942 - protein, 7 aa, synthetic construct
VRPNIIQ

SEQ ID NO: 153943 - protein, 7 aa, synthetic construct
VRPNPGM

SEQ ID NO: 153944 - protein, 7 aa, synthetic construct
VRPPLHN

SEQ ID NO: 153945 - protein, 7 aa, synthetic construct
VRPPSMP

SEQ ID NO: 153946 - protein, 7 aa, synthetic construct
VRPPTNY

SEQ ID NO: 153947 - protein, 7 aa, synthetic construct
VRPQKAD

SEQ ID NO: 153948 - protein, 7 aa, synthetic construct
VRPQNYA

SEQ ID NO: 153949 - protein, 7 aa, synthetic construct
VRPQRGE

SEQ ID NO: 153950 - protein, 7 aa, synthetic construct
VRPSAHA

SEQ ID NO: 153951 - protein, 7 aa, synthetic construct
VRPSHSL

SEQ ID NO: 153952 - protein, 7 aa, synthetic construct
VRPTHHA

SEQ ID NO: 153953 - protein, 7 aa, synthetic construct
VRPTQMY

SEQ ID NO: 153954 - protein, 7 aa, synthetic construct
VRPVGYQ

SEQ ID NO: 153955 - protein, 7 aa, synthetic construct
VRPVHPV

SEQ ID NO: 153956 - protein, 7 aa, synthetic construct
VRPVKFD

SEQ ID NO: 153957 - protein, 7 aa, synthetic construct
VRPVLNS

SEQ ID NO: 153958 - protein, 7 aa, synthetic construct
VRQALRD

SEQ ID NO: 153959 - protein, 7 aa, synthetic construct
VRQANQY

SEQ ID NO: 153960 - protein, 7 aa, synthetic construct
VRQANVY

SEQ ID NO: 153961 - protein, 7 aa, synthetic construct
VRQEIMR

SEQ ID NO: 153962 - protein, 7 aa, synthetic construct
VRQEISK

SEQ ID NO: 153963 - protein, 7 aa, synthetic construct
VRQGAIL

SEQ ID NO: 153964 - protein, 7 aa, synthetic construct
VRQGGFN

SEQ ID NO: 153965 - protein, 7 aa, synthetic construct
VRQISSA

SEQ ID NO: 153966 - protein, 7 aa, synthetic construct
VRQISVA

SEQ ID NO: 153967 - protein, 7 aa, synthetic construct
VRQKELF

SEQ ID NO: 153968 - protein, 7 aa, synthetic construct
VRQKLIE

SEQ ID NO: 153969 - protein, 7 aa, synthetic construct
VRQLAQL

SEQ ID NO: 153970 - protein, 7 aa, synthetic construct
VRQLASI

SEQ ID NO: 153971 - protein, 7 aa, synthetic construct
VRQLHKE

SEQ ID NO: 153972 - protein, 7 aa, synthetic construct
VRQLQEK

SEQ ID NO: 153973 - protein, 7 aa, synthetic construct
VRQNNTY

SEQ ID NO: 153974 - protein, 7 aa, synthetic construct
VRQPHQA

SEQ ID NO: 153975 - protein, 7 aa, synthetic construct
VRQPHQI

SEQ ID NO: 153976 - protein, 7 aa, synthetic construct
VRQPMQV

SEQ ID NO: 153977 - protein, 7 aa, synthetic construct
VRQPPLA

SEQ ID NO: 153978 - protein, 7 aa, synthetic construct
VRQQKFD

SEQ ID NO: 153979 - protein, 7 aa, synthetic construct
VRQQKQE

SEQ ID NO: 153980 - protein, 7 aa, synthetic construct
VRQSEKA

SEQ ID NO: 153981 - protein, 7 aa, synthetic construct
VRQSGHF

SEQ ID NO: 153982 - protein, 7 aa, synthetic construct
VRQSINN

SEQ ID NO: 153983 - protein, 7 aa, synthetic construct
VRQSPDR

SEQ ID NO: 153984 - protein, 7 aa, synthetic construct
VRQSPSI

SEQ ID NO: 153985 - protein, 7 aa, synthetic construct
VRQSQDK

SEQ ID NO: 153986 - protein, 7 aa, synthetic construct
VRQTADR

SEQ ID NO: 153987 - protein, 7 aa, synthetic construct
VRQTLST

SEQ ID NO: 153988 - protein, 7 aa, synthetic construct
VRQTTIQ

SEQ ID NO: 153989 - protein, 7 aa, synthetic construct
VRQTVAV

SEQ ID NO: 153990 - protein, 7 aa, synthetic construct
VRQVKPD

SEQ ID NO: 153991 - protein, 7 aa, synthetic construct
VRQVVPQ

SEQ ID NO: 153992 - protein, 7 aa, synthetic construct
VRQYGKE

SEQ ID NO: 153993 - protein, 7 aa, synthetic construct
VRRELLP

SEQ ID NO: 153994 - protein, 7 aa, synthetic construct
VRRELQV

SEQ ID NO: 153995 - protein, 7 aa, synthetic construct
VRREMTG

SEQ ID NO: 153996 - protein, 7 aa, synthetic construct
VRSAAGY

SEQ ID NO: 153997 - protein, 7 aa, synthetic construct
VRSAFAP

SEQ ID NO: 153998 - protein, 7 aa, synthetic construct
VRSAHNA

SEQ ID NO: 153999 - protein, 7 aa, synthetic construct
VRSAPHI

SEQ ID NO: 154000 - protein, 7 aa, synthetic construct
VRSAQNL

SEQ ID NO: 154001 - protein, 7 aa, synthetic construct
VRSAQPY

SEQ ID NO: 154002 - protein, 7 aa, synthetic construct
VRSASPF

SEQ ID NO: 154003 - protein, 7 aa, synthetic construct
VRSATHF

SEQ ID NO: 154004 - protein, 7 aa, synthetic construct
VRSEAHH

SEQ ID NO: 154005 - protein, 7 aa, synthetic construct
VRSGRDG

SEQ ID NO: 154006 - protein, 7 aa, synthetic construct
VRSHPGL

SEQ ID NO: 154007 - protein, 7 aa, synthetic construct
VRSIKDN

SEQ ID NO: 154008 - protein, 7 aa, synthetic construct
VRSKEGY

SEQ ID NO: 154009 - protein, 7 aa, synthetic construct
VRSKENY

SEQ ID NO: 154010 - protein, 7 aa, synthetic construct
VRSKMDG

SEQ ID NO: 154011 - protein, 7 aa, synthetic construct
VRSKTDA

SEQ ID NO: 154012 - protein, 7 aa, synthetic construct
VRSKVNE

SEQ ID NO: 154013 - protein, 7 aa, synthetic construct
VRSLNLQ

SEQ ID NO: 154014 - protein, 7 aa, synthetic construct
VRSLTHA

SEQ ID NO: 154015 - protein, 7 aa, synthetic construct
VRSLTHN

SEQ ID NO: 154016 - protein, 7 aa, synthetic construct
VRSMAPV

SEQ ID NO: 154017 - protein, 7 aa, synthetic construct
VRSNPHG

SEQ ID NO: 154018 - protein, 7 aa, synthetic construct
VRSPMNQ

SEQ ID NO: 154019 - protein, 7 aa, synthetic construct
VRSPMTL

SEQ ID NO: 154020 - protein, 7 aa, synthetic construct
VRSQEQK

SEQ ID NO: 154021 - protein, 7 aa, synthetic construct
VRSQGGF

SEQ ID NO: 154022 - protein, 7 aa, synthetic construct
VRSQHLA

SEQ ID NO: 154023 - protein, 7 aa, synthetic construct
VRSQPGF

SEQ ID NO: 154024 - protein, 7 aa, synthetic construct
VRSQREQ

SEQ ID NO: 154025 - protein, 7 aa, synthetic construct
VRSRDTP

SEQ ID NO: 154026 - protein, 7 aa, synthetic construct
VRSSILQ

SEQ ID NO: 154027 - protein, 7 aa, synthetic construct
VRSTKEI

SEQ ID NO: 154028 - protein, 7 aa, synthetic construct
VRSVPQN

SEQ ID NO: 154029 - protein, 7 aa, synthetic construct
VRSVSKD

SEQ ID NO: 154030 - protein, 7 aa, synthetic construct
VRTEKFM

SEQ ID NO: 154031 - protein, 7 aa, synthetic construct
VRTEQAK

SEQ ID NO: 154032 - protein, 7 aa, synthetic construct
VRTHQIG

SEQ ID NO: 154033 - protein, 7 aa, synthetic construct
VRTKGDI

SEQ ID NO: 154034 - protein, 7 aa, synthetic construct
VRTKLTD

SEQ ID NO: 154035 - protein, 7 aa, synthetic construct
VRTKNAE

SEQ ID NO: 154036 - protein, 7 aa, synthetic construct
VRTKVAD

SEQ ID NO: 154037 - protein, 7 aa, synthetic construct
VRTKVET

SEQ ID NO: 154038 - protein, 7 aa, synthetic construct
VRTNDNK

SEQ ID NO: 154039 - protein, 7 aa, synthetic construct
VRTNMPH

SEQ ID NO: 154040 - protein, 7 aa, synthetic construct
VRTPTAY

SEQ ID NO: 154041 - protein, 7 aa, synthetic construct
VRTQERN

SEQ ID NO: 154042 - protein, 7 aa, synthetic construct
VRTQETR

SEQ ID NO: 154043 - protein, 7 aa, synthetic construct
VRTQSMM

SEQ ID NO: 154044 - protein, 7 aa, synthetic construct
VRTQTER

SEQ ID NO: 154045 - protein, 7 aa, synthetic construct
VRTRDGV

SEQ ID NO: 154046 - protein, 7 aa, synthetic construct
VRTSQGQ

SEQ ID NO: 154047 - protein, 7 aa, synthetic construct
VRTSVMH

SEQ ID NO: 154048 - protein, 7 aa, synthetic construct
VRTVHNA

SEQ ID NO: 154049 - protein, 7 aa, synthetic construct
VRTVQRD

SEQ ID NO: 154050 - protein, 7 aa, synthetic construct
VRVAADR

SEQ ID NO: 154051 - protein, 7 aa, synthetic construct
VRVDIQK

SEQ ID NO: 154052 - protein, 7 aa, synthetic construct
VRVHTIA

SEQ ID NO: 154053 - protein, 7 aa, synthetic construct
VRVIKGE

SEQ ID NO: 154054 - protein, 7 aa, synthetic construct
VRVKFSE

SEQ ID NO: 154055 - protein, 7 aa, synthetic construct
VRVLAKE

SEQ ID NO: 154056 - protein, 7 aa, synthetic construct
VRVLEGK

SEQ ID NO: 154057 - protein, 7 aa, synthetic construct
VRVLREP

SEQ ID NO: 154058 - protein, 7 aa, synthetic construct
VRVPGSF

SEQ ID NO: 154059 - protein, 7 aa, synthetic construct
VRVQNSQ

SEQ ID NO: 154060 - protein, 7 aa, synthetic construct
VRVSAVT

SEQ ID NO: 154061 - protein, 7 aa, synthetic construct
VRVSHQA

SEQ ID NO: 154062 - protein, 7 aa, synthetic construct
VRVSSIQ

SEQ ID NO: 154063 - protein, 7 aa, synthetic construct
VRVTQGH

SEQ ID NO: 154064 - protein, 7 aa, synthetic construct
VRVVQNS

SEQ ID NO: 154065 - protein, 7 aa, synthetic construct
VRYKEQV

SEQ ID NO: 154066 - protein, 7 aa, synthetic construct
VRYNSQP

SEQ ID NO: 154067 - protein, 7 aa, synthetic construct
VRYQNTT

SEQ ID NO: 154068 - protein, 7 aa, synthetic construct
VSAHMRQ

SEQ ID NO: 154069 - protein, 7 aa, synthetic construct
VSAHSTR

SEQ ID NO: 154070 - protein, 7 aa, synthetic construct
VSAHVAR

SEQ ID NO: 154071 - protein, 7 aa, synthetic construct
VSAKTHF

SEQ ID NO: 154072 - protein, 7 aa, synthetic construct
VSARKIE

SEQ ID NO: 154073 - protein, 7 aa, synthetic construct
VSARNVY

SEQ ID NO: 154074 - protein, 7 aa, synthetic construct
VSAYIKS

SEQ ID NO: 154075 - protein, 7 aa, synthetic construct
VSELRRT

SEQ ID NO: 154076 - protein, 7 aa, synthetic construct
VSERATR

SEQ ID NO: 154077 - protein, 7 aa, synthetic construct
VSFKHSA

SEQ ID NO: 154078 - protein, 7 aa, synthetic construct
VSFQGNK

SEQ ID NO: 154079 - protein, 7 aa, synthetic construct
VSGAKYT

SEQ ID NO: 154080 - protein, 7 aa, synthetic construct
VSGAQGR

SEQ ID NO: 154081 - protein, 7 aa, synthetic construct
VSGGYKM

SEQ ID NO: 154082 - protein, 7 aa, synthetic construct
VSGKDRH

SEQ ID NO: 154083 - protein, 7 aa, synthetic construct
VSGKTNW

SEQ ID NO: 154084 - protein, 7 aa, synthetic construct
VSGMIRG

SEQ ID NO: 154085 - protein, 7 aa, synthetic construct
VSGNSHK

SEQ ID NO: 154086 - protein, 7 aa, synthetic construct
VSGNYRV

SEQ ID NO: 154087 - protein, 7 aa, synthetic construct
VSGQKYQ

SEQ ID NO: 154088 - protein, 7 aa, synthetic construct
VSGRMLQ

SEQ ID NO: 154089 - protein, 7 aa, synthetic construct
VSGRPIH

SEQ ID NO: 154090 - protein, 7 aa, synthetic construct
VSGSARG

SEQ ID NO: 154091 - protein, 7 aa, synthetic construct
VSGSKYV

SEQ ID NO: 154092 - protein, 7 aa, synthetic construct
VSGTNPR

SEQ ID NO: 154093 - protein, 7 aa, synthetic construct
VSGVHRG

SEQ ID NO: 154094 - protein, 7 aa, synthetic construct
VSGYNKP

SEQ ID NO: 154095 - protein, 7 aa, synthetic construct
VSHAAPR

SEQ ID NO: 154096 - protein, 7 aa, synthetic construct
VSHAGSR

SEQ ID NO: 154097 - protein, 7 aa, synthetic construct
VSHAPTR

SEQ ID NO: 154098 - protein, 7 aa, synthetic construct
VSHGPAK

SEQ ID NO: 154099 - protein, 7 aa, synthetic construct
VSHKAFA

SEQ ID NO: 154100 - protein, 7 aa, synthetic construct
VSHNFQK

SEQ ID NO: 154101 - protein, 7 aa, synthetic construct
VSHQKQT

SEQ ID NO: 154102 - protein, 7 aa, synthetic construct
VSHRPQI

SEQ ID NO: 154103 - protein, 7 aa, synthetic construct
VSHTIRS

SEQ ID NO: 154104 - protein, 7 aa, synthetic construct
VSHTPAK

SEQ ID NO: 154105 - protein, 7 aa, synthetic construct
VSHTYSK

SEQ ID NO: 154106 - protein, 7 aa, synthetic construct
VSIRSHA

SEQ ID NO: 154107 - protein, 7 aa, synthetic construct
VSKARMD

SEQ ID NO: 154108 - protein, 7 aa, synthetic construct
VSKDHYK

SEQ ID NO: 154109 - protein, 7 aa, synthetic construct
VSKDQWK

SEQ ID NO: 154110 - protein, 7 aa, synthetic construct
VSKEQWK

SEQ ID NO: 154111 - protein, 7 aa, synthetic construct
VSKFANV

SEQ ID NO: 154112 - protein, 7 aa, synthetic construct
VSKFMAS

SEQ ID NO: 154113 - protein, 7 aa, synthetic construct
VSKFNLA

SEQ ID NO: 154114 - protein, 7 aa, synthetic construct
VSKFVQN

SEQ ID NO: 154115 - protein, 7 aa, synthetic construct
VSKGPYV

SEQ ID NO: 154116 - protein, 7 aa, synthetic construct
VSKGTYS

SEQ ID NO: 154117 - protein, 7 aa, synthetic construct
VSKHMDR

SEQ ID NO: 154118 - protein, 7 aa, synthetic construct
VSKKSDM

SEQ ID NO: 154119 - protein, 7 aa, synthetic construct
VSKLGYQ

SEQ ID NO: 154120 - protein, 7 aa, synthetic construct
VSKMMNI

SEQ ID NO: 154121 - protein, 7 aa, synthetic construct
VSKMMPH

SEQ ID NO: 154122 - protein, 7 aa, synthetic construct
VSKMNSF

SEQ ID NO: 154123 - protein, 7 aa, synthetic construct
VSKNLEK

SEQ ID NO: 154124 - protein, 7 aa, synthetic construct
VSKPAWN

SEQ ID NO: 154125 - protein, 7 aa, synthetic construct
VSKPAWS

SEQ ID NO: 154126 - protein, 7 aa, synthetic construct
VSKPMLT

SEQ ID NO: 154127 - protein, 7 aa, synthetic construct
VSKSTGW

SEQ ID NO: 154128 - protein, 7 aa, synthetic construct
VSKTGTW

SEQ ID NO: 154129 - protein, 7 aa, synthetic construct
VSLQGHR

SEQ ID NO: 154130 - protein, 7 aa, synthetic construct
VSMGQSR

SEQ ID NO: 154131 - protein, 7 aa, synthetic construct
VSMNRGY

SEQ ID NO: 154132 - protein, 7 aa, synthetic construct
VSMREIK

SEQ ID NO: 154133 - protein, 7 aa, synthetic construct
VSMRGVV

SEQ ID NO: 154134 - protein, 7 aa, synthetic construct
VSMRPAP

SEQ ID NO: 154135 - protein, 7 aa, synthetic construct
VSNHIVR

SEQ ID NO: 154136 - protein, 7 aa, synthetic construct
VSNHRGG

SEQ ID NO: 154137 - protein, 7 aa, synthetic construct
VSNIHQR

SEQ ID NO: 154138 - protein, 7 aa, synthetic construct
VSNKYQM

SEQ ID NO: 154139 - protein, 7 aa, synthetic construct
VSNLKYS

SEQ ID NO: 154140 - protein, 7 aa, synthetic construct
VSNPRQY

SEQ ID NO: 154141 - protein, 7 aa, synthetic construct
VSNRIDR

SEQ ID NO: 154142 - protein, 7 aa, synthetic construct
VSPAKIY

SEQ ID NO: 154143 - protein, 7 aa, synthetic construct
VSPEWVK

SEQ ID NO: 154144 - protein, 7 aa, synthetic construct
VSPGIFK

SEQ ID NO: 154145 - protein, 7 aa, synthetic construct
VSPGRGY

SEQ ID NO: 154146 - protein, 7 aa, synthetic construct
VSPQYTR

SEQ ID NO: 154147 - protein, 7 aa, synthetic construct
VSPYGKA

SEQ ID NO: 154148 - protein, 7 aa, synthetic construct
VSQGMQR

SEQ ID NO: 154149 - protein, 7 aa, synthetic construct
VSQHQAK

SEQ ID NO: 154150 - protein, 7 aa, synthetic construct
VSQHVRI

SEQ ID NO: 154151 - protein, 7 aa, synthetic construct
VSQKPYS

SEQ ID NO: 154152 - protein, 7 aa, synthetic construct
VSQPRAM

SEQ ID NO: 154153 - protein, 7 aa, synthetic construct
VSQQNMR

SEQ ID NO: 154154 - protein, 7 aa, synthetic construct
VSQREKQ

SEQ ID NO: 154155 - protein, 7 aa, synthetic construct
VSQRETK

SEQ ID NO: 154156 - protein, 7 aa, synthetic construct
VSQRPMV

SEQ ID NO: 154157 - protein, 7 aa, synthetic construct
VSQRTVF

SEQ ID NO: 154158 - protein, 7 aa, synthetic construct
VSRAGHM

SEQ ID NO: 154159 - protein, 7 aa, synthetic construct
VSRAQTN

SEQ ID NO: 154160 - protein, 7 aa, synthetic construct
VSRDGNK

SEQ ID NO: 154161 - protein, 7 aa, synthetic construct
VSRDILR

SEQ ID NO: 154162 - protein, 7 aa, synthetic construct
VSRDMMK

SEQ ID NO: 154163 - protein, 7 aa, synthetic construct
VSRDSGR

SEQ ID NO: 154164 - protein, 7 aa, synthetic construct
VSRERTG

SEQ ID NO: 154165 - protein, 7 aa, synthetic construct
VSRGAAL

SEQ ID NO: 154166 - protein, 7 aa, synthetic construct
VSRGATL

SEQ ID NO: 154167 - protein, 7 aa, synthetic construct
VSRGEVK

SEQ ID NO: 154168 - protein, 7 aa, synthetic construct
VSRGIPA

SEQ ID NO: 154169 - protein, 7 aa, synthetic construct
VSRGISM

SEQ ID NO: 154170 - protein, 7 aa, synthetic construct
VSRGTQA

SEQ ID NO: 154171 - protein, 7 aa, synthetic construct
VSRHPPA

SEQ ID NO: 154172 - protein, 7 aa, synthetic construct
VSRHTHL

SEQ ID NO: 154173 - protein, 7 aa, synthetic construct
VSRIKDT

SEQ ID NO: 154174 - protein, 7 aa, synthetic construct
VSRISPQ

SEQ ID NO: 154175 - protein, 7 aa, synthetic construct
VSRITAS

SEQ ID NO: 154176 - protein, 7 aa, synthetic construct
VSRITGH

SEQ ID NO: 154177 - protein, 7 aa, synthetic construct
VSRLGSG

SEQ ID NO: 154178 - protein, 7 aa, synthetic construct
VSRLHSS

SEQ ID NO: 154179 - protein, 7 aa, synthetic construct
VSRLVPN

SEQ ID NO: 154180 - protein, 7 aa, synthetic construct
VSRMADK

SEQ ID NO: 154181 - protein, 7 aa, synthetic construct
VSRMLPN

SEQ ID NO: 154182 - protein, 7 aa, synthetic construct
VSRMQHP

SEQ ID NO: 154183 - protein, 7 aa, synthetic construct
VSRMVRE

SEQ ID NO: 154184 - protein, 7 aa, synthetic construct
VSRNPMQ

SEQ ID NO: 154185 - protein, 7 aa, synthetic construct
VSRQGPI

SEQ ID NO: 154186 - protein, 7 aa, synthetic construct
VSRQIAL

SEQ ID NO: 154187 - protein, 7 aa, synthetic construct
VSRQPEK

SEQ ID NO: 154188 - protein, 7 aa, synthetic construct
VSRQPLQ

SEQ ID NO: 154189 - protein, 7 aa, synthetic construct
VSRQQTN

SEQ ID NO: 154190 - protein, 7 aa, synthetic construct
VSRSFSG

SEQ ID NO: 154191 - protein, 7 aa, synthetic construct
VSRSISN

SEQ ID NO: 154192 - protein, 7 aa, synthetic construct
VSRSPDK

SEQ ID NO: 154193 - protein, 7 aa, synthetic construct
VSRSTDK

SEQ ID NO: 154194 - protein, 7 aa, synthetic construct
VSRSTSI

SEQ ID NO: 154195 - protein, 7 aa, synthetic construct
VSRTAIN

SEQ ID NO: 154196 - protein, 7 aa, synthetic construct
VSRTVNA

SEQ ID NO: 154197 - protein, 7 aa, synthetic construct
VSRVGRD

SEQ ID NO: 154198 - protein, 7 aa, synthetic construct
VSRVQVN

SEQ ID NO: 154199 - protein, 7 aa, synthetic construct
VSSGAFR

SEQ ID NO: 154200 - protein, 7 aa, synthetic construct
VSSIQIK

SEQ ID NO: 154201 - protein, 7 aa, synthetic construct
VSSIYKA

SEQ ID NO: 154202 - protein, 7 aa, synthetic construct
VSSKGNW

SEQ ID NO: 154203 - protein, 7 aa, synthetic construct
VSSKHFG

SEQ ID NO: 154204 - protein, 7 aa, synthetic construct
VSSKHGY

SEQ ID NO: 154205 - protein, 7 aa, synthetic construct
VSSKYNS

SEQ ID NO: 154206 - protein, 7 aa, synthetic construct
VSSMPRS

SEQ ID NO: 154207 - protein, 7 aa, synthetic construct
VSSQHNR

SEQ ID NO: 154208 - protein, 7 aa, synthetic construct
VSSRPQI

SEQ ID NO: 154209 - protein, 7 aa, synthetic construct
VSSTGHR

SEQ ID NO: 154210 - protein, 7 aa, synthetic construct
VSTGKYM

SEQ ID NO: 154211 - protein, 7 aa, synthetic construct
VSTKPMF

SEQ ID NO: 154212 - protein, 7 aa, synthetic construct
VSTPRHI

SEQ ID NO: 154213 - protein, 7 aa, synthetic construct
VSTRHAA

SEQ ID NO: 154214 - protein, 7 aa, synthetic construct
VSTSRAW

SEQ ID NO: 154215 - protein, 7 aa, synthetic construct
VSVHRSI

SEQ ID NO: 154216 - protein, 7 aa, synthetic construct
VSVKPYQ

SEQ ID NO: 154217 - protein, 7 aa, synthetic construct
VSVRAVI

SEQ ID NO: 154218 - protein, 7 aa, synthetic construct
VSWKGND

SEQ ID NO: 154219 - protein, 7 aa, synthetic construct
VSYAGSM

SEQ ID NO: 154220 - protein, 7 aa, synthetic construct
VSYAMSS

SEQ ID NO: 154221 - protein, 7 aa, synthetic construct
VSYKASA

SEQ ID NO: 154222 - protein, 7 aa, synthetic construct
VSYKNDK

SEQ ID NO: 154223 - protein, 7 aa, synthetic construct
VSYKPQI

SEQ ID NO: 154224 - protein, 7 aa, synthetic construct
VSYPASK

SEQ ID NO: 154225 - protein, 7 aa, synthetic construct
VTAHSKM

SEQ ID NO: 154226 - protein, 7 aa, synthetic construct
VTAKPYN

SEQ ID NO: 154227 - protein, 7 aa, synthetic construct
VTARDTR

SEQ ID NO: 154228 - protein, 7 aa, synthetic construct
VTARHVN

SEQ ID NO: 154229 - protein, 7 aa, synthetic construct
VTARPVM

SEQ ID NO: 154230 - protein, 7 aa, synthetic construct
VTARTSH

SEQ ID NO: 154231 - protein, 7 aa, synthetic construct
VTASNHR

SEQ ID NO: 154232 - protein, 7 aa, synthetic construct
VTATERR

SEQ ID NO: 154233 - protein, 7 aa, synthetic construct
VTDRPNR

SEQ ID NO: 154234 - protein, 7 aa, synthetic construct
VTEAMRR

SEQ ID NO: 154235 - protein, 7 aa, synthetic construct
VTFGQQK

SEQ ID NO: 154236 - protein, 7 aa, synthetic construct
VTGASSR

SEQ ID NO: 154237 - protein, 7 aa, synthetic construct
VTGMFKA

SEQ ID NO: 154238 - protein, 7 aa, synthetic construct
VTGNHRL

SEQ ID NO: 154239 - protein, 7 aa, synthetic construct
VTGPMRV

SEQ ID NO: 154240 - protein, 7 aa, synthetic construct
VTGQKYH

SEQ ID NO: 154241 - protein, 7 aa, synthetic construct
VTGQYIR

SEQ ID NO: 154242 - protein, 7 aa, synthetic construct
VTGRHSA

SEQ ID NO: 154243 - protein, 7 aa, synthetic construct
VTGRNEK

SEQ ID NO: 154244 - protein, 7 aa, synthetic construct
VTGRSKE

SEQ ID NO: 154245 - protein, 7 aa, synthetic construct
VTGRTDR

SEQ ID NO: 154246 - protein, 7 aa, synthetic construct
VTGSEKR

SEQ ID NO: 154247 - protein, 7 aa, synthetic construct
VTGSHTR

SEQ ID NO: 154248 - protein, 7 aa, synthetic construct
VTGTHLR

SEQ ID NO: 154249 - protein, 7 aa, synthetic construct
VTGYTKP

SEQ ID NO: 154250 - protein, 7 aa, synthetic construct
VTHANKQ

SEQ ID NO: 154251 - protein, 7 aa, synthetic construct
VTHGSKQ

SEQ ID NO: 154252 - protein, 7 aa, synthetic construct
VTHIKPT

SEQ ID NO: 154253 - protein, 7 aa, synthetic construct
VTHIQQR

SEQ ID NO: 154254 - protein, 7 aa, synthetic construct
VTHKFQG

SEQ ID NO: 154255 - protein, 7 aa, synthetic construct
VTHKPAH

SEQ ID NO: 154256 - protein, 7 aa, synthetic construct
VTHKPFA

SEQ ID NO: 154257 - protein, 7 aa, synthetic construct
VTHKVSM

SEQ ID NO: 154258 - protein, 7 aa, synthetic construct
VTHLARG

SEQ ID NO: 154259 - protein, 7 aa, synthetic construct
VTHMKNL

SEQ ID NO: 154260 - protein, 7 aa, synthetic construct
VTHNGMR

SEQ ID NO: 154261 - protein, 7 aa, synthetic construct
VTHNKYG

SEQ ID NO: 154262 - protein, 7 aa, synthetic construct
VTHNPKI

SEQ ID NO: 154263 - protein, 7 aa, synthetic construct
VTHQPAR

SEQ ID NO: 154264 - protein, 7 aa, synthetic construct
VTHQTRT

SEQ ID NO: 154265 - protein, 7 aa, synthetic construct
VTHRPQM

SEQ ID NO: 154266 - protein, 7 aa, synthetic construct
VTHRSMG

SEQ ID NO: 154267 - protein, 7 aa, synthetic construct
VTHSRGG

SEQ ID NO: 154268 - protein, 7 aa, synthetic construct
VTHTNRN

SEQ ID NO: 154269 - protein, 7 aa, synthetic construct
VTKAYGG

SEQ ID NO: 154270 - protein, 7 aa, synthetic construct
VTKFHAP

SEQ ID NO: 154271 - protein, 7 aa, synthetic construct
VTKFSDR

SEQ ID NO: 154272 - protein, 7 aa, synthetic construct
VTKGYQN

SEQ ID NO: 154273 - protein, 7 aa, synthetic construct
VTKHFTA

SEQ ID NO: 154274 - protein, 7 aa, synthetic construct
VTKHHLS

SEQ ID NO: 154275 - protein, 7 aa, synthetic construct
VTKHLRD

SEQ ID NO: 154276 - protein, 7 aa, synthetic construct
VTKIAYP

SEQ ID NO: 154277 - protein, 7 aa, synthetic construct
VTKIYQS

SEQ ID NO: 154278 - protein, 7 aa, synthetic construct
VTKMYKD

SEQ ID NO: 154279 - protein, 7 aa, synthetic construct
VTKNEFR

SEQ ID NO: 154280 - protein, 7 aa, synthetic construct
VTKNYNI

SEQ ID NO: 154281 - protein, 7 aa, synthetic construct
VTKPLSF

SEQ ID NO: 154282 - protein, 7 aa, synthetic construct
VTKPSPF

SEQ ID NO: 154283 - protein, 7 aa, synthetic construct
VTKQSYG

SEQ ID NO: 154284 - protein, 7 aa, synthetic construct
VTKYTGA

SEQ ID NO: 154285 - protein, 7 aa, synthetic construct
VTKYTPT

SEQ ID NO: 154286 - protein, 7 aa, synthetic construct
VTMGRLP

SEQ ID NO: 154287 - protein, 7 aa, synthetic construct
VTMNSNR

SEQ ID NO: 154288 - protein, 7 aa, synthetic construct
VTNAARN

SEQ ID NO: 154289 - protein, 7 aa, synthetic construct
VTNHGRL

SEQ ID NO: 154290 - protein, 7 aa, synthetic construct
VTNHPPK

SEQ ID NO: 154291 - protein, 7 aa, synthetic construct
VTNHQTR

SEQ ID NO: 154292 - protein, 7 aa, synthetic construct
VTNIYRA

SEQ ID NO: 154293 - protein, 7 aa, synthetic construct
VTNKYHG

SEQ ID NO: 154294 - protein, 7 aa, synthetic construct
VTNNHGR

SEQ ID NO: 154295 - protein, 7 aa, synthetic construct
VTNNVRA

SEQ ID NO: 154296 - protein, 7 aa, synthetic construct
VTNQHRN

SEQ ID NO: 154297 - protein, 7 aa, synthetic construct
VTNYIQK

SEQ ID NO: 154298 - protein, 7 aa, synthetic construct
VTPGKYM

SEQ ID NO: 154299 - protein, 7 aa, synthetic construct
VTPGQRQ

SEQ ID NO: 154300 - protein, 7 aa, synthetic construct
VTPHQRA

SEQ ID NO: 154301 - protein, 7 aa, synthetic construct
VTPHRST

SEQ ID NO: 154302 - protein, 7 aa, synthetic construct
VTPHSKY

SEQ ID NO: 154303 - protein, 7 aa, synthetic construct
VTPNIRG

SEQ ID NO: 154304 - protein, 7 aa, synthetic construct
VTPRGNM

SEQ ID NO: 154305 - protein, 7 aa, synthetic construct
VTPRHAV

SEQ ID NO: 154306 - protein, 7 aa, synthetic construct
VTPRREQ

SEQ ID NO: 154307 - protein, 7 aa, synthetic construct
VTQDRTR

SEQ ID NO: 154308 - protein, 7 aa, synthetic construct
VTQEPRR

SEQ ID NO: 154309 - protein, 7 aa, synthetic construct
VTQHREK

SEQ ID NO: 154310 - protein, 7 aa, synthetic construct
VTQPAKW

SEQ ID NO: 154311 - protein, 7 aa, synthetic construct
VTQQARM

SEQ ID NO: 154312 - protein, 7 aa, synthetic construct
VTQRKFE

SEQ ID NO: 154313 - protein, 7 aa, synthetic construct
VTQYAGK

SEQ ID NO: 154314 - protein, 7 aa, synthetic construct
VTRAKES

SEQ ID NO: 154315 - protein, 7 aa, synthetic construct
VTRAKET

SEQ ID NO: 154316 - protein, 7 aa, synthetic construct
VTRASFG

SEQ ID NO: 154317 - protein, 7 aa, synthetic construct
VTRAVVQ

SEQ ID NO: 154318 - protein, 7 aa, synthetic construct
VTRDSFK

SEQ ID NO: 154319 - protein, 7 aa, synthetic construct
VTREGRG

SEQ ID NO: 154320 - protein, 7 aa, synthetic construct
VTREVTK

SEQ ID NO: 154321 - protein, 7 aa, synthetic construct
VTRGANS

SEQ ID NO: 154322 - protein, 7 aa, synthetic construct
VTRGERI

SEQ ID NO: 154323 - protein, 7 aa, synthetic construct
VTRGIAL

SEQ ID NO: 154324 - protein, 7 aa, synthetic construct
VTRGLTA

SEQ ID NO: 154325 - protein, 7 aa, synthetic construct
VTRGNIM

SEQ ID NO: 154326 - protein, 7 aa, synthetic construct
VTRGPQH

SEQ ID NO: 154327 - protein, 7 aa, synthetic construct
VTRGQQQ

SEQ ID NO: 154328 - protein, 7 aa, synthetic construct
VTRGTHG

SEQ ID NO: 154329 - protein, 7 aa, synthetic construct
VTRGVQG

SEQ ID NO: 154330 - protein, 7 aa, synthetic construct
VTRITHA

SEQ ID NO: 154331 - protein, 7 aa, synthetic construct
VTRMKDG

SEQ ID NO: 154332 - protein, 7 aa, synthetic construct
VTRMSPV

SEQ ID NO: 154333 - protein, 7 aa, synthetic construct
VTRMTVA

SEQ ID NO: 154334 - protein, 7 aa, synthetic construct
VTRNEKM

SEQ ID NO: 154335 - protein, 7 aa, synthetic construct
VTRNIIG

SEQ ID NO: 154336 - protein, 7 aa, synthetic construct
VTRNNLL

SEQ ID NO: 154337 - protein, 7 aa, synthetic construct
VTRNPIL

SEQ ID NO: 154338 - protein, 7 aa, synthetic construct
VTRNPLQ

SEQ ID NO: 154339 - protein, 7 aa, synthetic construct
VTRNQPM

SEQ ID NO: 154340 - protein, 7 aa, synthetic construct
VTRQTAG

SEQ ID NO: 154341 - protein, 7 aa, synthetic construct
VTRQWQA

SEQ ID NO: 154342 - protein, 7 aa, synthetic construct
VTRSIAA

SEQ ID NO: 154343 - protein, 7 aa, synthetic construct
VTRSSGG

SEQ ID NO: 154344 - protein, 7 aa, synthetic construct
VTRTSTA

SEQ ID NO: 154345 - protein, 7 aa, synthetic construct
VTRTSTG

SEQ ID NO: 154346 - protein, 7 aa, synthetic construct
VTRTTLS

SEQ ID NO: 154347 - protein, 7 aa, synthetic construct
VTRVAHS

SEQ ID NO: 154348 - protein, 7 aa, synthetic construct
VTRVHVS

SEQ ID NO: 154349 - protein, 7 aa, synthetic construct
VTRVITH

SEQ ID NO: 154350 - protein, 7 aa, synthetic construct
VTRVLPA

SEQ ID NO: 154351 - protein, 7 aa, synthetic construct
VTRVSTG

SEQ ID NO: 154352 - protein, 7 aa, synthetic construct
VTSASRQ

SEQ ID NO: 154353 - protein, 7 aa, synthetic construct
VTSHSQK

SEQ ID NO: 154354 - protein, 7 aa, synthetic construct
VTSHYAK

SEQ ID NO: 154355 - protein, 7 aa, synthetic construct
VTSKIYG

SEQ ID NO: 154356 - protein, 7 aa, synthetic construct
VTSRAEK

SEQ ID NO: 154357 - protein, 7 aa, synthetic construct
VTSRPAM

SEQ ID NO: 154358 - protein, 7 aa, synthetic construct
VTSRVHA

SEQ ID NO: 154359 - protein, 7 aa, synthetic construct
VTSTARG

SEQ ID NO: 154360 - protein, 7 aa, synthetic construct
VTSYQKP

SEQ ID NO: 154361 - protein, 7 aa, synthetic construct
VTSYTKN

SEQ ID NO: 154362 - protein, 7 aa, synthetic construct
VTTGQRH

SEQ ID NO: 154363 - protein, 7 aa, synthetic construct
VTTHNSR

SEQ ID NO: 154364 - protein, 7 aa, synthetic construct
VTTMHRP

SEQ ID NO: 154365 - protein, 7 aa, synthetic construct
VTTRLSG

SEQ ID NO: 154366 - protein, 7 aa, synthetic construct
VTTSKHY

SEQ ID NO: 154367 - protein, 7 aa, synthetic construct
VTVAHHM

SEQ ID NO: 154368 - protein, 7 aa, synthetic construct
VTVASHR

SEQ ID NO: 154369 - protein, 7 aa, synthetic construct
VTVHAQK

SEQ ID NO: 154370 - protein, 7 aa, synthetic construct
VTVKRLD

SEQ ID NO: 154371 - protein, 7 aa, synthetic construct
VTVRSHG

SEQ ID NO: 154372 - protein, 7 aa, synthetic construct
VTYELGK

SEQ ID NO: 154373 - protein, 7 aa, synthetic construct
VTYTTSS

SEQ ID NO: 154374 - protein, 7 aa, synthetic construct
VVAHRTN

SEQ ID NO: 154375 - protein, 7 aa, synthetic construct
VVAKYER

SEQ ID NO: 154376 - protein, 7 aa, synthetic construct
VVANTRY

SEQ ID NO: 154377 - protein, 7 aa, synthetic construct
VVAVSHK

SEQ ID NO: 154378 - protein, 7 aa, synthetic construct
VVDKWNK

SEQ ID NO: 154379 - protein, 7 aa, synthetic construct
VVDQRRT

SEQ ID NO: 154380 - protein, 7 aa, synthetic construct
VVDQRWK

SEQ ID NO: 154381 - protein, 7 aa, synthetic construct
VVDRMRN

SEQ ID NO: 154382 - protein, 7 aa, synthetic construct
VVDRSGK

SEQ ID NO: 154383 - protein, 7 aa, synthetic construct
VVDVKGR

SEQ ID NO: 154384 - protein, 7 aa, synthetic construct
VVERNFK

SEQ ID NO: 154385 - protein, 7 aa, synthetic construct
VVGERRV

SEQ ID NO: 154386 - protein, 7 aa, synthetic construct
VVGKAYS

SEQ ID NO: 154387 - protein, 7 aa, synthetic construct
VVGPRQV

SEQ ID NO: 154388 - protein, 7 aa, synthetic construct
VVGRTSF

SEQ ID NO: 154389 - protein, 7 aa, synthetic construct
VVGTHMR

SEQ ID NO: 154390 - protein, 7 aa, synthetic construct
VVGTNWS

SEQ ID NO: 154391 - protein, 7 aa, synthetic construct
VVGVSHK

SEQ ID NO: 154392 - protein, 7 aa, synthetic construct
VVHASQK

SEQ ID NO: 154393 - protein, 7 aa, synthetic construct
VVHGATR

SEQ ID NO: 154394 - protein, 7 aa, synthetic construct
VVHGRAN

SEQ ID NO: 154395 - protein, 7 aa, synthetic construct
VVHGSRG

SEQ ID NO: 154396 - protein, 7 aa, synthetic construct
VVHMAGK

SEQ ID NO: 154397 - protein, 7 aa, synthetic construct
VVHNIKA

SEQ ID NO: 154398 - protein, 7 aa, synthetic construct
VVHQMNK

SEQ ID NO: 154399 - protein, 7 aa, synthetic construct
VVHRVNG

SEQ ID NO: 154400 - protein, 7 aa, synthetic construct
VVHSANR

SEQ ID NO: 154401 - protein, 7 aa, synthetic construct
VVHSVPR

SEQ ID NO: 154402 - protein, 7 aa, synthetic construct
VVHTSQK

SEQ ID NO: 154403 - protein, 7 aa, synthetic construct
VVKFRSE

SEQ ID NO: 154404 - protein, 7 aa, synthetic construct
VVKHVNQ

SEQ ID NO: 154405 - protein, 7 aa, synthetic construct
VVKPMHN

SEQ ID NO: 154406 - protein, 7 aa, synthetic construct
VVKRDTT

SEQ ID NO: 154407 - protein, 7 aa, synthetic construct
VVKRESN

SEQ ID NO: 154408 - protein, 7 aa, synthetic construct
VVKYPEK

SEQ ID NO: 154409 - protein, 7 aa, synthetic construct
VVNRERT

SEQ ID NO: 154410 - protein, 7 aa, synthetic construct
VVNTHRA

SEQ ID NO: 154411 - protein, 7 aa, synthetic construct
VVPEGRR

SEQ ID NO: 154412 - protein, 7 aa, synthetic construct
VVPERRN

SEQ ID NO: 154413 - protein, 7 aa, synthetic construct
VVPKAYH

SEQ ID NO: 154414 - protein, 7 aa, synthetic construct
VVPRGYN

SEQ ID NO: 154415 - protein, 7 aa, synthetic construct
VVPRMVP

SEQ ID NO: 154416 - protein, 7 aa, synthetic construct
VVPRNRE

SEQ ID NO: 154417 - protein, 7 aa, synthetic construct
VVPSARQ

SEQ ID NO: 154418 - protein, 7 aa, synthetic construct
VVPVQRH

SEQ ID NO: 154419 - protein, 7 aa, synthetic construct
VVQGTHR

SEQ ID NO: 154420 - protein, 7 aa, synthetic construct
VVQTSRG

SEQ ID NO: 154421 - protein, 7 aa, synthetic construct
VVRAIGN

SEQ ID NO: 154422 - protein, 7 aa, synthetic construct
VVRASQG

SEQ ID NO: 154423 - protein, 7 aa, synthetic construct
VVRDQQR

SEQ ID NO: 154424 - protein, 7 aa, synthetic construct
VVRDRVL

SEQ ID NO: 154425 - protein, 7 aa, synthetic construct
VVREVRG

SEQ ID NO: 154426 - protein, 7 aa, synthetic construct
VVRGAQF

SEQ ID NO: 154427 - protein, 7 aa, synthetic construct
VVRGGGF

SEQ ID NO: 154428 - protein, 7 aa, synthetic construct
VVRGHKE

SEQ ID NO: 154429 - protein, 7 aa, synthetic construct
VVRGLAN

SEQ ID NO: 154430 - protein, 7 aa, synthetic construct
VVRGVDK

SEQ ID NO: 154431 - protein, 7 aa, synthetic construct
VVRIAQP

SEQ ID NO: 154432 - protein, 7 aa, synthetic construct
VVRIKNE

SEQ ID NO: 154433 - protein, 7 aa, synthetic construct
VVRKAME

SEQ ID NO: 154434 - protein, 7 aa, synthetic construct
VVRKEII

SEQ ID NO: 154435 - protein, 7 aa, synthetic construct
VVRKIEG

SEQ ID NO: 154436 - protein, 7 aa, synthetic construct
VVRKVSE

SEQ ID NO: 154437 - protein, 7 aa, synthetic construct
VVRNAPN

SEQ ID NO: 154438 - protein, 7 aa, synthetic construct
VVRPPMN

SEQ ID NO: 154439 - protein, 7 aa, synthetic construct
VVRPSHV

SEQ ID NO: 154440 - protein, 7 aa, synthetic construct
VVRPTHQ

SEQ ID NO: 154441 - protein, 7 aa, synthetic construct
VVRQMPP

SEQ ID NO: 154442 - protein, 7 aa, synthetic construct
VVRQNNA

SEQ ID NO: 154443 - protein, 7 aa, synthetic construct
VVRQVQA

SEQ ID NO: 154444 - protein, 7 aa, synthetic construct
VVRSGPA

SEQ ID NO: 154445 - protein, 7 aa, synthetic construct
VVRSQKE

SEQ ID NO: 154446 - protein, 7 aa, synthetic construct
VVRSSPV

SEQ ID NO: 154447 - protein, 7 aa, synthetic construct
VVRVQSS

SEQ ID NO: 154448 - protein, 7 aa, synthetic construct
VVRVVDK

SEQ ID NO: 154449 - protein, 7 aa, synthetic construct
VVSRDRG

SEQ ID NO: 154450 - protein, 7 aa, synthetic construct
VVSRNSA

SEQ ID NO: 154451 - protein, 7 aa, synthetic construct
VVSRQSS

SEQ ID NO: 154452 - protein, 7 aa, synthetic construct
VVSSRDR

SEQ ID NO: 154453 - protein, 7 aa, synthetic construct
VVTHGRG

SEQ ID NO: 154454 - protein, 7 aa, synthetic construct
VVTNKYG

SEQ ID NO: 154455 - protein, 7 aa, synthetic construct
VVVRSQG

SEQ ID NO: 154456 - protein, 7 aa, synthetic construct
VVYGAKA

SEQ ID NO: 154457 - protein, 7 aa, synthetic construct
VVYGMKA

SEQ ID NO: 154458 - protein, 7 aa, synthetic construct
VVYGNTH

SEQ ID NO: 154459 - protein, 7 aa, synthetic construct
VVYGSSH

SEQ ID NO: 154460 - protein, 7 aa, synthetic construct
VVYSNKQ

SEQ ID NO: 154461 - protein, 7 aa, synthetic construct
VVYTTKA

SEQ ID NO: 154462 - protein, 7 aa, synthetic construct
VWDHMEF

SEQ ID NO: 154463 - protein, 7 aa, synthetic construct
VWKQIKE

SEQ ID NO: 154464 - protein, 7 aa, synthetic construct
VWKTERT

SEQ ID NO: 154465 - protein, 7 aa, synthetic construct
VWQKSSN

SEQ ID NO: 154466 - protein, 7 aa, synthetic construct
VYAHAKP

SEQ ID NO: 154467 - protein, 7 aa, synthetic construct
VYAKMRD

SEQ ID NO: 154468 - protein, 7 aa, synthetic construct
VYAKPTH

SEQ ID NO: 154469 - protein, 7 aa, synthetic construct
VYAKSRE

SEQ ID NO: 154470 - protein, 7 aa, synthetic construct
VYANEKK

SEQ ID NO: 154471 - protein, 7 aa, synthetic construct
VYASGSR

SEQ ID NO: 154472 - protein, 7 aa, synthetic construct
VYASSSK

SEQ ID NO: 154473 - protein, 7 aa, synthetic construct
VYGHKGG

SEQ ID NO: 154474 - protein, 7 aa, synthetic construct
VYGKSRE

SEQ ID NO: 154475 - protein, 7 aa, synthetic construct
VYGKTHQ

SEQ ID NO: 154476 - protein, 7 aa, synthetic construct
VYGMAKQ

SEQ ID NO: 154477 - protein, 7 aa, synthetic construct
VYGNNKL

SEQ ID NO: 154478 - protein, 7 aa, synthetic construct
VYGNTKQ

SEQ ID NO: 154479 - protein, 7 aa, synthetic construct
VYGNTPR

SEQ ID NO: 154480 - protein, 7 aa, synthetic construct
VYGSSKM

SEQ ID NO: 154481 - protein, 7 aa, synthetic construct
VYGTPKM

SEQ ID NO: 154482 - protein, 7 aa, synthetic construct
VYGTTKN

SEQ ID NO: 154483 - protein, 7 aa, synthetic construct
VYHHGGP

SEQ ID NO: 154484 - protein, 7 aa, synthetic construct
VYHSRTA

SEQ ID NO: 154485 - protein, 7 aa, synthetic construct
VYKADRA

SEQ ID NO: 154486 - protein, 7 aa, synthetic construct
VYKDNKY

SEQ ID NO: 154487 - protein, 7 aa, synthetic construct
VYKEARM

SEQ ID NO: 154488 - protein, 7 aa, synthetic construct
VYKEREK

SEQ ID NO: 154489 - protein, 7 aa, synthetic construct
VYKERTG

SEQ ID NO: 154490 - protein, 7 aa, synthetic construct
VYKGGVG

SEQ ID NO: 154491 - protein, 7 aa, synthetic construct
VYKGMIP

SEQ ID NO: 154492 - protein, 7 aa, synthetic construct
VYKGQGG

SEQ ID NO: 154493 - protein, 7 aa, synthetic construct
VYKGQNS

SEQ ID NO: 154494 - protein, 7 aa, synthetic construct
VYKGRTE

SEQ ID NO: 154495 - protein, 7 aa, synthetic construct
VYKGSHM

SEQ ID NO: 154496 - protein, 7 aa, synthetic construct
VYKGSTQ

SEQ ID NO: 154497 - protein, 7 aa, synthetic construct
VYKGVAH

SEQ ID NO: 154498 - protein, 7 aa, synthetic construct
VYKKADL

SEQ ID NO: 154499 - protein, 7 aa, synthetic construct
VYKKVES

SEQ ID NO: 154500 - protein, 7 aa, synthetic construct
VYKMSIA

SEQ ID NO: 154501 - protein, 7 aa, synthetic construct
VYKMVKD

SEQ ID NO: 154502 - protein, 7 aa, synthetic construct
VYKPGPQ

SEQ ID NO: 154503 - protein, 7 aa, synthetic construct
VYKPRVE

SEQ ID NO: 154504 - protein, 7 aa, synthetic construct
VYKPVRE

SEQ ID NO: 154505 - protein, 7 aa, synthetic construct
VYKQIQH

SEQ ID NO: 154506 - protein, 7 aa, synthetic construct
VYKQSIT

SEQ ID NO: 154507 - protein, 7 aa, synthetic construct
VYKQTIQ

SEQ ID NO: 154508 - protein, 7 aa, synthetic construct
VYKQVSG

SEQ ID NO: 154509 - protein, 7 aa, synthetic construct
VYKSKEN

SEQ ID NO: 154510 - protein, 7 aa, synthetic construct
VYKSKIE

SEQ ID NO: 154511 - protein, 7 aa, synthetic construct
VYKSLGG

SEQ ID NO: 154512 - protein, 7 aa, synthetic construct
VYKSQSM

SEQ ID NO: 154513 - protein, 7 aa, synthetic construct
VYKSTHG

SEQ ID NO: 154514 - protein, 7 aa, synthetic construct
VYKSVPT

SEQ ID NO: 154515 - protein, 7 aa, synthetic construct
VYKTSQN

SEQ ID NO: 154516 - protein, 7 aa, synthetic construct
VYKTTEK

SEQ ID NO: 154517 - protein, 7 aa, synthetic construct
VYKVIKD

SEQ ID NO: 154518 - protein, 7 aa, synthetic construct
VYKVTHP

SEQ ID NO: 154519 - protein, 7 aa, synthetic construct
VYKWEKE

SEQ ID NO: 154520 - protein, 7 aa, synthetic construct
VYKWQEE

SEQ ID NO: 154521 - protein, 7 aa, synthetic construct
VYMGEGR

SEQ ID NO: 154522 - protein, 7 aa, synthetic construct
VYNANNK

SEQ ID NO: 154523 - protein, 7 aa, synthetic construct
VYNASMK

SEQ ID NO: 154524 - protein, 7 aa, synthetic construct
VYNGKHL

SEQ ID NO: 154525 - protein, 7 aa, synthetic construct
VYNKEMR

SEQ ID NO: 154526 - protein, 7 aa, synthetic construct
VYNKMER

SEQ ID NO: 154527 - protein, 7 aa, synthetic construct
VYNQPSK

SEQ ID NO: 154528 - protein, 7 aa, synthetic construct
VYNRTKE

SEQ ID NO: 154529 - protein, 7 aa, synthetic construct
VYNSSKM

SEQ ID NO: 154530 - protein, 7 aa, synthetic construct
VYPAPKP

SEQ ID NO: 154531 - protein, 7 aa, synthetic construct
VYPKANL

SEQ ID NO: 154532 - protein, 7 aa, synthetic construct
VYPKGPS

SEQ ID NO: 154533 - protein, 7 aa, synthetic construct
VYPLAKA

SEQ ID NO: 154534 - protein, 7 aa, synthetic construct
VYPNQKQ

SEQ ID NO: 154535 - protein, 7 aa, synthetic construct
VYPNTKN

SEQ ID NO: 154536 - protein, 7 aa, synthetic construct
VYPQLGK

SEQ ID NO: 154537 - protein, 7 aa, synthetic construct
VYPQNGR

SEQ ID NO: 154538 - protein, 7 aa, synthetic construct
VYPQRSP

SEQ ID NO: 154539 - protein, 7 aa, synthetic construct
VYPTKAM

SEQ ID NO: 154540 - protein, 7 aa, synthetic construct
VYQATKG

SEQ ID NO: 154541 - protein, 7 aa, synthetic construct
VYQGLKG

SEQ ID NO: 154542 - protein, 7 aa, synthetic construct
VYQKMQV

SEQ ID NO: 154543 - protein, 7 aa, synthetic construct
VYQNNGK

SEQ ID NO: 154544 - protein, 7 aa, synthetic construct
VYQQTKM

SEQ ID NO: 154545 - protein, 7 aa, synthetic construct
VYQTSKS

SEQ ID NO: 154546 - protein, 7 aa, synthetic construct
VYRSAIP

SEQ ID NO: 154547 - protein, 7 aa, synthetic construct
VYRSGPT

SEQ ID NO: 154548 - protein, 7 aa, synthetic construct
VYSAHKG

SEQ ID NO: 154549 - protein, 7 aa, synthetic construct
VYSGMKA

SEQ ID NO: 154550 - protein, 7 aa, synthetic construct
VYSKSRE

SEQ ID NO: 154551 - protein, 7 aa, synthetic construct
VYSKTSL

SEQ ID NO: 154552 - protein, 7 aa, synthetic construct
VYSSVPK

SEQ ID NO: 154553 - protein, 7 aa, synthetic construct
VYSTARG

SEQ ID NO: 154554 - protein, 7 aa, synthetic construct
VYSTSPK

SEQ ID NO: 154555 - protein, 7 aa, synthetic construct
VYTPKDR

SEQ ID NO: 154556 - protein, 7 aa, synthetic construct
VYTQISK

SEQ ID NO: 154557 - protein, 7 aa, synthetic construct
VYTQKPM

SEQ ID NO: 154558 - protein, 7 aa, synthetic construct
VYTTTRG

SEQ ID NO: 154559 - protein, 7 aa, synthetic construct
WAAGGKA

SEQ ID NO: 154560 - protein, 7 aa, synthetic construct
WAAGISK

SEQ ID NO: 154561 - protein, 7 aa, synthetic construct
WAAGQQK

SEQ ID NO: 154562 - protein, 7 aa, synthetic construct
WAAKNRD

SEQ ID NO: 154563 - protein, 7 aa, synthetic construct
WAATGMK

SEQ ID NO: 154564 - protein, 7 aa, synthetic construct
WADKKSY

SEQ ID NO: 154565 - protein, 7 aa, synthetic construct
WADSKSK

SEQ ID NO: 154566 - protein, 7 aa, synthetic construct
WAGANLK

SEQ ID NO: 154567 - protein, 7 aa, synthetic construct
WAGASAK

SEQ ID NO: 154568 - protein, 7 aa, synthetic construct
WAGHKSH

SEQ ID NO: 154569 - protein, 7 aa, synthetic construct
WAGKEIK

SEQ ID NO: 154570 - protein, 7 aa, synthetic construct
WAGKMPQ

SEQ ID NO: 154571 - protein, 7 aa, synthetic construct
WAGLPNK

SEQ ID NO: 154572 - protein, 7 aa, synthetic construct
WAGNAKN

SEQ ID NO: 154573 - protein, 7 aa, synthetic construct
WAGNKYA

SEQ ID NO: 154574 - protein, 7 aa, synthetic construct
WAGNTLK

SEQ ID NO: 154575 - protein, 7 aa, synthetic construct
WAHESTK

SEQ ID NO: 154576 - protein, 7 aa, synthetic construct
WAKARDG

SEQ ID NO: 154577 - protein, 7 aa, synthetic construct
WAKGDKL

SEQ ID NO: 154578 - protein, 7 aa, synthetic construct
WAKGHQQ

SEQ ID NO: 154579 - protein, 7 aa, synthetic construct
WAKKENL

SEQ ID NO: 154580 - protein, 7 aa, synthetic construct
WAKNIHA

SEQ ID NO: 154581 - protein, 7 aa, synthetic construct
WAKSHVQ

SEQ ID NO: 154582 - protein, 7 aa, synthetic construct
WAKTDSK

SEQ ID NO: 154583 - protein, 7 aa, synthetic construct
WAKTEMR

SEQ ID NO: 154584 - protein, 7 aa, synthetic construct
WAKTQEK

SEQ ID NO: 154585 - protein, 7 aa, synthetic construct
WALNSKT

SEQ ID NO: 154586 - protein, 7 aa, synthetic construct
WAMEKKV

SEQ ID NO: 154587 - protein, 7 aa, synthetic construct
WANADKK

SEQ ID NO: 154588 - protein, 7 aa, synthetic construct
WANASAK

SEQ ID NO: 154589 - protein, 7 aa, synthetic construct
WANESKR

SEQ ID NO: 154590 - protein, 7 aa, synthetic construct
WANMKHG

SEQ ID NO: 154591 - protein, 7 aa, synthetic construct
WAPPKSG

SEQ ID NO: 154592 - protein, 7 aa, synthetic construct
WAQEGKK

SEQ ID NO: 154593 - protein, 7 aa, synthetic construct
WAQKNLN

SEQ ID NO: 154594 - protein, 7 aa, synthetic construct
WAQNNPK

SEQ ID NO: 154595 - protein, 7 aa, synthetic construct
WAQRTTN

SEQ ID NO: 154596 - protein, 7 aa, synthetic construct
WAQTKLQ

SEQ ID NO: 154597 - protein, 7 aa, synthetic construct
WARQNVT

SEQ ID NO: 154598 - protein, 7 aa, synthetic construct
WASGKHF

SEQ ID NO: 154599 - protein, 7 aa, synthetic construct
WASKADK

SEQ ID NO: 154600 - protein, 7 aa, synthetic construct
WASKQWD

SEQ ID NO: 154601 - protein, 7 aa, synthetic construct
WASKSSV

SEQ ID NO: 154602 - protein, 7 aa, synthetic construct
WAVQKQS

SEQ ID NO: 154603 - protein, 7 aa, synthetic construct
WAYKNND

SEQ ID NO: 154604 - protein, 7 aa, synthetic construct
WDAKAAK

SEQ ID NO: 154605 - protein, 7 aa, synthetic construct
WDDKSKK

SEQ ID NO: 154606 - protein, 7 aa, synthetic construct
WDGKRVS

SEQ ID NO: 154607 - protein, 7 aa, synthetic construct
WDHGTNR

SEQ ID NO: 154608 - protein, 7 aa, synthetic construct
WDIKQKN

SEQ ID NO: 154609 - protein, 7 aa, synthetic construct
WDKAAMR

SEQ ID NO: 154610 - protein, 7 aa, synthetic construct
WDKGMTR

SEQ ID NO: 154611 - protein, 7 aa, synthetic construct
WDKGNMK

SEQ ID NO: 154612 - protein, 7 aa, synthetic construct
WDKISRA

SEQ ID NO: 154613 - protein, 7 aa, synthetic construct
WDKMATR

SEQ ID NO: 154614 - protein, 7 aa, synthetic construct
WDKNRQG

SEQ ID NO: 154615 - protein, 7 aa, synthetic construct
WDKPYKA

SEQ ID NO: 154616 - protein, 7 aa, synthetic construct
WDKRTAG

SEQ ID NO: 154617 - protein, 7 aa, synthetic construct
WDKTLRQ

SEQ ID NO: 154618 - protein, 7 aa, synthetic construct
WDKYIKN

SEQ ID NO: 154619 - protein, 7 aa, synthetic construct
WDLNRTK

SEQ ID NO: 154620 - protein, 7 aa, synthetic construct
WDMKKAP

SEQ ID NO: 154621 - protein, 7 aa, synthetic construct
WDMKKNV

SEQ ID NO: 154622 - protein, 7 aa, synthetic construct
WDMKKSG

SEQ ID NO: 154623 - protein, 7 aa, synthetic construct
WDNGIHR

SEQ ID NO: 154624 - protein, 7 aa, synthetic construct
WDNMKRG

SEQ ID NO: 154625 - protein, 7 aa, synthetic construct
WDQRVKA

SEQ ID NO: 154626 - protein, 7 aa, synthetic construct
WDRHMPD

SEQ ID NO: 154627 - protein, 7 aa, synthetic construct
WDRWKTE

SEQ ID NO: 154628 - protein, 7 aa, synthetic construct
WDTKRAQ

SEQ ID NO: 154629 - protein, 7 aa, synthetic construct
WDTTQFS

SEQ ID NO: 154630 - protein, 7 aa, synthetic construct
WDVKRQG

SEQ ID NO: 154631 - protein, 7 aa, synthetic construct
WEGKFKQ

SEQ ID NO: 154632 - protein, 7 aa, synthetic construct
WEHLKKN

SEQ ID NO: 154633 - protein, 7 aa, synthetic construct
WEHQAKH

SEQ ID NO: 154634 - protein, 7 aa, synthetic construct
WEKGGKS

SEQ ID NO: 154635 - protein, 7 aa, synthetic construct
WEKGRAA

SEQ ID NO: 154636 - protein, 7 aa, synthetic construct
WEKGRGQ

SEQ ID NO: 154637 - protein, 7 aa, synthetic construct
WEKMSKG

SEQ ID NO: 154638 - protein, 7 aa, synthetic construct
WEKMTKN

SEQ ID NO: 154639 - protein, 7 aa, synthetic construct
WEKNQSK

SEQ ID NO: 154640 - protein, 7 aa, synthetic construct
WEKQSYK

SEQ ID NO: 154641 - protein, 7 aa, synthetic construct
WEKSGSR

SEQ ID NO: 154642 - protein, 7 aa, synthetic construct
WEKYAKA

SEQ ID NO: 154643 - protein, 7 aa, synthetic construct
WELSNKT

SEQ ID NO: 154644 - protein, 7 aa, synthetic construct
WEMKTKQ

SEQ ID NO: 154645 - protein, 7 aa, synthetic construct
WEMKVKN

SEQ ID NO: 154646 - protein, 7 aa, synthetic construct
WENKFKQ

SEQ ID NO: 154647 - protein, 7 aa, synthetic construct
WENKQKS

SEQ ID NO: 154648 - protein, 7 aa, synthetic construct
WENKSKM

SEQ ID NO: 154649 - protein, 7 aa, synthetic construct
WEPKMRQ

SEQ ID NO: 154650 - protein, 7 aa, synthetic construct
WERKTMH

SEQ ID NO: 154651 - protein, 7 aa, synthetic construct
WESKTTK

SEQ ID NO: 154652 - protein, 7 aa, synthetic construct
WESLSGR

SEQ ID NO: 154653 - protein, 7 aa, synthetic construct
WETKGRQ

SEQ ID NO: 154654 - protein, 7 aa, synthetic construct
WETKRMG

SEQ ID NO: 154655 - protein, 7 aa, synthetic construct
WETRLKN

SEQ ID NO: 154656 - protein, 7 aa, synthetic construct
WFEAASP

SEQ ID NO: 154657 - protein, 7 aa, synthetic construct
WGAAQMK

SEQ ID NO: 154658 - protein, 7 aa, synthetic construct
WGAHTKG

SEQ ID NO: 154659 - protein, 7 aa, synthetic construct
WGANSTR

SEQ ID NO: 154660 - protein, 7 aa, synthetic construct
WGEIRKQ

SEQ ID NO: 154661 - protein, 7 aa, synthetic construct
WGGGQVR

SEQ ID NO: 154662 - protein, 7 aa, synthetic construct
WGGKETR

SEQ ID NO: 154663 - protein, 7 aa, synthetic construct
WGGQRNG

SEQ ID NO: 154664 - protein, 7 aa, synthetic construct
WGGQRSQ

SEQ ID NO: 154665 - protein, 7 aa, synthetic construct
WGGTYPK

SEQ ID NO: 154666 - protein, 7 aa, synthetic construct
WGGVMNK

SEQ ID NO: 154667 - protein, 7 aa, synthetic construct
WGGYRSD

SEQ ID NO: 154668 - protein, 7 aa, synthetic construct
WGHEKKV

SEQ ID NO: 154669 - protein, 7 aa, synthetic construct
WGKPAVT

SEQ ID NO: 154670 - protein, 7 aa, synthetic construct
WGKREMA

SEQ ID NO: 154671 - protein, 7 aa, synthetic construct
WGLGNSK

SEQ ID NO: 154672 - protein, 7 aa, synthetic construct
WGMQNKV

SEQ ID NO: 154673 - protein, 7 aa, synthetic construct
WGNGPPK

SEQ ID NO: 154674 - protein, 7 aa, synthetic construct
WGNQAPK

SEQ ID NO: 154675 - protein, 7 aa, synthetic construct
WGNRGHN

SEQ ID NO: 154676 - protein, 7 aa, synthetic construct
WGPSPDP

SEQ ID NO: 154677 - protein, 7 aa, synthetic construct
WGQHIKA

SEQ ID NO: 154678 - protein, 7 aa, synthetic construct
WGQKEKS

SEQ ID NO: 154679 - protein, 7 aa, synthetic construct
WGQNIPK

SEQ ID NO: 154680 - protein, 7 aa, synthetic construct
WGQNTTR

SEQ ID NO: 154681 - protein, 7 aa, synthetic construct
WGQQGAK

SEQ ID NO: 154682 - protein, 7 aa, synthetic construct
WGRDAQK

SEQ ID NO: 154683 - protein, 7 aa, synthetic construct
WGRGAQL

SEQ ID NO: 154684 - protein, 7 aa, synthetic construct
WGRKDGV

SEQ ID NO: 154685 - protein, 7 aa, synthetic construct
WGSMKGV

SEQ ID NO: 154686 - protein, 7 aa, synthetic construct
WGSNTLK

SEQ ID NO: 154687 - protein, 7 aa, synthetic construct
WGSQNRQ

SEQ ID NO: 154688 - protein, 7 aa, synthetic construct
WGTAHKV

SEQ ID NO: 154689 - protein, 7 aa, synthetic construct
WGTASVK

SEQ ID NO: 154690 - protein, 7 aa, synthetic construct
WGTNASK

SEQ ID NO: 154691 - protein, 7 aa, synthetic construct
WGTNRSH

SEQ ID NO: 154692 - protein, 7 aa, synthetic construct
WGVGNTK

SEQ ID NO: 154693 - protein, 7 aa, synthetic construct
WGVGTAK

SEQ ID NO: 154694 - protein, 7 aa, synthetic construct
WGVNNTK

SEQ ID NO: 154695 - protein, 7 aa, synthetic construct
WGYVATE

SEQ ID NO: 154696 - protein, 7 aa, synthetic construct
WHANQRS

SEQ ID NO: 154697 - protein, 7 aa, synthetic construct
WHARTSN

SEQ ID NO: 154698 - protein, 7 aa, synthetic construct
WHKIVKE

SEQ ID NO: 154699 - protein, 7 aa, synthetic construct
WHKKAGD

SEQ ID NO: 154700 - protein, 7 aa, synthetic construct
WHKSIAG

SEQ ID NO: 154701 - protein, 7 aa, synthetic construct
WHKVNAA

SEQ ID NO: 154702 - protein, 7 aa, synthetic construct
WHLTNSA

SEQ ID NO: 154703 - protein, 7 aa, synthetic construct
WHMDKRG

SEQ ID NO: 154704 - protein, 7 aa, synthetic construct
WHNSNRG

SEQ ID NO: 154705 - protein, 7 aa, synthetic construct
WHRVRDE

SEQ ID NO: 154706 - protein, 7 aa, synthetic construct
WHSSKGQ

SEQ ID NO: 154707 - protein, 7 aa, synthetic construct
WHSSKQM

SEQ ID NO: 154708 - protein, 7 aa, synthetic construct
WHTNRSQ

SEQ ID NO: 154709 - protein, 7 aa, synthetic construct
WHTRYEG

SEQ ID NO: 154710 - protein, 7 aa, synthetic construct
WHTSRNP

SEQ ID NO: 154711 - protein, 7 aa, synthetic construct
WIAGASK

SEQ ID NO: 154712 - protein, 7 aa, synthetic construct
WIGKNAS

SEQ ID NO: 154713 - protein, 7 aa, synthetic construct
WIGNQKA

SEQ ID NO: 154714 - protein, 7 aa, synthetic construct
WIKANIT

SEQ ID NO: 154715 - protein, 7 aa, synthetic construct
WIKGTGA

SEQ ID NO: 154716 - protein, 7 aa, synthetic construct
WIKMKAE

SEQ ID NO: 154717 - protein, 7 aa, synthetic construct
WIKSAKD

SEQ ID NO: 154718 - protein, 7 aa, synthetic construct
WIKSNPG

SEQ ID NO: 154719 - protein, 7 aa, synthetic construct
WIKTQAA

SEQ ID NO: 154720 - protein, 7 aa, synthetic construct
WIKTTNT

SEQ ID NO: 154721 - protein, 7 aa, synthetic construct
WINGNKI

SEQ ID NO: 154722 - protein, 7 aa, synthetic construct
WIQTKAA

SEQ ID NO: 154723 - protein, 7 aa, synthetic construct
WITGTGK

SEQ ID NO: 154724 - protein, 7 aa, synthetic construct
WKAASSI

SEQ ID NO: 154725 - protein, 7 aa, synthetic construct
WKADAVR

SEQ ID NO: 154726 - protein, 7 aa, synthetic construct
WKAGATL

SEQ ID NO: 154727 - protein, 7 aa, synthetic construct
WKAHQPS

SEQ ID NO: 154728 - protein, 7 aa, synthetic construct
WKAITGS

SEQ ID NO: 154729 - protein, 7 aa, synthetic construct
WKAKDAM

SEQ ID NO: 154730 - protein, 7 aa, synthetic construct
WKAKVEI

SEQ ID NO: 154731 - protein, 7 aa, synthetic construct
WKANHAI

SEQ ID NO: 154732 - protein, 7 aa, synthetic construct
WKANISG

SEQ ID NO: 154733 - protein, 7 aa, synthetic construct
WKANLMN

SEQ ID NO: 154734 - protein, 7 aa, synthetic construct
WKANMEK

SEQ ID NO: 154735 - protein, 7 aa, synthetic construct
WKANRDG

SEQ ID NO: 154736 - protein, 7 aa, synthetic construct
WKAPAPM

SEQ ID NO: 154737 - protein, 7 aa, synthetic construct
WKASERP

SEQ ID NO: 154738 - protein, 7 aa, synthetic construct
WKASESK

SEQ ID NO: 154739 - protein, 7 aa, synthetic construct
WKASSMT

SEQ ID NO: 154740 - protein, 7 aa, synthetic construct
WKAVSMG

SEQ ID NO: 154741 - protein, 7 aa, synthetic construct
WKAVTSS

SEQ ID NO: 154742 - protein, 7 aa, synthetic construct
WKDANIR

SEQ ID NO: 154743 - protein, 7 aa, synthetic construct
WKDANLK

SEQ ID NO: 154744 - protein, 7 aa, synthetic construct
WKDGGSR

SEQ ID NO: 154745 - protein, 7 aa, synthetic construct
WKDGTWT

SEQ ID NO: 154746 - protein, 7 aa, synthetic construct
WKDHTQK

SEQ ID NO: 154747 - protein, 7 aa, synthetic construct
WKDHTRV

SEQ ID NO: 154748 - protein, 7 aa, synthetic construct
WKDHTYK

SEQ ID NO: 154749 - protein, 7 aa, synthetic construct
WKDIKTH

SEQ ID NO: 154750 - protein, 7 aa, synthetic construct
WKDITGK

SEQ ID NO: 154751 - protein, 7 aa, synthetic construct
WKDLKQH

SEQ ID NO: 154752 - protein, 7 aa, synthetic construct
WKDLRAQ

SEQ ID NO: 154753 - protein, 7 aa, synthetic construct
WKDNHKT

SEQ ID NO: 154754 - protein, 7 aa, synthetic construct
WKDNQSR

SEQ ID NO: 154755 - protein, 7 aa, synthetic construct
WKDNSFK

SEQ ID NO: 154756 - protein, 7 aa, synthetic construct
WKDNYRQ

SEQ ID NO: 154757 - protein, 7 aa, synthetic construct
WKDRMHN

SEQ ID NO: 154758 - protein, 7 aa, synthetic construct
WKDSKHV

SEQ ID NO: 154759 - protein, 7 aa, synthetic construct
WKDTARL

SEQ ID NO: 154760 - protein, 7 aa, synthetic construct
WKDTKSY

SEQ ID NO: 154761 - protein, 7 aa, synthetic construct
WKDVGPK

SEQ ID NO: 154762 - protein, 7 aa, synthetic construct
WKDVKQL

SEQ ID NO: 154763 - protein, 7 aa, synthetic construct
WKDVRMP

SEQ ID NO: 154764 - protein, 7 aa, synthetic construct
WKDYKAV

SEQ ID NO: 154765 - protein, 7 aa, synthetic construct
WKEATNK

SEQ ID NO: 154766 - protein, 7 aa, synthetic construct
WKEGLYK

SEQ ID NO: 154767 - protein, 7 aa, synthetic construct
WKEGQVR

SEQ ID NO: 154768 - protein, 7 aa, synthetic construct
WKEHRLG

SEQ ID NO: 154769 - protein, 7 aa, synthetic construct
WKEKMGH

SEQ ID NO: 154770 - protein, 7 aa, synthetic construct
WKENKQQ

SEQ ID NO: 154771 - protein, 7 aa, synthetic construct
WKEREKG

SEQ ID NO: 154772 - protein, 7 aa, synthetic construct
WKERSGG

SEQ ID NO: 154773 - protein, 7 aa, synthetic construct
WKESGRT

SEQ ID NO: 154774 - protein, 7 aa, synthetic construct
WKEVQRS

SEQ ID NO: 154775 - protein, 7 aa, synthetic construct
WKEYTRT

SEQ ID NO: 154776 - protein, 7 aa, synthetic construct
WKGDMQK

SEQ ID NO: 154777 - protein, 7 aa, synthetic construct
WKGGGGT

SEQ ID NO: 154778 - protein, 7 aa, synthetic construct
WKGGHTS

SEQ ID NO: 154779 - protein, 7 aa, synthetic construct
WKGGNHA

SEQ ID NO: 154780 - protein, 7 aa, synthetic construct
WKGGNVS

SEQ ID NO: 154781 - protein, 7 aa, synthetic construct
WKGGPSG

SEQ ID NO: 154782 - protein, 7 aa, synthetic construct
WKGGVGN

SEQ ID NO: 154783 - protein, 7 aa, synthetic construct
WKGHQSG

SEQ ID NO: 154784 - protein, 7 aa, synthetic construct
WKGHVQV

SEQ ID NO: 154785 - protein, 7 aa, synthetic construct
WKGIASG

SEQ ID NO: 154786 - protein, 7 aa, synthetic construct
WKGKDFA

SEQ ID NO: 154787 - protein, 7 aa, synthetic construct
WKGKDHI

SEQ ID NO: 154788 - protein, 7 aa, synthetic construct
WKGKDNL

SEQ ID NO: 154789 - protein, 7 aa, synthetic construct
WKGLMPQ

SEQ ID NO: 154790 - protein, 7 aa, synthetic construct
WKGNIMV

SEQ ID NO: 154791 - protein, 7 aa, synthetic construct
WKGNISA

SEQ ID NO: 154792 - protein, 7 aa, synthetic construct
WKGNMEK

SEQ ID NO: 154793 - protein, 7 aa, synthetic construct
WKGNNMT

SEQ ID NO: 154794 - protein, 7 aa, synthetic construct
WKGPHSA

SEQ ID NO: 154795 - protein, 7 aa, synthetic construct
WKGQSNV

SEQ ID NO: 154796 - protein, 7 aa, synthetic construct
WKGSHAG

SEQ ID NO: 154797 - protein, 7 aa, synthetic construct
WKGSMDK

SEQ ID NO: 154798 - protein, 7 aa, synthetic construct
WKGSQST

SEQ ID NO: 154799 - protein, 7 aa, synthetic construct
WKGSSAS

SEQ ID NO: 154800 - protein, 7 aa, synthetic construct
WKGSSTS

SEQ ID NO: 154801 - protein, 7 aa, synthetic construct
WKGSSVQ

SEQ ID NO: 154802 - protein, 7 aa, synthetic construct
WKGVGAV

SEQ ID NO: 154803 - protein, 7 aa, synthetic construct
WKHALQA

SEQ ID NO: 154804 - protein, 7 aa, synthetic construct
WKHASVA

SEQ ID NO: 154805 - protein, 7 aa, synthetic construct
WKHEKAG

SEQ ID NO: 154806 - protein, 7 aa, synthetic construct
WKHGSLM

SEQ ID NO: 154807 - protein, 7 aa, synthetic construct
WKHGVVA

SEQ ID NO: 154808 - protein, 7 aa, synthetic construct
WKHNQAH

SEQ ID NO: 154809 - protein, 7 aa, synthetic construct
WKHQITG

SEQ ID NO: 154810 - protein, 7 aa, synthetic construct
WKHTSIG

SEQ ID NO: 154811 - protein, 7 aa, synthetic construct
WKHYGEN

SEQ ID NO: 154812 - protein, 7 aa, synthetic construct
WKKDTFN

SEQ ID NO: 154813 - protein, 7 aa, synthetic construct
WKKDVGV

SEQ ID NO: 154814 - protein, 7 aa, synthetic construct
WKKMTDM

SEQ ID NO: 154815 - protein, 7 aa, synthetic construct
WKKYISE

SEQ ID NO: 154816 - protein, 7 aa, synthetic construct
WKLMKES

SEQ ID NO: 154817 - protein, 7 aa, synthetic construct
WKMKAYE

SEQ ID NO: 154818 - protein, 7 aa, synthetic construct
WKMSGNV

SEQ ID NO: 154819 - protein, 7 aa, synthetic construct
WKNAPVT

SEQ ID NO: 154820 - protein, 7 aa, synthetic construct
WKNAQER

SEQ ID NO: 154821 - protein, 7 aa, synthetic construct
WKNDKML

SEQ ID NO: 154822 - protein, 7 aa, synthetic construct
WKNEHAK

SEQ ID NO: 154823 - protein, 7 aa, synthetic construct
WKNFTAQ

SEQ ID NO: 154824 - protein, 7 aa, synthetic construct
WKNHERI

SEQ ID NO: 154825 - protein, 7 aa, synthetic construct
WKNKEWN

SEQ ID NO: 154826 - protein, 7 aa, synthetic construct
WKNNAHT

SEQ ID NO: 154827 - protein, 7 aa, synthetic construct
WKNNHQV

SEQ ID NO: 154828 - protein, 7 aa, synthetic construct
WKNPAVG

SEQ ID NO: 154829 - protein, 7 aa, synthetic construct
WKNQQPS

SEQ ID NO: 154830 - protein, 7 aa, synthetic construct
WKNRAEG

SEQ ID NO: 154831 - protein, 7 aa, synthetic construct
WKNSDFK

SEQ ID NO: 154832 - protein, 7 aa, synthetic construct
WKNSEGK

SEQ ID NO: 154833 - protein, 7 aa, synthetic construct
WKNSHNQ

SEQ ID NO: 154834 - protein, 7 aa, synthetic construct
WKNTIEK

SEQ ID NO: 154835 - protein, 7 aa, synthetic construct
WKNTKDN

SEQ ID NO: 154836 - protein, 7 aa, synthetic construct
WKNTNSF

SEQ ID NO: 154837 - protein, 7 aa, synthetic construct
WKNVLPT

SEQ ID NO: 154838 - protein, 7 aa, synthetic construct
WKNVNQI

SEQ ID NO: 154839 - protein, 7 aa, synthetic construct
WKPAAAM

SEQ ID NO: 154840 - protein, 7 aa, synthetic construct
WKPAQSF

SEQ ID NO: 154841 - protein, 7 aa, synthetic construct
WKPMSSG

SEQ ID NO: 154842 - protein, 7 aa, synthetic construct
WKPNESK

SEQ ID NO: 154843 - protein, 7 aa, synthetic construct
WKPQADR

SEQ ID NO: 154844 - protein, 7 aa, synthetic construct
WKPRTDN

SEQ ID NO: 154845 - protein, 7 aa, synthetic construct
WKPSNVD

SEQ ID NO: 154846 - protein, 7 aa, synthetic construct
WKPTIDR

SEQ ID NO: 154847 - protein, 7 aa, synthetic construct
WKPVTSA

SEQ ID NO: 154848 - protein, 7 aa, synthetic construct
WKQASSI

SEQ ID NO: 154849 - protein, 7 aa, synthetic construct
WKQASSV

SEQ ID NO: 154850 - protein, 7 aa, synthetic construct
WKQDKAN

SEQ ID NO: 154851 - protein, 7 aa, synthetic construct
WKQKDNS

SEQ ID NO: 154852 - protein, 7 aa, synthetic construct
WKQKDTV

SEQ ID NO: 154853 - protein, 7 aa, synthetic construct
WKQNHTV

SEQ ID NO: 154854 - protein, 7 aa, synthetic construct
WKQNYSQ

SEQ ID NO: 154855 - protein, 7 aa, synthetic construct
WKQPKDQ

SEQ ID NO: 154856 - protein, 7 aa, synthetic construct
WKQQHGP

SEQ ID NO: 154857 - protein, 7 aa, synthetic construct
WKQQHPQ

SEQ ID NO: 154858 - protein, 7 aa, synthetic construct
WKQSQIL

SEQ ID NO: 154859 - protein, 7 aa, synthetic construct
WKQSQNS

SEQ ID NO: 154860 - protein, 7 aa, synthetic construct
WKQSSNL

SEQ ID NO: 154861 - protein, 7 aa, synthetic construct
WKQTERN

SEQ ID NO: 154862 - protein, 7 aa, synthetic construct
WKQTPAV

SEQ ID NO: 154863 - protein, 7 aa, synthetic construct
WKQVGNS

SEQ ID NO: 154864 - protein, 7 aa, synthetic construct
WKQVIST

SEQ ID NO: 154865 - protein, 7 aa, synthetic construct
WKQVNPV

SEQ ID NO: 154866 - protein, 7 aa, synthetic construct
WKQVNQV

SEQ ID NO: 154867 - protein, 7 aa, synthetic construct
WKQVYPQ

SEQ ID NO: 154868 - protein, 7 aa, synthetic construct
WKRAELA

SEQ ID NO: 154869 - protein, 7 aa, synthetic construct
WKRDNQM

SEQ ID NO: 154870 - protein, 7 aa, synthetic construct
WKRDQSG

SEQ ID NO: 154871 - protein, 7 aa, synthetic construct
WKRDSYN

SEQ ID NO: 154872 - protein, 7 aa, synthetic construct
WKRQQDP

SEQ ID NO: 154873 - protein, 7 aa, synthetic construct
WKSAGSI

SEQ ID NO: 154874 - protein, 7 aa, synthetic construct
WKSEKTF

SEQ ID NO: 154875 - protein, 7 aa, synthetic construct
WKSEQIK

SEQ ID NO: 154876 - protein, 7 aa, synthetic construct
WKSGQVH

SEQ ID NO: 154877 - protein, 7 aa, synthetic construct
WKSLERG

SEQ ID NO: 154878 - protein, 7 aa, synthetic construct
WKSLSGS

SEQ ID NO: 154879 - protein, 7 aa, synthetic construct
WKSNHLQ

SEQ ID NO: 154880 - protein, 7 aa, synthetic construct
WKSNIGQ

SEQ ID NO: 154881 - protein, 7 aa, synthetic construct
WKSQLQM

SEQ ID NO: 154882 - protein, 7 aa, synthetic construct
WKSQMPV

SEQ ID NO: 154883 - protein, 7 aa, synthetic construct
WKSQQHL

SEQ ID NO: 154884 - protein, 7 aa, synthetic construct
WKSSINT

SEQ ID NO: 154885 - protein, 7 aa, synthetic construct
WKSSPPQ

SEQ ID NO: 154886 - protein, 7 aa, synthetic construct
WKSSTVT

SEQ ID NO: 154887 - protein, 7 aa, synthetic construct
WKTANGH

SEQ ID NO: 154888 - protein, 7 aa, synthetic construct
WKTANIQ

SEQ ID NO: 154889 - protein, 7 aa, synthetic construct
WKTDKHI

SEQ ID NO: 154890 - protein, 7 aa, synthetic construct
WKTHQQI

SEQ ID NO: 154891 - protein, 7 aa, synthetic construct
WKTHTIS

SEQ ID NO: 154892 - protein, 7 aa, synthetic construct
WKTHVAQ

SEQ ID NO: 154893 - protein, 7 aa, synthetic construct
WKTIASN

SEQ ID NO: 154894 - protein, 7 aa, synthetic construct
WKTIQGG

SEQ ID NO: 154895 - protein, 7 aa, synthetic construct
WKTLNAN

SEQ ID NO: 154896 - protein, 7 aa, synthetic construct
WKTLQSG

SEQ ID NO: 154897 - protein, 7 aa, synthetic construct
WKTLSPQ

SEQ ID NO: 154898 - protein, 7 aa, synthetic construct
WKTNDMK

SEQ ID NO: 154899 - protein, 7 aa, synthetic construct
WKTNHNQ

SEQ ID NO: 154900 - protein, 7 aa, synthetic construct
WKTNVQS

SEQ ID NO: 154901 - protein, 7 aa, synthetic construct
WKTPSDK

SEQ ID NO: 154902 - protein, 7 aa, synthetic construct
WKTQESK

SEQ ID NO: 154903 - protein, 7 aa, synthetic construct
WKTQKDM

SEQ ID NO: 154904 - protein, 7 aa, synthetic construct
WKTQTQH

SEQ ID NO: 154905 - protein, 7 aa, synthetic construct
WKTRTDV

SEQ ID NO: 154906 - protein, 7 aa, synthetic construct
WKTSQFQ

SEQ ID NO: 154907 - protein, 7 aa, synthetic construct
WKVQQGN

SEQ ID NO: 154908 - protein, 7 aa, synthetic construct
WKVSSHV

SEQ ID NO: 154909 - protein, 7 aa, synthetic construct
WKVTHTA

SEQ ID NO: 154910 - protein, 7 aa, synthetic construct
WLAASKG

SEQ ID NO: 154911 - protein, 7 aa, synthetic construct
WLANSKQ

SEQ ID NO: 154912 - protein, 7 aa, synthetic construct
WLASKKD

SEQ ID NO: 154913 - protein, 7 aa, synthetic construct
WLEKTSK

SEQ ID NO: 154914 - protein, 7 aa, synthetic construct
WLGKIKD

SEQ ID NO: 154915 - protein, 7 aa, synthetic construct
WLGKNIS

SEQ ID NO: 154916 - protein, 7 aa, synthetic construct
WLGSKAS

SEQ ID NO: 154917 - protein, 7 aa, synthetic construct
WLGTKAG

SEQ ID NO: 154918 - protein, 7 aa, synthetic construct
WLGTNKV

SEQ ID NO: 154919 - protein, 7 aa, synthetic construct
WLKAKDM

SEQ ID NO: 154920 - protein, 7 aa, synthetic construct
WLKPSTG

SEQ ID NO: 154921 - protein, 7 aa, synthetic construct
WLKSGNN

SEQ ID NO: 154922 - protein, 7 aa, synthetic construct
WLKSKAE

SEQ ID NO: 154923 - protein, 7 aa, synthetic construct
WLKSRDG

SEQ ID NO: 154924 - protein, 7 aa, synthetic construct
WLNQKSV

SEQ ID NO: 154925 - protein, 7 aa, synthetic construct
WLQTAKA

SEQ ID NO: 154926 - protein, 7 aa, synthetic construct
WLSNKVG

SEQ ID NO: 154927 - protein, 7 aa, synthetic construct
WMASQPK

SEQ ID NO: 154928 - protein, 7 aa, synthetic construct
WMGQTNK

SEQ ID NO: 154929 - protein, 7 aa, synthetic construct
WMGTTSK

SEQ ID NO: 154930 - protein, 7 aa, synthetic construct
WMGTVKA

SEQ ID NO: 154931 - protein, 7 aa, synthetic construct
WMKDHVK

SEQ ID NO: 154932 - protein, 7 aa, synthetic construct
WMKEAKN

SEQ ID NO: 154933 - protein, 7 aa, synthetic construct
WMKEASL

SEQ ID NO: 154934 - protein, 7 aa, synthetic construct
WMKEQSK

SEQ ID NO: 154935 - protein, 7 aa, synthetic construct
WMKGLQN

SEQ ID NO: 154936 - protein, 7 aa, synthetic construct
WMKKDAV

SEQ ID NO: 154937 - protein, 7 aa, synthetic construct
WMKNIAS

SEQ ID NO: 154938 - protein, 7 aa, synthetic construct
WMKNTIT

SEQ ID NO: 154939 - protein, 7 aa, synthetic construct
WMKNVPN

SEQ ID NO: 154940 - protein, 7 aa, synthetic construct
WMKQLPA

SEQ ID NO: 154941 - protein, 7 aa, synthetic construct
WMKQQPS

SEQ ID NO: 154942 - protein, 7 aa, synthetic construct
WMKQTPV

SEQ ID NO: 154943 - protein, 7 aa, synthetic construct
WMKSKND

SEQ ID NO: 154944 - protein, 7 aa, synthetic construct
WMKTEKL

SEQ ID NO: 154945 - protein, 7 aa, synthetic construct
WMKTKNE

SEQ ID NO: 154946 - protein, 7 aa, synthetic construct
WMKTSNM

SEQ ID NO: 154947 - protein, 7 aa, synthetic construct
WMKVNTQ

SEQ ID NO: 154948 - protein, 7 aa, synthetic construct
WMMKAKE

SEQ ID NO: 154949 - protein, 7 aa, synthetic construct
WMNDKAK

SEQ ID NO: 154950 - protein, 7 aa, synthetic construct
WMPNHKA

SEQ ID NO: 154951 - protein, 7 aa, synthetic construct
WMTSNKD

SEQ ID NO: 154952 - protein, 7 aa, synthetic construct
WNAGNSK

SEQ ID NO: 154953 - protein, 7 aa, synthetic construct
WNAHNKT

SEQ ID NO: 154954 - protein, 7 aa, synthetic construct
WNAHQMK

SEQ ID NO: 154955 - protein, 7 aa, synthetic construct
WNAHTKI

SEQ ID NO: 154956 - protein, 7 aa, synthetic construct
WNASGPK

SEQ ID NO: 154957 - protein, 7 aa, synthetic construct
WNDAKMR

SEQ ID NO: 154958 - protein, 7 aa, synthetic construct
WNEKKLM

SEQ ID NO: 154959 - protein, 7 aa, synthetic construct
WNGGHQR

SEQ ID NO: 154960 - protein, 7 aa, synthetic construct
WNGHAQK

SEQ ID NO: 154961 - protein, 7 aa, synthetic construct
WNGHQQR

SEQ ID NO: 154962 - protein, 7 aa, synthetic construct
WNGKNDK

SEQ ID NO: 154963 - protein, 7 aa, synthetic construct
WNGKQHI

SEQ ID NO: 154964 - protein, 7 aa, synthetic construct
WNGKSDK

SEQ ID NO: 154965 - protein, 7 aa, synthetic construct
WNGNHQK

SEQ ID NO: 154966 - protein, 7 aa, synthetic construct
WNGNNMK

SEQ ID NO: 154967 - protein, 7 aa, synthetic construct
WNGNNVK

SEQ ID NO: 154968 - protein, 7 aa, synthetic construct
WNGNQSK

SEQ ID NO: 154969 - protein, 7 aa, synthetic construct
WNGNTQK

SEQ ID NO: 154970 - protein, 7 aa, synthetic construct
WNGSFQK

SEQ ID NO: 154971 - protein, 7 aa, synthetic construct
WNGTDKR

SEQ ID NO: 154972 - protein, 7 aa, synthetic construct
WNHASMK

SEQ ID NO: 154973 - protein, 7 aa, synthetic construct
WNHQGTK

SEQ ID NO: 154974 - protein, 7 aa, synthetic construct
WNHQNVK

SEQ ID NO: 154975 - protein, 7 aa, synthetic construct
WNHRGIQ

SEQ ID NO: 154976 - protein, 7 aa, synthetic construct
WNHSQVK

SEQ ID NO: 154977 - protein, 7 aa, synthetic construct
WNKGDEW

SEQ ID NO: 154978 - protein, 7 aa, synthetic construct
WNKHHIT

SEQ ID NO: 154979 - protein, 7 aa, synthetic construct
WNKHVPV

SEQ ID NO: 154980 - protein, 7 aa, synthetic construct
WNKLHQN

SEQ ID NO: 154981 - protein, 7 aa, synthetic construct
WNKMLPN

SEQ ID NO: 154982 - protein, 7 aa, synthetic construct
WNKNYSH

SEQ ID NO: 154983 - protein, 7 aa, synthetic construct
WNKQQPL

SEQ ID NO: 154984 - protein, 7 aa, synthetic construct
WNKTQVI

SEQ ID NO: 154985 - protein, 7 aa, synthetic construct
WNNKMEK

SEQ ID NO: 154986 - protein, 7 aa, synthetic construct
WNNLKQM

SEQ ID NO: 154987 - protein, 7 aa, synthetic construct
WNNPKYG

SEQ ID NO: 154988 - protein, 7 aa, synthetic construct
WNNQQGR

SEQ ID NO: 154989 - protein, 7 aa, synthetic construct
WNNRTNQ

SEQ ID NO: 154990 - protein, 7 aa, synthetic construct
WNNSRTT

SEQ ID NO: 154991 - protein, 7 aa, synthetic construct
WNNTRSN

SEQ ID NO: 154992 - protein, 7 aa, synthetic construct
WNPAKPI

SEQ ID NO: 154993 - protein, 7 aa, synthetic construct
WNPIASE

SEQ ID NO: 154994 - protein, 7 aa, synthetic construct
WNQASKL

SEQ ID NO: 154995 - protein, 7 aa, synthetic construct
WNQGRNG

SEQ ID NO: 154996 - protein, 7 aa, synthetic construct
WNQLNKI

SEQ ID NO: 154997 - protein, 7 aa, synthetic construct
WNQNKHQ

SEQ ID NO: 154998 - protein, 7 aa, synthetic construct
WNQRSTG

SEQ ID NO: 154999 - protein, 7 aa, synthetic construct
WNQSKDK

SEQ ID NO: 155000 - protein, 7 aa, synthetic construct
WNQSSLK

SEQ ID NO: 155001 - protein, 7 aa, synthetic construct
WNQSTRQ

SEQ ID NO: 155002 - protein, 7 aa, synthetic construct
WNRHAVN

SEQ ID NO: 155003 - protein, 7 aa, synthetic construct
WNRHVSQ

SEQ ID NO: 155004 - protein, 7 aa, synthetic construct
WNRTSAA

SEQ ID NO: 155005 - protein, 7 aa, synthetic construct
WNSGQPR

SEQ ID NO: 155006 - protein, 7 aa, synthetic construct
WNSIKMN

SEQ ID NO: 155007 - protein, 7 aa, synthetic construct
WNSIKQM

SEQ ID NO: 155008 - protein, 7 aa, synthetic construct
WNSMRAS

SEQ ID NO: 155009 - protein, 7 aa, synthetic construct
WNSVRHV

SEQ ID NO: 155010 - protein, 7 aa, synthetic construct
WNTEGKK

SEQ ID NO: 155011 - protein, 7 aa, synthetic construct
WNTSISK

SEQ ID NO: 155012 - protein, 7 aa, synthetic construct
WNTSSTK

SEQ ID NO: 155013 - protein, 7 aa, synthetic construct
WNVASQK

SEQ ID NO: 155014 - protein, 7 aa, synthetic construct
WNVNNQK

SEQ ID NO: 155015 - protein, 7 aa, synthetic construct
WPANRSM

SEQ ID NO: 155016 - protein, 7 aa, synthetic construct
WPAQGGK

SEQ ID NO: 155017 - protein, 7 aa, synthetic construct
WPASQKV

SEQ ID NO: 155018 - protein, 7 aa, synthetic construct
WPASSRQ

SEQ ID NO: 155019 - protein, 7 aa, synthetic construct
WPDKSRS

SEQ ID NO: 155020 - protein, 7 aa, synthetic construct
WPDNKSK

SEQ ID NO: 155021 - protein, 7 aa, synthetic construct
WPGANKL

SEQ ID NO: 155022 - protein, 7 aa, synthetic construct
WPGGKLA

SEQ ID NO: 155023 - protein, 7 aa, synthetic construct
WPGGQQR

SEQ ID NO: 155024 - protein, 7 aa, synthetic construct
WPGKGVT

SEQ ID NO: 155025 - protein, 7 aa, synthetic construct
WPGKPST

SEQ ID NO: 155026 - protein, 7 aa, synthetic construct
WPGLKGG

SEQ ID NO: 155027 - protein, 7 aa, synthetic construct
WPGLKVS

SEQ ID NO: 155028 - protein, 7 aa, synthetic construct
WPGNQRQ

SEQ ID NO: 155029 - protein, 7 aa, synthetic construct
WPGQKAG

SEQ ID NO: 155030 - protein, 7 aa, synthetic construct
WPGQMKA

SEQ ID NO: 155031 - protein, 7 aa, synthetic construct
WPGTARS

SEQ ID NO: 155032 - protein, 7 aa, synthetic construct
WPGYAGG

SEQ ID NO: 155033 - protein, 7 aa, synthetic construct
WPHNNMK

SEQ ID NO: 155034 - protein, 7 aa, synthetic construct
WPHRDAH

SEQ ID NO: 155035 - protein, 7 aa, synthetic construct
WPIGNKA

SEQ ID NO: 155036 - protein, 7 aa, synthetic construct
WPKAHEK

SEQ ID NO: 155037 - protein, 7 aa, synthetic construct
WPKAPPS

SEQ ID NO: 155038 - protein, 7 aa, synthetic construct
WPKASRD

SEQ ID NO: 155039 - protein, 7 aa, synthetic construct
WPKDTTR

SEQ ID NO: 155040 - protein, 7 aa, synthetic construct
WPKDTYK

SEQ ID NO: 155041 - protein, 7 aa, synthetic construct
WPKENWA

SEQ ID NO: 155042 - protein, 7 aa, synthetic construct
WPKGDSR

SEQ ID NO: 155043 - protein, 7 aa, synthetic construct
WPKGSLN

SEQ ID NO: 155044 - protein, 7 aa, synthetic construct
WPKGSMA

SEQ ID NO: 155045 - protein, 7 aa, synthetic construct
WPKHIQG

SEQ ID NO: 155046 - protein, 7 aa, synthetic construct
WPKHQVG

SEQ ID NO: 155047 - protein, 7 aa, synthetic construct
WPKHSNA

SEQ ID NO: 155048 - protein, 7 aa, synthetic construct
WPKHTTS

SEQ ID NO: 155049 - protein, 7 aa, synthetic construct
WPKKDAM

SEQ ID NO: 155050 - protein, 7 aa, synthetic construct
WPKNEDF

SEQ ID NO: 155051 - protein, 7 aa, synthetic construct
WPKNEQK

SEQ ID NO: 155052 - protein, 7 aa, synthetic construct
WPKNVSV

SEQ ID NO: 155053 - protein, 7 aa, synthetic construct
WPKQQNM

SEQ ID NO: 155054 - protein, 7 aa, synthetic construct
WPKQRQE

SEQ ID NO: 155055 - protein, 7 aa, synthetic construct
WPKQSNI

SEQ ID NO: 155056 - protein, 7 aa, synthetic construct
WPKSPDR

SEQ ID NO: 155057 - protein, 7 aa, synthetic construct
WPKSQYP

SEQ ID NO: 155058 - protein, 7 aa, synthetic construct
WPKSSGS

SEQ ID NO: 155059 - protein, 7 aa, synthetic construct
WPKTADK

SEQ ID NO: 155060 - protein, 7 aa, synthetic construct
WPNAKLA

SEQ ID NO: 155061 - protein, 7 aa, synthetic construct
WPNKNTL

SEQ ID NO: 155062 - protein, 7 aa, synthetic construct
WPNNRNG

SEQ ID NO: 155063 - protein, 7 aa, synthetic construct
WPQKASH

SEQ ID NO: 155064 - protein, 7 aa, synthetic construct
WPQKVTG

SEQ ID NO: 155065 - protein, 7 aa, synthetic construct
WPQPNGK

SEQ ID NO: 155066 - protein, 7 aa, synthetic construct
WPQQRAS

SEQ ID NO: 155067 - protein, 7 aa, synthetic construct
WPQSVPK

SEQ ID NO: 155068 - protein, 7 aa, synthetic construct
WPREKTG

SEQ ID NO: 155069 - protein, 7 aa, synthetic construct
WPRGQNG

SEQ ID NO: 155070 - protein, 7 aa, synthetic construct
WPRSQNL

SEQ ID NO: 155071 - protein, 7 aa, synthetic construct
WPSKASL

SEQ ID NO: 155072 - protein, 7 aa, synthetic construct
WPSNKSS

SEQ ID NO: 155073 - protein, 7 aa, synthetic construct
WPSQIKS

SEQ ID NO: 155074 - protein, 7 aa, synthetic construct
WPSTHKS

SEQ ID NO: 155075 - protein, 7 aa, synthetic construct
WPTGNKA

SEQ ID NO: 155076 - protein, 7 aa, synthetic construct
WPTHKSA

SEQ ID NO: 155077 - protein, 7 aa, synthetic construct
WPTKIAN

SEQ ID NO: 155078 - protein, 7 aa, synthetic construct
WPTQNQR

SEQ ID NO: 155079 - protein, 7 aa, synthetic construct
WPTQVKA

SEQ ID NO: 155080 - protein, 7 aa, synthetic construct
WPTTRKE

SEQ ID NO: 155081 - protein, 7 aa, synthetic construct
WPTTTKG

SEQ ID NO: 155082 - protein, 7 aa, synthetic construct
WPVKAAN

SEQ ID NO: 155083 - protein, 7 aa, synthetic construct
WQAANTK

SEQ ID NO: 155084 - protein, 7 aa, synthetic construct
WQAAQNK

SEQ ID NO: 155085 - protein, 7 aa, synthetic construct
WQAATAK

SEQ ID NO: 155086 - protein, 7 aa, synthetic construct
WQAGIKN

SEQ ID NO: 155087 - protein, 7 aa, synthetic construct
WQAGTKS

SEQ ID NO: 155088 - protein, 7 aa, synthetic construct
WQAGTRV

SEQ ID NO: 155089 - protein, 7 aa, synthetic construct
WQAKRDS

SEQ ID NO: 155090 - protein, 7 aa, synthetic construct
WQANAVK

SEQ ID NO: 155091 - protein, 7 aa, synthetic construct
WQANGMK

SEQ ID NO: 155092 - protein, 7 aa, synthetic construct
WQANTPR

SEQ ID NO: 155093 - protein, 7 aa, synthetic construct
WQDNARK

SEQ ID NO: 155094 - protein, 7 aa, synthetic construct
WQDRDVF

SEQ ID NO: 155095 - protein, 7 aa, synthetic construct
WQEKNMK

SEQ ID NO: 155096 - protein, 7 aa, synthetic construct
WQEKRPV

SEQ ID NO: 155097 - protein, 7 aa, synthetic construct
WQGAPKN

SEQ ID NO: 155098 - protein, 7 aa, synthetic construct
WQGIKSS

SEQ ID NO: 155099 - protein, 7 aa, synthetic construct
WQGLKIS

SEQ ID NO: 155100 - protein, 7 aa, synthetic construct
WQGNTQR

SEQ ID NO: 155101 - protein, 7 aa, synthetic construct
WQGQIKS

SEQ ID NO: 155102 - protein, 7 aa, synthetic construct
WQGQRNM

SEQ ID NO: 155103 - protein, 7 aa, synthetic construct
WQGQVSK

SEQ ID NO: 155104 - protein, 7 aa, synthetic construct
WQGTANK

SEQ ID NO: 155105 - protein, 7 aa, synthetic construct
WQGTATK

SEQ ID NO: 155106 - protein, 7 aa, synthetic construct
WQGTNQK

SEQ ID NO: 155107 - protein, 7 aa, synthetic construct
WQGVKPQ

SEQ ID NO: 155108 - protein, 7 aa, synthetic construct
WQGVMKQ

SEQ ID NO: 155109 - protein, 7 aa, synthetic construct
WQHNKSV

SEQ ID NO: 155110 - protein, 7 aa, synthetic construct
WQKDDKR

SEQ ID NO: 155111 - protein, 7 aa, synthetic construct
WQKELRA

SEQ ID NO: 155112 - protein, 7 aa, synthetic construct
WQKERVV

SEQ ID NO: 155113 - protein, 7 aa, synthetic construct
WQKFQKD

SEQ ID NO: 155114 - protein, 7 aa, synthetic construct
WQKGFAQ

SEQ ID NO: 155115 - protein, 7 aa, synthetic construct
WQKGGDK

SEQ ID NO: 155116 - protein, 7 aa, synthetic construct
WQKGIGG

SEQ ID NO: 155117 - protein, 7 aa, synthetic construct
WQKGNQL

SEQ ID NO: 155118 - protein, 7 aa, synthetic construct
WQKHIKD

SEQ ID NO: 155119 - protein, 7 aa, synthetic construct
WQKIGVA

SEQ ID NO: 155120 - protein, 7 aa, synthetic construct
WQKITTG

SEQ ID NO: 155121 - protein, 7 aa, synthetic construct
WQKKDAV

SEQ ID NO: 155122 - protein, 7 aa, synthetic construct
WQKLQIN

SEQ ID NO: 155123 - protein, 7 aa, synthetic construct
WQKMQHT

SEQ ID NO: 155124 - protein, 7 aa, synthetic construct
WQKNIPN

SEQ ID NO: 155125 - protein, 7 aa, synthetic construct
WQKPSLN

SEQ ID NO: 155126 - protein, 7 aa, synthetic construct
WQKPVNG

SEQ ID NO: 155127 - protein, 7 aa, synthetic construct
WQKQMGG

SEQ ID NO: 155128 - protein, 7 aa, synthetic construct
WQKQQSI

SEQ ID NO: 155129 - protein, 7 aa, synthetic construct
WQKQQVT

SEQ ID NO: 155130 - protein, 7 aa, synthetic construct
WQKTRDG

SEQ ID NO: 155131 - protein, 7 aa, synthetic construct
WQKVANQ

SEQ ID NO: 155132 - protein, 7 aa, synthetic construct
WQKVTTT

SEQ ID NO: 155133 - protein, 7 aa, synthetic construct
WQKVVSG

SEQ ID NO: 155134 - protein, 7 aa, synthetic construct
WQLNRGA

SEQ ID NO: 155135 - protein, 7 aa, synthetic construct
WQMRGRE

SEQ ID NO: 155136 - protein, 7 aa, synthetic construct
WQNLTTK

SEQ ID NO: 155137 - protein, 7 aa, synthetic construct
WQNPKLG

SEQ ID NO: 155138 - protein, 7 aa, synthetic construct
WQNTRNT

SEQ ID NO: 155139 - protein, 7 aa, synthetic construct
WQNVTTK

SEQ ID NO: 155140 - protein, 7 aa, synthetic construct
WQPKERG

SEQ ID NO: 155141 - protein, 7 aa, synthetic construct
WQQAEKK

SEQ ID NO: 155142 - protein, 7 aa, synthetic construct
WQQGIAR

SEQ ID NO: 155143 - protein, 7 aa, synthetic construct
WQQGITR

SEQ ID NO: 155144 - protein, 7 aa, synthetic construct
WQQGQSK

SEQ ID NO: 155145 - protein, 7 aa, synthetic construct
WQQHGKV

SEQ ID NO: 155146 - protein, 7 aa, synthetic construct
WQQHKER

SEQ ID NO: 155147 - protein, 7 aa, synthetic construct
WQQKHVS

SEQ ID NO: 155148 - protein, 7 aa, synthetic construct
WQQSHGK

SEQ ID NO: 155149 - protein, 7 aa, synthetic construct
WQTHVKA

SEQ ID NO: 155150 - protein, 7 aa, synthetic construct
WQTLGPN

SEQ ID NO: 155151 - protein, 7 aa, synthetic construct
WQTLKVQ

SEQ ID NO: 155152 - protein, 7 aa, synthetic construct
WQTNAVK

SEQ ID NO: 155153 - protein, 7 aa, synthetic construct
WQVKSAN

SEQ ID NO: 155154 - protein, 7 aa, synthetic construct
WQYKSQN

SEQ ID NO: 155155 - protein, 7 aa, synthetic construct
WQYSKQS

SEQ ID NO: 155156 - protein, 7 aa, synthetic construct
WRAAKEG

SEQ ID NO: 155157 - protein, 7 aa, synthetic construct
WRDQQMK

SEQ ID NO: 155158 - protein, 7 aa, synthetic construct
WRDSNKI

SEQ ID NO: 155159 - protein, 7 aa, synthetic construct
WREDPTW

SEQ ID NO: 155160 - protein, 7 aa, synthetic construct
WREMKAA

SEQ ID NO: 155161 - protein, 7 aa, synthetic construct
WREMTRS

SEQ ID NO: 155162 - protein, 7 aa, synthetic construct
WREMTRT

SEQ ID NO: 155163 - protein, 7 aa, synthetic construct
WRGAGDK

SEQ ID NO: 155164 - protein, 7 aa, synthetic construct
WRGEPNK

SEQ ID NO: 155165 - protein, 7 aa, synthetic construct
WRGMKEG

SEQ ID NO: 155166 - protein, 7 aa, synthetic construct
WRGTKEG

SEQ ID NO: 155167 - protein, 7 aa, synthetic construct
WRGTNIS

SEQ ID NO: 155168 - protein, 7 aa, synthetic construct
WRHTQAG

SEQ ID NO: 155169 - protein, 7 aa, synthetic construct
WRKDKDI

SEQ ID NO: 155170 - protein, 7 aa, synthetic construct
WRKDVTS

SEQ ID NO: 155171 - protein, 7 aa, synthetic construct
WRKPAAD

SEQ ID NO: 155172 - protein, 7 aa, synthetic construct
WRKSNFE

SEQ ID NO: 155173 - protein, 7 aa, synthetic construct
WRMSTNA

SEQ ID NO: 155174 - protein, 7 aa, synthetic construct
WRNAQSQ

SEQ ID NO: 155175 - protein, 7 aa, synthetic construct
WRNATNG

SEQ ID NO: 155176 - protein, 7 aa, synthetic construct
WRNGRDT

SEQ ID NO: 155177 - protein, 7 aa, synthetic construct
WRNMDRG

SEQ ID NO: 155178 - protein, 7 aa, synthetic construct
WRNPSDD

SEQ ID NO: 155179 - protein, 7 aa, synthetic construct
WRNTGAV

SEQ ID NO: 155180 - protein, 7 aa, synthetic construct
WRPSKDG

SEQ ID NO: 155181 - protein, 7 aa, synthetic construct
WRQLTQS

SEQ ID NO: 155182 - protein, 7 aa, synthetic construct
WRQNMVT

SEQ ID NO: 155183 - protein, 7 aa, synthetic construct
WRQSSPH

SEQ ID NO: 155184 - protein, 7 aa, synthetic construct
WRQVNDK

SEQ ID NO: 155185 - protein, 7 aa, synthetic construct
WRSQADR

SEQ ID NO: 155186 - protein, 7 aa, synthetic construct
WRSSTAN

SEQ ID NO: 155187 - protein, 7 aa, synthetic construct
WRSSTNH

SEQ ID NO: 155188 - protein, 7 aa, synthetic construct
WRTKEGG

SEQ ID NO: 155189 - protein, 7 aa, synthetic construct
WRVNGGG

SEQ ID NO: 155190 - protein, 7 aa, synthetic construct
WSADRHM

SEQ ID NO: 155191 - protein, 7 aa, synthetic construct
WSANSTK

SEQ ID NO: 155192 - protein, 7 aa, synthetic construct
WSAQQMK

SEQ ID NO: 155193 - protein, 7 aa, synthetic construct
WSDEGRV

SEQ ID NO: 155194 - protein, 7 aa, synthetic construct
WSDKLGR

SEQ ID NO: 155195 - protein, 7 aa, synthetic construct
WSDKRKD

SEQ ID NO: 155196 - protein, 7 aa, synthetic construct
WSDKRPI

SEQ ID NO: 155197 - protein, 7 aa, synthetic construct
WSDKSSK

SEQ ID NO: 155198 - protein, 7 aa, synthetic construct
WSDNRRM

SEQ ID NO: 155199 - protein, 7 aa, synthetic construct
WSDTTKK

SEQ ID NO: 155200 - protein, 7 aa, synthetic construct
WSGKERN

SEQ ID NO: 155201 - protein, 7 aa, synthetic construct
WSGKHIG

SEQ ID NO: 155202 - protein, 7 aa, synthetic construct
WSGKMGV

SEQ ID NO: 155203 - protein, 7 aa, synthetic construct
WSGKMMN

SEQ ID NO: 155204 - protein, 7 aa, synthetic construct
WSGKPAY

SEQ ID NO: 155205 - protein, 7 aa, synthetic construct
WSGTKMV

SEQ ID NO: 155206 - protein, 7 aa, synthetic construct
WSHASNK

SEQ ID NO: 155207 - protein, 7 aa, synthetic construct
WSKDQNR

SEQ ID NO: 155208 - protein, 7 aa, synthetic construct
WSKEQVR

SEQ ID NO: 155209 - protein, 7 aa, synthetic construct
WSKGRDN

SEQ ID NO: 155210 - protein, 7 aa, synthetic construct
WSKIAMS

SEQ ID NO: 155211 - protein, 7 aa, synthetic construct
WSKKADL

SEQ ID NO: 155212 - protein, 7 aa, synthetic construct
WSKKADM

SEQ ID NO: 155213 - protein, 7 aa, synthetic construct
WSKMRGE

SEQ ID NO: 155214 - protein, 7 aa, synthetic construct
WSKNALN

SEQ ID NO: 155215 - protein, 7 aa, synthetic construct
WSKNLQT

SEQ ID NO: 155216 - protein, 7 aa, synthetic construct
WSKPIQG

SEQ ID NO: 155217 - protein, 7 aa, synthetic construct
WSKPMRD

SEQ ID NO: 155218 - protein, 7 aa, synthetic construct
WSKQIGM

SEQ ID NO: 155219 - protein, 7 aa, synthetic construct
WSKREVS

SEQ ID NO: 155220 - protein, 7 aa, synthetic construct
WSKSAVV

SEQ ID NO: 155221 - protein, 7 aa, synthetic construct
WSKVKDV

SEQ ID NO: 155222 - protein, 7 aa, synthetic construct
WSKVPGQ

SEQ ID NO: 155223 - protein, 7 aa, synthetic construct
WSLKTAG

SEQ ID NO: 155224 - protein, 7 aa, synthetic construct
WSMKSKD

SEQ ID NO: 155225 - protein, 7 aa, synthetic construct
WSNKGQL

SEQ ID NO: 155226 - protein, 7 aa, synthetic construct
WSNKVAV

SEQ ID NO: 155227 - protein, 7 aa, synthetic construct
WSNNRNV

SEQ ID NO: 155228 - protein, 7 aa, synthetic construct
WSNVKAI

SEQ ID NO: 155229 - protein, 7 aa, synthetic construct
WSPKVAT

SEQ ID NO: 155230 - protein, 7 aa, synthetic construct
WSQHIPK

SEQ ID NO: 155231 - protein, 7 aa, synthetic construct
WSQMQKT

SEQ ID NO: 155232 - protein, 7 aa, synthetic construct
WSQQQAR

SEQ ID NO: 155233 - protein, 7 aa, synthetic construct
WSQRANT

SEQ ID NO: 155234 - protein, 7 aa, synthetic construct
WSREKMS

SEQ ID NO: 155235 - protein, 7 aa, synthetic construct
WSRGQTL

SEQ ID NO: 155236 - protein, 7 aa, synthetic construct
WSSNIDA

SEQ ID NO: 155237 - protein, 7 aa, synthetic construct
WSSNRNG

SEQ ID NO: 155238 - protein, 7 aa, synthetic construct
WSSNRTQ

SEQ ID NO: 155239 - protein, 7 aa, synthetic construct
WSSSKSY

SEQ ID NO: 155240 - protein, 7 aa, synthetic construct
WSSTRAH

SEQ ID NO: 155241 - protein, 7 aa, synthetic construct
WSTKSIV

SEQ ID NO: 155242 - protein, 7 aa, synthetic construct
WSTNATK

SEQ ID NO: 155243 - protein, 7 aa, synthetic construct
WSTQHKA

SEQ ID NO: 155244 - protein, 7 aa, synthetic construct
WSTQQGK

SEQ ID NO: 155245 - protein, 7 aa, synthetic construct
WSVIKKE

SEQ ID NO: 155246 - protein, 7 aa, synthetic construct
WSVKQKD

SEQ ID NO: 155247 - protein, 7 aa, synthetic construct
WTAALKG

SEQ ID NO: 155248 - protein, 7 aa, synthetic construct
WTAGMAK

SEQ ID NO: 155249 - protein, 7 aa, synthetic construct
WTAHIKN

SEQ ID NO: 155250 - protein, 7 aa, synthetic construct
WTAKGDK

SEQ ID NO: 155251 - protein, 7 aa, synthetic construct
WTAKGPT

SEQ ID NO: 155252 - protein, 7 aa, synthetic construct
WTANTPR

SEQ ID NO: 155253 - protein, 7 aa, synthetic construct
WTAQEKK

SEQ ID NO: 155254 - protein, 7 aa, synthetic construct
WTAQQQR

SEQ ID NO: 155255 - protein, 7 aa, synthetic construct
WTARDKG

SEQ ID NO: 155256 - protein, 7 aa, synthetic construct
WTDNSNR

SEQ ID NO: 155257 - protein, 7 aa, synthetic construct
WTEANKK

SEQ ID NO: 155258 - protein, 7 aa, synthetic construct
WTGGSQK

SEQ ID NO: 155259 - protein, 7 aa, synthetic construct
WTGIKQN

SEQ ID NO: 155260 - protein, 7 aa, synthetic construct
WTGNAVK

SEQ ID NO: 155261 - protein, 7 aa, synthetic construct
WTGNTKG

SEQ ID NO: 155262 - protein, 7 aa, synthetic construct
WTKADKS

SEQ ID NO: 155263 - protein, 7 aa, synthetic construct
WTKAHKD

SEQ ID NO: 155264 - protein, 7 aa, synthetic construct
WTKAPHS

SEQ ID NO: 155265 - protein, 7 aa, synthetic construct
WTKDSNK

SEQ ID NO: 155266 - protein, 7 aa, synthetic construct
WTKDTRN

SEQ ID NO: 155267 - protein, 7 aa, synthetic construct
WTKEDKR

SEQ ID NO: 155268 - protein, 7 aa, synthetic construct
WTKEFPR

SEQ ID NO: 155269 - protein, 7 aa, synthetic construct
WTKEMGK

SEQ ID NO: 155270 - protein, 7 aa, synthetic construct
WTKENKN

SEQ ID NO: 155271 - protein, 7 aa, synthetic construct
WTKENRG

SEQ ID NO: 155272 - protein, 7 aa, synthetic construct
WTKETMR

SEQ ID NO: 155273 - protein, 7 aa, synthetic construct
WTKGAGT

SEQ ID NO: 155274 - protein, 7 aa, synthetic construct
WTKGMIG

SEQ ID NO: 155275 - protein, 7 aa, synthetic construct
WTKGNQQ

SEQ ID NO: 155276 - protein, 7 aa, synthetic construct
WTKGSMQ

SEQ ID NO: 155277 - protein, 7 aa, synthetic construct
WTKHALA

SEQ ID NO: 155278 - protein, 7 aa, synthetic construct
WTKHEKQ

SEQ ID NO: 155279 - protein, 7 aa, synthetic construct
WTKHLPA

SEQ ID NO: 155280 - protein, 7 aa, synthetic construct
WTKINQG

SEQ ID NO: 155281 - protein, 7 aa, synthetic construct
WTKLSTG

SEQ ID NO: 155282 - protein, 7 aa, synthetic construct
WTKLTSA

SEQ ID NO: 155283 - protein, 7 aa, synthetic construct
WTKLTSS

SEQ ID NO: 155284 - protein, 7 aa, synthetic construct
WTKMNRE

SEQ ID NO: 155285 - protein, 7 aa, synthetic construct
WTKNQEK

SEQ ID NO: 155286 - protein, 7 aa, synthetic construct
WTKNQSV

SEQ ID NO: 155287 - protein, 7 aa, synthetic construct
WTKNTLQ

SEQ ID NO: 155288 - protein, 7 aa, synthetic construct
WTKQEVK

SEQ ID NO: 155289 - protein, 7 aa, synthetic construct
WTKQKGD

SEQ ID NO: 155290 - protein, 7 aa, synthetic construct
WTKQVNN

SEQ ID NO: 155291 - protein, 7 aa, synthetic construct
WTKRETN

SEQ ID NO: 155292 - protein, 7 aa, synthetic construct
WTKSQPG

SEQ ID NO: 155293 - protein, 7 aa, synthetic construct
WTKTGPV

SEQ ID NO: 155294 - protein, 7 aa, synthetic construct
WTKVNAG

SEQ ID NO: 155295 - protein, 7 aa, synthetic construct
WTNGNNK

SEQ ID NO: 155296 - protein, 7 aa, synthetic construct
WTNKEQK

SEQ ID NO: 155297 - protein, 7 aa, synthetic construct
WTNKMAV

SEQ ID NO: 155298 - protein, 7 aa, synthetic construct
WTNNAPK

SEQ ID NO: 155299 - protein, 7 aa, synthetic construct
WTPKQGG

SEQ ID NO: 155300 - protein, 7 aa, synthetic construct
WTQHAKG

SEQ ID NO: 155301 - protein, 7 aa, synthetic construct
WTQNSKL

SEQ ID NO: 155302 - protein, 7 aa, synthetic construct
WTQSSKG

SEQ ID NO: 155303 - protein, 7 aa, synthetic construct
WTRTEKN

SEQ ID NO: 155304 - protein, 7 aa, synthetic construct
WTSGINT

SEQ ID NO: 155305 - protein, 7 aa, synthetic construct
WTSQKSG

SEQ ID NO: 155306 - protein, 7 aa, synthetic construct
WTSVKNV

SEQ ID NO: 155307 - protein, 7 aa, synthetic construct
WTTAKHG

SEQ ID NO: 155308 - protein, 7 aa, synthetic construct
WTTKHGG

SEQ ID NO: 155309 - protein, 7 aa, synthetic construct
WTTKQIA

SEQ ID NO: 155310 - protein, 7 aa, synthetic construct
WVAKNQN

SEQ ID NO: 155311 - protein, 7 aa, synthetic construct
WVAQNVK

SEQ ID NO: 155312 - protein, 7 aa, synthetic construct
WVDKAGK

SEQ ID NO: 155313 - protein, 7 aa, synthetic construct
WVDRIGK

SEQ ID NO: 155314 - protein, 7 aa, synthetic construct
WVGGVMK

SEQ ID NO: 155315 - protein, 7 aa, synthetic construct
WVGNAKQ

SEQ ID NO: 155316 - protein, 7 aa, synthetic construct
WVGNAMK

SEQ ID NO: 155317 - protein, 7 aa, synthetic construct
WVGQAKG

SEQ ID NO: 155318 - protein, 7 aa, synthetic construct
WVGQNVK

SEQ ID NO: 155319 - protein, 7 aa, synthetic construct
WVGQSKG

SEQ ID NO: 155320 - protein, 7 aa, synthetic construct
WVGSIKS

SEQ ID NO: 155321 - protein, 7 aa, synthetic construct
WVGSKIG

SEQ ID NO: 155322 - protein, 7 aa, synthetic construct
WVKAVPS

SEQ ID NO: 155323 - protein, 7 aa, synthetic construct
WVKDTQR

SEQ ID NO: 155324 - protein, 7 aa, synthetic construct
WVKESLR

SEQ ID NO: 155325 - protein, 7 aa, synthetic construct
WVKGTSL

SEQ ID NO: 155326 - protein, 7 aa, synthetic construct
WVKNASQ

SEQ ID NO: 155327 - protein, 7 aa, synthetic construct
WVKNLNM

SEQ ID NO: 155328 - protein, 7 aa, synthetic construct
WVKNQNI

SEQ ID NO: 155329 - protein, 7 aa, synthetic construct
WVKNTPN

SEQ ID NO: 155330 - protein, 7 aa, synthetic construct
WVKNVSL

SEQ ID NO: 155331 - protein, 7 aa, synthetic construct
WVKPANA

SEQ ID NO: 155332 - protein, 7 aa, synthetic construct
WVKPAQA

SEQ ID NO: 155333 - protein, 7 aa, synthetic construct
WVKPSTQ

SEQ ID NO: 155334 - protein, 7 aa, synthetic construct
WVKQTAQ

SEQ ID NO: 155335 - protein, 7 aa, synthetic construct
WVKQVGS

SEQ ID NO: 155336 - protein, 7 aa, synthetic construct
WVKSPQT

SEQ ID NO: 155337 - protein, 7 aa, synthetic construct
WVKSSSA

SEQ ID NO: 155338 - protein, 7 aa, synthetic construct
WVKSVPN

SEQ ID NO: 155339 - protein, 7 aa, synthetic construct
WVKTEAR

SEQ ID NO: 155340 - protein, 7 aa, synthetic construct
WVKTLKD

SEQ ID NO: 155341 - protein, 7 aa, synthetic construct
WVKWQDD

SEQ ID NO: 155342 - protein, 7 aa, synthetic construct
WVNGANK

SEQ ID NO: 155343 - protein, 7 aa, synthetic construct
WVNQKGG

SEQ ID NO: 155344 - protein, 7 aa, synthetic construct
WVQHEKG

SEQ ID NO: 155345 - protein, 7 aa, synthetic construct
WVQSTKA

SEQ ID NO: 155346 - protein, 7 aa, synthetic construct
WVSHQQK

SEQ ID NO: 155347 - protein, 7 aa, synthetic construct
WVSSSKS

SEQ ID NO: 155348 - protein, 7 aa, synthetic construct
WYKSATQ

SEQ ID NO: 155349 - protein, 7 aa, synthetic construct
WYKSQGG

SEQ ID NO: 155350 - protein, 7 aa, synthetic construct
YAAAKNY

SEQ ID NO: 155351 - protein, 7 aa, synthetic construct
YAAEVRK

SEQ ID NO: 155352 - protein, 7 aa, synthetic construct
YAAGHKV

SEQ ID NO: 155353 - protein, 7 aa, synthetic construct
YAAGTRL

SEQ ID NO: 155354 - protein, 7 aa, synthetic construct
YAAHANK

SEQ ID NO: 155355 - protein, 7 aa, synthetic construct
YAAHIKM

SEQ ID NO: 155356 - protein, 7 aa, synthetic construct
YAAHIKT

SEQ ID NO: 155357 - protein, 7 aa, synthetic construct
YAAHISK

SEQ ID NO: 155358 - protein, 7 aa, synthetic construct
YAAHNSK

SEQ ID NO: 155359 - protein, 7 aa, synthetic construct
YAAKGYS

SEQ ID NO: 155360 - protein, 7 aa, synthetic construct
YAAKMDR

SEQ ID NO: 155361 - protein, 7 aa, synthetic construct
YAAMKGL

SEQ ID NO: 155362 - protein, 7 aa, synthetic construct
YAAMKIP

SEQ ID NO: 155363 - protein, 7 aa, synthetic construct
YAAMSRP

SEQ ID NO: 155364 - protein, 7 aa, synthetic construct
YAANKFI

SEQ ID NO: 155365 - protein, 7 aa, synthetic construct
YAANPVR

SEQ ID NO: 155366 - protein, 7 aa, synthetic construct
YAAQAPR

SEQ ID NO: 155367 - protein, 7 aa, synthetic construct
YAARMLS

SEQ ID NO: 155368 - protein, 7 aa, synthetic construct
YAATHRS

SEQ ID NO: 155369 - protein, 7 aa, synthetic construct
YADKRNY

SEQ ID NO: 155370 - protein, 7 aa, synthetic construct
YADKWKQ

SEQ ID NO: 155371 - protein, 7 aa, synthetic construct
YADMKYK

SEQ ID NO: 155372 - protein, 7 aa, synthetic construct
YADWTAK

SEQ ID NO: 155373 - protein, 7 aa, synthetic construct
YAEERYA

SEQ ID NO: 155374 - protein, 7 aa, synthetic construct
YAEFKAK

SEQ ID NO: 155375 - protein, 7 aa, synthetic construct
YAEKMSK

SEQ ID NO: 155376 - protein, 7 aa, synthetic construct
YAERNGK

SEQ ID NO: 155377 - protein, 7 aa, synthetic construct
YAERSKV

SEQ ID NO: 155378 - protein, 7 aa, synthetic construct
YAFKQAS

SEQ ID NO: 155379 - protein, 7 aa, synthetic construct
YAGAAIR

SEQ ID NO: 155380 - protein, 7 aa, synthetic construct
YAGASSK

SEQ ID NO: 155381 - protein, 7 aa, synthetic construct
YAGFNAK

SEQ ID NO: 155382 - protein, 7 aa, synthetic construct
YAGGFQR

SEQ ID NO: 155383 - protein, 7 aa, synthetic construct
YAGGFTR

SEQ ID NO: 155384 - protein, 7 aa, synthetic construct
YAGGKNT

SEQ ID NO: 155385 - protein, 7 aa, synthetic construct
YAGGSKI

SEQ ID NO: 155386 - protein, 7 aa, synthetic construct
YAGHNKA

SEQ ID NO: 155387 - protein, 7 aa, synthetic construct
YAGHRNN

SEQ ID NO: 155388 - protein, 7 aa, synthetic construct
YAGHRYV

SEQ ID NO: 155389 - protein, 7 aa, synthetic construct
YAGHVKG

SEQ ID NO: 155390 - protein, 7 aa, synthetic construct
YAGKPKE

SEQ ID NO: 155391 - protein, 7 aa, synthetic construct
YAGMSKH

SEQ ID NO: 155392 - protein, 7 aa, synthetic construct
YAGMTPR

SEQ ID NO: 155393 - protein, 7 aa, synthetic construct
YAGNERK

SEQ ID NO: 155394 - protein, 7 aa, synthetic construct
YAGNNKH

SEQ ID NO: 155395 - protein, 7 aa, synthetic construct
YAGPNRP

SEQ ID NO: 155396 - protein, 7 aa, synthetic construct
YAGPPAK

SEQ ID NO: 155397 - protein, 7 aa, synthetic construct
YAGQHRS

SEQ ID NO: 155398 - protein, 7 aa, synthetic construct
YAGQKIL

SEQ ID NO: 155399 - protein, 7 aa, synthetic construct
YAGQKYT

SEQ ID NO: 155400 - protein, 7 aa, synthetic construct
YAGRHAP

SEQ ID NO: 155401 - protein, 7 aa, synthetic construct
YAGRIVP

SEQ ID NO: 155402 - protein, 7 aa, synthetic construct
YAGRQDK

SEQ ID NO: 155403 - protein, 7 aa, synthetic construct
YAGSHTR

SEQ ID NO: 155404 - protein, 7 aa, synthetic construct
YAGSMRN

SEQ ID NO: 155405 - protein, 7 aa, synthetic construct
YAGTAKL

SEQ ID NO: 155406 - protein, 7 aa, synthetic construct
YAGTHRN

SEQ ID NO: 155407 - protein, 7 aa, synthetic construct
YAGTHRP

SEQ ID NO: 155408 - protein, 7 aa, synthetic construct
YAGTPRI

SEQ ID NO: 155409 - protein, 7 aa, synthetic construct
YAGTTRP

SEQ ID NO: 155410 - protein, 7 aa, synthetic construct
YAGTVRA

SEQ ID NO: 155411 - protein, 7 aa, synthetic construct
YAGVRST

SEQ ID NO: 155412 - protein, 7 aa, synthetic construct
YAGYKQI

SEQ ID NO: 155413 - protein, 7 aa, synthetic construct
YAHAKVP

SEQ ID NO: 155414 - protein, 7 aa, synthetic construct
YAHARQQ

SEQ ID NO: 155415 - protein, 7 aa, synthetic construct
YAHGTGK

SEQ ID NO: 155416 - protein, 7 aa, synthetic construct
YAHIRTA

SEQ ID NO: 155417 - protein, 7 aa, synthetic construct
YAHKAFA

SEQ ID NO: 155418 - protein, 7 aa, synthetic construct
YAHKIHA

SEQ ID NO: 155419 - protein, 7 aa, synthetic construct
YAHKKDT

SEQ ID NO: 155420 - protein, 7 aa, synthetic construct
YAHKLER

SEQ ID NO: 155421 - protein, 7 aa, synthetic construct
YAHKMRE

SEQ ID NO: 155422 - protein, 7 aa, synthetic construct
YAHKPSM

SEQ ID NO: 155423 - protein, 7 aa, synthetic construct
YAHKQAT

SEQ ID NO: 155424 - protein, 7 aa, synthetic construct
YAHLARA

SEQ ID NO: 155425 - protein, 7 aa, synthetic construct
YAHMKHQ

SEQ ID NO: 155426 - protein, 7 aa, synthetic construct
YAHMTKT

SEQ ID NO: 155427 - protein, 7 aa, synthetic construct
YAHNTVK

SEQ ID NO: 155428 - protein, 7 aa, synthetic construct
YAHQTTR

SEQ ID NO: 155429 - protein, 7 aa, synthetic construct
YAHSINK

SEQ ID NO: 155430 - protein, 7 aa, synthetic construct
YAHVKKD

SEQ ID NO: 155431 - protein, 7 aa, synthetic construct
YAHVSLK

SEQ ID NO: 155432 - protein, 7 aa, synthetic construct
YAISHQK

SEQ ID NO: 155433 - protein, 7 aa, synthetic construct
YAKASHQ

SEQ ID NO: 155434 - protein, 7 aa, synthetic construct
YAKERLT

SEQ ID NO: 155435 - protein, 7 aa, synthetic construct
YAKFAGQ

SEQ ID NO: 155436 - protein, 7 aa, synthetic construct
YAKGFGS

SEQ ID NO: 155437 - protein, 7 aa, synthetic construct
YAKGVNY

SEQ ID NO: 155438 - protein, 7 aa, synthetic construct
YAKHASM

SEQ ID NO: 155439 - protein, 7 aa, synthetic construct
YAKHTGH

SEQ ID NO: 155440 - protein, 7 aa, synthetic construct
YAKIAPV

SEQ ID NO: 155441 - protein, 7 aa, synthetic construct
YAKIDKY

SEQ ID NO: 155442 - protein, 7 aa, synthetic construct
YAKIDRT

SEQ ID NO: 155443 - protein, 7 aa, synthetic construct
YAKLHGV

SEQ ID NO: 155444 - protein, 7 aa, synthetic construct
YAKLSPV

SEQ ID NO: 155445 - protein, 7 aa, synthetic construct
YAKMAFD

SEQ ID NO: 155446 - protein, 7 aa, synthetic construct
YAKMDIR

SEQ ID NO: 155447 - protein, 7 aa, synthetic construct
YAKMPYP

SEQ ID NO: 155448 - protein, 7 aa, synthetic construct
YAKMYPT

SEQ ID NO: 155449 - protein, 7 aa, synthetic construct
YAKNAAY

SEQ ID NO: 155450 - protein, 7 aa, synthetic construct
YAKNERA

SEQ ID NO: 155451 - protein, 7 aa, synthetic construct
YAKNKDM

SEQ ID NO: 155452 - protein, 7 aa, synthetic construct
YAKNPQL

SEQ ID NO: 155453 - protein, 7 aa, synthetic construct
YAKPHTL

SEQ ID NO: 155454 - protein, 7 aa, synthetic construct
YAKPNMI

SEQ ID NO: 155455 - protein, 7 aa, synthetic construct
YAKPYLS

SEQ ID NO: 155456 - protein, 7 aa, synthetic construct
YAKQDGR

SEQ ID NO: 155457 - protein, 7 aa, synthetic construct
YAKQGFT

SEQ ID NO: 155458 - protein, 7 aa, synthetic construct
YAKQHFS

SEQ ID NO: 155459 - protein, 7 aa, synthetic construct
YAKQIHV

SEQ ID NO: 155460 - protein, 7 aa, synthetic construct
YAKQNHL

SEQ ID NO: 155461 - protein, 7 aa, synthetic construct
YAKQRDM

SEQ ID NO: 155462 - protein, 7 aa, synthetic construct
YAKRDVI

SEQ ID NO: 155463 - protein, 7 aa, synthetic construct
YAKRPLE

SEQ ID NO: 155464 - protein, 7 aa, synthetic construct
YAKRQGE

SEQ ID NO: 155465 - protein, 7 aa, synthetic construct
YAKRTEV

SEQ ID NO: 155466 - protein, 7 aa, synthetic construct
YAKSDYK

SEQ ID NO: 155467 - protein, 7 aa, synthetic construct
YAKSEMR

SEQ ID NO: 155468 - protein, 7 aa, synthetic construct
YAKSMGL

SEQ ID NO: 155469 - protein, 7 aa, synthetic construct
YAKSSGF

SEQ ID NO: 155470 - protein, 7 aa, synthetic construct
YAKTDRT

SEQ ID NO: 155471 - protein, 7 aa, synthetic construct
YAKTETK

SEQ ID NO: 155472 - protein, 7 aa, synthetic construct
YAKYTHS

SEQ ID NO: 155473 - protein, 7 aa, synthetic construct
YAKYVQS

SEQ ID NO: 155474 - protein, 7 aa, synthetic construct
YALGAKQ

SEQ ID NO: 155475 - protein, 7 aa, synthetic construct
YALKAER

SEQ ID NO: 155476 - protein, 7 aa, synthetic construct
YALKNPP

SEQ ID NO: 155477 - protein, 7 aa, synthetic construct
YALNHTR

SEQ ID NO: 155478 - protein, 7 aa, synthetic construct
YALQNTR

SEQ ID NO: 155479 - protein, 7 aa, synthetic construct
YALRIKD

SEQ ID NO: 155480 - protein, 7 aa, synthetic construct
YAMHRSV

SEQ ID NO: 155481 - protein, 7 aa, synthetic construct
YAMKHVA

SEQ ID NO: 155482 - protein, 7 aa, synthetic construct
YAMKIHP

SEQ ID NO: 155483 - protein, 7 aa, synthetic construct
YAMMKEK

SEQ ID NO: 155484 - protein, 7 aa, synthetic construct
YAMNNAK

SEQ ID NO: 155485 - protein, 7 aa, synthetic construct
YAMNTMR

SEQ ID NO: 155486 - protein, 7 aa, synthetic construct
YAMPPKP

SEQ ID NO: 155487 - protein, 7 aa, synthetic construct
YANHNKF

SEQ ID NO: 155488 - protein, 7 aa, synthetic construct
YANMSPR

SEQ ID NO: 155489 - protein, 7 aa, synthetic construct
YANNGYK

SEQ ID NO: 155490 - protein, 7 aa, synthetic construct
YANNKKD

SEQ ID NO: 155491 - protein, 7 aa, synthetic construct
YANNSQR

SEQ ID NO: 155492 - protein, 7 aa, synthetic construct
YANQNYK

SEQ ID NO: 155493 - protein, 7 aa, synthetic construct
YANRHVV

SEQ ID NO: 155494 - protein, 7 aa, synthetic construct
YANSHYQ

SEQ ID NO: 155495 - protein, 7 aa, synthetic construct
YANSKRD

SEQ ID NO: 155496 - protein, 7 aa, synthetic construct
YANTMNR

SEQ ID NO: 155497 - protein, 7 aa, synthetic construct
YANTQTR

SEQ ID NO: 155498 - protein, 7 aa, synthetic construct
YANTYPK

SEQ ID NO: 155499 - protein, 7 aa, synthetic construct
YANVVQR

SEQ ID NO: 155500 - protein, 7 aa, synthetic construct
YAPAKQY

SEQ ID NO: 155501 - protein, 7 aa, synthetic construct
YAPHGSR

SEQ ID NO: 155502 - protein, 7 aa, synthetic construct
YAPNALR

SEQ ID NO: 155503 - protein, 7 aa, synthetic construct
YAPNQLR

SEQ ID NO: 155504 - protein, 7 aa, synthetic construct
YAPNYTK

SEQ ID NO: 155505 - protein, 7 aa, synthetic construct
YAPRHIQ

SEQ ID NO: 155506 - protein, 7 aa, synthetic construct
YAPRQGM

SEQ ID NO: 155507 - protein, 7 aa, synthetic construct
YAPRTIT

SEQ ID NO: 155508 - protein, 7 aa, synthetic construct
YAPSHTK

SEQ ID NO: 155509 - protein, 7 aa, synthetic construct
YAPSKQF

SEQ ID NO: 155510 - protein, 7 aa, synthetic construct
YAQAAQR

SEQ ID NO: 155511 - protein, 7 aa, synthetic construct
YAQGGAR

SEQ ID NO: 155512 - protein, 7 aa, synthetic construct
YAQGMMR

SEQ ID NO: 155513 - protein, 7 aa, synthetic construct
YAQHATR

SEQ ID NO: 155514 - protein, 7 aa, synthetic construct
YAQHIQK

SEQ ID NO: 155515 - protein, 7 aa, synthetic construct
YAQKNHI

SEQ ID NO: 155516 - protein, 7 aa, synthetic construct
YAQKSLH

SEQ ID NO: 155517 - protein, 7 aa, synthetic construct
YAQMHPK

SEQ ID NO: 155518 - protein, 7 aa, synthetic construct
YAQNQQK

SEQ ID NO: 155519 - protein, 7 aa, synthetic construct
YAQNSQR

SEQ ID NO: 155520 - protein, 7 aa, synthetic construct
YAQPQAK

SEQ ID NO: 155521 - protein, 7 aa, synthetic construct
YAQPRAM

SEQ ID NO: 155522 - protein, 7 aa, synthetic construct
YAQQLHK

SEQ ID NO: 155523 - protein, 7 aa, synthetic construct
YAQQMNR

SEQ ID NO: 155524 - protein, 7 aa, synthetic construct
YAQRLPN

SEQ ID NO: 155525 - protein, 7 aa, synthetic construct
YAQRQIP

SEQ ID NO: 155526 - protein, 7 aa, synthetic construct
YAQSHPR

SEQ ID NO: 155527 - protein, 7 aa, synthetic construct
YAQSLRV

SEQ ID NO: 155528 - protein, 7 aa, synthetic construct
YAQSVPR

SEQ ID NO: 155529 - protein, 7 aa, synthetic construct
YAQSWRD

SEQ ID NO: 155530 - protein, 7 aa, synthetic construct
YAQTNIR

SEQ ID NO: 155531 - protein, 7 aa, synthetic construct
YAQTQKF

SEQ ID NO: 155532 - protein, 7 aa, synthetic construct
YAQVRSQ

SEQ ID NO: 155533 - protein, 7 aa, synthetic construct
YAQVYKA

SEQ ID NO: 155534 - protein, 7 aa, synthetic construct
YARANAG

SEQ ID NO: 155535 - protein, 7 aa, synthetic construct
YARDSKG

SEQ ID NO: 155536 - protein, 7 aa, synthetic construct
YARGSVI

SEQ ID NO: 155537 - protein, 7 aa, synthetic construct
YARIQGP

SEQ ID NO: 155538 - protein, 7 aa, synthetic construct
YARMEKM

SEQ ID NO: 155539 - protein, 7 aa, synthetic construct
YARNLGS

SEQ ID NO: 155540 - protein, 7 aa, synthetic construct
YARQEVR

SEQ ID NO: 155541 - protein, 7 aa, synthetic construct
YARSTGG

SEQ ID NO: 155542 - protein, 7 aa, synthetic construct
YARTDVR

SEQ ID NO: 155543 - protein, 7 aa, synthetic construct
YARVTHN

SEQ ID NO: 155544 - protein, 7 aa, synthetic construct
YASDQKR

SEQ ID NO: 155545 - protein, 7 aa, synthetic construct
YASGHMK

SEQ ID NO: 155546 - protein, 7 aa, synthetic construct
YASGTQR

SEQ ID NO: 155547 - protein, 7 aa, synthetic construct
YASGVNR

SEQ ID NO: 155548 - protein, 7 aa, synthetic construct
YASGWSQ

SEQ ID NO: 155549 - protein, 7 aa, synthetic construct
YASHSKQ

SEQ ID NO: 155550 - protein, 7 aa, synthetic construct
YASHSRQ

SEQ ID NO: 155551 - protein, 7 aa, synthetic construct
YASKERA

SEQ ID NO: 155552 - protein, 7 aa, synthetic construct
YASKGHQ

SEQ ID NO: 155553 - protein, 7 aa, synthetic construct
YASLYKN

SEQ ID NO: 155554 - protein, 7 aa, synthetic construct
YASMSKN

SEQ ID NO: 155555 - protein, 7 aa, synthetic construct
YASNPRI

SEQ ID NO: 155556 - protein, 7 aa, synthetic construct
YASQGYK

SEQ ID NO: 155557 - protein, 7 aa, synthetic construct
YASRAQM

SEQ ID NO: 155558 - protein, 7 aa, synthetic construct
YASRVMP

SEQ ID NO: 155559 - protein, 7 aa, synthetic construct
YASSRDK

SEQ ID NO: 155560 - protein, 7 aa, synthetic construct
YASSSLR

SEQ ID NO: 155561 - protein, 7 aa, synthetic construct
YASTYSK

SEQ ID NO: 155562 - protein, 7 aa, synthetic construct
YASVYKA

SEQ ID NO: 155563 - protein, 7 aa, synthetic construct
YATAKDR

SEQ ID NO: 155564 - protein, 7 aa, synthetic construct
YATDRRI

SEQ ID NO: 155565 - protein, 7 aa, synthetic construct
YATGIPR

SEQ ID NO: 155566 - protein, 7 aa, synthetic construct
YATGNNR

SEQ ID NO: 155567 - protein, 7 aa, synthetic construct
YATGQMR

SEQ ID NO: 155568 - protein, 7 aa, synthetic construct
YATKERF

SEQ ID NO: 155569 - protein, 7 aa, synthetic construct
YATKFMA

SEQ ID NO: 155570 - protein, 7 aa, synthetic construct
YATNNTR

SEQ ID NO: 155571 - protein, 7 aa, synthetic construct
YATNPPK

SEQ ID NO: 155572 - protein, 7 aa, synthetic construct
YATPKDR

SEQ ID NO: 155573 - protein, 7 aa, synthetic construct
YATPKHV

SEQ ID NO: 155574 - protein, 7 aa, synthetic construct
YATRDMI

SEQ ID NO: 155575 - protein, 7 aa, synthetic construct
YATTTRY

SEQ ID NO: 155576 - protein, 7 aa, synthetic construct
YATTYKP

SEQ ID NO: 155577 - protein, 7 aa, synthetic construct
YATVHRQ

SEQ ID NO: 155578 - protein, 7 aa, synthetic construct
YAVHGKN

SEQ ID NO: 155579 - protein, 7 aa, synthetic construct
YAVQSPR

SEQ ID NO: 155580 - protein, 7 aa, synthetic construct
YAVRPKE

SEQ ID NO: 155581 - protein, 7 aa, synthetic construct
YAVSHVK

SEQ ID NO: 155582 - protein, 7 aa, synthetic construct
YDAGSHR

SEQ ID NO: 155583 - protein, 7 aa, synthetic construct
YDAKQRL

SEQ ID NO: 155584 - protein, 7 aa, synthetic construct
YDAKYRV

SEQ ID NO: 155585 - protein, 7 aa, synthetic construct
YDANRQK

SEQ ID NO: 155586 - protein, 7 aa, synthetic construct
YDAQHYR

SEQ ID NO: 155587 - protein, 7 aa, synthetic construct
YDARKAI

SEQ ID NO: 155588 - protein, 7 aa, synthetic construct
YDARMKS

SEQ ID NO: 155589 - protein, 7 aa, synthetic construct
YDEKMRK

SEQ ID NO: 155590 - protein, 7 aa, synthetic construct
YDGKRQQ

SEQ ID NO: 155591 - protein, 7 aa, synthetic construct
YDGKTVR

SEQ ID NO: 155592 - protein, 7 aa, synthetic construct
YDGLKLK

SEQ ID NO: 155593 - protein, 7 aa, synthetic construct
YDGMKAR

SEQ ID NO: 155594 - protein, 7 aa, synthetic construct
YDGQRWS

SEQ ID NO: 155595 - protein, 7 aa, synthetic construct
YDGRGKT

SEQ ID NO: 155596 - protein, 7 aa, synthetic construct
YDGRTLK

SEQ ID NO: 155597 - protein, 7 aa, synthetic construct
YDGTWSV

SEQ ID NO: 155598 - protein, 7 aa, synthetic construct
YDHGSGR

SEQ ID NO: 155599 - protein, 7 aa, synthetic construct
YDHHHAK

SEQ ID NO: 155600 - protein, 7 aa, synthetic construct
YDHHKHF

SEQ ID NO: 155601 - protein, 7 aa, synthetic construct
YDHKIMK

SEQ ID NO: 155602 - protein, 7 aa, synthetic construct
YDHPNVS

SEQ ID NO: 155603 - protein, 7 aa, synthetic construct
YDHRVKQ

SEQ ID NO: 155604 - protein, 7 aa, synthetic construct
YDIKSAK

SEQ ID NO: 155605 - protein, 7 aa, synthetic construct
YDIVKKN

SEQ ID NO: 155606 - protein, 7 aa, synthetic construct
YDKARQQ

SEQ ID NO: 155607 - protein, 7 aa, synthetic construct
YDKGNYK

SEQ ID NO: 155608 - protein, 7 aa, synthetic construct
YDKGQKY

SEQ ID NO: 155609 - protein, 7 aa, synthetic construct
YDKHPRT

SEQ ID NO: 155610 - protein, 7 aa, synthetic construct
YDKIPRG

SEQ ID NO: 155611 - protein, 7 aa, synthetic construct
YDKLMRN

SEQ ID NO: 155612 - protein, 7 aa, synthetic construct
YDKLPPR

SEQ ID NO: 155613 - protein, 7 aa, synthetic construct
YDKMHRM

SEQ ID NO: 155614 - protein, 7 aa, synthetic construct
YDKNIRN

SEQ ID NO: 155615 - protein, 7 aa, synthetic construct
YDKPHKM

SEQ ID NO: 155616 - protein, 7 aa, synthetic construct
YDKPQNK

SEQ ID NO: 155617 - protein, 7 aa, synthetic construct
YDKPQRS

SEQ ID NO: 155618 - protein, 7 aa, synthetic construct
YDKRGNL

SEQ ID NO: 155619 - protein, 7 aa, synthetic construct
YDKRGNS

SEQ ID NO: 155620 - protein, 7 aa, synthetic construct
YDKRPPL

SEQ ID NO: 155621 - protein, 7 aa, synthetic construct
YDKSNRL

SEQ ID NO: 155622 - protein, 7 aa, synthetic construct
YDKYIKS

SEQ ID NO: 155623 - protein, 7 aa, synthetic construct
YDKYTRG

SEQ ID NO: 155624 - protein, 7 aa, synthetic construct
YDLNRKA

SEQ ID NO: 155625 - protein, 7 aa, synthetic construct
YDMGRRV

SEQ ID NO: 155626 - protein, 7 aa, synthetic construct
YDNFKRA

SEQ ID NO: 155627 - protein, 7 aa, synthetic construct
YDNKGTR

SEQ ID NO: 155628 - protein, 7 aa, synthetic construct
YDNKQRM

SEQ ID NO: 155629 - protein, 7 aa, synthetic construct
YDNLRQY

SEQ ID NO: 155630 - protein, 7 aa, synthetic construct
YDNRKMG

SEQ ID NO: 155631 - protein, 7 aa, synthetic construct
YDNRLVK

SEQ ID NO: 155632 - protein, 7 aa, synthetic construct
YDPIGKK

SEQ ID NO: 155633 - protein, 7 aa, synthetic construct
YDPRQLK

SEQ ID NO: 155634 - protein, 7 aa, synthetic construct
YDPVKTR

SEQ ID NO: 155635 - protein, 7 aa, synthetic construct
YDQKRSM

SEQ ID NO: 155636 - protein, 7 aa, synthetic construct
YDQKTTR

SEQ ID NO: 155637 - protein, 7 aa, synthetic construct
YDQLARY

SEQ ID NO: 155638 - protein, 7 aa, synthetic construct
YDQRIKI

SEQ ID NO: 155639 - protein, 7 aa, synthetic construct
YDRAAQA

SEQ ID NO: 155640 - protein, 7 aa, synthetic construct
YDRAMKG

SEQ ID NO: 155641 - protein, 7 aa, synthetic construct
YDRGALR

SEQ ID NO: 155642 - protein, 7 aa, synthetic construct
YDRGTRQ

SEQ ID NO: 155643 - protein, 7 aa, synthetic construct
YDRINKQ

SEQ ID NO: 155644 - protein, 7 aa, synthetic construct
YDRKAVM

SEQ ID NO: 155645 - protein, 7 aa, synthetic construct
YDRKPVN

SEQ ID NO: 155646 - protein, 7 aa, synthetic construct
YDRKSTS

SEQ ID NO: 155647 - protein, 7 aa, synthetic construct
YDRPKNV

SEQ ID NO: 155648 - protein, 7 aa, synthetic construct
YDRQKTG

SEQ ID NO: 155649 - protein, 7 aa, synthetic construct
YDRQRNF

SEQ ID NO: 155650 - protein, 7 aa, synthetic construct
YDRSSKT

SEQ ID NO: 155651 - protein, 7 aa, synthetic construct
YDRVKYQ

SEQ ID NO: 155652 - protein, 7 aa, synthetic construct
YDRVRTG

SEQ ID NO: 155653 - protein, 7 aa, synthetic construct
YDRVSKN

SEQ ID NO: 155654 - protein, 7 aa, synthetic construct
YDSHHYK

SEQ ID NO: 155655 - protein, 7 aa, synthetic construct
YDSKLRL

SEQ ID NO: 155656 - protein, 7 aa, synthetic construct
YDSKRLL

SEQ ID NO: 155657 - protein, 7 aa, synthetic construct
YDSKVRQ

SEQ ID NO: 155658 - protein, 7 aa, synthetic construct
YDSLRKQ

SEQ ID NO: 155659 - protein, 7 aa, synthetic construct
YDSNKFK

SEQ ID NO: 155660 - protein, 7 aa, synthetic construct
YDSNKRL

SEQ ID NO: 155661 - protein, 7 aa, synthetic construct
YDSQHRY

SEQ ID NO: 155662 - protein, 7 aa, synthetic construct
YDSQKKM

SEQ ID NO: 155663 - protein, 7 aa, synthetic construct
YDSVRKA

SEQ ID NO: 155664 - protein, 7 aa, synthetic construct
YDTSHRY

SEQ ID NO: 155665 - protein, 7 aa, synthetic construct
YDVHHRY

SEQ ID NO: 155666 - protein, 7 aa, synthetic construct
YDVKYKG

SEQ ID NO: 155667 - protein, 7 aa, synthetic construct
YDVMKRS

SEQ ID NO: 155668 - protein, 7 aa, synthetic construct
YDVQKRI

SEQ ID NO: 155669 - protein, 7 aa, synthetic construct
YEAANKK

SEQ ID NO: 155670 - protein, 7 aa, synthetic construct
YEAKRNL

SEQ ID NO: 155671 - protein, 7 aa, synthetic construct
YEANRTW

SEQ ID NO: 155672 - protein, 7 aa, synthetic construct
YEARAKN

SEQ ID NO: 155673 - protein, 7 aa, synthetic construct
YEARNKL

SEQ ID NO: 155674 - protein, 7 aa, synthetic construct
YEFKNAK

SEQ ID NO: 155675 - protein, 7 aa, synthetic construct
YEGHQYR

SEQ ID NO: 155676 - protein, 7 aa, synthetic construct
YEGHRGY

SEQ ID NO: 155677 - protein, 7 aa, synthetic construct
YEGKTRL

SEQ ID NO: 155678 - protein, 7 aa, synthetic construct
YEGRVMK

SEQ ID NO: 155679 - protein, 7 aa, synthetic construct
YEIKLRA

SEQ ID NO: 155680 - protein, 7 aa, synthetic construct
YEKARQS

SEQ ID NO: 155681 - protein, 7 aa, synthetic construct
YEKFIQK

SEQ ID NO: 155682 - protein, 7 aa, synthetic construct
YEKHNKT

SEQ ID NO: 155683 - protein, 7 aa, synthetic construct
YEKIAKF

SEQ ID NO: 155684 - protein, 7 aa, synthetic construct
YEKIPVR

SEQ ID NO: 155685 - protein, 7 aa, synthetic construct
YEKIRGT

SEQ ID NO: 155686 - protein, 7 aa, synthetic construct
YEKIVQK

SEQ ID NO: 155687 - protein, 7 aa, synthetic construct
YEKKSVY

SEQ ID NO: 155688 - protein, 7 aa, synthetic construct
YEKLAKF

SEQ ID NO: 155689 - protein, 7 aa, synthetic construct
YEKLANR

SEQ ID NO: 155690 - protein, 7 aa, synthetic construct
YEKLKIM

SEQ ID NO: 155691 - protein, 7 aa, synthetic construct
YEKLRAN

SEQ ID NO: 155692 - protein, 7 aa, synthetic construct
YEKLSGK

SEQ ID NO: 155693 - protein, 7 aa, synthetic construct
YEKMARA

SEQ ID NO: 155694 - protein, 7 aa, synthetic construct
YEKMGRS

SEQ ID NO: 155695 - protein, 7 aa, synthetic construct
YEKMKFT

SEQ ID NO: 155696 - protein, 7 aa, synthetic construct
YEKMRAI

SEQ ID NO: 155697 - protein, 7 aa, synthetic construct
YEKNKQF

SEQ ID NO: 155698 - protein, 7 aa, synthetic construct
YEKRMSQ

SEQ ID NO: 155699 - protein, 7 aa, synthetic construct
YEKRMVS

SEQ ID NO: 155700 - protein, 7 aa, synthetic construct
YEKRNNN

SEQ ID NO: 155701 - protein, 7 aa, synthetic construct
YEKRQNA

SEQ ID NO: 155702 - protein, 7 aa, synthetic construct
YEKRSTG

SEQ ID NO: 155703 - protein, 7 aa, synthetic construct
YEKRTFS

SEQ ID NO: 155704 - protein, 7 aa, synthetic construct
YEKSGLR

SEQ ID NO: 155705 - protein, 7 aa, synthetic construct
YEKTNRV

SEQ ID NO: 155706 - protein, 7 aa, synthetic construct
YEKVLRN

SEQ ID NO: 155707 - protein, 7 aa, synthetic construct
YELKMRN

SEQ ID NO: 155708 - protein, 7 aa, synthetic construct
YELKSRN

SEQ ID NO: 155709 - protein, 7 aa, synthetic construct
YEMKRAS

SEQ ID NO: 155710 - protein, 7 aa, synthetic construct
YEMKRNL

SEQ ID NO: 155711 - protein, 7 aa, synthetic construct
YEMRTRA

SEQ ID NO: 155712 - protein, 7 aa, synthetic construct
YENKQQR

SEQ ID NO: 155713 - protein, 7 aa, synthetic construct
YENKTIR

SEQ ID NO: 155714 - protein, 7 aa, synthetic construct
YENKYKG

SEQ ID NO: 155715 - protein, 7 aa, synthetic construct
YENRVKN

SEQ ID NO: 155716 - protein, 7 aa, synthetic construct
YENVHFH

SEQ ID NO: 155717 - protein, 7 aa, synthetic construct
YEPLRRN

SEQ ID NO: 155718 - protein, 7 aa, synthetic construct
YEQHTHR

SEQ ID NO: 155719 - protein, 7 aa, synthetic construct
YEQKPAK

SEQ ID NO: 155720 - protein, 7 aa, synthetic construct
YEQKQKM

SEQ ID NO: 155721 - protein, 7 aa, synthetic construct
YEQKQKQ

SEQ ID NO: 155722 - protein, 7 aa, synthetic construct
YEQNKYY

SEQ ID NO: 155723 - protein, 7 aa, synthetic construct
YEQRVRQ

SEQ ID NO: 155724 - protein, 7 aa, synthetic construct
YEQWRNG

SEQ ID NO: 155725 - protein, 7 aa, synthetic construct
YERGKAM

SEQ ID NO: 155726 - protein, 7 aa, synthetic construct
YERGKTS

SEQ ID NO: 155727 - protein, 7 aa, synthetic construct
YERIPPK

SEQ ID NO: 155728 - protein, 7 aa, synthetic construct
YERKANS

SEQ ID NO: 155729 - protein, 7 aa, synthetic construct
YERKGTG

SEQ ID NO: 155730 - protein, 7 aa, synthetic construct
YERNIKI

SEQ ID NO: 155731 - protein, 7 aa, synthetic construct
YERQKFS

SEQ ID NO: 155732 - protein, 7 aa, synthetic construct
YERSYNT

SEQ ID NO: 155733 - protein, 7 aa, synthetic construct
YERTSAK

SEQ ID NO: 155734 - protein, 7 aa, synthetic construct
YETKIKY

SEQ ID NO: 155735 - protein, 7 aa, synthetic construct
YETKNRN

SEQ ID NO: 155736 - protein, 7 aa, synthetic construct
YETKTPR

SEQ ID NO: 155737 - protein, 7 aa, synthetic construct
YETRLKI

SEQ ID NO: 155738 - protein, 7 aa, synthetic construct
YETRPTK

SEQ ID NO: 155739 - protein, 7 aa, synthetic construct
YETVKLR

SEQ ID NO: 155740 - protein, 7 aa, synthetic construct
YEVKPSK

SEQ ID NO: 155741 - protein, 7 aa, synthetic construct
YEVTKRM

SEQ ID NO: 155742 - protein, 7 aa, synthetic construct
YEWRKDS

SEQ ID NO: 155743 - protein, 7 aa, synthetic construct
YFGKDSK

SEQ ID NO: 155744 - protein, 7 aa, synthetic construct
YFGKEKS

SEQ ID NO: 155745 - protein, 7 aa, synthetic construct
YFGKNPP

SEQ ID NO: 155746 - protein, 7 aa, synthetic construct
YFGKTDK

SEQ ID NO: 155747 - protein, 7 aa, synthetic construct
YFGQKTV

SEQ ID NO: 155748 - protein, 7 aa, synthetic construct
YFKAAPN

SEQ ID NO: 155749 - protein, 7 aa, synthetic construct
YFKAVTG

SEQ ID NO: 155750 - protein, 7 aa, synthetic construct
YFKGTAS

SEQ ID NO: 155751 - protein, 7 aa, synthetic construct
YFKKNDG

SEQ ID NO: 155752 - protein, 7 aa, synthetic construct
YFKKQTE

SEQ ID NO: 155753 - protein, 7 aa, synthetic construct
YFKLKES

SEQ ID NO: 155754 - protein, 7 aa, synthetic construct
YFKNSSG

SEQ ID NO: 155755 - protein, 7 aa, synthetic construct
YFKNTQG

SEQ ID NO: 155756 - protein, 7 aa, synthetic construct
YFKNTRE

SEQ ID NO: 155757 - protein, 7 aa, synthetic construct
YFKQPTN

SEQ ID NO: 155758 - protein, 7 aa, synthetic construct
YFKSNPS

SEQ ID NO: 155759 - protein, 7 aa, synthetic construct
YFNKSPP

SEQ ID NO: 155760 - protein, 7 aa, synthetic construct
YFNNQPK

SEQ ID NO: 155761 - protein, 7 aa, synthetic construct
YFNQKPS

SEQ ID NO: 155762 - protein, 7 aa, synthetic construct
YFPKNSA

SEQ ID NO: 155763 - protein, 7 aa, synthetic construct
YFRNQQG

SEQ ID NO: 155764 - protein, 7 aa, synthetic construct
YGAGASR

SEQ ID NO: 155765 - protein, 7 aa, synthetic construct
YGAGLGR

SEQ ID NO: 155766 - protein, 7 aa, synthetic construct
YGAGSIK

SEQ ID NO: 155767 - protein, 7 aa, synthetic construct
YGAIRQM

SEQ ID NO: 155768 - protein, 7 aa, synthetic construct
YGAMGHK

SEQ ID NO: 155769 - protein, 7 aa, synthetic construct
YGAMNGR

SEQ ID NO: 155770 - protein, 7 aa, synthetic construct
YGAMRKE

SEQ ID NO: 155771 - protein, 7 aa, synthetic construct
YGANPPR

SEQ ID NO: 155772 - protein, 7 aa, synthetic construct
YGAPKRD

SEQ ID NO: 155773 - protein, 7 aa, synthetic construct
YGAPQAR

SEQ ID NO: 155774 - protein, 7 aa, synthetic construct
YGAPRAP

SEQ ID NO: 155775 - protein, 7 aa, synthetic construct
YGAQASR

SEQ ID NO: 155776 - protein, 7 aa, synthetic construct
YGAQRVT

SEQ ID NO: 155777 - protein, 7 aa, synthetic construct
YGAREKL

SEQ ID NO: 155778 - protein, 7 aa, synthetic construct
YGARHVA

SEQ ID NO: 155779 - protein, 7 aa, synthetic construct
YGARPNI

SEQ ID NO: 155780 - protein, 7 aa, synthetic construct
YGATNSR

SEQ ID NO: 155781 - protein, 7 aa, synthetic construct
YGAVRGH

SEQ ID NO: 155782 - protein, 7 aa, synthetic construct
YGAVRHP

SEQ ID NO: 155783 - protein, 7 aa, synthetic construct
YGDAPKR

SEQ ID NO: 155784 - protein, 7 aa, synthetic construct
YGEGWHK

SEQ ID NO: 155785 - protein, 7 aa, synthetic construct
YGEKNTR

SEQ ID NO: 155786 - protein, 7 aa, synthetic construct
YGERARM

SEQ ID NO: 155787 - protein, 7 aa, synthetic construct
YGESSYR

SEQ ID NO: 155788 - protein, 7 aa, synthetic construct
YGGDKTR

SEQ ID NO: 155789 - protein, 7 aa, synthetic construct
YGGGVPR

SEQ ID NO: 155790 - protein, 7 aa, synthetic construct
YGGHLNK

SEQ ID NO: 155791 - protein, 7 aa, synthetic construct
YGGHMKT

SEQ ID NO: 155792 - protein, 7 aa, synthetic construct
YGGHNIK

SEQ ID NO: 155793 - protein, 7 aa, synthetic construct
YGGKEMR

SEQ ID NO: 155794 - protein, 7 aa, synthetic construct
YGGKNQL

SEQ ID NO: 155795 - protein, 7 aa, synthetic construct
YGGLAVR

SEQ ID NO: 155796 - protein, 7 aa, synthetic construct
YGGLQTR

SEQ ID NO: 155797 - protein, 7 aa, synthetic construct
YGGNPAR

SEQ ID NO: 155798 - protein, 7 aa, synthetic construct
YGGNQSR

SEQ ID NO: 155799 - protein, 7 aa, synthetic construct
YGGNQYK

SEQ ID NO: 155800 - protein, 7 aa, synthetic construct
YGGNRKE

SEQ ID NO: 155801 - protein, 7 aa, synthetic construct
YGGQQNR

SEQ ID NO: 155802 - protein, 7 aa, synthetic construct
YGGRQIV

SEQ ID NO: 155803 - protein, 7 aa, synthetic construct
YGGSKQL

SEQ ID NO: 155804 - protein, 7 aa, synthetic construct
YGGSNRY

SEQ ID NO: 155805 - protein, 7 aa, synthetic construct
YGGSPPR

SEQ ID NO: 155806 - protein, 7 aa, synthetic construct
YGGSQYK

SEQ ID NO: 155807 - protein, 7 aa, synthetic construct
YGGTTGR

SEQ ID NO: 155808 - protein, 7 aa, synthetic construct
YGGVKNF

SEQ ID NO: 155809 - protein, 7 aa, synthetic construct
YGGYGSM

SEQ ID NO: 155810 - protein, 7 aa, synthetic construct
YGHAGLK

SEQ ID NO: 155811 - protein, 7 aa, synthetic construct
YGHIIRA

SEQ ID NO: 155812 - protein, 7 aa, synthetic construct
YGHIKFG

SEQ ID NO: 155813 - protein, 7 aa, synthetic construct
YGHKGER

SEQ ID NO: 155814 - protein, 7 aa, synthetic construct
YGHQHGT

SEQ ID NO: 155815 - protein, 7 aa, synthetic construct
YGHQKFV

SEQ ID NO: 155816 - protein, 7 aa, synthetic construct
YGHRVAA

SEQ ID NO: 155817 - protein, 7 aa, synthetic construct
YGHTNKG

SEQ ID NO: 155818 - protein, 7 aa, synthetic construct
YGHVSNK

SEQ ID NO: 155819 - protein, 7 aa, synthetic construct
YGIERQK

SEQ ID NO: 155820 - protein, 7 aa, synthetic construct
YGIGHPK

SEQ ID NO: 155821 - protein, 7 aa, synthetic construct
YGIGQHK

SEQ ID NO: 155822 - protein, 7 aa, synthetic construct
YGIHNKQ

SEQ ID NO: 155823 - protein, 7 aa, synthetic construct
YGIRDKQ

SEQ ID NO: 155824 - protein, 7 aa, synthetic construct
YGKAPER

SEQ ID NO: 155825 - protein, 7 aa, synthetic construct
YGKDRAL

SEQ ID NO: 155826 - protein, 7 aa, synthetic construct
YGKDRAT

SEQ ID NO: 155827 - protein, 7 aa, synthetic construct
YGKDRGH

SEQ ID NO: 155828 - protein, 7 aa, synthetic construct
YGKEYMK

SEQ ID NO: 155829 - protein, 7 aa, synthetic construct
YGKHTVL

SEQ ID NO: 155830 - protein, 7 aa, synthetic construct
YGKIPSL

SEQ ID NO: 155831 - protein, 7 aa, synthetic construct
YGKKEYG

SEQ ID NO: 155832 - protein, 7 aa, synthetic construct
YGKLRDV

SEQ ID NO: 155833 - protein, 7 aa, synthetic construct
YGKMRDS

SEQ ID NO: 155834 - protein, 7 aa, synthetic construct
YGKNYLA

SEQ ID NO: 155835 - protein, 7 aa, synthetic construct
YGKQPDR

SEQ ID NO: 155836 - protein, 7 aa, synthetic construct
YGKQSYP

SEQ ID NO: 155837 - protein, 7 aa, synthetic construct
YGKRIQD

SEQ ID NO: 155838 - protein, 7 aa, synthetic construct
YGKRVEQ

SEQ ID NO: 155839 - protein, 7 aa, synthetic construct
YGKRVLD

SEQ ID NO: 155840 - protein, 7 aa, synthetic construct
YGKSIYP

SEQ ID NO: 155841 - protein, 7 aa, synthetic construct
YGKTMER

SEQ ID NO: 155842 - protein, 7 aa, synthetic construct
YGKTSAY

SEQ ID NO: 155843 - protein, 7 aa, synthetic construct
YGKVHFS

SEQ ID NO: 155844 - protein, 7 aa, synthetic construct
YGKVYAS

SEQ ID NO: 155845 - protein, 7 aa, synthetic construct
YGKYIAS

SEQ ID NO: 155846 - protein, 7 aa, synthetic construct
YGKYQIA

SEQ ID NO: 155847 - protein, 7 aa, synthetic construct
YGLHTAR

SEQ ID NO: 155848 - protein, 7 aa, synthetic construct
YGLSHKA

SEQ ID NO: 155849 - protein, 7 aa, synthetic construct
YGLSSAR

SEQ ID NO: 155850 - protein, 7 aa, synthetic construct
YGMATGK

SEQ ID NO: 155851 - protein, 7 aa, synthetic construct
YGMGAGK

SEQ ID NO: 155852 - protein, 7 aa, synthetic construct
YGMGSNK

SEQ ID NO: 155853 - protein, 7 aa, synthetic construct
YGMHQAK

SEQ ID NO: 155854 - protein, 7 aa, synthetic construct
YGMMSKV

SEQ ID NO: 155855 - protein, 7 aa, synthetic construct
YGMNDKK

SEQ ID NO: 155856 - protein, 7 aa, synthetic construct
YGMRGRD

SEQ ID NO: 155857 - protein, 7 aa, synthetic construct
YGMRQSM

SEQ ID NO: 155858 - protein, 7 aa, synthetic construct
YGMTQGK

SEQ ID NO: 155859 - protein, 7 aa, synthetic construct
YGNAART

SEQ ID NO: 155860 - protein, 7 aa, synthetic construct
YGNASMR

SEQ ID NO: 155861 - protein, 7 aa, synthetic construct
YGNDRTK

SEQ ID NO: 155862 - protein, 7 aa, synthetic construct
YGNGRAY

SEQ ID NO: 155863 - protein, 7 aa, synthetic construct
YGNGSFK

SEQ ID NO: 155864 - protein, 7 aa, synthetic construct
YGNHRNQ

SEQ ID NO: 155865 - protein, 7 aa, synthetic construct
YGNNLNR

SEQ ID NO: 155866 - protein, 7 aa, synthetic construct
YGNPMQK

SEQ ID NO: 155867 - protein, 7 aa, synthetic construct
YGNPNVR

SEQ ID NO: 155868 - protein, 7 aa, synthetic construct
YGNRSHM

SEQ ID NO: 155869 - protein, 7 aa, synthetic construct
YGNYITK

SEQ ID NO: 155870 - protein, 7 aa, synthetic construct
YGNYRNQ

SEQ ID NO: 155871 - protein, 7 aa, synthetic construct
YGNYTQK

SEQ ID NO: 155872 - protein, 7 aa, synthetic construct
YGPINRV

SEQ ID NO: 155873 - protein, 7 aa, synthetic construct
YGPKYSG

SEQ ID NO: 155874 - protein, 7 aa, synthetic construct
YGPQGTR

SEQ ID NO: 155875 - protein, 7 aa, synthetic construct
YGPVSVR

SEQ ID NO: 155876 - protein, 7 aa, synthetic construct
YGQAIPR

SEQ ID NO: 155877 - protein, 7 aa, synthetic construct
YGQGKHG

SEQ ID NO: 155878 - protein, 7 aa, synthetic construct
YGQGSKN

SEQ ID NO: 155879 - protein, 7 aa, synthetic construct
YGQHLHK

SEQ ID NO: 155880 - protein, 7 aa, synthetic construct
YGQHMGK

SEQ ID NO: 155881 - protein, 7 aa, synthetic construct
YGQHRNS

SEQ ID NO: 155882 - protein, 7 aa, synthetic construct
YGQNFKL

SEQ ID NO: 155883 - protein, 7 aa, synthetic construct
YGQNLPR

SEQ ID NO: 155884 - protein, 7 aa, synthetic construct
YGQNRHQ

SEQ ID NO: 155885 - protein, 7 aa, synthetic construct
YGQNTGK

SEQ ID NO: 155886 - protein, 7 aa, synthetic construct
YGQQAVR

SEQ ID NO: 155887 - protein, 7 aa, synthetic construct
YGQSFKV

SEQ ID NO: 155888 - protein, 7 aa, synthetic construct
YGQSQPR

SEQ ID NO: 155889 - protein, 7 aa, synthetic construct
YGQTPGV

SEQ ID NO: 155890 - protein, 7 aa, synthetic construct
YGQVKSY

SEQ ID NO: 155891 - protein, 7 aa, synthetic construct
YGRAEKV

SEQ ID NO: 155892 - protein, 7 aa, synthetic construct
YGRINMP

SEQ ID NO: 155893 - protein, 7 aa, synthetic construct
YGRKEVS

SEQ ID NO: 155894 - protein, 7 aa, synthetic construct
YGRPQTI

SEQ ID NO: 155895 - protein, 7 aa, synthetic construct
YGRQMMP

SEQ ID NO: 155896 - protein, 7 aa, synthetic construct
YGRSMTH

SEQ ID NO: 155897 - protein, 7 aa, synthetic construct
YGRTDLK

SEQ ID NO: 155898 - protein, 7 aa, synthetic construct
YGSGTWQ

SEQ ID NO: 155899 - protein, 7 aa, synthetic construct
YGSHYSK

SEQ ID NO: 155900 - protein, 7 aa, synthetic construct
YGSIEPV

SEQ ID NO: 155901 - protein, 7 aa, synthetic construct
YGSIGQR

SEQ ID NO: 155902 - protein, 7 aa, synthetic construct
YGSKNLL

SEQ ID NO: 155903 - protein, 7 aa, synthetic construct
YGSKQAF

SEQ ID NO: 155904 - protein, 7 aa, synthetic construct
YGSQTMR

SEQ ID NO: 155905 - protein, 7 aa, synthetic construct
YGSVAAK

SEQ ID NO: 155906 - protein, 7 aa, synthetic construct
YGSVKSY

SEQ ID NO: 155907 - protein, 7 aa, synthetic construct
YGTARTT

SEQ ID NO: 155908 - protein, 7 aa, synthetic construct
YGTGLGR

SEQ ID NO: 155909 - protein, 7 aa, synthetic construct
YGTGRYH

SEQ ID NO: 155910 - protein, 7 aa, synthetic construct
YGTHAQK

SEQ ID NO: 155911 - protein, 7 aa, synthetic construct
YGTHLKP

SEQ ID NO: 155912 - protein, 7 aa, synthetic construct
YGTHMSR

SEQ ID NO: 155913 - protein, 7 aa, synthetic construct
YGTHRQG

SEQ ID NO: 155914 - protein, 7 aa, synthetic construct
YGTHTGK

SEQ ID NO: 155915 - protein, 7 aa, synthetic construct
YGTKFMA

SEQ ID NO: 155916 - protein, 7 aa, synthetic construct
YGTLKTI

SEQ ID NO: 155917 - protein, 7 aa, synthetic construct
YGTMIPR

SEQ ID NO: 155918 - protein, 7 aa, synthetic construct
YGTNNFK

SEQ ID NO: 155919 - protein, 7 aa, synthetic construct
YGTNRIM

SEQ ID NO: 155920 - protein, 7 aa, synthetic construct
YGTRHVA

SEQ ID NO: 155921 - protein, 7 aa, synthetic construct
YGTRPPL

SEQ ID NO: 155922 - protein, 7 aa, synthetic construct
YGTVHPK

SEQ ID NO: 155923 - protein, 7 aa, synthetic construct
YGTVQGR

SEQ ID NO: 155924 - protein, 7 aa, synthetic construct
YGTVSYK

SEQ ID NO: 155925 - protein, 7 aa, synthetic construct
YGTYNMK

SEQ ID NO: 155926 - protein, 7 aa, synthetic construct
YGVKMMS

SEQ ID NO: 155927 - protein, 7 aa, synthetic construct
YGVKRQE

SEQ ID NO: 155928 - protein, 7 aa, synthetic construct
YGVNRNL

SEQ ID NO: 155929 - protein, 7 aa, synthetic construct
YGVRHSA

SEQ ID NO: 155930 - protein, 7 aa, synthetic construct
YGVSHKM

SEQ ID NO: 155931 - protein, 7 aa, synthetic construct
YGYGTIT

SEQ ID NO: 155932 - protein, 7 aa, synthetic construct
YHAAKIT

SEQ ID NO: 155933 - protein, 7 aa, synthetic construct
YHAGAPR

SEQ ID NO: 155934 - protein, 7 aa, synthetic construct
YHAGPRQ

SEQ ID NO: 155935 - protein, 7 aa, synthetic construct
YHAKQSI

SEQ ID NO: 155936 - protein, 7 aa, synthetic construct
YHAVHKN

SEQ ID NO: 155937 - protein, 7 aa, synthetic construct
YHAVKPQ

SEQ ID NO: 155938 - protein, 7 aa, synthetic construct
YHDRRTN

SEQ ID NO: 155939 - protein, 7 aa, synthetic construct
YHEKNGK

SEQ ID NO: 155940 - protein, 7 aa, synthetic construct
YHFVTDD

SEQ ID NO: 155941 - protein, 7 aa, synthetic construct
YHGAGAR

SEQ ID NO: 155942 - protein, 7 aa, synthetic construct
YHGGKPT

SEQ ID NO: 155943 - protein, 7 aa, synthetic construct
YHGGTSK

SEQ ID NO: 155944 - protein, 7 aa, synthetic construct
YHGITRN

SEQ ID NO: 155945 - protein, 7 aa, synthetic construct
YHGKPIT

SEQ ID NO: 155946 - protein, 7 aa, synthetic construct
YHGKPVQ

SEQ ID NO: 155947 - protein, 7 aa, synthetic construct
YHGLPQK

SEQ ID NO: 155948 - protein, 7 aa, synthetic construct
YHGLSTK

SEQ ID NO: 155949 - protein, 7 aa, synthetic construct
YHGMAKS

SEQ ID NO: 155950 - protein, 7 aa, synthetic construct
YHGQLMK

SEQ ID NO: 155951 - protein, 7 aa, synthetic construct
YHGSGKS

SEQ ID NO: 155952 - protein, 7 aa, synthetic construct
YHGSIAK

SEQ ID NO: 155953 - protein, 7 aa, synthetic construct
YHHASRS

SEQ ID NO: 155954 - protein, 7 aa, synthetic construct
YHIKSAS

SEQ ID NO: 155955 - protein, 7 aa, synthetic construct
YHKAILG

SEQ ID NO: 155956 - protein, 7 aa, synthetic construct
YHKATGS

SEQ ID NO: 155957 - protein, 7 aa, synthetic construct
YHKELSR

SEQ ID NO: 155958 - protein, 7 aa, synthetic construct
YHKFQSG

SEQ ID NO: 155959 - protein, 7 aa, synthetic construct
YHKGISQ

SEQ ID NO: 155960 - protein, 7 aa, synthetic construct
YHKHQLG

SEQ ID NO: 155961 - protein, 7 aa, synthetic construct
YHKIAIN

SEQ ID NO: 155962 - protein, 7 aa, synthetic construct
YHKINNS

SEQ ID NO: 155963 - protein, 7 aa, synthetic construct
YHKKFVE

SEQ ID NO: 155964 - protein, 7 aa, synthetic construct
YHKLPLA

SEQ ID NO: 155965 - protein, 7 aa, synthetic construct
YHKNNGH

SEQ ID NO: 155966 - protein, 7 aa, synthetic construct
YHKNQGA

SEQ ID NO: 155967 - protein, 7 aa, synthetic construct
YHKNQMG

SEQ ID NO: 155968 - protein, 7 aa, synthetic construct
YHKNQTS

SEQ ID NO: 155969 - protein, 7 aa, synthetic construct
YHKNVQS

SEQ ID NO: 155970 - protein, 7 aa, synthetic construct
YHKPHIV

SEQ ID NO: 155971 - protein, 7 aa, synthetic construct
YHKQIQS

SEQ ID NO: 155972 - protein, 7 aa, synthetic construct
YHKQQHM

SEQ ID NO: 155973 - protein, 7 aa, synthetic construct
YHKQQNA

SEQ ID NO: 155974 - protein, 7 aa, synthetic construct
YHKQSLV

SEQ ID NO: 155975 - protein, 7 aa, synthetic construct
YHKQSNL

SEQ ID NO: 155976 - protein, 7 aa, synthetic construct
YHKVEKL

SEQ ID NO: 155977 - protein, 7 aa, synthetic construct
YHKVQNS

SEQ ID NO: 155978 - protein, 7 aa, synthetic construct
YHKVSVQ

SEQ ID NO: 155979 - protein, 7 aa, synthetic construct
YHLGQGK

SEQ ID NO: 155980 - protein, 7 aa, synthetic construct
YHLKHTG

SEQ ID NO: 155981 - protein, 7 aa, synthetic construct
YHMKPGP

SEQ ID NO: 155982 - protein, 7 aa, synthetic construct
YHNAQQK

SEQ ID NO: 155983 - protein, 7 aa, synthetic construct
YHNQKNF

SEQ ID NO: 155984 - protein, 7 aa, synthetic construct
YHNQTQK

SEQ ID NO: 155985 - protein, 7 aa, synthetic construct
YHNRNTT

SEQ ID NO: 155986 - protein, 7 aa, synthetic construct
YHPAPKT

SEQ ID NO: 155987 - protein, 7 aa, synthetic construct
YHPKNQY

SEQ ID NO: 155988 - protein, 7 aa, synthetic construct
YHPKVAM

SEQ ID NO: 155989 - protein, 7 aa, synthetic construct
YHQGAKA

SEQ ID NO: 155990 - protein, 7 aa, synthetic construct
YHQLNKV

SEQ ID NO: 155991 - protein, 7 aa, synthetic construct
YHQRQTT

SEQ ID NO: 155992 - protein, 7 aa, synthetic construct
YHQTKVV

SEQ ID NO: 155993 - protein, 7 aa, synthetic construct
YHQTQKY

SEQ ID NO: 155994 - protein, 7 aa, synthetic construct
YHRNQQS

SEQ ID NO: 155995 - protein, 7 aa, synthetic construct
YHRSMVT

SEQ ID NO: 155996 - protein, 7 aa, synthetic construct
YHSGKVL

SEQ ID NO: 155997 - protein, 7 aa, synthetic construct
YHSGRGS

SEQ ID NO: 155998 - protein, 7 aa, synthetic construct
YHSISKM

SEQ ID NO: 155999 - protein, 7 aa, synthetic construct
YHSKYAS

SEQ ID NO: 156000 - protein, 7 aa, synthetic construct
YHSRMNP

SEQ ID NO: 156001 - protein, 7 aa, synthetic construct
YHSRTGG

SEQ ID NO: 156002 - protein, 7 aa, synthetic construct
YHTHKMS

SEQ ID NO: 156003 - protein, 7 aa, synthetic construct
YHTLQTK

SEQ ID NO: 156004 - protein, 7 aa, synthetic construct
YHTQGQK

SEQ ID NO: 156005 - protein, 7 aa, synthetic construct
YHTQIAK

SEQ ID NO: 156006 - protein, 7 aa, synthetic construct
YHTSQPR

SEQ ID NO: 156007 - protein, 7 aa, synthetic construct
YHTSTQK

SEQ ID NO: 156008 - protein, 7 aa, synthetic construct
YHTVSKT

SEQ ID NO: 156009 - protein, 7 aa, synthetic construct
YHVEKKG

SEQ ID NO: 156010 - protein, 7 aa, synthetic construct
YHVKLTP

SEQ ID NO: 156011 - protein, 7 aa, synthetic construct
YHVKNMG

SEQ ID NO: 156012 - protein, 7 aa, synthetic construct
YHVQVKQ

SEQ ID NO: 156013 - protein, 7 aa, synthetic construct
YIADGKR

SEQ ID NO: 156014 - protein, 7 aa, synthetic construct
YIAGSSR

SEQ ID NO: 156015 - protein, 7 aa, synthetic construct
YIAHKKE

SEQ ID NO: 156016 - protein, 7 aa, synthetic construct
YIAHTKN

SEQ ID NO: 156017 - protein, 7 aa, synthetic construct
YIAKEGK

SEQ ID NO: 156018 - protein, 7 aa, synthetic construct
YIAKERG

SEQ ID NO: 156019 - protein, 7 aa, synthetic construct
YIDKAHK

SEQ ID NO: 156020 - protein, 7 aa, synthetic construct
YIDNKRM

SEQ ID NO: 156021 - protein, 7 aa, synthetic construct
YIDNRNK

SEQ ID NO: 156022 - protein, 7 aa, synthetic construct
YIEKNRG

SEQ ID NO: 156023 - protein, 7 aa, synthetic construct
YIERTRN

SEQ ID NO: 156024 - protein, 7 aa, synthetic construct
YIGAANR

SEQ ID NO: 156025 - protein, 7 aa, synthetic construct
YIGARSG

SEQ ID NO: 156026 - protein, 7 aa, synthetic construct
YIGGRAQ

SEQ ID NO: 156027 - protein, 7 aa, synthetic construct
YIGHGKM

SEQ ID NO: 156028 - protein, 7 aa, synthetic construct
YIGHGKQ

SEQ ID NO: 156029 - protein, 7 aa, synthetic construct
YIGHPKA

SEQ ID NO: 156030 - protein, 7 aa, synthetic construct
YIGIKGQ

SEQ ID NO: 156031 - protein, 7 aa, synthetic construct
YIGKHDK

SEQ ID NO: 156032 - protein, 7 aa, synthetic construct
YIGNVKM

SEQ ID NO: 156033 - protein, 7 aa, synthetic construct
YIGQTNR

SEQ ID NO: 156034 - protein, 7 aa, synthetic construct
YIGSLRN

SEQ ID NO: 156035 - protein, 7 aa, synthetic construct
YIGSNAR

SEQ ID NO: 156036 - protein, 7 aa, synthetic construct
YIGTDRK

SEQ ID NO: 156037 - protein, 7 aa, synthetic construct
YIGVSKS

SEQ ID NO: 156038 - protein, 7 aa, synthetic construct
YIHSAKG

SEQ ID NO: 156039 - protein, 7 aa, synthetic construct
YIHSMKG

SEQ ID NO: 156040 - protein, 7 aa, synthetic construct
YIIKDNK

SEQ ID NO: 156041 - protein, 7 aa, synthetic construct
YIKANPS

SEQ ID NO: 156042 - protein, 7 aa, synthetic construct
YIKAYKE

SEQ ID NO: 156043 - protein, 7 aa, synthetic construct
YIKDNNR

SEQ ID NO: 156044 - protein, 7 aa, synthetic construct
YIKDVRG

SEQ ID NO: 156045 - protein, 7 aa, synthetic construct
YIKEMKY

SEQ ID NO: 156046 - protein, 7 aa, synthetic construct
YIKEQNR

SEQ ID NO: 156047 - protein, 7 aa, synthetic construct
YIKGPQQ

SEQ ID NO: 156048 - protein, 7 aa, synthetic construct
YIKGPTV

SEQ ID NO: 156049 - protein, 7 aa, synthetic construct
YIKGQYG

SEQ ID NO: 156050 - protein, 7 aa, synthetic construct
YIKGTSH

SEQ ID NO: 156051 - protein, 7 aa, synthetic construct
YIKHITG

SEQ ID NO: 156052 - protein, 7 aa, synthetic construct
YIKHVQQ

SEQ ID NO: 156053 - protein, 7 aa, synthetic construct
YIKIAGN

SEQ ID NO: 156054 - protein, 7 aa, synthetic construct
YIKKSTD

SEQ ID NO: 156055 - protein, 7 aa, synthetic construct
YIKLKAD

SEQ ID NO: 156056 - protein, 7 aa, synthetic construct
YIKMHRE

SEQ ID NO: 156057 - protein, 7 aa, synthetic construct
YIKNAIH

SEQ ID NO: 156058 - protein, 7 aa, synthetic construct
YIKNANV

SEQ ID NO: 156059 - protein, 7 aa, synthetic construct
YIKNIAS

SEQ ID NO: 156060 - protein, 7 aa, synthetic construct
YIKNLHS

SEQ ID NO: 156061 - protein, 7 aa, synthetic construct
YIKNQHV

SEQ ID NO: 156062 - protein, 7 aa, synthetic construct
YIKNREV

SEQ ID NO: 156063 - protein, 7 aa, synthetic construct
YIKPLSA

SEQ ID NO: 156064 - protein, 7 aa, synthetic construct
YIKSAYN

SEQ ID NO: 156065 - protein, 7 aa, synthetic construct
YIKSHNN

SEQ ID NO: 156066 - protein, 7 aa, synthetic construct
YIKSMHQ

SEQ ID NO: 156067 - protein, 7 aa, synthetic construct
YIKSQHQ

SEQ ID NO: 156068 - protein, 7 aa, synthetic construct
YIKSRVD

SEQ ID NO: 156069 - protein, 7 aa, synthetic construct
YIKSTRD

SEQ ID NO: 156070 - protein, 7 aa, synthetic construct
YIKTIHA

SEQ ID NO: 156071 - protein, 7 aa, synthetic construct
YIKVESK

SEQ ID NO: 156072 - protein, 7 aa, synthetic construct
YIKVGPP

SEQ ID NO: 156073 - protein, 7 aa, synthetic construct
YIKVTAN

SEQ ID NO: 156074 - protein, 7 aa, synthetic construct
YINAHKA

SEQ ID NO: 156075 - protein, 7 aa, synthetic construct
YINATKH

SEQ ID NO: 156076 - protein, 7 aa, synthetic construct
YINISKN

SEQ ID NO: 156077 - protein, 7 aa, synthetic construct
YINKRGE

SEQ ID NO: 156078 - protein, 7 aa, synthetic construct
YINNPAR

SEQ ID NO: 156079 - protein, 7 aa, synthetic construct
YINREKA

SEQ ID NO: 156080 - protein, 7 aa, synthetic construct
YINREKG

SEQ ID NO: 156081 - protein, 7 aa, synthetic construct
YINSSHR

SEQ ID NO: 156082 - protein, 7 aa, synthetic construct
YINTKYG

SEQ ID NO: 156083 - protein, 7 aa, synthetic construct
YINTTRG

SEQ ID NO: 156084 - protein, 7 aa, synthetic construct
YIPASRN

SEQ ID NO: 156085 - protein, 7 aa, synthetic construct
YIPGSGK

SEQ ID NO: 156086 - protein, 7 aa, synthetic construct
YIPKIPQ

SEQ ID NO: 156087 - protein, 7 aa, synthetic construct
YIPPKDK

SEQ ID NO: 156088 - protein, 7 aa, synthetic construct
YIPRNSQ

SEQ ID NO: 156089 - protein, 7 aa, synthetic construct
YIQHASK

SEQ ID NO: 156090 - protein, 7 aa, synthetic construct
YIQKQKD

SEQ ID NO: 156091 - protein, 7 aa, synthetic construct
YIQMRKE

SEQ ID NO: 156092 - protein, 7 aa, synthetic construct
YIQNQSK

SEQ ID NO: 156093 - protein, 7 aa, synthetic construct
YIQSSQR

SEQ ID NO: 156094 - protein, 7 aa, synthetic construct
YIRAVSQ

SEQ ID NO: 156095 - protein, 7 aa, synthetic construct
YIRDNNR

SEQ ID NO: 156096 - protein, 7 aa, synthetic construct
YIRENTK

SEQ ID NO: 156097 - protein, 7 aa, synthetic construct
YIRPATN

SEQ ID NO: 156098 - protein, 7 aa, synthetic construct
YIRPSAN

SEQ ID NO: 156099 - protein, 7 aa, synthetic construct
YIRVNSP

SEQ ID NO: 156100 - protein, 7 aa, synthetic construct
YISAIKS

SEQ ID NO: 156101 - protein, 7 aa, synthetic construct
YISARTG

SEQ ID NO: 156102 - protein, 7 aa, synthetic construct
YISGKNY

SEQ ID NO: 156103 - protein, 7 aa, synthetic construct
YISHKPQ

SEQ ID NO: 156104 - protein, 7 aa, synthetic construct
YISHLKG

SEQ ID NO: 156105 - protein, 7 aa, synthetic construct
YISKGGG

SEQ ID NO: 156106 - protein, 7 aa, synthetic construct
YISQLKA

SEQ ID NO: 156107 - protein, 7 aa, synthetic construct
YISSHRA

SEQ ID NO: 156108 - protein, 7 aa, synthetic construct
YISSTRA

SEQ ID NO: 156109 - protein, 7 aa, synthetic construct
YITAARG

SEQ ID NO: 156110 - protein, 7 aa, synthetic construct
YITHKGG

SEQ ID NO: 156111 - protein, 7 aa, synthetic construct
YITHNKS

SEQ ID NO: 156112 - protein, 7 aa, synthetic construct
YITHQKN

SEQ ID NO: 156113 - protein, 7 aa, synthetic construct
YITQKIN

SEQ ID NO: 156114 - protein, 7 aa, synthetic construct
YITSAKM

SEQ ID NO: 156115 - protein, 7 aa, synthetic construct
YITSARA

SEQ ID NO: 156116 - protein, 7 aa, synthetic construct
YIVKQGQ

SEQ ID NO: 156117 - protein, 7 aa, synthetic construct
YIVTAKA

SEQ ID NO: 156118 - protein, 7 aa, synthetic construct
YKAAHPQ

SEQ ID NO: 156119 - protein, 7 aa, synthetic construct
YKAAPYQ

SEQ ID NO: 156120 - protein, 7 aa, synthetic construct
YKADRTV

SEQ ID NO: 156121 - protein, 7 aa, synthetic construct
YKAGAFN

SEQ ID NO: 156122 - protein, 7 aa, synthetic construct
YKAGDHR

SEQ ID NO: 156123 - protein, 7 aa, synthetic construct
YKAGTGY

SEQ ID NO: 156124 - protein, 7 aa, synthetic construct
YKAHHAG

SEQ ID NO: 156125 - protein, 7 aa, synthetic construct
YKAHLSM

SEQ ID NO: 156126 - protein, 7 aa, synthetic construct
YKAHPIP

SEQ ID NO: 156127 - protein, 7 aa, synthetic construct
YKAHSMV

SEQ ID NO: 156128 - protein, 7 aa, synthetic construct
YKAHTSQ

SEQ ID NO: 156129 - protein, 7 aa, synthetic construct
YKAIRND

SEQ ID NO: 156130 - protein, 7 aa, synthetic construct
YKAKPAD

SEQ ID NO: 156131 - protein, 7 aa, synthetic construct
YKALNPQ

SEQ ID NO: 156132 - protein, 7 aa, synthetic construct
YKAMHSL

SEQ ID NO: 156133 - protein, 7 aa, synthetic construct
YKAMLGN

SEQ ID NO: 156134 - protein, 7 aa, synthetic construct
YKANAII

SEQ ID NO: 156135 - protein, 7 aa, synthetic construct
YKANIHV

SEQ ID NO: 156136 - protein, 7 aa, synthetic construct
YKAPLQP

SEQ ID NO: 156137 - protein, 7 aa, synthetic construct
YKAQQTF

SEQ ID NO: 156138 - protein, 7 aa, synthetic construct
YKARMSE

SEQ ID NO: 156139 - protein, 7 aa, synthetic construct
YKARVIE

SEQ ID NO: 156140 - protein, 7 aa, synthetic construct
YKASHAI

SEQ ID NO: 156141 - protein, 7 aa, synthetic construct
YKASPGN

SEQ ID NO: 156142 - protein, 7 aa, synthetic construct
YKATPFQ

SEQ ID NO: 156143 - protein, 7 aa, synthetic construct
YKATPGL

SEQ ID NO: 156144 - protein, 7 aa, synthetic construct
YKAVGVH

SEQ ID NO: 156145 - protein, 7 aa, synthetic construct
YKAVIPM

SEQ ID NO: 156146 - protein, 7 aa, synthetic construct
YKAVMHQ

SEQ ID NO: 156147 - protein, 7 aa, synthetic construct
YKAYIKD

SEQ ID NO: 156148 - protein, 7 aa, synthetic construct
YKDAGPR

SEQ ID NO: 156149 - protein, 7 aa, synthetic construct
YKDGPKW

SEQ ID NO: 156150 - protein, 7 aa, synthetic construct
YKDGTAR

SEQ ID NO: 156151 - protein, 7 aa, synthetic construct
YKDGYKQ

SEQ ID NO: 156152 - protein, 7 aa, synthetic construct
YKDGYKS

SEQ ID NO: 156153 - protein, 7 aa, synthetic construct
YKDHKII

SEQ ID NO: 156154 - protein, 7 aa, synthetic construct
YKDHKTL

SEQ ID NO: 156155 - protein, 7 aa, synthetic construct
YKDIIPR

SEQ ID NO: 156156 - protein, 7 aa, synthetic construct
YKDIKWA

SEQ ID NO: 156157 - protein, 7 aa, synthetic construct
YKDIQSR

SEQ ID NO: 156158 - protein, 7 aa, synthetic construct
YKDIRFG

SEQ ID NO: 156159 - protein, 7 aa, synthetic construct
YKDIRHT

SEQ ID NO: 156160 - protein, 7 aa, synthetic construct
YKDLKYN

SEQ ID NO: 156161 - protein, 7 aa, synthetic construct
YKDLNGR

SEQ ID NO: 156162 - protein, 7 aa, synthetic construct
YKDLSGK

SEQ ID NO: 156163 - protein, 7 aa, synthetic construct
YKDMNFK

SEQ ID NO: 156164 - protein, 7 aa, synthetic construct
YKDMQTR

SEQ ID NO: 156165 - protein, 7 aa, synthetic construct
YKDMSTR

SEQ ID NO: 156166 - protein, 7 aa, synthetic construct
YKDNKWV

SEQ ID NO: 156167 - protein, 7 aa, synthetic construct
YKDPTGK

SEQ ID NO: 156168 - protein, 7 aa, synthetic construct
YKDQKQN

SEQ ID NO: 156169 - protein, 7 aa, synthetic construct
YKDQWRG

SEQ ID NO: 156170 - protein, 7 aa, synthetic construct
YKDRSHG

SEQ ID NO: 156171 - protein, 7 aa, synthetic construct
YKDTMKH

SEQ ID NO: 156172 - protein, 7 aa, synthetic construct
YKDVPSR

SEQ ID NO: 156173 - protein, 7 aa, synthetic construct
YKDYSPR

SEQ ID NO: 156174 - protein, 7 aa, synthetic construct
YKEHKYA

SEQ ID NO: 156175 - protein, 7 aa, synthetic construct
YKEHWQK

SEQ ID NO: 156176 - protein, 7 aa, synthetic construct
YKEIKVV

SEQ ID NO: 156177 - protein, 7 aa, synthetic construct
YKEINRM

SEQ ID NO: 156178 - protein, 7 aa, synthetic construct
YKEMRGF

SEQ ID NO: 156179 - protein, 7 aa, synthetic construct
YKEPLHR

SEQ ID NO: 156180 - protein, 7 aa, synthetic construct
YKEPRAF

SEQ ID NO: 156181 - protein, 7 aa, synthetic construct
YKEQLHR

SEQ ID NO: 156182 - protein, 7 aa, synthetic construct
YKERTMH

SEQ ID NO: 156183 - protein, 7 aa, synthetic construct
YKERVYG

SEQ ID NO: 156184 - protein, 7 aa, synthetic construct
YKESFNK

SEQ ID NO: 156185 - protein, 7 aa, synthetic construct
YKETKHI

SEQ ID NO: 156186 - protein, 7 aa, synthetic construct
YKETRGI

SEQ ID NO: 156187 - protein, 7 aa, synthetic construct
YKEVVTR

SEQ ID NO: 156188 - protein, 7 aa, synthetic construct
YKEWEIN

SEQ ID NO: 156189 - protein, 7 aa, synthetic construct
YKEWKIA

SEQ ID NO: 156190 - protein, 7 aa, synthetic construct
YKEYQRG

SEQ ID NO: 156191 - protein, 7 aa, synthetic construct
YKFEGAK

SEQ ID NO: 156192 - protein, 7 aa, synthetic construct
YKFKERE

SEQ ID NO: 156193 - protein, 7 aa, synthetic construct
YKGAATY

SEQ ID NO: 156194 - protein, 7 aa, synthetic construct
YKGADGR

SEQ ID NO: 156195 - protein, 7 aa, synthetic construct
YKGAQYP

SEQ ID NO: 156196 - protein, 7 aa, synthetic construct
YKGAQYT

SEQ ID NO: 156197 - protein, 7 aa, synthetic construct
YKGDRNI

SEQ ID NO: 156198 - protein, 7 aa, synthetic construct
YKGEFKQ

SEQ ID NO: 156199 - protein, 7 aa, synthetic construct
YKGEKYN

SEQ ID NO: 156200 - protein, 7 aa, synthetic construct
YKGERGY

SEQ ID NO: 156201 - protein, 7 aa, synthetic construct
YKGETRQ

SEQ ID NO: 156202 - protein, 7 aa, synthetic construct
YKGEVRY

SEQ ID NO: 156203 - protein, 7 aa, synthetic construct
YKGFNDK

SEQ ID NO: 156204 - protein, 7 aa, synthetic construct
YKGFQHA

SEQ ID NO: 156205 - protein, 7 aa, synthetic construct
YKGGHGN

SEQ ID NO: 156206 - protein, 7 aa, synthetic construct
YKGGPHF

SEQ ID NO: 156207 - protein, 7 aa, synthetic construct
YKGHLAM

SEQ ID NO: 156208 - protein, 7 aa, synthetic construct
YKGHMIT

SEQ ID NO: 156209 - protein, 7 aa, synthetic construct
YKGHMST

SEQ ID NO: 156210 - protein, 7 aa, synthetic construct
YKGHVER

SEQ ID NO: 156211 - protein, 7 aa, synthetic construct
YKGHVSV

SEQ ID NO: 156212 - protein, 7 aa, synthetic construct
YKGHYTG

SEQ ID NO: 156213 - protein, 7 aa, synthetic construct
YKGISGM

SEQ ID NO: 156214 - protein, 7 aa, synthetic construct
YKGITTY

SEQ ID NO: 156215 - protein, 7 aa, synthetic construct
YKGKMYE

SEQ ID NO: 156216 - protein, 7 aa, synthetic construct
YKGKSQD

SEQ ID NO: 156217 - protein, 7 aa, synthetic construct
YKGLATY

SEQ ID NO: 156218 - protein, 7 aa, synthetic construct
YKGLQHV

SEQ ID NO: 156219 - protein, 7 aa, synthetic construct
YKGLREM

SEQ ID NO: 156220 - protein, 7 aa, synthetic construct
YKGLSFN

SEQ ID NO: 156221 - protein, 7 aa, synthetic construct
YKGMHAH

SEQ ID NO: 156222 - protein, 7 aa, synthetic construct
YKGMNFQ

SEQ ID NO: 156223 - protein, 7 aa, synthetic construct
YKGMPAP

SEQ ID NO: 156224 - protein, 7 aa, synthetic construct
YKGMPSI

SEQ ID NO: 156225 - protein, 7 aa, synthetic construct
YKGMRGD

SEQ ID NO: 156226 - protein, 7 aa, synthetic construct
YKGNLRD

SEQ ID NO: 156227 - protein, 7 aa, synthetic construct
YKGNLTL

SEQ ID NO: 156228 - protein, 7 aa, synthetic construct
YKGPELR

SEQ ID NO: 156229 - protein, 7 aa, synthetic construct
YKGPITI

SEQ ID NO: 156230 - protein, 7 aa, synthetic construct
YKGPIYG

SEQ ID NO: 156231 - protein, 7 aa, synthetic construct
YKGPMDK

SEQ ID NO: 156232 - protein, 7 aa, synthetic construct
YKGPMVS

SEQ ID NO: 156233 - protein, 7 aa, synthetic construct
YKGPPGP

SEQ ID NO: 156234 - protein, 7 aa, synthetic construct
YKGPTLH

SEQ ID NO: 156235 - protein, 7 aa, synthetic construct
YKGPVSP

SEQ ID NO: 156236 - protein, 7 aa, synthetic construct
YKGPVVT

SEQ ID NO: 156237 - protein, 7 aa, synthetic construct
YKGQGYP

SEQ ID NO: 156238 - protein, 7 aa, synthetic construct
YKGQPGF

SEQ ID NO: 156239 - protein, 7 aa, synthetic construct
YKGQTHL

SEQ ID NO: 156240 - protein, 7 aa, synthetic construct
YKGSINI

SEQ ID NO: 156241 - protein, 7 aa, synthetic construct
YKGSSNH

SEQ ID NO: 156242 - protein, 7 aa, synthetic construct
YKGSSYA

SEQ ID NO: 156243 - protein, 7 aa, synthetic construct
YKGSYTI

SEQ ID NO: 156244 - protein, 7 aa, synthetic construct
YKGTHVY

SEQ ID NO: 156245 - protein, 7 aa, synthetic construct
YKGTYVQ

SEQ ID NO: 156246 - protein, 7 aa, synthetic construct
YKGVDHR

SEQ ID NO: 156247 - protein, 7 aa, synthetic construct
YKGVGYQ

SEQ ID NO: 156248 - protein, 7 aa, synthetic construct
YKGVSVI

SEQ ID NO: 156249 - protein, 7 aa, synthetic construct
YKGYASG

SEQ ID NO: 156250 - protein, 7 aa, synthetic construct
YKGYNTT

SEQ ID NO: 156251 - protein, 7 aa, synthetic construct
YKHAEKV

SEQ ID NO: 156252 - protein, 7 aa, synthetic construct
YKHAGPN

SEQ ID NO: 156253 - protein, 7 aa, synthetic construct
YKHAIAV

SEQ ID NO: 156254 - protein, 7 aa, synthetic construct
YKHAPPV

SEQ ID NO: 156255 - protein, 7 aa, synthetic construct
YKHAQTL

SEQ ID NO: 156256 - protein, 7 aa, synthetic construct
YKHDIKV

SEQ ID NO: 156257 - protein, 7 aa, synthetic construct
YKHDMKV

SEQ ID NO: 156258 - protein, 7 aa, synthetic construct
YKHDRLN

SEQ ID NO: 156259 - protein, 7 aa, synthetic construct
YKHGHPG

SEQ ID NO: 156260 - protein, 7 aa, synthetic construct
YKHGVTT

SEQ ID NO: 156261 - protein, 7 aa, synthetic construct
YKHHLSG

SEQ ID NO: 156262 - protein, 7 aa, synthetic construct
YKHIAEK

SEQ ID NO: 156263 - protein, 7 aa, synthetic construct
YKHIGNT

SEQ ID NO: 156264 - protein, 7 aa, synthetic construct
YKHIMGA

SEQ ID NO: 156265 - protein, 7 aa, synthetic construct
YKHIMGN

SEQ ID NO: 156266 - protein, 7 aa, synthetic construct
YKHIPVA

SEQ ID NO: 156267 - protein, 7 aa, synthetic construct
YKHISPV

SEQ ID NO: 156268 - protein, 7 aa, synthetic construct
YKHKMVD

SEQ ID NO: 156269 - protein, 7 aa, synthetic construct
YKHLAQQ

SEQ ID NO: 156270 - protein, 7 aa, synthetic construct
YKHLARD

SEQ ID NO: 156271 - protein, 7 aa, synthetic construct
YKHLASQ

SEQ ID NO: 156272 - protein, 7 aa, synthetic construct
YKHLVMP

SEQ ID NO: 156273 - protein, 7 aa, synthetic construct
YKHMITS

SEQ ID NO: 156274 - protein, 7 aa, synthetic construct
YKHMKVE

SEQ ID NO: 156275 - protein, 7 aa, synthetic construct
YKHMVLA

SEQ ID NO: 156276 - protein, 7 aa, synthetic construct
YKHNLQA

SEQ ID NO: 156277 - protein, 7 aa, synthetic construct
YKHNQLV

SEQ ID NO: 156278 - protein, 7 aa, synthetic construct
YKHNQYA

SEQ ID NO: 156279 - protein, 7 aa, synthetic construct
YKHNSPA

SEQ ID NO: 156280 - protein, 7 aa, synthetic construct
YKHPAIS

SEQ ID NO: 156281 - protein, 7 aa, synthetic construct
YKHPQMN

SEQ ID NO: 156282 - protein, 7 aa, synthetic construct
YKHQKPD

SEQ ID NO: 156283 - protein, 7 aa, synthetic construct
YKHQLNP

SEQ ID NO: 156284 - protein, 7 aa, synthetic construct
YKHQNSI

SEQ ID NO: 156285 - protein, 7 aa, synthetic construct
YKHQNVQ

SEQ ID NO: 156286 - protein, 7 aa, synthetic construct
YKHQTPM

SEQ ID NO: 156287 - protein, 7 aa, synthetic construct
YKHSMAN

SEQ ID NO: 156288 - protein, 7 aa, synthetic construct
YKHSTGG

SEQ ID NO: 156289 - protein, 7 aa, synthetic construct
YKHTAFS

SEQ ID NO: 156290 - protein, 7 aa, synthetic construct
YKHTGSQ

SEQ ID NO: 156291 - protein, 7 aa, synthetic construct
YKHTIMT

SEQ ID NO: 156292 - protein, 7 aa, synthetic construct
YKHTSLQ

SEQ ID NO: 156293 - protein, 7 aa, synthetic construct
YKHVHIS

SEQ ID NO: 156294 - protein, 7 aa, synthetic construct
YKHVISG

SEQ ID NO: 156295 - protein, 7 aa, synthetic construct
YKHVPMV

SEQ ID NO: 156296 - protein, 7 aa, synthetic construct
YKHVVAN

SEQ ID NO: 156297 - protein, 7 aa, synthetic construct
YKIEMRQ

SEQ ID NO: 156298 - protein, 7 aa, synthetic construct
YKIGPGN

SEQ ID NO: 156299 - protein, 7 aa, synthetic construct
YKIHMGG

SEQ ID NO: 156300 - protein, 7 aa, synthetic construct
YKIHMNA

SEQ ID NO: 156301 - protein, 7 aa, synthetic construct
YKIKQFD

SEQ ID NO: 156302 - protein, 7 aa, synthetic construct
YKINSSL

SEQ ID NO: 156303 - protein, 7 aa, synthetic construct
YKIPAHP

SEQ ID NO: 156304 - protein, 7 aa, synthetic construct
YKIPHAV

SEQ ID NO: 156305 - protein, 7 aa, synthetic construct
YKIPHQQ

SEQ ID NO: 156306 - protein, 7 aa, synthetic construct
YKIVNAA

SEQ ID NO: 156307 - protein, 7 aa, synthetic construct
YKKDSMF

SEQ ID NO: 156308 - protein, 7 aa, synthetic construct
YKKDTWN

SEQ ID NO: 156309 - protein, 7 aa, synthetic construct
YKKELYV

SEQ ID NO: 156310 - protein, 7 aa, synthetic construct
YKKEYMS

SEQ ID NO: 156311 - protein, 7 aa, synthetic construct
YKKGDYI

SEQ ID NO: 156312 - protein, 7 aa, synthetic construct
YKKNEYA

SEQ ID NO: 156313 - protein, 7 aa, synthetic construct
YKKNTYE

SEQ ID NO: 156314 - protein, 7 aa, synthetic construct
YKKQEIY

SEQ ID NO: 156315 - protein, 7 aa, synthetic construct
YKKVYQE

SEQ ID NO: 156316 - protein, 7 aa, synthetic construct
YKKYQDA

SEQ ID NO: 156317 - protein, 7 aa, synthetic construct
YKLEKIV

SEQ ID NO: 156318 - protein, 7 aa, synthetic construct
YKLLRTD

SEQ ID NO: 156319 - protein, 7 aa, synthetic construct
YKLNIGH

SEQ ID NO: 156320 - protein, 7 aa, synthetic construct
YKLNPSV

SEQ ID NO: 156321 - protein, 7 aa, synthetic construct
YKLQTHN

SEQ ID NO: 156322 - protein, 7 aa, synthetic construct
YKLREIS

SEQ ID NO: 156323 - protein, 7 aa, synthetic construct
YKLSGDR

SEQ ID NO: 156324 - protein, 7 aa, synthetic construct
YKLSPPN

SEQ ID NO: 156325 - protein, 7 aa, synthetic construct
YKMARDY

SEQ ID NO: 156326 - protein, 7 aa, synthetic construct
YKMKDAN

SEQ ID NO: 156327 - protein, 7 aa, synthetic construct
YKMMNDR

SEQ ID NO: 156328 - protein, 7 aa, synthetic construct
YKMMSMA

SEQ ID NO: 156329 - protein, 7 aa, synthetic construct
YKMPLHA

SEQ ID NO: 156330 - protein, 7 aa, synthetic construct
YKMPQGT

SEQ ID NO: 156331 - protein, 7 aa, synthetic construct
YKMQHTH

SEQ ID NO: 156332 - protein, 7 aa, synthetic construct
YKMQNER

SEQ ID NO: 156333 - protein, 7 aa, synthetic construct
YKMSNAM

SEQ ID NO: 156334 - protein, 7 aa, synthetic construct
YKMTSQF

SEQ ID NO: 156335 - protein, 7 aa, synthetic construct
YKMVTPS

SEQ ID NO: 156336 - protein, 7 aa, synthetic construct
YKNAHEK

SEQ ID NO: 156337 - protein, 7 aa, synthetic construct
YKNHANL

SEQ ID NO: 156338 - protein, 7 aa, synthetic construct
YKNHPNL

SEQ ID NO: 156339 - protein, 7 aa, synthetic construct
YKNHQER

SEQ ID NO: 156340 - protein, 7 aa, synthetic construct
YKNIAPI

SEQ ID NO: 156341 - protein, 7 aa, synthetic construct
YKNIMPQ

SEQ ID NO: 156342 - protein, 7 aa, synthetic construct
YKNINPS

SEQ ID NO: 156343 - protein, 7 aa, synthetic construct
YKNIQFS

SEQ ID NO: 156344 - protein, 7 aa, synthetic construct
YKNISLT

SEQ ID NO: 156345 - protein, 7 aa, synthetic construct
YKNITFN

SEQ ID NO: 156346 - protein, 7 aa, synthetic construct
YKNKPDF

SEQ ID NO: 156347 - protein, 7 aa, synthetic construct
YKNLPHP

SEQ ID NO: 156348 - protein, 7 aa, synthetic construct
YKNLRDT

SEQ ID NO: 156349 - protein, 7 aa, synthetic construct
YKNLSFS

SEQ ID NO: 156350 - protein, 7 aa, synthetic construct
YKNMPAI

SEQ ID NO: 156351 - protein, 7 aa, synthetic construct
YKNMYSG

SEQ ID NO: 156352 - protein, 7 aa, synthetic construct
YKNNHHN

SEQ ID NO: 156353 - protein, 7 aa, synthetic construct
YKNNNDR

SEQ ID NO: 156354 - protein, 7 aa, synthetic construct
YKNNPIN

SEQ ID NO: 156355 - protein, 7 aa, synthetic construct
YKNNSHM

SEQ ID NO: 156356 - protein, 7 aa, synthetic construct
YKNNVAF

SEQ ID NO: 156357 - protein, 7 aa, synthetic construct
YKNPASG

SEQ ID NO: 156358 - protein, 7 aa, synthetic construct
YKNPEVK

SEQ ID NO: 156359 - protein, 7 aa, synthetic construct
YKNPGYS

SEQ ID NO: 156360 - protein, 7 aa, synthetic construct
YKNPHIQ

SEQ ID NO: 156361 - protein, 7 aa, synthetic construct
YKNPHIS

SEQ ID NO: 156362 - protein, 7 aa, synthetic construct
YKNPKDM

SEQ ID NO: 156363 - protein, 7 aa, synthetic construct
YKNPPSH

SEQ ID NO: 156364 - protein, 7 aa, synthetic construct
YKNPSGA

SEQ ID NO: 156365 - protein, 7 aa, synthetic construct
YKNQNRD

SEQ ID NO: 156366 - protein, 7 aa, synthetic construct
YKNRETL

SEQ ID NO: 156367 - protein, 7 aa, synthetic construct
YKNRNDP

SEQ ID NO: 156368 - protein, 7 aa, synthetic construct
YKNRTEV

SEQ ID NO: 156369 - protein, 7 aa, synthetic construct
YKNRTME

SEQ ID NO: 156370 - protein, 7 aa, synthetic construct
YKNSNYV

SEQ ID NO: 156371 - protein, 7 aa, synthetic construct
YKNVHAI

SEQ ID NO: 156372 - protein, 7 aa, synthetic construct
YKNVNIM

SEQ ID NO: 156373 - protein, 7 aa, synthetic construct
YKNVSNM

SEQ ID NO: 156374 - protein, 7 aa, synthetic construct
YKPAMSL

SEQ ID NO: 156375 - protein, 7 aa, synthetic construct
YKPAPHA

SEQ ID NO: 156376 - protein, 7 aa, synthetic construct
YKPAPST

SEQ ID NO: 156377 - protein, 7 aa, synthetic construct
YKPARYE

SEQ ID NO: 156378 - protein, 7 aa, synthetic construct
YKPAYGT

SEQ ID NO: 156379 - protein, 7 aa, synthetic construct
YKPFMTS

SEQ ID NO: 156380 - protein, 7 aa, synthetic construct
YKPGPII

SEQ ID NO: 156381 - protein, 7 aa, synthetic construct
YKPGYHS

SEQ ID NO: 156382 - protein, 7 aa, synthetic construct
YKPHTGT

SEQ ID NO: 156383 - protein, 7 aa, synthetic construct
YKPIRND

SEQ ID NO: 156384 - protein, 7 aa, synthetic construct
YKPLGHT

SEQ ID NO: 156385 - protein, 7 aa, synthetic construct
YKPMPMA

SEQ ID NO: 156386 - protein, 7 aa, synthetic construct
YKPNAYM

SEQ ID NO: 156387 - protein, 7 aa, synthetic construct
YKPNHQT

SEQ ID NO: 156388 - protein, 7 aa, synthetic construct
YKPNVHM

SEQ ID NO: 156389 - protein, 7 aa, synthetic construct
YKPPGPP

SEQ ID NO: 156390 - protein, 7 aa, synthetic construct
YKPPNMV

SEQ ID NO: 156391 - protein, 7 aa, synthetic construct
YKPPPTP

SEQ ID NO: 156392 - protein, 7 aa, synthetic construct
YKPPRNE

SEQ ID NO: 156393 - protein, 7 aa, synthetic construct
YKPRPID

SEQ ID NO: 156394 - protein, 7 aa, synthetic construct
YKPSPGT

SEQ ID NO: 156395 - protein, 7 aa, synthetic construct
YKPSPHM

SEQ ID NO: 156396 - protein, 7 aa, synthetic construct
YKPSYIG

SEQ ID NO: 156397 - protein, 7 aa, synthetic construct
YKPTMNM

SEQ ID NO: 156398 - protein, 7 aa, synthetic construct
YKPTNMF

SEQ ID NO: 156399 - protein, 7 aa, synthetic construct
YKPTTYN

SEQ ID NO: 156400 - protein, 7 aa, synthetic construct
YKPTYAQ

SEQ ID NO: 156401 - protein, 7 aa, synthetic construct
YKPTYSG

SEQ ID NO: 156402 - protein, 7 aa, synthetic construct
YKPVPYS

SEQ ID NO: 156403 - protein, 7 aa, synthetic construct
YKPYADR

SEQ ID NO: 156404 - protein, 7 aa, synthetic construct
YKPYVTS

SEQ ID NO: 156405 - protein, 7 aa, synthetic construct
YKQAHGV

SEQ ID NO: 156406 - protein, 7 aa, synthetic construct
YKQAHMV

SEQ ID NO: 156407 - protein, 7 aa, synthetic construct
YKQASER

SEQ ID NO: 156408 - protein, 7 aa, synthetic construct
YKQAYAH

SEQ ID NO: 156409 - protein, 7 aa, synthetic construct
YKQELQR

SEQ ID NO: 156410 - protein, 7 aa, synthetic construct
YKQGIYS

SEQ ID NO: 156411 - protein, 7 aa, synthetic construct
YKQHANF

SEQ ID NO: 156412 - protein, 7 aa, synthetic construct
YKQHAVI

SEQ ID NO: 156413 - protein, 7 aa, synthetic construct
YKQHGMS

SEQ ID NO: 156414 - protein, 7 aa, synthetic construct
YKQHLNM

SEQ ID NO: 156415 - protein, 7 aa, synthetic construct
YKQIAPS

SEQ ID NO: 156416 - protein, 7 aa, synthetic construct
YKQKDFL

SEQ ID NO: 156417 - protein, 7 aa, synthetic construct
YKQKYQD

SEQ ID NO: 156418 - protein, 7 aa, synthetic construct
YKQLSLS

SEQ ID NO: 156419 - protein, 7 aa, synthetic construct
YKQLYTG

SEQ ID NO: 156420 - protein, 7 aa, synthetic construct
YKQMPHQ

SEQ ID NO: 156421 - protein, 7 aa, synthetic construct
YKQNFTV

SEQ ID NO: 156422 - protein, 7 aa, synthetic construct
YKQNHSF

SEQ ID NO: 156423 - protein, 7 aa, synthetic construct
YKQNPGS

SEQ ID NO: 156424 - protein, 7 aa, synthetic construct
YKQPGPN

SEQ ID NO: 156425 - protein, 7 aa, synthetic construct
YKQPMHT

SEQ ID NO: 156426 - protein, 7 aa, synthetic construct
YKQQNEK

SEQ ID NO: 156427 - protein, 7 aa, synthetic construct
YKQQQFN

SEQ ID NO: 156428 - protein, 7 aa, synthetic construct
YKQQTHL

SEQ ID NO: 156429 - protein, 7 aa, synthetic construct
YKQRDMA

SEQ ID NO: 156430 - protein, 7 aa, synthetic construct
YKQRGDG

SEQ ID NO: 156431 - protein, 7 aa, synthetic construct
YKQRSPE

SEQ ID NO: 156432 - protein, 7 aa, synthetic construct
YKQSHQI

SEQ ID NO: 156433 - protein, 7 aa, synthetic construct
YKQSPYV

SEQ ID NO: 156434 - protein, 7 aa, synthetic construct
YKQSTMY

SEQ ID NO: 156435 - protein, 7 aa, synthetic construct
YKQVFNA

SEQ ID NO: 156436 - protein, 7 aa, synthetic construct
YKQVLAH

SEQ ID NO: 156437 - protein, 7 aa, synthetic construct
YKQVPQI

SEQ ID NO: 156438 - protein, 7 aa, synthetic construct
YKRAITD

SEQ ID NO: 156439 - protein, 7 aa, synthetic construct
YKRDTPA

SEQ ID NO: 156440 - protein, 7 aa, synthetic construct
YKRDVGQ

SEQ ID NO: 156441 - protein, 7 aa, synthetic construct
YKREAKE

SEQ ID NO: 156442 - protein, 7 aa, synthetic construct
YKREERG

SEQ ID NO: 156443 - protein, 7 aa, synthetic construct
YKREFNP

SEQ ID NO: 156444 - protein, 7 aa, synthetic construct
YKREGSM

SEQ ID NO: 156445 - protein, 7 aa, synthetic construct
YKREIMS

SEQ ID NO: 156446 - protein, 7 aa, synthetic construct
YKRESPV

SEQ ID NO: 156447 - protein, 7 aa, synthetic construct
YKRETVG

SEQ ID NO: 156448 - protein, 7 aa, synthetic construct
YKRLTSE

SEQ ID NO: 156449 - protein, 7 aa, synthetic construct
YKRQEIA

SEQ ID NO: 156450 - protein, 7 aa, synthetic construct
YKRSTVE

SEQ ID NO: 156451 - protein, 7 aa, synthetic construct
YKSASPF

SEQ ID NO: 156452 - protein, 7 aa, synthetic construct
YKSAVHH

SEQ ID NO: 156453 - protein, 7 aa, synthetic construct
YKSDYRS

SEQ ID NO: 156454 - protein, 7 aa, synthetic construct
YKSEITR

SEQ ID NO: 156455 - protein, 7 aa, synthetic construct
YKSEKNL

SEQ ID NO: 156456 - protein, 7 aa, synthetic construct
YKSFSRE

SEQ ID NO: 156457 - protein, 7 aa, synthetic construct
YKSHAIQ

SEQ ID NO: 156458 - protein, 7 aa, synthetic construct
YKSHASS

SEQ ID NO: 156459 - protein, 7 aa, synthetic construct
YKSHASV

SEQ ID NO: 156460 - protein, 7 aa, synthetic construct
YKSHSPQ

SEQ ID NO: 156461 - protein, 7 aa, synthetic construct
YKSIMLS

SEQ ID NO: 156462 - protein, 7 aa, synthetic construct
YKSLHHG

SEQ ID NO: 156463 - protein, 7 aa, synthetic construct
YKSMPHI

SEQ ID NO: 156464 - protein, 7 aa, synthetic construct
YKSMSNI

SEQ ID NO: 156465 - protein, 7 aa, synthetic construct
YKSNDLR

SEQ ID NO: 156466 - protein, 7 aa, synthetic construct
YKSNMER

SEQ ID NO: 156467 - protein, 7 aa, synthetic construct
YKSNPSY

SEQ ID NO: 156468 - protein, 7 aa, synthetic construct
YKSPQFS

SEQ ID NO: 156469 - protein, 7 aa, synthetic construct
YKSQASF

SEQ ID NO: 156470 - protein, 7 aa, synthetic construct
YKSQFLN

SEQ ID NO: 156471 - protein, 7 aa, synthetic construct
YKSQPFV

SEQ ID NO: 156472 - protein, 7 aa, synthetic construct
YKSQRES

SEQ ID NO: 156473 - protein, 7 aa, synthetic construct
YKSRLEA

SEQ ID NO: 156474 - protein, 7 aa, synthetic construct
YKSRVTE

SEQ ID NO: 156475 - protein, 7 aa, synthetic construct
YKSSDQR

SEQ ID NO: 156476 - protein, 7 aa, synthetic construct
YKSSFHS

SEQ ID NO: 156477 - protein, 7 aa, synthetic construct
YKSSSHF

SEQ ID NO: 156478 - protein, 7 aa, synthetic construct
YKSTHVL

SEQ ID NO: 156479 - protein, 7 aa, synthetic construct
YKSTMNY

SEQ ID NO: 156480 - protein, 7 aa, synthetic construct
YKSVDFR

SEQ ID NO: 156481 - protein, 7 aa, synthetic construct
YKSVERT

SEQ ID NO: 156482 - protein, 7 aa, synthetic construct
YKSVPTF

SEQ ID NO: 156483 - protein, 7 aa, synthetic construct
YKSVRND

SEQ ID NO: 156484 - protein, 7 aa, synthetic construct
YKSVYVN

SEQ ID NO: 156485 - protein, 7 aa, synthetic construct
YKSYKDS

SEQ ID NO: 156486 - protein, 7 aa, synthetic construct
YKTAEMR

SEQ ID NO: 156487 - protein, 7 aa, synthetic construct
YKTANAH

SEQ ID NO: 156488 - protein, 7 aa, synthetic construct
YKTDHKW

SEQ ID NO: 156489 - protein, 7 aa, synthetic construct
YKTDYPR

SEQ ID NO: 156490 - protein, 7 aa, synthetic construct
YKTEIMR

SEQ ID NO: 156491 - protein, 7 aa, synthetic construct
YKTEITR

SEQ ID NO: 156492 - protein, 7 aa, synthetic construct
YKTELGR

SEQ ID NO: 156493 - protein, 7 aa, synthetic construct
YKTERGN

SEQ ID NO: 156494 - protein, 7 aa, synthetic construct
YKTERTT

SEQ ID NO: 156495 - protein, 7 aa, synthetic construct
YKTGASS

SEQ ID NO: 156496 - protein, 7 aa, synthetic construct
YKTINPH

SEQ ID NO: 156497 - protein, 7 aa, synthetic construct
YKTISHV

SEQ ID NO: 156498 - protein, 7 aa, synthetic construct
YKTLMGS

SEQ ID NO: 156499 - protein, 7 aa, synthetic construct
YKTMHPI

SEQ ID NO: 156500 - protein, 7 aa, synthetic construct
YKTMLHS

SEQ ID NO: 156501 - protein, 7 aa, synthetic construct
YKTNHAL

SEQ ID NO: 156502 - protein, 7 aa, synthetic construct
YKTNQHL

SEQ ID NO: 156503 - protein, 7 aa, synthetic construct
YKTNREL

SEQ ID NO: 156504 - protein, 7 aa, synthetic construct
YKTQLGH

SEQ ID NO: 156505 - protein, 7 aa, synthetic construct
YKTRDIA

SEQ ID NO: 156506 - protein, 7 aa, synthetic construct
YKTSPPI

SEQ ID NO: 156507 - protein, 7 aa, synthetic construct
YKTSSWE

SEQ ID NO: 156508 - protein, 7 aa, synthetic construct
YKTTPVM

SEQ ID NO: 156509 - protein, 7 aa, synthetic construct
YKTTQDR

SEQ ID NO: 156510 - protein, 7 aa, synthetic construct
YKTTYRD

SEQ ID NO: 156511 - protein, 7 aa, synthetic construct
YKTVDTR

SEQ ID NO: 156512 - protein, 7 aa, synthetic construct
YKTVQDK

SEQ ID NO: 156513 - protein, 7 aa, synthetic construct
YKTYNAG

SEQ ID NO: 156514 - protein, 7 aa, synthetic construct
YKTYNPG

SEQ ID NO: 156515 - protein, 7 aa, synthetic construct
YKVHAGV

SEQ ID NO: 156516 - protein, 7 aa, synthetic construct
YKVHDKM

SEQ ID NO: 156517 - protein, 7 aa, synthetic construct
YKVHLNA

SEQ ID NO: 156518 - protein, 7 aa, synthetic construct
YKVHSPQ

SEQ ID NO: 156519 - protein, 7 aa, synthetic construct
YKVHVHA

SEQ ID NO: 156520 - protein, 7 aa, synthetic construct
YKVITPQ

SEQ ID NO: 156521 - protein, 7 aa, synthetic construct
YKVKYTD

SEQ ID NO: 156522 - protein, 7 aa, synthetic construct
YKVMNGQ

SEQ ID NO: 156523 - protein, 7 aa, synthetic construct
YKVMQMG

SEQ ID NO: 156524 - protein, 7 aa, synthetic construct
YKVMTPH

SEQ ID NO: 156525 - protein, 7 aa, synthetic construct
YKVMVHA

SEQ ID NO: 156526 - protein, 7 aa, synthetic construct
YKVNPSL

SEQ ID NO: 156527 - protein, 7 aa, synthetic construct
YKVPAST

SEQ ID NO: 156528 - protein, 7 aa, synthetic construct
YKVPISS

SEQ ID NO: 156529 - protein, 7 aa, synthetic construct
YKVPQSH

SEQ ID NO: 156530 - protein, 7 aa, synthetic construct
YKVPTDR

SEQ ID NO: 156531 - protein, 7 aa, synthetic construct
YKVRDVG

SEQ ID NO: 156532 - protein, 7 aa, synthetic construct
YKVSGDR

SEQ ID NO: 156533 - protein, 7 aa, synthetic construct
YKWKQED

SEQ ID NO: 156534 - protein, 7 aa, synthetic construct
YKYAQGQ

SEQ ID NO: 156535 - protein, 7 aa, synthetic construct
YKYKENT

SEQ ID NO: 156536 - protein, 7 aa, synthetic construct
YKYKIDA

SEQ ID NO: 156537 - protein, 7 aa, synthetic construct
YKYSKGD

SEQ ID NO: 156538 - protein, 7 aa, synthetic construct
YLAGGHK

SEQ ID NO: 156539 - protein, 7 aa, synthetic construct
YLAGKHV

SEQ ID NO: 156540 - protein, 7 aa, synthetic construct
YLAKEVR

SEQ ID NO: 156541 - protein, 7 aa, synthetic construct
YLAMKNS

SEQ ID NO: 156542 - protein, 7 aa, synthetic construct
YLDARRN

SEQ ID NO: 156543 - protein, 7 aa, synthetic construct
YLDHKRQ

SEQ ID NO: 156544 - protein, 7 aa, synthetic construct
YLDKPKM

SEQ ID NO: 156545 - protein, 7 aa, synthetic construct
YLEVKKP

SEQ ID NO: 156546 - protein, 7 aa, synthetic construct
YLGAAHK

SEQ ID NO: 156547 - protein, 7 aa, synthetic construct
YLGAQNR

SEQ ID NO: 156548 - protein, 7 aa, synthetic construct
YLGEKRI

SEQ ID NO: 156549 - protein, 7 aa, synthetic construct
YLGERNR

SEQ ID NO: 156550 - protein, 7 aa, synthetic construct
YLGGPTR

SEQ ID NO: 156551 - protein, 7 aa, synthetic construct
YLGGSAR

SEQ ID NO: 156552 - protein, 7 aa, synthetic construct
YLGHVKP

SEQ ID NO: 156553 - protein, 7 aa, synthetic construct
YLGITKM

SEQ ID NO: 156554 - protein, 7 aa, synthetic construct
YLGKKGD

SEQ ID NO: 156555 - protein, 7 aa, synthetic construct
YLGKNQL

SEQ ID NO: 156556 - protein, 7 aa, synthetic construct
YLGNQKN

SEQ ID NO: 156557 - protein, 7 aa, synthetic construct
YLGNTKL

SEQ ID NO: 156558 - protein, 7 aa, synthetic construct
YLGPHKG

SEQ ID NO: 156559 - protein, 7 aa, synthetic construct
YLGQAKI

SEQ ID NO: 156560 - protein, 7 aa, synthetic construct
YLGQGSR

SEQ ID NO: 156561 - protein, 7 aa, synthetic construct
YLGRPQP

SEQ ID NO: 156562 - protein, 7 aa, synthetic construct
YLGSRVT

SEQ ID NO: 156563 - protein, 7 aa, synthetic construct
YLGTKHM

SEQ ID NO: 156564 - protein, 7 aa, synthetic construct
YLGYVAQ

SEQ ID NO: 156565 - protein, 7 aa, synthetic construct
YLHGKMA

SEQ ID NO: 156566 - protein, 7 aa, synthetic construct
YLHGMKN

SEQ ID NO: 156567 - protein, 7 aa, synthetic construct
YLHNGVR

SEQ ID NO: 156568 - protein, 7 aa, synthetic construct
YLHNRNN

SEQ ID NO: 156569 - protein, 7 aa, synthetic construct
YLHPIKN

SEQ ID NO: 156570 - protein, 7 aa, synthetic construct
YLHTIKN

SEQ ID NO: 156571 - protein, 7 aa, synthetic construct
YLHVKKD

SEQ ID NO: 156572 - protein, 7 aa, synthetic construct
YLKAYPS

SEQ ID NO: 156573 - protein, 7 aa, synthetic construct
YLKDMHK

SEQ ID NO: 156574 - protein, 7 aa, synthetic construct
YLKDRYT

SEQ ID NO: 156575 - protein, 7 aa, synthetic construct
YLKGHLQ

SEQ ID NO: 156576 - protein, 7 aa, synthetic construct
YLKGHTQ

SEQ ID NO: 156577 - protein, 7 aa, synthetic construct
YLKGSTF

SEQ ID NO: 156578 - protein, 7 aa, synthetic construct
YLKGVHT

SEQ ID NO: 156579 - protein, 7 aa, synthetic construct
YLKHHPA

SEQ ID NO: 156580 - protein, 7 aa, synthetic construct
YLKHNNV

SEQ ID NO: 156581 - protein, 7 aa, synthetic construct
YLKHREV

SEQ ID NO: 156582 - protein, 7 aa, synthetic construct
YLKHSGA

SEQ ID NO: 156583 - protein, 7 aa, synthetic construct
YLKIHSS

SEQ ID NO: 156584 - protein, 7 aa, synthetic construct
YLKMHKD

SEQ ID NO: 156585 - protein, 7 aa, synthetic construct
YLKPQAS

SEQ ID NO: 156586 - protein, 7 aa, synthetic construct
YLKQAHN

SEQ ID NO: 156587 - protein, 7 aa, synthetic construct
YLKQIHQ

SEQ ID NO: 156588 - protein, 7 aa, synthetic construct
YLKREIP

SEQ ID NO: 156589 - protein, 7 aa, synthetic construct
YLKSERI

SEQ ID NO: 156590 - protein, 7 aa, synthetic construct
YLKTDIR

SEQ ID NO: 156591 - protein, 7 aa, synthetic construct
YLLKGRD

SEQ ID NO: 156592 - protein, 7 aa, synthetic construct
YLNGHTR

SEQ ID NO: 156593 - protein, 7 aa, synthetic construct
YLNNPKS

SEQ ID NO: 156594 - protein, 7 aa, synthetic construct
YLNRIKD

SEQ ID NO: 156595 - protein, 7 aa, synthetic construct
YLNRSAV

SEQ ID NO: 156596 - protein, 7 aa, synthetic construct
YLNRTVV

SEQ ID NO: 156597 - protein, 7 aa, synthetic construct
YLNRVEK

SEQ ID NO: 156598 - protein, 7 aa, synthetic construct
YLNSQVR

SEQ ID NO: 156599 - protein, 7 aa, synthetic construct
YLNTSNR

SEQ ID NO: 156600 - protein, 7 aa, synthetic construct
YLNTTAR

SEQ ID NO: 156601 - protein, 7 aa, synthetic construct
YLPDSRK

SEQ ID NO: 156602 - protein, 7 aa, synthetic construct
YLPKGVT

SEQ ID NO: 156603 - protein, 7 aa, synthetic construct
YLPKQHQ

SEQ ID NO: 156604 - protein, 7 aa, synthetic construct
YLPTANR

SEQ ID NO: 156605 - protein, 7 aa, synthetic construct
YLQGSGK

SEQ ID NO: 156606 - protein, 7 aa, synthetic construct
YLQGSKH

SEQ ID NO: 156607 - protein, 7 aa, synthetic construct
YLQHNKS

SEQ ID NO: 156608 - protein, 7 aa, synthetic construct
YLQNGRQ

SEQ ID NO: 156609 - protein, 7 aa, synthetic construct
YLQRNVA

SEQ ID NO: 156610 - protein, 7 aa, synthetic construct
YLQTHKM

SEQ ID NO: 156611 - protein, 7 aa, synthetic construct
YLRATNV

SEQ ID NO: 156612 - protein, 7 aa, synthetic construct
YLRDGAK

SEQ ID NO: 156613 - protein, 7 aa, synthetic construct
YLRDKDK

SEQ ID NO: 156614 - protein, 7 aa, synthetic construct
YLRDSVR

SEQ ID NO: 156615 - protein, 7 aa, synthetic construct
YLRELDF

SEQ ID NO: 156616 - protein, 7 aa, synthetic construct
YLREPRM

SEQ ID NO: 156617 - protein, 7 aa, synthetic construct
YLRGATG

SEQ ID NO: 156618 - protein, 7 aa, synthetic construct
YLRNITG

SEQ ID NO: 156619 - protein, 7 aa, synthetic construct
YLRNPTS

SEQ ID NO: 156620 - protein, 7 aa, synthetic construct
YLRPKDV

SEQ ID NO: 156621 - protein, 7 aa, synthetic construct
YLRQTAG

SEQ ID NO: 156622 - protein, 7 aa, synthetic construct
YLSHQKA

SEQ ID NO: 156623 - protein, 7 aa, synthetic construct
YLSHQRG

SEQ ID NO: 156624 - protein, 7 aa, synthetic construct
YLSQQHK

SEQ ID NO: 156625 - protein, 7 aa, synthetic construct
YLSRSKD

SEQ ID NO: 156626 - protein, 7 aa, synthetic construct
YLSRSKE

SEQ ID NO: 156627 - protein, 7 aa, synthetic construct
YLSSNRM

SEQ ID NO: 156628 - protein, 7 aa, synthetic construct
YLTGHKN

SEQ ID NO: 156629 - protein, 7 aa, synthetic construct
YLTGNAR

SEQ ID NO: 156630 - protein, 7 aa, synthetic construct
YLTIQKA

SEQ ID NO: 156631 - protein, 7 aa, synthetic construct
YLTPKNT

SEQ ID NO: 156632 - protein, 7 aa, synthetic construct
YLTRGVS

SEQ ID NO: 156633 - protein, 7 aa, synthetic construct
YLVNHSK

SEQ ID NO: 156634 - protein, 7 aa, synthetic construct
YMAKEIR

SEQ ID NO: 156635 - protein, 7 aa, synthetic construct
YMAMKQP

SEQ ID NO: 156636 - protein, 7 aa, synthetic construct
YMANGGR

SEQ ID NO: 156637 - protein, 7 aa, synthetic construct
YMANHAK

SEQ ID NO: 156638 - protein, 7 aa, synthetic construct
YMAVRNS

SEQ ID NO: 156639 - protein, 7 aa, synthetic construct
YMEGRPK

SEQ ID NO: 156640 - protein, 7 aa, synthetic construct
YMEKRGG

SEQ ID NO: 156641 - protein, 7 aa, synthetic construct
YMGAHNK

SEQ ID NO: 156642 - protein, 7 aa, synthetic construct
YMGAIAR

SEQ ID NO: 156643 - protein, 7 aa, synthetic construct
YMGDKGK

SEQ ID NO: 156644 - protein, 7 aa, synthetic construct
YMGGKMI

SEQ ID NO: 156645 - protein, 7 aa, synthetic construct
YMGGSKQ

SEQ ID NO: 156646 - protein, 7 aa, synthetic construct
YMGHQKA

SEQ ID NO: 156647 - protein, 7 aa, synthetic construct
YMGIIPK

SEQ ID NO: 156648 - protein, 7 aa, synthetic construct
YMGIRSG

SEQ ID NO: 156649 - protein, 7 aa, synthetic construct
YMGNKMH

SEQ ID NO: 156650 - protein, 7 aa, synthetic construct
YMGQNSK

SEQ ID NO: 156651 - protein, 7 aa, synthetic construct
YMGQQSK

SEQ ID NO: 156652 - protein, 7 aa, synthetic construct
YMGRIKD

SEQ ID NO: 156653 - protein, 7 aa, synthetic construct
YMGSRQQ

SEQ ID NO: 156654 - protein, 7 aa, synthetic construct
YMGTKSL

SEQ ID NO: 156655 - protein, 7 aa, synthetic construct
YMGTSNR

SEQ ID NO: 156656 - protein, 7 aa, synthetic construct
YMHAAKN

SEQ ID NO: 156657 - protein, 7 aa, synthetic construct
YMHDKNR

SEQ ID NO: 156658 - protein, 7 aa, synthetic construct
YMHKSMG

SEQ ID NO: 156659 - protein, 7 aa, synthetic construct
YMHNPKI

SEQ ID NO: 156660 - protein, 7 aa, synthetic construct
YMHQRQV

SEQ ID NO: 156661 - protein, 7 aa, synthetic construct
YMHSAKI

SEQ ID NO: 156662 - protein, 7 aa, synthetic construct
YMHSNKI

SEQ ID NO: 156663 - protein, 7 aa, synthetic construct
YMHTPTK

SEQ ID NO: 156664 - protein, 7 aa, synthetic construct
YMHTSKL

SEQ ID NO: 156665 - protein, 7 aa, synthetic construct
YMHVPNK

SEQ ID NO: 156666 - protein, 7 aa, synthetic construct
YMKAHMS

SEQ ID NO: 156667 - protein, 7 aa, synthetic construct
YMKAIHQ

SEQ ID NO: 156668 - protein, 7 aa, synthetic construct
YMKANKD

SEQ ID NO: 156669 - protein, 7 aa, synthetic construct
YMKDKQY

SEQ ID NO: 156670 - protein, 7 aa, synthetic construct
YMKDLSK

SEQ ID NO: 156671 - protein, 7 aa, synthetic construct
YMKEQQR

SEQ ID NO: 156672 - protein, 7 aa, synthetic construct
YMKGPRD

SEQ ID NO: 156673 - protein, 7 aa, synthetic construct
YMKGYQA

SEQ ID NO: 156674 - protein, 7 aa, synthetic construct
YMKHAQI

SEQ ID NO: 156675 - protein, 7 aa, synthetic construct
YMKHTAL

SEQ ID NO: 156676 - protein, 7 aa, synthetic construct
YMKLEKH

SEQ ID NO: 156677 - protein, 7 aa, synthetic construct
YMKMMNN

SEQ ID NO: 156678 - protein, 7 aa, synthetic construct
YMKNASM

SEQ ID NO: 156679 - protein, 7 aa, synthetic construct
YMKNINN

SEQ ID NO: 156680 - protein, 7 aa, synthetic construct
YMKNRDV

SEQ ID NO: 156681 - protein, 7 aa, synthetic construct
YMKNSDR

SEQ ID NO: 156682 - protein, 7 aa, synthetic construct
YMKPNIP

SEQ ID NO: 156683 - protein, 7 aa, synthetic construct
YMKPTMH

SEQ ID NO: 156684 - protein, 7 aa, synthetic construct
YMKQDAR

SEQ ID NO: 156685 - protein, 7 aa, synthetic construct
YMKRASE

SEQ ID NO: 156686 - protein, 7 aa, synthetic construct
YMKSIRD

SEQ ID NO: 156687 - protein, 7 aa, synthetic construct
YMKSNFP

SEQ ID NO: 156688 - protein, 7 aa, synthetic construct
YMKTPNL

SEQ ID NO: 156689 - protein, 7 aa, synthetic construct
YMKYNKE

SEQ ID NO: 156690 - protein, 7 aa, synthetic construct
YMMKASS

SEQ ID NO: 156691 - protein, 7 aa, synthetic construct
YMNHKAI

SEQ ID NO: 156692 - protein, 7 aa, synthetic construct
YMNHKQV

SEQ ID NO: 156693 - protein, 7 aa, synthetic construct
YMNNGGK

SEQ ID NO: 156694 - protein, 7 aa, synthetic construct
YMNNKER

SEQ ID NO: 156695 - protein, 7 aa, synthetic construct
YMNNMHK

SEQ ID NO: 156696 - protein, 7 aa, synthetic construct
YMNNQAK

SEQ ID NO: 156697 - protein, 7 aa, synthetic construct
YMNNTPK

SEQ ID NO: 156698 - protein, 7 aa, synthetic construct
YMNQRIT

SEQ ID NO: 156699 - protein, 7 aa, synthetic construct
YMNTREK

SEQ ID NO: 156700 - protein, 7 aa, synthetic construct
YMNVTSR

SEQ ID NO: 156701 - protein, 7 aa, synthetic construct
YMPGYKA

SEQ ID NO: 156702 - protein, 7 aa, synthetic construct
YMPISKQ

SEQ ID NO: 156703 - protein, 7 aa, synthetic construct
YMPKGPP

SEQ ID NO: 156704 - protein, 7 aa, synthetic construct
YMPNGRM

SEQ ID NO: 156705 - protein, 7 aa, synthetic construct
YMPRSPQ

SEQ ID NO: 156706 - protein, 7 aa, synthetic construct
YMPRTSM

SEQ ID NO: 156707 - protein, 7 aa, synthetic construct
YMPSKRD

SEQ ID NO: 156708 - protein, 7 aa, synthetic construct
YMQDKKL

SEQ ID NO: 156709 - protein, 7 aa, synthetic construct
YMQGGIR

SEQ ID NO: 156710 - protein, 7 aa, synthetic construct
YMQGGSK

SEQ ID NO: 156711 - protein, 7 aa, synthetic construct
YMQGIGK

SEQ ID NO: 156712 - protein, 7 aa, synthetic construct
YMQGNMK

SEQ ID NO: 156713 - protein, 7 aa, synthetic construct
YMQGQQR

SEQ ID NO: 156714 - protein, 7 aa, synthetic construct
YMQHLKS

SEQ ID NO: 156715 - protein, 7 aa, synthetic construct
YMQHMDS

SEQ ID NO: 156716 - protein, 7 aa, synthetic construct
YMQIHKA

SEQ ID NO: 156717 - protein, 7 aa, synthetic construct
YMQKHVQ

SEQ ID NO: 156718 - protein, 7 aa, synthetic construct
YMQKMPV

SEQ ID NO: 156719 - protein, 7 aa, synthetic construct
YMQKRAD

SEQ ID NO: 156720 - protein, 7 aa, synthetic construct
YMQQPPK

SEQ ID NO: 156721 - protein, 7 aa, synthetic construct
YMQSHKS

SEQ ID NO: 156722 - protein, 7 aa, synthetic construct
YMQTKSI

SEQ ID NO: 156723 - protein, 7 aa, synthetic construct
YMRADQR

SEQ ID NO: 156724 - protein, 7 aa, synthetic construct
YMREKPL

SEQ ID NO: 156725 - protein, 7 aa, synthetic construct
YMRKETN

SEQ ID NO: 156726 - protein, 7 aa, synthetic construct
YMRTKTE

SEQ ID NO: 156727 - protein, 7 aa, synthetic construct
YMSAKIQ

SEQ ID NO: 156728 - protein, 7 aa, synthetic construct
YMSDTKR

SEQ ID NO: 156729 - protein, 7 aa, synthetic construct
YMSGAMR

SEQ ID NO: 156730 - protein, 7 aa, synthetic construct
YMSGQVR

SEQ ID NO: 156731 - protein, 7 aa, synthetic construct
YMSKMAH

SEQ ID NO: 156732 - protein, 7 aa, synthetic construct
YMSQKVL

SEQ ID NO: 156733 - protein, 7 aa, synthetic construct
YMSRSVP

SEQ ID NO: 156734 - protein, 7 aa, synthetic construct
YMSSLKN

SEQ ID NO: 156735 - protein, 7 aa, synthetic construct
YMSSMRS

SEQ ID NO: 156736 - protein, 7 aa, synthetic construct
YMSTAAV

SEQ ID NO: 156737 - protein, 7 aa, synthetic construct
YMTGHMK

SEQ ID NO: 156738 - protein, 7 aa, synthetic construct
YMVARKE

SEQ ID NO: 156739 - protein, 7 aa, synthetic construct
YMVKISA

SEQ ID NO: 156740 - protein, 7 aa, synthetic construct
YMYNKHA

SEQ ID NO: 156741 - protein, 7 aa, synthetic construct
YNAAKFQ

SEQ ID NO: 156742 - protein, 7 aa, synthetic construct
YNAARTM

SEQ ID NO: 156743 - protein, 7 aa, synthetic construct
YNAGHIR

SEQ ID NO: 156744 - protein, 7 aa, synthetic construct
YNAHIPR

SEQ ID NO: 156745 - protein, 7 aa, synthetic construct
YNAHTFR

SEQ ID NO: 156746 - protein, 7 aa, synthetic construct
YNAKGPF

SEQ ID NO: 156747 - protein, 7 aa, synthetic construct
YNENPKR

SEQ ID NO: 156748 - protein, 7 aa, synthetic construct
YNEQKIR

SEQ ID NO: 156749 - protein, 7 aa, synthetic construct
YNGASSR

SEQ ID NO: 156750 - protein, 7 aa, synthetic construct
YNGDWDK

SEQ ID NO: 156751 - protein, 7 aa, synthetic construct
YNGHQSR

SEQ ID NO: 156752 - protein, 7 aa, synthetic construct
YNGIRGM

SEQ ID NO: 156753 - protein, 7 aa, synthetic construct
YNGQYNK

SEQ ID NO: 156754 - protein, 7 aa, synthetic construct
YNGRVTY

SEQ ID NO: 156755 - protein, 7 aa, synthetic construct
YNGTRER

SEQ ID NO: 156756 - protein, 7 aa, synthetic construct
YNGYNNK

SEQ ID NO: 156757 - protein, 7 aa, synthetic construct
YNHAVAR

SEQ ID NO: 156758 - protein, 7 aa, synthetic construct
YNHGAMK

SEQ ID NO: 156759 - protein, 7 aa, synthetic construct
YNHGAVR

SEQ ID NO: 156760 - protein, 7 aa, synthetic construct
YNHKVMT

SEQ ID NO: 156761 - protein, 7 aa, synthetic construct
YNHQKAM

SEQ ID NO: 156762 - protein, 7 aa, synthetic construct
YNHTRYD

SEQ ID NO: 156763 - protein, 7 aa, synthetic construct
YNHVMAK

SEQ ID NO: 156764 - protein, 7 aa, synthetic construct
YNIKEVR

SEQ ID NO: 156765 - protein, 7 aa, synthetic construct
YNIPLKA

SEQ ID NO: 156766 - protein, 7 aa, synthetic construct
YNISQGK

SEQ ID NO: 156767 - protein, 7 aa, synthetic construct
YNKAMDR

SEQ ID NO: 156768 - protein, 7 aa, synthetic construct
YNKEKQY

SEQ ID NO: 156769 - protein, 7 aa, synthetic construct
YNKFEGK

SEQ ID NO: 156770 - protein, 7 aa, synthetic construct
YNKFSHH

SEQ ID NO: 156771 - protein, 7 aa, synthetic construct
YNKGFGN

SEQ ID NO: 156772 - protein, 7 aa, synthetic construct
YNKIADR

SEQ ID NO: 156773 - protein, 7 aa, synthetic construct
YNKKDLM

SEQ ID NO: 156774 - protein, 7 aa, synthetic construct
YNKLELR

SEQ ID NO: 156775 - protein, 7 aa, synthetic construct
YNKNDGK

SEQ ID NO: 156776 - protein, 7 aa, synthetic construct
YNKPHMT

SEQ ID NO: 156777 - protein, 7 aa, synthetic construct
YNKPHNI

SEQ ID NO: 156778 - protein, 7 aa, synthetic construct
YNKRMNE

SEQ ID NO: 156779 - protein, 7 aa, synthetic construct
YNKRMSE

SEQ ID NO: 156780 - protein, 7 aa, synthetic construct
YNKYPGP

SEQ ID NO: 156781 - protein, 7 aa, synthetic construct
YNLHLQK

SEQ ID NO: 156782 - protein, 7 aa, synthetic construct
YNLIRKE

SEQ ID NO: 156783 - protein, 7 aa, synthetic construct
YNLMAGK

SEQ ID NO: 156784 - protein, 7 aa, synthetic construct
YNLQSTR

SEQ ID NO: 156785 - protein, 7 aa, synthetic construct
YNMIGKT

SEQ ID NO: 156786 - protein, 7 aa, synthetic construct
YNMQARP

SEQ ID NO: 156787 - protein, 7 aa, synthetic construct
YNMSQTK

SEQ ID NO: 156788 - protein, 7 aa, synthetic construct
YNMTATR

SEQ ID NO: 156789 - protein, 7 aa, synthetic construct
YNNDGRK

SEQ ID NO: 156790 - protein, 7 aa, synthetic construct
YNNFRNP

SEQ ID NO: 156791 - protein, 7 aa, synthetic construct
YNNGLPR

SEQ ID NO: 156792 - protein, 7 aa, synthetic construct
YNNHILK

SEQ ID NO: 156793 - protein, 7 aa, synthetic construct
YNNHQIR

SEQ ID NO: 156794 - protein, 7 aa, synthetic construct
YNNIHMK

SEQ ID NO: 156795 - protein, 7 aa, synthetic construct
YNNPAHR

SEQ ID NO: 156796 - protein, 7 aa, synthetic construct
YNNPKVT

SEQ ID NO: 156797 - protein, 7 aa, synthetic construct
YNNQGYK

SEQ ID NO: 156798 - protein, 7 aa, synthetic construct
YNNRTDK

SEQ ID NO: 156799 - protein, 7 aa, synthetic construct
YNNTNQR

SEQ ID NO: 156800 - protein, 7 aa, synthetic construct
YNNYSTK

SEQ ID NO: 156801 - protein, 7 aa, synthetic construct
YNPKVIH

SEQ ID NO: 156802 - protein, 7 aa, synthetic construct
YNPRLNQ

SEQ ID NO: 156803 - protein, 7 aa, synthetic construct
YNPVKYG

SEQ ID NO: 156804 - protein, 7 aa, synthetic construct
YNQFATK

SEQ ID NO: 156805 - protein, 7 aa, synthetic construct
YNQHLTR

SEQ ID NO: 156806 - protein, 7 aa, synthetic construct
YNQISNR

SEQ ID NO: 156807 - protein, 7 aa, synthetic construct
YNQLRAQ

SEQ ID NO: 156808 - protein, 7 aa, synthetic construct
YNQPNVR

SEQ ID NO: 156809 - protein, 7 aa, synthetic construct
YNQQNHK

SEQ ID NO: 156810 - protein, 7 aa, synthetic construct
YNQREPK

SEQ ID NO: 156811 - protein, 7 aa, synthetic construct
YNQRSGN

SEQ ID NO: 156812 - protein, 7 aa, synthetic construct
YNQTKHY

SEQ ID NO: 156813 - protein, 7 aa, synthetic construct
YNRIHKE

SEQ ID NO: 156814 - protein, 7 aa, synthetic construct
YNRKGDS

SEQ ID NO: 156815 - protein, 7 aa, synthetic construct
YNRNPNL

SEQ ID NO: 156816 - protein, 7 aa, synthetic construct
YNSQVTR

SEQ ID NO: 156817 - protein, 7 aa, synthetic construct
YNSSFKT

SEQ ID NO: 156818 - protein, 7 aa, synthetic construct
YNSVKPI

SEQ ID NO: 156819 - protein, 7 aa, synthetic construct
YNSVPNR

SEQ ID NO: 156820 - protein, 7 aa, synthetic construct
YNSYRQT

SEQ ID NO: 156821 - protein, 7 aa, synthetic construct
YNTGDKR

SEQ ID NO: 156822 - protein, 7 aa, synthetic construct
YNTGSPR

SEQ ID NO: 156823 - protein, 7 aa, synthetic construct
YNTHNMK

SEQ ID NO: 156824 - protein, 7 aa, synthetic construct
YNTHSFK

SEQ ID NO: 156825 - protein, 7 aa, synthetic construct
YNTHTGK

SEQ ID NO: 156826 - protein, 7 aa, synthetic construct
YNTPKQV

SEQ ID NO: 156827 - protein, 7 aa, synthetic construct
YNTPRNI

SEQ ID NO: 156828 - protein, 7 aa, synthetic construct
YNTSARY

SEQ ID NO: 156829 - protein, 7 aa, synthetic construct
YNTSKDR

SEQ ID NO: 156830 - protein, 7 aa, synthetic construct
YNTYQAL

SEQ ID NO: 156831 - protein, 7 aa, synthetic construct
YNVPTGK

SEQ ID NO: 156832 - protein, 7 aa, synthetic construct
YNVTRSH

SEQ ID NO: 156833 - protein, 7 aa, synthetic construct
YNYKSAQ

SEQ ID NO: 156834 - protein, 7 aa, synthetic construct
YPAASMR

SEQ ID NO: 156835 - protein, 7 aa, synthetic construct
YPAGSKN

SEQ ID NO: 156836 - protein, 7 aa, synthetic construct
YPAHALK

SEQ ID NO: 156837 - protein, 7 aa, synthetic construct
YPAHHKG

SEQ ID NO: 156838 - protein, 7 aa, synthetic construct
YPAHKIV

SEQ ID NO: 156839 - protein, 7 aa, synthetic construct
YPAHVRS

SEQ ID NO: 156840 - protein, 7 aa, synthetic construct
YPAIMRA

SEQ ID NO: 156841 - protein, 7 aa, synthetic construct
YPAMRHA

SEQ ID NO: 156842 - protein, 7 aa, synthetic construct
YPANGNR

SEQ ID NO: 156843 - protein, 7 aa, synthetic construct
YPARDKV

SEQ ID NO: 156844 - protein, 7 aa, synthetic construct
YPASQVR

SEQ ID NO: 156845 - protein, 7 aa, synthetic construct
YPATISR

SEQ ID NO: 156846 - protein, 7 aa, synthetic construct
YPATNMR

SEQ ID NO: 156847 - protein, 7 aa, synthetic construct
YPDARRN

SEQ ID NO: 156848 - protein, 7 aa, synthetic construct
YPDKAAR

SEQ ID NO: 156849 - protein, 7 aa, synthetic construct
YPDRARI

SEQ ID NO: 156850 - protein, 7 aa, synthetic construct
YPDRTRN

SEQ ID NO: 156851 - protein, 7 aa, synthetic construct
YPDTVRR

SEQ ID NO: 156852 - protein, 7 aa, synthetic construct
YPDVKGK

SEQ ID NO: 156853 - protein, 7 aa, synthetic construct
YPEKNAR

SEQ ID NO: 156854 - protein, 7 aa, synthetic construct
YPEPRRQ

SEQ ID NO: 156855 - protein, 7 aa, synthetic construct
YPERNAK

SEQ ID NO: 156856 - protein, 7 aa, synthetic construct
YPERNNR

SEQ ID NO: 156857 - protein, 7 aa, synthetic construct
YPFSQKS

SEQ ID NO: 156858 - protein, 7 aa, synthetic construct
YPFTNKQ

SEQ ID NO: 156859 - protein, 7 aa, synthetic construct
YPGAHRS

SEQ ID NO: 156860 - protein, 7 aa, synthetic construct
YPGAHSK

SEQ ID NO: 156861 - protein, 7 aa, synthetic construct
YPGAKFV

SEQ ID NO: 156862 - protein, 7 aa, synthetic construct
YPGGMKV

SEQ ID NO: 156863 - protein, 7 aa, synthetic construct
YPGGVRV

SEQ ID NO: 156864 - protein, 7 aa, synthetic construct
YPGHPKV

SEQ ID NO: 156865 - protein, 7 aa, synthetic construct
YPGHQPK

SEQ ID NO: 156866 - protein, 7 aa, synthetic construct
YPGHVKQ

SEQ ID NO: 156867 - protein, 7 aa, synthetic construct
YPGISHK

SEQ ID NO: 156868 - protein, 7 aa, synthetic construct
YPGKHGN

SEQ ID NO: 156869 - protein, 7 aa, synthetic construct
YPGKSLV

SEQ ID NO: 156870 - protein, 7 aa, synthetic construct
YPGLRVS

SEQ ID NO: 156871 - protein, 7 aa, synthetic construct
YPGMTIK

SEQ ID NO: 156872 - protein, 7 aa, synthetic construct
YPGNIQR

SEQ ID NO: 156873 - protein, 7 aa, synthetic construct
YPGNKHL

SEQ ID NO: 156874 - protein, 7 aa, synthetic construct
YPGNMKG

SEQ ID NO: 156875 - protein, 7 aa, synthetic construct
YPGNPSR

SEQ ID NO: 156876 - protein, 7 aa, synthetic construct
YPGNQTR

SEQ ID NO: 156877 - protein, 7 aa, synthetic construct
YPGPQKG

SEQ ID NO: 156878 - protein, 7 aa, synthetic construct
YPGQNRN

SEQ ID NO: 156879 - protein, 7 aa, synthetic construct
YPGRMSQ

SEQ ID NO: 156880 - protein, 7 aa, synthetic construct
YPGSYKV

SEQ ID NO: 156881 - protein, 7 aa, synthetic construct
YPGTNMR

SEQ ID NO: 156882 - protein, 7 aa, synthetic construct
YPGTSTR

SEQ ID NO: 156883 - protein, 7 aa, synthetic construct
YPGWESK

SEQ ID NO: 156884 - protein, 7 aa, synthetic construct
YPHAAKV

SEQ ID NO: 156885 - protein, 7 aa, synthetic construct
YPHAASR

SEQ ID NO: 156886 - protein, 7 aa, synthetic construct
YPHAMKG

SEQ ID NO: 156887 - protein, 7 aa, synthetic construct
YPHANKM

SEQ ID NO: 156888 - protein, 7 aa, synthetic construct
YPHGGIK

SEQ ID NO: 156889 - protein, 7 aa, synthetic construct
YPHGVRA

SEQ ID NO: 156890 - protein, 7 aa, synthetic construct
YPHKEKG

SEQ ID NO: 156891 - protein, 7 aa, synthetic construct
YPHKVPS

SEQ ID NO: 156892 - protein, 7 aa, synthetic construct
YPHLGKM

SEQ ID NO: 156893 - protein, 7 aa, synthetic construct
YPHQARS

SEQ ID NO: 156894 - protein, 7 aa, synthetic construct
YPHQNVK

SEQ ID NO: 156895 - protein, 7 aa, synthetic construct
YPHVAKQ

SEQ ID NO: 156896 - protein, 7 aa, synthetic construct
YPHVKHQ

SEQ ID NO: 156897 - protein, 7 aa, synthetic construct
YPHVKHT

SEQ ID NO: 156898 - protein, 7 aa, synthetic construct
YPIAKKD

SEQ ID NO: 156899 - protein, 7 aa, synthetic construct
YPIDKRA

SEQ ID NO: 156900 - protein, 7 aa, synthetic construct
YPIGTSK

SEQ ID NO: 156901 - protein, 7 aa, synthetic construct
YPIHTKA

SEQ ID NO: 156902 - protein, 7 aa, synthetic construct
YPIKNPP

SEQ ID NO: 156903 - protein, 7 aa, synthetic construct
YPIKRES

SEQ ID NO: 156904 - protein, 7 aa, synthetic construct
YPIKTMP

SEQ ID NO: 156905 - protein, 7 aa, synthetic construct
YPISKIP

SEQ ID NO: 156906 - protein, 7 aa, synthetic construct
YPISKSL

SEQ ID NO: 156907 - protein, 7 aa, synthetic construct
YPKAINP

SEQ ID NO: 156908 - protein, 7 aa, synthetic construct
YPKAKHD

SEQ ID NO: 156909 - protein, 7 aa, synthetic construct
YPKAQPF

SEQ ID NO: 156910 - protein, 7 aa, synthetic construct
YPKAREL

SEQ ID NO: 156911 - protein, 7 aa, synthetic construct
YPKDRFV

SEQ ID NO: 156912 - protein, 7 aa, synthetic construct
YPKDYKN

SEQ ID NO: 156913 - protein, 7 aa, synthetic construct
YPKEAFR

SEQ ID NO: 156914 - protein, 7 aa, synthetic construct
YPKFARE

SEQ ID NO: 156915 - protein, 7 aa, synthetic construct
YPKGNDR

SEQ ID NO: 156916 - protein, 7 aa, synthetic construct
YPKGRDS

SEQ ID NO: 156917 - protein, 7 aa, synthetic construct
YPKHAAI

SEQ ID NO: 156918 - protein, 7 aa, synthetic construct
YPKHELK

SEQ ID NO: 156919 - protein, 7 aa, synthetic construct
YPKHGGG

SEQ ID NO: 156920 - protein, 7 aa, synthetic construct
YPKHHVT

SEQ ID NO: 156921 - protein, 7 aa, synthetic construct
YPKHLQP

SEQ ID NO: 156922 - protein, 7 aa, synthetic construct
YPKHLQT

SEQ ID NO: 156923 - protein, 7 aa, synthetic construct
YPKHVEK

SEQ ID NO: 156924 - protein, 7 aa, synthetic construct
YPKIPSM

SEQ ID NO: 156925 - protein, 7 aa, synthetic construct
YPKIRDS

SEQ ID NO: 156926 - protein, 7 aa, synthetic construct
YPKISAT

SEQ ID NO: 156927 - protein, 7 aa, synthetic construct
YPKISHQ

SEQ ID NO: 156928 - protein, 7 aa, synthetic construct
YPKMIHS

SEQ ID NO: 156929 - protein, 7 aa, synthetic construct
YPKMSYG

SEQ ID NO: 156930 - protein, 7 aa, synthetic construct
YPKNEFK

SEQ ID NO: 156931 - protein, 7 aa, synthetic construct
YPKNLPP

SEQ ID NO: 156932 - protein, 7 aa, synthetic construct
YPKNTGQ

SEQ ID NO: 156933 - protein, 7 aa, synthetic construct
YPKNTSW

SEQ ID NO: 156934 - protein, 7 aa, synthetic construct
YPKNVAY

SEQ ID NO: 156935 - protein, 7 aa, synthetic construct
YPKPERN

SEQ ID NO: 156936 - protein, 7 aa, synthetic construct
YPKPQHL

SEQ ID NO: 156937 - protein, 7 aa, synthetic construct
YPKPTSY

SEQ ID NO: 156938 - protein, 7 aa, synthetic construct
YPKQKDH

SEQ ID NO: 156939 - protein, 7 aa, synthetic construct
YPKQMAH

SEQ ID NO: 156940 - protein, 7 aa, synthetic construct
YPKREAV

SEQ ID NO: 156941 - protein, 7 aa, synthetic construct
YPKRELL

SEQ ID NO: 156942 - protein, 7 aa, synthetic construct
YPKSITM

SEQ ID NO: 156943 - protein, 7 aa, synthetic construct
YPKSLHV

SEQ ID NO: 156944 - protein, 7 aa, synthetic construct
YPKSNNH

SEQ ID NO: 156945 - protein, 7 aa, synthetic construct
YPKTPQH

SEQ ID NO: 156946 - protein, 7 aa, synthetic construct
YPKTQNY

SEQ ID NO: 156947 - protein, 7 aa, synthetic construct
YPKVPSL

SEQ ID NO: 156948 - protein, 7 aa, synthetic construct
YPKYAPS

SEQ ID NO: 156949 - protein, 7 aa, synthetic construct
YPKYVTQ

SEQ ID NO: 156950 - protein, 7 aa, synthetic construct
YPLKARE

SEQ ID NO: 156951 - protein, 7 aa, synthetic construct
YPLKTLQ

SEQ ID NO: 156952 - protein, 7 aa, synthetic construct
YPMGKAQ

SEQ ID NO: 156953 - protein, 7 aa, synthetic construct
YPMGNTR

SEQ ID NO: 156954 - protein, 7 aa, synthetic construct
YPMIAKA

SEQ ID NO: 156955 - protein, 7 aa, synthetic construct
YPMKADR

SEQ ID NO: 156956 - protein, 7 aa, synthetic construct
YPMMSKA

SEQ ID NO: 156957 - protein, 7 aa, synthetic construct
YPMQRAS

SEQ ID NO: 156958 - protein, 7 aa, synthetic construct
YPMSKAT

SEQ ID NO: 156959 - protein, 7 aa, synthetic construct
YPMVAKH

SEQ ID NO: 156960 - protein, 7 aa, synthetic construct
YPNAERR

SEQ ID NO: 156961 - protein, 7 aa, synthetic construct
YPNHLRQ

SEQ ID NO: 156962 - protein, 7 aa, synthetic construct
YPNHRPM

SEQ ID NO: 156963 - protein, 7 aa, synthetic construct
YPNHVGK

SEQ ID NO: 156964 - protein, 7 aa, synthetic construct
YPNKHAL

SEQ ID NO: 156965 - protein, 7 aa, synthetic construct
YPNKPGY

SEQ ID NO: 156966 - protein, 7 aa, synthetic construct
YPNMHRG

SEQ ID NO: 156967 - protein, 7 aa, synthetic construct
YPNMKLP

SEQ ID NO: 156968 - protein, 7 aa, synthetic construct
YPNNGRQ

SEQ ID NO: 156969 - protein, 7 aa, synthetic construct
YPNPKNI

SEQ ID NO: 156970 - protein, 7 aa, synthetic construct
YPNPNGR

SEQ ID NO: 156971 - protein, 7 aa, synthetic construct
YPNPSSK

SEQ ID NO: 156972 - protein, 7 aa, synthetic construct
YPNQHSR

SEQ ID NO: 156973 - protein, 7 aa, synthetic construct
YPNQRYS

SEQ ID NO: 156974 - protein, 7 aa, synthetic construct
YPNRATL

SEQ ID NO: 156975 - protein, 7 aa, synthetic construct
YPNRETR

SEQ ID NO: 156976 - protein, 7 aa, synthetic construct
YPNSNLR

SEQ ID NO: 156977 - protein, 7 aa, synthetic construct
YPNTGAR

SEQ ID NO: 156978 - protein, 7 aa, synthetic construct
YPNVNNR

SEQ ID NO: 156979 - protein, 7 aa, synthetic construct
YPNYGQK

SEQ ID NO: 156980 - protein, 7 aa, synthetic construct
YPPAGKY

SEQ ID NO: 156981 - protein, 7 aa, synthetic construct
YPPAHAK

SEQ ID NO: 156982 - protein, 7 aa, synthetic construct
YPPHQKG

SEQ ID NO: 156983 - protein, 7 aa, synthetic construct
YPPKHVL

SEQ ID NO: 156984 - protein, 7 aa, synthetic construct
YPPMMKS

SEQ ID NO: 156985 - protein, 7 aa, synthetic construct
YPPNKGF

SEQ ID NO: 156986 - protein, 7 aa, synthetic construct
YPPQVRS

SEQ ID NO: 156987 - protein, 7 aa, synthetic construct
YPPRSSM

SEQ ID NO: 156988 - protein, 7 aa, synthetic construct
YPPSIRS

SEQ ID NO: 156989 - protein, 7 aa, synthetic construct
YPPSRGQ

SEQ ID NO: 156990 - protein, 7 aa, synthetic construct
YPPTHRN

SEQ ID NO: 156991 - protein, 7 aa, synthetic construct
YPQFAKN

SEQ ID NO: 156992 - protein, 7 aa, synthetic construct
YPQHRPV

SEQ ID NO: 156993 - protein, 7 aa, synthetic construct
YPQKSML

SEQ ID NO: 156994 - protein, 7 aa, synthetic construct
YPQMASK

SEQ ID NO: 156995 - protein, 7 aa, synthetic construct
YPQNAQK

SEQ ID NO: 156996 - protein, 7 aa, synthetic construct
YPQNQYK

SEQ ID NO: 156997 - protein, 7 aa, synthetic construct
YPQTVQR

SEQ ID NO: 156998 - protein, 7 aa, synthetic construct
YPQVKDR

SEQ ID NO: 156999 - protein, 7 aa, synthetic construct
YPREIKQ

SEQ ID NO: 157000 - protein, 7 aa, synthetic construct
YPREKGG

SEQ ID NO: 157001 - protein, 7 aa, synthetic construct
YPREQGK

SEQ ID NO: 157002 - protein, 7 aa, synthetic construct
YPRETRF

SEQ ID NO: 157003 - protein, 7 aa, synthetic construct
YPRGDKQ

SEQ ID NO: 157004 - protein, 7 aa, synthetic construct
YPRGKSD

SEQ ID NO: 157005 - protein, 7 aa, synthetic construct
YPRHEKQ

SEQ ID NO: 157006 - protein, 7 aa, synthetic construct
YPRHQTV

SEQ ID NO: 157007 - protein, 7 aa, synthetic construct
YPRIMKE

SEQ ID NO: 157008 - protein, 7 aa, synthetic construct
YPRISNG

SEQ ID NO: 157009 - protein, 7 aa, synthetic construct
YPRMAPA

SEQ ID NO: 157010 - protein, 7 aa, synthetic construct
YPRNETK

SEQ ID NO: 157011 - protein, 7 aa, synthetic construct
YPRSHGV

SEQ ID NO: 157012 - protein, 7 aa, synthetic construct
YPRSTHA

SEQ ID NO: 157013 - protein, 7 aa, synthetic construct
YPRTHLS

SEQ ID NO: 157014 - protein, 7 aa, synthetic construct
YPRTNIG

SEQ ID NO: 157015 - protein, 7 aa, synthetic construct
YPRTNVL

SEQ ID NO: 157016 - protein, 7 aa, synthetic construct
YPRTTQM

SEQ ID NO: 157017 - protein, 7 aa, synthetic construct
YPRVEKI

SEQ ID NO: 157018 - protein, 7 aa, synthetic construct
YPRVHAS

SEQ ID NO: 157019 - protein, 7 aa, synthetic construct
YPSANKQ

SEQ ID NO: 157020 - protein, 7 aa, synthetic construct
YPSAQNR

SEQ ID NO: 157021 - protein, 7 aa, synthetic construct
YPSATYK

SEQ ID NO: 157022 - protein, 7 aa, synthetic construct
YPSERQK

SEQ ID NO: 157023 - protein, 7 aa, synthetic construct
YPSGANR

SEQ ID NO: 157024 - protein, 7 aa, synthetic construct
YPSKAHI

SEQ ID NO: 157025 - protein, 7 aa, synthetic construct
YPSKAQM

SEQ ID NO: 157026 - protein, 7 aa, synthetic construct
YPSKIAL

SEQ ID NO: 157027 - protein, 7 aa, synthetic construct
YPSKNAL

SEQ ID NO: 157028 - protein, 7 aa, synthetic construct
YPSLRPA

SEQ ID NO: 157029 - protein, 7 aa, synthetic construct
YPSMTRV

SEQ ID NO: 157030 - protein, 7 aa, synthetic construct
YPSNNLR

SEQ ID NO: 157031 - protein, 7 aa, synthetic construct
YPSQRWD

SEQ ID NO: 157032 - protein, 7 aa, synthetic construct
YPSQTFK

SEQ ID NO: 157033 - protein, 7 aa, synthetic construct
YPSQTSR

SEQ ID NO: 157034 - protein, 7 aa, synthetic construct
YPSSGGR

SEQ ID NO: 157035 - protein, 7 aa, synthetic construct
YPSSGQR

SEQ ID NO: 157036 - protein, 7 aa, synthetic construct
YPSVANR

SEQ ID NO: 157037 - protein, 7 aa, synthetic construct
YPSVPKP

SEQ ID NO: 157038 - protein, 7 aa, synthetic construct
YPSVVRP

SEQ ID NO: 157039 - protein, 7 aa, synthetic construct
YPSYKSV

SEQ ID NO: 157040 - protein, 7 aa, synthetic construct
YPTALKQ

SEQ ID NO: 157041 - protein, 7 aa, synthetic construct
YPTANRN

SEQ ID NO: 157042 - protein, 7 aa, synthetic construct
YPTDRQK

SEQ ID NO: 157043 - protein, 7 aa, synthetic construct
YPTHNKM

SEQ ID NO: 157044 - protein, 7 aa, synthetic construct
YPTHNLK

SEQ ID NO: 157045 - protein, 7 aa, synthetic construct
YPTHTFK

SEQ ID NO: 157046 - protein, 7 aa, synthetic construct
YPTKGSY

SEQ ID NO: 157047 - protein, 7 aa, synthetic construct
YPTKSGF

SEQ ID NO: 157048 - protein, 7 aa, synthetic construct
YPTKTFG

SEQ ID NO: 157049 - protein, 7 aa, synthetic construct
YPTKTHI

SEQ ID NO: 157050 - protein, 7 aa, synthetic construct
YPTLSGK

SEQ ID NO: 157051 - protein, 7 aa, synthetic construct
YPTNHRN

SEQ ID NO: 157052 - protein, 7 aa, synthetic construct
YPTNRLN

SEQ ID NO: 157053 - protein, 7 aa, synthetic construct
YPTPRMA

SEQ ID NO: 157054 - protein, 7 aa, synthetic construct
YPTQEKK

SEQ ID NO: 157055 - protein, 7 aa, synthetic construct
YPTQKYM

SEQ ID NO: 157056 - protein, 7 aa, synthetic construct
YPTRDAK

SEQ ID NO: 157057 - protein, 7 aa, synthetic construct
YPTRDKF

SEQ ID NO: 157058 - protein, 7 aa, synthetic construct
YPTTPRN

SEQ ID NO: 157059 - protein, 7 aa, synthetic construct
YPTTRIQ

SEQ ID NO: 157060 - protein, 7 aa, synthetic construct
YPTTRSH

SEQ ID NO: 157061 - protein, 7 aa, synthetic construct
YPVAKYA

SEQ ID NO: 157062 - protein, 7 aa, synthetic construct
YPVAKYQ

SEQ ID NO: 157063 - protein, 7 aa, synthetic construct
YPVHSGK

SEQ ID NO: 157064 - protein, 7 aa, synthetic construct
YPVKRDN

SEQ ID NO: 157065 - protein, 7 aa, synthetic construct
YPVNSQR

SEQ ID NO: 157066 - protein, 7 aa, synthetic construct
YPVPKQP

SEQ ID NO: 157067 - protein, 7 aa, synthetic construct
YPVQRDK

SEQ ID NO: 157068 - protein, 7 aa, synthetic construct
YPVRGPG

SEQ ID NO: 157069 - protein, 7 aa, synthetic construct
YPVRHSG

SEQ ID NO: 157070 - protein, 7 aa, synthetic construct
YPYHGDK

SEQ ID NO: 157071 - protein, 7 aa, synthetic construct
YPYKSAA

SEQ ID NO: 157072 - protein, 7 aa, synthetic construct
YQAASRM

SEQ ID NO: 157073 - protein, 7 aa, synthetic construct
YQAGARG

SEQ ID NO: 157074 - protein, 7 aa, synthetic construct
YQAGFNK

SEQ ID NO: 157075 - protein, 7 aa, synthetic construct
YQAGGKS

SEQ ID NO: 157076 - protein, 7 aa, synthetic construct
YQAGNKS

SEQ ID NO: 157077 - protein, 7 aa, synthetic construct
YQAGTKY

SEQ ID NO: 157078 - protein, 7 aa, synthetic construct
YQAHKGG

SEQ ID NO: 157079 - protein, 7 aa, synthetic construct
YQAKPMM

SEQ ID NO: 157080 - protein, 7 aa, synthetic construct
YQAKRLD

SEQ ID NO: 157081 - protein, 7 aa, synthetic construct
YQAKSFN

SEQ ID NO: 157082 - protein, 7 aa, synthetic construct
YQARVQV

SEQ ID NO: 157083 - protein, 7 aa, synthetic construct
YQASDRK

SEQ ID NO: 157084 - protein, 7 aa, synthetic construct
YQAVKIQ

SEQ ID NO: 157085 - protein, 7 aa, synthetic construct
YQAVRNT

SEQ ID NO: 157086 - protein, 7 aa, synthetic construct
YQDGRFK

SEQ ID NO: 157087 - protein, 7 aa, synthetic construct
YQDRTKG

SEQ ID NO: 157088 - protein, 7 aa, synthetic construct
YQESVRK

SEQ ID NO: 157089 - protein, 7 aa, synthetic construct
YQFNTKA

SEQ ID NO: 157090 - protein, 7 aa, synthetic construct
YQGAKIL

SEQ ID NO: 157091 - protein, 7 aa, synthetic construct
YQGERQK

SEQ ID NO: 157092 - protein, 7 aa, synthetic construct
YQGERVR

SEQ ID NO: 157093 - protein, 7 aa, synthetic construct
YQGFLAD

SEQ ID NO: 157094 - protein, 7 aa, synthetic construct
YQGGLPK

SEQ ID NO: 157095 - protein, 7 aa, synthetic construct
YQGGMSR

SEQ ID NO: 157096 - protein, 7 aa, synthetic construct
YQGHKMS

SEQ ID NO: 157097 - protein, 7 aa, synthetic construct
YQGHPKM

SEQ ID NO: 157098 - protein, 7 aa, synthetic construct
YQGHVKG

SEQ ID NO: 157099 - protein, 7 aa, synthetic construct
YQGINGR

SEQ ID NO: 157100 - protein, 7 aa, synthetic construct
YQGKHYH

SEQ ID NO: 157101 - protein, 7 aa, synthetic construct
YQGKSAN

SEQ ID NO: 157102 - protein, 7 aa, synthetic construct
YQGLHTK

SEQ ID NO: 157103 - protein, 7 aa, synthetic construct
YQGMKSH

SEQ ID NO: 157104 - protein, 7 aa, synthetic construct
YQGNHIK

SEQ ID NO: 157105 - protein, 7 aa, synthetic construct
YQGNIVK

SEQ ID NO: 157106 - protein, 7 aa, synthetic construct
YQGNTFK

SEQ ID NO: 157107 - protein, 7 aa, synthetic construct
YQGNVKG

SEQ ID NO: 157108 - protein, 7 aa, synthetic construct
YQGNVVR

SEQ ID NO: 157109 - protein, 7 aa, synthetic construct
YQGPMKV

SEQ ID NO: 157110 - protein, 7 aa, synthetic construct
YQGQKAS

SEQ ID NO: 157111 - protein, 7 aa, synthetic construct
YQGQPLR

SEQ ID NO: 157112 - protein, 7 aa, synthetic construct
YQGQRAL

SEQ ID NO: 157113 - protein, 7 aa, synthetic construct
YQGSKYM

SEQ ID NO: 157114 - protein, 7 aa, synthetic construct
YQGSLGR

SEQ ID NO: 157115 - protein, 7 aa, synthetic construct
YQGTMGK

SEQ ID NO: 157116 - protein, 7 aa, synthetic construct
YQGVQGR

SEQ ID NO: 157117 - protein, 7 aa, synthetic construct
YQHANAK

SEQ ID NO: 157118 - protein, 7 aa, synthetic construct
YQHASPK

SEQ ID NO: 157119 - protein, 7 aa, synthetic construct
YQHGEGR

SEQ ID NO: 157120 - protein, 7 aa, synthetic construct
YQHGTVR

SEQ ID NO: 157121 - protein, 7 aa, synthetic construct
YQHITRS

SEQ ID NO: 157122 - protein, 7 aa, synthetic construct
YQHKQLI

SEQ ID NO: 157123 - protein, 7 aa, synthetic construct
YQHLKGV

SEQ ID NO: 157124 - protein, 7 aa, synthetic construct
YQHLTAK

SEQ ID NO: 157125 - protein, 7 aa, synthetic construct
YQHNPKG

SEQ ID NO: 157126 - protein, 7 aa, synthetic construct
YQHPKVI

SEQ ID NO: 157127 - protein, 7 aa, synthetic construct
YQHQTKN

SEQ ID NO: 157128 - protein, 7 aa, synthetic construct
YQHSLIK

SEQ ID NO: 157129 - protein, 7 aa, synthetic construct
YQHSRTP

SEQ ID NO: 157130 - protein, 7 aa, synthetic construct
YQHTNKI

SEQ ID NO: 157131 - protein, 7 aa, synthetic construct
YQHVNQK

SEQ ID NO: 157132 - protein, 7 aa, synthetic construct
YQIGTQR

SEQ ID NO: 157133 - protein, 7 aa, synthetic construct
YQKAREQ

SEQ ID NO: 157134 - protein, 7 aa, synthetic construct
YQKDSGK

SEQ ID NO: 157135 - protein, 7 aa, synthetic construct
YQKDTNK

SEQ ID NO: 157136 - protein, 7 aa, synthetic construct
YQKDWTK

SEQ ID NO: 157137 - protein, 7 aa, synthetic construct
YQKEHTR

SEQ ID NO: 157138 - protein, 7 aa, synthetic construct
YQKERYP

SEQ ID NO: 157139 - protein, 7 aa, synthetic construct
YQKETFR

SEQ ID NO: 157140 - protein, 7 aa, synthetic construct
YQKGAHQ

SEQ ID NO: 157141 - protein, 7 aa, synthetic construct
YQKGFIN

SEQ ID NO: 157142 - protein, 7 aa, synthetic construct
YQKGKDQ

SEQ ID NO: 157143 - protein, 7 aa, synthetic construct
YQKGRDV

SEQ ID NO: 157144 - protein, 7 aa, synthetic construct
YQKGYSQ

SEQ ID NO: 157145 - protein, 7 aa, synthetic construct
YQKHLQS

SEQ ID NO: 157146 - protein, 7 aa, synthetic construct
YQKHNPQ

SEQ ID NO: 157147 - protein, 7 aa, synthetic construct
YQKHQGI

SEQ ID NO: 157148 - protein, 7 aa, synthetic construct
YQKHQRE

SEQ ID NO: 157149 - protein, 7 aa, synthetic construct
YQKIKHD

SEQ ID NO: 157150 - protein, 7 aa, synthetic construct
YQKIYAA

SEQ ID NO: 157151 - protein, 7 aa, synthetic construct
YQKKDQM

SEQ ID NO: 157152 - protein, 7 aa, synthetic construct
YQKKMET

SEQ ID NO: 157153 - protein, 7 aa, synthetic construct
YQKKYPE

SEQ ID NO: 157154 - protein, 7 aa, synthetic construct
YQKMKGD

SEQ ID NO: 157155 - protein, 7 aa, synthetic construct
YQKMQGL

SEQ ID NO: 157156 - protein, 7 aa, synthetic construct
YQKNDRT

SEQ ID NO: 157157 - protein, 7 aa, synthetic construct
YQKNDVR

SEQ ID NO: 157158 - protein, 7 aa, synthetic construct
YQKPHGA

SEQ ID NO: 157159 - protein, 7 aa, synthetic construct
YQKPHVM

SEQ ID NO: 157160 - protein, 7 aa, synthetic construct
YQKPLDK

SEQ ID NO: 157161 - protein, 7 aa, synthetic construct
YQKPLVS

SEQ ID NO: 157162 - protein, 7 aa, synthetic construct
YQKPSGM

SEQ ID NO: 157163 - protein, 7 aa, synthetic construct
YQKPSVM

SEQ ID NO: 157164 - protein, 7 aa, synthetic construct
YQKQMPM

SEQ ID NO: 157165 - protein, 7 aa, synthetic construct
YQKRAEV

SEQ ID NO: 157166 - protein, 7 aa, synthetic construct
YQKRDIA

SEQ ID NO: 157167 - protein, 7 aa, synthetic construct
YQKRDIP

SEQ ID NO: 157168 - protein, 7 aa, synthetic construct
YQKREIT

SEQ ID NO: 157169 - protein, 7 aa, synthetic construct
YQKRIEG

SEQ ID NO: 157170 - protein, 7 aa, synthetic construct
YQKRLLE

SEQ ID NO: 157171 - protein, 7 aa, synthetic construct
YQKRMDN

SEQ ID NO: 157172 - protein, 7 aa, synthetic construct
YQKRMGE

SEQ ID NO: 157173 - protein, 7 aa, synthetic construct
YQKSERS

SEQ ID NO: 157174 - protein, 7 aa, synthetic construct
YQKSFTQ

SEQ ID NO: 157175 - protein, 7 aa, synthetic construct
YQKSKDS

SEQ ID NO: 157176 - protein, 7 aa, synthetic construct
YQKTHQY

SEQ ID NO: 157177 - protein, 7 aa, synthetic construct
YQKTIGH

SEQ ID NO: 157178 - protein, 7 aa, synthetic construct
YQKVESK

SEQ ID NO: 157179 - protein, 7 aa, synthetic construct
YQKVRNE

SEQ ID NO: 157180 - protein, 7 aa, synthetic construct
YQKVSFS

SEQ ID NO: 157181 - protein, 7 aa, synthetic construct
YQKYIQG

SEQ ID NO: 157182 - protein, 7 aa, synthetic construct
YQLHQKG

SEQ ID NO: 157183 - protein, 7 aa, synthetic construct
YQLKAER

SEQ ID NO: 157184 - protein, 7 aa, synthetic construct
YQLKANF

SEQ ID NO: 157185 - protein, 7 aa, synthetic construct
YQLKEKF

SEQ ID NO: 157186 - protein, 7 aa, synthetic construct
YQLKHKD

SEQ ID NO: 157187 - protein, 7 aa, synthetic construct
YQLSTSK

SEQ ID NO: 157188 - protein, 7 aa, synthetic construct
YQMPKQT

SEQ ID NO: 157189 - protein, 7 aa, synthetic construct
YQMQGHR

SEQ ID NO: 157190 - protein, 7 aa, synthetic construct
YQMSSKL

SEQ ID NO: 157191 - protein, 7 aa, synthetic construct
YQMTAQK

SEQ ID NO: 157192 - protein, 7 aa, synthetic construct
YQNASMR

SEQ ID NO: 157193 - protein, 7 aa, synthetic construct
YQNFANK

SEQ ID NO: 157194 - protein, 7 aa, synthetic construct
YQNHSFK

SEQ ID NO: 157195 - protein, 7 aa, synthetic construct
YQNHSTR

SEQ ID NO: 157196 - protein, 7 aa, synthetic construct
YQNLKHG

SEQ ID NO: 157197 - protein, 7 aa, synthetic construct
YQNLRDY

SEQ ID NO: 157198 - protein, 7 aa, synthetic construct
YQNMTGK

SEQ ID NO: 157199 - protein, 7 aa, synthetic construct
YQNSGNR

SEQ ID NO: 157200 - protein, 7 aa, synthetic construct
YQNSLYK

SEQ ID NO: 157201 - protein, 7 aa, synthetic construct
YQNSTRL

SEQ ID NO: 157202 - protein, 7 aa, synthetic construct
YQNSTYK

SEQ ID NO: 157203 - protein, 7 aa, synthetic construct
YQPGFTK

SEQ ID NO: 157204 - protein, 7 aa, synthetic construct
YQPKFSA

SEQ ID NO: 157205 - protein, 7 aa, synthetic construct
YQPQPRA

SEQ ID NO: 157206 - protein, 7 aa, synthetic construct
YQPSVRM

SEQ ID NO: 157207 - protein, 7 aa, synthetic construct
YQPVKAL

SEQ ID NO: 157208 - protein, 7 aa, synthetic construct
YQQGIAR

SEQ ID NO: 157209 - protein, 7 aa, synthetic construct
YQQGTRM

SEQ ID NO: 157210 - protein, 7 aa, synthetic construct
YQQHNGK

SEQ ID NO: 157211 - protein, 7 aa, synthetic construct
YQQKNAQ

SEQ ID NO: 157212 - protein, 7 aa, synthetic construct
YQQKTHG

SEQ ID NO: 157213 - protein, 7 aa, synthetic construct
YQQMQKM

SEQ ID NO: 157214 - protein, 7 aa, synthetic construct
YQQNKPY

SEQ ID NO: 157215 - protein, 7 aa, synthetic construct
YQQPQRP

SEQ ID NO: 157216 - protein, 7 aa, synthetic construct
YQQQAAR

SEQ ID NO: 157217 - protein, 7 aa, synthetic construct
YQQRHNP

SEQ ID NO: 157218 - protein, 7 aa, synthetic construct
YQQSGSR

SEQ ID NO: 157219 - protein, 7 aa, synthetic construct
YQQTGYK

SEQ ID NO: 157220 - protein, 7 aa, synthetic construct
YQQTKAM

SEQ ID NO: 157221 - protein, 7 aa, synthetic construct
YQRAVKD

SEQ ID NO: 157222 - protein, 7 aa, synthetic construct
YQRAYSA

SEQ ID NO: 157223 - protein, 7 aa, synthetic construct
YQRELSK

SEQ ID NO: 157224 - protein, 7 aa, synthetic construct
YQREVKL

SEQ ID NO: 157225 - protein, 7 aa, synthetic construct
YQRIMKD

SEQ ID NO: 157226 - protein, 7 aa, synthetic construct
YQRKEGI

SEQ ID NO: 157227 - protein, 7 aa, synthetic construct
YQRLPAH

SEQ ID NO: 157228 - protein, 7 aa, synthetic construct
YQRNGPP

SEQ ID NO: 157229 - protein, 7 aa, synthetic construct
YQRNSNL

SEQ ID NO: 157230 - protein, 7 aa, synthetic construct
YQRTSFQ

SEQ ID NO: 157231 - protein, 7 aa, synthetic construct
YQRVNVN

SEQ ID NO: 157232 - protein, 7 aa, synthetic construct
YQSAAIR

SEQ ID NO: 157233 - protein, 7 aa, synthetic construct
YQSARAV

SEQ ID NO: 157234 - protein, 7 aa, synthetic construct
YQSFQQK

SEQ ID NO: 157235 - protein, 7 aa, synthetic construct
YQSHRIA

SEQ ID NO: 157236 - protein, 7 aa, synthetic construct
YQSIHKM

SEQ ID NO: 157237 - protein, 7 aa, synthetic construct
YQSKPHG

SEQ ID NO: 157238 - protein, 7 aa, synthetic construct
YQSKQVY

SEQ ID NO: 157239 - protein, 7 aa, synthetic construct
YQSNAQK

SEQ ID NO: 157240 - protein, 7 aa, synthetic construct
YQSNTQR

SEQ ID NO: 157241 - protein, 7 aa, synthetic construct
YQSPKVT

SEQ ID NO: 157242 - protein, 7 aa, synthetic construct
YQSQRMI

SEQ ID NO: 157243 - protein, 7 aa, synthetic construct
YQSRSKE

SEQ ID NO: 157244 - protein, 7 aa, synthetic construct
YQSSGNK

SEQ ID NO: 157245 - protein, 7 aa, synthetic construct
YQSTAPR

SEQ ID NO: 157246 - protein, 7 aa, synthetic construct
YQSTIHK

SEQ ID NO: 157247 - protein, 7 aa, synthetic construct
YQSTRMV

SEQ ID NO: 157248 - protein, 7 aa, synthetic construct
YQSVNGR

SEQ ID NO: 157249 - protein, 7 aa, synthetic construct
YQTHKVL

SEQ ID NO: 157250 - protein, 7 aa, synthetic construct
YQTKDIR

SEQ ID NO: 157251 - protein, 7 aa, synthetic construct
YQTKGFT

SEQ ID NO: 157252 - protein, 7 aa, synthetic construct
YQTKHHA

SEQ ID NO: 157253 - protein, 7 aa, synthetic construct
YQTKPFT

SEQ ID NO: 157254 - protein, 7 aa, synthetic construct
YQTLQAK

SEQ ID NO: 157255 - protein, 7 aa, synthetic construct
YQTMHKV

SEQ ID NO: 157256 - protein, 7 aa, synthetic construct
YQTMKIP

SEQ ID NO: 157257 - protein, 7 aa, synthetic construct
YQTNISK

SEQ ID NO: 157258 - protein, 7 aa, synthetic construct
YQTPLPK

SEQ ID NO: 157259 - protein, 7 aa, synthetic construct
YQTQGRL

SEQ ID NO: 157260 - protein, 7 aa, synthetic construct
YQTSKHG

SEQ ID NO: 157261 - protein, 7 aa, synthetic construct
YQTSSSK

SEQ ID NO: 157262 - protein, 7 aa, synthetic construct
YQTTKML

SEQ ID NO: 157263 - protein, 7 aa, synthetic construct
YQTYSKI

SEQ ID NO: 157264 - protein, 7 aa, synthetic construct
YQVHMKG

SEQ ID NO: 157265 - protein, 7 aa, synthetic construct
YQVNPNR

SEQ ID NO: 157266 - protein, 7 aa, synthetic construct
YQVPNRA

SEQ ID NO: 157267 - protein, 7 aa, synthetic construct
YQVPVKA

SEQ ID NO: 157268 - protein, 7 aa, synthetic construct
YQVSSKG

SEQ ID NO: 157269 - protein, 7 aa, synthetic construct
YQVTHRG

SEQ ID NO: 157270 - protein, 7 aa, synthetic construct
YQYDRKS

SEQ ID NO: 157271 - protein, 7 aa, synthetic construct
YRAAEVK

SEQ ID NO: 157272 - protein, 7 aa, synthetic construct
YRAALKD

SEQ ID NO: 157273 - protein, 7 aa, synthetic construct
YRADHIK

SEQ ID NO: 157274 - protein, 7 aa, synthetic construct
YRAIQNS

SEQ ID NO: 157275 - protein, 7 aa, synthetic construct
YRAITHA

SEQ ID NO: 157276 - protein, 7 aa, synthetic construct
YRAKEYN

SEQ ID NO: 157277 - protein, 7 aa, synthetic construct
YRAKMID

SEQ ID NO: 157278 - protein, 7 aa, synthetic construct
YRAKPGE

SEQ ID NO: 157279 - protein, 7 aa, synthetic construct
YRAKSEV

SEQ ID NO: 157280 - protein, 7 aa, synthetic construct
YRAQADR

SEQ ID NO: 157281 - protein, 7 aa, synthetic construct
YRAVLPA

SEQ ID NO: 157282 - protein, 7 aa, synthetic construct
YRDAISK

SEQ ID NO: 157283 - protein, 7 aa, synthetic construct
YRDHFHS

SEQ ID NO: 157284 - protein, 7 aa, synthetic construct
YRDHVRG

SEQ ID NO: 157285 - protein, 7 aa, synthetic construct
YRDKAQM

SEQ ID NO: 157286 - protein, 7 aa, synthetic construct
YRDLMGK

SEQ ID NO: 157287 - protein, 7 aa, synthetic construct
YRDNVGK

SEQ ID NO: 157288 - protein, 7 aa, synthetic construct
YRDRPMV

SEQ ID NO: 157289 - protein, 7 aa, synthetic construct
YRDRSST

SEQ ID NO: 157290 - protein, 7 aa, synthetic construct
YRDSMSK

SEQ ID NO: 157291 - protein, 7 aa, synthetic construct
YRDSQGK

SEQ ID NO: 157292 - protein, 7 aa, synthetic construct
YRDTITR

SEQ ID NO: 157293 - protein, 7 aa, synthetic construct
YRDVKVT

SEQ ID NO: 157294 - protein, 7 aa, synthetic construct
YRDVMNK

SEQ ID NO: 157295 - protein, 7 aa, synthetic construct
YRDVMRG

SEQ ID NO: 157296 - protein, 7 aa, synthetic construct
YRDYGIA

SEQ ID NO: 157297 - protein, 7 aa, synthetic construct
YREAKGV

SEQ ID NO: 157298 - protein, 7 aa, synthetic construct
YREFKSA

SEQ ID NO: 157299 - protein, 7 aa, synthetic construct
YREGITR

SEQ ID NO: 157300 - protein, 7 aa, synthetic construct
YREKIAM

SEQ ID NO: 157301 - protein, 7 aa, synthetic construct
YREKMSL

SEQ ID NO: 157302 - protein, 7 aa, synthetic construct
YREMKQV

SEQ ID NO: 157303 - protein, 7 aa, synthetic construct
YREPTKF

SEQ ID NO: 157304 - protein, 7 aa, synthetic construct
YREVQRQ

SEQ ID NO: 157305 - protein, 7 aa, synthetic construct
YREYKMV

SEQ ID NO: 157306 - protein, 7 aa, synthetic construct
YRGADQK

SEQ ID NO: 157307 - protein, 7 aa, synthetic construct
YRGADSK

SEQ ID NO: 157308 - protein, 7 aa, synthetic construct
YRGDTKS

SEQ ID NO: 157309 - protein, 7 aa, synthetic construct
YRGFGGA

SEQ ID NO: 157310 - protein, 7 aa, synthetic construct
YRGGSVI

SEQ ID NO: 157311 - protein, 7 aa, synthetic construct
YRGHPTV

SEQ ID NO: 157312 - protein, 7 aa, synthetic construct
YRGMMSS

SEQ ID NO: 157313 - protein, 7 aa, synthetic construct
YRGNAQA

SEQ ID NO: 157314 - protein, 7 aa, synthetic construct
YRGPTLN

SEQ ID NO: 157315 - protein, 7 aa, synthetic construct
YRGQLRE

SEQ ID NO: 157316 - protein, 7 aa, synthetic construct
YRGSSQA

SEQ ID NO: 157317 - protein, 7 aa, synthetic construct
YRGTIPP

SEQ ID NO: 157318 - protein, 7 aa, synthetic construct
YRGTSSV

SEQ ID NO: 157319 - protein, 7 aa, synthetic construct
YRHNMIG

SEQ ID NO: 157320 - protein, 7 aa, synthetic construct
YRIKEVG

SEQ ID NO: 157321 - protein, 7 aa, synthetic construct
YRIKIDG

SEQ ID NO: 157322 - protein, 7 aa, synthetic construct
YRISSDK

SEQ ID NO: 157323 - protein, 7 aa, synthetic construct
YRKELPT

SEQ ID NO: 157324 - protein, 7 aa, synthetic construct
YRKEMMT

SEQ ID NO: 157325 - protein, 7 aa, synthetic construct
YRKETML

SEQ ID NO: 157326 - protein, 7 aa, synthetic construct
YRKFQGE

SEQ ID NO: 157327 - protein, 7 aa, synthetic construct
YRKMMGE

SEQ ID NO: 157328 - protein, 7 aa, synthetic construct
YRKNEMV

SEQ ID NO: 157329 - protein, 7 aa, synthetic construct
YRKNVME

SEQ ID NO: 157330 - protein, 7 aa, synthetic construct
YRKQEQA

SEQ ID NO: 157331 - protein, 7 aa, synthetic construct
YRKQEVG

SEQ ID NO: 157332 - protein, 7 aa, synthetic construct
YRKQLTD

SEQ ID NO: 157333 - protein, 7 aa, synthetic construct
YRKSMGE

SEQ ID NO: 157334 - protein, 7 aa, synthetic construct
YRLPTSA

SEQ ID NO: 157335 - protein, 7 aa, synthetic construct
YRMASHS

SEQ ID NO: 157336 - protein, 7 aa, synthetic construct
YRMPNTA

SEQ ID NO: 157337 - protein, 7 aa, synthetic construct
YRMSMTN

SEQ ID NO: 157338 - protein, 7 aa, synthetic construct
YRNAQSQ

SEQ ID NO: 157339 - protein, 7 aa, synthetic construct
YRNASSF

SEQ ID NO: 157340 - protein, 7 aa, synthetic construct
YRNGPIV

SEQ ID NO: 157341 - protein, 7 aa, synthetic construct
YRNGRQE

SEQ ID NO: 157342 - protein, 7 aa, synthetic construct
YRNGSTH

SEQ ID NO: 157343 - protein, 7 aa, synthetic construct
YRNKEMS

SEQ ID NO: 157344 - protein, 7 aa, synthetic construct
YRNKTES

SEQ ID NO: 157345 - protein, 7 aa, synthetic construct
YRNLKEV

SEQ ID NO: 157346 - protein, 7 aa, synthetic construct
YRNPQNS

SEQ ID NO: 157347 - protein, 7 aa, synthetic construct
YRNPTLG

SEQ ID NO: 157348 - protein, 7 aa, synthetic construct
YRNSEMK

SEQ ID NO: 157349 - protein, 7 aa, synthetic construct
YRNTAIM

SEQ ID NO: 157350 - protein, 7 aa, synthetic construct
YRNTLPH

SEQ ID NO: 157351 - protein, 7 aa, synthetic construct
YRNTNMM

SEQ ID NO: 157352 - protein, 7 aa, synthetic construct
YRNVKFE

SEQ ID NO: 157353 - protein, 7 aa, synthetic construct
YRNVVEK

SEQ ID NO: 157354 - protein, 7 aa, synthetic construct
YRPAQGV

SEQ ID NO: 157355 - protein, 7 aa, synthetic construct
YRPATHN

SEQ ID NO: 157356 - protein, 7 aa, synthetic construct
YRPHNGS

SEQ ID NO: 157357 - protein, 7 aa, synthetic construct
YRPKGDN

SEQ ID NO: 157358 - protein, 7 aa, synthetic construct
YRPNAMV

SEQ ID NO: 157359 - protein, 7 aa, synthetic construct
YRPNGHV

SEQ ID NO: 157360 - protein, 7 aa, synthetic construct
YRPNNIT

SEQ ID NO: 157361 - protein, 7 aa, synthetic construct
YRPPARD

SEQ ID NO: 157362 - protein, 7 aa, synthetic construct
YRPPMAS

SEQ ID NO: 157363 - protein, 7 aa, synthetic construct
YRPPNSV

SEQ ID NO: 157364 - protein, 7 aa, synthetic construct
YRPSMHA

SEQ ID NO: 157365 - protein, 7 aa, synthetic construct
YRPSNLV

SEQ ID NO: 157366 - protein, 7 aa, synthetic construct
YRPSTDR

SEQ ID NO: 157367 - protein, 7 aa, synthetic construct
YRPTTGL

SEQ ID NO: 157368 - protein, 7 aa, synthetic construct
YRPVIEK

SEQ ID NO: 157369 - protein, 7 aa, synthetic construct
YRQAVNM

SEQ ID NO: 157370 - protein, 7 aa, synthetic construct
YRQHGGP

SEQ ID NO: 157371 - protein, 7 aa, synthetic construct
YRQINEK

SEQ ID NO: 157372 - protein, 7 aa, synthetic construct
YRQIVKD

SEQ ID NO: 157373 - protein, 7 aa, synthetic construct
YRQKEGV

SEQ ID NO: 157374 - protein, 7 aa, synthetic construct
YRQKELN

SEQ ID NO: 157375 - protein, 7 aa, synthetic construct
YRQKGNE

SEQ ID NO: 157376 - protein, 7 aa, synthetic construct
YRQKQGD

SEQ ID NO: 157377 - protein, 7 aa, synthetic construct
YRQMETK

SEQ ID NO: 157378 - protein, 7 aa, synthetic construct
YRQMNVS

SEQ ID NO: 157379 - protein, 7 aa, synthetic construct
YRQNTLH

SEQ ID NO: 157380 - protein, 7 aa, synthetic construct
YRQPHTA

SEQ ID NO: 157381 - protein, 7 aa, synthetic construct
YRQPMQN

SEQ ID NO: 157382 - protein, 7 aa, synthetic construct
YRQQHNS

SEQ ID NO: 157383 - protein, 7 aa, synthetic construct
YRQSAHP

SEQ ID NO: 157384 - protein, 7 aa, synthetic construct
YRQSMGH

SEQ ID NO: 157385 - protein, 7 aa, synthetic construct
YRQTLLQ

SEQ ID NO: 157386 - protein, 7 aa, synthetic construct
YRQVSEK

SEQ ID NO: 157387 - protein, 7 aa, synthetic construct
YRSAPGL

SEQ ID NO: 157388 - protein, 7 aa, synthetic construct
YRSEIRQ

SEQ ID NO: 157389 - protein, 7 aa, synthetic construct
YRSEMKI

SEQ ID NO: 157390 - protein, 7 aa, synthetic construct
YRSINQQ

SEQ ID NO: 157391 - protein, 7 aa, synthetic construct
YRSKGDG

SEQ ID NO: 157392 - protein, 7 aa, synthetic construct
YRSLDKA

SEQ ID NO: 157393 - protein, 7 aa, synthetic construct
YRSMPDK

SEQ ID NO: 157394 - protein, 7 aa, synthetic construct
YRSPEKN

SEQ ID NO: 157395 - protein, 7 aa, synthetic construct
YRSQMIN

SEQ ID NO: 157396 - protein, 7 aa, synthetic construct
YRSSQFN

SEQ ID NO: 157397 - protein, 7 aa, synthetic construct
YRSSQQI

SEQ ID NO: 157398 - protein, 7 aa, synthetic construct
YRSTNIP

SEQ ID NO: 157399 - protein, 7 aa, synthetic construct
YRSVHPA

SEQ ID NO: 157400 - protein, 7 aa, synthetic construct
YRSVNHA

SEQ ID NO: 157401 - protein, 7 aa, synthetic construct
YRSYTTN

SEQ ID NO: 157402 - protein, 7 aa, synthetic construct
YRTEGGK

SEQ ID NO: 157403 - protein, 7 aa, synthetic construct
YRTEKNH

SEQ ID NO: 157404 - protein, 7 aa, synthetic construct
YRTEKQM

SEQ ID NO: 157405 - protein, 7 aa, synthetic construct
YRTGVER

SEQ ID NO: 157406 - protein, 7 aa, synthetic construct
YRTGYYE

SEQ ID NO: 157407 - protein, 7 aa, synthetic construct
YRTKTVD

SEQ ID NO: 157408 - protein, 7 aa, synthetic construct
YRTMSEK

SEQ ID NO: 157409 - protein, 7 aa, synthetic construct
YRTPKDM

SEQ ID NO: 157410 - protein, 7 aa, synthetic construct
YRTSAVV

SEQ ID NO: 157411 - protein, 7 aa, synthetic construct
YRTSDKM

SEQ ID NO: 157412 - protein, 7 aa, synthetic construct
YRTTTEK

SEQ ID NO: 157413 - protein, 7 aa, synthetic construct
YRVGEAK

SEQ ID NO: 157414 - protein, 7 aa, synthetic construct
YRVKDIS

SEQ ID NO: 157415 - protein, 7 aa, synthetic construct
YRVKDVN

SEQ ID NO: 157416 - protein, 7 aa, synthetic construct
YSAGMKQ

SEQ ID NO: 157417 - protein, 7 aa, synthetic construct
YSAGPSR

SEQ ID NO: 157418 - protein, 7 aa, synthetic construct
YSAHAGK

SEQ ID NO: 157419 - protein, 7 aa, synthetic construct
YSAIKHP

SEQ ID NO: 157420 - protein, 7 aa, synthetic construct
YSAIPAK

SEQ ID NO: 157421 - protein, 7 aa, synthetic construct
YSAIVRN

SEQ ID NO: 157422 - protein, 7 aa, synthetic construct
YSAKDRG

SEQ ID NO: 157423 - protein, 7 aa, synthetic construct
YSAKPPM

SEQ ID NO: 157424 - protein, 7 aa, synthetic construct
YSALHKN

SEQ ID NO: 157425 - protein, 7 aa, synthetic construct
YSAMGEK

SEQ ID NO: 157426 - protein, 7 aa, synthetic construct
YSANGQR

SEQ ID NO: 157427 - protein, 7 aa, synthetic construct
YSANSSR

SEQ ID NO: 157428 - protein, 7 aa, synthetic construct
YSAQHLR

SEQ ID NO: 157429 - protein, 7 aa, synthetic construct
YSAQPKQ

SEQ ID NO: 157430 - protein, 7 aa, synthetic construct
YSAQRIQ

SEQ ID NO: 157431 - protein, 7 aa, synthetic construct
YSARAQI

SEQ ID NO: 157432 - protein, 7 aa, synthetic construct
YSARIPV

SEQ ID NO: 157433 - protein, 7 aa, synthetic construct
YSARQKD

SEQ ID NO: 157434 - protein, 7 aa, synthetic construct
YSASRIT

SEQ ID NO: 157435 - protein, 7 aa, synthetic construct
YSASRSF

SEQ ID NO: 157436 - protein, 7 aa, synthetic construct
YSATRIV

SEQ ID NO: 157437 - protein, 7 aa, synthetic construct
YSAVRSA

SEQ ID NO: 157438 - protein, 7 aa, synthetic construct
YSDGRVK

SEQ ID NO: 157439 - protein, 7 aa, synthetic construct
YSERMKI

SEQ ID NO: 157440 - protein, 7 aa, synthetic construct
YSFAPKA

SEQ ID NO: 157441 - protein, 7 aa, synthetic construct
YSGAYKQ

SEQ ID NO: 157442 - protein, 7 aa, synthetic construct
YSGEKIK

SEQ ID NO: 157443 - protein, 7 aa, synthetic construct
YSGEKLR

SEQ ID NO: 157444 - protein, 7 aa, synthetic construct
YSGGGQK

SEQ ID NO: 157445 - protein, 7 aa, synthetic construct
YSGGKSL

SEQ ID NO: 157446 - protein, 7 aa, synthetic construct
YSGGMMR

SEQ ID NO: 157447 - protein, 7 aa, synthetic construct
YSGGYGK

SEQ ID NO: 157448 - protein, 7 aa, synthetic construct
YSGIKMI

SEQ ID NO: 157449 - protein, 7 aa, synthetic construct
YSGIRPT

SEQ ID NO: 157450 - protein, 7 aa, synthetic construct
YSGKFEK

SEQ ID NO: 157451 - protein, 7 aa, synthetic construct
YSGKFPM

SEQ ID NO: 157452 - protein, 7 aa, synthetic construct
YSGKHNL

SEQ ID NO: 157453 - protein, 7 aa, synthetic construct
YSGLHKS

SEQ ID NO: 157454 - protein, 7 aa, synthetic construct
YSGLRRE

SEQ ID NO: 157455 - protein, 7 aa, synthetic construct
YSGMLRP

SEQ ID NO: 157456 - protein, 7 aa, synthetic construct
YSGNARS

SEQ ID NO: 157457 - protein, 7 aa, synthetic construct
YSGNIAR

SEQ ID NO: 157458 - protein, 7 aa, synthetic construct
YSGNMIR

SEQ ID NO: 157459 - protein, 7 aa, synthetic construct
YSGNQKH

SEQ ID NO: 157460 - protein, 7 aa, synthetic construct
YSGPQQR

SEQ ID NO: 157461 - protein, 7 aa, synthetic construct
YSGQKHG

SEQ ID NO: 157462 - protein, 7 aa, synthetic construct
YSGRGYQ

SEQ ID NO: 157463 - protein, 7 aa, synthetic construct
YSGRVLG

SEQ ID NO: 157464 - protein, 7 aa, synthetic construct
YSGSVNR

SEQ ID NO: 157465 - protein, 7 aa, synthetic construct
YSGTAAR

SEQ ID NO: 157466 - protein, 7 aa, synthetic construct
YSGTKDR

SEQ ID NO: 157467 - protein, 7 aa, synthetic construct
YSGVRLQ

SEQ ID NO: 157468 - protein, 7 aa, synthetic construct
YSHGNIK

SEQ ID NO: 157469 - protein, 7 aa, synthetic construct
YSHIKVS

SEQ ID NO: 157470 - protein, 7 aa, synthetic construct
YSHKFPP

SEQ ID NO: 157471 - protein, 7 aa, synthetic construct
YSHKTDR

SEQ ID NO: 157472 - protein, 7 aa, synthetic construct
YSHLKAP

SEQ ID NO: 157473 - protein, 7 aa, synthetic construct
YSHMGRQ

SEQ ID NO: 157474 - protein, 7 aa, synthetic construct
YSHMNKQ

SEQ ID NO: 157475 - protein, 7 aa, synthetic construct
YSHMPKS

SEQ ID NO: 157476 - protein, 7 aa, synthetic construct
YSHNMKG

SEQ ID NO: 157477 - protein, 7 aa, synthetic construct
YSHNVAR

SEQ ID NO: 157478 - protein, 7 aa, synthetic construct
YSHNVKS

SEQ ID NO: 157479 - protein, 7 aa, synthetic construct
YSHQYKV

SEQ ID NO: 157480 - protein, 7 aa, synthetic construct
YSHTPKN

SEQ ID NO: 157481 - protein, 7 aa, synthetic construct
YSHVFKQ

SEQ ID NO: 157482 - protein, 7 aa, synthetic construct
YSHVGNT

SEQ ID NO: 157483 - protein, 7 aa, synthetic construct
YSHVKNA

SEQ ID NO: 157484 - protein, 7 aa, synthetic construct
YSHVLKQ

SEQ ID NO: 157485 - protein, 7 aa, synthetic construct
YSHVPAK

SEQ ID NO: 157486 - protein, 7 aa, synthetic construct
YSHVRVS

SEQ ID NO: 157487 - protein, 7 aa, synthetic construct
YSINAAR

SEQ ID NO: 157488 - protein, 7 aa, synthetic construct
YSINKHA

SEQ ID NO: 157489 - protein, 7 aa, synthetic construct
YSINTSR

SEQ ID NO: 157490 - protein, 7 aa, synthetic construct
YSIPKNS

SEQ ID NO: 157491 - protein, 7 aa, synthetic construct
YSISKSH

SEQ ID NO: 157492 - protein, 7 aa, synthetic construct
YSKATYG

SEQ ID NO: 157493 - protein, 7 aa, synthetic construct
YSKAYIS

SEQ ID NO: 157494 - protein, 7 aa, synthetic construct
YSKDRIL

SEQ ID NO: 157495 - protein, 7 aa, synthetic construct
YSKDTGR

SEQ ID NO: 157496 - protein, 7 aa, synthetic construct
YSKEIRY

SEQ ID NO: 157497 - protein, 7 aa, synthetic construct
YSKEVRY

SEQ ID NO: 157498 - protein, 7 aa, synthetic construct
YSKGFNS

SEQ ID NO: 157499 - protein, 7 aa, synthetic construct
YSKGGSH

SEQ ID NO: 157500 - protein, 7 aa, synthetic construct
YSKGMSH

SEQ ID NO: 157501 - protein, 7 aa, synthetic construct
YSKGSLY

SEQ ID NO: 157502 - protein, 7 aa, synthetic construct
YSKIKDL

SEQ ID NO: 157503 - protein, 7 aa, synthetic construct
YSKIRME

SEQ ID NO: 157504 - protein, 7 aa, synthetic construct
YSKKADT

SEQ ID NO: 157505 - protein, 7 aa, synthetic construct
YSKKEHI

SEQ ID NO: 157506 - protein, 7 aa, synthetic construct
YSKLHAN

SEQ ID NO: 157507 - protein, 7 aa, synthetic construct
YSKLRES

SEQ ID NO: 157508 - protein, 7 aa, synthetic construct
YSKMERM

SEQ ID NO: 157509 - protein, 7 aa, synthetic construct
YSKNIYA

SEQ ID NO: 157510 - protein, 7 aa, synthetic construct
YSKNVPY

SEQ ID NO: 157511 - protein, 7 aa, synthetic construct
YSKPDKS

SEQ ID NO: 157512 - protein, 7 aa, synthetic construct
YSKPESK

SEQ ID NO: 157513 - protein, 7 aa, synthetic construct
YSKPITL

SEQ ID NO: 157514 - protein, 7 aa, synthetic construct
YSKPLHN

SEQ ID NO: 157515 - protein, 7 aa, synthetic construct
YSKPPAM

SEQ ID NO: 157516 - protein, 7 aa, synthetic construct
YSKQELR

SEQ ID NO: 157517 - protein, 7 aa, synthetic construct
YSKQGAY

SEQ ID NO: 157518 - protein, 7 aa, synthetic construct
YSKQVYS

SEQ ID NO: 157519 - protein, 7 aa, synthetic construct
YSKQYLQ

SEQ ID NO: 157520 - protein, 7 aa, synthetic construct
YSKQYTG

SEQ ID NO: 157521 - protein, 7 aa, synthetic construct
YSKRVLD

SEQ ID NO: 157522 - protein, 7 aa, synthetic construct
YSKSMAY

SEQ ID NO: 157523 - protein, 7 aa, synthetic construct
YSKTHVT

SEQ ID NO: 157524 - protein, 7 aa, synthetic construct
YSKTVKE

SEQ ID NO: 157525 - protein, 7 aa, synthetic construct
YSKTYNQ

SEQ ID NO: 157526 - protein, 7 aa, synthetic construct
YSKVLGL

SEQ ID NO: 157527 - protein, 7 aa, synthetic construct
YSKVNVL

SEQ ID NO: 157528 - protein, 7 aa, synthetic construct
YSLHAKP

SEQ ID NO: 157529 - protein, 7 aa, synthetic construct
YSLHNRA

SEQ ID NO: 157530 - protein, 7 aa, synthetic construct
YSLKHSQ

SEQ ID NO: 157531 - protein, 7 aa, synthetic construct
YSLKPER

SEQ ID NO: 157532 - protein, 7 aa, synthetic construct
YSLPTPA

SEQ ID NO: 157533 - protein, 7 aa, synthetic construct
YSMKPGM

SEQ ID NO: 157534 - protein, 7 aa, synthetic construct
YSMKRTD

SEQ ID NO: 157535 - protein, 7 aa, synthetic construct
YSMQTQK

SEQ ID NO: 157536 - protein, 7 aa, synthetic construct
YSNAGVR

SEQ ID NO: 157537 - protein, 7 aa, synthetic construct
YSNAIPK

SEQ ID NO: 157538 - protein, 7 aa, synthetic construct
YSNHKYS

SEQ ID NO: 157539 - protein, 7 aa, synthetic construct
YSNHLPK

SEQ ID NO: 157540 - protein, 7 aa, synthetic construct
YSNHPKL

SEQ ID NO: 157541 - protein, 7 aa, synthetic construct
YSNKKDV

SEQ ID NO: 157542 - protein, 7 aa, synthetic construct
YSNKPHG

SEQ ID NO: 157543 - protein, 7 aa, synthetic construct
YSNLAGK

SEQ ID NO: 157544 - protein, 7 aa, synthetic construct
YSNLSAK

SEQ ID NO: 157545 - protein, 7 aa, synthetic construct
YSNMRIP

SEQ ID NO: 157546 - protein, 7 aa, synthetic construct
YSNQQFK

SEQ ID NO: 157547 - protein, 7 aa, synthetic construct
YSNQQQK

SEQ ID NO: 157548 - protein, 7 aa, synthetic construct
YSNREMK

SEQ ID NO: 157549 - protein, 7 aa, synthetic construct
YSNTAAR

SEQ ID NO: 157550 - protein, 7 aa, synthetic construct
YSNVTNR

SEQ ID NO: 157551 - protein, 7 aa, synthetic construct
YSPHARA

SEQ ID NO: 157552 - protein, 7 aa, synthetic construct
YSPHHKQ

SEQ ID NO: 157553 - protein, 7 aa, synthetic construct
YSPHKGQ

SEQ ID NO: 157554 - protein, 7 aa, synthetic construct
YSPRAHG

SEQ ID NO: 157555 - protein, 7 aa, synthetic construct
YSPSARQ

SEQ ID NO: 157556 - protein, 7 aa, synthetic construct
YSQFVTK

SEQ ID NO: 157557 - protein, 7 aa, synthetic construct
YSQGMKA

SEQ ID NO: 157558 - protein, 7 aa, synthetic construct
YSQGQNK

SEQ ID NO: 157559 - protein, 7 aa, synthetic construct
YSQLAGK

SEQ ID NO: 157560 - protein, 7 aa, synthetic construct
YSQPKGM

SEQ ID NO: 157561 - protein, 7 aa, synthetic construct
YSQPKTQ

SEQ ID NO: 157562 - protein, 7 aa, synthetic construct
YSQQMKY

SEQ ID NO: 157563 - protein, 7 aa, synthetic construct
YSQSILE

SEQ ID NO: 157564 - protein, 7 aa, synthetic construct
YSQTQRL

SEQ ID NO: 157565 - protein, 7 aa, synthetic construct
YSQVRMG

SEQ ID NO: 157566 - protein, 7 aa, synthetic construct
YSRAHIA

SEQ ID NO: 157567 - protein, 7 aa, synthetic construct
YSREAKM

SEQ ID NO: 157568 - protein, 7 aa, synthetic construct
YSRINKD

SEQ ID NO: 157569 - protein, 7 aa, synthetic construct
YSRKTAE

SEQ ID NO: 157570 - protein, 7 aa, synthetic construct
YSRNEKQ

SEQ ID NO: 157571 - protein, 7 aa, synthetic construct
YSRNYQN

SEQ ID NO: 157572 - protein, 7 aa, synthetic construct
YSRPALN

SEQ ID NO: 157573 - protein, 7 aa, synthetic construct
YSRPDRN

SEQ ID NO: 157574 - protein, 7 aa, synthetic construct
YSRPDSK

SEQ ID NO: 157575 - protein, 7 aa, synthetic construct
YSSDAKR

SEQ ID NO: 157576 - protein, 7 aa, synthetic construct
YSSGHRV

SEQ ID NO: 157577 - protein, 7 aa, synthetic construct
YSSGTKN

SEQ ID NO: 157578 - protein, 7 aa, synthetic construct
YSSKLIT

SEQ ID NO: 157579 - protein, 7 aa, synthetic construct
YSSKPMS

SEQ ID NO: 157580 - protein, 7 aa, synthetic construct
YSSMARA

SEQ ID NO: 157581 - protein, 7 aa, synthetic construct
YSSMKHP

SEQ ID NO: 157582 - protein, 7 aa, synthetic construct
YSSNHSK

SEQ ID NO: 157583 - protein, 7 aa, synthetic construct
YSSNKSI

SEQ ID NO: 157584 - protein, 7 aa, synthetic construct
YSSQAQR

SEQ ID NO: 157585 - protein, 7 aa, synthetic construct
YSSQNSK

SEQ ID NO: 157586 - protein, 7 aa, synthetic construct
YSSTRGL

SEQ ID NO: 157587 - protein, 7 aa, synthetic construct
YSSVPRS

SEQ ID NO: 157588 - protein, 7 aa, synthetic construct
YSTDKAR

SEQ ID NO: 157589 - protein, 7 aa, synthetic construct
YSTGGTR

SEQ ID NO: 157590 - protein, 7 aa, synthetic construct
YSTGKHS

SEQ ID NO: 157591 - protein, 7 aa, synthetic construct
YSTGLRG

SEQ ID NO: 157592 - protein, 7 aa, synthetic construct
YSTGSSK

SEQ ID NO: 157593 - protein, 7 aa, synthetic construct
YSTIPAK

SEQ ID NO: 157594 - protein, 7 aa, synthetic construct
YSTNLRG

SEQ ID NO: 157595 - protein, 7 aa, synthetic construct
YSTQHLR

SEQ ID NO: 157596 - protein, 7 aa, synthetic construct
YSTRHAA

SEQ ID NO: 157597 - protein, 7 aa, synthetic construct
YSTRIHS

SEQ ID NO: 157598 - protein, 7 aa, synthetic construct
YSTRQLQ

SEQ ID NO: 157599 - protein, 7 aa, synthetic construct
YSTRSIG

SEQ ID NO: 157600 - protein, 7 aa, synthetic construct
YSTSHRN

SEQ ID NO: 157601 - protein, 7 aa, synthetic construct
YSVKDRG

SEQ ID NO: 157602 - protein, 7 aa, synthetic construct
YSVKHMS

SEQ ID NO: 157603 - protein, 7 aa, synthetic construct
YSVQKMT

SEQ ID NO: 157604 - protein, 7 aa, synthetic construct
YSVQYKP

SEQ ID NO: 157605 - protein, 7 aa, synthetic construct
YSVRDAK

SEQ ID NO: 157606 - protein, 7 aa, synthetic construct
YTAGSRQ

SEQ ID NO: 157607 - protein, 7 aa, synthetic construct
YTAHHKF

SEQ ID NO: 157608 - protein, 7 aa, synthetic construct
YTANAYK

SEQ ID NO: 157609 - protein, 7 aa, synthetic construct
YTAPKLA

SEQ ID NO: 157610 - protein, 7 aa, synthetic construct
YTAQQSR

SEQ ID NO: 157611 - protein, 7 aa, synthetic construct
YTAQVHK

SEQ ID NO: 157612 - protein, 7 aa, synthetic construct
YTASLRN

SEQ ID NO: 157613 - protein, 7 aa, synthetic construct
YTASRRE

SEQ ID NO: 157614 - protein, 7 aa, synthetic construct
YTAVRHQ

SEQ ID NO: 157615 - protein, 7 aa, synthetic construct
YTAVTRG

SEQ ID NO: 157616 - protein, 7 aa, synthetic construct
YTDNKFR

SEQ ID NO: 157617 - protein, 7 aa, synthetic construct
YTENSKK

SEQ ID NO: 157618 - protein, 7 aa, synthetic construct
YTERASR

SEQ ID NO: 157619 - protein, 7 aa, synthetic construct
YTERMRN

SEQ ID NO: 157620 - protein, 7 aa, synthetic construct
YTESGKK

SEQ ID NO: 157621 - protein, 7 aa, synthetic construct
YTGAPKM

SEQ ID NO: 157622 - protein, 7 aa, synthetic construct
YTGASKH

SEQ ID NO: 157623 - protein, 7 aa, synthetic construct
YTGGQKL

SEQ ID NO: 157624 - protein, 7 aa, synthetic construct
YTGGQKY

SEQ ID NO: 157625 - protein, 7 aa, synthetic construct
YTGGRHV

SEQ ID NO: 157626 - protein, 7 aa, synthetic construct
YTGHRIS

SEQ ID NO: 157627 - protein, 7 aa, synthetic construct
YTGHYKV

SEQ ID NO: 157628 - protein, 7 aa, synthetic construct
YTGIGSR

SEQ ID NO: 157629 - protein, 7 aa, synthetic construct
YTGIHSK

SEQ ID NO: 157630 - protein, 7 aa, synthetic construct
YTGKTEK

SEQ ID NO: 157631 - protein, 7 aa, synthetic construct
YTGMRHP

SEQ ID NO: 157632 - protein, 7 aa, synthetic construct
YTGNPMK

SEQ ID NO: 157633 - protein, 7 aa, synthetic construct
YTGPQVR

SEQ ID NO: 157634 - protein, 7 aa, synthetic construct
YTGRVHG

SEQ ID NO: 157635 - protein, 7 aa, synthetic construct
YTGSTHK

SEQ ID NO: 157636 - protein, 7 aa, synthetic construct
YTGTHIR

SEQ ID NO: 157637 - protein, 7 aa, synthetic construct
YTGTHKS

SEQ ID NO: 157638 - protein, 7 aa, synthetic construct
YTGVKDR

SEQ ID NO: 157639 - protein, 7 aa, synthetic construct
YTHANKM

SEQ ID NO: 157640 - protein, 7 aa, synthetic construct
YTHISNH

SEQ ID NO: 157641 - protein, 7 aa, synthetic construct
YTHKLEK

SEQ ID NO: 157642 - protein, 7 aa, synthetic construct
YTHKTNI

SEQ ID NO: 157643 - protein, 7 aa, synthetic construct
YTHLAKS

SEQ ID NO: 157644 - protein, 7 aa, synthetic construct
YTHNATK

SEQ ID NO: 157645 - protein, 7 aa, synthetic construct
YTHNQAK

SEQ ID NO: 157646 - protein, 7 aa, synthetic construct
YTHPMKG

SEQ ID NO: 157647 - protein, 7 aa, synthetic construct
YTHRTSA

SEQ ID NO: 157648 - protein, 7 aa, synthetic construct
YTHSPPR

SEQ ID NO: 157649 - protein, 7 aa, synthetic construct
YTHSQSK

SEQ ID NO: 157650 - protein, 7 aa, synthetic construct
YTHTTKN

SEQ ID NO: 157651 - protein, 7 aa, synthetic construct
YTHVAKS

SEQ ID NO: 157652 - protein, 7 aa, synthetic construct
YTHVSKN

SEQ ID NO: 157653 - protein, 7 aa, synthetic construct
YTIGSKH

SEQ ID NO: 157654 - protein, 7 aa, synthetic construct
YTIKDAR

SEQ ID NO: 157655 - protein, 7 aa, synthetic construct
YTIQKGG

SEQ ID NO: 157656 - protein, 7 aa, synthetic construct
YTKAIYA

SEQ ID NO: 157657 - protein, 7 aa, synthetic construct
YTKAMYN

SEQ ID NO: 157658 - protein, 7 aa, synthetic construct
YTKDATR

SEQ ID NO: 157659 - protein, 7 aa, synthetic construct
YTKDRER

SEQ ID NO: 157660 - protein, 7 aa, synthetic construct
YTKDRGT

SEQ ID NO: 157661 - protein, 7 aa, synthetic construct
YTKEGSK

SEQ ID NO: 157662 - protein, 7 aa, synthetic construct
YTKEQAK

SEQ ID NO: 157663 - protein, 7 aa, synthetic construct
YTKEQYK

SEQ ID NO: 157664 - protein, 7 aa, synthetic construct
YTKERYN

SEQ ID NO: 157665 - protein, 7 aa, synthetic construct
YTKFEGK

SEQ ID NO: 157666 - protein, 7 aa, synthetic construct
YTKGVDR

SEQ ID NO: 157667 - protein, 7 aa, synthetic construct
YTKHPSI

SEQ ID NO: 157668 - protein, 7 aa, synthetic construct
YTKHPSV

SEQ ID NO: 157669 - protein, 7 aa, synthetic construct
YTKHSAQ

SEQ ID NO: 157670 - protein, 7 aa, synthetic construct
YTKHTFS

SEQ ID NO: 157671 - protein, 7 aa, synthetic construct
YTKNAAY

SEQ ID NO: 157672 - protein, 7 aa, synthetic construct
YTKNGGY

SEQ ID NO: 157673 - protein, 7 aa, synthetic construct
YTKNIAY

SEQ ID NO: 157674 - protein, 7 aa, synthetic construct
YTKPMPT

SEQ ID NO: 157675 - protein, 7 aa, synthetic construct
YTKPVMG

SEQ ID NO: 157676 - protein, 7 aa, synthetic construct
YTKQALL

SEQ ID NO: 157677 - protein, 7 aa, synthetic construct
YTKQDKN

SEQ ID NO: 157678 - protein, 7 aa, synthetic construct
YTKQFNA

SEQ ID NO: 157679 - protein, 7 aa, synthetic construct
YTKQFSN

SEQ ID NO: 157680 - protein, 7 aa, synthetic construct
YTKQRDG

SEQ ID NO: 157681 - protein, 7 aa, synthetic construct
YTKRQEV

SEQ ID NO: 157682 - protein, 7 aa, synthetic construct
YTKTREN

SEQ ID NO: 157683 - protein, 7 aa, synthetic construct
YTKVADR

SEQ ID NO: 157684 - protein, 7 aa, synthetic construct
YTKVHNN

SEQ ID NO: 157685 - protein, 7 aa, synthetic construct
YTKYNIA

SEQ ID NO: 157686 - protein, 7 aa, synthetic construct
YTKYTSS

SEQ ID NO: 157687 - protein, 7 aa, synthetic construct
YTLHQKA

SEQ ID NO: 157688 - protein, 7 aa, synthetic construct
YTLTRTA

SEQ ID NO: 157689 - protein, 7 aa, synthetic construct
YTMAQSK

SEQ ID NO: 157690 - protein, 7 aa, synthetic construct
YTMGGTR

SEQ ID NO: 157691 - protein, 7 aa, synthetic construct
YTMHLKS

SEQ ID NO: 157692 - protein, 7 aa, synthetic construct
YTNGLSR

SEQ ID NO: 157693 - protein, 7 aa, synthetic construct
YTNGNRQ

SEQ ID NO: 157694 - protein, 7 aa, synthetic construct
YTNHNQR

SEQ ID NO: 157695 - protein, 7 aa, synthetic construct
YTNHPVK

SEQ ID NO: 157696 - protein, 7 aa, synthetic construct
YTNKERM

SEQ ID NO: 157697 - protein, 7 aa, synthetic construct
YTNLTAR

SEQ ID NO: 157698 - protein, 7 aa, synthetic construct
YTNMATR

SEQ ID NO: 157699 - protein, 7 aa, synthetic construct
YTNRGIH

SEQ ID NO: 157700 - protein, 7 aa, synthetic construct
YTNSMSR

SEQ ID NO: 157701 - protein, 7 aa, synthetic construct
YTNTRPN

SEQ ID NO: 157702 - protein, 7 aa, synthetic construct
YTNTSSR

SEQ ID NO: 157703 - protein, 7 aa, synthetic construct
YTNVNPR

SEQ ID NO: 157704 - protein, 7 aa, synthetic construct
YTPHIRN

SEQ ID NO: 157705 - protein, 7 aa, synthetic construct
YTPKGYP

SEQ ID NO: 157706 - protein, 7 aa, synthetic construct
YTPNKFQ

SEQ ID NO: 157707 - protein, 7 aa, synthetic construct
YTPPKQV

SEQ ID NO: 157708 - protein, 7 aa, synthetic construct
YTPRERA

SEQ ID NO: 157709 - protein, 7 aa, synthetic construct
YTPRQHQ

SEQ ID NO: 157710 - protein, 7 aa, synthetic construct
YTPSHRN

SEQ ID NO: 157711 - protein, 7 aa, synthetic construct
YTPVARG

SEQ ID NO: 157712 - protein, 7 aa, synthetic construct
YTQAERK

SEQ ID NO: 157713 - protein, 7 aa, synthetic construct
YTQAHTR

SEQ ID NO: 157714 - protein, 7 aa, synthetic construct
YTQASRM

SEQ ID NO: 157715 - protein, 7 aa, synthetic construct
YTQGNNK

SEQ ID NO: 157716 - protein, 7 aa, synthetic construct
YTQGVRL

SEQ ID NO: 157717 - protein, 7 aa, synthetic construct
YTQKSHN

SEQ ID NO: 157718 - protein, 7 aa, synthetic construct
YTQMNRV

SEQ ID NO: 157719 - protein, 7 aa, synthetic construct
YTQNFKM

SEQ ID NO: 157720 - protein, 7 aa, synthetic construct
YTQPQRA

SEQ ID NO: 157721 - protein, 7 aa, synthetic construct
YTQQQRM

SEQ ID NO: 157722 - protein, 7 aa, synthetic construct
YTQSMSR

SEQ ID NO: 157723 - protein, 7 aa, synthetic construct
YTQSYAK

SEQ ID NO: 157724 - protein, 7 aa, synthetic construct
YTQTRPM

SEQ ID NO: 157725 - protein, 7 aa, synthetic construct
YTQVRAV

SEQ ID NO: 157726 - protein, 7 aa, synthetic construct
YTQVSTR

SEQ ID NO: 157727 - protein, 7 aa, synthetic construct
YTQYSQK

SEQ ID NO: 157728 - protein, 7 aa, synthetic construct
YTRAQGM

SEQ ID NO: 157729 - protein, 7 aa, synthetic construct
YTREMKA

SEQ ID NO: 157730 - protein, 7 aa, synthetic construct
YTRKSVE

SEQ ID NO: 157731 - protein, 7 aa, synthetic construct
YTRQVKD

SEQ ID NO: 157732 - protein, 7 aa, synthetic construct
YTRTGQM

SEQ ID NO: 157733 - protein, 7 aa, synthetic construct
YTRTNLV

SEQ ID NO: 157734 - protein, 7 aa, synthetic construct
YTRVQGP

SEQ ID NO: 157735 - protein, 7 aa, synthetic construct
YTSAFKG

SEQ ID NO: 157736 - protein, 7 aa, synthetic construct
YTSGPLK

SEQ ID NO: 157737 - protein, 7 aa, synthetic construct
YTSGTKS

SEQ ID NO: 157738 - protein, 7 aa, synthetic construct
YTSGYTM

SEQ ID NO: 157739 - protein, 7 aa, synthetic construct
YTSHLKG

SEQ ID NO: 157740 - protein, 7 aa, synthetic construct
YTSHRAV

SEQ ID NO: 157741 - protein, 7 aa, synthetic construct
YTSHTRA

SEQ ID NO: 157742 - protein, 7 aa, synthetic construct
YTSKLGM

SEQ ID NO: 157743 - protein, 7 aa, synthetic construct
YTSKPHI

SEQ ID NO: 157744 - protein, 7 aa, synthetic construct
YTSMVRA

SEQ ID NO: 157745 - protein, 7 aa, synthetic construct
YTSNHRN

SEQ ID NO: 157746 - protein, 7 aa, synthetic construct
YTSRDAK

SEQ ID NO: 157747 - protein, 7 aa, synthetic construct
YTSSHKA

SEQ ID NO: 157748 - protein, 7 aa, synthetic construct
YTSTRPT

SEQ ID NO: 157749 - protein, 7 aa, synthetic construct
YTSTYKG

SEQ ID NO: 157750 - protein, 7 aa, synthetic construct
YTTGMKL

SEQ ID NO: 157751 - protein, 7 aa, synthetic construct
YTTHGPK

SEQ ID NO: 157752 - protein, 7 aa, synthetic construct
YTTHSVR

SEQ ID NO: 157753 - protein, 7 aa, synthetic construct
YTTKERY

SEQ ID NO: 157754 - protein, 7 aa, synthetic construct
YTTNPRA

SEQ ID NO: 157755 - protein, 7 aa, synthetic construct
YTTQQNR

SEQ ID NO: 157756 - protein, 7 aa, synthetic construct
YTTYNSK

SEQ ID NO: 157757 - protein, 7 aa, synthetic construct
YTTYTQK

SEQ ID NO: 157758 - protein, 7 aa, synthetic construct
YTVGPPR

SEQ ID NO: 157759 - protein, 7 aa, synthetic construct
YTVHSTK

SEQ ID NO: 157760 - protein, 7 aa, synthetic construct
YTVKLRD

SEQ ID NO: 157761 - protein, 7 aa, synthetic construct
YTVNTKH

SEQ ID NO: 157762 - protein, 7 aa, synthetic construct
YVAGPRQ

SEQ ID NO: 157763 - protein, 7 aa, synthetic construct
YVAHQMK

SEQ ID NO: 157764 - protein, 7 aa, synthetic construct
YVAHQVK

SEQ ID NO: 157765 - protein, 7 aa, synthetic construct
YVAKIRE

SEQ ID NO: 157766 - protein, 7 aa, synthetic construct
YVAKQKD

SEQ ID NO: 157767 - protein, 7 aa, synthetic construct
YVAKQVH

SEQ ID NO: 157768 - protein, 7 aa, synthetic construct
YVANARG

SEQ ID NO: 157769 - protein, 7 aa, synthetic construct
YVANGMR

SEQ ID NO: 157770 - protein, 7 aa, synthetic construct
YVAREAK

SEQ ID NO: 157771 - protein, 7 aa, synthetic construct
YVARPSQ

SEQ ID NO: 157772 - protein, 7 aa, synthetic construct
YVARQNV

SEQ ID NO: 157773 - protein, 7 aa, synthetic construct
YVARTGV

SEQ ID NO: 157774 - protein, 7 aa, synthetic construct
YVASAKN

SEQ ID NO: 157775 - protein, 7 aa, synthetic construct
YVASHVK

SEQ ID NO: 157776 - protein, 7 aa, synthetic construct
YVDIKRG

SEQ ID NO: 157777 - protein, 7 aa, synthetic construct
YVEKNRS

SEQ ID NO: 157778 - protein, 7 aa, synthetic construct
YVGAKHI

SEQ ID NO: 157779 - protein, 7 aa, synthetic construct
YVGAPSR

SEQ ID NO: 157780 - protein, 7 aa, synthetic construct
YVGASKI

SEQ ID NO: 157781 - protein, 7 aa, synthetic construct
YVGGKHA

SEQ ID NO: 157782 - protein, 7 aa, synthetic construct
YVGGLGR

SEQ ID NO: 157783 - protein, 7 aa, synthetic construct
YVGGSKQ

SEQ ID NO: 157784 - protein, 7 aa, synthetic construct
YVGGTMK

SEQ ID NO: 157785 - protein, 7 aa, synthetic construct
YVGHKYS

SEQ ID NO: 157786 - protein, 7 aa, synthetic construct
YVGKGNF

SEQ ID NO: 157787 - protein, 7 aa, synthetic construct
YVGKMVQ

SEQ ID NO: 157788 - protein, 7 aa, synthetic construct
YVGKYSA

SEQ ID NO: 157789 - protein, 7 aa, synthetic construct
YVGLKVN

SEQ ID NO: 157790 - protein, 7 aa, synthetic construct
YVGMIKS

SEQ ID NO: 157791 - protein, 7 aa, synthetic construct
YVGMKSN

SEQ ID NO: 157792 - protein, 7 aa, synthetic construct
YVGPKAM

SEQ ID NO: 157793 - protein, 7 aa, synthetic construct
YVGQAQR

SEQ ID NO: 157794 - protein, 7 aa, synthetic construct
YVGQLQR

SEQ ID NO: 157795 - protein, 7 aa, synthetic construct
YVGRNSM

SEQ ID NO: 157796 - protein, 7 aa, synthetic construct
YVGSKFA

SEQ ID NO: 157797 - protein, 7 aa, synthetic construct
YVGTGPR

SEQ ID NO: 157798 - protein, 7 aa, synthetic construct
YVHASKN

SEQ ID NO: 157799 - protein, 7 aa, synthetic construct
YVHGVKS

SEQ ID NO: 157800 - protein, 7 aa, synthetic construct
YVHKQTS

SEQ ID NO: 157801 - protein, 7 aa, synthetic construct
YVHKSNG

SEQ ID NO: 157802 - protein, 7 aa, synthetic construct
YVHKVAG

SEQ ID NO: 157803 - protein, 7 aa, synthetic construct
YVHLQKN

SEQ ID NO: 157804 - protein, 7 aa, synthetic construct
YVHNKER

SEQ ID NO: 157805 - protein, 7 aa, synthetic construct
YVHTASK

SEQ ID NO: 157806 - protein, 7 aa, synthetic construct
YVHTPKP

SEQ ID NO: 157807 - protein, 7 aa, synthetic construct
YVKAHGM

SEQ ID NO: 157808 - protein, 7 aa, synthetic construct
YVKAPHS

SEQ ID NO: 157809 - protein, 7 aa, synthetic construct
YVKASHA

SEQ ID NO: 157810 - protein, 7 aa, synthetic construct
YVKDIAR

SEQ ID NO: 157811 - protein, 7 aa, synthetic construct
YVKDLNR

SEQ ID NO: 157812 - protein, 7 aa, synthetic construct
YVKDSSR

SEQ ID NO: 157813 - protein, 7 aa, synthetic construct
YVKDVVR

SEQ ID NO: 157814 - protein, 7 aa, synthetic construct
YVKERHG

SEQ ID NO: 157815 - protein, 7 aa, synthetic construct
YVKGEKF

SEQ ID NO: 157816 - protein, 7 aa, synthetic construct
YVKGPQF

SEQ ID NO: 157817 - protein, 7 aa, synthetic construct
YVKGQYS

SEQ ID NO: 157818 - protein, 7 aa, synthetic construct
YVKGRFE

SEQ ID NO: 157819 - protein, 7 aa, synthetic construct
YVKGVTY

SEQ ID NO: 157820 - protein, 7 aa, synthetic construct
YVKHAGN

SEQ ID NO: 157821 - protein, 7 aa, synthetic construct
YVKHHPS

SEQ ID NO: 157822 - protein, 7 aa, synthetic construct
YVKHILA

SEQ ID NO: 157823 - protein, 7 aa, synthetic construct
YVKHISQ

SEQ ID NO: 157824 - protein, 7 aa, synthetic construct
YVKHTGN

SEQ ID NO: 157825 - protein, 7 aa, synthetic construct
YVKHVMG

SEQ ID NO: 157826 - protein, 7 aa, synthetic construct
YVKIREG

SEQ ID NO: 157827 - protein, 7 aa, synthetic construct
YVKIREN

SEQ ID NO: 157828 - protein, 7 aa, synthetic construct
YVKISAA

SEQ ID NO: 157829 - protein, 7 aa, synthetic construct
YVKIVKD

SEQ ID NO: 157830 - protein, 7 aa, synthetic construct
YVKMDTR

SEQ ID NO: 157831 - protein, 7 aa, synthetic construct
YVKMGIN

SEQ ID NO: 157832 - protein, 7 aa, synthetic construct
YVKMPAN

SEQ ID NO: 157833 - protein, 7 aa, synthetic construct
YVKNAGH

SEQ ID NO: 157834 - protein, 7 aa, synthetic construct
YVKNMMQ

SEQ ID NO: 157835 - protein, 7 aa, synthetic construct
YVKNPQN

SEQ ID NO: 157836 - protein, 7 aa, synthetic construct
YVKNQHA

SEQ ID NO: 157837 - protein, 7 aa, synthetic construct
YVKPGHG

SEQ ID NO: 157838 - protein, 7 aa, synthetic construct
YVKPHVA

SEQ ID NO: 157839 - protein, 7 aa, synthetic construct
YVKPRMD

SEQ ID NO: 157840 - protein, 7 aa, synthetic construct
YVKPSNT

SEQ ID NO: 157841 - protein, 7 aa, synthetic construct
YVKPTLT

SEQ ID NO: 157842 - protein, 7 aa, synthetic construct
YVKPTQI

SEQ ID NO: 157843 - protein, 7 aa, synthetic construct
YVKQHPL

SEQ ID NO: 157844 - protein, 7 aa, synthetic construct
YVKSKYD

SEQ ID NO: 157845 - protein, 7 aa, synthetic construct
YVKSSSH

SEQ ID NO: 157846 - protein, 7 aa, synthetic construct
YVKTKSD

SEQ ID NO: 157847 - protein, 7 aa, synthetic construct
YVKTQER

SEQ ID NO: 157848 - protein, 7 aa, synthetic construct
YVMKSTT

SEQ ID NO: 157849 - protein, 7 aa, synthetic construct
YVNGRHV

SEQ ID NO: 157850 - protein, 7 aa, synthetic construct
YVNHLSK

SEQ ID NO: 157851 - protein, 7 aa, synthetic construct
YVNHTPK

SEQ ID NO: 157852 - protein, 7 aa, synthetic construct
YVNNSAK

SEQ ID NO: 157853 - protein, 7 aa, synthetic construct
YVNRDAK

SEQ ID NO: 157854 - protein, 7 aa, synthetic construct
YVNSMSR

SEQ ID NO: 157855 - protein, 7 aa, synthetic construct
YVPASHK

SEQ ID NO: 157856 - protein, 7 aa, synthetic construct
YVPGIRA

SEQ ID NO: 157857 - protein, 7 aa, synthetic construct
YVPHTRQ

SEQ ID NO: 157858 - protein, 7 aa, synthetic construct
YVPKFKD

SEQ ID NO: 157859 - protein, 7 aa, synthetic construct
YVPKMAH

SEQ ID NO: 157860 - protein, 7 aa, synthetic construct
YVPNRTV

SEQ ID NO: 157861 - protein, 7 aa, synthetic construct
YVPQNNK

SEQ ID NO: 157862 - protein, 7 aa, synthetic construct
YVPREKL

SEQ ID NO: 157863 - protein, 7 aa, synthetic construct
YVPSRDR

SEQ ID NO: 157864 - protein, 7 aa, synthetic construct
YVPSYKN

SEQ ID NO: 157865 - protein, 7 aa, synthetic construct
YVQARNP

SEQ ID NO: 157866 - protein, 7 aa, synthetic construct
YVQHNIK

SEQ ID NO: 157867 - protein, 7 aa, synthetic construct
YVQHNMK

SEQ ID NO: 157868 - protein, 7 aa, synthetic construct
YVQKHAG

SEQ ID NO: 157869 - protein, 7 aa, synthetic construct
YVQKNKD

SEQ ID NO: 157870 - protein, 7 aa, synthetic construct
YVQKNTL

SEQ ID NO: 157871 - protein, 7 aa, synthetic construct
YVQKTDK

SEQ ID NO: 157872 - protein, 7 aa, synthetic construct
YVQNSVQ

SEQ ID NO: 157873 - protein, 7 aa, synthetic construct
YVQTQAR

SEQ ID NO: 157874 - protein, 7 aa, synthetic construct
YVRAEKM

SEQ ID NO: 157875 - protein, 7 aa, synthetic construct
YVREIKN

SEQ ID NO: 157876 - protein, 7 aa, synthetic construct
YVRETAK

SEQ ID NO: 157877 - protein, 7 aa, synthetic construct
YVRGPSA

SEQ ID NO: 157878 - protein, 7 aa, synthetic construct
YVRGSAG

SEQ ID NO: 157879 - protein, 7 aa, synthetic construct
YVRMNKE

SEQ ID NO: 157880 - protein, 7 aa, synthetic construct
YVRPDKN

SEQ ID NO: 157881 - protein, 7 aa, synthetic construct
YVRQTEK

SEQ ID NO: 157882 - protein, 7 aa, synthetic construct
YVRSERA

SEQ ID NO: 157883 - protein, 7 aa, synthetic construct
YVRSMAG

SEQ ID NO: 157884 - protein, 7 aa, synthetic construct
YVRTSAG

SEQ ID NO: 157885 - protein, 7 aa, synthetic construct
YVRVQQG

SEQ ID NO: 157886 - protein, 7 aa, synthetic construct
YVRVQQS

SEQ ID NO: 157887 - protein, 7 aa, synthetic construct
YVSGGSR

SEQ ID NO: 157888 - protein, 7 aa, synthetic construct
YVSGNSR

SEQ ID NO: 157889 - protein, 7 aa, synthetic construct
YVSGRVM

SEQ ID NO: 157890 - protein, 7 aa, synthetic construct
YVSHPKS

SEQ ID NO: 157891 - protein, 7 aa, synthetic construct
YVSHRSG

SEQ ID NO: 157892 - protein, 7 aa, synthetic construct
YVSKKDF

SEQ ID NO: 157893 - protein, 7 aa, synthetic construct
YVSKQER

SEQ ID NO: 157894 - protein, 7 aa, synthetic construct
YVSNKHS

SEQ ID NO: 157895 - protein, 7 aa, synthetic construct
YVSNVRG

SEQ ID NO: 157896 - protein, 7 aa, synthetic construct
YVSQHNK

SEQ ID NO: 157897 - protein, 7 aa, synthetic construct
YVTGNRT

SEQ ID NO: 157898 - protein, 7 aa, synthetic construct
YVTKANM

SEQ ID NO: 157899 - protein, 7 aa, synthetic construct
YVTNHVR

SEQ ID NO: 157900 - protein, 7 aa, synthetic construct
YVTRQEK

SEQ ID NO: 157901 - protein, 7 aa, synthetic construct
YVVKTHN

SEQ ID NO: 157902 - protein, 7 aa, synthetic construct
YWQTEVA

SEQ ID NO: 157903 - protein, 7 aa, synthetic construct
YWSKDGD

SEQ ID NO: 157904 - protein, 7 aa, synthetic construct
YYAGTQK

SEQ ID NO: 157905 - protein, 7 aa, synthetic construct
YYAKSNQ

SEQ ID NO: 157906 - protein, 7 aa, synthetic construct
YYANKIS

SEQ ID NO: 157907 - protein, 7 aa, synthetic construct
YYDKKLM

SEQ ID NO: 157908 - protein, 7 aa, synthetic construct
YYGKGKD

SEQ ID NO: 157909 - protein, 7 aa, synthetic construct
YYGKVPS

SEQ ID NO: 157910 - protein, 7 aa, synthetic construct
YYGSTSK

SEQ ID NO: 157911 - protein, 7 aa, synthetic construct
YYGTGTK

SEQ ID NO: 157912 - protein, 7 aa, synthetic construct
YYGVKKD

SEQ ID NO: 157913 - protein, 7 aa, synthetic construct
YYKAISQ

SEQ ID NO: 157914 - protein, 7 aa, synthetic construct
YYKAQDI

SEQ ID NO: 157915 - protein, 7 aa, synthetic construct
YYKDKVQ

SEQ ID NO: 157916 - protein, 7 aa, synthetic construct
YYKDLKL

SEQ ID NO: 157917 - protein, 7 aa, synthetic construct
YYKEKGT

SEQ ID NO: 157918 - protein, 7 aa, synthetic construct
YYKEYKG

SEQ ID NO: 157919 - protein, 7 aa, synthetic construct
YYKGEKL

SEQ ID NO: 157920 - protein, 7 aa, synthetic construct
YYKGKQD

SEQ ID NO: 157921 - protein, 7 aa, synthetic construct
YYKTVNV

SEQ ID NO: 157922 - protein, 7 aa, synthetic construct
YYPKQSH

SEQ ID NO: 157923 - protein, 7 aa, synthetic construct
YYPNGKP

SEQ ID NO: 157924 - protein, 7 aa, synthetic construct
YYPNRGQ

SEQ ID NO: 157925 - protein, 7 aa, synthetic construct
YYQNTVK

SEQ ID NO: 157926 - protein, 7 aa, synthetic construct
YYRKADD

SEQ ID NO: 157927 - protein, 7 aa, synthetic construct
YYSTVKA

SEQ ID NO: 157928 - protein, 7 aa, synthetic construct
GHLGPPR

SEQ ID NO: 157929 - protein, 7 aa, synthetic construct
KEHSRTS

SEQ ID NO: 157930 - protein, 7 aa, synthetic construct
DRVHLNK

SEQ ID NO: 157931 - protein, 7 aa, synthetic construct
TYKAISM

SEQ ID NO: 157932 - protein, 7 aa, synthetic construct
KRMGETL

SEQ ID NO: 157933 - protein, 7 aa, synthetic construct
MDSPVRK

SEQ ID NO: 157934 - protein, 7 aa, synthetic construct
NADKNNR

SEQ ID NO: 157935 - protein, 7 aa, synthetic construct
PHARPTA

SEQ ID NO: 157936 - protein, 7 aa, synthetic construct
VKRQDER

SEQ ID NO: 157937 - protein, 7 aa, synthetic construct
HPKFDRL

SEQ ID NO: 157938 - protein, 7 aa, synthetic construct
WQKKMHE

SEQ ID NO: 157939 - protein, 7 aa, synthetic construct
IEIASRR

SEQ ID NO: 157940 - protein, 7 aa, synthetic construct
EQSQKPK

SEQ ID NO: 157941 - protein, 7 aa, synthetic construct
GTTEQRK

SEQ ID NO: 157942 - protein, 7 aa, synthetic construct
GEQKGQR

SEQ ID NO: 157943 - protein, 7 aa, synthetic construct
SEKPLRL

SEQ ID NO: 157944 - protein, 7 aa, synthetic construct
YLPQHTR

SEQ ID NO: 157945 - protein, 7 aa, synthetic construct
AEQMKGR

SEQ ID NO: 157946 - protein, 7 aa, synthetic construct
LDSEKRK

SEQ ID NO: 157947 - protein, 7 aa, synthetic construct
RMKQPDV

SEQ ID NO: 157948 - protein, 7 aa, synthetic construct
IRGMMTA

SEQ ID NO: 157949 - protein, 7 aa, synthetic construct
AKAFKTP

SEQ ID NO: 157950 - protein, 7 aa, synthetic construct
DRAEMKK

SEQ ID NO: 157951 - protein, 7 aa, synthetic construct
SQRKQGD

SEQ ID NO: 157952 - protein, 7 aa, synthetic construct
YGRDEKR

SEQ ID NO: 157953 - protein, 7 aa, synthetic construct
AQESRVR

SEQ ID NO: 157954 - protein, 7 aa, synthetic construct
KKEARWE

SEQ ID NO: 157955 - protein, 7 aa, synthetic construct
GNDFIKK

SEQ ID NO: 157956 - protein, 7 aa, synthetic construct
GEQFKSK

SEQ ID NO: 157957 - protein, 7 aa, synthetic construct
KKQIVDL

SEQ ID NO: 157958 - protein, 7 aa, synthetic construct
RKQAADF

SEQ ID NO: 157959 - protein, 7 aa, synthetic construct
YPKQIPY

SEQ ID NO: 157960 - protein, 7 aa, synthetic construct
YGKMEHK

SEQ ID NO: 157961 - protein, 7 aa, synthetic construct
GRGNIEK

SEQ ID NO: 157962 - protein, 7 aa, synthetic construct
METPKIR

SEQ ID NO: 157963 - protein, 7 aa, synthetic construct
AETGVKK

SEQ ID NO: 157964 - protein, 7 aa, synthetic construct
FKQRNFE

SEQ ID NO: 157965 - protein, 7 aa, synthetic construct
ERQIPKL

SEQ ID NO: 157966 - protein, 7 aa, synthetic construct
DTVSRKT

SEQ ID NO: 157967 - protein, 7 aa, synthetic construct
SEGKIKY

SEQ ID NO: 157968 - protein, 7 aa, synthetic construct
NFETVKR

SEQ ID NO: 157969 - protein, 7 aa, synthetic construct
NTEMRRM

SEQ ID NO: 157970 - protein, 7 aa, synthetic construct
PRHNPTV

SEQ ID NO: 157971 - protein, 7 aa, synthetic construct
WAKAEFK

SEQ ID NO: 157972 - protein, 7 aa, synthetic construct
DLTPQKK

SEQ ID NO: 157973 - protein, 7 aa, synthetic construct
RTDQEKK

SEQ ID NO: 157974 - protein, 7 aa, synthetic construct
QVERVAR

SEQ ID NO: 157975 - protein, 7 aa, synthetic construct
NKKNPEF

SEQ ID NO: 157976 - protein, 7 aa, synthetic construct
VEGATKK

SEQ ID NO: 157977 - protein, 7 aa, synthetic construct
DNTGPKK

SEQ ID NO: 157978 - protein, 7 aa, synthetic construct
TQKRQDS

SEQ ID NO: 157979 - protein, 7 aa, synthetic construct
QKRVGEG

SEQ ID NO: 157980 - protein, 7 aa, synthetic construct
DKKRTDM

SEQ ID NO: 157981 - protein, 7 aa, synthetic construct
GDLNRNK

SEQ ID NO: 157982 - protein, 7 aa, synthetic construct
MRQSREY

SEQ ID NO: 157983 - protein, 7 aa, synthetic construct
FENVGKK

SEQ ID NO: 157984 - protein, 7 aa, synthetic construct
ERGNMKM

SEQ ID NO: 157985 - protein, 7 aa, synthetic construct
YPIKFRD

SEQ ID NO: 157986 - protein, 7 aa, synthetic construct
VRQNKEN

SEQ ID NO: 157987 - protein, 7 aa, synthetic construct
DSTPRVR

SEQ ID NO: 157988 - protein, 7 aa, synthetic construct
FKAREVY

SEQ ID NO: 157989 - protein, 7 aa, synthetic construct
DAMQIKK

SEQ ID NO: 157990 - protein, 7 aa, synthetic construct
IKDISMR

SEQ ID NO: 157991 - protein, 7 aa, synthetic construct
RGKAEPH

SEQ ID NO: 157992 - protein, 7 aa, synthetic construct
RHTVTEK

SEQ ID NO: 157993 - protein, 7 aa, synthetic construct
ETVKIKF

SEQ ID NO: 157994 - protein, 7 aa, synthetic construct
SVQETRK

SEQ ID NO: 157995 - protein, 7 aa, synthetic construct
LRKAIIE

SEQ ID NO: 157996 - protein, 7 aa, synthetic construct
RIDGLTK

SEQ ID NO: 157997 - protein, 7 aa, synthetic construct
YVHKSTY

SEQ ID NO: 157998 - protein, 7 aa, synthetic construct
ARKLQEN

SEQ ID NO: 157999 - protein, 7 aa, synthetic construct
NEVARVK

SEQ ID NO: 158000 - protein, 7 aa, synthetic construct
RFVKALE

SEQ ID NO: 158001 - protein, 7 aa, synthetic construct
DSQTQKR

SEQ ID NO: 158002 - protein, 7 aa, synthetic construct
MRTMREN

SEQ ID NO: 158003 - protein, 7 aa, synthetic construct
YGEAIKK

SEQ ID NO: 158004 - protein, 7 aa, synthetic construct
AEMVKRI

SEQ ID NO: 158005 - protein, 7 aa, synthetic construct
DPNVVKR

SEQ ID NO: 158006 - protein, 7 aa, synthetic construct
TEQAKFR

SEQ ID NO: 158007 - protein, 7 aa, synthetic construct
QTRKGET

SEQ ID NO: 158008 - protein, 7 aa, synthetic construct
YATEQKR

SEQ ID NO: 158009 - protein, 7 aa, synthetic construct
DISSPKR

SEQ ID NO: 158010 - protein, 7 aa, synthetic construct
MRKNENY

SEQ ID NO: 158011 - protein, 7 aa, synthetic construct
AKRQQDF

SEQ ID NO: 158012 - protein, 7 aa, synthetic construct
PESKSFK

SEQ ID NO: 158013 - protein, 7 aa, synthetic construct
MQDNQKK

SEQ ID NO: 158014 - protein, 7 aa, synthetic construct
MAKKNDL

SEQ ID NO: 158015 - protein, 7 aa, synthetic construct
IRHTTQA

SEQ ID NO: 158016 - protein, 7 aa, synthetic construct
PIQKKFD

SEQ ID NO: 158017 - protein, 7 aa, synthetic construct
FKRMEQG

SEQ ID NO: 158018 - protein, 7 aa, synthetic construct
AETMKAK

SEQ ID NO: 158019 - protein, 7 aa, synthetic construct
TRSSKMD

SEQ ID NO: 158020 - protein, 7 aa, synthetic construct
LGSTERK

SEQ ID NO: 158021 - protein, 7 aa, synthetic construct
AQEGRAK

SEQ ID NO: 158022 - protein, 7 aa, synthetic construct
MEAQMKK

SEQ ID NO: 158023 - protein, 7 aa, synthetic construct
VRNQETR

SEQ ID NO: 158024 - protein, 7 aa, synthetic construct
SRAKGDL

SEQ ID NO: 158025 - protein, 7 aa, synthetic construct
TAFRGMA

SEQ ID NO: 158026 - protein, 7 aa, synthetic construct
MEVPNRK

SEQ ID NO: 158027 - protein, 7 aa, synthetic construct
TNKLLVK

SEQ ID NO: 158028 - protein, 7 aa, synthetic construct
VPQVERK

SEQ ID NO: 158029 - protein, 7 aa, synthetic construct
KQRAEPI

SEQ ID NO: 158030 - protein, 7 aa, synthetic construct
LYEVKRQ

SEQ ID NO: 158031 - protein, 7 aa, synthetic construct
PQERNFK

SEQ ID NO: 158032 - protein, 7 aa, synthetic construct
GNYTEKK

SEQ ID NO: 158033 - protein, 7 aa, synthetic construct
HGGRQTG

SEQ ID NO: 158034 - protein, 7 aa, synthetic construct
RSMKQDM

SEQ ID NO: 158035 - protein, 7 aa, synthetic construct
KKNMEYL

SEQ ID NO: 158036 - protein, 7 aa, synthetic construct
AYKARMD

SEQ ID NO: 158037 - protein, 7 aa, synthetic construct
QKGSEAR

SEQ ID NO: 158038 - protein, 7 aa, synthetic construct
EMKRSSA

SEQ ID NO: 158039 - protein, 7 aa, synthetic construct
QRQYAHA

SEQ ID NO: 158040 - protein, 7 aa, synthetic construct
PEVKLRA

SEQ ID NO: 158041 - protein, 7 aa, synthetic construct
TKRMIQE

SEQ ID NO: 158042 - protein, 7 aa, synthetic construct
QSKRIEA

SEQ ID NO: 158043 - protein, 7 aa, synthetic construct
EGIKQRA

SEQ ID NO: 158044 - protein, 7 aa, synthetic construct
FRDRESK

SEQ ID NO: 158045 - protein, 7 aa, synthetic construct
RVNMESK

SEQ ID NO: 158046 - protein, 7 aa, synthetic construct
TRNIKFD

SEQ ID NO: 158047 - protein, 7 aa, synthetic construct
ARKSDNI

SEQ ID NO: 158048 - protein, 7 aa, synthetic construct
YEKGNKS

SEQ ID NO: 158049 - protein, 7 aa, synthetic construct
QDKPRNF

SEQ ID NO: 158050 - protein, 7 aa, synthetic construct
NERNTPR

SEQ ID NO: 158051 - protein, 7 aa, synthetic construct
STENRSK

SEQ ID NO: 158052 - protein, 7 aa, synthetic construct
RATTRGD

SEQ ID NO: 158053 - protein, 7 aa, synthetic construct
TRKMFQE

SEQ ID NO: 158054 - protein, 7 aa, synthetic construct
FMARQKD

SEQ ID NO: 158055 - protein, 7 aa, synthetic construct
LRREAGN

SEQ ID NO: 158056 - protein, 7 aa, synthetic construct
VVEKREK

SEQ ID NO: 158057 - protein, 7 aa, synthetic construct
FQGPQKF

SEQ ID NO: 158058 - protein, 7 aa, synthetic construct
TNESRKA

SEQ ID NO: 158059 - protein, 7 aa, synthetic construct
TRQKETL

SEQ ID NO: 158060 - protein, 7 aa, synthetic construct
NDNMKRM

SEQ ID NO: 158061 - protein, 7 aa, synthetic construct
YDKYLRN

SEQ ID NO: 158062 - protein, 7 aa, synthetic construct
MKTRASD

SEQ ID NO: 158063 - protein, 7 aa, synthetic construct
QGKREIM

SEQ ID NO: 158064 - protein, 7 aa, synthetic construct
KAESWRQ

SEQ ID NO: 158065 - protein, 7 aa, synthetic construct
KRDPHFN

SEQ ID NO: 158066 - protein, 7 aa, synthetic construct
RDRQKDV

SEQ ID NO: 158067 - protein, 7 aa, synthetic construct
DSKQRHA

SEQ ID NO: 158068 - protein, 7 aa, synthetic construct
EQRLKAN

SEQ ID NO: 158069 - protein, 7 aa, synthetic construct
ARSTKAD

SEQ ID NO: 158070 - protein, 7 aa, synthetic construct
ESMKAKT

SEQ ID NO: 158071 - protein, 7 aa, synthetic construct
EVQRLKS

SEQ ID NO: 158072 - protein, 7 aa, synthetic construct
ERTIKDK

SEQ ID NO: 158073 - protein, 7 aa, synthetic construct
VMDRRAL

SEQ ID NO: 158074 - protein, 7 aa, synthetic construct
NDSRVKN

SEQ ID NO: 158075 - protein, 7 aa, synthetic construct
KVRGSVD

SEQ ID NO: 158076 - protein, 7 aa, synthetic construct
SETRNKV

SEQ ID NO: 158077 - protein, 7 aa, synthetic construct
GPHKGQH

SEQ ID NO: 158078 - protein, 7 aa, synthetic construct
YKENHSR

SEQ ID NO: 158079 - protein, 7 aa, synthetic construct
EGNKMKS

SEQ ID NO: 158080 - protein, 7 aa, synthetic construct
IRGHNIS

SEQ ID NO: 158081 - protein, 7 aa, synthetic construct
NRALKMD

SEQ ID NO: 158082 - protein, 7 aa, synthetic construct
NENKNRM

SEQ ID NO: 158083 - protein, 7 aa, synthetic construct
EAQRLKT

SEQ ID NO: 158084 - protein, 7 aa, synthetic construct
RVEQTRA

SEQ ID NO: 158085 - protein, 7 aa, synthetic construct
PNRKTEM

SEQ ID NO: 158086 - protein, 7 aa, synthetic construct
PERKAIN

SEQ ID NO: 158087 - protein, 7 aa, synthetic construct
KWENQKM

SEQ ID NO: 158088 - protein, 7 aa, synthetic construct
PDQMKLR

SEQ ID NO: 158089 - protein, 7 aa, synthetic construct
ERPQRLT

SEQ ID NO: 158090 - protein, 7 aa, synthetic construct
RGEGNTK

SEQ ID NO: 158091 - protein, 7 aa, synthetic construct
TNRYNAI

SEQ ID NO: 158092 - protein, 7 aa, synthetic construct
VRAKLEQ

SEQ ID NO: 158093 - protein, 7 aa, synthetic construct
PVRQRDS

SEQ ID NO: 158094 - protein, 7 aa, synthetic construct
IVRKITE

SEQ ID NO: 158095 - protein, 7 aa, synthetic construct
KMKVPHE

SEQ ID NO: 158096 - protein, 7 aa, synthetic construct
RLNPEGR

SEQ ID NO: 158097 - protein, 7 aa, synthetic construct
DMQKIRM

SEQ ID NO: 158098 - protein, 7 aa, synthetic construct
YVKQLRD

SEQ ID NO: 158099 - protein, 7 aa, synthetic construct
VIRVQKD

SEQ ID NO: 158100 - protein, 7 aa, synthetic construct
EHKKAAI

SEQ ID NO: 158101 - protein, 7 aa, synthetic construct
RGKSEER

SEQ ID NO: 158102 - protein, 7 aa, synthetic construct
QQDSTKR

SEQ ID NO: 158103 - protein, 7 aa, synthetic construct
KQTRVDF

SEQ ID NO: 158104 - protein, 7 aa, synthetic construct
NDTKYRA

SEQ ID NO: 158105 - protein, 7 aa, synthetic construct
VTRMMHA

SEQ ID NO: 158106 - protein, 7 aa, synthetic construct
DRKQPKE

SEQ ID NO: 158107 - protein, 7 aa, synthetic construct
TKGEARA

SEQ ID NO: 158108 - protein, 7 aa, synthetic construct
YPIRKTE

SEQ ID NO: 158109 - protein, 7 aa, synthetic construct
PRRDTVQ

SEQ ID NO: 158110 - protein, 7 aa, synthetic construct
SQRDANK

SEQ ID NO: 158111 - protein, 7 aa, synthetic construct
GIKNESR

SEQ ID NO: 158112 - protein, 7 aa, synthetic construct
PPRAKTE

SEQ ID NO: 158113 - protein, 7 aa, synthetic construct
KLYPNER

SEQ ID NO: 158114 - protein, 7 aa, synthetic construct
KLRTMVE

SEQ ID NO: 158115 - protein, 7 aa, synthetic construct
RDFGTRP

SEQ ID NO: 158116 - protein, 7 aa, synthetic construct
FKSKEVW

SEQ ID NO: 158117 - protein, 7 aa, synthetic construct
SNMRIKE

SEQ ID NO: 158118 - protein, 7 aa, synthetic construct
DAKPKNN

SEQ ID NO: 158119 - protein, 7 aa, synthetic construct
ISKMNYI

SEQ ID NO: 158120 - protein, 7 aa, synthetic construct
NKDRHNI

SEQ ID NO: 158121 - protein, 7 aa, synthetic construct
VRKSENP

SEQ ID NO: 158122 - protein, 7 aa, synthetic construct
FIRDANK

SEQ ID NO: 158123 - protein, 7 aa, synthetic construct
RTTPKDI

SEQ ID NO: 158124 - protein, 7 aa, synthetic construct
VAKRNDV

SEQ ID NO: 158125 - protein, 7 aa, synthetic construct
ARKDMQW

SEQ ID NO: 158126 - protein, 7 aa, synthetic construct
RSSQREN

SEQ ID NO: 158127 - protein, 7 aa, synthetic construct
NAGNANR

SEQ ID NO: 158128 - protein, 7 aa, synthetic construct
MIARPDK

SEQ ID NO: 158129 - protein, 7 aa, synthetic construct
ARAHSYS

SEQ ID NO: 158130 - protein, 7 aa, synthetic construct
WDRKSGM

SEQ ID NO: 158131 - protein, 7 aa, synthetic construct
YHSLVKP

SEQ ID NO: 158132 - protein, 7 aa, synthetic construct
TTRHGTL

SEQ ID NO: 158133 - protein, 7 aa, synthetic construct
DRKHLSV

SEQ ID NO: 158134 - protein, 7 aa, synthetic construct
KTEFRDK

SEQ ID NO: 158135 - protein, 7 aa, synthetic construct
EKDMKRY

SEQ ID NO: 158136 - protein, 7 aa, synthetic construct
DMQKQKM

SEQ ID NO: 158137 - protein, 7 aa, synthetic construct
TATRRDT

SEQ ID NO: 158138 - protein, 7 aa, synthetic construct
NRRIDVP

SEQ ID NO: 158139 - protein, 7 aa, synthetic construct
QRHSMTS

SEQ ID NO: 158140 - protein, 7 aa, synthetic construct
NPRIRGD

SEQ ID NO: 158141 - protein, 7 aa, synthetic construct
THVRSFS

SEQ ID NO: 158142 - protein, 7 aa, synthetic construct
MRSEVLR

SEQ ID NO: 158143 - protein, 7 aa, synthetic construct
STAKPHL

SEQ ID NO: 158144 - protein, 7 aa, synthetic construct
MQKGDRQ

SEQ ID NO: 158145 - protein, 7 aa, synthetic construct
IVRNTYA

SEQ ID NO: 158146 - protein, 7 aa, synthetic construct
AEMRTKA

SEQ ID NO: 158147 - protein, 7 aa, synthetic construct
QDGKLRG

SEQ ID NO: 158148 - protein, 7 aa, synthetic construct
MIRTSKE

SEQ ID NO: 158149 - protein, 7 aa, synthetic construct
QETKKMY

SEQ ID NO: 158150 - protein, 7 aa, synthetic construct
PENFKVK

SEQ ID NO: 158151 - protein, 7 aa, synthetic construct
KVKPQEM

SEQ ID NO: 158152 - protein, 7 aa, synthetic construct
NSTQYKF

SEQ ID NO: 158153 - protein, 7 aa, synthetic construct
FRGSPNL

SEQ ID NO: 158154 - protein, 7 aa, synthetic construct
QTTRHVP

SEQ ID NO: 158155 - protein, 7 aa, synthetic construct
MERKSHP

SEQ ID NO: 158156 - protein, 7 aa, synthetic construct
FAGHKSQ

SEQ ID NO: 158157 - protein, 7 aa, synthetic construct
AVRHVEK

SEQ ID NO: 158158 - protein, 7 aa, synthetic construct
YAEIKRS

SEQ ID NO: 158159 - protein, 7 aa, synthetic construct
AKQRNEL

SEQ ID NO: 158160 - protein, 7 aa, synthetic construct
IARSKDI

SEQ ID NO: 158161 - protein, 7 aa, synthetic construct
KYKQIEN

SEQ ID NO: 158162 - protein, 7 aa, synthetic construct
GIFSAKS

SEQ ID NO: 158163 - protein, 7 aa, synthetic construct
RLAHDNK

SEQ ID NO: 158164 - protein, 7 aa, synthetic construct
DSAINRK

SEQ ID NO: 158165 - protein, 7 aa, synthetic construct
FMGSRTV

SEQ ID NO: 158166 - protein, 7 aa, synthetic construct
IQIKRDM

SEQ ID NO: 158167 - protein, 7 aa, synthetic construct
RAHQKDS

SEQ ID NO: 158168 - protein, 7 aa, synthetic construct
SRSLHSS

SEQ ID NO: 158169 - protein, 7 aa, synthetic construct
FGRNAGM

SEQ ID NO: 158170 - protein, 7 aa, synthetic construct
YANQRLM

SEQ ID NO: 158171 - protein, 7 aa, synthetic construct
GGTHGPK

SEQ ID NO: 158172 - protein, 7 aa, synthetic construct
TTNRHVN

SEQ ID NO: 158173 - protein, 7 aa, synthetic construct
HDQKLSR

SEQ ID NO: 158174 - protein, 7 aa, synthetic construct
VNRHFAN

SEQ ID NO: 158175 - protein, 7 aa, synthetic construct
ENPPKTR

SEQ ID NO: 158176 - protein, 7 aa, synthetic construct
SRPAHST

SEQ ID NO: 158177 - protein, 7 aa, synthetic construct
PNRKSDV

SEQ ID NO: 158178 - protein, 7 aa, synthetic construct
LKKHPLD

SEQ ID NO: 158179 - protein, 7 aa, synthetic construct
PVVRKES

SEQ ID NO: 158180 - protein, 7 aa, synthetic construct
EPTPKKV

SEQ ID NO: 158181 - protein, 7 aa, synthetic construct
SKPVYDR

SEQ ID NO: 158182 - protein, 7 aa, synthetic construct
NDTRRTI

SEQ ID NO: 158183 - protein, 7 aa, synthetic construct
MTKRTEV

SEQ ID NO: 158184 - protein, 7 aa, synthetic construct
LEKRSHV

SEQ ID NO: 158185 - protein, 7 aa, synthetic construct
FRKHEVP

SEQ ID NO: 158186 - protein, 7 aa, synthetic construct
MTNRKDL

SEQ ID NO: 158187 - protein, 7 aa, synthetic construct
DTKMDKK

SEQ ID NO: 158188 - protein, 7 aa, synthetic construct
GYGQRVP

SEQ ID NO: 158189 - protein, 7 aa, synthetic construct
SGYKLHP

SEQ ID NO: 158190 - protein, 7 aa, synthetic construct
TSRETRA

SEQ ID NO: 158191 - protein, 7 aa, synthetic construct
LAREHKQ

SEQ ID NO: 158192 - protein, 7 aa, synthetic construct
AERAVKN

SEQ ID NO: 158193 - protein, 7 aa, synthetic construct
IHGQTSR

SEQ ID NO: 158194 - protein, 7 aa, synthetic construct
DLRQSKL

SEQ ID NO: 158195 - protein, 7 aa, synthetic construct
LRSQGQY

SEQ ID NO: 158196 - protein, 7 aa, synthetic construct
QPRDHRA

SEQ ID NO: 158197 - protein, 7 aa, synthetic construct
YPPGMRN

SEQ ID NO: 158198 - protein, 7 aa, synthetic construct
APKQVRD

SEQ ID NO: 158199 - protein, 7 aa, synthetic construct
IRNVAAT

SEQ ID NO: 158200 - protein, 7 aa, synthetic construct
KGAYVDK

SEQ ID NO: 158201 - protein, 7 aa, synthetic construct
YGSGGHK

SEQ ID NO: 158202 - protein, 7 aa, synthetic construct
DLGNKAR

SEQ ID NO: 158203 - protein, 7 aa, synthetic construct
RNHGGRD

SEQ ID NO: 158204 - protein, 7 aa, synthetic construct
VNYKYAA

SEQ ID NO: 158205 - protein, 7 aa, synthetic construct
SHKKDGM

SEQ ID NO: 158206 - protein, 7 aa, synthetic construct
PKMRDHA

SEQ ID NO: 158207 - protein, 7 aa, synthetic construct
ARIKVDT

SEQ ID NO: 158208 - protein, 7 aa, synthetic construct
YKNFTLA

SEQ ID NO: 158209 - protein, 7 aa, synthetic construct
FPDRTRN

SEQ ID NO: 158210 - protein, 7 aa, synthetic construct
RVPDYNK

SEQ ID NO: 158211 - protein, 7 aa, synthetic construct
KAIRVNE

SEQ ID NO: 158212 - protein, 7 aa, synthetic construct
TQVRDKY

SEQ ID NO: 158213 - protein, 7 aa, synthetic construct
ASGAKYG

SEQ ID NO: 158214 - protein, 7 aa, synthetic construct
SSHKEAR

SEQ ID NO: 158215 - protein, 7 aa, synthetic construct
KMNYTKE

SEQ ID NO: 158216 - protein, 7 aa, synthetic construct
EGIKVKI

SEQ ID NO: 158217 - protein, 7 aa, synthetic construct
KRPNPES

SEQ ID NO: 158218 - protein, 7 aa, synthetic construct
QPYRNVQ

SEQ ID NO: 158219 - protein, 7 aa, synthetic construct
LGRGPAP

SEQ ID NO: 158220 - protein, 7 aa, synthetic construct
MPMSRHG

SEQ ID NO: 158221 - protein, 7 aa, synthetic construct
MRNLMQP

SEQ ID NO: 158222 - protein, 7 aa, synthetic construct
TNRDKKD

SEQ ID NO: 158223 - protein, 7 aa, synthetic construct
SQTHSRA

SEQ ID NO: 158224 - protein, 7 aa, synthetic construct
FRTAGMQ

SEQ ID NO: 158225 - protein, 7 aa, synthetic construct
MLKRLAD

SEQ ID NO: 158226 - protein, 7 aa, synthetic construct
HVKYKPE

SEQ ID NO: 158227 - protein, 7 aa, synthetic construct
IARHMAA

SEQ ID NO: 158228 - protein, 7 aa, synthetic construct
RRDPIHG

SEQ ID NO: 158229 - protein, 7 aa, synthetic construct
SVRYGSQ

SEQ ID NO: 158230 - protein, 7 aa, synthetic construct
HGKIEIR

SEQ ID NO: 158231 - protein, 7 aa, synthetic construct
SKPHRDV

SEQ ID NO: 158232 - protein, 7 aa, synthetic construct
FADVRSR

SEQ ID NO: 158233 - protein, 7 aa, synthetic construct
IKVQHDR

SEQ ID NO: 158234 - protein, 7 aa, synthetic construct
KHGNNRE

SEQ ID NO: 158235 - protein, 7 aa, synthetic construct
QEVKHRA

SEQ ID NO: 158236 - protein, 7 aa, synthetic construct
DNLKIKF

SEQ ID NO: 158237 - protein, 7 aa, synthetic construct
KQTTRET

SEQ ID NO: 158238 - protein, 7 aa, synthetic construct
VTRSSAQ

SEQ ID NO: 158239 - protein, 7 aa, synthetic construct
HTQGQRP

SEQ ID NO: 158240 - protein, 7 aa, synthetic construct
TVSRSDR

SEQ ID NO: 158241 - protein, 7 aa, synthetic construct
PQTKYHG

SEQ ID NO: 158242 - protein, 7 aa, synthetic construct
SKMDANR

SEQ ID NO: 158243 - protein, 7 aa, synthetic construct
QRVSQNF

SEQ ID NO: 158244 - protein, 7 aa, synthetic construct
SERAMKN

SEQ ID NO: 158245 - protein, 7 aa, synthetic construct
NEKKYSQ

SEQ ID NO: 158246 - protein, 7 aa, synthetic construct
MKYTTSM

SEQ ID NO: 158247 - protein, 7 aa, synthetic construct
AQIKERY

SEQ ID NO: 158248 - protein, 7 aa, synthetic construct
KGMRTDI

SEQ ID NO: 158249 - protein, 7 aa, synthetic construct
VSNDVRR

SEQ ID NO: 158250 - protein, 7 aa, synthetic construct
YRQTTPF

SEQ ID NO: 158251 - protein, 7 aa, synthetic construct
ESAKGRA

SEQ ID NO: 158252 - protein, 7 aa, synthetic construct
GMSHLRG

SEQ ID NO: 158253 - protein, 7 aa, synthetic construct
QFRNMGT

SEQ ID NO: 158254 - protein, 7 aa, synthetic construct
AYVNRNP

SEQ ID NO: 158255 - protein, 7 aa, synthetic construct
LTNYSKI

SEQ ID NO: 158256 - protein, 7 aa, synthetic construct
RQSGEKI

SEQ ID NO: 158257 - protein, 7 aa, synthetic construct
ENKRVIS

SEQ ID NO: 158258 - protein, 7 aa, synthetic construct
VRDRRDV

SEQ ID NO: 158259 - protein, 7 aa, synthetic construct
MRSTVSY

SEQ ID NO: 158260 - protein, 7 aa, synthetic construct
GGSQTKW

SEQ ID NO: 158261 - protein, 7 aa, synthetic construct
GNKKLQD

SEQ ID NO: 158262 - protein, 7 aa, synthetic construct
IDARARA

SEQ ID NO: 158263 - protein, 7 aa, synthetic construct
RAHVPKD

SEQ ID NO: 158264 - protein, 7 aa, synthetic construct
VMQKPYN

SEQ ID NO: 158265 - protein, 7 aa, synthetic construct
PHKKMDV

SEQ ID NO: 158266 - protein, 7 aa, synthetic construct
TIKHIDR

SEQ ID NO: 158267 - protein, 7 aa, synthetic construct
KQKSELH

SEQ ID NO: 158268 - protein, 7 aa, synthetic construct
SQKVRDH

SEQ ID NO: 158269 - protein, 7 aa, synthetic construct
YLSRNIS

SEQ ID NO: 158270 - protein, 7 aa, synthetic construct
KLRQINE

SEQ ID NO: 158271 - protein, 7 aa, synthetic construct
EFIKLKS

SEQ ID NO: 158272 - protein, 7 aa, synthetic construct
GSRFGNA

SEQ ID NO: 158273 - protein, 7 aa, synthetic construct
NKREPFN

SEQ ID NO: 158274 - protein, 7 aa, synthetic construct
HTTNVNR

SEQ ID NO: 158275 - protein, 7 aa, synthetic construct
RSHIKGE

SEQ ID NO: 158276 - protein, 7 aa, synthetic construct
FRAQPNI

SEQ ID NO: 158277 - protein, 7 aa, synthetic construct
ETQKIRV

SEQ ID NO: 158278 - protein, 7 aa, synthetic construct
KANQQDR

SEQ ID NO: 158279 - protein, 7 aa, synthetic construct
MRAQTYP

SEQ ID NO: 158280 - protein, 7 aa, synthetic construct
QVRNHQL

SEQ ID NO: 158281 - protein, 7 aa, synthetic construct
DVNIKSK

SEQ ID NO: 158282 - protein, 7 aa, synthetic construct
DKHNIKQ

SEQ ID NO: 158283 - protein, 7 aa, synthetic construct
PMIKRDT

SEQ ID NO: 158284 - protein, 7 aa, synthetic construct
KKADPPF

SEQ ID NO: 158285 - protein, 7 aa, synthetic construct
WTGTYKA

SEQ ID NO: 158286 - protein, 7 aa, synthetic construct
RAYDRVS

SEQ ID NO: 158287 - protein, 7 aa, synthetic construct
PKKTHDM

SEQ ID NO: 158288 - protein, 7 aa, synthetic construct
GEQKRIN

SEQ ID NO: 158289 - protein, 7 aa, synthetic construct
NRGHLQI

SEQ ID NO: 158290 - protein, 7 aa, synthetic construct
TRIKEIM

SEQ ID NO: 158291 - protein, 7 aa, synthetic construct
EKGSNTK

SEQ ID NO: 158292 - protein, 7 aa, synthetic construct
EKTRAVL

SEQ ID NO: 158293 - protein, 7 aa, synthetic construct
TMTHRLN

SEQ ID NO: 158294 - protein, 7 aa, synthetic construct
KLNREMP

SEQ ID NO: 158295 - protein, 7 aa, synthetic construct
YTRTGTY

SEQ ID NO: 158296 - protein, 7 aa, synthetic construct
QMVRMSA

SEQ ID NO: 158297 - protein, 7 aa, synthetic construct
VPRHVPV

SEQ ID NO: 158298 - protein, 7 aa, synthetic construct
RLSGHNI

SEQ ID NO: 158299 - protein, 7 aa, synthetic construct
GSIPKRD

SEQ ID NO: 158300 - protein, 7 aa, synthetic construct
TNITKHQ

SEQ ID NO: 158301 - protein, 7 aa, synthetic construct
RSQTHGT

SEQ ID NO: 158302 - protein, 7 aa, synthetic construct
DVVKSGR

SEQ ID NO: 158303 - protein, 7 aa, synthetic construct
FASYKHQ

SEQ ID NO: 158304 - protein, 7 aa, synthetic construct
DNRLTKT

SEQ ID NO: 158305 - protein, 7 aa, synthetic construct
KQYSGNN

SEQ ID NO: 158306 - protein, 7 aa, synthetic construct
NFDRVTK

SEQ ID NO: 158307 - protein, 7 aa, synthetic construct
GSDRQKF

SEQ ID NO: 158308 - protein, 7 aa, synthetic construct
YSHIKMT

SEQ ID NO: 158309 - protein, 7 aa, synthetic construct
KLRGEIA

SEQ ID NO: 158310 - protein, 7 aa, synthetic construct
QQYAKPM

SEQ ID NO: 158311 - protein, 7 aa, synthetic construct
GFEIKRT

SEQ ID NO: 158312 - protein, 7 aa, synthetic construct
LIKYQQN

SEQ ID NO: 158313 - protein, 7 aa, synthetic construct
VRDMAMR

SEQ ID NO: 158314 - protein, 7 aa, synthetic construct
GKKFMID

SEQ ID NO: 158315 - protein, 7 aa, synthetic construct
KEAPKVM

SEQ ID NO: 158316 - protein, 7 aa, synthetic construct
IPERRIQ

SEQ ID NO: 158317 - protein, 7 aa, synthetic construct
KINREPL

SEQ ID NO: 158318 - protein, 7 aa, synthetic construct
IGQYRNI

SEQ ID NO: 158319 - protein, 7 aa, synthetic construct
NPGIHKS

SEQ ID NO: 158320 - protein, 7 aa, synthetic construct
QQRQGYY

SEQ ID NO: 158321 - protein, 7 aa, synthetic construct
TEKNIRF

SEQ ID NO: 158322 - protein, 7 aa, synthetic construct
KWQTERA

SEQ ID NO: 158323 - protein, 7 aa, synthetic construct
PLHTRPQ

SEQ ID NO: 158324 - protein, 7 aa, synthetic construct
GSSSSRG

SEQ ID NO: 158325 - protein, 7 aa, synthetic construct
WMKSNIP

SEQ ID NO: 158326 - protein, 7 aa, synthetic construct
KPRQETN

SEQ ID NO: 158327 - protein, 7 aa, synthetic construct
SDRKSPH

SEQ ID NO: 158328 - protein, 7 aa, synthetic construct
KTSHHQP

SEQ ID NO: 158329 - protein, 7 aa, synthetic construct
VQRGVDR

SEQ ID NO: 158330 - protein, 7 aa, synthetic construct
SGNQRFY

SEQ ID NO: 158331 - protein, 7 aa, synthetic construct
DMVRSVK

SEQ ID NO: 158332 - protein, 7 aa, synthetic construct
YAGSIKY

SEQ ID NO: 158333 - protein, 7 aa, synthetic construct
RLKGDNY

SEQ ID NO: 158334 - protein, 7 aa, synthetic construct
YIKSALN

SEQ ID NO: 158335 - protein, 7 aa, synthetic construct
YAANRQY

SEQ ID NO: 158336 - protein, 7 aa, synthetic construct
YMLKKDT

SEQ ID NO: 158337 - protein, 7 aa, synthetic construct
NQVLRNQ

SEQ ID NO: 158338 - protein, 7 aa, synthetic construct
HVGRMSV

SEQ ID NO: 158339 - protein, 7 aa, synthetic construct
FTDRVGR

SEQ ID NO: 158340 - protein, 7 aa, synthetic construct
FKHQAMI

SEQ ID NO: 158341 - protein, 7 aa, synthetic construct
IFEKNFK

SEQ ID NO: 158342 - protein, 7 aa, synthetic construct
TFRLEKA

SEQ ID NO: 158343 - protein, 7 aa, synthetic construct
RLHTVSA

SEQ ID NO: 158344 - protein, 7 aa, synthetic construct
AMHEKQR

SEQ ID NO: 158345 - protein, 7 aa, synthetic construct
RNKLPID

SEQ ID NO: 158346 - protein, 7 aa, synthetic construct
QMKPHYN

SEQ ID NO: 158347 - protein, 7 aa, synthetic construct
IIRSDKA

SEQ ID NO: 158348 - protein, 7 aa, synthetic construct
MHKTTNY

SEQ ID NO: 158349 - protein, 7 aa, synthetic construct
PPDRGNK

SEQ ID NO: 158350 - protein, 7 aa, synthetic construct
PEIKSRT

SEQ ID NO: 158351 - protein, 7 aa, synthetic construct
WQMNRSA

SEQ ID NO: 158352 - protein, 7 aa, synthetic construct
KQAPYSG

SEQ ID NO: 158353 - protein, 7 aa, synthetic construct
RLIKAVE

SEQ ID NO: 158354 - protein, 7 aa, synthetic construct
TRTVANY

SEQ ID NO: 158355 - protein, 7 aa, synthetic construct
RAKESQL

SEQ ID NO: 158356 - protein, 7 aa, synthetic construct
MMNPRTV

SEQ ID NO: 158357 - protein, 7 aa, synthetic construct
QARKTDV

SEQ ID NO: 158358 - protein, 7 aa, synthetic construct
HGPSNSR

SEQ ID NO: 158359 - protein, 7 aa, synthetic construct
FYQAAKP

SEQ ID NO: 158360 - protein, 7 aa, synthetic construct
IAMNIRP

SEQ ID NO: 158361 - protein, 7 aa, synthetic construct
MDKYRGI

SEQ ID NO: 158362 - protein, 7 aa, synthetic construct
FVGHNKM

SEQ ID NO: 158363 - protein, 7 aa, synthetic construct
NQRMINV

SEQ ID NO: 158364 - protein, 7 aa, synthetic construct
ILDKHSR

SEQ ID NO: 158365 - protein, 7 aa, synthetic construct
IFKKDTL

SEQ ID NO: 158366 - protein, 7 aa, synthetic construct
GDKPRAI

SEQ ID NO: 158367 - protein, 7 aa, synthetic construct
HQKHTFG

SEQ ID NO: 158368 - protein, 7 aa, synthetic construct
QPRNVPF

SEQ ID NO: 158369 - protein, 7 aa, synthetic construct
PIRHLKE

SEQ ID NO: 158370 - protein, 7 aa, synthetic construct
HEVKRVQ

SEQ ID NO: 158371 - protein, 7 aa, synthetic construct
YHGKTFG

SEQ ID NO: 158372 - protein, 7 aa, synthetic construct
RSKNDSA

SEQ ID NO: 158373 - protein, 7 aa, synthetic construct
TTHREKV

SEQ ID NO: 158374 - protein, 7 aa, synthetic construct
VFKGQYN

SEQ ID NO: 158375 - protein, 7 aa, synthetic construct
QPSRLHQ

SEQ ID NO: 158376 - protein, 7 aa, synthetic construct
NQDTKKF

SEQ ID NO: 158377 - protein, 7 aa, synthetic construct
RQETKFA

SEQ ID NO: 158378 - protein, 7 aa, synthetic construct
VVQRESK

SEQ ID NO: 158379 - protein, 7 aa, synthetic construct
KIPYGQQ

SEQ ID NO: 158380 - protein, 7 aa, synthetic construct
MRPGQMY

SEQ ID NO: 158381 - protein, 7 aa, synthetic construct
NKGYASL

SEQ ID NO: 158382 - protein, 7 aa, synthetic construct
YSYKHQN

SEQ ID NO: 158383 - protein, 7 aa, synthetic construct
FHVRQAQ

SEQ ID NO: 158384 - protein, 7 aa, synthetic construct
ATSSRER

SEQ ID NO: 158385 - protein, 7 aa, synthetic construct
DSIQKGR

SEQ ID NO: 158386 - protein, 7 aa, synthetic construct
ARNVHTV

SEQ ID NO: 158387 - protein, 7 aa, synthetic construct
AIPHRQA

SEQ ID NO: 158388 - protein, 7 aa, synthetic construct
NMRSVMP

SEQ ID NO: 158389 - protein, 7 aa, synthetic construct
MYAANRP

SEQ ID NO: 158390 - protein, 7 aa, synthetic construct
QKYTALS

SEQ ID NO: 158391 - protein, 7 aa, synthetic construct
YPKDHKY

SEQ ID NO: 158392 - protein, 7 aa, synthetic construct
GRHNTAV

SEQ ID NO: 158393 - protein, 7 aa, synthetic construct
VARNNVY

SEQ ID NO: 158394 - protein, 7 aa, synthetic construct
MHRPVPP

SEQ ID NO: 158395 - protein, 7 aa, synthetic construct
IQGMIRQ

SEQ ID NO: 158396 - protein, 7 aa, synthetic construct
KTYKTTE

SEQ ID NO: 158397 - protein, 7 aa, synthetic construct
QRDVVGK

SEQ ID NO: 158398 - protein, 7 aa, synthetic construct
SHAPRMN

SEQ ID NO: 158399 - protein, 7 aa, synthetic construct
MMKGHAF

SEQ ID NO: 158400 - protein, 7 aa, synthetic construct
NRVQIQM

SEQ ID NO: 158401 - protein, 7 aa, synthetic construct
LAANRFS

SEQ ID NO: 158402 - protein, 7 aa, synthetic construct
MHNKNFP

SEQ ID NO: 158403 - protein, 7 aa, synthetic construct
REDRKIV

SEQ ID NO: 158404 - protein, 7 aa, synthetic construct
SKMNHNI

SEQ ID NO: 158405 - protein, 7 aa, synthetic construct
GRMTHQI

SEQ ID NO: 158406 - protein, 7 aa, synthetic construct
KHAVREI

SEQ ID NO: 158407 - protein, 7 aa, synthetic construct
GTKNRDV

SEQ ID NO: 158408 - protein, 7 aa, synthetic construct
GHVRMPP

SEQ ID NO: 158409 - protein, 7 aa, synthetic construct
HAKFTDK

SEQ ID NO: 158410 - protein, 7 aa, synthetic construct
MKKEVLT

SEQ ID NO: 158411 - protein, 7 aa, synthetic construct
YIGAPKH

SEQ ID NO: 158412 - protein, 7 aa, synthetic construct
YSMKSRE

SEQ ID NO: 158413 - protein, 7 aa, synthetic construct
TRADFLK

SEQ ID NO: 158414 - protein, 7 aa, synthetic construct
RDAINPK

SEQ ID NO: 158415 - protein, 7 aa, synthetic construct
SQGHKPT

SEQ ID NO: 158416 - protein, 7 aa, synthetic construct
QSPRANY

SEQ ID NO: 158417 - protein, 7 aa, synthetic construct
QIRKEAL

SEQ ID NO: 158418 - protein, 7 aa, synthetic construct
LSKHAHQ

SEQ ID NO: 158419 - protein, 7 aa, synthetic construct
VRPANTF

SEQ ID NO: 158420 - protein, 7 aa, synthetic construct
RGYAAVA

SEQ ID NO: 158421 - protein, 7 aa, synthetic construct
NRSQHIT

SEQ ID NO: 158422 - protein, 7 aa, synthetic construct
QRVQQHI

SEQ ID NO: 158423 - protein, 7 aa, synthetic construct
IQTHRMQ

SEQ ID NO: 158424 - protein, 7 aa, synthetic construct
EKYPKMN

SEQ ID NO: 158425 - protein, 7 aa, synthetic construct
KSTHERS

SEQ ID NO: 158426 - protein, 7 aa, synthetic construct
TQPRIHQ

SEQ ID NO: 158427 - protein, 7 aa, synthetic construct
IDNKYRA

SEQ ID NO: 158428 - protein, 7 aa, synthetic construct
DRGAKTL

SEQ ID NO: 158429 - protein, 7 aa, synthetic construct
TKYEKIQ

SEQ ID NO: 158430 - protein, 7 aa, synthetic construct
EQNKTGR

SEQ ID NO: 158431 - protein, 7 aa, synthetic construct
FPKIVHS

SEQ ID NO: 158432 - protein, 7 aa, synthetic construct
YSKIHVP

SEQ ID NO: 158433 - protein, 7 aa, synthetic construct
NIGHTKQ

SEQ ID NO: 158434 - protein, 7 aa, synthetic construct
KSSDSMK

SEQ ID NO: 158435 - protein, 7 aa, synthetic construct
TSKSSYQ

SEQ ID NO: 158436 - protein, 7 aa, synthetic construct
SRNMTLM

SEQ ID NO: 158437 - protein, 7 aa, synthetic construct
AHKNVFG

SEQ ID NO: 158438 - protein, 7 aa, synthetic construct
GFSRQQY

SEQ ID NO: 158439 - protein, 7 aa, synthetic construct
RIVHNNS

SEQ ID NO: 158440 - protein, 7 aa, synthetic construct
QVRAPAF

SEQ ID NO: 158441 - protein, 7 aa, synthetic construct
HNRSMMP

SEQ ID NO: 158442 - protein, 7 aa, synthetic construct
SKHDFTK

SEQ ID NO: 158443 - protein, 7 aa, synthetic construct
FMKAERL

SEQ ID NO: 158444 - protein, 7 aa, synthetic construct
HVTNTRN

SEQ ID NO: 158445 - protein, 7 aa, synthetic construct
QERMVKL

SEQ ID NO: 158446 - protein, 7 aa, synthetic construct
VQGARMM

SEQ ID NO: 158447 - protein, 7 aa, synthetic construct
GSHSTPR

SEQ ID NO: 158448 - protein, 7 aa, synthetic construct
QFRGTVM

SEQ ID NO: 158449 - protein, 7 aa, synthetic construct
RLRDTMN

SEQ ID NO: 158450 - protein, 7 aa, synthetic construct
HDGKSKV

SEQ ID NO: 158451 - protein, 7 aa, synthetic construct
ELARMKT

SEQ ID NO: 158452 - protein, 7 aa, synthetic construct
AIRQKDV

SEQ ID NO: 158453 - protein, 7 aa, synthetic construct
AKVKEPW

SEQ ID NO: 158454 - protein, 7 aa, synthetic construct
RTPMDAK

SEQ ID NO: 158455 - protein, 7 aa, synthetic construct
YNQGSPR

SEQ ID NO: 158456 - protein, 7 aa, synthetic construct
REQSMVR

SEQ ID NO: 158457 - protein, 7 aa, synthetic construct
FRQPTGM

SEQ ID NO: 158458 - protein, 7 aa, synthetic construct
NLKKLEF

SEQ ID NO: 158459 - protein, 7 aa, synthetic construct
VRNNPVT

SEQ ID NO: 158460 - protein, 7 aa, synthetic construct
QAPRHLG

SEQ ID NO: 158461 - protein, 7 aa, synthetic construct
DTPRKSL

SEQ ID NO: 158462 - protein, 7 aa, synthetic construct
FAGKYNV

SEQ ID NO: 158463 - protein, 7 aa, synthetic construct
NMDARSK

SEQ ID NO: 158464 - protein, 7 aa, synthetic construct
QVSMRLP

SEQ ID NO: 158465 - protein, 7 aa, synthetic construct
QRTHTLV

SEQ ID NO: 158466 - protein, 7 aa, synthetic construct
FKSVHST

SEQ ID NO: 158467 - protein, 7 aa, synthetic construct
VITQHRA

SEQ ID NO: 158468 - protein, 7 aa, synthetic construct
MMKHLAQ

SEQ ID NO: 158469 - protein, 7 aa, synthetic construct
KLLNRLE

SEQ ID NO: 158470 - protein, 7 aa, synthetic construct
WRNPQSQ

SEQ ID NO: 158471 - protein, 7 aa, synthetic construct
KNKMDAY

SEQ ID NO: 158472 - protein, 7 aa, synthetic construct
KAERFVQ

SEQ ID NO: 158473 - protein, 7 aa, synthetic construct
IQNLVRT

SEQ ID NO: 158474 - protein, 7 aa, synthetic construct
HKAAYQQ

SEQ ID NO: 158475 - protein, 7 aa, synthetic construct
MHKLTFA

SEQ ID NO: 158476 - protein, 7 aa, synthetic construct
LLKKYDQ

SEQ ID NO: 158477 - protein, 7 aa, synthetic construct
NSRDYPK

SEQ ID NO: 158478 - protein, 7 aa, synthetic construct
KTHYSTA

SEQ ID NO: 158479 - protein, 7 aa, synthetic construct
THRPDKV

SEQ ID NO: 158480 - protein, 7 aa, synthetic construct
KPTHNPM

SEQ ID NO: 158481 - protein, 7 aa, synthetic construct
SNALRER

SEQ ID NO: 158482 - protein, 7 aa, synthetic construct
PDIRAKS

SEQ ID NO: 158483 - protein, 7 aa, synthetic construct
KAFNLEK

SEQ ID NO: 158484 - protein, 7 aa, synthetic construct
ISRSSII

SEQ ID NO: 158485 - protein, 7 aa, synthetic construct
QTFSQKN

SEQ ID NO: 158486 - protein, 7 aa, synthetic construct
TREMYKA

SEQ ID NO: 158487 - protein, 7 aa, synthetic construct
IGAIEKK

SEQ ID NO: 158488 - protein, 7 aa, synthetic construct
YTGTGPR

SEQ ID NO: 158489 - protein, 7 aa, synthetic construct
VPHRQDK

SEQ ID NO: 158490 - protein, 7 aa, synthetic construct
IAPKMYP

SEQ ID NO: 158491 - protein, 7 aa, synthetic construct
FVQTHKA

SEQ ID NO: 158492 - protein, 7 aa, synthetic construct
ITSKPSW

SEQ ID NO: 158493 - protein, 7 aa, synthetic construct
LQSTYKQ

SEQ ID NO: 158494 - protein, 7 aa, synthetic construct
NLRSTNF

SEQ ID NO: 158495 - protein, 7 aa, synthetic construct
YTNTRLL

SEQ ID NO: 158496 - protein, 7 aa, synthetic construct
VYQPQKA

SEQ ID NO: 158497 - protein, 7 aa, synthetic construct
AASQRIM

SEQ ID NO: 158498 - protein, 7 aa, synthetic construct
SRPSMMH

SEQ ID NO: 158499 - protein, 7 aa, synthetic construct
AVGTRDR

SEQ ID NO: 158500 - protein, 7 aa, synthetic construct
AIKREVY

SEQ ID NO: 158501 - protein, 7 aa, synthetic construct
KPITYQA

SEQ ID NO: 158502 - protein, 7 aa, synthetic construct
QQWKNIS

SEQ ID NO: 158503 - protein, 7 aa, synthetic construct
SQYLNKG

SEQ ID NO: 158504 - protein, 7 aa, synthetic construct
QPQRNFV

SEQ ID NO: 158505 - protein, 7 aa, synthetic construct
HSHQHYS

SEQ ID NO: 158506 - protein, 7 aa, synthetic construct
LYPVAKT

SEQ ID NO: 158507 - protein, 7 aa, synthetic construct
VNRLGPV

SEQ ID NO: 158508 - protein, 7 aa, synthetic construct
DKQTKQN

SEQ ID NO: 158509 - protein, 7 aa, synthetic construct
YGPNVKL

SEQ ID NO: 158510 - protein, 7 aa, synthetic construct
VTRPHIQ

SEQ ID NO: 158511 - protein, 7 aa, synthetic construct
KSLRDTL

SEQ ID NO: 158512 - protein, 7 aa, synthetic construct
NKFQLQN

SEQ ID NO: 158513 - protein, 7 aa, synthetic construct
YHGIPQK

SEQ ID NO: 158514 - protein, 7 aa, synthetic construct
SDNTKFK

SEQ ID NO: 158515 - protein, 7 aa, synthetic construct
FHGTITR

SEQ ID NO: 158516 - protein, 7 aa, synthetic construct
IHNGRHS

SEQ ID NO: 158517 - protein, 7 aa, synthetic construct
NERMPTK

SEQ ID NO: 158518 - protein, 7 aa, synthetic construct
MQSNRER

SEQ ID NO: 158519 - protein, 7 aa, synthetic construct
TPHAANR

SEQ ID NO: 158520 - protein, 7 aa, synthetic construct
MKFPEKN

SEQ ID NO: 158521 - protein, 7 aa, synthetic construct
TSHDKRS

SEQ ID NO: 158522 - protein, 7 aa, synthetic construct
KQGANDR

SEQ ID NO: 158523 - protein, 7 aa, synthetic construct
QSFNIKA

SEQ ID NO: 158524 - protein, 7 aa, synthetic construct
NATNHTR

SEQ ID NO: 158525 - protein, 7 aa, synthetic construct
KQSNHLN

SEQ ID NO: 158526 - protein, 7 aa, synthetic construct
LAHTPNR

SEQ ID NO: 158527 - protein, 7 aa, synthetic construct
VHKSMNF

SEQ ID NO: 158528 - protein, 7 aa, synthetic construct
VRSLDKG

SEQ ID NO: 158529 - protein, 7 aa, synthetic construct
ARHTQNP

SEQ ID NO: 158530 - protein, 7 aa, synthetic construct
SQGSYKM

SEQ ID NO: 158531 - protein, 7 aa, synthetic construct
PPTSRIP

SEQ ID NO: 158532 - protein, 7 aa, synthetic construct
FGSANFK

SEQ ID NO: 158533 - protein, 7 aa, synthetic construct
NPNPRPL

SEQ ID NO: 158534 - protein, 7 aa, synthetic construct
GFNQIVM

SEQ ID NO: 158535 - protein, 7 aa, synthetic construct
RVQGTHT

SEQ ID NO: 158536 - protein, 7 aa, synthetic construct
IGHTANK

SEQ ID NO: 158537 - protein, 7 aa, synthetic construct
MLSQRPI

SEQ ID NO: 158538 - protein, 7 aa, synthetic construct
VRSASDK

SEQ ID NO: 158539 - protein, 7 aa, synthetic construct
NRKSEEL

SEQ ID NO: 158540 - protein, 7 aa, synthetic construct
ASARNDK

SEQ ID NO: 158541 - protein, 7 aa, synthetic construct
SSMMRSV

SEQ ID NO: 158542 - protein, 7 aa, synthetic construct
PEQKKPF

SEQ ID NO: 158543 - protein, 7 aa, synthetic construct
VNIRPTV

SEQ ID NO: 158544 - protein, 7 aa, synthetic construct
EETQRRF

SEQ ID NO: 158545 - protein, 7 aa, synthetic construct
VQQAVRQ

SEQ ID NO: 158546 - protein, 7 aa, synthetic construct
TVRDLPR

SEQ ID NO: 158547 - protein, 7 aa, synthetic construct
TLTDRNR

SEQ ID NO: 158548 - protein, 7 aa, synthetic construct
RQTHVTI

SEQ ID NO: 158549 - protein, 7 aa, synthetic construct
ATTYAKM

SEQ ID NO: 158550 - protein, 7 aa, synthetic construct
MSQQKMY

SEQ ID NO: 158551 - protein, 7 aa, synthetic construct
IGQAMRM

SEQ ID NO: 158552 - protein, 7 aa, synthetic construct
RANVSGH

SEQ ID NO: 158553 - protein, 7 aa, synthetic construct
ANVQSAR

SEQ ID NO: 158554 - protein, 7 aa, synthetic construct
VHLARQS

SEQ ID NO: 158555 - protein, 7 aa, synthetic construct
QRQVTPM

SEQ ID NO: 158556 - protein, 7 aa, synthetic construct
IGNHAPR

SEQ ID NO: 158557 - protein, 7 aa, synthetic construct
AAQQRVH

SEQ ID NO: 158558 - protein, 7 aa, synthetic construct
SQVQRAI

SEQ ID NO: 158559 - protein, 7 aa, synthetic construct
KPSTDYR

SEQ ID NO: 158560 - protein, 7 aa, synthetic construct
TDRFAAK

SEQ ID NO: 158561 - protein, 7 aa, synthetic construct
DTASYRM

SEQ ID NO: 158562 - protein, 7 aa, synthetic construct
MQVRNDK

SEQ ID NO: 158563 - protein, 7 aa, synthetic construct
MIRSNDK

SEQ ID NO: 158564 - protein, 7 aa, synthetic construct
HQIGKVL

SEQ ID NO: 158565 - protein, 7 aa, synthetic construct
RNSPERI

SEQ ID NO: 158566 - protein, 7 aa, synthetic construct
TVSTQRH

SEQ ID NO: 158567 - protein, 7 aa, synthetic construct
SGAMQQR

SEQ ID NO: 158568 - protein, 7 aa, synthetic construct
RGGQAEQ

SEQ ID NO: 158569 - protein, 7 aa, synthetic construct
KLERNAI

SEQ ID NO: 158570 - protein, 7 aa, synthetic construct
SRTMDNR

SEQ ID NO: 158571 - protein, 7 aa, synthetic construct
QQSVTPR

SEQ ID NO: 158572 - protein, 7 aa, synthetic construct
RGQNNTV

SEQ ID NO: 158573 - protein, 7 aa, synthetic construct
HATAMRT

SEQ ID NO: 158574 - protein, 7 aa, synthetic construct
HTGVVTR

SEQ ID NO: 158575 - protein, 7 aa, synthetic construct
GMASHNK

SEQ ID NO: 158576 - protein, 7 aa, synthetic construct
PNNAQRQ

SEQ ID NO: 158577 - protein, 7 aa, synthetic construct
TTGIHTR

SEQ ID NO: 158578 - protein, 7 aa, synthetic construct
RSHQLNP

SEQ ID NO: 158579 - protein, 7 aa, synthetic construct
RKEVMQY

SEQ ID NO: 158580 - protein, 7 aa, synthetic construct
RHQGSSF

SEQ ID NO: 158581 - protein, 7 aa, synthetic construct
EFRGVLN

SEQ ID NO: 158582 - protein, 7 aa, synthetic construct
PQQHKNS

SEQ ID NO: 158583 - protein, 7 aa, synthetic construct
KRTDVAT

SEQ ID NO: 158584 - protein, 7 aa, synthetic construct
THTTAQR

SEQ ID NO: 158585 - protein, 7 aa, synthetic construct
NGGAMHR

SEQ ID NO: 158586 - protein, 7 aa, synthetic construct
TSTHQGR

SEQ ID NO: 158587 - protein, 7 aa, synthetic construct
HNQSQKM

SEQ ID NO: 158588 - protein, 7 aa, synthetic construct
KIHDRNV

SEQ ID NO: 158589 - protein, 7 aa, synthetic construct
FKTGPLM

SEQ ID NO: 158590 - protein, 7 aa, synthetic construct
SVIPRNT

SEQ ID NO: 158591 - protein, 7 aa, synthetic construct
DSNGRPK

SEQ ID NO: 158592 - protein, 7 aa, synthetic construct
PAYGAKS

SEQ ID NO: 158593 - protein, 7 aa, synthetic construct
RMVGVSH

SEQ ID NO: 158594 - protein, 7 aa, synthetic construct
NHGSQNK

SEQ ID NO: 158595 - protein, 7 aa, synthetic construct
HSRNQGI

SEQ ID NO: 158596 - protein, 7 aa, synthetic construct
HLVSQRP

SEQ ID NO: 158597 - protein, 7 aa, synthetic construct
IPRQPIP

SEQ ID NO: 158598 - protein, 7 aa, synthetic construct
PISQGNP

SEQ ID NO: 158599 - protein, 7 aa, synthetic construct
KRQMEEI

SEQ ID NO: 158600 - protein, 7 aa, synthetic construct
IARPHAV

SEQ ID NO: 158601 - protein, 7 aa, synthetic construct
QAALRTH

SEQ ID NO: 158602 - protein, 7 aa, synthetic construct
RDAPKLI

SEQ ID NO: 158603 - protein, 7 aa, synthetic construct
RQAQAYV

SEQ ID NO: 158604 - protein, 7 aa, synthetic construct
TGKVHNF

SEQ ID NO: 158605 - protein, 7 aa, synthetic construct
TVQSWDK

SEQ ID NO: 158606 - protein, 7 aa, synthetic construct
RPAHGLV

SEQ ID NO: 158607 - protein, 7 aa, synthetic construct
HQNLQRM

SEQ ID NO: 158608 - protein, 7 aa, synthetic construct
VMHPNRP

SEQ ID NO: 158609 - protein, 7 aa, synthetic construct
QKRESEQ

SEQ ID NO: 158610 - protein, 7 aa, synthetic construct
NMHYSGN

SEQ ID NO: 158611 - protein, 7 aa, synthetic construct
RGLNMQV

SEQ ID NO: 158612 - protein, 7 aa, synthetic construct
HVVRPSA

SEQ ID NO: 158613 - protein, 7 aa, synthetic construct
RQIQSGM

SEQ ID NO: 158614 - protein, 7 aa, synthetic construct
QQQKHVI

SEQ ID NO: 158615 - protein, 7 aa, synthetic construct
SQMRDGK

SEQ ID NO: 158616 - protein, 7 aa, synthetic construct
MMNNASR

SEQ ID NO: 158617 - protein, 7 aa, synthetic construct
YGEGRQN

SEQ ID NO: 158618 - protein, 7 aa, synthetic construct
QNHYTAV

SEQ ID NO: 158619 - protein, 7 aa, synthetic construct
ASRTPQM

SEQ ID NO: 158620 - protein, 7 aa, synthetic construct
QVRVVEK

SEQ ID NO: 158621 - protein, 7 aa, synthetic construct
NQTQQKW

SEQ ID NO: 158622 - protein, 7 aa, synthetic construct
RVPPHNP

SEQ ID NO: 158623 - protein, 7 aa, synthetic construct
GHQQKSV

SEQ ID NO: 158624 - protein, 7 aa, synthetic construct
AAQYTKQ

SEQ ID NO: 158625 - protein, 7 aa, synthetic construct
EGRRFEY

SEQ ID NO: 158626 - protein, 7 aa, synthetic construct
IGADNKR

SEQ ID NO: 158627 - protein, 7 aa, synthetic construct
KTEMKYP

SEQ ID NO: 158628 - protein, 7 aa, synthetic construct
THMAGRI

SEQ ID NO: 158629 - protein, 7 aa, synthetic construct
KDATNVR

SEQ ID NO: 158630 - protein, 7 aa, synthetic construct
THQLART

SEQ ID NO: 158631 - protein, 7 aa, synthetic construct
KQDMKPH

SEQ ID NO: 158632 - protein, 7 aa, synthetic construct
KNANERY

SEQ ID NO: 158633 - protein, 7 aa, synthetic construct
QIGRAEK

SEQ ID NO: 158634 - protein, 7 aa, synthetic construct
LQGREIR

SEQ ID NO: 158635 - protein, 7 aa, synthetic construct
EKLQRVL

SEQ ID NO: 158636 - protein, 7 aa, synthetic construct
YREITKV

SEQ ID NO: 158637 - protein, 7 aa, synthetic construct
KGTQDRQ

SEQ ID NO: 158638 - protein, 7 aa, synthetic construct
EHVRSHQ

SEQ ID NO: 158639 - protein, 7 aa, synthetic construct
AQMGAHK

SEQ ID NO: 158640 - protein, 7 aa, synthetic construct
FLHPNKA

SEQ ID NO: 158641 - protein, 7 aa, synthetic construct
HPDMRKI

SEQ ID NO: 158642 - protein, 7 aa, synthetic construct
QHQPLRS

SEQ ID NO: 158643 - protein, 7 aa, synthetic construct
SSKGHQY

SEQ ID NO: 158644 - protein, 7 aa, synthetic construct
WTQGQVY

SEQ ID NO: 158645 - protein, 7 aa, synthetic construct
LVQHGSK

SEQ ID NO: 158646 - protein, 7 aa, synthetic construct
TTDQRAK

SEQ ID NO: 158647 - protein, 7 aa, synthetic construct
GQRHALT

SEQ ID NO: 158648 - protein, 7 aa, synthetic construct
ATQERLR

SEQ ID NO: 158649 - protein, 7 aa, synthetic construct
RDNIARI

SEQ ID NO: 158650 - protein, 7 aa, synthetic construct
SKAESAR

SEQ ID NO: 158651 - protein, 7 aa, synthetic construct
SGVHSGK

SEQ ID NO: 158652 - protein, 7 aa, synthetic construct
VNTPRGM

SEQ ID NO: 158653 - protein, 7 aa, synthetic construct
AYVQGAR

SEQ ID NO: 158654 - protein, 7 aa, synthetic construct
SKNPAFI

SEQ ID NO: 158655 - protein, 7 aa, synthetic construct
VVGGSAR

SEQ ID NO: 158656 - protein, 7 aa, synthetic construct
QQVTMRM

SEQ ID NO: 158657 - protein, 7 aa, synthetic construct
AVPTRFN

SEQ ID NO: 158658 - protein, 7 aa, synthetic construct
DARMAPK

SEQ ID NO: 158659 - protein, 7 aa, synthetic construct
QSAHNSR

SEQ ID NO: 158660 - protein, 7 aa, synthetic construct
AELKRPI

SEQ ID NO: 158661 - protein, 7 aa, synthetic construct
EGKVIKL

SEQ ID NO: 158662 - protein, 7 aa, synthetic construct
AQANMQR

SEQ ID NO: 158663 - protein, 7 aa, synthetic construct
GTIRPMV

SEQ ID NO: 158664 - protein, 7 aa, synthetic construct
AAYGYGV

SEQ ID NO: 158665 - protein, 7 aa, synthetic construct
GRVVQAV

SEQ ID NO: 158666 - protein, 7 aa, synthetic construct
QHAVVSK

SEQ ID NO: 158667 - protein, 7 aa, synthetic construct
NSTTHQK

SEQ ID NO: 158668 - protein, 7 aa, synthetic construct
TQAHGVR

SEQ ID NO: 158669 - protein, 7 aa, synthetic construct
TVVRPAM

SEQ ID NO: 158670 - protein, 7 aa, synthetic construct
MSQHAQK

SEQ ID NO: 158671 - protein, 7 aa, synthetic construct
VDVSGRK

SEQ ID NO: 158672 - protein, 7 aa, synthetic construct
TNQAYRT

SEQ ID NO: 158673 - protein, 7 aa, synthetic construct
MTHTKQY

SEQ ID NO: 158674 - protein, 7 aa, synthetic construct
QSMGVAR

SEQ ID NO: 158675 - protein, 7 aa, synthetic construct
KNITKEV

SEQ ID NO: 158676 - protein, 7 aa, synthetic construct
VSASQYR

SEQ ID NO: 158677 - protein, 7 aa, synthetic construct
RMVNGSH

SEQ ID NO: 158678 - protein, 7 aa, synthetic construct
SMHGIKQ

SEQ ID NO: 158679 - protein, 7 aa, synthetic construct
RITTTTH

SEQ ID NO: 158680 - protein, 7 aa, synthetic construct
HRTLPNV

SEQ ID NO: 158681 - protein, 7 aa, synthetic construct
KNHSPMQ

SEQ ID NO: 158682 - protein, 7 aa, synthetic construct
AAYNSTK

SEQ ID NO: 158683 - protein, 7 aa, synthetic construct
KSKDNTW

SEQ ID NO: 158684 - protein, 7 aa, synthetic construct
TLMQHHK

SEQ ID NO: 158685 - protein, 7 aa, synthetic construct
VKSTPMH

SEQ ID NO: 158686 - protein, 7 aa, synthetic construct
KSQTNQW

SEQ ID NO: 158687 - protein, 7 aa, synthetic construct
GKLPPAF

SEQ ID NO: 158688 - protein, 7 aa, synthetic construct
GTHNYAK

SEQ ID NO: 158689 - protein, 7 aa, synthetic construct
WKAPQVM

SEQ ID NO: 158690 - protein, 7 aa, synthetic construct
MQLRHAT

SEQ ID NO: 158691 - protein, 7 aa, synthetic construct
KTTQWQP

SEQ ID NO: 158692 - protein, 7 aa, synthetic construct
HGLPKPM

SEQ ID NO: 158693 - protein, 7 aa, synthetic construct
VMGPKPF

SEQ ID NO: 158694 - protein, 7 aa, synthetic construct
SIGQSYR

SEQ ID NO: 158695 - protein, 7 aa, synthetic construct
KTQVPGF

SEQ ID NO: 158696 - protein, 7 aa, synthetic construct
FQGNLRM

SEQ ID NO: 158697 - protein, 7 aa, synthetic construct
DKAFITK

SEQ ID NO: 158698 - protein, 7 aa, synthetic construct
AKLDSRY

SEQ ID NO: 158699 - protein, 7 aa, synthetic construct
TQVMQKF

SEQ ID NO: 158700 - protein, 7 aa, synthetic construct
FPSNVLR

SEQ ID NO: 158701 - protein, 7 aa, synthetic construct
ATRVSNF

SEQ ID NO: 158702 - protein, 7 aa, synthetic construct
PNVSQRY

SEQ ID NO: 158703 - protein, 7 aa, synthetic construct
TMTVHSR

SEQ ID NO: 158704 - protein, 7 aa, synthetic construct
TREMTVR

SEQ ID NO: 158705 - protein, 7 aa, synthetic construct
RLPRDVQ

SEQ ID NO: 158706 - protein, 7 aa, synthetic construct
GYQRTVM

SEQ ID NO: 158707 - protein, 7 aa, synthetic construct
KNIQVSY

SEQ ID NO: 158708 - protein, 7 aa, synthetic construct
LNGSWIK

SEQ ID NO: 158709 - protein, 7 aa, synthetic construct
PPRMPRD

SEQ ID NO: 158710 - protein, 7 aa, synthetic construct
SAGVYTR

SEQ ID NO: 158711 - protein, 7 aa, synthetic construct
GTSVGLR

SEQ ID NO: 158712 - protein, 7 aa, synthetic construct
NIGNKFN

SEQ ID NO: 158713 - protein, 7 aa, synthetic construct
RSDMPQK

SEQ ID NO: 158714 - protein, 7 aa, synthetic construct
WGGQILK

SEQ ID NO: 158715 - protein, 7 aa, synthetic construct
AISVSTK

SEQ ID NO: 158716 - protein, 7 aa, synthetic construct
KYPHPTQ

SEQ ID NO: 158717 - protein, 7 aa, synthetic construct
QVHPGVR

SEQ ID NO: 158718 - protein, 7 aa, synthetic construct
AGQVGFR

SEQ ID NO: 158719 - protein, 7 aa, synthetic construct
KRTEQIT

SEQ ID NO: 158720 - protein, 7 aa, synthetic construct
QSRPIAL

SEQ ID NO: 158721 - protein, 7 aa, synthetic construct
KYIQPGP

SEQ ID NO: 158722 - protein, 7 aa, synthetic construct
HLGNIRQ

SEQ ID NO: 158723 - protein, 7 aa, synthetic construct
FKPVINQ

SEQ ID NO: 158724 - protein, 7 aa, synthetic construct
KHMQPAI

SEQ ID NO: 158725 - protein, 7 aa, synthetic construct
GLTKYIS

SEQ ID NO: 158726 - protein, 7 aa, synthetic construct
QKVVEVR

SEQ ID NO: 158727 - protein, 7 aa, synthetic construct
IRERHTV

SEQ ID NO: 158728 - protein, 7 aa, synthetic construct
HVVPKLA

SEQ ID NO: 158729 - protein, 7 aa, synthetic construct
TVQPRQL

SEQ ID NO: 158730 - protein, 7 aa, synthetic construct
VVGPTVR

SEQ ID NO: 158731 - protein, 7 aa, synthetic construct
LDKQFIK

SEQ ID NO: 158732 - protein, 7 aa, synthetic construct
QVMKPYG

SEQ ID NO: 158733 - protein, 7 aa, synthetic construct
QPPQTYR

SEQ ID NO: 158734 - protein, 7 aa, synthetic construct
PKIRPSD

SEQ ID NO: 158735 - protein, 7 aa, synthetic construct
RAHERTT

SEQ ID NO: 158736 - protein, 7 aa, synthetic construct
VGQSFLK

SEQ ID NO: 158737 - protein, 7 aa, synthetic construct
DPRVVAR

SEQ ID NO: 158738 - protein, 7 aa, synthetic construct
DKGKVFT

SEQ ID NO: 158739 - protein, 7 aa, synthetic construct
IPAASLR

SEQ ID NO: 158740 - protein, 7 aa, synthetic construct
TNTGNFR

SEQ ID NO: 158741 - protein, 7 aa, synthetic construct
HIIQKER

SEQ ID NO: 158742 - protein, 7 aa, synthetic construct
AKDKTWT

SEQ ID NO: 158743 - protein, 7 aa, synthetic construct
KMAFNEM

SEQ ID NO: 158744 - protein, 7 aa, synthetic construct
PPHATYK

SEQ ID NO: 158745 - protein, 7 aa, synthetic construct
ANAHKML

SEQ ID NO: 158746 - protein, 7 aa, synthetic construct
PVAVREK

SEQ ID NO: 158747 - protein, 7 aa, synthetic construct
NNHPTMR

SEQ ID NO: 158748 - protein, 7 aa, synthetic construct
LSGNKYL

SEQ ID NO: 158749 - protein, 7 aa, synthetic construct
PNQMRGY

SEQ ID NO: 158750 - protein, 7 aa, synthetic construct
TVNMTKW

SEQ ID NO: 158751 - protein, 7 aa, synthetic construct
PKSTPGW

SEQ ID NO: 158752 - protein, 7 aa, synthetic construct
MRLGERS

SEQ ID NO: 158753 - protein, 7 aa, synthetic construct
PGKHPAY

SEQ ID NO: 158754 - protein, 7 aa, synthetic construct
QSKWNEH

SEQ ID NO: 158755 - protein, 7 aa, synthetic construct
STDRNVR

SEQ ID NO: 158756 - protein, 7 aa, synthetic construct
SNAPRVM

SEQ ID NO: 158757 - protein, 7 aa, synthetic construct
AHQVGVR

SEQ ID NO: 158758 - protein, 7 aa, synthetic construct
STQGKNW

SEQ ID NO: 158759 - protein, 7 aa, synthetic construct
HGKHMIT

SEQ ID NO: 158760 - protein, 7 aa, synthetic construct
GTYPTIM

SEQ ID NO: 158761 - protein, 7 aa, synthetic construct
PNAHNKF

SEQ ID NO: 158762 - protein, 7 aa, synthetic construct
WPNNVPR

SEQ ID NO: 158763 - protein, 7 aa, synthetic construct
TSGHIRV

SEQ ID NO: 158764 - protein, 7 aa, synthetic construct
SKFNIPI

SEQ ID NO: 158765 - protein, 7 aa, synthetic construct
TSPAAYR

SEQ ID NO: 158766 - protein, 7 aa, synthetic construct
GPHMEGK

SEQ ID NO: 158767 - protein, 7 aa, synthetic construct
HQGIPSR

SEQ ID NO: 158768 - protein, 7 aa, synthetic construct
NNNRLML

SEQ ID NO: 158769 - protein, 7 aa, synthetic construct
NIMQVRA

SEQ ID NO: 158770 - protein, 7 aa, synthetic construct
THGVRPT

SEQ ID NO: 158771 - protein, 7 aa, synthetic construct
KAVQSMF

SEQ ID NO: 158772 - protein, 7 aa, synthetic construct
LTPQQYR

SEQ ID NO: 158773 - protein, 7 aa, synthetic construct
KSMDKMF

SEQ ID NO: 158774 - protein, 7 aa, synthetic construct
VQHTVVR

SEQ ID NO: 158775 - protein, 7 aa, synthetic construct
SHMAPRT

SEQ ID NO: 158776 - protein, 7 aa, synthetic construct
RVLLDSK

SEQ ID NO: 158777 - protein, 7 aa, synthetic construct
PNTPVRF

SEQ ID NO: 158778 - protein, 7 aa, synthetic construct
HSSPISR

SEQ ID NO: 158779 - protein, 7 aa, synthetic construct
HVTQMGR

SEQ ID NO: 158780 - protein, 7 aa, synthetic construct
HPQHIRG

SEQ ID NO: 158781 - protein, 7 aa, synthetic construct
QRINHSL

SEQ ID NO: 158782 - protein, 7 aa, synthetic construct
GQHAKFF

SEQ ID NO: 158783 - protein, 7 aa, synthetic construct
SQSMRLV

SEQ ID NO: 158784 - protein, 7 aa, synthetic construct
TAPNYTR

SEQ ID NO: 158785 - protein, 7 aa, synthetic construct
DATKIIK

SEQ ID NO: 158786 - protein, 7 aa, synthetic construct
SKFQVAI

SEQ ID NO: 158787 - protein, 7 aa, synthetic construct
QRQIPPH

SEQ ID NO: 158788 - protein, 7 aa, synthetic construct
AHPGPRM

SEQ ID NO: 158789 - protein, 7 aa, synthetic construct
RHVAQHV

SEQ ID NO: 158790 - protein, 7 aa, synthetic construct
GDKIKVF

SEQ ID NO: 158791 - protein, 7 aa, synthetic construct
LDPKKIF

SEQ ID NO: 158792 - protein, 7 aa, synthetic construct
PYNSGSR

SEQ ID NO: 158793 - protein, 7 aa, synthetic construct
KDHKIFP

SEQ ID NO: 158794 - protein, 7 aa, synthetic construct
RMAPMSQ

SEQ ID NO: 158795 - protein, 7 aa, synthetic construct
DKPRSVT

SEQ ID NO: 158796 - protein, 7 aa, synthetic construct
FKTAALM

SEQ ID NO: 158797 - protein, 7 aa, synthetic construct
YKLNIAS

SEQ ID NO: 158798 - protein, 7 aa, synthetic construct
NKQPIYQ

SEQ ID NO: 158799 - protein, 7 aa, synthetic construct
PDKNKYY

SEQ ID NO: 158800 - protein, 7 aa, synthetic construct
TNGHQFR

SEQ ID NO: 158801 - protein, 7 aa, synthetic construct
HINTSSR

SEQ ID NO: 158802 - protein, 7 aa, synthetic construct
LMDKFNR

SEQ ID NO: 158803 - protein, 7 aa, synthetic construct
QGYAQSK

SEQ ID NO: 158804 - protein, 7 aa, synthetic construct
MMSHTHK

SEQ ID NO: 158805 - protein, 7 aa, synthetic construct
SAHNKFT

SEQ ID NO: 158806 - protein, 7 aa, synthetic construct
PAHGALR

SEQ ID NO: 158807 - protein, 7 aa, synthetic construct
YANMAIK

SEQ ID NO: 158808 - protein, 7 aa, synthetic construct
KHHPPAP

SEQ ID NO: 158809 - protein, 7 aa, synthetic construct
KIPAPMM

SEQ ID NO: 158810 - protein, 7 aa, synthetic construct
NTLTPRY

SEQ ID NO: 158811 - protein, 7 aa, synthetic construct
HGTLQVR

SEQ ID NO: 158812 - protein, 7 aa, synthetic construct
QHKSIVT

SEQ ID NO: 158813 - protein, 7 aa, synthetic construct
NFEKRMV

SEQ ID NO: 158814 - protein, 7 aa, synthetic construct
PILRTKE

SEQ ID NO: 158815 - protein, 7 aa, synthetic construct
IAMHPTK

SEQ ID NO: 158816 - protein, 7 aa, synthetic construct
SIRDAFR

SEQ ID NO: 158817 - protein, 7 aa, synthetic construct
PLAAKAY

SEQ ID NO: 158818 - protein, 7 aa, synthetic construct
KERLTAF

SEQ ID NO: 158819 - protein, 7 aa, synthetic construct
TKITHTY

SEQ ID NO: 158820 - protein, 7 aa, synthetic construct
PHNQMQR

SEQ ID NO: 158821 - protein, 7 aa, synthetic construct
HGVMRTV

SEQ ID NO: 158822 - protein, 7 aa, synthetic construct
ITPKHVT

SEQ ID NO: 158823 - protein, 7 aa, synthetic construct
QKPIQLM

SEQ ID NO: 158824 - protein, 7 aa, synthetic construct
KPQLEKW

SEQ ID NO: 158825 - protein, 7 aa, synthetic construct
RDGNVMW

SEQ ID NO: 158826 - protein, 7 aa, synthetic construct
SAPVHIR

SEQ ID NO: 158827 - protein, 7 aa, synthetic construct
NWKDAKY

SEQ ID NO: 158828 - protein, 7 aa, synthetic construct
SKFPHTV

SEQ ID NO: 158829 - protein, 7 aa, synthetic construct
KRDPIPI

SEQ ID NO: 158830 - protein, 7 aa, synthetic construct
QGAFKTL

SEQ ID NO: 158831 - protein, 7 aa, synthetic construct
ASSQNKW

SEQ ID NO: 158832 - protein, 7 aa, synthetic construct
MMHGHTK

SEQ ID NO: 158833 - protein, 7 aa, synthetic construct
PNQMRHV

SEQ ID NO: 158834 - protein, 7 aa, synthetic construct
ITYAAGK

SEQ ID NO: 158835 - protein, 7 aa, synthetic construct
FAMIRAD

SEQ ID NO: 158836 - protein, 7 aa, synthetic construct
LKLHGSY

SEQ ID NO: 158837 - protein, 7 aa, synthetic construct
AMSTRGF

SEQ ID NO: 158838 - protein, 7 aa, synthetic construct
AKTGYAM

SEQ ID NO: 158839 - protein, 7 aa, synthetic construct
FSAGSLR

SEQ ID NO: 158840 - protein, 7 aa, synthetic construct
YPTGHLK

SEQ ID NO: 158841 - protein, 7 aa, synthetic construct
APIQMAK

SEQ ID NO: 158842 - protein, 7 aa, synthetic construct
HILGARQ

SEQ ID NO: 158843 - protein, 7 aa, synthetic construct
QPRPGIY

SEQ ID NO: 158844 - protein, 7 aa, synthetic construct
PRSTAGF

SEQ ID NO: 158845 - protein, 7 aa, synthetic construct
LSHNKYI

SEQ ID NO: 158846 - protein, 7 aa, synthetic construct
AHYPKTI

SEQ ID NO: 158847 - protein, 7 aa, synthetic construct
KQMVAPL

SEQ ID NO: 158848 - protein, 7 aa, synthetic construct
PYTQVKQ

SEQ ID NO: 158849 - protein, 7 aa, synthetic construct
HPKIPNV

SEQ ID NO: 158850 - protein, 7 aa, synthetic construct
KQAKEFF

SEQ ID NO: 158851 - protein, 7 aa, synthetic construct
QIHGYQK

SEQ ID NO: 158852 - protein, 7 aa, synthetic construct
GRETKIL

SEQ ID NO: 158853 - protein, 7 aa, synthetic construct
PHSVGAK

SEQ ID NO: 158854 - protein, 7 aa, synthetic construct
KSLPVPV

SEQ ID NO: 158855 - protein, 7 aa, synthetic construct
GAPKSLF

SEQ ID NO: 158856 - protein, 7 aa, synthetic construct
GQHHKIV

SEQ ID NO: 158857 - protein, 7 aa, synthetic construct
FPDKYKM

SEQ ID NO: 158858 - protein, 7 aa, synthetic construct
PNHAGKY

SEQ ID NO: 158859 - protein, 7 aa, synthetic construct
KHPTPVL

SEQ ID NO: 158860 - protein, 7 aa, synthetic construct
KSNAGIW

SEQ ID NO: 158861 - protein, 7 aa, synthetic construct
AHNGVYK

SEQ ID NO: 158862 - protein, 7 aa, synthetic construct
WYKESKH

SEQ ID NO: 158863 - protein, 7 aa, synthetic construct
GRVTMEK

SEQ ID NO: 158864 - protein, 7 aa, synthetic construct
KTQEKNW

SEQ ID NO: 158865 - protein, 7 aa, synthetic construct
FIHGSLK

SEQ ID NO: 158866 - protein, 7 aa, synthetic construct
MREKALL

SEQ ID NO: 158867 - protein, 7 aa, synthetic construct
GMSKIIV

SEQ ID NO: 158868 - protein, 7 aa, synthetic construct
LYAKSQY

SEQ ID NO: 158869 - protein, 7 aa, synthetic construct
QERAQWA

SEQ ID NO: 158870 - protein, 7 aa, synthetic construct
NVNSLRI

SEQ ID NO: 158871 - protein, 7 aa, synthetic construct
KGQPNTW

SEQ ID NO: 158872 - protein, 7 aa, synthetic construct
SAEKRLL

SEQ ID NO: 158873 - protein, 7 aa, synthetic construct
VHAMTHK

SEQ ID NO: 158874 - protein, 7 aa, synthetic construct
VKHPNLM

SEQ ID NO: 158875 - protein, 7 aa, synthetic construct
RQIVHAP

SEQ ID NO: 158876 - protein, 7 aa, synthetic construct
DSKRIAL

SEQ ID NO: 158877 - protein, 7 aa, synthetic construct
KMMPTAL

SEQ ID NO: 158878 - protein, 7 aa, synthetic construct
PRMGERY

SEQ ID NO: 158879 - protein, 7 aa, synthetic construct
NQKEIWV

SEQ ID NO: 158880 - protein, 7 aa, synthetic construct
KALPPTV

SEQ ID NO: 158881 - protein, 7 aa, synthetic construct
KIKDHFS

SEQ ID NO: 158882 - protein, 7 aa, synthetic construct
HMAQATR

SEQ ID NO: 158883 - protein, 7 aa, synthetic construct
PVDKRFA

SEQ ID NO: 158884 - protein, 7 aa, synthetic construct
MQKSFGM

SEQ ID NO: 158885 - protein, 7 aa, synthetic construct
TNTPVKW

SEQ ID NO: 158886 - protein, 7 aa, synthetic construct
YLNNNQR

SEQ ID NO: 158887 - protein, 7 aa, synthetic construct
MYVKDKL

SEQ ID NO: 158888 - protein, 7 aa, synthetic construct
SAKPMII

SEQ ID NO: 158889 - protein, 7 aa, synthetic construct
GHSPFPK

SEQ ID NO: 158890 - protein, 7 aa, synthetic construct
GGHINKL

SEQ ID NO: 158891 - protein, 7 aa, synthetic construct
RDNVSYK

SEQ ID NO: 158892 - protein, 7 aa, synthetic construct
LQQQGFR

SEQ ID NO: 158893 - protein, 7 aa, synthetic construct
PWKSEKA

SEQ ID NO: 158894 - protein, 7 aa, synthetic construct
MFHNHPT

SEQ ID NO: 158895 - protein, 7 aa, synthetic construct
PRIPARD

SEQ ID NO: 158896 - protein, 7 aa, synthetic construct
QSSRVSQ

SEQ ID NO: 158897 - protein, 7 aa, synthetic construct
PVPKQYL

SEQ ID NO: 158898 - protein, 7 aa, synthetic construct
KVPQQFV

SEQ ID NO: 158899 - protein, 7 aa, synthetic construct
SRMEVKY

SEQ ID NO: 158900 - protein, 7 aa, synthetic construct
QNQYAIK

SEQ ID NO: 158901 - protein, 7 aa, synthetic construct
YPSAYTK

SEQ ID NO: 158902 - protein, 7 aa, synthetic construct
LGNHTYK

SEQ ID NO: 158903 - protein, 7 aa, synthetic construct
RSVPHQS

SEQ ID NO: 158904 - protein, 7 aa, synthetic construct
KGHSLGL

SEQ ID NO: 158905 - protein, 7 aa, synthetic construct
KVPTIQL

SEQ ID NO: 158906 - protein, 7 aa, synthetic construct
VIHDRFK

SEQ ID NO: 158907 - protein, 7 aa, synthetic construct
LVHSNFK

SEQ ID NO: 158908 - protein, 7 aa, synthetic construct
RSQSPFQ

SEQ ID NO: 158909 - protein, 7 aa, synthetic construct
GEKKFSF

SEQ ID NO: 158910 - protein, 7 aa, synthetic construct
KDSHIVR

SEQ ID NO: 158911 - protein, 7 aa, synthetic construct
ATIPRAQ

SEQ ID NO: 158912 - protein, 7 aa, synthetic construct
TTAYKHM

SEQ ID NO: 158913 - protein, 7 aa, synthetic construct
GKTTYPL

SEQ ID NO: 158914 - protein, 7 aa, synthetic construct
HIQIKQQ

SEQ ID NO: 158915 - protein, 7 aa, synthetic construct
NAQKHNF

SEQ ID NO: 158916 - protein, 7 aa, synthetic construct
NAHATYK

SEQ ID NO: 158917 - protein, 7 aa, synthetic construct
AGSPKIY

SEQ ID NO: 158918 - protein, 7 aa, synthetic construct
SMRETIK

SEQ ID NO: 158919 - protein, 7 aa, synthetic construct
THLHIKQ

SEQ ID NO: 158920 - protein, 7 aa, synthetic construct
PRLDQAR

SEQ ID NO: 158921 - protein, 7 aa, synthetic construct
SYMGSLK

SEQ ID NO: 158922 - protein, 7 aa, synthetic construct
SGKTPTW

SEQ ID NO: 158923 - protein, 7 aa, synthetic construct
NSGRIGY

SEQ ID NO: 158924 - protein, 7 aa, synthetic construct
TNVRMHM

SEQ ID NO: 158925 - protein, 7 aa, synthetic construct
VGPQMMR

SEQ ID NO: 158926 - protein, 7 aa, synthetic construct
PKSTQPF

SEQ ID NO: 158927 - protein, 7 aa, synthetic construct
KQQMASF

SEQ ID NO: 158928 - protein, 7 aa, synthetic construct
YPTKTAF

SEQ ID NO: 158929 - protein, 7 aa, synthetic construct
VNVYPSK

SEQ ID NO: 158930 - protein, 7 aa, synthetic construct
SRTSELR

SEQ ID NO: 158931 - protein, 7 aa, synthetic construct
PARGESR

SEQ ID NO: 158932 - protein, 7 aa, synthetic construct
QSHVNPK

SEQ ID NO: 158933 - protein, 7 aa, synthetic construct
AAIAKHQ

SEQ ID NO: 158934 - protein, 7 aa, synthetic construct
SKDRMHF

SEQ ID NO: 158935 - protein, 7 aa, synthetic construct
LSMHSNK

SEQ ID NO: 158936 - protein, 7 aa, synthetic construct
IHGAGQK

SEQ ID NO: 158937 - protein, 7 aa, synthetic construct
GQFRITT

SEQ ID NO: 158938 - protein, 7 aa, synthetic construct
RAQAMVM

SEQ ID NO: 158939 - protein, 7 aa, synthetic construct
QMEKWQS

SEQ ID NO: 158940 - protein, 7 aa, synthetic construct
KMAHDRS

SEQ ID NO: 158941 - protein, 7 aa, synthetic construct
IMQRGPL

SEQ ID NO: 158942 - protein, 7 aa, synthetic construct
SAQKVVY

SEQ ID NO: 158943 - protein, 7 aa, synthetic construct
PTSHMYK

SEQ ID NO: 158944 - protein, 7 aa, synthetic construct
LPAVRNI

SEQ ID NO: 158945 - protein, 7 aa, synthetic construct
KTDRSFM

SEQ ID NO: 158946 - protein, 7 aa, synthetic construct
QAHAPKY

SEQ ID NO: 158947 - protein, 7 aa, synthetic construct
SQQSHVR

SEQ ID NO: 158948 - protein, 7 aa, synthetic construct
GVPDRYK

SEQ ID NO: 158949 - protein, 7 aa, synthetic construct
GSNKSHF

SEQ ID NO: 158950 - protein, 7 aa, synthetic construct
KMANAMF

SEQ ID NO: 158951 - protein, 7 aa, synthetic construct
QHKEVKA

SEQ ID NO: 158952 - protein, 7 aa, synthetic construct
KAVSHTF

SEQ ID NO: 158953 - protein, 7 aa, synthetic construct
EKTLARM

SEQ ID NO: 158954 - protein, 7 aa, synthetic construct
GDTKFTK

SEQ ID NO: 158955 - protein, 7 aa, synthetic construct
KPIQHDR

SEQ ID NO: 158956 - protein, 7 aa, synthetic construct
AMHQIPK

SEQ ID NO: 158957 - protein, 7 aa, synthetic construct
YLSRQHV

SEQ ID NO: 158958 - protein, 7 aa, synthetic construct
QQQTARY

SEQ ID NO: 158959 - protein, 7 aa, synthetic construct
YLSGHNK

SEQ ID NO: 158960 - protein, 7 aa, synthetic construct
GVAHFKM

SEQ ID NO: 158961 - protein, 7 aa, synthetic construct
THYQGTK

SEQ ID NO: 158962 - protein, 7 aa, synthetic construct
GTIGMGR

SEQ ID NO: 158963 - protein, 7 aa, synthetic construct
MRIDGMR

SEQ ID NO: 158964 - protein, 7 aa, synthetic construct
PIQKGFM

SEQ ID NO: 158965 - protein, 7 aa, synthetic construct
ILAVTRQ

SEQ ID NO: 158966 - protein, 7 aa, synthetic construct
KVMNHLA

SEQ ID NO: 158967 - protein, 7 aa, synthetic construct
QDRLMKV

SEQ ID NO: 158968 - protein, 7 aa, synthetic construct
APGQWDK

SEQ ID NO: 158969 - protein, 7 aa, synthetic construct
AAMPRQI

SEQ ID NO: 158970 - protein, 7 aa, synthetic construct
SPREIMR

SEQ ID NO: 158971 - protein, 7 aa, synthetic construct
FNSTVMR

SEQ ID NO: 158972 - protein, 7 aa, synthetic construct
KAFQGIS

SEQ ID NO: 158973 - protein, 7 aa, synthetic construct
HLNRLNV

SEQ ID NO: 158974 - protein, 7 aa, synthetic construct
KVSPHMT

SEQ ID NO: 158975 - protein, 7 aa, synthetic construct
HQAKMAI

SEQ ID NO: 158976 - protein, 7 aa, synthetic construct
QKHPILS

SEQ ID NO: 158977 - protein, 7 aa, synthetic construct
HPKAMTF

SEQ ID NO: 158978 - protein, 7 aa, synthetic construct
KHLVSNQ

SEQ ID NO: 158979 - protein, 7 aa, synthetic construct
KDKYHSI

SEQ ID NO: 158980 - protein, 7 aa, synthetic construct
LIAKVPT

SEQ ID NO: 158981 - protein, 7 aa, synthetic construct
VPKPIYQ

SEQ ID NO: 158982 - protein, 7 aa, synthetic construct
DKPTQLR

SEQ ID NO: 158983 - protein, 7 aa, synthetic construct
PYMQNKS

SEQ ID NO: 158984 - protein, 7 aa, synthetic construct
RNIPQVP

SEQ ID NO: 158985 - protein, 7 aa, synthetic construct
IQTMRNV

SEQ ID NO: 158986 - protein, 7 aa, synthetic construct
VLSREVR

SEQ ID NO: 158987 - protein, 7 aa, synthetic construct
YPKAMAI

SEQ ID NO: 158988 - protein, 7 aa, synthetic construct
LYSGSPK

SEQ ID NO: 158989 - protein, 7 aa, synthetic construct
WNSHMGK

SEQ ID NO: 158990 - protein, 7 aa, synthetic construct
SVGHMKL

SEQ ID NO: 158991 - protein, 7 aa, synthetic construct
LVRDRLH

SEQ ID NO: 158992 - protein, 7 aa, synthetic construct
HQISLKQ

SEQ ID NO: 158993 - protein, 7 aa, synthetic construct
QKVAPFV

SEQ ID NO: 158994 - protein, 7 aa, synthetic construct
IPHMPKM

SEQ ID NO: 158995 - protein, 7 aa, synthetic construct
KPPPSYS

SEQ ID NO: 158996 - protein, 7 aa, synthetic construct
KLHVKTE

SEQ ID NO: 158997 - protein, 7 aa, synthetic construct
QGMGQHK

SEQ ID NO: 158998 - protein, 7 aa, synthetic construct
TLPHRSL

SEQ ID NO: 158999 - protein, 7 aa, synthetic construct
KAQQIYS

SEQ ID NO: 159000 - protein, 7 aa, synthetic construct
EKNQIPR

SEQ ID NO: 159001 - protein, 7 aa, synthetic construct
YVASDKK

SEQ ID NO: 159002 - protein, 7 aa, synthetic construct
QGTKPFP

SEQ ID NO: 159003 - protein, 7 aa, synthetic construct
KLQREPI

SEQ ID NO: 159004 - protein, 7 aa, synthetic construct
DRVAVSK

SEQ ID NO: 159005 - protein, 7 aa, synthetic construct
GTSFKVM

SEQ ID NO: 159006 - protein, 7 aa, synthetic construct
KSHTTAH

SEQ ID NO: 159007 - protein, 7 aa, synthetic construct
KFNPNPM

SEQ ID NO: 159008 - protein, 7 aa, synthetic construct
RPRDTMQ

SEQ ID NO: 159009 - protein, 7 aa, synthetic construct
KSLQHGF

SEQ ID NO: 159010 - protein, 7 aa, synthetic construct
PAQYNPK

SEQ ID NO: 159011 - protein, 7 aa, synthetic construct
HQHYSTM

SEQ ID NO: 159012 - protein, 7 aa, synthetic construct
YLMKQGP

SEQ ID NO: 159013 - protein, 7 aa, synthetic construct
AFKQHGL

SEQ ID NO: 159014 - protein, 7 aa, synthetic construct
KLETRLM

SEQ ID NO: 159015 - protein, 7 aa, synthetic construct
LNKPIVY

SEQ ID NO: 159016 - protein, 7 aa, synthetic construct
KREQVYT

SEQ ID NO: 159017 - protein, 7 aa, synthetic construct
QSQMYNK

SEQ ID NO: 159018 - protein, 7 aa, synthetic construct
TEKFSAK

SEQ ID NO: 159019 - protein, 7 aa, synthetic construct
QALGHAK

SEQ ID NO: 159020 - protein, 7 aa, synthetic construct
KMYKDNT

SEQ ID NO: 159021 - protein, 7 aa, synthetic construct
KEFIGSI

SEQ ID NO: 159022 - protein, 7 aa, synthetic construct
PRQVSVM

SEQ ID NO: 159023 - protein, 7 aa, synthetic construct
RQQHQSM

SEQ ID NO: 159024 - protein, 7 aa, synthetic construct
PKAPHGY

SEQ ID NO: 159025 - protein, 7 aa, synthetic construct
KFDHKMI

SEQ ID NO: 159026 - protein, 7 aa, synthetic construct
VYGEKQK

SEQ ID NO: 159027 - protein, 7 aa, synthetic construct
SREKNFM

SEQ ID NO: 159028 - protein, 7 aa, synthetic construct
GGWSEPK

SEQ ID NO: 159029 - protein, 7 aa, synthetic construct
HLPQNQR

SEQ ID NO: 159030 - protein, 7 aa, synthetic construct
VVQKHTY

SEQ ID NO: 159031 - protein, 7 aa, synthetic construct
PKTYAPQ

SEQ ID NO: 159032 - protein, 7 aa, synthetic construct
RPPMNTY

SEQ ID NO: 159033 - protein, 7 aa, synthetic construct
QGIQAQK

SEQ ID NO: 159034 - protein, 7 aa, synthetic construct
RVANIHT

SEQ ID NO: 159035 - protein, 7 aa, synthetic construct
SRQPNYI

SEQ ID NO: 159036 - protein, 7 aa, synthetic construct
STSQNRY

SEQ ID NO: 159037 - protein, 7 aa, synthetic construct
PVKPGYY

SEQ ID NO: 159038 - protein, 7 aa, synthetic construct
NLADRYK

SEQ ID NO: 159039 - protein, 7 aa, synthetic construct
KVNYTSI

SEQ ID NO: 159040 - protein, 7 aa, synthetic construct
IHGTMRH

SEQ ID NO: 159041 - protein, 7 aa, synthetic construct
QMTMQHK

SEQ ID NO: 159042 - protein, 7 aa, synthetic construct
NKYKEFV

SEQ ID NO: 159043 - protein, 7 aa, synthetic construct
MVMKERI

SEQ ID NO: 159044 - protein, 7 aa, synthetic construct
GKYSQEK

SEQ ID NO: 159045 - protein, 7 aa, synthetic construct
QAIHKGF

SEQ ID NO: 159046 - protein, 7 aa, synthetic construct
PRSIPGV

SEQ ID NO: 159047 - protein, 7 aa, synthetic construct
NYREKEF

SEQ ID NO: 159048 - protein, 7 aa, synthetic construct
KGTIQEW

SEQ ID NO: 159049 - protein, 7 aa, synthetic construct
KMLHPTS

SEQ ID NO: 159050 - protein, 7 aa, synthetic construct
QPMQGPR

SEQ ID NO: 159051 - protein, 7 aa, synthetic construct
LAASPHR

SEQ ID NO: 159052 - protein, 7 aa, synthetic construct
RDAATYK

SEQ ID NO: 159053 - protein, 7 aa, synthetic construct
YIGTNHR

SEQ ID NO: 159054 - protein, 7 aa, synthetic construct
LPMTTQR

SEQ ID NO: 159055 - protein, 7 aa, synthetic construct
AVMVKRD

SEQ ID NO: 159056 - protein, 7 aa, synthetic construct
GSINGPR

SEQ ID NO: 159057 - protein, 7 aa, synthetic construct
MTGYVPK

SEQ ID NO: 159058 - protein, 7 aa, synthetic construct
IRNPVMT

SEQ ID NO: 159059 - protein, 7 aa, synthetic construct
PEKRMVT

SEQ ID NO: 159060 - protein, 7 aa, synthetic construct
KSNIDHK

SEQ ID NO: 159061 - protein, 7 aa, synthetic construct
TQREAKW

SEQ ID NO: 159062 - protein, 7 aa, synthetic construct
THDSKLK

SEQ ID NO: 159063 - protein, 7 aa, synthetic construct
SVSMKSH

SEQ ID NO: 159064 - protein, 7 aa, synthetic construct
PTMTRDK

SEQ ID NO: 159065 - protein, 7 aa, synthetic construct
LSYSTSV

SEQ ID NO: 159066 - protein, 7 aa, synthetic construct
PAEARKI

SEQ ID NO: 159067 - protein, 7 aa, synthetic construct
SKQGNFF

SEQ ID NO: 159068 - protein, 7 aa, synthetic construct
RKDVAFN

SEQ ID NO: 159069 - protein, 7 aa, synthetic construct
RAQPQLL

SEQ ID NO: 159070 - protein, 7 aa, synthetic construct
IQPKLYQ

SEQ ID NO: 159071 - protein, 7 aa, synthetic construct
DKGVSLK

SEQ ID NO: 159072 - protein, 7 aa, synthetic construct
EDAAYRR

SEQ ID NO: 159073 - protein, 7 aa, synthetic construct
MHGASQK

SEQ ID NO: 159074 - protein, 7 aa, synthetic construct
MGTMRGY

SEQ ID NO: 159075 - protein, 7 aa, synthetic construct
NHGTMMR

SEQ ID NO: 159076 - protein, 7 aa, synthetic construct
NIAHVAK

SEQ ID NO: 159077 - protein, 7 aa, synthetic construct
GHSPKVI

SEQ ID NO: 159078 - protein, 7 aa, synthetic construct
NGPSAGR

SEQ ID NO: 159079 - protein, 7 aa, synthetic construct
YLPQNGR

SEQ ID NO: 159080 - protein, 7 aa, synthetic construct
RSHTVPV

SEQ ID NO: 159081 - protein, 7 aa, synthetic construct
KAAIPQF

SEQ ID NO: 159082 - protein, 7 aa, synthetic construct
KPAVYGP

SEQ ID NO: 159083 - protein, 7 aa, synthetic construct
FTREHKV

SEQ ID NO: 159084 - protein, 7 aa, synthetic construct
KQQHSNT

SEQ ID NO: 159085 - protein, 7 aa, synthetic construct
THRIPLV

SEQ ID NO: 159086 - protein, 7 aa, synthetic construct
HSGGLKY

SEQ ID NO: 159087 - protein, 7 aa, synthetic construct
SASYHGK

SEQ ID NO: 159088 - protein, 7 aa, synthetic construct
LNNFNAK

SEQ ID NO: 159089 - protein, 7 aa, synthetic construct
ISNIISR

SEQ ID NO: 159090 - protein, 7 aa, synthetic construct
YGAQVHK

SEQ ID NO: 159091 - protein, 7 aa, synthetic construct
PIRQERG

SEQ ID NO: 159092 - protein, 7 aa, synthetic construct
WQKPIIA

SEQ ID NO: 159093 - protein, 7 aa, synthetic construct
SYKISPP

SEQ ID NO: 159094 - protein, 7 aa, synthetic construct
SHSTNAK

SEQ ID NO: 159095 - protein, 7 aa, synthetic construct
HVKHPMS

SEQ ID NO: 159096 - protein, 7 aa, synthetic construct
QFKTQWE

SEQ ID NO: 159097 - protein, 7 aa, synthetic construct
YQLKQDK

SEQ ID NO: 159098 - protein, 7 aa, synthetic construct
KDRSNYA

SEQ ID NO: 159099 - protein, 7 aa, synthetic construct
GSQPKSF

SEQ ID NO: 159100 - protein, 7 aa, synthetic construct
VRAAPTF

SEQ ID NO: 159101 - protein, 7 aa, synthetic construct
RKFPDSV

SEQ ID NO: 159102 - protein, 7 aa, synthetic construct
GPSQYNV

SEQ ID NO: 159103 - protein, 7 aa, synthetic construct
GKLENKW

SEQ ID NO: 159104 - protein, 7 aa, synthetic construct
QHSPPKY

SEQ ID NO: 159105 - protein, 7 aa, synthetic construct
LHSQAIR

SEQ ID NO: 159106 - protein, 7 aa, synthetic construct
SKGMIMH

SEQ ID NO: 159107 - protein, 7 aa, synthetic construct
KQEKINY

SEQ ID NO: 159108 - protein, 7 aa, synthetic construct
MTKGLYP

SEQ ID NO: 159109 - protein, 7 aa, synthetic construct
PKHPVER

SEQ ID NO: 159110 - protein, 7 aa, synthetic construct
RDMSMKT

SEQ ID NO: 159111 - protein, 7 aa, synthetic construct
KNPRGDL

SEQ ID NO: 159112 - protein, 7 aa, synthetic construct
EAQWNAK

SEQ ID NO: 159113 - protein, 7 aa, synthetic construct
KVYPSGH

SEQ ID NO: 159114 - protein, 7 aa, synthetic construct
GYQAASK

SEQ ID NO: 159115 - protein, 7 aa, synthetic construct
SLNHGIR

SEQ ID NO: 159116 - protein, 7 aa, synthetic construct
RMSEMRT

SEQ ID NO: 159117 - protein, 7 aa, synthetic construct
KYQMGNP

SEQ ID NO: 159118 - protein, 7 aa, synthetic construct
VKDSVYR

SEQ ID NO: 159119 - protein, 7 aa, synthetic construct
QKYDYPA

SEQ ID NO: 159120 - protein, 7 aa, synthetic construct
GAKQGFM

SEQ ID NO: 159121 - protein, 7 aa, synthetic construct
LYDAKVK

SEQ ID NO: 159122 - protein, 7 aa, synthetic construct
HGQVGMK

SEQ ID NO: 159123 - protein, 7 aa, synthetic construct
VHNQGFK

SEQ ID NO: 159124 - protein, 7 aa, synthetic construct
KLTDFAR

SEQ ID NO: 159125 - protein, 7 aa, synthetic construct
YMVKEIK

SEQ ID NO: 159126 - protein, 7 aa, synthetic construct
GDRVTAK

SEQ ID NO: 159127 - protein, 7 aa, synthetic construct
PRYSDSK

SEQ ID NO: 159128 - protein, 7 aa, synthetic construct
FQAGKFT

SEQ ID NO: 159129 - protein, 7 aa, synthetic construct
KTLDTNK

SEQ ID NO: 159130 - protein, 7 aa, synthetic construct
INLLHGK

SEQ ID NO: 159131 - protein, 7 aa, synthetic construct
MVISSNK

SEQ ID NO: 159132 - protein, 7 aa, synthetic construct
RTHGIVQ

SEQ ID NO: 159133 - protein, 7 aa, synthetic construct
TGMHLMK

SEQ ID NO: 159134 - protein, 7 aa, synthetic construct
KLTRLDL

SEQ ID NO: 159135 - protein, 7 aa, synthetic construct
HVKPMVV

SEQ ID NO: 159136 - protein, 7 aa, synthetic construct
KSQHQNP

SEQ ID NO: 159137 - protein, 7 aa, synthetic construct
KYLDKST

SEQ ID NO: 159138 - protein, 7 aa, synthetic construct
VPKNYGI

SEQ ID NO: 159139 - protein, 7 aa, synthetic construct
KFDSGYK

SEQ ID NO: 159140 - protein, 7 aa, synthetic construct
SAQHIKF

SEQ ID NO: 159141 - protein, 7 aa, synthetic construct
GGMVTRV

SEQ ID NO: 159142 - protein, 7 aa, synthetic construct
NYNGQFK

SEQ ID NO: 159143 - protein, 7 aa, synthetic construct
LNQQSWA

SEQ ID NO: 159144 - protein, 7 aa, synthetic construct
LKDGIKW

SEQ ID NO: 159145 - protein, 7 aa, synthetic construct
PHRERMT

SEQ ID NO: 159146 - protein, 7 aa, synthetic construct
NHKVAGY

SEQ ID NO: 159147 - protein, 7 aa, synthetic construct
ANNHSVK

SEQ ID NO: 159148 - protein, 7 aa, synthetic construct
STHGPKM

SEQ ID NO: 159149 - protein, 7 aa, synthetic construct
LKMSELK

SEQ ID NO: 159150 - protein, 7 aa, synthetic construct
QETYHGR

SEQ ID NO: 159151 - protein, 7 aa, synthetic construct
ISHLQLK

SEQ ID NO: 159152 - protein, 7 aa, synthetic construct
QAHITTR

SEQ ID NO: 159153 - protein, 7 aa, synthetic construct
HKMVVPA

SEQ ID NO: 159154 - protein, 7 aa, synthetic construct
YVSKEIR

SEQ ID NO: 159155 - protein, 7 aa, synthetic construct
IIHTTSR

SEQ ID NO: 159156 - protein, 7 aa, synthetic construct
IAQSVYK

SEQ ID NO: 159157 - protein, 7 aa, synthetic construct
GKIHVQM

SEQ ID NO: 159158 - protein, 7 aa, synthetic construct
HPRTPVQ

SEQ ID NO: 159159 - protein, 7 aa, synthetic construct
QQVHAQK

SEQ ID NO: 159160 - protein, 7 aa, synthetic construct
FQTQNRL

SEQ ID NO: 159161 - protein, 7 aa, synthetic construct
MKVPLMS

SEQ ID NO: 159162 - protein, 7 aa, synthetic construct
MTGHITK

SEQ ID NO: 159163 - protein, 7 aa, synthetic construct
QRVPTAM

SEQ ID NO: 159164 - protein, 7 aa, synthetic construct
MTHASNR

SEQ ID NO: 159165 - protein, 7 aa, synthetic construct
QDAKYPR

SEQ ID NO: 159166 - protein, 7 aa, synthetic construct
RHQATHV

SEQ ID NO: 159167 - protein, 7 aa, synthetic construct
MTSSHSR

SEQ ID NO: 159168 - protein, 7 aa, synthetic construct
TQVMMHK

SEQ ID NO: 159169 - protein, 7 aa, synthetic construct
KIAPMSI

SEQ ID NO: 159170 - protein, 7 aa, synthetic construct
YKQMAPP

SEQ ID NO: 159171 - protein, 7 aa, synthetic construct
NTHSLTR

SEQ ID NO: 159172 - protein, 7 aa, synthetic construct
SSNYKSL

SEQ ID NO: 159173 - protein, 7 aa, synthetic construct
KLQDSLR

SEQ ID NO: 159174 - protein, 7 aa, synthetic construct
IFKAISN

SEQ ID NO: 159175 - protein, 7 aa, synthetic construct
HYKAASI

SEQ ID NO: 159176 - protein, 7 aa, synthetic construct
KIPGGPF

SEQ ID NO: 159177 - protein, 7 aa, synthetic construct
ITREQVR

SEQ ID NO: 159178 - protein, 7 aa, synthetic construct
NDRMPTK

SEQ ID NO: 159179 - protein, 7 aa, synthetic construct
QGQYSNK

SEQ ID NO: 159180 - protein, 7 aa, synthetic construct
PQTRDYK

SEQ ID NO: 159181 - protein, 7 aa, synthetic construct
DKGKGFL

SEQ ID NO: 159182 - protein, 7 aa, synthetic construct
QQFTKGY

SEQ ID NO: 159183 - protein, 7 aa, synthetic construct
AAHTPSK

SEQ ID NO: 159184 - protein, 7 aa, synthetic construct
QLRESIK

SEQ ID NO: 159185 - protein, 7 aa, synthetic construct
FLNNQAR

SEQ ID NO: 159186 - protein, 7 aa, synthetic construct
NMNHVMK

SEQ ID NO: 159187 - protein, 7 aa, synthetic construct
KEAQMLR

SEQ ID NO: 159188 - protein, 7 aa, synthetic construct
LVPKVMT

SEQ ID NO: 159189 - protein, 7 aa, synthetic construct
KTWKPED

SEQ ID NO: 159190 - protein, 7 aa, synthetic construct
RSVQMTH

SEQ ID NO: 159191 - protein, 7 aa, synthetic construct
MIHQTQK

SEQ ID NO: 159192 - protein, 7 aa, synthetic construct
HVNAMAR

SEQ ID NO: 159193 - protein, 7 aa, synthetic construct
HMGLTKM

SEQ ID NO: 159194 - protein, 7 aa, synthetic construct
EKMARST

SEQ ID NO: 159195 - protein, 7 aa, synthetic construct
FGGVMTR

SEQ ID NO: 159196 - protein, 7 aa, synthetic construct
HQPSIRT

SEQ ID NO: 159197 - protein, 7 aa, synthetic construct
AYDKMKY

SEQ ID NO: 159198 - protein, 7 aa, synthetic construct
ASRPVTH

SEQ ID NO: 159199 - protein, 7 aa, synthetic construct
HTKQVTY

SEQ ID NO: 159200 - protein, 7 aa, synthetic construct
LQTAMYK

SEQ ID NO: 159201 - protein, 7 aa, synthetic construct
PKIGAGF

SEQ ID NO: 159202 - protein, 7 aa, synthetic construct
HMASATR

SEQ ID NO: 159203 - protein, 7 aa, synthetic construct
QAQTRAT

SEQ ID NO: 159204 - protein, 7 aa, synthetic construct
IGNKTIF

SEQ ID NO: 159205 - protein, 7 aa, synthetic construct
GVQQKLF

SEQ ID NO: 159206 - protein, 7 aa, synthetic construct
TFKTHQI

SEQ ID NO: 159207 - protein, 7 aa, synthetic construct
YQQGTYM

SEQ ID NO: 159208 - protein, 7 aa, synthetic construct
KRSPLDM

SEQ ID NO: 159209 - protein, 7 aa, synthetic construct
QMQYTAK

SEQ ID NO: 159210 - protein, 7 aa, synthetic construct
HSKVQNI

SEQ ID NO: 159211 - protein, 7 aa, synthetic construct
NGSVVMR

SEQ ID NO: 159212 - protein, 7 aa, synthetic construct
RDKQDIR

SEQ ID NO: 159213 - protein, 7 aa, synthetic construct
HIHTSKL

SEQ ID NO: 159214 - protein, 7 aa, synthetic construct
LKDGLHK

SEQ ID NO: 159215 - protein, 7 aa, synthetic construct
RMNPMNP

SEQ ID NO: 159216 - protein, 7 aa, synthetic construct
RQLNSSH

SEQ ID NO: 159217 - protein, 7 aa, synthetic construct
TKYQEVR

SEQ ID NO: 159218 - protein, 7 aa, synthetic construct
KPMDPFK

SEQ ID NO: 159219 - protein, 7 aa, synthetic construct
LKQLDAR

SEQ ID NO: 159220 - protein, 7 aa, synthetic construct
VKQYNTI

SEQ ID NO: 159221 - protein, 7 aa, synthetic construct
YKEVKTW

SEQ ID NO: 159222 - protein, 7 aa, synthetic construct
RKEYPNV

SEQ ID NO: 159223 - protein, 7 aa, synthetic construct
GVHISQK

SEQ ID NO: 159224 - protein, 7 aa, synthetic construct
TRETNLR

SEQ ID NO: 159225 - protein, 7 aa, synthetic construct
LVLMKKD

SEQ ID NO: 159226 - protein, 7 aa, synthetic construct
NFGAGNK

SEQ ID NO: 159227 - protein, 7 aa, synthetic construct
GANPMQR

SEQ ID NO: 159228 - protein, 7 aa, synthetic construct
TTHAKDK

SEQ ID NO: 159229 - protein, 7 aa, synthetic construct
VIKEWQK

SEQ ID NO: 159230 - protein, 7 aa, synthetic construct
SRDVFPK

SEQ ID NO: 159231 - protein, 7 aa, synthetic construct
PPNQRTF

SEQ ID NO: 159232 - protein, 7 aa, synthetic construct
TPAPKPY

SEQ ID NO: 159233 - protein, 7 aa, synthetic construct
KDTGYTK

SEQ ID NO: 159234 - protein, 7 aa, synthetic construct
MTAKNLY

SEQ ID NO: 159235 - protein, 7 aa, synthetic construct
KIQPLQQ

SEQ ID NO: 159236 - protein, 7 aa, synthetic construct
REKEPLR

SEQ ID NO: 159237 - protein, 7 aa, synthetic construct
LHAQNVR

SEQ ID NO: 159238 - protein, 7 aa, synthetic construct
MQMGQHK

SEQ ID NO: 159239 - protein, 7 aa, synthetic construct
HNLSTKH

SEQ ID NO: 159240 - protein, 7 aa, synthetic construct
HFSNTAK

SEQ ID NO: 159241 - protein, 7 aa, synthetic construct
TMKLNQY

SEQ ID NO: 159242 - protein, 7 aa, synthetic construct
KGDVSQK

SEQ ID NO: 159243 - protein, 7 aa, synthetic construct
WKHDTKS

SEQ ID NO: 159244 - protein, 7 aa, synthetic construct
GTVRDKS

SEQ ID NO: 159245 - protein, 7 aa, synthetic construct
IHQGLPR

SEQ ID NO: 159246 - protein, 7 aa, synthetic construct
HSPKPNY

SEQ ID NO: 159247 - protein, 7 aa, synthetic construct
LTQYSNK

SEQ ID NO: 159248 - protein, 7 aa, synthetic construct
HQAIANR

SEQ ID NO: 159249 - protein, 7 aa, synthetic construct
RMSTTWE

SEQ ID NO: 159250 - protein, 7 aa, synthetic construct
PYINSKA

SEQ ID NO: 159251 - protein, 7 aa, synthetic construct
KMQINGY

SEQ ID NO: 159252 - protein, 7 aa, synthetic construct
LHMKENR

SEQ ID NO: 159253 - protein, 7 aa, synthetic construct
PTHHKTA

SEQ ID NO: 159254 - protein, 7 aa, synthetic construct
MDNPMKR

SEQ ID NO: 159255 - protein, 7 aa, synthetic construct
AHFNVSH

SEQ ID NO: 159256 - protein, 7 aa, synthetic construct
MQKPYYE

SEQ ID NO: 159257 - protein, 7 aa, synthetic construct
MLTHHGK

SEQ ID NO: 159258 - protein, 7 aa, synthetic construct
AMDKVSR

SEQ ID NO: 159259 - protein, 7 aa, synthetic construct
NAYHGSQ

SEQ ID NO: 159260 - protein, 7 aa, synthetic construct
KIPAGMY

SEQ ID NO: 159261 - protein, 7 aa, synthetic construct
PGYQNAK

SEQ ID NO: 159262 - protein, 7 aa, synthetic construct
QQLAKYS

SEQ ID NO: 159263 - protein, 7 aa, synthetic construct
PRAPVNM

SEQ ID NO: 159264 - protein, 7 aa, synthetic construct
QIPAEKK

SEQ ID NO: 159265 - protein, 7 aa, synthetic construct
SPGQTHR

SEQ ID NO: 159266 - protein, 7 aa, synthetic construct
RLNMTGI

SEQ ID NO: 159267 - protein, 7 aa, synthetic construct
VMTERTR

SEQ ID NO: 159268 - protein, 7 aa, synthetic construct
QKDFSGK

SEQ ID NO: 159269 - protein, 7 aa, synthetic construct
LNVNRQL

SEQ ID NO: 159270 - protein, 7 aa, synthetic construct
FDATKYK

SEQ ID NO: 159271 - protein, 7 aa, synthetic construct
IQKIYPN

SEQ ID NO: 159272 - protein, 7 aa, synthetic construct
HLKPISV

SEQ ID NO: 159273 - protein, 7 aa, synthetic construct
IRGISLG

SEQ ID NO: 159274 - protein, 7 aa, synthetic construct
SRETFQK

SEQ ID NO: 159275 - protein, 7 aa, synthetic construct
KPPVHNI

SEQ ID NO: 159276 - protein, 7 aa, synthetic construct
LHQGREK

SEQ ID NO: 159277 - protein, 7 aa, synthetic construct
VDRQGFK

SEQ ID NO: 159278 - protein, 7 aa, synthetic construct
VMAHVQR

SEQ ID NO: 159279 - protein, 7 aa, synthetic construct
LIHKQTI

SEQ ID NO: 159280 - protein, 7 aa, synthetic construct
SAHAQKY

SEQ ID NO: 159281 - protein, 7 aa, synthetic construct
FGSMEMR

SEQ ID NO: 159282 - protein, 7 aa, synthetic construct
QFQTSVK

SEQ ID NO: 159283 - protein, 7 aa, synthetic construct
IQGVKIY

SEQ ID NO: 159284 - protein, 7 aa, synthetic construct
VQATNFR

SEQ ID NO: 159285 - protein, 7 aa, synthetic construct
RALSGAH

SEQ ID NO: 159286 - protein, 7 aa, synthetic construct
KQHVKHE

SEQ ID NO: 159287 - protein, 7 aa, synthetic construct
SHQQVGK

SEQ ID NO: 159288 - protein, 7 aa, synthetic construct
GDNRWEK

SEQ ID NO: 159289 - protein, 7 aa, synthetic construct
AKHLPGH

SEQ ID NO: 159290 - protein, 7 aa, synthetic construct
HSAQNMK

SEQ ID NO: 159291 - protein, 7 aa, synthetic construct
LPKLPMP

SEQ ID NO: 159292 - protein, 7 aa, synthetic construct
KDDVRKM

SEQ ID NO: 159293 - protein, 7 aa, synthetic construct
STKLPIM

SEQ ID NO: 159294 - protein, 7 aa, synthetic construct
RPSEKYF

SEQ ID NO: 159295 - protein, 7 aa, synthetic construct
DMRGLAK

SEQ ID NO: 159296 - protein, 7 aa, synthetic construct
FNHRTPI

SEQ ID NO: 159297 - protein, 7 aa, synthetic construct
MKDNVGK

SEQ ID NO: 159298 - protein, 7 aa, synthetic construct
FHVVTNK

SEQ ID NO: 159299 - protein, 7 aa, synthetic construct
PKAHDSK

SEQ ID NO: 159300 - protein, 7 aa, synthetic construct
MQTMARV

SEQ ID NO: 159301 - protein, 7 aa, synthetic construct
HAKERII

SEQ ID NO: 159302 - protein, 7 aa, synthetic construct
SFAEKSR

SEQ ID NO: 159303 - protein, 7 aa, synthetic construct
HGKVPVM

SEQ ID NO: 159304 - protein, 7 aa, synthetic construct
AFKINGM

SEQ ID NO: 159305 - protein, 7 aa, synthetic construct
ISSRNIV

SEQ ID NO: 159306 - protein, 7 aa, synthetic construct
KVPELHY

SEQ ID NO: 159307 - protein, 7 aa, synthetic construct
VGHSLGK

SEQ ID NO: 159308 - protein, 7 aa, synthetic construct
NLGSKYI

SEQ ID NO: 159309 - protein, 7 aa, synthetic construct
FPKALNM

SEQ ID NO: 159310 - protein, 7 aa, synthetic construct
SVSERWT

SEQ ID NO: 159311 - protein, 7 aa, synthetic construct
GLQDRMK

SEQ ID NO: 159312 - protein, 7 aa, synthetic construct
STQDGRK

SEQ ID NO: 159313 - protein, 7 aa, synthetic construct
PLARIAP

SEQ ID NO: 159314 - protein, 7 aa, synthetic construct
DAGYAYK

SEQ ID NO: 159315 - protein, 7 aa, synthetic construct
SNKGQFI

SEQ ID NO: 159316 - protein, 7 aa, synthetic construct
VNAQRMH

SEQ ID NO: 159317 - protein, 7 aa, synthetic construct
LDMTRTK

SEQ ID NO: 159318 - protein, 7 aa, synthetic construct
NLHRSGV

SEQ ID NO: 159319 - protein, 7 aa, synthetic construct
QQQAKAF

SEQ ID NO: 159320 - protein, 7 aa, synthetic construct
GPQSLRM

SEQ ID NO: 159321 - protein, 7 aa, synthetic construct
TAQFSNQ

SEQ ID NO: 159322 - protein, 7 aa, synthetic construct
GFGSVPR

SEQ ID NO: 159323 - protein, 7 aa, synthetic construct
LQTSYKV

SEQ ID NO: 159324 - protein, 7 aa, synthetic construct
GRGPGLP

SEQ ID NO: 159325 - protein, 7 aa, synthetic construct
KAAHMNL

SEQ ID NO: 159326 - protein, 7 aa, synthetic construct
DEMSIRR

SEQ ID NO: 159327 - protein, 7 aa, synthetic construct
AHNGNFK

SEQ ID NO: 159328 - protein, 7 aa, synthetic construct
KAPVIAM

SEQ ID NO: 159329 - protein, 7 aa, synthetic construct
SKLLEYK

SEQ ID NO: 159330 - protein, 7 aa, synthetic construct
LTHTKDR

SEQ ID NO: 159331 - protein, 7 aa, synthetic construct
HFKVVTS

SEQ ID NO: 159332 - protein, 7 aa, synthetic construct
SQHIMGK

SEQ ID NO: 159333 - protein, 7 aa, synthetic construct
HPVAKIA

SEQ ID NO: 159334 - protein, 7 aa, synthetic construct
KNVTHMH

SEQ ID NO: 159335 - protein, 7 aa, synthetic construct
IRYHESG

SEQ ID NO: 159336 - protein, 7 aa, synthetic construct
PPDMKSR

SEQ ID NO: 159337 - protein, 7 aa, synthetic construct
FSANIVR

SEQ ID NO: 159338 - protein, 7 aa, synthetic construct
GIATKHM

SEQ ID NO: 159339 - protein, 7 aa, synthetic construct
HSKSQPH

SEQ ID NO: 159340 - protein, 7 aa, synthetic construct
FLIKSSN

SEQ ID NO: 159341 - protein, 7 aa, synthetic construct
DVDGHRR

SEQ ID NO: 159342 - protein, 7 aa, synthetic construct
QVTNLHV

SEQ ID NO: 159343 - protein, 7 aa, synthetic construct
HTTLRQM

SEQ ID NO: 159344 - protein, 7 aa, synthetic construct
SVAHSNR

SEQ ID NO: 159345 - protein, 7 aa, synthetic construct
HMIQKAV

SEQ ID NO: 159346 - protein, 7 aa, synthetic construct
ANKGHPY

SEQ ID NO: 159347 - protein, 7 aa, synthetic construct
RAAEKAQ

SEQ ID NO: 159348 - protein, 7 aa, synthetic construct
VTLQHNR

SEQ ID NO: 159349 - protein, 7 aa, synthetic construct
IQHPKFG

SEQ ID NO: 159350 - protein, 7 aa, synthetic construct
MMKSFSQ

SEQ ID NO: 159351 - protein, 7 aa, synthetic construct
EHRFPGN

SEQ ID NO: 159352 - protein, 7 aa, synthetic construct
HQSKITH

SEQ ID NO: 159353 - protein, 7 aa, synthetic construct
VKNERVT

SEQ ID NO: 159354 - protein, 7 aa, synthetic construct
KHQGATQ

SEQ ID NO: 159355 - protein, 7 aa, synthetic construct
NTTHVPR

SEQ ID NO: 159356 - protein, 7 aa, synthetic construct
HMKTQTF

SEQ ID NO: 159357 - protein, 7 aa, synthetic construct
SKIQHII

SEQ ID NO: 159358 - protein, 7 aa, synthetic construct
AQYNQKL

SEQ ID NO: 159359 - protein, 7 aa, synthetic construct
MHIHTSK

SEQ ID NO: 159360 - protein, 7 aa, synthetic construct
YNSNSLR

SEQ ID NO: 159361 - protein, 7 aa, synthetic construct
GVSYNAK

SEQ ID NO: 159362 - protein, 7 aa, synthetic construct
RQNEKPY

SEQ ID NO: 159363 - protein, 7 aa, synthetic construct
QEWNPRD

SEQ ID NO: 159364 - protein, 7 aa, synthetic construct
MHPKMMI

SEQ ID NO: 159365 - protein, 7 aa, synthetic construct
MTERVTR

SEQ ID NO: 159366 - protein, 7 aa, synthetic construct
LRENMSK

SEQ ID NO: 159367 - protein, 7 aa, synthetic construct
AATHMRV

SEQ ID NO: 159368 - protein, 7 aa, synthetic construct
VASNYMK

SEQ ID NO: 159369 - protein, 7 aa, synthetic construct
PAIQQAK

SEQ ID NO: 159370 - protein, 7 aa, synthetic construct
VVQTNRY

SEQ ID NO: 159371 - protein, 7 aa, synthetic construct
LKMDSHK

SEQ ID NO: 159372 - protein, 7 aa, synthetic construct
IKHATVV

SEQ ID NO: 159373 - protein, 7 aa, synthetic construct
QPNPSHR

SEQ ID NO: 159374 - protein, 7 aa, synthetic construct
DHGSDRR

SEQ ID NO: 159375 - protein, 7 aa, synthetic construct
TVLSVNT

SEQ ID NO: 159376 - protein, 7 aa, synthetic construct
SSGYVTK

SEQ ID NO: 159377 - protein, 7 aa, synthetic construct
RVHDQKA

SEQ ID NO: 159378 - protein, 7 aa, synthetic construct
VPNGNYR

SEQ ID NO: 159379 - protein, 7 aa, synthetic construct
YNTLHKY

SEQ ID NO: 159380 - protein, 7 aa, synthetic construct
AMQKGTD

SEQ ID NO: 159381 - protein, 7 aa, synthetic construct
HKAKELP

SEQ ID NO: 159382 - protein, 7 aa, synthetic construct
ASVARPI

SEQ ID NO: 159383 - protein, 7 aa, synthetic construct
GVTHMNK

SEQ ID NO: 159384 - protein, 7 aa, synthetic construct
QSMQNQR

SEQ ID NO: 159385 - protein, 7 aa, synthetic construct
ASVGKPF

SEQ ID NO: 159386 - protein, 7 aa, synthetic construct
KSMPMGV

SEQ ID NO: 159387 - protein, 7 aa, synthetic construct
NVGQWDR

SEQ ID NO: 159388 - protein, 7 aa, synthetic construct
GMHAKNT

SEQ ID NO: 159389 - protein, 7 aa, synthetic construct
GSKSFSH

SEQ ID NO: 159390 - protein, 7 aa, synthetic construct
QNHAATK

SEQ ID NO: 159391 - protein, 7 aa, synthetic construct
GDKYKGL

SEQ ID NO: 159392 - protein, 7 aa, synthetic construct
KDVNNAK

SEQ ID NO: 159393 - protein, 7 aa, synthetic construct
DPYEPVP

SEQ ID NO: 159394 - protein, 7 aa, synthetic construct
SKDMAIR

SEQ ID NO: 159395 - protein, 7 aa, synthetic construct
VGYNGGQ

SEQ ID NO: 159396 - protein, 7 aa, synthetic construct
PREIKMA

SEQ ID NO: 159397 - protein, 7 aa, synthetic construct
HSTGSPK

SEQ ID NO: 159398 - protein, 7 aa, synthetic construct
ASYTGSH

SEQ ID NO: 159399 - protein, 7 aa, synthetic construct
ADQKLTR

SEQ ID NO: 159400 - protein, 7 aa, synthetic construct
GHINGYK

SEQ ID NO: 159401 - protein, 7 aa, synthetic construct
QPGELKY

SEQ ID NO: 159402 - protein, 7 aa, synthetic construct
ELMKKVD

SEQ ID NO: 159403 - protein, 7 aa, synthetic construct
RQINEHE

SEQ ID NO: 159404 - protein, 7 aa, synthetic construct
MQQVNSR

SEQ ID NO: 159405 - protein, 7 aa, synthetic construct
EYNSNHP

SEQ ID NO: 159406 - protein, 7 aa, synthetic construct
LNKGDAK

SEQ ID NO: 159407 - protein, 7 aa, synthetic construct
MSAKTPF

SEQ ID NO: 159408 - protein, 7 aa, synthetic construct
VHTSARI

SEQ ID NO: 159409 - protein, 7 aa, synthetic construct
MSTPKYQ

SEQ ID NO: 159410 - protein, 7 aa, synthetic construct
RDKDKLI

SEQ ID NO: 159411 - protein, 7 aa, synthetic construct
IEQIRPK

SEQ ID NO: 159412 - protein, 7 aa, synthetic construct
NQQFSAM

SEQ ID NO: 159413 - protein, 7 aa, synthetic construct
HATNQQR

SEQ ID NO: 159414 - protein, 7 aa, synthetic construct
PQMGNMR

SEQ ID NO: 159415 - protein, 7 aa, synthetic construct
MNQLVSR

SEQ ID NO: 159416 - protein, 7 aa, synthetic construct
QPVQAHK

SEQ ID NO: 159417 - protein, 7 aa, synthetic construct
GDVVSKI

SEQ ID NO: 159418 - protein, 7 aa, synthetic construct
AKFEPQK

SEQ ID NO: 159419 - protein, 7 aa, synthetic construct
YSNQGFK

SEQ ID NO: 159420 - protein, 7 aa, synthetic construct
QTGQQWV

SEQ ID NO: 159421 - protein, 7 aa, synthetic construct
SKDVQTR

SEQ ID NO: 159422 - protein, 7 aa, synthetic construct
QMYSQPS

SEQ ID NO: 159423 - protein, 7 aa, synthetic construct
AQTSQPR

SEQ ID NO: 159424 - protein, 7 aa, synthetic construct
QENQTRW

SEQ ID NO: 159425 - protein, 7 aa, synthetic construct
MNHTSVK

SEQ ID NO: 159426 - protein, 7 aa, synthetic construct
KEKNAQY

SEQ ID NO: 159427 - protein, 7 aa, synthetic construct
YLRDHSV

SEQ ID NO: 159428 - protein, 7 aa, synthetic construct
NNQQPRM

SEQ ID NO: 159429 - protein, 7 aa, synthetic construct
KDNRNTT

SEQ ID NO: 159430 - protein, 7 aa, synthetic construct
MQGSTQR

SEQ ID NO: 159431 - protein, 7 aa, synthetic construct
QSYNLQM

SEQ ID NO: 159432 - protein, 7 aa, synthetic construct
KHDVAKM

SEQ ID NO: 159433 - protein, 7 aa, synthetic construct
KREAQLV

SEQ ID NO: 159434 - protein, 7 aa, synthetic construct
THLLPSV

SEQ ID NO: 159435 - protein, 7 aa, synthetic construct
NHVKHLQ

SEQ ID NO: 159436 - protein, 7 aa, synthetic construct
PIPQATR

SEQ ID NO: 159437 - protein, 7 aa, synthetic construct
KEDIMVH

SEQ ID NO: 159438 - protein, 7 aa, synthetic construct
RIDNRVQ

SEQ ID NO: 159439 - protein, 7 aa, synthetic construct
TDKILKF

SEQ ID NO: 159440 - protein, 7 aa, synthetic construct
SRELNTK

SEQ ID NO: 159441 - protein, 7 aa, synthetic construct
PMAKVAY

SEQ ID NO: 159442 - protein, 7 aa, synthetic construct
GADHGYR

SEQ ID NO: 159443 - protein, 7 aa, synthetic construct
HTKHVNV

SEQ ID NO: 159444 - protein, 7 aa, synthetic construct
ARNAVEK

SEQ ID NO: 159445 - protein, 7 aa, synthetic construct
NHHKLTA

SEQ ID NO: 159446 - protein, 7 aa, synthetic construct
VSTHHNK

SEQ ID NO: 159447 - protein, 7 aa, synthetic construct
REPSLAK

SEQ ID NO: 159448 - protein, 7 aa, synthetic construct
ANNFKSI

SEQ ID NO: 159449 - protein, 7 aa, synthetic construct
ESGRYNH

SEQ ID NO: 159450 - protein, 7 aa, synthetic construct
PSRIDPS

SEQ ID NO: 159451 - protein, 7 aa, synthetic construct
DIGYLSS

SEQ ID NO: 159452 - protein, 7 aa, synthetic construct
LKSMMGH

SEQ ID NO: 159453 - protein, 7 aa, synthetic construct
SHQVVPK

SEQ ID NO: 159454 - protein, 7 aa, synthetic construct
PNANAGR

SEQ ID NO: 159455 - protein, 7 aa, synthetic construct
AGGNGIR

SEQ ID NO: 159456 - protein, 7 aa, synthetic construct
GSSGQAR

SEQ ID NO: 159457 - protein, 7 aa, synthetic construct
IARTPPH

SEQ ID NO: 159458 - protein, 7 aa, synthetic construct
SYGVVPK

SEQ ID NO: 159459 - protein, 7 aa, synthetic construct
GMEGAMR

SEQ ID NO: 159460 - protein, 7 aa, synthetic construct
PKMAERQ

SEQ ID NO: 159461 - protein, 7 aa, synthetic construct
MPKMEQR

SEQ ID NO: 159462 - protein, 7 aa, synthetic construct
HHQQPTD

SEQ ID NO: 159463 - protein, 7 aa, synthetic construct
GKEASFR

SEQ ID NO: 159464 - protein, 7 aa, synthetic construct
QKEMIQR

SEQ ID NO: 159465 - protein, 7 aa, synthetic construct
RSIQKDV

SEQ ID NO: 159466 - protein, 7 aa, synthetic construct
HHGTMNK

SEQ ID NO: 159467 - protein, 7 aa, synthetic construct
NKVSYVQ

SEQ ID NO: 159468 - protein, 7 aa, synthetic construct
KNFDSKM

SEQ ID NO: 159469 - protein, 7 aa, synthetic construct
IEQPNAF

SEQ ID NO: 159470 - protein, 7 aa, synthetic construct
QIARQAM

SEQ ID NO: 159471 - protein, 7 aa, synthetic construct
NTKSLDR

SEQ ID NO: 159472 - protein, 7 aa, synthetic construct
QGQNTAK

SEQ ID NO: 159473 - protein, 7 aa, synthetic construct
LNSQHGK

SEQ ID NO: 159474 - protein, 7 aa, synthetic construct
SEANYRM

SEQ ID NO: 159475 - protein, 7 aa, synthetic construct
YKDLQVR

SEQ ID NO: 159476 - protein, 7 aa, synthetic construct
KTQMQHL

SEQ ID NO: 159477 - protein, 7 aa, synthetic construct
TMREIQR

SEQ ID NO: 159478 - protein, 7 aa, synthetic construct
QKIPTLQ

SEQ ID NO: 159479 - protein, 7 aa, synthetic construct
THEHSGR

SEQ ID NO: 159480 - protein, 7 aa, synthetic construct
HQLMNGK

SEQ ID NO: 159481 - protein, 7 aa, synthetic construct
IKAPIIQ

SEQ ID NO: 159482 - protein, 7 aa, synthetic construct
SDAYQGR

SEQ ID NO: 159483 - protein, 7 aa, synthetic construct
FSATVAR

SEQ ID NO: 159484 - protein, 7 aa, synthetic construct
IGQRDAK

SEQ ID NO: 159485 - protein, 7 aa, synthetic construct
LVKEHSR

SEQ ID NO: 159486 - protein, 7 aa, synthetic construct
DSKNFTK

SEQ ID NO: 159487 - protein, 7 aa, synthetic construct
NRAEMLK

SEQ ID NO: 159488 - protein, 7 aa, synthetic construct
QVKPMGY

SEQ ID NO: 159489 - protein, 7 aa, synthetic construct
AFAATNT

SEQ ID NO: 159490 - protein, 7 aa, synthetic construct
HLNQTGK

SEQ ID NO: 159491 - protein, 7 aa, synthetic construct
NVAQAMR

SEQ ID NO: 159492 - protein, 7 aa, synthetic construct
SMQTYPK

SEQ ID NO: 159493 - protein, 7 aa, synthetic construct
ADNRGDG

SEQ ID NO: 159494 - protein, 7 aa, synthetic construct
LNSIHAK

SEQ ID NO: 159495 - protein, 7 aa, synthetic construct
KNHNISV

SEQ ID NO: 159496 - protein, 7 aa, synthetic construct
KSNEYEM

SEQ ID NO: 159497 - protein, 7 aa, synthetic construct
QGMTAQK

SEQ ID NO: 159498 - protein, 7 aa, synthetic construct
SNGSTHK

SEQ ID NO: 159499 - protein, 7 aa, synthetic construct
SQNNLAR

SEQ ID NO: 159500 - protein, 7 aa, synthetic construct
NMIHKSS

SEQ ID NO: 159501 - protein, 7 aa, synthetic construct
PKQLVPN

SEQ ID NO: 159502 - protein, 7 aa, synthetic construct
MTRETRT

SEQ ID NO: 159503 - protein, 7 aa, synthetic construct
MRNVDVK

SEQ ID NO: 159504 - protein, 7 aa, synthetic construct
NAQKAGW

SEQ ID NO: 159505 - protein, 7 aa, synthetic construct
TTNREIK

SEQ ID NO: 159506 - protein, 7 aa, synthetic construct
EMTYNAR

SEQ ID NO: 159507 - protein, 7 aa, synthetic construct
WKQVLNQ

SEQ ID NO: 159508 - protein, 7 aa, synthetic construct
YVAGMTR

SEQ ID NO: 159509 - protein, 7 aa, synthetic construct
NMANGYK

SEQ ID NO: 159510 - protein, 7 aa, synthetic construct
EKQPKTF

SEQ ID NO: 159511 - protein, 7 aa, synthetic construct
GSHAQKL

SEQ ID NO: 159512 - protein, 7 aa, synthetic construct
KVDMGNK

SEQ ID NO: 159513 - protein, 7 aa, synthetic construct
NKDARDK

SEQ ID NO: 159514 - protein, 7 aa, synthetic construct
EMRRRED

SEQ ID NO: 159515 - protein, 7 aa, synthetic construct
QQDKTMR

SEQ ID NO: 159516 - protein, 7 aa, synthetic construct
SFQGNAK

SEQ ID NO: 159517 - protein, 7 aa, synthetic construct
RNVQDTK

SEQ ID NO: 159518 - protein, 7 aa, synthetic construct
DKPPVRT

SEQ ID NO: 159519 - protein, 7 aa, synthetic construct
GHNMKAL

SEQ ID NO: 159520 - protein, 7 aa, synthetic construct
PRNPNER

SEQ ID NO: 159521 - protein, 7 aa, synthetic construct
NLQYEAR

SEQ ID NO: 159522 - protein, 7 aa, synthetic construct
AHASPMN

SEQ ID NO: 159523 - protein, 7 aa, synthetic construct
TDLNKGR

SEQ ID NO: 159524 - protein, 7 aa, synthetic construct
QSQYKTI

SEQ ID NO: 159525 - protein, 7 aa, synthetic construct
KVPHHSP

SEQ ID NO: 159526 - protein, 7 aa, synthetic construct
LRDSIAK

SEQ ID NO: 159527 - protein, 7 aa, synthetic construct
QTYAIPK

SEQ ID NO: 159528 - protein, 7 aa, synthetic construct
FNAKIPI

SEQ ID NO: 159529 - protein, 7 aa, synthetic construct
HTGGVKF

SEQ ID NO: 159530 - protein, 7 aa, synthetic construct
WHNEDQT

SEQ ID NO: 159531 - protein, 7 aa, synthetic construct
SVKHMSI

SEQ ID NO: 159532 - protein, 7 aa, synthetic construct
LMTNTHK

SEQ ID NO: 159533 - protein, 7 aa, synthetic construct
GTEHYNR

SEQ ID NO: 159534 - protein, 7 aa, synthetic construct
AANYAGK

SEQ ID NO: 159535 - protein, 7 aa, synthetic construct
VDKGAIR

SEQ ID NO: 159536 - protein, 7 aa, synthetic construct
NGMPQSR

SEQ ID NO: 159537 - protein, 7 aa, synthetic construct
NSHYQGM

SEQ ID NO: 159538 - protein, 7 aa, synthetic construct
KMIDYQQ

SEQ ID NO: 159539 - protein, 7 aa, synthetic construct
GQVKAYS

SEQ ID NO: 159540 - protein, 7 aa, synthetic construct
RDEGTRY

SEQ ID NO: 159541 - protein, 7 aa, synthetic construct
FLAKSSH

SEQ ID NO: 159542 - protein, 7 aa, synthetic construct
NETNKAR

SEQ ID NO: 159543 - protein, 7 aa, synthetic construct
IKDRPIN

SEQ ID NO: 159544 - protein, 7 aa, synthetic construct
ALKFKET

SEQ ID NO: 159545 - protein, 7 aa, synthetic construct
KQTHQNT

SEQ ID NO: 159546 - protein, 7 aa, synthetic construct
NAAGSTR

SEQ ID NO: 159547 - protein, 7 aa, synthetic construct
SAGQTWA

SEQ ID NO: 159548 - protein, 7 aa, synthetic construct
PSASGFM

SEQ ID NO: 159549 - protein, 7 aa, synthetic construct
PRHQNGP

SEQ ID NO: 159550 - protein, 7 aa, synthetic construct
HVAYGNV

SEQ ID NO: 159551 - protein, 7 aa, synthetic construct
AHIKNIQ

SEQ ID NO: 159552 - protein, 7 aa, synthetic construct
DGEKYHM

SEQ ID NO: 159553 - protein, 7 aa, synthetic construct
KVHNLQH

SEQ ID NO: 159554 - protein, 7 aa, synthetic construct
MHNMKPL

SEQ ID NO: 159555 - protein, 7 aa, synthetic construct
IPERTIK

SEQ ID NO: 159556 - protein, 7 aa, synthetic construct
KGQQGMH

SEQ ID NO: 159557 - protein, 7 aa, synthetic construct
YSAKQEK

SEQ ID NO: 159558 - protein, 7 aa, synthetic construct
ANNDRLK

SEQ ID NO: 159559 - protein, 7 aa, synthetic construct
YQSNVQR

SEQ ID NO: 159560 - protein, 7 aa, synthetic construct
PLASHNM

SEQ ID NO: 159561 - protein, 7 aa, synthetic construct
HMRTVGV

SEQ ID NO: 159562 - protein, 7 aa, synthetic construct
QFANDRY

SEQ ID NO: 159563 - protein, 7 aa, synthetic construct
KSTHGSM

SEQ ID NO: 159564 - protein, 7 aa, synthetic construct
NANHGRL

SEQ ID NO: 159565 - protein, 7 aa, synthetic construct
RERTASL

SEQ ID NO: 159566 - protein, 7 aa, synthetic construct
QATYQMK

SEQ ID NO: 159567 - protein, 7 aa, synthetic construct
KKEGHQL

SEQ ID NO: 159568 - protein, 7 aa, synthetic construct
KQTPMNM

SEQ ID NO: 159569 - protein, 7 aa, synthetic construct
TSEKYRV

SEQ ID NO: 159570 - protein, 7 aa, synthetic construct
KDSQQTK

SEQ ID NO: 159571 - protein, 7 aa, synthetic construct
HQHFVQQ

SEQ ID NO: 159572 - protein, 7 aa, synthetic construct
FIKDVPK

SEQ ID NO: 159573 - protein, 7 aa, synthetic construct
RAQAQNL

SEQ ID NO: 159574 - protein, 7 aa, synthetic construct
QAVNVPR

SEQ ID NO: 159575 - protein, 7 aa, synthetic construct
QSRPLNQ

SEQ ID NO: 159576 - protein, 7 aa, synthetic construct
HPQFGSQ

SEQ ID NO: 159577 - protein, 7 aa, synthetic construct
VGQNLMR

SEQ ID NO: 159578 - protein, 7 aa, synthetic construct
YMKERMH

SEQ ID NO: 159579 - protein, 7 aa, synthetic construct
SPKIPLS

SEQ ID NO: 159580 - protein, 7 aa, synthetic construct
SANRDQK

SEQ ID NO: 159581 - protein, 7 aa, synthetic construct
TGSDRQK

SEQ ID NO: 159582 - protein, 7 aa, synthetic construct
QKHADKI

SEQ ID NO: 159583 - protein, 7 aa, synthetic construct
KLKEWES

SEQ ID NO: 159584 - protein, 7 aa, synthetic construct
KNMDSKM

SEQ ID NO: 159585 - protein, 7 aa, synthetic construct
STHHQKA

SEQ ID NO: 159586 - protein, 7 aa, synthetic construct
AQMGLKG

SEQ ID NO: 159587 - protein, 7 aa, synthetic construct
DRLAMQK

SEQ ID NO: 159588 - protein, 7 aa, synthetic construct
VNQHNLK

SEQ ID NO: 159589 - protein, 7 aa, synthetic construct
NTHYQNM

SEQ ID NO: 159590 - protein, 7 aa, synthetic construct
MAQMTKF

SEQ ID NO: 159591 - protein, 7 aa, synthetic construct
ANDKSVR

SEQ ID NO: 159592 - protein, 7 aa, synthetic construct
LKDKITW

SEQ ID NO: 159593 - protein, 7 aa, synthetic construct
KYAQGSL

SEQ ID NO: 159594 - protein, 7 aa, synthetic construct
GMQLNSR

SEQ ID NO: 159595 - protein, 7 aa, synthetic construct
KHANVQL

SEQ ID NO: 159596 - protein, 7 aa, synthetic construct
IHARLDQ

SEQ ID NO: 159597 - protein, 7 aa, synthetic construct
PASAIDM

SEQ ID NO: 159598 - protein, 7 aa, synthetic construct
MIALHDH

SEQ ID NO: 159599 - protein, 7 aa, synthetic construct
LHETTTY

SEQ ID NO: 159600 - protein, 7 aa, synthetic construct
QHKDIPK

SEQ ID NO: 159601 - protein, 7 aa, synthetic construct
YVKELTR

SEQ ID NO: 159602 - protein, 7 aa, synthetic construct
SYEMHGK

SEQ ID NO: 159603 - protein, 7 aa, synthetic construct
HMYNSLD

SEQ ID NO: 159604 - protein, 7 aa, synthetic construct
GTYLAGH

SEQ ID NO: 159605 - protein, 7 aa, synthetic construct
PLLQTDD

SEQ ID NO: 159606 - protein, 7 aa, synthetic construct
HVVTGPK

SEQ ID NO: 159607 - protein, 7 aa, synthetic construct
QYLGSAK

SEQ ID NO: 159608 - protein, 7 aa, synthetic construct
QNANAVR

SEQ ID NO: 159609 - protein, 7 aa, synthetic construct
INHMMNK

SEQ ID NO: 159610 - protein, 7 aa, synthetic construct
SGSATPR

SEQ ID NO: 159611 - protein, 7 aa, synthetic construct
AKISDKD

SEQ ID NO: 159612 - protein, 7 aa, synthetic construct
APTMQDP

SEQ ID NO: 159613 - protein, 7 aa, synthetic construct
KPLASER

SEQ ID NO: 159614 - protein, 7 aa, synthetic construct
ARDSSSR

SEQ ID NO: 159615 - protein, 7 aa, synthetic construct
HTAGNKQ

SEQ ID NO: 159616 - protein, 7 aa, synthetic construct
PIAKSNN

SEQ ID NO: 159617 - protein, 7 aa, synthetic construct
GAQYSTQ

SEQ ID NO: 159618 - protein, 7 aa, synthetic construct
WVLNGQT

SEQ ID NO: 159619 - protein, 7 aa, synthetic construct
SNFANKA

SEQ ID NO: 159620 - protein, 7 aa, synthetic construct
HLETVSQ

SEQ ID NO: 159621 - protein, 7 aa, synthetic construct
HVKATDK

SEQ ID NO: 159622 - protein, 7 aa, synthetic construct
KGEPPRQ

SEQ ID NO: 159623 - protein, 7 aa, synthetic construct
VDHHNYV

SEQ ID NO: 159624 - protein, 7 aa, synthetic construct
SQSGPQR

SEQ ID NO: 159625 - protein, 7 aa, synthetic construct
VFKEVQK

SEQ ID NO: 159626 - protein, 7 aa, synthetic construct
HQSMMNK

SEQ ID NO: 159627 - protein, 7 aa, synthetic construct
DKMTQNR

SEQ ID NO: 159628 - protein, 7 aa, synthetic construct
MSMNASK

SEQ ID NO: 159629 - protein, 7 aa, synthetic construct
QVSREIK

SEQ ID NO: 159630 - protein, 7 aa, synthetic construct
MMQDPYD

SEQ ID NO: 159631 - protein, 7 aa, synthetic construct
AHGVNKS

SEQ ID NO: 159632 - protein, 7 aa, synthetic construct
RSPTLDK

SEQ ID NO: 159633 - protein, 7 aa, synthetic construct
IQIRMAE

SEQ ID NO: 159634 - protein, 7 aa, synthetic construct
DNERHSM

SEQ ID NO: 159635 - protein, 7 aa, synthetic construct
YQQHMPD

SEQ ID NO: 159636 - protein, 7 aa, synthetic construct
KVTQHLN

SEQ ID NO: 159637 - protein, 7 aa, synthetic construct
GQHQSSK

SEQ ID NO: 159638 - protein, 7 aa, synthetic construct
RGTPVTL

SEQ ID NO: 159639 - protein, 7 aa, synthetic construct
KLERNSQ

SEQ ID NO: 159640 - protein, 7 aa, synthetic construct
SIQHNRI

SEQ ID NO: 159641 - protein, 7 aa, synthetic construct
ESKGLAK

SEQ ID NO: 159642 - protein, 7 aa, synthetic construct
ARTDRDK

SEQ ID NO: 159643 - protein, 7 aa, synthetic construct
ISSDASI

SEQ ID NO: 159644 - protein, 7 aa, synthetic construct
AQNQNHK

SEQ ID NO: 159645 - protein, 7 aa, synthetic construct
SYKPNMQ

SEQ ID NO: 159646 - protein, 7 aa, synthetic construct
QSYAGSQ

SEQ ID NO: 159647 - protein, 7 aa, synthetic construct
VKVPTMV

SEQ ID NO: 159648 - protein, 7 aa, synthetic construct
VNEIMSS

SEQ ID NO: 159649 - protein, 7 aa, synthetic construct
KTHSQHS

SEQ ID NO: 159650 - protein, 7 aa, synthetic construct
VPKENYR

SEQ ID NO: 159651 - protein, 7 aa, synthetic construct
YRKDIGQ

SEQ ID NO: 159652 - protein, 7 aa, synthetic construct
KQQGNPH

SEQ ID NO: 159653 - protein, 7 aa, synthetic construct
GGAHMNK

SEQ ID NO: 159654 - protein, 7 aa, synthetic construct
NHAYEKI

SEQ ID NO: 159655 - protein, 7 aa, synthetic construct
GASPGGR

SEQ ID NO: 159656 - protein, 7 aa, synthetic construct
HGQNITK

SEQ ID NO: 159657 - protein, 7 aa, synthetic construct
HFDQETG

SEQ ID NO: 159658 - protein, 7 aa, synthetic construct
NHDEKRS

SEQ ID NO: 159659 - protein, 7 aa, synthetic construct
SNIPKVE

SEQ ID NO: 159660 - protein, 7 aa, synthetic construct
HKIQGLT

SEQ ID NO: 159661 - protein, 7 aa, synthetic construct
AMRDSVK

SEQ ID NO: 159662 - protein, 7 aa, synthetic construct
MFNEVTN

SEQ ID NO: 159663 - protein, 7 aa, synthetic construct
LLVHNGR

SEQ ID NO: 159664 - protein, 7 aa, synthetic construct
LADNRLK

SEQ ID NO: 159665 - protein, 7 aa, synthetic construct
TSNTGHR

SEQ ID NO: 159666 - protein, 7 aa, synthetic construct
QKNAEKY

SEQ ID NO: 159667 - protein, 7 aa, synthetic construct
ENAIRFP

SEQ ID NO: 159668 - protein, 7 aa, synthetic construct
NSSGNSR

SEQ ID NO: 159669 - protein, 7 aa, synthetic construct
YRKDAVM

SEQ ID NO: 159670 - protein, 7 aa, synthetic construct
IYEYATA

SEQ ID NO: 159671 - protein, 7 aa, synthetic construct
ANQQAFK

SEQ ID NO: 159672 - protein, 7 aa, synthetic construct
MKDLIGR

SEQ ID NO: 159673 - protein, 7 aa, synthetic construct
HVPSTDL

SEQ ID NO: 159674 - protein, 7 aa, synthetic construct
TGGFTPK

SEQ ID NO: 159675 - protein, 7 aa, synthetic construct
PVKPHNY

SEQ ID NO: 159676 - protein, 7 aa, synthetic construct
FGVSQGK

SEQ ID NO: 159677 - protein, 7 aa, synthetic construct
KGQAFNM

SEQ ID NO: 159678 - protein, 7 aa, synthetic construct
NVFGIPK

SEQ ID NO: 159679 - protein, 7 aa, synthetic construct
IEMRSQK

SEQ ID NO: 159680 - protein, 7 aa, synthetic construct
RQNNGSQ

SEQ ID NO: 159681 - protein, 7 aa, synthetic construct
NKRQDFE

SEQ ID NO: 159682 - protein, 7 aa, synthetic construct
LHAGTSR

SEQ ID NO: 159683 - protein, 7 aa, synthetic construct
AKHINIL

SEQ ID NO: 159684 - protein, 7 aa, synthetic construct
LMKDQFR

SEQ ID NO: 159685 - protein, 7 aa, synthetic construct
NSSQRDK

SEQ ID NO: 159686 - protein, 7 aa, synthetic construct
NEKNKSW

SEQ ID NO: 159687 - protein, 7 aa, synthetic construct
QQTYSAM

SEQ ID NO: 159688 - protein, 7 aa, synthetic construct
KNSPTSF

SEQ ID NO: 159689 - protein, 7 aa, synthetic construct
EQAKVKG

SEQ ID NO: 159690 - protein, 7 aa, synthetic construct
GTVQYKF

SEQ ID NO: 159691 - protein, 7 aa, synthetic construct
SQQARGM

SEQ ID NO: 159692 - protein, 7 aa, synthetic construct
NPVYTKG

SEQ ID NO: 159693 - protein, 7 aa, synthetic construct
ASQNRMM

SEQ ID NO: 159694 - protein, 7 aa, synthetic construct
MYKTLGP

SEQ ID NO: 159695 - protein, 7 aa, synthetic construct
SQKIMDR

SEQ ID NO: 159696 - protein, 7 aa, synthetic construct
EKFQSSK

SEQ ID NO: 159697 - protein, 7 aa, synthetic construct
ASFQQQK

SEQ ID NO: 159698 - protein, 7 aa, synthetic construct
VNTGNAE

SEQ ID NO: 159699 - protein, 7 aa, synthetic construct
DEHRNHK

SEQ ID NO: 159700 - protein, 7 aa, synthetic construct
DKPKILI

SEQ ID NO: 159701 - protein, 7 aa, synthetic construct
HKMVFKD

SEQ ID NO: 159702 - protein, 7 aa, synthetic construct
HRDRMTH

SEQ ID NO: 159703 - protein, 7 aa, synthetic construct
KMENINR

SEQ ID NO: 159704 - protein, 7 aa, synthetic construct
KNSGPFV

SEQ ID NO: 159705 - protein, 7 aa, synthetic construct
KRPEQMT

SEQ ID NO: 159706 - protein, 7 aa, synthetic construct
KSAPFPV

SEQ ID NO: 159707 - protein, 7 aa, synthetic construct
LARPQGF

SEQ ID NO: 159708 - protein, 7 aa, synthetic construct
MAKPAAW

SEQ ID NO: 159709 - protein, 7 aa, synthetic construct
NMSGKDR

SEQ ID NO: 159710 - protein, 7 aa, synthetic construct
QFKPLGT

SEQ ID NO: 159711 - protein, 7 aa, synthetic construct
QVREKYM

SEQ ID NO: 159712 - protein, 7 aa, synthetic construct
STLKPQY

SEQ ID NO: 159713 - protein, 7 aa, synthetic construct
TFQKPSM

SEQ ID NO: 159714 - protein, 7 aa, synthetic construct
TKEDRFK

SEQ ID NO: 159715 - protein, 7 aa, synthetic construct
VDKSPMG

SEQ ID NO: 159716 - protein, 7 aa, synthetic construct
VHHTLKG

SEQ ID NO: 159717 - protein, 7 aa, synthetic construct
YFTKERP

SEQ ID NO: 159718 - protein, 7 aa, synthetic construct
YKPTQPM

SEQ ID NO: 159719 - protein, 7 aa, synthetic construct
YSAIKHN

SEQ ID NO: 159720 - protein, 7 aa, synthetic construct
AAASSNN

SEQ ID NO: 159721 - protein, 7 aa, synthetic construct
AASANIY

SEQ ID NO: 159722 - protein, 7 aa, synthetic construct
ADRDFRM

SEQ ID NO: 159723 - protein, 7 aa, synthetic construct
ADSMRMT

SEQ ID NO: 159724 - protein, 7 aa, synthetic construct
ADTDRIM

SEQ ID NO: 159725 - protein, 7 aa, synthetic construct
AEGTAGM

SEQ ID NO: 159726 - protein, 7 aa, synthetic construct
AENKNVV

SEQ ID NO: 159727 - protein, 7 aa, synthetic construct
AEPKYRL

SEQ ID NO: 159728 - protein, 7 aa, synthetic construct
AFMDQQS

SEQ ID NO: 159729 - protein, 7 aa, synthetic construct
AGDPIKQ

SEQ ID NO: 159730 - protein, 7 aa, synthetic construct
AGHPQMF

SEQ ID NO: 159731 - protein, 7 aa, synthetic construct
AGLKDYI

SEQ ID NO: 159732 - protein, 7 aa, synthetic construct
AHDVAPI

SEQ ID NO: 159733 - protein, 7 aa, synthetic construct
AHNEYPN

SEQ ID NO: 159734 - protein, 7 aa, synthetic construct
AHQERGF

SEQ ID NO: 159735 - protein, 7 aa, synthetic construct
AIHQTQI

SEQ ID NO: 159736 - protein, 7 aa, synthetic construct
AIRDGDR

SEQ ID NO: 159737 - protein, 7 aa, synthetic construct
AIVAGLN

SEQ ID NO: 159738 - protein, 7 aa, synthetic construct
AKVMAGD

SEQ ID NO: 159739 - protein, 7 aa, synthetic construct
ALANQDK

SEQ ID NO: 159740 - protein, 7 aa, synthetic construct
AMMEYGK

SEQ ID NO: 159741 - protein, 7 aa, synthetic construct
AMQTNGP

SEQ ID NO: 159742 - protein, 7 aa, synthetic construct
AMREGVV

SEQ ID NO: 159743 - protein, 7 aa, synthetic construct
AMVLKEP

SEQ ID NO: 159744 - protein, 7 aa, synthetic construct
ANAHNLN

SEQ ID NO: 159745 - protein, 7 aa, synthetic construct
ANALQAR

SEQ ID NO: 159746 - protein, 7 aa, synthetic construct
ANAPKEM

SEQ ID NO: 159747 - protein, 7 aa, synthetic construct
ANINPKQ

SEQ ID NO: 159748 - protein, 7 aa, synthetic construct
ANSHIEM

SEQ ID NO: 159749 - protein, 7 aa, synthetic construct
ANWENRP

SEQ ID NO: 159750 - protein, 7 aa, synthetic construct
APVTHNA

SEQ ID NO: 159751 - protein, 7 aa, synthetic construct
AQNKPEK

SEQ ID NO: 159752 - protein, 7 aa, synthetic construct
AQQHLGM

SEQ ID NO: 159753 - protein, 7 aa, synthetic construct
ARDMEHH

SEQ ID NO: 159754 - protein, 7 aa, synthetic construct
ARNADEL

SEQ ID NO: 159755 - protein, 7 aa, synthetic construct
ASESADR

SEQ ID NO: 159756 - protein, 7 aa, synthetic construct
ASMALEI

SEQ ID NO: 159757 - protein, 7 aa, synthetic construct
ASNHDNR

SEQ ID NO: 159758 - protein, 7 aa, synthetic construct
ASQGGHP

SEQ ID NO: 159759 - protein, 7 aa, synthetic construct
ATERDSW

SEQ ID NO: 159760 - protein, 7 aa, synthetic construct
ATGDRAW

SEQ ID NO: 159761 - protein, 7 aa, synthetic construct
ATIENRH

SEQ ID NO: 159762 - protein, 7 aa, synthetic construct
ATNNPPK

SEQ ID NO: 159763 - protein, 7 aa, synthetic construct
ATQLAKL

SEQ ID NO: 159764 - protein, 7 aa, synthetic construct
AVWSAAE

SEQ ID NO: 159765 - protein, 7 aa, synthetic construct
AWHGGET

SEQ ID NO: 159766 - protein, 7 aa, synthetic construct
AYREQQN

SEQ ID NO: 159767 - protein, 7 aa, synthetic construct
CETSNCI

SEQ ID NO: 159768 - protein, 7 aa, synthetic construct
DAAKGVW

SEQ ID NO: 159769 - protein, 7 aa, synthetic construct
DAKKADR

SEQ ID NO: 159770 - protein, 7 aa, synthetic construct
DATMRPM

SEQ ID NO: 159771 - protein, 7 aa, synthetic construct
DEKINMA

SEQ ID NO: 159772 - protein, 7 aa, synthetic construct
DGGTLRF

SEQ ID NO: 159773 - protein, 7 aa, synthetic construct
DGSRNSD

SEQ ID NO: 159774 - protein, 7 aa, synthetic construct
DGTVNMV

SEQ ID NO: 159775 - protein, 7 aa, synthetic construct
DHATFRE

SEQ ID NO: 159776 - protein, 7 aa, synthetic construct
DHSPKYH

SEQ ID NO: 159777 - protein, 7 aa, synthetic construct
DIINMRK

SEQ ID NO: 159778 - protein, 7 aa, synthetic construct
DITGPQM

SEQ ID NO: 159779 - protein, 7 aa, synthetic construct
DKDIHVS

SEQ ID NO: 159780 - protein, 7 aa, synthetic construct
DKDPRNM

SEQ ID NO: 159781 - protein, 7 aa, synthetic construct
DKMGVIF

SEQ ID NO: 159782 - protein, 7 aa, synthetic construct
DLEVRLG

SEQ ID NO: 159783 - protein, 7 aa, synthetic construct
DLVVHRN

SEQ ID NO: 159784 - protein, 7 aa, synthetic construct
DMHNPSN

SEQ ID NO: 159785 - protein, 7 aa, synthetic construct
DNDPMRA

SEQ ID NO: 159786 - protein, 7 aa, synthetic construct
DNEHKSQ

SEQ ID NO: 159787 - protein, 7 aa, synthetic construct
DNHHVLG

SEQ ID NO: 159788 - protein, 7 aa, synthetic construct
DNPVYVA

SEQ ID NO: 159789 - protein, 7 aa, synthetic construct
DNRDAFA

SEQ ID NO: 159790 - protein, 7 aa, synthetic construct
DPKAPHR

SEQ ID NO: 159791 - protein, 7 aa, synthetic construct
DPNIPTY

SEQ ID NO: 159792 - protein, 7 aa, synthetic construct
DPQTSSY

SEQ ID NO: 159793 - protein, 7 aa, synthetic construct
DQTLPVS

SEQ ID NO: 159794 - protein, 7 aa, synthetic construct
DQVTLAS

SEQ ID NO: 159795 - protein, 7 aa, synthetic construct
DRADPKV

SEQ ID NO: 159796 - protein, 7 aa, synthetic construct
DRAERVH

SEQ ID NO: 159797 - protein, 7 aa, synthetic construct
DRGPALD

SEQ ID NO: 159798 - protein, 7 aa, synthetic construct
DRGTLTF

SEQ ID NO: 159799 - protein, 7 aa, synthetic construct
DRTATEF

SEQ ID NO: 159800 - protein, 7 aa, synthetic construct
DSNRGET

SEQ ID NO: 159801 - protein, 7 aa, synthetic construct
DSQLAQS

SEQ ID NO: 159802 - protein, 7 aa, synthetic construct
DSSPSYP

SEQ ID NO: 159803 - protein, 7 aa, synthetic construct
DSVSSIP

SEQ ID NO: 159804 - protein, 7 aa, synthetic construct
DVQVHNK

SEQ ID NO: 159805 - protein, 7 aa, synthetic construct
DYQQIGS

SEQ ID NO: 159806 - protein, 7 aa, synthetic construct
EANKANS

SEQ ID NO: 159807 - protein, 7 aa, synthetic construct
EANTMYR

SEQ ID NO: 159808 - protein, 7 aa, synthetic construct
EAPLKGT

SEQ ID NO: 159809 - protein, 7 aa, synthetic construct
EENMKFA

SEQ ID NO: 159810 - protein, 7 aa, synthetic construct
EFAEHKF

SEQ ID NO: 159811 - protein, 7 aa, synthetic construct
EFQDHHS

SEQ ID NO: 159812 - protein, 7 aa, synthetic construct
EFSTQHP

SEQ ID NO: 159813 - protein, 7 aa, synthetic construct
EGDPNRH

SEQ ID NO: 159814 - protein, 7 aa, synthetic construct
EGGHNPF

SEQ ID NO: 159815 - protein, 7 aa, synthetic construct
EGHTIAY

SEQ ID NO: 159816 - protein, 7 aa, synthetic construct
EGMVHHI

SEQ ID NO: 159817 - protein, 7 aa, synthetic construct
EGTIKDR

SEQ ID NO: 159818 - protein, 7 aa, synthetic construct
EHVTKKM

SEQ ID NO: 159819 - protein, 7 aa, synthetic construct
EIMNGSE

SEQ ID NO: 159820 - protein, 7 aa, synthetic construct
EKANLDS

SEQ ID NO: 159821 - protein, 7 aa, synthetic construct
EKGSNTL

SEQ ID NO: 159822 - protein, 7 aa, synthetic construct
EKHQYNT

SEQ ID NO: 159823 - protein, 7 aa, synthetic construct
EKVMDQV

SEQ ID NO: 159824 - protein, 7 aa, synthetic construct
ELGGQFG

SEQ ID NO: 159825 - protein, 7 aa, synthetic construct
ELTGKYI

SEQ ID NO: 159826 - protein, 7 aa, synthetic construct
EMQHLKE

SEQ ID NO: 159827 - protein, 7 aa, synthetic construct
ENHPATS

SEQ ID NO: 159828 - protein, 7 aa, synthetic construct
ENKPDYD

SEQ ID NO: 159829 - protein, 7 aa, synthetic construct
ENNHPLK

SEQ ID NO: 159830 - protein, 7 aa, synthetic construct
ENNQNHH

SEQ ID NO: 159831 - protein, 7 aa, synthetic construct
ENQAKGA

SEQ ID NO: 159832 - protein, 7 aa, synthetic construct
ENQPLYR

SEQ ID NO: 159833 - protein, 7 aa, synthetic construct
ENRSHYQ

SEQ ID NO: 159834 - protein, 7 aa, synthetic construct
ENVVLTA

SEQ ID NO: 159835 - protein, 7 aa, synthetic construct
EPVTADK

SEQ ID NO: 159836 - protein, 7 aa, synthetic construct
EQNYNSD

SEQ ID NO: 159837 - protein, 7 aa, synthetic construct
ERQSAMN

SEQ ID NO: 159838 - protein, 7 aa, synthetic construct
ERYAVQQ

SEQ ID NO: 159839 - protein, 7 aa, synthetic construct
ESRALTN

SEQ ID NO: 159840 - protein, 7 aa, synthetic construct
ESRAVAP

SEQ ID NO: 159841 - protein, 7 aa, synthetic construct
ETMHVRN

SEQ ID NO: 159842 - protein, 7 aa, synthetic construct
ETPVQKT

SEQ ID NO: 159843 - protein, 7 aa, synthetic construct
ETSLGKT

SEQ ID NO: 159844 - protein, 7 aa, synthetic construct
EVANLHR

SEQ ID NO: 159845 - protein, 7 aa, synthetic construct
EVINEKL

SEQ ID NO: 159846 - protein, 7 aa, synthetic construct
EVQKMDK

SEQ ID NO: 159847 - protein, 7 aa, synthetic construct
EVTRERA

SEQ ID NO: 159848 - protein, 7 aa, synthetic construct
EYSHHKS

SEQ ID NO: 159849 - protein, 7 aa, synthetic construct
FADLTQA

SEQ ID NO: 159850 - protein, 7 aa, synthetic construct
FAIGNME

SEQ ID NO: 159851 - protein, 7 aa, synthetic construct
FANNFIA

SEQ ID NO: 159852 - protein, 7 aa, synthetic construct
FENSASK

SEQ ID NO: 159853 - protein, 7 aa, synthetic construct
FETDQRA

SEQ ID NO: 159854 - protein, 7 aa, synthetic construct
FGSMYVD

SEQ ID NO: 159855 - protein, 7 aa, synthetic construct
FHEGNPA

SEQ ID NO: 159856 - protein, 7 aa, synthetic construct
FITNDNI

SEQ ID NO: 159857 - protein, 7 aa, synthetic construct
FKDTQDP

SEQ ID NO: 159858 - protein, 7 aa, synthetic construct
FKLNDDD

SEQ ID NO: 159859 - protein, 7 aa, synthetic construct
FMTAAEP

SEQ ID NO: 159860 - protein, 7 aa, synthetic construct
FNHQDTK

SEQ ID NO: 159861 - protein, 7 aa, synthetic construct
FNIDHNS

SEQ ID NO: 159862 - protein, 7 aa, synthetic construct
FNKHNTE

SEQ ID NO: 159863 - protein, 7 aa, synthetic construct
FNSDYPV

SEQ ID NO: 159864 - protein, 7 aa, synthetic construct
FNSYKYD

SEQ ID NO: 159865 - protein, 7 aa, synthetic construct
FQLNHEK

SEQ ID NO: 159866 - protein, 7 aa, synthetic construct
FVGEMPY

SEQ ID NO: 159867 - protein, 7 aa, synthetic construct
FYHTTDN

SEQ ID NO: 159868 - protein, 7 aa, synthetic construct
GADPMMR

SEQ ID NO: 159869 - protein, 7 aa, synthetic construct
GASDTSG

SEQ ID NO: 159870 - protein, 7 aa, synthetic construct
GDGGQRM

SEQ ID NO: 159871 - protein, 7 aa, synthetic construct
GDIQQAR

SEQ ID NO: 159872 - protein, 7 aa, synthetic construct
GDQNLTR

SEQ ID NO: 159873 - protein, 7 aa, synthetic construct
GDTHVGV

SEQ ID NO: 159874 - protein, 7 aa, synthetic construct
GEHLNSK

SEQ ID NO: 159875 - protein, 7 aa, synthetic construct
GFSDMKS

SEQ ID NO: 159876 - protein, 7 aa, synthetic construct
GGADYAM

SEQ ID NO: 159877 - protein, 7 aa, synthetic construct
GGTKDKG

SEQ ID NO: 159878 - protein, 7 aa, synthetic construct
GHDVMGF

SEQ ID NO: 159879 - protein, 7 aa, synthetic construct
GHREGYE

SEQ ID NO: 159880 - protein, 7 aa, synthetic construct
GHVQRLQ

SEQ ID NO: 159881 - protein, 7 aa, synthetic construct
GIHDRGI

SEQ ID NO: 159882 - protein, 7 aa, synthetic construct
GINFPST

SEQ ID NO: 159883 - protein, 7 aa, synthetic construct
GINNQMA

SEQ ID NO: 159884 - protein, 7 aa, synthetic construct
GINREMY

SEQ ID NO: 159885 - protein, 7 aa, synthetic construct
GITSVTE

SEQ ID NO: 159886 - protein, 7 aa, synthetic construct
GKNMQNG

SEQ ID NO: 159887 - protein, 7 aa, synthetic construct
GKNSTSV

SEQ ID NO: 159888 - protein, 7 aa, synthetic construct
GKSYEEH

SEQ ID NO: 159889 - protein, 7 aa, synthetic construct
GLHGTPV

SEQ ID NO: 159890 - protein, 7 aa, synthetic construct
GLRKDEV

SEQ ID NO: 159891 - protein, 7 aa, synthetic construct
GMGAVIH

SEQ ID NO: 159892 - protein, 7 aa, synthetic construct
GMPNAEN

SEQ ID NO: 159893 - protein, 7 aa, synthetic construct
GMQHTSE

SEQ ID NO: 159894 - protein, 7 aa, synthetic construct
GMSSNLK

SEQ ID NO: 159895 - protein, 7 aa, synthetic construct
GNARNNI

SEQ ID NO: 159896 - protein, 7 aa, synthetic construct
GNDRYVH

SEQ ID NO: 159897 - protein, 7 aa, synthetic construct
GNHNIIT

SEQ ID NO: 159898 - protein, 7 aa, synthetic construct
GNSLVSV

SEQ ID NO: 159899 - protein, 7 aa, synthetic construct
GNTKHGQ

SEQ ID NO: 159900 - protein, 7 aa, synthetic construct
GNTTMTH

SEQ ID NO: 159901 - protein, 7 aa, synthetic construct
GPGNMPK

SEQ ID NO: 159902 - protein, 7 aa, synthetic construct
GPSLMQA

SEQ ID NO: 159903 - protein, 7 aa, synthetic construct
GPSNQYE

SEQ ID NO: 159904 - protein, 7 aa, synthetic construct
GQAGYQP

SEQ ID NO: 159905 - protein, 7 aa, synthetic construct
GQGPIQS

SEQ ID NO: 159906 - protein, 7 aa, synthetic construct
GQIDAHY

SEQ ID NO: 159907 - protein, 7 aa, synthetic construct
GQKLEGI

SEQ ID NO: 159908 - protein, 7 aa, synthetic construct
GQPKPPE

SEQ ID NO: 159909 - protein, 7 aa, synthetic construct
GQYEMPA

SEQ ID NO: 159910 - protein, 7 aa, synthetic construct
GRTPEDM

SEQ ID NO: 159911 - protein, 7 aa, synthetic construct
GRVNQEA

SEQ ID NO: 159912 - protein, 7 aa, synthetic construct
GRYGQNE

SEQ ID NO: 159913 - protein, 7 aa, synthetic construct
GSALPAF

SEQ ID NO: 159914 - protein, 7 aa, synthetic construct
GSGDWHP

SEQ ID NO: 159915 - protein, 7 aa, synthetic construct
GSGSAEH

SEQ ID NO: 159916 - protein, 7 aa, synthetic construct
GSNSKMA

SEQ ID NO: 159917 - protein, 7 aa, synthetic construct
GSSDAGG

SEQ ID NO: 159918 - protein, 7 aa, synthetic construct
GSVQHMS

SEQ ID NO: 159919 - protein, 7 aa, synthetic construct
GTGPLTQ

SEQ ID NO: 159920 - protein, 7 aa, synthetic construct
GTGRWPD

SEQ ID NO: 159921 - protein, 7 aa, synthetic construct
GTHESLW

SEQ ID NO: 159922 - protein, 7 aa, synthetic construct
GTMAHML

SEQ ID NO: 159923 - protein, 7 aa, synthetic construct
GVIAHGQ

SEQ ID NO: 159924 - protein, 7 aa, synthetic construct
GVLHNTT

SEQ ID NO: 159925 - protein, 7 aa, synthetic construct
GYHYDKG

SEQ ID NO: 159926 - protein, 7 aa, synthetic construct
GYINTHA

SEQ ID NO: 159927 - protein, 7 aa, synthetic construct
GYSQEVS

SEQ ID NO: 159928 - protein, 7 aa, synthetic construct
GYVYDNP

SEQ ID NO: 159929 - protein, 7 aa, synthetic construct
HADYQRE

SEQ ID NO: 159930 - protein, 7 aa, synthetic construct
HAGDTGV

SEQ ID NO: 159931 - protein, 7 aa, synthetic construct
HDDLQRP

SEQ ID NO: 159932 - protein, 7 aa, synthetic construct
HDLRERE

SEQ ID NO: 159933 - protein, 7 aa, synthetic construct
HDMSLPR

SEQ ID NO: 159934 - protein, 7 aa, synthetic construct
HDQTVQY

SEQ ID NO: 159935 - protein, 7 aa, synthetic construct
HEDHLGW

SEQ ID NO: 159936 - protein, 7 aa, synthetic construct
HERNSTG

SEQ ID NO: 159937 - protein, 7 aa, synthetic construct
HGDLVKV

SEQ ID NO: 159938 - protein, 7 aa, synthetic construct
HGDQLAY

SEQ ID NO: 159939 - protein, 7 aa, synthetic construct
HGGQPAL

SEQ ID NO: 159940 - protein, 7 aa, synthetic construct
HGYGHDM

SEQ ID NO: 159941 - protein, 7 aa, synthetic construct
HGYGPPH

SEQ ID NO: 159942 - protein, 7 aa, synthetic construct
HHGMMSG

SEQ ID NO: 159943 - protein, 7 aa, synthetic construct
HHVKQMY

SEQ ID NO: 159944 - protein, 7 aa, synthetic construct
HIMSGNS

SEQ ID NO: 159945 - protein, 7 aa, synthetic construct
HIMSSDK

SEQ ID NO: 159946 - protein, 7 aa, synthetic construct
HIYSADM

SEQ ID NO: 159947 - protein, 7 aa, synthetic construct
HKDDATI

SEQ ID NO: 159948 - protein, 7 aa, synthetic construct
HKDGTAQ

SEQ ID NO: 159949 - protein, 7 aa, synthetic construct
HKNVEDH

SEQ ID NO: 159950 - protein, 7 aa, synthetic construct
HLAKDAV

SEQ ID NO: 159951 - protein, 7 aa, synthetic construct
HLTHEIG

SEQ ID NO: 159952 - protein, 7 aa, synthetic construct
HMANPHK

SEQ ID NO: 159953 - protein, 7 aa, synthetic construct
HMDLGNS

SEQ ID NO: 159954 - protein, 7 aa, synthetic construct
HMEANRL

SEQ ID NO: 159955 - protein, 7 aa, synthetic construct
HMGNKGQ

SEQ ID NO: 159956 - protein, 7 aa, synthetic construct
HNEKMKW

SEQ ID NO: 159957 - protein, 7 aa, synthetic construct
HNLHTGL

SEQ ID NO: 159958 - protein, 7 aa, synthetic construct
HNMAGNN

SEQ ID NO: 159959 - protein, 7 aa, synthetic construct
HNMEHDA

SEQ ID NO: 159960 - protein, 7 aa, synthetic construct
HNNIEKR

SEQ ID NO: 159961 - protein, 7 aa, synthetic construct
HNQNITW

SEQ ID NO: 159962 - protein, 7 aa, synthetic construct
HQGLDRF

SEQ ID NO: 159963 - protein, 7 aa, synthetic construct
HQNSTSE

SEQ ID NO: 159964 - protein, 7 aa, synthetic construct
HQTHLLT

SEQ ID NO: 159965 - protein, 7 aa, synthetic construct
HRNDMYP

SEQ ID NO: 159966 - protein, 7 aa, synthetic construct
HRQFSTQ

SEQ ID NO: 159967 - protein, 7 aa, synthetic construct
HRVSMDY

SEQ ID NO: 159968 - protein, 7 aa, synthetic construct
HSASQKF

SEQ ID NO: 159969 - protein, 7 aa, synthetic construct
HSPPNSK

SEQ ID NO: 159970 - protein, 7 aa, synthetic construct
HSQQPGQ

SEQ ID NO: 159971 - protein, 7 aa, synthetic construct
HSTAVQQ

SEQ ID NO: 159972 - protein, 7 aa, synthetic construct
HTAQSRY

SEQ ID NO: 159973 - protein, 7 aa, synthetic construct
HTSMPKA

SEQ ID NO: 159974 - protein, 7 aa, synthetic construct
HTVDKHV

SEQ ID NO: 159975 - protein, 7 aa, synthetic construct
HVGWGDK

SEQ ID NO: 159976 - protein, 7 aa, synthetic construct
HWDGKES

SEQ ID NO: 159977 - protein, 7 aa, synthetic construct
HWDSERV

SEQ ID NO: 159978 - protein, 7 aa, synthetic construct
IAGYKEW

SEQ ID NO: 159979 - protein, 7 aa, synthetic construct
IDDHNYK

SEQ ID NO: 159980 - protein, 7 aa, synthetic construct
IDLIKHS

SEQ ID NO: 159981 - protein, 7 aa, synthetic construct
IDNTLQD

SEQ ID NO: 159982 - protein, 7 aa, synthetic construct
IFATGGP

SEQ ID NO: 159983 - protein, 7 aa, synthetic construct
IGKEFMH

SEQ ID NO: 159984 - protein, 7 aa, synthetic construct
IGNIEGK

SEQ ID NO: 159985 - protein, 7 aa, synthetic construct
IGQYEAP

SEQ ID NO: 159986 - protein, 7 aa, synthetic construct
IGTVEPW

SEQ ID NO: 159987 - protein, 7 aa, synthetic construct
IHDGLKE

SEQ ID NO: 159988 - protein, 7 aa, synthetic construct
IIEKGDI

SEQ ID NO: 159989 - protein, 7 aa, synthetic construct
IIGHIQG

SEQ ID NO: 159990 - protein, 7 aa, synthetic construct
IKRNFNE

SEQ ID NO: 159991 - protein, 7 aa, synthetic construct
ILMGEKQ

SEQ ID NO: 159992 - protein, 7 aa, synthetic construct
IMALDSP

SEQ ID NO: 159993 - protein, 7 aa, synthetic construct
IMATGSS

SEQ ID NO: 159994 - protein, 7 aa, synthetic construct
INNDWSR

SEQ ID NO: 159995 - protein, 7 aa, synthetic construct
INPNEVM

SEQ ID NO: 159996 - protein, 7 aa, synthetic construct
INREQEV

SEQ ID NO: 159997 - protein, 7 aa, synthetic construct
INSAAEH

SEQ ID NO: 159998 - protein, 7 aa, synthetic construct
INSNRMV

SEQ ID NO: 159999 - protein, 7 aa, synthetic construct
INTTYQF

SEQ ID NO: 160000 - protein, 7 aa, synthetic construct
IPEIGVL

SEQ ID NO: 160001 - protein, 7 aa, synthetic construct
IPKHRDE

SEQ ID NO: 160002 - protein, 7 aa, synthetic construct
IQDPNIF

SEQ ID NO: 160003 - protein, 7 aa, synthetic construct
IQNTGDP

SEQ ID NO: 160004 - protein, 7 aa, synthetic construct
IRREGMQ

SEQ ID NO: 160005 - protein, 7 aa, synthetic construct
IRSGDDA

SEQ ID NO: 160006 - protein, 7 aa, synthetic construct
ITAYETD

SEQ ID NO: 160007 - protein, 7 aa, synthetic construct
IVANVPK

SEQ ID NO: 160008 - protein, 7 aa, synthetic construct
IVHTTTL

SEQ ID NO: 160009 - protein, 7 aa, synthetic construct
IVVMEKS

SEQ ID NO: 160010 - protein, 7 aa, synthetic construct
KADFREK

SEQ ID NO: 160011 - protein, 7 aa, synthetic construct
KASTGSA

SEQ ID NO: 160012 - protein, 7 aa, synthetic construct
KAYQFQD

SEQ ID NO: 160013 - protein, 7 aa, synthetic construct
KDDHNEK

SEQ ID NO: 160014 - protein, 7 aa, synthetic construct
KDLEGRK

SEQ ID NO: 160015 - protein, 7 aa, synthetic construct
KDMPMGI

SEQ ID NO: 160016 - protein, 7 aa, synthetic construct
KDTTAFH

SEQ ID NO: 160017 - protein, 7 aa, synthetic construct
KDYPMNA

SEQ ID NO: 160018 - protein, 7 aa, synthetic construct
KEDQNFP

SEQ ID NO: 160019 - protein, 7 aa, synthetic construct
KEELSGF

SEQ ID NO: 160020 - protein, 7 aa, synthetic construct
KEKEGIW

SEQ ID NO: 160021 - protein, 7 aa, synthetic construct
KFDVNDY

SEQ ID NO: 160022 - protein, 7 aa, synthetic construct
KGEGMWD

SEQ ID NO: 160023 - protein, 7 aa, synthetic construct
KGHPEHL

SEQ ID NO: 160024 - protein, 7 aa, synthetic construct
KHAEEEN

SEQ ID NO: 160025 - protein, 7 aa, synthetic construct
KHHPDNN

SEQ ID NO: 160026 - protein, 7 aa, synthetic construct
KHKEHND

SEQ ID NO: 160027 - protein, 7 aa, synthetic construct
KHQNGDQ

SEQ ID NO: 160028 - protein, 7 aa, synthetic construct
KHSSDEQ

SEQ ID NO: 160029 - protein, 7 aa, synthetic construct
KISSDTD

SEQ ID NO: 160030 - protein, 7 aa, synthetic construct
KKMDWTD

SEQ ID NO: 160031 - protein, 7 aa, synthetic construct
KMKHQYE

SEQ ID NO: 160032 - protein, 7 aa, synthetic construct
KMVNNGA

SEQ ID NO: 160033 - protein, 7 aa, synthetic construct
KNEGGFR

SEQ ID NO: 160034 - protein, 7 aa, synthetic construct
KNEQQVV

SEQ ID NO: 160035 - protein, 7 aa, synthetic construct
KPGATNA

SEQ ID NO: 160036 - protein, 7 aa, synthetic construct
KPMVEHD

SEQ ID NO: 160037 - protein, 7 aa, synthetic construct
KPNDRVG

SEQ ID NO: 160038 - protein, 7 aa, synthetic construct
KPNSAMA

SEQ ID NO: 160039 - protein, 7 aa, synthetic construct
KPNVGAH

SEQ ID NO: 160040 - protein, 7 aa, synthetic construct
KPQIDNI

SEQ ID NO: 160041 - protein, 7 aa, synthetic construct
KPTATSS

SEQ ID NO: 160042 - protein, 7 aa, synthetic construct
KQDGEQY

SEQ ID NO: 160043 - protein, 7 aa, synthetic construct
KQGDPIY

SEQ ID NO: 160044 - protein, 7 aa, synthetic construct
KQPEAQL

SEQ ID NO: 160045 - protein, 7 aa, synthetic construct
KQQVVDP

SEQ ID NO: 160046 - protein, 7 aa, synthetic construct
KQSAKEP

SEQ ID NO: 160047 - protein, 7 aa, synthetic construct
KRETGFA

SEQ ID NO: 160048 - protein, 7 aa, synthetic construct
KSNSNQV

SEQ ID NO: 160049 - protein, 7 aa, synthetic construct
KTLEAAY

SEQ ID NO: 160050 - protein, 7 aa, synthetic construct
KTNSSTA

SEQ ID NO: 160051 - protein, 7 aa, synthetic construct
KTQDMII

SEQ ID NO: 160052 - protein, 7 aa, synthetic construct
KVKDTDF

SEQ ID NO: 160053 - protein, 7 aa, synthetic construct
KVNNHAP

SEQ ID NO: 160054 - protein, 7 aa, synthetic construct
KVQDRMQ

SEQ ID NO: 160055 - protein, 7 aa, synthetic construct
LDSAVKG

SEQ ID NO: 160056 - protein, 7 aa, synthetic construct
LDYHRQH

SEQ ID NO: 160057 - protein, 7 aa, synthetic construct
LEGRMMT

SEQ ID NO: 160058 - protein, 7 aa, synthetic construct
LEVRYGH

SEQ ID NO: 160059 - protein, 7 aa, synthetic construct
LFDGQKF

SEQ ID NO: 160060 - protein, 7 aa, synthetic construct
LGSQAHH

SEQ ID NO: 160061 - protein, 7 aa, synthetic construct
LHAGAYT

SEQ ID NO: 160062 - protein, 7 aa, synthetic construct
LHGQQTF

SEQ ID NO: 160063 - protein, 7 aa, synthetic construct
LHMVGME

SEQ ID NO: 160064 - protein, 7 aa, synthetic construct
LIHSDQG

SEQ ID NO: 160065 - protein, 7 aa, synthetic construct
LKEHDNM

SEQ ID NO: 160066 - protein, 7 aa, synthetic construct
LLTQAGK

SEQ ID NO: 160067 - protein, 7 aa, synthetic construct
LLVNHQA

SEQ ID NO: 160068 - protein, 7 aa, synthetic construct
LNDDANR

SEQ ID NO: 160069 - protein, 7 aa, synthetic construct
LNDGLLP

SEQ ID NO: 160070 - protein, 7 aa, synthetic construct
LNFGHED

SEQ ID NO: 160071 - protein, 7 aa, synthetic construct
LNHVSKL

SEQ ID NO: 160072 - protein, 7 aa, synthetic construct
LNPGSQG

SEQ ID NO: 160073 - protein, 7 aa, synthetic construct
LNYTEHK

SEQ ID NO: 160074 - protein, 7 aa, synthetic construct
LPDKALA

SEQ ID NO: 160075 - protein, 7 aa, synthetic construct
LPEPRQP

SEQ ID NO: 160076 - protein, 7 aa, synthetic construct
LPGADHA

SEQ ID NO: 160077 - protein, 7 aa, synthetic construct
LPHMSDQ

SEQ ID NO: 160078 - protein, 7 aa, synthetic construct
LPNYHYE

SEQ ID NO: 160079 - protein, 7 aa, synthetic construct
LQALPNY

SEQ ID NO: 160080 - protein, 7 aa, synthetic construct
LQFGHME

SEQ ID NO: 160081 - protein, 7 aa, synthetic construct
LQHMPSE

SEQ ID NO: 160082 - protein, 7 aa, synthetic construct
LQNAPSI

SEQ ID NO: 160083 - protein, 7 aa, synthetic construct
LQNSSIF

SEQ ID NO: 160084 - protein, 7 aa, synthetic construct
LQQINML

SEQ ID NO: 160085 - protein, 7 aa, synthetic construct
LQSDFNS

SEQ ID NO: 160086 - protein, 7 aa, synthetic construct
LQTRETT

SEQ ID NO: 160087 - protein, 7 aa, synthetic construct
LRSDQQL

SEQ ID NO: 160088 - protein, 7 aa, synthetic construct
LRTTLEV

SEQ ID NO: 160089 - protein, 7 aa, synthetic construct
LSIGPED

SEQ ID NO: 160090 - protein, 7 aa, synthetic construct
LSIHQTV

SEQ ID NO: 160091 - protein, 7 aa, synthetic construct
LSTMVQL

SEQ ID NO: 160092 - protein, 7 aa, synthetic construct
LSVPISV

SEQ ID NO: 160093 - protein, 7 aa, synthetic construct
LTAQEPG

SEQ ID NO: 160094 - protein, 7 aa, synthetic construct
LTDGMKK

SEQ ID NO: 160095 - protein, 7 aa, synthetic construct
LTRAFAQ

SEQ ID NO: 160096 - protein, 7 aa, synthetic construct
LTTQFNS

SEQ ID NO: 160097 - protein, 7 aa, synthetic construct
LVSAVNQ

SEQ ID NO: 160098 - protein, 7 aa, synthetic construct
LYDNSIT

SEQ ID NO: 160099 - protein, 7 aa, synthetic construct
MADERRP

SEQ ID NO: 160100 - protein, 7 aa, synthetic construct
MANIADY

SEQ ID NO: 160101 - protein, 7 aa, synthetic construct
MATQSVD

SEQ ID NO: 160102 - protein, 7 aa, synthetic construct
MDLSKPG

SEQ ID NO: 160103 - protein, 7 aa, synthetic construct
MDTLSVP

SEQ ID NO: 160104 - protein, 7 aa, synthetic construct
MDTSNKP

SEQ ID NO: 160105 - protein, 7 aa, synthetic construct
MEIKGYA

SEQ ID NO: 160106 - protein, 7 aa, synthetic construct
MEPIHQI

SEQ ID NO: 160107 - protein, 7 aa, synthetic construct
MFDAHTR

SEQ ID NO: 160108 - protein, 7 aa, synthetic construct
MFQDTHT

SEQ ID NO: 160109 - protein, 7 aa, synthetic construct
MGSMLAQ

SEQ ID NO: 160110 - protein, 7 aa, synthetic construct
MIKDQQL

SEQ ID NO: 160111 - protein, 7 aa, synthetic construct
MINEWGS

SEQ ID NO: 160112 - protein, 7 aa, synthetic construct
MINNEFI

SEQ ID NO: 160113 - protein, 7 aa, synthetic construct
MKAKGSE

SEQ ID NO: 160114 - protein, 7 aa, synthetic construct
MKGAKLD

SEQ ID NO: 160115 - protein, 7 aa, synthetic construct
MMTLGEG

SEQ ID NO: 160116 - protein, 7 aa, synthetic construct
MNKAEDH

SEQ ID NO: 160117 - protein, 7 aa, synthetic construct
MPYVNAT

SEQ ID NO: 160118 - protein, 7 aa, synthetic construct
MRTTTQA

SEQ ID NO: 160119 - protein, 7 aa, synthetic construct
MSKEDHP

SEQ ID NO: 160120 - protein, 7 aa, synthetic construct
MTIAHDK

SEQ ID NO: 160121 - protein, 7 aa, synthetic construct
MTKITDM

SEQ ID NO: 160122 - protein, 7 aa, synthetic construct
MTTPPNP

SEQ ID NO: 160123 - protein, 7 aa, synthetic construct
MTVHDEY

SEQ ID NO: 160124 - protein, 7 aa, synthetic construct
MVERDFG

SEQ ID NO: 160125 - protein, 7 aa, synthetic construct
MVTKEDE

SEQ ID NO: 160126 - protein, 7 aa, synthetic construct
MYAEQRT

SEQ ID NO: 160127 - protein, 7 aa, synthetic construct
MYQTPKD

SEQ ID NO: 160128 - protein, 7 aa, synthetic construct
NAHEHIM

SEQ ID NO: 160129 - protein, 7 aa, synthetic construct
NAHLPSI

SEQ ID NO: 160130 - protein, 7 aa, synthetic construct
NALLTIE

SEQ ID NO: 160131 - protein, 7 aa, synthetic construct
NATQYNI

SEQ ID NO: 160132 - protein, 7 aa, synthetic construct
NEAYHVP

SEQ ID NO: 160133 - protein, 7 aa, synthetic construct
NEGTLRD

SEQ ID NO: 160134 - protein, 7 aa, synthetic construct
NEMHGIK

SEQ ID NO: 160135 - protein, 7 aa, synthetic construct
NFDTMLK

SEQ ID NO: 160136 - protein, 7 aa, synthetic construct
NFTNIAL

SEQ ID NO: 160137 - protein, 7 aa, synthetic construct
NGADVRR

SEQ ID NO: 160138 - protein, 7 aa, synthetic construct
NGDTLTM

SEQ ID NO: 160139 - protein, 7 aa, synthetic construct
NGHSHGW

SEQ ID NO: 160140 - protein, 7 aa, synthetic construct
NGKQNAA

SEQ ID NO: 160141 - protein, 7 aa, synthetic construct
NGKSVQQ

SEQ ID NO: 160142 - protein, 7 aa, synthetic construct
NGNQKSE

SEQ ID NO: 160143 - protein, 7 aa, synthetic construct
NGRAYPD

SEQ ID NO: 160144 - protein, 7 aa, synthetic construct
NGSAGFE

SEQ ID NO: 160145 - protein, 7 aa, synthetic construct
NGYHGKG

SEQ ID NO: 160146 - protein, 7 aa, synthetic construct
NHAGYIS

SEQ ID NO: 160147 - protein, 7 aa, synthetic construct
NHGKEGF

SEQ ID NO: 160148 - protein, 7 aa, synthetic construct
NHHRTMS

SEQ ID NO: 160149 - protein, 7 aa, synthetic construct
NHIDTAK

SEQ ID NO: 160150 - protein, 7 aa, synthetic construct
NHKDYQR

SEQ ID NO: 160151 - protein, 7 aa, synthetic construct
NHVDIRH

SEQ ID NO: 160152 - protein, 7 aa, synthetic construct
NHVPMEA

SEQ ID NO: 160153 - protein, 7 aa, synthetic construct
NIAYPDM

SEQ ID NO: 160154 - protein, 7 aa, synthetic construct
NIEHHIA

SEQ ID NO: 160155 - protein, 7 aa, synthetic construct
NIISHEE

SEQ ID NO: 160156 - protein, 7 aa, synthetic construct
NIQKVHE

SEQ ID NO: 160157 - protein, 7 aa, synthetic construct
NITRQPI

SEQ ID NO: 160158 - protein, 7 aa, synthetic construct
NKDNHGS

SEQ ID NO: 160159 - protein, 7 aa, synthetic construct
NKGEMMY

SEQ ID NO: 160160 - protein, 7 aa, synthetic construct
NKKLNEN

SEQ ID NO: 160161 - protein, 7 aa, synthetic construct
NKNMDDV

SEQ ID NO: 160162 - protein, 7 aa, synthetic construct
NMAASTF

SEQ ID NO: 160163 - protein, 7 aa, synthetic construct
NMMHSDA

SEQ ID NO: 160164 - protein, 7 aa, synthetic construct
NNFKTDV

SEQ ID NO: 160165 - protein, 7 aa, synthetic construct
NPHPQVQ

SEQ ID NO: 160166 - protein, 7 aa, synthetic construct
NPQRYIE

SEQ ID NO: 160167 - protein, 7 aa, synthetic construct
NQAGLPQ

SEQ ID NO: 160168 - protein, 7 aa, synthetic construct
NQRQGVA

SEQ ID NO: 160169 - protein, 7 aa, synthetic construct
NQYPETR

SEQ ID NO: 160170 - protein, 7 aa, synthetic construct
NSSRTDR

SEQ ID NO: 160171 - protein, 7 aa, synthetic construct
NTLPIPH

SEQ ID NO: 160172 - protein, 7 aa, synthetic construct
NTMALQK

SEQ ID NO: 160173 - protein, 7 aa, synthetic construct
NTVKMYM

SEQ ID NO: 160174 - protein, 7 aa, synthetic construct
NTWNGLA

SEQ ID NO: 160175 - protein, 7 aa, synthetic construct
NVAILDK

SEQ ID NO: 160176 - protein, 7 aa, synthetic construct
NYHTLDE

SEQ ID NO: 160177 - protein, 7 aa, synthetic construct
PAGDVKV

SEQ ID NO: 160178 - protein, 7 aa, synthetic construct
PDFNLQV

SEQ ID NO: 160179 - protein, 7 aa, synthetic construct
PDQPAVK

SEQ ID NO: 160180 - protein, 7 aa, synthetic construct
PDRHYDS

SEQ ID NO: 160181 - protein, 7 aa, synthetic construct
PDTHTSV

SEQ ID NO: 160182 - protein, 7 aa, synthetic construct
PEATAGS

SEQ ID NO: 160183 - protein, 7 aa, synthetic construct
PEKGSAG

SEQ ID NO: 160184 - protein, 7 aa, synthetic construct
PESPSTI

SEQ ID NO: 160185 - protein, 7 aa, synthetic construct
PFHNGQA

SEQ ID NO: 160186 - protein, 7 aa, synthetic construct
PHANTDG

SEQ ID NO: 160187 - protein, 7 aa, synthetic construct
PHDSNYK

SEQ ID NO: 160188 - protein, 7 aa, synthetic construct
PHFNDKL

SEQ ID NO: 160189 - protein, 7 aa, synthetic construct
PHGPDHV

SEQ ID NO: 160190 - protein, 7 aa, synthetic construct
PHHAPEI

SEQ ID NO: 160191 - protein, 7 aa, synthetic construct
PISPQRV

SEQ ID NO: 160192 - protein, 7 aa, synthetic construct
PKKIPEV

SEQ ID NO: 160193 - protein, 7 aa, synthetic construct
PKSSYSS

SEQ ID NO: 160194 - protein, 7 aa, synthetic construct
PKVDTQL

SEQ ID NO: 160195 - protein, 7 aa, synthetic construct
PLSTYTD

SEQ ID NO: 160196 - protein, 7 aa, synthetic construct
PMIANGE

SEQ ID NO: 160197 - protein, 7 aa, synthetic construct
PNDIPKF

SEQ ID NO: 160198 - protein, 7 aa, synthetic construct
PNMKDGY

SEQ ID NO: 160199 - protein, 7 aa, synthetic construct
PNNHQPI

SEQ ID NO: 160200 - protein, 7 aa, synthetic construct
PNQMTAL

SEQ ID NO: 160201 - protein, 7 aa, synthetic construct
PNRFDQA

SEQ ID NO: 160202 - protein, 7 aa, synthetic construct
PNRNIPM

SEQ ID NO: 160203 - protein, 7 aa, synthetic construct
PNSAGMS

SEQ ID NO: 160204 - protein, 7 aa, synthetic construct
PNTNTEY

SEQ ID NO: 160205 - protein, 7 aa, synthetic construct
PPTAGPD

SEQ ID NO: 160206 - protein, 7 aa, synthetic construct
PQAQQSE

SEQ ID NO: 160207 - protein, 7 aa, synthetic construct
PQDKSQG

SEQ ID NO: 160208 - protein, 7 aa, synthetic construct
PQPYTNT

SEQ ID NO: 160209 - protein, 7 aa, synthetic construct
PQSDKTV

SEQ ID NO: 160210 - protein, 7 aa, synthetic construct
PRASNMA

SEQ ID NO: 160211 - protein, 7 aa, synthetic construct
PSDSRER

SEQ ID NO: 160212 - protein, 7 aa, synthetic construct
PSGTAGE

SEQ ID NO: 160213 - protein, 7 aa, synthetic construct
PSRAQGP

SEQ ID NO: 160214 - protein, 7 aa, synthetic construct
PSYRTNG

SEQ ID NO: 160215 - protein, 7 aa, synthetic construct
PTKSMES

SEQ ID NO: 160216 - protein, 7 aa, synthetic construct
PTQPIIS

SEQ ID NO: 160217 - protein, 7 aa, synthetic construct
PTQQVPL

SEQ ID NO: 160218 - protein, 7 aa, synthetic construct
PVARDMY

SEQ ID NO: 160219 - protein, 7 aa, synthetic construct
PYHHDMS

SEQ ID NO: 160220 - protein, 7 aa, synthetic construct
PYQAGQN

SEQ ID NO: 160221 - protein, 7 aa, synthetic construct
QANDSYH

SEQ ID NO: 160222 - protein, 7 aa, synthetic construct
QDHNRGY

SEQ ID NO: 160223 - protein, 7 aa, synthetic construct
QDTAEYR

SEQ ID NO: 160224 - protein, 7 aa, synthetic construct
QEMTVTR

SEQ ID NO: 160225 - protein, 7 aa, synthetic construct
QENKPPL

SEQ ID NO: 160226 - protein, 7 aa, synthetic construct
QEQFRSI

SEQ ID NO: 160227 - protein, 7 aa, synthetic construct
QEYQHAM

SEQ ID NO: 160228 - protein, 7 aa, synthetic construct
QFSGHQA

SEQ ID NO: 160229 - protein, 7 aa, synthetic construct
QGAVDKD

SEQ ID NO: 160230 - protein, 7 aa, synthetic construct
QGVEHTI

SEQ ID NO: 160231 - protein, 7 aa, synthetic construct
QHTLITS

SEQ ID NO: 160232 - protein, 7 aa, synthetic construct
QHTVSAL

SEQ ID NO: 160233 - protein, 7 aa, synthetic construct
QIGITLP

SEQ ID NO: 160234 - protein, 7 aa, synthetic construct
QIQAVMA

SEQ ID NO: 160235 - protein, 7 aa, synthetic construct
QKEEKGM

SEQ ID NO: 160236 - protein, 7 aa, synthetic construct
QKSQGIL

SEQ ID NO: 160237 - protein, 7 aa, synthetic construct
QLDNPLG

SEQ ID NO: 160238 - protein, 7 aa, synthetic construct
QLGFQTQ

SEQ ID NO: 160239 - protein, 7 aa, synthetic construct
QLNAWPG

SEQ ID NO: 160240 - protein, 7 aa, synthetic construct
QLNIEAM

SEQ ID NO: 160241 - protein, 7 aa, synthetic construct
QLQPNHR

SEQ ID NO: 160242 - protein, 7 aa, synthetic construct
QNNGVWV

SEQ ID NO: 160243 - protein, 7 aa, synthetic construct
QNQTHEW

SEQ ID NO: 160244 - protein, 7 aa, synthetic construct
QNRDNVD

SEQ ID NO: 160245 - protein, 7 aa, synthetic construct
QNTQLTK

SEQ ID NO: 160246 - protein, 7 aa, synthetic construct
QPISDSY

SEQ ID NO: 160247 - protein, 7 aa, synthetic construct
QPKEGVL

SEQ ID NO: 160248 - protein, 7 aa, synthetic construct
QPQYHEE

SEQ ID NO: 160249 - protein, 7 aa, synthetic construct
QQMDKAH

SEQ ID NO: 160250 - protein, 7 aa, synthetic construct
QQSPPDV

SEQ ID NO: 160251 - protein, 7 aa, synthetic construct
QSADLGA

SEQ ID NO: 160252 - protein, 7 aa, synthetic construct
QSASGNN

SEQ ID NO: 160253 - protein, 7 aa, synthetic construct
QTDTTVL

SEQ ID NO: 160254 - protein, 7 aa, synthetic construct
QTMHKTA

SEQ ID NO: 160255 - protein, 7 aa, synthetic construct
QTQRGDF

SEQ ID NO: 160256 - protein, 7 aa, synthetic construct
QVAPNKL

SEQ ID NO: 160257 - protein, 7 aa, synthetic construct
QVETRRL

SEQ ID NO: 160258 - protein, 7 aa, synthetic construct
QYKSNYQ

SEQ ID NO: 160259 - protein, 7 aa, synthetic construct
QYYPNEV

SEQ ID NO: 160260 - protein, 7 aa, synthetic construct
RAEELKR

SEQ ID NO: 160261 - protein, 7 aa, synthetic construct
RAHDDRE

SEQ ID NO: 160262 - protein, 7 aa, synthetic construct
RDTSNNM

SEQ ID NO: 160263 - protein, 7 aa, synthetic construct
REDRAVD

SEQ ID NO: 160264 - protein, 7 aa, synthetic construct
REKEPAM

SEQ ID NO: 160265 - protein, 7 aa, synthetic construct
RESLPFT

SEQ ID NO: 160266 - protein, 7 aa, synthetic construct
RGTNNQP

SEQ ID NO: 160267 - protein, 7 aa, synthetic construct
RHEDPSK

SEQ ID NO: 160268 - protein, 7 aa, synthetic construct
RKDGVGI

SEQ ID NO: 160269 - protein, 7 aa, synthetic construct
RKEDHHP

SEQ ID NO: 160270 - protein, 7 aa, synthetic construct
RLDDKVH

SEQ ID NO: 160271 - protein, 7 aa, synthetic construct
RMSIDDP

SEQ ID NO: 160272 - protein, 7 aa, synthetic construct
RNQGASP

SEQ ID NO: 160273 - protein, 7 aa, synthetic construct
RNSEFGV

SEQ ID NO: 160274 - protein, 7 aa, synthetic construct
RPAELID

SEQ ID NO: 160275 - protein, 7 aa, synthetic construct
RPDDGRA

SEQ ID NO: 160276 - protein, 7 aa, synthetic construct
RQDNLIQ

SEQ ID NO: 160277 - protein, 7 aa, synthetic construct
RQWDNNP

SEQ ID NO: 160278 - protein, 7 aa, synthetic construct
RQYGQHA

SEQ ID NO: 160279 - protein, 7 aa, synthetic construct
RSEGNMH

SEQ ID NO: 160280 - protein, 7 aa, synthetic construct
RSIDPAV

SEQ ID NO: 160281 - protein, 7 aa, synthetic construct
RSMDAEA

SEQ ID NO: 160282 - protein, 7 aa, synthetic construct
RSMEHPR

SEQ ID NO: 160283 - protein, 7 aa, synthetic construct
RSVEQDF

SEQ ID NO: 160284 - protein, 7 aa, synthetic construct
RTNYNTE

SEQ ID NO: 160285 - protein, 7 aa, synthetic construct
RTQNSMA

SEQ ID NO: 160286 - protein, 7 aa, synthetic construct
RTQQNFH

SEQ ID NO: 160287 - protein, 7 aa, synthetic construct
RYDKDNT

SEQ ID NO: 160288 - protein, 7 aa, synthetic construct
SAEQRAF

SEQ ID NO: 160289 - protein, 7 aa, synthetic construct
SAGDVGP

SEQ ID NO: 160290 - protein, 7 aa, synthetic construct
SALIPND

SEQ ID NO: 160291 - protein, 7 aa, synthetic construct
SDNQKNI

SEQ ID NO: 160292 - protein, 7 aa, synthetic construct
SEGNIHR

SEQ ID NO: 160293 - protein, 7 aa, synthetic construct
SEHQVRV

SEQ ID NO: 160294 - protein, 7 aa, synthetic construct
SEYDLGR

SEQ ID NO: 160295 - protein, 7 aa, synthetic construct
SFEHNVS

SEQ ID NO: 160296 - protein, 7 aa, synthetic construct
SFERHNI

SEQ ID NO: 160297 - protein, 7 aa, synthetic construct
SFTGDMA

SEQ ID NO: 160298 - protein, 7 aa, synthetic construct
SGKMKEE

SEQ ID NO: 160299 - protein, 7 aa, synthetic construct
SGPNHFS

SEQ ID NO: 160300 - protein, 7 aa, synthetic construct
SGQHDNI

SEQ ID NO: 160301 - protein, 7 aa, synthetic construct
SHKKTDT

SEQ ID NO: 160302 - protein, 7 aa, synthetic construct
SHNSAYS

SEQ ID NO: 160303 - protein, 7 aa, synthetic construct
SHPDGHK

SEQ ID NO: 160304 - protein, 7 aa, synthetic construct
SISMSAS

SEQ ID NO: 160305 - protein, 7 aa, synthetic construct
SKEQMDF

SEQ ID NO: 160306 - protein, 7 aa, synthetic construct
SLEVGSA

SEQ ID NO: 160307 - protein, 7 aa, synthetic construct
SLGIVTK

SEQ ID NO: 160308 - protein, 7 aa, synthetic construct
SLQTTNF

SEQ ID NO: 160309 - protein, 7 aa, synthetic construct
SLSGFPM

SEQ ID NO: 160310 - protein, 7 aa, synthetic construct
SLVNQEF

SEQ ID NO: 160311 - protein, 7 aa, synthetic construct
SMRDFSA

SEQ ID NO: 160312 - protein, 7 aa, synthetic construct
SMTSLPT

SEQ ID NO: 160313 - protein, 7 aa, synthetic construct
SNNSAMH

SEQ ID NO: 160314 - protein, 7 aa, synthetic construct
SNQPVPS

SEQ ID NO: 160315 - protein, 7 aa, synthetic construct
SNSLIST

SEQ ID NO: 160316 - protein, 7 aa, synthetic construct
SPHVDRL

SEQ ID NO: 160317 - protein, 7 aa, synthetic construct
SPPDYPA

SEQ ID NO: 160318 - protein, 7 aa, synthetic construct
SQERSDS

SEQ ID NO: 160319 - protein, 7 aa, synthetic construct
SQFNGRH

SEQ ID NO: 160320 - protein, 7 aa, synthetic construct
SQGTPGF

SEQ ID NO: 160321 - protein, 7 aa, synthetic construct
SQHIPVT

SEQ ID NO: 160322 - protein, 7 aa, synthetic construct
SQKERMT

SEQ ID NO: 160323 - protein, 7 aa, synthetic construct
SQKGFDH

SEQ ID NO: 160324 - protein, 7 aa, synthetic construct
SQMELGR

SEQ ID NO: 160325 - protein, 7 aa, synthetic construct
SQRQIDD

SEQ ID NO: 160326 - protein, 7 aa, synthetic construct
SQYSYGV

SEQ ID NO: 160327 - protein, 7 aa, synthetic construct
SRETEPP

SEQ ID NO: 160328 - protein, 7 aa, synthetic construct
SRKDFHA

SEQ ID NO: 160329 - protein, 7 aa, synthetic construct
SSDNPAR

SEQ ID NO: 160330 - protein, 7 aa, synthetic construct
SSEHLTH

SEQ ID NO: 160331 - protein, 7 aa, synthetic construct
SSYSPQT

SEQ ID NO: 160332 - protein, 7 aa, synthetic construct
STHFGAN

SEQ ID NO: 160333 - protein, 7 aa, synthetic construct
STHLTTN

SEQ ID NO: 160334 - protein, 7 aa, synthetic construct
STHTNGT

SEQ ID NO: 160335 - protein, 7 aa, synthetic construct
STITMAG

SEQ ID NO: 160336 - protein, 7 aa, synthetic construct
SVTTEPG

SEQ ID NO: 160337 - protein, 7 aa, synthetic construct
SVVPSQL

SEQ ID NO: 160338 - protein, 7 aa, synthetic construct
TAKKEVS

SEQ ID NO: 160339 - protein, 7 aa, synthetic construct
TAQNEMT

SEQ ID NO: 160340 - protein, 7 aa, synthetic construct
TASNHIE

SEQ ID NO: 160341 - protein, 7 aa, synthetic construct
TASPMKI

SEQ ID NO: 160342 - protein, 7 aa, synthetic construct
TAYQIDT

SEQ ID NO: 160343 - protein, 7 aa, synthetic construct
TEVYSNG

SEQ ID NO: 160344 - protein, 7 aa, synthetic construct
TFQEKSA

SEQ ID NO: 160345 - protein, 7 aa, synthetic construct
TGDAIRK

SEQ ID NO: 160346 - protein, 7 aa, synthetic construct
TGNITQE

SEQ ID NO: 160347 - protein, 7 aa, synthetic construct
TGNWERN

SEQ ID NO: 160348 - protein, 7 aa, synthetic construct
THHGLQK

SEQ ID NO: 160349 - protein, 7 aa, synthetic construct
TKEANTH

SEQ ID NO: 160350 - protein, 7 aa, synthetic construct
TKGEREN

SEQ ID NO: 160351 - protein, 7 aa, synthetic construct
TKQAPVA

SEQ ID NO: 160352 - protein, 7 aa, synthetic construct
TLAAHDE

SEQ ID NO: 160353 - protein, 7 aa, synthetic construct
TMGQDHM

SEQ ID NO: 160354 - protein, 7 aa, synthetic construct
TMSGHAT

SEQ ID NO: 160355 - protein, 7 aa, synthetic construct
TNNIQIM

SEQ ID NO: 160356 - protein, 7 aa, synthetic construct
TNQEMRN

SEQ ID NO: 160357 - protein, 7 aa, synthetic construct
TNTSQEL

SEQ ID NO: 160358 - protein, 7 aa, synthetic construct
TQPEAPI

SEQ ID NO: 160359 - protein, 7 aa, synthetic construct
TQYGKSD

SEQ ID NO: 160360 - protein, 7 aa, synthetic construct
TRIVDDF

SEQ ID NO: 160361 - protein, 7 aa, synthetic construct
TRPQNTS

SEQ ID NO: 160362 - protein, 7 aa, synthetic construct
TRVDHSD

SEQ ID NO: 160363 - protein, 7 aa, synthetic construct
TTNINKY

SEQ ID NO: 160364 - protein, 7 aa, synthetic construct
TTSPPTD

SEQ ID NO: 160365 - protein, 7 aa, synthetic construct
TTSSVTY

SEQ ID NO: 160366 - protein, 7 aa, synthetic construct
TVTDHSS

SEQ ID NO: 160367 - protein, 7 aa, synthetic construct
TVTITGS

SEQ ID NO: 160368 - protein, 7 aa, synthetic construct
VAADVTK

SEQ ID NO: 160369 - protein, 7 aa, synthetic construct
VAHPGRN

SEQ ID NO: 160370 - protein, 7 aa, synthetic construct
VAYNNQG

SEQ ID NO: 160371 - protein, 7 aa, synthetic construct
VDFNMKY

SEQ ID NO: 160372 - protein, 7 aa, synthetic construct
VDVQRLA

SEQ ID NO: 160373 - protein, 7 aa, synthetic construct
VEGMHMM

SEQ ID NO: 160374 - protein, 7 aa, synthetic construct
VEGTKPI

SEQ ID NO: 160375 - protein, 7 aa, synthetic construct
VELRNPQ

SEQ ID NO: 160376 - protein, 7 aa, synthetic construct
VEPRSPW

SEQ ID NO: 160377 - protein, 7 aa, synthetic construct
VERLNNF

SEQ ID NO: 160378 - protein, 7 aa, synthetic construct
VEVHGVP

SEQ ID NO: 160379 - protein, 7 aa, synthetic construct
VGKTTLV

SEQ ID NO: 160380 - protein, 7 aa, synthetic construct
VGLTLAA

SEQ ID NO: 160381 - protein, 7 aa, synthetic construct
VGNYMIE

SEQ ID NO: 160382 - protein, 7 aa, synthetic construct
VGQGHHQ

SEQ ID NO: 160383 - protein, 7 aa, synthetic construct
VGTGVFM

SEQ ID NO: 160384 - protein, 7 aa, synthetic construct
VGVSLYP

SEQ ID NO: 160385 - protein, 7 aa, synthetic construct
VHLGKVE

SEQ ID NO: 160386 - protein, 7 aa, synthetic construct
VHMTSSL

SEQ ID NO: 160387 - protein, 7 aa, synthetic construct
VIKDSII

SEQ ID NO: 160388 - protein, 7 aa, synthetic construct
VIRETQP

SEQ ID NO: 160389 - protein, 7 aa, synthetic construct
VKTNAIA

SEQ ID NO: 160390 - protein, 7 aa, synthetic construct
VLDRQVF

SEQ ID NO: 160391 - protein, 7 aa, synthetic construct
VLDTERV

SEQ ID NO: 160392 - protein, 7 aa, synthetic construct
VLMAGNM

SEQ ID NO: 160393 - protein, 7 aa, synthetic construct
VLQMNER

SEQ ID NO: 160394 - protein, 7 aa, synthetic construct
VMDGFNG

SEQ ID NO: 160395 - protein, 7 aa, synthetic construct
VMLNGNT

SEQ ID NO: 160396 - protein, 7 aa, synthetic construct
VMNNMIE

SEQ ID NO: 160397 - protein, 7 aa, synthetic construct
VNAIRDY

SEQ ID NO: 160398 - protein, 7 aa, synthetic construct
VNGSPTT

SEQ ID NO: 160399 - protein, 7 aa, synthetic construct
VNNTGKG

SEQ ID NO: 160400 - protein, 7 aa, synthetic construct
VNQTALF

SEQ ID NO: 160401 - protein, 7 aa, synthetic construct
VNQTIPT

SEQ ID NO: 160402 - protein, 7 aa, synthetic construct
VNVRANH

SEQ ID NO: 160403 - protein, 7 aa, synthetic construct
VNYVDST

SEQ ID NO: 160404 - protein, 7 aa, synthetic construct
VPDFLNQ

SEQ ID NO: 160405 - protein, 7 aa, synthetic construct
VPEQVGR

SEQ ID NO: 160406 - protein, 7 aa, synthetic construct
VQAMSDP

SEQ ID NO: 160407 - protein, 7 aa, synthetic construct
VQQWPEA

SEQ ID NO: 160408 - protein, 7 aa, synthetic construct
VRHEGDW

SEQ ID NO: 160409 - protein, 7 aa, synthetic construct
VSFSPGN

SEQ ID NO: 160410 - protein, 7 aa, synthetic construct
VSHHAFQ

SEQ ID NO: 160411 - protein, 7 aa, synthetic construct
VSYVSQV

SEQ ID NO: 160412 - protein, 7 aa, synthetic construct
VTHDRST

SEQ ID NO: 160413 - protein, 7 aa, synthetic construct
VTHPPDP

SEQ ID NO: 160414 - protein, 7 aa, synthetic construct
VTNEASF

SEQ ID NO: 160415 - protein, 7 aa, synthetic construct
VTNISHK

SEQ ID NO: 160416 - protein, 7 aa, synthetic construct
VVDHIPL

SEQ ID NO: 160417 - protein, 7 aa, synthetic construct
VVERFNP

SEQ ID NO: 160418 - protein, 7 aa, synthetic construct
VVTSTKA

SEQ ID NO: 160419 - protein, 7 aa, synthetic construct
VVYDPER

SEQ ID NO: 160420 - protein, 7 aa, synthetic construct
WDADQHG

SEQ ID NO: 160421 - protein, 7 aa, synthetic construct
WDGTHYK

SEQ ID NO: 160422 - protein, 7 aa, synthetic construct
WDKGHVF

SEQ ID NO: 160423 - protein, 7 aa, synthetic construct
WDRYADE

SEQ ID NO: 160424 - protein, 7 aa, synthetic construct
WEEVGKN

SEQ ID NO: 160425 - protein, 7 aa, synthetic construct
WGKDSSD

SEQ ID NO: 160426 - protein, 7 aa, synthetic construct
WGSGTEA

SEQ ID NO: 160427 - protein, 7 aa, synthetic construct
WGTHHSS

SEQ ID NO: 160428 - protein, 7 aa, synthetic construct
WHNEITS

SEQ ID NO: 160429 - protein, 7 aa, synthetic construct
WKNSWVE

SEQ ID NO: 160430 - protein, 7 aa, synthetic construct
WMASGLE

SEQ ID NO: 160431 - protein, 7 aa, synthetic construct
WMDLQHA

SEQ ID NO: 160432 - protein, 7 aa, synthetic construct
WMDSLKA

SEQ ID NO: 160433 - protein, 7 aa, synthetic construct
WQETPQN

SEQ ID NO: 160434 - protein, 7 aa, synthetic construct
WRDTEFH

SEQ ID NO: 160435 - protein, 7 aa, synthetic construct
WRHSQSD

SEQ ID NO: 160436 - protein, 7 aa, synthetic construct
WSSGDIS

SEQ ID NO: 160437 - protein, 7 aa, synthetic construct
WSTSVQS

SEQ ID NO: 160438 - protein, 7 aa, synthetic construct
WVDGHLN

SEQ ID NO: 160439 - protein, 7 aa, synthetic construct
WVNSQQG

SEQ ID NO: 160440 - protein, 7 aa, synthetic construct
WVSSDNR

SEQ ID NO: 160441 - protein, 7 aa, synthetic construct
YAFENKQ

SEQ ID NO: 160442 - protein, 7 aa, synthetic construct
YAHDHML

SEQ ID NO: 160443 - protein, 7 aa, synthetic construct
YDPNKIV

SEQ ID NO: 160444 - protein, 7 aa, synthetic construct
YDSTIKP

SEQ ID NO: 160445 - protein, 7 aa, synthetic construct
YDTDRTS

SEQ ID NO: 160446 - protein, 7 aa, synthetic construct
YELAART

SEQ ID NO: 160447 - protein, 7 aa, synthetic construct
YEPPSAR

SEQ ID NO: 160448 - protein, 7 aa, synthetic construct
YFNDMGS

SEQ ID NO: 160449 - protein, 7 aa, synthetic construct
YGEQHFG

SEQ ID NO: 160450 - protein, 7 aa, synthetic construct
YGHAPGE

SEQ ID NO: 160451 - protein, 7 aa, synthetic construct
YGQIEGY

SEQ ID NO: 160452 - protein, 7 aa, synthetic construct
YHMVSTP

SEQ ID NO: 160453 - protein, 7 aa, synthetic construct
YHQERLS

SEQ ID NO: 160454 - protein, 7 aa, synthetic construct
YKGNGQN

SEQ ID NO: 160455 - protein, 7 aa, synthetic construct
YKTDLGI

SEQ ID NO: 160456 - protein, 7 aa, synthetic construct
YMAGMSL

SEQ ID NO: 160457 - protein, 7 aa, synthetic construct
YNHTKSG

SEQ ID NO: 160458 - protein, 7 aa, synthetic construct
YNLRLED

SEQ ID NO: 160459 - protein, 7 aa, synthetic construct
YNTQKEI

SEQ ID NO: 160460 - protein, 7 aa, synthetic construct
YNYHPSG

SEQ ID NO: 160461 - protein, 7 aa, synthetic construct
YPSSLGS

SEQ ID NO: 160462 - protein, 7 aa, synthetic construct
YQHNMQV

SEQ ID NO: 160463 - protein, 7 aa, synthetic construct
YQLNEHP

SEQ ID NO: 160464 - protein, 7 aa, synthetic construct
YQRPNGY

SEQ ID NO: 160465 - protein, 7 aa, synthetic construct
YQSGPTT

SEQ ID NO: 160466 - protein, 7 aa, synthetic construct
YRSASGE

SEQ ID NO: 160467 - protein, 7 aa, synthetic construct
YSDVHKH

SEQ ID NO: 160468 - protein, 7 aa, synthetic construct
YTITLSE

SEQ ID NO: 160469 - protein, 7 aa, synthetic construct
YYHSSAN

SEQ ID NO: 160470 - protein, 7 aa, synthetic construct
YYNVPTS

SEQ ID NO: 160471 - protein, 7 aa, synthetic construct
YYSPEQM

SEQ ID NO: 160472 - protein, 7 aa, synthetic construct
IDRDTRK

SEQ ID NO: 160473 - protein, 7 aa, synthetic construct
LEMPRTK

SEQ ID NO: 160474 - protein, 7 aa, synthetic construct
RVHPKET

SEQ ID NO: 160475 - protein, 7 aa, synthetic construct
PAPRMRD

SEQ ID NO: 160476 - protein, 7 aa, synthetic construct
YPDGAKR

SEQ ID NO: 160477 - protein, 7 aa, synthetic construct
YADGHKK

SEQ ID NO: 160478 - protein, 7 aa, synthetic construct
PEKPIKL

SEQ ID NO: 160479 - protein, 7 aa, synthetic construct
RSDSGPR

SEQ ID NO: 160480 - protein, 7 aa, synthetic construct
YMKGEPR

SEQ ID NO: 160481 - protein, 7 aa, synthetic construct
PERKGEK

SEQ ID NO: 160482 - protein, 7 aa, synthetic construct
KGRQDPG

SEQ ID NO: 160483 - protein, 7 aa, synthetic construct
IKAYLDR

SEQ ID NO: 160484 - protein, 7 aa, synthetic construct
GDAGLRK

SEQ ID NO: 160485 - protein, 7 aa, synthetic construct
ETRPKQA

SEQ ID NO: 160486 - protein, 7 aa, synthetic construct
RVQPREV

SEQ ID NO: 160487 - protein, 7 aa, synthetic construct
RLATESR

SEQ ID NO: 160488 - protein, 7 aa, synthetic construct
ENDKVKR

SEQ ID NO: 160489 - protein, 7 aa, synthetic construct
NIETKRG

SEQ ID NO: 160490 - protein, 7 aa, synthetic construct
LNEGFKR

SEQ ID NO: 160491 - protein, 7 aa, synthetic construct
PSLRPKE

SEQ ID NO: 160492 - protein, 7 aa, synthetic construct
EMRQTRA

SEQ ID NO: 160493 - protein, 7 aa, synthetic construct
PADTPRR

SEQ ID NO: 160494 - protein, 7 aa, synthetic construct
AGKYEGR

SEQ ID NO: 160495 - protein, 7 aa, synthetic construct
KPRNSEI

SEQ ID NO: 160496 - protein, 7 aa, synthetic construct
VRGHQPA

SEQ ID NO: 160497 - protein, 7 aa, synthetic construct
KRVSPEV

SEQ ID NO: 160498 - protein, 7 aa, synthetic construct
MSKRDPG

SEQ ID NO: 160499 - protein, 7 aa, synthetic construct
PSESIKK

SEQ ID NO: 160500 - protein, 7 aa, synthetic construct
PDAGPRK

SEQ ID NO: 160501 - protein, 7 aa, synthetic construct
YPHGGTR

SEQ ID NO: 160502 - protein, 7 aa, synthetic construct
QQEVKVR

SEQ ID NO: 160503 - protein, 7 aa, synthetic construct
YNEGPKR

SEQ ID NO: 160504 - protein, 7 aa, synthetic construct
DGLGVKK

SEQ ID NO: 160505 - protein, 7 aa, synthetic construct
IEEKQKK

SEQ ID NO: 160506 - protein, 7 aa, synthetic construct
VKRNEQN

SEQ ID NO: 160507 - protein, 7 aa, synthetic construct
ISRNEKN

SEQ ID NO: 160508 - protein, 7 aa, synthetic construct
NTRPRDS

SEQ ID NO: 160509 - protein, 7 aa, synthetic construct
NVDIRPK

SEQ ID NO: 160510 - protein, 7 aa, synthetic construct
YEVVKRA

SEQ ID NO: 160511 - protein, 7 aa, synthetic construct
IDAPLKR

SEQ ID NO: 160512 - protein, 7 aa, synthetic construct
RETRDRP

SEQ ID NO: 160513 - protein, 7 aa, synthetic construct
KVSRLDV

SEQ ID NO: 160514 - protein, 7 aa, synthetic construct
GDQGKYK

SEQ ID NO: 160515 - protein, 7 aa, synthetic construct
KEQETKR

SEQ ID NO: 160516 - protein, 7 aa, synthetic construct
DNSPRQK

SEQ ID NO: 160517 - protein, 7 aa, synthetic construct
ESKPRLM

SEQ ID NO: 160518 - protein, 7 aa, synthetic construct
MKRNENA

SEQ ID NO: 160519 - protein, 7 aa, synthetic construct
NRKQSSE

SEQ ID NO: 160520 - protein, 7 aa, synthetic construct
TQEPMRR

SEQ ID NO: 160521 - protein, 7 aa, synthetic construct
GKMRAPD

SEQ ID NO: 160522 - protein, 7 aa, synthetic construct
EQVPKKQ

SEQ ID NO: 160523 - protein, 7 aa, synthetic construct
QDGMKRG

SEQ ID NO: 160524 - protein, 7 aa, synthetic construct
VPKQIHY

SEQ ID NO: 160525 - protein, 7 aa, synthetic construct
LRGISPN

SEQ ID NO: 160526 - protein, 7 aa, synthetic construct
FDGVVKR

SEQ ID NO: 160527 - protein, 7 aa, synthetic construct
DVTPKRY

SEQ ID NO: 160528 - protein, 7 aa, synthetic construct
IPHQLKA

SEQ ID NO: 160529 - protein, 7 aa, synthetic construct
NRGLRID

SEQ ID NO: 160530 - protein, 7 aa, synthetic construct
SRRENSG

SEQ ID NO: 160531 - protein, 7 aa, synthetic construct
QGEAPKR

SEQ ID NO: 160532 - protein, 7 aa, synthetic construct
NPEARSR

SEQ ID NO: 160533 - protein, 7 aa, synthetic construct
FKNQEQR

SEQ ID NO: 160534 - protein, 7 aa, synthetic construct
TAEVPKR

SEQ ID NO: 160535 - protein, 7 aa, synthetic construct
YDKEQRK

SEQ ID NO: 160536 - protein, 7 aa, synthetic construct
SMRPIRD

SEQ ID NO: 160537 - protein, 7 aa, synthetic construct
QQEPQRK

SEQ ID NO: 160538 - protein, 7 aa, synthetic construct
KMKTLPP

SEQ ID NO: 160539 - protein, 7 aa, synthetic construct
EKGMRLQ

SEQ ID NO: 160540 - protein, 7 aa, synthetic construct
ELRNQRA

SEQ ID NO: 160541 - protein, 7 aa, synthetic construct
FRKDRDT

SEQ ID NO: 160542 - protein, 7 aa, synthetic construct
FENSNRK

SEQ ID NO: 160543 - protein, 7 aa, synthetic construct
QPEQRNR

SEQ ID NO: 160544 - protein, 7 aa, synthetic construct
ASETKRL

SEQ ID NO: 160545 - protein, 7 aa, synthetic construct
YKAMKVP

SEQ ID NO: 160546 - protein, 7 aa, synthetic construct
TYTGERK

SEQ ID NO: 160547 - protein, 7 aa, synthetic construct
VDQPRGK

SEQ ID NO: 160548 - protein, 7 aa, synthetic construct
YRKIEAS

SEQ ID NO: 160549 - protein, 7 aa, synthetic construct
KEAQYAK

SEQ ID NO: 160550 - protein, 7 aa, synthetic construct
TDVGRTR

SEQ ID NO: 160551 - protein, 7 aa, synthetic construct
REPPYNK

SEQ ID NO: 160552 - protein, 7 aa, synthetic construct
VSDGLRR

SEQ ID NO: 160553 - protein, 7 aa, synthetic construct
IDAGPKR

SEQ ID NO: 160554 - protein, 7 aa, synthetic construct
RQSREMI

SEQ ID NO: 160555 - protein, 7 aa, synthetic construct
DQIPKQK

SEQ ID NO: 160556 - protein, 7 aa, synthetic construct
NSEMTKK

SEQ ID NO: 160557 - protein, 7 aa, synthetic construct
YEKAHPR

SEQ ID NO: 160558 - protein, 7 aa, synthetic construct
GKKNDPV

SEQ ID NO: 160559 - protein, 7 aa, synthetic construct
YADGVRK

SEQ ID NO: 160560 - protein, 7 aa, synthetic construct
MARPKAD

SEQ ID NO: 160561 - protein, 7 aa, synthetic construct
IRHQSGA

SEQ ID NO: 160562 - protein, 7 aa, synthetic construct
VDNQIKK

SEQ ID NO: 160563 - protein, 7 aa, synthetic construct
QGRLNKE

SEQ ID NO: 160564 - protein, 7 aa, synthetic construct
VDGTVKR

SEQ ID NO: 160565 - protein, 7 aa, synthetic construct
HEQVKQK

SEQ ID NO: 160566 - protein, 7 aa, synthetic construct
PARKVDG

SEQ ID NO: 160567 - protein, 7 aa, synthetic construct
NPDGLRR

SEQ ID NO: 160568 - protein, 7 aa, synthetic construct
MGKKDTS

SEQ ID NO: 160569 - protein, 7 aa, synthetic construct
TGKRGDM

SEQ ID NO: 160570 - protein, 7 aa, synthetic construct
SAEPRPR

SEQ ID NO: 160571 - protein, 7 aa, synthetic construct
YSSEIKK

SEQ ID NO: 160572 - protein, 7 aa, synthetic construct
TEVPKTK

SEQ ID NO: 160573 - protein, 7 aa, synthetic construct
QSRNAEK

SEQ ID NO: 160574 - protein, 7 aa, synthetic construct
DGKYVRA

SEQ ID NO: 160575 - protein, 7 aa, synthetic construct
KQPDYAR

SEQ ID NO: 160576 - protein, 7 aa, synthetic construct
AITPRRD

SEQ ID NO: 160577 - protein, 7 aa, synthetic construct
NLEIRNK

SEQ ID NO: 160578 - protein, 7 aa, synthetic construct
LGKEEKR

SEQ ID NO: 160579 - protein, 7 aa, synthetic construct
VSRSERQ

SEQ ID NO: 160580 - protein, 7 aa, synthetic construct
GNEQAKK

SEQ ID NO: 160581 - protein, 7 aa, synthetic construct
WPTKADR

SEQ ID NO: 160582 - protein, 7 aa, synthetic construct
FARKPDV

SEQ ID NO: 160583 - protein, 7 aa, synthetic construct
KQNRGQD

SEQ ID NO: 160584 - protein, 7 aa, synthetic construct
TSAQERR

SEQ ID NO: 160585 - protein, 7 aa, synthetic construct
GEVGKFK

SEQ ID NO: 160586 - protein, 7 aa, synthetic construct
TTVGEKR

SEQ ID NO: 160587 - protein, 7 aa, synthetic construct
IYAKEAR

SEQ ID NO: 160588 - protein, 7 aa, synthetic construct
KNARNVD

SEQ ID NO: 160589 - protein, 7 aa, synthetic construct
SGRKGVD

SEQ ID NO: 160590 - protein, 7 aa, synthetic construct
LNRSDRG

SEQ ID NO: 160591 - protein, 7 aa, synthetic construct
GVSEGKR

SEQ ID NO: 160592 - protein, 7 aa, synthetic construct
EVKMHRA

SEQ ID NO: 160593 - protein, 7 aa, synthetic construct
ISDMARR

SEQ ID NO: 160594 - protein, 7 aa, synthetic construct
LNREQRA

SEQ ID NO: 160595 - protein, 7 aa, synthetic construct
SEKRSDK

SEQ ID NO: 160596 - protein, 7 aa, synthetic construct
RVQPREL

SEQ ID NO: 160597 - protein, 7 aa, synthetic construct
ITVRIKD

SEQ ID NO: 160598 - protein, 7 aa, synthetic construct
MDGGKYR

SEQ ID NO: 160599 - protein, 7 aa, synthetic construct
PERGMKG

SEQ ID NO: 160600 - protein, 7 aa, synthetic construct
EQRKQNS

SEQ ID NO: 160601 - protein, 7 aa, synthetic construct
EAIPKKA

SEQ ID NO: 160602 - protein, 7 aa, synthetic construct
TGRGVRD

SEQ ID NO: 160603 - protein, 7 aa, synthetic construct
MGRKDTM

SEQ ID NO: 160604 - protein, 7 aa, synthetic construct
EQSTKQR

SEQ ID NO: 160605 - protein, 7 aa, synthetic construct
IRNVMER

SEQ ID NO: 160606 - protein, 7 aa, synthetic construct
RKQIESF

SEQ ID NO: 160607 - protein, 7 aa, synthetic construct
GRGIRIE

SEQ ID NO: 160608 - protein, 7 aa, synthetic construct
DGNIQKR

SEQ ID NO: 160609 - protein, 7 aa, synthetic construct
TDSTYKK

SEQ ID NO: 160610 - protein, 7 aa, synthetic construct
DPMPKNK

SEQ ID NO: 160611 - protein, 7 aa, synthetic construct
RRQEIDK

SEQ ID NO: 160612 - protein, 7 aa, synthetic construct
LGEQVRK

SEQ ID NO: 160613 - protein, 7 aa, synthetic construct
GRKQEVY

SEQ ID NO: 160614 - protein, 7 aa, synthetic construct
ENMKLKY

SEQ ID NO: 160615 - protein, 7 aa, synthetic construct
NTEKEKR

SEQ ID NO: 160616 - protein, 7 aa, synthetic construct
NMEALKK

SEQ ID NO: 160617 - protein, 7 aa, synthetic construct
AKREEPR

SEQ ID NO: 160618 - protein, 7 aa, synthetic construct
RGKEESK

SEQ ID NO: 160619 - protein, 7 aa, synthetic construct
EILPRKS

SEQ ID NO: 160620 - protein, 7 aa, synthetic construct
EGKKPAS

SEQ ID NO: 160621 - protein, 7 aa, synthetic construct
LQDIQKR

SEQ ID NO: 160622 - protein, 7 aa, synthetic construct
RNPEMIR

SEQ ID NO: 160623 - protein, 7 aa, synthetic construct
SRKSEPS

SEQ ID NO: 160624 - protein, 7 aa, synthetic construct
WKQGEGR

SEQ ID NO: 160625 - protein, 7 aa, synthetic construct
NEGPRIK

SEQ ID NO: 160626 - protein, 7 aa, synthetic construct
QKAREPQ

SEQ ID NO: 160627 - protein, 7 aa, synthetic construct
NDPTFKK

SEQ ID NO: 160628 - protein, 7 aa, synthetic construct
YQKRGEN

SEQ ID NO: 160629 - protein, 7 aa, synthetic construct
YPRNKDN

SEQ ID NO: 160630 - protein, 7 aa, synthetic construct
QEVRSAK

SEQ ID NO: 160631 - protein, 7 aa, synthetic construct
QEVQKRT

SEQ ID NO: 160632 - protein, 7 aa, synthetic construct
YEKPDRK

SEQ ID NO: 160633 - protein, 7 aa, synthetic construct
GTSEMKR

SEQ ID NO: 160634 - protein, 7 aa, synthetic construct
GPVRAKD

SEQ ID NO: 160635 - protein, 7 aa, synthetic construct
AMENSKK

SEQ ID NO: 160636 - protein, 7 aa, synthetic construct
LIDGVKR

SEQ ID NO: 160637 - protein, 7 aa, synthetic construct
LDTGYKK

SEQ ID NO: 160638 - protein, 7 aa, synthetic construct
REGRGQV

SEQ ID NO: 160639 - protein, 7 aa, synthetic construct
FTRGEPK

SEQ ID NO: 160640 - protein, 7 aa, synthetic construct
YETSARK

SEQ ID NO: 160641 - protein, 7 aa, synthetic construct
SDQPKIK

SEQ ID NO: 160642 - protein, 7 aa, synthetic construct
NKKDPSN

SEQ ID NO: 160643 - protein, 7 aa, synthetic construct
AETARGK

SEQ ID NO: 160644 - protein, 7 aa, synthetic construct
MDVGKFR

SEQ ID NO: 160645 - protein, 7 aa, synthetic construct
GAEAIKK

SEQ ID NO: 160646 - protein, 7 aa, synthetic construct
KGHQNEK

SEQ ID NO: 160647 - protein, 7 aa, synthetic construct
FERPKLQ

SEQ ID NO: 160648 - protein, 7 aa, synthetic construct
AIRPKAE

SEQ ID NO: 160649 - protein, 7 aa, synthetic construct
QPELKPR

SEQ ID NO: 160650 - protein, 7 aa, synthetic construct
TGRQKSE

SEQ ID NO: 160651 - protein, 7 aa, synthetic construct
ENVRIKM

SEQ ID NO: 160652 - protein, 7 aa, synthetic construct
QRAQRGE

SEQ ID NO: 160653 - protein, 7 aa, synthetic construct
GQETRLK

SEQ ID NO: 160654 - protein, 7 aa, synthetic construct
LNEVSKR

SEQ ID NO: 160655 - protein, 7 aa, synthetic construct
SNDGGRR

SEQ ID NO: 160656 - protein, 7 aa, synthetic construct
ARANRSE

SEQ ID NO: 160657 - protein, 7 aa, synthetic construct
AFTRTEK

SEQ ID NO: 160658 - protein, 7 aa, synthetic construct
IDNTAKR

SEQ ID NO: 160659 - protein, 7 aa, synthetic construct
RASKNDN

SEQ ID NO: 160660 - protein, 7 aa, synthetic construct
LGRPKSE

SEQ ID NO: 160661 - protein, 7 aa, synthetic construct
KGLRNVD

SEQ ID NO: 160662 - protein, 7 aa, synthetic construct
TKREEIR

SEQ ID NO: 160663 - protein, 7 aa, synthetic construct
TGKRNDV

SEQ ID NO: 160664 - protein, 7 aa, synthetic construct
DDAKKAK

SEQ ID NO: 160665 - protein, 7 aa, synthetic construct
TPEVGRK

SEQ ID NO: 160666 - protein, 7 aa, synthetic construct
SETFKRA

SEQ ID NO: 160667 - protein, 7 aa, synthetic construct
YPEGKLR

SEQ ID NO: 160668 - protein, 7 aa, synthetic construct
NDRKQKE

SEQ ID NO: 160669 - protein, 7 aa, synthetic construct
GRKLDGL

SEQ ID NO: 160670 - protein, 7 aa, synthetic construct
GNPERSK

SEQ ID NO: 160671 - protein, 7 aa, synthetic construct
KLSRGID

SEQ ID NO: 160672 - protein, 7 aa, synthetic construct
IRQQLEK

SEQ ID NO: 160673 - protein, 7 aa, synthetic construct
DTRPSKA

SEQ ID NO: 160674 - protein, 7 aa, synthetic construct
SRKNVAE

SEQ ID NO: 160675 - protein, 7 aa, synthetic construct
GLEIPKK

SEQ ID NO: 160676 - protein, 7 aa, synthetic construct
ATEGRTR

SEQ ID NO: 160677 - protein, 7 aa, synthetic construct
GEVPKAK

SEQ ID NO: 160678 - protein, 7 aa, synthetic construct
TDAHAKK

SEQ ID NO: 160679 - protein, 7 aa, synthetic construct
NAESIKK

SEQ ID NO: 160680 - protein, 7 aa, synthetic construct
SDMPKGK

SEQ ID NO: 160681 - protein, 7 aa, synthetic construct
FKRNDGG

SEQ ID NO: 160682 - protein, 7 aa, synthetic construct
EMLNKRT

SEQ ID NO: 160683 - protein, 7 aa, synthetic construct
DRKKTES

SEQ ID NO: 160684 - protein, 7 aa, synthetic construct
NDIARSR

SEQ ID NO: 160685 - protein, 7 aa, synthetic construct
NKRQAEM

SEQ ID NO: 160686 - protein, 7 aa, synthetic construct
LGLNEKK

SEQ ID NO: 160687 - protein, 7 aa, synthetic construct
KSEGYNK

SEQ ID NO: 160688 - protein, 7 aa, synthetic construct
IAEQLKR

SEQ ID NO: 160689 - protein, 7 aa, synthetic construct
YETGRRQ

SEQ ID NO: 160690 - protein, 7 aa, synthetic construct
KYAEHAK

SEQ ID NO: 160691 - protein, 7 aa, synthetic construct
FGEAPKK

SEQ ID NO: 160692 - protein, 7 aa, synthetic construct
GEGLKKQ

SEQ ID NO: 160693 - protein, 7 aa, synthetic construct
KARMQES

SEQ ID NO: 160694 - protein, 7 aa, synthetic construct
KLHAEMR

SEQ ID NO: 160695 - protein, 7 aa, synthetic construct
TDFPKRA

SEQ ID NO: 160696 - protein, 7 aa, synthetic construct
DTRPSKF

SEQ ID NO: 160697 - protein, 7 aa, synthetic construct
WSDGQKK

SEQ ID NO: 160698 - protein, 7 aa, synthetic construct
EQDKKIK

SEQ ID NO: 160699 - protein, 7 aa, synthetic construct
MRRTTET

SEQ ID NO: 160700 - protein, 7 aa, synthetic construct
IMREVRA

SEQ ID NO: 160701 - protein, 7 aa, synthetic construct
QTRKGDA

SEQ ID NO: 160702 - protein, 7 aa, synthetic construct
MEVRRQV

SEQ ID NO: 160703 - protein, 7 aa, synthetic construct
MEGPRVR

SEQ ID NO: 160704 - protein, 7 aa, synthetic construct
GMDGMKR

SEQ ID NO: 160705 - protein, 7 aa, synthetic construct
MRGQKSD

SEQ ID NO: 160706 - protein, 7 aa, synthetic construct
IRKTSLE

SEQ ID NO: 160707 - protein, 7 aa, synthetic construct
IDTGRFK

SEQ ID NO: 160708 - protein, 7 aa, synthetic construct
IRQKSFE

SEQ ID NO: 160709 - protein, 7 aa, synthetic construct
VYETSKK

SEQ ID NO: 160710 - protein, 7 aa, synthetic construct
HTTEGKR

SEQ ID NO: 160711 - protein, 7 aa, synthetic construct
DSRPTKL

SEQ ID NO: 160712 - protein, 7 aa, synthetic construct
QPEMAKK

SEQ ID NO: 160713 - protein, 7 aa, synthetic construct
ERGAKSG

SEQ ID NO: 160714 - protein, 7 aa, synthetic construct
MRREPAN

SEQ ID NO: 160715 - protein, 7 aa, synthetic construct
HSDTLKK

SEQ ID NO: 160716 - protein, 7 aa, synthetic construct
DKQEGRR

SEQ ID NO: 160717 - protein, 7 aa, synthetic construct
RQSRESV

SEQ ID NO: 160718 - protein, 7 aa, synthetic construct
RMKPLHE

SEQ ID NO: 160719 - protein, 7 aa, synthetic construct
PGDGRMR

SEQ ID NO: 160720 - protein, 7 aa, synthetic construct
IPGERPR

SEQ ID NO: 160721 - protein, 7 aa, synthetic construct
PEKKIKD

SEQ ID NO: 160722 - protein, 7 aa, synthetic construct
NDSARLK

SEQ ID NO: 160723 - protein, 7 aa, synthetic construct
GLSSERK

SEQ ID NO: 160724 - protein, 7 aa, synthetic construct
PSERVNR

SEQ ID NO: 160725 - protein, 7 aa, synthetic construct
YEKAVHR

SEQ ID NO: 160726 - protein, 7 aa, synthetic construct
TDTRPRL

SEQ ID NO: 160727 - protein, 7 aa, synthetic construct
RTAEVQR

SEQ ID NO: 160728 - protein, 7 aa, synthetic construct
TVSRRDV

SEQ ID NO: 160729 - protein, 7 aa, synthetic construct
TKARQQD

SEQ ID NO: 160730 - protein, 7 aa, synthetic construct
QKRVESL

SEQ ID NO: 160731 - protein, 7 aa, synthetic construct
PEQKRMN

SEQ ID NO: 160732 - protein, 7 aa, synthetic construct
ASEQLKR

SEQ ID NO: 160733 - protein, 7 aa, synthetic construct
MFKVADR

SEQ ID NO: 160734 - protein, 7 aa, synthetic construct
KPRTMID

SEQ ID NO: 160735 - protein, 7 aa, synthetic construct
TETAQKK

SEQ ID NO: 160736 - protein, 7 aa, synthetic construct
SRQKQQD

SEQ ID NO: 160737 - protein, 7 aa, synthetic construct
REDMLKR

SEQ ID NO: 160738 - protein, 7 aa, synthetic construct
ESKSVRA

SEQ ID NO: 160739 - protein, 7 aa, synthetic construct
TKVVKVN

SEQ ID NO: 160740 - protein, 7 aa, synthetic construct
HGKGIER

SEQ ID NO: 160741 - protein, 7 aa, synthetic construct
SELATKK

SEQ ID NO: 160742 - protein, 7 aa, synthetic construct
NVDTGKR

SEQ ID NO: 160743 - protein, 7 aa, synthetic construct
YQQGERK

SEQ ID NO: 160744 - protein, 7 aa, synthetic construct
RGKAADI

SEQ ID NO: 160745 - protein, 7 aa, synthetic construct
IYLTEKK

SEQ ID NO: 160746 - protein, 7 aa, synthetic construct
IRGQTIA

SEQ ID NO: 160747 - protein, 7 aa, synthetic construct
TDGTSKR

SEQ ID NO: 160748 - protein, 7 aa, synthetic construct
VEVKVRM

SEQ ID NO: 160749 - protein, 7 aa, synthetic construct
MIEGSKK

SEQ ID NO: 160750 - protein, 7 aa, synthetic construct
SEQPKVR

SEQ ID NO: 160751 - protein, 7 aa, synthetic construct
GEGTLKK

SEQ ID NO: 160752 - protein, 7 aa, synthetic construct
EKPRTDK

SEQ ID NO: 160753 - protein, 7 aa, synthetic construct
REERAKV

SEQ ID NO: 160754 - protein, 7 aa, synthetic construct
NRGESRA

SEQ ID NO: 160755 - protein, 7 aa, synthetic construct
NRSQKSD

SEQ ID NO: 160756 - protein, 7 aa, synthetic construct
TDGKKYQ

SEQ ID NO: 160757 - protein, 7 aa, synthetic construct
GDMGKRY

SEQ ID NO: 160758 - protein, 7 aa, synthetic construct
EITTKMK

SEQ ID NO: 160759 - protein, 7 aa, synthetic construct
AEQVKTK

SEQ ID NO: 160760 - protein, 7 aa, synthetic construct
NKKYVQD

SEQ ID NO: 160761 - protein, 7 aa, synthetic construct
NRGHVEK

SEQ ID NO: 160762 - protein, 7 aa, synthetic construct
RVKTPDS

SEQ ID NO: 160763 - protein, 7 aa, synthetic construct
KDRPRDA

SEQ ID NO: 160764 - protein, 7 aa, synthetic construct
IRQRGSE

SEQ ID NO: 160765 - protein, 7 aa, synthetic construct
YEKGHKS

SEQ ID NO: 160766 - protein, 7 aa, synthetic construct
YRKAFDP

SEQ ID NO: 160767 - protein, 7 aa, synthetic construct
DQKQDKK

SEQ ID NO: 160768 - protein, 7 aa, synthetic construct
ADRQPKQ

SEQ ID NO: 160769 - protein, 7 aa, synthetic construct
GRAMRLE

SEQ ID NO: 160770 - protein, 7 aa, synthetic construct
TQEVRKG

SEQ ID NO: 160771 - protein, 7 aa, synthetic construct
IRGITRD

SEQ ID NO: 160772 - protein, 7 aa, synthetic construct
AVDGIKK

SEQ ID NO: 160773 - protein, 7 aa, synthetic construct
GEQKAVK

SEQ ID NO: 160774 - protein, 7 aa, synthetic construct
DVGQARR

SEQ ID NO: 160775 - protein, 7 aa, synthetic construct
TKQRDPS

SEQ ID NO: 160776 - protein, 7 aa, synthetic construct
NKPRDKE

SEQ ID NO: 160777 - protein, 7 aa, synthetic construct
VRGEVNR

SEQ ID NO: 160778 - protein, 7 aa, synthetic construct
TQETHKK

SEQ ID NO: 160779 - protein, 7 aa, synthetic construct
TDRPKAQ

SEQ ID NO: 160780 - protein, 7 aa, synthetic construct
KPRGATD

SEQ ID NO: 160781 - protein, 7 aa, synthetic construct
YRKVLDS

SEQ ID NO: 160782 - protein, 7 aa, synthetic construct
EFKVHPK

SEQ ID NO: 160783 - protein, 7 aa, synthetic construct
DQGPRQR

SEQ ID NO: 160784 - protein, 7 aa, synthetic construct
DRPHMRG

SEQ ID NO: 160785 - protein, 7 aa, synthetic construct
DATTRKL

SEQ ID NO: 160786 - protein, 7 aa, synthetic construct
GEVPKKS

SEQ ID NO: 160787 - protein, 7 aa, synthetic construct
RSHAIDK

SEQ ID NO: 160788 - protein, 7 aa, synthetic construct
AEGKIRT

SEQ ID NO: 160789 - protein, 7 aa, synthetic construct
MKARGPD

SEQ ID NO: 160790 - protein, 7 aa, synthetic construct
GDVGKLR

SEQ ID NO: 160791 - protein, 7 aa, synthetic construct
AGKKDTQ

SEQ ID NO: 160792 - protein, 7 aa, synthetic construct
TGEQIKK

SEQ ID NO: 160793 - protein, 7 aa, synthetic construct
TIESGRK

SEQ ID NO: 160794 - protein, 7 aa, synthetic construct
FKGTFER

SEQ ID NO: 160795 - protein, 7 aa, synthetic construct
LRSKLLD

SEQ ID NO: 160796 - protein, 7 aa, synthetic construct
APEVAKR

SEQ ID NO: 160797 - protein, 7 aa, synthetic construct
KPRSMAE

SEQ ID NO: 160798 - protein, 7 aa, synthetic construct
FEKGVQR

SEQ ID NO: 160799 - protein, 7 aa, synthetic construct
AEQRKFN

SEQ ID NO: 160800 - protein, 7 aa, synthetic construct
DREARLK

SEQ ID NO: 160801 - protein, 7 aa, synthetic construct
GRKADQM

SEQ ID NO: 160802 - protein, 7 aa, synthetic construct
SIDRPAK

SEQ ID NO: 160803 - protein, 7 aa, synthetic construct
AEREMKK

SEQ ID NO: 160804 - protein, 7 aa, synthetic construct
MKRLGAE

SEQ ID NO: 160805 - protein, 7 aa, synthetic construct
VRKQDAS

SEQ ID NO: 160806 - protein, 7 aa, synthetic construct
AQQKRFD

SEQ ID NO: 160807 - protein, 7 aa, synthetic construct
PSTKRGE

SEQ ID NO: 160808 - protein, 7 aa, synthetic construct
MPKMLKM

SEQ ID NO: 160809 - protein, 7 aa, synthetic construct
SEGKPMK

SEQ ID NO: 160810 - protein, 7 aa, synthetic construct
IAEGTKK

SEQ ID NO: 160811 - protein, 7 aa, synthetic construct
RPRENQY

SEQ ID NO: 160812 - protein, 7 aa, synthetic construct
IDVPSKR

SEQ ID NO: 160813 - protein, 7 aa, synthetic construct
NSGKRTD

SEQ ID NO: 160814 - protein, 7 aa, synthetic construct
QAAVERR

SEQ ID NO: 160815 - protein, 7 aa, synthetic construct
YENNVKK

SEQ ID NO: 160816 - protein, 7 aa, synthetic construct
ITRGNRD

SEQ ID NO: 160817 - protein, 7 aa, synthetic construct
YDNAAKR

SEQ ID NO: 160818 - protein, 7 aa, synthetic construct
SGKKDPN

SEQ ID NO: 160819 - protein, 7 aa, synthetic construct
EAAPKVR

SEQ ID NO: 160820 - protein, 7 aa, synthetic construct
YPDMRPK

SEQ ID NO: 160821 - protein, 7 aa, synthetic construct
SQEAVKR

SEQ ID NO: 160822 - protein, 7 aa, synthetic construct
YKRNADP

SEQ ID NO: 160823 - protein, 7 aa, synthetic construct
YKRTQSE

SEQ ID NO: 160824 - protein, 7 aa, synthetic construct
MKRGGEG

SEQ ID NO: 160825 - protein, 7 aa, synthetic construct
QDGTRSK

SEQ ID NO: 160826 - protein, 7 aa, synthetic construct
RKAAPDS

SEQ ID NO: 160827 - protein, 7 aa, synthetic construct
RQPHTER

SEQ ID NO: 160828 - protein, 7 aa, synthetic construct
VHKKGDG

SEQ ID NO: 160829 - protein, 7 aa, synthetic construct
GEIKQKI

SEQ ID NO: 160830 - protein, 7 aa, synthetic construct
AEGKAAK

SEQ ID NO: 160831 - protein, 7 aa, synthetic construct
EDKVKRS

SEQ ID NO: 160832 - protein, 7 aa, synthetic construct
GEQIKKS

SEQ ID NO: 160833 - protein, 7 aa, synthetic construct
LYEGAKK

SEQ ID NO: 160834 - protein, 7 aa, synthetic construct
RMKNPDL

SEQ ID NO: 160835 - protein, 7 aa, synthetic construct
IQQEVRK

SEQ ID NO: 160836 - protein, 7 aa, synthetic construct
RSSETPR

SEQ ID NO: 160837 - protein, 7 aa, synthetic construct
MEGRVRT

SEQ ID NO: 160838 - protein, 7 aa, synthetic construct
FSAENRK

SEQ ID NO: 160839 - protein, 7 aa, synthetic construct
KYDKNRD

SEQ ID NO: 160840 - protein, 7 aa, synthetic construct
LQRGDRA

SEQ ID NO: 160841 - protein, 7 aa, synthetic construct
FKRALIE

SEQ ID NO: 160842 - protein, 7 aa, synthetic construct
SENAFKK

SEQ ID NO: 160843 - protein, 7 aa, synthetic construct
YNSENKK

SEQ ID NO: 160844 - protein, 7 aa, synthetic construct
TEFGKRQ

SEQ ID NO: 160845 - protein, 7 aa, synthetic construct
TLESLKK

SEQ ID NO: 160846 - protein, 7 aa, synthetic construct
FEMGTKK

SEQ ID NO: 160847 - protein, 7 aa, synthetic construct
EKKAQTW

SEQ ID NO: 160848 - protein, 7 aa, synthetic construct
FTEVNKR

SEQ ID NO: 160849 - protein, 7 aa, synthetic construct
TEVKDRR

SEQ ID NO: 160850 - protein, 7 aa, synthetic construct
MQEVGRK

SEQ ID NO: 160851 - protein, 7 aa, synthetic construct
KNDYNIK

SEQ ID NO: 160852 - protein, 7 aa, synthetic construct
DVVPRRG

SEQ ID NO: 160853 - protein, 7 aa, synthetic construct
MARNKQD

SEQ ID NO: 160854 - protein, 7 aa, synthetic construct
IPDTPKR

SEQ ID NO: 160855 - protein, 7 aa, synthetic construct
VSRKEAS

SEQ ID NO: 160856 - protein, 7 aa, synthetic construct
YDKLHLR

SEQ ID NO: 160857 - protein, 7 aa, synthetic construct
DSLKAKF

SEQ ID NO: 160858 - protein, 7 aa, synthetic construct
KKTYNTE

SEQ ID NO: 160859 - protein, 7 aa, synthetic construct
NYEGSKR

SEQ ID NO: 160860 - protein, 7 aa, synthetic construct
TEKPDKK

SEQ ID NO: 160861 - protein, 7 aa, synthetic construct
TLETAKR

SEQ ID NO: 160862 - protein, 7 aa, synthetic construct
FSRKADG

SEQ ID NO: 160863 - protein, 7 aa, synthetic construct
QVERVSR

SEQ ID NO: 160864 - protein, 7 aa, synthetic construct
DIAPRSR

SEQ ID NO: 160865 - protein, 7 aa, synthetic construct
KGHEVGR

SEQ ID NO: 160866 - protein, 7 aa, synthetic construct
DPGQMKK

SEQ ID NO: 160867 - protein, 7 aa, synthetic construct
YKQHNEK

SEQ ID NO: 160868 - protein, 7 aa, synthetic construct
IGRETQK

SEQ ID NO: 160869 - protein, 7 aa, synthetic construct
NETGSKR

SEQ ID NO: 160870 - protein, 7 aa, synthetic construct
NKHQRDS

SEQ ID NO: 160871 - protein, 7 aa, synthetic construct
YARSESK

SEQ ID NO: 160872 - protein, 7 aa, synthetic construct
YVENARK

SEQ ID NO: 160873 - protein, 7 aa, synthetic construct
TRQLRTE

SEQ ID NO: 160874 - protein, 7 aa, synthetic construct
GRKAESS

SEQ ID NO: 160875 - protein, 7 aa, synthetic construct
EYKVAKA

SEQ ID NO: 160876 - protein, 7 aa, synthetic construct
QDSKPTR

SEQ ID NO: 160877 - protein, 7 aa, synthetic construct
TRQRELN

SEQ ID NO: 160878 - protein, 7 aa, synthetic construct
AKQRGSD

SEQ ID NO: 160879 - protein, 7 aa, synthetic construct
GYEVRKQ

SEQ ID NO: 160880 - protein, 7 aa, synthetic construct
EGKPLKS

SEQ ID NO: 160881 - protein, 7 aa, synthetic construct
STEREKK

SEQ ID NO: 160882 - protein, 7 aa, synthetic construct
EVRQAKF

SEQ ID NO: 160883 - protein, 7 aa, synthetic construct
SRKLDLT

SEQ ID NO: 160884 - protein, 7 aa, synthetic construct
ESGAKIK

SEQ ID NO: 160885 - protein, 7 aa, synthetic construct
VGKNKDL

SEQ ID NO: 160886 - protein, 7 aa, synthetic construct
KNLRNLE

SEQ ID NO: 160887 - protein, 7 aa, synthetic construct
QTAESKK

SEQ ID NO: 160888 - protein, 7 aa, synthetic construct
DSNIMKR

SEQ ID NO: 160889 - protein, 7 aa, synthetic construct
QTRQSRE

SEQ ID NO: 160890 - protein, 7 aa, synthetic construct
MDVGIKR

SEQ ID NO: 160891 - protein, 7 aa, synthetic construct
NDKPRNS

SEQ ID NO: 160892 - protein, 7 aa, synthetic construct
GRQRMLE

SEQ ID NO: 160893 - protein, 7 aa, synthetic construct
IDRPRFS

SEQ ID NO: 160894 - protein, 7 aa, synthetic construct
DGNPKFK

SEQ ID NO: 160895 - protein, 7 aa, synthetic construct
NEQQKGR

SEQ ID NO: 160896 - protein, 7 aa, synthetic construct
NEAMQKK

SEQ ID NO: 160897 - protein, 7 aa, synthetic construct
EHKPIKY

SEQ ID NO: 160898 - protein, 7 aa, synthetic construct
QTEVRQK

SEQ ID NO: 160899 - protein, 7 aa, synthetic construct
HMATEKK

SEQ ID NO: 160900 - protein, 7 aa, synthetic construct
TDNLQRK

SEQ ID NO: 160901 - protein, 7 aa, synthetic construct
LTGEMRK

SEQ ID NO: 160902 - protein, 7 aa, synthetic construct
MSKYEKH

SEQ ID NO: 160903 - protein, 7 aa, synthetic construct
SQELRRQ

SEQ ID NO: 160904 - protein, 7 aa, synthetic construct
QEIKMQK

SEQ ID NO: 160905 - protein, 7 aa, synthetic construct
EYSNKNK

SEQ ID NO: 160906 - protein, 7 aa, synthetic construct
MPEKPKQ

SEQ ID NO: 160907 - protein, 7 aa, synthetic construct
EQGTKQR

SEQ ID NO: 160908 - protein, 7 aa, synthetic construct
KASSRFE

SEQ ID NO: 160909 - protein, 7 aa, synthetic construct
NRKLTES

SEQ ID NO: 160910 - protein, 7 aa, synthetic construct
VKRDPHM

SEQ ID NO: 160911 - protein, 7 aa, synthetic construct
RKQISVD

SEQ ID NO: 160912 - protein, 7 aa, synthetic construct
MDRPRAQ

SEQ ID NO: 160913 - protein, 7 aa, synthetic construct
AMEQTKK

SEQ ID NO: 160914 - protein, 7 aa, synthetic construct
NDQGTKR

SEQ ID NO: 160915 - protein, 7 aa, synthetic construct
QESGLKK

SEQ ID NO: 160916 - protein, 7 aa, synthetic construct
EQTKPKV

SEQ ID NO: 160917 - protein, 7 aa, synthetic construct
SYETNKR

SEQ ID NO: 160918 - protein, 7 aa, synthetic construct
GDNPRSK

SEQ ID NO: 160919 - protein, 7 aa, synthetic construct
WKNQLDR

SEQ ID NO: 160920 - protein, 7 aa, synthetic construct
TKPRDSH

SEQ ID NO: 160921 - protein, 7 aa, synthetic construct
FGDGIKR

SEQ ID NO: 160922 - protein, 7 aa, synthetic construct
ERIKPNF

SEQ ID NO: 160923 - protein, 7 aa, synthetic construct
ENRSKGG

SEQ ID NO: 160924 - protein, 7 aa, synthetic construct
IRNMESR

SEQ ID NO: 160925 - protein, 7 aa, synthetic construct
VEVVNKK

SEQ ID NO: 160926 - protein, 7 aa, synthetic construct
IKRQEMY

SEQ ID NO: 160927 - protein, 7 aa, synthetic construct
KSHPPRD

SEQ ID NO: 160928 - protein, 7 aa, synthetic construct
NETARQR

SEQ ID NO: 160929 - protein, 7 aa, synthetic construct
AENQKGK

SEQ ID NO: 160930 - protein, 7 aa, synthetic construct
IKHKDPG

SEQ ID NO: 160931 - protein, 7 aa, synthetic construct
HKQQRDI

SEQ ID NO: 160932 - protein, 7 aa, synthetic construct
ERGQAVR

SEQ ID NO: 160933 - protein, 7 aa, synthetic construct
SMKRGQD

SEQ ID NO: 160934 - protein, 7 aa, synthetic construct
RARDKLD

SEQ ID NO: 160935 - protein, 7 aa, synthetic construct
QMHPRNM

SEQ ID NO: 160936 - protein, 7 aa, synthetic construct
NRKSLVD

SEQ ID NO: 160937 - protein, 7 aa, synthetic construct
FKQRDKD

SEQ ID NO: 160938 - protein, 7 aa, synthetic construct
RGNKQET

SEQ ID NO: 160939 - protein, 7 aa, synthetic construct
NKNRQET

SEQ ID NO: 160940 - protein, 7 aa, synthetic construct
KQRMQSD

SEQ ID NO: 160941 - protein, 7 aa, synthetic construct
AEVRKAQ

SEQ ID NO: 160942 - protein, 7 aa, synthetic construct
SAGETKR

SEQ ID NO: 160943 - protein, 7 aa, synthetic construct
QQTGEKR

SEQ ID NO: 160944 - protein, 7 aa, synthetic construct
KSRQGEG

SEQ ID NO: 160945 - protein, 7 aa, synthetic construct
PEQVRMK

SEQ ID NO: 160946 - protein, 7 aa, synthetic construct
RAHIQEK

SEQ ID NO: 160947 - protein, 7 aa, synthetic construct
ADQRVRQ

SEQ ID NO: 160948 - protein, 7 aa, synthetic construct
YYKQPDK

SEQ ID NO: 160949 - protein, 7 aa, synthetic construct
RQTRDVS

SEQ ID NO: 160950 - protein, 7 aa, synthetic construct
DLEKRAK

SEQ ID NO: 160951 - protein, 7 aa, synthetic construct
RRAPVGD

SEQ ID NO: 160952 - protein, 7 aa, synthetic construct
MPRKADI

SEQ ID NO: 160953 - protein, 7 aa, synthetic construct
PMRMRGD

SEQ ID NO: 160954 - protein, 7 aa, synthetic construct
FPRRGPE

SEQ ID NO: 160955 - protein, 7 aa, synthetic construct
YRKGGDT

SEQ ID NO: 160956 - protein, 7 aa, synthetic construct
EKPRNNL

SEQ ID NO: 160957 - protein, 7 aa, synthetic construct
DREIRTK

SEQ ID NO: 160958 - protein, 7 aa, synthetic construct
VAEGVKR

SEQ ID NO: 160959 - protein, 7 aa, synthetic construct
QQDNQKK

SEQ ID NO: 160960 - protein, 7 aa, synthetic construct
RKGNPDI

SEQ ID NO: 160961 - protein, 7 aa, synthetic construct
GKRNEMN

SEQ ID NO: 160962 - protein, 7 aa, synthetic construct
ATKPRSE

SEQ ID NO: 160963 - protein, 7 aa, synthetic construct
LDGVMKR

SEQ ID NO: 160964 - protein, 7 aa, synthetic construct
RGEQSTK

SEQ ID NO: 160965 - protein, 7 aa, synthetic construct
KALPRYD

SEQ ID NO: 160966 - protein, 7 aa, synthetic construct
GSRKMVE

SEQ ID NO: 160967 - protein, 7 aa, synthetic construct
SVDNMRK

SEQ ID NO: 160968 - protein, 7 aa, synthetic construct
HKQKDNF

SEQ ID NO: 160969 - protein, 7 aa, synthetic construct
IPRHTPA

SEQ ID NO: 160970 - protein, 7 aa, synthetic construct
GGDNMKK

SEQ ID NO: 160971 - protein, 7 aa, synthetic construct
RSNRQEV

SEQ ID NO: 160972 - protein, 7 aa, synthetic construct
ASEIRIK

SEQ ID NO: 160973 - protein, 7 aa, synthetic construct
IRRENSA

SEQ ID NO: 160974 - protein, 7 aa, synthetic construct
IQTSERR

SEQ ID NO: 160975 - protein, 7 aa, synthetic construct
QKKVIDH

SEQ ID NO: 160976 - protein, 7 aa, synthetic construct
RPVRDAL

SEQ ID NO: 160977 - protein, 7 aa, synthetic construct
RGARTGD

SEQ ID NO: 160978 - protein, 7 aa, synthetic construct
YSRKEQN

SEQ ID NO: 160979 - protein, 7 aa, synthetic construct
ATRKQME

SEQ ID NO: 160980 - protein, 7 aa, synthetic construct
PVKRPDV

SEQ ID NO: 160981 - protein, 7 aa, synthetic construct
FDNTAKR

SEQ ID NO: 160982 - protein, 7 aa, synthetic construct
YDSEKKR

SEQ ID NO: 160983 - protein, 7 aa, synthetic construct
DLATRNR

SEQ ID NO: 160984 - protein, 7 aa, synthetic construct
QRDSHGK

SEQ ID NO: 160985 - protein, 7 aa, synthetic construct
LKQRDNS

SEQ ID NO: 160986 - protein, 7 aa, synthetic construct
YSESLRK

SEQ ID NO: 160987 - protein, 7 aa, synthetic construct
FKRSQDG

SEQ ID NO: 160988 - protein, 7 aa, synthetic construct
SYARESK

SEQ ID NO: 160989 - protein, 7 aa, synthetic construct
KVMPRSE

SEQ ID NO: 160990 - protein, 7 aa, synthetic construct
MRKVALE

SEQ ID NO: 160991 - protein, 7 aa, synthetic construct
RVQHEPK

SEQ ID NO: 160992 - protein, 7 aa, synthetic construct
TPEQAKR

SEQ ID NO: 160993 - protein, 7 aa, synthetic construct
YEVNNKK

SEQ ID NO: 160994 - protein, 7 aa, synthetic construct
NDVGKQR

SEQ ID NO: 160995 - protein, 7 aa, synthetic construct
MYDQGKK

SEQ ID NO: 160996 - protein, 7 aa, synthetic construct
TGRNERS

SEQ ID NO: 160997 - protein, 7 aa, synthetic construct
SEAQRVK

SEQ ID NO: 160998 - protein, 7 aa, synthetic construct
PEGAKKV

SEQ ID NO: 160999 - protein, 7 aa, synthetic construct
TDALVKR

SEQ ID NO: 161000 - protein, 7 aa, synthetic construct
PKRNNDG

SEQ ID NO: 161001 - protein, 7 aa, synthetic construct
MRKQYGE

SEQ ID NO: 161002 - protein, 7 aa, synthetic construct
KPRVPEY

SEQ ID NO: 161003 - protein, 7 aa, synthetic construct
TREHRSG

SEQ ID NO: 161004 - protein, 7 aa, synthetic construct
IVSRIKD

SEQ ID NO: 161005 - protein, 7 aa, synthetic construct
ADGPKVR

SEQ ID NO: 161006 - protein, 7 aa, synthetic construct
YSESSKR

SEQ ID NO: 161007 - protein, 7 aa, synthetic construct
MDMPKNK

SEQ ID NO: 161008 - protein, 7 aa, synthetic construct
NDAGMRK

SEQ ID NO: 161009 - protein, 7 aa, synthetic construct
VRKQALE

SEQ ID NO: 161010 - protein, 7 aa, synthetic construct
IMNEVRR

SEQ ID NO: 161011 - protein, 7 aa, synthetic construct
QRRVETT

SEQ ID NO: 161012 - protein, 7 aa, synthetic construct
SMEGKRQ

SEQ ID NO: 161013 - protein, 7 aa, synthetic construct
TESSGKR

SEQ ID NO: 161014 - protein, 7 aa, synthetic construct
DKDGIRK

SEQ ID NO: 161015 - protein, 7 aa, synthetic construct
PERPKVT

SEQ ID NO: 161016 - protein, 7 aa, synthetic construct
TDLGRQK

SEQ ID NO: 161017 - protein, 7 aa, synthetic construct
IRDHAPK

SEQ ID NO: 161018 - protein, 7 aa, synthetic construct
DARPARA

SEQ ID NO: 161019 - protein, 7 aa, synthetic construct
AELAKRT

SEQ ID NO: 161020 - protein, 7 aa, synthetic construct
QESAKSK

SEQ ID NO: 161021 - protein, 7 aa, synthetic construct
SSKKQDQ

SEQ ID NO: 161022 - protein, 7 aa, synthetic construct
TEQIRGK

SEQ ID NO: 161023 - protein, 7 aa, synthetic construct
RMTGEGK

SEQ ID NO: 161024 - protein, 7 aa, synthetic construct
RTRETEK

SEQ ID NO: 161025 - protein, 7 aa, synthetic construct
LKRNDVT

SEQ ID NO: 161026 - protein, 7 aa, synthetic construct
VKRGTET

SEQ ID NO: 161027 - protein, 7 aa, synthetic construct
PSETNRK

SEQ ID NO: 161028 - protein, 7 aa, synthetic construct
RGRDVQN

SEQ ID NO: 161029 - protein, 7 aa, synthetic construct
YAREAIR

SEQ ID NO: 161030 - protein, 7 aa, synthetic construct
KRVPNNE

SEQ ID NO: 161031 - protein, 7 aa, synthetic construct
YIKHEGK

SEQ ID NO: 161032 - protein, 7 aa, synthetic construct
GKLKKDD

SEQ ID NO: 161033 - protein, 7 aa, synthetic construct
ERPKQTG

SEQ ID NO: 161034 - protein, 7 aa, synthetic construct
KQRMNPE

SEQ ID NO: 161035 - protein, 7 aa, synthetic construct
SIETVRK

SEQ ID NO: 161036 - protein, 7 aa, synthetic construct
NVRRGVE

SEQ ID NO: 161037 - protein, 7 aa, synthetic construct
GQERVQR

SEQ ID NO: 161038 - protein, 7 aa, synthetic construct
SIEIRGK

SEQ ID NO: 161039 - protein, 7 aa, synthetic construct
ETTLKRI

SEQ ID NO: 161040 - protein, 7 aa, synthetic construct
ADKRERN

SEQ ID NO: 161041 - protein, 7 aa, synthetic construct
ITDSHKR

SEQ ID NO: 161042 - protein, 7 aa, synthetic construct
TRKQDTS

SEQ ID NO: 161043 - protein, 7 aa, synthetic construct
ENAQTKK

SEQ ID NO: 161044 - protein, 7 aa, synthetic construct
KKNFQSD

SEQ ID NO: 161045 - protein, 7 aa, synthetic construct
TIETMKR

SEQ ID NO: 161046 - protein, 7 aa, synthetic construct
LTDHGKK

SEQ ID NO: 161047 - protein, 7 aa, synthetic construct
AEPPTKK

SEQ ID NO: 161048 - protein, 7 aa, synthetic construct
RLARDQS

SEQ ID NO: 161049 - protein, 7 aa, synthetic construct
LRGKAQD

SEQ ID NO: 161050 - protein, 7 aa, synthetic construct
SRDRENK

SEQ ID NO: 161051 - protein, 7 aa, synthetic construct
DETKKAK

SEQ ID NO: 161052 - protein, 7 aa, synthetic construct
DRPRQPN

SEQ ID NO: 161053 - protein, 7 aa, synthetic construct
DTGNKRQ

SEQ ID NO: 161054 - protein, 7 aa, synthetic construct
RQVQRLE

SEQ ID NO: 161055 - protein, 7 aa, synthetic construct
RPVRDEK

SEQ ID NO: 161056 - protein, 7 aa, synthetic construct
AEVKKKD

SEQ ID NO: 161057 - protein, 7 aa, synthetic construct
IRDQSRA

SEQ ID NO: 161058 - protein, 7 aa, synthetic construct
TSGAERK

SEQ ID NO: 161059 - protein, 7 aa, synthetic construct
ADRPRQN

SEQ ID NO: 161060 - protein, 7 aa, synthetic construct
DSKPRNQ

SEQ ID NO: 161061 - protein, 7 aa, synthetic construct
QEKTEKR

SEQ ID NO: 161062 - protein, 7 aa, synthetic construct
VGTTERR

SEQ ID NO: 161063 - protein, 7 aa, synthetic construct
QSEQVRR

SEQ ID NO: 161064 - protein, 7 aa, synthetic construct
EKKKDMT

SEQ ID NO: 161065 - protein, 7 aa, synthetic construct
KQSKKED

SEQ ID NO: 161066 - protein, 7 aa, synthetic construct
NSGPKRD

SEQ ID NO: 161067 - protein, 7 aa, synthetic construct
AVRAKLD

SEQ ID NO: 161068 - protein, 7 aa, synthetic construct
VEGNVKR

SEQ ID NO: 161069 - protein, 7 aa, synthetic construct
DARPVRS

SEQ ID NO: 161070 - protein, 7 aa, synthetic construct
NRGKNNE

SEQ ID NO: 161071 - protein, 7 aa, synthetic construct
LRQNKND

SEQ ID NO: 161072 - protein, 7 aa, synthetic construct
PVEQKRQ

SEQ ID NO: 161073 - protein, 7 aa, synthetic construct
ENVPKKF

SEQ ID NO: 161074 - protein, 7 aa, synthetic construct
ILDAPKR

SEQ ID NO: 161075 - protein, 7 aa, synthetic construct
YQENMRK

SEQ ID NO: 161076 - protein, 7 aa, synthetic construct
LDNNSKR

SEQ ID NO: 161077 - protein, 7 aa, synthetic construct
AQERGNK

SEQ ID NO: 161078 - protein, 7 aa, synthetic construct
VERPISK

SEQ ID NO: 161079 - protein, 7 aa, synthetic construct
DVLPKNK

SEQ ID NO: 161080 - protein, 7 aa, synthetic construct
GTMTEKK

SEQ ID NO: 161081 - protein, 7 aa, synthetic construct
GAEQRVK

SEQ ID NO: 161082 - protein, 7 aa, synthetic construct
QMELKRQ

SEQ ID NO: 161083 - protein, 7 aa, synthetic construct
HMKPRLE

SEQ ID NO: 161084 - protein, 7 aa, synthetic construct
EIQQNKK

SEQ ID NO: 161085 - protein, 7 aa, synthetic construct
RVIPKET

SEQ ID NO: 161086 - protein, 7 aa, synthetic construct
HTTGEKK

SEQ ID NO: 161087 - protein, 7 aa, synthetic construct
VDNDRKK

SEQ ID NO: 161088 - protein, 7 aa, synthetic construct
VKRQMFE

SEQ ID NO: 161089 - protein, 7 aa, synthetic construct
RQDGHAK

SEQ ID NO: 161090 - protein, 7 aa, synthetic construct
QNARQKD

SEQ ID NO: 161091 - protein, 7 aa, synthetic construct
MDHATKK

SEQ ID NO: 161092 - protein, 7 aa, synthetic construct
YKDSGHR

SEQ ID NO: 161093 - protein, 7 aa, synthetic construct
PEAKKNS

SEQ ID NO: 161094 - protein, 7 aa, synthetic construct
IRGEARG

SEQ ID NO: 161095 - protein, 7 aa, synthetic construct
EARNAKL

SEQ ID NO: 161096 - protein, 7 aa, synthetic construct
QRGIAPQ

SEQ ID NO: 161097 - protein, 7 aa, synthetic construct
ADRPKNA

SEQ ID NO: 161098 - protein, 7 aa, synthetic construct
TENVRLR

SEQ ID NO: 161099 - protein, 7 aa, synthetic construct
LTRNVER

SEQ ID NO: 161100 - protein, 7 aa, synthetic construct
VTDHVKK

SEQ ID NO: 161101 - protein, 7 aa, synthetic construct
FRKPSMD

SEQ ID NO: 161102 - protein, 7 aa, synthetic construct
KKQQPES

SEQ ID NO: 161103 - protein, 7 aa, synthetic construct
MKRGISE

SEQ ID NO: 161104 - protein, 7 aa, synthetic construct
TDIKPFK

SEQ ID NO: 161105 - protein, 7 aa, synthetic construct
DRPRAPQ

SEQ ID NO: 161106 - protein, 7 aa, synthetic construct
TRKSDPV

SEQ ID NO: 161107 - protein, 7 aa, synthetic construct
SNEGVKK

SEQ ID NO: 161108 - protein, 7 aa, synthetic construct
QQEVRTK

SEQ ID NO: 161109 - protein, 7 aa, synthetic construct
IKYETRN

SEQ ID NO: 161110 - protein, 7 aa, synthetic construct
IKKQHDT

SEQ ID NO: 161111 - protein, 7 aa, synthetic construct
EGKSSLK

SEQ ID NO: 161112 - protein, 7 aa, synthetic construct
EFKTSSK

SEQ ID NO: 161113 - protein, 7 aa, synthetic construct
IDGPRVK

SEQ ID NO: 161114 - protein, 7 aa, synthetic construct
DRKHTNM

SEQ ID NO: 161115 - protein, 7 aa, synthetic construct
VGKKEPY

SEQ ID NO: 161116 - protein, 7 aa, synthetic construct
EMGTKRM

SEQ ID NO: 161117 - protein, 7 aa, synthetic construct
TRGARIE

SEQ ID NO: 161118 - protein, 7 aa, synthetic construct
DRPRDRV

SEQ ID NO: 161119 - protein, 7 aa, synthetic construct
GLDGNKR

SEQ ID NO: 161120 - protein, 7 aa, synthetic construct
IAEAVRK

SEQ ID NO: 161121 - protein, 7 aa, synthetic construct
SMDGNRK

SEQ ID NO: 161122 - protein, 7 aa, synthetic construct
WDEKVKR

SEQ ID NO: 161123 - protein, 7 aa, synthetic construct
QQDGMRK

SEQ ID NO: 161124 - protein, 7 aa, synthetic construct
YITNRKD

SEQ ID NO: 161125 - protein, 7 aa, synthetic construct
RINREMP

SEQ ID NO: 161126 - protein, 7 aa, synthetic construct
NFESIKK

SEQ ID NO: 161127 - protein, 7 aa, synthetic construct
GDDRVKK

SEQ ID NO: 161128 - protein, 7 aa, synthetic construct
PETPRIK

SEQ ID NO: 161129 - protein, 7 aa, synthetic construct
DLGPARR

SEQ ID NO: 161130 - protein, 7 aa, synthetic construct
MERPIRN

SEQ ID NO: 161131 - protein, 7 aa, synthetic construct
PNEAMRR

SEQ ID NO: 161132 - protein, 7 aa, synthetic construct
RRTDPGS

SEQ ID NO: 161133 - protein, 7 aa, synthetic construct
DKEIRKT

SEQ ID NO: 161134 - protein, 7 aa, synthetic construct
AETPKKT

SEQ ID NO: 161135 - protein, 7 aa, synthetic construct
SEMPKRA

SEQ ID NO: 161136 - protein, 7 aa, synthetic construct
GEGVVKK

SEQ ID NO: 161137 - protein, 7 aa, synthetic construct
KRSLSEG

SEQ ID NO: 161138 - protein, 7 aa, synthetic construct
INETTRR

SEQ ID NO: 161139 - protein, 7 aa, synthetic construct
FPKRGID

SEQ ID NO: 161140 - protein, 7 aa, synthetic construct
RMKNPEI

SEQ ID NO: 161141 - protein, 7 aa, synthetic construct
RVDGVIR

SEQ ID NO: 161142 - protein, 7 aa, synthetic construct
DGGQRMK

SEQ ID NO: 161143 - protein, 7 aa, synthetic construct
VQKRGLD

SEQ ID NO: 161144 - protein, 7 aa, synthetic construct
ENVKRAY

SEQ ID NO: 161145 - protein, 7 aa, synthetic construct
NNENRKT

SEQ ID NO: 161146 - protein, 7 aa, synthetic construct
EKRQVLQ

SEQ ID NO: 161147 - protein, 7 aa, synthetic construct
AYEKQSK

SEQ ID NO: 161148 - protein, 7 aa, synthetic construct
KNQRDNN

SEQ ID NO: 161149 - protein, 7 aa, synthetic construct
QGKKGPE

SEQ ID NO: 161150 - protein, 7 aa, synthetic construct
KPSRDNN

SEQ ID NO: 161151 - protein, 7 aa, synthetic construct
QKRTQDL

SEQ ID NO: 161152 - protein, 7 aa, synthetic construct
IYKKGDN

SEQ ID NO: 161153 - protein, 7 aa, synthetic construct
GRKDDGK

SEQ ID NO: 161154 - protein, 7 aa, synthetic construct
IPRKEDK

SEQ ID NO: 161155 - protein, 7 aa, synthetic construct
SNEGRNK

SEQ ID NO: 161156 - protein, 7 aa, synthetic construct
PVTRAER

SEQ ID NO: 161157 - protein, 7 aa, synthetic construct
EMAPRQK

SEQ ID NO: 161158 - protein, 7 aa, synthetic construct
ERPQLNR

SEQ ID NO: 161159 - protein, 7 aa, synthetic construct
TRGSKDT

SEQ ID NO: 161160 - protein, 7 aa, synthetic construct
DSGAGKR

SEQ ID NO: 161161 - protein, 7 aa, synthetic construct
METKRQL

SEQ ID NO: 161162 - protein, 7 aa, synthetic construct
NLDNLKR

SEQ ID NO: 161163 - protein, 7 aa, synthetic construct
KPRTMVE

SEQ ID NO: 161164 - protein, 7 aa, synthetic construct
RQDHAGK

SEQ ID NO: 161165 - protein, 7 aa, synthetic construct
HDATAKK

SEQ ID NO: 161166 - protein, 7 aa, synthetic construct
LTDQARK

SEQ ID NO: 161167 - protein, 7 aa, synthetic construct
KSRQAIE

SEQ ID NO: 161168 - protein, 7 aa, synthetic construct
REAPRNS

SEQ ID NO: 161169 - protein, 7 aa, synthetic construct
LEQARGR

SEQ ID NO: 161170 - protein, 7 aa, synthetic construct
DNKHRGG

SEQ ID NO: 161171 - protein, 7 aa, synthetic construct
GDGKPRQ

SEQ ID NO: 161172 - protein, 7 aa, synthetic construct
RSLANER

SEQ ID NO: 161173 - protein, 7 aa, synthetic construct
QKKQDTF

SEQ ID NO: 161174 - protein, 7 aa, synthetic construct
FARKGDN

SEQ ID NO: 161175 - protein, 7 aa, synthetic construct
RSDTYSK

SEQ ID NO: 161176 - protein, 7 aa, synthetic construct
SHDGPKK

SEQ ID NO: 161177 - protein, 7 aa, synthetic construct
KIQRGDN

SEQ ID NO: 161178 - protein, 7 aa, synthetic construct
DGQARIK

SEQ ID NO: 161179 - protein, 7 aa, synthetic construct
FKASRMD

SEQ ID NO: 161180 - protein, 7 aa, synthetic construct
IDFSAKK

SEQ ID NO: 161181 - protein, 7 aa, synthetic construct
DQANIKK

SEQ ID NO: 161182 - protein, 7 aa, synthetic construct
GETTKKH

SEQ ID NO: 161183 - protein, 7 aa, synthetic construct
EKRQNPT

SEQ ID NO: 161184 - protein, 7 aa, synthetic construct
TDVGVKR

SEQ ID NO: 161185 - protein, 7 aa, synthetic construct
METKRDK

SEQ ID NO: 161186 - protein, 7 aa, synthetic construct
TRGKDKE

SEQ ID NO: 161187 - protein, 7 aa, synthetic construct
RDAHTQR

SEQ ID NO: 161188 - protein, 7 aa, synthetic construct
QETRTTK

SEQ ID NO: 161189 - protein, 7 aa, synthetic construct
TEGANKK

SEQ ID NO: 161190 - protein, 7 aa, synthetic construct
MVRRVLE

SEQ ID NO: 161191 - protein, 7 aa, synthetic construct
QTKREQG

SEQ ID NO: 161192 - protein, 7 aa, synthetic construct
ETAQKLK

SEQ ID NO: 161193 - protein, 7 aa, synthetic construct
DNNQVKR

SEQ ID NO: 161194 - protein, 7 aa, synthetic construct
GKRQDAT

SEQ ID NO: 161195 - protein, 7 aa, synthetic construct
KSRGVDS

SEQ ID NO: 161196 - protein, 7 aa, synthetic construct
EKPKVHY

SEQ ID NO: 161197 - protein, 7 aa, synthetic construct
LPEGLRK

SEQ ID NO: 161198 - protein, 7 aa, synthetic construct
SNELMKR

SEQ ID NO: 161199 - protein, 7 aa, synthetic construct
PNEGTKK

SEQ ID NO: 161200 - protein, 7 aa, synthetic construct
NTERNNK

SEQ ID NO: 161201 - protein, 7 aa, synthetic construct
FRKTVEG

SEQ ID NO: 161202 - protein, 7 aa, synthetic construct
ESGVKRA

SEQ ID NO: 161203 - protein, 7 aa, synthetic construct
QPEIRTK

SEQ ID NO: 161204 - protein, 7 aa, synthetic construct
EQRVTRA

SEQ ID NO: 161205 - protein, 7 aa, synthetic construct
IIDNAKR

SEQ ID NO: 161206 - protein, 7 aa, synthetic construct
TKVKYND

SEQ ID NO: 161207 - protein, 7 aa, synthetic construct
DGKPRNG

SEQ ID NO: 161208 - protein, 7 aa, synthetic construct
KPRSASE

SEQ ID NO: 161209 - protein, 7 aa, synthetic construct
NESSRPK

SEQ ID NO: 161210 - protein, 7 aa, synthetic construct
QPDRPKL

SEQ ID NO: 161211 - protein, 7 aa, synthetic construct
LNRKAGD

SEQ ID NO: 161212 - protein, 7 aa, synthetic construct
VESNMKK

SEQ ID NO: 161213 - protein, 7 aa, synthetic construct
DNNKRNI

SEQ ID NO: 161214 - protein, 7 aa, synthetic construct
SQEVRIK

SEQ ID NO: 161215 - protein, 7 aa, synthetic construct
TRKSTLE

SEQ ID NO: 161216 - protein, 7 aa, synthetic construct
TKMHRSD

SEQ ID NO: 161217 - protein, 7 aa, synthetic construct
LKRGNPE

SEQ ID NO: 161218 - protein, 7 aa, synthetic construct
QRKLQGD

SEQ ID NO: 161219 - protein, 7 aa, synthetic construct
DGKPRNQ

SEQ ID NO: 161220 - protein, 7 aa, synthetic construct
PEARGRP

SEQ ID NO: 161221 - protein, 7 aa, synthetic construct
GEVQKMK

SEQ ID NO: 161222 - protein, 7 aa, synthetic construct
KIDGHSR

SEQ ID NO: 161223 - protein, 7 aa, synthetic construct
ARGAEYK

SEQ ID NO: 161224 - protein, 7 aa, synthetic construct
SIDNRRG

SEQ ID NO: 161225 - protein, 7 aa, synthetic construct
DISSTKR

SEQ ID NO: 161226 - protein, 7 aa, synthetic construct
KTRNQEG

SEQ ID NO: 161227 - protein, 7 aa, synthetic construct
VKKSADN

SEQ ID NO: 161228 - protein, 7 aa, synthetic construct
GGDLRAR

SEQ ID NO: 161229 - protein, 7 aa, synthetic construct
KRGDPNY

SEQ ID NO: 161230 - protein, 7 aa, synthetic construct
NLEAAKK

SEQ ID NO: 161231 - protein, 7 aa, synthetic construct
GSPEVRK

SEQ ID NO: 161232 - protein, 7 aa, synthetic construct
IGNKEHR

SEQ ID NO: 161233 - protein, 7 aa, synthetic construct
TNDHGKR

SEQ ID NO: 161234 - protein, 7 aa, synthetic construct
QDIAMKK

SEQ ID NO: 161235 - protein, 7 aa, synthetic construct
ANNKKND

SEQ ID NO: 161236 - protein, 7 aa, synthetic construct
GEMRVRS

SEQ ID NO: 161237 - protein, 7 aa, synthetic construct
RRDASDR

SEQ ID NO: 161238 - protein, 7 aa, synthetic construct
RPKYETT

SEQ ID NO: 161239 - protein, 7 aa, synthetic construct
NRQLKHE

SEQ ID NO: 161240 - protein, 7 aa, synthetic construct
RSQTTER

SEQ ID NO: 161241 - protein, 7 aa, synthetic construct
QENPIRK

SEQ ID NO: 161242 - protein, 7 aa, synthetic construct
TDRKHIG

SEQ ID NO: 161243 - protein, 7 aa, synthetic construct
EMITKGK

SEQ ID NO: 161244 - protein, 7 aa, synthetic construct
GDKADRR

SEQ ID NO: 161245 - protein, 7 aa, synthetic construct
GQTTEKK

SEQ ID NO: 161246 - protein, 7 aa, synthetic construct
QQEVQKK

SEQ ID NO: 161247 - protein, 7 aa, synthetic construct
EGQNKRV

SEQ ID NO: 161248 - protein, 7 aa, synthetic construct
ETATKLR

SEQ ID NO: 161249 - protein, 7 aa, synthetic construct
TTQKKYD

SEQ ID NO: 161250 - protein, 7 aa, synthetic construct
NKRSDML

SEQ ID NO: 161251 - protein, 7 aa, synthetic construct
LKRQIEV

SEQ ID NO: 161252 - protein, 7 aa, synthetic construct
TDKEMRK

SEQ ID NO: 161253 - protein, 7 aa, synthetic construct
KSHETGR

SEQ ID NO: 161254 - protein, 7 aa, synthetic construct
KEVRYEK

SEQ ID NO: 161255 - protein, 7 aa, synthetic construct
VEKPMKY

SEQ ID NO: 161256 - protein, 7 aa, synthetic construct
KEDVAKR

SEQ ID NO: 161257 - protein, 7 aa, synthetic construct
YMRNAEK

SEQ ID NO: 161258 - protein, 7 aa, synthetic construct
QKRLGLE

SEQ ID NO: 161259 - protein, 7 aa, synthetic construct
ENKKELR

SEQ ID NO: 161260 - protein, 7 aa, synthetic construct
ETNKEKR

SEQ ID NO: 161261 - protein, 7 aa, synthetic construct
ENRKTGG

SEQ ID NO: 161262 - protein, 7 aa, synthetic construct
RESKFHV

SEQ ID NO: 161263 - protein, 7 aa, synthetic construct
IEHPKLK

SEQ ID NO: 161264 - protein, 7 aa, synthetic construct
AEVKIRN

SEQ ID NO: 161265 - protein, 7 aa, synthetic construct
IKKYMLE

SEQ ID NO: 161266 - protein, 7 aa, synthetic construct
MEGPRKT

SEQ ID NO: 161267 - protein, 7 aa, synthetic construct
DKGKHNS

SEQ ID NO: 161268 - protein, 7 aa, synthetic construct
YDQPRNK

SEQ ID NO: 161269 - protein, 7 aa, synthetic construct
SSEIYKR

SEQ ID NO: 161270 - protein, 7 aa, synthetic construct
RKQVENM

SEQ ID NO: 161271 - protein, 7 aa, synthetic construct
YDSARSR

SEQ ID NO: 161272 - protein, 7 aa, synthetic construct
QSKREDK

SEQ ID NO: 161273 - protein, 7 aa, synthetic construct
AKPRDSS

SEQ ID NO: 161274 - protein, 7 aa, synthetic construct
DKKKDYL

SEQ ID NO: 161275 - protein, 7 aa, synthetic construct
TSAEIKR

SEQ ID NO: 161276 - protein, 7 aa, synthetic construct
RPKNQDQ

SEQ ID NO: 161277 - protein, 7 aa, synthetic construct
NTKRVID

SEQ ID NO: 161278 - protein, 7 aa, synthetic construct
YKTRGDM

SEQ ID NO: 161279 - protein, 7 aa, synthetic construct
DTGGSKK

SEQ ID NO: 161280 - protein, 7 aa, synthetic construct
LEGPTKR

SEQ ID NO: 161281 - protein, 7 aa, synthetic construct
NDTREKR

SEQ ID NO: 161282 - protein, 7 aa, synthetic construct
VGRGKLD

SEQ ID NO: 161283 - protein, 7 aa, synthetic construct
TENVIRK

SEQ ID NO: 161284 - protein, 7 aa, synthetic construct
IAERGQR

SEQ ID NO: 161285 - protein, 7 aa, synthetic construct
RTQAHDK

SEQ ID NO: 161286 - protein, 7 aa, synthetic construct
ARKVETY

SEQ ID NO: 161287 - protein, 7 aa, synthetic construct
ARKQVLD

SEQ ID NO: 161288 - protein, 7 aa, synthetic construct
YDREMKK

SEQ ID NO: 161289 - protein, 7 aa, synthetic construct
IRGSQPN

SEQ ID NO: 161290 - protein, 7 aa, synthetic construct
RQKSADL

SEQ ID NO: 161291 - protein, 7 aa, synthetic construct
RGDGVAK

SEQ ID NO: 161292 - protein, 7 aa, synthetic construct
TKKGDHL

SEQ ID NO: 161293 - protein, 7 aa, synthetic construct
YDVNNKK

SEQ ID NO: 161294 - protein, 7 aa, synthetic construct
NKKQDTQ

SEQ ID NO: 161295 - protein, 7 aa, synthetic construct
THGKKDL

SEQ ID NO: 161296 - protein, 7 aa, synthetic construct
LDNSQRK

SEQ ID NO: 161297 - protein, 7 aa, synthetic construct
KGRGITE

SEQ ID NO: 161298 - protein, 7 aa, synthetic construct
KMVHRAE

SEQ ID NO: 161299 - protein, 7 aa, synthetic construct
EVKVSRY

SEQ ID NO: 161300 - protein, 7 aa, synthetic construct
QAAEQRK

SEQ ID NO: 161301 - protein, 7 aa, synthetic construct
YKNRGEM

SEQ ID NO: 161302 - protein, 7 aa, synthetic construct
PSMRTKD

SEQ ID NO: 161303 - protein, 7 aa, synthetic construct
RATEEKR

SEQ ID NO: 161304 - protein, 7 aa, synthetic construct
KQARMVD

SEQ ID NO: 161305 - protein, 7 aa, synthetic construct
FRKSQNE

SEQ ID NO: 161306 - protein, 7 aa, synthetic construct
NVEQRMK

SEQ ID NO: 161307 - protein, 7 aa, synthetic construct
RTDAFSK

SEQ ID NO: 161308 - protein, 7 aa, synthetic construct
NIEINKR

SEQ ID NO: 161309 - protein, 7 aa, synthetic construct
DLAARQR

SEQ ID NO: 161310 - protein, 7 aa, synthetic construct
GIEVGKR

SEQ ID NO: 161311 - protein, 7 aa, synthetic construct
YEKEARR

SEQ ID NO: 161312 - protein, 7 aa, synthetic construct
NRGKASD

SEQ ID NO: 161313 - protein, 7 aa, synthetic construct
DKPRNTN

SEQ ID NO: 161314 - protein, 7 aa, synthetic construct
SEPKERK

SEQ ID NO: 161315 - protein, 7 aa, synthetic construct
TDMARNR

SEQ ID NO: 161316 - protein, 7 aa, synthetic construct
GRKMEAL

SEQ ID NO: 161317 - protein, 7 aa, synthetic construct
ADAGIRK

SEQ ID NO: 161318 - protein, 7 aa, synthetic construct
DQNPQRK

SEQ ID NO: 161319 - protein, 7 aa, synthetic construct
EPVKRNT

SEQ ID NO: 161320 - protein, 7 aa, synthetic construct
TQDIPRK

SEQ ID NO: 161321 - protein, 7 aa, synthetic construct
DAMKPKT

SEQ ID NO: 161322 - protein, 7 aa, synthetic construct
EQSGVKR

SEQ ID NO: 161323 - protein, 7 aa, synthetic construct
DLGKRNT

SEQ ID NO: 161324 - protein, 7 aa, synthetic construct
VIESRRS

SEQ ID NO: 161325 - protein, 7 aa, synthetic construct
LDVQVKK

SEQ ID NO: 161326 - protein, 7 aa, synthetic construct
VKRMVSD

SEQ ID NO: 161327 - protein, 7 aa, synthetic construct
HGKKQDV

SEQ ID NO: 161328 - protein, 7 aa, synthetic construct
REGPRQI

SEQ ID NO: 161329 - protein, 7 aa, synthetic construct
DVGLGKK

SEQ ID NO: 161330 - protein, 7 aa, synthetic construct
PEQAKPK

SEQ ID NO: 161331 - protein, 7 aa, synthetic construct
VKRMTLD

SEQ ID NO: 161332 - protein, 7 aa, synthetic construct
QRGIKIE

SEQ ID NO: 161333 - protein, 7 aa, synthetic construct
SDKPRMH

SEQ ID NO: 161334 - protein, 7 aa, synthetic construct
HAKPRIE

SEQ ID NO: 161335 - protein, 7 aa, synthetic construct
NPEQRPR

SEQ ID NO: 161336 - protein, 7 aa, synthetic construct
MRKDREV

SEQ ID NO: 161337 - protein, 7 aa, synthetic construct
FSVKKYE

SEQ ID NO: 161338 - protein, 7 aa, synthetic construct
VKRQEVI

SEQ ID NO: 161339 - protein, 7 aa, synthetic construct
MRSKSVD

SEQ ID NO: 161340 - protein, 7 aa, synthetic construct
TDTSSRK

SEQ ID NO: 161341 - protein, 7 aa, synthetic construct
QGRLQKD

SEQ ID NO: 161342 - protein, 7 aa, synthetic construct
EGKGKYA

SEQ ID NO: 161343 - protein, 7 aa, synthetic construct
AGRGMRE

SEQ ID NO: 161344 - protein, 7 aa, synthetic construct
FRANKDN

SEQ ID NO: 161345 - protein, 7 aa, synthetic construct
RPARETT

SEQ ID NO: 161346 - protein, 7 aa, synthetic construct
RLQRLAE

SEQ ID NO: 161347 - protein, 7 aa, synthetic construct
QDGRIRG

SEQ ID NO: 161348 - protein, 7 aa, synthetic construct
RQHTEAK

SEQ ID NO: 161349 - protein, 7 aa, synthetic construct
SNEVAKK

SEQ ID NO: 161350 - protein, 7 aa, synthetic construct
TKPRDHG

SEQ ID NO: 161351 - protein, 7 aa, synthetic construct
HTDGKRM

SEQ ID NO: 161352 - protein, 7 aa, synthetic construct
QGKGDRQ

SEQ ID NO: 161353 - protein, 7 aa, synthetic construct
ENQNTKR

SEQ ID NO: 161354 - protein, 7 aa, synthetic construct
IRNNADR

SEQ ID NO: 161355 - protein, 7 aa, synthetic construct
GDFQKRS

SEQ ID NO: 161356 - protein, 7 aa, synthetic construct
MRANRNE

SEQ ID NO: 161357 - protein, 7 aa, synthetic construct
IRHINSA

SEQ ID NO: 161358 - protein, 7 aa, synthetic construct
VDQRPTK

SEQ ID NO: 161359 - protein, 7 aa, synthetic construct
RLQTETR

SEQ ID NO: 161360 - protein, 7 aa, synthetic construct
NRKTQSD

SEQ ID NO: 161361 - protein, 7 aa, synthetic construct
RVDRRDS

SEQ ID NO: 161362 - protein, 7 aa, synthetic construct
AMDKGHR

SEQ ID NO: 161363 - protein, 7 aa, synthetic construct
VPRDTPR

SEQ ID NO: 161364 - protein, 7 aa, synthetic construct
WDGTAKR

SEQ ID NO: 161365 - protein, 7 aa, synthetic construct
ASRKDQG

SEQ ID NO: 161366 - protein, 7 aa, synthetic construct
FKGIQER

SEQ ID NO: 161367 - protein, 7 aa, synthetic construct
MDRPIRT

SEQ ID NO: 161368 - protein, 7 aa, synthetic construct
KARQIME

SEQ ID NO: 161369 - protein, 7 aa, synthetic construct
KPHRTEM

SEQ ID NO: 161370 - protein, 7 aa, synthetic construct
MEHPKPK

SEQ ID NO: 161371 - protein, 7 aa, synthetic construct
KGSSQDR

SEQ ID NO: 161372 - protein, 7 aa, synthetic construct
NDTPKKQ

SEQ ID NO: 161373 - protein, 7 aa, synthetic construct
KLQRGID

SEQ ID NO: 161374 - protein, 7 aa, synthetic construct
TDAPRQR

SEQ ID NO: 161375 - protein, 7 aa, synthetic construct
YDGSKRG

SEQ ID NO: 161376 - protein, 7 aa, synthetic construct
FRKASLE

SEQ ID NO: 161377 - protein, 7 aa, synthetic construct
RTREADR

SEQ ID NO: 161378 - protein, 7 aa, synthetic construct
KKQYAQD

SEQ ID NO: 161379 - protein, 7 aa, synthetic construct
RIVNETR

SEQ ID NO: 161380 - protein, 7 aa, synthetic construct
YYKKMTD

SEQ ID NO: 161381 - protein, 7 aa, synthetic construct
MRRAEGP

SEQ ID NO: 161382 - protein, 7 aa, synthetic construct
QRHETVR

SEQ ID NO: 161383 - protein, 7 aa, synthetic construct
SRKGEQT

SEQ ID NO: 161384 - protein, 7 aa, synthetic construct
GQDSQKR

SEQ ID NO: 161385 - protein, 7 aa, synthetic construct
TELQSKK

SEQ ID NO: 161386 - protein, 7 aa, synthetic construct
KRQVESN

SEQ ID NO: 161387 - protein, 7 aa, synthetic construct
FERTVRS

SEQ ID NO: 161388 - protein, 7 aa, synthetic construct
YKKLDPN

SEQ ID NO: 161389 - protein, 7 aa, synthetic construct
QEAANKK

SEQ ID NO: 161390 - protein, 7 aa, synthetic construct
DSVRAKM

SEQ ID NO: 161391 - protein, 7 aa, synthetic construct
TESARGR

SEQ ID NO: 161392 - protein, 7 aa, synthetic construct
GPQAERR

SEQ ID NO: 161393 - protein, 7 aa, synthetic construct
RSGESTR

SEQ ID NO: 161394 - protein, 7 aa, synthetic construct
DVVPRQK

SEQ ID NO: 161395 - protein, 7 aa, synthetic construct
MDRMHPK

SEQ ID NO: 161396 - protein, 7 aa, synthetic construct
KRDTNDR

SEQ ID NO: 161397 - protein, 7 aa, synthetic construct
KSTRNEG

SEQ ID NO: 161398 - protein, 7 aa, synthetic construct
FRGDTVR

SEQ ID NO: 161399 - protein, 7 aa, synthetic construct
DLDTKKR

SEQ ID NO: 161400 - protein, 7 aa, synthetic construct
KGMPRLD

SEQ ID NO: 161401 - protein, 7 aa, synthetic construct
EQRNSLK

SEQ ID NO: 161402 - protein, 7 aa, synthetic construct
QKRQEKE

SEQ ID NO: 161403 - protein, 7 aa, synthetic construct
MTEVKRY

SEQ ID NO: 161404 - protein, 7 aa, synthetic construct
GDNPQKK

SEQ ID NO: 161405 - protein, 7 aa, synthetic construct
MVEMQKK

SEQ ID NO: 161406 - protein, 7 aa, synthetic construct
TGKKDAL

SEQ ID NO: 161407 - protein, 7 aa, synthetic construct
NKKLIDH

SEQ ID NO: 161408 - protein, 7 aa, synthetic construct
SNKRSGE

SEQ ID NO: 161409 - protein, 7 aa, synthetic construct
EPTPKRT

SEQ ID NO: 161410 - protein, 7 aa, synthetic construct
EGKKQAF

SEQ ID NO: 161411 - protein, 7 aa, synthetic construct
QDTARMR

SEQ ID NO: 161412 - protein, 7 aa, synthetic construct
YKHEREK

SEQ ID NO: 161413 - protein, 7 aa, synthetic construct
PEQKNKQ

SEQ ID NO: 161414 - protein, 7 aa, synthetic construct
MRKVHDG

SEQ ID NO: 161415 - protein, 7 aa, synthetic construct
TNRLRTE

SEQ ID NO: 161416 - protein, 7 aa, synthetic construct
TQDGMKK

SEQ ID NO: 161417 - protein, 7 aa, synthetic construct
GGKKDQL

SEQ ID NO: 161418 - protein, 7 aa, synthetic construct
MSDNLKR

SEQ ID NO: 161419 - protein, 7 aa, synthetic construct
KERSKLD

SEQ ID NO: 161420 - protein, 7 aa, synthetic construct
QPDLRPK

SEQ ID NO: 161421 - protein, 7 aa, synthetic construct
RQKGQDY

SEQ ID NO: 161422 - protein, 7 aa, synthetic construct
LRKAYEP

SEQ ID NO: 161423 - protein, 7 aa, synthetic construct
DGSSNKR

SEQ ID NO: 161424 - protein, 7 aa, synthetic construct
VRDRKGD

SEQ ID NO: 161425 - protein, 7 aa, synthetic construct
VNEITRR

SEQ ID NO: 161426 - protein, 7 aa, synthetic construct
RGSTTDR

SEQ ID NO: 161427 - protein, 7 aa, synthetic construct
ENKNAKF

SEQ ID NO: 161428 - protein, 7 aa, synthetic construct
QGEPVKR

SEQ ID NO: 161429 - protein, 7 aa, synthetic construct
DLQNLKR

SEQ ID NO: 161430 - protein, 7 aa, synthetic construct
DTTVRQK

SEQ ID NO: 161431 - protein, 7 aa, synthetic construct
PKRTEYG

SEQ ID NO: 161432 - protein, 7 aa, synthetic construct
DRSNKEK

SEQ ID NO: 161433 - protein, 7 aa, synthetic construct
TTRDEKK

SEQ ID NO: 161434 - protein, 7 aa, synthetic construct
GRQRLGE

SEQ ID NO: 161435 - protein, 7 aa, synthetic construct
DGATGRK

SEQ ID NO: 161436 - protein, 7 aa, synthetic construct
LDTQQKK

SEQ ID NO: 161437 - protein, 7 aa, synthetic construct
QAETRTK

SEQ ID NO: 161438 - protein, 7 aa, synthetic construct
NEMQRKI

SEQ ID NO: 161439 - protein, 7 aa, synthetic construct
KSRAPEV

SEQ ID NO: 161440 - protein, 7 aa, synthetic construct
VDGNAKR

SEQ ID NO: 161441 - protein, 7 aa, synthetic construct
NEQTRIR

SEQ ID NO: 161442 - protein, 7 aa, synthetic construct
SRANKSD

SEQ ID NO: 161443 - protein, 7 aa, synthetic construct
QSTRQER

SEQ ID NO: 161444 - protein, 7 aa, synthetic construct
MDTRSRM

SEQ ID NO: 161445 - protein, 7 aa, synthetic construct
QEASRAK

SEQ ID NO: 161446 - protein, 7 aa, synthetic construct
DLKIYGK

SEQ ID NO: 161447 - protein, 7 aa, synthetic construct
QENAFKK

SEQ ID NO: 161448 - protein, 7 aa, synthetic construct
NVEQAKK

SEQ ID NO: 161449 - protein, 7 aa, synthetic construct
MRDDIKR

SEQ ID NO: 161450 - protein, 7 aa, synthetic construct
EKRNTIA

SEQ ID NO: 161451 - protein, 7 aa, synthetic construct
QEVRGAK

SEQ ID NO: 161452 - protein, 7 aa, synthetic construct
EKGPASR

SEQ ID NO: 161453 - protein, 7 aa, synthetic construct
EGTKNKT

SEQ ID NO: 161454 - protein, 7 aa, synthetic construct
IDRSSRQ

SEQ ID NO: 161455 - protein, 7 aa, synthetic construct
AKRMMPE

SEQ ID NO: 161456 - protein, 7 aa, synthetic construct
SKPNRNE

SEQ ID NO: 161457 - protein, 7 aa, synthetic construct
NMDNSKR

SEQ ID NO: 161458 - protein, 7 aa, synthetic construct
QEMPRIK

SEQ ID NO: 161459 - protein, 7 aa, synthetic construct
SQEVIKR

SEQ ID NO: 161460 - protein, 7 aa, synthetic construct
KRSDNDK

SEQ ID NO: 161461 - protein, 7 aa, synthetic construct
METPQKK

SEQ ID NO: 161462 - protein, 7 aa, synthetic construct
GNERNNK

SEQ ID NO: 161463 - protein, 7 aa, synthetic construct
KRQITGD

SEQ ID NO: 161464 - protein, 7 aa, synthetic construct
VMKEERR

SEQ ID NO: 161465 - protein, 7 aa, synthetic construct
LSRKEFS

SEQ ID NO: 161466 - protein, 7 aa, synthetic construct
HDRPKGQ

SEQ ID NO: 161467 - protein, 7 aa, synthetic construct
DRKAHLM

SEQ ID NO: 161468 - protein, 7 aa, synthetic construct
DGGQNKR

SEQ ID NO: 161469 - protein, 7 aa, synthetic construct
MRKSIND

SEQ ID NO: 161470 - protein, 7 aa, synthetic construct
HDAAAKR

SEQ ID NO: 161471 - protein, 7 aa, synthetic construct
TRKDKAD

SEQ ID NO: 161472 - protein, 7 aa, synthetic construct
MHKSERA

SEQ ID NO: 161473 - protein, 7 aa, synthetic construct
NRPRETN

SEQ ID NO: 161474 - protein, 7 aa, synthetic construct
RGGQKDN

SEQ ID NO: 161475 - protein, 7 aa, synthetic construct
LTEIQKR

SEQ ID NO: 161476 - protein, 7 aa, synthetic construct
KHKPVAD

SEQ ID NO: 161477 - protein, 7 aa, synthetic construct
ADTNRGR

SEQ ID NO: 161478 - protein, 7 aa, synthetic construct
IRGVHTQ

SEQ ID NO: 161479 - protein, 7 aa, synthetic construct
KRNVSIE

SEQ ID NO: 161480 - protein, 7 aa, synthetic construct
KFEQNVR

SEQ ID NO: 161481 - protein, 7 aa, synthetic construct
IRKIMPE

SEQ ID NO: 161482 - protein, 7 aa, synthetic construct
TEASIKK

SEQ ID NO: 161483 - protein, 7 aa, synthetic construct
ARGHAPN

SEQ ID NO: 161484 - protein, 7 aa, synthetic construct
NRQSKGE

SEQ ID NO: 161485 - protein, 7 aa, synthetic construct
KTTKQYD

SEQ ID NO: 161486 - protein, 7 aa, synthetic construct
NDVSRQK

SEQ ID NO: 161487 - protein, 7 aa, synthetic construct
NKRMAPE

SEQ ID NO: 161488 - protein, 7 aa, synthetic construct
KDNEYKK

SEQ ID NO: 161489 - protein, 7 aa, synthetic construct
GPDNNRR

SEQ ID NO: 161490 - protein, 7 aa, synthetic construct
ARNKSPE

SEQ ID NO: 161491 - protein, 7 aa, synthetic construct
DQRELKK

SEQ ID NO: 161492 - protein, 7 aa, synthetic construct
MDDKSKR

SEQ ID NO: 161493 - protein, 7 aa, synthetic construct
KIDGHRQ

SEQ ID NO: 161494 - protein, 7 aa, synthetic construct
PIRKVPE

SEQ ID NO: 161495 - protein, 7 aa, synthetic construct
ADAGRNK

SEQ ID NO: 161496 - protein, 7 aa, synthetic construct
KQNKNPD

SEQ ID NO: 161497 - protein, 7 aa, synthetic construct
STRQKVD

SEQ ID NO: 161498 - protein, 7 aa, synthetic construct
TEVGRMK

SEQ ID NO: 161499 - protein, 7 aa, synthetic construct
LGRKDSS

SEQ ID NO: 161500 - protein, 7 aa, synthetic construct
SDAKDRK

SEQ ID NO: 161501 - protein, 7 aa, synthetic construct
EMRTKDK

SEQ ID NO: 161502 - protein, 7 aa, synthetic construct
SRKLDIN

SEQ ID NO: 161503 - protein, 7 aa, synthetic construct
SDRGPKY

SEQ ID NO: 161504 - protein, 7 aa, synthetic construct
WDKSDKK

SEQ ID NO: 161505 - protein, 7 aa, synthetic construct
FKRPTQE

SEQ ID NO: 161506 - protein, 7 aa, synthetic construct
SEKPIKS

SEQ ID NO: 161507 - protein, 7 aa, synthetic construct
RKMSPDV

SEQ ID NO: 161508 - protein, 7 aa, synthetic construct
VRTRQEP

SEQ ID NO: 161509 - protein, 7 aa, synthetic construct
TQQTERK

SEQ ID NO: 161510 - protein, 7 aa, synthetic construct
KQHKQPD

SEQ ID NO: 161511 - protein, 7 aa, synthetic construct
AAEKPIK

SEQ ID NO: 161512 - protein, 7 aa, synthetic construct
QGKTRSE

SEQ ID NO: 161513 - protein, 7 aa, synthetic construct
NSETRKM

SEQ ID NO: 161514 - protein, 7 aa, synthetic construct
ADGGAKK

SEQ ID NO: 161515 - protein, 7 aa, synthetic construct
GSETQKK

SEQ ID NO: 161516 - protein, 7 aa, synthetic construct
NYVREKQ

SEQ ID NO: 161517 - protein, 7 aa, synthetic construct
DSTIKRG

SEQ ID NO: 161518 - protein, 7 aa, synthetic construct
RSATFEK

SEQ ID NO: 161519 - protein, 7 aa, synthetic construct
GGRQSNN

SEQ ID NO: 161520 - protein, 7 aa, synthetic construct
VKPKMGG

SEQ ID NO: 161521 - protein, 7 aa, synthetic construct
KPANRFE

SEQ ID NO: 161522 - protein, 7 aa, synthetic construct
PQRTREG

SEQ ID NO: 161523 - protein, 7 aa, synthetic construct
YQKKSDQ

SEQ ID NO: 161524 - protein, 7 aa, synthetic construct
VMLRQKD

SEQ ID NO: 161525 - protein, 7 aa, synthetic construct
DEKPKKT

SEQ ID NO: 161526 - protein, 7 aa, synthetic construct
QIDSPKR

SEQ ID NO: 161527 - protein, 7 aa, synthetic construct
YDQPSKK

SEQ ID NO: 161528 - protein, 7 aa, synthetic construct
AKRTQGD

SEQ ID NO: 161529 - protein, 7 aa, synthetic construct
SDMQRKG

SEQ ID NO: 161530 - protein, 7 aa, synthetic construct
SRQLRTE

SEQ ID NO: 161531 - protein, 7 aa, synthetic construct
SIERNQK

SEQ ID NO: 161532 - protein, 7 aa, synthetic construct
NEFKNQR

SEQ ID NO: 161533 - protein, 7 aa, synthetic construct
TEQVRSK

SEQ ID NO: 161534 - protein, 7 aa, synthetic construct
RTAEQHK

SEQ ID NO: 161535 - protein, 7 aa, synthetic construct
EPVKAKF

SEQ ID NO: 161536 - protein, 7 aa, synthetic construct
RSVHKET

SEQ ID NO: 161537 - protein, 7 aa, synthetic construct
IETSRKS

SEQ ID NO: 161538 - protein, 7 aa, synthetic construct
REHGMRV

SEQ ID NO: 161539 - protein, 7 aa, synthetic construct
YDRIHKQ

SEQ ID NO: 161540 - protein, 7 aa, synthetic construct
RIEGLPR

SEQ ID NO: 161541 - protein, 7 aa, synthetic construct
GRVRVQE

SEQ ID NO: 161542 - protein, 7 aa, synthetic construct
AKGNRDF

SEQ ID NO: 161543 - protein, 7 aa, synthetic construct
QTRETPR

SEQ ID NO: 161544 - protein, 7 aa, synthetic construct
VAETLKK

SEQ ID NO: 161545 - protein, 7 aa, synthetic construct
YHKGGEK

SEQ ID NO: 161546 - protein, 7 aa, synthetic construct
MPEGFKK

SEQ ID NO: 161547 - protein, 7 aa, synthetic construct
LKKYVEV

SEQ ID NO: 161548 - protein, 7 aa, synthetic construct
GRGQKME

SEQ ID NO: 161549 - protein, 7 aa, synthetic construct
HIETAKR

SEQ ID NO: 161550 - protein, 7 aa, synthetic construct
VRGNKET

SEQ ID NO: 161551 - protein, 7 aa, synthetic construct
YAEPSKR

SEQ ID NO: 161552 - protein, 7 aa, synthetic construct
REKESTR

SEQ ID NO: 161553 - protein, 7 aa, synthetic construct
FKHQVER

SEQ ID NO: 161554 - protein, 7 aa, synthetic construct
KMRDHNL

SEQ ID NO: 161555 - protein, 7 aa, synthetic construct
NTETIKR

SEQ ID NO: 161556 - protein, 7 aa, synthetic construct
DAAIRGK

SEQ ID NO: 161557 - protein, 7 aa, synthetic construct
GEKPPRI

SEQ ID NO: 161558 - protein, 7 aa, synthetic construct
LDSAIKK

SEQ ID NO: 161559 - protein, 7 aa, synthetic construct
REGPRNV

SEQ ID NO: 161560 - protein, 7 aa, synthetic construct
IQRESRG

SEQ ID NO: 161561 - protein, 7 aa, synthetic construct
GLEVRKL

SEQ ID NO: 161562 - protein, 7 aa, synthetic construct
DRMPVKQ

SEQ ID NO: 161563 - protein, 7 aa, synthetic construct
KVRNSAE

SEQ ID NO: 161564 - protein, 7 aa, synthetic construct
QSRKEGG

SEQ ID NO: 161565 - protein, 7 aa, synthetic construct
IKRGQTE

SEQ ID NO: 161566 - protein, 7 aa, synthetic construct
RQRSETI

SEQ ID NO: 161567 - protein, 7 aa, synthetic construct
KQSRNDP

SEQ ID NO: 161568 - protein, 7 aa, synthetic construct
PNLKKYE

SEQ ID NO: 161569 - protein, 7 aa, synthetic construct
YEGVKKY

SEQ ID NO: 161570 - protein, 7 aa, synthetic construct
KSRDPHT

SEQ ID NO: 161571 - protein, 7 aa, synthetic construct
KIHPPRE

SEQ ID NO: 161572 - protein, 7 aa, synthetic construct
YDTTNKK

SEQ ID NO: 161573 - protein, 7 aa, synthetic construct
DGQKRSQ

SEQ ID NO: 161574 - protein, 7 aa, synthetic construct
NAGEVRK

SEQ ID NO: 161575 - protein, 7 aa, synthetic construct
EVRSTPR

SEQ ID NO: 161576 - protein, 7 aa, synthetic construct
TGRTKID

SEQ ID NO: 161577 - protein, 7 aa, synthetic construct
ELRPAKL

SEQ ID NO: 161578 - protein, 7 aa, synthetic construct
MGTRESR

SEQ ID NO: 161579 - protein, 7 aa, synthetic construct
ELGKRGT

SEQ ID NO: 161580 - protein, 7 aa, synthetic construct
MMENPKK

SEQ ID NO: 161581 - protein, 7 aa, synthetic construct
RRGDVNL

SEQ ID NO: 161582 - protein, 7 aa, synthetic construct
RDKEERK

SEQ ID NO: 161583 - protein, 7 aa, synthetic construct
GDEKKKM

SEQ ID NO: 161584 - protein, 7 aa, synthetic construct
ANEGLRK

SEQ ID NO: 161585 - protein, 7 aa, synthetic construct
KARMTVE

SEQ ID NO: 161586 - protein, 7 aa, synthetic construct
GEIQKMK

SEQ ID NO: 161587 - protein, 7 aa, synthetic construct
VKRNENF

SEQ ID NO: 161588 - protein, 7 aa, synthetic construct
RRNTMSD

SEQ ID NO: 161589 - protein, 7 aa, synthetic construct
NRRETPS

SEQ ID NO: 161590 - protein, 7 aa, synthetic construct
IRQKNDM

SEQ ID NO: 161591 - protein, 7 aa, synthetic construct
SSKKDYT

SEQ ID NO: 161592 - protein, 7 aa, synthetic construct
AKRPVVD

SEQ ID NO: 161593 - protein, 7 aa, synthetic construct
NNRKEKD

SEQ ID NO: 161594 - protein, 7 aa, synthetic construct
KSQRSLD

SEQ ID NO: 161595 - protein, 7 aa, synthetic construct
KMRDTER

SEQ ID NO: 161596 - protein, 7 aa, synthetic construct
ADASKKQ

SEQ ID NO: 161597 - protein, 7 aa, synthetic construct
GNTKRGD

SEQ ID NO: 161598 - protein, 7 aa, synthetic construct
EGKQMAR

SEQ ID NO: 161599 - protein, 7 aa, synthetic construct
EASAKLR

SEQ ID NO: 161600 - protein, 7 aa, synthetic construct
NVDGTKK

SEQ ID NO: 161601 - protein, 7 aa, synthetic construct
KATRTND

SEQ ID NO: 161602 - protein, 7 aa, synthetic construct
DIMPNRK

SEQ ID NO: 161603 - protein, 7 aa, synthetic construct
LQRKGQD

SEQ ID NO: 161604 - protein, 7 aa, synthetic construct
LRVKHLE

SEQ ID NO: 161605 - protein, 7 aa, synthetic construct
RKQTEDK

SEQ ID NO: 161606 - protein, 7 aa, synthetic construct
NRPSRSE

SEQ ID NO: 161607 - protein, 7 aa, synthetic construct
MTIKRSD

SEQ ID NO: 161608 - protein, 7 aa, synthetic construct
DPAGIKR

SEQ ID NO: 161609 - protein, 7 aa, synthetic construct
MGRGNSA

SEQ ID NO: 161610 - protein, 7 aa, synthetic construct
KIHAEAR

SEQ ID NO: 161611 - protein, 7 aa, synthetic construct
FTRKENG

SEQ ID NO: 161612 - protein, 7 aa, synthetic construct
IRKVLEN

SEQ ID NO: 161613 - protein, 7 aa, synthetic construct
AKGKDPY

SEQ ID NO: 161614 - protein, 7 aa, synthetic construct
EGKSVRG

SEQ ID NO: 161615 - protein, 7 aa, synthetic construct
AAENKKL

SEQ ID NO: 161616 - protein, 7 aa, synthetic construct
SREEIKK

SEQ ID NO: 161617 - protein, 7 aa, synthetic construct
FRKTAPE

SEQ ID NO: 161618 - protein, 7 aa, synthetic construct
LLTKVKP

SEQ ID NO: 161619 - protein, 7 aa, synthetic construct
MNKRDIS

SEQ ID NO: 161620 - protein, 7 aa, synthetic construct
IDNGYKR

SEQ ID NO: 161621 - protein, 7 aa, synthetic construct
MRQKKEE

SEQ ID NO: 161622 - protein, 7 aa, synthetic construct
TRKMSPE

SEQ ID NO: 161623 - protein, 7 aa, synthetic construct
IPHQTKN

SEQ ID NO: 161624 - protein, 7 aa, synthetic construct
QERPKAA

SEQ ID NO: 161625 - protein, 7 aa, synthetic construct
QEGTKRT

SEQ ID NO: 161626 - protein, 7 aa, synthetic construct
LDQPKTK

SEQ ID NO: 161627 - protein, 7 aa, synthetic construct
TRFKGNE

SEQ ID NO: 161628 - protein, 7 aa, synthetic construct
AHQKPRE

SEQ ID NO: 161629 - protein, 7 aa, synthetic construct
VFGETKR

SEQ ID NO: 161630 - protein, 7 aa, synthetic construct
SDDKRAK

SEQ ID NO: 161631 - protein, 7 aa, synthetic construct
IMEGPKK

SEQ ID NO: 161632 - protein, 7 aa, synthetic construct
DPPPIKR

SEQ ID NO: 161633 - protein, 7 aa, synthetic construct
RASHDAK

SEQ ID NO: 161634 - protein, 7 aa, synthetic construct
STDQARK

SEQ ID NO: 161635 - protein, 7 aa, synthetic construct
VGRGQDR

SEQ ID NO: 161636 - protein, 7 aa, synthetic construct
SETTKRQ

SEQ ID NO: 161637 - protein, 7 aa, synthetic construct
RDRVKQD

SEQ ID NO: 161638 - protein, 7 aa, synthetic construct
IPGQTRA

SEQ ID NO: 161639 - protein, 7 aa, synthetic construct
KQTKHDM

SEQ ID NO: 161640 - protein, 7 aa, synthetic construct
LNRGERQ

SEQ ID NO: 161641 - protein, 7 aa, synthetic construct
DTGIAKR

SEQ ID NO: 161642 - protein, 7 aa, synthetic construct
NRRDTSS

SEQ ID NO: 161643 - protein, 7 aa, synthetic construct
IRGKDPA

SEQ ID NO: 161644 - protein, 7 aa, synthetic construct
LARKSEG

SEQ ID NO: 161645 - protein, 7 aa, synthetic construct
LKRQGEN

SEQ ID NO: 161646 - protein, 7 aa, synthetic construct
KRIPQVE

SEQ ID NO: 161647 - protein, 7 aa, synthetic construct
AQKHPRD

SEQ ID NO: 161648 - protein, 7 aa, synthetic construct
GDGFKRQ

SEQ ID NO: 161649 - protein, 7 aa, synthetic construct
LVDSQKR

SEQ ID NO: 161650 - protein, 7 aa, synthetic construct
MTEQLKK

SEQ ID NO: 161651 - protein, 7 aa, synthetic construct
TRGNKQD

SEQ ID NO: 161652 - protein, 7 aa, synthetic construct
RIERGTQ

SEQ ID NO: 161653 - protein, 7 aa, synthetic construct
MKSRDIN

SEQ ID NO: 161654 - protein, 7 aa, synthetic construct
PEVRVVK

SEQ ID NO: 161655 - protein, 7 aa, synthetic construct
ADMGKKY

SEQ ID NO: 161656 - protein, 7 aa, synthetic construct
KRQEETR

SEQ ID NO: 161657 - protein, 7 aa, synthetic construct
DMQKAKN

SEQ ID NO: 161658 - protein, 7 aa, synthetic construct
QDQQGRR

SEQ ID NO: 161659 - protein, 7 aa, synthetic construct
MYKGESR

SEQ ID NO: 161660 - protein, 7 aa, synthetic construct
MYSSEKK

SEQ ID NO: 161661 - protein, 7 aa, synthetic construct
EMKSQRQ

SEQ ID NO: 161662 - protein, 7 aa, synthetic construct
KRQQEIM

SEQ ID NO: 161663 - protein, 7 aa, synthetic construct
RPKHVET

SEQ ID NO: 161664 - protein, 7 aa, synthetic construct
TDVGKKQ

SEQ ID NO: 161665 - protein, 7 aa, synthetic construct
SRKAETN

SEQ ID NO: 161666 - protein, 7 aa, synthetic construct
RAFDTPK

SEQ ID NO: 161667 - protein, 7 aa, synthetic construct
AQKVSIY

SEQ ID NO: 161668 - protein, 7 aa, synthetic construct
EINTRKS

SEQ ID NO: 161669 - protein, 7 aa, synthetic construct
YTESKRS

SEQ ID NO: 161670 - protein, 7 aa, synthetic construct
RQRNEVI

SEQ ID NO: 161671 - protein, 7 aa, synthetic construct
VKARGEY

SEQ ID NO: 161672 - protein, 7 aa, synthetic construct
QKRAIAD

SEQ ID NO: 161673 - protein, 7 aa, synthetic construct
DPIVKPR

SEQ ID NO: 161674 - protein, 7 aa, synthetic construct
PDPMPKK

SEQ ID NO: 161675 - protein, 7 aa, synthetic construct
KLQRNSD

SEQ ID NO: 161676 - protein, 7 aa, synthetic construct
KARMNQD

SEQ ID NO: 161677 - protein, 7 aa, synthetic construct
MGRGTDK

SEQ ID NO: 161678 - protein, 7 aa, synthetic construct
NKRQERE

SEQ ID NO: 161679 - protein, 7 aa, synthetic construct
TPENTRR

SEQ ID NO: 161680 - protein, 7 aa, synthetic construct
QRGFKEI

SEQ ID NO: 161681 - protein, 7 aa, synthetic construct
DFDKKPR

SEQ ID NO: 161682 - protein, 7 aa, synthetic construct
KGQKADH

SEQ ID NO: 161683 - protein, 7 aa, synthetic construct
DDKNLKK

SEQ ID NO: 161684 - protein, 7 aa, synthetic construct
IMRKTTE

SEQ ID NO: 161685 - protein, 7 aa, synthetic construct
QIGPRKD

SEQ ID NO: 161686 - protein, 7 aa, synthetic construct
KTDRRVD

SEQ ID NO: 161687 - protein, 7 aa, synthetic construct
LEKRNER

SEQ ID NO: 161688 - protein, 7 aa, synthetic construct
MQRGIKD

SEQ ID NO: 161689 - protein, 7 aa, synthetic construct
KRNQDNL

SEQ ID NO: 161690 - protein, 7 aa, synthetic construct
MRQRQEI

SEQ ID NO: 161691 - protein, 7 aa, synthetic construct
GDSPRIR

SEQ ID NO: 161692 - protein, 7 aa, synthetic construct
MSRKTLE

SEQ ID NO: 161693 - protein, 7 aa, synthetic construct
DAGNARK

SEQ ID NO: 161694 - protein, 7 aa, synthetic construct
RASKADM

SEQ ID NO: 161695 - protein, 7 aa, synthetic construct
NDVAIKK

SEQ ID NO: 161696 - protein, 7 aa, synthetic construct
ARQKDNL

SEQ ID NO: 161697 - protein, 7 aa, synthetic construct
TTEPVRK

SEQ ID NO: 161698 - protein, 7 aa, synthetic construct
HQVKKNE

SEQ ID NO: 161699 - protein, 7 aa, synthetic construct
EGQKMAK

SEQ ID NO: 161700 - protein, 7 aa, synthetic construct
IPREIQK

SEQ ID NO: 161701 - protein, 7 aa, synthetic construct
RAHDGGK

SEQ ID NO: 161702 - protein, 7 aa, synthetic construct
RQGGENK

SEQ ID NO: 161703 - protein, 7 aa, synthetic construct
QKRGQSE

SEQ ID NO: 161704 - protein, 7 aa, synthetic construct
LSREMPR

SEQ ID NO: 161705 - protein, 7 aa, synthetic construct
IPMEGKR

SEQ ID NO: 161706 - protein, 7 aa, synthetic construct
TIEVAKK

SEQ ID NO: 161707 - protein, 7 aa, synthetic construct
YIEHKNK

SEQ ID NO: 161708 - protein, 7 aa, synthetic construct
SIAESRK

SEQ ID NO: 161709 - protein, 7 aa, synthetic construct
KTDHDKK

SEQ ID NO: 161710 - protein, 7 aa, synthetic construct
ASRGEGR

SEQ ID NO: 161711 - protein, 7 aa, synthetic construct
NEIPRMK

SEQ ID NO: 161712 - protein, 7 aa, synthetic construct
DFPNVKR

SEQ ID NO: 161713 - protein, 7 aa, synthetic construct
GDNNKKG

SEQ ID NO: 161714 - protein, 7 aa, synthetic construct
EKKLDRM

SEQ ID NO: 161715 - protein, 7 aa, synthetic construct
QQAAERR

SEQ ID NO: 161716 - protein, 7 aa, synthetic construct
GRKSELT

SEQ ID NO: 161717 - protein, 7 aa, synthetic construct
VRTNRDM

SEQ ID NO: 161718 - protein, 7 aa, synthetic construct
RFKSGDL

SEQ ID NO: 161719 - protein, 7 aa, synthetic construct
PPRMARD

SEQ ID NO: 161720 - protein, 7 aa, synthetic construct
PAENMRK

SEQ ID NO: 161721 - protein, 7 aa, synthetic construct
EQMVKRT

SEQ ID NO: 161722 - protein, 7 aa, synthetic construct
PSDMPKK

SEQ ID NO: 161723 - protein, 7 aa, synthetic construct
AQKKADY

SEQ ID NO: 161724 - protein, 7 aa, synthetic construct
IDVPRKA

SEQ ID NO: 161725 - protein, 7 aa, synthetic construct
KSRQTET

SEQ ID NO: 161726 - protein, 7 aa, synthetic construct
SRGSKVD

SEQ ID NO: 161727 - protein, 7 aa, synthetic construct
NRRETAN

SEQ ID NO: 161728 - protein, 7 aa, synthetic construct
NVERIKL

SEQ ID NO: 161729 - protein, 7 aa, synthetic construct
HKPRDNT

SEQ ID NO: 161730 - protein, 7 aa, synthetic construct
KQSYSDK

SEQ ID NO: 161731 - protein, 7 aa, synthetic construct
PESKTQR

SEQ ID NO: 161732 - protein, 7 aa, synthetic construct
NDIGVRK

SEQ ID NO: 161733 - protein, 7 aa, synthetic construct
TADMRRQ

SEQ ID NO: 161734 - protein, 7 aa, synthetic construct
VRKLENI

SEQ ID NO: 161735 - protein, 7 aa, synthetic construct
INIKPRD

SEQ ID NO: 161736 - protein, 7 aa, synthetic construct
GTANERR

SEQ ID NO: 161737 - protein, 7 aa, synthetic construct
MRMKAIE

SEQ ID NO: 161738 - protein, 7 aa, synthetic construct
MEGTKKL

SEQ ID NO: 161739 - protein, 7 aa, synthetic construct
TRNREIS

SEQ ID NO: 161740 - protein, 7 aa, synthetic construct
PSEAKRT

SEQ ID NO: 161741 - protein, 7 aa, synthetic construct
ATEKVKW

SEQ ID NO: 161742 - protein, 7 aa, synthetic construct
NEATRRA

SEQ ID NO: 161743 - protein, 7 aa, synthetic construct
FPRKDPF

SEQ ID NO: 161744 - protein, 7 aa, synthetic construct
ARKMDKD

SEQ ID NO: 161745 - protein, 7 aa, synthetic construct
RTTSDGR

SEQ ID NO: 161746 - protein, 7 aa, synthetic construct
GNDGFKR

SEQ ID NO: 161747 - protein, 7 aa, synthetic construct
NETVKRL

SEQ ID NO: 161748 - protein, 7 aa, synthetic construct
GSKRESF

SEQ ID NO: 161749 - protein, 7 aa, synthetic construct
KNKQDTH

SEQ ID NO: 161750 - protein, 7 aa, synthetic construct
MNRKDSS

SEQ ID NO: 161751 - protein, 7 aa, synthetic construct
VRKLVDM

SEQ ID NO: 161752 - protein, 7 aa, synthetic construct
TEVRRGQ

SEQ ID NO: 161753 - protein, 7 aa, synthetic construct
FIDNTRK

SEQ ID NO: 161754 - protein, 7 aa, synthetic construct
DQGVRVK

SEQ ID NO: 161755 - protein, 7 aa, synthetic construct
RINKAID

SEQ ID NO: 161756 - protein, 7 aa, synthetic construct
YRKIENS

SEQ ID NO: 161757 - protein, 7 aa, synthetic construct
VRVRDNA

SEQ ID NO: 161758 - protein, 7 aa, synthetic construct
QETKAHR

SEQ ID NO: 161759 - protein, 7 aa, synthetic construct
NRKQQPE

SEQ ID NO: 161760 - protein, 7 aa, synthetic construct
MMRPKFE

SEQ ID NO: 161761 - protein, 7 aa, synthetic construct
RQPEAPR

SEQ ID NO: 161762 - protein, 7 aa, synthetic construct
DRKQRDS

SEQ ID NO: 161763 - protein, 7 aa, synthetic construct
FKRTDIN

SEQ ID NO: 161764 - protein, 7 aa, synthetic construct
FKHQGER

SEQ ID NO: 161765 - protein, 7 aa, synthetic construct
IPEKPKL

SEQ ID NO: 161766 - protein, 7 aa, synthetic construct
RQRQEAS

SEQ ID NO: 161767 - protein, 7 aa, synthetic construct
GEQRTKI

SEQ ID NO: 161768 - protein, 7 aa, synthetic construct
KEEATRK

SEQ ID NO: 161769 - protein, 7 aa, synthetic construct
TDAVVRR

SEQ ID NO: 161770 - protein, 7 aa, synthetic construct
TDPPKSK

SEQ ID NO: 161771 - protein, 7 aa, synthetic construct
IDGRDKR

SEQ ID NO: 161772 - protein, 7 aa, synthetic construct
ETASKPR

SEQ ID NO: 161773 - protein, 7 aa, synthetic construct
RKMNSDS

SEQ ID NO: 161774 - protein, 7 aa, synthetic construct
KSTRQIE

SEQ ID NO: 161775 - protein, 7 aa, synthetic construct
GDNMKLR

SEQ ID NO: 161776 - protein, 7 aa, synthetic construct
KPRDGDR

SEQ ID NO: 161777 - protein, 7 aa, synthetic construct
MAKRGDF

SEQ ID NO: 161778 - protein, 7 aa, synthetic construct
INKRLPD

SEQ ID NO: 161779 - protein, 7 aa, synthetic construct
VERTARS

SEQ ID NO: 161780 - protein, 7 aa, synthetic construct
LRKDPHQ

SEQ ID NO: 161781 - protein, 7 aa, synthetic construct
KRQEQDK

SEQ ID NO: 161782 - protein, 7 aa, synthetic construct
REKKSEL

SEQ ID NO: 161783 - protein, 7 aa, synthetic construct
ETMPKKF

SEQ ID NO: 161784 - protein, 7 aa, synthetic construct
SRVKDHM

SEQ ID NO: 161785 - protein, 7 aa, synthetic construct
DKQQEKK

SEQ ID NO: 161786 - protein, 7 aa, synthetic construct
WKDQEKK

SEQ ID NO: 161787 - protein, 7 aa, synthetic construct
IDKPRHA

SEQ ID NO: 161788 - protein, 7 aa, synthetic construct
RATGLDR

SEQ ID NO: 161789 - protein, 7 aa, synthetic construct
KGKNDPT

SEQ ID NO: 161790 - protein, 7 aa, synthetic construct
DAVPKKN

SEQ ID NO: 161791 - protein, 7 aa, synthetic construct
EAQGRAR

SEQ ID NO: 161792 - protein, 7 aa, synthetic construct
QKTRDDR

SEQ ID NO: 161793 - protein, 7 aa, synthetic construct
VDRKMRE

SEQ ID NO: 161794 - protein, 7 aa, synthetic construct
IKRQMEG

SEQ ID NO: 161795 - protein, 7 aa, synthetic construct
PSMETKR

SEQ ID NO: 161796 - protein, 7 aa, synthetic construct
TRALRSE

SEQ ID NO: 161797 - protein, 7 aa, synthetic construct
EPDKLKR

SEQ ID NO: 161798 - protein, 7 aa, synthetic construct
GENRAAK

SEQ ID NO: 161799 - protein, 7 aa, synthetic construct
RMRDNDK

SEQ ID NO: 161800 - protein, 7 aa, synthetic construct
LKARHPE

SEQ ID NO: 161801 - protein, 7 aa, synthetic construct
KAINRSD

SEQ ID NO: 161802 - protein, 7 aa, synthetic construct
HDNMPKK

SEQ ID NO: 161803 - protein, 7 aa, synthetic construct
GLGTEKK

SEQ ID NO: 161804 - protein, 7 aa, synthetic construct
DDKPKQR

SEQ ID NO: 161805 - protein, 7 aa, synthetic construct
QIDNQKK

SEQ ID NO: 161806 - protein, 7 aa, synthetic construct
GPETRLK

SEQ ID NO: 161807 - protein, 7 aa, synthetic construct
MVETARK

SEQ ID NO: 161808 - protein, 7 aa, synthetic construct
RHPDGAR

SEQ ID NO: 161809 - protein, 7 aa, synthetic construct
RSAQREN

SEQ ID NO: 161810 - protein, 7 aa, synthetic construct
KTQGEHR

SEQ ID NO: 161811 - protein, 7 aa, synthetic construct
PVEGAKK

SEQ ID NO: 161812 - protein, 7 aa, synthetic construct
VDRPAKN

SEQ ID NO: 161813 - protein, 7 aa, synthetic construct
NVDMQKK

SEQ ID NO: 161814 - protein, 7 aa, synthetic construct
SNKKSDQ

SEQ ID NO: 161815 - protein, 7 aa, synthetic construct
ELPRAKQ

SEQ ID NO: 161816 - protein, 7 aa, synthetic construct
DQSAKRI

SEQ ID NO: 161817 - protein, 7 aa, synthetic construct
ERKAVNN

SEQ ID NO: 161818 - protein, 7 aa, synthetic construct
QRANKDL

SEQ ID NO: 161819 - protein, 7 aa, synthetic construct
MGRKVLD

SEQ ID NO: 161820 - protein, 7 aa, synthetic construct
KNRQTGD

SEQ ID NO: 161821 - protein, 7 aa, synthetic construct
KQRPQSE

SEQ ID NO: 161822 - protein, 7 aa, synthetic construct
HDGKQTK

SEQ ID NO: 161823 - protein, 7 aa, synthetic construct
HDGAKGR

SEQ ID NO: 161824 - protein, 7 aa, synthetic construct
KYDHSMK

SEQ ID NO: 161825 - protein, 7 aa, synthetic construct
LRKTEIS

SEQ ID NO: 161826 - protein, 7 aa, synthetic construct
MKQRHEI

SEQ ID NO: 161827 - protein, 7 aa, synthetic construct
RNKDRDL

SEQ ID NO: 161828 - protein, 7 aa, synthetic construct
TKKFEPS

SEQ ID NO: 161829 - protein, 7 aa, synthetic construct
EVPPRKT

SEQ ID NO: 161830 - protein, 7 aa, synthetic construct
ALTKRGD

SEQ ID NO: 161831 - protein, 7 aa, synthetic construct
TDQAKVR

SEQ ID NO: 161832 - protein, 7 aa, synthetic construct
MKRLLES

SEQ ID NO: 161833 - protein, 7 aa, synthetic construct
VESPKNR

SEQ ID NO: 161834 - protein, 7 aa, synthetic construct
FRKDTEK

SEQ ID NO: 161835 - protein, 7 aa, synthetic construct
MARGEKS

SEQ ID NO: 161836 - protein, 7 aa, synthetic construct
FRKQVEG

SEQ ID NO: 161837 - protein, 7 aa, synthetic construct
IPKQHER

SEQ ID NO: 161838 - protein, 7 aa, synthetic construct
DPQQRMK

SEQ ID NO: 161839 - protein, 7 aa, synthetic construct
LKQPRHE

SEQ ID NO: 161840 - protein, 7 aa, synthetic construct
RTDKHNL

SEQ ID NO: 161841 - protein, 7 aa, synthetic construct
VKRMIDS

SEQ ID NO: 161842 - protein, 7 aa, synthetic construct
TEATNRR

SEQ ID NO: 161843 - protein, 7 aa, synthetic construct
ETNASKR

SEQ ID NO: 161844 - protein, 7 aa, synthetic construct
IPHSQRG

SEQ ID NO: 161845 - protein, 7 aa, synthetic construct
NTGAEKR

SEQ ID NO: 161846 - protein, 7 aa, synthetic construct
EKPHVRS

SEQ ID NO: 161847 - protein, 7 aa, synthetic construct
QAETRSK

SEQ ID NO: 161848 - protein, 7 aa, synthetic construct
NEMARKG

SEQ ID NO: 161849 - protein, 7 aa, synthetic construct
KMQVRQD

SEQ ID NO: 161850 - protein, 7 aa, synthetic construct
GKKDREQ

SEQ ID NO: 161851 - protein, 7 aa, synthetic construct
LNRKEFM

SEQ ID NO: 161852 - protein, 7 aa, synthetic construct
KRQEHNM

SEQ ID NO: 161853 - protein, 7 aa, synthetic construct
QEAQRLK

SEQ ID NO: 161854 - protein, 7 aa, synthetic construct
GRPTRVD

SEQ ID NO: 161855 - protein, 7 aa, synthetic construct
KANRNQD

SEQ ID NO: 161856 - protein, 7 aa, synthetic construct
DLSMRKL

SEQ ID NO: 161857 - protein, 7 aa, synthetic construct
MKPRGDY

SEQ ID NO: 161858 - protein, 7 aa, synthetic construct
NDTAKKF

SEQ ID NO: 161859 - protein, 7 aa, synthetic construct
PDNTQKR

SEQ ID NO: 161860 - protein, 7 aa, synthetic construct
VDNIQKK

SEQ ID NO: 161861 - protein, 7 aa, synthetic construct
ERSQKNV

SEQ ID NO: 161862 - protein, 7 aa, synthetic construct
MGRQNPG

SEQ ID NO: 161863 - protein, 7 aa, synthetic construct
DMALKRL

SEQ ID NO: 161864 - protein, 7 aa, synthetic construct
KRQQEMV

SEQ ID NO: 161865 - protein, 7 aa, synthetic construct
YDGLKRT

SEQ ID NO: 161866 - protein, 7 aa, synthetic construct
DSRPKTI

SEQ ID NO: 161867 - protein, 7 aa, synthetic construct
LKRNIVE

SEQ ID NO: 161868 - protein, 7 aa, synthetic construct
MRKSENY

SEQ ID NO: 161869 - protein, 7 aa, synthetic construct
METRNKM

SEQ ID NO: 161870 - protein, 7 aa, synthetic construct
GEIKKAQ

SEQ ID NO: 161871 - protein, 7 aa, synthetic construct
IPGIERK

SEQ ID NO: 161872 - protein, 7 aa, synthetic construct
QMRPIKD

SEQ ID NO: 161873 - protein, 7 aa, synthetic construct
IQVRKGD

SEQ ID NO: 161874 - protein, 7 aa, synthetic construct
ARTLRSE

SEQ ID NO: 161875 - protein, 7 aa, synthetic construct
DAANSKK

SEQ ID NO: 161876 - protein, 7 aa, synthetic construct
QKRGTDM

SEQ ID NO: 161877 - protein, 7 aa, synthetic construct
KRNQDTI

SEQ ID NO: 161878 - protein, 7 aa, synthetic construct
LKARDPT

SEQ ID NO: 161879 - protein, 7 aa, synthetic construct
ETAKKFN

SEQ ID NO: 161880 - protein, 7 aa, synthetic construct
PKRGVLE

SEQ ID NO: 161881 - protein, 7 aa, synthetic construct
NLEVNKR

SEQ ID NO: 161882 - protein, 7 aa, synthetic construct
NEKPRNT

SEQ ID NO: 161883 - protein, 7 aa, synthetic construct
QRKVQEN

SEQ ID NO: 161884 - protein, 7 aa, synthetic construct
NVSRARE

SEQ ID NO: 161885 - protein, 7 aa, synthetic construct
EPNNRQR

SEQ ID NO: 161886 - protein, 7 aa, synthetic construct
GDQQAKK

SEQ ID NO: 161887 - protein, 7 aa, synthetic construct
NKNKHDI

SEQ ID NO: 161888 - protein, 7 aa, synthetic construct
MKPQVKP

SEQ ID NO: 161889 - protein, 7 aa, synthetic construct
NKRQQEF

SEQ ID NO: 161890 - protein, 7 aa, synthetic construct
YENSTKK

SEQ ID NO: 161891 - protein, 7 aa, synthetic construct
AHSEAKK

SEQ ID NO: 161892 - protein, 7 aa, synthetic construct
NRRQMDP

SEQ ID NO: 161893 - protein, 7 aa, synthetic construct
SEFKRQI

SEQ ID NO: 161894 - protein, 7 aa, synthetic construct
YEMNGRR

SEQ ID NO: 161895 - protein, 7 aa, synthetic construct
QKKPHSD

SEQ ID NO: 161896 - protein, 7 aa, synthetic construct
DLDNKKK

SEQ ID NO: 161897 - protein, 7 aa, synthetic construct
KAKYVEV

SEQ ID NO: 161898 - protein, 7 aa, synthetic construct
GDIKAKW

SEQ ID NO: 161899 - protein, 7 aa, synthetic construct
DGAKNNR

SEQ ID NO: 161900 - protein, 7 aa, synthetic construct
AHEMKVR

SEQ ID NO: 161901 - protein, 7 aa, synthetic construct
IENMVKK

SEQ ID NO: 161902 - protein, 7 aa, synthetic construct
TEAPVRR

SEQ ID NO: 161903 - protein, 7 aa, synthetic construct
TESKRNQ

SEQ ID NO: 161904 - protein, 7 aa, synthetic construct
AERKSAN

SEQ ID NO: 161905 - protein, 7 aa, synthetic construct
GTTGERK

SEQ ID NO: 161906 - protein, 7 aa, synthetic construct
DLIQTKK

SEQ ID NO: 161907 - protein, 7 aa, synthetic construct
QSRTHSG

SEQ ID NO: 161908 - protein, 7 aa, synthetic construct
ISRGMRD

SEQ ID NO: 161909 - protein, 7 aa, synthetic construct
QGHKTEK

SEQ ID NO: 161910 - protein, 7 aa, synthetic construct
RENPKQS

SEQ ID NO: 161911 - protein, 7 aa, synthetic construct
GQPHVTR

SEQ ID NO: 161912 - protein, 7 aa, synthetic construct
KGRGEVS

SEQ ID NO: 161913 - protein, 7 aa, synthetic construct
RSMPRSD

SEQ ID NO: 161914 - protein, 7 aa, synthetic construct
MRVRDNA

SEQ ID NO: 161915 - protein, 7 aa, synthetic construct
PAQRSRE

SEQ ID NO: 161916 - protein, 7 aa, synthetic construct
TGVPRKD

SEQ ID NO: 161917 - protein, 7 aa, synthetic construct
MTRKNLE

SEQ ID NO: 161918 - protein, 7 aa, synthetic construct
KMRGQQD

SEQ ID NO: 161919 - protein, 7 aa, synthetic construct
KSHDKER

SEQ ID NO: 161920 - protein, 7 aa, synthetic construct
MDQPRNR

SEQ ID NO: 161921 - protein, 7 aa, synthetic construct
QQDAGRR

SEQ ID NO: 161922 - protein, 7 aa, synthetic construct
SENTKNR

SEQ ID NO: 161923 - protein, 7 aa, synthetic construct
SEKPRVH

SEQ ID NO: 161924 - protein, 7 aa, synthetic construct
QRGARMD

SEQ ID NO: 161925 - protein, 7 aa, synthetic construct
RVEQANR

SEQ ID NO: 161926 - protein, 7 aa, synthetic construct
YNESIKR

SEQ ID NO: 161927 - protein, 7 aa, synthetic construct
NEVRNAK

SEQ ID NO: 161928 - protein, 7 aa, synthetic construct
KGRAETS

SEQ ID NO: 161929 - protein, 7 aa, synthetic construct
LSKRSIE

SEQ ID NO: 161930 - protein, 7 aa, synthetic construct
KKNYMES

SEQ ID NO: 161931 - protein, 7 aa, synthetic construct
RELPKHP

SEQ ID NO: 161932 - protein, 7 aa, synthetic construct
LARKVVE

SEQ ID NO: 161933 - protein, 7 aa, synthetic construct
MRKNAFE

SEQ ID NO: 161934 - protein, 7 aa, synthetic construct
IKRAELM

SEQ ID NO: 161935 - protein, 7 aa, synthetic construct
ISENQKK

SEQ ID NO: 161936 - protein, 7 aa, synthetic construct
THGPKTL

SEQ ID NO: 161937 - protein, 7 aa, synthetic construct
NRGMKHE

SEQ ID NO: 161938 - protein, 7 aa, synthetic construct
FKRSETS

SEQ ID NO: 161939 - protein, 7 aa, synthetic construct
AMDQAKR

SEQ ID NO: 161940 - protein, 7 aa, synthetic construct
TQKRQTE

SEQ ID NO: 161941 - protein, 7 aa, synthetic construct
QKRVEYG

SEQ ID NO: 161942 - protein, 7 aa, synthetic construct
GRKSDTM

SEQ ID NO: 161943 - protein, 7 aa, synthetic construct
PEQKRDK

SEQ ID NO: 161944 - protein, 7 aa, synthetic construct
GEMRTKF

SEQ ID NO: 161945 - protein, 7 aa, synthetic construct
GDSSRLK

SEQ ID NO: 161946 - protein, 7 aa, synthetic construct
RSNRENV

SEQ ID NO: 161947 - protein, 7 aa, synthetic construct
ENQNKRS

SEQ ID NO: 161948 - protein, 7 aa, synthetic construct
IRAKEEK

SEQ ID NO: 161949 - protein, 7 aa, synthetic construct
TDNSPRR

SEQ ID NO: 161950 - protein, 7 aa, synthetic construct
YEQKGPR

SEQ ID NO: 161951 - protein, 7 aa, synthetic construct
EVTPKKF

SEQ ID NO: 161952 - protein, 7 aa, synthetic construct
HEKKERT

SEQ ID NO: 161953 - protein, 7 aa, synthetic construct
KVRLPDN

SEQ ID NO: 161954 - protein, 7 aa, synthetic construct
KQRTQAD

SEQ ID NO: 161955 - protein, 7 aa, synthetic construct
GSAENKK

SEQ ID NO: 161956 - protein, 7 aa, synthetic construct
TERPKQL

SEQ ID NO: 161957 - protein, 7 aa, synthetic construct
NTRKEEK

SEQ ID NO: 161958 - protein, 7 aa, synthetic construct
ENKKPAL

SEQ ID NO: 161959 - protein, 7 aa, synthetic construct
DRKTKDT

SEQ ID NO: 161960 - protein, 7 aa, synthetic construct
AATENRR

SEQ ID NO: 161961 - protein, 7 aa, synthetic construct
TKMREPL

SEQ ID NO: 161962 - protein, 7 aa, synthetic construct
TIGQEKK

SEQ ID NO: 161963 - protein, 7 aa, synthetic construct
YEKNEKR

SEQ ID NO: 161964 - protein, 7 aa, synthetic construct
EQPNKRI

SEQ ID NO: 161965 - protein, 7 aa, synthetic construct
SNKRVVE

SEQ ID NO: 161966 - protein, 7 aa, synthetic construct
RVEFTPK

SEQ ID NO: 161967 - protein, 7 aa, synthetic construct
VEKYMRA

SEQ ID NO: 161968 - protein, 7 aa, synthetic construct
KQHEVPR

SEQ ID NO: 161969 - protein, 7 aa, synthetic construct
WGAETKR

SEQ ID NO: 161970 - protein, 7 aa, synthetic construct
KHAENNR

SEQ ID NO: 161971 - protein, 7 aa, synthetic construct
GRDRHNV

SEQ ID NO: 161972 - protein, 7 aa, synthetic construct
IPHMAKN

SEQ ID NO: 161973 - protein, 7 aa, synthetic construct
NDGVVKK

SEQ ID NO: 161974 - protein, 7 aa, synthetic construct
SRKEKQD

SEQ ID NO: 161975 - protein, 7 aa, synthetic construct
VMNSEKR

SEQ ID NO: 161976 - protein, 7 aa, synthetic construct
SGKRDMM

SEQ ID NO: 161977 - protein, 7 aa, synthetic construct
HDNNAKK

SEQ ID NO: 161978 - protein, 7 aa, synthetic construct
AGAREAK

SEQ ID NO: 161979 - protein, 7 aa, synthetic construct
HLDGSKR

SEQ ID NO: 161980 - protein, 7 aa, synthetic construct
KEHNLQR

SEQ ID NO: 161981 - protein, 7 aa, synthetic construct
IPRSRDN

SEQ ID NO: 161982 - protein, 7 aa, synthetic construct
ENVKKYL

SEQ ID NO: 161983 - protein, 7 aa, synthetic construct
DQMKAQR

SEQ ID NO: 161984 - protein, 7 aa, synthetic construct
ERGTRQV

SEQ ID NO: 161985 - protein, 7 aa, synthetic construct
YVVKRTE

SEQ ID NO: 161986 - protein, 7 aa, synthetic construct
ISRNERM

SEQ ID NO: 161987 - protein, 7 aa, synthetic construct
SEFKNAK

SEQ ID NO: 161988 - protein, 7 aa, synthetic construct
MNRKVNE

SEQ ID NO: 161989 - protein, 7 aa, synthetic construct
YGRETPR

SEQ ID NO: 161990 - protein, 7 aa, synthetic construct
KVSRFEP

SEQ ID NO: 161991 - protein, 7 aa, synthetic construct
QAGEFKK

SEQ ID NO: 161992 - protein, 7 aa, synthetic construct
QDHGKPK

SEQ ID NO: 161993 - protein, 7 aa, synthetic construct
NIEIRSK

SEQ ID NO: 161994 - protein, 7 aa, synthetic construct
HDNQKAK

SEQ ID NO: 161995 - protein, 7 aa, synthetic construct
MRGITNS

SEQ ID NO: 161996 - protein, 7 aa, synthetic construct
SDIGIKR

SEQ ID NO: 161997 - protein, 7 aa, synthetic construct
QEQTRPR

SEQ ID NO: 161998 - protein, 7 aa, synthetic construct
QKREHYA

SEQ ID NO: 161999 - protein, 7 aa, synthetic construct
AKRMENL

SEQ ID NO: 162000 - protein, 7 aa, synthetic construct
KRMMQSE

SEQ ID NO: 162001 - protein, 7 aa, synthetic construct
AEVRKNM

SEQ ID NO: 162002 - protein, 7 aa, synthetic construct
YKNNESR

SEQ ID NO: 162003 - protein, 7 aa, synthetic construct
SRAERNN

SEQ ID NO: 162004 - protein, 7 aa, synthetic construct
ETRPIKM

SEQ ID NO: 162005 - protein, 7 aa, synthetic construct
SMEVRTK

SEQ ID NO: 162006 - protein, 7 aa, synthetic construct
VRHEMPK

SEQ ID NO: 162007 - protein, 7 aa, synthetic construct
GRKSDAT

SEQ ID NO: 162008 - protein, 7 aa, synthetic construct
NDMQRKG

SEQ ID NO: 162009 - protein, 7 aa, synthetic construct
TDKHPKY

SEQ ID NO: 162010 - protein, 7 aa, synthetic construct
TEGAKMK

SEQ ID NO: 162011 - protein, 7 aa, synthetic construct
GQPHAVR

SEQ ID NO: 162012 - protein, 7 aa, synthetic construct
NESKRQV

SEQ ID NO: 162013 - protein, 7 aa, synthetic construct
LQDQRRN

SEQ ID NO: 162014 - protein, 7 aa, synthetic construct
GATQERK

SEQ ID NO: 162015 - protein, 7 aa, synthetic construct
IRDHARS

SEQ ID NO: 162016 - protein, 7 aa, synthetic construct
DQTTRNK

SEQ ID NO: 162017 - protein, 7 aa, synthetic construct
DNAPKRT

SEQ ID NO: 162018 - protein, 7 aa, synthetic construct
SKGAYER

SEQ ID NO: 162019 - protein, 7 aa, synthetic construct
EGNAKAR

SEQ ID NO: 162020 - protein, 7 aa, synthetic construct
KRGSDIY

SEQ ID NO: 162021 - protein, 7 aa, synthetic construct
VRLSAER

SEQ ID NO: 162022 - protein, 7 aa, synthetic construct
PEKKHVS

SEQ ID NO: 162023 - protein, 7 aa, synthetic construct
ILEGRRM

SEQ ID NO: 162024 - protein, 7 aa, synthetic construct
IKRATES

SEQ ID NO: 162025 - protein, 7 aa, synthetic construct
QEGVRKM

SEQ ID NO: 162026 - protein, 7 aa, synthetic construct
NRQRVAE

SEQ ID NO: 162027 - protein, 7 aa, synthetic construct
YTGHGQR

SEQ ID NO: 162028 - protein, 7 aa, synthetic construct
DLTGTRR

SEQ ID NO: 162029 - protein, 7 aa, synthetic construct
YDGVRAK

SEQ ID NO: 162030 - protein, 7 aa, synthetic construct
YGEIVKR

SEQ ID NO: 162031 - protein, 7 aa, synthetic construct
DGPQRKQ

SEQ ID NO: 162032 - protein, 7 aa, synthetic construct
LRKSEQV

SEQ ID NO: 162033 - protein, 7 aa, synthetic construct
IRKSVQE

SEQ ID NO: 162034 - protein, 7 aa, synthetic construct
DGRPVTK

SEQ ID NO: 162035 - protein, 7 aa, synthetic construct
TESQRSK

SEQ ID NO: 162036 - protein, 7 aa, synthetic construct
YAEGNKK

SEQ ID NO: 162037 - protein, 7 aa, synthetic construct
VFKQPDK

SEQ ID NO: 162038 - protein, 7 aa, synthetic construct
ASEGNKK

SEQ ID NO: 162039 - protein, 7 aa, synthetic construct
GDPRPQK

SEQ ID NO: 162040 - protein, 7 aa, synthetic construct
RTHPPSQ

SEQ ID NO: 162041 - protein, 7 aa, synthetic construct
VRGIHAA

SEQ ID NO: 162042 - protein, 7 aa, synthetic construct
ARRDNPL

SEQ ID NO: 162043 - protein, 7 aa, synthetic construct
NADRDKR

SEQ ID NO: 162044 - protein, 7 aa, synthetic construct
VDLRAKL

SEQ ID NO: 162045 - protein, 7 aa, synthetic construct
LTRKSDV

SEQ ID NO: 162046 - protein, 7 aa, synthetic construct
WKEAEKR

SEQ ID NO: 162047 - protein, 7 aa, synthetic construct
GMPRNKD

SEQ ID NO: 162048 - protein, 7 aa, synthetic construct
IVRGERA

SEQ ID NO: 162049 - protein, 7 aa, synthetic construct
NEVRSKS

SEQ ID NO: 162050 - protein, 7 aa, synthetic construct
EFRATKA

SEQ ID NO: 162051 - protein, 7 aa, synthetic construct
MTKKNPD

SEQ ID NO: 162052 - protein, 7 aa, synthetic construct
EQQLKNR

SEQ ID NO: 162053 - protein, 7 aa, synthetic construct
NDRDTKR

SEQ ID NO: 162054 - protein, 7 aa, synthetic construct
TKRDYNQ

SEQ ID NO: 162055 - protein, 7 aa, synthetic construct
QRETHGR

SEQ ID NO: 162056 - protein, 7 aa, synthetic construct
QPESRIK

SEQ ID NO: 162057 - protein, 7 aa, synthetic construct
YDGRKSQ

SEQ ID NO: 162058 - protein, 7 aa, synthetic construct
LGRNMDK

SEQ ID NO: 162059 - protein, 7 aa, synthetic construct
ASRGTKD

SEQ ID NO: 162060 - protein, 7 aa, synthetic construct
PMARKLE

SEQ ID NO: 162061 - protein, 7 aa, synthetic construct
AKTRNNE

SEQ ID NO: 162062 - protein, 7 aa, synthetic construct
EGKPSKL

SEQ ID NO: 162063 - protein, 7 aa, synthetic construct
PDGKRGS

SEQ ID NO: 162064 - protein, 7 aa, synthetic construct
DMLPKKM

SEQ ID NO: 162065 - protein, 7 aa, synthetic construct
NSRKENS

SEQ ID NO: 162066 - protein, 7 aa, synthetic construct
ADRKERN

SEQ ID NO: 162067 - protein, 7 aa, synthetic construct
QKDGPRN

SEQ ID NO: 162068 - protein, 7 aa, synthetic construct
TEQPRKQ

SEQ ID NO: 162069 - protein, 7 aa, synthetic construct
ERDKRGQ

SEQ ID NO: 162070 - protein, 7 aa, synthetic construct
DAPKPRP

SEQ ID NO: 162071 - protein, 7 aa, synthetic construct
RDSYSAK

SEQ ID NO: 162072 - protein, 7 aa, synthetic construct
IQEQGKK

SEQ ID NO: 162073 - protein, 7 aa, synthetic construct
TGRAKDM

SEQ ID NO: 162074 - protein, 7 aa, synthetic construct
TDGQVKR

SEQ ID NO: 162075 - protein, 7 aa, synthetic construct
PAARKTE

SEQ ID NO: 162076 - protein, 7 aa, synthetic construct
NTDQKKW

SEQ ID NO: 162077 - protein, 7 aa, synthetic construct
VKQYREI

SEQ ID NO: 162078 - protein, 7 aa, synthetic construct
QSEGVKK

SEQ ID NO: 162079 - protein, 7 aa, synthetic construct
DRGPLRN

SEQ ID NO: 162080 - protein, 7 aa, synthetic construct
YIENTRK

SEQ ID NO: 162081 - protein, 7 aa, synthetic construct
DAATLRK

SEQ ID NO: 162082 - protein, 7 aa, synthetic construct
RRDDIGK

SEQ ID NO: 162083 - protein, 7 aa, synthetic construct
HINNDKK

SEQ ID NO: 162084 - protein, 7 aa, synthetic construct
HMEREKK

SEQ ID NO: 162085 - protein, 7 aa, synthetic construct
KGHTQDK

SEQ ID NO: 162086 - protein, 7 aa, synthetic construct
VDTPRRL

SEQ ID NO: 162087 - protein, 7 aa, synthetic construct
ADKRSEK

SEQ ID NO: 162088 - protein, 7 aa, synthetic construct
RQAHDGR

SEQ ID NO: 162089 - protein, 7 aa, synthetic construct
RIIRGEP

SEQ ID NO: 162090 - protein, 7 aa, synthetic construct
ARGSRET

SEQ ID NO: 162091 - protein, 7 aa, synthetic construct
QRGVSGA

SEQ ID NO: 162092 - protein, 7 aa, synthetic construct
AVKRQLD

SEQ ID NO: 162093 - protein, 7 aa, synthetic construct
IKNRDPT

SEQ ID NO: 162094 - protein, 7 aa, synthetic construct
IRKIEQF

SEQ ID NO: 162095 - protein, 7 aa, synthetic construct
EQAKIKL

SEQ ID NO: 162096 - protein, 7 aa, synthetic construct
GENPKKA

SEQ ID NO: 162097 - protein, 7 aa, synthetic construct
QSGKRDN

SEQ ID NO: 162098 - protein, 7 aa, synthetic construct
ETAKQRQ

SEQ ID NO: 162099 - protein, 7 aa, synthetic construct
QKPKEWN

SEQ ID NO: 162100 - protein, 7 aa, synthetic construct
TKRQLGD

SEQ ID NO: 162101 - protein, 7 aa, synthetic construct
HEKPRQM

SEQ ID NO: 162102 - protein, 7 aa, synthetic construct
VRGLHQS

SEQ ID NO: 162103 - protein, 7 aa, synthetic construct
DKSHKDK

SEQ ID NO: 162104 - protein, 7 aa, synthetic construct
KLHREQP

SEQ ID NO: 162105 - protein, 7 aa, synthetic construct
QSRGERP

SEQ ID NO: 162106 - protein, 7 aa, synthetic construct
IGRQELK

SEQ ID NO: 162107 - protein, 7 aa, synthetic construct
RVTHSDK

SEQ ID NO: 162108 - protein, 7 aa, synthetic construct
VEVKRSY

SEQ ID NO: 162109 - protein, 7 aa, synthetic construct
ITRNEKG

SEQ ID NO: 162110 - protein, 7 aa, synthetic construct
TEVNRKS

SEQ ID NO: 162111 - protein, 7 aa, synthetic construct
QYSKQEK

SEQ ID NO: 162112 - protein, 7 aa, synthetic construct
TEFAAKK

SEQ ID NO: 162113 - protein, 7 aa, synthetic construct
KETPRSN

SEQ ID NO: 162114 - protein, 7 aa, synthetic construct
NDTQLKK

SEQ ID NO: 162115 - protein, 7 aa, synthetic construct
RSHPKEL

SEQ ID NO: 162116 - protein, 7 aa, synthetic construct
IFRKEQG

SEQ ID NO: 162117 - protein, 7 aa, synthetic construct
VDQTNRR

SEQ ID NO: 162118 - protein, 7 aa, synthetic construct
LTAPRRE

SEQ ID NO: 162119 - protein, 7 aa, synthetic construct
KRQPPVE

SEQ ID NO: 162120 - protein, 7 aa, synthetic construct
HIDNTRK

SEQ ID NO: 162121 - protein, 7 aa, synthetic construct
NKKMDPF

SEQ ID NO: 162122 - protein, 7 aa, synthetic construct
IADVMRK

SEQ ID NO: 162123 - protein, 7 aa, synthetic construct
GIDGVKR

SEQ ID NO: 162124 - protein, 7 aa, synthetic construct
RPRTGEA

SEQ ID NO: 162125 - protein, 7 aa, synthetic construct
TEYRVKA

SEQ ID NO: 162126 - protein, 7 aa, synthetic construct
QRPHNPQ

SEQ ID NO: 162127 - protein, 7 aa, synthetic construct
KSIRQGD

SEQ ID NO: 162128 - protein, 7 aa, synthetic construct
NKRVSDV

SEQ ID NO: 162129 - protein, 7 aa, synthetic construct
QEQKIHR

SEQ ID NO: 162130 - protein, 7 aa, synthetic construct
SDGTKSR

SEQ ID NO: 162131 - protein, 7 aa, synthetic construct
DVKPRAQ

SEQ ID NO: 162132 - protein, 7 aa, synthetic construct
KRMPTAD

SEQ ID NO: 162133 - protein, 7 aa, synthetic construct
EGKFTKS

SEQ ID NO: 162134 - protein, 7 aa, synthetic construct
EKGLVRA

SEQ ID NO: 162135 - protein, 7 aa, synthetic construct
AASRKEV

SEQ ID NO: 162136 - protein, 7 aa, synthetic construct
KISHNDR

SEQ ID NO: 162137 - protein, 7 aa, synthetic construct
IIAEARK

SEQ ID NO: 162138 - protein, 7 aa, synthetic construct
KREKQSD

SEQ ID NO: 162139 - protein, 7 aa, synthetic construct
QDNTMKR

SEQ ID NO: 162140 - protein, 7 aa, synthetic construct
MARKDDK

SEQ ID NO: 162141 - protein, 7 aa, synthetic construct
MRGVHQN

SEQ ID NO: 162142 - protein, 7 aa, synthetic construct
RQRGEIM

SEQ ID NO: 162143 - protein, 7 aa, synthetic construct
YESVKRA

SEQ ID NO: 162144 - protein, 7 aa, synthetic construct
ETLPKIK

SEQ ID NO: 162145 - protein, 7 aa, synthetic construct
QESKRSM

SEQ ID NO: 162146 - protein, 7 aa, synthetic construct
GRNVKSE

SEQ ID NO: 162147 - protein, 7 aa, synthetic construct
RRQQGEV

SEQ ID NO: 162148 - protein, 7 aa, synthetic construct
SETKPKH

SEQ ID NO: 162149 - protein, 7 aa, synthetic construct
LENNMRR

SEQ ID NO: 162150 - protein, 7 aa, synthetic construct
KDTPRFN

SEQ ID NO: 162151 - protein, 7 aa, synthetic construct
EKPKKEQ

SEQ ID NO: 162152 - protein, 7 aa, synthetic construct
WQPKPKE

SEQ ID NO: 162153 - protein, 7 aa, synthetic construct
KVTKYEN

SEQ ID NO: 162154 - protein, 7 aa, synthetic construct
MRLPRAE

SEQ ID NO: 162155 - protein, 7 aa, synthetic construct
HKLPRVE

SEQ ID NO: 162156 - protein, 7 aa, synthetic construct
TRPRSDV

SEQ ID NO: 162157 - protein, 7 aa, synthetic construct
AEMRNAK

SEQ ID NO: 162158 - protein, 7 aa, synthetic construct
AKRGMID

SEQ ID NO: 162159 - protein, 7 aa, synthetic construct
RPVRDLN

SEQ ID NO: 162160 - protein, 7 aa, synthetic construct
TGRSDRG

SEQ ID NO: 162161 - protein, 7 aa, synthetic construct
MEAGIRK

SEQ ID NO: 162162 - protein, 7 aa, synthetic construct
DLTPRRS

SEQ ID NO: 162163 - protein, 7 aa, synthetic construct
NKKQTEH

SEQ ID NO: 162164 - protein, 7 aa, synthetic construct
KRDPGDK

SEQ ID NO: 162165 - protein, 7 aa, synthetic construct
SRKDSEK

SEQ ID NO: 162166 - protein, 7 aa, synthetic construct
AVERQKM

SEQ ID NO: 162167 - protein, 7 aa, synthetic construct
VEKMPKH

SEQ ID NO: 162168 - protein, 7 aa, synthetic construct
QEVTRGR

SEQ ID NO: 162169 - protein, 7 aa, synthetic construct
DFTAGKK

SEQ ID NO: 162170 - protein, 7 aa, synthetic construct
HEGVKKN

SEQ ID NO: 162171 - protein, 7 aa, synthetic construct
ETKNYKS

SEQ ID NO: 162172 - protein, 7 aa, synthetic construct
FPRQREN

SEQ ID NO: 162173 - protein, 7 aa, synthetic construct
DGAASKR

SEQ ID NO: 162174 - protein, 7 aa, synthetic construct
FTQENRK

SEQ ID NO: 162175 - protein, 7 aa, synthetic construct
EQQKRTQ

SEQ ID NO: 162176 - protein, 7 aa, synthetic construct
MKKQENF

SEQ ID NO: 162177 - protein, 7 aa, synthetic construct
GRQKDHV

SEQ ID NO: 162178 - protein, 7 aa, synthetic construct
QEEKKRP

SEQ ID NO: 162179 - protein, 7 aa, synthetic construct
IKRGEQN

SEQ ID NO: 162180 - protein, 7 aa, synthetic construct
EPRATKA

SEQ ID NO: 162181 - protein, 7 aa, synthetic construct
IEGPVKR

SEQ ID NO: 162182 - protein, 7 aa, synthetic construct
TIDSRRN

SEQ ID NO: 162183 - protein, 7 aa, synthetic construct
FDAAKKF

SEQ ID NO: 162184 - protein, 7 aa, synthetic construct
EKRSINA

SEQ ID NO: 162185 - protein, 7 aa, synthetic construct
MNRKETS

SEQ ID NO: 162186 - protein, 7 aa, synthetic construct
LDMPRNK

SEQ ID NO: 162187 - protein, 7 aa, synthetic construct
YRGKPLD

SEQ ID NO: 162188 - protein, 7 aa, synthetic construct
MKQYKEN

SEQ ID NO: 162189 - protein, 7 aa, synthetic construct
MRSNKEL

SEQ ID NO: 162190 - protein, 7 aa, synthetic construct
DHVKIKM

SEQ ID NO: 162191 - protein, 7 aa, synthetic construct
PGVRFKE

SEQ ID NO: 162192 - protein, 7 aa, synthetic construct
NDNTAKR

SEQ ID NO: 162193 - protein, 7 aa, synthetic construct
RTEQAHK

SEQ ID NO: 162194 - protein, 7 aa, synthetic construct
LRKSQGE

SEQ ID NO: 162195 - protein, 7 aa, synthetic construct
GQLKRID

SEQ ID NO: 162196 - protein, 7 aa, synthetic construct
PEQRAKS

SEQ ID NO: 162197 - protein, 7 aa, synthetic construct
AGRASDK

SEQ ID NO: 162198 - protein, 7 aa, synthetic construct
NARKSDL

SEQ ID NO: 162199 - protein, 7 aa, synthetic construct
QVEVKSR

SEQ ID NO: 162200 - protein, 7 aa, synthetic construct
ADSNRMR

SEQ ID NO: 162201 - protein, 7 aa, synthetic construct
NDRPRNL

SEQ ID NO: 162202 - protein, 7 aa, synthetic construct
VEIPARK

SEQ ID NO: 162203 - protein, 7 aa, synthetic construct
SENSRIK

SEQ ID NO: 162204 - protein, 7 aa, synthetic construct
RPRGGDF

SEQ ID NO: 162205 - protein, 7 aa, synthetic construct
EVKPIKH

SEQ ID NO: 162206 - protein, 7 aa, synthetic construct
QTEITRK

SEQ ID NO: 162207 - protein, 7 aa, synthetic construct
KIHRESP

SEQ ID NO: 162208 - protein, 7 aa, synthetic construct
DMIGVKK

SEQ ID NO: 162209 - protein, 7 aa, synthetic construct
MRKMKEE

SEQ ID NO: 162210 - protein, 7 aa, synthetic construct
QKPRDIL

SEQ ID NO: 162211 - protein, 7 aa, synthetic construct
IGRKILE

SEQ ID NO: 162212 - protein, 7 aa, synthetic construct
EGKMSMK

SEQ ID NO: 162213 - protein, 7 aa, synthetic construct
PAQKRDQ

SEQ ID NO: 162214 - protein, 7 aa, synthetic construct
RMSREVP

SEQ ID NO: 162215 - protein, 7 aa, synthetic construct
GEVMKLR

SEQ ID NO: 162216 - protein, 7 aa, synthetic construct
QKRTQLE

SEQ ID NO: 162217 - protein, 7 aa, synthetic construct
LKRIDNA

SEQ ID NO: 162218 - protein, 7 aa, synthetic construct
YETQRTK

SEQ ID NO: 162219 - protein, 7 aa, synthetic construct
RLDNSSR

SEQ ID NO: 162220 - protein, 7 aa, synthetic construct
NDTPRKQ

SEQ ID NO: 162221 - protein, 7 aa, synthetic construct
ETKQVRS

SEQ ID NO: 162222 - protein, 7 aa, synthetic construct
YDVGAKR

SEQ ID NO: 162223 - protein, 7 aa, synthetic construct
IKREVYQ

SEQ ID NO: 162224 - protein, 7 aa, synthetic construct
DEKAKRG

SEQ ID NO: 162225 - protein, 7 aa, synthetic construct
KREYKES

SEQ ID NO: 162226 - protein, 7 aa, synthetic construct
RQRQEGT

SEQ ID NO: 162227 - protein, 7 aa, synthetic construct
RMSKSIE

SEQ ID NO: 162228 - protein, 7 aa, synthetic construct
MRNQIEK

SEQ ID NO: 162229 - protein, 7 aa, synthetic construct
RPKTVPD

SEQ ID NO: 162230 - protein, 7 aa, synthetic construct
PDIKVKQ

SEQ ID NO: 162231 - protein, 7 aa, synthetic construct
RPKTYGD

SEQ ID NO: 162232 - protein, 7 aa, synthetic construct
RMSGEGR

SEQ ID NO: 162233 - protein, 7 aa, synthetic construct
PENTRAK

SEQ ID NO: 162234 - protein, 7 aa, synthetic construct
MTRPKGD

SEQ ID NO: 162235 - protein, 7 aa, synthetic construct
AKREREG

SEQ ID NO: 162236 - protein, 7 aa, synthetic construct
VRHVVAA

SEQ ID NO: 162237 - protein, 7 aa, synthetic construct
QKRQDPI

SEQ ID NO: 162238 - protein, 7 aa, synthetic construct
IPGASRQ

SEQ ID NO: 162239 - protein, 7 aa, synthetic construct
SRVKDTH

SEQ ID NO: 162240 - protein, 7 aa, synthetic construct
IRGITNH

SEQ ID NO: 162241 - protein, 7 aa, synthetic construct
IKRAVME

SEQ ID NO: 162242 - protein, 7 aa, synthetic construct
NKRPVME

SEQ ID NO: 162243 - protein, 7 aa, synthetic construct
SDRKNNS

SEQ ID NO: 162244 - protein, 7 aa, synthetic construct
MDSKERR

SEQ ID NO: 162245 - protein, 7 aa, synthetic construct
QGKRSEI

SEQ ID NO: 162246 - protein, 7 aa, synthetic construct
IRGERVA

SEQ ID NO: 162247 - protein, 7 aa, synthetic construct
EPNVRAK

SEQ ID NO: 162248 - protein, 7 aa, synthetic construct
SVETGKK

SEQ ID NO: 162249 - protein, 7 aa, synthetic construct
EQNQKYK

SEQ ID NO: 162250 - protein, 7 aa, synthetic construct
NRARTEV

SEQ ID NO: 162251 - protein, 7 aa, synthetic construct
SVEGRNK

SEQ ID NO: 162252 - protein, 7 aa, synthetic construct
ATDRREK

SEQ ID NO: 162253 - protein, 7 aa, synthetic construct
KNIKFTD

SEQ ID NO: 162254 - protein, 7 aa, synthetic construct
GNEGNKK

SEQ ID NO: 162255 - protein, 7 aa, synthetic construct
QGRNEPK

SEQ ID NO: 162256 - protein, 7 aa, synthetic construct
TYKQRDL

SEQ ID NO: 162257 - protein, 7 aa, synthetic construct
MADGSKK

SEQ ID NO: 162258 - protein, 7 aa, synthetic construct
MRKITGD

SEQ ID NO: 162259 - protein, 7 aa, synthetic construct
ARKADVT

SEQ ID NO: 162260 - protein, 7 aa, synthetic construct
REHKKEI

SEQ ID NO: 162261 - protein, 7 aa, synthetic construct
GEQTVKR

SEQ ID NO: 162262 - protein, 7 aa, synthetic construct
RPKMKDD

SEQ ID NO: 162263 - protein, 7 aa, synthetic construct
FKRVGEN

SEQ ID NO: 162264 - protein, 7 aa, synthetic construct
MTQEIKR

SEQ ID NO: 162265 - protein, 7 aa, synthetic construct
KRQVPME

SEQ ID NO: 162266 - protein, 7 aa, synthetic construct
TRSHQAN

SEQ ID NO: 162267 - protein, 7 aa, synthetic construct
SNKKDTT

SEQ ID NO: 162268 - protein, 7 aa, synthetic construct
DLKPASK

SEQ ID NO: 162269 - protein, 7 aa, synthetic construct
LKRTGVD

SEQ ID NO: 162270 - protein, 7 aa, synthetic construct
TKRAMLD

SEQ ID NO: 162271 - protein, 7 aa, synthetic construct
LGHSNRG

SEQ ID NO: 162272 - protein, 7 aa, synthetic construct
ATRKMDA

SEQ ID NO: 162273 - protein, 7 aa, synthetic construct
GAEGKVR

SEQ ID NO: 162274 - protein, 7 aa, synthetic construct
DIDKRGK

SEQ ID NO: 162275 - protein, 7 aa, synthetic construct
QGRMNPN

SEQ ID NO: 162276 - protein, 7 aa, synthetic construct
SERSVKY

SEQ ID NO: 162277 - protein, 7 aa, synthetic construct
RSTYKGD

SEQ ID NO: 162278 - protein, 7 aa, synthetic construct
AENMKMR

SEQ ID NO: 162279 - protein, 7 aa, synthetic construct
KQSRATD

SEQ ID NO: 162280 - protein, 7 aa, synthetic construct
NSKRDVS

SEQ ID NO: 162281 - protein, 7 aa, synthetic construct
EPAAMKK

SEQ ID NO: 162282 - protein, 7 aa, synthetic construct
QVDVVRK

SEQ ID NO: 162283 - protein, 7 aa, synthetic construct
DRPRQNT

SEQ ID NO: 162284 - protein, 7 aa, synthetic construct
RPHKELL

SEQ ID NO: 162285 - protein, 7 aa, synthetic construct
QGKKDIT

SEQ ID NO: 162286 - protein, 7 aa, synthetic construct
GAENVRK

SEQ ID NO: 162287 - protein, 7 aa, synthetic construct
PEQTRAK

SEQ ID NO: 162288 - protein, 7 aa, synthetic construct
TKRLETM

SEQ ID NO: 162289 - protein, 7 aa, synthetic construct
VSREEKK

SEQ ID NO: 162290 - protein, 7 aa, synthetic construct
IQRKMPE

SEQ ID NO: 162291 - protein, 7 aa, synthetic construct
AFEKAKY

SEQ ID NO: 162292 - protein, 7 aa, synthetic construct
VSRGAKD

SEQ ID NO: 162293 - protein, 7 aa, synthetic construct
GKVRSSE

SEQ ID NO: 162294 - protein, 7 aa, synthetic construct
NETNKRM

SEQ ID NO: 162295 - protein, 7 aa, synthetic construct
GGKKDMM

SEQ ID NO: 162296 - protein, 7 aa, synthetic construct
ETTKQKL

SEQ ID NO: 162297 - protein, 7 aa, synthetic construct
LNMEGRR

SEQ ID NO: 162298 - protein, 7 aa, synthetic construct
ETVKIRN

SEQ ID NO: 162299 - protein, 7 aa, synthetic construct
SKARDAQ

SEQ ID NO: 162300 - protein, 7 aa, synthetic construct
GRHETTR

SEQ ID NO: 162301 - protein, 7 aa, synthetic construct
DRQKKEV

SEQ ID NO: 162302 - protein, 7 aa, synthetic construct
GKTKENW

SEQ ID NO: 162303 - protein, 7 aa, synthetic construct
QENAKNR

SEQ ID NO: 162304 - protein, 7 aa, synthetic construct
HKQRDGM

SEQ ID NO: 162305 - protein, 7 aa, synthetic construct
LKGVSYA

SEQ ID NO: 162306 - protein, 7 aa, synthetic construct
QRKTQEM

SEQ ID NO: 162307 - protein, 7 aa, synthetic construct
RGLRVSE

SEQ ID NO: 162308 - protein, 7 aa, synthetic construct
TEGRIKA

SEQ ID NO: 162309 - protein, 7 aa, synthetic construct
KSKANPD

SEQ ID NO: 162310 - protein, 7 aa, synthetic construct
ERINTRA

SEQ ID NO: 162311 - protein, 7 aa, synthetic construct
KSADHAR

SEQ ID NO: 162312 - protein, 7 aa, synthetic construct
QKINRID

SEQ ID NO: 162313 - protein, 7 aa, synthetic construct
LGEVMRK

SEQ ID NO: 162314 - protein, 7 aa, synthetic construct
EVSPMKR

SEQ ID NO: 162315 - protein, 7 aa, synthetic construct
TRNLKHE

SEQ ID NO: 162316 - protein, 7 aa, synthetic construct
PEVIKKS

SEQ ID NO: 162317 - protein, 7 aa, synthetic construct
MHKPRVD

SEQ ID NO: 162318 - protein, 7 aa, synthetic construct
VRGKPLD

SEQ ID NO: 162319 - protein, 7 aa, synthetic construct
IKSRGEQ

SEQ ID NO: 162320 - protein, 7 aa, synthetic construct
AESRNKP

SEQ ID NO: 162321 - protein, 7 aa, synthetic construct
RQIGQDK

SEQ ID NO: 162322 - protein, 7 aa, synthetic construct
GKRDSDK

SEQ ID NO: 162323 - protein, 7 aa, synthetic construct
RVEKYEK

SEQ ID NO: 162324 - protein, 7 aa, synthetic construct
QQRKSDL

SEQ ID NO: 162325 - protein, 7 aa, synthetic construct
KPHRDQI

SEQ ID NO: 162326 - protein, 7 aa, synthetic construct
YSRATER

SEQ ID NO: 162327 - protein, 7 aa, synthetic construct
ERVKENK

SEQ ID NO: 162328 - protein, 7 aa, synthetic construct
IKYQMPS

SEQ ID NO: 162329 - protein, 7 aa, synthetic construct
RGTPRTE

SEQ ID NO: 162330 - protein, 7 aa, synthetic construct
ATRGEPR

SEQ ID NO: 162331 - protein, 7 aa, synthetic construct
NQESRKL

SEQ ID NO: 162332 - protein, 7 aa, synthetic construct
GIDTNRR

SEQ ID NO: 162333 - protein, 7 aa, synthetic construct
FKKPDPH

SEQ ID NO: 162334 - protein, 7 aa, synthetic construct
ETQKSAR

SEQ ID NO: 162335 - protein, 7 aa, synthetic construct
FKSREER

SEQ ID NO: 162336 - protein, 7 aa, synthetic construct
MDRQIKA

SEQ ID NO: 162337 - protein, 7 aa, synthetic construct
KMHVMER

SEQ ID NO: 162338 - protein, 7 aa, synthetic construct
NENTRSR

SEQ ID NO: 162339 - protein, 7 aa, synthetic construct
PLNEARR

SEQ ID NO: 162340 - protein, 7 aa, synthetic construct
NKAHFEK

SEQ ID NO: 162341 - protein, 7 aa, synthetic construct
QRKSELT

SEQ ID NO: 162342 - protein, 7 aa, synthetic construct
DHATKLR

SEQ ID NO: 162343 - protein, 7 aa, synthetic construct
HDAGKRM

SEQ ID NO: 162344 - protein, 7 aa, synthetic construct
ARPRDNI

SEQ ID NO: 162345 - protein, 7 aa, synthetic construct
RVRQQAE

SEQ ID NO: 162346 - protein, 7 aa, synthetic construct
EVKPRYG

SEQ ID NO: 162347 - protein, 7 aa, synthetic construct
TSKRDIS

SEQ ID NO: 162348 - protein, 7 aa, synthetic construct
DSNKREK

SEQ ID NO: 162349 - protein, 7 aa, synthetic construct
WNATEKR

SEQ ID NO: 162350 - protein, 7 aa, synthetic construct
MAPREHR

SEQ ID NO: 162351 - protein, 7 aa, synthetic construct
RGRGDVV

SEQ ID NO: 162352 - protein, 7 aa, synthetic construct
QPKREPF

SEQ ID NO: 162353 - protein, 7 aa, synthetic construct
IRNEHRG

SEQ ID NO: 162354 - protein, 7 aa, synthetic construct
NRKIDSI

SEQ ID NO: 162355 - protein, 7 aa, synthetic construct
DAGAKYK

SEQ ID NO: 162356 - protein, 7 aa, synthetic construct
MPRTRDN

SEQ ID NO: 162357 - protein, 7 aa, synthetic construct
NRQVKAE

SEQ ID NO: 162358 - protein, 7 aa, synthetic construct
FKRASEV

SEQ ID NO: 162359 - protein, 7 aa, synthetic construct
NKRDLER

SEQ ID NO: 162360 - protein, 7 aa, synthetic construct
RKAQPPD

SEQ ID NO: 162361 - protein, 7 aa, synthetic construct
QTRKVGE

SEQ ID NO: 162362 - protein, 7 aa, synthetic construct
FRKIIEG

SEQ ID NO: 162363 - protein, 7 aa, synthetic construct
STRQRET

SEQ ID NO: 162364 - protein, 7 aa, synthetic construct
LDQGRKQ

SEQ ID NO: 162365 - protein, 7 aa, synthetic construct
LEKHTRQ

SEQ ID NO: 162366 - protein, 7 aa, synthetic construct
VKMRDNT

SEQ ID NO: 162367 - protein, 7 aa, synthetic construct
NKGQVDR

SEQ ID NO: 162368 - protein, 7 aa, synthetic construct
IERPLRN

SEQ ID NO: 162369 - protein, 7 aa, synthetic construct
QKLGLKA

SEQ ID NO: 162370 - protein, 7 aa, synthetic construct
KPRHEGM

SEQ ID NO: 162371 - protein, 7 aa, synthetic construct
ETNPNKK

SEQ ID NO: 162372 - protein, 7 aa, synthetic construct
LKRQIDT

SEQ ID NO: 162373 - protein, 7 aa, synthetic construct
LKKHLVD

SEQ ID NO: 162374 - protein, 7 aa, synthetic construct
LENGPKR

SEQ ID NO: 162375 - protein, 7 aa, synthetic construct
QRKIDLN

SEQ ID NO: 162376 - protein, 7 aa, synthetic construct
QRSMKTE

SEQ ID NO: 162377 - protein, 7 aa, synthetic construct
RILRGEP

SEQ ID NO: 162378 - protein, 7 aa, synthetic construct
NANERRN

SEQ ID NO: 162379 - protein, 7 aa, synthetic construct
MEIGKLR

SEQ ID NO: 162380 - protein, 7 aa, synthetic construct
RVDRSTT

SEQ ID NO: 162381 - protein, 7 aa, synthetic construct
IDGTRRM

SEQ ID NO: 162382 - protein, 7 aa, synthetic construct
EYKPIRV

SEQ ID NO: 162383 - protein, 7 aa, synthetic construct
HIEKASR

SEQ ID NO: 162384 - protein, 7 aa, synthetic construct
VRGHIPA

SEQ ID NO: 162385 - protein, 7 aa, synthetic construct
QETPKMK

SEQ ID NO: 162386 - protein, 7 aa, synthetic construct
TETKRNN

SEQ ID NO: 162387 - protein, 7 aa, synthetic construct
AEARMVK

SEQ ID NO: 162388 - protein, 7 aa, synthetic construct
FKSREPQ

SEQ ID NO: 162389 - protein, 7 aa, synthetic construct
FKRAMES

SEQ ID NO: 162390 - protein, 7 aa, synthetic construct
RRGVAEL

SEQ ID NO: 162391 - protein, 7 aa, synthetic construct
FKRNDQS

SEQ ID NO: 162392 - protein, 7 aa, synthetic construct
LADISKR

SEQ ID NO: 162393 - protein, 7 aa, synthetic construct
VKAKDNW

SEQ ID NO: 162394 - protein, 7 aa, synthetic construct
DGYPKKA

SEQ ID NO: 162395 - protein, 7 aa, synthetic construct
KKDYGER

SEQ ID NO: 162396 - protein, 7 aa, synthetic construct
RGDHVTR

SEQ ID NO: 162397 - protein, 7 aa, synthetic construct
GKRTDNM

SEQ ID NO: 162398 - protein, 7 aa, synthetic construct
HEQKVGK

SEQ ID NO: 162399 - protein, 7 aa, synthetic construct
PVDRRGN

SEQ ID NO: 162400 - protein, 7 aa, synthetic construct
NMGKRSD

SEQ ID NO: 162401 - protein, 7 aa, synthetic construct
GEARLRN

SEQ ID NO: 162402 - protein, 7 aa, synthetic construct
DSKPAKY

SEQ ID NO: 162403 - protein, 7 aa, synthetic construct
DSANKKN

SEQ ID NO: 162404 - protein, 7 aa, synthetic construct
DRPRMQN

SEQ ID NO: 162405 - protein, 7 aa, synthetic construct
IEIGKQR

SEQ ID NO: 162406 - protein, 7 aa, synthetic construct
EGKQVMR

SEQ ID NO: 162407 - protein, 7 aa, synthetic construct
RKPDTIW

SEQ ID NO: 162408 - protein, 7 aa, synthetic construct
VDGQRRS

SEQ ID NO: 162409 - protein, 7 aa, synthetic construct
DSAQAKR

SEQ ID NO: 162410 - protein, 7 aa, synthetic construct
EVRQKTN

SEQ ID NO: 162411 - protein, 7 aa, synthetic construct
RHTNEAK

SEQ ID NO: 162412 - protein, 7 aa, synthetic construct
KTGERMW

SEQ ID NO: 162413 - protein, 7 aa, synthetic construct
TLKPRMD

SEQ ID NO: 162414 - protein, 7 aa, synthetic construct
KGNREHV

SEQ ID NO: 162415 - protein, 7 aa, synthetic construct
LRHISTA

SEQ ID NO: 162416 - protein, 7 aa, synthetic construct
KGRQMPD

SEQ ID NO: 162417 - protein, 7 aa, synthetic construct
ESNAIKR

SEQ ID NO: 162418 - protein, 7 aa, synthetic construct
KAQRQHE

SEQ ID NO: 162419 - protein, 7 aa, synthetic construct
EAPTVKK

SEQ ID NO: 162420 - protein, 7 aa, synthetic construct
IVETRFK

SEQ ID NO: 162421 - protein, 7 aa, synthetic construct
GRGAEMR

SEQ ID NO: 162422 - protein, 7 aa, synthetic construct
DRKSDTK

SEQ ID NO: 162423 - protein, 7 aa, synthetic construct
AEAGLKK

SEQ ID NO: 162424 - protein, 7 aa, synthetic construct
QSRAMRE

SEQ ID NO: 162425 - protein, 7 aa, synthetic construct
NDGRKNI

SEQ ID NO: 162426 - protein, 7 aa, synthetic construct
SKRSDGF

SEQ ID NO: 162427 - protein, 7 aa, synthetic construct
VDTSTRK

SEQ ID NO: 162428 - protein, 7 aa, synthetic construct
NQDTMKK

SEQ ID NO: 162429 - protein, 7 aa, synthetic construct
GESRIKS

SEQ ID NO: 162430 - protein, 7 aa, synthetic construct
NENGLRR

SEQ ID NO: 162431 - protein, 7 aa, synthetic construct
ETRNMKS

SEQ ID NO: 162432 - protein, 7 aa, synthetic construct
ATESGKK

SEQ ID NO: 162433 - protein, 7 aa, synthetic construct
KRQVTQE

SEQ ID NO: 162434 - protein, 7 aa, synthetic construct
IDRDQKR

SEQ ID NO: 162435 - protein, 7 aa, synthetic construct
SRGHTQS

SEQ ID NO: 162436 - protein, 7 aa, synthetic construct
RESKNYN

SEQ ID NO: 162437 - protein, 7 aa, synthetic construct
SEGKSIR

SEQ ID NO: 162438 - protein, 7 aa, synthetic construct
YESKNRN

SEQ ID NO: 162439 - protein, 7 aa, synthetic construct
YTETRRV

SEQ ID NO: 162440 - protein, 7 aa, synthetic construct
KAREYKD

SEQ ID NO: 162441 - protein, 7 aa, synthetic construct
VVNEVRR

SEQ ID NO: 162442 - protein, 7 aa, synthetic construct
MENTRAK

SEQ ID NO: 162443 - protein, 7 aa, synthetic construct
QKSRDAN

SEQ ID NO: 162444 - protein, 7 aa, synthetic construct
KKVSYNE

SEQ ID NO: 162445 - protein, 7 aa, synthetic construct
QGRAHVG

SEQ ID NO: 162446 - protein, 7 aa, synthetic construct
ISLAEKK

SEQ ID NO: 162447 - protein, 7 aa, synthetic construct
DGAAKRL

SEQ ID NO: 162448 - protein, 7 aa, synthetic construct
QKMKDPM

SEQ ID NO: 162449 - protein, 7 aa, synthetic construct
YAEQIKK

SEQ ID NO: 162450 - protein, 7 aa, synthetic construct
TRGMQRD

SEQ ID NO: 162451 - protein, 7 aa, synthetic construct
NTTRRET

SEQ ID NO: 162452 - protein, 7 aa, synthetic construct
AKQRDPM

SEQ ID NO: 162453 - protein, 7 aa, synthetic construct
HFKKQLD

SEQ ID NO: 162454 - protein, 7 aa, synthetic construct
LRHSMAA

SEQ ID NO: 162455 - protein, 7 aa, synthetic construct
KPRTQAE

SEQ ID NO: 162456 - protein, 7 aa, synthetic construct
ETKPARF

SEQ ID NO: 162457 - protein, 7 aa, synthetic construct
LDGMTRK

SEQ ID NO: 162458 - protein, 7 aa, synthetic construct
DSVRVNK

SEQ ID NO: 162459 - protein, 7 aa, synthetic construct
DPPHKVR

SEQ ID NO: 162460 - protein, 7 aa, synthetic construct
TKRAQFE

SEQ ID NO: 162461 - protein, 7 aa, synthetic construct
EKPRQTG

SEQ ID NO: 162462 - protein, 7 aa, synthetic construct
DKGKRDV

SEQ ID NO: 162463 - protein, 7 aa, synthetic construct
KRMPAVD

SEQ ID NO: 162464 - protein, 7 aa, synthetic construct
KNVRNQE

SEQ ID NO: 162465 - protein, 7 aa, synthetic construct
NENSKQK

SEQ ID NO: 162466 - protein, 7 aa, synthetic construct
KMMPKYE

SEQ ID NO: 162467 - protein, 7 aa, synthetic construct
EMLNKNK

SEQ ID NO: 162468 - protein, 7 aa, synthetic construct
QGRTIHA

SEQ ID NO: 162469 - protein, 7 aa, synthetic construct
EKQKRDT

SEQ ID NO: 162470 - protein, 7 aa, synthetic construct
QEGAVRK

SEQ ID NO: 162471 - protein, 7 aa, synthetic construct
PDVNIKR

SEQ ID NO: 162472 - protein, 7 aa, synthetic construct
RDAHGAR

SEQ ID NO: 162473 - protein, 7 aa, synthetic construct
ESTKKNI

SEQ ID NO: 162474 - protein, 7 aa, synthetic construct
DGNTNKK

SEQ ID NO: 162475 - protein, 7 aa, synthetic construct
KVIPRMD

SEQ ID NO: 162476 - protein, 7 aa, synthetic construct
IPPIERK

SEQ ID NO: 162477 - protein, 7 aa, synthetic construct
ADTRGAK

SEQ ID NO: 162478 - protein, 7 aa, synthetic construct
QKGHNDK

SEQ ID NO: 162479 - protein, 7 aa, synthetic construct
KREDSYR

SEQ ID NO: 162480 - protein, 7 aa, synthetic construct
QEQAKVK

SEQ ID NO: 162481 - protein, 7 aa, synthetic construct
GDAVRQK

SEQ ID NO: 162482 - protein, 7 aa, synthetic construct
DMSTRSK

SEQ ID NO: 162483 - protein, 7 aa, synthetic construct
DIPRMRT

SEQ ID NO: 162484 - protein, 7 aa, synthetic construct
MARQHDK

SEQ ID NO: 162485 - protein, 7 aa, synthetic construct
MRHNKDV

SEQ ID NO: 162486 - protein, 7 aa, synthetic construct
IKRVMDV

SEQ ID NO: 162487 - protein, 7 aa, synthetic construct
NKRDSLM

SEQ ID NO: 162488 - protein, 7 aa, synthetic construct
VEKTARQ

SEQ ID NO: 162489 - protein, 7 aa, synthetic construct
VLRKVAE

SEQ ID NO: 162490 - protein, 7 aa, synthetic construct
QRKNEFV

SEQ ID NO: 162491 - protein, 7 aa, synthetic construct
KAHKSVD

SEQ ID NO: 162492 - protein, 7 aa, synthetic construct
PKRMTSE

SEQ ID NO: 162493 - protein, 7 aa, synthetic construct
FRKTLLE

SEQ ID NO: 162494 - protein, 7 aa, synthetic construct
IKRMVLE

SEQ ID NO: 162495 - protein, 7 aa, synthetic construct
ATRNAER

SEQ ID NO: 162496 - protein, 7 aa, synthetic construct
QAKRGEI

SEQ ID NO: 162497 - protein, 7 aa, synthetic construct
FDKRDRT

SEQ ID NO: 162498 - protein, 7 aa, synthetic construct
ILQQEKK

SEQ ID NO: 162499 - protein, 7 aa, synthetic construct
PNDSIRR

SEQ ID NO: 162500 - protein, 7 aa, synthetic construct
FKKTPEH

SEQ ID NO: 162501 - protein, 7 aa, synthetic construct
YTEGIKR

SEQ ID NO: 162502 - protein, 7 aa, synthetic construct
DYKSPAR

SEQ ID NO: 162503 - protein, 7 aa, synthetic construct
QRKEREN

SEQ ID NO: 162504 - protein, 7 aa, synthetic construct
RVKHESV

SEQ ID NO: 162505 - protein, 7 aa, synthetic construct
GAEMKGR

SEQ ID NO: 162506 - protein, 7 aa, synthetic construct
YPSHTQR

SEQ ID NO: 162507 - protein, 7 aa, synthetic construct
SDIQGKR

SEQ ID NO: 162508 - protein, 7 aa, synthetic construct
RARLMTE

SEQ ID NO: 162509 - protein, 7 aa, synthetic construct
YLDGGRK

SEQ ID NO: 162510 - protein, 7 aa, synthetic construct
EQQKVRS

SEQ ID NO: 162511 - protein, 7 aa, synthetic construct
HDRPSKM

SEQ ID NO: 162512 - protein, 7 aa, synthetic construct
NKRVDLT

SEQ ID NO: 162513 - protein, 7 aa, synthetic construct
SAEGIKR

SEQ ID NO: 162514 - protein, 7 aa, synthetic construct
MRQKHGE

SEQ ID NO: 162515 - protein, 7 aa, synthetic construct
ADSARVK

SEQ ID NO: 162516 - protein, 7 aa, synthetic construct
DGQPIKK

SEQ ID NO: 162517 - protein, 7 aa, synthetic construct
YTGRPKD

SEQ ID NO: 162518 - protein, 7 aa, synthetic construct
NRKNDIA

SEQ ID NO: 162519 - protein, 7 aa, synthetic construct
IGSEAKR

SEQ ID NO: 162520 - protein, 7 aa, synthetic construct
SDISGKK

SEQ ID NO: 162521 - protein, 7 aa, synthetic construct
GRKDIHS

SEQ ID NO: 162522 - protein, 7 aa, synthetic construct
LDNIVRK

SEQ ID NO: 162523 - protein, 7 aa, synthetic construct
DYMRAKV

SEQ ID NO: 162524 - protein, 7 aa, synthetic construct
RMSKEEK

SEQ ID NO: 162525 - protein, 7 aa, synthetic construct
ANKREHV

SEQ ID NO: 162526 - protein, 7 aa, synthetic construct
KRGDKET

SEQ ID NO: 162527 - protein, 7 aa, synthetic construct
GDRPRIG

SEQ ID NO: 162528 - protein, 7 aa, synthetic construct
KITNEYR

SEQ ID NO: 162529 - protein, 7 aa, synthetic construct
PFKHKQE

SEQ ID NO: 162530 - protein, 7 aa, synthetic construct
TEQVKGK

SEQ ID NO: 162531 - protein, 7 aa, synthetic construct
KDTFGHK

SEQ ID NO: 162532 - protein, 7 aa, synthetic construct
VSRGDKA

SEQ ID NO: 162533 - protein, 7 aa, synthetic construct
GDKPNKS

SEQ ID NO: 162534 - protein, 7 aa, synthetic construct
NEKHAPR

SEQ ID NO: 162535 - protein, 7 aa, synthetic construct
LKYNTDR

SEQ ID NO: 162536 - protein, 7 aa, synthetic construct
EDKKKYS

SEQ ID NO: 162537 - protein, 7 aa, synthetic construct
REIPRTS

SEQ ID NO: 162538 - protein, 7 aa, synthetic construct
NKKSDFM

SEQ ID NO: 162539 - protein, 7 aa, synthetic construct
TEATRPR

SEQ ID NO: 162540 - protein, 7 aa, synthetic construct
TRHMKEI

SEQ ID NO: 162541 - protein, 7 aa, synthetic construct
KMRLQTE

SEQ ID NO: 162542 - protein, 7 aa, synthetic construct
RVSHMEK

SEQ ID NO: 162543 - protein, 7 aa, synthetic construct
TKAHRFD

SEQ ID NO: 162544 - protein, 7 aa, synthetic construct
GIDVKGR

SEQ ID NO: 162545 - protein, 7 aa, synthetic construct
RTRDPTI

SEQ ID NO: 162546 - protein, 7 aa, synthetic construct
NSEQTKR

SEQ ID NO: 162547 - protein, 7 aa, synthetic construct
PEQKRMA

SEQ ID NO: 162548 - protein, 7 aa, synthetic construct
NLENRKG

SEQ ID NO: 162549 - protein, 7 aa, synthetic construct
LKRLDSG

SEQ ID NO: 162550 - protein, 7 aa, synthetic construct
RKMQILD

SEQ ID NO: 162551 - protein, 7 aa, synthetic construct
MTKRTEN

SEQ ID NO: 162552 - protein, 7 aa, synthetic construct
MEGKLRF

SEQ ID NO: 162553 - protein, 7 aa, synthetic construct
DRDTRQK

SEQ ID NO: 162554 - protein, 7 aa, synthetic construct
IKEQHNR

SEQ ID NO: 162555 - protein, 7 aa, synthetic construct
ENINKMK

SEQ ID NO: 162556 - protein, 7 aa, synthetic construct
KEHQRIN

SEQ ID NO: 162557 - protein, 7 aa, synthetic construct
ADKPAKM

SEQ ID NO: 162558 - protein, 7 aa, synthetic construct
LRKVMEN

SEQ ID NO: 162559 - protein, 7 aa, synthetic construct
QERTMRG

SEQ ID NO: 162560 - protein, 7 aa, synthetic construct
DSIGKKY

SEQ ID NO: 162561 - protein, 7 aa, synthetic construct
HQDSVKK

SEQ ID NO: 162562 - protein, 7 aa, synthetic construct
MRKISMD

SEQ ID NO: 162563 - protein, 7 aa, synthetic construct
REIGNRS

SEQ ID NO: 162564 - protein, 7 aa, synthetic construct
PVEARGR

SEQ ID NO: 162565 - protein, 7 aa, synthetic construct
MGRGHTP

SEQ ID NO: 162566 - protein, 7 aa, synthetic construct
GDRTFKQ

SEQ ID NO: 162567 - protein, 7 aa, synthetic construct
TDGKIKH

SEQ ID NO: 162568 - protein, 7 aa, synthetic construct
RQKVQDT

SEQ ID NO: 162569 - protein, 7 aa, synthetic construct
QENRGSK

SEQ ID NO: 162570 - protein, 7 aa, synthetic construct
TNESARK

SEQ ID NO: 162571 - protein, 7 aa, synthetic construct
WGDAQKK

SEQ ID NO: 162572 - protein, 7 aa, synthetic construct
MVRPKQD

SEQ ID NO: 162573 - protein, 7 aa, synthetic construct
SNTEGRK

SEQ ID NO: 162574 - protein, 7 aa, synthetic construct
YENQSKR

SEQ ID NO: 162575 - protein, 7 aa, synthetic construct
NDAGLRR

SEQ ID NO: 162576 - protein, 7 aa, synthetic construct
NEDKKKV

SEQ ID NO: 162577 - protein, 7 aa, synthetic construct
PPTRKES

SEQ ID NO: 162578 - protein, 7 aa, synthetic construct
HTIKKSD

SEQ ID NO: 162579 - protein, 7 aa, synthetic construct
SQDNTKR

SEQ ID NO: 162580 - protein, 7 aa, synthetic construct
LKKHTDG

SEQ ID NO: 162581 - protein, 7 aa, synthetic construct
DRDRALK

SEQ ID NO: 162582 - protein, 7 aa, synthetic construct
GSTRLER

SEQ ID NO: 162583 - protein, 7 aa, synthetic construct
GENKGLR

SEQ ID NO: 162584 - protein, 7 aa, synthetic construct
FKRTNGE

SEQ ID NO: 162585 - protein, 7 aa, synthetic construct
RTSEGGR

SEQ ID NO: 162586 - protein, 7 aa, synthetic construct
KVRATPE

SEQ ID NO: 162587 - protein, 7 aa, synthetic construct
QKQKNDQ

SEQ ID NO: 162588 - protein, 7 aa, synthetic construct
YTRAKDN

SEQ ID NO: 162589 - protein, 7 aa, synthetic construct
IDGHKGR

SEQ ID NO: 162590 - protein, 7 aa, synthetic construct
FKHNKDS

SEQ ID NO: 162591 - protein, 7 aa, synthetic construct
NSDGARR

SEQ ID NO: 162592 - protein, 7 aa, synthetic construct
VKHSERA

SEQ ID NO: 162593 - protein, 7 aa, synthetic construct
TDNMKRY

SEQ ID NO: 162594 - protein, 7 aa, synthetic construct
ILERHTK

SEQ ID NO: 162595 - protein, 7 aa, synthetic construct
RDSHLGK

SEQ ID NO: 162596 - protein, 7 aa, synthetic construct
DGKKERY

SEQ ID NO: 162597 - protein, 7 aa, synthetic construct
KRQVNLD

SEQ ID NO: 162598 - protein, 7 aa, synthetic construct
GDNQKNK

SEQ ID NO: 162599 - protein, 7 aa, synthetic construct
VDQGARK

SEQ ID NO: 162600 - protein, 7 aa, synthetic construct
RKDHGDR

SEQ ID NO: 162601 - protein, 7 aa, synthetic construct
ERKISNA

SEQ ID NO: 162602 - protein, 7 aa, synthetic construct
RRQLSEP

SEQ ID NO: 162603 - protein, 7 aa, synthetic construct
NVDIAKR

SEQ ID NO: 162604 - protein, 7 aa, synthetic construct
GSENPKR

SEQ ID NO: 162605 - protein, 7 aa, synthetic construct
GIENAKK

SEQ ID NO: 162606 - protein, 7 aa, synthetic construct
PESKKSM

SEQ ID NO: 162607 - protein, 7 aa, synthetic construct
QKKSETH

SEQ ID NO: 162608 - protein, 7 aa, synthetic construct
IRSKMPE

SEQ ID NO: 162609 - protein, 7 aa, synthetic construct
ESKMRGN

SEQ ID NO: 162610 - protein, 7 aa, synthetic construct
KPHRDTV

SEQ ID NO: 162611 - protein, 7 aa, synthetic construct
IRGIASH

SEQ ID NO: 162612 - protein, 7 aa, synthetic construct
RKSDPHI

SEQ ID NO: 162613 - protein, 7 aa, synthetic construct
LRKGGDL

SEQ ID NO: 162614 - protein, 7 aa, synthetic construct
IEGNNRR

SEQ ID NO: 162615 - protein, 7 aa, synthetic construct
QRDHQGR

SEQ ID NO: 162616 - protein, 7 aa, synthetic construct
THKPIKD

SEQ ID NO: 162617 - protein, 7 aa, synthetic construct
QRHQTPN

SEQ ID NO: 162618 - protein, 7 aa, synthetic construct
KVVPKYD

SEQ ID NO: 162619 - protein, 7 aa, synthetic construct
DTHNKNK

SEQ ID NO: 162620 - protein, 7 aa, synthetic construct
EKHRGPV

SEQ ID NO: 162621 - protein, 7 aa, synthetic construct
DTNNPRR

SEQ ID NO: 162622 - protein, 7 aa, synthetic construct
LDVPRNR

SEQ ID NO: 162623 - protein, 7 aa, synthetic construct
KNLRMTE

SEQ ID NO: 162624 - protein, 7 aa, synthetic construct
QARSSHG

SEQ ID NO: 162625 - protein, 7 aa, synthetic construct
PGEKIYK

SEQ ID NO: 162626 - protein, 7 aa, synthetic construct
QNDAGKR

SEQ ID NO: 162627 - protein, 7 aa, synthetic construct
IRNKDPM

SEQ ID NO: 162628 - protein, 7 aa, synthetic construct
AQRPKNE

SEQ ID NO: 162629 - protein, 7 aa, synthetic construct
EGKKERL

SEQ ID NO: 162630 - protein, 7 aa, synthetic construct
KQTRQDN

SEQ ID NO: 162631 - protein, 7 aa, synthetic construct
IAAEVKK

SEQ ID NO: 162632 - protein, 7 aa, synthetic construct
FADAARK

SEQ ID NO: 162633 - protein, 7 aa, synthetic construct
KRALSMD

SEQ ID NO: 162634 - protein, 7 aa, synthetic construct
QEHPKKP

SEQ ID NO: 162635 - protein, 7 aa, synthetic construct
QVEAKHK

SEQ ID NO: 162636 - protein, 7 aa, synthetic construct
TNSRQKD

SEQ ID NO: 162637 - protein, 7 aa, synthetic construct
YPERNRN

SEQ ID NO: 162638 - protein, 7 aa, synthetic construct
SLDAVKR

SEQ ID NO: 162639 - protein, 7 aa, synthetic construct
QTKRGEI

SEQ ID NO: 162640 - protein, 7 aa, synthetic construct
DNNNHKK

SEQ ID NO: 162641 - protein, 7 aa, synthetic construct
SKRIEAN

SEQ ID NO: 162642 - protein, 7 aa, synthetic construct
SGRTKDV

SEQ ID NO: 162643 - protein, 7 aa, synthetic construct
RTRVEGI

SEQ ID NO: 162644 - protein, 7 aa, synthetic construct
QKREPNI

SEQ ID NO: 162645 - protein, 7 aa, synthetic construct
EQLRTKV

SEQ ID NO: 162646 - protein, 7 aa, synthetic construct
AEGNKIK

SEQ ID NO: 162647 - protein, 7 aa, synthetic construct
VPNESRK

SEQ ID NO: 162648 - protein, 7 aa, synthetic construct
IPRNREF

SEQ ID NO: 162649 - protein, 7 aa, synthetic construct
LARKEAS

SEQ ID NO: 162650 - protein, 7 aa, synthetic construct
NDQGMRK

SEQ ID NO: 162651 - protein, 7 aa, synthetic construct
SNKRNEI

SEQ ID NO: 162652 - protein, 7 aa, synthetic construct
DGQNNRK

SEQ ID NO: 162653 - protein, 7 aa, synthetic construct
GEQTRLK

SEQ ID NO: 162654 - protein, 7 aa, synthetic construct
MPERIHK

SEQ ID NO: 162655 - protein, 7 aa, synthetic construct
QDAKRYN

SEQ ID NO: 162656 - protein, 7 aa, synthetic construct
YTTRNKE

SEQ ID NO: 162657 - protein, 7 aa, synthetic construct
RETRAAN

SEQ ID NO: 162658 - protein, 7 aa, synthetic construct
IQEAKHR

SEQ ID NO: 162659 - protein, 7 aa, synthetic construct
NEGKGRT

SEQ ID NO: 162660 - protein, 7 aa, synthetic construct
MSRVDRA

SEQ ID NO: 162661 - protein, 7 aa, synthetic construct
DSMKPTK

SEQ ID NO: 162662 - protein, 7 aa, synthetic construct
GSTETRK

SEQ ID NO: 162663 - protein, 7 aa, synthetic construct
IRHEANK

SEQ ID NO: 162664 - protein, 7 aa, synthetic construct
KQQRLND

SEQ ID NO: 162665 - protein, 7 aa, synthetic construct
ETGPVKK

SEQ ID NO: 162666 - protein, 7 aa, synthetic construct
IETRNRP

SEQ ID NO: 162667 - protein, 7 aa, synthetic construct
KQKYQME

SEQ ID NO: 162668 - protein, 7 aa, synthetic construct
DDRNKNK

SEQ ID NO: 162669 - protein, 7 aa, synthetic construct
VSGPRYQ

SEQ ID NO: 162670 - protein, 7 aa, synthetic construct
YAEGTKR

SEQ ID NO: 162671 - protein, 7 aa, synthetic construct
RRQVNEN

SEQ ID NO: 162672 - protein, 7 aa, synthetic construct
DYIKTKL

SEQ ID NO: 162673 - protein, 7 aa, synthetic construct
NEMTKRS

SEQ ID NO: 162674 - protein, 7 aa, synthetic construct
EGPKQRP

SEQ ID NO: 162675 - protein, 7 aa, synthetic construct
KGANHDR

SEQ ID NO: 162676 - protein, 7 aa, synthetic construct
KLTRNDP

SEQ ID NO: 162677 - protein, 7 aa, synthetic construct
SETIRRP

SEQ ID NO: 162678 - protein, 7 aa, synthetic construct
NTPELKK

SEQ ID NO: 162679 - protein, 7 aa, synthetic construct
DGPPQKK

SEQ ID NO: 162680 - protein, 7 aa, synthetic construct
VRKQEQT

SEQ ID NO: 162681 - protein, 7 aa, synthetic construct
LYKEARA

SEQ ID NO: 162682 - protein, 7 aa, synthetic construct
YEGKSRA

SEQ ID NO: 162683 - protein, 7 aa, synthetic construct
PDHKVKM

SEQ ID NO: 162684 - protein, 7 aa, synthetic construct
YPENRGK

SEQ ID NO: 162685 - protein, 7 aa, synthetic construct
VGRMKDT

SEQ ID NO: 162686 - protein, 7 aa, synthetic construct
TEQAKRI

SEQ ID NO: 162687 - protein, 7 aa, synthetic construct
DGNAKPR

SEQ ID NO: 162688 - protein, 7 aa, synthetic construct
DGVKSKL

SEQ ID NO: 162689 - protein, 7 aa, synthetic construct
MEGQKRN

SEQ ID NO: 162690 - protein, 7 aa, synthetic construct
NQEGKRL

SEQ ID NO: 162691 - protein, 7 aa, synthetic construct
LVKRSGD

SEQ ID NO: 162692 - protein, 7 aa, synthetic construct
EARNNKG

SEQ ID NO: 162693 - protein, 7 aa, synthetic construct
MRPLTDR

SEQ ID NO: 162694 - protein, 7 aa, synthetic construct
GDTTRRA

SEQ ID NO: 162695 - protein, 7 aa, synthetic construct
IGRQDRN

SEQ ID NO: 162696 - protein, 7 aa, synthetic construct
SRSKQSE

SEQ ID NO: 162697 - protein, 7 aa, synthetic construct
YEKGVRM

SEQ ID NO: 162698 - protein, 7 aa, synthetic construct
GGRGTEK

SEQ ID NO: 162699 - protein, 7 aa, synthetic construct
EDKARAK

SEQ ID NO: 162700 - protein, 7 aa, synthetic construct
GKMRQNE

SEQ ID NO: 162701 - protein, 7 aa, synthetic construct
HNDATRK

SEQ ID NO: 162702 - protein, 7 aa, synthetic construct
MGRKLDS

SEQ ID NO: 162703 - protein, 7 aa, synthetic construct
NTTRDRS

SEQ ID NO: 162704 - protein, 7 aa, synthetic construct
GIEKRDR

SEQ ID NO: 162705 - protein, 7 aa, synthetic construct
DNIIRRP

SEQ ID NO: 162706 - protein, 7 aa, synthetic construct
APERNQR

SEQ ID NO: 162707 - protein, 7 aa, synthetic construct
TEQNKRQ

SEQ ID NO: 162708 - protein, 7 aa, synthetic construct
VAHRKDV

SEQ ID NO: 162709 - protein, 7 aa, synthetic construct
ADQGGKK

SEQ ID NO: 162710 - protein, 7 aa, synthetic construct
APKRDRE

SEQ ID NO: 162711 - protein, 7 aa, synthetic construct
DGRNMKN

SEQ ID NO: 162712 - protein, 7 aa, synthetic construct
IDDKTKR

SEQ ID NO: 162713 - protein, 7 aa, synthetic construct
SKRQTDT

SEQ ID NO: 162714 - protein, 7 aa, synthetic construct
KSTEHSR

SEQ ID NO: 162715 - protein, 7 aa, synthetic construct
SAKGEFR

SEQ ID NO: 162716 - protein, 7 aa, synthetic construct
KRQSELT

SEQ ID NO: 162717 - protein, 7 aa, synthetic construct
NIRNREN

SEQ ID NO: 162718 - protein, 7 aa, synthetic construct
NKRDYAM

SEQ ID NO: 162719 - protein, 7 aa, synthetic construct
VPERDKK

SEQ ID NO: 162720 - protein, 7 aa, synthetic construct
DHVGKVR

SEQ ID NO: 162721 - protein, 7 aa, synthetic construct
KQYPKDQ

SEQ ID NO: 162722 - protein, 7 aa, synthetic construct
RQKGDQT

SEQ ID NO: 162723 - protein, 7 aa, synthetic construct
IDHKVRG

SEQ ID NO: 162724 - protein, 7 aa, synthetic construct
LRGELSK

SEQ ID NO: 162725 - protein, 7 aa, synthetic construct
TEGIRKV

SEQ ID NO: 162726 - protein, 7 aa, synthetic construct
KSRNEGL

SEQ ID NO: 162727 - protein, 7 aa, synthetic construct
HDKPRVY

SEQ ID NO: 162728 - protein, 7 aa, synthetic construct
TDAAMKK

SEQ ID NO: 162729 - protein, 7 aa, synthetic construct
DGRKALV

SEQ ID NO: 162730 - protein, 7 aa, synthetic construct
LERTVKS

SEQ ID NO: 162731 - protein, 7 aa, synthetic construct
TDHITKK

SEQ ID NO: 162732 - protein, 7 aa, synthetic construct
ARKVSPE

SEQ ID NO: 162733 - protein, 7 aa, synthetic construct
ETQSKRL

SEQ ID NO: 162734 - protein, 7 aa, synthetic construct
RETKYVQ

SEQ ID NO: 162735 - protein, 7 aa, synthetic construct
YQGHSRG

SEQ ID NO: 162736 - protein, 7 aa, synthetic construct
DFAQKVR

SEQ ID NO: 162737 - protein, 7 aa, synthetic construct
FQEQNKK

SEQ ID NO: 162738 - protein, 7 aa, synthetic construct
RRTTQGE

SEQ ID NO: 162739 - protein, 7 aa, synthetic construct
MLERMGR

SEQ ID NO: 162740 - protein, 7 aa, synthetic construct
ARQRIPE

SEQ ID NO: 162741 - protein, 7 aa, synthetic construct
YLRAHNG

SEQ ID NO: 162742 - protein, 7 aa, synthetic construct
NNKKDLH

SEQ ID NO: 162743 - protein, 7 aa, synthetic construct
GMESKRS

SEQ ID NO: 162744 - protein, 7 aa, synthetic construct
FDRKEKM

SEQ ID NO: 162745 - protein, 7 aa, synthetic construct
SGEGIKR

SEQ ID NO: 162746 - protein, 7 aa, synthetic construct
NRQKDSM

SEQ ID NO: 162747 - protein, 7 aa, synthetic construct
VKRSMEV

SEQ ID NO: 162748 - protein, 7 aa, synthetic construct
TSGRIDR

SEQ ID NO: 162749 - protein, 7 aa, synthetic construct
AKLHKND

SEQ ID NO: 162750 - protein, 7 aa, synthetic construct
TIDGYKK

SEQ ID NO: 162751 - protein, 7 aa, synthetic construct
NKPEVYR

SEQ ID NO: 162752 - protein, 7 aa, synthetic construct
FRSKDSM

SEQ ID NO: 162753 - protein, 7 aa, synthetic construct
ETAKVKT

SEQ ID NO: 162754 - protein, 7 aa, synthetic construct
ADKNDRK

SEQ ID NO: 162755 - protein, 7 aa, synthetic construct
MRKAIPE

SEQ ID NO: 162756 - protein, 7 aa, synthetic construct
RARDAER

SEQ ID NO: 162757 - protein, 7 aa, synthetic construct
PIDQIKR

SEQ ID NO: 162758 - protein, 7 aa, synthetic construct
ETSVKKF

SEQ ID NO: 162759 - protein, 7 aa, synthetic construct
RLKPHTE

SEQ ID NO: 162760 - protein, 7 aa, synthetic construct
KPRQLTE

SEQ ID NO: 162761 - protein, 7 aa, synthetic construct
KGRPMTD

SEQ ID NO: 162762 - protein, 7 aa, synthetic construct
LHDTKAR

SEQ ID NO: 162763 - protein, 7 aa, synthetic construct
RSKSPDT

SEQ ID NO: 162764 - protein, 7 aa, synthetic construct
YQSNKRD

SEQ ID NO: 162765 - protein, 7 aa, synthetic construct
YDAVKRF

SEQ ID NO: 162766 - protein, 7 aa, synthetic construct
IGRQHPG

SEQ ID NO: 162767 - protein, 7 aa, synthetic construct
GRIKFTE

SEQ ID NO: 162768 - protein, 7 aa, synthetic construct
ERGIKVL

SEQ ID NO: 162769 - protein, 7 aa, synthetic construct
DQPARLK

SEQ ID NO: 162770 - protein, 7 aa, synthetic construct
EGKIAKN

SEQ ID NO: 162771 - protein, 7 aa, synthetic construct
HDPALRK

SEQ ID NO: 162772 - protein, 7 aa, synthetic construct
HRGNNPA

SEQ ID NO: 162773 - protein, 7 aa, synthetic construct
ENAPKKY

SEQ ID NO: 162774 - protein, 7 aa, synthetic construct
PDGRKGL

SEQ ID NO: 162775 - protein, 7 aa, synthetic construct
KGKERDH

SEQ ID NO: 162776 - protein, 7 aa, synthetic construct
WTGSKKD

SEQ ID NO: 162777 - protein, 7 aa, synthetic construct
GTNRFKE

SEQ ID NO: 162778 - protein, 7 aa, synthetic construct
RDAFGAK

SEQ ID NO: 162779 - protein, 7 aa, synthetic construct
ENNKVKS

SEQ ID NO: 162780 - protein, 7 aa, synthetic construct
YTRLKNE

SEQ ID NO: 162781 - protein, 7 aa, synthetic construct
DGRKIQQ

SEQ ID NO: 162782 - protein, 7 aa, synthetic construct
KNDRSER

SEQ ID NO: 162783 - protein, 7 aa, synthetic construct
AEVRSKT

SEQ ID NO: 162784 - protein, 7 aa, synthetic construct
EAHKIRP

SEQ ID NO: 162785 - protein, 7 aa, synthetic construct
IRNKQEG

SEQ ID NO: 162786 - protein, 7 aa, synthetic construct
KVAHRDN

SEQ ID NO: 162787 - protein, 7 aa, synthetic construct
KGRETPN

SEQ ID NO: 162788 - protein, 7 aa, synthetic construct
VRGISPM

SEQ ID NO: 162789 - protein, 7 aa, synthetic construct
RARNSEP

SEQ ID NO: 162790 - protein, 7 aa, synthetic construct
QNKHADK

SEQ ID NO: 162791 - protein, 7 aa, synthetic construct
KPKFNDM

SEQ ID NO: 162792 - protein, 7 aa, synthetic construct
ERKVSPM

SEQ ID NO: 162793 - protein, 7 aa, synthetic construct
SSDSFKK

SEQ ID NO: 162794 - protein, 7 aa, synthetic construct
RMSKQND

SEQ ID NO: 162795 - protein, 7 aa, synthetic construct
GTDHKTR

SEQ ID NO: 162796 - protein, 7 aa, synthetic construct
HPDKQAR

SEQ ID NO: 162797 - protein, 7 aa, synthetic construct
DGKRTAQ

SEQ ID NO: 162798 - protein, 7 aa, synthetic construct
QLRPKDS

SEQ ID NO: 162799 - protein, 7 aa, synthetic construct
LEPRQRQ

SEQ ID NO: 162800 - protein, 7 aa, synthetic construct
RRSDPMV

SEQ ID NO: 162801 - protein, 7 aa, synthetic construct
GGDMKPR

SEQ ID NO: 162802 - protein, 7 aa, synthetic construct
TKRDHMQ

SEQ ID NO: 162803 - protein, 7 aa, synthetic construct
TRIKQEL

SEQ ID NO: 162804 - protein, 7 aa, synthetic construct
DVRPVKA

SEQ ID NO: 162805 - protein, 7 aa, synthetic construct
RTRQGEV

SEQ ID NO: 162806 - protein, 7 aa, synthetic construct
TETRNMK

SEQ ID NO: 162807 - protein, 7 aa, synthetic construct
TVKRSDS

SEQ ID NO: 162808 - protein, 7 aa, synthetic construct
LGRSEAK

SEQ ID NO: 162809 - protein, 7 aa, synthetic construct
KRQMEML

SEQ ID NO: 162810 - protein, 7 aa, synthetic construct
EKRSTSG

SEQ ID NO: 162811 - protein, 7 aa, synthetic construct
ARNRELG

SEQ ID NO: 162812 - protein, 7 aa, synthetic construct
KNSHNDR

SEQ ID NO: 162813 - protein, 7 aa, synthetic construct
TKEDLRK

SEQ ID NO: 162814 - protein, 7 aa, synthetic construct
KPRATME

SEQ ID NO: 162815 - protein, 7 aa, synthetic construct
RVERNVV

SEQ ID NO: 162816 - protein, 7 aa, synthetic construct
IRGIVSA

SEQ ID NO: 162817 - protein, 7 aa, synthetic construct
TDRAVHK

SEQ ID NO: 162818 - protein, 7 aa, synthetic construct
AKRDRFE

SEQ ID NO: 162819 - protein, 7 aa, synthetic construct
TTTENRK

SEQ ID NO: 162820 - protein, 7 aa, synthetic construct
GGDNKRM

SEQ ID NO: 162821 - protein, 7 aa, synthetic construct
TRGSHNS

SEQ ID NO: 162822 - protein, 7 aa, synthetic construct
KLMPRIE

SEQ ID NO: 162823 - protein, 7 aa, synthetic construct
NVGERRS

SEQ ID NO: 162824 - protein, 7 aa, synthetic construct
IRANKDV

SEQ ID NO: 162825 - protein, 7 aa, synthetic construct
KARGVEM

SEQ ID NO: 162826 - protein, 7 aa, synthetic construct
HKNQRDI

SEQ ID NO: 162827 - protein, 7 aa, synthetic construct
ADMKRNV

SEQ ID NO: 162828 - protein, 7 aa, synthetic construct
PVDRKDK

SEQ ID NO: 162829 - protein, 7 aa, synthetic construct
ALKRGSD

SEQ ID NO: 162830 - protein, 7 aa, synthetic construct
GTEIKVR

SEQ ID NO: 162831 - protein, 7 aa, synthetic construct
KNVRDHA

SEQ ID NO: 162832 - protein, 7 aa, synthetic construct
LRMRQDG

SEQ ID NO: 162833 - protein, 7 aa, synthetic construct
QEMTKVR

SEQ ID NO: 162834 - protein, 7 aa, synthetic construct
GNERNKQ

SEQ ID NO: 162835 - protein, 7 aa, synthetic construct
NKRQAES

SEQ ID NO: 162836 - protein, 7 aa, synthetic construct
KRGPITE

SEQ ID NO: 162837 - protein, 7 aa, synthetic construct
VKRIAEG

SEQ ID NO: 162838 - protein, 7 aa, synthetic construct
SEPRGAR

SEQ ID NO: 162839 - protein, 7 aa, synthetic construct
NKRAEPN

SEQ ID NO: 162840 - protein, 7 aa, synthetic construct
MRIPRTE

SEQ ID NO: 162841 - protein, 7 aa, synthetic construct
ILSEQRK

SEQ ID NO: 162842 - protein, 7 aa, synthetic construct
RVHKADV

SEQ ID NO: 162843 - protein, 7 aa, synthetic construct
YPSRKDT

SEQ ID NO: 162844 - protein, 7 aa, synthetic construct
EQGLKRA

SEQ ID NO: 162845 - protein, 7 aa, synthetic construct
LENARVR

SEQ ID NO: 162846 - protein, 7 aa, synthetic construct
GKRTDTA

SEQ ID NO: 162847 - protein, 7 aa, synthetic construct
YDEKPKK

SEQ ID NO: 162848 - protein, 7 aa, synthetic construct
KRNDELR

SEQ ID NO: 162849 - protein, 7 aa, synthetic construct
KNPRAID

SEQ ID NO: 162850 - protein, 7 aa, synthetic construct
REPGHRV

SEQ ID NO: 162851 - protein, 7 aa, synthetic construct
DRAAPNR

SEQ ID NO: 162852 - protein, 7 aa, synthetic construct
QKRNETL

SEQ ID NO: 162853 - protein, 7 aa, synthetic construct
IQRKIPE

SEQ ID NO: 162854 - protein, 7 aa, synthetic construct
VGRQLDK

SEQ ID NO: 162855 - protein, 7 aa, synthetic construct
SDGAKRG

SEQ ID NO: 162856 - protein, 7 aa, synthetic construct
NQEMKRA

SEQ ID NO: 162857 - protein, 7 aa, synthetic construct
VPDKHAR

SEQ ID NO: 162858 - protein, 7 aa, synthetic construct
NTAQDRK

SEQ ID NO: 162859 - protein, 7 aa, synthetic construct
AGEILKK

SEQ ID NO: 162860 - protein, 7 aa, synthetic construct
TDAPRRF

SEQ ID NO: 162861 - protein, 7 aa, synthetic construct
FRKLSET

SEQ ID NO: 162862 - protein, 7 aa, synthetic construct
KRNQLET

SEQ ID NO: 162863 - protein, 7 aa, synthetic construct
RRETHQN

SEQ ID NO: 162864 - protein, 7 aa, synthetic construct
VDKHAAR

SEQ ID NO: 162865 - protein, 7 aa, synthetic construct
RKNMGDI

SEQ ID NO: 162866 - protein, 7 aa, synthetic construct
VETKRNN

SEQ ID NO: 162867 - protein, 7 aa, synthetic construct
TRVRDNV

SEQ ID NO: 162868 - protein, 7 aa, synthetic construct
AYPREKS

SEQ ID NO: 162869 - protein, 7 aa, synthetic construct
RRAGQEI

SEQ ID NO: 162870 - protein, 7 aa, synthetic construct
FKRQADN

SEQ ID NO: 162871 - protein, 7 aa, synthetic construct
AEGMKRV

SEQ ID NO: 162872 - protein, 7 aa, synthetic construct
FKRTMDP

SEQ ID NO: 162873 - protein, 7 aa, synthetic construct
PEPSMKR

SEQ ID NO: 162874 - protein, 7 aa, synthetic construct
DRGVRSN

SEQ ID NO: 162875 - protein, 7 aa, synthetic construct
YRTQRGE

SEQ ID NO: 162876 - protein, 7 aa, synthetic construct
KGKMNYD

SEQ ID NO: 162877 - protein, 7 aa, synthetic construct
KNRLVQE

SEQ ID NO: 162878 - protein, 7 aa, synthetic construct
MKRVNVD

SEQ ID NO: 162879 - protein, 7 aa, synthetic construct
KRVAVQD

SEQ ID NO: 162880 - protein, 7 aa, synthetic construct
TEGKRQM

SEQ ID NO: 162881 - protein, 7 aa, synthetic construct
ENTNNKR

SEQ ID NO: 162882 - protein, 7 aa, synthetic construct
GEKKHQT

SEQ ID NO: 162883 - protein, 7 aa, synthetic construct
TLQEVKR

SEQ ID NO: 162884 - protein, 7 aa, synthetic construct
PTDMVKR

SEQ ID NO: 162885 - protein, 7 aa, synthetic construct
ISRKEFQ

SEQ ID NO: 162886 - protein, 7 aa, synthetic construct
QKTRDNS

SEQ ID NO: 162887 - protein, 7 aa, synthetic construct
KEYKNHV

SEQ ID NO: 162888 - protein, 7 aa, synthetic construct
NSKRQVE

SEQ ID NO: 162889 - protein, 7 aa, synthetic construct
GESNGKK

SEQ ID NO: 162890 - protein, 7 aa, synthetic construct
IDALTKK

SEQ ID NO: 162891 - protein, 7 aa, synthetic construct
QGRAIPS

SEQ ID NO: 162892 - protein, 7 aa, synthetic construct
RGRETTV

SEQ ID NO: 162893 - protein, 7 aa, synthetic construct
KGFNSEK

SEQ ID NO: 162894 - protein, 7 aa, synthetic construct
VPETRRS

SEQ ID NO: 162895 - protein, 7 aa, synthetic construct
YRDDSRK

SEQ ID NO: 162896 - protein, 7 aa, synthetic construct
KRMVNIE

SEQ ID NO: 162897 - protein, 7 aa, synthetic construct
ETTAMKK

SEQ ID NO: 162898 - protein, 7 aa, synthetic construct
ATEKRER

SEQ ID NO: 162899 - protein, 7 aa, synthetic construct
KMRSNTE

SEQ ID NO: 162900 - protein, 7 aa, synthetic construct
QDRPKLI

SEQ ID NO: 162901 - protein, 7 aa, synthetic construct
IRNKSEI

SEQ ID NO: 162902 - protein, 7 aa, synthetic construct
GHTKSDR

SEQ ID NO: 162903 - protein, 7 aa, synthetic construct
PLMKRLE

SEQ ID NO: 162904 - protein, 7 aa, synthetic construct
IKRIDMA

SEQ ID NO: 162905 - protein, 7 aa, synthetic construct
SIDGKRY

SEQ ID NO: 162906 - protein, 7 aa, synthetic construct
TETRVRT

SEQ ID NO: 162907 - protein, 7 aa, synthetic construct
QVQELKR

SEQ ID NO: 162908 - protein, 7 aa, synthetic construct
IKGVSHH

SEQ ID NO: 162909 - protein, 7 aa, synthetic construct
KPTRDHV

SEQ ID NO: 162910 - protein, 7 aa, synthetic construct
KQVTRAD

SEQ ID NO: 162911 - protein, 7 aa, synthetic construct
RPSRVES

SEQ ID NO: 162912 - protein, 7 aa, synthetic construct
KQKPPEH

SEQ ID NO: 162913 - protein, 7 aa, synthetic construct
LFNVGRA

SEQ ID NO: 162914 - protein, 7 aa, synthetic construct
MSRFNKE

SEQ ID NO: 162915 - protein, 7 aa, synthetic construct
QRGEARA

SEQ ID NO: 162916 - protein, 7 aa, synthetic construct
QHDKKDR

SEQ ID NO: 162917 - protein, 7 aa, synthetic construct
QDRPTPK

SEQ ID NO: 162918 - protein, 7 aa, synthetic construct
VMESRSK

SEQ ID NO: 162919 - protein, 7 aa, synthetic construct
KIPVHVK

SEQ ID NO: 162920 - protein, 7 aa, synthetic construct
KTTRQLD

SEQ ID NO: 162921 - protein, 7 aa, synthetic construct
TGRVAHG

SEQ ID NO: 162922 - protein, 7 aa, synthetic construct
AERAPSK

SEQ ID NO: 162923 - protein, 7 aa, synthetic construct
VLRPLKE

SEQ ID NO: 162924 - protein, 7 aa, synthetic construct
MKQQMIY

SEQ ID NO: 162925 - protein, 7 aa, synthetic construct
IMRGEKN

SEQ ID NO: 162926 - protein, 7 aa, synthetic construct
NKKYDTS

SEQ ID NO: 162927 - protein, 7 aa, synthetic construct
DDKPPKR

SEQ ID NO: 162928 - protein, 7 aa, synthetic construct
TDNMRQK

SEQ ID NO: 162929 - protein, 7 aa, synthetic construct
IRPKDHF

SEQ ID NO: 162930 - protein, 7 aa, synthetic construct
HADANKR

SEQ ID NO: 162931 - protein, 7 aa, synthetic construct
NDGRRGM

SEQ ID NO: 162932 - protein, 7 aa, synthetic construct
IQRHKEI

SEQ ID NO: 162933 - protein, 7 aa, synthetic construct
KARQASE

SEQ ID NO: 162934 - protein, 7 aa, synthetic construct
ARVRESS

SEQ ID NO: 162935 - protein, 7 aa, synthetic construct
RMQKDHT

SEQ ID NO: 162936 - protein, 7 aa, synthetic construct
KSGHVRD

SEQ ID NO: 162937 - protein, 7 aa, synthetic construct
KSNHKFD

SEQ ID NO: 162938 - protein, 7 aa, synthetic construct
VNEIGRK

SEQ ID NO: 162939 - protein, 7 aa, synthetic construct
QTSRNER

SEQ ID NO: 162940 - protein, 7 aa, synthetic construct
GRGEGGR

SEQ ID NO: 162941 - protein, 7 aa, synthetic construct
TDKRHGA

SEQ ID NO: 162942 - protein, 7 aa, synthetic construct
SRQKGEF

SEQ ID NO: 162943 - protein, 7 aa, synthetic construct
KEKVKWD

SEQ ID NO: 162944 - protein, 7 aa, synthetic construct
PLTKKND

SEQ ID NO: 162945 - protein, 7 aa, synthetic construct
EARKISM

SEQ ID NO: 162946 - protein, 7 aa, synthetic construct
KNMLRLD

SEQ ID NO: 162947 - protein, 7 aa, synthetic construct
KRNTIEV

SEQ ID NO: 162948 - protein, 7 aa, synthetic construct
ELVTKRT

SEQ ID NO: 162949 - protein, 7 aa, synthetic construct
EQVMKSK

SEQ ID NO: 162950 - protein, 7 aa, synthetic construct
DQQRVKM

SEQ ID NO: 162951 - protein, 7 aa, synthetic construct
MQDQSKR

SEQ ID NO: 162952 - protein, 7 aa, synthetic construct
GENSKKA

SEQ ID NO: 162953 - protein, 7 aa, synthetic construct
SKRVDNT

SEQ ID NO: 162954 - protein, 7 aa, synthetic construct
ENMKPKQ

SEQ ID NO: 162955 - protein, 7 aa, synthetic construct
KNMRDSM

SEQ ID NO: 162956 - protein, 7 aa, synthetic construct
YDEARKK

SEQ ID NO: 162957 - protein, 7 aa, synthetic construct
IEQQRTR

SEQ ID NO: 162958 - protein, 7 aa, synthetic construct
VAKRPVD

SEQ ID NO: 162959 - protein, 7 aa, synthetic construct
MDRKHFA

SEQ ID NO: 162960 - protein, 7 aa, synthetic construct
DRGQKSH

SEQ ID NO: 162961 - protein, 7 aa, synthetic construct
EPAPKPR

SEQ ID NO: 162962 - protein, 7 aa, synthetic construct
FKRVEMT

SEQ ID NO: 162963 - protein, 7 aa, synthetic construct
YGGHTTR

SEQ ID NO: 162964 - protein, 7 aa, synthetic construct
GRKDHVI

SEQ ID NO: 162965 - protein, 7 aa, synthetic construct
ERPARSV

SEQ ID NO: 162966 - protein, 7 aa, synthetic construct
DRFKKDV

SEQ ID NO: 162967 - protein, 7 aa, synthetic construct
EGTNVKK

SEQ ID NO: 162968 - protein, 7 aa, synthetic construct
IRKIMSD

SEQ ID NO: 162969 - protein, 7 aa, synthetic construct
EVRNVRG

SEQ ID NO: 162970 - protein, 7 aa, synthetic construct
KQRSLTD

SEQ ID NO: 162971 - protein, 7 aa, synthetic construct
LRGSHAS

SEQ ID NO: 162972 - protein, 7 aa, synthetic construct
NYANDKK

SEQ ID NO: 162973 - protein, 7 aa, synthetic construct
DAPRASR

SEQ ID NO: 162974 - protein, 7 aa, synthetic construct
REIPRTQ

SEQ ID NO: 162975 - protein, 7 aa, synthetic construct
SVKRGET

SEQ ID NO: 162976 - protein, 7 aa, synthetic construct
ERGMSKL

SEQ ID NO: 162977 - protein, 7 aa, synthetic construct
KKYGNVD

SEQ ID NO: 162978 - protein, 7 aa, synthetic construct
IETHQKR

SEQ ID NO: 162979 - protein, 7 aa, synthetic construct
HSKTELR

SEQ ID NO: 162980 - protein, 7 aa, synthetic construct
DANLKRL

SEQ ID NO: 162981 - protein, 7 aa, synthetic construct
FKRGDAN

SEQ ID NO: 162982 - protein, 7 aa, synthetic construct
DNVPKFK

SEQ ID NO: 162983 - protein, 7 aa, synthetic construct
TRSKLPD

SEQ ID NO: 162984 - protein, 7 aa, synthetic construct
QPKAVHY

SEQ ID NO: 162985 - protein, 7 aa, synthetic construct
DANMQKK

SEQ ID NO: 162986 - protein, 7 aa, synthetic construct
RQAKDYI

SEQ ID NO: 162987 - protein, 7 aa, synthetic construct
AMEMNKK

SEQ ID NO: 162988 - protein, 7 aa, synthetic construct
NRLKSEV

SEQ ID NO: 162989 - protein, 7 aa, synthetic construct
YKPRDDK

SEQ ID NO: 162990 - protein, 7 aa, synthetic construct
GRKQEMS

SEQ ID NO: 162991 - protein, 7 aa, synthetic construct
AEMRQAK

SEQ ID NO: 162992 - protein, 7 aa, synthetic construct
EQIKSQK

SEQ ID NO: 162993 - protein, 7 aa, synthetic construct
GRRQQDP

SEQ ID NO: 162994 - protein, 7 aa, synthetic construct
VRHTKGE

SEQ ID NO: 162995 - protein, 7 aa, synthetic construct
TRTRIES

SEQ ID NO: 162996 - protein, 7 aa, synthetic construct
LEPITRK

SEQ ID NO: 162997 - protein, 7 aa, synthetic construct
RSRTNEP

SEQ ID NO: 162998 - protein, 7 aa, synthetic construct
EGMKNKS

SEQ ID NO: 162999 - protein, 7 aa, synthetic construct
HDLKLKY

SEQ ID NO: 163000 - protein, 7 aa, synthetic construct
DKGHRSA

SEQ ID NO: 163001 - protein, 7 aa, synthetic construct
DLQKSRQ

SEQ ID NO: 163002 - protein, 7 aa, synthetic construct
NRKMTVD

SEQ ID NO: 163003 - protein, 7 aa, synthetic construct
DGKQISR

SEQ ID NO: 163004 - protein, 7 aa, synthetic construct
ITRPLSH

SEQ ID NO: 163005 - protein, 7 aa, synthetic construct
QERNPKM

SEQ ID NO: 163006 - protein, 7 aa, synthetic construct
NKRITSE

SEQ ID NO: 163007 - protein, 7 aa, synthetic construct
VPELNKR

SEQ ID NO: 163008 - protein, 7 aa, synthetic construct
YDNNGKR

SEQ ID NO: 163009 - protein, 7 aa, synthetic construct
EGKQRGF

SEQ ID NO: 163010 - protein, 7 aa, synthetic construct
LKKHEPG

SEQ ID NO: 163011 - protein, 7 aa, synthetic construct
VRMKPPE

SEQ ID NO: 163012 - protein, 7 aa, synthetic construct
LKMNRFD

SEQ ID NO: 163013 - protein, 7 aa, synthetic construct
DGSIRGK

SEQ ID NO: 163014 - protein, 7 aa, synthetic construct
RSEGFKQ

SEQ ID NO: 163015 - protein, 7 aa, synthetic construct
TGRHNTG

SEQ ID NO: 163016 - protein, 7 aa, synthetic construct
LKRAVDN

SEQ ID NO: 163017 - protein, 7 aa, synthetic construct
SDQKPTR

SEQ ID NO: 163018 - protein, 7 aa, synthetic construct
IGRLQHS

SEQ ID NO: 163019 - protein, 7 aa, synthetic construct
QRGSHNL

SEQ ID NO: 163020 - protein, 7 aa, synthetic construct
QNKRDVA

SEQ ID NO: 163021 - protein, 7 aa, synthetic construct
KETRNQQ

SEQ ID NO: 163022 - protein, 7 aa, synthetic construct
IRRETNN

SEQ ID NO: 163023 - protein, 7 aa, synthetic construct
KRMTDGS

SEQ ID NO: 163024 - protein, 7 aa, synthetic construct
TDRSSKA

SEQ ID NO: 163025 - protein, 7 aa, synthetic construct
PPDGSKK

SEQ ID NO: 163026 - protein, 7 aa, synthetic construct
MKRMAES

SEQ ID NO: 163027 - protein, 7 aa, synthetic construct
NDIKQKW

SEQ ID NO: 163028 - protein, 7 aa, synthetic construct
DGRTVKN

SEQ ID NO: 163029 - protein, 7 aa, synthetic construct
DTKPNKH

SEQ ID NO: 163030 - protein, 7 aa, synthetic construct
TRSKDTF

SEQ ID NO: 163031 - protein, 7 aa, synthetic construct
RKYTVEP

SEQ ID NO: 163032 - protein, 7 aa, synthetic construct
FEGMRKA

SEQ ID NO: 163033 - protein, 7 aa, synthetic construct
PEANKIR

SEQ ID NO: 163034 - protein, 7 aa, synthetic construct
TSKREVN

SEQ ID NO: 163035 - protein, 7 aa, synthetic construct
HDKPANK

SEQ ID NO: 163036 - protein, 7 aa, synthetic construct
RRQTNDV

SEQ ID NO: 163037 - protein, 7 aa, synthetic construct
EAATKLR

SEQ ID NO: 163038 - protein, 7 aa, synthetic construct
RSARGEI

SEQ ID NO: 163039 - protein, 7 aa, synthetic construct
TELGKRY

SEQ ID NO: 163040 - protein, 7 aa, synthetic construct
DRDKEKK

SEQ ID NO: 163041 - protein, 7 aa, synthetic construct
RVDGHKY

SEQ ID NO: 163042 - protein, 7 aa, synthetic construct
MKRTQDT

SEQ ID NO: 163043 - protein, 7 aa, synthetic construct
TRGKDSL

SEQ ID NO: 163044 - protein, 7 aa, synthetic construct
GELVRKA

SEQ ID NO: 163045 - protein, 7 aa, synthetic construct
GDHIKVR

SEQ ID NO: 163046 - protein, 7 aa, synthetic construct
GRKDNYN

SEQ ID NO: 163047 - protein, 7 aa, synthetic construct
AQKREFQ

SEQ ID NO: 163048 - protein, 7 aa, synthetic construct
RTRQQTE

SEQ ID NO: 163049 - protein, 7 aa, synthetic construct
LSRKDVM

SEQ ID NO: 163050 - protein, 7 aa, synthetic construct
GSQRTER

SEQ ID NO: 163051 - protein, 7 aa, synthetic construct
ATSRIDR

SEQ ID NO: 163052 - protein, 7 aa, synthetic construct
GKRADIS

SEQ ID NO: 163053 - protein, 7 aa, synthetic construct
AGKKTND

SEQ ID NO: 163054 - protein, 7 aa, synthetic construct
HTRVAER

SEQ ID NO: 163055 - protein, 7 aa, synthetic construct
VHREIRA

SEQ ID NO: 163056 - protein, 7 aa, synthetic construct
DTGKVNR

SEQ ID NO: 163057 - protein, 7 aa, synthetic construct
FKRDKEQ

SEQ ID NO: 163058 - protein, 7 aa, synthetic construct
RRAETST

SEQ ID NO: 163059 - protein, 7 aa, synthetic construct
KEIPRMH

SEQ ID NO: 163060 - protein, 7 aa, synthetic construct
IEKAHRL

SEQ ID NO: 163061 - protein, 7 aa, synthetic construct
PERKVSS

SEQ ID NO: 163062 - protein, 7 aa, synthetic construct
AIQRMKE

SEQ ID NO: 163063 - protein, 7 aa, synthetic construct
GKRQETN

SEQ ID NO: 163064 - protein, 7 aa, synthetic construct
MRNQREV

SEQ ID NO: 163065 - protein, 7 aa, synthetic construct
GELRSKS

SEQ ID NO: 163066 - protein, 7 aa, synthetic construct
IAGQSRP

SEQ ID NO: 163067 - protein, 7 aa, synthetic construct
QESNKFK

SEQ ID NO: 163068 - protein, 7 aa, synthetic construct
KPRAQDT

SEQ ID NO: 163069 - protein, 7 aa, synthetic construct
KRPAPDQ

SEQ ID NO: 163070 - protein, 7 aa, synthetic construct
TEQKLRA

SEQ ID NO: 163071 - protein, 7 aa, synthetic construct
DLPRPKL

SEQ ID NO: 163072 - protein, 7 aa, synthetic construct
DGRINKA

SEQ ID NO: 163073 - protein, 7 aa, synthetic construct
IDRVQKN

SEQ ID NO: 163074 - protein, 7 aa, synthetic construct
TDARQKQ

SEQ ID NO: 163075 - protein, 7 aa, synthetic construct
TEKYQRS

SEQ ID NO: 163076 - protein, 7 aa, synthetic construct
EPPQNRK

SEQ ID NO: 163077 - protein, 7 aa, synthetic construct
SQENRTK

SEQ ID NO: 163078 - protein, 7 aa, synthetic construct
AKARDLS

SEQ ID NO: 163079 - protein, 7 aa, synthetic construct
FERNMKL

SEQ ID NO: 163080 - protein, 7 aa, synthetic construct
EKQSRAV

SEQ ID NO: 163081 - protein, 7 aa, synthetic construct
KTRQIND

SEQ ID NO: 163082 - protein, 7 aa, synthetic construct
SKEDRRQ

SEQ ID NO: 163083 - protein, 7 aa, synthetic construct
DRKVKPD

SEQ ID NO: 163084 - protein, 7 aa, synthetic construct
DSTRVKL

SEQ ID NO: 163085 - protein, 7 aa, synthetic construct
FEDNKKK

SEQ ID NO: 163086 - protein, 7 aa, synthetic construct
QEGNKNR

SEQ ID NO: 163087 - protein, 7 aa, synthetic construct
DSKPKML

SEQ ID NO: 163088 - protein, 7 aa, synthetic construct
NANVEKR

SEQ ID NO: 163089 - protein, 7 aa, synthetic construct
FENGTRK

SEQ ID NO: 163090 - protein, 7 aa, synthetic construct
THSKRDV

SEQ ID NO: 163091 - protein, 7 aa, synthetic construct
VKRGENS

SEQ ID NO: 163092 - protein, 7 aa, synthetic construct
QNRAIKE

SEQ ID NO: 163093 - protein, 7 aa, synthetic construct
GDDRKKV

SEQ ID NO: 163094 - protein, 7 aa, synthetic construct
AQRQKEN

SEQ ID NO: 163095 - protein, 7 aa, synthetic construct
IARKEPA

SEQ ID NO: 163096 - protein, 7 aa, synthetic construct
EMLKPKT

SEQ ID NO: 163097 - protein, 7 aa, synthetic construct
MKKFDSS

SEQ ID NO: 163098 - protein, 7 aa, synthetic construct
YDMAQKR

SEQ ID NO: 163099 - protein, 7 aa, synthetic construct
DRPVVRA

SEQ ID NO: 163100 - protein, 7 aa, synthetic construct
SRGEHKA

SEQ ID NO: 163101 - protein, 7 aa, synthetic construct
NDNRPKL

SEQ ID NO: 163102 - protein, 7 aa, synthetic construct
NRTTRDT

SEQ ID NO: 163103 - protein, 7 aa, synthetic construct
RFKVAEV

SEQ ID NO: 163104 - protein, 7 aa, synthetic construct
IRTHKEI

SEQ ID NO: 163105 - protein, 7 aa, synthetic construct
NKSRSEI

SEQ ID NO: 163106 - protein, 7 aa, synthetic construct
HEQKQKN

SEQ ID NO: 163107 - protein, 7 aa, synthetic construct
LRNEYKS

SEQ ID NO: 163108 - protein, 7 aa, synthetic construct
DQQKNNR

SEQ ID NO: 163109 - protein, 7 aa, synthetic construct
TRKQNEV

SEQ ID NO: 163110 - protein, 7 aa, synthetic construct
TRPRESM

SEQ ID NO: 163111 - protein, 7 aa, synthetic construct
WDLTKKL

SEQ ID NO: 163112 - protein, 7 aa, synthetic construct
YDKKKDY

SEQ ID NO: 163113 - protein, 7 aa, synthetic construct
VEKQHRL

SEQ ID NO: 163114 - protein, 7 aa, synthetic construct
RSGSREN

SEQ ID NO: 163115 - protein, 7 aa, synthetic construct
ENTAKYK

SEQ ID NO: 163116 - protein, 7 aa, synthetic construct
LEVRARS

SEQ ID NO: 163117 - protein, 7 aa, synthetic construct
INKRLEQ

SEQ ID NO: 163118 - protein, 7 aa, synthetic construct
HKKSENF

SEQ ID NO: 163119 - protein, 7 aa, synthetic construct
NEQKTKY

SEQ ID NO: 163120 - protein, 7 aa, synthetic construct
QEVPGKK

SEQ ID NO: 163121 - protein, 7 aa, synthetic construct
NQGERRS

SEQ ID NO: 163122 - protein, 7 aa, synthetic construct
QMENGRK

SEQ ID NO: 163123 - protein, 7 aa, synthetic construct
DAKPKMQ

SEQ ID NO: 163124 - protein, 7 aa, synthetic construct
RQKPQDY

SEQ ID NO: 163125 - protein, 7 aa, synthetic construct
DANSRQK

SEQ ID NO: 163126 - protein, 7 aa, synthetic construct
TPDNSRK

SEQ ID NO: 163127 - protein, 7 aa, synthetic construct
STRRENV

SEQ ID NO: 163128 - protein, 7 aa, synthetic construct
AKRLDNT

SEQ ID NO: 163129 - protein, 7 aa, synthetic construct
RTDRHAI

SEQ ID NO: 163130 - protein, 7 aa, synthetic construct
REHPRSV

SEQ ID NO: 163131 - protein, 7 aa, synthetic construct
IKKYDGL

SEQ ID NO: 163132 - protein, 7 aa, synthetic construct
PMIKRGD

SEQ ID NO: 163133 - protein, 7 aa, synthetic construct
DYPKMKN

SEQ ID NO: 163134 - protein, 7 aa, synthetic construct
ETGKRAG

SEQ ID NO: 163135 - protein, 7 aa, synthetic construct
VLNAERR

SEQ ID NO: 163136 - protein, 7 aa, synthetic construct
QENGRKS

SEQ ID NO: 163137 - protein, 7 aa, synthetic construct
KNARDVL

SEQ ID NO: 163138 - protein, 7 aa, synthetic construct
PSSRSDR

SEQ ID NO: 163139 - protein, 7 aa, synthetic construct
PSTRTER

SEQ ID NO: 163140 - protein, 7 aa, synthetic construct
DLQQKRH

SEQ ID NO: 163141 - protein, 7 aa, synthetic construct
QGKPYRD

SEQ ID NO: 163142 - protein, 7 aa, synthetic construct
ASNRDRG

SEQ ID NO: 163143 - protein, 7 aa, synthetic construct
QTEAKFR

SEQ ID NO: 163144 - protein, 7 aa, synthetic construct
DGRNNNK

SEQ ID NO: 163145 - protein, 7 aa, synthetic construct
QHVKKDL

SEQ ID NO: 163146 - protein, 7 aa, synthetic construct
YQKGVDR

SEQ ID NO: 163147 - protein, 7 aa, synthetic construct
DRARTDK

SEQ ID NO: 163148 - protein, 7 aa, synthetic construct
KTDHIYK

SEQ ID NO: 163149 - protein, 7 aa, synthetic construct
HAKGDIR

SEQ ID NO: 163150 - protein, 7 aa, synthetic construct
SIEIRTK

SEQ ID NO: 163151 - protein, 7 aa, synthetic construct
MERSIKA

SEQ ID NO: 163152 - protein, 7 aa, synthetic construct
NERMLRN

SEQ ID NO: 163153 - protein, 7 aa, synthetic construct
ETTRGMK

SEQ ID NO: 163154 - protein, 7 aa, synthetic construct
NETARKS

SEQ ID NO: 163155 - protein, 7 aa, synthetic construct
KANRFEA

SEQ ID NO: 163156 - protein, 7 aa, synthetic construct
NFEGKNR

SEQ ID NO: 163157 - protein, 7 aa, synthetic construct
EVRAKAQ

SEQ ID NO: 163158 - protein, 7 aa, synthetic construct
SDTQKQR

SEQ ID NO: 163159 - protein, 7 aa, synthetic construct
PVDHKRA

SEQ ID NO: 163160 - protein, 7 aa, synthetic construct
DFVNKAR

SEQ ID NO: 163161 - protein, 7 aa, synthetic construct
KKYQIVD

SEQ ID NO: 163162 - protein, 7 aa, synthetic construct
FEKMHRS

SEQ ID NO: 163163 - protein, 7 aa, synthetic construct
QTIKPYS

SEQ ID NO: 163164 - protein, 7 aa, synthetic construct
DYTPKNK

SEQ ID NO: 163165 - protein, 7 aa, synthetic construct
LRQLKHE

SEQ ID NO: 163166 - protein, 7 aa, synthetic construct
PIERNQR

SEQ ID NO: 163167 - protein, 7 aa, synthetic construct
IGRGNTM

SEQ ID NO: 163168 - protein, 7 aa, synthetic construct
VHSEMKR

SEQ ID NO: 163169 - protein, 7 aa, synthetic construct
SKRTDTT

SEQ ID NO: 163170 - protein, 7 aa, synthetic construct
MIRGEPK

SEQ ID NO: 163171 - protein, 7 aa, synthetic construct
RQAKDYS

SEQ ID NO: 163172 - protein, 7 aa, synthetic construct
IPHISKH

SEQ ID NO: 163173 - protein, 7 aa, synthetic construct
EYPKSKN

SEQ ID NO: 163174 - protein, 7 aa, synthetic construct
YENRSSK

SEQ ID NO: 163175 - protein, 7 aa, synthetic construct
RDKRDAL

SEQ ID NO: 163176 - protein, 7 aa, synthetic construct
HQSNEKK

SEQ ID NO: 163177 - protein, 7 aa, synthetic construct
VRSNEAK

SEQ ID NO: 163178 - protein, 7 aa, synthetic construct
EQKKVYN

SEQ ID NO: 163179 - protein, 7 aa, synthetic construct
KVRGQMD

SEQ ID NO: 163180 - protein, 7 aa, synthetic construct
MIRNQKD

SEQ ID NO: 163181 - protein, 7 aa, synthetic construct
QFQKELR

SEQ ID NO: 163182 - protein, 7 aa, synthetic construct
GEKRAMN

SEQ ID NO: 163183 - protein, 7 aa, synthetic construct
RLDHQPK

SEQ ID NO: 163184 - protein, 7 aa, synthetic construct
MADTSKR

SEQ ID NO: 163185 - protein, 7 aa, synthetic construct
QKRMPDP

SEQ ID NO: 163186 - protein, 7 aa, synthetic construct
ETKMQRG

SEQ ID NO: 163187 - protein, 7 aa, synthetic construct
AGRGHLA

SEQ ID NO: 163188 - protein, 7 aa, synthetic construct
EAKAVRF

SEQ ID NO: 163189 - protein, 7 aa, synthetic construct
RINMAEK

SEQ ID NO: 163190 - protein, 7 aa, synthetic construct
HKNDRAN

SEQ ID NO: 163191 - protein, 7 aa, synthetic construct
YQKKGEH

SEQ ID NO: 163192 - protein, 7 aa, synthetic construct
DLVGRNK

SEQ ID NO: 163193 - protein, 7 aa, synthetic construct
RRGPDTT

SEQ ID NO: 163194 - protein, 7 aa, synthetic construct
GKHDRGN

SEQ ID NO: 163195 - protein, 7 aa, synthetic construct
ESQKTKN

SEQ ID NO: 163196 - protein, 7 aa, synthetic construct
STKRDTA

SEQ ID NO: 163197 - protein, 7 aa, synthetic construct
KMKHMID

SEQ ID NO: 163198 - protein, 7 aa, synthetic construct
QVRGEPR

SEQ ID NO: 163199 - protein, 7 aa, synthetic construct
RRDIIDK

SEQ ID NO: 163200 - protein, 7 aa, synthetic construct
GHEKIRQ

SEQ ID NO: 163201 - protein, 7 aa, synthetic construct
SVEKQFR

SEQ ID NO: 163202 - protein, 7 aa, synthetic construct
NEGRIKA

SEQ ID NO: 163203 - protein, 7 aa, synthetic construct
NQDVKKW

SEQ ID NO: 163204 - protein, 7 aa, synthetic construct
HDSNKVR

SEQ ID NO: 163205 - protein, 7 aa, synthetic construct
TERSAKS

SEQ ID NO: 163206 - protein, 7 aa, synthetic construct
LHGLARA

SEQ ID NO: 163207 - protein, 7 aa, synthetic construct
QKRDPEK

SEQ ID NO: 163208 - protein, 7 aa, synthetic construct
DVGTSKK

SEQ ID NO: 163209 - protein, 7 aa, synthetic construct
DKTVDRR

SEQ ID NO: 163210 - protein, 7 aa, synthetic construct
KSEYLNK

SEQ ID NO: 163211 - protein, 7 aa, synthetic construct
QEIMKRN

SEQ ID NO: 163212 - protein, 7 aa, synthetic construct
LSKRDSG

SEQ ID NO: 163213 - protein, 7 aa, synthetic construct
KNTRSNE

SEQ ID NO: 163214 - protein, 7 aa, synthetic construct
KLDYSQK

SEQ ID NO: 163215 - protein, 7 aa, synthetic construct
LVVRQKE

SEQ ID NO: 163216 - protein, 7 aa, synthetic construct
DISSRAR

SEQ ID NO: 163217 - protein, 7 aa, synthetic construct
TEFKATR

SEQ ID NO: 163218 - protein, 7 aa, synthetic construct
MDSRQKF

SEQ ID NO: 163219 - protein, 7 aa, synthetic construct
KKAAPDA

SEQ ID NO: 163220 - protein, 7 aa, synthetic construct
IPKMEKY

SEQ ID NO: 163221 - protein, 7 aa, synthetic construct
MSRKETQ

SEQ ID NO: 163222 - protein, 7 aa, synthetic construct
KHAARME

SEQ ID NO: 163223 - protein, 7 aa, synthetic construct
EMMKVNK

SEQ ID NO: 163224 - protein, 7 aa, synthetic construct
QTKHRDV

SEQ ID NO: 163225 - protein, 7 aa, synthetic construct
MRGPYKD

SEQ ID NO: 163226 - protein, 7 aa, synthetic construct
DQGRAKP

SEQ ID NO: 163227 - protein, 7 aa, synthetic construct
EMSPKNK

SEQ ID NO: 163228 - protein, 7 aa, synthetic construct
SVRHIPG

SEQ ID NO: 163229 - protein, 7 aa, synthetic construct
TARTKND

SEQ ID NO: 163230 - protein, 7 aa, synthetic construct
EGNNKKG

SEQ ID NO: 163231 - protein, 7 aa, synthetic construct
QDSAKYK

SEQ ID NO: 163232 - protein, 7 aa, synthetic construct
TEKPKSA

SEQ ID NO: 163233 - protein, 7 aa, synthetic construct
KEKRERE

SEQ ID NO: 163234 - protein, 7 aa, synthetic construct
LGRGHSA

SEQ ID NO: 163235 - protein, 7 aa, synthetic construct
KKEHIVW

SEQ ID NO: 163236 - protein, 7 aa, synthetic construct
NENGNKR

SEQ ID NO: 163237 - protein, 7 aa, synthetic construct
EARNMKN

SEQ ID NO: 163238 - protein, 7 aa, synthetic construct
KVIHEGR

SEQ ID NO: 163239 - protein, 7 aa, synthetic construct
HSGPART

SEQ ID NO: 163240 - protein, 7 aa, synthetic construct
MHQKRDV

SEQ ID NO: 163241 - protein, 7 aa, synthetic construct
MKSHRLE

SEQ ID NO: 163242 - protein, 7 aa, synthetic construct
HKGDRIY

SEQ ID NO: 163243 - protein, 7 aa, synthetic construct
MRNVYKE

SEQ ID NO: 163244 - protein, 7 aa, synthetic construct
QDGLRIK

SEQ ID NO: 163245 - protein, 7 aa, synthetic construct
ASTRLKD

SEQ ID NO: 163246 - protein, 7 aa, synthetic construct
YQGPKIL

SEQ ID NO: 163247 - protein, 7 aa, synthetic construct
EAKQVKF

SEQ ID NO: 163248 - protein, 7 aa, synthetic construct
RIHKLMD

SEQ ID NO: 163249 - protein, 7 aa, synthetic construct
LDHRGKG

SEQ ID NO: 163250 - protein, 7 aa, synthetic construct
ARRDTAN

SEQ ID NO: 163251 - protein, 7 aa, synthetic construct
DKRNAER

SEQ ID NO: 163252 - protein, 7 aa, synthetic construct
QEHKKFN

SEQ ID NO: 163253 - protein, 7 aa, synthetic construct
FNKWTKE

SEQ ID NO: 163254 - protein, 7 aa, synthetic construct
AEKQMRF

SEQ ID NO: 163255 - protein, 7 aa, synthetic construct
MKSRGSD

SEQ ID NO: 163256 - protein, 7 aa, synthetic construct
YDQGRAK

SEQ ID NO: 163257 - protein, 7 aa, synthetic construct
MRNTKDF

SEQ ID NO: 163258 - protein, 7 aa, synthetic construct
GAGHTRG

SEQ ID NO: 163259 - protein, 7 aa, synthetic construct
NKNRDQM

SEQ ID NO: 163260 - protein, 7 aa, synthetic construct
KFRQPEP

SEQ ID NO: 163261 - protein, 7 aa, synthetic construct
DRKVHAL

SEQ ID NO: 163262 - protein, 7 aa, synthetic construct
STEPRRS

SEQ ID NO: 163263 - protein, 7 aa, synthetic construct
ISDQGKR

SEQ ID NO: 163264 - protein, 7 aa, synthetic construct
RHDAVQK

SEQ ID NO: 163265 - protein, 7 aa, synthetic construct
IVGYSKS

SEQ ID NO: 163266 - protein, 7 aa, synthetic construct
NEIKNRN

SEQ ID NO: 163267 - protein, 7 aa, synthetic construct
AAKRDVN

SEQ ID NO: 163268 - protein, 7 aa, synthetic construct
QPDTRRA

SEQ ID NO: 163269 - protein, 7 aa, synthetic construct
SDRKQNM

SEQ ID NO: 163270 - protein, 7 aa, synthetic construct
KMRQIEI

SEQ ID NO: 163271 - protein, 7 aa, synthetic construct
DQTKRNT

SEQ ID NO: 163272 - protein, 7 aa, synthetic construct
TSKHKDV

SEQ ID NO: 163273 - protein, 7 aa, synthetic construct
ADKHIAR

SEQ ID NO: 163274 - protein, 7 aa, synthetic construct
RTRDINT

SEQ ID NO: 163275 - protein, 7 aa, synthetic construct
DNTGRSR

SEQ ID NO: 163276 - protein, 7 aa, synthetic construct
GGGGALR

SEQ ID NO: 163277 - protein, 7 aa, synthetic construct
MKHPRQD

SEQ ID NO: 163278 - protein, 7 aa, synthetic construct
RETRAER

SEQ ID NO: 163279 - protein, 7 aa, synthetic construct
EQPRVKT

SEQ ID NO: 163280 - protein, 7 aa, synthetic construct
ADAKRHA

SEQ ID NO: 163281 - protein, 7 aa, synthetic construct
LEARATR

SEQ ID NO: 163282 - protein, 7 aa, synthetic construct
EHKKQMT

SEQ ID NO: 163283 - protein, 7 aa, synthetic construct
VGRSVPG

SEQ ID NO: 163284 - protein, 7 aa, synthetic construct
PARVKQE

SEQ ID NO: 163285 - protein, 7 aa, synthetic construct
LNRELRA

SEQ ID NO: 163286 - protein, 7 aa, synthetic construct
VTRSERA

SEQ ID NO: 163287 - protein, 7 aa, synthetic construct
TRQPKDA

SEQ ID NO: 163288 - protein, 7 aa, synthetic construct
EHKIKNF

SEQ ID NO: 163289 - protein, 7 aa, synthetic construct
IGRDSVR

SEQ ID NO: 163290 - protein, 7 aa, synthetic construct
RQRQEPP

SEQ ID NO: 163291 - protein, 7 aa, synthetic construct
HQEKTSR

SEQ ID NO: 163292 - protein, 7 aa, synthetic construct
RSEHKST

SEQ ID NO: 163293 - protein, 7 aa, synthetic construct
ETIKIRN

SEQ ID NO: 163294 - protein, 7 aa, synthetic construct
FKRIESN

SEQ ID NO: 163295 - protein, 7 aa, synthetic construct
KQNMRND

SEQ ID NO: 163296 - protein, 7 aa, synthetic construct
ELMKPKY

SEQ ID NO: 163297 - protein, 7 aa, synthetic construct
IVRKIEG

SEQ ID NO: 163298 - protein, 7 aa, synthetic construct
FKRDPIN

SEQ ID NO: 163299 - protein, 7 aa, synthetic construct
YEIPKRN

SEQ ID NO: 163300 - protein, 7 aa, synthetic construct
IRGEAPK

SEQ ID NO: 163301 - protein, 7 aa, synthetic construct
LEARGQK

SEQ ID NO: 163302 - protein, 7 aa, synthetic construct
ISRAKID

SEQ ID NO: 163303 - protein, 7 aa, synthetic construct
FSEVVKK

SEQ ID NO: 163304 - protein, 7 aa, synthetic construct
RLSHKTE

SEQ ID NO: 163305 - protein, 7 aa, synthetic construct
LHNPRSN

SEQ ID NO: 163306 - protein, 7 aa, synthetic construct
GEGGKIK

SEQ ID NO: 163307 - protein, 7 aa, synthetic construct
NETMKRH

SEQ ID NO: 163308 - protein, 7 aa, synthetic construct
REHPRGM

SEQ ID NO: 163309 - protein, 7 aa, synthetic construct
NSRAKTD

SEQ ID NO: 163310 - protein, 7 aa, synthetic construct
QGKRDPI

SEQ ID NO: 163311 - protein, 7 aa, synthetic construct
FQKREPP

SEQ ID NO: 163312 - protein, 7 aa, synthetic construct
NEKPRIA

SEQ ID NO: 163313 - protein, 7 aa, synthetic construct
QRHGPSS

SEQ ID NO: 163314 - protein, 7 aa, synthetic construct
SELTKRG

SEQ ID NO: 163315 - protein, 7 aa, synthetic construct
LEGLKRM

SEQ ID NO: 163316 - protein, 7 aa, synthetic construct
KRDAHNY

SEQ ID NO: 163317 - protein, 7 aa, synthetic construct
SEIKNLR

SEQ ID NO: 163318 - protein, 7 aa, synthetic construct
KGRDITI

SEQ ID NO: 163319 - protein, 7 aa, synthetic construct
IRNEFRA

SEQ ID NO: 163320 - protein, 7 aa, synthetic construct
TRRDVTV

SEQ ID NO: 163321 - protein, 7 aa, synthetic construct
YMDRAKY

SEQ ID NO: 163322 - protein, 7 aa, synthetic construct
FTKRNDV

SEQ ID NO: 163323 - protein, 7 aa, synthetic construct
EKNQRLS

SEQ ID NO: 163324 - protein, 7 aa, synthetic construct
LRHSVQN

SEQ ID NO: 163325 - protein, 7 aa, synthetic construct
VKRIDLN

SEQ ID NO: 163326 - protein, 7 aa, synthetic construct
HNDTPKR

SEQ ID NO: 163327 - protein, 7 aa, synthetic construct
KRGDPFV

SEQ ID NO: 163328 - protein, 7 aa, synthetic construct
SQEPNRK

SEQ ID NO: 163329 - protein, 7 aa, synthetic construct
DKRKMES

SEQ ID NO: 163330 - protein, 7 aa, synthetic construct
PVSRNEK

SEQ ID NO: 163331 - protein, 7 aa, synthetic construct
ENKQSKL

SEQ ID NO: 163332 - protein, 7 aa, synthetic construct
SNKKDLH

SEQ ID NO: 163333 - protein, 7 aa, synthetic construct
NMVKKYD

SEQ ID NO: 163334 - protein, 7 aa, synthetic construct
KGIRGNE

SEQ ID NO: 163335 - protein, 7 aa, synthetic construct
DKRGDSR

SEQ ID NO: 163336 - protein, 7 aa, synthetic construct
PETKRAM

SEQ ID NO: 163337 - protein, 7 aa, synthetic construct
PQRSKSE

SEQ ID NO: 163338 - protein, 7 aa, synthetic construct
GDLKFKH

SEQ ID NO: 163339 - protein, 7 aa, synthetic construct
TTELMKK

SEQ ID NO: 163340 - protein, 7 aa, synthetic construct
PRREADR

SEQ ID NO: 163341 - protein, 7 aa, synthetic construct
VEAKSSR

SEQ ID NO: 163342 - protein, 7 aa, synthetic construct
SRKFEQV

SEQ ID NO: 163343 - protein, 7 aa, synthetic construct
WEKGFKA

SEQ ID NO: 163344 - protein, 7 aa, synthetic construct
YEKAQRF

SEQ ID NO: 163345 - protein, 7 aa, synthetic construct
ISNRDKN

SEQ ID NO: 163346 - protein, 7 aa, synthetic construct
VEKPARG

SEQ ID NO: 163347 - protein, 7 aa, synthetic construct
NIDHKVR

SEQ ID NO: 163348 - protein, 7 aa, synthetic construct
ETKINRQ

SEQ ID NO: 163349 - protein, 7 aa, synthetic construct
SEVVRRA

SEQ ID NO: 163350 - protein, 7 aa, synthetic construct
EGAKNRV

SEQ ID NO: 163351 - protein, 7 aa, synthetic construct
MNRGDRG

SEQ ID NO: 163352 - protein, 7 aa, synthetic construct
GAEIRKA

SEQ ID NO: 163353 - protein, 7 aa, synthetic construct
GPIDARK

SEQ ID NO: 163354 - protein, 7 aa, synthetic construct
KREIREQ

SEQ ID NO: 163355 - protein, 7 aa, synthetic construct
DMMKPKH

SEQ ID NO: 163356 - protein, 7 aa, synthetic construct
EDKPIKR

SEQ ID NO: 163357 - protein, 7 aa, synthetic construct
MDMARKQ

SEQ ID NO: 163358 - protein, 7 aa, synthetic construct
DMNPGRR

SEQ ID NO: 163359 - protein, 7 aa, synthetic construct
YVAKKGD

SEQ ID NO: 163360 - protein, 7 aa, synthetic construct
RTVRAGE

SEQ ID NO: 163361 - protein, 7 aa, synthetic construct
IRGIMRD

SEQ ID NO: 163362 - protein, 7 aa, synthetic construct
PKMRSLE

SEQ ID NO: 163363 - protein, 7 aa, synthetic construct
ITHRGSA

SEQ ID NO: 163364 - protein, 7 aa, synthetic construct
MRKLTEG

SEQ ID NO: 163365 - protein, 7 aa, synthetic construct
NKEHTSR

SEQ ID NO: 163366 - protein, 7 aa, synthetic construct
LKHREQN

SEQ ID NO: 163367 - protein, 7 aa, synthetic construct
DQGTKYR

SEQ ID NO: 163368 - protein, 7 aa, synthetic construct
EKYEKAK

SEQ ID NO: 163369 - protein, 7 aa, synthetic construct
DFGKRSV

SEQ ID NO: 163370 - protein, 7 aa, synthetic construct
TDIPKKQ

SEQ ID NO: 163371 - protein, 7 aa, synthetic construct
LNKRDQA

SEQ ID NO: 163372 - protein, 7 aa, synthetic construct
RETKYLS

SEQ ID NO: 163373 - protein, 7 aa, synthetic construct
KSYPKDQ

SEQ ID NO: 163374 - protein, 7 aa, synthetic construct
SEKRGPQ

SEQ ID NO: 163375 - protein, 7 aa, synthetic construct
KTARAVD

SEQ ID NO: 163376 - protein, 7 aa, synthetic construct
KMIPREM

SEQ ID NO: 163377 - protein, 7 aa, synthetic construct
NDRPKYA

SEQ ID NO: 163378 - protein, 7 aa, synthetic construct
RAIPRDV

SEQ ID NO: 163379 - protein, 7 aa, synthetic construct
ELAGKFK

SEQ ID NO: 163380 - protein, 7 aa, synthetic construct
RDSRERV

SEQ ID NO: 163381 - protein, 7 aa, synthetic construct
LTKRDGS

SEQ ID NO: 163382 - protein, 7 aa, synthetic construct
EIHKAKA

SEQ ID NO: 163383 - protein, 7 aa, synthetic construct
YAVNPNK

SEQ ID NO: 163384 - protein, 7 aa, synthetic construct
MSIRNKD

SEQ ID NO: 163385 - protein, 7 aa, synthetic construct
MNTETRK

SEQ ID NO: 163386 - protein, 7 aa, synthetic construct
IPHQSPK

SEQ ID NO: 163387 - protein, 7 aa, synthetic construct
VTEIRKM

SEQ ID NO: 163388 - protein, 7 aa, synthetic construct
NADLARK

SEQ ID NO: 163389 - protein, 7 aa, synthetic construct
MKVKYDI

SEQ ID NO: 163390 - protein, 7 aa, synthetic construct
IITETRR

SEQ ID NO: 163391 - protein, 7 aa, synthetic construct
MGRQKDQ

SEQ ID NO: 163392 - protein, 7 aa, synthetic construct
DRRNTPV

SEQ ID NO: 163393 - protein, 7 aa, synthetic construct
RKLASND

SEQ ID NO: 163394 - protein, 7 aa, synthetic construct
IDRIVRP

SEQ ID NO: 163395 - protein, 7 aa, synthetic construct
HSQRERQ

SEQ ID NO: 163396 - protein, 7 aa, synthetic construct
VTRVEKN

SEQ ID NO: 163397 - protein, 7 aa, synthetic construct
NLDSKRN

SEQ ID NO: 163398 - protein, 7 aa, synthetic construct
LATSERK

SEQ ID NO: 163399 - protein, 7 aa, synthetic construct
KMRGIET

SEQ ID NO: 163400 - protein, 7 aa, synthetic construct
YSDHKRP

SEQ ID NO: 163401 - protein, 7 aa, synthetic construct
VLEKHQK

SEQ ID NO: 163402 - protein, 7 aa, synthetic construct
VLDQVKR

SEQ ID NO: 163403 - protein, 7 aa, synthetic construct
GERTLKQ

SEQ ID NO: 163404 - protein, 7 aa, synthetic construct
RESTRNT

SEQ ID NO: 163405 - protein, 7 aa, synthetic construct
VEVNPKR

SEQ ID NO: 163406 - protein, 7 aa, synthetic construct
PADRPKG

SEQ ID NO: 163407 - protein, 7 aa, synthetic construct
KLHRMVE

SEQ ID NO: 163408 - protein, 7 aa, synthetic construct
KVTNKYD

SEQ ID NO: 163409 - protein, 7 aa, synthetic construct
IEGRRGV

SEQ ID NO: 163410 - protein, 7 aa, synthetic construct
WLKEDKK

SEQ ID NO: 163411 - protein, 7 aa, synthetic construct
FDTSRLK

SEQ ID NO: 163412 - protein, 7 aa, synthetic construct
QMKRDTQ

SEQ ID NO: 163413 - protein, 7 aa, synthetic construct
LQKRGDI

SEQ ID NO: 163414 - protein, 7 aa, synthetic construct
DSRMVRS

SEQ ID NO: 163415 - protein, 7 aa, synthetic construct
GKVRSVE

SEQ ID NO: 163416 - protein, 7 aa, synthetic construct
QRAKDYV

SEQ ID NO: 163417 - protein, 7 aa, synthetic construct
WVDTKRA

SEQ ID NO: 163418 - protein, 7 aa, synthetic construct
LERNNRM

SEQ ID NO: 163419 - protein, 7 aa, synthetic construct
QDNLRKV

SEQ ID NO: 163420 - protein, 7 aa, synthetic construct
MTHREKS

SEQ ID NO: 163421 - protein, 7 aa, synthetic construct
RPRDHTV

SEQ ID NO: 163422 - protein, 7 aa, synthetic construct
QPEARFK

SEQ ID NO: 163423 - protein, 7 aa, synthetic construct
PQEKAKH

SEQ ID NO: 163424 - protein, 7 aa, synthetic construct
IHGQTRS

SEQ ID NO: 163425 - protein, 7 aa, synthetic construct
PELNKVR

SEQ ID NO: 163426 - protein, 7 aa, synthetic construct
HFKPKLD

SEQ ID NO: 163427 - protein, 7 aa, synthetic construct
ETKQRLL

SEQ ID NO: 163428 - protein, 7 aa, synthetic construct
KSHKMDV

SEQ ID NO: 163429 - protein, 7 aa, synthetic construct
GRKQTQE

SEQ ID NO: 163430 - protein, 7 aa, synthetic construct
MGKREPN

SEQ ID NO: 163431 - protein, 7 aa, synthetic construct
QTRSAKD

SEQ ID NO: 163432 - protein, 7 aa, synthetic construct
AGRIEAK

SEQ ID NO: 163433 - protein, 7 aa, synthetic construct
EQNMKTR

SEQ ID NO: 163434 - protein, 7 aa, synthetic construct
IKRLVPE

SEQ ID NO: 163435 - protein, 7 aa, synthetic construct
PARNKEN

SEQ ID NO: 163436 - protein, 7 aa, synthetic construct
TELVRRS

SEQ ID NO: 163437 - protein, 7 aa, synthetic construct
IQKRADV

SEQ ID NO: 163438 - protein, 7 aa, synthetic construct
TTPESKR

SEQ ID NO: 163439 - protein, 7 aa, synthetic construct
GRRDPQI

SEQ ID NO: 163440 - protein, 7 aa, synthetic construct
ENVKSKL

SEQ ID NO: 163441 - protein, 7 aa, synthetic construct
KGDYQVK

SEQ ID NO: 163442 - protein, 7 aa, synthetic construct
YDDKPKK

SEQ ID NO: 163443 - protein, 7 aa, synthetic construct
ENNQKGK

SEQ ID NO: 163444 - protein, 7 aa, synthetic construct
AKLRNQE

SEQ ID NO: 163445 - protein, 7 aa, synthetic construct
VDKAYRN

SEQ ID NO: 163446 - protein, 7 aa, synthetic construct
MRPRELN

SEQ ID NO: 163447 - protein, 7 aa, synthetic construct
MPRQHAQ

SEQ ID NO: 163448 - protein, 7 aa, synthetic construct
VVRSERA

SEQ ID NO: 163449 - protein, 7 aa, synthetic construct
GSGRDKT

SEQ ID NO: 163450 - protein, 7 aa, synthetic construct
NDQGKIR

SEQ ID NO: 163451 - protein, 7 aa, synthetic construct
FKTVEAR

SEQ ID NO: 163452 - protein, 7 aa, synthetic construct
MSNREKN

SEQ ID NO: 163453 - protein, 7 aa, synthetic construct
LDGTRRM

SEQ ID NO: 163454 - protein, 7 aa, synthetic construct
LKRGIGD

SEQ ID NO: 163455 - protein, 7 aa, synthetic construct
SQNKREQ

SEQ ID NO: 163456 - protein, 7 aa, synthetic construct
KTKAPDV

SEQ ID NO: 163457 - protein, 7 aa, synthetic construct
EVKPMKV

SEQ ID NO: 163458 - protein, 7 aa, synthetic construct
PDGKKQQ

SEQ ID NO: 163459 - protein, 7 aa, synthetic construct
EPRKNSV

SEQ ID NO: 163460 - protein, 7 aa, synthetic construct
KGRTSDP

SEQ ID NO: 163461 - protein, 7 aa, synthetic construct
IKFVNNA

SEQ ID NO: 163462 - protein, 7 aa, synthetic construct
VRSMKNE

SEQ ID NO: 163463 - protein, 7 aa, synthetic construct
EVNKQRF

SEQ ID NO: 163464 - protein, 7 aa, synthetic construct
YVKIMRE

SEQ ID NO: 163465 - protein, 7 aa, synthetic construct
DQIPKKL

SEQ ID NO: 163466 - protein, 7 aa, synthetic construct
RSNLTDK

SEQ ID NO: 163467 - protein, 7 aa, synthetic construct
VSKRETT

SEQ ID NO: 163468 - protein, 7 aa, synthetic construct
VERQIRA

SEQ ID NO: 163469 - protein, 7 aa, synthetic construct
MGRGSSN

SEQ ID NO: 163470 - protein, 7 aa, synthetic construct
ERQKNNT

SEQ ID NO: 163471 - protein, 7 aa, synthetic construct
DRPRTAS

SEQ ID NO: 163472 - protein, 7 aa, synthetic construct
DRRINVG

SEQ ID NO: 163473 - protein, 7 aa, synthetic construct
NDKPRLV

SEQ ID NO: 163474 - protein, 7 aa, synthetic construct
KHDVREK

SEQ ID NO: 163475 - protein, 7 aa, synthetic construct
INDHNKR

SEQ ID NO: 163476 - protein, 7 aa, synthetic construct
LLRNKPD

SEQ ID NO: 163477 - protein, 7 aa, synthetic construct
MEMKLRN

SEQ ID NO: 163478 - protein, 7 aa, synthetic construct
IRKADQF

SEQ ID NO: 163479 - protein, 7 aa, synthetic construct
FADAAKK

SEQ ID NO: 163480 - protein, 7 aa, synthetic construct
KARDHTT

SEQ ID NO: 163481 - protein, 7 aa, synthetic construct
SRPHNNN

SEQ ID NO: 163482 - protein, 7 aa, synthetic construct
FENSRKG

SEQ ID NO: 163483 - protein, 7 aa, synthetic construct
MKKVLDM

SEQ ID NO: 163484 - protein, 7 aa, synthetic construct
VKRVDGA

SEQ ID NO: 163485 - protein, 7 aa, synthetic construct
LAKKQDN

SEQ ID NO: 163486 - protein, 7 aa, synthetic construct
VVKKSDH

SEQ ID NO: 163487 - protein, 7 aa, synthetic construct
IRGQTHG

SEQ ID NO: 163488 - protein, 7 aa, synthetic construct
QLENRRG

SEQ ID NO: 163489 - protein, 7 aa, synthetic construct
QMRKITD

SEQ ID NO: 163490 - protein, 7 aa, synthetic construct
LKHKFEN

SEQ ID NO: 163491 - protein, 7 aa, synthetic construct
VNRQSPA

SEQ ID NO: 163492 - protein, 7 aa, synthetic construct
GVKKNDM

SEQ ID NO: 163493 - protein, 7 aa, synthetic construct
FRGPFKE

SEQ ID NO: 163494 - protein, 7 aa, synthetic construct
REFKNEK

SEQ ID NO: 163495 - protein, 7 aa, synthetic construct
DRPRVNN

SEQ ID NO: 163496 - protein, 7 aa, synthetic construct
ANNRLRE

SEQ ID NO: 163497 - protein, 7 aa, synthetic construct
TGRMSDR

SEQ ID NO: 163498 - protein, 7 aa, synthetic construct
GDNIRTR

SEQ ID NO: 163499 - protein, 7 aa, synthetic construct
AMSKKDL

SEQ ID NO: 163500 - protein, 7 aa, synthetic construct
MKPREYH

SEQ ID NO: 163501 - protein, 7 aa, synthetic construct
GPERASK

SEQ ID NO: 163502 - protein, 7 aa, synthetic construct
IKRQQEG

SEQ ID NO: 163503 - protein, 7 aa, synthetic construct
STRGEGK

SEQ ID NO: 163504 - protein, 7 aa, synthetic construct
IKNKFDN

SEQ ID NO: 163505 - protein, 7 aa, synthetic construct
YAHKKDI

SEQ ID NO: 163506 - protein, 7 aa, synthetic construct
QKYQKDL

SEQ ID NO: 163507 - protein, 7 aa, synthetic construct
ASRTQHG

SEQ ID NO: 163508 - protein, 7 aa, synthetic construct
SPDQRRA

SEQ ID NO: 163509 - protein, 7 aa, synthetic construct
KARSVIE

SEQ ID NO: 163510 - protein, 7 aa, synthetic construct
ETPKVKH

SEQ ID NO: 163511 - protein, 7 aa, synthetic construct
TEIKDKK

SEQ ID NO: 163512 - protein, 7 aa, synthetic construct
HDNIKRQ

SEQ ID NO: 163513 - protein, 7 aa, synthetic construct
SRTTHSS

SEQ ID NO: 163514 - protein, 7 aa, synthetic construct
FRARDVG

SEQ ID NO: 163515 - protein, 7 aa, synthetic construct
AVETKRY

SEQ ID NO: 163516 - protein, 7 aa, synthetic construct
ITNRDRG

SEQ ID NO: 163517 - protein, 7 aa, synthetic construct
SRTRSEV

SEQ ID NO: 163518 - protein, 7 aa, synthetic construct
IRQHKDV

SEQ ID NO: 163519 - protein, 7 aa, synthetic construct
QKFSARE

SEQ ID NO: 163520 - protein, 7 aa, synthetic construct
IGGRHTV

SEQ ID NO: 163521 - protein, 7 aa, synthetic construct
MDRNVKQ

SEQ ID NO: 163522 - protein, 7 aa, synthetic construct
NMNEVKK

SEQ ID NO: 163523 - protein, 7 aa, synthetic construct
YRAKIDQ

SEQ ID NO: 163524 - protein, 7 aa, synthetic construct
DKRHSGV

SEQ ID NO: 163525 - protein, 7 aa, synthetic construct
MDRQNKG

SEQ ID NO: 163526 - protein, 7 aa, synthetic construct
NRNVKHE

SEQ ID NO: 163527 - protein, 7 aa, synthetic construct
ISKRLDN

SEQ ID NO: 163528 - protein, 7 aa, synthetic construct
KVTRIDT

SEQ ID NO: 163529 - protein, 7 aa, synthetic construct
KMLARQD

SEQ ID NO: 163530 - protein, 7 aa, synthetic construct
KRSVAVE

SEQ ID NO: 163531 - protein, 7 aa, synthetic construct
ETTKRTS

SEQ ID NO: 163532 - protein, 7 aa, synthetic construct
KSFNQEK

SEQ ID NO: 163533 - protein, 7 aa, synthetic construct
DTKPKFQ

SEQ ID NO: 163534 - protein, 7 aa, synthetic construct
PEANKIK

SEQ ID NO: 163535 - protein, 7 aa, synthetic construct
TGSKHNQ

SEQ ID NO: 163536 - protein, 7 aa, synthetic construct
QMEKHNK

SEQ ID NO: 163537 - protein, 7 aa, synthetic construct
PERTRVA

SEQ ID NO: 163538 - protein, 7 aa, synthetic construct
VKRTDQM

SEQ ID NO: 163539 - protein, 7 aa, synthetic construct
AEVLRKA

SEQ ID NO: 163540 - protein, 7 aa, synthetic construct
VDTVGRK

SEQ ID NO: 163541 - protein, 7 aa, synthetic construct
ADGSKIR

SEQ ID NO: 163542 - protein, 7 aa, synthetic construct
KGRTLVD

SEQ ID NO: 163543 - protein, 7 aa, synthetic construct
QKFHSTA

SEQ ID NO: 163544 - protein, 7 aa, synthetic construct
KNRSTTE

SEQ ID NO: 163545 - protein, 7 aa, synthetic construct
SDGKKGQ

SEQ ID NO: 163546 - protein, 7 aa, synthetic construct
DGIAKSR

SEQ ID NO: 163547 - protein, 7 aa, synthetic construct
HSKKDSV

SEQ ID NO: 163548 - protein, 7 aa, synthetic construct
AEFKTNK

SEQ ID NO: 163549 - protein, 7 aa, synthetic construct
KQSREYP

SEQ ID NO: 163550 - protein, 7 aa, synthetic construct
SDIGKRT

SEQ ID NO: 163551 - protein, 7 aa, synthetic construct
QETKAKW

SEQ ID NO: 163552 - protein, 7 aa, synthetic construct
YKVRADN

SEQ ID NO: 163553 - protein, 7 aa, synthetic construct
QTRVKHE

SEQ ID NO: 163554 - protein, 7 aa, synthetic construct
KMSRGEL

SEQ ID NO: 163555 - protein, 7 aa, synthetic construct
SEAKGRS

SEQ ID NO: 163556 - protein, 7 aa, synthetic construct
KERNQRD

SEQ ID NO: 163557 - protein, 7 aa, synthetic construct
VPGYSKS

SEQ ID NO: 163558 - protein, 7 aa, synthetic construct
FKRDKDQ

SEQ ID NO: 163559 - protein, 7 aa, synthetic construct
GDIRQKF

SEQ ID NO: 163560 - protein, 7 aa, synthetic construct
RLSPREI

SEQ ID NO: 163561 - protein, 7 aa, synthetic construct
QGRNLPG

SEQ ID NO: 163562 - protein, 7 aa, synthetic construct
DRQPKAQ

SEQ ID NO: 163563 - protein, 7 aa, synthetic construct
DQRKAIQ

SEQ ID NO: 163564 - protein, 7 aa, synthetic construct
GKRLQEI

SEQ ID NO: 163565 - protein, 7 aa, synthetic construct
RQPAHEK

SEQ ID NO: 163566 - protein, 7 aa, synthetic construct
DQQPARK

SEQ ID NO: 163567 - protein, 7 aa, synthetic construct
FKGEINR

SEQ ID NO: 163568 - protein, 7 aa, synthetic construct
RVRDHSV

SEQ ID NO: 163569 - protein, 7 aa, synthetic construct
HIDKRDR

SEQ ID NO: 163570 - protein, 7 aa, synthetic construct
HDVKPQR

SEQ ID NO: 163571 - protein, 7 aa, synthetic construct
VEATRMK

SEQ ID NO: 163572 - protein, 7 aa, synthetic construct
LERVVRG

SEQ ID NO: 163573 - protein, 7 aa, synthetic construct
DSRTRSV

SEQ ID NO: 163574 - protein, 7 aa, synthetic construct
AISRSER

SEQ ID NO: 163575 - protein, 7 aa, synthetic construct
PDIPIKK

SEQ ID NO: 163576 - protein, 7 aa, synthetic construct
DQNVRRA

SEQ ID NO: 163577 - protein, 7 aa, synthetic construct
EPQKRAN

SEQ ID NO: 163578 - protein, 7 aa, synthetic construct
PEKRSVN

SEQ ID NO: 163579 - protein, 7 aa, synthetic construct
TGHRQVN

SEQ ID NO: 163580 - protein, 7 aa, synthetic construct
DRQIGSK

SEQ ID NO: 163581 - protein, 7 aa, synthetic construct
NRSNQDK

SEQ ID NO: 163582 - protein, 7 aa, synthetic construct
SRTHKLE

SEQ ID NO: 163583 - protein, 7 aa, synthetic construct
GSVNDRK

SEQ ID NO: 163584 - protein, 7 aa, synthetic construct
DHVKKYI

SEQ ID NO: 163585 - protein, 7 aa, synthetic construct
VHNPRAN

SEQ ID NO: 163586 - protein, 7 aa, synthetic construct
SDGRVKY

SEQ ID NO: 163587 - protein, 7 aa, synthetic construct
AKMRDAQ

SEQ ID NO: 163588 - protein, 7 aa, synthetic construct
EGRMKTV

SEQ ID NO: 163589 - protein, 7 aa, synthetic construct
KHRDTTV

SEQ ID NO: 163590 - protein, 7 aa, synthetic construct
KATRQET

SEQ ID NO: 163591 - protein, 7 aa, synthetic construct
IPGHYKQ

SEQ ID NO: 163592 - protein, 7 aa, synthetic construct
QKAKDHF

SEQ ID NO: 163593 - protein, 7 aa, synthetic construct
RNRGEGV

SEQ ID NO: 163594 - protein, 7 aa, synthetic construct
NQKHDRN

SEQ ID NO: 163595 - protein, 7 aa, synthetic construct
GTTRREQ

SEQ ID NO: 163596 - protein, 7 aa, synthetic construct
TSRQIKE

SEQ ID NO: 163597 - protein, 7 aa, synthetic construct
QTRPREV

SEQ ID NO: 163598 - protein, 7 aa, synthetic construct
IFKEHRG

SEQ ID NO: 163599 - protein, 7 aa, synthetic construct
ERTITRG

SEQ ID NO: 163600 - protein, 7 aa, synthetic construct
DIMNRAR

SEQ ID NO: 163601 - protein, 7 aa, synthetic construct
IMKRDSQ

SEQ ID NO: 163602 - protein, 7 aa, synthetic construct
QAELTKK

SEQ ID NO: 163603 - protein, 7 aa, synthetic construct
ATDRRGS

SEQ ID NO: 163604 - protein, 7 aa, synthetic construct
YDKGSHK

SEQ ID NO: 163605 - protein, 7 aa, synthetic construct
NMINDKK

SEQ ID NO: 163606 - protein, 7 aa, synthetic construct
EKMPHRM

SEQ ID NO: 163607 - protein, 7 aa, synthetic construct
LRKTFEG

SEQ ID NO: 163608 - protein, 7 aa, synthetic construct
KRHDALV

SEQ ID NO: 163609 - protein, 7 aa, synthetic construct
MPKHRDT

SEQ ID NO: 163610 - protein, 7 aa, synthetic construct
MLPGERK

SEQ ID NO: 163611 - protein, 7 aa, synthetic construct
HRGPFKE

SEQ ID NO: 163612 - protein, 7 aa, synthetic construct
HTARENK

SEQ ID NO: 163613 - protein, 7 aa, synthetic construct
ARAHKEV

SEQ ID NO: 163614 - protein, 7 aa, synthetic construct
KKYQLVD

SEQ ID NO: 163615 - protein, 7 aa, synthetic construct
DRKVDKH

SEQ ID NO: 163616 - protein, 7 aa, synthetic construct
TMEIRRS

SEQ ID NO: 163617 - protein, 7 aa, synthetic construct
VHTRETK

SEQ ID NO: 163618 - protein, 7 aa, synthetic construct
MKKHAPE

SEQ ID NO: 163619 - protein, 7 aa, synthetic construct
KARNSDI

SEQ ID NO: 163620 - protein, 7 aa, synthetic construct
FGKNERN

SEQ ID NO: 163621 - protein, 7 aa, synthetic construct
MKQYTQP

SEQ ID NO: 163622 - protein, 7 aa, synthetic construct
TQENRRP

SEQ ID NO: 163623 - protein, 7 aa, synthetic construct
AKMRDFS

SEQ ID NO: 163624 - protein, 7 aa, synthetic construct
VERVQRT

SEQ ID NO: 163625 - protein, 7 aa, synthetic construct
GDHKQKL

SEQ ID NO: 163626 - protein, 7 aa, synthetic construct
DKGLPKW

SEQ ID NO: 163627 - protein, 7 aa, synthetic construct
TEIRVTK

SEQ ID NO: 163628 - protein, 7 aa, synthetic construct
PDTPKFR

SEQ ID NO: 163629 - protein, 7 aa, synthetic construct
IVHQNKA

SEQ ID NO: 163630 - protein, 7 aa, synthetic construct
AENKRQA

SEQ ID NO: 163631 - protein, 7 aa, synthetic construct
HFKVNEK

SEQ ID NO: 163632 - protein, 7 aa, synthetic construct
PEKAHRS

SEQ ID NO: 163633 - protein, 7 aa, synthetic construct
PAKARDQ

SEQ ID NO: 163634 - protein, 7 aa, synthetic construct
TMDTRKS

SEQ ID NO: 163635 - protein, 7 aa, synthetic construct
KEHAIRM

SEQ ID NO: 163636 - protein, 7 aa, synthetic construct
RPHPKVD

SEQ ID NO: 163637 - protein, 7 aa, synthetic construct
QIKPRDF

SEQ ID NO: 163638 - protein, 7 aa, synthetic construct
GEIKLRG

SEQ ID NO: 163639 - protein, 7 aa, synthetic construct
ALERSSK

SEQ ID NO: 163640 - protein, 7 aa, synthetic construct
HKRDPPV

SEQ ID NO: 163641 - protein, 7 aa, synthetic construct
NSSTERR

SEQ ID NO: 163642 - protein, 7 aa, synthetic construct
VAPESKR

SEQ ID NO: 163643 - protein, 7 aa, synthetic construct
YFGSMKN

SEQ ID NO: 163644 - protein, 7 aa, synthetic construct
KVSRGDL

SEQ ID NO: 163645 - protein, 7 aa, synthetic construct
NQDGKYR

SEQ ID NO: 163646 - protein, 7 aa, synthetic construct
IARKQDP

SEQ ID NO: 163647 - protein, 7 aa, synthetic construct
MDRDVRK

SEQ ID NO: 163648 - protein, 7 aa, synthetic construct
NKRDHTI

SEQ ID NO: 163649 - protein, 7 aa, synthetic construct
KSRMAEV

SEQ ID NO: 163650 - protein, 7 aa, synthetic construct
FKRDMSI

SEQ ID NO: 163651 - protein, 7 aa, synthetic construct
VEVRPKQ

SEQ ID NO: 163652 - protein, 7 aa, synthetic construct
DVMRNKL

SEQ ID NO: 163653 - protein, 7 aa, synthetic construct
EARAPMK

SEQ ID NO: 163654 - protein, 7 aa, synthetic construct
NDNTKKH

SEQ ID NO: 163655 - protein, 7 aa, synthetic construct
KRGIVVD

SEQ ID NO: 163656 - protein, 7 aa, synthetic construct
MKRLDQN

SEQ ID NO: 163657 - protein, 7 aa, synthetic construct
QEQKQKH

SEQ ID NO: 163658 - protein, 7 aa, synthetic construct
VKRNDPP

SEQ ID NO: 163659 - protein, 7 aa, synthetic construct
DANPKYK

SEQ ID NO: 163660 - protein, 7 aa, synthetic construct
QEKRGLM

SEQ ID NO: 163661 - protein, 7 aa, synthetic construct
ITTHRYG

SEQ ID NO: 163662 - protein, 7 aa, synthetic construct
KNKPDPV

SEQ ID NO: 163663 - protein, 7 aa, synthetic construct
EKKVDKH

SEQ ID NO: 163664 - protein, 7 aa, synthetic construct
SQDVKHR

SEQ ID NO: 163665 - protein, 7 aa, synthetic construct
AIRNKQE

SEQ ID NO: 163666 - protein, 7 aa, synthetic construct
KDRRQEV

SEQ ID NO: 163667 - protein, 7 aa, synthetic construct
MNELVKK

SEQ ID NO: 163668 - protein, 7 aa, synthetic construct
YHGNAAK

SEQ ID NO: 163669 - protein, 7 aa, synthetic construct
TMKNERY

SEQ ID NO: 163670 - protein, 7 aa, synthetic construct
HTRGEKI

SEQ ID NO: 163671 - protein, 7 aa, synthetic construct
VYVKDRG

SEQ ID NO: 163672 - protein, 7 aa, synthetic construct
RTRDVSQ

SEQ ID NO: 163673 - protein, 7 aa, synthetic construct
APKEERR

SEQ ID NO: 163674 - protein, 7 aa, synthetic construct
ETHKTSR

SEQ ID NO: 163675 - protein, 7 aa, synthetic construct
RETRLSN

SEQ ID NO: 163676 - protein, 7 aa, synthetic construct
DAKPKVQ

SEQ ID NO: 163677 - protein, 7 aa, synthetic construct
GLGDTRK

SEQ ID NO: 163678 - protein, 7 aa, synthetic construct
YKVREPN

SEQ ID NO: 163679 - protein, 7 aa, synthetic construct
AMERRGA

SEQ ID NO: 163680 - protein, 7 aa, synthetic construct
FTGRKDN

SEQ ID NO: 163681 - protein, 7 aa, synthetic construct
NKQYEPR

SEQ ID NO: 163682 - protein, 7 aa, synthetic construct
RTMPKEY

SEQ ID NO: 163683 - protein, 7 aa, synthetic construct
QTRGREI

SEQ ID NO: 163684 - protein, 7 aa, synthetic construct
PLQKRDQ

SEQ ID NO: 163685 - protein, 7 aa, synthetic construct
NPEKFAR

SEQ ID NO: 163686 - protein, 7 aa, synthetic construct
YDTGKGR

SEQ ID NO: 163687 - protein, 7 aa, synthetic construct
YDAPRQR

SEQ ID NO: 163688 - protein, 7 aa, synthetic construct
IDRRDKV

SEQ ID NO: 163689 - protein, 7 aa, synthetic construct
RSTKENY

SEQ ID NO: 163690 - protein, 7 aa, synthetic construct
YDPTAKR

SEQ ID NO: 163691 - protein, 7 aa, synthetic construct
TSGGGHR

SEQ ID NO: 163692 - protein, 7 aa, synthetic construct
PPMRKSE

SEQ ID NO: 163693 - protein, 7 aa, synthetic construct
QVKHRTE

SEQ ID NO: 163694 - protein, 7 aa, synthetic construct
LKPMMKN

SEQ ID NO: 163695 - protein, 7 aa, synthetic construct
KRNDQGQ

SEQ ID NO: 163696 - protein, 7 aa, synthetic construct
NTDGSRK

SEQ ID NO: 163697 - protein, 7 aa, synthetic construct
VQERLRM

SEQ ID NO: 163698 - protein, 7 aa, synthetic construct
TEIRARN

SEQ ID NO: 163699 - protein, 7 aa, synthetic construct
RQKQDYT

SEQ ID NO: 163700 - protein, 7 aa, synthetic construct
QKSRDLM

SEQ ID NO: 163701 - protein, 7 aa, synthetic construct
IGRTNHA

SEQ ID NO: 163702 - protein, 7 aa, synthetic construct
GVTRLER

SEQ ID NO: 163703 - protein, 7 aa, synthetic construct
LRKGDIM

SEQ ID NO: 163704 - protein, 7 aa, synthetic construct
VAHQVRG

SEQ ID NO: 163705 - protein, 7 aa, synthetic construct
YSGNHVR

SEQ ID NO: 163706 - protein, 7 aa, synthetic construct
DGAAIKR

SEQ ID NO: 163707 - protein, 7 aa, synthetic construct
SKRFTGE

SEQ ID NO: 163708 - protein, 7 aa, synthetic construct
LGRGSSS

SEQ ID NO: 163709 - protein, 7 aa, synthetic construct
VTRSDKQ

SEQ ID NO: 163710 - protein, 7 aa, synthetic construct
KTMPRVD

SEQ ID NO: 163711 - protein, 7 aa, synthetic construct
KSRMVDS

SEQ ID NO: 163712 - protein, 7 aa, synthetic construct
DGITKNR

SEQ ID NO: 163713 - protein, 7 aa, synthetic construct
DGKRSTI

SEQ ID NO: 163714 - protein, 7 aa, synthetic construct
GRHTKDV

SEQ ID NO: 163715 - protein, 7 aa, synthetic construct
SSRVKNE

SEQ ID NO: 163716 - protein, 7 aa, synthetic construct
TMTDRRN

SEQ ID NO: 163717 - protein, 7 aa, synthetic construct
PETTKTR

SEQ ID NO: 163718 - protein, 7 aa, synthetic construct
RAHVKDN

SEQ ID NO: 163719 - protein, 7 aa, synthetic construct
VHRPSTA

SEQ ID NO: 163720 - protein, 7 aa, synthetic construct
NRKQEGH

SEQ ID NO: 163721 - protein, 7 aa, synthetic construct
VEGNKVR

SEQ ID NO: 163722 - protein, 7 aa, synthetic construct
RDDRRSP

SEQ ID NO: 163723 - protein, 7 aa, synthetic construct
KGRGDVA

SEQ ID NO: 163724 - protein, 7 aa, synthetic construct
SDYKIRA

SEQ ID NO: 163725 - protein, 7 aa, synthetic construct
SSGKKDH

SEQ ID NO: 163726 - protein, 7 aa, synthetic construct
DYRPKSV

SEQ ID NO: 163727 - protein, 7 aa, synthetic construct
IEARTKY

SEQ ID NO: 163728 - protein, 7 aa, synthetic construct
DGSKQAK

SEQ ID NO: 163729 - protein, 7 aa, synthetic construct
HTKSKGD

SEQ ID NO: 163730 - protein, 7 aa, synthetic construct
STSRGER

SEQ ID NO: 163731 - protein, 7 aa, synthetic construct
KHRDTTN

SEQ ID NO: 163732 - protein, 7 aa, synthetic construct
DGKLRYS

SEQ ID NO: 163733 - protein, 7 aa, synthetic construct
LETRKIL

SEQ ID NO: 163734 - protein, 7 aa, synthetic construct
YTRTKDS

SEQ ID NO: 163735 - protein, 7 aa, synthetic construct
NTRASER

SEQ ID NO: 163736 - protein, 7 aa, synthetic construct
DPAGLRK

SEQ ID NO: 163737 - protein, 7 aa, synthetic construct
SKGSHVY

SEQ ID NO: 163738 - protein, 7 aa, synthetic construct
MKRTEMA

SEQ ID NO: 163739 - protein, 7 aa, synthetic construct
LERNSRL

SEQ ID NO: 163740 - protein, 7 aa, synthetic construct
TRSAHGN

SEQ ID NO: 163741 - protein, 7 aa, synthetic construct
TEGIRKA

SEQ ID NO: 163742 - protein, 7 aa, synthetic construct
EKHAKYV

SEQ ID NO: 163743 - protein, 7 aa, synthetic construct
KHVRLVE

SEQ ID NO: 163744 - protein, 7 aa, synthetic construct
TGKLYHA

SEQ ID NO: 163745 - protein, 7 aa, synthetic construct
MMDRRHP

SEQ ID NO: 163746 - protein, 7 aa, synthetic construct
VRAKDLL

SEQ ID NO: 163747 - protein, 7 aa, synthetic construct
GDNMRTK

SEQ ID NO: 163748 - protein, 7 aa, synthetic construct
NVSELKR

SEQ ID NO: 163749 - protein, 7 aa, synthetic construct
NIRIHKE

SEQ ID NO: 163750 - protein, 7 aa, synthetic construct
SKAYGRD

SEQ ID NO: 163751 - protein, 7 aa, synthetic construct
FRLKQIE

SEQ ID NO: 163752 - protein, 7 aa, synthetic construct
VHRPASA

SEQ ID NO: 163753 - protein, 7 aa, synthetic construct
TQAYHKP

SEQ ID NO: 163754 - protein, 7 aa, synthetic construct
TTRKSDV

SEQ ID NO: 163755 - protein, 7 aa, synthetic construct
KKYIVSE

SEQ ID NO: 163756 - protein, 7 aa, synthetic construct
QRKQEMV

SEQ ID NO: 163757 - protein, 7 aa, synthetic construct
NAETRMK

SEQ ID NO: 163758 - protein, 7 aa, synthetic construct
MPKRVDY

SEQ ID NO: 163759 - protein, 7 aa, synthetic construct
STRESPR

SEQ ID NO: 163760 - protein, 7 aa, synthetic construct
LIGISRQ

SEQ ID NO: 163761 - protein, 7 aa, synthetic construct
EPTNKTR

SEQ ID NO: 163762 - protein, 7 aa, synthetic construct
RSRETHV

SEQ ID NO: 163763 - protein, 7 aa, synthetic construct
GKKYIDS

SEQ ID NO: 163764 - protein, 7 aa, synthetic construct
SENMKLR

SEQ ID NO: 163765 - protein, 7 aa, synthetic construct
DVNRNKQ

SEQ ID NO: 163766 - protein, 7 aa, synthetic construct
QITRNSG

SEQ ID NO: 163767 - protein, 7 aa, synthetic construct
LMHPKSM

SEQ ID NO: 163768 - protein, 7 aa, synthetic construct
VKKYQDG

SEQ ID NO: 163769 - protein, 7 aa, synthetic construct
IVGASRA

SEQ ID NO: 163770 - protein, 7 aa, synthetic construct
LHGVSTR

SEQ ID NO: 163771 - protein, 7 aa, synthetic construct
RKQMEDK

SEQ ID NO: 163772 - protein, 7 aa, synthetic construct
TMDNSKK

SEQ ID NO: 163773 - protein, 7 aa, synthetic construct
RSDISPR

SEQ ID NO: 163774 - protein, 7 aa, synthetic construct
SEIKLKM

SEQ ID NO: 163775 - protein, 7 aa, synthetic construct
SSGHVRA

SEQ ID NO: 163776 - protein, 7 aa, synthetic construct
NEEKPKK

SEQ ID NO: 163777 - protein, 7 aa, synthetic construct
GRAAHSS

SEQ ID NO: 163778 - protein, 7 aa, synthetic construct
MTKKHDS

SEQ ID NO: 163779 - protein, 7 aa, synthetic construct
FDARNRA

SEQ ID NO: 163780 - protein, 7 aa, synthetic construct
MELKRNM

SEQ ID NO: 163781 - protein, 7 aa, synthetic construct
RVAHRGE

SEQ ID NO: 163782 - protein, 7 aa, synthetic construct
SHNKSKE

SEQ ID NO: 163783 - protein, 7 aa, synthetic construct
TDQMRRA

SEQ ID NO: 163784 - protein, 7 aa, synthetic construct
RVNKSVD

SEQ ID NO: 163785 - protein, 7 aa, synthetic construct
NAVEGKR

SEQ ID NO: 163786 - protein, 7 aa, synthetic construct
PSEMKIR

SEQ ID NO: 163787 - protein, 7 aa, synthetic construct
LDHTKYK

SEQ ID NO: 163788 - protein, 7 aa, synthetic construct
KIDRDTR

SEQ ID NO: 163789 - protein, 7 aa, synthetic construct
VPYTAKG

SEQ ID NO: 163790 - protein, 7 aa, synthetic construct
NRTKASE

SEQ ID NO: 163791 - protein, 7 aa, synthetic construct
KGHKFDP

SEQ ID NO: 163792 - protein, 7 aa, synthetic construct
DRPRASV

SEQ ID NO: 163793 - protein, 7 aa, synthetic construct
GKRMESV

SEQ ID NO: 163794 - protein, 7 aa, synthetic construct
GGENRLK

SEQ ID NO: 163795 - protein, 7 aa, synthetic construct
KERPYST

SEQ ID NO: 163796 - protein, 7 aa, synthetic construct
DVRNAKM

SEQ ID NO: 163797 - protein, 7 aa, synthetic construct
IGVENRK

SEQ ID NO: 163798 - protein, 7 aa, synthetic construct
MDIPIKK

SEQ ID NO: 163799 - protein, 7 aa, synthetic construct
NRTAHKD

SEQ ID NO: 163800 - protein, 7 aa, synthetic construct
FGRKEIS

SEQ ID NO: 163801 - protein, 7 aa, synthetic construct
IIERVRQ

SEQ ID NO: 163802 - protein, 7 aa, synthetic construct
NPDHKFK

SEQ ID NO: 163803 - protein, 7 aa, synthetic construct
ESAQKTK

SEQ ID NO: 163804 - protein, 7 aa, synthetic construct
GVRKMNE

SEQ ID NO: 163805 - protein, 7 aa, synthetic construct
VSKRMDG

SEQ ID NO: 163806 - protein, 7 aa, synthetic construct
KVYKDDK

SEQ ID NO: 163807 - protein, 7 aa, synthetic construct
DKKFRDA

SEQ ID NO: 163808 - protein, 7 aa, synthetic construct
EKPNRII

SEQ ID NO: 163809 - protein, 7 aa, synthetic construct
GHTRERP

SEQ ID NO: 163810 - protein, 7 aa, synthetic construct
TQKRMEQ

SEQ ID NO: 163811 - protein, 7 aa, synthetic construct
RETRGIN

SEQ ID NO: 163812 - protein, 7 aa, synthetic construct
GDVKKSH

SEQ ID NO: 163813 - protein, 7 aa, synthetic construct
GGDVRRG

SEQ ID NO: 163814 - protein, 7 aa, synthetic construct
TQGHRSQ

SEQ ID NO: 163815 - protein, 7 aa, synthetic construct
RQAREIL

SEQ ID NO: 163816 - protein, 7 aa, synthetic construct
MSKYMAN

SEQ ID NO: 163817 - protein, 7 aa, synthetic construct
KARDHQQ

SEQ ID NO: 163818 - protein, 7 aa, synthetic construct
LARNREI

SEQ ID NO: 163819 - protein, 7 aa, synthetic construct
TDRKMDK

SEQ ID NO: 163820 - protein, 7 aa, synthetic construct
MRVNREV

SEQ ID NO: 163821 - protein, 7 aa, synthetic construct
LRKLEHS

SEQ ID NO: 163822 - protein, 7 aa, synthetic construct
KSRTSDM

SEQ ID NO: 163823 - protein, 7 aa, synthetic construct
KARGENN

SEQ ID NO: 163824 - protein, 7 aa, synthetic construct
IMTEVKR

SEQ ID NO: 163825 - protein, 7 aa, synthetic construct
ARTLKSD

SEQ ID NO: 163826 - protein, 7 aa, synthetic construct
RRNEVIS

SEQ ID NO: 163827 - protein, 7 aa, synthetic construct
KARTDGH

SEQ ID NO: 163828 - protein, 7 aa, synthetic construct
NDALRRG

SEQ ID NO: 163829 - protein, 7 aa, synthetic construct
AIHKRES

SEQ ID NO: 163830 - protein, 7 aa, synthetic construct
KVRGENQ

SEQ ID NO: 163831 - protein, 7 aa, synthetic construct
WLKNYKE

SEQ ID NO: 163832 - protein, 7 aa, synthetic construct
GHKKEFQ

SEQ ID NO: 163833 - protein, 7 aa, synthetic construct
IETKARH

SEQ ID NO: 163834 - protein, 7 aa, synthetic construct
SAELRTK

SEQ ID NO: 163835 - protein, 7 aa, synthetic construct
TEARLSK

SEQ ID NO: 163836 - protein, 7 aa, synthetic construct
KQIPREM

SEQ ID NO: 163837 - protein, 7 aa, synthetic construct
KRLLQAE

SEQ ID NO: 163838 - protein, 7 aa, synthetic construct
VYGSSRA

SEQ ID NO: 163839 - protein, 7 aa, synthetic construct
LKQKFHD

SEQ ID NO: 163840 - protein, 7 aa, synthetic construct
EVRQKSI

SEQ ID NO: 163841 - protein, 7 aa, synthetic construct
VIGNDRR

SEQ ID NO: 163842 - protein, 7 aa, synthetic construct
LSPEARK

SEQ ID NO: 163843 - protein, 7 aa, synthetic construct
DGNKSKQ

SEQ ID NO: 163844 - protein, 7 aa, synthetic construct
ESRMIKS

SEQ ID NO: 163845 - protein, 7 aa, synthetic construct
NDTRMKM

SEQ ID NO: 163846 - protein, 7 aa, synthetic construct
QGRNSIS

SEQ ID NO: 163847 - protein, 7 aa, synthetic construct
FRPTRDI

SEQ ID NO: 163848 - protein, 7 aa, synthetic construct
LGRHIQG

SEQ ID NO: 163849 - protein, 7 aa, synthetic construct
MPGHARS

SEQ ID NO: 163850 - protein, 7 aa, synthetic construct
PTEIKRV

SEQ ID NO: 163851 - protein, 7 aa, synthetic construct
VRSKDAQ

SEQ ID NO: 163852 - protein, 7 aa, synthetic construct
VVGHLRA

SEQ ID NO: 163853 - protein, 7 aa, synthetic construct
GEPKAKQ

SEQ ID NO: 163854 - protein, 7 aa, synthetic construct
MRSRDMG

SEQ ID NO: 163855 - protein, 7 aa, synthetic construct
YVGMHKQ

SEQ ID NO: 163856 - protein, 7 aa, synthetic construct
NRGTRDN

SEQ ID NO: 163857 - protein, 7 aa, synthetic construct
QQDNKRA

SEQ ID NO: 163858 - protein, 7 aa, synthetic construct
NRREVIQ

SEQ ID NO: 163859 - protein, 7 aa, synthetic construct
APERVKL

SEQ ID NO: 163860 - protein, 7 aa, synthetic construct
IPHQMKH

SEQ ID NO: 163861 - protein, 7 aa, synthetic construct
ENLKLRV

SEQ ID NO: 163862 - protein, 7 aa, synthetic construct
RRGDNII

SEQ ID NO: 163863 - protein, 7 aa, synthetic construct
TMKRDMH

SEQ ID NO: 163864 - protein, 7 aa, synthetic construct
RQVRTET

SEQ ID NO: 163865 - protein, 7 aa, synthetic construct
QMHPKTL

SEQ ID NO: 163866 - protein, 7 aa, synthetic construct
VPHVSRA

SEQ ID NO: 163867 - protein, 7 aa, synthetic construct
MNKYEPR

SEQ ID NO: 163868 - protein, 7 aa, synthetic construct
TEKQIRN

SEQ ID NO: 163869 - protein, 7 aa, synthetic construct
FDKPRHA

SEQ ID NO: 163870 - protein, 7 aa, synthetic construct
DYTKIKL

SEQ ID NO: 163871 - protein, 7 aa, synthetic construct
IGSGHRS

SEQ ID NO: 163872 - protein, 7 aa, synthetic construct
IQRGDKL

SEQ ID NO: 163873 - protein, 7 aa, synthetic construct
TNNELRK

SEQ ID NO: 163874 - protein, 7 aa, synthetic construct
ARHATKE

SEQ ID NO: 163875 - protein, 7 aa, synthetic construct
GKPKDYH

SEQ ID NO: 163876 - protein, 7 aa, synthetic construct
RMTPRDN

SEQ ID NO: 163877 - protein, 7 aa, synthetic construct
VSTRRDG

SEQ ID NO: 163878 - protein, 7 aa, synthetic construct
DGLKQKH

SEQ ID NO: 163879 - protein, 7 aa, synthetic construct
KTRDHGT

SEQ ID NO: 163880 - protein, 7 aa, synthetic construct
GSREVPR

SEQ ID NO: 163881 - protein, 7 aa, synthetic construct
RAGNEPR

SEQ ID NO: 163882 - protein, 7 aa, synthetic construct
MPGLHKA

SEQ ID NO: 163883 - protein, 7 aa, synthetic construct
GYDASKK

SEQ ID NO: 163884 - protein, 7 aa, synthetic construct
FTRNEAK

SEQ ID NO: 163885 - protein, 7 aa, synthetic construct
DHKANAR

SEQ ID NO: 163886 - protein, 7 aa, synthetic construct
NPVPRHQ

SEQ ID NO: 163887 - protein, 7 aa, synthetic construct
TEINKRV

SEQ ID NO: 163888 - protein, 7 aa, synthetic construct
FEPKPTK

SEQ ID NO: 163889 - protein, 7 aa, synthetic construct
LTDRRSQ

SEQ ID NO: 163890 - protein, 7 aa, synthetic construct
TYEQKNK

SEQ ID NO: 163891 - protein, 7 aa, synthetic construct
PLKHRDS

SEQ ID NO: 163892 - protein, 7 aa, synthetic construct
AQNRKDL

SEQ ID NO: 163893 - protein, 7 aa, synthetic construct
TARNKSE

SEQ ID NO: 163894 - protein, 7 aa, synthetic construct
VYHKVKE

SEQ ID NO: 163895 - protein, 7 aa, synthetic construct
HDNSIKR

SEQ ID NO: 163896 - protein, 7 aa, synthetic construct
KPMHRSE

SEQ ID NO: 163897 - protein, 7 aa, synthetic construct
RKPIGHD

SEQ ID NO: 163898 - protein, 7 aa, synthetic construct
ASRIKQE

SEQ ID NO: 163899 - protein, 7 aa, synthetic construct
SAGHSKA

SEQ ID NO: 163900 - protein, 7 aa, synthetic construct
TVGHRNN

SEQ ID NO: 163901 - protein, 7 aa, synthetic construct
YINRMVG

SEQ ID NO: 163902 - protein, 7 aa, synthetic construct
VRRTGDP

SEQ ID NO: 163903 - protein, 7 aa, synthetic construct
QYGKRDV

SEQ ID NO: 163904 - protein, 7 aa, synthetic construct
PLDMKGR

SEQ ID NO: 163905 - protein, 7 aa, synthetic construct
NDQRVKS

SEQ ID NO: 163906 - protein, 7 aa, synthetic construct
GPGRERA

SEQ ID NO: 163907 - protein, 7 aa, synthetic construct
STKKSDH

SEQ ID NO: 163908 - protein, 7 aa, synthetic construct
GDNVKSK

SEQ ID NO: 163909 - protein, 7 aa, synthetic construct
EKPDRGR

SEQ ID NO: 163910 - protein, 7 aa, synthetic construct
GESRIKP

SEQ ID NO: 163911 - protein, 7 aa, synthetic construct
MVKQMPY

SEQ ID NO: 163912 - protein, 7 aa, synthetic construct
QKVRGDY

SEQ ID NO: 163913 - protein, 7 aa, synthetic construct
AKMRVID

SEQ ID NO: 163914 - protein, 7 aa, synthetic construct
ILPKVKN

SEQ ID NO: 163915 - protein, 7 aa, synthetic construct
PDMKRAQ

SEQ ID NO: 163916 - protein, 7 aa, synthetic construct
KPRTPNE

SEQ ID NO: 163917 - protein, 7 aa, synthetic construct
DANRNNK

SEQ ID NO: 163918 - protein, 7 aa, synthetic construct
HSGPRMS

SEQ ID NO: 163919 - protein, 7 aa, synthetic construct
FSRKMDS

SEQ ID NO: 163920 - protein, 7 aa, synthetic construct
EVKPAVR

SEQ ID NO: 163921 - protein, 7 aa, synthetic construct
KRDHTMY

SEQ ID NO: 163922 - protein, 7 aa, synthetic construct
KMRGDNL

SEQ ID NO: 163923 - protein, 7 aa, synthetic construct
GKQKFSE

SEQ ID NO: 163924 - protein, 7 aa, synthetic construct
EPTAMKR

SEQ ID NO: 163925 - protein, 7 aa, synthetic construct
LKKHDFS

SEQ ID NO: 163926 - protein, 7 aa, synthetic construct
KAKADHY

SEQ ID NO: 163927 - protein, 7 aa, synthetic construct
IDKSYKY

SEQ ID NO: 163928 - protein, 7 aa, synthetic construct
SKRTDMS

SEQ ID NO: 163929 - protein, 7 aa, synthetic construct
MGRREIP

SEQ ID NO: 163930 - protein, 7 aa, synthetic construct
QHAGQRA

SEQ ID NO: 163931 - protein, 7 aa, synthetic construct
KLDYMPK

SEQ ID NO: 163932 - protein, 7 aa, synthetic construct
GDRPATK

SEQ ID NO: 163933 - protein, 7 aa, synthetic construct
NEHIKRP

SEQ ID NO: 163934 - protein, 7 aa, synthetic construct
RNVRDQI

SEQ ID NO: 163935 - protein, 7 aa, synthetic construct
PLMTKRD

SEQ ID NO: 163936 - protein, 7 aa, synthetic construct
PEKRGNF

SEQ ID NO: 163937 - protein, 7 aa, synthetic construct
KIRNLQE

SEQ ID NO: 163938 - protein, 7 aa, synthetic construct
MVGHTRS

SEQ ID NO: 163939 - protein, 7 aa, synthetic construct
KYDKHQI

SEQ ID NO: 163940 - protein, 7 aa, synthetic construct
FVKLKDL

SEQ ID NO: 163941 - protein, 7 aa, synthetic construct
NMDKAKW

SEQ ID NO: 163942 - protein, 7 aa, synthetic construct
VQRTAER

SEQ ID NO: 163943 - protein, 7 aa, synthetic construct
GYDRGKS

SEQ ID NO: 163944 - protein, 7 aa, synthetic construct
IDRNYKS

SEQ ID NO: 163945 - protein, 7 aa, synthetic construct
DKRVHAG

SEQ ID NO: 163946 - protein, 7 aa, synthetic construct
EMKQRGQ

SEQ ID NO: 163947 - protein, 7 aa, synthetic construct
SDVKTKW

SEQ ID NO: 163948 - protein, 7 aa, synthetic construct
NTKVHDR

SEQ ID NO: 163949 - protein, 7 aa, synthetic construct
KARTLDN

SEQ ID NO: 163950 - protein, 7 aa, synthetic construct
TRVQLER

SEQ ID NO: 163951 - protein, 7 aa, synthetic construct
QKRGDMV

SEQ ID NO: 163952 - protein, 7 aa, synthetic construct
VKAYTHS

SEQ ID NO: 163953 - protein, 7 aa, synthetic construct
KEIPRSY

SEQ ID NO: 163954 - protein, 7 aa, synthetic construct
MRPRMEI

SEQ ID NO: 163955 - protein, 7 aa, synthetic construct
HARGERV

SEQ ID NO: 163956 - protein, 7 aa, synthetic construct
MKKHDLL

SEQ ID NO: 163957 - protein, 7 aa, synthetic construct
QNSKREQ

SEQ ID NO: 163958 - protein, 7 aa, synthetic construct
IEKRERG

SEQ ID NO: 163959 - protein, 7 aa, synthetic construct
MGRPHTN

SEQ ID NO: 163960 - protein, 7 aa, synthetic construct
YIQKRDQ

SEQ ID NO: 163961 - protein, 7 aa, synthetic construct
DIGPKTK

SEQ ID NO: 163962 - protein, 7 aa, synthetic construct
DGHKTKV

SEQ ID NO: 163963 - protein, 7 aa, synthetic construct
FANLVKN

SEQ ID NO: 163964 - protein, 7 aa, synthetic construct
GQIGTHK

SEQ ID NO: 163965 - protein, 7 aa, synthetic construct
KIPFQGG

SEQ ID NO: 163966 - protein, 7 aa, synthetic construct
HDNKAQR

SEQ ID NO: 163967 - protein, 7 aa, synthetic construct
ELKNQVR

SEQ ID NO: 163968 - protein, 7 aa, synthetic construct
LRNQEQK

SEQ ID NO: 163969 - protein, 7 aa, synthetic construct
RLDHNRA

SEQ ID NO: 163970 - protein, 7 aa, synthetic construct
ARKTMPD

SEQ ID NO: 163971 - protein, 7 aa, synthetic construct
EFVKVRG

SEQ ID NO: 163972 - protein, 7 aa, synthetic construct
YGDAMRK

SEQ ID NO: 163973 - protein, 7 aa, synthetic construct
KKYVEKD

SEQ ID NO: 163974 - protein, 7 aa, synthetic construct
KMEYSPK

SEQ ID NO: 163975 - protein, 7 aa, synthetic construct
MFRGLKE

SEQ ID NO: 163976 - protein, 7 aa, synthetic construct
QGRIKIE

SEQ ID NO: 163977 - protein, 7 aa, synthetic construct
PADKERR

SEQ ID NO: 163978 - protein, 7 aa, synthetic construct
RQVPHDK

SEQ ID NO: 163979 - protein, 7 aa, synthetic construct
VEPQRGR

SEQ ID NO: 163980 - protein, 7 aa, synthetic construct
DLTKRHG

SEQ ID NO: 163981 - protein, 7 aa, synthetic construct
ISRQVRD

SEQ ID NO: 163982 - protein, 7 aa, synthetic construct
GKRDQTI

SEQ ID NO: 163983 - protein, 7 aa, synthetic construct
YDKQPKY

SEQ ID NO: 163984 - protein, 7 aa, synthetic construct
MTRTHMN

SEQ ID NO: 163985 - protein, 7 aa, synthetic construct
GQIHVRA

SEQ ID NO: 163986 - protein, 7 aa, synthetic construct
SFRNNDK

SEQ ID NO: 163987 - protein, 7 aa, synthetic construct
DISRIRS

SEQ ID NO: 163988 - protein, 7 aa, synthetic construct
GEQKFPR

SEQ ID NO: 163989 - protein, 7 aa, synthetic construct
NVDYKQK

SEQ ID NO: 163990 - protein, 7 aa, synthetic construct
QGNKQYG

SEQ ID NO: 163991 - protein, 7 aa, synthetic construct
VKHAREN

SEQ ID NO: 163992 - protein, 7 aa, synthetic construct
AYKGDRN

SEQ ID NO: 163993 - protein, 7 aa, synthetic construct
PPVRKLE

SEQ ID NO: 163994 - protein, 7 aa, synthetic construct
ASKRDIT

SEQ ID NO: 163995 - protein, 7 aa, synthetic construct
VSETLKR

SEQ ID NO: 163996 - protein, 7 aa, synthetic construct
HKNNQDR

SEQ ID NO: 163997 - protein, 7 aa, synthetic construct
LQDRQSR

SEQ ID NO: 163998 - protein, 7 aa, synthetic construct
RSSRLEV

SEQ ID NO: 163999 - protein, 7 aa, synthetic construct
EKRAEMK

SEQ ID NO: 164000 - protein, 7 aa, synthetic construct
PAQRNEK

SEQ ID NO: 164001 - protein, 7 aa, synthetic construct
KSGEYAK

SEQ ID NO: 164002 - protein, 7 aa, synthetic construct
ENARLKG

SEQ ID NO: 164003 - protein, 7 aa, synthetic construct
GTHGGRA

SEQ ID NO: 164004 - protein, 7 aa, synthetic construct
PEAINKK

SEQ ID NO: 164005 - protein, 7 aa, synthetic construct
TPMERRA

SEQ ID NO: 164006 - protein, 7 aa, synthetic construct
QGEHKSR

SEQ ID NO: 164007 - protein, 7 aa, synthetic construct
RTHPKTE

SEQ ID NO: 164008 - protein, 7 aa, synthetic construct
VKGYVTN

SEQ ID NO: 164009 - protein, 7 aa, synthetic construct
MEKRGHV

SEQ ID NO: 164010 - protein, 7 aa, synthetic construct
AQKHDRG

SEQ ID NO: 164011 - protein, 7 aa, synthetic construct
GTDRRQS

SEQ ID NO: 164012 - protein, 7 aa, synthetic construct
DNNKKQY

SEQ ID NO: 164013 - protein, 7 aa, synthetic construct
MPPSYRA

SEQ ID NO: 164014 - protein, 7 aa, synthetic construct
DRRGHIV

SEQ ID NO: 164015 - protein, 7 aa, synthetic construct
TSNVERK

SEQ ID NO: 164016 - protein, 7 aa, synthetic construct
VGKRDAF

SEQ ID NO: 164017 - protein, 7 aa, synthetic construct
YKPAYNA

SEQ ID NO: 164018 - protein, 7 aa, synthetic construct
DMLNGRK

SEQ ID NO: 164019 - protein, 7 aa, synthetic construct
RSNERGN

SEQ ID NO: 164020 - protein, 7 aa, synthetic construct
QIKKPTD

SEQ ID NO: 164021 - protein, 7 aa, synthetic construct
LRASSVN

SEQ ID NO: 164022 - protein, 7 aa, synthetic construct
DRGKHAV

SEQ ID NO: 164023 - protein, 7 aa, synthetic construct
GRVKVDV

SEQ ID NO: 164024 - protein, 7 aa, synthetic construct
HGAGRSN

SEQ ID NO: 164025 - protein, 7 aa, synthetic construct
DLNKYKQ

SEQ ID NO: 164026 - protein, 7 aa, synthetic construct
MIRTLGG

SEQ ID NO: 164027 - protein, 7 aa, synthetic construct
DNHKNKI

SEQ ID NO: 164028 - protein, 7 aa, synthetic construct
QTRPSSA

SEQ ID NO: 164029 - protein, 7 aa, synthetic construct
SEHLKRA

SEQ ID NO: 164030 - protein, 7 aa, synthetic construct
HETRVKS

SEQ ID NO: 164031 - protein, 7 aa, synthetic construct
PRTKPFE

SEQ ID NO: 164032 - protein, 7 aa, synthetic construct
YMKNPTN

SEQ ID NO: 164033 - protein, 7 aa, synthetic construct
EPPVKRS

SEQ ID NO: 164034 - protein, 7 aa, synthetic construct
GLNRERA

SEQ ID NO: 164035 - protein, 7 aa, synthetic construct
IKHAKFD

SEQ ID NO: 164036 - protein, 7 aa, synthetic construct
MIDTMKR

SEQ ID NO: 164037 - protein, 7 aa, synthetic construct
AFDTKPR

SEQ ID NO: 164038 - protein, 7 aa, synthetic construct
APRHTAN

SEQ ID NO: 164039 - protein, 7 aa, synthetic construct
KSTRDML

SEQ ID NO: 164040 - protein, 7 aa, synthetic construct
HRGQQTV

SEQ ID NO: 164041 - protein, 7 aa, synthetic construct
SMPELRK

SEQ ID NO: 164042 - protein, 7 aa, synthetic construct
RPKDTYY

SEQ ID NO: 164043 - protein, 7 aa, synthetic construct
KPTRVEQ

SEQ ID NO: 164044 - protein, 7 aa, synthetic construct
MKEYMRP

SEQ ID NO: 164045 - protein, 7 aa, synthetic construct
HQKRLLE

SEQ ID NO: 164046 - protein, 7 aa, synthetic construct
AARREVA

SEQ ID NO: 164047 - protein, 7 aa, synthetic construct
KAIRAME

SEQ ID NO: 164048 - protein, 7 aa, synthetic construct
LERNMPR

SEQ ID NO: 164049 - protein, 7 aa, synthetic construct
GRASSDR

SEQ ID NO: 164050 - protein, 7 aa, synthetic construct
DTDKVKR

SEQ ID NO: 164051 - protein, 7 aa, synthetic construct
NELVRRP

SEQ ID NO: 164052 - protein, 7 aa, synthetic construct
DGLPRKI

SEQ ID NO: 164053 - protein, 7 aa, synthetic construct
APGEAKR

SEQ ID NO: 164054 - protein, 7 aa, synthetic construct
VKKTWEG

SEQ ID NO: 164055 - protein, 7 aa, synthetic construct
KERSMKD

SEQ ID NO: 164056 - protein, 7 aa, synthetic construct
MKRFTDG

SEQ ID NO: 164057 - protein, 7 aa, synthetic construct
GQTAHRA

SEQ ID NO: 164058 - protein, 7 aa, synthetic construct
VDRINKM

SEQ ID NO: 164059 - protein, 7 aa, synthetic construct
STRQDRN

SEQ ID NO: 164060 - protein, 7 aa, synthetic construct
VDKLPHR

SEQ ID NO: 164061 - protein, 7 aa, synthetic construct
NVGSRHS

SEQ ID NO: 164062 - protein, 7 aa, synthetic construct
ESNRIKV

SEQ ID NO: 164063 - protein, 7 aa, synthetic construct
NRKMIVD

SEQ ID NO: 164064 - protein, 7 aa, synthetic construct
SQQMEKR

SEQ ID NO: 164065 - protein, 7 aa, synthetic construct
DPGKSKS

SEQ ID NO: 164066 - protein, 7 aa, synthetic construct
PQVRHQG

SEQ ID NO: 164067 - protein, 7 aa, synthetic construct
LGAQDRK

SEQ ID NO: 164068 - protein, 7 aa, synthetic construct
RSRDPNP

SEQ ID NO: 164069 - protein, 7 aa, synthetic construct
SGRAEKS

SEQ ID NO: 164070 - protein, 7 aa, synthetic construct
KLERHIQ

SEQ ID NO: 164071 - protein, 7 aa, synthetic construct
WSQDVKK

SEQ ID NO: 164072 - protein, 7 aa, synthetic construct
PRQKVSD

SEQ ID NO: 164073 - protein, 7 aa, synthetic construct
VHDRSAK

SEQ ID NO: 164074 - protein, 7 aa, synthetic construct
DLATRKQ

SEQ ID NO: 164075 - protein, 7 aa, synthetic construct
QEKPRGA

SEQ ID NO: 164076 - protein, 7 aa, synthetic construct
MEKRHTI

SEQ ID NO: 164077 - protein, 7 aa, synthetic construct
MRHNIAN

SEQ ID NO: 164078 - protein, 7 aa, synthetic construct
TRKFMAE

SEQ ID NO: 164079 - protein, 7 aa, synthetic construct
QERNARN

SEQ ID NO: 164080 - protein, 7 aa, synthetic construct
RPQKYEN

SEQ ID NO: 164081 - protein, 7 aa, synthetic construct
EKTFKDK

SEQ ID NO: 164082 - protein, 7 aa, synthetic construct
GRIKVSE

SEQ ID NO: 164083 - protein, 7 aa, synthetic construct
LKHREGA

SEQ ID NO: 164084 - protein, 7 aa, synthetic construct
NADGKYR

SEQ ID NO: 164085 - protein, 7 aa, synthetic construct
YRPINNA

SEQ ID NO: 164086 - protein, 7 aa, synthetic construct
QPFRTTG

SEQ ID NO: 164087 - protein, 7 aa, synthetic construct
TEKRSTQ

SEQ ID NO: 164088 - protein, 7 aa, synthetic construct
ENSAVKK

SEQ ID NO: 164089 - protein, 7 aa, synthetic construct
PEKRAMS

SEQ ID NO: 164090 - protein, 7 aa, synthetic construct
LPEMRQR

SEQ ID NO: 164091 - protein, 7 aa, synthetic construct
AMTRGSA

SEQ ID NO: 164092 - protein, 7 aa, synthetic construct
PKRQIDN

SEQ ID NO: 164093 - protein, 7 aa, synthetic construct
QRPHADK

SEQ ID NO: 164094 - protein, 7 aa, synthetic construct
KEDKWKS

SEQ ID NO: 164095 - protein, 7 aa, synthetic construct
VSRQKDV

SEQ ID NO: 164096 - protein, 7 aa, synthetic construct
GPRMRDV

SEQ ID NO: 164097 - protein, 7 aa, synthetic construct
EIPGKRT

SEQ ID NO: 164098 - protein, 7 aa, synthetic construct
REGPRGV

SEQ ID NO: 164099 - protein, 7 aa, synthetic construct
KFSTGER

SEQ ID NO: 164100 - protein, 7 aa, synthetic construct
KYDTAHK

SEQ ID NO: 164101 - protein, 7 aa, synthetic construct
FKPQTIY

SEQ ID NO: 164102 - protein, 7 aa, synthetic construct
MELQRKG

SEQ ID NO: 164103 - protein, 7 aa, synthetic construct
MTTRDKS

SEQ ID NO: 164104 - protein, 7 aa, synthetic construct
MDTKGRQ

SEQ ID NO: 164105 - protein, 7 aa, synthetic construct
NKRVTET

SEQ ID NO: 164106 - protein, 7 aa, synthetic construct
PDIPGKR

SEQ ID NO: 164107 - protein, 7 aa, synthetic construct
SRTKEFQ

SEQ ID NO: 164108 - protein, 7 aa, synthetic construct
EGKKQLT

SEQ ID NO: 164109 - protein, 7 aa, synthetic construct
PQRLKQE

SEQ ID NO: 164110 - protein, 7 aa, synthetic construct
RMSTKFD

SEQ ID NO: 164111 - protein, 7 aa, synthetic construct
TRTKDAQ

SEQ ID NO: 164112 - protein, 7 aa, synthetic construct
KQRGELV

SEQ ID NO: 164113 - protein, 7 aa, synthetic construct
TNTKFRD

SEQ ID NO: 164114 - protein, 7 aa, synthetic construct
DSGKHKI

SEQ ID NO: 164115 - protein, 7 aa, synthetic construct
VYEPAKK

SEQ ID NO: 164116 - protein, 7 aa, synthetic construct
PGRVQRE

SEQ ID NO: 164117 - protein, 7 aa, synthetic construct
GFDHKKS

SEQ ID NO: 164118 - protein, 7 aa, synthetic construct
TGQWTKA

SEQ ID NO: 164119 - protein, 7 aa, synthetic construct
KTESRYG

SEQ ID NO: 164120 - protein, 7 aa, synthetic construct
MTSGHRA

SEQ ID NO: 164121 - protein, 7 aa, synthetic construct
QGRLEKS

SEQ ID NO: 164122 - protein, 7 aa, synthetic construct
DRGGGAK

SEQ ID NO: 164123 - protein, 7 aa, synthetic construct
SDQKLRL

SEQ ID NO: 164124 - protein, 7 aa, synthetic construct
INRVDRS

SEQ ID NO: 164125 - protein, 7 aa, synthetic construct
RETARHP

SEQ ID NO: 164126 - protein, 7 aa, synthetic construct
PQMRKEI

SEQ ID NO: 164127 - protein, 7 aa, synthetic construct
GNSRAEK

SEQ ID NO: 164128 - protein, 7 aa, synthetic construct
NQEKQFK

SEQ ID NO: 164129 - protein, 7 aa, synthetic construct
KGRQDSI

SEQ ID NO: 164130 - protein, 7 aa, synthetic construct
MEKRGFH

SEQ ID NO: 164131 - protein, 7 aa, synthetic construct
KRGGEPA

SEQ ID NO: 164132 - protein, 7 aa, synthetic construct
EPKHNKL

SEQ ID NO: 164133 - protein, 7 aa, synthetic construct
DGKNRLM

SEQ ID NO: 164134 - protein, 7 aa, synthetic construct
NVTRERN

SEQ ID NO: 164135 - protein, 7 aa, synthetic construct
VRSKTES

SEQ ID NO: 164136 - protein, 7 aa, synthetic construct
TFKYQKD

SEQ ID NO: 164137 - protein, 7 aa, synthetic construct
HYIKVKE

SEQ ID NO: 164138 - protein, 7 aa, synthetic construct
TKYEKNN

SEQ ID NO: 164139 - protein, 7 aa, synthetic construct
HVEKRGL

SEQ ID NO: 164140 - protein, 7 aa, synthetic construct
KAHTEQR

SEQ ID NO: 164141 - protein, 7 aa, synthetic construct
EKRTSNV

SEQ ID NO: 164142 - protein, 7 aa, synthetic construct
YHKLVSA

SEQ ID NO: 164143 - protein, 7 aa, synthetic construct
GNERKVN

SEQ ID NO: 164144 - protein, 7 aa, synthetic construct
YDKRDGR

SEQ ID NO: 164145 - protein, 7 aa, synthetic construct
AEQKVRG

SEQ ID NO: 164146 - protein, 7 aa, synthetic construct
LHRTNTA

SEQ ID NO: 164147 - protein, 7 aa, synthetic construct
PRVKITE

SEQ ID NO: 164148 - protein, 7 aa, synthetic construct
KHVSNER

SEQ ID NO: 164149 - protein, 7 aa, synthetic construct
AAFQRKD

SEQ ID NO: 164150 - protein, 7 aa, synthetic construct
QPHIRGN

SEQ ID NO: 164151 - protein, 7 aa, synthetic construct
KKSMADL

SEQ ID NO: 164152 - protein, 7 aa, synthetic construct
QTKYSAN

SEQ ID NO: 164153 - protein, 7 aa, synthetic construct
VNVRIKD

SEQ ID NO: 164154 - protein, 7 aa, synthetic construct
ERKSQAF

SEQ ID NO: 164155 - protein, 7 aa, synthetic construct
KRMETTL

SEQ ID NO: 164156 - protein, 7 aa, synthetic construct
EPRIQKS

SEQ ID NO: 164157 - protein, 7 aa, synthetic construct
IHGAAAR

SEQ ID NO: 164158 - protein, 7 aa, synthetic construct
IGRLTHN

SEQ ID NO: 164159 - protein, 7 aa, synthetic construct
RSDKHEK

SEQ ID NO: 164160 - protein, 7 aa, synthetic construct
YDALRKL

SEQ ID NO: 164161 - protein, 7 aa, synthetic construct
NESRKIV

SEQ ID NO: 164162 - protein, 7 aa, synthetic construct
INERARM

SEQ ID NO: 164163 - protein, 7 aa, synthetic construct
NRGDISK

SEQ ID NO: 164164 - protein, 7 aa, synthetic construct
AAKRVDV

SEQ ID NO: 164165 - protein, 7 aa, synthetic construct
KVIHKSD

SEQ ID NO: 164166 - protein, 7 aa, synthetic construct
LKPYSHP

SEQ ID NO: 164167 - protein, 7 aa, synthetic construct
YVDQSRK

SEQ ID NO: 164168 - protein, 7 aa, synthetic construct
VRHVTSG

SEQ ID NO: 164169 - protein, 7 aa, synthetic construct
NIIKESR

SEQ ID NO: 164170 - protein, 7 aa, synthetic construct
KRGVETV

SEQ ID NO: 164171 - protein, 7 aa, synthetic construct
VTERAVR

SEQ ID NO: 164172 - protein, 7 aa, synthetic construct
THKSREI

SEQ ID NO: 164173 - protein, 7 aa, synthetic construct
VTVRESR

SEQ ID NO: 164174 - protein, 7 aa, synthetic construct
EKRMNNI

SEQ ID NO: 164175 - protein, 7 aa, synthetic construct
EKHERRI

SEQ ID NO: 164176 - protein, 7 aa, synthetic construct
SRGKDSF

SEQ ID NO: 164177 - protein, 7 aa, synthetic construct
IRIKMNE

SEQ ID NO: 164178 - protein, 7 aa, synthetic construct
KSRDPHP

SEQ ID NO: 164179 - protein, 7 aa, synthetic construct
NLSKRDN

SEQ ID NO: 164180 - protein, 7 aa, synthetic construct
QEQKFGK

SEQ ID NO: 164181 - protein, 7 aa, synthetic construct
ILGHQRP

SEQ ID NO: 164182 - protein, 7 aa, synthetic construct
RETRSIS

SEQ ID NO: 164183 - protein, 7 aa, synthetic construct
LHKSERL

SEQ ID NO: 164184 - protein, 7 aa, synthetic construct
GRVSKGD

SEQ ID NO: 164185 - protein, 7 aa, synthetic construct
PRGVKID

SEQ ID NO: 164186 - protein, 7 aa, synthetic construct
KRSTQET

SEQ ID NO: 164187 - protein, 7 aa, synthetic construct
KPRQQMD

SEQ ID NO: 164188 - protein, 7 aa, synthetic construct
VKVRMPD

SEQ ID NO: 164189 - protein, 7 aa, synthetic construct
DSKRNVL

SEQ ID NO: 164190 - protein, 7 aa, synthetic construct
FKHIQDK

SEQ ID NO: 164191 - protein, 7 aa, synthetic construct
TAESKKH

SEQ ID NO: 164192 - protein, 7 aa, synthetic construct
EHAKMKG

SEQ ID NO: 164193 - protein, 7 aa, synthetic construct
YPRSESK

SEQ ID NO: 164194 - protein, 7 aa, synthetic construct
PHEKMFK

SEQ ID NO: 164195 - protein, 7 aa, synthetic construct
RGRTDMV

SEQ ID NO: 164196 - protein, 7 aa, synthetic construct
SGARNDK

SEQ ID NO: 164197 - protein, 7 aa, synthetic construct
PVKVRSE

SEQ ID NO: 164198 - protein, 7 aa, synthetic construct
EPKYTKQ

SEQ ID NO: 164199 - protein, 7 aa, synthetic construct
LARGESR

SEQ ID NO: 164200 - protein, 7 aa, synthetic construct
TPEYKAK

SEQ ID NO: 164201 - protein, 7 aa, synthetic construct
LQHKKYE

SEQ ID NO: 164202 - protein, 7 aa, synthetic construct
RHKPDTL

SEQ ID NO: 164203 - protein, 7 aa, synthetic construct
KMAGEMR

SEQ ID NO: 164204 - protein, 7 aa, synthetic construct
IPRSRET

SEQ ID NO: 164205 - protein, 7 aa, synthetic construct
SHQKNDK

SEQ ID NO: 164206 - protein, 7 aa, synthetic construct
PARSKDA

SEQ ID NO: 164207 - protein, 7 aa, synthetic construct
VRNKDLQ

SEQ ID NO: 164208 - protein, 7 aa, synthetic construct
IKFQAPS

SEQ ID NO: 164209 - protein, 7 aa, synthetic construct
YERNAFK

SEQ ID NO: 164210 - protein, 7 aa, synthetic construct
MMHTRTN

SEQ ID NO: 164211 - protein, 7 aa, synthetic construct
YEPGQKK

SEQ ID NO: 164212 - protein, 7 aa, synthetic construct
KELPRTL

SEQ ID NO: 164213 - protein, 7 aa, synthetic construct
HTDTRAR

SEQ ID NO: 164214 - protein, 7 aa, synthetic construct
KDRKDNL

SEQ ID NO: 164215 - protein, 7 aa, synthetic construct
KIHDSSR

SEQ ID NO: 164216 - protein, 7 aa, synthetic construct
LTRAKDI

SEQ ID NO: 164217 - protein, 7 aa, synthetic construct
NNNKKDM

SEQ ID NO: 164218 - protein, 7 aa, synthetic construct
TAHRLAG

SEQ ID NO: 164219 - protein, 7 aa, synthetic construct
IKRNGEV

SEQ ID NO: 164220 - protein, 7 aa, synthetic construct
MDKHVSR

SEQ ID NO: 164221 - protein, 7 aa, synthetic construct
AEMVRKS

SEQ ID NO: 164222 - protein, 7 aa, synthetic construct
YTKYMSS

SEQ ID NO: 164223 - protein, 7 aa, synthetic construct
PQELKRT

SEQ ID NO: 164224 - protein, 7 aa, synthetic construct
IKPYMHN

SEQ ID NO: 164225 - protein, 7 aa, synthetic construct
TMRKDVH

SEQ ID NO: 164226 - protein, 7 aa, synthetic construct
DGKHKLL

SEQ ID NO: 164227 - protein, 7 aa, synthetic construct
RVTRIAE

SEQ ID NO: 164228 - protein, 7 aa, synthetic construct
TERGIRQ

SEQ ID NO: 164229 - protein, 7 aa, synthetic construct
NPDRVKL

SEQ ID NO: 164230 - protein, 7 aa, synthetic construct
YTSHGKG

SEQ ID NO: 164231 - protein, 7 aa, synthetic construct
GESKNLK

SEQ ID NO: 164232 - protein, 7 aa, synthetic construct
TTENKHR

SEQ ID NO: 164233 - protein, 7 aa, synthetic construct
SKGKQDS

SEQ ID NO: 164234 - protein, 7 aa, synthetic construct
DRTKLDR

SEQ ID NO: 164235 - protein, 7 aa, synthetic construct
VLRNKYE

SEQ ID NO: 164236 - protein, 7 aa, synthetic construct
YKSSRSD

SEQ ID NO: 164237 - protein, 7 aa, synthetic construct
MINKHYG

SEQ ID NO: 164238 - protein, 7 aa, synthetic construct
RRSEINI

SEQ ID NO: 164239 - protein, 7 aa, synthetic construct
LSDSIRK

SEQ ID NO: 164240 - protein, 7 aa, synthetic construct
KSRNEIM

SEQ ID NO: 164241 - protein, 7 aa, synthetic construct
QDQIRLK

SEQ ID NO: 164242 - protein, 7 aa, synthetic construct
KADHVYK

SEQ ID NO: 164243 - protein, 7 aa, synthetic construct
IELRNSK

SEQ ID NO: 164244 - protein, 7 aa, synthetic construct
TEVLRRP

SEQ ID NO: 164245 - protein, 7 aa, synthetic construct
AYPGVRA

SEQ ID NO: 164246 - protein, 7 aa, synthetic construct
LKRGAMD

SEQ ID NO: 164247 - protein, 7 aa, synthetic construct
LKQYITN

SEQ ID NO: 164248 - protein, 7 aa, synthetic construct
KNMPRVD

SEQ ID NO: 164249 - protein, 7 aa, synthetic construct
LRFKTSE

SEQ ID NO: 164250 - protein, 7 aa, synthetic construct
EPQTKNR

SEQ ID NO: 164251 - protein, 7 aa, synthetic construct
IKRQDLI

SEQ ID NO: 164252 - protein, 7 aa, synthetic construct
SKKYEFV

SEQ ID NO: 164253 - protein, 7 aa, synthetic construct
QDIAPRK

SEQ ID NO: 164254 - protein, 7 aa, synthetic construct
FDNSRAK

SEQ ID NO: 164255 - protein, 7 aa, synthetic construct
GMEPRAK

SEQ ID NO: 164256 - protein, 7 aa, synthetic construct
FKTRQEL

SEQ ID NO: 164257 - protein, 7 aa, synthetic construct
QGPRHTI

SEQ ID NO: 164258 - protein, 7 aa, synthetic construct
YTKRSDA

SEQ ID NO: 164259 - protein, 7 aa, synthetic construct
TADHRKP

SEQ ID NO: 164260 - protein, 7 aa, synthetic construct
KSRTTLD

SEQ ID NO: 164261 - protein, 7 aa, synthetic construct
VKLYSSA

SEQ ID NO: 164262 - protein, 7 aa, synthetic construct
IGRIIQG

SEQ ID NO: 164263 - protein, 7 aa, synthetic construct
DGRQKLV

SEQ ID NO: 164264 - protein, 7 aa, synthetic construct
AGRNLMN

SEQ ID NO: 164265 - protein, 7 aa, synthetic construct
IPNYMRA

SEQ ID NO: 164266 - protein, 7 aa, synthetic construct
DFAKVTK

SEQ ID NO: 164267 - protein, 7 aa, synthetic construct
VKNRPDI

SEQ ID NO: 164268 - protein, 7 aa, synthetic construct
KMRMAMD

SEQ ID NO: 164269 - protein, 7 aa, synthetic construct
AQKARDQ

SEQ ID NO: 164270 - protein, 7 aa, synthetic construct
VKLRGEQ

SEQ ID NO: 164271 - protein, 7 aa, synthetic construct
DQKQHLR

SEQ ID NO: 164272 - protein, 7 aa, synthetic construct
PEKRQFT

SEQ ID NO: 164273 - protein, 7 aa, synthetic construct
SEKPSRV

SEQ ID NO: 164274 - protein, 7 aa, synthetic construct
KLDRAHV

SEQ ID NO: 164275 - protein, 7 aa, synthetic construct
IESKRNT

SEQ ID NO: 164276 - protein, 7 aa, synthetic construct
RLVHKSE

SEQ ID NO: 164277 - protein, 7 aa, synthetic construct
ESAKSLR

SEQ ID NO: 164278 - protein, 7 aa, synthetic construct
QSKYVSN

SEQ ID NO: 164279 - protein, 7 aa, synthetic construct
PERQTQK

SEQ ID NO: 164280 - protein, 7 aa, synthetic construct
DVKQSKW

SEQ ID NO: 164281 - protein, 7 aa, synthetic construct
NSRAKDV

SEQ ID NO: 164282 - protein, 7 aa, synthetic construct
KRGEDRG

SEQ ID NO: 164283 - protein, 7 aa, synthetic construct
HTVRNNS

SEQ ID NO: 164284 - protein, 7 aa, synthetic construct
INKHDRQ

SEQ ID NO: 164285 - protein, 7 aa, synthetic construct
DLIKRHG

SEQ ID NO: 164286 - protein, 7 aa, synthetic construct
TYVKKDQ

SEQ ID NO: 164287 - protein, 7 aa, synthetic construct
NVEARRG

SEQ ID NO: 164288 - protein, 7 aa, synthetic construct
QTGTRDR

SEQ ID NO: 164289 - protein, 7 aa, synthetic construct
ENTKTRS

SEQ ID NO: 164290 - protein, 7 aa, synthetic construct
TKRTDPV

SEQ ID NO: 164291 - protein, 7 aa, synthetic construct
AETKLKY

SEQ ID NO: 164292 - protein, 7 aa, synthetic construct
KIRVQQD

SEQ ID NO: 164293 - protein, 7 aa, synthetic construct
IKYSTIA

SEQ ID NO: 164294 - protein, 7 aa, synthetic construct
MDPRPQR

SEQ ID NO: 164295 - protein, 7 aa, synthetic construct
TIDMRRP

SEQ ID NO: 164296 - protein, 7 aa, synthetic construct
DRRTSNI

SEQ ID NO: 164297 - protein, 7 aa, synthetic construct
NRSNLEK

SEQ ID NO: 164298 - protein, 7 aa, synthetic construct
EPQRNKI

SEQ ID NO: 164299 - protein, 7 aa, synthetic construct
IEAQKGR

SEQ ID NO: 164300 - protein, 7 aa, synthetic construct
FQQKRDG

SEQ ID NO: 164301 - protein, 7 aa, synthetic construct
AEPKQRT

SEQ ID NO: 164302 - protein, 7 aa, synthetic construct
KMNRDSI

SEQ ID NO: 164303 - protein, 7 aa, synthetic construct
FKEQAHR

SEQ ID NO: 164304 - protein, 7 aa, synthetic construct
RIPKGEY

SEQ ID NO: 164305 - protein, 7 aa, synthetic construct
IRKTELI

SEQ ID NO: 164306 - protein, 7 aa, synthetic construct
DTVKRHG

SEQ ID NO: 164307 - protein, 7 aa, synthetic construct
QHGIHKA

SEQ ID NO: 164308 - protein, 7 aa, synthetic construct
DNIKIKH

SEQ ID NO: 164309 - protein, 7 aa, synthetic construct
EKNRMMN

SEQ ID NO: 164310 - protein, 7 aa, synthetic construct
APHVRQN

SEQ ID NO: 164311 - protein, 7 aa, synthetic construct
FAKTRGD

SEQ ID NO: 164312 - protein, 7 aa, synthetic construct
VHQKVRD

SEQ ID NO: 164313 - protein, 7 aa, synthetic construct
EQKLKNF

SEQ ID NO: 164314 - protein, 7 aa, synthetic construct
VKQYVSG

SEQ ID NO: 164315 - protein, 7 aa, synthetic construct
LHKREYG

SEQ ID NO: 164316 - protein, 7 aa, synthetic construct
QNFKPDR

SEQ ID NO: 164317 - protein, 7 aa, synthetic construct
LSRTEKV

SEQ ID NO: 164318 - protein, 7 aa, synthetic construct
ETRQKTT

SEQ ID NO: 164319 - protein, 7 aa, synthetic construct
YERGALK

SEQ ID NO: 164320 - protein, 7 aa, synthetic construct
KDSGIHR

SEQ ID NO: 164321 - protein, 7 aa, synthetic construct
NVERRGQ

SEQ ID NO: 164322 - protein, 7 aa, synthetic construct
GHEKVMR

SEQ ID NO: 164323 - protein, 7 aa, synthetic construct
KKAMPEF

SEQ ID NO: 164324 - protein, 7 aa, synthetic construct
ISGHAGR

SEQ ID NO: 164325 - protein, 7 aa, synthetic construct
ARTKDPA

SEQ ID NO: 164326 - protein, 7 aa, synthetic construct
IRGLTNS

SEQ ID NO: 164327 - protein, 7 aa, synthetic construct
KTKYEIS

SEQ ID NO: 164328 - protein, 7 aa, synthetic construct
IHGSVKA

SEQ ID NO: 164329 - protein, 7 aa, synthetic construct
IAPNEKK

SEQ ID NO: 164330 - protein, 7 aa, synthetic construct
QSKVRDT

SEQ ID NO: 164331 - protein, 7 aa, synthetic construct
RFKDPTI

SEQ ID NO: 164332 - protein, 7 aa, synthetic construct
FKFASAS

SEQ ID NO: 164333 - protein, 7 aa, synthetic construct
KVHQPEK

SEQ ID NO: 164334 - protein, 7 aa, synthetic construct
QKRLIEN

SEQ ID NO: 164335 - protein, 7 aa, synthetic construct
MYGANKA

SEQ ID NO: 164336 - protein, 7 aa, synthetic construct
PNKRDIL

SEQ ID NO: 164337 - protein, 7 aa, synthetic construct
IQERVKF

SEQ ID NO: 164338 - protein, 7 aa, synthetic construct
NLKRTSD

SEQ ID NO: 164339 - protein, 7 aa, synthetic construct
QKRDQTF

SEQ ID NO: 164340 - protein, 7 aa, synthetic construct
YRINKNE

SEQ ID NO: 164341 - protein, 7 aa, synthetic construct
VNTRIYN

SEQ ID NO: 164342 - protein, 7 aa, synthetic construct
GLHSRSG

SEQ ID NO: 164343 - protein, 7 aa, synthetic construct
QDNLRAK

SEQ ID NO: 164344 - protein, 7 aa, synthetic construct
VKHITPS

SEQ ID NO: 164345 - protein, 7 aa, synthetic construct
IQLRERS

SEQ ID NO: 164346 - protein, 7 aa, synthetic construct
NYKQKAE

SEQ ID NO: 164347 - protein, 7 aa, synthetic construct
IENPRGK

SEQ ID NO: 164348 - protein, 7 aa, synthetic construct
VFAQSRG

SEQ ID NO: 164349 - protein, 7 aa, synthetic construct
QDQVRPR

SEQ ID NO: 164350 - protein, 7 aa, synthetic construct
LEMNKRA

SEQ ID NO: 164351 - protein, 7 aa, synthetic construct
GGERVRS

SEQ ID NO: 164352 - protein, 7 aa, synthetic construct
DTNAKRH

SEQ ID NO: 164353 - protein, 7 aa, synthetic construct
IARNHPA

SEQ ID NO: 164354 - protein, 7 aa, synthetic construct
IKYNLSN

SEQ ID NO: 164355 - protein, 7 aa, synthetic construct
KIRPVND

SEQ ID NO: 164356 - protein, 7 aa, synthetic construct
NERGIKS

SEQ ID NO: 164357 - protein, 7 aa, synthetic construct
YESGTRK

SEQ ID NO: 164358 - protein, 7 aa, synthetic construct
NENKNKL

SEQ ID NO: 164359 - protein, 7 aa, synthetic construct
KQHVEIR

SEQ ID NO: 164360 - protein, 7 aa, synthetic construct
EIGGKQK

SEQ ID NO: 164361 - protein, 7 aa, synthetic construct
KGREREN

SEQ ID NO: 164362 - protein, 7 aa, synthetic construct
GVHGKYN

SEQ ID NO: 164363 - protein, 7 aa, synthetic construct
IKHESRQ

SEQ ID NO: 164364 - protein, 7 aa, synthetic construct
DFGIKKT

SEQ ID NO: 164365 - protein, 7 aa, synthetic construct
PQRNMKD

SEQ ID NO: 164366 - protein, 7 aa, synthetic construct
ATGKPYN

SEQ ID NO: 164367 - protein, 7 aa, synthetic construct
YRQLLGA

SEQ ID NO: 164368 - protein, 7 aa, synthetic construct
THTIEKK

SEQ ID NO: 164369 - protein, 7 aa, synthetic construct
ARGEYAK

SEQ ID NO: 164370 - protein, 7 aa, synthetic construct
PMRQKSE

SEQ ID NO: 164371 - protein, 7 aa, synthetic construct
RKGDYNQ

SEQ ID NO: 164372 - protein, 7 aa, synthetic construct
NVVDRPR

SEQ ID NO: 164373 - protein, 7 aa, synthetic construct
APKRLDI

SEQ ID NO: 164374 - protein, 7 aa, synthetic construct
MERKDPK

SEQ ID NO: 164375 - protein, 7 aa, synthetic construct
MKLHIMA

SEQ ID NO: 164376 - protein, 7 aa, synthetic construct
VGARDKY

SEQ ID NO: 164377 - protein, 7 aa, synthetic construct
KEGHRGS

SEQ ID NO: 164378 - protein, 7 aa, synthetic construct
YLDHKNK

SEQ ID NO: 164379 - protein, 7 aa, synthetic construct
GPDRTPR

SEQ ID NO: 164380 - protein, 7 aa, synthetic construct
HDGKKYS

SEQ ID NO: 164381 - protein, 7 aa, synthetic construct
KENNRYN

SEQ ID NO: 164382 - protein, 7 aa, synthetic construct
NVDNRAR

SEQ ID NO: 164383 - protein, 7 aa, synthetic construct
RGTKDTY

SEQ ID NO: 164384 - protein, 7 aa, synthetic construct
IGRTQSL

SEQ ID NO: 164385 - protein, 7 aa, synthetic construct
ATSRADR

SEQ ID NO: 164386 - protein, 7 aa, synthetic construct
QQKPIIF

SEQ ID NO: 164387 - protein, 7 aa, synthetic construct
DNPKSKF

SEQ ID NO: 164388 - protein, 7 aa, synthetic construct
MKHYAPP

SEQ ID NO: 164389 - protein, 7 aa, synthetic construct
TYGNVHK

SEQ ID NO: 164390 - protein, 7 aa, synthetic construct
IDRNTVR

SEQ ID NO: 164391 - protein, 7 aa, synthetic construct
DKRYVAA

SEQ ID NO: 164392 - protein, 7 aa, synthetic construct
QRANHDK

SEQ ID NO: 164393 - protein, 7 aa, synthetic construct
KHVNRDI

SEQ ID NO: 164394 - protein, 7 aa, synthetic construct
FIKPERM

SEQ ID NO: 164395 - protein, 7 aa, synthetic construct
GEIKSLR

SEQ ID NO: 164396 - protein, 7 aa, synthetic construct
KSRVENM

SEQ ID NO: 164397 - protein, 7 aa, synthetic construct
GRETSRS

SEQ ID NO: 164398 - protein, 7 aa, synthetic construct
GKRAVPE

SEQ ID NO: 164399 - protein, 7 aa, synthetic construct
VEARRSV

SEQ ID NO: 164400 - protein, 7 aa, synthetic construct
SSRNLAN

SEQ ID NO: 164401 - protein, 7 aa, synthetic construct
YINTEKR

SEQ ID NO: 164402 - protein, 7 aa, synthetic construct
STENKTR

SEQ ID NO: 164403 - protein, 7 aa, synthetic construct
IGRGAIN

SEQ ID NO: 164404 - protein, 7 aa, synthetic construct
MEGMKQR

SEQ ID NO: 164405 - protein, 7 aa, synthetic construct
PVKRMSE

SEQ ID NO: 164406 - protein, 7 aa, synthetic construct
TAKPISY

SEQ ID NO: 164407 - protein, 7 aa, synthetic construct
IDRANHK

SEQ ID NO: 164408 - protein, 7 aa, synthetic construct
MLQAEKK

SEQ ID NO: 164409 - protein, 7 aa, synthetic construct
GPERMKA

SEQ ID NO: 164410 - protein, 7 aa, synthetic construct
NKREQYN

SEQ ID NO: 164411 - protein, 7 aa, synthetic construct
INVRERG

SEQ ID NO: 164412 - protein, 7 aa, synthetic construct
ENVKNKG

SEQ ID NO: 164413 - protein, 7 aa, synthetic construct
VARAEKG

SEQ ID NO: 164414 - protein, 7 aa, synthetic construct
MEKEPRK

SEQ ID NO: 164415 - protein, 7 aa, synthetic construct
MEKRDVR

SEQ ID NO: 164416 - protein, 7 aa, synthetic construct
TGTHRQN

SEQ ID NO: 164417 - protein, 7 aa, synthetic construct
GEKPRLI

SEQ ID NO: 164418 - protein, 7 aa, synthetic construct
LGGRGSS

SEQ ID NO: 164419 - protein, 7 aa, synthetic construct
IIKNMDR

SEQ ID NO: 164420 - protein, 7 aa, synthetic construct
QTMEARK

SEQ ID NO: 164421 - protein, 7 aa, synthetic construct
AGRPSTN

SEQ ID NO: 164422 - protein, 7 aa, synthetic construct
QKKLPND

SEQ ID NO: 164423 - protein, 7 aa, synthetic construct
NKRINPE

SEQ ID NO: 164424 - protein, 7 aa, synthetic construct
AQERHKP

SEQ ID NO: 164425 - protein, 7 aa, synthetic construct
AEKRNSL

SEQ ID NO: 164426 - protein, 7 aa, synthetic construct
GSHGAVR

SEQ ID NO: 164427 - protein, 7 aa, synthetic construct
SGEVKKW

SEQ ID NO: 164428 - protein, 7 aa, synthetic construct
TSNRMHQ

SEQ ID NO: 164429 - protein, 7 aa, synthetic construct
SEAKGRG

SEQ ID NO: 164430 - protein, 7 aa, synthetic construct
NVHYVKP

SEQ ID NO: 164431 - protein, 7 aa, synthetic construct
NRGTKEY

SEQ ID NO: 164432 - protein, 7 aa, synthetic construct
KDPYGQK

SEQ ID NO: 164433 - protein, 7 aa, synthetic construct
RFKAESN

SEQ ID NO: 164434 - protein, 7 aa, synthetic construct
EKQAKHF

SEQ ID NO: 164435 - protein, 7 aa, synthetic construct
VMRQEPR

SEQ ID NO: 164436 - protein, 7 aa, synthetic construct
IPTQIRA

SEQ ID NO: 164437 - protein, 7 aa, synthetic construct
DSLNKRH

SEQ ID NO: 164438 - protein, 7 aa, synthetic construct
RETRMQA

SEQ ID NO: 164439 - protein, 7 aa, synthetic construct
KMRAEPM

SEQ ID NO: 164440 - protein, 7 aa, synthetic construct
ETKVRSQ

SEQ ID NO: 164441 - protein, 7 aa, synthetic construct
KKGYDGH

SEQ ID NO: 164442 - protein, 7 aa, synthetic construct
LTRADRS

SEQ ID NO: 164443 - protein, 7 aa, synthetic construct
VRKETWN

SEQ ID NO: 164444 - protein, 7 aa, synthetic construct
ALARLRE

SEQ ID NO: 164445 - protein, 7 aa, synthetic construct
HEQNKKP

SEQ ID NO: 164446 - protein, 7 aa, synthetic construct
MQTELKR

SEQ ID NO: 164447 - protein, 7 aa, synthetic construct
FKNLYEK

SEQ ID NO: 164448 - protein, 7 aa, synthetic construct
SAGVRDR

SEQ ID NO: 164449 - protein, 7 aa, synthetic construct
TEHKSKL

SEQ ID NO: 164450 - protein, 7 aa, synthetic construct
AMEKRQH

SEQ ID NO: 164451 - protein, 7 aa, synthetic construct
VKKTVDI

SEQ ID NO: 164452 - protein, 7 aa, synthetic construct
KSLAHER

SEQ ID NO: 164453 - protein, 7 aa, synthetic construct
PMEVKSR

SEQ ID NO: 164454 - protein, 7 aa, synthetic construct
FQKKDST

SEQ ID NO: 164455 - protein, 7 aa, synthetic construct
NLIRSYG

SEQ ID NO: 164456 - protein, 7 aa, synthetic construct
FRSIQNP

SEQ ID NO: 164457 - protein, 7 aa, synthetic construct
IGKYLMS

SEQ ID NO: 164458 - protein, 7 aa, synthetic construct
RTREITV

SEQ ID NO: 164459 - protein, 7 aa, synthetic construct
FKDVQGR

SEQ ID NO: 164460 - protein, 7 aa, synthetic construct
IKNSIYS

SEQ ID NO: 164461 - protein, 7 aa, synthetic construct
AENKMRG

SEQ ID NO: 164462 - protein, 7 aa, synthetic construct
IIERNFK

SEQ ID NO: 164463 - protein, 7 aa, synthetic construct
RTERAGN

SEQ ID NO: 164464 - protein, 7 aa, synthetic construct
TDFAKGR

SEQ ID NO: 164465 - protein, 7 aa, synthetic construct
IRGIQRE

SEQ ID NO: 164466 - protein, 7 aa, synthetic construct
EMPLKRV

SEQ ID NO: 164467 - protein, 7 aa, synthetic construct
YDPQSKR

SEQ ID NO: 164468 - protein, 7 aa, synthetic construct
ELYKNKA

SEQ ID NO: 164469 - protein, 7 aa, synthetic construct
EIKHAKS

SEQ ID NO: 164470 - protein, 7 aa, synthetic construct
VRKGPPE

SEQ ID NO: 164471 - protein, 7 aa, synthetic construct
ITRNMHA

SEQ ID NO: 164472 - protein, 7 aa, synthetic construct
TVRTREL

SEQ ID NO: 164473 - protein, 7 aa, synthetic construct
NEKNFAK

SEQ ID NO: 164474 - protein, 7 aa, synthetic construct
ADRKQTA

SEQ ID NO: 164475 - protein, 7 aa, synthetic construct
TSAFEKK

SEQ ID NO: 164476 - protein, 7 aa, synthetic construct
KHSRETV

SEQ ID NO: 164477 - protein, 7 aa, synthetic construct
SDMAKGR

SEQ ID NO: 164478 - protein, 7 aa, synthetic construct
SRHTKDV

SEQ ID NO: 164479 - protein, 7 aa, synthetic construct
WQGGLRQ

SEQ ID NO: 164480 - protein, 7 aa, synthetic construct
RMDKYNT

SEQ ID NO: 164481 - protein, 7 aa, synthetic construct
DAVRMQK

SEQ ID NO: 164482 - protein, 7 aa, synthetic construct
KGLKYID

SEQ ID NO: 164483 - protein, 7 aa, synthetic construct
ALDRAGR

SEQ ID NO: 164484 - protein, 7 aa, synthetic construct
LKHQYVN

SEQ ID NO: 164485 - protein, 7 aa, synthetic construct
ARSIKYE

SEQ ID NO: 164486 - protein, 7 aa, synthetic construct
YVRPKDQ

SEQ ID NO: 164487 - protein, 7 aa, synthetic construct
KKDRFDV

SEQ ID NO: 164488 - protein, 7 aa, synthetic construct
GAVHRGA

SEQ ID NO: 164489 - protein, 7 aa, synthetic construct
AKGMRDT

SEQ ID NO: 164490 - protein, 7 aa, synthetic construct
FLRPSTA

SEQ ID NO: 164491 - protein, 7 aa, synthetic construct
NTDAQRK

SEQ ID NO: 164492 - protein, 7 aa, synthetic construct
MHKMGER

SEQ ID NO: 164493 - protein, 7 aa, synthetic construct
TKMHYNA

SEQ ID NO: 164494 - protein, 7 aa, synthetic construct
SNTLRKD

SEQ ID NO: 164495 - protein, 7 aa, synthetic construct
FADSKRM

SEQ ID NO: 164496 - protein, 7 aa, synthetic construct
DKAIEKK

SEQ ID NO: 164497 - protein, 7 aa, synthetic construct
GEKQTMR

SEQ ID NO: 164498 - protein, 7 aa, synthetic construct
KITKGWE

SEQ ID NO: 164499 - protein, 7 aa, synthetic construct
SENNKAK

SEQ ID NO: 164500 - protein, 7 aa, synthetic construct
YRGLIGA

SEQ ID NO: 164501 - protein, 7 aa, synthetic construct
GIEGKKM

SEQ ID NO: 164502 - protein, 7 aa, synthetic construct
YSHPKDR

SEQ ID NO: 164503 - protein, 7 aa, synthetic construct
FLNHIKS

SEQ ID NO: 164504 - protein, 7 aa, synthetic construct
DTRSMKY

SEQ ID NO: 164505 - protein, 7 aa, synthetic construct
DTSAKKH

SEQ ID NO: 164506 - protein, 7 aa, synthetic construct
RTDHKNT

SEQ ID NO: 164507 - protein, 7 aa, synthetic construct
KPRSEIF

SEQ ID NO: 164508 - protein, 7 aa, synthetic construct
TTKFQHN

SEQ ID NO: 164509 - protein, 7 aa, synthetic construct
RHAKDNV

SEQ ID NO: 164510 - protein, 7 aa, synthetic construct
YEKYQPK

SEQ ID NO: 164511 - protein, 7 aa, synthetic construct
ASARVDR

SEQ ID NO: 164512 - protein, 7 aa, synthetic construct
KRLSVIE

SEQ ID NO: 164513 - protein, 7 aa, synthetic construct
TQGHTRG

SEQ ID NO: 164514 - protein, 7 aa, synthetic construct
FTNEMKR

SEQ ID NO: 164515 - protein, 7 aa, synthetic construct
YSKGDKH

SEQ ID NO: 164516 - protein, 7 aa, synthetic construct
EAPKKFY

SEQ ID NO: 164517 - protein, 7 aa, synthetic construct
VKLNRHE

SEQ ID NO: 164518 - protein, 7 aa, synthetic construct
HRDNIVR

SEQ ID NO: 164519 - protein, 7 aa, synthetic construct
EAIKKHY

SEQ ID NO: 164520 - protein, 7 aa, synthetic construct
SNDKRNQ

SEQ ID NO: 164521 - protein, 7 aa, synthetic construct
TDSKRQL

SEQ ID NO: 164522 - protein, 7 aa, synthetic construct
EVRSKSV

SEQ ID NO: 164523 - protein, 7 aa, synthetic construct
QDSKSKY

SEQ ID NO: 164524 - protein, 7 aa, synthetic construct
VKPYMPQ

SEQ ID NO: 164525 - protein, 7 aa, synthetic construct
DSGQRLK

SEQ ID NO: 164526 - protein, 7 aa, synthetic construct
TQEPRIK

SEQ ID NO: 164527 - protein, 7 aa, synthetic construct
GERILPK

SEQ ID NO: 164528 - protein, 7 aa, synthetic construct
KGRMQDV

SEQ ID NO: 164529 - protein, 7 aa, synthetic construct
VYGQSAR

SEQ ID NO: 164530 - protein, 7 aa, synthetic construct
SYTTYKA

SEQ ID NO: 164531 - protein, 7 aa, synthetic construct
KAREKPE

SEQ ID NO: 164532 - protein, 7 aa, synthetic construct
DPSNRKA

SEQ ID NO: 164533 - protein, 7 aa, synthetic construct
MEMKIHK

SEQ ID NO: 164534 - protein, 7 aa, synthetic construct
HDRTRGG

SEQ ID NO: 164535 - protein, 7 aa, synthetic construct
RVKEPHY

SEQ ID NO: 164536 - protein, 7 aa, synthetic construct
MIDAKHR

SEQ ID NO: 164537 - protein, 7 aa, synthetic construct
MKHKDPM

SEQ ID NO: 164538 - protein, 7 aa, synthetic construct
TSNTRHN

SEQ ID NO: 164539 - protein, 7 aa, synthetic construct
DGKVNKY

SEQ ID NO: 164540 - protein, 7 aa, synthetic construct
KRGIDTI

SEQ ID NO: 164541 - protein, 7 aa, synthetic construct
VLRKVET

SEQ ID NO: 164542 - protein, 7 aa, synthetic construct
GKVRIGD

SEQ ID NO: 164543 - protein, 7 aa, synthetic construct
KSFTHSG

SEQ ID NO: 164544 - protein, 7 aa, synthetic construct
ENPVKRP

SEQ ID NO: 164545 - protein, 7 aa, synthetic construct
KNSRNPE

SEQ ID NO: 164546 - protein, 7 aa, synthetic construct
VDYKGRT

SEQ ID NO: 164547 - protein, 7 aa, synthetic construct
GDPAKSR

SEQ ID NO: 164548 - protein, 7 aa, synthetic construct
GDMKPRH

SEQ ID NO: 164549 - protein, 7 aa, synthetic construct
ITDVPRK

SEQ ID NO: 164550 - protein, 7 aa, synthetic construct
QKHKPTE

SEQ ID NO: 164551 - protein, 7 aa, synthetic construct
VRKNDVM

SEQ ID NO: 164552 - protein, 7 aa, synthetic construct
AREHRGN

SEQ ID NO: 164553 - protein, 7 aa, synthetic construct
PVRQTKD

SEQ ID NO: 164554 - protein, 7 aa, synthetic construct
HQGQSKQ

SEQ ID NO: 164555 - protein, 7 aa, synthetic construct
KYVPKDM

SEQ ID NO: 164556 - protein, 7 aa, synthetic construct
EKGMYKV

SEQ ID NO: 164557 - protein, 7 aa, synthetic construct
VRGHIPL

SEQ ID NO: 164558 - protein, 7 aa, synthetic construct
GEKLMKH

SEQ ID NO: 164559 - protein, 7 aa, synthetic construct
RNRQEPP

SEQ ID NO: 164560 - protein, 7 aa, synthetic construct
VKNHPNN

SEQ ID NO: 164561 - protein, 7 aa, synthetic construct
TLHARVN

SEQ ID NO: 164562 - protein, 7 aa, synthetic construct
KVHDQSR

SEQ ID NO: 164563 - protein, 7 aa, synthetic construct
MGRPEKQ

SEQ ID NO: 164564 - protein, 7 aa, synthetic construct
NADRALR

SEQ ID NO: 164565 - protein, 7 aa, synthetic construct
ITKHDRT

SEQ ID NO: 164566 - protein, 7 aa, synthetic construct
HTKAEFR

SEQ ID NO: 164567 - protein, 7 aa, synthetic construct
AAERRTP

SEQ ID NO: 164568 - protein, 7 aa, synthetic construct
LPQLHRA

SEQ ID NO: 164569 - protein, 7 aa, synthetic construct
INRMLQA

SEQ ID NO: 164570 - protein, 7 aa, synthetic construct
LARTKGD

SEQ ID NO: 164571 - protein, 7 aa, synthetic construct
VRPSISY

SEQ ID NO: 164572 - protein, 7 aa, synthetic construct
MFKIRSE

SEQ ID NO: 164573 - protein, 7 aa, synthetic construct
FKHKMSD

SEQ ID NO: 164574 - protein, 7 aa, synthetic construct
SLPDMKR

SEQ ID NO: 164575 - protein, 7 aa, synthetic construct
GMTTYRA

SEQ ID NO: 164576 - protein, 7 aa, synthetic construct
TIFKHKE

SEQ ID NO: 164577 - protein, 7 aa, synthetic construct
YIGTRHQ

SEQ ID NO: 164578 - protein, 7 aa, synthetic construct
SVPRGHQ

SEQ ID NO: 164579 - protein, 7 aa, synthetic construct
GIHVYKP

SEQ ID NO: 164580 - protein, 7 aa, synthetic construct
TTRGHNN

SEQ ID NO: 164581 - protein, 7 aa, synthetic construct
KMHQIER

SEQ ID NO: 164582 - protein, 7 aa, synthetic construct
ADKLRYS

SEQ ID NO: 164583 - protein, 7 aa, synthetic construct
SDTRNQK

SEQ ID NO: 164584 - protein, 7 aa, synthetic construct
QARKENA

SEQ ID NO: 164585 - protein, 7 aa, synthetic construct
VLGPRSQ

SEQ ID NO: 164586 - protein, 7 aa, synthetic construct
VGRTSDK

SEQ ID NO: 164587 - protein, 7 aa, synthetic construct
RQRTELN

SEQ ID NO: 164588 - protein, 7 aa, synthetic construct
TRPVKFD

SEQ ID NO: 164589 - protein, 7 aa, synthetic construct
KVNHKYE

SEQ ID NO: 164590 - protein, 7 aa, synthetic construct
PDNMKRF

SEQ ID NO: 164591 - protein, 7 aa, synthetic construct
ENKQKQF

SEQ ID NO: 164592 - protein, 7 aa, synthetic construct
EKLVQRS

SEQ ID NO: 164593 - protein, 7 aa, synthetic construct
MYGGPKS

SEQ ID NO: 164594 - protein, 7 aa, synthetic construct
IKMRTEQ

SEQ ID NO: 164595 - protein, 7 aa, synthetic construct
RSDHVRQ

SEQ ID NO: 164596 - protein, 7 aa, synthetic construct
IPHTQAR

SEQ ID NO: 164597 - protein, 7 aa, synthetic construct
YAYGMKN

SEQ ID NO: 164598 - protein, 7 aa, synthetic construct
NEGMKFR

SEQ ID NO: 164599 - protein, 7 aa, synthetic construct
GQEKKHS

SEQ ID NO: 164600 - protein, 7 aa, synthetic construct
VELRNTK

SEQ ID NO: 164601 - protein, 7 aa, synthetic construct
MKRSDDR

SEQ ID NO: 164602 - protein, 7 aa, synthetic construct
EPIRSKV

SEQ ID NO: 164603 - protein, 7 aa, synthetic construct
SAEQKNK

SEQ ID NO: 164604 - protein, 7 aa, synthetic construct
AIGAHRA

SEQ ID NO: 164605 - protein, 7 aa, synthetic construct
GARKDLS

SEQ ID NO: 164606 - protein, 7 aa, synthetic construct
QKGERYG

SEQ ID NO: 164607 - protein, 7 aa, synthetic construct
AENNRKP

SEQ ID NO: 164608 - protein, 7 aa, synthetic construct
SRSKTVE

SEQ ID NO: 164609 - protein, 7 aa, synthetic construct
SENKRSL

SEQ ID NO: 164610 - protein, 7 aa, synthetic construct
GRTTREQ

SEQ ID NO: 164611 - protein, 7 aa, synthetic construct
EKLPTRQ

SEQ ID NO: 164612 - protein, 7 aa, synthetic construct
ASERISK

SEQ ID NO: 164613 - protein, 7 aa, synthetic construct
GPTRGSN

SEQ ID NO: 164614 - protein, 7 aa, synthetic construct
LGRTKDL

SEQ ID NO: 164615 - protein, 7 aa, synthetic construct
RESKIYP

SEQ ID NO: 164616 - protein, 7 aa, synthetic construct
FRKDQTT

SEQ ID NO: 164617 - protein, 7 aa, synthetic construct
KVARAAD

SEQ ID NO: 164618 - protein, 7 aa, synthetic construct
TEGKNKA

SEQ ID NO: 164619 - protein, 7 aa, synthetic construct
PYQKRDV

SEQ ID NO: 164620 - protein, 7 aa, synthetic construct
TDKGTRQ

SEQ ID NO: 164621 - protein, 7 aa, synthetic construct
PVVKRDS

SEQ ID NO: 164622 - protein, 7 aa, synthetic construct
LEYKMKM

SEQ ID NO: 164623 - protein, 7 aa, synthetic construct
RVERQSI

SEQ ID NO: 164624 - protein, 7 aa, synthetic construct
YEKVRSL

SEQ ID NO: 164625 - protein, 7 aa, synthetic construct
GAYSNKA

SEQ ID NO: 164626 - protein, 7 aa, synthetic construct
GSKWVPA

SEQ ID NO: 164627 - protein, 7 aa, synthetic construct
KGYKVEV

SEQ ID NO: 164628 - protein, 7 aa, synthetic construct
AKRVVET

SEQ ID NO: 164629 - protein, 7 aa, synthetic construct
NYKKAIE

SEQ ID NO: 164630 - protein, 7 aa, synthetic construct
ITRGHAM

SEQ ID NO: 164631 - protein, 7 aa, synthetic construct
NDSNRQK

SEQ ID NO: 164632 - protein, 7 aa, synthetic construct
RVVERHA

SEQ ID NO: 164633 - protein, 7 aa, synthetic construct
VRTMKDI

SEQ ID NO: 164634 - protein, 7 aa, synthetic construct
YHVKKDM

SEQ ID NO: 164635 - protein, 7 aa, synthetic construct
EVPNKFK

SEQ ID NO: 164636 - protein, 7 aa, synthetic construct
ITRSQVN

SEQ ID NO: 164637 - protein, 7 aa, synthetic construct
FFNASKA

SEQ ID NO: 164638 - protein, 7 aa, synthetic construct
PELKRTP

SEQ ID NO: 164639 - protein, 7 aa, synthetic construct
YDGKRQH

SEQ ID NO: 164640 - protein, 7 aa, synthetic construct
QFRVTSG

SEQ ID NO: 164641 - protein, 7 aa, synthetic construct
PDNQKPK

SEQ ID NO: 164642 - protein, 7 aa, synthetic construct
MTKGHYN

SEQ ID NO: 164643 - protein, 7 aa, synthetic construct
HEVVKRS

SEQ ID NO: 164644 - protein, 7 aa, synthetic construct
YTELQKK

SEQ ID NO: 164645 - protein, 7 aa, synthetic construct
KLNYMSG

SEQ ID NO: 164646 - protein, 7 aa, synthetic construct
QTHINRA

SEQ ID NO: 164647 - protein, 7 aa, synthetic construct
SDNKKYL

SEQ ID NO: 164648 - protein, 7 aa, synthetic construct
APQRGHQ

SEQ ID NO: 164649 - protein, 7 aa, synthetic construct
LKNMYVS

SEQ ID NO: 164650 - protein, 7 aa, synthetic construct
SYVKPIG

SEQ ID NO: 164651 - protein, 7 aa, synthetic construct
KQTYESK

SEQ ID NO: 164652 - protein, 7 aa, synthetic construct
VKYTERA

SEQ ID NO: 164653 - protein, 7 aa, synthetic construct
TDRKAPY

SEQ ID NO: 164654 - protein, 7 aa, synthetic construct
HDKGYKS

SEQ ID NO: 164655 - protein, 7 aa, synthetic construct
QLGHKYG

SEQ ID NO: 164656 - protein, 7 aa, synthetic construct
MLRNMSA

SEQ ID NO: 164657 - protein, 7 aa, synthetic construct
DRHPVKS

SEQ ID NO: 164658 - protein, 7 aa, synthetic construct
RLQKDNS

SEQ ID NO: 164659 - protein, 7 aa, synthetic construct
NRYIKSE

SEQ ID NO: 164660 - protein, 7 aa, synthetic construct
TDALGRK

SEQ ID NO: 164661 - protein, 7 aa, synthetic construct
AQGGPRN

SEQ ID NO: 164662 - protein, 7 aa, synthetic construct
FHSKETK

SEQ ID NO: 164663 - protein, 7 aa, synthetic construct
NAEKVSR

SEQ ID NO: 164664 - protein, 7 aa, synthetic construct
LPRTANQ

SEQ ID NO: 164665 - protein, 7 aa, synthetic construct
YDLSRKA

SEQ ID NO: 164666 - protein, 7 aa, synthetic construct
YKGKDPF

SEQ ID NO: 164667 - protein, 7 aa, synthetic construct
KSRDQNI

SEQ ID NO: 164668 - protein, 7 aa, synthetic construct
LKYAAIA

SEQ ID NO: 164669 - protein, 7 aa, synthetic construct
DGVLRKT

SEQ ID NO: 164670 - protein, 7 aa, synthetic construct
TTSRGHG

SEQ ID NO: 164671 - protein, 7 aa, synthetic construct
RVKHDVS

SEQ ID NO: 164672 - protein, 7 aa, synthetic construct
VYGTYKA

SEQ ID NO: 164673 - protein, 7 aa, synthetic construct
ARQKAEV

SEQ ID NO: 164674 - protein, 7 aa, synthetic construct
VAHAARQ

SEQ ID NO: 164675 - protein, 7 aa, synthetic construct
EKRAAPV

SEQ ID NO: 164676 - protein, 7 aa, synthetic construct
KRIVTPE

SEQ ID NO: 164677 - protein, 7 aa, synthetic construct
KIRVSIE

SEQ ID NO: 164678 - protein, 7 aa, synthetic construct
IMPYSKP

SEQ ID NO: 164679 - protein, 7 aa, synthetic construct
EKKYSPP

SEQ ID NO: 164680 - protein, 7 aa, synthetic construct
IREGQRS

SEQ ID NO: 164681 - protein, 7 aa, synthetic construct
QLDHKKF

SEQ ID NO: 164682 - protein, 7 aa, synthetic construct
IKGHTYV

SEQ ID NO: 164683 - protein, 7 aa, synthetic construct
KSHKDVY

SEQ ID NO: 164684 - protein, 7 aa, synthetic construct
QMHPKNM

SEQ ID NO: 164685 - protein, 7 aa, synthetic construct
IKYDRDK

SEQ ID NO: 164686 - protein, 7 aa, synthetic construct
PKNREPT

SEQ ID NO: 164687 - protein, 7 aa, synthetic construct
FKGLYAP

SEQ ID NO: 164688 - protein, 7 aa, synthetic construct
VRSKDLQ

SEQ ID NO: 164689 - protein, 7 aa, synthetic construct
PNKRDDK

SEQ ID NO: 164690 - protein, 7 aa, synthetic construct
AGKYSGQ

SEQ ID NO: 164691 - protein, 7 aa, synthetic construct
IDKRDKH

SEQ ID NO: 164692 - protein, 7 aa, synthetic construct
QKRETHV

SEQ ID NO: 164693 - protein, 7 aa, synthetic construct
DKPLSRH

SEQ ID NO: 164694 - protein, 7 aa, synthetic construct
RYSGELK

SEQ ID NO: 164695 - protein, 7 aa, synthetic construct
EPKRQPQ

SEQ ID NO: 164696 - protein, 7 aa, synthetic construct
DSMNRSK

SEQ ID NO: 164697 - protein, 7 aa, synthetic construct
LDKYLRQ

SEQ ID NO: 164698 - protein, 7 aa, synthetic construct
KMRTIVD

SEQ ID NO: 164699 - protein, 7 aa, synthetic construct
TGLYKAS

SEQ ID NO: 164700 - protein, 7 aa, synthetic construct
QSRGRDI

SEQ ID NO: 164701 - protein, 7 aa, synthetic construct
YINPRQN

SEQ ID NO: 164702 - protein, 7 aa, synthetic construct
SIDQRSR

SEQ ID NO: 164703 - protein, 7 aa, synthetic construct
VSYTNKN

SEQ ID NO: 164704 - protein, 7 aa, synthetic construct
WEKVPKN

SEQ ID NO: 164705 - protein, 7 aa, synthetic construct
IDSHKVR

SEQ ID NO: 164706 - protein, 7 aa, synthetic construct
GMATHRG

SEQ ID NO: 164707 - protein, 7 aa, synthetic construct
QGRQHVV

SEQ ID NO: 164708 - protein, 7 aa, synthetic construct
NLHLTRA

SEQ ID NO: 164709 - protein, 7 aa, synthetic construct
DRSIRNT

SEQ ID NO: 164710 - protein, 7 aa, synthetic construct
GEPRIRT

SEQ ID NO: 164711 - protein, 7 aa, synthetic construct
LPDVRRL

SEQ ID NO: 164712 - protein, 7 aa, synthetic construct
RSIPKSE

SEQ ID NO: 164713 - protein, 7 aa, synthetic construct
PERVKVQ

SEQ ID NO: 164714 - protein, 7 aa, synthetic construct
ARPHSEK

SEQ ID NO: 164715 - protein, 7 aa, synthetic construct
GKHAKDF

SEQ ID NO: 164716 - protein, 7 aa, synthetic construct
GPANAKW

SEQ ID NO: 164717 - protein, 7 aa, synthetic construct
RIHTREP

SEQ ID NO: 164718 - protein, 7 aa, synthetic construct
RVDSVQR

SEQ ID NO: 164719 - protein, 7 aa, synthetic construct
FVKKDYQ

SEQ ID NO: 164720 - protein, 7 aa, synthetic construct
ARGGDLK

SEQ ID NO: 164721 - protein, 7 aa, synthetic construct
DKGYIRG

SEQ ID NO: 164722 - protein, 7 aa, synthetic construct
GEKPKFT

SEQ ID NO: 164723 - protein, 7 aa, synthetic construct
YSRPHIA

SEQ ID NO: 164724 - protein, 7 aa, synthetic construct
LSFSSKQ

SEQ ID NO: 164725 - protein, 7 aa, synthetic construct
MGVKHDR

SEQ ID NO: 164726 - protein, 7 aa, synthetic construct
PAERKVM

SEQ ID NO: 164727 - protein, 7 aa, synthetic construct
VSMHVRG

SEQ ID NO: 164728 - protein, 7 aa, synthetic construct
TNLMKYG

SEQ ID NO: 164729 - protein, 7 aa, synthetic construct
DANTRRA

SEQ ID NO: 164730 - protein, 7 aa, synthetic construct
KARSDPM

SEQ ID NO: 164731 - protein, 7 aa, synthetic construct
NMERRTN

SEQ ID NO: 164732 - protein, 7 aa, synthetic construct
IRLKEFN

SEQ ID NO: 164733 - protein, 7 aa, synthetic construct
IPNDYKR

SEQ ID NO: 164734 - protein, 7 aa, synthetic construct
HDKGTYK

SEQ ID NO: 164735 - protein, 7 aa, synthetic construct
RIEKGIY

SEQ ID NO: 164736 - protein, 7 aa, synthetic construct
VRLRETN

SEQ ID NO: 164737 - protein, 7 aa, synthetic construct
REHARLP

SEQ ID NO: 164738 - protein, 7 aa, synthetic construct
PGKRDAT

SEQ ID NO: 164739 - protein, 7 aa, synthetic construct
YPNKHDK

SEQ ID NO: 164740 - protein, 7 aa, synthetic construct
QRNVIMA

SEQ ID NO: 164741 - protein, 7 aa, synthetic construct
NANEFKK

SEQ ID NO: 164742 - protein, 7 aa, synthetic construct
YEIKIRS

SEQ ID NO: 164743 - protein, 7 aa, synthetic construct
RTREVHV

SEQ ID NO: 164744 - protein, 7 aa, synthetic construct
SKTRQDL

SEQ ID NO: 164745 - protein, 7 aa, synthetic construct
KMFPKEM

SEQ ID NO: 164746 - protein, 7 aa, synthetic construct
FDKQSRS

SEQ ID NO: 164747 - protein, 7 aa, synthetic construct
MMEVRQK

SEQ ID NO: 164748 - protein, 7 aa, synthetic construct
ELKTYKS

SEQ ID NO: 164749 - protein, 7 aa, synthetic construct
TGRPVHN

SEQ ID NO: 164750 - protein, 7 aa, synthetic construct
ARSREGV

SEQ ID NO: 164751 - protein, 7 aa, synthetic construct
EVRVLKA

SEQ ID NO: 164752 - protein, 7 aa, synthetic construct
HSGGPHR

SEQ ID NO: 164753 - protein, 7 aa, synthetic construct
SDLPRKT

SEQ ID NO: 164754 - protein, 7 aa, synthetic construct
MMRSDKQ

SEQ ID NO: 164755 - protein, 7 aa, synthetic construct
LYPNTKS

SEQ ID NO: 164756 - protein, 7 aa, synthetic construct
NLHPRSS

SEQ ID NO: 164757 - protein, 7 aa, synthetic construct
ADGRFKA

SEQ ID NO: 164758 - protein, 7 aa, synthetic construct
KIRDNRD

SEQ ID NO: 164759 - protein, 7 aa, synthetic construct
KTYVQSG

SEQ ID NO: 164760 - protein, 7 aa, synthetic construct
MKHDIYK

SEQ ID NO: 164761 - protein, 7 aa, synthetic construct
ADKNPYK

SEQ ID NO: 164762 - protein, 7 aa, synthetic construct
GDTKRMH

SEQ ID NO: 164763 - protein, 7 aa, synthetic construct
WNSKEHK

SEQ ID NO: 164764 - protein, 7 aa, synthetic construct
YDTRMKT

SEQ ID NO: 164765 - protein, 7 aa, synthetic construct
VQHKNDK

SEQ ID NO: 164766 - protein, 7 aa, synthetic construct
THAPRNA

SEQ ID NO: 164767 - protein, 7 aa, synthetic construct
AHEKRMV

SEQ ID NO: 164768 - protein, 7 aa, synthetic construct
IQGNHRQ

SEQ ID NO: 164769 - protein, 7 aa, synthetic construct
LSKYEFK

SEQ ID NO: 164770 - protein, 7 aa, synthetic construct
RDKRDGN

SEQ ID NO: 164771 - protein, 7 aa, synthetic construct
KRPMNDF

SEQ ID NO: 164772 - protein, 7 aa, synthetic construct
KMKFQTD

SEQ ID NO: 164773 - protein, 7 aa, synthetic construct
IRNLVGN

SEQ ID NO: 164774 - protein, 7 aa, synthetic construct
YKYTTSS

SEQ ID NO: 164775 - protein, 7 aa, synthetic construct
TYEVKNK

SEQ ID NO: 164776 - protein, 7 aa, synthetic construct
DRPMTRG

SEQ ID NO: 164777 - protein, 7 aa, synthetic construct
LPFKRTE

SEQ ID NO: 164778 - protein, 7 aa, synthetic construct
DRPYQKP

SEQ ID NO: 164779 - protein, 7 aa, synthetic construct
QAKYKDP

SEQ ID NO: 164780 - protein, 7 aa, synthetic construct
YPTPRDK

SEQ ID NO: 164781 - protein, 7 aa, synthetic construct
DNVKMKM

SEQ ID NO: 164782 - protein, 7 aa, synthetic construct
VLRKDTA

SEQ ID NO: 164783 - protein, 7 aa, synthetic construct
RSMVNDR

SEQ ID NO: 164784 - protein, 7 aa, synthetic construct
DPTRAKL

SEQ ID NO: 164785 - protein, 7 aa, synthetic construct
IDVVKRQ

SEQ ID NO: 164786 - protein, 7 aa, synthetic construct
EPQKTQR

SEQ ID NO: 164787 - protein, 7 aa, synthetic construct
FDKRYVN

SEQ ID NO: 164788 - protein, 7 aa, synthetic construct
TSRNKEV

SEQ ID NO: 164789 - protein, 7 aa, synthetic construct
VPREYSK

SEQ ID NO: 164790 - protein, 7 aa, synthetic construct
EKIQRTN

SEQ ID NO: 164791 - protein, 7 aa, synthetic construct
NRGKDPV

SEQ ID NO: 164792 - protein, 7 aa, synthetic construct
YDRVGKL

SEQ ID NO: 164793 - protein, 7 aa, synthetic construct
TFSRPSG

SEQ ID NO: 164794 - protein, 7 aa, synthetic construct
YQPEGKK

SEQ ID NO: 164795 - protein, 7 aa, synthetic construct
FKGSHFN

SEQ ID NO: 164796 - protein, 7 aa, synthetic construct
HKPYNNT

SEQ ID NO: 164797 - protein, 7 aa, synthetic construct
AHGPIRN

SEQ ID NO: 164798 - protein, 7 aa, synthetic construct
YQGKSYI

SEQ ID NO: 164799 - protein, 7 aa, synthetic construct
IYAAAKA

SEQ ID NO: 164800 - protein, 7 aa, synthetic construct
RSTKDVY

SEQ ID NO: 164801 - protein, 7 aa, synthetic construct
ASDVARK

SEQ ID NO: 164802 - protein, 7 aa, synthetic construct
LKLSYSG

SEQ ID NO: 164803 - protein, 7 aa, synthetic construct
KGYLKGD

SEQ ID NO: 164804 - protein, 7 aa, synthetic construct
SKTYIGA

SEQ ID NO: 164805 - protein, 7 aa, synthetic construct
GRPQHMQ

SEQ ID NO: 164806 - protein, 7 aa, synthetic construct
LKHHAPQ

SEQ ID NO: 164807 - protein, 7 aa, synthetic construct
MSKPIMY

SEQ ID NO: 164808 - protein, 7 aa, synthetic construct
DIQARTK

SEQ ID NO: 164809 - protein, 7 aa, synthetic construct
ADHIKKA

SEQ ID NO: 164810 - protein, 7 aa, synthetic construct
LERRQTV

SEQ ID NO: 164811 - protein, 7 aa, synthetic construct
KVNKMYE

SEQ ID NO: 164812 - protein, 7 aa, synthetic construct
VLRKETM

SEQ ID NO: 164813 - protein, 7 aa, synthetic construct
ERPQAMK

SEQ ID NO: 164814 - protein, 7 aa, synthetic construct
IKQFIQG

SEQ ID NO: 164815 - protein, 7 aa, synthetic construct
KIPEFGR

SEQ ID NO: 164816 - protein, 7 aa, synthetic construct
RRSELPV

SEQ ID NO: 164817 - protein, 7 aa, synthetic construct
EKLRMVN

SEQ ID NO: 164818 - protein, 7 aa, synthetic construct
TDQTGKK

SEQ ID NO: 164819 - protein, 7 aa, synthetic construct
IDSKARQ

SEQ ID NO: 164820 - protein, 7 aa, synthetic construct
RHIKVQE

SEQ ID NO: 164821 - protein, 7 aa, synthetic construct
IGRSTSL

SEQ ID NO: 164822 - protein, 7 aa, synthetic construct
RDGMRHG

SEQ ID NO: 164823 - protein, 7 aa, synthetic construct
AEMNKNK

SEQ ID NO: 164824 - protein, 7 aa, synthetic construct
QTGVIRA

SEQ ID NO: 164825 - protein, 7 aa, synthetic construct
TQEIRIK

SEQ ID NO: 164826 - protein, 7 aa, synthetic construct
KARSDSN

SEQ ID NO: 164827 - protein, 7 aa, synthetic construct
TQLHKYN

SEQ ID NO: 164828 - protein, 7 aa, synthetic construct
DIKPRYA

SEQ ID NO: 164829 - protein, 7 aa, synthetic construct
LTTYKTM

SEQ ID NO: 164830 - protein, 7 aa, synthetic construct
IHKPVYG

SEQ ID NO: 164831 - protein, 7 aa, synthetic construct
VKQYSIS

SEQ ID NO: 164832 - protein, 7 aa, synthetic construct
KSTRESY

SEQ ID NO: 164833 - protein, 7 aa, synthetic construct
TLIKYKD

SEQ ID NO: 164834 - protein, 7 aa, synthetic construct
RKLIQLD

SEQ ID NO: 164835 - protein, 7 aa, synthetic construct
TVEKVRH

SEQ ID NO: 164836 - protein, 7 aa, synthetic construct
TEARMKH

SEQ ID NO: 164837 - protein, 7 aa, synthetic construct
DTGKKIL

SEQ ID NO: 164838 - protein, 7 aa, synthetic construct
GVIRFKE

SEQ ID NO: 164839 - protein, 7 aa, synthetic construct
RDKKDYM

SEQ ID NO: 164840 - protein, 7 aa, synthetic construct
GRAARDI

SEQ ID NO: 164841 - protein, 7 aa, synthetic construct
IVHKPYS

SEQ ID NO: 164842 - protein, 7 aa, synthetic construct
GDIRRTG

SEQ ID NO: 164843 - protein, 7 aa, synthetic construct
YTELTKK

SEQ ID NO: 164844 - protein, 7 aa, synthetic construct
QKHQIVY

SEQ ID NO: 164845 - protein, 7 aa, synthetic construct
YPRIIPN

SEQ ID NO: 164846 - protein, 7 aa, synthetic construct
TMGELRK

SEQ ID NO: 164847 - protein, 7 aa, synthetic construct
MKSIYSS

SEQ ID NO: 164848 - protein, 7 aa, synthetic construct
GIAAHRA

SEQ ID NO: 164849 - protein, 7 aa, synthetic construct
ITDRMHK

SEQ ID NO: 164850 - protein, 7 aa, synthetic construct
DNPYKKG

SEQ ID NO: 164851 - protein, 7 aa, synthetic construct
QDGKMAR

SEQ ID NO: 164852 - protein, 7 aa, synthetic construct
PRVRGES

SEQ ID NO: 164853 - protein, 7 aa, synthetic construct
INKHDKY

SEQ ID NO: 164854 - protein, 7 aa, synthetic construct
RLTKDAQ

SEQ ID NO: 164855 - protein, 7 aa, synthetic construct
NENIKHK

SEQ ID NO: 164856 - protein, 7 aa, synthetic construct
ISGTRHT

SEQ ID NO: 164857 - protein, 7 aa, synthetic construct
SHSKPAN

SEQ ID NO: 164858 - protein, 7 aa, synthetic construct
DRRASLG

SEQ ID NO: 164859 - protein, 7 aa, synthetic construct
VKFMTAP

SEQ ID NO: 164860 - protein, 7 aa, synthetic construct
RLKVSND

SEQ ID NO: 164861 - protein, 7 aa, synthetic construct
DMPRPKL

SEQ ID NO: 164862 - protein, 7 aa, synthetic construct
VFSRQSQ

SEQ ID NO: 164863 - protein, 7 aa, synthetic construct
MVYSTKS

SEQ ID NO: 164864 - protein, 7 aa, synthetic construct
QDSRMKY

SEQ ID NO: 164865 - protein, 7 aa, synthetic construct
GVERIKL

SEQ ID NO: 164866 - protein, 7 aa, synthetic construct
YGIGKYG

SEQ ID NO: 164867 - protein, 7 aa, synthetic construct
TGKFASN

SEQ ID NO: 164868 - protein, 7 aa, synthetic construct
IIGTSRP

SEQ ID NO: 164869 - protein, 7 aa, synthetic construct
QDARKNN

SEQ ID NO: 164870 - protein, 7 aa, synthetic construct
VKYTMPQ

SEQ ID NO: 164871 - protein, 7 aa, synthetic construct
FPADRRN

SEQ ID NO: 164872 - protein, 7 aa, synthetic construct
EEKPKFK

SEQ ID NO: 164873 - protein, 7 aa, synthetic construct
EVRGIRP

SEQ ID NO: 164874 - protein, 7 aa, synthetic construct
HPNPQRG

SEQ ID NO: 164875 - protein, 7 aa, synthetic construct
MSHGKDR

SEQ ID NO: 164876 - protein, 7 aa, synthetic construct
PEKTRSS

SEQ ID NO: 164877 - protein, 7 aa, synthetic construct
VTINPKH

SEQ ID NO: 164878 - protein, 7 aa, synthetic construct
HQDRIKN

SEQ ID NO: 164879 - protein, 7 aa, synthetic construct
TIDKGHK

SEQ ID NO: 164880 - protein, 7 aa, synthetic construct
VDRKFTN

SEQ ID NO: 164881 - protein, 7 aa, synthetic construct
IVEARRA

SEQ ID NO: 164882 - protein, 7 aa, synthetic construct
EKPYGRP

SEQ ID NO: 164883 - protein, 7 aa, synthetic construct
QYGTLRA

SEQ ID NO: 164884 - protein, 7 aa, synthetic construct
DRHAKGM

SEQ ID NO: 164885 - protein, 7 aa, synthetic construct
GVEKQNR

SEQ ID NO: 164886 - protein, 7 aa, synthetic construct
PKTRMNE

SEQ ID NO: 164887 - protein, 7 aa, synthetic construct
YAHVVKM

SEQ ID NO: 164888 - protein, 7 aa, synthetic construct
VLRQDKA

SEQ ID NO: 164889 - protein, 7 aa, synthetic construct
TTHPKHM

SEQ ID NO: 164890 - protein, 7 aa, synthetic construct
AELKKYS

SEQ ID NO: 164891 - protein, 7 aa, synthetic construct
VSRVHAN

SEQ ID NO: 164892 - protein, 7 aa, synthetic construct
FAETRAR

SEQ ID NO: 164893 - protein, 7 aa, synthetic construct
QRGVHVG

SEQ ID NO: 164894 - protein, 7 aa, synthetic construct
NIPLYKS

SEQ ID NO: 164895 - protein, 7 aa, synthetic construct
DKPYRGQ

SEQ ID NO: 164896 - protein, 7 aa, synthetic construct
TGKAYLN

SEQ ID NO: 164897 - protein, 7 aa, synthetic construct
KKFQHGD

SEQ ID NO: 164898 - protein, 7 aa, synthetic construct
RSTGKDH

SEQ ID NO: 164899 - protein, 7 aa, synthetic construct
WRTLTNS

SEQ ID NO: 164900 - protein, 7 aa, synthetic construct
NDGKGMR

SEQ ID NO: 164901 - protein, 7 aa, synthetic construct
MTGVAHR

SEQ ID NO: 164902 - protein, 7 aa, synthetic construct
ARHAKGE

SEQ ID NO: 164903 - protein, 7 aa, synthetic construct
TEPGVKK

SEQ ID NO: 164904 - protein, 7 aa, synthetic construct
DSNYKVK

SEQ ID NO: 164905 - protein, 7 aa, synthetic construct
ETKVRHV

SEQ ID NO: 164906 - protein, 7 aa, synthetic construct
IGHFKGG

SEQ ID NO: 164907 - protein, 7 aa, synthetic construct
YELVRKS

SEQ ID NO: 164908 - protein, 7 aa, synthetic construct
PAEKFNK

SEQ ID NO: 164909 - protein, 7 aa, synthetic construct
DGLRVKT

SEQ ID NO: 164910 - protein, 7 aa, synthetic construct
RQTKDVY

SEQ ID NO: 164911 - protein, 7 aa, synthetic construct
KLSREAQ

SEQ ID NO: 164912 - protein, 7 aa, synthetic construct
PEPRVSK

SEQ ID NO: 164913 - protein, 7 aa, synthetic construct
YKYTTHA

SEQ ID NO: 164914 - protein, 7 aa, synthetic construct
TRKLIDS

SEQ ID NO: 164915 - protein, 7 aa, synthetic construct
LERGTRT

SEQ ID NO: 164916 - protein, 7 aa, synthetic construct
DQVAKRT

SEQ ID NO: 164917 - protein, 7 aa, synthetic construct
YKHNQQS

SEQ ID NO: 164918 - protein, 7 aa, synthetic construct
HSKYLVG

SEQ ID NO: 164919 - protein, 7 aa, synthetic construct
DSKNYKN

SEQ ID NO: 164920 - protein, 7 aa, synthetic construct
KLDRHTF

SEQ ID NO: 164921 - protein, 7 aa, synthetic construct
TSLEARK

SEQ ID NO: 164922 - protein, 7 aa, synthetic construct
YLKEITR

SEQ ID NO: 164923 - protein, 7 aa, synthetic construct
VSKNPNM

SEQ ID NO: 164924 - protein, 7 aa, synthetic construct
KSRGEGY

SEQ ID NO: 164925 - protein, 7 aa, synthetic construct
DFSRVKV

SEQ ID NO: 164926 - protein, 7 aa, synthetic construct
KRVVQSD

SEQ ID NO: 164927 - protein, 7 aa, synthetic construct
THVRPLQ

SEQ ID NO: 164928 - protein, 7 aa, synthetic construct
YEKFSSR

SEQ ID NO: 164929 - protein, 7 aa, synthetic construct
TARGEAK

SEQ ID NO: 164930 - protein, 7 aa, synthetic construct
DKYITRA

SEQ ID NO: 164931 - protein, 7 aa, synthetic construct
GFENKRV

SEQ ID NO: 164932 - protein, 7 aa, synthetic construct
KDFHTGK

SEQ ID NO: 164933 - protein, 7 aa, synthetic construct
NDKRANV

SEQ ID NO: 164934 - protein, 7 aa, synthetic construct
KTIHRTE

SEQ ID NO: 164935 - protein, 7 aa, synthetic construct
SARGEPR

SEQ ID NO: 164936 - protein, 7 aa, synthetic construct
NDVKPRG

SEQ ID NO: 164937 - protein, 7 aa, synthetic construct
RMKFNME

SEQ ID NO: 164938 - protein, 7 aa, synthetic construct
GGPRNSS

SEQ ID NO: 164939 - protein, 7 aa, synthetic construct
EIQKMKH

SEQ ID NO: 164940 - protein, 7 aa, synthetic construct
GNDRRSV

SEQ ID NO: 164941 - protein, 7 aa, synthetic construct
ARMPKVD

SEQ ID NO: 164942 - protein, 7 aa, synthetic construct
VRDITRA

SEQ ID NO: 164943 - protein, 7 aa, synthetic construct
HKPPRVE

SEQ ID NO: 164944 - protein, 7 aa, synthetic construct
QKIRAMD

SEQ ID NO: 164945 - protein, 7 aa, synthetic construct
VPMRKGD

SEQ ID NO: 164946 - protein, 7 aa, synthetic construct
FTRPKPD

SEQ ID NO: 164947 - protein, 7 aa, synthetic construct
IIKRTDV

SEQ ID NO: 164948 - protein, 7 aa, synthetic construct
FENNKQK

SEQ ID NO: 164949 - protein, 7 aa, synthetic construct
DSKRTMQ

SEQ ID NO: 164950 - protein, 7 aa, synthetic construct
WPANDRK

SEQ ID NO: 164951 - protein, 7 aa, synthetic construct
KGRSDII

SEQ ID NO: 164952 - protein, 7 aa, synthetic construct
RSHNVAS

SEQ ID NO: 164953 - protein, 7 aa, synthetic construct
ETSRVKA

SEQ ID NO: 164954 - protein, 7 aa, synthetic construct
YHGGVGK

SEQ ID NO: 164955 - protein, 7 aa, synthetic construct
HKREPNT

SEQ ID NO: 164956 - protein, 7 aa, synthetic construct
FDKNQHK

SEQ ID NO: 164957 - protein, 7 aa, synthetic construct
QHGSVRQ

SEQ ID NO: 164958 - protein, 7 aa, synthetic construct
LFDTGKK

SEQ ID NO: 164959 - protein, 7 aa, synthetic construct
DQQNKSR

SEQ ID NO: 164960 - protein, 7 aa, synthetic construct
RTFNANM

SEQ ID NO: 164961 - protein, 7 aa, synthetic construct
EGKYIKG

SEQ ID NO: 164962 - protein, 7 aa, synthetic construct
VERNRQT

SEQ ID NO: 164963 - protein, 7 aa, synthetic construct
QTGYLKS

SEQ ID NO: 164964 - protein, 7 aa, synthetic construct
KGRLGEG

SEQ ID NO: 164965 - protein, 7 aa, synthetic construct
PQVYKSG

SEQ ID NO: 164966 - protein, 7 aa, synthetic construct
GDFKNRM

SEQ ID NO: 164967 - protein, 7 aa, synthetic construct
ILKGYIG

SEQ ID NO: 164968 - protein, 7 aa, synthetic construct
SRKEIYI

SEQ ID NO: 164969 - protein, 7 aa, synthetic construct
TEPTRFK

SEQ ID NO: 164970 - protein, 7 aa, synthetic construct
KPERPAQ

SEQ ID NO: 164971 - protein, 7 aa, synthetic construct
SYKHEKA

SEQ ID NO: 164972 - protein, 7 aa, synthetic construct
PEKRTSP

SEQ ID NO: 164973 - protein, 7 aa, synthetic construct
ADQTRKG

SEQ ID NO: 164974 - protein, 7 aa, synthetic construct
INRIVDK

SEQ ID NO: 164975 - protein, 7 aa, synthetic construct
YESIKNK

SEQ ID NO: 164976 - protein, 7 aa, synthetic construct
LMTHKYS

SEQ ID NO: 164977 - protein, 7 aa, synthetic construct
TENRNTK

SEQ ID NO: 164978 - protein, 7 aa, synthetic construct
RDIPKNI

SEQ ID NO: 164979 - protein, 7 aa, synthetic construct
GGLYQKA

SEQ ID NO: 164980 - protein, 7 aa, synthetic construct
EVYKLKS

SEQ ID NO: 164981 - protein, 7 aa, synthetic construct
KRGDYMG

SEQ ID NO: 164982 - protein, 7 aa, synthetic construct
KRGEPVN

SEQ ID NO: 164983 - protein, 7 aa, synthetic construct
HTRQTPS

SEQ ID NO: 164984 - protein, 7 aa, synthetic construct
YSGYKSI

SEQ ID NO: 164985 - protein, 7 aa, synthetic construct
TAERNRT

SEQ ID NO: 164986 - protein, 7 aa, synthetic construct
LEKFVKM

SEQ ID NO: 164987 - protein, 7 aa, synthetic construct
MINQRHQ

SEQ ID NO: 164988 - protein, 7 aa, synthetic construct
TDRAVLR

SEQ ID NO: 164989 - protein, 7 aa, synthetic construct
PAKRNDI

SEQ ID NO: 164990 - protein, 7 aa, synthetic construct
AAKYVVG

SEQ ID NO: 164991 - protein, 7 aa, synthetic construct
NVIYQKP

SEQ ID NO: 164992 - protein, 7 aa, synthetic construct
GDRKMNM

SEQ ID NO: 164993 - protein, 7 aa, synthetic construct
KTMKYIE

SEQ ID NO: 164994 - protein, 7 aa, synthetic construct
EKAMRFS

SEQ ID NO: 164995 - protein, 7 aa, synthetic construct
QGGRASI

SEQ ID NO: 164996 - protein, 7 aa, synthetic construct
DKFHSAK

SEQ ID NO: 164997 - protein, 7 aa, synthetic construct
FTKEVHR

SEQ ID NO: 164998 - protein, 7 aa, synthetic construct
GQKYILS

SEQ ID NO: 164999 - protein, 7 aa, synthetic construct
LSRENKS

SEQ ID NO: 165000 - protein, 7 aa, synthetic construct
GLTYKNN

SEQ ID NO: 165001 - protein, 7 aa, synthetic construct
FVQKKDT

SEQ ID NO: 165002 - protein, 7 aa, synthetic construct
TTEKQYK

SEQ ID NO: 165003 - protein, 7 aa, synthetic construct
KGEYVPR

SEQ ID NO: 165004 - protein, 7 aa, synthetic construct
NMHQIRA

SEQ ID NO: 165005 - protein, 7 aa, synthetic construct
VKKEAWL

SEQ ID NO: 165006 - protein, 7 aa, synthetic construct
KIYTQSA

SEQ ID NO: 165007 - protein, 7 aa, synthetic construct
IQHQSRG

SEQ ID NO: 165008 - protein, 7 aa, synthetic construct
IGKVYGG

SEQ ID NO: 165009 - protein, 7 aa, synthetic construct
SARTDKQ

SEQ ID NO: 165010 - protein, 7 aa, synthetic construct
KTRQDNV

SEQ ID NO: 165011 - protein, 7 aa, synthetic construct
AMYNIKP

SEQ ID NO: 165012 - protein, 7 aa, synthetic construct
LGRQVPN

SEQ ID NO: 165013 - protein, 7 aa, synthetic construct
HDAVRIK

SEQ ID NO: 165014 - protein, 7 aa, synthetic construct
NKRGDPV

SEQ ID NO: 165015 - protein, 7 aa, synthetic construct
SDTRSLR

SEQ ID NO: 165016 - protein, 7 aa, synthetic construct
VEHKFKS

SEQ ID NO: 165017 - protein, 7 aa, synthetic construct
DKIHAQR

SEQ ID NO: 165018 - protein, 7 aa, synthetic construct
RVGTRDN

SEQ ID NO: 165019 - protein, 7 aa, synthetic construct
MTQEMKR

SEQ ID NO: 165020 - protein, 7 aa, synthetic construct
VNRKDFV

SEQ ID NO: 165021 - protein, 7 aa, synthetic construct
VKFQANA

SEQ ID NO: 165022 - protein, 7 aa, synthetic construct
ITERNRM

SEQ ID NO: 165023 - protein, 7 aa, synthetic construct
LKFPTRE

SEQ ID NO: 165024 - protein, 7 aa, synthetic construct
RSLGLRD

SEQ ID NO: 165025 - protein, 7 aa, synthetic construct
DRTLKGL

SEQ ID NO: 165026 - protein, 7 aa, synthetic construct
QPAQRHN

SEQ ID NO: 165027 - protein, 7 aa, synthetic construct
ALKRDHP

SEQ ID NO: 165028 - protein, 7 aa, synthetic construct
KMGRNEV

SEQ ID NO: 165029 - protein, 7 aa, synthetic construct
EAPKYNK

SEQ ID NO: 165030 - protein, 7 aa, synthetic construct
IAVRERA

SEQ ID NO: 165031 - protein, 7 aa, synthetic construct
DQTNRLK

SEQ ID NO: 165032 - protein, 7 aa, synthetic construct
KPSSRNE

SEQ ID NO: 165033 - protein, 7 aa, synthetic construct
NPDTKRN

SEQ ID NO: 165034 - protein, 7 aa, synthetic construct
DTRQKGH

SEQ ID NO: 165035 - protein, 7 aa, synthetic construct
GIARNHA

SEQ ID NO: 165036 - protein, 7 aa, synthetic construct
KNKADLL

SEQ ID NO: 165037 - protein, 7 aa, synthetic construct
STGHPKS

SEQ ID NO: 165038 - protein, 7 aa, synthetic construct
ATDRARS

SEQ ID NO: 165039 - protein, 7 aa, synthetic construct
GMVERKM

SEQ ID NO: 165040 - protein, 7 aa, synthetic construct
KARNIAD

SEQ ID NO: 165041 - protein, 7 aa, synthetic construct
QERRQLP

SEQ ID NO: 165042 - protein, 7 aa, synthetic construct
WAEKNNK

SEQ ID NO: 165043 - protein, 7 aa, synthetic construct
VAVRNER

SEQ ID NO: 165044 - protein, 7 aa, synthetic construct
TSKYQAN

SEQ ID NO: 165045 - protein, 7 aa, synthetic construct
KRNDITQ

SEQ ID NO: 165046 - protein, 7 aa, synthetic construct
GADRRTN

SEQ ID NO: 165047 - protein, 7 aa, synthetic construct
RTHPVTL

SEQ ID NO: 165048 - protein, 7 aa, synthetic construct
SVNQHRG

SEQ ID NO: 165049 - protein, 7 aa, synthetic construct
TLMYTKP

SEQ ID NO: 165050 - protein, 7 aa, synthetic construct
YAEARPR

SEQ ID NO: 165051 - protein, 7 aa, synthetic construct
ADHKNKA

SEQ ID NO: 165052 - protein, 7 aa, synthetic construct
RTGDRGN

SEQ ID NO: 165053 - protein, 7 aa, synthetic construct
PEKKHFT

SEQ ID NO: 165054 - protein, 7 aa, synthetic construct
GQPIEKK

SEQ ID NO: 165055 - protein, 7 aa, synthetic construct
RSHINKE

SEQ ID NO: 165056 - protein, 7 aa, synthetic construct
KRIPPVE

SEQ ID NO: 165057 - protein, 7 aa, synthetic construct
MTRLGSS

SEQ ID NO: 165058 - protein, 7 aa, synthetic construct
NRGESKY

SEQ ID NO: 165059 - protein, 7 aa, synthetic construct
MVHTSRS

SEQ ID NO: 165060 - protein, 7 aa, synthetic construct
KSAHKGD

SEQ ID NO: 165061 - protein, 7 aa, synthetic construct
TKTYMPG

SEQ ID NO: 165062 - protein, 7 aa, synthetic construct
LPRIHMN

SEQ ID NO: 165063 - protein, 7 aa, synthetic construct
NRAIEQR

SEQ ID NO: 165064 - protein, 7 aa, synthetic construct
MDGRRVI

SEQ ID NO: 165065 - protein, 7 aa, synthetic construct
TDIRLKL

SEQ ID NO: 165066 - protein, 7 aa, synthetic construct
SEQKILR

SEQ ID NO: 165067 - protein, 7 aa, synthetic construct
HEKTISR

SEQ ID NO: 165068 - protein, 7 aa, synthetic construct
TVADVKR

SEQ ID NO: 165069 - protein, 7 aa, synthetic construct
YVNVEKK

SEQ ID NO: 165070 - protein, 7 aa, synthetic construct
KFMGNER

SEQ ID NO: 165071 - protein, 7 aa, synthetic construct
GQGTRHG

SEQ ID NO: 165072 - protein, 7 aa, synthetic construct
SIGERRA

SEQ ID NO: 165073 - protein, 7 aa, synthetic construct
DFAKAGK

SEQ ID NO: 165074 - protein, 7 aa, synthetic construct
PRRGTEV

SEQ ID NO: 165075 - protein, 7 aa, synthetic construct
QQDVSKR

SEQ ID NO: 165076 - protein, 7 aa, synthetic construct
GRMKDPT

SEQ ID NO: 165077 - protein, 7 aa, synthetic construct
YEKPITK

SEQ ID NO: 165078 - protein, 7 aa, synthetic construct
SFANVAR

SEQ ID NO: 165079 - protein, 7 aa, synthetic construct
NAEKISR

SEQ ID NO: 165080 - protein, 7 aa, synthetic construct
YSKAFQS

SEQ ID NO: 165081 - protein, 7 aa, synthetic construct
LSHVMRN

SEQ ID NO: 165082 - protein, 7 aa, synthetic construct
MDRQSKA

SEQ ID NO: 165083 - protein, 7 aa, synthetic construct
TVSRHTV

SEQ ID NO: 165084 - protein, 7 aa, synthetic construct
DAAAKHR

SEQ ID NO: 165085 - protein, 7 aa, synthetic construct
TQKYMPG

SEQ ID NO: 165086 - protein, 7 aa, synthetic construct
ILEQRNK

SEQ ID NO: 165087 - protein, 7 aa, synthetic construct
ISYAAKS

SEQ ID NO: 165088 - protein, 7 aa, synthetic construct
MKESRYN

SEQ ID NO: 165089 - protein, 7 aa, synthetic construct
HKLRLPE

SEQ ID NO: 165090 - protein, 7 aa, synthetic construct
IPGERRV

SEQ ID NO: 165091 - protein, 7 aa, synthetic construct
IFNITKP

SEQ ID NO: 165092 - protein, 7 aa, synthetic construct
VMRVHPA

SEQ ID NO: 165093 - protein, 7 aa, synthetic construct
FAGTHGR

SEQ ID NO: 165094 - protein, 7 aa, synthetic construct
SDGRMRP

SEQ ID NO: 165095 - protein, 7 aa, synthetic construct
YVFKSKE

SEQ ID NO: 165096 - protein, 7 aa, synthetic construct
AVKKQDY

SEQ ID NO: 165097 - protein, 7 aa, synthetic construct
KLHRIEP

SEQ ID NO: 165098 - protein, 7 aa, synthetic construct
ILRESKS

SEQ ID NO: 165099 - protein, 7 aa, synthetic construct
NPVERRN

SEQ ID NO: 165100 - protein, 7 aa, synthetic construct
TGFTHKS

SEQ ID NO: 165101 - protein, 7 aa, synthetic construct
APMRKQE

SEQ ID NO: 165102 - protein, 7 aa, synthetic construct
GVSHFKQ

SEQ ID NO: 165103 - protein, 7 aa, synthetic construct
MMERISK

SEQ ID NO: 165104 - protein, 7 aa, synthetic construct
HDARMKS

SEQ ID NO: 165105 - protein, 7 aa, synthetic construct
IHSAYKA

SEQ ID NO: 165106 - protein, 7 aa, synthetic construct
YLSIMKA

SEQ ID NO: 165107 - protein, 7 aa, synthetic construct
KHFTTSA

SEQ ID NO: 165108 - protein, 7 aa, synthetic construct
IAHGTPR

SEQ ID NO: 165109 - protein, 7 aa, synthetic construct
GSMYKAG

SEQ ID NO: 165110 - protein, 7 aa, synthetic construct
VDKPRFI

SEQ ID NO: 165111 - protein, 7 aa, synthetic construct
AHYKIGG

SEQ ID NO: 165112 - protein, 7 aa, synthetic construct
YGFGTKQ

SEQ ID NO: 165113 - protein, 7 aa, synthetic construct
EKIKMQY

SEQ ID NO: 165114 - protein, 7 aa, synthetic construct
RTRETST

SEQ ID NO: 165115 - protein, 7 aa, synthetic construct
GRHIKGE

SEQ ID NO: 165116 - protein, 7 aa, synthetic construct
RDRPHMN

SEQ ID NO: 165117 - protein, 7 aa, synthetic construct
GGREIRN

SEQ ID NO: 165118 - protein, 7 aa, synthetic construct
YAERNNK

SEQ ID NO: 165119 - protein, 7 aa, synthetic construct
TYSMIKA

SEQ ID NO: 165120 - protein, 7 aa, synthetic construct
IFREMKQ

SEQ ID NO: 165121 - protein, 7 aa, synthetic construct
TYSAYKV

SEQ ID NO: 165122 - protein, 7 aa, synthetic construct
IKNTYSQ

SEQ ID NO: 165123 - protein, 7 aa, synthetic construct
NVGRHTQ

SEQ ID NO: 165124 - protein, 7 aa, synthetic construct
EIKKFNS

SEQ ID NO: 165125 - protein, 7 aa, synthetic construct
NYITMKA

SEQ ID NO: 165126 - protein, 7 aa, synthetic construct
WPKRAEN

SEQ ID NO: 165127 - protein, 7 aa, synthetic construct
WAKGKDN

SEQ ID NO: 165128 - protein, 7 aa, synthetic construct
EKVRITV

SEQ ID NO: 165129 - protein, 7 aa, synthetic construct
VYGINKN

SEQ ID NO: 165130 - protein, 7 aa, synthetic construct
YAGHKTH

SEQ ID NO: 165131 - protein, 7 aa, synthetic construct
TRKEVFL

SEQ ID NO: 165132 - protein, 7 aa, synthetic construct
YPRMIQA

SEQ ID NO: 165133 - protein, 7 aa, synthetic construct
AKHGYAP

SEQ ID NO: 165134 - protein, 7 aa, synthetic construct
TERKSSI

SEQ ID NO: 165135 - protein, 7 aa, synthetic construct
DAKKYNN

SEQ ID NO: 165136 - protein, 7 aa, synthetic construct
NAEKVKY

SEQ ID NO: 165137 - protein, 7 aa, synthetic construct
GRLSKGE

SEQ ID NO: 165138 - protein, 7 aa, synthetic construct
MKFAHPA

SEQ ID NO: 165139 - protein, 7 aa, synthetic construct
VRPREYG

SEQ ID NO: 165140 - protein, 7 aa, synthetic construct
IVQPRHQ

SEQ ID NO: 165141 - protein, 7 aa, synthetic construct
KASRDPT

SEQ ID NO: 165142 - protein, 7 aa, synthetic construct
GSYIAKS

SEQ ID NO: 165143 - protein, 7 aa, synthetic construct
QVQKKDH

SEQ ID NO: 165144 - protein, 7 aa, synthetic construct
ATSSRNT

SEQ ID NO: 165145 - protein, 7 aa, synthetic construct
IQTRTHQ

SEQ ID NO: 165146 - protein, 7 aa, synthetic construct
FLDHKVR

SEQ ID NO: 165147 - protein, 7 aa, synthetic construct
NMDRKQN

SEQ ID NO: 165148 - protein, 7 aa, synthetic construct
EQKAKSM

SEQ ID NO: 165149 - protein, 7 aa, synthetic construct
YKPGGGN

SEQ ID NO: 165150 - protein, 7 aa, synthetic construct
TMEKLKW

SEQ ID NO: 165151 - protein, 7 aa, synthetic construct
AHKTRDM

SEQ ID NO: 165152 - protein, 7 aa, synthetic construct
THHPAKG

SEQ ID NO: 165153 - protein, 7 aa, synthetic construct
DAKPKNA

SEQ ID NO: 165154 - protein, 7 aa, synthetic construct
YKQIREH

SEQ ID NO: 165155 - protein, 7 aa, synthetic construct
ISTGYKA

SEQ ID NO: 165156 - protein, 7 aa, synthetic construct
DFKPKHT

SEQ ID NO: 165157 - protein, 7 aa, synthetic construct
RTERHLT

SEQ ID NO: 165158 - protein, 7 aa, synthetic construct
YDTRQRV

SEQ ID NO: 165159 - protein, 7 aa, synthetic construct
GPDTRTR

SEQ ID NO: 165160 - protein, 7 aa, synthetic construct
KSGDVHR

SEQ ID NO: 165161 - protein, 7 aa, synthetic construct
TIEAKHK

SEQ ID NO: 165162 - protein, 7 aa, synthetic construct
AKGKDFQ

SEQ ID NO: 165163 - protein, 7 aa, synthetic construct
EAANKLK

SEQ ID NO: 165164 - protein, 7 aa, synthetic construct
PQEKSYK

SEQ ID NO: 165165 - protein, 7 aa, synthetic construct
YVRMQNG

SEQ ID NO: 165166 - protein, 7 aa, synthetic construct
LRPIHEK

SEQ ID NO: 165167 - protein, 7 aa, synthetic construct
TMPYIKP

SEQ ID NO: 165168 - protein, 7 aa, synthetic construct
MQKFRGD

SEQ ID NO: 165169 - protein, 7 aa, synthetic construct
YNKEILR

SEQ ID NO: 165170 - protein, 7 aa, synthetic construct
FREISPR

SEQ ID NO: 165171 - protein, 7 aa, synthetic construct
DFTKNKL

SEQ ID NO: 165172 - protein, 7 aa, synthetic construct
VNEVIKR

SEQ ID NO: 165173 - protein, 7 aa, synthetic construct
KVRQEKE

SEQ ID NO: 165174 - protein, 7 aa, synthetic construct
HDKPKHM

SEQ ID NO: 165175 - protein, 7 aa, synthetic construct
GTKSYSN

SEQ ID NO: 165176 - protein, 7 aa, synthetic construct
PETKRLS

SEQ ID NO: 165177 - protein, 7 aa, synthetic construct
GSRTQFP

SEQ ID NO: 165178 - protein, 7 aa, synthetic construct
LDRQTRM

SEQ ID NO: 165179 - protein, 7 aa, synthetic construct
PGDRVAK

SEQ ID NO: 165180 - protein, 7 aa, synthetic construct
KVHEQSR

SEQ ID NO: 165181 - protein, 7 aa, synthetic construct
ADKRGLY

SEQ ID NO: 165182 - protein, 7 aa, synthetic construct
IYQQDKK

SEQ ID NO: 165183 - protein, 7 aa, synthetic construct
KKYSEIV

SEQ ID NO: 165184 - protein, 7 aa, synthetic construct
PDAVKMK

SEQ ID NO: 165185 - protein, 7 aa, synthetic construct
KRFETAG

SEQ ID NO: 165186 - protein, 7 aa, synthetic construct
KTKYLNE

SEQ ID NO: 165187 - protein, 7 aa, synthetic construct
ADSIKGR

SEQ ID NO: 165188 - protein, 7 aa, synthetic construct
SSSREKN

SEQ ID NO: 165189 - protein, 7 aa, synthetic construct
SPEHKKQ

SEQ ID NO: 165190 - protein, 7 aa, synthetic construct
MKTMTYG

SEQ ID NO: 165191 - protein, 7 aa, synthetic construct
VQRREGA

SEQ ID NO: 165192 - protein, 7 aa, synthetic construct
EAPAKQR

SEQ ID NO: 165193 - protein, 7 aa, synthetic construct
GDNILKK

SEQ ID NO: 165194 - protein, 7 aa, synthetic construct
GGRSDTK

SEQ ID NO: 165195 - protein, 7 aa, synthetic construct
TSKYIMG

SEQ ID NO: 165196 - protein, 7 aa, synthetic construct
REARQNL

SEQ ID NO: 165197 - protein, 7 aa, synthetic construct
YKNPMYS

SEQ ID NO: 165198 - protein, 7 aa, synthetic construct
QERPTIK

SEQ ID NO: 165199 - protein, 7 aa, synthetic construct
IKYQVAP

SEQ ID NO: 165200 - protein, 7 aa, synthetic construct
VVDAQRR

SEQ ID NO: 165201 - protein, 7 aa, synthetic construct
YQSVKFG

SEQ ID NO: 165202 - protein, 7 aa, synthetic construct
KVVNRMD

SEQ ID NO: 165203 - protein, 7 aa, synthetic construct
QTVKPSW

SEQ ID NO: 165204 - protein, 7 aa, synthetic construct
HDKNINR

SEQ ID NO: 165205 - protein, 7 aa, synthetic construct
IDKPKHM

SEQ ID NO: 165206 - protein, 7 aa, synthetic construct
IPAMEKR

SEQ ID NO: 165207 - protein, 7 aa, synthetic construct
STTYRAG

SEQ ID NO: 165208 - protein, 7 aa, synthetic construct
TQKFHPS

SEQ ID NO: 165209 - protein, 7 aa, synthetic construct
LLDRRHA

SEQ ID NO: 165210 - protein, 7 aa, synthetic construct
QRVAVDR

SEQ ID NO: 165211 - protein, 7 aa, synthetic construct
RELRNMA

SEQ ID NO: 165212 - protein, 7 aa, synthetic construct
FQDIKRL

SEQ ID NO: 165213 - protein, 7 aa, synthetic construct
QKKGDPL

SEQ ID NO: 165214 - protein, 7 aa, synthetic construct
DSASGKK

SEQ ID NO: 165215 - protein, 7 aa, synthetic construct
QKGHSLH

SEQ ID NO: 165216 - protein, 7 aa, synthetic construct
TVGHKER

SEQ ID NO: 165217 - protein, 7 aa, synthetic construct
LTYKDKG

SEQ ID NO: 165218 - protein, 7 aa, synthetic construct
SAGHIKQ

SEQ ID NO: 165219 - protein, 7 aa, synthetic construct
MVHTRTQ

SEQ ID NO: 165220 - protein, 7 aa, synthetic construct
KEGAYRV

SEQ ID NO: 165221 - protein, 7 aa, synthetic construct
QPENKYK

SEQ ID NO: 165222 - protein, 7 aa, synthetic construct
VGIKKYD

SEQ ID NO: 165223 - protein, 7 aa, synthetic construct
LERPKIA

SEQ ID NO: 165224 - protein, 7 aa, synthetic construct
QTKYLGS

SEQ ID NO: 165225 - protein, 7 aa, synthetic construct
VQPAKWG

SEQ ID NO: 165226 - protein, 7 aa, synthetic construct
LEKRHTS

SEQ ID NO: 165227 - protein, 7 aa, synthetic construct
LKMTHYG

SEQ ID NO: 165228 - protein, 7 aa, synthetic construct
VPERRLQ

SEQ ID NO: 165229 - protein, 7 aa, synthetic construct
TQKYKIE

SEQ ID NO: 165230 - protein, 7 aa, synthetic construct
KVDRDRQ

SEQ ID NO: 165231 - protein, 7 aa, synthetic construct
KVKYLDA

SEQ ID NO: 165232 - protein, 7 aa, synthetic construct
EPRMQRG

SEQ ID NO: 165233 - protein, 7 aa, synthetic construct
FLKPAHG

SEQ ID NO: 165234 - protein, 7 aa, synthetic construct
VTKRDPI

SEQ ID NO: 165235 - protein, 7 aa, synthetic construct
IDMLKRN

SEQ ID NO: 165236 - protein, 7 aa, synthetic construct
HPEKLRN

SEQ ID NO: 165237 - protein, 7 aa, synthetic construct
GAPHARN

SEQ ID NO: 165238 - protein, 7 aa, synthetic construct
TDNIKRH

SEQ ID NO: 165239 - protein, 7 aa, synthetic construct
PVETKFR

SEQ ID NO: 165240 - protein, 7 aa, synthetic construct
TMDRLHK

SEQ ID NO: 165241 - protein, 7 aa, synthetic construct
PAESKNR

SEQ ID NO: 165242 - protein, 7 aa, synthetic construct
GVRTYKE

SEQ ID NO: 165243 - protein, 7 aa, synthetic construct
KMKISEL

SEQ ID NO: 165244 - protein, 7 aa, synthetic construct
GQVRKEN

SEQ ID NO: 165245 - protein, 7 aa, synthetic construct
QIHARTQ

SEQ ID NO: 165246 - protein, 7 aa, synthetic construct
NHDGRKV

SEQ ID NO: 165247 - protein, 7 aa, synthetic construct
IGRGHLN

SEQ ID NO: 165248 - protein, 7 aa, synthetic construct
ARIRGEV

SEQ ID NO: 165249 - protein, 7 aa, synthetic construct
SDINRQK

SEQ ID NO: 165250 - protein, 7 aa, synthetic construct
THSTDKR

SEQ ID NO: 165251 - protein, 7 aa, synthetic construct
SLERRIS

SEQ ID NO: 165252 - protein, 7 aa, synthetic construct
EPNKGQR

SEQ ID NO: 165253 - protein, 7 aa, synthetic construct
STDAARR

SEQ ID NO: 165254 - protein, 7 aa, synthetic construct
RETKYNA

SEQ ID NO: 165255 - protein, 7 aa, synthetic construct
LTELQKK

SEQ ID NO: 165256 - protein, 7 aa, synthetic construct
TANERNK

SEQ ID NO: 165257 - protein, 7 aa, synthetic construct
EVAMRKA

SEQ ID NO: 165258 - protein, 7 aa, synthetic construct
SHAPRNL

SEQ ID NO: 165259 - protein, 7 aa, synthetic construct
DTRQLKN

SEQ ID NO: 165260 - protein, 7 aa, synthetic construct
HVNPRSM

SEQ ID NO: 165261 - protein, 7 aa, synthetic construct
GDKIPRF

SEQ ID NO: 165262 - protein, 7 aa, synthetic construct
IKFVSGS

SEQ ID NO: 165263 - protein, 7 aa, synthetic construct
GLPTDKR

SEQ ID NO: 165264 - protein, 7 aa, synthetic construct
RSLRQEG

SEQ ID NO: 165265 - protein, 7 aa, synthetic construct
SRATHLS

SEQ ID NO: 165266 - protein, 7 aa, synthetic construct
MKFRTEA

SEQ ID NO: 165267 - protein, 7 aa, synthetic construct
FIQKANL

SEQ ID NO: 165268 - protein, 7 aa, synthetic construct
TYKQERM

SEQ ID NO: 165269 - protein, 7 aa, synthetic construct
KDFNKYP

SEQ ID NO: 165270 - protein, 7 aa, synthetic construct
RMPERHQ

SEQ ID NO: 165271 - protein, 7 aa, synthetic construct
KMRQEPV

SEQ ID NO: 165272 - protein, 7 aa, synthetic construct
GIHNTPR

SEQ ID NO: 165273 - protein, 7 aa, synthetic construct
KVDRVHA

SEQ ID NO: 165274 - protein, 7 aa, synthetic construct
VSERAMR

SEQ ID NO: 165275 - protein, 7 aa, synthetic construct
DVQIKIK

SEQ ID NO: 165276 - protein, 7 aa, synthetic construct
KSKIPTE

SEQ ID NO: 165277 - protein, 7 aa, synthetic construct
QKTYQLN

SEQ ID NO: 165278 - protein, 7 aa, synthetic construct
VHKYLQG

SEQ ID NO: 165279 - protein, 7 aa, synthetic construct
PYMKKDT

SEQ ID NO: 165280 - protein, 7 aa, synthetic construct
AHHGVKA

SEQ ID NO: 165281 - protein, 7 aa, synthetic construct
SKLKYNE

SEQ ID NO: 165282 - protein, 7 aa, synthetic construct
GRIKVDS

SEQ ID NO: 165283 - protein, 7 aa, synthetic construct
LKFAVRE

SEQ ID NO: 165284 - protein, 7 aa, synthetic construct
MTARERG

SEQ ID NO: 165285 - protein, 7 aa, synthetic construct
EKQLDKK

SEQ ID NO: 165286 - protein, 7 aa, synthetic construct
KSTRDMQ

SEQ ID NO: 165287 - protein, 7 aa, synthetic construct
PQKFREG

SEQ ID NO: 165288 - protein, 7 aa, synthetic construct
WQTDNKK

SEQ ID NO: 165289 - protein, 7 aa, synthetic construct
PKVRTDG

SEQ ID NO: 165290 - protein, 7 aa, synthetic construct
ARGVKEH

SEQ ID NO: 165291 - protein, 7 aa, synthetic construct
YEKLNRI

SEQ ID NO: 165292 - protein, 7 aa, synthetic construct
GAYMSKP

SEQ ID NO: 165293 - protein, 7 aa, synthetic construct
MFKREPT

SEQ ID NO: 165294 - protein, 7 aa, synthetic construct
KFVPRET

SEQ ID NO: 165295 - protein, 7 aa, synthetic construct
LTRSEQK

SEQ ID NO: 165296 - protein, 7 aa, synthetic construct
KHKNDTS

SEQ ID NO: 165297 - protein, 7 aa, synthetic construct
AIRIKND

SEQ ID NO: 165298 - protein, 7 aa, synthetic construct
GKRDHPV

SEQ ID NO: 165299 - protein, 7 aa, synthetic construct
PELMKKA

SEQ ID NO: 165300 - protein, 7 aa, synthetic construct
VGEMQKK

SEQ ID NO: 165301 - protein, 7 aa, synthetic construct
SKSLSHY

SEQ ID NO: 165302 - protein, 7 aa, synthetic construct
VKGNQYN

SEQ ID NO: 165303 - protein, 7 aa, synthetic construct
QETKRYA

SEQ ID NO: 165304 - protein, 7 aa, synthetic construct
AKDRHGQ

SEQ ID NO: 165305 - protein, 7 aa, synthetic construct
TQLKERF

SEQ ID NO: 165306 - protein, 7 aa, synthetic construct
KLREYKD

SEQ ID NO: 165307 - protein, 7 aa, synthetic construct
VSRLDRS

SEQ ID NO: 165308 - protein, 7 aa, synthetic construct
AETRMKV

SEQ ID NO: 165309 - protein, 7 aa, synthetic construct
EKPIHAK

SEQ ID NO: 165310 - protein, 7 aa, synthetic construct
SAGHNKS

SEQ ID NO: 165311 - protein, 7 aa, synthetic construct
NEKHLKF

SEQ ID NO: 165312 - protein, 7 aa, synthetic construct
LFVKNKD

SEQ ID NO: 165313 - protein, 7 aa, synthetic construct
IIKRMME

SEQ ID NO: 165314 - protein, 7 aa, synthetic construct
LSRQSPS

SEQ ID NO: 165315 - protein, 7 aa, synthetic construct
ITHKDKF

SEQ ID NO: 165316 - protein, 7 aa, synthetic construct
SIGYKGN

SEQ ID NO: 165317 - protein, 7 aa, synthetic construct
NSDTARK

SEQ ID NO: 165318 - protein, 7 aa, synthetic construct
SMHSSKQ

SEQ ID NO: 165319 - protein, 7 aa, synthetic construct
RLVKFQE

SEQ ID NO: 165320 - protein, 7 aa, synthetic construct
VHAGPKN

SEQ ID NO: 165321 - protein, 7 aa, synthetic construct
KQRSGDP

SEQ ID NO: 165322 - protein, 7 aa, synthetic construct
HPDMRAK

SEQ ID NO: 165323 - protein, 7 aa, synthetic construct
HTAMRHG

SEQ ID NO: 165324 - protein, 7 aa, synthetic construct
PTVRANQ

SEQ ID NO: 165325 - protein, 7 aa, synthetic construct
SDMNRIK

SEQ ID NO: 165326 - protein, 7 aa, synthetic construct
MKQFMSP

SEQ ID NO: 165327 - protein, 7 aa, synthetic construct
TKERQER

SEQ ID NO: 165328 - protein, 7 aa, synthetic construct
KIRLASD

SEQ ID NO: 165329 - protein, 7 aa, synthetic construct
LIAEGRK

SEQ ID NO: 165330 - protein, 7 aa, synthetic construct
PALRTRE

SEQ ID NO: 165331 - protein, 7 aa, synthetic construct
IEQMKSR

SEQ ID NO: 165332 - protein, 7 aa, synthetic construct
YVNLHKQ

SEQ ID NO: 165333 - protein, 7 aa, synthetic construct
NDTKSMR

SEQ ID NO: 165334 - protein, 7 aa, synthetic construct
KLTRTDM

SEQ ID NO: 165335 - protein, 7 aa, synthetic construct
DFQKTKL

SEQ ID NO: 165336 - protein, 7 aa, synthetic construct
FPRNIVA

SEQ ID NO: 165337 - protein, 7 aa, synthetic construct
KNSKFND

SEQ ID NO: 165338 - protein, 7 aa, synthetic construct
RQTKDLV

SEQ ID NO: 165339 - protein, 7 aa, synthetic construct
ASTRASQ

SEQ ID NO: 165340 - protein, 7 aa, synthetic construct
KARTEAT

SEQ ID NO: 165341 - protein, 7 aa, synthetic construct
MKRDILH

SEQ ID NO: 165342 - protein, 7 aa, synthetic construct
WLNARQP

SEQ ID NO: 165343 - protein, 7 aa, synthetic construct
TDRKLHM

SEQ ID NO: 165344 - protein, 7 aa, synthetic construct
RSHLKQE

SEQ ID NO: 165345 - protein, 7 aa, synthetic construct
KYKDTHN

SEQ ID NO: 165346 - protein, 7 aa, synthetic construct
VEVMKSK

SEQ ID NO: 165347 - protein, 7 aa, synthetic construct
FSYAAKS

SEQ ID NO: 165348 - protein, 7 aa, synthetic construct
GGILKYG

SEQ ID NO: 165349 - protein, 7 aa, synthetic construct
LPFSTRG

SEQ ID NO: 165350 - protein, 7 aa, synthetic construct
LKEYLRP

SEQ ID NO: 165351 - protein, 7 aa, synthetic construct
FKNLQYP

SEQ ID NO: 165352 - protein, 7 aa, synthetic construct
FTKNRDH

SEQ ID NO: 165353 - protein, 7 aa, synthetic construct
TMYNMKV

SEQ ID NO: 165354 - protein, 7 aa, synthetic construct
HSKTDRT

SEQ ID NO: 165355 - protein, 7 aa, synthetic construct
AKYTMRD

SEQ ID NO: 165356 - protein, 7 aa, synthetic construct
STHYLKA

SEQ ID NO: 165357 - protein, 7 aa, synthetic construct
QSMKHFG

SEQ ID NO: 165358 - protein, 7 aa, synthetic construct
ALEGRRP

SEQ ID NO: 165359 - protein, 7 aa, synthetic construct
YLKQERS

SEQ ID NO: 165360 - protein, 7 aa, synthetic construct
NRLIGEK

SEQ ID NO: 165361 - protein, 7 aa, synthetic construct
DVKKDRY

SEQ ID NO: 165362 - protein, 7 aa, synthetic construct
FDTRMKT

SEQ ID NO: 165363 - protein, 7 aa, synthetic construct
TSSNDKR

SEQ ID NO: 165364 - protein, 7 aa, synthetic construct
AVGHRSV

SEQ ID NO: 165365 - protein, 7 aa, synthetic construct
PLDRGVK

SEQ ID NO: 165366 - protein, 7 aa, synthetic construct
QERTAKF

SEQ ID NO: 165367 - protein, 7 aa, synthetic construct
FDARQKT

SEQ ID NO: 165368 - protein, 7 aa, synthetic construct
DRYTKQI

SEQ ID NO: 165369 - protein, 7 aa, synthetic construct
ITTARFG

SEQ ID NO: 165370 - protein, 7 aa, synthetic construct
LPQHRHG

SEQ ID NO: 165371 - protein, 7 aa, synthetic construct
ATARTHN

SEQ ID NO: 165372 - protein, 7 aa, synthetic construct
DSKFKYG

SEQ ID NO: 165373 - protein, 7 aa, synthetic construct
KIRMTAD

SEQ ID NO: 165374 - protein, 7 aa, synthetic construct
SAHPRTL

SEQ ID NO: 165375 - protein, 7 aa, synthetic construct
DSQVIKK

SEQ ID NO: 165376 - protein, 7 aa, synthetic construct
MDKPKSI

SEQ ID NO: 165377 - protein, 7 aa, synthetic construct
TEKQMKW

SEQ ID NO: 165378 - protein, 7 aa, synthetic construct
VMVKEAR

SEQ ID NO: 165379 - protein, 7 aa, synthetic construct
TRAHVPT

SEQ ID NO: 165380 - protein, 7 aa, synthetic construct
KLYQAKD

SEQ ID NO: 165381 - protein, 7 aa, synthetic construct
PSTYKIG

SEQ ID NO: 165382 - protein, 7 aa, synthetic construct
QDRTYKP

SEQ ID NO: 165383 - protein, 7 aa, synthetic construct
EPNPKMK

SEQ ID NO: 165384 - protein, 7 aa, synthetic construct
VEQGRNK

SEQ ID NO: 165385 - protein, 7 aa, synthetic construct
FSRVERP

SEQ ID NO: 165386 - protein, 7 aa, synthetic construct
TKYNALA

SEQ ID NO: 165387 - protein, 7 aa, synthetic construct
IKHLSTF

SEQ ID NO: 165388 - protein, 7 aa, synthetic construct
PVSHPNR

SEQ ID NO: 165389 - protein, 7 aa, synthetic construct
IHKNDKA

SEQ ID NO: 165390 - protein, 7 aa, synthetic construct
QRPTPEK

SEQ ID NO: 165391 - protein, 7 aa, synthetic construct
TTSYLKN

SEQ ID NO: 165392 - protein, 7 aa, synthetic construct
KAMYKSD

SEQ ID NO: 165393 - protein, 7 aa, synthetic construct
SQGKPHY

SEQ ID NO: 165394 - protein, 7 aa, synthetic construct
VPRALIG

SEQ ID NO: 165395 - protein, 7 aa, synthetic construct
GRKEIIY

SEQ ID NO: 165396 - protein, 7 aa, synthetic construct
LSKSYIN

SEQ ID NO: 165397 - protein, 7 aa, synthetic construct
ASKYSNQ

SEQ ID NO: 165398 - protein, 7 aa, synthetic construct
HATPRHA

SEQ ID NO: 165399 - protein, 7 aa, synthetic construct
YHGKVYA

SEQ ID NO: 165400 - protein, 7 aa, synthetic construct
TTTIHRS

SEQ ID NO: 165401 - protein, 7 aa, synthetic construct
TGRLDKM

SEQ ID NO: 165402 - protein, 7 aa, synthetic construct
MKNIEHR

SEQ ID NO: 165403 - protein, 7 aa, synthetic construct
VVDQRNR

SEQ ID NO: 165404 - protein, 7 aa, synthetic construct
RVDKFSN

SEQ ID NO: 165405 - protein, 7 aa, synthetic construct
ADSKTRN

SEQ ID NO: 165406 - protein, 7 aa, synthetic construct
TDSNRMR

SEQ ID NO: 165407 - protein, 7 aa, synthetic construct
TKKSPTD

SEQ ID NO: 165408 - protein, 7 aa, synthetic construct
MTGMRHQ

SEQ ID NO: 165409 - protein, 7 aa, synthetic construct
NRGQDKG

SEQ ID NO: 165410 - protein, 7 aa, synthetic construct
TSSKYEK

SEQ ID NO: 165411 - protein, 7 aa, synthetic construct
IKPYGPN

SEQ ID NO: 165412 - protein, 7 aa, synthetic construct
HSTGHGR

SEQ ID NO: 165413 - protein, 7 aa, synthetic construct
NIERLRG

SEQ ID NO: 165414 - protein, 7 aa, synthetic construct
ITRHTTQ

SEQ ID NO: 165415 - protein, 7 aa, synthetic construct
NEKLYKN

SEQ ID NO: 165416 - protein, 7 aa, synthetic construct
DFGPKGK

SEQ ID NO: 165417 - protein, 7 aa, synthetic construct
VDSTRVR

SEQ ID NO: 165418 - protein, 7 aa, synthetic construct
NDKYQGR

SEQ ID NO: 165419 - protein, 7 aa, synthetic construct
ASRGKDT

SEQ ID NO: 165420 - protein, 7 aa, synthetic construct
LRHAPPL

SEQ ID NO: 165421 - protein, 7 aa, synthetic construct
KRGEFHG

SEQ ID NO: 165422 - protein, 7 aa, synthetic construct
ASRIDKG

SEQ ID NO: 165423 - protein, 7 aa, synthetic construct
VVSKYLG

SEQ ID NO: 165424 - protein, 7 aa, synthetic construct
TIHSNRG

SEQ ID NO: 165425 - protein, 7 aa, synthetic construct
MEGKQTR

SEQ ID NO: 165426 - protein, 7 aa, synthetic construct
KRGEITY

SEQ ID NO: 165427 - protein, 7 aa, synthetic construct
LTSRERT

SEQ ID NO: 165428 - protein, 7 aa, synthetic construct
VRGMPLA

SEQ ID NO: 165429 - protein, 7 aa, synthetic construct
LGHVLRN

SEQ ID NO: 165430 - protein, 7 aa, synthetic construct
HDRKNTI

SEQ ID NO: 165431 - protein, 7 aa, synthetic construct
LNRMSLS

SEQ ID NO: 165432 - protein, 7 aa, synthetic construct
LGRVTHT

SEQ ID NO: 165433 - protein, 7 aa, synthetic construct
PDKYIRG

SEQ ID NO: 165434 - protein, 7 aa, synthetic construct
DRIARTH

SEQ ID NO: 165435 - protein, 7 aa, synthetic construct
SRREMIN

SEQ ID NO: 165436 - protein, 7 aa, synthetic construct
KPDRHAA

SEQ ID NO: 165437 - protein, 7 aa, synthetic construct
RESYKLS

SEQ ID NO: 165438 - protein, 7 aa, synthetic construct
RLMHTTA

SEQ ID NO: 165439 - protein, 7 aa, synthetic construct
FKKDRSD

SEQ ID NO: 165440 - protein, 7 aa, synthetic construct
NSDTRVR

SEQ ID NO: 165441 - protein, 7 aa, synthetic construct
NSYSLKS

SEQ ID NO: 165442 - protein, 7 aa, synthetic construct
PISRVKE

SEQ ID NO: 165443 - protein, 7 aa, synthetic construct
IELKHKL

SEQ ID NO: 165444 - protein, 7 aa, synthetic construct
RQGAHGQ

SEQ ID NO: 165445 - protein, 7 aa, synthetic construct
VDKWKGQ

SEQ ID NO: 165446 - protein, 7 aa, synthetic construct
MKEGYAR

SEQ ID NO: 165447 - protein, 7 aa, synthetic construct
MLKMMHG

SEQ ID NO: 165448 - protein, 7 aa, synthetic construct
FRANEKQ

SEQ ID NO: 165449 - protein, 7 aa, synthetic construct
RKLIMTD

SEQ ID NO: 165450 - protein, 7 aa, synthetic construct
IFKLSTA

SEQ ID NO: 165451 - protein, 7 aa, synthetic construct
KSGYERP

SEQ ID NO: 165452 - protein, 7 aa, synthetic construct
SIGHGVR

SEQ ID NO: 165453 - protein, 7 aa, synthetic construct
NEPIRSK

SEQ ID NO: 165454 - protein, 7 aa, synthetic construct
AQGTHRG

SEQ ID NO: 165455 - protein, 7 aa, synthetic construct
AVSKYIS

SEQ ID NO: 165456 - protein, 7 aa, synthetic construct
TSRQHPQ

SEQ ID NO: 165457 - protein, 7 aa, synthetic construct
YKGFPSN

SEQ ID NO: 165458 - protein, 7 aa, synthetic construct
IDIAKYK

SEQ ID NO: 165459 - protein, 7 aa, synthetic construct
KTAKAYD

SEQ ID NO: 165460 - protein, 7 aa, synthetic construct
QMEIRKV

SEQ ID NO: 165461 - protein, 7 aa, synthetic construct
EFNKNTR

SEQ ID NO: 165462 - protein, 7 aa, synthetic construct
QKSKDLM

SEQ ID NO: 165463 - protein, 7 aa, synthetic construct
ETKYLKN

SEQ ID NO: 165464 - protein, 7 aa, synthetic construct
NQHKFEK

SEQ ID NO: 165465 - protein, 7 aa, synthetic construct
IKAYHPG

SEQ ID NO: 165466 - protein, 7 aa, synthetic construct
YIKMNPN

SEQ ID NO: 165467 - protein, 7 aa, synthetic construct
HPSPKYN

SEQ ID NO: 165468 - protein, 7 aa, synthetic construct
MKKIEWS

SEQ ID NO: 165469 - protein, 7 aa, synthetic construct
IERKLTY

SEQ ID NO: 165470 - protein, 7 aa, synthetic construct
TQAFHKS

SEQ ID NO: 165471 - protein, 7 aa, synthetic construct
KFHTKEN

SEQ ID NO: 165472 - protein, 7 aa, synthetic construct
KPKVEGW

SEQ ID NO: 165473 - protein, 7 aa, synthetic construct
LDRANKH

SEQ ID NO: 165474 - protein, 7 aa, synthetic construct
NLMYSKA

SEQ ID NO: 165475 - protein, 7 aa, synthetic construct
VSTRHAT

SEQ ID NO: 165476 - protein, 7 aa, synthetic construct
QRGLMGI

SEQ ID NO: 165477 - protein, 7 aa, synthetic construct
VKNIMQY

SEQ ID NO: 165478 - protein, 7 aa, synthetic construct
VIKNVYG

SEQ ID NO: 165479 - protein, 7 aa, synthetic construct
TDIHKQK

SEQ ID NO: 165480 - protein, 7 aa, synthetic construct
YKHTQNA

SEQ ID NO: 165481 - protein, 7 aa, synthetic construct
IPYKNAG

SEQ ID NO: 165482 - protein, 7 aa, synthetic construct
AGPHQRS

SEQ ID NO: 165483 - protein, 7 aa, synthetic construct
YPSHPKG

SEQ ID NO: 165484 - protein, 7 aa, synthetic construct
LPGERKV

SEQ ID NO: 165485 - protein, 7 aa, synthetic construct
SGDRKSM

SEQ ID NO: 165486 - protein, 7 aa, synthetic construct
SEQKLKS

SEQ ID NO: 165487 - protein, 7 aa, synthetic construct
PEMMKRG

SEQ ID NO: 165488 - protein, 7 aa, synthetic construct
MKFNTNS

SEQ ID NO: 165489 - protein, 7 aa, synthetic construct
RIDHMKN

SEQ ID NO: 165490 - protein, 7 aa, synthetic construct
DLYKNKT

SEQ ID NO: 165491 - protein, 7 aa, synthetic construct
YDRNIKH

SEQ ID NO: 165492 - protein, 7 aa, synthetic construct
GNDVQKK

SEQ ID NO: 165493 - protein, 7 aa, synthetic construct
NQDGRMK

SEQ ID NO: 165494 - protein, 7 aa, synthetic construct
EAPKTAR

SEQ ID NO: 165495 - protein, 7 aa, synthetic construct
FLGGMRQ

SEQ ID NO: 165496 - protein, 7 aa, synthetic construct
RENPITR

SEQ ID NO: 165497 - protein, 7 aa, synthetic construct
TNTRHSS

SEQ ID NO: 165498 - protein, 7 aa, synthetic construct
QKGNPSS

SEQ ID NO: 165499 - protein, 7 aa, synthetic construct
QSKAIDR

SEQ ID NO: 165500 - protein, 7 aa, synthetic construct
LEHIKRG

SEQ ID NO: 165501 - protein, 7 aa, synthetic construct
RTRDQQI

SEQ ID NO: 165502 - protein, 7 aa, synthetic construct
NERIQKF

SEQ ID NO: 165503 - protein, 7 aa, synthetic construct
MEKGSKY

SEQ ID NO: 165504 - protein, 7 aa, synthetic construct
KDHNLGR

SEQ ID NO: 165505 - protein, 7 aa, synthetic construct
TYEKKHS

SEQ ID NO: 165506 - protein, 7 aa, synthetic construct
WIGSAKN

SEQ ID NO: 165507 - protein, 7 aa, synthetic construct
FKGTHYP

SEQ ID NO: 165508 - protein, 7 aa, synthetic construct
RETAFKS

SEQ ID NO: 165509 - protein, 7 aa, synthetic construct
KQLRLLE

SEQ ID NO: 165510 - protein, 7 aa, synthetic construct
EQSKAMK

SEQ ID NO: 165511 - protein, 7 aa, synthetic construct
NEKGPFR

SEQ ID NO: 165512 - protein, 7 aa, synthetic construct
YQPHPKA

SEQ ID NO: 165513 - protein, 7 aa, synthetic construct
PDLVKRV

SEQ ID NO: 165514 - protein, 7 aa, synthetic construct
IPKTAYL

SEQ ID NO: 165515 - protein, 7 aa, synthetic construct
RSKFPLE

SEQ ID NO: 165516 - protein, 7 aa, synthetic construct
LPRTTFQ

SEQ ID NO: 165517 - protein, 7 aa, synthetic construct
QSGHGPR

SEQ ID NO: 165518 - protein, 7 aa, synthetic construct
TAKYQAH

SEQ ID NO: 165519 - protein, 7 aa, synthetic construct
QGHNSKA

SEQ ID NO: 165520 - protein, 7 aa, synthetic construct
WLNPSKG

SEQ ID NO: 165521 - protein, 7 aa, synthetic construct
LKAYTLN

SEQ ID NO: 165522 - protein, 7 aa, synthetic construct
DMIKSKH

SEQ ID NO: 165523 - protein, 7 aa, synthetic construct
MEKVHQR

SEQ ID NO: 165524 - protein, 7 aa, synthetic construct
GDGRTKS

SEQ ID NO: 165525 - protein, 7 aa, synthetic construct
DNRNVKA

SEQ ID NO: 165526 - protein, 7 aa, synthetic construct
NDKKYNN

SEQ ID NO: 165527 - protein, 7 aa, synthetic construct
NMIGYKV

SEQ ID NO: 165528 - protein, 7 aa, synthetic construct
NQALEKR

SEQ ID NO: 165529 - protein, 7 aa, synthetic construct
KVHQRFE

SEQ ID NO: 165530 - protein, 7 aa, synthetic construct
YTMHNSR

SEQ ID NO: 165531 - protein, 7 aa, synthetic construct
RSKGDPI

SEQ ID NO: 165532 - protein, 7 aa, synthetic construct
MEKTRFQ

SEQ ID NO: 165533 - protein, 7 aa, synthetic construct
YAAIKYG

SEQ ID NO: 165534 - protein, 7 aa, synthetic construct
GATRHMS

SEQ ID NO: 165535 - protein, 7 aa, synthetic construct
APDIRNK

SEQ ID NO: 165536 - protein, 7 aa, synthetic construct
VGKYLMG

SEQ ID NO: 165537 - protein, 7 aa, synthetic construct
AIDRRSG

SEQ ID NO: 165538 - protein, 7 aa, synthetic construct
HEKRMLQ

SEQ ID NO: 165539 - protein, 7 aa, synthetic construct
MATRHTP

SEQ ID NO: 165540 - protein, 7 aa, synthetic construct
IPRHTYA

SEQ ID NO: 165541 - protein, 7 aa, synthetic construct
TSNKQYN

SEQ ID NO: 165542 - protein, 7 aa, synthetic construct
WKANPMN

SEQ ID NO: 165543 - protein, 7 aa, synthetic construct
KEARHIM

SEQ ID NO: 165544 - protein, 7 aa, synthetic construct
HGPTRAN

SEQ ID NO: 165545 - protein, 7 aa, synthetic construct
THPYQKQ

SEQ ID NO: 165546 - protein, 7 aa, synthetic construct
NFTSYKA

SEQ ID NO: 165547 - protein, 7 aa, synthetic construct
KTETRYN

SEQ ID NO: 165548 - protein, 7 aa, synthetic construct
AKPKDWS

SEQ ID NO: 165549 - protein, 7 aa, synthetic construct
QPGIKYA

SEQ ID NO: 165550 - protein, 7 aa, synthetic construct
VHKYLKD

SEQ ID NO: 165551 - protein, 7 aa, synthetic construct
SGFTNKN

SEQ ID NO: 165552 - protein, 7 aa, synthetic construct
KQRGDMV

SEQ ID NO: 165553 - protein, 7 aa, synthetic construct
MTGARSQ

SEQ ID NO: 165554 - protein, 7 aa, synthetic construct
AHRPVNQ

SEQ ID NO: 165555 - protein, 7 aa, synthetic construct
AIERAKS

SEQ ID NO: 165556 - protein, 7 aa, synthetic construct
QDRHVKS

SEQ ID NO: 165557 - protein, 7 aa, synthetic construct
RGAFPMG

SEQ ID NO: 165558 - protein, 7 aa, synthetic construct
KIRMHEP

SEQ ID NO: 165559 - protein, 7 aa, synthetic construct
MLDRIRQ

SEQ ID NO: 165560 - protein, 7 aa, synthetic construct
ILRNKID

SEQ ID NO: 165561 - protein, 7 aa, synthetic construct
FPHMIKS

SEQ ID NO: 165562 - protein, 7 aa, synthetic construct
MKSFNIP

SEQ ID NO: 165563 - protein, 7 aa, synthetic construct
IRGDKIH

SEQ ID NO: 165564 - protein, 7 aa, synthetic construct
YIPRADR

SEQ ID NO: 165565 - protein, 7 aa, synthetic construct
EATKTQR

SEQ ID NO: 165566 - protein, 7 aa, synthetic construct
QKSHLAY

SEQ ID NO: 165567 - protein, 7 aa, synthetic construct
SATRREL

SEQ ID NO: 165568 - protein, 7 aa, synthetic construct
DFRKMVA

SEQ ID NO: 165569 - protein, 7 aa, synthetic construct
VGKLYQS

SEQ ID NO: 165570 - protein, 7 aa, synthetic construct
SKKEYYG

SEQ ID NO: 165571 - protein, 7 aa, synthetic construct
PEGKKTT

SEQ ID NO: 165572 - protein, 7 aa, synthetic construct
AEKPQIR

SEQ ID NO: 165573 - protein, 7 aa, synthetic construct
MTRSVHQ

SEQ ID NO: 165574 - protein, 7 aa, synthetic construct
KHPNPYI

SEQ ID NO: 165575 - protein, 7 aa, synthetic construct
HFKNLRE

SEQ ID NO: 165576 - protein, 7 aa, synthetic construct
GERISMK

SEQ ID NO: 165577 - protein, 7 aa, synthetic construct
DVGNTKK

SEQ ID NO: 165578 - protein, 7 aa, synthetic construct
ASAIERK

SEQ ID NO: 165579 - protein, 7 aa, synthetic construct
FLMGSKA

SEQ ID NO: 165580 - protein, 7 aa, synthetic construct
GSTRSSN

SEQ ID NO: 165581 - protein, 7 aa, synthetic construct
TKPAYVN

SEQ ID NO: 165582 - protein, 7 aa, synthetic construct
TMSELKR

SEQ ID NO: 165583 - protein, 7 aa, synthetic construct
FKHTNFP

SEQ ID NO: 165584 - protein, 7 aa, synthetic construct
ILHKAFP

SEQ ID NO: 165585 - protein, 7 aa, synthetic construct
GTARMHS

SEQ ID NO: 165586 - protein, 7 aa, synthetic construct
NYAINRA

SEQ ID NO: 165587 - protein, 7 aa, synthetic construct
RVERMNI

SEQ ID NO: 165588 - protein, 7 aa, synthetic construct
HAGGNRQ

SEQ ID NO: 165589 - protein, 7 aa, synthetic construct
KEVRSHM

SEQ ID NO: 165590 - protein, 7 aa, synthetic construct
ANEKKSW

SEQ ID NO: 165591 - protein, 7 aa, synthetic construct
EPRGQGR

SEQ ID NO: 165592 - protein, 7 aa, synthetic construct
NEQKRSV

SEQ ID NO: 165593 - protein, 7 aa, synthetic construct
THRQEKG

SEQ ID NO: 165594 - protein, 7 aa, synthetic construct
QQYGLKS

SEQ ID NO: 165595 - protein, 7 aa, synthetic construct
SDRKDAK

SEQ ID NO: 165596 - protein, 7 aa, synthetic construct
MSSQHRA

SEQ ID NO: 165597 - protein, 7 aa, synthetic construct
AIPRHGQ

SEQ ID NO: 165598 - protein, 7 aa, synthetic construct
RSSKDTY

SEQ ID NO: 165599 - protein, 7 aa, synthetic construct
PDGKNKS

SEQ ID NO: 165600 - protein, 7 aa, synthetic construct
FLKPIMG

SEQ ID NO: 165601 - protein, 7 aa, synthetic construct
NKTFGGN

SEQ ID NO: 165602 - protein, 7 aa, synthetic construct
SADRRIN

SEQ ID NO: 165603 - protein, 7 aa, synthetic construct
HTSPKYI

SEQ ID NO: 165604 - protein, 7 aa, synthetic construct
FSVSKFG

SEQ ID NO: 165605 - protein, 7 aa, synthetic construct
SGARDKT

SEQ ID NO: 165606 - protein, 7 aa, synthetic construct
YAKAHFM

SEQ ID NO: 165607 - protein, 7 aa, synthetic construct
TKGYNVH

SEQ ID NO: 165608 - protein, 7 aa, synthetic construct
KARAIAD

SEQ ID NO: 165609 - protein, 7 aa, synthetic construct
HAKPSVY

SEQ ID NO: 165610 - protein, 7 aa, synthetic construct
YKQVANL

SEQ ID NO: 165611 - protein, 7 aa, synthetic construct
RETGHKA

SEQ ID NO: 165612 - protein, 7 aa, synthetic construct
KTVGKWE

SEQ ID NO: 165613 - protein, 7 aa, synthetic construct
LASYLKN

SEQ ID NO: 165614 - protein, 7 aa, synthetic construct
QVRKDLN

SEQ ID NO: 165615 - protein, 7 aa, synthetic construct
GQAHLGR

SEQ ID NO: 165616 - protein, 7 aa, synthetic construct
YAPADKR

SEQ ID NO: 165617 - protein, 7 aa, synthetic construct
YHLNPKQ

SEQ ID NO: 165618 - protein, 7 aa, synthetic construct
IYAKHNQ

SEQ ID NO: 165619 - protein, 7 aa, synthetic construct
EARVKSQ

SEQ ID NO: 165620 - protein, 7 aa, synthetic construct
RSSMRDS

SEQ ID NO: 165621 - protein, 7 aa, synthetic construct
KARTEVH

SEQ ID NO: 165622 - protein, 7 aa, synthetic construct
LTKVKWE

SEQ ID NO: 165623 - protein, 7 aa, synthetic construct
SDPVKHK

SEQ ID NO: 165624 - protein, 7 aa, synthetic construct
GSYMKHS

SEQ ID NO: 165625 - protein, 7 aa, synthetic construct
ITHKSFG

SEQ ID NO: 165626 - protein, 7 aa, synthetic construct
RALISEK

SEQ ID NO: 165627 - protein, 7 aa, synthetic construct
RFQKEPT

SEQ ID NO: 165628 - protein, 7 aa, synthetic construct
GMGGYKS

SEQ ID NO: 165629 - protein, 7 aa, synthetic construct
KVLNEMR

SEQ ID NO: 165630 - protein, 7 aa, synthetic construct
TQPDTKR

SEQ ID NO: 165631 - protein, 7 aa, synthetic construct
IITRTSQ

SEQ ID NO: 165632 - protein, 7 aa, synthetic construct
NEVVKSK

SEQ ID NO: 165633 - protein, 7 aa, synthetic construct
GGFVNRA

SEQ ID NO: 165634 - protein, 7 aa, synthetic construct
TDARKDK

SEQ ID NO: 165635 - protein, 7 aa, synthetic construct
KRNDVIY

SEQ ID NO: 165636 - protein, 7 aa, synthetic construct
YPAAEKK

SEQ ID NO: 165637 - protein, 7 aa, synthetic construct
YPQMYKQ

SEQ ID NO: 165638 - protein, 7 aa, synthetic construct
NPYVRVA

SEQ ID NO: 165639 - protein, 7 aa, synthetic construct
YVMSSKM

SEQ ID NO: 165640 - protein, 7 aa, synthetic construct
KKMPASD

SEQ ID NO: 165641 - protein, 7 aa, synthetic construct
KTAFERG

SEQ ID NO: 165642 - protein, 7 aa, synthetic construct
QRNLMVS

SEQ ID NO: 165643 - protein, 7 aa, synthetic construct
YKGALNF

SEQ ID NO: 165644 - protein, 7 aa, synthetic construct
THVPRNS

SEQ ID NO: 165645 - protein, 7 aa, synthetic construct
PDRNKMQ

SEQ ID NO: 165646 - protein, 7 aa, synthetic construct
IKERMYN

SEQ ID NO: 165647 - protein, 7 aa, synthetic construct
GLKRVFE

SEQ ID NO: 165648 - protein, 7 aa, synthetic construct
MSKVYIA

SEQ ID NO: 165649 - protein, 7 aa, synthetic construct
GTSRNQQ

SEQ ID NO: 165650 - protein, 7 aa, synthetic construct
SADKVHR

SEQ ID NO: 165651 - protein, 7 aa, synthetic construct
MEKPVPR

SEQ ID NO: 165652 - protein, 7 aa, synthetic construct
ALGEVKR

SEQ ID NO: 165653 - protein, 7 aa, synthetic construct
STKYQNQ

SEQ ID NO: 165654 - protein, 7 aa, synthetic construct
VRTHTVV

SEQ ID NO: 165655 - protein, 7 aa, synthetic construct
QFSKSNN

SEQ ID NO: 165656 - protein, 7 aa, synthetic construct
LHKMFQG

SEQ ID NO: 165657 - protein, 7 aa, synthetic construct
HVTRNSA

SEQ ID NO: 165658 - protein, 7 aa, synthetic construct
IPHPRSM

SEQ ID NO: 165659 - protein, 7 aa, synthetic construct
GMTSYKS

SEQ ID NO: 165660 - protein, 7 aa, synthetic construct
FTRTKDL

SEQ ID NO: 165661 - protein, 7 aa, synthetic construct
STGRNTL

SEQ ID NO: 165662 - protein, 7 aa, synthetic construct
IEMKVKF

SEQ ID NO: 165663 - protein, 7 aa, synthetic construct
SGDTKRT

SEQ ID NO: 165664 - protein, 7 aa, synthetic construct
AAEQKKS

SEQ ID NO: 165665 - protein, 7 aa, synthetic construct
AVHTYKA

SEQ ID NO: 165666 - protein, 7 aa, synthetic construct
YKKESYG

SEQ ID NO: 165667 - protein, 7 aa, synthetic construct
KSRLDLG

SEQ ID NO: 165668 - protein, 7 aa, synthetic construct
LQKLKWE

SEQ ID NO: 165669 - protein, 7 aa, synthetic construct
GKTRGEV

SEQ ID NO: 165670 - protein, 7 aa, synthetic construct
FGKFLGG

SEQ ID NO: 165671 - protein, 7 aa, synthetic construct
FKIKVHD

SEQ ID NO: 165672 - protein, 7 aa, synthetic construct
HQGVFKN

SEQ ID NO: 165673 - protein, 7 aa, synthetic construct
VTVKRDL

SEQ ID NO: 165674 - protein, 7 aa, synthetic construct
PRSKDFS

SEQ ID NO: 165675 - protein, 7 aa, synthetic construct
LFNANKS

SEQ ID NO: 165676 - protein, 7 aa, synthetic construct
TKMHQYN

SEQ ID NO: 165677 - protein, 7 aa, synthetic construct
YHKQLIQ

SEQ ID NO: 165678 - protein, 7 aa, synthetic construct
GYKMKLD

SEQ ID NO: 165679 - protein, 7 aa, synthetic construct
LFKKDPM

SEQ ID NO: 165680 - protein, 7 aa, synthetic construct
GMPHGRQ

SEQ ID NO: 165681 - protein, 7 aa, synthetic construct
TVSMRHN

SEQ ID NO: 165682 - protein, 7 aa, synthetic construct
RVKIMSD

SEQ ID NO: 165683 - protein, 7 aa, synthetic construct
KQRTEIH

SEQ ID NO: 165684 - protein, 7 aa, synthetic construct
ISLHQRP

SEQ ID NO: 165685 - protein, 7 aa, synthetic construct
SGAPYKN

SEQ ID NO: 165686 - protein, 7 aa, synthetic construct
VYSNLKG

SEQ ID NO: 165687 - protein, 7 aa, synthetic construct
KNTRDSA

SEQ ID NO: 165688 - protein, 7 aa, synthetic construct
TDRVRAH

SEQ ID NO: 165689 - protein, 7 aa, synthetic construct
LTKMHSY

SEQ ID NO: 165690 - protein, 7 aa, synthetic construct
VEKTLRY

SEQ ID NO: 165691 - protein, 7 aa, synthetic construct
DKTMRNY

SEQ ID NO: 165692 - protein, 7 aa, synthetic construct
LPRTLHS

SEQ ID NO: 165693 - protein, 7 aa, synthetic construct
QRPVNYI

SEQ ID NO: 165694 - protein, 7 aa, synthetic construct
QGQEAKK

SEQ ID NO: 165695 - protein, 7 aa, synthetic construct
KFHMKES

SEQ ID NO: 165696 - protein, 7 aa, synthetic construct
DKKWTGA

SEQ ID NO: 165697 - protein, 7 aa, synthetic construct
MTKVHSY

SEQ ID NO: 165698 - protein, 7 aa, synthetic construct
YMHKETK

SEQ ID NO: 165699 - protein, 7 aa, synthetic construct
YKAHPTS

SEQ ID NO: 165700 - protein, 7 aa, synthetic construct
DTNQKFK

SEQ ID NO: 165701 - protein, 7 aa, synthetic construct
VPVSERK

SEQ ID NO: 165702 - protein, 7 aa, synthetic construct
EKVLNNR

SEQ ID NO: 165703 - protein, 7 aa, synthetic construct
LDVRGKY

SEQ ID NO: 165704 - protein, 7 aa, synthetic construct
QYTLTKA

SEQ ID NO: 165705 - protein, 7 aa, synthetic construct
QKLYTGN

SEQ ID NO: 165706 - protein, 7 aa, synthetic construct
VPSNYKN

SEQ ID NO: 165707 - protein, 7 aa, synthetic construct
AQKYLSS

SEQ ID NO: 165708 - protein, 7 aa, synthetic construct
ATRSKDL

SEQ ID NO: 165709 - protein, 7 aa, synthetic construct
HFPKPSG

SEQ ID NO: 165710 - protein, 7 aa, synthetic construct
RDTYKSI

SEQ ID NO: 165711 - protein, 7 aa, synthetic construct
TTKYREP

SEQ ID NO: 165712 - protein, 7 aa, synthetic construct
IRLKMPE

SEQ ID NO: 165713 - protein, 7 aa, synthetic construct
NKIYNAN

SEQ ID NO: 165714 - protein, 7 aa, synthetic construct
TRTDHTK

SEQ ID NO: 165715 - protein, 7 aa, synthetic construct
WPQDNKK

SEQ ID NO: 165716 - protein, 7 aa, synthetic construct
GKHFMVG

SEQ ID NO: 165717 - protein, 7 aa, synthetic construct
PERSNAK

SEQ ID NO: 165718 - protein, 7 aa, synthetic construct
QGRSLPT

SEQ ID NO: 165719 - protein, 7 aa, synthetic construct
NSRTERI

SEQ ID NO: 165720 - protein, 7 aa, synthetic construct
NFEKYKN

SEQ ID NO: 165721 - protein, 7 aa, synthetic construct
AYKSLHG

SEQ ID NO: 165722 - protein, 7 aa, synthetic construct
KLRQENS

SEQ ID NO: 165723 - protein, 7 aa, synthetic construct
QSTIRFN

SEQ ID NO: 165724 - protein, 7 aa, synthetic construct
GKIKDHF

SEQ ID NO: 165725 - protein, 7 aa, synthetic construct
RSANREV

SEQ ID NO: 165726 - protein, 7 aa, synthetic construct
SQGKHSQ

SEQ ID NO: 165727 - protein, 7 aa, synthetic construct
DRPPAKY

SEQ ID NO: 165728 - protein, 7 aa, synthetic construct
PIRHEGK

SEQ ID NO: 165729 - protein, 7 aa, synthetic construct
IKPHQFP

SEQ ID NO: 165730 - protein, 7 aa, synthetic construct
ITKFQAN

SEQ ID NO: 165731 - protein, 7 aa, synthetic construct
ETKRTQV

SEQ ID NO: 165732 - protein, 7 aa, synthetic construct
TMTRKDF

SEQ ID NO: 165733 - protein, 7 aa, synthetic construct
LKMHERA

SEQ ID NO: 165734 - protein, 7 aa, synthetic construct
ADKRFSS

SEQ ID NO: 165735 - protein, 7 aa, synthetic construct
QEKVRHL

SEQ ID NO: 165736 - protein, 7 aa, synthetic construct
RELYGKP

SEQ ID NO: 165737 - protein, 7 aa, synthetic construct
LKGIAYS

SEQ ID NO: 165738 - protein, 7 aa, synthetic construct
IKMYTQG

SEQ ID NO: 165739 - protein, 7 aa, synthetic construct
TSKNWAG

SEQ ID NO: 165740 - protein, 7 aa, synthetic construct
VRGAAIH

SEQ ID NO: 165741 - protein, 7 aa, synthetic construct
KKSPPYE

SEQ ID NO: 165742 - protein, 7 aa, synthetic construct
IDRTASR

SEQ ID NO: 165743 - protein, 7 aa, synthetic construct
GAKPKDY

SEQ ID NO: 165744 - protein, 7 aa, synthetic construct
EKYNTKT

SEQ ID NO: 165745 - protein, 7 aa, synthetic construct
KRGDLGH

SEQ ID NO: 165746 - protein, 7 aa, synthetic construct
GYTNPRG

SEQ ID NO: 165747 - protein, 7 aa, synthetic construct
RTSGHIS

SEQ ID NO: 165748 - protein, 7 aa, synthetic construct
LDTKYKF

SEQ ID NO: 165749 - protein, 7 aa, synthetic construct
IPKSQWG

SEQ ID NO: 165750 - protein, 7 aa, synthetic construct
VTITHRS

SEQ ID NO: 165751 - protein, 7 aa, synthetic construct
KLFNTPG

SEQ ID NO: 165752 - protein, 7 aa, synthetic construct
KEKYELK

SEQ ID NO: 165753 - protein, 7 aa, synthetic construct
MSGLRYS

SEQ ID NO: 165754 - protein, 7 aa, synthetic construct
QASKYAN

SEQ ID NO: 165755 - protein, 7 aa, synthetic construct
GQIHNKN

SEQ ID NO: 165756 - protein, 7 aa, synthetic construct
VSFKTHS

SEQ ID NO: 165757 - protein, 7 aa, synthetic construct
KLERHIV

SEQ ID NO: 165758 - protein, 7 aa, synthetic construct
YKPITPY

SEQ ID NO: 165759 - protein, 7 aa, synthetic construct
GKHVYPA

SEQ ID NO: 165760 - protein, 7 aa, synthetic construct
MSGNLHR

SEQ ID NO: 165761 - protein, 7 aa, synthetic construct
IPLHYKN

SEQ ID NO: 165762 - protein, 7 aa, synthetic construct
LKYNVST

SEQ ID NO: 165763 - protein, 7 aa, synthetic construct
MTKTHYN

SEQ ID NO: 165764 - protein, 7 aa, synthetic construct
KFPANYP

SEQ ID NO: 165765 - protein, 7 aa, synthetic construct
GSTYVKS

SEQ ID NO: 165766 - protein, 7 aa, synthetic construct
IHGNVGR

SEQ ID NO: 165767 - protein, 7 aa, synthetic construct
LKFSNNS

SEQ ID NO: 165768 - protein, 7 aa, synthetic construct
ALGGHRA

SEQ ID NO: 165769 - protein, 7 aa, synthetic construct
VPPNYRQ

SEQ ID NO: 165770 - protein, 7 aa, synthetic construct
YPHHKGN

SEQ ID NO: 165771 - protein, 7 aa, synthetic construct
TKYTVSN

SEQ ID NO: 165772 - protein, 7 aa, synthetic construct
AFHQKGQ

SEQ ID NO: 165773 - protein, 7 aa, synthetic construct
YKSIMNT

SEQ ID NO: 165774 - protein, 7 aa, synthetic construct
PSQFKQG

SEQ ID NO: 165775 - protein, 7 aa, synthetic construct
KIPGHYN

SEQ ID NO: 165776 - protein, 7 aa, synthetic construct
SGKSYNI

SEQ ID NO: 165777 - protein, 7 aa, synthetic construct
VPRPSYM

SEQ ID NO: 165778 - protein, 7 aa, synthetic construct
KSKVYVD

SEQ ID NO: 165779 - protein, 7 aa, synthetic construct
IRPIHGG

SEQ ID NO: 165780 - protein, 7 aa, synthetic construct
GDAKRNF

SEQ ID NO: 165781 - protein, 7 aa, synthetic construct
YQKKDPI

SEQ ID NO: 165782 - protein, 7 aa, synthetic construct
ISRADKM

SEQ ID NO: 165783 - protein, 7 aa, synthetic construct
NTYKEKH

SEQ ID NO: 165784 - protein, 7 aa, synthetic construct
NKPNVYN

SEQ ID NO: 165785 - protein, 7 aa, synthetic construct
QDHNKGR

SEQ ID NO: 165786 - protein, 7 aa, synthetic construct
QTERARP

SEQ ID NO: 165787 - protein, 7 aa, synthetic construct
ILDRDKR

SEQ ID NO: 165788 - protein, 7 aa, synthetic construct
RFGAPVP

SEQ ID NO: 165789 - protein, 7 aa, synthetic construct
DLQKMQR

SEQ ID NO: 165790 - protein, 7 aa, synthetic construct
GKLRATD

SEQ ID NO: 165791 - protein, 7 aa, synthetic construct
FIANQRN

SEQ ID NO: 165792 - protein, 7 aa, synthetic construct
RANPYSV

SEQ ID NO: 165793 - protein, 7 aa, synthetic construct
FKGFVNA

SEQ ID NO: 165794 - protein, 7 aa, synthetic construct
KMRNDVS

SEQ ID NO: 165795 - protein, 7 aa, synthetic construct
SRTHVDK

SEQ ID NO: 165796 - protein, 7 aa, synthetic construct
NPHKFSS

SEQ ID NO: 165797 - protein, 7 aa, synthetic construct
RETLRIS

SEQ ID NO: 165798 - protein, 7 aa, synthetic construct
NRMVKEI

SEQ ID NO: 165799 - protein, 7 aa, synthetic construct
GMSLYKA

SEQ ID NO: 165800 - protein, 7 aa, synthetic construct
FKFNSPT

SEQ ID NO: 165801 - protein, 7 aa, synthetic construct
VENKHVR

SEQ ID NO: 165802 - protein, 7 aa, synthetic construct
TASRHVQ

SEQ ID NO: 165803 - protein, 7 aa, synthetic construct
YETGKAR

SEQ ID NO: 165804 - protein, 7 aa, synthetic construct
QTYNAKS

SEQ ID NO: 165805 - protein, 7 aa, synthetic construct
FKMLTAS

SEQ ID NO: 165806 - protein, 7 aa, synthetic construct
GHGTTAR

SEQ ID NO: 165807 - protein, 7 aa, synthetic construct
ADKGTKY

SEQ ID NO: 165808 - protein, 7 aa, synthetic construct
KEKWGPA

SEQ ID NO: 165809 - protein, 7 aa, synthetic construct
DVKANHR

SEQ ID NO: 165810 - protein, 7 aa, synthetic construct
TQIGHKQ

SEQ ID NO: 165811 - protein, 7 aa, synthetic construct
PPKREIY

SEQ ID NO: 165812 - protein, 7 aa, synthetic construct
IARTDKY

SEQ ID NO: 165813 - protein, 7 aa, synthetic construct
KVKVVDQ

SEQ ID NO: 165814 - protein, 7 aa, synthetic construct
AHGPRAV

SEQ ID NO: 165815 - protein, 7 aa, synthetic construct
GQIHMRS

SEQ ID NO: 165816 - protein, 7 aa, synthetic construct
GDTRSGK

SEQ ID NO: 165817 - protein, 7 aa, synthetic construct
VTRPVAQ

SEQ ID NO: 165818 - protein, 7 aa, synthetic construct
AHKFSPG

SEQ ID NO: 165819 - protein, 7 aa, synthetic construct
YAQKDHR

SEQ ID NO: 165820 - protein, 7 aa, synthetic construct
VEKVPAR

SEQ ID NO: 165821 - protein, 7 aa, synthetic construct
TMVENRK

SEQ ID NO: 165822 - protein, 7 aa, synthetic construct
VPYSHKA

SEQ ID NO: 165823 - protein, 7 aa, synthetic construct
EFKYKQP

SEQ ID NO: 165824 - protein, 7 aa, synthetic construct
SGKTYTN

SEQ ID NO: 165825 - protein, 7 aa, synthetic construct
IKHGIYA

SEQ ID NO: 165826 - protein, 7 aa, synthetic construct
TYAAYKG

SEQ ID NO: 165827 - protein, 7 aa, synthetic construct
VTRPIAH

SEQ ID NO: 165828 - protein, 7 aa, synthetic construct
VKHTLYA

SEQ ID NO: 165829 - protein, 7 aa, synthetic construct
NAKRLTD

SEQ ID NO: 165830 - protein, 7 aa, synthetic construct
SSSNSRQ

SEQ ID NO: 165831 - protein, 7 aa, synthetic construct
YEKQNIR

SEQ ID NO: 165832 - protein, 7 aa, synthetic construct
NISERLR

SEQ ID NO: 165833 - protein, 7 aa, synthetic construct
TKIKIDL

SEQ ID NO: 165834 - protein, 7 aa, synthetic construct
TYKKENT

SEQ ID NO: 165835 - protein, 7 aa, synthetic construct
RTREVMM

SEQ ID NO: 165836 - protein, 7 aa, synthetic construct
LEKFRMG

SEQ ID NO: 165837 - protein, 7 aa, synthetic construct
SVDKKHY

SEQ ID NO: 165838 - protein, 7 aa, synthetic construct
VDRRATN

SEQ ID NO: 165839 - protein, 7 aa, synthetic construct
LTRSQMN

SEQ ID NO: 165840 - protein, 7 aa, synthetic construct
DKKYHVI

SEQ ID NO: 165841 - protein, 7 aa, synthetic construct
HPPRPNV

SEQ ID NO: 165842 - protein, 7 aa, synthetic construct
QVRQEAR

SEQ ID NO: 165843 - protein, 7 aa, synthetic construct
SYKIQNQ

SEQ ID NO: 165844 - protein, 7 aa, synthetic construct
FKAAHVL

SEQ ID NO: 165845 - protein, 7 aa, synthetic construct
HDFKTRA

SEQ ID NO: 165846 - protein, 7 aa, synthetic construct
KKQYGDM

SEQ ID NO: 165847 - protein, 7 aa, synthetic construct
IAGKRDI

SEQ ID NO: 165848 - protein, 7 aa, synthetic construct
IEKARFM

SEQ ID NO: 165849 - protein, 7 aa, synthetic construct
FYAGVKA

SEQ ID NO: 165850 - protein, 7 aa, synthetic construct
LHALHKG

SEQ ID NO: 165851 - protein, 7 aa, synthetic construct
DKQYNKT

SEQ ID NO: 165852 - protein, 7 aa, synthetic construct
HRDNVVR

SEQ ID NO: 165853 - protein, 7 aa, synthetic construct
EQKIRSF

SEQ ID NO: 165854 - protein, 7 aa, synthetic construct
MPIMKRD

SEQ ID NO: 165855 - protein, 7 aa, synthetic construct
KIARPID

SEQ ID NO: 165856 - protein, 7 aa, synthetic construct
LPRHSPV

SEQ ID NO: 165857 - protein, 7 aa, synthetic construct
MPSSRSN

SEQ ID NO: 165858 - protein, 7 aa, synthetic construct
ADGKSKA

SEQ ID NO: 165859 - protein, 7 aa, synthetic construct
QKGIMTY

SEQ ID NO: 165860 - protein, 7 aa, synthetic construct
ELPTKFK

SEQ ID NO: 165861 - protein, 7 aa, synthetic construct
GPAKHFS

SEQ ID NO: 165862 - protein, 7 aa, synthetic construct
FFKPNTS

SEQ ID NO: 165863 - protein, 7 aa, synthetic construct
NERTRLI

SEQ ID NO: 165864 - protein, 7 aa, synthetic construct
VVHRINP

SEQ ID NO: 165865 - protein, 7 aa, synthetic construct
RVEQRHS

SEQ ID NO: 165866 - protein, 7 aa, synthetic construct
VQSKQYN

SEQ ID NO: 165867 - protein, 7 aa, synthetic construct
VPRDIQR

SEQ ID NO: 165868 - protein, 7 aa, synthetic construct
AAPRRDL

SEQ ID NO: 165869 - protein, 7 aa, synthetic construct
PTDKRAS

SEQ ID NO: 165870 - protein, 7 aa, synthetic construct
GTILQRG

SEQ ID NO: 165871 - protein, 7 aa, synthetic construct
NDSKSMR

SEQ ID NO: 165872 - protein, 7 aa, synthetic construct
NPEKNRL

SEQ ID NO: 165873 - protein, 7 aa, synthetic construct
LPGMYRA

SEQ ID NO: 165874 - protein, 7 aa, synthetic construct
TARHNPA

SEQ ID NO: 165875 - protein, 7 aa, synthetic construct
TVDVRKH

SEQ ID NO: 165876 - protein, 7 aa, synthetic construct
TKISEYR

SEQ ID NO: 165877 - protein, 7 aa, synthetic construct
KYSMMDK

SEQ ID NO: 165878 - protein, 7 aa, synthetic construct
MISHRQL

SEQ ID NO: 165879 - protein, 7 aa, synthetic construct
DAPARKG

SEQ ID NO: 165880 - protein, 7 aa, synthetic construct
RPFSGEK

SEQ ID NO: 165881 - protein, 7 aa, synthetic construct
MKYQQAL

SEQ ID NO: 165882 - protein, 7 aa, synthetic construct
FPKPVSY

SEQ ID NO: 165883 - protein, 7 aa, synthetic construct
DKNIYRP

SEQ ID NO: 165884 - protein, 7 aa, synthetic construct
QKNALHY

SEQ ID NO: 165885 - protein, 7 aa, synthetic construct
LEIKYKA

SEQ ID NO: 165886 - protein, 7 aa, synthetic construct
YPNFMKN

SEQ ID NO: 165887 - protein, 7 aa, synthetic construct
TGPRHTL

SEQ ID NO: 165888 - protein, 7 aa, synthetic construct
DIRTMKY

SEQ ID NO: 165889 - protein, 7 aa, synthetic construct
ISLTSRA

SEQ ID NO: 165890 - protein, 7 aa, synthetic construct
VFDRGKS

SEQ ID NO: 165891 - protein, 7 aa, synthetic construct
QDKHAFK

SEQ ID NO: 165892 - protein, 7 aa, synthetic construct
GYHTNKV

SEQ ID NO: 165893 - protein, 7 aa, synthetic construct
EPVKQVR

SEQ ID NO: 165894 - protein, 7 aa, synthetic construct
GKTYLHG

SEQ ID NO: 165895 - protein, 7 aa, synthetic construct
IARMIEK

SEQ ID NO: 165896 - protein, 7 aa, synthetic construct
YDAVSRK

SEQ ID NO: 165897 - protein, 7 aa, synthetic construct
KGAFGSN

SEQ ID NO: 165898 - protein, 7 aa, synthetic construct
GSFKESR

SEQ ID NO: 165899 - protein, 7 aa, synthetic construct
LSYVNKS

SEQ ID NO: 165900 - protein, 7 aa, synthetic construct
RKSPMDA

SEQ ID NO: 165901 - protein, 7 aa, synthetic construct
HSPRERP

SEQ ID NO: 165902 - protein, 7 aa, synthetic construct
IAPNKWG

SEQ ID NO: 165903 - protein, 7 aa, synthetic construct
HTTRMGQ

SEQ ID NO: 165904 - protein, 7 aa, synthetic construct
QKVHNER

SEQ ID NO: 165905 - protein, 7 aa, synthetic construct
QEPTRGK

SEQ ID NO: 165906 - protein, 7 aa, synthetic construct
MMRIKSD

SEQ ID NO: 165907 - protein, 7 aa, synthetic construct
TFHKIAG

SEQ ID NO: 165908 - protein, 7 aa, synthetic construct
MSEMRAR

SEQ ID NO: 165909 - protein, 7 aa, synthetic construct
IDRIQKH

SEQ ID NO: 165910 - protein, 7 aa, synthetic construct
SANYLKN

SEQ ID NO: 165911 - protein, 7 aa, synthetic construct
NMRGDKY

SEQ ID NO: 165912 - protein, 7 aa, synthetic construct
RITHMTP

SEQ ID NO: 165913 - protein, 7 aa, synthetic construct
MLHGPKL

SEQ ID NO: 165914 - protein, 7 aa, synthetic construct
KESRSFI

SEQ ID NO: 165915 - protein, 7 aa, synthetic construct
IPNQLRY

SEQ ID NO: 165916 - protein, 7 aa, synthetic construct
TIYNIKP

SEQ ID NO: 165917 - protein, 7 aa, synthetic construct
SNPFQKG

SEQ ID NO: 165918 - protein, 7 aa, synthetic construct
KNDGYKS

SEQ ID NO: 165919 - protein, 7 aa, synthetic construct
KLNRDQQ

SEQ ID NO: 165920 - protein, 7 aa, synthetic construct
HSGKIYA

SEQ ID NO: 165921 - protein, 7 aa, synthetic construct
WMKVSPS

SEQ ID NO: 165922 - protein, 7 aa, synthetic construct
NYAKEKM

SEQ ID NO: 165923 - protein, 7 aa, synthetic construct
HNYVVKA

SEQ ID NO: 165924 - protein, 7 aa, synthetic construct
TKMTYQN

SEQ ID NO: 165925 - protein, 7 aa, synthetic construct
RINTVER

SEQ ID NO: 165926 - protein, 7 aa, synthetic construct
GAKLYTN

SEQ ID NO: 165927 - protein, 7 aa, synthetic construct
RFAKVEN

SEQ ID NO: 165928 - protein, 7 aa, synthetic construct
NKRPDQL

SEQ ID NO: 165929 - protein, 7 aa, synthetic construct
DRLPKNM

SEQ ID NO: 165930 - protein, 7 aa, synthetic construct
TPNERIR

SEQ ID NO: 165931 - protein, 7 aa, synthetic construct
YGRSDSK

SEQ ID NO: 165932 - protein, 7 aa, synthetic construct
LKFPARD

SEQ ID NO: 165933 - protein, 7 aa, synthetic construct
QKYTAAN

SEQ ID NO: 165934 - protein, 7 aa, synthetic construct
DKVIRVM

SEQ ID NO: 165935 - protein, 7 aa, synthetic construct
GDMRLNK

SEQ ID NO: 165936 - protein, 7 aa, synthetic construct
ELKHKYV

SEQ ID NO: 165937 - protein, 7 aa, synthetic construct
VHTPRSV

SEQ ID NO: 165938 - protein, 7 aa, synthetic construct
FKFSSPN

SEQ ID NO: 165939 - protein, 7 aa, synthetic construct
LTKQHAY

SEQ ID NO: 165940 - protein, 7 aa, synthetic construct
KHNETNR

SEQ ID NO: 165941 - protein, 7 aa, synthetic construct
VKFERPG

SEQ ID NO: 165942 - protein, 7 aa, synthetic construct
GRPVHGM

SEQ ID NO: 165943 - protein, 7 aa, synthetic construct
ESNKTFK

SEQ ID NO: 165944 - protein, 7 aa, synthetic construct
TADRVKF

SEQ ID NO: 165945 - protein, 7 aa, synthetic construct
VSYTVKA

SEQ ID NO: 165946 - protein, 7 aa, synthetic construct
TKYEVSR

SEQ ID NO: 165947 - protein, 7 aa, synthetic construct
TTKNVKD

SEQ ID NO: 165948 - protein, 7 aa, synthetic construct
YDHKQGK

SEQ ID NO: 165949 - protein, 7 aa, synthetic construct
LHGIKYG

SEQ ID NO: 165950 - protein, 7 aa, synthetic construct
GKLYNLG

SEQ ID NO: 165951 - protein, 7 aa, synthetic construct
FGKPRDQ

SEQ ID NO: 165952 - protein, 7 aa, synthetic construct
IGFKARE

SEQ ID NO: 165953 - protein, 7 aa, synthetic construct
THTPKYI

SEQ ID NO: 165954 - protein, 7 aa, synthetic construct
KRTTIQD

SEQ ID NO: 165955 - protein, 7 aa, synthetic construct
GVRQSDK

SEQ ID NO: 165956 - protein, 7 aa, synthetic construct
MRAIHQS

SEQ ID NO: 165957 - protein, 7 aa, synthetic construct
EKRMMNP

SEQ ID NO: 165958 - protein, 7 aa, synthetic construct
IPSNKWG

SEQ ID NO: 165959 - protein, 7 aa, synthetic construct
VSYMAKA

SEQ ID NO: 165960 - protein, 7 aa, synthetic construct
KIKFTGD

SEQ ID NO: 165961 - protein, 7 aa, synthetic construct
MSDIARK

SEQ ID NO: 165962 - protein, 7 aa, synthetic construct
VKFTKDN

SEQ ID NO: 165963 - protein, 7 aa, synthetic construct
TGTWVKP

SEQ ID NO: 165964 - protein, 7 aa, synthetic construct
FLHTTKT

SEQ ID NO: 165965 - protein, 7 aa, synthetic construct
EKPQQFK

SEQ ID NO: 165966 - protein, 7 aa, synthetic construct
TQGAHRP

SEQ ID NO: 165967 - protein, 7 aa, synthetic construct
FTMQKRD

SEQ ID NO: 165968 - protein, 7 aa, synthetic construct
NEYAKTK

SEQ ID NO: 165969 - protein, 7 aa, synthetic construct
IARPAHM

SEQ ID NO: 165970 - protein, 7 aa, synthetic construct
GFHNLKQ

SEQ ID NO: 165971 - protein, 7 aa, synthetic construct
KTVREYN

SEQ ID NO: 165972 - protein, 7 aa, synthetic construct
LSSRERL

SEQ ID NO: 165973 - protein, 7 aa, synthetic construct
HSDRVKL

SEQ ID NO: 165974 - protein, 7 aa, synthetic construct
FFGNVKQ

SEQ ID NO: 165975 - protein, 7 aa, synthetic construct
KDAHVNR

SEQ ID NO: 165976 - protein, 7 aa, synthetic construct
LKFTSAQ

SEQ ID NO: 165977 - protein, 7 aa, synthetic construct
IDIKGRF

SEQ ID NO: 165978 - protein, 7 aa, synthetic construct
DNPRAKG

SEQ ID NO: 165979 - protein, 7 aa, synthetic construct
IYGTKSL

SEQ ID NO: 165980 - protein, 7 aa, synthetic construct
HDSRKTI

SEQ ID NO: 165981 - protein, 7 aa, synthetic construct
YDKLGHK

SEQ ID NO: 165982 - protein, 7 aa, synthetic construct
VSSRSNI

SEQ ID NO: 165983 - protein, 7 aa, synthetic construct
KSFMNAA

SEQ ID NO: 165984 - protein, 7 aa, synthetic construct
MSGPKHY

SEQ ID NO: 165985 - protein, 7 aa, synthetic construct
WSKPMSN

SEQ ID NO: 165986 - protein, 7 aa, synthetic construct
KSFTKDN

SEQ ID NO: 165987 - protein, 7 aa, synthetic construct
FSMKPSN

SEQ ID NO: 165988 - protein, 7 aa, synthetic construct
YERTTSK

SEQ ID NO: 165989 - protein, 7 aa, synthetic construct
IFEQKRA

SEQ ID NO: 165990 - protein, 7 aa, synthetic construct
LGDRAGR

SEQ ID NO: 165991 - protein, 7 aa, synthetic construct
LFGQLKQ

SEQ ID NO: 165992 - protein, 7 aa, synthetic construct
HPGSKDR

SEQ ID NO: 165993 - protein, 7 aa, synthetic construct
HVTRNSI

SEQ ID NO: 165994 - protein, 7 aa, synthetic construct
GEPAKKQ

SEQ ID NO: 165995 - protein, 7 aa, synthetic construct
LFKHDKT

SEQ ID NO: 165996 - protein, 7 aa, synthetic construct
QVKYVPN

SEQ ID NO: 165997 - protein, 7 aa, synthetic construct
RPVTVRD

SEQ ID NO: 165998 - protein, 7 aa, synthetic construct
KNSRDAV

SEQ ID NO: 165999 - protein, 7 aa, synthetic construct
HKPYVGM

SEQ ID NO: 166000 - protein, 7 aa, synthetic construct
GKKFFSE

SEQ ID NO: 166001 - protein, 7 aa, synthetic construct
TKTDRDR

SEQ ID NO: 166002 - protein, 7 aa, synthetic construct
AKNVFRD

SEQ ID NO: 166003 - protein, 7 aa, synthetic construct
FKGIYTG

SEQ ID NO: 166004 - protein, 7 aa, synthetic construct
AEARQKG

SEQ ID NO: 166005 - protein, 7 aa, synthetic construct
KRLPDMM

SEQ ID NO: 166006 - protein, 7 aa, synthetic construct
HVKFQVA

SEQ ID NO: 166007 - protein, 7 aa, synthetic construct
MTRGLMQ

SEQ ID NO: 166008 - protein, 7 aa, synthetic construct
EPGRGVK

SEQ ID NO: 166009 - protein, 7 aa, synthetic construct
PSKLRLE

SEQ ID NO: 166010 - protein, 7 aa, synthetic construct
RHSLTNP

SEQ ID NO: 166011 - protein, 7 aa, synthetic construct
VKVYAGN

SEQ ID NO: 166012 - protein, 7 aa, synthetic construct
IYKNPSM

SEQ ID NO: 166013 - protein, 7 aa, synthetic construct
GKHFNPA

SEQ ID NO: 166014 - protein, 7 aa, synthetic construct
RFATDTK

SEQ ID NO: 166015 - protein, 7 aa, synthetic construct
YIDLKRS

SEQ ID NO: 166016 - protein, 7 aa, synthetic construct
PTDRVKH

SEQ ID NO: 166017 - protein, 7 aa, synthetic construct
PDRANKQ

SEQ ID NO: 166018 - protein, 7 aa, synthetic construct
KVDGIYK

SEQ ID NO: 166019 - protein, 7 aa, synthetic construct
ATHIRGN

SEQ ID NO: 166020 - protein, 7 aa, synthetic construct
LPHKYGQ

SEQ ID NO: 166021 - protein, 7 aa, synthetic construct
MDARRNL

SEQ ID NO: 166022 - protein, 7 aa, synthetic construct
STKKDLF

SEQ ID NO: 166023 - protein, 7 aa, synthetic construct
IDHLKRI

SEQ ID NO: 166024 - protein, 7 aa, synthetic construct
NDKPKAM

SEQ ID NO: 166025 - protein, 7 aa, synthetic construct
LDRRTPL

SEQ ID NO: 166026 - protein, 7 aa, synthetic construct
RVKLNMD

SEQ ID NO: 166027 - protein, 7 aa, synthetic construct
GVEKKWG

SEQ ID NO: 166028 - protein, 7 aa, synthetic construct
GERNQVK

SEQ ID NO: 166029 - protein, 7 aa, synthetic construct
IARVQSG

SEQ ID NO: 166030 - protein, 7 aa, synthetic construct
TMKLYSG

SEQ ID NO: 166031 - protein, 7 aa, synthetic construct
KYMVKEN

SEQ ID NO: 166032 - protein, 7 aa, synthetic construct
MGNPERR

SEQ ID NO: 166033 - protein, 7 aa, synthetic construct
GKLRFSE

SEQ ID NO: 166034 - protein, 7 aa, synthetic construct
HDNKKIL

SEQ ID NO: 166035 - protein, 7 aa, synthetic construct
LKVHIQM

SEQ ID NO: 166036 - protein, 7 aa, synthetic construct
IIAGERK

SEQ ID NO: 166037 - protein, 7 aa, synthetic construct
GDGKMLR

SEQ ID NO: 166038 - protein, 7 aa, synthetic construct
QHPRTDK

SEQ ID NO: 166039 - protein, 7 aa, synthetic construct
ADMRSNK

SEQ ID NO: 166040 - protein, 7 aa, synthetic construct
IMSNPTR

SEQ ID NO: 166041 - protein, 7 aa, synthetic construct
SYKPLVG

SEQ ID NO: 166042 - protein, 7 aa, synthetic construct
HSSADKR

SEQ ID NO: 166043 - protein, 7 aa, synthetic construct
NIMRDRA

SEQ ID NO: 166044 - protein, 7 aa, synthetic construct
YHKNDMK

SEQ ID NO: 166045 - protein, 7 aa, synthetic construct
TFGHKNI

SEQ ID NO: 166046 - protein, 7 aa, synthetic construct
VIGQHGR

SEQ ID NO: 166047 - protein, 7 aa, synthetic construct
ALRAKSE

SEQ ID NO: 166048 - protein, 7 aa, synthetic construct
DGKNRAT

SEQ ID NO: 166049 - protein, 7 aa, synthetic construct
MVERNPR

SEQ ID NO: 166050 - protein, 7 aa, synthetic construct
QDRKNIQ

SEQ ID NO: 166051 - protein, 7 aa, synthetic construct
PETKTIR

SEQ ID NO: 166052 - protein, 7 aa, synthetic construct
FEKARYS

SEQ ID NO: 166053 - protein, 7 aa, synthetic construct
IPHDKAR

SEQ ID NO: 166054 - protein, 7 aa, synthetic construct
HEKVQRS

SEQ ID NO: 166055 - protein, 7 aa, synthetic construct
KARTAPD

SEQ ID NO: 166056 - protein, 7 aa, synthetic construct
NVAGVHR

SEQ ID NO: 166057 - protein, 7 aa, synthetic construct
DSLRTKL

SEQ ID NO: 166058 - protein, 7 aa, synthetic construct
HVRPSNI

SEQ ID NO: 166059 - protein, 7 aa, synthetic construct
LYGMHKA

SEQ ID NO: 166060 - protein, 7 aa, synthetic construct
PQKRDQY

SEQ ID NO: 166061 - protein, 7 aa, synthetic construct
FKSNIYA

SEQ ID NO: 166062 - protein, 7 aa, synthetic construct
VMKNIYA

SEQ ID NO: 166063 - protein, 7 aa, synthetic construct
NQAQDKR

SEQ ID NO: 166064 - protein, 7 aa, synthetic construct
IPYSHKA

SEQ ID NO: 166065 - protein, 7 aa, synthetic construct
REVRAHA

SEQ ID NO: 166066 - protein, 7 aa, synthetic construct
HFKNNPN

SEQ ID NO: 166067 - protein, 7 aa, synthetic construct
HKGGFNN

SEQ ID NO: 166068 - protein, 7 aa, synthetic construct
DKGPQRA

SEQ ID NO: 166069 - protein, 7 aa, synthetic construct
FPMGTKY

SEQ ID NO: 166070 - protein, 7 aa, synthetic construct
SSARLHS

SEQ ID NO: 166071 - protein, 7 aa, synthetic construct
TFSKNNT

SEQ ID NO: 166072 - protein, 7 aa, synthetic construct
KQRIDAN

SEQ ID NO: 166073 - protein, 7 aa, synthetic construct
TGMGGHR

SEQ ID NO: 166074 - protein, 7 aa, synthetic construct
PSSRPVH

SEQ ID NO: 166075 - protein, 7 aa, synthetic construct
VSTPRLQ

SEQ ID NO: 166076 - protein, 7 aa, synthetic construct
DANNKNR

SEQ ID NO: 166077 - protein, 7 aa, synthetic construct
RSSRDPV

SEQ ID NO: 166078 - protein, 7 aa, synthetic construct
QFGKDKM

SEQ ID NO: 166079 - protein, 7 aa, synthetic construct
TDKKYNP

SEQ ID NO: 166080 - protein, 7 aa, synthetic construct
KPYVKLD

SEQ ID NO: 166081 - protein, 7 aa, synthetic construct
GRHVNPA

SEQ ID NO: 166082 - protein, 7 aa, synthetic construct
TTARHGN

SEQ ID NO: 166083 - protein, 7 aa, synthetic construct
PPVRHIG

SEQ ID NO: 166084 - protein, 7 aa, synthetic construct
TDRGMKI

SEQ ID NO: 166085 - protein, 7 aa, synthetic construct
GDVRNKF

SEQ ID NO: 166086 - protein, 7 aa, synthetic construct
ALHATRN

SEQ ID NO: 166087 - protein, 7 aa, synthetic construct
ESARQKP

SEQ ID NO: 166088 - protein, 7 aa, synthetic construct
KVMSEHR

SEQ ID NO: 166089 - protein, 7 aa, synthetic construct
LKRDFTS

SEQ ID NO: 166090 - protein, 7 aa, synthetic construct
GIGHFKV

SEQ ID NO: 166091 - protein, 7 aa, synthetic construct
QHGRINT

SEQ ID NO: 166092 - protein, 7 aa, synthetic construct
YKHSAQA

SEQ ID NO: 166093 - protein, 7 aa, synthetic construct
MVKNIYG

SEQ ID NO: 166094 - protein, 7 aa, synthetic construct
KEYQNKA

SEQ ID NO: 166095 - protein, 7 aa, synthetic construct
WQGMVKQ

SEQ ID NO: 166096 - protein, 7 aa, synthetic construct
LNPFAKM

SEQ ID NO: 166097 - protein, 7 aa, synthetic construct
ATTRNEK

SEQ ID NO: 166098 - protein, 7 aa, synthetic construct
VLRGPER

SEQ ID NO: 166099 - protein, 7 aa, synthetic construct
VSLHARS

SEQ ID NO: 166100 - protein, 7 aa, synthetic construct
LKGNIYN

SEQ ID NO: 166101 - protein, 7 aa, synthetic construct
IKHKIMD

SEQ ID NO: 166102 - protein, 7 aa, synthetic construct
LTSHRVN

SEQ ID NO: 166103 - protein, 7 aa, synthetic construct
TRDHTLR

SEQ ID NO: 166104 - protein, 7 aa, synthetic construct
QTLTRHS

SEQ ID NO: 166105 - protein, 7 aa, synthetic construct
FVTKRET

SEQ ID NO: 166106 - protein, 7 aa, synthetic construct
YKMIESK

SEQ ID NO: 166107 - protein, 7 aa, synthetic construct
AIDHKRT

SEQ ID NO: 166108 - protein, 7 aa, synthetic construct
KTMHREV

SEQ ID NO: 166109 - protein, 7 aa, synthetic construct
KQGGVYN

SEQ ID NO: 166110 - protein, 7 aa, synthetic construct
GVGREAK

SEQ ID NO: 166111 - protein, 7 aa, synthetic construct
RTRDTAV

SEQ ID NO: 166112 - protein, 7 aa, synthetic construct
YKHDSPK

SEQ ID NO: 166113 - protein, 7 aa, synthetic construct
MKYQLTS

SEQ ID NO: 166114 - protein, 7 aa, synthetic construct
TMEPRQR

SEQ ID NO: 166115 - protein, 7 aa, synthetic construct
MSYVSKA

SEQ ID NO: 166116 - protein, 7 aa, synthetic construct
QGDVRTR

SEQ ID NO: 166117 - protein, 7 aa, synthetic construct
MKFSVGA

SEQ ID NO: 166118 - protein, 7 aa, synthetic construct
GDVNKPR

SEQ ID NO: 166119 - protein, 7 aa, synthetic construct
IKGGYGH

SEQ ID NO: 166120 - protein, 7 aa, synthetic construct
YVSKEKN

SEQ ID NO: 166121 - protein, 7 aa, synthetic construct
DVKQVRH

SEQ ID NO: 166122 - protein, 7 aa, synthetic construct
SAHRNFI

SEQ ID NO: 166123 - protein, 7 aa, synthetic construct
SKLYSKD

SEQ ID NO: 166124 - protein, 7 aa, synthetic construct
YEKRTMS

SEQ ID NO: 166125 - protein, 7 aa, synthetic construct
AGPDARR

SEQ ID NO: 166126 - protein, 7 aa, synthetic construct
TYVHAKS

SEQ ID NO: 166127 - protein, 7 aa, synthetic construct
TMKLYSA

SEQ ID NO: 166128 - protein, 7 aa, synthetic construct
EGKTKQQ

SEQ ID NO: 166129 - protein, 7 aa, synthetic construct
GPKRDFT

SEQ ID NO: 166130 - protein, 7 aa, synthetic construct
MAYTTKN

SEQ ID NO: 166131 - protein, 7 aa, synthetic construct
SGSRVNL

SEQ ID NO: 166132 - protein, 7 aa, synthetic construct
PTKYTIG

SEQ ID NO: 166133 - protein, 7 aa, synthetic construct
SKQLHVY

SEQ ID NO: 166134 - protein, 7 aa, synthetic construct
LDRALHK

SEQ ID NO: 166135 - protein, 7 aa, synthetic construct
TKRLEPP

SEQ ID NO: 166136 - protein, 7 aa, synthetic construct
DKPYSPK

SEQ ID NO: 166137 - protein, 7 aa, synthetic construct
KTVLRID

SEQ ID NO: 166138 - protein, 7 aa, synthetic construct
QLGQYKQ

SEQ ID NO: 166139 - protein, 7 aa, synthetic construct
NYAAIRA

SEQ ID NO: 166140 - protein, 7 aa, synthetic construct
IRPHMIN

SEQ ID NO: 166141 - protein, 7 aa, synthetic construct
TSEKRSH

SEQ ID NO: 166142 - protein, 7 aa, synthetic construct
FKAYVPS

SEQ ID NO: 166143 - protein, 7 aa, synthetic construct
NFKVMHA

SEQ ID NO: 166144 - protein, 7 aa, synthetic construct
MTTYKTG

SEQ ID NO: 166145 - protein, 7 aa, synthetic construct
GQHKASL

SEQ ID NO: 166146 - protein, 7 aa, synthetic construct
SGKKQDF

SEQ ID NO: 166147 - protein, 7 aa, synthetic construct
FAKHDQR

SEQ ID NO: 166148 - protein, 7 aa, synthetic construct
DIKPKLH

SEQ ID NO: 166149 - protein, 7 aa, synthetic construct
NKYVQPN

SEQ ID NO: 166150 - protein, 7 aa, synthetic construct
FPMRVRE

SEQ ID NO: 166151 - protein, 7 aa, synthetic construct
LDHVRGR

SEQ ID NO: 166152 - protein, 7 aa, synthetic construct
NEVAKIR

SEQ ID NO: 166153 - protein, 7 aa, synthetic construct
TINLKYA

SEQ ID NO: 166154 - protein, 7 aa, synthetic construct
MMDRSKS

SEQ ID NO: 166155 - protein, 7 aa, synthetic construct
WAKVKAD

SEQ ID NO: 166156 - protein, 7 aa, synthetic construct
SQKYVAN

SEQ ID NO: 166157 - protein, 7 aa, synthetic construct
VQKYEKG

SEQ ID NO: 166158 - protein, 7 aa, synthetic construct
GKFSKDN

SEQ ID NO: 166159 - protein, 7 aa, synthetic construct
VTRSINQ

SEQ ID NO: 166160 - protein, 7 aa, synthetic construct
TIPYKSN

SEQ ID NO: 166161 - protein, 7 aa, synthetic construct
DRMKSPQ

SEQ ID NO: 166162 - protein, 7 aa, synthetic construct
AERKIQF

SEQ ID NO: 166163 - protein, 7 aa, synthetic construct
GDKQISR

SEQ ID NO: 166164 - protein, 7 aa, synthetic construct
ITLAMRA

SEQ ID NO: 166165 - protein, 7 aa, synthetic construct
QSKFHAN

SEQ ID NO: 166166 - protein, 7 aa, synthetic construct
RTDRLQT

SEQ ID NO: 166167 - protein, 7 aa, synthetic construct
QDKPHFK

SEQ ID NO: 166168 - protein, 7 aa, synthetic construct
MEPVTKK

SEQ ID NO: 166169 - protein, 7 aa, synthetic construct
MMDVKRH

SEQ ID NO: 166170 - protein, 7 aa, synthetic construct
VIREIRG

SEQ ID NO: 166171 - protein, 7 aa, synthetic construct
EPQTKRG

SEQ ID NO: 166172 - protein, 7 aa, synthetic construct
DYKFKSF

SEQ ID NO: 166173 - protein, 7 aa, synthetic construct
VDKRQSN

SEQ ID NO: 166174 - protein, 7 aa, synthetic construct
HSGLMRA

SEQ ID NO: 166175 - protein, 7 aa, synthetic construct
TARNDSR

SEQ ID NO: 166176 - protein, 7 aa, synthetic construct
KSTYVDK

SEQ ID NO: 166177 - protein, 7 aa, synthetic construct
IKFTTPN

SEQ ID NO: 166178 - protein, 7 aa, synthetic construct
GHGLNKS

SEQ ID NO: 166179 - protein, 7 aa, synthetic construct
DLTKVKH

SEQ ID NO: 166180 - protein, 7 aa, synthetic construct
KALYGKD

SEQ ID NO: 166181 - protein, 7 aa, synthetic construct
HPTRVNL

SEQ ID NO: 166182 - protein, 7 aa, synthetic construct
RREVFPA

SEQ ID NO: 166183 - protein, 7 aa, synthetic construct
KYAVEVK

SEQ ID NO: 166184 - protein, 7 aa, synthetic construct
MNPMDRK

SEQ ID NO: 166185 - protein, 7 aa, synthetic construct
LYSMVKP

SEQ ID NO: 166186 - protein, 7 aa, synthetic construct
RSLAVEK

SEQ ID NO: 166187 - protein, 7 aa, synthetic construct
FRNPVIN

SEQ ID NO: 166188 - protein, 7 aa, synthetic construct
FRPVLSA

SEQ ID NO: 166189 - protein, 7 aa, synthetic construct
GKYSLTG

SEQ ID NO: 166190 - protein, 7 aa, synthetic construct
YLKHTTI

SEQ ID NO: 166191 - protein, 7 aa, synthetic construct
GYTHAKT

SEQ ID NO: 166192 - protein, 7 aa, synthetic construct
VWKALKE

SEQ ID NO: 166193 - protein, 7 aa, synthetic construct
GYKIQRD

SEQ ID NO: 166194 - protein, 7 aa, synthetic construct
PSLYAKP

SEQ ID NO: 166195 - protein, 7 aa, synthetic construct
GKTRDVN

SEQ ID NO: 166196 - protein, 7 aa, synthetic construct
TGKPYSQ

SEQ ID NO: 166197 - protein, 7 aa, synthetic construct
WTTKETR

SEQ ID NO: 166198 - protein, 7 aa, synthetic construct
NVERNIR

SEQ ID NO: 166199 - protein, 7 aa, synthetic construct
YHGTVAR

SEQ ID NO: 166200 - protein, 7 aa, synthetic construct
MYPAEKR

SEQ ID NO: 166201 - protein, 7 aa, synthetic construct
IPEKAGR

SEQ ID NO: 166202 - protein, 7 aa, synthetic construct
QGGKLFN

SEQ ID NO: 166203 - protein, 7 aa, synthetic construct
KARVELL

SEQ ID NO: 166204 - protein, 7 aa, synthetic construct
RATIHNL

SEQ ID NO: 166205 - protein, 7 aa, synthetic construct
GVKKYSE

SEQ ID NO: 166206 - protein, 7 aa, synthetic construct
YPLRKTD

SEQ ID NO: 166207 - protein, 7 aa, synthetic construct
NEFKLNK

SEQ ID NO: 166208 - protein, 7 aa, synthetic construct
FPKGIYQ

SEQ ID NO: 166209 - protein, 7 aa, synthetic construct
YKEWMKG

SEQ ID NO: 166210 - protein, 7 aa, synthetic construct
QDKGIRY

SEQ ID NO: 166211 - protein, 7 aa, synthetic construct
KGKYTDG

SEQ ID NO: 166212 - protein, 7 aa, synthetic construct
RVVLKQE

SEQ ID NO: 166213 - protein, 7 aa, synthetic construct
HDKVSLR

SEQ ID NO: 166214 - protein, 7 aa, synthetic construct
KEKGIWG

SEQ ID NO: 166215 - protein, 7 aa, synthetic construct
QDRQKNT

SEQ ID NO: 166216 - protein, 7 aa, synthetic construct
GHSAFKN

SEQ ID NO: 166217 - protein, 7 aa, synthetic construct
IERVPKS

SEQ ID NO: 166218 - protein, 7 aa, synthetic construct
FTRLEKG

SEQ ID NO: 166219 - protein, 7 aa, synthetic construct
HTPMRGN

SEQ ID NO: 166220 - protein, 7 aa, synthetic construct
AYIKHNA

SEQ ID NO: 166221 - protein, 7 aa, synthetic construct
EIKRIAN

SEQ ID NO: 166222 - protein, 7 aa, synthetic construct
SFPGDKR

SEQ ID NO: 166223 - protein, 7 aa, synthetic construct
DTMKLKL

SEQ ID NO: 166224 - protein, 7 aa, synthetic construct
MFGTNKM

SEQ ID NO: 166225 - protein, 7 aa, synthetic construct
SKAYNPN

SEQ ID NO: 166226 - protein, 7 aa, synthetic construct
AAGREKG

SEQ ID NO: 166227 - protein, 7 aa, synthetic construct
LLKKFME

SEQ ID NO: 166228 - protein, 7 aa, synthetic construct
AEKRTNI

SEQ ID NO: 166229 - protein, 7 aa, synthetic construct
QDKHNRL

SEQ ID NO: 166230 - protein, 7 aa, synthetic construct
IDKIIRM

SEQ ID NO: 166231 - protein, 7 aa, synthetic construct
TTGYKHQ

SEQ ID NO: 166232 - protein, 7 aa, synthetic construct
MKYVQTG

SEQ ID NO: 166233 - protein, 7 aa, synthetic construct
LLPQDRK

SEQ ID NO: 166234 - protein, 7 aa, synthetic construct
MKHEYRV

SEQ ID NO: 166235 - protein, 7 aa, synthetic construct
RMTPVDR

SEQ ID NO: 166236 - protein, 7 aa, synthetic construct
LENLKRH

SEQ ID NO: 166237 - protein, 7 aa, synthetic construct
QHGKIFA

SEQ ID NO: 166238 - protein, 7 aa, synthetic construct
NYPGVKY

SEQ ID NO: 166239 - protein, 7 aa, synthetic construct
EKGPTLR

SEQ ID NO: 166240 - protein, 7 aa, synthetic construct
MLKMRLD

SEQ ID NO: 166241 - protein, 7 aa, synthetic construct
KRLVASE

SEQ ID NO: 166242 - protein, 7 aa, synthetic construct
HSDKQRM

SEQ ID NO: 166243 - protein, 7 aa, synthetic construct
KVNYLAA

SEQ ID NO: 166244 - protein, 7 aa, synthetic construct
MKFTQQN

SEQ ID NO: 166245 - protein, 7 aa, synthetic construct
TDGPRKG

SEQ ID NO: 166246 - protein, 7 aa, synthetic construct
DKRAIHN

SEQ ID NO: 166247 - protein, 7 aa, synthetic construct
FKPALTY

SEQ ID NO: 166248 - protein, 7 aa, synthetic construct
QGFKHNG

SEQ ID NO: 166249 - protein, 7 aa, synthetic construct
IGIAHRN

SEQ ID NO: 166250 - protein, 7 aa, synthetic construct
EFKRMGV

SEQ ID NO: 166251 - protein, 7 aa, synthetic construct
LGGKHGY

SEQ ID NO: 166252 - protein, 7 aa, synthetic construct
FQHKAAM

SEQ ID NO: 166253 - protein, 7 aa, synthetic construct
YPRVITN

SEQ ID NO: 166254 - protein, 7 aa, synthetic construct
TKWTQAA

SEQ ID NO: 166255 - protein, 7 aa, synthetic construct
QKAVHMY

SEQ ID NO: 166256 - protein, 7 aa, synthetic construct
DKTPKMG

SEQ ID NO: 166257 - protein, 7 aa, synthetic construct
AGSKTHQ

SEQ ID NO: 166258 - protein, 7 aa, synthetic construct
NMPIKYA

SEQ ID NO: 166259 - protein, 7 aa, synthetic construct
LEPRSRS

SEQ ID NO: 166260 - protein, 7 aa, synthetic construct
TRENIPR

SEQ ID NO: 166261 - protein, 7 aa, synthetic construct
VLRAINS

SEQ ID NO: 166262 - protein, 7 aa, synthetic construct
RNKDLSL

SEQ ID NO: 166263 - protein, 7 aa, synthetic construct
IFDKRQN

SEQ ID NO: 166264 - protein, 7 aa, synthetic construct
LSKLHFP

SEQ ID NO: 166265 - protein, 7 aa, synthetic construct
IYADSKR

SEQ ID NO: 166266 - protein, 7 aa, synthetic construct
FSRPISA

SEQ ID NO: 166267 - protein, 7 aa, synthetic construct
KLRIEIA

SEQ ID NO: 166268 - protein, 7 aa, synthetic construct
TDRAHLK

SEQ ID NO: 166269 - protein, 7 aa, synthetic construct
MKAVIYN

SEQ ID NO: 166270 - protein, 7 aa, synthetic construct
RSEHMKS

SEQ ID NO: 166271 - protein, 7 aa, synthetic construct
VMSKDHR

SEQ ID NO: 166272 - protein, 7 aa, synthetic construct
MFGMQKS

SEQ ID NO: 166273 - protein, 7 aa, synthetic construct
SKSYVLN

SEQ ID NO: 166274 - protein, 7 aa, synthetic construct
GTAHRGQ

SEQ ID NO: 166275 - protein, 7 aa, synthetic construct
ADRVLRP

SEQ ID NO: 166276 - protein, 7 aa, synthetic construct
LEGSKLR

SEQ ID NO: 166277 - protein, 7 aa, synthetic construct
LKAHVMM

SEQ ID NO: 166278 - protein, 7 aa, synthetic construct
QAEIKTR

SEQ ID NO: 166279 - protein, 7 aa, synthetic construct
QKFTVHP

SEQ ID NO: 166280 - protein, 7 aa, synthetic construct
GEPKKSH

SEQ ID NO: 166281 - protein, 7 aa, synthetic construct
ITEVRRV

SEQ ID NO: 166282 - protein, 7 aa, synthetic construct
YRDVMPR

SEQ ID NO: 166283 - protein, 7 aa, synthetic construct
GLKFLSA

SEQ ID NO: 166284 - protein, 7 aa, synthetic construct
YRVPKDL

SEQ ID NO: 166285 - protein, 7 aa, synthetic construct
PRVTRDT

SEQ ID NO: 166286 - protein, 7 aa, synthetic construct
YADIKRF

SEQ ID NO: 166287 - protein, 7 aa, synthetic construct
TDRKLLM

SEQ ID NO: 166288 - protein, 7 aa, synthetic construct
NIPGYKS

SEQ ID NO: 166289 - protein, 7 aa, synthetic construct
QKFTISG

SEQ ID NO: 166290 - protein, 7 aa, synthetic construct
IDSKSRM

SEQ ID NO: 166291 - protein, 7 aa, synthetic construct
EPIIKKQ

SEQ ID NO: 166292 - protein, 7 aa, synthetic construct
KTSYKVD

SEQ ID NO: 166293 - protein, 7 aa, synthetic construct
GHKKDYP

SEQ ID NO: 166294 - protein, 7 aa, synthetic construct
RLHSTMS

SEQ ID NO: 166295 - protein, 7 aa, synthetic construct
TSLHRAS

SEQ ID NO: 166296 - protein, 7 aa, synthetic construct
TKRDDMR

SEQ ID NO: 166297 - protein, 7 aa, synthetic construct
GIPREVR

SEQ ID NO: 166298 - protein, 7 aa, synthetic construct
QKFNMTQ

SEQ ID NO: 166299 - protein, 7 aa, synthetic construct
YLRDLRN

SEQ ID NO: 166300 - protein, 7 aa, synthetic construct
TEYKSMK

SEQ ID NO: 166301 - protein, 7 aa, synthetic construct
LDRHMAK

SEQ ID NO: 166302 - protein, 7 aa, synthetic construct
MAFKSER

SEQ ID NO: 166303 - protein, 7 aa, synthetic construct
EYKLKNI

SEQ ID NO: 166304 - protein, 7 aa, synthetic construct
EQQKQKP

SEQ ID NO: 166305 - protein, 7 aa, synthetic construct
AKGYLPP

SEQ ID NO: 166306 - protein, 7 aa, synthetic construct
KSRADTA

SEQ ID NO: 166307 - protein, 7 aa, synthetic construct
TFENRGK

SEQ ID NO: 166308 - protein, 7 aa, synthetic construct
KVGADHR

SEQ ID NO: 166309 - protein, 7 aa, synthetic construct
GRPMIDR

SEQ ID NO: 166310 - protein, 7 aa, synthetic construct
SYKSHPN

SEQ ID NO: 166311 - protein, 7 aa, synthetic construct
PQRKETM

SEQ ID NO: 166312 - protein, 7 aa, synthetic construct
RKMPEPA

SEQ ID NO: 166313 - protein, 7 aa, synthetic construct
YKNTKDH

SEQ ID NO: 166314 - protein, 7 aa, synthetic construct
THKINFS

SEQ ID NO: 166315 - protein, 7 aa, synthetic construct
IVKPHYA

SEQ ID NO: 166316 - protein, 7 aa, synthetic construct
PQKRLME

SEQ ID NO: 166317 - protein, 7 aa, synthetic construct
KSSREQM

SEQ ID NO: 166318 - protein, 7 aa, synthetic construct
LKANIMY

SEQ ID NO: 166319 - protein, 7 aa, synthetic construct
LLERRST

SEQ ID NO: 166320 - protein, 7 aa, synthetic construct
DKQKYMI

SEQ ID NO: 166321 - protein, 7 aa, synthetic construct
GGAKHYI

SEQ ID NO: 166322 - protein, 7 aa, synthetic construct
KVFNEMK

SEQ ID NO: 166323 - protein, 7 aa, synthetic construct
YKIKHDS

SEQ ID NO: 166324 - protein, 7 aa, synthetic construct
DKNAMRS

SEQ ID NO: 166325 - protein, 7 aa, synthetic construct
GKYMTMN

SEQ ID NO: 166326 - protein, 7 aa, synthetic construct
PKHSKDS

SEQ ID NO: 166327 - protein, 7 aa, synthetic construct
KNSRDNF

SEQ ID NO: 166328 - protein, 7 aa, synthetic construct
YKHNIYG

SEQ ID NO: 166329 - protein, 7 aa, synthetic construct
MIHNINK

SEQ ID NO: 166330 - protein, 7 aa, synthetic construct
GAPKYSS

SEQ ID NO: 166331 - protein, 7 aa, synthetic construct
MKGQPYN

SEQ ID NO: 166332 - protein, 7 aa, synthetic construct
VVKNIYG

SEQ ID NO: 166333 - protein, 7 aa, synthetic construct
MINHRDK

SEQ ID NO: 166334 - protein, 7 aa, synthetic construct
LDRRISS

SEQ ID NO: 166335 - protein, 7 aa, synthetic construct
MSLTRRE

SEQ ID NO: 166336 - protein, 7 aa, synthetic construct
EPMQKRG

SEQ ID NO: 166337 - protein, 7 aa, synthetic construct
TPVKYRD

SEQ ID NO: 166338 - protein, 7 aa, synthetic construct
ITLHKYA

SEQ ID NO: 166339 - protein, 7 aa, synthetic construct
YSIHPKG

SEQ ID NO: 166340 - protein, 7 aa, synthetic construct
KSDIPKW

SEQ ID NO: 166341 - protein, 7 aa, synthetic construct
DGLTKIR

SEQ ID NO: 166342 - protein, 7 aa, synthetic construct
KKELGWG

SEQ ID NO: 166343 - protein, 7 aa, synthetic construct
QGRHLLA

SEQ ID NO: 166344 - protein, 7 aa, synthetic construct
FTAHKFS

SEQ ID NO: 166345 - protein, 7 aa, synthetic construct
TGTKYNN

SEQ ID NO: 166346 - protein, 7 aa, synthetic construct
IKYNPQL

SEQ ID NO: 166347 - protein, 7 aa, synthetic construct
FFKPKAE

SEQ ID NO: 166348 - protein, 7 aa, synthetic construct
FKPHYEK

SEQ ID NO: 166349 - protein, 7 aa, synthetic construct
DAKAAAR

SEQ ID NO: 166350 - protein, 7 aa, synthetic construct
QDRVTSR

SEQ ID NO: 166351 - protein, 7 aa, synthetic construct
HFGMPKP

SEQ ID NO: 166352 - protein, 7 aa, synthetic construct
FERGVTK

SEQ ID NO: 166353 - protein, 7 aa, synthetic construct
GIGVKYS

SEQ ID NO: 166354 - protein, 7 aa, synthetic construct
STQPRSL

SEQ ID NO: 166355 - protein, 7 aa, synthetic construct
HTIKANL

SEQ ID NO: 166356 - protein, 7 aa, synthetic construct
MGKMDKH

SEQ ID NO: 166357 - protein, 7 aa, synthetic construct
MEPKLRF

SEQ ID NO: 166358 - protein, 7 aa, synthetic construct
KGRLLES

SEQ ID NO: 166359 - protein, 7 aa, synthetic construct
YKGIPTF

SEQ ID NO: 166360 - protein, 7 aa, synthetic construct
KAFHGTA

SEQ ID NO: 166361 - protein, 7 aa, synthetic construct
YIKEHNK

SEQ ID NO: 166362 - protein, 7 aa, synthetic construct
IKYSPSI

SEQ ID NO: 166363 - protein, 7 aa, synthetic construct
KTRDLGQ

SEQ ID NO: 166364 - protein, 7 aa, synthetic construct
QSRAGDK

SEQ ID NO: 166365 - protein, 7 aa, synthetic construct
IDKIVRH

SEQ ID NO: 166366 - protein, 7 aa, synthetic construct
GAERMLK

SEQ ID NO: 166367 - protein, 7 aa, synthetic construct
SDQRTKT

SEQ ID NO: 166368 - protein, 7 aa, synthetic construct
ETLKRAT

SEQ ID NO: 166369 - protein, 7 aa, synthetic construct
KSLRIDS

SEQ ID NO: 166370 - protein, 7 aa, synthetic construct
QPFKPIA

SEQ ID NO: 166371 - protein, 7 aa, synthetic construct
LMQRPHS

SEQ ID NO: 166372 - protein, 7 aa, synthetic construct
SYAGIRN

SEQ ID NO: 166373 - protein, 7 aa, synthetic construct
IFKMTSS

SEQ ID NO: 166374 - protein, 7 aa, synthetic construct
EKGSLLR

SEQ ID NO: 166375 - protein, 7 aa, synthetic construct
YAHVTNK

SEQ ID NO: 166376 - protein, 7 aa, synthetic construct
LKHLTYA

SEQ ID NO: 166377 - protein, 7 aa, synthetic construct
NQGLKYS

SEQ ID NO: 166378 - protein, 7 aa, synthetic construct
YAKTLYG

SEQ ID NO: 166379 - protein, 7 aa, synthetic construct
QTRTEPK

SEQ ID NO: 166380 - protein, 7 aa, synthetic construct
YVPIASK

SEQ ID NO: 166381 - protein, 7 aa, synthetic construct
GKLYISP

SEQ ID NO: 166382 - protein, 7 aa, synthetic construct
KAMRDLS

SEQ ID NO: 166383 - protein, 7 aa, synthetic construct
SAPHRNV

SEQ ID NO: 166384 - protein, 7 aa, synthetic construct
FRPFKEG

SEQ ID NO: 166385 - protein, 7 aa, synthetic construct
IDKRIYN

SEQ ID NO: 166386 - protein, 7 aa, synthetic construct
ADKRQQT

SEQ ID NO: 166387 - protein, 7 aa, synthetic construct
AGHPKTI

SEQ ID NO: 166388 - protein, 7 aa, synthetic construct
HDRVKAI

SEQ ID NO: 166389 - protein, 7 aa, synthetic construct
ATTPRYS

SEQ ID NO: 166390 - protein, 7 aa, synthetic construct
MKMMSNN

SEQ ID NO: 166391 - protein, 7 aa, synthetic construct
HITHMKA

SEQ ID NO: 166392 - protein, 7 aa, synthetic construct
VNPGKWG

SEQ ID NO: 166393 - protein, 7 aa, synthetic construct
RVERIMA

SEQ ID NO: 166394 - protein, 7 aa, synthetic construct
YFKPSHA

SEQ ID NO: 166395 - protein, 7 aa, synthetic construct
MDKTPHK

SEQ ID NO: 166396 - protein, 7 aa, synthetic construct
HFKNIAQ

SEQ ID NO: 166397 - protein, 7 aa, synthetic construct
MMKFSTA

SEQ ID NO: 166398 - protein, 7 aa, synthetic construct
TMTIHKQ

SEQ ID NO: 166399 - protein, 7 aa, synthetic construct
KEHNYKG

SEQ ID NO: 166400 - protein, 7 aa, synthetic construct
RKLEPPF

SEQ ID NO: 166401 - protein, 7 aa, synthetic construct
MSTPKYM

SEQ ID NO: 166402 - protein, 7 aa, synthetic construct
KDSRTHT

SEQ ID NO: 166403 - protein, 7 aa, synthetic construct
LPVSRHN

SEQ ID NO: 166404 - protein, 7 aa, synthetic construct
TSIKYSS

SEQ ID NO: 166405 - protein, 7 aa, synthetic construct
VKKMPFE

SEQ ID NO: 166406 - protein, 7 aa, synthetic construct
AAKIRDL

SEQ ID NO: 166407 - protein, 7 aa, synthetic construct
LKNLYNP

SEQ ID NO: 166408 - protein, 7 aa, synthetic construct
AMGRASI

SEQ ID NO: 166409 - protein, 7 aa, synthetic construct
IRLAQDK

SEQ ID NO: 166410 - protein, 7 aa, synthetic construct
LKHHQVG

SEQ ID NO: 166411 - protein, 7 aa, synthetic construct
TNLHRSN

SEQ ID NO: 166412 - protein, 7 aa, synthetic construct
TKNFLSS

SEQ ID NO: 166413 - protein, 7 aa, synthetic construct
PTRGEKY

SEQ ID NO: 166414 - protein, 7 aa, synthetic construct
GLDGRKM

SEQ ID NO: 166415 - protein, 7 aa, synthetic construct
KRGDGII

SEQ ID NO: 166416 - protein, 7 aa, synthetic construct
VARERLN

SEQ ID NO: 166417 - protein, 7 aa, synthetic construct
ALHQIRG

SEQ ID NO: 166418 - protein, 7 aa, synthetic construct
IHGSNAR

SEQ ID NO: 166419 - protein, 7 aa, synthetic construct
KFQIKTD

SEQ ID NO: 166420 - protein, 7 aa, synthetic construct
HSVKYKE

SEQ ID NO: 166421 - protein, 7 aa, synthetic construct
SQPRDKM

SEQ ID NO: 166422 - protein, 7 aa, synthetic construct
DVTAKYK

SEQ ID NO: 166423 - protein, 7 aa, synthetic construct
KFRETMN

SEQ ID NO: 166424 - protein, 7 aa, synthetic construct
EKFNKFA

SEQ ID NO: 166425 - protein, 7 aa, synthetic construct
TVGYKLS

SEQ ID NO: 166426 - protein, 7 aa, synthetic construct
ADSKFRP

SEQ ID NO: 166427 - protein, 7 aa, synthetic construct
IGEHKRI

SEQ ID NO: 166428 - protein, 7 aa, synthetic construct
KFGPAHN

SEQ ID NO: 166429 - protein, 7 aa, synthetic construct
YFKMPKD

SEQ ID NO: 166430 - protein, 7 aa, synthetic construct
YKNTLFN

SEQ ID NO: 166431 - protein, 7 aa, synthetic construct
AEGKRFV

SEQ ID NO: 166432 - protein, 7 aa, synthetic construct
SKPMTYN

SEQ ID NO: 166433 - protein, 7 aa, synthetic construct
EPGKASK

SEQ ID NO: 166434 - protein, 7 aa, synthetic construct
FTPRDSR

SEQ ID NO: 166435 - protein, 7 aa, synthetic construct
DRHIKTI

SEQ ID NO: 166436 - protein, 7 aa, synthetic construct
DSMKNRI

SEQ ID NO: 166437 - protein, 7 aa, synthetic construct
DHLKQKT

SEQ ID NO: 166438 - protein, 7 aa, synthetic construct
YEKVARH

SEQ ID NO: 166439 - protein, 7 aa, synthetic construct
LKFERGS

SEQ ID NO: 166440 - protein, 7 aa, synthetic construct
KVKLVDI

SEQ ID NO: 166441 - protein, 7 aa, synthetic construct
GESKKSF

SEQ ID NO: 166442 - protein, 7 aa, synthetic construct
FTAKRDM

SEQ ID NO: 166443 - protein, 7 aa, synthetic construct
KNSRSEA

SEQ ID NO: 166444 - protein, 7 aa, synthetic construct
TKQLALY

SEQ ID NO: 166445 - protein, 7 aa, synthetic construct
REKFTSS

SEQ ID NO: 166446 - protein, 7 aa, synthetic construct
GEIKTVR

SEQ ID NO: 166447 - protein, 7 aa, synthetic construct
QMGMYKV

SEQ ID NO: 166448 - protein, 7 aa, synthetic construct
MKVFQQA

SEQ ID NO: 166449 - protein, 7 aa, synthetic construct
IAKMYQG

SEQ ID NO: 166450 - protein, 7 aa, synthetic construct
LAHKLFN

SEQ ID NO: 166451 - protein, 7 aa, synthetic construct
DKQPKAG

SEQ ID NO: 166452 - protein, 7 aa, synthetic construct
QTERFVK

SEQ ID NO: 166453 - protein, 7 aa, synthetic construct
EPKVKAW

SEQ ID NO: 166454 - protein, 7 aa, synthetic construct
MKHQIYA

SEQ ID NO: 166455 - protein, 7 aa, synthetic construct
TIGIYKQ

SEQ ID NO: 166456 - protein, 7 aa, synthetic construct
SKGIFSN

SEQ ID NO: 166457 - protein, 7 aa, synthetic construct
EKRTNLL

SEQ ID NO: 166458 - protein, 7 aa, synthetic construct
DKAIHRV

SEQ ID NO: 166459 - protein, 7 aa, synthetic construct
TILHVKS

SEQ ID NO: 166460 - protein, 7 aa, synthetic construct
IKNVPYN

SEQ ID NO: 166461 - protein, 7 aa, synthetic construct
YIPKHIN

SEQ ID NO: 166462 - protein, 7 aa, synthetic construct
YKAQTYT

SEQ ID NO: 166463 - protein, 7 aa, synthetic construct
RMDRPMQ

SEQ ID NO: 166464 - protein, 7 aa, synthetic construct
SKPHREF

SEQ ID NO: 166465 - protein, 7 aa, synthetic construct
YKPVYVG

SEQ ID NO: 166466 - protein, 7 aa, synthetic construct
VKAYLTG

SEQ ID NO: 166467 - protein, 7 aa, synthetic construct
LTFNKRE

SEQ ID NO: 166468 - protein, 7 aa, synthetic construct
FGNFMKG

SEQ ID NO: 166469 - protein, 7 aa, synthetic construct
AMDKRHF

SEQ ID NO: 166470 - protein, 7 aa, synthetic construct
DYGKIKT

SEQ ID NO: 166471 - protein, 7 aa, synthetic construct
PTSGKYQ

SEQ ID NO: 166472 - protein, 7 aa, synthetic construct
SYAKLGG

SEQ ID NO: 166473 - protein, 7 aa, synthetic construct
KMPNIYP

SEQ ID NO: 166474 - protein, 7 aa, synthetic construct
KELTSRA

SEQ ID NO: 166475 - protein, 7 aa, synthetic construct
KQTPRDI

SEQ ID NO: 166476 - protein, 7 aa, synthetic construct
GRASAHV

SEQ ID NO: 166477 - protein, 7 aa, synthetic construct
AHRPSTS

SEQ ID NO: 166478 - protein, 7 aa, synthetic construct
YSKRVDV

SEQ ID NO: 166479 - protein, 7 aa, synthetic construct
HGFATKG

SEQ ID NO: 166480 - protein, 7 aa, synthetic construct
KQVVEHR

SEQ ID NO: 166481 - protein, 7 aa, synthetic construct
QPGYKQN

SEQ ID NO: 166482 - protein, 7 aa, synthetic construct
RTPREGV

SEQ ID NO: 166483 - protein, 7 aa, synthetic construct
ANVEGKR

SEQ ID NO: 166484 - protein, 7 aa, synthetic construct
KEAYKHG

SEQ ID NO: 166485 - protein, 7 aa, synthetic construct
MAHKLSY

SEQ ID NO: 166486 - protein, 7 aa, synthetic construct
YSKGYVM

SEQ ID NO: 166487 - protein, 7 aa, synthetic construct
RLQIQIG

SEQ ID NO: 166488 - protein, 7 aa, synthetic construct
KLPYSMN

SEQ ID NO: 166489 - protein, 7 aa, synthetic construct
RSKIGDF

SEQ ID NO: 166490 - protein, 7 aa, synthetic construct
TNPKHYQ

SEQ ID NO: 166491 - protein, 7 aa, synthetic construct
DKKYTSL

SEQ ID NO: 166492 - protein, 7 aa, synthetic construct
LTRHMPG

SEQ ID NO: 166493 - protein, 7 aa, synthetic construct
GLAGTHR

SEQ ID NO: 166494 - protein, 7 aa, synthetic construct
HEIQRKP

SEQ ID NO: 166495 - protein, 7 aa, synthetic construct
KQRGDVL

SEQ ID NO: 166496 - protein, 7 aa, synthetic construct
HKGAPYN

SEQ ID NO: 166497 - protein, 7 aa, synthetic construct
LRNPMHN

SEQ ID NO: 166498 - protein, 7 aa, synthetic construct
PYGAHKN

SEQ ID NO: 166499 - protein, 7 aa, synthetic construct
VARNVSH

SEQ ID NO: 166500 - protein, 7 aa, synthetic construct
QKPAYIV

SEQ ID NO: 166501 - protein, 7 aa, synthetic construct
LEGFKNK

SEQ ID NO: 166502 - protein, 7 aa, synthetic construct
IVHSVKQ

SEQ ID NO: 166503 - protein, 7 aa, synthetic construct
LHKALSY

SEQ ID NO: 166504 - protein, 7 aa, synthetic construct
DSKSYKV

SEQ ID NO: 166505 - protein, 7 aa, synthetic construct
GENKFAR

SEQ ID NO: 166506 - protein, 7 aa, synthetic construct
LKFNERP

SEQ ID NO: 166507 - protein, 7 aa, synthetic construct
KESRVTV

SEQ ID NO: 166508 - protein, 7 aa, synthetic construct
KVSREIG

SEQ ID NO: 166509 - protein, 7 aa, synthetic construct
DTSPKKL

SEQ ID NO: 166510 - protein, 7 aa, synthetic construct
YTHGNVR

SEQ ID NO: 166511 - protein, 7 aa, synthetic construct
HAKYLSP

SEQ ID NO: 166512 - protein, 7 aa, synthetic construct
AKFVQPA

SEQ ID NO: 166513 - protein, 7 aa, synthetic construct
GHKYLSG

SEQ ID NO: 166514 - protein, 7 aa, synthetic construct
DMMKYKV

SEQ ID NO: 166515 - protein, 7 aa, synthetic construct
VPRTERF

SEQ ID NO: 166516 - protein, 7 aa, synthetic construct
TERKITY

SEQ ID NO: 166517 - protein, 7 aa, synthetic construct
AQHPRNM

SEQ ID NO: 166518 - protein, 7 aa, synthetic construct
SSYQIKQ

SEQ ID NO: 166519 - protein, 7 aa, synthetic construct
SSSYLKS

SEQ ID NO: 166520 - protein, 7 aa, synthetic construct
FPIMQKA

SEQ ID NO: 166521 - protein, 7 aa, synthetic construct
DKYIGAK

SEQ ID NO: 166522 - protein, 7 aa, synthetic construct
SPREYKT

SEQ ID NO: 166523 - protein, 7 aa, synthetic construct
MSYTIKA

SEQ ID NO: 166524 - protein, 7 aa, synthetic construct
TSRENKS

SEQ ID NO: 166525 - protein, 7 aa, synthetic construct
TSSGHGR

SEQ ID NO: 166526 - protein, 7 aa, synthetic construct
PGTRNQN

SEQ ID NO: 166527 - protein, 7 aa, synthetic construct
HGGPRLS

SEQ ID NO: 166528 - protein, 7 aa, synthetic construct
EKQPIRI

SEQ ID NO: 166529 - protein, 7 aa, synthetic construct
TPHIANR

SEQ ID NO: 166530 - protein, 7 aa, synthetic construct
TVDIARK

SEQ ID NO: 166531 - protein, 7 aa, synthetic construct
ATERLKM

SEQ ID NO: 166532 - protein, 7 aa, synthetic construct
MESKLGR

SEQ ID NO: 166533 - protein, 7 aa, synthetic construct
VRMPITN

SEQ ID NO: 166534 - protein, 7 aa, synthetic construct
MKHSVYI

SEQ ID NO: 166535 - protein, 7 aa, synthetic construct
YKPTLYT

SEQ ID NO: 166536 - protein, 7 aa, synthetic construct
GTSHNKQ

SEQ ID NO: 166537 - protein, 7 aa, synthetic construct
YTATTHR

SEQ ID NO: 166538 - protein, 7 aa, synthetic construct
RTGEIMR

SEQ ID NO: 166539 - protein, 7 aa, synthetic construct
LPRDHYK

SEQ ID NO: 166540 - protein, 7 aa, synthetic construct
IVKRDMM

SEQ ID NO: 166541 - protein, 7 aa, synthetic construct
ISGGARH

SEQ ID NO: 166542 - protein, 7 aa, synthetic construct
YLSDQKR

SEQ ID NO: 166543 - protein, 7 aa, synthetic construct
PSDFKNK

SEQ ID NO: 166544 - protein, 7 aa, synthetic construct
RKLTEYA

SEQ ID NO: 166545 - protein, 7 aa, synthetic construct
FNKVSFS

SEQ ID NO: 166546 - protein, 7 aa, synthetic construct
GHYPVKQ

SEQ ID NO: 166547 - protein, 7 aa, synthetic construct
IEPMARK

SEQ ID NO: 166548 - protein, 7 aa, synthetic construct
FTHKIEK

SEQ ID NO: 166549 - protein, 7 aa, synthetic construct
DISRSAK

SEQ ID NO: 166550 - protein, 7 aa, synthetic construct
RSIQKYE

SEQ ID NO: 166551 - protein, 7 aa, synthetic construct
DRVKYGT

SEQ ID NO: 166552 - protein, 7 aa, synthetic construct
RRTDLPH

SEQ ID NO: 166553 - protein, 7 aa, synthetic construct
ITKFMGG

SEQ ID NO: 166554 - protein, 7 aa, synthetic construct
KHHVREP

SEQ ID NO: 166555 - protein, 7 aa, synthetic construct
GIERQVK

SEQ ID NO: 166556 - protein, 7 aa, synthetic construct
TPKEKFN

SEQ ID NO: 166557 - protein, 7 aa, synthetic construct
DRITVRS

SEQ ID NO: 166558 - protein, 7 aa, synthetic construct
GPDKVYK

SEQ ID NO: 166559 - protein, 7 aa, synthetic construct
KHDRSGV

SEQ ID NO: 166560 - protein, 7 aa, synthetic construct
VMDRHKT

SEQ ID NO: 166561 - protein, 7 aa, synthetic construct
YKGPHTT

SEQ ID NO: 166562 - protein, 7 aa, synthetic construct
TDKHGGR

SEQ ID NO: 166563 - protein, 7 aa, synthetic construct
QYVKQNL

SEQ ID NO: 166564 - protein, 7 aa, synthetic construct
GLTHPRT

SEQ ID NO: 166565 - protein, 7 aa, synthetic construct
YKAPYLA

SEQ ID NO: 166566 - protein, 7 aa, synthetic construct
LHKFEKV

SEQ ID NO: 166567 - protein, 7 aa, synthetic construct
DFPKIRG

SEQ ID NO: 166568 - protein, 7 aa, synthetic construct
SSIRGDK

SEQ ID NO: 166569 - protein, 7 aa, synthetic construct
DKTTPRN

SEQ ID NO: 166570 - protein, 7 aa, synthetic construct
LKFTAAN

SEQ ID NO: 166571 - protein, 7 aa, synthetic construct
EPGKQGK

SEQ ID NO: 166572 - protein, 7 aa, synthetic construct
KAQVRDT

SEQ ID NO: 166573 - protein, 7 aa, synthetic construct
DKMIKMI

SEQ ID NO: 166574 - protein, 7 aa, synthetic construct
TYKSILS

SEQ ID NO: 166575 - protein, 7 aa, synthetic construct
PEAVRKG

SEQ ID NO: 166576 - protein, 7 aa, synthetic construct
IGHGAQK

SEQ ID NO: 166577 - protein, 7 aa, synthetic construct
SDKRVHV

SEQ ID NO: 166578 - protein, 7 aa, synthetic construct
GKMLYGA

SEQ ID NO: 166579 - protein, 7 aa, synthetic construct
KMRVEYP

SEQ ID NO: 166580 - protein, 7 aa, synthetic construct
RFKIGGD

SEQ ID NO: 166581 - protein, 7 aa, synthetic construct
VKAYSGA

SEQ ID NO: 166582 - protein, 7 aa, synthetic construct
YGSHSSK

SEQ ID NO: 166583 - protein, 7 aa, synthetic construct
VPFKSAH

SEQ ID NO: 166584 - protein, 7 aa, synthetic construct
RESLMRN

SEQ ID NO: 166585 - protein, 7 aa, synthetic construct
AKKIVDV

SEQ ID NO: 166586 - protein, 7 aa, synthetic construct
KSAFRNE

SEQ ID NO: 166587 - protein, 7 aa, synthetic construct
ENNKSTK

SEQ ID NO: 166588 - protein, 7 aa, synthetic construct
LASRVHA

SEQ ID NO: 166589 - protein, 7 aa, synthetic construct
QPHMNKQ

SEQ ID NO: 166590 - protein, 7 aa, synthetic construct
LKKDVWP

SEQ ID NO: 166591 - protein, 7 aa, synthetic construct
TYKMSGQ

SEQ ID NO: 166592 - protein, 7 aa, synthetic construct
GKGYMGQ

SEQ ID NO: 166593 - protein, 7 aa, synthetic construct
MDMKPRG

SEQ ID NO: 166594 - protein, 7 aa, synthetic construct
YLINSKS

SEQ ID NO: 166595 - protein, 7 aa, synthetic construct
IYKERDK

SEQ ID NO: 166596 - protein, 7 aa, synthetic construct
QKGTYGQ

SEQ ID NO: 166597 - protein, 7 aa, synthetic construct
VPREYGR

SEQ ID NO: 166598 - protein, 7 aa, synthetic construct
YREDMKK

SEQ ID NO: 166599 - protein, 7 aa, synthetic construct
VTRGVNN

SEQ ID NO: 166600 - protein, 7 aa, synthetic construct
RFNPKDV

SEQ ID NO: 166601 - protein, 7 aa, synthetic construct
IEGSKIR

SEQ ID NO: 166602 - protein, 7 aa, synthetic construct
ATSRPIS

SEQ ID NO: 166603 - protein, 7 aa, synthetic construct
LIKHQFA

SEQ ID NO: 166604 - protein, 7 aa, synthetic construct
GERKIFS

SEQ ID NO: 166605 - protein, 7 aa, synthetic construct
DKGFSMK

SEQ ID NO: 166606 - protein, 7 aa, synthetic construct
GPGHKST

SEQ ID NO: 166607 - protein, 7 aa, synthetic construct
RPFGMKD

SEQ ID NO: 166608 - protein, 7 aa, synthetic construct
ALKFDKS

SEQ ID NO: 166609 - protein, 7 aa, synthetic construct
KTYVTEK

SEQ ID NO: 166610 - protein, 7 aa, synthetic construct
NPDKVRS

SEQ ID NO: 166611 - protein, 7 aa, synthetic construct
QIGHQGR

SEQ ID NO: 166612 - protein, 7 aa, synthetic construct
DGFNKNR

SEQ ID NO: 166613 - protein, 7 aa, synthetic construct
GKSFIGA

SEQ ID NO: 166614 - protein, 7 aa, synthetic construct
TKDNAHR

SEQ ID NO: 166615 - protein, 7 aa, synthetic construct
GSDIRKN

SEQ ID NO: 166616 - protein, 7 aa, synthetic construct
IMKGQYN

SEQ ID NO: 166617 - protein, 7 aa, synthetic construct
VDRGGKY

SEQ ID NO: 166618 - protein, 7 aa, synthetic construct
KVNPYMN

SEQ ID NO: 166619 - protein, 7 aa, synthetic construct
QKDSRYN

SEQ ID NO: 166620 - protein, 7 aa, synthetic construct
FPQSKYQ

SEQ ID NO: 166621 - protein, 7 aa, synthetic construct
RQLKDNL

SEQ ID NO: 166622 - protein, 7 aa, synthetic construct
ALRGEKF

SEQ ID NO: 166623 - protein, 7 aa, synthetic construct
VKSEYSR

SEQ ID NO: 166624 - protein, 7 aa, synthetic construct
QDRGSPR

SEQ ID NO: 166625 - protein, 7 aa, synthetic construct
DKLYNKQ

SEQ ID NO: 166626 - protein, 7 aa, synthetic construct
KTEFQRG

SEQ ID NO: 166627 - protein, 7 aa, synthetic construct
DGKFSPK

SEQ ID NO: 166628 - protein, 7 aa, synthetic construct
MQTAERK

SEQ ID NO: 166629 - protein, 7 aa, synthetic construct
NDSKNRV

SEQ ID NO: 166630 - protein, 7 aa, synthetic construct
FPKPPSY

SEQ ID NO: 166631 - protein, 7 aa, synthetic construct
VADTRAR

SEQ ID NO: 166632 - protein, 7 aa, synthetic construct
MAKVQAY

SEQ ID NO: 166633 - protein, 7 aa, synthetic construct
GTARIHN

SEQ ID NO: 166634 - protein, 7 aa, synthetic construct
LKNALHY

SEQ ID NO: 166635 - protein, 7 aa, synthetic construct
GKFKPDT

SEQ ID NO: 166636 - protein, 7 aa, synthetic construct
GQFQQKN

SEQ ID NO: 166637 - protein, 7 aa, synthetic construct
TGPHRNN

SEQ ID NO: 166638 - protein, 7 aa, synthetic construct
KSMYGKD

SEQ ID NO: 166639 - protein, 7 aa, synthetic construct
KDSVHRQ

SEQ ID NO: 166640 - protein, 7 aa, synthetic construct
VLTRQDK

SEQ ID NO: 166641 - protein, 7 aa, synthetic construct
SLKHYVS

SEQ ID NO: 166642 - protein, 7 aa, synthetic construct
ILRGMIN

SEQ ID NO: 166643 - protein, 7 aa, synthetic construct
QVELRRT

SEQ ID NO: 166644 - protein, 7 aa, synthetic construct
DPAAKRL

SEQ ID NO: 166645 - protein, 7 aa, synthetic construct
YNKVPHS

SEQ ID NO: 166646 - protein, 7 aa, synthetic construct
LYSNLKS

SEQ ID NO: 166647 - protein, 7 aa, synthetic construct
MKGTIYN

SEQ ID NO: 166648 - protein, 7 aa, synthetic construct
ADRARNI

SEQ ID NO: 166649 - protein, 7 aa, synthetic construct
GIERNKV

SEQ ID NO: 166650 - protein, 7 aa, synthetic construct
QMHNVKQ

SEQ ID NO: 166651 - protein, 7 aa, synthetic construct
LKFPTHN

SEQ ID NO: 166652 - protein, 7 aa, synthetic construct
YIKITNS

SEQ ID NO: 166653 - protein, 7 aa, synthetic construct
SERGKSM

SEQ ID NO: 166654 - protein, 7 aa, synthetic construct
QYVKPTQ

SEQ ID NO: 166655 - protein, 7 aa, synthetic construct
MIRNEMR

SEQ ID NO: 166656 - protein, 7 aa, synthetic construct
RPSRVVE

SEQ ID NO: 166657 - protein, 7 aa, synthetic construct
HGGLMKN

SEQ ID NO: 166658 - protein, 7 aa, synthetic construct
QDAKKFH

SEQ ID NO: 166659 - protein, 7 aa, synthetic construct
HSEIKPR

SEQ ID NO: 166660 - protein, 7 aa, synthetic construct
TGKLYTN

SEQ ID NO: 166661 - protein, 7 aa, synthetic construct
LINMNRV

SEQ ID NO: 166662 - protein, 7 aa, synthetic construct
VKFTNPS

SEQ ID NO: 166663 - protein, 7 aa, synthetic construct
AHGKSAL

SEQ ID NO: 166664 - protein, 7 aa, synthetic construct
RISKDVM

SEQ ID NO: 166665 - protein, 7 aa, synthetic construct
DTRLLKV

SEQ ID NO: 166666 - protein, 7 aa, synthetic construct
EVQKQVR

SEQ ID NO: 166667 - protein, 7 aa, synthetic construct
PRLTRGE

SEQ ID NO: 166668 - protein, 7 aa, synthetic construct
KLHYTTP

SEQ ID NO: 166669 - protein, 7 aa, synthetic construct
MIDAAKR

SEQ ID NO: 166670 - protein, 7 aa, synthetic construct
KTAHRDI

SEQ ID NO: 166671 - protein, 7 aa, synthetic construct
LKGPHFQ

SEQ ID NO: 166672 - protein, 7 aa, synthetic construct
LIKGLYG

SEQ ID NO: 166673 - protein, 7 aa, synthetic construct
FDQMKAR

SEQ ID NO: 166674 - protein, 7 aa, synthetic construct
QSAFTKM

SEQ ID NO: 166675 - protein, 7 aa, synthetic construct
YGKHLYG

SEQ ID NO: 166676 - protein, 7 aa, synthetic construct
FAQKHSQ

SEQ ID NO: 166677 - protein, 7 aa, synthetic construct
DKTMNRN

SEQ ID NO: 166678 - protein, 7 aa, synthetic construct
QGRVITF

SEQ ID NO: 166679 - protein, 7 aa, synthetic construct
PHTHPKA

SEQ ID NO: 166680 - protein, 7 aa, synthetic construct
RSRELTV

SEQ ID NO: 166681 - protein, 7 aa, synthetic construct
LKGKDYH

SEQ ID NO: 166682 - protein, 7 aa, synthetic construct
FDRGASR

SEQ ID NO: 166683 - protein, 7 aa, synthetic construct
PLKMRIE

SEQ ID NO: 166684 - protein, 7 aa, synthetic construct
RALHATN

SEQ ID NO: 166685 - protein, 7 aa, synthetic construct
HKPMMGY

SEQ ID NO: 166686 - protein, 7 aa, synthetic construct
FVGMSKQ

SEQ ID NO: 166687 - protein, 7 aa, synthetic construct
PFRTEKQ

SEQ ID NO: 166688 - protein, 7 aa, synthetic construct
IKHHNQN

SEQ ID NO: 166689 - protein, 7 aa, synthetic construct
KRIVMQE

SEQ ID NO: 166690 - protein, 7 aa, synthetic construct
YSKVNNL

SEQ ID NO: 166691 - protein, 7 aa, synthetic construct
GYVKHTA

SEQ ID NO: 166692 - protein, 7 aa, synthetic construct
LTKLHYP

SEQ ID NO: 166693 - protein, 7 aa, synthetic construct
MMRPKEQ

SEQ ID NO: 166694 - protein, 7 aa, synthetic construct
FAGLSKH

SEQ ID NO: 166695 - protein, 7 aa, synthetic construct
KTFTSPA

SEQ ID NO: 166696 - protein, 7 aa, synthetic construct
ADVKNKY

SEQ ID NO: 166697 - protein, 7 aa, synthetic construct
FKYEIKA

SEQ ID NO: 166698 - protein, 7 aa, synthetic construct
MPRIERY

SEQ ID NO: 166699 - protein, 7 aa, synthetic construct
PVKRESY

SEQ ID NO: 166700 - protein, 7 aa, synthetic construct
MTHKFNS

SEQ ID NO: 166701 - protein, 7 aa, synthetic construct
GSKFSGN

SEQ ID NO: 166702 - protein, 7 aa, synthetic construct
ASVVRRD

SEQ ID NO: 166703 - protein, 7 aa, synthetic construct
QEPKGYK

SEQ ID NO: 166704 - protein, 7 aa, synthetic construct
VMTRGSH

SEQ ID NO: 166705 - protein, 7 aa, synthetic construct
KKLYTIE

SEQ ID NO: 166706 - protein, 7 aa, synthetic construct
KDLAHPR

SEQ ID NO: 166707 - protein, 7 aa, synthetic construct
MKFNTTA

SEQ ID NO: 166708 - protein, 7 aa, synthetic construct
YKTVYQA

SEQ ID NO: 166709 - protein, 7 aa, synthetic construct
RTNKDLQ

SEQ ID NO: 166710 - protein, 7 aa, synthetic construct
IKLASSY

SEQ ID NO: 166711 - protein, 7 aa, synthetic construct
RSDRHVT

SEQ ID NO: 166712 - protein, 7 aa, synthetic construct
SMKREYI

SEQ ID NO: 166713 - protein, 7 aa, synthetic construct
KDHKNFL

SEQ ID NO: 166714 - protein, 7 aa, synthetic construct
YEKTGSR

SEQ ID NO: 166715 - protein, 7 aa, synthetic construct
RDGGVKH

SEQ ID NO: 166716 - protein, 7 aa, synthetic construct
MGELNKR

SEQ ID NO: 166717 - protein, 7 aa, synthetic construct
YKAQLYQ

SEQ ID NO: 166718 - protein, 7 aa, synthetic construct
IDSQKSR

SEQ ID NO: 166719 - protein, 7 aa, synthetic construct
DIVAKMK

SEQ ID NO: 166720 - protein, 7 aa, synthetic construct
HEKFKFA

SEQ ID NO: 166721 - protein, 7 aa, synthetic construct
FPAKHYN

SEQ ID NO: 166722 - protein, 7 aa, synthetic construct
TKIYQTN

SEQ ID NO: 166723 - protein, 7 aa, synthetic construct
IEAQKNK

SEQ ID NO: 166724 - protein, 7 aa, synthetic construct
IRDAAHK

SEQ ID NO: 166725 - protein, 7 aa, synthetic construct
LGGLKHH

SEQ ID NO: 166726 - protein, 7 aa, synthetic construct
AYANITK

SEQ ID NO: 166727 - protein, 7 aa, synthetic construct
NMRSMDK

SEQ ID NO: 166728 - protein, 7 aa, synthetic construct
MRLTSEK

SEQ ID NO: 166729 - protein, 7 aa, synthetic construct
LKFNVTQ

SEQ ID NO: 166730 - protein, 7 aa, synthetic construct
KINYSTP

SEQ ID NO: 166731 - protein, 7 aa, synthetic construct
QKFENNR

SEQ ID NO: 166732 - protein, 7 aa, synthetic construct
IMGNRHI

SEQ ID NO: 166733 - protein, 7 aa, synthetic construct
QHIKASL

SEQ ID NO: 166734 - protein, 7 aa, synthetic construct
EVRKMTI

SEQ ID NO: 166735 - protein, 7 aa, synthetic construct
TIPHPRM

SEQ ID NO: 166736 - protein, 7 aa, synthetic construct
DKYIKSY

SEQ ID NO: 166737 - protein, 7 aa, synthetic construct
TKFTAPS

SEQ ID NO: 166738 - protein, 7 aa, synthetic construct
HIKNDMR

SEQ ID NO: 166739 - protein, 7 aa, synthetic construct
GGTPRHV

SEQ ID NO: 166740 - protein, 7 aa, synthetic construct
NFHKELK

SEQ ID NO: 166741 - protein, 7 aa, synthetic construct
HFSKVAN

SEQ ID NO: 166742 - protein, 7 aa, synthetic construct
TQMKPHS

SEQ ID NO: 166743 - protein, 7 aa, synthetic construct
EMINKMK

SEQ ID NO: 166744 - protein, 7 aa, synthetic construct
RVLHATP

SEQ ID NO: 166745 - protein, 7 aa, synthetic construct
IDRAMPK

SEQ ID NO: 166746 - protein, 7 aa, synthetic construct
MKFASNN

SEQ ID NO: 166747 - protein, 7 aa, synthetic construct
NKFRELN

SEQ ID NO: 166748 - protein, 7 aa, synthetic construct
KHFTTNP

SEQ ID NO: 166749 - protein, 7 aa, synthetic construct
YKFTTVN

SEQ ID NO: 166750 - protein, 7 aa, synthetic construct
VFPRQEK

SEQ ID NO: 166751 - protein, 7 aa, synthetic construct
KIMKYND

SEQ ID NO: 166752 - protein, 7 aa, synthetic construct
DPATGRK

SEQ ID NO: 166753 - protein, 7 aa, synthetic construct
PLRAIKD

SEQ ID NO: 166754 - protein, 7 aa, synthetic construct
GRGPRET

SEQ ID NO: 166755 - protein, 7 aa, synthetic construct
LKVRDIT

SEQ ID NO: 166756 - protein, 7 aa, synthetic construct
YPTHQKL

SEQ ID NO: 166757 - protein, 7 aa, synthetic construct
WQKGSII

SEQ ID NO: 166758 - protein, 7 aa, synthetic construct
ATKMSYN

SEQ ID NO: 166759 - protein, 7 aa, synthetic construct
KTRQEPN

SEQ ID NO: 166760 - protein, 7 aa, synthetic construct
HKDIRNN

SEQ ID NO: 166761 - protein, 7 aa, synthetic construct
KREFPRD

SEQ ID NO: 166762 - protein, 7 aa, synthetic construct
IMPKIYN

SEQ ID NO: 166763 - protein, 7 aa, synthetic construct
NFTGPRA

SEQ ID NO: 166764 - protein, 7 aa, synthetic construct
QDGKRTL

SEQ ID NO: 166765 - protein, 7 aa, synthetic construct
STKVRDH

SEQ ID NO: 166766 - protein, 7 aa, synthetic construct
EFQKNIK

SEQ ID NO: 166767 - protein, 7 aa, synthetic construct
DKSIKFH

SEQ ID NO: 166768 - protein, 7 aa, synthetic construct
HIEKRLQ

SEQ ID NO: 166769 - protein, 7 aa, synthetic construct
RMNIPDK

SEQ ID NO: 166770 - protein, 7 aa, synthetic construct
DMKTPHR

SEQ ID NO: 166771 - protein, 7 aa, synthetic construct
MSGYKTI

SEQ ID NO: 166772 - protein, 7 aa, synthetic construct
KMAPYVN

SEQ ID NO: 166773 - protein, 7 aa, synthetic construct
GLHRNSV

SEQ ID NO: 166774 - protein, 7 aa, synthetic construct
RMKPDGQ

SEQ ID NO: 166775 - protein, 7 aa, synthetic construct
IPKSYHN

SEQ ID NO: 166776 - protein, 7 aa, synthetic construct
ILQKHTY

SEQ ID NO: 166777 - protein, 7 aa, synthetic construct
LPLHVRQ

SEQ ID NO: 166778 - protein, 7 aa, synthetic construct
IPAGFRN

SEQ ID NO: 166779 - protein, 7 aa, synthetic construct
KPDKPWV

SEQ ID NO: 166780 - protein, 7 aa, synthetic construct
EKIFKSA

SEQ ID NO: 166781 - protein, 7 aa, synthetic construct
EQKLLKH

SEQ ID NO: 166782 - protein, 7 aa, synthetic construct
WKDSHSK

SEQ ID NO: 166783 - protein, 7 aa, synthetic construct
LHKQLMQ

SEQ ID NO: 166784 - protein, 7 aa, synthetic construct
THKDLLR

SEQ ID NO: 166785 - protein, 7 aa, synthetic construct
SVKYTPN

SEQ ID NO: 166786 - protein, 7 aa, synthetic construct
KKAFHDP

SEQ ID NO: 166787 - protein, 7 aa, synthetic construct
NPEPRKL

SEQ ID NO: 166788 - protein, 7 aa, synthetic construct
SDMKFAK

SEQ ID NO: 166789 - protein, 7 aa, synthetic construct
LSKFATN

SEQ ID NO: 166790 - protein, 7 aa, synthetic construct
TIPEMRK

SEQ ID NO: 166791 - protein, 7 aa, synthetic construct
EKFPMRA

SEQ ID NO: 166792 - protein, 7 aa, synthetic construct
LRAMVTA

SEQ ID NO: 166793 - protein, 7 aa, synthetic construct
VKAFQPQ

SEQ ID NO: 166794 - protein, 7 aa, synthetic construct
PPRTQRD

SEQ ID NO: 166795 - protein, 7 aa, synthetic construct
GVTRHTV

SEQ ID NO: 166796 - protein, 7 aa, synthetic construct
PRQRGDT

SEQ ID NO: 166797 - protein, 7 aa, synthetic construct
LTKNLYQ

SEQ ID NO: 166798 - protein, 7 aa, synthetic construct
YPMMLKA

SEQ ID NO: 166799 - protein, 7 aa, synthetic construct
PTMTRHG

SEQ ID NO: 166800 - protein, 7 aa, synthetic construct
YAGNLYK

SEQ ID NO: 166801 - protein, 7 aa, synthetic construct
HKPFTGT

SEQ ID NO: 166802 - protein, 7 aa, synthetic construct
SHKIPNM

SEQ ID NO: 166803 - protein, 7 aa, synthetic construct
EMSKMGR

SEQ ID NO: 166804 - protein, 7 aa, synthetic construct
TKMAYLA

SEQ ID NO: 166805 - protein, 7 aa, synthetic construct
VISQKYQ

SEQ ID NO: 166806 - protein, 7 aa, synthetic construct
QIFKGDK

SEQ ID NO: 166807 - protein, 7 aa, synthetic construct
DLKQVRS

SEQ ID NO: 166808 - protein, 7 aa, synthetic construct
AFKGAFN

SEQ ID NO: 166809 - protein, 7 aa, synthetic construct
IGFAVKG

SEQ ID NO: 166810 - protein, 7 aa, synthetic construct
MKLIHNA

SEQ ID NO: 166811 - protein, 7 aa, synthetic construct
QTATDRK

SEQ ID NO: 166812 - protein, 7 aa, synthetic construct
PHEKRFP

SEQ ID NO: 166813 - protein, 7 aa, synthetic construct
ASVYLKP

SEQ ID NO: 166814 - protein, 7 aa, synthetic construct
KIKYDAA

SEQ ID NO: 166815 - protein, 7 aa, synthetic construct
LDRSMKH

SEQ ID NO: 166816 - protein, 7 aa, synthetic construct
YINAKHM

SEQ ID NO: 166817 - protein, 7 aa, synthetic construct
LAKSYER

SEQ ID NO: 166818 - protein, 7 aa, synthetic construct
KYNLKEI

SEQ ID NO: 166819 - protein, 7 aa, synthetic construct
SKPMYAN

SEQ ID NO: 166820 - protein, 7 aa, synthetic construct
FQGHLKM

SEQ ID NO: 166821 - protein, 7 aa, synthetic construct
DSIQKMR

SEQ ID NO: 166822 - protein, 7 aa, synthetic construct
DRPMIRT

SEQ ID NO: 166823 - protein, 7 aa, synthetic construct
TKPNTWA

SEQ ID NO: 166824 - protein, 7 aa, synthetic construct
GQPHQAK

SEQ ID NO: 166825 - protein, 7 aa, synthetic construct
TDTKRFS

SEQ ID NO: 166826 - protein, 7 aa, synthetic construct
TLHRGMV

SEQ ID NO: 166827 - protein, 7 aa, synthetic construct
HSIKKDL

SEQ ID NO: 166828 - protein, 7 aa, synthetic construct
FDKYMKI

SEQ ID NO: 166829 - protein, 7 aa, synthetic construct
QIKNAYN

SEQ ID NO: 166830 - protein, 7 aa, synthetic construct
GSSKFER

SEQ ID NO: 166831 - protein, 7 aa, synthetic construct
FPHTQGK

SEQ ID NO: 166832 - protein, 7 aa, synthetic construct
PAKVKDW

SEQ ID NO: 166833 - protein, 7 aa, synthetic construct
FIKLNSS

SEQ ID NO: 166834 - protein, 7 aa, synthetic construct
GKPYLGQ

SEQ ID NO: 166835 - protein, 7 aa, synthetic construct
SFEPKRA

SEQ ID NO: 166836 - protein, 7 aa, synthetic construct
DKMKYNL

SEQ ID NO: 166837 - protein, 7 aa, synthetic construct
YDRALGK

SEQ ID NO: 166838 - protein, 7 aa, synthetic construct
NIDRKSL

SEQ ID NO: 166839 - protein, 7 aa, synthetic construct
QVMKPYP

SEQ ID NO: 166840 - protein, 7 aa, synthetic construct
LKFSAGQ

SEQ ID NO: 166841 - protein, 7 aa, synthetic construct
ALRTKQD

SEQ ID NO: 166842 - protein, 7 aa, synthetic construct
SMKPIFG

SEQ ID NO: 166843 - protein, 7 aa, synthetic construct
TDRIKER

SEQ ID NO: 166844 - protein, 7 aa, synthetic construct
SVERNKQ

SEQ ID NO: 166845 - protein, 7 aa, synthetic construct
VSKQYSN

SEQ ID NO: 166846 - protein, 7 aa, synthetic construct
MLKHNNF

SEQ ID NO: 166847 - protein, 7 aa, synthetic construct
ILRHQNM

SEQ ID NO: 166848 - protein, 7 aa, synthetic construct
LLDMAKK

SEQ ID NO: 166849 - protein, 7 aa, synthetic construct
IHGGHVK

SEQ ID NO: 166850 - protein, 7 aa, synthetic construct
VKAFERS

SEQ ID NO: 166851 - protein, 7 aa, synthetic construct
HPEVKKS

SEQ ID NO: 166852 - protein, 7 aa, synthetic construct
FVSHKTV

SEQ ID NO: 166853 - protein, 7 aa, synthetic construct
EQGKLQK

SEQ ID NO: 166854 - protein, 7 aa, synthetic construct
IIANPMR

SEQ ID NO: 166855 - protein, 7 aa, synthetic construct
QIRTDKY

SEQ ID NO: 166856 - protein, 7 aa, synthetic construct
IDRHGTK

SEQ ID NO: 166857 - protein, 7 aa, synthetic construct
VPRAINM

SEQ ID NO: 166858 - protein, 7 aa, synthetic construct
MTTRAVM

SEQ ID NO: 166859 - protein, 7 aa, synthetic construct
VMDRSAR

SEQ ID NO: 166860 - protein, 7 aa, synthetic construct
HTKSVYN

SEQ ID NO: 166861 - protein, 7 aa, synthetic construct
APYSIKS

SEQ ID NO: 166862 - protein, 7 aa, synthetic construct
LESIKQR

SEQ ID NO: 166863 - protein, 7 aa, synthetic construct
KRTVATD

SEQ ID NO: 166864 - protein, 7 aa, synthetic construct
KVNLRDL

SEQ ID NO: 166865 - protein, 7 aa, synthetic construct
ENKMNLR

SEQ ID NO: 166866 - protein, 7 aa, synthetic construct
TTHLKDR

SEQ ID NO: 166867 - protein, 7 aa, synthetic construct
MQKHIYP

SEQ ID NO: 166868 - protein, 7 aa, synthetic construct
QLKMHIN

SEQ ID NO: 166869 - protein, 7 aa, synthetic construct
FTPRASL

SEQ ID NO: 166870 - protein, 7 aa, synthetic construct
GHGPMKM

SEQ ID NO: 166871 - protein, 7 aa, synthetic construct
ATKYNTN

SEQ ID NO: 166872 - protein, 7 aa, synthetic construct
LIPRDKT

SEQ ID NO: 166873 - protein, 7 aa, synthetic construct
IPHKFVQ

SEQ ID NO: 166874 - protein, 7 aa, synthetic construct
RTSAHSI

SEQ ID NO: 166875 - protein, 7 aa, synthetic construct
IKIKVYE

SEQ ID NO: 166876 - protein, 7 aa, synthetic construct
RELVRAN

SEQ ID NO: 166877 - protein, 7 aa, synthetic construct
DAKANMR

SEQ ID NO: 166878 - protein, 7 aa, synthetic construct
PEVKIIK

SEQ ID NO: 166879 - protein, 7 aa, synthetic construct
VANKPHS

SEQ ID NO: 166880 - protein, 7 aa, synthetic construct
STDIRKY

SEQ ID NO: 166881 - protein, 7 aa, synthetic construct
LIQRNLH

SEQ ID NO: 166882 - protein, 7 aa, synthetic construct
ERPIKTI

SEQ ID NO: 166883 - protein, 7 aa, synthetic construct
SGHSIPR

SEQ ID NO: 166884 - protein, 7 aa, synthetic construct
YSGLKYM

SEQ ID NO: 166885 - protein, 7 aa, synthetic construct
VQQMEKK

SEQ ID NO: 166886 - protein, 7 aa, synthetic construct
MIHNMKN

SEQ ID NO: 166887 - protein, 7 aa, synthetic construct
VTKQIYQ

SEQ ID NO: 166888 - protein, 7 aa, synthetic construct
KNFKDPM

SEQ ID NO: 166889 - protein, 7 aa, synthetic construct
KYAKINE

SEQ ID NO: 166890 - protein, 7 aa, synthetic construct
HKTIREM

SEQ ID NO: 166891 - protein, 7 aa, synthetic construct
DLKNQRH

SEQ ID NO: 166892 - protein, 7 aa, synthetic construct
ILKHVQM

SEQ ID NO: 166893 - protein, 7 aa, synthetic construct
LLRNPII

SEQ ID NO: 166894 - protein, 7 aa, synthetic construct
GDRRSPM

SEQ ID NO: 166895 - protein, 7 aa, synthetic construct
MKAHMAY

SEQ ID NO: 166896 - protein, 7 aa, synthetic construct
QAKNYTQ

SEQ ID NO: 166897 - protein, 7 aa, synthetic construct
KANPYMV

SEQ ID NO: 166898 - protein, 7 aa, synthetic construct
GPHPNRS

SEQ ID NO: 166899 - protein, 7 aa, synthetic construct
GKAYLPN

SEQ ID NO: 166900 - protein, 7 aa, synthetic construct
DVPFKAK

SEQ ID NO: 166901 - protein, 7 aa, synthetic construct
AMDKRFN

SEQ ID NO: 166902 - protein, 7 aa, synthetic construct
GDKRTFN

SEQ ID NO: 166903 - protein, 7 aa, synthetic construct
TSKWTAI

SEQ ID NO: 166904 - protein, 7 aa, synthetic construct
GGHTTPR

SEQ ID NO: 166905 - protein, 7 aa, synthetic construct
VDKQIPR

SEQ ID NO: 166906 - protein, 7 aa, synthetic construct
GDAKRQI

SEQ ID NO: 166907 - protein, 7 aa, synthetic construct
RHGSITS

SEQ ID NO: 166908 - protein, 7 aa, synthetic construct
TKHAFSA

SEQ ID NO: 166909 - protein, 7 aa, synthetic construct
TSRTHNI

SEQ ID NO: 166910 - protein, 7 aa, synthetic construct
TTERTRL

SEQ ID NO: 166911 - protein, 7 aa, synthetic construct
QKGSERH

SEQ ID NO: 166912 - protein, 7 aa, synthetic construct
ATKYQPT

SEQ ID NO: 166913 - protein, 7 aa, synthetic construct
EAVKRTV

SEQ ID NO: 166914 - protein, 7 aa, synthetic construct
VTRPAHV

SEQ ID NO: 166915 - protein, 7 aa, synthetic construct
IKQMFGS

SEQ ID NO: 166916 - protein, 7 aa, synthetic construct
IYKVDRG

SEQ ID NO: 166917 - protein, 7 aa, synthetic construct
SKQYILS

SEQ ID NO: 166918 - protein, 7 aa, synthetic construct
KNPYNPV

SEQ ID NO: 166919 - protein, 7 aa, synthetic construct
GDNKRIT

SEQ ID NO: 166920 - protein, 7 aa, synthetic construct
DLPTRAR

SEQ ID NO: 166921 - protein, 7 aa, synthetic construct
KADHNRM

SEQ ID NO: 166922 - protein, 7 aa, synthetic construct
TEKHMLR

SEQ ID NO: 166923 - protein, 7 aa, synthetic construct
MTKYLPN

SEQ ID NO: 166924 - protein, 7 aa, synthetic construct
KVSYTSS

SEQ ID NO: 166925 - protein, 7 aa, synthetic construct
GVGIRHV

SEQ ID NO: 166926 - protein, 7 aa, synthetic construct
ARTHPPI

SEQ ID NO: 166927 - protein, 7 aa, synthetic construct
TRILAKD

SEQ ID NO: 166928 - protein, 7 aa, synthetic construct
KINYAVA

SEQ ID NO: 166929 - protein, 7 aa, synthetic construct
KPDYKSN

SEQ ID NO: 166930 - protein, 7 aa, synthetic construct
IHKFNPP

SEQ ID NO: 166931 - protein, 7 aa, synthetic construct
IKPPKWD

SEQ ID NO: 166932 - protein, 7 aa, synthetic construct
QKALSFS

SEQ ID NO: 166933 - protein, 7 aa, synthetic construct
LKLHTGY

SEQ ID NO: 166934 - protein, 7 aa, synthetic construct
DNPRGAK

SEQ ID NO: 166935 - protein, 7 aa, synthetic construct
KYKIMSE

SEQ ID NO: 166936 - protein, 7 aa, synthetic construct
KTRGDAL

SEQ ID NO: 166937 - protein, 7 aa, synthetic construct
FSKMYDK

SEQ ID NO: 166938 - protein, 7 aa, synthetic construct
VKRDQMY

SEQ ID NO: 166939 - protein, 7 aa, synthetic construct
FLKLGRD

SEQ ID NO: 166940 - protein, 7 aa, synthetic construct
NKYMSPQ

SEQ ID NO: 166941 - protein, 7 aa, synthetic construct
FKMPAHL

SEQ ID NO: 166942 - protein, 7 aa, synthetic construct
AYGPKHN

SEQ ID NO: 166943 - protein, 7 aa, synthetic construct
FKDDQRR

SEQ ID NO: 166944 - protein, 7 aa, synthetic construct
FTKHPHS

SEQ ID NO: 166945 - protein, 7 aa, synthetic construct
GQPHKFL

SEQ ID NO: 166946 - protein, 7 aa, synthetic construct
YEKVSLR

SEQ ID NO: 166947 - protein, 7 aa, synthetic construct
EAKVTIR

SEQ ID NO: 166948 - protein, 7 aa, synthetic construct
YPAIHKM

SEQ ID NO: 166949 - protein, 7 aa, synthetic construct
DGPAKLR

SEQ ID NO: 166950 - protein, 7 aa, synthetic construct
NKADHLR

SEQ ID NO: 166951 - protein, 7 aa, synthetic construct
PLPYSKG

SEQ ID NO: 166952 - protein, 7 aa, synthetic construct
VEKVKWS

SEQ ID NO: 166953 - protein, 7 aa, synthetic construct
HLGRMSV

SEQ ID NO: 166954 - protein, 7 aa, synthetic construct
NIPRHVN

SEQ ID NO: 166955 - protein, 7 aa, synthetic construct
LSYTTKQ

SEQ ID NO: 166956 - protein, 7 aa, synthetic construct
VRDQVNR

SEQ ID NO: 166957 - protein, 7 aa, synthetic construct
LMVNANR

SEQ ID NO: 166958 - protein, 7 aa, synthetic construct
MMPSDKR

SEQ ID NO: 166959 - protein, 7 aa, synthetic construct
KKTGPDV

SEQ ID NO: 166960 - protein, 7 aa, synthetic construct
LPDRPKS

SEQ ID NO: 166961 - protein, 7 aa, synthetic construct
SKFERDK

SEQ ID NO: 166962 - protein, 7 aa, synthetic construct
TSSRLNM

SEQ ID NO: 166963 - protein, 7 aa, synthetic construct
MFKKDLF

SEQ ID NO: 166964 - protein, 7 aa, synthetic construct
VLKPRDY

SEQ ID NO: 166965 - protein, 7 aa, synthetic construct
KRIPEIV

SEQ ID NO: 166966 - protein, 7 aa, synthetic construct
RHPINDK

SEQ ID NO: 166967 - protein, 7 aa, synthetic construct
HFKLSAN

SEQ ID NO: 166968 - protein, 7 aa, synthetic construct
KITRDLG

SEQ ID NO: 166969 - protein, 7 aa, synthetic construct
GPTQHGR

SEQ ID NO: 166970 - protein, 7 aa, synthetic construct
AKPYNQQ

SEQ ID NO: 166971 - protein, 7 aa, synthetic construct
KSRDQSN

SEQ ID NO: 166972 - protein, 7 aa, synthetic construct
YHKINSI

SEQ ID NO: 166973 - protein, 7 aa, synthetic construct
MLGTFKS

SEQ ID NO: 166974 - protein, 7 aa, synthetic construct
MKFGPNA

SEQ ID NO: 166975 - protein, 7 aa, synthetic construct
AKLYNPA

SEQ ID NO: 166976 - protein, 7 aa, synthetic construct
PDTRMKG

SEQ ID NO: 166977 - protein, 7 aa, synthetic construct
HREITRA

SEQ ID NO: 166978 - protein, 7 aa, synthetic construct
LTRNDKL

SEQ ID NO: 166979 - protein, 7 aa, synthetic construct
HKPFPQQ

SEQ ID NO: 166980 - protein, 7 aa, synthetic construct
GQGIHKL

SEQ ID NO: 166981 - protein, 7 aa, synthetic construct
SNIKYVH

SEQ ID NO: 166982 - protein, 7 aa, synthetic construct
LTQPRHV

SEQ ID NO: 166983 - protein, 7 aa, synthetic construct
AYPKHNV

SEQ ID NO: 166984 - protein, 7 aa, synthetic construct
ESMKRIV

SEQ ID NO: 166985 - protein, 7 aa, synthetic construct
RTHPNYA

SEQ ID NO: 166986 - protein, 7 aa, synthetic construct
DRALKML

SEQ ID NO: 166987 - protein, 7 aa, synthetic construct
QSHPRGQ

SEQ ID NO: 166988 - protein, 7 aa, synthetic construct
PGIVRKD

SEQ ID NO: 166989 - protein, 7 aa, synthetic construct
DVGAKIK

SEQ ID NO: 166990 - protein, 7 aa, synthetic construct
ADTKRSF

SEQ ID NO: 166991 - protein, 7 aa, synthetic construct
HKPVIYN

SEQ ID NO: 166992 - protein, 7 aa, synthetic construct
AMRIKAE

SEQ ID NO: 166993 - protein, 7 aa, synthetic construct
EQIKRAT

SEQ ID NO: 166994 - protein, 7 aa, synthetic construct
MDKQTQR

SEQ ID NO: 166995 - protein, 7 aa, synthetic construct
IFKTHSV

SEQ ID NO: 166996 - protein, 7 aa, synthetic construct
RDHKISY

SEQ ID NO: 166997 - protein, 7 aa, synthetic construct
YVKQLDK

SEQ ID NO: 166998 - protein, 7 aa, synthetic construct
KAQFDGR

SEQ ID NO: 166999 - protein, 7 aa, synthetic construct
PQKFVGG

SEQ ID NO: 167000 - protein, 7 aa, synthetic construct
GKGFNSQ

SEQ ID NO: 167001 - protein, 7 aa, synthetic construct
KITPYTN

SEQ ID NO: 167002 - protein, 7 aa, synthetic construct
NRNVENK

SEQ ID NO: 167003 - protein, 7 aa, synthetic construct
VADRGKW

SEQ ID NO: 167004 - protein, 7 aa, synthetic construct
KTHDRAQ

SEQ ID NO: 167005 - protein, 7 aa, synthetic construct
GFGAGPR

SEQ ID NO: 167006 - protein, 7 aa, synthetic construct
GLERMQK

SEQ ID NO: 167007 - protein, 7 aa, synthetic construct
ATIEGKR

SEQ ID NO: 167008 - protein, 7 aa, synthetic construct
FKHNSII

SEQ ID NO: 167009 - protein, 7 aa, synthetic construct
QGAGKYT

SEQ ID NO: 167010 - protein, 7 aa, synthetic construct
QDKHLKF

SEQ ID NO: 167011 - protein, 7 aa, synthetic construct
IYSTVKS

SEQ ID NO: 167012 - protein, 7 aa, synthetic construct
MRVTVEK

SEQ ID NO: 167013 - protein, 7 aa, synthetic construct
TDRGIRL

SEQ ID NO: 167014 - protein, 7 aa, synthetic construct
YPDKGPR

SEQ ID NO: 167015 - protein, 7 aa, synthetic construct
YLSTHKM

SEQ ID NO: 167016 - protein, 7 aa, synthetic construct
TMKGMYN

SEQ ID NO: 167017 - protein, 7 aa, synthetic construct
DLRGKFT

SEQ ID NO: 167018 - protein, 7 aa, synthetic construct
IKFNVAP

SEQ ID NO: 167019 - protein, 7 aa, synthetic construct
KLGMDRN

SEQ ID NO: 167020 - protein, 7 aa, synthetic construct
TQPYSSK

SEQ ID NO: 167021 - protein, 7 aa, synthetic construct
IRHENKI

SEQ ID NO: 167022 - protein, 7 aa, synthetic construct
LGKVHYI

SEQ ID NO: 167023 - protein, 7 aa, synthetic construct
DRQKVLH

SEQ ID NO: 167024 - protein, 7 aa, synthetic construct
MDSKFSR

SEQ ID NO: 167025 - protein, 7 aa, synthetic construct
TKFSLSQ

SEQ ID NO: 167026 - protein, 7 aa, synthetic construct
KSYVNTN

SEQ ID NO: 167027 - protein, 7 aa, synthetic construct
SPHPKYM

SEQ ID NO: 167028 - protein, 7 aa, synthetic construct
MLGHNKF

SEQ ID NO: 167029 - protein, 7 aa, synthetic construct
HLGMIKQ

SEQ ID NO: 167030 - protein, 7 aa, synthetic construct
VPRMMGQ

SEQ ID NO: 167031 - protein, 7 aa, synthetic construct
RKLEPPP

SEQ ID NO: 167032 - protein, 7 aa, synthetic construct
SIEKRGH

SEQ ID NO: 167033 - protein, 7 aa, synthetic construct
ALTRSDK

SEQ ID NO: 167034 - protein, 7 aa, synthetic construct
NSKNDYK

SEQ ID NO: 167035 - protein, 7 aa, synthetic construct
HFMKLKE

SEQ ID NO: 167036 - protein, 7 aa, synthetic construct
YSASDKK

SEQ ID NO: 167037 - protein, 7 aa, synthetic construct
DGRGVPR

SEQ ID NO: 167038 - protein, 7 aa, synthetic construct
KFVDSAR

SEQ ID NO: 167039 - protein, 7 aa, synthetic construct
IHAGHGK

SEQ ID NO: 167040 - protein, 7 aa, synthetic construct
IDRAFKT

SEQ ID NO: 167041 - protein, 7 aa, synthetic construct
NEPMKHK

SEQ ID NO: 167042 - protein, 7 aa, synthetic construct
THHSNKA

SEQ ID NO: 167043 - protein, 7 aa, synthetic construct
SDGRFKP

SEQ ID NO: 167044 - protein, 7 aa, synthetic construct
KTTFKMD

SEQ ID NO: 167045 - protein, 7 aa, synthetic construct
FKMMNNV

SEQ ID NO: 167046 - protein, 7 aa, synthetic construct
TGRENKL

SEQ ID NO: 167047 - protein, 7 aa, synthetic construct
IRLSHLN

SEQ ID NO: 167048 - protein, 7 aa, synthetic construct
QAGHYKI

SEQ ID NO: 167049 - protein, 7 aa, synthetic construct
GVPRMTY

SEQ ID NO: 167050 - protein, 7 aa, synthetic construct
KGIQDGR

SEQ ID NO: 167051 - protein, 7 aa, synthetic construct
IFSATKA

SEQ ID NO: 167052 - protein, 7 aa, synthetic construct
SFMKHTA

SEQ ID NO: 167053 - protein, 7 aa, synthetic construct
IIKDYNR

SEQ ID NO: 167054 - protein, 7 aa, synthetic construct
VPRHIGQ

SEQ ID NO: 167055 - protein, 7 aa, synthetic construct
LKVYTSP

SEQ ID NO: 167056 - protein, 7 aa, synthetic construct
FKHMPPA

SEQ ID NO: 167057 - protein, 7 aa, synthetic construct
KSSADYR

SEQ ID NO: 167058 - protein, 7 aa, synthetic construct
DRMVKST

SEQ ID NO: 167059 - protein, 7 aa, synthetic construct
FVGKDYK

SEQ ID NO: 167060 - protein, 7 aa, synthetic construct
HAREIKN

SEQ ID NO: 167061 - protein, 7 aa, synthetic construct
FDKPKSV

SEQ ID NO: 167062 - protein, 7 aa, synthetic construct
IDRHMNK

SEQ ID NO: 167063 - protein, 7 aa, synthetic construct
KVFNPEK

SEQ ID NO: 167064 - protein, 7 aa, synthetic construct
LKGPHYQ

SEQ ID NO: 167065 - protein, 7 aa, synthetic construct
QGPMTHK

SEQ ID NO: 167066 - protein, 7 aa, synthetic construct
KSKGPDI

SEQ ID NO: 167067 - protein, 7 aa, synthetic construct
TTHMNKQ

SEQ ID NO: 167068 - protein, 7 aa, synthetic construct
TSSIKFQ

SEQ ID NO: 167069 - protein, 7 aa, synthetic construct
VARPSPN

SEQ ID NO: 167070 - protein, 7 aa, synthetic construct
KTFNPDK

SEQ ID NO: 167071 - protein, 7 aa, synthetic construct
FDRIKNI

SEQ ID NO: 167072 - protein, 7 aa, synthetic construct
KSSRGDI

SEQ ID NO: 167073 - protein, 7 aa, synthetic construct
IKGAGWG

SEQ ID NO: 167074 - protein, 7 aa, synthetic construct
DPGAVKK

SEQ ID NO: 167075 - protein, 7 aa, synthetic construct
RNTIFNG

SEQ ID NO: 167076 - protein, 7 aa, synthetic construct
VMPGHPR

SEQ ID NO: 167077 - protein, 7 aa, synthetic construct
FKVLSSA

SEQ ID NO: 167078 - protein, 7 aa, synthetic construct
FTKPLHM

SEQ ID NO: 167079 - protein, 7 aa, synthetic construct
ATDPVRR

SEQ ID NO: 167080 - protein, 7 aa, synthetic construct
TTYTKSH

SEQ ID NO: 167081 - protein, 7 aa, synthetic construct
VVTKHTY

SEQ ID NO: 167082 - protein, 7 aa, synthetic construct
RMILKSE

SEQ ID NO: 167083 - protein, 7 aa, synthetic construct
LKHNIYP

SEQ ID NO: 167084 - protein, 7 aa, synthetic construct
GVGKYSQ

SEQ ID NO: 167085 - protein, 7 aa, synthetic construct
PDTKVKY

SEQ ID NO: 167086 - protein, 7 aa, synthetic construct
RGDHLLK

SEQ ID NO: 167087 - protein, 7 aa, synthetic construct
AKPHVLY

SEQ ID NO: 167088 - protein, 7 aa, synthetic construct
VTSKVYQ

SEQ ID NO: 167089 - protein, 7 aa, synthetic construct
TSKSLYN

SEQ ID NO: 167090 - protein, 7 aa, synthetic construct
TIETKNR

SEQ ID NO: 167091 - protein, 7 aa, synthetic construct
GADQRKV

SEQ ID NO: 167092 - protein, 7 aa, synthetic construct
HSGNITR

SEQ ID NO: 167093 - protein, 7 aa, synthetic construct
KVAYESK

SEQ ID NO: 167094 - protein, 7 aa, synthetic construct
IMTAEKK

SEQ ID NO: 167095 - protein, 7 aa, synthetic construct
VTNRQDK

SEQ ID NO: 167096 - protein, 7 aa, synthetic construct
IDARVHK

SEQ ID NO: 167097 - protein, 7 aa, synthetic construct
GDIKIAR

SEQ ID NO: 167098 - protein, 7 aa, synthetic construct
SVDRVRS

SEQ ID NO: 167099 - protein, 7 aa, synthetic construct
VKFVTRE

SEQ ID NO: 167100 - protein, 7 aa, synthetic construct
RITKDTQ

SEQ ID NO: 167101 - protein, 7 aa, synthetic construct
TAAYKGQ

SEQ ID NO: 167102 - protein, 7 aa, synthetic construct
HPRADRA

SEQ ID NO: 167103 - protein, 7 aa, synthetic construct
QMDKARQ

SEQ ID NO: 167104 - protein, 7 aa, synthetic construct
LNRLLGN

SEQ ID NO: 167105 - protein, 7 aa, synthetic construct
TDRKLPH

SEQ ID NO: 167106 - protein, 7 aa, synthetic construct
QEAKRMM

SEQ ID NO: 167107 - protein, 7 aa, synthetic construct
VPIKRDH

SEQ ID NO: 167108 - protein, 7 aa, synthetic construct
DVKQVRY

SEQ ID NO: 167109 - protein, 7 aa, synthetic construct
QAKQWPN

SEQ ID NO: 167110 - protein, 7 aa, synthetic construct
TSGPKIW

SEQ ID NO: 167111 - protein, 7 aa, synthetic construct
GTAYKSH

SEQ ID NO: 167112 - protein, 7 aa, synthetic construct
KKMDPIN

SEQ ID NO: 167113 - protein, 7 aa, synthetic construct
TKAMYTQ

SEQ ID NO: 167114 - protein, 7 aa, synthetic construct
INIIGRP

SEQ ID NO: 167115 - protein, 7 aa, synthetic construct
GRSHIPI

SEQ ID NO: 167116 - protein, 7 aa, synthetic construct
IPQDRAR

SEQ ID NO: 167117 - protein, 7 aa, synthetic construct
KGFASDK

SEQ ID NO: 167118 - protein, 7 aa, synthetic construct
LPQERMK

SEQ ID NO: 167119 - protein, 7 aa, synthetic construct
QHKAEVR

SEQ ID NO: 167120 - protein, 7 aa, synthetic construct
IMMLAKP

SEQ ID NO: 167121 - protein, 7 aa, synthetic construct
TAGQPKH

SEQ ID NO: 167122 - protein, 7 aa, synthetic construct
DLKHVKH

SEQ ID NO: 167123 - protein, 7 aa, synthetic construct
YKDWVKG

SEQ ID NO: 167124 - protein, 7 aa, synthetic construct
SSYINKV

SEQ ID NO: 167125 - protein, 7 aa, synthetic construct
YLPNDRK

SEQ ID NO: 167126 - protein, 7 aa, synthetic construct
AKGYNIV

SEQ ID NO: 167127 - protein, 7 aa, synthetic construct
VQERRTV

SEQ ID NO: 167128 - protein, 7 aa, synthetic construct
DKIKQFM

SEQ ID NO: 167129 - protein, 7 aa, synthetic construct
FMSNLKG

SEQ ID NO: 167130 - protein, 7 aa, synthetic construct
LGFSIKN

SEQ ID NO: 167131 - protein, 7 aa, synthetic construct
YMKLEKM

SEQ ID NO: 167132 - protein, 7 aa, synthetic construct
QKLHQPF

SEQ ID NO: 167133 - protein, 7 aa, synthetic construct
APNNKYT

SEQ ID NO: 167134 - protein, 7 aa, synthetic construct
ATDKVYR

SEQ ID NO: 167135 - protein, 7 aa, synthetic construct
QDKKQNW

SEQ ID NO: 167136 - protein, 7 aa, synthetic construct
MAKYTSL

SEQ ID NO: 167137 - protein, 7 aa, synthetic construct
NMLKHTL

SEQ ID NO: 167138 - protein, 7 aa, synthetic construct
LNMTLRP

SEQ ID NO: 167139 - protein, 7 aa, synthetic construct
TSIHNKN

SEQ ID NO: 167140 - protein, 7 aa, synthetic construct
LGHPSTR

SEQ ID NO: 167141 - protein, 7 aa, synthetic construct
DMNRILK

SEQ ID NO: 167142 - protein, 7 aa, synthetic construct
PKITRPD

SEQ ID NO: 167143 - protein, 7 aa, synthetic construct
DFPKARA

SEQ ID NO: 167144 - protein, 7 aa, synthetic construct
MKHPTYA

SEQ ID NO: 167145 - protein, 7 aa, synthetic construct
HRNTVPI

SEQ ID NO: 167146 - protein, 7 aa, synthetic construct
RSVLPER

SEQ ID NO: 167147 - protein, 7 aa, synthetic construct
HTKVDPR

SEQ ID NO: 167148 - protein, 7 aa, synthetic construct
SYKKEMQ

SEQ ID NO: 167149 - protein, 7 aa, synthetic construct
TSPELKR

SEQ ID NO: 167150 - protein, 7 aa, synthetic construct
MHKGGVY

SEQ ID NO: 167151 - protein, 7 aa, synthetic construct
KTYIKAD

SEQ ID NO: 167152 - protein, 7 aa, synthetic construct
YKGIVYA

SEQ ID NO: 167153 - protein, 7 aa, synthetic construct
WLKPTSS

SEQ ID NO: 167154 - protein, 7 aa, synthetic construct
KENYLSK

SEQ ID NO: 167155 - protein, 7 aa, synthetic construct
PIRKTDM

SEQ ID NO: 167156 - protein, 7 aa, synthetic construct
KDGHLTR

SEQ ID NO: 167157 - protein, 7 aa, synthetic construct
KYGPTRD

SEQ ID NO: 167158 - protein, 7 aa, synthetic construct
IPRQELK

SEQ ID NO: 167159 - protein, 7 aa, synthetic construct
YKMTKHE

SEQ ID NO: 167160 - protein, 7 aa, synthetic construct
MDMKRMI

SEQ ID NO: 167161 - protein, 7 aa, synthetic construct
PYAHAKA

SEQ ID NO: 167162 - protein, 7 aa, synthetic construct
STHSQRI

SEQ ID NO: 167163 - protein, 7 aa, synthetic construct
SAYKVSQ

SEQ ID NO: 167164 - protein, 7 aa, synthetic construct
TRTEKPW

SEQ ID NO: 167165 - protein, 7 aa, synthetic construct
VPQRVER

SEQ ID NO: 167166 - protein, 7 aa, synthetic construct
WANIQKH

SEQ ID NO: 167167 - protein, 7 aa, synthetic construct
AGGKQYI

SEQ ID NO: 167168 - protein, 7 aa, synthetic construct
LSRDAKS

SEQ ID NO: 167169 - protein, 7 aa, synthetic construct
TDRRGPV

SEQ ID NO: 167170 - protein, 7 aa, synthetic construct
PDRTTKQ

SEQ ID NO: 167171 - protein, 7 aa, synthetic construct
KYINSEK

SEQ ID NO: 167172 - protein, 7 aa, synthetic construct
KTATKYD

SEQ ID NO: 167173 - protein, 7 aa, synthetic construct
RPERHAT

SEQ ID NO: 167174 - protein, 7 aa, synthetic construct
RTDSYIK

SEQ ID NO: 167175 - protein, 7 aa, synthetic construct
GTDSRKI

SEQ ID NO: 167176 - protein, 7 aa, synthetic construct
PESKLKY

SEQ ID NO: 167177 - protein, 7 aa, synthetic construct
RMLKLSD

SEQ ID NO: 167178 - protein, 7 aa, synthetic construct
FGTHVKL

SEQ ID NO: 167179 - protein, 7 aa, synthetic construct
EKKSLFT

SEQ ID NO: 167180 - protein, 7 aa, synthetic construct
MFKLSNN

SEQ ID NO: 167181 - protein, 7 aa, synthetic construct
TDIMKNR

SEQ ID NO: 167182 - protein, 7 aa, synthetic construct
RSPRDVQ

SEQ ID NO: 167183 - protein, 7 aa, synthetic construct
MTMHAKQ

SEQ ID NO: 167184 - protein, 7 aa, synthetic construct
KVREYLN

SEQ ID NO: 167185 - protein, 7 aa, synthetic construct
LTHPRAI

SEQ ID NO: 167186 - protein, 7 aa, synthetic construct
GKHFING

SEQ ID NO: 167187 - protein, 7 aa, synthetic construct
DQKPKYF

SEQ ID NO: 167188 - protein, 7 aa, synthetic construct
FDKNVRH

SEQ ID NO: 167189 - protein, 7 aa, synthetic construct
KDAHFKS

SEQ ID NO: 167190 - protein, 7 aa, synthetic construct
SGYKNNL

SEQ ID NO: 167191 - protein, 7 aa, synthetic construct
SLQTHRM

SEQ ID NO: 167192 - protein, 7 aa, synthetic construct
NMKIYTS

SEQ ID NO: 167193 - protein, 7 aa, synthetic construct
HYGVIKA

SEQ ID NO: 167194 - protein, 7 aa, synthetic construct
MKVNVHY

SEQ ID NO: 167195 - protein, 7 aa, synthetic construct
EMPTKSK

SEQ ID NO: 167196 - protein, 7 aa, synthetic construct
TKQIMAY

SEQ ID NO: 167197 - protein, 7 aa, synthetic construct
APDRVKQ

SEQ ID NO: 167198 - protein, 7 aa, synthetic construct
SADARRI

SEQ ID NO: 167199 - protein, 7 aa, synthetic construct
QEKFRGQ

SEQ ID NO: 167200 - protein, 7 aa, synthetic construct
QKNVLQY

SEQ ID NO: 167201 - protein, 7 aa, synthetic construct
LPKIHFA

SEQ ID NO: 167202 - protein, 7 aa, synthetic construct
FKLAHTQ

SEQ ID NO: 167203 - protein, 7 aa, synthetic construct
GSSFMKS

SEQ ID NO: 167204 - protein, 7 aa, synthetic construct
GYKIISN

SEQ ID NO: 167205 - protein, 7 aa, synthetic construct
QSDRIKF

SEQ ID NO: 167206 - protein, 7 aa, synthetic construct
MLKHQAY

SEQ ID NO: 167207 - protein, 7 aa, synthetic construct
ASRHIPQ

SEQ ID NO: 167208 - protein, 7 aa, synthetic construct
TGRDKMI

SEQ ID NO: 167209 - protein, 7 aa, synthetic construct
FTGHMKI

SEQ ID NO: 167210 - protein, 7 aa, synthetic construct
VKEPWKA

SEQ ID NO: 167211 - protein, 7 aa, synthetic construct
DPRYKGV

SEQ ID NO: 167212 - protein, 7 aa, synthetic construct
FDRGIAR

SEQ ID NO: 167213 - protein, 7 aa, synthetic construct
KEFAHKA

SEQ ID NO: 167214 - protein, 7 aa, synthetic construct
GKFLQAN

SEQ ID NO: 167215 - protein, 7 aa, synthetic construct
GQGSIKH

SEQ ID NO: 167216 - protein, 7 aa, synthetic construct
YKPHPHL

SEQ ID NO: 167217 - protein, 7 aa, synthetic construct
ISGPRFV

SEQ ID NO: 167218 - protein, 7 aa, synthetic construct
KIMNENR

SEQ ID NO: 167219 - protein, 7 aa, synthetic construct
VKTYSQL

SEQ ID NO: 167220 - protein, 7 aa, synthetic construct
SHPGKYN

SEQ ID NO: 167221 - protein, 7 aa, synthetic construct
VYATSKN

SEQ ID NO: 167222 - protein, 7 aa, synthetic construct
IDRGTKH

SEQ ID NO: 167223 - protein, 7 aa, synthetic construct
DKFEKKY

SEQ ID NO: 167224 - protein, 7 aa, synthetic construct
IIKSYNN

SEQ ID NO: 167225 - protein, 7 aa, synthetic construct
LVRKDIM

SEQ ID NO: 167226 - protein, 7 aa, synthetic construct
VHKKDAV

SEQ ID NO: 167227 - protein, 7 aa, synthetic construct
SKGIFPS

SEQ ID NO: 167228 - protein, 7 aa, synthetic construct
FKTPYSQ

SEQ ID NO: 167229 - protein, 7 aa, synthetic construct
FLKAIHS

SEQ ID NO: 167230 - protein, 7 aa, synthetic construct
HMTPRNI

SEQ ID NO: 167231 - protein, 7 aa, synthetic construct
FKMPMLS

SEQ ID NO: 167232 - protein, 7 aa, synthetic construct
IHPRDKA

SEQ ID NO: 167233 - protein, 7 aa, synthetic construct
VVSTRHQ

SEQ ID NO: 167234 - protein, 7 aa, synthetic construct
MMGHIKM

SEQ ID NO: 167235 - protein, 7 aa, synthetic construct
VMIRDKS

SEQ ID NO: 167236 - protein, 7 aa, synthetic construct
GNIEKPR

SEQ ID NO: 167237 - protein, 7 aa, synthetic construct
RPMQNQQ

SEQ ID NO: 167238 - protein, 7 aa, synthetic construct
QDRPLQK

SEQ ID NO: 167239 - protein, 7 aa, synthetic construct
VMPRINN

SEQ ID NO: 167240 - protein, 7 aa, synthetic construct
NYKPMPL

SEQ ID NO: 167241 - protein, 7 aa, synthetic construct
NTERVKM

SEQ ID NO: 167242 - protein, 7 aa, synthetic construct
VLQHRQQ

SEQ ID NO: 167243 - protein, 7 aa, synthetic construct
MSTRHSI

SEQ ID NO: 167244 - protein, 7 aa, synthetic construct
SSVRPAF

SEQ ID NO: 167245 - protein, 7 aa, synthetic construct
KHFASNP

SEQ ID NO: 167246 - protein, 7 aa, synthetic construct
GISTGHR

SEQ ID NO: 167247 - protein, 7 aa, synthetic construct
VGELKRY

SEQ ID NO: 167248 - protein, 7 aa, synthetic construct
VKLHMNV

SEQ ID NO: 167249 - protein, 7 aa, synthetic construct
DPAGRVR

SEQ ID NO: 167250 - protein, 7 aa, synthetic construct
GPIRAFP

SEQ ID NO: 167251 - protein, 7 aa, synthetic construct
FPKAFNN

SEQ ID NO: 167252 - protein, 7 aa, synthetic construct
TYKTIGQ

SEQ ID NO: 167253 - protein, 7 aa, synthetic construct
GPREVSR

SEQ ID NO: 167254 - protein, 7 aa, synthetic construct
TYHAIKQ

SEQ ID NO: 167255 - protein, 7 aa, synthetic construct
MPSEMRK

SEQ ID NO: 167256 - protein, 7 aa, synthetic construct
YPHNPKM

SEQ ID NO: 167257 - protein, 7 aa, synthetic construct
SAKYTSL

SEQ ID NO: 167258 - protein, 7 aa, synthetic construct
KGTFGAS

SEQ ID NO: 167259 - protein, 7 aa, synthetic construct
VKKTPND

SEQ ID NO: 167260 - protein, 7 aa, synthetic construct
TSAKMYN

SEQ ID NO: 167261 - protein, 7 aa, synthetic construct
KKFVVND

SEQ ID NO: 167262 - protein, 7 aa, synthetic construct
DKQAFKY

SEQ ID NO: 167263 - protein, 7 aa, synthetic construct
DPMKFRA

SEQ ID NO: 167264 - protein, 7 aa, synthetic construct
QKLFQGG

SEQ ID NO: 167265 - protein, 7 aa, synthetic construct
FKIPMDR

SEQ ID NO: 167266 - protein, 7 aa, synthetic construct
YKETYRS

SEQ ID NO: 167267 - protein, 7 aa, synthetic construct
IPYQKDK

SEQ ID NO: 167268 - protein, 7 aa, synthetic construct
KVDHKVW

SEQ ID NO: 167269 - protein, 7 aa, synthetic construct
VGQRNDK

SEQ ID NO: 167270 - protein, 7 aa, synthetic construct
PLHKTYA

SEQ ID NO: 167271 - protein, 7 aa, synthetic construct
VDRGKSH

SEQ ID NO: 167272 - protein, 7 aa, synthetic construct
GMPHLGK

SEQ ID NO: 167273 - protein, 7 aa, synthetic construct
EQGKRFT

SEQ ID NO: 167274 - protein, 7 aa, synthetic construct
VDRFSPK

SEQ ID NO: 167275 - protein, 7 aa, synthetic construct
EKAVVKF

SEQ ID NO: 167276 - protein, 7 aa, synthetic construct
IAFKESR

SEQ ID NO: 167277 - protein, 7 aa, synthetic construct
KFLQSGG

SEQ ID NO: 167278 - protein, 7 aa, synthetic construct
DAKAIHR

SEQ ID NO: 167279 - protein, 7 aa, synthetic construct
TFGGSGR

SEQ ID NO: 167280 - protein, 7 aa, synthetic construct
DSRGVKT

SEQ ID NO: 167281 - protein, 7 aa, synthetic construct
NFDKRQQ

SEQ ID NO: 167282 - protein, 7 aa, synthetic construct
KGLTRDT

SEQ ID NO: 167283 - protein, 7 aa, synthetic construct
MDKDARK

SEQ ID NO: 167284 - protein, 7 aa, synthetic construct
WSKIISN

SEQ ID NO: 167285 - protein, 7 aa, synthetic construct
DIMKNAR

SEQ ID NO: 167286 - protein, 7 aa, synthetic construct
IQKHINF

SEQ ID NO: 167287 - protein, 7 aa, synthetic construct
VHRPMNI

SEQ ID NO: 167288 - protein, 7 aa, synthetic construct
DIKELKK

SEQ ID NO: 167289 - protein, 7 aa, synthetic construct
YIKPIER

SEQ ID NO: 167290 - protein, 7 aa, synthetic construct
SIDAIKK

SEQ ID NO: 167291 - protein, 7 aa, synthetic construct
IFGTVKQ

SEQ ID NO: 167292 - protein, 7 aa, synthetic construct
ADFKMKM

SEQ ID NO: 167293 - protein, 7 aa, synthetic construct
YPSHIMK

SEQ ID NO: 167294 - protein, 7 aa, synthetic construct
DLRVGTR

SEQ ID NO: 167295 - protein, 7 aa, synthetic construct
DFKAMKL

SEQ ID NO: 167296 - protein, 7 aa, synthetic construct
MRGMVIS

SEQ ID NO: 167297 - protein, 7 aa, synthetic construct
MTKPTYI

SEQ ID NO: 167298 - protein, 7 aa, synthetic construct
FLKSSHI

SEQ ID NO: 167299 - protein, 7 aa, synthetic construct
SGHKSAI

SEQ ID NO: 167300 - protein, 7 aa, synthetic construct
TSSAKYL

SEQ ID NO: 167301 - protein, 7 aa, synthetic construct
QESKKFT

SEQ ID NO: 167302 - protein, 7 aa, synthetic construct
QFKNPTQ

SEQ ID NO: 167303 - protein, 7 aa, synthetic construct
IMPKSYV

SEQ ID NO: 167304 - protein, 7 aa, synthetic construct
GGEIKKM

SEQ ID NO: 167305 - protein, 7 aa, synthetic construct
VTGTAHR

SEQ ID NO: 167306 - protein, 7 aa, synthetic construct
MNPIEKK

SEQ ID NO: 167307 - protein, 7 aa, synthetic construct
LFGAIKG

SEQ ID NO: 167308 - protein, 7 aa, synthetic construct
GIQRIER

SEQ ID NO: 167309 - protein, 7 aa, synthetic construct
KSAHDTR

SEQ ID NO: 167310 - protein, 7 aa, synthetic construct
KSFHTAS

SEQ ID NO: 167311 - protein, 7 aa, synthetic construct
DSKMQRY

SEQ ID NO: 167312 - protein, 7 aa, synthetic construct
IKIHDRS

SEQ ID NO: 167313 - protein, 7 aa, synthetic construct
KRDPYSS

SEQ ID NO: 167314 - protein, 7 aa, synthetic construct
NKYTAPI

SEQ ID NO: 167315 - protein, 7 aa, synthetic construct
VDMTRTK

SEQ ID NO: 167316 - protein, 7 aa, synthetic construct
RTHNLVN

SEQ ID NO: 167317 - protein, 7 aa, synthetic construct
EKPQPFK

SEQ ID NO: 167318 - protein, 7 aa, synthetic construct
IKHGALL

SEQ ID NO: 167319 - protein, 7 aa, synthetic construct
IPPNQHR

SEQ ID NO: 167320 - protein, 7 aa, synthetic construct
YKSNINT

SEQ ID NO: 167321 - protein, 7 aa, synthetic construct
AYAKHNN

SEQ ID NO: 167322 - protein, 7 aa, synthetic construct
HKPVNIY

SEQ ID NO: 167323 - protein, 7 aa, synthetic construct
TGYITKG

SEQ ID NO: 167324 - protein, 7 aa, synthetic construct
YQVKHTL

SEQ ID NO: 167325 - protein, 7 aa, synthetic construct
KFSKDVY

SEQ ID NO: 167326 - protein, 7 aa, synthetic construct
IKQQDRA

SEQ ID NO: 167327 - protein, 7 aa, synthetic construct
SDSRNTK

SEQ ID NO: 167328 - protein, 7 aa, synthetic construct
WLKNQLA

SEQ ID NO: 167329 - protein, 7 aa, synthetic construct
PDMKVSR

SEQ ID NO: 167330 - protein, 7 aa, synthetic construct
DKQPNKA

SEQ ID NO: 167331 - protein, 7 aa, synthetic construct
AVTRPTN

SEQ ID NO: 167332 - protein, 7 aa, synthetic construct
VHAHLKG

SEQ ID NO: 167333 - protein, 7 aa, synthetic construct
NRAIVHS

SEQ ID NO: 167334 - protein, 7 aa, synthetic construct
KYIPSDR

SEQ ID NO: 167335 - protein, 7 aa, synthetic construct
PRNKDMA

SEQ ID NO: 167336 - protein, 7 aa, synthetic construct
MISNTRS

SEQ ID NO: 167337 - protein, 7 aa, synthetic construct
WPATVRN

SEQ ID NO: 167338 - protein, 7 aa, synthetic construct
FKMPQNL

SEQ ID NO: 167339 - protein, 7 aa, synthetic construct
ETPQKRT

SEQ ID NO: 167340 - protein, 7 aa, synthetic construct
KFVPMNP

SEQ ID NO: 167341 - protein, 7 aa, synthetic construct
QTMKPHY

SEQ ID NO: 167342 - protein, 7 aa, synthetic construct
AVPERRA

SEQ ID NO: 167343 - protein, 7 aa, synthetic construct
TDPIRTR

SEQ ID NO: 167344 - protein, 7 aa, synthetic construct
VPVHARN

SEQ ID NO: 167345 - protein, 7 aa, synthetic construct
MTQHRTN

SEQ ID NO: 167346 - protein, 7 aa, synthetic construct
IQFKSDR

SEQ ID NO: 167347 - protein, 7 aa, synthetic construct
MKFNAVH

SEQ ID NO: 167348 - protein, 7 aa, synthetic construct
SLHITRS

SEQ ID NO: 167349 - protein, 7 aa, synthetic construct
VRNPMHN

SEQ ID NO: 167350 - protein, 7 aa, synthetic construct
THKPVLT

SEQ ID NO: 167351 - protein, 7 aa, synthetic construct
HKNPVPF

SEQ ID NO: 167352 - protein, 7 aa, synthetic construct
MMDAAKK

SEQ ID NO: 167353 - protein, 7 aa, synthetic construct
APTPRKE

SEQ ID NO: 167354 - protein, 7 aa, synthetic construct
QTRPSPQ

SEQ ID NO: 167355 - protein, 7 aa, synthetic construct
ASTHSGR

SEQ ID NO: 167356 - protein, 7 aa, synthetic construct
YANQTHK

SEQ ID NO: 167357 - protein, 7 aa, synthetic construct
YLKASAL

SEQ ID NO: 167358 - protein, 7 aa, synthetic construct
RSTHTVI

SEQ ID NO: 167359 - protein, 7 aa, synthetic construct
TKSMFNA

SEQ ID NO: 167360 - protein, 7 aa, synthetic construct
RQDKLYN

SEQ ID NO: 167361 - protein, 7 aa, synthetic construct
VGKLGYA

SEQ ID NO: 167362 - protein, 7 aa, synthetic construct
AERQVKI

SEQ ID NO: 167363 - protein, 7 aa, synthetic construct
LVPAERK

SEQ ID NO: 167364 - protein, 7 aa, synthetic construct
ITPNKYL

SEQ ID NO: 167365 - protein, 7 aa, synthetic construct
RMHNINV

SEQ ID NO: 167366 - protein, 7 aa, synthetic construct
LLAQMRN

SEQ ID NO: 167367 - protein, 7 aa, synthetic construct
QDNVKTR

SEQ ID NO: 167368 - protein, 7 aa, synthetic construct
FKGTVYV

SEQ ID NO: 167369 - protein, 7 aa, synthetic construct
KMRVLTD

SEQ ID NO: 167370 - protein, 7 aa, synthetic construct
FSSKDRN

SEQ ID NO: 167371 - protein, 7 aa, synthetic construct
LGTKSYT

SEQ ID NO: 167372 - protein, 7 aa, synthetic construct
QYAKEKS

SEQ ID NO: 167373 - protein, 7 aa, synthetic construct
TIPISHK

SEQ ID NO: 167374 - protein, 7 aa, synthetic construct
PSTYMKA

SEQ ID NO: 167375 - protein, 7 aa, synthetic construct
WTKEHRQ

SEQ ID NO: 167376 - protein, 7 aa, synthetic construct
GKPINYN

SEQ ID NO: 167377 - protein, 7 aa, synthetic construct
SDHKKST

SEQ ID NO: 167378 - protein, 7 aa, synthetic construct
PDVRMKA

SEQ ID NO: 167379 - protein, 7 aa, synthetic construct
KDHRMNV

SEQ ID NO: 167380 - protein, 7 aa, synthetic construct
TTTHNNR

SEQ ID NO: 167381 - protein, 7 aa, synthetic construct
VKLHNIM

SEQ ID NO: 167382 - protein, 7 aa, synthetic construct
REKNVYN

SEQ ID NO: 167383 - protein, 7 aa, synthetic construct
DRMPIKI

SEQ ID NO: 167384 - protein, 7 aa, synthetic construct
NEGRVVR

SEQ ID NO: 167385 - protein, 7 aa, synthetic construct
HTDKRHV

SEQ ID NO: 167386 - protein, 7 aa, synthetic construct
MVRPPIH

SEQ ID NO: 167387 - protein, 7 aa, synthetic construct
VEAKRYS

SEQ ID NO: 167388 - protein, 7 aa, synthetic construct
QLKHIQF

SEQ ID NO: 167389 - protein, 7 aa, synthetic construct
KSRDLIH

SEQ ID NO: 167390 - protein, 7 aa, synthetic construct
KYTKLEN

SEQ ID NO: 167391 - protein, 7 aa, synthetic construct
SMPSDRR

SEQ ID NO: 167392 - protein, 7 aa, synthetic construct
SAYKENK

SEQ ID NO: 167393 - protein, 7 aa, synthetic construct
MKPFPSN

SEQ ID NO: 167394 - protein, 7 aa, synthetic construct
HTVQLRA

SEQ ID NO: 167395 - protein, 7 aa, synthetic construct
AHLPRSS

SEQ ID NO: 167396 - protein, 7 aa, synthetic construct
RVNMKDH

SEQ ID NO: 167397 - protein, 7 aa, synthetic construct
FQKVMNM

SEQ ID NO: 167398 - protein, 7 aa, synthetic construct
VKMFPDR

SEQ ID NO: 167399 - protein, 7 aa, synthetic construct
RVHITNA

SEQ ID NO: 167400 - protein, 7 aa, synthetic construct
IVTNPRN

SEQ ID NO: 167401 - protein, 7 aa, synthetic construct
VIKALYG

SEQ ID NO: 167402 - protein, 7 aa, synthetic construct
KIPEVYR

SEQ ID NO: 167403 - protein, 7 aa, synthetic construct
GPDMKRH

SEQ ID NO: 167404 - protein, 7 aa, synthetic construct
YKQHIIV

SEQ ID NO: 167405 - protein, 7 aa, synthetic construct
VHSNTGR

SEQ ID NO: 167406 - protein, 7 aa, synthetic construct
IPKNIYQ

SEQ ID NO: 167407 - protein, 7 aa, synthetic construct
YPTSVPR

SEQ ID NO: 167408 - protein, 7 aa, synthetic construct
YPKIVYA

SEQ ID NO: 167409 - protein, 7 aa, synthetic construct
NERIKML

SEQ ID NO: 167410 - protein, 7 aa, synthetic construct
TKYKEFG

SEQ ID NO: 167411 - protein, 7 aa, synthetic construct
IRSTENK

SEQ ID NO: 167412 - protein, 7 aa, synthetic construct
PPEYKVK

SEQ ID NO: 167413 - protein, 7 aa, synthetic construct
TQPKFHN

SEQ ID NO: 167414 - protein, 7 aa, synthetic construct
ITVTYKA

SEQ ID NO: 167415 - protein, 7 aa, synthetic construct
MKMPQHY

SEQ ID NO: 167416 - protein, 7 aa, synthetic construct
KYVKISD

SEQ ID NO: 167417 - protein, 7 aa, synthetic construct
TDRQLKL

SEQ ID NO: 167418 - protein, 7 aa, synthetic construct
DARKFTS

SEQ ID NO: 167419 - protein, 7 aa, synthetic construct
IMLSMKA

SEQ ID NO: 167420 - protein, 7 aa, synthetic construct
MVKVQSY

SEQ ID NO: 167421 - protein, 7 aa, synthetic construct
TITREKH

SEQ ID NO: 167422 - protein, 7 aa, synthetic construct
FLKSSHQ

SEQ ID NO: 167423 - protein, 7 aa, synthetic construct
LSDRLHR

SEQ ID NO: 167424 - protein, 7 aa, synthetic construct
SMKIYSS

SEQ ID NO: 167425 - protein, 7 aa, synthetic construct
RPLRTDA

SEQ ID NO: 167426 - protein, 7 aa, synthetic construct
YKANLSH

SEQ ID NO: 167427 - protein, 7 aa, synthetic construct
AERNPKG

SEQ ID NO: 167428 - protein, 7 aa, synthetic construct
GFINQKS

SEQ ID NO: 167429 - protein, 7 aa, synthetic construct
YTDVRPR

SEQ ID NO: 167430 - protein, 7 aa, synthetic construct
LPDVRTK

SEQ ID NO: 167431 - protein, 7 aa, synthetic construct
NDKKYGF

SEQ ID NO: 167432 - protein, 7 aa, synthetic construct
PFQKPNM

SEQ ID NO: 167433 - protein, 7 aa, synthetic construct
IFSNTKV

SEQ ID NO: 167434 - protein, 7 aa, synthetic construct
DYKMKLA

SEQ ID NO: 167435 - protein, 7 aa, synthetic construct
FTKSIYS

SEQ ID NO: 167436 - protein, 7 aa, synthetic construct
MKPIGLY

SEQ ID NO: 167437 - protein, 7 aa, synthetic construct
WENRSPK

SEQ ID NO: 167438 - protein, 7 aa, synthetic construct
WSKPVPM

SEQ ID NO: 167439 - protein, 7 aa, synthetic construct
VVRHPTI

SEQ ID NO: 167440 - protein, 7 aa, synthetic construct
KREIYSP

SEQ ID NO: 167441 - protein, 7 aa, synthetic construct
MQKQYDK

SEQ ID NO: 167442 - protein, 7 aa, synthetic construct
MLRGEQK

SEQ ID NO: 167443 - protein, 7 aa, synthetic construct
FALHPKA

SEQ ID NO: 167444 - protein, 7 aa, synthetic construct
GKHPKDY

SEQ ID NO: 167445 - protein, 7 aa, synthetic construct
AEVRTKI

SEQ ID NO: 167446 - protein, 7 aa, synthetic construct
HTSSLRN

SEQ ID NO: 167447 - protein, 7 aa, synthetic construct
VKLNKWE

SEQ ID NO: 167448 - protein, 7 aa, synthetic construct
VTYTSKM

SEQ ID NO: 167449 - protein, 7 aa, synthetic construct
HSGKPLF

SEQ ID NO: 167450 - protein, 7 aa, synthetic construct
TMDRLKS

SEQ ID NO: 167451 - protein, 7 aa, synthetic construct
IVMKERH

SEQ ID NO: 167452 - protein, 7 aa, synthetic construct
EKGPLMR

SEQ ID NO: 167453 - protein, 7 aa, synthetic construct
RDAYLKQ

SEQ ID NO: 167454 - protein, 7 aa, synthetic construct
RSIHVKD

SEQ ID NO: 167455 - protein, 7 aa, synthetic construct
MLDIKRH

SEQ ID NO: 167456 - protein, 7 aa, synthetic construct
QERGTQK

SEQ ID NO: 167457 - protein, 7 aa, synthetic construct
HIHNVKI

SEQ ID NO: 167458 - protein, 7 aa, synthetic construct
TKFREPM

SEQ ID NO: 167459 - protein, 7 aa, synthetic construct
VKPFSPQ

SEQ ID NO: 167460 - protein, 7 aa, synthetic construct
AQTKGYQ

SEQ ID NO: 167461 - protein, 7 aa, synthetic construct
IFPKHST

SEQ ID NO: 167462 - protein, 7 aa, synthetic construct
KAYVKAD

SEQ ID NO: 167463 - protein, 7 aa, synthetic construct
FKTPHSI

SEQ ID NO: 167464 - protein, 7 aa, synthetic construct
MDRNTSK

SEQ ID NO: 167465 - protein, 7 aa, synthetic construct
RLNIDYK

SEQ ID NO: 167466 - protein, 7 aa, synthetic construct
PGLHKFG

SEQ ID NO: 167467 - protein, 7 aa, synthetic construct
LHKNPLS

SEQ ID NO: 167468 - protein, 7 aa, synthetic construct
HKQIINM

SEQ ID NO: 167469 - protein, 7 aa, synthetic construct
GSAFHKV

SEQ ID NO: 167470 - protein, 7 aa, synthetic construct
VQKQDRY

SEQ ID NO: 167471 - protein, 7 aa, synthetic construct
PDIKQVR

SEQ ID NO: 167472 - protein, 7 aa, synthetic construct
ELRGKIM

SEQ ID NO: 167473 - protein, 7 aa, synthetic construct
NPIYSKQ

SEQ ID NO: 167474 - protein, 7 aa, synthetic construct
TSREKFT

SEQ ID NO: 167475 - protein, 7 aa, synthetic construct
EPRAANK

SEQ ID NO: 167476 - protein, 7 aa, synthetic construct
RIHPTIS

SEQ ID NO: 167477 - protein, 7 aa, synthetic construct
IKFKMIE

SEQ ID NO: 167478 - protein, 7 aa, synthetic construct
IQHKFNV

SEQ ID NO: 167479 - protein, 7 aa, synthetic construct
ADMKRIL

SEQ ID NO: 167480 - protein, 7 aa, synthetic construct
TDIKSKH

SEQ ID NO: 167481 - protein, 7 aa, synthetic construct
VKFPQHA

SEQ ID NO: 167482 - protein, 7 aa, synthetic construct
FNPLHRV

SEQ ID NO: 167483 - protein, 7 aa, synthetic construct
FETKRTI

SEQ ID NO: 167484 - protein, 7 aa, synthetic construct
HKLHSNS

SEQ ID NO: 167485 - protein, 7 aa, synthetic construct
LGTNTHR

SEQ ID NO: 167486 - protein, 7 aa, synthetic construct
QIAAEKR

SEQ ID NO: 167487 - protein, 7 aa, synthetic construct
MKLTAHY

SEQ ID NO: 167488 - protein, 7 aa, synthetic construct
IFGNMKS

SEQ ID NO: 167489 - protein, 7 aa, synthetic construct
SEAMKLR

SEQ ID NO: 167490 - protein, 7 aa, synthetic construct
RKEHPLL

SEQ ID NO: 167491 - protein, 7 aa, synthetic construct
YIVVKSA

SEQ ID NO: 167492 - protein, 7 aa, synthetic construct
TKYQREI

SEQ ID NO: 167493 - protein, 7 aa, synthetic construct
HSSVVKH

SEQ ID NO: 167494 - protein, 7 aa, synthetic construct
VAKHIAF

SEQ ID NO: 167495 - protein, 7 aa, synthetic construct
RMPAHVL

SEQ ID NO: 167496 - protein, 7 aa, synthetic construct
LPKYMNL

SEQ ID NO: 167497 - protein, 7 aa, synthetic construct
TTYPKAL

SEQ ID NO: 167498 - protein, 7 aa, synthetic construct
DPFQKVK

SEQ ID NO: 167499 - protein, 7 aa, synthetic construct
HLPRSSL

SEQ ID NO: 167500 - protein, 7 aa, synthetic construct
MKLATSY

SEQ ID NO: 167501 - protein, 7 aa, synthetic construct
RRSDNMI

SEQ ID NO: 167502 - protein, 7 aa, synthetic construct
SPAEMRR

SEQ ID NO: 167503 - protein, 7 aa, synthetic construct
GILKHSM

SEQ ID NO: 167504 - protein, 7 aa, synthetic construct
RPDRVVQ

SEQ ID NO: 167505 - protein, 7 aa, synthetic construct
KVNFTAS

SEQ ID NO: 167506 - protein, 7 aa, synthetic construct
LKNPSHY

SEQ ID NO: 167507 - protein, 7 aa, synthetic construct
HIDTRMK

SEQ ID NO: 167508 - protein, 7 aa, synthetic construct
DKVVRTY

SEQ ID NO: 167509 - protein, 7 aa, synthetic construct
HPKMFPS

SEQ ID NO: 167510 - protein, 7 aa, synthetic construct
LPSKYAQ

SEQ ID NO: 167511 - protein, 7 aa, synthetic construct
FSSKQYN

SEQ ID NO: 167512 - protein, 7 aa, synthetic construct
KHDRVIT

SEQ ID NO: 167513 - protein, 7 aa, synthetic construct
VHSAIRN

SEQ ID NO: 167514 - protein, 7 aa, synthetic construct
SITQHRM

SEQ ID NO: 167515 - protein, 7 aa, synthetic construct
KPVRVTD

SEQ ID NO: 167516 - protein, 7 aa, synthetic construct
HVQKHNI

SEQ ID NO: 167517 - protein, 7 aa, synthetic construct
RLEKVYN

SEQ ID NO: 167518 - protein, 7 aa, synthetic construct
KESRNLL

SEQ ID NO: 167519 - protein, 7 aa, synthetic construct
KGIGFAV

SEQ ID NO: 167520 - protein, 7 aa, synthetic construct
IKIHHNN

SEQ ID NO: 167521 - protein, 7 aa, synthetic construct
IHAAYKA

SEQ ID NO: 167522 - protein, 7 aa, synthetic construct
KLHSMSN

SEQ ID NO: 167523 - protein, 7 aa, synthetic construct
VDKRITY

SEQ ID NO: 167524 - protein, 7 aa, synthetic construct
TPSKFSQ

SEQ ID NO: 167525 - protein, 7 aa, synthetic construct
SHKIVNM

SEQ ID NO: 167526 - protein, 7 aa, synthetic construct
GDKRQVT

SEQ ID NO: 167527 - protein, 7 aa, synthetic construct
DKQPYNK

SEQ ID NO: 167528 - protein, 7 aa, synthetic construct
DKAMPSR

SEQ ID NO: 167529 - protein, 7 aa, synthetic construct
MPKTERY

SEQ ID NO: 167530 - protein, 7 aa, synthetic construct
FAVKDLR

SEQ ID NO: 167531 - protein, 7 aa, synthetic construct
SDKQYAR

SEQ ID NO: 167532 - protein, 7 aa, synthetic construct
HKPSHLM

SEQ ID NO: 167533 - protein, 7 aa, synthetic construct
HSMLHKA

SEQ ID NO: 167534 - protein, 7 aa, synthetic construct
KSRDMTN

SEQ ID NO: 167535 - protein, 7 aa, synthetic construct
VTFGMKG

SEQ ID NO: 167536 - protein, 7 aa, synthetic construct
ELKRTFN

SEQ ID NO: 167537 - protein, 7 aa, synthetic construct
DPAMKKW

SEQ ID NO: 167538 - protein, 7 aa, synthetic construct
GVGHANK

SEQ ID NO: 167539 - protein, 7 aa, synthetic construct
SSFVTKS

SEQ ID NO: 167540 - protein, 7 aa, synthetic construct
VETKRLL

SEQ ID NO: 167541 - protein, 7 aa, synthetic construct
IELGRIK

SEQ ID NO: 167542 - protein, 7 aa, synthetic construct
AAHPKSS

SEQ ID NO: 167543 - protein, 7 aa, synthetic construct
STVPRHT

SEQ ID NO: 167544 - protein, 7 aa, synthetic construct
IVKDHSR

SEQ ID NO: 167545 - protein, 7 aa, synthetic construct
FGGADKR

SEQ ID NO: 167546 - protein, 7 aa, synthetic construct
KMPPTYL

SEQ ID NO: 167547 - protein, 7 aa, synthetic construct
GFLGQKT

SEQ ID NO: 167548 - protein, 7 aa, synthetic construct
KMAHTYV

SEQ ID NO: 167549 - protein, 7 aa, synthetic construct
KSKMENY

SEQ ID NO: 167550 - protein, 7 aa, synthetic construct
HDKIKFY

SEQ ID NO: 167551 - protein, 7 aa, synthetic construct
NFASHAK

SEQ ID NO: 167552 - protein, 7 aa, synthetic construct
LYASPKH

SEQ ID NO: 167553 - protein, 7 aa, synthetic construct
FLHTPKA

SEQ ID NO: 167554 - protein, 7 aa, synthetic construct
KSSFDPK

SEQ ID NO: 167555 - protein, 7 aa, synthetic construct
KPNNPKE

SEQ ID NO: 167556 - protein, 7 aa, synthetic construct
GLHKEMR

SEQ ID NO: 167557 - protein, 7 aa, synthetic construct
KFPNPMI

SEQ ID NO: 167558 - protein, 7 aa, synthetic construct
QKFEIPK

SEQ ID NO: 167559 - protein, 7 aa, synthetic construct
HVTNLAR

SEQ ID NO: 167560 - protein, 7 aa, synthetic construct
TRSEQLR

SEQ ID NO: 167561 - protein, 7 aa, synthetic construct
HSARTNI

SEQ ID NO: 167562 - protein, 7 aa, synthetic construct
KGAIRQD

SEQ ID NO: 167563 - protein, 7 aa, synthetic construct
MKDISKW

SEQ ID NO: 167564 - protein, 7 aa, synthetic construct
QAKQIPW

SEQ ID NO: 167565 - protein, 7 aa, synthetic construct
KEGKYIL

SEQ ID NO: 167566 - protein, 7 aa, synthetic construct
SQKLPRD

SEQ ID NO: 167567 - protein, 7 aa, synthetic construct
PDVKIRM

SEQ ID NO: 167568 - protein, 7 aa, synthetic construct
VKFSPVS

SEQ ID NO: 167569 - protein, 7 aa, synthetic construct
KFDAMGR

SEQ ID NO: 167570 - protein, 7 aa, synthetic construct
FKANITY

SEQ ID NO: 167571 - protein, 7 aa, synthetic construct
VIAHVKQ

SEQ ID NO: 167572 - protein, 7 aa, synthetic construct
IDTMRSR

SEQ ID NO: 167573 - protein, 7 aa, synthetic construct
IMVRPAA

SEQ ID NO: 167574 - protein, 7 aa, synthetic construct
MRNLEKL

SEQ ID NO: 167575 - protein, 7 aa, synthetic construct
GTIYPKG

SEQ ID NO: 167576 - protein, 7 aa, synthetic construct
VEQKRYT

SEQ ID NO: 167577 - protein, 7 aa, synthetic construct
KIRPDGQ

SEQ ID NO: 167578 - protein, 7 aa, synthetic construct
NELKRII

SEQ ID NO: 167579 - protein, 7 aa, synthetic construct
TVERTVR

SEQ ID NO: 167580 - protein, 7 aa, synthetic construct
SYKVLAN

SEQ ID NO: 167581 - protein, 7 aa, synthetic construct
ILKEQRY

SEQ ID NO: 167582 - protein, 7 aa, synthetic construct
MTRPSVM

SEQ ID NO: 167583 - protein, 7 aa, synthetic construct
DHMKKFV

SEQ ID NO: 167584 - protein, 7 aa, synthetic construct
KIDHQKY

SEQ ID NO: 167585 - protein, 7 aa, synthetic construct
VRSENVR

SEQ ID NO: 167586 - protein, 7 aa, synthetic construct
GPTREAR

SEQ ID NO: 167587 - protein, 7 aa, synthetic construct
DFKSTTR

SEQ ID NO: 167588 - protein, 7 aa, synthetic construct
FEAKVKH

SEQ ID NO: 167589 - protein, 7 aa, synthetic construct
KASKDTW

SEQ ID NO: 167590 - protein, 7 aa, synthetic construct
LERQMPK

SEQ ID NO: 167591 - protein, 7 aa, synthetic construct
DRQKVLL

SEQ ID NO: 167592 - protein, 7 aa, synthetic construct
GHSLVRS

SEQ ID NO: 167593 - protein, 7 aa, synthetic construct
DPRLREK

SEQ ID NO: 167594 - protein, 7 aa, synthetic construct
LRAIEKM

SEQ ID NO: 167595 - protein, 7 aa, synthetic construct
YEKQQSK

SEQ ID NO: 167596 - protein, 7 aa, synthetic construct
TIPSRSY

SEQ ID NO: 167597 - protein, 7 aa, synthetic construct
FTVRTQM

SEQ ID NO: 167598 - protein, 7 aa, synthetic construct
RSRPDVM

SEQ ID NO: 167599 - protein, 7 aa, synthetic construct
SIGHKSL

SEQ ID NO: 167600 - protein, 7 aa, synthetic construct
RPEGYLK

SEQ ID NO: 167601 - protein, 7 aa, synthetic construct
LTAHKYM

SEQ ID NO: 167602 - protein, 7 aa, synthetic construct
FTHSPKL

SEQ ID NO: 167603 - protein, 7 aa, synthetic construct
LIHSHKG

SEQ ID NO: 167604 - protein, 7 aa, synthetic construct
HKFTQAP

SEQ ID NO: 167605 - protein, 7 aa, synthetic construct
HKMVPAN

SEQ ID NO: 167606 - protein, 7 aa, synthetic construct
SFKHVTM

SEQ ID NO: 167607 - protein, 7 aa, synthetic construct
TVGHMAR

SEQ ID NO: 167608 - protein, 7 aa, synthetic construct
IRANVVH

SEQ ID NO: 167609 - protein, 7 aa, synthetic construct
TAKYELR

SEQ ID NO: 167610 - protein, 7 aa, synthetic construct
LKHLHVN

SEQ ID NO: 167611 - protein, 7 aa, synthetic construct
LPNKIHY

SEQ ID NO: 167612 - protein, 7 aa, synthetic construct
HTMKPHS

SEQ ID NO: 167613 - protein, 7 aa, synthetic construct
EPRTLKM

SEQ ID NO: 167614 - protein, 7 aa, synthetic construct
KLDRHVT

SEQ ID NO: 167615 - protein, 7 aa, synthetic construct
SQKNPRE

SEQ ID NO: 167616 - protein, 7 aa, synthetic construct
TLTKEKW

SEQ ID NO: 167617 - protein, 7 aa, synthetic construct
GYGAMKV

SEQ ID NO: 167618 - protein, 7 aa, synthetic construct
YPPIKHH

SEQ ID NO: 167619 - protein, 7 aa, synthetic construct
MVKPSHW

SEQ ID NO: 167620 - protein, 7 aa, synthetic construct
QFGALKN

SEQ ID NO: 167621 - protein, 7 aa, synthetic construct
NQFATPK

SEQ ID NO: 167622 - protein, 7 aa, synthetic construct
AHGPRMI

SEQ ID NO: 167623 - protein, 7 aa, synthetic construct
IERSPFK

SEQ ID NO: 167624 - protein, 7 aa, synthetic construct
YVKALNH

SEQ ID NO: 167625 - protein, 7 aa, synthetic construct
ADKLRGQ

SEQ ID NO: 167626 - protein, 7 aa, synthetic construct
RVPHDRT

SEQ ID NO: 167627 - protein, 7 aa, synthetic construct
KEGRLFA

SEQ ID NO: 167628 - protein, 7 aa, synthetic construct
TKNDSRQ

SEQ ID NO: 167629 - protein, 7 aa, synthetic construct
IQHAIKM

SEQ ID NO: 167630 - protein, 7 aa, synthetic construct
TKNIMSY

SEQ ID NO: 167631 - protein, 7 aa, synthetic construct
IHKPIMQ

SEQ ID NO: 167632 - protein, 7 aa, synthetic construct
KSHLHNP

SEQ ID NO: 167633 - protein, 7 aa, synthetic construct
MKQTVLY

SEQ ID NO: 167634 - protein, 7 aa, synthetic construct
MKNPAPW

SEQ ID NO: 167635 - protein, 7 aa, synthetic construct
THKIHQS

SEQ ID NO: 167636 - protein, 7 aa, synthetic construct
VDRVAAR

SEQ ID NO: 167637 - protein, 7 aa, synthetic construct
KTSISHM

SEQ ID NO: 167638 - protein, 7 aa, synthetic construct
TPGSRDK

SEQ ID NO: 167639 - protein, 7 aa, synthetic construct
SHPKNYI

SEQ ID NO: 167640 - protein, 7 aa, synthetic construct
QKFTLGS

SEQ ID NO: 167641 - protein, 7 aa, synthetic construct
MFGKERA

SEQ ID NO: 167642 - protein, 7 aa, synthetic construct
GDNKKTL

SEQ ID NO: 167643 - protein, 7 aa, synthetic construct
HMKINDR

SEQ ID NO: 167644 - protein, 7 aa, synthetic construct
PAEKYVK

SEQ ID NO: 167645 - protein, 7 aa, synthetic construct
HPFNAKA

SEQ ID NO: 167646 - protein, 7 aa, synthetic construct
SDQKRTL

SEQ ID NO: 167647 - protein, 7 aa, synthetic construct
TDRSLKM

SEQ ID NO: 167648 - protein, 7 aa, synthetic construct
QEPIRIK

SEQ ID NO: 167649 - protein, 7 aa, synthetic construct
LIHKHIN

SEQ ID NO: 167650 - protein, 7 aa, synthetic construct
DVKKFHV

SEQ ID NO: 167651 - protein, 7 aa, synthetic construct
YGIVIKH

SEQ ID NO: 167652 - protein, 7 aa, synthetic construct
MSKNPLT

SEQ ID NO: 167653 - protein, 7 aa, synthetic construct
NQKKDVW

SEQ ID NO: 167654 - protein, 7 aa, synthetic construct
QTPRPTH

SEQ ID NO: 167655 - protein, 7 aa, synthetic construct
HSGNFAK

SEQ ID NO: 167656 - protein, 7 aa, synthetic construct
QIHKMDK

SEQ ID NO: 167657 - protein, 7 aa, synthetic construct
SMKDWKG

SEQ ID NO: 167658 - protein, 7 aa, synthetic construct
AYPGKYV

SEQ ID NO: 167659 - protein, 7 aa, synthetic construct
AKLHTAF

SEQ ID NO: 167660 - protein, 7 aa, synthetic construct
KHFVAKE

SEQ ID NO: 167661 - protein, 7 aa, synthetic construct
FPSAHVR

SEQ ID NO: 167662 - protein, 7 aa, synthetic construct
DNPKVSK

SEQ ID NO: 167663 - protein, 7 aa, synthetic construct
FKNPIDR

SEQ ID NO: 167664 - protein, 7 aa, synthetic construct
YKQLHPI

SEQ ID NO: 167665 - protein, 7 aa, synthetic construct
AKEHPKN

SEQ ID NO: 167666 - protein, 7 aa, synthetic construct
VFGNMKA

SEQ ID NO: 167667 - protein, 7 aa, synthetic construct
YERGLVK

SEQ ID NO: 167668 - protein, 7 aa, synthetic construct
RLDKPTN

SEQ ID NO: 167669 - protein, 7 aa, synthetic construct
PTSYIKG

SEQ ID NO: 167670 - protein, 7 aa, synthetic construct
LTLVRKD

SEQ ID NO: 167671 - protein, 7 aa, synthetic construct
QDTKQVR

SEQ ID NO: 167672 - protein, 7 aa, synthetic construct
SKFMTPG

SEQ ID NO: 167673 - protein, 7 aa, synthetic construct
TMAEPRR

SEQ ID NO: 167674 - protein, 7 aa, synthetic construct
ALPRHTL

SEQ ID NO: 167675 - protein, 7 aa, synthetic construct
DKVPKYY

SEQ ID NO: 167676 - protein, 7 aa, synthetic construct
PPSERFK

SEQ ID NO: 167677 - protein, 7 aa, synthetic construct
GSIKYAN

SEQ ID NO: 167678 - protein, 7 aa, synthetic construct
ILRVDKP

SEQ ID NO: 167679 - protein, 7 aa, synthetic construct
YKNPPPQ

SEQ ID NO: 167680 - protein, 7 aa, synthetic construct
EGKAKVT

SEQ ID NO: 167681 - protein, 7 aa, synthetic construct
TPERLAR

SEQ ID NO: 167682 - protein, 7 aa, synthetic construct
RMDKYVM

SEQ ID NO: 167683 - protein, 7 aa, synthetic construct
QDRKTNF

SEQ ID NO: 167684 - protein, 7 aa, synthetic construct
GSSRLHV

SEQ ID NO: 167685 - protein, 7 aa, synthetic construct
FRAGESR

SEQ ID NO: 167686 - protein, 7 aa, synthetic construct
KTFSNFN

SEQ ID NO: 167687 - protein, 7 aa, synthetic construct
KHLSLMS

SEQ ID NO: 167688 - protein, 7 aa, synthetic construct
DIKVMRV

SEQ ID NO: 167689 - protein, 7 aa, synthetic construct
YENMKPK

SEQ ID NO: 167690 - protein, 7 aa, synthetic construct
RDPRHIN

SEQ ID NO: 167691 - protein, 7 aa, synthetic construct
LKPYAPV

SEQ ID NO: 167692 - protein, 7 aa, synthetic construct
FLHNSKM

SEQ ID NO: 167693 - protein, 7 aa, synthetic construct
IDTMKKW

SEQ ID NO: 167694 - protein, 7 aa, synthetic construct
NETRRVT

SEQ ID NO: 167695 - protein, 7 aa, synthetic construct
DKMFQNK

SEQ ID NO: 167696 - protein, 7 aa, synthetic construct
DKGLAIR

SEQ ID NO: 167697 - protein, 7 aa, synthetic construct
SAPYKDR

SEQ ID NO: 167698 - protein, 7 aa, synthetic construct
PTHKINQ

SEQ ID NO: 167699 - protein, 7 aa, synthetic construct
LKDVAKW

SEQ ID NO: 167700 - protein, 7 aa, synthetic construct
VRNPYDK

SEQ ID NO: 167701 - protein, 7 aa, synthetic construct
DIPTRVR

SEQ ID NO: 167702 - protein, 7 aa, synthetic construct
YKHPLMQ

SEQ ID NO: 167703 - protein, 7 aa, synthetic construct
VLKMDKY

SEQ ID NO: 167704 - protein, 7 aa, synthetic construct
GKVYVTQ

SEQ ID NO: 167705 - protein, 7 aa, synthetic construct
HPETKRM

SEQ ID NO: 167706 - protein, 7 aa, synthetic construct
FRTKITD

SEQ ID NO: 167707 - protein, 7 aa, synthetic construct
TPSSMRH

SEQ ID NO: 167708 - protein, 7 aa, synthetic construct
DAKGIKW

SEQ ID NO: 167709 - protein, 7 aa, synthetic construct
WVKPEKM

SEQ ID NO: 167710 - protein, 7 aa, synthetic construct
FLRTETK

SEQ ID NO: 167711 - protein, 7 aa, synthetic construct
MVAPKYM

SEQ ID NO: 167712 - protein, 7 aa, synthetic construct
TSKTYST

SEQ ID NO: 167713 - protein, 7 aa, synthetic construct
EKFTAKN

SEQ ID NO: 167714 - protein, 7 aa, synthetic construct
GYDKLRQ

SEQ ID NO: 167715 - protein, 7 aa, synthetic construct
MRLNEIK

SEQ ID NO: 167716 - protein, 7 aa, synthetic construct
GHAIPIR

SEQ ID NO: 167717 - protein, 7 aa, synthetic construct
GKQSKDQ

SEQ ID NO: 167718 - protein, 7 aa, synthetic construct
IDNIKYR

SEQ ID NO: 167719 - protein, 7 aa, synthetic construct
GRVVQER

SEQ ID NO: 167720 - protein, 7 aa, synthetic construct
MDTKSKW

SEQ ID NO: 167721 - protein, 7 aa, synthetic construct
PSPYMKG

SEQ ID NO: 167722 - protein, 7 aa, synthetic construct
MAGPRNQ

SEQ ID NO: 167723 - protein, 7 aa, synthetic construct
MKEHRFI

SEQ ID NO: 167724 - protein, 7 aa, synthetic construct
IRHDLKQ

SEQ ID NO: 167725 - protein, 7 aa, synthetic construct
FMNPANR

SEQ ID NO: 167726 - protein, 7 aa, synthetic construct
YHAGANK

SEQ ID NO: 167727 - protein, 7 aa, synthetic construct
VKLHMST

SEQ ID NO: 167728 - protein, 7 aa, synthetic construct
MTKYDIK

SEQ ID NO: 167729 - protein, 7 aa, synthetic construct
AEMKVKI

SEQ ID NO: 167730 - protein, 7 aa, synthetic construct
SGAYKGL

SEQ ID NO: 167731 - protein, 7 aa, synthetic construct
RMPPAVY

SEQ ID NO: 167732 - protein, 7 aa, synthetic construct
TENKYMK

SEQ ID NO: 167733 - protein, 7 aa, synthetic construct
DVGKVYK

SEQ ID NO: 167734 - protein, 7 aa, synthetic construct
VVQARDR

SEQ ID NO: 167735 - protein, 7 aa, synthetic construct
RTPERHN

SEQ ID NO: 167736 - protein, 7 aa, synthetic construct
EVAKVQK

SEQ ID NO: 167737 - protein, 7 aa, synthetic construct
GGPRSSI

SEQ ID NO: 167738 - protein, 7 aa, synthetic construct
NEKYLKI

SEQ ID NO: 167739 - protein, 7 aa, synthetic construct
PRSPREI

SEQ ID NO: 167740 - protein, 7 aa, synthetic construct
SIGKQFN

SEQ ID NO: 167741 - protein, 7 aa, synthetic construct
QVAKHFI

SEQ ID NO: 167742 - protein, 7 aa, synthetic construct
VFDKRNI

SEQ ID NO: 167743 - protein, 7 aa, synthetic construct
GIAGKYQ

SEQ ID NO: 167744 - protein, 7 aa, synthetic construct
GNLYTAK

SEQ ID NO: 167745 - protein, 7 aa, synthetic construct
QDTKALR

SEQ ID NO: 167746 - protein, 7 aa, synthetic construct
DTPKLFK

SEQ ID NO: 167747 - protein, 7 aa, synthetic construct
KEVRQML

SEQ ID NO: 167748 - protein, 7 aa, synthetic construct
YSKILMS

SEQ ID NO: 167749 - protein, 7 aa, synthetic construct
QTMGKYQ

SEQ ID NO: 167750 - protein, 7 aa, synthetic construct
ITFNNKA

SEQ ID NO: 167751 - protein, 7 aa, synthetic construct
DPKSYKS

SEQ ID NO: 167752 - protein, 7 aa, synthetic construct
DKPVKHI

SEQ ID NO: 167753 - protein, 7 aa, synthetic construct
YDRGIRS

SEQ ID NO: 167754 - protein, 7 aa, synthetic construct
MDLKYKT

SEQ ID NO: 167755 - protein, 7 aa, synthetic construct
MIPRVSM

SEQ ID NO: 167756 - protein, 7 aa, synthetic construct
FLGGNKH

SEQ ID NO: 167757 - protein, 7 aa, synthetic construct
VYGTTAR

SEQ ID NO: 167758 - protein, 7 aa, synthetic construct
FKSLQAH

SEQ ID NO: 167759 - protein, 7 aa, synthetic construct
PFRQSAL

SEQ ID NO: 167760 - protein, 7 aa, synthetic construct
TLAYKST

SEQ ID NO: 167761 - protein, 7 aa, synthetic construct
PDSVKVR

SEQ ID NO: 167762 - protein, 7 aa, synthetic construct
FKHAITM

SEQ ID NO: 167763 - protein, 7 aa, synthetic construct
GPVRSSH

SEQ ID NO: 167764 - protein, 7 aa, synthetic construct
QKFPTAA

SEQ ID NO: 167765 - protein, 7 aa, synthetic construct
RTDRHGI

SEQ ID NO: 167766 - protein, 7 aa, synthetic construct
YIKAPAH

SEQ ID NO: 167767 - protein, 7 aa, synthetic construct
QDRKLSL

SEQ ID NO: 167768 - protein, 7 aa, synthetic construct
DSILRKS

SEQ ID NO: 167769 - protein, 7 aa, synthetic construct
SKIHGVY

SEQ ID NO: 167770 - protein, 7 aa, synthetic construct
AEKQVRG

SEQ ID NO: 167771 - protein, 7 aa, synthetic construct
FSASDKR

SEQ ID NO: 167772 - protein, 7 aa, synthetic construct
IISTYKN

SEQ ID NO: 167773 - protein, 7 aa, synthetic construct
DKLIKHY

SEQ ID NO: 167774 - protein, 7 aa, synthetic construct
THKVDRA

SEQ ID NO: 167775 - protein, 7 aa, synthetic construct
VQKAIYQ

SEQ ID NO: 167776 - protein, 7 aa, synthetic construct
HSGAVKY

SEQ ID NO: 167777 - protein, 7 aa, synthetic construct
EKTPKYT

SEQ ID NO: 167778 - protein, 7 aa, synthetic construct
KPHQHTQ

SEQ ID NO: 167779 - protein, 7 aa, synthetic construct
HSGVIKY

SEQ ID NO: 167780 - protein, 7 aa, synthetic construct
KKMFENA

SEQ ID NO: 167781 - protein, 7 aa, synthetic construct
KFLQKNE

SEQ ID NO: 167782 - protein, 7 aa, synthetic construct
ITRPHSV

SEQ ID NO: 167783 - protein, 7 aa, synthetic construct
LKNPEKW

SEQ ID NO: 167784 - protein, 7 aa, synthetic construct
AKIHSPF

SEQ ID NO: 167785 - protein, 7 aa, synthetic construct
EKFMNKI

SEQ ID NO: 167786 - protein, 7 aa, synthetic construct
QKDKIWN

SEQ ID NO: 167787 - protein, 7 aa, synthetic construct
TFTGPKM

SEQ ID NO: 167788 - protein, 7 aa, synthetic construct
FPEKVRT

SEQ ID NO: 167789 - protein, 7 aa, synthetic construct
VKSAIHY

SEQ ID NO: 167790 - protein, 7 aa, synthetic construct
KQNPDTR

SEQ ID NO: 167791 - protein, 7 aa, synthetic construct
VKHSPPH

SEQ ID NO: 167792 - protein, 7 aa, synthetic construct
FKSPMNI

SEQ ID NO: 167793 - protein, 7 aa, synthetic construct
FFKENSR

SEQ ID NO: 167794 - protein, 7 aa, synthetic construct
ANPPKYM

SEQ ID NO: 167795 - protein, 7 aa, synthetic construct
NKLITQY

SEQ ID NO: 167796 - protein, 7 aa, synthetic construct
RSPRDSM

SEQ ID NO: 167797 - protein, 7 aa, synthetic construct
NLIHKHS

SEQ ID NO: 167798 - protein, 7 aa, synthetic construct
AFGNTHK

SEQ ID NO: 167799 - protein, 7 aa, synthetic construct
QKVNPIN

SEQ ID NO: 167800 - protein, 7 aa, synthetic construct
LKGSHLL

SEQ ID NO: 167801 - protein, 7 aa, synthetic construct
TSFNSAR

SEQ ID NO: 167802 - protein, 7 aa, synthetic construct
GAAYMRA

SEQ ID NO: 167803 - protein, 7 aa, synthetic construct
GDLKNNR

SEQ ID NO: 167804 - protein, 7 aa, synthetic construct
IQKFNER

SEQ ID NO: 167805 - protein, 7 aa, synthetic construct
SDIRNAK

SEQ ID NO: 167806 - protein, 7 aa, synthetic construct
KKDPIIW

SEQ ID NO: 167807 - protein, 7 aa, synthetic construct
YDFKKDK

SEQ ID NO: 167808 - protein, 7 aa, synthetic construct
NMFKSDK

SEQ ID NO: 167809 - protein, 7 aa, synthetic construct
YDKGFPK

SEQ ID NO: 167810 - protein, 7 aa, synthetic construct
KTKMDYL

SEQ ID NO: 167811 - protein, 7 aa, synthetic construct
VMKGLYN

SEQ ID NO: 167812 - protein, 7 aa, synthetic construct
RMPPAAM

SEQ ID NO: 167813 - protein, 7 aa, synthetic construct
KAERGLY

SEQ ID NO: 167814 - protein, 7 aa, synthetic construct
LDNRIKH

SEQ ID NO: 167815 - protein, 7 aa, synthetic construct
KMRPDHV

SEQ ID NO: 167816 - protein, 7 aa, synthetic construct
GAGKIYA

SEQ ID NO: 167817 - protein, 7 aa, synthetic construct
GKLLRFE

SEQ ID NO: 167818 - protein, 7 aa, synthetic construct
TKGIIAY

SEQ ID NO: 167819 - protein, 7 aa, synthetic construct
GTHKMFS

SEQ ID NO: 167820 - protein, 7 aa, synthetic construct
DKPQSFK

SEQ ID NO: 167821 - protein, 7 aa, synthetic construct
TQGHQAK

SEQ ID NO: 167822 - protein, 7 aa, synthetic construct
QGKHQFI

SEQ ID NO: 167823 - protein, 7 aa, synthetic construct
LAFKENR

SEQ ID NO: 167824 - protein, 7 aa, synthetic construct
FANKSNL

SEQ ID NO: 167825 - protein, 7 aa, synthetic construct
LHKMIIN

SEQ ID NO: 167826 - protein, 7 aa, synthetic construct
QVVEAKR

SEQ ID NO: 167827 - protein, 7 aa, synthetic construct
TGDMMKR

SEQ ID NO: 167828 - protein, 7 aa, synthetic construct
DTAKFKT

SEQ ID NO: 167829 - protein, 7 aa, synthetic construct
FLSNHKI

SEQ ID NO: 167830 - protein, 7 aa, synthetic construct
YAGPKTH

SEQ ID NO: 167831 - protein, 7 aa, synthetic construct
VSAREPR

SEQ ID NO: 167832 - protein, 7 aa, synthetic construct
IKHSISL

SEQ ID NO: 167833 - protein, 7 aa, synthetic construct
SKHPTLF

SEQ ID NO: 167834 - protein, 7 aa, synthetic construct
AQMKHTQ

SEQ ID NO: 167835 - protein, 7 aa, synthetic construct
PPGRIAL

SEQ ID NO: 167836 - protein, 7 aa, synthetic construct
KMNPQFM

SEQ ID NO: 167837 - protein, 7 aa, synthetic construct
VKFPAHS

SEQ ID NO: 167838 - protein, 7 aa, synthetic construct
TVDKWKQ

SEQ ID NO: 167839 - protein, 7 aa, synthetic construct
YDVKGRH

SEQ ID NO: 167840 - protein, 7 aa, synthetic construct
NFAGPKA

SEQ ID NO: 167841 - protein, 7 aa, synthetic construct
IDGKHLR

SEQ ID NO: 167842 - protein, 7 aa, synthetic construct
HPSHVRP

SEQ ID NO: 167843 - protein, 7 aa, synthetic construct
GQGKFNL

SEQ ID NO: 167844 - protein, 7 aa, synthetic construct
SAAERGK

SEQ ID NO: 167845 - protein, 7 aa, synthetic construct
WPSSMKH

SEQ ID NO: 167846 - protein, 7 aa, synthetic construct
SDSKLQR

SEQ ID NO: 167847 - protein, 7 aa, synthetic construct
LPHPAKY

SEQ ID NO: 167848 - protein, 7 aa, synthetic construct
TISHLKQ

SEQ ID NO: 167849 - protein, 7 aa, synthetic construct
IVQMEKK

SEQ ID NO: 167850 - protein, 7 aa, synthetic construct
QVEKTKW

SEQ ID NO: 167851 - protein, 7 aa, synthetic construct
HDIKMVR

SEQ ID NO: 167852 - protein, 7 aa, synthetic construct
KIRPDGY

SEQ ID NO: 167853 - protein, 7 aa, synthetic construct
LPTHAKF

SEQ ID NO: 167854 - protein, 7 aa, synthetic construct
IKYATAT

SEQ ID NO: 167855 - protein, 7 aa, synthetic construct
QRTVENR

SEQ ID NO: 167856 - protein, 7 aa, synthetic construct
QIDKRTY

SEQ ID NO: 167857 - protein, 7 aa, synthetic construct
DLKIYAK

SEQ ID NO: 167858 - protein, 7 aa, synthetic construct
NPNEIKR

SEQ ID NO: 167859 - protein, 7 aa, synthetic construct
FSKEILR

SEQ ID NO: 167860 - protein, 7 aa, synthetic construct
FSLSSKL

SEQ ID NO: 167861 - protein, 7 aa, synthetic construct
FSHAVKL

SEQ ID NO: 167862 - protein, 7 aa, synthetic construct
KFIKPVD

SEQ ID NO: 167863 - protein, 7 aa, synthetic construct
TGLHKYQ

SEQ ID NO: 167864 - protein, 7 aa, synthetic construct
GSKYNLV

SEQ ID NO: 167865 - protein, 7 aa, synthetic construct
PERTVAR

SEQ ID NO: 167866 - protein, 7 aa, synthetic construct
INPLVNR

SEQ ID NO: 167867 - protein, 7 aa, synthetic construct
NKPSLYN

SEQ ID NO: 167868 - protein, 7 aa, synthetic construct
HGGQQKV

SEQ ID NO: 167869 - protein, 7 aa, synthetic construct
EMARNVK

SEQ ID NO: 167870 - protein, 7 aa, synthetic construct
DKKFPGF

SEQ ID NO: 167871 - protein, 7 aa, synthetic construct
KMIQDSR

SEQ ID NO: 167872 - protein, 7 aa, synthetic construct
KIRDYTV

SEQ ID NO: 167873 - protein, 7 aa, synthetic construct
SNPARFI

SEQ ID NO: 167874 - protein, 7 aa, synthetic construct
GIDVRNK

SEQ ID NO: 167875 - protein, 7 aa, synthetic construct
PTDRVSR

SEQ ID NO: 167876 - protein, 7 aa, synthetic construct
YKHPVAV

SEQ ID NO: 167877 - protein, 7 aa, synthetic construct
LGGHKFL

SEQ ID NO: 167878 - protein, 7 aa, synthetic construct
ISHVTTR

SEQ ID NO: 167879 - protein, 7 aa, synthetic construct
IKHHPVV

SEQ ID NO: 167880 - protein, 7 aa, synthetic construct
ERRTVVP

SEQ ID NO: 167881 - protein, 7 aa, synthetic construct
LFKNDVR

SEQ ID NO: 167882 - protein, 7 aa, synthetic construct
GMRKDAI

SEQ ID NO: 167883 - protein, 7 aa, synthetic construct
DKISRMI

SEQ ID NO: 167884 - protein, 7 aa, synthetic construct
IPFKESR

SEQ ID NO: 167885 - protein, 7 aa, synthetic construct
TKSLYPM

SEQ ID NO: 167886 - protein, 7 aa, synthetic construct
RDHLRTV

SEQ ID NO: 167887 - protein, 7 aa, synthetic construct
NTIHRSQ

SEQ ID NO: 167888 - protein, 7 aa, synthetic construct
KEQGPKN

SEQ ID NO: 167889 - protein, 7 aa, synthetic construct
GIEKMLR

SEQ ID NO: 167890 - protein, 7 aa, synthetic construct
SERVLKI

SEQ ID NO: 167891 - protein, 7 aa, synthetic construct
FTSNVKY

SEQ ID NO: 167892 - protein, 7 aa, synthetic construct
FIGSHKT

SEQ ID NO: 167893 - protein, 7 aa, synthetic construct
YKFPNEK

SEQ ID NO: 167894 - protein, 7 aa, synthetic construct
EKVFAKS

SEQ ID NO: 167895 - protein, 7 aa, synthetic construct
QLKQIAY

SEQ ID NO: 167896 - protein, 7 aa, synthetic construct
MIEKIRM

SEQ ID NO: 167897 - protein, 7 aa, synthetic construct
ERLTSKL

SEQ ID NO: 167898 - protein, 7 aa, synthetic construct
RSHPITA

SEQ ID NO: 167899 - protein, 7 aa, synthetic construct
PQYKEKQ

SEQ ID NO: 167900 - protein, 7 aa, synthetic construct
VPKIPHQ

SEQ ID NO: 167901 - protein, 7 aa, synthetic construct
AVTRPTH

SEQ ID NO: 167902 - protein, 7 aa, synthetic construct
YLKPSSF

SEQ ID NO: 167903 - protein, 7 aa, synthetic construct
PQKHPAQ

SEQ ID NO: 167904 - protein, 7 aa, synthetic construct
RDIVTRS

SEQ ID NO: 167905 - protein, 7 aa, synthetic construct
MKFTAPS

SEQ ID NO: 167906 - protein, 7 aa, synthetic construct
MKLIHNP

SEQ ID NO: 167907 - protein, 7 aa, synthetic construct
HKIPIIS

SEQ ID NO: 167908 - protein, 7 aa, synthetic construct
VVHNIKH

SEQ ID NO: 167909 - protein, 7 aa, synthetic construct
ILMKPIN

SEQ ID NO: 167910 - protein, 7 aa, synthetic construct
VKFTQAS

SEQ ID NO: 167911 - protein, 7 aa, synthetic construct
QTNLKGW

SEQ ID NO: 167912 - protein, 7 aa, synthetic construct
IDKSLYR

SEQ ID NO: 167913 - protein, 7 aa, synthetic construct
FTLKYDK

SEQ ID NO: 167914 - protein, 7 aa, synthetic construct
PETITKK

SEQ ID NO: 167915 - protein, 7 aa, synthetic construct
LFKSASI

SEQ ID NO: 167916 - protein, 7 aa, synthetic construct
TKPITYT

SEQ ID NO: 167917 - protein, 7 aa, synthetic construct
DIKMSAR

SEQ ID NO: 167918 - protein, 7 aa, synthetic construct
GLTGHNR

SEQ ID NO: 167919 - protein, 7 aa, synthetic construct
TAERNLK

SEQ ID NO: 167920 - protein, 7 aa, synthetic construct
GAIHSNK

SEQ ID NO: 167921 - protein, 7 aa, synthetic construct
FPQQEKK

SEQ ID NO: 167922 - protein, 7 aa, synthetic construct
IFSKTTQ

SEQ ID NO: 167923 - protein, 7 aa, synthetic construct
KIINPMN

SEQ ID NO: 167924 - protein, 7 aa, synthetic construct
GTKFLGS

SEQ ID NO: 167925 - protein, 7 aa, synthetic construct
VLHKHLA

SEQ ID NO: 167926 - protein, 7 aa, synthetic construct
SKGYLTT

SEQ ID NO: 167927 - protein, 7 aa, synthetic construct
DGRLVPK

SEQ ID NO: 167928 - protein, 7 aa, synthetic construct
VSSGPRH

SEQ ID NO: 167929 - protein, 7 aa, synthetic construct
KMSVPDR

SEQ ID NO: 167930 - protein, 7 aa, synthetic construct
PRQQKDQ

SEQ ID NO: 167931 - protein, 7 aa, synthetic construct
LAHVSGR

SEQ ID NO: 167932 - protein, 7 aa, synthetic construct
MTHNREK

SEQ ID NO: 167933 - protein, 7 aa, synthetic construct
TDKTPRQ

SEQ ID NO: 167934 - protein, 7 aa, synthetic construct
TSLDSRK

SEQ ID NO: 167935 - protein, 7 aa, synthetic construct
GVDTKKW

SEQ ID NO: 167936 - protein, 7 aa, synthetic construct
FSKPIIM

SEQ ID NO: 167937 - protein, 7 aa, synthetic construct
AKFPSNN

SEQ ID NO: 167938 - protein, 7 aa, synthetic construct
KSYPLAN

SEQ ID NO: 167939 - protein, 7 aa, synthetic construct
RIKPDVH

SEQ ID NO: 167940 - protein, 7 aa, synthetic construct
IPKHPFQ

SEQ ID NO: 167941 - protein, 7 aa, synthetic construct
VKMITHV

SEQ ID NO: 167942 - protein, 7 aa, synthetic construct
SMDAQKR

SEQ ID NO: 167943 - protein, 7 aa, synthetic construct
WRKEIMM

SEQ ID NO: 167944 - protein, 7 aa, synthetic construct
RVPHVNM

SEQ ID NO: 167945 - protein, 7 aa, synthetic construct
QKDKWSN

SEQ ID NO: 167946 - protein, 7 aa, synthetic construct
AKYAVTN

SEQ ID NO: 167947 - protein, 7 aa, synthetic construct
IIREHKT

SEQ ID NO: 167948 - protein, 7 aa, synthetic construct
FVADSRK

SEQ ID NO: 167949 - protein, 7 aa, synthetic construct
KHNKDLI

SEQ ID NO: 167950 - protein, 7 aa, synthetic construct
LKMDKQW

SEQ ID NO: 167951 - protein, 7 aa, synthetic construct
GKMYTSI

SEQ ID NO: 167952 - protein, 7 aa, synthetic construct
DKSIPYR

SEQ ID NO: 167953 - protein, 7 aa, synthetic construct
SKMYTLG

SEQ ID NO: 167954 - protein, 7 aa, synthetic construct
LTPVTRH

SEQ ID NO: 167955 - protein, 7 aa, synthetic construct
MERAMKL

SEQ ID NO: 167956 - protein, 7 aa, synthetic construct
DPVKTKF

SEQ ID NO: 167957 - protein, 7 aa, synthetic construct
TVPHRSM

SEQ ID NO: 167958 - protein, 7 aa, synthetic construct
YKNALSL

SEQ ID NO: 167959 - protein, 7 aa, synthetic construct
HKERINM

SEQ ID NO: 167960 - protein, 7 aa, synthetic construct
YFGQKEK

SEQ ID NO: 167961 - protein, 7 aa, synthetic construct
MERLMKM

SEQ ID NO: 167962 - protein, 7 aa, synthetic construct
VPHPRGQ

SEQ ID NO: 167963 - protein, 7 aa, synthetic construct
AKNYTVI

SEQ ID NO: 167964 - protein, 7 aa, synthetic construct
MNKFSSI

SEQ ID NO: 167965 - protein, 7 aa, synthetic construct
KSHIDAR

SEQ ID NO: 167966 - protein, 7 aa, synthetic construct
PYLKVDK

SEQ ID NO: 167967 - protein, 7 aa, synthetic construct
KMFTSAA

SEQ ID NO: 167968 - protein, 7 aa, synthetic construct
NKFDYPK

SEQ ID NO: 167969 - protein, 7 aa, synthetic construct
DNANKIK

SEQ ID NO: 167970 - protein, 7 aa, synthetic construct
HGKLQVL

SEQ ID NO: 167971 - protein, 7 aa, synthetic construct
KKPFPEL

SEQ ID NO: 167972 - protein, 7 aa, synthetic construct
GKFNILS

SEQ ID NO: 167973 - protein, 7 aa, synthetic construct
RVDHVRV

SEQ ID NO: 167974 - protein, 7 aa, synthetic construct
HSINYKA

SEQ ID NO: 167975 - protein, 7 aa, synthetic construct
PMKKYDV

SEQ ID NO: 167976 - protein, 7 aa, synthetic construct
GDAKIQR

SEQ ID NO: 167977 - protein, 7 aa, synthetic construct
GAIPRAQ

SEQ ID NO: 167978 - protein, 7 aa, synthetic construct
VPSVHTR

SEQ ID NO: 167979 - protein, 7 aa, synthetic construct
VKHSVAH

SEQ ID NO: 167980 - protein, 7 aa, synthetic construct
KAKEHNW

SEQ ID NO: 167981 - protein, 7 aa, synthetic construct
KMANYIA

SEQ ID NO: 167982 - protein, 7 aa, synthetic construct
KLSYTSV

SEQ ID NO: 167983 - protein, 7 aa, synthetic construct
DKMPYAR

SEQ ID NO: 167984 - protein, 7 aa, synthetic construct
THDRILK

SEQ ID NO: 167985 - protein, 7 aa, synthetic construct
WQKVEKM

SEQ ID NO: 167986 - protein, 7 aa, synthetic construct
PVKTYRE

SEQ ID NO: 167987 - protein, 7 aa, synthetic construct
AMYNAKV

SEQ ID NO: 167988 - protein, 7 aa, synthetic construct
LMGNTKW

SEQ ID NO: 167989 - protein, 7 aa, synthetic construct
QLGQDRK

SEQ ID NO: 167990 - protein, 7 aa, synthetic construct
QSAPKYQ

SEQ ID NO: 167991 - protein, 7 aa, synthetic construct
IKFSGER

SEQ ID NO: 167992 - protein, 7 aa, synthetic construct
DVKSILR

SEQ ID NO: 167993 - protein, 7 aa, synthetic construct
HFGNPKM

SEQ ID NO: 167994 - protein, 7 aa, synthetic construct
EPNSKIR

SEQ ID NO: 167995 - protein, 7 aa, synthetic construct
TDKVIRH

SEQ ID NO: 167996 - protein, 7 aa, synthetic construct
LQKLQAY

SEQ ID NO: 167997 - protein, 7 aa, synthetic construct
EIAKSRT

SEQ ID NO: 167998 - protein, 7 aa, synthetic construct
IFQKSTM

SEQ ID NO: 167999 - protein, 7 aa, synthetic construct
ERITKQL

SEQ ID NO: 168000 - protein, 7 aa, synthetic construct
SNPARDK

SEQ ID NO: 168001 - protein, 7 aa, synthetic construct
SRAAPKD

SEQ ID NO: 168002 - protein, 7 aa, synthetic construct
FMKPVSQ

SEQ ID NO: 168003 - protein, 7 aa, synthetic construct
PKHILRE

SEQ ID NO: 168004 - protein, 7 aa, synthetic construct
KFLPTTA

SEQ ID NO: 168005 - protein, 7 aa, synthetic construct
HKAIDPR

SEQ ID NO: 168006 - protein, 7 aa, synthetic construct
TDIKYKI

SEQ ID NO: 168007 - protein, 7 aa, synthetic construct
QYEKPKG

SEQ ID NO: 168008 - protein, 7 aa, synthetic construct
PDKMRGQ

SEQ ID NO: 168009 - protein, 7 aa, synthetic construct
LMGLQKH

SEQ ID NO: 168010 - protein, 7 aa, synthetic construct
VAVEARK

SEQ ID NO: 168011 - protein, 7 aa, synthetic construct
DPNMKNR

SEQ ID NO: 168012 - protein, 7 aa, synthetic construct
KRIPDLV

SEQ ID NO: 168013 - protein, 7 aa, synthetic construct
HKHPGPG

SEQ ID NO: 168014 - protein, 7 aa, synthetic construct
IAKMPHN

SEQ ID NO: 168015 - protein, 7 aa, synthetic construct
TNKFDIK

SEQ ID NO: 168016 - protein, 7 aa, synthetic construct
PKYQVKD

SEQ ID NO: 168017 - protein, 7 aa, synthetic construct
RTVKPQD

SEQ ID NO: 168018 - protein, 7 aa, synthetic construct
LADIKRY

SEQ ID NO: 168019 - protein, 7 aa, synthetic construct
RNPHHSV

SEQ ID NO: 168020 - protein, 7 aa, synthetic construct
QKSMEHR

SEQ ID NO: 168021 - protein, 7 aa, synthetic construct
ALKPHSY

SEQ ID NO: 168022 - protein, 7 aa, synthetic construct
GDRGVIK

SEQ ID NO: 168023 - protein, 7 aa, synthetic construct
TNRPLSH

SEQ ID NO: 168024 - protein, 7 aa, synthetic construct
RTPTEYK

SEQ ID NO: 168025 - protein, 7 aa, synthetic construct
HLHGAKA

SEQ ID NO: 168026 - protein, 7 aa, synthetic construct
VSTPRHL

SEQ ID NO: 168027 - protein, 7 aa, synthetic construct
KFNPNIL

SEQ ID NO: 168028 - protein, 7 aa, synthetic construct
MTTQSHR

SEQ ID NO: 168029 - protein, 7 aa, synthetic construct
TFKTYEK

SEQ ID NO: 168030 - protein, 7 aa, synthetic construct
GFSREKV

SEQ ID NO: 168031 - protein, 7 aa, synthetic construct
TEKAPRS

SEQ ID NO: 168032 - protein, 7 aa, synthetic construct
DKMGVKW

SEQ ID NO: 168033 - protein, 7 aa, synthetic construct
HRGVEKT

SEQ ID NO: 168034 - protein, 7 aa, synthetic construct
LPRHVHV

SEQ ID NO: 168035 - protein, 7 aa, synthetic construct
ASRRVDP

SEQ ID NO: 168036 - protein, 7 aa, synthetic construct
AKGTDRH

SEQ ID NO: 168037 - protein, 7 aa, synthetic construct
KIEKGWA

SEQ ID NO: 168038 - protein, 7 aa, synthetic construct
TTDLRRI

SEQ ID NO: 168039 - protein, 7 aa, synthetic construct
AMPKHQY

SEQ ID NO: 168040 - protein, 7 aa, synthetic construct
KMLRPAE

SEQ ID NO: 168041 - protein, 7 aa, synthetic construct
LDPKPTK

SEQ ID NO: 168042 - protein, 7 aa, synthetic construct
KSHPNFL

SEQ ID NO: 168043 - protein, 7 aa, synthetic construct
QGVKYNI

SEQ ID NO: 168044 - protein, 7 aa, synthetic construct
DFKPQVK

SEQ ID NO: 168045 - protein, 7 aa, synthetic construct
GTPTYKN

SEQ ID NO: 168046 - protein, 7 aa, synthetic construct
MDKPFAK

SEQ ID NO: 168047 - protein, 7 aa, synthetic construct
DRPQTKL

SEQ ID NO: 168048 - protein, 7 aa, synthetic construct
GQKLYLS

SEQ ID NO: 168049 - protein, 7 aa, synthetic construct
MLGHVKI

SEQ ID NO: 168050 - protein, 7 aa, synthetic construct
GMVKYAS

SEQ ID NO: 168051 - protein, 7 aa, synthetic construct
MKMNPFS

SEQ ID NO: 168052 - protein, 7 aa, synthetic construct
MKFPAQM

SEQ ID NO: 168053 - protein, 7 aa, synthetic construct
SFGNKFQ

SEQ ID NO: 168054 - protein, 7 aa, synthetic construct
VPRGVQH

SEQ ID NO: 168055 - protein, 7 aa, synthetic construct
DKYVGPK

SEQ ID NO: 168056 - protein, 7 aa, synthetic construct
TETKKFY

SEQ ID NO: 168057 - protein, 7 aa, synthetic construct
GMGKIYS

SEQ ID NO: 168058 - protein, 7 aa, synthetic construct
PSALKRD

SEQ ID NO: 168059 - protein, 7 aa, synthetic construct
FNPRMEK

SEQ ID NO: 168060 - protein, 7 aa, synthetic construct
TKSLIGY

SEQ ID NO: 168061 - protein, 7 aa, synthetic construct
DANMKTR

SEQ ID NO: 168062 - protein, 7 aa, synthetic construct
TVAHPKF

SEQ ID NO: 168063 - protein, 7 aa, synthetic construct
NVEKRFV

SEQ ID NO: 168064 - protein, 7 aa, synthetic construct
EKVPRFT

SEQ ID NO: 168065 - protein, 7 aa, synthetic construct
GREARDK

SEQ ID NO: 168066 - protein, 7 aa, synthetic construct
LLKNYMN

SEQ ID NO: 168067 - protein, 7 aa, synthetic construct
FKFKLSD

SEQ ID NO: 168068 - protein, 7 aa, synthetic construct
TPHPKHQ

SEQ ID NO: 168069 - protein, 7 aa, synthetic construct
RVAHPPV

SEQ ID NO: 168070 - protein, 7 aa, synthetic construct
VSIVRKD

SEQ ID NO: 168071 - protein, 7 aa, synthetic construct
QKPVHLF

SEQ ID NO: 168072 - protein, 7 aa, synthetic construct
ADRQLAK

SEQ ID NO: 168073 - protein, 7 aa, synthetic construct
NPPHSMK

SEQ ID NO: 168074 - protein, 7 aa, synthetic construct
ENKLIKH

SEQ ID NO: 168075 - protein, 7 aa, synthetic construct
ILENRFK

SEQ ID NO: 168076 - protein, 7 aa, synthetic construct
DKFPKSL

SEQ ID NO: 168077 - protein, 7 aa, synthetic construct
TKSDHKW

SEQ ID NO: 168078 - protein, 7 aa, synthetic construct
EAAKFKI

SEQ ID NO: 168079 - protein, 7 aa, synthetic construct
RVREIGV

SEQ ID NO: 168080 - protein, 7 aa, synthetic construct
IDLKSMR

SEQ ID NO: 168081 - protein, 7 aa, synthetic construct
WKHTLIA

SEQ ID NO: 168082 - protein, 7 aa, synthetic construct
YVTKHNT

SEQ ID NO: 168083 - protein, 7 aa, synthetic construct
AIHGAKS

SEQ ID NO: 168084 - protein, 7 aa, synthetic construct
PGVSKHG

SEQ ID NO: 168085 - protein, 7 aa, synthetic construct
ERNQLKI

SEQ ID NO: 168086 - protein, 7 aa, synthetic construct
KHIPINA

SEQ ID NO: 168087 - protein, 7 aa, synthetic construct
KRDVYNP

SEQ ID NO: 168088 - protein, 7 aa, synthetic construct
MEKVLRH

SEQ ID NO: 168089 - protein, 7 aa, synthetic construct
IIKNYTA

SEQ ID NO: 168090 - protein, 7 aa, synthetic construct
KELYGKN

SEQ ID NO: 168091 - protein, 7 aa, synthetic construct
FMPKISM

SEQ ID NO: 168092 - protein, 7 aa, synthetic construct
IHPIKFT

SEQ ID NO: 168093 - protein, 7 aa, synthetic construct
TYANIRQ

SEQ ID NO: 168094 - protein, 7 aa, synthetic construct
VAKSPRE

SEQ ID NO: 168095 - protein, 7 aa, synthetic construct
IVDARNK

SEQ ID NO: 168096 - protein, 7 aa, synthetic construct
WKPINSH

SEQ ID NO: 168097 - protein, 7 aa, synthetic construct
NVHSIPR

SEQ ID NO: 168098 - protein, 7 aa, synthetic construct
DSARIQK

SEQ ID NO: 168099 - protein, 7 aa, synthetic construct
ANKPKDF

SEQ ID NO: 168100 - protein, 7 aa, synthetic construct
APVEKRF

SEQ ID NO: 168101 - protein, 7 aa, synthetic construct
MKQVPPN

SEQ ID NO: 168102 - protein, 7 aa, synthetic construct
LAEQRPR

SEQ ID NO: 168103 - protein, 7 aa, synthetic construct
TKLYQGT

SEQ ID NO: 168104 - protein, 7 aa, synthetic construct
KFGADNR

SEQ ID NO: 168105 - protein, 7 aa, synthetic construct
QAGPKFN

SEQ ID NO: 168106 - protein, 7 aa, synthetic construct
KYIKEAM

SEQ ID NO: 168107 - protein, 7 aa, synthetic construct
YMDKARS

SEQ ID NO: 168108 - protein, 7 aa, synthetic construct
FKMTPGN

SEQ ID NO: 168109 - protein, 7 aa, synthetic construct
DKNKPVW

SEQ ID NO: 168110 - protein, 7 aa, synthetic construct
SVHPKSM

SEQ ID NO: 168111 - protein, 7 aa, synthetic construct
IPSAVRH

SEQ ID NO: 168112 - protein, 7 aa, synthetic construct
YKNPIPF

SEQ ID NO: 168113 - protein, 7 aa, synthetic construct
KDPGFAR

SEQ ID NO: 168114 - protein, 7 aa, synthetic construct
DTNQTKK

SEQ ID NO: 168115 - protein, 7 aa, synthetic construct
FDRAKAL

SEQ ID NO: 168116 - protein, 7 aa, synthetic construct
SFKIEPR

SEQ ID NO: 168117 - protein, 7 aa, synthetic construct
DKQLQRG

SEQ ID NO: 168118 - protein, 7 aa, synthetic construct
KPHQTDK

SEQ ID NO: 168119 - protein, 7 aa, synthetic construct
NKHGVFS

SEQ ID NO: 168120 - protein, 7 aa, synthetic construct
HTAGVRT

SEQ ID NO: 168121 - protein, 7 aa, synthetic construct
TEPNRAK

SEQ ID NO: 168122 - protein, 7 aa, synthetic construct
ALKRELQ

SEQ ID NO: 168123 - protein, 7 aa, synthetic construct
RMEKGLY

SEQ ID NO: 168124 - protein, 7 aa, synthetic construct
REVRLNT

SEQ ID NO: 168125 - protein, 7 aa, synthetic construct
TDKIYLK

SEQ ID NO: 168126 - protein, 7 aa, synthetic construct
TKESTKW

SEQ ID NO: 168127 - protein, 7 aa, synthetic construct
DKFIKNM

SEQ ID NO: 168128 - protein, 7 aa, synthetic construct
TEITKPR

SEQ ID NO: 168129 - protein, 7 aa, synthetic construct
YLSASHK

SEQ ID NO: 168130 - protein, 7 aa, synthetic construct
SLHKLYG

SEQ ID NO: 168131 - protein, 7 aa, synthetic construct
HSGNNKL

SEQ ID NO: 168132 - protein, 7 aa, synthetic construct
KRQANDI

SEQ ID NO: 168133 - protein, 7 aa, synthetic construct
FHDKGIR

SEQ ID NO: 168134 - protein, 7 aa, synthetic construct
YAKIELR

SEQ ID NO: 168135 - protein, 7 aa, synthetic construct
QKLQTLY

SEQ ID NO: 168136 - protein, 7 aa, synthetic construct
TTYGSVR

SEQ ID NO: 168137 - protein, 7 aa, synthetic construct
AEKMRIT

SEQ ID NO: 168138 - protein, 7 aa, synthetic construct
DALKKYM

SEQ ID NO: 168139 - protein, 7 aa, synthetic construct
FMNAIKH

SEQ ID NO: 168140 - protein, 7 aa, synthetic construct
FSKPLSV

SEQ ID NO: 168141 - protein, 7 aa, synthetic construct
FKGFPQV

SEQ ID NO: 168142 - protein, 7 aa, synthetic construct
ASYPKSQ

SEQ ID NO: 168143 - protein, 7 aa, synthetic construct
INKHLFN

SEQ ID NO: 168144 - protein, 7 aa, synthetic construct
SSLERRV

SEQ ID NO: 168145 - protein, 7 aa, synthetic construct
PAHKAYT

SEQ ID NO: 168146 - protein, 7 aa, synthetic construct
RFQKDTA

SEQ ID NO: 168147 - protein, 7 aa, synthetic construct
LDLMKRI

SEQ ID NO: 168148 - protein, 7 aa, synthetic construct
QSGVHVR

SEQ ID NO: 168149 - protein, 7 aa, synthetic construct
STHKITY

SEQ ID NO: 168150 - protein, 7 aa, synthetic construct
VPNKIHF

SEQ ID NO: 168151 - protein, 7 aa, synthetic construct
WTSKEVK

SEQ ID NO: 168152 - protein, 7 aa, synthetic construct
KVKAEYY

SEQ ID NO: 168153 - protein, 7 aa, synthetic construct
STAYKAT

SEQ ID NO: 168154 - protein, 7 aa, synthetic construct
SRHDIKA

SEQ ID NO: 168155 - protein, 7 aa, synthetic construct
KELASRQ

SEQ ID NO: 168156 - protein, 7 aa, synthetic construct
ISVKPSY

SEQ ID NO: 168157 - protein, 7 aa, synthetic construct
LHKHINV

SEQ ID NO: 168158 - protein, 7 aa, synthetic construct
EKQMLAR

SEQ ID NO: 168159 - protein, 7 aa, synthetic construct
GAEKFVR

SEQ ID NO: 168160 - protein, 7 aa, synthetic construct
MDSRTQK

SEQ ID NO: 168161 - protein, 7 aa, synthetic construct
FSLKASL

SEQ ID NO: 168162 - protein, 7 aa, synthetic construct
QVHNVKF

SEQ ID NO: 168163 - protein, 7 aa, synthetic construct
VTNNRDK

SEQ ID NO: 168164 - protein, 7 aa, synthetic construct
WTKPLSP

SEQ ID NO: 168165 - protein, 7 aa, synthetic construct
TTDRMTR

SEQ ID NO: 168166 - protein, 7 aa, synthetic construct
SGHPVTR

SEQ ID NO: 168167 - protein, 7 aa, synthetic construct
PITRQAQ

SEQ ID NO: 168168 - protein, 7 aa, synthetic construct
VDRNPFK

SEQ ID NO: 168169 - protein, 7 aa, synthetic construct
LLHSNKL

SEQ ID NO: 168170 - protein, 7 aa, synthetic construct
YKHSIIS

SEQ ID NO: 168171 - protein, 7 aa, synthetic construct
KMFNNDK

SEQ ID NO: 168172 - protein, 7 aa, synthetic construct
MIGPRTI

SEQ ID NO: 168173 - protein, 7 aa, synthetic construct
RTIPLEK

SEQ ID NO: 168174 - protein, 7 aa, synthetic construct
KTHQFNP

SEQ ID NO: 168175 - protein, 7 aa, synthetic construct
FKPPATF

SEQ ID NO: 168176 - protein, 7 aa, synthetic construct
ISKFPVH

SEQ ID NO: 168177 - protein, 7 aa, synthetic construct
THSGPPR

SEQ ID NO: 168178 - protein, 7 aa, synthetic construct
VDRAVSK

SEQ ID NO: 168179 - protein, 7 aa, synthetic construct
LDALRKM

SEQ ID NO: 168180 - protein, 7 aa, synthetic construct
IMAHPKL

SEQ ID NO: 168181 - protein, 7 aa, synthetic construct
PEKVSKQ

SEQ ID NO: 168182 - protein, 7 aa, synthetic construct
PNQRNQP

SEQ ID NO: 168183 - protein, 7 aa, synthetic construct
LAKNLVY

SEQ ID NO: 168184 - protein, 7 aa, synthetic construct
RSREDIK

SEQ ID NO: 168185 - protein, 7 aa, synthetic construct
DTRIKAL

SEQ ID NO: 168186 - protein, 7 aa, synthetic construct
HDKKIYT

SEQ ID NO: 168187 - protein, 7 aa, synthetic construct
PPVQERR

SEQ ID NO: 168188 - protein, 7 aa, synthetic construct
IAFPKAN

SEQ ID NO: 168189 - protein, 7 aa, synthetic construct
AFKPVPH

SEQ ID NO: 168190 - protein, 7 aa, synthetic construct
GEAKMIK

SEQ ID NO: 168191 - protein, 7 aa, synthetic construct
DMRIMKT

SEQ ID NO: 168192 - protein, 7 aa, synthetic construct
VRPHDQK

SEQ ID NO: 168193 - protein, 7 aa, synthetic construct
KSHVINM

SEQ ID NO: 168194 - protein, 7 aa, synthetic construct
RHSQVTI

SEQ ID NO: 168195 - protein, 7 aa, synthetic construct
YKQIMMN

SEQ ID NO: 168196 - protein, 7 aa, synthetic construct
VHTVARL

SEQ ID NO: 168197 - protein, 7 aa, synthetic construct
ADKHPRG

SEQ ID NO: 168198 - protein, 7 aa, synthetic construct
IEVIKSK

SEQ ID NO: 168199 - protein, 7 aa, synthetic construct
RLEHIKM

SEQ ID NO: 168200 - protein, 7 aa, synthetic construct
FHKVTSL

SEQ ID NO: 168201 - protein, 7 aa, synthetic construct
EKAILKY

SEQ ID NO: 168202 - protein, 7 aa, synthetic construct
HTGALKF

SEQ ID NO: 168203 - protein, 7 aa, synthetic construct
HKHPTYA

SEQ ID NO: 168204 - protein, 7 aa, synthetic construct
KNLPGFV

SEQ ID NO: 168205 - protein, 7 aa, synthetic construct
HSDVRLK

SEQ ID NO: 168206 - protein, 7 aa, synthetic construct
REAHLKI

SEQ ID NO: 168207 - protein, 7 aa, synthetic construct
NKFVSPH

SEQ ID NO: 168208 - protein, 7 aa, synthetic construct
YTAKHDK

SEQ ID NO: 168209 - protein, 7 aa, synthetic construct
FLKQNVL

SEQ ID NO: 168210 - protein, 7 aa, synthetic construct
SATYKHI

SEQ ID NO: 168211 - protein, 7 aa, synthetic construct
RDVGFKT

SEQ ID NO: 168212 - protein, 7 aa, synthetic construct
TTHGPKT

SEQ ID NO: 168213 - protein, 7 aa, synthetic construct
IPISHKY

SEQ ID NO: 168214 - protein, 7 aa, synthetic construct
AQMPRNQ

SEQ ID NO: 168215 - protein, 7 aa, synthetic construct
MEKFPKF

SEQ ID NO: 168216 - protein, 7 aa, synthetic construct
FLGQIKM

SEQ ID NO: 168217 - protein, 7 aa, synthetic construct
YDSKRLH

SEQ ID NO: 168218 - protein, 7 aa, synthetic construct
EIKSALR

SEQ ID NO: 168219 - protein, 7 aa, synthetic construct
IREITKH

SEQ ID NO: 168220 - protein, 7 aa, synthetic construct
NLPHASK

SEQ ID NO: 168221 - protein, 7 aa, synthetic construct
IHKTPPN

SEQ ID NO: 168222 - protein, 7 aa, synthetic construct
ADKNMGR

SEQ ID NO: 168223 - protein, 7 aa, synthetic construct
DTKNKAW

SEQ ID NO: 168224 - protein, 7 aa, synthetic construct
TDKIVRL

SEQ ID NO: 168225 - protein, 7 aa, synthetic construct
QSEHKPR

SEQ ID NO: 168226 - protein, 7 aa, synthetic construct
ALKNTIY

SEQ ID NO: 168227 - protein, 7 aa, synthetic construct
QVKMQVY

SEQ ID NO: 168228 - protein, 7 aa, synthetic construct
YTKIRAD

SEQ ID NO: 168229 - protein, 7 aa, synthetic construct
AQGGIKH

SEQ ID NO: 168230 - protein, 7 aa, synthetic construct
VHKIVSM

SEQ ID NO: 168231 - protein, 7 aa, synthetic construct
LFKSLSQ

SEQ ID NO: 168232 - protein, 7 aa, synthetic construct
ISSAHPR

SEQ ID NO: 168233 - protein, 7 aa, synthetic construct
KFAHNTI

SEQ ID NO: 168234 - protein, 7 aa, synthetic construct
RPEKYIV

SEQ ID NO: 168235 - protein, 7 aa, synthetic construct
MFKPSAL

SEQ ID NO: 168236 - protein, 7 aa, synthetic construct
HVREIRN

SEQ ID NO: 168237 - protein, 7 aa, synthetic construct
QTKHFNV

SEQ ID NO: 168238 - protein, 7 aa, synthetic construct
TKSFDKH

SEQ ID NO: 168239 - protein, 7 aa, synthetic construct
DMKIKIY

SEQ ID NO: 168240 - protein, 7 aa, synthetic construct
KDMITPR

SEQ ID NO: 168241 - protein, 7 aa, synthetic construct
HKGGPLF

SEQ ID NO: 168242 - protein, 7 aa, synthetic construct
GFKPHNI

SEQ ID NO: 168243 - protein, 7 aa, synthetic construct
STHNISK

SEQ ID NO: 168244 - protein, 7 aa, synthetic construct
DKEKFRG

SEQ ID NO: 168245 - protein, 7 aa, synthetic construct
GSDRRTV

SEQ ID NO: 168246 - protein, 7 aa, synthetic construct
LLQRDKV

SEQ ID NO: 168247 - protein, 7 aa, synthetic construct
PPDRKMQ

SEQ ID NO: 168248 - protein, 7 aa, synthetic construct
YMKPTIL

SEQ ID NO: 168249 - protein, 7 aa, synthetic construct
KKSIDFT

SEQ ID NO: 168250 - protein, 7 aa, synthetic construct
YPHTMKL

SEQ ID NO: 168251 - protein, 7 aa, synthetic construct
GDTKTMR

SEQ ID NO: 168252 - protein, 7 aa, synthetic construct
DKSKIYI

SEQ ID NO: 168253 - protein, 7 aa, synthetic construct
DINKLRI

SEQ ID NO: 168254 - protein, 7 aa, synthetic construct
DRSLVKH

SEQ ID NO: 168255 - protein, 7 aa, synthetic construct
VMPPRHM

SEQ ID NO: 168256 - protein, 7 aa, synthetic construct
KDTRGSY

SEQ ID NO: 168257 - protein, 7 aa, synthetic construct
ETTKLRI

SEQ ID NO: 168258 - protein, 7 aa, synthetic construct
TLDRVQR

SEQ ID NO: 168259 - protein, 7 aa, synthetic construct
NDKNQRV

SEQ ID NO: 168260 - protein, 7 aa, synthetic construct
VRATDNR

SEQ ID NO: 168261 - protein, 7 aa, synthetic construct
GNDRVSK

SEQ ID NO: 168262 - protein, 7 aa, synthetic construct
MQDINRK

SEQ ID NO: 168263 - protein, 7 aa, synthetic construct
VPTHSMR

SEQ ID NO: 168264 - protein, 7 aa, synthetic construct
FKQPMPL

SEQ ID NO: 168265 - protein, 7 aa, synthetic construct
RMEKNFT

SEQ ID NO: 168266 - protein, 7 aa, synthetic construct
GDRIKVF

SEQ ID NO: 168267 - protein, 7 aa, synthetic construct
IKYAEKL

SEQ ID NO: 168268 - protein, 7 aa, synthetic construct
MEPIKIR

SEQ ID NO: 168269 - protein, 7 aa, synthetic construct
SSKPYST

SEQ ID NO: 168270 - protein, 7 aa, synthetic construct
DTAQKIK

SEQ ID NO: 168271 - protein, 7 aa, synthetic construct
IDAKSRW

SEQ ID NO: 168272 - protein, 7 aa, synthetic construct
KQKPDFF

SEQ ID NO: 168273 - protein, 7 aa, synthetic construct
RVVKVEH

SEQ ID NO: 168274 - protein, 7 aa, synthetic construct
YDTKILR

SEQ ID NO: 168275 - protein, 7 aa, synthetic construct
IKHPATT

SEQ ID NO: 168276 - protein, 7 aa, synthetic construct
DTPRSTK

SEQ ID NO: 168277 - protein, 7 aa, synthetic construct
MDRATQK

SEQ ID NO: 168278 - protein, 7 aa, synthetic construct
SAKMIYA

SEQ ID NO: 168279 - protein, 7 aa, synthetic construct
GMDIQKK

SEQ ID NO: 168280 - protein, 7 aa, synthetic construct
HKAIQTY

SEQ ID NO: 168281 - protein, 7 aa, synthetic construct
DAKIVRY

SEQ ID NO: 168282 - protein, 7 aa, synthetic construct
FAPKESR

SEQ ID NO: 168283 - protein, 7 aa, synthetic construct
VKGAPFN

SEQ ID NO: 168284 - protein, 7 aa, synthetic construct
QGKVEPR

SEQ ID NO: 168285 - protein, 7 aa, synthetic construct
NEALKVR

SEQ ID NO: 168286 - protein, 7 aa, synthetic construct
VKRVEPE

SEQ ID NO: 168287 - protein, 7 aa, synthetic construct
DKIQRIL

SEQ ID NO: 168288 - protein, 7 aa, synthetic construct
TKQIDHR

SEQ ID NO: 168289 - protein, 7 aa, synthetic construct
AEGKIKV

SEQ ID NO: 168290 - protein, 7 aa, synthetic construct
KYKNDVL

SEQ ID NO: 168291 - protein, 7 aa, synthetic construct
AIDRMRS

SEQ ID NO: 168292 - protein, 7 aa, synthetic construct
NAPEKRF

SEQ ID NO: 168293 - protein, 7 aa, synthetic construct
PSVRAGQ

SEQ ID NO: 168294 - protein, 7 aa, synthetic construct
HIHGNKM

SEQ ID NO: 168295 - protein, 7 aa, synthetic construct
TAFDTKK

SEQ ID NO: 168296 - protein, 7 aa, synthetic construct
YGAMVPR

SEQ ID NO: 168297 - protein, 7 aa, synthetic construct
QTGYKLT

SEQ ID NO: 168298 - protein, 7 aa, synthetic construct
HSAGPNR

SEQ ID NO: 168299 - protein, 7 aa, synthetic construct
TLDKRHL

SEQ ID NO: 168300 - protein, 7 aa, synthetic construct
GGVHFKS

SEQ ID NO: 168301 - protein, 7 aa, synthetic construct
PSDVRKF

SEQ ID NO: 168302 - protein, 7 aa, synthetic construct
KDKPSFL

SEQ ID NO: 168303 - protein, 7 aa, synthetic construct
YAHIASK

SEQ ID NO: 168304 - protein, 7 aa, synthetic construct
ATKFQSN

SEQ ID NO: 168305 - protein, 7 aa, synthetic construct
LDRLKHL

SEQ ID NO: 168306 - protein, 7 aa, synthetic construct
IHGNNKL

SEQ ID NO: 168307 - protein, 7 aa, synthetic construct
GTVLKYS

SEQ ID NO: 168308 - protein, 7 aa, synthetic construct
KPHNPTN

SEQ ID NO: 168309 - protein, 7 aa, synthetic construct
VQVRQVV

SEQ ID NO: 168310 - protein, 7 aa, synthetic construct
GKQLYIS

SEQ ID NO: 168311 - protein, 7 aa, synthetic construct
NPHSFKP

SEQ ID NO: 168312 - protein, 7 aa, synthetic construct
YPHTSVR

SEQ ID NO: 168313 - protein, 7 aa, synthetic construct
FDAARLK

SEQ ID NO: 168314 - protein, 7 aa, synthetic construct
SHKPINI

SEQ ID NO: 168315 - protein, 7 aa, synthetic construct
KMHVTSQ

SEQ ID NO: 168316 - protein, 7 aa, synthetic construct
LMDKFSR

SEQ ID NO: 168317 - protein, 7 aa, synthetic construct
QKFPLVA

SEQ ID NO: 168318 - protein, 7 aa, synthetic construct
LKEHRFM

SEQ ID NO: 168319 - protein, 7 aa, synthetic construct
VPYNVKT

SEQ ID NO: 168320 - protein, 7 aa, synthetic construct
VAFKPSV

SEQ ID NO: 168321 - protein, 7 aa, synthetic construct
GSVHGGK

SEQ ID NO: 168322 - protein, 7 aa, synthetic construct
PDRIAKF

SEQ ID NO: 168323 - protein, 7 aa, synthetic construct
KLTHYTQ

SEQ ID NO: 168324 - protein, 7 aa, synthetic construct
PYSKGST

SEQ ID NO: 168325 - protein, 7 aa, synthetic construct
LSRPISL

SEQ ID NO: 168326 - protein, 7 aa, synthetic construct
KSAKPTD

SEQ ID NO: 168327 - protein, 7 aa, synthetic construct
KSSHDRM

SEQ ID NO: 168328 - protein, 7 aa, synthetic construct
SHPKTYI

SEQ ID NO: 168329 - protein, 7 aa, synthetic construct
DKNLVRT

SEQ ID NO: 168330 - protein, 7 aa, synthetic construct
YLKLEKM

SEQ ID NO: 168331 - protein, 7 aa, synthetic construct
SKPHPHM

SEQ ID NO: 168332 - protein, 7 aa, synthetic construct
TSSVHTR

SEQ ID NO: 168333 - protein, 7 aa, synthetic construct
SFDKRQT

SEQ ID NO: 168334 - protein, 7 aa, synthetic construct
GKTFTNI

SEQ ID NO: 168335 - protein, 7 aa, synthetic construct
AVGYQKI

SEQ ID NO: 168336 - protein, 7 aa, synthetic construct
TLHGPKH

SEQ ID NO: 168337 - protein, 7 aa, synthetic construct
MFKSISQ

SEQ ID NO: 168338 - protein, 7 aa, synthetic construct
LFKSSIV

SEQ ID NO: 168339 - protein, 7 aa, synthetic construct
EQKTNQR

SEQ ID NO: 168340 - protein, 7 aa, synthetic construct
FTVHNKI

SEQ ID NO: 168341 - protein, 7 aa, synthetic construct
FKVPHIS

SEQ ID NO: 168342 - protein, 7 aa, synthetic construct
SIHKPIM

SEQ ID NO: 168343 - protein, 7 aa, synthetic construct
NINRLEK

SEQ ID NO: 168344 - protein, 7 aa, synthetic construct
IVTSKHY

SEQ ID NO: 168345 - protein, 7 aa, synthetic construct
KFDINQR

SEQ ID NO: 168346 - protein, 7 aa, synthetic construct
MMKPMQY

SEQ ID NO: 168347 - protein, 7 aa, synthetic construct
HSAGVGR

SEQ ID NO: 168348 - protein, 7 aa, synthetic construct
RQEKFNI

SEQ ID NO: 168349 - protein, 7 aa, synthetic construct
AERTKLY

SEQ ID NO: 168350 - protein, 7 aa, synthetic construct
IMEVRNK

SEQ ID NO: 168351 - protein, 7 aa, synthetic construct
TSDKKWS

SEQ ID NO: 168352 - protein, 7 aa, synthetic construct
THVPRTT

SEQ ID NO: 168353 - protein, 7 aa, synthetic construct
GSYVKSI

SEQ ID NO: 168354 - protein, 7 aa, synthetic construct
NIHGAKL

SEQ ID NO: 168355 - protein, 7 aa, synthetic construct
KFTMAEK

SEQ ID NO: 168356 - protein, 7 aa, synthetic construct
VIPRAAL

SEQ ID NO: 168357 - protein, 7 aa, synthetic construct
ATKTDYR

SEQ ID NO: 168358 - protein, 7 aa, synthetic construct
VQTHVGR

SEQ ID NO: 168359 - protein, 7 aa, synthetic construct
QKLGLSY

SEQ ID NO: 168360 - protein, 7 aa, synthetic construct
YPMVEKK

SEQ ID NO: 168361 - protein, 7 aa, synthetic construct
AAPERRP

SEQ ID NO: 168362 - protein, 7 aa, synthetic construct
NTDRFKQ

SEQ ID NO: 168363 - protein, 7 aa, synthetic construct
SFDKALR

SEQ ID NO: 168364 - protein, 7 aa, synthetic construct
MMASDKR

SEQ ID NO: 168365 - protein, 7 aa, synthetic construct
IQHKLHQ

SEQ ID NO: 168366 - protein, 7 aa, synthetic construct
MTRPTIL

SEQ ID NO: 168367 - protein, 7 aa, synthetic construct
MKKIPQD

SEQ ID NO: 168368 - protein, 7 aa, synthetic construct
AHKTPGN

SEQ ID NO: 168369 - protein, 7 aa, synthetic construct
AKFTERN

SEQ ID NO: 168370 - protein, 7 aa, synthetic construct
TMPSAHR

SEQ ID NO: 168371 - protein, 7 aa, synthetic construct
AVPGHNR

SEQ ID NO: 168372 - protein, 7 aa, synthetic construct
IKGAIVY

SEQ ID NO: 168373 - protein, 7 aa, synthetic construct
HVDKTKW

SEQ ID NO: 168374 - protein, 7 aa, synthetic construct
NPSAHNK

SEQ ID NO: 168375 - protein, 7 aa, synthetic construct
ATTPKAW

SEQ ID NO: 168376 - protein, 7 aa, synthetic construct
VAQKPHF

SEQ ID NO: 168377 - protein, 7 aa, synthetic construct
KYAKEMF

SEQ ID NO: 168378 - protein, 7 aa, synthetic construct
YISMKDR

SEQ ID NO: 168379 - protein, 7 aa, synthetic construct
FTSNKYI

SEQ ID NO: 168380 - protein, 7 aa, synthetic construct
HKIVINA

SEQ ID NO: 168381 - protein, 7 aa, synthetic construct
AKFTPAN

SEQ ID NO: 168382 - protein, 7 aa, synthetic construct
GMATHKM

SEQ ID NO: 168383 - protein, 7 aa, synthetic construct
GTGYKLV

SEQ ID NO: 168384 - protein, 7 aa, synthetic construct
LSKMTDR

SEQ ID NO: 168385 - protein, 7 aa, synthetic construct
TVQGHNR

SEQ ID NO: 168386 - protein, 7 aa, synthetic construct
HIHGVKS

SEQ ID NO: 168387 - protein, 7 aa, synthetic construct
TDKRYGI

SEQ ID NO: 168388 - protein, 7 aa, synthetic construct
TTKQYSI

SEQ ID NO: 168389 - protein, 7 aa, synthetic construct
HKELKWA

SEQ ID NO: 168390 - protein, 7 aa, synthetic construct
DKLATKW

SEQ ID NO: 168391 - protein, 7 aa, synthetic construct
RVDMRHI

SEQ ID NO: 168392 - protein, 7 aa, synthetic construct
QFGAVKM

SEQ ID NO: 168393 - protein, 7 aa, synthetic construct
MQPRPSF

SEQ ID NO: 168394 - protein, 7 aa, synthetic construct
SPYKDKM

SEQ ID NO: 168395 - protein, 7 aa, synthetic construct
TEHIKIK

SEQ ID NO: 168396 - protein, 7 aa, synthetic construct
DPASPKR

SEQ ID NO: 168397 - protein, 7 aa, synthetic construct
HKGPAAY

SEQ ID NO: 168398 - protein, 7 aa, synthetic construct
IYSASKL

SEQ ID NO: 168399 - protein, 7 aa, synthetic construct
KGKEPRD

SEQ ID NO: 168400 - protein, 7 aa, synthetic construct
KTIYTSP

SEQ ID NO: 168401 - protein, 7 aa, synthetic construct
RTAVARD

SEQ ID NO: 168402 - protein, 7 aa, synthetic construct
VISRPTL

SEQ ID NO: 168403 - protein, 7 aa, synthetic construct
TKDVHQR

SEQ ID NO: 168404 - protein, 7 aa, synthetic construct
KEKHPVW

SEQ ID NO: 168405 - protein, 7 aa, synthetic construct
EKQMAKL

SEQ ID NO: 168406 - protein, 7 aa, synthetic construct
VNKPIGW

SEQ ID NO: 168407 - protein, 7 aa, synthetic construct
LNTRGER

SEQ ID NO: 168408 - protein, 7 aa, synthetic construct
KEKTYVY

SEQ ID NO: 168409 - protein, 7 aa, synthetic construct
QVPHANK

SEQ ID NO: 168410 - protein, 7 aa, synthetic construct
DLGKITR

SEQ ID NO: 168411 - protein, 7 aa, synthetic construct
LKPSHIF

SEQ ID NO: 168412 - protein, 7 aa, synthetic construct
TFKPITM

SEQ ID NO: 168413 - protein, 7 aa, synthetic construct
KQYAVDK

SEQ ID NO: 168414 - protein, 7 aa, synthetic construct
DVRGNSR

SEQ ID NO: 168415 - protein, 7 aa, synthetic construct
TFKPMIS

SEQ ID NO: 168416 - protein, 7 aa, synthetic construct
HAPKYSV

SEQ ID NO: 168417 - protein, 7 aa, synthetic construct
AFLQTKA

SEQ ID NO: 168418 - protein, 7 aa, synthetic construct
HREHIKQ

SEQ ID NO: 168419 - protein, 7 aa, synthetic construct
GLDRAAK

SEQ ID NO: 168420 - protein, 7 aa, synthetic construct
KDKIGIW

SEQ ID NO: 168421 - protein, 7 aa, synthetic construct
FLKQERI

SEQ ID NO: 168422 - protein, 7 aa, synthetic construct
MTGTGRH

SEQ ID NO: 168423 - protein, 7 aa, synthetic construct
YSGIMPK

SEQ ID NO: 168424 - protein, 7 aa, synthetic construct
FIKPAHV

SEQ ID NO: 168425 - protein, 7 aa, synthetic construct
RHNPTSL

SEQ ID NO: 168426 - protein, 7 aa, synthetic construct
GKHITGY

SEQ ID NO: 168427 - protein, 7 aa, synthetic construct
MDSKMGR

SEQ ID NO: 168428 - protein, 7 aa, synthetic construct
KMGDHFK

SEQ ID NO: 168429 - protein, 7 aa, synthetic construct
LAPHVNR

SEQ ID NO: 168430 - protein, 7 aa, synthetic construct
KIYEGPK

SEQ ID NO: 168431 - protein, 7 aa, synthetic construct
KEYPMPK

SEQ ID NO: 168432 - protein, 7 aa, synthetic construct
PAEKIKF

SEQ ID NO: 168433 - protein, 7 aa, synthetic construct
YSSIPKL

SEQ ID NO: 168434 - protein, 7 aa, synthetic construct
KNLRELI

SEQ ID NO: 168435 - protein, 7 aa, synthetic construct
PSKYVEK

SEQ ID NO: 168436 - protein, 7 aa, synthetic construct
YSKPEQR

SEQ ID NO: 168437 - protein, 7 aa, synthetic construct
AMHGPKY

SEQ ID NO: 168438 - protein, 7 aa, synthetic construct
NFMGTKL

SEQ ID NO: 168439 - protein, 7 aa, synthetic construct
MEAFKSK

SEQ ID NO: 168440 - protein, 7 aa, synthetic construct
AMGPKIY

SEQ ID NO: 168441 - protein, 7 aa, synthetic construct
LKNLITV

SEQ ID NO: 168442 - protein, 7 aa, synthetic construct
KITHSMM

SEQ ID NO: 168443 - protein, 7 aa, synthetic construct
HFNKNIT

SEQ ID NO: 168444 - protein, 7 aa, synthetic construct
MKEYNKY

SEQ ID NO: 168445 - protein, 7 aa, synthetic construct
KIHQGAY

SEQ ID NO: 168446 - protein, 7 aa, synthetic construct
DMKYKLT

SEQ ID NO: 168447 - protein, 7 aa, synthetic construct
GNDRYKQ

SEQ ID NO: 168448 - protein, 7 aa, synthetic construct
VKFTNPV

SEQ ID NO: 168449 - protein, 7 aa, synthetic construct
FSKSDSR

SEQ ID NO: 168450 - protein, 7 aa, synthetic construct
LRTNESK

SEQ ID NO: 168451 - protein, 7 aa, synthetic construct
SSDARLR

SEQ ID NO: 168452 - protein, 7 aa, synthetic construct
FKGLAQL

SEQ ID NO: 168453 - protein, 7 aa, synthetic construct
DPANKIR

SEQ ID NO: 168454 - protein, 7 aa, synthetic construct
WLKQTAV

SEQ ID NO: 168455 - protein, 7 aa, synthetic construct
KHHPGTM

SEQ ID NO: 168456 - protein, 7 aa, synthetic construct
FTKILSS

SEQ ID NO: 168457 - protein, 7 aa, synthetic construct
QIDTKRL

SEQ ID NO: 168458 - protein, 7 aa, synthetic construct
RTHDQKQ

SEQ ID NO: 168459 - protein, 7 aa, synthetic construct
KDVYQGK

SEQ ID NO: 168460 - protein, 7 aa, synthetic construct
FVSNVKH

SEQ ID NO: 168461 - protein, 7 aa, synthetic construct
HPPQRGH

SEQ ID NO: 168462 - protein, 7 aa, synthetic construct
KVERNFV

SEQ ID NO: 168463 - protein, 7 aa, synthetic construct
GKANDRQ

SEQ ID NO: 168464 - protein, 7 aa, synthetic construct
IIDAGKK

SEQ ID NO: 168465 - protein, 7 aa, synthetic construct
KHEKYSV

SEQ ID NO: 168466 - protein, 7 aa, synthetic construct
SEINKQK

SEQ ID NO: 168467 - protein, 7 aa, synthetic construct
TSGLKSW

SEQ ID NO: 168468 - protein, 7 aa, synthetic construct
GKFISPV

SEQ ID NO: 168469 - protein, 7 aa, synthetic construct
KDTKPWP

SEQ ID NO: 168470 - protein, 7 aa, synthetic construct
KLDHFKS

SEQ ID NO: 168471 - protein, 7 aa, synthetic construct
AMLTTRA

SEQ ID NO: 168472 - protein, 7 aa, synthetic construct
VAHPIKQ

SEQ ID NO: 168473 - protein, 7 aa, synthetic construct
WQPPAKH

SEQ ID NO: 168474 - protein, 7 aa, synthetic construct
SSYVKGL

SEQ ID NO: 168475 - protein, 7 aa, synthetic construct
PYSGPKH

SEQ ID NO: 168476 - protein, 7 aa, synthetic construct
RFANPTA

SEQ ID NO: 168477 - protein, 7 aa, synthetic construct
KKGEPPT

SEQ ID NO: 168478 - protein, 7 aa, synthetic construct
DTPARMK

SEQ ID NO: 168479 - protein, 7 aa, synthetic construct
KQKIDIF

SEQ ID NO: 168480 - protein, 7 aa, synthetic construct
LFSKNVL

SEQ ID NO: 168481 - protein, 7 aa, synthetic construct
VKVSIQY

SEQ ID NO: 168482 - protein, 7 aa, synthetic construct
MAQYIPK

SEQ ID NO: 168483 - protein, 7 aa, synthetic construct
GLVNVRI

SEQ ID NO: 168484 - protein, 7 aa, synthetic construct
TPHPKHA

SEQ ID NO: 168485 - protein, 7 aa, synthetic construct
DKIPKFV

SEQ ID NO: 168486 - protein, 7 aa, synthetic construct
KEIRSMI

SEQ ID NO: 168487 - protein, 7 aa, synthetic construct
YKIPAPL

SEQ ID NO: 168488 - protein, 7 aa, synthetic construct
PDKPVLR

SEQ ID NO: 168489 - protein, 7 aa, synthetic construct
FDQKSKH

SEQ ID NO: 168490 - protein, 7 aa, synthetic construct
SVGYKSL

SEQ ID NO: 168491 - protein, 7 aa, synthetic construct
GASLHKL

SEQ ID NO: 168492 - protein, 7 aa, synthetic construct
DPNKSQR

SEQ ID NO: 168493 - protein, 7 aa, synthetic construct
KSVYDQK

SEQ ID NO: 168494 - protein, 7 aa, synthetic construct
DKLTARN

SEQ ID NO: 168495 - protein, 7 aa, synthetic construct
IMHKMSI

SEQ ID NO: 168496 - protein, 7 aa, synthetic construct
SPIETRK

SEQ ID NO: 168497 - protein, 7 aa, synthetic construct
KVYPMTA

SEQ ID NO: 168498 - protein, 7 aa, synthetic construct
LSRNINL

SEQ ID NO: 168499 - protein, 7 aa, synthetic construct
LAGPKHM

SEQ ID NO: 168500 - protein, 7 aa, synthetic construct
YKIQLDK

SEQ ID NO: 168501 - protein, 7 aa, synthetic construct
ETKLNSR

SEQ ID NO: 168502 - protein, 7 aa, synthetic construct
HLKHIAQ

SEQ ID NO: 168503 - protein, 7 aa, synthetic construct
KMHNLIN

SEQ ID NO: 168504 - protein, 7 aa, synthetic construct
TTHKYTV

SEQ ID NO: 168505 - protein, 7 aa, synthetic construct
KTRDVPF

SEQ ID NO: 168506 - protein, 7 aa, synthetic construct
KEMVRTQ

SEQ ID NO: 168507 - protein, 7 aa, synthetic construct
QKFMEPK

SEQ ID NO: 168508 - protein, 7 aa, synthetic construct
MMPRINV

SEQ ID NO: 168509 - protein, 7 aa, synthetic construct
TKMHSLI

SEQ ID NO: 168510 - protein, 7 aa, synthetic construct
FKHPIGM

SEQ ID NO: 168511 - protein, 7 aa, synthetic construct
SSSKPTF

SEQ ID NO: 168512 - protein, 7 aa, synthetic construct
HKIQDRA

SEQ ID NO: 168513 - protein, 7 aa, synthetic construct
SILHAKN

SEQ ID NO: 168514 - protein, 7 aa, synthetic construct
DQKVPKY

SEQ ID NO: 168515 - protein, 7 aa, synthetic construct
DPVRIMK

SEQ ID NO: 168516 - protein, 7 aa, synthetic construct
SKVNSPW

SEQ ID NO: 168517 - protein, 7 aa, synthetic construct
DQKNQYK

SEQ ID NO: 168518 - protein, 7 aa, synthetic construct
EPKSNNR

SEQ ID NO: 168519 - protein, 7 aa, synthetic construct
GMVPKYV

SEQ ID NO: 168520 - protein, 7 aa, synthetic construct
IIRDHSK

SEQ ID NO: 168521 - protein, 7 aa, synthetic construct
KQHINAQ

SEQ ID NO: 168522 - protein, 7 aa, synthetic construct
DRVNKML

SEQ ID NO: 168523 - protein, 7 aa, synthetic construct
RMQNDPK

SEQ ID NO: 168524 - protein, 7 aa, synthetic construct
TLAERKT

SEQ ID NO: 168525 - protein, 7 aa, synthetic construct
SKEYNTR

SEQ ID NO: 168526 - protein, 7 aa, synthetic construct
GMLHKST

SEQ ID NO: 168527 - protein, 7 aa, synthetic construct
KAMGGLY

SEQ ID NO: 168528 - protein, 7 aa, synthetic construct
WVKDALK

SEQ ID NO: 168529 - protein, 7 aa, synthetic construct
KHHPGLA

SEQ ID NO: 168530 - protein, 7 aa, synthetic construct
YQAGVMR

SEQ ID NO: 168531 - protein, 7 aa, synthetic construct
EPRPNQR

SEQ ID NO: 168532 - protein, 7 aa, synthetic construct
KYIPTAN

SEQ ID NO: 168533 - protein, 7 aa, synthetic construct
TMIEGRK

SEQ ID NO: 168534 - protein, 7 aa, synthetic construct
KTPTPGW

SEQ ID NO: 168535 - protein, 7 aa, synthetic construct
QERQVIK

SEQ ID NO: 168536 - protein, 7 aa, synthetic construct
TVDTKYR

SEQ ID NO: 168537 - protein, 7 aa, synthetic construct
AGLHKNQ

SEQ ID NO: 168538 - protein, 7 aa, synthetic construct
KMKTPME

SEQ ID NO: 168539 - protein, 7 aa, synthetic construct
FEKNTFK

SEQ ID NO: 168540 - protein, 7 aa, synthetic construct
FSSHLKL

SEQ ID NO: 168541 - protein, 7 aa, synthetic construct
NPHASSR

SEQ ID NO: 168542 - protein, 7 aa, synthetic construct
PDKYVNK

SEQ ID NO: 168543 - protein, 7 aa, synthetic construct
TIGMHNK

SEQ ID NO: 168544 - protein, 7 aa, synthetic construct
KFLNVTA

SEQ ID NO: 168545 - protein, 7 aa, synthetic construct
PKHNPRE

SEQ ID NO: 168546 - protein, 7 aa, synthetic construct
DFKNNPR

SEQ ID NO: 168547 - protein, 7 aa, synthetic construct
EQAKTAK

SEQ ID NO: 168548 - protein, 7 aa, synthetic construct
MIKHNFG

SEQ ID NO: 168549 - protein, 7 aa, synthetic construct
YGEKHRN

SEQ ID NO: 168550 - protein, 7 aa, synthetic construct
KDMKGIW

SEQ ID NO: 168551 - protein, 7 aa, synthetic construct
GMHKFNV

SEQ ID NO: 168552 - protein, 7 aa, synthetic construct
FKQINPM

SEQ ID NO: 168553 - protein, 7 aa, synthetic construct
TKEFTPR

SEQ ID NO: 168554 - protein, 7 aa, synthetic construct
KMDRSTY

SEQ ID NO: 168555 - protein, 7 aa, synthetic construct
KKEYLNQ

SEQ ID NO: 168556 - protein, 7 aa, synthetic construct
YPIGQNR

SEQ ID NO: 168557 - protein, 7 aa, synthetic construct
WPTKDTR

SEQ ID NO: 168558 - protein, 7 aa, synthetic construct
DKAILRQ

SEQ ID NO: 168559 - protein, 7 aa, synthetic construct
ISGLHNK

SEQ ID NO: 168560 - protein, 7 aa, synthetic construct
GLDINRK

SEQ ID NO: 168561 - protein, 7 aa, synthetic construct
PSAKNYQ

SEQ ID NO: 168562 - protein, 7 aa, synthetic construct
HTHSVKQ

SEQ ID NO: 168563 - protein, 7 aa, synthetic construct
SKIYQDK

SEQ ID NO: 168564 - protein, 7 aa, synthetic construct
MIPHGTR

SEQ ID NO: 168565 - protein, 7 aa, synthetic construct
GLHKLHS

SEQ ID NO: 168566 - protein, 7 aa, synthetic construct
RDNPKPV

SEQ ID NO: 168567 - protein, 7 aa, synthetic construct
PTKKEPM

SEQ ID NO: 168568 - protein, 7 aa, synthetic construct
FSKALNL

SEQ ID NO: 168569 - protein, 7 aa, synthetic construct
NMTERSR

SEQ ID NO: 168570 - protein, 7 aa, synthetic construct
KYKIAHE

SEQ ID NO: 168571 - protein, 7 aa, synthetic construct
PYPHTKV

SEQ ID NO: 168572 - protein, 7 aa, synthetic construct
AEKIPKN

SEQ ID NO: 168573 - protein, 7 aa, synthetic construct
MRSTEFK

SEQ ID NO: 168574 - protein, 7 aa, synthetic construct
QYKIASQ

SEQ ID NO: 168575 - protein, 7 aa, synthetic construct
FLTGNKH

SEQ ID NO: 168576 - protein, 7 aa, synthetic construct
KSFVSNA

SEQ ID NO: 168577 - protein, 7 aa, synthetic construct
KTEYSKT

SEQ ID NO: 168578 - protein, 7 aa, synthetic construct
RFDKKEL

SEQ ID NO: 168579 - protein, 7 aa, synthetic construct
GSLHNRV

SEQ ID NO: 168580 - protein, 7 aa, synthetic construct
REAKLFQ

SEQ ID NO: 168581 - protein, 7 aa, synthetic construct
FSKPLSL

SEQ ID NO: 168582 - protein, 7 aa, synthetic construct
VIDTKRF

SEQ ID NO: 168583 - protein, 7 aa, synthetic construct
QKFDVRQ

SEQ ID NO: 168584 - protein, 7 aa, synthetic construct
RSIVKEV

SEQ ID NO: 168585 - protein, 7 aa, synthetic construct
APERSKI

SEQ ID NO: 168586 - protein, 7 aa, synthetic construct
SKAVLAY

SEQ ID NO: 168587 - protein, 7 aa, synthetic construct
YEAMKLK

SEQ ID NO: 168588 - protein, 7 aa, synthetic construct
ISERIRQ

SEQ ID NO: 168589 - protein, 7 aa, synthetic construct
QLDKRFT

SEQ ID NO: 168590 - protein, 7 aa, synthetic construct
VKHPSLM

SEQ ID NO: 168591 - protein, 7 aa, synthetic construct
KDLGRSV

SEQ ID NO: 168592 - protein, 7 aa, synthetic construct
SPEKPRN

SEQ ID NO: 168593 - protein, 7 aa, synthetic construct
SHKPIIV

SEQ ID NO: 168594 - protein, 7 aa, synthetic construct
YKAIPMV

SEQ ID NO: 168595 - protein, 7 aa, synthetic construct
SALIAKN

SEQ ID NO: 168596 - protein, 7 aa, synthetic construct
YNADMRK

SEQ ID NO: 168597 - protein, 7 aa, synthetic construct
HTVKASY

SEQ ID NO: 168598 - protein, 7 aa, synthetic construct
VIPRTQH

SEQ ID NO: 168599 - protein, 7 aa, synthetic construct
DITRNMK

SEQ ID NO: 168600 - protein, 7 aa, synthetic construct
LPFVNKG

SEQ ID NO: 168601 - protein, 7 aa, synthetic construct
LSDIRSR

SEQ ID NO: 168602 - protein, 7 aa, synthetic construct
TTHGVSR

SEQ ID NO: 168603 - protein, 7 aa, synthetic construct
TRSQLDK

SEQ ID NO: 168604 - protein, 7 aa, synthetic construct
VKNFPAI

SEQ ID NO: 168605 - protein, 7 aa, synthetic construct
KYTKDFA

SEQ ID NO: 168606 - protein, 7 aa, synthetic construct
NVSTHPR

SEQ ID NO: 168607 - protein, 7 aa, synthetic construct
KLRIEVT

SEQ ID NO: 168608 - protein, 7 aa, synthetic construct
PHHMGGK

SEQ ID NO: 168609 - protein, 7 aa, synthetic construct
ITKPVGW

SEQ ID NO: 168610 - protein, 7 aa, synthetic construct
PTHRTTV

SEQ ID NO: 168611 - protein, 7 aa, synthetic construct
SHKGLSY

SEQ ID NO: 168612 - protein, 7 aa, synthetic construct
GFASTKH

SEQ ID NO: 168613 - protein, 7 aa, synthetic construct
IYKTNEK

SEQ ID NO: 168614 - protein, 7 aa, synthetic construct
MEKLSKH

SEQ ID NO: 168615 - protein, 7 aa, synthetic construct
QPADYKK

SEQ ID NO: 168616 - protein, 7 aa, synthetic construct
YAKILQH

SEQ ID NO: 168617 - protein, 7 aa, synthetic construct
GDIKAKV

SEQ ID NO: 168618 - protein, 7 aa, synthetic construct
RHANIPI

SEQ ID NO: 168619 - protein, 7 aa, synthetic construct
QPSYKEK

SEQ ID NO: 168620 - protein, 7 aa, synthetic construct
SDSKILR

SEQ ID NO: 168621 - protein, 7 aa, synthetic construct
TFPNTKH

SEQ ID NO: 168622 - protein, 7 aa, synthetic construct
HMHQLKQ

SEQ ID NO: 168623 - protein, 7 aa, synthetic construct
GIANIHK

SEQ ID NO: 168624 - protein, 7 aa, synthetic construct
TMDIKQR

SEQ ID NO: 168625 - protein, 7 aa, synthetic construct
MSRVDVR

SEQ ID NO: 168626 - protein, 7 aa, synthetic construct
LTRTDVR

SEQ ID NO: 168627 - protein, 7 aa, synthetic construct
LSFNTKI

SEQ ID NO: 168628 - protein, 7 aa, synthetic construct
MVQHKHF

SEQ ID NO: 168629 - protein, 7 aa, synthetic construct
IGHKILM

SEQ ID NO: 168630 - protein, 7 aa, synthetic construct
SIDRHKI

SEQ ID NO: 168631 - protein, 7 aa, synthetic construct
MKALPHT

SEQ ID NO: 168632 - protein, 7 aa, synthetic construct
RERPVPL

SEQ ID NO: 168633 - protein, 7 aa, synthetic construct
DTTRNLK

SEQ ID NO: 168634 - protein, 7 aa, synthetic construct
TGHISGK

SEQ ID NO: 168635 - protein, 7 aa, synthetic construct
VTNTSHR

SEQ ID NO: 168636 - protein, 7 aa, synthetic construct
IFTSVKN

SEQ ID NO: 168637 - protein, 7 aa, synthetic construct
LDKYNIK

SEQ ID NO: 168638 - protein, 7 aa, synthetic construct
FTTHNNK

SEQ ID NO: 168639 - protein, 7 aa, synthetic construct
KFGNLHA

SEQ ID NO: 168640 - protein, 7 aa, synthetic construct
QERTINR

SEQ ID NO: 168641 - protein, 7 aa, synthetic construct
TFQLKDK

SEQ ID NO: 168642 - protein, 7 aa, synthetic construct
GAIYGPK

SEQ ID NO: 168643 - protein, 7 aa, synthetic construct
VAFKASH

SEQ ID NO: 168644 - protein, 7 aa, synthetic construct
AINYLKP

SEQ ID NO: 168645 - protein, 7 aa, synthetic construct
GQTKDKY

SEQ ID NO: 168646 - protein, 7 aa, synthetic construct
NMERVVK

SEQ ID NO: 168647 - protein, 7 aa, synthetic construct
VDTKIKW

SEQ ID NO: 168648 - protein, 7 aa, synthetic construct
DLKKIGW

SEQ ID NO: 168649 - protein, 7 aa, synthetic construct
VMVHKNI

SEQ ID NO: 168650 - protein, 7 aa, synthetic construct
PVDRRAV

SEQ ID NO: 168651 - protein, 7 aa, synthetic construct
GSGYNAK

SEQ ID NO: 168652 - protein, 7 aa, synthetic construct
SKLAHAY

SEQ ID NO: 168653 - protein, 7 aa, synthetic construct
SFANMPR

SEQ ID NO: 168654 - protein, 7 aa, synthetic construct
QDRTTVR

SEQ ID NO: 168655 - protein, 7 aa, synthetic construct
AKFHTTT

SEQ ID NO: 168656 - protein, 7 aa, synthetic construct
DNTKYVK

SEQ ID NO: 168657 - protein, 7 aa, synthetic construct
VTKTYTL

SEQ ID NO: 168658 - protein, 7 aa, synthetic construct
TVPGAHR

SEQ ID NO: 168659 - protein, 7 aa, synthetic construct
FGNKLDK

SEQ ID NO: 168660 - protein, 7 aa, synthetic construct
PPTNRDK

SEQ ID NO: 168661 - protein, 7 aa, synthetic construct
IMDKIKW

SEQ ID NO: 168662 - protein, 7 aa, synthetic construct
AMSREVR

SEQ ID NO: 168663 - protein, 7 aa, synthetic construct
KTNVFSA

SEQ ID NO: 168664 - protein, 7 aa, synthetic construct
MPVNTKW

SEQ ID NO: 168665 - protein, 7 aa, synthetic construct
TTDRRVL

SEQ ID NO: 168666 - protein, 7 aa, synthetic construct
SKYEVQR

SEQ ID NO: 168667 - protein, 7 aa, synthetic construct
DVNNKPR

SEQ ID NO: 168668 - protein, 7 aa, synthetic construct
VDYTKGK

SEQ ID NO: 168669 - protein, 7 aa, synthetic construct
QSKGDSR

SEQ ID NO: 168670 - protein, 7 aa, synthetic construct
NMGIKSF

SEQ ID NO: 168671 - protein, 7 aa, synthetic construct
STRENSR

SEQ ID NO: 168672 - protein, 7 aa, synthetic construct
LTYPVKS

SEQ ID NO: 168673 - protein, 7 aa, synthetic construct
RSEVRHI

SEQ ID NO: 168674 - protein, 7 aa, synthetic construct
NDNKFLK

SEQ ID NO: 168675 - protein, 7 aa, synthetic construct
KMHPQAY

SEQ ID NO: 168676 - protein, 7 aa, synthetic construct
KSHDRLV

SEQ ID NO: 168677 - protein, 7 aa, synthetic construct
GSLHSKL

SEQ ID NO: 168678 - protein, 7 aa, synthetic construct
YTTQAKH

SEQ ID NO: 168679 - protein, 7 aa, synthetic construct
VVHNNKF

SEQ ID NO: 168680 - protein, 7 aa, synthetic construct
LEAKAIR

SEQ ID NO: 168681 - protein, 7 aa, synthetic construct
GVMHNKL

SEQ ID NO: 168682 - protein, 7 aa, synthetic construct
PPDRRVT

SEQ ID NO: 168683 - protein, 7 aa, synthetic construct
TIERTTR

SEQ ID NO: 168684 - protein, 7 aa, synthetic construct
KELYTKV

SEQ ID NO: 168685 - protein, 7 aa, synthetic construct
GFKPSHM

SEQ ID NO: 168686 - protein, 7 aa, synthetic construct
FKDVSAR

SEQ ID NO: 168687 - protein, 7 aa, synthetic construct
ESLKTRI

SEQ ID NO: 168688 - protein, 7 aa, synthetic construct
TQGYSLK

SEQ ID NO: 168689 - protein, 7 aa, synthetic construct
LDTVKKW

SEQ ID NO: 168690 - protein, 7 aa, synthetic construct
KRDPNFV

SEQ ID NO: 168691 - protein, 7 aa, synthetic construct
KSRELVV

SEQ ID NO: 168692 - protein, 7 aa, synthetic construct
RAIPHAV

SEQ ID NO: 168693 - protein, 7 aa, synthetic construct
VGHASVR

SEQ ID NO: 168694 - protein, 7 aa, synthetic construct
QKTYDNK

SEQ ID NO: 168695 - protein, 7 aa, synthetic construct
SEFNKPK

SEQ ID NO: 168696 - protein, 7 aa, synthetic construct
KELQRNT

SEQ ID NO: 168697 - protein, 7 aa, synthetic construct
SVYKLEK

SEQ ID NO: 168698 - protein, 7 aa, synthetic construct
IPDRALR

SEQ ID NO: 168699 - protein, 7 aa, synthetic construct
IKFSDKM

SEQ ID NO: 168700 - protein, 7 aa, synthetic construct
LPHNVPR

SEQ ID NO: 168701 - protein, 7 aa, synthetic construct
VTAYNKL

SEQ ID NO: 168702 - protein, 7 aa, synthetic construct
LFKVDNR

SEQ ID NO: 168703 - protein, 7 aa, synthetic construct
SIKRELI

SEQ ID NO: 168704 - protein, 7 aa, synthetic construct
GITGYAK

SEQ ID NO: 168705 - protein, 7 aa, synthetic construct
GYIKDKT

SEQ ID NO: 168706 - protein, 7 aa, synthetic construct
MKLTGVY

SEQ ID NO: 168707 - protein, 7 aa, synthetic construct
ETARLKI

SEQ ID NO: 168708 - protein, 7 aa, synthetic construct
KHFPTVS

SEQ ID NO: 168709 - protein, 7 aa, synthetic construct
DYKTLKH

SEQ ID NO: 168710 - protein, 7 aa, synthetic construct
LIDRMTR

SEQ ID NO: 168711 - protein, 7 aa, synthetic construct
MMVDTKR

SEQ ID NO: 168712 - protein, 7 aa, synthetic construct
GFKEYSK

SEQ ID NO: 168713 - protein, 7 aa, synthetic construct
SINTPRW

SEQ ID NO: 168714 - protein, 7 aa, synthetic construct
IAHSQNK

SEQ ID NO: 168715 - protein, 7 aa, synthetic construct
SMNMEKK

SEQ ID NO: 168716 - protein, 7 aa, synthetic construct
IRSNDAK

SEQ ID NO: 168717 - protein, 7 aa, synthetic construct
IERIPTK

SEQ ID NO: 168718 - protein, 7 aa, synthetic construct
PFSKASQ

SEQ ID NO: 168719 - protein, 7 aa, synthetic construct
KFLPANS

SEQ ID NO: 168720 - protein, 7 aa, synthetic construct
IRQPREL

SEQ ID NO: 168721 - protein, 7 aa, synthetic construct
VTLHKNL

SEQ ID NO: 168722 - protein, 7 aa, synthetic construct
QPDKRFS

SEQ ID NO: 168723 - protein, 7 aa, synthetic construct
IIHNSKH

SEQ ID NO: 168724 - protein, 7 aa, synthetic construct
YFDQKQK

SEQ ID NO: 168725 - protein, 7 aa, synthetic construct
KMAGVYN

SEQ ID NO: 168726 - protein, 7 aa, synthetic construct
VFQGSVR

SEQ ID NO: 168727 - protein, 7 aa, synthetic construct
KLLHSQS

SEQ ID NO: 168728 - protein, 7 aa, synthetic construct
TMRSNEK

SEQ ID NO: 168729 - protein, 7 aa, synthetic construct
RIRNADP

SEQ ID NO: 168730 - protein, 7 aa, synthetic construct
KREFTSV

SEQ ID NO: 168731 - protein, 7 aa, synthetic construct
HGPRLNI

SEQ ID NO: 168732 - protein, 7 aa, synthetic construct
ISHLASK

SEQ ID NO: 168733 - protein, 7 aa, synthetic construct
QIDIKRS

SEQ ID NO: 168734 - protein, 7 aa, synthetic construct
TPHGIAR

SEQ ID NO: 168735 - protein, 7 aa, synthetic construct
KVPHPTF

SEQ ID NO: 168736 - protein, 7 aa, synthetic construct
AKFGTDR

SEQ ID NO: 168737 - protein, 7 aa, synthetic construct
NPPDKFR

SEQ ID NO: 168738 - protein, 7 aa, synthetic construct
GPEVKFK

SEQ ID NO: 168739 - protein, 7 aa, synthetic construct
TEKIIRI

SEQ ID NO: 168740 - protein, 7 aa, synthetic construct
VMQTHNR

SEQ ID NO: 168741 - protein, 7 aa, synthetic construct
FAKPINV

SEQ ID NO: 168742 - protein, 7 aa, synthetic construct
KDAGAFR

SEQ ID NO: 168743 - protein, 7 aa, synthetic construct
KYDKSLL

SEQ ID NO: 168744 - protein, 7 aa, synthetic construct
MKMPSLL

SEQ ID NO: 168745 - protein, 7 aa, synthetic construct
VMPPRIQ

SEQ ID NO: 168746 - protein, 7 aa, synthetic construct
LKTIHSH

SEQ ID NO: 168747 - protein, 7 aa, synthetic construct
HLGSMKM

SEQ ID NO: 168748 - protein, 7 aa, synthetic construct
GTASHNK

SEQ ID NO: 168749 - protein, 7 aa, synthetic construct
AVSRPQT

SEQ ID NO: 168750 - protein, 7 aa, synthetic construct
QKMVGVY

SEQ ID NO: 168751 - protein, 7 aa, synthetic construct
DMKQVIR

SEQ ID NO: 168752 - protein, 7 aa, synthetic construct
ALDTRRI

SEQ ID NO: 168753 - protein, 7 aa, synthetic construct
YLSDARK

SEQ ID NO: 168754 - protein, 7 aa, synthetic construct
WKDNALR

SEQ ID NO: 168755 - protein, 7 aa, synthetic construct
AKYQTVT

SEQ ID NO: 168756 - protein, 7 aa, synthetic construct
PPEPKRM

SEQ ID NO: 168757 - protein, 7 aa, synthetic construct
LYKNDIR

SEQ ID NO: 168758 - protein, 7 aa, synthetic construct
SLMGKHQ

SEQ ID NO: 168759 - protein, 7 aa, synthetic construct
HPTNARG

SEQ ID NO: 168760 - protein, 7 aa, synthetic construct
HKHILQS

SEQ ID NO: 168761 - protein, 7 aa, synthetic construct
TVFNAAK

SEQ ID NO: 168762 - protein, 7 aa, synthetic construct
SLAPKHQ

SEQ ID NO: 168763 - protein, 7 aa, synthetic construct
IPSYIQK

SEQ ID NO: 168764 - protein, 7 aa, synthetic construct
IRDVFKS

SEQ ID NO: 168765 - protein, 7 aa, synthetic construct
YSAGVTR

SEQ ID NO: 168766 - protein, 7 aa, synthetic construct
KVIPMQM

SEQ ID NO: 168767 - protein, 7 aa, synthetic construct
HPHKGIM

SEQ ID NO: 168768 - protein, 7 aa, synthetic construct
SIKHPSL

SEQ ID NO: 168769 - protein, 7 aa, synthetic construct
GIYGTGK

SEQ ID NO: 168770 - protein, 7 aa, synthetic construct
GTISGHK

SEQ ID NO: 168771 - protein, 7 aa, synthetic construct
KIDTRYL

SEQ ID NO: 168772 - protein, 7 aa, synthetic construct
RKDKEGP

SEQ ID NO: 168773 - protein, 7 aa, synthetic construct
TFERVKG

SEQ ID NO: 168774 - protein, 7 aa, synthetic construct
QITRPHY

SEQ ID NO: 168775 - protein, 7 aa, synthetic construct
REKNFIV

SEQ ID NO: 168776 - protein, 7 aa, synthetic construct
MDSKRFM

SEQ ID NO: 168777 - protein, 7 aa, synthetic construct
NADILKR

SEQ ID NO: 168778 - protein, 7 aa, synthetic construct
KRDIPYV

SEQ ID NO: 168779 - protein, 7 aa, synthetic construct
IFKPVTQ

SEQ ID NO: 168780 - protein, 7 aa, synthetic construct
SIERMKV

SEQ ID NO: 168781 - protein, 7 aa, synthetic construct
KARQPTD

SEQ ID NO: 168782 - protein, 7 aa, synthetic construct
KMPISSN

SEQ ID NO: 168783 - protein, 7 aa, synthetic construct
GKLHTIM

SEQ ID NO: 168784 - protein, 7 aa, synthetic construct
VDKYMNK

SEQ ID NO: 168785 - protein, 7 aa, synthetic construct
QGAKTYL

SEQ ID NO: 168786 - protein, 7 aa, synthetic construct
AVYKPQV

SEQ ID NO: 168787 - protein, 7 aa, synthetic construct
SKEYVVR

SEQ ID NO: 168788 - protein, 7 aa, synthetic construct
GSAVHRV

SEQ ID NO: 168789 - protein, 7 aa, synthetic construct
LNPDGKR

SEQ ID NO: 168790 - protein, 7 aa, synthetic construct
AIPSQRH

SEQ ID NO: 168791 - protein, 7 aa, synthetic construct
QISVEKR

SEQ ID NO: 168792 - protein, 7 aa, synthetic construct
DKGKDMK

SEQ ID NO: 168793 - protein, 7 aa, synthetic construct
PERVAIK

SEQ ID NO: 168794 - protein, 7 aa, synthetic construct
HPNELKR

SEQ ID NO: 168795 - protein, 7 aa, synthetic construct
QDKVKVW

SEQ ID NO: 168796 - protein, 7 aa, synthetic construct
EKFINHK

SEQ ID NO: 168797 - protein, 7 aa, synthetic construct
KGAGDPR

SEQ ID NO: 168798 - protein, 7 aa, synthetic construct
NDSKLLR

SEQ ID NO: 168799 - protein, 7 aa, synthetic construct
VESRVVK

SEQ ID NO: 168800 - protein, 7 aa, synthetic construct
SHDKPRG

SEQ ID NO: 168801 - protein, 7 aa, synthetic construct
GVHAGGK

SEQ ID NO: 168802 - protein, 7 aa, synthetic construct
GATIEKK

SEQ ID NO: 168803 - protein, 7 aa, synthetic construct
HTGVTKH

SEQ ID NO: 168804 - protein, 7 aa, synthetic construct
SIAGHPR

SEQ ID NO: 168805 - protein, 7 aa, synthetic construct
SKGFPSV

SEQ ID NO: 168806 - protein, 7 aa, synthetic construct
HLPNPKA

SEQ ID NO: 168807 - protein, 7 aa, synthetic construct
QIDRMKF

SEQ ID NO: 168808 - protein, 7 aa, synthetic construct
HPHGLKQ

SEQ ID NO: 168809 - protein, 7 aa, synthetic construct
LIGNLKY

SEQ ID NO: 168810 - protein, 7 aa, synthetic construct
KDGQNIR

SEQ ID NO: 168811 - protein, 7 aa, synthetic construct
DAKKLPW

SEQ ID NO: 168812 - protein, 7 aa, synthetic construct
KAIHDVR

SEQ ID NO: 168813 - protein, 7 aa, synthetic construct
AKFETRQ

SEQ ID NO: 168814 - protein, 7 aa, synthetic construct
HKAIDKY

SEQ ID NO: 168815 - protein, 7 aa, synthetic construct
FASKLNL

SEQ ID NO: 168816 - protein, 7 aa, synthetic construct
PQDKRLM

SEQ ID NO: 168817 - protein, 7 aa, synthetic construct
NPMIREK

SEQ ID NO: 168818 - protein, 7 aa, synthetic construct
RTDIPPR

SEQ ID NO: 168819 - protein, 7 aa, synthetic construct
ITAHRSL

SEQ ID NO: 168820 - protein, 7 aa, synthetic construct
PHVKDRA

SEQ ID NO: 168821 - protein, 7 aa, synthetic construct
PHNKEAR

SEQ ID NO: 168822 - protein, 7 aa, synthetic construct
QQTFVKH

SEQ ID NO: 168823 - protein, 7 aa, synthetic construct
REKPPPM

SEQ ID NO: 168824 - protein, 7 aa, synthetic construct
ASKYSAI

SEQ ID NO: 168825 - protein, 7 aa, synthetic construct
IKEMYRV

SEQ ID NO: 168826 - protein, 7 aa, synthetic construct
ITHGTMR

SEQ ID NO: 168827 - protein, 7 aa, synthetic construct
DARGAAK

SEQ ID NO: 168828 - protein, 7 aa, synthetic construct
PDARVMK

SEQ ID NO: 168829 - protein, 7 aa, synthetic construct
WTAKEIK

SEQ ID NO: 168830 - protein, 7 aa, synthetic construct
AVKAPRD

SEQ ID NO: 168831 - protein, 7 aa, synthetic construct
VITKPHT

SEQ ID NO: 168832 - protein, 7 aa, synthetic construct
HPMPKSH

SEQ ID NO: 168833 - protein, 7 aa, synthetic construct
KERINIL

SEQ ID NO: 168834 - protein, 7 aa, synthetic construct
TVTHLKY

SEQ ID NO: 168835 - protein, 7 aa, synthetic construct
PQKLYKD

SEQ ID NO: 168836 - protein, 7 aa, synthetic construct
SKFEVSR

SEQ ID NO: 168837 - protein, 7 aa, synthetic construct
ATYPKQL

SEQ ID NO: 168838 - protein, 7 aa, synthetic construct
FVAKELR

SEQ ID NO: 168839 - protein, 7 aa, synthetic construct
SKTDHLR

SEQ ID NO: 168840 - protein, 7 aa, synthetic construct
QKNLPIV

SEQ ID NO: 168841 - protein, 7 aa, synthetic construct
SYQGIKL

SEQ ID NO: 168842 - protein, 7 aa, synthetic construct
REHLKPI

SEQ ID NO: 168843 - protein, 7 aa, synthetic construct
MVMNAKH

SEQ ID NO: 168844 - protein, 7 aa, synthetic construct
VKFNEPK

SEQ ID NO: 168845 - protein, 7 aa, synthetic construct
LIKGIQY

SEQ ID NO: 168846 - protein, 7 aa, synthetic construct
KKEVYHQ

SEQ ID NO: 168847 - protein, 7 aa, synthetic construct
PVVKGYM

SEQ ID NO: 168848 - protein, 7 aa, synthetic construct
NKMISPH

SEQ ID NO: 168849 - protein, 7 aa, synthetic construct
IREYIPK

SEQ ID NO: 168850 - protein, 7 aa, synthetic construct
QVDRALK

SEQ ID NO: 168851 - protein, 7 aa, synthetic construct
DKQIKYL

SEQ ID NO: 168852 - protein, 7 aa, synthetic construct
WGTANLR

SEQ ID NO: 168853 - protein, 7 aa, synthetic construct
TVVEIKK

SEQ ID NO: 168854 - protein, 7 aa, synthetic construct
YNIKIER

SEQ ID NO: 168855 - protein, 7 aa, synthetic construct
IFANTAK

SEQ ID NO: 168856 - protein, 7 aa, synthetic construct
KNSPPHN

SEQ ID NO: 168857 - protein, 7 aa, synthetic construct
KYEPMTR

SEQ ID NO: 168858 - protein, 7 aa, synthetic construct
YISSRPH

SEQ ID NO: 168859 - protein, 7 aa, synthetic construct
PAEKYKN

SEQ ID NO: 168860 - protein, 7 aa, synthetic construct
TYATNKL

SEQ ID NO: 168861 - protein, 7 aa, synthetic construct
GHSILKT

SEQ ID NO: 168862 - protein, 7 aa, synthetic construct
SVNFSAK

SEQ ID NO: 168863 - protein, 7 aa, synthetic construct
AVDQTKR

SEQ ID NO: 168864 - protein, 7 aa, synthetic construct
KMNIDVR

SEQ ID NO: 168865 - protein, 7 aa, synthetic construct
KDKYSLI

SEQ ID NO: 168866 - protein, 7 aa, synthetic construct
SMDIKQR

SEQ ID NO: 168867 - protein, 7 aa, synthetic construct
FHPQKDR

SEQ ID NO: 168868 - protein, 7 aa, synthetic construct
KPIHTTY

SEQ ID NO: 168869 - protein, 7 aa, synthetic construct
IADSRMR

SEQ ID NO: 168870 - protein, 7 aa, synthetic construct
KRDPHIM

SEQ ID NO: 168871 - protein, 7 aa, synthetic construct
TIHGPTR

SEQ ID NO: 168872 - protein, 7 aa, synthetic construct
SDKQIKW

SEQ ID NO: 168873 - protein, 7 aa, synthetic construct
LHAKDNR

SEQ ID NO: 168874 - protein, 7 aa, synthetic construct
VYAGPNK

SEQ ID NO: 168875 - protein, 7 aa, synthetic construct
GVSADRK

SEQ ID NO: 168876 - protein, 7 aa, synthetic construct
GSVKHLL

SEQ ID NO: 168877 - protein, 7 aa, synthetic construct
TEKMPSR

SEQ ID NO: 168878 - protein, 7 aa, synthetic construct
TVEKYRG

SEQ ID NO: 168879 - protein, 7 aa, synthetic construct
VTFNASK

SEQ ID NO: 168880 - protein, 7 aa, synthetic construct
KKDYPIT

SEQ ID NO: 168881 - protein, 7 aa, synthetic construct
PVGKHMH

SEQ ID NO: 168882 - protein, 7 aa, synthetic construct
VHKIQPH

SEQ ID NO: 168883 - protein, 7 aa, synthetic construct
MDASKGR

SEQ ID NO: 168884 - protein, 7 aa, synthetic construct
KLRELIQ

SEQ ID NO: 168885 - protein, 7 aa, synthetic construct
FSIKKEI

SEQ ID NO: 168886 - protein, 7 aa, synthetic construct
KDHRGLI

SEQ ID NO: 168887 - protein, 7 aa, synthetic construct
SPDMNKR

SEQ ID NO: 168888 - protein, 7 aa, synthetic construct
QDKKDPR

SEQ ID NO: 168889 - protein, 7 aa, synthetic construct
NQAGHAK

SEQ ID NO: 168890 - protein, 7 aa, synthetic construct
RSHPLSQ

SEQ ID NO: 168891 - protein, 7 aa, synthetic construct
TSGINKW

SEQ ID NO: 168892 - protein, 7 aa, synthetic construct
KTHEYKM

SEQ ID NO: 168893 - protein, 7 aa, synthetic construct
SSNILKH

SEQ ID NO: 168894 - protein, 7 aa, synthetic construct
ILSHTNR

SEQ ID NO: 168895 - protein, 7 aa, synthetic construct
AKTSDHR

SEQ ID NO: 168896 - protein, 7 aa, synthetic construct
VADRMLR

SEQ ID NO: 168897 - protein, 7 aa, synthetic construct
FSKSDLR

SEQ ID NO: 168898 - protein, 7 aa, synthetic construct
YDANKIK

SEQ ID NO: 168899 - protein, 7 aa, synthetic construct
FKDQISR

SEQ ID NO: 168900 - protein, 7 aa, synthetic construct
APGDARK

SEQ ID NO: 168901 - protein, 7 aa, synthetic construct
ERLPKTV

SEQ ID NO: 168902 - protein, 7 aa, synthetic construct
DKAGVFR

SEQ ID NO: 168903 - protein, 7 aa, synthetic construct
KTDVRSH

SEQ ID NO: 168904 - protein, 7 aa, synthetic construct
KKEPTIW

SEQ ID NO: 168905 - protein, 7 aa, synthetic construct
AGPHPKY

SEQ ID NO: 168906 - protein, 7 aa, synthetic construct
VKDYNQR

SEQ ID NO: 168907 - protein, 7 aa, synthetic construct
NDMNKYK

SEQ ID NO: 168908 - protein, 7 aa, synthetic construct
NPDKNKY

SEQ ID NO: 168909 - protein, 7 aa, synthetic construct
NDQGKPK

SEQ ID NO: 168910 - protein, 7 aa, synthetic construct
VVKPTHY

SEQ ID NO: 168911 - protein, 7 aa, synthetic construct
MYKNDPK

SEQ ID NO: 168912 - protein, 7 aa, synthetic construct
LLGAHNK

SEQ ID NO: 168913 - protein, 7 aa, synthetic construct
PQDVRVK

SEQ ID NO: 168914 - protein, 7 aa, synthetic construct
AKERLIY

SEQ ID NO: 168915 - protein, 7 aa, synthetic construct
YVKIAQH

SEQ ID NO: 168916 - protein, 7 aa, synthetic construct
VSLRENK

SEQ ID NO: 168917 - protein, 7 aa, synthetic construct
TLEGRVK

SEQ ID NO: 168918 - protein, 7 aa, synthetic construct
YTNPVHK

SEQ ID NO: 168919 - protein, 7 aa, synthetic construct
AYKPTIL

SEQ ID NO: 168920 - protein, 7 aa, synthetic construct
PYPGIKM

SEQ ID NO: 168921 - protein, 7 aa, synthetic construct
SFVKPAI

SEQ ID NO: 168922 - protein, 7 aa, synthetic construct
QKYIENK

SEQ ID NO: 168923 - protein, 7 aa, synthetic construct
DSKILRT

SEQ ID NO: 168924 - protein, 7 aa, synthetic construct
FDKLMAR

SEQ ID NO: 168925 - protein, 7 aa, synthetic construct
NSLGHKM

SEQ ID NO: 168926 - protein, 7 aa, synthetic construct
VVDRIAR

SEQ ID NO: 168927 - protein, 7 aa, synthetic construct
YEKTFAK

SEQ ID NO: 168928 - protein, 7 aa, synthetic construct
KMAHPVL

SEQ ID NO: 168929 - protein, 7 aa, synthetic construct
NMDRLTK

SEQ ID NO: 168930 - protein, 7 aa, synthetic construct
KMPNAFV

SEQ ID NO: 168931 - protein, 7 aa, synthetic construct
KEGYIKM

SEQ ID NO: 168932 - protein, 7 aa, synthetic construct
NADRKFL

SEQ ID NO: 168933 - protein, 7 aa, synthetic construct
SDVRIMK

SEQ ID NO: 168934 - protein, 7 aa, synthetic construct
VEKMSQR

SEQ ID NO: 168935 - protein, 7 aa, synthetic construct
LPIHNKL

SEQ ID NO: 168936 - protein, 7 aa, synthetic construct
ARNTENR

SEQ ID NO: 168937 - protein, 7 aa, synthetic construct
GMSQAHK

SEQ ID NO: 168938 - protein, 7 aa, synthetic construct
GISLAKH

SEQ ID NO: 168939 - protein, 7 aa, synthetic construct
SLMGYKA

SEQ ID NO: 168940 - protein, 7 aa, synthetic construct
YMNNPKM

SEQ ID NO: 168941 - protein, 7 aa, synthetic construct
AKYSVEK

SEQ ID NO: 168942 - protein, 7 aa, synthetic construct
IERMLSK

SEQ ID NO: 168943 - protein, 7 aa, synthetic construct
TSHISGR

SEQ ID NO: 168944 - protein, 7 aa, synthetic construct
TLAHPKM

SEQ ID NO: 168945 - protein, 7 aa, synthetic construct
HKQPNPM

SEQ ID NO: 168946 - protein, 7 aa, synthetic construct
SATDGRK

SEQ ID NO: 168947 - protein, 7 aa, synthetic construct
HQIKDIR

SEQ ID NO: 168948 - protein, 7 aa, synthetic construct
QVMPRGQ

SEQ ID NO: 168949 - protein, 7 aa, synthetic construct
PSDATRR

SEQ ID NO: 168950 - protein, 7 aa, synthetic construct
AHVPRTI

SEQ ID NO: 168951 - protein, 7 aa, synthetic construct
SIHGVKY

SEQ ID NO: 168952 - protein, 7 aa, synthetic construct
RIPAIQL

SEQ ID NO: 168953 - protein, 7 aa, synthetic construct
LPHSSNK

SEQ ID NO: 168954 - protein, 7 aa, synthetic construct
NDKKVVW

SEQ ID NO: 168955 - protein, 7 aa, synthetic construct
NKEYPIR

SEQ ID NO: 168956 - protein, 7 aa, synthetic construct
VSTRDNK

SEQ ID NO: 168957 - protein, 7 aa, synthetic construct
KMTNVHT

SEQ ID NO: 168958 - protein, 7 aa, synthetic construct
AEKVVRV

SEQ ID NO: 168959 - protein, 7 aa, synthetic construct
GTNRENK

SEQ ID NO: 168960 - protein, 7 aa, synthetic construct
YPHSNMK

SEQ ID NO: 168961 - protein, 7 aa, synthetic construct
ATNPKYM

SEQ ID NO: 168962 - protein, 7 aa, synthetic construct
VDKFMAK

SEQ ID NO: 168963 - protein, 7 aa, synthetic construct
TMKEYSR

SEQ ID NO: 168964 - protein, 7 aa, synthetic construct
SLHKITY

SEQ ID NO: 168965 - protein, 7 aa, synthetic construct
LERISMK

SEQ ID NO: 168966 - protein, 7 aa, synthetic construct
NADPRAR

SEQ ID NO: 168967 - protein, 7 aa, synthetic construct
KSNPFHG

SEQ ID NO: 168968 - protein, 7 aa, synthetic construct
RTHPINT

SEQ ID NO: 168969 - protein, 7 aa, synthetic construct
QVVGKVW

SEQ ID NO: 168970 - protein, 7 aa, synthetic construct
GVVHVKL

SEQ ID NO: 168971 - protein, 7 aa, synthetic construct
VPNTPKH

SEQ ID NO: 168972 - protein, 7 aa, synthetic construct
NPTDSKR

SEQ ID NO: 168973 - protein, 7 aa, synthetic construct
GKMFESK

SEQ ID NO: 168974 - protein, 7 aa, synthetic construct
KTHKDPI

SEQ ID NO: 168975 - protein, 7 aa, synthetic construct
LPVDKHR

SEQ ID NO: 168976 - protein, 7 aa, synthetic construct
VVNDSRK

SEQ ID NO: 168977 - protein, 7 aa, synthetic construct
YSTKDAR

SEQ ID NO: 168978 - protein, 7 aa, synthetic construct
GSDRVKT

SEQ ID NO: 168979 - protein, 7 aa, synthetic construct
VIQKHHI

SEQ ID NO: 168980 - protein, 7 aa, synthetic construct
LYSKEGK

SEQ ID NO: 168981 - protein, 7 aa, synthetic construct
PLDVKSR

SEQ ID NO: 168982 - protein, 7 aa, synthetic construct
DKTLSKW

SEQ ID NO: 168983 - protein, 7 aa, synthetic construct
PQHKGYT

SEQ ID NO: 168984 - protein, 7 aa, synthetic construct
QFKALTH

SEQ ID NO: 168985 - protein, 7 aa, synthetic construct
HAKHPVM

SEQ ID NO: 168986 - protein, 7 aa, synthetic construct
GLYNATK

SEQ ID NO: 168987 - protein, 7 aa, synthetic construct
TKQDFGR

SEQ ID NO: 168988 - protein, 7 aa, synthetic construct
TTMPKHQ

SEQ ID NO: 168989 - protein, 7 aa, synthetic construct
GPIHMMK

SEQ ID NO: 168990 - protein, 7 aa, synthetic construct
WKIKLQD

SEQ ID NO: 168991 - protein, 7 aa, synthetic construct
NKDKPPW

SEQ ID NO: 168992 - protein, 7 aa, synthetic construct
GKLYEGK

SEQ ID NO: 168993 - protein, 7 aa, synthetic construct
KITPYQQ

SEQ ID NO: 168994 - protein, 7 aa, synthetic construct
AAHPKII

SEQ ID NO: 168995 - protein, 7 aa, synthetic construct
ASVPKHL

SEQ ID NO: 168996 - protein, 7 aa, synthetic construct
RAHPVNV

SEQ ID NO: 168997 - protein, 7 aa, synthetic construct
GVHQNKL

SEQ ID NO: 168998 - protein, 7 aa, synthetic construct
GFDKFAK

SEQ ID NO: 168999 - protein, 7 aa, synthetic construct
ERVSNIK

SEQ ID NO: 169000 - protein, 7 aa, synthetic construct
GTVGAKY

SEQ ID NO: 169001 - protein, 7 aa, synthetic construct
ISHTIAR

SEQ ID NO: 169002 - protein, 7 aa, synthetic construct
RTHVNVV

SEQ ID NO: 169003 - protein, 7 aa, synthetic construct
KHIPSNV

SEQ ID NO: 169004 - protein, 7 aa, synthetic construct
PREGKYQ

SEQ ID NO: 169005 - protein, 7 aa, synthetic construct
ILPSNHR

SEQ ID NO: 169006 - protein, 7 aa, synthetic construct
SSHPKII

SEQ ID NO: 169007 - protein, 7 aa, synthetic construct
DKRLNPN

SEQ ID NO: 169008 - protein, 7 aa, synthetic construct
KPEIHKY

SEQ ID NO: 169009 - protein, 7 aa, synthetic construct
DAGLLKK

SEQ ID NO: 169010 - protein, 7 aa, synthetic construct
SKSILLH

SEQ ID NO: 169011 - protein, 7 aa, synthetic construct
KADYMPK

SEQ ID NO: 169012 - protein, 7 aa, synthetic construct
AMNPKYM

SEQ ID NO: 169013 - protein, 7 aa, synthetic construct
GVIQQKH

SEQ ID NO: 169014 - protein, 7 aa, synthetic construct
GIHNQNK

SEQ ID NO: 169015 - protein, 7 aa, synthetic construct
IDTIKLR

SEQ ID NO: 169016 - protein, 7 aa, synthetic construct
GAGYMAK

SEQ ID NO: 169017 - protein, 7 aa, synthetic construct
AQLKHTH

SEQ ID NO: 169018 - protein, 7 aa, synthetic construct
IYPSSAK

SEQ ID NO: 169019 - protein, 7 aa, synthetic construct
KMLHTSI

SEQ ID NO: 169020 - protein, 7 aa, synthetic construct
LPATERK

SEQ ID NO: 169021 - protein, 7 aa, synthetic construct
KMNPSVF

SEQ ID NO: 169022 - protein, 7 aa, synthetic construct
TYPSGHK

SEQ ID NO: 169023 - protein, 7 aa, synthetic construct
DMKASIR

SEQ ID NO: 169024 - protein, 7 aa, synthetic construct
DKITAAR

SEQ ID NO: 169025 - protein, 7 aa, synthetic construct
TDMVKMK

SEQ ID NO: 169026 - protein, 7 aa, synthetic construct
KFIANNA

SEQ ID NO: 169027 - protein, 7 aa, synthetic construct
DRPDKLR

SEQ ID NO: 169028 - protein, 7 aa, synthetic construct
YDVKMGK

SEQ ID NO: 169029 - protein, 7 aa, synthetic construct
IQFNPKA

SEQ ID NO: 169030 - protein, 7 aa, synthetic construct
KYEMLPK

SEQ ID NO: 169031 - protein, 7 aa, synthetic construct
LFTANKM

SEQ ID NO: 169032 - protein, 7 aa, synthetic construct
IEKSNYK

SEQ ID NO: 169033 - protein, 7 aa, synthetic construct
TSGYISK

SEQ ID NO: 169034 - protein, 7 aa, synthetic construct
VKFPTSM

SEQ ID NO: 169035 - protein, 7 aa, synthetic construct
RAVPLMS

SEQ ID NO: 169036 - protein, 7 aa, synthetic construct
DVAKSMK

SEQ ID NO: 169037 - protein, 7 aa, synthetic construct
AADSKYR

SEQ ID NO: 169038 - protein, 7 aa, synthetic construct
YAHNIQK

SEQ ID NO: 169039 - protein, 7 aa, synthetic construct
YTTPIKH

SEQ ID NO: 169040 - protein, 7 aa, synthetic construct
DRNFVPK

SEQ ID NO: 169041 - protein, 7 aa, synthetic construct
AFASTKH

SEQ ID NO: 169042 - protein, 7 aa, synthetic construct
DTRTISK

SEQ ID NO: 169043 - protein, 7 aa, synthetic construct
PMDMKQR

SEQ ID NO: 169044 - protein, 7 aa, synthetic construct
QPNERLK

SEQ ID NO: 169045 - protein, 7 aa, synthetic construct
VGFNNTR

SEQ ID NO: 169046 - protein, 7 aa, synthetic construct
KETRALF

SEQ ID NO: 169047 - protein, 7 aa, synthetic construct
GSDIKYR

SEQ ID NO: 169048 - protein, 7 aa, synthetic construct
NMAIKHQ

SEQ ID NO: 169049 - protein, 7 aa, synthetic construct
GTIHQKF

SEQ ID NO: 169050 - protein, 7 aa, synthetic construct
VPGDIRR

SEQ ID NO: 169051 - protein, 7 aa, synthetic construct
GKQIYPN

SEQ ID NO: 169052 - protein, 7 aa, synthetic construct
TEKAFVR

SEQ ID NO: 169053 - protein, 7 aa, synthetic construct
QKMFENK

SEQ ID NO: 169054 - protein, 7 aa, synthetic construct
KLNVQDR

SEQ ID NO: 169055 - protein, 7 aa, synthetic construct
TKDIKPW

SEQ ID NO: 169056 - protein, 7 aa, synthetic construct
SSKGIMY

SEQ ID NO: 169057 - protein, 7 aa, synthetic construct
LENIRQK

SEQ ID NO: 169058 - protein, 7 aa, synthetic construct
VLRDKMM

SEQ ID NO: 169059 - protein, 7 aa, synthetic construct
DLRANSK

SEQ ID NO: 169060 - protein, 7 aa, synthetic construct
KSIPGIY

SEQ ID NO: 169061 - protein, 7 aa, synthetic construct
YVDRVQR

SEQ ID NO: 169062 - protein, 7 aa, synthetic construct
SKNPIIY

SEQ ID NO: 169063 - protein, 7 aa, synthetic construct
VEKMVGR

SEQ ID NO: 169064 - protein, 7 aa, synthetic construct
TYQGLKH

SEQ ID NO: 169065 - protein, 7 aa, synthetic construct
YSVNIPR

SEQ ID NO: 169066 - protein, 7 aa, synthetic construct
VMKPITY

SEQ ID NO: 169067 - protein, 7 aa, synthetic construct
ITLHKNQ

SEQ ID NO: 169068 - protein, 7 aa, synthetic construct
YQTTVHK

SEQ ID NO: 169069 - protein, 7 aa, synthetic construct
SVYKPLS

SEQ ID NO: 169070 - protein, 7 aa, synthetic construct
LTEIRQK

SEQ ID NO: 169071 - protein, 7 aa, synthetic construct
KEHLKIY

SEQ ID NO: 169072 - protein, 7 aa, synthetic construct
HKVVSTY

SEQ ID NO: 169073 - protein, 7 aa, synthetic construct
AQDTRIK

SEQ ID NO: 169074 - protein, 7 aa, synthetic construct
VVDRVTR

SEQ ID NO: 169075 - protein, 7 aa, synthetic construct
EQKQLVR

SEQ ID NO: 169076 - protein, 7 aa, synthetic construct
TTDKMKW

SEQ ID NO: 169077 - protein, 7 aa, synthetic construct
RTINKEI

SEQ ID NO: 169078 - protein, 7 aa, synthetic construct
KTYPTLS

SEQ ID NO: 169079 - protein, 7 aa, synthetic construct
ISARENK

SEQ ID NO: 169080 - protein, 7 aa, synthetic construct
HTPKFNV

SEQ ID NO: 169081 - protein, 7 aa, synthetic construct
QVSREVK

SEQ ID NO: 169082 - protein, 7 aa, synthetic construct
FLSTNKH

SEQ ID NO: 169083 - protein, 7 aa, synthetic construct
KTDRNFI

SEQ ID NO: 169084 - protein, 7 aa, synthetic construct
HVGGQGK

SEQ ID NO: 169085 - protein, 7 aa, synthetic construct
KEIKNMY

SEQ ID NO: 169086 - protein, 7 aa, synthetic construct
TYQTVAK

SEQ ID NO: 169087 - protein, 7 aa, synthetic construct
PENKVPR

SEQ ID NO: 169088 - protein, 7 aa, synthetic construct
GLSRLDK

SEQ ID NO: 169089 - protein, 7 aa, synthetic construct
SYDKARL

SEQ ID NO: 169090 - protein, 7 aa, synthetic construct
AKTYSEK

SEQ ID NO: 169091 - protein, 7 aa, synthetic construct
MMSRELK

SEQ ID NO: 169092 - protein, 7 aa, synthetic construct
AVTKPMY

SEQ ID NO: 169093 - protein, 7 aa, synthetic construct
DFQKNMK

SEQ ID NO: 169094 - protein, 7 aa, synthetic construct
THIPRDK

SEQ ID NO: 169095 - protein, 7 aa, synthetic construct
KPYTSER

SEQ ID NO: 169096 - protein, 7 aa, synthetic construct
SIDKVKW

SEQ ID NO: 169097 - protein, 7 aa, synthetic construct
IPPPAIR

SEQ ID NO: 169098 - protein, 7 aa, synthetic construct
PGDINKR

SEQ ID NO: 169099 - protein, 7 aa, synthetic construct
TIKPIHM

SEQ ID NO: 169100 - protein, 7 aa, synthetic construct
VDGKQIR

SEQ ID NO: 169101 - protein, 7 aa, synthetic construct
LSRTQDK

SEQ ID NO: 169102 - protein, 7 aa, synthetic construct
LFSKEMR

SEQ ID NO: 169103 - protein, 7 aa, synthetic construct
RVIPSHP

SEQ ID NO: 169104 - protein, 7 aa, synthetic construct
MKTPDKW

SEQ ID NO: 169105 - protein, 7 aa, synthetic construct
PTVHRST

SEQ ID NO: 169106 - protein, 7 aa, synthetic construct
STVPKIH

SEQ ID NO: 169107 - protein, 7 aa, synthetic construct
TMPNPRQ

SEQ ID NO: 169108 - protein, 7 aa, synthetic construct
FAGGVTR

SEQ ID NO: 169109 - protein, 7 aa, synthetic construct
TTREKQY

SEQ ID NO: 169110 - protein, 7 aa, synthetic construct
RTDIQKY

SEQ ID NO: 169111 - protein, 7 aa, synthetic construct
ATHPKNV

SEQ ID NO: 169112 - protein, 7 aa, synthetic construct
HFAGKDK

SEQ ID NO: 169113 - protein, 7 aa, synthetic construct
MLSHSSK

SEQ ID NO: 169114 - protein, 7 aa, synthetic construct
LEGRQVK

SEQ ID NO: 169115 - protein, 7 aa, synthetic construct
PQVKISY

SEQ ID NO: 169116 - protein, 7 aa, synthetic construct
YSHLATK

SEQ ID NO: 169117 - protein, 7 aa, synthetic construct
IQYKTDK

SEQ ID NO: 169118 - protein, 7 aa, synthetic construct
MDKTFAR

SEQ ID NO: 169119 - protein, 7 aa, synthetic construct
KKELNQW

SEQ ID NO: 169120 - protein, 7 aa, synthetic construct
TKFTEMR

SEQ ID NO: 169121 - protein, 7 aa, synthetic construct
YVHSNQK

SEQ ID NO: 169122 - protein, 7 aa, synthetic construct
GRDKTDK

SEQ ID NO: 169123 - protein, 7 aa, synthetic construct
SIMGQKH

SEQ ID NO: 169124 - protein, 7 aa, synthetic construct
ITEKYRV

SEQ ID NO: 169125 - protein, 7 aa, synthetic construct
KLDTNKW

SEQ ID NO: 169126 - protein, 7 aa, synthetic construct
YLNAQHK

SEQ ID NO: 169127 - protein, 7 aa, synthetic construct
SISPKFI

SEQ ID NO: 169128 - protein, 7 aa, synthetic construct
YITDAKR

SEQ ID NO: 169129 - protein, 7 aa, synthetic construct
VVRTPKE

SEQ ID NO: 169130 - protein, 7 aa, synthetic construct
QMPEPKR

SEQ ID NO: 169131 - protein, 7 aa, synthetic construct
YKEIQRL

SEQ ID NO: 169132 - protein, 7 aa, synthetic construct
EQKALIR

SEQ ID NO: 169133 - protein, 7 aa, synthetic construct
INRDKLL

SEQ ID NO: 169134 - protein, 7 aa, synthetic construct
IINNPKF

SEQ ID NO: 169135 - protein, 7 aa, synthetic construct
HKEGYKT

SEQ ID NO: 169136 - protein, 7 aa, synthetic construct
TVVTQRH

SEQ ID NO: 169137 - protein, 7 aa, synthetic construct
YMIKEKT

SEQ ID NO: 169138 - protein, 7 aa, synthetic construct
KPVTVDR

SEQ ID NO: 169139 - protein, 7 aa, synthetic construct
KVDIQSR

SEQ ID NO: 169140 - protein, 7 aa, synthetic construct
FIGASAK

SEQ ID NO: 169141 - protein, 7 aa, synthetic construct
KNFPNLP

SEQ ID NO: 169142 - protein, 7 aa, synthetic construct
SKYTEPK

SEQ ID NO: 169143 - protein, 7 aa, synthetic construct
RDSPKPL

SEQ ID NO: 169144 - protein, 7 aa, synthetic construct
KDIKYNM

SEQ ID NO: 169145 - protein, 7 aa, synthetic construct
GVTIKHL

SEQ ID NO: 169146 - protein, 7 aa, synthetic construct
DMLGRVK

SEQ ID NO: 169147 - protein, 7 aa, synthetic construct
NLPDGRR

SEQ ID NO: 169148 - protein, 7 aa, synthetic construct
ITTPKFV

SEQ ID NO: 169149 - protein, 7 aa, synthetic construct
TIDKRFI

SEQ ID NO: 169150 - protein, 7 aa, synthetic construct
KMHPPPT

SEQ ID NO: 169151 - protein, 7 aa, synthetic construct
IMNPHTR

SEQ ID NO: 169152 - protein, 7 aa, synthetic construct
PYTTMKQ

SEQ ID NO: 169153 - protein, 7 aa, synthetic construct
NSKIYEK

SEQ ID NO: 169154 - protein, 7 aa, synthetic construct
AVHGPKF

SEQ ID NO: 169155 - protein, 7 aa, synthetic construct
SLYGAAK

SEQ ID NO: 169156 - protein, 7 aa, synthetic construct
KDAKEKW

SEQ ID NO: 169157 - protein, 7 aa, synthetic construct
QAFGMPK

SEQ ID NO: 169158 - protein, 7 aa, synthetic construct
FSATHVR

SEQ ID NO: 169159 - protein, 7 aa, synthetic construct
GIAQQHK

SEQ ID NO: 169160 - protein, 7 aa, synthetic construct
KHGPQLV

SEQ ID NO: 169161 - protein, 7 aa, synthetic construct
PEKMRLY

SEQ ID NO: 169162 - protein, 7 aa, synthetic construct
VYATAAK

SEQ ID NO: 169163 - protein, 7 aa, synthetic construct
VKFPVQQ

SEQ ID NO: 169164 - protein, 7 aa, synthetic construct
MKNYDTK

SEQ ID NO: 169165 - protein, 7 aa, synthetic construct
KMGPTYV

SEQ ID NO: 169166 - protein, 7 aa, synthetic construct
PYSGPKA

SEQ ID NO: 169167 - protein, 7 aa, synthetic construct
MTKPVIL

SEQ ID NO: 169168 - protein, 7 aa, synthetic construct
PDVRTKT

SEQ ID NO: 169169 - protein, 7 aa, synthetic construct
PQMKYDK

SEQ ID NO: 169170 - protein, 7 aa, synthetic construct
NPMRIDK

SEQ ID NO: 169171 - protein, 7 aa, synthetic construct
EARINLK

SEQ ID NO: 169172 - protein, 7 aa, synthetic construct
NDMRTVK

SEQ ID NO: 169173 - protein, 7 aa, synthetic construct
ARATDSR

SEQ ID NO: 169174 - protein, 7 aa, synthetic construct
EKQLTVR

SEQ ID NO: 169175 - protein, 7 aa, synthetic construct
PRQAPKE

SEQ ID NO: 169176 - protein, 7 aa, synthetic construct
MTVTKTW

SEQ ID NO: 169177 - protein, 7 aa, synthetic construct
VQHGVTR

SEQ ID NO: 169178 - protein, 7 aa, synthetic construct
KITTIVQ

SEQ ID NO: 169179 - protein, 7 aa, synthetic construct
EPGKNIK

SEQ ID NO: 169180 - protein, 7 aa, synthetic construct
TIDRSKM

SEQ ID NO: 169181 - protein, 7 aa, synthetic construct
KMEVNKW

SEQ ID NO: 169182 - protein, 7 aa, synthetic construct
MLLSAKV

SEQ ID NO: 169183 - protein, 7 aa, synthetic construct
TYASHIK

SEQ ID NO: 169184 - protein, 7 aa, synthetic construct
PQKNPKD

SEQ ID NO: 169185 - protein, 7 aa, synthetic construct
YRELMSK

SEQ ID NO: 169186 - protein, 7 aa, synthetic construct
TLRDVKH

SEQ ID NO: 169187 - protein, 7 aa, synthetic construct
HPNPVSR

SEQ ID NO: 169188 - protein, 7 aa, synthetic construct
QTMPKHM

SEQ ID NO: 169189 - protein, 7 aa, synthetic construct
LQNRDSK

SEQ ID NO: 169190 - protein, 7 aa, synthetic construct
VRSILEK

SEQ ID NO: 169191 - protein, 7 aa, synthetic construct
SILREKV

SEQ ID NO: 169192 - protein, 7 aa, synthetic construct
AMAGTKW

SEQ ID NO: 169193 - protein, 7 aa, synthetic construct
PSHKVHV

SEQ ID NO: 169194 - protein, 7 aa, synthetic construct
VKEINKW

SEQ ID NO: 169195 - protein, 7 aa, synthetic construct
LTGFNKT

SEQ ID NO: 169196 - protein, 7 aa, synthetic construct
VASYTNK

SEQ ID NO: 169197 - protein, 7 aa, synthetic construct
EKNPMSK

SEQ ID NO: 169198 - protein, 7 aa, synthetic construct
YAGQLLK

SEQ ID NO: 169199 - protein, 7 aa, synthetic construct
LIGDKKW

SEQ ID NO: 169200 - protein, 7 aa, synthetic construct
PYVGTKH

SEQ ID NO: 169201 - protein, 7 aa, synthetic construct
ILEKGRY

SEQ ID NO: 169202 - protein, 7 aa, synthetic construct
YAHGVNK

SEQ ID NO: 169203 - protein, 7 aa, synthetic construct
VPIQYAK

SEQ ID NO: 169204 - protein, 7 aa, synthetic construct
YIKELRT

SEQ ID NO: 169205 - protein, 7 aa, synthetic construct
MIKETYR

SEQ ID NO: 169206 - protein, 7 aa, synthetic construct
LAYNPTK

SEQ ID NO: 169207 - protein, 7 aa, synthetic construct
LDQVKAR

SEQ ID NO: 169208 - protein, 7 aa, synthetic construct
LLKYETK

SEQ ID NO: 169209 - protein, 7 aa, synthetic construct
SKFTERM

SEQ ID NO: 169210 - protein, 7 aa, synthetic construct
MDMKTFK

SEQ ID NO: 169211 - protein, 7 aa, synthetic construct
ATPEKRY

SEQ ID NO: 169212 - protein, 7 aa, synthetic construct
KMQVMNL

SEQ ID NO: 169213 - protein, 7 aa, synthetic construct
KHGPNLL

SEQ ID NO: 169214 - protein, 7 aa, synthetic construct
RSTPIQI

SEQ ID NO: 169215 - protein, 7 aa, synthetic construct
VDSRMIK

SEQ ID NO: 169216 - protein, 7 aa, synthetic construct
GDPKQRL

SEQ ID NO: 169217 - protein, 7 aa, synthetic construct
YPTLKER

SEQ ID NO: 169218 - protein, 7 aa, synthetic construct
YVSIQPK

SEQ ID NO: 169219 - protein, 7 aa, synthetic construct
DKGGNFK

SEQ ID NO: 169220 - protein, 7 aa, synthetic construct
FKTLDTR

SEQ ID NO: 169221 - protein, 7 aa, synthetic construct
NMTAKLL

SEQ ID NO: 169222 - protein, 7 aa, synthetic construct
GSMHNKT

SEQ ID NO: 169223 - protein, 7 aa, synthetic construct
SEKMLSR

SEQ ID NO: 169224 - protein, 7 aa, synthetic construct
IEPKVYR

SEQ ID NO: 169225 - protein, 7 aa, synthetic construct
SLAAFKA

SEQ ID NO: 169226 - protein, 7 aa, synthetic construct
VTLHKSM

SEQ ID NO: 169227 - protein, 7 aa, synthetic construct
TEKMTSR

SEQ ID NO: 169228 - protein, 7 aa, synthetic construct
VVHANSR

SEQ ID NO: 169229 - protein, 7 aa, synthetic construct
EKIPKSQ

SEQ ID NO: 169230 - protein, 7 aa, synthetic construct
YKDYPMK

SEQ ID NO: 169231 - protein, 7 aa, synthetic construct
GFSGVTR

SEQ ID NO: 169232 - protein, 7 aa, synthetic construct
KMMPTVI

SEQ ID NO: 169233 - protein, 7 aa, synthetic construct
LAAYSPK

SEQ ID NO: 169234 - protein, 7 aa, synthetic construct
KVKPETW

SEQ ID NO: 169235 - protein, 7 aa, synthetic construct
KDYIKDK

SEQ ID NO: 169236 - protein, 7 aa, synthetic construct
DSRQIIK

SEQ ID NO: 169237 - protein, 7 aa, synthetic construct
LSHSASK

SEQ ID NO: 169238 - protein, 7 aa, synthetic construct
STSPHNR

SEQ ID NO: 169239 - protein, 7 aa, synthetic construct
DSIKSMK

SEQ ID NO: 169240 - protein, 7 aa, synthetic construct
MTRSDMK

SEQ ID NO: 169241 - protein, 7 aa, synthetic construct
PFLQTKA

SEQ ID NO: 169242 - protein, 7 aa, synthetic construct
KRDVPSH

SEQ ID NO: 169243 - protein, 7 aa, synthetic construct
KVTPYQQ

SEQ ID NO: 169244 - protein, 7 aa, synthetic construct
NKEYQAK

SEQ ID NO: 169245 - protein, 7 aa, synthetic construct
QTKNDPR

SEQ ID NO: 169246 - protein, 7 aa, synthetic construct
HLGSQKM

SEQ ID NO: 169247 - protein, 7 aa, synthetic construct
HRDGVTR

SEQ ID NO: 169248 - protein, 7 aa, synthetic construct
KTDYKLT

SEQ ID NO: 169249 - protein, 7 aa, synthetic construct
AFITKNQ

SEQ ID NO: 169250 - protein, 7 aa, synthetic construct
QVFNAAK

SEQ ID NO: 169251 - protein, 7 aa, synthetic construct
KREPMML

SEQ ID NO: 169252 - protein, 7 aa, synthetic construct
QDKPKPL

SEQ ID NO: 169253 - protein, 7 aa, synthetic construct
YPKEIVR

SEQ ID NO: 169254 - protein, 7 aa, synthetic construct
TKYPEVK

SEQ ID NO: 169255 - protein, 7 aa, synthetic construct
KIDRIMV

SEQ ID NO: 169256 - protein, 7 aa, synthetic construct
QGRTDTK

SEQ ID NO: 169257 - protein, 7 aa, synthetic construct
VYSKELK

SEQ ID NO: 169258 - protein, 7 aa, synthetic construct
SIGLIRA

SEQ ID NO: 169259 - protein, 7 aa, synthetic construct
VMTTRDR

SEQ ID NO: 169260 - protein, 7 aa, synthetic construct
AIPAARH

SEQ ID NO: 169261 - protein, 7 aa, synthetic construct
QDVRIVK

SEQ ID NO: 169262 - protein, 7 aa, synthetic construct
KAASPKD

SEQ ID NO: 169263 - protein, 7 aa, synthetic construct
QMANIKH

SEQ ID NO: 169264 - protein, 7 aa, synthetic construct
FLKDARH

SEQ ID NO: 169265 - protein, 7 aa, synthetic construct
LGTIKHL

SEQ ID NO: 169266 - protein, 7 aa, synthetic construct
SDMKIRI

SEQ ID NO: 169267 - protein, 7 aa, synthetic construct
VFTTQKM

SEQ ID NO: 169268 - protein, 7 aa, synthetic construct
LTDRISR

SEQ ID NO: 169269 - protein, 7 aa, synthetic construct
YKLRPGD

SEQ ID NO: 169270 - protein, 7 aa, synthetic construct
DSKMQLR

SEQ ID NO: 169271 - protein, 7 aa, synthetic construct
YQASMLK

SEQ ID NO: 169272 - protein, 7 aa, synthetic construct
AFGNTRL

SEQ ID NO: 169273 - protein, 7 aa, synthetic construct
KTHAALL

SEQ ID NO: 169274 - protein, 7 aa, synthetic construct
KQLNYTH

SEQ ID NO: 169275 - protein, 7 aa, synthetic construct
YPTAVHK

SEQ ID NO: 169276 - protein, 7 aa, synthetic construct
AFSNVLK

SEQ ID NO: 169277 - protein, 7 aa, synthetic construct
SIRQLEK

SEQ ID NO: 169278 - protein, 7 aa, synthetic construct
YQEKFSK

SEQ ID NO: 169279 - protein, 7 aa, synthetic construct
QIRTIDK

SEQ ID NO: 169280 - protein, 7 aa, synthetic construct
KVTRNID

SEQ ID NO: 169281 - protein, 7 aa, synthetic construct
GSQLHKL

SEQ ID NO: 169282 - protein, 7 aa, synthetic construct
TIPALHK

SEQ ID NO: 169283 - protein, 7 aa, synthetic construct
LENQRPK

SEQ ID NO: 169284 - protein, 7 aa, synthetic construct
KEPNMRY

SEQ ID NO: 169285 - protein, 7 aa, synthetic construct
KMHPSGT

SEQ ID NO: 169286 - protein, 7 aa, synthetic construct
VTYPQKQ

SEQ ID NO: 169287 - protein, 7 aa, synthetic construct
MLGRQDK

SEQ ID NO: 169288 - protein, 7 aa, synthetic construct
MYNPDKK

SEQ ID NO: 169289 - protein, 7 aa, synthetic construct
KSFANAL

SEQ ID NO: 169290 - protein, 7 aa, synthetic construct
YKEGYPR

SEQ ID NO: 169291 - protein, 7 aa, synthetic construct
KMHPIGV

SEQ ID NO: 169292 - protein, 7 aa, synthetic construct
ADPRSKT

SEQ ID NO: 169293 - protein, 7 aa, synthetic construct
KYPRELV

SEQ ID NO: 169294 - protein, 7 aa, synthetic construct
GRDIMPR

SEQ ID NO: 169295 - protein, 7 aa, synthetic construct
VKAFEQK

SEQ ID NO: 169296 - protein, 7 aa, synthetic construct
PVDRMSK

SEQ ID NO: 169297 - protein, 7 aa, synthetic construct
LPQDRSK

SEQ ID NO: 169298 - protein, 7 aa, synthetic construct
VQFTSNK

SEQ ID NO: 169299 - protein, 7 aa, synthetic construct
IYATSSK

SEQ ID NO: 169300 - protein, 7 aa, synthetic construct
MSSSYLK

SEQ ID NO: 169301 - protein, 7 aa, synthetic construct
GIDRLSK

SEQ ID NO: 169302 - protein, 7 aa, synthetic construct
KMVPVAL

SEQ ID NO: 169303 - protein, 7 aa, synthetic construct
GSYANLK

SEQ ID NO: 169304 - protein, 7 aa, synthetic construct
AMDASRK

SEQ ID NO: 169305 - protein, 7 aa, synthetic construct
PDKQYSK

SEQ ID NO: 169306 - protein, 7 aa, synthetic construct
KLHASVT

SEQ ID NO: 169307 - protein, 7 aa, synthetic construct
GKFQIMN

SEQ ID NO: 169308 - protein, 7 aa, synthetic construct
RTMTDPK

SEQ ID NO: 169309 - protein, 7 aa, synthetic construct
SNVPRER

SEQ ID NO: 169310 - protein, 7 aa, synthetic construct
KFTPTAL

SEQ ID NO: 169311 - protein, 7 aa, synthetic construct
MIAQVKH

SEQ ID NO: 169312 - protein, 7 aa, synthetic construct
VARTEQK

SEQ ID NO: 169313 - protein, 7 aa, synthetic construct
GQPILPR

SEQ ID NO: 169314 - protein, 7 aa, synthetic construct
KENMNIR

SEQ ID NO: 169315 - protein, 7 aa, synthetic construct
EKPPVLR

SEQ ID NO: 169316 - protein, 7 aa, synthetic construct
GLERYKV

SEQ ID NO: 169317 - protein, 7 aa, synthetic construct
SKMPVNL

SEQ ID NO: 169318 - protein, 7 aa, synthetic construct
FKGEIRI

SEQ ID NO: 169319 - protein, 7 aa, synthetic construct
IEMKISR

SEQ ID NO: 169320 - protein, 7 aa, synthetic construct
TKPLYTQ

SEQ ID NO: 169321 - protein, 7 aa, synthetic construct
GKAVFER

SEQ ID NO: 169322 - protein, 7 aa, synthetic construct
DKIQRLM

SEQ ID NO: 169323 - protein, 7 aa, synthetic construct
KGSLDPR

SEQ ID NO: 169324 - protein, 7 aa, synthetic construct
KYPSETK

SEQ ID NO: 169325 - protein, 7 aa, synthetic construct
PSPAVMR

SEQ ID NO: 169326 - protein, 7 aa, synthetic construct
GSSYVAK

SEQ ID NO: 169327 - protein, 7 aa, synthetic construct
MKDMPKW

SEQ ID NO: 169328 - protein, 7 aa, synthetic construct
AKYSIDK

SEQ ID NO: 169329 - protein, 7 aa, synthetic construct
PADRTTR

SEQ ID NO: 169330 - protein, 7 aa, synthetic construct
DKNVQMR

SEQ ID NO: 169331 - protein, 7 aa, synthetic construct
SVSIREK

SEQ ID NO: 169332 - protein, 7 aa, synthetic construct
GDGKVIK

SEQ ID NO: 169333 - protein, 7 aa, synthetic construct
PYSTVKH

SEQ ID NO: 169334 - protein, 7 aa, synthetic construct
AAYGMAK

SEQ ID NO: 169335 - protein, 7 aa, synthetic construct
YISSHVK

SEQ ID NO: 169336 - protein, 7 aa, synthetic construct
PYSTLKT

SEQ ID NO: 169337 - protein, 7 aa, synthetic construct
TLMERQK

SEQ ID NO: 169338 - protein, 7 aa, synthetic construct
HFKIPTN

SEQ ID NO: 169339 - protein, 7 aa, synthetic construct
AISHTAR

SEQ ID NO: 169340 - protein, 7 aa, synthetic construct
VTRSDAK

SEQ ID NO: 169341 - protein, 7 aa, synthetic construct
LYNASLK

SEQ ID NO: 169342 - protein, 7 aa, synthetic construct
FISTNAR

SEQ ID NO: 169343 - protein, 7 aa, synthetic construct
PAAHLNR

SEQ ID NO: 169344 - protein, 7 aa, synthetic construct
TKFPATL

SEQ ID NO: 169345 - protein, 7 aa, synthetic construct
DRASLNK

SEQ ID NO: 169346 - protein, 7 aa, synthetic construct
NKNYDIK

SEQ ID NO: 169347 - protein, 7 aa, synthetic construct
EYKIKQL

SEQ ID NO: 169348 - protein, 7 aa, synthetic construct
VIGGAFK

SEQ ID NO: 169349 - protein, 7 aa, synthetic construct
KEKNVMW

SEQ ID NO: 169350 - protein, 7 aa, synthetic construct
YPATVHK

SEQ ID NO: 169351 - protein, 7 aa, synthetic construct
KMIPPHN

SEQ ID NO: 169352 - protein, 7 aa, synthetic construct
VSRESLK

SEQ ID NO: 169353 - protein, 7 aa, synthetic construct
YKLKPTD

SEQ ID NO: 169354 - protein, 7 aa, synthetic construct
MEKQMIR

SEQ ID NO: 169355 - protein, 7 aa, synthetic construct
MKDLMSR

SEQ ID NO: 169356 - protein, 7 aa, synthetic construct
AKYSDVK

SEQ ID NO: 169357 - protein, 7 aa, synthetic construct
TKELNKW

SEQ ID NO: 169358 - protein, 7 aa, synthetic construct
KAMPNII

SEQ ID NO: 169359 - protein, 7 aa, synthetic construct
PIDVRTK

SEQ ID NO: 169360 - protein, 7 aa, synthetic construct
EIRAMTK

SEQ ID NO: 169361 - protein, 7 aa, synthetic construct
AIPHHLK

SEQ ID NO: 169362 - protein, 7 aa, synthetic construct
AVGRIPL

SEQ ID NO: 169363 - protein, 7 aa, synthetic construct
MAFNTSK

SEQ ID NO: 169364 - protein, 7 aa, synthetic construct
KTDGTKW

SEQ ID NO: 169365 - protein, 7 aa, synthetic construct
WKEAMHK

SEQ ID NO: 169366 - protein, 7 aa, synthetic construct
PISRDKA

SEQ ID NO: 169367 - protein, 7 aa, synthetic construct
IQTQDRK

SEQ ID NO: 169368 - protein, 7 aa, synthetic construct
DFLGKAK

SEQ ID NO: 169369 - protein, 7 aa, synthetic construct
FDKFREK

SEQ ID NO: 169370 - protein, 7 aa, synthetic construct
KMADHKY

SEQ ID NO: 169371 - protein, 7 aa, synthetic construct
AVAYTAK

SEQ ID NO: 169372 - protein, 7 aa, synthetic construct
KLMENKW

SEQ ID NO: 169373 - protein, 7 aa, synthetic construct
SMINPKM

SEQ ID NO: 169374 - protein, 7 aa, synthetic construct
GSHIPSK

SEQ ID NO: 169375 - protein, 7 aa, synthetic construct
DKGYLVK

SEQ ID NO: 169376 - protein, 7 aa, synthetic construct
FTSAHTK

SEQ ID NO: 169377 - protein, 7 aa, synthetic construct
SQLPFKQ

SEQ ID NO: 169378 - protein, 7 aa, synthetic construct
RDFKINT

SEQ ID NO: 169379 - protein, 7 aa, synthetic construct
GVATHVR

SEQ ID NO: 169380 - protein, 7 aa, synthetic construct
KEKQAIW

SEQ ID NO: 169381 - protein, 7 aa, synthetic construct
SATHVPR

SEQ ID NO: 169382 - protein, 7 aa, synthetic construct
SNDAMKK

SEQ ID NO: 169383 - protein, 7 aa, synthetic construct
ITNDPRK

SEQ ID NO: 169384 - protein, 7 aa, synthetic construct
AQDRVIK

SEQ ID NO: 169385 - protein, 7 aa, synthetic construct
KVLHQSV

SEQ ID NO: 169386 - protein, 7 aa, synthetic construct
PYEKGRT

SEQ ID NO: 169387 - protein, 7 aa, synthetic construct
IDVRTSK

SEQ ID NO: 169388 - protein, 7 aa, synthetic construct
YMNDARK

SEQ ID NO: 169389 - protein, 7 aa, synthetic construct
VQKYDIK

SEQ ID NO: 169390 - protein, 7 aa, synthetic construct
TTKDMKW

SEQ ID NO: 169391 - protein, 7 aa, synthetic construct
TYAAHPK

SEQ ID NO: 169392 - protein, 7 aa, synthetic construct
QNERLPR

SEQ ID NO: 169393 - protein, 7 aa, synthetic construct
VVTGKYT

SEQ ID NO: 169394 - protein, 7 aa, synthetic construct
FGEKVRS

SEQ ID NO: 169395 - protein, 7 aa, synthetic construct
HKSGERM

SEQ ID NO: 169396 - protein, 7 aa, synthetic construct
GQGIHQK

SEQ ID NO: 169397 - protein, 7 aa, synthetic construct
LQRGDIK

SEQ ID NO: 169398 - protein, 7 aa, synthetic construct
MKTYDMK

SEQ ID NO: 169399 - protein, 7 aa, synthetic construct
YQVKIEK

SEQ ID NO: 169400 - protein, 7 aa, synthetic construct
IMIQQKM

SEQ ID NO: 169401 - protein, 7 aa, synthetic construct
IRMTEPK

SEQ ID NO: 169402 - protein, 7 aa, synthetic construct
LMPTMNR

SEQ ID NO: 169403 - protein, 7 aa, synthetic construct
DIKQTIR

SEQ ID NO: 169404 - protein, 7 aa, synthetic construct
GRILTEK

SEQ ID NO: 169405 - protein, 7 aa, synthetic construct
PQDRTTK

SEQ ID NO: 169406 - protein, 7 aa, synthetic construct
YPDLSKR

SEQ ID NO: 169407 - protein, 7 aa, synthetic construct
AVLNTKF

SEQ ID NO: 169408 - protein, 7 aa, synthetic construct
PRDKYSV

SEQ ID NO: 169409 - protein, 7 aa, synthetic construct
WEKIQVK

SEQ ID NO: 169410 - protein, 7 aa, synthetic construct
KSFPNTV

SEQ ID NO: 169411 - protein, 7 aa, synthetic construct
QLYKEQK

SEQ ID NO: 169412 - protein, 7 aa, synthetic construct
TFDATKK

SEQ ID NO: 169413 - protein, 7 aa, synthetic construct
AKHPAVT

SEQ ID NO: 169414 - protein, 7 aa, synthetic construct
QIGMTHK

SEQ ID NO: 169415 - protein, 7 aa, synthetic construct
SPDVRFK

SEQ ID NO: 169416 - protein, 7 aa, synthetic construct
TPGILVR

SEQ ID NO: 169417 - protein, 7 aa, synthetic construct
IDKGPVR

SEQ ID NO: 169418 - protein, 7 aa, synthetic construct
QSKLPKD

SEQ ID NO: 169419 - protein, 7 aa, synthetic construct
KTFPTTS

SEQ ID NO: 169420 - protein, 7 aa, synthetic construct
AMLGRQL

SEQ ID NO: 169421 - protein, 7 aa, synthetic construct
VDGRTIK

SEQ ID NO: 169422 - protein, 7 aa, synthetic construct
DQGKIIK

SEQ ID NO: 169423 - protein, 7 aa, synthetic construct
NKINDKW

SEQ ID NO: 169424 - protein, 7 aa, synthetic construct
QPVDRAK

SEQ ID NO: 169425 - protein, 7 aa, synthetic construct
NDKFLSK

SEQ ID NO: 169426 - protein, 7 aa, synthetic construct
PEKGYLK

SEQ ID NO: 169427 - protein, 7 aa, synthetic construct
YITNAMK

SEQ ID NO: 169428 - protein, 7 aa, synthetic construct
NMPVREK

SEQ ID NO: 169429 - protein, 7 aa, synthetic construct
KVHPTHQ

SEQ ID NO: 169430 - protein, 7 aa, synthetic construct
AKVNPKD

SEQ ID NO: 169431 - protein, 7 aa, synthetic construct
KHLPMNA

SEQ ID NO: 169432 - protein, 7 aa, synthetic construct
PQDRSPK

SEQ ID NO: 169433 - protein, 7 aa, synthetic construct
DPRNPKL

SEQ ID NO: 169434 - protein, 7 aa, synthetic construct
FEPKQMR

SEQ ID NO: 169435 - protein, 7 aa, synthetic construct
EQKIPKT

SEQ ID NO: 169436 - protein, 7 aa, synthetic construct
QFGDVKR

SEQ ID NO: 169437 - protein, 7 aa, synthetic construct
HITNAKM

SEQ ID NO: 169438 - protein, 7 aa, synthetic construct
HKVIQAM

SEQ ID NO: 169439 - protein, 7 aa, synthetic construct
KTIPSGY

SEQ ID NO: 169440 - protein, 7 aa, synthetic construct
QTLNSFK

SEQ ID NO: 169441 - protein, 7 aa, synthetic construct
TYGQALK

SEQ ID NO: 169442 - protein, 7 aa, synthetic construct
TILERSK

SEQ ID NO: 169443 - protein, 7 aa, synthetic construct
SISYTAK

SEQ ID NO: 169444 - protein, 7 aa, synthetic construct
SVGYQGK

SEQ ID NO: 169445 - protein, 7 aa, synthetic construct
AKIYEQK

SEQ ID NO: 169446 - protein, 7 aa, synthetic construct
IDAIRGR

SEQ ID NO: 169447 - protein, 7 aa, synthetic construct
VKRSDPD

SEQ ID NO: 169448 - protein, 7 aa, synthetic construct
PDPRTKT

SEQ ID NO: 169449 - protein, 7 aa, synthetic construct
FDAKVQR

SEQ ID NO: 169450 - protein, 7 aa, synthetic construct
GVRQDAK

SEQ ID NO: 169451 - protein, 7 aa, synthetic construct
PYQMKDK

SEQ ID NO: 169452 - protein, 7 aa, synthetic construct
PRVTAKD

SEQ ID NO: 169453 - protein, 7 aa, synthetic construct
PYSALKA

SEQ ID NO: 169454 - protein, 7 aa, synthetic construct
SLDQLKK

SEQ ID NO: 169455 - protein, 7 aa, synthetic construct
FPTTDKR

SEQ ID NO: 169456 - protein, 7 aa, synthetic construct
QIDRITK

SEQ ID NO: 169457 - protein, 7 aa, synthetic construct
AKEYSKL

SEQ ID NO: 169458 - protein, 7 aa, synthetic construct
VKDYPAK

SEQ ID NO: 169459 - protein, 7 aa, synthetic construct
WVKDIKS

SEQ ID NO: 169460 - protein, 7 aa, synthetic construct
LQDRISK

SEQ ID NO: 169461 - protein, 7 aa, synthetic construct
ADSPAKK

SEQ ID NO: 169462 - protein, 7 aa, synthetic construct
TSYIKEK

SEQ ID NO: 169463 - protein, 7 aa, synthetic construct
TSHIQSK

SEQ ID NO: 169464 - protein, 7 aa, synthetic construct
YVAQVAK

SEQ ID NO: 169465 - protein, 7 aa, synthetic construct
TPLDNRK

SEQ ID NO: 169466 - protein, 7 aa, synthetic construct
MFGSTPK

SEQ ID NO: 169467 - protein, 7 aa, synthetic construct
WPNQDKR

SEQ ID NO: 169468 - protein, 7 aa, synthetic construct
LYSNPKL

SEQ ID NO: 169469 - protein, 7 aa, synthetic construct
WEKTNLK

SEQ ID NO: 169470 - protein, 7 aa, synthetic construct
FTAERNK

SEQ ID NO: 169471 - protein, 7 aa, synthetic construct
GSFNLNK

SEQ ID NO: 169472 - protein, 7 aa, synthetic construct
YADPVKK

SEQ ID NO: 169473 - protein, 7 aa, synthetic construct
GKDKPVW

SEQ ID NO: 169474 - protein, 7 aa, synthetic construct
ATKYDVK

SEQ ID NO: 169475 - protein, 7 aa, synthetic construct
IVDINRK

SEQ ID NO: 169476 - protein, 7 aa, synthetic construct
SANYLAK

SEQ ID NO: 169477 - protein, 7 aa, synthetic construct
AVSTAKW

SEQ ID NO: 169478 - protein, 7 aa, synthetic construct
VTSNIKW

SEQ ID NO: 169479 - protein, 7 aa, synthetic construct
GMDRNVK

SEQ ID NO: 169480 - protein, 7 aa, synthetic construct
IEGRMMK

SEQ ID NO: 169481 - protein, 7 aa, synthetic construct
KVVPASF

SEQ ID NO: 169482 - protein, 7 aa, synthetic construct
QLNISHK

SEQ ID NO: 169483 - protein, 7 aa, synthetic construct
ITGDPRK

SEQ ID NO: 169484 - protein, 7 aa, synthetic construct
KLDYGKL

SEQ ID NO: 169485 - protein, 7 aa, synthetic construct
YAAQIAK

SEQ ID NO: 169486 - protein, 7 aa, synthetic construct
EKHPTMK

SEQ ID NO: 169487 - protein, 7 aa, synthetic construct
MQGDVRK

SEQ ID NO: 169488 - protein, 7 aa, synthetic construct
QTIPKNF

SEQ ID NO: 169489 - protein, 7 aa, synthetic construct
HAGGASK

SEQ ID NO: 169490 - protein, 7 aa, synthetic construct
GQSQFLK

SEQ ID NO: 169491 - protein, 7 aa, synthetic construct
FVGGISK

SEQ ID NO: 169492 - protein, 7 aa, synthetic construct
KVMPTTM

SEQ ID NO: 169493 - protein, 7 aa, synthetic construct
YTNNIPK

SEQ ID NO: 169494 - protein, 7 aa, synthetic construct
YVAGALK

SEQ ID NO: 169495 - protein, 7 aa, synthetic construct
QKDVYTR

SEQ ID NO: 169496 - protein, 7 aa, synthetic construct
HKDGFRA

SEQ ID NO: 169497 - protein, 7 aa, synthetic construct
IKAFDSK

SEQ ID NO: 169498 - protein, 7 aa, synthetic construct
VEKMPMK

SEQ ID NO: 169499 - protein, 7 aa, synthetic construct
VMANPRA

SEQ ID NO: 169500 - protein, 7 aa, synthetic construct
AKDVYAR

SEQ ID NO: 169501 - protein, 7 aa, synthetic construct
AIDRGKL

SEQ ID NO: 169502 - protein, 7 aa, synthetic construct
TTTIQNR

SEQ ID NO: 169503 - protein, 7 aa, synthetic construct
KIDLGRQ

SEQ ID NO: 169504 - protein, 7 aa, synthetic construct
TVIQDRK

SEQ ID NO: 169505 - protein, 7 aa, synthetic construct
LARQDLK

SEQ ID NO: 169506 - protein, 7 aa, synthetic construct
YKIEIPR

SEQ ID NO: 169507 - protein, 7 aa, synthetic construct
VPSEPKR

SEQ ID NO: 169508 - protein, 7 aa, synthetic construct
NADPNRR

SEQ ID NO: 169509 - protein, 7 aa, synthetic construct
PTDRMVK

SEQ ID NO: 169510 - protein, 7 aa, synthetic construct
KQANEKW

SEQ ID NO: 169511 - protein, 7 aa, synthetic construct
FADRTLK

SEQ ID NO: 169512 - protein, 7 aa, synthetic construct
RDVHKYP

SEQ ID NO: 169513 - protein, 7 aa, synthetic construct
PTERVPR

SEQ ID NO: 169514 - protein, 7 aa, synthetic construct
ISGSPHK

SEQ ID NO: 169515 - protein, 7 aa, synthetic construct
LPNTDRR

SEQ ID NO: 169516 - protein, 7 aa, synthetic construct
AYPPTAK

SEQ ID NO: 169517 - protein, 7 aa, synthetic construct
YIDKISR

SEQ ID NO: 169518 - protein, 7 aa, synthetic construct
ADKMKTW

SEQ ID NO: 169519 - protein, 7 aa, synthetic construct
WKAEVSR

SEQ ID NO: 169520 - protein, 7 aa, synthetic construct
PQDIKYK

SEQ ID NO: 169521 - protein, 7 aa, synthetic construct
VASNFLK

SEQ ID NO: 169522 - protein, 7 aa, synthetic construct
GSNKDLR

SEQ ID NO: 169523 - protein, 7 aa, synthetic construct
MPNSSNK

SEQ ID NO: 169524 - protein, 7 aa, synthetic construct
IFQGQQK

SEQ ID NO: 169525 - protein, 7 aa, synthetic construct
TDNPLKK

SEQ ID NO: 169526 - protein, 7 aa, synthetic construct
ITPNPKM

SEQ ID NO: 169527 - protein, 7 aa, synthetic construct
ILNPDRK

SEQ ID NO: 169528 - protein, 7 aa, synthetic construct
DKNIYPK

SEQ ID NO: 169529 - protein, 7 aa, synthetic construct
YRENIMK

SEQ ID NO: 169530 - protein, 7 aa, synthetic construct
HASGIKY

SEQ ID NO: 169531 - protein, 7 aa, synthetic construct
YRSEIVK

SEQ ID NO: 169532 - protein, 7 aa, synthetic construct
AMMPKVI

SEQ ID NO: 169533 - protein, 7 aa, synthetic construct
KNIPMDK

SEQ ID NO: 169534 - protein, 7 aa, synthetic construct
MPDPARR

SEQ ID NO: 169535 - protein, 7 aa, synthetic construct
IIDPNRR

SEQ ID NO: 169536 - protein, 7 aa, synthetic construct
ARTVDVR

SEQ ID NO: 169537 - protein, 7 aa, synthetic construct
RGEIMPK

SEQ ID NO: 169538 - protein, 7 aa, synthetic construct
DKFSIQR

SEQ ID NO: 169539 - protein, 7 aa, synthetic construct
PYSKELK

SEQ ID NO: 169540 - protein, 7 aa, synthetic construct
SPDKYKV

SEQ ID NO: 169541 - protein, 7 aa, synthetic construct
VLAGDRK

SEQ ID NO: 169542 - protein, 7 aa, synthetic construct
IKDGYLR

SEQ ID NO: 169543 - protein, 7 aa, synthetic construct
TINREIK

SEQ ID NO: 169544 - protein, 7 aa, synthetic construct
EIKPGIR

SEQ ID NO: 169545 - protein, 7 aa, synthetic construct
TEKLGRL

SEQ ID NO: 169546 - protein, 7 aa, synthetic construct
QTLPKNL

SEQ ID NO: 169547 - protein, 7 aa, synthetic construct
IDAMRPR

SEQ ID NO: 169548 - protein, 7 aa, synthetic construct
QIDIQKK

SEQ ID NO: 169549 - protein, 7 aa, synthetic construct
APVYPAK

SEQ ID NO: 169550 - protein, 7 aa, synthetic construct
QQDPTRR

SEQ ID NO: 169551 - protein, 7 aa, synthetic construct
PDSPGKR

SEQ ID NO: 169552 - protein, 7 aa, synthetic construct
ETNQKMR

SEQ ID NO: 169553 - protein, 7 aa, synthetic construct
ETTSAKR

SEQ ID NO: 169554 - protein, 7 aa, synthetic construct
ETNAPKR

SEQ ID NO: 169555 - protein, 7 aa, synthetic construct
ETNRTKT

SEQ ID NO: 169556 - protein, 7 aa, synthetic construct
ETNNTRR

SEQ ID NO: 169557 - protein, 7 aa, synthetic construct
ETNVARK

SEQ ID NO: 169558 - protein, 7 aa, synthetic construct
TGNRADR

SEQ ID NO: 169559 - protein, 7 aa, synthetic construct
ETNQKTR

SEQ ID NO: 169560 - protein, 7 aa, synthetic construct
HTGNAGR

SEQ ID NO: 169561 - protein, 7 aa, synthetic construct
EPPRAVR

SEQ ID NO: 169562 - protein, 7 aa, synthetic construct
EVNTKGR

SEQ ID NO: 169563 - protein, 7 aa, synthetic construct
EKTRAGS

SEQ ID NO: 169564 - protein, 7 aa, synthetic construct
FLNRADR

SEQ ID NO: 169565 - protein, 7 aa, synthetic construct
EKNRQGN

SEQ ID NO: 169566 - protein, 7 aa, synthetic construct
TDNKAGR

SEQ ID NO: 169567 - protein, 7 aa, synthetic construct
ESKVAGR

SEQ ID NO: 169568 - protein, 7 aa, synthetic construct
ETKYPGR

SEQ ID NO: 169569 - protein, 7 aa, synthetic construct
MENRAQR

SEQ ID NO: 169570 - protein, 7 aa, synthetic construct
EKNRALS

SEQ ID NO: 169571 - protein, 7 aa, synthetic construct
DTSRAQR

SEQ ID NO: 169572 - protein, 7 aa, synthetic construct
ENTKAGR

SEQ ID NO: 169573 - protein, 7 aa, synthetic construct
LTNRHGG

SEQ ID NO: 169574 - protein, 7 aa, synthetic construct
AENRAGK

SEQ ID NO: 169575 - protein, 7 aa, synthetic construct
ITERAAR

SEQ ID NO: 169576 - protein, 7 aa, synthetic construct
KTDRDGR

SEQ ID NO: 169577 - protein, 7 aa, synthetic construct
EKIQAGR

SEQ ID NO: 169578 - protein, 7 aa, synthetic construct
ETNPQKR

SEQ ID NO: 169579 - protein, 7 aa, synthetic construct
LTDRPGR

SEQ ID NO: 169580 - protein, 7 aa, synthetic construct
MLNREGR

SEQ ID NO: 169581 - protein, 7 aa, synthetic construct
GTHPAGR

SEQ ID NO: 169582 - protein, 7 aa, synthetic construct
ATHRAGV

SEQ ID NO: 169583 - protein, 7 aa, synthetic construct
ETTRAKP

SEQ ID NO: 169584 - protein, 7 aa, synthetic construct
ETNRLKM

SEQ ID NO: 169585 - protein, 7 aa, synthetic construct
ITNAAHR

SEQ ID NO: 169586 - protein, 7 aa, synthetic construct
RTEAAGR

SEQ ID NO: 169587 - protein, 7 aa, synthetic construct
FTARAGG

SEQ ID NO: 169588 - protein, 7 aa, synthetic construct
PTNRAER

SEQ ID NO: 169589 - protein, 7 aa, synthetic construct
FTKRAGE

SEQ ID NO: 169590 - protein, 7 aa, synthetic construct
EKTRAGQ

SEQ ID NO: 169591 - protein, 7 aa, synthetic construct
GTNRSDR

SEQ ID NO: 169592 - protein, 7 aa, synthetic construct
PNERAGR

SEQ ID NO: 169593 - protein, 7 aa, synthetic construct
EKPRAGL

SEQ ID NO: 169594 - protein, 7 aa, synthetic construct
NTDRAQR

SEQ ID NO: 169595 - protein, 7 aa, synthetic construct
ETNSTKR

SEQ ID NO: 169596 - protein, 7 aa, synthetic construct
RTNMEGR

SEQ ID NO: 169597 - protein, 7 aa, synthetic construct
ETPRGMR

SEQ ID NO: 169598 - protein, 7 aa, synthetic construct
EKNRAMI

SEQ ID NO: 169599 - protein, 7 aa, synthetic construct
ATNRKGD

SEQ ID NO: 169600 - protein, 7 aa, synthetic construct
ETKRMGN

SEQ ID NO: 169601 - protein, 7 aa, synthetic construct
ENNKAAR

SEQ ID NO: 169602 - protein, 7 aa, synthetic construct
KTIRAGD

SEQ ID NO: 169603 - protein, 7 aa, synthetic construct
TTERAIR

SEQ ID NO: 169604 - protein, 7 aa, synthetic construct
ELTKAGR

SEQ ID NO: 169605 - protein, 7 aa, synthetic construct
EKNIIGR

SEQ ID NO: 169606 - protein, 7 aa, synthetic construct
ETKMPGR

SEQ ID NO: 169607 - protein, 7 aa, synthetic construct
RTNPEGR

SEQ ID NO: 169608 - protein, 7 aa, synthetic construct
ETKRAIA

SEQ ID NO: 169609 - protein, 7 aa, synthetic construct
VENRANR

SEQ ID NO: 169610 - protein, 7 aa, synthetic construct
EANKASR

SEQ ID NO: 169611 - protein, 7 aa, synthetic construct
ETKGPGR

SEQ ID NO: 169612 - protein, 7 aa, synthetic construct
ETNKAVR

SEQ ID NO: 169613 - protein, 7 aa, synthetic construct
ETKRIGF

SEQ ID NO: 169614 - protein, 7 aa, synthetic construct
ETKRQGN

SEQ ID NO: 169615 - protein, 7 aa, synthetic construct
RTNDVGR

SEQ ID NO: 169616 - protein, 7 aa, synthetic construct
ETQRAQK

SEQ ID NO: 169617 - protein, 7 aa, synthetic construct
FTANAGR

SEQ ID NO: 169618 - protein, 7 aa, synthetic construct
ETNRTPK

SEQ ID NO: 169619 - protein, 7 aa, synthetic construct
EPNRAMK

SEQ ID NO: 169620 - protein, 7 aa, synthetic construct
EQKLAGR

SEQ ID NO: 169621 - protein, 7 aa, synthetic construct
EIKRAGS

SEQ ID NO: 169622 - protein, 7 aa, synthetic construct
ITNRARD

SEQ ID NO: 169623 - protein, 7 aa, synthetic construct
QTDRASR

SEQ ID NO: 169624 - protein, 7 aa, synthetic construct
EIRNAGR

SEQ ID NO: 169625 - protein, 7 aa, synthetic construct
FTNAASR

SEQ ID NO: 169626 - protein, 7 aa, synthetic construct
MANREGR

SEQ ID NO: 169627 - protein, 7 aa, synthetic construct
SLERAGR

SEQ ID NO: 169628 - protein, 7 aa, synthetic construct
EPNKQGR

SEQ ID NO: 169629 - protein, 7 aa, synthetic construct
VTHRAGG

SEQ ID NO: 169630 - protein, 7 aa, synthetic construct
EPNQAKR

SEQ ID NO: 169631 - protein, 7 aa, synthetic construct
TENRAPR

SEQ ID NO: 169632 - protein, 7 aa, synthetic construct
RENREGR

SEQ ID NO: 169633 - protein, 7 aa, synthetic construct
ETKRAPL

SEQ ID NO: 169634 - protein, 7 aa, synthetic construct
STERASR

SEQ ID NO: 169635 - protein, 7 aa, synthetic construct
EKNRQGS

SEQ ID NO: 169636 - protein, 7 aa, synthetic construct
GTDRAPR

SEQ ID NO: 169637 - protein, 7 aa, synthetic construct
ETKRVGL

SEQ ID NO: 169638 - protein, 7 aa, synthetic construct
ETNRIAK

SEQ ID NO: 169639 - protein, 7 aa, synthetic construct
ETNVPKR

SEQ ID NO: 169640 - protein, 7 aa, synthetic construct
ETNKNAR

SEQ ID NO: 169641 - protein, 7 aa, synthetic construct
ATNRTER

SEQ ID NO: 169642 - protein, 7 aa, synthetic construct
ETNKAKA

SEQ ID NO: 169643 - protein, 7 aa, synthetic construct
FTNREAR

SEQ ID NO: 169644 - protein, 7 aa, synthetic construct
EIKRAGV

SEQ ID NO: 169645 - protein, 7 aa, synthetic construct
EVNRAMK

SEQ ID NO: 169646 - protein, 7 aa, synthetic construct
PINRAER

SEQ ID NO: 169647 - protein, 7 aa, synthetic construct
EQKRAGN

SEQ ID NO: 169648 - protein, 7 aa, synthetic construct
TTNRPDR

SEQ ID NO: 169649 - protein, 7 aa, synthetic construct
ETNLKSR

SEQ ID NO: 169650 - protein, 7 aa, synthetic construct
ELNKMGR

SEQ ID NO: 169651 - protein, 7 aa, synthetic construct
ETAKALR

SEQ ID NO: 169652 - protein, 7 aa, synthetic construct
STQRADR

SEQ ID NO: 169653 - protein, 7 aa, synthetic construct
QTNREVR

SEQ ID NO: 169654 - protein, 7 aa, synthetic construct
ETNRMAK

SEQ ID NO: 169655 - protein, 7 aa, synthetic construct
ETNRNIK

SEQ ID NO: 169656 - protein, 7 aa, synthetic construct
TTSRAER

SEQ ID NO: 169657 - protein, 7 aa, synthetic construct
TTERANR

SEQ ID NO: 169658 - protein, 7 aa, synthetic construct
ETKRAMV

SEQ ID NO: 169659 - protein, 7 aa, synthetic construct
EAPRTGR

SEQ ID NO: 169660 - protein, 7 aa, synthetic construct
ESKRAGI

SEQ ID NO: 169661 - protein, 7 aa, synthetic construct
EPMKAGR

SEQ ID NO: 169662 - protein, 7 aa, synthetic construct
ITNRAKD

SEQ ID NO: 169663 - protein, 7 aa, synthetic construct
ADNRAMR

SEQ ID NO: 169664 - protein, 7 aa, synthetic construct
VTNRMER

SEQ ID NO: 169665 - protein, 7 aa, synthetic construct
EPPRAGR

SEQ ID NO: 169666 - protein, 7 aa, synthetic construct
ETITAKR

SEQ ID NO: 169667 - protein, 7 aa, synthetic construct
QTHRAGN

SEQ ID NO: 169668 - protein, 7 aa, synthetic construct
ENPKAGR

SEQ ID NO: 169669 - protein, 7 aa, synthetic construct
AFNREGR

SEQ ID NO: 169670 - protein, 7 aa, synthetic construct
NADRAGR

SEQ ID NO: 169671 - protein, 7 aa, synthetic construct
ADNRQGR

SEQ ID NO: 169672 - protein, 7 aa, synthetic construct
ELNRGGK

SEQ ID NO: 169673 - protein, 7 aa, synthetic construct
ITNRIER

SEQ ID NO: 169674 - protein, 7 aa, synthetic construct
RTNAAER

SEQ ID NO: 169675 - protein, 7 aa, synthetic construct
YDNRASR

SEQ ID NO: 169676 - protein, 7 aa, synthetic construct
DTNRAVK

SEQ ID NO: 169677 - protein, 7 aa, synthetic construct
DTNPKGR

SEQ ID NO: 169678 - protein, 7 aa, synthetic construct
GTNRAHG

SEQ ID NO: 169679 - protein, 7 aa, synthetic construct
NTKRAGD

SEQ ID NO: 169680 - protein, 7 aa, synthetic construct
ETARVGR

SEQ ID NO: 169681 - protein, 7 aa, synthetic construct
DTNTRGR

SEQ ID NO: 169682 - protein, 7 aa, synthetic construct
ETNRPVK

SEQ ID NO: 169683 - protein, 7 aa, synthetic construct
EINRVGK

SEQ ID NO: 169684 - protein, 7 aa, synthetic construct
ITDRAIR

SEQ ID NO: 169685 - protein, 7 aa, synthetic construct
ETPAARR

SEQ ID NO: 169686 - protein, 7 aa, synthetic construct
GTTGAGR

SEQ ID NO: 169687 - protein, 7 aa, synthetic construct
ATTRAER

SEQ ID NO: 169688 - protein, 7 aa, synthetic construct
NTERALR

SEQ ID NO: 169689 - protein, 7 aa, synthetic construct
DTMKAGR

SEQ ID NO: 169690 - protein, 7 aa, synthetic construct
EKNIMGR

SEQ ID NO: 169691 - protein, 7 aa, synthetic construct
FTNRAVG

SEQ ID NO: 169692 - protein, 7 aa, synthetic construct
ETKLAGR

SEQ ID NO: 169693 - protein, 7 aa, synthetic construct
PTGRADR

SEQ ID NO: 169694 - protein, 7 aa, synthetic construct
ETQRAVR

SEQ ID NO: 169695 - protein, 7 aa, synthetic construct
EMNRALK

SEQ ID NO: 169696 - protein, 7 aa, synthetic construct
RTVDAGR

SEQ ID NO: 169697 - protein, 7 aa, synthetic construct
QTDRTGR

SEQ ID NO: 169698 - protein, 7 aa, synthetic construct
EMKIAGR

SEQ ID NO: 169699 - protein, 7 aa, synthetic construct
PTNRSDR

SEQ ID NO: 169700 - protein, 7 aa, synthetic construct
DALRAGR

SEQ ID NO: 169701 - protein, 7 aa, synthetic construct
ETNRQRP

SEQ ID NO: 169702 - protein, 7 aa, synthetic construct
GTERAQR

SEQ ID NO: 169703 - protein, 7 aa, synthetic construct
DTNAAKR

SEQ ID NO: 169704 - protein, 7 aa, synthetic construct
EINNKGR

SEQ ID NO: 169705 - protein, 7 aa, synthetic construct
YTNTAHR

SEQ ID NO: 169706 - protein, 7 aa, synthetic construct
SPERAGR

SEQ ID NO: 169707 - protein, 7 aa, synthetic construct
ETNQKPR

SEQ ID NO: 169708 - protein, 7 aa, synthetic construct
ATNEAKR

SEQ ID NO: 169709 - protein, 7 aa, synthetic construct
TTDRASR

SEQ ID NO: 169710 - protein, 7 aa, synthetic construct
ETNAKQR

SEQ ID NO: 169711 - protein, 7 aa, synthetic construct
ETKYAGK

SEQ ID NO: 169712 - protein, 7 aa, synthetic construct
EVNKAIR

SEQ ID NO: 169713 - protein, 7 aa, synthetic construct
EKGIAGR

SEQ ID NO: 169714 - protein, 7 aa, synthetic construct
ETKQATR

SEQ ID NO: 169715 - protein, 7 aa, synthetic construct
DKNRADR

SEQ ID NO: 169716 - protein, 7 aa, synthetic construct
EFNQAKR

SEQ ID NO: 169717 - protein, 7 aa, synthetic construct
TENRPGR

SEQ ID NO: 169718 - protein, 7 aa, synthetic construct
SVNREGR

SEQ ID NO: 169719 - protein, 7 aa, synthetic construct
STNVHGR

SEQ ID NO: 169720 - protein, 7 aa, synthetic construct
MDMRAGR

SEQ ID NO: 169721 - protein, 7 aa, synthetic construct
DNNRANR

SEQ ID NO: 169722 - protein, 7 aa, synthetic construct
HTNRVGG

SEQ ID NO: 169723 - protein, 7 aa, synthetic construct
ETARGGR

SEQ ID NO: 169724 - protein, 7 aa, synthetic construct
ETSTKGR

SEQ ID NO: 169725 - protein, 7 aa, synthetic construct
RTNEIGR

SEQ ID NO: 169726 - protein, 7 aa, synthetic construct
ETKAAYR

SEQ ID NO: 169727 - protein, 7 aa, synthetic construct
GVNRADR

SEQ ID NO: 169728 - protein, 7 aa, synthetic construct
ETSRAVK

SEQ ID NO: 169729 - protein, 7 aa, synthetic construct
ENNKATR

SEQ ID NO: 169730 - protein, 7 aa, synthetic construct
ETKRAST

SEQ ID NO: 169731 - protein, 7 aa, synthetic construct
ETKPAGR

SEQ ID NO: 169732 - protein, 7 aa, synthetic construct
LTNRAER

SEQ ID NO: 169733 - protein, 7 aa, synthetic construct
ETKQPGR

SEQ ID NO: 169734 - protein, 7 aa, synthetic construct
KTNEFGR

SEQ ID NO: 169735 - protein, 7 aa, synthetic construct
ETKERGR

SEQ ID NO: 169736 - protein, 7 aa, synthetic construct
ETNRMKG

SEQ ID NO: 169737 - protein, 7 aa, synthetic construct
EFNKGGR

SEQ ID NO: 169738 - protein, 7 aa, synthetic construct
ETNTKVR

SEQ ID NO: 169739 - protein, 7 aa, synthetic construct
EQNRAGK

SEQ ID NO: 169740 - protein, 7 aa, synthetic construct
EKNRAGY

SEQ ID NO: 169741 - protein, 7 aa, synthetic construct
EANRAIK

SEQ ID NO: 169742 - protein, 7 aa, synthetic construct
ETKVALR

SEQ ID NO: 169743 - protein, 7 aa, synthetic construct
DTARSGR

SEQ ID NO: 169744 - protein, 7 aa, synthetic construct
ETPRAKT

SEQ ID NO: 169745 - protein, 7 aa, synthetic construct
ETNRGKT

SEQ ID NO: 169746 - protein, 7 aa, synthetic construct
ETNPKGR

SEQ ID NO: 169747 - protein, 7 aa, synthetic construct
ETKMAMR

SEQ ID NO: 169748 - protein, 7 aa, synthetic construct
DTKAAGR

SEQ ID NO: 169749 - protein, 7 aa, synthetic construct
EVQRQGR

SEQ ID NO: 169750 - protein, 7 aa, synthetic construct
ETKRALT

SEQ ID NO: 169751 - protein, 7 aa, synthetic construct
DTNKAAR

SEQ ID NO: 169752 - protein, 7 aa, synthetic construct
QPDRAGR

SEQ ID NO: 169753 - protein, 7 aa, synthetic construct
VTHRAGN

SEQ ID NO: 169754 - protein, 7 aa, synthetic construct
FTNASGR

SEQ ID NO: 169755 - protein, 7 aa, synthetic construct
EFNTAKR

SEQ ID NO: 169756 - protein, 7 aa, synthetic construct
ETPRAGK

SEQ ID NO: 169757 - protein, 7 aa, synthetic construct
STHQAGR

SEQ ID NO: 169758 - protein, 7 aa, synthetic construct
EANKQGR

SEQ ID NO: 169759 - protein, 7 aa, synthetic construct
GTSGAGR

SEQ ID NO: 169760 - protein, 7 aa, synthetic construct
ETNRAKA

SEQ ID NO: 169761 - protein, 7 aa, synthetic construct
RTDRADR

SEQ ID NO: 169762 - protein, 7 aa, synthetic construct
ETNNNRR

SEQ ID NO: 169763 - protein, 7 aa, synthetic construct
LENRALR

SEQ ID NO: 169764 - protein, 7 aa, synthetic construct
VDTRAGR

SEQ ID NO: 169765 - protein, 7 aa, synthetic construct
ETNRMKS

SEQ ID NO: 169766 - protein, 7 aa, synthetic construct
ETNVKIR

SEQ ID NO: 169767 - protein, 7 aa, synthetic construct
VTDRLGR

SEQ ID NO: 169768 - protein, 7 aa, synthetic construct
EKNRAFV

SEQ ID NO: 169769 - protein, 7 aa, synthetic construct
STDRAAR

SEQ ID NO: 169770 - protein, 7 aa, synthetic construct
ETKLTGR

SEQ ID NO: 169771 - protein, 7 aa, synthetic construct
ETKPASR

SEQ ID NO: 169772 - protein, 7 aa, synthetic construct
EINRQGR

SEQ ID NO: 169773 - protein, 7 aa, synthetic construct
EQNVAKR

SEQ ID NO: 169774 - protein, 7 aa, synthetic construct
ETNRRSP

SEQ ID NO: 169775 - protein, 7 aa, synthetic construct
EKNRATM

SEQ ID NO: 169776 - protein, 7 aa, synthetic construct
LTNRASH

SEQ ID NO: 169777 - protein, 7 aa, synthetic construct
EIKRAGL

SEQ ID NO: 169778 - protein, 7 aa, synthetic construct
RTDRAGN

SEQ ID NO: 169779 - protein, 7 aa, synthetic construct
ETNKPQR

SEQ ID NO: 169780 - protein, 7 aa, synthetic construct
PTNRAEK

SEQ ID NO: 169781 - protein, 7 aa, synthetic construct
ETDKAKR

SEQ ID NO: 169782 - protein, 7 aa, synthetic construct
HTNPASR

SEQ ID NO: 169783 - protein, 7 aa, synthetic construct
ETNNRGK

SEQ ID NO: 169784 - protein, 7 aa, synthetic construct
ETKRSGF

SEQ ID NO: 169785 - protein, 7 aa, synthetic construct
ETNKNPR

SEQ ID NO: 169786 - protein, 7 aa, synthetic construct
PGNRADR

SEQ ID NO: 169787 - protein, 7 aa, synthetic construct
IDNRATR

SEQ ID NO: 169788 - protein, 7 aa, synthetic construct
VTNRTDR

SEQ ID NO: 169789 - protein, 7 aa, synthetic construct
EAKNAGR

SEQ ID NO: 169790 - protein, 7 aa, synthetic construct
GTERPGR

SEQ ID NO: 169791 - protein, 7 aa, synthetic construct
ADNRAGK

SEQ ID NO: 169792 - protein, 7 aa, synthetic construct
EQTRAGK

SEQ ID NO: 169793 - protein, 7 aa, synthetic construct
EGKRAGV

SEQ ID NO: 169794 - protein, 7 aa, synthetic construct
MTERAQR

SEQ ID NO: 169795 - protein, 7 aa, synthetic construct
ERNQTGR

SEQ ID NO: 169796 - protein, 7 aa, synthetic construct
GTERLGR

SEQ ID NO: 169797 - protein, 7 aa, synthetic construct
GTHRAGA

SEQ ID NO: 169798 - protein, 7 aa, synthetic construct
EKNMIGR

SEQ ID NO: 169799 - protein, 7 aa, synthetic construct
ETNSRGK

SEQ ID NO: 169800 - protein, 7 aa, synthetic construct
ETVRPGK

SEQ ID NO: 169801 - protein, 7 aa, synthetic construct
ETKRAGG

SEQ ID NO: 169802 - protein, 7 aa, synthetic construct
MTNRQER

SEQ ID NO: 169803 - protein, 7 aa, synthetic construct
SLNREGR

SEQ ID NO: 169804 - protein, 7 aa, synthetic construct
EINAKGR

SEQ ID NO: 169805 - protein, 7 aa, synthetic construct
EVNKTGR

SEQ ID NO: 169806 - protein, 7 aa, synthetic construct
EMNKAAR

SEQ ID NO: 169807 - protein, 7 aa, synthetic construct
DTNRPTR

SEQ ID NO: 169808 - protein, 7 aa, synthetic construct
ETSGAKR

SEQ ID NO: 169809 - protein, 7 aa, synthetic construct
ETNNKQR

SEQ ID NO: 169810 - protein, 7 aa, synthetic construct
ETNKPNR

SEQ ID NO: 169811 - protein, 7 aa, synthetic construct
ETNKQTR

SEQ ID NO: 169812 - protein, 7 aa, synthetic construct
TTNERGR

SEQ ID NO: 169813 - protein, 7 aa, synthetic construct
KTNRSGD

SEQ ID NO: 169814 - protein, 7 aa, synthetic construct
DANRPGR

SEQ ID NO: 169815 - protein, 7 aa, synthetic construct
NTDRAIR

SEQ ID NO: 169816 - protein, 7 aa, synthetic construct
ETIKGGR

SEQ ID NO: 169817 - protein, 7 aa, synthetic construct
ETVRAKP

SEQ ID NO: 169818 - protein, 7 aa, synthetic construct
VQNRADR

SEQ ID NO: 169819 - protein, 7 aa, synthetic construct
VTERAMR

SEQ ID NO: 169820 - protein, 7 aa, synthetic construct
FVNRADR

SEQ ID NO: 169821 - protein, 7 aa, synthetic construct
NDNRIGR

SEQ ID NO: 169822 - protein, 7 aa, synthetic construct
ETPRSGK

SEQ ID NO: 169823 - protein, 7 aa, synthetic construct
EFNAAKR

SEQ ID NO: 169824 - protein, 7 aa, synthetic construct
EMNAKGR

SEQ ID NO: 169825 - protein, 7 aa, synthetic construct
EMNMKGR

SEQ ID NO: 169826 - protein, 7 aa, synthetic construct
ETNKVGR

SEQ ID NO: 169827 - protein, 7 aa, synthetic construct
RTNMDGR

SEQ ID NO: 169828 - protein, 7 aa, synthetic construct
ETNRGTK

SEQ ID NO: 169829 - protein, 7 aa, synthetic construct
RTNEQGR

SEQ ID NO: 169830 - protein, 7 aa, synthetic construct
ETAMKGR

SEQ ID NO: 169831 - protein, 7 aa, synthetic construct
PTERATR

SEQ ID NO: 169832 - protein, 7 aa, synthetic construct
ETGKTGR

SEQ ID NO: 169833 - protein, 7 aa, synthetic construct
MTNRAHG

SEQ ID NO: 169834 - protein, 7 aa, synthetic construct
ETNRLRA

SEQ ID NO: 169835 - protein, 7 aa, synthetic construct
ETRGAGK

SEQ ID NO: 169836 - protein, 7 aa, synthetic construct
IHNTAGR

SEQ ID NO: 169837 - protein, 7 aa, synthetic construct
EKNREGK

SEQ ID NO: 169838 - protein, 7 aa, synthetic construct
ETKRAVA

SEQ ID NO: 169839 - protein, 7 aa, synthetic construct
GINREGR

SEQ ID NO: 169840 - protein, 7 aa, synthetic construct
EINRGPR

SEQ ID NO: 169841 - protein, 7 aa, synthetic construct
ERPTAGR

SEQ ID NO: 169842 - protein, 7 aa, synthetic construct
ITNRASG

SEQ ID NO: 169843 - protein, 7 aa, synthetic construct
DTTRANR

SEQ ID NO: 169844 - protein, 7 aa, synthetic construct
ETKRSGS

SEQ ID NO: 169845 - protein, 7 aa, synthetic construct
ETNIGKR

SEQ ID NO: 169846 - protein, 7 aa, synthetic construct
ETTKIGR

SEQ ID NO: 169847 - protein, 7 aa, synthetic construct
ENQRAVR

SEQ ID NO: 169848 - protein, 7 aa, synthetic construct
ETKQAQR

SEQ ID NO: 169849 - protein, 7 aa, synthetic construct
EPQRLGR

SEQ ID NO: 169850 - protein, 7 aa, synthetic construct
EYKGAGR

SEQ ID NO: 169851 - protein, 7 aa, synthetic construct
EVKRAGY

SEQ ID NO: 169852 - protein, 7 aa, synthetic construct
RTNSDGR

SEQ ID NO: 169853 - protein, 7 aa, synthetic construct
ETKVAIR

SEQ ID NO: 169854 - protein, 7 aa, synthetic construct
EVNRAKA

SEQ ID NO: 169855 - protein, 7 aa, synthetic construct
ETNRKSG

SEQ ID NO: 169856 - protein, 7 aa, synthetic construct
EPRSAGR

SEQ ID NO: 169857 - protein, 7 aa, synthetic construct
EMMKAGR

SEQ ID NO: 169858 - protein, 7 aa, synthetic construct
EPNGAKR

SEQ ID NO: 169859 - protein, 7 aa, synthetic construct
ITNRDVR

SEQ ID NO: 169860 - protein, 7 aa, synthetic construct
EINKTGR

SEQ ID NO: 169861 - protein, 7 aa, synthetic construct
ETKSAFR

SEQ ID NO: 169862 - protein, 7 aa, synthetic construct
ERNPAAR

SEQ ID NO: 169863 - protein, 7 aa, synthetic construct
TTNEARR

SEQ ID NO: 169864 - protein, 7 aa, synthetic construct
GTDRLGR

SEQ ID NO: 169865 - protein, 7 aa, synthetic construct
LENRIGR

SEQ ID NO: 169866 - protein, 7 aa, synthetic construct
ETMRAAK

SEQ ID NO: 169867 - protein, 7 aa, synthetic construct
QTNREAR

SEQ ID NO: 169868 - protein, 7 aa, synthetic construct
ESNKATR

SEQ ID NO: 169869 - protein, 7 aa, synthetic construct
TLDRAGR

SEQ ID NO: 169870 - protein, 7 aa, synthetic construct
STNRAER

SEQ ID NO: 169871 - protein, 7 aa, synthetic construct
DTARLGR

SEQ ID NO: 169872 - protein, 7 aa, synthetic construct
ETGKALR

SEQ ID NO: 169873 - protein, 7 aa, synthetic construct
ETNLKPR

SEQ ID NO: 169874 - protein, 7 aa, synthetic construct
EVNVAKR

SEQ ID NO: 169875 - protein, 7 aa, synthetic construct
EPNRAKP

SEQ ID NO: 169876 - protein, 7 aa, synthetic construct
STPREGR

SEQ ID NO: 169877 - protein, 7 aa, synthetic construct
VTQHAGR

SEQ ID NO: 169878 - protein, 7 aa, synthetic construct
EKNRALT

SEQ ID NO: 169879 - protein, 7 aa, synthetic construct
SLNRAER

SEQ ID NO: 169880 - protein, 7 aa, synthetic construct
EPNKIGR

SEQ ID NO: 169881 - protein, 7 aa, synthetic construct
ETNRAIK

SEQ ID NO: 169882 - protein, 7 aa, synthetic construct
MDNRAVR

SEQ ID NO: 169883 - protein, 7 aa, synthetic construct
ETNPMKR

SEQ ID NO: 169884 - protein, 7 aa, synthetic construct
EKNRAAS

SEQ ID NO: 169885 - protein, 7 aa, synthetic construct
LENRAPR

SEQ ID NO: 169886 - protein, 7 aa, synthetic construct
VTQREGR

SEQ ID NO: 169887 - protein, 7 aa, synthetic construct
ETKRTGV

SEQ ID NO: 169888 - protein, 7 aa, synthetic construct
QENKAGR

SEQ ID NO: 169889 - protein, 7 aa, synthetic construct
GTNREAR

SEQ ID NO: 169890 - protein, 7 aa, synthetic construct
GTGVAGR

SEQ ID NO: 169891 - protein, 7 aa, synthetic construct
EVNKIGR

SEQ ID NO: 169892 - protein, 7 aa, synthetic construct
QTTRAGG

SEQ ID NO: 169893 - protein, 7 aa, synthetic construct
NDARAGR

SEQ ID NO: 169894 - protein, 7 aa, synthetic construct
YENRAVR

SEQ ID NO: 169895 - protein, 7 aa, synthetic construct
QTNRADR

SEQ ID NO: 169896 - protein, 7 aa, synthetic construct
QDLRAGR

SEQ ID NO: 169897 - protein, 7 aa, synthetic construct
IMERAGR

SEQ ID NO: 169898 - protein, 7 aa, synthetic construct
NTERAVR

SEQ ID NO: 169899 - protein, 7 aa, synthetic construct
ETNKSLR

SEQ ID NO: 169900 - protein, 7 aa, synthetic construct
ETMKAVR

SEQ ID NO: 169901 - protein, 7 aa, synthetic construct
ETPQKGR

SEQ ID NO: 169902 - protein, 7 aa, synthetic construct
FTNRTER

SEQ ID NO: 169903 - protein, 7 aa, synthetic construct
EPARQGR

SEQ ID NO: 169904 - protein, 7 aa, synthetic construct
TENRAQR

SEQ ID NO: 169905 - protein, 7 aa, synthetic construct
ETRTAVR

SEQ ID NO: 169906 - protein, 7 aa, synthetic construct
EATRAGK

SEQ ID NO: 169907 - protein, 7 aa, synthetic construct
ETKRSGG

SEQ ID NO: 169908 - protein, 7 aa, synthetic construct
VTDRAQR

SEQ ID NO: 169909 - protein, 7 aa, synthetic construct
ITNRAHN

SEQ ID NO: 169910 - protein, 7 aa, synthetic construct
PTDRASR

SEQ ID NO: 169911 - protein, 7 aa, synthetic construct
RTNQAER

SEQ ID NO: 169912 - protein, 7 aa, synthetic construct
SDNRAVR

SEQ ID NO: 169913 - protein, 7 aa, synthetic construct
EKNSANR

SEQ ID NO: 169914 - protein, 7 aa, synthetic construct
ETKRGGY

SEQ ID NO: 169915 - protein, 7 aa, synthetic construct
PDNRALR

SEQ ID NO: 169916 - protein, 7 aa, synthetic construct
AGNREGR

SEQ ID NO: 169917 - protein, 7 aa, synthetic construct
FTNREGK

SEQ ID NO: 169918 - protein, 7 aa, synthetic construct
ETLKAAR

SEQ ID NO: 169919 - protein, 7 aa, synthetic construct
ETNRLVK

SEQ ID NO: 169920 - protein, 7 aa, synthetic construct
ETPRAKM

SEQ ID NO: 169921 - protein, 7 aa, synthetic construct
IDPRAGR

SEQ ID NO: 169922 - protein, 7 aa, synthetic construct
ETNSMKR

SEQ ID NO: 169923 - protein, 7 aa, synthetic construct
ETARQGK

SEQ ID NO: 169924 - protein, 7 aa, synthetic construct
VTNRAHS

SEQ ID NO: 169925 - protein, 7 aa, synthetic construct
LDNRAIR

SEQ ID NO: 169926 - protein, 7 aa, synthetic construct
TTERASR

SEQ ID NO: 169927 - protein, 7 aa, synthetic construct
ETGVKGR

SEQ ID NO: 169928 - protein, 7 aa, synthetic construct
ETNPKAR

SEQ ID NO: 169929 - protein, 7 aa, synthetic construct
RTNRVGE

SEQ ID NO: 169930 - protein, 7 aa, synthetic construct
DMNRAIR

SEQ ID NO: 169931 - protein, 7 aa, synthetic construct
EQNKIGR

SEQ ID NO: 169932 - protein, 7 aa, synthetic construct
ETNRTKV

SEQ ID NO: 169933 - protein, 7 aa, synthetic construct
ETNRMRV

SEQ ID NO: 169934 - protein, 7 aa, synthetic construct
DTPRAQR

SEQ ID NO: 169935 - protein, 7 aa, synthetic construct
HTPRAGS

SEQ ID NO: 169936 - protein, 7 aa, synthetic construct
DTPRIGR

SEQ ID NO: 169937 - protein, 7 aa, synthetic construct
DTSRATR

SEQ ID NO: 169938 - protein, 7 aa, synthetic construct
ETSRIGK

SEQ ID NO: 169939 - protein, 7 aa, synthetic construct
NTERATR

SEQ ID NO: 169940 - protein, 7 aa, synthetic construct
EQGKAGR

SEQ ID NO: 169941 - protein, 7 aa, synthetic construct
ETKRMGA

SEQ ID NO: 169942 - protein, 7 aa, synthetic construct
ESNSKGR

SEQ ID NO: 169943 - protein, 7 aa, synthetic construct
EIIKAGR

SEQ ID NO: 169944 - protein, 7 aa, synthetic construct
ATKRAGE

SEQ ID NO: 169945 - protein, 7 aa, synthetic construct
LTNRELR

SEQ ID NO: 169946 - protein, 7 aa, synthetic construct
EQVRQGR

SEQ ID NO: 169947 - protein, 7 aa, synthetic construct
QTERPGR

SEQ ID NO: 169948 - protein, 7 aa, synthetic construct
ETNAKSR

SEQ ID NO: 169949 - protein, 7 aa, synthetic construct
GDNRAPR

SEQ ID NO: 169950 - protein, 7 aa, synthetic construct
DANRAIR

SEQ ID NO: 169951 - protein, 7 aa, synthetic construct
GDNRTGR

SEQ ID NO: 169952 - protein, 7 aa, synthetic construct
EPNKALR

SEQ ID NO: 169953 - protein, 7 aa, synthetic construct
ETQVKGR

SEQ ID NO: 169954 - protein, 7 aa, synthetic construct
YTPGAGR

SEQ ID NO: 169955 - protein, 7 aa, synthetic construct
ELKVAGR

SEQ ID NO: 169956 - protein, 7 aa, synthetic construct
HPNREGR

SEQ ID NO: 169957 - protein, 7 aa, synthetic construct
EKNIAIR

SEQ ID NO: 169958 - protein, 7 aa, synthetic construct
EKNNAFR

SEQ ID NO: 169959 - protein, 7 aa, synthetic construct
PHNRAGG

SEQ ID NO: 169960 - protein, 7 aa, synthetic construct
KTNREGQ

SEQ ID NO: 169961 - protein, 7 aa, synthetic construct
ETNVKTR

SEQ ID NO: 169962 - protein, 7 aa, synthetic construct
LVNRAER

SEQ ID NO: 169963 - protein, 7 aa, synthetic construct
DTKREGR

SEQ ID NO: 169964 - protein, 7 aa, synthetic construct
NTERANR

SEQ ID NO: 169965 - protein, 7 aa, synthetic construct
STSRAER

SEQ ID NO: 169966 - protein, 7 aa, synthetic construct
FTDRAIR

SEQ ID NO: 169967 - protein, 7 aa, synthetic construct
ATNRSER

SEQ ID NO: 169968 - protein, 7 aa, synthetic construct
EMSKAGR

SEQ ID NO: 169969 - protein, 7 aa, synthetic construct
DTVKAGR

SEQ ID NO: 169970 - protein, 7 aa, synthetic construct
ETNVTKR

SEQ ID NO: 169971 - protein, 7 aa, synthetic construct
ETGKSGR

SEQ ID NO: 169972 - protein, 7 aa, synthetic construct
PTNRENR

SEQ ID NO: 169973 - protein, 7 aa, synthetic construct
ENNKANR

SEQ ID NO: 169974 - protein, 7 aa, synthetic construct
ETNKGFR

SEQ ID NO: 169975 - protein, 7 aa, synthetic construct
MAERAGR

SEQ ID NO: 169976 - protein, 7 aa, synthetic construct
EVNRAKM

SEQ ID NO: 169977 - protein, 7 aa, synthetic construct
QTTHAGR

SEQ ID NO: 169978 - protein, 7 aa, synthetic construct
KTTRAGD

SEQ ID NO: 169979 - protein, 7 aa, synthetic construct
ETARAKT

SEQ ID NO: 169980 - protein, 7 aa, synthetic construct
ITGHAGR

SEQ ID NO: 169981 - protein, 7 aa, synthetic construct
ETNRLKG

SEQ ID NO: 169982 - protein, 7 aa, synthetic construct
EVNRARP

SEQ ID NO: 169983 - protein, 7 aa, synthetic construct
ETNSKVR

SEQ ID NO: 169984 - protein, 7 aa, synthetic construct
EANRAKV

SEQ ID NO: 169985 - protein, 7 aa, synthetic construct
DSNRAVR

SEQ ID NO: 169986 - protein, 7 aa, synthetic construct
ETNAAKK

SEQ ID NO: 169987 - protein, 7 aa, synthetic construct
YTNKAER

SEQ ID NO: 169988 - protein, 7 aa, synthetic construct
TSNREGR

SEQ ID NO: 169989 - protein, 7 aa, synthetic construct
ERNAAIR

SEQ ID NO: 169990 - protein, 7 aa, synthetic construct
DTARIGR

SEQ ID NO: 169991 - protein, 7 aa, synthetic construct
EINKMGR

SEQ ID NO: 169992 - protein, 7 aa, synthetic construct
EPKRADR

SEQ ID NO: 169993 - protein, 7 aa, synthetic construct
ETAPKGR

SEQ ID NO: 169994 - protein, 7 aa, synthetic construct
STNRMER

SEQ ID NO: 169995 - protein, 7 aa, synthetic construct
ETNLKGR

SEQ ID NO: 169996 - protein, 7 aa, synthetic construct
ETMRAKM

SEQ ID NO: 169997 - protein, 7 aa, synthetic construct
GQNRADR

SEQ ID NO: 169998 - protein, 7 aa, synthetic construct
ETMRAKL

SEQ ID NO: 169999 - protein, 7 aa, synthetic construct
VTNRIER

SEQ ID NO: 170000 - protein, 7 aa, synthetic construct
YDNRAVR

SEQ ID NO: 170001 - protein, 7 aa, synthetic construct
MENKAGR

SEQ ID NO: 170002 - protein, 7 aa, synthetic construct
MTNERGR

SEQ ID NO: 170003 - protein, 7 aa, synthetic construct
EPNLKGR

SEQ ID NO: 170004 - protein, 7 aa, synthetic construct
ETAKAGR

SEQ ID NO: 170005 - protein, 7 aa, synthetic construct
MTNRAHS

SEQ ID NO: 170006 - protein, 7 aa, synthetic construct
EKNRALI

SEQ ID NO: 170007 - protein, 7 aa, synthetic construct
ETNNRVR

SEQ ID NO: 170008 - protein, 7 aa, synthetic construct
GTHVAGR

SEQ ID NO: 170009 - protein, 7 aa, synthetic construct
LTNRLDR

SEQ ID NO: 170010 - protein, 7 aa, synthetic construct
ETAKAPR

SEQ ID NO: 170011 - protein, 7 aa, synthetic construct
EPTRQGR

SEQ ID NO: 170012 - protein, 7 aa, synthetic construct
ITNDARR

SEQ ID NO: 170013 - protein, 7 aa, synthetic construct
ETNRNRV

SEQ ID NO: 170014 - protein, 7 aa, synthetic construct
ENNRLGK

SEQ ID NO: 170015 - protein, 7 aa, synthetic construct
IQNRAER

SEQ ID NO: 170016 - protein, 7 aa, synthetic construct
GDQRAGR

SEQ ID NO: 170017 - protein, 7 aa, synthetic construct
MDARAGR

SEQ ID NO: 170018 - protein, 7 aa, synthetic construct
ELNKSGR

SEQ ID NO: 170019 - protein, 7 aa, synthetic construct
EPARVGR

SEQ ID NO: 170020 - protein, 7 aa, synthetic construct
DSTRAGR

SEQ ID NO: 170021 - protein, 7 aa, synthetic construct
LTNDAKR

SEQ ID NO: 170022 - protein, 7 aa, synthetic construct
LDARAGR

SEQ ID NO: 170023 - protein, 7 aa, synthetic construct
ADNRAVR

SEQ ID NO: 170024 - protein, 7 aa, synthetic construct
VTNRDIR

SEQ ID NO: 170025 - protein, 7 aa, synthetic construct
GTDRPGR

SEQ ID NO: 170026 - protein, 7 aa, synthetic construct
GGDRAGR

SEQ ID NO: 170027 - protein, 7 aa, synthetic construct
KEDRAGR

SEQ ID NO: 170028 - protein, 7 aa, synthetic construct
ETMTKGR

SEQ ID NO: 170029 - protein, 7 aa, synthetic construct
DTNRAKA

SEQ ID NO: 170030 - protein, 7 aa, synthetic construct
PDNRAVR

SEQ ID NO: 170031 - protein, 7 aa, synthetic construct
MRNEAGR

SEQ ID NO: 170032 - protein, 7 aa, synthetic construct
NSNREGR

SEQ ID NO: 170033 - protein, 7 aa, synthetic construct
IRNDAGR

SEQ ID NO: 170034 - protein, 7 aa, synthetic construct
ETQNAKR

SEQ ID NO: 170035 - protein, 7 aa, synthetic construct
MTTHAGR

SEQ ID NO: 170036 - protein, 7 aa, synthetic construct
TTYSAGR

SEQ ID NO: 170037 - protein, 7 aa, synthetic construct
STNRTDR

SEQ ID NO: 170038 - protein, 7 aa, synthetic construct
VTDRQGR

SEQ ID NO: 170039 - protein, 7 aa, synthetic construct
NTNERGR

SEQ ID NO: 170040 - protein, 7 aa, synthetic construct
RENRAGN

SEQ ID NO: 170041 - protein, 7 aa, synthetic construct
EMPRGGR

SEQ ID NO: 170042 - protein, 7 aa, synthetic construct
VTQRAER

SEQ ID NO: 170043 - protein, 7 aa, synthetic construct
ETNKIVR

SEQ ID NO: 170044 - protein, 7 aa, synthetic construct
ETIKMGR

SEQ ID NO: 170045 - protein, 7 aa, synthetic construct
DLNRATR

SEQ ID NO: 170046 - protein, 7 aa, synthetic construct
ETMRAKT

SEQ ID NO: 170047 - protein, 7 aa, synthetic construct
DTARANR

SEQ ID NO: 170048 - protein, 7 aa, synthetic construct
DIPRAGR

SEQ ID NO: 170049 - protein, 7 aa, synthetic construct
DTNKAPR

SEQ ID NO: 170050 - protein, 7 aa, synthetic construct
ATERIGR

SEQ ID NO: 170051 - protein, 7 aa, synthetic construct
DLNRANR

SEQ ID NO: 170052 - protein, 7 aa, synthetic construct
EKIVAGR

SEQ ID NO: 170053 - protein, 7 aa, synthetic construct
PDNKAGR

SEQ ID NO: 170054 - protein, 7 aa, synthetic construct
ETMNAKR

SEQ ID NO: 170055 - protein, 7 aa, synthetic construct
AMDRAGR

SEQ ID NO: 170056 - protein, 7 aa, synthetic construct
ETNQMKR

SEQ ID NO: 170057 - protein, 7 aa, synthetic construct
YTSRADR

SEQ ID NO: 170058 - protein, 7 aa, synthetic construct
ETNKAKQ

SEQ ID NO: 170059 - protein, 7 aa, synthetic construct
GTAREGR

SEQ ID NO: 170060 - protein, 7 aa, synthetic construct
ETNSNKR

SEQ ID NO: 170061 - protein, 7 aa, synthetic construct
ELPKAGR

SEQ ID NO: 170062 - protein, 7 aa, synthetic construct
EQNLKGR

SEQ ID NO: 170063 - protein, 7 aa, synthetic construct
ETLKGGR

SEQ ID NO: 170064 - protein, 7 aa, synthetic construct
DANRTGR

SEQ ID NO: 170065 - protein, 7 aa, synthetic construct
VTDRAPR

SEQ ID NO: 170066 - protein, 7 aa, synthetic construct
ELNRAVK

SEQ ID NO: 170067 - protein, 7 aa, synthetic construct
KTLRAGD

SEQ ID NO: 170068 - protein, 7 aa, synthetic construct
EAKRAGF

SEQ ID NO: 170069 - protein, 7 aa, synthetic construct
ETQKQGR

SEQ ID NO: 170070 - protein, 7 aa, synthetic construct
EMNKALR

SEQ ID NO: 170071 - protein, 7 aa, synthetic construct
ETKRMGM

SEQ ID NO: 170072 - protein, 7 aa, synthetic construct
ETNRKQI

SEQ ID NO: 170073 - protein, 7 aa, synthetic construct
ETTKAVR

SEQ ID NO: 170074 - protein, 7 aa, synthetic construct
VTNREVR

SEQ ID NO: 170075 - protein, 7 aa, synthetic construct
EINRRGA

SEQ ID NO: 170076 - protein, 7 aa, synthetic construct
ETMKAPR

SEQ ID NO: 170077 - protein, 7 aa, synthetic construct
DSNRPGR

SEQ ID NO: 170078 - protein, 7 aa, synthetic construct
STERATR

SEQ ID NO: 170079 - protein, 7 aa, synthetic construct
ETNKRGI

SEQ ID NO: 170080 - protein, 7 aa, synthetic construct
ETNNKAR

SEQ ID NO: 170081 - protein, 7 aa, synthetic construct
YTTHAGR

SEQ ID NO: 170082 - protein, 7 aa, synthetic construct
ETNKKGY

SEQ ID NO: 170083 - protein, 7 aa, synthetic construct
ETNIKAR

SEQ ID NO: 170084 - protein, 7 aa, synthetic construct
VPDRAGR

SEQ ID NO: 170085 - protein, 7 aa, synthetic construct
VSDRAGR

SEQ ID NO: 170086 - protein, 7 aa, synthetic construct
MDVRAGR

SEQ ID NO: 170087 - protein, 7 aa, synthetic construct
MTKRAGE

SEQ ID NO: 170088 - protein, 7 aa, synthetic construct
MTNRDNR

SEQ ID NO: 170089 - protein, 7 aa, synthetic construct
EKARAGQ

SEQ ID NO: 170090 - protein, 7 aa, synthetic construct
PMDRAGR

SEQ ID NO: 170091 - protein, 7 aa, synthetic construct
ETRNAVR

SEQ ID NO: 170092 - protein, 7 aa, synthetic construct
ITNRASH

SEQ ID NO: 170093 - protein, 7 aa, synthetic construct
LTNERGR

SEQ ID NO: 170094 - protein, 7 aa, synthetic construct
TLNRADR

SEQ ID NO: 170095 - protein, 7 aa, synthetic construct
GTNREGK

SEQ ID NO: 170096 - protein, 7 aa, synthetic construct
ELQKAGR

SEQ ID NO: 170097 - protein, 7 aa, synthetic construct
ETKPANR

SEQ ID NO: 170098 - protein, 7 aa, synthetic construct
ITPRADR

SEQ ID NO: 170099 - protein, 7 aa, synthetic construct
NPDRAGR

SEQ ID NO: 170100 - protein, 7 aa, synthetic construct
EPNKMGR

SEQ ID NO: 170101 - protein, 7 aa, synthetic construct
EINVAKR

SEQ ID NO: 170102 - protein, 7 aa, synthetic construct
DLSRAGR

SEQ ID NO: 170103 - protein, 7 aa, synthetic construct
EKNTASR

SEQ ID NO: 170104 - protein, 7 aa, synthetic construct
EIKPAGR

SEQ ID NO: 170105 - protein, 7 aa, synthetic construct
VTHAAGR

SEQ ID NO: 170106 - protein, 7 aa, synthetic construct
LDNRANR

SEQ ID NO: 170107 - protein, 7 aa, synthetic construct
ETKQAGR

SEQ ID NO: 170108 - protein, 7 aa, synthetic construct
EMNNKGR

SEQ ID NO: 170109 - protein, 7 aa, synthetic construct
DTNRAKN

SEQ ID NO: 170110 - protein, 7 aa, synthetic construct
DVNRAMR

SEQ ID NO: 170111 - protein, 7 aa, synthetic construct
EQNGAKR

SEQ ID NO: 170112 - protein, 7 aa, synthetic construct
VTNRAHI

SEQ ID NO: 170113 - protein, 7 aa, synthetic construct
MTNRPDR

SEQ ID NO: 170114 - protein, 7 aa, synthetic construct
ETKSAAR

SEQ ID NO: 170115 - protein, 7 aa, synthetic construct
ETKRAVL

SEQ ID NO: 170116 - protein, 7 aa, synthetic construct
GTDRMGR

SEQ ID NO: 170117 - protein, 7 aa, synthetic construct
EPKREGR

SEQ ID NO: 170118 - protein, 7 aa, synthetic construct
ETMRVGK

SEQ ID NO: 170119 - protein, 7 aa, synthetic construct
ETNRSKP

SEQ ID NO: 170120 - protein, 7 aa, synthetic construct
GTGGAGR

SEQ ID NO: 170121 - protein, 7 aa, synthetic construct
EAPRGGR

SEQ ID NO: 170122 - protein, 7 aa, synthetic construct
PLNRADR

SEQ ID NO: 170123 - protein, 7 aa, synthetic construct
ETKRVGQ

SEQ ID NO: 170124 - protein, 7 aa, synthetic construct
EQAKAGR

SEQ ID NO: 170125 - protein, 7 aa, synthetic construct
ETRVQGR

SEQ ID NO: 170126 - protein, 7 aa, synthetic construct
LQDRAGR

SEQ ID NO: 170127 - protein, 7 aa, synthetic construct
GTGRAER

SEQ ID NO: 170128 - protein, 7 aa, synthetic construct
ETNRNKP

SEQ ID NO: 170129 - protein, 7 aa, synthetic construct
STSHAGR

SEQ ID NO: 170130 - protein, 7 aa, synthetic construct
ATIRADR

SEQ ID NO: 170131 - protein, 7 aa, synthetic construct
DTNPRGR

SEQ ID NO: 170132 - protein, 7 aa, synthetic construct
ENNRATK

SEQ ID NO: 170133 - protein, 7 aa, synthetic construct
ERNPLGR

SEQ ID NO: 170134 - protein, 7 aa, synthetic construct
ETIVKGR

SEQ ID NO: 170135 - protein, 7 aa, synthetic construct
VTERLGR

SEQ ID NO: 170136 - protein, 7 aa, synthetic construct
EPNLAKR

SEQ ID NO: 170137 - protein, 7 aa, synthetic construct
ETKNASR

SEQ ID NO: 170138 - protein, 7 aa, synthetic construct
EPNRKGM

SEQ ID NO: 170139 - protein, 7 aa, synthetic construct
EVNQKGR

SEQ ID NO: 170140 - protein, 7 aa, synthetic construct
EMPRIGR

SEQ ID NO: 170141 - protein, 7 aa, synthetic construct
ETKVAQR

SEQ ID NO: 170142 - protein, 7 aa, synthetic construct
ETKRAPS

SEQ ID NO: 170143 - protein, 7 aa, synthetic construct
ETKGVGR

SEQ ID NO: 170144 - protein, 7 aa, synthetic construct
DVNKAGR

SEQ ID NO: 170145 - protein, 7 aa, synthetic construct
ETNVKNR

SEQ ID NO: 170146 - protein, 7 aa, synthetic construct
ETKSALR

SEQ ID NO: 170147 - protein, 7 aa, synthetic construct
ETPPAKR

SEQ ID NO: 170148 - protein, 7 aa, synthetic construct
ETVRRGV

SEQ ID NO: 170149 - protein, 7 aa, synthetic construct
EVKNAGR

SEQ ID NO: 170150 - protein, 7 aa, synthetic construct
EKNQVGR

SEQ ID NO: 170151 - protein, 7 aa, synthetic construct
MTERAAR

SEQ ID NO: 170152 - protein, 7 aa, synthetic construct
EKNLSGR

SEQ ID NO: 170153 - protein, 7 aa, synthetic construct
EMNPKGR

SEQ ID NO: 170154 - protein, 7 aa, synthetic construct
EANRAPK

SEQ ID NO: 170155 - protein, 7 aa, synthetic construct
STPRADR

SEQ ID NO: 170156 - protein, 7 aa, synthetic construct
NTDRAAR

SEQ ID NO: 170157 - protein, 7 aa, synthetic construct
ETANKGR

SEQ ID NO: 170158 - protein, 7 aa, synthetic construct
FTNRASV

SEQ ID NO: 170159 - protein, 7 aa, synthetic construct
ITNRIDR

SEQ ID NO: 170160 - protein, 7 aa, synthetic construct
ETKREGR

SEQ ID NO: 170161 - protein, 7 aa, synthetic construct
ETNRVKQ

SEQ ID NO: 170162 - protein, 7 aa, synthetic construct
ETAGAKR

SEQ ID NO: 170163 - protein, 7 aa, synthetic construct
EPPRAQR

SEQ ID NO: 170164 - protein, 7 aa, synthetic construct
NDNRALR

SEQ ID NO: 170165 - protein, 7 aa, synthetic construct
TDNRASR

SEQ ID NO: 170166 - protein, 7 aa, synthetic construct
HPNRAGG

SEQ ID NO: 170167 - protein, 7 aa, synthetic construct
ENSKAGR

SEQ ID NO: 170168 - protein, 7 aa, synthetic construct
IQNREGR

SEQ ID NO: 170169 - protein, 7 aa, synthetic construct
EKNRATI

SEQ ID NO: 170170 - protein, 7 aa, synthetic construct
ETKRIGN

SEQ ID NO: 170171 - protein, 7 aa, synthetic construct
ETNPKTR

SEQ ID NO: 170172 - protein, 7 aa, synthetic construct
EKNIAQR

SEQ ID NO: 170173 - protein, 7 aa, synthetic construct
ETPKAMR

SEQ ID NO: 170174 - protein, 7 aa, synthetic construct
TAERAGR

SEQ ID NO: 170175 - protein, 7 aa, synthetic construct
ERNQPGR

SEQ ID NO: 170176 - protein, 7 aa, synthetic construct
DTSRAAR

SEQ ID NO: 170177 - protein, 7 aa, synthetic construct
ENNKVGR

SEQ ID NO: 170178 - protein, 7 aa, synthetic construct
EINRAKT

SEQ ID NO: 170179 - protein, 7 aa, synthetic construct
EMNRGLR

SEQ ID NO: 170180 - protein, 7 aa, synthetic construct
EFPKAGR

SEQ ID NO: 170181 - protein, 7 aa, synthetic construct
ETNKRGN

SEQ ID NO: 170182 - protein, 7 aa, synthetic construct
RTNRADV

SEQ ID NO: 170183 - protein, 7 aa, synthetic construct
EAVRAGK

SEQ ID NO: 170184 - protein, 7 aa, synthetic construct
ETKNIGR

SEQ ID NO: 170185 - protein, 7 aa, synthetic construct
VENRAMR

SEQ ID NO: 170186 - protein, 7 aa, synthetic construct
ETQKAVR

SEQ ID NO: 170187 - protein, 7 aa, synthetic construct
IPNYAGR

SEQ ID NO: 170188 - protein, 7 aa, synthetic construct
GTNAHGR

SEQ ID NO: 170189 - protein, 7 aa, synthetic construct
LTDRAMR

SEQ ID NO: 170190 - protein, 7 aa, synthetic construct
PTDRAIR

SEQ ID NO: 170191 - protein, 7 aa, synthetic construct
VLERAGR

SEQ ID NO: 170192 - protein, 7 aa, synthetic construct
ETAIKGR

SEQ ID NO: 170193 - protein, 7 aa, synthetic construct
DTQRANR

SEQ ID NO: 170194 - protein, 7 aa, synthetic construct
ETNKPVR

SEQ ID NO: 170195 - protein, 7 aa, synthetic construct
EPNRVPR

SEQ ID NO: 170196 - protein, 7 aa, synthetic construct
EANKAMR

SEQ ID NO: 170197 - protein, 7 aa, synthetic construct
VETRAGR

SEQ ID NO: 170198 - protein, 7 aa, synthetic construct
LTDRAIR

SEQ ID NO: 170199 - protein, 7 aa, synthetic construct
HTNREVR

SEQ ID NO: 170200 - protein, 7 aa, synthetic construct
EGNKAMR

SEQ ID NO: 170201 - protein, 7 aa, synthetic construct
KENQAGR

SEQ ID NO: 170202 - protein, 7 aa, synthetic construct
TLNRAER

SEQ ID NO: 170203 - protein, 7 aa, synthetic construct
ELPRANR

SEQ ID NO: 170204 - protein, 7 aa, synthetic construct
RTDRAGQ

SEQ ID NO: 170205 - protein, 7 aa, synthetic construct
YTNRARE

SEQ ID NO: 170206 - protein, 7 aa, synthetic construct
ETARAIK

SEQ ID NO: 170207 - protein, 7 aa, synthetic construct
EINRAKP

SEQ ID NO: 170208 - protein, 7 aa, synthetic construct
STDRLGR

SEQ ID NO: 170209 - protein, 7 aa, synthetic construct
EMARTGR

SEQ ID NO: 170210 - protein, 7 aa, synthetic construct
LINRADR

SEQ ID NO: 170211 - protein, 7 aa, synthetic construct
ETTPARR

SEQ ID NO: 170212 - protein, 7 aa, synthetic construct
STNRENR

SEQ ID NO: 170213 - protein, 7 aa, synthetic construct
EGNKGGR

SEQ ID NO: 170214 - protein, 7 aa, synthetic construct
FTNRPDR

SEQ ID NO: 170215 - protein, 7 aa, synthetic construct
ETNKLSR

SEQ ID NO: 170216 - protein, 7 aa, synthetic construct
EPLRAGK

SEQ ID NO: 170217 - protein, 7 aa, synthetic construct
DINRAMR

SEQ ID NO: 170218 - protein, 7 aa, synthetic construct
QDSRAGR

SEQ ID NO: 170219 - protein, 7 aa, synthetic construct
EKNPAAR

SEQ ID NO: 170220 - protein, 7 aa, synthetic construct
VTNPAHR

SEQ ID NO: 170221 - protein, 7 aa, synthetic construct
ETQRARV

SEQ ID NO: 170222 - protein, 7 aa, synthetic construct
PSERAGR

SEQ ID NO: 170223 - protein, 7 aa, synthetic construct
AKNRAGD

SEQ ID NO: 170224 - protein, 7 aa, synthetic construct
DTVRAGK

SEQ ID NO: 170225 - protein, 7 aa, synthetic construct
ETKRATT

SEQ ID NO: 170226 - protein, 7 aa, synthetic construct
LTNREAR

SEQ ID NO: 170227 - protein, 7 aa, synthetic construct
ETAKAVR

SEQ ID NO: 170228 - protein, 7 aa, synthetic construct
ENNRKGG

SEQ ID NO: 170229 - protein, 7 aa, synthetic construct
KTNRAEV

SEQ ID NO: 170230 - protein, 7 aa, synthetic construct
THNPAGR

SEQ ID NO: 170231 - protein, 7 aa, synthetic construct
DTARGGR

SEQ ID NO: 170232 - protein, 7 aa, synthetic construct
DSNRAPR

SEQ ID NO: 170233 - protein, 7 aa, synthetic construct
YTNAAGK

SEQ ID NO: 170234 - protein, 7 aa, synthetic construct
NDNRAQR

SEQ ID NO: 170235 - protein, 7 aa, synthetic construct
QDNRAMR

SEQ ID NO: 170236 - protein, 7 aa, synthetic construct
ETNRRGV

SEQ ID NO: 170237 - protein, 7 aa, synthetic construct
EVRSAGR

SEQ ID NO: 170238 - protein, 7 aa, synthetic construct
EKVIAGR

SEQ ID NO: 170239 - protein, 7 aa, synthetic construct
LTNRIDR

SEQ ID NO: 170240 - protein, 7 aa, synthetic construct
MTGRAGQ

SEQ ID NO: 170241 - protein, 7 aa, synthetic construct
QTDRLGR

SEQ ID NO: 170242 - protein, 7 aa, synthetic construct
RTNREGM

SEQ ID NO: 170243 - protein, 7 aa, synthetic construct
YPNLAGR

SEQ ID NO: 170244 - protein, 7 aa, synthetic construct
LTNRSDR

SEQ ID NO: 170245 - protein, 7 aa, synthetic construct
ETNPKFR

SEQ ID NO: 170246 - protein, 7 aa, synthetic construct
HTGQAGR

SEQ ID NO: 170247 - protein, 7 aa, synthetic construct
LTERAGR

SEQ ID NO: 170248 - protein, 7 aa, synthetic construct
ITPRAGQ

SEQ ID NO: 170249 - protein, 7 aa, synthetic construct
RTDIAGR

SEQ ID NO: 170250 - protein, 7 aa, synthetic construct
NLNRADR

SEQ ID NO: 170251 - protein, 7 aa, synthetic construct
EKMQAGR

SEQ ID NO: 170252 - protein, 7 aa, synthetic construct
DNNRASR

SEQ ID NO: 170253 - protein, 7 aa, synthetic construct
PTNRQER

SEQ ID NO: 170254 - protein, 7 aa, synthetic construct
EMNAAKR

SEQ ID NO: 170255 - protein, 7 aa, synthetic construct
TNNREGR

SEQ ID NO: 170256 - protein, 7 aa, synthetic construct
ESNKAGR

SEQ ID NO: 170257 - protein, 7 aa, synthetic construct
STNQHGR

SEQ ID NO: 170258 - protein, 7 aa, synthetic construct
ETKRQGI

SEQ ID NO: 170259 - protein, 7 aa, synthetic construct
EGKQAGR

SEQ ID NO: 170260 - protein, 7 aa, synthetic construct
ELNRALK

SEQ ID NO: 170261 - protein, 7 aa, synthetic construct
PTNRVDR

SEQ ID NO: 170262 - protein, 7 aa, synthetic construct
EGNKVGR

SEQ ID NO: 170263 - protein, 7 aa, synthetic construct
ETNRIRP

SEQ ID NO: 170264 - protein, 7 aa, synthetic construct
DTNNKGR

SEQ ID NO: 170265 - protein, 7 aa, synthetic construct
TDTRAGR

SEQ ID NO: 170266 - protein, 7 aa, synthetic construct
EAQRAGK

SEQ ID NO: 170267 - protein, 7 aa, synthetic construct
ETNRGKA

SEQ ID NO: 170268 - protein, 7 aa, synthetic construct
EMNKLGR

SEQ ID NO: 170269 - protein, 7 aa, synthetic construct
HTNRAAN

SEQ ID NO: 170270 - protein, 7 aa, synthetic construct
EPNMAKR

SEQ ID NO: 170271 - protein, 7 aa, synthetic construct
VTHNAGR

SEQ ID NO: 170272 - protein, 7 aa, synthetic construct
LDTRAGR

SEQ ID NO: 170273 - protein, 7 aa, synthetic construct
EPARTGR

SEQ ID NO: 170274 - protein, 7 aa, synthetic construct
IDNRAVR

SEQ ID NO: 170275 - protein, 7 aa, synthetic construct
EFNKAGR

SEQ ID NO: 170276 - protein, 7 aa, synthetic construct
VTARADR

SEQ ID NO: 170277 - protein, 7 aa, synthetic construct
FTNREGR

SEQ ID NO: 170278 - protein, 7 aa, synthetic construct
DTNRANK

SEQ ID NO: 170279 - protein, 7 aa, synthetic construct
ERAGAGR

SEQ ID NO: 170280 - protein, 7 aa, synthetic construct
ENNRMGK

SEQ ID NO: 170281 - protein, 7 aa, synthetic construct
TTKRAGE

SEQ ID NO: 170282 - protein, 7 aa, synthetic construct
DLNRAVR

SEQ ID NO: 170283 - protein, 7 aa, synthetic construct
SENRAGK

SEQ ID NO: 170284 - protein, 7 aa, synthetic construct
QDNRAPR

SEQ ID NO: 170285 - protein, 7 aa, synthetic construct
ETLGKGR

SEQ ID NO: 170286 - protein, 7 aa, synthetic construct
TTVHAGR

SEQ ID NO: 170287 - protein, 7 aa, synthetic construct
FTERATR

SEQ ID NO: 170288 - protein, 7 aa, synthetic construct
DTNKGGR

SEQ ID NO: 170289 - protein, 7 aa, synthetic construct
PTNRESR

SEQ ID NO: 170290 - protein, 7 aa, synthetic construct
GSNRAER

SEQ ID NO: 170291 - protein, 7 aa, synthetic construct
STERAQR

SEQ ID NO: 170292 - protein, 7 aa, synthetic construct
ETQKVGR

SEQ ID NO: 170293 - protein, 7 aa, synthetic construct
EPNARGR

SEQ ID NO: 170294 - protein, 7 aa, synthetic construct
ETKRAIT

SEQ ID NO: 170295 - protein, 7 aa, synthetic construct
EMKLAGR

SEQ ID NO: 170296 - protein, 7 aa, synthetic construct
LQNRADR

SEQ ID NO: 170297 - protein, 7 aa, synthetic construct
QTNRIER

SEQ ID NO: 170298 - protein, 7 aa, synthetic construct
KTNRAEI

SEQ ID NO: 170299 - protein, 7 aa, synthetic construct
EAKIAGR

SEQ ID NO: 170300 - protein, 7 aa, synthetic construct
DPNRAAR

SEQ ID NO: 170301 - protein, 7 aa, synthetic construct
DTGRAMR

SEQ ID NO: 170302 - protein, 7 aa, synthetic construct
ETPRAAK

SEQ ID NO: 170303 - protein, 7 aa, synthetic construct
GTNREGR

SEQ ID NO: 170304 - protein, 7 aa, synthetic construct
QTVRADR

SEQ ID NO: 170305 - protein, 7 aa, synthetic construct
PSNRAER

SEQ ID NO: 170306 - protein, 7 aa, synthetic construct
ETVTKGR

SEQ ID NO: 170307 - protein, 7 aa, synthetic construct
EVQKAGR

SEQ ID NO: 170308 - protein, 7 aa, synthetic construct
ETNQLKR

SEQ ID NO: 170309 - protein, 7 aa, synthetic construct
GTNRPER

SEQ ID NO: 170310 - protein, 7 aa, synthetic construct
ELNNKGR

SEQ ID NO: 170311 - protein, 7 aa, synthetic construct
EKQRAGG

SEQ ID NO: 170312 - protein, 7 aa, synthetic construct
EKDRANR

SEQ ID NO: 170313 - protein, 7 aa, synthetic construct
LENRSGR

SEQ ID NO: 170314 - protein, 7 aa, synthetic construct
ETTRAKL

SEQ ID NO: 170315 - protein, 7 aa, synthetic construct
ETRTAGK

SEQ ID NO: 170316 - protein, 7 aa, synthetic construct
ETRPAGR

SEQ ID NO: 170317 - protein, 7 aa, synthetic construct
TRNEAGR

SEQ ID NO: 170318 - protein, 7 aa, synthetic construct
MTERVGR

SEQ ID NO: 170319 - protein, 7 aa, synthetic construct
ETNRMKL

SEQ ID NO: 170320 - protein, 7 aa, synthetic construct
EANNKGR

SEQ ID NO: 170321 - protein, 7 aa, synthetic construct
ETKRGGV

SEQ ID NO: 170322 - protein, 7 aa, synthetic construct
QEVRAGR

SEQ ID NO: 170323 - protein, 7 aa, synthetic construct
EMARAGK

SEQ ID NO: 170324 - protein, 7 aa, synthetic construct
PTQRADR

SEQ ID NO: 170325 - protein, 7 aa, synthetic construct
QESRAGR

SEQ ID NO: 170326 - protein, 7 aa, synthetic construct
EPNRGGK

SEQ ID NO: 170327 - protein, 7 aa, synthetic construct
ETTRAMK

SEQ ID NO: 170328 - protein, 7 aa, synthetic construct
TTERLGR

SEQ ID NO: 170329 - protein, 7 aa, synthetic construct
DTNKTGR

SEQ ID NO: 170330 - protein, 7 aa, synthetic construct
ERNAATR

SEQ ID NO: 170331 - protein, 7 aa, synthetic construct
EKPAAGR

SEQ ID NO: 170332 - protein, 7 aa, synthetic construct
NTNREAR

SEQ ID NO: 170333 - protein, 7 aa, synthetic construct
NDNRASR

SEQ ID NO: 170334 - protein, 7 aa, synthetic construct
EANIKGR

SEQ ID NO: 170335 - protein, 7 aa, synthetic construct
ETQQRGR

SEQ ID NO: 170336 - protein, 7 aa, synthetic construct
EKNRIGY

SEQ ID NO: 170337 - protein, 7 aa, synthetic construct
RTDSAGR

SEQ ID NO: 170338 - protein, 7 aa, synthetic construct
KTNRDGQ

SEQ ID NO: 170339 - protein, 7 aa, synthetic construct
RTQRAGE

SEQ ID NO: 170340 - protein, 7 aa, synthetic construct
MTTREGR

SEQ ID NO: 170341 - protein, 7 aa, synthetic construct
RDNIAGR

SEQ ID NO: 170342 - protein, 7 aa, synthetic construct
ERNTAVR

SEQ ID NO: 170343 - protein, 7 aa, synthetic construct
ETNKRGQ

SEQ ID NO: 170344 - protein, 7 aa, synthetic construct
EMKQAGR

SEQ ID NO: 170345 - protein, 7 aa, synthetic construct
PTNRVER

SEQ ID NO: 170346 - protein, 7 aa, synthetic construct
VINREGR

SEQ ID NO: 170347 - protein, 7 aa, synthetic construct
SVNRADR

SEQ ID NO: 170348 - protein, 7 aa, synthetic construct
ETLNAKR

SEQ ID NO: 170349 - protein, 7 aa, synthetic construct
EINTRGR

SEQ ID NO: 170350 - protein, 7 aa, synthetic construct
GDPRAGR

SEQ ID NO: 170351 - protein, 7 aa, synthetic construct
ITNRAHV

SEQ ID NO: 170352 - protein, 7 aa, synthetic construct
RTNRAEG

SEQ ID NO: 170353 - protein, 7 aa, synthetic construct
EFKTAGR

SEQ ID NO: 170354 - protein, 7 aa, synthetic construct
ETAPAKR

SEQ ID NO: 170355 - protein, 7 aa, synthetic construct
EQNMKGR

SEQ ID NO: 170356 - protein, 7 aa, synthetic construct
LTNRAHA

SEQ ID NO: 170357 - protein, 7 aa, synthetic construct
EPNRARV

SEQ ID NO: 170358 - protein, 7 aa, synthetic construct
ETLRAKT

SEQ ID NO: 170359 - protein, 7 aa, synthetic construct
ETNRTKA

SEQ ID NO: 170360 - protein, 7 aa, synthetic construct
ETMVKGR

SEQ ID NO: 170361 - protein, 7 aa, synthetic construct
ETNQRAR

SEQ ID NO: 170362 - protein, 7 aa, synthetic construct
ETNKANK

SEQ ID NO: 170363 - protein, 7 aa, synthetic construct
ETVRANK

SEQ ID NO: 170364 - protein, 7 aa, synthetic construct
TMNREGR

SEQ ID NO: 170365 - protein, 7 aa, synthetic construct
DTRQAGR

SEQ ID NO: 170366 - protein, 7 aa, synthetic construct
EMKVAGR

SEQ ID NO: 170367 - protein, 7 aa, synthetic construct
DLNRPGR

SEQ ID NO: 170368 - protein, 7 aa, synthetic construct
VTNRHGG

SEQ ID NO: 170369 - protein, 7 aa, synthetic construct
GTDRANR

SEQ ID NO: 170370 - protein, 7 aa, synthetic construct
ETKRAVF

SEQ ID NO: 170371 - protein, 7 aa, synthetic construct
FTGRAER

SEQ ID NO: 170372 - protein, 7 aa, synthetic construct
EAVKAGR

SEQ ID NO: 170373 - protein, 7 aa, synthetic construct
ETKQAMR

SEQ ID NO: 170374 - protein, 7 aa, synthetic construct
DTPRVGR

SEQ ID NO: 170375 - protein, 7 aa, synthetic construct
ETNKDKR

SEQ ID NO: 170376 - protein, 7 aa, synthetic construct
ETNKAKT

SEQ ID NO: 170377 - protein, 7 aa, synthetic construct
ETNKSNR

SEQ ID NO: 170378 - protein, 7 aa, synthetic construct
GTDRAVR

SEQ ID NO: 170379 - protein, 7 aa, synthetic construct
GTIRADR

SEQ ID NO: 170380 - protein, 7 aa, synthetic construct
ETNKARM

SEQ ID NO: 170381 - protein, 7 aa, synthetic construct
ETVRAMK

SEQ ID NO: 170382 - protein, 7 aa, synthetic construct
EINQKGR

SEQ ID NO: 170383 - protein, 7 aa, synthetic construct
ETKRATI

SEQ ID NO: 170384 - protein, 7 aa, synthetic construct
FTNRADK

SEQ ID NO: 170385 - protein, 7 aa, synthetic construct
QTERAVR

SEQ ID NO: 170386 - protein, 7 aa, synthetic construct
EMPKAGR

SEQ ID NO: 170387 - protein, 7 aa, synthetic construct
ETNVKLR

SEQ ID NO: 170388 - protein, 7 aa, synthetic construct
ETNRVAK

SEQ ID NO: 170389 - protein, 7 aa, synthetic construct
EANMKGR

SEQ ID NO: 170390 - protein, 7 aa, synthetic construct
EDKRAVR

SEQ ID NO: 170391 - protein, 7 aa, synthetic construct
DTTRAQR

SEQ ID NO: 170392 - protein, 7 aa, synthetic construct
ETNIAKR

SEQ ID NO: 170393 - protein, 7 aa, synthetic construct
DTARPGR

SEQ ID NO: 170394 - protein, 7 aa, synthetic construct
ETAKVGR

SEQ ID NO: 170395 - protein, 7 aa, synthetic construct
ETNAKGR

SEQ ID NO: 170396 - protein, 7 aa, synthetic construct
PENRMGR

SEQ ID NO: 170397 - protein, 7 aa, synthetic construct
ETNRIKA

SEQ ID NO: 170398 - protein, 7 aa, synthetic construct
ETPKAFR

SEQ ID NO: 170399 - protein, 7 aa, synthetic construct
ETGRAKV

SEQ ID NO: 170400 - protein, 7 aa, synthetic construct
GTNRLER

SEQ ID NO: 170401 - protein, 7 aa, synthetic construct
EMPRAGR

SEQ ID NO: 170402 - protein, 7 aa, synthetic construct
ETQRAVK

SEQ ID NO: 170403 - protein, 7 aa, synthetic construct
EPQRAGK

SEQ ID NO: 170404 - protein, 7 aa, synthetic construct
EPNRVGK

SEQ ID NO: 170405 - protein, 7 aa, synthetic construct
NTAREGR

SEQ ID NO: 170406 - protein, 7 aa, synthetic construct
DINRAQR

SEQ ID NO: 170407 - protein, 7 aa, synthetic construct
EFNSAKR

SEQ ID NO: 170408 - protein, 7 aa, synthetic construct
EKNRMGQ

SEQ ID NO: 170409 - protein, 7 aa, synthetic construct
ETTRGGR

SEQ ID NO: 170410 - protein, 7 aa, synthetic construct
EKGLAGR

SEQ ID NO: 170411 - protein, 7 aa, synthetic construct
ETNIKGR

SEQ ID NO: 170412 - protein, 7 aa, synthetic construct
ETNTKNR

SEQ ID NO: 170413 - protein, 7 aa, synthetic construct
ETNKVVR

SEQ ID NO: 170414 - protein, 7 aa, synthetic construct
ETPIAKR

SEQ ID NO: 170415 - protein, 7 aa, synthetic construct
DTKVAGR

SEQ ID NO: 170416 - protein, 7 aa, synthetic construct
TTHNAGR

SEQ ID NO: 170417 - protein, 7 aa, synthetic construct
DTVRGGR

SEQ ID NO: 170418 - protein, 7 aa, synthetic construct
LENRLGR

SEQ ID NO: 170419 - protein, 7 aa, synthetic construct
DMNRALR

SEQ ID NO: 170420 - protein, 7 aa, synthetic construct
EKTRAGN

SEQ ID NO: 170421 - protein, 7 aa, synthetic construct
YTNNAHR

SEQ ID NO: 170422 - protein, 7 aa, synthetic construct
ITPREGR

SEQ ID NO: 170423 - protein, 7 aa, synthetic construct
DTPRALR

SEQ ID NO: 170424 - protein, 7 aa, synthetic construct
PTDRAMR

SEQ ID NO: 170425 - protein, 7 aa, synthetic construct
EMNRAKL

SEQ ID NO: 170426 - protein, 7 aa, synthetic construct
STNREVR

SEQ ID NO: 170427 - protein, 7 aa, synthetic construct
KTNRADM

SEQ ID NO: 170428 - protein, 7 aa, synthetic construct
ETARARV

SEQ ID NO: 170429 - protein, 7 aa, synthetic construct
ENNRAPK

SEQ ID NO: 170430 - protein, 7 aa, synthetic construct
EKNRMGS

SEQ ID NO: 170431 - protein, 7 aa, synthetic construct
ETREKGR

SEQ ID NO: 170432 - protein, 7 aa, synthetic construct
ETPRAMK

SEQ ID NO: 170433 - protein, 7 aa, synthetic construct
SGNREGR

SEQ ID NO: 170434 - protein, 7 aa, synthetic construct
DTSRALR

SEQ ID NO: 170435 - protein, 7 aa, synthetic construct
KTNFAGN

SEQ ID NO: 170436 - protein, 7 aa, synthetic construct
ETVKAPR

SEQ ID NO: 170437 - protein, 7 aa, synthetic construct
EVNKAQR

SEQ ID NO: 170438 - protein, 7 aa, synthetic construct
ETQKLGR

SEQ ID NO: 170439 - protein, 7 aa, synthetic construct
ETPRAKS

SEQ ID NO: 170440 - protein, 7 aa, synthetic construct
VTNYAGK

SEQ ID NO: 170441 - protein, 7 aa, synthetic construct
ETARAKI

SEQ ID NO: 170442 - protein, 7 aa, synthetic construct
EINLKGR

SEQ ID NO: 170443 - protein, 7 aa, synthetic construct
HTDRAAR

SEQ ID NO: 170444 - protein, 7 aa, synthetic construct
VVNRAER

SEQ ID NO: 170445 - protein, 7 aa, synthetic construct
ETNRVRA

SEQ ID NO: 170446 - protein, 7 aa, synthetic construct
ITNREQR

SEQ ID NO: 170447 - protein, 7 aa, synthetic construct
LTERASR

SEQ ID NO: 170448 - protein, 7 aa, synthetic construct
ETKRAVI

SEQ ID NO: 170449 - protein, 7 aa, synthetic construct
EINPAKR

SEQ ID NO: 170450 - protein, 7 aa, synthetic construct
NVNREGR

SEQ ID NO: 170451 - protein, 7 aa, synthetic construct
VTNRELR

SEQ ID NO: 170452 - protein, 7 aa, synthetic construct
GINRAER

SEQ ID NO: 170453 - protein, 7 aa, synthetic construct
LTSRAGQ

SEQ ID NO: 170454 - protein, 7 aa, synthetic construct
ETQAAKR

SEQ ID NO: 170455 - protein, 7 aa, synthetic construct
ILNRADR

SEQ ID NO: 170456 - protein, 7 aa, synthetic construct
EYKPAGR

SEQ ID NO: 170457 - protein, 7 aa, synthetic construct
LENRAVR

SEQ ID NO: 170458 - protein, 7 aa, synthetic construct
RTDRAER

SEQ ID NO: 170459 - protein, 7 aa, synthetic construct
FAERAGR

SEQ ID NO: 170460 - protein, 7 aa, synthetic construct
ETNKLTR

SEQ ID NO: 170461 - protein, 7 aa, synthetic construct
ETKRALQ

SEQ ID NO: 170462 - protein, 7 aa, synthetic construct
ELNGAKR

SEQ ID NO: 170463 - protein, 7 aa, synthetic construct
EMNVAKR

SEQ ID NO: 170464 - protein, 7 aa, synthetic construct
PTTRAER

SEQ ID NO: 170465 - protein, 7 aa, synthetic construct
VDNRAPR

SEQ ID NO: 170466 - protein, 7 aa, synthetic construct
ESNPAKR

SEQ ID NO: 170467 - protein, 7 aa, synthetic construct
RTNEVGR

SEQ ID NO: 170468 - protein, 7 aa, synthetic construct
ETPRAKQ

SEQ ID NO: 170469 - protein, 7 aa, synthetic construct
ETNPVKR

SEQ ID NO: 170470 - protein, 7 aa, synthetic construct
EVNRGPR

SEQ ID NO: 170471 - protein, 7 aa, synthetic construct
ETKNLGR

SEQ ID NO: 170472 - protein, 7 aa, synthetic construct
VTAREGR

SEQ ID NO: 170473 - protein, 7 aa, synthetic construct
ETNTAKK

SEQ ID NO: 170474 - protein, 7 aa, synthetic construct
ETPRPGK

SEQ ID NO: 170475 - protein, 7 aa, synthetic construct
ETQRAGK

SEQ ID NO: 170476 - protein, 7 aa, synthetic construct
ASERAGR

SEQ ID NO: 170477 - protein, 7 aa, synthetic construct
EKNRVGY

SEQ ID NO: 170478 - protein, 7 aa, synthetic construct
ETIKVGR

SEQ ID NO: 170479 - protein, 7 aa, synthetic construct
ETRPAGK

SEQ ID NO: 170480 - protein, 7 aa, synthetic construct
EQKQAGR

SEQ ID NO: 170481 - protein, 7 aa, synthetic construct
ETKRSGN

SEQ ID NO: 170482 - protein, 7 aa, synthetic construct
EPNSKGR

SEQ ID NO: 170483 - protein, 7 aa, synthetic construct
EKSRAGS

SEQ ID NO: 170484 - protein, 7 aa, synthetic construct
EYKMAGR

SEQ ID NO: 170485 - protein, 7 aa, synthetic construct
EYKQAGR

SEQ ID NO: 170486 - protein, 7 aa, synthetic construct
ETPTAKR

SEQ ID NO: 170487 - protein, 7 aa, synthetic construct
AANREGR

SEQ ID NO: 170488 - protein, 7 aa, synthetic construct
ENNKQGR

SEQ ID NO: 170489 - protein, 7 aa, synthetic construct
HTNRLGN

SEQ ID NO: 170490 - protein, 7 aa, synthetic construct
RTDREGR

SEQ ID NO: 170491 - protein, 7 aa, synthetic construct
STERAGR

SEQ ID NO: 170492 - protein, 7 aa, synthetic construct
ETNKKER

SEQ ID NO: 170493 - protein, 7 aa, synthetic construct
KENREGR

SEQ ID NO: 170494 - protein, 7 aa, synthetic construct
ERNNAVR

SEQ ID NO: 170495 - protein, 7 aa, synthetic construct
VDIRAGR

SEQ ID NO: 170496 - protein, 7 aa, synthetic construct
PQERAGR

SEQ ID NO: 170497 - protein, 7 aa, synthetic construct
TTTHAGR

SEQ ID NO: 170498 - protein, 7 aa, synthetic construct
MTKRAGD

SEQ ID NO: 170499 - protein, 7 aa, synthetic construct
TENRTGR

SEQ ID NO: 170500 - protein, 7 aa, synthetic construct
MENRPGR

SEQ ID NO: 170501 - protein, 7 aa, synthetic construct
ETNRSKV

SEQ ID NO: 170502 - protein, 7 aa, synthetic construct
QTHRAGA

SEQ ID NO: 170503 - protein, 7 aa, synthetic construct
ETNRVKL

SEQ ID NO: 170504 - protein, 7 aa, synthetic construct
KTNRAMD

SEQ ID NO: 170505 - protein, 7 aa, synthetic construct
EFNNKGR

SEQ ID NO: 170506 - protein, 7 aa, synthetic construct
PTERALR

SEQ ID NO: 170507 - protein, 7 aa, synthetic construct
ETRNQGR

SEQ ID NO: 170508 - protein, 7 aa, synthetic construct
VTVRAGG

SEQ ID NO: 170509 - protein, 7 aa, synthetic construct
ETNNKNR

SEQ ID NO: 170510 - protein, 7 aa, synthetic construct
TEARAGR

SEQ ID NO: 170511 - protein, 7 aa, synthetic construct
VTNRGER

SEQ ID NO: 170512 - protein, 7 aa, synthetic construct
KQNRAGE

SEQ ID NO: 170513 - protein, 7 aa, synthetic construct
EIARAGK

SEQ ID NO: 170514 - protein, 7 aa, synthetic construct
DTNRAKM

SEQ ID NO: 170515 - protein, 7 aa, synthetic construct
MVNRAGG

SEQ ID NO: 170516 - protein, 7 aa, synthetic construct
ETNRKTI

SEQ ID NO: 170517 - protein, 7 aa, synthetic construct
ETNKALK

SEQ ID NO: 170518 - protein, 7 aa, synthetic construct
ETNSQKR

SEQ ID NO: 170519 - protein, 7 aa, synthetic construct
ERNNPGR

SEQ ID NO: 170520 - protein, 7 aa, synthetic construct
QMNREGR

SEQ ID NO: 170521 - protein, 7 aa, synthetic construct
EMVKAGR

SEQ ID NO: 170522 - protein, 7 aa, synthetic construct
GTGREGR

SEQ ID NO: 170523 - protein, 7 aa, synthetic construct
TTNRVER

SEQ ID NO: 170524 - protein, 7 aa, synthetic construct
ETNKAKM

SEQ ID NO: 170525 - protein, 7 aa, synthetic construct
ETNMKAR

SEQ ID NO: 170526 - protein, 7 aa, synthetic construct
ETLRAKG

SEQ ID NO: 170527 - protein, 7 aa, synthetic construct
ENKRAGF

SEQ ID NO: 170528 - protein, 7 aa, synthetic construct
DTNGAKR

SEQ ID NO: 170529 - protein, 7 aa, synthetic construct
ETNTPKR

SEQ ID NO: 170530 - protein, 7 aa, synthetic construct
LMNRAER

SEQ ID NO: 170531 - protein, 7 aa, synthetic construct
VTPRAGH

SEQ ID NO: 170532 - protein, 7 aa, synthetic construct
ETNLAKK

SEQ ID NO: 170533 - protein, 7 aa, synthetic construct
YANREGR

SEQ ID NO: 170534 - protein, 7 aa, synthetic construct
DLPRAGR

SEQ ID NO: 170535 - protein, 7 aa, synthetic construct
ITNRMDR

SEQ ID NO: 170536 - protein, 7 aa, synthetic construct
KTSRAGD

SEQ ID NO: 170537 - protein, 7 aa, synthetic construct
EKNRASV

SEQ ID NO: 170538 - protein, 7 aa, synthetic construct
ETNKAFR

SEQ ID NO: 170539 - protein, 7 aa, synthetic construct
SVDRAGR

SEQ ID NO: 170540 - protein, 7 aa, synthetic construct
ETLRAKA

SEQ ID NO: 170541 - protein, 7 aa, synthetic construct
EVNRIGK

SEQ ID NO: 170542 - protein, 7 aa, synthetic construct
QETRAGR

SEQ ID NO: 170543 - protein, 7 aa, synthetic construct
ITHRAGG

SEQ ID NO: 170544 - protein, 7 aa, synthetic construct
DNNRAVR

SEQ ID NO: 170545 - protein, 7 aa, synthetic construct
EQKRAGQ

SEQ ID NO: 170546 - protein, 7 aa, synthetic construct
LTNREGR

SEQ ID NO: 170547 - protein, 7 aa, synthetic construct
ENIRAGK

SEQ ID NO: 170548 - protein, 7 aa, synthetic construct
PTSRAGQ

SEQ ID NO: 170549 - protein, 7 aa, synthetic construct
ATDRAVR

SEQ ID NO: 170550 - protein, 7 aa, synthetic construct
FKNRAGD

SEQ ID NO: 170551 - protein, 7 aa, synthetic construct
ITNDAKR

SEQ ID NO: 170552 - protein, 7 aa, synthetic construct
TTERVGR

SEQ ID NO: 170553 - protein, 7 aa, synthetic construct
ETIKAGR

SEQ ID NO: 170554 - protein, 7 aa, synthetic construct
ETNKSAR

SEQ ID NO: 170555 - protein, 7 aa, synthetic construct
EIKRAGN

SEQ ID NO: 170556 - protein, 7 aa, synthetic construct
ETPKQGR

SEQ ID NO: 170557 - protein, 7 aa, synthetic construct
KGNRAGE

SEQ ID NO: 170558 - protein, 7 aa, synthetic construct
ETNTARK

SEQ ID NO: 170559 - protein, 7 aa, synthetic construct
EKPRAGV

SEQ ID NO: 170560 - protein, 7 aa, synthetic construct
DTRIAGR

SEQ ID NO: 170561 - protein, 7 aa, synthetic construct
ETKMSGR

SEQ ID NO: 170562 - protein, 7 aa, synthetic construct
EINVKGR

SEQ ID NO: 170563 - protein, 7 aa, synthetic construct
KTMRAGD

SEQ ID NO: 170564 - protein, 7 aa, synthetic construct
YTNRETR

SEQ ID NO: 170565 - protein, 7 aa, synthetic construct
ERNNALR

SEQ ID NO: 170566 - protein, 7 aa, synthetic construct
SDNRAIR

SEQ ID NO: 170567 - protein, 7 aa, synthetic construct
EYNNAKR

SEQ ID NO: 170568 - protein, 7 aa, synthetic construct
EVNRQGR

SEQ ID NO: 170569 - protein, 7 aa, synthetic construct
QLERAGR

SEQ ID NO: 170570 - protein, 7 aa, synthetic construct
ETKRPGF

SEQ ID NO: 170571 - protein, 7 aa, synthetic construct
DTQRAGK

SEQ ID NO: 170572 - protein, 7 aa, synthetic construct
ETKAAFR

SEQ ID NO: 170573 - protein, 7 aa, synthetic construct
EVKTAGR

SEQ ID NO: 170574 - protein, 7 aa, synthetic construct
EVNPKGR

SEQ ID NO: 170575 - protein, 7 aa, synthetic construct
VTNRVER

SEQ ID NO: 170576 - protein, 7 aa, synthetic construct
NTTRADR

SEQ ID NO: 170577 - protein, 7 aa, synthetic construct
ETNKMNR

SEQ ID NO: 170578 - protein, 7 aa, synthetic construct
ENNKTGR

SEQ ID NO: 170579 - protein, 7 aa, synthetic construct
ETNRNKI

SEQ ID NO: 170580 - protein, 7 aa, synthetic construct
ETNQPKR

SEQ ID NO: 170581 - protein, 7 aa, synthetic construct
ETVKAQR

SEQ ID NO: 170582 - protein, 7 aa, synthetic construct
LTKRAGD

SEQ ID NO: 170583 - protein, 7 aa, synthetic construct
ETNAQKR

SEQ ID NO: 170584 - protein, 7 aa, synthetic construct
ATDRAGR

SEQ ID NO: 170585 - protein, 7 aa, synthetic construct
ERPQAGR

SEQ ID NO: 170586 - protein, 7 aa, synthetic construct
EAKRAGV

SEQ ID NO: 170587 - protein, 7 aa, synthetic construct
RTIRAGE

SEQ ID NO: 170588 - protein, 7 aa, synthetic construct
DTNRATR

SEQ ID NO: 170589 - protein, 7 aa, synthetic construct
ITSRADR

SEQ ID NO: 170590 - protein, 7 aa, synthetic construct
NENRAVR

SEQ ID NO: 170591 - protein, 7 aa, synthetic construct
EVNRIPR

SEQ ID NO: 170592 - protein, 7 aa, synthetic construct
MTTRAER

SEQ ID NO: 170593 - protein, 7 aa, synthetic construct
RTGRAGE

SEQ ID NO: 170594 - protein, 7 aa, synthetic construct
EIKMAGR

SEQ ID NO: 170595 - protein, 7 aa, synthetic construct
EPNVAKR

SEQ ID NO: 170596 - protein, 7 aa, synthetic construct
ESNKQGR

SEQ ID NO: 170597 - protein, 7 aa, synthetic construct
EFKRAGT

SEQ ID NO: 170598 - protein, 7 aa, synthetic construct
VTNRASL

SEQ ID NO: 170599 - protein, 7 aa, synthetic construct
KTDRAGY

SEQ ID NO: 170600 - protein, 7 aa, synthetic construct
ETKRAGF

SEQ ID NO: 170601 - protein, 7 aa, synthetic construct
ETNRQVK

SEQ ID NO: 170602 - protein, 7 aa, synthetic construct
DTARAGR

SEQ ID NO: 170603 - protein, 7 aa, synthetic construct
EKNRATV

SEQ ID NO: 170604 - protein, 7 aa, synthetic construct
ETQKAGR

SEQ ID NO: 170605 - protein, 7 aa, synthetic construct
ETMRAGK

SEQ ID NO: 170606 - protein, 7 aa, synthetic construct
ENNKIGR

SEQ ID NO: 170607 - protein, 7 aa, synthetic construct
EMNRAKV

SEQ ID NO: 170608 - protein, 7 aa, synthetic construct
TTGREGR

SEQ ID NO: 170609 - protein, 7 aa, synthetic construct
MTDRAIR

SEQ ID NO: 170610 - protein, 7 aa, synthetic construct
FKNDAGR

SEQ ID NO: 170611 - protein, 7 aa, synthetic construct
EVKREGR

SEQ ID NO: 170612 - protein, 7 aa, synthetic construct
VTNRNER

SEQ ID NO: 170613 - protein, 7 aa, synthetic construct
STARAER

SEQ ID NO: 170614 - protein, 7 aa, synthetic construct
ETKPPGR

SEQ ID NO: 170615 - protein, 7 aa, synthetic construct
MTNRQDR

SEQ ID NO: 170616 - protein, 7 aa, synthetic construct
EPKFAGR

SEQ ID NO: 170617 - protein, 7 aa, synthetic construct
ETQKAFR

SEQ ID NO: 170618 - protein, 7 aa, synthetic construct
ETVRAVK

SEQ ID NO: 170619 - protein, 7 aa, synthetic construct
ETKAVGR

SEQ ID NO: 170620 - protein, 7 aa, synthetic construct
STDRAIR

SEQ ID NO: 170621 - protein, 7 aa, synthetic construct
TIERAGR

SEQ ID NO: 170622 - protein, 7 aa, synthetic construct
EINSAKR

SEQ ID NO: 170623 - protein, 7 aa, synthetic construct
PDNRAMR

SEQ ID NO: 170624 - protein, 7 aa, synthetic construct
SENKAGR

SEQ ID NO: 170625 - protein, 7 aa, synthetic construct
QTQREGR

SEQ ID NO: 170626 - protein, 7 aa, synthetic construct
EKSRAGN

SEQ ID NO: 170627 - protein, 7 aa, synthetic construct
ETVRAKA

SEQ ID NO: 170628 - protein, 7 aa, synthetic construct
EVLKAGR

SEQ ID NO: 170629 - protein, 7 aa, synthetic construct
DTNKANR

SEQ ID NO: 170630 - protein, 7 aa, synthetic construct
ERNRIGV

SEQ ID NO: 170631 - protein, 7 aa, synthetic construct
ETKPAVR

SEQ ID NO: 170632 - protein, 7 aa, synthetic construct
VTHVAGR

SEQ ID NO: 170633 - protein, 7 aa, synthetic construct
MPERAGR

SEQ ID NO: 170634 - protein, 7 aa, synthetic construct
FTNKDGR

SEQ ID NO: 170635 - protein, 7 aa, synthetic construct
ETTKPGR

SEQ ID NO: 170636 - protein, 7 aa, synthetic construct
ERNVAVR

SEQ ID NO: 170637 - protein, 7 aa, synthetic construct
EVNKAVR

SEQ ID NO: 170638 - protein, 7 aa, synthetic construct
VTVRAGQ

SEQ ID NO: 170639 - protein, 7 aa, synthetic construct
ESKGAGR

SEQ ID NO: 170640 - protein, 7 aa, synthetic construct
NTERQGR

SEQ ID NO: 170641 - protein, 7 aa, synthetic construct
EKNQASR

SEQ ID NO: 170642 - protein, 7 aa, synthetic construct
FTNAAPR

SEQ ID NO: 170643 - protein, 7 aa, synthetic construct
LEVRAGR

SEQ ID NO: 170644 - protein, 7 aa, synthetic construct
TTDRAIR

SEQ ID NO: 170645 - protein, 7 aa, synthetic construct
EFNKAMR

SEQ ID NO: 170646 - protein, 7 aa, synthetic construct
ATHRAGI

SEQ ID NO: 170647 - protein, 7 aa, synthetic construct
FTNREQR

SEQ ID NO: 170648 - protein, 7 aa, synthetic construct
LTNRTDR

SEQ ID NO: 170649 - protein, 7 aa, synthetic construct
YTNNATR

SEQ ID NO: 170650 - protein, 7 aa, synthetic construct
EPNTRGR

SEQ ID NO: 170651 - protein, 7 aa, synthetic construct
TEMRAGR

SEQ ID NO: 170652 - protein, 7 aa, synthetic construct
EKMRAGY

SEQ ID NO: 170653 - protein, 7 aa, synthetic construct
ETRTSGR

SEQ ID NO: 170654 - protein, 7 aa, synthetic construct
EANRIGK

SEQ ID NO: 170655 - protein, 7 aa, synthetic construct
ETNKILR

SEQ ID NO: 170656 - protein, 7 aa, synthetic construct
EPNRARP

SEQ ID NO: 170657 - protein, 7 aa, synthetic construct
ETNNKTR

SEQ ID NO: 170658 - protein, 7 aa, synthetic construct
ETLKQGR

SEQ ID NO: 170659 - protein, 7 aa, synthetic construct
MTDRAAR

SEQ ID NO: 170660 - protein, 7 aa, synthetic construct
ETPRAVR

SEQ ID NO: 170661 - protein, 7 aa, synthetic construct
EANRAVK

SEQ ID NO: 170662 - protein, 7 aa, synthetic construct
AINRADR

SEQ ID NO: 170663 - protein, 7 aa, synthetic construct
HTPRAGL

SEQ ID NO: 170664 - protein, 7 aa, synthetic construct
ETKRASA

SEQ ID NO: 170665 - protein, 7 aa, synthetic construct
DGPRAGR

SEQ ID NO: 170666 - protein, 7 aa, synthetic construct
FTNRESR

SEQ ID NO: 170667 - protein, 7 aa, synthetic construct
ATDRAIR

SEQ ID NO: 170668 - protein, 7 aa, synthetic construct
ISNRAER

SEQ ID NO: 170669 - protein, 7 aa, synthetic construct
ETKNQGR

SEQ ID NO: 170670 - protein, 7 aa, synthetic construct
LENRAIR

SEQ ID NO: 170671 - protein, 7 aa, synthetic construct
SEMRAGR

SEQ ID NO: 170672 - protein, 7 aa, synthetic construct
PTVRADR

SEQ ID NO: 170673 - protein, 7 aa, synthetic construct
ETNVKSR

SEQ ID NO: 170674 - protein, 7 aa, synthetic construct
IPDRAGR

SEQ ID NO: 170675 - protein, 7 aa, synthetic construct
VKNRAGD

SEQ ID NO: 170676 - protein, 7 aa, synthetic construct
ETNKQPR

SEQ ID NO: 170677 - protein, 7 aa, synthetic construct
KTNRPGE

SEQ ID NO: 170678 - protein, 7 aa, synthetic construct
ETTRPGK

SEQ ID NO: 170679 - protein, 7 aa, synthetic construct
LTERSGR

SEQ ID NO: 170680 - protein, 7 aa, synthetic construct
YTKRAGD

SEQ ID NO: 170681 - protein, 7 aa, synthetic construct
ETISAKR

SEQ ID NO: 170682 - protein, 7 aa, synthetic construct
STSREGR

SEQ ID NO: 170683 - protein, 7 aa, synthetic construct
DTNRAVR

SEQ ID NO: 170684 - protein, 7 aa, synthetic construct
EMPRAAR

SEQ ID NO: 170685 - protein, 7 aa, synthetic construct
EKNQPGR

SEQ ID NO: 170686 - protein, 7 aa, synthetic construct
EFQKAGR

SEQ ID NO: 170687 - protein, 7 aa, synthetic construct
NMDRAGR

SEQ ID NO: 170688 - protein, 7 aa, synthetic construct
EMNTRGR

SEQ ID NO: 170689 - protein, 7 aa, synthetic construct
ETNLKQR

SEQ ID NO: 170690 - protein, 7 aa, synthetic construct
ETNLAKR

SEQ ID NO: 170691 - protein, 7 aa, synthetic construct
ITNRETR

SEQ ID NO: 170692 - protein, 7 aa, synthetic construct
TSERAGR

SEQ ID NO: 170693 - protein, 7 aa, synthetic construct
ETNPPKR

SEQ ID NO: 170694 - protein, 7 aa, synthetic construct
RTDMAGR

SEQ ID NO: 170695 - protein, 7 aa, synthetic construct
ELNARGR

SEQ ID NO: 170696 - protein, 7 aa, synthetic construct
EPNNARR

SEQ ID NO: 170697 - protein, 7 aa, synthetic construct
LTNPAHR

SEQ ID NO: 170698 - protein, 7 aa, synthetic construct
QDNRAIR

SEQ ID NO: 170699 - protein, 7 aa, synthetic construct
ETKRAGI

SEQ ID NO: 170700 - protein, 7 aa, synthetic construct
SEVRAGR

SEQ ID NO: 170701 - protein, 7 aa, synthetic construct
ITNRSDR

SEQ ID NO: 170702 - protein, 7 aa, synthetic construct
EVVKAGR

SEQ ID NO: 170703 - protein, 7 aa, synthetic construct
DTKGAGR

SEQ ID NO: 170704 - protein, 7 aa, synthetic construct
QTNRPER

SEQ ID NO: 170705 - protein, 7 aa, synthetic construct
EQNKVGR

SEQ ID NO: 170706 - protein, 7 aa, synthetic construct
MLNRAER

SEQ ID NO: 170707 - protein, 7 aa, synthetic construct
ELNRTGK

SEQ ID NO: 170708 - protein, 7 aa, synthetic construct
ETKMAGR

SEQ ID NO: 170709 - protein, 7 aa, synthetic construct
ETAKSGR

SEQ ID NO: 170710 - protein, 7 aa, synthetic construct
NDNRANR

SEQ ID NO: 170711 - protein, 7 aa, synthetic construct
ETKRAAA

SEQ ID NO: 170712 - protein, 7 aa, synthetic construct
EKNPALR

SEQ ID NO: 170713 - protein, 7 aa, synthetic construct
MTNVHGR

SEQ ID NO: 170714 - protein, 7 aa, synthetic construct
EANKAFR

SEQ ID NO: 170715 - protein, 7 aa, synthetic construct
LDNRAQR

SEQ ID NO: 170716 - protein, 7 aa, synthetic construct
LMNRADR

SEQ ID NO: 170717 - protein, 7 aa, synthetic construct
FTNRQDR

SEQ ID NO: 170718 - protein, 7 aa, synthetic construct
STIRAER

SEQ ID NO: 170719 - protein, 7 aa, synthetic construct
GTNRAER

SEQ ID NO: 170720 - protein, 7 aa, synthetic construct
EPNRVVR

SEQ ID NO: 170721 - protein, 7 aa, synthetic construct
ETNTRAR

SEQ ID NO: 170722 - protein, 7 aa, synthetic construct
TTHRAGV

SEQ ID NO: 170723 - protein, 7 aa, synthetic construct
EVNRGMR

SEQ ID NO: 170724 - protein, 7 aa, synthetic construct
ETNRAVK

SEQ ID NO: 170725 - protein, 7 aa, synthetic construct
EKSRAGL

SEQ ID NO: 170726 - protein, 7 aa, synthetic construct
DTNQKGR

SEQ ID NO: 170727 - protein, 7 aa, synthetic construct
ETNRLKA

SEQ ID NO: 170728 - protein, 7 aa, synthetic construct
PSDRAGR

SEQ ID NO: 170729 - protein, 7 aa, synthetic construct
ITNRDLR

SEQ ID NO: 170730 - protein, 7 aa, synthetic construct
LTTRAER

SEQ ID NO: 170731 - protein, 7 aa, synthetic construct
ETKQTGR

SEQ ID NO: 170732 - protein, 7 aa, synthetic construct
ENNRPGK

SEQ ID NO: 170733 - protein, 7 aa, synthetic construct
AINREGR

SEQ ID NO: 170734 - protein, 7 aa, synthetic construct
ETAVRGR

SEQ ID NO: 170735 - protein, 7 aa, synthetic construct
AVNRADR

SEQ ID NO: 170736 - protein, 7 aa, synthetic construct
EMNKQGR

SEQ ID NO: 170737 - protein, 7 aa, synthetic construct
ADNRATR

SEQ ID NO: 170738 - protein, 7 aa, synthetic construct
SINRAER

SEQ ID NO: 170739 - protein, 7 aa, synthetic construct
DMNRPGR

SEQ ID NO: 170740 - protein, 7 aa, synthetic construct
DAMRAGR

SEQ ID NO: 170741 - protein, 7 aa, synthetic construct
ETNAKVR

SEQ ID NO: 170742 - protein, 7 aa, synthetic construct
ETKMVGR

SEQ ID NO: 170743 - protein, 7 aa, synthetic construct
ETMAKGR

SEQ ID NO: 170744 - protein, 7 aa, synthetic construct
EFKRAGS

SEQ ID NO: 170745 - protein, 7 aa, synthetic construct
ETNRARV

SEQ ID NO: 170746 - protein, 7 aa, synthetic construct
SQNREGR

SEQ ID NO: 170747 - protein, 7 aa, synthetic construct
ETKVLGR

SEQ ID NO: 170748 - protein, 7 aa, synthetic construct
TDNRPGR

SEQ ID NO: 170749 - protein, 7 aa, synthetic construct
GDNRQGR

SEQ ID NO: 170750 - protein, 7 aa, synthetic construct
TLNREGR

SEQ ID NO: 170751 - protein, 7 aa, synthetic construct
ETNTMKR

SEQ ID NO: 170752 - protein, 7 aa, synthetic construct
VGDRAGR

SEQ ID NO: 170753 - protein, 7 aa, synthetic construct
GTNREIR

SEQ ID NO: 170754 - protein, 7 aa, synthetic construct
DTSRPGR

SEQ ID NO: 170755 - protein, 7 aa, synthetic construct
PTERLGR

SEQ ID NO: 170756 - protein, 7 aa, synthetic construct
YTPRAGG

SEQ ID NO: 170757 - protein, 7 aa, synthetic construct
ETSPAKR

SEQ ID NO: 170758 - protein, 7 aa, synthetic construct
VTDRAGR

SEQ ID NO: 170759 - protein, 7 aa, synthetic construct
WTNDAKR

SEQ ID NO: 170760 - protein, 7 aa, synthetic construct
ETNRVKV

SEQ ID NO: 170761 - protein, 7 aa, synthetic construct
ETKRLGI

SEQ ID NO: 170762 - protein, 7 aa, synthetic construct
KTNRMGD

SEQ ID NO: 170763 - protein, 7 aa, synthetic construct
ETKSAMR

SEQ ID NO: 170764 - protein, 7 aa, synthetic construct
ETSVKGR

SEQ ID NO: 170765 - protein, 7 aa, synthetic construct
EKNPATR

SEQ ID NO: 170766 - protein, 7 aa, synthetic construct
QTNRNER

SEQ ID NO: 170767 - protein, 7 aa, synthetic construct
ETNQARK

SEQ ID NO: 170768 - protein, 7 aa, synthetic construct
EINRANK

SEQ ID NO: 170769 - protein, 7 aa, synthetic construct
DINKAGR

SEQ ID NO: 170770 - protein, 7 aa, synthetic construct
GTERAAR

SEQ ID NO: 170771 - protein, 7 aa, synthetic construct
DTGRAVR

SEQ ID NO: 170772 - protein, 7 aa, synthetic construct
TQNRADR

SEQ ID NO: 170773 - protein, 7 aa, synthetic construct
STTRAER

SEQ ID NO: 170774 - protein, 7 aa, synthetic construct
GTNRELR

SEQ ID NO: 170775 - protein, 7 aa, synthetic construct
ERNAASR

SEQ ID NO: 170776 - protein, 7 aa, synthetic construct
EKNRFGG

SEQ ID NO: 170777 - protein, 7 aa, synthetic construct
ETAKTGR

SEQ ID NO: 170778 - protein, 7 aa, synthetic construct
DTNNARR

SEQ ID NO: 170779 - protein, 7 aa, synthetic construct
ATDRATR

SEQ ID NO: 170780 - protein, 7 aa, synthetic construct
ETNVAKK

SEQ ID NO: 170781 - protein, 7 aa, synthetic construct
EYNKAGK

SEQ ID NO: 170782 - protein, 7 aa, synthetic construct
KDNRADR

SEQ ID NO: 170783 - protein, 7 aa, synthetic construct
EKNDRGR

SEQ ID NO: 170784 - protein, 7 aa, synthetic construct
STNSHGR

SEQ ID NO: 170785 - protein, 7 aa, synthetic construct
ETAQRGR

SEQ ID NO: 170786 - protein, 7 aa, synthetic construct
ETKPAQR

SEQ ID NO: 170787 - protein, 7 aa, synthetic construct
ETNKNNR

SEQ ID NO: 170788 - protein, 7 aa, synthetic construct
ETQKAMR

SEQ ID NO: 170789 - protein, 7 aa, synthetic construct
HTGRAGL

SEQ ID NO: 170790 - protein, 7 aa, synthetic construct
ETKAQGR

SEQ ID NO: 170791 - protein, 7 aa, synthetic construct
STGRAGN

SEQ ID NO: 170792 - protein, 7 aa, synthetic construct
MTNRAER

SEQ ID NO: 170793 - protein, 7 aa, synthetic construct
ETKRATA

SEQ ID NO: 170794 - protein, 7 aa, synthetic construct
ATVRAGG

SEQ ID NO: 170795 - protein, 7 aa, synthetic construct
ETKRIGT

SEQ ID NO: 170796 - protein, 7 aa, synthetic construct
ATNRELR

SEQ ID NO: 170797 - protein, 7 aa, synthetic construct
FTEKAGR

SEQ ID NO: 170798 - protein, 7 aa, synthetic construct
DSNRAAR

SEQ ID NO: 170799 - protein, 7 aa, synthetic construct
ETTKASR

SEQ ID NO: 170800 - protein, 7 aa, synthetic construct
LTDRQGR

SEQ ID NO: 170801 - protein, 7 aa, synthetic construct
TENRIGR

SEQ ID NO: 170802 - protein, 7 aa, synthetic construct
ELNVKGR

SEQ ID NO: 170803 - protein, 7 aa, synthetic construct
EPNRNVR

SEQ ID NO: 170804 - protein, 7 aa, synthetic construct
FTNRVGG

SEQ ID NO: 170805 - protein, 7 aa, synthetic construct
EMNARGR

SEQ ID NO: 170806 - protein, 7 aa, synthetic construct
LTNRSER

SEQ ID NO: 170807 - protein, 7 aa, synthetic construct
ETARAPK

SEQ ID NO: 170808 - protein, 7 aa, synthetic construct
ETNMKNR

SEQ ID NO: 170809 - protein, 7 aa, synthetic construct
ETTRGPR

SEQ ID NO: 170810 - protein, 7 aa, synthetic construct
GTPRAER

SEQ ID NO: 170811 - protein, 7 aa, synthetic construct
DTGRQGR

SEQ ID NO: 170812 - protein, 7 aa, synthetic construct
EMNSKGR

SEQ ID NO: 170813 - protein, 7 aa, synthetic construct
EIMKAGR

SEQ ID NO: 170814 - protein, 7 aa, synthetic construct
ETKIAVR

SEQ ID NO: 170815 - protein, 7 aa, synthetic construct
ETLAKGR

SEQ ID NO: 170816 - protein, 7 aa, synthetic construct
QTSRADR

SEQ ID NO: 170817 - protein, 7 aa, synthetic construct
SMNRADR

SEQ ID NO: 170818 - protein, 7 aa, synthetic construct
ESKIAGR

SEQ ID NO: 170819 - protein, 7 aa, synthetic construct
QDNRAVR

SEQ ID NO: 170820 - protein, 7 aa, synthetic construct
VLNREGR

SEQ ID NO: 170821 - protein, 7 aa, synthetic construct
MTNREQR

SEQ ID NO: 170822 - protein, 7 aa, synthetic construct
ETKQGGR

SEQ ID NO: 170823 - protein, 7 aa, synthetic construct
ETNRMKV

SEQ ID NO: 170824 - protein, 7 aa, synthetic construct
EVKIAGR

SEQ ID NO: 170825 - protein, 7 aa, synthetic construct
ELPRAGR

SEQ ID NO: 170826 - protein, 7 aa, synthetic construct
ETKRPGT

SEQ ID NO: 170827 - protein, 7 aa, synthetic construct
ETNNTKR

SEQ ID NO: 170828 - protein, 7 aa, synthetic construct
LENRMGR

SEQ ID NO: 170829 - protein, 7 aa, synthetic construct
VTDRALR

SEQ ID NO: 170830 - protein, 7 aa, synthetic construct
ETSKGGR

SEQ ID NO: 170831 - protein, 7 aa, synthetic construct
ETTQRGR

SEQ ID NO: 170832 - protein, 7 aa, synthetic construct
NTARADR

SEQ ID NO: 170833 - protein, 7 aa, synthetic construct
WTNKADR

SEQ ID NO: 170834 - protein, 7 aa, synthetic construct
ETNIKVR

SEQ ID NO: 170835 - protein, 7 aa, synthetic construct
EKNVAMR

SEQ ID NO: 170836 - protein, 7 aa, synthetic construct
ETARAMK

SEQ ID NO: 170837 - protein, 7 aa, synthetic construct
ETNKQVR

SEQ ID NO: 170838 - protein, 7 aa, synthetic construct
PDSRAGR

SEQ ID NO: 170839 - protein, 7 aa, synthetic construct
ETNNKPR

SEQ ID NO: 170840 - protein, 7 aa, synthetic construct
EKNSPGR

SEQ ID NO: 170841 - protein, 7 aa, synthetic construct
MTNRAAL

SEQ ID NO: 170842 - protein, 7 aa, synthetic construct
EVKRDGR

SEQ ID NO: 170843 - protein, 7 aa, synthetic construct
DNNRATR

SEQ ID NO: 170844 - protein, 7 aa, synthetic construct
ETKRALM

SEQ ID NO: 170845 - protein, 7 aa, synthetic construct
ETKRVGY

SEQ ID NO: 170846 - protein, 7 aa, synthetic construct
ENRVAGR

SEQ ID NO: 170847 - protein, 7 aa, synthetic construct
ADNRPGR

SEQ ID NO: 170848 - protein, 7 aa, synthetic construct
ETGLKGR

SEQ ID NO: 170849 - protein, 7 aa, synthetic construct
QTERAAR

SEQ ID NO: 170850 - protein, 7 aa, synthetic construct
YTNAAHR

SEQ ID NO: 170851 - protein, 7 aa, synthetic construct
EAKQAGR

SEQ ID NO: 170852 - protein, 7 aa, synthetic construct
ETNVLKR

SEQ ID NO: 170853 - protein, 7 aa, synthetic construct
EKNRQGY

SEQ ID NO: 170854 - protein, 7 aa, synthetic construct
ETNRLKQ

SEQ ID NO: 170855 - protein, 7 aa, synthetic construct
ITNREAR

SEQ ID NO: 170856 - protein, 7 aa, synthetic construct
ETKRAQG

SEQ ID NO: 170857 - protein, 7 aa, synthetic construct
GTERVGR

SEQ ID NO: 170858 - protein, 7 aa, synthetic construct
ETKRGGI

SEQ ID NO: 170859 - protein, 7 aa, synthetic construct
ETKRAGT

SEQ ID NO: 170860 - protein, 7 aa, synthetic construct
PTDRAGR

SEQ ID NO: 170861 - protein, 7 aa, synthetic construct
ETARAGK

SEQ ID NO: 170862 - protein, 7 aa, synthetic construct
ENVRAGK

SEQ ID NO: 170863 - protein, 7 aa, synthetic construct
NTDRLGR

SEQ ID NO: 170864 - protein, 7 aa, synthetic construct
MTHNAGR

SEQ ID NO: 170865 - protein, 7 aa, synthetic construct
EQTKAGR

SEQ ID NO: 170866 - protein, 7 aa, synthetic construct
EKNTAAR

SEQ ID NO: 170867 - protein, 7 aa, synthetic construct
EKNRGGQ

SEQ ID NO: 170868 - protein, 7 aa, synthetic construct
RTNLEGR

SEQ ID NO: 170869 - protein, 7 aa, synthetic construct
ALERAGR

SEQ ID NO: 170870 - protein, 7 aa, synthetic construct
ETSKQGR

SEQ ID NO: 170871 - protein, 7 aa, synthetic construct
ATGREGR

SEQ ID NO: 170872 - protein, 7 aa, synthetic construct
EQNMAKR

SEQ ID NO: 170873 - protein, 7 aa, synthetic construct
ERNPAMR

SEQ ID NO: 170874 - protein, 7 aa, synthetic construct
LTNRMDR

SEQ ID NO: 170875 - protein, 7 aa, synthetic construct
PMERAGR

SEQ ID NO: 170876 - protein, 7 aa, synthetic construct
ETVTAKR

SEQ ID NO: 170877 - protein, 7 aa, synthetic construct
ADMRAGR

SEQ ID NO: 170878 - protein, 7 aa, synthetic construct
ETKNAQR

SEQ ID NO: 170879 - protein, 7 aa, synthetic construct
EPQRMGR

SEQ ID NO: 170880 - protein, 7 aa, synthetic construct
ETNPKPR

SEQ ID NO: 170881 - protein, 7 aa, synthetic construct
ENNKAVR

SEQ ID NO: 170882 - protein, 7 aa, synthetic construct
ETRKAGA

SEQ ID NO: 170883 - protein, 7 aa, synthetic construct
ELRPAGR

SEQ ID NO: 170884 - protein, 7 aa, synthetic construct
STNRESR

SEQ ID NO: 170885 - protein, 7 aa, synthetic construct
ETKRAVS

SEQ ID NO: 170886 - protein, 7 aa, synthetic construct
FTNRADR

SEQ ID NO: 170887 - protein, 7 aa, synthetic construct
YTNREGK

SEQ ID NO: 170888 - protein, 7 aa, synthetic construct
DTQRAAR

SEQ ID NO: 170889 - protein, 7 aa, synthetic construct
ERNLSGR

SEQ ID NO: 170890 - protein, 7 aa, synthetic construct
KTNRDGV

SEQ ID NO: 170891 - protein, 7 aa, synthetic construct
ETNRIKI

SEQ ID NO: 170892 - protein, 7 aa, synthetic construct
EKGMAGR

SEQ ID NO: 170893 - protein, 7 aa, synthetic construct
GDNRMGR

SEQ ID NO: 170894 - protein, 7 aa, synthetic construct
DTNRIAR

SEQ ID NO: 170895 - protein, 7 aa, synthetic construct
VTERGGR

SEQ ID NO: 170896 - protein, 7 aa, synthetic construct
ETNRLRV

SEQ ID NO: 170897 - protein, 7 aa, synthetic construct
EGNKIGR

SEQ ID NO: 170898 - protein, 7 aa, synthetic construct
MTDRATR

SEQ ID NO: 170899 - protein, 7 aa, synthetic construct
DTPRGGR

SEQ ID NO: 170900 - protein, 7 aa, synthetic construct
FTNRATI

SEQ ID NO: 170901 - protein, 7 aa, synthetic construct
NDIRAGR

SEQ ID NO: 170902 - protein, 7 aa, synthetic construct
ETPIKGR

SEQ ID NO: 170903 - protein, 7 aa, synthetic construct
DTGRAGK

SEQ ID NO: 170904 - protein, 7 aa, synthetic construct
KENRAER

SEQ ID NO: 170905 - protein, 7 aa, synthetic construct
ERNTSGR

SEQ ID NO: 170906 - protein, 7 aa, synthetic construct
ETTRPVR

SEQ ID NO: 170907 - protein, 7 aa, synthetic construct
TTDRALR

SEQ ID NO: 170908 - protein, 7 aa, synthetic construct
KTQRAGD

SEQ ID NO: 170909 - protein, 7 aa, synthetic construct
FTNRDGK

SEQ ID NO: 170910 - protein, 7 aa, synthetic construct
ERLQAGR

SEQ ID NO: 170911 - protein, 7 aa, synthetic construct
ETAPRGR

SEQ ID NO: 170912 - protein, 7 aa, synthetic construct
ETNRGIK

SEQ ID NO: 170913 - protein, 7 aa, synthetic construct
ATHRAGG

SEQ ID NO: 170914 - protein, 7 aa, synthetic construct
EQNTKGR

SEQ ID NO: 170915 - protein, 7 aa, synthetic construct
FTSNAGR

SEQ ID NO: 170916 - protein, 7 aa, synthetic construct
DSNRAIR

SEQ ID NO: 170917 - protein, 7 aa, synthetic construct
EVRQAGR

SEQ ID NO: 170918 - protein, 7 aa, synthetic construct
EGNKLGR

SEQ ID NO: 170919 - protein, 7 aa, synthetic construct
PTNRHGG

SEQ ID NO: 170920 - protein, 7 aa, synthetic construct
TTERAAR

SEQ ID NO: 170921 - protein, 7 aa, synthetic construct
QVNRADR

SEQ ID NO: 170922 - protein, 7 aa, synthetic construct
EMPRLGR

SEQ ID NO: 170923 - protein, 7 aa, synthetic construct
EVNRAKV

SEQ ID NO: 170924 - protein, 7 aa, synthetic construct
ENQKAGR

SEQ ID NO: 170925 - protein, 7 aa, synthetic construct
ETKAAQR

SEQ ID NO: 170926 - protein, 7 aa, synthetic construct
FTNSAPR

SEQ ID NO: 170927 - protein, 7 aa, synthetic construct
ETNRTKI

SEQ ID NO: 170928 - protein, 7 aa, synthetic construct
VQNREGR

SEQ ID NO: 170929 - protein, 7 aa, synthetic construct
LTVRADR

SEQ ID NO: 170930 - protein, 7 aa, synthetic construct
PTERASR

SEQ ID NO: 170931 - protein, 7 aa, synthetic construct
VTNRDQR

SEQ ID NO: 170932 - protein, 7 aa, synthetic construct
VENKAGR

SEQ ID NO: 170933 - protein, 7 aa, synthetic construct
ENNRAKV

SEQ ID NO: 170934 - protein, 7 aa, synthetic construct
GTSRAGN

SEQ ID NO: 170935 - protein, 7 aa, synthetic construct
MTMRADR

SEQ ID NO: 170936 - protein, 7 aa, synthetic construct
VTNRVDR

SEQ ID NO: 170937 - protein, 7 aa, synthetic construct
SINRADR

SEQ ID NO: 170938 - protein, 7 aa, synthetic construct
NKNRAGD

SEQ ID NO: 170939 - protein, 7 aa, synthetic construct
VTQRADR

SEQ ID NO: 170940 - protein, 7 aa, synthetic construct
ETKRATS

SEQ ID NO: 170941 - protein, 7 aa, synthetic construct
ATTREGR

SEQ ID NO: 170942 - protein, 7 aa, synthetic construct
NTNRKGD

SEQ ID NO: 170943 - protein, 7 aa, synthetic construct
EKNRAQS

SEQ ID NO: 170944 - protein, 7 aa, synthetic construct
ETNKAMK

SEQ ID NO: 170945 - protein, 7 aa, synthetic construct
DTVRAAR

SEQ ID NO: 170946 - protein, 7 aa, synthetic construct
ETTVAKR

SEQ ID NO: 170947 - protein, 7 aa, synthetic construct
ETKRGGM

SEQ ID NO: 170948 - protein, 7 aa, synthetic construct
RLNEAGR

SEQ ID NO: 170949 - protein, 7 aa, synthetic construct
ATNRSDR

SEQ ID NO: 170950 - protein, 7 aa, synthetic construct
EKIRAGY

SEQ ID NO: 170951 - protein, 7 aa, synthetic construct
ETNIKSR

SEQ ID NO: 170952 - protein, 7 aa, synthetic construct
HTARAGQ

SEQ ID NO: 170953 - protein, 7 aa, synthetic construct
PTNRGDR

SEQ ID NO: 170954 - protein, 7 aa, synthetic construct
LTERANR

SEQ ID NO: 170955 - protein, 7 aa, synthetic construct
EKLTAGR

SEQ ID NO: 170956 - protein, 7 aa, synthetic construct
DTPRAIR

SEQ ID NO: 170957 - protein, 7 aa, synthetic construct
ETNKVQR

SEQ ID NO: 170958 - protein, 7 aa, synthetic construct
ETNKTQR

SEQ ID NO: 170959 - protein, 7 aa, synthetic construct
ETKRALS

SEQ ID NO: 170960 - protein, 7 aa, synthetic construct
ESNVKGR

SEQ ID NO: 170961 - protein, 7 aa, synthetic construct
ATARADR

SEQ ID NO: 170962 - protein, 7 aa, synthetic construct
ETQRAKI

SEQ ID NO: 170963 - protein, 7 aa, synthetic construct
ESKQAGR

SEQ ID NO: 170964 - protein, 7 aa, synthetic construct
ETKRAQS

SEQ ID NO: 170965 - protein, 7 aa, synthetic construct
VMNREGR

SEQ ID NO: 170966 - protein, 7 aa, synthetic construct
ETNQKGK

SEQ ID NO: 170967 - protein, 7 aa, synthetic construct
TTNRAEK

SEQ ID NO: 170968 - protein, 7 aa, synthetic construct
EINKANR

SEQ ID NO: 170969 - protein, 7 aa, synthetic construct
EPNMKGR

SEQ ID NO: 170970 - protein, 7 aa, synthetic construct
ESKRAGA

SEQ ID NO: 170971 - protein, 7 aa, synthetic construct
RTNRVGD

SEQ ID NO: 170972 - protein, 7 aa, synthetic construct
ETNKAKV

SEQ ID NO: 170973 - protein, 7 aa, synthetic construct
ENKRAGV

SEQ ID NO: 170974 - protein, 7 aa, synthetic construct
TTNEAKR

SEQ ID NO: 170975 - protein, 7 aa, synthetic construct
ETKIAQR

SEQ ID NO: 170976 - protein, 7 aa, synthetic construct
ETVKMGR

SEQ ID NO: 170977 - protein, 7 aa, synthetic construct
YTNPALR

SEQ ID NO: 170978 - protein, 7 aa, synthetic construct
ITNRDQR

SEQ ID NO: 170979 - protein, 7 aa, synthetic construct
ETNRGKL

SEQ ID NO: 170980 - protein, 7 aa, synthetic construct
ETSAKGR

SEQ ID NO: 170981 - protein, 7 aa, synthetic construct
RTARAGE

SEQ ID NO: 170982 - protein, 7 aa, synthetic construct
QENRQGR

SEQ ID NO: 170983 - protein, 7 aa, synthetic construct
FTNPANR

SEQ ID NO: 170984 - protein, 7 aa, synthetic construct
NENRAAR

SEQ ID NO: 170985 - protein, 7 aa, synthetic construct
ETKSAGR

SEQ ID NO: 170986 - protein, 7 aa, synthetic construct
TTDRMGR

SEQ ID NO: 170987 - protein, 7 aa, synthetic construct
EFNKASR

SEQ ID NO: 170988 - protein, 7 aa, synthetic construct
ETNPKNR

SEQ ID NO: 170989 - protein, 7 aa, synthetic construct
ERNKAGL

SEQ ID NO: 170990 - protein, 7 aa, synthetic construct
HTVRAGQ

SEQ ID NO: 170991 - protein, 7 aa, synthetic construct
EANTKGR

SEQ ID NO: 170992 - protein, 7 aa, synthetic construct
NESRAGR

SEQ ID NO: 170993 - protein, 7 aa, synthetic construct
ERNPAPR

SEQ ID NO: 170994 - protein, 7 aa, synthetic construct
STNRAHI

SEQ ID NO: 170995 - protein, 7 aa, synthetic construct
ETMKAQR

SEQ ID NO: 170996 - protein, 7 aa, synthetic construct
EPNRAIK

SEQ ID NO: 170997 - protein, 7 aa, synthetic construct
EVVRAGK

SEQ ID NO: 170998 - protein, 7 aa, synthetic construct
NENRAPR

SEQ ID NO: 170999 - protein, 7 aa, synthetic construct
VLNRAER

SEQ ID NO: 171000 - protein, 7 aa, synthetic construct
ETKRAVQ

SEQ ID NO: 171001 - protein, 7 aa, synthetic construct
ERPAAGR

SEQ ID NO: 171002 - protein, 7 aa, synthetic construct
EKNRPGF

SEQ ID NO: 171003 - protein, 7 aa, synthetic construct
EMTKAGR

SEQ ID NO: 171004 - protein, 7 aa, synthetic construct
QTSREGR

SEQ ID NO: 171005 - protein, 7 aa, synthetic construct
TVDRAGR

SEQ ID NO: 171006 - protein, 7 aa, synthetic construct
RTDNAGR

SEQ ID NO: 171007 - protein, 7 aa, synthetic construct
ETNRLMK

SEQ ID NO: 171008 - protein, 7 aa, synthetic construct
GTERALR

SEQ ID NO: 171009 - protein, 7 aa, synthetic construct
GTGSAGR

SEQ ID NO: 171010 - protein, 7 aa, synthetic construct
TENRANR

SEQ ID NO: 171011 - protein, 7 aa, synthetic construct
YTGRADR

SEQ ID NO: 171012 - protein, 7 aa, synthetic construct
NENRLGR

SEQ ID NO: 171013 - protein, 7 aa, synthetic construct
ETKPMGR

SEQ ID NO: 171014 - protein, 7 aa, synthetic construct
ENNRAKA

SEQ ID NO: 171015 - protein, 7 aa, synthetic construct
ETQGKGR

SEQ ID NO: 171016 - protein, 7 aa, synthetic construct
ETNPKGK

SEQ ID NO: 171017 - protein, 7 aa, synthetic construct
EQNKQGR

SEQ ID NO: 171018 - protein, 7 aa, synthetic construct
VENRAGK

SEQ ID NO: 171019 - protein, 7 aa, synthetic construct
ITNTAHR

SEQ ID NO: 171020 - protein, 7 aa, synthetic construct
VTNRPDR

SEQ ID NO: 171021 - protein, 7 aa, synthetic construct
ETNIPKR

SEQ ID NO: 171022 - protein, 7 aa, synthetic construct
ETQRAKL

SEQ ID NO: 171023 - protein, 7 aa, synthetic construct
ERNPAVR

SEQ ID NO: 171024 - protein, 7 aa, synthetic construct
ITNREPR

SEQ ID NO: 171025 - protein, 7 aa, synthetic construct
RTTRAGE

SEQ ID NO: 171026 - protein, 7 aa, synthetic construct
STSRAGQ

SEQ ID NO: 171027 - protein, 7 aa, synthetic construct
ETNKVPR

SEQ ID NO: 171028 - protein, 7 aa, synthetic construct
EANRRGV

SEQ ID NO: 171029 - protein, 7 aa, synthetic construct
EVNMKGR

SEQ ID NO: 171030 - protein, 7 aa, synthetic construct
ENPRAGR

SEQ ID NO: 171031 - protein, 7 aa, synthetic construct
FTNRIGG

SEQ ID NO: 171032 - protein, 7 aa, synthetic construct
DTNMAKR

SEQ ID NO: 171033 - protein, 7 aa, synthetic construct
QDNRPGR

SEQ ID NO: 171034 - protein, 7 aa, synthetic construct
DTGKAGR

SEQ ID NO: 171035 - protein, 7 aa, synthetic construct
FTNRAQG

SEQ ID NO: 171036 - protein, 7 aa, synthetic construct
EPNRAGR

SEQ ID NO: 171037 - protein, 7 aa, synthetic construct
GTNRGDR

SEQ ID NO: 171038 - protein, 7 aa, synthetic construct
ETRTPGR

SEQ ID NO: 171039 - protein, 7 aa, synthetic construct
ITNRTER

SEQ ID NO: 171040 - protein, 7 aa, synthetic construct
ETIQKGR

SEQ ID NO: 171041 - protein, 7 aa, synthetic construct
EQNRATK

SEQ ID NO: 171042 - protein, 7 aa, synthetic construct
YTGMAGR

SEQ ID NO: 171043 - protein, 7 aa, synthetic construct
EIPRANR

SEQ ID NO: 171044 - protein, 7 aa, synthetic construct
ETKRALG

SEQ ID NO: 171045 - protein, 7 aa, synthetic construct
ETNRPKI

SEQ ID NO: 171046 - protein, 7 aa, synthetic construct
QPERAGR

SEQ ID NO: 171047 - protein, 7 aa, synthetic construct
ETQKSGR

SEQ ID NO: 171048 - protein, 7 aa, synthetic construct
DNPRAGR

SEQ ID NO: 171049 - protein, 7 aa, synthetic construct
EKNRAIV

SEQ ID NO: 171050 - protein, 7 aa, synthetic construct
ETNKLVR

SEQ ID NO: 171051 - protein, 7 aa, synthetic construct
EFNKAAR

SEQ ID NO: 171052 - protein, 7 aa, synthetic construct
EQNRVGR

SEQ ID NO: 171053 - protein, 7 aa, synthetic construct
DTRPAGR

SEQ ID NO: 171054 - protein, 7 aa, synthetic construct
EVNQRGR

SEQ ID NO: 171055 - protein, 7 aa, synthetic construct
AEPRAGR

SEQ ID NO: 171056 - protein, 7 aa, synthetic construct
ETKAAIR

SEQ ID NO: 171057 - protein, 7 aa, synthetic construct
TDNRANR

SEQ ID NO: 171058 - protein, 7 aa, synthetic construct
EKNREMR

SEQ ID NO: 171059 - protein, 7 aa, synthetic construct
LTKRAGE

SEQ ID NO: 171060 - protein, 7 aa, synthetic construct
ELNKAMR

SEQ ID NO: 171061 - protein, 7 aa, synthetic construct
QANRADR

SEQ ID NO: 171062 - protein, 7 aa, synthetic construct
ETKLAIR

SEQ ID NO: 171063 - protein, 7 aa, synthetic construct
EINRGAR

SEQ ID NO: 171064 - protein, 7 aa, synthetic construct
ETIRAKA

SEQ ID NO: 171065 - protein, 7 aa, synthetic construct
EQKRAGV

SEQ ID NO: 171066 - protein, 7 aa, synthetic construct
GGNRADR

SEQ ID NO: 171067 - protein, 7 aa, synthetic construct
ENNRARP

SEQ ID NO: 171068 - protein, 7 aa, synthetic construct
ETKRPGY

SEQ ID NO: 171069 - protein, 7 aa, synthetic construct
ETGNAKR

SEQ ID NO: 171070 - protein, 7 aa, synthetic construct
ETKRAGM

SEQ ID NO: 171071 - protein, 7 aa, synthetic construct
ETTQAKR

SEQ ID NO: 171072 - protein, 7 aa, synthetic construct
ETRKAGT

SEQ ID NO: 171073 - protein, 7 aa, synthetic construct
EVKPAGR

SEQ ID NO: 171074 - protein, 7 aa, synthetic construct
EQNKAGR

SEQ ID NO: 171075 - protein, 7 aa, synthetic construct
ETNPSKR

SEQ ID NO: 171076 - protein, 7 aa, synthetic construct
TTHRAGQ

SEQ ID NO: 171077 - protein, 7 aa, synthetic construct
ETLPKGR

SEQ ID NO: 171078 - protein, 7 aa, synthetic construct
EPNKAAR

SEQ ID NO: 171079 - protein, 7 aa, synthetic construct
SANRAER

SEQ ID NO: 171080 - protein, 7 aa, synthetic construct
ETKPAGK

SEQ ID NO: 171081 - protein, 7 aa, synthetic construct
TINRADR

SEQ ID NO: 171082 - protein, 7 aa, synthetic construct
ETKRLGS

SEQ ID NO: 171083 - protein, 7 aa, synthetic construct
EKFRAGV

SEQ ID NO: 171084 - protein, 7 aa, synthetic construct
ETPQAKR

SEQ ID NO: 171085 - protein, 7 aa, synthetic construct
LLNREGR

SEQ ID NO: 171086 - protein, 7 aa, synthetic construct
EKQLAGR

SEQ ID NO: 171087 - protein, 7 aa, synthetic construct
KTERDGR

SEQ ID NO: 171088 - protein, 7 aa, synthetic construct
TTNRTDR

SEQ ID NO: 171089 - protein, 7 aa, synthetic construct
TKNRAGD

SEQ ID NO: 171090 - protein, 7 aa, synthetic construct
NTERAGK

SEQ ID NO: 171091 - protein, 7 aa, synthetic construct
ETNRLTK

SEQ ID NO: 171092 - protein, 7 aa, synthetic construct
PTNRTDR

SEQ ID NO: 171093 - protein, 7 aa, synthetic construct
NTDRASR

SEQ ID NO: 171094 - protein, 7 aa, synthetic construct
EFNKAPR

SEQ ID NO: 171095 - protein, 7 aa, synthetic construct
ERVPAGR

SEQ ID NO: 171096 - protein, 7 aa, synthetic construct
ETPRARV

SEQ ID NO: 171097 - protein, 7 aa, synthetic construct
NDNRAGR

SEQ ID NO: 171098 - protein, 7 aa, synthetic construct
GTNRAKD

SEQ ID NO: 171099 - protein, 7 aa, synthetic construct
EGNQKGR

SEQ ID NO: 171100 - protein, 7 aa, synthetic construct
KANRAGD

SEQ ID NO: 171101 - protein, 7 aa, synthetic construct
ETKRAPG

SEQ ID NO: 171102 - protein, 7 aa, synthetic construct
ETRNTGR

SEQ ID NO: 171103 - protein, 7 aa, synthetic construct
ITARAER

SEQ ID NO: 171104 - protein, 7 aa, synthetic construct
ETNPKSR

SEQ ID NO: 171105 - protein, 7 aa, synthetic construct
ELTRAGK

SEQ ID NO: 171106 - protein, 7 aa, synthetic construct
QDNRAAR

SEQ ID NO: 171107 - protein, 7 aa, synthetic construct
EAKRAGT

SEQ ID NO: 171108 - protein, 7 aa, synthetic construct
ETNNKIR

SEQ ID NO: 171109 - protein, 7 aa, synthetic construct
ETNKMAR

SEQ ID NO: 171110 - protein, 7 aa, synthetic construct
ETKRAGL

SEQ ID NO: 171111 - protein, 7 aa, synthetic construct
ELNRAIK

SEQ ID NO: 171112 - protein, 7 aa, synthetic construct
INNREGR

SEQ ID NO: 171113 - protein, 7 aa, synthetic construct
YTPRAGQ

SEQ ID NO: 171114 - protein, 7 aa, synthetic construct
EKNNSGR

SEQ ID NO: 171115 - protein, 7 aa, synthetic construct
MTGREGR

SEQ ID NO: 171116 - protein, 7 aa, synthetic construct
ERNRVGA

SEQ ID NO: 171117 - protein, 7 aa, synthetic construct
ETKPALR

SEQ ID NO: 171118 - protein, 7 aa, synthetic construct
ESNQKGR

SEQ ID NO: 171119 - protein, 7 aa, synthetic construct
EKNLIGR

SEQ ID NO: 171120 - protein, 7 aa, synthetic construct
DVGRAGR

SEQ ID NO: 171121 - protein, 7 aa, synthetic construct
VTERSGR

SEQ ID NO: 171122 - protein, 7 aa, synthetic construct
EQKMAGR

SEQ ID NO: 171123 - protein, 7 aa, synthetic construct
TENRAAR

SEQ ID NO: 171124 - protein, 7 aa, synthetic construct
EPVRAGK

SEQ ID NO: 171125 - protein, 7 aa, synthetic construct
ETQRAKG

SEQ ID NO: 171126 - protein, 7 aa, synthetic construct
ETNRVKT

SEQ ID NO: 171127 - protein, 7 aa, synthetic construct
ASDRAGR

SEQ ID NO: 171128 - protein, 7 aa, synthetic construct
STDRAGR

SEQ ID NO: 171129 - protein, 7 aa, synthetic construct
ETNQAKK

SEQ ID NO: 171130 - protein, 7 aa, synthetic construct
HTGRAGN

SEQ ID NO: 171131 - protein, 7 aa, synthetic construct
ETNAIKR

SEQ ID NO: 171132 - protein, 7 aa, synthetic construct
QKNRAGD

SEQ ID NO: 171133 - protein, 7 aa, synthetic construct
PTMRADR

SEQ ID NO: 171134 - protein, 7 aa, synthetic construct
VTNRENR

SEQ ID NO: 171135 - protein, 7 aa, synthetic construct
ITNRVER

SEQ ID NO: 171136 - protein, 7 aa, synthetic construct
LNNREGR

SEQ ID NO: 171137 - protein, 7 aa, synthetic construct
STDRVGR

SEQ ID NO: 171138 - protein, 7 aa, synthetic construct
EKNERGR

SEQ ID NO: 171139 - protein, 7 aa, synthetic construct
VTNRAHL

SEQ ID NO: 171140 - protein, 7 aa, synthetic construct
DTNRASR

SEQ ID NO: 171141 - protein, 7 aa, synthetic construct
ETKNALR

SEQ ID NO: 171142 - protein, 7 aa, synthetic construct
ETNRLKN

SEQ ID NO: 171143 - protein, 7 aa, synthetic construct
PENRAGR

SEQ ID NO: 171144 - protein, 7 aa, synthetic construct
DTNRSSR

SEQ ID NO: 171145 - protein, 7 aa, synthetic construct
ENNRQGK

SEQ ID NO: 171146 - protein, 7 aa, synthetic construct
QTDRATR

SEQ ID NO: 171147 - protein, 7 aa, synthetic construct
STERQGR

SEQ ID NO: 171148 - protein, 7 aa, synthetic construct
TTERSGR

SEQ ID NO: 171149 - protein, 7 aa, synthetic construct
EKNRAMS

SEQ ID NO: 171150 - protein, 7 aa, synthetic construct
QLDRAGR

SEQ ID NO: 171151 - protein, 7 aa, synthetic construct
TTHGAGR

SEQ ID NO: 171152 - protein, 7 aa, synthetic construct
ETQKAAR

SEQ ID NO: 171153 - protein, 7 aa, synthetic construct
ETKIAPR

SEQ ID NO: 171154 - protein, 7 aa, synthetic construct
EAPRQGR

SEQ ID NO: 171155 - protein, 7 aa, synthetic construct
STGHAGR

SEQ ID NO: 171156 - protein, 7 aa, synthetic construct
VTNIHGR

SEQ ID NO: 171157 - protein, 7 aa, synthetic construct
RTNEAGR

SEQ ID NO: 171158 - protein, 7 aa, synthetic construct
IINRADR

SEQ ID NO: 171159 - protein, 7 aa, synthetic construct
ETSKAGR

SEQ ID NO: 171160 - protein, 7 aa, synthetic construct
ETQRIGK

SEQ ID NO: 171161 - protein, 7 aa, synthetic construct
QTSRAGQ

SEQ ID NO: 171162 - protein, 7 aa, synthetic construct
ETNQRGK

SEQ ID NO: 171163 - protein, 7 aa, synthetic construct
YTNAALR

SEQ ID NO: 171164 - protein, 7 aa, synthetic construct
ATNRNDR

SEQ ID NO: 171165 - protein, 7 aa, synthetic construct
ETNRAKV

SEQ ID NO: 171166 - protein, 7 aa, synthetic construct
ERNPANR

SEQ ID NO: 171167 - protein, 7 aa, synthetic construct
QTERLGR

SEQ ID NO: 171168 - protein, 7 aa, synthetic construct
EGNKPGR

SEQ ID NO: 171169 - protein, 7 aa, synthetic construct
MTNRDSR

SEQ ID NO: 171170 - protein, 7 aa, synthetic construct
KDNRAER

SEQ ID NO: 171171 - protein, 7 aa, synthetic construct
DMPRAGR

SEQ ID NO: 171172 - protein, 7 aa, synthetic construct
ETNRATK

SEQ ID NO: 171173 - protein, 7 aa, synthetic construct
ETSKIGR

SEQ ID NO: 171174 - protein, 7 aa, synthetic construct
MTPRAGH

SEQ ID NO: 171175 - protein, 7 aa, synthetic construct
TINREGR

SEQ ID NO: 171176 - protein, 7 aa, synthetic construct
ITDRASR

SEQ ID NO: 171177 - protein, 7 aa, synthetic construct
ETKRTGQ

SEQ ID NO: 171178 - protein, 7 aa, synthetic construct
EFNKLGR

SEQ ID NO: 171179 - protein, 7 aa, synthetic construct
VTNRDAR

SEQ ID NO: 171180 - protein, 7 aa, synthetic construct
VTERATR

SEQ ID NO: 171181 - protein, 7 aa, synthetic construct
DNNRAAR

SEQ ID NO: 171182 - protein, 7 aa, synthetic construct
IENRAAR

SEQ ID NO: 171183 - protein, 7 aa, synthetic construct
ETATRGR

SEQ ID NO: 171184 - protein, 7 aa, synthetic construct
EKNRMGN

SEQ ID NO: 171185 - protein, 7 aa, synthetic construct
GDNRATR

SEQ ID NO: 171186 - protein, 7 aa, synthetic construct
FINREGR

SEQ ID NO: 171187 - protein, 7 aa, synthetic construct
DTKRAER

SEQ ID NO: 171188 - protein, 7 aa, synthetic construct
ETTRKGM

SEQ ID NO: 171189 - protein, 7 aa, synthetic construct
STNRANL

SEQ ID NO: 171190 - protein, 7 aa, synthetic construct
EKYAAGR

SEQ ID NO: 171191 - protein, 7 aa, synthetic construct
HTTRAGG

SEQ ID NO: 171192 - protein, 7 aa, synthetic construct
LTNRADK

SEQ ID NO: 171193 - protein, 7 aa, synthetic construct
EVARGGR

SEQ ID NO: 171194 - protein, 7 aa, synthetic construct
IADRAGR

SEQ ID NO: 171195 - protein, 7 aa, synthetic construct
ETGPAKR

SEQ ID NO: 171196 - protein, 7 aa, synthetic construct
GTNREQR

SEQ ID NO: 171197 - protein, 7 aa, synthetic construct
FSNRADR

SEQ ID NO: 171198 - protein, 7 aa, synthetic construct
ETLRGGK

SEQ ID NO: 171199 - protein, 7 aa, synthetic construct
ETNKART

SEQ ID NO: 171200 - protein, 7 aa, synthetic construct
DNARAGR

SEQ ID NO: 171201 - protein, 7 aa, synthetic construct
ETNPKMR

SEQ ID NO: 171202 - protein, 7 aa, synthetic construct
ETNLKAR

SEQ ID NO: 171203 - protein, 7 aa, synthetic construct
VTNRESR

SEQ ID NO: 171204 - protein, 7 aa, synthetic construct
GANREGR

SEQ ID NO: 171205 - protein, 7 aa, synthetic construct
ETKGAQR

SEQ ID NO: 171206 - protein, 7 aa, synthetic construct
ETTRAIK

SEQ ID NO: 171207 - protein, 7 aa, synthetic construct
FTNAANR

SEQ ID NO: 171208 - protein, 7 aa, synthetic construct
ETLKANR

SEQ ID NO: 171209 - protein, 7 aa, synthetic construct
EGNKTGR

SEQ ID NO: 171210 - protein, 7 aa, synthetic construct
ELNKAQR

SEQ ID NO: 171211 - protein, 7 aa, synthetic construct
VTERQGR

SEQ ID NO: 171212 - protein, 7 aa, synthetic construct
IENRANR

SEQ ID NO: 171213 - protein, 7 aa, synthetic construct
EKNMAAR

SEQ ID NO: 171214 - protein, 7 aa, synthetic construct
QTNRELR

SEQ ID NO: 171215 - protein, 7 aa, synthetic construct
AANRADR

SEQ ID NO: 171216 - protein, 7 aa, synthetic construct
ERNPMGR

SEQ ID NO: 171217 - protein, 7 aa, synthetic construct
ATERVGR

SEQ ID NO: 171218 - protein, 7 aa, synthetic construct
LTNRASM

SEQ ID NO: 171219 - protein, 7 aa, synthetic construct
GTNRKGD

SEQ ID NO: 171220 - protein, 7 aa, synthetic construct
VNNREGR

SEQ ID NO: 171221 - protein, 7 aa, synthetic construct
ITQRADR

SEQ ID NO: 171222 - protein, 7 aa, synthetic construct
ADIRAGR

SEQ ID NO: 171223 - protein, 7 aa, synthetic construct
EKNRAIS

SEQ ID NO: 171224 - protein, 7 aa, synthetic construct
ELIKAGR

SEQ ID NO: 171225 - protein, 7 aa, synthetic construct
MTNDARR

SEQ ID NO: 171226 - protein, 7 aa, synthetic construct
EKNPAGR

SEQ ID NO: 171227 - protein, 7 aa, synthetic construct
ELNRMGK

SEQ ID NO: 171228 - protein, 7 aa, synthetic construct
ERTRAGV

SEQ ID NO: 171229 - protein, 7 aa, synthetic construct
EPNQKGR

SEQ ID NO: 171230 - protein, 7 aa, synthetic construct
DTTRAGR

SEQ ID NO: 171231 - protein, 7 aa, synthetic construct
DTGRAPR

SEQ ID NO: 171232 - protein, 7 aa, synthetic construct
MIERAGR

SEQ ID NO: 171233 - protein, 7 aa, synthetic construct
IFNAAGR

SEQ ID NO: 171234 - protein, 7 aa, synthetic construct
EINRAVK

SEQ ID NO: 171235 - protein, 7 aa, synthetic construct
DKNHAGR

SEQ ID NO: 171236 - protein, 7 aa, synthetic construct
ELRNAGR

SEQ ID NO: 171237 - protein, 7 aa, synthetic construct
TTNRGER

SEQ ID NO: 171238 - protein, 7 aa, synthetic construct
TTHRAGN

SEQ ID NO: 171239 - protein, 7 aa, synthetic construct
ETNKSIR

SEQ ID NO: 171240 - protein, 7 aa, synthetic construct
DPGRAGR

SEQ ID NO: 171241 - protein, 7 aa, synthetic construct
ERNKEGR

SEQ ID NO: 171242 - protein, 7 aa, synthetic construct
VANREGR

SEQ ID NO: 171243 - protein, 7 aa, synthetic construct
ERPRAGV

SEQ ID NO: 171244 - protein, 7 aa, synthetic construct
ETKQAAR

SEQ ID NO: 171245 - protein, 7 aa, synthetic construct
DPNRQGR

SEQ ID NO: 171246 - protein, 7 aa, synthetic construct
DTNRRGT

SEQ ID NO: 171247 - protein, 7 aa, synthetic construct
ITNREGR

SEQ ID NO: 171248 - protein, 7 aa, synthetic construct
MTDRALR

SEQ ID NO: 171249 - protein, 7 aa, synthetic construct
EPNRVGR

SEQ ID NO: 171250 - protein, 7 aa, synthetic construct
APDRAGR

SEQ ID NO: 171251 - protein, 7 aa, synthetic construct
EPARAGK

SEQ ID NO: 171252 - protein, 7 aa, synthetic construct
ETTRRGV

SEQ ID NO: 171253 - protein, 7 aa, synthetic construct
ENNRKGA

SEQ ID NO: 171254 - protein, 7 aa, synthetic construct
ETNKGNR

SEQ ID NO: 171255 - protein, 7 aa, synthetic construct
EMNRAIK

SEQ ID NO: 171256 - protein, 7 aa, synthetic construct
ETPQRGR

SEQ ID NO: 171257 - protein, 7 aa, synthetic construct
EAIRAGK

SEQ ID NO: 171258 - protein, 7 aa, synthetic construct
QENRAVR

SEQ ID NO: 171259 - protein, 7 aa, synthetic construct
IINRAGG

SEQ ID NO: 171260 - protein, 7 aa, synthetic construct
ELKRAGF

SEQ ID NO: 171261 - protein, 7 aa, synthetic construct
ETAQAKR

SEQ ID NO: 171262 - protein, 7 aa, synthetic construct
ESNKTGR

SEQ ID NO: 171263 - protein, 7 aa, synthetic construct
MENRANR

SEQ ID NO: 171264 - protein, 7 aa, synthetic construct
ETVKTGR

SEQ ID NO: 171265 - protein, 7 aa, synthetic construct
ETSRAKV

SEQ ID NO: 171266 - protein, 7 aa, synthetic construct
TENRAVR

SEQ ID NO: 171267 - protein, 7 aa, synthetic construct
ETNRINK

SEQ ID NO: 171268 - protein, 7 aa, synthetic construct
EKNRAMG

SEQ ID NO: 171269 - protein, 7 aa, synthetic construct
ETKAMGR

SEQ ID NO: 171270 - protein, 7 aa, synthetic construct
EISKAGR

SEQ ID NO: 171271 - protein, 7 aa, synthetic construct
EKNRAAT

SEQ ID NO: 171272 - protein, 7 aa, synthetic construct
VTGREGR

SEQ ID NO: 171273 - protein, 7 aa, synthetic construct
EQKRAGY

SEQ ID NO: 171274 - protein, 7 aa, synthetic construct
EKSIAGR

SEQ ID NO: 171275 - protein, 7 aa, synthetic construct
ETNRSGK

SEQ ID NO: 171276 - protein, 7 aa, synthetic construct
VSERAGR

SEQ ID NO: 171277 - protein, 7 aa, synthetic construct
EVNKPGR

SEQ ID NO: 171278 - protein, 7 aa, synthetic construct
DLNKAGR

SEQ ID NO: 171279 - protein, 7 aa, synthetic construct
DTIRGGR

SEQ ID NO: 171280 - protein, 7 aa, synthetic construct
ETNKARA

SEQ ID NO: 171281 - protein, 7 aa, synthetic construct
ETIKAPR

SEQ ID NO: 171282 - protein, 7 aa, synthetic construct
ETKRAIV

SEQ ID NO: 171283 - protein, 7 aa, synthetic construct
TTERAPR

SEQ ID NO: 171284 - protein, 7 aa, synthetic construct
EINARGR

SEQ ID NO: 171285 - protein, 7 aa, synthetic construct
GTSRADR

SEQ ID NO: 171286 - protein, 7 aa, synthetic construct
ETPSKGR

SEQ ID NO: 171287 - protein, 7 aa, synthetic construct
VENRIGR

SEQ ID NO: 171288 - protein, 7 aa, synthetic construct
ITSRAER

SEQ ID NO: 171289 - protein, 7 aa, synthetic construct
ETTRLGK

SEQ ID NO: 171290 - protein, 7 aa, synthetic construct
TENRVGR

SEQ ID NO: 171291 - protein, 7 aa, synthetic construct
ELNRGTR

SEQ ID NO: 171292 - protein, 7 aa, synthetic construct
ETKFAGR

SEQ ID NO: 171293 - protein, 7 aa, synthetic construct
EGQKAGR

SEQ ID NO: 171294 - protein, 7 aa, synthetic construct
DTTRATR

SEQ ID NO: 171295 - protein, 7 aa, synthetic construct
SAERAGR

SEQ ID NO: 171296 - protein, 7 aa, synthetic construct
KTNRDGN

SEQ ID NO: 171297 - protein, 7 aa, synthetic construct
EQQKAGR

SEQ ID NO: 171298 - protein, 7 aa, synthetic construct
NDPRAGR

SEQ ID NO: 171299 - protein, 7 aa, synthetic construct
DTRGAGR

SEQ ID NO: 171300 - protein, 7 aa, synthetic construct
ETQGAKR

SEQ ID NO: 171301 - protein, 7 aa, synthetic construct
VTNRASG

SEQ ID NO: 171302 - protein, 7 aa, synthetic construct
EMNRVGR

SEQ ID NO: 171303 - protein, 7 aa, synthetic construct
MDNKAGR

SEQ ID NO: 171304 - protein, 7 aa, synthetic construct
ETNKVMR

SEQ ID NO: 171305 - protein, 7 aa, synthetic construct
ENQRAGK

SEQ ID NO: 171306 - protein, 7 aa, synthetic construct
EVNKVGR

SEQ ID NO: 171307 - protein, 7 aa, synthetic construct
ENNTAKR

SEQ ID NO: 171308 - protein, 7 aa, synthetic construct
EPNSAKR

SEQ ID NO: 171309 - protein, 7 aa, synthetic construct
ETKLSGR

SEQ ID NO: 171310 - protein, 7 aa, synthetic construct
ETFKAGK

SEQ ID NO: 171311 - protein, 7 aa, synthetic construct
EKNRPGQ

SEQ ID NO: 171312 - protein, 7 aa, synthetic construct
ETTPKGR

SEQ ID NO: 171313 - protein, 7 aa, synthetic construct
EVNTAKR

SEQ ID NO: 171314 - protein, 7 aa, synthetic construct
ETQKATR

SEQ ID NO: 171315 - protein, 7 aa, synthetic construct
VGNRAER

SEQ ID NO: 171316 - protein, 7 aa, synthetic construct
ETKRMGY

SEQ ID NO: 171317 - protein, 7 aa, synthetic construct
EANKAQR

SEQ ID NO: 171318 - protein, 7 aa, synthetic construct
ERNIAGR

SEQ ID NO: 171319 - protein, 7 aa, synthetic construct
AENRVGR

SEQ ID NO: 171320 - protein, 7 aa, synthetic construct
NVNRADR

SEQ ID NO: 171321 - protein, 7 aa, synthetic construct
ETNKTTR

SEQ ID NO: 171322 - protein, 7 aa, synthetic construct
ETNNKMR

SEQ ID NO: 171323 - protein, 7 aa, synthetic construct
ADNRTGR

SEQ ID NO: 171324 - protein, 7 aa, synthetic construct
EINRATK

SEQ ID NO: 171325 - protein, 7 aa, synthetic construct
EMNRAKI

SEQ ID NO: 171326 - protein, 7 aa, synthetic construct
LENRTGR

SEQ ID NO: 171327 - protein, 7 aa, synthetic construct
IENRAGR

SEQ ID NO: 171328 - protein, 7 aa, synthetic construct
DLNRAAR

SEQ ID NO: 171329 - protein, 7 aa, synthetic construct
FVNREGR

SEQ ID NO: 171330 - protein, 7 aa, synthetic construct
EINKAAR

SEQ ID NO: 171331 - protein, 7 aa, synthetic construct
ETRSPGR

SEQ ID NO: 171332 - protein, 7 aa, synthetic construct
HTEKAGR

SEQ ID NO: 171333 - protein, 7 aa, synthetic construct
AGDRAGR

SEQ ID NO: 171334 - protein, 7 aa, synthetic construct
STDRATR

SEQ ID NO: 171335 - protein, 7 aa, synthetic construct
ETKRQGY

SEQ ID NO: 171336 - protein, 7 aa, synthetic construct
ELNRTGR

SEQ ID NO: 171337 - protein, 7 aa, synthetic construct
FTTRADR

SEQ ID NO: 171338 - protein, 7 aa, synthetic construct
QENRTGR

SEQ ID NO: 171339 - protein, 7 aa, synthetic construct
HTNREGK

SEQ ID NO: 171340 - protein, 7 aa, synthetic construct
EPQRVGR

SEQ ID NO: 171341 - protein, 7 aa, synthetic construct
DTNIRGR

SEQ ID NO: 171342 - protein, 7 aa, synthetic construct
TELRAGR

SEQ ID NO: 171343 - protein, 7 aa, synthetic construct
ETKRSGT

SEQ ID NO: 171344 - protein, 7 aa, synthetic construct
ELNTKGR

SEQ ID NO: 171345 - protein, 7 aa, synthetic construct
ATNREGR

SEQ ID NO: 171346 - protein, 7 aa, synthetic construct
VDVRAGR

SEQ ID NO: 171347 - protein, 7 aa, synthetic construct
EQKGAGR

SEQ ID NO: 171348 - protein, 7 aa, synthetic construct
EFKRAGV

SEQ ID NO: 171349 - protein, 7 aa, synthetic construct
ETTIAKR

SEQ ID NO: 171350 - protein, 7 aa, synthetic construct
QTNREQR

SEQ ID NO: 171351 - protein, 7 aa, synthetic construct
YTNRPER

SEQ ID NO: 171352 - protein, 7 aa, synthetic construct
EPARMGR

SEQ ID NO: 171353 - protein, 7 aa, synthetic construct
ETIPAKR

SEQ ID NO: 171354 - protein, 7 aa, synthetic construct
ETNKAKF

SEQ ID NO: 171355 - protein, 7 aa, synthetic construct
EGAKAGR

SEQ ID NO: 171356 - protein, 7 aa, synthetic construct
LTNRDAR

SEQ ID NO: 171357 - protein, 7 aa, synthetic construct
DTNKAGR

SEQ ID NO: 171358 - protein, 7 aa, synthetic construct
ETNRLKV

SEQ ID NO: 171359 - protein, 7 aa, synthetic construct
ETNRVKM

SEQ ID NO: 171360 - protein, 7 aa, synthetic construct
ETNRKNI

SEQ ID NO: 171361 - protein, 7 aa, synthetic construct
FTNRAER

SEQ ID NO: 171362 - protein, 7 aa, synthetic construct
ELSKAGR

SEQ ID NO: 171363 - protein, 7 aa, synthetic construct
ELNTAKR

SEQ ID NO: 171364 - protein, 7 aa, synthetic construct
EKNRAQI

SEQ ID NO: 171365 - protein, 7 aa, synthetic construct
HTNEAKR

SEQ ID NO: 171366 - protein, 7 aa, synthetic construct
ELNAKGR

SEQ ID NO: 171367 - protein, 7 aa, synthetic construct
ETNKTSR

SEQ ID NO: 171368 - protein, 7 aa, synthetic construct
FTNREMR

SEQ ID NO: 171369 - protein, 7 aa, synthetic construct
EKNRDVR

SEQ ID NO: 171370 - protein, 7 aa, synthetic construct
EMIKAGR

SEQ ID NO: 171371 - protein, 7 aa, synthetic construct
EKNRAVF

SEQ ID NO: 171372 - protein, 7 aa, synthetic construct
RTDAAGR

SEQ ID NO: 171373 - protein, 7 aa, synthetic construct
SPDRAGR

SEQ ID NO: 171374 - protein, 7 aa, synthetic construct
ETNGNKR

SEQ ID NO: 171375 - protein, 7 aa, synthetic construct
LFNAAGR

SEQ ID NO: 171376 - protein, 7 aa, synthetic construct
FTNTASR

SEQ ID NO: 171377 - protein, 7 aa, synthetic construct
APNYAGR

SEQ ID NO: 171378 - protein, 7 aa, synthetic construct
GTSHAGR

SEQ ID NO: 171379 - protein, 7 aa, synthetic construct
EKPRAGQ

SEQ ID NO: 171380 - protein, 7 aa, synthetic construct
VTSRAGQ

SEQ ID NO: 171381 - protein, 7 aa, synthetic construct
EAPRAGR

SEQ ID NO: 171382 - protein, 7 aa, synthetic construct
ETKRLGV

SEQ ID NO: 171383 - protein, 7 aa, synthetic construct
LINRAER

SEQ ID NO: 171384 - protein, 7 aa, synthetic construct
RENQAGR

SEQ ID NO: 171385 - protein, 7 aa, synthetic construct
ETGKAAR

SEQ ID NO: 171386 - protein, 7 aa, synthetic construct
FTHNAGR

SEQ ID NO: 171387 - protein, 7 aa, synthetic construct
ATTRAGQ

SEQ ID NO: 171388 - protein, 7 aa, synthetic construct
ESTKAGR

SEQ ID NO: 171389 - protein, 7 aa, synthetic construct
IPNREGR

SEQ ID NO: 171390 - protein, 7 aa, synthetic construct
ETNRLIK

SEQ ID NO: 171391 - protein, 7 aa, synthetic construct
EVNKAPR

SEQ ID NO: 171392 - protein, 7 aa, synthetic construct
ELNRASK

SEQ ID NO: 171393 - protein, 7 aa, synthetic construct
EKNRALQ

SEQ ID NO: 171394 - protein, 7 aa, synthetic construct
ETMKMGR

SEQ ID NO: 171395 - protein, 7 aa, synthetic construct
ETKLVGR

SEQ ID NO: 171396 - protein, 7 aa, synthetic construct
DTGRANR

SEQ ID NO: 171397 - protein, 7 aa, synthetic construct
ETPRAVK

SEQ ID NO: 171398 - protein, 7 aa, synthetic construct
YTARAER

SEQ ID NO: 171399 - protein, 7 aa, synthetic construct
QTGREGR

SEQ ID NO: 171400 - protein, 7 aa, synthetic construct
MGDRAGR

SEQ ID NO: 171401 - protein, 7 aa, synthetic construct
DTNRPGR

SEQ ID NO: 171402 - protein, 7 aa, synthetic construct
EFKQAGR

SEQ ID NO: 171403 - protein, 7 aa, synthetic construct
EAKRAGG

SEQ ID NO: 171404 - protein, 7 aa, synthetic construct
GTTREGR

SEQ ID NO: 171405 - protein, 7 aa, synthetic construct
VDNRALR

SEQ ID NO: 171406 - protein, 7 aa, synthetic construct
ETTTAKR

SEQ ID NO: 171407 - protein, 7 aa, synthetic construct
YTNREAR

SEQ ID NO: 171408 - protein, 7 aa, synthetic construct
EQNKAVR

SEQ ID NO: 171409 - protein, 7 aa, synthetic construct
GDNRAQR

SEQ ID NO: 171410 - protein, 7 aa, synthetic construct
ELNRATK

SEQ ID NO: 171411 - protein, 7 aa, synthetic construct
EMNKAGR

SEQ ID NO: 171412 - protein, 7 aa, synthetic construct
EANKAIR

SEQ ID NO: 171413 - protein, 7 aa, synthetic construct
ETNRKSI

SEQ ID NO: 171414 - protein, 7 aa, synthetic construct
EKVQAGR

SEQ ID NO: 171415 - protein, 7 aa, synthetic construct
MTNRAHV

SEQ ID NO: 171416 - protein, 7 aa, synthetic construct
YTNRAKD

SEQ ID NO: 171417 - protein, 7 aa, synthetic construct
ITHGAGR

SEQ ID NO: 171418 - protein, 7 aa, synthetic construct
KTYEAGR

SEQ ID NO: 171419 - protein, 7 aa, synthetic construct
EKQRDGR

SEQ ID NO: 171420 - protein, 7 aa, synthetic construct
ATDRALR

SEQ ID NO: 171421 - protein, 7 aa, synthetic construct
RTNELGR

SEQ ID NO: 171422 - protein, 7 aa, synthetic construct
EKNRMGY

SEQ ID NO: 171423 - protein, 7 aa, synthetic construct
ATNRQDR

SEQ ID NO: 171424 - protein, 7 aa, synthetic construct
PTERAIR

SEQ ID NO: 171425 - protein, 7 aa, synthetic construct
EINRAKS

SEQ ID NO: 171426 - protein, 7 aa, synthetic construct
LTDRAGR

SEQ ID NO: 171427 - protein, 7 aa, synthetic construct
ETSQKGR

SEQ ID NO: 171428 - protein, 7 aa, synthetic construct
STVRAGG

SEQ ID NO: 171429 - protein, 7 aa, synthetic construct
ETANRGR

SEQ ID NO: 171430 - protein, 7 aa, synthetic construct
ETNRIVK

SEQ ID NO: 171431 - protein, 7 aa, synthetic construct
DTTRTGR

SEQ ID NO: 171432 - protein, 7 aa, synthetic construct
VENRAIR

SEQ ID NO: 171433 - protein, 7 aa, synthetic construct
MDNRASR

SEQ ID NO: 171434 - protein, 7 aa, synthetic construct
EQNKAGK

SEQ ID NO: 171435 - protein, 7 aa, synthetic construct
FTNAAVR

SEQ ID NO: 171436 - protein, 7 aa, synthetic construct
ERPRAGS

SEQ ID NO: 171437 - protein, 7 aa, synthetic construct
ETNSSKR

SEQ ID NO: 171438 - protein, 7 aa, synthetic construct
DTNRSAR

SEQ ID NO: 171439 - protein, 7 aa, synthetic construct
EANRKGM

SEQ ID NO: 171440 - protein, 7 aa, synthetic construct
ETKMAAR

SEQ ID NO: 171441 - protein, 7 aa, synthetic construct
GTNDARR

SEQ ID NO: 171442 - protein, 7 aa, synthetic construct
QTNEARR

SEQ ID NO: 171443 - protein, 7 aa, synthetic construct
PTNRAKE

SEQ ID NO: 171444 - protein, 7 aa, synthetic construct
TTNRAHG

SEQ ID NO: 171445 - protein, 7 aa, synthetic construct
ERNKAGQ

SEQ ID NO: 171446 - protein, 7 aa, synthetic construct
VTPRAER

SEQ ID NO: 171447 - protein, 7 aa, synthetic construct
PLDRAGR

SEQ ID NO: 171448 - protein, 7 aa, synthetic construct
EVNKAGR

SEQ ID NO: 171449 - protein, 7 aa, synthetic construct
EMPRAGK

SEQ ID NO: 171450 - protein, 7 aa, synthetic construct
STNRSDR

SEQ ID NO: 171451 - protein, 7 aa, synthetic construct
ERAVAGR

SEQ ID NO: 171452 - protein, 7 aa, synthetic construct
GRNEAGR

SEQ ID NO: 171453 - protein, 7 aa, synthetic construct
ETNRQKV

SEQ ID NO: 171454 - protein, 7 aa, synthetic construct
TTGRADR

SEQ ID NO: 171455 - protein, 7 aa, synthetic construct
PIERAGR

SEQ ID NO: 171456 - protein, 7 aa, synthetic construct
ETKRMGS

SEQ ID NO: 171457 - protein, 7 aa, synthetic construct
VTGRADR

SEQ ID NO: 171458 - protein, 7 aa, synthetic construct
ETNKSMR

SEQ ID NO: 171459 - protein, 7 aa, synthetic construct
EPQRAVR

SEQ ID NO: 171460 - protein, 7 aa, synthetic construct
ETPKPGR

SEQ ID NO: 171461 - protein, 7 aa, synthetic construct
EPNKVGR

SEQ ID NO: 171462 - protein, 7 aa, synthetic construct
KLNRAGE

SEQ ID NO: 171463 - protein, 7 aa, synthetic construct
GTNRAHS

SEQ ID NO: 171464 - protein, 7 aa, synthetic construct
YTGRAER

SEQ ID NO: 171465 - protein, 7 aa, synthetic construct
ETNNPKR

SEQ ID NO: 171466 - protein, 7 aa, synthetic construct
ETNRLKT

SEQ ID NO: 171467 - protein, 7 aa, synthetic construct
ETNRSVK

SEQ ID NO: 171468 - protein, 7 aa, synthetic construct
ETNTVKR

SEQ ID NO: 171469 - protein, 7 aa, synthetic construct
EINMKGR

SEQ ID NO: 171470 - protein, 7 aa, synthetic construct
ELNKASR

SEQ ID NO: 171471 - protein, 7 aa, synthetic construct
ETNPLKR

SEQ ID NO: 171472 - protein, 7 aa, synthetic construct
NTNRAER

SEQ ID NO: 171473 - protein, 7 aa, synthetic construct
DIGRAGR

SEQ ID NO: 171474 - protein, 7 aa, synthetic construct
ETNRKFG

SEQ ID NO: 171475 - protein, 7 aa, synthetic construct
NTERASR

SEQ ID NO: 171476 - protein, 7 aa, synthetic construct
ETKSAIR

SEQ ID NO: 171477 - protein, 7 aa, synthetic construct
ETNQKLR

SEQ ID NO: 171478 - protein, 7 aa, synthetic construct
GTVHAGR

SEQ ID NO: 171479 - protein, 7 aa, synthetic construct
ATDRANR

SEQ ID NO: 171480 - protein, 7 aa, synthetic construct
EPGKAGR

SEQ ID NO: 171481 - protein, 7 aa, synthetic construct
QTMRADR

SEQ ID NO: 171482 - protein, 7 aa, synthetic construct
IANYAGR

SEQ ID NO: 171483 - protein, 7 aa, synthetic construct
EIVRAGK

SEQ ID NO: 171484 - protein, 7 aa, synthetic construct
DTNRVAR

SEQ ID NO: 171485 - protein, 7 aa, synthetic construct
ETNSKSR

SEQ ID NO: 171486 - protein, 7 aa, synthetic construct
YLNRADR

SEQ ID NO: 171487 - protein, 7 aa, synthetic construct
DTNKASR

SEQ ID NO: 171488 - protein, 7 aa, synthetic construct
YVNRADR

SEQ ID NO: 171489 - protein, 7 aa, synthetic construct
ETNSKQR

SEQ ID NO: 171490 - protein, 7 aa, synthetic construct
ETIKIGR

SEQ ID NO: 171491 - protein, 7 aa, synthetic construct
ERNQVGR

SEQ ID NO: 171492 - protein, 7 aa, synthetic construct
DTGRALR

SEQ ID NO: 171493 - protein, 7 aa, synthetic construct
ETNKLGR

SEQ ID NO: 171494 - protein, 7 aa, synthetic construct
ETKRASI

SEQ ID NO: 171495 - protein, 7 aa, synthetic construct
MTNQAHR

SEQ ID NO: 171496 - protein, 7 aa, synthetic construct
EAIKAGR

SEQ ID NO: 171497 - protein, 7 aa, synthetic construct
PVDRAGR

SEQ ID NO: 171498 - protein, 7 aa, synthetic construct
AGNRADR

SEQ ID NO: 171499 - protein, 7 aa, synthetic construct
ETNAKIR

SEQ ID NO: 171500 - protein, 7 aa, synthetic construct
EKMREGR

SEQ ID NO: 171501 - protein, 7 aa, synthetic construct
LTERGGR

SEQ ID NO: 171502 - protein, 7 aa, synthetic construct
EKDRPGR

SEQ ID NO: 171503 - protein, 7 aa, synthetic construct
VDLRAGR

SEQ ID NO: 171504 - protein, 7 aa, synthetic construct
EMNRASK

SEQ ID NO: 171505 - protein, 7 aa, synthetic construct
MTHRAGN

SEQ ID NO: 171506 - protein, 7 aa, synthetic construct
ASNRADR

SEQ ID NO: 171507 - protein, 7 aa, synthetic construct
EVKRAGN

SEQ ID NO: 171508 - protein, 7 aa, synthetic construct
EQKSAGR

SEQ ID NO: 171509 - protein, 7 aa, synthetic construct
EPNKAPR

SEQ ID NO: 171510 - protein, 7 aa, synthetic construct
ENNMAKR

SEQ ID NO: 171511 - protein, 7 aa, synthetic construct
ERNVAGR

SEQ ID NO: 171512 - protein, 7 aa, synthetic construct
ESNLKGR

SEQ ID NO: 171513 - protein, 7 aa, synthetic construct
TVNREGR

SEQ ID NO: 171514 - protein, 7 aa, synthetic construct
EPNRLGR

SEQ ID NO: 171515 - protein, 7 aa, synthetic construct
VTNRLER

SEQ ID NO: 171516 - protein, 7 aa, synthetic construct
QSDRAGR

SEQ ID NO: 171517 - protein, 7 aa, synthetic construct
ATERPGR

SEQ ID NO: 171518 - protein, 7 aa, synthetic construct
EKNRALV

SEQ ID NO: 171519 - protein, 7 aa, synthetic construct
ETQKALR

SEQ ID NO: 171520 - protein, 7 aa, synthetic construct
GLNRAER

SEQ ID NO: 171521 - protein, 7 aa, synthetic construct
ETQRGVR

SEQ ID NO: 171522 - protein, 7 aa, synthetic construct
VTERMGR

SEQ ID NO: 171523 - protein, 7 aa, synthetic construct
VTVRAER

SEQ ID NO: 171524 - protein, 7 aa, synthetic construct
LTERLGR

SEQ ID NO: 171525 - protein, 7 aa, synthetic construct
ETKSPGR

SEQ ID NO: 171526 - protein, 7 aa, synthetic construct
GTMRADR

SEQ ID NO: 171527 - protein, 7 aa, synthetic construct
IDNRALR

SEQ ID NO: 171528 - protein, 7 aa, synthetic construct
ETPRAKA

SEQ ID NO: 171529 - protein, 7 aa, synthetic construct
ETVKAGR

SEQ ID NO: 171530 - protein, 7 aa, synthetic construct
QTNEAKR

SEQ ID NO: 171531 - protein, 7 aa, synthetic construct
EKNSIGR

SEQ ID NO: 171532 - protein, 7 aa, synthetic construct
ETRQVGR

SEQ ID NO: 171533 - protein, 7 aa, synthetic construct
LTNRADR

SEQ ID NO: 171534 - protein, 7 aa, synthetic construct
VENRALR

SEQ ID NO: 171535 - protein, 7 aa, synthetic construct
ETTNAKR

SEQ ID NO: 171536 - protein, 7 aa, synthetic construct
VENRAPR

SEQ ID NO: 171537 - protein, 7 aa, synthetic construct
ETASAKR

SEQ ID NO: 171538 - protein, 7 aa, synthetic construct
ATGRAER

SEQ ID NO: 171539 - protein, 7 aa, synthetic construct
DTNRQGK

SEQ ID NO: 171540 - protein, 7 aa, synthetic construct
ETRPAVR

SEQ ID NO: 171541 - protein, 7 aa, synthetic construct
EQKPAGR

SEQ ID NO: 171542 - protein, 7 aa, synthetic construct
ETRIAGK

SEQ ID NO: 171543 - protein, 7 aa, synthetic construct
VTKRAGE

SEQ ID NO: 171544 - protein, 7 aa, synthetic construct
FTNRASM

SEQ ID NO: 171545 - protein, 7 aa, synthetic construct
QDNRAGK

SEQ ID NO: 171546 - protein, 7 aa, synthetic construct
VENRAAR

SEQ ID NO: 171547 - protein, 7 aa, synthetic construct
MINRADR

SEQ ID NO: 171548 - protein, 7 aa, synthetic construct
PEMRAGR

SEQ ID NO: 171549 - protein, 7 aa, synthetic construct
ETKLAQR

SEQ ID NO: 171550 - protein, 7 aa, synthetic construct
PTDRQGR

SEQ ID NO: 171551 - protein, 7 aa, synthetic construct
EKNTAFR

SEQ ID NO: 171552 - protein, 7 aa, synthetic construct
ETNRAPK

SEQ ID NO: 171553 - protein, 7 aa, synthetic construct
EANKAPR

SEQ ID NO: 171554 - protein, 7 aa, synthetic construct
PENRIGR

SEQ ID NO: 171555 - protein, 7 aa, synthetic construct
LTTRAGQ

SEQ ID NO: 171556 - protein, 7 aa, synthetic construct
DTGRAAR

SEQ ID NO: 171557 - protein, 7 aa, synthetic construct
STHSAGR

SEQ ID NO: 171558 - protein, 7 aa, synthetic construct
DTTRSGR

SEQ ID NO: 171559 - protein, 7 aa, synthetic construct
ETIGKGR

SEQ ID NO: 171560 - protein, 7 aa, synthetic construct
NENRMGR

SEQ ID NO: 171561 - protein, 7 aa, synthetic construct
ENKIAGR

SEQ ID NO: 171562 - protein, 7 aa, synthetic construct
EKPRAGH

SEQ ID NO: 171563 - protein, 7 aa, synthetic construct
EPNRLGK

SEQ ID NO: 171564 - protein, 7 aa, synthetic construct
ETNQSKR

SEQ ID NO: 171565 - protein, 7 aa, synthetic construct
VENRLGR

SEQ ID NO: 171566 - protein, 7 aa, synthetic construct
YTKEAGR

SEQ ID NO: 171567 - protein, 7 aa, synthetic construct
VIDRAGR

SEQ ID NO: 171568 - protein, 7 aa, synthetic construct
TTDRLGR

SEQ ID NO: 171569 - protein, 7 aa, synthetic construct
EKAIAGR

SEQ ID NO: 171570 - protein, 7 aa, synthetic construct
GTVRADR

SEQ ID NO: 171571 - protein, 7 aa, synthetic construct
ETMKALR

SEQ ID NO: 171572 - protein, 7 aa, synthetic construct
ETLNKGR

SEQ ID NO: 171573 - protein, 7 aa, synthetic construct
ERNVAPR

SEQ ID NO: 171574 - protein, 7 aa, synthetic construct
DTNPAKR

SEQ ID NO: 171575 - protein, 7 aa, synthetic construct
HTARAGN

SEQ ID NO: 171576 - protein, 7 aa, synthetic construct
DTNRASK

SEQ ID NO: 171577 - protein, 7 aa, synthetic construct
EINKVGR

SEQ ID NO: 171578 - protein, 7 aa, synthetic construct
DTVRPGR

SEQ ID NO: 171579 - protein, 7 aa, synthetic construct
ETIAAKR

SEQ ID NO: 171580 - protein, 7 aa, synthetic construct
VTNRAER

SEQ ID NO: 171581 - protein, 7 aa, synthetic construct
ATPREGR

SEQ ID NO: 171582 - protein, 7 aa, synthetic construct
YTGVAGR

SEQ ID NO: 171583 - protein, 7 aa, synthetic construct
EINRALK

SEQ ID NO: 171584 - protein, 7 aa, synthetic construct
VADRAGR

SEQ ID NO: 171585 - protein, 7 aa, synthetic construct
ITNRELR

SEQ ID NO: 171586 - protein, 7 aa, synthetic construct
RTNQADR

SEQ ID NO: 171587 - protein, 7 aa, synthetic construct
FTDRANR

SEQ ID NO: 171588 - protein, 7 aa, synthetic construct
DTQRAVR

SEQ ID NO: 171589 - protein, 7 aa, synthetic construct
DMNRASR

SEQ ID NO: 171590 - protein, 7 aa, synthetic construct
ETVPKGR

SEQ ID NO: 171591 - protein, 7 aa, synthetic construct
NDSRAGR

SEQ ID NO: 171592 - protein, 7 aa, synthetic construct
EPNRALK

SEQ ID NO: 171593 - protein, 7 aa, synthetic construct
KTNYDGR

SEQ ID NO: 171594 - protein, 7 aa, synthetic construct
MTPRADR

SEQ ID NO: 171595 - protein, 7 aa, synthetic construct
ETIRGGK

SEQ ID NO: 171596 - protein, 7 aa, synthetic construct
ETKSIGR

SEQ ID NO: 171597 - protein, 7 aa, synthetic construct
ETNVAKR

SEQ ID NO: 171598 - protein, 7 aa, synthetic construct
ENNRAVK

SEQ ID NO: 171599 - protein, 7 aa, synthetic construct
AVDRAGR

SEQ ID NO: 171600 - protein, 7 aa, synthetic construct
ILERAGR

SEQ ID NO: 171601 - protein, 7 aa, synthetic construct
GTNSHGR

SEQ ID NO: 171602 - protein, 7 aa, synthetic construct
EFNQKGR

SEQ ID NO: 171603 - protein, 7 aa, synthetic construct
HTARAGG

SEQ ID NO: 171604 - protein, 7 aa, synthetic construct
DRNRAGL

SEQ ID NO: 171605 - protein, 7 aa, synthetic construct
FTPRADR

SEQ ID NO: 171606 - protein, 7 aa, synthetic construct
VTTRAGH

SEQ ID NO: 171607 - protein, 7 aa, synthetic construct
ITGRADR

SEQ ID NO: 171608 - protein, 7 aa, synthetic construct
GTGHAGR

SEQ ID NO: 171609 - protein, 7 aa, synthetic construct
SENRIGR

SEQ ID NO: 171610 - protein, 7 aa, synthetic construct
YTDRASR

SEQ ID NO: 171611 - protein, 7 aa, synthetic construct
LTDRAQR

SEQ ID NO: 171612 - protein, 7 aa, synthetic construct
DQLRAGR

SEQ ID NO: 171613 - protein, 7 aa, synthetic construct
MENRASR

SEQ ID NO: 171614 - protein, 7 aa, synthetic construct
ETKSQGR

SEQ ID NO: 171615 - protein, 7 aa, synthetic construct
MDTRAGR

SEQ ID NO: 171616 - protein, 7 aa, synthetic construct
ENKGAGR

SEQ ID NO: 171617 - protein, 7 aa, synthetic construct
ESKRAGL

SEQ ID NO: 171618 - protein, 7 aa, synthetic construct
ELNRAMK

SEQ ID NO: 171619 - protein, 7 aa, synthetic construct
YENRAGK

SEQ ID NO: 171620 - protein, 7 aa, synthetic construct
KTNRAEF

SEQ ID NO: 171621 - protein, 7 aa, synthetic construct
PTERAMR

SEQ ID NO: 171622 - protein, 7 aa, synthetic construct
EINQAKR

SEQ ID NO: 171623 - protein, 7 aa, synthetic construct
ESKRAGV

SEQ ID NO: 171624 - protein, 7 aa, synthetic construct
ATDRAQR

SEQ ID NO: 171625 - protein, 7 aa, synthetic construct
VPNYAGR

SEQ ID NO: 171626 - protein, 7 aa, synthetic construct
KTNRALD

SEQ ID NO: 171627 - protein, 7 aa, synthetic construct
QTNREPR

SEQ ID NO: 171628 - protein, 7 aa, synthetic construct
ADNRAAR

SEQ ID NO: 171629 - protein, 7 aa, synthetic construct
DTNRTGK

SEQ ID NO: 171630 - protein, 7 aa, synthetic construct
GTGQAGR

SEQ ID NO: 171631 - protein, 7 aa, synthetic construct
ETNRILK

SEQ ID NO: 171632 - protein, 7 aa, synthetic construct
QTDRVGR

SEQ ID NO: 171633 - protein, 7 aa, synthetic construct
QTERIGR

SEQ ID NO: 171634 - protein, 7 aa, synthetic construct
MSNRAER

SEQ ID NO: 171635 - protein, 7 aa, synthetic construct
EKNRAQL

SEQ ID NO: 171636 - protein, 7 aa, synthetic construct
ETTKSGR

SEQ ID NO: 171637 - protein, 7 aa, synthetic construct
EKQMAGR

SEQ ID NO: 171638 - protein, 7 aa, synthetic construct
PTDRAPR

SEQ ID NO: 171639 - protein, 7 aa, synthetic construct
NAERAGR

SEQ ID NO: 171640 - protein, 7 aa, synthetic construct
ETNQTKR

SEQ ID NO: 171641 - protein, 7 aa, synthetic construct
DQNRPGR

SEQ ID NO: 171642 - protein, 7 aa, synthetic construct
TTNRAHN

SEQ ID NO: 171643 - protein, 7 aa, synthetic construct
ITKRAGE

SEQ ID NO: 171644 - protein, 7 aa, synthetic construct
EINRGNR

SEQ ID NO: 171645 - protein, 7 aa, synthetic construct
LVDRAGR

SEQ ID NO: 171646 - protein, 7 aa, synthetic construct
EFNPAKR

SEQ ID NO: 171647 - protein, 7 aa, synthetic construct
GTERAMR

SEQ ID NO: 171648 - protein, 7 aa, synthetic construct
ETNRKSV

SEQ ID NO: 171649 - protein, 7 aa, synthetic construct
ETVKPGR

SEQ ID NO: 171650 - protein, 7 aa, synthetic construct
ETGTAKR

SEQ ID NO: 171651 - protein, 7 aa, synthetic construct
ETGKLGR

SEQ ID NO: 171652 - protein, 7 aa, synthetic construct
ETQQAKR

SEQ ID NO: 171653 - protein, 7 aa, synthetic construct
ETKRAQI

SEQ ID NO: 171654 - protein, 7 aa, synthetic construct
ETRVSGR

SEQ ID NO: 171655 - protein, 7 aa, synthetic construct
MTDRQGR

SEQ ID NO: 171656 - protein, 7 aa, synthetic construct
EKNRANI

SEQ ID NO: 171657 - protein, 7 aa, synthetic construct
LTNDRGR

SEQ ID NO: 171658 - protein, 7 aa, synthetic construct
DRNAAGR

SEQ ID NO: 171659 - protein, 7 aa, synthetic construct
RTDRAGS

SEQ ID NO: 171660 - protein, 7 aa, synthetic construct
ETNKSTR

SEQ ID NO: 171661 - protein, 7 aa, synthetic construct
VTSRAER

SEQ ID NO: 171662 - protein, 7 aa, synthetic construct
EQNKMGR

SEQ ID NO: 171663 - protein, 7 aa, synthetic construct
ETKPAIR

SEQ ID NO: 171664 - protein, 7 aa, synthetic construct
STHRAGV

SEQ ID NO: 171665 - protein, 7 aa, synthetic construct
ETKRPGL

SEQ ID NO: 171666 - protein, 7 aa, synthetic construct
ETNRTKS

SEQ ID NO: 171667 - protein, 7 aa, synthetic construct
QTNRKGE

SEQ ID NO: 171668 - protein, 7 aa, synthetic construct
EARQAGR

SEQ ID NO: 171669 - protein, 7 aa, synthetic construct
ESNTKGR

SEQ ID NO: 171670 - protein, 7 aa, synthetic construct
STNRHGG

SEQ ID NO: 171671 - protein, 7 aa, synthetic construct
STNREGR

SEQ ID NO: 171672 - protein, 7 aa, synthetic construct
EKVRAER

SEQ ID NO: 171673 - protein, 7 aa, synthetic construct
LTDRANR

SEQ ID NO: 171674 - protein, 7 aa, synthetic construct
EQKVAGR

SEQ ID NO: 171675 - protein, 7 aa, synthetic construct
ETRSAGK

SEQ ID NO: 171676 - protein, 7 aa, synthetic construct
ETNRKGM

SEQ ID NO: 171677 - protein, 7 aa, synthetic construct
TENRAGK

SEQ ID NO: 171678 - protein, 7 aa, synthetic construct
ATTRAGG

SEQ ID NO: 171679 - protein, 7 aa, synthetic construct
TTDRAGR

SEQ ID NO: 171680 - protein, 7 aa, synthetic construct
ETTRAKI

SEQ ID NO: 171681 - protein, 7 aa, synthetic construct
ETPGAKR

SEQ ID NO: 171682 - protein, 7 aa, synthetic construct
ERNAVGR

SEQ ID NO: 171683 - protein, 7 aa, synthetic construct
DTNRPLR

SEQ ID NO: 171684 - protein, 7 aa, synthetic construct
MTVRAER

SEQ ID NO: 171685 - protein, 7 aa, synthetic construct
ETNQGRR

SEQ ID NO: 171686 - protein, 7 aa, synthetic construct
ETNKARG

SEQ ID NO: 171687 - protein, 7 aa, synthetic construct
ITNREIR

SEQ ID NO: 171688 - protein, 7 aa, synthetic construct
ELNRAKM

SEQ ID NO: 171689 - protein, 7 aa, synthetic construct
EKNIASR

SEQ ID NO: 171690 - protein, 7 aa, synthetic construct
ETTRARP

SEQ ID NO: 171691 - protein, 7 aa, synthetic construct
TDNRAIR

SEQ ID NO: 171692 - protein, 7 aa, synthetic construct
PVNRAGG

SEQ ID NO: 171693 - protein, 7 aa, synthetic construct
ETKKAGW

SEQ ID NO: 171694 - protein, 7 aa, synthetic construct
ADNRALR

SEQ ID NO: 171695 - protein, 7 aa, synthetic construct
PTNRQDR

SEQ ID NO: 171696 - protein, 7 aa, synthetic construct
ELNPRGR

SEQ ID NO: 171697 - protein, 7 aa, synthetic construct
VEVRAGR

SEQ ID NO: 171698 - protein, 7 aa, synthetic construct
ETTNRGR

SEQ ID NO: 171699 - protein, 7 aa, synthetic construct
QDNRASR

SEQ ID NO: 171700 - protein, 7 aa, synthetic construct
DVNRALR

SEQ ID NO: 171701 - protein, 7 aa, synthetic construct
ETQRAAK

SEQ ID NO: 171702 - protein, 7 aa, synthetic construct
ETPNRGR

SEQ ID NO: 171703 - protein, 7 aa, synthetic construct
ESNKSGR

SEQ ID NO: 171704 - protein, 7 aa, synthetic construct
DTNRPVR

SEQ ID NO: 171705 - protein, 7 aa, synthetic construct
EMGKAGR

SEQ ID NO: 171706 - protein, 7 aa, synthetic construct
EVRAAGR

SEQ ID NO: 171707 - protein, 7 aa, synthetic construct
ETIRARP

SEQ ID NO: 171708 - protein, 7 aa, synthetic construct
FTAREGR

SEQ ID NO: 171709 - protein, 7 aa, synthetic construct
EQNKANR

SEQ ID NO: 171710 - protein, 7 aa, synthetic construct
ETNAKMR

SEQ ID NO: 171711 - protein, 7 aa, synthetic construct
EMRVAGR

SEQ ID NO: 171712 - protein, 7 aa, synthetic construct
EMKRAGS

SEQ ID NO: 171713 - protein, 7 aa, synthetic construct
MKNRAGD

SEQ ID NO: 171714 - protein, 7 aa, synthetic construct
ETARTGR

SEQ ID NO: 171715 - protein, 7 aa, synthetic construct
LTDRAAR

SEQ ID NO: 171716 - protein, 7 aa, synthetic construct
QTPRAGG

SEQ ID NO: 171717 - protein, 7 aa, synthetic construct
TENRAIR

SEQ ID NO: 171718 - protein, 7 aa, synthetic construct
ATERMGR

SEQ ID NO: 171719 - protein, 7 aa, synthetic construct
ETMRPGK

SEQ ID NO: 171720 - protein, 7 aa, synthetic construct
VSNRAGG

SEQ ID NO: 171721 - protein, 7 aa, synthetic construct
KSNRAGD

SEQ ID NO: 171722 - protein, 7 aa, synthetic construct
MTPRAGG

SEQ ID NO: 171723 - protein, 7 aa, synthetic construct
ETNSVKR

SEQ ID NO: 171724 - protein, 7 aa, synthetic construct
EPVRTGR

SEQ ID NO: 171725 - protein, 7 aa, synthetic construct
DGTRAGR

SEQ ID NO: 171726 - protein, 7 aa, synthetic construct
ESNMKGR

SEQ ID NO: 171727 - protein, 7 aa, synthetic construct
ENVKAGR

SEQ ID NO: 171728 - protein, 7 aa, synthetic construct
PKNRAGE

SEQ ID NO: 171729 - protein, 7 aa, synthetic construct
DTNRAIR

SEQ ID NO: 171730 - protein, 7 aa, synthetic construct
DTNRVGK

SEQ ID NO: 171731 - protein, 7 aa, synthetic construct
ENKRAGI

SEQ ID NO: 171732 - protein, 7 aa, synthetic construct
ETKIVGR

SEQ ID NO: 171733 - protein, 7 aa, synthetic construct
ETQRAKM

SEQ ID NO: 171734 - protein, 7 aa, synthetic construct
ELPRAGK

SEQ ID NO: 171735 - protein, 7 aa, synthetic construct
ETNARGR

SEQ ID NO: 171736 - protein, 7 aa, synthetic construct
ERNTVGR

SEQ ID NO: 171737 - protein, 7 aa, synthetic construct
EIPKAGR

SEQ ID NO: 171738 - protein, 7 aa, synthetic construct
EVTKAGR

SEQ ID NO: 171739 - protein, 7 aa, synthetic construct
LTHRAGN

SEQ ID NO: 171740 - protein, 7 aa, synthetic construct
YTNRPDR

SEQ ID NO: 171741 - protein, 7 aa, synthetic construct
ETVRAGK

SEQ ID NO: 171742 - protein, 7 aa, synthetic construct
ETVQRGR

SEQ ID NO: 171743 - protein, 7 aa, synthetic construct
YTNRADK

SEQ ID NO: 171744 - protein, 7 aa, synthetic construct
EKNVAPR

SEQ ID NO: 171745 - protein, 7 aa, synthetic construct
QTDRAAR

SEQ ID NO: 171746 - protein, 7 aa, synthetic construct
GDNRVGR

SEQ ID NO: 171747 - protein, 7 aa, synthetic construct
ELNRAGK

SEQ ID NO: 171748 - protein, 7 aa, synthetic construct
EKSRAGV

SEQ ID NO: 171749 - protein, 7 aa, synthetic construct
EVAKAGR

SEQ ID NO: 171750 - protein, 7 aa, synthetic construct
ELNRAGR

SEQ ID NO: 171751 - protein, 7 aa, synthetic construct
ETKISGR

SEQ ID NO: 171752 - protein, 7 aa, synthetic construct
ETNTKSR

SEQ ID NO: 171753 - protein, 7 aa, synthetic construct
DITRAGR

SEQ ID NO: 171754 - protein, 7 aa, synthetic construct
VTERAQR

SEQ ID NO: 171755 - protein, 7 aa, synthetic construct
PENRQGR

SEQ ID NO: 171756 - protein, 7 aa, synthetic construct
ETKKDGR

SEQ ID NO: 171757 - protein, 7 aa, synthetic construct
ITNRARE

SEQ ID NO: 171758 - protein, 7 aa, synthetic construct
EKNLAQR

SEQ ID NO: 171759 - protein, 7 aa, synthetic construct
GPDRAGR

SEQ ID NO: 171760 - protein, 7 aa, synthetic construct
ETTSKGR

SEQ ID NO: 171761 - protein, 7 aa, synthetic construct
DANRVGR

SEQ ID NO: 171762 - protein, 7 aa, synthetic construct
ETNRVLK

SEQ ID NO: 171763 - protein, 7 aa, synthetic construct
HPNRAGQ

SEQ ID NO: 171764 - protein, 7 aa, synthetic construct
EKNREGR

SEQ ID NO: 171765 - protein, 7 aa, synthetic construct
QTERQGR

SEQ ID NO: 171766 - protein, 7 aa, synthetic construct
ETNKVIR

SEQ ID NO: 171767 - protein, 7 aa, synthetic construct
TLERAGR

SEQ ID NO: 171768 - protein, 7 aa, synthetic construct
ITNRASN

SEQ ID NO: 171769 - protein, 7 aa, synthetic construct
EANKPGR

SEQ ID NO: 171770 - protein, 7 aa, synthetic construct
QEARAGR

SEQ ID NO: 171771 - protein, 7 aa, synthetic construct
ATERGGR

SEQ ID NO: 171772 - protein, 7 aa, synthetic construct
ERPIAGR

SEQ ID NO: 171773 - protein, 7 aa, synthetic construct
MTERATR

SEQ ID NO: 171774 - protein, 7 aa, synthetic construct
DTPRTGR

SEQ ID NO: 171775 - protein, 7 aa, synthetic construct
DGNRAGK

SEQ ID NO: 171776 - protein, 7 aa, synthetic construct
EKNSQGR

SEQ ID NO: 171777 - protein, 7 aa, synthetic construct
TTAREGR

SEQ ID NO: 171778 - protein, 7 aa, synthetic construct
QDNRVGR

SEQ ID NO: 171779 - protein, 7 aa, synthetic construct
QTVREGR

SEQ ID NO: 171780 - protein, 7 aa, synthetic construct
ETTLKGR

SEQ ID NO: 171781 - protein, 7 aa, synthetic construct
TTDRANR

SEQ ID NO: 171782 - protein, 7 aa, synthetic construct
HTPGAGR

SEQ ID NO: 171783 - protein, 7 aa, synthetic construct
EPRVAGR

SEQ ID NO: 171784 - protein, 7 aa, synthetic construct
TTPREGR

SEQ ID NO: 171785 - protein, 7 aa, synthetic construct
ETNRKMG

SEQ ID NO: 171786 - protein, 7 aa, synthetic construct
ITNRESR

SEQ ID NO: 171787 - protein, 7 aa, synthetic construct
EPMRAGK

SEQ ID NO: 171788 - protein, 7 aa, synthetic construct
PTVRAER

SEQ ID NO: 171789 - protein, 7 aa, synthetic construct
RTNSEGR

SEQ ID NO: 171790 - protein, 7 aa, synthetic construct
EMQKAGR

SEQ ID NO: 171791 - protein, 7 aa, synthetic construct
ETNVNKR

SEQ ID NO: 171792 - protein, 7 aa, synthetic construct
EPARAGR

SEQ ID NO: 171793 - protein, 7 aa, synthetic construct
ETAKATR

SEQ ID NO: 171794 - protein, 7 aa, synthetic construct
EKNIAMR

SEQ ID NO: 171795 - protein, 7 aa, synthetic construct
VPNRAER

SEQ ID NO: 171796 - protein, 7 aa, synthetic construct
TANREGR

SEQ ID NO: 171797 - protein, 7 aa, synthetic construct
ETNKQSR

SEQ ID NO: 171798 - protein, 7 aa, synthetic construct
ENIKAGR

SEQ ID NO: 171799 - protein, 7 aa, synthetic construct
ETKRGGA

SEQ ID NO: 171800 - protein, 7 aa, synthetic construct
EKPRAGT

SEQ ID NO: 171801 - protein, 7 aa, synthetic construct
LTHNAGR

SEQ ID NO: 171802 - protein, 7 aa, synthetic construct
EPARIGR

SEQ ID NO: 171803 - protein, 7 aa, synthetic construct
SLNRADR

SEQ ID NO: 171804 - protein, 7 aa, synthetic construct
ETKQAPR

SEQ ID NO: 171805 - protein, 7 aa, synthetic construct
EINIKGR

SEQ ID NO: 171806 - protein, 7 aa, synthetic construct
ETKRMGF

SEQ ID NO: 171807 - protein, 7 aa, synthetic construct
ETLRAKP

SEQ ID NO: 171808 - protein, 7 aa, synthetic construct
ETPKAGR

SEQ ID NO: 171809 - protein, 7 aa, synthetic construct
RTNIDGR

SEQ ID NO: 171810 - protein, 7 aa, synthetic construct
ENARAVR

SEQ ID NO: 171811 - protein, 7 aa, synthetic construct
PTSRAER

SEQ ID NO: 171812 - protein, 7 aa, synthetic construct
ADNRAPR

SEQ ID NO: 171813 - protein, 7 aa, synthetic construct
ERNASGR

SEQ ID NO: 171814 - protein, 7 aa, synthetic construct
ETNINKR

SEQ ID NO: 171815 - protein, 7 aa, synthetic construct
EKNKADR

SEQ ID NO: 171816 - protein, 7 aa, synthetic construct
FTTRAGG

SEQ ID NO: 171817 - protein, 7 aa, synthetic construct
VDNRVGR

SEQ ID NO: 171818 - protein, 7 aa, synthetic construct
ENNKAQR

SEQ ID NO: 171819 - protein, 7 aa, synthetic construct
LTNQAHR

SEQ ID NO: 171820 - protein, 7 aa, synthetic construct
ELNKGGR

SEQ ID NO: 171821 - protein, 7 aa, synthetic construct
FTNAAHR

SEQ ID NO: 171822 - protein, 7 aa, synthetic construct
ETRPVGR

SEQ ID NO: 171823 - protein, 7 aa, synthetic construct
EAQRVGR

SEQ ID NO: 171824 - protein, 7 aa, synthetic construct
DKNYAGR

SEQ ID NO: 171825 - protein, 7 aa, synthetic construct
ETMKTGR

SEQ ID NO: 171826 - protein, 7 aa, synthetic construct
ETNRAVR

SEQ ID NO: 171827 - protein, 7 aa, synthetic construct
EPNKAQR

SEQ ID NO: 171828 - protein, 7 aa, synthetic construct
ETNKPSR

SEQ ID NO: 171829 - protein, 7 aa, synthetic construct
PTNRADR

SEQ ID NO: 171830 - protein, 7 aa, synthetic construct
MTNRIER

SEQ ID NO: 171831 - protein, 7 aa, synthetic construct
DTNHKGR

SEQ ID NO: 171832 - protein, 7 aa, synthetic construct
RTHDAGR

SEQ ID NO: 171833 - protein, 7 aa, synthetic construct
MTNRMER

SEQ ID NO: 171834 - protein, 7 aa, synthetic construct
ELKMAGR

SEQ ID NO: 171835 - protein, 7 aa, synthetic construct
ETNNAKK

SEQ ID NO: 171836 - protein, 7 aa, synthetic construct
ETAKANR

SEQ ID NO: 171837 - protein, 7 aa, synthetic construct
LTNREMR

SEQ ID NO: 171838 - protein, 7 aa, synthetic construct
METRAGR

SEQ ID NO: 171839 - protein, 7 aa, synthetic construct
DTGRVGR

SEQ ID NO: 171840 - protein, 7 aa, synthetic construct
PTERMGR

SEQ ID NO: 171841 - protein, 7 aa, synthetic construct
EVKRAGQ

SEQ ID NO: 171842 - protein, 7 aa, synthetic construct
LEARAGR

SEQ ID NO: 171843 - protein, 7 aa, synthetic construct
TTGHAGR

SEQ ID NO: 171844 - protein, 7 aa, synthetic construct
VTERANR

SEQ ID NO: 171845 - protein, 7 aa, synthetic construct
NTDRAGK

SEQ ID NO: 171846 - protein, 7 aa, synthetic construct
ETKRAMS

SEQ ID NO: 171847 - protein, 7 aa, synthetic construct
FTNNASR

SEQ ID NO: 171848 - protein, 7 aa, synthetic construct
EQKRAGF

SEQ ID NO: 171849 - protein, 7 aa, synthetic construct
DTNNRGR

SEQ ID NO: 171850 - protein, 7 aa, synthetic construct
DSNKAGR

SEQ ID NO: 171851 - protein, 7 aa, synthetic construct
RTSEAGR

SEQ ID NO: 171852 - protein, 7 aa, synthetic construct
ETQRAKT

SEQ ID NO: 171853 - protein, 7 aa, synthetic construct
ITNYAGK

SEQ ID NO: 171854 - protein, 7 aa, synthetic construct
MTQRADR

SEQ ID NO: 171855 - protein, 7 aa, synthetic construct
TTMRADR

SEQ ID NO: 171856 - protein, 7 aa, synthetic construct
ETKRGGS

SEQ ID NO: 171857 - protein, 7 aa, synthetic construct
ETNRIKG

SEQ ID NO: 171858 - protein, 7 aa, synthetic construct
EPKYAGR

SEQ ID NO: 171859 - protein, 7 aa, synthetic construct
QTERAGR

SEQ ID NO: 171860 - protein, 7 aa, synthetic construct
VQERAGR

SEQ ID NO: 171861 - protein, 7 aa, synthetic construct
ETKRAGY

SEQ ID NO: 171862 - protein, 7 aa, synthetic construct
DTPRAMR

SEQ ID NO: 171863 - protein, 7 aa, synthetic construct
IVNRADR

SEQ ID NO: 171864 - protein, 7 aa, synthetic construct
STERPGR

SEQ ID NO: 171865 - protein, 7 aa, synthetic construct
EMNRAQK

SEQ ID NO: 171866 - protein, 7 aa, synthetic construct
VENRVGR

SEQ ID NO: 171867 - protein, 7 aa, synthetic construct
EINRAKG

SEQ ID NO: 171868 - protein, 7 aa, synthetic construct
ETNKARQ

SEQ ID NO: 171869 - protein, 7 aa, synthetic construct
ETNKPIR

SEQ ID NO: 171870 - protein, 7 aa, synthetic construct
ERNPAQR

SEQ ID NO: 171871 - protein, 7 aa, synthetic construct
ATERAVR

SEQ ID NO: 171872 - protein, 7 aa, synthetic construct
DTSRAGR

SEQ ID NO: 171873 - protein, 7 aa, synthetic construct
ETKAAPR

SEQ ID NO: 171874 - protein, 7 aa, synthetic construct
YVNREGR

SEQ ID NO: 171875 - protein, 7 aa, synthetic construct
KTNRAET

SEQ ID NO: 171876 - protein, 7 aa, synthetic construct
ITNRAHS

SEQ ID NO: 171877 - protein, 7 aa, synthetic construct
EPNRKGF

SEQ ID NO: 171878 - protein, 7 aa, synthetic construct
STNRETR

SEQ ID NO: 171879 - protein, 7 aa, synthetic construct
NTVRADR

SEQ ID NO: 171880 - protein, 7 aa, synthetic construct
EINKAMR

SEQ ID NO: 171881 - protein, 7 aa, synthetic construct
ETKRAMI

SEQ ID NO: 171882 - protein, 7 aa, synthetic construct
KTEREGR

SEQ ID NO: 171883 - protein, 7 aa, synthetic construct
YTNDAKR

SEQ ID NO: 171884 - protein, 7 aa, synthetic construct
VTGRAER

SEQ ID NO: 171885 - protein, 7 aa, synthetic construct
FTNNALR

SEQ ID NO: 171886 - protein, 7 aa, synthetic construct
VTDRVGR

SEQ ID NO: 171887 - protein, 7 aa, synthetic construct
ETNKQQR

SEQ ID NO: 171888 - protein, 7 aa, synthetic construct
LPNYAGR

SEQ ID NO: 171889 - protein, 7 aa, synthetic construct
ETQTAKR

SEQ ID NO: 171890 - protein, 7 aa, synthetic construct
YTTRAER

SEQ ID NO: 171891 - protein, 7 aa, synthetic construct
LTSRAER

SEQ ID NO: 171892 - protein, 7 aa, synthetic construct
ETMRAKS

SEQ ID NO: 171893 - protein, 7 aa, synthetic construct
EKNRAMA

SEQ ID NO: 171894 - protein, 7 aa, synthetic construct
QTGRADR

SEQ ID NO: 171895 - protein, 7 aa, synthetic construct
YTNRVDR

SEQ ID NO: 171896 - protein, 7 aa, synthetic construct
RTNRIGE

SEQ ID NO: 171897 - protein, 7 aa, synthetic construct
EANRLGK

SEQ ID NO: 171898 - protein, 7 aa, synthetic construct
IMNRAER

SEQ ID NO: 171899 - protein, 7 aa, synthetic construct
ETNRALK

SEQ ID NO: 171900 - protein, 7 aa, synthetic construct
ETPKVGR

SEQ ID NO: 171901 - protein, 7 aa, synthetic construct
DMTRAGR

SEQ ID NO: 171902 - protein, 7 aa, synthetic construct
ETNKPGR

SEQ ID NO: 171903 - protein, 7 aa, synthetic construct
DTPRAGK

SEQ ID NO: 171904 - protein, 7 aa, synthetic construct
ETPNAKR

SEQ ID NO: 171905 - protein, 7 aa, synthetic construct
IVDRAGR

SEQ ID NO: 171906 - protein, 7 aa, synthetic construct
DANRAGK

SEQ ID NO: 171907 - protein, 7 aa, synthetic construct
ADTRAGR

SEQ ID NO: 171908 - protein, 7 aa, synthetic construct
ELNNRGR

SEQ ID NO: 171909 - protein, 7 aa, synthetic construct
ETNRTRV

SEQ ID NO: 171910 - protein, 7 aa, synthetic construct
VSNRADR

SEQ ID NO: 171911 - protein, 7 aa, synthetic construct
DPSRAGR

SEQ ID NO: 171912 - protein, 7 aa, synthetic construct
VTNREGR

SEQ ID NO: 171913 - protein, 7 aa, synthetic construct
ETKRAAG

SEQ ID NO: 171914 - protein, 7 aa, synthetic construct
ETARSGK

SEQ ID NO: 171915 - protein, 7 aa, synthetic construct
ETKIAIR

SEQ ID NO: 171916 - protein, 7 aa, synthetic construct
SDNRALR

SEQ ID NO: 171917 - protein, 7 aa, synthetic construct
EIKRAGQ

SEQ ID NO: 171918 - protein, 7 aa, synthetic construct
LTNRNDR

SEQ ID NO: 171919 - protein, 7 aa, synthetic construct
ETNRVTK

SEQ ID NO: 171920 - protein, 7 aa, synthetic construct
ETKAIGR

SEQ ID NO: 171921 - protein, 7 aa, synthetic construct
MTNRDAR

SEQ ID NO: 171922 - protein, 7 aa, synthetic construct
EQKRAGS

SEQ ID NO: 171923 - protein, 7 aa, synthetic construct
TENRATR

SEQ ID NO: 171924 - protein, 7 aa, synthetic construct
ETNKNQR

SEQ ID NO: 171925 - protein, 7 aa, synthetic construct
SSNREGR

SEQ ID NO: 171926 - protein, 7 aa, synthetic construct
ETNRNKA

SEQ ID NO: 171927 - protein, 7 aa, synthetic construct
ETVRLGK

SEQ ID NO: 171928 - protein, 7 aa, synthetic construct
EPSRAGK

SEQ ID NO: 171929 - protein, 7 aa, synthetic construct
EAKRAGL

SEQ ID NO: 171930 - protein, 7 aa, synthetic construct
PEQRAGR

SEQ ID NO: 171931 - protein, 7 aa, synthetic construct
ETKRAPV

SEQ ID NO: 171932 - protein, 7 aa, synthetic construct
ETNTKLR

SEQ ID NO: 171933 - protein, 7 aa, synthetic construct
ETNGPKR

SEQ ID NO: 171934 - protein, 7 aa, synthetic construct
ETSKTGR

SEQ ID NO: 171935 - protein, 7 aa, synthetic construct
AVERAGR

SEQ ID NO: 171936 - protein, 7 aa, synthetic construct
ETRPAMR

SEQ ID NO: 171937 - protein, 7 aa, synthetic construct
RTNADGR

SEQ ID NO: 171938 - protein, 7 aa, synthetic construct
YTNPAHR

SEQ ID NO: 171939 - protein, 7 aa, synthetic construct
DNNRAGK

SEQ ID NO: 171940 - protein, 7 aa, synthetic construct
ETTRAGK

SEQ ID NO: 171941 - protein, 7 aa, synthetic construct
ATDRPGR

SEQ ID NO: 171942 - protein, 7 aa, synthetic construct
ETIAKGR

SEQ ID NO: 171943 - protein, 7 aa, synthetic construct
IENRVGR

SEQ ID NO: 171944 - protein, 7 aa, synthetic construct
ETNKTMR

SEQ ID NO: 171945 - protein, 7 aa, synthetic construct
EINPRGR

SEQ ID NO: 171946 - protein, 7 aa, synthetic construct
HTVRAGN

SEQ ID NO: 171947 - protein, 7 aa, synthetic construct
HTNNPGR

SEQ ID NO: 171948 - protein, 7 aa, synthetic construct
ETRKAGN

SEQ ID NO: 171949 - protein, 7 aa, synthetic construct
EKQTAGR

SEQ ID NO: 171950 - protein, 7 aa, synthetic construct
LNNRADR

SEQ ID NO: 171951 - protein, 7 aa, synthetic construct
EMNIKGR

SEQ ID NO: 171952 - protein, 7 aa, synthetic construct
ETNKVAR

SEQ ID NO: 171953 - protein, 7 aa, synthetic construct
ATDRAPR

SEQ ID NO: 171954 - protein, 7 aa, synthetic construct
LTERAPR

SEQ ID NO: 171955 - protein, 7 aa, synthetic construct
ETKNAFR

SEQ ID NO: 171956 - protein, 7 aa, synthetic construct
QTGRAER

SEQ ID NO: 171957 - protein, 7 aa, synthetic construct
DANRIGR

SEQ ID NO: 171958 - protein, 7 aa, synthetic construct
ETNRKSA

SEQ ID NO: 171959 - protein, 7 aa, synthetic construct
ITNREVR

SEQ ID NO: 171960 - protein, 7 aa, synthetic construct
EAKRAGN

SEQ ID NO: 171961 - protein, 7 aa, synthetic construct
ATNRDLR

SEQ ID NO: 171962 - protein, 7 aa, synthetic construct
GTNRTER

SEQ ID NO: 171963 - protein, 7 aa, synthetic construct
VDNRAGR

SEQ ID NO: 171964 - protein, 7 aa, synthetic construct
EQPRAGK

SEQ ID NO: 171965 - protein, 7 aa, synthetic construct
ETSIKGR

SEQ ID NO: 171966 - protein, 7 aa, synthetic construct
MTNRLER

SEQ ID NO: 171967 - protein, 7 aa, synthetic construct
EANRAKA

SEQ ID NO: 171968 - protein, 7 aa, synthetic construct
ESQKAGR

SEQ ID NO: 171969 - protein, 7 aa, synthetic construct
ENNKAMR

SEQ ID NO: 171970 - protein, 7 aa, synthetic construct
ETIGAKR

SEQ ID NO: 171971 - protein, 7 aa, synthetic construct
ERNRVGG

SEQ ID NO: 171972 - protein, 7 aa, synthetic construct
MQNRADR

SEQ ID NO: 171973 - protein, 7 aa, synthetic construct
GDIRAGR

SEQ ID NO: 171974 - protein, 7 aa, synthetic construct
ETNTRGR

SEQ ID NO: 171975 - protein, 7 aa, synthetic construct
EGNTKGR

SEQ ID NO: 171976 - protein, 7 aa, synthetic construct
ELNRGNR

SEQ ID NO: 171977 - protein, 7 aa, synthetic construct
ITNRLDR

SEQ ID NO: 171978 - protein, 7 aa, synthetic construct
EPNQRGR

SEQ ID NO: 171979 - protein, 7 aa, synthetic construct
ETKRLGY

SEQ ID NO: 171980 - protein, 7 aa, synthetic construct
ETKRAFP

SEQ ID NO: 171981 - protein, 7 aa, synthetic construct
EKQRAGN

SEQ ID NO: 171982 - protein, 7 aa, synthetic construct
QTNREGR

SEQ ID NO: 171983 - protein, 7 aa, synthetic construct
GTDRAGR

SEQ ID NO: 171984 - protein, 7 aa, synthetic construct
QTNREIR

SEQ ID NO: 171985 - protein, 7 aa, synthetic construct
KTNDHGR

SEQ ID NO: 171986 - protein, 7 aa, synthetic construct
YTNRELR

SEQ ID NO: 171987 - protein, 7 aa, synthetic construct
ETARALK

SEQ ID NO: 171988 - protein, 7 aa, synthetic construct
ENNRSGK

SEQ ID NO: 171989 - protein, 7 aa, synthetic construct
QLNRADR

SEQ ID NO: 171990 - protein, 7 aa, synthetic construct
DTIRAGK

SEQ ID NO: 171991 - protein, 7 aa, synthetic construct
ENNKLGR

SEQ ID NO: 171992 - protein, 7 aa, synthetic construct
ETIRAKG

SEQ ID NO: 171993 - protein, 7 aa, synthetic construct
MTSRAER

SEQ ID NO: 171994 - protein, 7 aa, synthetic construct
EITKAGR

SEQ ID NO: 171995 - protein, 7 aa, synthetic construct
EPNAAKR

SEQ ID NO: 171996 - protein, 7 aa, synthetic construct
FTKDAGR

SEQ ID NO: 171997 - protein, 7 aa, synthetic construct
ETGKMGR

SEQ ID NO: 171998 - protein, 7 aa, synthetic construct
VTTRAGQ

SEQ ID NO: 171999 - protein, 7 aa, synthetic construct
MPDRAGR

SEQ ID NO: 172000 - protein, 7 aa, synthetic construct
PTERAGK

SEQ ID NO: 172001 - protein, 7 aa, synthetic construct
EQSKAGR

SEQ ID NO: 172002 - protein, 7 aa, synthetic construct
EKNQAAR

SEQ ID NO: 172003 - protein, 7 aa, synthetic construct
STERIGR

SEQ ID NO: 172004 - protein, 7 aa, synthetic construct
EKNRTGY

SEQ ID NO: 172005 - protein, 7 aa, synthetic construct
HTNNAAR

SEQ ID NO: 172006 - protein, 7 aa, synthetic construct
PTERPGR

SEQ ID NO: 172007 - protein, 7 aa, synthetic construct
NDNKAGR

SEQ ID NO: 172008 - protein, 7 aa, synthetic construct
DANRAGR

SEQ ID NO: 172009 - protein, 7 aa, synthetic construct
MTARAER

SEQ ID NO: 172010 - protein, 7 aa, synthetic construct
PTEKAGR

SEQ ID NO: 172011 - protein, 7 aa, synthetic construct
DINRAAR

SEQ ID NO: 172012 - protein, 7 aa, synthetic construct
ENNRAGK

SEQ ID NO: 172013 - protein, 7 aa, synthetic construct
EPNRAAK

SEQ ID NO: 172014 - protein, 7 aa, synthetic construct
EINKASR

SEQ ID NO: 172015 - protein, 7 aa, synthetic construct
ATERAMR

SEQ ID NO: 172016 - protein, 7 aa, synthetic construct
ETNRGRV

SEQ ID NO: 172017 - protein, 7 aa, synthetic construct
KTSRAGE

SEQ ID NO: 172018 - protein, 7 aa, synthetic construct
EGKLAGR

SEQ ID NO: 172019 - protein, 7 aa, synthetic construct
ETKRAFS

SEQ ID NO: 172020 - protein, 7 aa, synthetic construct
ATTRADR

SEQ ID NO: 172021 - protein, 7 aa, synthetic construct
EANKAGR

SEQ ID NO: 172022 - protein, 7 aa, synthetic construct
ETGKVGR

SEQ ID NO: 172023 - protein, 7 aa, synthetic construct
ENNRKGT

SEQ ID NO: 172024 - protein, 7 aa, synthetic construct
ETQRATK

SEQ ID NO: 172025 - protein, 7 aa, synthetic construct
ISNREGR

SEQ ID NO: 172026 - protein, 7 aa, synthetic construct
ERNKAGI

SEQ ID NO: 172027 - protein, 7 aa, synthetic construct
DTGRTGR

SEQ ID NO: 172028 - protein, 7 aa, synthetic construct
ETKRAMM

SEQ ID NO: 172029 - protein, 7 aa, synthetic construct
EKNTANR

SEQ ID NO: 172030 - protein, 7 aa, synthetic construct
ETNLGKR

SEQ ID NO: 172031 - protein, 7 aa, synthetic construct
VTNRASQ

SEQ ID NO: 172032 - protein, 7 aa, synthetic construct
ERNTQGR

SEQ ID NO: 172033 - protein, 7 aa, synthetic construct
KTARAGD

SEQ ID NO: 172034 - protein, 7 aa, synthetic construct
ETTQKGR

SEQ ID NO: 172035 - protein, 7 aa, synthetic construct
EFNKVGR

SEQ ID NO: 172036 - protein, 7 aa, synthetic construct
QTDRAPR

SEQ ID NO: 172037 - protein, 7 aa, synthetic construct
ITNRADK

SEQ ID NO: 172038 - protein, 7 aa, synthetic construct
EANKAVR

SEQ ID NO: 172039 - protein, 7 aa, synthetic construct
ETNRQRV

SEQ ID NO: 172040 - protein, 7 aa, synthetic construct
EAARVGR

SEQ ID NO: 172041 - protein, 7 aa, synthetic construct
EQNKALR

SEQ ID NO: 172042 - protein, 7 aa, synthetic construct
NTIRADR

SEQ ID NO: 172043 - protein, 7 aa, synthetic construct
DQNRAIR

SEQ ID NO: 172044 - protein, 7 aa, synthetic construct
TDIRAGR

SEQ ID NO: 172045 - protein, 7 aa, synthetic construct
TTERAMR

SEQ ID NO: 172046 - protein, 7 aa, synthetic construct
ETKQANR

SEQ ID NO: 172047 - protein, 7 aa, synthetic construct
EKPRAGN

SEQ ID NO: 172048 - protein, 7 aa, synthetic construct
ENKPAGR

SEQ ID NO: 172049 - protein, 7 aa, synthetic construct
KTNRADI

SEQ ID NO: 172050 - protein, 7 aa, synthetic construct
ETNKTAR

SEQ ID NO: 172051 - protein, 7 aa, synthetic construct
DQVRAGR

SEQ ID NO: 172052 - protein, 7 aa, synthetic construct
ETTKVGR

SEQ ID NO: 172053 - protein, 7 aa, synthetic construct
ETITKGR

SEQ ID NO: 172054 - protein, 7 aa, synthetic construct
ATVREGR

SEQ ID NO: 172055 - protein, 7 aa, synthetic construct
NTNRADK

SEQ ID NO: 172056 - protein, 7 aa, synthetic construct
EPNIKGR

SEQ ID NO: 172057 - protein, 7 aa, synthetic construct
EVPRANR

SEQ ID NO: 172058 - protein, 7 aa, synthetic construct
MENRAGK

SEQ ID NO: 172059 - protein, 7 aa, synthetic construct
GENRVGR

SEQ ID NO: 172060 - protein, 7 aa, synthetic construct
TTNRADR

SEQ ID NO: 172061 - protein, 7 aa, synthetic construct
EANRALK

SEQ ID NO: 172062 - protein, 7 aa, synthetic construct
LENRASR

SEQ ID NO: 172063 - protein, 7 aa, synthetic construct
GTNRNDR

SEQ ID NO: 172064 - protein, 7 aa, synthetic construct
QTNRGDR

SEQ ID NO: 172065 - protein, 7 aa, synthetic construct
ATERLGR

SEQ ID NO: 172066 - protein, 7 aa, synthetic construct
ETKRAAI

SEQ ID NO: 172067 - protein, 7 aa, synthetic construct
FTNKAER

SEQ ID NO: 172068 - protein, 7 aa, synthetic construct
ETNKYGK

SEQ ID NO: 172069 - protein, 7 aa, synthetic construct
MENRAVR

SEQ ID NO: 172070 - protein, 7 aa, synthetic construct
KMNRAGE

SEQ ID NO: 172071 - protein, 7 aa, synthetic construct
EMPRAVR

SEQ ID NO: 172072 - protein, 7 aa, synthetic construct
QTDRAQR

SEQ ID NO: 172073 - protein, 7 aa, synthetic construct
RANEAGR

SEQ ID NO: 172074 - protein, 7 aa, synthetic construct
VTNRAHA

SEQ ID NO: 172075 - protein, 7 aa, synthetic construct
VVNRADR

SEQ ID NO: 172076 - protein, 7 aa, synthetic construct
GDNRAAR

SEQ ID NO: 172077 - protein, 7 aa, synthetic construct
EINNARR

SEQ ID NO: 172078 - protein, 7 aa, synthetic construct
FANRADR

SEQ ID NO: 172079 - protein, 7 aa, synthetic construct
ITNERGR

SEQ ID NO: 172080 - protein, 7 aa, synthetic construct
ETIKAQR

SEQ ID NO: 172081 - protein, 7 aa, synthetic construct
ETNKSSR

SEQ ID NO: 172082 - protein, 7 aa, synthetic construct
EGKMAGR

SEQ ID NO: 172083 - protein, 7 aa, synthetic construct
TQNREGR

SEQ ID NO: 172084 - protein, 7 aa, synthetic construct
EANRQGK

SEQ ID NO: 172085 - protein, 7 aa, synthetic construct
ADPRAGR

SEQ ID NO: 172086 - protein, 7 aa, synthetic construct
FTNRAKD

SEQ ID NO: 172087 - protein, 7 aa, synthetic construct
ENKRAGY

SEQ ID NO: 172088 - protein, 7 aa, synthetic construct
TTNRHGN

SEQ ID NO: 172089 - protein, 7 aa, synthetic construct
KTFDAGR

SEQ ID NO: 172090 - protein, 7 aa, synthetic construct
HTTRAGQ

SEQ ID NO: 172091 - protein, 7 aa, synthetic construct
FTNRASQ

SEQ ID NO: 172092 - protein, 7 aa, synthetic construct
ETNKAAK

SEQ ID NO: 172093 - protein, 7 aa, synthetic construct
EKNLAAR

SEQ ID NO: 172094 - protein, 7 aa, synthetic construct
ITERPGR

SEQ ID NO: 172095 - protein, 7 aa, synthetic construct
ETNRTGK

SEQ ID NO: 172096 - protein, 7 aa, synthetic construct
EKNNAQR

SEQ ID NO: 172097 - protein, 7 aa, synthetic construct
ELNMKGR

SEQ ID NO: 172098 - protein, 7 aa, synthetic construct
DVNRAVR

SEQ ID NO: 172099 - protein, 7 aa, synthetic construct
ETPRAKL

SEQ ID NO: 172100 - protein, 7 aa, synthetic construct
ETNRQKG

SEQ ID NO: 172101 - protein, 7 aa, synthetic construct
ETKVAPR

SEQ ID NO: 172102 - protein, 7 aa, synthetic construct
ENKQAGR

SEQ ID NO: 172103 - protein, 7 aa, synthetic construct
TTNRIER

SEQ ID NO: 172104 - protein, 7 aa, synthetic construct
NTNRAKD

SEQ ID NO: 172105 - protein, 7 aa, synthetic construct
PTDRVGR

SEQ ID NO: 172106 - protein, 7 aa, synthetic construct
ETMGAKR

SEQ ID NO: 172107 - protein, 7 aa, synthetic construct
EFNKPGR

SEQ ID NO: 172108 - protein, 7 aa, synthetic construct
ERQRAGG

SEQ ID NO: 172109 - protein, 7 aa, synthetic construct
ETNARGK

SEQ ID NO: 172110 - protein, 7 aa, synthetic construct
PDMRAGR

SEQ ID NO: 172111 - protein, 7 aa, synthetic construct
DTKRAGQ

SEQ ID NO: 172112 - protein, 7 aa, synthetic construct
ETKLLGR

SEQ ID NO: 172113 - protein, 7 aa, synthetic construct
ETINKGR

SEQ ID NO: 172114 - protein, 7 aa, synthetic construct
ATNEARR

SEQ ID NO: 172115 - protein, 7 aa, synthetic construct
ETNKPAR

SEQ ID NO: 172116 - protein, 7 aa, synthetic construct
TTERAQR

SEQ ID NO: 172117 - protein, 7 aa, synthetic construct
RTNRTGD

SEQ ID NO: 172118 - protein, 7 aa, synthetic construct
MTNREIR

SEQ ID NO: 172119 - protein, 7 aa, synthetic construct
ETNMAKR

SEQ ID NO: 172120 - protein, 7 aa, synthetic construct
GTAHAGR

SEQ ID NO: 172121 - protein, 7 aa, synthetic construct
EVNAKGR

SEQ ID NO: 172122 - protein, 7 aa, synthetic construct
ETNKMVR

SEQ ID NO: 172123 - protein, 7 aa, synthetic construct
ETNRLPK

SEQ ID NO: 172124 - protein, 7 aa, synthetic construct
EKNRPGS

SEQ ID NO: 172125 - protein, 7 aa, synthetic construct
EQNRAKP

SEQ ID NO: 172126 - protein, 7 aa, synthetic construct
NTERAQR

SEQ ID NO: 172127 - protein, 7 aa, synthetic construct
GTNEARR

SEQ ID NO: 172128 - protein, 7 aa, synthetic construct
ITARAGG

SEQ ID NO: 172129 - protein, 7 aa, synthetic construct
EVPRQGR

SEQ ID NO: 172130 - protein, 7 aa, synthetic construct
DMNKAGR

SEQ ID NO: 172131 - protein, 7 aa, synthetic construct
ETRNLGR

SEQ ID NO: 172132 - protein, 7 aa, synthetic construct
ERNVAQR

SEQ ID NO: 172133 - protein, 7 aa, synthetic construct
ETNRAMK

SEQ ID NO: 172134 - protein, 7 aa, synthetic construct
PPERAGR

SEQ ID NO: 172135 - protein, 7 aa, synthetic construct
ETNRKQG

SEQ ID NO: 172136 - protein, 7 aa, synthetic construct
EVNRATK

SEQ ID NO: 172137 - protein, 7 aa, synthetic construct
RTNREGI

SEQ ID NO: 172138 - protein, 7 aa, synthetic construct
ATNRGDR

SEQ ID NO: 172139 - protein, 7 aa, synthetic construct
MTERLGR

SEQ ID NO: 172140 - protein, 7 aa, synthetic construct
GTDRASR

SEQ ID NO: 172141 - protein, 7 aa, synthetic construct
DINRAVR

SEQ ID NO: 172142 - protein, 7 aa, synthetic construct
DRNRAGA

SEQ ID NO: 172143 - protein, 7 aa, synthetic construct
ESPRAGK

SEQ ID NO: 172144 - protein, 7 aa, synthetic construct
VTTRAGG

SEQ ID NO: 172145 - protein, 7 aa, synthetic construct
EINKATR

SEQ ID NO: 172146 - protein, 7 aa, synthetic construct
FTNRQER

SEQ ID NO: 172147 - protein, 7 aa, synthetic construct
DQNKAGR

SEQ ID NO: 172148 - protein, 7 aa, synthetic construct
ATNRKGE

SEQ ID NO: 172149 - protein, 7 aa, synthetic construct
ETNVSKR

SEQ ID NO: 172150 - protein, 7 aa, synthetic construct
DTNRAKQ

SEQ ID NO: 172151 - protein, 7 aa, synthetic construct
EKNMSGR

SEQ ID NO: 172152 - protein, 7 aa, synthetic construct
ETNVKMR

SEQ ID NO: 172153 - protein, 7 aa, synthetic construct
STNRAEK

SEQ ID NO: 172154 - protein, 7 aa, synthetic construct
ETKQLGR

SEQ ID NO: 172155 - protein, 7 aa, synthetic construct
ETNRISK

SEQ ID NO: 172156 - protein, 7 aa, synthetic construct
ETTGAKR

SEQ ID NO: 172157 - protein, 7 aa, synthetic construct
EKNSALR

SEQ ID NO: 172158 - protein, 7 aa, synthetic construct
YTPRAER

SEQ ID NO: 172159 - protein, 7 aa, synthetic construct
ETVNRGR

SEQ ID NO: 172160 - protein, 7 aa, synthetic construct
ATNRENR

SEQ ID NO: 172161 - protein, 7 aa, synthetic construct
HTNRMGG

SEQ ID NO: 172162 - protein, 7 aa, synthetic construct
STDRANR

SEQ ID NO: 172163 - protein, 7 aa, synthetic construct
ESMKAGR

SEQ ID NO: 172164 - protein, 7 aa, synthetic construct
VTERAIR

SEQ ID NO: 172165 - protein, 7 aa, synthetic construct
FTKRAGD

SEQ ID NO: 172166 - protein, 7 aa, synthetic construct
DTNRAQR

SEQ ID NO: 172167 - protein, 7 aa, synthetic construct
EFKRAGA

SEQ ID NO: 172168 - protein, 7 aa, synthetic construct
SINREGR

SEQ ID NO: 172169 - protein, 7 aa, synthetic construct
ITNRHGG

SEQ ID NO: 172170 - protein, 7 aa, synthetic construct
ETANAKR

SEQ ID NO: 172171 - protein, 7 aa, synthetic construct
RTNEGGR

SEQ ID NO: 172172 - protein, 7 aa, synthetic construct
EVNKMGR

SEQ ID NO: 172173 - protein, 7 aa, synthetic construct
ETNRITK

SEQ ID NO: 172174 - protein, 7 aa, synthetic construct
ITNRAHG

SEQ ID NO: 172175 - protein, 7 aa, synthetic construct
EMNRAKG

SEQ ID NO: 172176 - protein, 7 aa, synthetic construct
ETKRAGA

SEQ ID NO: 172177 - protein, 7 aa, synthetic construct
GTQRADR

SEQ ID NO: 172178 - protein, 7 aa, synthetic construct
ENNTKGR

SEQ ID NO: 172179 - protein, 7 aa, synthetic construct
ETAKQGR

SEQ ID NO: 172180 - protein, 7 aa, synthetic construct
YTNRESR

SEQ ID NO: 172181 - protein, 7 aa, synthetic construct
ETNRNKG

SEQ ID NO: 172182 - protein, 7 aa, synthetic construct
LTNRAHN

SEQ ID NO: 172183 - protein, 7 aa, synthetic construct
ETKRIGS

SEQ ID NO: 172184 - protein, 7 aa, synthetic construct
MTDRAMR

SEQ ID NO: 172185 - protein, 7 aa, synthetic construct
ETMNKGR

SEQ ID NO: 172186 - protein, 7 aa, synthetic construct
DGNKAGR

SEQ ID NO: 172187 - protein, 7 aa, synthetic construct
ETARRGV

SEQ ID NO: 172188 - protein, 7 aa, synthetic construct
SKNRAGD

SEQ ID NO: 172189 - protein, 7 aa, synthetic construct
ETKIIGR

SEQ ID NO: 172190 - protein, 7 aa, synthetic construct
ETPKAIR

SEQ ID NO: 172191 - protein, 7 aa, synthetic construct
ETNPNKR

SEQ ID NO: 172192 - protein, 7 aa, synthetic construct
ETARIPR

SEQ ID NO: 172193 - protein, 7 aa, synthetic construct
MTNRAHL

SEQ ID NO: 172194 - protein, 7 aa, synthetic construct
YTNEARR

SEQ ID NO: 172195 - protein, 7 aa, synthetic construct
EINGAKR

SEQ ID NO: 172196 - protein, 7 aa, synthetic construct
ETNKRGT

SEQ ID NO: 172197 - protein, 7 aa, synthetic construct
ERNIAPR

SEQ ID NO: 172198 - protein, 7 aa, synthetic construct
ESNKVGR

SEQ ID NO: 172199 - protein, 7 aa, synthetic construct
HTPRAGN

SEQ ID NO: 172200 - protein, 7 aa, synthetic construct
STNRNER

SEQ ID NO: 172201 - protein, 7 aa, synthetic construct
ETQPAKR

SEQ ID NO: 172202 - protein, 7 aa, synthetic construct
ITNRQER

SEQ ID NO: 172203 - protein, 7 aa, synthetic construct
FTNRASI

SEQ ID NO: 172204 - protein, 7 aa, synthetic construct
RTNRLGE

SEQ ID NO: 172205 - protein, 7 aa, synthetic construct
EQNARGR

SEQ ID NO: 172206 - protein, 7 aa, synthetic construct
DSNRAGK

SEQ ID NO: 172207 - protein, 7 aa, synthetic construct
QTNRNDR

SEQ ID NO: 172208 - protein, 7 aa, synthetic construct
STQHAGR

SEQ ID NO: 172209 - protein, 7 aa, synthetic construct
ETNRVRP

SEQ ID NO: 172210 - protein, 7 aa, synthetic construct
LTNRTER

SEQ ID NO: 172211 - protein, 7 aa, synthetic construct
TTPRADR

SEQ ID NO: 172212 - protein, 7 aa, synthetic construct
NTERLGR

SEQ ID NO: 172213 - protein, 7 aa, synthetic construct
FTNNAIR

SEQ ID NO: 172214 - protein, 7 aa, synthetic construct
EMNQKGR

SEQ ID NO: 172215 - protein, 7 aa, synthetic construct
EDKKAGR

SEQ ID NO: 172216 - protein, 7 aa, synthetic construct
EPNVRGR

SEQ ID NO: 172217 - protein, 7 aa, synthetic construct
EQPRGGR

SEQ ID NO: 172218 - protein, 7 aa, synthetic construct
LLNRADR

SEQ ID NO: 172219 - protein, 7 aa, synthetic construct
DTNRARS

SEQ ID NO: 172220 - protein, 7 aa, synthetic construct
DINRAGK

SEQ ID NO: 172221 - protein, 7 aa, synthetic construct
ELNPAKR

SEQ ID NO: 172222 - protein, 7 aa, synthetic construct
ETQRGLR

SEQ ID NO: 172223 - protein, 7 aa, synthetic construct
GSNRADR

SEQ ID NO: 172224 - protein, 7 aa, synthetic construct
TRNDAGR

SEQ ID NO: 172225 - protein, 7 aa, synthetic construct
ETVQKGR

SEQ ID NO: 172226 - protein, 7 aa, synthetic construct
ELKNAGR

SEQ ID NO: 172227 - protein, 7 aa, synthetic construct
EIKREGR

SEQ ID NO: 172228 - protein, 7 aa, synthetic construct
EFKRAGN

SEQ ID NO: 172229 - protein, 7 aa, synthetic construct
ETKRASG

SEQ ID NO: 172230 - protein, 7 aa, synthetic construct
ETNMKLR

SEQ ID NO: 172231 - protein, 7 aa, synthetic construct
IANRAER

SEQ ID NO: 172232 - protein, 7 aa, synthetic construct
MDSRAGR

SEQ ID NO: 172233 - protein, 7 aa, synthetic construct
ETNMKGR

SEQ ID NO: 172234 - protein, 7 aa, synthetic construct
STNRVDR

SEQ ID NO: 172235 - protein, 7 aa, synthetic construct
EKLREGR

SEQ ID NO: 172236 - protein, 7 aa, synthetic construct
DTNKAIR

SEQ ID NO: 172237 - protein, 7 aa, synthetic construct
ETNAARK

SEQ ID NO: 172238 - protein, 7 aa, synthetic construct
ETKAANR

SEQ ID NO: 172239 - protein, 7 aa, synthetic construct
EPNRAVR

SEQ ID NO: 172240 - protein, 7 aa, synthetic construct
ETKRATL

SEQ ID NO: 172241 - protein, 7 aa, synthetic construct
FTNRASA

SEQ ID NO: 172242 - protein, 7 aa, synthetic construct
ATERAGR

SEQ ID NO: 172243 - protein, 7 aa, synthetic construct
FTQRADR

SEQ ID NO: 172244 - protein, 7 aa, synthetic construct
EINRQGK

SEQ ID NO: 172245 - protein, 7 aa, synthetic construct
VTNRAHM

SEQ ID NO: 172246 - protein, 7 aa, synthetic construct
STVREGR

SEQ ID NO: 172247 - protein, 7 aa, synthetic construct
ETNSKMR

SEQ ID NO: 172248 - protein, 7 aa, synthetic construct
IANRADR

SEQ ID NO: 172249 - protein, 7 aa, synthetic construct
HTNNAVR

SEQ ID NO: 172250 - protein, 7 aa, synthetic construct
ERNQAVR

SEQ ID NO: 172251 - protein, 7 aa, synthetic construct
VANYAGR

SEQ ID NO: 172252 - protein, 7 aa, synthetic construct
EQKAAGR

SEQ ID NO: 172253 - protein, 7 aa, synthetic construct
TTERTGR

SEQ ID NO: 172254 - protein, 7 aa, synthetic construct
DNNRALR

SEQ ID NO: 172255 - protein, 7 aa, synthetic construct
ATTRAGN

SEQ ID NO: 172256 - protein, 7 aa, synthetic construct
ENKRAGM

SEQ ID NO: 172257 - protein, 7 aa, synthetic construct
ITNQAHR

SEQ ID NO: 172258 - protein, 7 aa, synthetic construct
EANKMGR

SEQ ID NO: 172259 - protein, 7 aa, synthetic construct
ELNRAKV

SEQ ID NO: 172260 - protein, 7 aa, synthetic construct
MTNIHGR

SEQ ID NO: 172261 - protein, 7 aa, synthetic construct
ETNYKGK

SEQ ID NO: 172262 - protein, 7 aa, synthetic construct
EVNRQGK

SEQ ID NO: 172263 - protein, 7 aa, synthetic construct
VENRAQR

SEQ ID NO: 172264 - protein, 7 aa, synthetic construct
ETNQAKR

SEQ ID NO: 172265 - protein, 7 aa, synthetic construct
ETVRTGK

SEQ ID NO: 172266 - protein, 7 aa, synthetic construct
ETSMKGR

SEQ ID NO: 172267 - protein, 7 aa, synthetic construct
DTNRAAK

SEQ ID NO: 172268 - protein, 7 aa, synthetic construct
ETNRGFK

SEQ ID NO: 172269 - protein, 7 aa, synthetic construct
ESNKAPR

SEQ ID NO: 172270 - protein, 7 aa, synthetic construct
MVDRAGR

SEQ ID NO: 172271 - protein, 7 aa, synthetic construct
HTNKDGR

SEQ ID NO: 172272 - protein, 7 aa, synthetic construct
EKLQAGR

SEQ ID NO: 172273 - protein, 7 aa, synthetic construct
QTERTGR

SEQ ID NO: 172274 - protein, 7 aa, synthetic construct
EGNKALR

SEQ ID NO: 172275 - protein, 7 aa, synthetic construct
PTDRAQR

SEQ ID NO: 172276 - protein, 7 aa, synthetic construct
ETNNQKR

SEQ ID NO: 172277 - protein, 7 aa, synthetic construct
EKNRFGA

SEQ ID NO: 172278 - protein, 7 aa, synthetic construct
ETNRVKG

SEQ ID NO: 172279 - protein, 7 aa, synthetic construct
FTNNANR

SEQ ID NO: 172280 - protein, 7 aa, synthetic construct
TTNRTER

SEQ ID NO: 172281 - protein, 7 aa, synthetic construct
GSDRAGR

SEQ ID NO: 172282 - protein, 7 aa, synthetic construct
EYKNAGR

SEQ ID NO: 172283 - protein, 7 aa, synthetic construct
MDIRAGR

SEQ ID NO: 172284 - protein, 7 aa, synthetic construct
YTAREGR

SEQ ID NO: 172285 - protein, 7 aa, synthetic construct
ETKRAMG

SEQ ID NO: 172286 - protein, 7 aa, synthetic construct
ETIRAKP

SEQ ID NO: 172287 - protein, 7 aa, synthetic construct
ETNKAQK

SEQ ID NO: 172288 - protein, 7 aa, synthetic construct
EKMRAGN

SEQ ID NO: 172289 - protein, 7 aa, synthetic construct
ETNRMKM

SEQ ID NO: 172290 - protein, 7 aa, synthetic construct
EGKPAGR

SEQ ID NO: 172291 - protein, 7 aa, synthetic construct
SDVRAGR

SEQ ID NO: 172292 - protein, 7 aa, synthetic construct
EQLRAGK

SEQ ID NO: 172293 - protein, 7 aa, synthetic construct
DSVRAGR

SEQ ID NO: 172294 - protein, 7 aa, synthetic construct
QTIRAER

SEQ ID NO: 172295 - protein, 7 aa, synthetic construct
EKNRASG

SEQ ID NO: 172296 - protein, 7 aa, synthetic construct
ETVRMGK

SEQ ID NO: 172297 - protein, 7 aa, synthetic construct
ENNNKGR

SEQ ID NO: 172298 - protein, 7 aa, synthetic construct
EVNRGVR

SEQ ID NO: 172299 - protein, 7 aa, synthetic construct
PDPRAGR

SEQ ID NO: 172300 - protein, 7 aa, synthetic construct
HTVRAGG

SEQ ID NO: 172301 - protein, 7 aa, synthetic construct
RTAEAGR

SEQ ID NO: 172302 - protein, 7 aa, synthetic construct
ETQIAKR

SEQ ID NO: 172303 - protein, 7 aa, synthetic construct
EKMRAGQ

SEQ ID NO: 172304 - protein, 7 aa, synthetic construct
LTNRAHL

SEQ ID NO: 172305 - protein, 7 aa, synthetic construct
YTNRAHA

SEQ ID NO: 172306 - protein, 7 aa, synthetic construct
ETAKIGR

SEQ ID NO: 172307 - protein, 7 aa, synthetic construct
FANREGR

SEQ ID NO: 172308 - protein, 7 aa, synthetic construct
VTNRGDR

SEQ ID NO: 172309 - protein, 7 aa, synthetic construct
ESVKAGR

SEQ ID NO: 172310 - protein, 7 aa, synthetic construct
LTNREVR

SEQ ID NO: 172311 - protein, 7 aa, synthetic construct
EPIKAGR

SEQ ID NO: 172312 - protein, 7 aa, synthetic construct
MTDRASR

SEQ ID NO: 172313 - protein, 7 aa, synthetic construct
DTNRARI

SEQ ID NO: 172314 - protein, 7 aa, synthetic construct
VTNRMDR

SEQ ID NO: 172315 - protein, 7 aa, synthetic construct
EANRGVR

SEQ ID NO: 172316 - protein, 7 aa, synthetic construct
DRNRAGV

SEQ ID NO: 172317 - protein, 7 aa, synthetic construct
ETNKKGQ

SEQ ID NO: 172318 - protein, 7 aa, synthetic construct
EQKRAGG

SEQ ID NO: 172319 - protein, 7 aa, synthetic construct
ETNKTPR

SEQ ID NO: 172320 - protein, 7 aa, synthetic construct
ITKRAGD

SEQ ID NO: 172321 - protein, 7 aa, synthetic construct
DTNRVGR

SEQ ID NO: 172322 - protein, 7 aa, synthetic construct
ETKMTGR

SEQ ID NO: 172323 - protein, 7 aa, synthetic construct
TTNRHGG

SEQ ID NO: 172324 - protein, 7 aa, synthetic construct
ERPRAGG

SEQ ID NO: 172325 - protein, 7 aa, synthetic construct
RTSDAGR

SEQ ID NO: 172326 - protein, 7 aa, synthetic construct
EKNAASR

SEQ ID NO: 172327 - protein, 7 aa, synthetic construct
ETSLKGR

SEQ ID NO: 172328 - protein, 7 aa, synthetic construct
ETGKAFR

SEQ ID NO: 172329 - protein, 7 aa, synthetic construct
NTSREGR

SEQ ID NO: 172330 - protein, 7 aa, synthetic construct
LTDRATR

SEQ ID NO: 172331 - protein, 7 aa, synthetic construct
DTNKAMR

SEQ ID NO: 172332 - protein, 7 aa, synthetic construct
EKLRAGL

SEQ ID NO: 172333 - protein, 7 aa, synthetic construct
ETNPKLR

SEQ ID NO: 172334 - protein, 7 aa, synthetic construct
MTNAAHR

SEQ ID NO: 172335 - protein, 7 aa, synthetic construct
EIQRAGK

SEQ ID NO: 172336 - protein, 7 aa, synthetic construct
ETNPGRR

SEQ ID NO: 172337 - protein, 7 aa, synthetic construct
ETSKMGR

SEQ ID NO: 172338 - protein, 7 aa, synthetic construct
ETMKATR

SEQ ID NO: 172339 - protein, 7 aa, synthetic construct
ETKRAPT

SEQ ID NO: 172340 - protein, 7 aa, synthetic construct
ETNKSPR

SEQ ID NO: 172341 - protein, 7 aa, synthetic construct
LTERAIR

SEQ ID NO: 172342 - protein, 7 aa, synthetic construct
VHNIAGR

SEQ ID NO: 172343 - protein, 7 aa, synthetic construct
ETTRAKG

SEQ ID NO: 172344 - protein, 7 aa, synthetic construct
ESNRAKP

SEQ ID NO: 172345 - protein, 7 aa, synthetic construct
STHRAGG

SEQ ID NO: 172346 - protein, 7 aa, synthetic construct
ETMPAKR

SEQ ID NO: 172347 - protein, 7 aa, synthetic construct
DPNRASR

SEQ ID NO: 172348 - protein, 7 aa, synthetic construct
DPNRALR

SEQ ID NO: 172349 - protein, 7 aa, synthetic construct
EQNPAKR

SEQ ID NO: 172350 - protein, 7 aa, synthetic construct
ETKQMGR

SEQ ID NO: 172351 - protein, 7 aa, synthetic construct
KTERADR

SEQ ID NO: 172352 - protein, 7 aa, synthetic construct
GDNRAGK

SEQ ID NO: 172353 - protein, 7 aa, synthetic construct
RTNSAER

SEQ ID NO: 172354 - protein, 7 aa, synthetic construct
KGNRAGD

SEQ ID NO: 172355 - protein, 7 aa, synthetic construct
EKNMGGR

SEQ ID NO: 172356 - protein, 7 aa, synthetic construct
ETRAAGR

SEQ ID NO: 172357 - protein, 7 aa, synthetic construct
EPNKANR

SEQ ID NO: 172358 - protein, 7 aa, synthetic construct
LTNRAHQ

SEQ ID NO: 172359 - protein, 7 aa, synthetic construct
ETPRARP

SEQ ID NO: 172360 - protein, 7 aa, synthetic construct
ENLRAGK

SEQ ID NO: 172361 - protein, 7 aa, synthetic construct
EIKNAGR

SEQ ID NO: 172362 - protein, 7 aa, synthetic construct
ETKILGR

SEQ ID NO: 172363 - protein, 7 aa, synthetic construct
ENNQRGR

SEQ ID NO: 172364 - protein, 7 aa, synthetic construct
STGRAGQ

SEQ ID NO: 172365 - protein, 7 aa, synthetic construct
ELNRAKS

SEQ ID NO: 172366 - protein, 7 aa, synthetic construct
LDNRAMR

SEQ ID NO: 172367 - protein, 7 aa, synthetic construct
NTDRAVR

SEQ ID NO: 172368 - protein, 7 aa, synthetic construct
ETQRPGK

SEQ ID NO: 172369 - protein, 7 aa, synthetic construct
EQNRTGK

SEQ ID NO: 172370 - protein, 7 aa, synthetic construct
ESNKGGR

SEQ ID NO: 172371 - protein, 7 aa, synthetic construct
ETRQIGR

SEQ ID NO: 172372 - protein, 7 aa, synthetic construct
NTERVGR

SEQ ID NO: 172373 - protein, 7 aa, synthetic construct
ERNISGR

SEQ ID NO: 172374 - protein, 7 aa, synthetic construct
ELNKAIR

SEQ ID NO: 172375 - protein, 7 aa, synthetic construct
PENRAGK

SEQ ID NO: 172376 - protein, 7 aa, synthetic construct
EANRTGK

SEQ ID NO: 172377 - protein, 7 aa, synthetic construct
SDNRANR

SEQ ID NO: 172378 - protein, 7 aa, synthetic construct
ERNQIGR

SEQ ID NO: 172379 - protein, 7 aa, synthetic construct
ETNVKVR

SEQ ID NO: 172380 - protein, 7 aa, synthetic construct
RTNDAPR

SEQ ID NO: 172381 - protein, 7 aa, synthetic construct
ITNRVDR

SEQ ID NO: 172382 - protein, 7 aa, synthetic construct
EKNRAVL

SEQ ID NO: 172383 - protein, 7 aa, synthetic construct
ETNRLQK

SEQ ID NO: 172384 - protein, 7 aa, synthetic construct
EPPRGGR

SEQ ID NO: 172385 - protein, 7 aa, synthetic construct
MTERALR

SEQ ID NO: 172386 - protein, 7 aa, synthetic construct
DPNRAGK

SEQ ID NO: 172387 - protein, 7 aa, synthetic construct
ELNAAKR

SEQ ID NO: 172388 - protein, 7 aa, synthetic construct
EIKGAGR

SEQ ID NO: 172389 - protein, 7 aa, synthetic construct
DTPRPGR

SEQ ID NO: 172390 - protein, 7 aa, synthetic construct
EKNLMGR

SEQ ID NO: 172391 - protein, 7 aa, synthetic construct
EQNRAIK

SEQ ID NO: 172392 - protein, 7 aa, synthetic construct
ESNKAMR

SEQ ID NO: 172393 - protein, 7 aa, synthetic construct
IVNREGR

SEQ ID NO: 172394 - protein, 7 aa, synthetic construct
GTVRAER

SEQ ID NO: 172395 - protein, 7 aa, synthetic construct
TTNRNDR

SEQ ID NO: 172396 - protein, 7 aa, synthetic construct
EPNRAVK

SEQ ID NO: 172397 - protein, 7 aa, synthetic construct
ETNRNAK

SEQ ID NO: 172398 - protein, 7 aa, synthetic construct
VLDRAGR

SEQ ID NO: 172399 - protein, 7 aa, synthetic construct
NDVRAGR

SEQ ID NO: 172400 - protein, 7 aa, synthetic construct
ETSKPGR

SEQ ID NO: 172401 - protein, 7 aa, synthetic construct
HTGRAGQ

SEQ ID NO: 172402 - protein, 7 aa, synthetic construct
ETARGVR

SEQ ID NO: 172403 - protein, 7 aa, synthetic construct
ETPRAKI

SEQ ID NO: 172404 - protein, 7 aa, synthetic construct
ETNKALR

SEQ ID NO: 172405 - protein, 7 aa, synthetic construct
EVNIKGR

SEQ ID NO: 172406 - protein, 7 aa, synthetic construct
EKMRAGS

SEQ ID NO: 172407 - protein, 7 aa, synthetic construct
STNREAR

SEQ ID NO: 172408 - protein, 7 aa, synthetic construct
ETNRVVK

SEQ ID NO: 172409 - protein, 7 aa, synthetic construct
YTNNAIR

SEQ ID NO: 172410 - protein, 7 aa, synthetic construct
ITERATR

SEQ ID NO: 172411 - protein, 7 aa, synthetic construct
ETLKVGR

SEQ ID NO: 172412 - protein, 7 aa, synthetic construct
ATERAIR

SEQ ID NO: 172413 - protein, 7 aa, synthetic construct
QTNRAEK

SEQ ID NO: 172414 - protein, 7 aa, synthetic construct
LVNRADR

SEQ ID NO: 172415 - protein, 7 aa, synthetic construct
TTNRADK

SEQ ID NO: 172416 - protein, 7 aa, synthetic construct
DTPRATR

SEQ ID NO: 172417 - protein, 7 aa, synthetic construct
EANKSGR

SEQ ID NO: 172418 - protein, 7 aa, synthetic construct
EFNKAIR

SEQ ID NO: 172419 - protein, 7 aa, synthetic construct
EASKAGR

SEQ ID NO: 172420 - protein, 7 aa, synthetic construct
EKNREVR

SEQ ID NO: 172421 - protein, 7 aa, synthetic construct
ESKRAGG

SEQ ID NO: 172422 - protein, 7 aa, synthetic construct
PPDRAGR

SEQ ID NO: 172423 - protein, 7 aa, synthetic construct
ETNRGLR

SEQ ID NO: 172424 - protein, 7 aa, synthetic construct
GINRADR

SEQ ID NO: 172425 - protein, 7 aa, synthetic construct
FTNRETR

SEQ ID NO: 172426 - protein, 7 aa, synthetic construct
EPRIAGR

SEQ ID NO: 172427 - protein, 7 aa, synthetic construct
ERVRAGG

SEQ ID NO: 172428 - protein, 7 aa, synthetic construct
ETRGVGR

SEQ ID NO: 172429 - protein, 7 aa, synthetic construct
GTNRIDR

SEQ ID NO: 172430 - protein, 7 aa, synthetic construct
TTDRPGR

SEQ ID NO: 172431 - protein, 7 aa, synthetic construct
VTARAGG

SEQ ID NO: 172432 - protein, 7 aa, synthetic construct
KDNREGR

SEQ ID NO: 172433 - protein, 7 aa, synthetic construct
GTNTHGR

SEQ ID NO: 172434 - protein, 7 aa, synthetic construct
STHNAGR

SEQ ID NO: 172435 - protein, 7 aa, synthetic construct
ETNMKSR

SEQ ID NO: 172436 - protein, 7 aa, synthetic construct
ENNAAKR

SEQ ID NO: 172437 - protein, 7 aa, synthetic construct
ETKVANR

SEQ ID NO: 172438 - protein, 7 aa, synthetic construct
DVNRVGR

SEQ ID NO: 172439 - protein, 7 aa, synthetic construct
VTNERGR

SEQ ID NO: 172440 - protein, 7 aa, synthetic construct
ETKAAAR

SEQ ID NO: 172441 - protein, 7 aa, synthetic construct
LIDRAGR

SEQ ID NO: 172442 - protein, 7 aa, synthetic construct
ETNKLLR

SEQ ID NO: 172443 - protein, 7 aa, synthetic construct
STNRELR

SEQ ID NO: 172444 - protein, 7 aa, synthetic construct
LGNREGR

SEQ ID NO: 172445 - protein, 7 aa, synthetic construct
SDNKAGR

SEQ ID NO: 172446 - protein, 7 aa, synthetic construct
ETQTRGR

SEQ ID NO: 172447 - protein, 7 aa, synthetic construct
LENRAGR

SEQ ID NO: 172448 - protein, 7 aa, synthetic construct
DTNRATK

SEQ ID NO: 172449 - protein, 7 aa, synthetic construct
DRNIAGR

SEQ ID NO: 172450 - protein, 7 aa, synthetic construct
VTNRDSR

SEQ ID NO: 172451 - protein, 7 aa, synthetic construct
ETRKAGF

SEQ ID NO: 172452 - protein, 7 aa, synthetic construct
GDARAGR

SEQ ID NO: 172453 - protein, 7 aa, synthetic construct
NKNDAGR

SEQ ID NO: 172454 - protein, 7 aa, synthetic construct
HTGRAGV

SEQ ID NO: 172455 - protein, 7 aa, synthetic construct
DTNLKGR

SEQ ID NO: 172456 - protein, 7 aa, synthetic construct
ETRTTGR

SEQ ID NO: 172457 - protein, 7 aa, synthetic construct
ELNRAKQ

SEQ ID NO: 172458 - protein, 7 aa, synthetic construct
NDNRAVR

SEQ ID NO: 172459 - protein, 7 aa, synthetic construct
ETNRTKL

SEQ ID NO: 172460 - protein, 7 aa, synthetic construct
ATNRPDR

SEQ ID NO: 172461 - protein, 7 aa, synthetic construct
ETKLALR

SEQ ID NO: 172462 - protein, 7 aa, synthetic construct
VTMRAER

SEQ ID NO: 172463 - protein, 7 aa, synthetic construct
ETNTTKR

SEQ ID NO: 172464 - protein, 7 aa, synthetic construct
ETNVMKR

SEQ ID NO: 172465 - protein, 7 aa, synthetic construct
EMNRANR

SEQ ID NO: 172466 - protein, 7 aa, synthetic construct
GTNRADR

SEQ ID NO: 172467 - protein, 7 aa, synthetic construct
EKNRAFG

SEQ ID NO: 172468 - protein, 7 aa, synthetic construct
ATERTGR

SEQ ID NO: 172469 - protein, 7 aa, synthetic construct
ETKVAVR

SEQ ID NO: 172470 - protein, 7 aa, synthetic construct
EKNSASR

SEQ ID NO: 172471 - protein, 7 aa, synthetic construct
DTNRQAR

SEQ ID NO: 172472 - protein, 7 aa, synthetic construct
RENRAGG

SEQ ID NO: 172473 - protein, 7 aa, synthetic construct
ETNQQKR

SEQ ID NO: 172474 - protein, 7 aa, synthetic construct
ETNTSKR

SEQ ID NO: 172475 - protein, 7 aa, synthetic construct
VDGRAGR

SEQ ID NO: 172476 - protein, 7 aa, synthetic construct
QDVRAGR

SEQ ID NO: 172477 - protein, 7 aa, synthetic construct
ETNRNLK

SEQ ID NO: 172478 - protein, 7 aa, synthetic construct
ETPRAKP

SEQ ID NO: 172479 - protein, 7 aa, synthetic construct
EPQRQGR

SEQ ID NO: 172480 - protein, 7 aa, synthetic construct
DTKYAGR

SEQ ID NO: 172481 - protein, 7 aa, synthetic construct
VTNRPER

SEQ ID NO: 172482 - protein, 7 aa, synthetic construct
ETNRQKP

SEQ ID NO: 172483 - protein, 7 aa, synthetic construct
LTNRASL

SEQ ID NO: 172484 - protein, 7 aa, synthetic construct
LTHRAGG

SEQ ID NO: 172485 - protein, 7 aa, synthetic construct
EMKNAGR

SEQ ID NO: 172486 - protein, 7 aa, synthetic construct
TMNRADR

SEQ ID NO: 172487 - protein, 7 aa, synthetic construct
ETGPKGR

SEQ ID NO: 172488 - protein, 7 aa, synthetic construct
ITQRAER

SEQ ID NO: 172489 - protein, 7 aa, synthetic construct
EANRAGK

SEQ ID NO: 172490 - protein, 7 aa, synthetic construct
ADNKAGR

SEQ ID NO: 172491 - protein, 7 aa, synthetic construct
LDNRAAR

SEQ ID NO: 172492 - protein, 7 aa, synthetic construct
ETKPVGR

SEQ ID NO: 172493 - protein, 7 aa, synthetic construct
EINKPGR

SEQ ID NO: 172494 - protein, 7 aa, synthetic construct
GTLREGR

SEQ ID NO: 172495 - protein, 7 aa, synthetic construct
DTQRATR

SEQ ID NO: 172496 - protein, 7 aa, synthetic construct
ETKGASR

SEQ ID NO: 172497 - protein, 7 aa, synthetic construct
FTDKAGR

SEQ ID NO: 172498 - protein, 7 aa, synthetic construct
EMNQAKR

SEQ ID NO: 172499 - protein, 7 aa, synthetic construct
QSNRAER

SEQ ID NO: 172500 - protein, 7 aa, synthetic construct
ETRAAPR

SEQ ID NO: 172501 - protein, 7 aa, synthetic construct
ETSAAKR

SEQ ID NO: 172502 - protein, 7 aa, synthetic construct
EVSKAGR

SEQ ID NO: 172503 - protein, 7 aa, synthetic construct
ETNPRGK

SEQ ID NO: 172504 - protein, 7 aa, synthetic construct
ETKPTGR

SEQ ID NO: 172505 - protein, 7 aa, synthetic construct
ELNKANR

SEQ ID NO: 172506 - protein, 7 aa, synthetic construct
DTNKPGR

SEQ ID NO: 172507 - protein, 7 aa, synthetic construct
DTARAVR

SEQ ID NO: 172508 - protein, 7 aa, synthetic construct
DAPRAGR

SEQ ID NO: 172509 - protein, 7 aa, synthetic construct
ETPRATK

SEQ ID NO: 172510 - protein, 7 aa, synthetic construct
EKTRAGY

SEQ ID NO: 172511 - protein, 7 aa, synthetic construct
GTERAIR

SEQ ID NO: 172512 - protein, 7 aa, synthetic construct
EVNRGGR

SEQ ID NO: 172513 - protein, 7 aa, synthetic construct
EKNRANA

SEQ ID NO: 172514 - protein, 7 aa, synthetic construct
ITARADR

SEQ ID NO: 172515 - protein, 7 aa, synthetic construct
EMNPAKR

SEQ ID NO: 172516 - protein, 7 aa, synthetic construct
STLRAER

SEQ ID NO: 172517 - protein, 7 aa, synthetic construct
SLDRAGR

SEQ ID NO: 172518 - protein, 7 aa, synthetic construct
EKNRALN

SEQ ID NO: 172519 - protein, 7 aa, synthetic construct
EPTRAGR

SEQ ID NO: 172520 - protein, 7 aa, synthetic construct
DTPRQGR

SEQ ID NO: 172521 - protein, 7 aa, synthetic construct
DTPRSGR

SEQ ID NO: 172522 - protein, 7 aa, synthetic construct
ELNSAKR

SEQ ID NO: 172523 - protein, 7 aa, synthetic construct
DTNRSGK

SEQ ID NO: 172524 - protein, 7 aa, synthetic construct
ETNRTRP

SEQ ID NO: 172525 - protein, 7 aa, synthetic construct
TFNREGR

SEQ ID NO: 172526 - protein, 7 aa, synthetic construct
ETRGTGR

SEQ ID NO: 172527 - protein, 7 aa, synthetic construct
ETNKKGF

SEQ ID NO: 172528 - protein, 7 aa, synthetic construct
ETIRAKT

SEQ ID NO: 172529 - protein, 7 aa, synthetic construct
NTDRQGR

SEQ ID NO: 172530 - protein, 7 aa, synthetic construct
ENAKAGR

SEQ ID NO: 172531 - protein, 7 aa, synthetic construct
PTNRTER

SEQ ID NO: 172532 - protein, 7 aa, synthetic construct
NTNEAKR

SEQ ID NO: 172533 - protein, 7 aa, synthetic construct
ETAPARR

SEQ ID NO: 172534 - protein, 7 aa, synthetic construct
ETPRGVR

SEQ ID NO: 172535 - protein, 7 aa, synthetic construct
MLNRADR

SEQ ID NO: 172536 - protein, 7 aa, synthetic construct
EKNNALR

SEQ ID NO: 172537 - protein, 7 aa, synthetic construct
QDNKAGR

SEQ ID NO: 172538 - protein, 7 aa, synthetic construct
ERNITGR

SEQ ID NO: 172539 - protein, 7 aa, synthetic construct
TTNREVR

SEQ ID NO: 172540 - protein, 7 aa, synthetic construct
ESNKAVR

SEQ ID NO: 172541 - protein, 7 aa, synthetic construct
EKNRAVS

SEQ ID NO: 172542 - protein, 7 aa, synthetic construct
ETARIGK

SEQ ID NO: 172543 - protein, 7 aa, synthetic construct
ETMKQGR

SEQ ID NO: 172544 - protein, 7 aa, synthetic construct
QTNRDGK

SEQ ID NO: 172545 - protein, 7 aa, synthetic construct
MTHGAGR

SEQ ID NO: 172546 - protein, 7 aa, synthetic construct
LTNREQR

SEQ ID NO: 172547 - protein, 7 aa, synthetic construct
ETNSLKR

SEQ ID NO: 172548 - protein, 7 aa, synthetic construct
DTNVKGR

SEQ ID NO: 172549 - protein, 7 aa, synthetic construct
LTERQGR

SEQ ID NO: 172550 - protein, 7 aa, synthetic construct
GPERAGR

SEQ ID NO: 172551 - protein, 7 aa, synthetic construct
ATERAGK

SEQ ID NO: 172552 - protein, 7 aa, synthetic construct
EGNMKGR

SEQ ID NO: 172553 - protein, 7 aa, synthetic construct
PTNRKGE

SEQ ID NO: 172554 - protein, 7 aa, synthetic construct
EPNKAMR

SEQ ID NO: 172555 - protein, 7 aa, synthetic construct
EQNKSGR

SEQ ID NO: 172556 - protein, 7 aa, synthetic construct
YTNNAAR

SEQ ID NO: 172557 - protein, 7 aa, synthetic construct
EMNRARV

SEQ ID NO: 172558 - protein, 7 aa, synthetic construct
KTDFAGR

SEQ ID NO: 172559 - protein, 7 aa, synthetic construct
EKNQALR

SEQ ID NO: 172560 - protein, 7 aa, synthetic construct
ETNIKMR

SEQ ID NO: 172561 - protein, 7 aa, synthetic construct
ETTRAKT

SEQ ID NO: 172562 - protein, 7 aa, synthetic construct
EKQVAGR

SEQ ID NO: 172563 - protein, 7 aa, synthetic construct
EKNRSGY

SEQ ID NO: 172564 - protein, 7 aa, synthetic construct
ETPRAKN

SEQ ID NO: 172565 - protein, 7 aa, synthetic construct
TTDRAMR

SEQ ID NO: 172566 - protein, 7 aa, synthetic construct
ETNRQKA

SEQ ID NO: 172567 - protein, 7 aa, synthetic construct
MTNRIDR

SEQ ID NO: 172568 - protein, 7 aa, synthetic construct
ITVRADR

SEQ ID NO: 172569 - protein, 7 aa, synthetic construct
ETSKAIR

SEQ ID NO: 172570 - protein, 7 aa, synthetic construct
TIDRAGR

SEQ ID NO: 172571 - protein, 7 aa, synthetic construct
FTDRATR

SEQ ID NO: 172572 - protein, 7 aa, synthetic construct
ETKNMGR

SEQ ID NO: 172573 - protein, 7 aa, synthetic construct
DANRATR

SEQ ID NO: 172574 - protein, 7 aa, synthetic construct
ETKMQGR

SEQ ID NO: 172575 - protein, 7 aa, synthetic construct
ETNALKR

SEQ ID NO: 172576 - protein, 7 aa, synthetic construct
DTNKATR

SEQ ID NO: 172577 - protein, 7 aa, synthetic construct
EQIRAGK

SEQ ID NO: 172578 - protein, 7 aa, synthetic construct
DVNRATR

SEQ ID NO: 172579 - protein, 7 aa, synthetic construct
VDNRAVR

SEQ ID NO: 172580 - protein, 7 aa, synthetic construct
KTNRGGD

SEQ ID NO: 172581 - protein, 7 aa, synthetic construct
YTTREGR

SEQ ID NO: 172582 - protein, 7 aa, synthetic construct
EKNRAQM

SEQ ID NO: 172583 - protein, 7 aa, synthetic construct
ETGSKGR

SEQ ID NO: 172584 - protein, 7 aa, synthetic construct
STNREGK

SEQ ID NO: 172585 - protein, 7 aa, synthetic construct
TDNRAAR

SEQ ID NO: 172586 - protein, 7 aa, synthetic construct
EKNRAVN

SEQ ID NO: 172587 - protein, 7 aa, synthetic construct
ENNKAGK

SEQ ID NO: 172588 - protein, 7 aa, synthetic construct
EGNVKGR

SEQ ID NO: 172589 - protein, 7 aa, synthetic construct
MTNRVDR

SEQ ID NO: 172590 - protein, 7 aa, synthetic construct
ETARAGR

SEQ ID NO: 172591 - protein, 7 aa, synthetic construct
YDNKAGR

SEQ ID NO: 172592 - protein, 7 aa, synthetic construct
DTNKVGR

SEQ ID NO: 172593 - protein, 7 aa, synthetic construct
ATERSGR

SEQ ID NO: 172594 - protein, 7 aa, synthetic construct
EVMKAGR

SEQ ID NO: 172595 - protein, 7 aa, synthetic construct
YTNREVR

SEQ ID NO: 172596 - protein, 7 aa, synthetic construct
GTNRDGK

SEQ ID NO: 172597 - protein, 7 aa, synthetic construct
EYKVAGR

SEQ ID NO: 172598 - protein, 7 aa, synthetic construct
RTEREGR

SEQ ID NO: 172599 - protein, 7 aa, synthetic construct
ESNKAAR

SEQ ID NO: 172600 - protein, 7 aa, synthetic construct
PTDRAVR

SEQ ID NO: 172601 - protein, 7 aa, synthetic construct
VTNAAHR

SEQ ID NO: 172602 - protein, 7 aa, synthetic construct
ESKMAGR

SEQ ID NO: 172603 - protein, 7 aa, synthetic construct
QTARAGG

SEQ ID NO: 172604 - protein, 7 aa, synthetic construct
ETLKAQR

SEQ ID NO: 172605 - protein, 7 aa, synthetic construct
EINRASK

SEQ ID NO: 172606 - protein, 7 aa, synthetic construct
GTIREGR

SEQ ID NO: 172607 - protein, 7 aa, synthetic construct
VTNVHGR

SEQ ID NO: 172608 - protein, 7 aa, synthetic construct
ERNPSGR

SEQ ID NO: 172609 - protein, 7 aa, synthetic construct
ETKTASR

SEQ ID NO: 172610 - protein, 7 aa, synthetic construct
EYQKAGR

SEQ ID NO: 172611 - protein, 7 aa, synthetic construct
ETKRTGS

SEQ ID NO: 172612 - protein, 7 aa, synthetic construct
EKNQANR

SEQ ID NO: 172613 - protein, 7 aa, synthetic construct
ETNRLAK

SEQ ID NO: 172614 - protein, 7 aa, synthetic construct
MTNREPR

SEQ ID NO: 172615 - protein, 7 aa, synthetic construct
EVNVRGR

SEQ ID NO: 172616 - protein, 7 aa, synthetic construct
ETNAGKR

SEQ ID NO: 172617 - protein, 7 aa, synthetic construct
MTHRAGG

SEQ ID NO: 172618 - protein, 7 aa, synthetic construct
ILNRAER

SEQ ID NO: 172619 - protein, 7 aa, synthetic construct
DTRTAGR

SEQ ID NO: 172620 - protein, 7 aa, synthetic construct
ERNAIGR

SEQ ID NO: 172621 - protein, 7 aa, synthetic construct
DTNRAIK

SEQ ID NO: 172622 - protein, 7 aa, synthetic construct
TENRASR

SEQ ID NO: 172623 - protein, 7 aa, synthetic construct
EKNRASI

SEQ ID NO: 172624 - protein, 7 aa, synthetic construct
EINNRGR

SEQ ID NO: 172625 - protein, 7 aa, synthetic construct
ENNLKGR

SEQ ID NO: 172626 - protein, 7 aa, synthetic construct
FTPRAER

SEQ ID NO: 172627 - protein, 7 aa, synthetic construct
GADRAGR

SEQ ID NO: 172628 - protein, 7 aa, synthetic construct
HTGGAGR

SEQ ID NO: 172629 - protein, 7 aa, synthetic construct
EKNIPGR

SEQ ID NO: 172630 - protein, 7 aa, synthetic construct
EQNKAMR

SEQ ID NO: 172631 - protein, 7 aa, synthetic construct
ITNRAAL

SEQ ID NO: 172632 - protein, 7 aa, synthetic construct
ATNERGR

SEQ ID NO: 172633 - protein, 7 aa, synthetic construct
EMAKAGR

SEQ ID NO: 172634 - protein, 7 aa, synthetic construct
EGNNKGR

SEQ ID NO: 172635 - protein, 7 aa, synthetic construct
ENNRKGV

SEQ ID NO: 172636 - protein, 7 aa, synthetic construct
HPDRAGR

SEQ ID NO: 172637 - protein, 7 aa, synthetic construct
EKFAAGR

SEQ ID NO: 172638 - protein, 7 aa, synthetic construct
LTARAER

SEQ ID NO: 172639 - protein, 7 aa, synthetic construct
ELNIKGR

SEQ ID NO: 172640 - protein, 7 aa, synthetic construct
EANRVGK

SEQ ID NO: 172641 - protein, 7 aa, synthetic construct
LRNEAGR

SEQ ID NO: 172642 - protein, 7 aa, synthetic construct
EKQRAGQ

SEQ ID NO: 172643 - protein, 7 aa, synthetic construct
IKNRAGD

SEQ ID NO: 172644 - protein, 7 aa, synthetic construct
AVNREGR

SEQ ID NO: 172645 - protein, 7 aa, synthetic construct
PTNRPER

SEQ ID NO: 172646 - protein, 7 aa, synthetic construct
DPTRAGR

SEQ ID NO: 172647 - protein, 7 aa, synthetic construct
ETNKARL

SEQ ID NO: 172648 - protein, 7 aa, synthetic construct
ESKSAGR

SEQ ID NO: 172649 - protein, 7 aa, synthetic construct
TDGRAGR

SEQ ID NO: 172650 - protein, 7 aa, synthetic construct
ITDRPGR

SEQ ID NO: 172651 - protein, 7 aa, synthetic construct
EVKSAGR

SEQ ID NO: 172652 - protein, 7 aa, synthetic construct
ETKRAQV

SEQ ID NO: 172653 - protein, 7 aa, synthetic construct
DFNKAGR

SEQ ID NO: 172654 - protein, 7 aa, synthetic construct
VDMRAGR

SEQ ID NO: 172655 - protein, 7 aa, synthetic construct
ELKLAGR

SEQ ID NO: 172656 - protein, 7 aa, synthetic construct
ETLKSGR

SEQ ID NO: 172657 - protein, 7 aa, synthetic construct
ETNKGQR

SEQ ID NO: 172658 - protein, 7 aa, synthetic construct
ITDRALR

SEQ ID NO: 172659 - protein, 7 aa, synthetic construct
ETARGPR

SEQ ID NO: 172660 - protein, 7 aa, synthetic construct
EKQRAGV

SEQ ID NO: 172661 - protein, 7 aa, synthetic construct
ETVAAKR

SEQ ID NO: 172662 - protein, 7 aa, synthetic construct
GTDRGGR

SEQ ID NO: 172663 - protein, 7 aa, synthetic construct
ETKRPGQ

SEQ ID NO: 172664 - protein, 7 aa, synthetic construct
ELNQRGR

SEQ ID NO: 172665 - protein, 7 aa, synthetic construct
ETLTKGR

SEQ ID NO: 172666 - protein, 7 aa, synthetic construct
DTARVGR

SEQ ID NO: 172667 - protein, 7 aa, synthetic construct
EVNRALK

SEQ ID NO: 172668 - protein, 7 aa, synthetic construct
EMNRAKM

SEQ ID NO: 172669 - protein, 7 aa, synthetic construct
NVNRAER

SEQ ID NO: 172670 - protein, 7 aa, synthetic construct
LTNRVER

SEQ ID NO: 172671 - protein, 7 aa, synthetic construct
EINRAKV

SEQ ID NO: 172672 - protein, 7 aa, synthetic construct
ETKPAMR

SEQ ID NO: 172673 - protein, 7 aa, synthetic construct
ETKRLGL

SEQ ID NO: 172674 - protein, 7 aa, synthetic construct
STVRAER

SEQ ID NO: 172675 - protein, 7 aa, synthetic construct
ETQMAKR

SEQ ID NO: 172676 - protein, 7 aa, synthetic construct
ATAREGR

SEQ ID NO: 172677 - protein, 7 aa, synthetic construct
LTNRMER

SEQ ID NO: 172678 - protein, 7 aa, synthetic construct
NTDRAPR

SEQ ID NO: 172679 - protein, 7 aa, synthetic construct
EMNLKGR

SEQ ID NO: 172680 - protein, 7 aa, synthetic construct
EKNQQGR

SEQ ID NO: 172681 - protein, 7 aa, synthetic construct
MENRALR

SEQ ID NO: 172682 - protein, 7 aa, synthetic construct
DTARAIR

SEQ ID NO: 172683 - protein, 7 aa, synthetic construct
STNREQR

SEQ ID NO: 172684 - protein, 7 aa, synthetic construct
YTNPASR

SEQ ID NO: 172685 - protein, 7 aa, synthetic construct
MEMRAGR

SEQ ID NO: 172686 - protein, 7 aa, synthetic construct
ETQRVPR

SEQ ID NO: 172687 - protein, 7 aa, synthetic construct
TTNRAHM

SEQ ID NO: 172688 - protein, 7 aa, synthetic construct
KTNRAEL

SEQ ID NO: 172689 - protein, 7 aa, synthetic construct
KENFAGR

SEQ ID NO: 172690 - protein, 7 aa, synthetic construct
IEMRAGR

SEQ ID NO: 172691 - protein, 7 aa, synthetic construct
ETMKPGR

SEQ ID NO: 172692 - protein, 7 aa, synthetic construct
EANTAKR

SEQ ID NO: 172693 - protein, 7 aa, synthetic construct
LTNRAHG

SEQ ID NO: 172694 - protein, 7 aa, synthetic construct
EINKAQR

SEQ ID NO: 172695 - protein, 7 aa, synthetic construct
VDNRAMR

SEQ ID NO: 172696 - protein, 7 aa, synthetic construct
FTNNAVR

SEQ ID NO: 172697 - protein, 7 aa, synthetic construct
EMNRAKT

SEQ ID NO: 172698 - protein, 7 aa, synthetic construct
GTVGAGR

SEQ ID NO: 172699 - protein, 7 aa, synthetic construct
EYNKATR

SEQ ID NO: 172700 - protein, 7 aa, synthetic construct
IENKAGR

SEQ ID NO: 172701 - protein, 7 aa, synthetic construct
GTMREGR

SEQ ID NO: 172702 - protein, 7 aa, synthetic construct
ELNRAKL

SEQ ID NO: 172703 - protein, 7 aa, synthetic construct
FVNRAGG

SEQ ID NO: 172704 - protein, 7 aa, synthetic construct
TTNREGK

SEQ ID NO: 172705 - protein, 7 aa, synthetic construct
EKNTAPR

SEQ ID NO: 172706 - protein, 7 aa, synthetic construct
DPNRANR

SEQ ID NO: 172707 - protein, 7 aa, synthetic construct
FTQREGR

SEQ ID NO: 172708 - protein, 7 aa, synthetic construct
EVRTAGR

SEQ ID NO: 172709 - protein, 7 aa, synthetic construct
ETQRAKP

SEQ ID NO: 172710 - protein, 7 aa, synthetic construct
ETNLKVR

SEQ ID NO: 172711 - protein, 7 aa, synthetic construct
EQNQAKR

SEQ ID NO: 172712 - protein, 7 aa, synthetic construct
EKQRAGS

SEQ ID NO: 172713 - protein, 7 aa, synthetic construct
ERPVAGR

SEQ ID NO: 172714 - protein, 7 aa, synthetic construct
ETPNARR

SEQ ID NO: 172715 - protein, 7 aa, synthetic construct
EVNNARR

SEQ ID NO: 172716 - protein, 7 aa, synthetic construct
ETARAKA

SEQ ID NO: 172717 - protein, 7 aa, synthetic construct
PTVRAGQ

SEQ ID NO: 172718 - protein, 7 aa, synthetic construct
LTPREGR

SEQ ID NO: 172719 - protein, 7 aa, synthetic construct
ETNRKQV

SEQ ID NO: 172720 - protein, 7 aa, synthetic construct
FTNRVER

SEQ ID NO: 172721 - protein, 7 aa, synthetic construct
YTNKDGR

SEQ ID NO: 172722 - protein, 7 aa, synthetic construct
IQNRAGG

SEQ ID NO: 172723 - protein, 7 aa, synthetic construct
DKNREGR

SEQ ID NO: 172724 - protein, 7 aa, synthetic construct
ERNIAGK

SEQ ID NO: 172725 - protein, 7 aa, synthetic construct
ITTRADR

SEQ ID NO: 172726 - protein, 7 aa, synthetic construct
DINRASR

SEQ ID NO: 172727 - protein, 7 aa, synthetic construct
RTEGAGR

SEQ ID NO: 172728 - protein, 7 aa, synthetic construct
EMTRGGR

SEQ ID NO: 172729 - protein, 7 aa, synthetic construct
ERNTTGR

SEQ ID NO: 172730 - protein, 7 aa, synthetic construct
EIKLAGR

SEQ ID NO: 172731 - protein, 7 aa, synthetic construct
STNRANN

SEQ ID NO: 172732 - protein, 7 aa, synthetic construct
EKNRAMN

SEQ ID NO: 172733 - protein, 7 aa, synthetic construct
EIRPAGR

SEQ ID NO: 172734 - protein, 7 aa, synthetic construct
VTQRAGG

SEQ ID NO: 172735 - protein, 7 aa, synthetic construct
VENRTGR

SEQ ID NO: 172736 - protein, 7 aa, synthetic construct
ENKLAGR

SEQ ID NO: 172737 - protein, 7 aa, synthetic construct
ESNAKGR

SEQ ID NO: 172738 - protein, 7 aa, synthetic construct
ETNSKIR

SEQ ID NO: 172739 - protein, 7 aa, synthetic construct
MVERAGR

SEQ ID NO: 172740 - protein, 7 aa, synthetic construct
ETKRANA

SEQ ID NO: 172741 - protein, 7 aa, synthetic construct
ERNVQGR

SEQ ID NO: 172742 - protein, 7 aa, synthetic construct
YTDRALR

SEQ ID NO: 172743 - protein, 7 aa, synthetic construct
QTPRAGQ

SEQ ID NO: 172744 - protein, 7 aa, synthetic construct
HDNKAGR

SEQ ID NO: 172745 - protein, 7 aa, synthetic construct
ERNQAGR

SEQ ID NO: 172746 - protein, 7 aa, synthetic construct
MTVRADR

SEQ ID NO: 172747 - protein, 7 aa, synthetic construct
PTNRADK

SEQ ID NO: 172748 - protein, 7 aa, synthetic construct
ETNTKQR

SEQ ID NO: 172749 - protein, 7 aa, synthetic construct
DGARAGR

SEQ ID NO: 172750 - protein, 7 aa, synthetic construct
AEVRAGR

SEQ ID NO: 172751 - protein, 7 aa, synthetic construct
EVKAAGR

SEQ ID NO: 172752 - protein, 7 aa, synthetic construct
ESNNAKR

SEQ ID NO: 172753 - protein, 7 aa, synthetic construct
DTNKALR

SEQ ID NO: 172754 - protein, 7 aa, synthetic construct
ETATKGR

SEQ ID NO: 172755 - protein, 7 aa, synthetic construct
LDNRAGR

SEQ ID NO: 172756 - protein, 7 aa, synthetic construct
EEKKAGR

SEQ ID NO: 172757 - protein, 7 aa, synthetic construct
EIKSAGR

SEQ ID NO: 172758 - protein, 7 aa, synthetic construct
ETKMAIR

SEQ ID NO: 172759 - protein, 7 aa, synthetic construct
ETVRAAK

SEQ ID NO: 172760 - protein, 7 aa, synthetic construct
ETSKSGR

SEQ ID NO: 172761 - protein, 7 aa, synthetic construct
EIKQAGR

SEQ ID NO: 172762 - protein, 7 aa, synthetic construct
ETRSAVR

SEQ ID NO: 172763 - protein, 7 aa, synthetic construct
KTNRADG

SEQ ID NO: 172764 - protein, 7 aa, synthetic construct
EMPRQGR

SEQ ID NO: 172765 - protein, 7 aa, synthetic construct
ENNKALR

SEQ ID NO: 172766 - protein, 7 aa, synthetic construct
ETNRMKT

SEQ ID NO: 172767 - protein, 7 aa, synthetic construct
ERNQAGK

SEQ ID NO: 172768 - protein, 7 aa, synthetic construct
DTARAGK

SEQ ID NO: 172769 - protein, 7 aa, synthetic construct
VDNRAQR

SEQ ID NO: 172770 - protein, 7 aa, synthetic construct
GTHRAGS

SEQ ID NO: 172771 - protein, 7 aa, synthetic construct
DTNRVTR

SEQ ID NO: 172772 - protein, 7 aa, synthetic construct
QTDRAIR

SEQ ID NO: 172773 - protein, 7 aa, synthetic construct
DANRALR

SEQ ID NO: 172774 - protein, 7 aa, synthetic construct
EANRAKP

SEQ ID NO: 172775 - protein, 7 aa, synthetic construct
DRNRAGG

SEQ ID NO: 172776 - protein, 7 aa, synthetic construct
ETKRMGI

SEQ ID NO: 172777 - protein, 7 aa, synthetic construct
ETNKVSR

SEQ ID NO: 172778 - protein, 7 aa, synthetic construct
FTSRAGG

SEQ ID NO: 172779 - protein, 7 aa, synthetic construct
ETVKIGR

SEQ ID NO: 172780 - protein, 7 aa, synthetic construct
ETNIKIR

SEQ ID NO: 172781 - protein, 7 aa, synthetic construct
DTAKAGR

SEQ ID NO: 172782 - protein, 7 aa, synthetic construct
ETQSKGR

SEQ ID NO: 172783 - protein, 7 aa, synthetic construct
MTNRVER

SEQ ID NO: 172784 - protein, 7 aa, synthetic construct
EKLRAGY

SEQ ID NO: 172785 - protein, 7 aa, synthetic construct
ETKGAAR

SEQ ID NO: 172786 - protein, 7 aa, synthetic construct
EKGVAGR

SEQ ID NO: 172787 - protein, 7 aa, synthetic construct
ATDRAAR

SEQ ID NO: 172788 - protein, 7 aa, synthetic construct
VQDRAGR

SEQ ID NO: 172789 - protein, 7 aa, synthetic construct
EKNMALR

SEQ ID NO: 172790 - protein, 7 aa, synthetic construct
RTDRDGR

SEQ ID NO: 172791 - protein, 7 aa, synthetic construct
PTDRALR

SEQ ID NO: 172792 - protein, 7 aa, synthetic construct
ESNKALR

SEQ ID NO: 172793 - protein, 7 aa, synthetic construct
ATERAQR

SEQ ID NO: 172794 - protein, 7 aa, synthetic construct
RTNNAER

SEQ ID NO: 172795 - protein, 7 aa, synthetic construct
PDTRAGR

SEQ ID NO: 172796 - protein, 7 aa, synthetic construct
EVNRPGK

SEQ ID NO: 172797 - protein, 7 aa, synthetic construct
EKNIANR

SEQ ID NO: 172798 - protein, 7 aa, synthetic construct
NTNRTDR

SEQ ID NO: 172799 - protein, 7 aa, synthetic construct
TDPRAGR

SEQ ID NO: 172800 - protein, 7 aa, synthetic construct
DTSKAGR

SEQ ID NO: 172801 - protein, 7 aa, synthetic construct
VTNRSER

SEQ ID NO: 172802 - protein, 7 aa, synthetic construct
ETAAAKR

SEQ ID NO: 172803 - protein, 7 aa, synthetic construct
EANKTGR

SEQ ID NO: 172804 - protein, 7 aa, synthetic construct
ETRAPGR

SEQ ID NO: 172805 - protein, 7 aa, synthetic construct
RTPDAGR

SEQ ID NO: 172806 - protein, 7 aa, synthetic construct
LTNRLER

SEQ ID NO: 172807 - protein, 7 aa, synthetic construct
EQNNRGR

SEQ ID NO: 172808 - protein, 7 aa, synthetic construct
ETKRGGF

SEQ ID NO: 172809 - protein, 7 aa, synthetic construct
KTNRLGD

SEQ ID NO: 172810 - protein, 7 aa, synthetic construct
ETKQALR

SEQ ID NO: 172811 - protein, 7 aa, synthetic construct
GLDRAGR

SEQ ID NO: 172812 - protein, 7 aa, synthetic construct
ETKRVGS

SEQ ID NO: 172813 - protein, 7 aa, synthetic construct
YANRAGG

SEQ ID NO: 172814 - protein, 7 aa, synthetic construct
DAGRAGR

SEQ ID NO: 172815 - protein, 7 aa, synthetic construct
KTNRAFE

SEQ ID NO: 172816 - protein, 7 aa, synthetic construct
ETSKALR

SEQ ID NO: 172817 - protein, 7 aa, synthetic construct
EAKPAGR

SEQ ID NO: 172818 - protein, 7 aa, synthetic construct
ETKRASV

SEQ ID NO: 172819 - protein, 7 aa, synthetic construct
ELAKAGR

SEQ ID NO: 172820 - protein, 7 aa, synthetic construct
KQNRAGD

SEQ ID NO: 172821 - protein, 7 aa, synthetic construct
EAKRAGS

SEQ ID NO: 172822 - protein, 7 aa, synthetic construct
ADNRAQR

SEQ ID NO: 172823 - protein, 7 aa, synthetic construct
EMKRDGR

SEQ ID NO: 172824 - protein, 7 aa, synthetic construct
ARNEAGR

SEQ ID NO: 172825 - protein, 7 aa, synthetic construct
QENRAMR

SEQ ID NO: 172826 - protein, 7 aa, synthetic construct
ETNKQAR

SEQ ID NO: 172827 - protein, 7 aa, synthetic construct
QTQRAER

SEQ ID NO: 172828 - protein, 7 aa, synthetic construct
EMNPRGR

SEQ ID NO: 172829 - protein, 7 aa, synthetic construct
TTDRSGR

SEQ ID NO: 172830 - protein, 7 aa, synthetic construct
EKNEAKR

SEQ ID NO: 172831 - protein, 7 aa, synthetic construct
LTERMGR

SEQ ID NO: 172832 - protein, 7 aa, synthetic construct
MTPRAER

SEQ ID NO: 172833 - protein, 7 aa, synthetic construct
ETTRTGK

SEQ ID NO: 172834 - protein, 7 aa, synthetic construct
ETNRPKA

SEQ ID NO: 172835 - protein, 7 aa, synthetic construct
ETNNKGR

SEQ ID NO: 172836 - protein, 7 aa, synthetic construct
ITPRAGH

SEQ ID NO: 172837 - protein, 7 aa, synthetic construct
ENNPKGR

SEQ ID NO: 172838 - protein, 7 aa, synthetic construct
YTPRADR

SEQ ID NO: 172839 - protein, 7 aa, synthetic construct
EKPREGR

SEQ ID NO: 172840 - protein, 7 aa, synthetic construct
EIKRAGT

SEQ ID NO: 172841 - protein, 7 aa, synthetic construct
ETKPQGR

SEQ ID NO: 172842 - protein, 7 aa, synthetic construct
EPKHAGR

SEQ ID NO: 172843 - protein, 7 aa, synthetic construct
ATHRAGA

SEQ ID NO: 172844 - protein, 7 aa, synthetic construct
FDNRASR

SEQ ID NO: 172845 - protein, 7 aa, synthetic construct
KINRAGE

SEQ ID NO: 172846 - protein, 7 aa, synthetic construct
EPVRQGR

SEQ ID NO: 172847 - protein, 7 aa, synthetic construct
LTERVGR

SEQ ID NO: 172848 - protein, 7 aa, synthetic construct
ENNRKGL

SEQ ID NO: 172849 - protein, 7 aa, synthetic construct
EPNNKGR

SEQ ID NO: 172850 - protein, 7 aa, synthetic construct
EMNRATK

SEQ ID NO: 172851 - protein, 7 aa, synthetic construct
EKGRAGS

SEQ ID NO: 172852 - protein, 7 aa, synthetic construct
IANREGR

SEQ ID NO: 172853 - protein, 7 aa, synthetic construct
ETVKAIR

SEQ ID NO: 172854 - protein, 7 aa, synthetic construct
LTDRMGR

SEQ ID NO: 172855 - protein, 7 aa, synthetic construct
ETIRAGK

SEQ ID NO: 172856 - protein, 7 aa, synthetic construct
ETMKANR

SEQ ID NO: 172857 - protein, 7 aa, synthetic construct
ETVPAKR

SEQ ID NO: 172858 - protein, 7 aa, synthetic construct
EMNNRGR

SEQ ID NO: 172859 - protein, 7 aa, synthetic construct
ETNKLPR

SEQ ID NO: 172860 - protein, 7 aa, synthetic construct
EVPRGGR

SEQ ID NO: 172861 - protein, 7 aa, synthetic construct
EKNRAVQ

SEQ ID NO: 172862 - protein, 7 aa, synthetic construct
EKQREGR

SEQ ID NO: 172863 - protein, 7 aa, synthetic construct
EVNGAKR

SEQ ID NO: 172864 - protein, 7 aa, synthetic construct
RTNREGT

SEQ ID NO: 172865 - protein, 7 aa, synthetic construct
RTNVDGR

SEQ ID NO: 172866 - protein, 7 aa, synthetic construct
EIKRAGY

SEQ ID NO: 172867 - protein, 7 aa, synthetic construct
EPNRRGV

SEQ ID NO: 172868 - protein, 7 aa, synthetic construct
ETRNIGR

SEQ ID NO: 172869 - protein, 7 aa, synthetic construct
ITNRAYQ

SEQ ID NO: 172870 - protein, 7 aa, synthetic construct
ETQARGR

SEQ ID NO: 172871 - protein, 7 aa, synthetic construct
ETNKAKY

SEQ ID NO: 172872 - protein, 7 aa, synthetic construct
EYNTAKR

SEQ ID NO: 172873 - protein, 7 aa, synthetic construct
EKNRMGG

SEQ ID NO: 172874 - protein, 7 aa, synthetic construct
PTHRAGG

SEQ ID NO: 172875 - protein, 7 aa, synthetic construct
ETNPAKR

SEQ ID NO: 172876 - protein, 7 aa, synthetic construct
MTNRGDR

SEQ ID NO: 172877 - protein, 7 aa, synthetic construct
EVNRGLR

SEQ ID NO: 172878 - protein, 7 aa, synthetic construct
ETTKALR

SEQ ID NO: 172879 - protein, 7 aa, synthetic construct
ETQLKGR

SEQ ID NO: 172880 - protein, 7 aa, synthetic construct
DTNRTSR

SEQ ID NO: 172881 - protein, 7 aa, synthetic construct
VANRADR

SEQ ID NO: 172882 - protein, 7 aa, synthetic construct
FTNRAHG

SEQ ID NO: 172883 - protein, 7 aa, synthetic construct
MTNRAHT

SEQ ID NO: 172884 - protein, 7 aa, synthetic construct
ETKRTGN

SEQ ID NO: 172885 - protein, 7 aa, synthetic construct
VTNREIR

SEQ ID NO: 172886 - protein, 7 aa, synthetic construct
ETPRGGR

SEQ ID NO: 172887 - protein, 7 aa, synthetic construct
ERNRIGG

SEQ ID NO: 172888 - protein, 7 aa, synthetic construct
VDARAGR

SEQ ID NO: 172889 - protein, 7 aa, synthetic construct
WTKDAGR

SEQ ID NO: 172890 - protein, 7 aa, synthetic construct
ETKPSGR

SEQ ID NO: 172891 - protein, 7 aa, synthetic construct
ADARAGR

SEQ ID NO: 172892 - protein, 7 aa, synthetic construct
ELNKALR

SEQ ID NO: 172893 - protein, 7 aa, synthetic construct
RTNPAER

SEQ ID NO: 172894 - protein, 7 aa, synthetic construct
VTPRADR

SEQ ID NO: 172895 - protein, 7 aa, synthetic construct
PTNRMER

SEQ ID NO: 172896 - protein, 7 aa, synthetic construct
LTNRESR

SEQ ID NO: 172897 - protein, 7 aa, synthetic construct
TTNRDNR

SEQ ID NO: 172898 - protein, 7 aa, synthetic construct
VTREAGR

SEQ ID NO: 172899 - protein, 7 aa, synthetic construct
DTNNAKR

SEQ ID NO: 172900 - protein, 7 aa, synthetic construct
LENRVGR

SEQ ID NO: 172901 - protein, 7 aa, synthetic construct
EFAKAGR

SEQ ID NO: 172902 - protein, 7 aa, synthetic construct
ETLRAKS

SEQ ID NO: 172903 - protein, 7 aa, synthetic construct
EFTKAGR

SEQ ID NO: 172904 - protein, 7 aa, synthetic construct
DTGRPGR

SEQ ID NO: 172905 - protein, 7 aa, synthetic construct
ELNRGPR

SEQ ID NO: 172906 - protein, 7 aa, synthetic construct
FTNTAAR

SEQ ID NO: 172907 - protein, 7 aa, synthetic construct
ETNKRGG

SEQ ID NO: 172908 - protein, 7 aa, synthetic construct
TENRALR

SEQ ID NO: 172909 - protein, 7 aa, synthetic construct
KTGRAGD

SEQ ID NO: 172910 - protein, 7 aa, synthetic construct
TTNRGDR

SEQ ID NO: 172911 - protein, 7 aa, synthetic construct
ELNKAGR

SEQ ID NO: 172912 - protein, 7 aa, synthetic construct
ETKRQGQ

SEQ ID NO: 172913 - protein, 7 aa, synthetic construct
TDNRAPR

SEQ ID NO: 172914 - protein, 7 aa, synthetic construct
EQNQKGR

SEQ ID NO: 172915 - protein, 7 aa, synthetic construct
EVARAGK

SEQ ID NO: 172916 - protein, 7 aa, synthetic construct
TTHRAGM

SEQ ID NO: 172917 - protein, 7 aa, synthetic construct
ETVKALR

SEQ ID NO: 172918 - protein, 7 aa, synthetic construct
DVVRAGR

SEQ ID NO: 172919 - protein, 7 aa, synthetic construct
KTNREER

SEQ ID NO: 172920 - protein, 7 aa, synthetic construct
ETNRTKP

SEQ ID NO: 172921 - protein, 7 aa, synthetic construct
VTTRADR

SEQ ID NO: 172922 - protein, 7 aa, synthetic construct
ETVKSGR

SEQ ID NO: 172923 - protein, 7 aa, synthetic construct
RINRAGE

SEQ ID NO: 172924 - protein, 7 aa, synthetic construct
ETKRALI

SEQ ID NO: 172925 - protein, 7 aa, synthetic construct
ATNRARE

SEQ ID NO: 172926 - protein, 7 aa, synthetic construct
STNERGR

SEQ ID NO: 172927 - protein, 7 aa, synthetic construct
EVNRSGK

SEQ ID NO: 172928 - protein, 7 aa, synthetic construct
ETKRIGQ

SEQ ID NO: 172929 - protein, 7 aa, synthetic construct
ETSVAKR

SEQ ID NO: 172930 - protein, 7 aa, synthetic construct
EQNRLGK

SEQ ID NO: 172931 - protein, 7 aa, synthetic construct
ETNKGAR

SEQ ID NO: 172932 - protein, 7 aa, synthetic construct
ETGIKGR

SEQ ID NO: 172933 - protein, 7 aa, synthetic construct
PEVRAGR

SEQ ID NO: 172934 - protein, 7 aa, synthetic construct
MSNREGR

SEQ ID NO: 172935 - protein, 7 aa, synthetic construct
VTNRARE

SEQ ID NO: 172936 - protein, 7 aa, synthetic construct
ETPRRGV

SEQ ID NO: 172937 - protein, 7 aa, synthetic construct
EANRAKI

SEQ ID NO: 172938 - protein, 7 aa, synthetic construct
GTSREGR

SEQ ID NO: 172939 - protein, 7 aa, synthetic construct
VEMRAGR

SEQ ID NO: 172940 - protein, 7 aa, synthetic construct
ITNRAER

SEQ ID NO: 172941 - protein, 7 aa, synthetic construct
ETKRTGI

SEQ ID NO: 172942 - protein, 7 aa, synthetic construct
ETKLPGR

SEQ ID NO: 172943 - protein, 7 aa, synthetic construct
VTDRPGR

SEQ ID NO: 172944 - protein, 7 aa, synthetic construct
IDIRAGR

SEQ ID NO: 172945 - protein, 7 aa, synthetic construct
EINRPGK

SEQ ID NO: 172946 - protein, 7 aa, synthetic construct
MTNRDGK

SEQ ID NO: 172947 - protein, 7 aa, synthetic construct
ETPRVGR

SEQ ID NO: 172948 - protein, 7 aa, synthetic construct
PDNRPGR

SEQ ID NO: 172949 - protein, 7 aa, synthetic construct
RTNREGL

SEQ ID NO: 172950 - protein, 7 aa, synthetic construct
HTGSAGR

SEQ ID NO: 172951 - protein, 7 aa, synthetic construct
QDGRAGR

SEQ ID NO: 172952 - protein, 7 aa, synthetic construct
ETKRAPF

SEQ ID NO: 172953 - protein, 7 aa, synthetic construct
ETKRMGQ

SEQ ID NO: 172954 - protein, 7 aa, synthetic construct
VTERAPR

SEQ ID NO: 172955 - protein, 7 aa, synthetic construct
NEPRAGR

SEQ ID NO: 172956 - protein, 7 aa, synthetic construct
GTNRAEK

SEQ ID NO: 172957 - protein, 7 aa, synthetic construct
TEIRAGR

SEQ ID NO: 172958 - protein, 7 aa, synthetic construct
NENRIGR

SEQ ID NO: 172959 - protein, 7 aa, synthetic construct
ALNRADR

SEQ ID NO: 172960 - protein, 7 aa, synthetic construct
EINKQGR

SEQ ID NO: 172961 - protein, 7 aa, synthetic construct
ETVRIGK

SEQ ID NO: 172962 - protein, 7 aa, synthetic construct
ERGTAGR

SEQ ID NO: 172963 - protein, 7 aa, synthetic construct
TTVRADR

SEQ ID NO: 172964 - protein, 7 aa, synthetic construct
EKFRAGG

SEQ ID NO: 172965 - protein, 7 aa, synthetic construct
ETVRQGK

SEQ ID NO: 172966 - protein, 7 aa, synthetic construct
EKNQTGR

SEQ ID NO: 172967 - protein, 7 aa, synthetic construct
DTNTARR

SEQ ID NO: 172968 - protein, 7 aa, synthetic construct
ETNKQNR

SEQ ID NO: 172969 - protein, 7 aa, synthetic construct
ETKMATR

SEQ ID NO: 172970 - protein, 7 aa, synthetic construct
GTNRIER

SEQ ID NO: 172971 - protein, 7 aa, synthetic construct
DTNRAKV

SEQ ID NO: 172972 - protein, 7 aa, synthetic construct
HTNRSGG

SEQ ID NO: 172973 - protein, 7 aa, synthetic construct
ETAVKGR

SEQ ID NO: 172974 - protein, 7 aa, synthetic construct
ETNKNMR

SEQ ID NO: 172975 - protein, 7 aa, synthetic construct
QTVHAGR

SEQ ID NO: 172976 - protein, 7 aa, synthetic construct
EANPAKR

SEQ ID NO: 172977 - protein, 7 aa, synthetic construct
ATDRAMR

SEQ ID NO: 172978 - protein, 7 aa, synthetic construct
QTERAPR

SEQ ID NO: 172979 - protein, 7 aa, synthetic construct
HTDKAGR

SEQ ID NO: 172980 - protein, 7 aa, synthetic construct
ETNKIGR

SEQ ID NO: 172981 - protein, 7 aa, synthetic construct
ANERAGR

SEQ ID NO: 172982 - protein, 7 aa, synthetic construct
ETMRAKA

SEQ ID NO: 172983 - protein, 7 aa, synthetic construct
DANRQGR

SEQ ID NO: 172984 - protein, 7 aa, synthetic construct
ETVKATR

SEQ ID NO: 172985 - protein, 7 aa, synthetic construct
EKARDGR

SEQ ID NO: 172986 - protein, 7 aa, synthetic construct
MTNRAKD

SEQ ID NO: 172987 - protein, 7 aa, synthetic construct
IRNEAGR

SEQ ID NO: 172988 - protein, 7 aa, synthetic construct
EQKRAGM

SEQ ID NO: 172989 - protein, 7 aa, synthetic construct
EPNRAFK

SEQ ID NO: 172990 - protein, 7 aa, synthetic construct
ETNRAKG

SEQ ID NO: 172991 - protein, 7 aa, synthetic construct
ETKRAMN

SEQ ID NO: 172992 - protein, 7 aa, synthetic construct
VTNRADK

SEQ ID NO: 172993 - protein, 7 aa, synthetic construct
DAQRAGR

SEQ ID NO: 172994 - protein, 7 aa, synthetic construct
ETNVRGR

SEQ ID NO: 172995 - protein, 7 aa, synthetic construct
MTERMGR

SEQ ID NO: 172996 - protein, 7 aa, synthetic construct
DNNRAIR

SEQ ID NO: 172997 - protein, 7 aa, synthetic construct
EMNKGGR

SEQ ID NO: 172998 - protein, 7 aa, synthetic construct
EKNRAQV

SEQ ID NO: 172999 - protein, 7 aa, synthetic construct
TTNREMR

SEQ ID NO: 173000 - protein, 7 aa, synthetic construct
FTNAAGR

SEQ ID NO: 173001 - protein, 7 aa, synthetic construct
TTNRDLR

SEQ ID NO: 173002 - protein, 7 aa, synthetic construct
EQNIKGR

SEQ ID NO: 173003 - protein, 7 aa, synthetic construct
QTGHAGR

SEQ ID NO: 173004 - protein, 7 aa, synthetic construct
VTDRAMR

SEQ ID NO: 173005 - protein, 7 aa, synthetic construct
FTNRDSR

SEQ ID NO: 173006 - protein, 7 aa, synthetic construct
MTERQGR

SEQ ID NO: 173007 - protein, 7 aa, synthetic construct
ETNKLQR

SEQ ID NO: 173008 - protein, 7 aa, synthetic construct
ETQAKGR

SEQ ID NO: 173009 - protein, 7 aa, synthetic construct
QTAREGR

SEQ ID NO: 173010 - protein, 7 aa, synthetic construct
ITNRAHQ

SEQ ID NO: 173011 - protein, 7 aa, synthetic construct
ELNRAKT

SEQ ID NO: 173012 - protein, 7 aa, synthetic construct
ETKNPGR

SEQ ID NO: 173013 - protein, 7 aa, synthetic construct
HTNDAKR

SEQ ID NO: 173014 - protein, 7 aa, synthetic construct
MEVRAGR

SEQ ID NO: 173015 - protein, 7 aa, synthetic construct
TTERGGR

SEQ ID NO: 173016 - protein, 7 aa, synthetic construct
ETPRAQK

SEQ ID NO: 173017 - protein, 7 aa, synthetic construct
ENNARGR

SEQ ID NO: 173018 - protein, 7 aa, synthetic construct
VTNQAHR

SEQ ID NO: 173019 - protein, 7 aa, synthetic construct
ERNVVGR

SEQ ID NO: 173020 - protein, 7 aa, synthetic construct
GPNRAER

SEQ ID NO: 173021 - protein, 7 aa, synthetic construct
KTNRAGD

SEQ ID NO: 173022 - protein, 7 aa, synthetic construct
LTNRARD

SEQ ID NO: 173023 - protein, 7 aa, synthetic construct
MTNRARE

SEQ ID NO: 173024 - protein, 7 aa, synthetic construct
VMNRAER

SEQ ID NO: 173025 - protein, 7 aa, synthetic construct
ETKRAQA

SEQ ID NO: 173026 - protein, 7 aa, synthetic construct
GTERASR

SEQ ID NO: 173027 - protein, 7 aa, synthetic construct
PVNREGR

SEQ ID NO: 173028 - protein, 7 aa, synthetic construct
LTNDARR

SEQ ID NO: 173029 - protein, 7 aa, synthetic construct
VTNRAHV

SEQ ID NO: 173030 - protein, 7 aa, synthetic construct
ETNRTIK

SEQ ID NO: 173031 - protein, 7 aa, synthetic construct
ERNQAPR

SEQ ID NO: 173032 - protein, 7 aa, synthetic construct
LENRAGK

SEQ ID NO: 173033 - protein, 7 aa, synthetic construct
ETNMVKR

SEQ ID NO: 173034 - protein, 7 aa, synthetic construct
TTHRAGG

SEQ ID NO: 173035 - protein, 7 aa, synthetic construct
ENNKGGR

SEQ ID NO: 173036 - protein, 7 aa, synthetic construct
EFNKSGR

SEQ ID NO: 173037 - protein, 7 aa, synthetic construct
ETNKNLR

SEQ ID NO: 173038 - protein, 7 aa, synthetic construct
TTNRQDR

SEQ ID NO: 173039 - protein, 7 aa, synthetic construct
EVNRGTR

SEQ ID NO: 173040 - protein, 7 aa, synthetic construct
PTERVGR

SEQ ID NO: 173041 - protein, 7 aa, synthetic construct
QTSRAGN

SEQ ID NO: 173042 - protein, 7 aa, synthetic construct
EKNVIGR

SEQ ID NO: 173043 - protein, 7 aa, synthetic construct
EPNRANK

SEQ ID NO: 173044 - protein, 7 aa, synthetic construct
EKMTAGR

SEQ ID NO: 173045 - protein, 7 aa, synthetic construct
TTERATR

SEQ ID NO: 173046 - protein, 7 aa, synthetic construct
LDMRAGR

SEQ ID NO: 173047 - protein, 7 aa, synthetic construct
ITNRAHL

SEQ ID NO: 173048 - protein, 7 aa, synthetic construct
LMDRAGR

SEQ ID NO: 173049 - protein, 7 aa, synthetic construct
ETNKARY

SEQ ID NO: 173050 - protein, 7 aa, synthetic construct
LRNRAGE

SEQ ID NO: 173051 - protein, 7 aa, synthetic construct
KTNEYGR

SEQ ID NO: 173052 - protein, 7 aa, synthetic construct
EPNKGGR

SEQ ID NO: 173053 - protein, 7 aa, synthetic construct
GTDRAMR

SEQ ID NO: 173054 - protein, 7 aa, synthetic construct
EKSRAGG

SEQ ID NO: 173055 - protein, 7 aa, synthetic construct
GTERAVR

SEQ ID NO: 173056 - protein, 7 aa, synthetic construct
SENRAPR

SEQ ID NO: 173057 - protein, 7 aa, synthetic construct
ETTKANR

SEQ ID NO: 173058 - protein, 7 aa, synthetic construct
EANRPGK

SEQ ID NO: 173059 - protein, 7 aa, synthetic construct
TTERQGR

SEQ ID NO: 173060 - protein, 7 aa, synthetic construct
ITSHAGR

SEQ ID NO: 173061 - protein, 7 aa, synthetic construct
ETLQKGR

SEQ ID NO: 173062 - protein, 7 aa, synthetic construct
YTNPATR

SEQ ID NO: 173063 - protein, 7 aa, synthetic construct
YTNRENR

SEQ ID NO: 173064 - protein, 7 aa, synthetic construct
DTNRALK

SEQ ID NO: 173065 - protein, 7 aa, synthetic construct
ELKRAGY

SEQ ID NO: 173066 - protein, 7 aa, synthetic construct
ETNKPMR

SEQ ID NO: 173067 - protein, 7 aa, synthetic construct
EFKGAGR

SEQ ID NO: 173068 - protein, 7 aa, synthetic construct
DTNRARA

SEQ ID NO: 173069 - protein, 7 aa, synthetic construct
ETPKASR

SEQ ID NO: 173070 - protein, 7 aa, synthetic construct
ENNNRGR

SEQ ID NO: 173071 - protein, 7 aa, synthetic construct
QTARADR

SEQ ID NO: 173072 - protein, 7 aa, synthetic construct
ETKRAGV

SEQ ID NO: 173073 - protein, 7 aa, synthetic construct
DMVRAGR

SEQ ID NO: 173074 - protein, 7 aa, synthetic construct
ETNRNKV

SEQ ID NO: 173075 - protein, 7 aa, synthetic construct
GVNRAER

SEQ ID NO: 173076 - protein, 7 aa, synthetic construct
NEARAGR

SEQ ID NO: 173077 - protein, 7 aa, synthetic construct
EKNRAVM

SEQ ID NO: 173078 - protein, 7 aa, synthetic construct
ETNKRGF

SEQ ID NO: 173079 - protein, 7 aa, synthetic construct
GTGRAGN

SEQ ID NO: 173080 - protein, 7 aa, synthetic construct
SVNRAER

SEQ ID NO: 173081 - protein, 7 aa, synthetic construct
KTNDYGR

SEQ ID NO: 173082 - protein, 7 aa, synthetic construct
GTTRAER

SEQ ID NO: 173083 - protein, 7 aa, synthetic construct
GTPHAGR

SEQ ID NO: 173084 - protein, 7 aa, synthetic construct
ETKRSGI

SEQ ID NO: 173085 - protein, 7 aa, synthetic construct
EMSRAGK

SEQ ID NO: 173086 - protein, 7 aa, synthetic construct
PTNRNER

SEQ ID NO: 173087 - protein, 7 aa, synthetic construct
ITERALR

SEQ ID NO: 173088 - protein, 7 aa, synthetic construct
TTNRETR

SEQ ID NO: 173089 - protein, 7 aa, synthetic construct
RANRAGE

SEQ ID NO: 173090 - protein, 7 aa, synthetic construct
ETNKRGL

SEQ ID NO: 173091 - protein, 7 aa, synthetic construct
DNTRAGR

SEQ ID NO: 173092 - protein, 7 aa, synthetic construct
KTNRAQE

SEQ ID NO: 173093 - protein, 7 aa, synthetic construct
ERNRTGG

SEQ ID NO: 173094 - protein, 7 aa, synthetic construct
DLNRAGR

SEQ ID NO: 173095 - protein, 7 aa, synthetic construct
EKQSAGR

SEQ ID NO: 173096 - protein, 7 aa, synthetic construct
ITPRAER

SEQ ID NO: 173097 - protein, 7 aa, synthetic construct
TSNRADR

SEQ ID NO: 173098 - protein, 7 aa, synthetic construct
QTDRAGR

SEQ ID NO: 173099 - protein, 7 aa, synthetic construct
ITNRNDR

SEQ ID NO: 173100 - protein, 7 aa, synthetic construct
FTPRAGG

SEQ ID NO: 173101 - protein, 7 aa, synthetic construct
ITNNAHR

SEQ ID NO: 173102 - protein, 7 aa, synthetic construct
YPNHAGR

SEQ ID NO: 173103 - protein, 7 aa, synthetic construct
FTNQAGK

SEQ ID NO: 173104 - protein, 7 aa, synthetic construct
DVQRAGR

SEQ ID NO: 173105 - protein, 7 aa, synthetic construct
HANRAGG

SEQ ID NO: 173106 - protein, 7 aa, synthetic construct
ELQRAGK

SEQ ID NO: 173107 - protein, 7 aa, synthetic construct
ETNRLNK

SEQ ID NO: 173108 - protein, 7 aa, synthetic construct
ENKNAGR

SEQ ID NO: 173109 - protein, 7 aa, synthetic construct
EGVKAGR

SEQ ID NO: 173110 - protein, 7 aa, synthetic construct
ETNRPGK

SEQ ID NO: 173111 - protein, 7 aa, synthetic construct
EINRGMR

SEQ ID NO: 173112 - protein, 7 aa, synthetic construct
LTNRPDR

SEQ ID NO: 173113 - protein, 7 aa, synthetic construct
ERNRIGA

SEQ ID NO: 173114 - protein, 7 aa, synthetic construct
YTNNALR

SEQ ID NO: 173115 - protein, 7 aa, synthetic construct
ETIKANR

SEQ ID NO: 173116 - protein, 7 aa, synthetic construct
TTNRMDR

SEQ ID NO: 173117 - protein, 7 aa, synthetic construct
VTNREPR

SEQ ID NO: 173118 - protein, 7 aa, synthetic construct
EINKAGR

SEQ ID NO: 173119 - protein, 7 aa, synthetic construct
QTNREGK

SEQ ID NO: 173120 - protein, 7 aa, synthetic construct
ETNRQKI

SEQ ID NO: 173121 - protein, 7 aa, synthetic construct
ETARAKV

SEQ ID NO: 173122 - protein, 7 aa, synthetic construct
ETNRGKG

SEQ ID NO: 173123 - protein, 7 aa, synthetic construct
ETSNKGR

SEQ ID NO: 173124 - protein, 7 aa, synthetic construct
EFNKAVR

SEQ ID NO: 173125 - protein, 7 aa, synthetic construct
ERNVGGR

SEQ ID NO: 173126 - protein, 7 aa, synthetic construct
DGNRAVR

SEQ ID NO: 173127 - protein, 7 aa, synthetic construct
EVNRAPK

SEQ ID NO: 173128 - protein, 7 aa, synthetic construct
ETNKANR

SEQ ID NO: 173129 - protein, 7 aa, synthetic construct
ETKRLGT

SEQ ID NO: 173130 - protein, 7 aa, synthetic construct
EPPRVGR

SEQ ID NO: 173131 - protein, 7 aa, synthetic construct
EARVAGR

SEQ ID NO: 173132 - protein, 7 aa, synthetic construct
YTNRAEK

SEQ ID NO: 173133 - protein, 7 aa, synthetic construct
ERNKAGM

SEQ ID NO: 173134 - protein, 7 aa, synthetic construct
ETNKGSR

SEQ ID NO: 173135 - protein, 7 aa, synthetic construct
TDNRAVR

SEQ ID NO: 173136 - protein, 7 aa, synthetic construct
MMNRADR

SEQ ID NO: 173137 - protein, 7 aa, synthetic construct
EKNQAMR

SEQ ID NO: 173138 - protein, 7 aa, synthetic construct
EKNAAAR

SEQ ID NO: 173139 - protein, 7 aa, synthetic construct
EKPRAGM

SEQ ID NO: 173140 - protein, 7 aa, synthetic construct
QTTRAGQ

SEQ ID NO: 173141 - protein, 7 aa, synthetic construct
LTERAMR

SEQ ID NO: 173142 - protein, 7 aa, synthetic construct
EQNVKGR

SEQ ID NO: 173143 - protein, 7 aa, synthetic construct
NDNRAGK

SEQ ID NO: 173144 - protein, 7 aa, synthetic construct
YTNKADR

SEQ ID NO: 173145 - protein, 7 aa, synthetic construct
EKQRAGM

SEQ ID NO: 173146 - protein, 7 aa, synthetic construct
EVKQAGR

SEQ ID NO: 173147 - protein, 7 aa, synthetic construct
GTNRTDR

SEQ ID NO: 173148 - protein, 7 aa, synthetic construct
ETSRLGK

SEQ ID NO: 173149 - protein, 7 aa, synthetic construct
QDTRAGR

SEQ ID NO: 173150 - protein, 7 aa, synthetic construct
HTNPANR

SEQ ID NO: 173151 - protein, 7 aa, synthetic construct
KTNYEGR

SEQ ID NO: 173152 - protein, 7 aa, synthetic construct
DAIRAGR

SEQ ID NO: 173153 - protein, 7 aa, synthetic construct
ETRNPGR

SEQ ID NO: 173154 - protein, 7 aa, synthetic construct
GQDRAGR

SEQ ID NO: 173155 - protein, 7 aa, synthetic construct
GTNRVER

SEQ ID NO: 173156 - protein, 7 aa, synthetic construct
ETNRGKV

SEQ ID NO: 173157 - protein, 7 aa, synthetic construct
VTRDAGR

SEQ ID NO: 173158 - protein, 7 aa, synthetic construct
LVNREGR

SEQ ID NO: 173159 - protein, 7 aa, synthetic construct
ETNKKDR

SEQ ID NO: 173160 - protein, 7 aa, synthetic construct
ETNTLKR

SEQ ID NO: 173161 - protein, 7 aa, synthetic construct
ETQRIPR

SEQ ID NO: 173162 - protein, 7 aa, synthetic construct
ETKRAFA

SEQ ID NO: 173163 - protein, 7 aa, synthetic construct
QTNRHGG

SEQ ID NO: 173164 - protein, 7 aa, synthetic construct
ERNKAGG

SEQ ID NO: 173165 - protein, 7 aa, synthetic construct
TTQRADR

SEQ ID NO: 173166 - protein, 7 aa, synthetic construct
ERNVATR

SEQ ID NO: 173167 - protein, 7 aa, synthetic construct
NDNRATR

SEQ ID NO: 173168 - protein, 7 aa, synthetic construct
RTNTAER

SEQ ID NO: 173169 - protein, 7 aa, synthetic construct
RTNLADR

SEQ ID NO: 173170 - protein, 7 aa, synthetic construct
ETKRANV

SEQ ID NO: 173171 - protein, 7 aa, synthetic construct
LTERAAR

SEQ ID NO: 173172 - protein, 7 aa, synthetic construct
ETVKVGR

SEQ ID NO: 173173 - protein, 7 aa, synthetic construct
ENNRVGK

SEQ ID NO: 173174 - protein, 7 aa, synthetic construct
EPNPAKR

SEQ ID NO: 173175 - protein, 7 aa, synthetic construct
YTNDARR

SEQ ID NO: 173176 - protein, 7 aa, synthetic construct
EINKAIR

SEQ ID NO: 173177 - protein, 7 aa, synthetic construct
ENNIKGR

SEQ ID NO: 173178 - protein, 7 aa, synthetic construct
EPQRTGR

SEQ ID NO: 173179 - protein, 7 aa, synthetic construct
ETRKAGG

SEQ ID NO: 173180 - protein, 7 aa, synthetic construct
IHNIAGR

SEQ ID NO: 173181 - protein, 7 aa, synthetic construct
RTNVADR

SEQ ID NO: 173182 - protein, 7 aa, synthetic construct
EKVRAGY

SEQ ID NO: 173183 - protein, 7 aa, synthetic construct
QENRVGR

SEQ ID NO: 173184 - protein, 7 aa, synthetic construct
EGNKQGR

SEQ ID NO: 173185 - protein, 7 aa, synthetic construct
PKNRAGD

SEQ ID NO: 173186 - protein, 7 aa, synthetic construct
ETKVASR

SEQ ID NO: 173187 - protein, 7 aa, synthetic construct
ETKRAQT

SEQ ID NO: 173188 - protein, 7 aa, synthetic construct
MTGRADR

SEQ ID NO: 173189 - protein, 7 aa, synthetic construct
LGNRADR

SEQ ID NO: 173190 - protein, 7 aa, synthetic construct
ETKLAAR

SEQ ID NO: 173191 - protein, 7 aa, synthetic construct
EMNKASR

SEQ ID NO: 173192 - protein, 7 aa, synthetic construct
YTDKAGR

SEQ ID NO: 173193 - protein, 7 aa, synthetic construct
ATQRADR

SEQ ID NO: 173194 - protein, 7 aa, synthetic construct
ETTRAPK

SEQ ID NO: 173195 - protein, 7 aa, synthetic construct
EMNRAPR

SEQ ID NO: 173196 - protein, 7 aa, synthetic construct
DVNRASR

SEQ ID NO: 173197 - protein, 7 aa, synthetic construct
HTNRTGG

SEQ ID NO: 173198 - protein, 7 aa, synthetic construct
MTNNAHR

SEQ ID NO: 173199 - protein, 7 aa, synthetic construct
EINRAKM

SEQ ID NO: 173200 - protein, 7 aa, synthetic construct
EKNVMGR

SEQ ID NO: 173201 - protein, 7 aa, synthetic construct
EKPRAGS

SEQ ID NO: 173202 - protein, 7 aa, synthetic construct
ESNKMGR

SEQ ID NO: 173203 - protein, 7 aa, synthetic construct
LADRAGR

SEQ ID NO: 173204 - protein, 7 aa, synthetic construct
DTDRKGR

SEQ ID NO: 173205 - protein, 7 aa, synthetic construct
ETPRANK

SEQ ID NO: 173206 - protein, 7 aa, synthetic construct
PTERIGR

SEQ ID NO: 173207 - protein, 7 aa, synthetic construct
EKNIAGR

SEQ ID NO: 173208 - protein, 7 aa, synthetic construct
EIRTAGR

SEQ ID NO: 173209 - protein, 7 aa, synthetic construct
FTPRAGQ

SEQ ID NO: 173210 - protein, 7 aa, synthetic construct
DTNKQGR

SEQ ID NO: 173211 - protein, 7 aa, synthetic construct
MDNRANR

SEQ ID NO: 173212 - protein, 7 aa, synthetic construct
DTKLAGR

SEQ ID NO: 173213 - protein, 7 aa, synthetic construct
ELNLKGR

SEQ ID NO: 173214 - protein, 7 aa, synthetic construct
ETSKATR

SEQ ID NO: 173215 - protein, 7 aa, synthetic construct
PTNRNDR

SEQ ID NO: 173216 - protein, 7 aa, synthetic construct
ITNRMER

SEQ ID NO: 173217 - protein, 7 aa, synthetic construct
EINRAGR

SEQ ID NO: 173218 - protein, 7 aa, synthetic construct
ETNRIKL

SEQ ID NO: 173219 - protein, 7 aa, synthetic construct
ETKRAFG

SEQ ID NO: 173220 - protein, 7 aa, synthetic construct
IPNRADR

SEQ ID NO: 173221 - protein, 7 aa, synthetic construct
HTGRAGT

SEQ ID NO: 173222 - protein, 7 aa, synthetic construct
ETVRARP

SEQ ID NO: 173223 - protein, 7 aa, synthetic construct
EPRNAGR

SEQ ID NO: 173224 - protein, 7 aa, synthetic construct
ATNREVR

SEQ ID NO: 173225 - protein, 7 aa, synthetic construct
ETNFKGK

SEQ ID NO: 173226 - protein, 7 aa, synthetic construct
IAERAGR

SEQ ID NO: 173227 - protein, 7 aa, synthetic construct
DTGRAGR

SEQ ID NO: 173228 - protein, 7 aa, synthetic construct
IENRAQR

SEQ ID NO: 173229 - protein, 7 aa, synthetic construct
NINRADR

SEQ ID NO: 173230 - protein, 7 aa, synthetic construct
ETKQSGR

SEQ ID NO: 173231 - protein, 7 aa, synthetic construct
EKRDAGR

SEQ ID NO: 173232 - protein, 7 aa, synthetic construct
VTDRAAR

SEQ ID NO: 173233 - protein, 7 aa, synthetic construct
EMNRVGK

SEQ ID NO: 173234 - protein, 7 aa, synthetic construct
EVRGAGR

SEQ ID NO: 173235 - protein, 7 aa, synthetic construct
RTNTDGR

SEQ ID NO: 173236 - protein, 7 aa, synthetic construct
LETRAGR

SEQ ID NO: 173237 - protein, 7 aa, synthetic construct
EVQRTGR

SEQ ID NO: 173238 - protein, 7 aa, synthetic construct
ETAKLGR

SEQ ID NO: 173239 - protein, 7 aa, synthetic construct
LTSREGR

SEQ ID NO: 173240 - protein, 7 aa, synthetic construct
ETNKNVR

SEQ ID NO: 173241 - protein, 7 aa, synthetic construct
EPNRAGK

SEQ ID NO: 173242 - protein, 7 aa, synthetic construct
ETNRVQK

SEQ ID NO: 173243 - protein, 7 aa, synthetic construct
ETMKAMR

SEQ ID NO: 173244 - protein, 7 aa, synthetic construct
EQNRVGK

SEQ ID NO: 173245 - protein, 7 aa, synthetic construct
NDTRAGR

SEQ ID NO: 173246 - protein, 7 aa, synthetic construct
MTSREGR

SEQ ID NO: 173247 - protein, 7 aa, synthetic construct
QTKRAGD

SEQ ID NO: 173248 - protein, 7 aa, synthetic construct
EKNRAAI

SEQ ID NO: 173249 - protein, 7 aa, synthetic construct
EVNKAFR

SEQ ID NO: 173250 - protein, 7 aa, synthetic construct
ETNMGKR

SEQ ID NO: 173251 - protein, 7 aa, synthetic construct
NINREGR

SEQ ID NO: 173252 - protein, 7 aa, synthetic construct
ETNKARS

SEQ ID NO: 173253 - protein, 7 aa, synthetic construct
NVDRAGR

SEQ ID NO: 173254 - protein, 7 aa, synthetic construct
ITNRDNR

SEQ ID NO: 173255 - protein, 7 aa, synthetic construct
GTQREGR

SEQ ID NO: 173256 - protein, 7 aa, synthetic construct
ETKFAGK

SEQ ID NO: 173257 - protein, 7 aa, synthetic construct
LDSRAGR

SEQ ID NO: 173258 - protein, 7 aa, synthetic construct
VTNYAGR

SEQ ID NO: 173259 - protein, 7 aa, synthetic construct
EINRGVR

SEQ ID NO: 173260 - protein, 7 aa, synthetic construct
DTNRTAR

SEQ ID NO: 173261 - protein, 7 aa, synthetic construct
ETNRPAK

SEQ ID NO: 173262 - protein, 7 aa, synthetic construct
MTNRELR

SEQ ID NO: 173263 - protein, 7 aa, synthetic construct
ETQRAMK

SEQ ID NO: 173264 - protein, 7 aa, synthetic construct
FADRAGR

SEQ ID NO: 173265 - protein, 7 aa, synthetic construct
ETGKAIR

SEQ ID NO: 173266 - protein, 7 aa, synthetic construct
SENRAVR

SEQ ID NO: 173267 - protein, 7 aa, synthetic construct
TTVRAER

SEQ ID NO: 173268 - protein, 7 aa, synthetic construct
EIPRQGR

SEQ ID NO: 173269 - protein, 7 aa, synthetic construct
ERNAALR

SEQ ID NO: 173270 - protein, 7 aa, synthetic construct
QINREGR

SEQ ID NO: 173271 - protein, 7 aa, synthetic construct
YTSRAER

SEQ ID NO: 173272 - protein, 7 aa, synthetic construct
ETRAQGR

SEQ ID NO: 173273 - protein, 7 aa, synthetic construct
ETKREVR

SEQ ID NO: 173274 - protein, 7 aa, synthetic construct
EPRAAGR

SEQ ID NO: 173275 - protein, 7 aa, synthetic construct
ATNREMR

SEQ ID NO: 173276 - protein, 7 aa, synthetic construct
ELNRANK

SEQ ID NO: 173277 - protein, 7 aa, synthetic construct
QTNRVDR

SEQ ID NO: 173278 - protein, 7 aa, synthetic construct
EKNTSGR

SEQ ID NO: 173279 - protein, 7 aa, synthetic construct
QTSRAGG

SEQ ID NO: 173280 - protein, 7 aa, synthetic construct
HTNNAPR

SEQ ID NO: 173281 - protein, 7 aa, synthetic construct
ETRIPGR

SEQ ID NO: 173282 - protein, 7 aa, synthetic construct
DTTRAAR

SEQ ID NO: 173283 - protein, 7 aa, synthetic construct
EVIKAGR

SEQ ID NO: 173284 - protein, 7 aa, synthetic construct
NENRVGR

SEQ ID NO: 173285 - protein, 7 aa, synthetic construct
VTKRAGD

SEQ ID NO: 173286 - protein, 7 aa, synthetic construct
FTERAAR

SEQ ID NO: 173287 - protein, 7 aa, synthetic construct
LANYAGR

SEQ ID NO: 173288 - protein, 7 aa, synthetic construct
ELNQKGR

SEQ ID NO: 173289 - protein, 7 aa, synthetic construct
EAARAGK

SEQ ID NO: 173290 - protein, 7 aa, synthetic construct
EPKVAGR

SEQ ID NO: 173291 - protein, 7 aa, synthetic construct
YTNPANR

SEQ ID NO: 173292 - protein, 7 aa, synthetic construct
ETNRLLK

SEQ ID NO: 173293 - protein, 7 aa, synthetic construct
TTNDARR

SEQ ID NO: 173294 - protein, 7 aa, synthetic construct
MTNREVR

SEQ ID NO: 173295 - protein, 7 aa, synthetic construct
TGNREGR

SEQ ID NO: 173296 - protein, 7 aa, synthetic construct
STNRGER

SEQ ID NO: 173297 - protein, 7 aa, synthetic construct
EKNAAPR

SEQ ID NO: 173298 - protein, 7 aa, synthetic construct
LTDRVGR

SEQ ID NO: 173299 - protein, 7 aa, synthetic construct
DSPRAGR

SEQ ID NO: 173300 - protein, 7 aa, synthetic construct
TTHRAGA

SEQ ID NO: 173301 - protein, 7 aa, synthetic construct
ETNRGAK

SEQ ID NO: 173302 - protein, 7 aa, synthetic construct
ETKRFGG

SEQ ID NO: 173303 - protein, 7 aa, synthetic construct
VTNRETR

SEQ ID NO: 173304 - protein, 7 aa, synthetic construct
ETNTAKR

SEQ ID NO: 173305 - protein, 7 aa, synthetic construct
MANRADR

SEQ ID NO: 173306 - protein, 7 aa, synthetic construct
VNNRAER

SEQ ID NO: 173307 - protein, 7 aa, synthetic construct
ETATAKR

SEQ ID NO: 173308 - protein, 7 aa, synthetic construct
ETNITKR

SEQ ID NO: 173309 - protein, 7 aa, synthetic construct
ETPRVGK

SEQ ID NO: 173310 - protein, 7 aa, synthetic construct
LTHSAGR

SEQ ID NO: 173311 - protein, 7 aa, synthetic construct
EPNRAKI

SEQ ID NO: 173312 - protein, 7 aa, synthetic construct
ETASKGR

SEQ ID NO: 173313 - protein, 7 aa, synthetic construct
ELARAGK

SEQ ID NO: 173314 - protein, 7 aa, synthetic construct
ITNREMR

SEQ ID NO: 173315 - protein, 7 aa, synthetic construct
EKIREGR

SEQ ID NO: 173316 - protein, 7 aa, synthetic construct
RTNQEGR

SEQ ID NO: 173317 - protein, 7 aa, synthetic construct
EVPRAGR

SEQ ID NO: 173318 - protein, 7 aa, synthetic construct
ETRTAPR

SEQ ID NO: 173319 - protein, 7 aa, synthetic construct
DTMRAGK

SEQ ID NO: 173320 - protein, 7 aa, synthetic construct
ELPRGGR

SEQ ID NO: 173321 - protein, 7 aa, synthetic construct
ETKRAAV

SEQ ID NO: 173322 - protein, 7 aa, synthetic construct
GTNQHGR

SEQ ID NO: 173323 - protein, 7 aa, synthetic construct
FTERANR

SEQ ID NO: 173324 - protein, 7 aa, synthetic construct
TTDRAAR

SEQ ID NO: 173325 - protein, 7 aa, synthetic construct
ETTRAKV

SEQ ID NO: 173326 - protein, 7 aa, synthetic construct
ETKRAVT

SEQ ID NO: 173327 - protein, 7 aa, synthetic construct
ETNTKGR

SEQ ID NO: 173328 - protein, 7 aa, synthetic construct
EMNKAIR

SEQ ID NO: 173329 - protein, 7 aa, synthetic construct
ATNRNER

SEQ ID NO: 173330 - protein, 7 aa, synthetic construct
LLERAGR

SEQ ID NO: 173331 - protein, 7 aa, synthetic construct
ETQKPGR

SEQ ID NO: 173332 - protein, 7 aa, synthetic construct
EINQRGR

SEQ ID NO: 173333 - protein, 7 aa, synthetic construct
YTNAANR

SEQ ID NO: 173334 - protein, 7 aa, synthetic construct
EVPKAGR

SEQ ID NO: 173335 - protein, 7 aa, synthetic construct
EFKVAGR

SEQ ID NO: 173336 - protein, 7 aa, synthetic construct
GSKYKET

SEQ ID NO: 173337 - protein, 7 aa, synthetic construct
GEKVIRT

SEQ ID NO: 173338 - protein, 7 aa, synthetic construct
GHKPLIT

SEQ ID NO: 173339 - protein, 7 aa, synthetic construct
QEKPKTV

SEQ ID NO: 173340 - protein, 7 aa, synthetic construct
GEVKKFL

SEQ ID NO: 173341 - protein, 7 aa, synthetic construct
GESPKKI

SEQ ID NO: 173342 - protein, 7 aa, synthetic construct
GMKPRFE

SEQ ID NO: 173343 - protein, 7 aa, synthetic construct
AEKPKVN

SEQ ID NO: 173344 - protein, 7 aa, synthetic construct
GGKPKDS

SEQ ID NO: 173345 - protein, 7 aa, synthetic construct
GEQVKKT

SEQ ID NO: 173346 - protein, 7 aa, synthetic construct
GEKPRMF

SEQ ID NO: 173347 - protein, 7 aa, synthetic construct
GENKKFF

SEQ ID NO: 173348 - protein, 7 aa, synthetic construct
REKNIFT

SEQ ID NO: 173349 - protein, 7 aa, synthetic construct
GFKVKFD

SEQ ID NO: 173350 - protein, 7 aa, synthetic construct
HEKPKSM

SEQ ID NO: 173351 - protein, 7 aa, synthetic construct
DIKPKFI

SEQ ID NO: 173352 - protein, 7 aa, synthetic construct
GEKPLHK

SEQ ID NO: 173353 - protein, 7 aa, synthetic construct
GEKPKSL

SEQ ID NO: 173354 - protein, 7 aa, synthetic construct
TDKPKFA

SEQ ID NO: 173355 - protein, 7 aa, synthetic construct
GQKPKYD

SEQ ID NO: 173356 - protein, 7 aa, synthetic construct
GEKRLFN

SEQ ID NO: 173357 - protein, 7 aa, synthetic construct
YEQPKFK

SEQ ID NO: 173358 - protein, 7 aa, synthetic construct
TEPPKFK

SEQ ID NO: 173359 - protein, 7 aa, synthetic construct
GEKIKVW

SEQ ID NO: 173360 - protein, 7 aa, synthetic construct
QEKPNRT

SEQ ID NO: 173361 - protein, 7 aa, synthetic construct
GIGHKFT

SEQ ID NO: 173362 - protein, 7 aa, synthetic construct
DAKPRFT

SEQ ID NO: 173363 - protein, 7 aa, synthetic construct
FEKPKAL

SEQ ID NO: 173364 - protein, 7 aa, synthetic construct
QEKPKSY

SEQ ID NO: 173365 - protein, 7 aa, synthetic construct
PEKHKFS

SEQ ID NO: 173366 - protein, 7 aa, synthetic construct
AESPKFR

SEQ ID NO: 173367 - protein, 7 aa, synthetic construct
GESIKKT

SEQ ID NO: 173368 - protein, 7 aa, synthetic construct
AERPKLT

SEQ ID NO: 173369 - protein, 7 aa, synthetic construct
GIHPKFG

SEQ ID NO: 173370 - protein, 7 aa, synthetic construct
DKPPKFT

SEQ ID NO: 173371 - protein, 7 aa, synthetic construct
GDKPKHY

SEQ ID NO: 173372 - protein, 7 aa, synthetic construct
DQKPKFL

SEQ ID NO: 173373 - protein, 7 aa, synthetic construct
TEKRGFT

SEQ ID NO: 173374 - protein, 7 aa, synthetic construct
GELPKMR

SEQ ID NO: 173375 - protein, 7 aa, synthetic construct
DIKPKFM

SEQ ID NO: 173376 - protein, 7 aa, synthetic construct
GEKVKSW

SEQ ID NO: 173377 - protein, 7 aa, synthetic construct
GERQKFA

SEQ ID NO: 173378 - protein, 7 aa, synthetic construct
NERPKFG

SEQ ID NO: 173379 - protein, 7 aa, synthetic construct
GENRKIT

SEQ ID NO: 173380 - protein, 7 aa, synthetic construct
ESKPKPT

SEQ ID NO: 173381 - protein, 7 aa, synthetic construct
GEKWKPG

SEQ ID NO: 173382 - protein, 7 aa, synthetic construct
MEKTKFF

SEQ ID NO: 173383 - protein, 7 aa, synthetic construct
PEKPKHS

SEQ ID NO: 173384 - protein, 7 aa, synthetic construct
PETPKFK

SEQ ID NO: 173385 - protein, 7 aa, synthetic construct
GEKRVVT

SEQ ID NO: 173386 - protein, 7 aa, synthetic construct
DNKPKFT

SEQ ID NO: 173387 - protein, 7 aa, synthetic construct
SEKYKFA

SEQ ID NO: 173388 - protein, 7 aa, synthetic construct
GIYPKST

SEQ ID NO: 173389 - protein, 7 aa, synthetic construct
GEVPKPR

SEQ ID NO: 173390 - protein, 7 aa, synthetic construct
MHKPKFD

SEQ ID NO: 173391 - protein, 7 aa, synthetic construct
NMKPKDT

SEQ ID NO: 173392 - protein, 7 aa, synthetic construct
TEKPKFI

SEQ ID NO: 173393 - protein, 7 aa, synthetic construct
MEKPKTS

SEQ ID NO: 173394 - protein, 7 aa, synthetic construct
GISHKFT

SEQ ID NO: 173395 - protein, 7 aa, synthetic construct
AEKPKLL

SEQ ID NO: 173396 - protein, 7 aa, synthetic construct
HEKPKNY

SEQ ID NO: 173397 - protein, 7 aa, synthetic construct
GEAPKRG

SEQ ID NO: 173398 - protein, 7 aa, synthetic construct
VEKPKYF

SEQ ID NO: 173399 - protein, 7 aa, synthetic construct
AEKPKSA

SEQ ID NO: 173400 - protein, 7 aa, synthetic construct
QENPKKT

SEQ ID NO: 173401 - protein, 7 aa, synthetic construct
SDKPKFQ

SEQ ID NO: 173402 - protein, 7 aa, synthetic construct
GEVIKKT

SEQ ID NO: 173403 - protein, 7 aa, synthetic construct
MEKPKHY

SEQ ID NO: 173404 - protein, 7 aa, synthetic construct
GGGPKFN

SEQ ID NO: 173405 - protein, 7 aa, synthetic construct
REEPKRT

SEQ ID NO: 173406 - protein, 7 aa, synthetic construct
GDKPKPL

SEQ ID NO: 173407 - protein, 7 aa, synthetic construct
GFKIKFE

SEQ ID NO: 173408 - protein, 7 aa, synthetic construct
EAKPKST

SEQ ID NO: 173409 - protein, 7 aa, synthetic construct
GEKYKMS

SEQ ID NO: 173410 - protein, 7 aa, synthetic construct
VEKPKQY

SEQ ID NO: 173411 - protein, 7 aa, synthetic construct
QERPKFI

SEQ ID NO: 173412 - protein, 7 aa, synthetic construct
GEMIKRT

SEQ ID NO: 173413 - protein, 7 aa, synthetic construct
DQKPKFY

SEQ ID NO: 173414 - protein, 7 aa, synthetic construct
NEGPKFK

SEQ ID NO: 173415 - protein, 7 aa, synthetic construct
GELPKKN

SEQ ID NO: 173416 - protein, 7 aa, synthetic construct
GEKPFKY

SEQ ID NO: 173417 - protein, 7 aa, synthetic construct
HEKPKTS

SEQ ID NO: 173418 - protein, 7 aa, synthetic construct
AEKPKHG

SEQ ID NO: 173419 - protein, 7 aa, synthetic construct
GEKRNFV

SEQ ID NO: 173420 - protein, 7 aa, synthetic construct
TEKPKHS

SEQ ID NO: 173421 - protein, 7 aa, synthetic construct
GHKPMFG

SEQ ID NO: 173422 - protein, 7 aa, synthetic construct
GEKPIGR

SEQ ID NO: 173423 - protein, 7 aa, synthetic construct
TYKPKFD

SEQ ID NO: 173424 - protein, 7 aa, synthetic construct
TEKPKTW

SEQ ID NO: 173425 - protein, 7 aa, synthetic construct
YEKHKFM

SEQ ID NO: 173426 - protein, 7 aa, synthetic construct
GEIGKKT

SEQ ID NO: 173427 - protein, 7 aa, synthetic construct
YEMPKRT

SEQ ID NO: 173428 - protein, 7 aa, synthetic construct
DQKPKYT

SEQ ID NO: 173429 - protein, 7 aa, synthetic construct
GDKPRFN

SEQ ID NO: 173430 - protein, 7 aa, synthetic construct
VEKPKIF

SEQ ID NO: 173431 - protein, 7 aa, synthetic construct
PEKPRMT

SEQ ID NO: 173432 - protein, 7 aa, synthetic construct
NEKPKWA

SEQ ID NO: 173433 - protein, 7 aa, synthetic construct
GERPKSM

SEQ ID NO: 173434 - protein, 7 aa, synthetic construct
EQKPKYT

SEQ ID NO: 173435 - protein, 7 aa, synthetic construct
TENPKFR

SEQ ID NO: 173436 - protein, 7 aa, synthetic construct
GEKLKWG

SEQ ID NO: 173437 - protein, 7 aa, synthetic construct
GEKPIAR

SEQ ID NO: 173438 - protein, 7 aa, synthetic construct
WEKIKAT

SEQ ID NO: 173439 - protein, 7 aa, synthetic construct
AEKPKFF

SEQ ID NO: 173440 - protein, 7 aa, synthetic construct
KEVPKFV

SEQ ID NO: 173441 - protein, 7 aa, synthetic construct
GRKEKET

SEQ ID NO: 173442 - protein, 7 aa, synthetic construct
QEKPKNV

SEQ ID NO: 173443 - protein, 7 aa, synthetic construct
PEKPKNQ

SEQ ID NO: 173444 - protein, 7 aa, synthetic construct
MEKPKGW

SEQ ID NO: 173445 - protein, 7 aa, synthetic construct
SERPKFN

SEQ ID NO: 173446 - protein, 7 aa, synthetic construct
PEKPKHF

SEQ ID NO: 173447 - protein, 7 aa, synthetic construct
GEKGVFR

SEQ ID NO: 173448 - protein, 7 aa, synthetic construct
GEKPKMM

SEQ ID NO: 173449 - protein, 7 aa, synthetic construct
YEMPKFK

SEQ ID NO: 173450 - protein, 7 aa, synthetic construct
QEKPKYM

SEQ ID NO: 173451 - protein, 7 aa, synthetic construct
QDKPKFA

SEQ ID NO: 173452 - protein, 7 aa, synthetic construct
ETKPKST

SEQ ID NO: 173453 - protein, 7 aa, synthetic construct
DFKPKPT

SEQ ID NO: 173454 - protein, 7 aa, synthetic construct
TEKHKYT

SEQ ID NO: 173455 - protein, 7 aa, synthetic construct
AEKAKFF

SEQ ID NO: 173456 - protein, 7 aa, synthetic construct
EEKKKFN

SEQ ID NO: 173457 - protein, 7 aa, synthetic construct
GTHPKFV

SEQ ID NO: 173458 - protein, 7 aa, synthetic construct
GEKVRST

SEQ ID NO: 173459 - protein, 7 aa, synthetic construct
GEKPKSV

SEQ ID NO: 173460 - protein, 7 aa, synthetic construct
AERPKFI

SEQ ID NO: 173461 - protein, 7 aa, synthetic construct
GERPKSF

SEQ ID NO: 173462 - protein, 7 aa, synthetic construct
GETPKRQ

SEQ ID NO: 173463 - protein, 7 aa, synthetic construct
MEKPTRT

SEQ ID NO: 173464 - protein, 7 aa, synthetic construct
DEKQKFR

SEQ ID NO: 173465 - protein, 7 aa, synthetic construct
EGKTKFT

SEQ ID NO: 173466 - protein, 7 aa, synthetic construct
GEKPAFR

SEQ ID NO: 173467 - protein, 7 aa, synthetic construct
GEQPKLK

SEQ ID NO: 173468 - protein, 7 aa, synthetic construct
HEKPKVQ

SEQ ID NO: 173469 - protein, 7 aa, synthetic construct
WEKGKFQ

SEQ ID NO: 173470 - protein, 7 aa, synthetic construct
GEPRKNT

SEQ ID NO: 173471 - protein, 7 aa, synthetic construct
NEKPKSV

SEQ ID NO: 173472 - protein, 7 aa, synthetic construct
GETPKRM

SEQ ID NO: 173473 - protein, 7 aa, synthetic construct
GQKPRET

SEQ ID NO: 173474 - protein, 7 aa, synthetic construct
GEPMKRT

SEQ ID NO: 173475 - protein, 7 aa, synthetic construct
GENPKIR

SEQ ID NO: 173476 - protein, 7 aa, synthetic construct
GEKPTIR

SEQ ID NO: 173477 - protein, 7 aa, synthetic construct
GMHPKFS

SEQ ID NO: 173478 - protein, 7 aa, synthetic construct
GPIPKYT

SEQ ID NO: 173479 - protein, 7 aa, synthetic construct
EMKPKFI

SEQ ID NO: 173480 - protein, 7 aa, synthetic construct
GNKKDFT

SEQ ID NO: 173481 - protein, 7 aa, synthetic construct
GESLKFK

SEQ ID NO: 173482 - protein, 7 aa, synthetic construct
MMKPKFE

SEQ ID NO: 173483 - protein, 7 aa, synthetic construct
YETPKRT

SEQ ID NO: 173484 - protein, 7 aa, synthetic construct
FDKPKFM

SEQ ID NO: 173485 - protein, 7 aa, synthetic construct
PEKKQFT

SEQ ID NO: 173486 - protein, 7 aa, synthetic construct
AEKPTRT

SEQ ID NO: 173487 - protein, 7 aa, synthetic construct
GVQPKFG

SEQ ID NO: 173488 - protein, 7 aa, synthetic construct
DMKPKFA

SEQ ID NO: 173489 - protein, 7 aa, synthetic construct
KEHPKPT

SEQ ID NO: 173490 - protein, 7 aa, synthetic construct
TDKPKFM

SEQ ID NO: 173491 - protein, 7 aa, synthetic construct
GEKNKTW

SEQ ID NO: 173492 - protein, 7 aa, synthetic construct
PEKPKAV

SEQ ID NO: 173493 - protein, 7 aa, synthetic construct
GEKRLVT

SEQ ID NO: 173494 - protein, 7 aa, synthetic construct
GEKRQQT

SEQ ID NO: 173495 - protein, 7 aa, synthetic construct
FEKFKNT

SEQ ID NO: 173496 - protein, 7 aa, synthetic construct
PEKPRFP

SEQ ID NO: 173497 - protein, 7 aa, synthetic construct
MMKPKFD

SEQ ID NO: 173498 - protein, 7 aa, synthetic construct
VEKPKYS

SEQ ID NO: 173499 - protein, 7 aa, synthetic construct
YEKPTFR

SEQ ID NO: 173500 - protein, 7 aa, synthetic construct
PENPKFK

SEQ ID NO: 173501 - protein, 7 aa, synthetic construct
DEKPKNR

SEQ ID NO: 173502 - protein, 7 aa, synthetic construct
SEIPKFK

SEQ ID NO: 173503 - protein, 7 aa, synthetic construct
GEQMKFK

SEQ ID NO: 173504 - protein, 7 aa, synthetic construct
VDKPKFL

SEQ ID NO: 173505 - protein, 7 aa, synthetic construct
GEKMKDR

SEQ ID NO: 173506 - protein, 7 aa, synthetic construct
NENPKFK

SEQ ID NO: 173507 - protein, 7 aa, synthetic construct
GEMKKFN

SEQ ID NO: 173508 - protein, 7 aa, synthetic construct
GLKGHFT

SEQ ID NO: 173509 - protein, 7 aa, synthetic construct
GDKPKII

SEQ ID NO: 173510 - protein, 7 aa, synthetic construct
DSKPKFF

SEQ ID NO: 173511 - protein, 7 aa, synthetic construct
GETRKIT

SEQ ID NO: 173512 - protein, 7 aa, synthetic construct
GKKGDFT

SEQ ID NO: 173513 - protein, 7 aa, synthetic construct
YELPKRT

SEQ ID NO: 173514 - protein, 7 aa, synthetic construct
QEVRKFT

SEQ ID NO: 173515 - protein, 7 aa, synthetic construct
LFKPKFD

SEQ ID NO: 173516 - protein, 7 aa, synthetic construct
FEKVKFM

SEQ ID NO: 173517 - protein, 7 aa, synthetic construct
GDNKKFT

SEQ ID NO: 173518 - protein, 7 aa, synthetic construct
GEHKKST

SEQ ID NO: 173519 - protein, 7 aa, synthetic construct
GEKPIKF

SEQ ID NO: 173520 - protein, 7 aa, synthetic construct
GENPKPR

SEQ ID NO: 173521 - protein, 7 aa, synthetic construct
PEKPKVF

SEQ ID NO: 173522 - protein, 7 aa, synthetic construct
GDKAKFY

SEQ ID NO: 173523 - protein, 7 aa, synthetic construct
REHPKTT

SEQ ID NO: 173524 - protein, 7 aa, synthetic construct
EKTPKFT

SEQ ID NO: 173525 - protein, 7 aa, synthetic construct
GEKPMKM

SEQ ID NO: 173526 - protein, 7 aa, synthetic construct
TEKPKSS

SEQ ID NO: 173527 - protein, 7 aa, synthetic construct
YEKPKDR

SEQ ID NO: 173528 - protein, 7 aa, synthetic construct
RENPKST

SEQ ID NO: 173529 - protein, 7 aa, synthetic construct
FEKPRFA

SEQ ID NO: 173530 - protein, 7 aa, synthetic construct
DEKPKTK

SEQ ID NO: 173531 - protein, 7 aa, synthetic construct
LEKPRMT

SEQ ID NO: 173532 - protein, 7 aa, synthetic construct
YSNPKFT

SEQ ID NO: 173533 - protein, 7 aa, synthetic construct
GSVPKFG

SEQ ID NO: 173534 - protein, 7 aa, synthetic construct
DIKPKFN

SEQ ID NO: 173535 - protein, 7 aa, synthetic construct
TEKYKFQ

SEQ ID NO: 173536 - protein, 7 aa, synthetic construct
SEIPKRT

SEQ ID NO: 173537 - protein, 7 aa, synthetic construct
FESPKRT

SEQ ID NO: 173538 - protein, 7 aa, synthetic construct
SEKFKFS

SEQ ID NO: 173539 - protein, 7 aa, synthetic construct
AEKPKTG

SEQ ID NO: 173540 - protein, 7 aa, synthetic construct
GEAKKFM

SEQ ID NO: 173541 - protein, 7 aa, synthetic construct
GEHKKFI

SEQ ID NO: 173542 - protein, 7 aa, synthetic construct
GNKFKDT

SEQ ID NO: 173543 - protein, 7 aa, synthetic construct
GEANKFK

SEQ ID NO: 173544 - protein, 7 aa, synthetic construct
GAHPKLT

SEQ ID NO: 173545 - protein, 7 aa, synthetic construct
GERVKFT

SEQ ID NO: 173546 - protein, 7 aa, synthetic construct
AEKGKFY

SEQ ID NO: 173547 - protein, 7 aa, synthetic construct
GEKPKSF

SEQ ID NO: 173548 - protein, 7 aa, synthetic construct
GEKQKHF

SEQ ID NO: 173549 - protein, 7 aa, synthetic construct
MDKPKFM

SEQ ID NO: 173550 - protein, 7 aa, synthetic construct
SEKPTRT

SEQ ID NO: 173551 - protein, 7 aa, synthetic construct
GENRKFA

SEQ ID NO: 173552 - protein, 7 aa, synthetic construct
GAKYKDT

SEQ ID NO: 173553 - protein, 7 aa, synthetic construct
AEKPKPW

SEQ ID NO: 173554 - protein, 7 aa, synthetic construct
GRKPDFI

SEQ ID NO: 173555 - protein, 7 aa, synthetic construct
DQKIKFT

SEQ ID NO: 173556 - protein, 7 aa, synthetic construct
TEKPKGW

SEQ ID NO: 173557 - protein, 7 aa, synthetic construct
PEKPKAL

SEQ ID NO: 173558 - protein, 7 aa, synthetic construct
HAKPKFD

SEQ ID NO: 173559 - protein, 7 aa, synthetic construct
AERPKPT

SEQ ID NO: 173560 - protein, 7 aa, synthetic construct
GEKRKDA

SEQ ID NO: 173561 - protein, 7 aa, synthetic construct
PEKSKFQ

SEQ ID NO: 173562 - protein, 7 aa, synthetic construct
GEKFKFT

SEQ ID NO: 173563 - protein, 7 aa, synthetic construct
REKPYST

SEQ ID NO: 173564 - protein, 7 aa, synthetic construct
GEARKFM

SEQ ID NO: 173565 - protein, 7 aa, synthetic construct
MEKPKQY

SEQ ID NO: 173566 - protein, 7 aa, synthetic construct
GERPQKT

SEQ ID NO: 173567 - protein, 7 aa, synthetic construct
GAVPKYT

SEQ ID NO: 173568 - protein, 7 aa, synthetic construct
MEKPKMY

SEQ ID NO: 173569 - protein, 7 aa, synthetic construct
AEKPKMM

SEQ ID NO: 173570 - protein, 7 aa, synthetic construct
QEMPKKT

SEQ ID NO: 173571 - protein, 7 aa, synthetic construct
PERPKFN

SEQ ID NO: 173572 - protein, 7 aa, synthetic construct
GEIPKNR

SEQ ID NO: 173573 - protein, 7 aa, synthetic construct
GEKPRLN

SEQ ID NO: 173574 - protein, 7 aa, synthetic construct
GPHPKAT

SEQ ID NO: 173575 - protein, 7 aa, synthetic construct
GEKVTFR

SEQ ID NO: 173576 - protein, 7 aa, synthetic construct
GDKPKMT

SEQ ID NO: 173577 - protein, 7 aa, synthetic construct
GHKMKDT

SEQ ID NO: 173578 - protein, 7 aa, synthetic construct
GRKPDFS

SEQ ID NO: 173579 - protein, 7 aa, synthetic construct
EAKPKTT

SEQ ID NO: 173580 - protein, 7 aa, synthetic construct
IEKPKRE

SEQ ID NO: 173581 - protein, 7 aa, synthetic construct
QEKPKVY

SEQ ID NO: 173582 - protein, 7 aa, synthetic construct
DMKNKFT

SEQ ID NO: 173583 - protein, 7 aa, synthetic construct
LDKPKWT

SEQ ID NO: 173584 - protein, 7 aa, synthetic construct
YEKNKFM

SEQ ID NO: 173585 - protein, 7 aa, synthetic construct
TEKPKNS

SEQ ID NO: 173586 - protein, 7 aa, synthetic construct
TEKPKTF

SEQ ID NO: 173587 - protein, 7 aa, synthetic construct
GYKVKFD

SEQ ID NO: 173588 - protein, 7 aa, synthetic construct
YEKYKST

SEQ ID NO: 173589 - protein, 7 aa, synthetic construct
GETPKRN

SEQ ID NO: 173590 - protein, 7 aa, synthetic construct
NFKPKFD

SEQ ID NO: 173591 - protein, 7 aa, synthetic construct
AETPKFR

SEQ ID NO: 173592 - protein, 7 aa, synthetic construct
SEKPKWG

SEQ ID NO: 173593 - protein, 7 aa, synthetic construct
AEKHKFT

SEQ ID NO: 173594 - protein, 7 aa, synthetic construct
REHPKLT

SEQ ID NO: 173595 - protein, 7 aa, synthetic construct
SEKHKFV

SEQ ID NO: 173596 - protein, 7 aa, synthetic construct
IEKPKYM

SEQ ID NO: 173597 - protein, 7 aa, synthetic construct
GFKQKFD

SEQ ID NO: 173598 - protein, 7 aa, synthetic construct
NEKPKQW

SEQ ID NO: 173599 - protein, 7 aa, synthetic construct
REKPIFV

SEQ ID NO: 173600 - protein, 7 aa, synthetic construct
TEKYKFP

SEQ ID NO: 173601 - protein, 7 aa, synthetic construct
GAPHKFT

SEQ ID NO: 173602 - protein, 7 aa, synthetic construct
GDRIKFT

SEQ ID NO: 173603 - protein, 7 aa, synthetic construct
AEKPKVI

SEQ ID NO: 173604 - protein, 7 aa, synthetic construct
GGKPKQD

SEQ ID NO: 173605 - protein, 7 aa, synthetic construct
QSMPKFT

SEQ ID NO: 173606 - protein, 7 aa, synthetic construct
ETRPKFT

SEQ ID NO: 173607 - protein, 7 aa, synthetic construct
IEKPKWQ

SEQ ID NO: 173608 - protein, 7 aa, synthetic construct
GEKKYIT

SEQ ID NO: 173609 - protein, 7 aa, synthetic construct
WEKMKST

SEQ ID NO: 173610 - protein, 7 aa, synthetic construct
GEHKKIT

SEQ ID NO: 173611 - protein, 7 aa, synthetic construct
TETRKFT

SEQ ID NO: 173612 - protein, 7 aa, synthetic construct
GEKPPFR

SEQ ID NO: 173613 - protein, 7 aa, synthetic construct
QEKPKVM

SEQ ID NO: 173614 - protein, 7 aa, synthetic construct
ADKPKIT

SEQ ID NO: 173615 - protein, 7 aa, synthetic construct
PEKPKSV

SEQ ID NO: 173616 - protein, 7 aa, synthetic construct
HFKPKFE

SEQ ID NO: 173617 - protein, 7 aa, synthetic construct
MEKPKHI

SEQ ID NO: 173618 - protein, 7 aa, synthetic construct
GDKPKYA

SEQ ID NO: 173619 - protein, 7 aa, synthetic construct
PEKPKYG

SEQ ID NO: 173620 - protein, 7 aa, synthetic construct
GEMPKRV

SEQ ID NO: 173621 - protein, 7 aa, synthetic construct
GPHPKTT

SEQ ID NO: 173622 - protein, 7 aa, synthetic construct
GEIPKMK

SEQ ID NO: 173623 - protein, 7 aa, synthetic construct
AMKPKFE

SEQ ID NO: 173624 - protein, 7 aa, synthetic construct
YEKPKSY

SEQ ID NO: 173625 - protein, 7 aa, synthetic construct
NTKPKFD

SEQ ID NO: 173626 - protein, 7 aa, synthetic construct
EQKPKQT

SEQ ID NO: 173627 - protein, 7 aa, synthetic construct
GERPKAI

SEQ ID NO: 173628 - protein, 7 aa, synthetic construct
PEKNKFQ

SEQ ID NO: 173629 - protein, 7 aa, synthetic construct
GPKPKHD

SEQ ID NO: 173630 - protein, 7 aa, synthetic construct
GERPKFI

SEQ ID NO: 173631 - protein, 7 aa, synthetic construct
TEKPKFL

SEQ ID NO: 173632 - protein, 7 aa, synthetic construct
REGTKFT

SEQ ID NO: 173633 - protein, 7 aa, synthetic construct
NEVRKFT

SEQ ID NO: 173634 - protein, 7 aa, synthetic construct
GERMKAT

SEQ ID NO: 173635 - protein, 7 aa, synthetic construct
GSVPKYT

SEQ ID NO: 173636 - protein, 7 aa, synthetic construct
GDKKKDT

SEQ ID NO: 173637 - protein, 7 aa, synthetic construct
QEKPKIF

SEQ ID NO: 173638 - protein, 7 aa, synthetic construct
GDKPPFR

SEQ ID NO: 173639 - protein, 7 aa, synthetic construct
GEKPKMI

SEQ ID NO: 173640 - protein, 7 aa, synthetic construct
MEGRKFT

SEQ ID NO: 173641 - protein, 7 aa, synthetic construct
GERPKQV

SEQ ID NO: 173642 - protein, 7 aa, synthetic construct
GEKRAQT

SEQ ID NO: 173643 - protein, 7 aa, synthetic construct
DKKPQFT

SEQ ID NO: 173644 - protein, 7 aa, synthetic construct
LEKMRFT

SEQ ID NO: 173645 - protein, 7 aa, synthetic construct
DEKPKPK

SEQ ID NO: 173646 - protein, 7 aa, synthetic construct
GEKPTRA

SEQ ID NO: 173647 - protein, 7 aa, synthetic construct
GQKNKDT

SEQ ID NO: 173648 - protein, 7 aa, synthetic construct
GPHPKNT

SEQ ID NO: 173649 - protein, 7 aa, synthetic construct
GDKPKAQ

SEQ ID NO: 173650 - protein, 7 aa, synthetic construct
VQKPKFD

SEQ ID NO: 173651 - protein, 7 aa, synthetic construct
TEKPKWQ

SEQ ID NO: 173652 - protein, 7 aa, synthetic construct
GEQPKNR

SEQ ID NO: 173653 - protein, 7 aa, synthetic construct
REKPIFA

SEQ ID NO: 173654 - protein, 7 aa, synthetic construct
AEKPKVA

SEQ ID NO: 173655 - protein, 7 aa, synthetic construct
GESPKKV

SEQ ID NO: 173656 - protein, 7 aa, synthetic construct
AEKYKFA

SEQ ID NO: 173657 - protein, 7 aa, synthetic construct
HEKPPRT

SEQ ID NO: 173658 - protein, 7 aa, synthetic construct
GDKYKAT

SEQ ID NO: 173659 - protein, 7 aa, synthetic construct
GEQPKMK

SEQ ID NO: 173660 - protein, 7 aa, synthetic construct
KERPKDT

SEQ ID NO: 173661 - protein, 7 aa, synthetic construct
HEKPKSS

SEQ ID NO: 173662 - protein, 7 aa, synthetic construct
DFKPKFS

SEQ ID NO: 173663 - protein, 7 aa, synthetic construct
GEKPQTR

SEQ ID NO: 173664 - protein, 7 aa, synthetic construct
DMKPKFQ

SEQ ID NO: 173665 - protein, 7 aa, synthetic construct
GERPKIA

SEQ ID NO: 173666 - protein, 7 aa, synthetic construct
GEKPKMN

SEQ ID NO: 173667 - protein, 7 aa, synthetic construct
HEKPKGQ

SEQ ID NO: 173668 - protein, 7 aa, synthetic construct
REKPKAD

SEQ ID NO: 173669 - protein, 7 aa, synthetic construct
NESRKFT

SEQ ID NO: 173670 - protein, 7 aa, synthetic construct
GEKPINR

SEQ ID NO: 173671 - protein, 7 aa, synthetic construct
GEKPRSM

SEQ ID NO: 173672 - protein, 7 aa, synthetic construct
GEINKFK

SEQ ID NO: 173673 - protein, 7 aa, synthetic construct
GESFKKT

SEQ ID NO: 173674 - protein, 7 aa, synthetic construct
TEKPKHT

SEQ ID NO: 173675 - protein, 7 aa, synthetic construct
QDKPKFQ

SEQ ID NO: 173676 - protein, 7 aa, synthetic construct
GRKDKFE

SEQ ID NO: 173677 - protein, 7 aa, synthetic construct
FEKPKMG

SEQ ID NO: 173678 - protein, 7 aa, synthetic construct
NEKPKYI

SEQ ID NO: 173679 - protein, 7 aa, synthetic construct
GELGKKT

SEQ ID NO: 173680 - protein, 7 aa, synthetic construct
GEAPKVR

SEQ ID NO: 173681 - protein, 7 aa, synthetic construct
GEKKMFM

SEQ ID NO: 173682 - protein, 7 aa, synthetic construct
GENPKMR

SEQ ID NO: 173683 - protein, 7 aa, synthetic construct
TEVPKRT

SEQ ID NO: 173684 - protein, 7 aa, synthetic construct
AESKKFT

SEQ ID NO: 173685 - protein, 7 aa, synthetic construct
PEKFKNT

SEQ ID NO: 173686 - protein, 7 aa, synthetic construct
GEKPYLK

SEQ ID NO: 173687 - protein, 7 aa, synthetic construct
FEKPKSN

SEQ ID NO: 173688 - protein, 7 aa, synthetic construct
KELPKFT

SEQ ID NO: 173689 - protein, 7 aa, synthetic construct
YEKPKHM

SEQ ID NO: 173690 - protein, 7 aa, synthetic construct
GTKPRFD

SEQ ID NO: 173691 - protein, 7 aa, synthetic construct
GEGKKTT

SEQ ID NO: 173692 - protein, 7 aa, synthetic construct
QEKPKAH

SEQ ID NO: 173693 - protein, 7 aa, synthetic construct
PEKPKQM

SEQ ID NO: 173694 - protein, 7 aa, synthetic construct
KEHPRFT

SEQ ID NO: 173695 - protein, 7 aa, synthetic construct
RENPKNT

SEQ ID NO: 173696 - protein, 7 aa, synthetic construct
GEKPKAY

SEQ ID NO: 173697 - protein, 7 aa, synthetic construct
DVKPKFN

SEQ ID NO: 173698 - protein, 7 aa, synthetic construct
GEMPRKT

SEQ ID NO: 173699 - protein, 7 aa, synthetic construct
GSKPRDT

SEQ ID NO: 173700 - protein, 7 aa, synthetic construct
GEGKKFS

SEQ ID NO: 173701 - protein, 7 aa, synthetic construct
AEKPKVM

SEQ ID NO: 173702 - protein, 7 aa, synthetic construct
EFKPKTT

SEQ ID NO: 173703 - protein, 7 aa, synthetic construct
NEKPSRT

SEQ ID NO: 173704 - protein, 7 aa, synthetic construct
GETPRKT

SEQ ID NO: 173705 - protein, 7 aa, synthetic construct
GEKRPGT

SEQ ID NO: 173706 - protein, 7 aa, synthetic construct
AESPKKT

SEQ ID NO: 173707 - protein, 7 aa, synthetic construct
GEPFKKT

SEQ ID NO: 173708 - protein, 7 aa, synthetic construct
TSHPKFT

SEQ ID NO: 173709 - protein, 7 aa, synthetic construct
GYKPKDS

SEQ ID NO: 173710 - protein, 7 aa, synthetic construct
SEKPRIT

SEQ ID NO: 173711 - protein, 7 aa, synthetic construct
TEKPKSW

SEQ ID NO: 173712 - protein, 7 aa, synthetic construct
NEKPKWQ

SEQ ID NO: 173713 - protein, 7 aa, synthetic construct
QEKPKAI

SEQ ID NO: 173714 - protein, 7 aa, synthetic construct
GDKKHFT

SEQ ID NO: 173715 - protein, 7 aa, synthetic construct
SHKPKFE

SEQ ID NO: 173716 - protein, 7 aa, synthetic construct
MEKPRNT

SEQ ID NO: 173717 - protein, 7 aa, synthetic construct
GEKRIFA

SEQ ID NO: 173718 - protein, 7 aa, synthetic construct
DTKPKFP

SEQ ID NO: 173719 - protein, 7 aa, synthetic construct
VEKPKSS

SEQ ID NO: 173720 - protein, 7 aa, synthetic construct
SEKYKFP

SEQ ID NO: 173721 - protein, 7 aa, synthetic construct
GVKPKYE

SEQ ID NO: 173722 - protein, 7 aa, synthetic construct
GEIPKKG

SEQ ID NO: 173723 - protein, 7 aa, synthetic construct
GDKPKYV

SEQ ID NO: 173724 - protein, 7 aa, synthetic construct
EPKPKFF

SEQ ID NO: 173725 - protein, 7 aa, synthetic construct
GEKKQFM

SEQ ID NO: 173726 - protein, 7 aa, synthetic construct
IEKPKIY

SEQ ID NO: 173727 - protein, 7 aa, synthetic construct
GLKYKDT

SEQ ID NO: 173728 - protein, 7 aa, synthetic construct
IEKPNRT

SEQ ID NO: 173729 - protein, 7 aa, synthetic construct
GENPKRA

SEQ ID NO: 173730 - protein, 7 aa, synthetic construct
GTKPKYD

SEQ ID NO: 173731 - protein, 7 aa, synthetic construct
TEKKHFT

SEQ ID NO: 173732 - protein, 7 aa, synthetic construct
GEKRMIT

SEQ ID NO: 173733 - protein, 7 aa, synthetic construct
GVKFKFD

SEQ ID NO: 173734 - protein, 7 aa, synthetic construct
HEKPKSL

SEQ ID NO: 173735 - protein, 7 aa, synthetic construct
GEQPKRG

SEQ ID NO: 173736 - protein, 7 aa, synthetic construct
QSNPKFT

SEQ ID NO: 173737 - protein, 7 aa, synthetic construct
GVHPKFV

SEQ ID NO: 173738 - protein, 7 aa, synthetic construct
QERPKNT

SEQ ID NO: 173739 - protein, 7 aa, synthetic construct
PEKFKMT

SEQ ID NO: 173740 - protein, 7 aa, synthetic construct
NEKPKFG

SEQ ID NO: 173741 - protein, 7 aa, synthetic construct
GETRKFM

SEQ ID NO: 173742 - protein, 7 aa, synthetic construct
DQKPKAT

SEQ ID NO: 173743 - protein, 7 aa, synthetic construct
AERPKAT

SEQ ID NO: 173744 - protein, 7 aa, synthetic construct
KEHPKIT

SEQ ID NO: 173745 - protein, 7 aa, synthetic construct
TEHPKKT

SEQ ID NO: 173746 - protein, 7 aa, synthetic construct
GDKPKIW

SEQ ID NO: 173747 - protein, 7 aa, synthetic construct
NEKPKYG

SEQ ID NO: 173748 - protein, 7 aa, synthetic construct
RESPKFG

SEQ ID NO: 173749 - protein, 7 aa, synthetic construct
GRKSEFT

SEQ ID NO: 173750 - protein, 7 aa, synthetic construct
TVHPKFT

SEQ ID NO: 173751 - protein, 7 aa, synthetic construct
VEKARFT

SEQ ID NO: 173752 - protein, 7 aa, synthetic construct
GEKPMKW

SEQ ID NO: 173753 - protein, 7 aa, synthetic construct
GEKRVFS

SEQ ID NO: 173754 - protein, 7 aa, synthetic construct
GEKPRQM

SEQ ID NO: 173755 - protein, 7 aa, synthetic construct
GEGPKKI

SEQ ID NO: 173756 - protein, 7 aa, synthetic construct
GTAPKYT

SEQ ID NO: 173757 - protein, 7 aa, synthetic construct
YQKPKDT

SEQ ID NO: 173758 - protein, 7 aa, synthetic construct
GENTKFK

SEQ ID NO: 173759 - protein, 7 aa, synthetic construct
GEAPKKV

SEQ ID NO: 173760 - protein, 7 aa, synthetic construct
GEKPKMY

SEQ ID NO: 173761 - protein, 7 aa, synthetic construct
FEKPKTF

SEQ ID NO: 173762 - protein, 7 aa, synthetic construct
TEKPKQH

SEQ ID NO: 173763 - protein, 7 aa, synthetic construct
WEKLKST

SEQ ID NO: 173764 - protein, 7 aa, synthetic construct
GETTKFR

SEQ ID NO: 173765 - protein, 7 aa, synthetic construct
SEKPKGF

SEQ ID NO: 173766 - protein, 7 aa, synthetic construct
GEQPKKG

SEQ ID NO: 173767 - protein, 7 aa, synthetic construct
EAKPKMT

SEQ ID NO: 173768 - protein, 7 aa, synthetic construct
GEMPKVR

SEQ ID NO: 173769 - protein, 7 aa, synthetic construct
FEKPKNS

SEQ ID NO: 173770 - protein, 7 aa, synthetic construct
REGPRFT

SEQ ID NO: 173771 - protein, 7 aa, synthetic construct
NEKPKWG

SEQ ID NO: 173772 - protein, 7 aa, synthetic construct
GEKRMFN

SEQ ID NO: 173773 - protein, 7 aa, synthetic construct
LEKRQFT

SEQ ID NO: 173774 - protein, 7 aa, synthetic construct
GDKPKKD

SEQ ID NO: 173775 - protein, 7 aa, synthetic construct
FVKPKFD

SEQ ID NO: 173776 - protein, 7 aa, synthetic construct
DIKPKFT

SEQ ID NO: 173777 - protein, 7 aa, synthetic construct
HETKKFT

SEQ ID NO: 173778 - protein, 7 aa, synthetic construct
GEQIKFK

SEQ ID NO: 173779 - protein, 7 aa, synthetic construct
GEKRGVT

SEQ ID NO: 173780 - protein, 7 aa, synthetic construct
PERPKST

SEQ ID NO: 173781 - protein, 7 aa, synthetic construct
NEKVKFF

SEQ ID NO: 173782 - protein, 7 aa, synthetic construct
GELPKRA

SEQ ID NO: 173783 - protein, 7 aa, synthetic construct
VETPKRT

SEQ ID NO: 173784 - protein, 7 aa, synthetic construct
GEGPKKS

SEQ ID NO: 173785 - protein, 7 aa, synthetic construct
PEKHKFN

SEQ ID NO: 173786 - protein, 7 aa, synthetic construct
GELNKFK

SEQ ID NO: 173787 - protein, 7 aa, synthetic construct
DGKPKFA

SEQ ID NO: 173788 - protein, 7 aa, synthetic construct
GEKKKDF

SEQ ID NO: 173789 - protein, 7 aa, synthetic construct
GHGPKFG

SEQ ID NO: 173790 - protein, 7 aa, synthetic construct
DEKPKLR

SEQ ID NO: 173791 - protein, 7 aa, synthetic construct
YLKPKFD

SEQ ID NO: 173792 - protein, 7 aa, synthetic construct
GEKPMRN

SEQ ID NO: 173793 - protein, 7 aa, synthetic construct
GSGHKFT

SEQ ID NO: 173794 - protein, 7 aa, synthetic construct
GERVKFM

SEQ ID NO: 173795 - protein, 7 aa, synthetic construct
GEIPKKA

SEQ ID NO: 173796 - protein, 7 aa, synthetic construct
QEKPKAQ

SEQ ID NO: 173797 - protein, 7 aa, synthetic construct
QEKPKGM

SEQ ID NO: 173798 - protein, 7 aa, synthetic construct
GEKIGFR

SEQ ID NO: 173799 - protein, 7 aa, synthetic construct
EQKPKMT

SEQ ID NO: 173800 - protein, 7 aa, synthetic construct
GEKIVRT

SEQ ID NO: 173801 - protein, 7 aa, synthetic construct
ENKPKFI

SEQ ID NO: 173802 - protein, 7 aa, synthetic construct
AEKPLRT

SEQ ID NO: 173803 - protein, 7 aa, synthetic construct
GEKPLRA

SEQ ID NO: 173804 - protein, 7 aa, synthetic construct
VEKNRFT

SEQ ID NO: 173805 - protein, 7 aa, synthetic construct
GEKISRT

SEQ ID NO: 173806 - protein, 7 aa, synthetic construct
ENKPKTT

SEQ ID NO: 173807 - protein, 7 aa, synthetic construct
EQKHKFT

SEQ ID NO: 173808 - protein, 7 aa, synthetic construct
IEKPKLF

SEQ ID NO: 173809 - protein, 7 aa, synthetic construct
AVKPKFD

SEQ ID NO: 173810 - protein, 7 aa, synthetic construct
VEKQRFT

SEQ ID NO: 173811 - protein, 7 aa, synthetic construct
SEKHKFM

SEQ ID NO: 173812 - protein, 7 aa, synthetic construct
GEKPKGY

SEQ ID NO: 173813 - protein, 7 aa, synthetic construct
AEKPKGA

SEQ ID NO: 173814 - protein, 7 aa, synthetic construct
YESPKFK

SEQ ID NO: 173815 - protein, 7 aa, synthetic construct
VEKPKYA

SEQ ID NO: 173816 - protein, 7 aa, synthetic construct
GVKPKEW

SEQ ID NO: 173817 - protein, 7 aa, synthetic construct
DLKPKFH

SEQ ID NO: 173818 - protein, 7 aa, synthetic construct
SEKPKYQ

SEQ ID NO: 173819 - protein, 7 aa, synthetic construct
SEKPKHM

SEQ ID NO: 173820 - protein, 7 aa, synthetic construct
AEKPKFY

SEQ ID NO: 173821 - protein, 7 aa, synthetic construct
PQKPKFE

SEQ ID NO: 173822 - protein, 7 aa, synthetic construct
GEGQKFK

SEQ ID NO: 173823 - protein, 7 aa, synthetic construct
GEKIKPW

SEQ ID NO: 173824 - protein, 7 aa, synthetic construct
GEKPKQL

SEQ ID NO: 173825 - protein, 7 aa, synthetic construct
IELPKRT

SEQ ID NO: 173826 - protein, 7 aa, synthetic construct
EAKPKFL

SEQ ID NO: 173827 - protein, 7 aa, synthetic construct
KEKPYFN

SEQ ID NO: 173828 - protein, 7 aa, synthetic construct
TQKPKDT

SEQ ID NO: 173829 - protein, 7 aa, synthetic construct
QEKPKTN

SEQ ID NO: 173830 - protein, 7 aa, synthetic construct
ETKPKFH

SEQ ID NO: 173831 - protein, 7 aa, synthetic construct
GEKPQPR

SEQ ID NO: 173832 - protein, 7 aa, synthetic construct
GRKPEFA

SEQ ID NO: 173833 - protein, 7 aa, synthetic construct
NEKPKAW

SEQ ID NO: 173834 - protein, 7 aa, synthetic construct
DVKPRFT

SEQ ID NO: 173835 - protein, 7 aa, synthetic construct
GHKLKDT

SEQ ID NO: 173836 - protein, 7 aa, synthetic construct
AEKPFKT

SEQ ID NO: 173837 - protein, 7 aa, synthetic construct
YEKPKHL

SEQ ID NO: 173838 - protein, 7 aa, synthetic construct
PEKLKFS

SEQ ID NO: 173839 - protein, 7 aa, synthetic construct
REKQKDT

SEQ ID NO: 173840 - protein, 7 aa, synthetic construct
GDKNRFT

SEQ ID NO: 173841 - protein, 7 aa, synthetic construct
DNKPKAT

SEQ ID NO: 173842 - protein, 7 aa, synthetic construct
FEKPKVF

SEQ ID NO: 173843 - protein, 7 aa, synthetic construct
DGKPKHT

SEQ ID NO: 173844 - protein, 7 aa, synthetic construct
GELIKRT

SEQ ID NO: 173845 - protein, 7 aa, synthetic construct
GEIPKRI

SEQ ID NO: 173846 - protein, 7 aa, synthetic construct
GEKYKIQ

SEQ ID NO: 173847 - protein, 7 aa, synthetic construct
GDKVKFL

SEQ ID NO: 173848 - protein, 7 aa, synthetic construct
GNKPKMD

SEQ ID NO: 173849 - protein, 7 aa, synthetic construct
QEKVKFF

SEQ ID NO: 173850 - protein, 7 aa, synthetic construct
SEKPKNY

SEQ ID NO: 173851 - protein, 7 aa, synthetic construct
ESKAKFT

SEQ ID NO: 173852 - protein, 7 aa, synthetic construct
GGHPKFG

SEQ ID NO: 173853 - protein, 7 aa, synthetic construct
DQKPKLT

SEQ ID NO: 173854 - protein, 7 aa, synthetic construct
GAKPKDF

SEQ ID NO: 173855 - protein, 7 aa, synthetic construct
NEQKKFT

SEQ ID NO: 173856 - protein, 7 aa, synthetic construct
PEKKPFT

SEQ ID NO: 173857 - protein, 7 aa, synthetic construct
TEKPKMY

SEQ ID NO: 173858 - protein, 7 aa, synthetic construct
DEKNKFR

SEQ ID NO: 173859 - protein, 7 aa, synthetic construct
YDKHKFT

SEQ ID NO: 173860 - protein, 7 aa, synthetic construct
KEKPKHD

SEQ ID NO: 173861 - protein, 7 aa, synthetic construct
EPKPKFL

SEQ ID NO: 173862 - protein, 7 aa, synthetic construct
GEAPKLK

SEQ ID NO: 173863 - protein, 7 aa, synthetic construct
LEKPKFQ

SEQ ID NO: 173864 - protein, 7 aa, synthetic construct
GDKPKPM

SEQ ID NO: 173865 - protein, 7 aa, synthetic construct
QEKPKFG

SEQ ID NO: 173866 - protein, 7 aa, synthetic construct
NERPKMT

SEQ ID NO: 173867 - protein, 7 aa, synthetic construct
TEKPKLS

SEQ ID NO: 173868 - protein, 7 aa, synthetic construct
TGKPKDT

SEQ ID NO: 173869 - protein, 7 aa, synthetic construct
GKKPHFE

SEQ ID NO: 173870 - protein, 7 aa, synthetic construct
GEIPKPR

SEQ ID NO: 173871 - protein, 7 aa, synthetic construct
GEAKKFL

SEQ ID NO: 173872 - protein, 7 aa, synthetic construct
GERPKTF

SEQ ID NO: 173873 - protein, 7 aa, synthetic construct
REKKDFT

SEQ ID NO: 173874 - protein, 7 aa, synthetic construct
TEKPRMT

SEQ ID NO: 173875 - protein, 7 aa, synthetic construct
MEKPKFA

SEQ ID NO: 173876 - protein, 7 aa, synthetic construct
EPKPKFP

SEQ ID NO: 173877 - protein, 7 aa, synthetic construct
REHPKFQ

SEQ ID NO: 173878 - protein, 7 aa, synthetic construct
DHKPKFS

SEQ ID NO: 173879 - protein, 7 aa, synthetic construct
GERPKVY

SEQ ID NO: 173880 - protein, 7 aa, synthetic construct
GYKAKDT

SEQ ID NO: 173881 - protein, 7 aa, synthetic construct
GISPKYT

SEQ ID NO: 173882 - protein, 7 aa, synthetic construct
GESKKFA

SEQ ID NO: 173883 - protein, 7 aa, synthetic construct
GEKPQGR

SEQ ID NO: 173884 - protein, 7 aa, synthetic construct
GESRKFG

SEQ ID NO: 173885 - protein, 7 aa, synthetic construct
GLHPKFG

SEQ ID NO: 173886 - protein, 7 aa, synthetic construct
MEKPKFF

SEQ ID NO: 173887 - protein, 7 aa, synthetic construct
EQKPKST

SEQ ID NO: 173888 - protein, 7 aa, synthetic construct
QEKPTFR

SEQ ID NO: 173889 - protein, 7 aa, synthetic construct
YTGPKFT

SEQ ID NO: 173890 - protein, 7 aa, synthetic construct
NDKPKFM

SEQ ID NO: 173891 - protein, 7 aa, synthetic construct
NEKMKFY

SEQ ID NO: 173892 - protein, 7 aa, synthetic construct
GTKPHFQ

SEQ ID NO: 173893 - protein, 7 aa, synthetic construct
GEKRVQT

SEQ ID NO: 173894 - protein, 7 aa, synthetic construct
REIPKTT

SEQ ID NO: 173895 - protein, 7 aa, synthetic construct
GELPKNR

SEQ ID NO: 173896 - protein, 7 aa, synthetic construct
TEKPKMF

SEQ ID NO: 173897 - protein, 7 aa, synthetic construct
GETRKFP

SEQ ID NO: 173898 - protein, 7 aa, synthetic construct
GETNKRT

SEQ ID NO: 173899 - protein, 7 aa, synthetic construct
NESPKFR

SEQ ID NO: 173900 - protein, 7 aa, synthetic construct
MEKPKNM

SEQ ID NO: 173901 - protein, 7 aa, synthetic construct
HNKPKFE

SEQ ID NO: 173902 - protein, 7 aa, synthetic construct
GLKQKFD

SEQ ID NO: 173903 - protein, 7 aa, synthetic construct
GSRPKET

SEQ ID NO: 173904 - protein, 7 aa, synthetic construct
PEKLKFQ

SEQ ID NO: 173905 - protein, 7 aa, synthetic construct
GNKPKHE

SEQ ID NO: 173906 - protein, 7 aa, synthetic construct
TEKPKTH

SEQ ID NO: 173907 - protein, 7 aa, synthetic construct
NEARKFT

SEQ ID NO: 173908 - protein, 7 aa, synthetic construct
GHKIKFD

SEQ ID NO: 173909 - protein, 7 aa, synthetic construct
GTMPKFQ

SEQ ID NO: 173910 - protein, 7 aa, synthetic construct
MEKPKIL

SEQ ID NO: 173911 - protein, 7 aa, synthetic construct
LEKPKHN

SEQ ID NO: 173912 - protein, 7 aa, synthetic construct
NDKGKFT

SEQ ID NO: 173913 - protein, 7 aa, synthetic construct
GDPRKFT

SEQ ID NO: 173914 - protein, 7 aa, synthetic construct
VEKPKQF

SEQ ID NO: 173915 - protein, 7 aa, synthetic construct
SEKMKFY

SEQ ID NO: 173916 - protein, 7 aa, synthetic construct
VESPKFK

SEQ ID NO: 173917 - protein, 7 aa, synthetic construct
DEKVKFR

SEQ ID NO: 173918 - protein, 7 aa, synthetic construct
AEKPKYA

SEQ ID NO: 173919 - protein, 7 aa, synthetic construct
GMPPKYT

SEQ ID NO: 173920 - protein, 7 aa, synthetic construct
GERPKMG

SEQ ID NO: 173921 - protein, 7 aa, synthetic construct
TLTPKFT

SEQ ID NO: 173922 - protein, 7 aa, synthetic construct
GEKPTRM

SEQ ID NO: 173923 - protein, 7 aa, synthetic construct
GEIIKRT

SEQ ID NO: 173924 - protein, 7 aa, synthetic construct
DIKPKFG

SEQ ID NO: 173925 - protein, 7 aa, synthetic construct
GEPRKTT

SEQ ID NO: 173926 - protein, 7 aa, synthetic construct
ETKHKFT

SEQ ID NO: 173927 - protein, 7 aa, synthetic construct
GESRKFP

SEQ ID NO: 173928 - protein, 7 aa, synthetic construct
GAKPKDT

SEQ ID NO: 173929 - protein, 7 aa, synthetic construct
GDQPKRT

SEQ ID NO: 173930 - protein, 7 aa, synthetic construct
GEKRMTT

SEQ ID NO: 173931 - protein, 7 aa, synthetic construct
SEKYKFV

SEQ ID NO: 173932 - protein, 7 aa, synthetic construct
FETPKRT

SEQ ID NO: 173933 - protein, 7 aa, synthetic construct
DTKPKQT

SEQ ID NO: 173934 - protein, 7 aa, synthetic construct
YEKPKNF

SEQ ID NO: 173935 - protein, 7 aa, synthetic construct
YEKPKSQ

SEQ ID NO: 173936 - protein, 7 aa, synthetic construct
EEKKKFM

SEQ ID NO: 173937 - protein, 7 aa, synthetic construct
IEKPRFM

SEQ ID NO: 173938 - protein, 7 aa, synthetic construct
HEKPKMQ

SEQ ID NO: 173939 - protein, 7 aa, synthetic construct
GEKPMRQ

SEQ ID NO: 173940 - protein, 7 aa, synthetic construct
GAKRDFT

SEQ ID NO: 173941 - protein, 7 aa, synthetic construct
EQKQKFT

SEQ ID NO: 173942 - protein, 7 aa, synthetic construct
GEKYKFA

SEQ ID NO: 173943 - protein, 7 aa, synthetic construct
GEAPKKS

SEQ ID NO: 173944 - protein, 7 aa, synthetic construct
GDKPKFL

SEQ ID NO: 173945 - protein, 7 aa, synthetic construct
GDKPKQQ

SEQ ID NO: 173946 - protein, 7 aa, synthetic construct
GETPKAR

SEQ ID NO: 173947 - protein, 7 aa, synthetic construct
NEKPKVY

SEQ ID NO: 173948 - protein, 7 aa, synthetic construct
LEKPKYF

SEQ ID NO: 173949 - protein, 7 aa, synthetic construct
NEKPKFN

SEQ ID NO: 173950 - protein, 7 aa, synthetic construct
GRKPEFL

SEQ ID NO: 173951 - protein, 7 aa, synthetic construct
EPKPRFT

SEQ ID NO: 173952 - protein, 7 aa, synthetic construct
DMKPKFN

SEQ ID NO: 173953 - protein, 7 aa, synthetic construct
DGKPKFP

SEQ ID NO: 173954 - protein, 7 aa, synthetic construct
SEKPVFR

SEQ ID NO: 173955 - protein, 7 aa, synthetic construct
GEQPKRT

SEQ ID NO: 173956 - protein, 7 aa, synthetic construct
NEKRLFT

SEQ ID NO: 173957 - protein, 7 aa, synthetic construct
GDKGKFY

SEQ ID NO: 173958 - protein, 7 aa, synthetic construct
KEKPVFY

SEQ ID NO: 173959 - protein, 7 aa, synthetic construct
QEKPKHS

SEQ ID NO: 173960 - protein, 7 aa, synthetic construct
GFKPINT

SEQ ID NO: 173961 - protein, 7 aa, synthetic construct
QEKPKQM

SEQ ID NO: 173962 - protein, 7 aa, synthetic construct
GVRPKDT

SEQ ID NO: 173963 - protein, 7 aa, synthetic construct
GEKPRTY

SEQ ID NO: 173964 - protein, 7 aa, synthetic construct
GEMPKKQ

SEQ ID NO: 173965 - protein, 7 aa, synthetic construct
AEKPKVS

SEQ ID NO: 173966 - protein, 7 aa, synthetic construct
DMKPKFG

SEQ ID NO: 173967 - protein, 7 aa, synthetic construct
ENKNKFT

SEQ ID NO: 173968 - protein, 7 aa, synthetic construct
LEKPKNY

SEQ ID NO: 173969 - protein, 7 aa, synthetic construct
GDRPKFV

SEQ ID NO: 173970 - protein, 7 aa, synthetic construct
VIKPKFE

SEQ ID NO: 173971 - protein, 7 aa, synthetic construct
ETKPKFT

SEQ ID NO: 173972 - protein, 7 aa, synthetic construct
AHKPKFD

SEQ ID NO: 173973 - protein, 7 aa, synthetic construct
GESPKQK

SEQ ID NO: 173974 - protein, 7 aa, synthetic construct
GEKRQFG

SEQ ID NO: 173975 - protein, 7 aa, synthetic construct
SEKPKSF

SEQ ID NO: 173976 - protein, 7 aa, synthetic construct
GEKPNRI

SEQ ID NO: 173977 - protein, 7 aa, synthetic construct
KENPKFY

SEQ ID NO: 173978 - protein, 7 aa, synthetic construct
GESMKRT

SEQ ID NO: 173979 - protein, 7 aa, synthetic construct
YPKPKFD

SEQ ID NO: 173980 - protein, 7 aa, synthetic construct
GEPRKFQ

SEQ ID NO: 173981 - protein, 7 aa, synthetic construct
TERPKFS

SEQ ID NO: 173982 - protein, 7 aa, synthetic construct
QEKPKFP

SEQ ID NO: 173983 - protein, 7 aa, synthetic construct
NEKPKFM

SEQ ID NO: 173984 - protein, 7 aa, synthetic construct
GDKYKQT

SEQ ID NO: 173985 - protein, 7 aa, synthetic construct
GEKRSLT

SEQ ID NO: 173986 - protein, 7 aa, synthetic construct
GEMPKRG

SEQ ID NO: 173987 - protein, 7 aa, synthetic construct
AEKPKIS

SEQ ID NO: 173988 - protein, 7 aa, synthetic construct
GEKPQMR

SEQ ID NO: 173989 - protein, 7 aa, synthetic construct
GEKPFNK

SEQ ID NO: 173990 - protein, 7 aa, synthetic construct
QEKPKHA

SEQ ID NO: 173991 - protein, 7 aa, synthetic construct
LEKPRFT

SEQ ID NO: 173992 - protein, 7 aa, synthetic construct
FEIPKRT

SEQ ID NO: 173993 - protein, 7 aa, synthetic construct
HEKFKNT

SEQ ID NO: 173994 - protein, 7 aa, synthetic construct
GVTHKFT

SEQ ID NO: 173995 - protein, 7 aa, synthetic construct
DEKVKFK

SEQ ID NO: 173996 - protein, 7 aa, synthetic construct
GESPKPR

SEQ ID NO: 173997 - protein, 7 aa, synthetic construct
GEKPSQR

SEQ ID NO: 173998 - protein, 7 aa, synthetic construct
KEIPKFT

SEQ ID NO: 173999 - protein, 7 aa, synthetic construct
AEKPKYS

SEQ ID NO: 174000 - protein, 7 aa, synthetic construct
GAKNKDT

SEQ ID NO: 174001 - protein, 7 aa, synthetic construct
KELPKFG

SEQ ID NO: 174002 - protein, 7 aa, synthetic construct
QEKPKSM

SEQ ID NO: 174003 - protein, 7 aa, synthetic construct
GDRGKFT

SEQ ID NO: 174004 - protein, 7 aa, synthetic construct
GETRKMT

SEQ ID NO: 174005 - protein, 7 aa, synthetic construct
GFKHKDT

SEQ ID NO: 174006 - protein, 7 aa, synthetic construct
DMKPKFM

SEQ ID NO: 174007 - protein, 7 aa, synthetic construct
EEKMKFK

SEQ ID NO: 174008 - protein, 7 aa, synthetic construct
NEKPKWV

SEQ ID NO: 174009 - protein, 7 aa, synthetic construct
GEKPVRF

SEQ ID NO: 174010 - protein, 7 aa, synthetic construct
REGIKFT

SEQ ID NO: 174011 - protein, 7 aa, synthetic construct
VERPKFT

SEQ ID NO: 174012 - protein, 7 aa, synthetic construct
IEKPKYA

SEQ ID NO: 174013 - protein, 7 aa, synthetic construct
GEKNPFK

SEQ ID NO: 174014 - protein, 7 aa, synthetic construct
NEVPKRT

SEQ ID NO: 174015 - protein, 7 aa, synthetic construct
NEKRGFT

SEQ ID NO: 174016 - protein, 7 aa, synthetic construct
GEKPLVR

SEQ ID NO: 174017 - protein, 7 aa, synthetic construct
PEKIKFS

SEQ ID NO: 174018 - protein, 7 aa, synthetic construct
LENPKFR

SEQ ID NO: 174019 - protein, 7 aa, synthetic construct
GEKRQFT

SEQ ID NO: 174020 - protein, 7 aa, synthetic construct
REVPKFV

SEQ ID NO: 174021 - protein, 7 aa, synthetic construct
GIAHKFT

SEQ ID NO: 174022 - protein, 7 aa, synthetic construct
GAKYKFE

SEQ ID NO: 174023 - protein, 7 aa, synthetic construct
KETPKFQ

SEQ ID NO: 174024 - protein, 7 aa, synthetic construct
TAKPKFD

SEQ ID NO: 174025 - protein, 7 aa, synthetic construct
GEMPKRS

SEQ ID NO: 174026 - protein, 7 aa, synthetic construct
AEKPIKT

SEQ ID NO: 174027 - protein, 7 aa, synthetic construct
YEKPKTF

SEQ ID NO: 174028 - protein, 7 aa, synthetic construct
GEKYKNM

SEQ ID NO: 174029 - protein, 7 aa, synthetic construct
PEKTKFQ

SEQ ID NO: 174030 - protein, 7 aa, synthetic construct
QNKPKFD

SEQ ID NO: 174031 - protein, 7 aa, synthetic construct
IEKPKMY

SEQ ID NO: 174032 - protein, 7 aa, synthetic construct
AEKPKAW

SEQ ID NO: 174033 - protein, 7 aa, synthetic construct
YEKGKFF

SEQ ID NO: 174034 - protein, 7 aa, synthetic construct
YDKPKFQ

SEQ ID NO: 174035 - protein, 7 aa, synthetic construct
METPKFR

SEQ ID NO: 174036 - protein, 7 aa, synthetic construct
DEKAKFK

SEQ ID NO: 174037 - protein, 7 aa, synthetic construct
DNKPKFQ

SEQ ID NO: 174038 - protein, 7 aa, synthetic construct
DAKPKFM

SEQ ID NO: 174039 - protein, 7 aa, synthetic construct
GETPKKM

SEQ ID NO: 174040 - protein, 7 aa, synthetic construct
GRQPKFE

SEQ ID NO: 174041 - protein, 7 aa, synthetic construct
EGKIKFT

SEQ ID NO: 174042 - protein, 7 aa, synthetic construct
VTKPHFT

SEQ ID NO: 174043 - protein, 7 aa, synthetic construct
TEKPNRT

SEQ ID NO: 174044 - protein, 7 aa, synthetic construct
QEKPKSP

SEQ ID NO: 174045 - protein, 7 aa, synthetic construct
SEVPKRT

SEQ ID NO: 174046 - protein, 7 aa, synthetic construct
IEKPKQW

SEQ ID NO: 174047 - protein, 7 aa, synthetic construct
EQKPKFV

SEQ ID NO: 174048 - protein, 7 aa, synthetic construct
PYKPKDT

SEQ ID NO: 174049 - protein, 7 aa, synthetic construct
GEKPRFV

SEQ ID NO: 174050 - protein, 7 aa, synthetic construct
GFRPKDT

SEQ ID NO: 174051 - protein, 7 aa, synthetic construct
RIKPDFT

SEQ ID NO: 174052 - protein, 7 aa, synthetic construct
GEKRMFG

SEQ ID NO: 174053 - protein, 7 aa, synthetic construct
FEKPKPF

SEQ ID NO: 174054 - protein, 7 aa, synthetic construct
GEVAKFK

SEQ ID NO: 174055 - protein, 7 aa, synthetic construct
SEKPKFF

SEQ ID NO: 174056 - protein, 7 aa, synthetic construct
GSDRKFT

SEQ ID NO: 174057 - protein, 7 aa, synthetic construct
GLKPKEW

SEQ ID NO: 174058 - protein, 7 aa, synthetic construct
DEKKKFQ

SEQ ID NO: 174059 - protein, 7 aa, synthetic construct
HEVPKFK

SEQ ID NO: 174060 - protein, 7 aa, synthetic construct
NIKPKFD

SEQ ID NO: 174061 - protein, 7 aa, synthetic construct
IEKPKSM

SEQ ID NO: 174062 - protein, 7 aa, synthetic construct
QEKPKAS

SEQ ID NO: 174063 - protein, 7 aa, synthetic construct
GEIKKFV

SEQ ID NO: 174064 - protein, 7 aa, synthetic construct
VELPKRT

SEQ ID NO: 174065 - protein, 7 aa, synthetic construct
GEKFKYS

SEQ ID NO: 174066 - protein, 7 aa, synthetic construct
NEKFKFN

SEQ ID NO: 174067 - protein, 7 aa, synthetic construct
GEKKLFY

SEQ ID NO: 174068 - protein, 7 aa, synthetic construct
TEKPKTQ

SEQ ID NO: 174069 - protein, 7 aa, synthetic construct
MEKTKWT

SEQ ID NO: 174070 - protein, 7 aa, synthetic construct
SDKPKIT

SEQ ID NO: 174071 - protein, 7 aa, synthetic construct
DVKPKFQ

SEQ ID NO: 174072 - protein, 7 aa, synthetic construct
DNKIKFT

SEQ ID NO: 174073 - protein, 7 aa, synthetic construct
TEKPKRE

SEQ ID NO: 174074 - protein, 7 aa, synthetic construct
GEKRQLT

SEQ ID NO: 174075 - protein, 7 aa, synthetic construct
GEINKRT

SEQ ID NO: 174076 - protein, 7 aa, synthetic construct
GENRKFT

SEQ ID NO: 174077 - protein, 7 aa, synthetic construct
SEKPKYM

SEQ ID NO: 174078 - protein, 7 aa, synthetic construct
DVKPKFY

SEQ ID NO: 174079 - protein, 7 aa, synthetic construct
LEKHKFF

SEQ ID NO: 174080 - protein, 7 aa, synthetic construct
GEKLKSW

SEQ ID NO: 174081 - protein, 7 aa, synthetic construct
HESKKFT

SEQ ID NO: 174082 - protein, 7 aa, synthetic construct
GEKPVLR

SEQ ID NO: 174083 - protein, 7 aa, synthetic construct
GDKPYRT

SEQ ID NO: 174084 - protein, 7 aa, synthetic construct
IEKPKMG

SEQ ID NO: 174085 - protein, 7 aa, synthetic construct
DGKPKFG

SEQ ID NO: 174086 - protein, 7 aa, synthetic construct
PEKGKYT

SEQ ID NO: 174087 - protein, 7 aa, synthetic construct
DNKPKLT

SEQ ID NO: 174088 - protein, 7 aa, synthetic construct
GEKKYFA

SEQ ID NO: 174089 - protein, 7 aa, synthetic construct
GLHPKST

SEQ ID NO: 174090 - protein, 7 aa, synthetic construct
GEPNKFR

SEQ ID NO: 174091 - protein, 7 aa, synthetic construct
GEVNKRT

SEQ ID NO: 174092 - protein, 7 aa, synthetic construct
GEKPKSS

SEQ ID NO: 174093 - protein, 7 aa, synthetic construct
VMKPKFD

SEQ ID NO: 174094 - protein, 7 aa, synthetic construct
GEKRKEV

SEQ ID NO: 174095 - protein, 7 aa, synthetic construct
AVTPKFT

SEQ ID NO: 174096 - protein, 7 aa, synthetic construct
TFKPKFD

SEQ ID NO: 174097 - protein, 7 aa, synthetic construct
SVQPKFT

SEQ ID NO: 174098 - protein, 7 aa, synthetic construct
GEGPKKV

SEQ ID NO: 174099 - protein, 7 aa, synthetic construct
YEKFKFQ

SEQ ID NO: 174100 - protein, 7 aa, synthetic construct
GEAPKKN

SEQ ID NO: 174101 - protein, 7 aa, synthetic construct
RETPKFA

SEQ ID NO: 174102 - protein, 7 aa, synthetic construct
DEKQKRT

SEQ ID NO: 174103 - protein, 7 aa, synthetic construct
TEKSKFL

SEQ ID NO: 174104 - protein, 7 aa, synthetic construct
DEKPKKL

SEQ ID NO: 174105 - protein, 7 aa, synthetic construct
SEKPRVT

SEQ ID NO: 174106 - protein, 7 aa, synthetic construct
QEKMKFY

SEQ ID NO: 174107 - protein, 7 aa, synthetic construct
GESPKKG

SEQ ID NO: 174108 - protein, 7 aa, synthetic construct
TEKHKFF

SEQ ID NO: 174109 - protein, 7 aa, synthetic construct
TEKNKYT

SEQ ID NO: 174110 - protein, 7 aa, synthetic construct
EMKPKFY

SEQ ID NO: 174111 - protein, 7 aa, synthetic construct
QEKPKDR

SEQ ID NO: 174112 - protein, 7 aa, synthetic construct
GQKPKDW

SEQ ID NO: 174113 - protein, 7 aa, synthetic construct
GDKPNFK

SEQ ID NO: 174114 - protein, 7 aa, synthetic construct
GPHPKFG

SEQ ID NO: 174115 - protein, 7 aa, synthetic construct
DSKPKFM

SEQ ID NO: 174116 - protein, 7 aa, synthetic construct
LEKPKWV

SEQ ID NO: 174117 - protein, 7 aa, synthetic construct
GEKRMFT

SEQ ID NO: 174118 - protein, 7 aa, synthetic construct
MEKPKTM

SEQ ID NO: 174119 - protein, 7 aa, synthetic construct
ESKPKVT

SEQ ID NO: 174120 - protein, 7 aa, synthetic construct
GEKLRFQ

SEQ ID NO: 174121 - protein, 7 aa, synthetic construct
GEKPKTM

SEQ ID NO: 174122 - protein, 7 aa, synthetic construct
QVKPKFD

SEQ ID NO: 174123 - protein, 7 aa, synthetic construct
GDKPKAM

SEQ ID NO: 174124 - protein, 7 aa, synthetic construct
DGKMKFT

SEQ ID NO: 174125 - protein, 7 aa, synthetic construct
DIKHKFT

SEQ ID NO: 174126 - protein, 7 aa, synthetic construct
GDPPKFR

SEQ ID NO: 174127 - protein, 7 aa, synthetic construct
AYKPKFE

SEQ ID NO: 174128 - protein, 7 aa, synthetic construct
AESPKRT

SEQ ID NO: 174129 - protein, 7 aa, synthetic construct
GKKPIFD

SEQ ID NO: 174130 - protein, 7 aa, synthetic construct
SERPKIT

SEQ ID NO: 174131 - protein, 7 aa, synthetic construct
GEVPKRS

SEQ ID NO: 174132 - protein, 7 aa, synthetic construct
GETVKFK

SEQ ID NO: 174133 - protein, 7 aa, synthetic construct
GDQPKFR

SEQ ID NO: 174134 - protein, 7 aa, synthetic construct
AEKPART

SEQ ID NO: 174135 - protein, 7 aa, synthetic construct
GRKPDIT

SEQ ID NO: 174136 - protein, 7 aa, synthetic construct
NEKIKFY

SEQ ID NO: 174137 - protein, 7 aa, synthetic construct
GEKPNFK

SEQ ID NO: 174138 - protein, 7 aa, synthetic construct
IEKPKYQ

SEQ ID NO: 174139 - protein, 7 aa, synthetic construct
SERPKTT

SEQ ID NO: 174140 - protein, 7 aa, synthetic construct
GEGPKMR

SEQ ID NO: 174141 - protein, 7 aa, synthetic construct
GEVPKRG

SEQ ID NO: 174142 - protein, 7 aa, synthetic construct
ENKLKFT

SEQ ID NO: 174143 - protein, 7 aa, synthetic construct
GETPKYK

SEQ ID NO: 174144 - protein, 7 aa, synthetic construct
GEKPFKQ

SEQ ID NO: 174145 - protein, 7 aa, synthetic construct
GEKYKSN

SEQ ID NO: 174146 - protein, 7 aa, synthetic construct
TEKHKFL

SEQ ID NO: 174147 - protein, 7 aa, synthetic construct
GEKNPFR

SEQ ID NO: 174148 - protein, 7 aa, synthetic construct
GVKPKDY

SEQ ID NO: 174149 - protein, 7 aa, synthetic construct
GEKRSTT

SEQ ID NO: 174150 - protein, 7 aa, synthetic construct
GVGIKFT

SEQ ID NO: 174151 - protein, 7 aa, synthetic construct
PEKPKTY

SEQ ID NO: 174152 - protein, 7 aa, synthetic construct
QEKPKYP

SEQ ID NO: 174153 - protein, 7 aa, synthetic construct
GERPKGT

SEQ ID NO: 174154 - protein, 7 aa, synthetic construct
GEKRNLT

SEQ ID NO: 174155 - protein, 7 aa, synthetic construct
GEKPKLQ

SEQ ID NO: 174156 - protein, 7 aa, synthetic construct
DEKPKQK

SEQ ID NO: 174157 - protein, 7 aa, synthetic construct
NEKYKFN

SEQ ID NO: 174158 - protein, 7 aa, synthetic construct
GEKSKYN

SEQ ID NO: 174159 - protein, 7 aa, synthetic construct
GEKPRAL

SEQ ID NO: 174160 - protein, 7 aa, synthetic construct
QVKPKDT

SEQ ID NO: 174161 - protein, 7 aa, synthetic construct
GEIKKFY

SEQ ID NO: 174162 - protein, 7 aa, synthetic construct
GEKPSLR

SEQ ID NO: 174163 - protein, 7 aa, synthetic construct
QEKPKYV

SEQ ID NO: 174164 - protein, 7 aa, synthetic construct
IEKPKHS

SEQ ID NO: 174165 - protein, 7 aa, synthetic construct
QERPKFM

SEQ ID NO: 174166 - protein, 7 aa, synthetic construct
GEGPKPK

SEQ ID NO: 174167 - protein, 7 aa, synthetic construct
IERPKFT

SEQ ID NO: 174168 - protein, 7 aa, synthetic construct
QEKPKII

SEQ ID NO: 174169 - protein, 7 aa, synthetic construct
ITKPKFD

SEQ ID NO: 174170 - protein, 7 aa, synthetic construct
GEKPIRS

SEQ ID NO: 174171 - protein, 7 aa, synthetic construct
GQKPKQD

SEQ ID NO: 174172 - protein, 7 aa, synthetic construct
GEGRKFV

SEQ ID NO: 174173 - protein, 7 aa, synthetic construct
TEGPKFR

SEQ ID NO: 174174 - protein, 7 aa, synthetic construct
GEVPKMR

SEQ ID NO: 174175 - protein, 7 aa, synthetic construct
GERPKFQ

SEQ ID NO: 174176 - protein, 7 aa, synthetic construct
QEKHKFI

SEQ ID NO: 174177 - protein, 7 aa, synthetic construct
HEKLKFM

SEQ ID NO: 174178 - protein, 7 aa, synthetic construct
FEKPRTT

SEQ ID NO: 174179 - protein, 7 aa, synthetic construct
IEGPKFK

SEQ ID NO: 174180 - protein, 7 aa, synthetic construct
KEKPKDW

SEQ ID NO: 174181 - protein, 7 aa, synthetic construct
MEKPKTF

SEQ ID NO: 174182 - protein, 7 aa, synthetic construct
HEKNKFM

SEQ ID NO: 174183 - protein, 7 aa, synthetic construct
EDKPKKT

SEQ ID NO: 174184 - protein, 7 aa, synthetic construct
DGKIKFT

SEQ ID NO: 174185 - protein, 7 aa, synthetic construct
AEKPFRT

SEQ ID NO: 174186 - protein, 7 aa, synthetic construct
GEPKKFM

SEQ ID NO: 174187 - protein, 7 aa, synthetic construct
AEPPKRT

SEQ ID NO: 174188 - protein, 7 aa, synthetic construct
QEKVKFM

SEQ ID NO: 174189 - protein, 7 aa, synthetic construct
SEKRSFT

SEQ ID NO: 174190 - protein, 7 aa, synthetic construct
GNPPKYT

SEQ ID NO: 174191 - protein, 7 aa, synthetic construct
TEKPKWA

SEQ ID NO: 174192 - protein, 7 aa, synthetic construct
WLKPKDT

SEQ ID NO: 174193 - protein, 7 aa, synthetic construct
GVKPKHD

SEQ ID NO: 174194 - protein, 7 aa, synthetic construct
TSKPKFD

SEQ ID NO: 174195 - protein, 7 aa, synthetic construct
ETKPKMT

SEQ ID NO: 174196 - protein, 7 aa, synthetic construct
YEKVKFH

SEQ ID NO: 174197 - protein, 7 aa, synthetic construct
GERTKLT

SEQ ID NO: 174198 - protein, 7 aa, synthetic construct
GHAPKST

SEQ ID NO: 174199 - protein, 7 aa, synthetic construct
GEIPKRM

SEQ ID NO: 174200 - protein, 7 aa, synthetic construct
GEKPKQF

SEQ ID NO: 174201 - protein, 7 aa, synthetic construct
GEPPKRF

SEQ ID NO: 174202 - protein, 7 aa, synthetic construct
QEKPQRT

SEQ ID NO: 174203 - protein, 7 aa, synthetic construct
EQKPKFN

SEQ ID NO: 174204 - protein, 7 aa, synthetic construct
GIHPKNT

SEQ ID NO: 174205 - protein, 7 aa, synthetic construct
QEKMKFF

SEQ ID NO: 174206 - protein, 7 aa, synthetic construct
QEKPKMF

SEQ ID NO: 174207 - protein, 7 aa, synthetic construct
GEGKKST

SEQ ID NO: 174208 - protein, 7 aa, synthetic construct
VEKPKAF

SEQ ID NO: 174209 - protein, 7 aa, synthetic construct
GTHTKFT

SEQ ID NO: 174210 - protein, 7 aa, synthetic construct
GEVRKFP

SEQ ID NO: 174211 - protein, 7 aa, synthetic construct
GERPKPV

SEQ ID NO: 174212 - protein, 7 aa, synthetic construct
TEKTKWT

SEQ ID NO: 174213 - protein, 7 aa, synthetic construct
GEQKKFY

SEQ ID NO: 174214 - protein, 7 aa, synthetic construct
GQKPRDT

SEQ ID NO: 174215 - protein, 7 aa, synthetic construct
GEQTKKT

SEQ ID NO: 174216 - protein, 7 aa, synthetic construct
YEKFKFS

SEQ ID NO: 174217 - protein, 7 aa, synthetic construct
AEKPKGW

SEQ ID NO: 174218 - protein, 7 aa, synthetic construct
GEKYKGS

SEQ ID NO: 174219 - protein, 7 aa, synthetic construct
DSKPKMT

SEQ ID NO: 174220 - protein, 7 aa, synthetic construct
EHKPKAT

SEQ ID NO: 174221 - protein, 7 aa, synthetic construct
GKKPHET

SEQ ID NO: 174222 - protein, 7 aa, synthetic construct
GEKPNYK

SEQ ID NO: 174223 - protein, 7 aa, synthetic construct
QEKYKFA

SEQ ID NO: 174224 - protein, 7 aa, synthetic construct
WEKPKQG

SEQ ID NO: 174225 - protein, 7 aa, synthetic construct
GEKPKAF

SEQ ID NO: 174226 - protein, 7 aa, synthetic construct
NEKPKHG

SEQ ID NO: 174227 - protein, 7 aa, synthetic construct
SEKPKIQ

SEQ ID NO: 174228 - protein, 7 aa, synthetic construct
QEKFKFN

SEQ ID NO: 174229 - protein, 7 aa, synthetic construct
EYKGKFT

SEQ ID NO: 174230 - protein, 7 aa, synthetic construct
GEHKKFN

SEQ ID NO: 174231 - protein, 7 aa, synthetic construct
QETPKFR

SEQ ID NO: 174232 - protein, 7 aa, synthetic construct
GEKPPNR

SEQ ID NO: 174233 - protein, 7 aa, synthetic construct
GEFPKAK

SEQ ID NO: 174234 - protein, 7 aa, synthetic construct
KENPKFS

SEQ ID NO: 174235 - protein, 7 aa, synthetic construct
REKPIFN

SEQ ID NO: 174236 - protein, 7 aa, synthetic construct
DGKPKFL

SEQ ID NO: 174237 - protein, 7 aa, synthetic construct
GVTPKFQ

SEQ ID NO: 174238 - protein, 7 aa, synthetic construct
GRSPKDT

SEQ ID NO: 174239 - protein, 7 aa, synthetic construct
SEAPKFK

SEQ ID NO: 174240 - protein, 7 aa, synthetic construct
QEIPKFK

SEQ ID NO: 174241 - protein, 7 aa, synthetic construct
GEKIRTT

SEQ ID NO: 174242 - protein, 7 aa, synthetic construct
NDKPKMT

SEQ ID NO: 174243 - protein, 7 aa, synthetic construct
GEKKKDL

SEQ ID NO: 174244 - protein, 7 aa, synthetic construct
TEQPKRT

SEQ ID NO: 174245 - protein, 7 aa, synthetic construct
QEKPKMS

SEQ ID NO: 174246 - protein, 7 aa, synthetic construct
TEKPRVT

SEQ ID NO: 174247 - protein, 7 aa, synthetic construct
GESPKRI

SEQ ID NO: 174248 - protein, 7 aa, synthetic construct
GEKPYKV

SEQ ID NO: 174249 - protein, 7 aa, synthetic construct
GETAKFK

SEQ ID NO: 174250 - protein, 7 aa, synthetic construct
ASKPKFD

SEQ ID NO: 174251 - protein, 7 aa, synthetic construct
GENLKRT

SEQ ID NO: 174252 - protein, 7 aa, synthetic construct
GEKPRLQ

SEQ ID NO: 174253 - protein, 7 aa, synthetic construct
MEKRNFT

SEQ ID NO: 174254 - protein, 7 aa, synthetic construct
GEKPRTV

SEQ ID NO: 174255 - protein, 7 aa, synthetic construct
GPQPKYT

SEQ ID NO: 174256 - protein, 7 aa, synthetic construct
GAKPKEW

SEQ ID NO: 174257 - protein, 7 aa, synthetic construct
KEMPKFN

SEQ ID NO: 174258 - protein, 7 aa, synthetic construct
GEKGKVW

SEQ ID NO: 174259 - protein, 7 aa, synthetic construct
GLKPRFE

SEQ ID NO: 174260 - protein, 7 aa, synthetic construct
PERPKFA

SEQ ID NO: 174261 - protein, 7 aa, synthetic construct
PEKPKSF

SEQ ID NO: 174262 - protein, 7 aa, synthetic construct
GETPKKY

SEQ ID NO: 174263 - protein, 7 aa, synthetic construct
GEKTRFG

SEQ ID NO: 174264 - protein, 7 aa, synthetic construct
GEGKKAT

SEQ ID NO: 174265 - protein, 7 aa, synthetic construct
GEVKKFI

SEQ ID NO: 174266 - protein, 7 aa, synthetic construct
GDKPKGY

SEQ ID NO: 174267 - protein, 7 aa, synthetic construct
GEKPAKF

SEQ ID NO: 174268 - protein, 7 aa, synthetic construct
GMTHKFT

SEQ ID NO: 174269 - protein, 7 aa, synthetic construct
AEVPKRT

SEQ ID NO: 174270 - protein, 7 aa, synthetic construct
GDKPKFN

SEQ ID NO: 174271 - protein, 7 aa, synthetic construct
GDKPRFS

SEQ ID NO: 174272 - protein, 7 aa, synthetic construct
DEKAKFR

SEQ ID NO: 174273 - protein, 7 aa, synthetic construct
GEITKFK

SEQ ID NO: 174274 - protein, 7 aa, synthetic construct
MEKPKSL

SEQ ID NO: 174275 - protein, 7 aa, synthetic construct
GETGKFR

SEQ ID NO: 174276 - protein, 7 aa, synthetic construct
AEMPKFK

SEQ ID NO: 174277 - protein, 7 aa, synthetic construct
EMKPKFP

SEQ ID NO: 174278 - protein, 7 aa, synthetic construct
GEIPKRG

SEQ ID NO: 174279 - protein, 7 aa, synthetic construct
GEARKQT

SEQ ID NO: 174280 - protein, 7 aa, synthetic construct
GEKPYPK

SEQ ID NO: 174281 - protein, 7 aa, synthetic construct
GEKYKYP

SEQ ID NO: 174282 - protein, 7 aa, synthetic construct
DEKKKFG

SEQ ID NO: 174283 - protein, 7 aa, synthetic construct
GEKKIFT

SEQ ID NO: 174284 - protein, 7 aa, synthetic construct
GEKNQRT

SEQ ID NO: 174285 - protein, 7 aa, synthetic construct
MELPKFK

SEQ ID NO: 174286 - protein, 7 aa, synthetic construct
YEKGKFI

SEQ ID NO: 174287 - protein, 7 aa, synthetic construct
AIKPKFD

SEQ ID NO: 174288 - protein, 7 aa, synthetic construct
QEKPKIQ

SEQ ID NO: 174289 - protein, 7 aa, synthetic construct
NPHPKFT

SEQ ID NO: 174290 - protein, 7 aa, synthetic construct
EMKPRFT

SEQ ID NO: 174291 - protein, 7 aa, synthetic construct
QEKPRHT

SEQ ID NO: 174292 - protein, 7 aa, synthetic construct
PEKYKAT

SEQ ID NO: 174293 - protein, 7 aa, synthetic construct
PEKPKSG

SEQ ID NO: 174294 - protein, 7 aa, synthetic construct
APHPKFT

SEQ ID NO: 174295 - protein, 7 aa, synthetic construct
HEKPKGL

SEQ ID NO: 174296 - protein, 7 aa, synthetic construct
TEKPKII

SEQ ID NO: 174297 - protein, 7 aa, synthetic construct
GHKVKFD

SEQ ID NO: 174298 - protein, 7 aa, synthetic construct
DSKPKFS

SEQ ID NO: 174299 - protein, 7 aa, synthetic construct
DAKPKYT

SEQ ID NO: 174300 - protein, 7 aa, synthetic construct
GVKPKDW

SEQ ID NO: 174301 - protein, 7 aa, synthetic construct
KEKPKFD

SEQ ID NO: 174302 - protein, 7 aa, synthetic construct
GEKRAFQ

SEQ ID NO: 174303 - protein, 7 aa, synthetic construct
GEGAKFK

SEQ ID NO: 174304 - protein, 7 aa, synthetic construct
GEKKSFM

SEQ ID NO: 174305 - protein, 7 aa, synthetic construct
PEKIKFA

SEQ ID NO: 174306 - protein, 7 aa, synthetic construct
VEKPKNH

SEQ ID NO: 174307 - protein, 7 aa, synthetic construct
GSKPKGD

SEQ ID NO: 174308 - protein, 7 aa, synthetic construct
GEKPRQQ

SEQ ID NO: 174309 - protein, 7 aa, synthetic construct
WEKNKFG

SEQ ID NO: 174310 - protein, 7 aa, synthetic construct
GEKRAIT

SEQ ID NO: 174311 - protein, 7 aa, synthetic construct
YEKPKIG

SEQ ID NO: 174312 - protein, 7 aa, synthetic construct
IEKHKYT

SEQ ID NO: 174313 - protein, 7 aa, synthetic construct
GEPPKQK

SEQ ID NO: 174314 - protein, 7 aa, synthetic construct
GEKLKNW

SEQ ID NO: 174315 - protein, 7 aa, synthetic construct
MDKPKNT

SEQ ID NO: 174316 - protein, 7 aa, synthetic construct
AEKPKIP

SEQ ID NO: 174317 - protein, 7 aa, synthetic construct
DMKPRFT

SEQ ID NO: 174318 - protein, 7 aa, synthetic construct
GESKKFV

SEQ ID NO: 174319 - protein, 7 aa, synthetic construct
MEKPKHM

SEQ ID NO: 174320 - protein, 7 aa, synthetic construct
GEKPKYI

SEQ ID NO: 174321 - protein, 7 aa, synthetic construct
PDKPKST

SEQ ID NO: 174322 - protein, 7 aa, synthetic construct
GVGPKFQ

SEQ ID NO: 174323 - protein, 7 aa, synthetic construct
MEKPKNF

SEQ ID NO: 174324 - protein, 7 aa, synthetic construct
AEKPRMT

SEQ ID NO: 174325 - protein, 7 aa, synthetic construct
GDKFKFV

SEQ ID NO: 174326 - protein, 7 aa, synthetic construct
GEKPKGM

SEQ ID NO: 174327 - protein, 7 aa, synthetic construct
GEKPRTF

SEQ ID NO: 174328 - protein, 7 aa, synthetic construct
VEKPKSQ

SEQ ID NO: 174329 - protein, 7 aa, synthetic construct
TEAPKFR

SEQ ID NO: 174330 - protein, 7 aa, synthetic construct
GKKPEFM

SEQ ID NO: 174331 - protein, 7 aa, synthetic construct
GSKLKFD

SEQ ID NO: 174332 - protein, 7 aa, synthetic construct
TEKHKFM

SEQ ID NO: 174333 - protein, 7 aa, synthetic construct
GTIPKFT

SEQ ID NO: 174334 - protein, 7 aa, synthetic construct
REKPRDT

SEQ ID NO: 174335 - protein, 7 aa, synthetic construct
GPHPKYT

SEQ ID NO: 174336 - protein, 7 aa, synthetic construct
HEKPKSV

SEQ ID NO: 174337 - protein, 7 aa, synthetic construct
TEKPKFP

SEQ ID NO: 174338 - protein, 7 aa, synthetic construct
GGKPKDY

SEQ ID NO: 174339 - protein, 7 aa, synthetic construct
TMHPKFT

SEQ ID NO: 174340 - protein, 7 aa, synthetic construct
AEKPKAV

SEQ ID NO: 174341 - protein, 7 aa, synthetic construct
WEKMKFA

SEQ ID NO: 174342 - protein, 7 aa, synthetic construct
GPKPHFN

SEQ ID NO: 174343 - protein, 7 aa, synthetic construct
SSHPKFT

SEQ ID NO: 174344 - protein, 7 aa, synthetic construct
AEKQRFT

SEQ ID NO: 174345 - protein, 7 aa, synthetic construct
PIKPKFD

SEQ ID NO: 174346 - protein, 7 aa, synthetic construct
QSKPKDT

SEQ ID NO: 174347 - protein, 7 aa, synthetic construct
NEKPKHS

SEQ ID NO: 174348 - protein, 7 aa, synthetic construct
SEKPKPH

SEQ ID NO: 174349 - protein, 7 aa, synthetic construct
TDKPRFT

SEQ ID NO: 174350 - protein, 7 aa, synthetic construct
AEKNKFM

SEQ ID NO: 174351 - protein, 7 aa, synthetic construct
GSNPKHT

SEQ ID NO: 174352 - protein, 7 aa, synthetic construct
SDKPKHT

SEQ ID NO: 174353 - protein, 7 aa, synthetic construct
HNKPKDT

SEQ ID NO: 174354 - protein, 7 aa, synthetic construct
QEKPKFF

SEQ ID NO: 174355 - protein, 7 aa, synthetic construct
DGKPKIT

SEQ ID NO: 174356 - protein, 7 aa, synthetic construct
EKVPKFT

SEQ ID NO: 174357 - protein, 7 aa, synthetic construct
VETPKFK

SEQ ID NO: 174358 - protein, 7 aa, synthetic construct
GEKPRAI

SEQ ID NO: 174359 - protein, 7 aa, synthetic construct
TDKPKFY

SEQ ID NO: 174360 - protein, 7 aa, synthetic construct
DFKPKFV

SEQ ID NO: 174361 - protein, 7 aa, synthetic construct
GEKNKGW

SEQ ID NO: 174362 - protein, 7 aa, synthetic construct
GEKPPRF

SEQ ID NO: 174363 - protein, 7 aa, synthetic construct
NEKNKFF

SEQ ID NO: 174364 - protein, 7 aa, synthetic construct
WSKPKDT

SEQ ID NO: 174365 - protein, 7 aa, synthetic construct
YDKPKFV

SEQ ID NO: 174366 - protein, 7 aa, synthetic construct
GDKHKFL

SEQ ID NO: 174367 - protein, 7 aa, synthetic construct
EKQPKFT

SEQ ID NO: 174368 - protein, 7 aa, synthetic construct
GEKRPTT

SEQ ID NO: 174369 - protein, 7 aa, synthetic construct
TEKPKIM

SEQ ID NO: 174370 - protein, 7 aa, synthetic construct
GDKPKAS

SEQ ID NO: 174371 - protein, 7 aa, synthetic construct
VSKPKFD

SEQ ID NO: 174372 - protein, 7 aa, synthetic construct
TAGPKFT

SEQ ID NO: 174373 - protein, 7 aa, synthetic construct
GELPKAR

SEQ ID NO: 174374 - protein, 7 aa, synthetic construct
YEGPKRT

SEQ ID NO: 174375 - protein, 7 aa, synthetic construct
GHKPSNT

SEQ ID NO: 174376 - protein, 7 aa, synthetic construct
PHKPKDT

SEQ ID NO: 174377 - protein, 7 aa, synthetic construct
AEKYKFG

SEQ ID NO: 174378 - protein, 7 aa, synthetic construct
NEKPRFM

SEQ ID NO: 174379 - protein, 7 aa, synthetic construct
VESPKRT

SEQ ID NO: 174380 - protein, 7 aa, synthetic construct
GEQVKRT

SEQ ID NO: 174381 - protein, 7 aa, synthetic construct
GEKPRDK

SEQ ID NO: 174382 - protein, 7 aa, synthetic construct
REKPKDY

SEQ ID NO: 174383 - protein, 7 aa, synthetic construct
EVKPKFS

SEQ ID NO: 174384 - protein, 7 aa, synthetic construct
AEQPKFK

SEQ ID NO: 174385 - protein, 7 aa, synthetic construct
GEKRLLT

SEQ ID NO: 174386 - protein, 7 aa, synthetic construct
GEKPTNR

SEQ ID NO: 174387 - protein, 7 aa, synthetic construct
DHKPKFP

SEQ ID NO: 174388 - protein, 7 aa, synthetic construct
GENIKFK

SEQ ID NO: 174389 - protein, 7 aa, synthetic construct
GDKPRGT

SEQ ID NO: 174390 - protein, 7 aa, synthetic construct
AEKPKVY

SEQ ID NO: 174391 - protein, 7 aa, synthetic construct
VEKPKRE

SEQ ID NO: 174392 - protein, 7 aa, synthetic construct
SEKPKFN

SEQ ID NO: 174393 - protein, 7 aa, synthetic construct
NEKFKFT

SEQ ID NO: 174394 - protein, 7 aa, synthetic construct
HTKPSFT

SEQ ID NO: 174395 - protein, 7 aa, synthetic construct
GALPKYT

SEQ ID NO: 174396 - protein, 7 aa, synthetic construct
GEKVRFN

SEQ ID NO: 174397 - protein, 7 aa, synthetic construct
HEKPKMI

SEQ ID NO: 174398 - protein, 7 aa, synthetic construct
FEKPKSI

SEQ ID NO: 174399 - protein, 7 aa, synthetic construct
MEKVKFY

SEQ ID NO: 174400 - protein, 7 aa, synthetic construct
GEKPFRQ

SEQ ID NO: 174401 - protein, 7 aa, synthetic construct
LEKPRAT

SEQ ID NO: 174402 - protein, 7 aa, synthetic construct
DSKPKYT

SEQ ID NO: 174403 - protein, 7 aa, synthetic construct
GEKKQFF

SEQ ID NO: 174404 - protein, 7 aa, synthetic construct
AEKAKFY

SEQ ID NO: 174405 - protein, 7 aa, synthetic construct
PEKPAFR

SEQ ID NO: 174406 - protein, 7 aa, synthetic construct
LEKPKHL

SEQ ID NO: 174407 - protein, 7 aa, synthetic construct
GEGPKLR

SEQ ID NO: 174408 - protein, 7 aa, synthetic construct
FEKPTRT

SEQ ID NO: 174409 - protein, 7 aa, synthetic construct
TEKPKAI

SEQ ID NO: 174410 - protein, 7 aa, synthetic construct
GERLKFN

SEQ ID NO: 174411 - protein, 7 aa, synthetic construct
METPKRT

SEQ ID NO: 174412 - protein, 7 aa, synthetic construct
DQKHKFT

SEQ ID NO: 174413 - protein, 7 aa, synthetic construct
RENPKFG

SEQ ID NO: 174414 - protein, 7 aa, synthetic construct
GEKREKT

SEQ ID NO: 174415 - protein, 7 aa, synthetic construct
GAHPKFG

SEQ ID NO: 174416 - protein, 7 aa, synthetic construct
GHKAKDT

SEQ ID NO: 174417 - protein, 7 aa, synthetic construct
GENPKQK

SEQ ID NO: 174418 - protein, 7 aa, synthetic construct
GMAPKYT

SEQ ID NO: 174419 - protein, 7 aa, synthetic construct
MEKPKVF

SEQ ID NO: 174420 - protein, 7 aa, synthetic construct
GEKHKYA

SEQ ID NO: 174421 - protein, 7 aa, synthetic construct
QEKPRMT

SEQ ID NO: 174422 - protein, 7 aa, synthetic construct
GELPKRV

SEQ ID NO: 174423 - protein, 7 aa, synthetic construct
MEKPKFG

SEQ ID NO: 174424 - protein, 7 aa, synthetic construct
QEKPRTT

SEQ ID NO: 174425 - protein, 7 aa, synthetic construct
LEHPKRT

SEQ ID NO: 174426 - protein, 7 aa, synthetic construct
IEKPRFA

SEQ ID NO: 174427 - protein, 7 aa, synthetic construct
ENKIKFT

SEQ ID NO: 174428 - protein, 7 aa, synthetic construct
AEKPKIG

SEQ ID NO: 174429 - protein, 7 aa, synthetic construct
DKKPKDT

SEQ ID NO: 174430 - protein, 7 aa, synthetic construct
EAKPKVT

SEQ ID NO: 174431 - protein, 7 aa, synthetic construct
TERPKFA

SEQ ID NO: 174432 - protein, 7 aa, synthetic construct
GEKQVRT

SEQ ID NO: 174433 - protein, 7 aa, synthetic construct
GGKPKDH

SEQ ID NO: 174434 - protein, 7 aa, synthetic construct
GEKMSRT

SEQ ID NO: 174435 - protein, 7 aa, synthetic construct
AEKPKTQ

SEQ ID NO: 174436 - protein, 7 aa, synthetic construct
EKKPKFD

SEQ ID NO: 174437 - protein, 7 aa, synthetic construct
GEKRALT

SEQ ID NO: 174438 - protein, 7 aa, synthetic construct
VEKPKIY

SEQ ID NO: 174439 - protein, 7 aa, synthetic construct
FVKPKFE

SEQ ID NO: 174440 - protein, 7 aa, synthetic construct
PEKPIKT

SEQ ID NO: 174441 - protein, 7 aa, synthetic construct
PESPKFK

SEQ ID NO: 174442 - protein, 7 aa, synthetic construct
GMHPKIT

SEQ ID NO: 174443 - protein, 7 aa, synthetic construct
GEKTKWG

SEQ ID NO: 174444 - protein, 7 aa, synthetic construct
GELPKMK

SEQ ID NO: 174445 - protein, 7 aa, synthetic construct
GETSKFR

SEQ ID NO: 174446 - protein, 7 aa, synthetic construct
TDKPKFL

SEQ ID NO: 174447 - protein, 7 aa, synthetic construct
GEKPTKY

SEQ ID NO: 174448 - protein, 7 aa, synthetic construct
GEKPSRI

SEQ ID NO: 174449 - protein, 7 aa, synthetic construct
VEKPKFL

SEQ ID NO: 174450 - protein, 7 aa, synthetic construct
GEGKKFT

SEQ ID NO: 174451 - protein, 7 aa, synthetic construct
QYKPKFD

SEQ ID NO: 174452 - protein, 7 aa, synthetic construct
SHKPSFT

SEQ ID NO: 174453 - protein, 7 aa, synthetic construct
EMKPKIT

SEQ ID NO: 174454 - protein, 7 aa, synthetic construct
PEKPNFR

SEQ ID NO: 174455 - protein, 7 aa, synthetic construct
GEKQKHL

SEQ ID NO: 174456 - protein, 7 aa, synthetic construct
ESKPKNT

SEQ ID NO: 174457 - protein, 7 aa, synthetic construct
GENRKFI

SEQ ID NO: 174458 - protein, 7 aa, synthetic construct
DLKHKFT

SEQ ID NO: 174459 - protein, 7 aa, synthetic construct
YEGPKFR

SEQ ID NO: 174460 - protein, 7 aa, synthetic construct
MEKPRFG

SEQ ID NO: 174461 - protein, 7 aa, synthetic construct
GRKDKFD

SEQ ID NO: 174462 - protein, 7 aa, synthetic construct
GHKLKFD

SEQ ID NO: 174463 - protein, 7 aa, synthetic construct
LERPKFA

SEQ ID NO: 174464 - protein, 7 aa, synthetic construct
AEKPKMQ

SEQ ID NO: 174465 - protein, 7 aa, synthetic construct
HEKPKLY

SEQ ID NO: 174466 - protein, 7 aa, synthetic construct
GENLKKT

SEQ ID NO: 174467 - protein, 7 aa, synthetic construct
SEKPRLT

SEQ ID NO: 174468 - protein, 7 aa, synthetic construct
AEKGRFT

SEQ ID NO: 174469 - protein, 7 aa, synthetic construct
GEPKKFI

SEQ ID NO: 174470 - protein, 7 aa, synthetic construct
HEKPKSY

SEQ ID NO: 174471 - protein, 7 aa, synthetic construct
GEKPAYK

SEQ ID NO: 174472 - protein, 7 aa, synthetic construct
GEMPKIK

SEQ ID NO: 174473 - protein, 7 aa, synthetic construct
TDKPKFG

SEQ ID NO: 174474 - protein, 7 aa, synthetic construct
GEIPKRS

SEQ ID NO: 174475 - protein, 7 aa, synthetic construct
GEMPKQR

SEQ ID NO: 174476 - protein, 7 aa, synthetic construct
QEKPKLG

SEQ ID NO: 174477 - protein, 7 aa, synthetic construct
GPHPKQT

SEQ ID NO: 174478 - protein, 7 aa, synthetic construct
VYKPKDT

SEQ ID NO: 174479 - protein, 7 aa, synthetic construct
MEKPKWA

SEQ ID NO: 174480 - protein, 7 aa, synthetic construct
AEKPKLG

SEQ ID NO: 174481 - protein, 7 aa, synthetic construct
DRPPKFT

SEQ ID NO: 174482 - protein, 7 aa, synthetic construct
GEVKRFT

SEQ ID NO: 174483 - protein, 7 aa, synthetic construct
GEKRGQT

SEQ ID NO: 174484 - protein, 7 aa, synthetic construct
REGPKFV

SEQ ID NO: 174485 - protein, 7 aa, synthetic construct
GIQHKFT

SEQ ID NO: 174486 - protein, 7 aa, synthetic construct
GEKPARG

SEQ ID NO: 174487 - protein, 7 aa, synthetic construct
WEKIKMT

SEQ ID NO: 174488 - protein, 7 aa, synthetic construct
VEVPKRT

SEQ ID NO: 174489 - protein, 7 aa, synthetic construct
GERIKMT

SEQ ID NO: 174490 - protein, 7 aa, synthetic construct
GDKPKFY

SEQ ID NO: 174491 - protein, 7 aa, synthetic construct
VEKPKHL

SEQ ID NO: 174492 - protein, 7 aa, synthetic construct
GEAQKFK

SEQ ID NO: 174493 - protein, 7 aa, synthetic construct
HEKPKMA

SEQ ID NO: 174494 - protein, 7 aa, synthetic construct
GEKRLIT

SEQ ID NO: 174495 - protein, 7 aa, synthetic construct
GEKLKKD

SEQ ID NO: 174496 - protein, 7 aa, synthetic construct
GSNPKYT

SEQ ID NO: 174497 - protein, 7 aa, synthetic construct
GDKPKQT

SEQ ID NO: 174498 - protein, 7 aa, synthetic construct
LEHPKFK

SEQ ID NO: 174499 - protein, 7 aa, synthetic construct
QEKIKFL

SEQ ID NO: 174500 - protein, 7 aa, synthetic construct
PEAKKFT

SEQ ID NO: 174501 - protein, 7 aa, synthetic construct
GEKHKVY

SEQ ID NO: 174502 - protein, 7 aa, synthetic construct
MEKHKYT

SEQ ID NO: 174503 - protein, 7 aa, synthetic construct
GEKPRNM

SEQ ID NO: 174504 - protein, 7 aa, synthetic construct
GGHPKFS

SEQ ID NO: 174505 - protein, 7 aa, synthetic construct
GERPKVI

SEQ ID NO: 174506 - protein, 7 aa, synthetic construct
DHKIKFT

SEQ ID NO: 174507 - protein, 7 aa, synthetic construct
TDKPKFS

SEQ ID NO: 174508 - protein, 7 aa, synthetic construct
GEKPSRT

SEQ ID NO: 174509 - protein, 7 aa, synthetic construct
DGKPKMT

SEQ ID NO: 174510 - protein, 7 aa, synthetic construct
GEKAKKD

SEQ ID NO: 174511 - protein, 7 aa, synthetic construct
GEKGKFY

SEQ ID NO: 174512 - protein, 7 aa, synthetic construct
GEPPKRG

SEQ ID NO: 174513 - protein, 7 aa, synthetic construct
DNKHKFT

SEQ ID NO: 174514 - protein, 7 aa, synthetic construct
ENKPKMT

SEQ ID NO: 174515 - protein, 7 aa, synthetic construct
GPKPYST

SEQ ID NO: 174516 - protein, 7 aa, synthetic construct
VEKPKFA

SEQ ID NO: 174517 - protein, 7 aa, synthetic construct
AEKPKMS

SEQ ID NO: 174518 - protein, 7 aa, synthetic construct
MEKPRVT

SEQ ID NO: 174519 - protein, 7 aa, synthetic construct
NDKPKNT

SEQ ID NO: 174520 - protein, 7 aa, synthetic construct
GDKNKFL

SEQ ID NO: 174521 - protein, 7 aa, synthetic construct
NEKPKML

SEQ ID NO: 174522 - protein, 7 aa, synthetic construct
HEKPKHV

SEQ ID NO: 174523 - protein, 7 aa, synthetic construct
GEKPQKL

SEQ ID NO: 174524 - protein, 7 aa, synthetic construct
VEKPKWN

SEQ ID NO: 174525 - protein, 7 aa, synthetic construct
GEQPKKP

SEQ ID NO: 174526 - protein, 7 aa, synthetic construct
TDKPKYT

SEQ ID NO: 174527 - protein, 7 aa, synthetic construct
GEKRVLT

SEQ ID NO: 174528 - protein, 7 aa, synthetic construct
YEKIKFQ

SEQ ID NO: 174529 - protein, 7 aa, synthetic construct
GQHPKNT

SEQ ID NO: 174530 - protein, 7 aa, synthetic construct
DMKHKFT

SEQ ID NO: 174531 - protein, 7 aa, synthetic construct
GSHPKFG

SEQ ID NO: 174532 - protein, 7 aa, synthetic construct
GENPKKI

SEQ ID NO: 174533 - protein, 7 aa, synthetic construct
HEKQKFY

SEQ ID NO: 174534 - protein, 7 aa, synthetic construct
GERPTFK

SEQ ID NO: 174535 - protein, 7 aa, synthetic construct
GQKPKDH

SEQ ID NO: 174536 - protein, 7 aa, synthetic construct
AEKPKVH

SEQ ID NO: 174537 - protein, 7 aa, synthetic construct
ADKPKFL

SEQ ID NO: 174538 - protein, 7 aa, synthetic construct
GEIPKKT

SEQ ID NO: 174539 - protein, 7 aa, synthetic construct
GEMPKIR

SEQ ID NO: 174540 - protein, 7 aa, synthetic construct
GETAKFR

SEQ ID NO: 174541 - protein, 7 aa, synthetic construct
GEVPKNR

SEQ ID NO: 174542 - protein, 7 aa, synthetic construct
GEKRAFN

SEQ ID NO: 174543 - protein, 7 aa, synthetic construct
DSKPKLT

SEQ ID NO: 174544 - protein, 7 aa, synthetic construct
GEAPKKT

SEQ ID NO: 174545 - protein, 7 aa, synthetic construct
ADKPKYT

SEQ ID NO: 174546 - protein, 7 aa, synthetic construct
GEVPKAR

SEQ ID NO: 174547 - protein, 7 aa, synthetic construct
AFKPKDT

SEQ ID NO: 174548 - protein, 7 aa, synthetic construct
DNKPKYT

SEQ ID NO: 174549 - protein, 7 aa, synthetic construct
YEKPIRT

SEQ ID NO: 174550 - protein, 7 aa, synthetic construct
VEKPRVT

SEQ ID NO: 174551 - protein, 7 aa, synthetic construct
ENKPKPT

SEQ ID NO: 174552 - protein, 7 aa, synthetic construct
NFKPKFE

SEQ ID NO: 174553 - protein, 7 aa, synthetic construct
TEKPKTY

SEQ ID NO: 174554 - protein, 7 aa, synthetic construct
GEALKFK

SEQ ID NO: 174555 - protein, 7 aa, synthetic construct
GEKPVQR

SEQ ID NO: 174556 - protein, 7 aa, synthetic construct
GEKKQFY

SEQ ID NO: 174557 - protein, 7 aa, synthetic construct
GPSHKFT

SEQ ID NO: 174558 - protein, 7 aa, synthetic construct
TEKPNFK

SEQ ID NO: 174559 - protein, 7 aa, synthetic construct
GEKPRYQ

SEQ ID NO: 174560 - protein, 7 aa, synthetic construct
GQHPKMT

SEQ ID NO: 174561 - protein, 7 aa, synthetic construct
DYKPKFG

SEQ ID NO: 174562 - protein, 7 aa, synthetic construct
GERPKPT

SEQ ID NO: 174563 - protein, 7 aa, synthetic construct
GEGKKFG

SEQ ID NO: 174564 - protein, 7 aa, synthetic construct
GEKRPAT

SEQ ID NO: 174565 - protein, 7 aa, synthetic construct
GEKPNMK

SEQ ID NO: 174566 - protein, 7 aa, synthetic construct
AEKPKQH

SEQ ID NO: 174567 - protein, 7 aa, synthetic construct
REIPKFG

SEQ ID NO: 174568 - protein, 7 aa, synthetic construct
GEKQKHS

SEQ ID NO: 174569 - protein, 7 aa, synthetic construct
GERPKPQ

SEQ ID NO: 174570 - protein, 7 aa, synthetic construct
TEKPRYT

SEQ ID NO: 174571 - protein, 7 aa, synthetic construct
SDKPKFH

SEQ ID NO: 174572 - protein, 7 aa, synthetic construct
TIKPKFD

SEQ ID NO: 174573 - protein, 7 aa, synthetic construct
TEKPHFK

SEQ ID NO: 174574 - protein, 7 aa, synthetic construct
GEKMKRD

SEQ ID NO: 174575 - protein, 7 aa, synthetic construct
HIKPKFE

SEQ ID NO: 174576 - protein, 7 aa, synthetic construct
GDKPKSS

SEQ ID NO: 174577 - protein, 7 aa, synthetic construct
GEKRAFI

SEQ ID NO: 174578 - protein, 7 aa, synthetic construct
REKRDFT

SEQ ID NO: 174579 - protein, 7 aa, synthetic construct
GERPKVF

SEQ ID NO: 174580 - protein, 7 aa, synthetic construct
GETPKPR

SEQ ID NO: 174581 - protein, 7 aa, synthetic construct
AEKPKLS

SEQ ID NO: 174582 - protein, 7 aa, synthetic construct
YEKPRFA

SEQ ID NO: 174583 - protein, 7 aa, synthetic construct
QEKPKMW

SEQ ID NO: 174584 - protein, 7 aa, synthetic construct
KEHPKFV

SEQ ID NO: 174585 - protein, 7 aa, synthetic construct
LEKPKWQ

SEQ ID NO: 174586 - protein, 7 aa, synthetic construct
TIHPKFT

SEQ ID NO: 174587 - protein, 7 aa, synthetic construct
GEAPKQK

SEQ ID NO: 174588 - protein, 7 aa, synthetic construct
GEKIKWG

SEQ ID NO: 174589 - protein, 7 aa, synthetic construct
WEKVKFN

SEQ ID NO: 174590 - protein, 7 aa, synthetic construct
DQKPKFM

SEQ ID NO: 174591 - protein, 7 aa, synthetic construct
REAPKFA

SEQ ID NO: 174592 - protein, 7 aa, synthetic construct
DDKPKRT

SEQ ID NO: 174593 - protein, 7 aa, synthetic construct
GEKPKMQ

SEQ ID NO: 174594 - protein, 7 aa, synthetic construct
GGKYKET

SEQ ID NO: 174595 - protein, 7 aa, synthetic construct
HETPKFK

SEQ ID NO: 174596 - protein, 7 aa, synthetic construct
GEKPKLL

SEQ ID NO: 174597 - protein, 7 aa, synthetic construct
GEKPSMR

SEQ ID NO: 174598 - protein, 7 aa, synthetic construct
QERPKST

SEQ ID NO: 174599 - protein, 7 aa, synthetic construct
GERPKNT

SEQ ID NO: 174600 - protein, 7 aa, synthetic construct
AGKPKFD

SEQ ID NO: 174601 - protein, 7 aa, synthetic construct
REKPKGD

SEQ ID NO: 174602 - protein, 7 aa, synthetic construct
DYKPKFQ

SEQ ID NO: 174603 - protein, 7 aa, synthetic construct
LMKPKFD

SEQ ID NO: 174604 - protein, 7 aa, synthetic construct
FEKPKQN

SEQ ID NO: 174605 - protein, 7 aa, synthetic construct
GEYKKFV

SEQ ID NO: 174606 - protein, 7 aa, synthetic construct
IFKPKFE

SEQ ID NO: 174607 - protein, 7 aa, synthetic construct
GDKPKER

SEQ ID NO: 174608 - protein, 7 aa, synthetic construct
VEKPVRT

SEQ ID NO: 174609 - protein, 7 aa, synthetic construct
REGPKFG

SEQ ID NO: 174610 - protein, 7 aa, synthetic construct
QEKPKIL

SEQ ID NO: 174611 - protein, 7 aa, synthetic construct
DIKPKFH

SEQ ID NO: 174612 - protein, 7 aa, synthetic construct
AEKPKMY

SEQ ID NO: 174613 - protein, 7 aa, synthetic construct
MEKPRYT

SEQ ID NO: 174614 - protein, 7 aa, synthetic construct
GDKHKFS

SEQ ID NO: 174615 - protein, 7 aa, synthetic construct
TDKPKFH

SEQ ID NO: 174616 - protein, 7 aa, synthetic construct
GEKPHKV

SEQ ID NO: 174617 - protein, 7 aa, synthetic construct
GEVPKNK

SEQ ID NO: 174618 - protein, 7 aa, synthetic construct
GEKKLFL

SEQ ID NO: 174619 - protein, 7 aa, synthetic construct
GHKNKET

SEQ ID NO: 174620 - protein, 7 aa, synthetic construct
GDKPKGT

SEQ ID NO: 174621 - protein, 7 aa, synthetic construct
DHKPKNT

SEQ ID NO: 174622 - protein, 7 aa, synthetic construct
NEKPRLT

SEQ ID NO: 174623 - protein, 7 aa, synthetic construct
GRKPDFN

SEQ ID NO: 174624 - protein, 7 aa, synthetic construct
TEKVKFF

SEQ ID NO: 174625 - protein, 7 aa, synthetic construct
EKMPKFT

SEQ ID NO: 174626 - protein, 7 aa, synthetic construct
AERPKFS

SEQ ID NO: 174627 - protein, 7 aa, synthetic construct
SELPKFK

SEQ ID NO: 174628 - protein, 7 aa, synthetic construct
NDKPKFN

SEQ ID NO: 174629 - protein, 7 aa, synthetic construct
FGKPKFD

SEQ ID NO: 174630 - protein, 7 aa, synthetic construct
EMKQKFT

SEQ ID NO: 174631 - protein, 7 aa, synthetic construct
GDMPKRT

SEQ ID NO: 174632 - protein, 7 aa, synthetic construct
PEKKTFT

SEQ ID NO: 174633 - protein, 7 aa, synthetic construct
GNPHKFT

SEQ ID NO: 174634 - protein, 7 aa, synthetic construct
GEKRMGT

SEQ ID NO: 174635 - protein, 7 aa, synthetic construct
HEKPKLF

SEQ ID NO: 174636 - protein, 7 aa, synthetic construct
QEKPKSS

SEQ ID NO: 174637 - protein, 7 aa, synthetic construct
GERPKTG

SEQ ID NO: 174638 - protein, 7 aa, synthetic construct
HTGPKFT

SEQ ID NO: 174639 - protein, 7 aa, synthetic construct
VEKRAFT

SEQ ID NO: 174640 - protein, 7 aa, synthetic construct
GEKPRQN

SEQ ID NO: 174641 - protein, 7 aa, synthetic construct
EGKPKVT

SEQ ID NO: 174642 - protein, 7 aa, synthetic construct
AEKPVFR

SEQ ID NO: 174643 - protein, 7 aa, synthetic construct
GEKLRFS

SEQ ID NO: 174644 - protein, 7 aa, synthetic construct
TEKPLFR

SEQ ID NO: 174645 - protein, 7 aa, synthetic construct
SETPKFK

SEQ ID NO: 174646 - protein, 7 aa, synthetic construct
GEKPQNR

SEQ ID NO: 174647 - protein, 7 aa, synthetic construct
SEKGRFT

SEQ ID NO: 174648 - protein, 7 aa, synthetic construct
DAKPKMT

SEQ ID NO: 174649 - protein, 7 aa, synthetic construct
GEKPKHT

SEQ ID NO: 174650 - protein, 7 aa, synthetic construct
GQKPKDQ

SEQ ID NO: 174651 - protein, 7 aa, synthetic construct
GEKMRNT

SEQ ID NO: 174652 - protein, 7 aa, synthetic construct
GEKPRIF

SEQ ID NO: 174653 - protein, 7 aa, synthetic construct
GAHPKYT

SEQ ID NO: 174654 - protein, 7 aa, synthetic construct
GDKPKWS

SEQ ID NO: 174655 - protein, 7 aa, synthetic construct
GEKWKVS

SEQ ID NO: 174656 - protein, 7 aa, synthetic construct
GVHPKYT

SEQ ID NO: 174657 - protein, 7 aa, synthetic construct
YEKKKFD

SEQ ID NO: 174658 - protein, 7 aa, synthetic construct
YMKPKFE

SEQ ID NO: 174659 - protein, 7 aa, synthetic construct
GYKPKDQ

SEQ ID NO: 174660 - protein, 7 aa, synthetic construct
GLRPKFE

SEQ ID NO: 174661 - protein, 7 aa, synthetic construct
AEKPKFS

SEQ ID NO: 174662 - protein, 7 aa, synthetic construct
GSIPKYT

SEQ ID NO: 174663 - protein, 7 aa, synthetic construct
KESPKFS

SEQ ID NO: 174664 - protein, 7 aa, synthetic construct
GEKRNIT

SEQ ID NO: 174665 - protein, 7 aa, synthetic construct
GGKPKDM

SEQ ID NO: 174666 - protein, 7 aa, synthetic construct
PEKPIRT

SEQ ID NO: 174667 - protein, 7 aa, synthetic construct
SEKYKFG

SEQ ID NO: 174668 - protein, 7 aa, synthetic construct
GEPPKNR

SEQ ID NO: 174669 - protein, 7 aa, synthetic construct
GTPHKFT

SEQ ID NO: 174670 - protein, 7 aa, synthetic construct
QEKPKPQ

SEQ ID NO: 174671 - protein, 7 aa, synthetic construct
IEKRSFT

SEQ ID NO: 174672 - protein, 7 aa, synthetic construct
VDKPKFF

SEQ ID NO: 174673 - protein, 7 aa, synthetic construct
VEKPRTT

SEQ ID NO: 174674 - protein, 7 aa, synthetic construct
GEIRKFG

SEQ ID NO: 174675 - protein, 7 aa, synthetic construct
GAMPKFQ

SEQ ID NO: 174676 - protein, 7 aa, synthetic construct
GRIPKDT

SEQ ID NO: 174677 - protein, 7 aa, synthetic construct
ETKPKAT

SEQ ID NO: 174678 - protein, 7 aa, synthetic construct
VEKPRHT

SEQ ID NO: 174679 - protein, 7 aa, synthetic construct
ERGPKFT

SEQ ID NO: 174680 - protein, 7 aa, synthetic construct
DQKPKST

SEQ ID NO: 174681 - protein, 7 aa, synthetic construct
HEKPLRT

SEQ ID NO: 174682 - protein, 7 aa, synthetic construct
IEKPKFY

SEQ ID NO: 174683 - protein, 7 aa, synthetic construct
GEKVKWQ

SEQ ID NO: 174684 - protein, 7 aa, synthetic construct
VEKPKAG

SEQ ID NO: 174685 - protein, 7 aa, synthetic construct
DQKPKFP

SEQ ID NO: 174686 - protein, 7 aa, synthetic construct
SDRPKFT

SEQ ID NO: 174687 - protein, 7 aa, synthetic construct
GENPKRF

SEQ ID NO: 174688 - protein, 7 aa, synthetic construct
TEKPKTM

SEQ ID NO: 174689 - protein, 7 aa, synthetic construct
HEKPKPY

SEQ ID NO: 174690 - protein, 7 aa, synthetic construct
DYKPKTT

SEQ ID NO: 174691 - protein, 7 aa, synthetic construct
TDKPKFQ

SEQ ID NO: 174692 - protein, 7 aa, synthetic construct
FEQPKFK

SEQ ID NO: 174693 - protein, 7 aa, synthetic construct
PEKHKFG

SEQ ID NO: 174694 - protein, 7 aa, synthetic construct
PEKPKLF

SEQ ID NO: 174695 - protein, 7 aa, synthetic construct
TEKPKAM

SEQ ID NO: 174696 - protein, 7 aa, synthetic construct
WEKAKFS

SEQ ID NO: 174697 - protein, 7 aa, synthetic construct
GERIKLT

SEQ ID NO: 174698 - protein, 7 aa, synthetic construct
GETKKFM

SEQ ID NO: 174699 - protein, 7 aa, synthetic construct
AEKKSFT

SEQ ID NO: 174700 - protein, 7 aa, synthetic construct
GDKPHKT

SEQ ID NO: 174701 - protein, 7 aa, synthetic construct
PEKNKFL

SEQ ID NO: 174702 - protein, 7 aa, synthetic construct
TNKPKFD

SEQ ID NO: 174703 - protein, 7 aa, synthetic construct
GERPRVT

SEQ ID NO: 174704 - protein, 7 aa, synthetic construct
GELPKKQ

SEQ ID NO: 174705 - protein, 7 aa, synthetic construct
EARPKFT

SEQ ID NO: 174706 - protein, 7 aa, synthetic construct
GDYPKKT

SEQ ID NO: 174707 - protein, 7 aa, synthetic construct
GSKPKDT

SEQ ID NO: 174708 - protein, 7 aa, synthetic construct
GPAPKYT

SEQ ID NO: 174709 - protein, 7 aa, synthetic construct
GVKPKWE

SEQ ID NO: 174710 - protein, 7 aa, synthetic construct
HEKVKFL

SEQ ID NO: 174711 - protein, 7 aa, synthetic construct
AEKRSFT

SEQ ID NO: 174712 - protein, 7 aa, synthetic construct
GPERKFT

SEQ ID NO: 174713 - protein, 7 aa, synthetic construct
GDKKAFT

SEQ ID NO: 174714 - protein, 7 aa, synthetic construct
QEKPSFR

SEQ ID NO: 174715 - protein, 7 aa, synthetic construct
GDKPKYS

SEQ ID NO: 174716 - protein, 7 aa, synthetic construct
GANPKYT

SEQ ID NO: 174717 - protein, 7 aa, synthetic construct
YEKPKNQ

SEQ ID NO: 174718 - protein, 7 aa, synthetic construct
IERPKFA

SEQ ID NO: 174719 - protein, 7 aa, synthetic construct
GEKPKSN

SEQ ID NO: 174720 - protein, 7 aa, synthetic construct
DLKPKFY

SEQ ID NO: 174721 - protein, 7 aa, synthetic construct
FEKPKHI

SEQ ID NO: 174722 - protein, 7 aa, synthetic construct
GRGPKET

SEQ ID NO: 174723 - protein, 7 aa, synthetic construct
GEKRQFM

SEQ ID NO: 174724 - protein, 7 aa, synthetic construct
GEKPRMN

SEQ ID NO: 174725 - protein, 7 aa, synthetic construct
GEKRFAT

SEQ ID NO: 174726 - protein, 7 aa, synthetic construct
GEAIKRT

SEQ ID NO: 174727 - protein, 7 aa, synthetic construct
YEPPKFK

SEQ ID NO: 174728 - protein, 7 aa, synthetic construct
GEKPAKQ

SEQ ID NO: 174729 - protein, 7 aa, synthetic construct
REHPKFG

SEQ ID NO: 174730 - protein, 7 aa, synthetic construct
GETPKGK

SEQ ID NO: 174731 - protein, 7 aa, synthetic construct
GERKAFT

SEQ ID NO: 174732 - protein, 7 aa, synthetic construct
ESKPKFY

SEQ ID NO: 174733 - protein, 7 aa, synthetic construct
GHKPSFA

SEQ ID NO: 174734 - protein, 7 aa, synthetic construct
DNKPKFY

SEQ ID NO: 174735 - protein, 7 aa, synthetic construct
GHSPKFG

SEQ ID NO: 174736 - protein, 7 aa, synthetic construct
GEFPKRV

SEQ ID NO: 174737 - protein, 7 aa, synthetic construct
GERNKST

SEQ ID NO: 174738 - protein, 7 aa, synthetic construct
GMHPKFV

SEQ ID NO: 174739 - protein, 7 aa, synthetic construct
YEKPKTY

SEQ ID NO: 174740 - protein, 7 aa, synthetic construct
GERKLFT

SEQ ID NO: 174741 - protein, 7 aa, synthetic construct
QGKPKDT

SEQ ID NO: 174742 - protein, 7 aa, synthetic construct
DFKPKFM

SEQ ID NO: 174743 - protein, 7 aa, synthetic construct
GEKRVMT

SEQ ID NO: 174744 - protein, 7 aa, synthetic construct
IEKPAFR

SEQ ID NO: 174745 - protein, 7 aa, synthetic construct
KEKPQFY

SEQ ID NO: 174746 - protein, 7 aa, synthetic construct
GHGVKFT

SEQ ID NO: 174747 - protein, 7 aa, synthetic construct
DPKPKFQ

SEQ ID NO: 174748 - protein, 7 aa, synthetic construct
GELPKKG

SEQ ID NO: 174749 - protein, 7 aa, synthetic construct
WEKVKNT

SEQ ID NO: 174750 - protein, 7 aa, synthetic construct
AEKPKPH

SEQ ID NO: 174751 - protein, 7 aa, synthetic construct
QEKPKQF

SEQ ID NO: 174752 - protein, 7 aa, synthetic construct
GDKPRIT

SEQ ID NO: 174753 - protein, 7 aa, synthetic construct
REKPIFG

SEQ ID NO: 174754 - protein, 7 aa, synthetic construct
GESKKFT

SEQ ID NO: 174755 - protein, 7 aa, synthetic construct
DSKPKFN

SEQ ID NO: 174756 - protein, 7 aa, synthetic construct
AEKNKFY

SEQ ID NO: 174757 - protein, 7 aa, synthetic construct
SENPKFK

SEQ ID NO: 174758 - protein, 7 aa, synthetic construct
SMTPKFT

SEQ ID NO: 174759 - protein, 7 aa, synthetic construct
IEKPRFN

SEQ ID NO: 174760 - protein, 7 aa, synthetic construct
DEKPKNK

SEQ ID NO: 174761 - protein, 7 aa, synthetic construct
GEKRSFP

SEQ ID NO: 174762 - protein, 7 aa, synthetic construct
GEKPKFA

SEQ ID NO: 174763 - protein, 7 aa, synthetic construct
QEKNKFF

SEQ ID NO: 174764 - protein, 7 aa, synthetic construct
GDKRPFT

SEQ ID NO: 174765 - protein, 7 aa, synthetic construct
INKPKFD

SEQ ID NO: 174766 - protein, 7 aa, synthetic construct
GKKPDFM

SEQ ID NO: 174767 - protein, 7 aa, synthetic construct
GETPKRL

SEQ ID NO: 174768 - protein, 7 aa, synthetic construct
GEKRTIT

SEQ ID NO: 174769 - protein, 7 aa, synthetic construct
DEKVKRT

SEQ ID NO: 174770 - protein, 7 aa, synthetic construct
QEKPKFS

SEQ ID NO: 174771 - protein, 7 aa, synthetic construct
GEKPYKN

SEQ ID NO: 174772 - protein, 7 aa, synthetic construct
GSRPKFE

SEQ ID NO: 174773 - protein, 7 aa, synthetic construct
SEKPKNQ

SEQ ID NO: 174774 - protein, 7 aa, synthetic construct
GKEFKFT

SEQ ID NO: 174775 - protein, 7 aa, synthetic construct
EHKVKFT

SEQ ID NO: 174776 - protein, 7 aa, synthetic construct
IEKVRFT

SEQ ID NO: 174777 - protein, 7 aa, synthetic construct
GEKPVSR

SEQ ID NO: 174778 - protein, 7 aa, synthetic construct
GDTPKFR

SEQ ID NO: 174779 - protein, 7 aa, synthetic construct
NERPKST

SEQ ID NO: 174780 - protein, 7 aa, synthetic construct
GEKPNIK

SEQ ID NO: 174781 - protein, 7 aa, synthetic construct
GERPLRT

SEQ ID NO: 174782 - protein, 7 aa, synthetic construct
GEKPKLF

SEQ ID NO: 174783 - protein, 7 aa, synthetic construct
KEIPKFG

SEQ ID NO: 174784 - protein, 7 aa, synthetic construct
LENPKRT

SEQ ID NO: 174785 - protein, 7 aa, synthetic construct
GTKFKFD

SEQ ID NO: 174786 - protein, 7 aa, synthetic construct
RTKPEFT

SEQ ID NO: 174787 - protein, 7 aa, synthetic construct
GMKPKYD

SEQ ID NO: 174788 - protein, 7 aa, synthetic construct
QEKPKGG

SEQ ID NO: 174789 - protein, 7 aa, synthetic construct
NEKLRFT

SEQ ID NO: 174790 - protein, 7 aa, synthetic construct
GTTPKYT

SEQ ID NO: 174791 - protein, 7 aa, synthetic construct
VEKTRFT

SEQ ID NO: 174792 - protein, 7 aa, synthetic construct
GEKPFKA

SEQ ID NO: 174793 - protein, 7 aa, synthetic construct
GDKPRYT

SEQ ID NO: 174794 - protein, 7 aa, synthetic construct
GEIPKRV

SEQ ID NO: 174795 - protein, 7 aa, synthetic construct
GEVPKKA

SEQ ID NO: 174796 - protein, 7 aa, synthetic construct
GEPPKSK

SEQ ID NO: 174797 - protein, 7 aa, synthetic construct
IEIPKFK

SEQ ID NO: 174798 - protein, 7 aa, synthetic construct
LEKPKSF

SEQ ID NO: 174799 - protein, 7 aa, synthetic construct
GRPPKFD

SEQ ID NO: 174800 - protein, 7 aa, synthetic construct
PEKPSFR

SEQ ID NO: 174801 - protein, 7 aa, synthetic construct
GEKPRVN

SEQ ID NO: 174802 - protein, 7 aa, synthetic construct
GEAPKKQ

SEQ ID NO: 174803 - protein, 7 aa, synthetic construct
DNKPRFT

SEQ ID NO: 174804 - protein, 7 aa, synthetic construct
GEKYKFG

SEQ ID NO: 174805 - protein, 7 aa, synthetic construct
DRKPPFT

SEQ ID NO: 174806 - protein, 7 aa, synthetic construct
IEKNRFT

SEQ ID NO: 174807 - protein, 7 aa, synthetic construct
GEKPTPR

SEQ ID NO: 174808 - protein, 7 aa, synthetic construct
GSKPKDY

SEQ ID NO: 174809 - protein, 7 aa, synthetic construct
GEAPKRA

SEQ ID NO: 174810 - protein, 7 aa, synthetic construct
AENPKKT

SEQ ID NO: 174811 - protein, 7 aa, synthetic construct
HEKPKAM

SEQ ID NO: 174812 - protein, 7 aa, synthetic construct
GEKRQFN

SEQ ID NO: 174813 - protein, 7 aa, synthetic construct
GELPKRG

SEQ ID NO: 174814 - protein, 7 aa, synthetic construct
AEKPKYP

SEQ ID NO: 174815 - protein, 7 aa, synthetic construct
HEKNKFQ

SEQ ID NO: 174816 - protein, 7 aa, synthetic construct
GEKPMKQ

SEQ ID NO: 174817 - protein, 7 aa, synthetic construct
WEKIKST

SEQ ID NO: 174818 - protein, 7 aa, synthetic construct
GEPPKMR

SEQ ID NO: 174819 - protein, 7 aa, synthetic construct
QEKPKYS

SEQ ID NO: 174820 - protein, 7 aa, synthetic construct
NMNPKFT

SEQ ID NO: 174821 - protein, 7 aa, synthetic construct
MEKPKWS

SEQ ID NO: 174822 - protein, 7 aa, synthetic construct
KEYPKFN

SEQ ID NO: 174823 - protein, 7 aa, synthetic construct
EGKPKFN

SEQ ID NO: 174824 - protein, 7 aa, synthetic construct
PEKTRFT

SEQ ID NO: 174825 - protein, 7 aa, synthetic construct
GDKKSFT

SEQ ID NO: 174826 - protein, 7 aa, synthetic construct
REHPKFS

SEQ ID NO: 174827 - protein, 7 aa, synthetic construct
ILKPKFD

SEQ ID NO: 174828 - protein, 7 aa, synthetic construct
GEGPKRV

SEQ ID NO: 174829 - protein, 7 aa, synthetic construct
NDKPKFA

SEQ ID NO: 174830 - protein, 7 aa, synthetic construct
GDKPKVQ

SEQ ID NO: 174831 - protein, 7 aa, synthetic construct
GEKPRIT

SEQ ID NO: 174832 - protein, 7 aa, synthetic construct
GEKPAKY

SEQ ID NO: 174833 - protein, 7 aa, synthetic construct
LEKYKFQ

SEQ ID NO: 174834 - protein, 7 aa, synthetic construct
GRAPKDT

SEQ ID NO: 174835 - protein, 7 aa, synthetic construct
EQKPRFT

SEQ ID NO: 174836 - protein, 7 aa, synthetic construct
GDKPVRT

SEQ ID NO: 174837 - protein, 7 aa, synthetic construct
GDRPKFM

SEQ ID NO: 174838 - protein, 7 aa, synthetic construct
GDKPKAH

SEQ ID NO: 174839 - protein, 7 aa, synthetic construct
QSKPKFE

SEQ ID NO: 174840 - protein, 7 aa, synthetic construct
DFKPKST

SEQ ID NO: 174841 - protein, 7 aa, synthetic construct
EVKPRFT

SEQ ID NO: 174842 - protein, 7 aa, synthetic construct
GEKHKFQ

SEQ ID NO: 174843 - protein, 7 aa, synthetic construct
QEKHKFL

SEQ ID NO: 174844 - protein, 7 aa, synthetic construct
YEKPKAY

SEQ ID NO: 174845 - protein, 7 aa, synthetic construct
LEKPAFR

SEQ ID NO: 174846 - protein, 7 aa, synthetic construct
GERPKQF

SEQ ID NO: 174847 - protein, 7 aa, synthetic construct
GKFPKFE

SEQ ID NO: 174848 - protein, 7 aa, synthetic construct
GYKPKDT

SEQ ID NO: 174849 - protein, 7 aa, synthetic construct
GEKPITR

SEQ ID NO: 174850 - protein, 7 aa, synthetic construct
GEKRPFA

SEQ ID NO: 174851 - protein, 7 aa, synthetic construct
AEKPKQM

SEQ ID NO: 174852 - protein, 7 aa, synthetic construct
GEHPKKV

SEQ ID NO: 174853 - protein, 7 aa, synthetic construct
PETPKFR

SEQ ID NO: 174854 - protein, 7 aa, synthetic construct
ERKDKFT

SEQ ID NO: 174855 - protein, 7 aa, synthetic construct
GESGKFK

SEQ ID NO: 174856 - protein, 7 aa, synthetic construct
HEKKPFT

SEQ ID NO: 174857 - protein, 7 aa, synthetic construct
GEAAKFK

SEQ ID NO: 174858 - protein, 7 aa, synthetic construct
GEKVKWN

SEQ ID NO: 174859 - protein, 7 aa, synthetic construct
EEKLKFK

SEQ ID NO: 174860 - protein, 7 aa, synthetic construct
GEKYKAN

SEQ ID NO: 174861 - protein, 7 aa, synthetic construct
KEHPKFA

SEQ ID NO: 174862 - protein, 7 aa, synthetic construct
REGHKFT

SEQ ID NO: 174863 - protein, 7 aa, synthetic construct
GEKHLRT

SEQ ID NO: 174864 - protein, 7 aa, synthetic construct
VEKKPFT

SEQ ID NO: 174865 - protein, 7 aa, synthetic construct
FEKPKLQ

SEQ ID NO: 174866 - protein, 7 aa, synthetic construct
GEMPKKM

SEQ ID NO: 174867 - protein, 7 aa, synthetic construct
GEKVPFR

SEQ ID NO: 174868 - protein, 7 aa, synthetic construct
AEKPKAH

SEQ ID NO: 174869 - protein, 7 aa, synthetic construct
PEKAKFY

SEQ ID NO: 174870 - protein, 7 aa, synthetic construct
GEKKSFI

SEQ ID NO: 174871 - protein, 7 aa, synthetic construct
GQKSKFD

SEQ ID NO: 174872 - protein, 7 aa, synthetic construct
GEKGGFR

SEQ ID NO: 174873 - protein, 7 aa, synthetic construct
EPKPKFN

SEQ ID NO: 174874 - protein, 7 aa, synthetic construct
GEKKMFI

SEQ ID NO: 174875 - protein, 7 aa, synthetic construct
FEKPKHG

SEQ ID NO: 174876 - protein, 7 aa, synthetic construct
GQTIKFT

SEQ ID NO: 174877 - protein, 7 aa, synthetic construct
GVKYKFE

SEQ ID NO: 174878 - protein, 7 aa, synthetic construct
MEKPAFR

SEQ ID NO: 174879 - protein, 7 aa, synthetic construct
AEKPKHT

SEQ ID NO: 174880 - protein, 7 aa, synthetic construct
SEKPRFG

SEQ ID NO: 174881 - protein, 7 aa, synthetic construct
DTKPKFA

SEQ ID NO: 174882 - protein, 7 aa, synthetic construct
FEKYKNT

SEQ ID NO: 174883 - protein, 7 aa, synthetic construct
MEKPKNN

SEQ ID NO: 174884 - protein, 7 aa, synthetic construct
VHKPKFE

SEQ ID NO: 174885 - protein, 7 aa, synthetic construct
GTHPKYT

SEQ ID NO: 174886 - protein, 7 aa, synthetic construct
GDKPRFG

SEQ ID NO: 174887 - protein, 7 aa, synthetic construct
GELQKFK

SEQ ID NO: 174888 - protein, 7 aa, synthetic construct
GEKPKVF

SEQ ID NO: 174889 - protein, 7 aa, synthetic construct
GEMKKFA

SEQ ID NO: 174890 - protein, 7 aa, synthetic construct
DPKPKFS

SEQ ID NO: 174891 - protein, 7 aa, synthetic construct
PEKNKYT

SEQ ID NO: 174892 - protein, 7 aa, synthetic construct
QEKPKYY

SEQ ID NO: 174893 - protein, 7 aa, synthetic construct
QEKPKLY

SEQ ID NO: 174894 - protein, 7 aa, synthetic construct
GELPKRS

SEQ ID NO: 174895 - protein, 7 aa, synthetic construct
GEKPNKN

SEQ ID NO: 174896 - protein, 7 aa, synthetic construct
PERPKIT

SEQ ID NO: 174897 - protein, 7 aa, synthetic construct
GEKRSFA

SEQ ID NO: 174898 - protein, 7 aa, synthetic construct
GPHPKFN

SEQ ID NO: 174899 - protein, 7 aa, synthetic construct
TEKPKWT

SEQ ID NO: 174900 - protein, 7 aa, synthetic construct
AEKNRFT

SEQ ID NO: 174901 - protein, 7 aa, synthetic construct
GEAMKFK

SEQ ID NO: 174902 - protein, 7 aa, synthetic construct
GDRPKAT

SEQ ID NO: 174903 - protein, 7 aa, synthetic construct
GQMPKFG

SEQ ID NO: 174904 - protein, 7 aa, synthetic construct
VERPKFN

SEQ ID NO: 174905 - protein, 7 aa, synthetic construct
PEKGRFT

SEQ ID NO: 174906 - protein, 7 aa, synthetic construct
PDKPKFF

SEQ ID NO: 174907 - protein, 7 aa, synthetic construct
GEKPKIS

SEQ ID NO: 174908 - protein, 7 aa, synthetic construct
GEKIIRT

SEQ ID NO: 174909 - protein, 7 aa, synthetic construct
REKPHFS

SEQ ID NO: 174910 - protein, 7 aa, synthetic construct
PEKPKAY

SEQ ID NO: 174911 - protein, 7 aa, synthetic construct
REIPKFT

SEQ ID NO: 174912 - protein, 7 aa, synthetic construct
VEKPMRT

SEQ ID NO: 174913 - protein, 7 aa, synthetic construct
GHKPKGD

SEQ ID NO: 174914 - protein, 7 aa, synthetic construct
MESPKFK

SEQ ID NO: 174915 - protein, 7 aa, synthetic construct
GGKFKDT

SEQ ID NO: 174916 - protein, 7 aa, synthetic construct
GDRPKVT

SEQ ID NO: 174917 - protein, 7 aa, synthetic construct
PEKPKSN

SEQ ID NO: 174918 - protein, 7 aa, synthetic construct
SFKPKFD

SEQ ID NO: 174919 - protein, 7 aa, synthetic construct
GHPPKFG

SEQ ID NO: 174920 - protein, 7 aa, synthetic construct
GDKPKFT

SEQ ID NO: 174921 - protein, 7 aa, synthetic construct
MERPKIT

SEQ ID NO: 174922 - protein, 7 aa, synthetic construct
SEMPKRT

SEQ ID NO: 174923 - protein, 7 aa, synthetic construct
GEKPSRA

SEQ ID NO: 174924 - protein, 7 aa, synthetic construct
VEMPKFK

SEQ ID NO: 174925 - protein, 7 aa, synthetic construct
GDKPKSA

SEQ ID NO: 174926 - protein, 7 aa, synthetic construct
GEKVRFQ

SEQ ID NO: 174927 - protein, 7 aa, synthetic construct
GERGKQT

SEQ ID NO: 174928 - protein, 7 aa, synthetic construct
AEKPRFS

SEQ ID NO: 174929 - protein, 7 aa, synthetic construct
GEKRTPT

SEQ ID NO: 174930 - protein, 7 aa, synthetic construct
NEKYKFG

SEQ ID NO: 174931 - protein, 7 aa, synthetic construct
AEKPKHL

SEQ ID NO: 174932 - protein, 7 aa, synthetic construct
SEKKHFT

SEQ ID NO: 174933 - protein, 7 aa, synthetic construct
AEHKKFT

SEQ ID NO: 174934 - protein, 7 aa, synthetic construct
DNKPKFI

SEQ ID NO: 174935 - protein, 7 aa, synthetic construct
SEKPRMT

SEQ ID NO: 174936 - protein, 7 aa, synthetic construct
GEKPAPR

SEQ ID NO: 174937 - protein, 7 aa, synthetic construct
YEKGRFT

SEQ ID NO: 174938 - protein, 7 aa, synthetic construct
SEKPKFM

SEQ ID NO: 174939 - protein, 7 aa, synthetic construct
GMKPKDF

SEQ ID NO: 174940 - protein, 7 aa, synthetic construct
MEAPKFR

SEQ ID NO: 174941 - protein, 7 aa, synthetic construct
MELPKRT

SEQ ID NO: 174942 - protein, 7 aa, synthetic construct
AEKVKFL

SEQ ID NO: 174943 - protein, 7 aa, synthetic construct
TTKPKFD

SEQ ID NO: 174944 - protein, 7 aa, synthetic construct
HDKPKFQ

SEQ ID NO: 174945 - protein, 7 aa, synthetic construct
GYKPKDI

SEQ ID NO: 174946 - protein, 7 aa, synthetic construct
NEKRAFT

SEQ ID NO: 174947 - protein, 7 aa, synthetic construct
FLKPKFD

SEQ ID NO: 174948 - protein, 7 aa, synthetic construct
EMKPKFL

SEQ ID NO: 174949 - protein, 7 aa, synthetic construct
HEKKKFE

SEQ ID NO: 174950 - protein, 7 aa, synthetic construct
GKHPKDT

SEQ ID NO: 174951 - protein, 7 aa, synthetic construct
DFKPKFH

SEQ ID NO: 174952 - protein, 7 aa, synthetic construct
GEKPKII

SEQ ID NO: 174953 - protein, 7 aa, synthetic construct
GDAPKKT

SEQ ID NO: 174954 - protein, 7 aa, synthetic construct
GDKIKFL

SEQ ID NO: 174955 - protein, 7 aa, synthetic construct
IEKRTFT

SEQ ID NO: 174956 - protein, 7 aa, synthetic construct
FEKPART

SEQ ID NO: 174957 - protein, 7 aa, synthetic construct
GDKPKLQ

SEQ ID NO: 174958 - protein, 7 aa, synthetic construct
WEKPKAG

SEQ ID NO: 174959 - protein, 7 aa, synthetic construct
MEKPKER

SEQ ID NO: 174960 - protein, 7 aa, synthetic construct
GETVKFR

SEQ ID NO: 174961 - protein, 7 aa, synthetic construct
VEQPKFK

SEQ ID NO: 174962 - protein, 7 aa, synthetic construct
GEKRQMT

SEQ ID NO: 174963 - protein, 7 aa, synthetic construct
KNKPDFT

SEQ ID NO: 174964 - protein, 7 aa, synthetic construct
ESKPKFN

SEQ ID NO: 174965 - protein, 7 aa, synthetic construct
QENRKFT

SEQ ID NO: 174966 - protein, 7 aa, synthetic construct
NEMPKRT

SEQ ID NO: 174967 - protein, 7 aa, synthetic construct
GEKPRAT

SEQ ID NO: 174968 - protein, 7 aa, synthetic construct
GELPKKV

SEQ ID NO: 174969 - protein, 7 aa, synthetic construct
RQKPEFT

SEQ ID NO: 174970 - protein, 7 aa, synthetic construct
GDRPKFQ

SEQ ID NO: 174971 - protein, 7 aa, synthetic construct
PEKPKFQ

SEQ ID NO: 174972 - protein, 7 aa, synthetic construct
GEGPKRP

SEQ ID NO: 174973 - protein, 7 aa, synthetic construct
GQKPKFD

SEQ ID NO: 174974 - protein, 7 aa, synthetic construct
NEKPKFQ

SEQ ID NO: 174975 - protein, 7 aa, synthetic construct
GDKPKLF

SEQ ID NO: 174976 - protein, 7 aa, synthetic construct
NYKPKDT

SEQ ID NO: 174977 - protein, 7 aa, synthetic construct
HERPKFP

SEQ ID NO: 174978 - protein, 7 aa, synthetic construct
HEKPRLT

SEQ ID NO: 174979 - protein, 7 aa, synthetic construct
GEQMKRT

SEQ ID NO: 174980 - protein, 7 aa, synthetic construct
GEKQKWG

SEQ ID NO: 174981 - protein, 7 aa, synthetic construct
GEKIKGW

SEQ ID NO: 174982 - protein, 7 aa, synthetic construct
MGKPKDT

SEQ ID NO: 174983 - protein, 7 aa, synthetic construct
GEKPRNA

SEQ ID NO: 174984 - protein, 7 aa, synthetic construct
QESPKFR

SEQ ID NO: 174985 - protein, 7 aa, synthetic construct
EQKPKTT

SEQ ID NO: 174986 - protein, 7 aa, synthetic construct
GQKFKDT

SEQ ID NO: 174987 - protein, 7 aa, synthetic construct
GEKGRFQ

SEQ ID NO: 174988 - protein, 7 aa, synthetic construct
GEPPRKT

SEQ ID NO: 174989 - protein, 7 aa, synthetic construct
GEGKKFA

SEQ ID NO: 174990 - protein, 7 aa, synthetic construct
GERPKGG

SEQ ID NO: 174991 - protein, 7 aa, synthetic construct
GEAPKPK

SEQ ID NO: 174992 - protein, 7 aa, synthetic construct
AEKRGFT

SEQ ID NO: 174993 - protein, 7 aa, synthetic construct
QGKPKFE

SEQ ID NO: 174994 - protein, 7 aa, synthetic construct
TEHKKFT

SEQ ID NO: 174995 - protein, 7 aa, synthetic construct
GENIKRT

SEQ ID NO: 174996 - protein, 7 aa, synthetic construct
RETIKFT

SEQ ID NO: 174997 - protein, 7 aa, synthetic construct
HEKPKYQ

SEQ ID NO: 174998 - protein, 7 aa, synthetic construct
GEKNKFF

SEQ ID NO: 174999 - protein, 7 aa, synthetic construct
QEKYKFN

SEQ ID NO: 175000 - protein, 7 aa, synthetic construct
GEKPRHV

SEQ ID NO: 175001 - protein, 7 aa, synthetic construct
GELNKRT

SEQ ID NO: 175002 - protein, 7 aa, synthetic construct
REGPKIT

SEQ ID NO: 175003 - protein, 7 aa, synthetic construct
GEKIKYN

SEQ ID NO: 175004 - protein, 7 aa, synthetic construct
YSKPKFD

SEQ ID NO: 175005 - protein, 7 aa, synthetic construct
HEKPYKT

SEQ ID NO: 175006 - protein, 7 aa, synthetic construct
VEKPKNF

SEQ ID NO: 175007 - protein, 7 aa, synthetic construct
MRKPDFT

SEQ ID NO: 175008 - protein, 7 aa, synthetic construct
GEKPRTL

SEQ ID NO: 175009 - protein, 7 aa, synthetic construct
VDKPKFH

SEQ ID NO: 175010 - protein, 7 aa, synthetic construct
SDKPKFY

SEQ ID NO: 175011 - protein, 7 aa, synthetic construct
GEKVKWS

SEQ ID NO: 175012 - protein, 7 aa, synthetic construct
LENPKFK

SEQ ID NO: 175013 - protein, 7 aa, synthetic construct
EGKSKFT

SEQ ID NO: 175014 - protein, 7 aa, synthetic construct
PEKGKFF

SEQ ID NO: 175015 - protein, 7 aa, synthetic construct
NEKRMFT

SEQ ID NO: 175016 - protein, 7 aa, synthetic construct
GEQPKIK

SEQ ID NO: 175017 - protein, 7 aa, synthetic construct
GSKPKDH

SEQ ID NO: 175018 - protein, 7 aa, synthetic construct
MEKPHKT

SEQ ID NO: 175019 - protein, 7 aa, synthetic construct
DNKPKFA

SEQ ID NO: 175020 - protein, 7 aa, synthetic construct
IEGPKRT

SEQ ID NO: 175021 - protein, 7 aa, synthetic construct
GSKPYST

SEQ ID NO: 175022 - protein, 7 aa, synthetic construct
GEKPTRL

SEQ ID NO: 175023 - protein, 7 aa, synthetic construct
GEKPQKQ

SEQ ID NO: 175024 - protein, 7 aa, synthetic construct
MEKPKFS

SEQ ID NO: 175025 - protein, 7 aa, synthetic construct
GGPPKYT

SEQ ID NO: 175026 - protein, 7 aa, synthetic construct
FEGPKFK

SEQ ID NO: 175027 - protein, 7 aa, synthetic construct
GDKRKDT

SEQ ID NO: 175028 - protein, 7 aa, synthetic construct
GTMPKYT

SEQ ID NO: 175029 - protein, 7 aa, synthetic construct
KERPKFE

SEQ ID NO: 175030 - protein, 7 aa, synthetic construct
QEKPKNQ

SEQ ID NO: 175031 - protein, 7 aa, synthetic construct
HEKNKFL

SEQ ID NO: 175032 - protein, 7 aa, synthetic construct
GGGSKFT

SEQ ID NO: 175033 - protein, 7 aa, synthetic construct
GETKRFT

SEQ ID NO: 175034 - protein, 7 aa, synthetic construct
GEKPPKY

SEQ ID NO: 175035 - protein, 7 aa, synthetic construct
GEKPARF

SEQ ID NO: 175036 - protein, 7 aa, synthetic construct
GEKKKFD

SEQ ID NO: 175037 - protein, 7 aa, synthetic construct
GEKYKMN

SEQ ID NO: 175038 - protein, 7 aa, synthetic construct
PEKPKYP

SEQ ID NO: 175039 - protein, 7 aa, synthetic construct
GEKPRPF

SEQ ID NO: 175040 - protein, 7 aa, synthetic construct
MERPKFM

SEQ ID NO: 175041 - protein, 7 aa, synthetic construct
NEKPTRT

SEQ ID NO: 175042 - protein, 7 aa, synthetic construct
HEKPRFA

SEQ ID NO: 175043 - protein, 7 aa, synthetic construct
WEKPKSG

SEQ ID NO: 175044 - protein, 7 aa, synthetic construct
MEKLKFM

SEQ ID NO: 175045 - protein, 7 aa, synthetic construct
GPDRKFT

SEQ ID NO: 175046 - protein, 7 aa, synthetic construct
GDKPKTS

SEQ ID NO: 175047 - protein, 7 aa, synthetic construct
FDKPKNT

SEQ ID NO: 175048 - protein, 7 aa, synthetic construct
GDKPKYH

SEQ ID NO: 175049 - protein, 7 aa, synthetic construct
GQKPKTD

SEQ ID NO: 175050 - protein, 7 aa, synthetic construct
MENPKFR

SEQ ID NO: 175051 - protein, 7 aa, synthetic construct
GDKPKNW

SEQ ID NO: 175052 - protein, 7 aa, synthetic construct
NEKPKLF

SEQ ID NO: 175053 - protein, 7 aa, synthetic construct
GDKYKMT

SEQ ID NO: 175054 - protein, 7 aa, synthetic construct
GHKIKDT

SEQ ID NO: 175055 - protein, 7 aa, synthetic construct
GEKPQNK

SEQ ID NO: 175056 - protein, 7 aa, synthetic construct
GEKVKFF

SEQ ID NO: 175057 - protein, 7 aa, synthetic construct
GELMKRT

SEQ ID NO: 175058 - protein, 7 aa, synthetic construct
GERNKGT

SEQ ID NO: 175059 - protein, 7 aa, synthetic construct
NEKPRFS

SEQ ID NO: 175060 - protein, 7 aa, synthetic construct
TVKPKFD

SEQ ID NO: 175061 - protein, 7 aa, synthetic construct
GEKPVKQ

SEQ ID NO: 175062 - protein, 7 aa, synthetic construct
SEKPKHL

SEQ ID NO: 175063 - protein, 7 aa, synthetic construct
GTMPKFV

SEQ ID NO: 175064 - protein, 7 aa, synthetic construct
SQIPKFT

SEQ ID NO: 175065 - protein, 7 aa, synthetic construct
GEKYKAS

SEQ ID NO: 175066 - protein, 7 aa, synthetic construct
PDKPKFA

SEQ ID NO: 175067 - protein, 7 aa, synthetic construct
QEKPKSI

SEQ ID NO: 175068 - protein, 7 aa, synthetic construct
LEKPRNT

SEQ ID NO: 175069 - protein, 7 aa, synthetic construct
EGKQKFT

SEQ ID NO: 175070 - protein, 7 aa, synthetic construct
GMQPKFQ

SEQ ID NO: 175071 - protein, 7 aa, synthetic construct
GHKPKDM

SEQ ID NO: 175072 - protein, 7 aa, synthetic construct
QTHPKFT

SEQ ID NO: 175073 - protein, 7 aa, synthetic construct
FEKPKTY

SEQ ID NO: 175074 - protein, 7 aa, synthetic construct
GEKLKWA

SEQ ID NO: 175075 - protein, 7 aa, synthetic construct
TEKGKYT

SEQ ID NO: 175076 - protein, 7 aa, synthetic construct
GEIPKKM

SEQ ID NO: 175077 - protein, 7 aa, synthetic construct
TDKPKNT

SEQ ID NO: 175078 - protein, 7 aa, synthetic construct
VEKPKNY

SEQ ID NO: 175079 - protein, 7 aa, synthetic construct
GEKRAST

SEQ ID NO: 175080 - protein, 7 aa, synthetic construct
SEKPKER

SEQ ID NO: 175081 - protein, 7 aa, synthetic construct
GVAPKHT

SEQ ID NO: 175082 - protein, 7 aa, synthetic construct
GEKPRNS

SEQ ID NO: 175083 - protein, 7 aa, synthetic construct
GETPKRI

SEQ ID NO: 175084 - protein, 7 aa, synthetic construct
GEKNSFR

SEQ ID NO: 175085 - protein, 7 aa, synthetic construct
GENRKFQ

SEQ ID NO: 175086 - protein, 7 aa, synthetic construct
TEQPKFK

SEQ ID NO: 175087 - protein, 7 aa, synthetic construct
GENAKRT

SEQ ID NO: 175088 - protein, 7 aa, synthetic construct
GYKNKDT

SEQ ID NO: 175089 - protein, 7 aa, synthetic construct
QEKPKSQ

SEQ ID NO: 175090 - protein, 7 aa, synthetic construct
HFKPKDT

SEQ ID NO: 175091 - protein, 7 aa, synthetic construct
ESKPKFM

SEQ ID NO: 175092 - protein, 7 aa, synthetic construct
DNKPKGT

SEQ ID NO: 175093 - protein, 7 aa, synthetic construct
YDKPKFI

SEQ ID NO: 175094 - protein, 7 aa, synthetic construct
TERPKFN

SEQ ID NO: 175095 - protein, 7 aa, synthetic construct
NDKPKFG

SEQ ID NO: 175096 - protein, 7 aa, synthetic construct
RESVKFT

SEQ ID NO: 175097 - protein, 7 aa, synthetic construct
DGKPRFT

SEQ ID NO: 175098 - protein, 7 aa, synthetic construct
GEKRVAT

SEQ ID NO: 175099 - protein, 7 aa, synthetic construct
DSKPKFH

SEQ ID NO: 175100 - protein, 7 aa, synthetic construct
GDSPKKT

SEQ ID NO: 175101 - protein, 7 aa, synthetic construct
TSMPKFT

SEQ ID NO: 175102 - protein, 7 aa, synthetic construct
PSKPKFD

SEQ ID NO: 175103 - protein, 7 aa, synthetic construct
SEKRGFT

SEQ ID NO: 175104 - protein, 7 aa, synthetic construct
EAKLKFT

SEQ ID NO: 175105 - protein, 7 aa, synthetic construct
YEKIKFT

SEQ ID NO: 175106 - protein, 7 aa, synthetic construct
AEKPKYF

SEQ ID NO: 175107 - protein, 7 aa, synthetic construct
GEAKKFN

SEQ ID NO: 175108 - protein, 7 aa, synthetic construct
GEIRKFQ

SEQ ID NO: 175109 - protein, 7 aa, synthetic construct
AEKPRAT

SEQ ID NO: 175110 - protein, 7 aa, synthetic construct
EGKPKQT

SEQ ID NO: 175111 - protein, 7 aa, synthetic construct
GEKKHST

SEQ ID NO: 175112 - protein, 7 aa, synthetic construct
GENRKFG

SEQ ID NO: 175113 - protein, 7 aa, synthetic construct
GEAPKKA

SEQ ID NO: 175114 - protein, 7 aa, synthetic construct
SEKNKFF

SEQ ID NO: 175115 - protein, 7 aa, synthetic construct
GEKPMRH

SEQ ID NO: 175116 - protein, 7 aa, synthetic construct
GENPKGR

SEQ ID NO: 175117 - protein, 7 aa, synthetic construct
EYKPKPT

SEQ ID NO: 175118 - protein, 7 aa, synthetic construct
GKDYKFT

SEQ ID NO: 175119 - protein, 7 aa, synthetic construct
EPKPKFT

SEQ ID NO: 175120 - protein, 7 aa, synthetic construct
AEKNKFL

SEQ ID NO: 175121 - protein, 7 aa, synthetic construct
DRKPVFT

SEQ ID NO: 175122 - protein, 7 aa, synthetic construct
YEKHKFN

SEQ ID NO: 175123 - protein, 7 aa, synthetic construct
GPTHKFT

SEQ ID NO: 175124 - protein, 7 aa, synthetic construct
KEKPLFY

SEQ ID NO: 175125 - protein, 7 aa, synthetic construct
GETNKFR

SEQ ID NO: 175126 - protein, 7 aa, synthetic construct
NEKGRFT

SEQ ID NO: 175127 - protein, 7 aa, synthetic construct
MEQPKFR

SEQ ID NO: 175128 - protein, 7 aa, synthetic construct
REKREFT

SEQ ID NO: 175129 - protein, 7 aa, synthetic construct
GETIKFK

SEQ ID NO: 175130 - protein, 7 aa, synthetic construct
QDKPKVT

SEQ ID NO: 175131 - protein, 7 aa, synthetic construct
TEQPKFR

SEQ ID NO: 175132 - protein, 7 aa, synthetic construct
HEKPRFP

SEQ ID NO: 175133 - protein, 7 aa, synthetic construct
ETKNKFT

SEQ ID NO: 175134 - protein, 7 aa, synthetic construct
MTKPKFD

SEQ ID NO: 175135 - protein, 7 aa, synthetic construct
TGKPKFD

SEQ ID NO: 175136 - protein, 7 aa, synthetic construct
GIRPKDT

SEQ ID NO: 175137 - protein, 7 aa, synthetic construct
ESKPKAT

SEQ ID NO: 175138 - protein, 7 aa, synthetic construct
NEKPKAQ

SEQ ID NO: 175139 - protein, 7 aa, synthetic construct
LEKPKYQ

SEQ ID NO: 175140 - protein, 7 aa, synthetic construct
TYKPKDT

SEQ ID NO: 175141 - protein, 7 aa, synthetic construct
HAGPKFT

SEQ ID NO: 175142 - protein, 7 aa, synthetic construct
GENPKMK

SEQ ID NO: 175143 - protein, 7 aa, synthetic construct
GERPKSS

SEQ ID NO: 175144 - protein, 7 aa, synthetic construct
TEKPKMW

SEQ ID NO: 175145 - protein, 7 aa, synthetic construct
GHKQKDT

SEQ ID NO: 175146 - protein, 7 aa, synthetic construct
GGKPRDT

SEQ ID NO: 175147 - protein, 7 aa, synthetic construct
PFKPKFE

SEQ ID NO: 175148 - protein, 7 aa, synthetic construct
GDKFKFS

SEQ ID NO: 175149 - protein, 7 aa, synthetic construct
GEKQKMY

SEQ ID NO: 175150 - protein, 7 aa, synthetic construct
GDKPIRT

SEQ ID NO: 175151 - protein, 7 aa, synthetic construct
GEVNKFK

SEQ ID NO: 175152 - protein, 7 aa, synthetic construct
TENPKFK

SEQ ID NO: 175153 - protein, 7 aa, synthetic construct
GERPKSV

SEQ ID NO: 175154 - protein, 7 aa, synthetic construct
ATKPKFD

SEQ ID NO: 175155 - protein, 7 aa, synthetic construct
PEKPKPM

SEQ ID NO: 175156 - protein, 7 aa, synthetic construct
GDRVKFT

SEQ ID NO: 175157 - protein, 7 aa, synthetic construct
MENPKFK

SEQ ID NO: 175158 - protein, 7 aa, synthetic construct
YEKPRFV

SEQ ID NO: 175159 - protein, 7 aa, synthetic construct
KEKPYYT

SEQ ID NO: 175160 - protein, 7 aa, synthetic construct
GNKPRDT

SEQ ID NO: 175161 - protein, 7 aa, synthetic construct
REKPHST

SEQ ID NO: 175162 - protein, 7 aa, synthetic construct
GERMKMT

SEQ ID NO: 175163 - protein, 7 aa, synthetic construct
ETKPKFY

SEQ ID NO: 175164 - protein, 7 aa, synthetic construct
LEMPKRT

SEQ ID NO: 175165 - protein, 7 aa, synthetic construct
ELKPKHT

SEQ ID NO: 175166 - protein, 7 aa, synthetic construct
QEKPKHI

SEQ ID NO: 175167 - protein, 7 aa, synthetic construct
VPKPKFD

SEQ ID NO: 175168 - protein, 7 aa, synthetic construct
IEKARFT

SEQ ID NO: 175169 - protein, 7 aa, synthetic construct
VEKPKWA

SEQ ID NO: 175170 - protein, 7 aa, synthetic construct
GMKPRDT

SEQ ID NO: 175171 - protein, 7 aa, synthetic construct
GESPKIR

SEQ ID NO: 175172 - protein, 7 aa, synthetic construct
GDKPKLY

SEQ ID NO: 175173 - protein, 7 aa, synthetic construct
LEQPKRT

SEQ ID NO: 175174 - protein, 7 aa, synthetic construct
PEKPKIH

SEQ ID NO: 175175 - protein, 7 aa, synthetic construct
GELTKRT

SEQ ID NO: 175176 - protein, 7 aa, synthetic construct
GEKKFNT

SEQ ID NO: 175177 - protein, 7 aa, synthetic construct
GEKPYKQ

SEQ ID NO: 175178 - protein, 7 aa, synthetic construct
GTHPKFG

SEQ ID NO: 175179 - protein, 7 aa, synthetic construct
GEKRAFV

SEQ ID NO: 175180 - protein, 7 aa, synthetic construct
GELPKKM

SEQ ID NO: 175181 - protein, 7 aa, synthetic construct
MEKPRAT

SEQ ID NO: 175182 - protein, 7 aa, synthetic construct
GDKPKLH

SEQ ID NO: 175183 - protein, 7 aa, synthetic construct
GDKPKSH

SEQ ID NO: 175184 - protein, 7 aa, synthetic construct
GEKPRLM

SEQ ID NO: 175185 - protein, 7 aa, synthetic construct
AEKGKYT

SEQ ID NO: 175186 - protein, 7 aa, synthetic construct
GEKHRLT

SEQ ID NO: 175187 - protein, 7 aa, synthetic construct
TEKPKVY

SEQ ID NO: 175188 - protein, 7 aa, synthetic construct
GERPKFV

SEQ ID NO: 175189 - protein, 7 aa, synthetic construct
PEKPKFV

SEQ ID NO: 175190 - protein, 7 aa, synthetic construct
LEKPKFM

SEQ ID NO: 175191 - protein, 7 aa, synthetic construct
GETGKFK

SEQ ID NO: 175192 - protein, 7 aa, synthetic construct
GGTHKFT

SEQ ID NO: 175193 - protein, 7 aa, synthetic construct
ADKPKWT

SEQ ID NO: 175194 - protein, 7 aa, synthetic construct
RSKPDFT

SEQ ID NO: 175195 - protein, 7 aa, synthetic construct
GEAPKSR

SEQ ID NO: 175196 - protein, 7 aa, synthetic construct
YQKPKFD

SEQ ID NO: 175197 - protein, 7 aa, synthetic construct
GESKKFS

SEQ ID NO: 175198 - protein, 7 aa, synthetic construct
GAKPKDM

SEQ ID NO: 175199 - protein, 7 aa, synthetic construct
GDGKKFT

SEQ ID NO: 175200 - protein, 7 aa, synthetic construct
VEKPKWQ

SEQ ID NO: 175201 - protein, 7 aa, synthetic construct
PEKPKDR

SEQ ID NO: 175202 - protein, 7 aa, synthetic construct
GEPNKRT

SEQ ID NO: 175203 - protein, 7 aa, synthetic construct
IEKPKTY

SEQ ID NO: 175204 - protein, 7 aa, synthetic construct
GDKIKFT

SEQ ID NO: 175205 - protein, 7 aa, synthetic construct
REPPKFG

SEQ ID NO: 175206 - protein, 7 aa, synthetic construct
GEPPKKM

SEQ ID NO: 175207 - protein, 7 aa, synthetic construct
IDKPKFY

SEQ ID NO: 175208 - protein, 7 aa, synthetic construct
GEKPKTS

SEQ ID NO: 175209 - protein, 7 aa, synthetic construct
MEKPKQW

SEQ ID NO: 175210 - protein, 7 aa, synthetic construct
GEKKFHT

SEQ ID NO: 175211 - protein, 7 aa, synthetic construct
GEKPVMR

SEQ ID NO: 175212 - protein, 7 aa, synthetic construct
LEKPKWA

SEQ ID NO: 175213 - protein, 7 aa, synthetic construct
GSKFKDT

SEQ ID NO: 175214 - protein, 7 aa, synthetic construct
IEKPKWA

SEQ ID NO: 175215 - protein, 7 aa, synthetic construct
ESKSKFT

SEQ ID NO: 175216 - protein, 7 aa, synthetic construct
PEKPSFK

SEQ ID NO: 175217 - protein, 7 aa, synthetic construct
MEKPKNS

SEQ ID NO: 175218 - protein, 7 aa, synthetic construct
DSKPKNT

SEQ ID NO: 175219 - protein, 7 aa, synthetic construct
GDRPKTT

SEQ ID NO: 175220 - protein, 7 aa, synthetic construct
FEKPKQM

SEQ ID NO: 175221 - protein, 7 aa, synthetic construct
QEKPKGF

SEQ ID NO: 175222 - protein, 7 aa, synthetic construct
GDHPKFK

SEQ ID NO: 175223 - protein, 7 aa, synthetic construct
KEKPHFY

SEQ ID NO: 175224 - protein, 7 aa, synthetic construct
GESKKIT

SEQ ID NO: 175225 - protein, 7 aa, synthetic construct
GMKPHFN

SEQ ID NO: 175226 - protein, 7 aa, synthetic construct
QQMPKFT

SEQ ID NO: 175227 - protein, 7 aa, synthetic construct
NDKPKAT

SEQ ID NO: 175228 - protein, 7 aa, synthetic construct
SEKPKSY

SEQ ID NO: 175229 - protein, 7 aa, synthetic construct
GENQKFK

SEQ ID NO: 175230 - protein, 7 aa, synthetic construct
HEKPIKT

SEQ ID NO: 175231 - protein, 7 aa, synthetic construct
AEKPKYL

SEQ ID NO: 175232 - protein, 7 aa, synthetic construct
FEKYKST

SEQ ID NO: 175233 - protein, 7 aa, synthetic construct
GEKPGLR

SEQ ID NO: 175234 - protein, 7 aa, synthetic construct
DEKPKIR

SEQ ID NO: 175235 - protein, 7 aa, synthetic construct
GAHPKST

SEQ ID NO: 175236 - protein, 7 aa, synthetic construct
VEKPKMF

SEQ ID NO: 175237 - protein, 7 aa, synthetic construct
GEQPKRS

SEQ ID NO: 175238 - protein, 7 aa, synthetic construct
AEKPKSM

SEQ ID NO: 175239 - protein, 7 aa, synthetic construct
YEKPRFQ

SEQ ID NO: 175240 - protein, 7 aa, synthetic construct
GDKYKLT

SEQ ID NO: 175241 - protein, 7 aa, synthetic construct
WEKPKFG

SEQ ID NO: 175242 - protein, 7 aa, synthetic construct
NEQPKKT

SEQ ID NO: 175243 - protein, 7 aa, synthetic construct
LEKYKHT

SEQ ID NO: 175244 - protein, 7 aa, synthetic construct
NEKPKNQ

SEQ ID NO: 175245 - protein, 7 aa, synthetic construct
TERPKFL

SEQ ID NO: 175246 - protein, 7 aa, synthetic construct
PEKPKIQ

SEQ ID NO: 175247 - protein, 7 aa, synthetic construct
GEKPNAR

SEQ ID NO: 175248 - protein, 7 aa, synthetic construct
GEKPTKM

SEQ ID NO: 175249 - protein, 7 aa, synthetic construct
GDKPKYF

SEQ ID NO: 175250 - protein, 7 aa, synthetic construct
GEKPRLY

SEQ ID NO: 175251 - protein, 7 aa, synthetic construct
REKPKEL

SEQ ID NO: 175252 - protein, 7 aa, synthetic construct
GEKPHKI

SEQ ID NO: 175253 - protein, 7 aa, synthetic construct
SEKQKFF

SEQ ID NO: 175254 - protein, 7 aa, synthetic construct
HVKPKFE

SEQ ID NO: 175255 - protein, 7 aa, synthetic construct
GQPPKYT

SEQ ID NO: 175256 - protein, 7 aa, synthetic construct
REGPKNT

SEQ ID NO: 175257 - protein, 7 aa, synthetic construct
GRKPADT

SEQ ID NO: 175258 - protein, 7 aa, synthetic construct
GEKPKQN

SEQ ID NO: 175259 - protein, 7 aa, synthetic construct
DQKPKFV

SEQ ID NO: 175260 - protein, 7 aa, synthetic construct
HEKPKYV

SEQ ID NO: 175261 - protein, 7 aa, synthetic construct
GETKKFH

SEQ ID NO: 175262 - protein, 7 aa, synthetic construct
HEKPKSI

SEQ ID NO: 175263 - protein, 7 aa, synthetic construct
GDKPKAY

SEQ ID NO: 175264 - protein, 7 aa, synthetic construct
QEKGKFF

SEQ ID NO: 175265 - protein, 7 aa, synthetic construct
GESTKRT

SEQ ID NO: 175266 - protein, 7 aa, synthetic construct
VEKPHKT

SEQ ID NO: 175267 - protein, 7 aa, synthetic construct
AEKPKML

SEQ ID NO: 175268 - protein, 7 aa, synthetic construct
GEKPAIR

SEQ ID NO: 175269 - protein, 7 aa, synthetic construct
GDRPKLT

SEQ ID NO: 175270 - protein, 7 aa, synthetic construct
GKYEKFT

SEQ ID NO: 175271 - protein, 7 aa, synthetic construct
GSKPHFG

SEQ ID NO: 175272 - protein, 7 aa, synthetic construct
SEKPKMS

SEQ ID NO: 175273 - protein, 7 aa, synthetic construct
FQKPKFE

SEQ ID NO: 175274 - protein, 7 aa, synthetic construct
GEKMKKD

SEQ ID NO: 175275 - protein, 7 aa, synthetic construct
NEKPKMS

SEQ ID NO: 175276 - protein, 7 aa, synthetic construct
GEKIRIT

SEQ ID NO: 175277 - protein, 7 aa, synthetic construct
GENPKKT

SEQ ID NO: 175278 - protein, 7 aa, synthetic construct
SDKPKST

SEQ ID NO: 175279 - protein, 7 aa, synthetic construct
GGKVKDT

SEQ ID NO: 175280 - protein, 7 aa, synthetic construct
HEKPKNF

SEQ ID NO: 175281 - protein, 7 aa, synthetic construct
QEKPKAW

SEQ ID NO: 175282 - protein, 7 aa, synthetic construct
AEKPKWS

SEQ ID NO: 175283 - protein, 7 aa, synthetic construct
GEKPRLS

SEQ ID NO: 175284 - protein, 7 aa, synthetic construct
ESKPKFF

SEQ ID NO: 175285 - protein, 7 aa, synthetic construct
GEMPKRA

SEQ ID NO: 175286 - protein, 7 aa, synthetic construct
EIKPKST

SEQ ID NO: 175287 - protein, 7 aa, synthetic construct
GELPKKF

SEQ ID NO: 175288 - protein, 7 aa, synthetic construct
SERPKFA

SEQ ID NO: 175289 - protein, 7 aa, synthetic construct
TEKPKYY

SEQ ID NO: 175290 - protein, 7 aa, synthetic construct
NEKPRFA

SEQ ID NO: 175291 - protein, 7 aa, synthetic construct
STKPKFD

SEQ ID NO: 175292 - protein, 7 aa, synthetic construct
MEKPKKD

SEQ ID NO: 175293 - protein, 7 aa, synthetic construct
GDKPKLW

SEQ ID NO: 175294 - protein, 7 aa, synthetic construct
GTHPKFT

SEQ ID NO: 175295 - protein, 7 aa, synthetic construct
REKHKDT

SEQ ID NO: 175296 - protein, 7 aa, synthetic construct
AEKKMFT

SEQ ID NO: 175297 - protein, 7 aa, synthetic construct
HEKPRTT

SEQ ID NO: 175298 - protein, 7 aa, synthetic construct
VEKPKMG

SEQ ID NO: 175299 - protein, 7 aa, synthetic construct
GEANKFR

SEQ ID NO: 175300 - protein, 7 aa, synthetic construct
PEKPKGW

SEQ ID NO: 175301 - protein, 7 aa, synthetic construct
GENFKKT

SEQ ID NO: 175302 - protein, 7 aa, synthetic construct
QEKPKIN

SEQ ID NO: 175303 - protein, 7 aa, synthetic construct
PEKPKQH

SEQ ID NO: 175304 - protein, 7 aa, synthetic construct
THAPKFT

SEQ ID NO: 175305 - protein, 7 aa, synthetic construct
GEKNRFN

SEQ ID NO: 175306 - protein, 7 aa, synthetic construct
TEKYKFT

SEQ ID NO: 175307 - protein, 7 aa, synthetic construct
AEKPRIT

SEQ ID NO: 175308 - protein, 7 aa, synthetic construct
GDGPKKT

SEQ ID NO: 175309 - protein, 7 aa, synthetic construct
NETPKFK

SEQ ID NO: 175310 - protein, 7 aa, synthetic construct
TFKPKFE

SEQ ID NO: 175311 - protein, 7 aa, synthetic construct
RETHKFT

SEQ ID NO: 175312 - protein, 7 aa, synthetic construct
GEVRKFT

SEQ ID NO: 175313 - protein, 7 aa, synthetic construct
VEKRPFT

SEQ ID NO: 175314 - protein, 7 aa, synthetic construct
YEKPKTM

SEQ ID NO: 175315 - protein, 7 aa, synthetic construct
GEKRSST

SEQ ID NO: 175316 - protein, 7 aa, synthetic construct
MEKPRTT

SEQ ID NO: 175317 - protein, 7 aa, synthetic construct
DGKPKFY

SEQ ID NO: 175318 - protein, 7 aa, synthetic construct
IEKPRYT

SEQ ID NO: 175319 - protein, 7 aa, synthetic construct
GEKPKFI

SEQ ID NO: 175320 - protein, 7 aa, synthetic construct
MEKYKFN

SEQ ID NO: 175321 - protein, 7 aa, synthetic construct
GENPKRL

SEQ ID NO: 175322 - protein, 7 aa, synthetic construct
DSKSKFT

SEQ ID NO: 175323 - protein, 7 aa, synthetic construct
GENPKRP

SEQ ID NO: 175324 - protein, 7 aa, synthetic construct
KEIPKFH

SEQ ID NO: 175325 - protein, 7 aa, synthetic construct
FEKPKVY

SEQ ID NO: 175326 - protein, 7 aa, synthetic construct
GEKRLNT

SEQ ID NO: 175327 - protein, 7 aa, synthetic construct
GVKFKDT

SEQ ID NO: 175328 - protein, 7 aa, synthetic construct
EGKVKFT

SEQ ID NO: 175329 - protein, 7 aa, synthetic construct
MEKNKFF

SEQ ID NO: 175330 - protein, 7 aa, synthetic construct
GPHPKFT

SEQ ID NO: 175331 - protein, 7 aa, synthetic construct
GEAKKNT

SEQ ID NO: 175332 - protein, 7 aa, synthetic construct
GRLPKFD

SEQ ID NO: 175333 - protein, 7 aa, synthetic construct
REIPKFN

SEQ ID NO: 175334 - protein, 7 aa, synthetic construct
NERPKFP

SEQ ID NO: 175335 - protein, 7 aa, synthetic construct
GEKPKIH

SEQ ID NO: 175336 - protein, 7 aa, synthetic construct
KEGHKFT

SEQ ID NO: 175337 - protein, 7 aa, synthetic construct
GEKIKTW

SEQ ID NO: 175338 - protein, 7 aa, synthetic construct
DGKPKAT

SEQ ID NO: 175339 - protein, 7 aa, synthetic construct
VERPKFV

SEQ ID NO: 175340 - protein, 7 aa, synthetic construct
AEKPKFI

SEQ ID NO: 175341 - protein, 7 aa, synthetic construct
GEKPKVW

SEQ ID NO: 175342 - protein, 7 aa, synthetic construct
QEKPRFG

SEQ ID NO: 175343 - protein, 7 aa, synthetic construct
SDKHKFT

SEQ ID NO: 175344 - protein, 7 aa, synthetic construct
PEKMKFI

SEQ ID NO: 175345 - protein, 7 aa, synthetic construct
PEKPKTM

SEQ ID NO: 175346 - protein, 7 aa, synthetic construct
QEKPKLF

SEQ ID NO: 175347 - protein, 7 aa, synthetic construct
VEKPKVW

SEQ ID NO: 175348 - protein, 7 aa, synthetic construct
GAGPKFG

SEQ ID NO: 175349 - protein, 7 aa, synthetic construct
GTGIKFT

SEQ ID NO: 175350 - protein, 7 aa, synthetic construct
GERPKQL

SEQ ID NO: 175351 - protein, 7 aa, synthetic construct
GEKPVRY

SEQ ID NO: 175352 - protein, 7 aa, synthetic construct
DGKNKFT

SEQ ID NO: 175353 - protein, 7 aa, synthetic construct
PERPKGT

SEQ ID NO: 175354 - protein, 7 aa, synthetic construct
GERPKAT

SEQ ID NO: 175355 - protein, 7 aa, synthetic construct
GEQAKKT

SEQ ID NO: 175356 - protein, 7 aa, synthetic construct
HEKPKVM

SEQ ID NO: 175357 - protein, 7 aa, synthetic construct
GERAKFS

SEQ ID NO: 175358 - protein, 7 aa, synthetic construct
GELPKQK

SEQ ID NO: 175359 - protein, 7 aa, synthetic construct
GESVKFK

SEQ ID NO: 175360 - protein, 7 aa, synthetic construct
GDKPKPY

SEQ ID NO: 175361 - protein, 7 aa, synthetic construct
GDKPKYL

SEQ ID NO: 175362 - protein, 7 aa, synthetic construct
PEKPKYL

SEQ ID NO: 175363 - protein, 7 aa, synthetic construct
PEKPKHP

SEQ ID NO: 175364 - protein, 7 aa, synthetic construct
AEKPKFQ

SEQ ID NO: 175365 - protein, 7 aa, synthetic construct
EVKPKFT

SEQ ID NO: 175366 - protein, 7 aa, synthetic construct
QEKPKVL

SEQ ID NO: 175367 - protein, 7 aa, synthetic construct
TEKPKQQ

SEQ ID NO: 175368 - protein, 7 aa, synthetic construct
AEKQKFY

SEQ ID NO: 175369 - protein, 7 aa, synthetic construct
NEAKKFT

SEQ ID NO: 175370 - protein, 7 aa, synthetic construct
QEKPKGA

SEQ ID NO: 175371 - protein, 7 aa, synthetic construct
GEKPYAK

SEQ ID NO: 175372 - protein, 7 aa, synthetic construct
IETPKRT

SEQ ID NO: 175373 - protein, 7 aa, synthetic construct
FEKPKSA

SEQ ID NO: 175374 - protein, 7 aa, synthetic construct
GEVAKFR

SEQ ID NO: 175375 - protein, 7 aa, synthetic construct
GDKPKTT

SEQ ID NO: 175376 - protein, 7 aa, synthetic construct
PEKPKVM

SEQ ID NO: 175377 - protein, 7 aa, synthetic construct
KEHPKFG

SEQ ID NO: 175378 - protein, 7 aa, synthetic construct
GDKPKGL

SEQ ID NO: 175379 - protein, 7 aa, synthetic construct
FEKPKHQ

SEQ ID NO: 175380 - protein, 7 aa, synthetic construct
QEKPKYF

SEQ ID NO: 175381 - protein, 7 aa, synthetic construct
GEEKKFR

SEQ ID NO: 175382 - protein, 7 aa, synthetic construct
GDTPKKT

SEQ ID NO: 175383 - protein, 7 aa, synthetic construct
GQKPKEY

SEQ ID NO: 175384 - protein, 7 aa, synthetic construct
GETVKKT

SEQ ID NO: 175385 - protein, 7 aa, synthetic construct
QDKPKFS

SEQ ID NO: 175386 - protein, 7 aa, synthetic construct
PEKAKFL

SEQ ID NO: 175387 - protein, 7 aa, synthetic construct
GEFKKFQ

SEQ ID NO: 175388 - protein, 7 aa, synthetic construct
IEKPKHG

SEQ ID NO: 175389 - protein, 7 aa, synthetic construct
MEKPKAA

SEQ ID NO: 175390 - protein, 7 aa, synthetic construct
NEKPKFF

SEQ ID NO: 175391 - protein, 7 aa, synthetic construct
GEAPKKG

SEQ ID NO: 175392 - protein, 7 aa, synthetic construct
FEKQKFL

SEQ ID NO: 175393 - protein, 7 aa, synthetic construct
GAGPKST

SEQ ID NO: 175394 - protein, 7 aa, synthetic construct
GEKPTKF

SEQ ID NO: 175395 - protein, 7 aa, synthetic construct
HEKPKIF

SEQ ID NO: 175396 - protein, 7 aa, synthetic construct
MEKPKNA

SEQ ID NO: 175397 - protein, 7 aa, synthetic construct
GEKPLRM

SEQ ID NO: 175398 - protein, 7 aa, synthetic construct
GERIKYT

SEQ ID NO: 175399 - protein, 7 aa, synthetic construct
GERIKAT

SEQ ID NO: 175400 - protein, 7 aa, synthetic construct
TEKFKFS

SEQ ID NO: 175401 - protein, 7 aa, synthetic construct
GENNKRT

SEQ ID NO: 175402 - protein, 7 aa, synthetic construct
VEKPKAM

SEQ ID NO: 175403 - protein, 7 aa, synthetic construct
GEKRTFT

SEQ ID NO: 175404 - protein, 7 aa, synthetic construct
GVDRKFT

SEQ ID NO: 175405 - protein, 7 aa, synthetic construct
ELKPKFL

SEQ ID NO: 175406 - protein, 7 aa, synthetic construct
GERPKGS

SEQ ID NO: 175407 - protein, 7 aa, synthetic construct
GDKRNFT

SEQ ID NO: 175408 - protein, 7 aa, synthetic construct
GRKPDLT

SEQ ID NO: 175409 - protein, 7 aa, synthetic construct
GEKPRFT

SEQ ID NO: 175410 - protein, 7 aa, synthetic construct
GEMPKRP

SEQ ID NO: 175411 - protein, 7 aa, synthetic construct
GENKKFG

SEQ ID NO: 175412 - protein, 7 aa, synthetic construct
GGAPKYT

SEQ ID NO: 175413 - protein, 7 aa, synthetic construct
GEKPLRF

SEQ ID NO: 175414 - protein, 7 aa, synthetic construct
AEKYKST

SEQ ID NO: 175415 - protein, 7 aa, synthetic construct
TEKPKQF

SEQ ID NO: 175416 - protein, 7 aa, synthetic construct
GTHPKFN

SEQ ID NO: 175417 - protein, 7 aa, synthetic construct
ELKPKFS

SEQ ID NO: 175418 - protein, 7 aa, synthetic construct
GEPPKFK

SEQ ID NO: 175419 - protein, 7 aa, synthetic construct
LTHPKFT

SEQ ID NO: 175420 - protein, 7 aa, synthetic construct
TERPKFT

SEQ ID NO: 175421 - protein, 7 aa, synthetic construct
GEKIKWA

SEQ ID NO: 175422 - protein, 7 aa, synthetic construct
AEKPKYY

SEQ ID NO: 175423 - protein, 7 aa, synthetic construct
GERPKTI

SEQ ID NO: 175424 - protein, 7 aa, synthetic construct
KETPKFF

SEQ ID NO: 175425 - protein, 7 aa, synthetic construct
GGKTKDT

SEQ ID NO: 175426 - protein, 7 aa, synthetic construct
TEAPKRT

SEQ ID NO: 175427 - protein, 7 aa, synthetic construct
GEIPKFK

SEQ ID NO: 175428 - protein, 7 aa, synthetic construct
EVKMKFT

SEQ ID NO: 175429 - protein, 7 aa, synthetic construct
SEGPKFK

SEQ ID NO: 175430 - protein, 7 aa, synthetic construct
WEKVKFG

SEQ ID NO: 175431 - protein, 7 aa, synthetic construct
FEKPKAQ

SEQ ID NO: 175432 - protein, 7 aa, synthetic construct
DIKPRFT

SEQ ID NO: 175433 - protein, 7 aa, synthetic construct
GEKPTRV

SEQ ID NO: 175434 - protein, 7 aa, synthetic construct
GERVKVT

SEQ ID NO: 175435 - protein, 7 aa, synthetic construct
KEHIKFT

SEQ ID NO: 175436 - protein, 7 aa, synthetic construct
GKKPEFL

SEQ ID NO: 175437 - protein, 7 aa, synthetic construct
GEKPRST

SEQ ID NO: 175438 - protein, 7 aa, synthetic construct
GIRPKFE

SEQ ID NO: 175439 - protein, 7 aa, synthetic construct
GDKFKFT

SEQ ID NO: 175440 - protein, 7 aa, synthetic construct
GEKPAGR

SEQ ID NO: 175441 - protein, 7 aa, synthetic construct
DSKPKHT

SEQ ID NO: 175442 - protein, 7 aa, synthetic construct
QQKPKFD

SEQ ID NO: 175443 - protein, 7 aa, synthetic construct
GERVKMT

SEQ ID NO: 175444 - protein, 7 aa, synthetic construct
GEKGRFN

SEQ ID NO: 175445 - protein, 7 aa, synthetic construct
HEKEKRT

SEQ ID NO: 175446 - protein, 7 aa, synthetic construct
IEKPKNY

SEQ ID NO: 175447 - protein, 7 aa, synthetic construct
GEKNFRT

SEQ ID NO: 175448 - protein, 7 aa, synthetic construct
GEKPPTR

SEQ ID NO: 175449 - protein, 7 aa, synthetic construct
AEKPPRT

SEQ ID NO: 175450 - protein, 7 aa, synthetic construct
GPHPKST

SEQ ID NO: 175451 - protein, 7 aa, synthetic construct
VEKPKYM

SEQ ID NO: 175452 - protein, 7 aa, synthetic construct
IEKTKWT

SEQ ID NO: 175453 - protein, 7 aa, synthetic construct
EVKLKFT

SEQ ID NO: 175454 - protein, 7 aa, synthetic construct
GEGKKFY

SEQ ID NO: 175455 - protein, 7 aa, synthetic construct
DKMPKFT

SEQ ID NO: 175456 - protein, 7 aa, synthetic construct
GERPKVL

SEQ ID NO: 175457 - protein, 7 aa, synthetic construct
KEKPVFF

SEQ ID NO: 175458 - protein, 7 aa, synthetic construct
GAKPRDT

SEQ ID NO: 175459 - protein, 7 aa, synthetic construct
YEKPKNS

SEQ ID NO: 175460 - protein, 7 aa, synthetic construct
GEKPRFS

SEQ ID NO: 175461 - protein, 7 aa, synthetic construct
KEKPRFE

SEQ ID NO: 175462 - protein, 7 aa, synthetic construct
SEKIRFT

SEQ ID NO: 175463 - protein, 7 aa, synthetic construct
GEKPVAR

SEQ ID NO: 175464 - protein, 7 aa, synthetic construct
IERPKFV

SEQ ID NO: 175465 - protein, 7 aa, synthetic construct
GKRPDFT

SEQ ID NO: 175466 - protein, 7 aa, synthetic construct
EGKPKFG

SEQ ID NO: 175467 - protein, 7 aa, synthetic construct
YEKPKAS

SEQ ID NO: 175468 - protein, 7 aa, synthetic construct
GFKPKDL

SEQ ID NO: 175469 - protein, 7 aa, synthetic construct
MHKPKFE

SEQ ID NO: 175470 - protein, 7 aa, synthetic construct
LEKPRTT

SEQ ID NO: 175471 - protein, 7 aa, synthetic construct
NEKPKVF

SEQ ID NO: 175472 - protein, 7 aa, synthetic construct
DTKPKST

SEQ ID NO: 175473 - protein, 7 aa, synthetic construct
DGKPKLT

SEQ ID NO: 175474 - protein, 7 aa, synthetic construct
GETRKFG

SEQ ID NO: 175475 - protein, 7 aa, synthetic construct
GETKKNT

SEQ ID NO: 175476 - protein, 7 aa, synthetic construct
DEKPKSK

SEQ ID NO: 175477 - protein, 7 aa, synthetic construct
ENKSKFT

SEQ ID NO: 175478 - protein, 7 aa, synthetic construct
GEKKIFL

SEQ ID NO: 175479 - protein, 7 aa, synthetic construct
SEKPKHA

SEQ ID NO: 175480 - protein, 7 aa, synthetic construct
THSPKFT

SEQ ID NO: 175481 - protein, 7 aa, synthetic construct
AEKPKGM

SEQ ID NO: 175482 - protein, 7 aa, synthetic construct
AEKPKFP

SEQ ID NO: 175483 - protein, 7 aa, synthetic construct
GDKPKSV

SEQ ID NO: 175484 - protein, 7 aa, synthetic construct
GETKKFY

SEQ ID NO: 175485 - protein, 7 aa, synthetic construct
KENPKFQ

SEQ ID NO: 175486 - protein, 7 aa, synthetic construct
GEPRKFM

SEQ ID NO: 175487 - protein, 7 aa, synthetic construct
GEKPKSA

SEQ ID NO: 175488 - protein, 7 aa, synthetic construct
DVKPKFV

SEQ ID NO: 175489 - protein, 7 aa, synthetic construct
NEKPKPW

SEQ ID NO: 175490 - protein, 7 aa, synthetic construct
YEAPKFR

SEQ ID NO: 175491 - protein, 7 aa, synthetic construct
GDPPKFK

SEQ ID NO: 175492 - protein, 7 aa, synthetic construct
QEKLKFY

SEQ ID NO: 175493 - protein, 7 aa, synthetic construct
ELKPKIT

SEQ ID NO: 175494 - protein, 7 aa, synthetic construct
REKPIFQ

SEQ ID NO: 175495 - protein, 7 aa, synthetic construct
GDKPKPF

SEQ ID NO: 175496 - protein, 7 aa, synthetic construct
GDKVRFT

SEQ ID NO: 175497 - protein, 7 aa, synthetic construct
IEKPKYS

SEQ ID NO: 175498 - protein, 7 aa, synthetic construct
SEKPKSW

SEQ ID NO: 175499 - protein, 7 aa, synthetic construct
GEKPTMR

SEQ ID NO: 175500 - protein, 7 aa, synthetic construct
GRVPKFD

SEQ ID NO: 175501 - protein, 7 aa, synthetic construct
GRKLEFT

SEQ ID NO: 175502 - protein, 7 aa, synthetic construct
GEFPKKN

SEQ ID NO: 175503 - protein, 7 aa, synthetic construct
GEQPKTK

SEQ ID NO: 175504 - protein, 7 aa, synthetic construct
GEKPIRV

SEQ ID NO: 175505 - protein, 7 aa, synthetic construct
QVHPKFT

SEQ ID NO: 175506 - protein, 7 aa, synthetic construct
QERPKIT

SEQ ID NO: 175507 - protein, 7 aa, synthetic construct
SERPKFM

SEQ ID NO: 175508 - protein, 7 aa, synthetic construct
DHKPKFM

SEQ ID NO: 175509 - protein, 7 aa, synthetic construct
GEGPKGK

SEQ ID NO: 175510 - protein, 7 aa, synthetic construct
GEIPKKL

SEQ ID NO: 175511 - protein, 7 aa, synthetic construct
GTIPKFS

SEQ ID NO: 175512 - protein, 7 aa, synthetic construct
SETRKFT

SEQ ID NO: 175513 - protein, 7 aa, synthetic construct
GEKRIAT

SEQ ID NO: 175514 - protein, 7 aa, synthetic construct
MEKYKFS

SEQ ID NO: 175515 - protein, 7 aa, synthetic construct
GQHPKIT

SEQ ID NO: 175516 - protein, 7 aa, synthetic construct
EEKPKVK

SEQ ID NO: 175517 - protein, 7 aa, synthetic construct
GERPKNI

SEQ ID NO: 175518 - protein, 7 aa, synthetic construct
YEKPKPF

SEQ ID NO: 175519 - protein, 7 aa, synthetic construct
NEKPRAT

SEQ ID NO: 175520 - protein, 7 aa, synthetic construct
GEKPRAV

SEQ ID NO: 175521 - protein, 7 aa, synthetic construct
GDKPKQY

SEQ ID NO: 175522 - protein, 7 aa, synthetic construct
GDKPKMH

SEQ ID NO: 175523 - protein, 7 aa, synthetic construct
GGKPKDI

SEQ ID NO: 175524 - protein, 7 aa, synthetic construct
AEKPKPY

SEQ ID NO: 175525 - protein, 7 aa, synthetic construct
GETKKFQ

SEQ ID NO: 175526 - protein, 7 aa, synthetic construct
MEKPRST

SEQ ID NO: 175527 - protein, 7 aa, synthetic construct
GVAPKYT

SEQ ID NO: 175528 - protein, 7 aa, synthetic construct
GDKPKWV

SEQ ID NO: 175529 - protein, 7 aa, synthetic construct
GERNKFV

SEQ ID NO: 175530 - protein, 7 aa, synthetic construct
GEKPRYG

SEQ ID NO: 175531 - protein, 7 aa, synthetic construct
GEGPKVK

SEQ ID NO: 175532 - protein, 7 aa, synthetic construct
GEGRKGT

SEQ ID NO: 175533 - protein, 7 aa, synthetic construct
GEKRQIT

SEQ ID NO: 175534 - protein, 7 aa, synthetic construct
VEKPKTF

SEQ ID NO: 175535 - protein, 7 aa, synthetic construct
GGSPKYT

SEQ ID NO: 175536 - protein, 7 aa, synthetic construct
NEKPKHV

SEQ ID NO: 175537 - protein, 7 aa, synthetic construct
GEKPNLR

SEQ ID NO: 175538 - protein, 7 aa, synthetic construct
GEKTKSW

SEQ ID NO: 175539 - protein, 7 aa, synthetic construct
QEKPKAV

SEQ ID NO: 175540 - protein, 7 aa, synthetic construct
GISPKFQ

SEQ ID NO: 175541 - protein, 7 aa, synthetic construct
GEATKKT

SEQ ID NO: 175542 - protein, 7 aa, synthetic construct
GEKPRQS

SEQ ID NO: 175543 - protein, 7 aa, synthetic construct
GTHPKFM

SEQ ID NO: 175544 - protein, 7 aa, synthetic construct
NEKPKTY

SEQ ID NO: 175545 - protein, 7 aa, synthetic construct
VEKPKIL

SEQ ID NO: 175546 - protein, 7 aa, synthetic construct
AEKPKSG

SEQ ID NO: 175547 - protein, 7 aa, synthetic construct
GRKPLFE

SEQ ID NO: 175548 - protein, 7 aa, synthetic construct
GEKPKTF

SEQ ID NO: 175549 - protein, 7 aa, synthetic construct
PEKPKFT

SEQ ID NO: 175550 - protein, 7 aa, synthetic construct
GAYPKST

SEQ ID NO: 175551 - protein, 7 aa, synthetic construct
GEKPRIS

SEQ ID NO: 175552 - protein, 7 aa, synthetic construct
GEKQKGW

SEQ ID NO: 175553 - protein, 7 aa, synthetic construct
GEKKPFH

SEQ ID NO: 175554 - protein, 7 aa, synthetic construct
DTKPKMT

SEQ ID NO: 175555 - protein, 7 aa, synthetic construct
GEKPKIL

SEQ ID NO: 175556 - protein, 7 aa, synthetic construct
GEIKKFH

SEQ ID NO: 175557 - protein, 7 aa, synthetic construct
YEKPKSF

SEQ ID NO: 175558 - protein, 7 aa, synthetic construct
GDKPKMG

SEQ ID NO: 175559 - protein, 7 aa, synthetic construct
VEKPKTW

SEQ ID NO: 175560 - protein, 7 aa, synthetic construct
PEKPKLQ

SEQ ID NO: 175561 - protein, 7 aa, synthetic construct
QDKPKFN

SEQ ID NO: 175562 - protein, 7 aa, synthetic construct
VEKPKHN

SEQ ID NO: 175563 - protein, 7 aa, synthetic construct
GETPKIR

SEQ ID NO: 175564 - protein, 7 aa, synthetic construct
KEKPQFF

SEQ ID NO: 175565 - protein, 7 aa, synthetic construct
GEIQKKT

SEQ ID NO: 175566 - protein, 7 aa, synthetic construct
DKKPIFT

SEQ ID NO: 175567 - protein, 7 aa, synthetic construct
GEKPRVI

SEQ ID NO: 175568 - protein, 7 aa, synthetic construct
TERPKFG

SEQ ID NO: 175569 - protein, 7 aa, synthetic construct
GDKPKQW

SEQ ID NO: 175570 - protein, 7 aa, synthetic construct
TEKRVFT

SEQ ID NO: 175571 - protein, 7 aa, synthetic construct
GEKPNKY

SEQ ID NO: 175572 - protein, 7 aa, synthetic construct
GEIKKFM

SEQ ID NO: 175573 - protein, 7 aa, synthetic construct
DHKPKAT

SEQ ID NO: 175574 - protein, 7 aa, synthetic construct
IEKPKRD

SEQ ID NO: 175575 - protein, 7 aa, synthetic construct
AEKPKAI

SEQ ID NO: 175576 - protein, 7 aa, synthetic construct
GESPKFK

SEQ ID NO: 175577 - protein, 7 aa, synthetic construct
QEKPKVN

SEQ ID NO: 175578 - protein, 7 aa, synthetic construct
KEHSKFT

SEQ ID NO: 175579 - protein, 7 aa, synthetic construct
QELPKFK

SEQ ID NO: 175580 - protein, 7 aa, synthetic construct
QERPKFA

SEQ ID NO: 175581 - protein, 7 aa, synthetic construct
GENPKFK

SEQ ID NO: 175582 - protein, 7 aa, synthetic construct
GDKPKIM

SEQ ID NO: 175583 - protein, 7 aa, synthetic construct
GAKPKDL

SEQ ID NO: 175584 - protein, 7 aa, synthetic construct
PERNKFT

SEQ ID NO: 175585 - protein, 7 aa, synthetic construct
FGKPKFE

SEQ ID NO: 175586 - protein, 7 aa, synthetic construct
DSKPKFA

SEQ ID NO: 175587 - protein, 7 aa, synthetic construct
GLKPKDW

SEQ ID NO: 175588 - protein, 7 aa, synthetic construct
GIKPRDT

SEQ ID NO: 175589 - protein, 7 aa, synthetic construct
EIKPKQT

SEQ ID NO: 175590 - protein, 7 aa, synthetic construct
GGKPKAD

SEQ ID NO: 175591 - protein, 7 aa, synthetic construct
PEKARFT

SEQ ID NO: 175592 - protein, 7 aa, synthetic construct
PEKPKMM

SEQ ID NO: 175593 - protein, 7 aa, synthetic construct
NMGPKFT

SEQ ID NO: 175594 - protein, 7 aa, synthetic construct
PTHPKFT

SEQ ID NO: 175595 - protein, 7 aa, synthetic construct
GRKPQET

SEQ ID NO: 175596 - protein, 7 aa, synthetic construct
DRSPKFT

SEQ ID NO: 175597 - protein, 7 aa, synthetic construct
TEKPKGY

SEQ ID NO: 175598 - protein, 7 aa, synthetic construct
GPGPKHT

SEQ ID NO: 175599 - protein, 7 aa, synthetic construct
FEKGKFF

SEQ ID NO: 175600 - protein, 7 aa, synthetic construct
DAKPKFP

SEQ ID NO: 175601 - protein, 7 aa, synthetic construct
GELPKFK

SEQ ID NO: 175602 - protein, 7 aa, synthetic construct
ETKPKVT

SEQ ID NO: 175603 - protein, 7 aa, synthetic construct
REVPKFQ

SEQ ID NO: 175604 - protein, 7 aa, synthetic construct
WEKQKFS

SEQ ID NO: 175605 - protein, 7 aa, synthetic construct
LDKPKFH

SEQ ID NO: 175606 - protein, 7 aa, synthetic construct
KEKPKWE

SEQ ID NO: 175607 - protein, 7 aa, synthetic construct
GEKRTFI

SEQ ID NO: 175608 - protein, 7 aa, synthetic construct
GEKPMRA

SEQ ID NO: 175609 - protein, 7 aa, synthetic construct
GSRPKDT

SEQ ID NO: 175610 - protein, 7 aa, synthetic construct
PSHPKFT

SEQ ID NO: 175611 - protein, 7 aa, synthetic construct
FETPKFK

SEQ ID NO: 175612 - protein, 7 aa, synthetic construct
SIQPKFT

SEQ ID NO: 175613 - protein, 7 aa, synthetic construct
GEKRITT

SEQ ID NO: 175614 - protein, 7 aa, synthetic construct
SEQPKRT

SEQ ID NO: 175615 - protein, 7 aa, synthetic construct
GDKPKRD

SEQ ID NO: 175616 - protein, 7 aa, synthetic construct
YDKPRFT

SEQ ID NO: 175617 - protein, 7 aa, synthetic construct
KENPKWT

SEQ ID NO: 175618 - protein, 7 aa, synthetic construct
EFKPKPT

SEQ ID NO: 175619 - protein, 7 aa, synthetic construct
LEKPRFP

SEQ ID NO: 175620 - protein, 7 aa, synthetic construct
EIKHKFT

SEQ ID NO: 175621 - protein, 7 aa, synthetic construct
GSIPKFQ

SEQ ID NO: 175622 - protein, 7 aa, synthetic construct
EPKPKFQ

SEQ ID NO: 175623 - protein, 7 aa, synthetic construct
GEKVKHF

SEQ ID NO: 175624 - protein, 7 aa, synthetic construct
GDRPKIT

SEQ ID NO: 175625 - protein, 7 aa, synthetic construct
DQKPKHT

SEQ ID NO: 175626 - protein, 7 aa, synthetic construct
NDKPKFT

SEQ ID NO: 175627 - protein, 7 aa, synthetic construct
GERPKFM

SEQ ID NO: 175628 - protein, 7 aa, synthetic construct
REHPKNT

SEQ ID NO: 175629 - protein, 7 aa, synthetic construct
AEKPKTF

SEQ ID NO: 175630 - protein, 7 aa, synthetic construct
HEKPNRT

SEQ ID NO: 175631 - protein, 7 aa, synthetic construct
EAKPKFT

SEQ ID NO: 175632 - protein, 7 aa, synthetic construct
SEPPKFR

SEQ ID NO: 175633 - protein, 7 aa, synthetic construct
GEKPMRL

SEQ ID NO: 175634 - protein, 7 aa, synthetic construct
GESKKFL

SEQ ID NO: 175635 - protein, 7 aa, synthetic construct
VERPKIT

SEQ ID NO: 175636 - protein, 7 aa, synthetic construct
GEKPRMQ

SEQ ID NO: 175637 - protein, 7 aa, synthetic construct
ESKPKIT

SEQ ID NO: 175638 - protein, 7 aa, synthetic construct
ENKHKFT

SEQ ID NO: 175639 - protein, 7 aa, synthetic construct
QEKPKYL

SEQ ID NO: 175640 - protein, 7 aa, synthetic construct
TEVPKFR

SEQ ID NO: 175641 - protein, 7 aa, synthetic construct
GVKPHFS

SEQ ID NO: 175642 - protein, 7 aa, synthetic construct
EMKVKFT

SEQ ID NO: 175643 - protein, 7 aa, synthetic construct
NEKPKMN

SEQ ID NO: 175644 - protein, 7 aa, synthetic construct
SEKPKPL

SEQ ID NO: 175645 - protein, 7 aa, synthetic construct
GESPKKT

SEQ ID NO: 175646 - protein, 7 aa, synthetic construct
GGRPKDT

SEQ ID NO: 175647 - protein, 7 aa, synthetic construct
GPKPKDW

SEQ ID NO: 175648 - protein, 7 aa, synthetic construct
GEKWKGG

SEQ ID NO: 175649 - protein, 7 aa, synthetic construct
GEKKSFH

SEQ ID NO: 175650 - protein, 7 aa, synthetic construct
GEKRTFG

SEQ ID NO: 175651 - protein, 7 aa, synthetic construct
TEKPRST

SEQ ID NO: 175652 - protein, 7 aa, synthetic construct
GEPGKFK

SEQ ID NO: 175653 - protein, 7 aa, synthetic construct
GDKSKFL

SEQ ID NO: 175654 - protein, 7 aa, synthetic construct
MLKPKFD

SEQ ID NO: 175655 - protein, 7 aa, synthetic construct
EEKGKFK

SEQ ID NO: 175656 - protein, 7 aa, synthetic construct
WDKPKFG

SEQ ID NO: 175657 - protein, 7 aa, synthetic construct
EAKHKFT

SEQ ID NO: 175658 - protein, 7 aa, synthetic construct
REIPKNT

SEQ ID NO: 175659 - protein, 7 aa, synthetic construct
FEKPKSM

SEQ ID NO: 175660 - protein, 7 aa, synthetic construct
QEKPKLN

SEQ ID NO: 175661 - protein, 7 aa, synthetic construct
GEKGART

SEQ ID NO: 175662 - protein, 7 aa, synthetic construct
HEKPKYM

SEQ ID NO: 175663 - protein, 7 aa, synthetic construct
SSNPKFT

SEQ ID NO: 175664 - protein, 7 aa, synthetic construct
GEKPRFA

SEQ ID NO: 175665 - protein, 7 aa, synthetic construct
GELPKNK

SEQ ID NO: 175666 - protein, 7 aa, synthetic construct
GKKPEWT

SEQ ID NO: 175667 - protein, 7 aa, synthetic construct
PEKPKQA

SEQ ID NO: 175668 - protein, 7 aa, synthetic construct
GDKQKFL

SEQ ID NO: 175669 - protein, 7 aa, synthetic construct
GEKQTFR

SEQ ID NO: 175670 - protein, 7 aa, synthetic construct
EYKPKNT

SEQ ID NO: 175671 - protein, 7 aa, synthetic construct
GKKDKDT

SEQ ID NO: 175672 - protein, 7 aa, synthetic construct
VEKPKSF

SEQ ID NO: 175673 - protein, 7 aa, synthetic construct
NDKPKFQ

SEQ ID NO: 175674 - protein, 7 aa, synthetic construct
VDKPKFV

SEQ ID NO: 175675 - protein, 7 aa, synthetic construct
GSKPSYT

SEQ ID NO: 175676 - protein, 7 aa, synthetic construct
QERPKTT

SEQ ID NO: 175677 - protein, 7 aa, synthetic construct
GEQNKFK

SEQ ID NO: 175678 - protein, 7 aa, synthetic construct
GEKPKYN

SEQ ID NO: 175679 - protein, 7 aa, synthetic construct
GEANKKT

SEQ ID NO: 175680 - protein, 7 aa, synthetic construct
PEKGKFL

SEQ ID NO: 175681 - protein, 7 aa, synthetic construct
GTIPKYT

SEQ ID NO: 175682 - protein, 7 aa, synthetic construct
FAKPKFD

SEQ ID NO: 175683 - protein, 7 aa, synthetic construct
IHKPKFD

SEQ ID NO: 175684 - protein, 7 aa, synthetic construct
EMKPKFQ

SEQ ID NO: 175685 - protein, 7 aa, synthetic construct
GDLPKFK

SEQ ID NO: 175686 - protein, 7 aa, synthetic construct
HMKPKDT

SEQ ID NO: 175687 - protein, 7 aa, synthetic construct
ADKPKFM

SEQ ID NO: 175688 - protein, 7 aa, synthetic construct
TQKPKFD

SEQ ID NO: 175689 - protein, 7 aa, synthetic construct
AEKPKAM

SEQ ID NO: 175690 - protein, 7 aa, synthetic construct
GKKPHDT

SEQ ID NO: 175691 - protein, 7 aa, synthetic construct
TEKNRFT

SEQ ID NO: 175692 - protein, 7 aa, synthetic construct
GRKPIDT

SEQ ID NO: 175693 - protein, 7 aa, synthetic construct
TEKPKYF

SEQ ID NO: 175694 - protein, 7 aa, synthetic construct
GRKPEFF

SEQ ID NO: 175695 - protein, 7 aa, synthetic construct
HGPPKFT

SEQ ID NO: 175696 - protein, 7 aa, synthetic construct
GEKVQRT

SEQ ID NO: 175697 - protein, 7 aa, synthetic construct
GTIPKFV

SEQ ID NO: 175698 - protein, 7 aa, synthetic construct
GETKKFF

SEQ ID NO: 175699 - protein, 7 aa, synthetic construct
IEKFKFS

SEQ ID NO: 175700 - protein, 7 aa, synthetic construct
TEKPKAS

SEQ ID NO: 175701 - protein, 7 aa, synthetic construct
QEKPRNT

SEQ ID NO: 175702 - protein, 7 aa, synthetic construct
QEGRKFT

SEQ ID NO: 175703 - protein, 7 aa, synthetic construct
GYKPKAD

SEQ ID NO: 175704 - protein, 7 aa, synthetic construct
GAHPKFM

SEQ ID NO: 175705 - protein, 7 aa, synthetic construct
SEKPKFA

SEQ ID NO: 175706 - protein, 7 aa, synthetic construct
HDKPKIT

SEQ ID NO: 175707 - protein, 7 aa, synthetic construct
YEKPKHN

SEQ ID NO: 175708 - protein, 7 aa, synthetic construct
YEKPKSG

SEQ ID NO: 175709 - protein, 7 aa, synthetic construct
GERPKNV

SEQ ID NO: 175710 - protein, 7 aa, synthetic construct
GENKKST

SEQ ID NO: 175711 - protein, 7 aa, synthetic construct
VEKPART

SEQ ID NO: 175712 - protein, 7 aa, synthetic construct
PEKPKIY

SEQ ID NO: 175713 - protein, 7 aa, synthetic construct
GEIPKRQ

SEQ ID NO: 175714 - protein, 7 aa, synthetic construct
GEKMNRT

SEQ ID NO: 175715 - protein, 7 aa, synthetic construct
VNKPKFD

SEQ ID NO: 175716 - protein, 7 aa, synthetic construct
GEGNKFK

SEQ ID NO: 175717 - protein, 7 aa, synthetic construct
RELPKFQ

SEQ ID NO: 175718 - protein, 7 aa, synthetic construct
GERPKVV

SEQ ID NO: 175719 - protein, 7 aa, synthetic construct
GPKYKDT

SEQ ID NO: 175720 - protein, 7 aa, synthetic construct
SEKPSRT

SEQ ID NO: 175721 - protein, 7 aa, synthetic construct
QEKPNFK

SEQ ID NO: 175722 - protein, 7 aa, synthetic construct
KEVPKFG

SEQ ID NO: 175723 - protein, 7 aa, synthetic construct
TDKPKFP

SEQ ID NO: 175724 - protein, 7 aa, synthetic construct
KEKPIFL

SEQ ID NO: 175725 - protein, 7 aa, synthetic construct
GGKYKDT

SEQ ID NO: 175726 - protein, 7 aa, synthetic construct
GDQPKKT

SEQ ID NO: 175727 - protein, 7 aa, synthetic construct
MEHPKFK

SEQ ID NO: 175728 - protein, 7 aa, synthetic construct
REAPKFQ

SEQ ID NO: 175729 - protein, 7 aa, synthetic construct
WEKNKFS

SEQ ID NO: 175730 - protein, 7 aa, synthetic construct
GEKRSFS

SEQ ID NO: 175731 - protein, 7 aa, synthetic construct
VEKPKAY

SEQ ID NO: 175732 - protein, 7 aa, synthetic construct
GKKPEFY

SEQ ID NO: 175733 - protein, 7 aa, synthetic construct
AEKPRFP

SEQ ID NO: 175734 - protein, 7 aa, synthetic construct
MEKPRMT

SEQ ID NO: 175735 - protein, 7 aa, synthetic construct
VEKQKWT

SEQ ID NO: 175736 - protein, 7 aa, synthetic construct
IEKPKAF

SEQ ID NO: 175737 - protein, 7 aa, synthetic construct
LDKPKFY

SEQ ID NO: 175738 - protein, 7 aa, synthetic construct
DSKGKFT

SEQ ID NO: 175739 - protein, 7 aa, synthetic construct
GNKPKFD

SEQ ID NO: 175740 - protein, 7 aa, synthetic construct
RESTKFT

SEQ ID NO: 175741 - protein, 7 aa, synthetic construct
ATGPKFT

SEQ ID NO: 175742 - protein, 7 aa, synthetic construct
DGKLKFT

SEQ ID NO: 175743 - protein, 7 aa, synthetic construct
ESKPKFH

SEQ ID NO: 175744 - protein, 7 aa, synthetic construct
GMKPYST

SEQ ID NO: 175745 - protein, 7 aa, synthetic construct
KETPKWT

SEQ ID NO: 175746 - protein, 7 aa, synthetic construct
VDRPKFT

SEQ ID NO: 175747 - protein, 7 aa, synthetic construct
PEKPKNF

SEQ ID NO: 175748 - protein, 7 aa, synthetic construct
PEKNKFT

SEQ ID NO: 175749 - protein, 7 aa, synthetic construct
PEKPKGM

SEQ ID NO: 175750 - protein, 7 aa, synthetic construct
HGKPKFD

SEQ ID NO: 175751 - protein, 7 aa, synthetic construct
KEFPKFA

SEQ ID NO: 175752 - protein, 7 aa, synthetic construct
EEKPKVR

SEQ ID NO: 175753 - protein, 7 aa, synthetic construct
GDKPKAF

SEQ ID NO: 175754 - protein, 7 aa, synthetic construct
IEKPKIH

SEQ ID NO: 175755 - protein, 7 aa, synthetic construct
PEKSKFM

SEQ ID NO: 175756 - protein, 7 aa, synthetic construct
GERQKIT

SEQ ID NO: 175757 - protein, 7 aa, synthetic construct
AEKPNRT

SEQ ID NO: 175758 - protein, 7 aa, synthetic construct
AEKPKTL

SEQ ID NO: 175759 - protein, 7 aa, synthetic construct
GEKMKYN

SEQ ID NO: 175760 - protein, 7 aa, synthetic construct
LEKPKWG

SEQ ID NO: 175761 - protein, 7 aa, synthetic construct
GIHPKFT

SEQ ID NO: 175762 - protein, 7 aa, synthetic construct
GPKFKDT

SEQ ID NO: 175763 - protein, 7 aa, synthetic construct
FVKPKDT

SEQ ID NO: 175764 - protein, 7 aa, synthetic construct
AEKYKFP

SEQ ID NO: 175765 - protein, 7 aa, synthetic construct
EGKPKFT

SEQ ID NO: 175766 - protein, 7 aa, synthetic construct
GEKPTFR

SEQ ID NO: 175767 - protein, 7 aa, synthetic construct
QEKPKVW

SEQ ID NO: 175768 - protein, 7 aa, synthetic construct
AEKPKHV

SEQ ID NO: 175769 - protein, 7 aa, synthetic construct
LEKPNFR

SEQ ID NO: 175770 - protein, 7 aa, synthetic construct
PEKVKFQ

SEQ ID NO: 175771 - protein, 7 aa, synthetic construct
GEQVKFK

SEQ ID NO: 175772 - protein, 7 aa, synthetic construct
GERTKAT

SEQ ID NO: 175773 - protein, 7 aa, synthetic construct
RERPKDT

SEQ ID NO: 175774 - protein, 7 aa, synthetic construct
VEKPKGW

SEQ ID NO: 175775 - protein, 7 aa, synthetic construct
GEKTRGT

SEQ ID NO: 175776 - protein, 7 aa, synthetic construct
YEKPKAF

SEQ ID NO: 175777 - protein, 7 aa, synthetic construct
AERPKGT

SEQ ID NO: 175778 - protein, 7 aa, synthetic construct
GEGVKFR

SEQ ID NO: 175779 - protein, 7 aa, synthetic construct
TEKPAFR

SEQ ID NO: 175780 - protein, 7 aa, synthetic construct
GDKFKYT

SEQ ID NO: 175781 - protein, 7 aa, synthetic construct
GDKKPFT

SEQ ID NO: 175782 - protein, 7 aa, synthetic construct
GIKPKFD

SEQ ID NO: 175783 - protein, 7 aa, synthetic construct
NEKPKRD

SEQ ID NO: 175784 - protein, 7 aa, synthetic construct
DTKPKFI

SEQ ID NO: 175785 - protein, 7 aa, synthetic construct
GERQKGT

SEQ ID NO: 175786 - protein, 7 aa, synthetic construct
EQKPKAT

SEQ ID NO: 175787 - protein, 7 aa, synthetic construct
GEKPKPW

SEQ ID NO: 175788 - protein, 7 aa, synthetic construct
GERPKML

SEQ ID NO: 175789 - protein, 7 aa, synthetic construct
AGKPKDT

SEQ ID NO: 175790 - protein, 7 aa, synthetic construct
TEKRNFT

SEQ ID NO: 175791 - protein, 7 aa, synthetic construct
GVHPKFG

SEQ ID NO: 175792 - protein, 7 aa, synthetic construct
GEKPNPR

SEQ ID NO: 175793 - protein, 7 aa, synthetic construct
HVKPKDT

SEQ ID NO: 175794 - protein, 7 aa, synthetic construct
AERTKFT

SEQ ID NO: 175795 - protein, 7 aa, synthetic construct
YQKPKFE

SEQ ID NO: 175796 - protein, 7 aa, synthetic construct
PEKIKFT

SEQ ID NO: 175797 - protein, 7 aa, synthetic construct
QEKPRFI

SEQ ID NO: 175798 - protein, 7 aa, synthetic construct
QEIPKKT

SEQ ID NO: 175799 - protein, 7 aa, synthetic construct
GEKRTAT

SEQ ID NO: 175800 - protein, 7 aa, synthetic construct
KEHMKFT

SEQ ID NO: 175801 - protein, 7 aa, synthetic construct
PEKRPFT

SEQ ID NO: 175802 - protein, 7 aa, synthetic construct
GKMPKFD

SEQ ID NO: 175803 - protein, 7 aa, synthetic construct
GENRKLT

SEQ ID NO: 175804 - protein, 7 aa, synthetic construct
TEKPKQL

SEQ ID NO: 175805 - protein, 7 aa, synthetic construct
VQKPKFE

SEQ ID NO: 175806 - protein, 7 aa, synthetic construct
GSKPRET

SEQ ID NO: 175807 - protein, 7 aa, synthetic construct
GPVPKYT

SEQ ID NO: 175808 - protein, 7 aa, synthetic construct
GEKPSRF

SEQ ID NO: 175809 - protein, 7 aa, synthetic construct
QEKPKTQ

SEQ ID NO: 175810 - protein, 7 aa, synthetic construct
GELPKSK

SEQ ID NO: 175811 - protein, 7 aa, synthetic construct
FERPKFN

SEQ ID NO: 175812 - protein, 7 aa, synthetic construct
GERPKTS

SEQ ID NO: 175813 - protein, 7 aa, synthetic construct
GAIPKFQ

SEQ ID NO: 175814 - protein, 7 aa, synthetic construct
AEKVKFY

SEQ ID NO: 175815 - protein, 7 aa, synthetic construct
IEKPKVW

SEQ ID NO: 175816 - protein, 7 aa, synthetic construct
GEAKKFS

SEQ ID NO: 175817 - protein, 7 aa, synthetic construct
GGPHKFT

SEQ ID NO: 175818 - protein, 7 aa, synthetic construct
GEKGKWG

SEQ ID NO: 175819 - protein, 7 aa, synthetic construct
GEQRKFG

SEQ ID NO: 175820 - protein, 7 aa, synthetic construct
YEKIKFH

SEQ ID NO: 175821 - protein, 7 aa, synthetic construct
DDKKKFT

SEQ ID NO: 175822 - protein, 7 aa, synthetic construct
RETPRFT

SEQ ID NO: 175823 - protein, 7 aa, synthetic construct
EIKPKFI

SEQ ID NO: 175824 - protein, 7 aa, synthetic construct
GDKPRLT

SEQ ID NO: 175825 - protein, 7 aa, synthetic construct
DTKPKFY

SEQ ID NO: 175826 - protein, 7 aa, synthetic construct
RIKPEFT

SEQ ID NO: 175827 - protein, 7 aa, synthetic construct
GEKPMGR

SEQ ID NO: 175828 - protein, 7 aa, synthetic construct
VERPKNT

SEQ ID NO: 175829 - protein, 7 aa, synthetic construct
GETLKFK

SEQ ID NO: 175830 - protein, 7 aa, synthetic construct
GENKKFN

SEQ ID NO: 175831 - protein, 7 aa, synthetic construct
GEKPKNV

SEQ ID NO: 175832 - protein, 7 aa, synthetic construct
TEKIRFT

SEQ ID NO: 175833 - protein, 7 aa, synthetic construct
PEKLKFT

SEQ ID NO: 175834 - protein, 7 aa, synthetic construct
QETPKRT

SEQ ID NO: 175835 - protein, 7 aa, synthetic construct
GLKFKDT

SEQ ID NO: 175836 - protein, 7 aa, synthetic construct
GKNPKDT

SEQ ID NO: 175837 - protein, 7 aa, synthetic construct
GEGKKFL

SEQ ID NO: 175838 - protein, 7 aa, synthetic construct
REHPKMT

SEQ ID NO: 175839 - protein, 7 aa, synthetic construct
GEGLKFK

SEQ ID NO: 175840 - protein, 7 aa, synthetic construct
GMSPKFQ

SEQ ID NO: 175841 - protein, 7 aa, synthetic construct
GEKRSNT

SEQ ID NO: 175842 - protein, 7 aa, synthetic construct
EHKPKFG

SEQ ID NO: 175843 - protein, 7 aa, synthetic construct
GEVQKFR

SEQ ID NO: 175844 - protein, 7 aa, synthetic construct
EQKPKFA

SEQ ID NO: 175845 - protein, 7 aa, synthetic construct
GEKPNRF

SEQ ID NO: 175846 - protein, 7 aa, synthetic construct
HQKPKDT

SEQ ID NO: 175847 - protein, 7 aa, synthetic construct
GTMPKFG

SEQ ID NO: 175848 - protein, 7 aa, synthetic construct
YEKPKTL

SEQ ID NO: 175849 - protein, 7 aa, synthetic construct
HNKPKFD

SEQ ID NO: 175850 - protein, 7 aa, synthetic construct
IEKPKSL

SEQ ID NO: 175851 - protein, 7 aa, synthetic construct
DYKPKFS

SEQ ID NO: 175852 - protein, 7 aa, synthetic construct
GEKYKSM

SEQ ID NO: 175853 - protein, 7 aa, synthetic construct
GPHNKFT

SEQ ID NO: 175854 - protein, 7 aa, synthetic construct
GDKKKFD

SEQ ID NO: 175855 - protein, 7 aa, synthetic construct
QEKPKIG

SEQ ID NO: 175856 - protein, 7 aa, synthetic construct
TEKPKSI

SEQ ID NO: 175857 - protein, 7 aa, synthetic construct
SEKPKMQ

SEQ ID NO: 175858 - protein, 7 aa, synthetic construct
VEKPKNM

SEQ ID NO: 175859 - protein, 7 aa, synthetic construct
MEKPKHG

SEQ ID NO: 175860 - protein, 7 aa, synthetic construct
FAKPKFE

SEQ ID NO: 175861 - protein, 7 aa, synthetic construct
AEKPRFG

SEQ ID NO: 175862 - protein, 7 aa, synthetic construct
NEKPKYF

SEQ ID NO: 175863 - protein, 7 aa, synthetic construct
TEKPKNN

SEQ ID NO: 175864 - protein, 7 aa, synthetic construct
GERPKVN

SEQ ID NO: 175865 - protein, 7 aa, synthetic construct
GEKHRFG

SEQ ID NO: 175866 - protein, 7 aa, synthetic construct
GEKLRFG

SEQ ID NO: 175867 - protein, 7 aa, synthetic construct
PEKPKIL

SEQ ID NO: 175868 - protein, 7 aa, synthetic construct
GDKHKFV

SEQ ID NO: 175869 - protein, 7 aa, synthetic construct
HERPKFQ

SEQ ID NO: 175870 - protein, 7 aa, synthetic construct
GEKQTRT

SEQ ID NO: 175871 - protein, 7 aa, synthetic construct
GEKNIRT

SEQ ID NO: 175872 - protein, 7 aa, synthetic construct
ESKQKFT

SEQ ID NO: 175873 - protein, 7 aa, synthetic construct
TGHPKFT

SEQ ID NO: 175874 - protein, 7 aa, synthetic construct
GEKPKMS

SEQ ID NO: 175875 - protein, 7 aa, synthetic construct
MEKPKAM

SEQ ID NO: 175876 - protein, 7 aa, synthetic construct
GDKSKFF

SEQ ID NO: 175877 - protein, 7 aa, synthetic construct
IEKPKFF

SEQ ID NO: 175878 - protein, 7 aa, synthetic construct
GERPKNS

SEQ ID NO: 175879 - protein, 7 aa, synthetic construct
DGKPKYT

SEQ ID NO: 175880 - protein, 7 aa, synthetic construct
QHKPKFE

SEQ ID NO: 175881 - protein, 7 aa, synthetic construct
IEKPKTF

SEQ ID NO: 175882 - protein, 7 aa, synthetic construct
YHKPKDT

SEQ ID NO: 175883 - protein, 7 aa, synthetic construct
GEKLKYN

SEQ ID NO: 175884 - protein, 7 aa, synthetic construct
GNKPKDM

SEQ ID NO: 175885 - protein, 7 aa, synthetic construct
SQMPKFT

SEQ ID NO: 175886 - protein, 7 aa, synthetic construct
LEKYKST

SEQ ID NO: 175887 - protein, 7 aa, synthetic construct
GEKKPFI

SEQ ID NO: 175888 - protein, 7 aa, synthetic construct
LEKPKVW

SEQ ID NO: 175889 - protein, 7 aa, synthetic construct
QEKVKWT

SEQ ID NO: 175890 - protein, 7 aa, synthetic construct
GEKPIRG

SEQ ID NO: 175891 - protein, 7 aa, synthetic construct
GLKPHFQ

SEQ ID NO: 175892 - protein, 7 aa, synthetic construct
GTKPHFA

SEQ ID NO: 175893 - protein, 7 aa, synthetic construct
DIKPKFQ

SEQ ID NO: 175894 - protein, 7 aa, synthetic construct
EIKPKYT

SEQ ID NO: 175895 - protein, 7 aa, synthetic construct
GEKPYMK

SEQ ID NO: 175896 - protein, 7 aa, synthetic construct
GEIPKSK

SEQ ID NO: 175897 - protein, 7 aa, synthetic construct
GDNPKRT

SEQ ID NO: 175898 - protein, 7 aa, synthetic construct
TYKPKET

SEQ ID NO: 175899 - protein, 7 aa, synthetic construct
QEKPART

SEQ ID NO: 175900 - protein, 7 aa, synthetic construct
DGKPKFI

SEQ ID NO: 175901 - protein, 7 aa, synthetic construct
GENQKRT

SEQ ID NO: 175902 - protein, 7 aa, synthetic construct
PLKPKFD

SEQ ID NO: 175903 - protein, 7 aa, synthetic construct
HEKPKAF

SEQ ID NO: 175904 - protein, 7 aa, synthetic construct
ESKPKFI

SEQ ID NO: 175905 - protein, 7 aa, synthetic construct
SERPKFQ

SEQ ID NO: 175906 - protein, 7 aa, synthetic construct
GEMPKMK

SEQ ID NO: 175907 - protein, 7 aa, synthetic construct
PEKPKMN

SEQ ID NO: 175908 - protein, 7 aa, synthetic construct
PEKHKST

SEQ ID NO: 175909 - protein, 7 aa, synthetic construct
GELQKRT

SEQ ID NO: 175910 - protein, 7 aa, synthetic construct
GDKGKYT

SEQ ID NO: 175911 - protein, 7 aa, synthetic construct
QEKPKHV

SEQ ID NO: 175912 - protein, 7 aa, synthetic construct
MEKPKIF

SEQ ID NO: 175913 - protein, 7 aa, synthetic construct
VEKRGFT

SEQ ID NO: 175914 - protein, 7 aa, synthetic construct
DGKPKFS

SEQ ID NO: 175915 - protein, 7 aa, synthetic construct
PEKPNFK

SEQ ID NO: 175916 - protein, 7 aa, synthetic construct
GGKLKFD

SEQ ID NO: 175917 - protein, 7 aa, synthetic construct
PEKNKFS

SEQ ID NO: 175918 - protein, 7 aa, synthetic construct
PEKPKFP

SEQ ID NO: 175919 - protein, 7 aa, synthetic construct
FEKPRFG

SEQ ID NO: 175920 - protein, 7 aa, synthetic construct
EPKPKFY

SEQ ID NO: 175921 - protein, 7 aa, synthetic construct
SEGPKFR

SEQ ID NO: 175922 - protein, 7 aa, synthetic construct
WEKPKIG

SEQ ID NO: 175923 - protein, 7 aa, synthetic construct
GEVPKQK

SEQ ID NO: 175924 - protein, 7 aa, synthetic construct
TNPPKFT

SEQ ID NO: 175925 - protein, 7 aa, synthetic construct
SEKPKQG

SEQ ID NO: 175926 - protein, 7 aa, synthetic construct
SEKNRFT

SEQ ID NO: 175927 - protein, 7 aa, synthetic construct
KEKYQFT

SEQ ID NO: 175928 - protein, 7 aa, synthetic construct
WEKPKMG

SEQ ID NO: 175929 - protein, 7 aa, synthetic construct
YEKPKIL

SEQ ID NO: 175930 - protein, 7 aa, synthetic construct
ENKPKFG

SEQ ID NO: 175931 - protein, 7 aa, synthetic construct
GEKKKDI

SEQ ID NO: 175932 - protein, 7 aa, synthetic construct
TEKPKFV

SEQ ID NO: 175933 - protein, 7 aa, synthetic construct
GEKIRFV

SEQ ID NO: 175934 - protein, 7 aa, synthetic construct
QEIPKRT

SEQ ID NO: 175935 - protein, 7 aa, synthetic construct
GEKFRNT

SEQ ID NO: 175936 - protein, 7 aa, synthetic construct
VEKPRFM

SEQ ID NO: 175937 - protein, 7 aa, synthetic construct
GEIPKKF

SEQ ID NO: 175938 - protein, 7 aa, synthetic construct
EIKPKFQ

SEQ ID NO: 175939 - protein, 7 aa, synthetic construct
GEKPVNR

SEQ ID NO: 175940 - protein, 7 aa, synthetic construct
IEKPKSI

SEQ ID NO: 175941 - protein, 7 aa, synthetic construct
PEAPKFR

SEQ ID NO: 175942 - protein, 7 aa, synthetic construct
GLHPKFT

SEQ ID NO: 175943 - protein, 7 aa, synthetic construct
GEKPRLA

SEQ ID NO: 175944 - protein, 7 aa, synthetic construct
DNKPKFP

SEQ ID NO: 175945 - protein, 7 aa, synthetic construct
EEKNKFK

SEQ ID NO: 175946 - protein, 7 aa, synthetic construct
GEKRMAT

SEQ ID NO: 175947 - protein, 7 aa, synthetic construct
SVTPKFT

SEQ ID NO: 175948 - protein, 7 aa, synthetic construct
GVKPYNT

SEQ ID NO: 175949 - protein, 7 aa, synthetic construct
GGVPKYT

SEQ ID NO: 175950 - protein, 7 aa, synthetic construct
LERPKFS

SEQ ID NO: 175951 - protein, 7 aa, synthetic construct
GDPKKFT

SEQ ID NO: 175952 - protein, 7 aa, synthetic construct
GEKPRMM

SEQ ID NO: 175953 - protein, 7 aa, synthetic construct
GDAPKRT

SEQ ID NO: 175954 - protein, 7 aa, synthetic construct
GEARKFG

SEQ ID NO: 175955 - protein, 7 aa, synthetic construct
GEKPKFM

SEQ ID NO: 175956 - protein, 7 aa, synthetic construct
GENPKVK

SEQ ID NO: 175957 - protein, 7 aa, synthetic construct
FDKHKFT

SEQ ID NO: 175958 - protein, 7 aa, synthetic construct
GDKPIFR

SEQ ID NO: 175959 - protein, 7 aa, synthetic construct
GESPKMR

SEQ ID NO: 175960 - protein, 7 aa, synthetic construct
GEAKKYT

SEQ ID NO: 175961 - protein, 7 aa, synthetic construct
GELRKFN

SEQ ID NO: 175962 - protein, 7 aa, synthetic construct
MEKSKFF

SEQ ID NO: 175963 - protein, 7 aa, synthetic construct
GEKKHTT

SEQ ID NO: 175964 - protein, 7 aa, synthetic construct
NEPPKRT

SEQ ID NO: 175965 - protein, 7 aa, synthetic construct
FEKPRFS

SEQ ID NO: 175966 - protein, 7 aa, synthetic construct
NERPKFM

SEQ ID NO: 175967 - protein, 7 aa, synthetic construct
GSKPYNT

SEQ ID NO: 175968 - protein, 7 aa, synthetic construct
GEKPRSF

SEQ ID NO: 175969 - protein, 7 aa, synthetic construct
GRKDKDT

SEQ ID NO: 175970 - protein, 7 aa, synthetic construct
AEKPKQN

SEQ ID NO: 175971 - protein, 7 aa, synthetic construct
GEKKFST

SEQ ID NO: 175972 - protein, 7 aa, synthetic construct
GDKPKKE

SEQ ID NO: 175973 - protein, 7 aa, synthetic construct
GRKPDPT

SEQ ID NO: 175974 - protein, 7 aa, synthetic construct
GETPKKL

SEQ ID NO: 175975 - protein, 7 aa, synthetic construct
GETKKFN

SEQ ID NO: 175976 - protein, 7 aa, synthetic construct
GEKNART

SEQ ID NO: 175977 - protein, 7 aa, synthetic construct
FEQPKKT

SEQ ID NO: 175978 - protein, 7 aa, synthetic construct
LEKPKIY

SEQ ID NO: 175979 - protein, 7 aa, synthetic construct
MEKPKNW

SEQ ID NO: 175980 - protein, 7 aa, synthetic construct
GEPKKFS

SEQ ID NO: 175981 - protein, 7 aa, synthetic construct
GPKPKSD

SEQ ID NO: 175982 - protein, 7 aa, synthetic construct
SEKPKMG

SEQ ID NO: 175983 - protein, 7 aa, synthetic construct
GEKPQSK

SEQ ID NO: 175984 - protein, 7 aa, synthetic construct
AEKPKGN

SEQ ID NO: 175985 - protein, 7 aa, synthetic construct
HDKPKFP

SEQ ID NO: 175986 - protein, 7 aa, synthetic construct
GTKPKFD

SEQ ID NO: 175987 - protein, 7 aa, synthetic construct
GLKPKWE

SEQ ID NO: 175988 - protein, 7 aa, synthetic construct
ENKPKYT

SEQ ID NO: 175989 - protein, 7 aa, synthetic construct
GEKPRTT

SEQ ID NO: 175990 - protein, 7 aa, synthetic construct
GEKKRFE

SEQ ID NO: 175991 - protein, 7 aa, synthetic construct
DHKPKIT

SEQ ID NO: 175992 - protein, 7 aa, synthetic construct
MIKPKFE

SEQ ID NO: 175993 - protein, 7 aa, synthetic construct
GGKPHST

SEQ ID NO: 175994 - protein, 7 aa, synthetic construct
GERPKFG

SEQ ID NO: 175995 - protein, 7 aa, synthetic construct
NEKRQFT

SEQ ID NO: 175996 - protein, 7 aa, synthetic construct
TEKPKHI

SEQ ID NO: 175997 - protein, 7 aa, synthetic construct
ELKPKFI

SEQ ID NO: 175998 - protein, 7 aa, synthetic construct
HEKPKLQ

SEQ ID NO: 175999 - protein, 7 aa, synthetic construct
WEKMKFN

SEQ ID NO: 176000 - protein, 7 aa, synthetic construct
GEKLKTW

SEQ ID NO: 176001 - protein, 7 aa, synthetic construct
TEKIKFL

SEQ ID NO: 176002 - protein, 7 aa, synthetic construct
ERTPKFT

SEQ ID NO: 176003 - protein, 7 aa, synthetic construct
LEKPRFI

SEQ ID NO: 176004 - protein, 7 aa, synthetic construct
TEKRAFT

SEQ ID NO: 176005 - protein, 7 aa, synthetic construct
GEKFKYA

SEQ ID NO: 176006 - protein, 7 aa, synthetic construct
GEKPAQR

SEQ ID NO: 176007 - protein, 7 aa, synthetic construct
GELGKFK

SEQ ID NO: 176008 - protein, 7 aa, synthetic construct
KEIPKFS

SEQ ID NO: 176009 - protein, 7 aa, synthetic construct
VEPPKRT

SEQ ID NO: 176010 - protein, 7 aa, synthetic construct
KETPKFS

SEQ ID NO: 176011 - protein, 7 aa, synthetic construct
DEKSKFK

SEQ ID NO: 176012 - protein, 7 aa, synthetic construct
GSKQKFD

SEQ ID NO: 176013 - protein, 7 aa, synthetic construct
GYKLKFD

SEQ ID NO: 176014 - protein, 7 aa, synthetic construct
GDKPKQN

SEQ ID NO: 176015 - protein, 7 aa, synthetic construct
TNMPKFT

SEQ ID NO: 176016 - protein, 7 aa, synthetic construct
GELPKQR

SEQ ID NO: 176017 - protein, 7 aa, synthetic construct
REIGKFT

SEQ ID NO: 176018 - protein, 7 aa, synthetic construct
GERPKSG

SEQ ID NO: 176019 - protein, 7 aa, synthetic construct
SEKPKYS

SEQ ID NO: 176020 - protein, 7 aa, synthetic construct
GEKKKDQ

SEQ ID NO: 176021 - protein, 7 aa, synthetic construct
QEKPKAM

SEQ ID NO: 176022 - protein, 7 aa, synthetic construct
GEKPQSR

SEQ ID NO: 176023 - protein, 7 aa, synthetic construct
GVGHKFT

SEQ ID NO: 176024 - protein, 7 aa, synthetic construct
GEKRAAT

SEQ ID NO: 176025 - protein, 7 aa, synthetic construct
VEKPNRT

SEQ ID NO: 176026 - protein, 7 aa, synthetic construct
GEKRNAT

SEQ ID NO: 176027 - protein, 7 aa, synthetic construct
GEPRKFN

SEQ ID NO: 176028 - protein, 7 aa, synthetic construct
GFDKKFT

SEQ ID NO: 176029 - protein, 7 aa, synthetic construct
ENKPKFA

SEQ ID NO: 176030 - protein, 7 aa, synthetic construct
QEQPKFR

SEQ ID NO: 176031 - protein, 7 aa, synthetic construct
GDKPKQS

SEQ ID NO: 176032 - protein, 7 aa, synthetic construct
SEKPKIS

SEQ ID NO: 176033 - protein, 7 aa, synthetic construct
IEKPRTT

SEQ ID NO: 176034 - protein, 7 aa, synthetic construct
IERPKIT

SEQ ID NO: 176035 - protein, 7 aa, synthetic construct
PEKYKTT

SEQ ID NO: 176036 - protein, 7 aa, synthetic construct
GDRLKFT

SEQ ID NO: 176037 - protein, 7 aa, synthetic construct
GEKFRST

SEQ ID NO: 176038 - protein, 7 aa, synthetic construct
GETRKFV

SEQ ID NO: 176039 - protein, 7 aa, synthetic construct
GEQPKRN

SEQ ID NO: 176040 - protein, 7 aa, synthetic construct
NEKVKWT

SEQ ID NO: 176041 - protein, 7 aa, synthetic construct
ADKPKFG

SEQ ID NO: 176042 - protein, 7 aa, synthetic construct
EAKPKFI

SEQ ID NO: 176043 - protein, 7 aa, synthetic construct
GERPKIS

SEQ ID NO: 176044 - protein, 7 aa, synthetic construct
GEIKKHT

SEQ ID NO: 176045 - protein, 7 aa, synthetic construct
GEFPKKG

SEQ ID NO: 176046 - protein, 7 aa, synthetic construct
NRKPDFT

SEQ ID NO: 176047 - protein, 7 aa, synthetic construct
GEKPRNF

SEQ ID NO: 176048 - protein, 7 aa, synthetic construct
KDHPKFT

SEQ ID NO: 176049 - protein, 7 aa, synthetic construct
KEYPKFS

SEQ ID NO: 176050 - protein, 7 aa, synthetic construct
AEKKKFD

SEQ ID NO: 176051 - protein, 7 aa, synthetic construct
GENSKFR

SEQ ID NO: 176052 - protein, 7 aa, synthetic construct
REMPKFQ

SEQ ID NO: 176053 - protein, 7 aa, synthetic construct
RMKPEFT

SEQ ID NO: 176054 - protein, 7 aa, synthetic construct
VEKHKYT

SEQ ID NO: 176055 - protein, 7 aa, synthetic construct
GGHPKFI

SEQ ID NO: 176056 - protein, 7 aa, synthetic construct
EMKPKTT

SEQ ID NO: 176057 - protein, 7 aa, synthetic construct
VENPKRT

SEQ ID NO: 176058 - protein, 7 aa, synthetic construct
LEKPKNM

SEQ ID NO: 176059 - protein, 7 aa, synthetic construct
GERAKNT

SEQ ID NO: 176060 - protein, 7 aa, synthetic construct
DEKPKTR

SEQ ID NO: 176061 - protein, 7 aa, synthetic construct
MEKPKFY

SEQ ID NO: 176062 - protein, 7 aa, synthetic construct
HEKPKTM

SEQ ID NO: 176063 - protein, 7 aa, synthetic construct
GEQKKFN

SEQ ID NO: 176064 - protein, 7 aa, synthetic construct
EVKPKFH

SEQ ID NO: 176065 - protein, 7 aa, synthetic construct
AEKPRFT

SEQ ID NO: 176066 - protein, 7 aa, synthetic construct
GTKPYTT

SEQ ID NO: 176067 - protein, 7 aa, synthetic construct
NEKPKNI

SEQ ID NO: 176068 - protein, 7 aa, synthetic construct
PEKPKTI

SEQ ID NO: 176069 - protein, 7 aa, synthetic construct
AEKPKHM

SEQ ID NO: 176070 - protein, 7 aa, synthetic construct
AEKPKTT

SEQ ID NO: 176071 - protein, 7 aa, synthetic construct
PEKNKFM

SEQ ID NO: 176072 - protein, 7 aa, synthetic construct
RNKPDFT

SEQ ID NO: 176073 - protein, 7 aa, synthetic construct
ERKPPFT

SEQ ID NO: 176074 - protein, 7 aa, synthetic construct
GERPKAM

SEQ ID NO: 176075 - protein, 7 aa, synthetic construct
HEKPRVT

SEQ ID NO: 176076 - protein, 7 aa, synthetic construct
DEKPKFR

SEQ ID NO: 176077 - protein, 7 aa, synthetic construct
DIKPKHT

SEQ ID NO: 176078 - protein, 7 aa, synthetic construct
ENKPKFP

SEQ ID NO: 176079 - protein, 7 aa, synthetic construct
GENNKKT

SEQ ID NO: 176080 - protein, 7 aa, synthetic construct
GEKYSKT

SEQ ID NO: 176081 - protein, 7 aa, synthetic construct
GDKPKQF

SEQ ID NO: 176082 - protein, 7 aa, synthetic construct
GYKPKDG

SEQ ID NO: 176083 - protein, 7 aa, synthetic construct
GEKPAKS

SEQ ID NO: 176084 - protein, 7 aa, synthetic construct
GEMNKRT

SEQ ID NO: 176085 - protein, 7 aa, synthetic construct
GEAPKRT

SEQ ID NO: 176086 - protein, 7 aa, synthetic construct
IEKPKWG

SEQ ID NO: 176087 - protein, 7 aa, synthetic construct
MEKPKPW

SEQ ID NO: 176088 - protein, 7 aa, synthetic construct
GRKPDST

SEQ ID NO: 176089 - protein, 7 aa, synthetic construct
GSKYKDT

SEQ ID NO: 176090 - protein, 7 aa, synthetic construct
GEQPKNK

SEQ ID NO: 176091 - protein, 7 aa, synthetic construct
NERPKTT

SEQ ID NO: 176092 - protein, 7 aa, synthetic construct
QEKPKIH

SEQ ID NO: 176093 - protein, 7 aa, synthetic construct
IEKPKMQ

SEQ ID NO: 176094 - protein, 7 aa, synthetic construct
GEQPKVK

SEQ ID NO: 176095 - protein, 7 aa, synthetic construct
PEKKSFT

SEQ ID NO: 176096 - protein, 7 aa, synthetic construct
FEKPIRT

SEQ ID NO: 176097 - protein, 7 aa, synthetic construct
IEKPRST

SEQ ID NO: 176098 - protein, 7 aa, synthetic construct
GENKKFT

SEQ ID NO: 176099 - protein, 7 aa, synthetic construct
FDKPKFV

SEQ ID NO: 176100 - protein, 7 aa, synthetic construct
MHKPKDT

SEQ ID NO: 176101 - protein, 7 aa, synthetic construct
GQKPKHE

SEQ ID NO: 176102 - protein, 7 aa, synthetic construct
GIKPRFD

SEQ ID NO: 176103 - protein, 7 aa, synthetic construct
GEKWKVA

SEQ ID NO: 176104 - protein, 7 aa, synthetic construct
GEHIKKT

SEQ ID NO: 176105 - protein, 7 aa, synthetic construct
PEKYKVT

SEQ ID NO: 176106 - protein, 7 aa, synthetic construct
QEKPKYI

SEQ ID NO: 176107 - protein, 7 aa, synthetic construct
NEIPKKT

SEQ ID NO: 176108 - protein, 7 aa, synthetic construct
GEKMYKT

SEQ ID NO: 176109 - protein, 7 aa, synthetic construct
TSVPKFT

SEQ ID NO: 176110 - protein, 7 aa, synthetic construct
MEKRSFT

SEQ ID NO: 176111 - protein, 7 aa, synthetic construct
GEKRNTT

SEQ ID NO: 176112 - protein, 7 aa, synthetic construct
DAKPKFQ

SEQ ID NO: 176113 - protein, 7 aa, synthetic construct
GRKPDFV

SEQ ID NO: 176114 - protein, 7 aa, synthetic construct
TERNKFT

SEQ ID NO: 176115 - protein, 7 aa, synthetic construct
VEKYKFP

SEQ ID NO: 176116 - protein, 7 aa, synthetic construct
GEQPKKQ

SEQ ID NO: 176117 - protein, 7 aa, synthetic construct
HNPPKFT

SEQ ID NO: 176118 - protein, 7 aa, synthetic construct
FEKPKMQ

SEQ ID NO: 176119 - protein, 7 aa, synthetic construct
NEKPKGY

SEQ ID NO: 176120 - protein, 7 aa, synthetic construct
GEMNKFK

SEQ ID NO: 176121 - protein, 7 aa, synthetic construct
IEKPVRT

SEQ ID NO: 176122 - protein, 7 aa, synthetic construct
GDKPKHN

SEQ ID NO: 176123 - protein, 7 aa, synthetic construct
GSKNKDT

SEQ ID NO: 176124 - protein, 7 aa, synthetic construct
NYKPKFD

SEQ ID NO: 176125 - protein, 7 aa, synthetic construct
IDKPKFN

SEQ ID NO: 176126 - protein, 7 aa, synthetic construct
IEKPKFH

SEQ ID NO: 176127 - protein, 7 aa, synthetic construct
GEKHIRT

SEQ ID NO: 176128 - protein, 7 aa, synthetic construct
GHGPKFS

SEQ ID NO: 176129 - protein, 7 aa, synthetic construct
LEKPRYT

SEQ ID NO: 176130 - protein, 7 aa, synthetic construct
EHKPKVT

SEQ ID NO: 176131 - protein, 7 aa, synthetic construct
GEKPKAQ

SEQ ID NO: 176132 - protein, 7 aa, synthetic construct
NEKPRFV

SEQ ID NO: 176133 - protein, 7 aa, synthetic construct
GSHPKFN

SEQ ID NO: 176134 - protein, 7 aa, synthetic construct
GESPKLR

SEQ ID NO: 176135 - protein, 7 aa, synthetic construct
AEKPRLT

SEQ ID NO: 176136 - protein, 7 aa, synthetic construct
SNKPKFD

SEQ ID NO: 176137 - protein, 7 aa, synthetic construct
GEKPKIQ

SEQ ID NO: 176138 - protein, 7 aa, synthetic construct
GEMRKFG

SEQ ID NO: 176139 - protein, 7 aa, synthetic construct
GENMKFR

SEQ ID NO: 176140 - protein, 7 aa, synthetic construct
VEKPKMQ

SEQ ID NO: 176141 - protein, 7 aa, synthetic construct
GEGRKFS

SEQ ID NO: 176142 - protein, 7 aa, synthetic construct
GEKAKYS

SEQ ID NO: 176143 - protein, 7 aa, synthetic construct
GDKPKNQ

SEQ ID NO: 176144 - protein, 7 aa, synthetic construct
MMGPKFT

SEQ ID NO: 176145 - protein, 7 aa, synthetic construct
GEKKPFY

SEQ ID NO: 176146 - protein, 7 aa, synthetic construct
GEQKKFM

SEQ ID NO: 176147 - protein, 7 aa, synthetic construct
EFKPKNT

SEQ ID NO: 176148 - protein, 7 aa, synthetic construct
REQPKFA

SEQ ID NO: 176149 - protein, 7 aa, synthetic construct
KEKPAWT

SEQ ID NO: 176150 - protein, 7 aa, synthetic construct
MEKPIRT

SEQ ID NO: 176151 - protein, 7 aa, synthetic construct
GEKPRTN

SEQ ID NO: 176152 - protein, 7 aa, synthetic construct
GRMPKET

SEQ ID NO: 176153 - protein, 7 aa, synthetic construct
PEKYKQT

SEQ ID NO: 176154 - protein, 7 aa, synthetic construct
AEKPVRT

SEQ ID NO: 176155 - protein, 7 aa, synthetic construct
GEKPARA

SEQ ID NO: 176156 - protein, 7 aa, synthetic construct
AEKPKGQ

SEQ ID NO: 176157 - protein, 7 aa, synthetic construct
GEKRNST

SEQ ID NO: 176158 - protein, 7 aa, synthetic construct
GEGLKRT

SEQ ID NO: 176159 - protein, 7 aa, synthetic construct
GEKRTFV

SEQ ID NO: 176160 - protein, 7 aa, synthetic construct
DQKPKTT

SEQ ID NO: 176161 - protein, 7 aa, synthetic construct
NEMPKFK

SEQ ID NO: 176162 - protein, 7 aa, synthetic construct
HEKPRFS

SEQ ID NO: 176163 - protein, 7 aa, synthetic construct
FEKPKAN

SEQ ID NO: 176164 - protein, 7 aa, synthetic construct
YEKGKFH

SEQ ID NO: 176165 - protein, 7 aa, synthetic construct
NEKYKFP

SEQ ID NO: 176166 - protein, 7 aa, synthetic construct
GEKRIFS

SEQ ID NO: 176167 - protein, 7 aa, synthetic construct
AERPKQT

SEQ ID NO: 176168 - protein, 7 aa, synthetic construct
EVKPKST

SEQ ID NO: 176169 - protein, 7 aa, synthetic construct
GFKNKFD

SEQ ID NO: 176170 - protein, 7 aa, synthetic construct
LEIPKFK

SEQ ID NO: 176171 - protein, 7 aa, synthetic construct
GAKPKHD

SEQ ID NO: 176172 - protein, 7 aa, synthetic construct
GEKRTFA

SEQ ID NO: 176173 - protein, 7 aa, synthetic construct
QEKPKIM

SEQ ID NO: 176174 - protein, 7 aa, synthetic construct
TETPKRT

SEQ ID NO: 176175 - protein, 7 aa, synthetic construct
GERTKNT

SEQ ID NO: 176176 - protein, 7 aa, synthetic construct
IEKPKYG

SEQ ID NO: 176177 - protein, 7 aa, synthetic construct
LETPKFR

SEQ ID NO: 176178 - protein, 7 aa, synthetic construct
MEKKPFT

SEQ ID NO: 176179 - protein, 7 aa, synthetic construct
GEKPMLR

SEQ ID NO: 176180 - protein, 7 aa, synthetic construct
GENPKLR

SEQ ID NO: 176181 - protein, 7 aa, synthetic construct
DYKPKNT

SEQ ID NO: 176182 - protein, 7 aa, synthetic construct
GPGHKFT

SEQ ID NO: 176183 - protein, 7 aa, synthetic construct
SEKPKFY

SEQ ID NO: 176184 - protein, 7 aa, synthetic construct
AEKRTFT

SEQ ID NO: 176185 - protein, 7 aa, synthetic construct
GENGKRT

SEQ ID NO: 176186 - protein, 7 aa, synthetic construct
KEKRDFT

SEQ ID NO: 176187 - protein, 7 aa, synthetic construct
IEKPKHT

SEQ ID NO: 176188 - protein, 7 aa, synthetic construct
NEKPRFG

SEQ ID NO: 176189 - protein, 7 aa, synthetic construct
REKPKSD

SEQ ID NO: 176190 - protein, 7 aa, synthetic construct
GEKLRFN

SEQ ID NO: 176191 - protein, 7 aa, synthetic construct
PGKPKFD

SEQ ID NO: 176192 - protein, 7 aa, synthetic construct
HEKPKAN

SEQ ID NO: 176193 - protein, 7 aa, synthetic construct
GEKPKFF

SEQ ID NO: 176194 - protein, 7 aa, synthetic construct
QEKPKLH

SEQ ID NO: 176195 - protein, 7 aa, synthetic construct
LEKPKYY

SEQ ID NO: 176196 - protein, 7 aa, synthetic construct
GMIPKNT

SEQ ID NO: 176197 - protein, 7 aa, synthetic construct
THNPKFT

SEQ ID NO: 176198 - protein, 7 aa, synthetic construct
LEVPKRT

SEQ ID NO: 176199 - protein, 7 aa, synthetic construct
HEKPKYS

SEQ ID NO: 176200 - protein, 7 aa, synthetic construct
GESLKRT

SEQ ID NO: 176201 - protein, 7 aa, synthetic construct
RESPKFA

SEQ ID NO: 176202 - protein, 7 aa, synthetic construct
ENKPKST

SEQ ID NO: 176203 - protein, 7 aa, synthetic construct
QDKPRFT

SEQ ID NO: 176204 - protein, 7 aa, synthetic construct
GEKPARY

SEQ ID NO: 176205 - protein, 7 aa, synthetic construct
GDIPKKT

SEQ ID NO: 176206 - protein, 7 aa, synthetic construct
FEKPKQQ

SEQ ID NO: 176207 - protein, 7 aa, synthetic construct
NEKPKHM

SEQ ID NO: 176208 - protein, 7 aa, synthetic construct
YEKPKSL

SEQ ID NO: 176209 - protein, 7 aa, synthetic construct
IEKYKFS

SEQ ID NO: 176210 - protein, 7 aa, synthetic construct
GEKHKSF

SEQ ID NO: 176211 - protein, 7 aa, synthetic construct
VEKRSFT

SEQ ID NO: 176212 - protein, 7 aa, synthetic construct
GSKPRFE

SEQ ID NO: 176213 - protein, 7 aa, synthetic construct
GEKRQAT

SEQ ID NO: 176214 - protein, 7 aa, synthetic construct
GEVRKMT

SEQ ID NO: 176215 - protein, 7 aa, synthetic construct
YAKPKFD

SEQ ID NO: 176216 - protein, 7 aa, synthetic construct
HEKPKPF

SEQ ID NO: 176217 - protein, 7 aa, synthetic construct
RETPKFG

SEQ ID NO: 176218 - protein, 7 aa, synthetic construct
GEKPKNT

SEQ ID NO: 176219 - protein, 7 aa, synthetic construct
MEIPKRT

SEQ ID NO: 176220 - protein, 7 aa, synthetic construct
GETPKRG

SEQ ID NO: 176221 - protein, 7 aa, synthetic construct
RLKPDFT

SEQ ID NO: 176222 - protein, 7 aa, synthetic construct
SDKPKFF

SEQ ID NO: 176223 - protein, 7 aa, synthetic construct
PEKFKST

SEQ ID NO: 176224 - protein, 7 aa, synthetic construct
DKFPKFT

SEQ ID NO: 176225 - protein, 7 aa, synthetic construct
QHKPKDT

SEQ ID NO: 176226 - protein, 7 aa, synthetic construct
GKFPKFD

SEQ ID NO: 176227 - protein, 7 aa, synthetic construct
TEKPKVF

SEQ ID NO: 176228 - protein, 7 aa, synthetic construct
GDKWKPT

SEQ ID NO: 176229 - protein, 7 aa, synthetic construct
LEVPKFK

SEQ ID NO: 176230 - protein, 7 aa, synthetic construct
GEKRAFT

SEQ ID NO: 176231 - protein, 7 aa, synthetic construct
IEKPKIM

SEQ ID NO: 176232 - protein, 7 aa, synthetic construct
AEKPKII

SEQ ID NO: 176233 - protein, 7 aa, synthetic construct
PERQKFT

SEQ ID NO: 176234 - protein, 7 aa, synthetic construct
KENPKFF

SEQ ID NO: 176235 - protein, 7 aa, synthetic construct
HEKPKNL

SEQ ID NO: 176236 - protein, 7 aa, synthetic construct
GEKPSTR

SEQ ID NO: 176237 - protein, 7 aa, synthetic construct
ELKPKFP

SEQ ID NO: 176238 - protein, 7 aa, synthetic construct
GPHPKIT

SEQ ID NO: 176239 - protein, 7 aa, synthetic construct
GEMPKKS

SEQ ID NO: 176240 - protein, 7 aa, synthetic construct
VEKPKFG

SEQ ID NO: 176241 - protein, 7 aa, synthetic construct
QEKKSFT

SEQ ID NO: 176242 - protein, 7 aa, synthetic construct
GHKPSFG

SEQ ID NO: 176243 - protein, 7 aa, synthetic construct
LEKHRFT

SEQ ID NO: 176244 - protein, 7 aa, synthetic construct
GNKIKFD

SEQ ID NO: 176245 - protein, 7 aa, synthetic construct
GDKPKIF

SEQ ID NO: 176246 - protein, 7 aa, synthetic construct
GTTHKFT

SEQ ID NO: 176247 - protein, 7 aa, synthetic construct
GEGKKMT

SEQ ID NO: 176248 - protein, 7 aa, synthetic construct
GSKHKDT

SEQ ID NO: 176249 - protein, 7 aa, synthetic construct
GSHPKNT

SEQ ID NO: 176250 - protein, 7 aa, synthetic construct
GEKPVRV

SEQ ID NO: 176251 - protein, 7 aa, synthetic construct
GEQPKQR

SEQ ID NO: 176252 - protein, 7 aa, synthetic construct
YEKNKFQ

SEQ ID NO: 176253 - protein, 7 aa, synthetic construct
GETPKAK

SEQ ID NO: 176254 - protein, 7 aa, synthetic construct
VERNKFT

SEQ ID NO: 176255 - protein, 7 aa, synthetic construct
MEQPKRT

SEQ ID NO: 176256 - protein, 7 aa, synthetic construct
TEKPKNW

SEQ ID NO: 176257 - protein, 7 aa, synthetic construct
GEKPRQF

SEQ ID NO: 176258 - protein, 7 aa, synthetic construct
GADRKFT

SEQ ID NO: 176259 - protein, 7 aa, synthetic construct
GDKPKSW

SEQ ID NO: 176260 - protein, 7 aa, synthetic construct
DHKTKFT

SEQ ID NO: 176261 - protein, 7 aa, synthetic construct
DSKPKST

SEQ ID NO: 176262 - protein, 7 aa, synthetic construct
VESPKFR

SEQ ID NO: 176263 - protein, 7 aa, synthetic construct
GMKPKND

SEQ ID NO: 176264 - protein, 7 aa, synthetic construct
GNKPKEL

SEQ ID NO: 176265 - protein, 7 aa, synthetic construct
HEKVKFY

SEQ ID NO: 176266 - protein, 7 aa, synthetic construct
GEKPARN

SEQ ID NO: 176267 - protein, 7 aa, synthetic construct
QEGPKFR

SEQ ID NO: 176268 - protein, 7 aa, synthetic construct
NEKPKAM

SEQ ID NO: 176269 - protein, 7 aa, synthetic construct
VDKPKFG

SEQ ID NO: 176270 - protein, 7 aa, synthetic construct
PEKPKVY

SEQ ID NO: 176271 - protein, 7 aa, synthetic construct
GESKKFM

SEQ ID NO: 176272 - protein, 7 aa, synthetic construct
GEKYKSV

SEQ ID NO: 176273 - protein, 7 aa, synthetic construct
LEKNKWT

SEQ ID NO: 176274 - protein, 7 aa, synthetic construct
MEKPSFR

SEQ ID NO: 176275 - protein, 7 aa, synthetic construct
SEGPKRT

SEQ ID NO: 176276 - protein, 7 aa, synthetic construct
DEKPKPR

SEQ ID NO: 176277 - protein, 7 aa, synthetic construct
GESNKFR

SEQ ID NO: 176278 - protein, 7 aa, synthetic construct
TETPKFK

SEQ ID NO: 176279 - protein, 7 aa, synthetic construct
REKPLFQ

SEQ ID NO: 176280 - protein, 7 aa, synthetic construct
GEKNRFS

SEQ ID NO: 176281 - protein, 7 aa, synthetic construct
GGHPKFN

SEQ ID NO: 176282 - protein, 7 aa, synthetic construct
GEIPKQK

SEQ ID NO: 176283 - protein, 7 aa, synthetic construct
GEGRKFA

SEQ ID NO: 176284 - protein, 7 aa, synthetic construct
GEKPRNL

SEQ ID NO: 176285 - protein, 7 aa, synthetic construct
GEKVKWP

SEQ ID NO: 176286 - protein, 7 aa, synthetic construct
MEKQKFF

SEQ ID NO: 176287 - protein, 7 aa, synthetic construct
GEVKKFT

SEQ ID NO: 176288 - protein, 7 aa, synthetic construct
GEKPRMS

SEQ ID NO: 176289 - protein, 7 aa, synthetic construct
GESRKFV

SEQ ID NO: 176290 - protein, 7 aa, synthetic construct
GEGKKFQ

SEQ ID NO: 176291 - protein, 7 aa, synthetic construct
IEKPKTM

SEQ ID NO: 176292 - protein, 7 aa, synthetic construct
GEKVRFA

SEQ ID NO: 176293 - protein, 7 aa, synthetic construct
GEKRTST

SEQ ID NO: 176294 - protein, 7 aa, synthetic construct
LEAPKRT

SEQ ID NO: 176295 - protein, 7 aa, synthetic construct
GEKYKNV

SEQ ID NO: 176296 - protein, 7 aa, synthetic construct
GRKPEYT

SEQ ID NO: 176297 - protein, 7 aa, synthetic construct
NEHPKFK

SEQ ID NO: 176298 - protein, 7 aa, synthetic construct
LEKPKHG

SEQ ID NO: 176299 - protein, 7 aa, synthetic construct
GERNKFL

SEQ ID NO: 176300 - protein, 7 aa, synthetic construct
MEKPKSS

SEQ ID NO: 176301 - protein, 7 aa, synthetic construct
RENPKFP

SEQ ID NO: 176302 - protein, 7 aa, synthetic construct
PEKPTFR

SEQ ID NO: 176303 - protein, 7 aa, synthetic construct
GQHPKFS

SEQ ID NO: 176304 - protein, 7 aa, synthetic construct
KEKPAFY

SEQ ID NO: 176305 - protein, 7 aa, synthetic construct
GEKPQYK

SEQ ID NO: 176306 - protein, 7 aa, synthetic construct
GDKPKMN

SEQ ID NO: 176307 - protein, 7 aa, synthetic construct
IEKPKNF

SEQ ID NO: 176308 - protein, 7 aa, synthetic construct
GERVKFI

SEQ ID NO: 176309 - protein, 7 aa, synthetic construct
NEKPRIT

SEQ ID NO: 176310 - protein, 7 aa, synthetic construct
GERPKFP

SEQ ID NO: 176311 - protein, 7 aa, synthetic construct
DTKHKFT

SEQ ID NO: 176312 - protein, 7 aa, synthetic construct
SETPKRT

SEQ ID NO: 176313 - protein, 7 aa, synthetic construct
EIKPKFH

SEQ ID NO: 176314 - protein, 7 aa, synthetic construct
GESKKFF

SEQ ID NO: 176315 - protein, 7 aa, synthetic construct
GTYPKNT

SEQ ID NO: 176316 - protein, 7 aa, synthetic construct
ESKLKFT

SEQ ID NO: 176317 - protein, 7 aa, synthetic construct
FEKPKAM

SEQ ID NO: 176318 - protein, 7 aa, synthetic construct
GARPKFD

SEQ ID NO: 176319 - protein, 7 aa, synthetic construct
GEKHKYI

SEQ ID NO: 176320 - protein, 7 aa, synthetic construct
HEKPKMS

SEQ ID NO: 176321 - protein, 7 aa, synthetic construct
EMKHKFT

SEQ ID NO: 176322 - protein, 7 aa, synthetic construct
GEAIKKT

SEQ ID NO: 176323 - protein, 7 aa, synthetic construct
GSKNKFD

SEQ ID NO: 176324 - protein, 7 aa, synthetic construct
KEIHKFT

SEQ ID NO: 176325 - protein, 7 aa, synthetic construct
GDKHKFI

SEQ ID NO: 176326 - protein, 7 aa, synthetic construct
FEKPRFN

SEQ ID NO: 176327 - protein, 7 aa, synthetic construct
YEKPKIS

SEQ ID NO: 176328 - protein, 7 aa, synthetic construct
GDKAKFL

SEQ ID NO: 176329 - protein, 7 aa, synthetic construct
GRKPDFA

SEQ ID NO: 176330 - protein, 7 aa, synthetic construct
GGGIKFT

SEQ ID NO: 176331 - protein, 7 aa, synthetic construct
IEPPKFR

SEQ ID NO: 176332 - protein, 7 aa, synthetic construct
VYKPKFD

SEQ ID NO: 176333 - protein, 7 aa, synthetic construct
GEKRTFS

SEQ ID NO: 176334 - protein, 7 aa, synthetic construct
TEKPKAY

SEQ ID NO: 176335 - protein, 7 aa, synthetic construct
GDAKKFT

SEQ ID NO: 176336 - protein, 7 aa, synthetic construct
GEKPFRV

SEQ ID NO: 176337 - protein, 7 aa, synthetic construct
KEHPKFP

SEQ ID NO: 176338 - protein, 7 aa, synthetic construct
GVHPKFN

SEQ ID NO: 176339 - protein, 7 aa, synthetic construct
GEKHKFM

SEQ ID NO: 176340 - protein, 7 aa, synthetic construct
GEKRTFM

SEQ ID NO: 176341 - protein, 7 aa, synthetic construct
GEKLRIT

SEQ ID NO: 176342 - protein, 7 aa, synthetic construct
GQHLKFT

SEQ ID NO: 176343 - protein, 7 aa, synthetic construct
LEKPKQW

SEQ ID NO: 176344 - protein, 7 aa, synthetic construct
KEKPHFF

SEQ ID NO: 176345 - protein, 7 aa, synthetic construct
GEFPKRA

SEQ ID NO: 176346 - protein, 7 aa, synthetic construct
EKNPKFT

SEQ ID NO: 176347 - protein, 7 aa, synthetic construct
GEVPKFR

SEQ ID NO: 176348 - protein, 7 aa, synthetic construct
GELRKFA

SEQ ID NO: 176349 - protein, 7 aa, synthetic construct
AEKPKNI

SEQ ID NO: 176350 - protein, 7 aa, synthetic construct
TEKPQFR

SEQ ID NO: 176351 - protein, 7 aa, synthetic construct
HEKGKYT

SEQ ID NO: 176352 - protein, 7 aa, synthetic construct
GDKMRFT

SEQ ID NO: 176353 - protein, 7 aa, synthetic construct
GEKPSRM

SEQ ID NO: 176354 - protein, 7 aa, synthetic construct
GRKPEFV

SEQ ID NO: 176355 - protein, 7 aa, synthetic construct
LEKPKAW

SEQ ID NO: 176356 - protein, 7 aa, synthetic construct
KELPKFS

SEQ ID NO: 176357 - protein, 7 aa, synthetic construct
HDKPKFF

SEQ ID NO: 176358 - protein, 7 aa, synthetic construct
GEKPGRN

SEQ ID NO: 176359 - protein, 7 aa, synthetic construct
GDKYKFV

SEQ ID NO: 176360 - protein, 7 aa, synthetic construct
GKKPMFD

SEQ ID NO: 176361 - protein, 7 aa, synthetic construct
HEKPKFF

SEQ ID NO: 176362 - protein, 7 aa, synthetic construct
GDVPKFR

SEQ ID NO: 176363 - protein, 7 aa, synthetic construct
GERPKGY

SEQ ID NO: 176364 - protein, 7 aa, synthetic construct
GEKPRIN

SEQ ID NO: 176365 - protein, 7 aa, synthetic construct
GEKPRVA

SEQ ID NO: 176366 - protein, 7 aa, synthetic construct
VEKPFRT

SEQ ID NO: 176367 - protein, 7 aa, synthetic construct
GHKPKMD

SEQ ID NO: 176368 - protein, 7 aa, synthetic construct
GEKLRST

SEQ ID NO: 176369 - protein, 7 aa, synthetic construct
EAKPKYT

SEQ ID NO: 176370 - protein, 7 aa, synthetic construct
EGKPKNT

SEQ ID NO: 176371 - protein, 7 aa, synthetic construct
GRKGEFT

SEQ ID NO: 176372 - protein, 7 aa, synthetic construct
MVKPKFD

SEQ ID NO: 176373 - protein, 7 aa, synthetic construct
LEKFKFN

SEQ ID NO: 176374 - protein, 7 aa, synthetic construct
VEAPKFK

SEQ ID NO: 176375 - protein, 7 aa, synthetic construct
GMKFKDT

SEQ ID NO: 176376 - protein, 7 aa, synthetic construct
GEKRLTT

SEQ ID NO: 176377 - protein, 7 aa, synthetic construct
GTSIKFT

SEQ ID NO: 176378 - protein, 7 aa, synthetic construct
GEKPKNL

SEQ ID NO: 176379 - protein, 7 aa, synthetic construct
EQKPKHT

SEQ ID NO: 176380 - protein, 7 aa, synthetic construct
QEARKFT

SEQ ID NO: 176381 - protein, 7 aa, synthetic construct
GEQLKRT

SEQ ID NO: 176382 - protein, 7 aa, synthetic construct
QEKPKNF

SEQ ID NO: 176383 - protein, 7 aa, synthetic construct
TEKPVRT

SEQ ID NO: 176384 - protein, 7 aa, synthetic construct
GEKIKHF

SEQ ID NO: 176385 - protein, 7 aa, synthetic construct
GEKVRFS

SEQ ID NO: 176386 - protein, 7 aa, synthetic construct
GDRNKFT

SEQ ID NO: 176387 - protein, 7 aa, synthetic construct
GDKPKMY

SEQ ID NO: 176388 - protein, 7 aa, synthetic construct
TEKGRFT

SEQ ID NO: 176389 - protein, 7 aa, synthetic construct
EEKKKFS

SEQ ID NO: 176390 - protein, 7 aa, synthetic construct
VEKPKWG

SEQ ID NO: 176391 - protein, 7 aa, synthetic construct
MEKPKAW

SEQ ID NO: 176392 - protein, 7 aa, synthetic construct
GERPKNL

SEQ ID NO: 176393 - protein, 7 aa, synthetic construct
GEVPKLR

SEQ ID NO: 176394 - protein, 7 aa, synthetic construct
DQKPKFA

SEQ ID NO: 176395 - protein, 7 aa, synthetic construct
LEKRGFT

SEQ ID NO: 176396 - protein, 7 aa, synthetic construct
NEVPKFK

SEQ ID NO: 176397 - protein, 7 aa, synthetic construct
GEVKKFY

SEQ ID NO: 176398 - protein, 7 aa, synthetic construct
GEKPKHV

SEQ ID NO: 176399 - protein, 7 aa, synthetic construct
DAKPKIT

SEQ ID NO: 176400 - protein, 7 aa, synthetic construct
REKNKDT

SEQ ID NO: 176401 - protein, 7 aa, synthetic construct
GEKGPFR

SEQ ID NO: 176402 - protein, 7 aa, synthetic construct
QEKVKFY

SEQ ID NO: 176403 - protein, 7 aa, synthetic construct
RENPKFQ

SEQ ID NO: 176404 - protein, 7 aa, synthetic construct
GEKMRFN

SEQ ID NO: 176405 - protein, 7 aa, synthetic construct
GAKNKFD

SEQ ID NO: 176406 - protein, 7 aa, synthetic construct
GERPKAA

SEQ ID NO: 176407 - protein, 7 aa, synthetic construct
GEKKSFT

SEQ ID NO: 176408 - protein, 7 aa, synthetic construct
GEEKKFK

SEQ ID NO: 176409 - protein, 7 aa, synthetic construct
GEAPKIR

SEQ ID NO: 176410 - protein, 7 aa, synthetic construct
DMKPKFY

SEQ ID NO: 176411 - protein, 7 aa, synthetic construct
QEKPKTL

SEQ ID NO: 176412 - protein, 7 aa, synthetic construct
GDSPKRT

SEQ ID NO: 176413 - protein, 7 aa, synthetic construct
GQGPKHT

SEQ ID NO: 176414 - protein, 7 aa, synthetic construct
SEKPKKD

SEQ ID NO: 176415 - protein, 7 aa, synthetic construct
GNMPKFG

SEQ ID NO: 176416 - protein, 7 aa, synthetic construct
MFKPKFE

SEQ ID NO: 176417 - protein, 7 aa, synthetic construct
QEKIKFY

SEQ ID NO: 176418 - protein, 7 aa, synthetic construct
ATHPKFT

SEQ ID NO: 176419 - protein, 7 aa, synthetic construct
PEKPKNS

SEQ ID NO: 176420 - protein, 7 aa, synthetic construct
AEGPKFR

SEQ ID NO: 176421 - protein, 7 aa, synthetic construct
SAHPKFT

SEQ ID NO: 176422 - protein, 7 aa, synthetic construct
GEPPKRN

SEQ ID NO: 176423 - protein, 7 aa, synthetic construct
GDKMKFL

SEQ ID NO: 176424 - protein, 7 aa, synthetic construct
GEKRAFG

SEQ ID NO: 176425 - protein, 7 aa, synthetic construct
PERPKFV

SEQ ID NO: 176426 - protein, 7 aa, synthetic construct
FEKPKTM

SEQ ID NO: 176427 - protein, 7 aa, synthetic construct
KDIPKFT

SEQ ID NO: 176428 - protein, 7 aa, synthetic construct
IETPKFR

SEQ ID NO: 176429 - protein, 7 aa, synthetic construct
YEKMKFH

SEQ ID NO: 176430 - protein, 7 aa, synthetic construct
GEKAKWN

SEQ ID NO: 176431 - protein, 7 aa, synthetic construct
GEKPRGQ

SEQ ID NO: 176432 - protein, 7 aa, synthetic construct
FEKARFT

SEQ ID NO: 176433 - protein, 7 aa, synthetic construct
GETQKRT

SEQ ID NO: 176434 - protein, 7 aa, synthetic construct
GEKPRAG

SEQ ID NO: 176435 - protein, 7 aa, synthetic construct
GEKPLSR

SEQ ID NO: 176436 - protein, 7 aa, synthetic construct
MEKPKQG

SEQ ID NO: 176437 - protein, 7 aa, synthetic construct
PEKPKTH

SEQ ID NO: 176438 - protein, 7 aa, synthetic construct
MEKYKFG

SEQ ID NO: 176439 - protein, 7 aa, synthetic construct
GEKKYST

SEQ ID NO: 176440 - protein, 7 aa, synthetic construct
YEGPKFK

SEQ ID NO: 176441 - protein, 7 aa, synthetic construct
TEKPRFI

SEQ ID NO: 176442 - protein, 7 aa, synthetic construct
PEKPRFQ

SEQ ID NO: 176443 - protein, 7 aa, synthetic construct
ENKAKFT

SEQ ID NO: 176444 - protein, 7 aa, synthetic construct
KEKPQFM

SEQ ID NO: 176445 - protein, 7 aa, synthetic construct
GERVKFQ

SEQ ID NO: 176446 - protein, 7 aa, synthetic construct
QEKPKSV

SEQ ID NO: 176447 - protein, 7 aa, synthetic construct
MEKPKSG

SEQ ID NO: 176448 - protein, 7 aa, synthetic construct
REHPKFN

SEQ ID NO: 176449 - protein, 7 aa, synthetic construct
KENPKFM

SEQ ID NO: 176450 - protein, 7 aa, synthetic construct
SEKPKVW

SEQ ID NO: 176451 - protein, 7 aa, synthetic construct
PEKNKFY

SEQ ID NO: 176452 - protein, 7 aa, synthetic construct
GRQPKDT

SEQ ID NO: 176453 - protein, 7 aa, synthetic construct
FEKPKVM

SEQ ID NO: 176454 - protein, 7 aa, synthetic construct
GELPKRI

SEQ ID NO: 176455 - protein, 7 aa, synthetic construct
GEKPRPL

SEQ ID NO: 176456 - protein, 7 aa, synthetic construct
NEGPKFR

SEQ ID NO: 176457 - protein, 7 aa, synthetic construct
GTQHKFT

SEQ ID NO: 176458 - protein, 7 aa, synthetic construct
EQKPKFQ

SEQ ID NO: 176459 - protein, 7 aa, synthetic construct
GSKPKSD

SEQ ID NO: 176460 - protein, 7 aa, synthetic construct
GENPKNK

SEQ ID NO: 176461 - protein, 7 aa, synthetic construct
GTMPKHT

SEQ ID NO: 176462 - protein, 7 aa, synthetic construct
TEKLKFY

SEQ ID NO: 176463 - protein, 7 aa, synthetic construct
HEKPKTY

SEQ ID NO: 176464 - protein, 7 aa, synthetic construct
GEARKNT

SEQ ID NO: 176465 - protein, 7 aa, synthetic construct
IEVPKRT

SEQ ID NO: 176466 - protein, 7 aa, synthetic construct
GGSHKFT

SEQ ID NO: 176467 - protein, 7 aa, synthetic construct
GNKPKPD

SEQ ID NO: 176468 - protein, 7 aa, synthetic construct
DGKSKFT

SEQ ID NO: 176469 - protein, 7 aa, synthetic construct
GEIPKKI

SEQ ID NO: 176470 - protein, 7 aa, synthetic construct
TEKPRFM

SEQ ID NO: 176471 - protein, 7 aa, synthetic construct
AEKPKTI

SEQ ID NO: 176472 - protein, 7 aa, synthetic construct
GVRPKFE

SEQ ID NO: 176473 - protein, 7 aa, synthetic construct
GEIPKKV

SEQ ID NO: 176474 - protein, 7 aa, synthetic construct
GDKPKHM

SEQ ID NO: 176475 - protein, 7 aa, synthetic construct
GDKPKGM

SEQ ID NO: 176476 - protein, 7 aa, synthetic construct
MEKYKFA

SEQ ID NO: 176477 - protein, 7 aa, synthetic construct
REKPHFA

SEQ ID NO: 176478 - protein, 7 aa, synthetic construct
YEKPKHV

SEQ ID NO: 176479 - protein, 7 aa, synthetic construct
GIHPKFV

SEQ ID NO: 176480 - protein, 7 aa, synthetic construct
VQKPKDT

SEQ ID NO: 176481 - protein, 7 aa, synthetic construct
GQRPKFE

SEQ ID NO: 176482 - protein, 7 aa, synthetic construct
GERPKFT

SEQ ID NO: 176483 - protein, 7 aa, synthetic construct
GEVRKFM

SEQ ID NO: 176484 - protein, 7 aa, synthetic construct
FENPKRT

SEQ ID NO: 176485 - protein, 7 aa, synthetic construct
DYKPKIT

SEQ ID NO: 176486 - protein, 7 aa, synthetic construct
REVPKFM

SEQ ID NO: 176487 - protein, 7 aa, synthetic construct
GHKPKDQ

SEQ ID NO: 176488 - protein, 7 aa, synthetic construct
TETPKKT

SEQ ID NO: 176489 - protein, 7 aa, synthetic construct
NEMPKFR

SEQ ID NO: 176490 - protein, 7 aa, synthetic construct
GEVPKKF

SEQ ID NO: 176491 - protein, 7 aa, synthetic construct
QEKPKTS

SEQ ID NO: 176492 - protein, 7 aa, synthetic construct
GENRKTT

SEQ ID NO: 176493 - protein, 7 aa, synthetic construct
AEKPKHS

SEQ ID NO: 176494 - protein, 7 aa, synthetic construct
GSHPKMT

SEQ ID NO: 176495 - protein, 7 aa, synthetic construct
GEKRMFQ

SEQ ID NO: 176496 - protein, 7 aa, synthetic construct
GQHIKFT

SEQ ID NO: 176497 - protein, 7 aa, synthetic construct
GDLPKRT

SEQ ID NO: 176498 - protein, 7 aa, synthetic construct
LETPKFK

SEQ ID NO: 176499 - protein, 7 aa, synthetic construct
GEKPKIY

SEQ ID NO: 176500 - protein, 7 aa, synthetic construct
DHKPKFQ

SEQ ID NO: 176501 - protein, 7 aa, synthetic construct
GRKPDYT

SEQ ID NO: 176502 - protein, 7 aa, synthetic construct
HTKPKFD

SEQ ID NO: 176503 - protein, 7 aa, synthetic construct
GDRMKFT

SEQ ID NO: 176504 - protein, 7 aa, synthetic construct
TEKPKFG

SEQ ID NO: 176505 - protein, 7 aa, synthetic construct
EKAPKFT

SEQ ID NO: 176506 - protein, 7 aa, synthetic construct
GEKPVGR

SEQ ID NO: 176507 - protein, 7 aa, synthetic construct
SERNKFT

SEQ ID NO: 176508 - protein, 7 aa, synthetic construct
REHPKFV

SEQ ID NO: 176509 - protein, 7 aa, synthetic construct
QEKPKIV

SEQ ID NO: 176510 - protein, 7 aa, synthetic construct
GIKPKYE

SEQ ID NO: 176511 - protein, 7 aa, synthetic construct
YEKNKFL

SEQ ID NO: 176512 - protein, 7 aa, synthetic construct
GDKPKSY

SEQ ID NO: 176513 - protein, 7 aa, synthetic construct
GEGPKAR

SEQ ID NO: 176514 - protein, 7 aa, synthetic construct
GEKFKYN

SEQ ID NO: 176515 - protein, 7 aa, synthetic construct
GDGRKFT

SEQ ID NO: 176516 - protein, 7 aa, synthetic construct
GDKMKYT

SEQ ID NO: 176517 - protein, 7 aa, synthetic construct
TEKPKIV

SEQ ID NO: 176518 - protein, 7 aa, synthetic construct
GHKPKPD

SEQ ID NO: 176519 - protein, 7 aa, synthetic construct
VEKPKFH

SEQ ID NO: 176520 - protein, 7 aa, synthetic construct
GEKPRFI

SEQ ID NO: 176521 - protein, 7 aa, synthetic construct
DIKPKST

SEQ ID NO: 176522 - protein, 7 aa, synthetic construct
QEKPRFV

SEQ ID NO: 176523 - protein, 7 aa, synthetic construct
PEKPKFF

SEQ ID NO: 176524 - protein, 7 aa, synthetic construct
FEKPKHN

SEQ ID NO: 176525 - protein, 7 aa, synthetic construct
GTKPKEW

SEQ ID NO: 176526 - protein, 7 aa, synthetic construct
GDKPKST

SEQ ID NO: 176527 - protein, 7 aa, synthetic construct
GERPKGN

SEQ ID NO: 176528 - protein, 7 aa, synthetic construct
GEKPATR

SEQ ID NO: 176529 - protein, 7 aa, synthetic construct
GVKPHFA

SEQ ID NO: 176530 - protein, 7 aa, synthetic construct
SEKPRNT

SEQ ID NO: 176531 - protein, 7 aa, synthetic construct
GDKPKHS

SEQ ID NO: 176532 - protein, 7 aa, synthetic construct
DYKPKST

SEQ ID NO: 176533 - protein, 7 aa, synthetic construct
RELPKFG

SEQ ID NO: 176534 - protein, 7 aa, synthetic construct
GERKPFT

SEQ ID NO: 176535 - protein, 7 aa, synthetic construct
YEKGKFQ

SEQ ID NO: 176536 - protein, 7 aa, synthetic construct
GDKPKNY

SEQ ID NO: 176537 - protein, 7 aa, synthetic construct
FEKPKSS

SEQ ID NO: 176538 - protein, 7 aa, synthetic construct
GLKPRFD

SEQ ID NO: 176539 - protein, 7 aa, synthetic construct
HEKPKPM

SEQ ID NO: 176540 - protein, 7 aa, synthetic construct
GEKRSFT

SEQ ID NO: 176541 - protein, 7 aa, synthetic construct
QDKPKFV

SEQ ID NO: 176542 - protein, 7 aa, synthetic construct
MTGPKFT

SEQ ID NO: 176543 - protein, 7 aa, synthetic construct
YEQPKRT

SEQ ID NO: 176544 - protein, 7 aa, synthetic construct
GEKPQKS

SEQ ID NO: 176545 - protein, 7 aa, synthetic construct
MDKPKFA

SEQ ID NO: 176546 - protein, 7 aa, synthetic construct
GNKPKDN

SEQ ID NO: 176547 - protein, 7 aa, synthetic construct
GESKKFI

SEQ ID NO: 176548 - protein, 7 aa, synthetic construct
MEKTRFT

SEQ ID NO: 176549 - protein, 7 aa, synthetic construct
GEKPFRP

SEQ ID NO: 176550 - protein, 7 aa, synthetic construct
GDKPKMS

SEQ ID NO: 176551 - protein, 7 aa, synthetic construct
GSHPKLT

SEQ ID NO: 176552 - protein, 7 aa, synthetic construct
DHKPKFA

SEQ ID NO: 176553 - protein, 7 aa, synthetic construct
SEKPKAY

SEQ ID NO: 176554 - protein, 7 aa, synthetic construct
HEKPKII

SEQ ID NO: 176555 - protein, 7 aa, synthetic construct
HEKPART

SEQ ID NO: 176556 - protein, 7 aa, synthetic construct
EAKPKPT

SEQ ID NO: 176557 - protein, 7 aa, synthetic construct
YEKLKFM

SEQ ID NO: 176558 - protein, 7 aa, synthetic construct
GAKQKDT

SEQ ID NO: 176559 - protein, 7 aa, synthetic construct
NEAPKRT

SEQ ID NO: 176560 - protein, 7 aa, synthetic construct
GEKPRLG

SEQ ID NO: 176561 - protein, 7 aa, synthetic construct
DAKPKFN

SEQ ID NO: 176562 - protein, 7 aa, synthetic construct
REGPKPT

SEQ ID NO: 176563 - protein, 7 aa, synthetic construct
HENPKKT

SEQ ID NO: 176564 - protein, 7 aa, synthetic construct
REGPKFS

SEQ ID NO: 176565 - protein, 7 aa, synthetic construct
PEGKKFT

SEQ ID NO: 176566 - protein, 7 aa, synthetic construct
LIKPKFD

SEQ ID NO: 176567 - protein, 7 aa, synthetic construct
MEMPKFK

SEQ ID NO: 176568 - protein, 7 aa, synthetic construct
GQDKKFT

SEQ ID NO: 176569 - protein, 7 aa, synthetic construct
TEKPIFR

SEQ ID NO: 176570 - protein, 7 aa, synthetic construct
GEMRKFV

SEQ ID NO: 176571 - protein, 7 aa, synthetic construct
TEKPLRT

SEQ ID NO: 176572 - protein, 7 aa, synthetic construct
GEPIKKT

SEQ ID NO: 176573 - protein, 7 aa, synthetic construct
PENPKRT

SEQ ID NO: 176574 - protein, 7 aa, synthetic construct
GEKRLST

SEQ ID NO: 176575 - protein, 7 aa, synthetic construct
DIKPKFV

SEQ ID NO: 176576 - protein, 7 aa, synthetic construct
EFKSKFT

SEQ ID NO: 176577 - protein, 7 aa, synthetic construct
YDKPKFY

SEQ ID NO: 176578 - protein, 7 aa, synthetic construct
QEKMKFL

SEQ ID NO: 176579 - protein, 7 aa, synthetic construct
AEKPKIY

SEQ ID NO: 176580 - protein, 7 aa, synthetic construct
GEKPRPY

SEQ ID NO: 176581 - protein, 7 aa, synthetic construct
IEKPKQY

SEQ ID NO: 176582 - protein, 7 aa, synthetic construct
GKKDKET

SEQ ID NO: 176583 - protein, 7 aa, synthetic construct
GTRPKFE

SEQ ID NO: 176584 - protein, 7 aa, synthetic construct
SEKPKVF

SEQ ID NO: 176585 - protein, 7 aa, synthetic construct
HEKPKFY

SEQ ID NO: 176586 - protein, 7 aa, synthetic construct
GEKPKAM

SEQ ID NO: 176587 - protein, 7 aa, synthetic construct
GSKPYLT

SEQ ID NO: 176588 - protein, 7 aa, synthetic construct
AEKPKHA

SEQ ID NO: 176589 - protein, 7 aa, synthetic construct
GQKPKDI

SEQ ID NO: 176590 - protein, 7 aa, synthetic construct
GEKRLFS

SEQ ID NO: 176591 - protein, 7 aa, synthetic construct
IEKPKNM

SEQ ID NO: 176592 - protein, 7 aa, synthetic construct
LEKPRFV

SEQ ID NO: 176593 - protein, 7 aa, synthetic construct
QEKPQFR

SEQ ID NO: 176594 - protein, 7 aa, synthetic construct
GEKKPFQ

SEQ ID NO: 176595 - protein, 7 aa, synthetic construct
GGKPKTD

SEQ ID NO: 176596 - protein, 7 aa, synthetic construct
GEKMTRT

SEQ ID NO: 176597 - protein, 7 aa, synthetic construct
GEKPKNQ

SEQ ID NO: 176598 - protein, 7 aa, synthetic construct
AEKPHFK

SEQ ID NO: 176599 - protein, 7 aa, synthetic construct
GDKPKIV

SEQ ID NO: 176600 - protein, 7 aa, synthetic construct
GLKPKYD

SEQ ID NO: 176601 - protein, 7 aa, synthetic construct
GEKPRVT

SEQ ID NO: 176602 - protein, 7 aa, synthetic construct
KEMPKYT

SEQ ID NO: 176603 - protein, 7 aa, synthetic construct
TEGPKRT

SEQ ID NO: 176604 - protein, 7 aa, synthetic construct
TEKSRFT

SEQ ID NO: 176605 - protein, 7 aa, synthetic construct
GEAPKGR

SEQ ID NO: 176606 - protein, 7 aa, synthetic construct
HGKPKDT

SEQ ID NO: 176607 - protein, 7 aa, synthetic construct
PEVPKRT

SEQ ID NO: 176608 - protein, 7 aa, synthetic construct
MERPKFS

SEQ ID NO: 176609 - protein, 7 aa, synthetic construct
QEMPKRT

SEQ ID NO: 176610 - protein, 7 aa, synthetic construct
GEKPFKS

SEQ ID NO: 176611 - protein, 7 aa, synthetic construct
GGKSKFD

SEQ ID NO: 176612 - protein, 7 aa, synthetic construct
DNKPKFG

SEQ ID NO: 176613 - protein, 7 aa, synthetic construct
GEMPKNR

SEQ ID NO: 176614 - protein, 7 aa, synthetic construct
GEKPMKA

SEQ ID NO: 176615 - protein, 7 aa, synthetic construct
ETKPKFG

SEQ ID NO: 176616 - protein, 7 aa, synthetic construct
GEKKKFE

SEQ ID NO: 176617 - protein, 7 aa, synthetic construct
ESKVKFT

SEQ ID NO: 176618 - protein, 7 aa, synthetic construct
GEKPMRG

SEQ ID NO: 176619 - protein, 7 aa, synthetic construct
GQKKDFT

SEQ ID NO: 176620 - protein, 7 aa, synthetic construct
KENPRFT

SEQ ID NO: 176621 - protein, 7 aa, synthetic construct
FEKPKSV

SEQ ID NO: 176622 - protein, 7 aa, synthetic construct
AEKPKAQ

SEQ ID NO: 176623 - protein, 7 aa, synthetic construct
LEKPART

SEQ ID NO: 176624 - protein, 7 aa, synthetic construct
TLHPKFT

SEQ ID NO: 176625 - protein, 7 aa, synthetic construct
GEIPKVK

SEQ ID NO: 176626 - protein, 7 aa, synthetic construct
DEKGKFR

SEQ ID NO: 176627 - protein, 7 aa, synthetic construct
GEKYLKT

SEQ ID NO: 176628 - protein, 7 aa, synthetic construct
GMKAKFD

SEQ ID NO: 176629 - protein, 7 aa, synthetic construct
AEKPKAS

SEQ ID NO: 176630 - protein, 7 aa, synthetic construct
GEKRPFI

SEQ ID NO: 176631 - protein, 7 aa, synthetic construct
YEKGKFT

SEQ ID NO: 176632 - protein, 7 aa, synthetic construct
TEKKKFD

SEQ ID NO: 176633 - protein, 7 aa, synthetic construct
GLKREFT

SEQ ID NO: 176634 - protein, 7 aa, synthetic construct
GEMRKFS

SEQ ID NO: 176635 - protein, 7 aa, synthetic construct
GDKAKFT

SEQ ID NO: 176636 - protein, 7 aa, synthetic construct
GGKNKDT

SEQ ID NO: 176637 - protein, 7 aa, synthetic construct
GEKRGAT

SEQ ID NO: 176638 - protein, 7 aa, synthetic construct
DGKPKPT

SEQ ID NO: 176639 - protein, 7 aa, synthetic construct
PEKPKTF

SEQ ID NO: 176640 - protein, 7 aa, synthetic construct
DNKPKFN

SEQ ID NO: 176641 - protein, 7 aa, synthetic construct
KETPKFA

SEQ ID NO: 176642 - protein, 7 aa, synthetic construct
SEKPRFL

SEQ ID NO: 176643 - protein, 7 aa, synthetic construct
AEKTRFT

SEQ ID NO: 176644 - protein, 7 aa, synthetic construct
TEKPKML

SEQ ID NO: 176645 - protein, 7 aa, synthetic construct
HEKPKSQ

SEQ ID NO: 176646 - protein, 7 aa, synthetic construct
YEKPKIN

SEQ ID NO: 176647 - protein, 7 aa, synthetic construct
PELPKRT

SEQ ID NO: 176648 - protein, 7 aa, synthetic construct
KEKPMFF

SEQ ID NO: 176649 - protein, 7 aa, synthetic construct
GDKPKAW

SEQ ID NO: 176650 - protein, 7 aa, synthetic construct
GEVPKTK

SEQ ID NO: 176651 - protein, 7 aa, synthetic construct
HEKPMRT

SEQ ID NO: 176652 - protein, 7 aa, synthetic construct
GEKQKSY

SEQ ID NO: 176653 - protein, 7 aa, synthetic construct
GDKPRAT

SEQ ID NO: 176654 - protein, 7 aa, synthetic construct
PERPKPT

SEQ ID NO: 176655 - protein, 7 aa, synthetic construct
EIKPKFM

SEQ ID NO: 176656 - protein, 7 aa, synthetic construct
GEKPQRQ

SEQ ID NO: 176657 - protein, 7 aa, synthetic construct
PETPKRT

SEQ ID NO: 176658 - protein, 7 aa, synthetic construct
NEKPKSS

SEQ ID NO: 176659 - protein, 7 aa, synthetic construct
AEKPKMH

SEQ ID NO: 176660 - protein, 7 aa, synthetic construct
GFKPKDH

SEQ ID NO: 176661 - protein, 7 aa, synthetic construct
REHPKST

SEQ ID NO: 176662 - protein, 7 aa, synthetic construct
AEKPRGT

SEQ ID NO: 176663 - protein, 7 aa, synthetic construct
YEKPRST

SEQ ID NO: 176664 - protein, 7 aa, synthetic construct
YSKPKFE

SEQ ID NO: 176665 - protein, 7 aa, synthetic construct
GEQPKKV

SEQ ID NO: 176666 - protein, 7 aa, synthetic construct
QEKPKNN

SEQ ID NO: 176667 - protein, 7 aa, synthetic construct
GAKPKDQ

SEQ ID NO: 176668 - protein, 7 aa, synthetic construct
GEKPIMR

SEQ ID NO: 176669 - protein, 7 aa, synthetic construct
PEKPKGG

SEQ ID NO: 176670 - protein, 7 aa, synthetic construct
GDKYKFG

SEQ ID NO: 176671 - protein, 7 aa, synthetic construct
FEKPKNF

SEQ ID NO: 176672 - protein, 7 aa, synthetic construct
GEKQKHQ

SEQ ID NO: 176673 - protein, 7 aa, synthetic construct
GKLPKFD

SEQ ID NO: 176674 - protein, 7 aa, synthetic construct
FDKPKFG

SEQ ID NO: 176675 - protein, 7 aa, synthetic construct
GNKPKDH

SEQ ID NO: 176676 - protein, 7 aa, synthetic construct
IERPKTT

SEQ ID NO: 176677 - protein, 7 aa, synthetic construct
NDKPKFY

SEQ ID NO: 176678 - protein, 7 aa, synthetic construct
QEGKKFT

SEQ ID NO: 176679 - protein, 7 aa, synthetic construct
TDRPKFT

SEQ ID NO: 176680 - protein, 7 aa, synthetic construct
MERPKFG

SEQ ID NO: 176681 - protein, 7 aa, synthetic construct
GERLKNT

SEQ ID NO: 176682 - protein, 7 aa, synthetic construct
AEKPGFR

SEQ ID NO: 176683 - protein, 7 aa, synthetic construct
GDKPKHP

SEQ ID NO: 176684 - protein, 7 aa, synthetic construct
GAHPKFS

SEQ ID NO: 176685 - protein, 7 aa, synthetic construct
PEKQKYT

SEQ ID NO: 176686 - protein, 7 aa, synthetic construct
VHKPKFD

SEQ ID NO: 176687 - protein, 7 aa, synthetic construct
GQHPKST

SEQ ID NO: 176688 - protein, 7 aa, synthetic construct
GEKRTQT

SEQ ID NO: 176689 - protein, 7 aa, synthetic construct
GEKRANT

SEQ ID NO: 176690 - protein, 7 aa, synthetic construct
GEKIKRD

SEQ ID NO: 176691 - protein, 7 aa, synthetic construct
QEKPKSN

SEQ ID NO: 176692 - protein, 7 aa, synthetic construct
GEKNVRT

SEQ ID NO: 176693 - protein, 7 aa, synthetic construct
GEKPKMF

SEQ ID NO: 176694 - protein, 7 aa, synthetic construct
SEKPKSV

SEQ ID NO: 176695 - protein, 7 aa, synthetic construct
VEKPRAT

SEQ ID NO: 176696 - protein, 7 aa, synthetic construct
IEKPKKD

SEQ ID NO: 176697 - protein, 7 aa, synthetic construct
DTKPKFL

SEQ ID NO: 176698 - protein, 7 aa, synthetic construct
DAKPKAT

SEQ ID NO: 176699 - protein, 7 aa, synthetic construct
GDKPKNH

SEQ ID NO: 176700 - protein, 7 aa, synthetic construct
YEKPKIQ

SEQ ID NO: 176701 - protein, 7 aa, synthetic construct
GDRPKFS

SEQ ID NO: 176702 - protein, 7 aa, synthetic construct
PEKPKTP

SEQ ID NO: 176703 - protein, 7 aa, synthetic construct
GEMKKFY

SEQ ID NO: 176704 - protein, 7 aa, synthetic construct
VEKPQRT

SEQ ID NO: 176705 - protein, 7 aa, synthetic construct
IEKYKIT

SEQ ID NO: 176706 - protein, 7 aa, synthetic construct
FEKPKLM

SEQ ID NO: 176707 - protein, 7 aa, synthetic construct
GEKRIVT

SEQ ID NO: 176708 - protein, 7 aa, synthetic construct
GEKRIFN

SEQ ID NO: 176709 - protein, 7 aa, synthetic construct
HEKPKQQ

SEQ ID NO: 176710 - protein, 7 aa, synthetic construct
MEKPKTY

SEQ ID NO: 176711 - protein, 7 aa, synthetic construct
AEKPKPQ

SEQ ID NO: 176712 - protein, 7 aa, synthetic construct
TERPKNT

SEQ ID NO: 176713 - protein, 7 aa, synthetic construct
KEKPQFL

SEQ ID NO: 176714 - protein, 7 aa, synthetic construct
GELPKRM

SEQ ID NO: 176715 - protein, 7 aa, synthetic construct
GEKPKHI

SEQ ID NO: 176716 - protein, 7 aa, synthetic construct
EQKPKFP

SEQ ID NO: 176717 - protein, 7 aa, synthetic construct
IESPKFR

SEQ ID NO: 176718 - protein, 7 aa, synthetic construct
DVKPKFA

SEQ ID NO: 176719 - protein, 7 aa, synthetic construct
MEKPRHT

SEQ ID NO: 176720 - protein, 7 aa, synthetic construct
SNKPKDT

SEQ ID NO: 176721 - protein, 7 aa, synthetic construct
MEKPRQT

SEQ ID NO: 176722 - protein, 7 aa, synthetic construct
GERPKLL

SEQ ID NO: 176723 - protein, 7 aa, synthetic construct
RESGKFT

SEQ ID NO: 176724 - protein, 7 aa, synthetic construct
GENLKFK

SEQ ID NO: 176725 - protein, 7 aa, synthetic construct
GEKRMFA

SEQ ID NO: 176726 - protein, 7 aa, synthetic construct
GEKRPMT

SEQ ID NO: 176727 - protein, 7 aa, synthetic construct
WEKNKFN

SEQ ID NO: 176728 - protein, 7 aa, synthetic construct
VEKPKSY

SEQ ID NO: 176729 - protein, 7 aa, synthetic construct
MEKPKAG

SEQ ID NO: 176730 - protein, 7 aa, synthetic construct
AEKPKSN

SEQ ID NO: 176731 - protein, 7 aa, synthetic construct
GYKGKFD

SEQ ID NO: 176732 - protein, 7 aa, synthetic construct
MEKPKIM

SEQ ID NO: 176733 - protein, 7 aa, synthetic construct
ETKPKFP

SEQ ID NO: 176734 - protein, 7 aa, synthetic construct
IEKPKIL

SEQ ID NO: 176735 - protein, 7 aa, synthetic construct
RENPKFN

SEQ ID NO: 176736 - protein, 7 aa, synthetic construct
GEKPQAR

SEQ ID NO: 176737 - protein, 7 aa, synthetic construct
QEKPKVI

SEQ ID NO: 176738 - protein, 7 aa, synthetic construct
GEKWKTA

SEQ ID NO: 176739 - protein, 7 aa, synthetic construct
KEVPKFY

SEQ ID NO: 176740 - protein, 7 aa, synthetic construct
GMKPKMD

SEQ ID NO: 176741 - protein, 7 aa, synthetic construct
ESKIKFT

SEQ ID NO: 176742 - protein, 7 aa, synthetic construct
GMKQKFD

SEQ ID NO: 176743 - protein, 7 aa, synthetic construct
HEKPKFG

SEQ ID NO: 176744 - protein, 7 aa, synthetic construct
GEHKKFP

SEQ ID NO: 176745 - protein, 7 aa, synthetic construct
GELKKFL

SEQ ID NO: 176746 - protein, 7 aa, synthetic construct
GHKPIFG

SEQ ID NO: 176747 - protein, 7 aa, synthetic construct
GEKGQFR

SEQ ID NO: 176748 - protein, 7 aa, synthetic construct
SEKPRFQ

SEQ ID NO: 176749 - protein, 7 aa, synthetic construct
GEKPRAF

SEQ ID NO: 176750 - protein, 7 aa, synthetic construct
IPKPKFD

SEQ ID NO: 176751 - protein, 7 aa, synthetic construct
GERPKSI

SEQ ID NO: 176752 - protein, 7 aa, synthetic construct
GETPKMR

SEQ ID NO: 176753 - protein, 7 aa, synthetic construct
GEAVKRT

SEQ ID NO: 176754 - protein, 7 aa, synthetic construct
HEKKIFT

SEQ ID NO: 176755 - protein, 7 aa, synthetic construct
GDKYKST

SEQ ID NO: 176756 - protein, 7 aa, synthetic construct
GESKKYT

SEQ ID NO: 176757 - protein, 7 aa, synthetic construct
PEKPRNT

SEQ ID NO: 176758 - protein, 7 aa, synthetic construct
DTKPKFG

SEQ ID NO: 176759 - protein, 7 aa, synthetic construct
GEMKKFH

SEQ ID NO: 176760 - protein, 7 aa, synthetic construct
NEIRKFT

SEQ ID NO: 176761 - protein, 7 aa, synthetic construct
YEKPKHF

SEQ ID NO: 176762 - protein, 7 aa, synthetic construct
AEKPNFR

SEQ ID NO: 176763 - protein, 7 aa, synthetic construct
GEQGKRT

SEQ ID NO: 176764 - protein, 7 aa, synthetic construct
GEKPYKS

SEQ ID NO: 176765 - protein, 7 aa, synthetic construct
LMSPKFT

SEQ ID NO: 176766 - protein, 7 aa, synthetic construct
IYKPKFE

SEQ ID NO: 176767 - protein, 7 aa, synthetic construct
SINPKFT

SEQ ID NO: 176768 - protein, 7 aa, synthetic construct
QEKPGFR

SEQ ID NO: 176769 - protein, 7 aa, synthetic construct
ADKPKNT

SEQ ID NO: 176770 - protein, 7 aa, synthetic construct
GEVRKFN

SEQ ID NO: 176771 - protein, 7 aa, synthetic construct
FEKPKYA

SEQ ID NO: 176772 - protein, 7 aa, synthetic construct
GEKPMSK

SEQ ID NO: 176773 - protein, 7 aa, synthetic construct
PENPKFR

SEQ ID NO: 176774 - protein, 7 aa, synthetic construct
GEKPNTR

SEQ ID NO: 176775 - protein, 7 aa, synthetic construct
NETRKFT

SEQ ID NO: 176776 - protein, 7 aa, synthetic construct
GEARKFS

SEQ ID NO: 176777 - protein, 7 aa, synthetic construct
GATPKYT

SEQ ID NO: 176778 - protein, 7 aa, synthetic construct
NEKRTFT

SEQ ID NO: 176779 - protein, 7 aa, synthetic construct
EKKPKDT

SEQ ID NO: 176780 - protein, 7 aa, synthetic construct
GEKPLTR

SEQ ID NO: 176781 - protein, 7 aa, synthetic construct
GSHPKFV

SEQ ID NO: 176782 - protein, 7 aa, synthetic construct
MEKPKYM

SEQ ID NO: 176783 - protein, 7 aa, synthetic construct
GEQPKRI

SEQ ID NO: 176784 - protein, 7 aa, synthetic construct
NEKPKSY

SEQ ID NO: 176785 - protein, 7 aa, synthetic construct
GEKPRVG

SEQ ID NO: 176786 - protein, 7 aa, synthetic construct
SEQPKFK

SEQ ID NO: 176787 - protein, 7 aa, synthetic construct
DTKPKTT

SEQ ID NO: 176788 - protein, 7 aa, synthetic construct
GERMKQT

SEQ ID NO: 176789 - protein, 7 aa, synthetic construct
YEKPKIV

SEQ ID NO: 176790 - protein, 7 aa, synthetic construct
ETKPKLT

SEQ ID NO: 176791 - protein, 7 aa, synthetic construct
MEKPRFV

SEQ ID NO: 176792 - protein, 7 aa, synthetic construct
GERNKFQ

SEQ ID NO: 176793 - protein, 7 aa, synthetic construct
GKKPPFD

SEQ ID NO: 176794 - protein, 7 aa, synthetic construct
NSKPKFD

SEQ ID NO: 176795 - protein, 7 aa, synthetic construct
GDKPKLS

SEQ ID NO: 176796 - protein, 7 aa, synthetic construct
GERVKQT

SEQ ID NO: 176797 - protein, 7 aa, synthetic construct
REVPKFA

SEQ ID NO: 176798 - protein, 7 aa, synthetic construct
GEMPKAR

SEQ ID NO: 176799 - protein, 7 aa, synthetic construct
GHKGKDT

SEQ ID NO: 176800 - protein, 7 aa, synthetic construct
GERPKTM

SEQ ID NO: 176801 - protein, 7 aa, synthetic construct
GEMPKRI

SEQ ID NO: 176802 - protein, 7 aa, synthetic construct
HQKPKFD

SEQ ID NO: 176803 - protein, 7 aa, synthetic construct
PEKTKYT

SEQ ID NO: 176804 - protein, 7 aa, synthetic construct
GDKPKWG

SEQ ID NO: 176805 - protein, 7 aa, synthetic construct
GESGKFR

SEQ ID NO: 176806 - protein, 7 aa, synthetic construct
LESPKRT

SEQ ID NO: 176807 - protein, 7 aa, synthetic construct
GNKLKFD

SEQ ID NO: 176808 - protein, 7 aa, synthetic construct
VEKPKHM

SEQ ID NO: 176809 - protein, 7 aa, synthetic construct
GNKPRFD

SEQ ID NO: 176810 - protein, 7 aa, synthetic construct
TEKPRFH

SEQ ID NO: 176811 - protein, 7 aa, synthetic construct
TEKFKFQ

SEQ ID NO: 176812 - protein, 7 aa, synthetic construct
GEPPKRP

SEQ ID NO: 176813 - protein, 7 aa, synthetic construct
TDKPKMT

SEQ ID NO: 176814 - protein, 7 aa, synthetic construct
GEKPMPR

SEQ ID NO: 176815 - protein, 7 aa, synthetic construct
EKPPKFT

SEQ ID NO: 176816 - protein, 7 aa, synthetic construct
GEQIKKT

SEQ ID NO: 176817 - protein, 7 aa, synthetic construct
PDKPKFN

SEQ ID NO: 176818 - protein, 7 aa, synthetic construct
MEKPRFQ

SEQ ID NO: 176819 - protein, 7 aa, synthetic construct
GERPKQS

SEQ ID NO: 176820 - protein, 7 aa, synthetic construct
NDKPKFF

SEQ ID NO: 176821 - protein, 7 aa, synthetic construct
GEKPGKY

SEQ ID NO: 176822 - protein, 7 aa, synthetic construct
QETRKFT

SEQ ID NO: 176823 - protein, 7 aa, synthetic construct
GEKYKNN

SEQ ID NO: 176824 - protein, 7 aa, synthetic construct
PEKPKII

SEQ ID NO: 176825 - protein, 7 aa, synthetic construct
EIKPKFV

SEQ ID NO: 176826 - protein, 7 aa, synthetic construct
GPHPKFV

SEQ ID NO: 176827 - protein, 7 aa, synthetic construct
GDKPKNI

SEQ ID NO: 176828 - protein, 7 aa, synthetic construct
GFKPMNT

SEQ ID NO: 176829 - protein, 7 aa, synthetic construct
VDKPKFI

SEQ ID NO: 176830 - protein, 7 aa, synthetic construct
GMIPKHT

SEQ ID NO: 176831 - protein, 7 aa, synthetic construct
MDKPKFL

SEQ ID NO: 176832 - protein, 7 aa, synthetic construct
PEKAKFQ

SEQ ID NO: 176833 - protein, 7 aa, synthetic construct
AEKHKFI

SEQ ID NO: 176834 - protein, 7 aa, synthetic construct
FEKYKPT

SEQ ID NO: 176835 - protein, 7 aa, synthetic construct
GETRKFN

SEQ ID NO: 176836 - protein, 7 aa, synthetic construct
GKPPKFD

SEQ ID NO: 176837 - protein, 7 aa, synthetic construct
TEKPVFR

SEQ ID NO: 176838 - protein, 7 aa, synthetic construct
GETPKRT

SEQ ID NO: 176839 - protein, 7 aa, synthetic construct
AQKPKFD

SEQ ID NO: 176840 - protein, 7 aa, synthetic construct
PEKPKYN

SEQ ID NO: 176841 - protein, 7 aa, synthetic construct
GEKNRST

SEQ ID NO: 176842 - protein, 7 aa, synthetic construct
LEGPKFR

SEQ ID NO: 176843 - protein, 7 aa, synthetic construct
GEKPRQT

SEQ ID NO: 176844 - protein, 7 aa, synthetic construct
GENNKFK

SEQ ID NO: 176845 - protein, 7 aa, synthetic construct
GERPPKT

SEQ ID NO: 176846 - protein, 7 aa, synthetic construct
PERPKLT

SEQ ID NO: 176847 - protein, 7 aa, synthetic construct
GEAPKQR

SEQ ID NO: 176848 - protein, 7 aa, synthetic construct
DKKPVFT

SEQ ID NO: 176849 - protein, 7 aa, synthetic construct
TEKPKTL

SEQ ID NO: 176850 - protein, 7 aa, synthetic construct
VEKPKDR

SEQ ID NO: 176851 - protein, 7 aa, synthetic construct
GEKPLKY

SEQ ID NO: 176852 - protein, 7 aa, synthetic construct
GEKVKYS

SEQ ID NO: 176853 - protein, 7 aa, synthetic construct
PEKPKTS

SEQ ID NO: 176854 - protein, 7 aa, synthetic construct
NEAPKFR

SEQ ID NO: 176855 - protein, 7 aa, synthetic construct
GESPKKF

SEQ ID NO: 176856 - protein, 7 aa, synthetic construct
QDKPKHT

SEQ ID NO: 176857 - protein, 7 aa, synthetic construct
PERPKQT

SEQ ID NO: 176858 - protein, 7 aa, synthetic construct
TENPKRT

SEQ ID NO: 176859 - protein, 7 aa, synthetic construct
IEKPPRT

SEQ ID NO: 176860 - protein, 7 aa, synthetic construct
GEKIKHY

SEQ ID NO: 176861 - protein, 7 aa, synthetic construct
SERPKFG

SEQ ID NO: 176862 - protein, 7 aa, synthetic construct
GEQPKKL

SEQ ID NO: 176863 - protein, 7 aa, synthetic construct
QMKPKDT

SEQ ID NO: 176864 - protein, 7 aa, synthetic construct
GEKPKYL

SEQ ID NO: 176865 - protein, 7 aa, synthetic construct
GDKRQFT

SEQ ID NO: 176866 - protein, 7 aa, synthetic construct
FEKPKLN

SEQ ID NO: 176867 - protein, 7 aa, synthetic construct
IYKPKDT

SEQ ID NO: 176868 - protein, 7 aa, synthetic construct
GQKREFT

SEQ ID NO: 176869 - protein, 7 aa, synthetic construct
EPKPKNT

SEQ ID NO: 176870 - protein, 7 aa, synthetic construct
GGKVKFD

SEQ ID NO: 176871 - protein, 7 aa, synthetic construct
SEKPKGY

SEQ ID NO: 176872 - protein, 7 aa, synthetic construct
GDKVKFF

SEQ ID NO: 176873 - protein, 7 aa, synthetic construct
NERPKFA

SEQ ID NO: 176874 - protein, 7 aa, synthetic construct
GERNKNT

SEQ ID NO: 176875 - protein, 7 aa, synthetic construct
QYKPKFE

SEQ ID NO: 176876 - protein, 7 aa, synthetic construct
GHKPKDT

SEQ ID NO: 176877 - protein, 7 aa, synthetic construct
GEVPKTR

SEQ ID NO: 176878 - protein, 7 aa, synthetic construct
MEKPKSM

SEQ ID NO: 176879 - protein, 7 aa, synthetic construct
GEKIKDR

SEQ ID NO: 176880 - protein, 7 aa, synthetic construct
QEKPRFN

SEQ ID NO: 176881 - protein, 7 aa, synthetic construct
GEKKAFF

SEQ ID NO: 176882 - protein, 7 aa, synthetic construct
GENPKTR

SEQ ID NO: 176883 - protein, 7 aa, synthetic construct
GERGKFT

SEQ ID NO: 176884 - protein, 7 aa, synthetic construct
VEKPKNS

SEQ ID NO: 176885 - protein, 7 aa, synthetic construct
GEQPKRP

SEQ ID NO: 176886 - protein, 7 aa, synthetic construct
EGKPKFS

SEQ ID NO: 176887 - protein, 7 aa, synthetic construct
GEKPQRI

SEQ ID NO: 176888 - protein, 7 aa, synthetic construct
AEKPKTM

SEQ ID NO: 176889 - protein, 7 aa, synthetic construct
GEKPNRY

SEQ ID NO: 176890 - protein, 7 aa, synthetic construct
DNKLKFT

SEQ ID NO: 176891 - protein, 7 aa, synthetic construct
GEIVKRT

SEQ ID NO: 176892 - protein, 7 aa, synthetic construct
GEILKRT

SEQ ID NO: 176893 - protein, 7 aa, synthetic construct
GERPKAV

SEQ ID NO: 176894 - protein, 7 aa, synthetic construct
GDNPKKT

SEQ ID NO: 176895 - protein, 7 aa, synthetic construct
ADKPKHT

SEQ ID NO: 176896 - protein, 7 aa, synthetic construct
GFKPKND

SEQ ID NO: 176897 - protein, 7 aa, synthetic construct
GEGPKKF

SEQ ID NO: 176898 - protein, 7 aa, synthetic construct
NEKPVRT

SEQ ID NO: 176899 - protein, 7 aa, synthetic construct
GDKPGFK

SEQ ID NO: 176900 - protein, 7 aa, synthetic construct
QEKQKFF

SEQ ID NO: 176901 - protein, 7 aa, synthetic construct
GEAKKFQ

SEQ ID NO: 176902 - protein, 7 aa, synthetic construct
TFKPKDT

SEQ ID NO: 176903 - protein, 7 aa, synthetic construct
GEKPFRN

SEQ ID NO: 176904 - protein, 7 aa, synthetic construct
GEQPKIR

SEQ ID NO: 176905 - protein, 7 aa, synthetic construct
DRLPKFT

SEQ ID NO: 176906 - protein, 7 aa, synthetic construct
DGKPKFH

SEQ ID NO: 176907 - protein, 7 aa, synthetic construct
NERPKFI

SEQ ID NO: 176908 - protein, 7 aa, synthetic construct
GEPIKRT

SEQ ID NO: 176909 - protein, 7 aa, synthetic construct
VEKYKIT

SEQ ID NO: 176910 - protein, 7 aa, synthetic construct
GSGPKHT

SEQ ID NO: 176911 - protein, 7 aa, synthetic construct
VEKMRFT

SEQ ID NO: 176912 - protein, 7 aa, synthetic construct
VEKYKNT

SEQ ID NO: 176913 - protein, 7 aa, synthetic construct
YEKYKPT

SEQ ID NO: 176914 - protein, 7 aa, synthetic construct
RETNKFT

SEQ ID NO: 176915 - protein, 7 aa, synthetic construct
HEKPRFG

SEQ ID NO: 176916 - protein, 7 aa, synthetic construct
QEVPKFK

SEQ ID NO: 176917 - protein, 7 aa, synthetic construct
EGKLKFT

SEQ ID NO: 176918 - protein, 7 aa, synthetic construct
FTKPKFE

SEQ ID NO: 176919 - protein, 7 aa, synthetic construct
GEVRKFG

SEQ ID NO: 176920 - protein, 7 aa, synthetic construct
GDKPQFR

SEQ ID NO: 176921 - protein, 7 aa, synthetic construct
NEKPKTW

SEQ ID NO: 176922 - protein, 7 aa, synthetic construct
GAHPKTT

SEQ ID NO: 176923 - protein, 7 aa, synthetic construct
GMHPKST

SEQ ID NO: 176924 - protein, 7 aa, synthetic construct
GGKPRET

SEQ ID NO: 176925 - protein, 7 aa, synthetic construct
GGPPKHT

SEQ ID NO: 176926 - protein, 7 aa, synthetic construct
GEVGKFR

SEQ ID NO: 176927 - protein, 7 aa, synthetic construct
EHKPKFQ

SEQ ID NO: 176928 - protein, 7 aa, synthetic construct
AEKPKNQ

SEQ ID NO: 176929 - protein, 7 aa, synthetic construct
GEKPSNR

SEQ ID NO: 176930 - protein, 7 aa, synthetic construct
EVKPKFG

SEQ ID NO: 176931 - protein, 7 aa, synthetic construct
NERIKFT

SEQ ID NO: 176932 - protein, 7 aa, synthetic construct
GDKPKMF

SEQ ID NO: 176933 - protein, 7 aa, synthetic construct
GTSHKFT

SEQ ID NO: 176934 - protein, 7 aa, synthetic construct
GSKPKDI

SEQ ID NO: 176935 - protein, 7 aa, synthetic construct
GEIKKYT

SEQ ID NO: 176936 - protein, 7 aa, synthetic construct
WEKLKFN

SEQ ID NO: 176937 - protein, 7 aa, synthetic construct
AEKYKFS

SEQ ID NO: 176938 - protein, 7 aa, synthetic construct
GTVHKFT

SEQ ID NO: 176939 - protein, 7 aa, synthetic construct
EAKNKFT

SEQ ID NO: 176940 - protein, 7 aa, synthetic construct
EGKPKYT

SEQ ID NO: 176941 - protein, 7 aa, synthetic construct
GEKTKIW

SEQ ID NO: 176942 - protein, 7 aa, synthetic construct
GEKRATT

SEQ ID NO: 176943 - protein, 7 aa, synthetic construct
GDKPNFR

SEQ ID NO: 176944 - protein, 7 aa, synthetic construct
IEKPHFK

SEQ ID NO: 176945 - protein, 7 aa, synthetic construct
QEKPKFA

SEQ ID NO: 176946 - protein, 7 aa, synthetic construct
TEKVKFY

SEQ ID NO: 176947 - protein, 7 aa, synthetic construct
HEKIKFL

SEQ ID NO: 176948 - protein, 7 aa, synthetic construct
HEKPKSA

SEQ ID NO: 176949 - protein, 7 aa, synthetic construct
TEPPKRT

SEQ ID NO: 176950 - protein, 7 aa, synthetic construct
GEKPKQY

SEQ ID NO: 176951 - protein, 7 aa, synthetic construct
GESKKFG

SEQ ID NO: 176952 - protein, 7 aa, synthetic construct
THGPKFT

SEQ ID NO: 176953 - protein, 7 aa, synthetic construct
GAKPKDW

SEQ ID NO: 176954 - protein, 7 aa, synthetic construct
GEKAKHF

SEQ ID NO: 176955 - protein, 7 aa, synthetic construct
GQKPKND

SEQ ID NO: 176956 - protein, 7 aa, synthetic construct
TEKPKAW

SEQ ID NO: 176957 - protein, 7 aa, synthetic construct
NLKPKFD

SEQ ID NO: 176958 - protein, 7 aa, synthetic construct
GERPKMA

SEQ ID NO: 176959 - protein, 7 aa, synthetic construct
DNKAKFT

SEQ ID NO: 176960 - protein, 7 aa, synthetic construct
EGKPKMT

SEQ ID NO: 176961 - protein, 7 aa, synthetic construct
LEKPKHS

SEQ ID NO: 176962 - protein, 7 aa, synthetic construct
TERPKFI

SEQ ID NO: 176963 - protein, 7 aa, synthetic construct
NEFKKFT

SEQ ID NO: 176964 - protein, 7 aa, synthetic construct
IENPKFR

SEQ ID NO: 176965 - protein, 7 aa, synthetic construct
AEKPTKT

SEQ ID NO: 176966 - protein, 7 aa, synthetic construct
SEKPKTY

SEQ ID NO: 176967 - protein, 7 aa, synthetic construct
AEPPKFK

SEQ ID NO: 176968 - protein, 7 aa, synthetic construct
TEKRLFT

SEQ ID NO: 176969 - protein, 7 aa, synthetic construct
EIKNKFT

SEQ ID NO: 176970 - protein, 7 aa, synthetic construct
TEIPKFK

SEQ ID NO: 176971 - protein, 7 aa, synthetic construct
GERGKST

SEQ ID NO: 176972 - protein, 7 aa, synthetic construct
GITHKFT

SEQ ID NO: 176973 - protein, 7 aa, synthetic construct
AEKPKYG

SEQ ID NO: 176974 - protein, 7 aa, synthetic construct
SQKPKFD

SEQ ID NO: 176975 - protein, 7 aa, synthetic construct
GYKTKDT

SEQ ID NO: 176976 - protein, 7 aa, synthetic construct
KEKPWQT

SEQ ID NO: 176977 - protein, 7 aa, synthetic construct
TEKPRFA

SEQ ID NO: 176978 - protein, 7 aa, synthetic construct
DTKPKFS

SEQ ID NO: 176979 - protein, 7 aa, synthetic construct
MEKPKYG

SEQ ID NO: 176980 - protein, 7 aa, synthetic construct
GENTKKT

SEQ ID NO: 176981 - protein, 7 aa, synthetic construct
GDRPKNT

SEQ ID NO: 176982 - protein, 7 aa, synthetic construct
MYKPKDT

SEQ ID NO: 176983 - protein, 7 aa, synthetic construct
LEKSRFT

SEQ ID NO: 176984 - protein, 7 aa, synthetic construct
DGKPKQT

SEQ ID NO: 176985 - protein, 7 aa, synthetic construct
DRGPKFT

SEQ ID NO: 176986 - protein, 7 aa, synthetic construct
GEANKRT

SEQ ID NO: 176987 - protein, 7 aa, synthetic construct
ENKPKFH

SEQ ID NO: 176988 - protein, 7 aa, synthetic construct
TEKPKIH

SEQ ID NO: 176989 - protein, 7 aa, synthetic construct
QEKPKYA

SEQ ID NO: 176990 - protein, 7 aa, synthetic construct
FDKPKST

SEQ ID NO: 176991 - protein, 7 aa, synthetic construct
VEKPKYN

SEQ ID NO: 176992 - protein, 7 aa, synthetic construct
GERPMKT

SEQ ID NO: 176993 - protein, 7 aa, synthetic construct
GERPKVS

SEQ ID NO: 176994 - protein, 7 aa, synthetic construct
IDKPKFS

SEQ ID NO: 176995 - protein, 7 aa, synthetic construct
PESKKFT

SEQ ID NO: 176996 - protein, 7 aa, synthetic construct
GAIPKHT

SEQ ID NO: 176997 - protein, 7 aa, synthetic construct
ASNPKFT

SEQ ID NO: 176998 - protein, 7 aa, synthetic construct
GEGAKFR

SEQ ID NO: 176999 - protein, 7 aa, synthetic construct
GEDKKKT

SEQ ID NO: 177000 - protein, 7 aa, synthetic construct
PEKVKFV

SEQ ID NO: 177001 - protein, 7 aa, synthetic construct
GIHPKIT

SEQ ID NO: 177002 - protein, 7 aa, synthetic construct
VEKPHFK

SEQ ID NO: 177003 - protein, 7 aa, synthetic construct
QEKPKMM

SEQ ID NO: 177004 - protein, 7 aa, synthetic construct
GERAKIT

SEQ ID NO: 177005 - protein, 7 aa, synthetic construct
PERPKAT

SEQ ID NO: 177006 - protein, 7 aa, synthetic construct
AEKPRFI

SEQ ID NO: 177007 - protein, 7 aa, synthetic construct
FIKPKFD

SEQ ID NO: 177008 - protein, 7 aa, synthetic construct
QEKPKSG

SEQ ID NO: 177009 - protein, 7 aa, synthetic construct
DIKPKFS

SEQ ID NO: 177010 - protein, 7 aa, synthetic construct
AEKPKDR

SEQ ID NO: 177011 - protein, 7 aa, synthetic construct
PEKPRFV

SEQ ID NO: 177012 - protein, 7 aa, synthetic construct
GEGRKLT

SEQ ID NO: 177013 - protein, 7 aa, synthetic construct
REKFKDT

SEQ ID NO: 177014 - protein, 7 aa, synthetic construct
NEKGKFF

SEQ ID NO: 177015 - protein, 7 aa, synthetic construct
GIHPKST

SEQ ID NO: 177016 - protein, 7 aa, synthetic construct
QEKPRFQ

SEQ ID NO: 177017 - protein, 7 aa, synthetic construct
VELPKFK

SEQ ID NO: 177018 - protein, 7 aa, synthetic construct
GERMKFQ

SEQ ID NO: 177019 - protein, 7 aa, synthetic construct
SDKPKFN

SEQ ID NO: 177020 - protein, 7 aa, synthetic construct
YEKVKFM

SEQ ID NO: 177021 - protein, 7 aa, synthetic construct
ADRPKFT

SEQ ID NO: 177022 - protein, 7 aa, synthetic construct
TENPKKT

SEQ ID NO: 177023 - protein, 7 aa, synthetic construct
GMQPKFG

SEQ ID NO: 177024 - protein, 7 aa, synthetic construct
KERPHFT

SEQ ID NO: 177025 - protein, 7 aa, synthetic construct
AEKPRNT

SEQ ID NO: 177026 - protein, 7 aa, synthetic construct
LEPPKFR

SEQ ID NO: 177027 - protein, 7 aa, synthetic construct
AEKPVKT

SEQ ID NO: 177028 - protein, 7 aa, synthetic construct
QERPKFG

SEQ ID NO: 177029 - protein, 7 aa, synthetic construct
QEKPKQA

SEQ ID NO: 177030 - protein, 7 aa, synthetic construct
YEKPKGG

SEQ ID NO: 177031 - protein, 7 aa, synthetic construct
GMKPKEW

SEQ ID NO: 177032 - protein, 7 aa, synthetic construct
RETPKFS

SEQ ID NO: 177033 - protein, 7 aa, synthetic construct
TEKPYRT

SEQ ID NO: 177034 - protein, 7 aa, synthetic construct
FEKPQRT

SEQ ID NO: 177035 - protein, 7 aa, synthetic construct
GDAPKFK

SEQ ID NO: 177036 - protein, 7 aa, synthetic construct
GYKPKPD

SEQ ID NO: 177037 - protein, 7 aa, synthetic construct
GTHPKNT

SEQ ID NO: 177038 - protein, 7 aa, synthetic construct
GEKPKHF

SEQ ID NO: 177039 - protein, 7 aa, synthetic construct
QETPKKT

SEQ ID NO: 177040 - protein, 7 aa, synthetic construct
QEKPKSW

SEQ ID NO: 177041 - protein, 7 aa, synthetic construct
GEKPRFN

SEQ ID NO: 177042 - protein, 7 aa, synthetic construct
GGAPKNT

SEQ ID NO: 177043 - protein, 7 aa, synthetic construct
KEFPKFS

SEQ ID NO: 177044 - protein, 7 aa, synthetic construct
FEKYKTT

SEQ ID NO: 177045 - protein, 7 aa, synthetic construct
NEKPKLY

SEQ ID NO: 177046 - protein, 7 aa, synthetic construct
AEGPKKT

SEQ ID NO: 177047 - protein, 7 aa, synthetic construct
GEKKPNT

SEQ ID NO: 177048 - protein, 7 aa, synthetic construct
ENKQKFT

SEQ ID NO: 177049 - protein, 7 aa, synthetic construct
GETQKFK

SEQ ID NO: 177050 - protein, 7 aa, synthetic construct
GDKYKNT

SEQ ID NO: 177051 - protein, 7 aa, synthetic construct
YTKPKFE

SEQ ID NO: 177052 - protein, 7 aa, synthetic construct
GEQPKRL

SEQ ID NO: 177053 - protein, 7 aa, synthetic construct
QEKPSRT

SEQ ID NO: 177054 - protein, 7 aa, synthetic construct
GERIKST

SEQ ID NO: 177055 - protein, 7 aa, synthetic construct
KEHPKFT

SEQ ID NO: 177056 - protein, 7 aa, synthetic construct
TSNPKFT

SEQ ID NO: 177057 - protein, 7 aa, synthetic construct
GEKPRFL

SEQ ID NO: 177058 - protein, 7 aa, synthetic construct
GVIPKFG

SEQ ID NO: 177059 - protein, 7 aa, synthetic construct
GRKPVFE

SEQ ID NO: 177060 - protein, 7 aa, synthetic construct
TEKPKPF

SEQ ID NO: 177061 - protein, 7 aa, synthetic construct
GDKPKAI

SEQ ID NO: 177062 - protein, 7 aa, synthetic construct
GHKPKEY

SEQ ID NO: 177063 - protein, 7 aa, synthetic construct
TEKPRFV

SEQ ID NO: 177064 - protein, 7 aa, synthetic construct
TNKPKDT

SEQ ID NO: 177065 - protein, 7 aa, synthetic construct
GEMPKFK

SEQ ID NO: 177066 - protein, 7 aa, synthetic construct
GMKPKDL

SEQ ID NO: 177067 - protein, 7 aa, synthetic construct
EPKPKFI

SEQ ID NO: 177068 - protein, 7 aa, synthetic construct
HEKPFKT

SEQ ID NO: 177069 - protein, 7 aa, synthetic construct
REGPKFA

SEQ ID NO: 177070 - protein, 7 aa, synthetic construct
GMKPKEY

SEQ ID NO: 177071 - protein, 7 aa, synthetic construct
DEKPKKS

SEQ ID NO: 177072 - protein, 7 aa, synthetic construct
GEKRMVT

SEQ ID NO: 177073 - protein, 7 aa, synthetic construct
GDKPART

SEQ ID NO: 177074 - protein, 7 aa, synthetic construct
GRGPKDT

SEQ ID NO: 177075 - protein, 7 aa, synthetic construct
GEKPRQV

SEQ ID NO: 177076 - protein, 7 aa, synthetic construct
GEKPRMI

SEQ ID NO: 177077 - protein, 7 aa, synthetic construct
PEKIKFQ

SEQ ID NO: 177078 - protein, 7 aa, synthetic construct
VEKPKNL

SEQ ID NO: 177079 - protein, 7 aa, synthetic construct
AEKPKIV

SEQ ID NO: 177080 - protein, 7 aa, synthetic construct
DNKPKHT

SEQ ID NO: 177081 - protein, 7 aa, synthetic construct
TEKYKIT

SEQ ID NO: 177082 - protein, 7 aa, synthetic construct
GEKRTVT

SEQ ID NO: 177083 - protein, 7 aa, synthetic construct
IDKPKHT

SEQ ID NO: 177084 - protein, 7 aa, synthetic construct
GEKPRLT

SEQ ID NO: 177085 - protein, 7 aa, synthetic construct
GEKKFFS

SEQ ID NO: 177086 - protein, 7 aa, synthetic construct
YENPKFK

SEQ ID NO: 177087 - protein, 7 aa, synthetic construct
GEAQKFR

SEQ ID NO: 177088 - protein, 7 aa, synthetic construct
GETPKKN

SEQ ID NO: 177089 - protein, 7 aa, synthetic construct
KEMPKFM

SEQ ID NO: 177090 - protein, 7 aa, synthetic construct
MEKPKAN

SEQ ID NO: 177091 - protein, 7 aa, synthetic construct
GEKAKYN

SEQ ID NO: 177092 - protein, 7 aa, synthetic construct
GEAQKRT

SEQ ID NO: 177093 - protein, 7 aa, synthetic construct
PQKPKFD

SEQ ID NO: 177094 - protein, 7 aa, synthetic construct
EAKQKFT

SEQ ID NO: 177095 - protein, 7 aa, synthetic construct
GELRKFS

SEQ ID NO: 177096 - protein, 7 aa, synthetic construct
TERPKST

SEQ ID NO: 177097 - protein, 7 aa, synthetic construct
GEKIRMT

SEQ ID NO: 177098 - protein, 7 aa, synthetic construct
FEKPKNQ

SEQ ID NO: 177099 - protein, 7 aa, synthetic construct
GEKWKSP

SEQ ID NO: 177100 - protein, 7 aa, synthetic construct
GEKPRIL

SEQ ID NO: 177101 - protein, 7 aa, synthetic construct
HEKPKFQ

SEQ ID NO: 177102 - protein, 7 aa, synthetic construct
YEKIKFM

SEQ ID NO: 177103 - protein, 7 aa, synthetic construct
NEKPKYY

SEQ ID NO: 177104 - protein, 7 aa, synthetic construct
NERPKFQ

SEQ ID NO: 177105 - protein, 7 aa, synthetic construct
GEKRQFV

SEQ ID NO: 177106 - protein, 7 aa, synthetic construct
GEKNKDR

SEQ ID NO: 177107 - protein, 7 aa, synthetic construct
GEKPTAR

SEQ ID NO: 177108 - protein, 7 aa, synthetic construct
GEAKRFT

SEQ ID NO: 177109 - protein, 7 aa, synthetic construct
YEVPKFK

SEQ ID NO: 177110 - protein, 7 aa, synthetic construct
GDKPHRT

SEQ ID NO: 177111 - protein, 7 aa, synthetic construct
DIKPKAT

SEQ ID NO: 177112 - protein, 7 aa, synthetic construct
QEKPKNH

SEQ ID NO: 177113 - protein, 7 aa, synthetic construct
SMQPKFT

SEQ ID NO: 177114 - protein, 7 aa, synthetic construct
HEKPVRT

SEQ ID NO: 177115 - protein, 7 aa, synthetic construct
GEKPYKP

SEQ ID NO: 177116 - protein, 7 aa, synthetic construct
GDKPGFR

SEQ ID NO: 177117 - protein, 7 aa, synthetic construct
GEKRNQT

SEQ ID NO: 177118 - protein, 7 aa, synthetic construct
GEKPRIY

SEQ ID NO: 177119 - protein, 7 aa, synthetic construct
GEKPKSH

SEQ ID NO: 177120 - protein, 7 aa, synthetic construct
GENMKRT

SEQ ID NO: 177121 - protein, 7 aa, synthetic construct
KEVPKFS

SEQ ID NO: 177122 - protein, 7 aa, synthetic construct
TEKPTFR

SEQ ID NO: 177123 - protein, 7 aa, synthetic construct
TEKPRFP

SEQ ID NO: 177124 - protein, 7 aa, synthetic construct
IEKPRIT

SEQ ID NO: 177125 - protein, 7 aa, synthetic construct
GEKPRMT

SEQ ID NO: 177126 - protein, 7 aa, synthetic construct
GEKRTMT

SEQ ID NO: 177127 - protein, 7 aa, synthetic construct
PEAPKFK

SEQ ID NO: 177128 - protein, 7 aa, synthetic construct
SYKPKET

SEQ ID NO: 177129 - protein, 7 aa, synthetic construct
VEKPKLY

SEQ ID NO: 177130 - protein, 7 aa, synthetic construct
REIPKFA

SEQ ID NO: 177131 - protein, 7 aa, synthetic construct
MEKPKIY

SEQ ID NO: 177132 - protein, 7 aa, synthetic construct
GAGPKFN

SEQ ID NO: 177133 - protein, 7 aa, synthetic construct
QEKPKYH

SEQ ID NO: 177134 - protein, 7 aa, synthetic construct
GEMPKTK

SEQ ID NO: 177135 - protein, 7 aa, synthetic construct
MEKFKFA

SEQ ID NO: 177136 - protein, 7 aa, synthetic construct
IEKPKSF

SEQ ID NO: 177137 - protein, 7 aa, synthetic construct
HEPPKFK

SEQ ID NO: 177138 - protein, 7 aa, synthetic construct
QEKPKPH

SEQ ID NO: 177139 - protein, 7 aa, synthetic construct
DAKPKFI

SEQ ID NO: 177140 - protein, 7 aa, synthetic construct
GEKYKIN

SEQ ID NO: 177141 - protein, 7 aa, synthetic construct
KENPKFA

SEQ ID NO: 177142 - protein, 7 aa, synthetic construct
FEKPKYG

SEQ ID NO: 177143 - protein, 7 aa, synthetic construct
YDKPKMT

SEQ ID NO: 177144 - protein, 7 aa, synthetic construct
QITPKFT

SEQ ID NO: 177145 - protein, 7 aa, synthetic construct
GRTPKFD

SEQ ID NO: 177146 - protein, 7 aa, synthetic construct
TEKPKIL

SEQ ID NO: 177147 - protein, 7 aa, synthetic construct
GDKPKAL

SEQ ID NO: 177148 - protein, 7 aa, synthetic construct
LEKPKRD

SEQ ID NO: 177149 - protein, 7 aa, synthetic construct
GEQPKPK

SEQ ID NO: 177150 - protein, 7 aa, synthetic construct
GEKPAVR

SEQ ID NO: 177151 - protein, 7 aa, synthetic construct
GRKPDFT

SEQ ID NO: 177152 - protein, 7 aa, synthetic construct
EQKPKVT

SEQ ID NO: 177153 - protein, 7 aa, synthetic construct
REKPKFD

SEQ ID NO: 177154 - protein, 7 aa, synthetic construct
QQKPKFE

SEQ ID NO: 177155 - protein, 7 aa, synthetic construct
AYKPKDT

SEQ ID NO: 177156 - protein, 7 aa, synthetic construct
DEKPKKG

SEQ ID NO: 177157 - protein, 7 aa, synthetic construct
LEKYKIT

SEQ ID NO: 177158 - protein, 7 aa, synthetic construct
QEKPIKT

SEQ ID NO: 177159 - protein, 7 aa, synthetic construct
AEKVRFT

SEQ ID NO: 177160 - protein, 7 aa, synthetic construct
DLKPKFM

SEQ ID NO: 177161 - protein, 7 aa, synthetic construct
MEKHKFM

SEQ ID NO: 177162 - protein, 7 aa, synthetic construct
NEHKKFT

SEQ ID NO: 177163 - protein, 7 aa, synthetic construct
GERPKFL

SEQ ID NO: 177164 - protein, 7 aa, synthetic construct
SEKPKRE

SEQ ID NO: 177165 - protein, 7 aa, synthetic construct
GQKSKDT

SEQ ID NO: 177166 - protein, 7 aa, synthetic construct
TEKPKMQ

SEQ ID NO: 177167 - protein, 7 aa, synthetic construct
ENKMKFT

SEQ ID NO: 177168 - protein, 7 aa, synthetic construct
GIQPKFQ

SEQ ID NO: 177169 - protein, 7 aa, synthetic construct
QEAPKFR

SEQ ID NO: 177170 - protein, 7 aa, synthetic construct
HEKPKFL

SEQ ID NO: 177171 - protein, 7 aa, synthetic construct
HSKPKDT

SEQ ID NO: 177172 - protein, 7 aa, synthetic construct
TEGPKFK

SEQ ID NO: 177173 - protein, 7 aa, synthetic construct
GEGGKKT

SEQ ID NO: 177174 - protein, 7 aa, synthetic construct
GEKYIKT

SEQ ID NO: 177175 - protein, 7 aa, synthetic construct
GFKVKFE

SEQ ID NO: 177176 - protein, 7 aa, synthetic construct
GAKPKQD

SEQ ID NO: 177177 - protein, 7 aa, synthetic construct
AEPRKFT

SEQ ID NO: 177178 - protein, 7 aa, synthetic construct
GDKPKVL

SEQ ID NO: 177179 - protein, 7 aa, synthetic construct
GYKPKLD

SEQ ID NO: 177180 - protein, 7 aa, synthetic construct
GEMPKRF

SEQ ID NO: 177181 - protein, 7 aa, synthetic construct
AEGKKFT

SEQ ID NO: 177182 - protein, 7 aa, synthetic construct
REKYKET

SEQ ID NO: 177183 - protein, 7 aa, synthetic construct
GTKPKDH

SEQ ID NO: 177184 - protein, 7 aa, synthetic construct
SEKPKTM

SEQ ID NO: 177185 - protein, 7 aa, synthetic construct
QEKPKHQ

SEQ ID NO: 177186 - protein, 7 aa, synthetic construct
MEKPRIT

SEQ ID NO: 177187 - protein, 7 aa, synthetic construct
DGKTKFT

SEQ ID NO: 177188 - protein, 7 aa, synthetic construct
PEKLKYT

SEQ ID NO: 177189 - protein, 7 aa, synthetic construct
QEKPKDK

SEQ ID NO: 177190 - protein, 7 aa, synthetic construct
GEIPKRN

SEQ ID NO: 177191 - protein, 7 aa, synthetic construct
SEKPKTL

SEQ ID NO: 177192 - protein, 7 aa, synthetic construct
GEKPPRA

SEQ ID NO: 177193 - protein, 7 aa, synthetic construct
QELPKRT

SEQ ID NO: 177194 - protein, 7 aa, synthetic construct
NEKPKIM

SEQ ID NO: 177195 - protein, 7 aa, synthetic construct
KEYPKFA

SEQ ID NO: 177196 - protein, 7 aa, synthetic construct
GDKPKMW

SEQ ID NO: 177197 - protein, 7 aa, synthetic construct
GGKHKDT

SEQ ID NO: 177198 - protein, 7 aa, synthetic construct
GEKRIFG

SEQ ID NO: 177199 - protein, 7 aa, synthetic construct
KEVPKFA

SEQ ID NO: 177200 - protein, 7 aa, synthetic construct
GAKPKYD

SEQ ID NO: 177201 - protein, 7 aa, synthetic construct
GDKPKVM

SEQ ID NO: 177202 - protein, 7 aa, synthetic construct
QEPPKFK

SEQ ID NO: 177203 - protein, 7 aa, synthetic construct
GEKPNQR

SEQ ID NO: 177204 - protein, 7 aa, synthetic construct
HEKFKFN

SEQ ID NO: 177205 - protein, 7 aa, synthetic construct
GNKPKDY

SEQ ID NO: 177206 - protein, 7 aa, synthetic construct
TEKYKST

SEQ ID NO: 177207 - protein, 7 aa, synthetic construct
GERPKQT

SEQ ID NO: 177208 - protein, 7 aa, synthetic construct
SEQPKKT

SEQ ID NO: 177209 - protein, 7 aa, synthetic construct
EGKPKFQ

SEQ ID NO: 177210 - protein, 7 aa, synthetic construct
TEGRKFT

SEQ ID NO: 177211 - protein, 7 aa, synthetic construct
GERPKAS

SEQ ID NO: 177212 - protein, 7 aa, synthetic construct
MEKPKYY

SEQ ID NO: 177213 - protein, 7 aa, synthetic construct
GFKPKDN

SEQ ID NO: 177214 - protein, 7 aa, synthetic construct
LSKPKFD

SEQ ID NO: 177215 - protein, 7 aa, synthetic construct
GEKYKLN

SEQ ID NO: 177216 - protein, 7 aa, synthetic construct
NERLKFT

SEQ ID NO: 177217 - protein, 7 aa, synthetic construct
GEKPRTS

SEQ ID NO: 177218 - protein, 7 aa, synthetic construct
GEIPKKN

SEQ ID NO: 177219 - protein, 7 aa, synthetic construct
EEKIKFK

SEQ ID NO: 177220 - protein, 7 aa, synthetic construct
QEKFKFS

SEQ ID NO: 177221 - protein, 7 aa, synthetic construct
EGKMKFT

SEQ ID NO: 177222 - protein, 7 aa, synthetic construct
GEKPRGL

SEQ ID NO: 177223 - protein, 7 aa, synthetic construct
VEKPKIH

SEQ ID NO: 177224 - protein, 7 aa, synthetic construct
DEKPKRI

SEQ ID NO: 177225 - protein, 7 aa, synthetic construct
SETPKFR

SEQ ID NO: 177226 - protein, 7 aa, synthetic construct
GEGNKFR

SEQ ID NO: 177227 - protein, 7 aa, synthetic construct
THKPVFT

SEQ ID NO: 177228 - protein, 7 aa, synthetic construct
LEKPKSY

SEQ ID NO: 177229 - protein, 7 aa, synthetic construct
GPKPRFD

SEQ ID NO: 177230 - protein, 7 aa, synthetic construct
NEKPKQY

SEQ ID NO: 177231 - protein, 7 aa, synthetic construct
NEIPKFK

SEQ ID NO: 177232 - protein, 7 aa, synthetic construct
GERNKFS

SEQ ID NO: 177233 - protein, 7 aa, synthetic construct
GEIPKVR

SEQ ID NO: 177234 - protein, 7 aa, synthetic construct
GERPKQQ

SEQ ID NO: 177235 - protein, 7 aa, synthetic construct
SEKPNRT

SEQ ID NO: 177236 - protein, 7 aa, synthetic construct
GEKPRTI

SEQ ID NO: 177237 - protein, 7 aa, synthetic construct
AENPKFK

SEQ ID NO: 177238 - protein, 7 aa, synthetic construct
GEKVRIT

SEQ ID NO: 177239 - protein, 7 aa, synthetic construct
GLKNKFD

SEQ ID NO: 177240 - protein, 7 aa, synthetic construct
YEKPKIF

SEQ ID NO: 177241 - protein, 7 aa, synthetic construct
GDSKKFT

SEQ ID NO: 177242 - protein, 7 aa, synthetic construct
YDKPKFT

SEQ ID NO: 177243 - protein, 7 aa, synthetic construct
VDKPKFS

SEQ ID NO: 177244 - protein, 7 aa, synthetic construct
GEKIRNT

SEQ ID NO: 177245 - protein, 7 aa, synthetic construct
ENKPKFM

SEQ ID NO: 177246 - protein, 7 aa, synthetic construct
YEKHKFQ

SEQ ID NO: 177247 - protein, 7 aa, synthetic construct
DRKPKET

SEQ ID NO: 177248 - protein, 7 aa, synthetic construct
GHKPKDI

SEQ ID NO: 177249 - protein, 7 aa, synthetic construct
GEKKPFF

SEQ ID NO: 177250 - protein, 7 aa, synthetic construct
KELPKFM

SEQ ID NO: 177251 - protein, 7 aa, synthetic construct
QEKKPFT

SEQ ID NO: 177252 - protein, 7 aa, synthetic construct
YVKPKFD

SEQ ID NO: 177253 - protein, 7 aa, synthetic construct
GERTKST

SEQ ID NO: 177254 - protein, 7 aa, synthetic construct
GGKNKFD

SEQ ID NO: 177255 - protein, 7 aa, synthetic construct
REKPAPT

SEQ ID NO: 177256 - protein, 7 aa, synthetic construct
NEKPKHN

SEQ ID NO: 177257 - protein, 7 aa, synthetic construct
GDKPKQA

SEQ ID NO: 177258 - protein, 7 aa, synthetic construct
GEPGKFR

SEQ ID NO: 177259 - protein, 7 aa, synthetic construct
DAKHKFT

SEQ ID NO: 177260 - protein, 7 aa, synthetic construct
VDKPKFN

SEQ ID NO: 177261 - protein, 7 aa, synthetic construct
HMKPKFD

SEQ ID NO: 177262 - protein, 7 aa, synthetic construct
GERPKLQ

SEQ ID NO: 177263 - protein, 7 aa, synthetic construct
IEKPQRT

SEQ ID NO: 177264 - protein, 7 aa, synthetic construct
IERPKFG

SEQ ID NO: 177265 - protein, 7 aa, synthetic construct
GEHPKKP

SEQ ID NO: 177266 - protein, 7 aa, synthetic construct
GETKKFA

SEQ ID NO: 177267 - protein, 7 aa, synthetic construct
GDKYKFP

SEQ ID NO: 177268 - protein, 7 aa, synthetic construct
GFKSKFD

SEQ ID NO: 177269 - protein, 7 aa, synthetic construct
GDKPVFR

SEQ ID NO: 177270 - protein, 7 aa, synthetic construct
GEKLHRT

SEQ ID NO: 177271 - protein, 7 aa, synthetic construct
AEKPYKT

SEQ ID NO: 177272 - protein, 7 aa, synthetic construct
DHKAKFT

SEQ ID NO: 177273 - protein, 7 aa, synthetic construct
GSPHKFT

SEQ ID NO: 177274 - protein, 7 aa, synthetic construct
MEKRAFT

SEQ ID NO: 177275 - protein, 7 aa, synthetic construct
FPKPKFE

SEQ ID NO: 177276 - protein, 7 aa, synthetic construct
AEMPKKT

SEQ ID NO: 177277 - protein, 7 aa, synthetic construct
GSIPKHT

SEQ ID NO: 177278 - protein, 7 aa, synthetic construct
SERTKFT

SEQ ID NO: 177279 - protein, 7 aa, synthetic construct
TMGPKFT

SEQ ID NO: 177280 - protein, 7 aa, synthetic construct
KEKPTFY

SEQ ID NO: 177281 - protein, 7 aa, synthetic construct
GAKFKDT

SEQ ID NO: 177282 - protein, 7 aa, synthetic construct
GELPKGR

SEQ ID NO: 177283 - protein, 7 aa, synthetic construct
SEKPKAN

SEQ ID NO: 177284 - protein, 7 aa, synthetic construct
GGGPKHT

SEQ ID NO: 177285 - protein, 7 aa, synthetic construct
GEKIKYA

SEQ ID NO: 177286 - protein, 7 aa, synthetic construct
GDRPKQT

SEQ ID NO: 177287 - protein, 7 aa, synthetic construct
GERLKIT

SEQ ID NO: 177288 - protein, 7 aa, synthetic construct
YEKPKHI

SEQ ID NO: 177289 - protein, 7 aa, synthetic construct
QEKPRFP

SEQ ID NO: 177290 - protein, 7 aa, synthetic construct
NEKRIFT

SEQ ID NO: 177291 - protein, 7 aa, synthetic construct
NEGKKFT

SEQ ID NO: 177292 - protein, 7 aa, synthetic construct
FEKPKLY

SEQ ID NO: 177293 - protein, 7 aa, synthetic construct
GRKPMFE

SEQ ID NO: 177294 - protein, 7 aa, synthetic construct
AQKPKFE

SEQ ID NO: 177295 - protein, 7 aa, synthetic construct
TEKPKFA

SEQ ID NO: 177296 - protein, 7 aa, synthetic construct
MAKPKFD

SEQ ID NO: 177297 - protein, 7 aa, synthetic construct
GEQPKSK

SEQ ID NO: 177298 - protein, 7 aa, synthetic construct
LEKYKFN

SEQ ID NO: 177299 - protein, 7 aa, synthetic construct
AEKPKQQ

SEQ ID NO: 177300 - protein, 7 aa, synthetic construct
EEKPKPK

SEQ ID NO: 177301 - protein, 7 aa, synthetic construct
REMPKFN

SEQ ID NO: 177302 - protein, 7 aa, synthetic construct
PEKPKPF

SEQ ID NO: 177303 - protein, 7 aa, synthetic construct
GEVPKMK

SEQ ID NO: 177304 - protein, 7 aa, synthetic construct
GETPKNR

SEQ ID NO: 177305 - protein, 7 aa, synthetic construct
GEMKKFL

SEQ ID NO: 177306 - protein, 7 aa, synthetic construct
GEVPKRI

SEQ ID NO: 177307 - protein, 7 aa, synthetic construct
NEKYKFA

SEQ ID NO: 177308 - protein, 7 aa, synthetic construct
GEPRKFS

SEQ ID NO: 177309 - protein, 7 aa, synthetic construct
EKHPKFT

SEQ ID NO: 177310 - protein, 7 aa, synthetic construct
AHNPKFT

SEQ ID NO: 177311 - protein, 7 aa, synthetic construct
DGKPKVT

SEQ ID NO: 177312 - protein, 7 aa, synthetic construct
GEMPKRL

SEQ ID NO: 177313 - protein, 7 aa, synthetic construct
GFKPKSD

SEQ ID NO: 177314 - protein, 7 aa, synthetic construct
DEKPKQR

SEQ ID NO: 177315 - protein, 7 aa, synthetic construct
GFKPKGD

SEQ ID NO: 177316 - protein, 7 aa, synthetic construct
KETPKFN

SEQ ID NO: 177317 - protein, 7 aa, synthetic construct
ENKPKFF

SEQ ID NO: 177318 - protein, 7 aa, synthetic construct
TEKPKFY

SEQ ID NO: 177319 - protein, 7 aa, synthetic construct
IEKPKHQ

SEQ ID NO: 177320 - protein, 7 aa, synthetic construct
FDKPKFT

SEQ ID NO: 177321 - protein, 7 aa, synthetic construct
GEQNKKT

SEQ ID NO: 177322 - protein, 7 aa, synthetic construct
AERNKFT

SEQ ID NO: 177323 - protein, 7 aa, synthetic construct
GEKKGFY

SEQ ID NO: 177324 - protein, 7 aa, synthetic construct
GEKYKHP

SEQ ID NO: 177325 - protein, 7 aa, synthetic construct
RETGKFT

SEQ ID NO: 177326 - protein, 7 aa, synthetic construct
KEKPHFQ

SEQ ID NO: 177327 - protein, 7 aa, synthetic construct
GEKPGGR

SEQ ID NO: 177328 - protein, 7 aa, synthetic construct
FEKPKAY

SEQ ID NO: 177329 - protein, 7 aa, synthetic construct
REAPKFN

SEQ ID NO: 177330 - protein, 7 aa, synthetic construct
GEKKSFY

SEQ ID NO: 177331 - protein, 7 aa, synthetic construct
DEKPKAK

SEQ ID NO: 177332 - protein, 7 aa, synthetic construct
GYKPINT

SEQ ID NO: 177333 - protein, 7 aa, synthetic construct
QEKIRFT

SEQ ID NO: 177334 - protein, 7 aa, synthetic construct
GEKPVRL

SEQ ID NO: 177335 - protein, 7 aa, synthetic construct
DAKPKFY

SEQ ID NO: 177336 - protein, 7 aa, synthetic construct
GQHPKFG

SEQ ID NO: 177337 - protein, 7 aa, synthetic construct
GDKPKFH

SEQ ID NO: 177338 - protein, 7 aa, synthetic construct
VEKPRST

SEQ ID NO: 177339 - protein, 7 aa, synthetic construct
PEKPKHM

SEQ ID NO: 177340 - protein, 7 aa, synthetic construct
QDKPKNT

SEQ ID NO: 177341 - protein, 7 aa, synthetic construct
LEKPKTW

SEQ ID NO: 177342 - protein, 7 aa, synthetic construct
QEKPKNM

SEQ ID NO: 177343 - protein, 7 aa, synthetic construct
GEKHKPY

SEQ ID NO: 177344 - protein, 7 aa, synthetic construct
SEKPKIY

SEQ ID NO: 177345 - protein, 7 aa, synthetic construct
MDKPKFI

SEQ ID NO: 177346 - protein, 7 aa, synthetic construct
AEKPKAF

SEQ ID NO: 177347 - protein, 7 aa, synthetic construct
PEKPKPQ

SEQ ID NO: 177348 - protein, 7 aa, synthetic construct
PDKPKFM

SEQ ID NO: 177349 - protein, 7 aa, synthetic construct
NEKPKHI

SEQ ID NO: 177350 - protein, 7 aa, synthetic construct
QEKPRFT

SEQ ID NO: 177351 - protein, 7 aa, synthetic construct
GEKVGFR

SEQ ID NO: 177352 - protein, 7 aa, synthetic construct
PEKPKSL

SEQ ID NO: 177353 - protein, 7 aa, synthetic construct
VEKPRFG

SEQ ID NO: 177354 - protein, 7 aa, synthetic construct
YEKGKFM

SEQ ID NO: 177355 - protein, 7 aa, synthetic construct
GEVPKKG

SEQ ID NO: 177356 - protein, 7 aa, synthetic construct
QEPPKFR

SEQ ID NO: 177357 - protein, 7 aa, synthetic construct
VEKPNFR

SEQ ID NO: 177358 - protein, 7 aa, synthetic construct
GREIKFT

SEQ ID NO: 177359 - protein, 7 aa, synthetic construct
GENPKKN

SEQ ID NO: 177360 - protein, 7 aa, synthetic construct
GERTKFQ

SEQ ID NO: 177361 - protein, 7 aa, synthetic construct
REKPFTT

SEQ ID NO: 177362 - protein, 7 aa, synthetic construct
QEKPKWG

SEQ ID NO: 177363 - protein, 7 aa, synthetic construct
LHKPKFD

SEQ ID NO: 177364 - protein, 7 aa, synthetic construct
DNKNKFT

SEQ ID NO: 177365 - protein, 7 aa, synthetic construct
GDKGRFT

SEQ ID NO: 177366 - protein, 7 aa, synthetic construct
GEKPKYQ

SEQ ID NO: 177367 - protein, 7 aa, synthetic construct
ADKPKFS

SEQ ID NO: 177368 - protein, 7 aa, synthetic construct
FEKPKGY

SEQ ID NO: 177369 - protein, 7 aa, synthetic construct
HEKPKAQ

SEQ ID NO: 177370 - protein, 7 aa, synthetic construct
TYKPKFE

SEQ ID NO: 177371 - protein, 7 aa, synthetic construct
GEKPKNS

SEQ ID NO: 177372 - protein, 7 aa, synthetic construct
DGKPKFT

SEQ ID NO: 177373 - protein, 7 aa, synthetic construct
RESIKFT

SEQ ID NO: 177374 - protein, 7 aa, synthetic construct
GEKPPRQ

SEQ ID NO: 177375 - protein, 7 aa, synthetic construct
SEKPKPF

SEQ ID NO: 177376 - protein, 7 aa, synthetic construct
GEKPRML

SEQ ID NO: 177377 - protein, 7 aa, synthetic construct
GEMPKMR

SEQ ID NO: 177378 - protein, 7 aa, synthetic construct
HDKPKFI

SEQ ID NO: 177379 - protein, 7 aa, synthetic construct
YEKPKQG

SEQ ID NO: 177380 - protein, 7 aa, synthetic construct
PEKPKVN

SEQ ID NO: 177381 - protein, 7 aa, synthetic construct
VEKPKIQ

SEQ ID NO: 177382 - protein, 7 aa, synthetic construct
DQKPKNT

SEQ ID NO: 177383 - protein, 7 aa, synthetic construct
HEKLKFL

SEQ ID NO: 177384 - protein, 7 aa, synthetic construct
IEKPYRT

SEQ ID NO: 177385 - protein, 7 aa, synthetic construct
GEKPFRG

SEQ ID NO: 177386 - protein, 7 aa, synthetic construct
GEKPRFP

SEQ ID NO: 177387 - protein, 7 aa, synthetic construct
FEKPKMY

SEQ ID NO: 177388 - protein, 7 aa, synthetic construct
GEKVKTW

SEQ ID NO: 177389 - protein, 7 aa, synthetic construct
HEKPKFA

SEQ ID NO: 177390 - protein, 7 aa, synthetic construct
TQIPKFT

SEQ ID NO: 177391 - protein, 7 aa, synthetic construct
GEKGYKT

SEQ ID NO: 177392 - protein, 7 aa, synthetic construct
REGPKFN

SEQ ID NO: 177393 - protein, 7 aa, synthetic construct
NEKYKST

SEQ ID NO: 177394 - protein, 7 aa, synthetic construct
GLTHKFT

SEQ ID NO: 177395 - protein, 7 aa, synthetic construct
GEIPKTK

SEQ ID NO: 177396 - protein, 7 aa, synthetic construct
DMKPKFI

SEQ ID NO: 177397 - protein, 7 aa, synthetic construct
AEKNKFQ

SEQ ID NO: 177398 - protein, 7 aa, synthetic construct
GEVQKRT

SEQ ID NO: 177399 - protein, 7 aa, synthetic construct
ETKPKFM

SEQ ID NO: 177400 - protein, 7 aa, synthetic construct
GEQRKFQ

SEQ ID NO: 177401 - protein, 7 aa, synthetic construct
GEQPKVR

SEQ ID NO: 177402 - protein, 7 aa, synthetic construct
GEKLKRD

SEQ ID NO: 177403 - protein, 7 aa, synthetic construct
KEKPIFM

SEQ ID NO: 177404 - protein, 7 aa, synthetic construct
GEKQKNY

SEQ ID NO: 177405 - protein, 7 aa, synthetic construct
FEKPKTI

SEQ ID NO: 177406 - protein, 7 aa, synthetic construct
GEKWKQG

SEQ ID NO: 177407 - protein, 7 aa, synthetic construct
GEQPKRA

SEQ ID NO: 177408 - protein, 7 aa, synthetic construct
GEKPNRG

SEQ ID NO: 177409 - protein, 7 aa, synthetic construct
REKPHNT

SEQ ID NO: 177410 - protein, 7 aa, synthetic construct
TEKHKFY

SEQ ID NO: 177411 - protein, 7 aa, synthetic construct
EIKPKFG

SEQ ID NO: 177412 - protein, 7 aa, synthetic construct
GQRPKDT

SEQ ID NO: 177413 - protein, 7 aa, synthetic construct
GDKPKMQ

SEQ ID NO: 177414 - protein, 7 aa, synthetic construct
ERVPKFT

SEQ ID NO: 177415 - protein, 7 aa, synthetic construct
SVHPKFT

SEQ ID NO: 177416 - protein, 7 aa, synthetic construct
DEKNKFK

SEQ ID NO: 177417 - protein, 7 aa, synthetic construct
KEYPKFT

SEQ ID NO: 177418 - protein, 7 aa, synthetic construct
FEKPKHM

SEQ ID NO: 177419 - protein, 7 aa, synthetic construct
FSKPKDT

SEQ ID NO: 177420 - protein, 7 aa, synthetic construct
TEKPPFR

SEQ ID NO: 177421 - protein, 7 aa, synthetic construct
GEKPSKF

SEQ ID NO: 177422 - protein, 7 aa, synthetic construct
GERPKGL

SEQ ID NO: 177423 - protein, 7 aa, synthetic construct
SEKHKFI

SEQ ID NO: 177424 - protein, 7 aa, synthetic construct
DNKPKFM

SEQ ID NO: 177425 - protein, 7 aa, synthetic construct
GEKPKST

SEQ ID NO: 177426 - protein, 7 aa, synthetic construct
PEKPKFM

SEQ ID NO: 177427 - protein, 7 aa, synthetic construct
ELKHKFT

SEQ ID NO: 177428 - protein, 7 aa, synthetic construct
GLKHKFD

SEQ ID NO: 177429 - protein, 7 aa, synthetic construct
GEKPRDR

SEQ ID NO: 177430 - protein, 7 aa, synthetic construct
IEKAKWT

SEQ ID NO: 177431 - protein, 7 aa, synthetic construct
GDKPKTW

SEQ ID NO: 177432 - protein, 7 aa, synthetic construct
DSKAKFT

SEQ ID NO: 177433 - protein, 7 aa, synthetic construct
GEKPFRA

SEQ ID NO: 177434 - protein, 7 aa, synthetic construct
QEKHKFQ

SEQ ID NO: 177435 - protein, 7 aa, synthetic construct
QEHKKFT

SEQ ID NO: 177436 - protein, 7 aa, synthetic construct
GENKKFH

SEQ ID NO: 177437 - protein, 7 aa, synthetic construct
GEKKIFQ

SEQ ID NO: 177438 - protein, 7 aa, synthetic construct
GDKPKIT

SEQ ID NO: 177439 - protein, 7 aa, synthetic construct
GELPKTR

SEQ ID NO: 177440 - protein, 7 aa, synthetic construct
NEKHKFY

SEQ ID NO: 177441 - protein, 7 aa, synthetic construct
GEPKKYT

SEQ ID NO: 177442 - protein, 7 aa, synthetic construct
GEKPGRF

SEQ ID NO: 177443 - protein, 7 aa, synthetic construct
KEMPKFS

SEQ ID NO: 177444 - protein, 7 aa, synthetic construct
GEPKKFT

SEQ ID NO: 177445 - protein, 7 aa, synthetic construct
GELKKFS

SEQ ID NO: 177446 - protein, 7 aa, synthetic construct
FEKPMRT

SEQ ID NO: 177447 - protein, 7 aa, synthetic construct
QEKRQFT

SEQ ID NO: 177448 - protein, 7 aa, synthetic construct
LEKFKFS

SEQ ID NO: 177449 - protein, 7 aa, synthetic construct
DNKPKQT

SEQ ID NO: 177450 - protein, 7 aa, synthetic construct
GEKMKHY

SEQ ID NO: 177451 - protein, 7 aa, synthetic construct
GMHPKFG

SEQ ID NO: 177452 - protein, 7 aa, synthetic construct
GTKPHFS

SEQ ID NO: 177453 - protein, 7 aa, synthetic construct
NDKPKQT

SEQ ID NO: 177454 - protein, 7 aa, synthetic construct
GEPPKQR

SEQ ID NO: 177455 - protein, 7 aa, synthetic construct
TEKPKYS

SEQ ID NO: 177456 - protein, 7 aa, synthetic construct
PEKPKNI

SEQ ID NO: 177457 - protein, 7 aa, synthetic construct
GDRPKFI

SEQ ID NO: 177458 - protein, 7 aa, synthetic construct
GDKPKLM

SEQ ID NO: 177459 - protein, 7 aa, synthetic construct
GYKIKFE

SEQ ID NO: 177460 - protein, 7 aa, synthetic construct
MEKPKLY

SEQ ID NO: 177461 - protein, 7 aa, synthetic construct
GEGPKKM

SEQ ID NO: 177462 - protein, 7 aa, synthetic construct
GETPKLK

SEQ ID NO: 177463 - protein, 7 aa, synthetic construct
MEKHKFL

SEQ ID NO: 177464 - protein, 7 aa, synthetic construct
GDRPKFG

SEQ ID NO: 177465 - protein, 7 aa, synthetic construct
SEKPKHI

SEQ ID NO: 177466 - protein, 7 aa, synthetic construct
YIKPKFD

SEQ ID NO: 177467 - protein, 7 aa, synthetic construct
QEKPKVS

SEQ ID NO: 177468 - protein, 7 aa, synthetic construct
GPEPKRT

SEQ ID NO: 177469 - protein, 7 aa, synthetic construct
GEARKST

SEQ ID NO: 177470 - protein, 7 aa, synthetic construct
QEKPRVT

SEQ ID NO: 177471 - protein, 7 aa, synthetic construct
QEKPKQL

SEQ ID NO: 177472 - protein, 7 aa, synthetic construct
GDKSKYT

SEQ ID NO: 177473 - protein, 7 aa, synthetic construct
HEKPKNV

SEQ ID NO: 177474 - protein, 7 aa, synthetic construct
TIGPKFT

SEQ ID NO: 177475 - protein, 7 aa, synthetic construct
SEKVKFY

SEQ ID NO: 177476 - protein, 7 aa, synthetic construct
PEKPKYV

SEQ ID NO: 177477 - protein, 7 aa, synthetic construct
TEKPRFG

SEQ ID NO: 177478 - protein, 7 aa, synthetic construct
REGAKFT

SEQ ID NO: 177479 - protein, 7 aa, synthetic construct
GEIGKRT

SEQ ID NO: 177480 - protein, 7 aa, synthetic construct
REKPKMD

SEQ ID NO: 177481 - protein, 7 aa, synthetic construct
GDKPKAN

SEQ ID NO: 177482 - protein, 7 aa, synthetic construct
GETPKRP

SEQ ID NO: 177483 - protein, 7 aa, synthetic construct
YDKPKST

SEQ ID NO: 177484 - protein, 7 aa, synthetic construct
GEKPNRT

SEQ ID NO: 177485 - protein, 7 aa, synthetic construct
GESPKNK

SEQ ID NO: 177486 - protein, 7 aa, synthetic construct
GRKPDVT

SEQ ID NO: 177487 - protein, 7 aa, synthetic construct
MEKPKSQ

SEQ ID NO: 177488 - protein, 7 aa, synthetic construct
GEKPILR

SEQ ID NO: 177489 - protein, 7 aa, synthetic construct
KEHLKFT

SEQ ID NO: 177490 - protein, 7 aa, synthetic construct
GEKPRVV

SEQ ID NO: 177491 - protein, 7 aa, synthetic construct
GEKIKMY

SEQ ID NO: 177492 - protein, 7 aa, synthetic construct
GEQPKFR

SEQ ID NO: 177493 - protein, 7 aa, synthetic construct
QEKPKIT

SEQ ID NO: 177494 - protein, 7 aa, synthetic construct
REHPKFT

SEQ ID NO: 177495 - protein, 7 aa, synthetic construct
PERPKFT

SEQ ID NO: 177496 - protein, 7 aa, synthetic construct
GEKPRSS

SEQ ID NO: 177497 - protein, 7 aa, synthetic construct
GERNKIT

SEQ ID NO: 177498 - protein, 7 aa, synthetic construct
GEKNRIT

SEQ ID NO: 177499 - protein, 7 aa, synthetic construct
HPKPKFD

SEQ ID NO: 177500 - protein, 7 aa, synthetic construct
PEKPKVH

SEQ ID NO: 177501 - protein, 7 aa, synthetic construct
MEIPKFK

SEQ ID NO: 177502 - protein, 7 aa, synthetic construct
RESSKFT

SEQ ID NO: 177503 - protein, 7 aa, synthetic construct
FHKPKDT

SEQ ID NO: 177504 - protein, 7 aa, synthetic construct
GRKPEFT

SEQ ID NO: 177505 - protein, 7 aa, synthetic construct
EHKPKST

SEQ ID NO: 177506 - protein, 7 aa, synthetic construct
GERGKFV

SEQ ID NO: 177507 - protein, 7 aa, synthetic construct
GEKMKWS

SEQ ID NO: 177508 - protein, 7 aa, synthetic construct
GEKPRSN

SEQ ID NO: 177509 - protein, 7 aa, synthetic construct
GTHSKFT

SEQ ID NO: 177510 - protein, 7 aa, synthetic construct
GEAPKFR

SEQ ID NO: 177511 - protein, 7 aa, synthetic construct
SHPPKFT

SEQ ID NO: 177512 - protein, 7 aa, synthetic construct
MEKRTFT

SEQ ID NO: 177513 - protein, 7 aa, synthetic construct
VEKPVFR

SEQ ID NO: 177514 - protein, 7 aa, synthetic construct
QEAPKRT

SEQ ID NO: 177515 - protein, 7 aa, synthetic construct
GTKPHFV

SEQ ID NO: 177516 - protein, 7 aa, synthetic construct
GEKAKSW

SEQ ID NO: 177517 - protein, 7 aa, synthetic construct
VEKPKHI

SEQ ID NO: 177518 - protein, 7 aa, synthetic construct
IEKPKVF

SEQ ID NO: 177519 - protein, 7 aa, synthetic construct
GRSPKFD

SEQ ID NO: 177520 - protein, 7 aa, synthetic construct
GEFPKNK

SEQ ID NO: 177521 - protein, 7 aa, synthetic construct
GDKPKVV

SEQ ID NO: 177522 - protein, 7 aa, synthetic construct
QEKPKLQ

SEQ ID NO: 177523 - protein, 7 aa, synthetic construct
PFKPKFD

SEQ ID NO: 177524 - protein, 7 aa, synthetic construct
GEKRQFI

SEQ ID NO: 177525 - protein, 7 aa, synthetic construct
DVKPKFG

SEQ ID NO: 177526 - protein, 7 aa, synthetic construct
MEKPKAY

SEQ ID NO: 177527 - protein, 7 aa, synthetic construct
DGKQKFT

SEQ ID NO: 177528 - protein, 7 aa, synthetic construct
GEKRNFT

SEQ ID NO: 177529 - protein, 7 aa, synthetic construct
YEKYKNT

SEQ ID NO: 177530 - protein, 7 aa, synthetic construct
LTKPKFD

SEQ ID NO: 177531 - protein, 7 aa, synthetic construct
GEFKKFT

SEQ ID NO: 177532 - protein, 7 aa, synthetic construct
LEKPKHM

SEQ ID NO: 177533 - protein, 7 aa, synthetic construct
PEKVKFI

SEQ ID NO: 177534 - protein, 7 aa, synthetic construct
NEKPKFS

SEQ ID NO: 177535 - protein, 7 aa, synthetic construct
KEKPMFY

SEQ ID NO: 177536 - protein, 7 aa, synthetic construct
DYKPKHT

SEQ ID NO: 177537 - protein, 7 aa, synthetic construct
ENKPKFQ

SEQ ID NO: 177538 - protein, 7 aa, synthetic construct
SEKPKYN

SEQ ID NO: 177539 - protein, 7 aa, synthetic construct
IEKSRFT

SEQ ID NO: 177540 - protein, 7 aa, synthetic construct
GEKYKSQ

SEQ ID NO: 177541 - protein, 7 aa, synthetic construct
SEKPKAM

SEQ ID NO: 177542 - protein, 7 aa, synthetic construct
TEKPKGQ

SEQ ID NO: 177543 - protein, 7 aa, synthetic construct
SEKPKHT

SEQ ID NO: 177544 - protein, 7 aa, synthetic construct
GEKRQST

SEQ ID NO: 177545 - protein, 7 aa, synthetic construct
GGKQKDT

SEQ ID NO: 177546 - protein, 7 aa, synthetic construct
IEKPRVT

SEQ ID NO: 177547 - protein, 7 aa, synthetic construct
GEIPKKY

SEQ ID NO: 177548 - protein, 7 aa, synthetic construct
YLKPKDT

SEQ ID NO: 177549 - protein, 7 aa, synthetic construct
DPKPKHT

SEQ ID NO: 177550 - protein, 7 aa, synthetic construct
QEKPKQQ

SEQ ID NO: 177551 - protein, 7 aa, synthetic construct
LDKPKFF

SEQ ID NO: 177552 - protein, 7 aa, synthetic construct
TEKPRAT

SEQ ID NO: 177553 - protein, 7 aa, synthetic construct
MDKPKFQ

SEQ ID NO: 177554 - protein, 7 aa, synthetic construct
EIKQKFT

SEQ ID NO: 177555 - protein, 7 aa, synthetic construct
SFKPKDT

SEQ ID NO: 177556 - protein, 7 aa, synthetic construct
FEKPKSH

SEQ ID NO: 177557 - protein, 7 aa, synthetic construct
IEKPKFN

SEQ ID NO: 177558 - protein, 7 aa, synthetic construct
GFKQKDT

SEQ ID NO: 177559 - protein, 7 aa, synthetic construct
GTDRKFT

SEQ ID NO: 177560 - protein, 7 aa, synthetic construct
GEKMKFF

SEQ ID NO: 177561 - protein, 7 aa, synthetic construct
GEPPKIR

SEQ ID NO: 177562 - protein, 7 aa, synthetic construct
IEQPKRT

SEQ ID NO: 177563 - protein, 7 aa, synthetic construct
DPKPKFM

SEQ ID NO: 177564 - protein, 7 aa, synthetic construct
GVNPKYT

SEQ ID NO: 177565 - protein, 7 aa, synthetic construct
EAKPKFQ

SEQ ID NO: 177566 - protein, 7 aa, synthetic construct
GRKPDQT

SEQ ID NO: 177567 - protein, 7 aa, synthetic construct
NEKPKYA

SEQ ID NO: 177568 - protein, 7 aa, synthetic construct
HEKFKFS

SEQ ID NO: 177569 - protein, 7 aa, synthetic construct
GEVMKFK

SEQ ID NO: 177570 - protein, 7 aa, synthetic construct
PEKPKPH

SEQ ID NO: 177571 - protein, 7 aa, synthetic construct
GRKPPFE

SEQ ID NO: 177572 - protein, 7 aa, synthetic construct
GHPPKFQ

SEQ ID NO: 177573 - protein, 7 aa, synthetic construct
GAKFKFD

SEQ ID NO: 177574 - protein, 7 aa, synthetic construct
GYKPRDT

SEQ ID NO: 177575 - protein, 7 aa, synthetic construct
FEKYKQT

SEQ ID NO: 177576 - protein, 7 aa, synthetic construct
ETKPKPT

SEQ ID NO: 177577 - protein, 7 aa, synthetic construct
GEQKKFS

SEQ ID NO: 177578 - protein, 7 aa, synthetic construct
EYKPKFG

SEQ ID NO: 177579 - protein, 7 aa, synthetic construct
GIIPKHT

SEQ ID NO: 177580 - protein, 7 aa, synthetic construct
AEKPKWA

SEQ ID NO: 177581 - protein, 7 aa, synthetic construct
DPKPKFT

SEQ ID NO: 177582 - protein, 7 aa, synthetic construct
GERPKFN

SEQ ID NO: 177583 - protein, 7 aa, synthetic construct
AEKPKGL

SEQ ID NO: 177584 - protein, 7 aa, synthetic construct
NFKPKDT

SEQ ID NO: 177585 - protein, 7 aa, synthetic construct
METPKFK

SEQ ID NO: 177586 - protein, 7 aa, synthetic construct
QEKPKAN

SEQ ID NO: 177587 - protein, 7 aa, synthetic construct
GEFPKMK

SEQ ID NO: 177588 - protein, 7 aa, synthetic construct
GEKRLMT

SEQ ID NO: 177589 - protein, 7 aa, synthetic construct
TMTPKFT

SEQ ID NO: 177590 - protein, 7 aa, synthetic construct
VAKPKFD

SEQ ID NO: 177591 - protein, 7 aa, synthetic construct
DHKPKQT

SEQ ID NO: 177592 - protein, 7 aa, synthetic construct
RMKPDFT

SEQ ID NO: 177593 - protein, 7 aa, synthetic construct
GTEPKFR

SEQ ID NO: 177594 - protein, 7 aa, synthetic construct
DRKPSFT

SEQ ID NO: 177595 - protein, 7 aa, synthetic construct
NEKPKFI

SEQ ID NO: 177596 - protein, 7 aa, synthetic construct
GESAKFR

SEQ ID NO: 177597 - protein, 7 aa, synthetic construct
PEKPKGN

SEQ ID NO: 177598 - protein, 7 aa, synthetic construct
GETLKRT

SEQ ID NO: 177599 - protein, 7 aa, synthetic construct
PEKPRAT

SEQ ID NO: 177600 - protein, 7 aa, synthetic construct
REKPLPT

SEQ ID NO: 177601 - protein, 7 aa, synthetic construct
AENPKRT

SEQ ID NO: 177602 - protein, 7 aa, synthetic construct
DHKPKFN

SEQ ID NO: 177603 - protein, 7 aa, synthetic construct
GEKPAAR

SEQ ID NO: 177604 - protein, 7 aa, synthetic construct
TEKPART

SEQ ID NO: 177605 - protein, 7 aa, synthetic construct
GHVPKFG

SEQ ID NO: 177606 - protein, 7 aa, synthetic construct
QEKPKGL

SEQ ID NO: 177607 - protein, 7 aa, synthetic construct
DNKPKIT

SEQ ID NO: 177608 - protein, 7 aa, synthetic construct
GDKPKVI

SEQ ID NO: 177609 - protein, 7 aa, synthetic construct
GMKPKHD

SEQ ID NO: 177610 - protein, 7 aa, synthetic construct
GEKQKRE

SEQ ID NO: 177611 - protein, 7 aa, synthetic construct
GEPPKRV

SEQ ID NO: 177612 - protein, 7 aa, synthetic construct
NEKMKFF

SEQ ID NO: 177613 - protein, 7 aa, synthetic construct
QEKPKTW

SEQ ID NO: 177614 - protein, 7 aa, synthetic construct
LESPKFR

SEQ ID NO: 177615 - protein, 7 aa, synthetic construct
SGKPKFD

SEQ ID NO: 177616 - protein, 7 aa, synthetic construct
GEKRTFQ

SEQ ID NO: 177617 - protein, 7 aa, synthetic construct
GEKIPFR

SEQ ID NO: 177618 - protein, 7 aa, synthetic construct
REKPTFS

SEQ ID NO: 177619 - protein, 7 aa, synthetic construct
GEKPMTR

SEQ ID NO: 177620 - protein, 7 aa, synthetic construct
GDKPRFT

SEQ ID NO: 177621 - protein, 7 aa, synthetic construct
AEKPKLF

SEQ ID NO: 177622 - protein, 7 aa, synthetic construct
GEKRSFN

SEQ ID NO: 177623 - protein, 7 aa, synthetic construct
TEQPKKT

SEQ ID NO: 177624 - protein, 7 aa, synthetic construct
GVTPKYT

SEQ ID NO: 177625 - protein, 7 aa, synthetic construct
TEKFKYT

SEQ ID NO: 177626 - protein, 7 aa, synthetic construct
EYKAKFT

SEQ ID NO: 177627 - protein, 7 aa, synthetic construct
GDTKKFT

SEQ ID NO: 177628 - protein, 7 aa, synthetic construct
GEIPRKT

SEQ ID NO: 177629 - protein, 7 aa, synthetic construct
EEKPKLK

SEQ ID NO: 177630 - protein, 7 aa, synthetic construct
DSKPKFT

SEQ ID NO: 177631 - protein, 7 aa, synthetic construct
GETMKRT

SEQ ID NO: 177632 - protein, 7 aa, synthetic construct
NEKPKKD

SEQ ID NO: 177633 - protein, 7 aa, synthetic construct
AEKPSRT

SEQ ID NO: 177634 - protein, 7 aa, synthetic construct
ELKPKFH

SEQ ID NO: 177635 - protein, 7 aa, synthetic construct
GEKRSQT

SEQ ID NO: 177636 - protein, 7 aa, synthetic construct
AEKPKFG

SEQ ID NO: 177637 - protein, 7 aa, synthetic construct
GHKVKDT

SEQ ID NO: 177638 - protein, 7 aa, synthetic construct
GEGTKRT

SEQ ID NO: 177639 - protein, 7 aa, synthetic construct
GEAVKKT

SEQ ID NO: 177640 - protein, 7 aa, synthetic construct
GGAPKHT

SEQ ID NO: 177641 - protein, 7 aa, synthetic construct
HEKPRFN

SEQ ID NO: 177642 - protein, 7 aa, synthetic construct
LEKNRFT

SEQ ID NO: 177643 - protein, 7 aa, synthetic construct
LEKPKSQ

SEQ ID NO: 177644 - protein, 7 aa, synthetic construct
GSVPKFQ

SEQ ID NO: 177645 - protein, 7 aa, synthetic construct
GEKPFPR

SEQ ID NO: 177646 - protein, 7 aa, synthetic construct
GEKKKDS

SEQ ID NO: 177647 - protein, 7 aa, synthetic construct
GEKPQRY

SEQ ID NO: 177648 - protein, 7 aa, synthetic construct
EKKPSFT

SEQ ID NO: 177649 - protein, 7 aa, synthetic construct
GEKPVRT

SEQ ID NO: 177650 - protein, 7 aa, synthetic construct
HEKPKNI

SEQ ID NO: 177651 - protein, 7 aa, synthetic construct
GEKIRGT

SEQ ID NO: 177652 - protein, 7 aa, synthetic construct
IEMPKRT

SEQ ID NO: 177653 - protein, 7 aa, synthetic construct
LEKPRST

SEQ ID NO: 177654 - protein, 7 aa, synthetic construct
VEKPKLF

SEQ ID NO: 177655 - protein, 7 aa, synthetic construct
ETKPKFN

SEQ ID NO: 177656 - protein, 7 aa, synthetic construct
YIKPKFE

SEQ ID NO: 177657 - protein, 7 aa, synthetic construct
EEKVKKT

SEQ ID NO: 177658 - protein, 7 aa, synthetic construct
GERPKPL

SEQ ID NO: 177659 - protein, 7 aa, synthetic construct
GEKQRNT

SEQ ID NO: 177660 - protein, 7 aa, synthetic construct
GEMGKRT

SEQ ID NO: 177661 - protein, 7 aa, synthetic construct
GEKPRNQ

SEQ ID NO: 177662 - protein, 7 aa, synthetic construct
LRKPDFT

SEQ ID NO: 177663 - protein, 7 aa, synthetic construct
QEKPKFN

SEQ ID NO: 177664 - protein, 7 aa, synthetic construct
SWKPKDT

SEQ ID NO: 177665 - protein, 7 aa, synthetic construct
NEKPKIW

SEQ ID NO: 177666 - protein, 7 aa, synthetic construct
FDKPKFH

SEQ ID NO: 177667 - protein, 7 aa, synthetic construct
QEAPKKT

SEQ ID NO: 177668 - protein, 7 aa, synthetic construct
QMTPKFT

SEQ ID NO: 177669 - protein, 7 aa, synthetic construct
ETKPKHT

SEQ ID NO: 177670 - protein, 7 aa, synthetic construct
LEKPKSW

SEQ ID NO: 177671 - protein, 7 aa, synthetic construct
HEKPKVY

SEQ ID NO: 177672 - protein, 7 aa, synthetic construct
QYKPKDT

SEQ ID NO: 177673 - protein, 7 aa, synthetic construct
KEKPVWT

SEQ ID NO: 177674 - protein, 7 aa, synthetic construct
IESPKRT

SEQ ID NO: 177675 - protein, 7 aa, synthetic construct
GEGMKRT

SEQ ID NO: 177676 - protein, 7 aa, synthetic construct
GEKRMST

SEQ ID NO: 177677 - protein, 7 aa, synthetic construct
PERTKFT

SEQ ID NO: 177678 - protein, 7 aa, synthetic construct
GEIPKNK

SEQ ID NO: 177679 - protein, 7 aa, synthetic construct
SISPKFT

SEQ ID NO: 177680 - protein, 7 aa, synthetic construct
QEKPKSA

SEQ ID NO: 177681 - protein, 7 aa, synthetic construct
SEKPKLY

SEQ ID NO: 177682 - protein, 7 aa, synthetic construct
DMKPKFS

SEQ ID NO: 177683 - protein, 7 aa, synthetic construct
GSHPKTT

SEQ ID NO: 177684 - protein, 7 aa, synthetic construct
GGKPKYD

SEQ ID NO: 177685 - protein, 7 aa, synthetic construct
LELPKFK

SEQ ID NO: 177686 - protein, 7 aa, synthetic construct
MEKRGFT

SEQ ID NO: 177687 - protein, 7 aa, synthetic construct
GEQPKKM

SEQ ID NO: 177688 - protein, 7 aa, synthetic construct
DRAPKFT

SEQ ID NO: 177689 - protein, 7 aa, synthetic construct
GDIKKFT

SEQ ID NO: 177690 - protein, 7 aa, synthetic construct
KEFPKFN

SEQ ID NO: 177691 - protein, 7 aa, synthetic construct
AEKPRQT

SEQ ID NO: 177692 - protein, 7 aa, synthetic construct
AEKIKFM

SEQ ID NO: 177693 - protein, 7 aa, synthetic construct
NEPPKFR

SEQ ID NO: 177694 - protein, 7 aa, synthetic construct
IEKPKHV

SEQ ID NO: 177695 - protein, 7 aa, synthetic construct
GEIPKGR

SEQ ID NO: 177696 - protein, 7 aa, synthetic construct
PEKPKAA

SEQ ID NO: 177697 - protein, 7 aa, synthetic construct
EHKPKFP

SEQ ID NO: 177698 - protein, 7 aa, synthetic construct
PDKPKFT

SEQ ID NO: 177699 - protein, 7 aa, synthetic construct
QEQPKRT

SEQ ID NO: 177700 - protein, 7 aa, synthetic construct
AEKHKFM

SEQ ID NO: 177701 - protein, 7 aa, synthetic construct
GERPKFA

SEQ ID NO: 177702 - protein, 7 aa, synthetic construct
GEKRGFN

SEQ ID NO: 177703 - protein, 7 aa, synthetic construct
GEKPKML

SEQ ID NO: 177704 - protein, 7 aa, synthetic construct
LEKQRFT

SEQ ID NO: 177705 - protein, 7 aa, synthetic construct
GEKPKFG

SEQ ID NO: 177706 - protein, 7 aa, synthetic construct
GKKPDFF

SEQ ID NO: 177707 - protein, 7 aa, synthetic construct
ENKPKNT

SEQ ID NO: 177708 - protein, 7 aa, synthetic construct
GMKPKGD

SEQ ID NO: 177709 - protein, 7 aa, synthetic construct
GVKHKFD

SEQ ID NO: 177710 - protein, 7 aa, synthetic construct
KEHPKFN

SEQ ID NO: 177711 - protein, 7 aa, synthetic construct
DEKKKFL

SEQ ID NO: 177712 - protein, 7 aa, synthetic construct
GELRKFG

SEQ ID NO: 177713 - protein, 7 aa, synthetic construct
IEKPKWN

SEQ ID NO: 177714 - protein, 7 aa, synthetic construct
GENPKKY

SEQ ID NO: 177715 - protein, 7 aa, synthetic construct
NERPKFT

SEQ ID NO: 177716 - protein, 7 aa, synthetic construct
GSTIKFT

SEQ ID NO: 177717 - protein, 7 aa, synthetic construct
VERPKFA

SEQ ID NO: 177718 - protein, 7 aa, synthetic construct
HEKPKNM

SEQ ID NO: 177719 - protein, 7 aa, synthetic construct
GEPPKKL

SEQ ID NO: 177720 - protein, 7 aa, synthetic construct
MEKPKHQ

SEQ ID NO: 177721 - protein, 7 aa, synthetic construct
LEKRPFT

SEQ ID NO: 177722 - protein, 7 aa, synthetic construct
GQKPKDF

SEQ ID NO: 177723 - protein, 7 aa, synthetic construct
GEKMKGW

SEQ ID NO: 177724 - protein, 7 aa, synthetic construct
SEKPKAW

SEQ ID NO: 177725 - protein, 7 aa, synthetic construct
GDSPKFR

SEQ ID NO: 177726 - protein, 7 aa, synthetic construct
GQKQKFD

SEQ ID NO: 177727 - protein, 7 aa, synthetic construct
HSGPKFT

SEQ ID NO: 177728 - protein, 7 aa, synthetic construct
MEKNKFY

SEQ ID NO: 177729 - protein, 7 aa, synthetic construct
GEKKHFM

SEQ ID NO: 177730 - protein, 7 aa, synthetic construct
NNKPKDT

SEQ ID NO: 177731 - protein, 7 aa, synthetic construct
GEKPRVL

SEQ ID NO: 177732 - protein, 7 aa, synthetic construct
SEKPKQW

SEQ ID NO: 177733 - protein, 7 aa, synthetic construct
TEPPKFR

SEQ ID NO: 177734 - protein, 7 aa, synthetic construct
GEKRPVT

SEQ ID NO: 177735 - protein, 7 aa, synthetic construct
GEGVKFK

SEQ ID NO: 177736 - protein, 7 aa, synthetic construct
TDKPKFI

SEQ ID NO: 177737 - protein, 7 aa, synthetic construct
NEKHKFM

SEQ ID NO: 177738 - protein, 7 aa, synthetic construct
NEKPKFL

SEQ ID NO: 177739 - protein, 7 aa, synthetic construct
GEPNKFK

SEQ ID NO: 177740 - protein, 7 aa, synthetic construct
REKGSFT

SEQ ID NO: 177741 - protein, 7 aa, synthetic construct
GEKVKHY

SEQ ID NO: 177742 - protein, 7 aa, synthetic construct
GEKIRFN

SEQ ID NO: 177743 - protein, 7 aa, synthetic construct
GENKKFY

SEQ ID NO: 177744 - protein, 7 aa, synthetic construct
GGKMKDT

SEQ ID NO: 177745 - protein, 7 aa, synthetic construct
GANPKHT

SEQ ID NO: 177746 - protein, 7 aa, synthetic construct
TEKHRFT

SEQ ID NO: 177747 - protein, 7 aa, synthetic construct
GEKKSYT

SEQ ID NO: 177748 - protein, 7 aa, synthetic construct
GEKIRFS

SEQ ID NO: 177749 - protein, 7 aa, synthetic construct
GEKTKLW

SEQ ID NO: 177750 - protein, 7 aa, synthetic construct
DIRPKFT

SEQ ID NO: 177751 - protein, 7 aa, synthetic construct
GEMPKRT

SEQ ID NO: 177752 - protein, 7 aa, synthetic construct
GEKHVRT

SEQ ID NO: 177753 - protein, 7 aa, synthetic construct
AMQPKFT

SEQ ID NO: 177754 - protein, 7 aa, synthetic construct
HEKPKQN

SEQ ID NO: 177755 - protein, 7 aa, synthetic construct
MEKPKTW

SEQ ID NO: 177756 - protein, 7 aa, synthetic construct
GNKMKDT

SEQ ID NO: 177757 - protein, 7 aa, synthetic construct
GENPKTK

SEQ ID NO: 177758 - protein, 7 aa, synthetic construct
GYKVKFE

SEQ ID NO: 177759 - protein, 7 aa, synthetic construct
MEKPKTQ

SEQ ID NO: 177760 - protein, 7 aa, synthetic construct
GEHKKFV

SEQ ID NO: 177761 - protein, 7 aa, synthetic construct
GEVRKNT

SEQ ID NO: 177762 - protein, 7 aa, synthetic construct
GIKFKFE

SEQ ID NO: 177763 - protein, 7 aa, synthetic construct
GRKPEFM

SEQ ID NO: 177764 - protein, 7 aa, synthetic construct
GEQPKKA

SEQ ID NO: 177765 - protein, 7 aa, synthetic construct
QEKYKFG

SEQ ID NO: 177766 - protein, 7 aa, synthetic construct
ELKPKFA

SEQ ID NO: 177767 - protein, 7 aa, synthetic construct
GVKPRFD

SEQ ID NO: 177768 - protein, 7 aa, synthetic construct
KESPRFT

SEQ ID NO: 177769 - protein, 7 aa, synthetic construct
GHKPAFG

SEQ ID NO: 177770 - protein, 7 aa, synthetic construct
AEKPKLY

SEQ ID NO: 177771 - protein, 7 aa, synthetic construct
EGKPKFP

SEQ ID NO: 177772 - protein, 7 aa, synthetic construct
PEKPKFN

SEQ ID NO: 177773 - protein, 7 aa, synthetic construct
GPKPRFE

SEQ ID NO: 177774 - protein, 7 aa, synthetic construct
GEKPRVH

SEQ ID NO: 177775 - protein, 7 aa, synthetic construct
AEKPKVQ

SEQ ID NO: 177776 - protein, 7 aa, synthetic construct
GTKPYMT

SEQ ID NO: 177777 - protein, 7 aa, synthetic construct
GEAGKFK

SEQ ID NO: 177778 - protein, 7 aa, synthetic construct
PEKPKHT

SEQ ID NO: 177779 - protein, 7 aa, synthetic construct
DFKPKFG

SEQ ID NO: 177780 - protein, 7 aa, synthetic construct
IEKPKHY

SEQ ID NO: 177781 - protein, 7 aa, synthetic construct
GEVKKHT

SEQ ID NO: 177782 - protein, 7 aa, synthetic construct
GEKPNNK

SEQ ID NO: 177783 - protein, 7 aa, synthetic construct
GEKLKWS

SEQ ID NO: 177784 - protein, 7 aa, synthetic construct
EIKPKHT

SEQ ID NO: 177785 - protein, 7 aa, synthetic construct
GEKKQNT

SEQ ID NO: 177786 - protein, 7 aa, synthetic construct
GEKYKSS

SEQ ID NO: 177787 - protein, 7 aa, synthetic construct
HEKPNFK

SEQ ID NO: 177788 - protein, 7 aa, synthetic construct
GEKQKYN

SEQ ID NO: 177789 - protein, 7 aa, synthetic construct
GEGPKKQ

SEQ ID NO: 177790 - protein, 7 aa, synthetic construct
ETKPKFV

SEQ ID NO: 177791 - protein, 7 aa, synthetic construct
PEKVKFS

SEQ ID NO: 177792 - protein, 7 aa, synthetic construct
GEKPKVQ

SEQ ID NO: 177793 - protein, 7 aa, synthetic construct
GDKPKNF

SEQ ID NO: 177794 - protein, 7 aa, synthetic construct
GEATKFR

SEQ ID NO: 177795 - protein, 7 aa, synthetic construct
GEQPKRV

SEQ ID NO: 177796 - protein, 7 aa, synthetic construct
YSKPKDT

SEQ ID NO: 177797 - protein, 7 aa, synthetic construct
NEKPTFR

SEQ ID NO: 177798 - protein, 7 aa, synthetic construct
SERPKFI

SEQ ID NO: 177799 - protein, 7 aa, synthetic construct
GDKPKNS

SEQ ID NO: 177800 - protein, 7 aa, synthetic construct
GEKPRTM

SEQ ID NO: 177801 - protein, 7 aa, synthetic construct
GEKNTFR

SEQ ID NO: 177802 - protein, 7 aa, synthetic construct
GRKPSDT

SEQ ID NO: 177803 - protein, 7 aa, synthetic construct
GEAIKFK

SEQ ID NO: 177804 - protein, 7 aa, synthetic construct
SENPKRT

SEQ ID NO: 177805 - protein, 7 aa, synthetic construct
QERPKFS

SEQ ID NO: 177806 - protein, 7 aa, synthetic construct
NEKKKFD

SEQ ID NO: 177807 - protein, 7 aa, synthetic construct
AEKPMRT

SEQ ID NO: 177808 - protein, 7 aa, synthetic construct
PEKPKNM

SEQ ID NO: 177809 - protein, 7 aa, synthetic construct
NEKHKFL

SEQ ID NO: 177810 - protein, 7 aa, synthetic construct
GEKKHFV

SEQ ID NO: 177811 - protein, 7 aa, synthetic construct
VENPKFR

SEQ ID NO: 177812 - protein, 7 aa, synthetic construct
GAQPKFG

SEQ ID NO: 177813 - protein, 7 aa, synthetic construct
GEKRTGT

SEQ ID NO: 177814 - protein, 7 aa, synthetic construct
AEKPKFL

SEQ ID NO: 177815 - protein, 7 aa, synthetic construct
GEKKKMD

SEQ ID NO: 177816 - protein, 7 aa, synthetic construct
GEFNKRT

SEQ ID NO: 177817 - protein, 7 aa, synthetic construct
GEAKKFF

SEQ ID NO: 177818 - protein, 7 aa, synthetic construct
GGKPKFD

SEQ ID NO: 177819 - protein, 7 aa, synthetic construct
GKKPDFH

SEQ ID NO: 177820 - protein, 7 aa, synthetic construct
FEKPKAF

SEQ ID NO: 177821 - protein, 7 aa, synthetic construct
FEKPKVQ

SEQ ID NO: 177822 - protein, 7 aa, synthetic construct
GEIVKKT

SEQ ID NO: 177823 - protein, 7 aa, synthetic construct
DRTPKFT

SEQ ID NO: 177824 - protein, 7 aa, synthetic construct
LEKPKFG

SEQ ID NO: 177825 - protein, 7 aa, synthetic construct
GDKPKGW

SEQ ID NO: 177826 - protein, 7 aa, synthetic construct
GEPPKKN

SEQ ID NO: 177827 - protein, 7 aa, synthetic construct
SEKPKPW

SEQ ID NO: 177828 - protein, 7 aa, synthetic construct
GERKNFT

SEQ ID NO: 177829 - protein, 7 aa, synthetic construct
PEKPKHA

SEQ ID NO: 177830 - protein, 7 aa, synthetic construct
GSHPKQT

SEQ ID NO: 177831 - protein, 7 aa, synthetic construct
GSHPKST

SEQ ID NO: 177832 - protein, 7 aa, synthetic construct
AEKPRTT

SEQ ID NO: 177833 - protein, 7 aa, synthetic construct
QDKPKFT

SEQ ID NO: 177834 - protein, 7 aa, synthetic construct
GHGPKFV

SEQ ID NO: 177835 - protein, 7 aa, synthetic construct
GEKQQRT

SEQ ID NO: 177836 - protein, 7 aa, synthetic construct
VFKPKFE

SEQ ID NO: 177837 - protein, 7 aa, synthetic construct
FEKPKNI

SEQ ID NO: 177838 - protein, 7 aa, synthetic construct
PEKPKTV

SEQ ID NO: 177839 - protein, 7 aa, synthetic construct
KEIPKFI

SEQ ID NO: 177840 - protein, 7 aa, synthetic construct
GEKRSVT

SEQ ID NO: 177841 - protein, 7 aa, synthetic construct
REKPHFV

SEQ ID NO: 177842 - protein, 7 aa, synthetic construct
GRKPTFE

SEQ ID NO: 177843 - protein, 7 aa, synthetic construct
GEYKKFG

SEQ ID NO: 177844 - protein, 7 aa, synthetic construct
ELKPKFN

SEQ ID NO: 177845 - protein, 7 aa, synthetic construct
GEARKMT

SEQ ID NO: 177846 - protein, 7 aa, synthetic construct
GEKPFKL

SEQ ID NO: 177847 - protein, 7 aa, synthetic construct
QEKRVFT

SEQ ID NO: 177848 - protein, 7 aa, synthetic construct
SEKRPFT

SEQ ID NO: 177849 - protein, 7 aa, synthetic construct
GEKPRYV

SEQ ID NO: 177850 - protein, 7 aa, synthetic construct
GEKFKFN

SEQ ID NO: 177851 - protein, 7 aa, synthetic construct
MEKPKHN

SEQ ID NO: 177852 - protein, 7 aa, synthetic construct
GEKKPFN

SEQ ID NO: 177853 - protein, 7 aa, synthetic construct
GEVNKFR

SEQ ID NO: 177854 - protein, 7 aa, synthetic construct
GENRKQT

SEQ ID NO: 177855 - protein, 7 aa, synthetic construct
ERPPKFT

SEQ ID NO: 177856 - protein, 7 aa, synthetic construct
NEKPKSM

SEQ ID NO: 177857 - protein, 7 aa, synthetic construct
GDNPKFR

SEQ ID NO: 177858 - protein, 7 aa, synthetic construct
GNPPKHT

SEQ ID NO: 177859 - protein, 7 aa, synthetic construct
FENPKFK

SEQ ID NO: 177860 - protein, 7 aa, synthetic construct
KEMPRFT

SEQ ID NO: 177861 - protein, 7 aa, synthetic construct
DTKPKFT

SEQ ID NO: 177862 - protein, 7 aa, synthetic construct
GDKPSRT

SEQ ID NO: 177863 - protein, 7 aa, synthetic construct
GEKPIRT

SEQ ID NO: 177864 - protein, 7 aa, synthetic construct
SEKPKMY

SEQ ID NO: 177865 - protein, 7 aa, synthetic construct
GEVKKFH

SEQ ID NO: 177866 - protein, 7 aa, synthetic construct
IDKPKFF

SEQ ID NO: 177867 - protein, 7 aa, synthetic construct
GESPKFR

SEQ ID NO: 177868 - protein, 7 aa, synthetic construct
DNKPKVT

SEQ ID NO: 177869 - protein, 7 aa, synthetic construct
HEKPKNN

SEQ ID NO: 177870 - protein, 7 aa, synthetic construct
FEKPKIN

SEQ ID NO: 177871 - protein, 7 aa, synthetic construct
GEKPPRL

SEQ ID NO: 177872 - protein, 7 aa, synthetic construct
GEAAKRT

SEQ ID NO: 177873 - protein, 7 aa, synthetic construct
TEKPRFS

SEQ ID NO: 177874 - protein, 7 aa, synthetic construct
HEQPKKT

SEQ ID NO: 177875 - protein, 7 aa, synthetic construct
ELKPKFG

SEQ ID NO: 177876 - protein, 7 aa, synthetic construct
QEKPTRT

SEQ ID NO: 177877 - protein, 7 aa, synthetic construct
LEKPKWT

SEQ ID NO: 177878 - protein, 7 aa, synthetic construct
GDKPKFG

SEQ ID NO: 177879 - protein, 7 aa, synthetic construct
SEKPRFP

SEQ ID NO: 177880 - protein, 7 aa, synthetic construct
NENRKFT

SEQ ID NO: 177881 - protein, 7 aa, synthetic construct
GEKHRGT

SEQ ID NO: 177882 - protein, 7 aa, synthetic construct
ENKPKLT

SEQ ID NO: 177883 - protein, 7 aa, synthetic construct
GEAPKKL

SEQ ID NO: 177884 - protein, 7 aa, synthetic construct
GEKPIKQ

SEQ ID NO: 177885 - protein, 7 aa, synthetic construct
PDKPKFQ

SEQ ID NO: 177886 - protein, 7 aa, synthetic construct
ESKPKFL

SEQ ID NO: 177887 - protein, 7 aa, synthetic construct
GERPKAF

SEQ ID NO: 177888 - protein, 7 aa, synthetic construct
GRKPVDT

SEQ ID NO: 177889 - protein, 7 aa, synthetic construct
QAKPKFD

SEQ ID NO: 177890 - protein, 7 aa, synthetic construct
GEKPASR

SEQ ID NO: 177891 - protein, 7 aa, synthetic construct
GEQPKKN

SEQ ID NO: 177892 - protein, 7 aa, synthetic construct
GEIPKMR

SEQ ID NO: 177893 - protein, 7 aa, synthetic construct
DGKAKFT

SEQ ID NO: 177894 - protein, 7 aa, synthetic construct
NEKLKFL

SEQ ID NO: 177895 - protein, 7 aa, synthetic construct
TEKPKNL

SEQ ID NO: 177896 - protein, 7 aa, synthetic construct
GEKPKHP

SEQ ID NO: 177897 - protein, 7 aa, synthetic construct
GRKEKFD

SEQ ID NO: 177898 - protein, 7 aa, synthetic construct
ETKPRFT

SEQ ID NO: 177899 - protein, 7 aa, synthetic construct
GEKPNMR

SEQ ID NO: 177900 - protein, 7 aa, synthetic construct
NEKPKAY

SEQ ID NO: 177901 - protein, 7 aa, synthetic construct
GERPKQI

SEQ ID NO: 177902 - protein, 7 aa, synthetic construct
GENPKIK

SEQ ID NO: 177903 - protein, 7 aa, synthetic construct
HEKPKIV

SEQ ID NO: 177904 - protein, 7 aa, synthetic construct
KEKPIFV

SEQ ID NO: 177905 - protein, 7 aa, synthetic construct
REHPKPT

SEQ ID NO: 177906 - protein, 7 aa, synthetic construct
GKKPDFT

SEQ ID NO: 177907 - protein, 7 aa, synthetic construct
SEKPKYY

SEQ ID NO: 177908 - protein, 7 aa, synthetic construct
GEKPFVR

SEQ ID NO: 177909 - protein, 7 aa, synthetic construct
DEKPKRV

SEQ ID NO: 177910 - protein, 7 aa, synthetic construct
EEKKKFA

SEQ ID NO: 177911 - protein, 7 aa, synthetic construct
QEVPKRT

SEQ ID NO: 177912 - protein, 7 aa, synthetic construct
PEKPKGF

SEQ ID NO: 177913 - protein, 7 aa, synthetic construct
GEKIKYL

SEQ ID NO: 177914 - protein, 7 aa, synthetic construct
TEKPKYV

SEQ ID NO: 177915 - protein, 7 aa, synthetic construct
GEQRKFN

SEQ ID NO: 177916 - protein, 7 aa, synthetic construct
GEKPMNK

SEQ ID NO: 177917 - protein, 7 aa, synthetic construct
AEKPKMF

SEQ ID NO: 177918 - protein, 7 aa, synthetic construct
TERPKFM

SEQ ID NO: 177919 - protein, 7 aa, synthetic construct
GDKPKLL

SEQ ID NO: 177920 - protein, 7 aa, synthetic construct
GEHKKFS

SEQ ID NO: 177921 - protein, 7 aa, synthetic construct
NEIKKFT

SEQ ID NO: 177922 - protein, 7 aa, synthetic construct
EAKPKFN

SEQ ID NO: 177923 - protein, 7 aa, synthetic construct
PEKVKYT

SEQ ID NO: 177924 - protein, 7 aa, synthetic construct
YEKPKIY

SEQ ID NO: 177925 - protein, 7 aa, synthetic construct
QERPKPT

SEQ ID NO: 177926 - protein, 7 aa, synthetic construct
FEKPKTL

SEQ ID NO: 177927 - protein, 7 aa, synthetic construct
VGKPKFD

SEQ ID NO: 177928 - protein, 7 aa, synthetic construct
VEKPRFI

SEQ ID NO: 177929 - protein, 7 aa, synthetic construct
EVKPKFP

SEQ ID NO: 177930 - protein, 7 aa, synthetic construct
GVGPKYT

SEQ ID NO: 177931 - protein, 7 aa, synthetic construct
GEIPKRP

SEQ ID NO: 177932 - protein, 7 aa, synthetic construct
GEVPKRL

SEQ ID NO: 177933 - protein, 7 aa, synthetic construct
GESPKRV

SEQ ID NO: 177934 - protein, 7 aa, synthetic construct
DSKPKIT

SEQ ID NO: 177935 - protein, 7 aa, synthetic construct
RENPKPT

SEQ ID NO: 177936 - protein, 7 aa, synthetic construct
GDMPKFK

SEQ ID NO: 177937 - protein, 7 aa, synthetic construct
GEKPLRQ

SEQ ID NO: 177938 - protein, 7 aa, synthetic construct
QEKPKNS

SEQ ID NO: 177939 - protein, 7 aa, synthetic construct
GEASKFR

SEQ ID NO: 177940 - protein, 7 aa, synthetic construct
GEKPVKM

SEQ ID NO: 177941 - protein, 7 aa, synthetic construct
GENPKSR

SEQ ID NO: 177942 - protein, 7 aa, synthetic construct
EGKPKFL

SEQ ID NO: 177943 - protein, 7 aa, synthetic construct
SERPKPT

SEQ ID NO: 177944 - protein, 7 aa, synthetic construct
DNKPKFF

SEQ ID NO: 177945 - protein, 7 aa, synthetic construct
GGKPKSD

SEQ ID NO: 177946 - protein, 7 aa, synthetic construct
FEKPKSQ

SEQ ID NO: 177947 - protein, 7 aa, synthetic construct
YEIPKRT

SEQ ID NO: 177948 - protein, 7 aa, synthetic construct
FEKPKIM

SEQ ID NO: 177949 - protein, 7 aa, synthetic construct
GEKPRQA

SEQ ID NO: 177950 - protein, 7 aa, synthetic construct
VEIPKRT

SEQ ID NO: 177951 - protein, 7 aa, synthetic construct
GRKPNDT

SEQ ID NO: 177952 - protein, 7 aa, synthetic construct
GEPRKMT

SEQ ID NO: 177953 - protein, 7 aa, synthetic construct
GPKPRDT

SEQ ID NO: 177954 - protein, 7 aa, synthetic construct
QEPRKFT

SEQ ID NO: 177955 - protein, 7 aa, synthetic construct
GESPKKM

SEQ ID NO: 177956 - protein, 7 aa, synthetic construct
GSGPKYT

SEQ ID NO: 177957 - protein, 7 aa, synthetic construct
GEKYKSL

SEQ ID NO: 177958 - protein, 7 aa, synthetic construct
GELVKRT

SEQ ID NO: 177959 - protein, 7 aa, synthetic construct
IERPKFM

SEQ ID NO: 177960 - protein, 7 aa, synthetic construct
TEKPKLL

SEQ ID NO: 177961 - protein, 7 aa, synthetic construct
HEKPKLM

SEQ ID NO: 177962 - protein, 7 aa, synthetic construct
REKPKTD

SEQ ID NO: 177963 - protein, 7 aa, synthetic construct
AEKPKMV

SEQ ID NO: 177964 - protein, 7 aa, synthetic construct
GEIKKFT

SEQ ID NO: 177965 - protein, 7 aa, synthetic construct
GEGRKVT

SEQ ID NO: 177966 - protein, 7 aa, synthetic construct
GERPKLM

SEQ ID NO: 177967 - protein, 7 aa, synthetic construct
REKPKHE

SEQ ID NO: 177968 - protein, 7 aa, synthetic construct
GEKPIKN

SEQ ID NO: 177969 - protein, 7 aa, synthetic construct
GMKPKDH

SEQ ID NO: 177970 - protein, 7 aa, synthetic construct
PDKPKHT

SEQ ID NO: 177971 - protein, 7 aa, synthetic construct
PEKPKYA

SEQ ID NO: 177972 - protein, 7 aa, synthetic construct
GSKPHFV

SEQ ID NO: 177973 - protein, 7 aa, synthetic construct
GSHPKFQ

SEQ ID NO: 177974 - protein, 7 aa, synthetic construct
IEKPKTL

SEQ ID NO: 177975 - protein, 7 aa, synthetic construct
QIKPKFD

SEQ ID NO: 177976 - protein, 7 aa, synthetic construct
NEKRKDT

SEQ ID NO: 177977 - protein, 7 aa, synthetic construct
GNKNKDT

SEQ ID NO: 177978 - protein, 7 aa, synthetic construct
QEKPKMH

SEQ ID NO: 177979 - protein, 7 aa, synthetic construct
GERPKFS

SEQ ID NO: 177980 - protein, 7 aa, synthetic construct
QEKPRAT

SEQ ID NO: 177981 - protein, 7 aa, synthetic construct
GENPKGK

SEQ ID NO: 177982 - protein, 7 aa, synthetic construct
GERPKAG

SEQ ID NO: 177983 - protein, 7 aa, synthetic construct
EQKPKIT

SEQ ID NO: 177984 - protein, 7 aa, synthetic construct
KENPKFG

SEQ ID NO: 177985 - protein, 7 aa, synthetic construct
EEKQKFK

SEQ ID NO: 177986 - protein, 7 aa, synthetic construct
IEKPRAT

SEQ ID NO: 177987 - protein, 7 aa, synthetic construct
NEKRVFT

SEQ ID NO: 177988 - protein, 7 aa, synthetic construct
SEKRQFT

SEQ ID NO: 177989 - protein, 7 aa, synthetic construct
QEKPKLA

SEQ ID NO: 177990 - protein, 7 aa, synthetic construct
GEKNNFR

SEQ ID NO: 177991 - protein, 7 aa, synthetic construct
FEKPRST

SEQ ID NO: 177992 - protein, 7 aa, synthetic construct
LNKPKFD

SEQ ID NO: 177993 - protein, 7 aa, synthetic construct
GEPPKRI

SEQ ID NO: 177994 - protein, 7 aa, synthetic construct
GEKKKLD

SEQ ID NO: 177995 - protein, 7 aa, synthetic construct
GEKPMRV

SEQ ID NO: 177996 - protein, 7 aa, synthetic construct
AERPKST

SEQ ID NO: 177997 - protein, 7 aa, synthetic construct
GERVKAT

SEQ ID NO: 177998 - protein, 7 aa, synthetic construct
YEKPKGF

SEQ ID NO: 177999 - protein, 7 aa, synthetic construct
MEKPRFM

SEQ ID NO: 178000 - protein, 7 aa, synthetic construct
VEKPRFS

SEQ ID NO: 178001 - protein, 7 aa, synthetic construct
GEMPKQK

SEQ ID NO: 178002 - protein, 7 aa, synthetic construct
EIKPKIT

SEQ ID NO: 178003 - protein, 7 aa, synthetic construct
GEKKKME

SEQ ID NO: 178004 - protein, 7 aa, synthetic construct
GEKPAKM

SEQ ID NO: 178005 - protein, 7 aa, synthetic construct
PEKPIFK

SEQ ID NO: 178006 - protein, 7 aa, synthetic construct
GQPHKFT

SEQ ID NO: 178007 - protein, 7 aa, synthetic construct
TEKPKAQ

SEQ ID NO: 178008 - protein, 7 aa, synthetic construct
GDKPAFR

SEQ ID NO: 178009 - protein, 7 aa, synthetic construct
GVKPYIT

SEQ ID NO: 178010 - protein, 7 aa, synthetic construct
ENKPKIT

SEQ ID NO: 178011 - protein, 7 aa, synthetic construct
GGSPKHT

SEQ ID NO: 178012 - protein, 7 aa, synthetic construct
GAHPKFV

SEQ ID NO: 178013 - protein, 7 aa, synthetic construct
KEKYKFE

SEQ ID NO: 178014 - protein, 7 aa, synthetic construct
MEKGRFT

SEQ ID NO: 178015 - protein, 7 aa, synthetic construct
FDKPKFN

SEQ ID NO: 178016 - protein, 7 aa, synthetic construct
IIPPKFT

SEQ ID NO: 178017 - protein, 7 aa, synthetic construct
EHKPKFM

SEQ ID NO: 178018 - protein, 7 aa, synthetic construct
AEKPKGG

SEQ ID NO: 178019 - protein, 7 aa, synthetic construct
GDKPKYT

SEQ ID NO: 178020 - protein, 7 aa, synthetic construct
ETKPKFQ

SEQ ID NO: 178021 - protein, 7 aa, synthetic construct
QEKPRYT

SEQ ID NO: 178022 - protein, 7 aa, synthetic construct
MEKPKWV

SEQ ID NO: 178023 - protein, 7 aa, synthetic construct
AEKPKTA

SEQ ID NO: 178024 - protein, 7 aa, synthetic construct
KEHPKFS

SEQ ID NO: 178025 - protein, 7 aa, synthetic construct
DEKKKFM

SEQ ID NO: 178026 - protein, 7 aa, synthetic construct
VERPKFG

SEQ ID NO: 178027 - protein, 7 aa, synthetic construct
NEKPKYL

SEQ ID NO: 178028 - protein, 7 aa, synthetic construct
FEKPNRT

SEQ ID NO: 178029 - protein, 7 aa, synthetic construct
GEVPKRT

SEQ ID NO: 178030 - protein, 7 aa, synthetic construct
GETKKFV

SEQ ID NO: 178031 - protein, 7 aa, synthetic construct
LDKYKFT

SEQ ID NO: 178032 - protein, 7 aa, synthetic construct
GEKIKYY

SEQ ID NO: 178033 - protein, 7 aa, synthetic construct
DEKPKKP

SEQ ID NO: 178034 - protein, 7 aa, synthetic construct
GEKPKFV

SEQ ID NO: 178035 - protein, 7 aa, synthetic construct
QEKPKWN

SEQ ID NO: 178036 - protein, 7 aa, synthetic construct
GRKTEFT

SEQ ID NO: 178037 - protein, 7 aa, synthetic construct
PEKPKQG

SEQ ID NO: 178038 - protein, 7 aa, synthetic construct
MEKPKAQ

SEQ ID NO: 178039 - protein, 7 aa, synthetic construct
TLKPKFD

SEQ ID NO: 178040 - protein, 7 aa, synthetic construct
IEKPKDR

SEQ ID NO: 178041 - protein, 7 aa, synthetic construct
SEKHKFT

SEQ ID NO: 178042 - protein, 7 aa, synthetic construct
FEKPKER

SEQ ID NO: 178043 - protein, 7 aa, synthetic construct
VEKPKYG

SEQ ID NO: 178044 - protein, 7 aa, synthetic construct
IEKPKMF

SEQ ID NO: 178045 - protein, 7 aa, synthetic construct
VEKVKFY

SEQ ID NO: 178046 - protein, 7 aa, synthetic construct
SERPKFS

SEQ ID NO: 178047 - protein, 7 aa, synthetic construct
GEKPRTG

SEQ ID NO: 178048 - protein, 7 aa, synthetic construct
GSGIKFT

SEQ ID NO: 178049 - protein, 7 aa, synthetic construct
TEKPKFT

SEQ ID NO: 178050 - protein, 7 aa, synthetic construct
YEKPKNM

SEQ ID NO: 178051 - protein, 7 aa, synthetic construct
QTKPKDT

SEQ ID NO: 178052 - protein, 7 aa, synthetic construct
GEKPVKY

SEQ ID NO: 178053 - protein, 7 aa, synthetic construct
GERPKQN

SEQ ID NO: 178054 - protein, 7 aa, synthetic construct
GESPKRP

SEQ ID NO: 178055 - protein, 7 aa, synthetic construct
YEKPNFR

SEQ ID NO: 178056 - protein, 7 aa, synthetic construct
GGKPKGD

SEQ ID NO: 178057 - protein, 7 aa, synthetic construct
SEKPKDR

SEQ ID NO: 178058 - protein, 7 aa, synthetic construct
GEHKKFA

SEQ ID NO: 178059 - protein, 7 aa, synthetic construct
GENKKFM

SEQ ID NO: 178060 - protein, 7 aa, synthetic construct
GETTKKT

SEQ ID NO: 178061 - protein, 7 aa, synthetic construct
LEKRSFT

SEQ ID NO: 178062 - protein, 7 aa, synthetic construct
QEKPKQN

SEQ ID NO: 178063 - protein, 7 aa, synthetic construct
SDKPKFG

SEQ ID NO: 178064 - protein, 7 aa, synthetic construct
GEKPRSA

SEQ ID NO: 178065 - protein, 7 aa, synthetic construct
QQKPKDT

SEQ ID NO: 178066 - protein, 7 aa, synthetic construct
AEKPKNM

SEQ ID NO: 178067 - protein, 7 aa, synthetic construct
GEAPKMR

SEQ ID NO: 178068 - protein, 7 aa, synthetic construct
ESKPKLT

SEQ ID NO: 178069 - protein, 7 aa, synthetic construct
GEKHRFP

SEQ ID NO: 178070 - protein, 7 aa, synthetic construct
GDQKKFT

SEQ ID NO: 178071 - protein, 7 aa, synthetic construct
GDKPKVH

SEQ ID NO: 178072 - protein, 7 aa, synthetic construct
GEKPRLV

SEQ ID NO: 178073 - protein, 7 aa, synthetic construct
GDKPRFH

SEQ ID NO: 178074 - protein, 7 aa, synthetic construct
GEKPARL

SEQ ID NO: 178075 - protein, 7 aa, synthetic construct
GESPKNR

SEQ ID NO: 178076 - protein, 7 aa, synthetic construct
TEKPQRT

SEQ ID NO: 178077 - protein, 7 aa, synthetic construct
GEAPKRM

SEQ ID NO: 178078 - protein, 7 aa, synthetic construct
DQKPKFG

SEQ ID NO: 178079 - protein, 7 aa, synthetic construct
GEQAKRT

SEQ ID NO: 178080 - protein, 7 aa, synthetic construct
QESPKFK

SEQ ID NO: 178081 - protein, 7 aa, synthetic construct
AEKPKTH

SEQ ID NO: 178082 - protein, 7 aa, synthetic construct
LDKPKFG

SEQ ID NO: 178083 - protein, 7 aa, synthetic construct
GEKPVRM

SEQ ID NO: 178084 - protein, 7 aa, synthetic construct
DHKNKFT

SEQ ID NO: 178085 - protein, 7 aa, synthetic construct
SEKYKFS

SEQ ID NO: 178086 - protein, 7 aa, synthetic construct
IEKYKFA

SEQ ID NO: 178087 - protein, 7 aa, synthetic construct
REGSKFT

SEQ ID NO: 178088 - protein, 7 aa, synthetic construct
MNKPKFD

SEQ ID NO: 178089 - protein, 7 aa, synthetic construct
PEKPQFR

SEQ ID NO: 178090 - protein, 7 aa, synthetic construct
NDKPKST

SEQ ID NO: 178091 - protein, 7 aa, synthetic construct
AERPKFG

SEQ ID NO: 178092 - protein, 7 aa, synthetic construct
GEKRVIT

SEQ ID NO: 178093 - protein, 7 aa, synthetic construct
DRKDKFT

SEQ ID NO: 178094 - protein, 7 aa, synthetic construct
GAEPKFR

SEQ ID NO: 178095 - protein, 7 aa, synthetic construct
GEKKYFP

SEQ ID NO: 178096 - protein, 7 aa, synthetic construct
GDKPRVT

SEQ ID NO: 178097 - protein, 7 aa, synthetic construct
GDKPKLT

SEQ ID NO: 178098 - protein, 7 aa, synthetic construct
EFKPKFN

SEQ ID NO: 178099 - protein, 7 aa, synthetic construct
GRVPKFE

SEQ ID NO: 178100 - protein, 7 aa, synthetic construct
GEGIKKT

SEQ ID NO: 178101 - protein, 7 aa, synthetic construct
QFKPKFE

SEQ ID NO: 178102 - protein, 7 aa, synthetic construct
HETPKKT

SEQ ID NO: 178103 - protein, 7 aa, synthetic construct
GEKPSGR

SEQ ID NO: 178104 - protein, 7 aa, synthetic construct
GEKRQFQ

SEQ ID NO: 178105 - protein, 7 aa, synthetic construct
MEKFKFS

SEQ ID NO: 178106 - protein, 7 aa, synthetic construct
YVKPKDT

SEQ ID NO: 178107 - protein, 7 aa, synthetic construct
GRQPKFD

SEQ ID NO: 178108 - protein, 7 aa, synthetic construct
TERPKFV

SEQ ID NO: 178109 - protein, 7 aa, synthetic construct
GEKNQFR

SEQ ID NO: 178110 - protein, 7 aa, synthetic construct
GKKPVFD

SEQ ID NO: 178111 - protein, 7 aa, synthetic construct
AEKPKVG

SEQ ID NO: 178112 - protein, 7 aa, synthetic construct
GEKPHRV

SEQ ID NO: 178113 - protein, 7 aa, synthetic construct
IEKPRQT

SEQ ID NO: 178114 - protein, 7 aa, synthetic construct
GNKPKGD

SEQ ID NO: 178115 - protein, 7 aa, synthetic construct
YEKMKFI

SEQ ID NO: 178116 - protein, 7 aa, synthetic construct
YPKPKFE

SEQ ID NO: 178117 - protein, 7 aa, synthetic construct
SEKPKSL

SEQ ID NO: 178118 - protein, 7 aa, synthetic construct
PEKPKQQ

SEQ ID NO: 178119 - protein, 7 aa, synthetic construct
YEAPKFK

SEQ ID NO: 178120 - protein, 7 aa, synthetic construct
GHKPKEM

SEQ ID NO: 178121 - protein, 7 aa, synthetic construct
IYKPKET

SEQ ID NO: 178122 - protein, 7 aa, synthetic construct
SENPKFR

SEQ ID NO: 178123 - protein, 7 aa, synthetic construct
SHKPKFD

SEQ ID NO: 178124 - protein, 7 aa, synthetic construct
HENPKFK

SEQ ID NO: 178125 - protein, 7 aa, synthetic construct
QDKPKFG

SEQ ID NO: 178126 - protein, 7 aa, synthetic construct
GDKLKFL

SEQ ID NO: 178127 - protein, 7 aa, synthetic construct
GEKPRSL

SEQ ID NO: 178128 - protein, 7 aa, synthetic construct
PEKMKYT

SEQ ID NO: 178129 - protein, 7 aa, synthetic construct
QEGPKFK

SEQ ID NO: 178130 - protein, 7 aa, synthetic construct
GEKFKFQ

SEQ ID NO: 178131 - protein, 7 aa, synthetic construct
YEAPKRT

SEQ ID NO: 178132 - protein, 7 aa, synthetic construct
YEKFKFN

SEQ ID NO: 178133 - protein, 7 aa, synthetic construct
GTKPKGD

SEQ ID NO: 178134 - protein, 7 aa, synthetic construct
GENPKKL

SEQ ID NO: 178135 - protein, 7 aa, synthetic construct
GYKKEFT

SEQ ID NO: 178136 - protein, 7 aa, synthetic construct
NEAPKKT

SEQ ID NO: 178137 - protein, 7 aa, synthetic construct
GEKPMNR

SEQ ID NO: 178138 - protein, 7 aa, synthetic construct
GETPKRA

SEQ ID NO: 178139 - protein, 7 aa, synthetic construct
DRNPKFT

SEQ ID NO: 178140 - protein, 7 aa, synthetic construct
TEKPKLH

SEQ ID NO: 178141 - protein, 7 aa, synthetic construct
GELPKIK

SEQ ID NO: 178142 - protein, 7 aa, synthetic construct
GDKPFRT

SEQ ID NO: 178143 - protein, 7 aa, synthetic construct
TEKPKKD

SEQ ID NO: 178144 - protein, 7 aa, synthetic construct
GEQKKFA

SEQ ID NO: 178145 - protein, 7 aa, synthetic construct
AEQPKRT

SEQ ID NO: 178146 - protein, 7 aa, synthetic construct
GETIKKT

SEQ ID NO: 178147 - protein, 7 aa, synthetic construct
QETKKFT

SEQ ID NO: 178148 - protein, 7 aa, synthetic construct
GVHPKFQ

SEQ ID NO: 178149 - protein, 7 aa, synthetic construct
GDKPMKT

SEQ ID NO: 178150 - protein, 7 aa, synthetic construct
GEAMKRT

SEQ ID NO: 178151 - protein, 7 aa, synthetic construct
AERPKFV

SEQ ID NO: 178152 - protein, 7 aa, synthetic construct
GEKPKFS

SEQ ID NO: 178153 - protein, 7 aa, synthetic construct
YEKPKIM

SEQ ID NO: 178154 - protein, 7 aa, synthetic construct
GEKPGMR

SEQ ID NO: 178155 - protein, 7 aa, synthetic construct
DTKPKAT

SEQ ID NO: 178156 - protein, 7 aa, synthetic construct
DSKIKFT

SEQ ID NO: 178157 - protein, 7 aa, synthetic construct
EVKPKHT

SEQ ID NO: 178158 - protein, 7 aa, synthetic construct
DKHPKFT

SEQ ID NO: 178159 - protein, 7 aa, synthetic construct
QEKIKFM

SEQ ID NO: 178160 - protein, 7 aa, synthetic construct
GEFGKKT

SEQ ID NO: 178161 - protein, 7 aa, synthetic construct
QEKPKHL

SEQ ID NO: 178162 - protein, 7 aa, synthetic construct
NEKPNRT

SEQ ID NO: 178163 - protein, 7 aa, synthetic construct
WDKPKFS

SEQ ID NO: 178164 - protein, 7 aa, synthetic construct
QEKKMFT

SEQ ID NO: 178165 - protein, 7 aa, synthetic construct
AEKPKNF

SEQ ID NO: 178166 - protein, 7 aa, synthetic construct
PEKPKVW

SEQ ID NO: 178167 - protein, 7 aa, synthetic construct
GEMPKNK

SEQ ID NO: 178168 - protein, 7 aa, synthetic construct
GDKPKTH

SEQ ID NO: 178169 - protein, 7 aa, synthetic construct
FEKPKNY

SEQ ID NO: 178170 - protein, 7 aa, synthetic construct
PEKPKIN

SEQ ID NO: 178171 - protein, 7 aa, synthetic construct
QEKPKHY

SEQ ID NO: 178172 - protein, 7 aa, synthetic construct
GEKRVNT

SEQ ID NO: 178173 - protein, 7 aa, synthetic construct
GEKPQRT

SEQ ID NO: 178174 - protein, 7 aa, synthetic construct
GEPPKLR

SEQ ID NO: 178175 - protein, 7 aa, synthetic construct
NEKPKIL

SEQ ID NO: 178176 - protein, 7 aa, synthetic construct
QEKPKMN

SEQ ID NO: 178177 - protein, 7 aa, synthetic construct
GERPKIV

SEQ ID NO: 178178 - protein, 7 aa, synthetic construct
DFKPKFI

SEQ ID NO: 178179 - protein, 7 aa, synthetic construct
GRKEKDT

SEQ ID NO: 178180 - protein, 7 aa, synthetic construct
GIGPKHT

SEQ ID NO: 178181 - protein, 7 aa, synthetic construct
PEKPKQF

SEQ ID NO: 178182 - protein, 7 aa, synthetic construct
GDKPRNT

SEQ ID NO: 178183 - protein, 7 aa, synthetic construct
GERPKVA

SEQ ID NO: 178184 - protein, 7 aa, synthetic construct
AWKPKDT

SEQ ID NO: 178185 - protein, 7 aa, synthetic construct
DHKPKFL

SEQ ID NO: 178186 - protein, 7 aa, synthetic construct
GEKPGRY

SEQ ID NO: 178187 - protein, 7 aa, synthetic construct
GERPKIN

SEQ ID NO: 178188 - protein, 7 aa, synthetic construct
EPKPKST

SEQ ID NO: 178189 - protein, 7 aa, synthetic construct
GEKKAHT

SEQ ID NO: 178190 - protein, 7 aa, synthetic construct
ADKPKFI

SEQ ID NO: 178191 - protein, 7 aa, synthetic construct
RETPKFQ

SEQ ID NO: 178192 - protein, 7 aa, synthetic construct
DVKPKFI

SEQ ID NO: 178193 - protein, 7 aa, synthetic construct
GERIKFS

SEQ ID NO: 178194 - protein, 7 aa, synthetic construct
GTKPYST

SEQ ID NO: 178195 - protein, 7 aa, synthetic construct
GETPKFK

SEQ ID NO: 178196 - protein, 7 aa, synthetic construct
GLKPKHD

SEQ ID NO: 178197 - protein, 7 aa, synthetic construct
GKKPDFQ

SEQ ID NO: 178198 - protein, 7 aa, synthetic construct
GRNPKET

SEQ ID NO: 178199 - protein, 7 aa, synthetic construct
GDKYKTT

SEQ ID NO: 178200 - protein, 7 aa, synthetic construct
KERPKFD

SEQ ID NO: 178201 - protein, 7 aa, synthetic construct
SEKPKLF

SEQ ID NO: 178202 - protein, 7 aa, synthetic construct
AEKPIRT

SEQ ID NO: 178203 - protein, 7 aa, synthetic construct
REVPKFN

SEQ ID NO: 178204 - protein, 7 aa, synthetic construct
TDKPKIT

SEQ ID NO: 178205 - protein, 7 aa, synthetic construct
REFPKTT

SEQ ID NO: 178206 - protein, 7 aa, synthetic construct
PEKPKKE

SEQ ID NO: 178207 - protein, 7 aa, synthetic construct
NEKPKAF

SEQ ID NO: 178208 - protein, 7 aa, synthetic construct
QHKPKFD

SEQ ID NO: 178209 - protein, 7 aa, synthetic construct
TEKAKFF

SEQ ID NO: 178210 - protein, 7 aa, synthetic construct
GEKPRAS

SEQ ID NO: 178211 - protein, 7 aa, synthetic construct
GEQQKKT

SEQ ID NO: 178212 - protein, 7 aa, synthetic construct
REKPMFV

SEQ ID NO: 178213 - protein, 7 aa, synthetic construct
GENPKKM

SEQ ID NO: 178214 - protein, 7 aa, synthetic construct
QEKPKHN

SEQ ID NO: 178215 - protein, 7 aa, synthetic construct
GEKPKIV

SEQ ID NO: 178216 - protein, 7 aa, synthetic construct
GEKPIRY

SEQ ID NO: 178217 - protein, 7 aa, synthetic construct
GDKPKIL

SEQ ID NO: 178218 - protein, 7 aa, synthetic construct
SEKLKFY

SEQ ID NO: 178219 - protein, 7 aa, synthetic construct
GEKKTFF

SEQ ID NO: 178220 - protein, 7 aa, synthetic construct
GEHPKVK

SEQ ID NO: 178221 - protein, 7 aa, synthetic construct
NEKPKWN

SEQ ID NO: 178222 - protein, 7 aa, synthetic construct
GEKRSFV

SEQ ID NO: 178223 - protein, 7 aa, synthetic construct
GRKPDNT

SEQ ID NO: 178224 - protein, 7 aa, synthetic construct
AEVPKFK

SEQ ID NO: 178225 - protein, 7 aa, synthetic construct
GEKPPRM

SEQ ID NO: 178226 - protein, 7 aa, synthetic construct
SEQPKFR

SEQ ID NO: 178227 - protein, 7 aa, synthetic construct
KEKPMWT

SEQ ID NO: 178228 - protein, 7 aa, synthetic construct
GEDKKFK

SEQ ID NO: 178229 - protein, 7 aa, synthetic construct
GEKPMFR

SEQ ID NO: 178230 - protein, 7 aa, synthetic construct
GEKPRAM

SEQ ID NO: 178231 - protein, 7 aa, synthetic construct
EGKPKFM

SEQ ID NO: 178232 - protein, 7 aa, synthetic construct
GEKKPFS

SEQ ID NO: 178233 - protein, 7 aa, synthetic construct
GEKPKMG

SEQ ID NO: 178234 - protein, 7 aa, synthetic construct
IEKPRFP

SEQ ID NO: 178235 - protein, 7 aa, synthetic construct
GEKPQRF

SEQ ID NO: 178236 - protein, 7 aa, synthetic construct
VEKPTFR

SEQ ID NO: 178237 - protein, 7 aa, synthetic construct
GETPKGR

SEQ ID NO: 178238 - protein, 7 aa, synthetic construct
GERPKSL

SEQ ID NO: 178239 - protein, 7 aa, synthetic construct
DDKPKFR

SEQ ID NO: 178240 - protein, 7 aa, synthetic construct
GMGPKFQ

SEQ ID NO: 178241 - protein, 7 aa, synthetic construct
GDKSKFT

SEQ ID NO: 178242 - protein, 7 aa, synthetic construct
GEALKRT

SEQ ID NO: 178243 - protein, 7 aa, synthetic construct
GYKPKDH

SEQ ID NO: 178244 - protein, 7 aa, synthetic construct
PEKRGFT

SEQ ID NO: 178245 - protein, 7 aa, synthetic construct
VEKPKFY

SEQ ID NO: 178246 - protein, 7 aa, synthetic construct
DSKPKFG

SEQ ID NO: 178247 - protein, 7 aa, synthetic construct
GEKPQQR

SEQ ID NO: 178248 - protein, 7 aa, synthetic construct
QEKPKLL

SEQ ID NO: 178249 - protein, 7 aa, synthetic construct
MEKPRFP

SEQ ID NO: 178250 - protein, 7 aa, synthetic construct
GERNKAT

SEQ ID NO: 178251 - protein, 7 aa, synthetic construct
LEGRKFT

SEQ ID NO: 178252 - protein, 7 aa, synthetic construct
GEKFKYG

SEQ ID NO: 178253 - protein, 7 aa, synthetic construct
REKSKDT

SEQ ID NO: 178254 - protein, 7 aa, synthetic construct
YENPKFR

SEQ ID NO: 178255 - protein, 7 aa, synthetic construct
DVKPKFL

SEQ ID NO: 178256 - protein, 7 aa, synthetic construct
GERTKFV

SEQ ID NO: 178257 - protein, 7 aa, synthetic construct
REKPMPT

SEQ ID NO: 178258 - protein, 7 aa, synthetic construct
TEKPKHP

SEQ ID NO: 178259 - protein, 7 aa, synthetic construct
GEKPRMV

SEQ ID NO: 178260 - protein, 7 aa, synthetic construct
EAKPKFM

SEQ ID NO: 178261 - protein, 7 aa, synthetic construct
GDKRKFE

SEQ ID NO: 178262 - protein, 7 aa, synthetic construct
GMKPKWE

SEQ ID NO: 178263 - protein, 7 aa, synthetic construct
GEKPYRV

SEQ ID NO: 178264 - protein, 7 aa, synthetic construct
DFKPKAT

SEQ ID NO: 178265 - protein, 7 aa, synthetic construct
SEKPKTG

SEQ ID NO: 178266 - protein, 7 aa, synthetic construct
GEKKKDT

SEQ ID NO: 178267 - protein, 7 aa, synthetic construct
HQKPKFE

SEQ ID NO: 178268 - protein, 7 aa, synthetic construct
ADKHKFT

SEQ ID NO: 178269 - protein, 7 aa, synthetic construct
QIQPKFT

SEQ ID NO: 178270 - protein, 7 aa, synthetic construct
GEKRSGT

SEQ ID NO: 178271 - protein, 7 aa, synthetic construct
GEKPKNM

SEQ ID NO: 178272 - protein, 7 aa, synthetic construct
VEKPKFS

SEQ ID NO: 178273 - protein, 7 aa, synthetic construct
EGKAKFT

SEQ ID NO: 178274 - protein, 7 aa, synthetic construct
DEKPKKA

SEQ ID NO: 178275 - protein, 7 aa, synthetic construct
VEKPKSA

SEQ ID NO: 178276 - protein, 7 aa, synthetic construct
MDKPKHT

SEQ ID NO: 178277 - protein, 7 aa, synthetic construct
GEKQYKT

SEQ ID NO: 178278 - protein, 7 aa, synthetic construct
KESPKWT

SEQ ID NO: 178279 - protein, 7 aa, synthetic construct
DGKGKFT

SEQ ID NO: 178280 - protein, 7 aa, synthetic construct
VEKPRFA

SEQ ID NO: 178281 - protein, 7 aa, synthetic construct
GNKPKTD

SEQ ID NO: 178282 - protein, 7 aa, synthetic construct
SHNPKFT

SEQ ID NO: 178283 - protein, 7 aa, synthetic construct
SEKFKFN

SEQ ID NO: 178284 - protein, 7 aa, synthetic construct
TERLKFT

SEQ ID NO: 178285 - protein, 7 aa, synthetic construct
GEGVKKT

SEQ ID NO: 178286 - protein, 7 aa, synthetic construct
AEKKHFT

SEQ ID NO: 178287 - protein, 7 aa, synthetic construct
GEKRTYT

SEQ ID NO: 178288 - protein, 7 aa, synthetic construct
AEKPKYQ

SEQ ID NO: 178289 - protein, 7 aa, synthetic construct
REGPKFQ

SEQ ID NO: 178290 - protein, 7 aa, synthetic construct
KENPKFT

SEQ ID NO: 178291 - protein, 7 aa, synthetic construct
GYKPKDL

SEQ ID NO: 178292 - protein, 7 aa, synthetic construct
GEKPLKF

SEQ ID NO: 178293 - protein, 7 aa, synthetic construct
GEGKRFT

SEQ ID NO: 178294 - protein, 7 aa, synthetic construct
VEKPKAW

SEQ ID NO: 178295 - protein, 7 aa, synthetic construct
TEKPKHF

SEQ ID NO: 178296 - protein, 7 aa, synthetic construct
QEKPKVH

SEQ ID NO: 178297 - protein, 7 aa, synthetic construct
NEKFKFQ

SEQ ID NO: 178298 - protein, 7 aa, synthetic construct
FEKPSRT

SEQ ID NO: 178299 - protein, 7 aa, synthetic construct
DFKPKFA

SEQ ID NO: 178300 - protein, 7 aa, synthetic construct
GERIKNT

SEQ ID NO: 178301 - protein, 7 aa, synthetic construct
KEYPKFP

SEQ ID NO: 178302 - protein, 7 aa, synthetic construct
PEKHKFP

SEQ ID NO: 178303 - protein, 7 aa, synthetic construct
LEKARFT

SEQ ID NO: 178304 - protein, 7 aa, synthetic construct
GEKGKSW

SEQ ID NO: 178305 - protein, 7 aa, synthetic construct
WEKIKFA

SEQ ID NO: 178306 - protein, 7 aa, synthetic construct
PEKPKSI

SEQ ID NO: 178307 - protein, 7 aa, synthetic construct
VEKNKFF

SEQ ID NO: 178308 - protein, 7 aa, synthetic construct
GVKPKYD

SEQ ID NO: 178309 - protein, 7 aa, synthetic construct
VEKPKTM

SEQ ID NO: 178310 - protein, 7 aa, synthetic construct
GENKKFA

SEQ ID NO: 178311 - protein, 7 aa, synthetic construct
GEKKKGE

SEQ ID NO: 178312 - protein, 7 aa, synthetic construct
GEKFNRT

SEQ ID NO: 178313 - protein, 7 aa, synthetic construct
GEKYPKT

SEQ ID NO: 178314 - protein, 7 aa, synthetic construct
EQKAKFT

SEQ ID NO: 178315 - protein, 7 aa, synthetic construct
TEKMKFL

SEQ ID NO: 178316 - protein, 7 aa, synthetic construct
IEKPKIF

SEQ ID NO: 178317 - protein, 7 aa, synthetic construct
EFKPKAT

SEQ ID NO: 178318 - protein, 7 aa, synthetic construct
EPKPKAT

SEQ ID NO: 178319 - protein, 7 aa, synthetic construct
TEKPFRT

SEQ ID NO: 178320 - protein, 7 aa, synthetic construct
TEKPKHM

SEQ ID NO: 178321 - protein, 7 aa, synthetic construct
GDKPKYY

SEQ ID NO: 178322 - protein, 7 aa, synthetic construct
EAKPKIT

SEQ ID NO: 178323 - protein, 7 aa, synthetic construct
REKPKDH

SEQ ID NO: 178324 - protein, 7 aa, synthetic construct
GELPKRT

SEQ ID NO: 178325 - protein, 7 aa, synthetic construct
NERGKFT

SEQ ID NO: 178326 - protein, 7 aa, synthetic construct
SERPKFV

SEQ ID NO: 178327 - protein, 7 aa, synthetic construct
GDIPKFK

SEQ ID NO: 178328 - protein, 7 aa, synthetic construct
HEAPKRT

SEQ ID NO: 178329 - protein, 7 aa, synthetic construct
GHKSKDT

SEQ ID NO: 178330 - protein, 7 aa, synthetic construct
GEPKKFL

SEQ ID NO: 178331 - protein, 7 aa, synthetic construct
NDKHKFT

SEQ ID NO: 178332 - protein, 7 aa, synthetic construct
GEKKNFL

SEQ ID NO: 178333 - protein, 7 aa, synthetic construct
YMKPKFD

SEQ ID NO: 178334 - protein, 7 aa, synthetic construct
MEKFKFN

SEQ ID NO: 178335 - protein, 7 aa, synthetic construct
GAGPKYT

SEQ ID NO: 178336 - protein, 7 aa, synthetic construct
SEKPKWV

SEQ ID NO: 178337 - protein, 7 aa, synthetic construct
PEKQKFF

SEQ ID NO: 178338 - protein, 7 aa, synthetic construct
GFKPKFD

SEQ ID NO: 178339 - protein, 7 aa, synthetic construct
GEKPAKL

SEQ ID NO: 178340 - protein, 7 aa, synthetic construct
GYSPKFG

SEQ ID NO: 178341 - protein, 7 aa, synthetic construct
GEKPKWV

SEQ ID NO: 178342 - protein, 7 aa, synthetic construct
VEKRQFT

SEQ ID NO: 178343 - protein, 7 aa, synthetic construct
TERPKTT

SEQ ID NO: 178344 - protein, 7 aa, synthetic construct
GEKLKYS

SEQ ID NO: 178345 - protein, 7 aa, synthetic construct
GEKPKFY

SEQ ID NO: 178346 - protein, 7 aa, synthetic construct
IEKPRFV

SEQ ID NO: 178347 - protein, 7 aa, synthetic construct
IETPKFK

SEQ ID NO: 178348 - protein, 7 aa, synthetic construct
GQDRKFT

SEQ ID NO: 178349 - protein, 7 aa, synthetic construct
GRKPDFG

SEQ ID NO: 178350 - protein, 7 aa, synthetic construct
GDQPKFK

SEQ ID NO: 178351 - protein, 7 aa, synthetic construct
SFKPKFE

SEQ ID NO: 178352 - protein, 7 aa, synthetic construct
AEKPKNN

SEQ ID NO: 178353 - protein, 7 aa, synthetic construct
GEKPKNI

SEQ ID NO: 178354 - protein, 7 aa, synthetic construct
AEKPKLM

SEQ ID NO: 178355 - protein, 7 aa, synthetic construct
PEKQKFT

SEQ ID NO: 178356 - protein, 7 aa, synthetic construct
GELPKRP

SEQ ID NO: 178357 - protein, 7 aa, synthetic construct
GNKPKQD

SEQ ID NO: 178358 - protein, 7 aa, synthetic construct
PMKPKFD

SEQ ID NO: 178359 - protein, 7 aa, synthetic construct
GEAPKRQ

SEQ ID NO: 178360 - protein, 7 aa, synthetic construct
GENKKIT

SEQ ID NO: 178361 - protein, 7 aa, synthetic construct
VEKPQFR

SEQ ID NO: 178362 - protein, 7 aa, synthetic construct
PEQPKRT

SEQ ID NO: 178363 - protein, 7 aa, synthetic construct
QEKYKFS

SEQ ID NO: 178364 - protein, 7 aa, synthetic construct
GYKMKDT

SEQ ID NO: 178365 - protein, 7 aa, synthetic construct
GMKFKFD

SEQ ID NO: 178366 - protein, 7 aa, synthetic construct
DVKPKHT

SEQ ID NO: 178367 - protein, 7 aa, synthetic construct
GRNPKDT

SEQ ID NO: 178368 - protein, 7 aa, synthetic construct
VEKPRYT

SEQ ID NO: 178369 - protein, 7 aa, synthetic construct
GESPKPK

SEQ ID NO: 178370 - protein, 7 aa, synthetic construct
EQKPKNT

SEQ ID NO: 178371 - protein, 7 aa, synthetic construct
DEKIKFK

SEQ ID NO: 178372 - protein, 7 aa, synthetic construct
AEKPKHI

SEQ ID NO: 178373 - protein, 7 aa, synthetic construct
GENVKRT

SEQ ID NO: 178374 - protein, 7 aa, synthetic construct
GEKRKES

SEQ ID NO: 178375 - protein, 7 aa, synthetic construct
QHKPKET

SEQ ID NO: 178376 - protein, 7 aa, synthetic construct
MEKPKMG

SEQ ID NO: 178377 - protein, 7 aa, synthetic construct
MQKPKDT

SEQ ID NO: 178378 - protein, 7 aa, synthetic construct
GEKVSFR

SEQ ID NO: 178379 - protein, 7 aa, synthetic construct
GEKTKKD

SEQ ID NO: 178380 - protein, 7 aa, synthetic construct
GERTKFN

SEQ ID NO: 178381 - protein, 7 aa, synthetic construct
HEKPKYA

SEQ ID NO: 178382 - protein, 7 aa, synthetic construct
GERLKFS

SEQ ID NO: 178383 - protein, 7 aa, synthetic construct
VDIQRRV

SEQ ID NO: 178384 - protein, 7 aa, synthetic construct
SDGKRTI

SEQ ID NO: 178385 - protein, 7 aa, synthetic construct
MDVQRVK

SEQ ID NO: 178386 - protein, 7 aa, synthetic construct
MDRPRNI

SEQ ID NO: 178387 - protein, 7 aa, synthetic construct
MDKQGRN

SEQ ID NO: 178388 - protein, 7 aa, synthetic construct
VDGKRYI

SEQ ID NO: 178389 - protein, 7 aa, synthetic construct
MDGLKRA

SEQ ID NO: 178390 - protein, 7 aa, synthetic construct
MDKQRDK

SEQ ID NO: 178391 - protein, 7 aa, synthetic construct
MDITRKI

SEQ ID NO: 178392 - protein, 7 aa, synthetic construct
MDGVKRN

SEQ ID NO: 178393 - protein, 7 aa, synthetic construct
MIGQARS

SEQ ID NO: 178394 - protein, 7 aa, synthetic construct
MDGRARV

SEQ ID NO: 178395 - protein, 7 aa, synthetic construct
IDTQRRM

SEQ ID NO: 178396 - protein, 7 aa, synthetic construct
LSGQRRE

SEQ ID NO: 178397 - protein, 7 aa, synthetic construct
MDGQIKR

SEQ ID NO: 178398 - protein, 7 aa, synthetic construct
TDGPRRQ

SEQ ID NO: 178399 - protein, 7 aa, synthetic construct
TDGKARI

SEQ ID NO: 178400 - protein, 7 aa, synthetic construct
MDGPRNK

SEQ ID NO: 178401 - protein, 7 aa, synthetic construct
MDLQRKV

SEQ ID NO: 178402 - protein, 7 aa, synthetic construct
MDGKLRM

SEQ ID NO: 178403 - protein, 7 aa, synthetic construct
MTGQDRR

SEQ ID NO: 178404 - protein, 7 aa, synthetic construct
MVDQRRG

SEQ ID NO: 178405 - protein, 7 aa, synthetic construct
LDIQRRV

SEQ ID NO: 178406 - protein, 7 aa, synthetic construct
LDGVRRA

SEQ ID NO: 178407 - protein, 7 aa, synthetic construct
GDGMRRV

SEQ ID NO: 178408 - protein, 7 aa, synthetic construct
MDGKRDK

SEQ ID NO: 178409 - protein, 7 aa, synthetic construct
MDRPVRI

SEQ ID NO: 178410 - protein, 7 aa, synthetic construct
YDKQRNI

SEQ ID NO: 178411 - protein, 7 aa, synthetic construct
IDAQRRM

SEQ ID NO: 178412 - protein, 7 aa, synthetic construct
METQRRV

SEQ ID NO: 178413 - protein, 7 aa, synthetic construct
YDGQRAR

SEQ ID NO: 178414 - protein, 7 aa, synthetic construct
MDGSRIK

SEQ ID NO: 178415 - protein, 7 aa, synthetic construct
VDGTRRS

SEQ ID NO: 178416 - protein, 7 aa, synthetic construct
MHGQPRG

SEQ ID NO: 178417 - protein, 7 aa, synthetic construct
NDGIRRV

SEQ ID NO: 178418 - protein, 7 aa, synthetic construct
MIGDRRG

SEQ ID NO: 178419 - protein, 7 aa, synthetic construct
MTGQRSN

SEQ ID NO: 178420 - protein, 7 aa, synthetic construct
MDGIRGK

SEQ ID NO: 178421 - protein, 7 aa, synthetic construct
MTGQERK

SEQ ID NO: 178422 - protein, 7 aa, synthetic construct
DQAQRRI

SEQ ID NO: 178423 - protein, 7 aa, synthetic construct
QDGQRKI

SEQ ID NO: 178424 - protein, 7 aa, synthetic construct
MDKQLRM

SEQ ID NO: 178425 - protein, 7 aa, synthetic construct
PRGQRDI

SEQ ID NO: 178426 - protein, 7 aa, synthetic construct
MDTQRAK

SEQ ID NO: 178427 - protein, 7 aa, synthetic construct
IDGPRKI

SEQ ID NO: 178428 - protein, 7 aa, synthetic construct
IPGQRRD

SEQ ID NO: 178429 - protein, 7 aa, synthetic construct
QDSQRRV

SEQ ID NO: 178430 - protein, 7 aa, synthetic construct
LDSNRRI

SEQ ID NO: 178431 - protein, 7 aa, synthetic construct
MPGQDRK

SEQ ID NO: 178432 - protein, 7 aa, synthetic construct
NDGKSRI

SEQ ID NO: 178433 - protein, 7 aa, synthetic construct
MSGQRHP

SEQ ID NO: 178434 - protein, 7 aa, synthetic construct
TDPQRRS

SEQ ID NO: 178435 - protein, 7 aa, synthetic construct
MDVKIRI

SEQ ID NO: 178436 - protein, 7 aa, synthetic construct
SDGKNRI

SEQ ID NO: 178437 - protein, 7 aa, synthetic construct
SDGVRRI

SEQ ID NO: 178438 - protein, 7 aa, synthetic construct
MHGQTRQ

SEQ ID NO: 178439 - protein, 7 aa, synthetic construct
FDGQRVK

SEQ ID NO: 178440 - protein, 7 aa, synthetic construct
NDTQRRT

SEQ ID NO: 178441 - protein, 7 aa, synthetic construct
LDGTRRA

SEQ ID NO: 178442 - protein, 7 aa, synthetic construct
MDGRRTG

SEQ ID NO: 178443 - protein, 7 aa, synthetic construct
MDGMKRA

SEQ ID NO: 178444 - protein, 7 aa, synthetic construct
MKGQRDL

SEQ ID NO: 178445 - protein, 7 aa, synthetic construct
MRNQREI

SEQ ID NO: 178446 - protein, 7 aa, synthetic construct
IDTQRRQ

SEQ ID NO: 178447 - protein, 7 aa, synthetic construct
MDGQRKT

SEQ ID NO: 178448 - protein, 7 aa, synthetic construct
MDQQRRG

SEQ ID NO: 178449 - protein, 7 aa, synthetic construct
MDMTRRV

SEQ ID NO: 178450 - protein, 7 aa, synthetic construct
MDRQPRP

SEQ ID NO: 178451 - protein, 7 aa, synthetic construct
IDGNRRS

SEQ ID NO: 178452 - protein, 7 aa, synthetic construct
TDGVRRQ

SEQ ID NO: 178453 - protein, 7 aa, synthetic construct
LDQPRRI

SEQ ID NO: 178454 - protein, 7 aa, synthetic construct
MDMNRRA

SEQ ID NO: 178455 - protein, 7 aa, synthetic construct
REGQRTI

SEQ ID NO: 178456 - protein, 7 aa, synthetic construct
TDGPRRT

SEQ ID NO: 178457 - protein, 7 aa, synthetic construct
MAPQRRD

SEQ ID NO: 178458 - protein, 7 aa, synthetic construct
MDGGVRK

SEQ ID NO: 178459 - protein, 7 aa, synthetic construct
GDLTRRI

SEQ ID NO: 178460 - protein, 7 aa, synthetic construct
ISGQHRI

SEQ ID NO: 178461 - protein, 7 aa, synthetic construct
MDRQTRQ

SEQ ID NO: 178462 - protein, 7 aa, synthetic construct
MDMGRRI

SEQ ID NO: 178463 - protein, 7 aa, synthetic construct
SDAQRKI

SEQ ID NO: 178464 - protein, 7 aa, synthetic construct
MDKQRFT

SEQ ID NO: 178465 - protein, 7 aa, synthetic construct
MSKQRDI

SEQ ID NO: 178466 - protein, 7 aa, synthetic construct
MDSLRRP

SEQ ID NO: 178467 - protein, 7 aa, synthetic construct
MPGQVRA

SEQ ID NO: 178468 - protein, 7 aa, synthetic construct
MDGAKRV

SEQ ID NO: 178469 - protein, 7 aa, synthetic construct
MPGQQRQ

SEQ ID NO: 178470 - protein, 7 aa, synthetic construct
MDGGPRR

SEQ ID NO: 178471 - protein, 7 aa, synthetic construct
MDGPRGK

SEQ ID NO: 178472 - protein, 7 aa, synthetic construct
MDPQGRR

SEQ ID NO: 178473 - protein, 7 aa, synthetic construct
NVEQRRI

SEQ ID NO: 178474 - protein, 7 aa, synthetic construct
DDKQRRV

SEQ ID NO: 178475 - protein, 7 aa, synthetic construct
GDKQRII

SEQ ID NO: 178476 - protein, 7 aa, synthetic construct
MDKQSRH

SEQ ID NO: 178477 - protein, 7 aa, synthetic construct
LDVSRRI

SEQ ID NO: 178478 - protein, 7 aa, synthetic construct
MSGQERK

SEQ ID NO: 178479 - protein, 7 aa, synthetic construct
MIGQHRG

SEQ ID NO: 178480 - protein, 7 aa, synthetic construct
TDRQTRI

SEQ ID NO: 178481 - protein, 7 aa, synthetic construct
MDGQKIR

SEQ ID NO: 178482 - protein, 7 aa, synthetic construct
MDKQYRQ

SEQ ID NO: 178483 - protein, 7 aa, synthetic construct
LDGLRRA

SEQ ID NO: 178484 - protein, 7 aa, synthetic construct
YDGMRRG

SEQ ID NO: 178485 - protein, 7 aa, synthetic construct
MDSIRRA

SEQ ID NO: 178486 - protein, 7 aa, synthetic construct
NDGLRRI

SEQ ID NO: 178487 - protein, 7 aa, synthetic construct
MDGQKRI

SEQ ID NO: 178488 - protein, 7 aa, synthetic construct
MLGQDRK

SEQ ID NO: 178489 - protein, 7 aa, synthetic construct
MDGRRSG

SEQ ID NO: 178490 - protein, 7 aa, synthetic construct
TMDQRRI

SEQ ID NO: 178491 - protein, 7 aa, synthetic construct
TDGKRAI

SEQ ID NO: 178492 - protein, 7 aa, synthetic construct
MDGRGRQ

SEQ ID NO: 178493 - protein, 7 aa, synthetic construct
MDGPRGR

SEQ ID NO: 178494 - protein, 7 aa, synthetic construct
MDIPRRP

SEQ ID NO: 178495 - protein, 7 aa, synthetic construct
MRGETRI

SEQ ID NO: 178496 - protein, 7 aa, synthetic construct
MDGKRYP

SEQ ID NO: 178497 - protein, 7 aa, synthetic construct
MDKQRNN

SEQ ID NO: 178498 - protein, 7 aa, synthetic construct
IDGMRRN

SEQ ID NO: 178499 - protein, 7 aa, synthetic construct
YDGLRRV

SEQ ID NO: 178500 - protein, 7 aa, synthetic construct
MDSVRRT

SEQ ID NO: 178501 - protein, 7 aa, synthetic construct
MGGQKYI

SEQ ID NO: 178502 - protein, 7 aa, synthetic construct
QDGQRMR

SEQ ID NO: 178503 - protein, 7 aa, synthetic construct
MDGVRAR

SEQ ID NO: 178504 - protein, 7 aa, synthetic construct
MTGDRRL

SEQ ID NO: 178505 - protein, 7 aa, synthetic construct
MRQQRDI

SEQ ID NO: 178506 - protein, 7 aa, synthetic construct
MDGTMRK

SEQ ID NO: 178507 - protein, 7 aa, synthetic construct
MEGQKRF

SEQ ID NO: 178508 - protein, 7 aa, synthetic construct
MTGSRSI

SEQ ID NO: 178509 - protein, 7 aa, synthetic construct
MDRQMRA

SEQ ID NO: 178510 - protein, 7 aa, synthetic construct
MTEQRRG

SEQ ID NO: 178511 - protein, 7 aa, synthetic construct
MRGQRME

SEQ ID NO: 178512 - protein, 7 aa, synthetic construct
IDASRRI

SEQ ID NO: 178513 - protein, 7 aa, synthetic construct
GDTQKRI

SEQ ID NO: 178514 - protein, 7 aa, synthetic construct
MHGQSRV

SEQ ID NO: 178515 - protein, 7 aa, synthetic construct
NDGQRQK

SEQ ID NO: 178516 - protein, 7 aa, synthetic construct
ADKQRYI

SEQ ID NO: 178517 - protein, 7 aa, synthetic construct
MTAQRRE

SEQ ID NO: 178518 - protein, 7 aa, synthetic construct
MDGIRKN

SEQ ID NO: 178519 - protein, 7 aa, synthetic construct
GDGVRRA

SEQ ID NO: 178520 - protein, 7 aa, synthetic construct
MDVQRMK

SEQ ID NO: 178521 - protein, 7 aa, synthetic construct
IDGQRGK

SEQ ID NO: 178522 - protein, 7 aa, synthetic construct
YDAQRKI

SEQ ID NO: 178523 - protein, 7 aa, synthetic construct
NDTMRRI

SEQ ID NO: 178524 - protein, 7 aa, synthetic construct
MDLTRRP

SEQ ID NO: 178525 - protein, 7 aa, synthetic construct
MDAKRFI

SEQ ID NO: 178526 - protein, 7 aa, synthetic construct
QDPQRRA

SEQ ID NO: 178527 - protein, 7 aa, synthetic construct
REGQRSI

SEQ ID NO: 178528 - protein, 7 aa, synthetic construct
MDGVKRT

SEQ ID NO: 178529 - protein, 7 aa, synthetic construct
MDGKNRI

SEQ ID NO: 178530 - protein, 7 aa, synthetic construct
VDGRPRI

SEQ ID NO: 178531 - protein, 7 aa, synthetic construct
MDVRRNI

SEQ ID NO: 178532 - protein, 7 aa, synthetic construct
MDGNIRR

SEQ ID NO: 178533 - protein, 7 aa, synthetic construct
MDTIRRV

SEQ ID NO: 178534 - protein, 7 aa, synthetic construct
FDGQRQK

SEQ ID NO: 178535 - protein, 7 aa, synthetic construct
MDGPKRQ

SEQ ID NO: 178536 - protein, 7 aa, synthetic construct
MDGTRRI

SEQ ID NO: 178537 - protein, 7 aa, synthetic construct
RDGQSRA

SEQ ID NO: 178538 - protein, 7 aa, synthetic construct
MTGERRM

SEQ ID NO: 178539 - protein, 7 aa, synthetic construct
MDGIRKI

SEQ ID NO: 178540 - protein, 7 aa, synthetic construct
MDGVARK

SEQ ID NO: 178541 - protein, 7 aa, synthetic construct
MDGKVRM

SEQ ID NO: 178542 - protein, 7 aa, synthetic construct
MDKPSRI

SEQ ID NO: 178543 - protein, 7 aa, synthetic construct
IDIQRRA

SEQ ID NO: 178544 - protein, 7 aa, synthetic construct
MDGSRAK

SEQ ID NO: 178545 - protein, 7 aa, synthetic construct
MDIGRRA

SEQ ID NO: 178546 - protein, 7 aa, synthetic construct
MRGEIRI

SEQ ID NO: 178547 - protein, 7 aa, synthetic construct
MKGQPRD

SEQ ID NO: 178548 - protein, 7 aa, synthetic construct
MDMARRS

SEQ ID NO: 178549 - protein, 7 aa, synthetic construct
MDKQRFQ

SEQ ID NO: 178550 - protein, 7 aa, synthetic construct
MDKRERI

SEQ ID NO: 178551 - protein, 7 aa, synthetic construct
FDKQIRI

SEQ ID NO: 178552 - protein, 7 aa, synthetic construct
NDGQRLR

SEQ ID NO: 178553 - protein, 7 aa, synthetic construct
VDNQRRA

SEQ ID NO: 178554 - protein, 7 aa, synthetic construct
QDGKRQI

SEQ ID NO: 178555 - protein, 7 aa, synthetic construct
DAVQRRI

SEQ ID NO: 178556 - protein, 7 aa, synthetic construct
MDGIRKT

SEQ ID NO: 178557 - protein, 7 aa, synthetic construct
MDNVRRV

SEQ ID NO: 178558 - protein, 7 aa, synthetic construct
NDGMRRP

SEQ ID NO: 178559 - protein, 7 aa, synthetic construct
QDGRNRI

SEQ ID NO: 178560 - protein, 7 aa, synthetic construct
MDGTRMK

SEQ ID NO: 178561 - protein, 7 aa, synthetic construct
MDGQRRV

SEQ ID NO: 178562 - protein, 7 aa, synthetic construct
NDGARRP

SEQ ID NO: 178563 - protein, 7 aa, synthetic construct
VDTQRRG

SEQ ID NO: 178564 - protein, 7 aa, synthetic construct
MDGPRVK

SEQ ID NO: 178565 - protein, 7 aa, synthetic construct
MDTVRRI

SEQ ID NO: 178566 - protein, 7 aa, synthetic construct
RDGDRRV

SEQ ID NO: 178567 - protein, 7 aa, synthetic construct
MDSQGRK

SEQ ID NO: 178568 - protein, 7 aa, synthetic construct
MDPNRRS

SEQ ID NO: 178569 - protein, 7 aa, synthetic construct
YDGMRRQ

SEQ ID NO: 178570 - protein, 7 aa, synthetic construct
LDGLRRG

SEQ ID NO: 178571 - protein, 7 aa, synthetic construct
MDLKRNI

SEQ ID NO: 178572 - protein, 7 aa, synthetic construct
ADPMRRI

SEQ ID NO: 178573 - protein, 7 aa, synthetic construct
MDVSRRA

SEQ ID NO: 178574 - protein, 7 aa, synthetic construct
MDGSRKV

SEQ ID NO: 178575 - protein, 7 aa, synthetic construct
SDNPRRI

SEQ ID NO: 178576 - protein, 7 aa, synthetic construct
IDTMRRI

SEQ ID NO: 178577 - protein, 7 aa, synthetic construct
LIGQRRE

SEQ ID NO: 178578 - protein, 7 aa, synthetic construct
MDSSRRV

SEQ ID NO: 178579 - protein, 7 aa, synthetic construct
MDGNSRR

SEQ ID NO: 178580 - protein, 7 aa, synthetic construct
MDVTRRG

SEQ ID NO: 178581 - protein, 7 aa, synthetic construct
MDGKMRG

SEQ ID NO: 178582 - protein, 7 aa, synthetic construct
MPGERRA

SEQ ID NO: 178583 - protein, 7 aa, synthetic construct
IDGQRRT

SEQ ID NO: 178584 - protein, 7 aa, synthetic construct
MDKYNRI

SEQ ID NO: 178585 - protein, 7 aa, synthetic construct
MDGIRRS

SEQ ID NO: 178586 - protein, 7 aa, synthetic construct
MDQPRRT

SEQ ID NO: 178587 - protein, 7 aa, synthetic construct
MDQGRRS

SEQ ID NO: 178588 - protein, 7 aa, synthetic construct
NDPQRRQ

SEQ ID NO: 178589 - protein, 7 aa, synthetic construct
MQDQRRG

SEQ ID NO: 178590 - protein, 7 aa, synthetic construct
MQGLRRE

SEQ ID NO: 178591 - protein, 7 aa, synthetic construct
IMGQRRE

SEQ ID NO: 178592 - protein, 7 aa, synthetic construct
MDGRARS

SEQ ID NO: 178593 - protein, 7 aa, synthetic construct
MDGKPRF

SEQ ID NO: 178594 - protein, 7 aa, synthetic construct
SDTQKRI

SEQ ID NO: 178595 - protein, 7 aa, synthetic construct
MDGGRAK

SEQ ID NO: 178596 - protein, 7 aa, synthetic construct
VDGQRRA

SEQ ID NO: 178597 - protein, 7 aa, synthetic construct
MMGPRQI

SEQ ID NO: 178598 - protein, 7 aa, synthetic construct
QDSPRRI

SEQ ID NO: 178599 - protein, 7 aa, synthetic construct
MDGSKRA

SEQ ID NO: 178600 - protein, 7 aa, synthetic construct
ADAQRRI

SEQ ID NO: 178601 - protein, 7 aa, synthetic construct
MAGDRRV

SEQ ID NO: 178602 - protein, 7 aa, synthetic construct
MDKQLRH

SEQ ID NO: 178603 - protein, 7 aa, synthetic construct
ADGQRIK

SEQ ID NO: 178604 - protein, 7 aa, synthetic construct
MIGQRHG

SEQ ID NO: 178605 - protein, 7 aa, synthetic construct
FDGGKRI

SEQ ID NO: 178606 - protein, 7 aa, synthetic construct
SDAQRRS

SEQ ID NO: 178607 - protein, 7 aa, synthetic construct
IDGARRQ

SEQ ID NO: 178608 - protein, 7 aa, synthetic construct
MPVQRRE

SEQ ID NO: 178609 - protein, 7 aa, synthetic construct
MDHNKRI

SEQ ID NO: 178610 - protein, 7 aa, synthetic construct
IDGQRTK

SEQ ID NO: 178611 - protein, 7 aa, synthetic construct
VDMQRRS

SEQ ID NO: 178612 - protein, 7 aa, synthetic construct
MDLQKRQ

SEQ ID NO: 178613 - protein, 7 aa, synthetic construct
MDKQRYS

SEQ ID NO: 178614 - protein, 7 aa, synthetic construct
IEGQRKI

SEQ ID NO: 178615 - protein, 7 aa, synthetic construct
MDGTRLK

SEQ ID NO: 178616 - protein, 7 aa, synthetic construct
LDGSRRG

SEQ ID NO: 178617 - protein, 7 aa, synthetic construct
RIGQRDI

SEQ ID NO: 178618 - protein, 7 aa, synthetic construct
MDVIRRP

SEQ ID NO: 178619 - protein, 7 aa, synthetic construct
MDKYSRI

SEQ ID NO: 178620 - protein, 7 aa, synthetic construct
MDGSARR

SEQ ID NO: 178621 - protein, 7 aa, synthetic construct
LDGTRRV

SEQ ID NO: 178622 - protein, 7 aa, synthetic construct
VDGPRRV

SEQ ID NO: 178623 - protein, 7 aa, synthetic construct
MEKQARI

SEQ ID NO: 178624 - protein, 7 aa, synthetic construct
MIGERRT

SEQ ID NO: 178625 - protein, 7 aa, synthetic construct
MDGANRR

SEQ ID NO: 178626 - protein, 7 aa, synthetic construct
MLTQRRE

SEQ ID NO: 178627 - protein, 7 aa, synthetic construct
DTSQRRI

SEQ ID NO: 178628 - protein, 7 aa, synthetic construct
GDGQKRV

SEQ ID NO: 178629 - protein, 7 aa, synthetic construct
MDTQRMK

SEQ ID NO: 178630 - protein, 7 aa, synthetic construct
SDQQKRI

SEQ ID NO: 178631 - protein, 7 aa, synthetic construct
MDQQVRK

SEQ ID NO: 178632 - protein, 7 aa, synthetic construct
MIGERRQ

SEQ ID NO: 178633 - protein, 7 aa, synthetic construct
DQGQRKI

SEQ ID NO: 178634 - protein, 7 aa, synthetic construct
MDKYRAI

SEQ ID NO: 178635 - protein, 7 aa, synthetic construct
MDTLRKI

SEQ ID NO: 178636 - protein, 7 aa, synthetic construct
DRGQQRI

SEQ ID NO: 178637 - protein, 7 aa, synthetic construct
MDGVRGR

SEQ ID NO: 178638 - protein, 7 aa, synthetic construct
MDMKARI

SEQ ID NO: 178639 - protein, 7 aa, synthetic construct
MPEARRI

SEQ ID NO: 178640 - protein, 7 aa, synthetic construct
MDANRRI

SEQ ID NO: 178641 - protein, 7 aa, synthetic construct
MDDRKRI

SEQ ID NO: 178642 - protein, 7 aa, synthetic construct
ADRQRII

SEQ ID NO: 178643 - protein, 7 aa, synthetic construct
MTGQPRQ

SEQ ID NO: 178644 - protein, 7 aa, synthetic construct
MRAQRDI

SEQ ID NO: 178645 - protein, 7 aa, synthetic construct
MTRQDRI

SEQ ID NO: 178646 - protein, 7 aa, synthetic construct
NDNIRRI

SEQ ID NO: 178647 - protein, 7 aa, synthetic construct
SDTARRI

SEQ ID NO: 178648 - protein, 7 aa, synthetic construct
QDGGKRI

SEQ ID NO: 178649 - protein, 7 aa, synthetic construct
MDGAARR

SEQ ID NO: 178650 - protein, 7 aa, synthetic construct
MDGKPRT

SEQ ID NO: 178651 - protein, 7 aa, synthetic construct
IDGSRRI

SEQ ID NO: 178652 - protein, 7 aa, synthetic construct
MRGERNI

SEQ ID NO: 178653 - protein, 7 aa, synthetic construct
MDKQVRF

SEQ ID NO: 178654 - protein, 7 aa, synthetic construct
SDGMRKI

SEQ ID NO: 178655 - protein, 7 aa, synthetic construct
MDQQIRK

SEQ ID NO: 178656 - protein, 7 aa, synthetic construct
NDGQRIR

SEQ ID NO: 178657 - protein, 7 aa, synthetic construct
MLGQRKD

SEQ ID NO: 178658 - protein, 7 aa, synthetic construct
MDKIPRI

SEQ ID NO: 178659 - protein, 7 aa, synthetic construct
IDGNRRQ

SEQ ID NO: 178660 - protein, 7 aa, synthetic construct
QDGQMRK

SEQ ID NO: 178661 - protein, 7 aa, synthetic construct
VDMNRRI

SEQ ID NO: 178662 - protein, 7 aa, synthetic construct
YDGQRVR

SEQ ID NO: 178663 - protein, 7 aa, synthetic construct
MDGGRSR

SEQ ID NO: 178664 - protein, 7 aa, synthetic construct
MDNQKRI

SEQ ID NO: 178665 - protein, 7 aa, synthetic construct
MDGSTRR

SEQ ID NO: 178666 - protein, 7 aa, synthetic construct
MDGNGRK

SEQ ID NO: 178667 - protein, 7 aa, synthetic construct
TDNMRRI

SEQ ID NO: 178668 - protein, 7 aa, synthetic construct
TDGQRAK

SEQ ID NO: 178669 - protein, 7 aa, synthetic construct
MDSQRKQ

SEQ ID NO: 178670 - protein, 7 aa, synthetic construct
SDGQKRN

SEQ ID NO: 178671 - protein, 7 aa, synthetic construct
MRGQRDI

SEQ ID NO: 178672 - protein, 7 aa, synthetic construct
QDTNRRI

SEQ ID NO: 178673 - protein, 7 aa, synthetic construct
MIGMRRE

SEQ ID NO: 178674 - protein, 7 aa, synthetic construct
MIDSRRI

SEQ ID NO: 178675 - protein, 7 aa, synthetic construct
FDGQTRK

SEQ ID NO: 178676 - protein, 7 aa, synthetic construct
MTGQHRN

SEQ ID NO: 178677 - protein, 7 aa, synthetic construct
PADQRRI

SEQ ID NO: 178678 - protein, 7 aa, synthetic construct
NDGQKRN

SEQ ID NO: 178679 - protein, 7 aa, synthetic construct
STGQRHI

SEQ ID NO: 178680 - protein, 7 aa, synthetic construct
MDINRRV

SEQ ID NO: 178681 - protein, 7 aa, synthetic construct
MDGRNRS

SEQ ID NO: 178682 - protein, 7 aa, synthetic construct
MSGQSRG

SEQ ID NO: 178683 - protein, 7 aa, synthetic construct
MRVQRDI

SEQ ID NO: 178684 - protein, 7 aa, synthetic construct
MDVKARI

SEQ ID NO: 178685 - protein, 7 aa, synthetic construct
MDGTKRM

SEQ ID NO: 178686 - protein, 7 aa, synthetic construct
RDGPRHI

SEQ ID NO: 178687 - protein, 7 aa, synthetic construct
MDQPRRA

SEQ ID NO: 178688 - protein, 7 aa, synthetic construct
NDVQRRT

SEQ ID NO: 178689 - protein, 7 aa, synthetic construct
AIDQRRI

SEQ ID NO: 178690 - protein, 7 aa, synthetic construct
MDAQRNR

SEQ ID NO: 178691 - protein, 7 aa, synthetic construct
IDGARRS

SEQ ID NO: 178692 - protein, 7 aa, synthetic construct
NDGKRMI

SEQ ID NO: 178693 - protein, 7 aa, synthetic construct
VDQQRRV

SEQ ID NO: 178694 - protein, 7 aa, synthetic construct
FDGQRKA

SEQ ID NO: 178695 - protein, 7 aa, synthetic construct
VDAQRRL

SEQ ID NO: 178696 - protein, 7 aa, synthetic construct
IDGQNRR

SEQ ID NO: 178697 - protein, 7 aa, synthetic construct
IDLQRRN

SEQ ID NO: 178698 - protein, 7 aa, synthetic construct
RDGMRSI

SEQ ID NO: 178699 - protein, 7 aa, synthetic construct
MTGNHRI

SEQ ID NO: 178700 - protein, 7 aa, synthetic construct
LLGQRRE

SEQ ID NO: 178701 - protein, 7 aa, synthetic construct
MPGNRRE

SEQ ID NO: 178702 - protein, 7 aa, synthetic construct
MDGPVRK

SEQ ID NO: 178703 - protein, 7 aa, synthetic construct
MEPQRRS

SEQ ID NO: 178704 - protein, 7 aa, synthetic construct
MDAQNRR

SEQ ID NO: 178705 - protein, 7 aa, synthetic construct
MTGDRRN

SEQ ID NO: 178706 - protein, 7 aa, synthetic construct
MLGQIRS

SEQ ID NO: 178707 - protein, 7 aa, synthetic construct
LDSQRRI

SEQ ID NO: 178708 - protein, 7 aa, synthetic construct
MDGARTR

SEQ ID NO: 178709 - protein, 7 aa, synthetic construct
WDGQRKA

SEQ ID NO: 178710 - protein, 7 aa, synthetic construct
GDGQRVK

SEQ ID NO: 178711 - protein, 7 aa, synthetic construct
MTGERRN

SEQ ID NO: 178712 - protein, 7 aa, synthetic construct
SDQPRRI

SEQ ID NO: 178713 - protein, 7 aa, synthetic construct
MPGQRKD

SEQ ID NO: 178714 - protein, 7 aa, synthetic construct
IDGPRRN

SEQ ID NO: 178715 - protein, 7 aa, synthetic construct
MDNQRLK

SEQ ID NO: 178716 - protein, 7 aa, synthetic construct
LDGVRRN

SEQ ID NO: 178717 - protein, 7 aa, synthetic construct
MDGVIRK

SEQ ID NO: 178718 - protein, 7 aa, synthetic construct
MMGQRHV

SEQ ID NO: 178719 - protein, 7 aa, synthetic construct
MDNQSRR

SEQ ID NO: 178720 - protein, 7 aa, synthetic construct
MRGERTI

SEQ ID NO: 178721 - protein, 7 aa, synthetic construct
IDGTRRT

SEQ ID NO: 178722 - protein, 7 aa, synthetic construct
MLGERRT

SEQ ID NO: 178723 - protein, 7 aa, synthetic construct
ADGTRRP

SEQ ID NO: 178724 - protein, 7 aa, synthetic construct
MDLQKRS

SEQ ID NO: 178725 - protein, 7 aa, synthetic construct
MDPVRRS

SEQ ID NO: 178726 - protein, 7 aa, synthetic construct
MTGQSRP

SEQ ID NO: 178727 - protein, 7 aa, synthetic construct
MADMRRI

SEQ ID NO: 178728 - protein, 7 aa, synthetic construct
YDGKRLI

SEQ ID NO: 178729 - protein, 7 aa, synthetic construct
QDGQRIR

SEQ ID NO: 178730 - protein, 7 aa, synthetic construct
MVGSRHI

SEQ ID NO: 178731 - protein, 7 aa, synthetic construct
MDGKPRH

SEQ ID NO: 178732 - protein, 7 aa, synthetic construct
MDGKNRM

SEQ ID NO: 178733 - protein, 7 aa, synthetic construct
MMGQPRA

SEQ ID NO: 178734 - protein, 7 aa, synthetic construct
STEQRRI

SEQ ID NO: 178735 - protein, 7 aa, synthetic construct
MDRPTRI

SEQ ID NO: 178736 - protein, 7 aa, synthetic construct
MDGARNR

SEQ ID NO: 178737 - protein, 7 aa, synthetic construct
MDGGRRP

SEQ ID NO: 178738 - protein, 7 aa, synthetic construct
LDNIRRI

SEQ ID NO: 178739 - protein, 7 aa, synthetic construct
VDGLRRA

SEQ ID NO: 178740 - protein, 7 aa, synthetic construct
MDVKVRI

SEQ ID NO: 178741 - protein, 7 aa, synthetic construct
MDGALRK

SEQ ID NO: 178742 - protein, 7 aa, synthetic construct
METNRRI

SEQ ID NO: 178743 - protein, 7 aa, synthetic construct
MLGHTRI

SEQ ID NO: 178744 - protein, 7 aa, synthetic construct
MDGPRTR

SEQ ID NO: 178745 - protein, 7 aa, synthetic construct
MDQQRLK

SEQ ID NO: 178746 - protein, 7 aa, synthetic construct
MKGQHFI

SEQ ID NO: 178747 - protein, 7 aa, synthetic construct
SDVQRRP

SEQ ID NO: 178748 - protein, 7 aa, synthetic construct
DRGQRII

SEQ ID NO: 178749 - protein, 7 aa, synthetic construct
TIGQRHI

SEQ ID NO: 178750 - protein, 7 aa, synthetic construct
MDRSTRI

SEQ ID NO: 178751 - protein, 7 aa, synthetic construct
SDGLKRI

SEQ ID NO: 178752 - protein, 7 aa, synthetic construct
MEGQRKV

SEQ ID NO: 178753 - protein, 7 aa, synthetic construct
MDNARRT

SEQ ID NO: 178754 - protein, 7 aa, synthetic construct
MDGARKT

SEQ ID NO: 178755 - protein, 7 aa, synthetic construct
GIGQRHI

SEQ ID NO: 178756 - protein, 7 aa, synthetic construct
GDVQRRP

SEQ ID NO: 178757 - protein, 7 aa, synthetic construct
ADLQKRI

SEQ ID NO: 178758 - protein, 7 aa, synthetic construct
MDPMRRM

SEQ ID NO: 178759 - protein, 7 aa, synthetic construct
NDGRNRI

SEQ ID NO: 178760 - protein, 7 aa, synthetic construct
IDGQIRK

SEQ ID NO: 178761 - protein, 7 aa, synthetic construct
MDQQRRV

SEQ ID NO: 178762 - protein, 7 aa, synthetic construct
MDLSRRP

SEQ ID NO: 178763 - protein, 7 aa, synthetic construct
QDAVRRI

SEQ ID NO: 178764 - protein, 7 aa, synthetic construct
IDRQPRI

SEQ ID NO: 178765 - protein, 7 aa, synthetic construct
MRGQNAI

SEQ ID NO: 178766 - protein, 7 aa, synthetic construct
MDAQIRK

SEQ ID NO: 178767 - protein, 7 aa, synthetic construct
MLDNRRI

SEQ ID NO: 178768 - protein, 7 aa, synthetic construct
MDAPRRG

SEQ ID NO: 178769 - protein, 7 aa, synthetic construct
MSGQVRG

SEQ ID NO: 178770 - protein, 7 aa, synthetic construct
MQGQRRE

SEQ ID NO: 178771 - protein, 7 aa, synthetic construct
GDGSKRI

SEQ ID NO: 178772 - protein, 7 aa, synthetic construct
VDGMRRT

SEQ ID NO: 178773 - protein, 7 aa, synthetic construct
MDGNRKM

SEQ ID NO: 178774 - protein, 7 aa, synthetic construct
QDGVRRV

SEQ ID NO: 178775 - protein, 7 aa, synthetic construct
MDGKLRH

SEQ ID NO: 178776 - protein, 7 aa, synthetic construct
MVGQTRN

SEQ ID NO: 178777 - protein, 7 aa, synthetic construct
YDGQKRP

SEQ ID NO: 178778 - protein, 7 aa, synthetic construct
MEGKTRI

SEQ ID NO: 178779 - protein, 7 aa, synthetic construct
MDRAPRI

SEQ ID NO: 178780 - protein, 7 aa, synthetic construct
GDRQIRI

SEQ ID NO: 178781 - protein, 7 aa, synthetic construct
MDLKRHI

SEQ ID NO: 178782 - protein, 7 aa, synthetic construct
MDSKPRI

SEQ ID NO: 178783 - protein, 7 aa, synthetic construct
MDHKARI

SEQ ID NO: 178784 - protein, 7 aa, synthetic construct
MRGQQVI

SEQ ID NO: 178785 - protein, 7 aa, synthetic construct
ADGKSRI

SEQ ID NO: 178786 - protein, 7 aa, synthetic construct
MDGVRKY

SEQ ID NO: 178787 - protein, 7 aa, synthetic construct
MDKQHRM

SEQ ID NO: 178788 - protein, 7 aa, synthetic construct
MDGVRLR

SEQ ID NO: 178789 - protein, 7 aa, synthetic construct
MDGGKRI

SEQ ID NO: 178790 - protein, 7 aa, synthetic construct
YDGVRRP

SEQ ID NO: 178791 - protein, 7 aa, synthetic construct
MSGHRNI

SEQ ID NO: 178792 - protein, 7 aa, synthetic construct
MSGQPRN

SEQ ID NO: 178793 - protein, 7 aa, synthetic construct
MVGQLRG

SEQ ID NO: 178794 - protein, 7 aa, synthetic construct
MDVQRRV

SEQ ID NO: 178795 - protein, 7 aa, synthetic construct
MDMQRVK

SEQ ID NO: 178796 - protein, 7 aa, synthetic construct
MDSMKRI

SEQ ID NO: 178797 - protein, 7 aa, synthetic construct
GDNVRRI

SEQ ID NO: 178798 - protein, 7 aa, synthetic construct
YDGQVRK

SEQ ID NO: 178799 - protein, 7 aa, synthetic construct
MDNMRRG

SEQ ID NO: 178800 - protein, 7 aa, synthetic construct
MDKQIRS

SEQ ID NO: 178801 - protein, 7 aa, synthetic construct
MDSQRGR

SEQ ID NO: 178802 - protein, 7 aa, synthetic construct
MDRQTRT

SEQ ID NO: 178803 - protein, 7 aa, synthetic construct
IDRQVRI

SEQ ID NO: 178804 - protein, 7 aa, synthetic construct
MRGQERP

SEQ ID NO: 178805 - protein, 7 aa, synthetic construct
MENQRRP

SEQ ID NO: 178806 - protein, 7 aa, synthetic construct
MTGERRS

SEQ ID NO: 178807 - protein, 7 aa, synthetic construct
GDVQRRI

SEQ ID NO: 178808 - protein, 7 aa, synthetic construct
LRGQERI

SEQ ID NO: 178809 - protein, 7 aa, synthetic construct
MAGHRNI

SEQ ID NO: 178810 - protein, 7 aa, synthetic construct
MDTQRTR

SEQ ID NO: 178811 - protein, 7 aa, synthetic construct
VDGMRRS

SEQ ID NO: 178812 - protein, 7 aa, synthetic construct
DKEQRRI

SEQ ID NO: 178813 - protein, 7 aa, synthetic construct
NDTQKRI

SEQ ID NO: 178814 - protein, 7 aa, synthetic construct
MIGQMRA

SEQ ID NO: 178815 - protein, 7 aa, synthetic construct
ADVQKRI

SEQ ID NO: 178816 - protein, 7 aa, synthetic construct
MDGKRLY

SEQ ID NO: 178817 - protein, 7 aa, synthetic construct
MDGPRKL

SEQ ID NO: 178818 - protein, 7 aa, synthetic construct
TDGARRI

SEQ ID NO: 178819 - protein, 7 aa, synthetic construct
MVGHRNI

SEQ ID NO: 178820 - protein, 7 aa, synthetic construct
GDVARRI

SEQ ID NO: 178821 - protein, 7 aa, synthetic construct
SDGVRRV

SEQ ID NO: 178822 - protein, 7 aa, synthetic construct
QDLQRRP

SEQ ID NO: 178823 - protein, 7 aa, synthetic construct
MHGQMRG

SEQ ID NO: 178824 - protein, 7 aa, synthetic construct
MDGDKRK

SEQ ID NO: 178825 - protein, 7 aa, synthetic construct
MMGDRRM

SEQ ID NO: 178826 - protein, 7 aa, synthetic construct
MVGQMRQ

SEQ ID NO: 178827 - protein, 7 aa, synthetic construct
MDKQRYV

SEQ ID NO: 178828 - protein, 7 aa, synthetic construct
PDAQRRG

SEQ ID NO: 178829 - protein, 7 aa, synthetic construct
NIGQHRI

SEQ ID NO: 178830 - protein, 7 aa, synthetic construct
QDGRQRI

SEQ ID NO: 178831 - protein, 7 aa, synthetic construct
MDVVRRG

SEQ ID NO: 178832 - protein, 7 aa, synthetic construct
RDGAHRI

SEQ ID NO: 178833 - protein, 7 aa, synthetic construct
QDGLRRP

SEQ ID NO: 178834 - protein, 7 aa, synthetic construct
FDNQRRA

SEQ ID NO: 178835 - protein, 7 aa, synthetic construct
GDAPRRI

SEQ ID NO: 178836 - protein, 7 aa, synthetic construct
NDNQRRS

SEQ ID NO: 178837 - protein, 7 aa, synthetic construct
MDATRRI

SEQ ID NO: 178838 - protein, 7 aa, synthetic construct
RTGQRDI

SEQ ID NO: 178839 - protein, 7 aa, synthetic construct
RDKQRDI

SEQ ID NO: 178840 - protein, 7 aa, synthetic construct
MAGHRVI

SEQ ID NO: 178841 - protein, 7 aa, synthetic construct
MKGQRDI

SEQ ID NO: 178842 - protein, 7 aa, synthetic construct
MQGQVRA

SEQ ID NO: 178843 - protein, 7 aa, synthetic construct
MDTPRKI

SEQ ID NO: 178844 - protein, 7 aa, synthetic construct
MKGQYTI

SEQ ID NO: 178845 - protein, 7 aa, synthetic construct
MDNTRRT

SEQ ID NO: 178846 - protein, 7 aa, synthetic construct
WDKQVRI

SEQ ID NO: 178847 - protein, 7 aa, synthetic construct
MPGQIRG

SEQ ID NO: 178848 - protein, 7 aa, synthetic construct
MEGQKRG

SEQ ID NO: 178849 - protein, 7 aa, synthetic construct
RDGQTRA

SEQ ID NO: 178850 - protein, 7 aa, synthetic construct
MDNVRRT

SEQ ID NO: 178851 - protein, 7 aa, synthetic construct
RDDQRRP

SEQ ID NO: 178852 - protein, 7 aa, synthetic construct
LDGQRAR

SEQ ID NO: 178853 - protein, 7 aa, synthetic construct
MLGQIRG

SEQ ID NO: 178854 - protein, 7 aa, synthetic construct
MDGRLKI

SEQ ID NO: 178855 - protein, 7 aa, synthetic construct
MDGQAKR

SEQ ID NO: 178856 - protein, 7 aa, synthetic construct
MDPLRRT

SEQ ID NO: 178857 - protein, 7 aa, synthetic construct
MDIARRS

SEQ ID NO: 178858 - protein, 7 aa, synthetic construct
MPGQHRA

SEQ ID NO: 178859 - protein, 7 aa, synthetic construct
DTGTRRI

SEQ ID NO: 178860 - protein, 7 aa, synthetic construct
VDGQKRQ

SEQ ID NO: 178861 - protein, 7 aa, synthetic construct
MDQVRRA

SEQ ID NO: 178862 - protein, 7 aa, synthetic construct
MRGQTRE

SEQ ID NO: 178863 - protein, 7 aa, synthetic construct
LDGPRRV

SEQ ID NO: 178864 - protein, 7 aa, synthetic construct
MDGTTRK

SEQ ID NO: 178865 - protein, 7 aa, synthetic construct
MDTRRAI

SEQ ID NO: 178866 - protein, 7 aa, synthetic construct
DTGQRKI

SEQ ID NO: 178867 - protein, 7 aa, synthetic construct
MMGERRS

SEQ ID NO: 178868 - protein, 7 aa, synthetic construct
MDQKHRI

SEQ ID NO: 178869 - protein, 7 aa, synthetic construct
IDSIRRI

SEQ ID NO: 178870 - protein, 7 aa, synthetic construct
GVGQHRI

SEQ ID NO: 178871 - protein, 7 aa, synthetic construct
GDAVRRI

SEQ ID NO: 178872 - protein, 7 aa, synthetic construct
MDGASRR

SEQ ID NO: 178873 - protein, 7 aa, synthetic construct
NDQQRRG

SEQ ID NO: 178874 - protein, 7 aa, synthetic construct
MAGHSRI

SEQ ID NO: 178875 - protein, 7 aa, synthetic construct
IDGRARI

SEQ ID NO: 178876 - protein, 7 aa, synthetic construct
IDQTRRI

SEQ ID NO: 178877 - protein, 7 aa, synthetic construct
NDGQRKM

SEQ ID NO: 178878 - protein, 7 aa, synthetic construct
KDGQERK

SEQ ID NO: 178879 - protein, 7 aa, synthetic construct
MRGQLRD

SEQ ID NO: 178880 - protein, 7 aa, synthetic construct
MDGMRLK

SEQ ID NO: 178881 - protein, 7 aa, synthetic construct
MMGNRRE

SEQ ID NO: 178882 - protein, 7 aa, synthetic construct
MDGMRSK

SEQ ID NO: 178883 - protein, 7 aa, synthetic construct
FDTQRKI

SEQ ID NO: 178884 - protein, 7 aa, synthetic construct
QDGQRAR

SEQ ID NO: 178885 - protein, 7 aa, synthetic construct
IDGQKRY

SEQ ID NO: 178886 - protein, 7 aa, synthetic construct
ADGQKRY

SEQ ID NO: 178887 - protein, 7 aa, synthetic construct
MTKQRDI

SEQ ID NO: 178888 - protein, 7 aa, synthetic construct
MDGRRSA

SEQ ID NO: 178889 - protein, 7 aa, synthetic construct
VDRQTRI

SEQ ID NO: 178890 - protein, 7 aa, synthetic construct
TDGLRRV

SEQ ID NO: 178891 - protein, 7 aa, synthetic construct
MDGSKRG

SEQ ID NO: 178892 - protein, 7 aa, synthetic construct
MDKQVRA

SEQ ID NO: 178893 - protein, 7 aa, synthetic construct
YDGIRRG

SEQ ID NO: 178894 - protein, 7 aa, synthetic construct
IDSQRRT

SEQ ID NO: 178895 - protein, 7 aa, synthetic construct
MDGPRMK

SEQ ID NO: 178896 - protein, 7 aa, synthetic construct
ADGRGRI

SEQ ID NO: 178897 - protein, 7 aa, synthetic construct
MDNPRRA

SEQ ID NO: 178898 - protein, 7 aa, synthetic construct
MKGNRDI

SEQ ID NO: 178899 - protein, 7 aa, synthetic construct
FDGKVRI

SEQ ID NO: 178900 - protein, 7 aa, synthetic construct
VENQRRI

SEQ ID NO: 178901 - protein, 7 aa, synthetic construct
YDNQRRI

SEQ ID NO: 178902 - protein, 7 aa, synthetic construct
MHGQTRG

SEQ ID NO: 178903 - protein, 7 aa, synthetic construct
MDRMRAI

SEQ ID NO: 178904 - protein, 7 aa, synthetic construct
IDVQRRG

SEQ ID NO: 178905 - protein, 7 aa, synthetic construct
NDNVRRI

SEQ ID NO: 178906 - protein, 7 aa, synthetic construct
DMGPRRI

SEQ ID NO: 178907 - protein, 7 aa, synthetic construct
ADDKRRI

SEQ ID NO: 178908 - protein, 7 aa, synthetic construct
MDGIRKM

SEQ ID NO: 178909 - protein, 7 aa, synthetic construct
DIGTRRI

SEQ ID NO: 178910 - protein, 7 aa, synthetic construct
MIGTRHI

SEQ ID NO: 178911 - protein, 7 aa, synthetic construct
IDGLRRS

SEQ ID NO: 178912 - protein, 7 aa, synthetic construct
TDGAKRI

SEQ ID NO: 178913 - protein, 7 aa, synthetic construct
MDQQKRF

SEQ ID NO: 178914 - protein, 7 aa, synthetic construct
MDGIRQK

SEQ ID NO: 178915 - protein, 7 aa, synthetic construct
IDGVRRV

SEQ ID NO: 178916 - protein, 7 aa, synthetic construct
MPGQRHQ

SEQ ID NO: 178917 - protein, 7 aa, synthetic construct
GDGIRRV

SEQ ID NO: 178918 - protein, 7 aa, synthetic construct
MPGQTRG

SEQ ID NO: 178919 - protein, 7 aa, synthetic construct
MDGQMKK

SEQ ID NO: 178920 - protein, 7 aa, synthetic construct
MDGKPRI

SEQ ID NO: 178921 - protein, 7 aa, synthetic construct
IDNTRRI

SEQ ID NO: 178922 - protein, 7 aa, synthetic construct
NDSQRRV

SEQ ID NO: 178923 - protein, 7 aa, synthetic construct
LDGQKRM

SEQ ID NO: 178924 - protein, 7 aa, synthetic construct
SDGRNRI

SEQ ID NO: 178925 - protein, 7 aa, synthetic construct
TDAQKRI

SEQ ID NO: 178926 - protein, 7 aa, synthetic construct
TDAMRRI

SEQ ID NO: 178927 - protein, 7 aa, synthetic construct
LDGQRGK

SEQ ID NO: 178928 - protein, 7 aa, synthetic construct
ADGLKRI

SEQ ID NO: 178929 - protein, 7 aa, synthetic construct
MDGRNRT

SEQ ID NO: 178930 - protein, 7 aa, synthetic construct
MDSQNRK

SEQ ID NO: 178931 - protein, 7 aa, synthetic construct
MIDQRRV

SEQ ID NO: 178932 - protein, 7 aa, synthetic construct
MDAQQRK

SEQ ID NO: 178933 - protein, 7 aa, synthetic construct
LDGSRRA

SEQ ID NO: 178934 - protein, 7 aa, synthetic construct
RDGQRAS

SEQ ID NO: 178935 - protein, 7 aa, synthetic construct
MDGIKRY

SEQ ID NO: 178936 - protein, 7 aa, synthetic construct
MDLARRA

SEQ ID NO: 178937 - protein, 7 aa, synthetic construct
MDGRQKI

SEQ ID NO: 178938 - protein, 7 aa, synthetic construct
GDNQKRI

SEQ ID NO: 178939 - protein, 7 aa, synthetic construct
DPGQKRI

SEQ ID NO: 178940 - protein, 7 aa, synthetic construct
QDQQRRG

SEQ ID NO: 178941 - protein, 7 aa, synthetic construct
QDGQRLR

SEQ ID NO: 178942 - protein, 7 aa, synthetic construct
VDGIRRI

SEQ ID NO: 178943 - protein, 7 aa, synthetic construct
MDGKIRH

SEQ ID NO: 178944 - protein, 7 aa, synthetic construct
MDGRAKI

SEQ ID NO: 178945 - protein, 7 aa, synthetic construct
MPGQTRN

SEQ ID NO: 178946 - protein, 7 aa, synthetic construct
ADGQRVK

SEQ ID NO: 178947 - protein, 7 aa, synthetic construct
MDKLARI

SEQ ID NO: 178948 - protein, 7 aa, synthetic construct
YDGQSRK

SEQ ID NO: 178949 - protein, 7 aa, synthetic construct
MDNQKRV

SEQ ID NO: 178950 - protein, 7 aa, synthetic construct
NDGQRVR

SEQ ID NO: 178951 - protein, 7 aa, synthetic construct
IDGQQRK

SEQ ID NO: 178952 - protein, 7 aa, synthetic construct
ADGKQRI

SEQ ID NO: 178953 - protein, 7 aa, synthetic construct
MDAMRRS

SEQ ID NO: 178954 - protein, 7 aa, synthetic construct
MDAQKRT

SEQ ID NO: 178955 - protein, 7 aa, synthetic construct
MKSQRDI

SEQ ID NO: 178956 - protein, 7 aa, synthetic construct
IDGQRKS

SEQ ID NO: 178957 - protein, 7 aa, synthetic construct
MDGFKRV

SEQ ID NO: 178958 - protein, 7 aa, synthetic construct
GDNPRRI

SEQ ID NO: 178959 - protein, 7 aa, synthetic construct
GDTTRRI

SEQ ID NO: 178960 - protein, 7 aa, synthetic construct
MDLHKRI

SEQ ID NO: 178961 - protein, 7 aa, synthetic construct
SDPQRRG

SEQ ID NO: 178962 - protein, 7 aa, synthetic construct
MDQQRAK

SEQ ID NO: 178963 - protein, 7 aa, synthetic construct
MDQPKRI

SEQ ID NO: 178964 - protein, 7 aa, synthetic construct
LDGQRNR

SEQ ID NO: 178965 - protein, 7 aa, synthetic construct
RDGARNI

SEQ ID NO: 178966 - protein, 7 aa, synthetic construct
MLGERRG

SEQ ID NO: 178967 - protein, 7 aa, synthetic construct
MDMKLRI

SEQ ID NO: 178968 - protein, 7 aa, synthetic construct
IDNPRRI

SEQ ID NO: 178969 - protein, 7 aa, synthetic construct
ATEQRRI

SEQ ID NO: 178970 - protein, 7 aa, synthetic construct
MVDQRRN

SEQ ID NO: 178971 - protein, 7 aa, synthetic construct
NDGVRRP

SEQ ID NO: 178972 - protein, 7 aa, synthetic construct
MHGNRAI

SEQ ID NO: 178973 - protein, 7 aa, synthetic construct
MDGMARK

SEQ ID NO: 178974 - protein, 7 aa, synthetic construct
FDGVKRI

SEQ ID NO: 178975 - protein, 7 aa, synthetic construct
MDGGRPR

SEQ ID NO: 178976 - protein, 7 aa, synthetic construct
MDKQHRY

SEQ ID NO: 178977 - protein, 7 aa, synthetic construct
MVGQARH

SEQ ID NO: 178978 - protein, 7 aa, synthetic construct
VDLQRRP

SEQ ID NO: 178979 - protein, 7 aa, synthetic construct
MDGKNRG

SEQ ID NO: 178980 - protein, 7 aa, synthetic construct
TDMSRRI

SEQ ID NO: 178981 - protein, 7 aa, synthetic construct
MDHAKRI

SEQ ID NO: 178982 - protein, 7 aa, synthetic construct
ADGPRRI

SEQ ID NO: 178983 - protein, 7 aa, synthetic construct
MDGKIRI

SEQ ID NO: 178984 - protein, 7 aa, synthetic construct
GDGTRRV

SEQ ID NO: 178985 - protein, 7 aa, synthetic construct
ADTQKRI

SEQ ID NO: 178986 - protein, 7 aa, synthetic construct
QDPNRRI

SEQ ID NO: 178987 - protein, 7 aa, synthetic construct
MDVQKRS

SEQ ID NO: 178988 - protein, 7 aa, synthetic construct
MIGQIRG

SEQ ID NO: 178989 - protein, 7 aa, synthetic construct
TDLQRKI

SEQ ID NO: 178990 - protein, 7 aa, synthetic construct
LDNQRRT

SEQ ID NO: 178991 - protein, 7 aa, synthetic construct
DKGQRSI

SEQ ID NO: 178992 - protein, 7 aa, synthetic construct
MPIQRRE

SEQ ID NO: 178993 - protein, 7 aa, synthetic construct
MDKQTRF

SEQ ID NO: 178994 - protein, 7 aa, synthetic construct
MDGKRIF

SEQ ID NO: 178995 - protein, 7 aa, synthetic construct
QDGQRKM

SEQ ID NO: 178996 - protein, 7 aa, synthetic construct
MRGMRDI

SEQ ID NO: 178997 - protein, 7 aa, synthetic construct
LDGIRRT

SEQ ID NO: 178998 - protein, 7 aa, synthetic construct
MDGSMRK

SEQ ID NO: 178999 - protein, 7 aa, synthetic construct
APDQRRI

SEQ ID NO: 179000 - protein, 7 aa, synthetic construct
MIDQRRQ

SEQ ID NO: 179001 - protein, 7 aa, synthetic construct
GDRQRTI

SEQ ID NO: 179002 - protein, 7 aa, synthetic construct
IIDQRRI

SEQ ID NO: 179003 - protein, 7 aa, synthetic construct
IDGGRRV

SEQ ID NO: 179004 - protein, 7 aa, synthetic construct
MLGQVRP

SEQ ID NO: 179005 - protein, 7 aa, synthetic construct
MRGQIRE

SEQ ID NO: 179006 - protein, 7 aa, synthetic construct
MTGHRQI

SEQ ID NO: 179007 - protein, 7 aa, synthetic construct
MDGSKRM

SEQ ID NO: 179008 - protein, 7 aa, synthetic construct
IDGQRQK

SEQ ID NO: 179009 - protein, 7 aa, synthetic construct
MDGKHRS

SEQ ID NO: 179010 - protein, 7 aa, synthetic construct
MMGERRQ

SEQ ID NO: 179011 - protein, 7 aa, synthetic construct
MDRQVRN

SEQ ID NO: 179012 - protein, 7 aa, synthetic construct
GDLQRRV

SEQ ID NO: 179013 - protein, 7 aa, synthetic construct
QDGQKRS

SEQ ID NO: 179014 - protein, 7 aa, synthetic construct
LDGQRGR

SEQ ID NO: 179015 - protein, 7 aa, synthetic construct
IDIQRRN

SEQ ID NO: 179016 - protein, 7 aa, synthetic construct
MDRQARM

SEQ ID NO: 179017 - protein, 7 aa, synthetic construct
VIDQRRI

SEQ ID NO: 179018 - protein, 7 aa, synthetic construct
MDGIKRH

SEQ ID NO: 179019 - protein, 7 aa, synthetic construct
LDIQRRG

SEQ ID NO: 179020 - protein, 7 aa, synthetic construct
FDGNRRV

SEQ ID NO: 179021 - protein, 7 aa, synthetic construct
MHGQLRN

SEQ ID NO: 179022 - protein, 7 aa, synthetic construct
TDNSRRI

SEQ ID NO: 179023 - protein, 7 aa, synthetic construct
VDGIRRG

SEQ ID NO: 179024 - protein, 7 aa, synthetic construct
MHGQLRQ

SEQ ID NO: 179025 - protein, 7 aa, synthetic construct
MDSGRRA

SEQ ID NO: 179026 - protein, 7 aa, synthetic construct
MIDARRI

SEQ ID NO: 179027 - protein, 7 aa, synthetic construct
MDGRRVT

SEQ ID NO: 179028 - protein, 7 aa, synthetic construct
MAGHRMI

SEQ ID NO: 179029 - protein, 7 aa, synthetic construct
QDPMRRI

SEQ ID NO: 179030 - protein, 7 aa, synthetic construct
MHKQRDI

SEQ ID NO: 179031 - protein, 7 aa, synthetic construct
ADGQKRQ

SEQ ID NO: 179032 - protein, 7 aa, synthetic construct
SDSQRRP

SEQ ID NO: 179033 - protein, 7 aa, synthetic construct
HDKQVRI

SEQ ID NO: 179034 - protein, 7 aa, synthetic construct
ELGQKRI

SEQ ID NO: 179035 - protein, 7 aa, synthetic construct
ADGMKRI

SEQ ID NO: 179036 - protein, 7 aa, synthetic construct
MSETRRI

SEQ ID NO: 179037 - protein, 7 aa, synthetic construct
NDSPRRI

SEQ ID NO: 179038 - protein, 7 aa, synthetic construct
MRGQRDP

SEQ ID NO: 179039 - protein, 7 aa, synthetic construct
YSGQHRI

SEQ ID NO: 179040 - protein, 7 aa, synthetic construct
NDGQMRK

SEQ ID NO: 179041 - protein, 7 aa, synthetic construct
VDSSRRI

SEQ ID NO: 179042 - protein, 7 aa, synthetic construct
TDRQARI

SEQ ID NO: 179043 - protein, 7 aa, synthetic construct
RDHQTRI

SEQ ID NO: 179044 - protein, 7 aa, synthetic construct
MTGQARQ

SEQ ID NO: 179045 - protein, 7 aa, synthetic construct
FDSARRI

SEQ ID NO: 179046 - protein, 7 aa, synthetic construct
MDAPRRM

SEQ ID NO: 179047 - protein, 7 aa, synthetic construct
FDGKRVI

SEQ ID NO: 179048 - protein, 7 aa, synthetic construct
NDGKGRI

SEQ ID NO: 179049 - protein, 7 aa, synthetic construct
SDTQRRS

SEQ ID NO: 179050 - protein, 7 aa, synthetic construct
TVEQRRI

SEQ ID NO: 179051 - protein, 7 aa, synthetic construct
VETQRRI

SEQ ID NO: 179052 - protein, 7 aa, synthetic construct
MDGSARK

SEQ ID NO: 179053 - protein, 7 aa, synthetic construct
HDGQKRV

SEQ ID NO: 179054 - protein, 7 aa, synthetic construct
MDGKVRF

SEQ ID NO: 179055 - protein, 7 aa, synthetic construct
MDGPTRK

SEQ ID NO: 179056 - protein, 7 aa, synthetic construct
VEPQRRI

SEQ ID NO: 179057 - protein, 7 aa, synthetic construct
ADRQSRI

SEQ ID NO: 179058 - protein, 7 aa, synthetic construct
RDGQRHP

SEQ ID NO: 179059 - protein, 7 aa, synthetic construct
MDRQMKI

SEQ ID NO: 179060 - protein, 7 aa, synthetic construct
MDNQRVK

SEQ ID NO: 179061 - protein, 7 aa, synthetic construct
MMGMRRE

SEQ ID NO: 179062 - protein, 7 aa, synthetic construct
MDKERRL

SEQ ID NO: 179063 - protein, 7 aa, synthetic construct
MDAIRRT

SEQ ID NO: 179064 - protein, 7 aa, synthetic construct
ADGQKRS

SEQ ID NO: 179065 - protein, 7 aa, synthetic construct
MDTGRRA

SEQ ID NO: 179066 - protein, 7 aa, synthetic construct
IDGVRRA

SEQ ID NO: 179067 - protein, 7 aa, synthetic construct
MDGQIKK

SEQ ID NO: 179068 - protein, 7 aa, synthetic construct
YDIQRKI

SEQ ID NO: 179069 - protein, 7 aa, synthetic construct
MAGERRA

SEQ ID NO: 179070 - protein, 7 aa, synthetic construct
MDKQFRV

SEQ ID NO: 179071 - protein, 7 aa, synthetic construct
NKGQRDI

SEQ ID NO: 179072 - protein, 7 aa, synthetic construct
MRGQAQI

SEQ ID NO: 179073 - protein, 7 aa, synthetic construct
LDGQKRQ

SEQ ID NO: 179074 - protein, 7 aa, synthetic construct
MSGQMRA

SEQ ID NO: 179075 - protein, 7 aa, synthetic construct
HDGKRII

SEQ ID NO: 179076 - protein, 7 aa, synthetic construct
MSGQSRP

SEQ ID NO: 179077 - protein, 7 aa, synthetic construct
RDGVHRI

SEQ ID NO: 179078 - protein, 7 aa, synthetic construct
MDGKMRF

SEQ ID NO: 179079 - protein, 7 aa, synthetic construct
MMGTRHI

SEQ ID NO: 179080 - protein, 7 aa, synthetic construct
FDGARRQ

SEQ ID NO: 179081 - protein, 7 aa, synthetic construct
RDGIRSI

SEQ ID NO: 179082 - protein, 7 aa, synthetic construct
MTGTRHI

SEQ ID NO: 179083 - protein, 7 aa, synthetic construct
GDGGRKI

SEQ ID NO: 179084 - protein, 7 aa, synthetic construct
EKGQRNI

SEQ ID NO: 179085 - protein, 7 aa, synthetic construct
MDGKNRT

SEQ ID NO: 179086 - protein, 7 aa, synthetic construct
FDGTRRP

SEQ ID NO: 179087 - protein, 7 aa, synthetic construct
SDKQRRE

SEQ ID NO: 179088 - protein, 7 aa, synthetic construct
ADSPRRI

SEQ ID NO: 179089 - protein, 7 aa, synthetic construct
MNPERRI

SEQ ID NO: 179090 - protein, 7 aa, synthetic construct
MDRVRHI

SEQ ID NO: 179091 - protein, 7 aa, synthetic construct
MAGPRRE

SEQ ID NO: 179092 - protein, 7 aa, synthetic construct
MDTQKRN

SEQ ID NO: 179093 - protein, 7 aa, synthetic construct
MDAQARK

SEQ ID NO: 179094 - protein, 7 aa, synthetic construct
LDMGRRI

SEQ ID NO: 179095 - protein, 7 aa, synthetic construct
MRGDRSI

SEQ ID NO: 179096 - protein, 7 aa, synthetic construct
MVGQIRQ

SEQ ID NO: 179097 - protein, 7 aa, synthetic construct
TDTQKRI

SEQ ID NO: 179098 - protein, 7 aa, synthetic construct
NDGQKRL

SEQ ID NO: 179099 - protein, 7 aa, synthetic construct
TDGQKRV

SEQ ID NO: 179100 - protein, 7 aa, synthetic construct
MMGQHRP

SEQ ID NO: 179101 - protein, 7 aa, synthetic construct
DVAQRRI

SEQ ID NO: 179102 - protein, 7 aa, synthetic construct
MSGERRA

SEQ ID NO: 179103 - protein, 7 aa, synthetic construct
MDGNRGK

SEQ ID NO: 179104 - protein, 7 aa, synthetic construct
NDGQRKG

SEQ ID NO: 179105 - protein, 7 aa, synthetic construct
NDGPRRA

SEQ ID NO: 179106 - protein, 7 aa, synthetic construct
MDKQRFM

SEQ ID NO: 179107 - protein, 7 aa, synthetic construct
MDSQKRN

SEQ ID NO: 179108 - protein, 7 aa, synthetic construct
MAGQRHA

SEQ ID NO: 179109 - protein, 7 aa, synthetic construct
VDGLRRS

SEQ ID NO: 179110 - protein, 7 aa, synthetic construct
MTGQMRA

SEQ ID NO: 179111 - protein, 7 aa, synthetic construct
MDKQARH

SEQ ID NO: 179112 - protein, 7 aa, synthetic construct
YDGQKRI

SEQ ID NO: 179113 - protein, 7 aa, synthetic construct
MDGQRKS

SEQ ID NO: 179114 - protein, 7 aa, synthetic construct
QDGKFRI

SEQ ID NO: 179115 - protein, 7 aa, synthetic construct
IDIQRRG

SEQ ID NO: 179116 - protein, 7 aa, synthetic construct
MDGVKRS

SEQ ID NO: 179117 - protein, 7 aa, synthetic construct
IDGQKRG

SEQ ID NO: 179118 - protein, 7 aa, synthetic construct
YDGVRKI

SEQ ID NO: 179119 - protein, 7 aa, synthetic construct
MRGQRMD

SEQ ID NO: 179120 - protein, 7 aa, synthetic construct
NDGIKRI

SEQ ID NO: 179121 - protein, 7 aa, synthetic construct
TIGQRRE

SEQ ID NO: 179122 - protein, 7 aa, synthetic construct
TDQIRRI

SEQ ID NO: 179123 - protein, 7 aa, synthetic construct
FDGSKRI

SEQ ID NO: 179124 - protein, 7 aa, synthetic construct
YDGKRGI

SEQ ID NO: 179125 - protein, 7 aa, synthetic construct
MMGQARN

SEQ ID NO: 179126 - protein, 7 aa, synthetic construct
MPGPRRE

SEQ ID NO: 179127 - protein, 7 aa, synthetic construct
MDGPRKV

SEQ ID NO: 179128 - protein, 7 aa, synthetic construct
MDGARKV

SEQ ID NO: 179129 - protein, 7 aa, synthetic construct
MDGKFRT

SEQ ID NO: 179130 - protein, 7 aa, synthetic construct
YDGTRRP

SEQ ID NO: 179131 - protein, 7 aa, synthetic construct
MHGSSRI

SEQ ID NO: 179132 - protein, 7 aa, synthetic construct
MTGDRRA

SEQ ID NO: 179133 - protein, 7 aa, synthetic construct
RDGHTRI

SEQ ID NO: 179134 - protein, 7 aa, synthetic construct
RDGPRII

SEQ ID NO: 179135 - protein, 7 aa, synthetic construct
MMGQSRN

SEQ ID NO: 179136 - protein, 7 aa, synthetic construct
FDGPKRI

SEQ ID NO: 179137 - protein, 7 aa, synthetic construct
YDGVRRA

SEQ ID NO: 179138 - protein, 7 aa, synthetic construct
QDAQRRI

SEQ ID NO: 179139 - protein, 7 aa, synthetic construct
YDGQKRQ

SEQ ID NO: 179140 - protein, 7 aa, synthetic construct
MTTQRHI

SEQ ID NO: 179141 - protein, 7 aa, synthetic construct
MMGQKRD

SEQ ID NO: 179142 - protein, 7 aa, synthetic construct
MDGGPRK

SEQ ID NO: 179143 - protein, 7 aa, synthetic construct
GDGQRRV

SEQ ID NO: 179144 - protein, 7 aa, synthetic construct
MDMQRRA

SEQ ID NO: 179145 - protein, 7 aa, synthetic construct
MRGSERI

SEQ ID NO: 179146 - protein, 7 aa, synthetic construct
LDINRRI

SEQ ID NO: 179147 - protein, 7 aa, synthetic construct
QDVTRRI

SEQ ID NO: 179148 - protein, 7 aa, synthetic construct
MDGKRFH

SEQ ID NO: 179149 - protein, 7 aa, synthetic construct
MTTQRRE

SEQ ID NO: 179150 - protein, 7 aa, synthetic construct
NDGLRKI

SEQ ID NO: 179151 - protein, 7 aa, synthetic construct
MDKRRDI

SEQ ID NO: 179152 - protein, 7 aa, synthetic construct
MQGQSRA

SEQ ID NO: 179153 - protein, 7 aa, synthetic construct
MAGDRRM

SEQ ID NO: 179154 - protein, 7 aa, synthetic construct
MDQQRKN

SEQ ID NO: 179155 - protein, 7 aa, synthetic construct
MQGERRN

SEQ ID NO: 179156 - protein, 7 aa, synthetic construct
NDGQRKT

SEQ ID NO: 179157 - protein, 7 aa, synthetic construct
MDGTRGR

SEQ ID NO: 179158 - protein, 7 aa, synthetic construct
NDGVRRM

SEQ ID NO: 179159 - protein, 7 aa, synthetic construct
MDQLRRP

SEQ ID NO: 179160 - protein, 7 aa, synthetic construct
VDGQKRF

SEQ ID NO: 179161 - protein, 7 aa, synthetic construct
MDGQVRK

SEQ ID NO: 179162 - protein, 7 aa, synthetic construct
QDATRRI

SEQ ID NO: 179163 - protein, 7 aa, synthetic construct
IDTGRRI

SEQ ID NO: 179164 - protein, 7 aa, synthetic construct
TDQVRRI

SEQ ID NO: 179165 - protein, 7 aa, synthetic construct
TDGKRMI

SEQ ID NO: 179166 - protein, 7 aa, synthetic construct
MDIQRRG

SEQ ID NO: 179167 - protein, 7 aa, synthetic construct
MDSQRVR

SEQ ID NO: 179168 - protein, 7 aa, synthetic construct
LDGQRKN

SEQ ID NO: 179169 - protein, 7 aa, synthetic construct
MHGQTRS

SEQ ID NO: 179170 - protein, 7 aa, synthetic construct
MDSQKRL

SEQ ID NO: 179171 - protein, 7 aa, synthetic construct
DIAQRRI

SEQ ID NO: 179172 - protein, 7 aa, synthetic construct
QDGQLRK

SEQ ID NO: 179173 - protein, 7 aa, synthetic construct
MRTQRDI

SEQ ID NO: 179174 - protein, 7 aa, synthetic construct
MRGQRTD

SEQ ID NO: 179175 - protein, 7 aa, synthetic construct
MEKQRHI

SEQ ID NO: 179176 - protein, 7 aa, synthetic construct
GDVQRRA

SEQ ID NO: 179177 - protein, 7 aa, synthetic construct
MTGKRDI

SEQ ID NO: 179178 - protein, 7 aa, synthetic construct
MVGQHRA

SEQ ID NO: 179179 - protein, 7 aa, synthetic construct
MAGERRQ

SEQ ID NO: 179180 - protein, 7 aa, synthetic construct
MDTMRRV

SEQ ID NO: 179181 - protein, 7 aa, synthetic construct
IDGQARK

SEQ ID NO: 179182 - protein, 7 aa, synthetic construct
SDGQRLK

SEQ ID NO: 179183 - protein, 7 aa, synthetic construct
MVDNRRI

SEQ ID NO: 179184 - protein, 7 aa, synthetic construct
NDNQRKI

SEQ ID NO: 179185 - protein, 7 aa, synthetic construct
MDGAGRK

SEQ ID NO: 179186 - protein, 7 aa, synthetic construct
RDHQRTI

SEQ ID NO: 179187 - protein, 7 aa, synthetic construct
VDQQRRS

SEQ ID NO: 179188 - protein, 7 aa, synthetic construct
VRGQRDI

SEQ ID NO: 179189 - protein, 7 aa, synthetic construct
LDGQVRR

SEQ ID NO: 179190 - protein, 7 aa, synthetic construct
MIGQLRQ

SEQ ID NO: 179191 - protein, 7 aa, synthetic construct
YTGQHRI

SEQ ID NO: 179192 - protein, 7 aa, synthetic construct
GDITRRI

SEQ ID NO: 179193 - protein, 7 aa, synthetic construct
MPGQERR

SEQ ID NO: 179194 - protein, 7 aa, synthetic construct
MTGRREI

SEQ ID NO: 179195 - protein, 7 aa, synthetic construct
FDTQKRI

SEQ ID NO: 179196 - protein, 7 aa, synthetic construct
MDGRMRM

SEQ ID NO: 179197 - protein, 7 aa, synthetic construct
MDGMRKQ

SEQ ID NO: 179198 - protein, 7 aa, synthetic construct
NDGPRRI

SEQ ID NO: 179199 - protein, 7 aa, synthetic construct
SDGQKRM

SEQ ID NO: 179200 - protein, 7 aa, synthetic construct
MPPQRRD

SEQ ID NO: 179201 - protein, 7 aa, synthetic construct
YDGQRIK

SEQ ID NO: 179202 - protein, 7 aa, synthetic construct
RDGQRDK

SEQ ID NO: 179203 - protein, 7 aa, synthetic construct
MDTKPRI

SEQ ID NO: 179204 - protein, 7 aa, synthetic construct
MDRQKTI

SEQ ID NO: 179205 - protein, 7 aa, synthetic construct
LDGVRRG

SEQ ID NO: 179206 - protein, 7 aa, synthetic construct
TEPQRRI

SEQ ID NO: 179207 - protein, 7 aa, synthetic construct
ADGMRRP

SEQ ID NO: 179208 - protein, 7 aa, synthetic construct
MDPVRRL

SEQ ID NO: 179209 - protein, 7 aa, synthetic construct
MTGQSRQ

SEQ ID NO: 179210 - protein, 7 aa, synthetic construct
TDLQRRV

SEQ ID NO: 179211 - protein, 7 aa, synthetic construct
MDNQKRF

SEQ ID NO: 179212 - protein, 7 aa, synthetic construct
MHGQVRG

SEQ ID NO: 179213 - protein, 7 aa, synthetic construct
IDHQKRI

SEQ ID NO: 179214 - protein, 7 aa, synthetic construct
YDKQSRI

SEQ ID NO: 179215 - protein, 7 aa, synthetic construct
FDGLKRI

SEQ ID NO: 179216 - protein, 7 aa, synthetic construct
MIGHRNI

SEQ ID NO: 179217 - protein, 7 aa, synthetic construct
MDGRTRL

SEQ ID NO: 179218 - protein, 7 aa, synthetic construct
MDHKIRI

SEQ ID NO: 179219 - protein, 7 aa, synthetic construct
MEGKMRI

SEQ ID NO: 179220 - protein, 7 aa, synthetic construct
TDGGRRV

SEQ ID NO: 179221 - protein, 7 aa, synthetic construct
MDGQKSR

SEQ ID NO: 179222 - protein, 7 aa, synthetic construct
YDGQRRV

SEQ ID NO: 179223 - protein, 7 aa, synthetic construct
QDMPRRI

SEQ ID NO: 179224 - protein, 7 aa, synthetic construct
MVGHNRI

SEQ ID NO: 179225 - protein, 7 aa, synthetic construct
MVRQRDI

SEQ ID NO: 179226 - protein, 7 aa, synthetic construct
MDIKPRI

SEQ ID NO: 179227 - protein, 7 aa, synthetic construct
MDGKSRG

SEQ ID NO: 179228 - protein, 7 aa, synthetic construct
QENQRRI

SEQ ID NO: 179229 - protein, 7 aa, synthetic construct
MSGQARG

SEQ ID NO: 179230 - protein, 7 aa, synthetic construct
TDTQRRS

SEQ ID NO: 179231 - protein, 7 aa, synthetic construct
MDGSPRK

SEQ ID NO: 179232 - protein, 7 aa, synthetic construct
MDGTRTK

SEQ ID NO: 179233 - protein, 7 aa, synthetic construct
MDTQRLK

SEQ ID NO: 179234 - protein, 7 aa, synthetic construct
MPDQRRI

SEQ ID NO: 179235 - protein, 7 aa, synthetic construct
MDIAKRI

SEQ ID NO: 179236 - protein, 7 aa, synthetic construct
MDGGGRK

SEQ ID NO: 179237 - protein, 7 aa, synthetic construct
MDRQTKI

SEQ ID NO: 179238 - protein, 7 aa, synthetic construct
NDGQRMK

SEQ ID NO: 179239 - protein, 7 aa, synthetic construct
VDGQTRR

SEQ ID NO: 179240 - protein, 7 aa, synthetic construct
TDTQRRA

SEQ ID NO: 179241 - protein, 7 aa, synthetic construct
MDTRRSI

SEQ ID NO: 179242 - protein, 7 aa, synthetic construct
MDVQKRQ

SEQ ID NO: 179243 - protein, 7 aa, synthetic construct
SDTPRRI

SEQ ID NO: 179244 - protein, 7 aa, synthetic construct
MEKQHRI

SEQ ID NO: 179245 - protein, 7 aa, synthetic construct
MLGQQRN

SEQ ID NO: 179246 - protein, 7 aa, synthetic construct
TDAGRRI

SEQ ID NO: 179247 - protein, 7 aa, synthetic construct
MDGQQKK

SEQ ID NO: 179248 - protein, 7 aa, synthetic construct
MMGTHRI

SEQ ID NO: 179249 - protein, 7 aa, synthetic construct
MDKNYRI

SEQ ID NO: 179250 - protein, 7 aa, synthetic construct
ADQVRRI

SEQ ID NO: 179251 - protein, 7 aa, synthetic construct
SDNQRRP

SEQ ID NO: 179252 - protein, 7 aa, synthetic construct
MGGQKRE

SEQ ID NO: 179253 - protein, 7 aa, synthetic construct
MMGPRTI

SEQ ID NO: 179254 - protein, 7 aa, synthetic construct
MDGRIRN

SEQ ID NO: 179255 - protein, 7 aa, synthetic construct
RAGQREI

SEQ ID NO: 179256 - protein, 7 aa, synthetic construct
MDAARRV

SEQ ID NO: 179257 - protein, 7 aa, synthetic construct
MDGMRRS

SEQ ID NO: 179258 - protein, 7 aa, synthetic construct
MKGQDRA

SEQ ID NO: 179259 - protein, 7 aa, synthetic construct
TDGKPRI

SEQ ID NO: 179260 - protein, 7 aa, synthetic construct
MKGQSYI

SEQ ID NO: 179261 - protein, 7 aa, synthetic construct
MDGGLRK

SEQ ID NO: 179262 - protein, 7 aa, synthetic construct
LDGGRRG

SEQ ID NO: 179263 - protein, 7 aa, synthetic construct
MKGPREI

SEQ ID NO: 179264 - protein, 7 aa, synthetic construct
LDNQRRM

SEQ ID NO: 179265 - protein, 7 aa, synthetic construct
MDGQRRP

SEQ ID NO: 179266 - protein, 7 aa, synthetic construct
MDGTVRK

SEQ ID NO: 179267 - protein, 7 aa, synthetic construct
EKGQIRI

SEQ ID NO: 179268 - protein, 7 aa, synthetic construct
TDSQRRV

SEQ ID NO: 179269 - protein, 7 aa, synthetic construct
MDRQVRM

SEQ ID NO: 179270 - protein, 7 aa, synthetic construct
IDSTRRI

SEQ ID NO: 179271 - protein, 7 aa, synthetic construct
VDGQRMK

SEQ ID NO: 179272 - protein, 7 aa, synthetic construct
VDGPRRS

SEQ ID NO: 179273 - protein, 7 aa, synthetic construct
MDGTKRS

SEQ ID NO: 179274 - protein, 7 aa, synthetic construct
DLGTRRI

SEQ ID NO: 179275 - protein, 7 aa, synthetic construct
MTGQHRV

SEQ ID NO: 179276 - protein, 7 aa, synthetic construct
MDNNRRL

SEQ ID NO: 179277 - protein, 7 aa, synthetic construct
MDAQRSK

SEQ ID NO: 179278 - protein, 7 aa, synthetic construct
MPSQRRE

SEQ ID NO: 179279 - protein, 7 aa, synthetic construct
MDGQRQR

SEQ ID NO: 179280 - protein, 7 aa, synthetic construct
SDLQRRV

SEQ ID NO: 179281 - protein, 7 aa, synthetic construct
MDGIRGR

SEQ ID NO: 179282 - protein, 7 aa, synthetic construct
LDQQRRM

SEQ ID NO: 179283 - protein, 7 aa, synthetic construct
QDGVRRA

SEQ ID NO: 179284 - protein, 7 aa, synthetic construct
MRGQTPI

SEQ ID NO: 179285 - protein, 7 aa, synthetic construct
MRGQTQI

SEQ ID NO: 179286 - protein, 7 aa, synthetic construct
MDGMRQR

SEQ ID NO: 179287 - protein, 7 aa, synthetic construct
YDNQRRS

SEQ ID NO: 179288 - protein, 7 aa, synthetic construct
TDKQRFI

SEQ ID NO: 179289 - protein, 7 aa, synthetic construct
IEPQRRI

SEQ ID NO: 179290 - protein, 7 aa, synthetic construct
MMGQIRN

SEQ ID NO: 179291 - protein, 7 aa, synthetic construct
FDGQARK

SEQ ID NO: 179292 - protein, 7 aa, synthetic construct
MYKQRDI

SEQ ID NO: 179293 - protein, 7 aa, synthetic construct
SDVQKRI

SEQ ID NO: 179294 - protein, 7 aa, synthetic construct
MDLARRG

SEQ ID NO: 179295 - protein, 7 aa, synthetic construct
MDGMRRA

SEQ ID NO: 179296 - protein, 7 aa, synthetic construct
MDSPRRT

SEQ ID NO: 179297 - protein, 7 aa, synthetic construct
IDGQRTR

SEQ ID NO: 179298 - protein, 7 aa, synthetic construct
YDKQRGI

SEQ ID NO: 179299 - protein, 7 aa, synthetic construct
MDGSKRT

SEQ ID NO: 179300 - protein, 7 aa, synthetic construct
MDGQKNK

SEQ ID NO: 179301 - protein, 7 aa, synthetic construct
MDVQKRI

SEQ ID NO: 179302 - protein, 7 aa, synthetic construct
TDGKRYI

SEQ ID NO: 179303 - protein, 7 aa, synthetic construct
MRGQSMI

SEQ ID NO: 179304 - protein, 7 aa, synthetic construct
MDSQKRM

SEQ ID NO: 179305 - protein, 7 aa, synthetic construct
MPGQIRH

SEQ ID NO: 179306 - protein, 7 aa, synthetic construct
GDGQRLK

SEQ ID NO: 179307 - protein, 7 aa, synthetic construct
MDGIRMK

SEQ ID NO: 179308 - protein, 7 aa, synthetic construct
MDGRRMV

SEQ ID NO: 179309 - protein, 7 aa, synthetic construct
VDGIRRS

SEQ ID NO: 179310 - protein, 7 aa, synthetic construct
MFGQTRS

SEQ ID NO: 179311 - protein, 7 aa, synthetic construct
NDIQRRS

SEQ ID NO: 179312 - protein, 7 aa, synthetic construct
GDQQRKI

SEQ ID NO: 179313 - protein, 7 aa, synthetic construct
MDQQKRA

SEQ ID NO: 179314 - protein, 7 aa, synthetic construct
YDGNRRV

SEQ ID NO: 179315 - protein, 7 aa, synthetic construct
MDTARRM

SEQ ID NO: 179316 - protein, 7 aa, synthetic construct
MTGHRTI

SEQ ID NO: 179317 - protein, 7 aa, synthetic construct
MGGQKRD

SEQ ID NO: 179318 - protein, 7 aa, synthetic construct
MDPNRRM

SEQ ID NO: 179319 - protein, 7 aa, synthetic construct
MTGQHRM

SEQ ID NO: 179320 - protein, 7 aa, synthetic construct
MDKQQRN

SEQ ID NO: 179321 - protein, 7 aa, synthetic construct
TDRQNRI

SEQ ID NO: 179322 - protein, 7 aa, synthetic construct
MDGQSKK

SEQ ID NO: 179323 - protein, 7 aa, synthetic construct
GDGQKRN

SEQ ID NO: 179324 - protein, 7 aa, synthetic construct
MPGQRGN

SEQ ID NO: 179325 - protein, 7 aa, synthetic construct
GDPQRRS

SEQ ID NO: 179326 - protein, 7 aa, synthetic construct
IDAMRRI

SEQ ID NO: 179327 - protein, 7 aa, synthetic construct
LDGNRRN

SEQ ID NO: 179328 - protein, 7 aa, synthetic construct
MSDQRRG

SEQ ID NO: 179329 - protein, 7 aa, synthetic construct
FDDKRRI

SEQ ID NO: 179330 - protein, 7 aa, synthetic construct
YDKERRI

SEQ ID NO: 179331 - protein, 7 aa, synthetic construct
ADGKRSI

SEQ ID NO: 179332 - protein, 7 aa, synthetic construct
IDGQRMK

SEQ ID NO: 179333 - protein, 7 aa, synthetic construct
ADRQLRI

SEQ ID NO: 179334 - protein, 7 aa, synthetic construct
LDNNRRI

SEQ ID NO: 179335 - protein, 7 aa, synthetic construct
MTGPRHI

SEQ ID NO: 179336 - protein, 7 aa, synthetic construct
SDGQRMK

SEQ ID NO: 179337 - protein, 7 aa, synthetic construct
MDSQRLK

SEQ ID NO: 179338 - protein, 7 aa, synthetic construct
YAGQHRI

SEQ ID NO: 179339 - protein, 7 aa, synthetic construct
IDVTRRI

SEQ ID NO: 179340 - protein, 7 aa, synthetic construct
TDQQRRA

SEQ ID NO: 179341 - protein, 7 aa, synthetic construct
MDKPRFI

SEQ ID NO: 179342 - protein, 7 aa, synthetic construct
MDQVRRG

SEQ ID NO: 179343 - protein, 7 aa, synthetic construct
ADMPRRI

SEQ ID NO: 179344 - protein, 7 aa, synthetic construct
IDGARRI

SEQ ID NO: 179345 - protein, 7 aa, synthetic construct
MDAARRT

SEQ ID NO: 179346 - protein, 7 aa, synthetic construct
MGDTRRI

SEQ ID NO: 179347 - protein, 7 aa, synthetic construct
MDNQKRT

SEQ ID NO: 179348 - protein, 7 aa, synthetic construct
TDSQRKI

SEQ ID NO: 179349 - protein, 7 aa, synthetic construct
MDGGQRK

SEQ ID NO: 179350 - protein, 7 aa, synthetic construct
QDGQKRL

SEQ ID NO: 179351 - protein, 7 aa, synthetic construct
VDGIRRA

SEQ ID NO: 179352 - protein, 7 aa, synthetic construct
MDAQMRK

SEQ ID NO: 179353 - protein, 7 aa, synthetic construct
MDGRVRL

SEQ ID NO: 179354 - protein, 7 aa, synthetic construct
FDGARRG

SEQ ID NO: 179355 - protein, 7 aa, synthetic construct
MLGDRRS

SEQ ID NO: 179356 - protein, 7 aa, synthetic construct
MDLTKRI

SEQ ID NO: 179357 - protein, 7 aa, synthetic construct
MDAPRRS

SEQ ID NO: 179358 - protein, 7 aa, synthetic construct
MDGLRKI

SEQ ID NO: 179359 - protein, 7 aa, synthetic construct
VDGVRRA

SEQ ID NO: 179360 - protein, 7 aa, synthetic construct
MTGQMRN

SEQ ID NO: 179361 - protein, 7 aa, synthetic construct
MDTTRRA

SEQ ID NO: 179362 - protein, 7 aa, synthetic construct
SDGQRGR

SEQ ID NO: 179363 - protein, 7 aa, synthetic construct
MDGTRSR

SEQ ID NO: 179364 - protein, 7 aa, synthetic construct
VDGQRAR

SEQ ID NO: 179365 - protein, 7 aa, synthetic construct
MDGNRTK

SEQ ID NO: 179366 - protein, 7 aa, synthetic construct
MDGRIRI

SEQ ID NO: 179367 - protein, 7 aa, synthetic construct
IDSQRRN

SEQ ID NO: 179368 - protein, 7 aa, synthetic construct
YDGLRRQ

SEQ ID NO: 179369 - protein, 7 aa, synthetic construct
MDAARRM

SEQ ID NO: 179370 - protein, 7 aa, synthetic construct
MDGPKRG

SEQ ID NO: 179371 - protein, 7 aa, synthetic construct
GDGKRSI

SEQ ID NO: 179372 - protein, 7 aa, synthetic construct
IDGRSRI

SEQ ID NO: 179373 - protein, 7 aa, synthetic construct
MIDQRRG

SEQ ID NO: 179374 - protein, 7 aa, synthetic construct
LDSQRRS

SEQ ID NO: 179375 - protein, 7 aa, synthetic construct
MIGERRA

SEQ ID NO: 179376 - protein, 7 aa, synthetic construct
FDKQGRI

SEQ ID NO: 179377 - protein, 7 aa, synthetic construct
MLGPRRE

SEQ ID NO: 179378 - protein, 7 aa, synthetic construct
MDGRTRI

SEQ ID NO: 179379 - protein, 7 aa, synthetic construct
MGGQSRA

SEQ ID NO: 179380 - protein, 7 aa, synthetic construct
MRGSRDI

SEQ ID NO: 179381 - protein, 7 aa, synthetic construct
GDRQPRI

SEQ ID NO: 179382 - protein, 7 aa, synthetic construct
MDGVRPR

SEQ ID NO: 179383 - protein, 7 aa, synthetic construct
MDIQRKS

SEQ ID NO: 179384 - protein, 7 aa, synthetic construct
MPGQARQ

SEQ ID NO: 179385 - protein, 7 aa, synthetic construct
SDGKRGI

SEQ ID NO: 179386 - protein, 7 aa, synthetic construct
MDGKPRY

SEQ ID NO: 179387 - protein, 7 aa, synthetic construct
MDGRIRT

SEQ ID NO: 179388 - protein, 7 aa, synthetic construct
MDALRRS

SEQ ID NO: 179389 - protein, 7 aa, synthetic construct
PDGPKRI

SEQ ID NO: 179390 - protein, 7 aa, synthetic construct
IDGRQRI

SEQ ID NO: 179391 - protein, 7 aa, synthetic construct
QDPQRRI

SEQ ID NO: 179392 - protein, 7 aa, synthetic construct
GTGQHRI

SEQ ID NO: 179393 - protein, 7 aa, synthetic construct
PDVQRRV

SEQ ID NO: 179394 - protein, 7 aa, synthetic construct
IDTQRRT

SEQ ID NO: 179395 - protein, 7 aa, synthetic construct
MDNQRKT

SEQ ID NO: 179396 - protein, 7 aa, synthetic construct
TDGQRLR

SEQ ID NO: 179397 - protein, 7 aa, synthetic construct
MDGTKRT

SEQ ID NO: 179398 - protein, 7 aa, synthetic construct
MDKQRYN

SEQ ID NO: 179399 - protein, 7 aa, synthetic construct
TDGKRQI

SEQ ID NO: 179400 - protein, 7 aa, synthetic construct
MMGQDRK

SEQ ID NO: 179401 - protein, 7 aa, synthetic construct
IDGQTRR

SEQ ID NO: 179402 - protein, 7 aa, synthetic construct
GDMPRRI

SEQ ID NO: 179403 - protein, 7 aa, synthetic construct
MDGTKRF

SEQ ID NO: 179404 - protein, 7 aa, synthetic construct
VDGRMRI

SEQ ID NO: 179405 - protein, 7 aa, synthetic construct
MQGVRRE

SEQ ID NO: 179406 - protein, 7 aa, synthetic construct
PDVQRRG

SEQ ID NO: 179407 - protein, 7 aa, synthetic construct
MDGITRK

SEQ ID NO: 179408 - protein, 7 aa, synthetic construct
MDNQVRK

SEQ ID NO: 179409 - protein, 7 aa, synthetic construct
IDVQRRQ

SEQ ID NO: 179410 - protein, 7 aa, synthetic construct
SDGLRRP

SEQ ID NO: 179411 - protein, 7 aa, synthetic construct
MVGHQRI

SEQ ID NO: 179412 - protein, 7 aa, synthetic construct
MDGVPRK

SEQ ID NO: 179413 - protein, 7 aa, synthetic construct
MDGKQRG

SEQ ID NO: 179414 - protein, 7 aa, synthetic construct
QDGVRRI

SEQ ID NO: 179415 - protein, 7 aa, synthetic construct
MDVRARI

SEQ ID NO: 179416 - protein, 7 aa, synthetic construct
LDSIRRI

SEQ ID NO: 179417 - protein, 7 aa, synthetic construct
MEGVRRV

SEQ ID NO: 179418 - protein, 7 aa, synthetic construct
MVGQSRN

SEQ ID NO: 179419 - protein, 7 aa, synthetic construct
MRGGERI

SEQ ID NO: 179420 - protein, 7 aa, synthetic construct
MDTQRRV

SEQ ID NO: 179421 - protein, 7 aa, synthetic construct
MDGRQRA

SEQ ID NO: 179422 - protein, 7 aa, synthetic construct
MDPIRRN

SEQ ID NO: 179423 - protein, 7 aa, synthetic construct
MDKQHRV

SEQ ID NO: 179424 - protein, 7 aa, synthetic construct
MDGVRNR

SEQ ID NO: 179425 - protein, 7 aa, synthetic construct
MEGQKRV

SEQ ID NO: 179426 - protein, 7 aa, synthetic construct
TDAQRRS

SEQ ID NO: 179427 - protein, 7 aa, synthetic construct
IDGARRN

SEQ ID NO: 179428 - protein, 7 aa, synthetic construct
MDGMRVK

SEQ ID NO: 179429 - protein, 7 aa, synthetic construct
MTGQHRG

SEQ ID NO: 179430 - protein, 7 aa, synthetic construct
MDGGRKS

SEQ ID NO: 179431 - protein, 7 aa, synthetic construct
VDGPRKI

SEQ ID NO: 179432 - protein, 7 aa, synthetic construct
LDRQHRI

SEQ ID NO: 179433 - protein, 7 aa, synthetic construct
MDRQPRQ

SEQ ID NO: 179434 - protein, 7 aa, synthetic construct
ADATRRI

SEQ ID NO: 179435 - protein, 7 aa, synthetic construct
MDGTRAR

SEQ ID NO: 179436 - protein, 7 aa, synthetic construct
LDGPKRI

SEQ ID NO: 179437 - protein, 7 aa, synthetic construct
MDGPRSK

SEQ ID NO: 179438 - protein, 7 aa, synthetic construct
ADGQRLK

SEQ ID NO: 179439 - protein, 7 aa, synthetic construct
ETGQKRI

SEQ ID NO: 179440 - protein, 7 aa, synthetic construct
MDGIRKQ

SEQ ID NO: 179441 - protein, 7 aa, synthetic construct
MAGQERK

SEQ ID NO: 179442 - protein, 7 aa, synthetic construct
MDGKARV

SEQ ID NO: 179443 - protein, 7 aa, synthetic construct
NDQPRRI

SEQ ID NO: 179444 - protein, 7 aa, synthetic construct
QDTGRRI

SEQ ID NO: 179445 - protein, 7 aa, synthetic construct
MDLARRS

SEQ ID NO: 179446 - protein, 7 aa, synthetic construct
MHGQIRN

SEQ ID NO: 179447 - protein, 7 aa, synthetic construct
MLGVRRE

SEQ ID NO: 179448 - protein, 7 aa, synthetic construct
VDGQRKM

SEQ ID NO: 179449 - protein, 7 aa, synthetic construct
NDSMRRI

SEQ ID NO: 179450 - protein, 7 aa, synthetic construct
FDKQHRI

SEQ ID NO: 179451 - protein, 7 aa, synthetic construct
NDGNRRI

SEQ ID NO: 179452 - protein, 7 aa, synthetic construct
FDGQKRQ

SEQ ID NO: 179453 - protein, 7 aa, synthetic construct
IDNQRRA

SEQ ID NO: 179454 - protein, 7 aa, synthetic construct
LDTQRRV

SEQ ID NO: 179455 - protein, 7 aa, synthetic construct
MRGQPNI

SEQ ID NO: 179456 - protein, 7 aa, synthetic construct
LDAVRRI

SEQ ID NO: 179457 - protein, 7 aa, synthetic construct
MTGQVRN

SEQ ID NO: 179458 - protein, 7 aa, synthetic construct
RDGTRHI

SEQ ID NO: 179459 - protein, 7 aa, synthetic construct
MDKDRRN

SEQ ID NO: 179460 - protein, 7 aa, synthetic construct
MDRATRI

SEQ ID NO: 179461 - protein, 7 aa, synthetic construct
MVGHRSI

SEQ ID NO: 179462 - protein, 7 aa, synthetic construct
ADTQRRI

SEQ ID NO: 179463 - protein, 7 aa, synthetic construct
MDLSRKI

SEQ ID NO: 179464 - protein, 7 aa, synthetic construct
MDGKLRY

SEQ ID NO: 179465 - protein, 7 aa, synthetic construct
MSGSRHI

SEQ ID NO: 179466 - protein, 7 aa, synthetic construct
MDVARRA

SEQ ID NO: 179467 - protein, 7 aa, synthetic construct
IDGQRKF

SEQ ID NO: 179468 - protein, 7 aa, synthetic construct
MMGQSRA

SEQ ID NO: 179469 - protein, 7 aa, synthetic construct
LDASRRI

SEQ ID NO: 179470 - protein, 7 aa, synthetic construct
MDRQPRN

SEQ ID NO: 179471 - protein, 7 aa, synthetic construct
MRGQERS

SEQ ID NO: 179472 - protein, 7 aa, synthetic construct
QDGKSRI

SEQ ID NO: 179473 - protein, 7 aa, synthetic construct
MDGQARR

SEQ ID NO: 179474 - protein, 7 aa, synthetic construct
LDGLRRT

SEQ ID NO: 179475 - protein, 7 aa, synthetic construct
MITQRRE

SEQ ID NO: 179476 - protein, 7 aa, synthetic construct
TDKQYRI

SEQ ID NO: 179477 - protein, 7 aa, synthetic construct
MDMNRRG

SEQ ID NO: 179478 - protein, 7 aa, synthetic construct
MDGRTRP

SEQ ID NO: 179479 - protein, 7 aa, synthetic construct
IDVGRRI

SEQ ID NO: 179480 - protein, 7 aa, synthetic construct
MDGIKRV

SEQ ID NO: 179481 - protein, 7 aa, synthetic construct
MDVARRT

SEQ ID NO: 179482 - protein, 7 aa, synthetic construct
MDNARRI

SEQ ID NO: 179483 - protein, 7 aa, synthetic construct
TDGQKRF

SEQ ID NO: 179484 - protein, 7 aa, synthetic construct
GDGKRQI

SEQ ID NO: 179485 - protein, 7 aa, synthetic construct
SDGQRMR

SEQ ID NO: 179486 - protein, 7 aa, synthetic construct
ADKQPRI

SEQ ID NO: 179487 - protein, 7 aa, synthetic construct
MDGRLRQ

SEQ ID NO: 179488 - protein, 7 aa, synthetic construct
MMGQRHG

SEQ ID NO: 179489 - protein, 7 aa, synthetic construct
MDGMKRL

SEQ ID NO: 179490 - protein, 7 aa, synthetic construct
MDGRVRG

SEQ ID NO: 179491 - protein, 7 aa, synthetic construct
TDVQRRP

SEQ ID NO: 179492 - protein, 7 aa, synthetic construct
MDKQGRQ

SEQ ID NO: 179493 - protein, 7 aa, synthetic construct
IDLNRRI

SEQ ID NO: 179494 - protein, 7 aa, synthetic construct
GDGKRNI

SEQ ID NO: 179495 - protein, 7 aa, synthetic construct
MMGQVRN

SEQ ID NO: 179496 - protein, 7 aa, synthetic construct
MDGKYRT

SEQ ID NO: 179497 - protein, 7 aa, synthetic construct
DQGQKRI

SEQ ID NO: 179498 - protein, 7 aa, synthetic construct
MIGQMRQ

SEQ ID NO: 179499 - protein, 7 aa, synthetic construct
MLGQARG

SEQ ID NO: 179500 - protein, 7 aa, synthetic construct
MDGRRGS

SEQ ID NO: 179501 - protein, 7 aa, synthetic construct
MSGQARA

SEQ ID NO: 179502 - protein, 7 aa, synthetic construct
MHGQPRA

SEQ ID NO: 179503 - protein, 7 aa, synthetic construct
TDGTRRI

SEQ ID NO: 179504 - protein, 7 aa, synthetic construct
NDGQKRI

SEQ ID NO: 179505 - protein, 7 aa, synthetic construct
RDGSRSI

SEQ ID NO: 179506 - protein, 7 aa, synthetic construct
MRGVREI

SEQ ID NO: 179507 - protein, 7 aa, synthetic construct
MDGPRSR

SEQ ID NO: 179508 - protein, 7 aa, synthetic construct
MDGTKRQ

SEQ ID NO: 179509 - protein, 7 aa, synthetic construct
DAGQRRV

SEQ ID NO: 179510 - protein, 7 aa, synthetic construct
MDGQTKK

SEQ ID NO: 179511 - protein, 7 aa, synthetic construct
MDSPRRM

SEQ ID NO: 179512 - protein, 7 aa, synthetic construct
LDSQRRG

SEQ ID NO: 179513 - protein, 7 aa, synthetic construct
MDGRNRA

SEQ ID NO: 179514 - protein, 7 aa, synthetic construct
SDGQRKS

SEQ ID NO: 179515 - protein, 7 aa, synthetic construct
MRGQINI

SEQ ID NO: 179516 - protein, 7 aa, synthetic construct
MLGQERK

SEQ ID NO: 179517 - protein, 7 aa, synthetic construct
MDRVPRI

SEQ ID NO: 179518 - protein, 7 aa, synthetic construct
MTETRRI

SEQ ID NO: 179519 - protein, 7 aa, synthetic construct
MDAQKRV

SEQ ID NO: 179520 - protein, 7 aa, synthetic construct
FDGQRLK

SEQ ID NO: 179521 - protein, 7 aa, synthetic construct
QDGQRQR

SEQ ID NO: 179522 - protein, 7 aa, synthetic construct
ADGRTRI

SEQ ID NO: 179523 - protein, 7 aa, synthetic construct
HDGQKRA

SEQ ID NO: 179524 - protein, 7 aa, synthetic construct
MDGAKRT

SEQ ID NO: 179525 - protein, 7 aa, synthetic construct
MDKPQRI

SEQ ID NO: 179526 - protein, 7 aa, synthetic construct
HDGKSRI

SEQ ID NO: 179527 - protein, 7 aa, synthetic construct
MTGQHRA

SEQ ID NO: 179528 - protein, 7 aa, synthetic construct
MDRQRAN

SEQ ID NO: 179529 - protein, 7 aa, synthetic construct
MVGQRHG

SEQ ID NO: 179530 - protein, 7 aa, synthetic construct
TDGQRKI

SEQ ID NO: 179531 - protein, 7 aa, synthetic construct
MLGQTRS

SEQ ID NO: 179532 - protein, 7 aa, synthetic construct
MDKQIRH

SEQ ID NO: 179533 - protein, 7 aa, synthetic construct
TDRQIRI

SEQ ID NO: 179534 - protein, 7 aa, synthetic construct
MDGQTRR

SEQ ID NO: 179535 - protein, 7 aa, synthetic construct
MRGQTII

SEQ ID NO: 179536 - protein, 7 aa, synthetic construct
QHGQRVI

SEQ ID NO: 179537 - protein, 7 aa, synthetic construct
MDGTRKF

SEQ ID NO: 179538 - protein, 7 aa, synthetic construct
MDSLRRV

SEQ ID NO: 179539 - protein, 7 aa, synthetic construct
TDGIRRI

SEQ ID NO: 179540 - protein, 7 aa, synthetic construct
MDGKRNM

SEQ ID NO: 179541 - protein, 7 aa, synthetic construct
MDKERRQ

SEQ ID NO: 179542 - protein, 7 aa, synthetic construct
MMNQRRE

SEQ ID NO: 179543 - protein, 7 aa, synthetic construct
LDLQRRG

SEQ ID NO: 179544 - protein, 7 aa, synthetic construct
IDGPRRT

SEQ ID NO: 179545 - protein, 7 aa, synthetic construct
ADPQRRV

SEQ ID NO: 179546 - protein, 7 aa, synthetic construct
MDGARFK

SEQ ID NO: 179547 - protein, 7 aa, synthetic construct
MDGKYRA

SEQ ID NO: 179548 - protein, 7 aa, synthetic construct
NDGQRNR

SEQ ID NO: 179549 - protein, 7 aa, synthetic construct
MDKQGRF

SEQ ID NO: 179550 - protein, 7 aa, synthetic construct
IDGIRRQ

SEQ ID NO: 179551 - protein, 7 aa, synthetic construct
MDNARRV

SEQ ID NO: 179552 - protein, 7 aa, synthetic construct
VTEQRRI

SEQ ID NO: 179553 - protein, 7 aa, synthetic construct
MDGKVRT

SEQ ID NO: 179554 - protein, 7 aa, synthetic construct
MDNQRLR

SEQ ID NO: 179555 - protein, 7 aa, synthetic construct
MDGTRVR

SEQ ID NO: 179556 - protein, 7 aa, synthetic construct
MDGQKQR

SEQ ID NO: 179557 - protein, 7 aa, synthetic construct
DKGQARI

SEQ ID NO: 179558 - protein, 7 aa, synthetic construct
MDGRRTS

SEQ ID NO: 179559 - protein, 7 aa, synthetic construct
MIGQIRS

SEQ ID NO: 179560 - protein, 7 aa, synthetic construct
NDKQIRI

SEQ ID NO: 179561 - protein, 7 aa, synthetic construct
MVGQSRQ

SEQ ID NO: 179562 - protein, 7 aa, synthetic construct
MDSRRQI

SEQ ID NO: 179563 - protein, 7 aa, synthetic construct
MIGQRHQ

SEQ ID NO: 179564 - protein, 7 aa, synthetic construct
MDGQKYR

SEQ ID NO: 179565 - protein, 7 aa, synthetic construct
MDGQRKI

SEQ ID NO: 179566 - protein, 7 aa, synthetic construct
KDGQRHS

SEQ ID NO: 179567 - protein, 7 aa, synthetic construct
MPGQSRQ

SEQ ID NO: 179568 - protein, 7 aa, synthetic construct
MRGQSSI

SEQ ID NO: 179569 - protein, 7 aa, synthetic construct
MDNVRRG

SEQ ID NO: 179570 - protein, 7 aa, synthetic construct
TDGKRTI

SEQ ID NO: 179571 - protein, 7 aa, synthetic construct
TDGVRRA

SEQ ID NO: 179572 - protein, 7 aa, synthetic construct
QDTQRRS

SEQ ID NO: 179573 - protein, 7 aa, synthetic construct
MDRTHRI

SEQ ID NO: 179574 - protein, 7 aa, synthetic construct
MDVPRRV

SEQ ID NO: 179575 - protein, 7 aa, synthetic construct
MDRQMRN

SEQ ID NO: 179576 - protein, 7 aa, synthetic construct
QDNARRI

SEQ ID NO: 179577 - protein, 7 aa, synthetic construct
NDGQRKA

SEQ ID NO: 179578 - protein, 7 aa, synthetic construct
LDGNRRG

SEQ ID NO: 179579 - protein, 7 aa, synthetic construct
ADVQRRP

SEQ ID NO: 179580 - protein, 7 aa, synthetic construct
GDGMRKI

SEQ ID NO: 179581 - protein, 7 aa, synthetic construct
MDGRRQM

SEQ ID NO: 179582 - protein, 7 aa, synthetic construct
MDGQRIK

SEQ ID NO: 179583 - protein, 7 aa, synthetic construct
MDLQRKN

SEQ ID NO: 179584 - protein, 7 aa, synthetic construct
QDGRMRI

SEQ ID NO: 179585 - protein, 7 aa, synthetic construct
MDMQKRM

SEQ ID NO: 179586 - protein, 7 aa, synthetic construct
IDGLRRG

SEQ ID NO: 179587 - protein, 7 aa, synthetic construct
IDGVRRG

SEQ ID NO: 179588 - protein, 7 aa, synthetic construct
HDGVKRI

SEQ ID NO: 179589 - protein, 7 aa, synthetic construct
MDGVRTR

SEQ ID NO: 179590 - protein, 7 aa, synthetic construct
MDPGRRQ

SEQ ID NO: 179591 - protein, 7 aa, synthetic construct
VDGQRGR

SEQ ID NO: 179592 - protein, 7 aa, synthetic construct
MDAMRRG

SEQ ID NO: 179593 - protein, 7 aa, synthetic construct
GDKQTRI

SEQ ID NO: 179594 - protein, 7 aa, synthetic construct
MDNSRRG

SEQ ID NO: 179595 - protein, 7 aa, synthetic construct
MDGQQRK

SEQ ID NO: 179596 - protein, 7 aa, synthetic construct
MDGSRGR

SEQ ID NO: 179597 - protein, 7 aa, synthetic construct
QDGQRQK

SEQ ID NO: 179598 - protein, 7 aa, synthetic construct
IDGQRRP

SEQ ID NO: 179599 - protein, 7 aa, synthetic construct
ADLQRRP

SEQ ID NO: 179600 - protein, 7 aa, synthetic construct
MDSMRRG

SEQ ID NO: 179601 - protein, 7 aa, synthetic construct
YDGQRTK

SEQ ID NO: 179602 - protein, 7 aa, synthetic construct
MVGDRRQ

SEQ ID NO: 179603 - protein, 7 aa, synthetic construct
NDGLRRG

SEQ ID NO: 179604 - protein, 7 aa, synthetic construct
NDGQKRM

SEQ ID NO: 179605 - protein, 7 aa, synthetic construct
MDGKTRL

SEQ ID NO: 179606 - protein, 7 aa, synthetic construct
MVGLRRE

SEQ ID NO: 179607 - protein, 7 aa, synthetic construct
MIGDRRS

SEQ ID NO: 179608 - protein, 7 aa, synthetic construct
DMPQRRI

SEQ ID NO: 179609 - protein, 7 aa, synthetic construct
MDSRSRI

SEQ ID NO: 179610 - protein, 7 aa, synthetic construct
MDGSNRR

SEQ ID NO: 179611 - protein, 7 aa, synthetic construct
IDGNRRG

SEQ ID NO: 179612 - protein, 7 aa, synthetic construct
MDLQRNK

SEQ ID NO: 179613 - protein, 7 aa, synthetic construct
VDGVRRS

SEQ ID NO: 179614 - protein, 7 aa, synthetic construct
LDGVRRI

SEQ ID NO: 179615 - protein, 7 aa, synthetic construct
YDGQRKL

SEQ ID NO: 179616 - protein, 7 aa, synthetic construct
MDITRRS

SEQ ID NO: 179617 - protein, 7 aa, synthetic construct
MDVKPRI

SEQ ID NO: 179618 - protein, 7 aa, synthetic construct
MDGGRTK

SEQ ID NO: 179619 - protein, 7 aa, synthetic construct
VDNQRRL

SEQ ID NO: 179620 - protein, 7 aa, synthetic construct
MDGGKRG

SEQ ID NO: 179621 - protein, 7 aa, synthetic construct
MDGLRGR

SEQ ID NO: 179622 - protein, 7 aa, synthetic construct
TDGLRRQ

SEQ ID NO: 179623 - protein, 7 aa, synthetic construct
SDGKRSI

SEQ ID NO: 179624 - protein, 7 aa, synthetic construct
QDGQGRK

SEQ ID NO: 179625 - protein, 7 aa, synthetic construct
TLDQRRI

SEQ ID NO: 179626 - protein, 7 aa, synthetic construct
MDQQKRI

SEQ ID NO: 179627 - protein, 7 aa, synthetic construct
FDKQQRI

SEQ ID NO: 179628 - protein, 7 aa, synthetic construct
LDGMRRQ

SEQ ID NO: 179629 - protein, 7 aa, synthetic construct
TDAIRRI

SEQ ID NO: 179630 - protein, 7 aa, synthetic construct
MDGKDRK

SEQ ID NO: 179631 - protein, 7 aa, synthetic construct
MDGKRYN

SEQ ID NO: 179632 - protein, 7 aa, synthetic construct
MDGQGKK

SEQ ID NO: 179633 - protein, 7 aa, synthetic construct
MPGQARA

SEQ ID NO: 179634 - protein, 7 aa, synthetic construct
QIDQRRI

SEQ ID NO: 179635 - protein, 7 aa, synthetic construct
TDGQKRT

SEQ ID NO: 179636 - protein, 7 aa, synthetic construct
YDKQMRI

SEQ ID NO: 179637 - protein, 7 aa, synthetic construct
LDGQTRR

SEQ ID NO: 179638 - protein, 7 aa, synthetic construct
NDGRRQI

SEQ ID NO: 179639 - protein, 7 aa, synthetic construct
MRGQRNE

SEQ ID NO: 179640 - protein, 7 aa, synthetic construct
IDGIRRI

SEQ ID NO: 179641 - protein, 7 aa, synthetic construct
IDPQRRM

SEQ ID NO: 179642 - protein, 7 aa, synthetic construct
MDGRRLS

SEQ ID NO: 179643 - protein, 7 aa, synthetic construct
YDGIRRN

SEQ ID NO: 179644 - protein, 7 aa, synthetic construct
ADGQKRA

SEQ ID NO: 179645 - protein, 7 aa, synthetic construct
TDQPRRI

SEQ ID NO: 179646 - protein, 7 aa, synthetic construct
MDGRTRQ

SEQ ID NO: 179647 - protein, 7 aa, synthetic construct
ADTQRRP

SEQ ID NO: 179648 - protein, 7 aa, synthetic construct
NQGQRRE

SEQ ID NO: 179649 - protein, 7 aa, synthetic construct
YDGKRSI

SEQ ID NO: 179650 - protein, 7 aa, synthetic construct
NDGKARI

SEQ ID NO: 179651 - protein, 7 aa, synthetic construct
YDGQKRN

SEQ ID NO: 179652 - protein, 7 aa, synthetic construct
YDGQTRK

SEQ ID NO: 179653 - protein, 7 aa, synthetic construct
MDKLRHI

SEQ ID NO: 179654 - protein, 7 aa, synthetic construct
FDNQRKI

SEQ ID NO: 179655 - protein, 7 aa, synthetic construct
RQGQREI

SEQ ID NO: 179656 - protein, 7 aa, synthetic construct
MDHKNRI

SEQ ID NO: 179657 - protein, 7 aa, synthetic construct
PDGQRPK

SEQ ID NO: 179658 - protein, 7 aa, synthetic construct
TDTARRI

SEQ ID NO: 179659 - protein, 7 aa, synthetic construct
NDKQVRI

SEQ ID NO: 179660 - protein, 7 aa, synthetic construct
GDGNKRI

SEQ ID NO: 179661 - protein, 7 aa, synthetic construct
MDGPRPK

SEQ ID NO: 179662 - protein, 7 aa, synthetic construct
MDGTRGK

SEQ ID NO: 179663 - protein, 7 aa, synthetic construct
YDGKRVI

SEQ ID NO: 179664 - protein, 7 aa, synthetic construct
MDHKLRI

SEQ ID NO: 179665 - protein, 7 aa, synthetic construct
MDVQRKL

SEQ ID NO: 179666 - protein, 7 aa, synthetic construct
YDGKMRI

SEQ ID NO: 179667 - protein, 7 aa, synthetic construct
MDGRLRM

SEQ ID NO: 179668 - protein, 7 aa, synthetic construct
RDGTSRI

SEQ ID NO: 179669 - protein, 7 aa, synthetic construct
PDKQPRI

SEQ ID NO: 179670 - protein, 7 aa, synthetic construct
LDRQTRI

SEQ ID NO: 179671 - protein, 7 aa, synthetic construct
PDGQKRL

SEQ ID NO: 179672 - protein, 7 aa, synthetic construct
MDARQRI

SEQ ID NO: 179673 - protein, 7 aa, synthetic construct
MTGSHRI

SEQ ID NO: 179674 - protein, 7 aa, synthetic construct
NDPMRRI

SEQ ID NO: 179675 - protein, 7 aa, synthetic construct
LPGERRI

SEQ ID NO: 179676 - protein, 7 aa, synthetic construct
MHGQPRP

SEQ ID NO: 179677 - protein, 7 aa, synthetic construct
MDIQRKI

SEQ ID NO: 179678 - protein, 7 aa, synthetic construct
SDVQRRS

SEQ ID NO: 179679 - protein, 7 aa, synthetic construct
VDAARRI

SEQ ID NO: 179680 - protein, 7 aa, synthetic construct
PDGIKRI

SEQ ID NO: 179681 - protein, 7 aa, synthetic construct
SDGKRII

SEQ ID NO: 179682 - protein, 7 aa, synthetic construct
TDMQRRA

SEQ ID NO: 179683 - protein, 7 aa, synthetic construct
MDKQRFN

SEQ ID NO: 179684 - protein, 7 aa, synthetic construct
MDKQRNY

SEQ ID NO: 179685 - protein, 7 aa, synthetic construct
MRGQHTI

SEQ ID NO: 179686 - protein, 7 aa, synthetic construct
MDAIRRS

SEQ ID NO: 179687 - protein, 7 aa, synthetic construct
MDGPGRK

SEQ ID NO: 179688 - protein, 7 aa, synthetic construct
MDGPRQR

SEQ ID NO: 179689 - protein, 7 aa, synthetic construct
RDGQARS

SEQ ID NO: 179690 - protein, 7 aa, synthetic construct
DLPQRRI

SEQ ID NO: 179691 - protein, 7 aa, synthetic construct
MDGVRMK

SEQ ID NO: 179692 - protein, 7 aa, synthetic construct
MDAQGRR

SEQ ID NO: 179693 - protein, 7 aa, synthetic construct
MDGARMR

SEQ ID NO: 179694 - protein, 7 aa, synthetic construct
YDNQRRP

SEQ ID NO: 179695 - protein, 7 aa, synthetic construct
MEGQKRM

SEQ ID NO: 179696 - protein, 7 aa, synthetic construct
TDGQNRK

SEQ ID NO: 179697 - protein, 7 aa, synthetic construct
MHGQTRN

SEQ ID NO: 179698 - protein, 7 aa, synthetic construct
MPRQERI

SEQ ID NO: 179699 - protein, 7 aa, synthetic construct
LDTMRRI

SEQ ID NO: 179700 - protein, 7 aa, synthetic construct
FDGMRRA

SEQ ID NO: 179701 - protein, 7 aa, synthetic construct
GDTQRRI

SEQ ID NO: 179702 - protein, 7 aa, synthetic construct
YDGTRRI

SEQ ID NO: 179703 - protein, 7 aa, synthetic construct
MEPQRRG

SEQ ID NO: 179704 - protein, 7 aa, synthetic construct
MLGQRHA

SEQ ID NO: 179705 - protein, 7 aa, synthetic construct
MTGQTRG

SEQ ID NO: 179706 - protein, 7 aa, synthetic construct
MDKARYI

SEQ ID NO: 179707 - protein, 7 aa, synthetic construct
QDTARRI

SEQ ID NO: 179708 - protein, 7 aa, synthetic construct
MDRQSRN

SEQ ID NO: 179709 - protein, 7 aa, synthetic construct
MDGGRKM

SEQ ID NO: 179710 - protein, 7 aa, synthetic construct
TDVQRRN

SEQ ID NO: 179711 - protein, 7 aa, synthetic construct
TQEQRRI

SEQ ID NO: 179712 - protein, 7 aa, synthetic construct
IDGQSRK

SEQ ID NO: 179713 - protein, 7 aa, synthetic construct
MDSRVRI

SEQ ID NO: 179714 - protein, 7 aa, synthetic construct
MDRQLRN

SEQ ID NO: 179715 - protein, 7 aa, synthetic construct
SDGQRKA

SEQ ID NO: 179716 - protein, 7 aa, synthetic construct
IDSARRI

SEQ ID NO: 179717 - protein, 7 aa, synthetic construct
MIGQRHS

SEQ ID NO: 179718 - protein, 7 aa, synthetic construct
ADAPRRI

SEQ ID NO: 179719 - protein, 7 aa, synthetic construct
VDGLRRT

SEQ ID NO: 179720 - protein, 7 aa, synthetic construct
YDGQRKI

SEQ ID NO: 179721 - protein, 7 aa, synthetic construct
MTGHQRI

SEQ ID NO: 179722 - protein, 7 aa, synthetic construct
MPGQLRN

SEQ ID NO: 179723 - protein, 7 aa, synthetic construct
NDGQRKV

SEQ ID NO: 179724 - protein, 7 aa, synthetic construct
MRGERPI

SEQ ID NO: 179725 - protein, 7 aa, synthetic construct
MDALKRI

SEQ ID NO: 179726 - protein, 7 aa, synthetic construct
SDGPRRV

SEQ ID NO: 179727 - protein, 7 aa, synthetic construct
MDSHKRI

SEQ ID NO: 179728 - protein, 7 aa, synthetic construct
MEGPKRI

SEQ ID NO: 179729 - protein, 7 aa, synthetic construct
FDGQKRG

SEQ ID NO: 179730 - protein, 7 aa, synthetic construct
MDGPIRK

SEQ ID NO: 179731 - protein, 7 aa, synthetic construct
MRTQREI

SEQ ID NO: 179732 - protein, 7 aa, synthetic construct
GDMTRRI

SEQ ID NO: 179733 - protein, 7 aa, synthetic construct
MDGQKKT

SEQ ID NO: 179734 - protein, 7 aa, synthetic construct
FDGKRQI

SEQ ID NO: 179735 - protein, 7 aa, synthetic construct
MDRQPRS

SEQ ID NO: 179736 - protein, 7 aa, synthetic construct
TDGQRKL

SEQ ID NO: 179737 - protein, 7 aa, synthetic construct
MVSQRRE

SEQ ID NO: 179738 - protein, 7 aa, synthetic construct
MENPRRI

SEQ ID NO: 179739 - protein, 7 aa, synthetic construct
ADMQRRV

SEQ ID NO: 179740 - protein, 7 aa, synthetic construct
FDKQPRI

SEQ ID NO: 179741 - protein, 7 aa, synthetic construct
VDGLRRV

SEQ ID NO: 179742 - protein, 7 aa, synthetic construct
MDVSRRV

SEQ ID NO: 179743 - protein, 7 aa, synthetic construct
QDGPRRI

SEQ ID NO: 179744 - protein, 7 aa, synthetic construct
MDVQRKT

SEQ ID NO: 179745 - protein, 7 aa, synthetic construct
MDTARRT

SEQ ID NO: 179746 - protein, 7 aa, synthetic construct
GDKQRSI

SEQ ID NO: 179747 - protein, 7 aa, synthetic construct
MDNTRRI

SEQ ID NO: 179748 - protein, 7 aa, synthetic construct
GDGKQRI

SEQ ID NO: 179749 - protein, 7 aa, synthetic construct
MDGKERK

SEQ ID NO: 179750 - protein, 7 aa, synthetic construct
MDGARRS

SEQ ID NO: 179751 - protein, 7 aa, synthetic construct
SDGKMRI

SEQ ID NO: 179752 - protein, 7 aa, synthetic construct
QDGNRRI

SEQ ID NO: 179753 - protein, 7 aa, synthetic construct
MDIQRKV

SEQ ID NO: 179754 - protein, 7 aa, synthetic construct
SDGQRRV

SEQ ID NO: 179755 - protein, 7 aa, synthetic construct
LDGIRRA

SEQ ID NO: 179756 - protein, 7 aa, synthetic construct
MTGQQRA

SEQ ID NO: 179757 - protein, 7 aa, synthetic construct
MIGQIRA

SEQ ID NO: 179758 - protein, 7 aa, synthetic construct
MDKQRVY

SEQ ID NO: 179759 - protein, 7 aa, synthetic construct
MDGKARI

SEQ ID NO: 179760 - protein, 7 aa, synthetic construct
LDQQRRQ

SEQ ID NO: 179761 - protein, 7 aa, synthetic construct
MEGKPRI

SEQ ID NO: 179762 - protein, 7 aa, synthetic construct
MDGARIK

SEQ ID NO: 179763 - protein, 7 aa, synthetic construct
MHGQVRN

SEQ ID NO: 179764 - protein, 7 aa, synthetic construct
ADTNRRI

SEQ ID NO: 179765 - protein, 7 aa, synthetic construct
MDRQSRA

SEQ ID NO: 179766 - protein, 7 aa, synthetic construct
DLGQKRI

SEQ ID NO: 179767 - protein, 7 aa, synthetic construct
GDGMRRP

SEQ ID NO: 179768 - protein, 7 aa, synthetic construct
FDGKLRI

SEQ ID NO: 179769 - protein, 7 aa, synthetic construct
YDGKARI

SEQ ID NO: 179770 - protein, 7 aa, synthetic construct
MDSARRG

SEQ ID NO: 179771 - protein, 7 aa, synthetic construct
MDGSRNR

SEQ ID NO: 179772 - protein, 7 aa, synthetic construct
MGGTHRI

SEQ ID NO: 179773 - protein, 7 aa, synthetic construct
MDTQARK

SEQ ID NO: 179774 - protein, 7 aa, synthetic construct
VDQQRRQ

SEQ ID NO: 179775 - protein, 7 aa, synthetic construct
TDGQRRA

SEQ ID NO: 179776 - protein, 7 aa, synthetic construct
MRGQPAI

SEQ ID NO: 179777 - protein, 7 aa, synthetic construct
VDGLRRQ

SEQ ID NO: 179778 - protein, 7 aa, synthetic construct
GDIQKRI

SEQ ID NO: 179779 - protein, 7 aa, synthetic construct
LPEQRRI

SEQ ID NO: 179780 - protein, 7 aa, synthetic construct
MAEQRRS

SEQ ID NO: 179781 - protein, 7 aa, synthetic construct
MIGQSRS

SEQ ID NO: 179782 - protein, 7 aa, synthetic construct
MDRPRVI

SEQ ID NO: 179783 - protein, 7 aa, synthetic construct
YDGKQRI

SEQ ID NO: 179784 - protein, 7 aa, synthetic construct
MEGPRKI

SEQ ID NO: 179785 - protein, 7 aa, synthetic construct
MPGQSRA

SEQ ID NO: 179786 - protein, 7 aa, synthetic construct
MDGPPRK

SEQ ID NO: 179787 - protein, 7 aa, synthetic construct
DGGQKRI

SEQ ID NO: 179788 - protein, 7 aa, synthetic construct
RDGQRSS

SEQ ID NO: 179789 - protein, 7 aa, synthetic construct
MDGRRIG

SEQ ID NO: 179790 - protein, 7 aa, synthetic construct
MDAQRSR

SEQ ID NO: 179791 - protein, 7 aa, synthetic construct
MAGQDRR

SEQ ID NO: 179792 - protein, 7 aa, synthetic construct
MTGPRNI

SEQ ID NO: 179793 - protein, 7 aa, synthetic construct
MDGMRTR

SEQ ID NO: 179794 - protein, 7 aa, synthetic construct
SDGKRAI

SEQ ID NO: 179795 - protein, 7 aa, synthetic construct
MDGKSRM

SEQ ID NO: 179796 - protein, 7 aa, synthetic construct
MAVQRRE

SEQ ID NO: 179797 - protein, 7 aa, synthetic construct
MDKQARL

SEQ ID NO: 179798 - protein, 7 aa, synthetic construct
YDGQGRK

SEQ ID NO: 179799 - protein, 7 aa, synthetic construct
GDKQRRE

SEQ ID NO: 179800 - protein, 7 aa, synthetic construct
MDIKARI

SEQ ID NO: 179801 - protein, 7 aa, synthetic construct
MRGQRTE

SEQ ID NO: 179802 - protein, 7 aa, synthetic construct
SDVARRI

SEQ ID NO: 179803 - protein, 7 aa, synthetic construct
NDAMRRI

SEQ ID NO: 179804 - protein, 7 aa, synthetic construct
MQGQDRK

SEQ ID NO: 179805 - protein, 7 aa, synthetic construct
LDSSRRI

SEQ ID NO: 179806 - protein, 7 aa, synthetic construct
TDINRRI

SEQ ID NO: 179807 - protein, 7 aa, synthetic construct
MDGRVRQ

SEQ ID NO: 179808 - protein, 7 aa, synthetic construct
MDGARKG

SEQ ID NO: 179809 - protein, 7 aa, synthetic construct
MDRQTRN

SEQ ID NO: 179810 - protein, 7 aa, synthetic construct
MDGKTRQ

SEQ ID NO: 179811 - protein, 7 aa, synthetic construct
MDGKRFI

SEQ ID NO: 179812 - protein, 7 aa, synthetic construct
SDGNRRV

SEQ ID NO: 179813 - protein, 7 aa, synthetic construct
ADGQRQK

SEQ ID NO: 179814 - protein, 7 aa, synthetic construct
LDVQRRA

SEQ ID NO: 179815 - protein, 7 aa, synthetic construct
MDGSVRK

SEQ ID NO: 179816 - protein, 7 aa, synthetic construct
MDTKRFI

SEQ ID NO: 179817 - protein, 7 aa, synthetic construct
TDGQRPK

SEQ ID NO: 179818 - protein, 7 aa, synthetic construct
MDVQKRL

SEQ ID NO: 179819 - protein, 7 aa, synthetic construct
NDGARRI

SEQ ID NO: 179820 - protein, 7 aa, synthetic construct
MTEQRRQ

SEQ ID NO: 179821 - protein, 7 aa, synthetic construct
MDRQIRN

SEQ ID NO: 179822 - protein, 7 aa, synthetic construct
NMGQRRE

SEQ ID NO: 179823 - protein, 7 aa, synthetic construct
MKGQYRD

SEQ ID NO: 179824 - protein, 7 aa, synthetic construct
MDGKGRL

SEQ ID NO: 179825 - protein, 7 aa, synthetic construct
MDGRTRS

SEQ ID NO: 179826 - protein, 7 aa, synthetic construct
GDSQRRV

SEQ ID NO: 179827 - protein, 7 aa, synthetic construct
ADPPRRI

SEQ ID NO: 179828 - protein, 7 aa, synthetic construct
MDAVRRA

SEQ ID NO: 179829 - protein, 7 aa, synthetic construct
MDPQGRK

SEQ ID NO: 179830 - protein, 7 aa, synthetic construct
MPLQRRE

SEQ ID NO: 179831 - protein, 7 aa, synthetic construct
FDGKRMI

SEQ ID NO: 179832 - protein, 7 aa, synthetic construct
YDKQLRI

SEQ ID NO: 179833 - protein, 7 aa, synthetic construct
MVRQREI

SEQ ID NO: 179834 - protein, 7 aa, synthetic construct
ADIQRRA

SEQ ID NO: 179835 - protein, 7 aa, synthetic construct
TDQQRRM

SEQ ID NO: 179836 - protein, 7 aa, synthetic construct
SDAQRRG

SEQ ID NO: 179837 - protein, 7 aa, synthetic construct
MDGTRMR

SEQ ID NO: 179838 - protein, 7 aa, synthetic construct
KSGQRDI

SEQ ID NO: 179839 - protein, 7 aa, synthetic construct
MEGMRRP

SEQ ID NO: 179840 - protein, 7 aa, synthetic construct
NDGKRAI

SEQ ID NO: 179841 - protein, 7 aa, synthetic construct
YDGQRAK

SEQ ID NO: 179842 - protein, 7 aa, synthetic construct
LDGQRKM

SEQ ID NO: 179843 - protein, 7 aa, synthetic construct
MDAIRKI

SEQ ID NO: 179844 - protein, 7 aa, synthetic construct
MDGKIRN

SEQ ID NO: 179845 - protein, 7 aa, synthetic construct
MDPVRRQ

SEQ ID NO: 179846 - protein, 7 aa, synthetic construct
MDGMRSR

SEQ ID NO: 179847 - protein, 7 aa, synthetic construct
MDGIRKL

SEQ ID NO: 179848 - protein, 7 aa, synthetic construct
MIGQMRN

SEQ ID NO: 179849 - protein, 7 aa, synthetic construct
MTGERRQ

SEQ ID NO: 179850 - protein, 7 aa, synthetic construct
QDGQRRV

SEQ ID NO: 179851 - protein, 7 aa, synthetic construct
IDGQRKY

SEQ ID NO: 179852 - protein, 7 aa, synthetic construct
MGGQERK

SEQ ID NO: 179853 - protein, 7 aa, synthetic construct
MDGMKRN

SEQ ID NO: 179854 - protein, 7 aa, synthetic construct
MMGQMRA

SEQ ID NO: 179855 - protein, 7 aa, synthetic construct
LDGQRRM

SEQ ID NO: 179856 - protein, 7 aa, synthetic construct
LDGQKRS

SEQ ID NO: 179857 - protein, 7 aa, synthetic construct
MDQQRRA

SEQ ID NO: 179858 - protein, 7 aa, synthetic construct
MRGQTLI

SEQ ID NO: 179859 - protein, 7 aa, synthetic construct
MMGPRNI

SEQ ID NO: 179860 - protein, 7 aa, synthetic construct
MIQQRRE

SEQ ID NO: 179861 - protein, 7 aa, synthetic construct
MDKHVRI

SEQ ID NO: 179862 - protein, 7 aa, synthetic construct
MDAGRRQ

SEQ ID NO: 179863 - protein, 7 aa, synthetic construct
LDGRRSI

SEQ ID NO: 179864 - protein, 7 aa, synthetic construct
VDNQRRQ

SEQ ID NO: 179865 - protein, 7 aa, synthetic construct
MDIQRRV

SEQ ID NO: 179866 - protein, 7 aa, synthetic construct
TDGQRNK

SEQ ID NO: 179867 - protein, 7 aa, synthetic construct
MDQGRRV

SEQ ID NO: 179868 - protein, 7 aa, synthetic construct
SKGQRDI

SEQ ID NO: 179869 - protein, 7 aa, synthetic construct
MTEMRRI

SEQ ID NO: 179870 - protein, 7 aa, synthetic construct
MDLQRKQ

SEQ ID NO: 179871 - protein, 7 aa, synthetic construct
MSGARSI

SEQ ID NO: 179872 - protein, 7 aa, synthetic construct
MDAQRVR

SEQ ID NO: 179873 - protein, 7 aa, synthetic construct
MTGPRII

SEQ ID NO: 179874 - protein, 7 aa, synthetic construct
MDGTRTR

SEQ ID NO: 179875 - protein, 7 aa, synthetic construct
MRGVRDI

SEQ ID NO: 179876 - protein, 7 aa, synthetic construct
MDGKTRV

SEQ ID NO: 179877 - protein, 7 aa, synthetic construct
MDVQRNR

SEQ ID NO: 179878 - protein, 7 aa, synthetic construct
IDGSRRA

SEQ ID NO: 179879 - protein, 7 aa, synthetic construct
MTGQHRQ

SEQ ID NO: 179880 - protein, 7 aa, synthetic construct
LDRQARI

SEQ ID NO: 179881 - protein, 7 aa, synthetic construct
MDGRPRQ

SEQ ID NO: 179882 - protein, 7 aa, synthetic construct
RDGTRTI

SEQ ID NO: 179883 - protein, 7 aa, synthetic construct
YDGQRNK

SEQ ID NO: 179884 - protein, 7 aa, synthetic construct
MDGVRIK

SEQ ID NO: 179885 - protein, 7 aa, synthetic construct
QDGQKRF

SEQ ID NO: 179886 - protein, 7 aa, synthetic construct
YDNQRKI

SEQ ID NO: 179887 - protein, 7 aa, synthetic construct
FDGQRIK

SEQ ID NO: 179888 - protein, 7 aa, synthetic construct
MDGRGRG

SEQ ID NO: 179889 - protein, 7 aa, synthetic construct
MDGKRIY

SEQ ID NO: 179890 - protein, 7 aa, synthetic construct
PDMQRRV

SEQ ID NO: 179891 - protein, 7 aa, synthetic construct
TDGQRKG

SEQ ID NO: 179892 - protein, 7 aa, synthetic construct
IDGTRRP

SEQ ID NO: 179893 - protein, 7 aa, synthetic construct
MDAVRRQ

SEQ ID NO: 179894 - protein, 7 aa, synthetic construct
TDNQRKI

SEQ ID NO: 179895 - protein, 7 aa, synthetic construct
MDHKMRI

SEQ ID NO: 179896 - protein, 7 aa, synthetic construct
GDLNRRI

SEQ ID NO: 179897 - protein, 7 aa, synthetic construct
MLGERRA

SEQ ID NO: 179898 - protein, 7 aa, synthetic construct
MEPNRRI

SEQ ID NO: 179899 - protein, 7 aa, synthetic construct
MDGSRNK

SEQ ID NO: 179900 - protein, 7 aa, synthetic construct
MMGPRHI

SEQ ID NO: 179901 - protein, 7 aa, synthetic construct
MPGERKI

SEQ ID NO: 179902 - protein, 7 aa, synthetic construct
MDTRGRI

SEQ ID NO: 179903 - protein, 7 aa, synthetic construct
MDGPNRK

SEQ ID NO: 179904 - protein, 7 aa, synthetic construct
ADPVRRI

SEQ ID NO: 179905 - protein, 7 aa, synthetic construct
LDGMRRA

SEQ ID NO: 179906 - protein, 7 aa, synthetic construct
QDGQNRK

SEQ ID NO: 179907 - protein, 7 aa, synthetic construct
MDVQRKS

SEQ ID NO: 179908 - protein, 7 aa, synthetic construct
MDGSRMR

SEQ ID NO: 179909 - protein, 7 aa, synthetic construct
MMGQQRN

SEQ ID NO: 179910 - protein, 7 aa, synthetic construct
FDGARRA

SEQ ID NO: 179911 - protein, 7 aa, synthetic construct
SDGQRNK

SEQ ID NO: 179912 - protein, 7 aa, synthetic construct
SDNTRRI

SEQ ID NO: 179913 - protein, 7 aa, synthetic construct
NTEQRRI

SEQ ID NO: 179914 - protein, 7 aa, synthetic construct
MQGKRDI

SEQ ID NO: 179915 - protein, 7 aa, synthetic construct
HDGKARI

SEQ ID NO: 179916 - protein, 7 aa, synthetic construct
REGQRNI

SEQ ID NO: 179917 - protein, 7 aa, synthetic construct
MTGQRHN

SEQ ID NO: 179918 - protein, 7 aa, synthetic construct
MDGKMRS

SEQ ID NO: 179919 - protein, 7 aa, synthetic construct
MHGQLRP

SEQ ID NO: 179920 - protein, 7 aa, synthetic construct
MQDVRRI

SEQ ID NO: 179921 - protein, 7 aa, synthetic construct
YDTARRI

SEQ ID NO: 179922 - protein, 7 aa, synthetic construct
MLGHRTI

SEQ ID NO: 179923 - protein, 7 aa, synthetic construct
MDALRRV

SEQ ID NO: 179924 - protein, 7 aa, synthetic construct
MDGKRYI

SEQ ID NO: 179925 - protein, 7 aa, synthetic construct
MDGQRKQ

SEQ ID NO: 179926 - protein, 7 aa, synthetic construct
LDGRPRI

SEQ ID NO: 179927 - protein, 7 aa, synthetic construct
MDGARIR

SEQ ID NO: 179928 - protein, 7 aa, synthetic construct
MDGNRKV

SEQ ID NO: 179929 - protein, 7 aa, synthetic construct
RDGQTRQ

SEQ ID NO: 179930 - protein, 7 aa, synthetic construct
MDNMRRS

SEQ ID NO: 179931 - protein, 7 aa, synthetic construct
YDNNRRI

SEQ ID NO: 179932 - protein, 7 aa, synthetic construct
NPDQRRI

SEQ ID NO: 179933 - protein, 7 aa, synthetic construct
HDKQPRI

SEQ ID NO: 179934 - protein, 7 aa, synthetic construct
MDKIRHI

SEQ ID NO: 179935 - protein, 7 aa, synthetic construct
MDGATRR

SEQ ID NO: 179936 - protein, 7 aa, synthetic construct
IDQVRRI

SEQ ID NO: 179937 - protein, 7 aa, synthetic construct
YAGQRHI

SEQ ID NO: 179938 - protein, 7 aa, synthetic construct
LDGARRL

SEQ ID NO: 179939 - protein, 7 aa, synthetic construct
MDTQRGK

SEQ ID NO: 179940 - protein, 7 aa, synthetic construct
MDSRQRI

SEQ ID NO: 179941 - protein, 7 aa, synthetic construct
DRGQRPI

SEQ ID NO: 179942 - protein, 7 aa, synthetic construct
HTGQRNI

SEQ ID NO: 179943 - protein, 7 aa, synthetic construct
MDGPKRY

SEQ ID NO: 179944 - protein, 7 aa, synthetic construct
VAGQRRE

SEQ ID NO: 179945 - protein, 7 aa, synthetic construct
GDGRRPI

SEQ ID NO: 179946 - protein, 7 aa, synthetic construct
MDSIRRV

SEQ ID NO: 179947 - protein, 7 aa, synthetic construct
ADRQRVI

SEQ ID NO: 179948 - protein, 7 aa, synthetic construct
MPGQTRH

SEQ ID NO: 179949 - protein, 7 aa, synthetic construct
TDAQRKI

SEQ ID NO: 179950 - protein, 7 aa, synthetic construct
MDNRVRI

SEQ ID NO: 179951 - protein, 7 aa, synthetic construct
GDGQKRQ

SEQ ID NO: 179952 - protein, 7 aa, synthetic construct
MEGLKRI

SEQ ID NO: 179953 - protein, 7 aa, synthetic construct
NDGQNRK

SEQ ID NO: 179954 - protein, 7 aa, synthetic construct
TDGIRKI

SEQ ID NO: 179955 - protein, 7 aa, synthetic construct
MDISRRA

SEQ ID NO: 179956 - protein, 7 aa, synthetic construct
MIGQKYI

SEQ ID NO: 179957 - protein, 7 aa, synthetic construct
PDGQRGK

SEQ ID NO: 179958 - protein, 7 aa, synthetic construct
IDNMRRI

SEQ ID NO: 179959 - protein, 7 aa, synthetic construct
MDGRMRV

SEQ ID NO: 179960 - protein, 7 aa, synthetic construct
LDATRRI

SEQ ID NO: 179961 - protein, 7 aa, synthetic construct
MDGTGRR

SEQ ID NO: 179962 - protein, 7 aa, synthetic construct
MDGQRKA

SEQ ID NO: 179963 - protein, 7 aa, synthetic construct
SDGKSRI

SEQ ID NO: 179964 - protein, 7 aa, synthetic construct
MDIVRRP

SEQ ID NO: 179965 - protein, 7 aa, synthetic construct
QPDQRRI

SEQ ID NO: 179966 - protein, 7 aa, synthetic construct
YDGARRA

SEQ ID NO: 179967 - protein, 7 aa, synthetic construct
MLGQRHN

SEQ ID NO: 179968 - protein, 7 aa, synthetic construct
YDGARRI

SEQ ID NO: 179969 - protein, 7 aa, synthetic construct
GDGQRMR

SEQ ID NO: 179970 - protein, 7 aa, synthetic construct
YDGMRKI

SEQ ID NO: 179971 - protein, 7 aa, synthetic construct
YDGQKRT

SEQ ID NO: 179972 - protein, 7 aa, synthetic construct
MDRQARV

SEQ ID NO: 179973 - protein, 7 aa, synthetic construct
FDGRTRI

SEQ ID NO: 179974 - protein, 7 aa, synthetic construct
MDKMHRI

SEQ ID NO: 179975 - protein, 7 aa, synthetic construct
MDTPKRI

SEQ ID NO: 179976 - protein, 7 aa, synthetic construct
IDGSRRQ

SEQ ID NO: 179977 - protein, 7 aa, synthetic construct
QDGKRYI

SEQ ID NO: 179978 - protein, 7 aa, synthetic construct
VDGQVRK

SEQ ID NO: 179979 - protein, 7 aa, synthetic construct
LDQQRRT

SEQ ID NO: 179980 - protein, 7 aa, synthetic construct
TDGQRRQ

SEQ ID NO: 179981 - protein, 7 aa, synthetic construct
FDGKTRI

SEQ ID NO: 179982 - protein, 7 aa, synthetic construct
QDLQRKI

SEQ ID NO: 179983 - protein, 7 aa, synthetic construct
IDQSRRI

SEQ ID NO: 179984 - protein, 7 aa, synthetic construct
MDNQRAR

SEQ ID NO: 179985 - protein, 7 aa, synthetic construct
IDGPRRV

SEQ ID NO: 179986 - protein, 7 aa, synthetic construct
MDGMRRV

SEQ ID NO: 179987 - protein, 7 aa, synthetic construct
MPEQRRV

SEQ ID NO: 179988 - protein, 7 aa, synthetic construct
FDGKRTI

SEQ ID NO: 179989 - protein, 7 aa, synthetic construct
MDAQKRY

SEQ ID NO: 179990 - protein, 7 aa, synthetic construct
MRGQREQ

SEQ ID NO: 179991 - protein, 7 aa, synthetic construct
SDPQRRT

SEQ ID NO: 179992 - protein, 7 aa, synthetic construct
MDGARRV

SEQ ID NO: 179993 - protein, 7 aa, synthetic construct
NDGNRRV

SEQ ID NO: 179994 - protein, 7 aa, synthetic construct
MDQPRRI

SEQ ID NO: 179995 - protein, 7 aa, synthetic construct
FDGQKRI

SEQ ID NO: 179996 - protein, 7 aa, synthetic construct
MDKVRRD

SEQ ID NO: 179997 - protein, 7 aa, synthetic construct
MDIKSRI

SEQ ID NO: 179998 - protein, 7 aa, synthetic construct
MDKQARS

SEQ ID NO: 179999 - protein, 7 aa, synthetic construct
MVGQPRN

SEQ ID NO: 180000 - protein, 7 aa, synthetic construct
MDQNRRG

SEQ ID NO: 180001 - protein, 7 aa, synthetic construct
MDGKIRG

SEQ ID NO: 180002 - protein, 7 aa, synthetic construct
MDMQKRF

SEQ ID NO: 180003 - protein, 7 aa, synthetic construct
MDNQKRY

SEQ ID NO: 180004 - protein, 7 aa, synthetic construct
MTGVRHI

SEQ ID NO: 180005 - protein, 7 aa, synthetic construct
TRGQDRI

SEQ ID NO: 180006 - protein, 7 aa, synthetic construct
MDLGKRI

SEQ ID NO: 180007 - protein, 7 aa, synthetic construct
RDGQRHV

SEQ ID NO: 180008 - protein, 7 aa, synthetic construct
FDNQRRG

SEQ ID NO: 180009 - protein, 7 aa, synthetic construct
MRGQRLD

SEQ ID NO: 180010 - protein, 7 aa, synthetic construct
MDMKRRE

SEQ ID NO: 180011 - protein, 7 aa, synthetic construct
MDKQHRS

SEQ ID NO: 180012 - protein, 7 aa, synthetic construct
MDGGTRK

SEQ ID NO: 180013 - protein, 7 aa, synthetic construct
LDGQRQK

SEQ ID NO: 180014 - protein, 7 aa, synthetic construct
NDGQKRV

SEQ ID NO: 180015 - protein, 7 aa, synthetic construct
MDGLRLK

SEQ ID NO: 180016 - protein, 7 aa, synthetic construct
IDGQKRA

SEQ ID NO: 180017 - protein, 7 aa, synthetic construct
SQGQRRE

SEQ ID NO: 180018 - protein, 7 aa, synthetic construct
MDAQKRF

SEQ ID NO: 180019 - protein, 7 aa, synthetic construct
GDGIRKI

SEQ ID NO: 180020 - protein, 7 aa, synthetic construct
QDTQRRI

SEQ ID NO: 180021 - protein, 7 aa, synthetic construct
NDSQRRA

SEQ ID NO: 180022 - protein, 7 aa, synthetic construct
RDGPRLI

SEQ ID NO: 180023 - protein, 7 aa, synthetic construct
MSGQRHN

SEQ ID NO: 180024 - protein, 7 aa, synthetic construct
MDNQRKA

SEQ ID NO: 180025 - protein, 7 aa, synthetic construct
MDQTRRA

SEQ ID NO: 180026 - protein, 7 aa, synthetic construct
MMGQTRA

SEQ ID NO: 180027 - protein, 7 aa, synthetic construct
MTGQVRH

SEQ ID NO: 180028 - protein, 7 aa, synthetic construct
MRGQRQE

SEQ ID NO: 180029 - protein, 7 aa, synthetic construct
GDIQRRA

SEQ ID NO: 180030 - protein, 7 aa, synthetic construct
MDQQKRL

SEQ ID NO: 180031 - protein, 7 aa, synthetic construct
MIGNRRE

SEQ ID NO: 180032 - protein, 7 aa, synthetic construct
LDGQGRK

SEQ ID NO: 180033 - protein, 7 aa, synthetic construct
MDGSRIR

SEQ ID NO: 180034 - protein, 7 aa, synthetic construct
MIGQPRN

SEQ ID NO: 180035 - protein, 7 aa, synthetic construct
SDGIRRP

SEQ ID NO: 180036 - protein, 7 aa, synthetic construct
MDKQPRV

SEQ ID NO: 180037 - protein, 7 aa, synthetic construct
MIDQRRA

SEQ ID NO: 180038 - protein, 7 aa, synthetic construct
QDIQRRA

SEQ ID NO: 180039 - protein, 7 aa, synthetic construct
TDSPRRI

SEQ ID NO: 180040 - protein, 7 aa, synthetic construct
VDGKPRI

SEQ ID NO: 180041 - protein, 7 aa, synthetic construct
NDSQRRI

SEQ ID NO: 180042 - protein, 7 aa, synthetic construct
MDTQPRK

SEQ ID NO: 180043 - protein, 7 aa, synthetic construct
TDGQRSK

SEQ ID NO: 180044 - protein, 7 aa, synthetic construct
VDGPRRG

SEQ ID NO: 180045 - protein, 7 aa, synthetic construct
MEGAKRI

SEQ ID NO: 180046 - protein, 7 aa, synthetic construct
FDGKRLI

SEQ ID NO: 180047 - protein, 7 aa, synthetic construct
IDPQRRN

SEQ ID NO: 180048 - protein, 7 aa, synthetic construct
MFGQARA

SEQ ID NO: 180049 - protein, 7 aa, synthetic construct
MIGERRV

SEQ ID NO: 180050 - protein, 7 aa, synthetic construct
MSRQRDI

SEQ ID NO: 180051 - protein, 7 aa, synthetic construct
QDGQIRK

SEQ ID NO: 180052 - protein, 7 aa, synthetic construct
MDGPRKS

SEQ ID NO: 180053 - protein, 7 aa, synthetic construct
LDLQKRI

SEQ ID NO: 180054 - protein, 7 aa, synthetic construct
MPDQRRA

SEQ ID NO: 180055 - protein, 7 aa, synthetic construct
DIQQRRI

SEQ ID NO: 180056 - protein, 7 aa, synthetic construct
MRGTRDI

SEQ ID NO: 180057 - protein, 7 aa, synthetic construct
MDGSRTK

SEQ ID NO: 180058 - protein, 7 aa, synthetic construct
MDGKFRM

SEQ ID NO: 180059 - protein, 7 aa, synthetic construct
MRGQIAI

SEQ ID NO: 180060 - protein, 7 aa, synthetic construct
GDGARKI

SEQ ID NO: 180061 - protein, 7 aa, synthetic construct
MSGQMRN

SEQ ID NO: 180062 - protein, 7 aa, synthetic construct
MDIGKRI

SEQ ID NO: 180063 - protein, 7 aa, synthetic construct
MDGGRRV

SEQ ID NO: 180064 - protein, 7 aa, synthetic construct
NDGLRRP

SEQ ID NO: 180065 - protein, 7 aa, synthetic construct
MDGGKRH

SEQ ID NO: 180066 - protein, 7 aa, synthetic construct
MSGQLRA

SEQ ID NO: 180067 - protein, 7 aa, synthetic construct
MDGRTRA

SEQ ID NO: 180068 - protein, 7 aa, synthetic construct
MDGRRAI

SEQ ID NO: 180069 - protein, 7 aa, synthetic construct
DIGQRKI

SEQ ID NO: 180070 - protein, 7 aa, synthetic construct
MDPMRRT

SEQ ID NO: 180071 - protein, 7 aa, synthetic construct
MSTQRHI

SEQ ID NO: 180072 - protein, 7 aa, synthetic construct
MDGKARY

SEQ ID NO: 180073 - protein, 7 aa, synthetic construct
TENQRRI

SEQ ID NO: 180074 - protein, 7 aa, synthetic construct
MDGTRKL

SEQ ID NO: 180075 - protein, 7 aa, synthetic construct
IDGMRRV

SEQ ID NO: 180076 - protein, 7 aa, synthetic construct
PDRQRNI

SEQ ID NO: 180077 - protein, 7 aa, synthetic construct
SDNVRRI

SEQ ID NO: 180078 - protein, 7 aa, synthetic construct
ADNQRKI

SEQ ID NO: 180079 - protein, 7 aa, synthetic construct
VDASRRI

SEQ ID NO: 180080 - protein, 7 aa, synthetic construct
YDGPRKI

SEQ ID NO: 180081 - protein, 7 aa, synthetic construct
RDDVRRI

SEQ ID NO: 180082 - protein, 7 aa, synthetic construct
NDGGKRI

SEQ ID NO: 180083 - protein, 7 aa, synthetic construct
MDSARRA

SEQ ID NO: 180084 - protein, 7 aa, synthetic construct
NDNQRRV

SEQ ID NO: 180085 - protein, 7 aa, synthetic construct
FDGTRRA

SEQ ID NO: 180086 - protein, 7 aa, synthetic construct
DKGQRYI

SEQ ID NO: 180087 - protein, 7 aa, synthetic construct
MMGPRAI

SEQ ID NO: 180088 - protein, 7 aa, synthetic construct
QDRQTRI

SEQ ID NO: 180089 - protein, 7 aa, synthetic construct
MSGQIRN

SEQ ID NO: 180090 - protein, 7 aa, synthetic construct
TDMQKRI

SEQ ID NO: 180091 - protein, 7 aa, synthetic construct
SDRQVRI

SEQ ID NO: 180092 - protein, 7 aa, synthetic construct
NDPQRRA

SEQ ID NO: 180093 - protein, 7 aa, synthetic construct
MTGRDRI

SEQ ID NO: 180094 - protein, 7 aa, synthetic construct
LSEQRRI

SEQ ID NO: 180095 - protein, 7 aa, synthetic construct
LDGQRKS

SEQ ID NO: 180096 - protein, 7 aa, synthetic construct
VDGARRS

SEQ ID NO: 180097 - protein, 7 aa, synthetic construct
TDVQRRS

SEQ ID NO: 180098 - protein, 7 aa, synthetic construct
MDAPRRA

SEQ ID NO: 180099 - protein, 7 aa, synthetic construct
PDSQRRV

SEQ ID NO: 180100 - protein, 7 aa, synthetic construct
MDGKRNY

SEQ ID NO: 180101 - protein, 7 aa, synthetic construct
MTGQRHG

SEQ ID NO: 180102 - protein, 7 aa, synthetic construct
VDGARRM

SEQ ID NO: 180103 - protein, 7 aa, synthetic construct
MDQVRRQ

SEQ ID NO: 180104 - protein, 7 aa, synthetic construct
HDKQRNI

SEQ ID NO: 180105 - protein, 7 aa, synthetic construct
MLGERRV

SEQ ID NO: 180106 - protein, 7 aa, synthetic construct
MDKQYRA

SEQ ID NO: 180107 - protein, 7 aa, synthetic construct
MTGTHRI

SEQ ID NO: 180108 - protein, 7 aa, synthetic construct
ADRQRLI

SEQ ID NO: 180109 - protein, 7 aa, synthetic construct
QDGQRTR

SEQ ID NO: 180110 - protein, 7 aa, synthetic construct
MERQTRI

SEQ ID NO: 180111 - protein, 7 aa, synthetic construct
TDQGRRI

SEQ ID NO: 180112 - protein, 7 aa, synthetic construct
MEKQIRI

SEQ ID NO: 180113 - protein, 7 aa, synthetic construct
SDNQRKI

SEQ ID NO: 180114 - protein, 7 aa, synthetic construct
YDGQMRK

SEQ ID NO: 180115 - protein, 7 aa, synthetic construct
GDIQRRV

SEQ ID NO: 180116 - protein, 7 aa, synthetic construct
MLGQIRQ

SEQ ID NO: 180117 - protein, 7 aa, synthetic construct
VDTQRRM

SEQ ID NO: 180118 - protein, 7 aa, synthetic construct
MDGSKRY

SEQ ID NO: 180119 - protein, 7 aa, synthetic construct
MDTQGRR

SEQ ID NO: 180120 - protein, 7 aa, synthetic construct
MDGGRKF

SEQ ID NO: 180121 - protein, 7 aa, synthetic construct
GDLQKRI

SEQ ID NO: 180122 - protein, 7 aa, synthetic construct
MDPGRRT

SEQ ID NO: 180123 - protein, 7 aa, synthetic construct
MRGQQRE

SEQ ID NO: 180124 - protein, 7 aa, synthetic construct
YDGQKKI

SEQ ID NO: 180125 - protein, 7 aa, synthetic construct
GDQTRRI

SEQ ID NO: 180126 - protein, 7 aa, synthetic construct
MDGTRKQ

SEQ ID NO: 180127 - protein, 7 aa, synthetic construct
MDKQHRQ

SEQ ID NO: 180128 - protein, 7 aa, synthetic construct
IDTTRRI

SEQ ID NO: 180129 - protein, 7 aa, synthetic construct
KDGQPRN

SEQ ID NO: 180130 - protein, 7 aa, synthetic construct
TDIPRRI

SEQ ID NO: 180131 - protein, 7 aa, synthetic construct
MDSARRT

SEQ ID NO: 180132 - protein, 7 aa, synthetic construct
MDVRTRI

SEQ ID NO: 180133 - protein, 7 aa, synthetic construct
MDGVKRM

SEQ ID NO: 180134 - protein, 7 aa, synthetic construct
YDGGRRQ

SEQ ID NO: 180135 - protein, 7 aa, synthetic construct
MMGTRRE

SEQ ID NO: 180136 - protein, 7 aa, synthetic construct
VDGVRRQ

SEQ ID NO: 180137 - protein, 7 aa, synthetic construct
SDTQRRA

SEQ ID NO: 180138 - protein, 7 aa, synthetic construct
MDRNRSI

SEQ ID NO: 180139 - protein, 7 aa, synthetic construct
ITEQRRI

SEQ ID NO: 180140 - protein, 7 aa, synthetic construct
MDKFQRI

SEQ ID NO: 180141 - protein, 7 aa, synthetic construct
VDLQRRG

SEQ ID NO: 180142 - protein, 7 aa, synthetic construct
MRGNREI

SEQ ID NO: 180143 - protein, 7 aa, synthetic construct
MDGMRGR

SEQ ID NO: 180144 - protein, 7 aa, synthetic construct
YDGQRKG

SEQ ID NO: 180145 - protein, 7 aa, synthetic construct
DQGTRRI

SEQ ID NO: 180146 - protein, 7 aa, synthetic construct
MDRITRI

SEQ ID NO: 180147 - protein, 7 aa, synthetic construct
MPTERRI

SEQ ID NO: 180148 - protein, 7 aa, synthetic construct
MDAVRKI

SEQ ID NO: 180149 - protein, 7 aa, synthetic construct
MLAQRRE

SEQ ID NO: 180150 - protein, 7 aa, synthetic construct
IDNLRRI

SEQ ID NO: 180151 - protein, 7 aa, synthetic construct
YDGVRRV

SEQ ID NO: 180152 - protein, 7 aa, synthetic construct
MPGQVRN

SEQ ID NO: 180153 - protein, 7 aa, synthetic construct
MDNQKRA

SEQ ID NO: 180154 - protein, 7 aa, synthetic construct
MDKQFRS

SEQ ID NO: 180155 - protein, 7 aa, synthetic construct
MRGQDRG

SEQ ID NO: 180156 - protein, 7 aa, synthetic construct
MDSMRRP

SEQ ID NO: 180157 - protein, 7 aa, synthetic construct
MKGQRDN

SEQ ID NO: 180158 - protein, 7 aa, synthetic construct
MTGSRYI

SEQ ID NO: 180159 - protein, 7 aa, synthetic construct
YDGRVRI

SEQ ID NO: 180160 - protein, 7 aa, synthetic construct
QDIQRKI

SEQ ID NO: 180161 - protein, 7 aa, synthetic construct
SDTQRRI

SEQ ID NO: 180162 - protein, 7 aa, synthetic construct
MGGQHRA

SEQ ID NO: 180163 - protein, 7 aa, synthetic construct
MLGMRRE

SEQ ID NO: 180164 - protein, 7 aa, synthetic construct
MEGQKRP

SEQ ID NO: 180165 - protein, 7 aa, synthetic construct
IDMPRRI

SEQ ID NO: 180166 - protein, 7 aa, synthetic construct
DAGQKRI

SEQ ID NO: 180167 - protein, 7 aa, synthetic construct
RDGQYKI

SEQ ID NO: 180168 - protein, 7 aa, synthetic construct
FDAQRKI

SEQ ID NO: 180169 - protein, 7 aa, synthetic construct
MEGTRRV

SEQ ID NO: 180170 - protein, 7 aa, synthetic construct
MDKQRSY

SEQ ID NO: 180171 - protein, 7 aa, synthetic construct
QDGRRGI

SEQ ID NO: 180172 - protein, 7 aa, synthetic construct
SDAMRRI

SEQ ID NO: 180173 - protein, 7 aa, synthetic construct
MDGRKYI

SEQ ID NO: 180174 - protein, 7 aa, synthetic construct
NDPGRRI

SEQ ID NO: 180175 - protein, 7 aa, synthetic construct
TDGQRQR

SEQ ID NO: 180176 - protein, 7 aa, synthetic construct
GDNTRRI

SEQ ID NO: 180177 - protein, 7 aa, synthetic construct
MDLQRGK

SEQ ID NO: 180178 - protein, 7 aa, synthetic construct
MDGRSRP

SEQ ID NO: 180179 - protein, 7 aa, synthetic construct
MDGQKRL

SEQ ID NO: 180180 - protein, 7 aa, synthetic construct
QDGKPRI

SEQ ID NO: 180181 - protein, 7 aa, synthetic construct
MPAQRRD

SEQ ID NO: 180182 - protein, 7 aa, synthetic construct
MVGQHRP

SEQ ID NO: 180183 - protein, 7 aa, synthetic construct
RDGPRTI

SEQ ID NO: 180184 - protein, 7 aa, synthetic construct
MPGMRRE

SEQ ID NO: 180185 - protein, 7 aa, synthetic construct
MPGQNRA

SEQ ID NO: 180186 - protein, 7 aa, synthetic construct
YDGLRRS

SEQ ID NO: 180187 - protein, 7 aa, synthetic construct
TDPQRRQ

SEQ ID NO: 180188 - protein, 7 aa, synthetic construct
MDSARRV

SEQ ID NO: 180189 - protein, 7 aa, synthetic construct
LDGPRRG

SEQ ID NO: 180190 - protein, 7 aa, synthetic construct
GEGQKRI

SEQ ID NO: 180191 - protein, 7 aa, synthetic construct
MLGERRS

SEQ ID NO: 180192 - protein, 7 aa, synthetic construct
MTEQRRA

SEQ ID NO: 180193 - protein, 7 aa, synthetic construct
MDGIRRV

SEQ ID NO: 180194 - protein, 7 aa, synthetic construct
VDNQRRT

SEQ ID NO: 180195 - protein, 7 aa, synthetic construct
MDGNRKF

SEQ ID NO: 180196 - protein, 7 aa, synthetic construct
MDGRQRP

SEQ ID NO: 180197 - protein, 7 aa, synthetic construct
NDQVRRI

SEQ ID NO: 180198 - protein, 7 aa, synthetic construct
MAGRREI

SEQ ID NO: 180199 - protein, 7 aa, synthetic construct
MHGQRAG

SEQ ID NO: 180200 - protein, 7 aa, synthetic construct
MDNRPRI

SEQ ID NO: 180201 - protein, 7 aa, synthetic construct
QDGKQRI

SEQ ID NO: 180202 - protein, 7 aa, synthetic construct
MDAMRKI

SEQ ID NO: 180203 - protein, 7 aa, synthetic construct
LDVGRRI

SEQ ID NO: 180204 - protein, 7 aa, synthetic construct
MDGVTRR

SEQ ID NO: 180205 - protein, 7 aa, synthetic construct
MDSNRRA

SEQ ID NO: 180206 - protein, 7 aa, synthetic construct
MDQQARK

SEQ ID NO: 180207 - protein, 7 aa, synthetic construct
PDGQRIK

SEQ ID NO: 180208 - protein, 7 aa, synthetic construct
MIGQRHI

SEQ ID NO: 180209 - protein, 7 aa, synthetic construct
GDVQRRG

SEQ ID NO: 180210 - protein, 7 aa, synthetic construct
KMGQRDI

SEQ ID NO: 180211 - protein, 7 aa, synthetic construct
LDGTRRQ

SEQ ID NO: 180212 - protein, 7 aa, synthetic construct
MDRQIRI

SEQ ID NO: 180213 - protein, 7 aa, synthetic construct
MDNARRA

SEQ ID NO: 180214 - protein, 7 aa, synthetic construct
FDGARKI

SEQ ID NO: 180215 - protein, 7 aa, synthetic construct
MPGQMRA

SEQ ID NO: 180216 - protein, 7 aa, synthetic construct
MDGKVRS

SEQ ID NO: 180217 - protein, 7 aa, synthetic construct
MDGSRVK

SEQ ID NO: 180218 - protein, 7 aa, synthetic construct
NDGPRRM

SEQ ID NO: 180219 - protein, 7 aa, synthetic construct
MDGPRKG

SEQ ID NO: 180220 - protein, 7 aa, synthetic construct
MDGKLRA

SEQ ID NO: 180221 - protein, 7 aa, synthetic construct
MDGIRLK

SEQ ID NO: 180222 - protein, 7 aa, synthetic construct
MNRQRDI

SEQ ID NO: 180223 - protein, 7 aa, synthetic construct
MTGQARN

SEQ ID NO: 180224 - protein, 7 aa, synthetic construct
ADGKVRI

SEQ ID NO: 180225 - protein, 7 aa, synthetic construct
MDAQRVK

SEQ ID NO: 180226 - protein, 7 aa, synthetic construct
LDGQRRN

SEQ ID NO: 180227 - protein, 7 aa, synthetic construct
MDNQRRG

SEQ ID NO: 180228 - protein, 7 aa, synthetic construct
YDGKNRI

SEQ ID NO: 180229 - protein, 7 aa, synthetic construct
HDLQKRI

SEQ ID NO: 180230 - protein, 7 aa, synthetic construct
MDGQKTR

SEQ ID NO: 180231 - protein, 7 aa, synthetic construct
MDAPRRQ

SEQ ID NO: 180232 - protein, 7 aa, synthetic construct
IDMQRRA

SEQ ID NO: 180233 - protein, 7 aa, synthetic construct
MMGERRG

SEQ ID NO: 180234 - protein, 7 aa, synthetic construct
MDNQRAK

SEQ ID NO: 180235 - protein, 7 aa, synthetic construct
MRGQSRD

SEQ ID NO: 180236 - protein, 7 aa, synthetic construct
LDGQMRK

SEQ ID NO: 180237 - protein, 7 aa, synthetic construct
IDGVRRQ

SEQ ID NO: 180238 - protein, 7 aa, synthetic construct
VSEQRRI

SEQ ID NO: 180239 - protein, 7 aa, synthetic construct
IDSPRRI

SEQ ID NO: 180240 - protein, 7 aa, synthetic construct
MDRGTRI

SEQ ID NO: 180241 - protein, 7 aa, synthetic construct
YDGPKRI

SEQ ID NO: 180242 - protein, 7 aa, synthetic construct
MSGIRHI

SEQ ID NO: 180243 - protein, 7 aa, synthetic construct
MDGHKRP

SEQ ID NO: 180244 - protein, 7 aa, synthetic construct
MDGVRKS

SEQ ID NO: 180245 - protein, 7 aa, synthetic construct
MDRQRQN

SEQ ID NO: 180246 - protein, 7 aa, synthetic construct
TDRQSRI

SEQ ID NO: 180247 - protein, 7 aa, synthetic construct
MDKQRFL

SEQ ID NO: 180248 - protein, 7 aa, synthetic construct
MDGKARH

SEQ ID NO: 180249 - protein, 7 aa, synthetic construct
MDGKHRI

SEQ ID NO: 180250 - protein, 7 aa, synthetic construct
MDKIRRD

SEQ ID NO: 180251 - protein, 7 aa, synthetic construct
FDTARRI

SEQ ID NO: 180252 - protein, 7 aa, synthetic construct
LDGVRRT

SEQ ID NO: 180253 - protein, 7 aa, synthetic construct
GDAQRRV

SEQ ID NO: 180254 - protein, 7 aa, synthetic construct
VDQMRRI

SEQ ID NO: 180255 - protein, 7 aa, synthetic construct
QDGKRII

SEQ ID NO: 180256 - protein, 7 aa, synthetic construct
IDGNRRA

SEQ ID NO: 180257 - protein, 7 aa, synthetic construct
TDGQTRR

SEQ ID NO: 180258 - protein, 7 aa, synthetic construct
MDGLRKL

SEQ ID NO: 180259 - protein, 7 aa, synthetic construct
MKGQRDQ

SEQ ID NO: 180260 - protein, 7 aa, synthetic construct
IRGQERI

SEQ ID NO: 180261 - protein, 7 aa, synthetic construct
MDGQVKK

SEQ ID NO: 180262 - protein, 7 aa, synthetic construct
QDGLKRI

SEQ ID NO: 180263 - protein, 7 aa, synthetic construct
MRGQMAI

SEQ ID NO: 180264 - protein, 7 aa, synthetic construct
MDGKVRA

SEQ ID NO: 180265 - protein, 7 aa, synthetic construct
MGEVRRI

SEQ ID NO: 180266 - protein, 7 aa, synthetic construct
TDVSRRI

SEQ ID NO: 180267 - protein, 7 aa, synthetic construct
SDAQKRI

SEQ ID NO: 180268 - protein, 7 aa, synthetic construct
VDAIRRI

SEQ ID NO: 180269 - protein, 7 aa, synthetic construct
TDLQRRS

SEQ ID NO: 180270 - protein, 7 aa, synthetic construct
MDSVRRS

SEQ ID NO: 180271 - protein, 7 aa, synthetic construct
IDGGRRM

SEQ ID NO: 180272 - protein, 7 aa, synthetic construct
VEGQRKI

SEQ ID NO: 180273 - protein, 7 aa, synthetic construct
LDAQRRA

SEQ ID NO: 180274 - protein, 7 aa, synthetic construct
IDGQKRL

SEQ ID NO: 180275 - protein, 7 aa, synthetic construct
QDGKRTI

SEQ ID NO: 180276 - protein, 7 aa, synthetic construct
MENQRKI

SEQ ID NO: 180277 - protein, 7 aa, synthetic construct
MDGGRKT

SEQ ID NO: 180278 - protein, 7 aa, synthetic construct
MDANRRS

SEQ ID NO: 180279 - protein, 7 aa, synthetic construct
MDSTRRG

SEQ ID NO: 180280 - protein, 7 aa, synthetic construct
IDAQRRL

SEQ ID NO: 180281 - protein, 7 aa, synthetic construct
TDLQRRG

SEQ ID NO: 180282 - protein, 7 aa, synthetic construct
NDIARRI

SEQ ID NO: 180283 - protein, 7 aa, synthetic construct
MDNQRRS

SEQ ID NO: 180284 - protein, 7 aa, synthetic construct
MEGTRKI

SEQ ID NO: 180285 - protein, 7 aa, synthetic construct
FDAQRRQ

SEQ ID NO: 180286 - protein, 7 aa, synthetic construct
QDVQRRA

SEQ ID NO: 180287 - protein, 7 aa, synthetic construct
MDGNRKT

SEQ ID NO: 180288 - protein, 7 aa, synthetic construct
YKGQDRI

SEQ ID NO: 180289 - protein, 7 aa, synthetic construct
MDGGGRR

SEQ ID NO: 180290 - protein, 7 aa, synthetic construct
MRGQDRS

SEQ ID NO: 180291 - protein, 7 aa, synthetic construct
IDGLKRI

SEQ ID NO: 180292 - protein, 7 aa, synthetic construct
MDGRMKI

SEQ ID NO: 180293 - protein, 7 aa, synthetic construct
NDPQRRS

SEQ ID NO: 180294 - protein, 7 aa, synthetic construct
MDVAKRI

SEQ ID NO: 180295 - protein, 7 aa, synthetic construct
ADGKIRI

SEQ ID NO: 180296 - protein, 7 aa, synthetic construct
MDGIRSR

SEQ ID NO: 180297 - protein, 7 aa, synthetic construct
MIGDRRA

SEQ ID NO: 180298 - protein, 7 aa, synthetic construct
TDGARKI

SEQ ID NO: 180299 - protein, 7 aa, synthetic construct
TTGERRI

SEQ ID NO: 180300 - protein, 7 aa, synthetic construct
MVGQHRG

SEQ ID NO: 180301 - protein, 7 aa, synthetic construct
MDIPRRA

SEQ ID NO: 180302 - protein, 7 aa, synthetic construct
MDGRTRT

SEQ ID NO: 180303 - protein, 7 aa, synthetic construct
MDTQKRL

SEQ ID NO: 180304 - protein, 7 aa, synthetic construct
LDIQKRI

SEQ ID NO: 180305 - protein, 7 aa, synthetic construct
ADGKRFI

SEQ ID NO: 180306 - protein, 7 aa, synthetic construct
MDGKMRY

SEQ ID NO: 180307 - protein, 7 aa, synthetic construct
DKGQRTI

SEQ ID NO: 180308 - protein, 7 aa, synthetic construct
MAGPRSI

SEQ ID NO: 180309 - protein, 7 aa, synthetic construct
MDRNSRI

SEQ ID NO: 180310 - protein, 7 aa, synthetic construct
MSGERRV

SEQ ID NO: 180311 - protein, 7 aa, synthetic construct
NDPARRI

SEQ ID NO: 180312 - protein, 7 aa, synthetic construct
MDSLKRI

SEQ ID NO: 180313 - protein, 7 aa, synthetic construct
MDAQRPR

SEQ ID NO: 180314 - protein, 7 aa, synthetic construct
IDRQARI

SEQ ID NO: 180315 - protein, 7 aa, synthetic construct
PDGKRSI

SEQ ID NO: 180316 - protein, 7 aa, synthetic construct
NDVQRKI

SEQ ID NO: 180317 - protein, 7 aa, synthetic construct
SDNQRRV

SEQ ID NO: 180318 - protein, 7 aa, synthetic construct
MAGERRG

SEQ ID NO: 180319 - protein, 7 aa, synthetic construct
MRPQRDI

SEQ ID NO: 180320 - protein, 7 aa, synthetic construct
VDSQRRG

SEQ ID NO: 180321 - protein, 7 aa, synthetic construct
GDAIRRI

SEQ ID NO: 180322 - protein, 7 aa, synthetic construct
GDGQRAR

SEQ ID NO: 180323 - protein, 7 aa, synthetic construct
FDGKMRI

SEQ ID NO: 180324 - protein, 7 aa, synthetic construct
MEKQRNI

SEQ ID NO: 180325 - protein, 7 aa, synthetic construct
MDLQKRM

SEQ ID NO: 180326 - protein, 7 aa, synthetic construct
MDLVRRP

SEQ ID NO: 180327 - protein, 7 aa, synthetic construct
SDGKQRI

SEQ ID NO: 180328 - protein, 7 aa, synthetic construct
MVENRRI

SEQ ID NO: 180329 - protein, 7 aa, synthetic construct
LDGGRRM

SEQ ID NO: 180330 - protein, 7 aa, synthetic construct
RDGPRMI

SEQ ID NO: 180331 - protein, 7 aa, synthetic construct
TDVQRRI

SEQ ID NO: 180332 - protein, 7 aa, synthetic construct
VDQNRRI

SEQ ID NO: 180333 - protein, 7 aa, synthetic construct
MRGQRVE

SEQ ID NO: 180334 - protein, 7 aa, synthetic construct
MDKQTRY

SEQ ID NO: 180335 - protein, 7 aa, synthetic construct
FDTQRRP

SEQ ID NO: 180336 - protein, 7 aa, synthetic construct
TDMGRRI

SEQ ID NO: 180337 - protein, 7 aa, synthetic construct
MDRIRAI

SEQ ID NO: 180338 - protein, 7 aa, synthetic construct
PDGLKRI

SEQ ID NO: 180339 - protein, 7 aa, synthetic construct
IDGLRRV

SEQ ID NO: 180340 - protein, 7 aa, synthetic construct
LDRQSRI

SEQ ID NO: 180341 - protein, 7 aa, synthetic construct
MDVVRRS

SEQ ID NO: 180342 - protein, 7 aa, synthetic construct
SDGMRRV

SEQ ID NO: 180343 - protein, 7 aa, synthetic construct
TDGQRRI

SEQ ID NO: 180344 - protein, 7 aa, synthetic construct
MDGKRNL

SEQ ID NO: 180345 - protein, 7 aa, synthetic construct
MDGKFRS

SEQ ID NO: 180346 - protein, 7 aa, synthetic construct
TDMQRRG

SEQ ID NO: 180347 - protein, 7 aa, synthetic construct
NDGKPRI

SEQ ID NO: 180348 - protein, 7 aa, synthetic construct
IDRQSRI

SEQ ID NO: 180349 - protein, 7 aa, synthetic construct
MDGGKRT

SEQ ID NO: 180350 - protein, 7 aa, synthetic construct
MDAQQRR

SEQ ID NO: 180351 - protein, 7 aa, synthetic construct
NDGQRKS

SEQ ID NO: 180352 - protein, 7 aa, synthetic construct
MDNQRKY

SEQ ID NO: 180353 - protein, 7 aa, synthetic construct
GDNQRRV

SEQ ID NO: 180354 - protein, 7 aa, synthetic construct
MIGQPRA

SEQ ID NO: 180355 - protein, 7 aa, synthetic construct
MDGKQRA

SEQ ID NO: 180356 - protein, 7 aa, synthetic construct
VDGQKRN

SEQ ID NO: 180357 - protein, 7 aa, synthetic construct
MDGKSRY

SEQ ID NO: 180358 - protein, 7 aa, synthetic construct
MDKQRFV

SEQ ID NO: 180359 - protein, 7 aa, synthetic construct
MDGIARK

SEQ ID NO: 180360 - protein, 7 aa, synthetic construct
IDGPRRP

SEQ ID NO: 180361 - protein, 7 aa, synthetic construct
MMGQLRA

SEQ ID NO: 180362 - protein, 7 aa, synthetic construct
MSEMRRI

SEQ ID NO: 180363 - protein, 7 aa, synthetic construct
GDGQRQK

SEQ ID NO: 180364 - protein, 7 aa, synthetic construct
MDGKRIL

SEQ ID NO: 180365 - protein, 7 aa, synthetic construct
MDGQRMK

SEQ ID NO: 180366 - protein, 7 aa, synthetic construct
MPSERRI

SEQ ID NO: 180367 - protein, 7 aa, synthetic construct
IDQQRRG

SEQ ID NO: 180368 - protein, 7 aa, synthetic construct
MDGGMRK

SEQ ID NO: 180369 - protein, 7 aa, synthetic construct
MDKHRNI

SEQ ID NO: 180370 - protein, 7 aa, synthetic construct
MDKVRYI

SEQ ID NO: 180371 - protein, 7 aa, synthetic construct
IDGQRKM

SEQ ID NO: 180372 - protein, 7 aa, synthetic construct
MPGQARH

SEQ ID NO: 180373 - protein, 7 aa, synthetic construct
TTEQRRI

SEQ ID NO: 180374 - protein, 7 aa, synthetic construct
VDLNRRI

SEQ ID NO: 180375 - protein, 7 aa, synthetic construct
MDGPKRS

SEQ ID NO: 180376 - protein, 7 aa, synthetic construct
TDGQVRK

SEQ ID NO: 180377 - protein, 7 aa, synthetic construct
LDGARRS

SEQ ID NO: 180378 - protein, 7 aa, synthetic construct
MVGQARA

SEQ ID NO: 180379 - protein, 7 aa, synthetic construct
MDIKQRI

SEQ ID NO: 180380 - protein, 7 aa, synthetic construct
VDAQRRQ

SEQ ID NO: 180381 - protein, 7 aa, synthetic construct
MDGLRQK

SEQ ID NO: 180382 - protein, 7 aa, synthetic construct
MDGNRQK

SEQ ID NO: 180383 - protein, 7 aa, synthetic construct
MDGKRLF

SEQ ID NO: 180384 - protein, 7 aa, synthetic construct
QDAIRRI

SEQ ID NO: 180385 - protein, 7 aa, synthetic construct
GDGQRPK

SEQ ID NO: 180386 - protein, 7 aa, synthetic construct
NDGRLRI

SEQ ID NO: 180387 - protein, 7 aa, synthetic construct
MDKQPRS

SEQ ID NO: 180388 - protein, 7 aa, synthetic construct
QDNQRRP

SEQ ID NO: 180389 - protein, 7 aa, synthetic construct
RDGQVRN

SEQ ID NO: 180390 - protein, 7 aa, synthetic construct
ADPNRRI

SEQ ID NO: 180391 - protein, 7 aa, synthetic construct
MDGQFKK

SEQ ID NO: 180392 - protein, 7 aa, synthetic construct
SDGLRRV

SEQ ID NO: 180393 - protein, 7 aa, synthetic construct
QDGPRKI

SEQ ID NO: 180394 - protein, 7 aa, synthetic construct
MDQQRSK

SEQ ID NO: 180395 - protein, 7 aa, synthetic construct
MDMKHRI

SEQ ID NO: 180396 - protein, 7 aa, synthetic construct
MTGLRHI

SEQ ID NO: 180397 - protein, 7 aa, synthetic construct
MDGNRVK

SEQ ID NO: 180398 - protein, 7 aa, synthetic construct
QDGNKRI

SEQ ID NO: 180399 - protein, 7 aa, synthetic construct
MDGKSRN

SEQ ID NO: 180400 - protein, 7 aa, synthetic construct
MVDQRRS

SEQ ID NO: 180401 - protein, 7 aa, synthetic construct
MPGQPRQ

SEQ ID NO: 180402 - protein, 7 aa, synthetic construct
MDGKSRL

SEQ ID NO: 180403 - protein, 7 aa, synthetic construct
MRGQERA

SEQ ID NO: 180404 - protein, 7 aa, synthetic construct
TDGPKRI

SEQ ID NO: 180405 - protein, 7 aa, synthetic construct
LDNQRRV

SEQ ID NO: 180406 - protein, 7 aa, synthetic construct
MTGQARG

SEQ ID NO: 180407 - protein, 7 aa, synthetic construct
MDSQIRK

SEQ ID NO: 180408 - protein, 7 aa, synthetic construct
EKGQSRI

SEQ ID NO: 180409 - protein, 7 aa, synthetic construct
QDGMRRA

SEQ ID NO: 180410 - protein, 7 aa, synthetic construct
MHGQIRG

SEQ ID NO: 180411 - protein, 7 aa, synthetic construct
VDVQRRT

SEQ ID NO: 180412 - protein, 7 aa, synthetic construct
LDMQRRG

SEQ ID NO: 180413 - protein, 7 aa, synthetic construct
MDGAKRF

SEQ ID NO: 180414 - protein, 7 aa, synthetic construct
IMGERRI

SEQ ID NO: 180415 - protein, 7 aa, synthetic construct
PDIQRRP

SEQ ID NO: 180416 - protein, 7 aa, synthetic construct
NDAQRRV

SEQ ID NO: 180417 - protein, 7 aa, synthetic construct
MDNQRNK

SEQ ID NO: 180418 - protein, 7 aa, synthetic construct
YDVQRKI

SEQ ID NO: 180419 - protein, 7 aa, synthetic construct
DKGQPRI

SEQ ID NO: 180420 - protein, 7 aa, synthetic construct
IDKQRYI

SEQ ID NO: 180421 - protein, 7 aa, synthetic construct
LDSGRRI

SEQ ID NO: 180422 - protein, 7 aa, synthetic construct
HDGKRSI

SEQ ID NO: 180423 - protein, 7 aa, synthetic construct
MDVKLRI

SEQ ID NO: 180424 - protein, 7 aa, synthetic construct
MDGIRNK

SEQ ID NO: 180425 - protein, 7 aa, synthetic construct
MQGTRRE

SEQ ID NO: 180426 - protein, 7 aa, synthetic construct
LDGQTRK

SEQ ID NO: 180427 - protein, 7 aa, synthetic construct
MDNIRRG

SEQ ID NO: 180428 - protein, 7 aa, synthetic construct
MHGPRVI

SEQ ID NO: 180429 - protein, 7 aa, synthetic construct
DLGPRRI

SEQ ID NO: 180430 - protein, 7 aa, synthetic construct
MPGQERK

SEQ ID NO: 180431 - protein, 7 aa, synthetic construct
MDGGLRR

SEQ ID NO: 180432 - protein, 7 aa, synthetic construct
LDGQQRK

SEQ ID NO: 180433 - protein, 7 aa, synthetic construct
MSGSHRI

SEQ ID NO: 180434 - protein, 7 aa, synthetic construct
MAGERRT

SEQ ID NO: 180435 - protein, 7 aa, synthetic construct
VDGQQRR

SEQ ID NO: 180436 - protein, 7 aa, synthetic construct
MHGQVRA

SEQ ID NO: 180437 - protein, 7 aa, synthetic construct
MRGQTVI

SEQ ID NO: 180438 - protein, 7 aa, synthetic construct
QVDQRRI

SEQ ID NO: 180439 - protein, 7 aa, synthetic construct
QEGQKRI

SEQ ID NO: 180440 - protein, 7 aa, synthetic construct
MRSQRDI

SEQ ID NO: 180441 - protein, 7 aa, synthetic construct
MVRQERI

SEQ ID NO: 180442 - protein, 7 aa, synthetic construct
MDRPIRI

SEQ ID NO: 180443 - protein, 7 aa, synthetic construct
SDGVRRA

SEQ ID NO: 180444 - protein, 7 aa, synthetic construct
MDGNRVR

SEQ ID NO: 180445 - protein, 7 aa, synthetic construct
TDQMRRI

SEQ ID NO: 180446 - protein, 7 aa, synthetic construct
MDAQKRM

SEQ ID NO: 180447 - protein, 7 aa, synthetic construct
ADGKARI

SEQ ID NO: 180448 - protein, 7 aa, synthetic construct
MDGKIRL

SEQ ID NO: 180449 - protein, 7 aa, synthetic construct
YDGIRRS

SEQ ID NO: 180450 - protein, 7 aa, synthetic construct
NDAQRRG

SEQ ID NO: 180451 - protein, 7 aa, synthetic construct
GDGQKKI

SEQ ID NO: 180452 - protein, 7 aa, synthetic construct
MLGQSRG

SEQ ID NO: 180453 - protein, 7 aa, synthetic construct
TDGQRTK

SEQ ID NO: 180454 - protein, 7 aa, synthetic construct
VDGMRRI

SEQ ID NO: 180455 - protein, 7 aa, synthetic construct
NDGKRQI

SEQ ID NO: 180456 - protein, 7 aa, synthetic construct
MDNQLRK

SEQ ID NO: 180457 - protein, 7 aa, synthetic construct
MIGQKRD

SEQ ID NO: 180458 - protein, 7 aa, synthetic construct
MDGKRNV

SEQ ID NO: 180459 - protein, 7 aa, synthetic construct
MEIQKRI

SEQ ID NO: 180460 - protein, 7 aa, synthetic construct
MDQIRKI

SEQ ID NO: 180461 - protein, 7 aa, synthetic construct
MDGSRGK

SEQ ID NO: 180462 - protein, 7 aa, synthetic construct
TDGQQRK

SEQ ID NO: 180463 - protein, 7 aa, synthetic construct
MSGVRHI

SEQ ID NO: 180464 - protein, 7 aa, synthetic construct
MDTIKRI

SEQ ID NO: 180465 - protein, 7 aa, synthetic construct
NDGRTRI

SEQ ID NO: 180466 - protein, 7 aa, synthetic construct
TDQQRRT

SEQ ID NO: 180467 - protein, 7 aa, synthetic construct
MDFKSRI

SEQ ID NO: 180468 - protein, 7 aa, synthetic construct
MVGQIRG

SEQ ID NO: 180469 - protein, 7 aa, synthetic construct
MQGQHRP

SEQ ID NO: 180470 - protein, 7 aa, synthetic construct
MMGQMRG

SEQ ID NO: 180471 - protein, 7 aa, synthetic construct
MIGQSRQ

SEQ ID NO: 180472 - protein, 7 aa, synthetic construct
GDGKRTI

SEQ ID NO: 180473 - protein, 7 aa, synthetic construct
GDQQRRV

SEQ ID NO: 180474 - protein, 7 aa, synthetic construct
MSGERRG

SEQ ID NO: 180475 - protein, 7 aa, synthetic construct
IDGQMRK

SEQ ID NO: 180476 - protein, 7 aa, synthetic construct
MSVQRRE

SEQ ID NO: 180477 - protein, 7 aa, synthetic construct
IDGFKRI

SEQ ID NO: 180478 - protein, 7 aa, synthetic construct
TDIARRI

SEQ ID NO: 180479 - protein, 7 aa, synthetic construct
GDAQRKI

SEQ ID NO: 180480 - protein, 7 aa, synthetic construct
NDGKRLI

SEQ ID NO: 180481 - protein, 7 aa, synthetic construct
ADSQRRV

SEQ ID NO: 180482 - protein, 7 aa, synthetic construct
ADNNRRI

SEQ ID NO: 180483 - protein, 7 aa, synthetic construct
MDKGFRI

SEQ ID NO: 180484 - protein, 7 aa, synthetic construct
MDGRVRP

SEQ ID NO: 180485 - protein, 7 aa, synthetic construct
NLGQRRE

SEQ ID NO: 180486 - protein, 7 aa, synthetic construct
SDIQRRS

SEQ ID NO: 180487 - protein, 7 aa, synthetic construct
TDGQRFK

SEQ ID NO: 180488 - protein, 7 aa, synthetic construct
MDGIRKF

SEQ ID NO: 180489 - protein, 7 aa, synthetic construct
MDGRVKI

SEQ ID NO: 180490 - protein, 7 aa, synthetic construct
MDGNVRR

SEQ ID NO: 180491 - protein, 7 aa, synthetic construct
TDGLRRA

SEQ ID NO: 180492 - protein, 7 aa, synthetic construct
MDRQKII

SEQ ID NO: 180493 - protein, 7 aa, synthetic construct
MDGKPRN

SEQ ID NO: 180494 - protein, 7 aa, synthetic construct
NDGGRKI

SEQ ID NO: 180495 - protein, 7 aa, synthetic construct
MDQKPRI

SEQ ID NO: 180496 - protein, 7 aa, synthetic construct
YDGKLRI

SEQ ID NO: 180497 - protein, 7 aa, synthetic construct
MDPQLRK

SEQ ID NO: 180498 - protein, 7 aa, synthetic construct
NDGQRRV

SEQ ID NO: 180499 - protein, 7 aa, synthetic construct
MEGTRRP

SEQ ID NO: 180500 - protein, 7 aa, synthetic construct
NDGTRRG

SEQ ID NO: 180501 - protein, 7 aa, synthetic construct
IDTQRRN

SEQ ID NO: 180502 - protein, 7 aa, synthetic construct
GDGKRFI

SEQ ID NO: 180503 - protein, 7 aa, synthetic construct
MDGQKKF

SEQ ID NO: 180504 - protein, 7 aa, synthetic construct
VDLQRKI

SEQ ID NO: 180505 - protein, 7 aa, synthetic construct
FDKQRII

SEQ ID NO: 180506 - protein, 7 aa, synthetic construct
MEGGKRI

SEQ ID NO: 180507 - protein, 7 aa, synthetic construct
MDAQRGK

SEQ ID NO: 180508 - protein, 7 aa, synthetic construct
LDGPRKI

SEQ ID NO: 180509 - protein, 7 aa, synthetic construct
MDGVRTK

SEQ ID NO: 180510 - protein, 7 aa, synthetic construct
VDGTRRT

SEQ ID NO: 180511 - protein, 7 aa, synthetic construct
IDRQTRI

SEQ ID NO: 180512 - protein, 7 aa, synthetic construct
NDGQRVK

SEQ ID NO: 180513 - protein, 7 aa, synthetic construct
MSEQRRV

SEQ ID NO: 180514 - protein, 7 aa, synthetic construct
FDATRRI

SEQ ID NO: 180515 - protein, 7 aa, synthetic construct
MDKERRF

SEQ ID NO: 180516 - protein, 7 aa, synthetic construct
ADRQRNI

SEQ ID NO: 180517 - protein, 7 aa, synthetic construct
MDSGRRV

SEQ ID NO: 180518 - protein, 7 aa, synthetic construct
MDGKNRQ

SEQ ID NO: 180519 - protein, 7 aa, synthetic construct
LDGKPRI

SEQ ID NO: 180520 - protein, 7 aa, synthetic construct
MDVARRV

SEQ ID NO: 180521 - protein, 7 aa, synthetic construct
LDNLRRI

SEQ ID NO: 180522 - protein, 7 aa, synthetic construct
MDGMKRQ

SEQ ID NO: 180523 - protein, 7 aa, synthetic construct
YDNQRRV

SEQ ID NO: 180524 - protein, 7 aa, synthetic construct
MSGTHRI

SEQ ID NO: 180525 - protein, 7 aa, synthetic construct
IDQQRRQ

SEQ ID NO: 180526 - protein, 7 aa, synthetic construct
MDAGRRT

SEQ ID NO: 180527 - protein, 7 aa, synthetic construct
IDMQRRT

SEQ ID NO: 180528 - protein, 7 aa, synthetic construct
MDGKGRA

SEQ ID NO: 180529 - protein, 7 aa, synthetic construct
MQGQIRN

SEQ ID NO: 180530 - protein, 7 aa, synthetic construct
MDGKSRH

SEQ ID NO: 180531 - protein, 7 aa, synthetic construct
ADGKRMI

SEQ ID NO: 180532 - protein, 7 aa, synthetic construct
MDRVRSI

SEQ ID NO: 180533 - protein, 7 aa, synthetic construct
GDQVRRI

SEQ ID NO: 180534 - protein, 7 aa, synthetic construct
SDMQRRP

SEQ ID NO: 180535 - protein, 7 aa, synthetic construct
MSGQARQ

SEQ ID NO: 180536 - protein, 7 aa, synthetic construct
MDGNKRG

SEQ ID NO: 180537 - protein, 7 aa, synthetic construct
MDGMRKL

SEQ ID NO: 180538 - protein, 7 aa, synthetic construct
MSGQRHS

SEQ ID NO: 180539 - protein, 7 aa, synthetic construct
MPGLRRE

SEQ ID NO: 180540 - protein, 7 aa, synthetic construct
MVGPRSI

SEQ ID NO: 180541 - protein, 7 aa, synthetic construct
NDTQRRV

SEQ ID NO: 180542 - protein, 7 aa, synthetic construct
MDGLRMK

SEQ ID NO: 180543 - protein, 7 aa, synthetic construct
MGGQRHG

SEQ ID NO: 180544 - protein, 7 aa, synthetic construct
MPEQRRT

SEQ ID NO: 180545 - protein, 7 aa, synthetic construct
MEPQRRV

SEQ ID NO: 180546 - protein, 7 aa, synthetic construct
MDLQRKT

SEQ ID NO: 180547 - protein, 7 aa, synthetic construct
MDTVRRA

SEQ ID NO: 180548 - protein, 7 aa, synthetic construct
RDGQTRS

SEQ ID NO: 180549 - protein, 7 aa, synthetic construct
MDRQSRG

SEQ ID NO: 180550 - protein, 7 aa, synthetic construct
LDQVRRI

SEQ ID NO: 180551 - protein, 7 aa, synthetic construct
MRGQREG

SEQ ID NO: 180552 - protein, 7 aa, synthetic construct
YEGQKRI

SEQ ID NO: 180553 - protein, 7 aa, synthetic construct
SDQVRRI

SEQ ID NO: 180554 - protein, 7 aa, synthetic construct
TDGARRQ

SEQ ID NO: 180555 - protein, 7 aa, synthetic construct
MSGQTRH

SEQ ID NO: 180556 - protein, 7 aa, synthetic construct
MDHKRQI

SEQ ID NO: 180557 - protein, 7 aa, synthetic construct
MDQQMRK

SEQ ID NO: 180558 - protein, 7 aa, synthetic construct
YDANRRI

SEQ ID NO: 180559 - protein, 7 aa, synthetic construct
RSGQREI

SEQ ID NO: 180560 - protein, 7 aa, synthetic construct
ADIQRRP

SEQ ID NO: 180561 - protein, 7 aa, synthetic construct
MDLQKRI

SEQ ID NO: 180562 - protein, 7 aa, synthetic construct
GDGKNRI

SEQ ID NO: 180563 - protein, 7 aa, synthetic construct
DKGQIRI

SEQ ID NO: 180564 - protein, 7 aa, synthetic construct
IDGQRRG

SEQ ID NO: 180565 - protein, 7 aa, synthetic construct
MDRQTRA

SEQ ID NO: 180566 - protein, 7 aa, synthetic construct
TDQQRRG

SEQ ID NO: 180567 - protein, 7 aa, synthetic construct
MDGGKRL

SEQ ID NO: 180568 - protein, 7 aa, synthetic construct
MSGQIRA

SEQ ID NO: 180569 - protein, 7 aa, synthetic construct
EAGQKRI

SEQ ID NO: 180570 - protein, 7 aa, synthetic construct
MSGQDRK

SEQ ID NO: 180571 - protein, 7 aa, synthetic construct
GDKQVRI

SEQ ID NO: 180572 - protein, 7 aa, synthetic construct
MDGPRRS

SEQ ID NO: 180573 - protein, 7 aa, synthetic construct
MIGQRHV

SEQ ID NO: 180574 - protein, 7 aa, synthetic construct
MDGPARR

SEQ ID NO: 180575 - protein, 7 aa, synthetic construct
MDGRQRQ

SEQ ID NO: 180576 - protein, 7 aa, synthetic construct
MDVQRKI

SEQ ID NO: 180577 - protein, 7 aa, synthetic construct
MDKQPRQ

SEQ ID NO: 180578 - protein, 7 aa, synthetic construct
MTGQPRA

SEQ ID NO: 180579 - protein, 7 aa, synthetic construct
MELQKRI

SEQ ID NO: 180580 - protein, 7 aa, synthetic construct
VDGQRGK

SEQ ID NO: 180581 - protein, 7 aa, synthetic construct
ADIQRRV

SEQ ID NO: 180582 - protein, 7 aa, synthetic construct
TDTVRRI

SEQ ID NO: 180583 - protein, 7 aa, synthetic construct
MMRQRDI

SEQ ID NO: 180584 - protein, 7 aa, synthetic construct
TDRQPRI

SEQ ID NO: 180585 - protein, 7 aa, synthetic construct
SDGQRGK

SEQ ID NO: 180586 - protein, 7 aa, synthetic construct
MDGKMRQ

SEQ ID NO: 180587 - protein, 7 aa, synthetic construct
MDGRQRS

SEQ ID NO: 180588 - protein, 7 aa, synthetic construct
TDSQRRS

SEQ ID NO: 180589 - protein, 7 aa, synthetic construct
NDGQTRK

SEQ ID NO: 180590 - protein, 7 aa, synthetic construct
MMGPRRE

SEQ ID NO: 180591 - protein, 7 aa, synthetic construct
MMGQHRA

SEQ ID NO: 180592 - protein, 7 aa, synthetic construct
MDGMRAR

SEQ ID NO: 180593 - protein, 7 aa, synthetic construct
NIDQRRI

SEQ ID NO: 180594 - protein, 7 aa, synthetic construct
MDNQRSR

SEQ ID NO: 180595 - protein, 7 aa, synthetic construct
NDVQRRA

SEQ ID NO: 180596 - protein, 7 aa, synthetic construct
MDRQKNI

SEQ ID NO: 180597 - protein, 7 aa, synthetic construct
VDGQMRR

SEQ ID NO: 180598 - protein, 7 aa, synthetic construct
FDTQRRV

SEQ ID NO: 180599 - protein, 7 aa, synthetic construct
MTGQRHL

SEQ ID NO: 180600 - protein, 7 aa, synthetic construct
VDGIRRV

SEQ ID NO: 180601 - protein, 7 aa, synthetic construct
IDPIRRI

SEQ ID NO: 180602 - protein, 7 aa, synthetic construct
DPAQRRI

SEQ ID NO: 180603 - protein, 7 aa, synthetic construct
MDTRARI

SEQ ID NO: 180604 - protein, 7 aa, synthetic construct
TDTIRRI

SEQ ID NO: 180605 - protein, 7 aa, synthetic construct
MDKQYRT

SEQ ID NO: 180606 - protein, 7 aa, synthetic construct
MTDQRRQ

SEQ ID NO: 180607 - protein, 7 aa, synthetic construct
MDRQIRA

SEQ ID NO: 180608 - protein, 7 aa, synthetic construct
SDGTRRI

SEQ ID NO: 180609 - protein, 7 aa, synthetic construct
MDVQKRM

SEQ ID NO: 180610 - protein, 7 aa, synthetic construct
DPPQRRI

SEQ ID NO: 180611 - protein, 7 aa, synthetic construct
MVGRERI

SEQ ID NO: 180612 - protein, 7 aa, synthetic construct
MDKGIRI

SEQ ID NO: 180613 - protein, 7 aa, synthetic construct
MDGQKNR

SEQ ID NO: 180614 - protein, 7 aa, synthetic construct
MDSPKRI

SEQ ID NO: 180615 - protein, 7 aa, synthetic construct
LDGPRRA

SEQ ID NO: 180616 - protein, 7 aa, synthetic construct
YDGKGRI

SEQ ID NO: 180617 - protein, 7 aa, synthetic construct
DATQRRI

SEQ ID NO: 180618 - protein, 7 aa, synthetic construct
MTGQHRS

SEQ ID NO: 180619 - protein, 7 aa, synthetic construct
MDAIRRN

SEQ ID NO: 180620 - protein, 7 aa, synthetic construct
MRGQMNI

SEQ ID NO: 180621 - protein, 7 aa, synthetic construct
NDGQKRS

SEQ ID NO: 180622 - protein, 7 aa, synthetic construct
MDGQKGR

SEQ ID NO: 180623 - protein, 7 aa, synthetic construct
MTEARRI

SEQ ID NO: 180624 - protein, 7 aa, synthetic construct
GDGAKRI

SEQ ID NO: 180625 - protein, 7 aa, synthetic construct
MRGQTSI

SEQ ID NO: 180626 - protein, 7 aa, synthetic construct
KDHQRII

SEQ ID NO: 180627 - protein, 7 aa, synthetic construct
MDGKMRM

SEQ ID NO: 180628 - protein, 7 aa, synthetic construct
MSGQSRA

SEQ ID NO: 180629 - protein, 7 aa, synthetic construct
MTGTRSI

SEQ ID NO: 180630 - protein, 7 aa, synthetic construct
VDAQRRV

SEQ ID NO: 180631 - protein, 7 aa, synthetic construct
VDIQRRG

SEQ ID NO: 180632 - protein, 7 aa, synthetic construct
MDAQRRN

SEQ ID NO: 180633 - protein, 7 aa, synthetic construct
MQGQKRD

SEQ ID NO: 180634 - protein, 7 aa, synthetic construct
MDIQRGK

SEQ ID NO: 180635 - protein, 7 aa, synthetic construct
MDGTRKV

SEQ ID NO: 180636 - protein, 7 aa, synthetic construct
MDPQMRK

SEQ ID NO: 180637 - protein, 7 aa, synthetic construct
LDAARRI

SEQ ID NO: 180638 - protein, 7 aa, synthetic construct
VDVPRRI

SEQ ID NO: 180639 - protein, 7 aa, synthetic construct
PDGKRNI

SEQ ID NO: 180640 - protein, 7 aa, synthetic construct
MDAQARR

SEQ ID NO: 180641 - protein, 7 aa, synthetic construct
MDGKNRN

SEQ ID NO: 180642 - protein, 7 aa, synthetic construct
KGGQRDI

SEQ ID NO: 180643 - protein, 7 aa, synthetic construct
MDLSRRV

SEQ ID NO: 180644 - protein, 7 aa, synthetic construct
NDIQRRI

SEQ ID NO: 180645 - protein, 7 aa, synthetic construct
MDAQRKF

SEQ ID NO: 180646 - protein, 7 aa, synthetic construct
MDNNRRA

SEQ ID NO: 180647 - protein, 7 aa, synthetic construct
SDINRRI

SEQ ID NO: 180648 - protein, 7 aa, synthetic construct
MMGQMRQ

SEQ ID NO: 180649 - protein, 7 aa, synthetic construct
MIGQTRQ

SEQ ID NO: 180650 - protein, 7 aa, synthetic construct
QDANRRI

SEQ ID NO: 180651 - protein, 7 aa, synthetic construct
MDHGKRI

SEQ ID NO: 180652 - protein, 7 aa, synthetic construct
MDGKRFQ

SEQ ID NO: 180653 - protein, 7 aa, synthetic construct
IDGHKRI

SEQ ID NO: 180654 - protein, 7 aa, synthetic construct
NDGARRA

SEQ ID NO: 180655 - protein, 7 aa, synthetic construct
GDNARRI

SEQ ID NO: 180656 - protein, 7 aa, synthetic construct
FDAQRRV

SEQ ID NO: 180657 - protein, 7 aa, synthetic construct
MDMSRRA

SEQ ID NO: 180658 - protein, 7 aa, synthetic construct
KDGQSRG

SEQ ID NO: 180659 - protein, 7 aa, synthetic construct
ADVQRKI

SEQ ID NO: 180660 - protein, 7 aa, synthetic construct
MDKQIRA

SEQ ID NO: 180661 - protein, 7 aa, synthetic construct
QDAQRRP

SEQ ID NO: 180662 - protein, 7 aa, synthetic construct
MRGQFRE

SEQ ID NO: 180663 - protein, 7 aa, synthetic construct
NDNLRRI

SEQ ID NO: 180664 - protein, 7 aa, synthetic construct
TDSMRRI

SEQ ID NO: 180665 - protein, 7 aa, synthetic construct
MDVIKRI

SEQ ID NO: 180666 - protein, 7 aa, synthetic construct
MEKQLRI

SEQ ID NO: 180667 - protein, 7 aa, synthetic construct
MRGQERT

SEQ ID NO: 180668 - protein, 7 aa, synthetic construct
QDVQRRT

SEQ ID NO: 180669 - protein, 7 aa, synthetic construct
LDLQRKI

SEQ ID NO: 180670 - protein, 7 aa, synthetic construct
MDMARRG

SEQ ID NO: 180671 - protein, 7 aa, synthetic construct
MDRQLRS

SEQ ID NO: 180672 - protein, 7 aa, synthetic construct
LDNQRRS

SEQ ID NO: 180673 - protein, 7 aa, synthetic construct
SDLQRRP

SEQ ID NO: 180674 - protein, 7 aa, synthetic construct
MDGKIRF

SEQ ID NO: 180675 - protein, 7 aa, synthetic construct
SDGQKRT

SEQ ID NO: 180676 - protein, 7 aa, synthetic construct
VDSMRRI

SEQ ID NO: 180677 - protein, 7 aa, synthetic construct
NDIQRKI

SEQ ID NO: 180678 - protein, 7 aa, synthetic construct
MDGRPRP

SEQ ID NO: 180679 - protein, 7 aa, synthetic construct
IVGQRRE

SEQ ID NO: 180680 - protein, 7 aa, synthetic construct
EVGQKRI

SEQ ID NO: 180681 - protein, 7 aa, synthetic construct
HDGKRVI

SEQ ID NO: 180682 - protein, 7 aa, synthetic construct
MDRQKYI

SEQ ID NO: 180683 - protein, 7 aa, synthetic construct
MAGNRRE

SEQ ID NO: 180684 - protein, 7 aa, synthetic construct
MDIQGRK

SEQ ID NO: 180685 - protein, 7 aa, synthetic construct
MDGNRNK

SEQ ID NO: 180686 - protein, 7 aa, synthetic construct
DKDQRRI

SEQ ID NO: 180687 - protein, 7 aa, synthetic construct
SDTNRRI

SEQ ID NO: 180688 - protein, 7 aa, synthetic construct
VDRQLRI

SEQ ID NO: 180689 - protein, 7 aa, synthetic construct
MHGASRI

SEQ ID NO: 180690 - protein, 7 aa, synthetic construct
MDGMRNR

SEQ ID NO: 180691 - protein, 7 aa, synthetic construct
MLGQARN

SEQ ID NO: 180692 - protein, 7 aa, synthetic construct
MIGPRSI

SEQ ID NO: 180693 - protein, 7 aa, synthetic construct
MDQQRKM

SEQ ID NO: 180694 - protein, 7 aa, synthetic construct
TDAQRRA

SEQ ID NO: 180695 - protein, 7 aa, synthetic construct
MIGQLRP

SEQ ID NO: 180696 - protein, 7 aa, synthetic construct
MRGQSQI

SEQ ID NO: 180697 - protein, 7 aa, synthetic construct
MRGQERM

SEQ ID NO: 180698 - protein, 7 aa, synthetic construct
HDGKIRI

SEQ ID NO: 180699 - protein, 7 aa, synthetic construct
GDAARRI

SEQ ID NO: 180700 - protein, 7 aa, synthetic construct
MDHKRTI

SEQ ID NO: 180701 - protein, 7 aa, synthetic construct
MDTARRS

SEQ ID NO: 180702 - protein, 7 aa, synthetic construct
TDKERRI

SEQ ID NO: 180703 - protein, 7 aa, synthetic construct
MQGQRHG

SEQ ID NO: 180704 - protein, 7 aa, synthetic construct
MDGNTRK

SEQ ID NO: 180705 - protein, 7 aa, synthetic construct
MDGSKRS

SEQ ID NO: 180706 - protein, 7 aa, synthetic construct
MVGQMRN

SEQ ID NO: 180707 - protein, 7 aa, synthetic construct
LDSMRRI

SEQ ID NO: 180708 - protein, 7 aa, synthetic construct
RGGQRDI

SEQ ID NO: 180709 - protein, 7 aa, synthetic construct
RDGIRAI

SEQ ID NO: 180710 - protein, 7 aa, synthetic construct
MPGQHRG

SEQ ID NO: 180711 - protein, 7 aa, synthetic construct
MMGQLRN

SEQ ID NO: 180712 - protein, 7 aa, synthetic construct
STGQRRE

SEQ ID NO: 180713 - protein, 7 aa, synthetic construct
IDGQRKQ

SEQ ID NO: 180714 - protein, 7 aa, synthetic construct
ADVPRRI

SEQ ID NO: 180715 - protein, 7 aa, synthetic construct
MDRQRTI

SEQ ID NO: 180716 - protein, 7 aa, synthetic construct
TDGIKRI

SEQ ID NO: 180717 - protein, 7 aa, synthetic construct
FDGVRRP

SEQ ID NO: 180718 - protein, 7 aa, synthetic construct
MRVQREI

SEQ ID NO: 180719 - protein, 7 aa, synthetic construct
RDGMRAI

SEQ ID NO: 180720 - protein, 7 aa, synthetic construct
MDGRIRV

SEQ ID NO: 180721 - protein, 7 aa, synthetic construct
NDGTRRA

SEQ ID NO: 180722 - protein, 7 aa, synthetic construct
MDPIRRQ

SEQ ID NO: 180723 - protein, 7 aa, synthetic construct
MDIQRVK

SEQ ID NO: 180724 - protein, 7 aa, synthetic construct
MDHPKRI

SEQ ID NO: 180725 - protein, 7 aa, synthetic construct
YDGLKRI

SEQ ID NO: 180726 - protein, 7 aa, synthetic construct
QRGQREI

SEQ ID NO: 180727 - protein, 7 aa, synthetic construct
HDKQIRI

SEQ ID NO: 180728 - protein, 7 aa, synthetic construct
MDRGPRI

SEQ ID NO: 180729 - protein, 7 aa, synthetic construct
MERQPRI

SEQ ID NO: 180730 - protein, 7 aa, synthetic construct
MPGQARN

SEQ ID NO: 180731 - protein, 7 aa, synthetic construct
RDGQKYI

SEQ ID NO: 180732 - protein, 7 aa, synthetic construct
MDGTRKN

SEQ ID NO: 180733 - protein, 7 aa, synthetic construct
VDGQRTK

SEQ ID NO: 180734 - protein, 7 aa, synthetic construct
MADQRRG

SEQ ID NO: 180735 - protein, 7 aa, synthetic construct
MPNERRI

SEQ ID NO: 180736 - protein, 7 aa, synthetic construct
MDIQRNK

SEQ ID NO: 180737 - protein, 7 aa, synthetic construct
MSGTRHI

SEQ ID NO: 180738 - protein, 7 aa, synthetic construct
PDLQKRI

SEQ ID NO: 180739 - protein, 7 aa, synthetic construct
MDAPRRP

SEQ ID NO: 180740 - protein, 7 aa, synthetic construct
MDKQGRY

SEQ ID NO: 180741 - protein, 7 aa, synthetic construct
MDNQKRG

SEQ ID NO: 180742 - protein, 7 aa, synthetic construct
RDGQHRP

SEQ ID NO: 180743 - protein, 7 aa, synthetic construct
TDGVRRI

SEQ ID NO: 180744 - protein, 7 aa, synthetic construct
SDMQRRA

SEQ ID NO: 180745 - protein, 7 aa, synthetic construct
MPTQRRE

SEQ ID NO: 180746 - protein, 7 aa, synthetic construct
IDGQKRH

SEQ ID NO: 180747 - protein, 7 aa, synthetic construct
HDGKLRI

SEQ ID NO: 180748 - protein, 7 aa, synthetic construct
MDGKFRV

SEQ ID NO: 180749 - protein, 7 aa, synthetic construct
DAAQRRI

SEQ ID NO: 180750 - protein, 7 aa, synthetic construct
MEVQRRP

SEQ ID NO: 180751 - protein, 7 aa, synthetic construct
LDGQKRY

SEQ ID NO: 180752 - protein, 7 aa, synthetic construct
QRGQRDI

SEQ ID NO: 180753 - protein, 7 aa, synthetic construct
DRGQRNI

SEQ ID NO: 180754 - protein, 7 aa, synthetic construct
MDGQKRM

SEQ ID NO: 180755 - protein, 7 aa, synthetic construct
MTGSRNI

SEQ ID NO: 180756 - protein, 7 aa, synthetic construct
VMDQRRI

SEQ ID NO: 180757 - protein, 7 aa, synthetic construct
MDALRRG

SEQ ID NO: 180758 - protein, 7 aa, synthetic construct
IDQMRRI

SEQ ID NO: 180759 - protein, 7 aa, synthetic construct
MLGQLRA

SEQ ID NO: 180760 - protein, 7 aa, synthetic construct
NDAQRRI

SEQ ID NO: 180761 - protein, 7 aa, synthetic construct
MDGKFRA

SEQ ID NO: 180762 - protein, 7 aa, synthetic construct
ADGQRPK

SEQ ID NO: 180763 - protein, 7 aa, synthetic construct
HDGKRNI

SEQ ID NO: 180764 - protein, 7 aa, synthetic construct
LDGARRM

SEQ ID NO: 180765 - protein, 7 aa, synthetic construct
MDSMRRA

SEQ ID NO: 180766 - protein, 7 aa, synthetic construct
MEGQRKA

SEQ ID NO: 180767 - protein, 7 aa, synthetic construct
RDGTRYI

SEQ ID NO: 180768 - protein, 7 aa, synthetic construct
IDNQRRV

SEQ ID NO: 180769 - protein, 7 aa, synthetic construct
MDGTIRR

SEQ ID NO: 180770 - protein, 7 aa, synthetic construct
GDVQKRI

SEQ ID NO: 180771 - protein, 7 aa, synthetic construct
DVQQRRI

SEQ ID NO: 180772 - protein, 7 aa, synthetic construct
MDKQFRN

SEQ ID NO: 180773 - protein, 7 aa, synthetic construct
MVDSRRI

SEQ ID NO: 180774 - protein, 7 aa, synthetic construct
MDKERRG

SEQ ID NO: 180775 - protein, 7 aa, synthetic construct
MDSRPRI

SEQ ID NO: 180776 - protein, 7 aa, synthetic construct
SDGKYRI

SEQ ID NO: 180777 - protein, 7 aa, synthetic construct
TDTGRRI

SEQ ID NO: 180778 - protein, 7 aa, synthetic construct
IDGIRRT

SEQ ID NO: 180779 - protein, 7 aa, synthetic construct
MLDSRRI

SEQ ID NO: 180780 - protein, 7 aa, synthetic construct
MDGLKRI

SEQ ID NO: 180781 - protein, 7 aa, synthetic construct
GDTNRRI

SEQ ID NO: 180782 - protein, 7 aa, synthetic construct
MDGGKRA

SEQ ID NO: 180783 - protein, 7 aa, synthetic construct
MNKQRDI

SEQ ID NO: 180784 - protein, 7 aa, synthetic construct
FDGQKRS

SEQ ID NO: 180785 - protein, 7 aa, synthetic construct
YDGVRRS

SEQ ID NO: 180786 - protein, 7 aa, synthetic construct
VDAQRRM

SEQ ID NO: 180787 - protein, 7 aa, synthetic construct
QDTMRRI

SEQ ID NO: 180788 - protein, 7 aa, synthetic construct
MDGGNRR

SEQ ID NO: 180789 - protein, 7 aa, synthetic construct
TDMQRRT

SEQ ID NO: 180790 - protein, 7 aa, synthetic construct
MDGNKRV

SEQ ID NO: 180791 - protein, 7 aa, synthetic construct
SDGIRKI

SEQ ID NO: 180792 - protein, 7 aa, synthetic construct
MDGANRK

SEQ ID NO: 180793 - protein, 7 aa, synthetic construct
MDSRRTI

SEQ ID NO: 180794 - protein, 7 aa, synthetic construct
QDNTRRI

SEQ ID NO: 180795 - protein, 7 aa, synthetic construct
MDSTRRA

SEQ ID NO: 180796 - protein, 7 aa, synthetic construct
LDVNRRI

SEQ ID NO: 180797 - protein, 7 aa, synthetic construct
MDEKRRV

SEQ ID NO: 180798 - protein, 7 aa, synthetic construct
MRGQRSE

SEQ ID NO: 180799 - protein, 7 aa, synthetic construct
MDSQRNR

SEQ ID NO: 180800 - protein, 7 aa, synthetic construct
IDLQRRT

SEQ ID NO: 180801 - protein, 7 aa, synthetic construct
MSEQRRQ

SEQ ID NO: 180802 - protein, 7 aa, synthetic construct
MDGKIRS

SEQ ID NO: 180803 - protein, 7 aa, synthetic construct
MRGQMRD

SEQ ID NO: 180804 - protein, 7 aa, synthetic construct
TDGQRLK

SEQ ID NO: 180805 - protein, 7 aa, synthetic construct
MDGKRQN

SEQ ID NO: 180806 - protein, 7 aa, synthetic construct
ADGIRRP

SEQ ID NO: 180807 - protein, 7 aa, synthetic construct
MVNQRRE

SEQ ID NO: 180808 - protein, 7 aa, synthetic construct
QDGQARK

SEQ ID NO: 180809 - protein, 7 aa, synthetic construct
SPDQRRI

SEQ ID NO: 180810 - protein, 7 aa, synthetic construct
MGGTRRE

SEQ ID NO: 180811 - protein, 7 aa, synthetic construct
TDRQRSI

SEQ ID NO: 180812 - protein, 7 aa, synthetic construct
MDKQSRF

SEQ ID NO: 180813 - protein, 7 aa, synthetic construct
QDAARRI

SEQ ID NO: 180814 - protein, 7 aa, synthetic construct
MDGKGRY

SEQ ID NO: 180815 - protein, 7 aa, synthetic construct
MDIQARK

SEQ ID NO: 180816 - protein, 7 aa, synthetic construct
MDNQRQK

SEQ ID NO: 180817 - protein, 7 aa, synthetic construct
MINERRI

SEQ ID NO: 180818 - protein, 7 aa, synthetic construct
MHGQARG

SEQ ID NO: 180819 - protein, 7 aa, synthetic construct
NDSNRRI

SEQ ID NO: 180820 - protein, 7 aa, synthetic construct
MKGPRDI

SEQ ID NO: 180821 - protein, 7 aa, synthetic construct
LDTQRRS

SEQ ID NO: 180822 - protein, 7 aa, synthetic construct
MDARRNI

SEQ ID NO: 180823 - protein, 7 aa, synthetic construct
MDGQRGK

SEQ ID NO: 180824 - protein, 7 aa, synthetic construct
MDGAPRR

SEQ ID NO: 180825 - protein, 7 aa, synthetic construct
MDGMRIK

SEQ ID NO: 180826 - protein, 7 aa, synthetic construct
TDISRRI

SEQ ID NO: 180827 - protein, 7 aa, synthetic construct
MDGARYK

SEQ ID NO: 180828 - protein, 7 aa, synthetic construct
MDKQHRL

SEQ ID NO: 180829 - protein, 7 aa, synthetic construct
MDGIQRK

SEQ ID NO: 180830 - protein, 7 aa, synthetic construct
MDKQTRA

SEQ ID NO: 180831 - protein, 7 aa, synthetic construct
METQRRA

SEQ ID NO: 180832 - protein, 7 aa, synthetic construct
NDLQKRI

SEQ ID NO: 180833 - protein, 7 aa, synthetic construct
RDGQHRI

SEQ ID NO: 180834 - protein, 7 aa, synthetic construct
MDMQRGK

SEQ ID NO: 180835 - protein, 7 aa, synthetic construct
RAGQRDI

SEQ ID NO: 180836 - protein, 7 aa, synthetic construct
YDVQRRQ

SEQ ID NO: 180837 - protein, 7 aa, synthetic construct
MDGQPKR

SEQ ID NO: 180838 - protein, 7 aa, synthetic construct
MDPNRRG

SEQ ID NO: 180839 - protein, 7 aa, synthetic construct
LDGQKRF

SEQ ID NO: 180840 - protein, 7 aa, synthetic construct
MPDQRRV

SEQ ID NO: 180841 - protein, 7 aa, synthetic construct
HDGKQRI

SEQ ID NO: 180842 - protein, 7 aa, synthetic construct
MTGQRRE

SEQ ID NO: 180843 - protein, 7 aa, synthetic construct
IDIQKRI

SEQ ID NO: 180844 - protein, 7 aa, synthetic construct
QDGARKI

SEQ ID NO: 180845 - protein, 7 aa, synthetic construct
MDGKQRT

SEQ ID NO: 180846 - protein, 7 aa, synthetic construct
MDGSKRQ

SEQ ID NO: 180847 - protein, 7 aa, synthetic construct
TVDQRRI

SEQ ID NO: 180848 - protein, 7 aa, synthetic construct
GDFQKRI

SEQ ID NO: 180849 - protein, 7 aa, synthetic construct
MDKQIRQ

SEQ ID NO: 180850 - protein, 7 aa, synthetic construct
YDGMRRS

SEQ ID NO: 180851 - protein, 7 aa, synthetic construct
NDLQRRV

SEQ ID NO: 180852 - protein, 7 aa, synthetic construct
LDAQRRG

SEQ ID NO: 180853 - protein, 7 aa, synthetic construct
ADAQKRI

SEQ ID NO: 180854 - protein, 7 aa, synthetic construct
MDGKTRG

SEQ ID NO: 180855 - protein, 7 aa, synthetic construct
MDAIRRG

SEQ ID NO: 180856 - protein, 7 aa, synthetic construct
NDGFKRI

SEQ ID NO: 180857 - protein, 7 aa, synthetic construct
MDGIVRK

SEQ ID NO: 180858 - protein, 7 aa, synthetic construct
MSGLRHI

SEQ ID NO: 180859 - protein, 7 aa, synthetic construct
MDGMRRI

SEQ ID NO: 180860 - protein, 7 aa, synthetic construct
MDAQNRK

SEQ ID NO: 180861 - protein, 7 aa, synthetic construct
TDGIRRT

SEQ ID NO: 180862 - protein, 7 aa, synthetic construct
LDTQRRG

SEQ ID NO: 180863 - protein, 7 aa, synthetic construct
MDKGRFI

SEQ ID NO: 180864 - protein, 7 aa, synthetic construct
MDSQRKL

SEQ ID NO: 180865 - protein, 7 aa, synthetic construct
MINDRRI

SEQ ID NO: 180866 - protein, 7 aa, synthetic construct
MPGQHRQ

SEQ ID NO: 180867 - protein, 7 aa, synthetic construct
MDTKYRI

SEQ ID NO: 180868 - protein, 7 aa, synthetic construct
MPGTRRE

SEQ ID NO: 180869 - protein, 7 aa, synthetic construct
GDINRRI

SEQ ID NO: 180870 - protein, 7 aa, synthetic construct
MDIQKRM

SEQ ID NO: 180871 - protein, 7 aa, synthetic construct
MDGRRQG

SEQ ID NO: 180872 - protein, 7 aa, synthetic construct
LIDQRRI

SEQ ID NO: 180873 - protein, 7 aa, synthetic construct
NDAQRRS

SEQ ID NO: 180874 - protein, 7 aa, synthetic construct
MKNQRDI

SEQ ID NO: 180875 - protein, 7 aa, synthetic construct
MDGKQRL

SEQ ID NO: 180876 - protein, 7 aa, synthetic construct
MDGRMRP

SEQ ID NO: 180877 - protein, 7 aa, synthetic construct
LDGVRRS

SEQ ID NO: 180878 - protein, 7 aa, synthetic construct
MDGARAR

SEQ ID NO: 180879 - protein, 7 aa, synthetic construct
MMEGRRI

SEQ ID NO: 180880 - protein, 7 aa, synthetic construct
LPGQRRD

SEQ ID NO: 180881 - protein, 7 aa, synthetic construct
MDKQRGW

SEQ ID NO: 180882 - protein, 7 aa, synthetic construct
MDGARTK

SEQ ID NO: 180883 - protein, 7 aa, synthetic construct
YDGARRT

SEQ ID NO: 180884 - protein, 7 aa, synthetic construct
MDGRMRA

SEQ ID NO: 180885 - protein, 7 aa, synthetic construct
YDGPRRQ

SEQ ID NO: 180886 - protein, 7 aa, synthetic construct
MDGMPRK

SEQ ID NO: 180887 - protein, 7 aa, synthetic construct
MDGPRRM

SEQ ID NO: 180888 - protein, 7 aa, synthetic construct
MDQQRKV

SEQ ID NO: 180889 - protein, 7 aa, synthetic construct
MDGTRNR

SEQ ID NO: 180890 - protein, 7 aa, synthetic construct
DKGQRLI

SEQ ID NO: 180891 - protein, 7 aa, synthetic construct
MDGIRKV

SEQ ID NO: 180892 - protein, 7 aa, synthetic construct
SIDQRRI

SEQ ID NO: 180893 - protein, 7 aa, synthetic construct
IDGRRNI

SEQ ID NO: 180894 - protein, 7 aa, synthetic construct
QDKQRHI

SEQ ID NO: 180895 - protein, 7 aa, synthetic construct
NDIQRRV

SEQ ID NO: 180896 - protein, 7 aa, synthetic construct
MSGQTRN

SEQ ID NO: 180897 - protein, 7 aa, synthetic construct
MDGPLRK

SEQ ID NO: 180898 - protein, 7 aa, synthetic construct
MDSQRLR

SEQ ID NO: 180899 - protein, 7 aa, synthetic construct
EMGQKRI

SEQ ID NO: 180900 - protein, 7 aa, synthetic construct
TDPQRRL

SEQ ID NO: 180901 - protein, 7 aa, synthetic construct
MDRQKSI

SEQ ID NO: 180902 - protein, 7 aa, synthetic construct
TDAVRRI

SEQ ID NO: 180903 - protein, 7 aa, synthetic construct
MIDNRRI

SEQ ID NO: 180904 - protein, 7 aa, synthetic construct
NDGIRRG

SEQ ID NO: 180905 - protein, 7 aa, synthetic construct
MPGQRGG

SEQ ID NO: 180906 - protein, 7 aa, synthetic construct
QDVQKRI

SEQ ID NO: 180907 - protein, 7 aa, synthetic construct
YDGIKRI

SEQ ID NO: 180908 - protein, 7 aa, synthetic construct
MSGARHI

SEQ ID NO: 180909 - protein, 7 aa, synthetic construct
ADGRPRI

SEQ ID NO: 180910 - protein, 7 aa, synthetic construct
MDTSRRV

SEQ ID NO: 180911 - protein, 7 aa, synthetic construct
SDGNRRP

SEQ ID NO: 180912 - protein, 7 aa, synthetic construct
TDGVRKI

SEQ ID NO: 180913 - protein, 7 aa, synthetic construct
MVGQMRG

SEQ ID NO: 180914 - protein, 7 aa, synthetic construct
VDVARRI

SEQ ID NO: 180915 - protein, 7 aa, synthetic construct
ADVQRRA

SEQ ID NO: 180916 - protein, 7 aa, synthetic construct
MDQKRHI

SEQ ID NO: 180917 - protein, 7 aa, synthetic construct
IDGQQRR

SEQ ID NO: 180918 - protein, 7 aa, synthetic construct
MKGEYRI

SEQ ID NO: 180919 - protein, 7 aa, synthetic construct
DTGQRRV

SEQ ID NO: 180920 - protein, 7 aa, synthetic construct
FDGQRTK

SEQ ID NO: 180921 - protein, 7 aa, synthetic construct
MMGDRRS

SEQ ID NO: 180922 - protein, 7 aa, synthetic construct
MDMQKRL

SEQ ID NO: 180923 - protein, 7 aa, synthetic construct
MEGKRSI

SEQ ID NO: 180924 - protein, 7 aa, synthetic construct
MDGQRKV

SEQ ID NO: 180925 - protein, 7 aa, synthetic construct
MLGQTRP

SEQ ID NO: 180926 - protein, 7 aa, synthetic construct
DRGQRQI

SEQ ID NO: 180927 - protein, 7 aa, synthetic construct
MTGMRHI

SEQ ID NO: 180928 - protein, 7 aa, synthetic construct
MDGKYRS

SEQ ID NO: 180929 - protein, 7 aa, synthetic construct
MMGQERK

SEQ ID NO: 180930 - protein, 7 aa, synthetic construct
MDSQGRR

SEQ ID NO: 180931 - protein, 7 aa, synthetic construct
NDRQPRI

SEQ ID NO: 180932 - protein, 7 aa, synthetic construct
MDRQNKI

SEQ ID NO: 180933 - protein, 7 aa, synthetic construct
MLGQKRD

SEQ ID NO: 180934 - protein, 7 aa, synthetic construct
MKGQDRY

SEQ ID NO: 180935 - protein, 7 aa, synthetic construct
MDMPRRP

SEQ ID NO: 180936 - protein, 7 aa, synthetic construct
YDTQRRP

SEQ ID NO: 180937 - protein, 7 aa, synthetic construct
VDGQKRS

SEQ ID NO: 180938 - protein, 7 aa, synthetic construct
MMGQIRP

SEQ ID NO: 180939 - protein, 7 aa, synthetic construct
MDGKSRS

SEQ ID NO: 180940 - protein, 7 aa, synthetic construct
GDGLRKI

SEQ ID NO: 180941 - protein, 7 aa, synthetic construct
SDGARRV

SEQ ID NO: 180942 - protein, 7 aa, synthetic construct
IDVQRRT

SEQ ID NO: 180943 - protein, 7 aa, synthetic construct
MSGPRHI

SEQ ID NO: 180944 - protein, 7 aa, synthetic construct
MDKHIRI

SEQ ID NO: 180945 - protein, 7 aa, synthetic construct
MDIPRKI

SEQ ID NO: 180946 - protein, 7 aa, synthetic construct
QDNQRRV

SEQ ID NO: 180947 - protein, 7 aa, synthetic construct
MDFQKRA

SEQ ID NO: 180948 - protein, 7 aa, synthetic construct
MDGKGRS

SEQ ID NO: 180949 - protein, 7 aa, synthetic construct
QDQTRRI

SEQ ID NO: 180950 - protein, 7 aa, synthetic construct
QDGSKRI

SEQ ID NO: 180951 - protein, 7 aa, synthetic construct
MDGRNRI

SEQ ID NO: 180952 - protein, 7 aa, synthetic construct
MDGARKL

SEQ ID NO: 180953 - protein, 7 aa, synthetic construct
MRGQAII

SEQ ID NO: 180954 - protein, 7 aa, synthetic construct
VDMPRRI

SEQ ID NO: 180955 - protein, 7 aa, synthetic construct
MDVQKRG

SEQ ID NO: 180956 - protein, 7 aa, synthetic construct
ADMQRRA

SEQ ID NO: 180957 - protein, 7 aa, synthetic construct
MMGQPRN

SEQ ID NO: 180958 - protein, 7 aa, synthetic construct
MDGKGRG

SEQ ID NO: 180959 - protein, 7 aa, synthetic construct
MDGMRRP

SEQ ID NO: 180960 - protein, 7 aa, synthetic construct
MIGQLRA

SEQ ID NO: 180961 - protein, 7 aa, synthetic construct
TDGIRRP

SEQ ID NO: 180962 - protein, 7 aa, synthetic construct
MDRQRAI

SEQ ID NO: 180963 - protein, 7 aa, synthetic construct
GDGLKRI

SEQ ID NO: 180964 - protein, 7 aa, synthetic construct
MDTNRRS

SEQ ID NO: 180965 - protein, 7 aa, synthetic construct
MSGKRDI

SEQ ID NO: 180966 - protein, 7 aa, synthetic construct
VDGMRRA

SEQ ID NO: 180967 - protein, 7 aa, synthetic construct
TDQQRRP

SEQ ID NO: 180968 - protein, 7 aa, synthetic construct
MPGDRRQ

SEQ ID NO: 180969 - protein, 7 aa, synthetic construct
SDDKRRI

SEQ ID NO: 180970 - protein, 7 aa, synthetic construct
TDGNRRI

SEQ ID NO: 180971 - protein, 7 aa, synthetic construct
FDGNRKI

SEQ ID NO: 180972 - protein, 7 aa, synthetic construct
MDGNRMK

SEQ ID NO: 180973 - protein, 7 aa, synthetic construct
YKGQRDI

SEQ ID NO: 180974 - protein, 7 aa, synthetic construct
SDGPRRI

SEQ ID NO: 180975 - protein, 7 aa, synthetic construct
SDVTRRI

SEQ ID NO: 180976 - protein, 7 aa, synthetic construct
MDQQKRN

SEQ ID NO: 180977 - protein, 7 aa, synthetic construct
YDGQKRA

SEQ ID NO: 180978 - protein, 7 aa, synthetic construct
MDQARRG

SEQ ID NO: 180979 - protein, 7 aa, synthetic construct
MDGLKRN

SEQ ID NO: 180980 - protein, 7 aa, synthetic construct
MDKPRVI

SEQ ID NO: 180981 - protein, 7 aa, synthetic construct
PDGVRRV

SEQ ID NO: 180982 - protein, 7 aa, synthetic construct
NDPQRRV

SEQ ID NO: 180983 - protein, 7 aa, synthetic construct
MAGDRRA

SEQ ID NO: 180984 - protein, 7 aa, synthetic construct
MSGPRNI

SEQ ID NO: 180985 - protein, 7 aa, synthetic construct
IDAQRRI

SEQ ID NO: 180986 - protein, 7 aa, synthetic construct
DMGNRRI

SEQ ID NO: 180987 - protein, 7 aa, synthetic construct
MRGQRDA

SEQ ID NO: 180988 - protein, 7 aa, synthetic construct
MDGVRAK

SEQ ID NO: 180989 - protein, 7 aa, synthetic construct
GDGQRKA

SEQ ID NO: 180990 - protein, 7 aa, synthetic construct
MDTQRSR

SEQ ID NO: 180991 - protein, 7 aa, synthetic construct
DSNQRRI

SEQ ID NO: 180992 - protein, 7 aa, synthetic construct
MDRQPRA

SEQ ID NO: 180993 - protein, 7 aa, synthetic construct
MDGGRTR

SEQ ID NO: 180994 - protein, 7 aa, synthetic construct
MPGQNRQ

SEQ ID NO: 180995 - protein, 7 aa, synthetic construct
MDNQQRK

SEQ ID NO: 180996 - protein, 7 aa, synthetic construct
MDRQAKI

SEQ ID NO: 180997 - protein, 7 aa, synthetic construct
QDGTRRI

SEQ ID NO: 180998 - protein, 7 aa, synthetic construct
NIGQRRE

SEQ ID NO: 180999 - protein, 7 aa, synthetic construct
MLGQVRG

SEQ ID NO: 181000 - protein, 7 aa, synthetic construct
IDTQRRA

SEQ ID NO: 181001 - protein, 7 aa, synthetic construct
MDKQVRM

SEQ ID NO: 181002 - protein, 7 aa, synthetic construct
MDVPRRP

SEQ ID NO: 181003 - protein, 7 aa, synthetic construct
MDKYQRI

SEQ ID NO: 181004 - protein, 7 aa, synthetic construct
IDGGRRI

SEQ ID NO: 181005 - protein, 7 aa, synthetic construct
MDMPRRA

SEQ ID NO: 181006 - protein, 7 aa, synthetic construct
QHGQRAI

SEQ ID NO: 181007 - protein, 7 aa, synthetic construct
LDGQPRK

SEQ ID NO: 181008 - protein, 7 aa, synthetic construct
MAKQRDI

SEQ ID NO: 181009 - protein, 7 aa, synthetic construct
MDRQVRL

SEQ ID NO: 181010 - protein, 7 aa, synthetic construct
NDGRQRI

SEQ ID NO: 181011 - protein, 7 aa, synthetic construct
MDRQVKI

SEQ ID NO: 181012 - protein, 7 aa, synthetic construct
MDGMRRG

SEQ ID NO: 181013 - protein, 7 aa, synthetic construct
MDAGRRG

SEQ ID NO: 181014 - protein, 7 aa, synthetic construct
VDGQQRK

SEQ ID NO: 181015 - protein, 7 aa, synthetic construct
MHGQQRA

SEQ ID NO: 181016 - protein, 7 aa, synthetic construct
DQGQRRV

SEQ ID NO: 181017 - protein, 7 aa, synthetic construct
MSGSRSI

SEQ ID NO: 181018 - protein, 7 aa, synthetic construct
YDGMRRV

SEQ ID NO: 181019 - protein, 7 aa, synthetic construct
RDGTRMI

SEQ ID NO: 181020 - protein, 7 aa, synthetic construct
IDGLRRI

SEQ ID NO: 181021 - protein, 7 aa, synthetic construct
MPGQVRG

SEQ ID NO: 181022 - protein, 7 aa, synthetic construct
MDRMPRI

SEQ ID NO: 181023 - protein, 7 aa, synthetic construct
MDAVRRV

SEQ ID NO: 181024 - protein, 7 aa, synthetic construct
NDGQRGK

SEQ ID NO: 181025 - protein, 7 aa, synthetic construct
YDKQPRI

SEQ ID NO: 181026 - protein, 7 aa, synthetic construct
MDISKRI

SEQ ID NO: 181027 - protein, 7 aa, synthetic construct
NDTQRRS

SEQ ID NO: 181028 - protein, 7 aa, synthetic construct
TDGQNRR

SEQ ID NO: 181029 - protein, 7 aa, synthetic construct
MDGQRIR

SEQ ID NO: 181030 - protein, 7 aa, synthetic construct
HDVQKRI

SEQ ID NO: 181031 - protein, 7 aa, synthetic construct
MDGKFRI

SEQ ID NO: 181032 - protein, 7 aa, synthetic construct
YDATRRI

SEQ ID NO: 181033 - protein, 7 aa, synthetic construct
MDAIRRV

SEQ ID NO: 181034 - protein, 7 aa, synthetic construct
IDGTRRI

SEQ ID NO: 181035 - protein, 7 aa, synthetic construct
TDGMRKI

SEQ ID NO: 181036 - protein, 7 aa, synthetic construct
MMGQTRH

SEQ ID NO: 181037 - protein, 7 aa, synthetic construct
MDITRRV

SEQ ID NO: 181038 - protein, 7 aa, synthetic construct
MVGQLRN

SEQ ID NO: 181039 - protein, 7 aa, synthetic construct
MDSNRRG

SEQ ID NO: 181040 - protein, 7 aa, synthetic construct
MDVQRRA

SEQ ID NO: 181041 - protein, 7 aa, synthetic construct
MPQERRI

SEQ ID NO: 181042 - protein, 7 aa, synthetic construct
MEVQRKI

SEQ ID NO: 181043 - protein, 7 aa, synthetic construct
TDGTKRI

SEQ ID NO: 181044 - protein, 7 aa, synthetic construct
MSGERRQ

SEQ ID NO: 181045 - protein, 7 aa, synthetic construct
MTGDRRT

SEQ ID NO: 181046 - protein, 7 aa, synthetic construct
MPGQRSN

SEQ ID NO: 181047 - protein, 7 aa, synthetic construct
QDDKRRI

SEQ ID NO: 181048 - protein, 7 aa, synthetic construct
MDRLSRI

SEQ ID NO: 181049 - protein, 7 aa, synthetic construct
TDITRRI

SEQ ID NO: 181050 - protein, 7 aa, synthetic construct
ADGQKRF

SEQ ID NO: 181051 - protein, 7 aa, synthetic construct
MIGERRS

SEQ ID NO: 181052 - protein, 7 aa, synthetic construct
MVGQQRA

SEQ ID NO: 181053 - protein, 7 aa, synthetic construct
MDRIARI

SEQ ID NO: 181054 - protein, 7 aa, synthetic construct
MADGRRI

SEQ ID NO: 181055 - protein, 7 aa, synthetic construct
MDQVRKI

SEQ ID NO: 181056 - protein, 7 aa, synthetic construct
SDANRRI

SEQ ID NO: 181057 - protein, 7 aa, synthetic construct
MDGSKRF

SEQ ID NO: 181058 - protein, 7 aa, synthetic construct
MDGAQRK

SEQ ID NO: 181059 - protein, 7 aa, synthetic construct
MDGLKRY

SEQ ID NO: 181060 - protein, 7 aa, synthetic construct
MSRQERI

SEQ ID NO: 181061 - protein, 7 aa, synthetic construct
IDGQTRK

SEQ ID NO: 181062 - protein, 7 aa, synthetic construct
MDGTIRK

SEQ ID NO: 181063 - protein, 7 aa, synthetic construct
DKGQRNI

SEQ ID NO: 181064 - protein, 7 aa, synthetic construct
IDQQRRS

SEQ ID NO: 181065 - protein, 7 aa, synthetic construct
YDKQTRI

SEQ ID NO: 181066 - protein, 7 aa, synthetic construct
TDQTRRI

SEQ ID NO: 181067 - protein, 7 aa, synthetic construct
MEDKRRI

SEQ ID NO: 181068 - protein, 7 aa, synthetic construct
MDSIRRG

SEQ ID NO: 181069 - protein, 7 aa, synthetic construct
MPGQSRH

SEQ ID NO: 181070 - protein, 7 aa, synthetic construct
NDGNRKI

SEQ ID NO: 181071 - protein, 7 aa, synthetic construct
PDGQKRS

SEQ ID NO: 181072 - protein, 7 aa, synthetic construct
LDKQYRI

SEQ ID NO: 181073 - protein, 7 aa, synthetic construct
IDNQRRQ

SEQ ID NO: 181074 - protein, 7 aa, synthetic construct
NDPQRRG

SEQ ID NO: 181075 - protein, 7 aa, synthetic construct
MIGQSRG

SEQ ID NO: 181076 - protein, 7 aa, synthetic construct
ADTQRRG

SEQ ID NO: 181077 - protein, 7 aa, synthetic construct
LDGVRRQ

SEQ ID NO: 181078 - protein, 7 aa, synthetic construct
TDLPRRI

SEQ ID NO: 181079 - protein, 7 aa, synthetic construct
GDTVRRI

SEQ ID NO: 181080 - protein, 7 aa, synthetic construct
MTGQVRG

SEQ ID NO: 181081 - protein, 7 aa, synthetic construct
MDGRRQV

SEQ ID NO: 181082 - protein, 7 aa, synthetic construct
NDNQRRG

SEQ ID NO: 181083 - protein, 7 aa, synthetic construct
NTGERRI

SEQ ID NO: 181084 - protein, 7 aa, synthetic construct
YDGIRRV

SEQ ID NO: 181085 - protein, 7 aa, synthetic construct
MDMQKRI

SEQ ID NO: 181086 - protein, 7 aa, synthetic construct
GKGQRDI

SEQ ID NO: 181087 - protein, 7 aa, synthetic construct
MRGQHSI

SEQ ID NO: 181088 - protein, 7 aa, synthetic construct
ADMQRRI

SEQ ID NO: 181089 - protein, 7 aa, synthetic construct
MDGARQK

SEQ ID NO: 181090 - protein, 7 aa, synthetic construct
GDQQKRI

SEQ ID NO: 181091 - protein, 7 aa, synthetic construct
MDNQRKS

SEQ ID NO: 181092 - protein, 7 aa, synthetic construct
RDGQHRV

SEQ ID NO: 181093 - protein, 7 aa, synthetic construct
MHGQPRS

SEQ ID NO: 181094 - protein, 7 aa, synthetic construct
MRGEVRI

SEQ ID NO: 181095 - protein, 7 aa, synthetic construct
MDGKYKI

SEQ ID NO: 181096 - protein, 7 aa, synthetic construct
MDNTRRS

SEQ ID NO: 181097 - protein, 7 aa, synthetic construct
VDQQRRM

SEQ ID NO: 181098 - protein, 7 aa, synthetic construct
MTGQTRS

SEQ ID NO: 181099 - protein, 7 aa, synthetic construct
IDSGRRI

SEQ ID NO: 181100 - protein, 7 aa, synthetic construct
MDLQRKS

SEQ ID NO: 181101 - protein, 7 aa, synthetic construct
VDNQRRN

SEQ ID NO: 181102 - protein, 7 aa, synthetic construct
IDGIRRG

SEQ ID NO: 181103 - protein, 7 aa, synthetic construct
IDGMRRT

SEQ ID NO: 181104 - protein, 7 aa, synthetic construct
MDGAKRH

SEQ ID NO: 181105 - protein, 7 aa, synthetic construct
QDGQKRN

SEQ ID NO: 181106 - protein, 7 aa, synthetic construct
MDKERRM

SEQ ID NO: 181107 - protein, 7 aa, synthetic construct
IDNQRRN

SEQ ID NO: 181108 - protein, 7 aa, synthetic construct
IDGRMRI

SEQ ID NO: 181109 - protein, 7 aa, synthetic construct
MSEQRRA

SEQ ID NO: 181110 - protein, 7 aa, synthetic construct
MDGKLRN

SEQ ID NO: 181111 - protein, 7 aa, synthetic construct
VDGQRQK

SEQ ID NO: 181112 - protein, 7 aa, synthetic construct
MDGKQRY

SEQ ID NO: 181113 - protein, 7 aa, synthetic construct
QDNQRRI

SEQ ID NO: 181114 - protein, 7 aa, synthetic construct
MFGQAKI

SEQ ID NO: 181115 - protein, 7 aa, synthetic construct
MSEQRRG

SEQ ID NO: 181116 - protein, 7 aa, synthetic construct
LDQARRI

SEQ ID NO: 181117 - protein, 7 aa, synthetic construct
MGGQRHA

SEQ ID NO: 181118 - protein, 7 aa, synthetic construct
TDIQRRG

SEQ ID NO: 181119 - protein, 7 aa, synthetic construct
SDAPRRI

SEQ ID NO: 181120 - protein, 7 aa, synthetic construct
MDGAMRK

SEQ ID NO: 181121 - protein, 7 aa, synthetic construct
NDGRIRI

SEQ ID NO: 181122 - protein, 7 aa, synthetic construct
MIGVRRE

SEQ ID NO: 181123 - protein, 7 aa, synthetic construct
MDGKPRP

SEQ ID NO: 181124 - protein, 7 aa, synthetic construct
YDGKSRI

SEQ ID NO: 181125 - protein, 7 aa, synthetic construct
QDTQRRA

SEQ ID NO: 181126 - protein, 7 aa, synthetic construct
QDVQRRV

SEQ ID NO: 181127 - protein, 7 aa, synthetic construct
MDPQNRR

SEQ ID NO: 181128 - protein, 7 aa, synthetic construct
IDNIRRI

SEQ ID NO: 181129 - protein, 7 aa, synthetic construct
MTGNRRE

SEQ ID NO: 181130 - protein, 7 aa, synthetic construct
MTVQRRE

SEQ ID NO: 181131 - protein, 7 aa, synthetic construct
TDTPRRI

SEQ ID NO: 181132 - protein, 7 aa, synthetic construct
MDKQARF

SEQ ID NO: 181133 - protein, 7 aa, synthetic construct
MDGLRIK

SEQ ID NO: 181134 - protein, 7 aa, synthetic construct
TDMQRRS

SEQ ID NO: 181135 - protein, 7 aa, synthetic construct
SDMTRRI

SEQ ID NO: 181136 - protein, 7 aa, synthetic construct
MDGLRKV

SEQ ID NO: 181137 - protein, 7 aa, synthetic construct
MDQNRRA

SEQ ID NO: 181138 - protein, 7 aa, synthetic construct
TDNQRRL

SEQ ID NO: 181139 - protein, 7 aa, synthetic construct
TDMNRRI

SEQ ID NO: 181140 - protein, 7 aa, synthetic construct
YDGQRKT

SEQ ID NO: 181141 - protein, 7 aa, synthetic construct
MDQTRRI

SEQ ID NO: 181142 - protein, 7 aa, synthetic construct
TDGQGRK

SEQ ID NO: 181143 - protein, 7 aa, synthetic construct
YDGQRSK

SEQ ID NO: 181144 - protein, 7 aa, synthetic construct
MQGERRG

SEQ ID NO: 181145 - protein, 7 aa, synthetic construct
MDMQRKV

SEQ ID NO: 181146 - protein, 7 aa, synthetic construct
MTDQRRI

SEQ ID NO: 181147 - protein, 7 aa, synthetic construct
IDGGRRT

SEQ ID NO: 181148 - protein, 7 aa, synthetic construct
PDQQRRG

SEQ ID NO: 181149 - protein, 7 aa, synthetic construct
MDGSRKM

SEQ ID NO: 181150 - protein, 7 aa, synthetic construct
DRGQRTI

SEQ ID NO: 181151 - protein, 7 aa, synthetic construct
MAGSRHI

SEQ ID NO: 181152 - protein, 7 aa, synthetic construct
MDNQRKG

SEQ ID NO: 181153 - protein, 7 aa, synthetic construct
MPGIRRE

SEQ ID NO: 181154 - protein, 7 aa, synthetic construct
QDTVRRI

SEQ ID NO: 181155 - protein, 7 aa, synthetic construct
MMGHRTI

SEQ ID NO: 181156 - protein, 7 aa, synthetic construct
GDGQKRA

SEQ ID NO: 181157 - protein, 7 aa, synthetic construct
MDGNRFK

SEQ ID NO: 181158 - protein, 7 aa, synthetic construct
MDKQSRY

SEQ ID NO: 181159 - protein, 7 aa, synthetic construct
QPGQRRE

SEQ ID NO: 181160 - protein, 7 aa, synthetic construct
ISEQRRI

SEQ ID NO: 181161 - protein, 7 aa, synthetic construct
YDAQRRS

SEQ ID NO: 181162 - protein, 7 aa, synthetic construct
MDGQKAR

SEQ ID NO: 181163 - protein, 7 aa, synthetic construct
VDSPRRI

SEQ ID NO: 181164 - protein, 7 aa, synthetic construct
MSGQTRS

SEQ ID NO: 181165 - protein, 7 aa, synthetic construct
MTGERRG

SEQ ID NO: 181166 - protein, 7 aa, synthetic construct
YDGQTRR

SEQ ID NO: 181167 - protein, 7 aa, synthetic construct
LEGQRKI

SEQ ID NO: 181168 - protein, 7 aa, synthetic construct
MDLPKRI

SEQ ID NO: 181169 - protein, 7 aa, synthetic construct
MRGQRGE

SEQ ID NO: 181170 - protein, 7 aa, synthetic construct
MDGQRQK

SEQ ID NO: 181171 - protein, 7 aa, synthetic construct
DPQQRRI

SEQ ID NO: 181172 - protein, 7 aa, synthetic construct
HDKQLRI

SEQ ID NO: 181173 - protein, 7 aa, synthetic construct
NDKQSRI

SEQ ID NO: 181174 - protein, 7 aa, synthetic construct
MDGNVRK

SEQ ID NO: 181175 - protein, 7 aa, synthetic construct
MDGAQRR

SEQ ID NO: 181176 - protein, 7 aa, synthetic construct
MVGQTRQ

SEQ ID NO: 181177 - protein, 7 aa, synthetic construct
MDNQRRA

SEQ ID NO: 181178 - protein, 7 aa, synthetic construct
MVGQQRG

SEQ ID NO: 181179 - protein, 7 aa, synthetic construct
MLDGRRI

SEQ ID NO: 181180 - protein, 7 aa, synthetic construct
MDIQRKL

SEQ ID NO: 181181 - protein, 7 aa, synthetic construct
MDRNTRI

SEQ ID NO: 181182 - protein, 7 aa, synthetic construct
VDRQNRI

SEQ ID NO: 181183 - protein, 7 aa, synthetic construct
SDNMRRI

SEQ ID NO: 181184 - protein, 7 aa, synthetic construct
ERGQRGI

SEQ ID NO: 181185 - protein, 7 aa, synthetic construct
MDNQRRV

SEQ ID NO: 181186 - protein, 7 aa, synthetic construct
NDGKMRI

SEQ ID NO: 181187 - protein, 7 aa, synthetic construct
TSEQRRI

SEQ ID NO: 181188 - protein, 7 aa, synthetic construct
MDGPRAR

SEQ ID NO: 181189 - protein, 7 aa, synthetic construct
QDGVRRG

SEQ ID NO: 181190 - protein, 7 aa, synthetic construct
TDQQRKI

SEQ ID NO: 181191 - protein, 7 aa, synthetic construct
KDGQQRN

SEQ ID NO: 181192 - protein, 7 aa, synthetic construct
LDSVRRI

SEQ ID NO: 181193 - protein, 7 aa, synthetic construct
MDRQPKI

SEQ ID NO: 181194 - protein, 7 aa, synthetic construct
IDMNRRI

SEQ ID NO: 181195 - protein, 7 aa, synthetic construct
MDKQGRW

SEQ ID NO: 181196 - protein, 7 aa, synthetic construct
YDNQRRG

SEQ ID NO: 181197 - protein, 7 aa, synthetic construct
MDGKDRR

SEQ ID NO: 181198 - protein, 7 aa, synthetic construct
MDASRRG

SEQ ID NO: 181199 - protein, 7 aa, synthetic construct
MDQQGRK

SEQ ID NO: 181200 - protein, 7 aa, synthetic construct
QDTQRRG

SEQ ID NO: 181201 - protein, 7 aa, synthetic construct
MDGQARK

SEQ ID NO: 181202 - protein, 7 aa, synthetic construct
MDAMRRT

SEQ ID NO: 181203 - protein, 7 aa, synthetic construct
TDKQRRE

SEQ ID NO: 181204 - protein, 7 aa, synthetic construct
MDNTRRV

SEQ ID NO: 181205 - protein, 7 aa, synthetic construct
MDGKRYT

SEQ ID NO: 181206 - protein, 7 aa, synthetic construct
MDKQRYM

SEQ ID NO: 181207 - protein, 7 aa, synthetic construct
MDGAKRQ

SEQ ID NO: 181208 - protein, 7 aa, synthetic construct
MDGSRQK

SEQ ID NO: 181209 - protein, 7 aa, synthetic construct
MDHKQRI

SEQ ID NO: 181210 - protein, 7 aa, synthetic construct
MDGKRYS

SEQ ID NO: 181211 - protein, 7 aa, synthetic construct
MIGHRTI

SEQ ID NO: 181212 - protein, 7 aa, synthetic construct
MDRAVRI

SEQ ID NO: 181213 - protein, 7 aa, synthetic construct
MDGSRPR

SEQ ID NO: 181214 - protein, 7 aa, synthetic construct
SDGQRIK

SEQ ID NO: 181215 - protein, 7 aa, synthetic construct
MAGQVRA

SEQ ID NO: 181216 - protein, 7 aa, synthetic construct
DKGQRII

SEQ ID NO: 181217 - protein, 7 aa, synthetic construct
MDAMRRP

SEQ ID NO: 181218 - protein, 7 aa, synthetic construct
MDSQRSK

SEQ ID NO: 181219 - protein, 7 aa, synthetic construct
MDRAIRI

SEQ ID NO: 181220 - protein, 7 aa, synthetic construct
MHGSTRI

SEQ ID NO: 181221 - protein, 7 aa, synthetic construct
YDGQRGR

SEQ ID NO: 181222 - protein, 7 aa, synthetic construct
MDGTRKG

SEQ ID NO: 181223 - protein, 7 aa, synthetic construct
MRGSDRI

SEQ ID NO: 181224 - protein, 7 aa, synthetic construct
MENTRRI

SEQ ID NO: 181225 - protein, 7 aa, synthetic construct
YDGQRKV

SEQ ID NO: 181226 - protein, 7 aa, synthetic construct
MEAPRRI

SEQ ID NO: 181227 - protein, 7 aa, synthetic construct
MDGTMRR

SEQ ID NO: 181228 - protein, 7 aa, synthetic construct
MDGKPRS

SEQ ID NO: 181229 - protein, 7 aa, synthetic construct
GDGQRKP

SEQ ID NO: 181230 - protein, 7 aa, synthetic construct
NDGKRNI

SEQ ID NO: 181231 - protein, 7 aa, synthetic construct
MEVQKRI

SEQ ID NO: 181232 - protein, 7 aa, synthetic construct
MDNPRRG

SEQ ID NO: 181233 - protein, 7 aa, synthetic construct
MDGMRTK

SEQ ID NO: 181234 - protein, 7 aa, synthetic construct
IDGVRRT

SEQ ID NO: 181235 - protein, 7 aa, synthetic construct
LDGTRRN

SEQ ID NO: 181236 - protein, 7 aa, synthetic construct
MDTQKRS

SEQ ID NO: 181237 - protein, 7 aa, synthetic construct
MVGQHRQ

SEQ ID NO: 181238 - protein, 7 aa, synthetic construct
MDGNRRA

SEQ ID NO: 181239 - protein, 7 aa, synthetic construct
GDATRRI

SEQ ID NO: 181240 - protein, 7 aa, synthetic construct
MDGQRTR

SEQ ID NO: 181241 - protein, 7 aa, synthetic construct
MTGQVRQ

SEQ ID NO: 181242 - protein, 7 aa, synthetic construct
IDGGRRA

SEQ ID NO: 181243 - protein, 7 aa, synthetic construct
MDKQTRM

SEQ ID NO: 181244 - protein, 7 aa, synthetic construct
TMGERRI

SEQ ID NO: 181245 - protein, 7 aa, synthetic construct
MDLNRRP

SEQ ID NO: 181246 - protein, 7 aa, synthetic construct
MTGQIRA

SEQ ID NO: 181247 - protein, 7 aa, synthetic construct
MRGERVI

SEQ ID NO: 181248 - protein, 7 aa, synthetic construct
YDGNRKI

SEQ ID NO: 181249 - protein, 7 aa, synthetic construct
VDSQRRS

SEQ ID NO: 181250 - protein, 7 aa, synthetic construct
MTEQRRS

SEQ ID NO: 181251 - protein, 7 aa, synthetic construct
PDVQRRS

SEQ ID NO: 181252 - protein, 7 aa, synthetic construct
VDGVRRM

SEQ ID NO: 181253 - protein, 7 aa, synthetic construct
IDGQVRR

SEQ ID NO: 181254 - protein, 7 aa, synthetic construct
MEGIRKI

SEQ ID NO: 181255 - protein, 7 aa, synthetic construct
MDSQKRF

SEQ ID NO: 181256 - protein, 7 aa, synthetic construct
QDGRLRI

SEQ ID NO: 181257 - protein, 7 aa, synthetic construct
ISGQRRE

SEQ ID NO: 181258 - protein, 7 aa, synthetic construct
MDGKLRF

SEQ ID NO: 181259 - protein, 7 aa, synthetic construct
MDGVMRK

SEQ ID NO: 181260 - protein, 7 aa, synthetic construct
MAGQHRG

SEQ ID NO: 181261 - protein, 7 aa, synthetic construct
LDSQRRQ

SEQ ID NO: 181262 - protein, 7 aa, synthetic construct
YDGQNRK

SEQ ID NO: 181263 - protein, 7 aa, synthetic construct
MPDQRRN

SEQ ID NO: 181264 - protein, 7 aa, synthetic construct
MDKDRRS

SEQ ID NO: 181265 - protein, 7 aa, synthetic construct
HDKQSRI

SEQ ID NO: 181266 - protein, 7 aa, synthetic construct
MDLAKRI

SEQ ID NO: 181267 - protein, 7 aa, synthetic construct
NDGKFRI

SEQ ID NO: 181268 - protein, 7 aa, synthetic construct
QDGKRLI

SEQ ID NO: 181269 - protein, 7 aa, synthetic construct
MVGQIRS

SEQ ID NO: 181270 - protein, 7 aa, synthetic construct
MDKQQRS

SEQ ID NO: 181271 - protein, 7 aa, synthetic construct
MDGVKRY

SEQ ID NO: 181272 - protein, 7 aa, synthetic construct
HDGKRQI

SEQ ID NO: 181273 - protein, 7 aa, synthetic construct
YDGTRRQ

SEQ ID NO: 181274 - protein, 7 aa, synthetic construct
MIGQMRP

SEQ ID NO: 181275 - protein, 7 aa, synthetic construct
FDGKRNI

SEQ ID NO: 181276 - protein, 7 aa, synthetic construct
NDGQRTR

SEQ ID NO: 181277 - protein, 7 aa, synthetic construct
MDGNRKQ

SEQ ID NO: 181278 - protein, 7 aa, synthetic construct
RTGQREI

SEQ ID NO: 181279 - protein, 7 aa, synthetic construct
TDRQVRI

SEQ ID NO: 181280 - protein, 7 aa, synthetic construct
MDQQRNK

SEQ ID NO: 181281 - protein, 7 aa, synthetic construct
MTGQGRN

SEQ ID NO: 181282 - protein, 7 aa, synthetic construct
LDGPRRL

SEQ ID NO: 181283 - protein, 7 aa, synthetic construct
GDVQRKI

SEQ ID NO: 181284 - protein, 7 aa, synthetic construct
MDIQRRA

SEQ ID NO: 181285 - protein, 7 aa, synthetic construct
ADGQRVR

SEQ ID NO: 181286 - protein, 7 aa, synthetic construct
MDPIRRS

SEQ ID NO: 181287 - protein, 7 aa, synthetic construct
MDGLKRL

SEQ ID NO: 181288 - protein, 7 aa, synthetic construct
ADRQPRI

SEQ ID NO: 181289 - protein, 7 aa, synthetic construct
NDGKNRI

SEQ ID NO: 181290 - protein, 7 aa, synthetic construct
MMGDRRQ

SEQ ID NO: 181291 - protein, 7 aa, synthetic construct
KDGQSRN

SEQ ID NO: 181292 - protein, 7 aa, synthetic construct
TDNTRRI

SEQ ID NO: 181293 - protein, 7 aa, synthetic construct
MVGQARQ

SEQ ID NO: 181294 - protein, 7 aa, synthetic construct
MDKPRHI

SEQ ID NO: 181295 - protein, 7 aa, synthetic construct
RPGQRDI

SEQ ID NO: 181296 - protein, 7 aa, synthetic construct
MDGPRTK

SEQ ID NO: 181297 - protein, 7 aa, synthetic construct
YDKQQRI

SEQ ID NO: 181298 - protein, 7 aa, synthetic construct
MDAVRRS

SEQ ID NO: 181299 - protein, 7 aa, synthetic construct
TDGRQRI

SEQ ID NO: 181300 - protein, 7 aa, synthetic construct
MVDQRRV

SEQ ID NO: 181301 - protein, 7 aa, synthetic construct
ADNQKRI

SEQ ID NO: 181302 - protein, 7 aa, synthetic construct
ADGQRKA

SEQ ID NO: 181303 - protein, 7 aa, synthetic construct
TDGVKRI

SEQ ID NO: 181304 - protein, 7 aa, synthetic construct
MDNPRRL

SEQ ID NO: 181305 - protein, 7 aa, synthetic construct
MPGQSRG

SEQ ID NO: 181306 - protein, 7 aa, synthetic construct
MDGQRPR

SEQ ID NO: 181307 - protein, 7 aa, synthetic construct
VDNVRRI

SEQ ID NO: 181308 - protein, 7 aa, synthetic construct
NDGQIRK

SEQ ID NO: 181309 - protein, 7 aa, synthetic construct
MDQQKRG

SEQ ID NO: 181310 - protein, 7 aa, synthetic construct
MQGERRA

SEQ ID NO: 181311 - protein, 7 aa, synthetic construct
MQGQIRA

SEQ ID NO: 181312 - protein, 7 aa, synthetic construct
MPGVRRE

SEQ ID NO: 181313 - protein, 7 aa, synthetic construct
VDGVRRI

SEQ ID NO: 181314 - protein, 7 aa, synthetic construct
DMAQRRI

SEQ ID NO: 181315 - protein, 7 aa, synthetic construct
MDGKLRQ

SEQ ID NO: 181316 - protein, 7 aa, synthetic construct
MDGKRAY

SEQ ID NO: 181317 - protein, 7 aa, synthetic construct
VDGQRRQ

SEQ ID NO: 181318 - protein, 7 aa, synthetic construct
MDMKRII

SEQ ID NO: 181319 - protein, 7 aa, synthetic construct
MDGGRMK

SEQ ID NO: 181320 - protein, 7 aa, synthetic construct
VDGLRRI

SEQ ID NO: 181321 - protein, 7 aa, synthetic construct
MDGRQRV

SEQ ID NO: 181322 - protein, 7 aa, synthetic construct
MGGIRHI

SEQ ID NO: 181323 - protein, 7 aa, synthetic construct
KDHQRNI

SEQ ID NO: 181324 - protein, 7 aa, synthetic construct
MDKPYRI

SEQ ID NO: 181325 - protein, 7 aa, synthetic construct
MDGSRKG

SEQ ID NO: 181326 - protein, 7 aa, synthetic construct
MDNQRKN

SEQ ID NO: 181327 - protein, 7 aa, synthetic construct
LDGIRRV

SEQ ID NO: 181328 - protein, 7 aa, synthetic construct
LDGQRSR

SEQ ID NO: 181329 - protein, 7 aa, synthetic construct
MTGQIRH

SEQ ID NO: 181330 - protein, 7 aa, synthetic construct
GDGIKRI

SEQ ID NO: 181331 - protein, 7 aa, synthetic construct
NDTGRRI

SEQ ID NO: 181332 - protein, 7 aa, synthetic construct
MTDGRRI

SEQ ID NO: 181333 - protein, 7 aa, synthetic construct
MKGSRDI

SEQ ID NO: 181334 - protein, 7 aa, synthetic construct
MDRTRSI

SEQ ID NO: 181335 - protein, 7 aa, synthetic construct
TDGQRIK

SEQ ID NO: 181336 - protein, 7 aa, synthetic construct
MDGRGRM

SEQ ID NO: 181337 - protein, 7 aa, synthetic construct
FDKQNRI

SEQ ID NO: 181338 - protein, 7 aa, synthetic construct
NDGGRRV

SEQ ID NO: 181339 - protein, 7 aa, synthetic construct
MDGQKKH

SEQ ID NO: 181340 - protein, 7 aa, synthetic construct
DDKQKRI

SEQ ID NO: 181341 - protein, 7 aa, synthetic construct
MDRPARI

SEQ ID NO: 181342 - protein, 7 aa, synthetic construct
LDTQRRL

SEQ ID NO: 181343 - protein, 7 aa, synthetic construct
MHGQNRG

SEQ ID NO: 181344 - protein, 7 aa, synthetic construct
MTEQRRV

SEQ ID NO: 181345 - protein, 7 aa, synthetic construct
MDGMRGK

SEQ ID NO: 181346 - protein, 7 aa, synthetic construct
LDNQRRL

SEQ ID NO: 181347 - protein, 7 aa, synthetic construct
MDKQGRH

SEQ ID NO: 181348 - protein, 7 aa, synthetic construct
FDGTRRV

SEQ ID NO: 181349 - protein, 7 aa, synthetic construct
QDGQRVR

SEQ ID NO: 181350 - protein, 7 aa, synthetic construct
GDGKRYI

SEQ ID NO: 181351 - protein, 7 aa, synthetic construct
SDAARRI

SEQ ID NO: 181352 - protein, 7 aa, synthetic construct
VDGPRRM

SEQ ID NO: 181353 - protein, 7 aa, synthetic construct
MRGQQRD

SEQ ID NO: 181354 - protein, 7 aa, synthetic construct
MDGKVRL

SEQ ID NO: 181355 - protein, 7 aa, synthetic construct
MGRQRDI

SEQ ID NO: 181356 - protein, 7 aa, synthetic construct
MMGTRSI

SEQ ID NO: 181357 - protein, 7 aa, synthetic construct
IDSQRRQ

SEQ ID NO: 181358 - protein, 7 aa, synthetic construct
MDGVRRT

SEQ ID NO: 181359 - protein, 7 aa, synthetic construct
MIGQVRQ

SEQ ID NO: 181360 - protein, 7 aa, synthetic construct
IDGVRRM

SEQ ID NO: 181361 - protein, 7 aa, synthetic construct
MDGMRQK

SEQ ID NO: 181362 - protein, 7 aa, synthetic construct
FDRQTRI

SEQ ID NO: 181363 - protein, 7 aa, synthetic construct
ADIQKRI

SEQ ID NO: 181364 - protein, 7 aa, synthetic construct
MRGVERI

SEQ ID NO: 181365 - protein, 7 aa, synthetic construct
GDGQRKI

SEQ ID NO: 181366 - protein, 7 aa, synthetic construct
MDNPRRI

SEQ ID NO: 181367 - protein, 7 aa, synthetic construct
MDRQLRQ

SEQ ID NO: 181368 - protein, 7 aa, synthetic construct
MDGVKRL

SEQ ID NO: 181369 - protein, 7 aa, synthetic construct
ADKQRFI

SEQ ID NO: 181370 - protein, 7 aa, synthetic construct
NDGVRRT

SEQ ID NO: 181371 - protein, 7 aa, synthetic construct
FDGVRKI

SEQ ID NO: 181372 - protein, 7 aa, synthetic construct
RDGQARN

SEQ ID NO: 181373 - protein, 7 aa, synthetic construct
MDAQLRK

SEQ ID NO: 181374 - protein, 7 aa, synthetic construct
NENQRRI

SEQ ID NO: 181375 - protein, 7 aa, synthetic construct
MDRQTRG

SEQ ID NO: 181376 - protein, 7 aa, synthetic construct
MDVQRTK

SEQ ID NO: 181377 - protein, 7 aa, synthetic construct
LDVQRRG

SEQ ID NO: 181378 - protein, 7 aa, synthetic construct
MDSPRRI

SEQ ID NO: 181379 - protein, 7 aa, synthetic construct
DRGQARI

SEQ ID NO: 181380 - protein, 7 aa, synthetic construct
MDVQRLK

SEQ ID NO: 181381 - protein, 7 aa, synthetic construct
NDGQRNK

SEQ ID NO: 181382 - protein, 7 aa, synthetic construct
PDGQRVR

SEQ ID NO: 181383 - protein, 7 aa, synthetic construct
MDRQRAM

SEQ ID NO: 181384 - protein, 7 aa, synthetic construct
MDALRRA

SEQ ID NO: 181385 - protein, 7 aa, synthetic construct
MVGQVRH

SEQ ID NO: 181386 - protein, 7 aa, synthetic construct
IDQQRRM

SEQ ID NO: 181387 - protein, 7 aa, synthetic construct
MRGQAMI

SEQ ID NO: 181388 - protein, 7 aa, synthetic construct
FDGNRRA

SEQ ID NO: 181389 - protein, 7 aa, synthetic construct
YDTQRRV

SEQ ID NO: 181390 - protein, 7 aa, synthetic construct
MDIQKRN

SEQ ID NO: 181391 - protein, 7 aa, synthetic construct
LDGTRRG

SEQ ID NO: 181392 - protein, 7 aa, synthetic construct
NEGQKRI

SEQ ID NO: 181393 - protein, 7 aa, synthetic construct
MDGNRAR

SEQ ID NO: 181394 - protein, 7 aa, synthetic construct
TTGQRRE

SEQ ID NO: 181395 - protein, 7 aa, synthetic construct
MDGIKRG

SEQ ID NO: 181396 - protein, 7 aa, synthetic construct
MDSQRSR

SEQ ID NO: 181397 - protein, 7 aa, synthetic construct
MDGPKRP

SEQ ID NO: 181398 - protein, 7 aa, synthetic construct
LDLQRRP

SEQ ID NO: 181399 - protein, 7 aa, synthetic construct
RDDTRRI

SEQ ID NO: 181400 - protein, 7 aa, synthetic construct
MDMKRYI

SEQ ID NO: 181401 - protein, 7 aa, synthetic construct
IDGPRRQ

SEQ ID NO: 181402 - protein, 7 aa, synthetic construct
KDGQERR

SEQ ID NO: 181403 - protein, 7 aa, synthetic construct
MDNVRRM

SEQ ID NO: 181404 - protein, 7 aa, synthetic construct
MDGRPRA

SEQ ID NO: 181405 - protein, 7 aa, synthetic construct
VDAVRRI

SEQ ID NO: 181406 - protein, 7 aa, synthetic construct
GDGQRGK

SEQ ID NO: 181407 - protein, 7 aa, synthetic construct
MVGPRHI

SEQ ID NO: 181408 - protein, 7 aa, synthetic construct
IDGQRAK

SEQ ID NO: 181409 - protein, 7 aa, synthetic construct
HDAQKRI

SEQ ID NO: 181410 - protein, 7 aa, synthetic construct
GDGVKRI

SEQ ID NO: 181411 - protein, 7 aa, synthetic construct
QTEQRRI

SEQ ID NO: 181412 - protein, 7 aa, synthetic construct
MDGNRMR

SEQ ID NO: 181413 - protein, 7 aa, synthetic construct
VDQQRRA

SEQ ID NO: 181414 - protein, 7 aa, synthetic construct
NDNTRRI

SEQ ID NO: 181415 - protein, 7 aa, synthetic construct
ADGAKRI

SEQ ID NO: 181416 - protein, 7 aa, synthetic construct
QDVQRRQ

SEQ ID NO: 181417 - protein, 7 aa, synthetic construct
FDGQRKV

SEQ ID NO: 181418 - protein, 7 aa, synthetic construct
MDLQRAK

SEQ ID NO: 181419 - protein, 7 aa, synthetic construct
MDGPRQK

SEQ ID NO: 181420 - protein, 7 aa, synthetic construct
VQEQRRI

SEQ ID NO: 181421 - protein, 7 aa, synthetic construct
TDTTRRI

SEQ ID NO: 181422 - protein, 7 aa, synthetic construct
MDGIKRF

SEQ ID NO: 181423 - protein, 7 aa, synthetic construct
MDGAKRY

SEQ ID NO: 181424 - protein, 7 aa, synthetic construct
ADGKLRI

SEQ ID NO: 181425 - protein, 7 aa, synthetic construct
LDGQARK

SEQ ID NO: 181426 - protein, 7 aa, synthetic construct
MLGHRSI

SEQ ID NO: 181427 - protein, 7 aa, synthetic construct
MDGVRKT

SEQ ID NO: 181428 - protein, 7 aa, synthetic construct
SDGRMRI

SEQ ID NO: 181429 - protein, 7 aa, synthetic construct
NDPQRRI

SEQ ID NO: 181430 - protein, 7 aa, synthetic construct
GDGKRVI

SEQ ID NO: 181431 - protein, 7 aa, synthetic construct
MDSQRKM

SEQ ID NO: 181432 - protein, 7 aa, synthetic construct
KQGQRDI

SEQ ID NO: 181433 - protein, 7 aa, synthetic construct
DVGPRRI

SEQ ID NO: 181434 - protein, 7 aa, synthetic construct
MDGNRRG

SEQ ID NO: 181435 - protein, 7 aa, synthetic construct
MDGNARK

SEQ ID NO: 181436 - protein, 7 aa, synthetic construct
MSGQSRQ

SEQ ID NO: 181437 - protein, 7 aa, synthetic construct
MDGQKRF

SEQ ID NO: 181438 - protein, 7 aa, synthetic construct
MDGQMRK

SEQ ID NO: 181439 - protein, 7 aa, synthetic construct
GDTARRI

SEQ ID NO: 181440 - protein, 7 aa, synthetic construct
MPGHRQI

SEQ ID NO: 181441 - protein, 7 aa, synthetic construct
MDNIRKI

SEQ ID NO: 181442 - protein, 7 aa, synthetic construct
MDGTRRG

SEQ ID NO: 181443 - protein, 7 aa, synthetic construct
MDGKRYQ

SEQ ID NO: 181444 - protein, 7 aa, synthetic construct
MDTVRRV

SEQ ID NO: 181445 - protein, 7 aa, synthetic construct
MDGKARG

SEQ ID NO: 181446 - protein, 7 aa, synthetic construct
NDGAKRI

SEQ ID NO: 181447 - protein, 7 aa, synthetic construct
MTGPRRE

SEQ ID NO: 181448 - protein, 7 aa, synthetic construct
MDARRSI

SEQ ID NO: 181449 - protein, 7 aa, synthetic construct
MDLQRKM

SEQ ID NO: 181450 - protein, 7 aa, synthetic construct
TDGIRRS

SEQ ID NO: 181451 - protein, 7 aa, synthetic construct
MRGQRFE

SEQ ID NO: 181452 - protein, 7 aa, synthetic construct
IDTQRRV

SEQ ID NO: 181453 - protein, 7 aa, synthetic construct
MDKSHRI

SEQ ID NO: 181454 - protein, 7 aa, synthetic construct
TDGNKRI

SEQ ID NO: 181455 - protein, 7 aa, synthetic construct
PDAARRI

SEQ ID NO: 181456 - protein, 7 aa, synthetic construct
MTGERRA

SEQ ID NO: 181457 - protein, 7 aa, synthetic construct
KDEQRRG

SEQ ID NO: 181458 - protein, 7 aa, synthetic construct
MDGSRSK

SEQ ID NO: 181459 - protein, 7 aa, synthetic construct
MDMKQRI

SEQ ID NO: 181460 - protein, 7 aa, synthetic construct
MDGVRMR

SEQ ID NO: 181461 - protein, 7 aa, synthetic construct
MDGPKRV

SEQ ID NO: 181462 - protein, 7 aa, synthetic construct
MDTQRPR

SEQ ID NO: 181463 - protein, 7 aa, synthetic construct
MDKQFRP

SEQ ID NO: 181464 - protein, 7 aa, synthetic construct
MDATRRT

SEQ ID NO: 181465 - protein, 7 aa, synthetic construct
YDIQRRQ

SEQ ID NO: 181466 - protein, 7 aa, synthetic construct
PDGQKRM

SEQ ID NO: 181467 - protein, 7 aa, synthetic construct
MDGPKRM

SEQ ID NO: 181468 - protein, 7 aa, synthetic construct
MDLQKRL

SEQ ID NO: 181469 - protein, 7 aa, synthetic construct
MIGQSRP

SEQ ID NO: 181470 - protein, 7 aa, synthetic construct
QDPQRRQ

SEQ ID NO: 181471 - protein, 7 aa, synthetic construct
VDGQRRT

SEQ ID NO: 181472 - protein, 7 aa, synthetic construct
VDNLRRI

SEQ ID NO: 181473 - protein, 7 aa, synthetic construct
MSGHRSI

SEQ ID NO: 181474 - protein, 7 aa, synthetic construct
VDGQARR

SEQ ID NO: 181475 - protein, 7 aa, synthetic construct
MDNQRTK

SEQ ID NO: 181476 - protein, 7 aa, synthetic construct
IDGSRRV

SEQ ID NO: 181477 - protein, 7 aa, synthetic construct
MRGQRLE

SEQ ID NO: 181478 - protein, 7 aa, synthetic construct
MDSQKRY

SEQ ID NO: 181479 - protein, 7 aa, synthetic construct
MPGERRQ

SEQ ID NO: 181480 - protein, 7 aa, synthetic construct
MEQQRRV

SEQ ID NO: 181481 - protein, 7 aa, synthetic construct
SDPQRRS

SEQ ID NO: 181482 - protein, 7 aa, synthetic construct
MDVNRRG

SEQ ID NO: 181483 - protein, 7 aa, synthetic construct
QDSQRRP

SEQ ID NO: 181484 - protein, 7 aa, synthetic construct
FDGIRRQ

SEQ ID NO: 181485 - protein, 7 aa, synthetic construct
IDGMRRP

SEQ ID NO: 181486 - protein, 7 aa, synthetic construct
RDGHRQI

SEQ ID NO: 181487 - protein, 7 aa, synthetic construct
MDASRRA

SEQ ID NO: 181488 - protein, 7 aa, synthetic construct
MDGIKRI

SEQ ID NO: 181489 - protein, 7 aa, synthetic construct
NDTTRRI

SEQ ID NO: 181490 - protein, 7 aa, synthetic construct
MDGQKKQ

SEQ ID NO: 181491 - protein, 7 aa, synthetic construct
MVGQTRG

SEQ ID NO: 181492 - protein, 7 aa, synthetic construct
MTGHRVI

SEQ ID NO: 181493 - protein, 7 aa, synthetic construct
RDGQPRN

SEQ ID NO: 181494 - protein, 7 aa, synthetic construct
MLDQRRA

SEQ ID NO: 181495 - protein, 7 aa, synthetic construct
SDGQRRP

SEQ ID NO: 181496 - protein, 7 aa, synthetic construct
MDRTSRI

SEQ ID NO: 181497 - protein, 7 aa, synthetic construct
FDGTRRG

SEQ ID NO: 181498 - protein, 7 aa, synthetic construct
YDQQKRI

SEQ ID NO: 181499 - protein, 7 aa, synthetic construct
MINQRRE

SEQ ID NO: 181500 - protein, 7 aa, synthetic construct
MDKSYRI

SEQ ID NO: 181501 - protein, 7 aa, synthetic construct
TSDQRRI

SEQ ID NO: 181502 - protein, 7 aa, synthetic construct
VDMQRRV

SEQ ID NO: 181503 - protein, 7 aa, synthetic construct
MAGMRRE

SEQ ID NO: 181504 - protein, 7 aa, synthetic construct
YDMQKRI

SEQ ID NO: 181505 - protein, 7 aa, synthetic construct
NDGVRKI

SEQ ID NO: 181506 - protein, 7 aa, synthetic construct
TDGQRGR

SEQ ID NO: 181507 - protein, 7 aa, synthetic construct
DSTQRRI

SEQ ID NO: 181508 - protein, 7 aa, synthetic construct
QDGQRIK

SEQ ID NO: 181509 - protein, 7 aa, synthetic construct
MDGQKRQ

SEQ ID NO: 181510 - protein, 7 aa, synthetic construct
NDQTRRI

SEQ ID NO: 181511 - protein, 7 aa, synthetic construct
MDAVRRM

SEQ ID NO: 181512 - protein, 7 aa, synthetic construct
TDGQKRG

SEQ ID NO: 181513 - protein, 7 aa, synthetic construct
MDGTRRP

SEQ ID NO: 181514 - protein, 7 aa, synthetic construct
MDGVKRG

SEQ ID NO: 181515 - protein, 7 aa, synthetic construct
LDGLRRI

SEQ ID NO: 181516 - protein, 7 aa, synthetic construct
MDGGRMR

SEQ ID NO: 181517 - protein, 7 aa, synthetic construct
IDGKYRI

SEQ ID NO: 181518 - protein, 7 aa, synthetic construct
MDQQNRK

SEQ ID NO: 181519 - protein, 7 aa, synthetic construct
YDGQRMK

SEQ ID NO: 181520 - protein, 7 aa, synthetic construct
VDQQRRI

SEQ ID NO: 181521 - protein, 7 aa, synthetic construct
MDHKTRI

SEQ ID NO: 181522 - protein, 7 aa, synthetic construct
MDGIRKG

SEQ ID NO: 181523 - protein, 7 aa, synthetic construct
IDSVRRI

SEQ ID NO: 181524 - protein, 7 aa, synthetic construct
YDGQRRQ

SEQ ID NO: 181525 - protein, 7 aa, synthetic construct
MDPQRRS

SEQ ID NO: 181526 - protein, 7 aa, synthetic construct
MRGQRDL

SEQ ID NO: 181527 - protein, 7 aa, synthetic construct
MRGQVSI

SEQ ID NO: 181528 - protein, 7 aa, synthetic construct
MLGNRRE

SEQ ID NO: 181529 - protein, 7 aa, synthetic construct
MDGKSRT

SEQ ID NO: 181530 - protein, 7 aa, synthetic construct
MDGRNKI

SEQ ID NO: 181531 - protein, 7 aa, synthetic construct
MPGQRRE

SEQ ID NO: 181532 - protein, 7 aa, synthetic construct
MDAIRRA

SEQ ID NO: 181533 - protein, 7 aa, synthetic construct
TDAQRRM

SEQ ID NO: 181534 - protein, 7 aa, synthetic construct
MDGPRKQ

SEQ ID NO: 181535 - protein, 7 aa, synthetic construct
VDAQRRT

SEQ ID NO: 181536 - protein, 7 aa, synthetic construct
YDGRTRI

SEQ ID NO: 181537 - protein, 7 aa, synthetic construct
LADQRRI

SEQ ID NO: 181538 - protein, 7 aa, synthetic construct
MDRNRTI

SEQ ID NO: 181539 - protein, 7 aa, synthetic construct
VDGQRNR

SEQ ID NO: 181540 - protein, 7 aa, synthetic construct
IDGTRRV

SEQ ID NO: 181541 - protein, 7 aa, synthetic construct
MQGQRKD

SEQ ID NO: 181542 - protein, 7 aa, synthetic construct
MDRNQRI

SEQ ID NO: 181543 - protein, 7 aa, synthetic construct
NTDQRRI

SEQ ID NO: 181544 - protein, 7 aa, synthetic construct
TDPQRRT

SEQ ID NO: 181545 - protein, 7 aa, synthetic construct
MDGIRVK

SEQ ID NO: 181546 - protein, 7 aa, synthetic construct
MDNVRKI

SEQ ID NO: 181547 - protein, 7 aa, synthetic construct
MDGIRTR

SEQ ID NO: 181548 - protein, 7 aa, synthetic construct
YDKQIRI

SEQ ID NO: 181549 - protein, 7 aa, synthetic construct
MDGMRKV

SEQ ID NO: 181550 - protein, 7 aa, synthetic construct
IDGSRRP

SEQ ID NO: 181551 - protein, 7 aa, synthetic construct
MDTMRRA

SEQ ID NO: 181552 - protein, 7 aa, synthetic construct
VDAGRRI

SEQ ID NO: 181553 - protein, 7 aa, synthetic construct
MDRPMRI

SEQ ID NO: 181554 - protein, 7 aa, synthetic construct
TDATRRI

SEQ ID NO: 181555 - protein, 7 aa, synthetic construct
MDGQRTK

SEQ ID NO: 181556 - protein, 7 aa, synthetic construct
YDSQKRI

SEQ ID NO: 181557 - protein, 7 aa, synthetic construct
LDGQKRN

SEQ ID NO: 181558 - protein, 7 aa, synthetic construct
QVGQRRE

SEQ ID NO: 181559 - protein, 7 aa, synthetic construct
MPGQGRN

SEQ ID NO: 181560 - protein, 7 aa, synthetic construct
TDGKSRI

SEQ ID NO: 181561 - protein, 7 aa, synthetic construct
MDKPRSI

SEQ ID NO: 181562 - protein, 7 aa, synthetic construct
MPDVRRI

SEQ ID NO: 181563 - protein, 7 aa, synthetic construct
MLGRERI

SEQ ID NO: 181564 - protein, 7 aa, synthetic construct
ADGQKRL

SEQ ID NO: 181565 - protein, 7 aa, synthetic construct
GDGQKRI

SEQ ID NO: 181566 - protein, 7 aa, synthetic construct
MDGAMRR

SEQ ID NO: 181567 - protein, 7 aa, synthetic construct
NDGQTRR

SEQ ID NO: 181568 - protein, 7 aa, synthetic construct
GDSQKRI

SEQ ID NO: 181569 - protein, 7 aa, synthetic construct
DAPQRRI

SEQ ID NO: 181570 - protein, 7 aa, synthetic construct
MLGQMRG

SEQ ID NO: 181571 - protein, 7 aa, synthetic construct
MAGQHRP

SEQ ID NO: 181572 - protein, 7 aa, synthetic construct
MRGQRDT

SEQ ID NO: 181573 - protein, 7 aa, synthetic construct
GDNQRRI

SEQ ID NO: 181574 - protein, 7 aa, synthetic construct
YDGKRMI

SEQ ID NO: 181575 - protein, 7 aa, synthetic construct
TDLNRRI

SEQ ID NO: 181576 - protein, 7 aa, synthetic construct
MDGRGRA

SEQ ID NO: 181577 - protein, 7 aa, synthetic construct
MDGQRNK

SEQ ID NO: 181578 - protein, 7 aa, synthetic construct
LDGQRRV

SEQ ID NO: 181579 - protein, 7 aa, synthetic construct
MDKRREI

SEQ ID NO: 181580 - protein, 7 aa, synthetic construct
NDSQKRI

SEQ ID NO: 181581 - protein, 7 aa, synthetic construct
QDGQRRP

SEQ ID NO: 181582 - protein, 7 aa, synthetic construct
FDGKQRI

SEQ ID NO: 181583 - protein, 7 aa, synthetic construct
MTGIRRE

SEQ ID NO: 181584 - protein, 7 aa, synthetic construct
YDGARRV

SEQ ID NO: 181585 - protein, 7 aa, synthetic construct
IDGQRAR

SEQ ID NO: 181586 - protein, 7 aa, synthetic construct
MDKQNRN

SEQ ID NO: 181587 - protein, 7 aa, synthetic construct
QDGQRSR

SEQ ID NO: 181588 - protein, 7 aa, synthetic construct
MDAQRAK

SEQ ID NO: 181589 - protein, 7 aa, synthetic construct
NDGQRRP

SEQ ID NO: 181590 - protein, 7 aa, synthetic construct
MVEQRRA

SEQ ID NO: 181591 - protein, 7 aa, synthetic construct
IDTVRRI

SEQ ID NO: 181592 - protein, 7 aa, synthetic construct
LDGTRRL

SEQ ID NO: 181593 - protein, 7 aa, synthetic construct
MDTRNRI

SEQ ID NO: 181594 - protein, 7 aa, synthetic construct
MDPTRRQ

SEQ ID NO: 181595 - protein, 7 aa, synthetic construct
MQGQVRG

SEQ ID NO: 181596 - protein, 7 aa, synthetic construct
GDNNRRI

SEQ ID NO: 181597 - protein, 7 aa, synthetic construct
NDGIRRA

SEQ ID NO: 181598 - protein, 7 aa, synthetic construct
MTRQREI

SEQ ID NO: 181599 - protein, 7 aa, synthetic construct
MRGQPRE

SEQ ID NO: 181600 - protein, 7 aa, synthetic construct
MAGDRRS

SEQ ID NO: 181601 - protein, 7 aa, synthetic construct
MSAQRRE

SEQ ID NO: 181602 - protein, 7 aa, synthetic construct
NDGKYRI

SEQ ID NO: 181603 - protein, 7 aa, synthetic construct
NDGVRRI

SEQ ID NO: 181604 - protein, 7 aa, synthetic construct
MDQARRQ

SEQ ID NO: 181605 - protein, 7 aa, synthetic construct
EKGQPRI

SEQ ID NO: 181606 - protein, 7 aa, synthetic construct
IDGKSRI

SEQ ID NO: 181607 - protein, 7 aa, synthetic construct
SDKERRI

SEQ ID NO: 181608 - protein, 7 aa, synthetic construct
MQGQARA

SEQ ID NO: 181609 - protein, 7 aa, synthetic construct
MDGKQRS

SEQ ID NO: 181610 - protein, 7 aa, synthetic construct
MDGRRVN

SEQ ID NO: 181611 - protein, 7 aa, synthetic construct
YDGLRRN

SEQ ID NO: 181612 - protein, 7 aa, synthetic construct
MIGQTRP

SEQ ID NO: 181613 - protein, 7 aa, synthetic construct
IDGPRRM

SEQ ID NO: 181614 - protein, 7 aa, synthetic construct
IDGMRRM

SEQ ID NO: 181615 - protein, 7 aa, synthetic construct
MDGMRKG

SEQ ID NO: 181616 - protein, 7 aa, synthetic construct
MDNARRG

SEQ ID NO: 181617 - protein, 7 aa, synthetic construct
DVGQRKI

SEQ ID NO: 181618 - protein, 7 aa, synthetic construct
MIGDRRL

SEQ ID NO: 181619 - protein, 7 aa, synthetic construct
VDVQRRS

SEQ ID NO: 181620 - protein, 7 aa, synthetic construct
YDAQRRN

SEQ ID NO: 181621 - protein, 7 aa, synthetic construct
MDVQRAR

SEQ ID NO: 181622 - protein, 7 aa, synthetic construct
MDKQRYG

SEQ ID NO: 181623 - protein, 7 aa, synthetic construct
MDLARRP

SEQ ID NO: 181624 - protein, 7 aa, synthetic construct
FDGQRKS

SEQ ID NO: 181625 - protein, 7 aa, synthetic construct
KDHQRLI

SEQ ID NO: 181626 - protein, 7 aa, synthetic construct
VDNQRRI

SEQ ID NO: 181627 - protein, 7 aa, synthetic construct
MDGRPRT

SEQ ID NO: 181628 - protein, 7 aa, synthetic construct
MDGNRNR

SEQ ID NO: 181629 - protein, 7 aa, synthetic construct
LTDQRRI

SEQ ID NO: 181630 - protein, 7 aa, synthetic construct
QDNSRRI

SEQ ID NO: 181631 - protein, 7 aa, synthetic construct
NDTQRRI

SEQ ID NO: 181632 - protein, 7 aa, synthetic construct
MDKISRI

SEQ ID NO: 181633 - protein, 7 aa, synthetic construct
MTGQRHA

SEQ ID NO: 181634 - protein, 7 aa, synthetic construct
MDGRQRT

SEQ ID NO: 181635 - protein, 7 aa, synthetic construct
QDGQKRV

SEQ ID NO: 181636 - protein, 7 aa, synthetic construct
TDGKRHI

SEQ ID NO: 181637 - protein, 7 aa, synthetic construct
MPGQSRS

SEQ ID NO: 181638 - protein, 7 aa, synthetic construct
IDGRPRI

SEQ ID NO: 181639 - protein, 7 aa, synthetic construct
VDAQRRS

SEQ ID NO: 181640 - protein, 7 aa, synthetic construct
VDGQPRK

SEQ ID NO: 181641 - protein, 7 aa, synthetic construct
MDGVRRG

SEQ ID NO: 181642 - protein, 7 aa, synthetic construct
MDSRRSI

SEQ ID NO: 181643 - protein, 7 aa, synthetic construct
YDTQKRI

SEQ ID NO: 181644 - protein, 7 aa, synthetic construct
YDGKRQI

SEQ ID NO: 181645 - protein, 7 aa, synthetic construct
MDKYTRI

SEQ ID NO: 181646 - protein, 7 aa, synthetic construct
MADVRRI

SEQ ID NO: 181647 - protein, 7 aa, synthetic construct
MDAQRGR

SEQ ID NO: 181648 - protein, 7 aa, synthetic construct
MAEQRRV

SEQ ID NO: 181649 - protein, 7 aa, synthetic construct
IDGPRRL

SEQ ID NO: 181650 - protein, 7 aa, synthetic construct
MAGERRI

SEQ ID NO: 181651 - protein, 7 aa, synthetic construct
LDMPRRI

SEQ ID NO: 181652 - protein, 7 aa, synthetic construct
QDGQRKG

SEQ ID NO: 181653 - protein, 7 aa, synthetic construct
MDVQRGK

SEQ ID NO: 181654 - protein, 7 aa, synthetic construct
SDGVRRP

SEQ ID NO: 181655 - protein, 7 aa, synthetic construct
MDAQRKL

SEQ ID NO: 181656 - protein, 7 aa, synthetic construct
MAGHRQI

SEQ ID NO: 181657 - protein, 7 aa, synthetic construct
LDGNRRT

SEQ ID NO: 181658 - protein, 7 aa, synthetic construct
MEGVRKI

SEQ ID NO: 181659 - protein, 7 aa, synthetic construct
DPGQRRV

SEQ ID NO: 181660 - protein, 7 aa, synthetic construct
ADGKRNI

SEQ ID NO: 181661 - protein, 7 aa, synthetic construct
MDKPRNI

SEQ ID NO: 181662 - protein, 7 aa, synthetic construct
MDLTRRA

SEQ ID NO: 181663 - protein, 7 aa, synthetic construct
MDGVRRV

SEQ ID NO: 181664 - protein, 7 aa, synthetic construct
MDNLRRG

SEQ ID NO: 181665 - protein, 7 aa, synthetic construct
MVQQRRE

SEQ ID NO: 181666 - protein, 7 aa, synthetic construct
MDSTRRV

SEQ ID NO: 181667 - protein, 7 aa, synthetic construct
QKGQRDI

SEQ ID NO: 181668 - protein, 7 aa, synthetic construct
QDKQRRE

SEQ ID NO: 181669 - protein, 7 aa, synthetic construct
MEGQRKI

SEQ ID NO: 181670 - protein, 7 aa, synthetic construct
MDGGRKV

SEQ ID NO: 181671 - protein, 7 aa, synthetic construct
MTGQRNN

SEQ ID NO: 181672 - protein, 7 aa, synthetic construct
MDIRGRI

SEQ ID NO: 181673 - protein, 7 aa, synthetic construct
MDKQYRP

SEQ ID NO: 181674 - protein, 7 aa, synthetic construct
MDSQKRT

SEQ ID NO: 181675 - protein, 7 aa, synthetic construct
MPGQKRD

SEQ ID NO: 181676 - protein, 7 aa, synthetic construct
LDGQRMK

SEQ ID NO: 181677 - protein, 7 aa, synthetic construct
YDGQRVK

SEQ ID NO: 181678 - protein, 7 aa, synthetic construct
MDKQRDR

SEQ ID NO: 181679 - protein, 7 aa, synthetic construct
SDTMRRI

SEQ ID NO: 181680 - protein, 7 aa, synthetic construct
IDSMRRI

SEQ ID NO: 181681 - protein, 7 aa, synthetic construct
MKGQERY

SEQ ID NO: 181682 - protein, 7 aa, synthetic construct
MDAQRRQ

SEQ ID NO: 181683 - protein, 7 aa, synthetic construct
MDGSTRK

SEQ ID NO: 181684 - protein, 7 aa, synthetic construct
MDGRGRT

SEQ ID NO: 181685 - protein, 7 aa, synthetic construct
MDGGARR

SEQ ID NO: 181686 - protein, 7 aa, synthetic construct
MDRQMRQ

SEQ ID NO: 181687 - protein, 7 aa, synthetic construct
LDGSRRQ

SEQ ID NO: 181688 - protein, 7 aa, synthetic construct
MDVQRRG

SEQ ID NO: 181689 - protein, 7 aa, synthetic construct
MDNLRRA

SEQ ID NO: 181690 - protein, 7 aa, synthetic construct
VDVQRRQ

SEQ ID NO: 181691 - protein, 7 aa, synthetic construct
MRGQQAI

SEQ ID NO: 181692 - protein, 7 aa, synthetic construct
SDSQRRV

SEQ ID NO: 181693 - protein, 7 aa, synthetic construct
GDTMRRI

SEQ ID NO: 181694 - protein, 7 aa, synthetic construct
MTLQRRE

SEQ ID NO: 181695 - protein, 7 aa, synthetic construct
MRGQDRN

SEQ ID NO: 181696 - protein, 7 aa, synthetic construct
MDTIRRS

SEQ ID NO: 181697 - protein, 7 aa, synthetic construct
YDGQKRS

SEQ ID NO: 181698 - protein, 7 aa, synthetic construct
MPGSRHI

SEQ ID NO: 181699 - protein, 7 aa, synthetic construct
MLNQRRE

SEQ ID NO: 181700 - protein, 7 aa, synthetic construct
MDATRRV

SEQ ID NO: 181701 - protein, 7 aa, synthetic construct
HDGKVRI

SEQ ID NO: 181702 - protein, 7 aa, synthetic construct
MDQQRKS

SEQ ID NO: 181703 - protein, 7 aa, synthetic construct
MDGGKRS

SEQ ID NO: 181704 - protein, 7 aa, synthetic construct
QDGKRFI

SEQ ID NO: 181705 - protein, 7 aa, synthetic construct
VDGIRRQ

SEQ ID NO: 181706 - protein, 7 aa, synthetic construct
ADVNRRI

SEQ ID NO: 181707 - protein, 7 aa, synthetic construct
MHGQSRG

SEQ ID NO: 181708 - protein, 7 aa, synthetic construct
MDGQTRK

SEQ ID NO: 181709 - protein, 7 aa, synthetic construct
MDGMKRV

SEQ ID NO: 181710 - protein, 7 aa, synthetic construct
MDGKIRQ

SEQ ID NO: 181711 - protein, 7 aa, synthetic construct
FDGQRKL

SEQ ID NO: 181712 - protein, 7 aa, synthetic construct
MDGKPRM

SEQ ID NO: 181713 - protein, 7 aa, synthetic construct
GDIQRRG

SEQ ID NO: 181714 - protein, 7 aa, synthetic construct
MMGVRRE

SEQ ID NO: 181715 - protein, 7 aa, synthetic construct
MDTQRKN

SEQ ID NO: 181716 - protein, 7 aa, synthetic construct
NDNQKRI

SEQ ID NO: 181717 - protein, 7 aa, synthetic construct
YDPQRRA

SEQ ID NO: 181718 - protein, 7 aa, synthetic construct
MVGQNRG

SEQ ID NO: 181719 - protein, 7 aa, synthetic construct
FDGQKRF

SEQ ID NO: 181720 - protein, 7 aa, synthetic construct
IDGQRPR

SEQ ID NO: 181721 - protein, 7 aa, synthetic construct
MDIKRSI

SEQ ID NO: 181722 - protein, 7 aa, synthetic construct
MDKQQRY

SEQ ID NO: 181723 - protein, 7 aa, synthetic construct
MDMQRAK

SEQ ID NO: 181724 - protein, 7 aa, synthetic construct
MPGHRTI

SEQ ID NO: 181725 - protein, 7 aa, synthetic construct
MDRARSI

SEQ ID NO: 181726 - protein, 7 aa, synthetic construct
MDSTRRI

SEQ ID NO: 181727 - protein, 7 aa, synthetic construct
TDGQKRI

SEQ ID NO: 181728 - protein, 7 aa, synthetic construct
MDGKRFL

SEQ ID NO: 181729 - protein, 7 aa, synthetic construct
MDTRMRI

SEQ ID NO: 181730 - protein, 7 aa, synthetic construct
MDGVRLK

SEQ ID NO: 181731 - protein, 7 aa, synthetic construct
TDGTRRP

SEQ ID NO: 181732 - protein, 7 aa, synthetic construct
TDQQRRQ

SEQ ID NO: 181733 - protein, 7 aa, synthetic construct
TVGQRRE

SEQ ID NO: 181734 - protein, 7 aa, synthetic construct
MDGGRAR

SEQ ID NO: 181735 - protein, 7 aa, synthetic construct
SDGQRPK

SEQ ID NO: 181736 - protein, 7 aa, synthetic construct
MVGQPRG

SEQ ID NO: 181737 - protein, 7 aa, synthetic construct
IDAQRRA

SEQ ID NO: 181738 - protein, 7 aa, synthetic construct
MTRQERI

SEQ ID NO: 181739 - protein, 7 aa, synthetic construct
MGGPRSI

SEQ ID NO: 181740 - protein, 7 aa, synthetic construct
TADQRRI

SEQ ID NO: 181741 - protein, 7 aa, synthetic construct
FDGQRNK

SEQ ID NO: 181742 - protein, 7 aa, synthetic construct
MDGKIRV

SEQ ID NO: 181743 - protein, 7 aa, synthetic construct
LDMQRRA

SEQ ID NO: 181744 - protein, 7 aa, synthetic construct
MINQRHI

SEQ ID NO: 181745 - protein, 7 aa, synthetic construct
MDGKLRT

SEQ ID NO: 181746 - protein, 7 aa, synthetic construct
MDKLRRD

SEQ ID NO: 181747 - protein, 7 aa, synthetic construct
SDPQRRI

SEQ ID NO: 181748 - protein, 7 aa, synthetic construct
MTGQRDK

SEQ ID NO: 181749 - protein, 7 aa, synthetic construct
NDGVRRG

SEQ ID NO: 181750 - protein, 7 aa, synthetic construct
DRGQRSI

SEQ ID NO: 181751 - protein, 7 aa, synthetic construct
NDRQTRI

SEQ ID NO: 181752 - protein, 7 aa, synthetic construct
VDAQRRN

SEQ ID NO: 181753 - protein, 7 aa, synthetic construct
MDGNRSK

SEQ ID NO: 181754 - protein, 7 aa, synthetic construct
MDGKRGW

SEQ ID NO: 181755 - protein, 7 aa, synthetic construct
MDGQIRK

SEQ ID NO: 181756 - protein, 7 aa, synthetic construct
MDLQKRN

SEQ ID NO: 181757 - protein, 7 aa, synthetic construct
MDRNVRI

SEQ ID NO: 181758 - protein, 7 aa, synthetic construct
MPGNRHI

SEQ ID NO: 181759 - protein, 7 aa, synthetic construct
SDGTRRP

SEQ ID NO: 181760 - protein, 7 aa, synthetic construct
GDGKRII

SEQ ID NO: 181761 - protein, 7 aa, synthetic construct
MDRQRLN

SEQ ID NO: 181762 - protein, 7 aa, synthetic construct
MSGQHRP

SEQ ID NO: 181763 - protein, 7 aa, synthetic construct
YDAQRRG

SEQ ID NO: 181764 - protein, 7 aa, synthetic construct
NDGVRRA

SEQ ID NO: 181765 - protein, 7 aa, synthetic construct
MDSQARK

SEQ ID NO: 181766 - protein, 7 aa, synthetic construct
MDGQKAK

SEQ ID NO: 181767 - protein, 7 aa, synthetic construct
MDGTRNK

SEQ ID NO: 181768 - protein, 7 aa, synthetic construct
IDINRRI

SEQ ID NO: 181769 - protein, 7 aa, synthetic construct
DLNQRRI

SEQ ID NO: 181770 - protein, 7 aa, synthetic construct
MDRTARI

SEQ ID NO: 181771 - protein, 7 aa, synthetic construct
MAEQRRG

SEQ ID NO: 181772 - protein, 7 aa, synthetic construct
QDGQRMK

SEQ ID NO: 181773 - protein, 7 aa, synthetic construct
TDQQKRI

SEQ ID NO: 181774 - protein, 7 aa, synthetic construct
MDGQVKR

SEQ ID NO: 181775 - protein, 7 aa, synthetic construct
MDGKSRV

SEQ ID NO: 181776 - protein, 7 aa, synthetic construct
VDLQRRA

SEQ ID NO: 181777 - protein, 7 aa, synthetic construct
MTGERRL

SEQ ID NO: 181778 - protein, 7 aa, synthetic construct
QDAQRRG

SEQ ID NO: 181779 - protein, 7 aa, synthetic construct
MDTNRRG

SEQ ID NO: 181780 - protein, 7 aa, synthetic construct
MDTGRRG

SEQ ID NO: 181781 - protein, 7 aa, synthetic construct
GDVPRRI

SEQ ID NO: 181782 - protein, 7 aa, synthetic construct
MDGRIKI

SEQ ID NO: 181783 - protein, 7 aa, synthetic construct
NDGQARK

SEQ ID NO: 181784 - protein, 7 aa, synthetic construct
QDGPRRP

SEQ ID NO: 181785 - protein, 7 aa, synthetic construct
QDGGRRV

SEQ ID NO: 181786 - protein, 7 aa, synthetic construct
MDAGRRA

SEQ ID NO: 181787 - protein, 7 aa, synthetic construct
MDKQIRL

SEQ ID NO: 181788 - protein, 7 aa, synthetic construct
MDGKRFA

SEQ ID NO: 181789 - protein, 7 aa, synthetic construct
MIDQRRT

SEQ ID NO: 181790 - protein, 7 aa, synthetic construct
IDTQRRG

SEQ ID NO: 181791 - protein, 7 aa, synthetic construct
MIGQVRG

SEQ ID NO: 181792 - protein, 7 aa, synthetic construct
VIGQRRE

SEQ ID NO: 181793 - protein, 7 aa, synthetic construct
MMTQRHI

SEQ ID NO: 181794 - protein, 7 aa, synthetic construct
MDPARRS

SEQ ID NO: 181795 - protein, 7 aa, synthetic construct
VDVSRRI

SEQ ID NO: 181796 - protein, 7 aa, synthetic construct
MDGQGKR

SEQ ID NO: 181797 - protein, 7 aa, synthetic construct
ADGLRKI

SEQ ID NO: 181798 - protein, 7 aa, synthetic construct
NDFQKRI

SEQ ID NO: 181799 - protein, 7 aa, synthetic construct
MDGVRKL

SEQ ID NO: 181800 - protein, 7 aa, synthetic construct
MTGHRNI

SEQ ID NO: 181801 - protein, 7 aa, synthetic construct
LDMTRRI

SEQ ID NO: 181802 - protein, 7 aa, synthetic construct
MDPKPRI

SEQ ID NO: 181803 - protein, 7 aa, synthetic construct
NDAARRI

SEQ ID NO: 181804 - protein, 7 aa, synthetic construct
IDGARRG

SEQ ID NO: 181805 - protein, 7 aa, synthetic construct
MEGVRRP

SEQ ID NO: 181806 - protein, 7 aa, synthetic construct
MDGRMRG

SEQ ID NO: 181807 - protein, 7 aa, synthetic construct
MDGTKRG

SEQ ID NO: 181808 - protein, 7 aa, synthetic construct
MDQIRRA

SEQ ID NO: 181809 - protein, 7 aa, synthetic construct
MDLKPRI

SEQ ID NO: 181810 - protein, 7 aa, synthetic construct
MEGMRRV

SEQ ID NO: 181811 - protein, 7 aa, synthetic construct
IDLQRKI

SEQ ID NO: 181812 - protein, 7 aa, synthetic construct
DAGPRRI

SEQ ID NO: 181813 - protein, 7 aa, synthetic construct
NDQQKRI

SEQ ID NO: 181814 - protein, 7 aa, synthetic construct
QDIQRRV

SEQ ID NO: 181815 - protein, 7 aa, synthetic construct
MDKQRYA

SEQ ID NO: 181816 - protein, 7 aa, synthetic construct
QDGNRKI

SEQ ID NO: 181817 - protein, 7 aa, synthetic construct
TDGKRLI

SEQ ID NO: 181818 - protein, 7 aa, synthetic construct
MAGQMRA

SEQ ID NO: 181819 - protein, 7 aa, synthetic construct
DKGQRHI

SEQ ID NO: 181820 - protein, 7 aa, synthetic construct
SDMQRRG

SEQ ID NO: 181821 - protein, 7 aa, synthetic construct
TDGKQRI

SEQ ID NO: 181822 - protein, 7 aa, synthetic construct
MDMRPRI

SEQ ID NO: 181823 - protein, 7 aa, synthetic construct
NDGQKRT

SEQ ID NO: 181824 - protein, 7 aa, synthetic construct
MDGRRLV

SEQ ID NO: 181825 - protein, 7 aa, synthetic construct
MDGGRVK

SEQ ID NO: 181826 - protein, 7 aa, synthetic construct
MDGKARS

SEQ ID NO: 181827 - protein, 7 aa, synthetic construct
QDGQRPR

SEQ ID NO: 181828 - protein, 7 aa, synthetic construct
YDGGRRV

SEQ ID NO: 181829 - protein, 7 aa, synthetic construct
MDGKVRG

SEQ ID NO: 181830 - protein, 7 aa, synthetic construct
MDITRRA

SEQ ID NO: 181831 - protein, 7 aa, synthetic construct
PDGQKRG

SEQ ID NO: 181832 - protein, 7 aa, synthetic construct
YAGQIRI

SEQ ID NO: 181833 - protein, 7 aa, synthetic construct
ADNQRRI

SEQ ID NO: 181834 - protein, 7 aa, synthetic construct
MDRQPRM

SEQ ID NO: 181835 - protein, 7 aa, synthetic construct
WDGQKRA

SEQ ID NO: 181836 - protein, 7 aa, synthetic construct
MDGNMRK

SEQ ID NO: 181837 - protein, 7 aa, synthetic construct
FDGGRKI

SEQ ID NO: 181838 - protein, 7 aa, synthetic construct
MRGQSPI

SEQ ID NO: 181839 - protein, 7 aa, synthetic construct
VQGQRRE

SEQ ID NO: 181840 - protein, 7 aa, synthetic construct
MDGLRTK

SEQ ID NO: 181841 - protein, 7 aa, synthetic construct
MDNVRRP

SEQ ID NO: 181842 - protein, 7 aa, synthetic construct
MDAQTRK

SEQ ID NO: 181843 - protein, 7 aa, synthetic construct
MDGRRVV

SEQ ID NO: 181844 - protein, 7 aa, synthetic construct
MPMQRRE

SEQ ID NO: 181845 - protein, 7 aa, synthetic construct
MDGQRLR

SEQ ID NO: 181846 - protein, 7 aa, synthetic construct
YDGIRRA

SEQ ID NO: 181847 - protein, 7 aa, synthetic construct
YDGIRKI

SEQ ID NO: 181848 - protein, 7 aa, synthetic construct
MPGQDRR

SEQ ID NO: 181849 - protein, 7 aa, synthetic construct
MTGQQRN

SEQ ID NO: 181850 - protein, 7 aa, synthetic construct
ADNTRRI

SEQ ID NO: 181851 - protein, 7 aa, synthetic construct
MDKQTRS

SEQ ID NO: 181852 - protein, 7 aa, synthetic construct
MDGPRRP

SEQ ID NO: 181853 - protein, 7 aa, synthetic construct
MRGNRDI

SEQ ID NO: 181854 - protein, 7 aa, synthetic construct
IDTQRRS

SEQ ID NO: 181855 - protein, 7 aa, synthetic construct
SDIQRKI

SEQ ID NO: 181856 - protein, 7 aa, synthetic construct
MDKQRTY

SEQ ID NO: 181857 - protein, 7 aa, synthetic construct
RDGTRNI

SEQ ID NO: 181858 - protein, 7 aa, synthetic construct
DIPQRRI

SEQ ID NO: 181859 - protein, 7 aa, synthetic construct
HDGIKRI

SEQ ID NO: 181860 - protein, 7 aa, synthetic construct
MDGRSKI

SEQ ID NO: 181861 - protein, 7 aa, synthetic construct
MDGKRFG

SEQ ID NO: 181862 - protein, 7 aa, synthetic construct
LDGQRIK

SEQ ID NO: 181863 - protein, 7 aa, synthetic construct
IDGQRKA

SEQ ID NO: 181864 - protein, 7 aa, synthetic construct
MDGPRAK

SEQ ID NO: 181865 - protein, 7 aa, synthetic construct
MDQQRIK

SEQ ID NO: 181866 - protein, 7 aa, synthetic construct
VDANRRI

SEQ ID NO: 181867 - protein, 7 aa, synthetic construct
MDRGIRI

SEQ ID NO: 181868 - protein, 7 aa, synthetic construct
VDGQNRK

SEQ ID NO: 181869 - protein, 7 aa, synthetic construct
MKHQRDI

SEQ ID NO: 181870 - protein, 7 aa, synthetic construct
DANQRRI

SEQ ID NO: 181871 - protein, 7 aa, synthetic construct
VDGQGRK

SEQ ID NO: 181872 - protein, 7 aa, synthetic construct
DNNQRRI

SEQ ID NO: 181873 - protein, 7 aa, synthetic construct
MDIKRRE

SEQ ID NO: 181874 - protein, 7 aa, synthetic construct
MDTVRRG

SEQ ID NO: 181875 - protein, 7 aa, synthetic construct
NDGPRRV

SEQ ID NO: 181876 - protein, 7 aa, synthetic construct
MDGNKRN

SEQ ID NO: 181877 - protein, 7 aa, synthetic construct
TDGQRTR

SEQ ID NO: 181878 - protein, 7 aa, synthetic construct
IDNSRRI

SEQ ID NO: 181879 - protein, 7 aa, synthetic construct
TDLQRRT

SEQ ID NO: 181880 - protein, 7 aa, synthetic construct
MAENRRI

SEQ ID NO: 181881 - protein, 7 aa, synthetic construct
TDVQRRA

SEQ ID NO: 181882 - protein, 7 aa, synthetic construct
MDGVRVK

SEQ ID NO: 181883 - protein, 7 aa, synthetic construct
MDGGKRV

SEQ ID NO: 181884 - protein, 7 aa, synthetic construct
MDGIRRQ

SEQ ID NO: 181885 - protein, 7 aa, synthetic construct
NDGTRRI

SEQ ID NO: 181886 - protein, 7 aa, synthetic construct
TDTQRKI

SEQ ID NO: 181887 - protein, 7 aa, synthetic construct
MDNQRKL

SEQ ID NO: 181888 - protein, 7 aa, synthetic construct
DIGQKRI

SEQ ID NO: 181889 - protein, 7 aa, synthetic construct
IDGPRRA

SEQ ID NO: 181890 - protein, 7 aa, synthetic construct
MDVRNRI

SEQ ID NO: 181891 - protein, 7 aa, synthetic construct
MDQVRRS

SEQ ID NO: 181892 - protein, 7 aa, synthetic construct
LDQQRRG

SEQ ID NO: 181893 - protein, 7 aa, synthetic construct
MPQQRRE

SEQ ID NO: 181894 - protein, 7 aa, synthetic construct
MDGQKMR

SEQ ID NO: 181895 - protein, 7 aa, synthetic construct
MDSQRAR

SEQ ID NO: 181896 - protein, 7 aa, synthetic construct
MDGKRYM

SEQ ID NO: 181897 - protein, 7 aa, synthetic construct
FDGPRRV

SEQ ID NO: 181898 - protein, 7 aa, synthetic construct
GDMQRRA

SEQ ID NO: 181899 - protein, 7 aa, synthetic construct
MDGAVRR

SEQ ID NO: 181900 - protein, 7 aa, synthetic construct
ADGARRV

SEQ ID NO: 181901 - protein, 7 aa, synthetic construct
MDKHSRI

SEQ ID NO: 181902 - protein, 7 aa, synthetic construct
MDATRRS

SEQ ID NO: 181903 - protein, 7 aa, synthetic construct
MDAARRL

SEQ ID NO: 181904 - protein, 7 aa, synthetic construct
MDGARNK

SEQ ID NO: 181905 - protein, 7 aa, synthetic construct
TLGERRI

SEQ ID NO: 181906 - protein, 7 aa, synthetic construct
NDSQRKI

SEQ ID NO: 181907 - protein, 7 aa, synthetic construct
AVDQRRI

SEQ ID NO: 181908 - protein, 7 aa, synthetic construct
MDGYKRV

SEQ ID NO: 181909 - protein, 7 aa, synthetic construct
MDGSRFK

SEQ ID NO: 181910 - protein, 7 aa, synthetic construct
ADGKNRI

SEQ ID NO: 181911 - protein, 7 aa, synthetic construct
MDGTRIR

SEQ ID NO: 181912 - protein, 7 aa, synthetic construct
ADRQVRI

SEQ ID NO: 181913 - protein, 7 aa, synthetic construct
MDTLRRA

SEQ ID NO: 181914 - protein, 7 aa, synthetic construct
VDGQRIK

SEQ ID NO: 181915 - protein, 7 aa, synthetic construct
TDGQRKQ

SEQ ID NO: 181916 - protein, 7 aa, synthetic construct
MDGQRMR

SEQ ID NO: 181917 - protein, 7 aa, synthetic construct
NDGSKRI

SEQ ID NO: 181918 - protein, 7 aa, synthetic construct
MDKMSRI

SEQ ID NO: 181919 - protein, 7 aa, synthetic construct
SDTVRRI

SEQ ID NO: 181920 - protein, 7 aa, synthetic construct
QHGQVRI

SEQ ID NO: 181921 - protein, 7 aa, synthetic construct
MEGQRIK

SEQ ID NO: 181922 - protein, 7 aa, synthetic construct
VDSQRRT

SEQ ID NO: 181923 - protein, 7 aa, synthetic construct
GDGPRKI

SEQ ID NO: 181924 - protein, 7 aa, synthetic construct
GDRQRAI

SEQ ID NO: 181925 - protein, 7 aa, synthetic construct
MVGQIRP

SEQ ID NO: 181926 - protein, 7 aa, synthetic construct
MAGHRLI

SEQ ID NO: 181927 - protein, 7 aa, synthetic construct
SIGQHRI

SEQ ID NO: 181928 - protein, 7 aa, synthetic construct
MPAQRRE

SEQ ID NO: 181929 - protein, 7 aa, synthetic construct
MDRVSRI

SEQ ID NO: 181930 - protein, 7 aa, synthetic construct
MDGAIRR

SEQ ID NO: 181931 - protein, 7 aa, synthetic construct
MKGQRDY

SEQ ID NO: 181932 - protein, 7 aa, synthetic construct
MDQMRRA

SEQ ID NO: 181933 - protein, 7 aa, synthetic construct
VDGQRNK

SEQ ID NO: 181934 - protein, 7 aa, synthetic construct
LDGLRRV

SEQ ID NO: 181935 - protein, 7 aa, synthetic construct
MTGQSRA

SEQ ID NO: 181936 - protein, 7 aa, synthetic construct
GDVTRRI

SEQ ID NO: 181937 - protein, 7 aa, synthetic construct
MKGQRDH

SEQ ID NO: 181938 - protein, 7 aa, synthetic construct
MRGQRDN

SEQ ID NO: 181939 - protein, 7 aa, synthetic construct
TDIQRRS

SEQ ID NO: 181940 - protein, 7 aa, synthetic construct
MDGSRAR

SEQ ID NO: 181941 - protein, 7 aa, synthetic construct
PDGQRKV

SEQ ID NO: 181942 - protein, 7 aa, synthetic construct
MDATRRL

SEQ ID NO: 181943 - protein, 7 aa, synthetic construct
SDQTRRI

SEQ ID NO: 181944 - protein, 7 aa, synthetic construct
NDSTRRI

SEQ ID NO: 181945 - protein, 7 aa, synthetic construct
MDKQMRY

SEQ ID NO: 181946 - protein, 7 aa, synthetic construct
MDGKTRH

SEQ ID NO: 181947 - protein, 7 aa, synthetic construct
MDGSRLK

SEQ ID NO: 181948 - protein, 7 aa, synthetic construct
MDGKVRI

SEQ ID NO: 181949 - protein, 7 aa, synthetic construct
MDIPKRI

SEQ ID NO: 181950 - protein, 7 aa, synthetic construct
DGGQRKI

SEQ ID NO: 181951 - protein, 7 aa, synthetic construct
MDAQPRK

SEQ ID NO: 181952 - protein, 7 aa, synthetic construct
MTGQPRN

SEQ ID NO: 181953 - protein, 7 aa, synthetic construct
MLGHRQI

SEQ ID NO: 181954 - protein, 7 aa, synthetic construct
MKGQTYI

SEQ ID NO: 181955 - protein, 7 aa, synthetic construct
TDGARRV

SEQ ID NO: 181956 - protein, 7 aa, synthetic construct
ADGRRGI

SEQ ID NO: 181957 - protein, 7 aa, synthetic construct
DAGQRKI

SEQ ID NO: 181958 - protein, 7 aa, synthetic construct
LDVPRRI

SEQ ID NO: 181959 - protein, 7 aa, synthetic construct
LDGPRRQ

SEQ ID NO: 181960 - protein, 7 aa, synthetic construct
MDGKGRT

SEQ ID NO: 181961 - protein, 7 aa, synthetic construct
LDGARRT

SEQ ID NO: 181962 - protein, 7 aa, synthetic construct
GDLQRKI

SEQ ID NO: 181963 - protein, 7 aa, synthetic construct
DDKVRRI

SEQ ID NO: 181964 - protein, 7 aa, synthetic construct
MDHKRII

SEQ ID NO: 181965 - protein, 7 aa, synthetic construct
TPGQRRE

SEQ ID NO: 181966 - protein, 7 aa, synthetic construct
MIDTRRI

SEQ ID NO: 181967 - protein, 7 aa, synthetic construct
VDRQMRI

SEQ ID NO: 181968 - protein, 7 aa, synthetic construct
GDGNRKI

SEQ ID NO: 181969 - protein, 7 aa, synthetic construct
MDGNRRP

SEQ ID NO: 181970 - protein, 7 aa, synthetic construct
MIGQLRG

SEQ ID NO: 181971 - protein, 7 aa, synthetic construct
TDPQRRV

SEQ ID NO: 181972 - protein, 7 aa, synthetic construct
SDGQKRS

SEQ ID NO: 181973 - protein, 7 aa, synthetic construct
MDGKQRH

SEQ ID NO: 181974 - protein, 7 aa, synthetic construct
MPEQRRN

SEQ ID NO: 181975 - protein, 7 aa, synthetic construct
MDKQLRY

SEQ ID NO: 181976 - protein, 7 aa, synthetic construct
MDGPKRH

SEQ ID NO: 181977 - protein, 7 aa, synthetic construct
IDGQKRT

SEQ ID NO: 181978 - protein, 7 aa, synthetic construct
MDGQRVK

SEQ ID NO: 181979 - protein, 7 aa, synthetic construct
MDVMRRA

SEQ ID NO: 181980 - protein, 7 aa, synthetic construct
MDKQLRF

SEQ ID NO: 181981 - protein, 7 aa, synthetic construct
MTNQRHI

SEQ ID NO: 181982 - protein, 7 aa, synthetic construct
MDHKRAI

SEQ ID NO: 181983 - protein, 7 aa, synthetic construct
MTGDRRV

SEQ ID NO: 181984 - protein, 7 aa, synthetic construct
VDIQRRN

SEQ ID NO: 181985 - protein, 7 aa, synthetic construct
NDGRVRI

SEQ ID NO: 181986 - protein, 7 aa, synthetic construct
MDAQKRL

SEQ ID NO: 181987 - protein, 7 aa, synthetic construct
MDGKARA

SEQ ID NO: 181988 - protein, 7 aa, synthetic construct
MGVQRRE

SEQ ID NO: 181989 - protein, 7 aa, synthetic construct
MDTTRRG

SEQ ID NO: 181990 - protein, 7 aa, synthetic construct
NDAQKRI

SEQ ID NO: 181991 - protein, 7 aa, synthetic construct
FDKQRNI

SEQ ID NO: 181992 - protein, 7 aa, synthetic construct
LDAIRRI

SEQ ID NO: 181993 - protein, 7 aa, synthetic construct
NDRQLRI

SEQ ID NO: 181994 - protein, 7 aa, synthetic construct
MDLQRKA

SEQ ID NO: 181995 - protein, 7 aa, synthetic construct
MDPQIRK

SEQ ID NO: 181996 - protein, 7 aa, synthetic construct
NDGPRKI

SEQ ID NO: 181997 - protein, 7 aa, synthetic construct
MKGQRDF

SEQ ID NO: 181998 - protein, 7 aa, synthetic construct
MAGTRHI

SEQ ID NO: 181999 - protein, 7 aa, synthetic construct
MDGKRFM

SEQ ID NO: 182000 - protein, 7 aa, synthetic construct
IDGLRRA

SEQ ID NO: 182001 - protein, 7 aa, synthetic construct
VDGQRQR

SEQ ID NO: 182002 - protein, 7 aa, synthetic construct
MDMQKRA

SEQ ID NO: 182003 - protein, 7 aa, synthetic construct
SDGVRRG

SEQ ID NO: 182004 - protein, 7 aa, synthetic construct
DKGQHRI

SEQ ID NO: 182005 - protein, 7 aa, synthetic construct
QDAQRRS

SEQ ID NO: 182006 - protein, 7 aa, synthetic construct
MLGTRRE

SEQ ID NO: 182007 - protein, 7 aa, synthetic construct
GDAQKRI

SEQ ID NO: 182008 - protein, 7 aa, synthetic construct
YDGTRRG

SEQ ID NO: 182009 - protein, 7 aa, synthetic construct
MDRQARA

SEQ ID NO: 182010 - protein, 7 aa, synthetic construct
MDGKNRY

SEQ ID NO: 182011 - protein, 7 aa, synthetic construct
MDGKQRN

SEQ ID NO: 182012 - protein, 7 aa, synthetic construct
MIGQVRN

SEQ ID NO: 182013 - protein, 7 aa, synthetic construct
IDAGRRI

SEQ ID NO: 182014 - protein, 7 aa, synthetic construct
TDNPRRI

SEQ ID NO: 182015 - protein, 7 aa, synthetic construct
MDATRRN

SEQ ID NO: 182016 - protein, 7 aa, synthetic construct
VDQTRRI

SEQ ID NO: 182017 - protein, 7 aa, synthetic construct
LDGNRRA

SEQ ID NO: 182018 - protein, 7 aa, synthetic construct
MDGKGRF

SEQ ID NO: 182019 - protein, 7 aa, synthetic construct
MDGNRTR

SEQ ID NO: 182020 - protein, 7 aa, synthetic construct
TDGTRKI

SEQ ID NO: 182021 - protein, 7 aa, synthetic construct
MDKDRRG

SEQ ID NO: 182022 - protein, 7 aa, synthetic construct
MDGPRRV

SEQ ID NO: 182023 - protein, 7 aa, synthetic construct
TDGPRKI

SEQ ID NO: 182024 - protein, 7 aa, synthetic construct
KDEQRRN

SEQ ID NO: 182025 - protein, 7 aa, synthetic construct
QDSARRI

SEQ ID NO: 182026 - protein, 7 aa, synthetic construct
GDGPKRI

SEQ ID NO: 182027 - protein, 7 aa, synthetic construct
MDKQMRF

SEQ ID NO: 182028 - protein, 7 aa, synthetic construct
MDITRRP

SEQ ID NO: 182029 - protein, 7 aa, synthetic construct
LDAQRRV

SEQ ID NO: 182030 - protein, 7 aa, synthetic construct
IRGQRDI

SEQ ID NO: 182031 - protein, 7 aa, synthetic construct
LTEQRRI

SEQ ID NO: 182032 - protein, 7 aa, synthetic construct
TDGKRII

SEQ ID NO: 182033 - protein, 7 aa, synthetic construct
ADMQRRP

SEQ ID NO: 182034 - protein, 7 aa, synthetic construct
MDTQNRK

SEQ ID NO: 182035 - protein, 7 aa, synthetic construct
ADRQMRI

SEQ ID NO: 182036 - protein, 7 aa, synthetic construct
GDANRRI

SEQ ID NO: 182037 - protein, 7 aa, synthetic construct
MDKQTRQ

SEQ ID NO: 182038 - protein, 7 aa, synthetic construct
KDHQRTI

SEQ ID NO: 182039 - protein, 7 aa, synthetic construct
TDKQHRI

SEQ ID NO: 182040 - protein, 7 aa, synthetic construct
VDNQRRS

SEQ ID NO: 182041 - protein, 7 aa, synthetic construct
MGGQTRA

SEQ ID NO: 182042 - protein, 7 aa, synthetic construct
QDGQTRK

SEQ ID NO: 182043 - protein, 7 aa, synthetic construct
MMGQRHA

SEQ ID NO: 182044 - protein, 7 aa, synthetic construct
IDTNRRI

SEQ ID NO: 182045 - protein, 7 aa, synthetic construct
MDMGKRI

SEQ ID NO: 182046 - protein, 7 aa, synthetic construct
NDGRPRI

SEQ ID NO: 182047 - protein, 7 aa, synthetic construct
RVGQRDI

SEQ ID NO: 182048 - protein, 7 aa, synthetic construct
FDGARRV

SEQ ID NO: 182049 - protein, 7 aa, synthetic construct
MSGMRHI

SEQ ID NO: 182050 - protein, 7 aa, synthetic construct
MDNSRRV

SEQ ID NO: 182051 - protein, 7 aa, synthetic construct
LEGQRRV

SEQ ID NO: 182052 - protein, 7 aa, synthetic construct
MRGADRI

SEQ ID NO: 182053 - protein, 7 aa, synthetic construct
MRGQRET

SEQ ID NO: 182054 - protein, 7 aa, synthetic construct
TDIQRRT

SEQ ID NO: 182055 - protein, 7 aa, synthetic construct
MPRQRDI

SEQ ID NO: 182056 - protein, 7 aa, synthetic construct
MDRQKQI

SEQ ID NO: 182057 - protein, 7 aa, synthetic construct
MDGRRIV

SEQ ID NO: 182058 - protein, 7 aa, synthetic construct
VDGTRRM

SEQ ID NO: 182059 - protein, 7 aa, synthetic construct
MDTQRSK

SEQ ID NO: 182060 - protein, 7 aa, synthetic construct
TDGVRRT

SEQ ID NO: 182061 - protein, 7 aa, synthetic construct
NDLQRRG

SEQ ID NO: 182062 - protein, 7 aa, synthetic construct
MDNQGRK

SEQ ID NO: 182063 - protein, 7 aa, synthetic construct
VDVQRRG

SEQ ID NO: 182064 - protein, 7 aa, synthetic construct
IDVPRRI

SEQ ID NO: 182065 - protein, 7 aa, synthetic construct
IADQRRI

SEQ ID NO: 182066 - protein, 7 aa, synthetic construct
MDGLRRA

SEQ ID NO: 182067 - protein, 7 aa, synthetic construct
IDGQKRN

SEQ ID NO: 182068 - protein, 7 aa, synthetic construct
MDSQRGK

SEQ ID NO: 182069 - protein, 7 aa, synthetic construct
MDGNKRI

SEQ ID NO: 182070 - protein, 7 aa, synthetic construct
MDPGRRS

SEQ ID NO: 182071 - protein, 7 aa, synthetic construct
QDAQRRA

SEQ ID NO: 182072 - protein, 7 aa, synthetic construct
GDGKRAI

SEQ ID NO: 182073 - protein, 7 aa, synthetic construct
MMGQTRN

SEQ ID NO: 182074 - protein, 7 aa, synthetic construct
QDGSRKI

SEQ ID NO: 182075 - protein, 7 aa, synthetic construct
MKGQYSI

SEQ ID NO: 182076 - protein, 7 aa, synthetic construct
MAGQHRA

SEQ ID NO: 182077 - protein, 7 aa, synthetic construct
TDSQKRI

SEQ ID NO: 182078 - protein, 7 aa, synthetic construct
MAAQRRE

SEQ ID NO: 182079 - protein, 7 aa, synthetic construct
LDGQNRK

SEQ ID NO: 182080 - protein, 7 aa, synthetic construct
SDGIRRA

SEQ ID NO: 182081 - protein, 7 aa, synthetic construct
MDGKVRY

SEQ ID NO: 182082 - protein, 7 aa, synthetic construct
VDGQRPR

SEQ ID NO: 182083 - protein, 7 aa, synthetic construct
MVGQDRK

SEQ ID NO: 182084 - protein, 7 aa, synthetic construct
MTDQRRS

SEQ ID NO: 182085 - protein, 7 aa, synthetic construct
QDGQRPK

SEQ ID NO: 182086 - protein, 7 aa, synthetic construct
HDGKPRI

SEQ ID NO: 182087 - protein, 7 aa, synthetic construct
YDGTKRI

SEQ ID NO: 182088 - protein, 7 aa, synthetic construct
MDSQRVK

SEQ ID NO: 182089 - protein, 7 aa, synthetic construct
RQGQRDI

SEQ ID NO: 182090 - protein, 7 aa, synthetic construct
IDMQRRG

SEQ ID NO: 182091 - protein, 7 aa, synthetic construct
ADGTRKI

SEQ ID NO: 182092 - protein, 7 aa, synthetic construct
ADQQRRP

SEQ ID NO: 182093 - protein, 7 aa, synthetic construct
RDGQSRN

SEQ ID NO: 182094 - protein, 7 aa, synthetic construct
MPGQMRN

SEQ ID NO: 182095 - protein, 7 aa, synthetic construct
MDGQRSR

SEQ ID NO: 182096 - protein, 7 aa, synthetic construct
VDGTRRA

SEQ ID NO: 182097 - protein, 7 aa, synthetic construct
MDAQKRQ

SEQ ID NO: 182098 - protein, 7 aa, synthetic construct
MDTQRRA

SEQ ID NO: 182099 - protein, 7 aa, synthetic construct
MDPPRRQ

SEQ ID NO: 182100 - protein, 7 aa, synthetic construct
LDMQRRS

SEQ ID NO: 182101 - protein, 7 aa, synthetic construct
MDRTTRI

SEQ ID NO: 182102 - protein, 7 aa, synthetic construct
TDGRRTI

SEQ ID NO: 182103 - protein, 7 aa, synthetic construct
IDGIRRA

SEQ ID NO: 182104 - protein, 7 aa, synthetic construct
MDGKQRF

SEQ ID NO: 182105 - protein, 7 aa, synthetic construct
MSGQQRN

SEQ ID NO: 182106 - protein, 7 aa, synthetic construct
MDGARPR

SEQ ID NO: 182107 - protein, 7 aa, synthetic construct
MDGTRKM

SEQ ID NO: 182108 - protein, 7 aa, synthetic construct
MVDQRRT

SEQ ID NO: 182109 - protein, 7 aa, synthetic construct
TDGPRRA

SEQ ID NO: 182110 - protein, 7 aa, synthetic construct
MDTNRRA

SEQ ID NO: 182111 - protein, 7 aa, synthetic construct
MPDTRRI

SEQ ID NO: 182112 - protein, 7 aa, synthetic construct
SIGQRHI

SEQ ID NO: 182113 - protein, 7 aa, synthetic construct
MPNQRRD

SEQ ID NO: 182114 - protein, 7 aa, synthetic construct
ADRQTRI

SEQ ID NO: 182115 - protein, 7 aa, synthetic construct
VDKQRYI

SEQ ID NO: 182116 - protein, 7 aa, synthetic construct
IDGARRA

SEQ ID NO: 182117 - protein, 7 aa, synthetic construct
ITDQRRI

SEQ ID NO: 182118 - protein, 7 aa, synthetic construct
ADGKPRI

SEQ ID NO: 182119 - protein, 7 aa, synthetic construct
MDGKARM

SEQ ID NO: 182120 - protein, 7 aa, synthetic construct
MLDTRRI

SEQ ID NO: 182121 - protein, 7 aa, synthetic construct
GDNQRRP

SEQ ID NO: 182122 - protein, 7 aa, synthetic construct
IDQQRRT

SEQ ID NO: 182123 - protein, 7 aa, synthetic construct
GDSQRKI

SEQ ID NO: 182124 - protein, 7 aa, synthetic construct
YDPQRRQ

SEQ ID NO: 182125 - protein, 7 aa, synthetic construct
MTGPRSI

SEQ ID NO: 182126 - protein, 7 aa, synthetic construct
MNLQRRE

SEQ ID NO: 182127 - protein, 7 aa, synthetic construct
MDGTRVK

SEQ ID NO: 182128 - protein, 7 aa, synthetic construct
SDGRVRI

SEQ ID NO: 182129 - protein, 7 aa, synthetic construct
PDAPRRI

SEQ ID NO: 182130 - protein, 7 aa, synthetic construct
SDIQKRI

SEQ ID NO: 182131 - protein, 7 aa, synthetic construct
MDGQKRN

SEQ ID NO: 182132 - protein, 7 aa, synthetic construct
MDGRMRS

SEQ ID NO: 182133 - protein, 7 aa, synthetic construct
RMGQRDI

SEQ ID NO: 182134 - protein, 7 aa, synthetic construct
YDAQRRI

SEQ ID NO: 182135 - protein, 7 aa, synthetic construct
MDGRPRI

SEQ ID NO: 182136 - protein, 7 aa, synthetic construct
SDGKRQI

SEQ ID NO: 182137 - protein, 7 aa, synthetic construct
MDGKRVY

SEQ ID NO: 182138 - protein, 7 aa, synthetic construct
MDMPRRS

SEQ ID NO: 182139 - protein, 7 aa, synthetic construct
MDRNIRI

SEQ ID NO: 182140 - protein, 7 aa, synthetic construct
PDGQKRV

SEQ ID NO: 182141 - protein, 7 aa, synthetic construct
MDGKVRH

SEQ ID NO: 182142 - protein, 7 aa, synthetic construct
MEGQKRS

SEQ ID NO: 182143 - protein, 7 aa, synthetic construct
RDGHRTI

SEQ ID NO: 182144 - protein, 7 aa, synthetic construct
MEGKLRI

SEQ ID NO: 182145 - protein, 7 aa, synthetic construct
MDNQSRK

SEQ ID NO: 182146 - protein, 7 aa, synthetic construct
MDRQLRA

SEQ ID NO: 182147 - protein, 7 aa, synthetic construct
MDGRRVS

SEQ ID NO: 182148 - protein, 7 aa, synthetic construct
LDVQRRT

SEQ ID NO: 182149 - protein, 7 aa, synthetic construct
VPGQRRE

SEQ ID NO: 182150 - protein, 7 aa, synthetic construct
MDKQYRM

SEQ ID NO: 182151 - protein, 7 aa, synthetic construct
MDGSRMK

SEQ ID NO: 182152 - protein, 7 aa, synthetic construct
MDMQRKS

SEQ ID NO: 182153 - protein, 7 aa, synthetic construct
MHGNRVI

SEQ ID NO: 182154 - protein, 7 aa, synthetic construct
VDTQRRQ

SEQ ID NO: 182155 - protein, 7 aa, synthetic construct
MDGGRKL

SEQ ID NO: 182156 - protein, 7 aa, synthetic construct
MDRQRAV

SEQ ID NO: 182157 - protein, 7 aa, synthetic construct
GDGQRVR

SEQ ID NO: 182158 - protein, 7 aa, synthetic construct
IPDQRRI

SEQ ID NO: 182159 - protein, 7 aa, synthetic construct
MDKMRYI

SEQ ID NO: 182160 - protein, 7 aa, synthetic construct
MDKQPRH

SEQ ID NO: 182161 - protein, 7 aa, synthetic construct
MDGIKRS

SEQ ID NO: 182162 - protein, 7 aa, synthetic construct
YDGQRKS

SEQ ID NO: 182163 - protein, 7 aa, synthetic construct
VDRQSRI

SEQ ID NO: 182164 - protein, 7 aa, synthetic construct
MRGQERV

SEQ ID NO: 182165 - protein, 7 aa, synthetic construct
MEGKRNI

SEQ ID NO: 182166 - protein, 7 aa, synthetic construct
MDAMRRV

SEQ ID NO: 182167 - protein, 7 aa, synthetic construct
LDGQRNK

SEQ ID NO: 182168 - protein, 7 aa, synthetic construct
MDGGRLK

SEQ ID NO: 182169 - protein, 7 aa, synthetic construct
NDRQIRI

SEQ ID NO: 182170 - protein, 7 aa, synthetic construct
MDGARKM

SEQ ID NO: 182171 - protein, 7 aa, synthetic construct
MDGQRKM

SEQ ID NO: 182172 - protein, 7 aa, synthetic construct
DVGQRRV

SEQ ID NO: 182173 - protein, 7 aa, synthetic construct
LDGQARR

SEQ ID NO: 182174 - protein, 7 aa, synthetic construct
MVGQRHA

SEQ ID NO: 182175 - protein, 7 aa, synthetic construct
LDGQRRT

SEQ ID NO: 182176 - protein, 7 aa, synthetic construct
ITGERRI

SEQ ID NO: 182177 - protein, 7 aa, synthetic construct
MEGMRKI

SEQ ID NO: 182178 - protein, 7 aa, synthetic construct
MDQMRRV

SEQ ID NO: 182179 - protein, 7 aa, synthetic construct
ADNVRRI

SEQ ID NO: 182180 - protein, 7 aa, synthetic construct
TDVQRKI

SEQ ID NO: 182181 - protein, 7 aa, synthetic construct
MDGRGRL

SEQ ID NO: 182182 - protein, 7 aa, synthetic construct
MDMVRRA

SEQ ID NO: 182183 - protein, 7 aa, synthetic construct
MDGQKKS

SEQ ID NO: 182184 - protein, 7 aa, synthetic construct
TDGQKRM

SEQ ID NO: 182185 - protein, 7 aa, synthetic construct
MDGKSRF

SEQ ID NO: 182186 - protein, 7 aa, synthetic construct
MDKQVRH

SEQ ID NO: 182187 - protein, 7 aa, synthetic construct
IDGQKRM

SEQ ID NO: 182188 - protein, 7 aa, synthetic construct
MPGQIRA

SEQ ID NO: 182189 - protein, 7 aa, synthetic construct
LDAQRRL

SEQ ID NO: 182190 - protein, 7 aa, synthetic construct
TDGLRRG

SEQ ID NO: 182191 - protein, 7 aa, synthetic construct
SDIQRRV

SEQ ID NO: 182192 - protein, 7 aa, synthetic construct
ADMARRI

SEQ ID NO: 182193 - protein, 7 aa, synthetic construct
TDTQRRL

SEQ ID NO: 182194 - protein, 7 aa, synthetic construct
MDMKVRI

SEQ ID NO: 182195 - protein, 7 aa, synthetic construct
LDNQRRN

SEQ ID NO: 182196 - protein, 7 aa, synthetic construct
IDGQLRK

SEQ ID NO: 182197 - protein, 7 aa, synthetic construct
IDIQRRV

SEQ ID NO: 182198 - protein, 7 aa, synthetic construct
MTGVRRD

SEQ ID NO: 182199 - protein, 7 aa, synthetic construct
MDGVRKQ

SEQ ID NO: 182200 - protein, 7 aa, synthetic construct
MDGKHRT

SEQ ID NO: 182201 - protein, 7 aa, synthetic construct
NDGQVRR

SEQ ID NO: 182202 - protein, 7 aa, synthetic construct
MVEQRRV

SEQ ID NO: 182203 - protein, 7 aa, synthetic construct
NDAQRRA

SEQ ID NO: 182204 - protein, 7 aa, synthetic construct
MDRPQRI

SEQ ID NO: 182205 - protein, 7 aa, synthetic construct
MDAARRS

SEQ ID NO: 182206 - protein, 7 aa, synthetic construct
TLGQRHI

SEQ ID NO: 182207 - protein, 7 aa, synthetic construct
MDIQKRV

SEQ ID NO: 182208 - protein, 7 aa, synthetic construct
YDGQRQK

SEQ ID NO: 182209 - protein, 7 aa, synthetic construct
MDAPRRN

SEQ ID NO: 182210 - protein, 7 aa, synthetic construct
FDAARRI

SEQ ID NO: 182211 - protein, 7 aa, synthetic construct
MDKDRRL

SEQ ID NO: 182212 - protein, 7 aa, synthetic construct
TDGFKRI

SEQ ID NO: 182213 - protein, 7 aa, synthetic construct
SDSVRRI

SEQ ID NO: 182214 - protein, 7 aa, synthetic construct
MAGARHI

SEQ ID NO: 182215 - protein, 7 aa, synthetic construct
ADAQRRV

SEQ ID NO: 182216 - protein, 7 aa, synthetic construct
TDGQIRK

SEQ ID NO: 182217 - protein, 7 aa, synthetic construct
TDGKYRI

SEQ ID NO: 182218 - protein, 7 aa, synthetic construct
SDIQRRP

SEQ ID NO: 182219 - protein, 7 aa, synthetic construct
MDGLRAR

SEQ ID NO: 182220 - protein, 7 aa, synthetic construct
VDMGRRI

SEQ ID NO: 182221 - protein, 7 aa, synthetic construct
IDAPRRI

SEQ ID NO: 182222 - protein, 7 aa, synthetic construct
MRGQNPI

SEQ ID NO: 182223 - protein, 7 aa, synthetic construct
GDGLRRV

SEQ ID NO: 182224 - protein, 7 aa, synthetic construct
STGERRI

SEQ ID NO: 182225 - protein, 7 aa, synthetic construct
TDGIRRG

SEQ ID NO: 182226 - protein, 7 aa, synthetic construct
YDGNRRA

SEQ ID NO: 182227 - protein, 7 aa, synthetic construct
EDKQKRI

SEQ ID NO: 182228 - protein, 7 aa, synthetic construct
MDKMRRD

SEQ ID NO: 182229 - protein, 7 aa, synthetic construct
MDMPRRI

SEQ ID NO: 182230 - protein, 7 aa, synthetic construct
NDMPRRI

SEQ ID NO: 182231 - protein, 7 aa, synthetic construct
MDNGRRQ

SEQ ID NO: 182232 - protein, 7 aa, synthetic construct
TDRQRTI

SEQ ID NO: 182233 - protein, 7 aa, synthetic construct
MDGTQRK

SEQ ID NO: 182234 - protein, 7 aa, synthetic construct
LDGIRRM

SEQ ID NO: 182235 - protein, 7 aa, synthetic construct
SDQQRRG

SEQ ID NO: 182236 - protein, 7 aa, synthetic construct
IDGLRKI

SEQ ID NO: 182237 - protein, 7 aa, synthetic construct
MDGMRKS

SEQ ID NO: 182238 - protein, 7 aa, synthetic construct
MGGQIRA

SEQ ID NO: 182239 - protein, 7 aa, synthetic construct
ADAQRKI

SEQ ID NO: 182240 - protein, 7 aa, synthetic construct
LDGIRRN

SEQ ID NO: 182241 - protein, 7 aa, synthetic construct
NDGVRRV

SEQ ID NO: 182242 - protein, 7 aa, synthetic construct
MTGHARI

SEQ ID NO: 182243 - protein, 7 aa, synthetic construct
MDRNPRI

SEQ ID NO: 182244 - protein, 7 aa, synthetic construct
MDGPRIR

SEQ ID NO: 182245 - protein, 7 aa, synthetic construct
MPETRRI

SEQ ID NO: 182246 - protein, 7 aa, synthetic construct
IDSQRRM

SEQ ID NO: 182247 - protein, 7 aa, synthetic construct
TDGQKRL

SEQ ID NO: 182248 - protein, 7 aa, synthetic construct
MDAQRQK

SEQ ID NO: 182249 - protein, 7 aa, synthetic construct
MSGQLRN

SEQ ID NO: 182250 - protein, 7 aa, synthetic construct
MTGNRYI

SEQ ID NO: 182251 - protein, 7 aa, synthetic construct
MTMQRRE

SEQ ID NO: 182252 - protein, 7 aa, synthetic construct
MDAQRRG

SEQ ID NO: 182253 - protein, 7 aa, synthetic construct
MMGQTRP

SEQ ID NO: 182254 - protein, 7 aa, synthetic construct
MDGMRKA

SEQ ID NO: 182255 - protein, 7 aa, synthetic construct
FDPQRRV

SEQ ID NO: 182256 - protein, 7 aa, synthetic construct
KDEIRRI

SEQ ID NO: 182257 - protein, 7 aa, synthetic construct
MMDSRRI

SEQ ID NO: 182258 - protein, 7 aa, synthetic construct
MDLQRKI

SEQ ID NO: 182259 - protein, 7 aa, synthetic construct
MVTQRRE

SEQ ID NO: 182260 - protein, 7 aa, synthetic construct
NIGERRI

SEQ ID NO: 182261 - protein, 7 aa, synthetic construct
SDGVKRI

SEQ ID NO: 182262 - protein, 7 aa, synthetic construct
MDGAIRK

SEQ ID NO: 182263 - protein, 7 aa, synthetic construct
GDTQRRG

SEQ ID NO: 182264 - protein, 7 aa, synthetic construct
MPGDRRA

SEQ ID NO: 182265 - protein, 7 aa, synthetic construct
MARQRDI

SEQ ID NO: 182266 - protein, 7 aa, synthetic construct
MEGKFRI

SEQ ID NO: 182267 - protein, 7 aa, synthetic construct
YDAQRRT

SEQ ID NO: 182268 - protein, 7 aa, synthetic construct
MDLNRRG

SEQ ID NO: 182269 - protein, 7 aa, synthetic construct
MDGSKRV

SEQ ID NO: 182270 - protein, 7 aa, synthetic construct
RDGQRHA

SEQ ID NO: 182271 - protein, 7 aa, synthetic construct
MDGKPRQ

SEQ ID NO: 182272 - protein, 7 aa, synthetic construct
YDGAKRI

SEQ ID NO: 182273 - protein, 7 aa, synthetic construct
MDGIKRN

SEQ ID NO: 182274 - protein, 7 aa, synthetic construct
NDNQRRA

SEQ ID NO: 182275 - protein, 7 aa, synthetic construct
LDGVRRV

SEQ ID NO: 182276 - protein, 7 aa, synthetic construct
MDGLRKT

SEQ ID NO: 182277 - protein, 7 aa, synthetic construct
TDTQRRI

SEQ ID NO: 182278 - protein, 7 aa, synthetic construct
QDKQPRI

SEQ ID NO: 182279 - protein, 7 aa, synthetic construct
TDNQRRV

SEQ ID NO: 182280 - protein, 7 aa, synthetic construct
MDLTRRG

SEQ ID NO: 182281 - protein, 7 aa, synthetic construct
VDGQKRY

SEQ ID NO: 182282 - protein, 7 aa, synthetic construct
YDTTRRI

SEQ ID NO: 182283 - protein, 7 aa, synthetic construct
LDGKRYI

SEQ ID NO: 182284 - protein, 7 aa, synthetic construct
MDGKIRY

SEQ ID NO: 182285 - protein, 7 aa, synthetic construct
MPGQARG

SEQ ID NO: 182286 - protein, 7 aa, synthetic construct
MDDKRRT

SEQ ID NO: 182287 - protein, 7 aa, synthetic construct
MRNQRDI

SEQ ID NO: 182288 - protein, 7 aa, synthetic construct
IDGQRSK

SEQ ID NO: 182289 - protein, 7 aa, synthetic construct
MFGQSKI

SEQ ID NO: 182290 - protein, 7 aa, synthetic construct
DTAQRRI

SEQ ID NO: 182291 - protein, 7 aa, synthetic construct
MAGQRHG

SEQ ID NO: 182292 - protein, 7 aa, synthetic construct
MHGQQRG

SEQ ID NO: 182293 - protein, 7 aa, synthetic construct
IDGKPRI

SEQ ID NO: 182294 - protein, 7 aa, synthetic construct
YDAQRRA

SEQ ID NO: 182295 - protein, 7 aa, synthetic construct
MSGLRRE

SEQ ID NO: 182296 - protein, 7 aa, synthetic construct
TDTNRRI

SEQ ID NO: 182297 - protein, 7 aa, synthetic construct
MDQGRRG

SEQ ID NO: 182298 - protein, 7 aa, synthetic construct
MMGSRHI

SEQ ID NO: 182299 - protein, 7 aa, synthetic construct
FDGQRVR

SEQ ID NO: 182300 - protein, 7 aa, synthetic construct
NDNQRRT

SEQ ID NO: 182301 - protein, 7 aa, synthetic construct
MEGTKRI

SEQ ID NO: 182302 - protein, 7 aa, synthetic construct
MQGNRRE

SEQ ID NO: 182303 - protein, 7 aa, synthetic construct
YDIQRRA

SEQ ID NO: 182304 - protein, 7 aa, synthetic construct
SDTQRKI

SEQ ID NO: 182305 - protein, 7 aa, synthetic construct
MTGLRRE

SEQ ID NO: 182306 - protein, 7 aa, synthetic construct
IDVQRRV

SEQ ID NO: 182307 - protein, 7 aa, synthetic construct
MIGDRRN

SEQ ID NO: 182308 - protein, 7 aa, synthetic construct
SDGLRRA

SEQ ID NO: 182309 - protein, 7 aa, synthetic construct
MATERRI

SEQ ID NO: 182310 - protein, 7 aa, synthetic construct
MDGAKRG

SEQ ID NO: 182311 - protein, 7 aa, synthetic construct
MDGRRNV

SEQ ID NO: 182312 - protein, 7 aa, synthetic construct
PDGQRVK

SEQ ID NO: 182313 - protein, 7 aa, synthetic construct
PDQQRRS

SEQ ID NO: 182314 - protein, 7 aa, synthetic construct
TDGQPRK

SEQ ID NO: 182315 - protein, 7 aa, synthetic construct
ALDQRRI

SEQ ID NO: 182316 - protein, 7 aa, synthetic construct
KDGQHRS

SEQ ID NO: 182317 - protein, 7 aa, synthetic construct
NDGQRSK

SEQ ID NO: 182318 - protein, 7 aa, synthetic construct
NDAIRRI

SEQ ID NO: 182319 - protein, 7 aa, synthetic construct
MRGQVQI

SEQ ID NO: 182320 - protein, 7 aa, synthetic construct
IDGQKRS

SEQ ID NO: 182321 - protein, 7 aa, synthetic construct
MPGHRSI

SEQ ID NO: 182322 - protein, 7 aa, synthetic construct
MPGQIRN

SEQ ID NO: 182323 - protein, 7 aa, synthetic construct
MDQLRRG

SEQ ID NO: 182324 - protein, 7 aa, synthetic construct
MVDQRRQ

SEQ ID NO: 182325 - protein, 7 aa, synthetic construct
MLGDRRQ

SEQ ID NO: 182326 - protein, 7 aa, synthetic construct
IDGLRRQ

SEQ ID NO: 182327 - protein, 7 aa, synthetic construct
QDGVRRS

SEQ ID NO: 182328 - protein, 7 aa, synthetic construct
MQGRRDI

SEQ ID NO: 182329 - protein, 7 aa, synthetic construct
MDANRRM

SEQ ID NO: 182330 - protein, 7 aa, synthetic construct
MAGPRNI

SEQ ID NO: 182331 - protein, 7 aa, synthetic construct
MTGGHRI

SEQ ID NO: 182332 - protein, 7 aa, synthetic construct
ADPQRRG

SEQ ID NO: 182333 - protein, 7 aa, synthetic construct
MDGRRGM

SEQ ID NO: 182334 - protein, 7 aa, synthetic construct
LDIQRRQ

SEQ ID NO: 182335 - protein, 7 aa, synthetic construct
NDVQRRV

SEQ ID NO: 182336 - protein, 7 aa, synthetic construct
MMGQVRA

SEQ ID NO: 182337 - protein, 7 aa, synthetic construct
MDGRARP

SEQ ID NO: 182338 - protein, 7 aa, synthetic construct
DTTQRRI

SEQ ID NO: 182339 - protein, 7 aa, synthetic construct
FDGKARI

SEQ ID NO: 182340 - protein, 7 aa, synthetic construct
TDAARRI

SEQ ID NO: 182341 - protein, 7 aa, synthetic construct
MRGERII

SEQ ID NO: 182342 - protein, 7 aa, synthetic construct
MENNRRI

SEQ ID NO: 182343 - protein, 7 aa, synthetic construct
GDNQRRA

SEQ ID NO: 182344 - protein, 7 aa, synthetic construct
MIGQTRN

SEQ ID NO: 182345 - protein, 7 aa, synthetic construct
MDPQRGR

SEQ ID NO: 182346 - protein, 7 aa, synthetic construct
IENQRRI

SEQ ID NO: 182347 - protein, 7 aa, synthetic construct
NDAQRRP

SEQ ID NO: 182348 - protein, 7 aa, synthetic construct
MDLARRV

SEQ ID NO: 182349 - protein, 7 aa, synthetic construct
LDNQRRI

SEQ ID NO: 182350 - protein, 7 aa, synthetic construct
MDGVRKG

SEQ ID NO: 182351 - protein, 7 aa, synthetic construct
MDQQKRY

SEQ ID NO: 182352 - protein, 7 aa, synthetic construct
PDAQRRV

SEQ ID NO: 182353 - protein, 7 aa, synthetic construct
GDTQRRA

SEQ ID NO: 182354 - protein, 7 aa, synthetic construct
SDGKRMI

SEQ ID NO: 182355 - protein, 7 aa, synthetic construct
MDMQKRQ

SEQ ID NO: 182356 - protein, 7 aa, synthetic construct
MSGQSRS

SEQ ID NO: 182357 - protein, 7 aa, synthetic construct
MSGRERI

SEQ ID NO: 182358 - protein, 7 aa, synthetic construct
LDGVRRM

SEQ ID NO: 182359 - protein, 7 aa, synthetic construct
IDMGRRI

SEQ ID NO: 182360 - protein, 7 aa, synthetic construct
SDGQKRG

SEQ ID NO: 182361 - protein, 7 aa, synthetic construct
MIGQHRA

SEQ ID NO: 182362 - protein, 7 aa, synthetic construct
MDGPRLK

SEQ ID NO: 182363 - protein, 7 aa, synthetic construct
MHGQTRA

SEQ ID NO: 182364 - protein, 7 aa, synthetic construct
MDQRPRI

SEQ ID NO: 182365 - protein, 7 aa, synthetic construct
IDGVRRL

SEQ ID NO: 182366 - protein, 7 aa, synthetic construct
MDNQKRM

SEQ ID NO: 182367 - protein, 7 aa, synthetic construct
ARGQRDI

SEQ ID NO: 182368 - protein, 7 aa, synthetic construct
FDGQRAK

SEQ ID NO: 182369 - protein, 7 aa, synthetic construct
TDGSKRI

SEQ ID NO: 182370 - protein, 7 aa, synthetic construct
MDKPHRI

SEQ ID NO: 182371 - protein, 7 aa, synthetic construct
MDVQKRA

SEQ ID NO: 182372 - protein, 7 aa, synthetic construct
NDGQRSR

SEQ ID NO: 182373 - protein, 7 aa, synthetic construct
MRGQAAI

SEQ ID NO: 182374 - protein, 7 aa, synthetic construct
TEQQRRI

SEQ ID NO: 182375 - protein, 7 aa, synthetic construct
LDAQRRN

SEQ ID NO: 182376 - protein, 7 aa, synthetic construct
VDGQRKQ

SEQ ID NO: 182377 - protein, 7 aa, synthetic construct
YDTQRRG

SEQ ID NO: 182378 - protein, 7 aa, synthetic construct
MDGPRKY

SEQ ID NO: 182379 - protein, 7 aa, synthetic construct
MDKQIRN

SEQ ID NO: 182380 - protein, 7 aa, synthetic construct
MDGPKRN

SEQ ID NO: 182381 - protein, 7 aa, synthetic construct
IDGQRNK

SEQ ID NO: 182382 - protein, 7 aa, synthetic construct
IDGQIRR

SEQ ID NO: 182383 - protein, 7 aa, synthetic construct
MDNPRRP

SEQ ID NO: 182384 - protein, 7 aa, synthetic construct
MIGNHRI

SEQ ID NO: 182385 - protein, 7 aa, synthetic construct
VDTQRRS

SEQ ID NO: 182386 - protein, 7 aa, synthetic construct
QDGVRRP

SEQ ID NO: 182387 - protein, 7 aa, synthetic construct
NDGKRTI

SEQ ID NO: 182388 - protein, 7 aa, synthetic construct
MDGIRKY

SEQ ID NO: 182389 - protein, 7 aa, synthetic construct
IDVSRRI

SEQ ID NO: 182390 - protein, 7 aa, synthetic construct
TLGQRRE

SEQ ID NO: 182391 - protein, 7 aa, synthetic construct
MDSQRAK

SEQ ID NO: 182392 - protein, 7 aa, synthetic construct
MAEPRRI

SEQ ID NO: 182393 - protein, 7 aa, synthetic construct
IDIQRRQ

SEQ ID NO: 182394 - protein, 7 aa, synthetic construct
MAGPRHI

SEQ ID NO: 182395 - protein, 7 aa, synthetic construct
MSGQRHG

SEQ ID NO: 182396 - protein, 7 aa, synthetic construct
TDGTRRV

SEQ ID NO: 182397 - protein, 7 aa, synthetic construct
MAGVRRE

SEQ ID NO: 182398 - protein, 7 aa, synthetic construct
MQGQTRP

SEQ ID NO: 182399 - protein, 7 aa, synthetic construct
MRGQERQ

SEQ ID NO: 182400 - protein, 7 aa, synthetic construct
MDSQKRQ

SEQ ID NO: 182401 - protein, 7 aa, synthetic construct
MDGNKRT

SEQ ID NO: 182402 - protein, 7 aa, synthetic construct
QDGQRLK

SEQ ID NO: 182403 - protein, 7 aa, synthetic construct
MDNIRRA

SEQ ID NO: 182404 - protein, 7 aa, synthetic construct
TDGMRRG

SEQ ID NO: 182405 - protein, 7 aa, synthetic construct
LDIQRRA

SEQ ID NO: 182406 - protein, 7 aa, synthetic construct
MSGRREI

SEQ ID NO: 182407 - protein, 7 aa, synthetic construct
VDRQVRI

SEQ ID NO: 182408 - protein, 7 aa, synthetic construct
LDSPRRI

SEQ ID NO: 182409 - protein, 7 aa, synthetic construct
DMGQKRI

SEQ ID NO: 182410 - protein, 7 aa, synthetic construct
MDGTRSK

SEQ ID NO: 182411 - protein, 7 aa, synthetic construct
DDKQRRP

SEQ ID NO: 182412 - protein, 7 aa, synthetic construct
VDTQRRI

SEQ ID NO: 182413 - protein, 7 aa, synthetic construct
MDGMRPR

SEQ ID NO: 182414 - protein, 7 aa, synthetic construct
MDTQARR

SEQ ID NO: 182415 - protein, 7 aa, synthetic construct
MQGMRRE

SEQ ID NO: 182416 - protein, 7 aa, synthetic construct
ILDQRRI

SEQ ID NO: 182417 - protein, 7 aa, synthetic construct
MDRQKVI

SEQ ID NO: 182418 - protein, 7 aa, synthetic construct
MDRARTI

SEQ ID NO: 182419 - protein, 7 aa, synthetic construct
MDGLKRQ

SEQ ID NO: 182420 - protein, 7 aa, synthetic construct
IDSQRRS

SEQ ID NO: 182421 - protein, 7 aa, synthetic construct
MTGQRGN

SEQ ID NO: 182422 - protein, 7 aa, synthetic construct
MPGQRHN

SEQ ID NO: 182423 - protein, 7 aa, synthetic construct
MDKYARI

SEQ ID NO: 182424 - protein, 7 aa, synthetic construct
MDAQRRT

SEQ ID NO: 182425 - protein, 7 aa, synthetic construct
MDKQRFS

SEQ ID NO: 182426 - protein, 7 aa, synthetic construct
MIGQLRN

SEQ ID NO: 182427 - protein, 7 aa, synthetic construct
GDKQRHI

SEQ ID NO: 182428 - protein, 7 aa, synthetic construct
SDNQRRS

SEQ ID NO: 182429 - protein, 7 aa, synthetic construct
IDGMRRQ

SEQ ID NO: 182430 - protein, 7 aa, synthetic construct
MDQQKRQ

SEQ ID NO: 182431 - protein, 7 aa, synthetic construct
MAGQRDK

SEQ ID NO: 182432 - protein, 7 aa, synthetic construct
EKGQRFI

SEQ ID NO: 182433 - protein, 7 aa, synthetic construct
SDGPKRI

SEQ ID NO: 182434 - protein, 7 aa, synthetic construct
MSGQRHV

SEQ ID NO: 182435 - protein, 7 aa, synthetic construct
LDIQRRT

SEQ ID NO: 182436 - protein, 7 aa, synthetic construct
MDKSRYI

SEQ ID NO: 182437 - protein, 7 aa, synthetic construct
ADGQRMK

SEQ ID NO: 182438 - protein, 7 aa, synthetic construct
MDVPRRT

SEQ ID NO: 182439 - protein, 7 aa, synthetic construct
VDTMRRI

SEQ ID NO: 182440 - protein, 7 aa, synthetic construct
MDRPRSI

SEQ ID NO: 182441 - protein, 7 aa, synthetic construct
GDGVRKI

SEQ ID NO: 182442 - protein, 7 aa, synthetic construct
TDGRMRI

SEQ ID NO: 182443 - protein, 7 aa, synthetic construct
MEPTRRI

SEQ ID NO: 182444 - protein, 7 aa, synthetic construct
EIGQKRI

SEQ ID NO: 182445 - protein, 7 aa, synthetic construct
ADGGRKI

SEQ ID NO: 182446 - protein, 7 aa, synthetic construct
MDNARRL

SEQ ID NO: 182447 - protein, 7 aa, synthetic construct
MDGLKRV

SEQ ID NO: 182448 - protein, 7 aa, synthetic construct
ADGNKRI

SEQ ID NO: 182449 - protein, 7 aa, synthetic construct
MPGDRRL

SEQ ID NO: 182450 - protein, 7 aa, synthetic construct
MGGGHRI

SEQ ID NO: 182451 - protein, 7 aa, synthetic construct
MAGRRDI

SEQ ID NO: 182452 - protein, 7 aa, synthetic construct
MKGQRND

SEQ ID NO: 182453 - protein, 7 aa, synthetic construct
VDMQRRG

SEQ ID NO: 182454 - protein, 7 aa, synthetic construct
GDGKRLI

SEQ ID NO: 182455 - protein, 7 aa, synthetic construct
MDGQNRK

SEQ ID NO: 182456 - protein, 7 aa, synthetic construct
MEPQRRN

SEQ ID NO: 182457 - protein, 7 aa, synthetic construct
LDGTRRI

SEQ ID NO: 182458 - protein, 7 aa, synthetic construct
MHGQLRG

SEQ ID NO: 182459 - protein, 7 aa, synthetic construct
GDGKSRI

SEQ ID NO: 182460 - protein, 7 aa, synthetic construct
GDQQRRP

SEQ ID NO: 182461 - protein, 7 aa, synthetic construct
FDKQVRI

SEQ ID NO: 182462 - protein, 7 aa, synthetic construct
TDGKNRI

SEQ ID NO: 182463 - protein, 7 aa, synthetic construct
FDGVRRQ

SEQ ID NO: 182464 - protein, 7 aa, synthetic construct
IDGQRIR

SEQ ID NO: 182465 - protein, 7 aa, synthetic construct
TDRQQRI

SEQ ID NO: 182466 - protein, 7 aa, synthetic construct
MDSGRRI

SEQ ID NO: 182467 - protein, 7 aa, synthetic construct
LDTQRRI

SEQ ID NO: 182468 - protein, 7 aa, synthetic construct
IGGQHRI

SEQ ID NO: 182469 - protein, 7 aa, synthetic construct
IDGMRRI

SEQ ID NO: 182470 - protein, 7 aa, synthetic construct
MDGGRKQ

SEQ ID NO: 182471 - protein, 7 aa, synthetic construct
LDGIRRS

SEQ ID NO: 182472 - protein, 7 aa, synthetic construct
MDNLRRV

SEQ ID NO: 182473 - protein, 7 aa, synthetic construct
MDGRRSI

SEQ ID NO: 182474 - protein, 7 aa, synthetic construct
MDMTRRA

SEQ ID NO: 182475 - protein, 7 aa, synthetic construct
MTGDRRG

SEQ ID NO: 182476 - protein, 7 aa, synthetic construct
MDKFARI

SEQ ID NO: 182477 - protein, 7 aa, synthetic construct
ADQQRKI

SEQ ID NO: 182478 - protein, 7 aa, synthetic construct
IDLQRRG

SEQ ID NO: 182479 - protein, 7 aa, synthetic construct
MDKGYRI

SEQ ID NO: 182480 - protein, 7 aa, synthetic construct
QDNQRRS

SEQ ID NO: 182481 - protein, 7 aa, synthetic construct
IDVQRRN

SEQ ID NO: 182482 - protein, 7 aa, synthetic construct
MDGMKRF

SEQ ID NO: 182483 - protein, 7 aa, synthetic construct
VDGQRMR

SEQ ID NO: 182484 - protein, 7 aa, synthetic construct
MDGKSRI

SEQ ID NO: 182485 - protein, 7 aa, synthetic construct
FDGTKRI

SEQ ID NO: 182486 - protein, 7 aa, synthetic construct
ADGARKI

SEQ ID NO: 182487 - protein, 7 aa, synthetic construct
MDVARRG

SEQ ID NO: 182488 - protein, 7 aa, synthetic construct
MDGKTRF

SEQ ID NO: 182489 - protein, 7 aa, synthetic construct
FDANRRI

SEQ ID NO: 182490 - protein, 7 aa, synthetic construct
ADGVRRV

SEQ ID NO: 182491 - protein, 7 aa, synthetic construct
MVGERRG

SEQ ID NO: 182492 - protein, 7 aa, synthetic construct
LDGQRKQ

SEQ ID NO: 182493 - protein, 7 aa, synthetic construct
LDGQRRQ

SEQ ID NO: 182494 - protein, 7 aa, synthetic construct
QDPQRRG

SEQ ID NO: 182495 - protein, 7 aa, synthetic construct
MDGKYRG

SEQ ID NO: 182496 - protein, 7 aa, synthetic construct
MIGQIRP

SEQ ID NO: 182497 - protein, 7 aa, synthetic construct
IDGNRRN

SEQ ID NO: 182498 - protein, 7 aa, synthetic construct
IDANRRI

SEQ ID NO: 182499 - protein, 7 aa, synthetic construct
MRGQNNI

SEQ ID NO: 182500 - protein, 7 aa, synthetic construct
NDGQGRK

SEQ ID NO: 182501 - protein, 7 aa, synthetic construct
GPDQRRI

SEQ ID NO: 182502 - protein, 7 aa, synthetic construct
MTGPRAI

SEQ ID NO: 182503 - protein, 7 aa, synthetic construct
MDAPRRI

SEQ ID NO: 182504 - protein, 7 aa, synthetic construct
MDAVRRI

SEQ ID NO: 182505 - protein, 7 aa, synthetic construct
FDGQKRL

SEQ ID NO: 182506 - protein, 7 aa, synthetic construct
MDKGHRI

SEQ ID NO: 182507 - protein, 7 aa, synthetic construct
MIGQMRS

SEQ ID NO: 182508 - protein, 7 aa, synthetic construct
PDGQKRT

SEQ ID NO: 182509 - protein, 7 aa, synthetic construct
MAGQSRG

SEQ ID NO: 182510 - protein, 7 aa, synthetic construct
VDGQRKY

SEQ ID NO: 182511 - protein, 7 aa, synthetic construct
ADQQRRG

SEQ ID NO: 182512 - protein, 7 aa, synthetic construct
QDGTRRA

SEQ ID NO: 182513 - protein, 7 aa, synthetic construct
YDNQRRA

SEQ ID NO: 182514 - protein, 7 aa, synthetic construct
MDGRRSV

SEQ ID NO: 182515 - protein, 7 aa, synthetic construct
MDGKIRT

SEQ ID NO: 182516 - protein, 7 aa, synthetic construct
VDIQRRT

SEQ ID NO: 182517 - protein, 7 aa, synthetic construct
TMGQRRE

SEQ ID NO: 182518 - protein, 7 aa, synthetic construct
LEGQKRI

SEQ ID NO: 182519 - protein, 7 aa, synthetic construct
MDGMRKI

SEQ ID NO: 182520 - protein, 7 aa, synthetic construct
MDGTKRN

SEQ ID NO: 182521 - protein, 7 aa, synthetic construct
NDGPRRG

SEQ ID NO: 182522 - protein, 7 aa, synthetic construct
MDSMRRV

SEQ ID NO: 182523 - protein, 7 aa, synthetic construct
MTGAHRI

SEQ ID NO: 182524 - protein, 7 aa, synthetic construct
ADTQRKI

SEQ ID NO: 182525 - protein, 7 aa, synthetic construct
MDGIKRM

SEQ ID NO: 182526 - protein, 7 aa, synthetic construct
MVPHQRQ

SEQ ID NO: 182527 - protein, 7 aa, synthetic construct
HEPKQRL

SEQ ID NO: 182528 - protein, 7 aa, synthetic construct
MEMRQKT

SEQ ID NO: 182529 - protein, 7 aa, synthetic construct
MIPNQRA

SEQ ID NO: 182530 - protein, 7 aa, synthetic construct
MEKRVIT

SEQ ID NO: 182531 - protein, 7 aa, synthetic construct
GEPRQMK

SEQ ID NO: 182532 - protein, 7 aa, synthetic construct
IEPLRRT

SEQ ID NO: 182533 - protein, 7 aa, synthetic construct
DLPRQRP

SEQ ID NO: 182534 - protein, 7 aa, synthetic construct
TETKQRT

SEQ ID NO: 182535 - protein, 7 aa, synthetic construct
MEPRPRP

SEQ ID NO: 182536 - protein, 7 aa, synthetic construct
MGPRERQ

SEQ ID NO: 182537 - protein, 7 aa, synthetic construct
KESRQTT

SEQ ID NO: 182538 - protein, 7 aa, synthetic construct
LESRQKT

SEQ ID NO: 182539 - protein, 7 aa, synthetic construct
TEPRNRG

SEQ ID NO: 182540 - protein, 7 aa, synthetic construct
MPPHQRG

SEQ ID NO: 182541 - protein, 7 aa, synthetic construct
MVPRQQM

SEQ ID NO: 182542 - protein, 7 aa, synthetic construct
PVPRDRT

SEQ ID NO: 182543 - protein, 7 aa, synthetic construct
MENRIRV

SEQ ID NO: 182544 - protein, 7 aa, synthetic construct
PEPKPRT

SEQ ID NO: 182545 - protein, 7 aa, synthetic construct
MEKRLAT

SEQ ID NO: 182546 - protein, 7 aa, synthetic construct
TEPRLRI

SEQ ID NO: 182547 - protein, 7 aa, synthetic construct
MEKRQQH

SEQ ID NO: 182548 - protein, 7 aa, synthetic construct
SEPKPRT

SEQ ID NO: 182549 - protein, 7 aa, synthetic construct
PEPRIKT

SEQ ID NO: 182550 - protein, 7 aa, synthetic construct
DPVRQRT

SEQ ID NO: 182551 - protein, 7 aa, synthetic construct
YEPRIRT

SEQ ID NO: 182552 - protein, 7 aa, synthetic construct
LETRQRN

SEQ ID NO: 182553 - protein, 7 aa, synthetic construct
NLPRERT

SEQ ID NO: 182554 - protein, 7 aa, synthetic construct
VEPRYKT

SEQ ID NO: 182555 - protein, 7 aa, synthetic construct
KEHNQRT

SEQ ID NO: 182556 - protein, 7 aa, synthetic construct
MDPAQRK

SEQ ID NO: 182557 - protein, 7 aa, synthetic construct
REPRQNT

SEQ ID NO: 182558 - protein, 7 aa, synthetic construct
MEVRLRN

SEQ ID NO: 182559 - protein, 7 aa, synthetic construct
YEPKQRN

SEQ ID NO: 182560 - protein, 7 aa, synthetic construct
MLPRDRL

SEQ ID NO: 182561 - protein, 7 aa, synthetic construct
TDPRNRT

SEQ ID NO: 182562 - protein, 7 aa, synthetic construct
MPERLRT

SEQ ID NO: 182563 - protein, 7 aa, synthetic construct
MLPRERT

SEQ ID NO: 182564 - protein, 7 aa, synthetic construct
GTDRQRT

SEQ ID NO: 182565 - protein, 7 aa, synthetic construct
KEHRQIT

SEQ ID NO: 182566 - protein, 7 aa, synthetic construct
MEPRRNV

SEQ ID NO: 182567 - protein, 7 aa, synthetic construct
VEKRQVT

SEQ ID NO: 182568 - protein, 7 aa, synthetic construct
METRMRV

SEQ ID NO: 182569 - protein, 7 aa, synthetic construct
FEPRQKM

SEQ ID NO: 182570 - protein, 7 aa, synthetic construct
QEPRVRI

SEQ ID NO: 182571 - protein, 7 aa, synthetic construct
EKPRQGT

SEQ ID NO: 182572 - protein, 7 aa, synthetic construct
KEPHQRS

SEQ ID NO: 182573 - protein, 7 aa, synthetic construct
MEPRVNR

SEQ ID NO: 182574 - protein, 7 aa, synthetic construct
VEPRIRA

SEQ ID NO: 182575 - protein, 7 aa, synthetic construct
MIDRQRM

SEQ ID NO: 182576 - protein, 7 aa, synthetic construct
MTPEQRK

SEQ ID NO: 182577 - protein, 7 aa, synthetic construct
MLPRQER

SEQ ID NO: 182578 - protein, 7 aa, synthetic construct
MEARQRG

SEQ ID NO: 182579 - protein, 7 aa, synthetic construct
YETRQRN

SEQ ID NO: 182580 - protein, 7 aa, synthetic construct
IEPRTRI

SEQ ID NO: 182581 - protein, 7 aa, synthetic construct
TEMRPRT

SEQ ID NO: 182582 - protein, 7 aa, synthetic construct
MENTQRK

SEQ ID NO: 182583 - protein, 7 aa, synthetic construct
IEPRMRG

SEQ ID NO: 182584 - protein, 7 aa, synthetic construct
REPLHRT

SEQ ID NO: 182585 - protein, 7 aa, synthetic construct
MEPIRRQ

SEQ ID NO: 182586 - protein, 7 aa, synthetic construct
NEPRPRN

SEQ ID NO: 182587 - protein, 7 aa, synthetic construct
MERIQRV

SEQ ID NO: 182588 - protein, 7 aa, synthetic construct
FETRQKT

SEQ ID NO: 182589 - protein, 7 aa, synthetic construct
HDPRQRV

SEQ ID NO: 182590 - protein, 7 aa, synthetic construct
DIPRNRT

SEQ ID NO: 182591 - protein, 7 aa, synthetic construct
TADRQRT

SEQ ID NO: 182592 - protein, 7 aa, synthetic construct
METRGRV

SEQ ID NO: 182593 - protein, 7 aa, synthetic construct
LESRVRT

SEQ ID NO: 182594 - protein, 7 aa, synthetic construct
QEVRQRP

SEQ ID NO: 182595 - protein, 7 aa, synthetic construct
STDRQRT

SEQ ID NO: 182596 - protein, 7 aa, synthetic construct
LEIRQRN

SEQ ID NO: 182597 - protein, 7 aa, synthetic construct
LEMRQRA

SEQ ID NO: 182598 - protein, 7 aa, synthetic construct
MKMRQET

SEQ ID NO: 182599 - protein, 7 aa, synthetic construct
MMPRVRE

SEQ ID NO: 182600 - protein, 7 aa, synthetic construct
MHPRPAT

SEQ ID NO: 182601 - protein, 7 aa, synthetic construct
GEPRNRV

SEQ ID NO: 182602 - protein, 7 aa, synthetic construct
MMPRHST

SEQ ID NO: 182603 - protein, 7 aa, synthetic construct
SSPRDRT

SEQ ID NO: 182604 - protein, 7 aa, synthetic construct
NEARQRV

SEQ ID NO: 182605 - protein, 7 aa, synthetic construct
MVPRQHT

SEQ ID NO: 182606 - protein, 7 aa, synthetic construct
MQPRDRL

SEQ ID NO: 182607 - protein, 7 aa, synthetic construct
MEMRIKT

SEQ ID NO: 182608 - protein, 7 aa, synthetic construct
MENRQVK

SEQ ID NO: 182609 - protein, 7 aa, synthetic construct
DQPRPRT

SEQ ID NO: 182610 - protein, 7 aa, synthetic construct
MPPRERL

SEQ ID NO: 182611 - protein, 7 aa, synthetic construct
TEIRQRS

SEQ ID NO: 182612 - protein, 7 aa, synthetic construct
TEPRTRA

SEQ ID NO: 182613 - protein, 7 aa, synthetic construct
MEPARRN

SEQ ID NO: 182614 - protein, 7 aa, synthetic construct
REPHQRV

SEQ ID NO: 182615 - protein, 7 aa, synthetic construct
DVPRQRT

SEQ ID NO: 182616 - protein, 7 aa, synthetic construct
NEPRPRG

SEQ ID NO: 182617 - protein, 7 aa, synthetic construct
KESRDRT

SEQ ID NO: 182618 - protein, 7 aa, synthetic construct
MEVKART

SEQ ID NO: 182619 - protein, 7 aa, synthetic construct
MERTPRT

SEQ ID NO: 182620 - protein, 7 aa, synthetic construct
MTPRQHM

SEQ ID NO: 182621 - protein, 7 aa, synthetic construct
HEPRVKT

SEQ ID NO: 182622 - protein, 7 aa, synthetic construct
MNPHQRN

SEQ ID NO: 182623 - protein, 7 aa, synthetic construct
MEIKPRT

SEQ ID NO: 182624 - protein, 7 aa, synthetic construct
GEPRMRM

SEQ ID NO: 182625 - protein, 7 aa, synthetic construct
LEPRVRM

SEQ ID NO: 182626 - protein, 7 aa, synthetic construct
FEPRPKT

SEQ ID NO: 182627 - protein, 7 aa, synthetic construct
LEQRLRT

SEQ ID NO: 182628 - protein, 7 aa, synthetic construct
MEGKPRT

SEQ ID NO: 182629 - protein, 7 aa, synthetic construct
PEPRMRS

SEQ ID NO: 182630 - protein, 7 aa, synthetic construct
QETRQRV

SEQ ID NO: 182631 - protein, 7 aa, synthetic construct
DIPRVRT

SEQ ID NO: 182632 - protein, 7 aa, synthetic construct
KEGRQYT

SEQ ID NO: 182633 - protein, 7 aa, synthetic construct
MNPERRT

SEQ ID NO: 182634 - protein, 7 aa, synthetic construct
REPTQRA

SEQ ID NO: 182635 - protein, 7 aa, synthetic construct
LEQRQRP

SEQ ID NO: 182636 - protein, 7 aa, synthetic construct
MLERGRT

SEQ ID NO: 182637 - protein, 7 aa, synthetic construct
TEPTQRR

SEQ ID NO: 182638 - protein, 7 aa, synthetic construct
NEPRVRQ

SEQ ID NO: 182639 - protein, 7 aa, synthetic construct
KENRQNT

SEQ ID NO: 182640 - protein, 7 aa, synthetic construct
MEMRNRS

SEQ ID NO: 182641 - protein, 7 aa, synthetic construct
MEKRVRE

SEQ ID NO: 182642 - protein, 7 aa, synthetic construct
MEPSVRK

SEQ ID NO: 182643 - protein, 7 aa, synthetic construct
IEPRSRG

SEQ ID NO: 182644 - protein, 7 aa, synthetic construct
METRGRT

SEQ ID NO: 182645 - protein, 7 aa, synthetic construct
MEPRTYK

SEQ ID NO: 182646 - protein, 7 aa, synthetic construct
MIPRVRD

SEQ ID NO: 182647 - protein, 7 aa, synthetic construct
MEVRPRS

SEQ ID NO: 182648 - protein, 7 aa, synthetic construct
TEQRQRG

SEQ ID NO: 182649 - protein, 7 aa, synthetic construct
MTTRERT

SEQ ID NO: 182650 - protein, 7 aa, synthetic construct
IEMRNRT

SEQ ID NO: 182651 - protein, 7 aa, synthetic construct
KEPFQRN

SEQ ID NO: 182652 - protein, 7 aa, synthetic construct
MKPRQME

SEQ ID NO: 182653 - protein, 7 aa, synthetic construct
SEKRERT

SEQ ID NO: 182654 - protein, 7 aa, synthetic construct
ELPRQRT

SEQ ID NO: 182655 - protein, 7 aa, synthetic construct
IEQRQRA

SEQ ID NO: 182656 - protein, 7 aa, synthetic construct
REPRDRG

SEQ ID NO: 182657 - protein, 7 aa, synthetic construct
VERMQRT

SEQ ID NO: 182658 - protein, 7 aa, synthetic construct
QEPRVRN

SEQ ID NO: 182659 - protein, 7 aa, synthetic construct
REPVTRT

SEQ ID NO: 182660 - protein, 7 aa, synthetic construct
MAKRQDT

SEQ ID NO: 182661 - protein, 7 aa, synthetic construct
MGLRQRE

SEQ ID NO: 182662 - protein, 7 aa, synthetic construct
MKPRDRD

SEQ ID NO: 182663 - protein, 7 aa, synthetic construct
MEDKKRT

SEQ ID NO: 182664 - protein, 7 aa, synthetic construct
MKPRVDT

SEQ ID NO: 182665 - protein, 7 aa, synthetic construct
MHPRQAN

SEQ ID NO: 182666 - protein, 7 aa, synthetic construct
MQPRTRD

SEQ ID NO: 182667 - protein, 7 aa, synthetic construct
HEPRVRT

SEQ ID NO: 182668 - protein, 7 aa, synthetic construct
NEARQRP

SEQ ID NO: 182669 - protein, 7 aa, synthetic construct
GEPRGRP

SEQ ID NO: 182670 - protein, 7 aa, synthetic construct
NEPRIRS

SEQ ID NO: 182671 - protein, 7 aa, synthetic construct
NVERQRT

SEQ ID NO: 182672 - protein, 7 aa, synthetic construct
MESKQRF

SEQ ID NO: 182673 - protein, 7 aa, synthetic construct
VEQRIRT

SEQ ID NO: 182674 - protein, 7 aa, synthetic construct
MDPRHKT

SEQ ID NO: 182675 - protein, 7 aa, synthetic construct
VELRQKT

SEQ ID NO: 182676 - protein, 7 aa, synthetic construct
TELRVRT

SEQ ID NO: 182677 - protein, 7 aa, synthetic construct
MLPRHNT

SEQ ID NO: 182678 - protein, 7 aa, synthetic construct
PEPIKRT

SEQ ID NO: 182679 - protein, 7 aa, synthetic construct
MEPTQRK

SEQ ID NO: 182680 - protein, 7 aa, synthetic construct
MVERVRT

SEQ ID NO: 182681 - protein, 7 aa, synthetic construct
MESKQRV

SEQ ID NO: 182682 - protein, 7 aa, synthetic construct
QENRQRA

SEQ ID NO: 182683 - protein, 7 aa, synthetic construct
DLPRQRN

SEQ ID NO: 182684 - protein, 7 aa, synthetic construct
ASDRQRT

SEQ ID NO: 182685 - protein, 7 aa, synthetic construct
VEPRPRV

SEQ ID NO: 182686 - protein, 7 aa, synthetic construct
MEKRQQF

SEQ ID NO: 182687 - protein, 7 aa, synthetic construct
MEARQSK

SEQ ID NO: 182688 - protein, 7 aa, synthetic construct
MEPRTGR

SEQ ID NO: 182689 - protein, 7 aa, synthetic construct
VEPRTRT

SEQ ID NO: 182690 - protein, 7 aa, synthetic construct
VQPRERT

SEQ ID NO: 182691 - protein, 7 aa, synthetic construct
MEPRTRN

SEQ ID NO: 182692 - protein, 7 aa, synthetic construct
MELKQRS

SEQ ID NO: 182693 - protein, 7 aa, synthetic construct
MEPKYRQ

SEQ ID NO: 182694 - protein, 7 aa, synthetic construct
NEPRMRS

SEQ ID NO: 182695 - protein, 7 aa, synthetic construct
MDVRQRG

SEQ ID NO: 182696 - protein, 7 aa, synthetic construct
MEKRANT

SEQ ID NO: 182697 - protein, 7 aa, synthetic construct
QEPRARP

SEQ ID NO: 182698 - protein, 7 aa, synthetic construct
MEPQNRK

SEQ ID NO: 182699 - protein, 7 aa, synthetic construct
VENRTRT

SEQ ID NO: 182700 - protein, 7 aa, synthetic construct
AEVRQKT

SEQ ID NO: 182701 - protein, 7 aa, synthetic construct
MEPRIGR

SEQ ID NO: 182702 - protein, 7 aa, synthetic construct
HEKRQLT

SEQ ID NO: 182703 - protein, 7 aa, synthetic construct
ANPRQRE

SEQ ID NO: 182704 - protein, 7 aa, synthetic construct
MELKQRM

SEQ ID NO: 182705 - protein, 7 aa, synthetic construct
VEPRGRT

SEQ ID NO: 182706 - protein, 7 aa, synthetic construct
MEPRVKH

SEQ ID NO: 182707 - protein, 7 aa, synthetic construct
DVPRQRS

SEQ ID NO: 182708 - protein, 7 aa, synthetic construct
HVPRERT

SEQ ID NO: 182709 - protein, 7 aa, synthetic construct
MDTRGRT

SEQ ID NO: 182710 - protein, 7 aa, synthetic construct
MLPRLRD

SEQ ID NO: 182711 - protein, 7 aa, synthetic construct
KEPYQRS

SEQ ID NO: 182712 - protein, 7 aa, synthetic construct
MSDRPRT

SEQ ID NO: 182713 - protein, 7 aa, synthetic construct
MLPRTRE

SEQ ID NO: 182714 - protein, 7 aa, synthetic construct
LEPRQRP

SEQ ID NO: 182715 - protein, 7 aa, synthetic construct
MGVRQRE

SEQ ID NO: 182716 - protein, 7 aa, synthetic construct
LPPRQRD

SEQ ID NO: 182717 - protein, 7 aa, synthetic construct
IEVRQRV

SEQ ID NO: 182718 - protein, 7 aa, synthetic construct
QEPRTRV

SEQ ID NO: 182719 - protein, 7 aa, synthetic construct
LEPRMRQ

SEQ ID NO: 182720 - protein, 7 aa, synthetic construct
MEPRQGR

SEQ ID NO: 182721 - protein, 7 aa, synthetic construct
DSPRIRT

SEQ ID NO: 182722 - protein, 7 aa, synthetic construct
MEKGQRN

SEQ ID NO: 182723 - protein, 7 aa, synthetic construct
DKPIQRT

SEQ ID NO: 182724 - protein, 7 aa, synthetic construct
DAQRQRT

SEQ ID NO: 182725 - protein, 7 aa, synthetic construct
QEGKQRT

SEQ ID NO: 182726 - protein, 7 aa, synthetic construct
YEVRQRQ

SEQ ID NO: 182727 - protein, 7 aa, synthetic construct
QEQRQRA

SEQ ID NO: 182728 - protein, 7 aa, synthetic construct
VIDRQRT

SEQ ID NO: 182729 - protein, 7 aa, synthetic construct
HEPRMRQ

SEQ ID NO: 182730 - protein, 7 aa, synthetic construct
MDPRGRQ

SEQ ID NO: 182731 - protein, 7 aa, synthetic construct
MEKRQMS

SEQ ID NO: 182732 - protein, 7 aa, synthetic construct
IEARTRT

SEQ ID NO: 182733 - protein, 7 aa, synthetic construct
METRTRT

SEQ ID NO: 182734 - protein, 7 aa, synthetic construct
MEPRPRG

SEQ ID NO: 182735 - protein, 7 aa, synthetic construct
REVRQTT

SEQ ID NO: 182736 - protein, 7 aa, synthetic construct
MIDRQRG

SEQ ID NO: 182737 - protein, 7 aa, synthetic construct
MKPDQRW

SEQ ID NO: 182738 - protein, 7 aa, synthetic construct
MELKQRV

SEQ ID NO: 182739 - protein, 7 aa, synthetic construct
AEKRQGT

SEQ ID NO: 182740 - protein, 7 aa, synthetic construct
MEPRAMR

SEQ ID NO: 182741 - protein, 7 aa, synthetic construct
MNPRDRQ

SEQ ID NO: 182742 - protein, 7 aa, synthetic construct
DPPRQRN

SEQ ID NO: 182743 - protein, 7 aa, synthetic construct
IEIRQRS

SEQ ID NO: 182744 - protein, 7 aa, synthetic construct
MKPRDPT

SEQ ID NO: 182745 - protein, 7 aa, synthetic construct
TEIRQRQ

SEQ ID NO: 182746 - protein, 7 aa, synthetic construct
MERPQKT

SEQ ID NO: 182747 - protein, 7 aa, synthetic construct
ADPRQRT

SEQ ID NO: 182748 - protein, 7 aa, synthetic construct
MEPRMHK

SEQ ID NO: 182749 - protein, 7 aa, synthetic construct
LENRTRT

SEQ ID NO: 182750 - protein, 7 aa, synthetic construct
LMERQRT

SEQ ID NO: 182751 - protein, 7 aa, synthetic construct
MEGRIRP

SEQ ID NO: 182752 - protein, 7 aa, synthetic construct
TEKYQRT

SEQ ID NO: 182753 - protein, 7 aa, synthetic construct
MEPRGTR

SEQ ID NO: 182754 - protein, 7 aa, synthetic construct
MEPRNIR

SEQ ID NO: 182755 - protein, 7 aa, synthetic construct
RAPRQDT

SEQ ID NO: 182756 - protein, 7 aa, synthetic construct
MTPRERG

SEQ ID NO: 182757 - protein, 7 aa, synthetic construct
MQGRQRE

SEQ ID NO: 182758 - protein, 7 aa, synthetic construct
MIERQRT

SEQ ID NO: 182759 - protein, 7 aa, synthetic construct
MELRTRP

SEQ ID NO: 182760 - protein, 7 aa, synthetic construct
VEARLRT

SEQ ID NO: 182761 - protein, 7 aa, synthetic construct
LENRPRT

SEQ ID NO: 182762 - protein, 7 aa, synthetic construct
DLPRMRT

SEQ ID NO: 182763 - protein, 7 aa, synthetic construct
EKPRQYT

SEQ ID NO: 182764 - protein, 7 aa, synthetic construct
AEVRQRG

SEQ ID NO: 182765 - protein, 7 aa, synthetic construct
MERPIRT

SEQ ID NO: 182766 - protein, 7 aa, synthetic construct
NEQRQRS

SEQ ID NO: 182767 - protein, 7 aa, synthetic construct
MERVQRS

SEQ ID NO: 182768 - protein, 7 aa, synthetic construct
TETRQRP

SEQ ID NO: 182769 - protein, 7 aa, synthetic construct
MVPRNRE

SEQ ID NO: 182770 - protein, 7 aa, synthetic construct
MIPQQRH

SEQ ID NO: 182771 - protein, 7 aa, synthetic construct
METQKRT

SEQ ID NO: 182772 - protein, 7 aa, synthetic construct
DRPRQMT

SEQ ID NO: 182773 - protein, 7 aa, synthetic construct
IEARQRQ

SEQ ID NO: 182774 - protein, 7 aa, synthetic construct
MEPKGRY

SEQ ID NO: 182775 - protein, 7 aa, synthetic construct
VEPRQRT

SEQ ID NO: 182776 - protein, 7 aa, synthetic construct
REPRHVT

SEQ ID NO: 182777 - protein, 7 aa, synthetic construct
MEKLQRY

SEQ ID NO: 182778 - protein, 7 aa, synthetic construct
DGPRQRV

SEQ ID NO: 182779 - protein, 7 aa, synthetic construct
NPDRQRT

SEQ ID NO: 182780 - protein, 7 aa, synthetic construct
IEPRQQR

SEQ ID NO: 182781 - protein, 7 aa, synthetic construct
MEKRQMV

SEQ ID NO: 182782 - protein, 7 aa, synthetic construct
QEPRQVR

SEQ ID NO: 182783 - protein, 7 aa, synthetic construct
MEQRLRQ

SEQ ID NO: 182784 - protein, 7 aa, synthetic construct
MEQRQMK

SEQ ID NO: 182785 - protein, 7 aa, synthetic construct
DKPQQRT

SEQ ID NO: 182786 - protein, 7 aa, synthetic construct
MTDRQRN

SEQ ID NO: 182787 - protein, 7 aa, synthetic construct
LEPRGRF

SEQ ID NO: 182788 - protein, 7 aa, synthetic construct
TEPRARN

SEQ ID NO: 182789 - protein, 7 aa, synthetic construct
MTERQRQ

SEQ ID NO: 182790 - protein, 7 aa, synthetic construct
QEVRQRG

SEQ ID NO: 182791 - protein, 7 aa, synthetic construct
MEPLRRA

SEQ ID NO: 182792 - protein, 7 aa, synthetic construct
MVPRQNQ

SEQ ID NO: 182793 - protein, 7 aa, synthetic construct
MTERQRA

SEQ ID NO: 182794 - protein, 7 aa, synthetic construct
MVPRSHT

SEQ ID NO: 182795 - protein, 7 aa, synthetic construct
MIPRERS

SEQ ID NO: 182796 - protein, 7 aa, synthetic construct
TEQRQRQ

SEQ ID NO: 182797 - protein, 7 aa, synthetic construct
GEPRQGK

SEQ ID NO: 182798 - protein, 7 aa, synthetic construct
YEKLQRT

SEQ ID NO: 182799 - protein, 7 aa, synthetic construct
IERGQRT

SEQ ID NO: 182800 - protein, 7 aa, synthetic construct
MEVRQGK

SEQ ID NO: 182801 - protein, 7 aa, synthetic construct
MEPQGRK

SEQ ID NO: 182802 - protein, 7 aa, synthetic construct
MEPNRRS

SEQ ID NO: 182803 - protein, 7 aa, synthetic construct
LEGRQRA

SEQ ID NO: 182804 - protein, 7 aa, synthetic construct
YEPRSRQ

SEQ ID NO: 182805 - protein, 7 aa, synthetic construct
MKPRSET

SEQ ID NO: 182806 - protein, 7 aa, synthetic construct
IEGRMRT

SEQ ID NO: 182807 - protein, 7 aa, synthetic construct
MEKNQRF

SEQ ID NO: 182808 - protein, 7 aa, synthetic construct
ARPRQET

SEQ ID NO: 182809 - protein, 7 aa, synthetic construct
MIPSQRH

SEQ ID NO: 182810 - protein, 7 aa, synthetic construct
KEDRSRT

SEQ ID NO: 182811 - protein, 7 aa, synthetic construct
MEKRQVQ

SEQ ID NO: 182812 - protein, 7 aa, synthetic construct
NIERQRT

SEQ ID NO: 182813 - protein, 7 aa, synthetic construct
NEPRQQR

SEQ ID NO: 182814 - protein, 7 aa, synthetic construct
MSPRSRE

SEQ ID NO: 182815 - protein, 7 aa, synthetic construct
IEGRIRT

SEQ ID NO: 182816 - protein, 7 aa, synthetic construct
AEPKQRM

SEQ ID NO: 182817 - protein, 7 aa, synthetic construct
HEPRLKT

SEQ ID NO: 182818 - protein, 7 aa, synthetic construct
DPPRMRT

SEQ ID NO: 182819 - protein, 7 aa, synthetic construct
TEPRARL

SEQ ID NO: 182820 - protein, 7 aa, synthetic construct
MEIRQKA

SEQ ID NO: 182821 - protein, 7 aa, synthetic construct
MMERQRS

SEQ ID NO: 182822 - protein, 7 aa, synthetic construct
THPRQNT

SEQ ID NO: 182823 - protein, 7 aa, synthetic construct
MEPNKRY

SEQ ID NO: 182824 - protein, 7 aa, synthetic construct
DSPRPRT

SEQ ID NO: 182825 - protein, 7 aa, synthetic construct
MQPRGRD

SEQ ID NO: 182826 - protein, 7 aa, synthetic construct
MLPRQIQ

SEQ ID NO: 182827 - protein, 7 aa, synthetic construct
EIPRQRS

SEQ ID NO: 182828 - protein, 7 aa, synthetic construct
IETRQRM

SEQ ID NO: 182829 - protein, 7 aa, synthetic construct
LEGRQRG

SEQ ID NO: 182830 - protein, 7 aa, synthetic construct
MEPKPRA

SEQ ID NO: 182831 - protein, 7 aa, synthetic construct
MEPRVFK

SEQ ID NO: 182832 - protein, 7 aa, synthetic construct
AEPRLRN

SEQ ID NO: 182833 - protein, 7 aa, synthetic construct
METRGRS

SEQ ID NO: 182834 - protein, 7 aa, synthetic construct
TEKRQNT

SEQ ID NO: 182835 - protein, 7 aa, synthetic construct
AEPRLRV

SEQ ID NO: 182836 - protein, 7 aa, synthetic construct
VEPPRRT

SEQ ID NO: 182837 - protein, 7 aa, synthetic construct
LEPRIRG

SEQ ID NO: 182838 - protein, 7 aa, synthetic construct
YEPRMRQ

SEQ ID NO: 182839 - protein, 7 aa, synthetic construct
MRPRTET

SEQ ID NO: 182840 - protein, 7 aa, synthetic construct
MNPRQRE

SEQ ID NO: 182841 - protein, 7 aa, synthetic construct
QEQKQRT

SEQ ID NO: 182842 - protein, 7 aa, synthetic construct
MEPRARG

SEQ ID NO: 182843 - protein, 7 aa, synthetic construct
MDLRGRT

SEQ ID NO: 182844 - protein, 7 aa, synthetic construct
MIPRQSL

SEQ ID NO: 182845 - protein, 7 aa, synthetic construct
IEFKQRT

SEQ ID NO: 182846 - protein, 7 aa, synthetic construct
LERVQRT

SEQ ID NO: 182847 - protein, 7 aa, synthetic construct
DIPRQRM

SEQ ID NO: 182848 - protein, 7 aa, synthetic construct
HNPRQAT

SEQ ID NO: 182849 - protein, 7 aa, synthetic construct
KESRQIT

SEQ ID NO: 182850 - protein, 7 aa, synthetic construct
LEARQRI

SEQ ID NO: 182851 - protein, 7 aa, synthetic construct
MHPRQTN

SEQ ID NO: 182852 - protein, 7 aa, synthetic construct
MPNRQRD

SEQ ID NO: 182853 - protein, 7 aa, synthetic construct
MEKVQRF

SEQ ID NO: 182854 - protein, 7 aa, synthetic construct
MENRQAK

SEQ ID NO: 182855 - protein, 7 aa, synthetic construct
MEGRARV

SEQ ID NO: 182856 - protein, 7 aa, synthetic construct
MEKRSMT

SEQ ID NO: 182857 - protein, 7 aa, synthetic construct
TEARQRI

SEQ ID NO: 182858 - protein, 7 aa, synthetic construct
VENRQRS

SEQ ID NO: 182859 - protein, 7 aa, synthetic construct
YEPKQRQ

SEQ ID NO: 182860 - protein, 7 aa, synthetic construct
MEPRLTR

SEQ ID NO: 182861 - protein, 7 aa, synthetic construct
MEMRLRG

SEQ ID NO: 182862 - protein, 7 aa, synthetic construct
TEPRQRV

SEQ ID NO: 182863 - protein, 7 aa, synthetic construct
VEPRQRG

SEQ ID NO: 182864 - protein, 7 aa, synthetic construct
MNPRHST

SEQ ID NO: 182865 - protein, 7 aa, synthetic construct
MIPRQSG

SEQ ID NO: 182866 - protein, 7 aa, synthetic construct
KEPRPRE

SEQ ID NO: 182867 - protein, 7 aa, synthetic construct
MEPVRRS

SEQ ID NO: 182868 - protein, 7 aa, synthetic construct
KEERPRT

SEQ ID NO: 182869 - protein, 7 aa, synthetic construct
MDPRTRN

SEQ ID NO: 182870 - protein, 7 aa, synthetic construct
MMPRPRE

SEQ ID NO: 182871 - protein, 7 aa, synthetic construct
MTPRQHQ

SEQ ID NO: 182872 - protein, 7 aa, synthetic construct
FEKRQVT

SEQ ID NO: 182873 - protein, 7 aa, synthetic construct
LEQRQRQ

SEQ ID NO: 182874 - protein, 7 aa, synthetic construct
MHPRDRV

SEQ ID NO: 182875 - protein, 7 aa, synthetic construct
MEVRGRI

SEQ ID NO: 182876 - protein, 7 aa, synthetic construct
DIPRQRP

SEQ ID NO: 182877 - protein, 7 aa, synthetic construct
IEKYQRT

SEQ ID NO: 182878 - protein, 7 aa, synthetic construct
MVPRQVG

SEQ ID NO: 182879 - protein, 7 aa, synthetic construct
MEPNTRR

SEQ ID NO: 182880 - protein, 7 aa, synthetic construct
MEPVRRT

SEQ ID NO: 182881 - protein, 7 aa, synthetic construct
QVPRQRE

SEQ ID NO: 182882 - protein, 7 aa, synthetic construct
SEPRLRA

SEQ ID NO: 182883 - protein, 7 aa, synthetic construct
SEPRGRS

SEQ ID NO: 182884 - protein, 7 aa, synthetic construct
MEKQHRT

SEQ ID NO: 182885 - protein, 7 aa, synthetic construct
TEMRQKT

SEQ ID NO: 182886 - protein, 7 aa, synthetic construct
IEPRTRT

SEQ ID NO: 182887 - protein, 7 aa, synthetic construct
IHPRERT

SEQ ID NO: 182888 - protein, 7 aa, synthetic construct
MEPTIRK

SEQ ID NO: 182889 - protein, 7 aa, synthetic construct
REPQQRS

SEQ ID NO: 182890 - protein, 7 aa, synthetic construct
REPRQST

SEQ ID NO: 182891 - protein, 7 aa, synthetic construct
DSPRLRT

SEQ ID NO: 182892 - protein, 7 aa, synthetic construct
VEPRVRQ

SEQ ID NO: 182893 - protein, 7 aa, synthetic construct
ELPRQRV

SEQ ID NO: 182894 - protein, 7 aa, synthetic construct
MVPRQNF

SEQ ID NO: 182895 - protein, 7 aa, synthetic construct
PLPRQRD

SEQ ID NO: 182896 - protein, 7 aa, synthetic construct
HEVKQRT

SEQ ID NO: 182897 - protein, 7 aa, synthetic construct
MPPRVRD

SEQ ID NO: 182898 - protein, 7 aa, synthetic construct
SERPQRT

SEQ ID NO: 182899 - protein, 7 aa, synthetic construct
TEMKQRT

SEQ ID NO: 182900 - protein, 7 aa, synthetic construct
RESVQRT

SEQ ID NO: 182901 - protein, 7 aa, synthetic construct
MEPRVRS

SEQ ID NO: 182902 - protein, 7 aa, synthetic construct
METRSRA

SEQ ID NO: 182903 - protein, 7 aa, synthetic construct
MEPRLRV

SEQ ID NO: 182904 - protein, 7 aa, synthetic construct
MRPRQSE

SEQ ID NO: 182905 - protein, 7 aa, synthetic construct
REPRQNQ

SEQ ID NO: 182906 - protein, 7 aa, synthetic construct
MMPRDRM

SEQ ID NO: 182907 - protein, 7 aa, synthetic construct
TEPVQRK

SEQ ID NO: 182908 - protein, 7 aa, synthetic construct
TLPRQRE

SEQ ID NO: 182909 - protein, 7 aa, synthetic construct
LEPQQRK

SEQ ID NO: 182910 - protein, 7 aa, synthetic construct
METRNKT

SEQ ID NO: 182911 - protein, 7 aa, synthetic construct
MEVRVRP

SEQ ID NO: 182912 - protein, 7 aa, synthetic construct
MENRVRM

SEQ ID NO: 182913 - protein, 7 aa, synthetic construct
TIPRERT

SEQ ID NO: 182914 - protein, 7 aa, synthetic construct
MEKGQRQ

SEQ ID NO: 182915 - protein, 7 aa, synthetic construct
MERKQLT

SEQ ID NO: 182916 - protein, 7 aa, synthetic construct
LEQRQRS

SEQ ID NO: 182917 - protein, 7 aa, synthetic construct
MGPRHIT

SEQ ID NO: 182918 - protein, 7 aa, synthetic construct
MDQRPRT

SEQ ID NO: 182919 - protein, 7 aa, synthetic construct
LEPRQRM

SEQ ID NO: 182920 - protein, 7 aa, synthetic construct
MIPRTRE

SEQ ID NO: 182921 - protein, 7 aa, synthetic construct
MQPRMRD

SEQ ID NO: 182922 - protein, 7 aa, synthetic construct
MEPRQRQ

SEQ ID NO: 182923 - protein, 7 aa, synthetic construct
REPGHRT

SEQ ID NO: 182924 - protein, 7 aa, synthetic construct
MLPRMRE

SEQ ID NO: 182925 - protein, 7 aa, synthetic construct
VEPRSRG

SEQ ID NO: 182926 - protein, 7 aa, synthetic construct
KEPHQRA

SEQ ID NO: 182927 - protein, 7 aa, synthetic construct
MKMRQDT

SEQ ID NO: 182928 - protein, 7 aa, synthetic construct
DKPRQIT

SEQ ID NO: 182929 - protein, 7 aa, synthetic construct
MEPRQAR

SEQ ID NO: 182930 - protein, 7 aa, synthetic construct
MQPRDKT

SEQ ID NO: 182931 - protein, 7 aa, synthetic construct
VEPRGRQ

SEQ ID NO: 182932 - protein, 7 aa, synthetic construct
DAPRLRT

SEQ ID NO: 182933 - protein, 7 aa, synthetic construct
MHPRQNV

SEQ ID NO: 182934 - protein, 7 aa, synthetic construct
MTPHQRN

SEQ ID NO: 182935 - protein, 7 aa, synthetic construct
MERTQRQ

SEQ ID NO: 182936 - protein, 7 aa, synthetic construct
VEPRTRA

SEQ ID NO: 182937 - protein, 7 aa, synthetic construct
MAMRQRE

SEQ ID NO: 182938 - protein, 7 aa, synthetic construct
MSPRERA

SEQ ID NO: 182939 - protein, 7 aa, synthetic construct
MRPRGET

SEQ ID NO: 182940 - protein, 7 aa, synthetic construct
SNPRQRE

SEQ ID NO: 182941 - protein, 7 aa, synthetic construct
MKPYQST

SEQ ID NO: 182942 - protein, 7 aa, synthetic construct
LETRPRT

SEQ ID NO: 182943 - protein, 7 aa, synthetic construct
LEVRQRA

SEQ ID NO: 182944 - protein, 7 aa, synthetic construct
LTDRQRT

SEQ ID NO: 182945 - protein, 7 aa, synthetic construct
MVPRQGQ

SEQ ID NO: 182946 - protein, 7 aa, synthetic construct
MEKHPRT

SEQ ID NO: 182947 - protein, 7 aa, synthetic construct
KEVRQHT

SEQ ID NO: 182948 - protein, 7 aa, synthetic construct
MEVRSRA

SEQ ID NO: 182949 - protein, 7 aa, synthetic construct
PEPRTRP

SEQ ID NO: 182950 - protein, 7 aa, synthetic construct
AETRVRT

SEQ ID NO: 182951 - protein, 7 aa, synthetic construct
MENRARA

SEQ ID NO: 182952 - protein, 7 aa, synthetic construct
TEIRART

SEQ ID NO: 182953 - protein, 7 aa, synthetic construct
AEPRVRT

SEQ ID NO: 182954 - protein, 7 aa, synthetic construct
MEPRNRG

SEQ ID NO: 182955 - protein, 7 aa, synthetic construct
QEARQRQ

SEQ ID NO: 182956 - protein, 7 aa, synthetic construct
MRPRDGT

SEQ ID NO: 182957 - protein, 7 aa, synthetic construct
MENGQRK

SEQ ID NO: 182958 - protein, 7 aa, synthetic construct
MIPRQHV

SEQ ID NO: 182959 - protein, 7 aa, synthetic construct
QDPRQRS

SEQ ID NO: 182960 - protein, 7 aa, synthetic construct
MGPRERG

SEQ ID NO: 182961 - protein, 7 aa, synthetic construct
IEPRTRG

SEQ ID NO: 182962 - protein, 7 aa, synthetic construct
REPIQRN

SEQ ID NO: 182963 - protein, 7 aa, synthetic construct
MMPGQRH

SEQ ID NO: 182964 - protein, 7 aa, synthetic construct
SEPRGRA

SEQ ID NO: 182965 - protein, 7 aa, synthetic construct
MPPTQRH

SEQ ID NO: 182966 - protein, 7 aa, synthetic construct
MNPHQRG

SEQ ID NO: 182967 - protein, 7 aa, synthetic construct
MEPRFKV

SEQ ID NO: 182968 - protein, 7 aa, synthetic construct
HEPKQRM

SEQ ID NO: 182969 - protein, 7 aa, synthetic construct
QEPRVRM

SEQ ID NO: 182970 - protein, 7 aa, synthetic construct
PQPRQRE

SEQ ID NO: 182971 - protein, 7 aa, synthetic construct
MERRQGV

SEQ ID NO: 182972 - protein, 7 aa, synthetic construct
DAPRSRT

SEQ ID NO: 182973 - protein, 7 aa, synthetic construct
MEAKQRH

SEQ ID NO: 182974 - protein, 7 aa, synthetic construct
TETRQKT

SEQ ID NO: 182975 - protein, 7 aa, synthetic construct
SEQRIRT

SEQ ID NO: 182976 - protein, 7 aa, synthetic construct
MESRQKP

SEQ ID NO: 182977 - protein, 7 aa, synthetic construct
MIPIQRG

SEQ ID NO: 182978 - protein, 7 aa, synthetic construct
MIPKQYT

SEQ ID NO: 182979 - protein, 7 aa, synthetic construct
MEAKQRY

SEQ ID NO: 182980 - protein, 7 aa, synthetic construct
MERGQRM

SEQ ID NO: 182981 - protein, 7 aa, synthetic construct
SKPRQDT

SEQ ID NO: 182982 - protein, 7 aa, synthetic construct
KNPRQET

SEQ ID NO: 182983 - protein, 7 aa, synthetic construct
MEQKHRT

SEQ ID NO: 182984 - protein, 7 aa, synthetic construct
LETRSRT

SEQ ID NO: 182985 - protein, 7 aa, synthetic construct
MRPRQES

SEQ ID NO: 182986 - protein, 7 aa, synthetic construct
REGSQRT

SEQ ID NO: 182987 - protein, 7 aa, synthetic construct
TEIRQRN

SEQ ID NO: 182988 - protein, 7 aa, synthetic construct
MEIRVKT

SEQ ID NO: 182989 - protein, 7 aa, synthetic construct
MEMVKRT

SEQ ID NO: 182990 - protein, 7 aa, synthetic construct
AVERQRT

SEQ ID NO: 182991 - protein, 7 aa, synthetic construct
MEVRQTK

SEQ ID NO: 182992 - protein, 7 aa, synthetic construct
QEPRARA

SEQ ID NO: 182993 - protein, 7 aa, synthetic construct
MERLQRA

SEQ ID NO: 182994 - protein, 7 aa, synthetic construct
ERPPQRT

SEQ ID NO: 182995 - protein, 7 aa, synthetic construct
MEKRSVT

SEQ ID NO: 182996 - protein, 7 aa, synthetic construct
IEPRVRV

SEQ ID NO: 182997 - protein, 7 aa, synthetic construct
NEPSKRT

SEQ ID NO: 182998 - protein, 7 aa, synthetic construct
TQPRQRD

SEQ ID NO: 182999 - protein, 7 aa, synthetic construct
NEPRNRQ

SEQ ID NO: 183000 - protein, 7 aa, synthetic construct
QEPRVRV

SEQ ID NO: 183001 - protein, 7 aa, synthetic construct
MDVRPRT

SEQ ID NO: 183002 - protein, 7 aa, synthetic construct
YEPRQRQ

SEQ ID NO: 183003 - protein, 7 aa, synthetic construct
MVPNQRH

SEQ ID NO: 183004 - protein, 7 aa, synthetic construct
MGPRSHT

SEQ ID NO: 183005 - protein, 7 aa, synthetic construct
KESRQMT

SEQ ID NO: 183006 - protein, 7 aa, synthetic construct
MEPSARK

SEQ ID NO: 183007 - protein, 7 aa, synthetic construct
NEQRQRP

SEQ ID NO: 183008 - protein, 7 aa, synthetic construct
MKTRQDT

SEQ ID NO: 183009 - protein, 7 aa, synthetic construct
YEARQRN

SEQ ID NO: 183010 - protein, 7 aa, synthetic construct
PEKRQST

SEQ ID NO: 183011 - protein, 7 aa, synthetic construct
REPVHRT

SEQ ID NO: 183012 - protein, 7 aa, synthetic construct
RESRQLT

SEQ ID NO: 183013 - protein, 7 aa, synthetic construct
IEPRIRM

SEQ ID NO: 183014 - protein, 7 aa, synthetic construct
MEAAQRK

SEQ ID NO: 183015 - protein, 7 aa, synthetic construct
VLPRQRE

SEQ ID NO: 183016 - protein, 7 aa, synthetic construct
LIPRQRD

SEQ ID NO: 183017 - protein, 7 aa, synthetic construct
MEKTPRT

SEQ ID NO: 183018 - protein, 7 aa, synthetic construct
MEKRQHV

SEQ ID NO: 183019 - protein, 7 aa, synthetic construct
FEPRNRQ

SEQ ID NO: 183020 - protein, 7 aa, synthetic construct
MEIRQKM

SEQ ID NO: 183021 - protein, 7 aa, synthetic construct
MVPRQAG

SEQ ID NO: 183022 - protein, 7 aa, synthetic construct
MEMRQKS

SEQ ID NO: 183023 - protein, 7 aa, synthetic construct
MIPRQRE

SEQ ID NO: 183024 - protein, 7 aa, synthetic construct
MEVRTRN

SEQ ID NO: 183025 - protein, 7 aa, synthetic construct
REPIHRT

SEQ ID NO: 183026 - protein, 7 aa, synthetic construct
SEPRLRS

SEQ ID NO: 183027 - protein, 7 aa, synthetic construct
VEPRNRL

SEQ ID NO: 183028 - protein, 7 aa, synthetic construct
MEQRQKS

SEQ ID NO: 183029 - protein, 7 aa, synthetic construct
MTPRSST

SEQ ID NO: 183030 - protein, 7 aa, synthetic construct
MEPRGIR

SEQ ID NO: 183031 - protein, 7 aa, synthetic construct
SEPAKRT

SEQ ID NO: 183032 - protein, 7 aa, synthetic construct
MEKRPNT

SEQ ID NO: 183033 - protein, 7 aa, synthetic construct
TEPRARV

SEQ ID NO: 183034 - protein, 7 aa, synthetic construct
MQVRQRE

SEQ ID NO: 183035 - protein, 7 aa, synthetic construct
YEKIQRT

SEQ ID NO: 183036 - protein, 7 aa, synthetic construct
DTPRQRA

SEQ ID NO: 183037 - protein, 7 aa, synthetic construct
MENRTRA

SEQ ID NO: 183038 - protein, 7 aa, synthetic construct
TEPRLRT

SEQ ID NO: 183039 - protein, 7 aa, synthetic construct
REPAQRQ

SEQ ID NO: 183040 - protein, 7 aa, synthetic construct
PEPRARP

SEQ ID NO: 183041 - protein, 7 aa, synthetic construct
IEPRQRV

SEQ ID NO: 183042 - protein, 7 aa, synthetic construct
MEKMHRT

SEQ ID NO: 183043 - protein, 7 aa, synthetic construct
AEPRTRA

SEQ ID NO: 183044 - protein, 7 aa, synthetic construct
FELKQRT

SEQ ID NO: 183045 - protein, 7 aa, synthetic construct
LEKHQRT

SEQ ID NO: 183046 - protein, 7 aa, synthetic construct
NESRQRV

SEQ ID NO: 183047 - protein, 7 aa, synthetic construct
LEPRPKT

SEQ ID NO: 183048 - protein, 7 aa, synthetic construct
NDPRQRL

SEQ ID NO: 183049 - protein, 7 aa, synthetic construct
MDARART

SEQ ID NO: 183050 - protein, 7 aa, synthetic construct
QEPRMRM

SEQ ID NO: 183051 - protein, 7 aa, synthetic construct
MLPRQRE

SEQ ID NO: 183052 - protein, 7 aa, synthetic construct
SAERQRT

SEQ ID NO: 183053 - protein, 7 aa, synthetic construct
IDPRPRT

SEQ ID NO: 183054 - protein, 7 aa, synthetic construct
AIPRDRT

SEQ ID NO: 183055 - protein, 7 aa, synthetic construct
QEPRGRM

SEQ ID NO: 183056 - protein, 7 aa, synthetic construct
MEPRIRT

SEQ ID NO: 183057 - protein, 7 aa, synthetic construct
MTERART

SEQ ID NO: 183058 - protein, 7 aa, synthetic construct
GDPRPRT

SEQ ID NO: 183059 - protein, 7 aa, synthetic construct
VEQRQRI

SEQ ID NO: 183060 - protein, 7 aa, synthetic construct
SEPRQVR

SEQ ID NO: 183061 - protein, 7 aa, synthetic construct
MKPRTET

SEQ ID NO: 183062 - protein, 7 aa, synthetic construct
MENRQKF

SEQ ID NO: 183063 - protein, 7 aa, synthetic construct
LERPQRT

SEQ ID NO: 183064 - protein, 7 aa, synthetic construct
DIPRIRT

SEQ ID NO: 183065 - protein, 7 aa, synthetic construct
IIPRQNT

SEQ ID NO: 183066 - protein, 7 aa, synthetic construct
LEPRQRG

SEQ ID NO: 183067 - protein, 7 aa, synthetic construct
VETRMRT

SEQ ID NO: 183068 - protein, 7 aa, synthetic construct
MVPRQTH

SEQ ID NO: 183069 - protein, 7 aa, synthetic construct
MEARQGR

SEQ ID NO: 183070 - protein, 7 aa, synthetic construct
TTPRQRE

SEQ ID NO: 183071 - protein, 7 aa, synthetic construct
MEPRLRS

SEQ ID NO: 183072 - protein, 7 aa, synthetic construct
MEKRQFP

SEQ ID NO: 183073 - protein, 7 aa, synthetic construct
IEPRMRA

SEQ ID NO: 183074 - protein, 7 aa, synthetic construct
MLPRSRD

SEQ ID NO: 183075 - protein, 7 aa, synthetic construct
MELRGRA

SEQ ID NO: 183076 - protein, 7 aa, synthetic construct
METMKRT

SEQ ID NO: 183077 - protein, 7 aa, synthetic construct
TDMRQRT

SEQ ID NO: 183078 - protein, 7 aa, synthetic construct
PEPRQKG

SEQ ID NO: 183079 - protein, 7 aa, synthetic construct
NENRQRA

SEQ ID NO: 183080 - protein, 7 aa, synthetic construct
MMPRMRE

SEQ ID NO: 183081 - protein, 7 aa, synthetic construct
VEPRSRN

SEQ ID NO: 183082 - protein, 7 aa, synthetic construct
FEPLKRT

SEQ ID NO: 183083 - protein, 7 aa, synthetic construct
MKPYQRE

SEQ ID NO: 183084 - protein, 7 aa, synthetic construct
GEPRQRV

SEQ ID NO: 183085 - protein, 7 aa, synthetic construct
MEPRVVR

SEQ ID NO: 183086 - protein, 7 aa, synthetic construct
KEDRLRT

SEQ ID NO: 183087 - protein, 7 aa, synthetic construct
AEAKQRT

SEQ ID NO: 183088 - protein, 7 aa, synthetic construct
EVPRQRP

SEQ ID NO: 183089 - protein, 7 aa, synthetic construct
MSMRQRE

SEQ ID NO: 183090 - protein, 7 aa, synthetic construct
SEKRQNT

SEQ ID NO: 183091 - protein, 7 aa, synthetic construct
MTPRQTQ

SEQ ID NO: 183092 - protein, 7 aa, synthetic construct
NEPRQRG

SEQ ID NO: 183093 - protein, 7 aa, synthetic construct
MNERQRN

SEQ ID NO: 183094 - protein, 7 aa, synthetic construct
REPGQRF

SEQ ID NO: 183095 - protein, 7 aa, synthetic construct
TGERQRT

SEQ ID NO: 183096 - protein, 7 aa, synthetic construct
LENRLRT

SEQ ID NO: 183097 - protein, 7 aa, synthetic construct
MEKRERI

SEQ ID NO: 183098 - protein, 7 aa, synthetic construct
IERIQRT

SEQ ID NO: 183099 - protein, 7 aa, synthetic construct
MEMRQKA

SEQ ID NO: 183100 - protein, 7 aa, synthetic construct
KEPYVRT

SEQ ID NO: 183101 - protein, 7 aa, synthetic construct
MEPLRRG

SEQ ID NO: 183102 - protein, 7 aa, synthetic construct
FEPRMRS

SEQ ID NO: 183103 - protein, 7 aa, synthetic construct
MVPHQRN

SEQ ID NO: 183104 - protein, 7 aa, synthetic construct
FEPRQKQ

SEQ ID NO: 183105 - protein, 7 aa, synthetic construct
IEPRIRG

SEQ ID NO: 183106 - protein, 7 aa, synthetic construct
VEPRVRV

SEQ ID NO: 183107 - protein, 7 aa, synthetic construct
GTERQRT

SEQ ID NO: 183108 - protein, 7 aa, synthetic construct
YDPRQRN

SEQ ID NO: 183109 - protein, 7 aa, synthetic construct
MESRMKT

SEQ ID NO: 183110 - protein, 7 aa, synthetic construct
GEAKQRT

SEQ ID NO: 183111 - protein, 7 aa, synthetic construct
KESRQST

SEQ ID NO: 183112 - protein, 7 aa, synthetic construct
TEIRQRV

SEQ ID NO: 183113 - protein, 7 aa, synthetic construct
PEPRQRS

SEQ ID NO: 183114 - protein, 7 aa, synthetic construct
ADVRQRT

SEQ ID NO: 183115 - protein, 7 aa, synthetic construct
IEPRTRM

SEQ ID NO: 183116 - protein, 7 aa, synthetic construct
MNPRVRD

SEQ ID NO: 183117 - protein, 7 aa, synthetic construct
REPHQRP

SEQ ID NO: 183118 - protein, 7 aa, synthetic construct
VDPRQRG

SEQ ID NO: 183119 - protein, 7 aa, synthetic construct
METRSRG

SEQ ID NO: 183120 - protein, 7 aa, synthetic construct
MTDRPRT

SEQ ID NO: 183121 - protein, 7 aa, synthetic construct
MEGAKRT

SEQ ID NO: 183122 - protein, 7 aa, synthetic construct
MERGQRG

SEQ ID NO: 183123 - protein, 7 aa, synthetic construct
MTPRQER

SEQ ID NO: 183124 - protein, 7 aa, synthetic construct
LEKRQST

SEQ ID NO: 183125 - protein, 7 aa, synthetic construct
AEPKQRN

SEQ ID NO: 183126 - protein, 7 aa, synthetic construct
MEKMQRM

SEQ ID NO: 183127 - protein, 7 aa, synthetic construct
MEQRQKL

SEQ ID NO: 183128 - protein, 7 aa, synthetic construct
IEPNQRR

SEQ ID NO: 183129 - protein, 7 aa, synthetic construct
GEPKFRT

SEQ ID NO: 183130 - protein, 7 aa, synthetic construct
MLPRGRE

SEQ ID NO: 183131 - protein, 7 aa, synthetic construct
IEPMQRK

SEQ ID NO: 183132 - protein, 7 aa, synthetic construct
AELKQRT

SEQ ID NO: 183133 - protein, 7 aa, synthetic construct
MEGRGRP

SEQ ID NO: 183134 - protein, 7 aa, synthetic construct
LEKRQIT

SEQ ID NO: 183135 - protein, 7 aa, synthetic construct
NDVRQRT

SEQ ID NO: 183136 - protein, 7 aa, synthetic construct
REPRERN

SEQ ID NO: 183137 - protein, 7 aa, synthetic construct
MEPTRRG

SEQ ID NO: 183138 - protein, 7 aa, synthetic construct
SPERQRT

SEQ ID NO: 183139 - protein, 7 aa, synthetic construct
MNIRQRE

SEQ ID NO: 183140 - protein, 7 aa, synthetic construct
NEPRQRM

SEQ ID NO: 183141 - protein, 7 aa, synthetic construct
MVKRQDT

SEQ ID NO: 183142 - protein, 7 aa, synthetic construct
REPGSRT

SEQ ID NO: 183143 - protein, 7 aa, synthetic construct
MEMRQLK

SEQ ID NO: 183144 - protein, 7 aa, synthetic construct
NSERQRT

SEQ ID NO: 183145 - protein, 7 aa, synthetic construct
MQPRRET

SEQ ID NO: 183146 - protein, 7 aa, synthetic construct
MAPRVRE

SEQ ID NO: 183147 - protein, 7 aa, synthetic construct
MEPRYKG

SEQ ID NO: 183148 - protein, 7 aa, synthetic construct
GEPRRGT

SEQ ID NO: 183149 - protein, 7 aa, synthetic construct
MRPRQEQ

SEQ ID NO: 183150 - protein, 7 aa, synthetic construct
EMPRQRP

SEQ ID NO: 183151 - protein, 7 aa, synthetic construct
MEPGLRK

SEQ ID NO: 183152 - protein, 7 aa, synthetic construct
LEPRMRG

SEQ ID NO: 183153 - protein, 7 aa, synthetic construct
DNARQRT

SEQ ID NO: 183154 - protein, 7 aa, synthetic construct
MEKVQRL

SEQ ID NO: 183155 - protein, 7 aa, synthetic construct
MNPRQSN

SEQ ID NO: 183156 - protein, 7 aa, synthetic construct
EIPRNRT

SEQ ID NO: 183157 - protein, 7 aa, synthetic construct
MERQQRQ

SEQ ID NO: 183158 - protein, 7 aa, synthetic construct
MEKFQRA

SEQ ID NO: 183159 - protein, 7 aa, synthetic construct
MIPRQSA

SEQ ID NO: 183160 - protein, 7 aa, synthetic construct
LIERQRT

SEQ ID NO: 183161 - protein, 7 aa, synthetic construct
TDTRQRT

SEQ ID NO: 183162 - protein, 7 aa, synthetic construct
KEPYQKT

SEQ ID NO: 183163 - protein, 7 aa, synthetic construct
VTPRQRD

SEQ ID NO: 183164 - protein, 7 aa, synthetic construct
VEPMQRK

SEQ ID NO: 183165 - protein, 7 aa, synthetic construct
MEGRVRS

SEQ ID NO: 183166 - protein, 7 aa, synthetic construct
SEQRQRA

SEQ ID NO: 183167 - protein, 7 aa, synthetic construct
MEPQMRK

SEQ ID NO: 183168 - protein, 7 aa, synthetic construct
MEGRLRV

SEQ ID NO: 183169 - protein, 7 aa, synthetic construct
NEPRGRV

SEQ ID NO: 183170 - protein, 7 aa, synthetic construct
IEKRQYT

SEQ ID NO: 183171 - protein, 7 aa, synthetic construct
MEARNRV

SEQ ID NO: 183172 - protein, 7 aa, synthetic construct
DIPRQRQ

SEQ ID NO: 183173 - protein, 7 aa, synthetic construct
YEPRART

SEQ ID NO: 183174 - protein, 7 aa, synthetic construct
MAIRQRE

SEQ ID NO: 183175 - protein, 7 aa, synthetic construct
METRNRP

SEQ ID NO: 183176 - protein, 7 aa, synthetic construct
EQPRVRT

SEQ ID NO: 183177 - protein, 7 aa, synthetic construct
MIPRQAH

SEQ ID NO: 183178 - protein, 7 aa, synthetic construct
MEKDQRK

SEQ ID NO: 183179 - protein, 7 aa, synthetic construct
IEQRPRT

SEQ ID NO: 183180 - protein, 7 aa, synthetic construct
HEPKQRT

SEQ ID NO: 183181 - protein, 7 aa, synthetic construct
MEPVRRQ

SEQ ID NO: 183182 - protein, 7 aa, synthetic construct
TNPRQNT

SEQ ID NO: 183183 - protein, 7 aa, synthetic construct
QENRQKT

SEQ ID NO: 183184 - protein, 7 aa, synthetic construct
SIERQRT

SEQ ID NO: 183185 - protein, 7 aa, synthetic construct
MEAKART

SEQ ID NO: 183186 - protein, 7 aa, synthetic construct
VEPAQRR

SEQ ID NO: 183187 - protein, 7 aa, synthetic construct
RSPRQDT

SEQ ID NO: 183188 - protein, 7 aa, synthetic construct
MEKNIRT

SEQ ID NO: 183189 - protein, 7 aa, synthetic construct
TEPKPRT

SEQ ID NO: 183190 - protein, 7 aa, synthetic construct
QEPRQKS

SEQ ID NO: 183191 - protein, 7 aa, synthetic construct
YEPRSRN

SEQ ID NO: 183192 - protein, 7 aa, synthetic construct
NEPNQRR

SEQ ID NO: 183193 - protein, 7 aa, synthetic construct
METKQRY

SEQ ID NO: 183194 - protein, 7 aa, synthetic construct
MEPKARY

SEQ ID NO: 183195 - protein, 7 aa, synthetic construct
MMPRQSQ

SEQ ID NO: 183196 - protein, 7 aa, synthetic construct
NDPRSRT

SEQ ID NO: 183197 - protein, 7 aa, synthetic construct
EKPAQRT

SEQ ID NO: 183198 - protein, 7 aa, synthetic construct
MVPRVRD

SEQ ID NO: 183199 - protein, 7 aa, synthetic construct
MERKERT

SEQ ID NO: 183200 - protein, 7 aa, synthetic construct
HEPKQRN

SEQ ID NO: 183201 - protein, 7 aa, synthetic construct
KEERART

SEQ ID NO: 183202 - protein, 7 aa, synthetic construct
YEPRNRN

SEQ ID NO: 183203 - protein, 7 aa, synthetic construct
MERLQRS

SEQ ID NO: 183204 - protein, 7 aa, synthetic construct
MEPIKRQ

SEQ ID NO: 183205 - protein, 7 aa, synthetic construct
MEIRGRG

SEQ ID NO: 183206 - protein, 7 aa, synthetic construct
MERIQRN

SEQ ID NO: 183207 - protein, 7 aa, synthetic construct
MEKRQYN

SEQ ID NO: 183208 - protein, 7 aa, synthetic construct
MEPRSIR

SEQ ID NO: 183209 - protein, 7 aa, synthetic construct
METRLRG

SEQ ID NO: 183210 - protein, 7 aa, synthetic construct
MAPRQHQ

SEQ ID NO: 183211 - protein, 7 aa, synthetic construct
IDLRQRT

SEQ ID NO: 183212 - protein, 7 aa, synthetic construct
MPPRERY

SEQ ID NO: 183213 - protein, 7 aa, synthetic construct
AEPNQRK

SEQ ID NO: 183214 - protein, 7 aa, synthetic construct
KDPRQRD

SEQ ID NO: 183215 - protein, 7 aa, synthetic construct
MEVRARG

SEQ ID NO: 183216 - protein, 7 aa, synthetic construct
MTPRVRE

SEQ ID NO: 183217 - protein, 7 aa, synthetic construct
MQPRGRE

SEQ ID NO: 183218 - protein, 7 aa, synthetic construct
MEVRGRP

SEQ ID NO: 183219 - protein, 7 aa, synthetic construct
NEPRSRI

SEQ ID NO: 183220 - protein, 7 aa, synthetic construct
KEHRQQT

SEQ ID NO: 183221 - protein, 7 aa, synthetic construct
MEGRMRV

SEQ ID NO: 183222 - protein, 7 aa, synthetic construct
MEKYQRV

SEQ ID NO: 183223 - protein, 7 aa, synthetic construct
SEKNQRT

SEQ ID NO: 183224 - protein, 7 aa, synthetic construct
RELRQVT

SEQ ID NO: 183225 - protein, 7 aa, synthetic construct
MEPRNRA

SEQ ID NO: 183226 - protein, 7 aa, synthetic construct
MPPRQHQ

SEQ ID NO: 183227 - protein, 7 aa, synthetic construct
MVDRQRQ

SEQ ID NO: 183228 - protein, 7 aa, synthetic construct
FENRQKT

SEQ ID NO: 183229 - protein, 7 aa, synthetic construct
MKPRQYE

SEQ ID NO: 183230 - protein, 7 aa, synthetic construct
NEKRQIT

SEQ ID NO: 183231 - protein, 7 aa, synthetic construct
PEPRVRT

SEQ ID NO: 183232 - protein, 7 aa, synthetic construct
MEKMQRN

SEQ ID NO: 183233 - protein, 7 aa, synthetic construct
TEKRQAT

SEQ ID NO: 183234 - protein, 7 aa, synthetic construct
VEVRQRA

SEQ ID NO: 183235 - protein, 7 aa, synthetic construct
AETKQRT

SEQ ID NO: 183236 - protein, 7 aa, synthetic construct
MTPRSHT

SEQ ID NO: 183237 - protein, 7 aa, synthetic construct
MPKRQET

SEQ ID NO: 183238 - protein, 7 aa, synthetic construct
MHPRERQ

SEQ ID NO: 183239 - protein, 7 aa, synthetic construct
LEGRLRT

SEQ ID NO: 183240 - protein, 7 aa, synthetic construct
MPKRQDT

SEQ ID NO: 183241 - protein, 7 aa, synthetic construct
QEKRQIT

SEQ ID NO: 183242 - protein, 7 aa, synthetic construct
MEPRTFK

SEQ ID NO: 183243 - protein, 7 aa, synthetic construct
TEPRVRA

SEQ ID NO: 183244 - protein, 7 aa, synthetic construct
NEIRQRP

SEQ ID NO: 183245 - protein, 7 aa, synthetic construct
MEPPRRS

SEQ ID NO: 183246 - protein, 7 aa, synthetic construct
AEPRGRP

SEQ ID NO: 183247 - protein, 7 aa, synthetic construct
KEDRART

SEQ ID NO: 183248 - protein, 7 aa, synthetic construct
REPRPAT

SEQ ID NO: 183249 - protein, 7 aa, synthetic construct
TYPGQRT

SEQ ID NO: 183250 - protein, 7 aa, synthetic construct
MPDRQRL

SEQ ID NO: 183251 - protein, 7 aa, synthetic construct
MNPRQHQ

SEQ ID NO: 183252 - protein, 7 aa, synthetic construct
MENRQGK

SEQ ID NO: 183253 - protein, 7 aa, synthetic construct
AEPKQRY

SEQ ID NO: 183254 - protein, 7 aa, synthetic construct
VEKRQNT

SEQ ID NO: 183255 - protein, 7 aa, synthetic construct
FEPRQAK

SEQ ID NO: 183256 - protein, 7 aa, synthetic construct
VMPRQRE

SEQ ID NO: 183257 - protein, 7 aa, synthetic construct
REPQHRT

SEQ ID NO: 183258 - protein, 7 aa, synthetic construct
TEGRQKT

SEQ ID NO: 183259 - protein, 7 aa, synthetic construct
SEPRVKT

SEQ ID NO: 183260 - protein, 7 aa, synthetic construct
MDVRQKT

SEQ ID NO: 183261 - protein, 7 aa, synthetic construct
QEPMQRK

SEQ ID NO: 183262 - protein, 7 aa, synthetic construct
MEKRQLS

SEQ ID NO: 183263 - protein, 7 aa, synthetic construct
LEGRGRT

SEQ ID NO: 183264 - protein, 7 aa, synthetic construct
REPMQRN

SEQ ID NO: 183265 - protein, 7 aa, synthetic construct
KEPRERA

SEQ ID NO: 183266 - protein, 7 aa, synthetic construct
MEKRQEK

SEQ ID NO: 183267 - protein, 7 aa, synthetic construct
ATPRQRE

SEQ ID NO: 183268 - protein, 7 aa, synthetic construct
MEKAHRT

SEQ ID NO: 183269 - protein, 7 aa, synthetic construct
LEKRERT

SEQ ID NO: 183270 - protein, 7 aa, synthetic construct
TIPRQRE

SEQ ID NO: 183271 - protein, 7 aa, synthetic construct
MEAKQRF

SEQ ID NO: 183272 - protein, 7 aa, synthetic construct
MEPRLKH

SEQ ID NO: 183273 - protein, 7 aa, synthetic construct
LLPRQRD

SEQ ID NO: 183274 - protein, 7 aa, synthetic construct
YPERQRT

SEQ ID NO: 183275 - protein, 7 aa, synthetic construct
PDVRQRT

SEQ ID NO: 183276 - protein, 7 aa, synthetic construct
DKPRQFT

SEQ ID NO: 183277 - protein, 7 aa, synthetic construct
IDVRQRT

SEQ ID NO: 183278 - protein, 7 aa, synthetic construct
MEKAQRF

SEQ ID NO: 183279 - protein, 7 aa, synthetic construct
MEKHNRT

SEQ ID NO: 183280 - protein, 7 aa, synthetic construct
MEQRQKV

SEQ ID NO: 183281 - protein, 7 aa, synthetic construct
ISERQRT

SEQ ID NO: 183282 - protein, 7 aa, synthetic construct
MKPRQGD

SEQ ID NO: 183283 - protein, 7 aa, synthetic construct
MELRVKT

SEQ ID NO: 183284 - protein, 7 aa, synthetic construct
TEPRNRQ

SEQ ID NO: 183285 - protein, 7 aa, synthetic construct
NEPRQKT

SEQ ID NO: 183286 - protein, 7 aa, synthetic construct
KEPMQRY

SEQ ID NO: 183287 - protein, 7 aa, synthetic construct
MERLQRG

SEQ ID NO: 183288 - protein, 7 aa, synthetic construct
METRQKA

SEQ ID NO: 183289 - protein, 7 aa, synthetic construct
MKPHQYT

SEQ ID NO: 183290 - protein, 7 aa, synthetic construct
AEVRQRA

SEQ ID NO: 183291 - protein, 7 aa, synthetic construct
MERRQGM

SEQ ID NO: 183292 - protein, 7 aa, synthetic construct
MRPRPDT

SEQ ID NO: 183293 - protein, 7 aa, synthetic construct
MLPRRDT

SEQ ID NO: 183294 - protein, 7 aa, synthetic construct
MEARQKN

SEQ ID NO: 183295 - protein, 7 aa, synthetic construct
MKPRDIT

SEQ ID NO: 183296 - protein, 7 aa, synthetic construct
REPRPST

SEQ ID NO: 183297 - protein, 7 aa, synthetic construct
MEPRQRV

SEQ ID NO: 183298 - protein, 7 aa, synthetic construct
MQPRQSQ

SEQ ID NO: 183299 - protein, 7 aa, synthetic construct
MEAKQRM

SEQ ID NO: 183300 - protein, 7 aa, synthetic construct
MPPSQRH

SEQ ID NO: 183301 - protein, 7 aa, synthetic construct
NEARGRT

SEQ ID NO: 183302 - protein, 7 aa, synthetic construct
MEGRKMT

SEQ ID NO: 183303 - protein, 7 aa, synthetic construct
PSDRQRT

SEQ ID NO: 183304 - protein, 7 aa, synthetic construct
QIPRQRD

SEQ ID NO: 183305 - protein, 7 aa, synthetic construct
VEIRQKT

SEQ ID NO: 183306 - protein, 7 aa, synthetic construct
PEKRQNT

SEQ ID NO: 183307 - protein, 7 aa, synthetic construct
IEPRGRM

SEQ ID NO: 183308 - protein, 7 aa, synthetic construct
IETRQRI

SEQ ID NO: 183309 - protein, 7 aa, synthetic construct
KEHRQPT

SEQ ID NO: 183310 - protein, 7 aa, synthetic construct
MHPRAST

SEQ ID NO: 183311 - protein, 7 aa, synthetic construct
MEVKVRT

SEQ ID NO: 183312 - protein, 7 aa, synthetic construct
MDPRERK

SEQ ID NO: 183313 - protein, 7 aa, synthetic construct
IIPRQST

SEQ ID NO: 183314 - protein, 7 aa, synthetic construct
MAERQRG

SEQ ID NO: 183315 - protein, 7 aa, synthetic construct
MEMRQKL

SEQ ID NO: 183316 - protein, 7 aa, synthetic construct
DLPRIRT

SEQ ID NO: 183317 - protein, 7 aa, synthetic construct
MEPRQKQ

SEQ ID NO: 183318 - protein, 7 aa, synthetic construct
METRPRP

SEQ ID NO: 183319 - protein, 7 aa, synthetic construct
TERVQRT

SEQ ID NO: 183320 - protein, 7 aa, synthetic construct
ASPRQRE

SEQ ID NO: 183321 - protein, 7 aa, synthetic construct
EKPVQRT

SEQ ID NO: 183322 - protein, 7 aa, synthetic construct
METRVRP

SEQ ID NO: 183323 - protein, 7 aa, synthetic construct
METRNRG

SEQ ID NO: 183324 - protein, 7 aa, synthetic construct
MDPRSRM

SEQ ID NO: 183325 - protein, 7 aa, synthetic construct
VEPRRTT

SEQ ID NO: 183326 - protein, 7 aa, synthetic construct
QEPRQAR

SEQ ID NO: 183327 - protein, 7 aa, synthetic construct
ENPKQRT

SEQ ID NO: 183328 - protein, 7 aa, synthetic construct
MEPAMRK

SEQ ID NO: 183329 - protein, 7 aa, synthetic construct
IERPQRT

SEQ ID NO: 183330 - protein, 7 aa, synthetic construct
QDPRQRQ

SEQ ID NO: 183331 - protein, 7 aa, synthetic construct
METRQQK

SEQ ID NO: 183332 - protein, 7 aa, synthetic construct
IEQRMRT

SEQ ID NO: 183333 - protein, 7 aa, synthetic construct
MEPRNTR

SEQ ID NO: 183334 - protein, 7 aa, synthetic construct
TEPRRLT

SEQ ID NO: 183335 - protein, 7 aa, synthetic construct
YEPKHRT

SEQ ID NO: 183336 - protein, 7 aa, synthetic construct
NEPRIRI

SEQ ID NO: 183337 - protein, 7 aa, synthetic construct
MVPRERM

SEQ ID NO: 183338 - protein, 7 aa, synthetic construct
METRQRP

SEQ ID NO: 183339 - protein, 7 aa, synthetic construct
MESRVRG

SEQ ID NO: 183340 - protein, 7 aa, synthetic construct
REPRAST

SEQ ID NO: 183341 - protein, 7 aa, synthetic construct
NDPRPRT

SEQ ID NO: 183342 - protein, 7 aa, synthetic construct
MDPIQRK

SEQ ID NO: 183343 - protein, 7 aa, synthetic construct
DNPKQRT

SEQ ID NO: 183344 - protein, 7 aa, synthetic construct
MEARGRN

SEQ ID NO: 183345 - protein, 7 aa, synthetic construct
DPPRSRT

SEQ ID NO: 183346 - protein, 7 aa, synthetic construct
NEARIRT

SEQ ID NO: 183347 - protein, 7 aa, synthetic construct
PERRQGT

SEQ ID NO: 183348 - protein, 7 aa, synthetic construct
MEMRGRA

SEQ ID NO: 183349 - protein, 7 aa, synthetic construct
MEPRNRN

SEQ ID NO: 183350 - protein, 7 aa, synthetic construct
SPPRQRD

SEQ ID NO: 183351 - protein, 7 aa, synthetic construct
QEVRPRT

SEQ ID NO: 183352 - protein, 7 aa, synthetic construct
TEPNQRR

SEQ ID NO: 183353 - protein, 7 aa, synthetic construct
MEKFQRN

SEQ ID NO: 183354 - protein, 7 aa, synthetic construct
MVPRRDT

SEQ ID NO: 183355 - protein, 7 aa, synthetic construct
QVPRERT

SEQ ID NO: 183356 - protein, 7 aa, synthetic construct
MEPRTRT

SEQ ID NO: 183357 - protein, 7 aa, synthetic construct
MEPRTRQ

SEQ ID NO: 183358 - protein, 7 aa, synthetic construct
NEKRQAT

SEQ ID NO: 183359 - protein, 7 aa, synthetic construct
NEIRQRV

SEQ ID NO: 183360 - protein, 7 aa, synthetic construct
KEPYQRT

SEQ ID NO: 183361 - protein, 7 aa, synthetic construct
MEARPRT

SEQ ID NO: 183362 - protein, 7 aa, synthetic construct
NEPRQRQ

SEQ ID NO: 183363 - protein, 7 aa, synthetic construct
MEPRPRA

SEQ ID NO: 183364 - protein, 7 aa, synthetic construct
NEPRQKY

SEQ ID NO: 183365 - protein, 7 aa, synthetic construct
EPPRQRQ

SEQ ID NO: 183366 - protein, 7 aa, synthetic construct
MDARQRM

SEQ ID NO: 183367 - protein, 7 aa, synthetic construct
MEMKQRM

SEQ ID NO: 183368 - protein, 7 aa, synthetic construct
MPPRQRD

SEQ ID NO: 183369 - protein, 7 aa, synthetic construct
MDRRQAT

SEQ ID NO: 183370 - protein, 7 aa, synthetic construct
LERIQRT

SEQ ID NO: 183371 - protein, 7 aa, synthetic construct
MEKNQRH

SEQ ID NO: 183372 - protein, 7 aa, synthetic construct
METRLKT

SEQ ID NO: 183373 - protein, 7 aa, synthetic construct
MERRQVV

SEQ ID NO: 183374 - protein, 7 aa, synthetic construct
TEPRMRA

SEQ ID NO: 183375 - protein, 7 aa, synthetic construct
MLDRQRA

SEQ ID NO: 183376 - protein, 7 aa, synthetic construct
MAPRHNT

SEQ ID NO: 183377 - protein, 7 aa, synthetic construct
TEPRNRN

SEQ ID NO: 183378 - protein, 7 aa, synthetic construct
EKPRQNT

SEQ ID NO: 183379 - protein, 7 aa, synthetic construct
MEGKTRT

SEQ ID NO: 183380 - protein, 7 aa, synthetic construct
TEPRMRN

SEQ ID NO: 183381 - protein, 7 aa, synthetic construct
VEPRSRA

SEQ ID NO: 183382 - protein, 7 aa, synthetic construct
MELRNRP

SEQ ID NO: 183383 - protein, 7 aa, synthetic construct
MTSRERT

SEQ ID NO: 183384 - protein, 7 aa, synthetic construct
KEIRQIT

SEQ ID NO: 183385 - protein, 7 aa, synthetic construct
MEPRSQR

SEQ ID NO: 183386 - protein, 7 aa, synthetic construct
REGRQMT

SEQ ID NO: 183387 - protein, 7 aa, synthetic construct
DVPRTRT

SEQ ID NO: 183388 - protein, 7 aa, synthetic construct
MERKQAT

SEQ ID NO: 183389 - protein, 7 aa, synthetic construct
MEGKVRT

SEQ ID NO: 183390 - protein, 7 aa, synthetic construct
RDPHQRT

SEQ ID NO: 183391 - protein, 7 aa, synthetic construct
DPPRQRS

SEQ ID NO: 183392 - protein, 7 aa, synthetic construct
MELKIRT

SEQ ID NO: 183393 - protein, 7 aa, synthetic construct
MEKSQRA

SEQ ID NO: 183394 - protein, 7 aa, synthetic construct
IEMRQRG

SEQ ID NO: 183395 - protein, 7 aa, synthetic construct
KEDRIRT

SEQ ID NO: 183396 - protein, 7 aa, synthetic construct
NDNRQRT

SEQ ID NO: 183397 - protein, 7 aa, synthetic construct
QEPRMRP

SEQ ID NO: 183398 - protein, 7 aa, synthetic construct
VEPRNRS

SEQ ID NO: 183399 - protein, 7 aa, synthetic construct
MERIQRS

SEQ ID NO: 183400 - protein, 7 aa, synthetic construct
MEARVRT

SEQ ID NO: 183401 - protein, 7 aa, synthetic construct
MKGRQET

SEQ ID NO: 183402 - protein, 7 aa, synthetic construct
MAPRPRD

SEQ ID NO: 183403 - protein, 7 aa, synthetic construct
MEMKIRT

SEQ ID NO: 183404 - protein, 7 aa, synthetic construct
NEPRLRA

SEQ ID NO: 183405 - protein, 7 aa, synthetic construct
TEKRQYT

SEQ ID NO: 183406 - protein, 7 aa, synthetic construct
IERQQRT

SEQ ID NO: 183407 - protein, 7 aa, synthetic construct
DTPRTRT

SEQ ID NO: 183408 - protein, 7 aa, synthetic construct
MESRQKG

SEQ ID NO: 183409 - protein, 7 aa, synthetic construct
PEPRVKT

SEQ ID NO: 183410 - protein, 7 aa, synthetic construct
HEPRVRV

SEQ ID NO: 183411 - protein, 7 aa, synthetic construct
QEVRQKT

SEQ ID NO: 183412 - protein, 7 aa, synthetic construct
MEPKNRY

SEQ ID NO: 183413 - protein, 7 aa, synthetic construct
IEIRGRT

SEQ ID NO: 183414 - protein, 7 aa, synthetic construct
MEPRIRG

SEQ ID NO: 183415 - protein, 7 aa, synthetic construct
IEPRIRS

SEQ ID NO: 183416 - protein, 7 aa, synthetic construct
YEPLKRT

SEQ ID NO: 183417 - protein, 7 aa, synthetic construct
SEPRQKT

SEQ ID NO: 183418 - protein, 7 aa, synthetic construct
SEPRQNK

SEQ ID NO: 183419 - protein, 7 aa, synthetic construct
VEARTRT

SEQ ID NO: 183420 - protein, 7 aa, synthetic construct
MEPKQYR

SEQ ID NO: 183421 - protein, 7 aa, synthetic construct
MEARPRI

SEQ ID NO: 183422 - protein, 7 aa, synthetic construct
MPERIRT

SEQ ID NO: 183423 - protein, 7 aa, synthetic construct
MERQPRT

SEQ ID NO: 183424 - protein, 7 aa, synthetic construct
TERIQRT

SEQ ID NO: 183425 - protein, 7 aa, synthetic construct
MEVRLRA

SEQ ID NO: 183426 - protein, 7 aa, synthetic construct
MGARQRE

SEQ ID NO: 183427 - protein, 7 aa, synthetic construct
MEPVRRA

SEQ ID NO: 183428 - protein, 7 aa, synthetic construct
MQPRQSG

SEQ ID NO: 183429 - protein, 7 aa, synthetic construct
MNPRTRE

SEQ ID NO: 183430 - protein, 7 aa, synthetic construct
PERTQRT

SEQ ID NO: 183431 - protein, 7 aa, synthetic construct
METRQQR

SEQ ID NO: 183432 - protein, 7 aa, synthetic construct
MRPRMDT

SEQ ID NO: 183433 - protein, 7 aa, synthetic construct
MEIRGRV

SEQ ID NO: 183434 - protein, 7 aa, synthetic construct
MINRERT

SEQ ID NO: 183435 - protein, 7 aa, synthetic construct
MEVRPRA

SEQ ID NO: 183436 - protein, 7 aa, synthetic construct
QEPKPRT

SEQ ID NO: 183437 - protein, 7 aa, synthetic construct
GEPRPKT

SEQ ID NO: 183438 - protein, 7 aa, synthetic construct
KEPYQRG

SEQ ID NO: 183439 - protein, 7 aa, synthetic construct
QEPRART

SEQ ID NO: 183440 - protein, 7 aa, synthetic construct
MQMRQRE

SEQ ID NO: 183441 - protein, 7 aa, synthetic construct
GEPRVRT

SEQ ID NO: 183442 - protein, 7 aa, synthetic construct
VDARQRT

SEQ ID NO: 183443 - protein, 7 aa, synthetic construct
VSERQRT

SEQ ID NO: 183444 - protein, 7 aa, synthetic construct
GEIRQKT

SEQ ID NO: 183445 - protein, 7 aa, synthetic construct
MDPRQRQ

SEQ ID NO: 183446 - protein, 7 aa, synthetic construct
LENRQRI

SEQ ID NO: 183447 - protein, 7 aa, synthetic construct
YEPRMRN

SEQ ID NO: 183448 - protein, 7 aa, synthetic construct
MEMRQMK

SEQ ID NO: 183449 - protein, 7 aa, synthetic construct
MVPRQTG

SEQ ID NO: 183450 - protein, 7 aa, synthetic construct
MESRQRV

SEQ ID NO: 183451 - protein, 7 aa, synthetic construct
MENKQRS

SEQ ID NO: 183452 - protein, 7 aa, synthetic construct
KEIRQRE

SEQ ID NO: 183453 - protein, 7 aa, synthetic construct
YDPRART

SEQ ID NO: 183454 - protein, 7 aa, synthetic construct
DKPYQRT

SEQ ID NO: 183455 - protein, 7 aa, synthetic construct
DTPRQRG

SEQ ID NO: 183456 - protein, 7 aa, synthetic construct
MKPRMDT

SEQ ID NO: 183457 - protein, 7 aa, synthetic construct
MQPRQAH

SEQ ID NO: 183458 - protein, 7 aa, synthetic construct
AETRQKT

SEQ ID NO: 183459 - protein, 7 aa, synthetic construct
MIPRQER

SEQ ID NO: 183460 - protein, 7 aa, synthetic construct
MEPRQKY

SEQ ID NO: 183461 - protein, 7 aa, synthetic construct
MEKMPRT

SEQ ID NO: 183462 - protein, 7 aa, synthetic construct
TEPRTRP

SEQ ID NO: 183463 - protein, 7 aa, synthetic construct
MEPIRRN

SEQ ID NO: 183464 - protein, 7 aa, synthetic construct
NEIRGRT

SEQ ID NO: 183465 - protein, 7 aa, synthetic construct
MEKRQAY

SEQ ID NO: 183466 - protein, 7 aa, synthetic construct
LETRTRT

SEQ ID NO: 183467 - protein, 7 aa, synthetic construct
REPRHAT

SEQ ID NO: 183468 - protein, 7 aa, synthetic construct
AEPRQGR

SEQ ID NO: 183469 - protein, 7 aa, synthetic construct
HDPRQKT

SEQ ID NO: 183470 - protein, 7 aa, synthetic construct
TEPRQRG

SEQ ID NO: 183471 - protein, 7 aa, synthetic construct
TEPRNRP

SEQ ID NO: 183472 - protein, 7 aa, synthetic construct
NEQRIRT

SEQ ID NO: 183473 - protein, 7 aa, synthetic construct
IEPRGRL

SEQ ID NO: 183474 - protein, 7 aa, synthetic construct
MIPRQQN

SEQ ID NO: 183475 - protein, 7 aa, synthetic construct
YEPRQSK

SEQ ID NO: 183476 - protein, 7 aa, synthetic construct
TQPRQRE

SEQ ID NO: 183477 - protein, 7 aa, synthetic construct
KEPRQSY

SEQ ID NO: 183478 - protein, 7 aa, synthetic construct
ADPRQRL

SEQ ID NO: 183479 - protein, 7 aa, synthetic construct
AEPRMKT

SEQ ID NO: 183480 - protein, 7 aa, synthetic construct
FEPRQTK

SEQ ID NO: 183481 - protein, 7 aa, synthetic construct
NEPKYRT

SEQ ID NO: 183482 - protein, 7 aa, synthetic construct
METRGRL

SEQ ID NO: 183483 - protein, 7 aa, synthetic construct
METRTRA

SEQ ID NO: 183484 - protein, 7 aa, synthetic construct
GEPKQRN

SEQ ID NO: 183485 - protein, 7 aa, synthetic construct
MEKRQNA

SEQ ID NO: 183486 - protein, 7 aa, synthetic construct
MQPRHNT

SEQ ID NO: 183487 - protein, 7 aa, synthetic construct
TEPKQRH

SEQ ID NO: 183488 - protein, 7 aa, synthetic construct
MHPRQDK

SEQ ID NO: 183489 - protein, 7 aa, synthetic construct
AEPRLRS

SEQ ID NO: 183490 - protein, 7 aa, synthetic construct
VEPRTRG

SEQ ID NO: 183491 - protein, 7 aa, synthetic construct
MEVRPKT

SEQ ID NO: 183492 - protein, 7 aa, synthetic construct
REPNYRT

SEQ ID NO: 183493 - protein, 7 aa, synthetic construct
LDSRQRT

SEQ ID NO: 183494 - protein, 7 aa, synthetic construct
NEPRNRT

SEQ ID NO: 183495 - protein, 7 aa, synthetic construct
YEGRQKT

SEQ ID NO: 183496 - protein, 7 aa, synthetic construct
MEQVKRT

SEQ ID NO: 183497 - protein, 7 aa, synthetic construct
MSLRQRE

SEQ ID NO: 183498 - protein, 7 aa, synthetic construct
AEPRQIK

SEQ ID NO: 183499 - protein, 7 aa, synthetic construct
MEPRVKM

SEQ ID NO: 183500 - protein, 7 aa, synthetic construct
IEQRNRT

SEQ ID NO: 183501 - protein, 7 aa, synthetic construct
MEPPKRN

SEQ ID NO: 183502 - protein, 7 aa, synthetic construct
GEPKQRM

SEQ ID NO: 183503 - protein, 7 aa, synthetic construct
MEKRQNQ

SEQ ID NO: 183504 - protein, 7 aa, synthetic construct
DVQRQRT

SEQ ID NO: 183505 - protein, 7 aa, synthetic construct
AEQKQRT

SEQ ID NO: 183506 - protein, 7 aa, synthetic construct
MTPRPST

SEQ ID NO: 183507 - protein, 7 aa, synthetic construct
GIERQRT

SEQ ID NO: 183508 - protein, 7 aa, synthetic construct
LEMRQRS

SEQ ID NO: 183509 - protein, 7 aa, synthetic construct
MQPRQSL

SEQ ID NO: 183510 - protein, 7 aa, synthetic construct
MEMKQRI

SEQ ID NO: 183511 - protein, 7 aa, synthetic construct
QEPRQRS

SEQ ID NO: 183512 - protein, 7 aa, synthetic construct
MERSQKT

SEQ ID NO: 183513 - protein, 7 aa, synthetic construct
MASRQRE

SEQ ID NO: 183514 - protein, 7 aa, synthetic construct
NEPRMRN

SEQ ID NO: 183515 - protein, 7 aa, synthetic construct
TEPRTRL

SEQ ID NO: 183516 - protein, 7 aa, synthetic construct
TEPRGRT

SEQ ID NO: 183517 - protein, 7 aa, synthetic construct
GEVRQRA

SEQ ID NO: 183518 - protein, 7 aa, synthetic construct
TEPRPRG

SEQ ID NO: 183519 - protein, 7 aa, synthetic construct
MEPRMGR

SEQ ID NO: 183520 - protein, 7 aa, synthetic construct
IEPRPRP

SEQ ID NO: 183521 - protein, 7 aa, synthetic construct
MEGKQRG

SEQ ID NO: 183522 - protein, 7 aa, synthetic construct
TEPKQRF

SEQ ID NO: 183523 - protein, 7 aa, synthetic construct
LENRNRT

SEQ ID NO: 183524 - protein, 7 aa, synthetic construct
REPRQAQ

SEQ ID NO: 183525 - protein, 7 aa, synthetic construct
QEPRLRV

SEQ ID NO: 183526 - protein, 7 aa, synthetic construct
ADPRQRS

SEQ ID NO: 183527 - protein, 7 aa, synthetic construct
DVPRSRT

SEQ ID NO: 183528 - protein, 7 aa, synthetic construct
REARQVT

SEQ ID NO: 183529 - protein, 7 aa, synthetic construct
MEPRPKY

SEQ ID NO: 183530 - protein, 7 aa, synthetic construct
MIPRQHA

SEQ ID NO: 183531 - protein, 7 aa, synthetic construct
MQLRQRE

SEQ ID NO: 183532 - protein, 7 aa, synthetic construct
MLPRQHN

SEQ ID NO: 183533 - protein, 7 aa, synthetic construct
MEIRTRV

SEQ ID NO: 183534 - protein, 7 aa, synthetic construct
MEPRGRN

SEQ ID NO: 183535 - protein, 7 aa, synthetic construct
QENRQRP

SEQ ID NO: 183536 - protein, 7 aa, synthetic construct
MRPRQEV

SEQ ID NO: 183537 - protein, 7 aa, synthetic construct
LENRSRT

SEQ ID NO: 183538 - protein, 7 aa, synthetic construct
MEKHQRA

SEQ ID NO: 183539 - protein, 7 aa, synthetic construct
MIPRSHT

SEQ ID NO: 183540 - protein, 7 aa, synthetic construct
FDPRART

SEQ ID NO: 183541 - protein, 7 aa, synthetic construct
IEPRQRM

SEQ ID NO: 183542 - protein, 7 aa, synthetic construct
MEVSKRT

SEQ ID NO: 183543 - protein, 7 aa, synthetic construct
MEPRGVR

SEQ ID NO: 183544 - protein, 7 aa, synthetic construct
VEPRNRM

SEQ ID NO: 183545 - protein, 7 aa, synthetic construct
MGPRERS

SEQ ID NO: 183546 - protein, 7 aa, synthetic construct
MEPNARR

SEQ ID NO: 183547 - protein, 7 aa, synthetic construct
MENRQQK

SEQ ID NO: 183548 - protein, 7 aa, synthetic construct
VNPRERT

SEQ ID NO: 183549 - protein, 7 aa, synthetic construct
MEKSIRT

SEQ ID NO: 183550 - protein, 7 aa, synthetic construct
IEPRTRV

SEQ ID NO: 183551 - protein, 7 aa, synthetic construct
IESRVRT

SEQ ID NO: 183552 - protein, 7 aa, synthetic construct
REPVSRT

SEQ ID NO: 183553 - protein, 7 aa, synthetic construct
MRPRQLE

SEQ ID NO: 183554 - protein, 7 aa, synthetic construct
TEPTRRT

SEQ ID NO: 183555 - protein, 7 aa, synthetic construct
MEKMQRL

SEQ ID NO: 183556 - protein, 7 aa, synthetic construct
LEARIRT

SEQ ID NO: 183557 - protein, 7 aa, synthetic construct
MEKGQRA

SEQ ID NO: 183558 - protein, 7 aa, synthetic construct
MTERQRT

SEQ ID NO: 183559 - protein, 7 aa, synthetic construct
MEARGKT

SEQ ID NO: 183560 - protein, 7 aa, synthetic construct
MEPNKRQ

SEQ ID NO: 183561 - protein, 7 aa, synthetic construct
MIPRHQT

SEQ ID NO: 183562 - protein, 7 aa, synthetic construct
MIPRANT

SEQ ID NO: 183563 - protein, 7 aa, synthetic construct
FEPRMRG

SEQ ID NO: 183564 - protein, 7 aa, synthetic construct
MEMRVRG

SEQ ID NO: 183565 - protein, 7 aa, synthetic construct
REPRTTT

SEQ ID NO: 183566 - protein, 7 aa, synthetic construct
REPMQRS

SEQ ID NO: 183567 - protein, 7 aa, synthetic construct
VEPRARQ

SEQ ID NO: 183568 - protein, 7 aa, synthetic construct
LEDRKRT

SEQ ID NO: 183569 - protein, 7 aa, synthetic construct
MEPRPTR

SEQ ID NO: 183570 - protein, 7 aa, synthetic construct
LQPRQRD

SEQ ID NO: 183571 - protein, 7 aa, synthetic construct
SEVKQRT

SEQ ID NO: 183572 - protein, 7 aa, synthetic construct
MEIRQQK

SEQ ID NO: 183573 - protein, 7 aa, synthetic construct
MMPRQNQ

SEQ ID NO: 183574 - protein, 7 aa, synthetic construct
LEMRTRT

SEQ ID NO: 183575 - protein, 7 aa, synthetic construct
MTPNQRH

SEQ ID NO: 183576 - protein, 7 aa, synthetic construct
MEGKGRT

SEQ ID NO: 183577 - protein, 7 aa, synthetic construct
TEQRQRS

SEQ ID NO: 183578 - protein, 7 aa, synthetic construct
MENRQMK

SEQ ID NO: 183579 - protein, 7 aa, synthetic construct
ARPRQDT

SEQ ID NO: 183580 - protein, 7 aa, synthetic construct
KEPRDRQ

SEQ ID NO: 183581 - protein, 7 aa, synthetic construct
PEPRQKT

SEQ ID NO: 183582 - protein, 7 aa, synthetic construct
AENKQRT

SEQ ID NO: 183583 - protein, 7 aa, synthetic construct
SEPRSRV

SEQ ID NO: 183584 - protein, 7 aa, synthetic construct
KEPRGYT

SEQ ID NO: 183585 - protein, 7 aa, synthetic construct
MIPRTRD

SEQ ID NO: 183586 - protein, 7 aa, synthetic construct
PEPNQRK

SEQ ID NO: 183587 - protein, 7 aa, synthetic construct
YEPMKRT

SEQ ID NO: 183588 - protein, 7 aa, synthetic construct
MVPNQRN

SEQ ID NO: 183589 - protein, 7 aa, synthetic construct
MADRPRT

SEQ ID NO: 183590 - protein, 7 aa, synthetic construct
AEQRQRV

SEQ ID NO: 183591 - protein, 7 aa, synthetic construct
MDNRQRA

SEQ ID NO: 183592 - protein, 7 aa, synthetic construct
AMPRQRE

SEQ ID NO: 183593 - protein, 7 aa, synthetic construct
MEPRPKQ

SEQ ID NO: 183594 - protein, 7 aa, synthetic construct
MAPRNRD

SEQ ID NO: 183595 - protein, 7 aa, synthetic construct
MEKRGST

SEQ ID NO: 183596 - protein, 7 aa, synthetic construct
MEPRMKY

SEQ ID NO: 183597 - protein, 7 aa, synthetic construct
MEPRRSI

SEQ ID NO: 183598 - protein, 7 aa, synthetic construct
MEKRQMI

SEQ ID NO: 183599 - protein, 7 aa, synthetic construct
METRQIK

SEQ ID NO: 183600 - protein, 7 aa, synthetic construct
QEPRARN

SEQ ID NO: 183601 - protein, 7 aa, synthetic construct
MEPNKRF

SEQ ID NO: 183602 - protein, 7 aa, synthetic construct
KEHTQRT

SEQ ID NO: 183603 - protein, 7 aa, synthetic construct
MEGKQRY

SEQ ID NO: 183604 - protein, 7 aa, synthetic construct
MEPRMNR

SEQ ID NO: 183605 - protein, 7 aa, synthetic construct
LEPRARQ

SEQ ID NO: 183606 - protein, 7 aa, synthetic construct
DMPRQRM

SEQ ID NO: 183607 - protein, 7 aa, synthetic construct
PMDRQRT

SEQ ID NO: 183608 - protein, 7 aa, synthetic construct
MEQRNKT

SEQ ID NO: 183609 - protein, 7 aa, synthetic construct
MEKNVRT

SEQ ID NO: 183610 - protein, 7 aa, synthetic construct
REPGQRY

SEQ ID NO: 183611 - protein, 7 aa, synthetic construct
MKPRQEM

SEQ ID NO: 183612 - protein, 7 aa, synthetic construct
AGPRQNT

SEQ ID NO: 183613 - protein, 7 aa, synthetic construct
MEPKPRG

SEQ ID NO: 183614 - protein, 7 aa, synthetic construct
MENRQRG

SEQ ID NO: 183615 - protein, 7 aa, synthetic construct
MESLKRT

SEQ ID NO: 183616 - protein, 7 aa, synthetic construct
MENRVRQ

SEQ ID NO: 183617 - protein, 7 aa, synthetic construct
VEPRSRT

SEQ ID NO: 183618 - protein, 7 aa, synthetic construct
MIPRAST

SEQ ID NO: 183619 - protein, 7 aa, synthetic construct
MKIRQDT

SEQ ID NO: 183620 - protein, 7 aa, synthetic construct
MVPIQRA

SEQ ID NO: 183621 - protein, 7 aa, synthetic construct
MEKRQAM

SEQ ID NO: 183622 - protein, 7 aa, synthetic construct
TDPRQRG

SEQ ID NO: 183623 - protein, 7 aa, synthetic construct
TEPRQKN

SEQ ID NO: 183624 - protein, 7 aa, synthetic construct
PEPRQIK

SEQ ID NO: 183625 - protein, 7 aa, synthetic construct
MKNRQDT

SEQ ID NO: 183626 - protein, 7 aa, synthetic construct
NEPRLRT

SEQ ID NO: 183627 - protein, 7 aa, synthetic construct
KEDRQRT

SEQ ID NO: 183628 - protein, 7 aa, synthetic construct
MPPRDRH

SEQ ID NO: 183629 - protein, 7 aa, synthetic construct
MEPPRRQ

SEQ ID NO: 183630 - protein, 7 aa, synthetic construct
EAPRVRT

SEQ ID NO: 183631 - protein, 7 aa, synthetic construct
LEGRIRT

SEQ ID NO: 183632 - protein, 7 aa, synthetic construct
MEVRVKT

SEQ ID NO: 183633 - protein, 7 aa, synthetic construct
QEIRQRA

SEQ ID NO: 183634 - protein, 7 aa, synthetic construct
NENKQRT

SEQ ID NO: 183635 - protein, 7 aa, synthetic construct
IENRVRT

SEQ ID NO: 183636 - protein, 7 aa, synthetic construct
MESRLRA

SEQ ID NO: 183637 - protein, 7 aa, synthetic construct
KEPRFST

SEQ ID NO: 183638 - protein, 7 aa, synthetic construct
MEKVART

SEQ ID NO: 183639 - protein, 7 aa, synthetic construct
MVERQRA

SEQ ID NO: 183640 - protein, 7 aa, synthetic construct
KEDRQRY

SEQ ID NO: 183641 - protein, 7 aa, synthetic construct
TDNRQRT

SEQ ID NO: 183642 - protein, 7 aa, synthetic construct
MEQRPRP

SEQ ID NO: 183643 - protein, 7 aa, synthetic construct
MTPRHIT

SEQ ID NO: 183644 - protein, 7 aa, synthetic construct
AEPRMRA

SEQ ID NO: 183645 - protein, 7 aa, synthetic construct
MSPRQHG

SEQ ID NO: 183646 - protein, 7 aa, synthetic construct
MEPRAYK

SEQ ID NO: 183647 - protein, 7 aa, synthetic construct
MEQRQRV

SEQ ID NO: 183648 - protein, 7 aa, synthetic construct
MVERNRT

SEQ ID NO: 183649 - protein, 7 aa, synthetic construct
AEPRARS

SEQ ID NO: 183650 - protein, 7 aa, synthetic construct
SDPRQRG

SEQ ID NO: 183651 - protein, 7 aa, synthetic construct
TENRGRT

SEQ ID NO: 183652 - protein, 7 aa, synthetic construct
MENGQRR

SEQ ID NO: 183653 - protein, 7 aa, synthetic construct
MTPIQRG

SEQ ID NO: 183654 - protein, 7 aa, synthetic construct
QEPRNRG

SEQ ID NO: 183655 - protein, 7 aa, synthetic construct
SEPRNRS

SEQ ID NO: 183656 - protein, 7 aa, synthetic construct
MRPRAET

SEQ ID NO: 183657 - protein, 7 aa, synthetic construct
TEPRQRA

SEQ ID NO: 183658 - protein, 7 aa, synthetic construct
DQPRIRT

SEQ ID NO: 183659 - protein, 7 aa, synthetic construct
AEPRLRA

SEQ ID NO: 183660 - protein, 7 aa, synthetic construct
MEARVRA

SEQ ID NO: 183661 - protein, 7 aa, synthetic construct
GETRLRT

SEQ ID NO: 183662 - protein, 7 aa, synthetic construct
MEKRQNF

SEQ ID NO: 183663 - protein, 7 aa, synthetic construct
GEPKTRT

SEQ ID NO: 183664 - protein, 7 aa, synthetic construct
YEPRNRS

SEQ ID NO: 183665 - protein, 7 aa, synthetic construct
MSTRQRE

SEQ ID NO: 183666 - protein, 7 aa, synthetic construct
KETRQNT

SEQ ID NO: 183667 - protein, 7 aa, synthetic construct
MEKVSRT

SEQ ID NO: 183668 - protein, 7 aa, synthetic construct
DLPRNRT

SEQ ID NO: 183669 - protein, 7 aa, synthetic construct
LEPRMRM

SEQ ID NO: 183670 - protein, 7 aa, synthetic construct
MEPRLSR

SEQ ID NO: 183671 - protein, 7 aa, synthetic construct
SEQRQRV

SEQ ID NO: 183672 - protein, 7 aa, synthetic construct
AEPRRGT

SEQ ID NO: 183673 - protein, 7 aa, synthetic construct
GEPRMRI

SEQ ID NO: 183674 - protein, 7 aa, synthetic construct
MQPRDRA

SEQ ID NO: 183675 - protein, 7 aa, synthetic construct
FRPRQDT

SEQ ID NO: 183676 - protein, 7 aa, synthetic construct
MESRTRI

SEQ ID NO: 183677 - protein, 7 aa, synthetic construct
DAVRQRT

SEQ ID NO: 183678 - protein, 7 aa, synthetic construct
MVPDQRK

SEQ ID NO: 183679 - protein, 7 aa, synthetic construct
MEARQKA

SEQ ID NO: 183680 - protein, 7 aa, synthetic construct
MPERQRV

SEQ ID NO: 183681 - protein, 7 aa, synthetic construct
MVPRQER

SEQ ID NO: 183682 - protein, 7 aa, synthetic construct
MGPRQHN

SEQ ID NO: 183683 - protein, 7 aa, synthetic construct
MEKRQER

SEQ ID NO: 183684 - protein, 7 aa, synthetic construct
MERTLRT

SEQ ID NO: 183685 - protein, 7 aa, synthetic construct
HIPRERT

SEQ ID NO: 183686 - protein, 7 aa, synthetic construct
VLERQRT

SEQ ID NO: 183687 - protein, 7 aa, synthetic construct
TEPRQKS

SEQ ID NO: 183688 - protein, 7 aa, synthetic construct
MEPNMRK

SEQ ID NO: 183689 - protein, 7 aa, synthetic construct
MEIKART

SEQ ID NO: 183690 - protein, 7 aa, synthetic construct
MQPRQSH

SEQ ID NO: 183691 - protein, 7 aa, synthetic construct
IEPRHRQ

SEQ ID NO: 183692 - protein, 7 aa, synthetic construct
LHPRERT

SEQ ID NO: 183693 - protein, 7 aa, synthetic construct
MTPHQRG

SEQ ID NO: 183694 - protein, 7 aa, synthetic construct
LEPRQRN

SEQ ID NO: 183695 - protein, 7 aa, synthetic construct
IESRQRQ

SEQ ID NO: 183696 - protein, 7 aa, synthetic construct
PIPRERT

SEQ ID NO: 183697 - protein, 7 aa, synthetic construct
MVPNQRG

SEQ ID NO: 183698 - protein, 7 aa, synthetic construct
MEARVRV

SEQ ID NO: 183699 - protein, 7 aa, synthetic construct
MEVRRGT

SEQ ID NO: 183700 - protein, 7 aa, synthetic construct
QEVRGRT

SEQ ID NO: 183701 - protein, 7 aa, synthetic construct
MIERQRP

SEQ ID NO: 183702 - protein, 7 aa, synthetic construct
AEKRQVT

SEQ ID NO: 183703 - protein, 7 aa, synthetic construct
MEKNQRM

SEQ ID NO: 183704 - protein, 7 aa, synthetic construct
MEKLSRT

SEQ ID NO: 183705 - protein, 7 aa, synthetic construct
METRQLK

SEQ ID NO: 183706 - protein, 7 aa, synthetic construct
MEPAQKK

SEQ ID NO: 183707 - protein, 7 aa, synthetic construct
EAPKQRT

SEQ ID NO: 183708 - protein, 7 aa, synthetic construct
PETKQRT

SEQ ID NO: 183709 - protein, 7 aa, synthetic construct
PEAKQRT

SEQ ID NO: 183710 - protein, 7 aa, synthetic construct
HPPRQNT

SEQ ID NO: 183711 - protein, 7 aa, synthetic construct
MEKSQRM

SEQ ID NO: 183712 - protein, 7 aa, synthetic construct
MSPNQRH

SEQ ID NO: 183713 - protein, 7 aa, synthetic construct
MGERQRS

SEQ ID NO: 183714 - protein, 7 aa, synthetic construct
MENRPKT

SEQ ID NO: 183715 - protein, 7 aa, synthetic construct
PEPQQRK

SEQ ID NO: 183716 - protein, 7 aa, synthetic construct
TERLQRT

SEQ ID NO: 183717 - protein, 7 aa, synthetic construct
QEGRQRP

SEQ ID NO: 183718 - protein, 7 aa, synthetic construct
KEPRDRG

SEQ ID NO: 183719 - protein, 7 aa, synthetic construct
MEPKYRS

SEQ ID NO: 183720 - protein, 7 aa, synthetic construct
LEPRIRS

SEQ ID NO: 183721 - protein, 7 aa, synthetic construct
FEMKQRT

SEQ ID NO: 183722 - protein, 7 aa, synthetic construct
NERGQRT

SEQ ID NO: 183723 - protein, 7 aa, synthetic construct
IELRTRT

SEQ ID NO: 183724 - protein, 7 aa, synthetic construct
MELRQKV

SEQ ID NO: 183725 - protein, 7 aa, synthetic construct
DLNRQRT

SEQ ID NO: 183726 - protein, 7 aa, synthetic construct
MLPRQAQ

SEQ ID NO: 183727 - protein, 7 aa, synthetic construct
LEVRPRT

SEQ ID NO: 183728 - protein, 7 aa, synthetic construct
MTERQRS

SEQ ID NO: 183729 - protein, 7 aa, synthetic construct
IEPRQVR

SEQ ID NO: 183730 - protein, 7 aa, synthetic construct
FEPRTRV

SEQ ID NO: 183731 - protein, 7 aa, synthetic construct
VEPRMRI

SEQ ID NO: 183732 - protein, 7 aa, synthetic construct
GEPKPRT

SEQ ID NO: 183733 - protein, 7 aa, synthetic construct
LEPRVRS

SEQ ID NO: 183734 - protein, 7 aa, synthetic construct
NEQRQRG

SEQ ID NO: 183735 - protein, 7 aa, synthetic construct
MTPGQRQ

SEQ ID NO: 183736 - protein, 7 aa, synthetic construct
MPPDQRR

SEQ ID NO: 183737 - protein, 7 aa, synthetic construct
LDVRQRT

SEQ ID NO: 183738 - protein, 7 aa, synthetic construct
PEVKQRT

SEQ ID NO: 183739 - protein, 7 aa, synthetic construct
NEPRMRL

SEQ ID NO: 183740 - protein, 7 aa, synthetic construct
PEVRQKT

SEQ ID NO: 183741 - protein, 7 aa, synthetic construct
MENNQRK

SEQ ID NO: 183742 - protein, 7 aa, synthetic construct
YEGKQRT

SEQ ID NO: 183743 - protein, 7 aa, synthetic construct
MMGRQRE

SEQ ID NO: 183744 - protein, 7 aa, synthetic construct
MEKTQRH

SEQ ID NO: 183745 - protein, 7 aa, synthetic construct
REPNQRP

SEQ ID NO: 183746 - protein, 7 aa, synthetic construct
LEARQKT

SEQ ID NO: 183747 - protein, 7 aa, synthetic construct
TEPRQRP

SEQ ID NO: 183748 - protein, 7 aa, synthetic construct
NNPRDRT

SEQ ID NO: 183749 - protein, 7 aa, synthetic construct
MEPVQKK

SEQ ID NO: 183750 - protein, 7 aa, synthetic construct
PDARQRT

SEQ ID NO: 183751 - protein, 7 aa, synthetic construct
GGPRERT

SEQ ID NO: 183752 - protein, 7 aa, synthetic construct
METRQNK

SEQ ID NO: 183753 - protein, 7 aa, synthetic construct
PIPRDRT

SEQ ID NO: 183754 - protein, 7 aa, synthetic construct
METRQKT

SEQ ID NO: 183755 - protein, 7 aa, synthetic construct
MENRVRN

SEQ ID NO: 183756 - protein, 7 aa, synthetic construct
IEPRLRG

SEQ ID NO: 183757 - protein, 7 aa, synthetic construct
SEPRTRP

SEQ ID NO: 183758 - protein, 7 aa, synthetic construct
MMPRQDK

SEQ ID NO: 183759 - protein, 7 aa, synthetic construct
MEPRMTR

SEQ ID NO: 183760 - protein, 7 aa, synthetic construct
MFPRQDK

SEQ ID NO: 183761 - protein, 7 aa, synthetic construct
HEPRIRN

SEQ ID NO: 183762 - protein, 7 aa, synthetic construct
GEPRARP

SEQ ID NO: 183763 - protein, 7 aa, synthetic construct
MPDRQRN

SEQ ID NO: 183764 - protein, 7 aa, synthetic construct
MEPRNRS

SEQ ID NO: 183765 - protein, 7 aa, synthetic construct
LEVRART

SEQ ID NO: 183766 - protein, 7 aa, synthetic construct
REPSSRT

SEQ ID NO: 183767 - protein, 7 aa, synthetic construct
MELRQQK

SEQ ID NO: 183768 - protein, 7 aa, synthetic construct
VETRQRS

SEQ ID NO: 183769 - protein, 7 aa, synthetic construct
MAERQRN

SEQ ID NO: 183770 - protein, 7 aa, synthetic construct
TELRTRT

SEQ ID NO: 183771 - protein, 7 aa, synthetic construct
MEPRFKS

SEQ ID NO: 183772 - protein, 7 aa, synthetic construct
AIDRQRT

SEQ ID NO: 183773 - protein, 7 aa, synthetic construct
LEKRQLT

SEQ ID NO: 183774 - protein, 7 aa, synthetic construct
GEPRGRQ

SEQ ID NO: 183775 - protein, 7 aa, synthetic construct
SEVRGRT

SEQ ID NO: 183776 - protein, 7 aa, synthetic construct
TEARQRT

SEQ ID NO: 183777 - protein, 7 aa, synthetic construct
MEMRSKT

SEQ ID NO: 183778 - protein, 7 aa, synthetic construct
MESRPKT

SEQ ID NO: 183779 - protein, 7 aa, synthetic construct
QMERQRT

SEQ ID NO: 183780 - protein, 7 aa, synthetic construct
IEVRNRT

SEQ ID NO: 183781 - protein, 7 aa, synthetic construct
MEVRQSK

SEQ ID NO: 183782 - protein, 7 aa, synthetic construct
ITPRERT

SEQ ID NO: 183783 - protein, 7 aa, synthetic construct
MEPVQKR

SEQ ID NO: 183784 - protein, 7 aa, synthetic construct
MERQQRV

SEQ ID NO: 183785 - protein, 7 aa, synthetic construct
YETRQRQ

SEQ ID NO: 183786 - protein, 7 aa, synthetic construct
EPPRQRS

SEQ ID NO: 183787 - protein, 7 aa, synthetic construct
MERGART

SEQ ID NO: 183788 - protein, 7 aa, synthetic construct
MEVRQKG

SEQ ID NO: 183789 - protein, 7 aa, synthetic construct
LEGKQRT

SEQ ID NO: 183790 - protein, 7 aa, synthetic construct
GEPRQKG

SEQ ID NO: 183791 - protein, 7 aa, synthetic construct
METKHRT

SEQ ID NO: 183792 - protein, 7 aa, synthetic construct
PDPRART

SEQ ID NO: 183793 - protein, 7 aa, synthetic construct
MMERQRA

SEQ ID NO: 183794 - protein, 7 aa, synthetic construct
AEPAKRT

SEQ ID NO: 183795 - protein, 7 aa, synthetic construct
MVDRQRI

SEQ ID NO: 183796 - protein, 7 aa, synthetic construct
MEPVKRQ

SEQ ID NO: 183797 - protein, 7 aa, synthetic construct
METRIRA

SEQ ID NO: 183798 - protein, 7 aa, synthetic construct
IERLQRT

SEQ ID NO: 183799 - protein, 7 aa, synthetic construct
MEGIKRT

SEQ ID NO: 183800 - protein, 7 aa, synthetic construct
MEKMQRY

SEQ ID NO: 183801 - protein, 7 aa, synthetic construct
MEKQQRA

SEQ ID NO: 183802 - protein, 7 aa, synthetic construct
MIPREKT

SEQ ID NO: 183803 - protein, 7 aa, synthetic construct
DIPRQRA

SEQ ID NO: 183804 - protein, 7 aa, synthetic construct
MEAVKRT

SEQ ID NO: 183805 - protein, 7 aa, synthetic construct
VEPRRST

SEQ ID NO: 183806 - protein, 7 aa, synthetic construct
VPPRERT

SEQ ID NO: 183807 - protein, 7 aa, synthetic construct
MAERQRM

SEQ ID NO: 183808 - protein, 7 aa, synthetic construct
HEPRQKV

SEQ ID NO: 183809 - protein, 7 aa, synthetic construct
MEKNQRV

SEQ ID NO: 183810 - protein, 7 aa, synthetic construct
MEKRQAG

SEQ ID NO: 183811 - protein, 7 aa, synthetic construct
VEPRQNR

SEQ ID NO: 183812 - protein, 7 aa, synthetic construct
MEKLQRT

SEQ ID NO: 183813 - protein, 7 aa, synthetic construct
MTPRERS

SEQ ID NO: 183814 - protein, 7 aa, synthetic construct
SETRQRA

SEQ ID NO: 183815 - protein, 7 aa, synthetic construct
VEPRLRM

SEQ ID NO: 183816 - protein, 7 aa, synthetic construct
DPPRQRM

SEQ ID NO: 183817 - protein, 7 aa, synthetic construct
MEPRRAQ

SEQ ID NO: 183818 - protein, 7 aa, synthetic construct
MEKRSQT

SEQ ID NO: 183819 - protein, 7 aa, synthetic construct
MNPRERA

SEQ ID NO: 183820 - protein, 7 aa, synthetic construct
GEPRLRQ

SEQ ID NO: 183821 - protein, 7 aa, synthetic construct
PEPRQKS

SEQ ID NO: 183822 - protein, 7 aa, synthetic construct
MAPRRET

SEQ ID NO: 183823 - protein, 7 aa, synthetic construct
MEPRQRG

SEQ ID NO: 183824 - protein, 7 aa, synthetic construct
SEPRART

SEQ ID NO: 183825 - protein, 7 aa, synthetic construct
MEVKQRI

SEQ ID NO: 183826 - protein, 7 aa, synthetic construct
DVPRQRA

SEQ ID NO: 183827 - protein, 7 aa, synthetic construct
MPPRPRD

SEQ ID NO: 183828 - protein, 7 aa, synthetic construct
METRVRA

SEQ ID NO: 183829 - protein, 7 aa, synthetic construct
VERLQRT

SEQ ID NO: 183830 - protein, 7 aa, synthetic construct
MERTSRT

SEQ ID NO: 183831 - protein, 7 aa, synthetic construct
LEPRMRI

SEQ ID NO: 183832 - protein, 7 aa, synthetic construct
METRQAK

SEQ ID NO: 183833 - protein, 7 aa, synthetic construct
QEPRGRA

SEQ ID NO: 183834 - protein, 7 aa, synthetic construct
MTPRERI

SEQ ID NO: 183835 - protein, 7 aa, synthetic construct
VEPRPRS

SEQ ID NO: 183836 - protein, 7 aa, synthetic construct
PENRQRV

SEQ ID NO: 183837 - protein, 7 aa, synthetic construct
MKPRFET

SEQ ID NO: 183838 - protein, 7 aa, synthetic construct
MKPRPET

SEQ ID NO: 183839 - protein, 7 aa, synthetic construct
MERNPRT

SEQ ID NO: 183840 - protein, 7 aa, synthetic construct
MEKIQRV

SEQ ID NO: 183841 - protein, 7 aa, synthetic construct
LEPRNRN

SEQ ID NO: 183842 - protein, 7 aa, synthetic construct
SENRQKT

SEQ ID NO: 183843 - protein, 7 aa, synthetic construct
YEPRQIK

SEQ ID NO: 183844 - protein, 7 aa, synthetic construct
YEPRTRS

SEQ ID NO: 183845 - protein, 7 aa, synthetic construct
MEPTRRT

SEQ ID NO: 183846 - protein, 7 aa, synthetic construct
MPPRERA

SEQ ID NO: 183847 - protein, 7 aa, synthetic construct
TEQRQKT

SEQ ID NO: 183848 - protein, 7 aa, synthetic construct
NEPQRRT

SEQ ID NO: 183849 - protein, 7 aa, synthetic construct
MEPRSAR

SEQ ID NO: 183850 - protein, 7 aa, synthetic construct
MQERPRT

SEQ ID NO: 183851 - protein, 7 aa, synthetic construct
MEARARN

SEQ ID NO: 183852 - protein, 7 aa, synthetic construct
METRIRT

SEQ ID NO: 183853 - protein, 7 aa, synthetic construct
NEPRLRN

SEQ ID NO: 183854 - protein, 7 aa, synthetic construct
SEPRGRV

SEQ ID NO: 183855 - protein, 7 aa, synthetic construct
MEPTARK

SEQ ID NO: 183856 - protein, 7 aa, synthetic construct
QEPRTRI

SEQ ID NO: 183857 - protein, 7 aa, synthetic construct
MESRLRV

SEQ ID NO: 183858 - protein, 7 aa, synthetic construct
MENRARV

SEQ ID NO: 183859 - protein, 7 aa, synthetic construct
MGPRHST

SEQ ID NO: 183860 - protein, 7 aa, synthetic construct
QEPRTRG

SEQ ID NO: 183861 - protein, 7 aa, synthetic construct
QDPRQRL

SEQ ID NO: 183862 - protein, 7 aa, synthetic construct
PEPRQKV

SEQ ID NO: 183863 - protein, 7 aa, synthetic construct
MTPRTRD

SEQ ID NO: 183864 - protein, 7 aa, synthetic construct
MEVRLRS

SEQ ID NO: 183865 - protein, 7 aa, synthetic construct
TEKRQVT

SEQ ID NO: 183866 - protein, 7 aa, synthetic construct
MEPRIVR

SEQ ID NO: 183867 - protein, 7 aa, synthetic construct
MEKRQSQ

SEQ ID NO: 183868 - protein, 7 aa, synthetic construct
MSNRQRE

SEQ ID NO: 183869 - protein, 7 aa, synthetic construct
DQPRQKT

SEQ ID NO: 183870 - protein, 7 aa, synthetic construct
NEPRIRA

SEQ ID NO: 183871 - protein, 7 aa, synthetic construct
MERAQRA

SEQ ID NO: 183872 - protein, 7 aa, synthetic construct
IEPRNRF

SEQ ID NO: 183873 - protein, 7 aa, synthetic construct
MQPRQSA

SEQ ID NO: 183874 - protein, 7 aa, synthetic construct
DIPRGRT

SEQ ID NO: 183875 - protein, 7 aa, synthetic construct
MMPRERA

SEQ ID NO: 183876 - protein, 7 aa, synthetic construct
YEPRTRG

SEQ ID NO: 183877 - protein, 7 aa, synthetic construct
FEPRGRQ

SEQ ID NO: 183878 - protein, 7 aa, synthetic construct
YETRQRG

SEQ ID NO: 183879 - protein, 7 aa, synthetic construct
MEGRIRG

SEQ ID NO: 183880 - protein, 7 aa, synthetic construct
MIPRSRE

SEQ ID NO: 183881 - protein, 7 aa, synthetic construct
MNPRRET

SEQ ID NO: 183882 - protein, 7 aa, synthetic construct
DTPRQRP

SEQ ID NO: 183883 - protein, 7 aa, synthetic construct
PDPRQKT

SEQ ID NO: 183884 - protein, 7 aa, synthetic construct
MKPRNDT

SEQ ID NO: 183885 - protein, 7 aa, synthetic construct
LEARQRM

SEQ ID NO: 183886 - protein, 7 aa, synthetic construct
MEMRTRA

SEQ ID NO: 183887 - protein, 7 aa, synthetic construct
MEKIQRQ

SEQ ID NO: 183888 - protein, 7 aa, synthetic construct
GEQRQRV

SEQ ID NO: 183889 - protein, 7 aa, synthetic construct
MEKRQLL

SEQ ID NO: 183890 - protein, 7 aa, synthetic construct
PEPRQGR

SEQ ID NO: 183891 - protein, 7 aa, synthetic construct
VEQRQRP

SEQ ID NO: 183892 - protein, 7 aa, synthetic construct
REPRQSV

SEQ ID NO: 183893 - protein, 7 aa, synthetic construct
MEPRQVR

SEQ ID NO: 183894 - protein, 7 aa, synthetic construct
MEPKERK

SEQ ID NO: 183895 - protein, 7 aa, synthetic construct
TETRIRT

SEQ ID NO: 183896 - protein, 7 aa, synthetic construct
MEKRQST

SEQ ID NO: 183897 - protein, 7 aa, synthetic construct
TEIKQRT

SEQ ID NO: 183898 - protein, 7 aa, synthetic construct
MELTKRT

SEQ ID NO: 183899 - protein, 7 aa, synthetic construct
TESRIRT

SEQ ID NO: 183900 - protein, 7 aa, synthetic construct
MPERQRT

SEQ ID NO: 183901 - protein, 7 aa, synthetic construct
NEKRQVT

SEQ ID NO: 183902 - protein, 7 aa, synthetic construct
IEPRPRN

SEQ ID NO: 183903 - protein, 7 aa, synthetic construct
TEPRRAT

SEQ ID NO: 183904 - protein, 7 aa, synthetic construct
MVPRQNH

SEQ ID NO: 183905 - protein, 7 aa, synthetic construct
LEPRTRQ

SEQ ID NO: 183906 - protein, 7 aa, synthetic construct
QEARQRT

SEQ ID NO: 183907 - protein, 7 aa, synthetic construct
IEPRPRS

SEQ ID NO: 183908 - protein, 7 aa, synthetic construct
MEARPRS

SEQ ID NO: 183909 - protein, 7 aa, synthetic construct
REGRQGT

SEQ ID NO: 183910 - protein, 7 aa, synthetic construct
MESRIRS

SEQ ID NO: 183911 - protein, 7 aa, synthetic construct
YEPRVRT

SEQ ID NO: 183912 - protein, 7 aa, synthetic construct
MHPRQNQ

SEQ ID NO: 183913 - protein, 7 aa, synthetic construct
MKVRQDT

SEQ ID NO: 183914 - protein, 7 aa, synthetic construct
MRPHERT

SEQ ID NO: 183915 - protein, 7 aa, synthetic construct
DTARQRT

SEQ ID NO: 183916 - protein, 7 aa, synthetic construct
MEAKQRG

SEQ ID NO: 183917 - protein, 7 aa, synthetic construct
MEKNQRQ

SEQ ID NO: 183918 - protein, 7 aa, synthetic construct
LTPRQRD

SEQ ID NO: 183919 - protein, 7 aa, synthetic construct
NDPRIRT

SEQ ID NO: 183920 - protein, 7 aa, synthetic construct
MHPRQQN

SEQ ID NO: 183921 - protein, 7 aa, synthetic construct
IEPRTRA

SEQ ID NO: 183922 - protein, 7 aa, synthetic construct
MVPRDRS

SEQ ID NO: 183923 - protein, 7 aa, synthetic construct
PEPRQQK

SEQ ID NO: 183924 - protein, 7 aa, synthetic construct
KEDRQRI

SEQ ID NO: 183925 - protein, 7 aa, synthetic construct
IEPRVRN

SEQ ID NO: 183926 - protein, 7 aa, synthetic construct
DGPRQRI

SEQ ID NO: 183927 - protein, 7 aa, synthetic construct
VEQRMRT

SEQ ID NO: 183928 - protein, 7 aa, synthetic construct
QEPRIRA

SEQ ID NO: 183929 - protein, 7 aa, synthetic construct
EPPRQRA

SEQ ID NO: 183930 - protein, 7 aa, synthetic construct
QPERQRT

SEQ ID NO: 183931 - protein, 7 aa, synthetic construct
MEKRHLT

SEQ ID NO: 183932 - protein, 7 aa, synthetic construct
NLDRQRT

SEQ ID NO: 183933 - protein, 7 aa, synthetic construct
MEIKNRT

SEQ ID NO: 183934 - protein, 7 aa, synthetic construct
METRLRV

SEQ ID NO: 183935 - protein, 7 aa, synthetic construct
GEPRIRG

SEQ ID NO: 183936 - protein, 7 aa, synthetic construct
MPPVQRH

SEQ ID NO: 183937 - protein, 7 aa, synthetic construct
MRPRQDA

SEQ ID NO: 183938 - protein, 7 aa, synthetic construct
TEPRIRT

SEQ ID NO: 183939 - protein, 7 aa, synthetic construct
VEQRART

SEQ ID NO: 183940 - protein, 7 aa, synthetic construct
MNPRDRM

SEQ ID NO: 183941 - protein, 7 aa, synthetic construct
HMPRERT

SEQ ID NO: 183942 - protein, 7 aa, synthetic construct
IAERQRT

SEQ ID NO: 183943 - protein, 7 aa, synthetic construct
DKPSQRT

SEQ ID NO: 183944 - protein, 7 aa, synthetic construct
REPRERG

SEQ ID NO: 183945 - protein, 7 aa, synthetic construct
SQPRERT

SEQ ID NO: 183946 - protein, 7 aa, synthetic construct
PQERQRT

SEQ ID NO: 183947 - protein, 7 aa, synthetic construct
MEPRARN

SEQ ID NO: 183948 - protein, 7 aa, synthetic construct
MEPRGFK

SEQ ID NO: 183949 - protein, 7 aa, synthetic construct
MDPRNRN

SEQ ID NO: 183950 - protein, 7 aa, synthetic construct
MESRPRV

SEQ ID NO: 183951 - protein, 7 aa, synthetic construct
AEKLQRT

SEQ ID NO: 183952 - protein, 7 aa, synthetic construct
AEPRQGK

SEQ ID NO: 183953 - protein, 7 aa, synthetic construct
LEVRSRT

SEQ ID NO: 183954 - protein, 7 aa, synthetic construct
MLPRSRE

SEQ ID NO: 183955 - protein, 7 aa, synthetic construct
KEPYQRP

SEQ ID NO: 183956 - protein, 7 aa, synthetic construct
MKPRQMD

SEQ ID NO: 183957 - protein, 7 aa, synthetic construct
IEPRQRA

SEQ ID NO: 183958 - protein, 7 aa, synthetic construct
VEGRQRP

SEQ ID NO: 183959 - protein, 7 aa, synthetic construct
SEMRQRA

SEQ ID NO: 183960 - protein, 7 aa, synthetic construct
MIPHQRA

SEQ ID NO: 183961 - protein, 7 aa, synthetic construct
LVPRQRE

SEQ ID NO: 183962 - protein, 7 aa, synthetic construct
REPSGRT

SEQ ID NO: 183963 - protein, 7 aa, synthetic construct
MEPNRRT

SEQ ID NO: 183964 - protein, 7 aa, synthetic construct
MVPRERN

SEQ ID NO: 183965 - protein, 7 aa, synthetic construct
MVPRGRD

SEQ ID NO: 183966 - protein, 7 aa, synthetic construct
MEIRQKG

SEQ ID NO: 183967 - protein, 7 aa, synthetic construct
YEPTQRK

SEQ ID NO: 183968 - protein, 7 aa, synthetic construct
MVPGQRH

SEQ ID NO: 183969 - protein, 7 aa, synthetic construct
QEARLRT

SEQ ID NO: 183970 - protein, 7 aa, synthetic construct
QEPVQRK

SEQ ID NO: 183971 - protein, 7 aa, synthetic construct
MVDRART

SEQ ID NO: 183972 - protein, 7 aa, synthetic construct
IDPRQRL

SEQ ID NO: 183973 - protein, 7 aa, synthetic construct
MAERQRS

SEQ ID NO: 183974 - protein, 7 aa, synthetic construct
KEIRQNT

SEQ ID NO: 183975 - protein, 7 aa, synthetic construct
MEARARS

SEQ ID NO: 183976 - protein, 7 aa, synthetic construct
GEPRIRS

SEQ ID NO: 183977 - protein, 7 aa, synthetic construct
REPHQRA

SEQ ID NO: 183978 - protein, 7 aa, synthetic construct
MTPRQHN

SEQ ID NO: 183979 - protein, 7 aa, synthetic construct
IENRPRT

SEQ ID NO: 183980 - protein, 7 aa, synthetic construct
NPERQRT

SEQ ID NO: 183981 - protein, 7 aa, synthetic construct
MDIRGRT

SEQ ID NO: 183982 - protein, 7 aa, synthetic construct
MRPRTDT

SEQ ID NO: 183983 - protein, 7 aa, synthetic construct
MEVRNRA

SEQ ID NO: 183984 - protein, 7 aa, synthetic construct
IEPRQKY

SEQ ID NO: 183985 - protein, 7 aa, synthetic construct
MEIKSRT

SEQ ID NO: 183986 - protein, 7 aa, synthetic construct
MEVKNRT

SEQ ID NO: 183987 - protein, 7 aa, synthetic construct
MEKLQRA

SEQ ID NO: 183988 - protein, 7 aa, synthetic construct
GELKQRT

SEQ ID NO: 183989 - protein, 7 aa, synthetic construct
QEPRVRA

SEQ ID NO: 183990 - protein, 7 aa, synthetic construct
MEKIQRM

SEQ ID NO: 183991 - protein, 7 aa, synthetic construct
MVPSQRQ

SEQ ID NO: 183992 - protein, 7 aa, synthetic construct
TEQRVRT

SEQ ID NO: 183993 - protein, 7 aa, synthetic construct
LEPRMRN

SEQ ID NO: 183994 - protein, 7 aa, synthetic construct
SEPRQAK

SEQ ID NO: 183995 - protein, 7 aa, synthetic construct
NEPMRRT

SEQ ID NO: 183996 - protein, 7 aa, synthetic construct
TEMRGRT

SEQ ID NO: 183997 - protein, 7 aa, synthetic construct
MEMRNRV

SEQ ID NO: 183998 - protein, 7 aa, synthetic construct
LEPRLRN

SEQ ID NO: 183999 - protein, 7 aa, synthetic construct
SETRQRV

SEQ ID NO: 184000 - protein, 7 aa, synthetic construct
HLPRQRE

SEQ ID NO: 184001 - protein, 7 aa, synthetic construct
MEKRQAT

SEQ ID NO: 184002 - protein, 7 aa, synthetic construct
LEKRQVT

SEQ ID NO: 184003 - protein, 7 aa, synthetic construct
MDPRQNR

SEQ ID NO: 184004 - protein, 7 aa, synthetic construct
MEKRMST

SEQ ID NO: 184005 - protein, 7 aa, synthetic construct
DRPSQRT

SEQ ID NO: 184006 - protein, 7 aa, synthetic construct
ERPIQRT

SEQ ID NO: 184007 - protein, 7 aa, synthetic construct
SEAKQRT

SEQ ID NO: 184008 - protein, 7 aa, synthetic construct
MERNQRM

SEQ ID NO: 184009 - protein, 7 aa, synthetic construct
MEKRQQN

SEQ ID NO: 184010 - protein, 7 aa, synthetic construct
LLERQRT

SEQ ID NO: 184011 - protein, 7 aa, synthetic construct
PDPRNRT

SEQ ID NO: 184012 - protein, 7 aa, synthetic construct
IEPRGRG

SEQ ID NO: 184013 - protein, 7 aa, synthetic construct
MMPTQRH

SEQ ID NO: 184014 - protein, 7 aa, synthetic construct
MVPGQRQ

SEQ ID NO: 184015 - protein, 7 aa, synthetic construct
NEPVRRT

SEQ ID NO: 184016 - protein, 7 aa, synthetic construct
MLSRQRE

SEQ ID NO: 184017 - protein, 7 aa, synthetic construct
IEARQRP

SEQ ID NO: 184018 - protein, 7 aa, synthetic construct
KEARERT

SEQ ID NO: 184019 - protein, 7 aa, synthetic construct
MEKRERA

SEQ ID NO: 184020 - protein, 7 aa, synthetic construct
QEPRMRS

SEQ ID NO: 184021 - protein, 7 aa, synthetic construct
METRQKV

SEQ ID NO: 184022 - protein, 7 aa, synthetic construct
KEHQQRT

SEQ ID NO: 184023 - protein, 7 aa, synthetic construct
MIDRQRS

SEQ ID NO: 184024 - protein, 7 aa, synthetic construct
QEPRGRQ

SEQ ID NO: 184025 - protein, 7 aa, synthetic construct
MERRQVG

SEQ ID NO: 184026 - protein, 7 aa, synthetic construct
IEARIRT

SEQ ID NO: 184027 - protein, 7 aa, synthetic construct
MQPRLRE

SEQ ID NO: 184028 - protein, 7 aa, synthetic construct
TEVRGRT

SEQ ID NO: 184029 - protein, 7 aa, synthetic construct
MEKRQIT

SEQ ID NO: 184030 - protein, 7 aa, synthetic construct
LEPAQRK

SEQ ID NO: 184031 - protein, 7 aa, synthetic construct
PIDRQRT

SEQ ID NO: 184032 - protein, 7 aa, synthetic construct
MEQRQSK

SEQ ID NO: 184033 - protein, 7 aa, synthetic construct
NDPRQRT

SEQ ID NO: 184034 - protein, 7 aa, synthetic construct
VTPRQRE

SEQ ID NO: 184035 - protein, 7 aa, synthetic construct
QEQRQRN

SEQ ID NO: 184036 - protein, 7 aa, synthetic construct
VTPRERT

SEQ ID NO: 184037 - protein, 7 aa, synthetic construct
IEVRTRT

SEQ ID NO: 184038 - protein, 7 aa, synthetic construct
MERRQGG

SEQ ID NO: 184039 - protein, 7 aa, synthetic construct
SEVRQRP

SEQ ID NO: 184040 - protein, 7 aa, synthetic construct
PLDRQRT

SEQ ID NO: 184041 - protein, 7 aa, synthetic construct
MEPRKYQ

SEQ ID NO: 184042 - protein, 7 aa, synthetic construct
MEPAARK

SEQ ID NO: 184043 - protein, 7 aa, synthetic construct
GEPRVRI

SEQ ID NO: 184044 - protein, 7 aa, synthetic construct
REVGQRT

SEQ ID NO: 184045 - protein, 7 aa, synthetic construct
NEPIKRT

SEQ ID NO: 184046 - protein, 7 aa, synthetic construct
AEGKQRT

SEQ ID NO: 184047 - protein, 7 aa, synthetic construct
MKGRQDT

SEQ ID NO: 184048 - protein, 7 aa, synthetic construct
TEPRQFK

SEQ ID NO: 184049 - protein, 7 aa, synthetic construct
IEARQKT

SEQ ID NO: 184050 - protein, 7 aa, synthetic construct
VEKRERT

SEQ ID NO: 184051 - protein, 7 aa, synthetic construct
MEPRQTR

SEQ ID NO: 184052 - protein, 7 aa, synthetic construct
MDARQRT

SEQ ID NO: 184053 - protein, 7 aa, synthetic construct
MEGKQRL

SEQ ID NO: 184054 - protein, 7 aa, synthetic construct
MVPRERL

SEQ ID NO: 184055 - protein, 7 aa, synthetic construct
MEPRYKS

SEQ ID NO: 184056 - protein, 7 aa, synthetic construct
MDTRLRT

SEQ ID NO: 184057 - protein, 7 aa, synthetic construct
YEPRIRV

SEQ ID NO: 184058 - protein, 7 aa, synthetic construct
TEPKQRS

SEQ ID NO: 184059 - protein, 7 aa, synthetic construct
MEPSRRV

SEQ ID NO: 184060 - protein, 7 aa, synthetic construct
TEARQRM

SEQ ID NO: 184061 - protein, 7 aa, synthetic construct
LEPRNRT

SEQ ID NO: 184062 - protein, 7 aa, synthetic construct
NEPRQRN

SEQ ID NO: 184063 - protein, 7 aa, synthetic construct
REGTQRT

SEQ ID NO: 184064 - protein, 7 aa, synthetic construct
MEPRPRS

SEQ ID NO: 184065 - protein, 7 aa, synthetic construct
MVDRQRG

SEQ ID NO: 184066 - protein, 7 aa, synthetic construct
NEARQRS

SEQ ID NO: 184067 - protein, 7 aa, synthetic construct
EKPRQMT

SEQ ID NO: 184068 - protein, 7 aa, synthetic construct
MEIKQRL

SEQ ID NO: 184069 - protein, 7 aa, synthetic construct
TENRIRT

SEQ ID NO: 184070 - protein, 7 aa, synthetic construct
TERNQRT

SEQ ID NO: 184071 - protein, 7 aa, synthetic construct
IAPRQRE

SEQ ID NO: 184072 - protein, 7 aa, synthetic construct
MESRVRT

SEQ ID NO: 184073 - protein, 7 aa, synthetic construct
MEPAVRR

SEQ ID NO: 184074 - protein, 7 aa, synthetic construct
NEIRPRT

SEQ ID NO: 184075 - protein, 7 aa, synthetic construct
MQPRQGG

SEQ ID NO: 184076 - protein, 7 aa, synthetic construct
IEPNRRT

SEQ ID NO: 184077 - protein, 7 aa, synthetic construct
ELPKQRT

SEQ ID NO: 184078 - protein, 7 aa, synthetic construct
MEPRSRV

SEQ ID NO: 184079 - protein, 7 aa, synthetic construct
AEPRAKT

SEQ ID NO: 184080 - protein, 7 aa, synthetic construct
NVPRQRE

SEQ ID NO: 184081 - protein, 7 aa, synthetic construct
LEPRTRA

SEQ ID NO: 184082 - protein, 7 aa, synthetic construct
MEVRQRT

SEQ ID NO: 184083 - protein, 7 aa, synthetic construct
LEPRMRV

SEQ ID NO: 184084 - protein, 7 aa, synthetic construct
NEPRPRM

SEQ ID NO: 184085 - protein, 7 aa, synthetic construct
DLPRTRT

SEQ ID NO: 184086 - protein, 7 aa, synthetic construct
VSPRQRD

SEQ ID NO: 184087 - protein, 7 aa, synthetic construct
MKPRQET

SEQ ID NO: 184088 - protein, 7 aa, synthetic construct
MEQRPKT

SEQ ID NO: 184089 - protein, 7 aa, synthetic construct
GVERQRT

SEQ ID NO: 184090 - protein, 7 aa, synthetic construct
VEGKQRT

SEQ ID NO: 184091 - protein, 7 aa, synthetic construct
TMPRDRT

SEQ ID NO: 184092 - protein, 7 aa, synthetic construct
AERVQRT

SEQ ID NO: 184093 - protein, 7 aa, synthetic construct
MEPRQRI

SEQ ID NO: 184094 - protein, 7 aa, synthetic construct
QIPRDRT

SEQ ID NO: 184095 - protein, 7 aa, synthetic construct
IEGKQRT

SEQ ID NO: 184096 - protein, 7 aa, synthetic construct
MEVKQRY

SEQ ID NO: 184097 - protein, 7 aa, synthetic construct
MEARIRV

SEQ ID NO: 184098 - protein, 7 aa, synthetic construct
FTERQRT

SEQ ID NO: 184099 - protein, 7 aa, synthetic construct
IEPRLRM

SEQ ID NO: 184100 - protein, 7 aa, synthetic construct
MPTRQRE

SEQ ID NO: 184101 - protein, 7 aa, synthetic construct
MTPRQSG

SEQ ID NO: 184102 - protein, 7 aa, synthetic construct
MMPRQHG

SEQ ID NO: 184103 - protein, 7 aa, synthetic construct
MGPHQRN

SEQ ID NO: 184104 - protein, 7 aa, synthetic construct
MRPRDQT

SEQ ID NO: 184105 - protein, 7 aa, synthetic construct
NETKQRT

SEQ ID NO: 184106 - protein, 7 aa, synthetic construct
SEQRVRT

SEQ ID NO: 184107 - protein, 7 aa, synthetic construct
NEIRQRI

SEQ ID NO: 184108 - protein, 7 aa, synthetic construct
VEARVRT

SEQ ID NO: 184109 - protein, 7 aa, synthetic construct
MKPRQDT

SEQ ID NO: 184110 - protein, 7 aa, synthetic construct
MVERMRT

SEQ ID NO: 184111 - protein, 7 aa, synthetic construct
TEIRTRT

SEQ ID NO: 184112 - protein, 7 aa, synthetic construct
YEPNQRK

SEQ ID NO: 184113 - protein, 7 aa, synthetic construct
REVRQST

SEQ ID NO: 184114 - protein, 7 aa, synthetic construct
MVPRQHV

SEQ ID NO: 184115 - protein, 7 aa, synthetic construct
ILPRQRD

SEQ ID NO: 184116 - protein, 7 aa, synthetic construct
TDPRQRA

SEQ ID NO: 184117 - protein, 7 aa, synthetic construct
MKPYQRD

SEQ ID NO: 184118 - protein, 7 aa, synthetic construct
QEARQRP

SEQ ID NO: 184119 - protein, 7 aa, synthetic construct
NEPRQKS

SEQ ID NO: 184120 - protein, 7 aa, synthetic construct
MDTRQRS

SEQ ID NO: 184121 - protein, 7 aa, synthetic construct
REPNQRS

SEQ ID NO: 184122 - protein, 7 aa, synthetic construct
MNPRQVQ

SEQ ID NO: 184123 - protein, 7 aa, synthetic construct
MMERQRT

SEQ ID NO: 184124 - protein, 7 aa, synthetic construct
METKQRN

SEQ ID NO: 184125 - protein, 7 aa, synthetic construct
GEPRIRQ

SEQ ID NO: 184126 - protein, 7 aa, synthetic construct
TENRQRI

SEQ ID NO: 184127 - protein, 7 aa, synthetic construct
NEPRQAK

SEQ ID NO: 184128 - protein, 7 aa, synthetic construct
MENRTKT

SEQ ID NO: 184129 - protein, 7 aa, synthetic construct
TEMRTRT

SEQ ID NO: 184130 - protein, 7 aa, synthetic construct
MEPRTKF

SEQ ID NO: 184131 - protein, 7 aa, synthetic construct
MMPRQNL

SEQ ID NO: 184132 - protein, 7 aa, synthetic construct
MEKGQRF

SEQ ID NO: 184133 - protein, 7 aa, synthetic construct
MGPRERN

SEQ ID NO: 184134 - protein, 7 aa, synthetic construct
MEMRGRG

SEQ ID NO: 184135 - protein, 7 aa, synthetic construct
PDPRQRT

SEQ ID NO: 184136 - protein, 7 aa, synthetic construct
PQDRQRT

SEQ ID NO: 184137 - protein, 7 aa, synthetic construct
MEARQAK

SEQ ID NO: 184138 - protein, 7 aa, synthetic construct
MIERQRS

SEQ ID NO: 184139 - protein, 7 aa, synthetic construct
LKPRQDT

SEQ ID NO: 184140 - protein, 7 aa, synthetic construct
LNPRQRE

SEQ ID NO: 184141 - protein, 7 aa, synthetic construct
GEIRQRP

SEQ ID NO: 184142 - protein, 7 aa, synthetic construct
MPPRHST

SEQ ID NO: 184143 - protein, 7 aa, synthetic construct
MHPRQGG

SEQ ID NO: 184144 - protein, 7 aa, synthetic construct
METRTRV

SEQ ID NO: 184145 - protein, 7 aa, synthetic construct
DKPRQNT

SEQ ID NO: 184146 - protein, 7 aa, synthetic construct
MLPRQHQ

SEQ ID NO: 184147 - protein, 7 aa, synthetic construct
DRPVQRT

SEQ ID NO: 184148 - protein, 7 aa, synthetic construct
MLDRPRT

SEQ ID NO: 184149 - protein, 7 aa, synthetic construct
SEARVRT

SEQ ID NO: 184150 - protein, 7 aa, synthetic construct
MEQRMRG

SEQ ID NO: 184151 - protein, 7 aa, synthetic construct
MRPREGT

SEQ ID NO: 184152 - protein, 7 aa, synthetic construct
MLGRQRE

SEQ ID NO: 184153 - protein, 7 aa, synthetic construct
VVPRQRE

SEQ ID NO: 184154 - protein, 7 aa, synthetic construct
QEPRQQR

SEQ ID NO: 184155 - protein, 7 aa, synthetic construct
QEPRVRG

SEQ ID NO: 184156 - protein, 7 aa, synthetic construct
IMERQRT

SEQ ID NO: 184157 - protein, 7 aa, synthetic construct
IEPKQRH

SEQ ID NO: 184158 - protein, 7 aa, synthetic construct
PDPRMRT

SEQ ID NO: 184159 - protein, 7 aa, synthetic construct
VENRQRT

SEQ ID NO: 184160 - protein, 7 aa, synthetic construct
MTPRQQQ

SEQ ID NO: 184161 - protein, 7 aa, synthetic construct
REPIQRA

SEQ ID NO: 184162 - protein, 7 aa, synthetic construct
MAPRSRE

SEQ ID NO: 184163 - protein, 7 aa, synthetic construct
VEPRVRN

SEQ ID NO: 184164 - protein, 7 aa, synthetic construct
TEVRQRV

SEQ ID NO: 184165 - protein, 7 aa, synthetic construct
KQPRQDT

SEQ ID NO: 184166 - protein, 7 aa, synthetic construct
KEERGRT

SEQ ID NO: 184167 - protein, 7 aa, synthetic construct
MTPRERT

SEQ ID NO: 184168 - protein, 7 aa, synthetic construct
MLPRQSG

SEQ ID NO: 184169 - protein, 7 aa, synthetic construct
DGPRQRP

SEQ ID NO: 184170 - protein, 7 aa, synthetic construct
REGRQIT

SEQ ID NO: 184171 - protein, 7 aa, synthetic construct
MPERSRT

SEQ ID NO: 184172 - protein, 7 aa, synthetic construct
MEVRGRQ

SEQ ID NO: 184173 - protein, 7 aa, synthetic construct
MKARQDT

SEQ ID NO: 184174 - protein, 7 aa, synthetic construct
METRMRN

SEQ ID NO: 184175 - protein, 7 aa, synthetic construct
YEPRLRA

SEQ ID NO: 184176 - protein, 7 aa, synthetic construct
VEVRGRT

SEQ ID NO: 184177 - protein, 7 aa, synthetic construct
MKPRQSD

SEQ ID NO: 184178 - protein, 7 aa, synthetic construct
MEPPTRK

SEQ ID NO: 184179 - protein, 7 aa, synthetic construct
MQPRERN

SEQ ID NO: 184180 - protein, 7 aa, synthetic construct
MEPTNRK

SEQ ID NO: 184181 - protein, 7 aa, synthetic construct
KEERIRT

SEQ ID NO: 184182 - protein, 7 aa, synthetic construct
YEPRVRQ

SEQ ID NO: 184183 - protein, 7 aa, synthetic construct
IEPRNRI

SEQ ID NO: 184184 - protein, 7 aa, synthetic construct
LEPRVRT

SEQ ID NO: 184185 - protein, 7 aa, synthetic construct
VAERQRT

SEQ ID NO: 184186 - protein, 7 aa, synthetic construct
NELRVRT

SEQ ID NO: 184187 - protein, 7 aa, synthetic construct
KEHAQRT

SEQ ID NO: 184188 - protein, 7 aa, synthetic construct
IIPRDRT

SEQ ID NO: 184189 - protein, 7 aa, synthetic construct
IEPRFKT

SEQ ID NO: 184190 - protein, 7 aa, synthetic construct
DHPKQRT

SEQ ID NO: 184191 - protein, 7 aa, synthetic construct
MIDRPRT

SEQ ID NO: 184192 - protein, 7 aa, synthetic construct
MKPEQRW

SEQ ID NO: 184193 - protein, 7 aa, synthetic construct
KEFRQAT

SEQ ID NO: 184194 - protein, 7 aa, synthetic construct
MERGQRP

SEQ ID NO: 184195 - protein, 7 aa, synthetic construct
MEKFQRQ

SEQ ID NO: 184196 - protein, 7 aa, synthetic construct
SEPRQRA

SEQ ID NO: 184197 - protein, 7 aa, synthetic construct
TEPRPRS

SEQ ID NO: 184198 - protein, 7 aa, synthetic construct
GEPRLRV

SEQ ID NO: 184199 - protein, 7 aa, synthetic construct
MEIRPKT

SEQ ID NO: 184200 - protein, 7 aa, synthetic construct
MEKRQFS

SEQ ID NO: 184201 - protein, 7 aa, synthetic construct
KETRQRE

SEQ ID NO: 184202 - protein, 7 aa, synthetic construct
RETRQAT

SEQ ID NO: 184203 - protein, 7 aa, synthetic construct
MEAKQRQ

SEQ ID NO: 184204 - protein, 7 aa, synthetic construct
FEPQKRT

SEQ ID NO: 184205 - protein, 7 aa, synthetic construct
MEKRIST

SEQ ID NO: 184206 - protein, 7 aa, synthetic construct
MNPRDRS

SEQ ID NO: 184207 - protein, 7 aa, synthetic construct
MEPPKRS

SEQ ID NO: 184208 - protein, 7 aa, synthetic construct
MATRQRE

SEQ ID NO: 184209 - protein, 7 aa, synthetic construct
TEPRQRQ

SEQ ID NO: 184210 - protein, 7 aa, synthetic construct
ENPRVRT

SEQ ID NO: 184211 - protein, 7 aa, synthetic construct
MDPRVRN

SEQ ID NO: 184212 - protein, 7 aa, synthetic construct
MLPEQRK

SEQ ID NO: 184213 - protein, 7 aa, synthetic construct
YEPARRT

SEQ ID NO: 184214 - protein, 7 aa, synthetic construct
MEARTRN

SEQ ID NO: 184215 - protein, 7 aa, synthetic construct
VHPRQST

SEQ ID NO: 184216 - protein, 7 aa, synthetic construct
MDPRPRN

SEQ ID NO: 184217 - protein, 7 aa, synthetic construct
SEPRQTK

SEQ ID NO: 184218 - protein, 7 aa, synthetic construct
HEPRVRN

SEQ ID NO: 184219 - protein, 7 aa, synthetic construct
MENKQRM

SEQ ID NO: 184220 - protein, 7 aa, synthetic construct
MERNQKT

SEQ ID NO: 184221 - protein, 7 aa, synthetic construct
MDPKQRY

SEQ ID NO: 184222 - protein, 7 aa, synthetic construct
MEPKQHR

SEQ ID NO: 184223 - protein, 7 aa, synthetic construct
MVPRQKD

SEQ ID NO: 184224 - protein, 7 aa, synthetic construct
MEIRLKT

SEQ ID NO: 184225 - protein, 7 aa, synthetic construct
MENRPRV

SEQ ID NO: 184226 - protein, 7 aa, synthetic construct
GEPKQRF

SEQ ID NO: 184227 - protein, 7 aa, synthetic construct
TDPRQRL

SEQ ID NO: 184228 - protein, 7 aa, synthetic construct
LEQKQRT

SEQ ID NO: 184229 - protein, 7 aa, synthetic construct
KEHMQRT

SEQ ID NO: 184230 - protein, 7 aa, synthetic construct
MEIKQRQ

SEQ ID NO: 184231 - protein, 7 aa, synthetic construct
MEMRQKG

SEQ ID NO: 184232 - protein, 7 aa, synthetic construct
AHPRQST

SEQ ID NO: 184233 - protein, 7 aa, synthetic construct
PEVRQRV

SEQ ID NO: 184234 - protein, 7 aa, synthetic construct
EVPRQRT

SEQ ID NO: 184235 - protein, 7 aa, synthetic construct
QEKRQQT

SEQ ID NO: 184236 - protein, 7 aa, synthetic construct
MEPRAQR

SEQ ID NO: 184237 - protein, 7 aa, synthetic construct
MEMRQAK

SEQ ID NO: 184238 - protein, 7 aa, synthetic construct
MTPRQNQ

SEQ ID NO: 184239 - protein, 7 aa, synthetic construct
MEPKQRY

SEQ ID NO: 184240 - protein, 7 aa, synthetic construct
MERQVRT

SEQ ID NO: 184241 - protein, 7 aa, synthetic construct
MEQRQVK

SEQ ID NO: 184242 - protein, 7 aa, synthetic construct
LIDRQRT

SEQ ID NO: 184243 - protein, 7 aa, synthetic construct
MELRQKT

SEQ ID NO: 184244 - protein, 7 aa, synthetic construct
MLPRNRD

SEQ ID NO: 184245 - protein, 7 aa, synthetic construct
MEPVARK

SEQ ID NO: 184246 - protein, 7 aa, synthetic construct
GEPRQNK

SEQ ID NO: 184247 - protein, 7 aa, synthetic construct
MMPRDRN

SEQ ID NO: 184248 - protein, 7 aa, synthetic construct
AEPRQRA

SEQ ID NO: 184249 - protein, 7 aa, synthetic construct
MESRTKT

SEQ ID NO: 184250 - protein, 7 aa, synthetic construct
MVPRERP

SEQ ID NO: 184251 - protein, 7 aa, synthetic construct
MPPRERN

SEQ ID NO: 184252 - protein, 7 aa, synthetic construct
REPTQRS

SEQ ID NO: 184253 - protein, 7 aa, synthetic construct
NSPRERT

SEQ ID NO: 184254 - protein, 7 aa, synthetic construct
MEPIKRN

SEQ ID NO: 184255 - protein, 7 aa, synthetic construct
MKPRHET

SEQ ID NO: 184256 - protein, 7 aa, synthetic construct
VQPRQRD

SEQ ID NO: 184257 - protein, 7 aa, synthetic construct
QTPRERT

SEQ ID NO: 184258 - protein, 7 aa, synthetic construct
MEPRGYK

SEQ ID NO: 184259 - protein, 7 aa, synthetic construct
FAPRQRE

SEQ ID NO: 184260 - protein, 7 aa, synthetic construct
ITDRQRT

SEQ ID NO: 184261 - protein, 7 aa, synthetic construct
DVPRNRT

SEQ ID NO: 184262 - protein, 7 aa, synthetic construct
MEPKPRS

SEQ ID NO: 184263 - protein, 7 aa, synthetic construct
MELRTRA

SEQ ID NO: 184264 - protein, 7 aa, synthetic construct
MTGRERT

SEQ ID NO: 184265 - protein, 7 aa, synthetic construct
GEIRQRV

SEQ ID NO: 184266 - protein, 7 aa, synthetic construct
MPPQQRQ

SEQ ID NO: 184267 - protein, 7 aa, synthetic construct
KEDRQKT

SEQ ID NO: 184268 - protein, 7 aa, synthetic construct
MLERQRQ

SEQ ID NO: 184269 - protein, 7 aa, synthetic construct
MKQRQDT

SEQ ID NO: 184270 - protein, 7 aa, synthetic construct
NEPRSRG

SEQ ID NO: 184271 - protein, 7 aa, synthetic construct
MTKRQDT

SEQ ID NO: 184272 - protein, 7 aa, synthetic construct
MENRQTK

SEQ ID NO: 184273 - protein, 7 aa, synthetic construct
MDPKYRT

SEQ ID NO: 184274 - protein, 7 aa, synthetic construct
TNERQRT

SEQ ID NO: 184275 - protein, 7 aa, synthetic construct
MENQKRT

SEQ ID NO: 184276 - protein, 7 aa, synthetic construct
KESRQNT

SEQ ID NO: 184277 - protein, 7 aa, synthetic construct
DMPRPRT

SEQ ID NO: 184278 - protein, 7 aa, synthetic construct
AIPRQRE

SEQ ID NO: 184279 - protein, 7 aa, synthetic construct
MIPRARE

SEQ ID NO: 184280 - protein, 7 aa, synthetic construct
PEPRQKP

SEQ ID NO: 184281 - protein, 7 aa, synthetic construct
VETRQRA

SEQ ID NO: 184282 - protein, 7 aa, synthetic construct
MEPVNRK

SEQ ID NO: 184283 - protein, 7 aa, synthetic construct
PRPRQET

SEQ ID NO: 184284 - protein, 7 aa, synthetic construct
MNPRERM

SEQ ID NO: 184285 - protein, 7 aa, synthetic construct
MEPRVRN

SEQ ID NO: 184286 - protein, 7 aa, synthetic construct
MEKRQNN

SEQ ID NO: 184287 - protein, 7 aa, synthetic construct
IQPRQRE

SEQ ID NO: 184288 - protein, 7 aa, synthetic construct
MEKMQRA

SEQ ID NO: 184289 - protein, 7 aa, synthetic construct
KEERTRT

SEQ ID NO: 184290 - protein, 7 aa, synthetic construct
IAPRQRD

SEQ ID NO: 184291 - protein, 7 aa, synthetic construct
MNPRERL

SEQ ID NO: 184292 - protein, 7 aa, synthetic construct
YEPRIRN

SEQ ID NO: 184293 - protein, 7 aa, synthetic construct
MRPRDVT

SEQ ID NO: 184294 - protein, 7 aa, synthetic construct
IEPRTRL

SEQ ID NO: 184295 - protein, 7 aa, synthetic construct
MEKIQRH

SEQ ID NO: 184296 - protein, 7 aa, synthetic construct
MSARQRE

SEQ ID NO: 184297 - protein, 7 aa, synthetic construct
NEPRRGT

SEQ ID NO: 184298 - protein, 7 aa, synthetic construct
MAPRQDR

SEQ ID NO: 184299 - protein, 7 aa, synthetic construct
QDARQRT

SEQ ID NO: 184300 - protein, 7 aa, synthetic construct
REERVRT

SEQ ID NO: 184301 - protein, 7 aa, synthetic construct
METRTRP

SEQ ID NO: 184302 - protein, 7 aa, synthetic construct
YETKQRT

SEQ ID NO: 184303 - protein, 7 aa, synthetic construct
MVPRQLG

SEQ ID NO: 184304 - protein, 7 aa, synthetic construct
TDGRQRT

SEQ ID NO: 184305 - protein, 7 aa, synthetic construct
MEPRTRS

SEQ ID NO: 184306 - protein, 7 aa, synthetic construct
MTQRQRD

SEQ ID NO: 184307 - protein, 7 aa, synthetic construct
MEPRTRA

SEQ ID NO: 184308 - protein, 7 aa, synthetic construct
MEPKPRH

SEQ ID NO: 184309 - protein, 7 aa, synthetic construct
MEVAKRT

SEQ ID NO: 184310 - protein, 7 aa, synthetic construct
METRLRN

SEQ ID NO: 184311 - protein, 7 aa, synthetic construct
HEPRLRQ

SEQ ID NO: 184312 - protein, 7 aa, synthetic construct
LEPVQRK

SEQ ID NO: 184313 - protein, 7 aa, synthetic construct
MEKRQFQ

SEQ ID NO: 184314 - protein, 7 aa, synthetic construct
MERGQRV

SEQ ID NO: 184315 - protein, 7 aa, synthetic construct
MEKRQGN

SEQ ID NO: 184316 - protein, 7 aa, synthetic construct
IENRTRT

SEQ ID NO: 184317 - protein, 7 aa, synthetic construct
QEARQRA

SEQ ID NO: 184318 - protein, 7 aa, synthetic construct
MERSTRT

SEQ ID NO: 184319 - protein, 7 aa, synthetic construct
MEGKFRT

SEQ ID NO: 184320 - protein, 7 aa, synthetic construct
MEVRQNK

SEQ ID NO: 184321 - protein, 7 aa, synthetic construct
VLPRQRD

SEQ ID NO: 184322 - protein, 7 aa, synthetic construct
KEDRVRT

SEQ ID NO: 184323 - protein, 7 aa, synthetic construct
VEPRQVR

SEQ ID NO: 184324 - protein, 7 aa, synthetic construct
MLPRQQQ

SEQ ID NO: 184325 - protein, 7 aa, synthetic construct
MDPGQRR

SEQ ID NO: 184326 - protein, 7 aa, synthetic construct
MESKART

SEQ ID NO: 184327 - protein, 7 aa, synthetic construct
MEPRSMR

SEQ ID NO: 184328 - protein, 7 aa, synthetic construct
MSPRQHN

SEQ ID NO: 184329 - protein, 7 aa, synthetic construct
METRQNR

SEQ ID NO: 184330 - protein, 7 aa, synthetic construct
SEARQKT

SEQ ID NO: 184331 - protein, 7 aa, synthetic construct
ERPLQRT

SEQ ID NO: 184332 - protein, 7 aa, synthetic construct
MKPIQYT

SEQ ID NO: 184333 - protein, 7 aa, synthetic construct
MDKRERT

SEQ ID NO: 184334 - protein, 7 aa, synthetic construct
MEKVQRN

SEQ ID NO: 184335 - protein, 7 aa, synthetic construct
PEPRQVK

SEQ ID NO: 184336 - protein, 7 aa, synthetic construct
MRPLQRD

SEQ ID NO: 184337 - protein, 7 aa, synthetic construct
MELRGRG

SEQ ID NO: 184338 - protein, 7 aa, synthetic construct
MEPRMAR

SEQ ID NO: 184339 - protein, 7 aa, synthetic construct
YEPRQLK

SEQ ID NO: 184340 - protein, 7 aa, synthetic construct
TIDRQRT

SEQ ID NO: 184341 - protein, 7 aa, synthetic construct
MERVSRT

SEQ ID NO: 184342 - protein, 7 aa, synthetic construct
MERGQRN

SEQ ID NO: 184343 - protein, 7 aa, synthetic construct
NEPRLRI

SEQ ID NO: 184344 - protein, 7 aa, synthetic construct
MDGRQKT

SEQ ID NO: 184345 - protein, 7 aa, synthetic construct
MEIRNRG

SEQ ID NO: 184346 - protein, 7 aa, synthetic construct
VEMRQRA

SEQ ID NO: 184347 - protein, 7 aa, synthetic construct
IEARQRN

SEQ ID NO: 184348 - protein, 7 aa, synthetic construct
MEARQRT

SEQ ID NO: 184349 - protein, 7 aa, synthetic construct
MEMRPKT

SEQ ID NO: 184350 - protein, 7 aa, synthetic construct
GEPRVRM

SEQ ID NO: 184351 - protein, 7 aa, synthetic construct
METRQRI

SEQ ID NO: 184352 - protein, 7 aa, synthetic construct
AEIKQRT

SEQ ID NO: 184353 - protein, 7 aa, synthetic construct
LEPRLRQ

SEQ ID NO: 184354 - protein, 7 aa, synthetic construct
MQERQRS

SEQ ID NO: 184355 - protein, 7 aa, synthetic construct
REGRQST

SEQ ID NO: 184356 - protein, 7 aa, synthetic construct
YEPGKRT

SEQ ID NO: 184357 - protein, 7 aa, synthetic construct
MEQRLRN

SEQ ID NO: 184358 - protein, 7 aa, synthetic construct
MEPGMRK

SEQ ID NO: 184359 - protein, 7 aa, synthetic construct
MGPRIRD

SEQ ID NO: 184360 - protein, 7 aa, synthetic construct
MRPRDLT

SEQ ID NO: 184361 - protein, 7 aa, synthetic construct
SEPRPKT

SEQ ID NO: 184362 - protein, 7 aa, synthetic construct
QMPRQRE

SEQ ID NO: 184363 - protein, 7 aa, synthetic construct
KEPHQRF

SEQ ID NO: 184364 - protein, 7 aa, synthetic construct
MAPRIRE

SEQ ID NO: 184365 - protein, 7 aa, synthetic construct
MSPRERY

SEQ ID NO: 184366 - protein, 7 aa, synthetic construct
SEKIQRT

SEQ ID NO: 184367 - protein, 7 aa, synthetic construct
KEHRQMT

SEQ ID NO: 184368 - protein, 7 aa, synthetic construct
VEKRQIT

SEQ ID NO: 184369 - protein, 7 aa, synthetic construct
NEMKQRT

SEQ ID NO: 184370 - protein, 7 aa, synthetic construct
SSPRQRE

SEQ ID NO: 184371 - protein, 7 aa, synthetic construct
MEGRVRG

SEQ ID NO: 184372 - protein, 7 aa, synthetic construct
MLNRQRD

SEQ ID NO: 184373 - protein, 7 aa, synthetic construct
MIPRQNV

SEQ ID NO: 184374 - protein, 7 aa, synthetic construct
QTPRQRE

SEQ ID NO: 184375 - protein, 7 aa, synthetic construct
SEPRAKT

SEQ ID NO: 184376 - protein, 7 aa, synthetic construct
MEQRIRQ

SEQ ID NO: 184377 - protein, 7 aa, synthetic construct
MDPRPRS

SEQ ID NO: 184378 - protein, 7 aa, synthetic construct
FEKIQRT

SEQ ID NO: 184379 - protein, 7 aa, synthetic construct
MEKIQRY

SEQ ID NO: 184380 - protein, 7 aa, synthetic construct
QEARQRS

SEQ ID NO: 184381 - protein, 7 aa, synthetic construct
IEPRQRQ

SEQ ID NO: 184382 - protein, 7 aa, synthetic construct
MTPRQRD

SEQ ID NO: 184383 - protein, 7 aa, synthetic construct
MLPRQSH

SEQ ID NO: 184384 - protein, 7 aa, synthetic construct
METKQRA

SEQ ID NO: 184385 - protein, 7 aa, synthetic construct
MERGQRQ

SEQ ID NO: 184386 - protein, 7 aa, synthetic construct
MKPRPDT

SEQ ID NO: 184387 - protein, 7 aa, synthetic construct
TEPRTRI

SEQ ID NO: 184388 - protein, 7 aa, synthetic construct
MEMRGRV

SEQ ID NO: 184389 - protein, 7 aa, synthetic construct
TEPRVRT

SEQ ID NO: 184390 - protein, 7 aa, synthetic construct
TEPRTRQ

SEQ ID NO: 184391 - protein, 7 aa, synthetic construct
QVDRQRT

SEQ ID NO: 184392 - protein, 7 aa, synthetic construct
SEPRQKF

SEQ ID NO: 184393 - protein, 7 aa, synthetic construct
MSPRPHT

SEQ ID NO: 184394 - protein, 7 aa, synthetic construct
PVPRERT

SEQ ID NO: 184395 - protein, 7 aa, synthetic construct
YEPRMRV

SEQ ID NO: 184396 - protein, 7 aa, synthetic construct
MEVKQRM

SEQ ID NO: 184397 - protein, 7 aa, synthetic construct
QEPRNRS

SEQ ID NO: 184398 - protein, 7 aa, synthetic construct
VEPRGRM

SEQ ID NO: 184399 - protein, 7 aa, synthetic construct
FDPRQRG

SEQ ID NO: 184400 - protein, 7 aa, synthetic construct
IEPQRRT

SEQ ID NO: 184401 - protein, 7 aa, synthetic construct
MEMKQRY

SEQ ID NO: 184402 - protein, 7 aa, synthetic construct
AEPRVRG

SEQ ID NO: 184403 - protein, 7 aa, synthetic construct
FEKMQRT

SEQ ID NO: 184404 - protein, 7 aa, synthetic construct
MEQRVRN

SEQ ID NO: 184405 - protein, 7 aa, synthetic construct
MTPIQRN

SEQ ID NO: 184406 - protein, 7 aa, synthetic construct
MIPRERG

SEQ ID NO: 184407 - protein, 7 aa, synthetic construct
QEPRLRT

SEQ ID NO: 184408 - protein, 7 aa, synthetic construct
SEIRQKT

SEQ ID NO: 184409 - protein, 7 aa, synthetic construct
MERNQRL

SEQ ID NO: 184410 - protein, 7 aa, synthetic construct
MEKRQSG

SEQ ID NO: 184411 - protein, 7 aa, synthetic construct
MIPRQMQ

SEQ ID NO: 184412 - protein, 7 aa, synthetic construct
MEKLHRT

SEQ ID NO: 184413 - protein, 7 aa, synthetic construct
TEPRQKM

SEQ ID NO: 184414 - protein, 7 aa, synthetic construct
MIPRDKT

SEQ ID NO: 184415 - protein, 7 aa, synthetic construct
VEPRQRN

SEQ ID NO: 184416 - protein, 7 aa, synthetic construct
NEPRVRL

SEQ ID NO: 184417 - protein, 7 aa, synthetic construct
MEAGKRT

SEQ ID NO: 184418 - protein, 7 aa, synthetic construct
MVPRERI

SEQ ID NO: 184419 - protein, 7 aa, synthetic construct
MNPRERT

SEQ ID NO: 184420 - protein, 7 aa, synthetic construct
KEPHQRT

SEQ ID NO: 184421 - protein, 7 aa, synthetic construct
IERTQRT

SEQ ID NO: 184422 - protein, 7 aa, synthetic construct
YEPRQKQ

SEQ ID NO: 184423 - protein, 7 aa, synthetic construct
MEPNMRR

SEQ ID NO: 184424 - protein, 7 aa, synthetic construct
HDPRIRT

SEQ ID NO: 184425 - protein, 7 aa, synthetic construct
SEVRQRS

SEQ ID NO: 184426 - protein, 7 aa, synthetic construct
IEPRSRA

SEQ ID NO: 184427 - protein, 7 aa, synthetic construct
MENAQRK

SEQ ID NO: 184428 - protein, 7 aa, synthetic construct
MIPRGRE

SEQ ID NO: 184429 - protein, 7 aa, synthetic construct
MIKRQDT

SEQ ID NO: 184430 - protein, 7 aa, synthetic construct
DAARQRT

SEQ ID NO: 184431 - protein, 7 aa, synthetic construct
MKIRQET

SEQ ID NO: 184432 - protein, 7 aa, synthetic construct
VEPNQRK

SEQ ID NO: 184433 - protein, 7 aa, synthetic construct
MTPSQRH

SEQ ID NO: 184434 - protein, 7 aa, synthetic construct
IEPRPRQ

SEQ ID NO: 184435 - protein, 7 aa, synthetic construct
NEPRNRS

SEQ ID NO: 184436 - protein, 7 aa, synthetic construct
MEVRQKA

SEQ ID NO: 184437 - protein, 7 aa, synthetic construct
MSPEQRK

SEQ ID NO: 184438 - protein, 7 aa, synthetic construct
DMPRVRT

SEQ ID NO: 184439 - protein, 7 aa, synthetic construct
MMPSQRH

SEQ ID NO: 184440 - protein, 7 aa, synthetic construct
MEPKSRF

SEQ ID NO: 184441 - protein, 7 aa, synthetic construct
MEARVRS

SEQ ID NO: 184442 - protein, 7 aa, synthetic construct
DNPRPRT

SEQ ID NO: 184443 - protein, 7 aa, synthetic construct
DGPRVRT

SEQ ID NO: 184444 - protein, 7 aa, synthetic construct
MEKRQTT

SEQ ID NO: 184445 - protein, 7 aa, synthetic construct
DKPFQRT

SEQ ID NO: 184446 - protein, 7 aa, synthetic construct
MEQRLRG

SEQ ID NO: 184447 - protein, 7 aa, synthetic construct
NERLQRT

SEQ ID NO: 184448 - protein, 7 aa, synthetic construct
MENTKRT

SEQ ID NO: 184449 - protein, 7 aa, synthetic construct
MMDRQRL

SEQ ID NO: 184450 - protein, 7 aa, synthetic construct
MEPNNRR

SEQ ID NO: 184451 - protein, 7 aa, synthetic construct
VKPRQDT

SEQ ID NO: 184452 - protein, 7 aa, synthetic construct
TEPRQKQ

SEQ ID NO: 184453 - protein, 7 aa, synthetic construct
IEPRARA

SEQ ID NO: 184454 - protein, 7 aa, synthetic construct
SEARLRT

SEQ ID NO: 184455 - protein, 7 aa, synthetic construct
AEPIKRT

SEQ ID NO: 184456 - protein, 7 aa, synthetic construct
VETRGRT

SEQ ID NO: 184457 - protein, 7 aa, synthetic construct
MPPRDRG

SEQ ID NO: 184458 - protein, 7 aa, synthetic construct
MEQRQKT

SEQ ID NO: 184459 - protein, 7 aa, synthetic construct
MEKHQRS

SEQ ID NO: 184460 - protein, 7 aa, synthetic construct
MPERQRI

SEQ ID NO: 184461 - protein, 7 aa, synthetic construct
MPERQRA

SEQ ID NO: 184462 - protein, 7 aa, synthetic construct
EIPRQRA

SEQ ID NO: 184463 - protein, 7 aa, synthetic construct
GETRQRP

SEQ ID NO: 184464 - protein, 7 aa, synthetic construct
VEPRGRL

SEQ ID NO: 184465 - protein, 7 aa, synthetic construct
NENRQRG

SEQ ID NO: 184466 - protein, 7 aa, synthetic construct
MGDRPRT

SEQ ID NO: 184467 - protein, 7 aa, synthetic construct
MEKRSTT

SEQ ID NO: 184468 - protein, 7 aa, synthetic construct
MERRQSP

SEQ ID NO: 184469 - protein, 7 aa, synthetic construct
QEVRQRS

SEQ ID NO: 184470 - protein, 7 aa, synthetic construct
MEKSQRL

SEQ ID NO: 184471 - protein, 7 aa, synthetic construct
HEKTQRT

SEQ ID NO: 184472 - protein, 7 aa, synthetic construct
METRPRS

SEQ ID NO: 184473 - protein, 7 aa, synthetic construct
AHPRQNT

SEQ ID NO: 184474 - protein, 7 aa, synthetic construct
IENRART

SEQ ID NO: 184475 - protein, 7 aa, synthetic construct
KEKRQDT

SEQ ID NO: 184476 - protein, 7 aa, synthetic construct
MEKQPRT

SEQ ID NO: 184477 - protein, 7 aa, synthetic construct
MEPSQKK

SEQ ID NO: 184478 - protein, 7 aa, synthetic construct
LETRLRT

SEQ ID NO: 184479 - protein, 7 aa, synthetic construct
AEMRQKT

SEQ ID NO: 184480 - protein, 7 aa, synthetic construct
MRPRQVE

SEQ ID NO: 184481 - protein, 7 aa, synthetic construct
LEARSRT

SEQ ID NO: 184482 - protein, 7 aa, synthetic construct
VEPRTRV

SEQ ID NO: 184483 - protein, 7 aa, synthetic construct
MLERQRS

SEQ ID NO: 184484 - protein, 7 aa, synthetic construct
MEARQNR

SEQ ID NO: 184485 - protein, 7 aa, synthetic construct
MEGRLRN

SEQ ID NO: 184486 - protein, 7 aa, synthetic construct
LEPRPRG

SEQ ID NO: 184487 - protein, 7 aa, synthetic construct
MEPKPRY

SEQ ID NO: 184488 - protein, 7 aa, synthetic construct
TEARQRG

SEQ ID NO: 184489 - protein, 7 aa, synthetic construct
MTPQQRH

SEQ ID NO: 184490 - protein, 7 aa, synthetic construct
MEKMVRT

SEQ ID NO: 184491 - protein, 7 aa, synthetic construct
MEPARRS

SEQ ID NO: 184492 - protein, 7 aa, synthetic construct
MIPQQRG

SEQ ID NO: 184493 - protein, 7 aa, synthetic construct
YEPVKRT

SEQ ID NO: 184494 - protein, 7 aa, synthetic construct
LEQRGRT

SEQ ID NO: 184495 - protein, 7 aa, synthetic construct
VEARQRQ

SEQ ID NO: 184496 - protein, 7 aa, synthetic construct
REPRMIT

SEQ ID NO: 184497 - protein, 7 aa, synthetic construct
MEKHART

SEQ ID NO: 184498 - protein, 7 aa, synthetic construct
DAPKQRT

SEQ ID NO: 184499 - protein, 7 aa, synthetic construct
AEPRGRI

SEQ ID NO: 184500 - protein, 7 aa, synthetic construct
MIPRQRD

SEQ ID NO: 184501 - protein, 7 aa, synthetic construct
KEDRQRM

SEQ ID NO: 184502 - protein, 7 aa, synthetic construct
MIPRQTG

SEQ ID NO: 184503 - protein, 7 aa, synthetic construct
MERRQTV

SEQ ID NO: 184504 - protein, 7 aa, synthetic construct
MEPRANR

SEQ ID NO: 184505 - protein, 7 aa, synthetic construct
MENRLKT

SEQ ID NO: 184506 - protein, 7 aa, synthetic construct
MEKPQRG

SEQ ID NO: 184507 - protein, 7 aa, synthetic construct
IEDRKRT

SEQ ID NO: 184508 - protein, 7 aa, synthetic construct
MEVIKRT

SEQ ID NO: 184509 - protein, 7 aa, synthetic construct
MEPRART

SEQ ID NO: 184510 - protein, 7 aa, synthetic construct
REPTQRT

SEQ ID NO: 184511 - protein, 7 aa, synthetic construct
MVPRQNS

SEQ ID NO: 184512 - protein, 7 aa, synthetic construct
MIERSRT

SEQ ID NO: 184513 - protein, 7 aa, synthetic construct
METRMRT

SEQ ID NO: 184514 - protein, 7 aa, synthetic construct
QEKRQST

SEQ ID NO: 184515 - protein, 7 aa, synthetic construct
LEPRVRQ

SEQ ID NO: 184516 - protein, 7 aa, synthetic construct
KMPRQET

SEQ ID NO: 184517 - protein, 7 aa, synthetic construct
VEPRIRS

SEQ ID NO: 184518 - protein, 7 aa, synthetic construct
YEPRVRG

SEQ ID NO: 184519 - protein, 7 aa, synthetic construct
VEPRPRT

SEQ ID NO: 184520 - protein, 7 aa, synthetic construct
MQPRDRQ

SEQ ID NO: 184521 - protein, 7 aa, synthetic construct
METRTRI

SEQ ID NO: 184522 - protein, 7 aa, synthetic construct
MEQNKRT

SEQ ID NO: 184523 - protein, 7 aa, synthetic construct
REPMQRA

SEQ ID NO: 184524 - protein, 7 aa, synthetic construct
LEPRSRI

SEQ ID NO: 184525 - protein, 7 aa, synthetic construct
MEPRMVR

SEQ ID NO: 184526 - protein, 7 aa, synthetic construct
MEPRRLQ

SEQ ID NO: 184527 - protein, 7 aa, synthetic construct
TETRQRM

SEQ ID NO: 184528 - protein, 7 aa, synthetic construct
PEPRGRG

SEQ ID NO: 184529 - protein, 7 aa, synthetic construct
DTPRGRT

SEQ ID NO: 184530 - protein, 7 aa, synthetic construct
FEPRTRS

SEQ ID NO: 184531 - protein, 7 aa, synthetic construct
YEPIKRT

SEQ ID NO: 184532 - protein, 7 aa, synthetic construct
MMPRRDT

SEQ ID NO: 184533 - protein, 7 aa, synthetic construct
TNPRERT

SEQ ID NO: 184534 - protein, 7 aa, synthetic construct
MEKAQRA

SEQ ID NO: 184535 - protein, 7 aa, synthetic construct
MENRQKI

SEQ ID NO: 184536 - protein, 7 aa, synthetic construct
TEPRMRS

SEQ ID NO: 184537 - protein, 7 aa, synthetic construct
NEPRQTR

SEQ ID NO: 184538 - protein, 7 aa, synthetic construct
MKPRQVD

SEQ ID NO: 184539 - protein, 7 aa, synthetic construct
AIPRERT

SEQ ID NO: 184540 - protein, 7 aa, synthetic construct
MEARQIK

SEQ ID NO: 184541 - protein, 7 aa, synthetic construct
TEPRQSK

SEQ ID NO: 184542 - protein, 7 aa, synthetic construct
METVKRT

SEQ ID NO: 184543 - protein, 7 aa, synthetic construct
RESRQST

SEQ ID NO: 184544 - protein, 7 aa, synthetic construct
SEVRQKT

SEQ ID NO: 184545 - protein, 7 aa, synthetic construct
MDPTQRK

SEQ ID NO: 184546 - protein, 7 aa, synthetic construct
MEKFNRT

SEQ ID NO: 184547 - protein, 7 aa, synthetic construct
RELRQAT

SEQ ID NO: 184548 - protein, 7 aa, synthetic construct
MEMRVRS

SEQ ID NO: 184549 - protein, 7 aa, synthetic construct
MKPRDTT

SEQ ID NO: 184550 - protein, 7 aa, synthetic construct
LEPRART

SEQ ID NO: 184551 - protein, 7 aa, synthetic construct
GEPRQKL

SEQ ID NO: 184552 - protein, 7 aa, synthetic construct
MEKSQRH

SEQ ID NO: 184553 - protein, 7 aa, synthetic construct
MPPIQRH

SEQ ID NO: 184554 - protein, 7 aa, synthetic construct
DQPRQRT

SEQ ID NO: 184555 - protein, 7 aa, synthetic construct
VETRTRT

SEQ ID NO: 184556 - protein, 7 aa, synthetic construct
QENRQRV

SEQ ID NO: 184557 - protein, 7 aa, synthetic construct
MDPRPRM

SEQ ID NO: 184558 - protein, 7 aa, synthetic construct
TVPRQRE

SEQ ID NO: 184559 - protein, 7 aa, synthetic construct
VEQRQKT

SEQ ID NO: 184560 - protein, 7 aa, synthetic construct
IEPPRRT

SEQ ID NO: 184561 - protein, 7 aa, synthetic construct
NENRQRV

SEQ ID NO: 184562 - protein, 7 aa, synthetic construct
MEGRQKS

SEQ ID NO: 184563 - protein, 7 aa, synthetic construct
MELKQRG

SEQ ID NO: 184564 - protein, 7 aa, synthetic construct
MEPTARR

SEQ ID NO: 184565 - protein, 7 aa, synthetic construct
REPVQRQ

SEQ ID NO: 184566 - protein, 7 aa, synthetic construct
QEPRPRT

SEQ ID NO: 184567 - protein, 7 aa, synthetic construct
SEQRLRT

SEQ ID NO: 184568 - protein, 7 aa, synthetic construct
GEPRVRP

SEQ ID NO: 184569 - protein, 7 aa, synthetic construct
KEPHQRM

SEQ ID NO: 184570 - protein, 7 aa, synthetic construct
MEPTTRR

SEQ ID NO: 184571 - protein, 7 aa, synthetic construct
LEARART

SEQ ID NO: 184572 - protein, 7 aa, synthetic construct
MEPRPGR

SEQ ID NO: 184573 - protein, 7 aa, synthetic construct
MVERART

SEQ ID NO: 184574 - protein, 7 aa, synthetic construct
LEPNQRK

SEQ ID NO: 184575 - protein, 7 aa, synthetic construct
LEQRVRT

SEQ ID NO: 184576 - protein, 7 aa, synthetic construct
MGPRSST

SEQ ID NO: 184577 - protein, 7 aa, synthetic construct
EAPRQKT

SEQ ID NO: 184578 - protein, 7 aa, synthetic construct
MTPRERL

SEQ ID NO: 184579 - protein, 7 aa, synthetic construct
MEGRLKT

SEQ ID NO: 184580 - protein, 7 aa, synthetic construct
KESHQRT

SEQ ID NO: 184581 - protein, 7 aa, synthetic construct
IEPRQRT

SEQ ID NO: 184582 - protein, 7 aa, synthetic construct
DIQRQRT

SEQ ID NO: 184583 - protein, 7 aa, synthetic construct
MEKLQRI

SEQ ID NO: 184584 - protein, 7 aa, synthetic construct
IEPRNRM

SEQ ID NO: 184585 - protein, 7 aa, synthetic construct
REPRPIT

SEQ ID NO: 184586 - protein, 7 aa, synthetic construct
GEPRVKT

SEQ ID NO: 184587 - protein, 7 aa, synthetic construct
LESRQRA

SEQ ID NO: 184588 - protein, 7 aa, synthetic construct
LEPRLRG

SEQ ID NO: 184589 - protein, 7 aa, synthetic construct
TEQRQRN

SEQ ID NO: 184590 - protein, 7 aa, synthetic construct
PEPRQTK

SEQ ID NO: 184591 - protein, 7 aa, synthetic construct
MERPMRT

SEQ ID NO: 184592 - protein, 7 aa, synthetic construct
MEQRQRG

SEQ ID NO: 184593 - protein, 7 aa, synthetic construct
MERPQRN

SEQ ID NO: 184594 - protein, 7 aa, synthetic construct
MEKRHGT

SEQ ID NO: 184595 - protein, 7 aa, synthetic construct
SEPRIRV

SEQ ID NO: 184596 - protein, 7 aa, synthetic construct
MHPRQNA

SEQ ID NO: 184597 - protein, 7 aa, synthetic construct
MEKRAIT

SEQ ID NO: 184598 - protein, 7 aa, synthetic construct
TAPRQRE

SEQ ID NO: 184599 - protein, 7 aa, synthetic construct
MHPRQSM

SEQ ID NO: 184600 - protein, 7 aa, synthetic construct
MKPFQRD

SEQ ID NO: 184601 - protein, 7 aa, synthetic construct
NELRGRT

SEQ ID NO: 184602 - protein, 7 aa, synthetic construct
VEARART

SEQ ID NO: 184603 - protein, 7 aa, synthetic construct
AEPRQTK

SEQ ID NO: 184604 - protein, 7 aa, synthetic construct
VEPRNRI

SEQ ID NO: 184605 - protein, 7 aa, synthetic construct
SEKRQIT

SEQ ID NO: 184606 - protein, 7 aa, synthetic construct
NAERQRT

SEQ ID NO: 184607 - protein, 7 aa, synthetic construct
REDKQRT

SEQ ID NO: 184608 - protein, 7 aa, synthetic construct
MQPRQRE

SEQ ID NO: 184609 - protein, 7 aa, synthetic construct
MEKRQLT

SEQ ID NO: 184610 - protein, 7 aa, synthetic construct
MNPEQRK

SEQ ID NO: 184611 - protein, 7 aa, synthetic construct
TIPRQRD

SEQ ID NO: 184612 - protein, 7 aa, synthetic construct
MEVKQRA

SEQ ID NO: 184613 - protein, 7 aa, synthetic construct
IEPMRRT

SEQ ID NO: 184614 - protein, 7 aa, synthetic construct
FEPRMRA

SEQ ID NO: 184615 - protein, 7 aa, synthetic construct
KELRQRE

SEQ ID NO: 184616 - protein, 7 aa, synthetic construct
IDARQRT

SEQ ID NO: 184617 - protein, 7 aa, synthetic construct
VEARIRT

SEQ ID NO: 184618 - protein, 7 aa, synthetic construct
VEPRMRM

SEQ ID NO: 184619 - protein, 7 aa, synthetic construct
HAPRERT

SEQ ID NO: 184620 - protein, 7 aa, synthetic construct
MEKRQFI

SEQ ID NO: 184621 - protein, 7 aa, synthetic construct
MLQRQRE

SEQ ID NO: 184622 - protein, 7 aa, synthetic construct
HEPVKRT

SEQ ID NO: 184623 - protein, 7 aa, synthetic construct
MVPRNRD

SEQ ID NO: 184624 - protein, 7 aa, synthetic construct
MEVRGRA

SEQ ID NO: 184625 - protein, 7 aa, synthetic construct
MRPRQEI

SEQ ID NO: 184626 - protein, 7 aa, synthetic construct
LEPLRRT

SEQ ID NO: 184627 - protein, 7 aa, synthetic construct
MIPQQRN

SEQ ID NO: 184628 - protein, 7 aa, synthetic construct
MENIQRK

SEQ ID NO: 184629 - protein, 7 aa, synthetic construct
NEIRQRG

SEQ ID NO: 184630 - protein, 7 aa, synthetic construct
MENRIRN

SEQ ID NO: 184631 - protein, 7 aa, synthetic construct
REPHLRT

SEQ ID NO: 184632 - protein, 7 aa, synthetic construct
IEIRTRT

SEQ ID NO: 184633 - protein, 7 aa, synthetic construct
NEPIQRK

SEQ ID NO: 184634 - protein, 7 aa, synthetic construct
MIPHQRG

SEQ ID NO: 184635 - protein, 7 aa, synthetic construct
MESKQRN

SEQ ID NO: 184636 - protein, 7 aa, synthetic construct
MEPRLNR

SEQ ID NO: 184637 - protein, 7 aa, synthetic construct
MEPRQRA

SEQ ID NO: 184638 - protein, 7 aa, synthetic construct
MEVRPRV

SEQ ID NO: 184639 - protein, 7 aa, synthetic construct
MDLKQRT

SEQ ID NO: 184640 - protein, 7 aa, synthetic construct
TETRQRV

SEQ ID NO: 184641 - protein, 7 aa, synthetic construct
NELRQRA

SEQ ID NO: 184642 - protein, 7 aa, synthetic construct
IEPRARS

SEQ ID NO: 184643 - protein, 7 aa, synthetic construct
TEPRIRG

SEQ ID NO: 184644 - protein, 7 aa, synthetic construct
MEKPQRQ

SEQ ID NO: 184645 - protein, 7 aa, synthetic construct
HEQKQRT

SEQ ID NO: 184646 - protein, 7 aa, synthetic construct
GEPRMRP

SEQ ID NO: 184647 - protein, 7 aa, synthetic construct
REPRDRT

SEQ ID NO: 184648 - protein, 7 aa, synthetic construct
MEPRARI

SEQ ID NO: 184649 - protein, 7 aa, synthetic construct
LEPRMRA

SEQ ID NO: 184650 - protein, 7 aa, synthetic construct
RETRQIT

SEQ ID NO: 184651 - protein, 7 aa, synthetic construct
KEPRQYG

SEQ ID NO: 184652 - protein, 7 aa, synthetic construct
MEKYPRT

SEQ ID NO: 184653 - protein, 7 aa, synthetic construct
REPSQRQ

SEQ ID NO: 184654 - protein, 7 aa, synthetic construct
MIPGQRQ

SEQ ID NO: 184655 - protein, 7 aa, synthetic construct
VETRQRP

SEQ ID NO: 184656 - protein, 7 aa, synthetic construct
MEVRTRG

SEQ ID NO: 184657 - protein, 7 aa, synthetic construct
MELRGKT

SEQ ID NO: 184658 - protein, 7 aa, synthetic construct
MEPRVRI

SEQ ID NO: 184659 - protein, 7 aa, synthetic construct
MEARQGK

SEQ ID NO: 184660 - protein, 7 aa, synthetic construct
MEPRQRN

SEQ ID NO: 184661 - protein, 7 aa, synthetic construct
YETRQRS

SEQ ID NO: 184662 - protein, 7 aa, synthetic construct
TENRQRA

SEQ ID NO: 184663 - protein, 7 aa, synthetic construct
MELRTRS

SEQ ID NO: 184664 - protein, 7 aa, synthetic construct
QEPRMRV

SEQ ID NO: 184665 - protein, 7 aa, synthetic construct
VEVRQRT

SEQ ID NO: 184666 - protein, 7 aa, synthetic construct
HTPRQNT

SEQ ID NO: 184667 - protein, 7 aa, synthetic construct
MEPRRQN

SEQ ID NO: 184668 - protein, 7 aa, synthetic construct
MEPRNVR

SEQ ID NO: 184669 - protein, 7 aa, synthetic construct
MTERMRT

SEQ ID NO: 184670 - protein, 7 aa, synthetic construct
QIPRERT

SEQ ID NO: 184671 - protein, 7 aa, synthetic construct
VEPRMRG

SEQ ID NO: 184672 - protein, 7 aa, synthetic construct
EKPRQAT

SEQ ID NO: 184673 - protein, 7 aa, synthetic construct
NEPRPRQ

SEQ ID NO: 184674 - protein, 7 aa, synthetic construct
KETRERT

SEQ ID NO: 184675 - protein, 7 aa, synthetic construct
AEKRQAT

SEQ ID NO: 184676 - protein, 7 aa, synthetic construct
LEPRTRS

SEQ ID NO: 184677 - protein, 7 aa, synthetic construct
IMPRERT

SEQ ID NO: 184678 - protein, 7 aa, synthetic construct
PERQQRT

SEQ ID NO: 184679 - protein, 7 aa, synthetic construct
IEGRLRT

SEQ ID NO: 184680 - protein, 7 aa, synthetic construct
DAPRPRT

SEQ ID NO: 184681 - protein, 7 aa, synthetic construct
PEIKQRT

SEQ ID NO: 184682 - protein, 7 aa, synthetic construct
MDPTQRR

SEQ ID NO: 184683 - protein, 7 aa, synthetic construct
LEPRPRN

SEQ ID NO: 184684 - protein, 7 aa, synthetic construct
MEKRLIT

SEQ ID NO: 184685 - protein, 7 aa, synthetic construct
MIARQRE

SEQ ID NO: 184686 - protein, 7 aa, synthetic construct
LESRGRT

SEQ ID NO: 184687 - protein, 7 aa, synthetic construct
APPRQRE

SEQ ID NO: 184688 - protein, 7 aa, synthetic construct
VEIKQRT

SEQ ID NO: 184689 - protein, 7 aa, synthetic construct
SEPRMRN

SEQ ID NO: 184690 - protein, 7 aa, synthetic construct
MENRQQR

SEQ ID NO: 184691 - protein, 7 aa, synthetic construct
IEPRGRA

SEQ ID NO: 184692 - protein, 7 aa, synthetic construct
IEARVRT

SEQ ID NO: 184693 - protein, 7 aa, synthetic construct
MEGRQGK

SEQ ID NO: 184694 - protein, 7 aa, synthetic construct
MEKPQRF

SEQ ID NO: 184695 - protein, 7 aa, synthetic construct
MEIKGRT

SEQ ID NO: 184696 - protein, 7 aa, synthetic construct
MEPRVYK

SEQ ID NO: 184697 - protein, 7 aa, synthetic construct
IEPRQRS

SEQ ID NO: 184698 - protein, 7 aa, synthetic construct
SLPRQRD

SEQ ID NO: 184699 - protein, 7 aa, synthetic construct
IEPTQRR

SEQ ID NO: 184700 - protein, 7 aa, synthetic construct
MEPRMQR

SEQ ID NO: 184701 - protein, 7 aa, synthetic construct
PETRQRV

SEQ ID NO: 184702 - protein, 7 aa, synthetic construct
DTPRQRT

SEQ ID NO: 184703 - protein, 7 aa, synthetic construct
SEPRVRN

SEQ ID NO: 184704 - protein, 7 aa, synthetic construct
AEPRTRV

SEQ ID NO: 184705 - protein, 7 aa, synthetic construct
MEPRRTN

SEQ ID NO: 184706 - protein, 7 aa, synthetic construct
IEPRVRS

SEQ ID NO: 184707 - protein, 7 aa, synthetic construct
MEKSSRT

SEQ ID NO: 184708 - protein, 7 aa, synthetic construct
MIPRDRQ

SEQ ID NO: 184709 - protein, 7 aa, synthetic construct
MEVRMRP

SEQ ID NO: 184710 - protein, 7 aa, synthetic construct
MEPRTVR

SEQ ID NO: 184711 - protein, 7 aa, synthetic construct
NEPRGRI

SEQ ID NO: 184712 - protein, 7 aa, synthetic construct
VEPRPRQ

SEQ ID NO: 184713 - protein, 7 aa, synthetic construct
MRPREVT

SEQ ID NO: 184714 - protein, 7 aa, synthetic construct
HTPRQST

SEQ ID NO: 184715 - protein, 7 aa, synthetic construct
MENRTRG

SEQ ID NO: 184716 - protein, 7 aa, synthetic construct
GNPRQRE

SEQ ID NO: 184717 - protein, 7 aa, synthetic construct
NELRQRG

SEQ ID NO: 184718 - protein, 7 aa, synthetic construct
MEPLQKK

SEQ ID NO: 184719 - protein, 7 aa, synthetic construct
MERTQRS

SEQ ID NO: 184720 - protein, 7 aa, synthetic construct
MEPKTRY

SEQ ID NO: 184721 - protein, 7 aa, synthetic construct
LEPRNRQ

SEQ ID NO: 184722 - protein, 7 aa, synthetic construct
DLPRPRT

SEQ ID NO: 184723 - protein, 7 aa, synthetic construct
MEKRQII

SEQ ID NO: 184724 - protein, 7 aa, synthetic construct
AEPRART

SEQ ID NO: 184725 - protein, 7 aa, synthetic construct
LEPRQRS

SEQ ID NO: 184726 - protein, 7 aa, synthetic construct
MEPRVRG

SEQ ID NO: 184727 - protein, 7 aa, synthetic construct
MAPRTRD

SEQ ID NO: 184728 - protein, 7 aa, synthetic construct
LEARLRT

SEQ ID NO: 184729 - protein, 7 aa, synthetic construct
MEPNQRK

SEQ ID NO: 184730 - protein, 7 aa, synthetic construct
TEPMQRK

SEQ ID NO: 184731 - protein, 7 aa, synthetic construct
VVERQRT

SEQ ID NO: 184732 - protein, 7 aa, synthetic construct
MVPRQRE

SEQ ID NO: 184733 - protein, 7 aa, synthetic construct
MEKIQRL

SEQ ID NO: 184734 - protein, 7 aa, synthetic construct
NEVRQRT

SEQ ID NO: 184735 - protein, 7 aa, synthetic construct
NEPRQTK

SEQ ID NO: 184736 - protein, 7 aa, synthetic construct
AEPRTRT

SEQ ID NO: 184737 - protein, 7 aa, synthetic construct
LEVRQKT

SEQ ID NO: 184738 - protein, 7 aa, synthetic construct
MEVRVRG

SEQ ID NO: 184739 - protein, 7 aa, synthetic construct
MDLRQKT

SEQ ID NO: 184740 - protein, 7 aa, synthetic construct
NEPMQRK

SEQ ID NO: 184741 - protein, 7 aa, synthetic construct
MTPRANT

SEQ ID NO: 184742 - protein, 7 aa, synthetic construct
LEPRARL

SEQ ID NO: 184743 - protein, 7 aa, synthetic construct
MGPRQHQ

SEQ ID NO: 184744 - protein, 7 aa, synthetic construct
DMPRNRT

SEQ ID NO: 184745 - protein, 7 aa, synthetic construct
MVPHQRM

SEQ ID NO: 184746 - protein, 7 aa, synthetic construct
REPVNRT

SEQ ID NO: 184747 - protein, 7 aa, synthetic construct
GEPRPRV

SEQ ID NO: 184748 - protein, 7 aa, synthetic construct
MKPRADT

SEQ ID NO: 184749 - protein, 7 aa, synthetic construct
PIPRQRD

SEQ ID NO: 184750 - protein, 7 aa, synthetic construct
YEPRGRS

SEQ ID NO: 184751 - protein, 7 aa, synthetic construct
MIPRQTL

SEQ ID NO: 184752 - protein, 7 aa, synthetic construct
EIPRQRV

SEQ ID NO: 184753 - protein, 7 aa, synthetic construct
MEHKMRT

SEQ ID NO: 184754 - protein, 7 aa, synthetic construct
VEPRPRN

SEQ ID NO: 184755 - protein, 7 aa, synthetic construct
TSPRQRE

SEQ ID NO: 184756 - protein, 7 aa, synthetic construct
VEPRVRG

SEQ ID NO: 184757 - protein, 7 aa, synthetic construct
MSPRERL

SEQ ID NO: 184758 - protein, 7 aa, synthetic construct
IEARLRT

SEQ ID NO: 184759 - protein, 7 aa, synthetic construct
MERKQTT

SEQ ID NO: 184760 - protein, 7 aa, synthetic construct
IEPRARM

SEQ ID NO: 184761 - protein, 7 aa, synthetic construct
MNPRIRD

SEQ ID NO: 184762 - protein, 7 aa, synthetic construct
KEKRQET

SEQ ID NO: 184763 - protein, 7 aa, synthetic construct
HEKVQRT

SEQ ID NO: 184764 - protein, 7 aa, synthetic construct
KEIRDRT

SEQ ID NO: 184765 - protein, 7 aa, synthetic construct
LEARPRT

SEQ ID NO: 184766 - protein, 7 aa, synthetic construct
TEPRTRS

SEQ ID NO: 184767 - protein, 7 aa, synthetic construct
LEVRTRT

SEQ ID NO: 184768 - protein, 7 aa, synthetic construct
LEGRTRT

SEQ ID NO: 184769 - protein, 7 aa, synthetic construct
REPGMRT

SEQ ID NO: 184770 - protein, 7 aa, synthetic construct
MRPRIET

SEQ ID NO: 184771 - protein, 7 aa, synthetic construct
MEPRLRT

SEQ ID NO: 184772 - protein, 7 aa, synthetic construct
MENRQAR

SEQ ID NO: 184773 - protein, 7 aa, synthetic construct
MEPMRRT

SEQ ID NO: 184774 - protein, 7 aa, synthetic construct
MEKNQRN

SEQ ID NO: 184775 - protein, 7 aa, synthetic construct
AIPRQRD

SEQ ID NO: 184776 - protein, 7 aa, synthetic construct
MRPRQDI

SEQ ID NO: 184777 - protein, 7 aa, synthetic construct
QENRQRG

SEQ ID NO: 184778 - protein, 7 aa, synthetic construct
MEKRQAF

SEQ ID NO: 184779 - protein, 7 aa, synthetic construct
PEKRQMT

SEQ ID NO: 184780 - protein, 7 aa, synthetic construct
PEPRMRV

SEQ ID NO: 184781 - protein, 7 aa, synthetic construct
IENRQRM

SEQ ID NO: 184782 - protein, 7 aa, synthetic construct
MERKQMT

SEQ ID NO: 184783 - protein, 7 aa, synthetic construct
MEPRIRA

SEQ ID NO: 184784 - protein, 7 aa, synthetic construct
TDSRQRT

SEQ ID NO: 184785 - protein, 7 aa, synthetic construct
MNPRVRE

SEQ ID NO: 184786 - protein, 7 aa, synthetic construct
VEPRTRN

SEQ ID NO: 184787 - protein, 7 aa, synthetic construct
MKTRQET

SEQ ID NO: 184788 - protein, 7 aa, synthetic construct
QGPRQNT

SEQ ID NO: 184789 - protein, 7 aa, synthetic construct
MEKRIAT

SEQ ID NO: 184790 - protein, 7 aa, synthetic construct
QEVRQRN

SEQ ID NO: 184791 - protein, 7 aa, synthetic construct
LEPRQAR

SEQ ID NO: 184792 - protein, 7 aa, synthetic construct
MKPRQDV

SEQ ID NO: 184793 - protein, 7 aa, synthetic construct
NQERQRT

SEQ ID NO: 184794 - protein, 7 aa, synthetic construct
MRPRQPE

SEQ ID NO: 184795 - protein, 7 aa, synthetic construct
MEKRQAS

SEQ ID NO: 184796 - protein, 7 aa, synthetic construct
IEPRVRM

SEQ ID NO: 184797 - protein, 7 aa, synthetic construct
MERNQRG

SEQ ID NO: 184798 - protein, 7 aa, synthetic construct
DQPRQRP

SEQ ID NO: 184799 - protein, 7 aa, synthetic construct
VEVRQRQ

SEQ ID NO: 184800 - protein, 7 aa, synthetic construct
NEPGKRT

SEQ ID NO: 184801 - protein, 7 aa, synthetic construct
TEPRTRN

SEQ ID NO: 184802 - protein, 7 aa, synthetic construct
MDARQRQ

SEQ ID NO: 184803 - protein, 7 aa, synthetic construct
MEKRSST

SEQ ID NO: 184804 - protein, 7 aa, synthetic construct
KEPRDRY

SEQ ID NO: 184805 - protein, 7 aa, synthetic construct
LEPRQGR

SEQ ID NO: 184806 - protein, 7 aa, synthetic construct
MEVRNRV

SEQ ID NO: 184807 - protein, 7 aa, synthetic construct
MEMRLKT

SEQ ID NO: 184808 - protein, 7 aa, synthetic construct
MNPREKT

SEQ ID NO: 184809 - protein, 7 aa, synthetic construct
RETRQVT

SEQ ID NO: 184810 - protein, 7 aa, synthetic construct
QEPRQKQ

SEQ ID NO: 184811 - protein, 7 aa, synthetic construct
QEPRVKT

SEQ ID NO: 184812 - protein, 7 aa, synthetic construct
ADPRQRA

SEQ ID NO: 184813 - protein, 7 aa, synthetic construct
MVPRARE

SEQ ID NO: 184814 - protein, 7 aa, synthetic construct
MPPMQRQ

SEQ ID NO: 184815 - protein, 7 aa, synthetic construct
TEPRARS

SEQ ID NO: 184816 - protein, 7 aa, synthetic construct
MDPRMRN

SEQ ID NO: 184817 - protein, 7 aa, synthetic construct
MEPKHRQ

SEQ ID NO: 184818 - protein, 7 aa, synthetic construct
MEQMKRT

SEQ ID NO: 184819 - protein, 7 aa, synthetic construct
LEKRQHT

SEQ ID NO: 184820 - protein, 7 aa, synthetic construct
KEFRQVT

SEQ ID NO: 184821 - protein, 7 aa, synthetic construct
NEPKHRT

SEQ ID NO: 184822 - protein, 7 aa, synthetic construct
MESGKRT

SEQ ID NO: 184823 - protein, 7 aa, synthetic construct
MHPRQSL

SEQ ID NO: 184824 - protein, 7 aa, synthetic construct
NEMRLRT

SEQ ID NO: 184825 - protein, 7 aa, synthetic construct
MEPNIRK

SEQ ID NO: 184826 - protein, 7 aa, synthetic construct
MESKQRL

SEQ ID NO: 184827 - protein, 7 aa, synthetic construct
MVPRQGH

SEQ ID NO: 184828 - protein, 7 aa, synthetic construct
AEVRQRV

SEQ ID NO: 184829 - protein, 7 aa, synthetic construct
HKPRQET

SEQ ID NO: 184830 - protein, 7 aa, synthetic construct
MDSRQRS

SEQ ID NO: 184831 - protein, 7 aa, synthetic construct
MGNRQRE

SEQ ID NO: 184832 - protein, 7 aa, synthetic construct
REPRERS

SEQ ID NO: 184833 - protein, 7 aa, synthetic construct
MENRTRV

SEQ ID NO: 184834 - protein, 7 aa, synthetic construct
KEHLQRT

SEQ ID NO: 184835 - protein, 7 aa, synthetic construct
MERPQRV

SEQ ID NO: 184836 - protein, 7 aa, synthetic construct
NEQRQRV

SEQ ID NO: 184837 - protein, 7 aa, synthetic construct
RETNQRT

SEQ ID NO: 184838 - protein, 7 aa, synthetic construct
MEPRPMK

SEQ ID NO: 184839 - protein, 7 aa, synthetic construct
NEPRMRM

SEQ ID NO: 184840 - protein, 7 aa, synthetic construct
IETRQRS

SEQ ID NO: 184841 - protein, 7 aa, synthetic construct
SETRLRT

SEQ ID NO: 184842 - protein, 7 aa, synthetic construct
QEPRGRS

SEQ ID NO: 184843 - protein, 7 aa, synthetic construct
DQPRART

SEQ ID NO: 184844 - protein, 7 aa, synthetic construct
FEKAQRT

SEQ ID NO: 184845 - protein, 7 aa, synthetic construct
MKARQET

SEQ ID NO: 184846 - protein, 7 aa, synthetic construct
MEKRQVM

SEQ ID NO: 184847 - protein, 7 aa, synthetic construct
MESKIRT

SEQ ID NO: 184848 - protein, 7 aa, synthetic construct
NTDRQRT

SEQ ID NO: 184849 - protein, 7 aa, synthetic construct
MENNQRR

SEQ ID NO: 184850 - protein, 7 aa, synthetic construct
FEPRTRG

SEQ ID NO: 184851 - protein, 7 aa, synthetic construct
LEPRTRL

SEQ ID NO: 184852 - protein, 7 aa, synthetic construct
EKPMQRT

SEQ ID NO: 184853 - protein, 7 aa, synthetic construct
MDPRPRA

SEQ ID NO: 184854 - protein, 7 aa, synthetic construct
MEGRMRP

SEQ ID NO: 184855 - protein, 7 aa, synthetic construct
METRMRG

SEQ ID NO: 184856 - protein, 7 aa, synthetic construct
MEPNQKR

SEQ ID NO: 184857 - protein, 7 aa, synthetic construct
DIPRQRN

SEQ ID NO: 184858 - protein, 7 aa, synthetic construct
ELPRNRT

SEQ ID NO: 184859 - protein, 7 aa, synthetic construct
METRQKN

SEQ ID NO: 184860 - protein, 7 aa, synthetic construct
IEVRQRA

SEQ ID NO: 184861 - protein, 7 aa, synthetic construct
MERQQRG

SEQ ID NO: 184862 - protein, 7 aa, synthetic construct
PEPRVRQ

SEQ ID NO: 184863 - protein, 7 aa, synthetic construct
YEPRMKT

SEQ ID NO: 184864 - protein, 7 aa, synthetic construct
MDARQRS

SEQ ID NO: 184865 - protein, 7 aa, synthetic construct
SEIRQRV

SEQ ID NO: 184866 - protein, 7 aa, synthetic construct
PEPRGRS

SEQ ID NO: 184867 - protein, 7 aa, synthetic construct
PEMRQRP

SEQ ID NO: 184868 - protein, 7 aa, synthetic construct
MEARQKL

SEQ ID NO: 184869 - protein, 7 aa, synthetic construct
MEPRMRV

SEQ ID NO: 184870 - protein, 7 aa, synthetic construct
MMPRQDR

SEQ ID NO: 184871 - protein, 7 aa, synthetic construct
NDPRMRT

SEQ ID NO: 184872 - protein, 7 aa, synthetic construct
MEQRIRS

SEQ ID NO: 184873 - protein, 7 aa, synthetic construct
KEIRQHT

SEQ ID NO: 184874 - protein, 7 aa, synthetic construct
MAPRVRD

SEQ ID NO: 184875 - protein, 7 aa, synthetic construct
MEKRQSI

SEQ ID NO: 184876 - protein, 7 aa, synthetic construct
TEARQRV

SEQ ID NO: 184877 - protein, 7 aa, synthetic construct
VENRIRT

SEQ ID NO: 184878 - protein, 7 aa, synthetic construct
MSPRPRE

SEQ ID NO: 184879 - protein, 7 aa, synthetic construct
DAPRTRT

SEQ ID NO: 184880 - protein, 7 aa, synthetic construct
MNPRQRD

SEQ ID NO: 184881 - protein, 7 aa, synthetic construct
MESKQRQ

SEQ ID NO: 184882 - protein, 7 aa, synthetic construct
YEVRQKT

SEQ ID NO: 184883 - protein, 7 aa, synthetic construct
IENRQRQ

SEQ ID NO: 184884 - protein, 7 aa, synthetic construct
IEPRQFK

SEQ ID NO: 184885 - protein, 7 aa, synthetic construct
NEARQRN

SEQ ID NO: 184886 - protein, 7 aa, synthetic construct
GEVKQRT

SEQ ID NO: 184887 - protein, 7 aa, synthetic construct
KEPRHFT

SEQ ID NO: 184888 - protein, 7 aa, synthetic construct
LENRQRP

SEQ ID NO: 184889 - protein, 7 aa, synthetic construct
LEPRQTR

SEQ ID NO: 184890 - protein, 7 aa, synthetic construct
MGPRTRD

SEQ ID NO: 184891 - protein, 7 aa, synthetic construct
LEARQRQ

SEQ ID NO: 184892 - protein, 7 aa, synthetic construct
LGERQRT

SEQ ID NO: 184893 - protein, 7 aa, synthetic construct
MDPRPRV

SEQ ID NO: 184894 - protein, 7 aa, synthetic construct
GTPRDRT

SEQ ID NO: 184895 - protein, 7 aa, synthetic construct
ADPRPRT

SEQ ID NO: 184896 - protein, 7 aa, synthetic construct
LEMRQRG

SEQ ID NO: 184897 - protein, 7 aa, synthetic construct
NEVRQRS

SEQ ID NO: 184898 - protein, 7 aa, synthetic construct
LEPRQKF

SEQ ID NO: 184899 - protein, 7 aa, synthetic construct
QETRQRA

SEQ ID NO: 184900 - protein, 7 aa, synthetic construct
METRIRN

SEQ ID NO: 184901 - protein, 7 aa, synthetic construct
SEPRPRP

SEQ ID NO: 184902 - protein, 7 aa, synthetic construct
MEGRMRA

SEQ ID NO: 184903 - protein, 7 aa, synthetic construct
NEARLRT

SEQ ID NO: 184904 - protein, 7 aa, synthetic construct
SEPRQRG

SEQ ID NO: 184905 - protein, 7 aa, synthetic construct
MEKVQRV

SEQ ID NO: 184906 - protein, 7 aa, synthetic construct
AEPRQRP

SEQ ID NO: 184907 - protein, 7 aa, synthetic construct
MEVKIRT

SEQ ID NO: 184908 - protein, 7 aa, synthetic construct
MEPRTKH

SEQ ID NO: 184909 - protein, 7 aa, synthetic construct
IEPRSRQ

SEQ ID NO: 184910 - protein, 7 aa, synthetic construct
MDNRIRT

SEQ ID NO: 184911 - protein, 7 aa, synthetic construct
LEPRARA

SEQ ID NO: 184912 - protein, 7 aa, synthetic construct
MGPEQRK

SEQ ID NO: 184913 - protein, 7 aa, synthetic construct
MIPRQHN

SEQ ID NO: 184914 - protein, 7 aa, synthetic construct
TEGRQRP

SEQ ID NO: 184915 - protein, 7 aa, synthetic construct
AQPRQRE

SEQ ID NO: 184916 - protein, 7 aa, synthetic construct
QEKRQHT

SEQ ID NO: 184917 - protein, 7 aa, synthetic construct
AEMRQRP

SEQ ID NO: 184918 - protein, 7 aa, synthetic construct
MESRQKV

SEQ ID NO: 184919 - protein, 7 aa, synthetic construct
DTPRART

SEQ ID NO: 184920 - protein, 7 aa, synthetic construct
PAPRQRD

SEQ ID NO: 184921 - protein, 7 aa, synthetic construct
MEPRLRG

SEQ ID NO: 184922 - protein, 7 aa, synthetic construct
TDPRQRN

SEQ ID NO: 184923 - protein, 7 aa, synthetic construct
SETRQRI

SEQ ID NO: 184924 - protein, 7 aa, synthetic construct
KELRQRD

SEQ ID NO: 184925 - protein, 7 aa, synthetic construct
VEVRQRV

SEQ ID NO: 184926 - protein, 7 aa, synthetic construct
QEIKQRT

SEQ ID NO: 184927 - protein, 7 aa, synthetic construct
MPPHQRN

SEQ ID NO: 184928 - protein, 7 aa, synthetic construct
TEPRIRN

SEQ ID NO: 184929 - protein, 7 aa, synthetic construct
EKPRQPT

SEQ ID NO: 184930 - protein, 7 aa, synthetic construct
GEPKLRT

SEQ ID NO: 184931 - protein, 7 aa, synthetic construct
NEVRVRT

SEQ ID NO: 184932 - protein, 7 aa, synthetic construct
MEPPKRF

SEQ ID NO: 184933 - protein, 7 aa, synthetic construct
MEKFQRS

SEQ ID NO: 184934 - protein, 7 aa, synthetic construct
MDNRVRT

SEQ ID NO: 184935 - protein, 7 aa, synthetic construct
MLPRQHG

SEQ ID NO: 184936 - protein, 7 aa, synthetic construct
MEPRAKH

SEQ ID NO: 184937 - protein, 7 aa, synthetic construct
NEKRQST

SEQ ID NO: 184938 - protein, 7 aa, synthetic construct
QEKNQRT

SEQ ID NO: 184939 - protein, 7 aa, synthetic construct
NDPRQRS

SEQ ID NO: 184940 - protein, 7 aa, synthetic construct
QEPRTRN

SEQ ID NO: 184941 - protein, 7 aa, synthetic construct
MEARSRV

SEQ ID NO: 184942 - protein, 7 aa, synthetic construct
TEPQQRK

SEQ ID NO: 184943 - protein, 7 aa, synthetic construct
MESRIRG

SEQ ID NO: 184944 - protein, 7 aa, synthetic construct
MEARQVK

SEQ ID NO: 184945 - protein, 7 aa, synthetic construct
VEPRPRI

SEQ ID NO: 184946 - protein, 7 aa, synthetic construct
MEGKQRT

SEQ ID NO: 184947 - protein, 7 aa, synthetic construct
MEQGKRT

SEQ ID NO: 184948 - protein, 7 aa, synthetic construct
GEPRTRV

SEQ ID NO: 184949 - protein, 7 aa, synthetic construct
MEARNRG

SEQ ID NO: 184950 - protein, 7 aa, synthetic construct
MPPNQRQ

SEQ ID NO: 184951 - protein, 7 aa, synthetic construct
SESKQRT

SEQ ID NO: 184952 - protein, 7 aa, synthetic construct
FEKRQMT

SEQ ID NO: 184953 - protein, 7 aa, synthetic construct
MENMKRT

SEQ ID NO: 184954 - protein, 7 aa, synthetic construct
MEQKQRH

SEQ ID NO: 184955 - protein, 7 aa, synthetic construct
MAPRERN

SEQ ID NO: 184956 - protein, 7 aa, synthetic construct
MEKSQRN

SEQ ID NO: 184957 - protein, 7 aa, synthetic construct
VEPRARV

SEQ ID NO: 184958 - protein, 7 aa, synthetic construct
VETRNRT

SEQ ID NO: 184959 - protein, 7 aa, synthetic construct
METRQTK

SEQ ID NO: 184960 - protein, 7 aa, synthetic construct
DVPRGRT

SEQ ID NO: 184961 - protein, 7 aa, synthetic construct
AEARQRP

SEQ ID NO: 184962 - protein, 7 aa, synthetic construct
ADPRQRG

SEQ ID NO: 184963 - protein, 7 aa, synthetic construct
MEKILRT

SEQ ID NO: 184964 - protein, 7 aa, synthetic construct
NEPRFKT

SEQ ID NO: 184965 - protein, 7 aa, synthetic construct
MGERPRT

SEQ ID NO: 184966 - protein, 7 aa, synthetic construct
MKPYQLT

SEQ ID NO: 184967 - protein, 7 aa, synthetic construct
SEPRMKT

SEQ ID NO: 184968 - protein, 7 aa, synthetic construct
TTERQRT

SEQ ID NO: 184969 - protein, 7 aa, synthetic construct
MEKQVRT

SEQ ID NO: 184970 - protein, 7 aa, synthetic construct
MEKRTHT

SEQ ID NO: 184971 - protein, 7 aa, synthetic construct
AEKRQST

SEQ ID NO: 184972 - protein, 7 aa, synthetic construct
MEPPRRG

SEQ ID NO: 184973 - protein, 7 aa, synthetic construct
MELRTKT

SEQ ID NO: 184974 - protein, 7 aa, synthetic construct
DMPRTRT

SEQ ID NO: 184975 - protein, 7 aa, synthetic construct
MEPAPRK

SEQ ID NO: 184976 - protein, 7 aa, synthetic construct
MERIQKT

SEQ ID NO: 184977 - protein, 7 aa, synthetic construct
MEQKPRT

SEQ ID NO: 184978 - protein, 7 aa, synthetic construct
QENRQRS

SEQ ID NO: 184979 - protein, 7 aa, synthetic construct
MEPTKRY

SEQ ID NO: 184980 - protein, 7 aa, synthetic construct
MKSRQET

SEQ ID NO: 184981 - protein, 7 aa, synthetic construct
MEPRRMQ

SEQ ID NO: 184982 - protein, 7 aa, synthetic construct
MEPPKRL

SEQ ID NO: 184983 - protein, 7 aa, synthetic construct
MEKRQIQ

SEQ ID NO: 184984 - protein, 7 aa, synthetic construct
MEMRARA

SEQ ID NO: 184985 - protein, 7 aa, synthetic construct
DVPRQRI

SEQ ID NO: 184986 - protein, 7 aa, synthetic construct
TEKRQQT

SEQ ID NO: 184987 - protein, 7 aa, synthetic construct
QETRGRT

SEQ ID NO: 184988 - protein, 7 aa, synthetic construct
MEGRLRA

SEQ ID NO: 184989 - protein, 7 aa, synthetic construct
MEARIRQ

SEQ ID NO: 184990 - protein, 7 aa, synthetic construct
MKPRQIE

SEQ ID NO: 184991 - protein, 7 aa, synthetic construct
KEPHART

SEQ ID NO: 184992 - protein, 7 aa, synthetic construct
MEVRQVK

SEQ ID NO: 184993 - protein, 7 aa, synthetic construct
REPIQRV

SEQ ID NO: 184994 - protein, 7 aa, synthetic construct
AEPRPRV

SEQ ID NO: 184995 - protein, 7 aa, synthetic construct
MEKRQMH

SEQ ID NO: 184996 - protein, 7 aa, synthetic construct
NNPRERT

SEQ ID NO: 184997 - protein, 7 aa, synthetic construct
MEGVKRT

SEQ ID NO: 184998 - protein, 7 aa, synthetic construct
MEPGNRK

SEQ ID NO: 184999 - protein, 7 aa, synthetic construct
MEPRGRM

SEQ ID NO: 185000 - protein, 7 aa, synthetic construct
LEIRGRT

SEQ ID NO: 185001 - protein, 7 aa, synthetic construct
MTPRQSL

SEQ ID NO: 185002 - protein, 7 aa, synthetic construct
PTERQRT

SEQ ID NO: 185003 - protein, 7 aa, synthetic construct
IEARNRT

SEQ ID NO: 185004 - protein, 7 aa, synthetic construct
MVPRQHL

SEQ ID NO: 185005 - protein, 7 aa, synthetic construct
EKPNQRT

SEQ ID NO: 185006 - protein, 7 aa, synthetic construct
NELRQRV

SEQ ID NO: 185007 - protein, 7 aa, synthetic construct
AEVKQRT

SEQ ID NO: 185008 - protein, 7 aa, synthetic construct
TAPRQRD

SEQ ID NO: 185009 - protein, 7 aa, synthetic construct
REPNQRQ

SEQ ID NO: 185010 - protein, 7 aa, synthetic construct
REPIQRT

SEQ ID NO: 185011 - protein, 7 aa, synthetic construct
ADPRMRT

SEQ ID NO: 185012 - protein, 7 aa, synthetic construct
QEARPRT

SEQ ID NO: 185013 - protein, 7 aa, synthetic construct
MEHKQRA

SEQ ID NO: 185014 - protein, 7 aa, synthetic construct
TEVKQRT

SEQ ID NO: 185015 - protein, 7 aa, synthetic construct
MELRQKI

SEQ ID NO: 185016 - protein, 7 aa, synthetic construct
IETRLRT

SEQ ID NO: 185017 - protein, 7 aa, synthetic construct
PAERQRT

SEQ ID NO: 185018 - protein, 7 aa, synthetic construct
YEIKQRT

SEQ ID NO: 185019 - protein, 7 aa, synthetic construct
MVPRAHT

SEQ ID NO: 185020 - protein, 7 aa, synthetic construct
MAPRSRD

SEQ ID NO: 185021 - protein, 7 aa, synthetic construct
MEGRKQT

SEQ ID NO: 185022 - protein, 7 aa, synthetic construct
MEINKRT

SEQ ID NO: 185023 - protein, 7 aa, synthetic construct
KEPRDRA

SEQ ID NO: 185024 - protein, 7 aa, synthetic construct
GEPRQKA

SEQ ID NO: 185025 - protein, 7 aa, synthetic construct
MEKLQRS

SEQ ID NO: 185026 - protein, 7 aa, synthetic construct
MGERQRM

SEQ ID NO: 185027 - protein, 7 aa, synthetic construct
DVPRQKT

SEQ ID NO: 185028 - protein, 7 aa, synthetic construct
VEVRQKT

SEQ ID NO: 185029 - protein, 7 aa, synthetic construct
QEPRARV

SEQ ID NO: 185030 - protein, 7 aa, synthetic construct
DPPRPRT

SEQ ID NO: 185031 - protein, 7 aa, synthetic construct
MMERTRT

SEQ ID NO: 185032 - protein, 7 aa, synthetic construct
MEKRNTT

SEQ ID NO: 185033 - protein, 7 aa, synthetic construct
MPPRERS

SEQ ID NO: 185034 - protein, 7 aa, synthetic construct
MPPRERV

SEQ ID NO: 185035 - protein, 7 aa, synthetic construct
MERRQNV

SEQ ID NO: 185036 - protein, 7 aa, synthetic construct
KESRQHT

SEQ ID NO: 185037 - protein, 7 aa, synthetic construct
NENRIRT

SEQ ID NO: 185038 - protein, 7 aa, synthetic construct
DFPKQRT

SEQ ID NO: 185039 - protein, 7 aa, synthetic construct
MDIRTRT

SEQ ID NO: 185040 - protein, 7 aa, synthetic construct
QKPRQDT

SEQ ID NO: 185041 - protein, 7 aa, synthetic construct
MRPRQEG

SEQ ID NO: 185042 - protein, 7 aa, synthetic construct
MEPRIAR

SEQ ID NO: 185043 - protein, 7 aa, synthetic construct
MEKRQVL

SEQ ID NO: 185044 - protein, 7 aa, synthetic construct
YETRQRV

SEQ ID NO: 185045 - protein, 7 aa, synthetic construct
MEKHLRT

SEQ ID NO: 185046 - protein, 7 aa, synthetic construct
TEPRVRQ

SEQ ID NO: 185047 - protein, 7 aa, synthetic construct
MMERQRV

SEQ ID NO: 185048 - protein, 7 aa, synthetic construct
MGPRQSN

SEQ ID NO: 185049 - protein, 7 aa, synthetic construct
SEQKQRT

SEQ ID NO: 185050 - protein, 7 aa, synthetic construct
TEVRQRT

SEQ ID NO: 185051 - protein, 7 aa, synthetic construct
MPDRQRM

SEQ ID NO: 185052 - protein, 7 aa, synthetic construct
PEKRQTT

SEQ ID NO: 185053 - protein, 7 aa, synthetic construct
LEKRQMT

SEQ ID NO: 185054 - protein, 7 aa, synthetic construct
EVPKQRT

SEQ ID NO: 185055 - protein, 7 aa, synthetic construct
MTPRDRQ

SEQ ID NO: 185056 - protein, 7 aa, synthetic construct
MEPKVRH

SEQ ID NO: 185057 - protein, 7 aa, synthetic construct
MQKRQET

SEQ ID NO: 185058 - protein, 7 aa, synthetic construct
EKPRQTT

SEQ ID NO: 185059 - protein, 7 aa, synthetic construct
IEGRTRT

SEQ ID NO: 185060 - protein, 7 aa, synthetic construct
MEHKVRT

SEQ ID NO: 185061 - protein, 7 aa, synthetic construct
MTPRQRE

SEQ ID NO: 185062 - protein, 7 aa, synthetic construct
MEKVVRT

SEQ ID NO: 185063 - protein, 7 aa, synthetic construct
MQPRQER

SEQ ID NO: 185064 - protein, 7 aa, synthetic construct
LEPRDRK

SEQ ID NO: 185065 - protein, 7 aa, synthetic construct
MEPASRK

SEQ ID NO: 185066 - protein, 7 aa, synthetic construct
MNPRDRG

SEQ ID NO: 185067 - protein, 7 aa, synthetic construct
MEGRQKG

SEQ ID NO: 185068 - protein, 7 aa, synthetic construct
IERMQRT

SEQ ID NO: 185069 - protein, 7 aa, synthetic construct
SEVRQRG

SEQ ID NO: 185070 - protein, 7 aa, synthetic construct
MEQKQRQ

SEQ ID NO: 185071 - protein, 7 aa, synthetic construct
NEQRTRT

SEQ ID NO: 185072 - protein, 7 aa, synthetic construct
MEKQQRN

SEQ ID NO: 185073 - protein, 7 aa, synthetic construct
MDPRPRQ

SEQ ID NO: 185074 - protein, 7 aa, synthetic construct
MEKRPVT

SEQ ID NO: 185075 - protein, 7 aa, synthetic construct
MEAKQRI

SEQ ID NO: 185076 - protein, 7 aa, synthetic construct
QEPRARG

SEQ ID NO: 185077 - protein, 7 aa, synthetic construct
VEKRQST

SEQ ID NO: 185078 - protein, 7 aa, synthetic construct
MEARIRT

SEQ ID NO: 185079 - protein, 7 aa, synthetic construct
IEQRQRT

SEQ ID NO: 185080 - protein, 7 aa, synthetic construct
MLPHQRN

SEQ ID NO: 185081 - protein, 7 aa, synthetic construct
MIPRQNQ

SEQ ID NO: 185082 - protein, 7 aa, synthetic construct
EVPRQRV

SEQ ID NO: 185083 - protein, 7 aa, synthetic construct
IEARQRG

SEQ ID NO: 185084 - protein, 7 aa, synthetic construct
MIPRDRS

SEQ ID NO: 185085 - protein, 7 aa, synthetic construct
IEGRQRN

SEQ ID NO: 185086 - protein, 7 aa, synthetic construct
YESRQKT

SEQ ID NO: 185087 - protein, 7 aa, synthetic construct
QETRQRI

SEQ ID NO: 185088 - protein, 7 aa, synthetic construct
MNPRDRA

SEQ ID NO: 185089 - protein, 7 aa, synthetic construct
IETRQRG

SEQ ID NO: 185090 - protein, 7 aa, synthetic construct
VEPRVRM

SEQ ID NO: 185091 - protein, 7 aa, synthetic construct
NEPRMRP

SEQ ID NO: 185092 - protein, 7 aa, synthetic construct
MESRNRV

SEQ ID NO: 185093 - protein, 7 aa, synthetic construct
DINRQRT

SEQ ID NO: 185094 - protein, 7 aa, synthetic construct
MEPNNRK

SEQ ID NO: 185095 - protein, 7 aa, synthetic construct
IEPFKRT

SEQ ID NO: 185096 - protein, 7 aa, synthetic construct
MEPMRRS

SEQ ID NO: 185097 - protein, 7 aa, synthetic construct
AEPRQKV

SEQ ID NO: 185098 - protein, 7 aa, synthetic construct
NEVKQRT

SEQ ID NO: 185099 - protein, 7 aa, synthetic construct
MVPRGRE

SEQ ID NO: 185100 - protein, 7 aa, synthetic construct
TEPRLRM

SEQ ID NO: 185101 - protein, 7 aa, synthetic construct
MEKPQRM

SEQ ID NO: 185102 - protein, 7 aa, synthetic construct
SEPRTRG

SEQ ID NO: 185103 - protein, 7 aa, synthetic construct
MENRMRA

SEQ ID NO: 185104 - protein, 7 aa, synthetic construct
MERRQIP

SEQ ID NO: 185105 - protein, 7 aa, synthetic construct
MESRTRP

SEQ ID NO: 185106 - protein, 7 aa, synthetic construct
NEARTRT

SEQ ID NO: 185107 - protein, 7 aa, synthetic construct
MEKIHRT

SEQ ID NO: 185108 - protein, 7 aa, synthetic construct
TELRPRT

SEQ ID NO: 185109 - protein, 7 aa, synthetic construct
TEMRQRG

SEQ ID NO: 185110 - protein, 7 aa, synthetic construct
KEFGQRT

SEQ ID NO: 185111 - protein, 7 aa, synthetic construct
REPRDRM

SEQ ID NO: 185112 - protein, 7 aa, synthetic construct
MEKRATT

SEQ ID NO: 185113 - protein, 7 aa, synthetic construct
MELRARP

SEQ ID NO: 185114 - protein, 7 aa, synthetic construct
REHPQRT

SEQ ID NO: 185115 - protein, 7 aa, synthetic construct
TEPRMRI

SEQ ID NO: 185116 - protein, 7 aa, synthetic construct
MEGRMKT

SEQ ID NO: 185117 - protein, 7 aa, synthetic construct
MDRGQRT

SEQ ID NO: 185118 - protein, 7 aa, synthetic construct
ERPRQGT

SEQ ID NO: 185119 - protein, 7 aa, synthetic construct
FDPRQKT

SEQ ID NO: 185120 - protein, 7 aa, synthetic construct
PERVQRT

SEQ ID NO: 185121 - protein, 7 aa, synthetic construct
MEKAQRQ

SEQ ID NO: 185122 - protein, 7 aa, synthetic construct
MEIRNRV

SEQ ID NO: 185123 - protein, 7 aa, synthetic construct
REPGGRT

SEQ ID NO: 185124 - protein, 7 aa, synthetic construct
MEKRQPY

SEQ ID NO: 185125 - protein, 7 aa, synthetic construct
LEPRQRV

SEQ ID NO: 185126 - protein, 7 aa, synthetic construct
MAPRQRE

SEQ ID NO: 185127 - protein, 7 aa, synthetic construct
MEVRQKM

SEQ ID NO: 185128 - protein, 7 aa, synthetic construct
MIPNQRG

SEQ ID NO: 185129 - protein, 7 aa, synthetic construct
ADPRQRM

SEQ ID NO: 185130 - protein, 7 aa, synthetic construct
MEPQQRK

SEQ ID NO: 185131 - protein, 7 aa, synthetic construct
MEARTRS

SEQ ID NO: 185132 - protein, 7 aa, synthetic construct
SEPRLRQ

SEQ ID NO: 185133 - protein, 7 aa, synthetic construct
YEPKART

SEQ ID NO: 185134 - protein, 7 aa, synthetic construct
MEPVRRN

SEQ ID NO: 185135 - protein, 7 aa, synthetic construct
MIPRHTT

SEQ ID NO: 185136 - protein, 7 aa, synthetic construct
MEVKPRT

SEQ ID NO: 185137 - protein, 7 aa, synthetic construct
ETPRVRT

SEQ ID NO: 185138 - protein, 7 aa, synthetic construct
TETRQRN

SEQ ID NO: 185139 - protein, 7 aa, synthetic construct
VETRQRI

SEQ ID NO: 185140 - protein, 7 aa, synthetic construct
MEKHQRV

SEQ ID NO: 185141 - protein, 7 aa, synthetic construct
IEPRARQ

SEQ ID NO: 185142 - protein, 7 aa, synthetic construct
MNPRQSQ

SEQ ID NO: 185143 - protein, 7 aa, synthetic construct
ANPRDRT

SEQ ID NO: 185144 - protein, 7 aa, synthetic construct
DMPRSRT

SEQ ID NO: 185145 - protein, 7 aa, synthetic construct
LENRQRS

SEQ ID NO: 185146 - protein, 7 aa, synthetic construct
VEARQRI

SEQ ID NO: 185147 - protein, 7 aa, synthetic construct
DTPRNRT

SEQ ID NO: 185148 - protein, 7 aa, synthetic construct
MVERQRN

SEQ ID NO: 185149 - protein, 7 aa, synthetic construct
VEVRPRT

SEQ ID NO: 185150 - protein, 7 aa, synthetic construct
GMPRQRE

SEQ ID NO: 185151 - protein, 7 aa, synthetic construct
REPHQRS

SEQ ID NO: 185152 - protein, 7 aa, synthetic construct
QEPRMRN

SEQ ID NO: 185153 - protein, 7 aa, synthetic construct
MESRQLK

SEQ ID NO: 185154 - protein, 7 aa, synthetic construct
MEKHIRT

SEQ ID NO: 185155 - protein, 7 aa, synthetic construct
MIPRQNM

SEQ ID NO: 185156 - protein, 7 aa, synthetic construct
TETRGRT

SEQ ID NO: 185157 - protein, 7 aa, synthetic construct
MVPRMRD

SEQ ID NO: 185158 - protein, 7 aa, synthetic construct
MEARTRV

SEQ ID NO: 185159 - protein, 7 aa, synthetic construct
PEMKQRT

SEQ ID NO: 185160 - protein, 7 aa, synthetic construct
MMPRIRE

SEQ ID NO: 185161 - protein, 7 aa, synthetic construct
MEKRQIL

SEQ ID NO: 185162 - protein, 7 aa, synthetic construct
AEPRIRQ

SEQ ID NO: 185163 - protein, 7 aa, synthetic construct
LERGQRT

SEQ ID NO: 185164 - protein, 7 aa, synthetic construct
MERPQRQ

SEQ ID NO: 185165 - protein, 7 aa, synthetic construct
QEMRQRA

SEQ ID NO: 185166 - protein, 7 aa, synthetic construct
MEPARRG

SEQ ID NO: 185167 - protein, 7 aa, synthetic construct
MEPMRRV

SEQ ID NO: 185168 - protein, 7 aa, synthetic construct
MEKIQRN

SEQ ID NO: 185169 - protein, 7 aa, synthetic construct
VEQRVRT

SEQ ID NO: 185170 - protein, 7 aa, synthetic construct
MENKQRV

SEQ ID NO: 185171 - protein, 7 aa, synthetic construct
PEPRGRA

SEQ ID NO: 185172 - protein, 7 aa, synthetic construct
MVPRQHI

SEQ ID NO: 185173 - protein, 7 aa, synthetic construct
PENRQRP

SEQ ID NO: 185174 - protein, 7 aa, synthetic construct
NEPLRRT

SEQ ID NO: 185175 - protein, 7 aa, synthetic construct
QEPRTRA

SEQ ID NO: 185176 - protein, 7 aa, synthetic construct
IESRGRT

SEQ ID NO: 185177 - protein, 7 aa, synthetic construct
VEPRARA

SEQ ID NO: 185178 - protein, 7 aa, synthetic construct
DPPRQRL

SEQ ID NO: 185179 - protein, 7 aa, synthetic construct
QEARVRT

SEQ ID NO: 185180 - protein, 7 aa, synthetic construct
VTPRQHT

SEQ ID NO: 185181 - protein, 7 aa, synthetic construct
MERVTRT

SEQ ID NO: 185182 - protein, 7 aa, synthetic construct
SEPRMRS

SEQ ID NO: 185183 - protein, 7 aa, synthetic construct
GEPRMRQ

SEQ ID NO: 185184 - protein, 7 aa, synthetic construct
MESRLRS

SEQ ID NO: 185185 - protein, 7 aa, synthetic construct
MEPKYRA

SEQ ID NO: 185186 - protein, 7 aa, synthetic construct
TEIRSRT

SEQ ID NO: 185187 - protein, 7 aa, synthetic construct
VEMRTRT

SEQ ID NO: 185188 - protein, 7 aa, synthetic construct
EVPRVRT

SEQ ID NO: 185189 - protein, 7 aa, synthetic construct
MEARMRG

SEQ ID NO: 185190 - protein, 7 aa, synthetic construct
MEPMRRG

SEQ ID NO: 185191 - protein, 7 aa, synthetic construct
QEPRLRA

SEQ ID NO: 185192 - protein, 7 aa, synthetic construct
KEPYTRT

SEQ ID NO: 185193 - protein, 7 aa, synthetic construct
DKPRQGT

SEQ ID NO: 185194 - protein, 7 aa, synthetic construct
LEARVRT

SEQ ID NO: 185195 - protein, 7 aa, synthetic construct
METQQRK

SEQ ID NO: 185196 - protein, 7 aa, synthetic construct
MEKRLNT

SEQ ID NO: 185197 - protein, 7 aa, synthetic construct
QDPRQRN

SEQ ID NO: 185198 - protein, 7 aa, synthetic construct
MVPIQRQ

SEQ ID NO: 185199 - protein, 7 aa, synthetic construct
MEGRGKT

SEQ ID NO: 185200 - protein, 7 aa, synthetic construct
LEPRIRA

SEQ ID NO: 185201 - protein, 7 aa, synthetic construct
MQIRQRE

SEQ ID NO: 185202 - protein, 7 aa, synthetic construct
LESRTRT

SEQ ID NO: 185203 - protein, 7 aa, synthetic construct
MDVRQRS

SEQ ID NO: 185204 - protein, 7 aa, synthetic construct
DNPRMRT

SEQ ID NO: 185205 - protein, 7 aa, synthetic construct
TEPARRT

SEQ ID NO: 185206 - protein, 7 aa, synthetic construct
MEIKQRA

SEQ ID NO: 185207 - protein, 7 aa, synthetic construct
MIDRQRA

SEQ ID NO: 185208 - protein, 7 aa, synthetic construct
MERKQNT

SEQ ID NO: 185209 - protein, 7 aa, synthetic construct
KEPRDRM

SEQ ID NO: 185210 - protein, 7 aa, synthetic construct
MKPRQLD

SEQ ID NO: 185211 - protein, 7 aa, synthetic construct
MDSRQRT

SEQ ID NO: 185212 - protein, 7 aa, synthetic construct
TEPRARQ

SEQ ID NO: 185213 - protein, 7 aa, synthetic construct
NEQRQRT

SEQ ID NO: 185214 - protein, 7 aa, synthetic construct
VEPRVRS

SEQ ID NO: 185215 - protein, 7 aa, synthetic construct
MRPRQAE

SEQ ID NO: 185216 - protein, 7 aa, synthetic construct
IEIKQRT

SEQ ID NO: 185217 - protein, 7 aa, synthetic construct
MIPRAHT

SEQ ID NO: 185218 - protein, 7 aa, synthetic construct
MEPRRNS

SEQ ID NO: 185219 - protein, 7 aa, synthetic construct
MEKIIRT

SEQ ID NO: 185220 - protein, 7 aa, synthetic construct
MIPRQHI

SEQ ID NO: 185221 - protein, 7 aa, synthetic construct
MEVRQLK

SEQ ID NO: 185222 - protein, 7 aa, synthetic construct
MEAKSRT

SEQ ID NO: 185223 - protein, 7 aa, synthetic construct
MEKRQVT

SEQ ID NO: 185224 - protein, 7 aa, synthetic construct
REGRQQT

SEQ ID NO: 185225 - protein, 7 aa, synthetic construct
TEPRIRV

SEQ ID NO: 185226 - protein, 7 aa, synthetic construct
MITRQRE

SEQ ID NO: 185227 - protein, 7 aa, synthetic construct
MDARQRV

SEQ ID NO: 185228 - protein, 7 aa, synthetic construct
MRPRGDT

SEQ ID NO: 185229 - protein, 7 aa, synthetic construct
QEPRQQK

SEQ ID NO: 185230 - protein, 7 aa, synthetic construct
NEKRQTT

SEQ ID NO: 185231 - protein, 7 aa, synthetic construct
QEPRMRA

SEQ ID NO: 185232 - protein, 7 aa, synthetic construct
HEPKPRT

SEQ ID NO: 185233 - protein, 7 aa, synthetic construct
MGKRQET

SEQ ID NO: 185234 - protein, 7 aa, synthetic construct
TEPRRTT

SEQ ID NO: 185235 - protein, 7 aa, synthetic construct
SEPRQGR

SEQ ID NO: 185236 - protein, 7 aa, synthetic construct
LDPRQRQ

SEQ ID NO: 185237 - protein, 7 aa, synthetic construct
REDRMRT

SEQ ID NO: 185238 - protein, 7 aa, synthetic construct
IDIRQRT

SEQ ID NO: 185239 - protein, 7 aa, synthetic construct
MDPRIRN

SEQ ID NO: 185240 - protein, 7 aa, synthetic construct
EPPRQRV

SEQ ID NO: 185241 - protein, 7 aa, synthetic construct
KEGRERT

SEQ ID NO: 185242 - protein, 7 aa, synthetic construct
FEPRMKT

SEQ ID NO: 185243 - protein, 7 aa, synthetic construct
DNPRQRV

SEQ ID NO: 185244 - protein, 7 aa, synthetic construct
MEKRLHT

SEQ ID NO: 185245 - protein, 7 aa, synthetic construct
ANPRQNT

SEQ ID NO: 185246 - protein, 7 aa, synthetic construct
DSPRVRT

SEQ ID NO: 185247 - protein, 7 aa, synthetic construct
MERTIRT

SEQ ID NO: 185248 - protein, 7 aa, synthetic construct
REPSQRM

SEQ ID NO: 185249 - protein, 7 aa, synthetic construct
MEPRPRI

SEQ ID NO: 185250 - protein, 7 aa, synthetic construct
DNPRIRT

SEQ ID NO: 185251 - protein, 7 aa, synthetic construct
TEPRQKT

SEQ ID NO: 185252 - protein, 7 aa, synthetic construct
TEPRMRT

SEQ ID NO: 185253 - protein, 7 aa, synthetic construct
MIPRQHP

SEQ ID NO: 185254 - protein, 7 aa, synthetic construct
AEPRQRV

SEQ ID NO: 185255 - protein, 7 aa, synthetic construct
MEYKQRP

SEQ ID NO: 185256 - protein, 7 aa, synthetic construct
IENRQRV

SEQ ID NO: 185257 - protein, 7 aa, synthetic construct
IEPRMRS

SEQ ID NO: 185258 - protein, 7 aa, synthetic construct
QEPRIRS

SEQ ID NO: 185259 - protein, 7 aa, synthetic construct
NVPRDRT

SEQ ID NO: 185260 - protein, 7 aa, synthetic construct
METLKRT

SEQ ID NO: 185261 - protein, 7 aa, synthetic construct
VEPRLRA

SEQ ID NO: 185262 - protein, 7 aa, synthetic construct
MNPRQLN

SEQ ID NO: 185263 - protein, 7 aa, synthetic construct
AEPRGRA

SEQ ID NO: 185264 - protein, 7 aa, synthetic construct
MEKRQQG

SEQ ID NO: 185265 - protein, 7 aa, synthetic construct
TEPKFRT

SEQ ID NO: 185266 - protein, 7 aa, synthetic construct
TEPRQLR

SEQ ID NO: 185267 - protein, 7 aa, synthetic construct
TEARQKT

SEQ ID NO: 185268 - protein, 7 aa, synthetic construct
STPRDRT

SEQ ID NO: 185269 - protein, 7 aa, synthetic construct
GESKQRT

SEQ ID NO: 185270 - protein, 7 aa, synthetic construct
MEKRHPT

SEQ ID NO: 185271 - protein, 7 aa, synthetic construct
MAGRQRE

SEQ ID NO: 185272 - protein, 7 aa, synthetic construct
NDPRQRG

SEQ ID NO: 185273 - protein, 7 aa, synthetic construct
VEPQRRT

SEQ ID NO: 185274 - protein, 7 aa, synthetic construct
MEKRPIT

SEQ ID NO: 185275 - protein, 7 aa, synthetic construct
MDKGQRT

SEQ ID NO: 185276 - protein, 7 aa, synthetic construct
MEKRQNS

SEQ ID NO: 185277 - protein, 7 aa, synthetic construct
MNERPRT

SEQ ID NO: 185278 - protein, 7 aa, synthetic construct
MVPRQTL

SEQ ID NO: 185279 - protein, 7 aa, synthetic construct
MEKRPPT

SEQ ID NO: 185280 - protein, 7 aa, synthetic construct
MVPRSNT

SEQ ID NO: 185281 - protein, 7 aa, synthetic construct
IIPRERT

SEQ ID NO: 185282 - protein, 7 aa, synthetic construct
MEPGIRK

SEQ ID NO: 185283 - protein, 7 aa, synthetic construct
MSPRQRD

SEQ ID NO: 185284 - protein, 7 aa, synthetic construct
ELPRQRP

SEQ ID NO: 185285 - protein, 7 aa, synthetic construct
REPIQRS

SEQ ID NO: 185286 - protein, 7 aa, synthetic construct
MGKRQDT

SEQ ID NO: 185287 - protein, 7 aa, synthetic construct
DQPRQRS

SEQ ID NO: 185288 - protein, 7 aa, synthetic construct
NERIQRT

SEQ ID NO: 185289 - protein, 7 aa, synthetic construct
AEKRQNT

SEQ ID NO: 185290 - protein, 7 aa, synthetic construct
SEARMRT

SEQ ID NO: 185291 - protein, 7 aa, synthetic construct
MERQQRA

SEQ ID NO: 185292 - protein, 7 aa, synthetic construct
NEIRVRT

SEQ ID NO: 185293 - protein, 7 aa, synthetic construct
MEVRQRG

SEQ ID NO: 185294 - protein, 7 aa, synthetic construct
MEPRAVR

SEQ ID NO: 185295 - protein, 7 aa, synthetic construct
MEPRPSK

SEQ ID NO: 185296 - protein, 7 aa, synthetic construct
RELRQTT

SEQ ID NO: 185297 - protein, 7 aa, synthetic construct
QERPQRT

SEQ ID NO: 185298 - protein, 7 aa, synthetic construct
MEPRPAK

SEQ ID NO: 185299 - protein, 7 aa, synthetic construct
MQPRERL

SEQ ID NO: 185300 - protein, 7 aa, synthetic construct
MEARQNK

SEQ ID NO: 185301 - protein, 7 aa, synthetic construct
MEARLRA

SEQ ID NO: 185302 - protein, 7 aa, synthetic construct
YEPRTRN

SEQ ID NO: 185303 - protein, 7 aa, synthetic construct
FEPRQKS

SEQ ID NO: 185304 - protein, 7 aa, synthetic construct
VETRPRT

SEQ ID NO: 185305 - protein, 7 aa, synthetic construct
SGPRDRT

SEQ ID NO: 185306 - protein, 7 aa, synthetic construct
IEPRTRS

SEQ ID NO: 185307 - protein, 7 aa, synthetic construct
MDPRARQ

SEQ ID NO: 185308 - protein, 7 aa, synthetic construct
QELRQKT

SEQ ID NO: 185309 - protein, 7 aa, synthetic construct
TLPRERT

SEQ ID NO: 185310 - protein, 7 aa, synthetic construct
MEHKQRI

SEQ ID NO: 185311 - protein, 7 aa, synthetic construct
DPARQRT

SEQ ID NO: 185312 - protein, 7 aa, synthetic construct
REDRQRP

SEQ ID NO: 185313 - protein, 7 aa, synthetic construct
MEPLRRQ

SEQ ID NO: 185314 - protein, 7 aa, synthetic construct
LEKYQRT

SEQ ID NO: 185315 - protein, 7 aa, synthetic construct
MEQRIRN

SEQ ID NO: 185316 - protein, 7 aa, synthetic construct
MEPKYRN

SEQ ID NO: 185317 - protein, 7 aa, synthetic construct
METRQRG

SEQ ID NO: 185318 - protein, 7 aa, synthetic construct
MEQRMKT

SEQ ID NO: 185319 - protein, 7 aa, synthetic construct
REPGQRA

SEQ ID NO: 185320 - protein, 7 aa, synthetic construct
MIDRQRV

SEQ ID NO: 185321 - protein, 7 aa, synthetic construct
KEIRERT

SEQ ID NO: 185322 - protein, 7 aa, synthetic construct
MTPRARE

SEQ ID NO: 185323 - protein, 7 aa, synthetic construct
IEPIRRT

SEQ ID NO: 185324 - protein, 7 aa, synthetic construct
MEQRNRG

SEQ ID NO: 185325 - protein, 7 aa, synthetic construct
IEGRQKT

SEQ ID NO: 185326 - protein, 7 aa, synthetic construct
NEPKQRY

SEQ ID NO: 185327 - protein, 7 aa, synthetic construct
IEVRQRP

SEQ ID NO: 185328 - protein, 7 aa, synthetic construct
MEMRQVK

SEQ ID NO: 185329 - protein, 7 aa, synthetic construct
KEARDRT

SEQ ID NO: 185330 - protein, 7 aa, synthetic construct
MPPRNRD

SEQ ID NO: 185331 - protein, 7 aa, synthetic construct
GEPKVRT

SEQ ID NO: 185332 - protein, 7 aa, synthetic construct
DMPRQRS

SEQ ID NO: 185333 - protein, 7 aa, synthetic construct
SETKQRT

SEQ ID NO: 185334 - protein, 7 aa, synthetic construct
LEMRNRT

SEQ ID NO: 185335 - protein, 7 aa, synthetic construct
MENKQRH

SEQ ID NO: 185336 - protein, 7 aa, synthetic construct
LETRMRT

SEQ ID NO: 185337 - protein, 7 aa, synthetic construct
NEMRTRT

SEQ ID NO: 185338 - protein, 7 aa, synthetic construct
GEPKMRT

SEQ ID NO: 185339 - protein, 7 aa, synthetic construct
IEPRRNT

SEQ ID NO: 185340 - protein, 7 aa, synthetic construct
MEPRSFK

SEQ ID NO: 185341 - protein, 7 aa, synthetic construct
DAPRQRP

SEQ ID NO: 185342 - protein, 7 aa, synthetic construct
MVPRQIG

SEQ ID NO: 185343 - protein, 7 aa, synthetic construct
MEPMKRF

SEQ ID NO: 185344 - protein, 7 aa, synthetic construct
REPVQRA

SEQ ID NO: 185345 - protein, 7 aa, synthetic construct
MEQRQKQ

SEQ ID NO: 185346 - protein, 7 aa, synthetic construct
MEKRQLI

SEQ ID NO: 185347 - protein, 7 aa, synthetic construct
MKPRDHT

SEQ ID NO: 185348 - protein, 7 aa, synthetic construct
MERNQRQ

SEQ ID NO: 185349 - protein, 7 aa, synthetic construct
MANRQRE

SEQ ID NO: 185350 - protein, 7 aa, synthetic construct
MEARQAR

SEQ ID NO: 185351 - protein, 7 aa, synthetic construct
EVPRQRA

SEQ ID NO: 185352 - protein, 7 aa, synthetic construct
NERNQRT

SEQ ID NO: 185353 - protein, 7 aa, synthetic construct
MEPNQRR

SEQ ID NO: 185354 - protein, 7 aa, synthetic construct
KELRQIT

SEQ ID NO: 185355 - protein, 7 aa, synthetic construct
DRPRQVT

SEQ ID NO: 185356 - protein, 7 aa, synthetic construct
MEPKIRF

SEQ ID NO: 185357 - protein, 7 aa, synthetic construct
VEQRQRT

SEQ ID NO: 185358 - protein, 7 aa, synthetic construct
MEPRIQR

SEQ ID NO: 185359 - protein, 7 aa, synthetic construct
MDSRQKT

SEQ ID NO: 185360 - protein, 7 aa, synthetic construct
METRGKT

SEQ ID NO: 185361 - protein, 7 aa, synthetic construct
MGERVRT

SEQ ID NO: 185362 - protein, 7 aa, synthetic construct
AEPRIRV

SEQ ID NO: 185363 - protein, 7 aa, synthetic construct
ITERQRT

SEQ ID NO: 185364 - protein, 7 aa, synthetic construct
MEARQKF

SEQ ID NO: 185365 - protein, 7 aa, synthetic construct
MEPIRRS

SEQ ID NO: 185366 - protein, 7 aa, synthetic construct
SEPRQKN

SEQ ID NO: 185367 - protein, 7 aa, synthetic construct
MTPRGRE

SEQ ID NO: 185368 - protein, 7 aa, synthetic construct
NEPKQRF

SEQ ID NO: 185369 - protein, 7 aa, synthetic construct
MRPRPET

SEQ ID NO: 185370 - protein, 7 aa, synthetic construct
NIPHQRT

SEQ ID NO: 185371 - protein, 7 aa, synthetic construct
MEPPRRA

SEQ ID NO: 185372 - protein, 7 aa, synthetic construct
NEPRMRI

SEQ ID NO: 185373 - protein, 7 aa, synthetic construct
LEARTRT

SEQ ID NO: 185374 - protein, 7 aa, synthetic construct
AEPRGRT

SEQ ID NO: 185375 - protein, 7 aa, synthetic construct
LERMQRT

SEQ ID NO: 185376 - protein, 7 aa, synthetic construct
QENRIRT

SEQ ID NO: 185377 - protein, 7 aa, synthetic construct
KELRQNT

SEQ ID NO: 185378 - protein, 7 aa, synthetic construct
AEKRQIT

SEQ ID NO: 185379 - protein, 7 aa, synthetic construct
AMPRERT

SEQ ID NO: 185380 - protein, 7 aa, synthetic construct
LETRIRT

SEQ ID NO: 185381 - protein, 7 aa, synthetic construct
MEVRQRS

SEQ ID NO: 185382 - protein, 7 aa, synthetic construct
YEKRQNT

SEQ ID NO: 185383 - protein, 7 aa, synthetic construct
TEPRNRS

SEQ ID NO: 185384 - protein, 7 aa, synthetic construct
QEPKQRY

SEQ ID NO: 185385 - protein, 7 aa, synthetic construct
MEHKTRT

SEQ ID NO: 185386 - protein, 7 aa, synthetic construct
IEPRMRI

SEQ ID NO: 185387 - protein, 7 aa, synthetic construct
FEKLQRT

SEQ ID NO: 185388 - protein, 7 aa, synthetic construct
LEPRTRN

SEQ ID NO: 185389 - protein, 7 aa, synthetic construct
YEPRTRM

SEQ ID NO: 185390 - protein, 7 aa, synthetic construct
TSPRERT

SEQ ID NO: 185391 - protein, 7 aa, synthetic construct
MEPRSGR

SEQ ID NO: 185392 - protein, 7 aa, synthetic construct
VVPRQHT

SEQ ID NO: 185393 - protein, 7 aa, synthetic construct
TEPRNRA

SEQ ID NO: 185394 - protein, 7 aa, synthetic construct
KEERQRT

SEQ ID NO: 185395 - protein, 7 aa, synthetic construct
MEPRVTR

SEQ ID NO: 185396 - protein, 7 aa, synthetic construct
MTERNRT

SEQ ID NO: 185397 - protein, 7 aa, synthetic construct
VEHKQRT

SEQ ID NO: 185398 - protein, 7 aa, synthetic construct
MNPRERI

SEQ ID NO: 185399 - protein, 7 aa, synthetic construct
MKPRAET

SEQ ID NO: 185400 - protein, 7 aa, synthetic construct
QEPRQNK

SEQ ID NO: 185401 - protein, 7 aa, synthetic construct
KEPFTRT

SEQ ID NO: 185402 - protein, 7 aa, synthetic construct
AEKRQMT

SEQ ID NO: 185403 - protein, 7 aa, synthetic construct
MQPRDRN

SEQ ID NO: 185404 - protein, 7 aa, synthetic construct
THPRQAT

SEQ ID NO: 185405 - protein, 7 aa, synthetic construct
KNPRQDT

SEQ ID NO: 185406 - protein, 7 aa, synthetic construct
TEPRVRN

SEQ ID NO: 185407 - protein, 7 aa, synthetic construct
AEPRIRA

SEQ ID NO: 185408 - protein, 7 aa, synthetic construct
MLERQRP

SEQ ID NO: 185409 - protein, 7 aa, synthetic construct
VEPRQTR

SEQ ID NO: 185410 - protein, 7 aa, synthetic construct
MNPRQIN

SEQ ID NO: 185411 - protein, 7 aa, synthetic construct
TEVRQKT

SEQ ID NO: 185412 - protein, 7 aa, synthetic construct
YEPRPRQ

SEQ ID NO: 185413 - protein, 7 aa, synthetic construct
MVERSRT

SEQ ID NO: 185414 - protein, 7 aa, synthetic construct
MIPRVRE

SEQ ID NO: 185415 - protein, 7 aa, synthetic construct
MIPRQNI

SEQ ID NO: 185416 - protein, 7 aa, synthetic construct
NEPRGRN

SEQ ID NO: 185417 - protein, 7 aa, synthetic construct
MMPRQHA

SEQ ID NO: 185418 - protein, 7 aa, synthetic construct
QEPRGRL

SEQ ID NO: 185419 - protein, 7 aa, synthetic construct
METPRRT

SEQ ID NO: 185420 - protein, 7 aa, synthetic construct
FEPKPRT

SEQ ID NO: 185421 - protein, 7 aa, synthetic construct
YEPAKRT

SEQ ID NO: 185422 - protein, 7 aa, synthetic construct
MERGLRT

SEQ ID NO: 185423 - protein, 7 aa, synthetic construct
PEPRARV

SEQ ID NO: 185424 - protein, 7 aa, synthetic construct
MVMRQRE

SEQ ID NO: 185425 - protein, 7 aa, synthetic construct
TEQRNRT

SEQ ID NO: 185426 - protein, 7 aa, synthetic construct
SERVQRT

SEQ ID NO: 185427 - protein, 7 aa, synthetic construct
FEPRVRG

SEQ ID NO: 185428 - protein, 7 aa, synthetic construct
DIPRQRT

SEQ ID NO: 185429 - protein, 7 aa, synthetic construct
LETRQRI

SEQ ID NO: 185430 - protein, 7 aa, synthetic construct
REPGART

SEQ ID NO: 185431 - protein, 7 aa, synthetic construct
TEPRRNT

SEQ ID NO: 185432 - protein, 7 aa, synthetic construct
MRPRSET

SEQ ID NO: 185433 - protein, 7 aa, synthetic construct
LEQRIRT

SEQ ID NO: 185434 - protein, 7 aa, synthetic construct
MEHKLRT

SEQ ID NO: 185435 - protein, 7 aa, synthetic construct
EVPRMRT

SEQ ID NO: 185436 - protein, 7 aa, synthetic construct
QPPRQRE

SEQ ID NO: 185437 - protein, 7 aa, synthetic construct
NEARMRT

SEQ ID NO: 185438 - protein, 7 aa, synthetic construct
IENRQRT

SEQ ID NO: 185439 - protein, 7 aa, synthetic construct
HEPRLRN

SEQ ID NO: 185440 - protein, 7 aa, synthetic construct
MERVQRV

SEQ ID NO: 185441 - protein, 7 aa, synthetic construct
PVPRQRD

SEQ ID NO: 185442 - protein, 7 aa, synthetic construct
MEPRQKF

SEQ ID NO: 185443 - protein, 7 aa, synthetic construct
TEPQKRT

SEQ ID NO: 185444 - protein, 7 aa, synthetic construct
MEPRGKY

SEQ ID NO: 185445 - protein, 7 aa, synthetic construct
MEQRMRN

SEQ ID NO: 185446 - protein, 7 aa, synthetic construct
MEKASRT

SEQ ID NO: 185447 - protein, 7 aa, synthetic construct
DQARQRT

SEQ ID NO: 185448 - protein, 7 aa, synthetic construct
QEPRRVT

SEQ ID NO: 185449 - protein, 7 aa, synthetic construct
YEPRNRQ

SEQ ID NO: 185450 - protein, 7 aa, synthetic construct
LPERQRT

SEQ ID NO: 185451 - protein, 7 aa, synthetic construct
METRNRI

SEQ ID NO: 185452 - protein, 7 aa, synthetic construct
SEVRQRV

SEQ ID NO: 185453 - protein, 7 aa, synthetic construct
VEPRNRG

SEQ ID NO: 185454 - protein, 7 aa, synthetic construct
MEKRGHT

SEQ ID NO: 185455 - protein, 7 aa, synthetic construct
MLPNQRH

SEQ ID NO: 185456 - protein, 7 aa, synthetic construct
MEPSMRK

SEQ ID NO: 185457 - protein, 7 aa, synthetic construct
TEIRQRG

SEQ ID NO: 185458 - protein, 7 aa, synthetic construct
MTERVRT

SEQ ID NO: 185459 - protein, 7 aa, synthetic construct
MSERQRM

SEQ ID NO: 185460 - protein, 7 aa, synthetic construct
VENRLRT

SEQ ID NO: 185461 - protein, 7 aa, synthetic construct
TEIRQRA

SEQ ID NO: 185462 - protein, 7 aa, synthetic construct
QEPRGRN

SEQ ID NO: 185463 - protein, 7 aa, synthetic construct
YEPRQKS

SEQ ID NO: 185464 - protein, 7 aa, synthetic construct
LEARQRT

SEQ ID NO: 185465 - protein, 7 aa, synthetic construct
MEKRQVI

SEQ ID NO: 185466 - protein, 7 aa, synthetic construct
MEKRERN

SEQ ID NO: 185467 - protein, 7 aa, synthetic construct
QETRLRT

SEQ ID NO: 185468 - protein, 7 aa, synthetic construct
SEPTKRT

SEQ ID NO: 185469 - protein, 7 aa, synthetic construct
QEPRIRN

SEQ ID NO: 185470 - protein, 7 aa, synthetic construct
IRPRQDT

SEQ ID NO: 185471 - protein, 7 aa, synthetic construct
REPRSTT

SEQ ID NO: 185472 - protein, 7 aa, synthetic construct
TEPRLRS

SEQ ID NO: 185473 - protein, 7 aa, synthetic construct
MEKRQSN

SEQ ID NO: 185474 - protein, 7 aa, synthetic construct
IEVRQRS

SEQ ID NO: 185475 - protein, 7 aa, synthetic construct
LEPRHRV

SEQ ID NO: 185476 - protein, 7 aa, synthetic construct
MEPTPRK

SEQ ID NO: 185477 - protein, 7 aa, synthetic construct
MQPRQDR

SEQ ID NO: 185478 - protein, 7 aa, synthetic construct
MEPRLKY

SEQ ID NO: 185479 - protein, 7 aa, synthetic construct
TEPRQKY

SEQ ID NO: 185480 - protein, 7 aa, synthetic construct
MENRLRV

SEQ ID NO: 185481 - protein, 7 aa, synthetic construct
MEPRGRG

SEQ ID NO: 185482 - protein, 7 aa, synthetic construct
IEPRPRI

SEQ ID NO: 185483 - protein, 7 aa, synthetic construct
MTPRDRV

SEQ ID NO: 185484 - protein, 7 aa, synthetic construct
VDMRQRT

SEQ ID NO: 185485 - protein, 7 aa, synthetic construct
MEPKYRM

SEQ ID NO: 185486 - protein, 7 aa, synthetic construct
SEVRQRA

SEQ ID NO: 185487 - protein, 7 aa, synthetic construct
MNPRLRD

SEQ ID NO: 185488 - protein, 7 aa, synthetic construct
LEIRNRT

SEQ ID NO: 185489 - protein, 7 aa, synthetic construct
YEPRLRN

SEQ ID NO: 185490 - protein, 7 aa, synthetic construct
NEPRVRV

SEQ ID NO: 185491 - protein, 7 aa, synthetic construct
MEPRQMR

SEQ ID NO: 185492 - protein, 7 aa, synthetic construct
MKPRYET

SEQ ID NO: 185493 - protein, 7 aa, synthetic construct
VMERQRT

SEQ ID NO: 185494 - protein, 7 aa, synthetic construct
DPPRQRA

SEQ ID NO: 185495 - protein, 7 aa, synthetic construct
NEPRNRV

SEQ ID NO: 185496 - protein, 7 aa, synthetic construct
MEARSKT

SEQ ID NO: 185497 - protein, 7 aa, synthetic construct
ERPAQRT

SEQ ID NO: 185498 - protein, 7 aa, synthetic construct
MEVRVRA

SEQ ID NO: 185499 - protein, 7 aa, synthetic construct
MEARTRI

SEQ ID NO: 185500 - protein, 7 aa, synthetic construct
KVPRQET

SEQ ID NO: 185501 - protein, 7 aa, synthetic construct
TEPRIRS

SEQ ID NO: 185502 - protein, 7 aa, synthetic construct
ERPTQRT

SEQ ID NO: 185503 - protein, 7 aa, synthetic construct
MESAKRT

SEQ ID NO: 185504 - protein, 7 aa, synthetic construct
MEPRGRF

SEQ ID NO: 185505 - protein, 7 aa, synthetic construct
GEPRTRA

SEQ ID NO: 185506 - protein, 7 aa, synthetic construct
MKPFQNT

SEQ ID NO: 185507 - protein, 7 aa, synthetic construct
QEKVQRT

SEQ ID NO: 185508 - protein, 7 aa, synthetic construct
KEHRQST

SEQ ID NO: 185509 - protein, 7 aa, synthetic construct
SEPRQRV

SEQ ID NO: 185510 - protein, 7 aa, synthetic construct
MEPANRR

SEQ ID NO: 185511 - protein, 7 aa, synthetic construct
MEQTQRK

SEQ ID NO: 185512 - protein, 7 aa, synthetic construct
NEKRERT

SEQ ID NO: 185513 - protein, 7 aa, synthetic construct
MEGRPRV

SEQ ID NO: 185514 - protein, 7 aa, synthetic construct
MESKQRI

SEQ ID NO: 185515 - protein, 7 aa, synthetic construct
TEVRVRT

SEQ ID NO: 185516 - protein, 7 aa, synthetic construct
GEVRQRS

SEQ ID NO: 185517 - protein, 7 aa, synthetic construct
NDPRTRT

SEQ ID NO: 185518 - protein, 7 aa, synthetic construct
TEKIQRT

SEQ ID NO: 185519 - protein, 7 aa, synthetic construct
MEMKQRL

SEQ ID NO: 185520 - protein, 7 aa, synthetic construct
MEARVRQ

SEQ ID NO: 185521 - protein, 7 aa, synthetic construct
MVPRQQQ

SEQ ID NO: 185522 - protein, 7 aa, synthetic construct
MEARPRQ

SEQ ID NO: 185523 - protein, 7 aa, synthetic construct
REGRQTT

SEQ ID NO: 185524 - protein, 7 aa, synthetic construct
MRPRNDT

SEQ ID NO: 185525 - protein, 7 aa, synthetic construct
NDARQRT

SEQ ID NO: 185526 - protein, 7 aa, synthetic construct
VDPRQRQ

SEQ ID NO: 185527 - protein, 7 aa, synthetic construct
MESRTRG

SEQ ID NO: 185528 - protein, 7 aa, synthetic construct
FEPVKRT

SEQ ID NO: 185529 - protein, 7 aa, synthetic construct
METKQRQ

SEQ ID NO: 185530 - protein, 7 aa, synthetic construct
IEPRPRG

SEQ ID NO: 185531 - protein, 7 aa, synthetic construct
MEPNRRP

SEQ ID NO: 185532 - protein, 7 aa, synthetic construct
VEPRVRT

SEQ ID NO: 185533 - protein, 7 aa, synthetic construct
NEPRPRT

SEQ ID NO: 185534 - protein, 7 aa, synthetic construct
QETRQRG

SEQ ID NO: 185535 - protein, 7 aa, synthetic construct
ELPRGRT

SEQ ID NO: 185536 - protein, 7 aa, synthetic construct
MEARQKS

SEQ ID NO: 185537 - protein, 7 aa, synthetic construct
FEPRVRN

SEQ ID NO: 185538 - protein, 7 aa, synthetic construct
MLPRERL

SEQ ID NO: 185539 - protein, 7 aa, synthetic construct
GEPRQKQ

SEQ ID NO: 185540 - protein, 7 aa, synthetic construct
MEPAIRK

SEQ ID NO: 185541 - protein, 7 aa, synthetic construct
QEPRQRG

SEQ ID NO: 185542 - protein, 7 aa, synthetic construct
MRPRELT

SEQ ID NO: 185543 - protein, 7 aa, synthetic construct
TENRQRV

SEQ ID NO: 185544 - protein, 7 aa, synthetic construct
MESRIRP

SEQ ID NO: 185545 - protein, 7 aa, synthetic construct
LEPRSRG

SEQ ID NO: 185546 - protein, 7 aa, synthetic construct
MEKRQFG

SEQ ID NO: 185547 - protein, 7 aa, synthetic construct
SEKRQTT

SEQ ID NO: 185548 - protein, 7 aa, synthetic construct
MEVRSRG

SEQ ID NO: 185549 - protein, 7 aa, synthetic construct
MSERQRQ

SEQ ID NO: 185550 - protein, 7 aa, synthetic construct
FEKRQST

SEQ ID NO: 185551 - protein, 7 aa, synthetic construct
PEQKQRT

SEQ ID NO: 185552 - protein, 7 aa, synthetic construct
FEKGQRT

SEQ ID NO: 185553 - protein, 7 aa, synthetic construct
IEPRGRT

SEQ ID NO: 185554 - protein, 7 aa, synthetic construct
MEPRMRN

SEQ ID NO: 185555 - protein, 7 aa, synthetic construct
MEPNVRK

SEQ ID NO: 185556 - protein, 7 aa, synthetic construct
MEAPRRT

SEQ ID NO: 185557 - protein, 7 aa, synthetic construct
NEPRQNK

SEQ ID NO: 185558 - protein, 7 aa, synthetic construct
MEPAVRK

SEQ ID NO: 185559 - protein, 7 aa, synthetic construct
MVPRQSF

SEQ ID NO: 185560 - protein, 7 aa, synthetic construct
MEHKIRT

SEQ ID NO: 185561 - protein, 7 aa, synthetic construct
AETRQRV

SEQ ID NO: 185562 - protein, 7 aa, synthetic construct
LESRPRT

SEQ ID NO: 185563 - protein, 7 aa, synthetic construct
MTPGQRH

SEQ ID NO: 185564 - protein, 7 aa, synthetic construct
IENRLRT

SEQ ID NO: 185565 - protein, 7 aa, synthetic construct
REPFQKT

SEQ ID NO: 185566 - protein, 7 aa, synthetic construct
YEPRARG

SEQ ID NO: 185567 - protein, 7 aa, synthetic construct
MADRQRN

SEQ ID NO: 185568 - protein, 7 aa, synthetic construct
MEARIRA

SEQ ID NO: 185569 - protein, 7 aa, synthetic construct
MEPRMRI

SEQ ID NO: 185570 - protein, 7 aa, synthetic construct
MDPRLRQ

SEQ ID NO: 185571 - protein, 7 aa, synthetic construct
RETRQQT

SEQ ID NO: 185572 - protein, 7 aa, synthetic construct
GETRQRV

SEQ ID NO: 185573 - protein, 7 aa, synthetic construct
DMPRQRT

SEQ ID NO: 185574 - protein, 7 aa, synthetic construct
MERGVRT

SEQ ID NO: 185575 - protein, 7 aa, synthetic construct
DNPRVRT

SEQ ID NO: 185576 - protein, 7 aa, synthetic construct
MEKRPTT

SEQ ID NO: 185577 - protein, 7 aa, synthetic construct
GEVRQKT

SEQ ID NO: 185578 - protein, 7 aa, synthetic construct
VDPRQRF

SEQ ID NO: 185579 - protein, 7 aa, synthetic construct
MTPRDRI

SEQ ID NO: 185580 - protein, 7 aa, synthetic construct
FEPRGRN

SEQ ID NO: 185581 - protein, 7 aa, synthetic construct
MNPRNRE

SEQ ID NO: 185582 - protein, 7 aa, synthetic construct
NEPRQVR

SEQ ID NO: 185583 - protein, 7 aa, synthetic construct
VEIRGRT

SEQ ID NO: 185584 - protein, 7 aa, synthetic construct
MIPSQRN

SEQ ID NO: 185585 - protein, 7 aa, synthetic construct
VEPRARP

SEQ ID NO: 185586 - protein, 7 aa, synthetic construct
SEPRQNR

SEQ ID NO: 185587 - protein, 7 aa, synthetic construct
MESQKRT

SEQ ID NO: 185588 - protein, 7 aa, synthetic construct
MEPTNRR

SEQ ID NO: 185589 - protein, 7 aa, synthetic construct
MIPRQSH

SEQ ID NO: 185590 - protein, 7 aa, synthetic construct
MEQKQRV

SEQ ID NO: 185591 - protein, 7 aa, synthetic construct
MEPRIRS

SEQ ID NO: 185592 - protein, 7 aa, synthetic construct
MEARQVR

SEQ ID NO: 185593 - protein, 7 aa, synthetic construct
KEPKQWT

SEQ ID NO: 185594 - protein, 7 aa, synthetic construct
IEPRLRQ

SEQ ID NO: 185595 - protein, 7 aa, synthetic construct
LEPRSRQ

SEQ ID NO: 185596 - protein, 7 aa, synthetic construct
REPSQRY

SEQ ID NO: 185597 - protein, 7 aa, synthetic construct
IEMRQRA

SEQ ID NO: 185598 - protein, 7 aa, synthetic construct
MERKQQT

SEQ ID NO: 185599 - protein, 7 aa, synthetic construct
SETRQKT

SEQ ID NO: 185600 - protein, 7 aa, synthetic construct
DNPRQRI

SEQ ID NO: 185601 - protein, 7 aa, synthetic construct
MEPRVGR

SEQ ID NO: 185602 - protein, 7 aa, synthetic construct
REPLQRQ

SEQ ID NO: 185603 - protein, 7 aa, synthetic construct
REPRQER

SEQ ID NO: 185604 - protein, 7 aa, synthetic construct
GEPRVRV

SEQ ID NO: 185605 - protein, 7 aa, synthetic construct
MEARGRA

SEQ ID NO: 185606 - protein, 7 aa, synthetic construct
KEGRQQT

SEQ ID NO: 185607 - protein, 7 aa, synthetic construct
MESKQRM

SEQ ID NO: 185608 - protein, 7 aa, synthetic construct
NPPRDRT

SEQ ID NO: 185609 - protein, 7 aa, synthetic construct
MEGRKTT

SEQ ID NO: 185610 - protein, 7 aa, synthetic construct
FEPRQRQ

SEQ ID NO: 185611 - protein, 7 aa, synthetic construct
MEMRTRG

SEQ ID NO: 185612 - protein, 7 aa, synthetic construct
MPARQRD

SEQ ID NO: 185613 - protein, 7 aa, synthetic construct
MESRQNK

SEQ ID NO: 185614 - protein, 7 aa, synthetic construct
MEARLRG

SEQ ID NO: 185615 - protein, 7 aa, synthetic construct
LNPRERT

SEQ ID NO: 185616 - protein, 7 aa, synthetic construct
MTPRAHT

SEQ ID NO: 185617 - protein, 7 aa, synthetic construct
MEPRNRV

SEQ ID NO: 185618 - protein, 7 aa, synthetic construct
IEPRLRN

SEQ ID NO: 185619 - protein, 7 aa, synthetic construct
GPERQRT

SEQ ID NO: 185620 - protein, 7 aa, synthetic construct
MIPRSST

SEQ ID NO: 185621 - protein, 7 aa, synthetic construct
MEPRYQK

SEQ ID NO: 185622 - protein, 7 aa, synthetic construct
MEKRQSY

SEQ ID NO: 185623 - protein, 7 aa, synthetic construct
IEPRARV

SEQ ID NO: 185624 - protein, 7 aa, synthetic construct
MEKNPRT

SEQ ID NO: 185625 - protein, 7 aa, synthetic construct
PMPRERT

SEQ ID NO: 185626 - protein, 7 aa, synthetic construct
MNPRQNQ

SEQ ID NO: 185627 - protein, 7 aa, synthetic construct
MNPRERF

SEQ ID NO: 185628 - protein, 7 aa, synthetic construct
IEPRPRT

SEQ ID NO: 185629 - protein, 7 aa, synthetic construct
KENRDRT

SEQ ID NO: 185630 - protein, 7 aa, synthetic construct
QNPRDRT

SEQ ID NO: 185631 - protein, 7 aa, synthetic construct
LEVRQRS

SEQ ID NO: 185632 - protein, 7 aa, synthetic construct
TELRQKT

SEQ ID NO: 185633 - protein, 7 aa, synthetic construct
QEPRTRT

SEQ ID NO: 185634 - protein, 7 aa, synthetic construct
MEKREKT

SEQ ID NO: 185635 - protein, 7 aa, synthetic construct
MMDRQRQ

SEQ ID NO: 185636 - protein, 7 aa, synthetic construct
FNPRQRD

SEQ ID NO: 185637 - protein, 7 aa, synthetic construct
MHPRERV

SEQ ID NO: 185638 - protein, 7 aa, synthetic construct
MEMKLRT

SEQ ID NO: 185639 - protein, 7 aa, synthetic construct
NIPRDRT

SEQ ID NO: 185640 - protein, 7 aa, synthetic construct
MGTRQRE

SEQ ID NO: 185641 - protein, 7 aa, synthetic construct
MAPRTRE

SEQ ID NO: 185642 - protein, 7 aa, synthetic construct
AEPRTRI

SEQ ID NO: 185643 - protein, 7 aa, synthetic construct
KEPSYRT

SEQ ID NO: 185644 - protein, 7 aa, synthetic construct
KEERVRT

SEQ ID NO: 185645 - protein, 7 aa, synthetic construct
NENRVRT

SEQ ID NO: 185646 - protein, 7 aa, synthetic construct
IPPRERT

SEQ ID NO: 185647 - protein, 7 aa, synthetic construct
PEPRVRV

SEQ ID NO: 185648 - protein, 7 aa, synthetic construct
MENNKRT

SEQ ID NO: 185649 - protein, 7 aa, synthetic construct
ELPRQRS

SEQ ID NO: 185650 - protein, 7 aa, synthetic construct
MEGRIKT

SEQ ID NO: 185651 - protein, 7 aa, synthetic construct
MEAKQRV

SEQ ID NO: 185652 - protein, 7 aa, synthetic construct
LEARQRN

SEQ ID NO: 185653 - protein, 7 aa, synthetic construct
MNPRDRT

SEQ ID NO: 185654 - protein, 7 aa, synthetic construct
QEMKQRT

SEQ ID NO: 185655 - protein, 7 aa, synthetic construct
KEERLRT

SEQ ID NO: 185656 - protein, 7 aa, synthetic construct
HEKQQRT

SEQ ID NO: 185657 - protein, 7 aa, synthetic construct
MEPRISR

SEQ ID NO: 185658 - protein, 7 aa, synthetic construct
KMPRQDT

SEQ ID NO: 185659 - protein, 7 aa, synthetic construct
KEPRYST

SEQ ID NO: 185660 - protein, 7 aa, synthetic construct
MERRQVS

SEQ ID NO: 185661 - protein, 7 aa, synthetic construct
MAPRHST

SEQ ID NO: 185662 - protein, 7 aa, synthetic construct
LVERQRT

SEQ ID NO: 185663 - protein, 7 aa, synthetic construct
SEQRQRS

SEQ ID NO: 185664 - protein, 7 aa, synthetic construct
MEIRNKT

SEQ ID NO: 185665 - protein, 7 aa, synthetic construct
SEPRPRV

SEQ ID NO: 185666 - protein, 7 aa, synthetic construct
VEPRLRQ

SEQ ID NO: 185667 - protein, 7 aa, synthetic construct
MGIRQRE

SEQ ID NO: 185668 - protein, 7 aa, synthetic construct
MEPRMRM

SEQ ID NO: 185669 - protein, 7 aa, synthetic construct
HELKQRT

SEQ ID NO: 185670 - protein, 7 aa, synthetic construct
TENRQRG

SEQ ID NO: 185671 - protein, 7 aa, synthetic construct
IELRQRG

SEQ ID NO: 185672 - protein, 7 aa, synthetic construct
MMKRQDT

SEQ ID NO: 185673 - protein, 7 aa, synthetic construct
MSPRQSQ

SEQ ID NO: 185674 - protein, 7 aa, synthetic construct
MRPRVDT

SEQ ID NO: 185675 - protein, 7 aa, synthetic construct
YEPRGRN

SEQ ID NO: 185676 - protein, 7 aa, synthetic construct
MLPRNRE

SEQ ID NO: 185677 - protein, 7 aa, synthetic construct
DPPRQRV

SEQ ID NO: 185678 - protein, 7 aa, synthetic construct
LERQQRT

SEQ ID NO: 185679 - protein, 7 aa, synthetic construct
EKPQQRT

SEQ ID NO: 185680 - protein, 7 aa, synthetic construct
QAPRQRD

SEQ ID NO: 185681 - protein, 7 aa, synthetic construct
MEKQQRM

SEQ ID NO: 185682 - protein, 7 aa, synthetic construct
MVERQRT

SEQ ID NO: 185683 - protein, 7 aa, synthetic construct
MEPRSRA

SEQ ID NO: 185684 - protein, 7 aa, synthetic construct
GEPRQKN

SEQ ID NO: 185685 - protein, 7 aa, synthetic construct
LEPRPRT

SEQ ID NO: 185686 - protein, 7 aa, synthetic construct
FEKNQRT

SEQ ID NO: 185687 - protein, 7 aa, synthetic construct
MAPRIRD

SEQ ID NO: 185688 - protein, 7 aa, synthetic construct
QETRQRP

SEQ ID NO: 185689 - protein, 7 aa, synthetic construct
VEPRARG

SEQ ID NO: 185690 - protein, 7 aa, synthetic construct
MVPRQYG

SEQ ID NO: 185691 - protein, 7 aa, synthetic construct
MEPRTKY

SEQ ID NO: 185692 - protein, 7 aa, synthetic construct
MEPRFQK

SEQ ID NO: 185693 - protein, 7 aa, synthetic construct
MEQRIRG

SEQ ID NO: 185694 - protein, 7 aa, synthetic construct
IEVRQRN

SEQ ID NO: 185695 - protein, 7 aa, synthetic construct
MQPRQTG

SEQ ID NO: 185696 - protein, 7 aa, synthetic construct
MTPRDRG

SEQ ID NO: 185697 - protein, 7 aa, synthetic construct
MEQRLKT

SEQ ID NO: 185698 - protein, 7 aa, synthetic construct
MEKRQMT

SEQ ID NO: 185699 - protein, 7 aa, synthetic construct
KEPGYRT

SEQ ID NO: 185700 - protein, 7 aa, synthetic construct
MEKRQMF

SEQ ID NO: 185701 - protein, 7 aa, synthetic construct
LEQRQRV

SEQ ID NO: 185702 - protein, 7 aa, synthetic construct
MMPRHNT

SEQ ID NO: 185703 - protein, 7 aa, synthetic construct
METNKRT

SEQ ID NO: 185704 - protein, 7 aa, synthetic construct
SEPMKRT

SEQ ID NO: 185705 - protein, 7 aa, synthetic construct
FENRQRV

SEQ ID NO: 185706 - protein, 7 aa, synthetic construct
LEPRRST

SEQ ID NO: 185707 - protein, 7 aa, synthetic construct
REPQQRA

SEQ ID NO: 185708 - protein, 7 aa, synthetic construct
MEARTRA

SEQ ID NO: 185709 - protein, 7 aa, synthetic construct
MVPRDRL

SEQ ID NO: 185710 - protein, 7 aa, synthetic construct
SEPRTKT

SEQ ID NO: 185711 - protein, 7 aa, synthetic construct
MNPRQER

SEQ ID NO: 185712 - protein, 7 aa, synthetic construct
ELPRPRT

SEQ ID NO: 185713 - protein, 7 aa, synthetic construct
MEPRAAR

SEQ ID NO: 185714 - protein, 7 aa, synthetic construct
MEKLQRQ

SEQ ID NO: 185715 - protein, 7 aa, synthetic construct
MEPGRRQ

SEQ ID NO: 185716 - protein, 7 aa, synthetic construct
TEPRVRI

SEQ ID NO: 185717 - protein, 7 aa, synthetic construct
QQPRQRE

SEQ ID NO: 185718 - protein, 7 aa, synthetic construct
MEKRQFM

SEQ ID NO: 185719 - protein, 7 aa, synthetic construct
DQPKQRT

SEQ ID NO: 185720 - protein, 7 aa, synthetic construct
QEPIKRT

SEQ ID NO: 185721 - protein, 7 aa, synthetic construct
MERPART

SEQ ID NO: 185722 - protein, 7 aa, synthetic construct
RESRQAT

SEQ ID NO: 185723 - protein, 7 aa, synthetic construct
LESRNRT

SEQ ID NO: 185724 - protein, 7 aa, synthetic construct
MEIGKRT

SEQ ID NO: 185725 - protein, 7 aa, synthetic construct
MESIKRT

SEQ ID NO: 185726 - protein, 7 aa, synthetic construct
MERNLRT

SEQ ID NO: 185727 - protein, 7 aa, synthetic construct
MEKRQQY

SEQ ID NO: 185728 - protein, 7 aa, synthetic construct
MEKAQRG

SEQ ID NO: 185729 - protein, 7 aa, synthetic construct
DSPRQRV

SEQ ID NO: 185730 - protein, 7 aa, synthetic construct
MLARQRE

SEQ ID NO: 185731 - protein, 7 aa, synthetic construct
MHPRQSQ

SEQ ID NO: 185732 - protein, 7 aa, synthetic construct
NDPRLRT

SEQ ID NO: 185733 - protein, 7 aa, synthetic construct
NEPRQQK

SEQ ID NO: 185734 - protein, 7 aa, synthetic construct
SEMKQRT

SEQ ID NO: 185735 - protein, 7 aa, synthetic construct
MEPRVSR

SEQ ID NO: 185736 - protein, 7 aa, synthetic construct
MEQRQRA

SEQ ID NO: 185737 - protein, 7 aa, synthetic construct
AEARVRT

SEQ ID NO: 185738 - protein, 7 aa, synthetic construct
REPRQIQ

SEQ ID NO: 185739 - protein, 7 aa, synthetic construct
MQPRPRE

SEQ ID NO: 185740 - protein, 7 aa, synthetic construct
MEKRSAT

SEQ ID NO: 185741 - protein, 7 aa, synthetic construct
NEPRSRP

SEQ ID NO: 185742 - protein, 7 aa, synthetic construct
MENRNRG

SEQ ID NO: 185743 - protein, 7 aa, synthetic construct
MEMKQRT

SEQ ID NO: 185744 - protein, 7 aa, synthetic construct
DTPRMRT

SEQ ID NO: 185745 - protein, 7 aa, synthetic construct
MERVQRN

SEQ ID NO: 185746 - protein, 7 aa, synthetic construct
AENRQRV

SEQ ID NO: 185747 - protein, 7 aa, synthetic construct
MPPRLRD

SEQ ID NO: 185748 - protein, 7 aa, synthetic construct
MEPNQKK

SEQ ID NO: 185749 - protein, 7 aa, synthetic construct
LEGRQRQ

SEQ ID NO: 185750 - protein, 7 aa, synthetic construct
IEPRGRN

SEQ ID NO: 185751 - protein, 7 aa, synthetic construct
REPRQDR

SEQ ID NO: 185752 - protein, 7 aa, synthetic construct
PEPRQKI

SEQ ID NO: 185753 - protein, 7 aa, synthetic construct
NEPRPRI

SEQ ID NO: 185754 - protein, 7 aa, synthetic construct
MIERGRT

SEQ ID NO: 185755 - protein, 7 aa, synthetic construct
NEMRPRT

SEQ ID NO: 185756 - protein, 7 aa, synthetic construct
KEDRMRT

SEQ ID NO: 185757 - protein, 7 aa, synthetic construct
LEPRNRV

SEQ ID NO: 185758 - protein, 7 aa, synthetic construct
MEPRPQK

SEQ ID NO: 185759 - protein, 7 aa, synthetic construct
HLPRERT

SEQ ID NO: 185760 - protein, 7 aa, synthetic construct
MEKRMQT

SEQ ID NO: 185761 - protein, 7 aa, synthetic construct
SNDRQRT

SEQ ID NO: 185762 - protein, 7 aa, synthetic construct
MTPRMRE

SEQ ID NO: 185763 - protein, 7 aa, synthetic construct
SAPRQRE

SEQ ID NO: 185764 - protein, 7 aa, synthetic construct
MEIKQRN

SEQ ID NO: 185765 - protein, 7 aa, synthetic construct
LEPRFRQ

SEQ ID NO: 185766 - protein, 7 aa, synthetic construct
NEPRGRT

SEQ ID NO: 185767 - protein, 7 aa, synthetic construct
QEPRGRT

SEQ ID NO: 185768 - protein, 7 aa, synthetic construct
LEGRQRN

SEQ ID NO: 185769 - protein, 7 aa, synthetic construct
TEVRQRQ

SEQ ID NO: 185770 - protein, 7 aa, synthetic construct
KEDRQRN

SEQ ID NO: 185771 - protein, 7 aa, synthetic construct
MKPRQDN

SEQ ID NO: 185772 - protein, 7 aa, synthetic construct
IEPRMRV

SEQ ID NO: 185773 - protein, 7 aa, synthetic construct
MEPRPKT

SEQ ID NO: 185774 - protein, 7 aa, synthetic construct
YTPRQRE

SEQ ID NO: 185775 - protein, 7 aa, synthetic construct
RVPRQDT

SEQ ID NO: 185776 - protein, 7 aa, synthetic construct
AEPRQNK

SEQ ID NO: 185777 - protein, 7 aa, synthetic construct
MEQKART

SEQ ID NO: 185778 - protein, 7 aa, synthetic construct
TMPRERT

SEQ ID NO: 185779 - protein, 7 aa, synthetic construct
MEMKMRT

SEQ ID NO: 185780 - protein, 7 aa, synthetic construct
MEKRPST

SEQ ID NO: 185781 - protein, 7 aa, synthetic construct
MEPRYKV

SEQ ID NO: 185782 - protein, 7 aa, synthetic construct
MEKRQTG

SEQ ID NO: 185783 - protein, 7 aa, synthetic construct
YEPRSRV

SEQ ID NO: 185784 - protein, 7 aa, synthetic construct
NESRQRP

SEQ ID NO: 185785 - protein, 7 aa, synthetic construct
MLPRVRD

SEQ ID NO: 185786 - protein, 7 aa, synthetic construct
EIPRART

SEQ ID NO: 185787 - protein, 7 aa, synthetic construct
PEKRQPT

SEQ ID NO: 185788 - protein, 7 aa, synthetic construct
MELKQRI

SEQ ID NO: 185789 - protein, 7 aa, synthetic construct
MMPRQSH

SEQ ID NO: 185790 - protein, 7 aa, synthetic construct
MHPRQEK

SEQ ID NO: 185791 - protein, 7 aa, synthetic construct
MMPNQRH

SEQ ID NO: 185792 - protein, 7 aa, synthetic construct
RTPRQDT

SEQ ID NO: 185793 - protein, 7 aa, synthetic construct
METRGRP

SEQ ID NO: 185794 - protein, 7 aa, synthetic construct
SEPRIRG

SEQ ID NO: 185795 - protein, 7 aa, synthetic construct
MEARGRS

SEQ ID NO: 185796 - protein, 7 aa, synthetic construct
MEPRPIK

SEQ ID NO: 185797 - protein, 7 aa, synthetic construct
QEPNQRR

SEQ ID NO: 185798 - protein, 7 aa, synthetic construct
LESRQRN

SEQ ID NO: 185799 - protein, 7 aa, synthetic construct
SEARIRT

SEQ ID NO: 185800 - protein, 7 aa, synthetic construct
TEPRQMR

SEQ ID NO: 185801 - protein, 7 aa, synthetic construct
REDRIRT

SEQ ID NO: 185802 - protein, 7 aa, synthetic construct
LELRGRT

SEQ ID NO: 185803 - protein, 7 aa, synthetic construct
TEVRQRM

SEQ ID NO: 185804 - protein, 7 aa, synthetic construct
KEIRQMT

SEQ ID NO: 185805 - protein, 7 aa, synthetic construct
MLPRIRD

SEQ ID NO: 185806 - protein, 7 aa, synthetic construct
MEKQQRQ

SEQ ID NO: 185807 - protein, 7 aa, synthetic construct
DRPRQTT

SEQ ID NO: 185808 - protein, 7 aa, synthetic construct
IEKRQQT

SEQ ID NO: 185809 - protein, 7 aa, synthetic construct
MEVRARA

SEQ ID NO: 185810 - protein, 7 aa, synthetic construct
MEKHVRT

SEQ ID NO: 185811 - protein, 7 aa, synthetic construct
KEDRQRS

SEQ ID NO: 185812 - protein, 7 aa, synthetic construct
DEKKQRT

SEQ ID NO: 185813 - protein, 7 aa, synthetic construct
NEPNQRK

SEQ ID NO: 185814 - protein, 7 aa, synthetic construct
MIPRMRE

SEQ ID NO: 185815 - protein, 7 aa, synthetic construct
MDPRQKY

SEQ ID NO: 185816 - protein, 7 aa, synthetic construct
GEPKIRT

SEQ ID NO: 185817 - protein, 7 aa, synthetic construct
MIPRQSV

SEQ ID NO: 185818 - protein, 7 aa, synthetic construct
MDRRQST

SEQ ID NO: 185819 - protein, 7 aa, synthetic construct
LEPRIRN

SEQ ID NO: 185820 - protein, 7 aa, synthetic construct
QENKQRT

SEQ ID NO: 185821 - protein, 7 aa, synthetic construct
MEAKPRT

SEQ ID NO: 185822 - protein, 7 aa, synthetic construct
PERAQRT

SEQ ID NO: 185823 - protein, 7 aa, synthetic construct
MEVRTRV

SEQ ID NO: 185824 - protein, 7 aa, synthetic construct
MNPRGRD

SEQ ID NO: 185825 - protein, 7 aa, synthetic construct
KENRQRD

SEQ ID NO: 185826 - protein, 7 aa, synthetic construct
MEKPQRN

SEQ ID NO: 185827 - protein, 7 aa, synthetic construct
GEARLRT

SEQ ID NO: 185828 - protein, 7 aa, synthetic construct
MEPMARK

SEQ ID NO: 185829 - protein, 7 aa, synthetic construct
MESRQKT

SEQ ID NO: 185830 - protein, 7 aa, synthetic construct
EGPKQRT

SEQ ID NO: 185831 - protein, 7 aa, synthetic construct
YEPRQRS

SEQ ID NO: 185832 - protein, 7 aa, synthetic construct
KQPRQET

SEQ ID NO: 185833 - protein, 7 aa, synthetic construct
EMPRQRS

SEQ ID NO: 185834 - protein, 7 aa, synthetic construct
MDKRQHT

SEQ ID NO: 185835 - protein, 7 aa, synthetic construct
LEQRPRT

SEQ ID NO: 185836 - protein, 7 aa, synthetic construct
MSQRQRE

SEQ ID NO: 185837 - protein, 7 aa, synthetic construct
MNPHQRA

SEQ ID NO: 185838 - protein, 7 aa, synthetic construct
PSPRQRE

SEQ ID NO: 185839 - protein, 7 aa, synthetic construct
IELKQRT

SEQ ID NO: 185840 - protein, 7 aa, synthetic construct
MERTQRI

SEQ ID NO: 185841 - protein, 7 aa, synthetic construct
MDIRQRV

SEQ ID NO: 185842 - protein, 7 aa, synthetic construct
MHPRQVQ

SEQ ID NO: 185843 - protein, 7 aa, synthetic construct
VEQRNRT

SEQ ID NO: 185844 - protein, 7 aa, synthetic construct
HEPKFRT

SEQ ID NO: 185845 - protein, 7 aa, synthetic construct
MVPRQHA

SEQ ID NO: 185846 - protein, 7 aa, synthetic construct
TEPRGRG

SEQ ID NO: 185847 - protein, 7 aa, synthetic construct
MVPRQAQ

SEQ ID NO: 185848 - protein, 7 aa, synthetic construct
VEPRLRS

SEQ ID NO: 185849 - protein, 7 aa, synthetic construct
NTPRERT

SEQ ID NO: 185850 - protein, 7 aa, synthetic construct
PNERQRT

SEQ ID NO: 185851 - protein, 7 aa, synthetic construct
VEPARRT

SEQ ID NO: 185852 - protein, 7 aa, synthetic construct
NEPRTRT

SEQ ID NO: 185853 - protein, 7 aa, synthetic construct
YEKQQRT

SEQ ID NO: 185854 - protein, 7 aa, synthetic construct
GVPHQRT

SEQ ID NO: 185855 - protein, 7 aa, synthetic construct
YEPRVRS

SEQ ID NO: 185856 - protein, 7 aa, synthetic construct
MRPRQEM

SEQ ID NO: 185857 - protein, 7 aa, synthetic construct
MEPRSRT

SEQ ID NO: 185858 - protein, 7 aa, synthetic construct
MELRNKT

SEQ ID NO: 185859 - protein, 7 aa, synthetic construct
KEHRQAT

SEQ ID NO: 185860 - protein, 7 aa, synthetic construct
MEKRMTT

SEQ ID NO: 185861 - protein, 7 aa, synthetic construct
VENRQRA

SEQ ID NO: 185862 - protein, 7 aa, synthetic construct
MHPRQNN

SEQ ID NO: 185863 - protein, 7 aa, synthetic construct
DTPRQRV

SEQ ID NO: 185864 - protein, 7 aa, synthetic construct
GEPRMRS

SEQ ID NO: 185865 - protein, 7 aa, synthetic construct
MERTQRL

SEQ ID NO: 185866 - protein, 7 aa, synthetic construct
MERLQKT

SEQ ID NO: 185867 - protein, 7 aa, synthetic construct
PEKRQLT

SEQ ID NO: 185868 - protein, 7 aa, synthetic construct
SEPRVRS

SEQ ID NO: 185869 - protein, 7 aa, synthetic construct
MVDRPRT

SEQ ID NO: 185870 - protein, 7 aa, synthetic construct
MEARLKT

SEQ ID NO: 185871 - protein, 7 aa, synthetic construct
METRVRT

SEQ ID NO: 185872 - protein, 7 aa, synthetic construct
VERQQRT

SEQ ID NO: 185873 - protein, 7 aa, synthetic construct
SETRVRT

SEQ ID NO: 185874 - protein, 7 aa, synthetic construct
SEPRMRV

SEQ ID NO: 185875 - protein, 7 aa, synthetic construct
REPHQRQ

SEQ ID NO: 185876 - protein, 7 aa, synthetic construct
MEAQQRK

SEQ ID NO: 185877 - protein, 7 aa, synthetic construct
NEGRQRP

SEQ ID NO: 185878 - protein, 7 aa, synthetic construct
MIPGQRG

SEQ ID NO: 185879 - protein, 7 aa, synthetic construct
MEPKQRQ

SEQ ID NO: 185880 - protein, 7 aa, synthetic construct
MEPRPRN

SEQ ID NO: 185881 - protein, 7 aa, synthetic construct
FTPRQRE

SEQ ID NO: 185882 - protein, 7 aa, synthetic construct
TEPRGRM

SEQ ID NO: 185883 - protein, 7 aa, synthetic construct
MEISKRT

SEQ ID NO: 185884 - protein, 7 aa, synthetic construct
LEQRTRT

SEQ ID NO: 185885 - protein, 7 aa, synthetic construct
MEPKPRN

SEQ ID NO: 185886 - protein, 7 aa, synthetic construct
KEHIQRT

SEQ ID NO: 185887 - protein, 7 aa, synthetic construct
METRNRS

SEQ ID NO: 185888 - protein, 7 aa, synthetic construct
DKPRQQT

SEQ ID NO: 185889 - protein, 7 aa, synthetic construct
AEPRQRG

SEQ ID NO: 185890 - protein, 7 aa, synthetic construct
METRGRM

SEQ ID NO: 185891 - protein, 7 aa, synthetic construct
MERTTRT

SEQ ID NO: 185892 - protein, 7 aa, synthetic construct
NEVRQRP

SEQ ID NO: 185893 - protein, 7 aa, synthetic construct
SLPRQRE

SEQ ID NO: 185894 - protein, 7 aa, synthetic construct
MKPYQIT

SEQ ID NO: 185895 - protein, 7 aa, synthetic construct
LEPRRNT

SEQ ID NO: 185896 - protein, 7 aa, synthetic construct
DVPRQRP

SEQ ID NO: 185897 - protein, 7 aa, synthetic construct
TENKQRT

SEQ ID NO: 185898 - protein, 7 aa, synthetic construct
YEPKQRH

SEQ ID NO: 185899 - protein, 7 aa, synthetic construct
MEPVTRK

SEQ ID NO: 185900 - protein, 7 aa, synthetic construct
MEVRVRS

SEQ ID NO: 185901 - protein, 7 aa, synthetic construct
MAPRDRQ

SEQ ID NO: 185902 - protein, 7 aa, synthetic construct
MENVRRT

SEQ ID NO: 185903 - protein, 7 aa, synthetic construct
MEMKHRT

SEQ ID NO: 185904 - protein, 7 aa, synthetic construct
MEVMKRT

SEQ ID NO: 185905 - protein, 7 aa, synthetic construct
MMPRQHN

SEQ ID NO: 185906 - protein, 7 aa, synthetic construct
KEPFNRT

SEQ ID NO: 185907 - protein, 7 aa, synthetic construct
MPPEQRK

SEQ ID NO: 185908 - protein, 7 aa, synthetic construct
VTERQRT

SEQ ID NO: 185909 - protein, 7 aa, synthetic construct
MIPHQRQ

SEQ ID NO: 185910 - protein, 7 aa, synthetic construct
MEARGRG

SEQ ID NO: 185911 - protein, 7 aa, synthetic construct
KESRQVT

SEQ ID NO: 185912 - protein, 7 aa, synthetic construct
MVARQRE

SEQ ID NO: 185913 - protein, 7 aa, synthetic construct
MTERLRT

SEQ ID NO: 185914 - protein, 7 aa, synthetic construct
APERQRT

SEQ ID NO: 185915 - protein, 7 aa, synthetic construct
MERVQRG

SEQ ID NO: 185916 - protein, 7 aa, synthetic construct
METRGRQ

SEQ ID NO: 185917 - protein, 7 aa, synthetic construct
TEPRIRM

SEQ ID NO: 185918 - protein, 7 aa, synthetic construct
TGPRERT

SEQ ID NO: 185919 - protein, 7 aa, synthetic construct
LEKRQQT

SEQ ID NO: 185920 - protein, 7 aa, synthetic construct
MEAMKRT

SEQ ID NO: 185921 - protein, 7 aa, synthetic construct
QENRLRT

SEQ ID NO: 185922 - protein, 7 aa, synthetic construct
GEPRLRG

SEQ ID NO: 185923 - protein, 7 aa, synthetic construct
DSPRART

SEQ ID NO: 185924 - protein, 7 aa, synthetic construct
MTPRPHT

SEQ ID NO: 185925 - protein, 7 aa, synthetic construct
MVPNQRQ

SEQ ID NO: 185926 - protein, 7 aa, synthetic construct
MEMKQRF

SEQ ID NO: 185927 - protein, 7 aa, synthetic construct
MTTRQRE

SEQ ID NO: 185928 - protein, 7 aa, synthetic construct
FEKRQTT

SEQ ID NO: 185929 - protein, 7 aa, synthetic construct
LEPSQRK

SEQ ID NO: 185930 - protein, 7 aa, synthetic construct
MVPRQHM

SEQ ID NO: 185931 - protein, 7 aa, synthetic construct
NEPRQRP

SEQ ID NO: 185932 - protein, 7 aa, synthetic construct
MEPTTRK

SEQ ID NO: 185933 - protein, 7 aa, synthetic construct
TETRQRS

SEQ ID NO: 185934 - protein, 7 aa, synthetic construct
MDTRVRT

SEQ ID NO: 185935 - protein, 7 aa, synthetic construct
TNPRQLT

SEQ ID NO: 185936 - protein, 7 aa, synthetic construct
IEPRMRT

SEQ ID NO: 185937 - protein, 7 aa, synthetic construct
MERNMRT

SEQ ID NO: 185938 - protein, 7 aa, synthetic construct
MEVRNKT

SEQ ID NO: 185939 - protein, 7 aa, synthetic construct
METRLRS

SEQ ID NO: 185940 - protein, 7 aa, synthetic construct
EPPRVRT

SEQ ID NO: 185941 - protein, 7 aa, synthetic construct
MIPRPRE

SEQ ID NO: 185942 - protein, 7 aa, synthetic construct
ALPRQRD

SEQ ID NO: 185943 - protein, 7 aa, synthetic construct
MELKQRQ

SEQ ID NO: 185944 - protein, 7 aa, synthetic construct
YEPRGRA

SEQ ID NO: 185945 - protein, 7 aa, synthetic construct
MMPRPHT

SEQ ID NO: 185946 - protein, 7 aa, synthetic construct
MPIRQRE

SEQ ID NO: 185947 - protein, 7 aa, synthetic construct
MEPKSRY

SEQ ID NO: 185948 - protein, 7 aa, synthetic construct
QEQRQKT

SEQ ID NO: 185949 - protein, 7 aa, synthetic construct
SDPRQRS

SEQ ID NO: 185950 - protein, 7 aa, synthetic construct
MEGRLRG

SEQ ID NO: 185951 - protein, 7 aa, synthetic construct
MEQNQRK

SEQ ID NO: 185952 - protein, 7 aa, synthetic construct
MNPRPRE

SEQ ID NO: 185953 - protein, 7 aa, synthetic construct
KEPRQFN

SEQ ID NO: 185954 - protein, 7 aa, synthetic construct
PPDRQRT

SEQ ID NO: 185955 - protein, 7 aa, synthetic construct
GEPRQAK

SEQ ID NO: 185956 - protein, 7 aa, synthetic construct
MEKRLST

SEQ ID NO: 185957 - protein, 7 aa, synthetic construct
KEIRQVT

SEQ ID NO: 185958 - protein, 7 aa, synthetic construct
DTPRQKT

SEQ ID NO: 185959 - protein, 7 aa, synthetic construct
MEPRAKY

SEQ ID NO: 185960 - protein, 7 aa, synthetic construct
PEPRAKT

SEQ ID NO: 185961 - protein, 7 aa, synthetic construct
IETRMRT

SEQ ID NO: 185962 - protein, 7 aa, synthetic construct
IEKRQMT

SEQ ID NO: 185963 - protein, 7 aa, synthetic construct
SEKRQMT

SEQ ID NO: 185964 - protein, 7 aa, synthetic construct
MEPRPFK

SEQ ID NO: 185965 - protein, 7 aa, synthetic construct
MVPRQSA

SEQ ID NO: 185966 - protein, 7 aa, synthetic construct
DNPRNRT

SEQ ID NO: 185967 - protein, 7 aa, synthetic construct
MEKRQHS

SEQ ID NO: 185968 - protein, 7 aa, synthetic construct
QEKQQRT

SEQ ID NO: 185969 - protein, 7 aa, synthetic construct
TDARQRT

SEQ ID NO: 185970 - protein, 7 aa, synthetic construct
MEPIKRS

SEQ ID NO: 185971 - protein, 7 aa, synthetic construct
MEMRQNK

SEQ ID NO: 185972 - protein, 7 aa, synthetic construct
SEPRMRA

SEQ ID NO: 185973 - protein, 7 aa, synthetic construct
MEKRTAT

SEQ ID NO: 185974 - protein, 7 aa, synthetic construct
YAPRQRE

SEQ ID NO: 185975 - protein, 7 aa, synthetic construct
DMPRMRT

SEQ ID NO: 185976 - protein, 7 aa, synthetic construct
DGPKQRT

SEQ ID NO: 185977 - protein, 7 aa, synthetic construct
IEPRMRN

SEQ ID NO: 185978 - protein, 7 aa, synthetic construct
VEARGRT

SEQ ID NO: 185979 - protein, 7 aa, synthetic construct
KEPFQRQ

SEQ ID NO: 185980 - protein, 7 aa, synthetic construct
RESGQRT

SEQ ID NO: 185981 - protein, 7 aa, synthetic construct
SEPRFKT

SEQ ID NO: 185982 - protein, 7 aa, synthetic construct
TEPRNRI

SEQ ID NO: 185983 - protein, 7 aa, synthetic construct
SMPRQRE

SEQ ID NO: 185984 - protein, 7 aa, synthetic construct
PPPRQRD

SEQ ID NO: 185985 - protein, 7 aa, synthetic construct
YEPRIRG

SEQ ID NO: 185986 - protein, 7 aa, synthetic construct
MEPQLRK

SEQ ID NO: 185987 - protein, 7 aa, synthetic construct
MLERSRT

SEQ ID NO: 185988 - protein, 7 aa, synthetic construct
MMQRQRE

SEQ ID NO: 185989 - protein, 7 aa, synthetic construct
TEPRQIR

SEQ ID NO: 185990 - protein, 7 aa, synthetic construct
MESRQRP

SEQ ID NO: 185991 - protein, 7 aa, synthetic construct
LEGRQRV

SEQ ID NO: 185992 - protein, 7 aa, synthetic construct
AEMRQRV

SEQ ID NO: 185993 - protein, 7 aa, synthetic construct
MAERQRQ

SEQ ID NO: 185994 - protein, 7 aa, synthetic construct
LEPRQNR

SEQ ID NO: 185995 - protein, 7 aa, synthetic construct
YEPKPRT

SEQ ID NO: 185996 - protein, 7 aa, synthetic construct
VEPRQRQ

SEQ ID NO: 185997 - protein, 7 aa, synthetic construct
VEPKPRT

SEQ ID NO: 185998 - protein, 7 aa, synthetic construct
GIPRERT

SEQ ID NO: 185999 - protein, 7 aa, synthetic construct
LEVRNRT

SEQ ID NO: 186000 - protein, 7 aa, synthetic construct
ADPRART

SEQ ID NO: 186001 - protein, 7 aa, synthetic construct
FEKVQRT

SEQ ID NO: 186002 - protein, 7 aa, synthetic construct
KESRERT

SEQ ID NO: 186003 - protein, 7 aa, synthetic construct
MDKPQRT

SEQ ID NO: 186004 - protein, 7 aa, synthetic construct
AEPRARA

SEQ ID NO: 186005 - protein, 7 aa, synthetic construct
MVPRQIQ

SEQ ID NO: 186006 - protein, 7 aa, synthetic construct
MEPKVRY

SEQ ID NO: 186007 - protein, 7 aa, synthetic construct
LEPRPRM

SEQ ID NO: 186008 - protein, 7 aa, synthetic construct
MVPRQNV

SEQ ID NO: 186009 - protein, 7 aa, synthetic construct
MEKRDRI

SEQ ID NO: 186010 - protein, 7 aa, synthetic construct
MEVKQRS

SEQ ID NO: 186011 - protein, 7 aa, synthetic construct
IEPRSRN

SEQ ID NO: 186012 - protein, 7 aa, synthetic construct
TEVRQRI

SEQ ID NO: 186013 - protein, 7 aa, synthetic construct
METRQRV

SEQ ID NO: 186014 - protein, 7 aa, synthetic construct
MEMRNKT

SEQ ID NO: 186015 - protein, 7 aa, synthetic construct
MEPIRRA

SEQ ID NO: 186016 - protein, 7 aa, synthetic construct
YEPRLRG

SEQ ID NO: 186017 - protein, 7 aa, synthetic construct
MEAKQRN

SEQ ID NO: 186018 - protein, 7 aa, synthetic construct
RETRQTT

SEQ ID NO: 186019 - protein, 7 aa, synthetic construct
MENRQKA

SEQ ID NO: 186020 - protein, 7 aa, synthetic construct
MPPIQRQ

SEQ ID NO: 186021 - protein, 7 aa, synthetic construct
LENRQRT

SEQ ID NO: 186022 - protein, 7 aa, synthetic construct
IVPRQHT

SEQ ID NO: 186023 - protein, 7 aa, synthetic construct
MENRIRS

SEQ ID NO: 186024 - protein, 7 aa, synthetic construct
MEPRPMR

SEQ ID NO: 186025 - protein, 7 aa, synthetic construct
LEPRLRS

SEQ ID NO: 186026 - protein, 7 aa, synthetic construct
RESRQMT

SEQ ID NO: 186027 - protein, 7 aa, synthetic construct
KEPNYRT

SEQ ID NO: 186028 - protein, 7 aa, synthetic construct
AEPRMRV

SEQ ID NO: 186029 - protein, 7 aa, synthetic construct
GEPKGRT

SEQ ID NO: 186030 - protein, 7 aa, synthetic construct
MPPRERG

SEQ ID NO: 186031 - protein, 7 aa, synthetic construct
REPRTST

SEQ ID NO: 186032 - protein, 7 aa, synthetic construct
QEIRGRT

SEQ ID NO: 186033 - protein, 7 aa, synthetic construct
MEARPRA

SEQ ID NO: 186034 - protein, 7 aa, synthetic construct
MTPRHQT

SEQ ID NO: 186035 - protein, 7 aa, synthetic construct
MKPRQDS

SEQ ID NO: 186036 - protein, 7 aa, synthetic construct
KEPTQRY

SEQ ID NO: 186037 - protein, 7 aa, synthetic construct
LESRLRT

SEQ ID NO: 186038 - protein, 7 aa, synthetic construct
NELRQRS

SEQ ID NO: 186039 - protein, 7 aa, synthetic construct
LEARGRT

SEQ ID NO: 186040 - protein, 7 aa, synthetic construct
LELRQRP

SEQ ID NO: 186041 - protein, 7 aa, synthetic construct
MTPRHST

SEQ ID NO: 186042 - protein, 7 aa, synthetic construct
MEKRQYI

SEQ ID NO: 186043 - protein, 7 aa, synthetic construct
MERVQRM

SEQ ID NO: 186044 - protein, 7 aa, synthetic construct
IENRQRG

SEQ ID NO: 186045 - protein, 7 aa, synthetic construct
ALPRQRE

SEQ ID NO: 186046 - protein, 7 aa, synthetic construct
FEPNKRT

SEQ ID NO: 186047 - protein, 7 aa, synthetic construct
NEPRQRS

SEQ ID NO: 186048 - protein, 7 aa, synthetic construct
TEPLKRT

SEQ ID NO: 186049 - protein, 7 aa, synthetic construct
SEPRMRQ

SEQ ID NO: 186050 - protein, 7 aa, synthetic construct
MEPAGRR

SEQ ID NO: 186051 - protein, 7 aa, synthetic construct
MVERQRG

SEQ ID NO: 186052 - protein, 7 aa, synthetic construct
LEPRHRS

SEQ ID NO: 186053 - protein, 7 aa, synthetic construct
TEKFQRT

SEQ ID NO: 186054 - protein, 7 aa, synthetic construct
MRPRQEN

SEQ ID NO: 186055 - protein, 7 aa, synthetic construct
MEPRSVR

SEQ ID NO: 186056 - protein, 7 aa, synthetic construct
MEKRQQM

SEQ ID NO: 186057 - protein, 7 aa, synthetic construct
MEKQIRT

SEQ ID NO: 186058 - protein, 7 aa, synthetic construct
AVPRERT

SEQ ID NO: 186059 - protein, 7 aa, synthetic construct
DKPRQHT

SEQ ID NO: 186060 - protein, 7 aa, synthetic construct
METRPKT

SEQ ID NO: 186061 - protein, 7 aa, synthetic construct
MNPRQDR

SEQ ID NO: 186062 - protein, 7 aa, synthetic construct
IEHKQRT

SEQ ID NO: 186063 - protein, 7 aa, synthetic construct
GEIKQRT

SEQ ID NO: 186064 - protein, 7 aa, synthetic construct
MRPRQEF

SEQ ID NO: 186065 - protein, 7 aa, synthetic construct
MDPRSRN

SEQ ID NO: 186066 - protein, 7 aa, synthetic construct
MRPREPT

SEQ ID NO: 186067 - protein, 7 aa, synthetic construct
IENRGRT

SEQ ID NO: 186068 - protein, 7 aa, synthetic construct
MQDRPRT

SEQ ID NO: 186069 - protein, 7 aa, synthetic construct
MLPRDRG

SEQ ID NO: 186070 - protein, 7 aa, synthetic construct
YEPRQVK

SEQ ID NO: 186071 - protein, 7 aa, synthetic construct
LEIRQRG

SEQ ID NO: 186072 - protein, 7 aa, synthetic construct
IEPKQRQ

SEQ ID NO: 186073 - protein, 7 aa, synthetic construct
MDMRQRS

SEQ ID NO: 186074 - protein, 7 aa, synthetic construct
TEPIQRK

SEQ ID NO: 186075 - protein, 7 aa, synthetic construct
MEPARRQ

SEQ ID NO: 186076 - protein, 7 aa, synthetic construct
INPRQRE

SEQ ID NO: 186077 - protein, 7 aa, synthetic construct
VDPRPRT

SEQ ID NO: 186078 - protein, 7 aa, synthetic construct
MEKRQLH

SEQ ID NO: 186079 - protein, 7 aa, synthetic construct
KEIRQLT

SEQ ID NO: 186080 - protein, 7 aa, synthetic construct
EKPRERT

SEQ ID NO: 186081 - protein, 7 aa, synthetic construct
SEPRMRM

SEQ ID NO: 186082 - protein, 7 aa, synthetic construct
NKPRQET

SEQ ID NO: 186083 - protein, 7 aa, synthetic construct
TMERQRT

SEQ ID NO: 186084 - protein, 7 aa, synthetic construct
TEMRQRT

SEQ ID NO: 186085 - protein, 7 aa, synthetic construct
VEGRQKT

SEQ ID NO: 186086 - protein, 7 aa, synthetic construct
IERAQRT

SEQ ID NO: 186087 - protein, 7 aa, synthetic construct
SDPRPRT

SEQ ID NO: 186088 - protein, 7 aa, synthetic construct
NEPRGRA

SEQ ID NO: 186089 - protein, 7 aa, synthetic construct
EPPRQRP

SEQ ID NO: 186090 - protein, 7 aa, synthetic construct
MADRQRQ

SEQ ID NO: 186091 - protein, 7 aa, synthetic construct
MEKHQRG

SEQ ID NO: 186092 - protein, 7 aa, synthetic construct
MIPRHNT

SEQ ID NO: 186093 - protein, 7 aa, synthetic construct
MEPKPRM

SEQ ID NO: 186094 - protein, 7 aa, synthetic construct
MEPRMRQ

SEQ ID NO: 186095 - protein, 7 aa, synthetic construct
AEPRLRG

SEQ ID NO: 186096 - protein, 7 aa, synthetic construct
LSPRQRD

SEQ ID NO: 186097 - protein, 7 aa, synthetic construct
PEVRQRP

SEQ ID NO: 186098 - protein, 7 aa, synthetic construct
MEQLKRT

SEQ ID NO: 186099 - protein, 7 aa, synthetic construct
MEKRIMT

SEQ ID NO: 186100 - protein, 7 aa, synthetic construct
MEATKRT

SEQ ID NO: 186101 - protein, 7 aa, synthetic construct
MEKRQAI

SEQ ID NO: 186102 - protein, 7 aa, synthetic construct
FEIKQRT

SEQ ID NO: 186103 - protein, 7 aa, synthetic construct
HEPKSRT

SEQ ID NO: 186104 - protein, 7 aa, synthetic construct
LEPRNRG

SEQ ID NO: 186105 - protein, 7 aa, synthetic construct
MEAKLRT

SEQ ID NO: 186106 - protein, 7 aa, synthetic construct
VDSRQRT

SEQ ID NO: 186107 - protein, 7 aa, synthetic construct
LEPRTRG

SEQ ID NO: 186108 - protein, 7 aa, synthetic construct
MAPRLRD

SEQ ID NO: 186109 - protein, 7 aa, synthetic construct
FEPGKRT

SEQ ID NO: 186110 - protein, 7 aa, synthetic construct
MEVRSRP

SEQ ID NO: 186111 - protein, 7 aa, synthetic construct
MESRQGK

SEQ ID NO: 186112 - protein, 7 aa, synthetic construct
YEKRQST

SEQ ID NO: 186113 - protein, 7 aa, synthetic construct
MEGRLRP

SEQ ID NO: 186114 - protein, 7 aa, synthetic construct
MEPKPRT

SEQ ID NO: 186115 - protein, 7 aa, synthetic construct
NEPRTRM

SEQ ID NO: 186116 - protein, 7 aa, synthetic construct
VEMRQRV

SEQ ID NO: 186117 - protein, 7 aa, synthetic construct
MEKHQRI

SEQ ID NO: 186118 - protein, 7 aa, synthetic construct
MIPRQIG

SEQ ID NO: 186119 - protein, 7 aa, synthetic construct
MEIKHRT

SEQ ID NO: 186120 - protein, 7 aa, synthetic construct
NEPPQRK

SEQ ID NO: 186121 - protein, 7 aa, synthetic construct
MSPRIRD

SEQ ID NO: 186122 - protein, 7 aa, synthetic construct
MENAKRT

SEQ ID NO: 186123 - protein, 7 aa, synthetic construct
MEPQQKK

SEQ ID NO: 186124 - protein, 7 aa, synthetic construct
TEARLRT

SEQ ID NO: 186125 - protein, 7 aa, synthetic construct
VEPRIRQ

SEQ ID NO: 186126 - protein, 7 aa, synthetic construct
MLPHQRG

SEQ ID NO: 186127 - protein, 7 aa, synthetic construct
MEKMIRT

SEQ ID NO: 186128 - protein, 7 aa, synthetic construct
MNPRERV

SEQ ID NO: 186129 - protein, 7 aa, synthetic construct
SEPKQRF

SEQ ID NO: 186130 - protein, 7 aa, synthetic construct
QEPRNRV

SEQ ID NO: 186131 - protein, 7 aa, synthetic construct
MKPHQRD

SEQ ID NO: 186132 - protein, 7 aa, synthetic construct
KEPGQRQ

SEQ ID NO: 186133 - protein, 7 aa, synthetic construct
IEIRNRT

SEQ ID NO: 186134 - protein, 7 aa, synthetic construct
MKPRQDH

SEQ ID NO: 186135 - protein, 7 aa, synthetic construct
MEMRQRA

SEQ ID NO: 186136 - protein, 7 aa, synthetic construct
TEVRQRN

SEQ ID NO: 186137 - protein, 7 aa, synthetic construct
VEQRQRS

SEQ ID NO: 186138 - protein, 7 aa, synthetic construct
MDKRDRT

SEQ ID NO: 186139 - protein, 7 aa, synthetic construct
ANPRERT

SEQ ID NO: 186140 - protein, 7 aa, synthetic construct
MEIRTKT

SEQ ID NO: 186141 - protein, 7 aa, synthetic construct
NLPRDRT

SEQ ID NO: 186142 - protein, 7 aa, synthetic construct
MRPRQME

SEQ ID NO: 186143 - protein, 7 aa, synthetic construct
MKSRQDT

SEQ ID NO: 186144 - protein, 7 aa, synthetic construct
MDPRVRH

SEQ ID NO: 186145 - protein, 7 aa, synthetic construct
AEPRMRT

SEQ ID NO: 186146 - protein, 7 aa, synthetic construct
MTIRQRE

SEQ ID NO: 186147 - protein, 7 aa, synthetic construct
DMPRQKT

SEQ ID NO: 186148 - protein, 7 aa, synthetic construct
MNPRPRD

SEQ ID NO: 186149 - protein, 7 aa, synthetic construct
MEKQQRS

SEQ ID NO: 186150 - protein, 7 aa, synthetic construct
HEPRMKT

SEQ ID NO: 186151 - protein, 7 aa, synthetic construct
IEQRQRG

SEQ ID NO: 186152 - protein, 7 aa, synthetic construct
TLERQRT

SEQ ID NO: 186153 - protein, 7 aa, synthetic construct
MEKRQQS

SEQ ID NO: 186154 - protein, 7 aa, synthetic construct
MEKPQRV

SEQ ID NO: 186155 - protein, 7 aa, synthetic construct
VEARQRP

SEQ ID NO: 186156 - protein, 7 aa, synthetic construct
VQPRQRE

SEQ ID NO: 186157 - protein, 7 aa, synthetic construct
MVPRLRD

SEQ ID NO: 186158 - protein, 7 aa, synthetic construct
MMPRNRE

SEQ ID NO: 186159 - protein, 7 aa, synthetic construct
SEPRQKL

SEQ ID NO: 186160 - protein, 7 aa, synthetic construct
ADPRQKT

SEQ ID NO: 186161 - protein, 7 aa, synthetic construct
MNPRQTN

SEQ ID NO: 186162 - protein, 7 aa, synthetic construct
IETRPRT

SEQ ID NO: 186163 - protein, 7 aa, synthetic construct
MVERGRT

SEQ ID NO: 186164 - protein, 7 aa, synthetic construct
DAPRQRG

SEQ ID NO: 186165 - protein, 7 aa, synthetic construct
PEKRQAT

SEQ ID NO: 186166 - protein, 7 aa, synthetic construct
IEPRGRQ

SEQ ID NO: 186167 - protein, 7 aa, synthetic construct
FESKQRT

SEQ ID NO: 186168 - protein, 7 aa, synthetic construct
KEDRGRT

SEQ ID NO: 186169 - protein, 7 aa, synthetic construct
MVPHQRA

SEQ ID NO: 186170 - protein, 7 aa, synthetic construct
NEQRQRA

SEQ ID NO: 186171 - protein, 7 aa, synthetic construct
KEIRQRD

SEQ ID NO: 186172 - protein, 7 aa, synthetic construct
MEPIKRY

SEQ ID NO: 186173 - protein, 7 aa, synthetic construct
MEARIRN

SEQ ID NO: 186174 - protein, 7 aa, synthetic construct
MERPQRI

SEQ ID NO: 186175 - protein, 7 aa, synthetic construct
MPSRQRE

SEQ ID NO: 186176 - protein, 7 aa, synthetic construct
MEVRPRP

SEQ ID NO: 186177 - protein, 7 aa, synthetic construct
IESRMRT

SEQ ID NO: 186178 - protein, 7 aa, synthetic construct
MENRQLK

SEQ ID NO: 186179 - protein, 7 aa, synthetic construct
MENRIRA

SEQ ID NO: 186180 - protein, 7 aa, synthetic construct
QEKRQAT

SEQ ID NO: 186181 - protein, 7 aa, synthetic construct
MMPRDRG

SEQ ID NO: 186182 - protein, 7 aa, synthetic construct
KEPFQRS

SEQ ID NO: 186183 - protein, 7 aa, synthetic construct
MEKRPAT

SEQ ID NO: 186184 - protein, 7 aa, synthetic construct
NEPRQMR

SEQ ID NO: 186185 - protein, 7 aa, synthetic construct
TEPLRRT

SEQ ID NO: 186186 - protein, 7 aa, synthetic construct
NEPRRQT

SEQ ID NO: 186187 - protein, 7 aa, synthetic construct
GERTQRT

SEQ ID NO: 186188 - protein, 7 aa, synthetic construct
IETRQRT

SEQ ID NO: 186189 - protein, 7 aa, synthetic construct
DTPRQRI

SEQ ID NO: 186190 - protein, 7 aa, synthetic construct
MEGRQKP

SEQ ID NO: 186191 - protein, 7 aa, synthetic construct
TEPRGRN

SEQ ID NO: 186192 - protein, 7 aa, synthetic construct
MTERIRT

SEQ ID NO: 186193 - protein, 7 aa, synthetic construct
LEPRPRV

SEQ ID NO: 186194 - protein, 7 aa, synthetic construct
TEPRQRT

SEQ ID NO: 186195 - protein, 7 aa, synthetic construct
MEPRIRM

SEQ ID NO: 186196 - protein, 7 aa, synthetic construct
LEPRGRS

SEQ ID NO: 186197 - protein, 7 aa, synthetic construct
GEPRQKI

SEQ ID NO: 186198 - protein, 7 aa, synthetic construct
RETRQST

SEQ ID NO: 186199 - protein, 7 aa, synthetic construct
VEPRSRS

SEQ ID NO: 186200 - protein, 7 aa, synthetic construct
HEPKQRS

SEQ ID NO: 186201 - protein, 7 aa, synthetic construct
MDVRTRT

SEQ ID NO: 186202 - protein, 7 aa, synthetic construct
MIPTQRM

SEQ ID NO: 186203 - protein, 7 aa, synthetic construct
GHPRQNT

SEQ ID NO: 186204 - protein, 7 aa, synthetic construct
MEKRQDR

SEQ ID NO: 186205 - protein, 7 aa, synthetic construct
VIPRERT

SEQ ID NO: 186206 - protein, 7 aa, synthetic construct
IETRNRT

SEQ ID NO: 186207 - protein, 7 aa, synthetic construct
MEITKRT

SEQ ID NO: 186208 - protein, 7 aa, synthetic construct
DAPRIRT

SEQ ID NO: 186209 - protein, 7 aa, synthetic construct
DNPRQRS

SEQ ID NO: 186210 - protein, 7 aa, synthetic construct
YDPRVRT

SEQ ID NO: 186211 - protein, 7 aa, synthetic construct
MERNQRV

SEQ ID NO: 186212 - protein, 7 aa, synthetic construct
GVPRERT

SEQ ID NO: 186213 - protein, 7 aa, synthetic construct
MQPREKT

SEQ ID NO: 186214 - protein, 7 aa, synthetic construct
VEPRQRA

SEQ ID NO: 186215 - protein, 7 aa, synthetic construct
DKPGQRT

SEQ ID NO: 186216 - protein, 7 aa, synthetic construct
MNVRQRE

SEQ ID NO: 186217 - protein, 7 aa, synthetic construct
KEDRPRT

SEQ ID NO: 186218 - protein, 7 aa, synthetic construct
LENRQRQ

SEQ ID NO: 186219 - protein, 7 aa, synthetic construct
MEGRGRV

SEQ ID NO: 186220 - protein, 7 aa, synthetic construct
PEPRVRN

SEQ ID NO: 186221 - protein, 7 aa, synthetic construct
VEPRQGR

SEQ ID NO: 186222 - protein, 7 aa, synthetic construct
VRPRQET

SEQ ID NO: 186223 - protein, 7 aa, synthetic construct
TNPRDRT

SEQ ID NO: 186224 - protein, 7 aa, synthetic construct
MENRNKT

SEQ ID NO: 186225 - protein, 7 aa, synthetic construct
SNPRERT

SEQ ID NO: 186226 - protein, 7 aa, synthetic construct
NEARQRT

SEQ ID NO: 186227 - protein, 7 aa, synthetic construct
MEKPQRI

SEQ ID NO: 186228 - protein, 7 aa, synthetic construct
IEPRQAR

SEQ ID NO: 186229 - protein, 7 aa, synthetic construct
IEPRMRM

SEQ ID NO: 186230 - protein, 7 aa, synthetic construct
MEKRGMT

SEQ ID NO: 186231 - protein, 7 aa, synthetic construct
TEPRPRV

SEQ ID NO: 186232 - protein, 7 aa, synthetic construct
MGPRVRD

SEQ ID NO: 186233 - protein, 7 aa, synthetic construct
QEPRQKM

SEQ ID NO: 186234 - protein, 7 aa, synthetic construct
MEKAQRY

SEQ ID NO: 186235 - protein, 7 aa, synthetic construct
PNPRQRE

SEQ ID NO: 186236 - protein, 7 aa, synthetic construct
MEMKSRT

SEQ ID NO: 186237 - protein, 7 aa, synthetic construct
MEARGRV

SEQ ID NO: 186238 - protein, 7 aa, synthetic construct
MENRTRI

SEQ ID NO: 186239 - protein, 7 aa, synthetic construct
MEPRGAR

SEQ ID NO: 186240 - protein, 7 aa, synthetic construct
IEPRIRV

SEQ ID NO: 186241 - protein, 7 aa, synthetic construct
KEMRQRD

SEQ ID NO: 186242 - protein, 7 aa, synthetic construct
LETRNRT

SEQ ID NO: 186243 - protein, 7 aa, synthetic construct
MVPRERG

SEQ ID NO: 186244 - protein, 7 aa, synthetic construct
AEPKPRT

SEQ ID NO: 186245 - protein, 7 aa, synthetic construct
QEMRQRG

SEQ ID NO: 186246 - protein, 7 aa, synthetic construct
MKLRQET

SEQ ID NO: 186247 - protein, 7 aa, synthetic construct
MEIRSRP

SEQ ID NO: 186248 - protein, 7 aa, synthetic construct
MGPRSNT

SEQ ID NO: 186249 - protein, 7 aa, synthetic construct
MEQKIRT

SEQ ID NO: 186250 - protein, 7 aa, synthetic construct
YENRQRA

SEQ ID NO: 186251 - protein, 7 aa, synthetic construct
KENRQRE

SEQ ID NO: 186252 - protein, 7 aa, synthetic construct
MEPRLRM

SEQ ID NO: 186253 - protein, 7 aa, synthetic construct
MEMKPRT

SEQ ID NO: 186254 - protein, 7 aa, synthetic construct
MQPRDRG

SEQ ID NO: 186255 - protein, 7 aa, synthetic construct
MVPRHAT

SEQ ID NO: 186256 - protein, 7 aa, synthetic construct
MSERQRN

SEQ ID NO: 186257 - protein, 7 aa, synthetic construct
SVPRDRT

SEQ ID NO: 186258 - protein, 7 aa, synthetic construct
AEPRRVT

SEQ ID NO: 186259 - protein, 7 aa, synthetic construct
IVPRERT

SEQ ID NO: 186260 - protein, 7 aa, synthetic construct
AVPRQRE

SEQ ID NO: 186261 - protein, 7 aa, synthetic construct
LETRQRV

SEQ ID NO: 186262 - protein, 7 aa, synthetic construct
MIPRQSM

SEQ ID NO: 186263 - protein, 7 aa, synthetic construct
LEGRQRP

SEQ ID NO: 186264 - protein, 7 aa, synthetic construct
REPRSIT

SEQ ID NO: 186265 - protein, 7 aa, synthetic construct
MEGKNRT

SEQ ID NO: 186266 - protein, 7 aa, synthetic construct
MEIRQKS

SEQ ID NO: 186267 - protein, 7 aa, synthetic construct
MESRLKT

SEQ ID NO: 186268 - protein, 7 aa, synthetic construct
SEPIKRT

SEQ ID NO: 186269 - protein, 7 aa, synthetic construct
IETRQRA

SEQ ID NO: 186270 - protein, 7 aa, synthetic construct
IEPVRRT

SEQ ID NO: 186271 - protein, 7 aa, synthetic construct
MERNQRI

SEQ ID NO: 186272 - protein, 7 aa, synthetic construct
IEPRNRV

SEQ ID NO: 186273 - protein, 7 aa, synthetic construct
MTPRQHV

SEQ ID NO: 186274 - protein, 7 aa, synthetic construct
NEPQKRT

SEQ ID NO: 186275 - protein, 7 aa, synthetic construct
VETRQKT

SEQ ID NO: 186276 - protein, 7 aa, synthetic construct
KEGRQFT

SEQ ID NO: 186277 - protein, 7 aa, synthetic construct
MVPRQSN

SEQ ID NO: 186278 - protein, 7 aa, synthetic construct
KEPRERN

SEQ ID NO: 186279 - protein, 7 aa, synthetic construct
MAPRMRD

SEQ ID NO: 186280 - protein, 7 aa, synthetic construct
MDVRQRT

SEQ ID NO: 186281 - protein, 7 aa, synthetic construct
MIPRQSS

SEQ ID NO: 186282 - protein, 7 aa, synthetic construct
MHPRQQQ

SEQ ID NO: 186283 - protein, 7 aa, synthetic construct
TEARNRT

SEQ ID NO: 186284 - protein, 7 aa, synthetic construct
MTTRQHT

SEQ ID NO: 186285 - protein, 7 aa, synthetic construct
MENRLRS

SEQ ID NO: 186286 - protein, 7 aa, synthetic construct
MEIKMRT

SEQ ID NO: 186287 - protein, 7 aa, synthetic construct
QNPRERT

SEQ ID NO: 186288 - protein, 7 aa, synthetic construct
LEPQRRT

SEQ ID NO: 186289 - protein, 7 aa, synthetic construct
QEQRQRG

SEQ ID NO: 186290 - protein, 7 aa, synthetic construct
MEKGQRG

SEQ ID NO: 186291 - protein, 7 aa, synthetic construct
REPRAIT

SEQ ID NO: 186292 - protein, 7 aa, synthetic construct
TEPMKRT

SEQ ID NO: 186293 - protein, 7 aa, synthetic construct
MKPRQDM

SEQ ID NO: 186294 - protein, 7 aa, synthetic construct
GEQRQRP

SEQ ID NO: 186295 - protein, 7 aa, synthetic construct
REPNQRN

SEQ ID NO: 186296 - protein, 7 aa, synthetic construct
MELKQRA

SEQ ID NO: 186297 - protein, 7 aa, synthetic construct
MESMKRT

SEQ ID NO: 186298 - protein, 7 aa, synthetic construct
ELPRVRT

SEQ ID NO: 186299 - protein, 7 aa, synthetic construct
LEPRTRV

SEQ ID NO: 186300 - protein, 7 aa, synthetic construct
GIPHQRT

SEQ ID NO: 186301 - protein, 7 aa, synthetic construct
KEMRQRE

SEQ ID NO: 186302 - protein, 7 aa, synthetic construct
MEPRPRM

SEQ ID NO: 186303 - protein, 7 aa, synthetic construct
MVPRQQN

SEQ ID NO: 186304 - protein, 7 aa, synthetic construct
FEPRVRA

SEQ ID NO: 186305 - protein, 7 aa, synthetic construct
KEPFQRG

SEQ ID NO: 186306 - protein, 7 aa, synthetic construct
MENVQRK

SEQ ID NO: 186307 - protein, 7 aa, synthetic construct
MEKRMNT

SEQ ID NO: 186308 - protein, 7 aa, synthetic construct
DIPRSRT

SEQ ID NO: 186309 - protein, 7 aa, synthetic construct
MENRLRN

SEQ ID NO: 186310 - protein, 7 aa, synthetic construct
MSPRVRD

SEQ ID NO: 186311 - protein, 7 aa, synthetic construct
MTSRQRE

SEQ ID NO: 186312 - protein, 7 aa, synthetic construct
MDIKQRT

SEQ ID NO: 186313 - protein, 7 aa, synthetic construct
EKPIQRT

SEQ ID NO: 186314 - protein, 7 aa, synthetic construct
MEPRTIR

SEQ ID NO: 186315 - protein, 7 aa, synthetic construct
IPPRQRD

SEQ ID NO: 186316 - protein, 7 aa, synthetic construct
MPPRRDT

SEQ ID NO: 186317 - protein, 7 aa, synthetic construct
MEARQKT

SEQ ID NO: 186318 - protein, 7 aa, synthetic construct
MRPRDST

SEQ ID NO: 186319 - protein, 7 aa, synthetic construct
MEKRQTL

SEQ ID NO: 186320 - protein, 7 aa, synthetic construct
NLPHQRT

SEQ ID NO: 186321 - protein, 7 aa, synthetic construct
KEPRQYN

SEQ ID NO: 186322 - protein, 7 aa, synthetic construct
MTPRRET

SEQ ID NO: 186323 - protein, 7 aa, synthetic construct
NEPLKRT

SEQ ID NO: 186324 - protein, 7 aa, synthetic construct
MEPRSKQ

SEQ ID NO: 186325 - protein, 7 aa, synthetic construct
MVDRQRM

SEQ ID NO: 186326 - protein, 7 aa, synthetic construct
MESRIKT

SEQ ID NO: 186327 - protein, 7 aa, synthetic construct
MEAKQRS

SEQ ID NO: 186328 - protein, 7 aa, synthetic construct
MEPRRSS

SEQ ID NO: 186329 - protein, 7 aa, synthetic construct
MEPRPKF

SEQ ID NO: 186330 - protein, 7 aa, synthetic construct
PEPRQGK

SEQ ID NO: 186331 - protein, 7 aa, synthetic construct
TEQRPRT

SEQ ID NO: 186332 - protein, 7 aa, synthetic construct
IEPRNRL

SEQ ID NO: 186333 - protein, 7 aa, synthetic construct
TEPRSRP

SEQ ID NO: 186334 - protein, 7 aa, synthetic construct
IEPRLRT

SEQ ID NO: 186335 - protein, 7 aa, synthetic construct
DKPVQRT

SEQ ID NO: 186336 - protein, 7 aa, synthetic construct
SMERQRT

SEQ ID NO: 186337 - protein, 7 aa, synthetic construct
RNPRQDT

SEQ ID NO: 186338 - protein, 7 aa, synthetic construct
REPGQRT

SEQ ID NO: 186339 - protein, 7 aa, synthetic construct
MEPKMRY

SEQ ID NO: 186340 - protein, 7 aa, synthetic construct
MEPRTNR

SEQ ID NO: 186341 - protein, 7 aa, synthetic construct
TEPRNRV

SEQ ID NO: 186342 - protein, 7 aa, synthetic construct
MEMKQRS

SEQ ID NO: 186343 - protein, 7 aa, synthetic construct
DVNRQRT

SEQ ID NO: 186344 - protein, 7 aa, synthetic construct
HEPRVRP

SEQ ID NO: 186345 - protein, 7 aa, synthetic construct
LEGRQRS

SEQ ID NO: 186346 - protein, 7 aa, synthetic construct
GEQRQKT

SEQ ID NO: 186347 - protein, 7 aa, synthetic construct
MEPRRNI

SEQ ID NO: 186348 - protein, 7 aa, synthetic construct
MEGNKRT

SEQ ID NO: 186349 - protein, 7 aa, synthetic construct
ALPRERT

SEQ ID NO: 186350 - protein, 7 aa, synthetic construct
MEMRGRT

SEQ ID NO: 186351 - protein, 7 aa, synthetic construct
IEGRVRT

SEQ ID NO: 186352 - protein, 7 aa, synthetic construct
AEPRVRP

SEQ ID NO: 186353 - protein, 7 aa, synthetic construct
VEPIQRK

SEQ ID NO: 186354 - protein, 7 aa, synthetic construct
AERNQRT

SEQ ID NO: 186355 - protein, 7 aa, synthetic construct
MHPRQTQ

SEQ ID NO: 186356 - protein, 7 aa, synthetic construct
MEGRQRP

SEQ ID NO: 186357 - protein, 7 aa, synthetic construct
DAPRQRN

SEQ ID NO: 186358 - protein, 7 aa, synthetic construct
MEGRKAT

SEQ ID NO: 186359 - protein, 7 aa, synthetic construct
MSPRQNQ

SEQ ID NO: 186360 - protein, 7 aa, synthetic construct
LGPRQRD

SEQ ID NO: 186361 - protein, 7 aa, synthetic construct
SEPRGRM

SEQ ID NO: 186362 - protein, 7 aa, synthetic construct
NERRQVT

SEQ ID NO: 186363 - protein, 7 aa, synthetic construct
MEPRQRS

SEQ ID NO: 186364 - protein, 7 aa, synthetic construct
NEPRNRI

SEQ ID NO: 186365 - protein, 7 aa, synthetic construct
AEPVKRT

SEQ ID NO: 186366 - protein, 7 aa, synthetic construct
MRPREIT

SEQ ID NO: 186367 - protein, 7 aa, synthetic construct
LEPRGRL

SEQ ID NO: 186368 - protein, 7 aa, synthetic construct
IEPRSRT

SEQ ID NO: 186369 - protein, 7 aa, synthetic construct
NEPRLRM

SEQ ID NO: 186370 - protein, 7 aa, synthetic construct
FEKRQLT

SEQ ID NO: 186371 - protein, 7 aa, synthetic construct
YNPRQRE

SEQ ID NO: 186372 - protein, 7 aa, synthetic construct
GEPRQKV

SEQ ID NO: 186373 - protein, 7 aa, synthetic construct
MQPRQDK

SEQ ID NO: 186374 - protein, 7 aa, synthetic construct
DRPRQIT

SEQ ID NO: 186375 - protein, 7 aa, synthetic construct
MPPHQRQ

SEQ ID NO: 186376 - protein, 7 aa, synthetic construct
MVPRQLQ

SEQ ID NO: 186377 - protein, 7 aa, synthetic construct
MIPRQTN

SEQ ID NO: 186378 - protein, 7 aa, synthetic construct
IEPRQYK

SEQ ID NO: 186379 - protein, 7 aa, synthetic construct
QLPRQRD

SEQ ID NO: 186380 - protein, 7 aa, synthetic construct
GEPKQRV

SEQ ID NO: 186381 - protein, 7 aa, synthetic construct
RQPRQDT

SEQ ID NO: 186382 - protein, 7 aa, synthetic construct
KELRQLT

SEQ ID NO: 186383 - protein, 7 aa, synthetic construct
MEPGKRY

SEQ ID NO: 186384 - protein, 7 aa, synthetic construct
MKPRQEY

SEQ ID NO: 186385 - protein, 7 aa, synthetic construct
KETRQHT

SEQ ID NO: 186386 - protein, 7 aa, synthetic construct
AEPKQRQ

SEQ ID NO: 186387 - protein, 7 aa, synthetic construct
HEPRGRV

SEQ ID NO: 186388 - protein, 7 aa, synthetic construct
MIDRGRT

SEQ ID NO: 186389 - protein, 7 aa, synthetic construct
IEPRART

SEQ ID NO: 186390 - protein, 7 aa, synthetic construct
MPERMRT

SEQ ID NO: 186391 - protein, 7 aa, synthetic construct
REPSQRS

SEQ ID NO: 186392 - protein, 7 aa, synthetic construct
QLERQRT

SEQ ID NO: 186393 - protein, 7 aa, synthetic construct
QEKRQVT

SEQ ID NO: 186394 - protein, 7 aa, synthetic construct
MTDRART

SEQ ID NO: 186395 - protein, 7 aa, synthetic construct
MERSPRT

SEQ ID NO: 186396 - protein, 7 aa, synthetic construct
DKPRQRE

SEQ ID NO: 186397 - protein, 7 aa, synthetic construct
TEPRLRG

SEQ ID NO: 186398 - protein, 7 aa, synthetic construct
MIPRIRE

SEQ ID NO: 186399 - protein, 7 aa, synthetic construct
MESVKRT

SEQ ID NO: 186400 - protein, 7 aa, synthetic construct
MQPRQNQ

SEQ ID NO: 186401 - protein, 7 aa, synthetic construct
SERLQRT

SEQ ID NO: 186402 - protein, 7 aa, synthetic construct
MENRARG

SEQ ID NO: 186403 - protein, 7 aa, synthetic construct
MRPRQGE

SEQ ID NO: 186404 - protein, 7 aa, synthetic construct
EQPKQRT

SEQ ID NO: 186405 - protein, 7 aa, synthetic construct
MEPRPKI

SEQ ID NO: 186406 - protein, 7 aa, synthetic construct
PMPRQRE

SEQ ID NO: 186407 - protein, 7 aa, synthetic construct
MEPRTRG

SEQ ID NO: 186408 - protein, 7 aa, synthetic construct
MDTRQRV

SEQ ID NO: 186409 - protein, 7 aa, synthetic construct
MENRVRV

SEQ ID NO: 186410 - protein, 7 aa, synthetic construct
MEIRQAK

SEQ ID NO: 186411 - protein, 7 aa, synthetic construct
MTERQRG

SEQ ID NO: 186412 - protein, 7 aa, synthetic construct
MEPKPRL

SEQ ID NO: 186413 - protein, 7 aa, synthetic construct
MIPRQQQ

SEQ ID NO: 186414 - protein, 7 aa, synthetic construct
VEPRARI

SEQ ID NO: 186415 - protein, 7 aa, synthetic construct
MEPRGRQ

SEQ ID NO: 186416 - protein, 7 aa, synthetic construct
LESRMRT

SEQ ID NO: 186417 - protein, 7 aa, synthetic construct
MENRQRV

SEQ ID NO: 186418 - protein, 7 aa, synthetic construct
MEPRRNN

SEQ ID NO: 186419 - protein, 7 aa, synthetic construct
MTPRQSM

SEQ ID NO: 186420 - protein, 7 aa, synthetic construct
QEAKQRT

SEQ ID NO: 186421 - protein, 7 aa, synthetic construct
MTPRDRA

SEQ ID NO: 186422 - protein, 7 aa, synthetic construct
QEPRQNR

SEQ ID NO: 186423 - protein, 7 aa, synthetic construct
SEIKQRT

SEQ ID NO: 186424 - protein, 7 aa, synthetic construct
METRQKQ

SEQ ID NO: 186425 - protein, 7 aa, synthetic construct
MEMRTRS

SEQ ID NO: 186426 - protein, 7 aa, synthetic construct
MEKRTST

SEQ ID NO: 186427 - protein, 7 aa, synthetic construct
MEKRMIT

SEQ ID NO: 186428 - protein, 7 aa, synthetic construct
AEPRSRV

SEQ ID NO: 186429 - protein, 7 aa, synthetic construct
NEPAQRK

SEQ ID NO: 186430 - protein, 7 aa, synthetic construct
REPIQRQ

SEQ ID NO: 186431 - protein, 7 aa, synthetic construct
IEARPRT

SEQ ID NO: 186432 - protein, 7 aa, synthetic construct
LMPRQRE

SEQ ID NO: 186433 - protein, 7 aa, synthetic construct
TESRQRV

SEQ ID NO: 186434 - protein, 7 aa, synthetic construct
MEGRTRV

SEQ ID NO: 186435 - protein, 7 aa, synthetic construct
HEKNQRT

SEQ ID NO: 186436 - protein, 7 aa, synthetic construct
IEKFQRT

SEQ ID NO: 186437 - protein, 7 aa, synthetic construct
MENKPRT

SEQ ID NO: 186438 - protein, 7 aa, synthetic construct
SVPRERT

SEQ ID NO: 186439 - protein, 7 aa, synthetic construct
MEQKQRL

SEQ ID NO: 186440 - protein, 7 aa, synthetic construct
VIERQRT

SEQ ID NO: 186441 - protein, 7 aa, synthetic construct
MEVRTRA

SEQ ID NO: 186442 - protein, 7 aa, synthetic construct
HEPRTRV

SEQ ID NO: 186443 - protein, 7 aa, synthetic construct
LEPRSRM

SEQ ID NO: 186444 - protein, 7 aa, synthetic construct
IETRQRV

SEQ ID NO: 186445 - protein, 7 aa, synthetic construct
MIPRQGG

SEQ ID NO: 186446 - protein, 7 aa, synthetic construct
VEPRNRA

SEQ ID NO: 186447 - protein, 7 aa, synthetic construct
PIPRQHT

SEQ ID NO: 186448 - protein, 7 aa, synthetic construct
LEPRGRV

SEQ ID NO: 186449 - protein, 7 aa, synthetic construct
YEPRSKT

SEQ ID NO: 186450 - protein, 7 aa, synthetic construct
MEPAKRF

SEQ ID NO: 186451 - protein, 7 aa, synthetic construct
MNDRPRT

SEQ ID NO: 186452 - protein, 7 aa, synthetic construct
SELRQKT

SEQ ID NO: 186453 - protein, 7 aa, synthetic construct
MTPRERA

SEQ ID NO: 186454 - protein, 7 aa, synthetic construct
MEPRASR

SEQ ID NO: 186455 - protein, 7 aa, synthetic construct
MVPRDRQ

SEQ ID NO: 186456 - protein, 7 aa, synthetic construct
REPVQRN

SEQ ID NO: 186457 - protein, 7 aa, synthetic construct
MELRQNK

SEQ ID NO: 186458 - protein, 7 aa, synthetic construct
MEKAIRT

SEQ ID NO: 186459 - protein, 7 aa, synthetic construct
MPERART

SEQ ID NO: 186460 - protein, 7 aa, synthetic construct
MNPDQRR

SEQ ID NO: 186461 - protein, 7 aa, synthetic construct
NDPRQRV

SEQ ID NO: 186462 - protein, 7 aa, synthetic construct
VNPRDRT

SEQ ID NO: 186463 - protein, 7 aa, synthetic construct
NEPRMRT

SEQ ID NO: 186464 - protein, 7 aa, synthetic construct
PVPRQRE

SEQ ID NO: 186465 - protein, 7 aa, synthetic construct
IQERQRT

SEQ ID NO: 186466 - protein, 7 aa, synthetic construct
MMPRQSL

SEQ ID NO: 186467 - protein, 7 aa, synthetic construct
REPAHRT

SEQ ID NO: 186468 - protein, 7 aa, synthetic construct
GEPRMRV

SEQ ID NO: 186469 - protein, 7 aa, synthetic construct
MTPRQHA

SEQ ID NO: 186470 - protein, 7 aa, synthetic construct
MVPRAST

SEQ ID NO: 186471 - protein, 7 aa, synthetic construct
SDTRQRT

SEQ ID NO: 186472 - protein, 7 aa, synthetic construct
MDRRQTT

SEQ ID NO: 186473 - protein, 7 aa, synthetic construct
REPGQRV

SEQ ID NO: 186474 - protein, 7 aa, synthetic construct
GEVRVRT

SEQ ID NO: 186475 - protein, 7 aa, synthetic construct
VEPRVRA

SEQ ID NO: 186476 - protein, 7 aa, synthetic construct
LNPRQRD

SEQ ID NO: 186477 - protein, 7 aa, synthetic construct
MTPRDRT

SEQ ID NO: 186478 - protein, 7 aa, synthetic construct
VEQRQRN

SEQ ID NO: 186479 - protein, 7 aa, synthetic construct
MEVRMRG

SEQ ID NO: 186480 - protein, 7 aa, synthetic construct
GEPRQVK

SEQ ID NO: 186481 - protein, 7 aa, synthetic construct
MEKRERT

SEQ ID NO: 186482 - protein, 7 aa, synthetic construct
TEPRSRT

SEQ ID NO: 186483 - protein, 7 aa, synthetic construct
REPHPRT

SEQ ID NO: 186484 - protein, 7 aa, synthetic construct
LEPRGRN

SEQ ID NO: 186485 - protein, 7 aa, synthetic construct
MLPRERA

SEQ ID NO: 186486 - protein, 7 aa, synthetic construct
TEPRTRT

SEQ ID NO: 186487 - protein, 7 aa, synthetic construct
TEPRQSR

SEQ ID NO: 186488 - protein, 7 aa, synthetic construct
MEMRNRG

SEQ ID NO: 186489 - protein, 7 aa, synthetic construct
MEPRAKF

SEQ ID NO: 186490 - protein, 7 aa, synthetic construct
GIPRQRD

SEQ ID NO: 186491 - protein, 7 aa, synthetic construct
SEPRIRN

SEQ ID NO: 186492 - protein, 7 aa, synthetic construct
TEVRIRT

SEQ ID NO: 186493 - protein, 7 aa, synthetic construct
SEPVKRT

SEQ ID NO: 186494 - protein, 7 aa, synthetic construct
HVPRQST

SEQ ID NO: 186495 - protein, 7 aa, synthetic construct
TEARQRS

SEQ ID NO: 186496 - protein, 7 aa, synthetic construct
MEVRNRS

SEQ ID NO: 186497 - protein, 7 aa, synthetic construct
MEMRQTK

SEQ ID NO: 186498 - protein, 7 aa, synthetic construct
GEPRVRS

SEQ ID NO: 186499 - protein, 7 aa, synthetic construct
NEVRGRT

SEQ ID NO: 186500 - protein, 7 aa, synthetic construct
REPRDRA

SEQ ID NO: 186501 - protein, 7 aa, synthetic construct
KEERQRN

SEQ ID NO: 186502 - protein, 7 aa, synthetic construct
TNPRQRE

SEQ ID NO: 186503 - protein, 7 aa, synthetic construct
GETRQKT

SEQ ID NO: 186504 - protein, 7 aa, synthetic construct
MTERQRN

SEQ ID NO: 186505 - protein, 7 aa, synthetic construct
TENRLRT

SEQ ID NO: 186506 - protein, 7 aa, synthetic construct
TEPRQKF

SEQ ID NO: 186507 - protein, 7 aa, synthetic construct
ADTRQRT

SEQ ID NO: 186508 - protein, 7 aa, synthetic construct
LEPFKRT

SEQ ID NO: 186509 - protein, 7 aa, synthetic construct
MHPRQHG

SEQ ID NO: 186510 - protein, 7 aa, synthetic construct
VEIRQRG

SEQ ID NO: 186511 - protein, 7 aa, synthetic construct
QEPRMRI

SEQ ID NO: 186512 - protein, 7 aa, synthetic construct
MEPRQRM

SEQ ID NO: 186513 - protein, 7 aa, synthetic construct
IELRQRS

SEQ ID NO: 186514 - protein, 7 aa, synthetic construct
TEMRQRI

SEQ ID NO: 186515 - protein, 7 aa, synthetic construct
METRQKI

SEQ ID NO: 186516 - protein, 7 aa, synthetic construct
GEPKSRT

SEQ ID NO: 186517 - protein, 7 aa, synthetic construct
GEPRIRN

SEQ ID NO: 186518 - protein, 7 aa, synthetic construct
PEPKQRY

SEQ ID NO: 186519 - protein, 7 aa, synthetic construct
TDPRQRS

SEQ ID NO: 186520 - protein, 7 aa, synthetic construct
NEPRQRA

SEQ ID NO: 186521 - protein, 7 aa, synthetic construct
SENRQRP

SEQ ID NO: 186522 - protein, 7 aa, synthetic construct
MDNRQRS

SEQ ID NO: 186523 - protein, 7 aa, synthetic construct
NEMRQKT

SEQ ID NO: 186524 - protein, 7 aa, synthetic construct
SEPQKRT

SEQ ID NO: 186525 - protein, 7 aa, synthetic construct
MIERQRG

SEQ ID NO: 186526 - protein, 7 aa, synthetic construct
MEKRQAL

SEQ ID NO: 186527 - protein, 7 aa, synthetic construct
MERMQKT

SEQ ID NO: 186528 - protein, 7 aa, synthetic construct
AETRQRP

SEQ ID NO: 186529 - protein, 7 aa, synthetic construct
MENRLRA

SEQ ID NO: 186530 - protein, 7 aa, synthetic construct
MEPRNLR

SEQ ID NO: 186531 - protein, 7 aa, synthetic construct
MQPRRDT

SEQ ID NO: 186532 - protein, 7 aa, synthetic construct
MEPSKRF

SEQ ID NO: 186533 - protein, 7 aa, synthetic construct
YEPRQQK

SEQ ID NO: 186534 - protein, 7 aa, synthetic construct
MEGRLRQ

SEQ ID NO: 186535 - protein, 7 aa, synthetic construct
YEARQRV

SEQ ID NO: 186536 - protein, 7 aa, synthetic construct
VPPRQRD

SEQ ID NO: 186537 - protein, 7 aa, synthetic construct
MENRIRQ

SEQ ID NO: 186538 - protein, 7 aa, synthetic construct
NEPRVRM

SEQ ID NO: 186539 - protein, 7 aa, synthetic construct
MERNVRT

SEQ ID NO: 186540 - protein, 7 aa, synthetic construct
VEPRQMR

SEQ ID NO: 186541 - protein, 7 aa, synthetic construct
PEPRQRV

SEQ ID NO: 186542 - protein, 7 aa, synthetic construct
VERNQRT

SEQ ID NO: 186543 - protein, 7 aa, synthetic construct
MIPEQRK

SEQ ID NO: 186544 - protein, 7 aa, synthetic construct
MEPALRK

SEQ ID NO: 186545 - protein, 7 aa, synthetic construct
QVPRQRD

SEQ ID NO: 186546 - protein, 7 aa, synthetic construct
MVPEQRK

SEQ ID NO: 186547 - protein, 7 aa, synthetic construct
DMPRIRT

SEQ ID NO: 186548 - protein, 7 aa, synthetic construct
MNPRDRV

SEQ ID NO: 186549 - protein, 7 aa, synthetic construct
METKQRS

SEQ ID NO: 186550 - protein, 7 aa, synthetic construct
YEARQRA

SEQ ID NO: 186551 - protein, 7 aa, synthetic construct
NEPRQSK

SEQ ID NO: 186552 - protein, 7 aa, synthetic construct
YEMRQKT

SEQ ID NO: 186553 - protein, 7 aa, synthetic construct
QEPRQAK

SEQ ID NO: 186554 - protein, 7 aa, synthetic construct
MEPGGRK

SEQ ID NO: 186555 - protein, 7 aa, synthetic construct
MEKRLRE

SEQ ID NO: 186556 - protein, 7 aa, synthetic construct
SDNRQRT

SEQ ID NO: 186557 - protein, 7 aa, synthetic construct
TEQRTRT

SEQ ID NO: 186558 - protein, 7 aa, synthetic construct
MEQQKRT

SEQ ID NO: 186559 - protein, 7 aa, synthetic construct
AESKQRT

SEQ ID NO: 186560 - protein, 7 aa, synthetic construct
MMPDQRK

SEQ ID NO: 186561 - protein, 7 aa, synthetic construct
AEPRNKT

SEQ ID NO: 186562 - protein, 7 aa, synthetic construct
VEARQRA

SEQ ID NO: 186563 - protein, 7 aa, synthetic construct
MESRTRV

SEQ ID NO: 186564 - protein, 7 aa, synthetic construct
GELRQKT

SEQ ID NO: 186565 - protein, 7 aa, synthetic construct
TVERQRT

SEQ ID NO: 186566 - protein, 7 aa, synthetic construct
MQPRIRE

SEQ ID NO: 186567 - protein, 7 aa, synthetic construct
MENRVRT

SEQ ID NO: 186568 - protein, 7 aa, synthetic construct
MDLRQRS

SEQ ID NO: 186569 - protein, 7 aa, synthetic construct
PEPRRGT

SEQ ID NO: 186570 - protein, 7 aa, synthetic construct
DAPRQRA

SEQ ID NO: 186571 - protein, 7 aa, synthetic construct
EMPRVRT

SEQ ID NO: 186572 - protein, 7 aa, synthetic construct
MEKPQRY

SEQ ID NO: 186573 - protein, 7 aa, synthetic construct
MEPRIKY

SEQ ID NO: 186574 - protein, 7 aa, synthetic construct
LDTRQRT

SEQ ID NO: 186575 - protein, 7 aa, synthetic construct
MEPRSTR

SEQ ID NO: 186576 - protein, 7 aa, synthetic construct
MEKGPRT

SEQ ID NO: 186577 - protein, 7 aa, synthetic construct
MAPRGRD

SEQ ID NO: 186578 - protein, 7 aa, synthetic construct
MEARMRQ

SEQ ID NO: 186579 - protein, 7 aa, synthetic construct
MEPRVKF

SEQ ID NO: 186580 - protein, 7 aa, synthetic construct
EQPRQRV

SEQ ID NO: 186581 - protein, 7 aa, synthetic construct
RETRQLT

SEQ ID NO: 186582 - protein, 7 aa, synthetic construct
SRPRQET

SEQ ID NO: 186583 - protein, 7 aa, synthetic construct
EPPRQRG

SEQ ID NO: 186584 - protein, 7 aa, synthetic construct
NEPRQIR

SEQ ID NO: 186585 - protein, 7 aa, synthetic construct
MEKRQMN

SEQ ID NO: 186586 - protein, 7 aa, synthetic construct
MEQRQRS

SEQ ID NO: 186587 - protein, 7 aa, synthetic construct
FEPKQRQ

SEQ ID NO: 186588 - protein, 7 aa, synthetic construct
TEPRGRS

SEQ ID NO: 186589 - protein, 7 aa, synthetic construct
MQPRQQQ

SEQ ID NO: 186590 - protein, 7 aa, synthetic construct
NEVRQRA

SEQ ID NO: 186591 - protein, 7 aa, synthetic construct
SEPRARV

SEQ ID NO: 186592 - protein, 7 aa, synthetic construct
NEPRMRG

SEQ ID NO: 186593 - protein, 7 aa, synthetic construct
VEQRTRT

SEQ ID NO: 186594 - protein, 7 aa, synthetic construct
REPSQRA

SEQ ID NO: 186595 - protein, 7 aa, synthetic construct
AERQQRT

SEQ ID NO: 186596 - protein, 7 aa, synthetic construct
NKPRQDT

SEQ ID NO: 186597 - protein, 7 aa, synthetic construct
MEPRNKY

SEQ ID NO: 186598 - protein, 7 aa, synthetic construct
LTPRDRT

SEQ ID NO: 186599 - protein, 7 aa, synthetic construct
HEPRIRQ

SEQ ID NO: 186600 - protein, 7 aa, synthetic construct
DLPRQRV

SEQ ID NO: 186601 - protein, 7 aa, synthetic construct
AEPRTRG

SEQ ID NO: 186602 - protein, 7 aa, synthetic construct
LETRQRS

SEQ ID NO: 186603 - protein, 7 aa, synthetic construct
MEARMKT

SEQ ID NO: 186604 - protein, 7 aa, synthetic construct
TEIRQKT

SEQ ID NO: 186605 - protein, 7 aa, synthetic construct
MELRSRP

SEQ ID NO: 186606 - protein, 7 aa, synthetic construct
MEQRTRG

SEQ ID NO: 186607 - protein, 7 aa, synthetic construct
LVPRERT

SEQ ID NO: 186608 - protein, 7 aa, synthetic construct
KEDRQRL

SEQ ID NO: 186609 - protein, 7 aa, synthetic construct
MEVKQRV

SEQ ID NO: 186610 - protein, 7 aa, synthetic construct
TERQQRT

SEQ ID NO: 186611 - protein, 7 aa, synthetic construct
MIPQQRQ

SEQ ID NO: 186612 - protein, 7 aa, synthetic construct
MHPRQAG

SEQ ID NO: 186613 - protein, 7 aa, synthetic construct
LEMRQRP

SEQ ID NO: 186614 - protein, 7 aa, synthetic construct
SEPKQRS

SEQ ID NO: 186615 - protein, 7 aa, synthetic construct
KELRQVT

SEQ ID NO: 186616 - protein, 7 aa, synthetic construct
MEKRSIT

SEQ ID NO: 186617 - protein, 7 aa, synthetic construct
MEPRTQR

SEQ ID NO: 186618 - protein, 7 aa, synthetic construct
LEGRQRT

SEQ ID NO: 186619 - protein, 7 aa, synthetic construct
MEVKHRT

SEQ ID NO: 186620 - protein, 7 aa, synthetic construct
MKPRDLT

SEQ ID NO: 186621 - protein, 7 aa, synthetic construct
QEARQRI

SEQ ID NO: 186622 - protein, 7 aa, synthetic construct
MEPAKRY

SEQ ID NO: 186623 - protein, 7 aa, synthetic construct
QEFKQRT

SEQ ID NO: 186624 - protein, 7 aa, synthetic construct
MVPRSRE

SEQ ID NO: 186625 - protein, 7 aa, synthetic construct
EKPRQVT

SEQ ID NO: 186626 - protein, 7 aa, synthetic construct
MEPATRK

SEQ ID NO: 186627 - protein, 7 aa, synthetic construct
EKPTQRT

SEQ ID NO: 186628 - protein, 7 aa, synthetic construct
MMARQRE

SEQ ID NO: 186629 - protein, 7 aa, synthetic construct
MESRQQK

SEQ ID NO: 186630 - protein, 7 aa, synthetic construct
MEQRQQK

SEQ ID NO: 186631 - protein, 7 aa, synthetic construct
ERPNQRT

SEQ ID NO: 186632 - protein, 7 aa, synthetic construct
MESKQRT

SEQ ID NO: 186633 - protein, 7 aa, synthetic construct
MEKRERG

SEQ ID NO: 186634 - protein, 7 aa, synthetic construct
MRPRVET

SEQ ID NO: 186635 - protein, 7 aa, synthetic construct
IEPNQRK

SEQ ID NO: 186636 - protein, 7 aa, synthetic construct
EIPRQKT

SEQ ID NO: 186637 - protein, 7 aa, synthetic construct
MEKRQIS

SEQ ID NO: 186638 - protein, 7 aa, synthetic construct
GHPRQST

SEQ ID NO: 186639 - protein, 7 aa, synthetic construct
SEVRVRT

SEQ ID NO: 186640 - protein, 7 aa, synthetic construct
LDIRQRT

SEQ ID NO: 186641 - protein, 7 aa, synthetic construct
TEPRMRL

SEQ ID NO: 186642 - protein, 7 aa, synthetic construct
AEPRGRV

SEQ ID NO: 186643 - protein, 7 aa, synthetic construct
MVPRQVQ

SEQ ID NO: 186644 - protein, 7 aa, synthetic construct
MERGIRT

SEQ ID NO: 186645 - protein, 7 aa, synthetic construct
MTPRERM

SEQ ID NO: 186646 - protein, 7 aa, synthetic construct
MPERQRN

SEQ ID NO: 186647 - protein, 7 aa, synthetic construct
MERGQRT

SEQ ID NO: 186648 - protein, 7 aa, synthetic construct
MDVRQRA

SEQ ID NO: 186649 - protein, 7 aa, synthetic construct
MKPRHDT

SEQ ID NO: 186650 - protein, 7 aa, synthetic construct
MRPRQDV

SEQ ID NO: 186651 - protein, 7 aa, synthetic construct
MEVRLRG

SEQ ID NO: 186652 - protein, 7 aa, synthetic construct
MVPRDRM

SEQ ID NO: 186653 - protein, 7 aa, synthetic construct
MESKPRT

SEQ ID NO: 186654 - protein, 7 aa, synthetic construct
QEARIRT

SEQ ID NO: 186655 - protein, 7 aa, synthetic construct
AEPKFRT

SEQ ID NO: 186656 - protein, 7 aa, synthetic construct
MEVRPRT

SEQ ID NO: 186657 - protein, 7 aa, synthetic construct
MPPRERQ

SEQ ID NO: 186658 - protein, 7 aa, synthetic construct
LEPMQRK

SEQ ID NO: 186659 - protein, 7 aa, synthetic construct
QEPRQRN

SEQ ID NO: 186660 - protein, 7 aa, synthetic construct
PNPRERT

SEQ ID NO: 186661 - protein, 7 aa, synthetic construct
RETGQRT

SEQ ID NO: 186662 - protein, 7 aa, synthetic construct
MEPRGRL

SEQ ID NO: 186663 - protein, 7 aa, synthetic construct
DVARQRT

SEQ ID NO: 186664 - protein, 7 aa, synthetic construct
MVPRMRE

SEQ ID NO: 186665 - protein, 7 aa, synthetic construct
VEPRLRG

SEQ ID NO: 186666 - protein, 7 aa, synthetic construct
VEPTQRK

SEQ ID NO: 186667 - protein, 7 aa, synthetic construct
TEPRSRV

SEQ ID NO: 186668 - protein, 7 aa, synthetic construct
MIPRPRD

SEQ ID NO: 186669 - protein, 7 aa, synthetic construct
TEPKQRM

SEQ ID NO: 186670 - protein, 7 aa, synthetic construct
MLERPRT

SEQ ID NO: 186671 - protein, 7 aa, synthetic construct
IEKRQNT

SEQ ID NO: 186672 - protein, 7 aa, synthetic construct
LNPRDRT

SEQ ID NO: 186673 - protein, 7 aa, synthetic construct
METRIRP

SEQ ID NO: 186674 - protein, 7 aa, synthetic construct
MRPVQRD

SEQ ID NO: 186675 - protein, 7 aa, synthetic construct
MLPRARE

SEQ ID NO: 186676 - protein, 7 aa, synthetic construct
MTPRQLQ

SEQ ID NO: 186677 - protein, 7 aa, synthetic construct
KEPRQHN

SEQ ID NO: 186678 - protein, 7 aa, synthetic construct
MIPRGHT

SEQ ID NO: 186679 - protein, 7 aa, synthetic construct
MGPRDRN

SEQ ID NO: 186680 - protein, 7 aa, synthetic construct
LEARQRA

SEQ ID NO: 186681 - protein, 7 aa, synthetic construct
GENKQRT

SEQ ID NO: 186682 - protein, 7 aa, synthetic construct
MEKVQRS

SEQ ID NO: 186683 - protein, 7 aa, synthetic construct
MEMRGRS

SEQ ID NO: 186684 - protein, 7 aa, synthetic construct
NEPRMRV

SEQ ID NO: 186685 - protein, 7 aa, synthetic construct
REARQMT

SEQ ID NO: 186686 - protein, 7 aa, synthetic construct
MVPRQMQ

SEQ ID NO: 186687 - protein, 7 aa, synthetic construct
MEGKQKT

SEQ ID NO: 186688 - protein, 7 aa, synthetic construct
KESRQLT

SEQ ID NO: 186689 - protein, 7 aa, synthetic construct
MEKKQRD

SEQ ID NO: 186690 - protein, 7 aa, synthetic construct
MLERTRT

SEQ ID NO: 186691 - protein, 7 aa, synthetic construct
YEPRLRQ

SEQ ID NO: 186692 - protein, 7 aa, synthetic construct
MERITRT

SEQ ID NO: 186693 - protein, 7 aa, synthetic construct
MEPAARR

SEQ ID NO: 186694 - protein, 7 aa, synthetic construct
MQPRSRE

SEQ ID NO: 186695 - protein, 7 aa, synthetic construct
ETPRLRT

SEQ ID NO: 186696 - protein, 7 aa, synthetic construct
MENRQRI

SEQ ID NO: 186697 - protein, 7 aa, synthetic construct
NEGRQRV

SEQ ID NO: 186698 - protein, 7 aa, synthetic construct
ADPRQRV

SEQ ID NO: 186699 - protein, 7 aa, synthetic construct
DKPRQYT

SEQ ID NO: 186700 - protein, 7 aa, synthetic construct
MRPRENT

SEQ ID NO: 186701 - protein, 7 aa, synthetic construct
MEPRPTK

SEQ ID NO: 186702 - protein, 7 aa, synthetic construct
MEPRGGR

SEQ ID NO: 186703 - protein, 7 aa, synthetic construct
SEPRQKS

SEQ ID NO: 186704 - protein, 7 aa, synthetic construct
REPGQRN

SEQ ID NO: 186705 - protein, 7 aa, synthetic construct
MEPARRT

SEQ ID NO: 186706 - protein, 7 aa, synthetic construct
IGERQRT

SEQ ID NO: 186707 - protein, 7 aa, synthetic construct
IVPRQRE

SEQ ID NO: 186708 - protein, 7 aa, synthetic construct
IETRTRT

SEQ ID NO: 186709 - protein, 7 aa, synthetic construct
KELRDRT

SEQ ID NO: 186710 - protein, 7 aa, synthetic construct
AHPRQAT

SEQ ID NO: 186711 - protein, 7 aa, synthetic construct
YDPRIRT

SEQ ID NO: 186712 - protein, 7 aa, synthetic construct
MVPRHTT

SEQ ID NO: 186713 - protein, 7 aa, synthetic construct
MIPRQVQ

SEQ ID NO: 186714 - protein, 7 aa, synthetic construct
MNPRRDT

SEQ ID NO: 186715 - protein, 7 aa, synthetic construct
MPPRDRM

SEQ ID NO: 186716 - protein, 7 aa, synthetic construct
MEPIRRG

SEQ ID NO: 186717 - protein, 7 aa, synthetic construct
MTPHQRQ

SEQ ID NO: 186718 - protein, 7 aa, synthetic construct
AEPRNRV

SEQ ID NO: 186719 - protein, 7 aa, synthetic construct
ELPRTRT

SEQ ID NO: 186720 - protein, 7 aa, synthetic construct
MAPRQHG

SEQ ID NO: 186721 - protein, 7 aa, synthetic construct
MMERPRT

SEQ ID NO: 186722 - protein, 7 aa, synthetic construct
LEQRQRA

SEQ ID NO: 186723 - protein, 7 aa, synthetic construct
LEPRNRA

SEQ ID NO: 186724 - protein, 7 aa, synthetic construct
MEFKQRV

SEQ ID NO: 186725 - protein, 7 aa, synthetic construct
YEPRMRG

SEQ ID NO: 186726 - protein, 7 aa, synthetic construct
GEPRLRP

SEQ ID NO: 186727 - protein, 7 aa, synthetic construct
GEPRVRN

SEQ ID NO: 186728 - protein, 7 aa, synthetic construct
MVPRQQH

SEQ ID NO: 186729 - protein, 7 aa, synthetic construct
GEPRGKT

SEQ ID NO: 186730 - protein, 7 aa, synthetic construct
DLPRQRQ

SEQ ID NO: 186731 - protein, 7 aa, synthetic construct
YEPRQTK

SEQ ID NO: 186732 - protein, 7 aa, synthetic construct
MGPRQHS

SEQ ID NO: 186733 - protein, 7 aa, synthetic construct
MEKYQRP

SEQ ID NO: 186734 - protein, 7 aa, synthetic construct
QEMRQRV

SEQ ID NO: 186735 - protein, 7 aa, synthetic construct
YEKRQIT

SEQ ID NO: 186736 - protein, 7 aa, synthetic construct
NEPKQRQ

SEQ ID NO: 186737 - protein, 7 aa, synthetic construct
MEPATRR

SEQ ID NO: 186738 - protein, 7 aa, synthetic construct
MEPRMKQ

SEQ ID NO: 186739 - protein, 7 aa, synthetic construct
LEPVRRT

SEQ ID NO: 186740 - protein, 7 aa, synthetic construct
MEQRIRA

SEQ ID NO: 186741 - protein, 7 aa, synthetic construct
TEPVKRT

SEQ ID NO: 186742 - protein, 7 aa, synthetic construct
MIDRQRQ

SEQ ID NO: 186743 - protein, 7 aa, synthetic construct
KEPHQRQ

SEQ ID NO: 186744 - protein, 7 aa, synthetic construct
MEARMRS

SEQ ID NO: 186745 - protein, 7 aa, synthetic construct
HEPKQRQ

SEQ ID NO: 186746 - protein, 7 aa, synthetic construct
MEKRQMQ

SEQ ID NO: 186747 - protein, 7 aa, synthetic construct
MESRARV

SEQ ID NO: 186748 - protein, 7 aa, synthetic construct
QDPRQRG

SEQ ID NO: 186749 - protein, 7 aa, synthetic construct
FEKQQRT

SEQ ID NO: 186750 - protein, 7 aa, synthetic construct
TEKHQRT

SEQ ID NO: 186751 - protein, 7 aa, synthetic construct
AEPRQLK

SEQ ID NO: 186752 - protein, 7 aa, synthetic construct
MVPSQRG

SEQ ID NO: 186753 - protein, 7 aa, synthetic construct
DRPRQST

SEQ ID NO: 186754 - protein, 7 aa, synthetic construct
MEQRVRV

SEQ ID NO: 186755 - protein, 7 aa, synthetic construct
MIPRQTA

SEQ ID NO: 186756 - protein, 7 aa, synthetic construct
QEPVKRT

SEQ ID NO: 186757 - protein, 7 aa, synthetic construct
MEKNQRY

SEQ ID NO: 186758 - protein, 7 aa, synthetic construct
GPDRQRT

SEQ ID NO: 186759 - protein, 7 aa, synthetic construct
MEPRGMR

SEQ ID NO: 186760 - protein, 7 aa, synthetic construct
VEQRQRV

SEQ ID NO: 186761 - protein, 7 aa, synthetic construct
MEIRVRP

SEQ ID NO: 186762 - protein, 7 aa, synthetic construct
METRQKG

SEQ ID NO: 186763 - protein, 7 aa, synthetic construct
LRPRQDT

SEQ ID NO: 186764 - protein, 7 aa, synthetic construct
MVNRQRE

SEQ ID NO: 186765 - protein, 7 aa, synthetic construct
MLPRQHS

SEQ ID NO: 186766 - protein, 7 aa, synthetic construct
DKPHQRT

SEQ ID NO: 186767 - protein, 7 aa, synthetic construct
PDPRQRG

SEQ ID NO: 186768 - protein, 7 aa, synthetic construct
IPERQRT

SEQ ID NO: 186769 - protein, 7 aa, synthetic construct
AEPRPKT

SEQ ID NO: 186770 - protein, 7 aa, synthetic construct
VETRLRT

SEQ ID NO: 186771 - protein, 7 aa, synthetic construct
MEPPKRM

SEQ ID NO: 186772 - protein, 7 aa, synthetic construct
MQPRDRM

SEQ ID NO: 186773 - protein, 7 aa, synthetic construct
DTQRQRT

SEQ ID NO: 186774 - protein, 7 aa, synthetic construct
MKPRQYD

SEQ ID NO: 186775 - protein, 7 aa, synthetic construct
NEPRVRG

SEQ ID NO: 186776 - protein, 7 aa, synthetic construct
METRQSK

SEQ ID NO: 186777 - protein, 7 aa, synthetic construct
IEPTQRK

SEQ ID NO: 186778 - protein, 7 aa, synthetic construct
NEPRQAR

SEQ ID NO: 186779 - protein, 7 aa, synthetic construct
MEPKARF

SEQ ID NO: 186780 - protein, 7 aa, synthetic construct
DVPRQRV

SEQ ID NO: 186781 - protein, 7 aa, synthetic construct
PEPRTRV

SEQ ID NO: 186782 - protein, 7 aa, synthetic construct
METRTRN

SEQ ID NO: 186783 - protein, 7 aa, synthetic construct
VEPRMRN

SEQ ID NO: 186784 - protein, 7 aa, synthetic construct
EIPRVRT

SEQ ID NO: 186785 - protein, 7 aa, synthetic construct
IEPRQRI

SEQ ID NO: 186786 - protein, 7 aa, synthetic construct
KEPRQYQ

SEQ ID NO: 186787 - protein, 7 aa, synthetic construct
MEKRQHT

SEQ ID NO: 186788 - protein, 7 aa, synthetic construct
KVPRQDT

SEQ ID NO: 186789 - protein, 7 aa, synthetic construct
DIPRQRG

SEQ ID NO: 186790 - protein, 7 aa, synthetic construct
REPRHLT

SEQ ID NO: 186791 - protein, 7 aa, synthetic construct
PEPRVRS

SEQ ID NO: 186792 - protein, 7 aa, synthetic construct
MPQRQRD

SEQ ID NO: 186793 - protein, 7 aa, synthetic construct
MRPRQDM

SEQ ID NO: 186794 - protein, 7 aa, synthetic construct
METKQRL

SEQ ID NO: 186795 - protein, 7 aa, synthetic construct
DAPRQRI

SEQ ID NO: 186796 - protein, 7 aa, synthetic construct
MEARMRA

SEQ ID NO: 186797 - protein, 7 aa, synthetic construct
MEPRMSR

SEQ ID NO: 186798 - protein, 7 aa, synthetic construct
MDPGQRK

SEQ ID NO: 186799 - protein, 7 aa, synthetic construct
LETRQKT

SEQ ID NO: 186800 - protein, 7 aa, synthetic construct
VEPRNRQ

SEQ ID NO: 186801 - protein, 7 aa, synthetic construct
TEQRQRA

SEQ ID NO: 186802 - protein, 7 aa, synthetic construct
IENRSRT

SEQ ID NO: 186803 - protein, 7 aa, synthetic construct
MEARLRS

SEQ ID NO: 186804 - protein, 7 aa, synthetic construct
MEPRNMR

SEQ ID NO: 186805 - protein, 7 aa, synthetic construct
NEPRSRA

SEQ ID NO: 186806 - protein, 7 aa, synthetic construct
MQPRHST

SEQ ID NO: 186807 - protein, 7 aa, synthetic construct
MEKRQTM

SEQ ID NO: 186808 - protein, 7 aa, synthetic construct
VEFKQRT

SEQ ID NO: 186809 - protein, 7 aa, synthetic construct
VEPRVRI

SEQ ID NO: 186810 - protein, 7 aa, synthetic construct
MPLRQRE

SEQ ID NO: 186811 - protein, 7 aa, synthetic construct
LEKRDRT

SEQ ID NO: 186812 - protein, 7 aa, synthetic construct
DLPRSRT

SEQ ID NO: 186813 - protein, 7 aa, synthetic construct
LEPRPRI

SEQ ID NO: 186814 - protein, 7 aa, synthetic construct
VIPRQNT

SEQ ID NO: 186815 - protein, 7 aa, synthetic construct
MLPRQNQ

SEQ ID NO: 186816 - protein, 7 aa, synthetic construct
TEPRRST

SEQ ID NO: 186817 - protein, 7 aa, synthetic construct
MEARPRV

SEQ ID NO: 186818 - protein, 7 aa, synthetic construct
MENRQVR

SEQ ID NO: 186819 - protein, 7 aa, synthetic construct
MEKTQRF

SEQ ID NO: 186820 - protein, 7 aa, synthetic construct
TEPQRRT

SEQ ID NO: 186821 - protein, 7 aa, synthetic construct
MENQQRK

SEQ ID NO: 186822 - protein, 7 aa, synthetic construct
REPRANT

SEQ ID NO: 186823 - protein, 7 aa, synthetic construct
MEVRARP

SEQ ID NO: 186824 - protein, 7 aa, synthetic construct
LEPTQRK

SEQ ID NO: 186825 - protein, 7 aa, synthetic construct
HEPGKRT

SEQ ID NO: 186826 - protein, 7 aa, synthetic construct
MNPRSRE

SEQ ID NO: 186827 - protein, 7 aa, synthetic construct
METRNRV

SEQ ID NO: 186828 - protein, 7 aa, synthetic construct
MIPNQRQ

SEQ ID NO: 186829 - protein, 7 aa, synthetic construct
VESRQRP

SEQ ID NO: 186830 - protein, 7 aa, synthetic construct
MLPRERS

SEQ ID NO: 186831 - protein, 7 aa, synthetic construct
MEPRPRQ

SEQ ID NO: 186832 - protein, 7 aa, synthetic construct
DPPRNRT

SEQ ID NO: 186833 - protein, 7 aa, synthetic construct
MEPRAGK

SEQ ID NO: 186834 - protein, 7 aa, synthetic construct
IEIRQRG

SEQ ID NO: 186835 - protein, 7 aa, synthetic construct
MSPRTRD

SEQ ID NO: 186836 - protein, 7 aa, synthetic construct
MEAKVRT

SEQ ID NO: 186837 - protein, 7 aa, synthetic construct
HEPRMRV

SEQ ID NO: 186838 - protein, 7 aa, synthetic construct
DQPRGRT

SEQ ID NO: 186839 - protein, 7 aa, synthetic construct
MAKRQET

SEQ ID NO: 186840 - protein, 7 aa, synthetic construct
KEPYQRM

SEQ ID NO: 186841 - protein, 7 aa, synthetic construct
REDRVRT

SEQ ID NO: 186842 - protein, 7 aa, synthetic construct
KEERQRA

SEQ ID NO: 186843 - protein, 7 aa, synthetic construct
MEKFQRG

SEQ ID NO: 186844 - protein, 7 aa, synthetic construct
SAPRQRD

SEQ ID NO: 186845 - protein, 7 aa, synthetic construct
QEPAQRK

SEQ ID NO: 186846 - protein, 7 aa, synthetic construct
PEPKQRS

SEQ ID NO: 186847 - protein, 7 aa, synthetic construct
MEAKQRT

SEQ ID NO: 186848 - protein, 7 aa, synthetic construct
MAPEQRK

SEQ ID NO: 186849 - protein, 7 aa, synthetic construct
MEPRAFK

SEQ ID NO: 186850 - protein, 7 aa, synthetic construct
YKPRQDT

SEQ ID NO: 186851 - protein, 7 aa, synthetic construct
MPARQRE

SEQ ID NO: 186852 - protein, 7 aa, synthetic construct
IEPRMRQ

SEQ ID NO: 186853 - protein, 7 aa, synthetic construct
TEKRQST

SEQ ID NO: 186854 - protein, 7 aa, synthetic construct
REPVQRT

SEQ ID NO: 186855 - protein, 7 aa, synthetic construct
NERTQRT

SEQ ID NO: 186856 - protein, 7 aa, synthetic construct
FEKRQAT

SEQ ID NO: 186857 - protein, 7 aa, synthetic construct
FEPRARS

SEQ ID NO: 186858 - protein, 7 aa, synthetic construct
MFPRQKE

SEQ ID NO: 186859 - protein, 7 aa, synthetic construct
VELRGRT

SEQ ID NO: 186860 - protein, 7 aa, synthetic construct
MAERQRA

SEQ ID NO: 186861 - protein, 7 aa, synthetic construct
MEMKVRT

SEQ ID NO: 186862 - protein, 7 aa, synthetic construct
MEPRPVR

SEQ ID NO: 186863 - protein, 7 aa, synthetic construct
MTDRQRM

SEQ ID NO: 186864 - protein, 7 aa, synthetic construct
MEARMRV

SEQ ID NO: 186865 - protein, 7 aa, synthetic construct
MEKNQRA

SEQ ID NO: 186866 - protein, 7 aa, synthetic construct
MEKMART

SEQ ID NO: 186867 - protein, 7 aa, synthetic construct
TEVRPRT

SEQ ID NO: 186868 - protein, 7 aa, synthetic construct
MVPRTRD

SEQ ID NO: 186869 - protein, 7 aa, synthetic construct
MESRVKT

SEQ ID NO: 186870 - protein, 7 aa, synthetic construct
TEPKHRT

SEQ ID NO: 186871 - protein, 7 aa, synthetic construct
REGRQAT

SEQ ID NO: 186872 - protein, 7 aa, synthetic construct
GEGKQRT

SEQ ID NO: 186873 - protein, 7 aa, synthetic construct
TEPGKRT

SEQ ID NO: 186874 - protein, 7 aa, synthetic construct
SMTAKRD

SEQ ID NO: 186875 - protein, 7 aa, synthetic construct
TGTRAKD

SEQ ID NO: 186876 - protein, 7 aa, synthetic construct
NMKRAID

SEQ ID NO: 186877 - protein, 7 aa, synthetic construct
DLTRARS

SEQ ID NO: 186878 - protein, 7 aa, synthetic construct
NMTRLRE

SEQ ID NO: 186879 - protein, 7 aa, synthetic construct
NMKRIAD

SEQ ID NO: 186880 - protein, 7 aa, synthetic construct
NIARIRD

SEQ ID NO: 186881 - protein, 7 aa, synthetic construct
NKERSRD

SEQ ID NO: 186882 - protein, 7 aa, synthetic construct
EMTKARM

SEQ ID NO: 186883 - protein, 7 aa, synthetic construct
NMTKDRY

SEQ ID NO: 186884 - protein, 7 aa, synthetic construct
ILPRARD

SEQ ID NO: 186885 - protein, 7 aa, synthetic construct
NMVQKRD

SEQ ID NO: 186886 - protein, 7 aa, synthetic construct
AAVRARD

SEQ ID NO: 186887 - protein, 7 aa, synthetic construct
NMPRERI

SEQ ID NO: 186888 - protein, 7 aa, synthetic construct
TDTRARV

SEQ ID NO: 186889 - protein, 7 aa, synthetic construct
NFTKARE

SEQ ID NO: 186890 - protein, 7 aa, synthetic construct
NVERARP

SEQ ID NO: 186891 - protein, 7 aa, synthetic construct
NDKRLRD

SEQ ID NO: 186892 - protein, 7 aa, synthetic construct
YMERARG

SEQ ID NO: 186893 - protein, 7 aa, synthetic construct
FTTRAKD

SEQ ID NO: 186894 - protein, 7 aa, synthetic construct
NMTRQDK

SEQ ID NO: 186895 - protein, 7 aa, synthetic construct
NMMKVRD

SEQ ID NO: 186896 - protein, 7 aa, synthetic construct
NMTQRRE

SEQ ID NO: 186897 - protein, 7 aa, synthetic construct
TVTRAKD

SEQ ID NO: 186898 - protein, 7 aa, synthetic construct
TTTRTRD

SEQ ID NO: 186899 - protein, 7 aa, synthetic construct
NETRMRT

SEQ ID NO: 186900 - protein, 7 aa, synthetic construct
KMTRSMD

SEQ ID NO: 186901 - protein, 7 aa, synthetic construct
QGTRVRD

SEQ ID NO: 186902 - protein, 7 aa, synthetic construct
QMTRIRE

SEQ ID NO: 186903 - protein, 7 aa, synthetic construct
TLTRARD

SEQ ID NO: 186904 - protein, 7 aa, synthetic construct
GMVRTRD

SEQ ID NO: 186905 - protein, 7 aa, synthetic construct
NMPPARY

SEQ ID NO: 186906 - protein, 7 aa, synthetic construct
NKTRQSD

SEQ ID NO: 186907 - protein, 7 aa, synthetic construct
FMTNARA

SEQ ID NO: 186908 - protein, 7 aa, synthetic construct
EMTKARY

SEQ ID NO: 186909 - protein, 7 aa, synthetic construct
NMATKRD

SEQ ID NO: 186910 - protein, 7 aa, synthetic construct
TRTQARD

SEQ ID NO: 186911 - protein, 7 aa, synthetic construct
NNRPARD

SEQ ID NO: 186912 - protein, 7 aa, synthetic construct
KMTRSLD

SEQ ID NO: 186913 - protein, 7 aa, synthetic construct
NSLRMRD

SEQ ID NO: 186914 - protein, 7 aa, synthetic construct
NMSRVKD

SEQ ID NO: 186915 - protein, 7 aa, synthetic construct
AMTRAAH

SEQ ID NO: 186916 - protein, 7 aa, synthetic construct
NETRTRT

SEQ ID NO: 186917 - protein, 7 aa, synthetic construct
NMGRLKD

SEQ ID NO: 186918 - protein, 7 aa, synthetic construct
HMKQARD

SEQ ID NO: 186919 - protein, 7 aa, synthetic construct
LGTRIRD

SEQ ID NO: 186920 - protein, 7 aa, synthetic construct
NTMRGRD

SEQ ID NO: 186921 - protein, 7 aa, synthetic construct
NNPRMRD

SEQ ID NO: 186922 - protein, 7 aa, synthetic construct
NPTRNRE

SEQ ID NO: 186923 - protein, 7 aa, synthetic construct
HMNKARD

SEQ ID NO: 186924 - protein, 7 aa, synthetic construct
FDTRARV

SEQ ID NO: 186925 - protein, 7 aa, synthetic construct
NKVRASD

SEQ ID NO: 186926 - protein, 7 aa, synthetic construct
QMERARN

SEQ ID NO: 186927 - protein, 7 aa, synthetic construct
VDTRARS

SEQ ID NO: 186928 - protein, 7 aa, synthetic construct
TRTIARD

SEQ ID NO: 186929 - protein, 7 aa, synthetic construct
TMTRAAL

SEQ ID NO: 186930 - protein, 7 aa, synthetic construct
NPLRARD

SEQ ID NO: 186931 - protein, 7 aa, synthetic construct
NMTRPDR

SEQ ID NO: 186932 - protein, 7 aa, synthetic construct
LMTRAEK

SEQ ID NO: 186933 - protein, 7 aa, synthetic construct
GMTRQKD

SEQ ID NO: 186934 - protein, 7 aa, synthetic construct
NMTRSDR

SEQ ID NO: 186935 - protein, 7 aa, synthetic construct
NADRARQ

SEQ ID NO: 186936 - protein, 7 aa, synthetic construct
VPARARD

SEQ ID NO: 186937 - protein, 7 aa, synthetic construct
NMLQKRD

SEQ ID NO: 186938 - protein, 7 aa, synthetic construct
YMTRASQ

SEQ ID NO: 186939 - protein, 7 aa, synthetic construct
LNTRVRD

SEQ ID NO: 186940 - protein, 7 aa, synthetic construct
TMTRQRD

SEQ ID NO: 186941 - protein, 7 aa, synthetic construct
NMTRPHT

SEQ ID NO: 186942 - protein, 7 aa, synthetic construct
VMKRAGD

SEQ ID NO: 186943 - protein, 7 aa, synthetic construct
NPQRTRD

SEQ ID NO: 186944 - protein, 7 aa, synthetic construct
NDTRAFK

SEQ ID NO: 186945 - protein, 7 aa, synthetic construct
NPARIRD

SEQ ID NO: 186946 - protein, 7 aa, synthetic construct
NETRIRT

SEQ ID NO: 186947 - protein, 7 aa, synthetic construct
GMARAKD

SEQ ID NO: 186948 - protein, 7 aa, synthetic construct
AKTRERD

SEQ ID NO: 186949 - protein, 7 aa, synthetic construct
MMTHARS

SEQ ID NO: 186950 - protein, 7 aa, synthetic construct
SMLRAKD

SEQ ID NO: 186951 - protein, 7 aa, synthetic construct
IMDRARP

SEQ ID NO: 186952 - protein, 7 aa, synthetic construct
NMVRGRD

SEQ ID NO: 186953 - protein, 7 aa, synthetic construct
NLQRARE

SEQ ID NO: 186954 - protein, 7 aa, synthetic construct
NMRLAKD

SEQ ID NO: 186955 - protein, 7 aa, synthetic construct
TMPRMRD

SEQ ID NO: 186956 - protein, 7 aa, synthetic construct
NEPRARQ

SEQ ID NO: 186957 - protein, 7 aa, synthetic construct
VMQKARD

SEQ ID NO: 186958 - protein, 7 aa, synthetic construct
NYTRAKE

SEQ ID NO: 186959 - protein, 7 aa, synthetic construct
NETRAKA

SEQ ID NO: 186960 - protein, 7 aa, synthetic construct
NMLRKQD

SEQ ID NO: 186961 - protein, 7 aa, synthetic construct
AMARIRD

SEQ ID NO: 186962 - protein, 7 aa, synthetic construct
NLSRTRD

SEQ ID NO: 186963 - protein, 7 aa, synthetic construct
NMIRKND

SEQ ID NO: 186964 - protein, 7 aa, synthetic construct
TATRTRD

SEQ ID NO: 186965 - protein, 7 aa, synthetic construct
NTTRDRL

SEQ ID NO: 186966 - protein, 7 aa, synthetic construct
PMTMKRD

SEQ ID NO: 186967 - protein, 7 aa, synthetic construct
SMRVARD

SEQ ID NO: 186968 - protein, 7 aa, synthetic construct
NMKIPRD

SEQ ID NO: 186969 - protein, 7 aa, synthetic construct
VKTRAFD

SEQ ID NO: 186970 - protein, 7 aa, synthetic construct
NLERARS

SEQ ID NO: 186971 - protein, 7 aa, synthetic construct
NDIRARV

SEQ ID NO: 186972 - protein, 7 aa, synthetic construct
TMPRAKD

SEQ ID NO: 186973 - protein, 7 aa, synthetic construct
LMSRGRD

SEQ ID NO: 186974 - protein, 7 aa, synthetic construct
AMMKARD

SEQ ID NO: 186975 - protein, 7 aa, synthetic construct
LMVRAKD

SEQ ID NO: 186976 - protein, 7 aa, synthetic construct
NQTVKRD

SEQ ID NO: 186977 - protein, 7 aa, synthetic construct
KMVRATD

SEQ ID NO: 186978 - protein, 7 aa, synthetic construct
DPTRARV

SEQ ID NO: 186979 - protein, 7 aa, synthetic construct
NPNRMRD

SEQ ID NO: 186980 - protein, 7 aa, synthetic construct
NMTRDKN

SEQ ID NO: 186981 - protein, 7 aa, synthetic construct
NDTRGRL

SEQ ID NO: 186982 - protein, 7 aa, synthetic construct
NMKYAKD

SEQ ID NO: 186983 - protein, 7 aa, synthetic construct
NPLRPRD

SEQ ID NO: 186984 - protein, 7 aa, synthetic construct
NMTPHRG

SEQ ID NO: 186985 - protein, 7 aa, synthetic construct
VMKHARD

SEQ ID NO: 186986 - protein, 7 aa, synthetic construct
KNTRERD

SEQ ID NO: 186987 - protein, 7 aa, synthetic construct
NMTYAKG

SEQ ID NO: 186988 - protein, 7 aa, synthetic construct
VDTRARQ

SEQ ID NO: 186989 - protein, 7 aa, synthetic construct
NMITARA

SEQ ID NO: 186990 - protein, 7 aa, synthetic construct
RMDRVRD

SEQ ID NO: 186991 - protein, 7 aa, synthetic construct
NMLRADK

SEQ ID NO: 186992 - protein, 7 aa, synthetic construct
NMDRIRI

SEQ ID NO: 186993 - protein, 7 aa, synthetic construct
EMTRAKM

SEQ ID NO: 186994 - protein, 7 aa, synthetic construct
NPTKSRD

SEQ ID NO: 186995 - protein, 7 aa, synthetic construct
NMPRAHQ

SEQ ID NO: 186996 - protein, 7 aa, synthetic construct
NQLRGRD

SEQ ID NO: 186997 - protein, 7 aa, synthetic construct
NMPNARG

SEQ ID NO: 186998 - protein, 7 aa, synthetic construct
NLTRERA

SEQ ID NO: 186999 - protein, 7 aa, synthetic construct
NIVRGRD

SEQ ID NO: 187000 - protein, 7 aa, synthetic construct
NMVKQRD

SEQ ID NO: 187001 - protein, 7 aa, synthetic construct
AMVRARE

SEQ ID NO: 187002 - protein, 7 aa, synthetic construct
NMERARS

SEQ ID NO: 187003 - protein, 7 aa, synthetic construct
DMVRARS

SEQ ID NO: 187004 - protein, 7 aa, synthetic construct
VMTTARA

SEQ ID NO: 187005 - protein, 7 aa, synthetic construct
NDTKARS

SEQ ID NO: 187006 - protein, 7 aa, synthetic construct
NQVKARD

SEQ ID NO: 187007 - protein, 7 aa, synthetic construct
DMVRARV

SEQ ID NO: 187008 - protein, 7 aa, synthetic construct
QRTVARD

SEQ ID NO: 187009 - protein, 7 aa, synthetic construct
FMTKARD

SEQ ID NO: 187010 - protein, 7 aa, synthetic construct
NVTRSRE

SEQ ID NO: 187011 - protein, 7 aa, synthetic construct
NMRLSRD

SEQ ID NO: 187012 - protein, 7 aa, synthetic construct
NDTRQRI

SEQ ID NO: 187013 - protein, 7 aa, synthetic construct
NMDRARG

SEQ ID NO: 187014 - protein, 7 aa, synthetic construct
VMTRANM

SEQ ID NO: 187015 - protein, 7 aa, synthetic construct
MMTTARG

SEQ ID NO: 187016 - protein, 7 aa, synthetic construct
QMTTARG

SEQ ID NO: 187017 - protein, 7 aa, synthetic construct
GVTRAKD

SEQ ID NO: 187018 - protein, 7 aa, synthetic construct
SMQRQRD

SEQ ID NO: 187019 - protein, 7 aa, synthetic construct
NKDRNRD

SEQ ID NO: 187020 - protein, 7 aa, synthetic construct
NRTLGRD

SEQ ID NO: 187021 - protein, 7 aa, synthetic construct
NMFKARE

SEQ ID NO: 187022 - protein, 7 aa, synthetic construct
AQTRLRD

SEQ ID NO: 187023 - protein, 7 aa, synthetic construct
NKPRAID

SEQ ID NO: 187024 - protein, 7 aa, synthetic construct
NMDRARM

SEQ ID NO: 187025 - protein, 7 aa, synthetic construct
LPTRQRD

SEQ ID NO: 187026 - protein, 7 aa, synthetic construct
LMTSARA

SEQ ID NO: 187027 - protein, 7 aa, synthetic construct
RPTPARD

SEQ ID NO: 187028 - protein, 7 aa, synthetic construct
YMNRARE

SEQ ID NO: 187029 - protein, 7 aa, synthetic construct
KMTQHRD

SEQ ID NO: 187030 - protein, 7 aa, synthetic construct
FKTRASD

SEQ ID NO: 187031 - protein, 7 aa, synthetic construct
NMERVRM

SEQ ID NO: 187032 - protein, 7 aa, synthetic construct
VMTRASH

SEQ ID NO: 187033 - protein, 7 aa, synthetic construct
NYTQKRD

SEQ ID NO: 187034 - protein, 7 aa, synthetic construct
NMERTRP

SEQ ID NO: 187035 - protein, 7 aa, synthetic construct
NETRSRP

SEQ ID NO: 187036 - protein, 7 aa, synthetic construct
DMTRARA

SEQ ID NO: 187037 - protein, 7 aa, synthetic construct
AMTRERL

SEQ ID NO: 187038 - protein, 7 aa, synthetic construct
NVRAARD

SEQ ID NO: 187039 - protein, 7 aa, synthetic construct
HMTKNRD

SEQ ID NO: 187040 - protein, 7 aa, synthetic construct
IMNRVRD

SEQ ID NO: 187041 - protein, 7 aa, synthetic construct
KMMRASD

SEQ ID NO: 187042 - protein, 7 aa, synthetic construct
NMTHLRS

SEQ ID NO: 187043 - protein, 7 aa, synthetic construct
NITHARI

SEQ ID NO: 187044 - protein, 7 aa, synthetic construct
MMTRAAQ

SEQ ID NO: 187045 - protein, 7 aa, synthetic construct
NMTRVER

SEQ ID NO: 187046 - protein, 7 aa, synthetic construct
NPERART

SEQ ID NO: 187047 - protein, 7 aa, synthetic construct
NMARGKD

SEQ ID NO: 187048 - protein, 7 aa, synthetic construct
YMTKARD

SEQ ID NO: 187049 - protein, 7 aa, synthetic construct
NMEKARG

SEQ ID NO: 187050 - protein, 7 aa, synthetic construct
ALTRTRD

SEQ ID NO: 187051 - protein, 7 aa, synthetic construct
NMIPKRD

SEQ ID NO: 187052 - protein, 7 aa, synthetic construct
NTVRLRD

SEQ ID NO: 187053 - protein, 7 aa, synthetic construct
NLTGRRD

SEQ ID NO: 187054 - protein, 7 aa, synthetic construct
NKVRAGD

SEQ ID NO: 187055 - protein, 7 aa, synthetic construct
NDPRARI

SEQ ID NO: 187056 - protein, 7 aa, synthetic construct
IMERARG

SEQ ID NO: 187057 - protein, 7 aa, synthetic construct
VMQRARE

SEQ ID NO: 187058 - protein, 7 aa, synthetic construct
AMKRAQD

SEQ ID NO: 187059 - protein, 7 aa, synthetic construct
TMNKARD

SEQ ID NO: 187060 - protein, 7 aa, synthetic construct
NETRAAR

SEQ ID NO: 187061 - protein, 7 aa, synthetic construct
NMTRRTE

SEQ ID NO: 187062 - protein, 7 aa, synthetic construct
NMERQRQ

SEQ ID NO: 187063 - protein, 7 aa, synthetic construct
NKIHARD

SEQ ID NO: 187064 - protein, 7 aa, synthetic construct
RMTTARD

SEQ ID NO: 187065 - protein, 7 aa, synthetic construct
NMVIKRD

SEQ ID NO: 187066 - protein, 7 aa, synthetic construct
NEQRARA

SEQ ID NO: 187067 - protein, 7 aa, synthetic construct
GNTKARD

SEQ ID NO: 187068 - protein, 7 aa, synthetic construct
TTTRAKD

SEQ ID NO: 187069 - protein, 7 aa, synthetic construct
NKQRALD

SEQ ID NO: 187070 - protein, 7 aa, synthetic construct
PMKRERD

SEQ ID NO: 187071 - protein, 7 aa, synthetic construct
NYKMARD

SEQ ID NO: 187072 - protein, 7 aa, synthetic construct
NLTRRGD

SEQ ID NO: 187073 - protein, 7 aa, synthetic construct
NVGRAKD

SEQ ID NO: 187074 - protein, 7 aa, synthetic construct
KMSRAVD

SEQ ID NO: 187075 - protein, 7 aa, synthetic construct
LPTRNRD

SEQ ID NO: 187076 - protein, 7 aa, synthetic construct
NMGRIRE

SEQ ID NO: 187077 - protein, 7 aa, synthetic construct
LKTRAMD

SEQ ID NO: 187078 - protein, 7 aa, synthetic construct
NMSHARA

SEQ ID NO: 187079 - protein, 7 aa, synthetic construct
GMTIARA

SEQ ID NO: 187080 - protein, 7 aa, synthetic construct
LKTRAID

SEQ ID NO: 187081 - protein, 7 aa, synthetic construct
NMDRLRA

SEQ ID NO: 187082 - protein, 7 aa, synthetic construct
NETRAPR

SEQ ID NO: 187083 - protein, 7 aa, synthetic construct
NMPRNRD

SEQ ID NO: 187084 - protein, 7 aa, synthetic construct
SLTRGRD

SEQ ID NO: 187085 - protein, 7 aa, synthetic construct
NVGRVRD

SEQ ID NO: 187086 - protein, 7 aa, synthetic construct
NTTRKSD

SEQ ID NO: 187087 - protein, 7 aa, synthetic construct
NVTRPKD

SEQ ID NO: 187088 - protein, 7 aa, synthetic construct
NMAARRD

SEQ ID NO: 187089 - protein, 7 aa, synthetic construct
NMRGVRD

SEQ ID NO: 187090 - protein, 7 aa, synthetic construct
NMFKVRD

SEQ ID NO: 187091 - protein, 7 aa, synthetic construct
NLTRQRE

SEQ ID NO: 187092 - protein, 7 aa, synthetic construct
NDTGARK

SEQ ID NO: 187093 - protein, 7 aa, synthetic construct
NMLLKRD

SEQ ID NO: 187094 - protein, 7 aa, synthetic construct
NMDRMRV

SEQ ID NO: 187095 - protein, 7 aa, synthetic construct
SMPRTRD

SEQ ID NO: 187096 - protein, 7 aa, synthetic construct
FMKRAAD

SEQ ID NO: 187097 - protein, 7 aa, synthetic construct
TMDRARQ

SEQ ID NO: 187098 - protein, 7 aa, synthetic construct
VPTRQRD

SEQ ID NO: 187099 - protein, 7 aa, synthetic construct
MGTRARE

SEQ ID NO: 187100 - protein, 7 aa, synthetic construct
NPNRAKD

SEQ ID NO: 187101 - protein, 7 aa, synthetic construct
NVERARA

SEQ ID NO: 187102 - protein, 7 aa, synthetic construct
AMKRAMD

SEQ ID NO: 187103 - protein, 7 aa, synthetic construct
QMPRAKD

SEQ ID NO: 187104 - protein, 7 aa, synthetic construct
FPTRGRD

SEQ ID NO: 187105 - protein, 7 aa, synthetic construct
NDPRART

SEQ ID NO: 187106 - protein, 7 aa, synthetic construct
AMTRNKD

SEQ ID NO: 187107 - protein, 7 aa, synthetic construct
AQTRARE

SEQ ID NO: 187108 - protein, 7 aa, synthetic construct
LITRAKD

SEQ ID NO: 187109 - protein, 7 aa, synthetic construct
MMTRATN

SEQ ID NO: 187110 - protein, 7 aa, synthetic construct
NMPRERT

SEQ ID NO: 187111 - protein, 7 aa, synthetic construct
TMRLARD

SEQ ID NO: 187112 - protein, 7 aa, synthetic construct
NETKARL

SEQ ID NO: 187113 - protein, 7 aa, synthetic construct
IMTDARK

SEQ ID NO: 187114 - protein, 7 aa, synthetic construct
NMGRTRD

SEQ ID NO: 187115 - protein, 7 aa, synthetic construct
NETRTRG

SEQ ID NO: 187116 - protein, 7 aa, synthetic construct
NAPRMRD

SEQ ID NO: 187117 - protein, 7 aa, synthetic construct
NDTRASK

SEQ ID NO: 187118 - protein, 7 aa, synthetic construct
NMKRAEI

SEQ ID NO: 187119 - protein, 7 aa, synthetic construct
GMKRAMD

SEQ ID NO: 187120 - protein, 7 aa, synthetic construct
NMTRERT

SEQ ID NO: 187121 - protein, 7 aa, synthetic construct
VLARARD

SEQ ID NO: 187122 - protein, 7 aa, synthetic construct
EMTKART

SEQ ID NO: 187123 - protein, 7 aa, synthetic construct
NMTISRA

SEQ ID NO: 187124 - protein, 7 aa, synthetic construct
KPTHARD

SEQ ID NO: 187125 - protein, 7 aa, synthetic construct
QMGKARD

SEQ ID NO: 187126 - protein, 7 aa, synthetic construct
TATRVRD

SEQ ID NO: 187127 - protein, 7 aa, synthetic construct
FATRAKD

SEQ ID NO: 187128 - protein, 7 aa, synthetic construct
KMTRTND

SEQ ID NO: 187129 - protein, 7 aa, synthetic construct
SMKRAVD

SEQ ID NO: 187130 - protein, 7 aa, synthetic construct
NLTRPKD

SEQ ID NO: 187131 - protein, 7 aa, synthetic construct
DMTKARV

SEQ ID NO: 187132 - protein, 7 aa, synthetic construct
NETAARK

SEQ ID NO: 187133 - protein, 7 aa, synthetic construct
NMKRATD

SEQ ID NO: 187134 - protein, 7 aa, synthetic construct
NTDRARN

SEQ ID NO: 187135 - protein, 7 aa, synthetic construct
NMTHLRA

SEQ ID NO: 187136 - protein, 7 aa, synthetic construct
NMERGRA

SEQ ID NO: 187137 - protein, 7 aa, synthetic construct
NMQVRRD

SEQ ID NO: 187138 - protein, 7 aa, synthetic construct
TLTRMRD

SEQ ID NO: 187139 - protein, 7 aa, synthetic construct
ASTRLRD

SEQ ID NO: 187140 - protein, 7 aa, synthetic construct
NESRARP

SEQ ID NO: 187141 - protein, 7 aa, synthetic construct
HMTVKRD

SEQ ID NO: 187142 - protein, 7 aa, synthetic construct
IMARNRD

SEQ ID NO: 187143 - protein, 7 aa, synthetic construct
NMKRLLD

SEQ ID NO: 187144 - protein, 7 aa, synthetic construct
NLPRVRD

SEQ ID NO: 187145 - protein, 7 aa, synthetic construct
TMVRTRD

SEQ ID NO: 187146 - protein, 7 aa, synthetic construct
LMTSARN

SEQ ID NO: 187147 - protein, 7 aa, synthetic construct
NVMRMRD

SEQ ID NO: 187148 - protein, 7 aa, synthetic construct
TNTRIRD

SEQ ID NO: 187149 - protein, 7 aa, synthetic construct
TMMRARE

SEQ ID NO: 187150 - protein, 7 aa, synthetic construct
NMTHIRA

SEQ ID NO: 187151 - protein, 7 aa, synthetic construct
KMTRSGD

SEQ ID NO: 187152 - protein, 7 aa, synthetic construct
NTTLKRD

SEQ ID NO: 187153 - protein, 7 aa, synthetic construct
NMDSARK

SEQ ID NO: 187154 - protein, 7 aa, synthetic construct
LINRARD

SEQ ID NO: 187155 - protein, 7 aa, synthetic construct
HMTKIRD

SEQ ID NO: 187156 - protein, 7 aa, synthetic construct
NAPRARE

SEQ ID NO: 187157 - protein, 7 aa, synthetic construct
NMTRGRE

SEQ ID NO: 187158 - protein, 7 aa, synthetic construct
NTNRIRD

SEQ ID NO: 187159 - protein, 7 aa, synthetic construct
NKLRATD

SEQ ID NO: 187160 - protein, 7 aa, synthetic construct
NKMQARD

SEQ ID NO: 187161 - protein, 7 aa, synthetic construct
IMDRARL

SEQ ID NO: 187162 - protein, 7 aa, synthetic construct
NVVRSRD

SEQ ID NO: 187163 - protein, 7 aa, synthetic construct
NMTDKRN

SEQ ID NO: 187164 - protein, 7 aa, synthetic construct
NMVRTRD

SEQ ID NO: 187165 - protein, 7 aa, synthetic construct
YKTRATD

SEQ ID NO: 187166 - protein, 7 aa, synthetic construct
KMDRNRD

SEQ ID NO: 187167 - protein, 7 aa, synthetic construct
NMEKARS

SEQ ID NO: 187168 - protein, 7 aa, synthetic construct
GMKRALD

SEQ ID NO: 187169 - protein, 7 aa, synthetic construct
IMTRTRE

SEQ ID NO: 187170 - protein, 7 aa, synthetic construct
NDTQARR

SEQ ID NO: 187171 - protein, 7 aa, synthetic construct
MGTRTRD

SEQ ID NO: 187172 - protein, 7 aa, synthetic construct
KMTRMND

SEQ ID NO: 187173 - protein, 7 aa, synthetic construct
NMEGARK

SEQ ID NO: 187174 - protein, 7 aa, synthetic construct
NVDRARG

SEQ ID NO: 187175 - protein, 7 aa, synthetic construct
NMDRPRT

SEQ ID NO: 187176 - protein, 7 aa, synthetic construct
NIDRARA

SEQ ID NO: 187177 - protein, 7 aa, synthetic construct
KMTRAEF

SEQ ID NO: 187178 - protein, 7 aa, synthetic construct
FMKIARD

SEQ ID NO: 187179 - protein, 7 aa, synthetic construct
IMTGARG

SEQ ID NO: 187180 - protein, 7 aa, synthetic construct
TMTTKRD

SEQ ID NO: 187181 - protein, 7 aa, synthetic construct
TMPRARE

SEQ ID NO: 187182 - protein, 7 aa, synthetic construct
NLTRERT

SEQ ID NO: 187183 - protein, 7 aa, synthetic construct
NITRMRD

SEQ ID NO: 187184 - protein, 7 aa, synthetic construct
NDTKARA

SEQ ID NO: 187185 - protein, 7 aa, synthetic construct
MMDRARQ

SEQ ID NO: 187186 - protein, 7 aa, synthetic construct
NMDRQRL

SEQ ID NO: 187187 - protein, 7 aa, synthetic construct
NINRARD

SEQ ID NO: 187188 - protein, 7 aa, synthetic construct
IMTRIKD

SEQ ID NO: 187189 - protein, 7 aa, synthetic construct
MMTRASH

SEQ ID NO: 187190 - protein, 7 aa, synthetic construct
NMGRVKD

SEQ ID NO: 187191 - protein, 7 aa, synthetic construct
NMTRDKT

SEQ ID NO: 187192 - protein, 7 aa, synthetic construct
NMLKARD

SEQ ID NO: 187193 - protein, 7 aa, synthetic construct
NITGARH

SEQ ID NO: 187194 - protein, 7 aa, synthetic construct
KMTRMAD

SEQ ID NO: 187195 - protein, 7 aa, synthetic construct
NLGRVRD

SEQ ID NO: 187196 - protein, 7 aa, synthetic construct
NVKHARD

SEQ ID NO: 187197 - protein, 7 aa, synthetic construct
NRTQIRD

SEQ ID NO: 187198 - protein, 7 aa, synthetic construct
QMTRAAG

SEQ ID NO: 187199 - protein, 7 aa, synthetic construct
NNARPRD

SEQ ID NO: 187200 - protein, 7 aa, synthetic construct
NMNRTKD

SEQ ID NO: 187201 - protein, 7 aa, synthetic construct
DMTKARI

SEQ ID NO: 187202 - protein, 7 aa, synthetic construct
MMTRKQD

SEQ ID NO: 187203 - protein, 7 aa, synthetic construct
NETRAKL

SEQ ID NO: 187204 - protein, 7 aa, synthetic construct
GVTRLRD

SEQ ID NO: 187205 - protein, 7 aa, synthetic construct
NMTHKRE

SEQ ID NO: 187206 - protein, 7 aa, synthetic construct
NVTRTRD

SEQ ID NO: 187207 - protein, 7 aa, synthetic construct
MMARAKD

SEQ ID NO: 187208 - protein, 7 aa, synthetic construct
LMNRARD

SEQ ID NO: 187209 - protein, 7 aa, synthetic construct
MMERARN

SEQ ID NO: 187210 - protein, 7 aa, synthetic construct
NMLGARA

SEQ ID NO: 187211 - protein, 7 aa, synthetic construct
KMTRVPD

SEQ ID NO: 187212 - protein, 7 aa, synthetic construct
AATRLRD

SEQ ID NO: 187213 - protein, 7 aa, synthetic construct
YMTGARM

SEQ ID NO: 187214 - protein, 7 aa, synthetic construct
NTTRADK

SEQ ID NO: 187215 - protein, 7 aa, synthetic construct
NTPRVRD

SEQ ID NO: 187216 - protein, 7 aa, synthetic construct
NMERAKM

SEQ ID NO: 187217 - protein, 7 aa, synthetic construct
MMTSARN

SEQ ID NO: 187218 - protein, 7 aa, synthetic construct
ANTRLRD

SEQ ID NO: 187219 - protein, 7 aa, synthetic construct
YMTNARG

SEQ ID NO: 187220 - protein, 7 aa, synthetic construct
NIKRATD

SEQ ID NO: 187221 - protein, 7 aa, synthetic construct
MATRARE

SEQ ID NO: 187222 - protein, 7 aa, synthetic construct
NATRADR

SEQ ID NO: 187223 - protein, 7 aa, synthetic construct
NFTPKRD

SEQ ID NO: 187224 - protein, 7 aa, synthetic construct
LDTRARS

SEQ ID NO: 187225 - protein, 7 aa, synthetic construct
FMTRAKE

SEQ ID NO: 187226 - protein, 7 aa, synthetic construct
NMPHARM

SEQ ID NO: 187227 - protein, 7 aa, synthetic construct
NKAYARD

SEQ ID NO: 187228 - protein, 7 aa, synthetic construct
NQFKARD

SEQ ID NO: 187229 - protein, 7 aa, synthetic construct
TMTRDRS

SEQ ID NO: 187230 - protein, 7 aa, synthetic construct
NMNRADK

SEQ ID NO: 187231 - protein, 7 aa, synthetic construct
TMTRPRD

SEQ ID NO: 187232 - protein, 7 aa, synthetic construct
NVVRNRD

SEQ ID NO: 187233 - protein, 7 aa, synthetic construct
NFTRTKD

SEQ ID NO: 187234 - protein, 7 aa, synthetic construct
IMTGARQ

SEQ ID NO: 187235 - protein, 7 aa, synthetic construct
FMTKPRD

SEQ ID NO: 187236 - protein, 7 aa, synthetic construct
NTIRVRD

SEQ ID NO: 187237 - protein, 7 aa, synthetic construct
IMTRAAQ

SEQ ID NO: 187238 - protein, 7 aa, synthetic construct
SATRARE

SEQ ID NO: 187239 - protein, 7 aa, synthetic construct
NMVRAKD

SEQ ID NO: 187240 - protein, 7 aa, synthetic construct
NKTRQQD

SEQ ID NO: 187241 - protein, 7 aa, synthetic construct
DMARARG

SEQ ID NO: 187242 - protein, 7 aa, synthetic construct
VATRAKD

SEQ ID NO: 187243 - protein, 7 aa, synthetic construct
ASTRVRD

SEQ ID NO: 187244 - protein, 7 aa, synthetic construct
VLTRTRD

SEQ ID NO: 187245 - protein, 7 aa, synthetic construct
GMKRAAD

SEQ ID NO: 187246 - protein, 7 aa, synthetic construct
NVIRGRD

SEQ ID NO: 187247 - protein, 7 aa, synthetic construct
LMNRGRD

SEQ ID NO: 187248 - protein, 7 aa, synthetic construct
NMGRKFD

SEQ ID NO: 187249 - protein, 7 aa, synthetic construct
VQTRTRD

SEQ ID NO: 187250 - protein, 7 aa, synthetic construct
NTDRARI

SEQ ID NO: 187251 - protein, 7 aa, synthetic construct
NVMRTRD

SEQ ID NO: 187252 - protein, 7 aa, synthetic construct
NMTQLRA

SEQ ID NO: 187253 - protein, 7 aa, synthetic construct
KMTMGRD

SEQ ID NO: 187254 - protein, 7 aa, synthetic construct
KETRLRD

SEQ ID NO: 187255 - protein, 7 aa, synthetic construct
GTTRARE

SEQ ID NO: 187256 - protein, 7 aa, synthetic construct
APTRAKD

SEQ ID NO: 187257 - protein, 7 aa, synthetic construct
NQARQRD

SEQ ID NO: 187258 - protein, 7 aa, synthetic construct
EMTKARA

SEQ ID NO: 187259 - protein, 7 aa, synthetic construct
SMRLARD

SEQ ID NO: 187260 - protein, 7 aa, synthetic construct
VMTRAER

SEQ ID NO: 187261 - protein, 7 aa, synthetic construct
LETRARI

SEQ ID NO: 187262 - protein, 7 aa, synthetic construct
SMNRTRD

SEQ ID NO: 187263 - protein, 7 aa, synthetic construct
KATRDRD

SEQ ID NO: 187264 - protein, 7 aa, synthetic construct
NTIRLRD

SEQ ID NO: 187265 - protein, 7 aa, synthetic construct
NMERVRV

SEQ ID NO: 187266 - protein, 7 aa, synthetic construct
KMTRAIE

SEQ ID NO: 187267 - protein, 7 aa, synthetic construct
AATRMRD

SEQ ID NO: 187268 - protein, 7 aa, synthetic construct
DMTRALK

SEQ ID NO: 187269 - protein, 7 aa, synthetic construct
NAFKARD

SEQ ID NO: 187270 - protein, 7 aa, synthetic construct
NMVGKRD

SEQ ID NO: 187271 - protein, 7 aa, synthetic construct
NLERARI

SEQ ID NO: 187272 - protein, 7 aa, synthetic construct
DMTRAIK

SEQ ID NO: 187273 - protein, 7 aa, synthetic construct
NMRTNRD

SEQ ID NO: 187274 - protein, 7 aa, synthetic construct
NSMRVRD

SEQ ID NO: 187275 - protein, 7 aa, synthetic construct
AMTSKRD

SEQ ID NO: 187276 - protein, 7 aa, synthetic construct
DPTRARG

SEQ ID NO: 187277 - protein, 7 aa, synthetic construct
MMTRNKD

SEQ ID NO: 187278 - protein, 7 aa, synthetic construct
IMDRARQ

SEQ ID NO: 187279 - protein, 7 aa, synthetic construct
NDVRARM

SEQ ID NO: 187280 - protein, 7 aa, synthetic construct
IMARAKD

SEQ ID NO: 187281 - protein, 7 aa, synthetic construct
KMARAAD

SEQ ID NO: 187282 - protein, 7 aa, synthetic construct
IMTGRRD

SEQ ID NO: 187283 - protein, 7 aa, synthetic construct
NVTHARG

SEQ ID NO: 187284 - protein, 7 aa, synthetic construct
TDTRARA

SEQ ID NO: 187285 - protein, 7 aa, synthetic construct
GMMRAKD

SEQ ID NO: 187286 - protein, 7 aa, synthetic construct
QMTRLKD

SEQ ID NO: 187287 - protein, 7 aa, synthetic construct
SRTGARD

SEQ ID NO: 187288 - protein, 7 aa, synthetic construct
NMIRVKD

SEQ ID NO: 187289 - protein, 7 aa, synthetic construct
NETKARQ

SEQ ID NO: 187290 - protein, 7 aa, synthetic construct
VMRVARD

SEQ ID NO: 187291 - protein, 7 aa, synthetic construct
NLLRTRD

SEQ ID NO: 187292 - protein, 7 aa, synthetic construct
MMPRQRD

SEQ ID NO: 187293 - protein, 7 aa, synthetic construct
VITRAKD

SEQ ID NO: 187294 - protein, 7 aa, synthetic construct
QMTTKRD

SEQ ID NO: 187295 - protein, 7 aa, synthetic construct
NTTRKGD

SEQ ID NO: 187296 - protein, 7 aa, synthetic construct
NMKYTRD

SEQ ID NO: 187297 - protein, 7 aa, synthetic construct
GMKRAID

SEQ ID NO: 187298 - protein, 7 aa, synthetic construct
MPMRARD

SEQ ID NO: 187299 - protein, 7 aa, synthetic construct
GMDRARV

SEQ ID NO: 187300 - protein, 7 aa, synthetic construct
NSTRIRD

SEQ ID NO: 187301 - protein, 7 aa, synthetic construct
NMRLGRD

SEQ ID NO: 187302 - protein, 7 aa, synthetic construct
NYTKSRD

SEQ ID NO: 187303 - protein, 7 aa, synthetic construct
GMTTKRD

SEQ ID NO: 187304 - protein, 7 aa, synthetic construct
NKTYMRD

SEQ ID NO: 187305 - protein, 7 aa, synthetic construct
NDTRLRG

SEQ ID NO: 187306 - protein, 7 aa, synthetic construct
TMNRAKD

SEQ ID NO: 187307 - protein, 7 aa, synthetic construct
RLTNARD

SEQ ID NO: 187308 - protein, 7 aa, synthetic construct
NDTRNRS

SEQ ID NO: 187309 - protein, 7 aa, synthetic construct
MGTRIRD

SEQ ID NO: 187310 - protein, 7 aa, synthetic construct
MMTRANQ

SEQ ID NO: 187311 - protein, 7 aa, synthetic construct
KMVRASD

SEQ ID NO: 187312 - protein, 7 aa, synthetic construct
KMSRALD

SEQ ID NO: 187313 - protein, 7 aa, synthetic construct
NRTKAPD

SEQ ID NO: 187314 - protein, 7 aa, synthetic construct
NQLRVRD

SEQ ID NO: 187315 - protein, 7 aa, synthetic construct
NTGRIRD

SEQ ID NO: 187316 - protein, 7 aa, synthetic construct
KTERARD

SEQ ID NO: 187317 - protein, 7 aa, synthetic construct
NETGARK

SEQ ID NO: 187318 - protein, 7 aa, synthetic construct
RMTPQRD

SEQ ID NO: 187319 - protein, 7 aa, synthetic construct
LQTRMRD

SEQ ID NO: 187320 - protein, 7 aa, synthetic construct
NSNRAKD

SEQ ID NO: 187321 - protein, 7 aa, synthetic construct
NIERARN

SEQ ID NO: 187322 - protein, 7 aa, synthetic construct
NDTRATR

SEQ ID NO: 187323 - protein, 7 aa, synthetic construct
TMARAKD

SEQ ID NO: 187324 - protein, 7 aa, synthetic construct
LPTRLRD

SEQ ID NO: 187325 - protein, 7 aa, synthetic construct
NLTRMRE

SEQ ID NO: 187326 - protein, 7 aa, synthetic construct
NDTRARL

SEQ ID NO: 187327 - protein, 7 aa, synthetic construct
NIKRAVD

SEQ ID NO: 187328 - protein, 7 aa, synthetic construct
NMRLARE

SEQ ID NO: 187329 - protein, 7 aa, synthetic construct
NMDRTRG

SEQ ID NO: 187330 - protein, 7 aa, synthetic construct
TMTRSRE

SEQ ID NO: 187331 - protein, 7 aa, synthetic construct
KMSSARD

SEQ ID NO: 187332 - protein, 7 aa, synthetic construct
ATVRARD

SEQ ID NO: 187333 - protein, 7 aa, synthetic construct
NKFPARD

SEQ ID NO: 187334 - protein, 7 aa, synthetic construct
GPTRAKD

SEQ ID NO: 187335 - protein, 7 aa, synthetic construct
NMERGRV

SEQ ID NO: 187336 - protein, 7 aa, synthetic construct
NKTRSID

SEQ ID NO: 187337 - protein, 7 aa, synthetic construct
NMTRGDR

SEQ ID NO: 187338 - protein, 7 aa, synthetic construct
LMVKARD

SEQ ID NO: 187339 - protein, 7 aa, synthetic construct
LMTRASS

SEQ ID NO: 187340 - protein, 7 aa, synthetic construct
QPQRARD

SEQ ID NO: 187341 - protein, 7 aa, synthetic construct
NMTEARR

SEQ ID NO: 187342 - protein, 7 aa, synthetic construct
NKMIARD

SEQ ID NO: 187343 - protein, 7 aa, synthetic construct
FKTVARD

SEQ ID NO: 187344 - protein, 7 aa, synthetic construct
IMDRARA

SEQ ID NO: 187345 - protein, 7 aa, synthetic construct
NMPRANA

SEQ ID NO: 187346 - protein, 7 aa, synthetic construct
QMTGARA

SEQ ID NO: 187347 - protein, 7 aa, synthetic construct
NMPRKMD

SEQ ID NO: 187348 - protein, 7 aa, synthetic construct
NMTKPKD

SEQ ID NO: 187349 - protein, 7 aa, synthetic construct
NKTNPRD

SEQ ID NO: 187350 - protein, 7 aa, synthetic construct
SLTRTRD

SEQ ID NO: 187351 - protein, 7 aa, synthetic construct
NDTGARR

SEQ ID NO: 187352 - protein, 7 aa, synthetic construct
NKQRAVD

SEQ ID NO: 187353 - protein, 7 aa, synthetic construct
GMPRGRD

SEQ ID NO: 187354 - protein, 7 aa, synthetic construct
GMPRQRD

SEQ ID NO: 187355 - protein, 7 aa, synthetic construct
NEVRARA

SEQ ID NO: 187356 - protein, 7 aa, synthetic construct
NMHPARS

SEQ ID NO: 187357 - protein, 7 aa, synthetic construct
LMGRTRD

SEQ ID NO: 187358 - protein, 7 aa, synthetic construct
NMARADK

SEQ ID NO: 187359 - protein, 7 aa, synthetic construct
NMTHPRG

SEQ ID NO: 187360 - protein, 7 aa, synthetic construct
SMVRAKD

SEQ ID NO: 187361 - protein, 7 aa, synthetic construct
NMRTQRD

SEQ ID NO: 187362 - protein, 7 aa, synthetic construct
NMKIHRD

SEQ ID NO: 187363 - protein, 7 aa, synthetic construct
TQTRAKD

SEQ ID NO: 187364 - protein, 7 aa, synthetic construct
AMTRASM

SEQ ID NO: 187365 - protein, 7 aa, synthetic construct
AMTRARE

SEQ ID NO: 187366 - protein, 7 aa, synthetic construct
NMKRGVD

SEQ ID NO: 187367 - protein, 7 aa, synthetic construct
TMKRASD

SEQ ID NO: 187368 - protein, 7 aa, synthetic construct
NPLRQRD

SEQ ID NO: 187369 - protein, 7 aa, synthetic construct
NPRTARD

SEQ ID NO: 187370 - protein, 7 aa, synthetic construct
DNTRARG

SEQ ID NO: 187371 - protein, 7 aa, synthetic construct
SMPRGRD

SEQ ID NO: 187372 - protein, 7 aa, synthetic construct
AAPRARD

SEQ ID NO: 187373 - protein, 7 aa, synthetic construct
RMTSLRD

SEQ ID NO: 187374 - protein, 7 aa, synthetic construct
IMRQARD

SEQ ID NO: 187375 - protein, 7 aa, synthetic construct
TMNRMRD

SEQ ID NO: 187376 - protein, 7 aa, synthetic construct
NPQRGRD

SEQ ID NO: 187377 - protein, 7 aa, synthetic construct
NETRLRI

SEQ ID NO: 187378 - protein, 7 aa, synthetic construct
AETRARV

SEQ ID NO: 187379 - protein, 7 aa, synthetic construct
AMKRERD

SEQ ID NO: 187380 - protein, 7 aa, synthetic construct
PMTPKRD

SEQ ID NO: 187381 - protein, 7 aa, synthetic construct
LLTRTRD

SEQ ID NO: 187382 - protein, 7 aa, synthetic construct
YETRARP

SEQ ID NO: 187383 - protein, 7 aa, synthetic construct
KMTRGLD

SEQ ID NO: 187384 - protein, 7 aa, synthetic construct
NMTLHRA

SEQ ID NO: 187385 - protein, 7 aa, synthetic construct
NPERARS

SEQ ID NO: 187386 - protein, 7 aa, synthetic construct
NMVMKRD

SEQ ID NO: 187387 - protein, 7 aa, synthetic construct
NLERARP

SEQ ID NO: 187388 - protein, 7 aa, synthetic construct
MMRQARD

SEQ ID NO: 187389 - protein, 7 aa, synthetic construct
AMTNKRD

SEQ ID NO: 187390 - protein, 7 aa, synthetic construct
WSTKARD

SEQ ID NO: 187391 - protein, 7 aa, synthetic construct
NDKRAKD

SEQ ID NO: 187392 - protein, 7 aa, synthetic construct
NSTRLRD

SEQ ID NO: 187393 - protein, 7 aa, synthetic construct
NMMRLRE

SEQ ID NO: 187394 - protein, 7 aa, synthetic construct
NDARARQ

SEQ ID NO: 187395 - protein, 7 aa, synthetic construct
NMTRPNL

SEQ ID NO: 187396 - protein, 7 aa, synthetic construct
SAMRARD

SEQ ID NO: 187397 - protein, 7 aa, synthetic construct
NMTRVDR

SEQ ID NO: 187398 - protein, 7 aa, synthetic construct
NMRTLRD

SEQ ID NO: 187399 - protein, 7 aa, synthetic construct
QKDRARD

SEQ ID NO: 187400 - protein, 7 aa, synthetic construct
ISTRGRD

SEQ ID NO: 187401 - protein, 7 aa, synthetic construct
NENRARI

SEQ ID NO: 187402 - protein, 7 aa, synthetic construct
QKTRATD

SEQ ID NO: 187403 - protein, 7 aa, synthetic construct
NSVRLRD

SEQ ID NO: 187404 - protein, 7 aa, synthetic construct
NMTREKM

SEQ ID NO: 187405 - protein, 7 aa, synthetic construct
NITRTKD

SEQ ID NO: 187406 - protein, 7 aa, synthetic construct
NETRTRP

SEQ ID NO: 187407 - protein, 7 aa, synthetic construct
NPIRARD

SEQ ID NO: 187408 - protein, 7 aa, synthetic construct
NMDRLRV

SEQ ID NO: 187409 - protein, 7 aa, synthetic construct
NKIRAGD

SEQ ID NO: 187410 - protein, 7 aa, synthetic construct
NRTTIRD

SEQ ID NO: 187411 - protein, 7 aa, synthetic construct
NMIRQKD

SEQ ID NO: 187412 - protein, 7 aa, synthetic construct
NMKRAQE

SEQ ID NO: 187413 - protein, 7 aa, synthetic construct
NALRQRD

SEQ ID NO: 187414 - protein, 7 aa, synthetic construct
PMQRARE

SEQ ID NO: 187415 - protein, 7 aa, synthetic construct
FKTHARD

SEQ ID NO: 187416 - protein, 7 aa, synthetic construct
KSTRAGD

SEQ ID NO: 187417 - protein, 7 aa, synthetic construct
NMKRADL

SEQ ID NO: 187418 - protein, 7 aa, synthetic construct
NMTRKEL

SEQ ID NO: 187419 - protein, 7 aa, synthetic construct
NDTRGRS

SEQ ID NO: 187420 - protein, 7 aa, synthetic construct
IMPRPRD

SEQ ID NO: 187421 - protein, 7 aa, synthetic construct
NLPRQRD

SEQ ID NO: 187422 - protein, 7 aa, synthetic construct
NKNRATD

SEQ ID NO: 187423 - protein, 7 aa, synthetic construct
RLTAARD

SEQ ID NO: 187424 - protein, 7 aa, synthetic construct
NMPHARL

SEQ ID NO: 187425 - protein, 7 aa, synthetic construct
NLNRIRD

SEQ ID NO: 187426 - protein, 7 aa, synthetic construct
NSTRTRD

SEQ ID NO: 187427 - protein, 7 aa, synthetic construct
NPDRARS

SEQ ID NO: 187428 - protein, 7 aa, synthetic construct
NKHGARD

SEQ ID NO: 187429 - protein, 7 aa, synthetic construct
NYTKNRD

SEQ ID NO: 187430 - protein, 7 aa, synthetic construct
SQTRAKD

SEQ ID NO: 187431 - protein, 7 aa, synthetic construct
NMTHTRM

SEQ ID NO: 187432 - protein, 7 aa, synthetic construct
DMPRARV

SEQ ID NO: 187433 - protein, 7 aa, synthetic construct
TTTRLRD

SEQ ID NO: 187434 - protein, 7 aa, synthetic construct
NDTKARQ

SEQ ID NO: 187435 - protein, 7 aa, synthetic construct
NYTTKRD

SEQ ID NO: 187436 - protein, 7 aa, synthetic construct
DMTKARH

SEQ ID NO: 187437 - protein, 7 aa, synthetic construct
MMTHARA

SEQ ID NO: 187438 - protein, 7 aa, synthetic construct
QMQRARE

SEQ ID NO: 187439 - protein, 7 aa, synthetic construct
NMPQARH

SEQ ID NO: 187440 - protein, 7 aa, synthetic construct
PMDRARS

SEQ ID NO: 187441 - protein, 7 aa, synthetic construct
NETRAMR

SEQ ID NO: 187442 - protein, 7 aa, synthetic construct
TMERARS

SEQ ID NO: 187443 - protein, 7 aa, synthetic construct
NDQRARG

SEQ ID NO: 187444 - protein, 7 aa, synthetic construct
TMARVRD

SEQ ID NO: 187445 - protein, 7 aa, synthetic construct
LPTRSRD

SEQ ID NO: 187446 - protein, 7 aa, synthetic construct
NKPRAFD

SEQ ID NO: 187447 - protein, 7 aa, synthetic construct
NFPRAKD

SEQ ID NO: 187448 - protein, 7 aa, synthetic construct
NETRAKI

SEQ ID NO: 187449 - protein, 7 aa, synthetic construct
TMARTRD

SEQ ID NO: 187450 - protein, 7 aa, synthetic construct
PMQRAKD

SEQ ID NO: 187451 - protein, 7 aa, synthetic construct
NMKRGMD

SEQ ID NO: 187452 - protein, 7 aa, synthetic construct
VMQRTRD

SEQ ID NO: 187453 - protein, 7 aa, synthetic construct
QQTRLRD

SEQ ID NO: 187454 - protein, 7 aa, synthetic construct
NTDRARQ

SEQ ID NO: 187455 - protein, 7 aa, synthetic construct
NTTRARE

SEQ ID NO: 187456 - protein, 7 aa, synthetic construct
NVTKPRD

SEQ ID NO: 187457 - protein, 7 aa, synthetic construct
NMKFPRD

SEQ ID NO: 187458 - protein, 7 aa, synthetic construct
ISTRTRD

SEQ ID NO: 187459 - protein, 7 aa, synthetic construct
NIVRQRD

SEQ ID NO: 187460 - protein, 7 aa, synthetic construct
KLTRAID

SEQ ID NO: 187461 - protein, 7 aa, synthetic construct
NMPMRRD

SEQ ID NO: 187462 - protein, 7 aa, synthetic construct
TMVRGRD

SEQ ID NO: 187463 - protein, 7 aa, synthetic construct
NMTRNKE

SEQ ID NO: 187464 - protein, 7 aa, synthetic construct
RMTRQGD

SEQ ID NO: 187465 - protein, 7 aa, synthetic construct
NMDPARR

SEQ ID NO: 187466 - protein, 7 aa, synthetic construct
GMERARS

SEQ ID NO: 187467 - protein, 7 aa, synthetic construct
QDTRARG

SEQ ID NO: 187468 - protein, 7 aa, synthetic construct
NMTGAKW

SEQ ID NO: 187469 - protein, 7 aa, synthetic construct
GMVRPRD

SEQ ID NO: 187470 - protein, 7 aa, synthetic construct
MMDRARL

SEQ ID NO: 187471 - protein, 7 aa, synthetic construct
LKTRAAD

SEQ ID NO: 187472 - protein, 7 aa, synthetic construct
EMTRAKT

SEQ ID NO: 187473 - protein, 7 aa, synthetic construct
KMTRPMD

SEQ ID NO: 187474 - protein, 7 aa, synthetic construct
AYTKARD

SEQ ID NO: 187475 - protein, 7 aa, synthetic construct
NITRDRT

SEQ ID NO: 187476 - protein, 7 aa, synthetic construct
NMTHSRA

SEQ ID NO: 187477 - protein, 7 aa, synthetic construct
NPRPARD

SEQ ID NO: 187478 - protein, 7 aa, synthetic construct
NMKRAVE

SEQ ID NO: 187479 - protein, 7 aa, synthetic construct
TVTRLRD

SEQ ID NO: 187480 - protein, 7 aa, synthetic construct
YMKSARD

SEQ ID NO: 187481 - protein, 7 aa, synthetic construct
TNTRVRD

SEQ ID NO: 187482 - protein, 7 aa, synthetic construct
NLNRLRD

SEQ ID NO: 187483 - protein, 7 aa, synthetic construct
NMTSRKD

SEQ ID NO: 187484 - protein, 7 aa, synthetic construct
NMTRYKE

SEQ ID NO: 187485 - protein, 7 aa, synthetic construct
IMTRVKD

SEQ ID NO: 187486 - protein, 7 aa, synthetic construct
KMPRASD

SEQ ID NO: 187487 - protein, 7 aa, synthetic construct
VMTNARM

SEQ ID NO: 187488 - protein, 7 aa, synthetic construct
SLNRARD

SEQ ID NO: 187489 - protein, 7 aa, synthetic construct
NVQRVRD

SEQ ID NO: 187490 - protein, 7 aa, synthetic construct
NDTRAMR

SEQ ID NO: 187491 - protein, 7 aa, synthetic construct
KMTRADT

SEQ ID NO: 187492 - protein, 7 aa, synthetic construct
QMTHARA

SEQ ID NO: 187493 - protein, 7 aa, synthetic construct
GMDRARS

SEQ ID NO: 187494 - protein, 7 aa, synthetic construct
NMDRAKQ

SEQ ID NO: 187495 - protein, 7 aa, synthetic construct
NKTLHRD

SEQ ID NO: 187496 - protein, 7 aa, synthetic construct
TMQKARD

SEQ ID NO: 187497 - protein, 7 aa, synthetic construct
LMLKARD

SEQ ID NO: 187498 - protein, 7 aa, synthetic construct
QMTRAAV

SEQ ID NO: 187499 - protein, 7 aa, synthetic construct
IRTVARD

SEQ ID NO: 187500 - protein, 7 aa, synthetic construct
SQVRARD

SEQ ID NO: 187501 - protein, 7 aa, synthetic construct
NETRAKF

SEQ ID NO: 187502 - protein, 7 aa, synthetic construct
KMLRAVD

SEQ ID NO: 187503 - protein, 7 aa, synthetic construct
DMIRARP

SEQ ID NO: 187504 - protein, 7 aa, synthetic construct
NPVRIRD

SEQ ID NO: 187505 - protein, 7 aa, synthetic construct
LMKRAND

SEQ ID NO: 187506 - protein, 7 aa, synthetic construct
TMTLKRD

SEQ ID NO: 187507 - protein, 7 aa, synthetic construct
QMPRTRD

SEQ ID NO: 187508 - protein, 7 aa, synthetic construct
NTTRGRD

SEQ ID NO: 187509 - protein, 7 aa, synthetic construct
NITRPRE

SEQ ID NO: 187510 - protein, 7 aa, synthetic construct
NMTRLKD

SEQ ID NO: 187511 - protein, 7 aa, synthetic construct
NSTRMRD

SEQ ID NO: 187512 - protein, 7 aa, synthetic construct
AQTRIRD

SEQ ID NO: 187513 - protein, 7 aa, synthetic construct
KMTRGSD

SEQ ID NO: 187514 - protein, 7 aa, synthetic construct
NPKRAGD

SEQ ID NO: 187515 - protein, 7 aa, synthetic construct
NDTRAQR

SEQ ID NO: 187516 - protein, 7 aa, synthetic construct
NPARVRD

SEQ ID NO: 187517 - protein, 7 aa, synthetic construct
NTLRTRD

SEQ ID NO: 187518 - protein, 7 aa, synthetic construct
VQTRGRD

SEQ ID NO: 187519 - protein, 7 aa, synthetic construct
STMRARD

SEQ ID NO: 187520 - protein, 7 aa, synthetic construct
KMTMHRD

SEQ ID NO: 187521 - protein, 7 aa, synthetic construct
NMKIYRD

SEQ ID NO: 187522 - protein, 7 aa, synthetic construct
NMGPKRD

SEQ ID NO: 187523 - protein, 7 aa, synthetic construct
NTRLARD

SEQ ID NO: 187524 - protein, 7 aa, synthetic construct
NMQKPRD

SEQ ID NO: 187525 - protein, 7 aa, synthetic construct
MSTRAKD

SEQ ID NO: 187526 - protein, 7 aa, synthetic construct
LTPRARD

SEQ ID NO: 187527 - protein, 7 aa, synthetic construct
LNTRLRD

SEQ ID NO: 187528 - protein, 7 aa, synthetic construct
NKPRASD

SEQ ID NO: 187529 - protein, 7 aa, synthetic construct
GMTGARA

SEQ ID NO: 187530 - protein, 7 aa, synthetic construct
RTTLARD

SEQ ID NO: 187531 - protein, 7 aa, synthetic construct
VMARTRD

SEQ ID NO: 187532 - protein, 7 aa, synthetic construct
NMRPLRD

SEQ ID NO: 187533 - protein, 7 aa, synthetic construct
NKSRAPD

SEQ ID NO: 187534 - protein, 7 aa, synthetic construct
QKTRAVD

SEQ ID NO: 187535 - protein, 7 aa, synthetic construct
GLTRTRD

SEQ ID NO: 187536 - protein, 7 aa, synthetic construct
NMKMSRD

SEQ ID NO: 187537 - protein, 7 aa, synthetic construct
NQVRAKD

SEQ ID NO: 187538 - protein, 7 aa, synthetic construct
RMTDKRD

SEQ ID NO: 187539 - protein, 7 aa, synthetic construct
KMPHARD

SEQ ID NO: 187540 - protein, 7 aa, synthetic construct
NMMRVRD

SEQ ID NO: 187541 - protein, 7 aa, synthetic construct
AMTRERV

SEQ ID NO: 187542 - protein, 7 aa, synthetic construct
NTTKYRD

SEQ ID NO: 187543 - protein, 7 aa, synthetic construct
NPTQKRD

SEQ ID NO: 187544 - protein, 7 aa, synthetic construct
NQMRAKD

SEQ ID NO: 187545 - protein, 7 aa, synthetic construct
STQRARD

SEQ ID NO: 187546 - protein, 7 aa, synthetic construct
NPTRERQ

SEQ ID NO: 187547 - protein, 7 aa, synthetic construct
GPTRARE

SEQ ID NO: 187548 - protein, 7 aa, synthetic construct
DTTRARP

SEQ ID NO: 187549 - protein, 7 aa, synthetic construct
EMTRGRP

SEQ ID NO: 187550 - protein, 7 aa, synthetic construct
NQLRMRD

SEQ ID NO: 187551 - protein, 7 aa, synthetic construct
NAPRARD

SEQ ID NO: 187552 - protein, 7 aa, synthetic construct
GFTKARD

SEQ ID NO: 187553 - protein, 7 aa, synthetic construct
TMQRIRD

SEQ ID NO: 187554 - protein, 7 aa, synthetic construct
NMIRVRE

SEQ ID NO: 187555 - protein, 7 aa, synthetic construct
KYTPARD

SEQ ID NO: 187556 - protein, 7 aa, synthetic construct
IMMRAKD

SEQ ID NO: 187557 - protein, 7 aa, synthetic construct
NDTRTRV

SEQ ID NO: 187558 - protein, 7 aa, synthetic construct
NRPNARD

SEQ ID NO: 187559 - protein, 7 aa, synthetic construct
NLTRTRE

SEQ ID NO: 187560 - protein, 7 aa, synthetic construct
QMTRAAA

SEQ ID NO: 187561 - protein, 7 aa, synthetic construct
TMTRERL

SEQ ID NO: 187562 - protein, 7 aa, synthetic construct
TAMRARD

SEQ ID NO: 187563 - protein, 7 aa, synthetic construct
NMKSHRD

SEQ ID NO: 187564 - protein, 7 aa, synthetic construct
SAVRARD

SEQ ID NO: 187565 - protein, 7 aa, synthetic construct
KMERIRD

SEQ ID NO: 187566 - protein, 7 aa, synthetic construct
NQGRAKD

SEQ ID NO: 187567 - protein, 7 aa, synthetic construct
NPQKARD

SEQ ID NO: 187568 - protein, 7 aa, synthetic construct
VSPRARD

SEQ ID NO: 187569 - protein, 7 aa, synthetic construct
NMRGSRD

SEQ ID NO: 187570 - protein, 7 aa, synthetic construct
IMERARS

SEQ ID NO: 187571 - protein, 7 aa, synthetic construct
NVTIKRD

SEQ ID NO: 187572 - protein, 7 aa, synthetic construct
NENRARV

SEQ ID NO: 187573 - protein, 7 aa, synthetic construct
NMERTRM

SEQ ID NO: 187574 - protein, 7 aa, synthetic construct
NMKRLVD

SEQ ID NO: 187575 - protein, 7 aa, synthetic construct
NMMKLRD

SEQ ID NO: 187576 - protein, 7 aa, synthetic construct
NMNRVKD

SEQ ID NO: 187577 - protein, 7 aa, synthetic construct
VMTRERS

SEQ ID NO: 187578 - protein, 7 aa, synthetic construct
VMTRATL

SEQ ID NO: 187579 - protein, 7 aa, synthetic construct
HATKARD

SEQ ID NO: 187580 - protein, 7 aa, synthetic construct
IMPRSRD

SEQ ID NO: 187581 - protein, 7 aa, synthetic construct
NMNRTRE

SEQ ID NO: 187582 - protein, 7 aa, synthetic construct
NMPRQRD

SEQ ID NO: 187583 - protein, 7 aa, synthetic construct
VMTRASI

SEQ ID NO: 187584 - protein, 7 aa, synthetic construct
NPTRDRL

SEQ ID NO: 187585 - protein, 7 aa, synthetic construct
GMTRSKD

SEQ ID NO: 187586 - protein, 7 aa, synthetic construct
NMDRMRS

SEQ ID NO: 187587 - protein, 7 aa, synthetic construct
NMRGLRD

SEQ ID NO: 187588 - protein, 7 aa, synthetic construct
IMNRMRD

SEQ ID NO: 187589 - protein, 7 aa, synthetic construct
NIKRAMD

SEQ ID NO: 187590 - protein, 7 aa, synthetic construct
NMDRMRI

SEQ ID NO: 187591 - protein, 7 aa, synthetic construct
ANVRARD

SEQ ID NO: 187592 - protein, 7 aa, synthetic construct
AMDRARP

SEQ ID NO: 187593 - protein, 7 aa, synthetic construct
NPTSKRD

SEQ ID NO: 187594 - protein, 7 aa, synthetic construct
GATRLRD

SEQ ID NO: 187595 - protein, 7 aa, synthetic construct
NVMRGRD

SEQ ID NO: 187596 - protein, 7 aa, synthetic construct
INTRTRD

SEQ ID NO: 187597 - protein, 7 aa, synthetic construct
NMPRKTD

SEQ ID NO: 187598 - protein, 7 aa, synthetic construct
NDTRVRM

SEQ ID NO: 187599 - protein, 7 aa, synthetic construct
QMTRAAM

SEQ ID NO: 187600 - protein, 7 aa, synthetic construct
NMKREKD

SEQ ID NO: 187601 - protein, 7 aa, synthetic construct
NMQRIRE

SEQ ID NO: 187602 - protein, 7 aa, synthetic construct
TMTSKRD

SEQ ID NO: 187603 - protein, 7 aa, synthetic construct
NMTGAKY

SEQ ID NO: 187604 - protein, 7 aa, synthetic construct
NMTRGRD

SEQ ID NO: 187605 - protein, 7 aa, synthetic construct
GMTKARD

SEQ ID NO: 187606 - protein, 7 aa, synthetic construct
NDSRARG

SEQ ID NO: 187607 - protein, 7 aa, synthetic construct
TMTQKRD

SEQ ID NO: 187608 - protein, 7 aa, synthetic construct
ITQRARD

SEQ ID NO: 187609 - protein, 7 aa, synthetic construct
NMKRAGD

SEQ ID NO: 187610 - protein, 7 aa, synthetic construct
NSTRERN

SEQ ID NO: 187611 - protein, 7 aa, synthetic construct
VQTRAKD

SEQ ID NO: 187612 - protein, 7 aa, synthetic construct
NKPRAMD

SEQ ID NO: 187613 - protein, 7 aa, synthetic construct
NMMRIKD

SEQ ID NO: 187614 - protein, 7 aa, synthetic construct
NMTGQRA

SEQ ID NO: 187615 - protein, 7 aa, synthetic construct
NMPDARR

SEQ ID NO: 187616 - protein, 7 aa, synthetic construct
INTRPRD

SEQ ID NO: 187617 - protein, 7 aa, synthetic construct
LMPRARD

SEQ ID NO: 187618 - protein, 7 aa, synthetic construct
NIDRARS

SEQ ID NO: 187619 - protein, 7 aa, synthetic construct
NKTRSMD

SEQ ID NO: 187620 - protein, 7 aa, synthetic construct
NDTRNRP

SEQ ID NO: 187621 - protein, 7 aa, synthetic construct
NMDRVRM

SEQ ID NO: 187622 - protein, 7 aa, synthetic construct
PVTRAKD

SEQ ID NO: 187623 - protein, 7 aa, synthetic construct
NMTREKN

SEQ ID NO: 187624 - protein, 7 aa, synthetic construct
KLTRAQD

SEQ ID NO: 187625 - protein, 7 aa, synthetic construct
KQTRAQD

SEQ ID NO: 187626 - protein, 7 aa, synthetic construct
SMTRASL

SEQ ID NO: 187627 - protein, 7 aa, synthetic construct
MMMRAKD

SEQ ID NO: 187628 - protein, 7 aa, synthetic construct
ALTRAKD

SEQ ID NO: 187629 - protein, 7 aa, synthetic construct
NMTLSRA

SEQ ID NO: 187630 - protein, 7 aa, synthetic construct
NMTHAKN

SEQ ID NO: 187631 - protein, 7 aa, synthetic construct
NMMRVKD

SEQ ID NO: 187632 - protein, 7 aa, synthetic construct
NIIRARE

SEQ ID NO: 187633 - protein, 7 aa, synthetic construct
NTKYARD

SEQ ID NO: 187634 - protein, 7 aa, synthetic construct
FDTRARA

SEQ ID NO: 187635 - protein, 7 aa, synthetic construct
AMPRNRD

SEQ ID NO: 187636 - protein, 7 aa, synthetic construct
NFTNKRD

SEQ ID NO: 187637 - protein, 7 aa, synthetic construct
LQTRTRD

SEQ ID NO: 187638 - protein, 7 aa, synthetic construct
GNTRGRD

SEQ ID NO: 187639 - protein, 7 aa, synthetic construct
VMPRIRD

SEQ ID NO: 187640 - protein, 7 aa, synthetic construct
YTTKARD

SEQ ID NO: 187641 - protein, 7 aa, synthetic construct
NQQKARD

SEQ ID NO: 187642 - protein, 7 aa, synthetic construct
QFTKARD

SEQ ID NO: 187643 - protein, 7 aa, synthetic construct
NMTKYRE

SEQ ID NO: 187644 - protein, 7 aa, synthetic construct
NQGRTRD

SEQ ID NO: 187645 - protein, 7 aa, synthetic construct
NMDRANR

SEQ ID NO: 187646 - protein, 7 aa, synthetic construct
GMTRADK

SEQ ID NO: 187647 - protein, 7 aa, synthetic construct
IETRARA

SEQ ID NO: 187648 - protein, 7 aa, synthetic construct
NDTRARM

SEQ ID NO: 187649 - protein, 7 aa, synthetic construct
TMTSARH

SEQ ID NO: 187650 - protein, 7 aa, synthetic construct
MMRGARD

SEQ ID NO: 187651 - protein, 7 aa, synthetic construct
LMPRGRD

SEQ ID NO: 187652 - protein, 7 aa, synthetic construct
NLARIRD

SEQ ID NO: 187653 - protein, 7 aa, synthetic construct
NMAGKRD

SEQ ID NO: 187654 - protein, 7 aa, synthetic construct
VDTRARL

SEQ ID NO: 187655 - protein, 7 aa, synthetic construct
IQTRARE

SEQ ID NO: 187656 - protein, 7 aa, synthetic construct
NTTHARG

SEQ ID NO: 187657 - protein, 7 aa, synthetic construct
LPTRARD

SEQ ID NO: 187658 - protein, 7 aa, synthetic construct
AMARTRD

SEQ ID NO: 187659 - protein, 7 aa, synthetic construct
NVARMRD

SEQ ID NO: 187660 - protein, 7 aa, synthetic construct
NMTRARE

SEQ ID NO: 187661 - protein, 7 aa, synthetic construct
NMTHVRP

SEQ ID NO: 187662 - protein, 7 aa, synthetic construct
NLTRNRE

SEQ ID NO: 187663 - protein, 7 aa, synthetic construct
NMTRGEK

SEQ ID NO: 187664 - protein, 7 aa, synthetic construct
IMTRGRE

SEQ ID NO: 187665 - protein, 7 aa, synthetic construct
NMTSSRN

SEQ ID NO: 187666 - protein, 7 aa, synthetic construct
NQDRARN

SEQ ID NO: 187667 - protein, 7 aa, synthetic construct
NMPPARQ

SEQ ID NO: 187668 - protein, 7 aa, synthetic construct
NMTRVDK

SEQ ID NO: 187669 - protein, 7 aa, synthetic construct
LGPRARD

SEQ ID NO: 187670 - protein, 7 aa, synthetic construct
NMPRAQN

SEQ ID NO: 187671 - protein, 7 aa, synthetic construct
VPLRARD

SEQ ID NO: 187672 - protein, 7 aa, synthetic construct
NKQRASD

SEQ ID NO: 187673 - protein, 7 aa, synthetic construct
GPTRMRD

SEQ ID NO: 187674 - protein, 7 aa, synthetic construct
RMTPVRD

SEQ ID NO: 187675 - protein, 7 aa, synthetic construct
VMTGARQ

SEQ ID NO: 187676 - protein, 7 aa, synthetic construct
TMTRDRL

SEQ ID NO: 187677 - protein, 7 aa, synthetic construct
NAKRAPD

SEQ ID NO: 187678 - protein, 7 aa, synthetic construct
TMTRAHI

SEQ ID NO: 187679 - protein, 7 aa, synthetic construct
NMTKDRM

SEQ ID NO: 187680 - protein, 7 aa, synthetic construct
NMRTVRD

SEQ ID NO: 187681 - protein, 7 aa, synthetic construct
AMTRTRE

SEQ ID NO: 187682 - protein, 7 aa, synthetic construct
NMFKARD

SEQ ID NO: 187683 - protein, 7 aa, synthetic construct
SMMRGRD

SEQ ID NO: 187684 - protein, 7 aa, synthetic construct
NAERARL

SEQ ID NO: 187685 - protein, 7 aa, synthetic construct
NKTFQRD

SEQ ID NO: 187686 - protein, 7 aa, synthetic construct
MMKRAGD

SEQ ID NO: 187687 - protein, 7 aa, synthetic construct
NIERARV

SEQ ID NO: 187688 - protein, 7 aa, synthetic construct
KMTRALE

SEQ ID NO: 187689 - protein, 7 aa, synthetic construct
NKSRALD

SEQ ID NO: 187690 - protein, 7 aa, synthetic construct
KMPRAND

SEQ ID NO: 187691 - protein, 7 aa, synthetic construct
SMTRKSD

SEQ ID NO: 187692 - protein, 7 aa, synthetic construct
NSIRAKD

SEQ ID NO: 187693 - protein, 7 aa, synthetic construct
KMERSRD

SEQ ID NO: 187694 - protein, 7 aa, synthetic construct
NDTRVRQ

SEQ ID NO: 187695 - protein, 7 aa, synthetic construct
NMTIKRD

SEQ ID NO: 187696 - protein, 7 aa, synthetic construct
TQLRARD

SEQ ID NO: 187697 - protein, 7 aa, synthetic construct
TLQRARD

SEQ ID NO: 187698 - protein, 7 aa, synthetic construct
NQKRERD

SEQ ID NO: 187699 - protein, 7 aa, synthetic construct
GMTHARS

SEQ ID NO: 187700 - protein, 7 aa, synthetic construct
NMRAVRD

SEQ ID NO: 187701 - protein, 7 aa, synthetic construct
TMTRIKD

SEQ ID NO: 187702 - protein, 7 aa, synthetic construct
NMTTHRS

SEQ ID NO: 187703 - protein, 7 aa, synthetic construct
NMTHAKM

SEQ ID NO: 187704 - protein, 7 aa, synthetic construct
SMTRAHA

SEQ ID NO: 187705 - protein, 7 aa, synthetic construct
VMTRAQQ

SEQ ID NO: 187706 - protein, 7 aa, synthetic construct
SMKRAPD

SEQ ID NO: 187707 - protein, 7 aa, synthetic construct
NMKAYRD

SEQ ID NO: 187708 - protein, 7 aa, synthetic construct
LMKHARD

SEQ ID NO: 187709 - protein, 7 aa, synthetic construct
NKMRAGD

SEQ ID NO: 187710 - protein, 7 aa, synthetic construct
NMTERRA

SEQ ID NO: 187711 - protein, 7 aa, synthetic construct
NYTKQRD

SEQ ID NO: 187712 - protein, 7 aa, synthetic construct
NTTRPKD

SEQ ID NO: 187713 - protein, 7 aa, synthetic construct
NKVRAMD

SEQ ID NO: 187714 - protein, 7 aa, synthetic construct
QMVRAKD

SEQ ID NO: 187715 - protein, 7 aa, synthetic construct
KMMRAQD

SEQ ID NO: 187716 - protein, 7 aa, synthetic construct
NMERQRI

SEQ ID NO: 187717 - protein, 7 aa, synthetic construct
QMTRAHV

SEQ ID NO: 187718 - protein, 7 aa, synthetic construct
NDARARG

SEQ ID NO: 187719 - protein, 7 aa, synthetic construct
MMKRALD

SEQ ID NO: 187720 - protein, 7 aa, synthetic construct
NPTRPKD

SEQ ID NO: 187721 - protein, 7 aa, synthetic construct
NMIRIKD

SEQ ID NO: 187722 - protein, 7 aa, synthetic construct
VMKRAAD

SEQ ID NO: 187723 - protein, 7 aa, synthetic construct
NMTQLRN

SEQ ID NO: 187724 - protein, 7 aa, synthetic construct
LMTRLKD

SEQ ID NO: 187725 - protein, 7 aa, synthetic construct
LGTRVRD

SEQ ID NO: 187726 - protein, 7 aa, synthetic construct
GMKRASD

SEQ ID NO: 187727 - protein, 7 aa, synthetic construct
MMTGARH

SEQ ID NO: 187728 - protein, 7 aa, synthetic construct
NEPRART

SEQ ID NO: 187729 - protein, 7 aa, synthetic construct
NRTQQRD

SEQ ID NO: 187730 - protein, 7 aa, synthetic construct
TETRARN

SEQ ID NO: 187731 - protein, 7 aa, synthetic construct
LMTRERN

SEQ ID NO: 187732 - protein, 7 aa, synthetic construct
TETRARI

SEQ ID NO: 187733 - protein, 7 aa, synthetic construct
SMERARM

SEQ ID NO: 187734 - protein, 7 aa, synthetic construct
NQKRAGD

SEQ ID NO: 187735 - protein, 7 aa, synthetic construct
NETRTRM

SEQ ID NO: 187736 - protein, 7 aa, synthetic construct
GMQRIRD

SEQ ID NO: 187737 - protein, 7 aa, synthetic construct
NPDRARN

SEQ ID NO: 187738 - protein, 7 aa, synthetic construct
SATRGRD

SEQ ID NO: 187739 - protein, 7 aa, synthetic construct
SVTRMRD

SEQ ID NO: 187740 - protein, 7 aa, synthetic construct
NMPRERG

SEQ ID NO: 187741 - protein, 7 aa, synthetic construct
SDTRARS

SEQ ID NO: 187742 - protein, 7 aa, synthetic construct
GMPRARD

SEQ ID NO: 187743 - protein, 7 aa, synthetic construct
QMTRMKD

SEQ ID NO: 187744 - protein, 7 aa, synthetic construct
LDTRARG

SEQ ID NO: 187745 - protein, 7 aa, synthetic construct
GMTRIRD

SEQ ID NO: 187746 - protein, 7 aa, synthetic construct
LMTGARH

SEQ ID NO: 187747 - protein, 7 aa, synthetic construct
NMERAFK

SEQ ID NO: 187748 - protein, 7 aa, synthetic construct
SMTRVRE

SEQ ID NO: 187749 - protein, 7 aa, synthetic construct
NVGRMRD

SEQ ID NO: 187750 - protein, 7 aa, synthetic construct
IVNRARD

SEQ ID NO: 187751 - protein, 7 aa, synthetic construct
NMRAIRD

SEQ ID NO: 187752 - protein, 7 aa, synthetic construct
NLIRAKD

SEQ ID NO: 187753 - protein, 7 aa, synthetic construct
VMTRASM

SEQ ID NO: 187754 - protein, 7 aa, synthetic construct
NDTRSRS

SEQ ID NO: 187755 - protein, 7 aa, synthetic construct
FMTTKRD

SEQ ID NO: 187756 - protein, 7 aa, synthetic construct
MMTDARR

SEQ ID NO: 187757 - protein, 7 aa, synthetic construct
NMRKAVD

SEQ ID NO: 187758 - protein, 7 aa, synthetic construct
KDTRLRD

SEQ ID NO: 187759 - protein, 7 aa, synthetic construct
RMTPNRD

SEQ ID NO: 187760 - protein, 7 aa, synthetic construct
NMIHARA

SEQ ID NO: 187761 - protein, 7 aa, synthetic construct
LSPRARD

SEQ ID NO: 187762 - protein, 7 aa, synthetic construct
NMERNRV

SEQ ID NO: 187763 - protein, 7 aa, synthetic construct
AMNRMRD

SEQ ID NO: 187764 - protein, 7 aa, synthetic construct
NMDRHRV

SEQ ID NO: 187765 - protein, 7 aa, synthetic construct
HMTRERA

SEQ ID NO: 187766 - protein, 7 aa, synthetic construct
NNPRVRD

SEQ ID NO: 187767 - protein, 7 aa, synthetic construct
ISTRLRD

SEQ ID NO: 187768 - protein, 7 aa, synthetic construct
MMTRMKD

SEQ ID NO: 187769 - protein, 7 aa, synthetic construct
NLDRARQ

SEQ ID NO: 187770 - protein, 7 aa, synthetic construct
LLTRARE

SEQ ID NO: 187771 - protein, 7 aa, synthetic construct
NMQRPRD

SEQ ID NO: 187772 - protein, 7 aa, synthetic construct
GMTGARG

SEQ ID NO: 187773 - protein, 7 aa, synthetic construct
NPTRMRE

SEQ ID NO: 187774 - protein, 7 aa, synthetic construct
NMVRMRE

SEQ ID NO: 187775 - protein, 7 aa, synthetic construct
GMRGARD

SEQ ID NO: 187776 - protein, 7 aa, synthetic construct
RMTATRD

SEQ ID NO: 187777 - protein, 7 aa, synthetic construct
NMTIRRE

SEQ ID NO: 187778 - protein, 7 aa, synthetic construct
NFQKARD

SEQ ID NO: 187779 - protein, 7 aa, synthetic construct
NMVPKRD

SEQ ID NO: 187780 - protein, 7 aa, synthetic construct
KMGNARD

SEQ ID NO: 187781 - protein, 7 aa, synthetic construct
NTLRPRD

SEQ ID NO: 187782 - protein, 7 aa, synthetic construct
NIVRTRD

SEQ ID NO: 187783 - protein, 7 aa, synthetic construct
GMKRAQD

SEQ ID NO: 187784 - protein, 7 aa, synthetic construct
DMTRSRA

SEQ ID NO: 187785 - protein, 7 aa, synthetic construct
NMDRIRG

SEQ ID NO: 187786 - protein, 7 aa, synthetic construct
NNKPARD

SEQ ID NO: 187787 - protein, 7 aa, synthetic construct
VDTRARN

SEQ ID NO: 187788 - protein, 7 aa, synthetic construct
NKTDRRD

SEQ ID NO: 187789 - protein, 7 aa, synthetic construct
SMARIRD

SEQ ID NO: 187790 - protein, 7 aa, synthetic construct
NDTRPRT

SEQ ID NO: 187791 - protein, 7 aa, synthetic construct
NMMRTRD

SEQ ID NO: 187792 - protein, 7 aa, synthetic construct
LMERARN

SEQ ID NO: 187793 - protein, 7 aa, synthetic construct
FMTPKRD

SEQ ID NO: 187794 - protein, 7 aa, synthetic construct
NDTRARI

SEQ ID NO: 187795 - protein, 7 aa, synthetic construct
NPTRGKD

SEQ ID NO: 187796 - protein, 7 aa, synthetic construct
MPTRAKD

SEQ ID NO: 187797 - protein, 7 aa, synthetic construct
NMTQPRA

SEQ ID NO: 187798 - protein, 7 aa, synthetic construct
FMTNARV

SEQ ID NO: 187799 - protein, 7 aa, synthetic construct
VMTRANQ

SEQ ID NO: 187800 - protein, 7 aa, synthetic construct
DSTRARV

SEQ ID NO: 187801 - protein, 7 aa, synthetic construct
NMTPKRD

SEQ ID NO: 187802 - protein, 7 aa, synthetic construct
KGTRAPD

SEQ ID NO: 187803 - protein, 7 aa, synthetic construct
YVTKARD

SEQ ID NO: 187804 - protein, 7 aa, synthetic construct
NMERTRQ

SEQ ID NO: 187805 - protein, 7 aa, synthetic construct
NMERARG

SEQ ID NO: 187806 - protein, 7 aa, synthetic construct
NQGRIRD

SEQ ID NO: 187807 - protein, 7 aa, synthetic construct
TMTEARR

SEQ ID NO: 187808 - protein, 7 aa, synthetic construct
NPTRQKD

SEQ ID NO: 187809 - protein, 7 aa, synthetic construct
NMTSERR

SEQ ID NO: 187810 - protein, 7 aa, synthetic construct
METRARG

SEQ ID NO: 187811 - protein, 7 aa, synthetic construct
LMTSKRD

SEQ ID NO: 187812 - protein, 7 aa, synthetic construct
SMTRADR

SEQ ID NO: 187813 - protein, 7 aa, synthetic construct
ELTRARP

SEQ ID NO: 187814 - protein, 7 aa, synthetic construct
NDTKARI

SEQ ID NO: 187815 - protein, 7 aa, synthetic construct
LETRARQ

SEQ ID NO: 187816 - protein, 7 aa, synthetic construct
NETRQRP

SEQ ID NO: 187817 - protein, 7 aa, synthetic construct
NEVRARQ

SEQ ID NO: 187818 - protein, 7 aa, synthetic construct
NMVRNRD

SEQ ID NO: 187819 - protein, 7 aa, synthetic construct
DMTRVRV

SEQ ID NO: 187820 - protein, 7 aa, synthetic construct
NTARAKD

SEQ ID NO: 187821 - protein, 7 aa, synthetic construct
NPKHARD

SEQ ID NO: 187822 - protein, 7 aa, synthetic construct
KDTRTRD

SEQ ID NO: 187823 - protein, 7 aa, synthetic construct
ADTRARV

SEQ ID NO: 187824 - protein, 7 aa, synthetic construct
NLTRIRE

SEQ ID NO: 187825 - protein, 7 aa, synthetic construct
NITVRRD

SEQ ID NO: 187826 - protein, 7 aa, synthetic construct
NYTKGRD

SEQ ID NO: 187827 - protein, 7 aa, synthetic construct
KNTRAGD

SEQ ID NO: 187828 - protein, 7 aa, synthetic construct
NMVRAKE

SEQ ID NO: 187829 - protein, 7 aa, synthetic construct
QMTRADK

SEQ ID NO: 187830 - protein, 7 aa, synthetic construct
LRTTARD

SEQ ID NO: 187831 - protein, 7 aa, synthetic construct
NTERARG

SEQ ID NO: 187832 - protein, 7 aa, synthetic construct
NKQRAND

SEQ ID NO: 187833 - protein, 7 aa, synthetic construct
NMTNHRA

SEQ ID NO: 187834 - protein, 7 aa, synthetic construct
ALNRARD

SEQ ID NO: 187835 - protein, 7 aa, synthetic construct
ALTRARE

SEQ ID NO: 187836 - protein, 7 aa, synthetic construct
NMERLRV

SEQ ID NO: 187837 - protein, 7 aa, synthetic construct
VSTRLRD

SEQ ID NO: 187838 - protein, 7 aa, synthetic construct
LHTKARD

SEQ ID NO: 187839 - protein, 7 aa, synthetic construct
AMTRASG

SEQ ID NO: 187840 - protein, 7 aa, synthetic construct
NMSRVRE

SEQ ID NO: 187841 - protein, 7 aa, synthetic construct
NMGQKRD

SEQ ID NO: 187842 - protein, 7 aa, synthetic construct
NMRVVRD

SEQ ID NO: 187843 - protein, 7 aa, synthetic construct
NPVRTRD

SEQ ID NO: 187844 - protein, 7 aa, synthetic construct
ALTRVRD

SEQ ID NO: 187845 - protein, 7 aa, synthetic construct
DMTRNRI

SEQ ID NO: 187846 - protein, 7 aa, synthetic construct
VTTRTRD

SEQ ID NO: 187847 - protein, 7 aa, synthetic construct
VMTMARA

SEQ ID NO: 187848 - protein, 7 aa, synthetic construct
GLTRLRD

SEQ ID NO: 187849 - protein, 7 aa, synthetic construct
NAGRLRD

SEQ ID NO: 187850 - protein, 7 aa, synthetic construct
TMVKARD

SEQ ID NO: 187851 - protein, 7 aa, synthetic construct
NETRIRM

SEQ ID NO: 187852 - protein, 7 aa, synthetic construct
NMPRATN

SEQ ID NO: 187853 - protein, 7 aa, synthetic construct
YKTVARD

SEQ ID NO: 187854 - protein, 7 aa, synthetic construct
NVQRPRD

SEQ ID NO: 187855 - protein, 7 aa, synthetic construct
LVTRAKD

SEQ ID NO: 187856 - protein, 7 aa, synthetic construct
VMTHARS

SEQ ID NO: 187857 - protein, 7 aa, synthetic construct
TDTRART

SEQ ID NO: 187858 - protein, 7 aa, synthetic construct
SVTRARE

SEQ ID NO: 187859 - protein, 7 aa, synthetic construct
PMTRAHA

SEQ ID NO: 187860 - protein, 7 aa, synthetic construct
EMTKARN

SEQ ID NO: 187861 - protein, 7 aa, synthetic construct
TMLRGRD

SEQ ID NO: 187862 - protein, 7 aa, synthetic construct
NMSEARK

SEQ ID NO: 187863 - protein, 7 aa, synthetic construct
RMPRAVD

SEQ ID NO: 187864 - protein, 7 aa, synthetic construct
KPDRARD

SEQ ID NO: 187865 - protein, 7 aa, synthetic construct
TMGRAKD

SEQ ID NO: 187866 - protein, 7 aa, synthetic construct
NKARDRD

SEQ ID NO: 187867 - protein, 7 aa, synthetic construct
WMKPARD

SEQ ID NO: 187868 - protein, 7 aa, synthetic construct
NQTRADK

SEQ ID NO: 187869 - protein, 7 aa, synthetic construct
NMKRGLD

SEQ ID NO: 187870 - protein, 7 aa, synthetic construct
NMIHARP

SEQ ID NO: 187871 - protein, 7 aa, synthetic construct
NETVARK

SEQ ID NO: 187872 - protein, 7 aa, synthetic construct
TKTRERD

SEQ ID NO: 187873 - protein, 7 aa, synthetic construct
NKVRAAD

SEQ ID NO: 187874 - protein, 7 aa, synthetic construct
PFTKARD

SEQ ID NO: 187875 - protein, 7 aa, synthetic construct
NETRAAK

SEQ ID NO: 187876 - protein, 7 aa, synthetic construct
NMKRTTD

SEQ ID NO: 187877 - protein, 7 aa, synthetic construct
SMARTRD

SEQ ID NO: 187878 - protein, 7 aa, synthetic construct
NTDRARL

SEQ ID NO: 187879 - protein, 7 aa, synthetic construct
NMSRTKD

SEQ ID NO: 187880 - protein, 7 aa, synthetic construct
NKMRDRD

SEQ ID NO: 187881 - protein, 7 aa, synthetic construct
KMTRGQD

SEQ ID NO: 187882 - protein, 7 aa, synthetic construct
NLPRNRD

SEQ ID NO: 187883 - protein, 7 aa, synthetic construct
HPTKARD

SEQ ID NO: 187884 - protein, 7 aa, synthetic construct
KMVRAND

SEQ ID NO: 187885 - protein, 7 aa, synthetic construct
NMTGHRA

SEQ ID NO: 187886 - protein, 7 aa, synthetic construct
NMKRVTD

SEQ ID NO: 187887 - protein, 7 aa, synthetic construct
IMTNARN

SEQ ID NO: 187888 - protein, 7 aa, synthetic construct
KMTRANE

SEQ ID NO: 187889 - protein, 7 aa, synthetic construct
SVTRQRD

SEQ ID NO: 187890 - protein, 7 aa, synthetic construct
NMKTYRD

SEQ ID NO: 187891 - protein, 7 aa, synthetic construct
NPARARE

SEQ ID NO: 187892 - protein, 7 aa, synthetic construct
TMPRQRD

SEQ ID NO: 187893 - protein, 7 aa, synthetic construct
IMTTKRD

SEQ ID NO: 187894 - protein, 7 aa, synthetic construct
LNTRPRD

SEQ ID NO: 187895 - protein, 7 aa, synthetic construct
NMARMRD

SEQ ID NO: 187896 - protein, 7 aa, synthetic construct
NQTIKRD

SEQ ID NO: 187897 - protein, 7 aa, synthetic construct
DMTRANK

SEQ ID NO: 187898 - protein, 7 aa, synthetic construct
NMKVPRD

SEQ ID NO: 187899 - protein, 7 aa, synthetic construct
GMTRAEK

SEQ ID NO: 187900 - protein, 7 aa, synthetic construct
WMKTARD

SEQ ID NO: 187901 - protein, 7 aa, synthetic construct
PMDRARV

SEQ ID NO: 187902 - protein, 7 aa, synthetic construct
NMARERA

SEQ ID NO: 187903 - protein, 7 aa, synthetic construct
LMTNARQ

SEQ ID NO: 187904 - protein, 7 aa, synthetic construct
NVPRIRD

SEQ ID NO: 187905 - protein, 7 aa, synthetic construct
NDTSARR

SEQ ID NO: 187906 - protein, 7 aa, synthetic construct
TYTKARD

SEQ ID NO: 187907 - protein, 7 aa, synthetic construct
NSERARQ

SEQ ID NO: 187908 - protein, 7 aa, synthetic construct
LQPRARD

SEQ ID NO: 187909 - protein, 7 aa, synthetic construct
NMSRTRE

SEQ ID NO: 187910 - protein, 7 aa, synthetic construct
RVTPARD

SEQ ID NO: 187911 - protein, 7 aa, synthetic construct
NTMRTRD

SEQ ID NO: 187912 - protein, 7 aa, synthetic construct
RTTVARD

SEQ ID NO: 187913 - protein, 7 aa, synthetic construct
MMTSARA

SEQ ID NO: 187914 - protein, 7 aa, synthetic construct
NMGHARN

SEQ ID NO: 187915 - protein, 7 aa, synthetic construct
NITRKTD

SEQ ID NO: 187916 - protein, 7 aa, synthetic construct
NPIRQRD

SEQ ID NO: 187917 - protein, 7 aa, synthetic construct
SMKRAAD

SEQ ID NO: 187918 - protein, 7 aa, synthetic construct
NMKRITD

SEQ ID NO: 187919 - protein, 7 aa, synthetic construct
YKTIARD

SEQ ID NO: 187920 - protein, 7 aa, synthetic construct
QMTIKRD

SEQ ID NO: 187921 - protein, 7 aa, synthetic construct
NMQRVRD

SEQ ID NO: 187922 - protein, 7 aa, synthetic construct
NMTLTRA

SEQ ID NO: 187923 - protein, 7 aa, synthetic construct
NMERLRT

SEQ ID NO: 187924 - protein, 7 aa, synthetic construct
NMERAMK

SEQ ID NO: 187925 - protein, 7 aa, synthetic construct
NFTKLRD

SEQ ID NO: 187926 - protein, 7 aa, synthetic construct
AMERARS

SEQ ID NO: 187927 - protein, 7 aa, synthetic construct
KMTPYRD

SEQ ID NO: 187928 - protein, 7 aa, synthetic construct
KLTRALD

SEQ ID NO: 187929 - protein, 7 aa, synthetic construct
NQPRTRD

SEQ ID NO: 187930 - protein, 7 aa, synthetic construct
SVVRARD

SEQ ID NO: 187931 - protein, 7 aa, synthetic construct
LMNRLRD

SEQ ID NO: 187932 - protein, 7 aa, synthetic construct
NMGRMRE

SEQ ID NO: 187933 - protein, 7 aa, synthetic construct
DLTRARV

SEQ ID NO: 187934 - protein, 7 aa, synthetic construct
LMTLKRD

SEQ ID NO: 187935 - protein, 7 aa, synthetic construct
MMTRQRE

SEQ ID NO: 187936 - protein, 7 aa, synthetic construct
FMMKARD

SEQ ID NO: 187937 - protein, 7 aa, synthetic construct
NMKRMID

SEQ ID NO: 187938 - protein, 7 aa, synthetic construct
NMPRAAQ

SEQ ID NO: 187939 - protein, 7 aa, synthetic construct
NSTRERS

SEQ ID NO: 187940 - protein, 7 aa, synthetic construct
SGTRVRD

SEQ ID NO: 187941 - protein, 7 aa, synthetic construct
NDNRARL

SEQ ID NO: 187942 - protein, 7 aa, synthetic construct
MMTRKGD

SEQ ID NO: 187943 - protein, 7 aa, synthetic construct
NMTRENR

SEQ ID NO: 187944 - protein, 7 aa, synthetic construct
NMTRSEK

SEQ ID NO: 187945 - protein, 7 aa, synthetic construct
LKTYARD

SEQ ID NO: 187946 - protein, 7 aa, synthetic construct
KPTRAFD

SEQ ID NO: 187947 - protein, 7 aa, synthetic construct
DMTRSRG

SEQ ID NO: 187948 - protein, 7 aa, synthetic construct
LETRARM

SEQ ID NO: 187949 - protein, 7 aa, synthetic construct
TMGRLRD

SEQ ID NO: 187950 - protein, 7 aa, synthetic construct
LRTAARD

SEQ ID NO: 187951 - protein, 7 aa, synthetic construct
NDTRNRT

SEQ ID NO: 187952 - protein, 7 aa, synthetic construct
KMPRAID

SEQ ID NO: 187953 - protein, 7 aa, synthetic construct
NLNRAKD

SEQ ID NO: 187954 - protein, 7 aa, synthetic construct
TMGKARD

SEQ ID NO: 187955 - protein, 7 aa, synthetic construct
IMTRAKD

SEQ ID NO: 187956 - protein, 7 aa, synthetic construct
NQTRVKD

SEQ ID NO: 187957 - protein, 7 aa, synthetic construct
AMERARA

SEQ ID NO: 187958 - protein, 7 aa, synthetic construct
IPTRARD

SEQ ID NO: 187959 - protein, 7 aa, synthetic construct
MVPRARD

SEQ ID NO: 187960 - protein, 7 aa, synthetic construct
NSGRVRD

SEQ ID NO: 187961 - protein, 7 aa, synthetic construct
VDTRART

SEQ ID NO: 187962 - protein, 7 aa, synthetic construct
NITGKRD

SEQ ID NO: 187963 - protein, 7 aa, synthetic construct
NMERMRT

SEQ ID NO: 187964 - protein, 7 aa, synthetic construct
NPTRGRE

SEQ ID NO: 187965 - protein, 7 aa, synthetic construct
RVTQARD

SEQ ID NO: 187966 - protein, 7 aa, synthetic construct
AKTRAMD

SEQ ID NO: 187967 - protein, 7 aa, synthetic construct
KMTGYRD

SEQ ID NO: 187968 - protein, 7 aa, synthetic construct
PMTRAHG

SEQ ID NO: 187969 - protein, 7 aa, synthetic construct
VMPRNRD

SEQ ID NO: 187970 - protein, 7 aa, synthetic construct
LMQKARD

SEQ ID NO: 187971 - protein, 7 aa, synthetic construct
TVPRARD

SEQ ID NO: 187972 - protein, 7 aa, synthetic construct
YKTRAPD

SEQ ID NO: 187973 - protein, 7 aa, synthetic construct
LMMKARD

SEQ ID NO: 187974 - protein, 7 aa, synthetic construct
GMTRLKD

SEQ ID NO: 187975 - protein, 7 aa, synthetic construct
NMERAKY

SEQ ID NO: 187976 - protein, 7 aa, synthetic construct
NMDRQRS

SEQ ID NO: 187977 - protein, 7 aa, synthetic construct
NTRPARD

SEQ ID NO: 187978 - protein, 7 aa, synthetic construct
LATRARD

SEQ ID NO: 187979 - protein, 7 aa, synthetic construct
FMTGKRD

SEQ ID NO: 187980 - protein, 7 aa, synthetic construct
NMTYAKS

SEQ ID NO: 187981 - protein, 7 aa, synthetic construct
NMIGARG

SEQ ID NO: 187982 - protein, 7 aa, synthetic construct
NPTRKVD

SEQ ID NO: 187983 - protein, 7 aa, synthetic construct
IMNRARD

SEQ ID NO: 187984 - protein, 7 aa, synthetic construct
NMKFSRD

SEQ ID NO: 187985 - protein, 7 aa, synthetic construct
NMKFNRD

SEQ ID NO: 187986 - protein, 7 aa, synthetic construct
NMKRQVD

SEQ ID NO: 187987 - protein, 7 aa, synthetic construct
NITRKMD

SEQ ID NO: 187988 - protein, 7 aa, synthetic construct
DMARARS

SEQ ID NO: 187989 - protein, 7 aa, synthetic construct
NMDRMRT

SEQ ID NO: 187990 - protein, 7 aa, synthetic construct
KTTRASD

SEQ ID NO: 187991 - protein, 7 aa, synthetic construct
GMVRARE

SEQ ID NO: 187992 - protein, 7 aa, synthetic construct
YMTGKRD

SEQ ID NO: 187993 - protein, 7 aa, synthetic construct
YMTRVKD

SEQ ID NO: 187994 - protein, 7 aa, synthetic construct
NMKRSSD

SEQ ID NO: 187995 - protein, 7 aa, synthetic construct
MMIKARD

SEQ ID NO: 187996 - protein, 7 aa, synthetic construct
AMTEARK

SEQ ID NO: 187997 - protein, 7 aa, synthetic construct
NMDRIRV

SEQ ID NO: 187998 - protein, 7 aa, synthetic construct
KQTRALD

SEQ ID NO: 187999 - protein, 7 aa, synthetic construct
NQPRVRD

SEQ ID NO: 188000 - protein, 7 aa, synthetic construct
NMDRPRV

SEQ ID NO: 188001 - protein, 7 aa, synthetic construct
NKTHSRD

SEQ ID NO: 188002 - protein, 7 aa, synthetic construct
FMTNARG

SEQ ID NO: 188003 - protein, 7 aa, synthetic construct
NLTQKRD

SEQ ID NO: 188004 - protein, 7 aa, synthetic construct
NMVKARD

SEQ ID NO: 188005 - protein, 7 aa, synthetic construct
RATRAGD

SEQ ID NO: 188006 - protein, 7 aa, synthetic construct
NDTRMRG

SEQ ID NO: 188007 - protein, 7 aa, synthetic construct
TMTHARG

SEQ ID NO: 188008 - protein, 7 aa, synthetic construct
NKMRAQD

SEQ ID NO: 188009 - protein, 7 aa, synthetic construct
KMQRAVD

SEQ ID NO: 188010 - protein, 7 aa, synthetic construct
NRNPARD

SEQ ID NO: 188011 - protein, 7 aa, synthetic construct
SGTRLRD

SEQ ID NO: 188012 - protein, 7 aa, synthetic construct
NVTLRRD

SEQ ID NO: 188013 - protein, 7 aa, synthetic construct
NFTKPRD

SEQ ID NO: 188014 - protein, 7 aa, synthetic construct
NMDRAKH

SEQ ID NO: 188015 - protein, 7 aa, synthetic construct
NMLRARE

SEQ ID NO: 188016 - protein, 7 aa, synthetic construct
NMPRKFD

SEQ ID NO: 188017 - protein, 7 aa, synthetic construct
ISTRAKD

SEQ ID NO: 188018 - protein, 7 aa, synthetic construct
NMDRPRL

SEQ ID NO: 188019 - protein, 7 aa, synthetic construct
NTSRAKD

SEQ ID NO: 188020 - protein, 7 aa, synthetic construct
MMTRAQL

SEQ ID NO: 188021 - protein, 7 aa, synthetic construct
MKTRAVD

SEQ ID NO: 188022 - protein, 7 aa, synthetic construct
NMERIRT

SEQ ID NO: 188023 - protein, 7 aa, synthetic construct
NMKRIMD

SEQ ID NO: 188024 - protein, 7 aa, synthetic construct
NEVRARP

SEQ ID NO: 188025 - protein, 7 aa, synthetic construct
NYTKVRD

SEQ ID NO: 188026 - protein, 7 aa, synthetic construct
NMERIRN

SEQ ID NO: 188027 - protein, 7 aa, synthetic construct
YMTRTKD

SEQ ID NO: 188028 - protein, 7 aa, synthetic construct
NVDRARQ

SEQ ID NO: 188029 - protein, 7 aa, synthetic construct
NKHQARD

SEQ ID NO: 188030 - protein, 7 aa, synthetic construct
NMPVKRD

SEQ ID NO: 188031 - protein, 7 aa, synthetic construct
NKARASD

SEQ ID NO: 188032 - protein, 7 aa, synthetic construct
LMTRAHA

SEQ ID NO: 188033 - protein, 7 aa, synthetic construct
RMTRVGD

SEQ ID NO: 188034 - protein, 7 aa, synthetic construct
LMTRAQQ

SEQ ID NO: 188035 - protein, 7 aa, synthetic construct
AMTRANQ

SEQ ID NO: 188036 - protein, 7 aa, synthetic construct
IMTNARS

SEQ ID NO: 188037 - protein, 7 aa, synthetic construct
NEARARI

SEQ ID NO: 188038 - protein, 7 aa, synthetic construct
PMTRVKD

SEQ ID NO: 188039 - protein, 7 aa, synthetic construct
NMTRAEK

SEQ ID NO: 188040 - protein, 7 aa, synthetic construct
WMTKAKD

SEQ ID NO: 188041 - protein, 7 aa, synthetic construct
EMTRTRP

SEQ ID NO: 188042 - protein, 7 aa, synthetic construct
GMSKARD

SEQ ID NO: 188043 - protein, 7 aa, synthetic construct
NMPRQRE

SEQ ID NO: 188044 - protein, 7 aa, synthetic construct
NRTLIRD

SEQ ID NO: 188045 - protein, 7 aa, synthetic construct
PMERARG

SEQ ID NO: 188046 - protein, 7 aa, synthetic construct
NIGRAKD

SEQ ID NO: 188047 - protein, 7 aa, synthetic construct
NMIRERS

SEQ ID NO: 188048 - protein, 7 aa, synthetic construct
YATRIRD

SEQ ID NO: 188049 - protein, 7 aa, synthetic construct
QMTAKRD

SEQ ID NO: 188050 - protein, 7 aa, synthetic construct
GTTRLRD

SEQ ID NO: 188051 - protein, 7 aa, synthetic construct
NMSRLKD

SEQ ID NO: 188052 - protein, 7 aa, synthetic construct
DNTRARA

SEQ ID NO: 188053 - protein, 7 aa, synthetic construct
NIKRERD

SEQ ID NO: 188054 - protein, 7 aa, synthetic construct
QDTRARS

SEQ ID NO: 188055 - protein, 7 aa, synthetic construct
NMKRTGD

SEQ ID NO: 188056 - protein, 7 aa, synthetic construct
TMNRLRD

SEQ ID NO: 188057 - protein, 7 aa, synthetic construct
NIMRTRD

SEQ ID NO: 188058 - protein, 7 aa, synthetic construct
QMTRATM

SEQ ID NO: 188059 - protein, 7 aa, synthetic construct
LQTRARE

SEQ ID NO: 188060 - protein, 7 aa, synthetic construct
NMIRKSD

SEQ ID NO: 188061 - protein, 7 aa, synthetic construct
QMTRERA

SEQ ID NO: 188062 - protein, 7 aa, synthetic construct
KADRARD

SEQ ID NO: 188063 - protein, 7 aa, synthetic construct
FKTLARD

SEQ ID NO: 188064 - protein, 7 aa, synthetic construct
NMQVKRD

SEQ ID NO: 188065 - protein, 7 aa, synthetic construct
VMDRARG

SEQ ID NO: 188066 - protein, 7 aa, synthetic construct
NKLYARD

SEQ ID NO: 188067 - protein, 7 aa, synthetic construct
NLGRARE

SEQ ID NO: 188068 - protein, 7 aa, synthetic construct
NMPRMRD

SEQ ID NO: 188069 - protein, 7 aa, synthetic construct
SMTRERI

SEQ ID NO: 188070 - protein, 7 aa, synthetic construct
NMKRERD

SEQ ID NO: 188071 - protein, 7 aa, synthetic construct
NATRQRE

SEQ ID NO: 188072 - protein, 7 aa, synthetic construct
KMTRVID

SEQ ID NO: 188073 - protein, 7 aa, synthetic construct
AMTRERN

SEQ ID NO: 188074 - protein, 7 aa, synthetic construct
NITRERV

SEQ ID NO: 188075 - protein, 7 aa, synthetic construct
IMDRARH

SEQ ID NO: 188076 - protein, 7 aa, synthetic construct
ISTRQRD

SEQ ID NO: 188077 - protein, 7 aa, synthetic construct
KLTRAAD

SEQ ID NO: 188078 - protein, 7 aa, synthetic construct
NVVRPRD

SEQ ID NO: 188079 - protein, 7 aa, synthetic construct
NKARAAD

SEQ ID NO: 188080 - protein, 7 aa, synthetic construct
LMTTARG

SEQ ID NO: 188081 - protein, 7 aa, synthetic construct
KMLRAQD

SEQ ID NO: 188082 - protein, 7 aa, synthetic construct
SMTKPRD

SEQ ID NO: 188083 - protein, 7 aa, synthetic construct
NMGRADK

SEQ ID NO: 188084 - protein, 7 aa, synthetic construct
NRTLQRD

SEQ ID NO: 188085 - protein, 7 aa, synthetic construct
NMFKSRD

SEQ ID NO: 188086 - protein, 7 aa, synthetic construct
NMKGYRD

SEQ ID NO: 188087 - protein, 7 aa, synthetic construct
NMTRMRD

SEQ ID NO: 188088 - protein, 7 aa, synthetic construct
NMKRGQD

SEQ ID NO: 188089 - protein, 7 aa, synthetic construct
NTLRARE

SEQ ID NO: 188090 - protein, 7 aa, synthetic construct
NPGRLRD

SEQ ID NO: 188091 - protein, 7 aa, synthetic construct
VLTRGRD

SEQ ID NO: 188092 - protein, 7 aa, synthetic construct
NMMRARD

SEQ ID NO: 188093 - protein, 7 aa, synthetic construct
NMVRPKD

SEQ ID NO: 188094 - protein, 7 aa, synthetic construct
NQARVRD

SEQ ID NO: 188095 - protein, 7 aa, synthetic construct
NRTVSRD

SEQ ID NO: 188096 - protein, 7 aa, synthetic construct
MPTRARE

SEQ ID NO: 188097 - protein, 7 aa, synthetic construct
NPLRGRD

SEQ ID NO: 188098 - protein, 7 aa, synthetic construct
TMTEARK

SEQ ID NO: 188099 - protein, 7 aa, synthetic construct
TMTRMRD

SEQ ID NO: 188100 - protein, 7 aa, synthetic construct
KQTRAAD

SEQ ID NO: 188101 - protein, 7 aa, synthetic construct
KETRMRD

SEQ ID NO: 188102 - protein, 7 aa, synthetic construct
NTNRLRD

SEQ ID NO: 188103 - protein, 7 aa, synthetic construct
LLARARD

SEQ ID NO: 188104 - protein, 7 aa, synthetic construct
PMTHARG

SEQ ID NO: 188105 - protein, 7 aa, synthetic construct
NTGRMRD

SEQ ID NO: 188106 - protein, 7 aa, synthetic construct
SVTRTRD

SEQ ID NO: 188107 - protein, 7 aa, synthetic construct
NDARARM

SEQ ID NO: 188108 - protein, 7 aa, synthetic construct
NPARLRD

SEQ ID NO: 188109 - protein, 7 aa, synthetic construct
EPTRARV

SEQ ID NO: 188110 - protein, 7 aa, synthetic construct
VGTRLRD

SEQ ID NO: 188111 - protein, 7 aa, synthetic construct
NKTRSVD

SEQ ID NO: 188112 - protein, 7 aa, synthetic construct
NSTRPRE

SEQ ID NO: 188113 - protein, 7 aa, synthetic construct
ITTRAKD

SEQ ID NO: 188114 - protein, 7 aa, synthetic construct
NMTKFRE

SEQ ID NO: 188115 - protein, 7 aa, synthetic construct
TPTRIRD

SEQ ID NO: 188116 - protein, 7 aa, synthetic construct
NMDRARI

SEQ ID NO: 188117 - protein, 7 aa, synthetic construct
NETRMRA

SEQ ID NO: 188118 - protein, 7 aa, synthetic construct
NMERQRV

SEQ ID NO: 188119 - protein, 7 aa, synthetic construct
NMVRQRE

SEQ ID NO: 188120 - protein, 7 aa, synthetic construct
NIMRARE

SEQ ID NO: 188121 - protein, 7 aa, synthetic construct
NDTRPRA

SEQ ID NO: 188122 - protein, 7 aa, synthetic construct
NMKRSQD

SEQ ID NO: 188123 - protein, 7 aa, synthetic construct
VMTRATG

SEQ ID NO: 188124 - protein, 7 aa, synthetic construct
AMDRARN

SEQ ID NO: 188125 - protein, 7 aa, synthetic construct
YMPRARE

SEQ ID NO: 188126 - protein, 7 aa, synthetic construct
SMTNARQ

SEQ ID NO: 188127 - protein, 7 aa, synthetic construct
VGTRVRD

SEQ ID NO: 188128 - protein, 7 aa, synthetic construct
KTTRAPD

SEQ ID NO: 188129 - protein, 7 aa, synthetic construct
NPIRMRD

SEQ ID NO: 188130 - protein, 7 aa, synthetic construct
NITRGRE

SEQ ID NO: 188131 - protein, 7 aa, synthetic construct
NTPRIRD

SEQ ID NO: 188132 - protein, 7 aa, synthetic construct
FTPRARD

SEQ ID NO: 188133 - protein, 7 aa, synthetic construct
IMNRLRD

SEQ ID NO: 188134 - protein, 7 aa, synthetic construct
NMTRDKA

SEQ ID NO: 188135 - protein, 7 aa, synthetic construct
NIARAKD

SEQ ID NO: 188136 - protein, 7 aa, synthetic construct
KMTRILD

SEQ ID NO: 188137 - protein, 7 aa, synthetic construct
NMLRKLD

SEQ ID NO: 188138 - protein, 7 aa, synthetic construct
PMTRTKD

SEQ ID NO: 188139 - protein, 7 aa, synthetic construct
SMTRMKD

SEQ ID NO: 188140 - protein, 7 aa, synthetic construct
IMTRERP

SEQ ID NO: 188141 - protein, 7 aa, synthetic construct
MMTRATI

SEQ ID NO: 188142 - protein, 7 aa, synthetic construct
AKTFARD

SEQ ID NO: 188143 - protein, 7 aa, synthetic construct
NETRLRQ

SEQ ID NO: 188144 - protein, 7 aa, synthetic construct
NKTTYRD

SEQ ID NO: 188145 - protein, 7 aa, synthetic construct
QMARGRD

SEQ ID NO: 188146 - protein, 7 aa, synthetic construct
VAVRARD

SEQ ID NO: 188147 - protein, 7 aa, synthetic construct
NMTRPER

SEQ ID NO: 188148 - protein, 7 aa, synthetic construct
YMTGARG

SEQ ID NO: 188149 - protein, 7 aa, synthetic construct
NETRAVK

SEQ ID NO: 188150 - protein, 7 aa, synthetic construct
DQTRARI

SEQ ID NO: 188151 - protein, 7 aa, synthetic construct
NVPRLRD

SEQ ID NO: 188152 - protein, 7 aa, synthetic construct
NKQRAID

SEQ ID NO: 188153 - protein, 7 aa, synthetic construct
IMNRTRD

SEQ ID NO: 188154 - protein, 7 aa, synthetic construct
AMARPRD

SEQ ID NO: 188155 - protein, 7 aa, synthetic construct
KMVRAGD

SEQ ID NO: 188156 - protein, 7 aa, synthetic construct
VMARAKD

SEQ ID NO: 188157 - protein, 7 aa, synthetic construct
NMPVARH

SEQ ID NO: 188158 - protein, 7 aa, synthetic construct
NMSSKRD

SEQ ID NO: 188159 - protein, 7 aa, synthetic construct
NMIRKQD

SEQ ID NO: 188160 - protein, 7 aa, synthetic construct
NDTRPRV

SEQ ID NO: 188161 - protein, 7 aa, synthetic construct
NMLRERS

SEQ ID NO: 188162 - protein, 7 aa, synthetic construct
LMKRALD

SEQ ID NO: 188163 - protein, 7 aa, synthetic construct
GMTRIKD

SEQ ID NO: 188164 - protein, 7 aa, synthetic construct
SMVRTRD

SEQ ID NO: 188165 - protein, 7 aa, synthetic construct
NMVKHRD

SEQ ID NO: 188166 - protein, 7 aa, synthetic construct
DMTRAKM

SEQ ID NO: 188167 - protein, 7 aa, synthetic construct
KMTRMLD

SEQ ID NO: 188168 - protein, 7 aa, synthetic construct
DMVRARA

SEQ ID NO: 188169 - protein, 7 aa, synthetic construct
NMALRRD

SEQ ID NO: 188170 - protein, 7 aa, synthetic construct
NETRLRN

SEQ ID NO: 188171 - protein, 7 aa, synthetic construct
FMSRAKD

SEQ ID NO: 188172 - protein, 7 aa, synthetic construct
VMPRGRD

SEQ ID NO: 188173 - protein, 7 aa, synthetic construct
MMDRARM

SEQ ID NO: 188174 - protein, 7 aa, synthetic construct
NITMKRD

SEQ ID NO: 188175 - protein, 7 aa, synthetic construct
MMVKARD

SEQ ID NO: 188176 - protein, 7 aa, synthetic construct
NMKRTPD

SEQ ID NO: 188177 - protein, 7 aa, synthetic construct
KMTRAAE

SEQ ID NO: 188178 - protein, 7 aa, synthetic construct
EMTPARK

SEQ ID NO: 188179 - protein, 7 aa, synthetic construct
LMKRERD

SEQ ID NO: 188180 - protein, 7 aa, synthetic construct
KMERMRD

SEQ ID NO: 188181 - protein, 7 aa, synthetic construct
NPQRAKD

SEQ ID NO: 188182 - protein, 7 aa, synthetic construct
NDTRMRA

SEQ ID NO: 188183 - protein, 7 aa, synthetic construct
DPTRARA

SEQ ID NO: 188184 - protein, 7 aa, synthetic construct
GMMRVRD

SEQ ID NO: 188185 - protein, 7 aa, synthetic construct
NMPTARH

SEQ ID NO: 188186 - protein, 7 aa, synthetic construct
QQTKARD

SEQ ID NO: 188187 - protein, 7 aa, synthetic construct
KQTRATD

SEQ ID NO: 188188 - protein, 7 aa, synthetic construct
IMKRALD

SEQ ID NO: 188189 - protein, 7 aa, synthetic construct
PMNRVRD

SEQ ID NO: 188190 - protein, 7 aa, synthetic construct
NLTRERP

SEQ ID NO: 188191 - protein, 7 aa, synthetic construct
SMIRAKD

SEQ ID NO: 188192 - protein, 7 aa, synthetic construct
MMTMKRD

SEQ ID NO: 188193 - protein, 7 aa, synthetic construct
KMTGHRD

SEQ ID NO: 188194 - protein, 7 aa, synthetic construct
DMKRLRD

SEQ ID NO: 188195 - protein, 7 aa, synthetic construct
NLQRAKD

SEQ ID NO: 188196 - protein, 7 aa, synthetic construct
RLTTARD

SEQ ID NO: 188197 - protein, 7 aa, synthetic construct
NRTVVRD

SEQ ID NO: 188198 - protein, 7 aa, synthetic construct
LMARNRD

SEQ ID NO: 188199 - protein, 7 aa, synthetic construct
IGTRGRD

SEQ ID NO: 188200 - protein, 7 aa, synthetic construct
NMPRASQ

SEQ ID NO: 188201 - protein, 7 aa, synthetic construct
YKTHARD

SEQ ID NO: 188202 - protein, 7 aa, synthetic construct
GTTRAKD

SEQ ID NO: 188203 - protein, 7 aa, synthetic construct
NIVRARE

SEQ ID NO: 188204 - protein, 7 aa, synthetic construct
NKTRAAD

SEQ ID NO: 188205 - protein, 7 aa, synthetic construct
ATTRLRD

SEQ ID NO: 188206 - protein, 7 aa, synthetic construct
QMTRERG

SEQ ID NO: 188207 - protein, 7 aa, synthetic construct
NMGKQRD

SEQ ID NO: 188208 - protein, 7 aa, synthetic construct
PRTAARD

SEQ ID NO: 188209 - protein, 7 aa, synthetic construct
EMTRAVK

SEQ ID NO: 188210 - protein, 7 aa, synthetic construct
NMIRMRE

SEQ ID NO: 188211 - protein, 7 aa, synthetic construct
NMTRKDV

SEQ ID NO: 188212 - protein, 7 aa, synthetic construct
KMSLARD

SEQ ID NO: 188213 - protein, 7 aa, synthetic construct
TMPRTRD

SEQ ID NO: 188214 - protein, 7 aa, synthetic construct
NLTRMRD

SEQ ID NO: 188215 - protein, 7 aa, synthetic construct
IVTRAKD

SEQ ID NO: 188216 - protein, 7 aa, synthetic construct
NMPRAQQ

SEQ ID NO: 188217 - protein, 7 aa, synthetic construct
NMFKTRD

SEQ ID NO: 188218 - protein, 7 aa, synthetic construct
LKTRALD

SEQ ID NO: 188219 - protein, 7 aa, synthetic construct
NLHKARD

SEQ ID NO: 188220 - protein, 7 aa, synthetic construct
NVGRTRD

SEQ ID NO: 188221 - protein, 7 aa, synthetic construct
VQARARD

SEQ ID NO: 188222 - protein, 7 aa, synthetic construct
NYMKARD

SEQ ID NO: 188223 - protein, 7 aa, synthetic construct
NMRPPRD

SEQ ID NO: 188224 - protein, 7 aa, synthetic construct
NMTREKA

SEQ ID NO: 188225 - protein, 7 aa, synthetic construct
NKDRARD

SEQ ID NO: 188226 - protein, 7 aa, synthetic construct
ILTRGRD

SEQ ID NO: 188227 - protein, 7 aa, synthetic construct
NDTRMRP

SEQ ID NO: 188228 - protein, 7 aa, synthetic construct
NETRARP

SEQ ID NO: 188229 - protein, 7 aa, synthetic construct
PMKHARD

SEQ ID NO: 188230 - protein, 7 aa, synthetic construct
NMIVKRD

SEQ ID NO: 188231 - protein, 7 aa, synthetic construct
NKARAND

SEQ ID NO: 188232 - protein, 7 aa, synthetic construct
MMTRLKD

SEQ ID NO: 188233 - protein, 7 aa, synthetic construct
PMPRGRD

SEQ ID NO: 188234 - protein, 7 aa, synthetic construct
NMMRQRE

SEQ ID NO: 188235 - protein, 7 aa, synthetic construct
AMPRSRD

SEQ ID NO: 188236 - protein, 7 aa, synthetic construct
NMDRGRG

SEQ ID NO: 188237 - protein, 7 aa, synthetic construct
MMTTARQ

SEQ ID NO: 188238 - protein, 7 aa, synthetic construct
NMTREKT

SEQ ID NO: 188239 - protein, 7 aa, synthetic construct
NMRIPRD

SEQ ID NO: 188240 - protein, 7 aa, synthetic construct
VMTTARM

SEQ ID NO: 188241 - protein, 7 aa, synthetic construct
NMRQPRD

SEQ ID NO: 188242 - protein, 7 aa, synthetic construct
TMTPKRD

SEQ ID NO: 188243 - protein, 7 aa, synthetic construct
NPTPKRD

SEQ ID NO: 188244 - protein, 7 aa, synthetic construct
NDTRALK

SEQ ID NO: 188245 - protein, 7 aa, synthetic construct
NKYTARD

SEQ ID NO: 188246 - protein, 7 aa, synthetic construct
NMMVKRD

SEQ ID NO: 188247 - protein, 7 aa, synthetic construct
QMTKARD

SEQ ID NO: 188248 - protein, 7 aa, synthetic construct
MMARVRD

SEQ ID NO: 188249 - protein, 7 aa, synthetic construct
VMTNARH

SEQ ID NO: 188250 - protein, 7 aa, synthetic construct
NSTRQKD

SEQ ID NO: 188251 - protein, 7 aa, synthetic construct
KSTRALD

SEQ ID NO: 188252 - protein, 7 aa, synthetic construct
GMAKARD

SEQ ID NO: 188253 - protein, 7 aa, synthetic construct
NKTRADM

SEQ ID NO: 188254 - protein, 7 aa, synthetic construct
NLRNARD

SEQ ID NO: 188255 - protein, 7 aa, synthetic construct
NMPHARS

SEQ ID NO: 188256 - protein, 7 aa, synthetic construct
NPKRALD

SEQ ID NO: 188257 - protein, 7 aa, synthetic construct
NPVRMRD

SEQ ID NO: 188258 - protein, 7 aa, synthetic construct
NDPRARN

SEQ ID NO: 188259 - protein, 7 aa, synthetic construct
NVLRVRD

SEQ ID NO: 188260 - protein, 7 aa, synthetic construct
GTTRVRD

SEQ ID NO: 188261 - protein, 7 aa, synthetic construct
DTTRARI

SEQ ID NO: 188262 - protein, 7 aa, synthetic construct
NMERQRS

SEQ ID NO: 188263 - protein, 7 aa, synthetic construct
KMTRVQD

SEQ ID NO: 188264 - protein, 7 aa, synthetic construct
NKTRGGD

SEQ ID NO: 188265 - protein, 7 aa, synthetic construct
NSTRNRE

SEQ ID NO: 188266 - protein, 7 aa, synthetic construct
VMKRAMD

SEQ ID NO: 188267 - protein, 7 aa, synthetic construct
KMIRAVD

SEQ ID NO: 188268 - protein, 7 aa, synthetic construct
NMERMRS

SEQ ID NO: 188269 - protein, 7 aa, synthetic construct
AETRARP

SEQ ID NO: 188270 - protein, 7 aa, synthetic construct
TMARGRD

SEQ ID NO: 188271 - protein, 7 aa, synthetic construct
LGTRTRD

SEQ ID NO: 188272 - protein, 7 aa, synthetic construct
NLTAKRD

SEQ ID NO: 188273 - protein, 7 aa, synthetic construct
GMERARG

SEQ ID NO: 188274 - protein, 7 aa, synthetic construct
YDTRARA

SEQ ID NO: 188275 - protein, 7 aa, synthetic construct
EMTRAQK

SEQ ID NO: 188276 - protein, 7 aa, synthetic construct
NMKAFRD

SEQ ID NO: 188277 - protein, 7 aa, synthetic construct
DATRARA

SEQ ID NO: 188278 - protein, 7 aa, synthetic construct
NETKARV

SEQ ID NO: 188279 - protein, 7 aa, synthetic construct
TATRAKD

SEQ ID NO: 188280 - protein, 7 aa, synthetic construct
AMTRAKD

SEQ ID NO: 188281 - protein, 7 aa, synthetic construct
TVTRMRD

SEQ ID NO: 188282 - protein, 7 aa, synthetic construct
LMTRGRD

SEQ ID NO: 188283 - protein, 7 aa, synthetic construct
VMTAKRD

SEQ ID NO: 188284 - protein, 7 aa, synthetic construct
NMKRNID

SEQ ID NO: 188285 - protein, 7 aa, synthetic construct
MMTRERP

SEQ ID NO: 188286 - protein, 7 aa, synthetic construct
NVQRLRD

SEQ ID NO: 188287 - protein, 7 aa, synthetic construct
TLTRPRD

SEQ ID NO: 188288 - protein, 7 aa, synthetic construct
ILNRARD

SEQ ID NO: 188289 - protein, 7 aa, synthetic construct
NITRKQD

SEQ ID NO: 188290 - protein, 7 aa, synthetic construct
NETRGRT

SEQ ID NO: 188291 - protein, 7 aa, synthetic construct
NDTRAKS

SEQ ID NO: 188292 - protein, 7 aa, synthetic construct
NETRIRN

SEQ ID NO: 188293 - protein, 7 aa, synthetic construct
NKERARD

SEQ ID NO: 188294 - protein, 7 aa, synthetic construct
NMVRSRD

SEQ ID NO: 188295 - protein, 7 aa, synthetic construct
NDTRSRA

SEQ ID NO: 188296 - protein, 7 aa, synthetic construct
ISTRARE

SEQ ID NO: 188297 - protein, 7 aa, synthetic construct
WMTKTRD

SEQ ID NO: 188298 - protein, 7 aa, synthetic construct
NVKRALD

SEQ ID NO: 188299 - protein, 7 aa, synthetic construct
NDTKKRD

SEQ ID NO: 188300 - protein, 7 aa, synthetic construct
IATRGRD

SEQ ID NO: 188301 - protein, 7 aa, synthetic construct
VMERARV

SEQ ID NO: 188302 - protein, 7 aa, synthetic construct
NDTRPRM

SEQ ID NO: 188303 - protein, 7 aa, synthetic construct
NMAMRRD

SEQ ID NO: 188304 - protein, 7 aa, synthetic construct
NKSRAID

SEQ ID NO: 188305 - protein, 7 aa, synthetic construct
MPTRLRD

SEQ ID NO: 188306 - protein, 7 aa, synthetic construct
GMARLRD

SEQ ID NO: 188307 - protein, 7 aa, synthetic construct
NETRTRI

SEQ ID NO: 188308 - protein, 7 aa, synthetic construct
NQKRAPD

SEQ ID NO: 188309 - protein, 7 aa, synthetic construct
NMNRIRD

SEQ ID NO: 188310 - protein, 7 aa, synthetic construct
NKIRALD

SEQ ID NO: 188311 - protein, 7 aa, synthetic construct
NMVRPRD

SEQ ID NO: 188312 - protein, 7 aa, synthetic construct
NKLRAVD

SEQ ID NO: 188313 - protein, 7 aa, synthetic construct
HMTKPRD

SEQ ID NO: 188314 - protein, 7 aa, synthetic construct
NITEARR

SEQ ID NO: 188315 - protein, 7 aa, synthetic construct
NMTETRR

SEQ ID NO: 188316 - protein, 7 aa, synthetic construct
DMTRPRG

SEQ ID NO: 188317 - protein, 7 aa, synthetic construct
NRTKERD

SEQ ID NO: 188318 - protein, 7 aa, synthetic construct
NMPRGRD

SEQ ID NO: 188319 - protein, 7 aa, synthetic construct
IAARARD

SEQ ID NO: 188320 - protein, 7 aa, synthetic construct
PMMRAKD

SEQ ID NO: 188321 - protein, 7 aa, synthetic construct
NAMRLRD

SEQ ID NO: 188322 - protein, 7 aa, synthetic construct
NVMRIRD

SEQ ID NO: 188323 - protein, 7 aa, synthetic construct
FMKRAPD

SEQ ID NO: 188324 - protein, 7 aa, synthetic construct
NVVRVRD

SEQ ID NO: 188325 - protein, 7 aa, synthetic construct
NFTKARD

SEQ ID NO: 188326 - protein, 7 aa, synthetic construct
NMRTIRD

SEQ ID NO: 188327 - protein, 7 aa, synthetic construct
IMTPARH

SEQ ID NO: 188328 - protein, 7 aa, synthetic construct
KMTRTPD

SEQ ID NO: 188329 - protein, 7 aa, synthetic construct
NIARTRD

SEQ ID NO: 188330 - protein, 7 aa, synthetic construct
DMTRARP

SEQ ID NO: 188331 - protein, 7 aa, synthetic construct
NMPRADR

SEQ ID NO: 188332 - protein, 7 aa, synthetic construct
LMKRAMD

SEQ ID NO: 188333 - protein, 7 aa, synthetic construct
NYKVARD

SEQ ID NO: 188334 - protein, 7 aa, synthetic construct
NMNRSKD

SEQ ID NO: 188335 - protein, 7 aa, synthetic construct
PMKRALD

SEQ ID NO: 188336 - protein, 7 aa, synthetic construct
QATRIRD

SEQ ID NO: 188337 - protein, 7 aa, synthetic construct
NMERASK

SEQ ID NO: 188338 - protein, 7 aa, synthetic construct
RMSPARD

SEQ ID NO: 188339 - protein, 7 aa, synthetic construct
QMNKARD

SEQ ID NO: 188340 - protein, 7 aa, synthetic construct
NKGHARD

SEQ ID NO: 188341 - protein, 7 aa, synthetic construct
GMLKARD

SEQ ID NO: 188342 - protein, 7 aa, synthetic construct
TMTRGRD

SEQ ID NO: 188343 - protein, 7 aa, synthetic construct
NETRAFK

SEQ ID NO: 188344 - protein, 7 aa, synthetic construct
LMDRARS

SEQ ID NO: 188345 - protein, 7 aa, synthetic construct
NKFQARD

SEQ ID NO: 188346 - protein, 7 aa, synthetic construct
NKERQRD

SEQ ID NO: 188347 - protein, 7 aa, synthetic construct
NMDRQRI

SEQ ID NO: 188348 - protein, 7 aa, synthetic construct
TQTRARE

SEQ ID NO: 188349 - protein, 7 aa, synthetic construct
NMGAKRD

SEQ ID NO: 188350 - protein, 7 aa, synthetic construct
SMKYARD

SEQ ID NO: 188351 - protein, 7 aa, synthetic construct
NTIRQRD

SEQ ID NO: 188352 - protein, 7 aa, synthetic construct
NMKRNLD

SEQ ID NO: 188353 - protein, 7 aa, synthetic construct
IPTRLRD

SEQ ID NO: 188354 - protein, 7 aa, synthetic construct
NQTRMKD

SEQ ID NO: 188355 - protein, 7 aa, synthetic construct
FMVKARD

SEQ ID NO: 188356 - protein, 7 aa, synthetic construct
NETRAQR

SEQ ID NO: 188357 - protein, 7 aa, synthetic construct
NMERGRQ

SEQ ID NO: 188358 - protein, 7 aa, synthetic construct
KMHTARD

SEQ ID NO: 188359 - protein, 7 aa, synthetic construct
AKTRAAD

SEQ ID NO: 188360 - protein, 7 aa, synthetic construct
TSTRAKD

SEQ ID NO: 188361 - protein, 7 aa, synthetic construct
NKQRAPD

SEQ ID NO: 188362 - protein, 7 aa, synthetic construct
NKVRAVD

SEQ ID NO: 188363 - protein, 7 aa, synthetic construct
EMTRVRG

SEQ ID NO: 188364 - protein, 7 aa, synthetic construct
TMSKARD

SEQ ID NO: 188365 - protein, 7 aa, synthetic construct
NKTRAID

SEQ ID NO: 188366 - protein, 7 aa, synthetic construct
NMDAARK

SEQ ID NO: 188367 - protein, 7 aa, synthetic construct
NMDRQRN

SEQ ID NO: 188368 - protein, 7 aa, synthetic construct
NMTRADK

SEQ ID NO: 188369 - protein, 7 aa, synthetic construct
SQTRVRD

SEQ ID NO: 188370 - protein, 7 aa, synthetic construct
AMTRDRA

SEQ ID NO: 188371 - protein, 7 aa, synthetic construct
STTRVRD

SEQ ID NO: 188372 - protein, 7 aa, synthetic construct
YMTRASG

SEQ ID NO: 188373 - protein, 7 aa, synthetic construct
NMVRKMD

SEQ ID NO: 188374 - protein, 7 aa, synthetic construct
KMQRAQD

SEQ ID NO: 188375 - protein, 7 aa, synthetic construct
DATRARP

SEQ ID NO: 188376 - protein, 7 aa, synthetic construct
MLPRARD

SEQ ID NO: 188377 - protein, 7 aa, synthetic construct
NDSRARV

SEQ ID NO: 188378 - protein, 7 aa, synthetic construct
KMTRVMD

SEQ ID NO: 188379 - protein, 7 aa, synthetic construct
PMVRARE

SEQ ID NO: 188380 - protein, 7 aa, synthetic construct
NFTTKRD

SEQ ID NO: 188381 - protein, 7 aa, synthetic construct
NYSKARD

SEQ ID NO: 188382 - protein, 7 aa, synthetic construct
KELRARD

SEQ ID NO: 188383 - protein, 7 aa, synthetic construct
NIKFARD

SEQ ID NO: 188384 - protein, 7 aa, synthetic construct
NALRMRD

SEQ ID NO: 188385 - protein, 7 aa, synthetic construct
NIPRTRD

SEQ ID NO: 188386 - protein, 7 aa, synthetic construct
FMKMARD

SEQ ID NO: 188387 - protein, 7 aa, synthetic construct
AMTRASA

SEQ ID NO: 188388 - protein, 7 aa, synthetic construct
MMTQKRD

SEQ ID NO: 188389 - protein, 7 aa, synthetic construct
NMTTSRN

SEQ ID NO: 188390 - protein, 7 aa, synthetic construct
TPPRARD

SEQ ID NO: 188391 - protein, 7 aa, synthetic construct
LMGRAKD

SEQ ID NO: 188392 - protein, 7 aa, synthetic construct
SATRVRD

SEQ ID NO: 188393 - protein, 7 aa, synthetic construct
PMKRDRD

SEQ ID NO: 188394 - protein, 7 aa, synthetic construct
NVLRARE

SEQ ID NO: 188395 - protein, 7 aa, synthetic construct
NPTRMKD

SEQ ID NO: 188396 - protein, 7 aa, synthetic construct
IMDRARN

SEQ ID NO: 188397 - protein, 7 aa, synthetic construct
AMTRGRE

SEQ ID NO: 188398 - protein, 7 aa, synthetic construct
PATRAKD

SEQ ID NO: 188399 - protein, 7 aa, synthetic construct
NQTRSKD

SEQ ID NO: 188400 - protein, 7 aa, synthetic construct
IQTRLRD

SEQ ID NO: 188401 - protein, 7 aa, synthetic construct
KMARALD

SEQ ID NO: 188402 - protein, 7 aa, synthetic construct
NMERNRS

SEQ ID NO: 188403 - protein, 7 aa, synthetic construct
QMTVKRD

SEQ ID NO: 188404 - protein, 7 aa, synthetic construct
KEVRARD

SEQ ID NO: 188405 - protein, 7 aa, synthetic construct
LAVRARD

SEQ ID NO: 188406 - protein, 7 aa, synthetic construct
NDTKARF

SEQ ID NO: 188407 - protein, 7 aa, synthetic construct
KMMRATD

SEQ ID NO: 188408 - protein, 7 aa, synthetic construct
HQTKARD

SEQ ID NO: 188409 - protein, 7 aa, synthetic construct
QMTRATQ

SEQ ID NO: 188410 - protein, 7 aa, synthetic construct
NILRTRD

SEQ ID NO: 188411 - protein, 7 aa, synthetic construct
NNLRAKD

SEQ ID NO: 188412 - protein, 7 aa, synthetic construct
RMTSTRD

SEQ ID NO: 188413 - protein, 7 aa, synthetic construct
NVMRPRD

SEQ ID NO: 188414 - protein, 7 aa, synthetic construct
GMTGARN

SEQ ID NO: 188415 - protein, 7 aa, synthetic construct
NMPRERA

SEQ ID NO: 188416 - protein, 7 aa, synthetic construct
NPMRLRD

SEQ ID NO: 188417 - protein, 7 aa, synthetic construct
FMTKNRD

SEQ ID NO: 188418 - protein, 7 aa, synthetic construct
KMIRATD

SEQ ID NO: 188419 - protein, 7 aa, synthetic construct
VMERART

SEQ ID NO: 188420 - protein, 7 aa, synthetic construct
ITPRARD

SEQ ID NO: 188421 - protein, 7 aa, synthetic construct
NKHNARD

SEQ ID NO: 188422 - protein, 7 aa, synthetic construct
NFTKNRD

SEQ ID NO: 188423 - protein, 7 aa, synthetic construct
NMTERRV

SEQ ID NO: 188424 - protein, 7 aa, synthetic construct
DMGRARA

SEQ ID NO: 188425 - protein, 7 aa, synthetic construct
NMHPARN

SEQ ID NO: 188426 - protein, 7 aa, synthetic construct
NDTRAKY

SEQ ID NO: 188427 - protein, 7 aa, synthetic construct
SVQRARD

SEQ ID NO: 188428 - protein, 7 aa, synthetic construct
NVLRGRD

SEQ ID NO: 188429 - protein, 7 aa, synthetic construct
IMTRADR

SEQ ID NO: 188430 - protein, 7 aa, synthetic construct
NIQRPRD

SEQ ID NO: 188431 - protein, 7 aa, synthetic construct
NMTRHAV

SEQ ID NO: 188432 - protein, 7 aa, synthetic construct
VNVRARD

SEQ ID NO: 188433 - protein, 7 aa, synthetic construct
LMTVKRD

SEQ ID NO: 188434 - protein, 7 aa, synthetic construct
IMKRAID

SEQ ID NO: 188435 - protein, 7 aa, synthetic construct
NVTEARR

SEQ ID NO: 188436 - protein, 7 aa, synthetic construct
NKTSHRD

SEQ ID NO: 188437 - protein, 7 aa, synthetic construct
NKPNARD

SEQ ID NO: 188438 - protein, 7 aa, synthetic construct
TMPRPRD

SEQ ID NO: 188439 - protein, 7 aa, synthetic construct
GMTEARK

SEQ ID NO: 188440 - protein, 7 aa, synthetic construct
NITRLKD

SEQ ID NO: 188441 - protein, 7 aa, synthetic construct
QLTRARE

SEQ ID NO: 188442 - protein, 7 aa, synthetic construct
EMTRAKL

SEQ ID NO: 188443 - protein, 7 aa, synthetic construct
MMTRAAA

SEQ ID NO: 188444 - protein, 7 aa, synthetic construct
PMTRLKD

SEQ ID NO: 188445 - protein, 7 aa, synthetic construct
YGTRARE

SEQ ID NO: 188446 - protein, 7 aa, synthetic construct
QMTRAHS

SEQ ID NO: 188447 - protein, 7 aa, synthetic construct
NLNRARE

SEQ ID NO: 188448 - protein, 7 aa, synthetic construct
LMTNARA

SEQ ID NO: 188449 - protein, 7 aa, synthetic construct
MMDRARA

SEQ ID NO: 188450 - protein, 7 aa, synthetic construct
NKTRQVD

SEQ ID NO: 188451 - protein, 7 aa, synthetic construct
NDTRAPK

SEQ ID NO: 188452 - protein, 7 aa, synthetic construct
FSTRAKD

SEQ ID NO: 188453 - protein, 7 aa, synthetic construct
QMTRAHI

SEQ ID NO: 188454 - protein, 7 aa, synthetic construct
NSVRARD

SEQ ID NO: 188455 - protein, 7 aa, synthetic construct
LMTRERP

SEQ ID NO: 188456 - protein, 7 aa, synthetic construct
NATVRRD

SEQ ID NO: 188457 - protein, 7 aa, synthetic construct
YMTRAKD

SEQ ID NO: 188458 - protein, 7 aa, synthetic construct
KMTRTVD

SEQ ID NO: 188459 - protein, 7 aa, synthetic construct
QTTRIRD

SEQ ID NO: 188460 - protein, 7 aa, synthetic construct
NTTRPRE

SEQ ID NO: 188461 - protein, 7 aa, synthetic construct
DMTRLRA

SEQ ID NO: 188462 - protein, 7 aa, synthetic construct
NMKRQQD

SEQ ID NO: 188463 - protein, 7 aa, synthetic construct
NYQKARD

SEQ ID NO: 188464 - protein, 7 aa, synthetic construct
NMAHARN

SEQ ID NO: 188465 - protein, 7 aa, synthetic construct
NPTRSKD

SEQ ID NO: 188466 - protein, 7 aa, synthetic construct
AMTRATN

SEQ ID NO: 188467 - protein, 7 aa, synthetic construct
NIARMRD

SEQ ID NO: 188468 - protein, 7 aa, synthetic construct
NMKFARD

SEQ ID NO: 188469 - protein, 7 aa, synthetic construct
NNTRVRD

SEQ ID NO: 188470 - protein, 7 aa, synthetic construct
PITKARD

SEQ ID NO: 188471 - protein, 7 aa, synthetic construct
SMTRQRE

SEQ ID NO: 188472 - protein, 7 aa, synthetic construct
KMTRADI

SEQ ID NO: 188473 - protein, 7 aa, synthetic construct
NIPRNRD

SEQ ID NO: 188474 - protein, 7 aa, synthetic construct
NMTHARS

SEQ ID NO: 188475 - protein, 7 aa, synthetic construct
QMTRATL

SEQ ID NO: 188476 - protein, 7 aa, synthetic construct
KETRARE

SEQ ID NO: 188477 - protein, 7 aa, synthetic construct
VMARARE

SEQ ID NO: 188478 - protein, 7 aa, synthetic construct
KMNLARD

SEQ ID NO: 188479 - protein, 7 aa, synthetic construct
LSTRMRD

SEQ ID NO: 188480 - protein, 7 aa, synthetic construct
KMTLMRD

SEQ ID NO: 188481 - protein, 7 aa, synthetic construct
NLRTARD

SEQ ID NO: 188482 - protein, 7 aa, synthetic construct
IMTEARR

SEQ ID NO: 188483 - protein, 7 aa, synthetic construct
NMSRMKD

SEQ ID NO: 188484 - protein, 7 aa, synthetic construct
NLPRARD

SEQ ID NO: 188485 - protein, 7 aa, synthetic construct
NLGRMRD

SEQ ID NO: 188486 - protein, 7 aa, synthetic construct
TMTRVKD

SEQ ID NO: 188487 - protein, 7 aa, synthetic construct
NLIRTRD

SEQ ID NO: 188488 - protein, 7 aa, synthetic construct
NLRAARD

SEQ ID NO: 188489 - protein, 7 aa, synthetic construct
NSLRTRD

SEQ ID NO: 188490 - protein, 7 aa, synthetic construct
NQTRADR

SEQ ID NO: 188491 - protein, 7 aa, synthetic construct
NQTTKRD

SEQ ID NO: 188492 - protein, 7 aa, synthetic construct
KMTRAVE

SEQ ID NO: 188493 - protein, 7 aa, synthetic construct
NVLRAKD

SEQ ID NO: 188494 - protein, 7 aa, synthetic construct
NPTRIRE

SEQ ID NO: 188495 - protein, 7 aa, synthetic construct
NITRAER

SEQ ID NO: 188496 - protein, 7 aa, synthetic construct
NKMRAMD

SEQ ID NO: 188497 - protein, 7 aa, synthetic construct
LMTTARS

SEQ ID NO: 188498 - protein, 7 aa, synthetic construct
NMDGARR

SEQ ID NO: 188499 - protein, 7 aa, synthetic construct
TITRAKD

SEQ ID NO: 188500 - protein, 7 aa, synthetic construct
SPTRMRD

SEQ ID NO: 188501 - protein, 7 aa, synthetic construct
SMNKARD

SEQ ID NO: 188502 - protein, 7 aa, synthetic construct
LDTRARV

SEQ ID NO: 188503 - protein, 7 aa, synthetic construct
TMQRGRD

SEQ ID NO: 188504 - protein, 7 aa, synthetic construct
NQERARN

SEQ ID NO: 188505 - protein, 7 aa, synthetic construct
NPVRPRD

SEQ ID NO: 188506 - protein, 7 aa, synthetic construct
NMTERRI

SEQ ID NO: 188507 - protein, 7 aa, synthetic construct
NPDRARA

SEQ ID NO: 188508 - protein, 7 aa, synthetic construct
NMLIKRD

SEQ ID NO: 188509 - protein, 7 aa, synthetic construct
NLTRERN

SEQ ID NO: 188510 - protein, 7 aa, synthetic construct
LETRARP

SEQ ID NO: 188511 - protein, 7 aa, synthetic construct
NSTRAKD

SEQ ID NO: 188512 - protein, 7 aa, synthetic construct
SALRARD

SEQ ID NO: 188513 - protein, 7 aa, synthetic construct
NADRARN

SEQ ID NO: 188514 - protein, 7 aa, synthetic construct
NMVSKRD

SEQ ID NO: 188515 - protein, 7 aa, synthetic construct
SMERARG

SEQ ID NO: 188516 - protein, 7 aa, synthetic construct
NETRPRP

SEQ ID NO: 188517 - protein, 7 aa, synthetic construct
MMTRERV

SEQ ID NO: 188518 - protein, 7 aa, synthetic construct
NMTREVR

SEQ ID NO: 188519 - protein, 7 aa, synthetic construct
NVRVARD

SEQ ID NO: 188520 - protein, 7 aa, synthetic construct
IMTNARP

SEQ ID NO: 188521 - protein, 7 aa, synthetic construct
NYTKMRD

SEQ ID NO: 188522 - protein, 7 aa, synthetic construct
NDSRARP

SEQ ID NO: 188523 - protein, 7 aa, synthetic construct
NMTRPAH

SEQ ID NO: 188524 - protein, 7 aa, synthetic construct
YMTKPRD

SEQ ID NO: 188525 - protein, 7 aa, synthetic construct
NSTRNKD

SEQ ID NO: 188526 - protein, 7 aa, synthetic construct
GMTRERA

SEQ ID NO: 188527 - protein, 7 aa, synthetic construct
SPLRARD

SEQ ID NO: 188528 - protein, 7 aa, synthetic construct
NLRIARD

SEQ ID NO: 188529 - protein, 7 aa, synthetic construct
DMTTARK

SEQ ID NO: 188530 - protein, 7 aa, synthetic construct
RMTKAPD

SEQ ID NO: 188531 - protein, 7 aa, synthetic construct
NMPRSRD

SEQ ID NO: 188532 - protein, 7 aa, synthetic construct
NRTPLRD

SEQ ID NO: 188533 - protein, 7 aa, synthetic construct
SMKRERD

SEQ ID NO: 188534 - protein, 7 aa, synthetic construct
DMTRPRV

SEQ ID NO: 188535 - protein, 7 aa, synthetic construct
AKTRAVD

SEQ ID NO: 188536 - protein, 7 aa, synthetic construct
NMQRADK

SEQ ID NO: 188537 - protein, 7 aa, synthetic construct
QMTRASI

SEQ ID NO: 188538 - protein, 7 aa, synthetic construct
PMKRAMD

SEQ ID NO: 188539 - protein, 7 aa, synthetic construct
VMTRPRE

SEQ ID NO: 188540 - protein, 7 aa, synthetic construct
RMTKAAD

SEQ ID NO: 188541 - protein, 7 aa, synthetic construct
NETRMRM

SEQ ID NO: 188542 - protein, 7 aa, synthetic construct
AITRAKD

SEQ ID NO: 188543 - protein, 7 aa, synthetic construct
NKTYVRD

SEQ ID NO: 188544 - protein, 7 aa, synthetic construct
VMTRMRE

SEQ ID NO: 188545 - protein, 7 aa, synthetic construct
NMARSRE

SEQ ID NO: 188546 - protein, 7 aa, synthetic construct
NIKRAQD

SEQ ID NO: 188547 - protein, 7 aa, synthetic construct
NVDRART

SEQ ID NO: 188548 - protein, 7 aa, synthetic construct
NMTGHRP

SEQ ID NO: 188549 - protein, 7 aa, synthetic construct
NRPIARD

SEQ ID NO: 188550 - protein, 7 aa, synthetic construct
MMTRTRE

SEQ ID NO: 188551 - protein, 7 aa, synthetic construct
NMPRAHN

SEQ ID NO: 188552 - protein, 7 aa, synthetic construct
NQMRPRD

SEQ ID NO: 188553 - protein, 7 aa, synthetic construct
KMTRQAD

SEQ ID NO: 188554 - protein, 7 aa, synthetic construct
NMERMRI

SEQ ID NO: 188555 - protein, 7 aa, synthetic construct
EMPRARV

SEQ ID NO: 188556 - protein, 7 aa, synthetic construct
NSLRGRD

SEQ ID NO: 188557 - protein, 7 aa, synthetic construct
NAYKARD

SEQ ID NO: 188558 - protein, 7 aa, synthetic construct
VMTRATA

SEQ ID NO: 188559 - protein, 7 aa, synthetic construct
NMERGRG

SEQ ID NO: 188560 - protein, 7 aa, synthetic construct
NMANKRD

SEQ ID NO: 188561 - protein, 7 aa, synthetic construct
NMHGARQ

SEQ ID NO: 188562 - protein, 7 aa, synthetic construct
NITRTRE

SEQ ID NO: 188563 - protein, 7 aa, synthetic construct
GQTRARE

SEQ ID NO: 188564 - protein, 7 aa, synthetic construct
MMTHARG

SEQ ID NO: 188565 - protein, 7 aa, synthetic construct
NMPRAIN

SEQ ID NO: 188566 - protein, 7 aa, synthetic construct
MMTRATL

SEQ ID NO: 188567 - protein, 7 aa, synthetic construct
KMTRGND

SEQ ID NO: 188568 - protein, 7 aa, synthetic construct
NMSGARN

SEQ ID NO: 188569 - protein, 7 aa, synthetic construct
NMPRVRE

SEQ ID NO: 188570 - protein, 7 aa, synthetic construct
RMTKAVD

SEQ ID NO: 188571 - protein, 7 aa, synthetic construct
GMQKARD

SEQ ID NO: 188572 - protein, 7 aa, synthetic construct
NNTRPKD

SEQ ID NO: 188573 - protein, 7 aa, synthetic construct
NMGRGRD

SEQ ID NO: 188574 - protein, 7 aa, synthetic construct
SMDRARV

SEQ ID NO: 188575 - protein, 7 aa, synthetic construct
MMTTARA

SEQ ID NO: 188576 - protein, 7 aa, synthetic construct
NVIRPRD

SEQ ID NO: 188577 - protein, 7 aa, synthetic construct
FKTRALD

SEQ ID NO: 188578 - protein, 7 aa, synthetic construct
ILTRTRD

SEQ ID NO: 188579 - protein, 7 aa, synthetic construct
NMLRKTD

SEQ ID NO: 188580 - protein, 7 aa, synthetic construct
VMTRERP

SEQ ID NO: 188581 - protein, 7 aa, synthetic construct
RITGARD

SEQ ID NO: 188582 - protein, 7 aa, synthetic construct
LMTMARP

SEQ ID NO: 188583 - protein, 7 aa, synthetic construct
DMARARA

SEQ ID NO: 188584 - protein, 7 aa, synthetic construct
QMTRAAQ

SEQ ID NO: 188585 - protein, 7 aa, synthetic construct
NKTYIRD

SEQ ID NO: 188586 - protein, 7 aa, synthetic construct
AMTKARD

SEQ ID NO: 188587 - protein, 7 aa, synthetic construct
NLERART

SEQ ID NO: 188588 - protein, 7 aa, synthetic construct
MMTRMRE

SEQ ID NO: 188589 - protein, 7 aa, synthetic construct
IRTTARD

SEQ ID NO: 188590 - protein, 7 aa, synthetic construct
NPTRGRD

SEQ ID NO: 188591 - protein, 7 aa, synthetic construct
NRPQARD

SEQ ID NO: 188592 - protein, 7 aa, synthetic construct
NKPRAAD

SEQ ID NO: 188593 - protein, 7 aa, synthetic construct
NMPNKRD

SEQ ID NO: 188594 - protein, 7 aa, synthetic construct
AMTRAEK

SEQ ID NO: 188595 - protein, 7 aa, synthetic construct
FMTNARS

SEQ ID NO: 188596 - protein, 7 aa, synthetic construct
LMTHARN

SEQ ID NO: 188597 - protein, 7 aa, synthetic construct
KEPRARD

SEQ ID NO: 188598 - protein, 7 aa, synthetic construct
TLTRARE

SEQ ID NO: 188599 - protein, 7 aa, synthetic construct
HMTIKRD

SEQ ID NO: 188600 - protein, 7 aa, synthetic construct
VVTRGRD

SEQ ID NO: 188601 - protein, 7 aa, synthetic construct
NMVKSRD

SEQ ID NO: 188602 - protein, 7 aa, synthetic construct
NVTRSKD

SEQ ID NO: 188603 - protein, 7 aa, synthetic construct
NMERNRM

SEQ ID NO: 188604 - protein, 7 aa, synthetic construct
IGTRMRD

SEQ ID NO: 188605 - protein, 7 aa, synthetic construct
NVGRLRD

SEQ ID NO: 188606 - protein, 7 aa, synthetic construct
NMRQLRD

SEQ ID NO: 188607 - protein, 7 aa, synthetic construct
NVDRARP

SEQ ID NO: 188608 - protein, 7 aa, synthetic construct
TMARMRD

SEQ ID NO: 188609 - protein, 7 aa, synthetic construct
VMPRAKD

SEQ ID NO: 188610 - protein, 7 aa, synthetic construct
NMERTRS

SEQ ID NO: 188611 - protein, 7 aa, synthetic construct
NLNRMRD

SEQ ID NO: 188612 - protein, 7 aa, synthetic construct
TMKRAQD

SEQ ID NO: 188613 - protein, 7 aa, synthetic construct
KMPRAPD

SEQ ID NO: 188614 - protein, 7 aa, synthetic construct
DMTRNRA

SEQ ID NO: 188615 - protein, 7 aa, synthetic construct
NMTYAKA

SEQ ID NO: 188616 - protein, 7 aa, synthetic construct
KMTRQTD

SEQ ID NO: 188617 - protein, 7 aa, synthetic construct
NMGRARE

SEQ ID NO: 188618 - protein, 7 aa, synthetic construct
NMSRADK

SEQ ID NO: 188619 - protein, 7 aa, synthetic construct
TMRIARD

SEQ ID NO: 188620 - protein, 7 aa, synthetic construct
YMTVKRD

SEQ ID NO: 188621 - protein, 7 aa, synthetic construct
TMERART

SEQ ID NO: 188622 - protein, 7 aa, synthetic construct
QMSKARD

SEQ ID NO: 188623 - protein, 7 aa, synthetic construct
SMPRSRD

SEQ ID NO: 188624 - protein, 7 aa, synthetic construct
NMFRAKE

SEQ ID NO: 188625 - protein, 7 aa, synthetic construct
NTDRARA

SEQ ID NO: 188626 - protein, 7 aa, synthetic construct
NVIRARE

SEQ ID NO: 188627 - protein, 7 aa, synthetic construct
NFQRAKD

SEQ ID NO: 188628 - protein, 7 aa, synthetic construct
NMQGKRD

SEQ ID NO: 188629 - protein, 7 aa, synthetic construct
NMTRTKD

SEQ ID NO: 188630 - protein, 7 aa, synthetic construct
FATRARE

SEQ ID NO: 188631 - protein, 7 aa, synthetic construct
NPTKARD

SEQ ID NO: 188632 - protein, 7 aa, synthetic construct
NSRPARD

SEQ ID NO: 188633 - protein, 7 aa, synthetic construct
NQDRARP

SEQ ID NO: 188634 - protein, 7 aa, synthetic construct
LMTRASI

SEQ ID NO: 188635 - protein, 7 aa, synthetic construct
NMERQRN

SEQ ID NO: 188636 - protein, 7 aa, synthetic construct
SPTRLRD

SEQ ID NO: 188637 - protein, 7 aa, synthetic construct
YMKRAVD

SEQ ID NO: 188638 - protein, 7 aa, synthetic construct
FMTRERA

SEQ ID NO: 188639 - protein, 7 aa, synthetic construct
TMKRERD

SEQ ID NO: 188640 - protein, 7 aa, synthetic construct
IMTSKRD

SEQ ID NO: 188641 - protein, 7 aa, synthetic construct
NMQRVRE

SEQ ID NO: 188642 - protein, 7 aa, synthetic construct
SMAKARD

SEQ ID NO: 188643 - protein, 7 aa, synthetic construct
IMKRAMD

SEQ ID NO: 188644 - protein, 7 aa, synthetic construct
KSDRARD

SEQ ID NO: 188645 - protein, 7 aa, synthetic construct
WATKARD

SEQ ID NO: 188646 - protein, 7 aa, synthetic construct
NLIRGRD

SEQ ID NO: 188647 - protein, 7 aa, synthetic construct
KMPRAFD

SEQ ID NO: 188648 - protein, 7 aa, synthetic construct
LETRARV

SEQ ID NO: 188649 - protein, 7 aa, synthetic construct
QTTRVRD

SEQ ID NO: 188650 - protein, 7 aa, synthetic construct
NMTAHRA

SEQ ID NO: 188651 - protein, 7 aa, synthetic construct
SMTKFRD

SEQ ID NO: 188652 - protein, 7 aa, synthetic construct
NMKRAEF

SEQ ID NO: 188653 - protein, 7 aa, synthetic construct
TMRTARD

SEQ ID NO: 188654 - protein, 7 aa, synthetic construct
TLTRGRD

SEQ ID NO: 188655 - protein, 7 aa, synthetic construct
GVTRARE

SEQ ID NO: 188656 - protein, 7 aa, synthetic construct
EMTKARV

SEQ ID NO: 188657 - protein, 7 aa, synthetic construct
NPQRVRD

SEQ ID NO: 188658 - protein, 7 aa, synthetic construct
AMTVKRD

SEQ ID NO: 188659 - protein, 7 aa, synthetic construct
NMTRMKD

SEQ ID NO: 188660 - protein, 7 aa, synthetic construct
GETRARP

SEQ ID NO: 188661 - protein, 7 aa, synthetic construct
IINRARD

SEQ ID NO: 188662 - protein, 7 aa, synthetic construct
KMTRERE

SEQ ID NO: 188663 - protein, 7 aa, synthetic construct
NPMRQRD

SEQ ID NO: 188664 - protein, 7 aa, synthetic construct
IMTRTRD

SEQ ID NO: 188665 - protein, 7 aa, synthetic construct
NQLRARE

SEQ ID NO: 188666 - protein, 7 aa, synthetic construct
NINKARD

SEQ ID NO: 188667 - protein, 7 aa, synthetic construct
TPTRVRD

SEQ ID NO: 188668 - protein, 7 aa, synthetic construct
NMRAMRD

SEQ ID NO: 188669 - protein, 7 aa, synthetic construct
NMGRAHA

SEQ ID NO: 188670 - protein, 7 aa, synthetic construct
NMGKSRD

SEQ ID NO: 188671 - protein, 7 aa, synthetic construct
NMPTARN

SEQ ID NO: 188672 - protein, 7 aa, synthetic construct
KMTTPRD

SEQ ID NO: 188673 - protein, 7 aa, synthetic construct
NDTRPRP

SEQ ID NO: 188674 - protein, 7 aa, synthetic construct
NMTRPRD

SEQ ID NO: 188675 - protein, 7 aa, synthetic construct
NMERAKQ

SEQ ID NO: 188676 - protein, 7 aa, synthetic construct
NMTKPRD

SEQ ID NO: 188677 - protein, 7 aa, synthetic construct
NITRNKD

SEQ ID NO: 188678 - protein, 7 aa, synthetic construct
VKTFARD

SEQ ID NO: 188679 - protein, 7 aa, synthetic construct
NKVRAFD

SEQ ID NO: 188680 - protein, 7 aa, synthetic construct
NDGRARP

SEQ ID NO: 188681 - protein, 7 aa, synthetic construct
YMPKARD

SEQ ID NO: 188682 - protein, 7 aa, synthetic construct
NMLRGRE

SEQ ID NO: 188683 - protein, 7 aa, synthetic construct
NMARAKD

SEQ ID NO: 188684 - protein, 7 aa, synthetic construct
NTVRARE

SEQ ID NO: 188685 - protein, 7 aa, synthetic construct
FMQRAKD

SEQ ID NO: 188686 - protein, 7 aa, synthetic construct
EMTRNRV

SEQ ID NO: 188687 - protein, 7 aa, synthetic construct
SMTRAHI

SEQ ID NO: 188688 - protein, 7 aa, synthetic construct
KMTRIAD

SEQ ID NO: 188689 - protein, 7 aa, synthetic construct
SMDRARQ

SEQ ID NO: 188690 - protein, 7 aa, synthetic construct
KMQRAGD

SEQ ID NO: 188691 - protein, 7 aa, synthetic construct
IETRART

SEQ ID NO: 188692 - protein, 7 aa, synthetic construct
NMDRVRA

SEQ ID NO: 188693 - protein, 7 aa, synthetic construct
NKSRAFD

SEQ ID NO: 188694 - protein, 7 aa, synthetic construct
AMARGRD

SEQ ID NO: 188695 - protein, 7 aa, synthetic construct
NMNRERN

SEQ ID NO: 188696 - protein, 7 aa, synthetic construct
IANRARD

SEQ ID NO: 188697 - protein, 7 aa, synthetic construct
NDTRPRI

SEQ ID NO: 188698 - protein, 7 aa, synthetic construct
NMPRALN

SEQ ID NO: 188699 - protein, 7 aa, synthetic construct
VMTRQRE

SEQ ID NO: 188700 - protein, 7 aa, synthetic construct
TMNRARE

SEQ ID NO: 188701 - protein, 7 aa, synthetic construct
PMMRGRD

SEQ ID NO: 188702 - protein, 7 aa, synthetic construct
TMTNARM

SEQ ID NO: 188703 - protein, 7 aa, synthetic construct
NIERART

SEQ ID NO: 188704 - protein, 7 aa, synthetic construct
LKTRERD

SEQ ID NO: 188705 - protein, 7 aa, synthetic construct
NDTRTRA

SEQ ID NO: 188706 - protein, 7 aa, synthetic construct
VMLKARD

SEQ ID NO: 188707 - protein, 7 aa, synthetic construct
KMARAND

SEQ ID NO: 188708 - protein, 7 aa, synthetic construct
NRTLPRD

SEQ ID NO: 188709 - protein, 7 aa, synthetic construct
SMNRARE

SEQ ID NO: 188710 - protein, 7 aa, synthetic construct
NKARALD

SEQ ID NO: 188711 - protein, 7 aa, synthetic construct
NVTVKRD

SEQ ID NO: 188712 - protein, 7 aa, synthetic construct
VMTGARM

SEQ ID NO: 188713 - protein, 7 aa, synthetic construct
NTARLRD

SEQ ID NO: 188714 - protein, 7 aa, synthetic construct
KMTRAPD

SEQ ID NO: 188715 - protein, 7 aa, synthetic construct
TMQRQRD

SEQ ID NO: 188716 - protein, 7 aa, synthetic construct
VMRNARD

SEQ ID NO: 188717 - protein, 7 aa, synthetic construct
NMPRKGD

SEQ ID NO: 188718 - protein, 7 aa, synthetic construct
KPTRAMD

SEQ ID NO: 188719 - protein, 7 aa, synthetic construct
IQPRARD

SEQ ID NO: 188720 - protein, 7 aa, synthetic construct
NVTRTRE

SEQ ID NO: 188721 - protein, 7 aa, synthetic construct
APLRARD

SEQ ID NO: 188722 - protein, 7 aa, synthetic construct
NDTRANK

SEQ ID NO: 188723 - protein, 7 aa, synthetic construct
NDIRARG

SEQ ID NO: 188724 - protein, 7 aa, synthetic construct
KMTSHRD

SEQ ID NO: 188725 - protein, 7 aa, synthetic construct
QKTRASD

SEQ ID NO: 188726 - protein, 7 aa, synthetic construct
DMTRTRI

SEQ ID NO: 188727 - protein, 7 aa, synthetic construct
NMTRHAG

SEQ ID NO: 188728 - protein, 7 aa, synthetic construct
RMIPARD

SEQ ID NO: 188729 - protein, 7 aa, synthetic construct
NQLRQRD

SEQ ID NO: 188730 - protein, 7 aa, synthetic construct
NDTSARK

SEQ ID NO: 188731 - protein, 7 aa, synthetic construct
HMTKMRD

SEQ ID NO: 188732 - protein, 7 aa, synthetic construct
NFPKARD

SEQ ID NO: 188733 - protein, 7 aa, synthetic construct
EMTRVRP

SEQ ID NO: 188734 - protein, 7 aa, synthetic construct
TMTRAHV

SEQ ID NO: 188735 - protein, 7 aa, synthetic construct
YETRARG

SEQ ID NO: 188736 - protein, 7 aa, synthetic construct
TPTRMRD

SEQ ID NO: 188737 - protein, 7 aa, synthetic construct
NMPKPRD

SEQ ID NO: 188738 - protein, 7 aa, synthetic construct
NMQRVKD

SEQ ID NO: 188739 - protein, 7 aa, synthetic construct
DMTRANR

SEQ ID NO: 188740 - protein, 7 aa, synthetic construct
FMTRVKD

SEQ ID NO: 188741 - protein, 7 aa, synthetic construct
NPPRQRD

SEQ ID NO: 188742 - protein, 7 aa, synthetic construct
MMTPARQ

SEQ ID NO: 188743 - protein, 7 aa, synthetic construct
LMQRAKD

SEQ ID NO: 188744 - protein, 7 aa, synthetic construct
NMVRTRE

SEQ ID NO: 188745 - protein, 7 aa, synthetic construct
NKGRERD

SEQ ID NO: 188746 - protein, 7 aa, synthetic construct
KMTRGPD

SEQ ID NO: 188747 - protein, 7 aa, synthetic construct
NIGRMRD

SEQ ID NO: 188748 - protein, 7 aa, synthetic construct
NMDRALK

SEQ ID NO: 188749 - protein, 7 aa, synthetic construct
PMTRASN

SEQ ID NO: 188750 - protein, 7 aa, synthetic construct
NKTKAYD

SEQ ID NO: 188751 - protein, 7 aa, synthetic construct
NIQRAKD

SEQ ID NO: 188752 - protein, 7 aa, synthetic construct
NETRAMK

SEQ ID NO: 188753 - protein, 7 aa, synthetic construct
QMTRASM

SEQ ID NO: 188754 - protein, 7 aa, synthetic construct
QMPRVRD

SEQ ID NO: 188755 - protein, 7 aa, synthetic construct
VMTRAQG

SEQ ID NO: 188756 - protein, 7 aa, synthetic construct
NKNRALD

SEQ ID NO: 188757 - protein, 7 aa, synthetic construct
KMTRVAD

SEQ ID NO: 188758 - protein, 7 aa, synthetic construct
NMERMRP

SEQ ID NO: 188759 - protein, 7 aa, synthetic construct
VRTTARD

SEQ ID NO: 188760 - protein, 7 aa, synthetic construct
TMTRAHM

SEQ ID NO: 188761 - protein, 7 aa, synthetic construct
NKTRSPD

SEQ ID NO: 188762 - protein, 7 aa, synthetic construct
AMTRERM

SEQ ID NO: 188763 - protein, 7 aa, synthetic construct
TRTPARD

SEQ ID NO: 188764 - protein, 7 aa, synthetic construct
LQTRGRD

SEQ ID NO: 188765 - protein, 7 aa, synthetic construct
NTRGARD

SEQ ID NO: 188766 - protein, 7 aa, synthetic construct
SMTRERP

SEQ ID NO: 188767 - protein, 7 aa, synthetic construct
NETKARA

SEQ ID NO: 188768 - protein, 7 aa, synthetic construct
NMTVRKD

SEQ ID NO: 188769 - protein, 7 aa, synthetic construct
NMVRVKD

SEQ ID NO: 188770 - protein, 7 aa, synthetic construct
NKTRNVD

SEQ ID NO: 188771 - protein, 7 aa, synthetic construct
DLTRARA

SEQ ID NO: 188772 - protein, 7 aa, synthetic construct
NLERARN

SEQ ID NO: 188773 - protein, 7 aa, synthetic construct
NMPRTRE

SEQ ID NO: 188774 - protein, 7 aa, synthetic construct
NETRIRS

SEQ ID NO: 188775 - protein, 7 aa, synthetic construct
NRGLARD

SEQ ID NO: 188776 - protein, 7 aa, synthetic construct
NMERPRG

SEQ ID NO: 188777 - protein, 7 aa, synthetic construct
MMTRAQQ

SEQ ID NO: 188778 - protein, 7 aa, synthetic construct
NMAHARS

SEQ ID NO: 188779 - protein, 7 aa, synthetic construct
KMDRTRD

SEQ ID NO: 188780 - protein, 7 aa, synthetic construct
NFTRGKD

SEQ ID NO: 188781 - protein, 7 aa, synthetic construct
GMNRAKD

SEQ ID NO: 188782 - protein, 7 aa, synthetic construct
VMDRARM

SEQ ID NO: 188783 - protein, 7 aa, synthetic construct
NESRARV

SEQ ID NO: 188784 - protein, 7 aa, synthetic construct
NETRLRT

SEQ ID NO: 188785 - protein, 7 aa, synthetic construct
IMTGARH

SEQ ID NO: 188786 - protein, 7 aa, synthetic construct
NMIRPRE

SEQ ID NO: 188787 - protein, 7 aa, synthetic construct
QMTRQRE

SEQ ID NO: 188788 - protein, 7 aa, synthetic construct
NMLRTRE

SEQ ID NO: 188789 - protein, 7 aa, synthetic construct
LMKRAVD

SEQ ID NO: 188790 - protein, 7 aa, synthetic construct
IQTRIRD

SEQ ID NO: 188791 - protein, 7 aa, synthetic construct
NDVRART

SEQ ID NO: 188792 - protein, 7 aa, synthetic construct
PQTKARD

SEQ ID NO: 188793 - protein, 7 aa, synthetic construct
NRTIQRD

SEQ ID NO: 188794 - protein, 7 aa, synthetic construct
NKTRNLD

SEQ ID NO: 188795 - protein, 7 aa, synthetic construct
RTTGARD

SEQ ID NO: 188796 - protein, 7 aa, synthetic construct
NKHIARD

SEQ ID NO: 188797 - protein, 7 aa, synthetic construct
NQKRALD

SEQ ID NO: 188798 - protein, 7 aa, synthetic construct
TMTHARA

SEQ ID NO: 188799 - protein, 7 aa, synthetic construct
NDMRARG

SEQ ID NO: 188800 - protein, 7 aa, synthetic construct
NQDRARL

SEQ ID NO: 188801 - protein, 7 aa, synthetic construct
NAVRNRD

SEQ ID NO: 188802 - protein, 7 aa, synthetic construct
GQTRIRD

SEQ ID NO: 188803 - protein, 7 aa, synthetic construct
NETTARR

SEQ ID NO: 188804 - protein, 7 aa, synthetic construct
IMTRASA

SEQ ID NO: 188805 - protein, 7 aa, synthetic construct
NASRLRD

SEQ ID NO: 188806 - protein, 7 aa, synthetic construct
NMKRGID

SEQ ID NO: 188807 - protein, 7 aa, synthetic construct
NDTKARN

SEQ ID NO: 188808 - protein, 7 aa, synthetic construct
NKTHPRD

SEQ ID NO: 188809 - protein, 7 aa, synthetic construct
NKTRQFD

SEQ ID NO: 188810 - protein, 7 aa, synthetic construct
NQKPARD

SEQ ID NO: 188811 - protein, 7 aa, synthetic construct
GVVRARD

SEQ ID NO: 188812 - protein, 7 aa, synthetic construct
MRTVARD

SEQ ID NO: 188813 - protein, 7 aa, synthetic construct
KMPRALD

SEQ ID NO: 188814 - protein, 7 aa, synthetic construct
NMTMRRE

SEQ ID NO: 188815 - protein, 7 aa, synthetic construct
NPRMARD

SEQ ID NO: 188816 - protein, 7 aa, synthetic construct
EMTKARI

SEQ ID NO: 188817 - protein, 7 aa, synthetic construct
NKMRAND

SEQ ID NO: 188818 - protein, 7 aa, synthetic construct
RMTTLRD

SEQ ID NO: 188819 - protein, 7 aa, synthetic construct
NMTHQRA

SEQ ID NO: 188820 - protein, 7 aa, synthetic construct
NMMGARN

SEQ ID NO: 188821 - protein, 7 aa, synthetic construct
LNTRGRD

SEQ ID NO: 188822 - protein, 7 aa, synthetic construct
GMTRPKD

SEQ ID NO: 188823 - protein, 7 aa, synthetic construct
NMDRALR

SEQ ID NO: 188824 - protein, 7 aa, synthetic construct
VKTYARD

SEQ ID NO: 188825 - protein, 7 aa, synthetic construct
NRTSVRD

SEQ ID NO: 188826 - protein, 7 aa, synthetic construct
LMTRADR

SEQ ID NO: 188827 - protein, 7 aa, synthetic construct
NMTHMRG

SEQ ID NO: 188828 - protein, 7 aa, synthetic construct
DQTRARG

SEQ ID NO: 188829 - protein, 7 aa, synthetic construct
PMTRERS

SEQ ID NO: 188830 - protein, 7 aa, synthetic construct
KNTRALD

SEQ ID NO: 188831 - protein, 7 aa, synthetic construct
NMERGRM

SEQ ID NO: 188832 - protein, 7 aa, synthetic construct
NETRIRI

SEQ ID NO: 188833 - protein, 7 aa, synthetic construct
MMARTRD

SEQ ID NO: 188834 - protein, 7 aa, synthetic construct
YMKRAQD

SEQ ID NO: 188835 - protein, 7 aa, synthetic construct
NFTQKRD

SEQ ID NO: 188836 - protein, 7 aa, synthetic construct
NMTRPSL

SEQ ID NO: 188837 - protein, 7 aa, synthetic construct
SMTGARN

SEQ ID NO: 188838 - protein, 7 aa, synthetic construct
NTERARQ

SEQ ID NO: 188839 - protein, 7 aa, synthetic construct
GMTGARS

SEQ ID NO: 188840 - protein, 7 aa, synthetic construct
NQTLKRD

SEQ ID NO: 188841 - protein, 7 aa, synthetic construct
NMERLRS

SEQ ID NO: 188842 - protein, 7 aa, synthetic construct
NMERSRS

SEQ ID NO: 188843 - protein, 7 aa, synthetic construct
PMDRARG

SEQ ID NO: 188844 - protein, 7 aa, synthetic construct
GMTLKRD

SEQ ID NO: 188845 - protein, 7 aa, synthetic construct
GQTKARD

SEQ ID NO: 188846 - protein, 7 aa, synthetic construct
NMTHSRG

SEQ ID NO: 188847 - protein, 7 aa, synthetic construct
TIPRARD

SEQ ID NO: 188848 - protein, 7 aa, synthetic construct
NMTRQDR

SEQ ID NO: 188849 - protein, 7 aa, synthetic construct
LMTRQKD

SEQ ID NO: 188850 - protein, 7 aa, synthetic construct
STTRARE

SEQ ID NO: 188851 - protein, 7 aa, synthetic construct
VMQRGRD

SEQ ID NO: 188852 - protein, 7 aa, synthetic construct
NVMRSRD

SEQ ID NO: 188853 - protein, 7 aa, synthetic construct
GMVRGRD

SEQ ID NO: 188854 - protein, 7 aa, synthetic construct
KMTRLTD

SEQ ID NO: 188855 - protein, 7 aa, synthetic construct
YVTRAKD

SEQ ID NO: 188856 - protein, 7 aa, synthetic construct
AMNKARD

SEQ ID NO: 188857 - protein, 7 aa, synthetic construct
IPTRSRD

SEQ ID NO: 188858 - protein, 7 aa, synthetic construct
IETRARN

SEQ ID NO: 188859 - protein, 7 aa, synthetic construct
NKTRQGD

SEQ ID NO: 188860 - protein, 7 aa, synthetic construct
GMNRLRD

SEQ ID NO: 188861 - protein, 7 aa, synthetic construct
NVTKYRD

SEQ ID NO: 188862 - protein, 7 aa, synthetic construct
VMTRIKD

SEQ ID NO: 188863 - protein, 7 aa, synthetic construct
NMTKRVD

SEQ ID NO: 188864 - protein, 7 aa, synthetic construct
SMPRNRD

SEQ ID NO: 188865 - protein, 7 aa, synthetic construct
NTSRLRD

SEQ ID NO: 188866 - protein, 7 aa, synthetic construct
NKTRGSD

SEQ ID NO: 188867 - protein, 7 aa, synthetic construct
SMQRGRD

SEQ ID NO: 188868 - protein, 7 aa, synthetic construct
LMARVRD

SEQ ID NO: 188869 - protein, 7 aa, synthetic construct
QMTGARG

SEQ ID NO: 188870 - protein, 7 aa, synthetic construct
NMNRNKD

SEQ ID NO: 188871 - protein, 7 aa, synthetic construct
KPTRALD

SEQ ID NO: 188872 - protein, 7 aa, synthetic construct
NMDRPRA

SEQ ID NO: 188873 - protein, 7 aa, synthetic construct
QQTRAKD

SEQ ID NO: 188874 - protein, 7 aa, synthetic construct
KMTRMMD

SEQ ID NO: 188875 - protein, 7 aa, synthetic construct
QMTRAHM

SEQ ID NO: 188876 - protein, 7 aa, synthetic construct
YMKRATD

SEQ ID NO: 188877 - protein, 7 aa, synthetic construct
GMTRMKD

SEQ ID NO: 188878 - protein, 7 aa, synthetic construct
LTTRIRD

SEQ ID NO: 188879 - protein, 7 aa, synthetic construct
NMARIKD

SEQ ID NO: 188880 - protein, 7 aa, synthetic construct
NNLRPRD

SEQ ID NO: 188881 - protein, 7 aa, synthetic construct
RMTPPRD

SEQ ID NO: 188882 - protein, 7 aa, synthetic construct
VMTRERI

SEQ ID NO: 188883 - protein, 7 aa, synthetic construct
NKTYARD

SEQ ID NO: 188884 - protein, 7 aa, synthetic construct
GMTRMRD

SEQ ID NO: 188885 - protein, 7 aa, synthetic construct
NMGRADR

SEQ ID NO: 188886 - protein, 7 aa, synthetic construct
DMTKARA

SEQ ID NO: 188887 - protein, 7 aa, synthetic construct
NETRTRA

SEQ ID NO: 188888 - protein, 7 aa, synthetic construct
FMTRAAG

SEQ ID NO: 188889 - protein, 7 aa, synthetic construct
DMPRARI

SEQ ID NO: 188890 - protein, 7 aa, synthetic construct
NMARERS

SEQ ID NO: 188891 - protein, 7 aa, synthetic construct
NRLVARD

SEQ ID NO: 188892 - protein, 7 aa, synthetic construct
MMTGARN

SEQ ID NO: 188893 - protein, 7 aa, synthetic construct
TLTRLRD

SEQ ID NO: 188894 - protein, 7 aa, synthetic construct
LMTRPRE

SEQ ID NO: 188895 - protein, 7 aa, synthetic construct
YMNRAKD

SEQ ID NO: 188896 - protein, 7 aa, synthetic construct
NMKRNTD

SEQ ID NO: 188897 - protein, 7 aa, synthetic construct
NDSRARA

SEQ ID NO: 188898 - protein, 7 aa, synthetic construct
NMKPNRD

SEQ ID NO: 188899 - protein, 7 aa, synthetic construct
NSTRKGD

SEQ ID NO: 188900 - protein, 7 aa, synthetic construct
NMERQRT

SEQ ID NO: 188901 - protein, 7 aa, synthetic construct
TMDRARL

SEQ ID NO: 188902 - protein, 7 aa, synthetic construct
KETRARD

SEQ ID NO: 188903 - protein, 7 aa, synthetic construct
TMTRNKD

SEQ ID NO: 188904 - protein, 7 aa, synthetic construct
VQTRARE

SEQ ID NO: 188905 - protein, 7 aa, synthetic construct
NLRPARD

SEQ ID NO: 188906 - protein, 7 aa, synthetic construct
DVTRARV

SEQ ID NO: 188907 - protein, 7 aa, synthetic construct
NMDRARS

SEQ ID NO: 188908 - protein, 7 aa, synthetic construct
EMPRARS

SEQ ID NO: 188909 - protein, 7 aa, synthetic construct
NDQRARV

SEQ ID NO: 188910 - protein, 7 aa, synthetic construct
TDTRARI

SEQ ID NO: 188911 - protein, 7 aa, synthetic construct
NKERPRD

SEQ ID NO: 188912 - protein, 7 aa, synthetic construct
YKTRAGD

SEQ ID NO: 188913 - protein, 7 aa, synthetic construct
TVTRIRD

SEQ ID NO: 188914 - protein, 7 aa, synthetic construct
NVMRARD

SEQ ID NO: 188915 - protein, 7 aa, synthetic construct
NMKRPND

SEQ ID NO: 188916 - protein, 7 aa, synthetic construct
NMTRGER

SEQ ID NO: 188917 - protein, 7 aa, synthetic construct
NYNKARD

SEQ ID NO: 188918 - protein, 7 aa, synthetic construct
NFMKARD

SEQ ID NO: 188919 - protein, 7 aa, synthetic construct
KMTRALD

SEQ ID NO: 188920 - protein, 7 aa, synthetic construct
VMPRSRD

SEQ ID NO: 188921 - protein, 7 aa, synthetic construct
NETRIRA

SEQ ID NO: 188922 - protein, 7 aa, synthetic construct
VMKRAID

SEQ ID NO: 188923 - protein, 7 aa, synthetic construct
NMKYPRD

SEQ ID NO: 188924 - protein, 7 aa, synthetic construct
NPTIKRD

SEQ ID NO: 188925 - protein, 7 aa, synthetic construct
NPERARQ

SEQ ID NO: 188926 - protein, 7 aa, synthetic construct
NMTNPRL

SEQ ID NO: 188927 - protein, 7 aa, synthetic construct
NPKRAVD

SEQ ID NO: 188928 - protein, 7 aa, synthetic construct
SMVKARD

SEQ ID NO: 188929 - protein, 7 aa, synthetic construct
NELRARG

SEQ ID NO: 188930 - protein, 7 aa, synthetic construct
NTTQKRD

SEQ ID NO: 188931 - protein, 7 aa, synthetic construct
NMTRPHS

SEQ ID NO: 188932 - protein, 7 aa, synthetic construct
KMTRGFD

SEQ ID NO: 188933 - protein, 7 aa, synthetic construct
AMTRERS

SEQ ID NO: 188934 - protein, 7 aa, synthetic construct
NMIRTRE

SEQ ID NO: 188935 - protein, 7 aa, synthetic construct
MMKRATD

SEQ ID NO: 188936 - protein, 7 aa, synthetic construct
MMERARS

SEQ ID NO: 188937 - protein, 7 aa, synthetic construct
LMPRMRD

SEQ ID NO: 188938 - protein, 7 aa, synthetic construct
VMTRAHA

SEQ ID NO: 188939 - protein, 7 aa, synthetic construct
GMRVARD

SEQ ID NO: 188940 - protein, 7 aa, synthetic construct
VPTRVRD

SEQ ID NO: 188941 - protein, 7 aa, synthetic construct
LMTRAAQ

SEQ ID NO: 188942 - protein, 7 aa, synthetic construct
KPTRERD

SEQ ID NO: 188943 - protein, 7 aa, synthetic construct
KMTRNMD

SEQ ID NO: 188944 - protein, 7 aa, synthetic construct
NTERARI

SEQ ID NO: 188945 - protein, 7 aa, synthetic construct
NASRAKD

SEQ ID NO: 188946 - protein, 7 aa, synthetic construct
TMDRARV

SEQ ID NO: 188947 - protein, 7 aa, synthetic construct
NMGRIRD

SEQ ID NO: 188948 - protein, 7 aa, synthetic construct
KMARAFD

SEQ ID NO: 188949 - protein, 7 aa, synthetic construct
NMTHVRA

SEQ ID NO: 188950 - protein, 7 aa, synthetic construct
NMGRGKD

SEQ ID NO: 188951 - protein, 7 aa, synthetic construct
KMARATD

SEQ ID NO: 188952 - protein, 7 aa, synthetic construct
NAGRAKD

SEQ ID NO: 188953 - protein, 7 aa, synthetic construct
HVTKARD

SEQ ID NO: 188954 - protein, 7 aa, synthetic construct
LMTKPRD

SEQ ID NO: 188955 - protein, 7 aa, synthetic construct
ALPRARD

SEQ ID NO: 188956 - protein, 7 aa, synthetic construct
NMTHVRG

SEQ ID NO: 188957 - protein, 7 aa, synthetic construct
NIQRLRD

SEQ ID NO: 188958 - protein, 7 aa, synthetic construct
KMVRDRD

SEQ ID NO: 188959 - protein, 7 aa, synthetic construct
NMERMRM

SEQ ID NO: 188960 - protein, 7 aa, synthetic construct
KMTRGMD

SEQ ID NO: 188961 - protein, 7 aa, synthetic construct
IMTRASQ

SEQ ID NO: 188962 - protein, 7 aa, synthetic construct
NMDRVRS

SEQ ID NO: 188963 - protein, 7 aa, synthetic construct
AMARARE

SEQ ID NO: 188964 - protein, 7 aa, synthetic construct
DQTRARA

SEQ ID NO: 188965 - protein, 7 aa, synthetic construct
MSTRLRD

SEQ ID NO: 188966 - protein, 7 aa, synthetic construct
NDPRARG

SEQ ID NO: 188967 - protein, 7 aa, synthetic construct
NMRTAKD

SEQ ID NO: 188968 - protein, 7 aa, synthetic construct
TLARARD

SEQ ID NO: 188969 - protein, 7 aa, synthetic construct
NRTKASD

SEQ ID NO: 188970 - protein, 7 aa, synthetic construct
RTTSARD

SEQ ID NO: 188971 - protein, 7 aa, synthetic construct
KMDRIRD

SEQ ID NO: 188972 - protein, 7 aa, synthetic construct
LMTRAKD

SEQ ID NO: 188973 - protein, 7 aa, synthetic construct
KMTRLID

SEQ ID NO: 188974 - protein, 7 aa, synthetic construct
IMTRKTD

SEQ ID NO: 188975 - protein, 7 aa, synthetic construct
NDVRARV

SEQ ID NO: 188976 - protein, 7 aa, synthetic construct
NMGHARG

SEQ ID NO: 188977 - protein, 7 aa, synthetic construct
NMPGARQ

SEQ ID NO: 188978 - protein, 7 aa, synthetic construct
KMQRASD

SEQ ID NO: 188979 - protein, 7 aa, synthetic construct
NMLRNKD

SEQ ID NO: 188980 - protein, 7 aa, synthetic construct
NMKAHRD

SEQ ID NO: 188981 - protein, 7 aa, synthetic construct
GMDRARQ

SEQ ID NO: 188982 - protein, 7 aa, synthetic construct
GMRLARD

SEQ ID NO: 188983 - protein, 7 aa, synthetic construct
KMTRMSD

SEQ ID NO: 188984 - protein, 7 aa, synthetic construct
NMARLKD

SEQ ID NO: 188985 - protein, 7 aa, synthetic construct
IMDRARI

SEQ ID NO: 188986 - protein, 7 aa, synthetic construct
GMTVRRD

SEQ ID NO: 188987 - protein, 7 aa, synthetic construct
NMLRGKD

SEQ ID NO: 188988 - protein, 7 aa, synthetic construct
DPTRARS

SEQ ID NO: 188989 - protein, 7 aa, synthetic construct
NMVRIRD

SEQ ID NO: 188990 - protein, 7 aa, synthetic construct
NIDRARP

SEQ ID NO: 188991 - protein, 7 aa, synthetic construct
AMTRSRE

SEQ ID NO: 188992 - protein, 7 aa, synthetic construct
ITTRVRD

SEQ ID NO: 188993 - protein, 7 aa, synthetic construct
DQTRARV

SEQ ID NO: 188994 - protein, 7 aa, synthetic construct
NETRATR

SEQ ID NO: 188995 - protein, 7 aa, synthetic construct
NVRLARD

SEQ ID NO: 188996 - protein, 7 aa, synthetic construct
MMDRARP

SEQ ID NO: 188997 - protein, 7 aa, synthetic construct
NMSRIRE

SEQ ID NO: 188998 - protein, 7 aa, synthetic construct
TSTRARE

SEQ ID NO: 188999 - protein, 7 aa, synthetic construct
NPPRIRD

SEQ ID NO: 189000 - protein, 7 aa, synthetic construct
NRTTSRD

SEQ ID NO: 189001 - protein, 7 aa, synthetic construct
VMLRAKD

SEQ ID NO: 189002 - protein, 7 aa, synthetic construct
INTRGRD

SEQ ID NO: 189003 - protein, 7 aa, synthetic construct
NKGSARD

SEQ ID NO: 189004 - protein, 7 aa, synthetic construct
DVTRARP

SEQ ID NO: 189005 - protein, 7 aa, synthetic construct
NMPRANS

SEQ ID NO: 189006 - protein, 7 aa, synthetic construct
RMNPARD

SEQ ID NO: 189007 - protein, 7 aa, synthetic construct
NLIRARE

SEQ ID NO: 189008 - protein, 7 aa, synthetic construct
GLTRARE

SEQ ID NO: 189009 - protein, 7 aa, synthetic construct
NMTTKRD

SEQ ID NO: 189010 - protein, 7 aa, synthetic construct
SLTRAKD

SEQ ID NO: 189011 - protein, 7 aa, synthetic construct
NSVRPRD

SEQ ID NO: 189012 - protein, 7 aa, synthetic construct
RMTGVRD

SEQ ID NO: 189013 - protein, 7 aa, synthetic construct
MPTRPRD

SEQ ID NO: 189014 - protein, 7 aa, synthetic construct
HMKGARD

SEQ ID NO: 189015 - protein, 7 aa, synthetic construct
NYTKARE

SEQ ID NO: 189016 - protein, 7 aa, synthetic construct
NDTKARM

SEQ ID NO: 189017 - protein, 7 aa, synthetic construct
TMERARM

SEQ ID NO: 189018 - protein, 7 aa, synthetic construct
NMDKKRD

SEQ ID NO: 189019 - protein, 7 aa, synthetic construct
NPNRGRD

SEQ ID NO: 189020 - protein, 7 aa, synthetic construct
NVDRARN

SEQ ID NO: 189021 - protein, 7 aa, synthetic construct
YMTRASA

SEQ ID NO: 189022 - protein, 7 aa, synthetic construct
AMTRIKD

SEQ ID NO: 189023 - protein, 7 aa, synthetic construct
NMDRQRM

SEQ ID NO: 189024 - protein, 7 aa, synthetic construct
LKTRAVD

SEQ ID NO: 189025 - protein, 7 aa, synthetic construct
VNTRGRD

SEQ ID NO: 189026 - protein, 7 aa, synthetic construct
STTRMRD

SEQ ID NO: 189027 - protein, 7 aa, synthetic construct
NMKRGND

SEQ ID NO: 189028 - protein, 7 aa, synthetic construct
YMTDARK

SEQ ID NO: 189029 - protein, 7 aa, synthetic construct
LVNRARD

SEQ ID NO: 189030 - protein, 7 aa, synthetic construct
NMTRNDK

SEQ ID NO: 189031 - protein, 7 aa, synthetic construct
NDTIARK

SEQ ID NO: 189032 - protein, 7 aa, synthetic construct
QPTRGRD

SEQ ID NO: 189033 - protein, 7 aa, synthetic construct
QDTRARP

SEQ ID NO: 189034 - protein, 7 aa, synthetic construct
LMTRAHS

SEQ ID NO: 189035 - protein, 7 aa, synthetic construct
NMPHARG

SEQ ID NO: 189036 - protein, 7 aa, synthetic construct
AMKRASD

SEQ ID NO: 189037 - protein, 7 aa, synthetic construct
QPTRVRD

SEQ ID NO: 189038 - protein, 7 aa, synthetic construct
NMVRKAD

SEQ ID NO: 189039 - protein, 7 aa, synthetic construct
SMTRAHM

SEQ ID NO: 189040 - protein, 7 aa, synthetic construct
NDGRARA

SEQ ID NO: 189041 - protein, 7 aa, synthetic construct
YMKMARD

SEQ ID NO: 189042 - protein, 7 aa, synthetic construct
NVTRIRE

SEQ ID NO: 189043 - protein, 7 aa, synthetic construct
NETRIRV

SEQ ID NO: 189044 - protein, 7 aa, synthetic construct
MGTRMRD

SEQ ID NO: 189045 - protein, 7 aa, synthetic construct
KMTRLGD

SEQ ID NO: 189046 - protein, 7 aa, synthetic construct
NKTYLRD

SEQ ID NO: 189047 - protein, 7 aa, synthetic construct
NITRKGD

SEQ ID NO: 189048 - protein, 7 aa, synthetic construct
NETRANK

SEQ ID NO: 189049 - protein, 7 aa, synthetic construct
NMINKRD

SEQ ID NO: 189050 - protein, 7 aa, synthetic construct
KMNRAMD

SEQ ID NO: 189051 - protein, 7 aa, synthetic construct
SPVRARD

SEQ ID NO: 189052 - protein, 7 aa, synthetic construct
NQLRARD

SEQ ID NO: 189053 - protein, 7 aa, synthetic construct
IMTLKRD

SEQ ID NO: 189054 - protein, 7 aa, synthetic construct
TMDRARI

SEQ ID NO: 189055 - protein, 7 aa, synthetic construct
AMTRASN

SEQ ID NO: 189056 - protein, 7 aa, synthetic construct
SQTRMRD

SEQ ID NO: 189057 - protein, 7 aa, synthetic construct
NDPRARP

SEQ ID NO: 189058 - protein, 7 aa, synthetic construct
NDARARP

SEQ ID NO: 189059 - protein, 7 aa, synthetic construct
DMTQARK

SEQ ID NO: 189060 - protein, 7 aa, synthetic construct
PMPRLRD

SEQ ID NO: 189061 - protein, 7 aa, synthetic construct
PMTRANL

SEQ ID NO: 189062 - protein, 7 aa, synthetic construct
NMMGARS

SEQ ID NO: 189063 - protein, 7 aa, synthetic construct
NLTPKRD

SEQ ID NO: 189064 - protein, 7 aa, synthetic construct
IDTRARM

SEQ ID NO: 189065 - protein, 7 aa, synthetic construct
NIRGARD

SEQ ID NO: 189066 - protein, 7 aa, synthetic construct
NITRERQ

SEQ ID NO: 189067 - protein, 7 aa, synthetic construct
PMNRGRD

SEQ ID NO: 189068 - protein, 7 aa, synthetic construct
NMPIRRD

SEQ ID NO: 189069 - protein, 7 aa, synthetic construct
YMTRSKD

SEQ ID NO: 189070 - protein, 7 aa, synthetic construct
PMTRQRE

SEQ ID NO: 189071 - protein, 7 aa, synthetic construct
TVTRARE

SEQ ID NO: 189072 - protein, 7 aa, synthetic construct
NMDRTRS

SEQ ID NO: 189073 - protein, 7 aa, synthetic construct
NMERIRS

SEQ ID NO: 189074 - protein, 7 aa, synthetic construct
IMTRNRE

SEQ ID NO: 189075 - protein, 7 aa, synthetic construct
NMNRNRE

SEQ ID NO: 189076 - protein, 7 aa, synthetic construct
NDTRNRA

SEQ ID NO: 189077 - protein, 7 aa, synthetic construct
NMGRVRE

SEQ ID NO: 189078 - protein, 7 aa, synthetic construct
PKDRARD

SEQ ID NO: 189079 - protein, 7 aa, synthetic construct
NTRTARD

SEQ ID NO: 189080 - protein, 7 aa, synthetic construct
NRPSARD

SEQ ID NO: 189081 - protein, 7 aa, synthetic construct
NDTRAKF

SEQ ID NO: 189082 - protein, 7 aa, synthetic construct
KETRGRD

SEQ ID NO: 189083 - protein, 7 aa, synthetic construct
LMTRERQ

SEQ ID NO: 189084 - protein, 7 aa, synthetic construct
GMTGARQ

SEQ ID NO: 189085 - protein, 7 aa, synthetic construct
KMIRASD

SEQ ID NO: 189086 - protein, 7 aa, synthetic construct
GMTNARN

SEQ ID NO: 189087 - protein, 7 aa, synthetic construct
GMTRERG

SEQ ID NO: 189088 - protein, 7 aa, synthetic construct
NMRPAKD

SEQ ID NO: 189089 - protein, 7 aa, synthetic construct
NMALKRD

SEQ ID NO: 189090 - protein, 7 aa, synthetic construct
NTTPKRD

SEQ ID NO: 189091 - protein, 7 aa, synthetic construct
DATRARS

SEQ ID NO: 189092 - protein, 7 aa, synthetic construct
LQNRARD

SEQ ID NO: 189093 - protein, 7 aa, synthetic construct
KETRAKD

SEQ ID NO: 189094 - protein, 7 aa, synthetic construct
IMTQARN

SEQ ID NO: 189095 - protein, 7 aa, synthetic construct
FMTRSKD

SEQ ID NO: 189096 - protein, 7 aa, synthetic construct
MRTPARD

SEQ ID NO: 189097 - protein, 7 aa, synthetic construct
NMKGFRD

SEQ ID NO: 189098 - protein, 7 aa, synthetic construct
NDNRARS

SEQ ID NO: 189099 - protein, 7 aa, synthetic construct
LQARARD

SEQ ID NO: 189100 - protein, 7 aa, synthetic construct
VMTHARV

SEQ ID NO: 189101 - protein, 7 aa, synthetic construct
NMTRERL

SEQ ID NO: 189102 - protein, 7 aa, synthetic construct
NPTRTRE

SEQ ID NO: 189103 - protein, 7 aa, synthetic construct
TIQRARD

SEQ ID NO: 189104 - protein, 7 aa, synthetic construct
TMTNARG

SEQ ID NO: 189105 - protein, 7 aa, synthetic construct
LPTRARE

SEQ ID NO: 189106 - protein, 7 aa, synthetic construct
NMPMARH

SEQ ID NO: 189107 - protein, 7 aa, synthetic construct
LNTRIRD

SEQ ID NO: 189108 - protein, 7 aa, synthetic construct
MMTNARH

SEQ ID NO: 189109 - protein, 7 aa, synthetic construct
GMLRGRD

SEQ ID NO: 189110 - protein, 7 aa, synthetic construct
IPTRIRD

SEQ ID NO: 189111 - protein, 7 aa, synthetic construct
LMTQARP

SEQ ID NO: 189112 - protein, 7 aa, synthetic construct
NMPHARN

SEQ ID NO: 189113 - protein, 7 aa, synthetic construct
GATRVRD

SEQ ID NO: 189114 - protein, 7 aa, synthetic construct
NKSRAGD

SEQ ID NO: 189115 - protein, 7 aa, synthetic construct
NFTRAEK

SEQ ID NO: 189116 - protein, 7 aa, synthetic construct
NMERASR

SEQ ID NO: 189117 - protein, 7 aa, synthetic construct
NMETARR

SEQ ID NO: 189118 - protein, 7 aa, synthetic construct
ITTRTRD

SEQ ID NO: 189119 - protein, 7 aa, synthetic construct
NMYKARE

SEQ ID NO: 189120 - protein, 7 aa, synthetic construct
NIDRART

SEQ ID NO: 189121 - protein, 7 aa, synthetic construct
NITAKRD

SEQ ID NO: 189122 - protein, 7 aa, synthetic construct
KMNRAVD

SEQ ID NO: 189123 - protein, 7 aa, synthetic construct
NMEVARK

SEQ ID NO: 189124 - protein, 7 aa, synthetic construct
DMVRARG

SEQ ID NO: 189125 - protein, 7 aa, synthetic construct
TMVRPRD

SEQ ID NO: 189126 - protein, 7 aa, synthetic construct
IPTRGRD

SEQ ID NO: 189127 - protein, 7 aa, synthetic construct
DMTKARM

SEQ ID NO: 189128 - protein, 7 aa, synthetic construct
TMVRAKD

SEQ ID NO: 189129 - protein, 7 aa, synthetic construct
IMTAKRD

SEQ ID NO: 189130 - protein, 7 aa, synthetic construct
NEPRARP

SEQ ID NO: 189131 - protein, 7 aa, synthetic construct
DMNRARM

SEQ ID NO: 189132 - protein, 7 aa, synthetic construct
MRTTARD

SEQ ID NO: 189133 - protein, 7 aa, synthetic construct
NMTRPHA

SEQ ID NO: 189134 - protein, 7 aa, synthetic construct
LRTSARD

SEQ ID NO: 189135 - protein, 7 aa, synthetic construct
NVTRAHG

SEQ ID NO: 189136 - protein, 7 aa, synthetic construct
NETRAKS

SEQ ID NO: 189137 - protein, 7 aa, synthetic construct
NMIRERA

SEQ ID NO: 189138 - protein, 7 aa, synthetic construct
NMTNKRE

SEQ ID NO: 189139 - protein, 7 aa, synthetic construct
NVTRAKD

SEQ ID NO: 189140 - protein, 7 aa, synthetic construct
TMKRAAD

SEQ ID NO: 189141 - protein, 7 aa, synthetic construct
NMIKIRD

SEQ ID NO: 189142 - protein, 7 aa, synthetic construct
KMLRATD

SEQ ID NO: 189143 - protein, 7 aa, synthetic construct
NARLARD

SEQ ID NO: 189144 - protein, 7 aa, synthetic construct
NPRQARD

SEQ ID NO: 189145 - protein, 7 aa, synthetic construct
YMKPARD

SEQ ID NO: 189146 - protein, 7 aa, synthetic construct
NLGRAKD

SEQ ID NO: 189147 - protein, 7 aa, synthetic construct
VMTRAHG

SEQ ID NO: 189148 - protein, 7 aa, synthetic construct
TMTQARN

SEQ ID NO: 189149 - protein, 7 aa, synthetic construct
NFKVARD

SEQ ID NO: 189150 - protein, 7 aa, synthetic construct
IMERARQ

SEQ ID NO: 189151 - protein, 7 aa, synthetic construct
NMERMRQ

SEQ ID NO: 189152 - protein, 7 aa, synthetic construct
NMERPRT

SEQ ID NO: 189153 - protein, 7 aa, synthetic construct
NATRNRE

SEQ ID NO: 189154 - protein, 7 aa, synthetic construct
NMKRSGD

SEQ ID NO: 189155 - protein, 7 aa, synthetic construct
LTQRARD

SEQ ID NO: 189156 - protein, 7 aa, synthetic construct
VMNRARE

SEQ ID NO: 189157 - protein, 7 aa, synthetic construct
IMTKPRD

SEQ ID NO: 189158 - protein, 7 aa, synthetic construct
SMPRARE

SEQ ID NO: 189159 - protein, 7 aa, synthetic construct
NTMRAKD

SEQ ID NO: 189160 - protein, 7 aa, synthetic construct
VKTRAVD

SEQ ID NO: 189161 - protein, 7 aa, synthetic construct
NEPRARI

SEQ ID NO: 189162 - protein, 7 aa, synthetic construct
NMPRANL

SEQ ID NO: 189163 - protein, 7 aa, synthetic construct
NDPRARS

SEQ ID NO: 189164 - protein, 7 aa, synthetic construct
PMRNARD

SEQ ID NO: 189165 - protein, 7 aa, synthetic construct
DPTRARI

SEQ ID NO: 189166 - protein, 7 aa, synthetic construct
NRALARD

SEQ ID NO: 189167 - protein, 7 aa, synthetic construct
EMPRARA

SEQ ID NO: 189168 - protein, 7 aa, synthetic construct
VQVRARD

SEQ ID NO: 189169 - protein, 7 aa, synthetic construct
NVPRSRD

SEQ ID NO: 189170 - protein, 7 aa, synthetic construct
NPTTKRD

SEQ ID NO: 189171 - protein, 7 aa, synthetic construct
NPLKARD

SEQ ID NO: 189172 - protein, 7 aa, synthetic construct
NMDQARK

SEQ ID NO: 189173 - protein, 7 aa, synthetic construct
YMGRAKD

SEQ ID NO: 189174 - protein, 7 aa, synthetic construct
NMERLRQ

SEQ ID NO: 189175 - protein, 7 aa, synthetic construct
NVPRARE

SEQ ID NO: 189176 - protein, 7 aa, synthetic construct
NFLKARD

SEQ ID NO: 189177 - protein, 7 aa, synthetic construct
NKIRAQD

SEQ ID NO: 189178 - protein, 7 aa, synthetic construct
PMTKPRD

SEQ ID NO: 189179 - protein, 7 aa, synthetic construct
AMLRAKD

SEQ ID NO: 189180 - protein, 7 aa, synthetic construct
VMTRAAH

SEQ ID NO: 189181 - protein, 7 aa, synthetic construct
NMRGAKD

SEQ ID NO: 189182 - protein, 7 aa, synthetic construct
GMTRVRD

SEQ ID NO: 189183 - protein, 7 aa, synthetic construct
NKLRERD

SEQ ID NO: 189184 - protein, 7 aa, synthetic construct
FDTRARS

SEQ ID NO: 189185 - protein, 7 aa, synthetic construct
NDTRTRM

SEQ ID NO: 189186 - protein, 7 aa, synthetic construct
LMTKQRD

SEQ ID NO: 189187 - protein, 7 aa, synthetic construct
QMTRANV

SEQ ID NO: 189188 - protein, 7 aa, synthetic construct
APTRMRD

SEQ ID NO: 189189 - protein, 7 aa, synthetic construct
NMKPIRD

SEQ ID NO: 189190 - protein, 7 aa, synthetic construct
VPTRGRD

SEQ ID NO: 189191 - protein, 7 aa, synthetic construct
PMKRAPD

SEQ ID NO: 189192 - protein, 7 aa, synthetic construct
TMTGARG

SEQ ID NO: 189193 - protein, 7 aa, synthetic construct
NIDRARV

SEQ ID NO: 189194 - protein, 7 aa, synthetic construct
NQDRARQ

SEQ ID NO: 189195 - protein, 7 aa, synthetic construct
MMTRDRA

SEQ ID NO: 189196 - protein, 7 aa, synthetic construct
NLARPRD

SEQ ID NO: 189197 - protein, 7 aa, synthetic construct
NDTNARR

SEQ ID NO: 189198 - protein, 7 aa, synthetic construct
NMSVRRD

SEQ ID NO: 189199 - protein, 7 aa, synthetic construct
MDTRARS

SEQ ID NO: 189200 - protein, 7 aa, synthetic construct
TPMRARD

SEQ ID NO: 189201 - protein, 7 aa, synthetic construct
NRVLARD

SEQ ID NO: 189202 - protein, 7 aa, synthetic construct
FDTRART

SEQ ID NO: 189203 - protein, 7 aa, synthetic construct
KMQRAAD

SEQ ID NO: 189204 - protein, 7 aa, synthetic construct
SMDRARM

SEQ ID NO: 189205 - protein, 7 aa, synthetic construct
DMTRPRA

SEQ ID NO: 189206 - protein, 7 aa, synthetic construct
YMTRNKD

SEQ ID NO: 189207 - protein, 7 aa, synthetic construct
NMERGRS

SEQ ID NO: 189208 - protein, 7 aa, synthetic construct
NETRATK

SEQ ID NO: 189209 - protein, 7 aa, synthetic construct
MMTGARG

SEQ ID NO: 189210 - protein, 7 aa, synthetic construct
KMTRIND

SEQ ID NO: 189211 - protein, 7 aa, synthetic construct
VPTRLRD

SEQ ID NO: 189212 - protein, 7 aa, synthetic construct
NTMRQRD

SEQ ID NO: 189213 - protein, 7 aa, synthetic construct
NMDRMRG

SEQ ID NO: 189214 - protein, 7 aa, synthetic construct
PMTRKGD

SEQ ID NO: 189215 - protein, 7 aa, synthetic construct
NDTRAVK

SEQ ID NO: 189216 - protein, 7 aa, synthetic construct
TMTNKRD

SEQ ID NO: 189217 - protein, 7 aa, synthetic construct
NAGKARD

SEQ ID NO: 189218 - protein, 7 aa, synthetic construct
NMIRLKD

SEQ ID NO: 189219 - protein, 7 aa, synthetic construct
KMTRTLD

SEQ ID NO: 189220 - protein, 7 aa, synthetic construct
IMTRGRD

SEQ ID NO: 189221 - protein, 7 aa, synthetic construct
NKNRAMD

SEQ ID NO: 189222 - protein, 7 aa, synthetic construct
NPVRGRD

SEQ ID NO: 189223 - protein, 7 aa, synthetic construct
PMTRANT

SEQ ID NO: 189224 - protein, 7 aa, synthetic construct
KMTRIVD

SEQ ID NO: 189225 - protein, 7 aa, synthetic construct
NKYIARD

SEQ ID NO: 189226 - protein, 7 aa, synthetic construct
NNARAKD

SEQ ID NO: 189227 - protein, 7 aa, synthetic construct
NMTIRKD

SEQ ID NO: 189228 - protein, 7 aa, synthetic construct
SIPRARD

SEQ ID NO: 189229 - protein, 7 aa, synthetic construct
SLPRARD

SEQ ID NO: 189230 - protein, 7 aa, synthetic construct
NMMRPRE

SEQ ID NO: 189231 - protein, 7 aa, synthetic construct
NMERART

SEQ ID NO: 189232 - protein, 7 aa, synthetic construct
LSTRQRD

SEQ ID NO: 189233 - protein, 7 aa, synthetic construct
KMGRAGD

SEQ ID NO: 189234 - protein, 7 aa, synthetic construct
KMGSARD

SEQ ID NO: 189235 - protein, 7 aa, synthetic construct
EATRARP

SEQ ID NO: 189236 - protein, 7 aa, synthetic construct
MMPRVRD

SEQ ID NO: 189237 - protein, 7 aa, synthetic construct
NMSVKRD

SEQ ID NO: 189238 - protein, 7 aa, synthetic construct
FMTRASA

SEQ ID NO: 189239 - protein, 7 aa, synthetic construct
NMPRANM

SEQ ID NO: 189240 - protein, 7 aa, synthetic construct
NDNRARI

SEQ ID NO: 189241 - protein, 7 aa, synthetic construct
IDTRARN

SEQ ID NO: 189242 - protein, 7 aa, synthetic construct
NETRASK

SEQ ID NO: 189243 - protein, 7 aa, synthetic construct
NPPRGRD

SEQ ID NO: 189244 - protein, 7 aa, synthetic construct
NTTRLRE

SEQ ID NO: 189245 - protein, 7 aa, synthetic construct
NMTRRDI

SEQ ID NO: 189246 - protein, 7 aa, synthetic construct
NMKRVLD

SEQ ID NO: 189247 - protein, 7 aa, synthetic construct
NIDRARQ

SEQ ID NO: 189248 - protein, 7 aa, synthetic construct
NMNQKRD

SEQ ID NO: 189249 - protein, 7 aa, synthetic construct
FMNRARE

SEQ ID NO: 189250 - protein, 7 aa, synthetic construct
QMKSARD

SEQ ID NO: 189251 - protein, 7 aa, synthetic construct
KLTRAGD

SEQ ID NO: 189252 - protein, 7 aa, synthetic construct
SMMKARD

SEQ ID NO: 189253 - protein, 7 aa, synthetic construct
NALRIRD

SEQ ID NO: 189254 - protein, 7 aa, synthetic construct
LPTRVRD

SEQ ID NO: 189255 - protein, 7 aa, synthetic construct
LNARARD

SEQ ID NO: 189256 - protein, 7 aa, synthetic construct
NETKARI

SEQ ID NO: 189257 - protein, 7 aa, synthetic construct
LAMRARD

SEQ ID NO: 189258 - protein, 7 aa, synthetic construct
NAQRPRD

SEQ ID NO: 189259 - protein, 7 aa, synthetic construct
NMTGHRS

SEQ ID NO: 189260 - protein, 7 aa, synthetic construct
NMPRNRE

SEQ ID NO: 189261 - protein, 7 aa, synthetic construct
GMTRAHA

SEQ ID NO: 189262 - protein, 7 aa, synthetic construct
TRTLARD

SEQ ID NO: 189263 - protein, 7 aa, synthetic construct
SMTRARE

SEQ ID NO: 189264 - protein, 7 aa, synthetic construct
NEPRARM

SEQ ID NO: 189265 - protein, 7 aa, synthetic construct
NDTRAKQ

SEQ ID NO: 189266 - protein, 7 aa, synthetic construct
NMMHARA

SEQ ID NO: 189267 - protein, 7 aa, synthetic construct
NAKPARD

SEQ ID NO: 189268 - protein, 7 aa, synthetic construct
AATRARE

SEQ ID NO: 189269 - protein, 7 aa, synthetic construct
NMTRVEK

SEQ ID NO: 189270 - protein, 7 aa, synthetic construct
VMTRTRE

SEQ ID NO: 189271 - protein, 7 aa, synthetic construct
NMPSARN

SEQ ID NO: 189272 - protein, 7 aa, synthetic construct
NSNRVRD

SEQ ID NO: 189273 - protein, 7 aa, synthetic construct
VMTSKRD

SEQ ID NO: 189274 - protein, 7 aa, synthetic construct
KITRERD

SEQ ID NO: 189275 - protein, 7 aa, synthetic construct
NNVRAKD

SEQ ID NO: 189276 - protein, 7 aa, synthetic construct
NMTSHRG

SEQ ID NO: 189277 - protein, 7 aa, synthetic construct
IMKRASD

SEQ ID NO: 189278 - protein, 7 aa, synthetic construct
IMTRERN

SEQ ID NO: 189279 - protein, 7 aa, synthetic construct
NQKRATD

SEQ ID NO: 189280 - protein, 7 aa, synthetic construct
AMIRAKD

SEQ ID NO: 189281 - protein, 7 aa, synthetic construct
VMNRMRD

SEQ ID NO: 189282 - protein, 7 aa, synthetic construct
RATPARD

SEQ ID NO: 189283 - protein, 7 aa, synthetic construct
NDPRARL

SEQ ID NO: 189284 - protein, 7 aa, synthetic construct
FKTRERD

SEQ ID NO: 189285 - protein, 7 aa, synthetic construct
NMIRTKD

SEQ ID NO: 189286 - protein, 7 aa, synthetic construct
NKTQPRD

SEQ ID NO: 189287 - protein, 7 aa, synthetic construct
GMTHARV

SEQ ID NO: 189288 - protein, 7 aa, synthetic construct
PMVRAKD

SEQ ID NO: 189289 - protein, 7 aa, synthetic construct
PNTRVRD

SEQ ID NO: 189290 - protein, 7 aa, synthetic construct
YMMRAKD

SEQ ID NO: 189291 - protein, 7 aa, synthetic construct
KMTRADG

SEQ ID NO: 189292 - protein, 7 aa, synthetic construct
NSTRADR

SEQ ID NO: 189293 - protein, 7 aa, synthetic construct
NTERARA

SEQ ID NO: 189294 - protein, 7 aa, synthetic construct
NITRKLD

SEQ ID NO: 189295 - protein, 7 aa, synthetic construct
AMTRKLD

SEQ ID NO: 189296 - protein, 7 aa, synthetic construct
NDGRARV

SEQ ID NO: 189297 - protein, 7 aa, synthetic construct
MMDRARI

SEQ ID NO: 189298 - protein, 7 aa, synthetic construct
GMTNKRD

SEQ ID NO: 189299 - protein, 7 aa, synthetic construct
RMEKARD

SEQ ID NO: 189300 - protein, 7 aa, synthetic construct
NTVRMRD

SEQ ID NO: 189301 - protein, 7 aa, synthetic construct
NITRAHG

SEQ ID NO: 189302 - protein, 7 aa, synthetic construct
KMTRLLD

SEQ ID NO: 189303 - protein, 7 aa, synthetic construct
KPTRAID

SEQ ID NO: 189304 - protein, 7 aa, synthetic construct
PMMKARD

SEQ ID NO: 189305 - protein, 7 aa, synthetic construct
NKMHARD

SEQ ID NO: 189306 - protein, 7 aa, synthetic construct
NKTRGND

SEQ ID NO: 189307 - protein, 7 aa, synthetic construct
VMRPARD

SEQ ID NO: 189308 - protein, 7 aa, synthetic construct
MMTRASM

SEQ ID NO: 189309 - protein, 7 aa, synthetic construct
LATRNRD

SEQ ID NO: 189310 - protein, 7 aa, synthetic construct
PMTRAEK

SEQ ID NO: 189311 - protein, 7 aa, synthetic construct
MNTRLRD

SEQ ID NO: 189312 - protein, 7 aa, synthetic construct
NMKRTQD

SEQ ID NO: 189313 - protein, 7 aa, synthetic construct
MMTRAAV

SEQ ID NO: 189314 - protein, 7 aa, synthetic construct
PMDRARI

SEQ ID NO: 189315 - protein, 7 aa, synthetic construct
TMTKPRD

SEQ ID NO: 189316 - protein, 7 aa, synthetic construct
ITTRARE

SEQ ID NO: 189317 - protein, 7 aa, synthetic construct
NMTGSRN

SEQ ID NO: 189318 - protein, 7 aa, synthetic construct
NMIKLRD

SEQ ID NO: 189319 - protein, 7 aa, synthetic construct
VTPRARD

SEQ ID NO: 189320 - protein, 7 aa, synthetic construct
SLTRVRD

SEQ ID NO: 189321 - protein, 7 aa, synthetic construct
FMTQKRD

SEQ ID NO: 189322 - protein, 7 aa, synthetic construct
NMTHARG

SEQ ID NO: 189323 - protein, 7 aa, synthetic construct
KMMTARD

SEQ ID NO: 189324 - protein, 7 aa, synthetic construct
VSTRVRD

SEQ ID NO: 189325 - protein, 7 aa, synthetic construct
NETRLRS

SEQ ID NO: 189326 - protein, 7 aa, synthetic construct
KVTRAMD

SEQ ID NO: 189327 - protein, 7 aa, synthetic construct
MMTRAER

SEQ ID NO: 189328 - protein, 7 aa, synthetic construct
NMERSRT

SEQ ID NO: 189329 - protein, 7 aa, synthetic construct
NMTHIRG

SEQ ID NO: 189330 - protein, 7 aa, synthetic construct
NMTRNRE

SEQ ID NO: 189331 - protein, 7 aa, synthetic construct
NMQTKRD

SEQ ID NO: 189332 - protein, 7 aa, synthetic construct
NMTRTDK

SEQ ID NO: 189333 - protein, 7 aa, synthetic construct
NMTRGKD

SEQ ID NO: 189334 - protein, 7 aa, synthetic construct
NMTARRE

SEQ ID NO: 189335 - protein, 7 aa, synthetic construct
NMKRMQD

SEQ ID NO: 189336 - protein, 7 aa, synthetic construct
MDTRARV

SEQ ID NO: 189337 - protein, 7 aa, synthetic construct
NLKRATD

SEQ ID NO: 189338 - protein, 7 aa, synthetic construct
NMPAARH

SEQ ID NO: 189339 - protein, 7 aa, synthetic construct
QAPRARD

SEQ ID NO: 189340 - protein, 7 aa, synthetic construct
NMTGAHK

SEQ ID NO: 189341 - protein, 7 aa, synthetic construct
NYVKARD

SEQ ID NO: 189342 - protein, 7 aa, synthetic construct
LMERARA

SEQ ID NO: 189343 - protein, 7 aa, synthetic construct
NITHARN

SEQ ID NO: 189344 - protein, 7 aa, synthetic construct
NQIRAKD

SEQ ID NO: 189345 - protein, 7 aa, synthetic construct
VMTRAAI

SEQ ID NO: 189346 - protein, 7 aa, synthetic construct
NTTRQRE

SEQ ID NO: 189347 - protein, 7 aa, synthetic construct
NQVRNRD

SEQ ID NO: 189348 - protein, 7 aa, synthetic construct
NLTRAHG

SEQ ID NO: 189349 - protein, 7 aa, synthetic construct
INTRVRD

SEQ ID NO: 189350 - protein, 7 aa, synthetic construct
NLERARV

SEQ ID NO: 189351 - protein, 7 aa, synthetic construct
NVMRARE

SEQ ID NO: 189352 - protein, 7 aa, synthetic construct
ATTRTRD

SEQ ID NO: 189353 - protein, 7 aa, synthetic construct
FMTRNKD

SEQ ID NO: 189354 - protein, 7 aa, synthetic construct
NMRLARD

SEQ ID NO: 189355 - protein, 7 aa, synthetic construct
NKDRPRD

SEQ ID NO: 189356 - protein, 7 aa, synthetic construct
NMTLKRD

SEQ ID NO: 189357 - protein, 7 aa, synthetic construct
NMTRKDQ

SEQ ID NO: 189358 - protein, 7 aa, synthetic construct
LMPRPRD

SEQ ID NO: 189359 - protein, 7 aa, synthetic construct
NITVKRD

SEQ ID NO: 189360 - protein, 7 aa, synthetic construct
KNTRASD

SEQ ID NO: 189361 - protein, 7 aa, synthetic construct
YMTQKRD

SEQ ID NO: 189362 - protein, 7 aa, synthetic construct
TMTRASN

SEQ ID NO: 189363 - protein, 7 aa, synthetic construct
NVTVRRD

SEQ ID NO: 189364 - protein, 7 aa, synthetic construct
SMTKARD

SEQ ID NO: 189365 - protein, 7 aa, synthetic construct
IMTNARG

SEQ ID NO: 189366 - protein, 7 aa, synthetic construct
MLTRARE

SEQ ID NO: 189367 - protein, 7 aa, synthetic construct
NKSHARD

SEQ ID NO: 189368 - protein, 7 aa, synthetic construct
IMKRAVD

SEQ ID NO: 189369 - protein, 7 aa, synthetic construct
TNVRARD

SEQ ID NO: 189370 - protein, 7 aa, synthetic construct
NMGRFKD

SEQ ID NO: 189371 - protein, 7 aa, synthetic construct
NITRERG

SEQ ID NO: 189372 - protein, 7 aa, synthetic construct
LMNRARE

SEQ ID NO: 189373 - protein, 7 aa, synthetic construct
AMARLRD

SEQ ID NO: 189374 - protein, 7 aa, synthetic construct
AGTRVRD

SEQ ID NO: 189375 - protein, 7 aa, synthetic construct
PAPRARD

SEQ ID NO: 189376 - protein, 7 aa, synthetic construct
DKTRVRD

SEQ ID NO: 189377 - protein, 7 aa, synthetic construct
AVPRARD

SEQ ID NO: 189378 - protein, 7 aa, synthetic construct
NVTMRRD

SEQ ID NO: 189379 - protein, 7 aa, synthetic construct
NMKRQSD

SEQ ID NO: 189380 - protein, 7 aa, synthetic construct
PLPRARD

SEQ ID NO: 189381 - protein, 7 aa, synthetic construct
SMVRARE

SEQ ID NO: 189382 - protein, 7 aa, synthetic construct
KMHAARD

SEQ ID NO: 189383 - protein, 7 aa, synthetic construct
NVKRAVD

SEQ ID NO: 189384 - protein, 7 aa, synthetic construct
TMMKARD

SEQ ID NO: 189385 - protein, 7 aa, synthetic construct
NMDRPRM

SEQ ID NO: 189386 - protein, 7 aa, synthetic construct
ITTRLRD

SEQ ID NO: 189387 - protein, 7 aa, synthetic construct
NTMRIRD

SEQ ID NO: 189388 - protein, 7 aa, synthetic construct
IMPRTRD

SEQ ID NO: 189389 - protein, 7 aa, synthetic construct
MTTRARE

SEQ ID NO: 189390 - protein, 7 aa, synthetic construct
NMDRAKN

SEQ ID NO: 189391 - protein, 7 aa, synthetic construct
MMTRANM

SEQ ID NO: 189392 - protein, 7 aa, synthetic construct
PMARAKD

SEQ ID NO: 189393 - protein, 7 aa, synthetic construct
NMPPARH

SEQ ID NO: 189394 - protein, 7 aa, synthetic construct
LNPRARD

SEQ ID NO: 189395 - protein, 7 aa, synthetic construct
NMERQRP

SEQ ID NO: 189396 - protein, 7 aa, synthetic construct
RVTVARD

SEQ ID NO: 189397 - protein, 7 aa, synthetic construct
VMTHARA

SEQ ID NO: 189398 - protein, 7 aa, synthetic construct
RMTNPRD

SEQ ID NO: 189399 - protein, 7 aa, synthetic construct
KMTRPTD

SEQ ID NO: 189400 - protein, 7 aa, synthetic construct
KATRASD

SEQ ID NO: 189401 - protein, 7 aa, synthetic construct
MMTRASQ

SEQ ID NO: 189402 - protein, 7 aa, synthetic construct
YKTRASD

SEQ ID NO: 189403 - protein, 7 aa, synthetic construct
FTTKARD

SEQ ID NO: 189404 - protein, 7 aa, synthetic construct
NISRARE

SEQ ID NO: 189405 - protein, 7 aa, synthetic construct
YMTIKRD

SEQ ID NO: 189406 - protein, 7 aa, synthetic construct
NMDRIRQ

SEQ ID NO: 189407 - protein, 7 aa, synthetic construct
NKVRDRD

SEQ ID NO: 189408 - protein, 7 aa, synthetic construct
IMTRKSD

SEQ ID NO: 189409 - protein, 7 aa, synthetic construct
AFTKARD

SEQ ID NO: 189410 - protein, 7 aa, synthetic construct
MMTQARA

SEQ ID NO: 189411 - protein, 7 aa, synthetic construct
GMNKARD

SEQ ID NO: 189412 - protein, 7 aa, synthetic construct
LGTRAKD

SEQ ID NO: 189413 - protein, 7 aa, synthetic construct
NMRPARD

SEQ ID NO: 189414 - protein, 7 aa, synthetic construct
RMTPSRD

SEQ ID NO: 189415 - protein, 7 aa, synthetic construct
NPTRIKD

SEQ ID NO: 189416 - protein, 7 aa, synthetic construct
GDTRARV

SEQ ID NO: 189417 - protein, 7 aa, synthetic construct
IMTHARV

SEQ ID NO: 189418 - protein, 7 aa, synthetic construct
NANRLRD

SEQ ID NO: 189419 - protein, 7 aa, synthetic construct
GKTRAMD

SEQ ID NO: 189420 - protein, 7 aa, synthetic construct
NLRVARD

SEQ ID NO: 189421 - protein, 7 aa, synthetic construct
NLKFARD

SEQ ID NO: 189422 - protein, 7 aa, synthetic construct
VKTRASD

SEQ ID NO: 189423 - protein, 7 aa, synthetic construct
NKHAARD

SEQ ID NO: 189424 - protein, 7 aa, synthetic construct
AMTRAER

SEQ ID NO: 189425 - protein, 7 aa, synthetic construct
VMVRAKD

SEQ ID NO: 189426 - protein, 7 aa, synthetic construct
NMDRAAR

SEQ ID NO: 189427 - protein, 7 aa, synthetic construct
VMTNARL

SEQ ID NO: 189428 - protein, 7 aa, synthetic construct
NLARVRD

SEQ ID NO: 189429 - protein, 7 aa, synthetic construct
KQTRAVD

SEQ ID NO: 189430 - protein, 7 aa, synthetic construct
TMTRAER

SEQ ID NO: 189431 - protein, 7 aa, synthetic construct
IETRARG

SEQ ID NO: 189432 - protein, 7 aa, synthetic construct
NMTRPKE

SEQ ID NO: 189433 - protein, 7 aa, synthetic construct
SMTRERG

SEQ ID NO: 189434 - protein, 7 aa, synthetic construct
MMTRAHV

SEQ ID NO: 189435 - protein, 7 aa, synthetic construct
IKTYARD

SEQ ID NO: 189436 - protein, 7 aa, synthetic construct
NAPRPRD

SEQ ID NO: 189437 - protein, 7 aa, synthetic construct
VMTRAAG

SEQ ID NO: 189438 - protein, 7 aa, synthetic construct
NMERVRT

SEQ ID NO: 189439 - protein, 7 aa, synthetic construct
NMSNKRD

SEQ ID NO: 189440 - protein, 7 aa, synthetic construct
NEMRARS

SEQ ID NO: 189441 - protein, 7 aa, synthetic construct
NMERAAK

SEQ ID NO: 189442 - protein, 7 aa, synthetic construct
LMRTARD

SEQ ID NO: 189443 - protein, 7 aa, synthetic construct
SMTRASQ

SEQ ID NO: 189444 - protein, 7 aa, synthetic construct
SITRARE

SEQ ID NO: 189445 - protein, 7 aa, synthetic construct
NKFVARD

SEQ ID NO: 189446 - protein, 7 aa, synthetic construct
NMTFAKA

SEQ ID NO: 189447 - protein, 7 aa, synthetic construct
NMRVSRD

SEQ ID NO: 189448 - protein, 7 aa, synthetic construct
AMTLKRD

SEQ ID NO: 189449 - protein, 7 aa, synthetic construct
PMTRGKD

SEQ ID NO: 189450 - protein, 7 aa, synthetic construct
AMTRIRE

SEQ ID NO: 189451 - protein, 7 aa, synthetic construct
QMVRGRD

SEQ ID NO: 189452 - protein, 7 aa, synthetic construct
KMTAYRD

SEQ ID NO: 189453 - protein, 7 aa, synthetic construct
TMTRPKD

SEQ ID NO: 189454 - protein, 7 aa, synthetic construct
NMGRMKD

SEQ ID NO: 189455 - protein, 7 aa, synthetic construct
NMAKYRD

SEQ ID NO: 189456 - protein, 7 aa, synthetic construct
VMPRPRD

SEQ ID NO: 189457 - protein, 7 aa, synthetic construct
YMKQARD

SEQ ID NO: 189458 - protein, 7 aa, synthetic construct
NATRPKD

SEQ ID NO: 189459 - protein, 7 aa, synthetic construct
TQTRMRD

SEQ ID NO: 189460 - protein, 7 aa, synthetic construct
MMGKARD

SEQ ID NO: 189461 - protein, 7 aa, synthetic construct
WPTKARD

SEQ ID NO: 189462 - protein, 7 aa, synthetic construct
AMTRTKD

SEQ ID NO: 189463 - protein, 7 aa, synthetic construct
NMSRGRD

SEQ ID NO: 189464 - protein, 7 aa, synthetic construct
NMETARK

SEQ ID NO: 189465 - protein, 7 aa, synthetic construct
IMDRARV

SEQ ID NO: 189466 - protein, 7 aa, synthetic construct
KPTRAGD

SEQ ID NO: 189467 - protein, 7 aa, synthetic construct
LMRAARD

SEQ ID NO: 189468 - protein, 7 aa, synthetic construct
IMTTARN

SEQ ID NO: 189469 - protein, 7 aa, synthetic construct
NLTRDRG

SEQ ID NO: 189470 - protein, 7 aa, synthetic construct
NMNRAKE

SEQ ID NO: 189471 - protein, 7 aa, synthetic construct
NRPGARD

SEQ ID NO: 189472 - protein, 7 aa, synthetic construct
SMERARS

SEQ ID NO: 189473 - protein, 7 aa, synthetic construct
NIARARE

SEQ ID NO: 189474 - protein, 7 aa, synthetic construct
SDTRARG

SEQ ID NO: 189475 - protein, 7 aa, synthetic construct
NATNKRD

SEQ ID NO: 189476 - protein, 7 aa, synthetic construct
NMKRQLD

SEQ ID NO: 189477 - protein, 7 aa, synthetic construct
KMSVARD

SEQ ID NO: 189478 - protein, 7 aa, synthetic construct
NEMRARV

SEQ ID NO: 189479 - protein, 7 aa, synthetic construct
AKTRAQD

SEQ ID NO: 189480 - protein, 7 aa, synthetic construct
NITRDRA

SEQ ID NO: 189481 - protein, 7 aa, synthetic construct
NKTRMQD

SEQ ID NO: 189482 - protein, 7 aa, synthetic construct
NRLQARD

SEQ ID NO: 189483 - protein, 7 aa, synthetic construct
NMQQKRD

SEQ ID NO: 189484 - protein, 7 aa, synthetic construct
IMTNARQ

SEQ ID NO: 189485 - protein, 7 aa, synthetic construct
NLKRAID

SEQ ID NO: 189486 - protein, 7 aa, synthetic construct
KMMRERD

SEQ ID NO: 189487 - protein, 7 aa, synthetic construct
NMPRAER

SEQ ID NO: 189488 - protein, 7 aa, synthetic construct
NMGGARA

SEQ ID NO: 189489 - protein, 7 aa, synthetic construct
NMNEARK

SEQ ID NO: 189490 - protein, 7 aa, synthetic construct
NMGRKTD

SEQ ID NO: 189491 - protein, 7 aa, synthetic construct
MMKLARD

SEQ ID NO: 189492 - protein, 7 aa, synthetic construct
NLPRTRD

SEQ ID NO: 189493 - protein, 7 aa, synthetic construct
MMNRARE

SEQ ID NO: 189494 - protein, 7 aa, synthetic construct
KMTRQQD

SEQ ID NO: 189495 - protein, 7 aa, synthetic construct
MMDRARG

SEQ ID NO: 189496 - protein, 7 aa, synthetic construct
QMTNARN

SEQ ID NO: 189497 - protein, 7 aa, synthetic construct
NMIRTRD

SEQ ID NO: 189498 - protein, 7 aa, synthetic construct
NETRAPK

SEQ ID NO: 189499 - protein, 7 aa, synthetic construct
LMKRAQD

SEQ ID NO: 189500 - protein, 7 aa, synthetic construct
NETRVRG

SEQ ID NO: 189501 - protein, 7 aa, synthetic construct
MTTRVRD

SEQ ID NO: 189502 - protein, 7 aa, synthetic construct
PMTRERG

SEQ ID NO: 189503 - protein, 7 aa, synthetic construct
NMTRAKD

SEQ ID NO: 189504 - protein, 7 aa, synthetic construct
NMPTRRD

SEQ ID NO: 189505 - protein, 7 aa, synthetic construct
MTTRLRD

SEQ ID NO: 189506 - protein, 7 aa, synthetic construct
NMERANR

SEQ ID NO: 189507 - protein, 7 aa, synthetic construct
NINRARE

SEQ ID NO: 189508 - protein, 7 aa, synthetic construct
QMTRAEK

SEQ ID NO: 189509 - protein, 7 aa, synthetic construct
NMITKRD

SEQ ID NO: 189510 - protein, 7 aa, synthetic construct
NIARARD

SEQ ID NO: 189511 - protein, 7 aa, synthetic construct
LMTHARV

SEQ ID NO: 189512 - protein, 7 aa, synthetic construct
KMTRQID

SEQ ID NO: 189513 - protein, 7 aa, synthetic construct
TMTVRRD

SEQ ID NO: 189514 - protein, 7 aa, synthetic construct
YMDRARS

SEQ ID NO: 189515 - protein, 7 aa, synthetic construct
HMTKSRD

SEQ ID NO: 189516 - protein, 7 aa, synthetic construct
KITRAAD

SEQ ID NO: 189517 - protein, 7 aa, synthetic construct
NKYVARD

SEQ ID NO: 189518 - protein, 7 aa, synthetic construct
KMDRQRD

SEQ ID NO: 189519 - protein, 7 aa, synthetic construct
NTTKFRD

SEQ ID NO: 189520 - protein, 7 aa, synthetic construct
YDTRARV

SEQ ID NO: 189521 - protein, 7 aa, synthetic construct
NMTQHRA

SEQ ID NO: 189522 - protein, 7 aa, synthetic construct
NMERMRV

SEQ ID NO: 189523 - protein, 7 aa, synthetic construct
TATRGRD

SEQ ID NO: 189524 - protein, 7 aa, synthetic construct
SMKRAQD

SEQ ID NO: 189525 - protein, 7 aa, synthetic construct
YMTRIKD

SEQ ID NO: 189526 - protein, 7 aa, synthetic construct
NETRLRV

SEQ ID NO: 189527 - protein, 7 aa, synthetic construct
VKTRAPD

SEQ ID NO: 189528 - protein, 7 aa, synthetic construct
APQRARD

SEQ ID NO: 189529 - protein, 7 aa, synthetic construct
AMMRGRD

SEQ ID NO: 189530 - protein, 7 aa, synthetic construct
MMTKARD

SEQ ID NO: 189531 - protein, 7 aa, synthetic construct
GMVRMRD

SEQ ID NO: 189532 - protein, 7 aa, synthetic construct
ILTRQRD

SEQ ID NO: 189533 - protein, 7 aa, synthetic construct
NTTHARN

SEQ ID NO: 189534 - protein, 7 aa, synthetic construct
TMTRGRE

SEQ ID NO: 189535 - protein, 7 aa, synthetic construct
GMKRAPD

SEQ ID NO: 189536 - protein, 7 aa, synthetic construct
NDTRIRA

SEQ ID NO: 189537 - protein, 7 aa, synthetic construct
KMNRALD

SEQ ID NO: 189538 - protein, 7 aa, synthetic construct
YETRARA

SEQ ID NO: 189539 - protein, 7 aa, synthetic construct
NMLRDRP

SEQ ID NO: 189540 - protein, 7 aa, synthetic construct
NITHARM

SEQ ID NO: 189541 - protein, 7 aa, synthetic construct
NMKPPRD

SEQ ID NO: 189542 - protein, 7 aa, synthetic construct
VVTRARE

SEQ ID NO: 189543 - protein, 7 aa, synthetic construct
KMTRAID

SEQ ID NO: 189544 - protein, 7 aa, synthetic construct
SITRTRD

SEQ ID NO: 189545 - protein, 7 aa, synthetic construct
PATRGRD

SEQ ID NO: 189546 - protein, 7 aa, synthetic construct
NMDRVRG

SEQ ID NO: 189547 - protein, 7 aa, synthetic construct
YMTLKRD

SEQ ID NO: 189548 - protein, 7 aa, synthetic construct
NMLRGRD

SEQ ID NO: 189549 - protein, 7 aa, synthetic construct
NMKNYRD

SEQ ID NO: 189550 - protein, 7 aa, synthetic construct
NKQRAGD

SEQ ID NO: 189551 - protein, 7 aa, synthetic construct
LMPRARE

SEQ ID NO: 189552 - protein, 7 aa, synthetic construct
VGTRIRD

SEQ ID NO: 189553 - protein, 7 aa, synthetic construct
QMTRAKD

SEQ ID NO: 189554 - protein, 7 aa, synthetic construct
NMTRERG

SEQ ID NO: 189555 - protein, 7 aa, synthetic construct
VMTGARG

SEQ ID NO: 189556 - protein, 7 aa, synthetic construct
TQARARD

SEQ ID NO: 189557 - protein, 7 aa, synthetic construct
AMVRTRD

SEQ ID NO: 189558 - protein, 7 aa, synthetic construct
DMTRAKA

SEQ ID NO: 189559 - protein, 7 aa, synthetic construct
NLTRARE

SEQ ID NO: 189560 - protein, 7 aa, synthetic construct
NMTRTDR

SEQ ID NO: 189561 - protein, 7 aa, synthetic construct
ATTRAKD

SEQ ID NO: 189562 - protein, 7 aa, synthetic construct
QMTRAER

SEQ ID NO: 189563 - protein, 7 aa, synthetic construct
MMTRATH

SEQ ID NO: 189564 - protein, 7 aa, synthetic construct
NMTNDRK

SEQ ID NO: 189565 - protein, 7 aa, synthetic construct
AMTRAKE

SEQ ID NO: 189566 - protein, 7 aa, synthetic construct
NKTRQMD

SEQ ID NO: 189567 - protein, 7 aa, synthetic construct
KETRIRD

SEQ ID NO: 189568 - protein, 7 aa, synthetic construct
TMPRIRD

SEQ ID NO: 189569 - protein, 7 aa, synthetic construct
LTTRTRD

SEQ ID NO: 189570 - protein, 7 aa, synthetic construct
QMTRGKD

SEQ ID NO: 189571 - protein, 7 aa, synthetic construct
NMAGARN

SEQ ID NO: 189572 - protein, 7 aa, synthetic construct
NMSRERS

SEQ ID NO: 189573 - protein, 7 aa, synthetic construct
NTPRTRD

SEQ ID NO: 189574 - protein, 7 aa, synthetic construct
PMTRAQQ

SEQ ID NO: 189575 - protein, 7 aa, synthetic construct
KMTRAAD

SEQ ID NO: 189576 - protein, 7 aa, synthetic construct
MFTKARD

SEQ ID NO: 189577 - protein, 7 aa, synthetic construct
NQPRMRD

SEQ ID NO: 189578 - protein, 7 aa, synthetic construct
NSNKARD

SEQ ID NO: 189579 - protein, 7 aa, synthetic construct
NMKRLID

SEQ ID NO: 189580 - protein, 7 aa, synthetic construct
NETRAIK

SEQ ID NO: 189581 - protein, 7 aa, synthetic construct
IMPRMRD

SEQ ID NO: 189582 - protein, 7 aa, synthetic construct
NMERANK

SEQ ID NO: 189583 - protein, 7 aa, synthetic construct
MATRAKD

SEQ ID NO: 189584 - protein, 7 aa, synthetic construct
RMTKDRD

SEQ ID NO: 189585 - protein, 7 aa, synthetic construct
GQTRVRD

SEQ ID NO: 189586 - protein, 7 aa, synthetic construct
QMNRAKD

SEQ ID NO: 189587 - protein, 7 aa, synthetic construct
VDTRARV

SEQ ID NO: 189588 - protein, 7 aa, synthetic construct
DSTRARP

SEQ ID NO: 189589 - protein, 7 aa, synthetic construct
MVTKARD

SEQ ID NO: 189590 - protein, 7 aa, synthetic construct
YMTRPKD

SEQ ID NO: 189591 - protein, 7 aa, synthetic construct
NKPYARD

SEQ ID NO: 189592 - protein, 7 aa, synthetic construct
TMQRARD

SEQ ID NO: 189593 - protein, 7 aa, synthetic construct
YTTRAKD

SEQ ID NO: 189594 - protein, 7 aa, synthetic construct
FITKARD

SEQ ID NO: 189595 - protein, 7 aa, synthetic construct
RMTRTGD

SEQ ID NO: 189596 - protein, 7 aa, synthetic construct
LPTRPRD

SEQ ID NO: 189597 - protein, 7 aa, synthetic construct
MSTRIRD

SEQ ID NO: 189598 - protein, 7 aa, synthetic construct
IQTRAKD

SEQ ID NO: 189599 - protein, 7 aa, synthetic construct
NITRQKD

SEQ ID NO: 189600 - protein, 7 aa, synthetic construct
NMTRDRG

SEQ ID NO: 189601 - protein, 7 aa, synthetic construct
NQKRAAD

SEQ ID NO: 189602 - protein, 7 aa, synthetic construct
GGTKARD

SEQ ID NO: 189603 - protein, 7 aa, synthetic construct
NRTTQRD

SEQ ID NO: 189604 - protein, 7 aa, synthetic construct
KMTRISD

SEQ ID NO: 189605 - protein, 7 aa, synthetic construct
QVQRARD

SEQ ID NO: 189606 - protein, 7 aa, synthetic construct
NSTRVRE

SEQ ID NO: 189607 - protein, 7 aa, synthetic construct
IMTHARN

SEQ ID NO: 189608 - protein, 7 aa, synthetic construct
LRTLARD

SEQ ID NO: 189609 - protein, 7 aa, synthetic construct
NMTTHRM

SEQ ID NO: 189610 - protein, 7 aa, synthetic construct
NQTRNRE

SEQ ID NO: 189611 - protein, 7 aa, synthetic construct
NPLRLRD

SEQ ID NO: 189612 - protein, 7 aa, synthetic construct
NMPRPRD

SEQ ID NO: 189613 - protein, 7 aa, synthetic construct
NDTRLRT

SEQ ID NO: 189614 - protein, 7 aa, synthetic construct
NQTRQRD

SEQ ID NO: 189615 - protein, 7 aa, synthetic construct
NPERARM

SEQ ID NO: 189616 - protein, 7 aa, synthetic construct
RVTGARD

SEQ ID NO: 189617 - protein, 7 aa, synthetic construct
VMNRTRD

SEQ ID NO: 189618 - protein, 7 aa, synthetic construct
NRTINRD

SEQ ID NO: 189619 - protein, 7 aa, synthetic construct
KMTRADM

SEQ ID NO: 189620 - protein, 7 aa, synthetic construct
QMDRARS

SEQ ID NO: 189621 - protein, 7 aa, synthetic construct
NDTRAKT

SEQ ID NO: 189622 - protein, 7 aa, synthetic construct
VRTVARD

SEQ ID NO: 189623 - protein, 7 aa, synthetic construct
MMTRATM

SEQ ID NO: 189624 - protein, 7 aa, synthetic construct
KMARAGD

SEQ ID NO: 189625 - protein, 7 aa, synthetic construct
LMTTARQ

SEQ ID NO: 189626 - protein, 7 aa, synthetic construct
NMKRTID

SEQ ID NO: 189627 - protein, 7 aa, synthetic construct
IMTEARK

SEQ ID NO: 189628 - protein, 7 aa, synthetic construct
NSTRLRE

SEQ ID NO: 189629 - protein, 7 aa, synthetic construct
NLTRQRD

SEQ ID NO: 189630 - protein, 7 aa, synthetic construct
SMMRVRD

SEQ ID NO: 189631 - protein, 7 aa, synthetic construct
NMERMRN

SEQ ID NO: 189632 - protein, 7 aa, synthetic construct
NMLRMRE

SEQ ID NO: 189633 - protein, 7 aa, synthetic construct
IQTRMRD

SEQ ID NO: 189634 - protein, 7 aa, synthetic construct
YMTHARA

SEQ ID NO: 189635 - protein, 7 aa, synthetic construct
NTTMRRD

SEQ ID NO: 189636 - protein, 7 aa, synthetic construct
NMAEARK

SEQ ID NO: 189637 - protein, 7 aa, synthetic construct
FKTRAMD

SEQ ID NO: 189638 - protein, 7 aa, synthetic construct
TMTRVRE

SEQ ID NO: 189639 - protein, 7 aa, synthetic construct
TMTRKGD

SEQ ID NO: 189640 - protein, 7 aa, synthetic construct
NVVRQRD

SEQ ID NO: 189641 - protein, 7 aa, synthetic construct
NMMKPRD

SEQ ID NO: 189642 - protein, 7 aa, synthetic construct
NSERARS

SEQ ID NO: 189643 - protein, 7 aa, synthetic construct
NNVRPRD

SEQ ID NO: 189644 - protein, 7 aa, synthetic construct
TVMRARD

SEQ ID NO: 189645 - protein, 7 aa, synthetic construct
NITNKRD

SEQ ID NO: 189646 - protein, 7 aa, synthetic construct
MMTRAAH

SEQ ID NO: 189647 - protein, 7 aa, synthetic construct
NMHLARA

SEQ ID NO: 189648 - protein, 7 aa, synthetic construct
NTTEARR

SEQ ID NO: 189649 - protein, 7 aa, synthetic construct
KMTRQMD

SEQ ID NO: 189650 - protein, 7 aa, synthetic construct
VSTRAKD

SEQ ID NO: 189651 - protein, 7 aa, synthetic construct
GMQRVRD

SEQ ID NO: 189652 - protein, 7 aa, synthetic construct
NDTRAVR

SEQ ID NO: 189653 - protein, 7 aa, synthetic construct
MATRMRD

SEQ ID NO: 189654 - protein, 7 aa, synthetic construct
NMIRNRE

SEQ ID NO: 189655 - protein, 7 aa, synthetic construct
NDTRGRP

SEQ ID NO: 189656 - protein, 7 aa, synthetic construct
NPLRMRD

SEQ ID NO: 189657 - protein, 7 aa, synthetic construct
AMTPKRD

SEQ ID NO: 189658 - protein, 7 aa, synthetic construct
NMVHARA

SEQ ID NO: 189659 - protein, 7 aa, synthetic construct
NDTTARK

SEQ ID NO: 189660 - protein, 7 aa, synthetic construct
KMDRGRD

SEQ ID NO: 189661 - protein, 7 aa, synthetic construct
GKDRARD

SEQ ID NO: 189662 - protein, 7 aa, synthetic construct
NMSIKRD

SEQ ID NO: 189663 - protein, 7 aa, synthetic construct
NEARARS

SEQ ID NO: 189664 - protein, 7 aa, synthetic construct
NMTREKH

SEQ ID NO: 189665 - protein, 7 aa, synthetic construct
NMKRAAD

SEQ ID NO: 189666 - protein, 7 aa, synthetic construct
NMPHARA

SEQ ID NO: 189667 - protein, 7 aa, synthetic construct
KMARAMD

SEQ ID NO: 189668 - protein, 7 aa, synthetic construct
NMVKIRD

SEQ ID NO: 189669 - protein, 7 aa, synthetic construct
NRLTARD

SEQ ID NO: 189670 - protein, 7 aa, synthetic construct
KGTRALD

SEQ ID NO: 189671 - protein, 7 aa, synthetic construct
HMTKVRD

SEQ ID NO: 189672 - protein, 7 aa, synthetic construct
LQTRIRD

SEQ ID NO: 189673 - protein, 7 aa, synthetic construct
TITRARE

SEQ ID NO: 189674 - protein, 7 aa, synthetic construct
NMVKLRD

SEQ ID NO: 189675 - protein, 7 aa, synthetic construct
NVDRARI

SEQ ID NO: 189676 - protein, 7 aa, synthetic construct
AMVKARD

SEQ ID NO: 189677 - protein, 7 aa, synthetic construct
NMSRQRE

SEQ ID NO: 189678 - protein, 7 aa, synthetic construct
NRTPSRD

SEQ ID NO: 189679 - protein, 7 aa, synthetic construct
NDIRART

SEQ ID NO: 189680 - protein, 7 aa, synthetic construct
NITRGKD

SEQ ID NO: 189681 - protein, 7 aa, synthetic construct
NMERSRA

SEQ ID NO: 189682 - protein, 7 aa, synthetic construct
TMDRARN

SEQ ID NO: 189683 - protein, 7 aa, synthetic construct
TMTRERN

SEQ ID NO: 189684 - protein, 7 aa, synthetic construct
NDIRARA

SEQ ID NO: 189685 - protein, 7 aa, synthetic construct
NTVRQRD

SEQ ID NO: 189686 - protein, 7 aa, synthetic construct
VRTAARD

SEQ ID NO: 189687 - protein, 7 aa, synthetic construct
DTTRARV

SEQ ID NO: 189688 - protein, 7 aa, synthetic construct
NIERARI

SEQ ID NO: 189689 - protein, 7 aa, synthetic construct
YMKRAGD

SEQ ID NO: 189690 - protein, 7 aa, synthetic construct
DMTPARK

SEQ ID NO: 189691 - protein, 7 aa, synthetic construct
IMTQARA

SEQ ID NO: 189692 - protein, 7 aa, synthetic construct
NQTRAKD

SEQ ID NO: 189693 - protein, 7 aa, synthetic construct
NMKPHRD

SEQ ID NO: 189694 - protein, 7 aa, synthetic construct
NFTKIRD

SEQ ID NO: 189695 - protein, 7 aa, synthetic construct
NATEARR

SEQ ID NO: 189696 - protein, 7 aa, synthetic construct
SMQRARE

SEQ ID NO: 189697 - protein, 7 aa, synthetic construct
KMTFAKD

SEQ ID NO: 189698 - protein, 7 aa, synthetic construct
GMTRAHI

SEQ ID NO: 189699 - protein, 7 aa, synthetic construct
NLVRSRD

SEQ ID NO: 189700 - protein, 7 aa, synthetic construct
NMTKRQD

SEQ ID NO: 189701 - protein, 7 aa, synthetic construct
PMTRAGH

SEQ ID NO: 189702 - protein, 7 aa, synthetic construct
EMTRAKV

SEQ ID NO: 189703 - protein, 7 aa, synthetic construct
NMIKQRD

SEQ ID NO: 189704 - protein, 7 aa, synthetic construct
YMTKARE

SEQ ID NO: 189705 - protein, 7 aa, synthetic construct
NMVRERS

SEQ ID NO: 189706 - protein, 7 aa, synthetic construct
NMTNHRG

SEQ ID NO: 189707 - protein, 7 aa, synthetic construct
TMTKARD

SEQ ID NO: 189708 - protein, 7 aa, synthetic construct
KMVLARD

SEQ ID NO: 189709 - protein, 7 aa, synthetic construct
QNTRAKD

SEQ ID NO: 189710 - protein, 7 aa, synthetic construct
NMHMARA

SEQ ID NO: 189711 - protein, 7 aa, synthetic construct
KMTRTQD

SEQ ID NO: 189712 - protein, 7 aa, synthetic construct
NMPVRRD

SEQ ID NO: 189713 - protein, 7 aa, synthetic construct
NTIRMRD

SEQ ID NO: 189714 - protein, 7 aa, synthetic construct
GMTRAHG

SEQ ID NO: 189715 - protein, 7 aa, synthetic construct
RMTKAGD

SEQ ID NO: 189716 - protein, 7 aa, synthetic construct
NVVKARD

SEQ ID NO: 189717 - protein, 7 aa, synthetic construct
NETRLRP

SEQ ID NO: 189718 - protein, 7 aa, synthetic construct
AMERARG

SEQ ID NO: 189719 - protein, 7 aa, synthetic construct
NKTRDKD

SEQ ID NO: 189720 - protein, 7 aa, synthetic construct
NKLRAQD

SEQ ID NO: 189721 - protein, 7 aa, synthetic construct
PMIKARD

SEQ ID NO: 189722 - protein, 7 aa, synthetic construct
NMTDRRG

SEQ ID NO: 189723 - protein, 7 aa, synthetic construct
NPTRERS

SEQ ID NO: 189724 - protein, 7 aa, synthetic construct
NTQRPRD

SEQ ID NO: 189725 - protein, 7 aa, synthetic construct
TMNRIRD

SEQ ID NO: 189726 - protein, 7 aa, synthetic construct
NMGVKRD

SEQ ID NO: 189727 - protein, 7 aa, synthetic construct
TTTRQRD

SEQ ID NO: 189728 - protein, 7 aa, synthetic construct
VMTRANL

SEQ ID NO: 189729 - protein, 7 aa, synthetic construct
NMLRERA

SEQ ID NO: 189730 - protein, 7 aa, synthetic construct
NMDRARA

SEQ ID NO: 189731 - protein, 7 aa, synthetic construct
PMRVARD

SEQ ID NO: 189732 - protein, 7 aa, synthetic construct
LDTRART

SEQ ID NO: 189733 - protein, 7 aa, synthetic construct
NDTRSRG

SEQ ID NO: 189734 - protein, 7 aa, synthetic construct
NDTTARR

SEQ ID NO: 189735 - protein, 7 aa, synthetic construct
MLTRGRD

SEQ ID NO: 189736 - protein, 7 aa, synthetic construct
NVVRMRD

SEQ ID NO: 189737 - protein, 7 aa, synthetic construct
NITRAHS

SEQ ID NO: 189738 - protein, 7 aa, synthetic construct
NMVRKSD

SEQ ID NO: 189739 - protein, 7 aa, synthetic construct
LMTRERS

SEQ ID NO: 189740 - protein, 7 aa, synthetic construct
NLVRQRD

SEQ ID NO: 189741 - protein, 7 aa, synthetic construct
AMPRGRD

SEQ ID NO: 189742 - protein, 7 aa, synthetic construct
VMTRASN

SEQ ID NO: 189743 - protein, 7 aa, synthetic construct
TMSRLRD

SEQ ID NO: 189744 - protein, 7 aa, synthetic construct
MMNRAKD

SEQ ID NO: 189745 - protein, 7 aa, synthetic construct
NMIRPKD

SEQ ID NO: 189746 - protein, 7 aa, synthetic construct
KMTRPID

SEQ ID NO: 189747 - protein, 7 aa, synthetic construct
TMNRARD

SEQ ID NO: 189748 - protein, 7 aa, synthetic construct
AMTRMRE

SEQ ID NO: 189749 - protein, 7 aa, synthetic construct
NLERARA

SEQ ID NO: 189750 - protein, 7 aa, synthetic construct
KMDRVRD

SEQ ID NO: 189751 - protein, 7 aa, synthetic construct
NVPRPRD

SEQ ID NO: 189752 - protein, 7 aa, synthetic construct
SMNRLRD

SEQ ID NO: 189753 - protein, 7 aa, synthetic construct
VMSRARE

SEQ ID NO: 189754 - protein, 7 aa, synthetic construct
NLTRLRE

SEQ ID NO: 189755 - protein, 7 aa, synthetic construct
QGTKARD

SEQ ID NO: 189756 - protein, 7 aa, synthetic construct
GMTRGKD

SEQ ID NO: 189757 - protein, 7 aa, synthetic construct
NMNRQRE

SEQ ID NO: 189758 - protein, 7 aa, synthetic construct
FMTNARQ

SEQ ID NO: 189759 - protein, 7 aa, synthetic construct
MPVRARD

SEQ ID NO: 189760 - protein, 7 aa, synthetic construct
VMSRAKD

SEQ ID NO: 189761 - protein, 7 aa, synthetic construct
NEMRARA

SEQ ID NO: 189762 - protein, 7 aa, synthetic construct
KMTRMGD

SEQ ID NO: 189763 - protein, 7 aa, synthetic construct
NATRNKD

SEQ ID NO: 189764 - protein, 7 aa, synthetic construct
DMTRAKV

SEQ ID NO: 189765 - protein, 7 aa, synthetic construct
NEIRARA

SEQ ID NO: 189766 - protein, 7 aa, synthetic construct
NQTRTRE

SEQ ID NO: 189767 - protein, 7 aa, synthetic construct
NPTRAKD

SEQ ID NO: 189768 - protein, 7 aa, synthetic construct
FMTKSRD

SEQ ID NO: 189769 - protein, 7 aa, synthetic construct
NATRGRD

SEQ ID NO: 189770 - protein, 7 aa, synthetic construct
TMIRAKD

SEQ ID NO: 189771 - protein, 7 aa, synthetic construct
QMTEARR

SEQ ID NO: 189772 - protein, 7 aa, synthetic construct
NITPRRD

SEQ ID NO: 189773 - protein, 7 aa, synthetic construct
EMTRARV

SEQ ID NO: 189774 - protein, 7 aa, synthetic construct
NVTRTKD

SEQ ID NO: 189775 - protein, 7 aa, synthetic construct
QMTRVRE

SEQ ID NO: 189776 - protein, 7 aa, synthetic construct
LMDRARP

SEQ ID NO: 189777 - protein, 7 aa, synthetic construct
NMTRMRE

SEQ ID NO: 189778 - protein, 7 aa, synthetic construct
NNLRIRD

SEQ ID NO: 189779 - protein, 7 aa, synthetic construct
PMTRANQ

SEQ ID NO: 189780 - protein, 7 aa, synthetic construct
KMITARD

SEQ ID NO: 189781 - protein, 7 aa, synthetic construct
GITRVRD

SEQ ID NO: 189782 - protein, 7 aa, synthetic construct
NRTPNRD

SEQ ID NO: 189783 - protein, 7 aa, synthetic construct
VMTRSKD

SEQ ID NO: 189784 - protein, 7 aa, synthetic construct
NETRNRV

SEQ ID NO: 189785 - protein, 7 aa, synthetic construct
NQERARA

SEQ ID NO: 189786 - protein, 7 aa, synthetic construct
NRTLVRD

SEQ ID NO: 189787 - protein, 7 aa, synthetic construct
KMTRLQD

SEQ ID NO: 189788 - protein, 7 aa, synthetic construct
NEQRARP

SEQ ID NO: 189789 - protein, 7 aa, synthetic construct
QMTRERV

SEQ ID NO: 189790 - protein, 7 aa, synthetic construct
SMVRGRD

SEQ ID NO: 189791 - protein, 7 aa, synthetic construct
NMPRERS

SEQ ID NO: 189792 - protein, 7 aa, synthetic construct
GMLRARE

SEQ ID NO: 189793 - protein, 7 aa, synthetic construct
NMTRPKD

SEQ ID NO: 189794 - protein, 7 aa, synthetic construct
VMARGRD

SEQ ID NO: 189795 - protein, 7 aa, synthetic construct
GLTRQRD

SEQ ID NO: 189796 - protein, 7 aa, synthetic construct
NQPRGRD

SEQ ID NO: 189797 - protein, 7 aa, synthetic construct
SMTQARN

SEQ ID NO: 189798 - protein, 7 aa, synthetic construct
SPTRTRD

SEQ ID NO: 189799 - protein, 7 aa, synthetic construct
NMEPARK

SEQ ID NO: 189800 - protein, 7 aa, synthetic construct
NETRSRI

SEQ ID NO: 189801 - protein, 7 aa, synthetic construct
SMTRAKD

SEQ ID NO: 189802 - protein, 7 aa, synthetic construct
NLSRVRD

SEQ ID NO: 189803 - protein, 7 aa, synthetic construct
NKTSPRD

SEQ ID NO: 189804 - protein, 7 aa, synthetic construct
DMPRART

SEQ ID NO: 189805 - protein, 7 aa, synthetic construct
AMQRARE

SEQ ID NO: 189806 - protein, 7 aa, synthetic construct
INPRARD

SEQ ID NO: 189807 - protein, 7 aa, synthetic construct
NMRVARE

SEQ ID NO: 189808 - protein, 7 aa, synthetic construct
VATRGRD

SEQ ID NO: 189809 - protein, 7 aa, synthetic construct
IPTRAKD

SEQ ID NO: 189810 - protein, 7 aa, synthetic construct
NKVRATD

SEQ ID NO: 189811 - protein, 7 aa, synthetic construct
SMTRERN

SEQ ID NO: 189812 - protein, 7 aa, synthetic construct
PVPRARD

SEQ ID NO: 189813 - protein, 7 aa, synthetic construct
TMTIARA

SEQ ID NO: 189814 - protein, 7 aa, synthetic construct
NMRLVRD

SEQ ID NO: 189815 - protein, 7 aa, synthetic construct
NVTRIRD

SEQ ID NO: 189816 - protein, 7 aa, synthetic construct
NPTRKGD

SEQ ID NO: 189817 - protein, 7 aa, synthetic construct
LMTRIRE

SEQ ID NO: 189818 - protein, 7 aa, synthetic construct
QMTRQKD

SEQ ID NO: 189819 - protein, 7 aa, synthetic construct
NNARLRD

SEQ ID NO: 189820 - protein, 7 aa, synthetic construct
LMTRIKD

SEQ ID NO: 189821 - protein, 7 aa, synthetic construct
MMTRADK

SEQ ID NO: 189822 - protein, 7 aa, synthetic construct
SSTRLRD

SEQ ID NO: 189823 - protein, 7 aa, synthetic construct
NMMRMRE

SEQ ID NO: 189824 - protein, 7 aa, synthetic construct
YMTAKRD

SEQ ID NO: 189825 - protein, 7 aa, synthetic construct
GMPRMRD

SEQ ID NO: 189826 - protein, 7 aa, synthetic construct
FMTGARA

SEQ ID NO: 189827 - protein, 7 aa, synthetic construct
NTERARL

SEQ ID NO: 189828 - protein, 7 aa, synthetic construct
IPTRNRD

SEQ ID NO: 189829 - protein, 7 aa, synthetic construct
SMTKQRD

SEQ ID NO: 189830 - protein, 7 aa, synthetic construct
NMPRALQ

SEQ ID NO: 189831 - protein, 7 aa, synthetic construct
MMPRSRD

SEQ ID NO: 189832 - protein, 7 aa, synthetic construct
NVTIRRD

SEQ ID NO: 189833 - protein, 7 aa, synthetic construct
NMKRLSD

SEQ ID NO: 189834 - protein, 7 aa, synthetic construct
NRTAVRD

SEQ ID NO: 189835 - protein, 7 aa, synthetic construct
NEARART

SEQ ID NO: 189836 - protein, 7 aa, synthetic construct
NMTRKEQ

SEQ ID NO: 189837 - protein, 7 aa, synthetic construct
NIPRARE

SEQ ID NO: 189838 - protein, 7 aa, synthetic construct
TNIRARD

SEQ ID NO: 189839 - protein, 7 aa, synthetic construct
NMKRAYE

SEQ ID NO: 189840 - protein, 7 aa, synthetic construct
GMTQKRD

SEQ ID NO: 189841 - protein, 7 aa, synthetic construct
TAARARD

SEQ ID NO: 189842 - protein, 7 aa, synthetic construct
NMTRAKE

SEQ ID NO: 189843 - protein, 7 aa, synthetic construct
AMTRNRE

SEQ ID NO: 189844 - protein, 7 aa, synthetic construct
NSERARV

SEQ ID NO: 189845 - protein, 7 aa, synthetic construct
EMTRAKI

SEQ ID NO: 189846 - protein, 7 aa, synthetic construct
VNTRARE

SEQ ID NO: 189847 - protein, 7 aa, synthetic construct
TDTRARG

SEQ ID NO: 189848 - protein, 7 aa, synthetic construct
NQKHARD

SEQ ID NO: 189849 - protein, 7 aa, synthetic construct
NQTRQRE

SEQ ID NO: 189850 - protein, 7 aa, synthetic construct
NMRPNRD

SEQ ID NO: 189851 - protein, 7 aa, synthetic construct
LMTGARN

SEQ ID NO: 189852 - protein, 7 aa, synthetic construct
GITRIRD

SEQ ID NO: 189853 - protein, 7 aa, synthetic construct
NVARIRD

SEQ ID NO: 189854 - protein, 7 aa, synthetic construct
NMTRPRE

SEQ ID NO: 189855 - protein, 7 aa, synthetic construct
TMPRSRD

SEQ ID NO: 189856 - protein, 7 aa, synthetic construct
FQTKARD

SEQ ID NO: 189857 - protein, 7 aa, synthetic construct
NMERAAR

SEQ ID NO: 189858 - protein, 7 aa, synthetic construct
NMRNPRD

SEQ ID NO: 189859 - protein, 7 aa, synthetic construct
NMLHARP

SEQ ID NO: 189860 - protein, 7 aa, synthetic construct
NMVRERG

SEQ ID NO: 189861 - protein, 7 aa, synthetic construct
GMDRARG

SEQ ID NO: 189862 - protein, 7 aa, synthetic construct
NVTYARP

SEQ ID NO: 189863 - protein, 7 aa, synthetic construct
TVVRARD

SEQ ID NO: 189864 - protein, 7 aa, synthetic construct
MQTKARD

SEQ ID NO: 189865 - protein, 7 aa, synthetic construct
GMTRQRE

SEQ ID NO: 189866 - protein, 7 aa, synthetic construct
KITRAVD

SEQ ID NO: 189867 - protein, 7 aa, synthetic construct
NALRTRD

SEQ ID NO: 189868 - protein, 7 aa, synthetic construct
NMSRLRD

SEQ ID NO: 189869 - protein, 7 aa, synthetic construct
GMNRARE

SEQ ID NO: 189870 - protein, 7 aa, synthetic construct
NMGRKQD

SEQ ID NO: 189871 - protein, 7 aa, synthetic construct
NVKRAMD

SEQ ID NO: 189872 - protein, 7 aa, synthetic construct
NVARARE

SEQ ID NO: 189873 - protein, 7 aa, synthetic construct
NNTRLRD

SEQ ID NO: 189874 - protein, 7 aa, synthetic construct
NVMRQRD

SEQ ID NO: 189875 - protein, 7 aa, synthetic construct
NMMRNKD

SEQ ID NO: 189876 - protein, 7 aa, synthetic construct
NMAKARD

SEQ ID NO: 189877 - protein, 7 aa, synthetic construct
NLVRTRD

SEQ ID NO: 189878 - protein, 7 aa, synthetic construct
NMSGARA

SEQ ID NO: 189879 - protein, 7 aa, synthetic construct
QMTRANL

SEQ ID NO: 189880 - protein, 7 aa, synthetic construct
TRTVARD

SEQ ID NO: 189881 - protein, 7 aa, synthetic construct
IAPRARD

SEQ ID NO: 189882 - protein, 7 aa, synthetic construct
QMTRAAL

SEQ ID NO: 189883 - protein, 7 aa, synthetic construct
NPTRERA

SEQ ID NO: 189884 - protein, 7 aa, synthetic construct
NVSRMRD

SEQ ID NO: 189885 - protein, 7 aa, synthetic construct
NETRAQK

SEQ ID NO: 189886 - protein, 7 aa, synthetic construct
NMKMPRD

SEQ ID NO: 189887 - protein, 7 aa, synthetic construct
SMPRQRD

SEQ ID NO: 189888 - protein, 7 aa, synthetic construct
TMNRVRD

SEQ ID NO: 189889 - protein, 7 aa, synthetic construct
TNTRARE

SEQ ID NO: 189890 - protein, 7 aa, synthetic construct
VMTRLKD

SEQ ID NO: 189891 - protein, 7 aa, synthetic construct
NMERARV

SEQ ID NO: 189892 - protein, 7 aa, synthetic construct
KMTRGID

SEQ ID NO: 189893 - protein, 7 aa, synthetic construct
NMERATR

SEQ ID NO: 189894 - protein, 7 aa, synthetic construct
DMLRARG

SEQ ID NO: 189895 - protein, 7 aa, synthetic construct
NKTFVRD

SEQ ID NO: 189896 - protein, 7 aa, synthetic construct
NTTRDRM

SEQ ID NO: 189897 - protein, 7 aa, synthetic construct
MDTRARA

SEQ ID NO: 189898 - protein, 7 aa, synthetic construct
NMRATRD

SEQ ID NO: 189899 - protein, 7 aa, synthetic construct
NADRARA

SEQ ID NO: 189900 - protein, 7 aa, synthetic construct
SMARAKD

SEQ ID NO: 189901 - protein, 7 aa, synthetic construct
NLKRAQD

SEQ ID NO: 189902 - protein, 7 aa, synthetic construct
KMQRAND

SEQ ID NO: 189903 - protein, 7 aa, synthetic construct
IMTRERS

SEQ ID NO: 189904 - protein, 7 aa, synthetic construct
LMARARE

SEQ ID NO: 189905 - protein, 7 aa, synthetic construct
KMTRAEL

SEQ ID NO: 189906 - protein, 7 aa, synthetic construct
IMNRIRD

SEQ ID NO: 189907 - protein, 7 aa, synthetic construct
STTRGRD

SEQ ID NO: 189908 - protein, 7 aa, synthetic construct
ASTRAKD

SEQ ID NO: 189909 - protein, 7 aa, synthetic construct
NMTRERQ

SEQ ID NO: 189910 - protein, 7 aa, synthetic construct
YMQRAKD

SEQ ID NO: 189911 - protein, 7 aa, synthetic construct
TMTHARM

SEQ ID NO: 189912 - protein, 7 aa, synthetic construct
NMERARA

SEQ ID NO: 189913 - protein, 7 aa, synthetic construct
IYTKARD

SEQ ID NO: 189914 - protein, 7 aa, synthetic construct
LMRGARD

SEQ ID NO: 189915 - protein, 7 aa, synthetic construct
LMTRAQL

SEQ ID NO: 189916 - protein, 7 aa, synthetic construct
NMDRAPK

SEQ ID NO: 189917 - protein, 7 aa, synthetic construct
NMIRKGD

SEQ ID NO: 189918 - protein, 7 aa, synthetic construct
IITRAKD

SEQ ID NO: 189919 - protein, 7 aa, synthetic construct
NMTAHRN

SEQ ID NO: 189920 - protein, 7 aa, synthetic construct
NMENARR

SEQ ID NO: 189921 - protein, 7 aa, synthetic construct
NITRARE

SEQ ID NO: 189922 - protein, 7 aa, synthetic construct
NMDRQRV

SEQ ID NO: 189923 - protein, 7 aa, synthetic construct
GMARARE

SEQ ID NO: 189924 - protein, 7 aa, synthetic construct
SMVRVRD

SEQ ID NO: 189925 - protein, 7 aa, synthetic construct
TQTRGRD

SEQ ID NO: 189926 - protein, 7 aa, synthetic construct
VTTRIRD

SEQ ID NO: 189927 - protein, 7 aa, synthetic construct
EMTRAKP

SEQ ID NO: 189928 - protein, 7 aa, synthetic construct
IMTTARG

SEQ ID NO: 189929 - protein, 7 aa, synthetic construct
NRTTPRD

SEQ ID NO: 189930 - protein, 7 aa, synthetic construct
NYKIARD

SEQ ID NO: 189931 - protein, 7 aa, synthetic construct
NMTRRLE

SEQ ID NO: 189932 - protein, 7 aa, synthetic construct
YMPRAKD

SEQ ID NO: 189933 - protein, 7 aa, synthetic construct
NVNRMRD

SEQ ID NO: 189934 - protein, 7 aa, synthetic construct
GTTRGRD

SEQ ID NO: 189935 - protein, 7 aa, synthetic construct
NMTQTRN

SEQ ID NO: 189936 - protein, 7 aa, synthetic construct
NSTRARE

SEQ ID NO: 189937 - protein, 7 aa, synthetic construct
IMTRERA

SEQ ID NO: 189938 - protein, 7 aa, synthetic construct
KMTRSVD

SEQ ID NO: 189939 - protein, 7 aa, synthetic construct
NATARRD

SEQ ID NO: 189940 - protein, 7 aa, synthetic construct
PMRGARD

SEQ ID NO: 189941 - protein, 7 aa, synthetic construct
ALTRGRD

SEQ ID NO: 189942 - protein, 7 aa, synthetic construct
QMKRAVD

SEQ ID NO: 189943 - protein, 7 aa, synthetic construct
SSTRVRD

SEQ ID NO: 189944 - protein, 7 aa, synthetic construct
NKYQARD

SEQ ID NO: 189945 - protein, 7 aa, synthetic construct
NDVRARG

SEQ ID NO: 189946 - protein, 7 aa, synthetic construct
QMTKPRD

SEQ ID NO: 189947 - protein, 7 aa, synthetic construct
VMPRVRD

SEQ ID NO: 189948 - protein, 7 aa, synthetic construct
SRTVARD

SEQ ID NO: 189949 - protein, 7 aa, synthetic construct
NQTRKQD

SEQ ID NO: 189950 - protein, 7 aa, synthetic construct
NMTRAHG

SEQ ID NO: 189951 - protein, 7 aa, synthetic construct
HMTKARD

SEQ ID NO: 189952 - protein, 7 aa, synthetic construct
IMTRDRA

SEQ ID NO: 189953 - protein, 7 aa, synthetic construct
NLNRQRD

SEQ ID NO: 189954 - protein, 7 aa, synthetic construct
FMLKARD

SEQ ID NO: 189955 - protein, 7 aa, synthetic construct
GVTRIRD

SEQ ID NO: 189956 - protein, 7 aa, synthetic construct
NMARMKD

SEQ ID NO: 189957 - protein, 7 aa, synthetic construct
IMDRARM

SEQ ID NO: 189958 - protein, 7 aa, synthetic construct
LATRTRD

SEQ ID NO: 189959 - protein, 7 aa, synthetic construct
NMPRAHA

SEQ ID NO: 189960 - protein, 7 aa, synthetic construct
NMPKFRD

SEQ ID NO: 189961 - protein, 7 aa, synthetic construct
NPLRAKD

SEQ ID NO: 189962 - protein, 7 aa, synthetic construct
NPTRIRD

SEQ ID NO: 189963 - protein, 7 aa, synthetic construct
LANRARD

SEQ ID NO: 189964 - protein, 7 aa, synthetic construct
NKTRPVD

SEQ ID NO: 189965 - protein, 7 aa, synthetic construct
LRTVARD

SEQ ID NO: 189966 - protein, 7 aa, synthetic construct
NMKRVID

SEQ ID NO: 189967 - protein, 7 aa, synthetic construct
FMTSKRD

SEQ ID NO: 189968 - protein, 7 aa, synthetic construct
NMMKARD

SEQ ID NO: 189969 - protein, 7 aa, synthetic construct
QVTRVRD

SEQ ID NO: 189970 - protein, 7 aa, synthetic construct
NNLRARD

SEQ ID NO: 189971 - protein, 7 aa, synthetic construct
IMERARV

SEQ ID NO: 189972 - protein, 7 aa, synthetic construct
NQGRGRD

SEQ ID NO: 189973 - protein, 7 aa, synthetic construct
NMVRARE

SEQ ID NO: 189974 - protein, 7 aa, synthetic construct
NETRSRA

SEQ ID NO: 189975 - protein, 7 aa, synthetic construct
NDQRARA

SEQ ID NO: 189976 - protein, 7 aa, synthetic construct
GMTRANL

SEQ ID NO: 189977 - protein, 7 aa, synthetic construct
NLDRARM

SEQ ID NO: 189978 - protein, 7 aa, synthetic construct
RATVARD

SEQ ID NO: 189979 - protein, 7 aa, synthetic construct
NKVRAQD

SEQ ID NO: 189980 - protein, 7 aa, synthetic construct
NMRPQRD

SEQ ID NO: 189981 - protein, 7 aa, synthetic construct
NANRAKD

SEQ ID NO: 189982 - protein, 7 aa, synthetic construct
VMTMKRD

SEQ ID NO: 189983 - protein, 7 aa, synthetic construct
SMSRARE

SEQ ID NO: 189984 - protein, 7 aa, synthetic construct
SMTRNKD

SEQ ID NO: 189985 - protein, 7 aa, synthetic construct
KNTRATD

SEQ ID NO: 189986 - protein, 7 aa, synthetic construct
NIARPRD

SEQ ID NO: 189987 - protein, 7 aa, synthetic construct
NTMRPRD

SEQ ID NO: 189988 - protein, 7 aa, synthetic construct
NMERNRP

SEQ ID NO: 189989 - protein, 7 aa, synthetic construct
NMNKPRD

SEQ ID NO: 189990 - protein, 7 aa, synthetic construct
MPTRIRD

SEQ ID NO: 189991 - protein, 7 aa, synthetic construct
VMTRAAM

SEQ ID NO: 189992 - protein, 7 aa, synthetic construct
NMDRASR

SEQ ID NO: 189993 - protein, 7 aa, synthetic construct
NMERAIR

SEQ ID NO: 189994 - protein, 7 aa, synthetic construct
NDNRARP

SEQ ID NO: 189995 - protein, 7 aa, synthetic construct
NTLRVRD

SEQ ID NO: 189996 - protein, 7 aa, synthetic construct
TNLRARD

SEQ ID NO: 189997 - protein, 7 aa, synthetic construct
NMTITRA

SEQ ID NO: 189998 - protein, 7 aa, synthetic construct
NMERSRP

SEQ ID NO: 189999 - protein, 7 aa, synthetic construct
NTQRLRD

SEQ ID NO: 190000 - protein, 7 aa, synthetic construct
NMKFTRD

SEQ ID NO: 190001 - protein, 7 aa, synthetic construct
NIGRLRD

SEQ ID NO: 190002 - protein, 7 aa, synthetic construct
KMNAARD

SEQ ID NO: 190003 - protein, 7 aa, synthetic construct
TMNRTRD

SEQ ID NO: 190004 - protein, 7 aa, synthetic construct
NTGRVRD

SEQ ID NO: 190005 - protein, 7 aa, synthetic construct
NPMRPRD

SEQ ID NO: 190006 - protein, 7 aa, synthetic construct
IMTRERG

SEQ ID NO: 190007 - protein, 7 aa, synthetic construct
MKTRERD

SEQ ID NO: 190008 - protein, 7 aa, synthetic construct
METRARI

SEQ ID NO: 190009 - protein, 7 aa, synthetic construct
NPTKPRD

SEQ ID NO: 190010 - protein, 7 aa, synthetic construct
NMTRFKE

SEQ ID NO: 190011 - protein, 7 aa, synthetic construct
NMPRDRG

SEQ ID NO: 190012 - protein, 7 aa, synthetic construct
DMTPARR

SEQ ID NO: 190013 - protein, 7 aa, synthetic construct
SMSRAKD

SEQ ID NO: 190014 - protein, 7 aa, synthetic construct
NMTNERK

SEQ ID NO: 190015 - protein, 7 aa, synthetic construct
KMTRGTD

SEQ ID NO: 190016 - protein, 7 aa, synthetic construct
AMERARV

SEQ ID NO: 190017 - protein, 7 aa, synthetic construct
LMTRARE

SEQ ID NO: 190018 - protein, 7 aa, synthetic construct
NETRIRG

SEQ ID NO: 190019 - protein, 7 aa, synthetic construct
IMARGRD

SEQ ID NO: 190020 - protein, 7 aa, synthetic construct
KGDRARD

SEQ ID NO: 190021 - protein, 7 aa, synthetic construct
RSTGARD

SEQ ID NO: 190022 - protein, 7 aa, synthetic construct
NPIRGRD

SEQ ID NO: 190023 - protein, 7 aa, synthetic construct
NVERART

SEQ ID NO: 190024 - protein, 7 aa, synthetic construct
IAQRARD

SEQ ID NO: 190025 - protein, 7 aa, synthetic construct
TMERARA

SEQ ID NO: 190026 - protein, 7 aa, synthetic construct
NDTRQRT

SEQ ID NO: 190027 - protein, 7 aa, synthetic construct
NMPRAAH

SEQ ID NO: 190028 - protein, 7 aa, synthetic construct
YMTRTRE

SEQ ID NO: 190029 - protein, 7 aa, synthetic construct
GMTRERL

SEQ ID NO: 190030 - protein, 7 aa, synthetic construct
NVDRARS

SEQ ID NO: 190031 - protein, 7 aa, synthetic construct
INTRARE

SEQ ID NO: 190032 - protein, 7 aa, synthetic construct
NMDKARN

SEQ ID NO: 190033 - protein, 7 aa, synthetic construct
VMVKARD

SEQ ID NO: 190034 - protein, 7 aa, synthetic construct
MRTLARD

SEQ ID NO: 190035 - protein, 7 aa, synthetic construct
SMDRARS

SEQ ID NO: 190036 - protein, 7 aa, synthetic construct
AMNRVRD

SEQ ID NO: 190037 - protein, 7 aa, synthetic construct
NDTRQRS

SEQ ID NO: 190038 - protein, 7 aa, synthetic construct
MMKRAQD

SEQ ID NO: 190039 - protein, 7 aa, synthetic construct
FMTRMKD

SEQ ID NO: 190040 - protein, 7 aa, synthetic construct
YMKRAAD

SEQ ID NO: 190041 - protein, 7 aa, synthetic construct
AKTRALD

SEQ ID NO: 190042 - protein, 7 aa, synthetic construct
QTTRARE

SEQ ID NO: 190043 - protein, 7 aa, synthetic construct
NITRIRE

SEQ ID NO: 190044 - protein, 7 aa, synthetic construct
NMKYQRD

SEQ ID NO: 190045 - protein, 7 aa, synthetic construct
QVTRARE

SEQ ID NO: 190046 - protein, 7 aa, synthetic construct
NYGKARD

SEQ ID NO: 190047 - protein, 7 aa, synthetic construct
KSTRERD

SEQ ID NO: 190048 - protein, 7 aa, synthetic construct
NVPRQRD

SEQ ID NO: 190049 - protein, 7 aa, synthetic construct
NNTLKRD

SEQ ID NO: 190050 - protein, 7 aa, synthetic construct
NMDRAPR

SEQ ID NO: 190051 - protein, 7 aa, synthetic construct
IMTPRRD

SEQ ID NO: 190052 - protein, 7 aa, synthetic construct
NTTRQKD

SEQ ID NO: 190053 - protein, 7 aa, synthetic construct
NMPGARH

SEQ ID NO: 190054 - protein, 7 aa, synthetic construct
AATRGRD

SEQ ID NO: 190055 - protein, 7 aa, synthetic construct
NDTRIRV

SEQ ID NO: 190056 - protein, 7 aa, synthetic construct
NMRQIRD

SEQ ID NO: 190057 - protein, 7 aa, synthetic construct
TNTRTRD

SEQ ID NO: 190058 - protein, 7 aa, synthetic construct
MSPRARD

SEQ ID NO: 190059 - protein, 7 aa, synthetic construct
ITTRQRD

SEQ ID NO: 190060 - protein, 7 aa, synthetic construct
KVTRATD

SEQ ID NO: 190061 - protein, 7 aa, synthetic construct
NLQRLRD

SEQ ID NO: 190062 - protein, 7 aa, synthetic construct
NNKRALD

SEQ ID NO: 190063 - protein, 7 aa, synthetic construct
VRTQARD

SEQ ID NO: 190064 - protein, 7 aa, synthetic construct
YQTKARD

SEQ ID NO: 190065 - protein, 7 aa, synthetic construct
NKVRAID

SEQ ID NO: 190066 - protein, 7 aa, synthetic construct
TETRARV

SEQ ID NO: 190067 - protein, 7 aa, synthetic construct
FPTKARD

SEQ ID NO: 190068 - protein, 7 aa, synthetic construct
PMTIKRD

SEQ ID NO: 190069 - protein, 7 aa, synthetic construct
NKTRASD

SEQ ID NO: 190070 - protein, 7 aa, synthetic construct
NMKRADS

SEQ ID NO: 190071 - protein, 7 aa, synthetic construct
ARTVARD

SEQ ID NO: 190072 - protein, 7 aa, synthetic construct
SMTRAER

SEQ ID NO: 190073 - protein, 7 aa, synthetic construct
QMDRARQ

SEQ ID NO: 190074 - protein, 7 aa, synthetic construct
KMIRAGD

SEQ ID NO: 190075 - protein, 7 aa, synthetic construct
MDTRARP

SEQ ID NO: 190076 - protein, 7 aa, synthetic construct
NNNRAKD

SEQ ID NO: 190077 - protein, 7 aa, synthetic construct
ADTRARP

SEQ ID NO: 190078 - protein, 7 aa, synthetic construct
FMTKGRD

SEQ ID NO: 190079 - protein, 7 aa, synthetic construct
MQTRAKD

SEQ ID NO: 190080 - protein, 7 aa, synthetic construct
PMTRAHV

SEQ ID NO: 190081 - protein, 7 aa, synthetic construct
NYTGKRD

SEQ ID NO: 190082 - protein, 7 aa, synthetic construct
NMDPARK

SEQ ID NO: 190083 - protein, 7 aa, synthetic construct
NMTKRTD

SEQ ID NO: 190084 - protein, 7 aa, synthetic construct
NMAVKRD

SEQ ID NO: 190085 - protein, 7 aa, synthetic construct
KMQLARD

SEQ ID NO: 190086 - protein, 7 aa, synthetic construct
NNIRPRD

SEQ ID NO: 190087 - protein, 7 aa, synthetic construct
NLTVRRD

SEQ ID NO: 190088 - protein, 7 aa, synthetic construct
GMTRTKD

SEQ ID NO: 190089 - protein, 7 aa, synthetic construct
TMTRERS

SEQ ID NO: 190090 - protein, 7 aa, synthetic construct
NPTVRRD

SEQ ID NO: 190091 - protein, 7 aa, synthetic construct
SMVRPRD

SEQ ID NO: 190092 - protein, 7 aa, synthetic construct
NFNRAKD

SEQ ID NO: 190093 - protein, 7 aa, synthetic construct
KDTRVRD

SEQ ID NO: 190094 - protein, 7 aa, synthetic construct
NVDRARA

SEQ ID NO: 190095 - protein, 7 aa, synthetic construct
DMTRGRA

SEQ ID NO: 190096 - protein, 7 aa, synthetic construct
SMTRMRD

SEQ ID NO: 190097 - protein, 7 aa, synthetic construct
YMTKQRD

SEQ ID NO: 190098 - protein, 7 aa, synthetic construct
SMTRKQD

SEQ ID NO: 190099 - protein, 7 aa, synthetic construct
NMVRQKD

SEQ ID NO: 190100 - protein, 7 aa, synthetic construct
NITKPRD

SEQ ID NO: 190101 - protein, 7 aa, synthetic construct
NMDRVRV

SEQ ID NO: 190102 - protein, 7 aa, synthetic construct
NLSRMRD

SEQ ID NO: 190103 - protein, 7 aa, synthetic construct
MMTKQRD

SEQ ID NO: 190104 - protein, 7 aa, synthetic construct
TSTRMRD

SEQ ID NO: 190105 - protein, 7 aa, synthetic construct
NKARERD

SEQ ID NO: 190106 - protein, 7 aa, synthetic construct
IMSRTRD

SEQ ID NO: 190107 - protein, 7 aa, synthetic construct
NETRMRS

SEQ ID NO: 190108 - protein, 7 aa, synthetic construct
LMTRNKD

SEQ ID NO: 190109 - protein, 7 aa, synthetic construct
TMRAARD

SEQ ID NO: 190110 - protein, 7 aa, synthetic construct
NKLRAMD

SEQ ID NO: 190111 - protein, 7 aa, synthetic construct
MDTRARG

SEQ ID NO: 190112 - protein, 7 aa, synthetic construct
NVTRPRD

SEQ ID NO: 190113 - protein, 7 aa, synthetic construct
NMTGHRN

SEQ ID NO: 190114 - protein, 7 aa, synthetic construct
NMERTRA

SEQ ID NO: 190115 - protein, 7 aa, synthetic construct
NKARAGD

SEQ ID NO: 190116 - protein, 7 aa, synthetic construct
QMRGARD

SEQ ID NO: 190117 - protein, 7 aa, synthetic construct
TTTRARE

SEQ ID NO: 190118 - protein, 7 aa, synthetic construct
NMPRSKD

SEQ ID NO: 190119 - protein, 7 aa, synthetic construct
GATRMRD

SEQ ID NO: 190120 - protein, 7 aa, synthetic construct
TMKRAVD

SEQ ID NO: 190121 - protein, 7 aa, synthetic construct
YETRARN

SEQ ID NO: 190122 - protein, 7 aa, synthetic construct
VMERARP

SEQ ID NO: 190123 - protein, 7 aa, synthetic construct
NPTYARG

SEQ ID NO: 190124 - protein, 7 aa, synthetic construct
MMGRAKD

SEQ ID NO: 190125 - protein, 7 aa, synthetic construct
LMTHARS

SEQ ID NO: 190126 - protein, 7 aa, synthetic construct
VDTRARG

SEQ ID NO: 190127 - protein, 7 aa, synthetic construct
MMTRASN

SEQ ID NO: 190128 - protein, 7 aa, synthetic construct
KPTRATD

SEQ ID NO: 190129 - protein, 7 aa, synthetic construct
TMERARL

SEQ ID NO: 190130 - protein, 7 aa, synthetic construct
QGTRIRD

SEQ ID NO: 190131 - protein, 7 aa, synthetic construct
VMTGARA

SEQ ID NO: 190132 - protein, 7 aa, synthetic construct
FMDRARV

SEQ ID NO: 190133 - protein, 7 aa, synthetic construct
NALRAKD

SEQ ID NO: 190134 - protein, 7 aa, synthetic construct
ISPRARD

SEQ ID NO: 190135 - protein, 7 aa, synthetic construct
NMKQPRD

SEQ ID NO: 190136 - protein, 7 aa, synthetic construct
KQTRAID

SEQ ID NO: 190137 - protein, 7 aa, synthetic construct
NIERARQ

SEQ ID NO: 190138 - protein, 7 aa, synthetic construct
VLTRAKD

SEQ ID NO: 190139 - protein, 7 aa, synthetic construct
NLDRARL

SEQ ID NO: 190140 - protein, 7 aa, synthetic construct
NKIRASD

SEQ ID NO: 190141 - protein, 7 aa, synthetic construct
KTTRAAD

SEQ ID NO: 190142 - protein, 7 aa, synthetic construct
NKGRAID

SEQ ID NO: 190143 - protein, 7 aa, synthetic construct
MTPRARD

SEQ ID NO: 190144 - protein, 7 aa, synthetic construct
NRPMARD

SEQ ID NO: 190145 - protein, 7 aa, synthetic construct
VMPRTRD

SEQ ID NO: 190146 - protein, 7 aa, synthetic construct
LTTRVRD

SEQ ID NO: 190147 - protein, 7 aa, synthetic construct
NKTMPRD

SEQ ID NO: 190148 - protein, 7 aa, synthetic construct
YMTTKRD

SEQ ID NO: 190149 - protein, 7 aa, synthetic construct
NMDRASK

SEQ ID NO: 190150 - protein, 7 aa, synthetic construct
AMTRASQ

SEQ ID NO: 190151 - protein, 7 aa, synthetic construct
NMTHMRA

SEQ ID NO: 190152 - protein, 7 aa, synthetic construct
LMTRAER

SEQ ID NO: 190153 - protein, 7 aa, synthetic construct
AMNRAKD

SEQ ID NO: 190154 - protein, 7 aa, synthetic construct
MMTRSRE

SEQ ID NO: 190155 - protein, 7 aa, synthetic construct
NNLRQRD

SEQ ID NO: 190156 - protein, 7 aa, synthetic construct
NITKFRD

SEQ ID NO: 190157 - protein, 7 aa, synthetic construct
VMTRGKD

SEQ ID NO: 190158 - protein, 7 aa, synthetic construct
MPTRGRD

SEQ ID NO: 190159 - protein, 7 aa, synthetic construct
NMTNRRE

SEQ ID NO: 190160 - protein, 7 aa, synthetic construct
NNLRGRD

SEQ ID NO: 190161 - protein, 7 aa, synthetic construct
NMERARN

SEQ ID NO: 190162 - protein, 7 aa, synthetic construct
SMPRAKD

SEQ ID NO: 190163 - protein, 7 aa, synthetic construct
LMPRTRD

SEQ ID NO: 190164 - protein, 7 aa, synthetic construct
IVTRGRD

SEQ ID NO: 190165 - protein, 7 aa, synthetic construct
LPVRARD

SEQ ID NO: 190166 - protein, 7 aa, synthetic construct
NMRVPRD

SEQ ID NO: 190167 - protein, 7 aa, synthetic construct
NITNARA

SEQ ID NO: 190168 - protein, 7 aa, synthetic construct
SMTIKRD

SEQ ID NO: 190169 - protein, 7 aa, synthetic construct
LETRARA

SEQ ID NO: 190170 - protein, 7 aa, synthetic construct
NMTESRK

SEQ ID NO: 190171 - protein, 7 aa, synthetic construct
NETRVRM

SEQ ID NO: 190172 - protein, 7 aa, synthetic construct
NMTEKRN

SEQ ID NO: 190173 - protein, 7 aa, synthetic construct
NVERARQ

SEQ ID NO: 190174 - protein, 7 aa, synthetic construct
TMARARD

SEQ ID NO: 190175 - protein, 7 aa, synthetic construct
INVRARD

SEQ ID NO: 190176 - protein, 7 aa, synthetic construct
NMKKAYD

SEQ ID NO: 190177 - protein, 7 aa, synthetic construct
KMLTARD

SEQ ID NO: 190178 - protein, 7 aa, synthetic construct
DMTRAQK

SEQ ID NO: 190179 - protein, 7 aa, synthetic construct
KIERARD

SEQ ID NO: 190180 - protein, 7 aa, synthetic construct
AMPRLRD

SEQ ID NO: 190181 - protein, 7 aa, synthetic construct
LPGRARD

SEQ ID NO: 190182 - protein, 7 aa, synthetic construct
VMGRAKD

SEQ ID NO: 190183 - protein, 7 aa, synthetic construct
NMQRFKD

SEQ ID NO: 190184 - protein, 7 aa, synthetic construct
AMTTKRD

SEQ ID NO: 190185 - protein, 7 aa, synthetic construct
NMNMKRD

SEQ ID NO: 190186 - protein, 7 aa, synthetic construct
MMTSKRD

SEQ ID NO: 190187 - protein, 7 aa, synthetic construct
KATRAMD

SEQ ID NO: 190188 - protein, 7 aa, synthetic construct
SMGRLRD

SEQ ID NO: 190189 - protein, 7 aa, synthetic construct
NVNRAKD

SEQ ID NO: 190190 - protein, 7 aa, synthetic construct
NMTRHSG

SEQ ID NO: 190191 - protein, 7 aa, synthetic construct
NMTRTRE

SEQ ID NO: 190192 - protein, 7 aa, synthetic construct
INTRIRD

SEQ ID NO: 190193 - protein, 7 aa, synthetic construct
KETRTRD

SEQ ID NO: 190194 - protein, 7 aa, synthetic construct
KMARASD

SEQ ID NO: 190195 - protein, 7 aa, synthetic construct
NMKRMMD

SEQ ID NO: 190196 - protein, 7 aa, synthetic construct
AMARAKD

SEQ ID NO: 190197 - protein, 7 aa, synthetic construct
RMGTARD

SEQ ID NO: 190198 - protein, 7 aa, synthetic construct
KMTRIPD

SEQ ID NO: 190199 - protein, 7 aa, synthetic construct
NMKHSRD

SEQ ID NO: 190200 - protein, 7 aa, synthetic construct
TMTRASM

SEQ ID NO: 190201 - protein, 7 aa, synthetic construct
RMTGSRD

SEQ ID NO: 190202 - protein, 7 aa, synthetic construct
PMARGRD

SEQ ID NO: 190203 - protein, 7 aa, synthetic construct
NSERARG

SEQ ID NO: 190204 - protein, 7 aa, synthetic construct
NAERARQ

SEQ ID NO: 190205 - protein, 7 aa, synthetic construct
KMTRASE

SEQ ID NO: 190206 - protein, 7 aa, synthetic construct
NMMKHRD

SEQ ID NO: 190207 - protein, 7 aa, synthetic construct
NRTGSRD

SEQ ID NO: 190208 - protein, 7 aa, synthetic construct
IMNRNRD

SEQ ID NO: 190209 - protein, 7 aa, synthetic construct
NMDRVRP

SEQ ID NO: 190210 - protein, 7 aa, synthetic construct
NMDRAKV

SEQ ID NO: 190211 - protein, 7 aa, synthetic construct
NTMRMRD

SEQ ID NO: 190212 - protein, 7 aa, synthetic construct
NTTRVRD

SEQ ID NO: 190213 - protein, 7 aa, synthetic construct
GLTKARD

SEQ ID NO: 190214 - protein, 7 aa, synthetic construct
PMPRIRD

SEQ ID NO: 190215 - protein, 7 aa, synthetic construct
NLPRPRD

SEQ ID NO: 190216 - protein, 7 aa, synthetic construct
NMDRGRQ

SEQ ID NO: 190217 - protein, 7 aa, synthetic construct
NILRARE

SEQ ID NO: 190218 - protein, 7 aa, synthetic construct
LMTIKRD

SEQ ID NO: 190219 - protein, 7 aa, synthetic construct
VDTRARI

SEQ ID NO: 190220 - protein, 7 aa, synthetic construct
METRART

SEQ ID NO: 190221 - protein, 7 aa, synthetic construct
IMKVARD

SEQ ID NO: 190222 - protein, 7 aa, synthetic construct
AQTRGRD

SEQ ID NO: 190223 - protein, 7 aa, synthetic construct
KMPRERD

SEQ ID NO: 190224 - protein, 7 aa, synthetic construct
TMKRATD

SEQ ID NO: 190225 - protein, 7 aa, synthetic construct
NMRITRD

SEQ ID NO: 190226 - protein, 7 aa, synthetic construct
NMTRKQE

SEQ ID NO: 190227 - protein, 7 aa, synthetic construct
GMTRNRE

SEQ ID NO: 190228 - protein, 7 aa, synthetic construct
NMHPARQ

SEQ ID NO: 190229 - protein, 7 aa, synthetic construct
NMTRQRE

SEQ ID NO: 190230 - protein, 7 aa, synthetic construct
VMTQARA

SEQ ID NO: 190231 - protein, 7 aa, synthetic construct
TMGRARE

SEQ ID NO: 190232 - protein, 7 aa, synthetic construct
VATRLRD

SEQ ID NO: 190233 - protein, 7 aa, synthetic construct
NDTRAAK

SEQ ID NO: 190234 - protein, 7 aa, synthetic construct
NMDRAFK

SEQ ID NO: 190235 - protein, 7 aa, synthetic construct
TMTRADK

SEQ ID NO: 190236 - protein, 7 aa, synthetic construct
TLNRARD

SEQ ID NO: 190237 - protein, 7 aa, synthetic construct
STTRTRD

SEQ ID NO: 190238 - protein, 7 aa, synthetic construct
TMTDARK

SEQ ID NO: 190239 - protein, 7 aa, synthetic construct
NMGHARA

SEQ ID NO: 190240 - protein, 7 aa, synthetic construct
NQTRAEK

SEQ ID NO: 190241 - protein, 7 aa, synthetic construct
NMERVRA

SEQ ID NO: 190242 - protein, 7 aa, synthetic construct
NMTNERR

SEQ ID NO: 190243 - protein, 7 aa, synthetic construct
MMRTARD

SEQ ID NO: 190244 - protein, 7 aa, synthetic construct
MPTRMRD

SEQ ID NO: 190245 - protein, 7 aa, synthetic construct
NMIKNRD

SEQ ID NO: 190246 - protein, 7 aa, synthetic construct
SMQRAKD

SEQ ID NO: 190247 - protein, 7 aa, synthetic construct
NMKLYRD

SEQ ID NO: 190248 - protein, 7 aa, synthetic construct
AMTRASI

SEQ ID NO: 190249 - protein, 7 aa, synthetic construct
NMTRERP

SEQ ID NO: 190250 - protein, 7 aa, synthetic construct
KMGGARD

SEQ ID NO: 190251 - protein, 7 aa, synthetic construct
NMRQVRD

SEQ ID NO: 190252 - protein, 7 aa, synthetic construct
VMTRNKD

SEQ ID NO: 190253 - protein, 7 aa, synthetic construct
NKQRDRD

SEQ ID NO: 190254 - protein, 7 aa, synthetic construct
NMNRAKD

SEQ ID NO: 190255 - protein, 7 aa, synthetic construct
TDTRARN

SEQ ID NO: 190256 - protein, 7 aa, synthetic construct
DMNRARS

SEQ ID NO: 190257 - protein, 7 aa, synthetic construct
NLQRNRD

SEQ ID NO: 190258 - protein, 7 aa, synthetic construct
MMTRLRE

SEQ ID NO: 190259 - protein, 7 aa, synthetic construct
NMSRVRD

SEQ ID NO: 190260 - protein, 7 aa, synthetic construct
NMTRLDK

SEQ ID NO: 190261 - protein, 7 aa, synthetic construct
NPERARI

SEQ ID NO: 190262 - protein, 7 aa, synthetic construct
LETRARN

SEQ ID NO: 190263 - protein, 7 aa, synthetic construct
KMHVARD

SEQ ID NO: 190264 - protein, 7 aa, synthetic construct
NMMHARG

SEQ ID NO: 190265 - protein, 7 aa, synthetic construct
NKQRAQD

SEQ ID NO: 190266 - protein, 7 aa, synthetic construct
MMTIKRD

SEQ ID NO: 190267 - protein, 7 aa, synthetic construct
NLTRLKD

SEQ ID NO: 190268 - protein, 7 aa, synthetic construct
NTERART

SEQ ID NO: 190269 - protein, 7 aa, synthetic construct
QMTRERI

SEQ ID NO: 190270 - protein, 7 aa, synthetic construct
NMKRIND

SEQ ID NO: 190271 - protein, 7 aa, synthetic construct
NLTRSRE

SEQ ID NO: 190272 - protein, 7 aa, synthetic construct
NITRERA

SEQ ID NO: 190273 - protein, 7 aa, synthetic construct
RTTPARD

SEQ ID NO: 190274 - protein, 7 aa, synthetic construct
LTTRLRD

SEQ ID NO: 190275 - protein, 7 aa, synthetic construct
SMTVRRD

SEQ ID NO: 190276 - protein, 7 aa, synthetic construct
NLARTRD

SEQ ID NO: 190277 - protein, 7 aa, synthetic construct
YATRVRD

SEQ ID NO: 190278 - protein, 7 aa, synthetic construct
NMDRAIR

SEQ ID NO: 190279 - protein, 7 aa, synthetic construct
RPDRARD

SEQ ID NO: 190280 - protein, 7 aa, synthetic construct
DMTRMRV

SEQ ID NO: 190281 - protein, 7 aa, synthetic construct
AMNRGRD

SEQ ID NO: 190282 - protein, 7 aa, synthetic construct
APTRIRD

SEQ ID NO: 190283 - protein, 7 aa, synthetic construct
NVTKFRD

SEQ ID NO: 190284 - protein, 7 aa, synthetic construct
SRTPARD

SEQ ID NO: 190285 - protein, 7 aa, synthetic construct
YMKNARD

SEQ ID NO: 190286 - protein, 7 aa, synthetic construct
LMTRLRE

SEQ ID NO: 190287 - protein, 7 aa, synthetic construct
NMPRAHS

SEQ ID NO: 190288 - protein, 7 aa, synthetic construct
KPTRAVD

SEQ ID NO: 190289 - protein, 7 aa, synthetic construct
NETRALK

SEQ ID NO: 190290 - protein, 7 aa, synthetic construct
NMTHLRG

SEQ ID NO: 190291 - protein, 7 aa, synthetic construct
NMKRLND

SEQ ID NO: 190292 - protein, 7 aa, synthetic construct
AMTRKGD

SEQ ID NO: 190293 - protein, 7 aa, synthetic construct
KMTRATE

SEQ ID NO: 190294 - protein, 7 aa, synthetic construct
NMLRTKD

SEQ ID NO: 190295 - protein, 7 aa, synthetic construct
GKTRAGD

SEQ ID NO: 190296 - protein, 7 aa, synthetic construct
NMRTPRD

SEQ ID NO: 190297 - protein, 7 aa, synthetic construct
KVTRAAD

SEQ ID NO: 190298 - protein, 7 aa, synthetic construct
NFTKVRD

SEQ ID NO: 190299 - protein, 7 aa, synthetic construct
GMIRAKD

SEQ ID NO: 190300 - protein, 7 aa, synthetic construct
NMDRAKF

SEQ ID NO: 190301 - protein, 7 aa, synthetic construct
RPTAARD

SEQ ID NO: 190302 - protein, 7 aa, synthetic construct
DMTRAKS

SEQ ID NO: 190303 - protein, 7 aa, synthetic construct
YMTKTRD

SEQ ID NO: 190304 - protein, 7 aa, synthetic construct
DMSRARV

SEQ ID NO: 190305 - protein, 7 aa, synthetic construct
KMSQARD

SEQ ID NO: 190306 - protein, 7 aa, synthetic construct
NLGRGRD

SEQ ID NO: 190307 - protein, 7 aa, synthetic construct
VMNRIRD

SEQ ID NO: 190308 - protein, 7 aa, synthetic construct
GKTRAPD

SEQ ID NO: 190309 - protein, 7 aa, synthetic construct
QMERARS

SEQ ID NO: 190310 - protein, 7 aa, synthetic construct
NMLRQKD

SEQ ID NO: 190311 - protein, 7 aa, synthetic construct
SPPRARD

SEQ ID NO: 190312 - protein, 7 aa, synthetic construct
GMTRAHS

SEQ ID NO: 190313 - protein, 7 aa, synthetic construct
KGTRAGD

SEQ ID NO: 190314 - protein, 7 aa, synthetic construct
NMGRTRE

SEQ ID NO: 190315 - protein, 7 aa, synthetic construct
LDTRARA

SEQ ID NO: 190316 - protein, 7 aa, synthetic construct
GMERARA

SEQ ID NO: 190317 - protein, 7 aa, synthetic construct
SMTLKRD

SEQ ID NO: 190318 - protein, 7 aa, synthetic construct
KDTRPRD

SEQ ID NO: 190319 - protein, 7 aa, synthetic construct
IMGRAKD

SEQ ID NO: 190320 - protein, 7 aa, synthetic construct
NELRARP

SEQ ID NO: 190321 - protein, 7 aa, synthetic construct
NMARDRA

SEQ ID NO: 190322 - protein, 7 aa, synthetic construct
QMTRVKD

SEQ ID NO: 190323 - protein, 7 aa, synthetic construct
IPVRARD

SEQ ID NO: 190324 - protein, 7 aa, synthetic construct
NMAPKRD

SEQ ID NO: 190325 - protein, 7 aa, synthetic construct
AITRGRD

SEQ ID NO: 190326 - protein, 7 aa, synthetic construct
QTTRMRD

SEQ ID NO: 190327 - protein, 7 aa, synthetic construct
NMMRQRD

SEQ ID NO: 190328 - protein, 7 aa, synthetic construct
LMTRSRE

SEQ ID NO: 190329 - protein, 7 aa, synthetic construct
NMKRADI

SEQ ID NO: 190330 - protein, 7 aa, synthetic construct
HTTKARD

SEQ ID NO: 190331 - protein, 7 aa, synthetic construct
NMKRMSD

SEQ ID NO: 190332 - protein, 7 aa, synthetic construct
AATRIRD

SEQ ID NO: 190333 - protein, 7 aa, synthetic construct
NVTRKAD

SEQ ID NO: 190334 - protein, 7 aa, synthetic construct
ATTRARE

SEQ ID NO: 190335 - protein, 7 aa, synthetic construct
VMTIKRD

SEQ ID NO: 190336 - protein, 7 aa, synthetic construct
GMTKYRD

SEQ ID NO: 190337 - protein, 7 aa, synthetic construct
PMTRAHT

SEQ ID NO: 190338 - protein, 7 aa, synthetic construct
KMSRAMD

SEQ ID NO: 190339 - protein, 7 aa, synthetic construct
NLVRAKD

SEQ ID NO: 190340 - protein, 7 aa, synthetic construct
AMTGARQ

SEQ ID NO: 190341 - protein, 7 aa, synthetic construct
NVTRKSD

SEQ ID NO: 190342 - protein, 7 aa, synthetic construct
NMGRAHS

SEQ ID NO: 190343 - protein, 7 aa, synthetic construct
HMTRAKE

SEQ ID NO: 190344 - protein, 7 aa, synthetic construct
NMKRLTD

SEQ ID NO: 190345 - protein, 7 aa, synthetic construct
AMTRAVQ

SEQ ID NO: 190346 - protein, 7 aa, synthetic construct
NINRAKD

SEQ ID NO: 190347 - protein, 7 aa, synthetic construct
NMQLKRD

SEQ ID NO: 190348 - protein, 7 aa, synthetic construct
NATRFKD

SEQ ID NO: 190349 - protein, 7 aa, synthetic construct
NVARARD

SEQ ID NO: 190350 - protein, 7 aa, synthetic construct
TFTKARD

SEQ ID NO: 190351 - protein, 7 aa, synthetic construct
MMTRERA

SEQ ID NO: 190352 - protein, 7 aa, synthetic construct
KTTRALD

SEQ ID NO: 190353 - protein, 7 aa, synthetic construct
NMERVRI

SEQ ID NO: 190354 - protein, 7 aa, synthetic construct
IMTRKGD

SEQ ID NO: 190355 - protein, 7 aa, synthetic construct
METRARP

SEQ ID NO: 190356 - protein, 7 aa, synthetic construct
SMTNARA

SEQ ID NO: 190357 - protein, 7 aa, synthetic construct
NLERARG

SEQ ID NO: 190358 - protein, 7 aa, synthetic construct
TLTRAKD

SEQ ID NO: 190359 - protein, 7 aa, synthetic construct
NMERNRA

SEQ ID NO: 190360 - protein, 7 aa, synthetic construct
NENRARA

SEQ ID NO: 190361 - protein, 7 aa, synthetic construct
NMHGARV

SEQ ID NO: 190362 - protein, 7 aa, synthetic construct
NPSKARD

SEQ ID NO: 190363 - protein, 7 aa, synthetic construct
NPIRTRD

SEQ ID NO: 190364 - protein, 7 aa, synthetic construct
NMVRERA

SEQ ID NO: 190365 - protein, 7 aa, synthetic construct
NITRKAD

SEQ ID NO: 190366 - protein, 7 aa, synthetic construct
NMDRPRS

SEQ ID NO: 190367 - protein, 7 aa, synthetic construct
SMLRARE

SEQ ID NO: 190368 - protein, 7 aa, synthetic construct
NETRQRV

SEQ ID NO: 190369 - protein, 7 aa, synthetic construct
NMARQKD

SEQ ID NO: 190370 - protein, 7 aa, synthetic construct
NALRVRD

SEQ ID NO: 190371 - protein, 7 aa, synthetic construct
NPMRVRD

SEQ ID NO: 190372 - protein, 7 aa, synthetic construct
VATRIRD

SEQ ID NO: 190373 - protein, 7 aa, synthetic construct
FKTRAID

SEQ ID NO: 190374 - protein, 7 aa, synthetic construct
LMTRERV

SEQ ID NO: 190375 - protein, 7 aa, synthetic construct
NETTARK

SEQ ID NO: 190376 - protein, 7 aa, synthetic construct
LPTRGRD

SEQ ID NO: 190377 - protein, 7 aa, synthetic construct
NMTRERA

SEQ ID NO: 190378 - protein, 7 aa, synthetic construct
NKMRAPD

SEQ ID NO: 190379 - protein, 7 aa, synthetic construct
TMMRTRD

SEQ ID NO: 190380 - protein, 7 aa, synthetic construct
NKAHARD

SEQ ID NO: 190381 - protein, 7 aa, synthetic construct
KMTRVND

SEQ ID NO: 190382 - protein, 7 aa, synthetic construct
FKTRAVD

SEQ ID NO: 190383 - protein, 7 aa, synthetic construct
MMKRAVD

SEQ ID NO: 190384 - protein, 7 aa, synthetic construct
NTTKPRD

SEQ ID NO: 190385 - protein, 7 aa, synthetic construct
NLDRARI

SEQ ID NO: 190386 - protein, 7 aa, synthetic construct
VETRARA

SEQ ID NO: 190387 - protein, 7 aa, synthetic construct
NMIGARA

SEQ ID NO: 190388 - protein, 7 aa, synthetic construct
NMPRKSD

SEQ ID NO: 190389 - protein, 7 aa, synthetic construct
NDTRVRL

SEQ ID NO: 190390 - protein, 7 aa, synthetic construct
NMTGARN

SEQ ID NO: 190391 - protein, 7 aa, synthetic construct
VTTRVRD

SEQ ID NO: 190392 - protein, 7 aa, synthetic construct
NMTRNER

SEQ ID NO: 190393 - protein, 7 aa, synthetic construct
IKTRAVD

SEQ ID NO: 190394 - protein, 7 aa, synthetic construct
MPTRTRD

SEQ ID NO: 190395 - protein, 7 aa, synthetic construct
IMPRQRD

SEQ ID NO: 190396 - protein, 7 aa, synthetic construct
NLTRGRE

SEQ ID NO: 190397 - protein, 7 aa, synthetic construct
NDTRTRI

SEQ ID NO: 190398 - protein, 7 aa, synthetic construct
YMNKARD

SEQ ID NO: 190399 - protein, 7 aa, synthetic construct
LMRNARD

SEQ ID NO: 190400 - protein, 7 aa, synthetic construct
GVTRVRD

SEQ ID NO: 190401 - protein, 7 aa, synthetic construct
SQTRTRD

SEQ ID NO: 190402 - protein, 7 aa, synthetic construct
PMTNARG

SEQ ID NO: 190403 - protein, 7 aa, synthetic construct
TATRLRD

SEQ ID NO: 190404 - protein, 7 aa, synthetic construct
NVTRMRD

SEQ ID NO: 190405 - protein, 7 aa, synthetic construct
PMTRANN

SEQ ID NO: 190406 - protein, 7 aa, synthetic construct
NPTRQRE

SEQ ID NO: 190407 - protein, 7 aa, synthetic construct
NMMKQRD

SEQ ID NO: 190408 - protein, 7 aa, synthetic construct
TDTRARM

SEQ ID NO: 190409 - protein, 7 aa, synthetic construct
SVTRLRD

SEQ ID NO: 190410 - protein, 7 aa, synthetic construct
NMTRSDK

SEQ ID NO: 190411 - protein, 7 aa, synthetic construct
QMTRATA

SEQ ID NO: 190412 - protein, 7 aa, synthetic construct
PMPRPRD

SEQ ID NO: 190413 - protein, 7 aa, synthetic construct
SMTRERM

SEQ ID NO: 190414 - protein, 7 aa, synthetic construct
NKTRMTD

SEQ ID NO: 190415 - protein, 7 aa, synthetic construct
KVTRAQD

SEQ ID NO: 190416 - protein, 7 aa, synthetic construct
NMSAKRD

SEQ ID NO: 190417 - protein, 7 aa, synthetic construct
NMERVRL

SEQ ID NO: 190418 - protein, 7 aa, synthetic construct
NVTRAEK

SEQ ID NO: 190419 - protein, 7 aa, synthetic construct
NMARADR

SEQ ID NO: 190420 - protein, 7 aa, synthetic construct
GTTRTRD

SEQ ID NO: 190421 - protein, 7 aa, synthetic construct
NMNIKRD

SEQ ID NO: 190422 - protein, 7 aa, synthetic construct
AMPRQRD

SEQ ID NO: 190423 - protein, 7 aa, synthetic construct
IMKMARD

SEQ ID NO: 190424 - protein, 7 aa, synthetic construct
NMRMTRD

SEQ ID NO: 190425 - protein, 7 aa, synthetic construct
IMQRTRD

SEQ ID NO: 190426 - protein, 7 aa, synthetic construct
NDTRLRS

SEQ ID NO: 190427 - protein, 7 aa, synthetic construct
SMTRAHV

SEQ ID NO: 190428 - protein, 7 aa, synthetic construct
LKTRAFD

SEQ ID NO: 190429 - protein, 7 aa, synthetic construct
IMTKARD

SEQ ID NO: 190430 - protein, 7 aa, synthetic construct
YMTKGRD

SEQ ID NO: 190431 - protein, 7 aa, synthetic construct
PMTRANM

SEQ ID NO: 190432 - protein, 7 aa, synthetic construct
KMMRAPD

SEQ ID NO: 190433 - protein, 7 aa, synthetic construct
VMTRASS

SEQ ID NO: 190434 - protein, 7 aa, synthetic construct
QMPRGRD

SEQ ID NO: 190435 - protein, 7 aa, synthetic construct
NTGRTRD

SEQ ID NO: 190436 - protein, 7 aa, synthetic construct
AMTGARG

SEQ ID NO: 190437 - protein, 7 aa, synthetic construct
TMTTARN

SEQ ID NO: 190438 - protein, 7 aa, synthetic construct
NMERPRQ

SEQ ID NO: 190439 - protein, 7 aa, synthetic construct
QLPRARD

SEQ ID NO: 190440 - protein, 7 aa, synthetic construct
NVVRAKD

SEQ ID NO: 190441 - protein, 7 aa, synthetic construct
MMERARV

SEQ ID NO: 190442 - protein, 7 aa, synthetic construct
TVTRARD

SEQ ID NO: 190443 - protein, 7 aa, synthetic construct
NTERARM

SEQ ID NO: 190444 - protein, 7 aa, synthetic construct
NTTRTRD

SEQ ID NO: 190445 - protein, 7 aa, synthetic construct
DSTRARA

SEQ ID NO: 190446 - protein, 7 aa, synthetic construct
NMRMPRD

SEQ ID NO: 190447 - protein, 7 aa, synthetic construct
LETRARG

SEQ ID NO: 190448 - protein, 7 aa, synthetic construct
VMTTARQ

SEQ ID NO: 190449 - protein, 7 aa, synthetic construct
NMVTKRD

SEQ ID NO: 190450 - protein, 7 aa, synthetic construct
NETRVRL

SEQ ID NO: 190451 - protein, 7 aa, synthetic construct
IDTRARQ

SEQ ID NO: 190452 - protein, 7 aa, synthetic construct
NRTTLRD

SEQ ID NO: 190453 - protein, 7 aa, synthetic construct
VITKARD

SEQ ID NO: 190454 - protein, 7 aa, synthetic construct
RMPRAPD

SEQ ID NO: 190455 - protein, 7 aa, synthetic construct
NDARART

SEQ ID NO: 190456 - protein, 7 aa, synthetic construct
NMRTTRD

SEQ ID NO: 190457 - protein, 7 aa, synthetic construct
NMVRMRD

SEQ ID NO: 190458 - protein, 7 aa, synthetic construct
NYKSARD

SEQ ID NO: 190459 - protein, 7 aa, synthetic construct
TMTHARN

SEQ ID NO: 190460 - protein, 7 aa, synthetic construct
YMKRAPD

SEQ ID NO: 190461 - protein, 7 aa, synthetic construct
NMLRERV

SEQ ID NO: 190462 - protein, 7 aa, synthetic construct
NMDTARK

SEQ ID NO: 190463 - protein, 7 aa, synthetic construct
KMERGRD

SEQ ID NO: 190464 - protein, 7 aa, synthetic construct
NIARGRD

SEQ ID NO: 190465 - protein, 7 aa, synthetic construct
NITRKSD

SEQ ID NO: 190466 - protein, 7 aa, synthetic construct
AMTRANT

SEQ ID NO: 190467 - protein, 7 aa, synthetic construct
NTTRAKD

SEQ ID NO: 190468 - protein, 7 aa, synthetic construct
FMTGARQ

SEQ ID NO: 190469 - protein, 7 aa, synthetic construct
NMTHPRS

SEQ ID NO: 190470 - protein, 7 aa, synthetic construct
NMSQKRD

SEQ ID NO: 190471 - protein, 7 aa, synthetic construct
NMDRARP

SEQ ID NO: 190472 - protein, 7 aa, synthetic construct
NIRTARD

SEQ ID NO: 190473 - protein, 7 aa, synthetic construct
PLTRGRD

SEQ ID NO: 190474 - protein, 7 aa, synthetic construct
NMRVIRD

SEQ ID NO: 190475 - protein, 7 aa, synthetic construct
KMHNARD

SEQ ID NO: 190476 - protein, 7 aa, synthetic construct
NVTEARK

SEQ ID NO: 190477 - protein, 7 aa, synthetic construct
LMERARG

SEQ ID NO: 190478 - protein, 7 aa, synthetic construct
NMYKAKD

SEQ ID NO: 190479 - protein, 7 aa, synthetic construct
NAERARM

SEQ ID NO: 190480 - protein, 7 aa, synthetic construct
NETRAKV

SEQ ID NO: 190481 - protein, 7 aa, synthetic construct
YKTLARD

SEQ ID NO: 190482 - protein, 7 aa, synthetic construct
LMTGARQ

SEQ ID NO: 190483 - protein, 7 aa, synthetic construct
NRTIAKD

SEQ ID NO: 190484 - protein, 7 aa, synthetic construct
YMTKVRD

SEQ ID NO: 190485 - protein, 7 aa, synthetic construct
NMVRTKD

SEQ ID NO: 190486 - protein, 7 aa, synthetic construct
QDTRARI

SEQ ID NO: 190487 - protein, 7 aa, synthetic construct
NLNRVRD

SEQ ID NO: 190488 - protein, 7 aa, synthetic construct
IDTRART

SEQ ID NO: 190489 - protein, 7 aa, synthetic construct
SVTRGRD

SEQ ID NO: 190490 - protein, 7 aa, synthetic construct
KMARAID

SEQ ID NO: 190491 - protein, 7 aa, synthetic construct
NKERNRD

SEQ ID NO: 190492 - protein, 7 aa, synthetic construct
NMTHTRS

SEQ ID NO: 190493 - protein, 7 aa, synthetic construct
GMDRARN

SEQ ID NO: 190494 - protein, 7 aa, synthetic construct
NPDRARL

SEQ ID NO: 190495 - protein, 7 aa, synthetic construct
NMPLRRD

SEQ ID NO: 190496 - protein, 7 aa, synthetic construct
NKTRPGD

SEQ ID NO: 190497 - protein, 7 aa, synthetic construct
KMARAQD

SEQ ID NO: 190498 - protein, 7 aa, synthetic construct
NMVNKRD

SEQ ID NO: 190499 - protein, 7 aa, synthetic construct
LMTRAHG

SEQ ID NO: 190500 - protein, 7 aa, synthetic construct
NMPIARG

SEQ ID NO: 190501 - protein, 7 aa, synthetic construct
NMKGPRD

SEQ ID NO: 190502 - protein, 7 aa, synthetic construct
NMTHLRP

SEQ ID NO: 190503 - protein, 7 aa, synthetic construct
TMTAKRD

SEQ ID NO: 190504 - protein, 7 aa, synthetic construct
NPPRTRD

SEQ ID NO: 190505 - protein, 7 aa, synthetic construct
NMKRALE

SEQ ID NO: 190506 - protein, 7 aa, synthetic construct
GNTRVRD

SEQ ID NO: 190507 - protein, 7 aa, synthetic construct
NMNKSRD

SEQ ID NO: 190508 - protein, 7 aa, synthetic construct
NPQRIRD

SEQ ID NO: 190509 - protein, 7 aa, synthetic construct
GVTRTRD

SEQ ID NO: 190510 - protein, 7 aa, synthetic construct
IMDRARG

SEQ ID NO: 190511 - protein, 7 aa, synthetic construct
QMARVRD

SEQ ID NO: 190512 - protein, 7 aa, synthetic construct
DMTRPRI

SEQ ID NO: 190513 - protein, 7 aa, synthetic construct
NMDGARK

SEQ ID NO: 190514 - protein, 7 aa, synthetic construct
QVTRAKD

SEQ ID NO: 190515 - protein, 7 aa, synthetic construct
NMDRNRN

SEQ ID NO: 190516 - protein, 7 aa, synthetic construct
NLARARD

SEQ ID NO: 190517 - protein, 7 aa, synthetic construct
FAPRARD

SEQ ID NO: 190518 - protein, 7 aa, synthetic construct
NMRKALD

SEQ ID NO: 190519 - protein, 7 aa, synthetic construct
VSTRMRD

SEQ ID NO: 190520 - protein, 7 aa, synthetic construct
NIPRSRD

SEQ ID NO: 190521 - protein, 7 aa, synthetic construct
NPTHARN

SEQ ID NO: 190522 - protein, 7 aa, synthetic construct
SMTTARN

SEQ ID NO: 190523 - protein, 7 aa, synthetic construct
NPIRIRD

SEQ ID NO: 190524 - protein, 7 aa, synthetic construct
TMERARQ

SEQ ID NO: 190525 - protein, 7 aa, synthetic construct
IMTRADK

SEQ ID NO: 190526 - protein, 7 aa, synthetic construct
PMTKARD

SEQ ID NO: 190527 - protein, 7 aa, synthetic construct
KMSRAID

SEQ ID NO: 190528 - protein, 7 aa, synthetic construct
SMTSKRD

SEQ ID NO: 190529 - protein, 7 aa, synthetic construct
MKTRAFD

SEQ ID NO: 190530 - protein, 7 aa, synthetic construct
MRTGARD

SEQ ID NO: 190531 - protein, 7 aa, synthetic construct
NMVPRRD

SEQ ID NO: 190532 - protein, 7 aa, synthetic construct
NMPHARV

SEQ ID NO: 190533 - protein, 7 aa, synthetic construct
NMNKARD

SEQ ID NO: 190534 - protein, 7 aa, synthetic construct
TMTRANL

SEQ ID NO: 190535 - protein, 7 aa, synthetic construct
NMARAKE

SEQ ID NO: 190536 - protein, 7 aa, synthetic construct
NETRLRM

SEQ ID NO: 190537 - protein, 7 aa, synthetic construct
NMTSSRA

SEQ ID NO: 190538 - protein, 7 aa, synthetic construct
IMTRQRE

SEQ ID NO: 190539 - protein, 7 aa, synthetic construct
NAERARI

SEQ ID NO: 190540 - protein, 7 aa, synthetic construct
NIARLRD

SEQ ID NO: 190541 - protein, 7 aa, synthetic construct
NETRMRG

SEQ ID NO: 190542 - protein, 7 aa, synthetic construct
NMTERRG

SEQ ID NO: 190543 - protein, 7 aa, synthetic construct
NMDRATR

SEQ ID NO: 190544 - protein, 7 aa, synthetic construct
NKPHARD

SEQ ID NO: 190545 - protein, 7 aa, synthetic construct
NMKTPRD

SEQ ID NO: 190546 - protein, 7 aa, synthetic construct
YATRARE

SEQ ID NO: 190547 - protein, 7 aa, synthetic construct
FMKSARD

SEQ ID NO: 190548 - protein, 7 aa, synthetic construct
PMPRAKD

SEQ ID NO: 190549 - protein, 7 aa, synthetic construct
NKTRPAD

SEQ ID NO: 190550 - protein, 7 aa, synthetic construct
NMDRPRI

SEQ ID NO: 190551 - protein, 7 aa, synthetic construct
KEIRARD

SEQ ID NO: 190552 - protein, 7 aa, synthetic construct
TMLRARE

SEQ ID NO: 190553 - protein, 7 aa, synthetic construct
LMTNKRD

SEQ ID NO: 190554 - protein, 7 aa, synthetic construct
NMAEARR

SEQ ID NO: 190555 - protein, 7 aa, synthetic construct
SDTRARA

SEQ ID NO: 190556 - protein, 7 aa, synthetic construct
NMKYSRD

SEQ ID NO: 190557 - protein, 7 aa, synthetic construct
NAPRIRD

SEQ ID NO: 190558 - protein, 7 aa, synthetic construct
GMPRARE

SEQ ID NO: 190559 - protein, 7 aa, synthetic construct
TMPRGRD

SEQ ID NO: 190560 - protein, 7 aa, synthetic construct
APPRARD

SEQ ID NO: 190561 - protein, 7 aa, synthetic construct
NMDRGRN

SEQ ID NO: 190562 - protein, 7 aa, synthetic construct
TMKYARD

SEQ ID NO: 190563 - protein, 7 aa, synthetic construct
NMHGARA

SEQ ID NO: 190564 - protein, 7 aa, synthetic construct
QMARAKD

SEQ ID NO: 190565 - protein, 7 aa, synthetic construct
DMPRARP

SEQ ID NO: 190566 - protein, 7 aa, synthetic construct
NMNPKRD

SEQ ID NO: 190567 - protein, 7 aa, synthetic construct
LATRARE

SEQ ID NO: 190568 - protein, 7 aa, synthetic construct
NPQRARE

SEQ ID NO: 190569 - protein, 7 aa, synthetic construct
TMTKYRD

SEQ ID NO: 190570 - protein, 7 aa, synthetic construct
TGTRLRD

SEQ ID NO: 190571 - protein, 7 aa, synthetic construct
YDTRARI

SEQ ID NO: 190572 - protein, 7 aa, synthetic construct
NLTRKGD

SEQ ID NO: 190573 - protein, 7 aa, synthetic construct
TMARIRD

SEQ ID NO: 190574 - protein, 7 aa, synthetic construct
NLTRADK

SEQ ID NO: 190575 - protein, 7 aa, synthetic construct
GMTRGRE

SEQ ID NO: 190576 - protein, 7 aa, synthetic construct
MMTRVKD

SEQ ID NO: 190577 - protein, 7 aa, synthetic construct
MMTRAHS

SEQ ID NO: 190578 - protein, 7 aa, synthetic construct
NMKRNVD

SEQ ID NO: 190579 - protein, 7 aa, synthetic construct
TMQRVRD

SEQ ID NO: 190580 - protein, 7 aa, synthetic construct
YETRARV

SEQ ID NO: 190581 - protein, 7 aa, synthetic construct
NETRSRV

SEQ ID NO: 190582 - protein, 7 aa, synthetic construct
YMTRQKD

SEQ ID NO: 190583 - protein, 7 aa, synthetic construct
NKTRADS

SEQ ID NO: 190584 - protein, 7 aa, synthetic construct
LTTRMRD

SEQ ID NO: 190585 - protein, 7 aa, synthetic construct
NEKKARD

SEQ ID NO: 190586 - protein, 7 aa, synthetic construct
NMVRLRE

SEQ ID NO: 190587 - protein, 7 aa, synthetic construct
IDTRARS

SEQ ID NO: 190588 - protein, 7 aa, synthetic construct
INLRARD

SEQ ID NO: 190589 - protein, 7 aa, synthetic construct
DVTRARI

SEQ ID NO: 190590 - protein, 7 aa, synthetic construct
KMFPARD

SEQ ID NO: 190591 - protein, 7 aa, synthetic construct
TMPRARD

SEQ ID NO: 190592 - protein, 7 aa, synthetic construct
KMTSARD

SEQ ID NO: 190593 - protein, 7 aa, synthetic construct
NMPRAHG

SEQ ID NO: 190594 - protein, 7 aa, synthetic construct
MMTRNRE

SEQ ID NO: 190595 - protein, 7 aa, synthetic construct
NKTERRD

SEQ ID NO: 190596 - protein, 7 aa, synthetic construct
NDPRARM

SEQ ID NO: 190597 - protein, 7 aa, synthetic construct
SATRLRD

SEQ ID NO: 190598 - protein, 7 aa, synthetic construct
NVTRKQD

SEQ ID NO: 190599 - protein, 7 aa, synthetic construct
QKTRALD

SEQ ID NO: 190600 - protein, 7 aa, synthetic construct
PMTRAGQ

SEQ ID NO: 190601 - protein, 7 aa, synthetic construct
MMKRERD

SEQ ID NO: 190602 - protein, 7 aa, synthetic construct
LMDRARQ

SEQ ID NO: 190603 - protein, 7 aa, synthetic construct
NDTRVRS

SEQ ID NO: 190604 - protein, 7 aa, synthetic construct
NFTAKRD

SEQ ID NO: 190605 - protein, 7 aa, synthetic construct
KMTQSRD

SEQ ID NO: 190606 - protein, 7 aa, synthetic construct
NRTPIRD

SEQ ID NO: 190607 - protein, 7 aa, synthetic construct
GMVKARD

SEQ ID NO: 190608 - protein, 7 aa, synthetic construct
NMRPVRD

SEQ ID NO: 190609 - protein, 7 aa, synthetic construct
TPIRARD

SEQ ID NO: 190610 - protein, 7 aa, synthetic construct
NPFKARD

SEQ ID NO: 190611 - protein, 7 aa, synthetic construct
NMKFARE

SEQ ID NO: 190612 - protein, 7 aa, synthetic construct
LMTRADK

SEQ ID NO: 190613 - protein, 7 aa, synthetic construct
NIERARP

SEQ ID NO: 190614 - protein, 7 aa, synthetic construct
NDTRLRI

SEQ ID NO: 190615 - protein, 7 aa, synthetic construct
MLTRAKD

SEQ ID NO: 190616 - protein, 7 aa, synthetic construct
NLTRSKD

SEQ ID NO: 190617 - protein, 7 aa, synthetic construct
DMTKARS

SEQ ID NO: 190618 - protein, 7 aa, synthetic construct
VVTRAKD

SEQ ID NO: 190619 - protein, 7 aa, synthetic construct
NMVRERN

SEQ ID NO: 190620 - protein, 7 aa, synthetic construct
MMTRERG

SEQ ID NO: 190621 - protein, 7 aa, synthetic construct
GMTRGRD

SEQ ID NO: 190622 - protein, 7 aa, synthetic construct
NMQRKGD

SEQ ID NO: 190623 - protein, 7 aa, synthetic construct
NATPKRD

SEQ ID NO: 190624 - protein, 7 aa, synthetic construct
TMQRLRD

SEQ ID NO: 190625 - protein, 7 aa, synthetic construct
NMTQKRD

SEQ ID NO: 190626 - protein, 7 aa, synthetic construct
NDTRTRT

SEQ ID NO: 190627 - protein, 7 aa, synthetic construct
NMPRAIG

SEQ ID NO: 190628 - protein, 7 aa, synthetic construct
VMTQARG

SEQ ID NO: 190629 - protein, 7 aa, synthetic construct
NMKRTMD

SEQ ID NO: 190630 - protein, 7 aa, synthetic construct
NSKPARD

SEQ ID NO: 190631 - protein, 7 aa, synthetic construct
SPIRARD

SEQ ID NO: 190632 - protein, 7 aa, synthetic construct
TPTRGRD

SEQ ID NO: 190633 - protein, 7 aa, synthetic construct
QITKARD

SEQ ID NO: 190634 - protein, 7 aa, synthetic construct
SMLRGRD

SEQ ID NO: 190635 - protein, 7 aa, synthetic construct
NMIRKMD

SEQ ID NO: 190636 - protein, 7 aa, synthetic construct
SMARMRD

SEQ ID NO: 190637 - protein, 7 aa, synthetic construct
NMMRQKD

SEQ ID NO: 190638 - protein, 7 aa, synthetic construct
NMERPRS

SEQ ID NO: 190639 - protein, 7 aa, synthetic construct
NMVRVRE

SEQ ID NO: 190640 - protein, 7 aa, synthetic construct
KQTRERD

SEQ ID NO: 190641 - protein, 7 aa, synthetic construct
SMTRTRE

SEQ ID NO: 190642 - protein, 7 aa, synthetic construct
KMTRVVD

SEQ ID NO: 190643 - protein, 7 aa, synthetic construct
DNTRARS

SEQ ID NO: 190644 - protein, 7 aa, synthetic construct
NKQRATD

SEQ ID NO: 190645 - protein, 7 aa, synthetic construct
NNLRARE

SEQ ID NO: 190646 - protein, 7 aa, synthetic construct
NLTRKTD

SEQ ID NO: 190647 - protein, 7 aa, synthetic construct
NPTRLRD

SEQ ID NO: 190648 - protein, 7 aa, synthetic construct
NMTNPRA

SEQ ID NO: 190649 - protein, 7 aa, synthetic construct
KMTRAQD

SEQ ID NO: 190650 - protein, 7 aa, synthetic construct
LMSRAKD

SEQ ID NO: 190651 - protein, 7 aa, synthetic construct
DMARARM

SEQ ID NO: 190652 - protein, 7 aa, synthetic construct
SMTRANL

SEQ ID NO: 190653 - protein, 7 aa, synthetic construct
NETRLRA

SEQ ID NO: 190654 - protein, 7 aa, synthetic construct
DATRARV

SEQ ID NO: 190655 - protein, 7 aa, synthetic construct
KMTLARD

SEQ ID NO: 190656 - protein, 7 aa, synthetic construct
TMTRSKD

SEQ ID NO: 190657 - protein, 7 aa, synthetic construct
NKTFIRD

SEQ ID NO: 190658 - protein, 7 aa, synthetic construct
NAKYARD

SEQ ID NO: 190659 - protein, 7 aa, synthetic construct
KMTRTMD

SEQ ID NO: 190660 - protein, 7 aa, synthetic construct
NFKGARD

SEQ ID NO: 190661 - protein, 7 aa, synthetic construct
TMTRASL

SEQ ID NO: 190662 - protein, 7 aa, synthetic construct
PMTTKRD

SEQ ID NO: 190663 - protein, 7 aa, synthetic construct
NMNRMRE

SEQ ID NO: 190664 - protein, 7 aa, synthetic construct
AATRVRD

SEQ ID NO: 190665 - protein, 7 aa, synthetic construct
NIRPARD

SEQ ID NO: 190666 - protein, 7 aa, synthetic construct
NMMGARG

SEQ ID NO: 190667 - protein, 7 aa, synthetic construct
NLTRARD

SEQ ID NO: 190668 - protein, 7 aa, synthetic construct
QMMKARD

SEQ ID NO: 190669 - protein, 7 aa, synthetic construct
NEPRARG

SEQ ID NO: 190670 - protein, 7 aa, synthetic construct
NMRKAAD

SEQ ID NO: 190671 - protein, 7 aa, synthetic construct
NRTLARE

SEQ ID NO: 190672 - protein, 7 aa, synthetic construct
NMARNRE

SEQ ID NO: 190673 - protein, 7 aa, synthetic construct
IFTKARD

SEQ ID NO: 190674 - protein, 7 aa, synthetic construct
NMRSPRD

SEQ ID NO: 190675 - protein, 7 aa, synthetic construct
SFTKARD

SEQ ID NO: 190676 - protein, 7 aa, synthetic construct
KMTRVSD

SEQ ID NO: 190677 - protein, 7 aa, synthetic construct
NMLKQRD

SEQ ID NO: 190678 - protein, 7 aa, synthetic construct
NYPKARD

SEQ ID NO: 190679 - protein, 7 aa, synthetic construct
NMGRNRE

SEQ ID NO: 190680 - protein, 7 aa, synthetic construct
NVARQRD

SEQ ID NO: 190681 - protein, 7 aa, synthetic construct
NMIRADK

SEQ ID NO: 190682 - protein, 7 aa, synthetic construct
NMDKARM

SEQ ID NO: 190683 - protein, 7 aa, synthetic construct
KGTRAVD

SEQ ID NO: 190684 - protein, 7 aa, synthetic construct
MMPRARE

SEQ ID NO: 190685 - protein, 7 aa, synthetic construct
NVTRERG

SEQ ID NO: 190686 - protein, 7 aa, synthetic construct
NMERQRA

SEQ ID NO: 190687 - protein, 7 aa, synthetic construct
PMARVRD

SEQ ID NO: 190688 - protein, 7 aa, synthetic construct
NKPRATD

SEQ ID NO: 190689 - protein, 7 aa, synthetic construct
TMDRARS

SEQ ID NO: 190690 - protein, 7 aa, synthetic construct
VITRARE

SEQ ID NO: 190691 - protein, 7 aa, synthetic construct
TPVRARD

SEQ ID NO: 190692 - protein, 7 aa, synthetic construct
NMKRVMD

SEQ ID NO: 190693 - protein, 7 aa, synthetic construct
NQKRASD

SEQ ID NO: 190694 - protein, 7 aa, synthetic construct
MRTIARD

SEQ ID NO: 190695 - protein, 7 aa, synthetic construct
VMTNARA

SEQ ID NO: 190696 - protein, 7 aa, synthetic construct
NRTPAKD

SEQ ID NO: 190697 - protein, 7 aa, synthetic construct
AMDRARG

SEQ ID NO: 190698 - protein, 7 aa, synthetic construct
SPTRARE

SEQ ID NO: 190699 - protein, 7 aa, synthetic construct
HMKVARD

SEQ ID NO: 190700 - protein, 7 aa, synthetic construct
FMTGARG

SEQ ID NO: 190701 - protein, 7 aa, synthetic construct
NVTRQRE

SEQ ID NO: 190702 - protein, 7 aa, synthetic construct
IVPRARD

SEQ ID NO: 190703 - protein, 7 aa, synthetic construct
NMERAKN

SEQ ID NO: 190704 - protein, 7 aa, synthetic construct
NMKRIQD

SEQ ID NO: 190705 - protein, 7 aa, synthetic construct
NMTRIRD

SEQ ID NO: 190706 - protein, 7 aa, synthetic construct
SMTMKRD

SEQ ID NO: 190707 - protein, 7 aa, synthetic construct
NMERTRN

SEQ ID NO: 190708 - protein, 7 aa, synthetic construct
NMTNKRD

SEQ ID NO: 190709 - protein, 7 aa, synthetic construct
NMKRAEV

SEQ ID NO: 190710 - protein, 7 aa, synthetic construct
SMDRARA

SEQ ID NO: 190711 - protein, 7 aa, synthetic construct
TGTRVRD

SEQ ID NO: 190712 - protein, 7 aa, synthetic construct
NAKRAFD

SEQ ID NO: 190713 - protein, 7 aa, synthetic construct
IATRQRD

SEQ ID NO: 190714 - protein, 7 aa, synthetic construct
DMTRARS

SEQ ID NO: 190715 - protein, 7 aa, synthetic construct
NVKFARD

SEQ ID NO: 190716 - protein, 7 aa, synthetic construct
NETKARF

SEQ ID NO: 190717 - protein, 7 aa, synthetic construct
VMERARQ

SEQ ID NO: 190718 - protein, 7 aa, synthetic construct
NMTRKDT

SEQ ID NO: 190719 - protein, 7 aa, synthetic construct
QMDRARN

SEQ ID NO: 190720 - protein, 7 aa, synthetic construct
NKGRATD

SEQ ID NO: 190721 - protein, 7 aa, synthetic construct
TMARARE

SEQ ID NO: 190722 - protein, 7 aa, synthetic construct
IQTRGRD

SEQ ID NO: 190723 - protein, 7 aa, synthetic construct
LMTNARM

SEQ ID NO: 190724 - protein, 7 aa, synthetic construct
NAMRAKD

SEQ ID NO: 190725 - protein, 7 aa, synthetic construct
TMTKHRD

SEQ ID NO: 190726 - protein, 7 aa, synthetic construct
VKTRERD

SEQ ID NO: 190727 - protein, 7 aa, synthetic construct
NPMRMRD

SEQ ID NO: 190728 - protein, 7 aa, synthetic construct
LMKRAPD

SEQ ID NO: 190729 - protein, 7 aa, synthetic construct
NMLAKRD

SEQ ID NO: 190730 - protein, 7 aa, synthetic construct
NMSKARD

SEQ ID NO: 190731 - protein, 7 aa, synthetic construct
IATRIRD

SEQ ID NO: 190732 - protein, 7 aa, synthetic construct
NMKRPSD

SEQ ID NO: 190733 - protein, 7 aa, synthetic construct
NTKRAVD

SEQ ID NO: 190734 - protein, 7 aa, synthetic construct
NAPRVRD

SEQ ID NO: 190735 - protein, 7 aa, synthetic construct
NMTHTRG

SEQ ID NO: 190736 - protein, 7 aa, synthetic construct
MMTTKRD

SEQ ID NO: 190737 - protein, 7 aa, synthetic construct
NKGRALD

SEQ ID NO: 190738 - protein, 7 aa, synthetic construct
LTTRGRD

SEQ ID NO: 190739 - protein, 7 aa, synthetic construct
NMKRSAD

SEQ ID NO: 190740 - protein, 7 aa, synthetic construct
VMPRMRD

SEQ ID NO: 190741 - protein, 7 aa, synthetic construct
KDTRQRD

SEQ ID NO: 190742 - protein, 7 aa, synthetic construct
NMPPRRD

SEQ ID NO: 190743 - protein, 7 aa, synthetic construct
SMQRLRD

SEQ ID NO: 190744 - protein, 7 aa, synthetic construct
APARARD

SEQ ID NO: 190745 - protein, 7 aa, synthetic construct
QMTRASS

SEQ ID NO: 190746 - protein, 7 aa, synthetic construct
GMKRAVD

SEQ ID NO: 190747 - protein, 7 aa, synthetic construct
DMTRQRI

SEQ ID NO: 190748 - protein, 7 aa, synthetic construct
QATRAKD

SEQ ID NO: 190749 - protein, 7 aa, synthetic construct
GMTRAHV

SEQ ID NO: 190750 - protein, 7 aa, synthetic construct
NPPRPRD

SEQ ID NO: 190751 - protein, 7 aa, synthetic construct
MPNRARD

SEQ ID NO: 190752 - protein, 7 aa, synthetic construct
TMTRQKD

SEQ ID NO: 190753 - protein, 7 aa, synthetic construct
PPTRGRD

SEQ ID NO: 190754 - protein, 7 aa, synthetic construct
NRPPARD

SEQ ID NO: 190755 - protein, 7 aa, synthetic construct
NTERARV

SEQ ID NO: 190756 - protein, 7 aa, synthetic construct
NMTRQER

SEQ ID NO: 190757 - protein, 7 aa, synthetic construct
NMTKRSD

SEQ ID NO: 190758 - protein, 7 aa, synthetic construct
NMSKPRD

SEQ ID NO: 190759 - protein, 7 aa, synthetic construct
AMTRANI

SEQ ID NO: 190760 - protein, 7 aa, synthetic construct
GMTRIRE

SEQ ID NO: 190761 - protein, 7 aa, synthetic construct
NPLRIRD

SEQ ID NO: 190762 - protein, 7 aa, synthetic construct
NSTRFKD

SEQ ID NO: 190763 - protein, 7 aa, synthetic construct
RVTAARD

SEQ ID NO: 190764 - protein, 7 aa, synthetic construct
NYTAKRD

SEQ ID NO: 190765 - protein, 7 aa, synthetic construct
NMLRPRE

SEQ ID NO: 190766 - protein, 7 aa, synthetic construct
NDNRARV

SEQ ID NO: 190767 - protein, 7 aa, synthetic construct
GPTRIRD

SEQ ID NO: 190768 - protein, 7 aa, synthetic construct
VETRARV

SEQ ID NO: 190769 - protein, 7 aa, synthetic construct
NKGNARD

SEQ ID NO: 190770 - protein, 7 aa, synthetic construct
QMERARV

SEQ ID NO: 190771 - protein, 7 aa, synthetic construct
FPTRVRD

SEQ ID NO: 190772 - protein, 7 aa, synthetic construct
KLTRAPD

SEQ ID NO: 190773 - protein, 7 aa, synthetic construct
NMTRKQD

SEQ ID NO: 190774 - protein, 7 aa, synthetic construct
DMGRARV

SEQ ID NO: 190775 - protein, 7 aa, synthetic construct
NMARDRG

SEQ ID NO: 190776 - protein, 7 aa, synthetic construct
MMTRERM

SEQ ID NO: 190777 - protein, 7 aa, synthetic construct
QMNRVRD

SEQ ID NO: 190778 - protein, 7 aa, synthetic construct
ARTTARD

SEQ ID NO: 190779 - protein, 7 aa, synthetic construct
NMNRLRE

SEQ ID NO: 190780 - protein, 7 aa, synthetic construct
NMPSARH

SEQ ID NO: 190781 - protein, 7 aa, synthetic construct
VMTRASL

SEQ ID NO: 190782 - protein, 7 aa, synthetic construct
IPPRARD

SEQ ID NO: 190783 - protein, 7 aa, synthetic construct
VMTTARG

SEQ ID NO: 190784 - protein, 7 aa, synthetic construct
KMQRAPD

SEQ ID NO: 190785 - protein, 7 aa, synthetic construct
NQTRPRE

SEQ ID NO: 190786 - protein, 7 aa, synthetic construct
IMTRASG

SEQ ID NO: 190787 - protein, 7 aa, synthetic construct
PKTRERD

SEQ ID NO: 190788 - protein, 7 aa, synthetic construct
AMTRVRD

SEQ ID NO: 190789 - protein, 7 aa, synthetic construct
NEVRARG

SEQ ID NO: 190790 - protein, 7 aa, synthetic construct
NMPDARK

SEQ ID NO: 190791 - protein, 7 aa, synthetic construct
QMTRASA

SEQ ID NO: 190792 - protein, 7 aa, synthetic construct
NYTKIRD

SEQ ID NO: 190793 - protein, 7 aa, synthetic construct
MMERARA

SEQ ID NO: 190794 - protein, 7 aa, synthetic construct
IMQKARD

SEQ ID NO: 190795 - protein, 7 aa, synthetic construct
NRTKAAD

SEQ ID NO: 190796 - protein, 7 aa, synthetic construct
VMTRIRE

SEQ ID NO: 190797 - protein, 7 aa, synthetic construct
MMTRPRE

SEQ ID NO: 190798 - protein, 7 aa, synthetic construct
AMNRTRD

SEQ ID NO: 190799 - protein, 7 aa, synthetic construct
NVDRARV

SEQ ID NO: 190800 - protein, 7 aa, synthetic construct
NMYKARD

SEQ ID NO: 190801 - protein, 7 aa, synthetic construct
NPVRARE

SEQ ID NO: 190802 - protein, 7 aa, synthetic construct
NLARAKD

SEQ ID NO: 190803 - protein, 7 aa, synthetic construct
QMTQKRD

SEQ ID NO: 190804 - protein, 7 aa, synthetic construct
NMPRANN

SEQ ID NO: 190805 - protein, 7 aa, synthetic construct
GMTRPRE

SEQ ID NO: 190806 - protein, 7 aa, synthetic construct
LMPRVRD

SEQ ID NO: 190807 - protein, 7 aa, synthetic construct
NMMKSRD

SEQ ID NO: 190808 - protein, 7 aa, synthetic construct
NMTKRAD

SEQ ID NO: 190809 - protein, 7 aa, synthetic construct
NMMRTKD

SEQ ID NO: 190810 - protein, 7 aa, synthetic construct
NATKPRD

SEQ ID NO: 190811 - protein, 7 aa, synthetic construct
NVKRERD

SEQ ID NO: 190812 - protein, 7 aa, synthetic construct
TQVRARD

SEQ ID NO: 190813 - protein, 7 aa, synthetic construct
NMGHARS

SEQ ID NO: 190814 - protein, 7 aa, synthetic construct
LMTPARQ

SEQ ID NO: 190815 - protein, 7 aa, synthetic construct
KETRVRD

SEQ ID NO: 190816 - protein, 7 aa, synthetic construct
NVTRFKD

SEQ ID NO: 190817 - protein, 7 aa, synthetic construct
NVNRARE

SEQ ID NO: 190818 - protein, 7 aa, synthetic construct
YKTRAAD

SEQ ID NO: 190819 - protein, 7 aa, synthetic construct
NISRGRD

SEQ ID NO: 190820 - protein, 7 aa, synthetic construct
NMLGARN

SEQ ID NO: 190821 - protein, 7 aa, synthetic construct
NPMRARD

SEQ ID NO: 190822 - protein, 7 aa, synthetic construct
NLQRQRD

SEQ ID NO: 190823 - protein, 7 aa, synthetic construct
NVSKARD

SEQ ID NO: 190824 - protein, 7 aa, synthetic construct
NPTRERN

SEQ ID NO: 190825 - protein, 7 aa, synthetic construct
NPTRVRD

SEQ ID NO: 190826 - protein, 7 aa, synthetic construct
YMTNARA

SEQ ID NO: 190827 - protein, 7 aa, synthetic construct
NKMRAVD

SEQ ID NO: 190828 - protein, 7 aa, synthetic construct
NPTRKPD

SEQ ID NO: 190829 - protein, 7 aa, synthetic construct
NMMGARA

SEQ ID NO: 190830 - protein, 7 aa, synthetic construct
IMTRAKE

SEQ ID NO: 190831 - protein, 7 aa, synthetic construct
VETRARI

SEQ ID NO: 190832 - protein, 7 aa, synthetic construct
AMKHARD

SEQ ID NO: 190833 - protein, 7 aa, synthetic construct
TMTKQRD

SEQ ID NO: 190834 - protein, 7 aa, synthetic construct
GMNRVRD

SEQ ID NO: 190835 - protein, 7 aa, synthetic construct
NMIGARN

SEQ ID NO: 190836 - protein, 7 aa, synthetic construct
NPGKARD

SEQ ID NO: 190837 - protein, 7 aa, synthetic construct
NDTRIRT

SEQ ID NO: 190838 - protein, 7 aa, synthetic construct
NDTRGRT

SEQ ID NO: 190839 - protein, 7 aa, synthetic construct
NMTRREI

SEQ ID NO: 190840 - protein, 7 aa, synthetic construct
RLTGARD

SEQ ID NO: 190841 - protein, 7 aa, synthetic construct
NMERTRT

SEQ ID NO: 190842 - protein, 7 aa, synthetic construct
NKTVPRD

SEQ ID NO: 190843 - protein, 7 aa, synthetic construct
FMNRAKD

SEQ ID NO: 190844 - protein, 7 aa, synthetic construct
NMTAERR

SEQ ID NO: 190845 - protein, 7 aa, synthetic construct
NIRAARD

SEQ ID NO: 190846 - protein, 7 aa, synthetic construct
MMTRAAM

SEQ ID NO: 190847 - protein, 7 aa, synthetic construct
NITRMRE

SEQ ID NO: 190848 - protein, 7 aa, synthetic construct
SMQRIRD

SEQ ID NO: 190849 - protein, 7 aa, synthetic construct
NKTRPMD

SEQ ID NO: 190850 - protein, 7 aa, synthetic construct
NVIRTRD

SEQ ID NO: 190851 - protein, 7 aa, synthetic construct
SMPRMRD

SEQ ID NO: 190852 - protein, 7 aa, synthetic construct
GMPRPRD

SEQ ID NO: 190853 - protein, 7 aa, synthetic construct
NLTSKRD

SEQ ID NO: 190854 - protein, 7 aa, synthetic construct
NMERARM

SEQ ID NO: 190855 - protein, 7 aa, synthetic construct
NMTRKDI

SEQ ID NO: 190856 - protein, 7 aa, synthetic construct
PMTRAVQ

SEQ ID NO: 190857 - protein, 7 aa, synthetic construct
NEVRARS

SEQ ID NO: 190858 - protein, 7 aa, synthetic construct
TMTMKRD

SEQ ID NO: 190859 - protein, 7 aa, synthetic construct
NRTIVRD

SEQ ID NO: 190860 - protein, 7 aa, synthetic construct
NMHKARD

SEQ ID NO: 190861 - protein, 7 aa, synthetic construct
NMIKVRD

SEQ ID NO: 190862 - protein, 7 aa, synthetic construct
IMQRGRD

SEQ ID NO: 190863 - protein, 7 aa, synthetic construct
IMARTRD

SEQ ID NO: 190864 - protein, 7 aa, synthetic construct
TTTRMRD

SEQ ID NO: 190865 - protein, 7 aa, synthetic construct
LMTTARM

SEQ ID NO: 190866 - protein, 7 aa, synthetic construct
KMTLSRD

SEQ ID NO: 190867 - protein, 7 aa, synthetic construct
NMTVERK

SEQ ID NO: 190868 - protein, 7 aa, synthetic construct
KMTREKD

SEQ ID NO: 190869 - protein, 7 aa, synthetic construct
NMKRADF

SEQ ID NO: 190870 - protein, 7 aa, synthetic construct
NTTIRRD

SEQ ID NO: 190871 - protein, 7 aa, synthetic construct
NLKYARD

SEQ ID NO: 190872 - protein, 7 aa, synthetic construct
NMAAKRD

SEQ ID NO: 190873 - protein, 7 aa, synthetic construct
SNTRLRD

SEQ ID NO: 190874 - protein, 7 aa, synthetic construct
VIPRARD

SEQ ID NO: 190875 - protein, 7 aa, synthetic construct
NMMRMKD

SEQ ID NO: 190876 - protein, 7 aa, synthetic construct
TQTRIRD

SEQ ID NO: 190877 - protein, 7 aa, synthetic construct
MMTRGRD

SEQ ID NO: 190878 - protein, 7 aa, synthetic construct
VMTTKRD

SEQ ID NO: 190879 - protein, 7 aa, synthetic construct
KMTRPGD

SEQ ID NO: 190880 - protein, 7 aa, synthetic construct
NMIKARD

SEQ ID NO: 190881 - protein, 7 aa, synthetic construct
MMTNARS

SEQ ID NO: 190882 - protein, 7 aa, synthetic construct
NKMRAID

SEQ ID NO: 190883 - protein, 7 aa, synthetic construct
IMPRLRD

SEQ ID NO: 190884 - protein, 7 aa, synthetic construct
TMKRAID

SEQ ID NO: 190885 - protein, 7 aa, synthetic construct
NITRNRE

SEQ ID NO: 190886 - protein, 7 aa, synthetic construct
VMTTARN

SEQ ID NO: 190887 - protein, 7 aa, synthetic construct
YMERARN

SEQ ID NO: 190888 - protein, 7 aa, synthetic construct
NKTYGRD

SEQ ID NO: 190889 - protein, 7 aa, synthetic construct
KSTRAID

SEQ ID NO: 190890 - protein, 7 aa, synthetic construct
NMGGKRD

SEQ ID NO: 190891 - protein, 7 aa, synthetic construct
NETKART

SEQ ID NO: 190892 - protein, 7 aa, synthetic construct
VRTIARD

SEQ ID NO: 190893 - protein, 7 aa, synthetic construct
NMKLHRD

SEQ ID NO: 190894 - protein, 7 aa, synthetic construct
NMERIRQ

SEQ ID NO: 190895 - protein, 7 aa, synthetic construct
NMKQFRD

SEQ ID NO: 190896 - protein, 7 aa, synthetic construct
MVTRGRD

SEQ ID NO: 190897 - protein, 7 aa, synthetic construct
GMVRAKD

SEQ ID NO: 190898 - protein, 7 aa, synthetic construct
NTLRARD

SEQ ID NO: 190899 - protein, 7 aa, synthetic construct
SMTRNRE

SEQ ID NO: 190900 - protein, 7 aa, synthetic construct
TQTRLRD

SEQ ID NO: 190901 - protein, 7 aa, synthetic construct
NETRAVR

SEQ ID NO: 190902 - protein, 7 aa, synthetic construct
NMKPFRD

SEQ ID NO: 190903 - protein, 7 aa, synthetic construct
TMSRAKD

SEQ ID NO: 190904 - protein, 7 aa, synthetic construct
KMTRQGD

SEQ ID NO: 190905 - protein, 7 aa, synthetic construct
NMARPRE

SEQ ID NO: 190906 - protein, 7 aa, synthetic construct
SMVRQRD

SEQ ID NO: 190907 - protein, 7 aa, synthetic construct
NDTRTRP

SEQ ID NO: 190908 - protein, 7 aa, synthetic construct
NMDRLRQ

SEQ ID NO: 190909 - protein, 7 aa, synthetic construct
HKTIARD

SEQ ID NO: 190910 - protein, 7 aa, synthetic construct
VMARMRD

SEQ ID NO: 190911 - protein, 7 aa, synthetic construct
QMTPKRD

SEQ ID NO: 190912 - protein, 7 aa, synthetic construct
NMDRQRA

SEQ ID NO: 190913 - protein, 7 aa, synthetic construct
PMGKARD

SEQ ID NO: 190914 - protein, 7 aa, synthetic construct
SMNRAKD

SEQ ID NO: 190915 - protein, 7 aa, synthetic construct
NSTEARR

SEQ ID NO: 190916 - protein, 7 aa, synthetic construct
VMTVKRD

SEQ ID NO: 190917 - protein, 7 aa, synthetic construct
NKMLARD

SEQ ID NO: 190918 - protein, 7 aa, synthetic construct
HDTRARP

SEQ ID NO: 190919 - protein, 7 aa, synthetic construct
NMTRQEK

SEQ ID NO: 190920 - protein, 7 aa, synthetic construct
KMTRGGD

SEQ ID NO: 190921 - protein, 7 aa, synthetic construct
NRTLSRD

SEQ ID NO: 190922 - protein, 7 aa, synthetic construct
NMIRNKD

SEQ ID NO: 190923 - protein, 7 aa, synthetic construct
GMARVRD

SEQ ID NO: 190924 - protein, 7 aa, synthetic construct
KFTVARD

SEQ ID NO: 190925 - protein, 7 aa, synthetic construct
NKMVARD

SEQ ID NO: 190926 - protein, 7 aa, synthetic construct
NITTRRD

SEQ ID NO: 190927 - protein, 7 aa, synthetic construct
MMTRASS

SEQ ID NO: 190928 - protein, 7 aa, synthetic construct
SMTRERL

SEQ ID NO: 190929 - protein, 7 aa, synthetic construct
NMTRRIE

SEQ ID NO: 190930 - protein, 7 aa, synthetic construct
NMGRAEK

SEQ ID NO: 190931 - protein, 7 aa, synthetic construct
NRTVQRD

SEQ ID NO: 190932 - protein, 7 aa, synthetic construct
NMDRMRQ

SEQ ID NO: 190933 - protein, 7 aa, synthetic construct
AMTRGKD

SEQ ID NO: 190934 - protein, 7 aa, synthetic construct
NVERARV

SEQ ID NO: 190935 - protein, 7 aa, synthetic construct
NEQRARG

SEQ ID NO: 190936 - protein, 7 aa, synthetic construct
NDTRQRM

SEQ ID NO: 190937 - protein, 7 aa, synthetic construct
NMAHARA

SEQ ID NO: 190938 - protein, 7 aa, synthetic construct
NMVRGKD

SEQ ID NO: 190939 - protein, 7 aa, synthetic construct
NKMTARD

SEQ ID NO: 190940 - protein, 7 aa, synthetic construct
NMTRQKE

SEQ ID NO: 190941 - protein, 7 aa, synthetic construct
DMTKARQ

SEQ ID NO: 190942 - protein, 7 aa, synthetic construct
NTRVARD

SEQ ID NO: 190943 - protein, 7 aa, synthetic construct
AMRTARD

SEQ ID NO: 190944 - protein, 7 aa, synthetic construct
IQTRVRD

SEQ ID NO: 190945 - protein, 7 aa, synthetic construct
GMMRTRD

SEQ ID NO: 190946 - protein, 7 aa, synthetic construct
IMVRAKD

SEQ ID NO: 190947 - protein, 7 aa, synthetic construct
NMTRPDK

SEQ ID NO: 190948 - protein, 7 aa, synthetic construct
NTGRARE

SEQ ID NO: 190949 - protein, 7 aa, synthetic construct
WMSKARD

SEQ ID NO: 190950 - protein, 7 aa, synthetic construct
NQTKFRD

SEQ ID NO: 190951 - protein, 7 aa, synthetic construct
SMTRAHG

SEQ ID NO: 190952 - protein, 7 aa, synthetic construct
STTRIRD

SEQ ID NO: 190953 - protein, 7 aa, synthetic construct
PDTRARV

SEQ ID NO: 190954 - protein, 7 aa, synthetic construct
NMKRAES

SEQ ID NO: 190955 - protein, 7 aa, synthetic construct
NPARPRD

SEQ ID NO: 190956 - protein, 7 aa, synthetic construct
NETRVRN

SEQ ID NO: 190957 - protein, 7 aa, synthetic construct
NIVRAKD

SEQ ID NO: 190958 - protein, 7 aa, synthetic construct
IDTRARG

SEQ ID NO: 190959 - protein, 7 aa, synthetic construct
MMTRARE

SEQ ID NO: 190960 - protein, 7 aa, synthetic construct
VMTRASV

SEQ ID NO: 190961 - protein, 7 aa, synthetic construct
TMMRAKD

SEQ ID NO: 190962 - protein, 7 aa, synthetic construct
NKRDARD

SEQ ID NO: 190963 - protein, 7 aa, synthetic construct
DMTRAVK

SEQ ID NO: 190964 - protein, 7 aa, synthetic construct
NMDSARR

SEQ ID NO: 190965 - protein, 7 aa, synthetic construct
NMMRTRE

SEQ ID NO: 190966 - protein, 7 aa, synthetic construct
NKNRAID

SEQ ID NO: 190967 - protein, 7 aa, synthetic construct
NMKRAME

SEQ ID NO: 190968 - protein, 7 aa, synthetic construct
NMTGKRD

SEQ ID NO: 190969 - protein, 7 aa, synthetic construct
MMTRAKD

SEQ ID NO: 190970 - protein, 7 aa, synthetic construct
DVTRARS

SEQ ID NO: 190971 - protein, 7 aa, synthetic construct
GNTRLRD

SEQ ID NO: 190972 - protein, 7 aa, synthetic construct
GMTRTRD

SEQ ID NO: 190973 - protein, 7 aa, synthetic construct
PMPRARE

SEQ ID NO: 190974 - protein, 7 aa, synthetic construct
SMIKARD

SEQ ID NO: 190975 - protein, 7 aa, synthetic construct
WTTKARD

SEQ ID NO: 190976 - protein, 7 aa, synthetic construct
QATRARE

SEQ ID NO: 190977 - protein, 7 aa, synthetic construct
NDLRARV

SEQ ID NO: 190978 - protein, 7 aa, synthetic construct
KMGRAID

SEQ ID NO: 190979 - protein, 7 aa, synthetic construct
NKARAFD

SEQ ID NO: 190980 - protein, 7 aa, synthetic construct
RMTTQRD

SEQ ID NO: 190981 - protein, 7 aa, synthetic construct
EMKKARD

SEQ ID NO: 190982 - protein, 7 aa, synthetic construct
KMTMNRD

SEQ ID NO: 190983 - protein, 7 aa, synthetic construct
NMMIKRD

SEQ ID NO: 190984 - protein, 7 aa, synthetic construct
KMGLARD

SEQ ID NO: 190985 - protein, 7 aa, synthetic construct
NMQKARD

SEQ ID NO: 190986 - protein, 7 aa, synthetic construct
VMMKARD

SEQ ID NO: 190987 - protein, 7 aa, synthetic construct
NDARARL

SEQ ID NO: 190988 - protein, 7 aa, synthetic construct
KITRASD

SEQ ID NO: 190989 - protein, 7 aa, synthetic construct
NPIRARE

SEQ ID NO: 190990 - protein, 7 aa, synthetic construct
NMPRASA

SEQ ID NO: 190991 - protein, 7 aa, synthetic construct
RMLPARD

SEQ ID NO: 190992 - protein, 7 aa, synthetic construct
IDTRARP

SEQ ID NO: 190993 - protein, 7 aa, synthetic construct
NKGRAPD

SEQ ID NO: 190994 - protein, 7 aa, synthetic construct
LMKRAGD

SEQ ID NO: 190995 - protein, 7 aa, synthetic construct
NVLRARD

SEQ ID NO: 190996 - protein, 7 aa, synthetic construct
NKTRQTD

SEQ ID NO: 190997 - protein, 7 aa, synthetic construct
DITRARI

SEQ ID NO: 190998 - protein, 7 aa, synthetic construct
NMTKRFD

SEQ ID NO: 190999 - protein, 7 aa, synthetic construct
LKTRASD

SEQ ID NO: 191000 - protein, 7 aa, synthetic construct
SMNRIRD

SEQ ID NO: 191001 - protein, 7 aa, synthetic construct
NTIRPRD

SEQ ID NO: 191002 - protein, 7 aa, synthetic construct
NMKRSVD

SEQ ID NO: 191003 - protein, 7 aa, synthetic construct
NMTTRKD

SEQ ID NO: 191004 - protein, 7 aa, synthetic construct
NMIQKRD

SEQ ID NO: 191005 - protein, 7 aa, synthetic construct
TFTRAKD

SEQ ID NO: 191006 - protein, 7 aa, synthetic construct
NMKRPVD

SEQ ID NO: 191007 - protein, 7 aa, synthetic construct
YMTKSRD

SEQ ID NO: 191008 - protein, 7 aa, synthetic construct
QMTRANI

SEQ ID NO: 191009 - protein, 7 aa, synthetic construct
SKERARD

SEQ ID NO: 191010 - protein, 7 aa, synthetic construct
NMERVRP

SEQ ID NO: 191011 - protein, 7 aa, synthetic construct
VMQRAKD

SEQ ID NO: 191012 - protein, 7 aa, synthetic construct
NMIRKAD

SEQ ID NO: 191013 - protein, 7 aa, synthetic construct
NMRIARE

SEQ ID NO: 191014 - protein, 7 aa, synthetic construct
NITRAHA

SEQ ID NO: 191015 - protein, 7 aa, synthetic construct
TMTRERP

SEQ ID NO: 191016 - protein, 7 aa, synthetic construct
ILARARD

SEQ ID NO: 191017 - protein, 7 aa, synthetic construct
NMKRTVD

SEQ ID NO: 191018 - protein, 7 aa, synthetic construct
RMTPIRD

SEQ ID NO: 191019 - protein, 7 aa, synthetic construct
NQVRLRD

SEQ ID NO: 191020 - protein, 7 aa, synthetic construct
NTMRNRD

SEQ ID NO: 191021 - protein, 7 aa, synthetic construct
NMDRIRT

SEQ ID NO: 191022 - protein, 7 aa, synthetic construct
SMPRLRD

SEQ ID NO: 191023 - protein, 7 aa, synthetic construct
TSTRIRD

SEQ ID NO: 191024 - protein, 7 aa, synthetic construct
NPRLARD

SEQ ID NO: 191025 - protein, 7 aa, synthetic construct
NSLRLRD

SEQ ID NO: 191026 - protein, 7 aa, synthetic construct
NMQRTRE

SEQ ID NO: 191027 - protein, 7 aa, synthetic construct
TRTSARD

SEQ ID NO: 191028 - protein, 7 aa, synthetic construct
NETRGRS

SEQ ID NO: 191029 - protein, 7 aa, synthetic construct
INTRLRD

SEQ ID NO: 191030 - protein, 7 aa, synthetic construct
WMKNARD

SEQ ID NO: 191031 - protein, 7 aa, synthetic construct
VMTRERN

SEQ ID NO: 191032 - protein, 7 aa, synthetic construct
NLDRARG

SEQ ID NO: 191033 - protein, 7 aa, synthetic construct
NMNRMKD

SEQ ID NO: 191034 - protein, 7 aa, synthetic construct
NMKRNPD

SEQ ID NO: 191035 - protein, 7 aa, synthetic construct
KMTGPRD

SEQ ID NO: 191036 - protein, 7 aa, synthetic construct
NQYKARD

SEQ ID NO: 191037 - protein, 7 aa, synthetic construct
NMTRSRE

SEQ ID NO: 191038 - protein, 7 aa, synthetic construct
TMIKARD

SEQ ID NO: 191039 - protein, 7 aa, synthetic construct
NMKRIID

SEQ ID NO: 191040 - protein, 7 aa, synthetic construct
NVTRVRD

SEQ ID NO: 191041 - protein, 7 aa, synthetic construct
NVTRGRD

SEQ ID NO: 191042 - protein, 7 aa, synthetic construct
NMKRANE

SEQ ID NO: 191043 - protein, 7 aa, synthetic construct
NVQKARD

SEQ ID NO: 191044 - protein, 7 aa, synthetic construct
NMTRSKE

SEQ ID NO: 191045 - protein, 7 aa, synthetic construct
NMAMKRD

SEQ ID NO: 191046 - protein, 7 aa, synthetic construct
NMTMHRA

SEQ ID NO: 191047 - protein, 7 aa, synthetic construct
NLSRIRD

SEQ ID NO: 191048 - protein, 7 aa, synthetic construct
NMGHARP

SEQ ID NO: 191049 - protein, 7 aa, synthetic construct
NITRADK

SEQ ID NO: 191050 - protein, 7 aa, synthetic construct
AMDRART

SEQ ID NO: 191051 - protein, 7 aa, synthetic construct
NMTEGRK

SEQ ID NO: 191052 - protein, 7 aa, synthetic construct
GDTRARA

SEQ ID NO: 191053 - protein, 7 aa, synthetic construct
QMTRMRE

SEQ ID NO: 191054 - protein, 7 aa, synthetic construct
NPVKARD

SEQ ID NO: 191055 - protein, 7 aa, synthetic construct
NLKRAVD

SEQ ID NO: 191056 - protein, 7 aa, synthetic construct
KPTNARD

SEQ ID NO: 191057 - protein, 7 aa, synthetic construct
KITRAID

SEQ ID NO: 191058 - protein, 7 aa, synthetic construct
NPLRTRD

SEQ ID NO: 191059 - protein, 7 aa, synthetic construct
NMIGKRD

SEQ ID NO: 191060 - protein, 7 aa, synthetic construct
KDPRARD

SEQ ID NO: 191061 - protein, 7 aa, synthetic construct
EMPRART

SEQ ID NO: 191062 - protein, 7 aa, synthetic construct
NMKVYRD

SEQ ID NO: 191063 - protein, 7 aa, synthetic construct
LMDRARA

SEQ ID NO: 191064 - protein, 7 aa, synthetic construct
IMKRAGD

SEQ ID NO: 191065 - protein, 7 aa, synthetic construct
TMTRARD

SEQ ID NO: 191066 - protein, 7 aa, synthetic construct
NKQRAAD

SEQ ID NO: 191067 - protein, 7 aa, synthetic construct
LDTRARQ

SEQ ID NO: 191068 - protein, 7 aa, synthetic construct
NMTGQRN

SEQ ID NO: 191069 - protein, 7 aa, synthetic construct
SNTRTRD

SEQ ID NO: 191070 - protein, 7 aa, synthetic construct
YMDRARM

SEQ ID NO: 191071 - protein, 7 aa, synthetic construct
NMDRPRQ

SEQ ID NO: 191072 - protein, 7 aa, synthetic construct
LMTQARG

SEQ ID NO: 191073 - protein, 7 aa, synthetic construct
NMTLHRP

SEQ ID NO: 191074 - protein, 7 aa, synthetic construct
MMERARG

SEQ ID NO: 191075 - protein, 7 aa, synthetic construct
KATRAPD

SEQ ID NO: 191076 - protein, 7 aa, synthetic construct
NVERARM

SEQ ID NO: 191077 - protein, 7 aa, synthetic construct
KMTRGAD

SEQ ID NO: 191078 - protein, 7 aa, synthetic construct
KIDRARD

SEQ ID NO: 191079 - protein, 7 aa, synthetic construct
IRTGARD

SEQ ID NO: 191080 - protein, 7 aa, synthetic construct
NATRQRD

SEQ ID NO: 191081 - protein, 7 aa, synthetic construct
IMRPARD

SEQ ID NO: 191082 - protein, 7 aa, synthetic construct
IMTRMRE

SEQ ID NO: 191083 - protein, 7 aa, synthetic construct
NMARERG

SEQ ID NO: 191084 - protein, 7 aa, synthetic construct
SVMRARD

SEQ ID NO: 191085 - protein, 7 aa, synthetic construct
NLTEARK

SEQ ID NO: 191086 - protein, 7 aa, synthetic construct
NMRGARE

SEQ ID NO: 191087 - protein, 7 aa, synthetic construct
NEMRARG

SEQ ID NO: 191088 - protein, 7 aa, synthetic construct
NNDRARN

SEQ ID NO: 191089 - protein, 7 aa, synthetic construct
TLTRTRD

SEQ ID NO: 191090 - protein, 7 aa, synthetic construct
AVTRAKD

SEQ ID NO: 191091 - protein, 7 aa, synthetic construct
NMTGLRA

SEQ ID NO: 191092 - protein, 7 aa, synthetic construct
NETRIRP

SEQ ID NO: 191093 - protein, 7 aa, synthetic construct
NNRLARD

SEQ ID NO: 191094 - protein, 7 aa, synthetic construct
NVKRAGD

SEQ ID NO: 191095 - protein, 7 aa, synthetic construct
AMTRADR

SEQ ID NO: 191096 - protein, 7 aa, synthetic construct
KMTRTAD

SEQ ID NO: 191097 - protein, 7 aa, synthetic construct
PMPRVRD

SEQ ID NO: 191098 - protein, 7 aa, synthetic construct
NDARARS

SEQ ID NO: 191099 - protein, 7 aa, synthetic construct
MMNRTRD

SEQ ID NO: 191100 - protein, 7 aa, synthetic construct
NETRMRI

SEQ ID NO: 191101 - protein, 7 aa, synthetic construct
MQTRMRD

SEQ ID NO: 191102 - protein, 7 aa, synthetic construct
RMTPAKD

SEQ ID NO: 191103 - protein, 7 aa, synthetic construct
NETRIRQ

SEQ ID NO: 191104 - protein, 7 aa, synthetic construct
MKTRAID

SEQ ID NO: 191105 - protein, 7 aa, synthetic construct
IKTRAFD

SEQ ID NO: 191106 - protein, 7 aa, synthetic construct
NATTRRD

SEQ ID NO: 191107 - protein, 7 aa, synthetic construct
SITRGRD

SEQ ID NO: 191108 - protein, 7 aa, synthetic construct
SMTPKRD

SEQ ID NO: 191109 - protein, 7 aa, synthetic construct
QMTRADR

SEQ ID NO: 191110 - protein, 7 aa, synthetic construct
LMDRARN

SEQ ID NO: 191111 - protein, 7 aa, synthetic construct
SMTRGRD

SEQ ID NO: 191112 - protein, 7 aa, synthetic construct
NMERSRG

SEQ ID NO: 191113 - protein, 7 aa, synthetic construct
NIDRARI

SEQ ID NO: 191114 - protein, 7 aa, synthetic construct
PMRMARD

SEQ ID NO: 191115 - protein, 7 aa, synthetic construct
NADRARL

SEQ ID NO: 191116 - protein, 7 aa, synthetic construct
TATRIRD

SEQ ID NO: 191117 - protein, 7 aa, synthetic construct
MMTRAKE

SEQ ID NO: 191118 - protein, 7 aa, synthetic construct
DITRARP

SEQ ID NO: 191119 - protein, 7 aa, synthetic construct
NFKAARD

SEQ ID NO: 191120 - protein, 7 aa, synthetic construct
NDPRARA

SEQ ID NO: 191121 - protein, 7 aa, synthetic construct
NITRSKD

SEQ ID NO: 191122 - protein, 7 aa, synthetic construct
KMQRALD

SEQ ID NO: 191123 - protein, 7 aa, synthetic construct
DMSRARA

SEQ ID NO: 191124 - protein, 7 aa, synthetic construct
NDTRNRI

SEQ ID NO: 191125 - protein, 7 aa, synthetic construct
GMARIRD

SEQ ID NO: 191126 - protein, 7 aa, synthetic construct
IDTRARI

SEQ ID NO: 191127 - protein, 7 aa, synthetic construct
NMRSAKD

SEQ ID NO: 191128 - protein, 7 aa, synthetic construct
VMTRNRE

SEQ ID NO: 191129 - protein, 7 aa, synthetic construct
NKTFNRD

SEQ ID NO: 191130 - protein, 7 aa, synthetic construct
QMQKARD

SEQ ID NO: 191131 - protein, 7 aa, synthetic construct
YMAKARD

SEQ ID NO: 191132 - protein, 7 aa, synthetic construct
NMEKKRD

SEQ ID NO: 191133 - protein, 7 aa, synthetic construct
HMTRLKD

SEQ ID NO: 191134 - protein, 7 aa, synthetic construct
NPQRARD

SEQ ID NO: 191135 - protein, 7 aa, synthetic construct
KQTRASD

SEQ ID NO: 191136 - protein, 7 aa, synthetic construct
NMDRAYK

SEQ ID NO: 191137 - protein, 7 aa, synthetic construct
NITRPKD

SEQ ID NO: 191138 - protein, 7 aa, synthetic construct
LMTRTRD

SEQ ID NO: 191139 - protein, 7 aa, synthetic construct
KMLRAGD

SEQ ID NO: 191140 - protein, 7 aa, synthetic construct
MMARARE

SEQ ID NO: 191141 - protein, 7 aa, synthetic construct
NVTRVRE

SEQ ID NO: 191142 - protein, 7 aa, synthetic construct
KPTRAQD

SEQ ID NO: 191143 - protein, 7 aa, synthetic construct
NMSRQKD

SEQ ID NO: 191144 - protein, 7 aa, synthetic construct
IMTGARA

SEQ ID NO: 191145 - protein, 7 aa, synthetic construct
DMTKARL

SEQ ID NO: 191146 - protein, 7 aa, synthetic construct
NMHTARN

SEQ ID NO: 191147 - protein, 7 aa, synthetic construct
YMQKARD

SEQ ID NO: 191148 - protein, 7 aa, synthetic construct
NPARTRD

SEQ ID NO: 191149 - protein, 7 aa, synthetic construct
NSLRARE

SEQ ID NO: 191150 - protein, 7 aa, synthetic construct
RQTPARD

SEQ ID NO: 191151 - protein, 7 aa, synthetic construct
NMKPMRD

SEQ ID NO: 191152 - protein, 7 aa, synthetic construct
MMKRAPD

SEQ ID NO: 191153 - protein, 7 aa, synthetic construct
NDTKARH

SEQ ID NO: 191154 - protein, 7 aa, synthetic construct
TMTRDRM

SEQ ID NO: 191155 - protein, 7 aa, synthetic construct
NMQMKRD

SEQ ID NO: 191156 - protein, 7 aa, synthetic construct
VMTRERA

SEQ ID NO: 191157 - protein, 7 aa, synthetic construct
NMDRTRI

SEQ ID NO: 191158 - protein, 7 aa, synthetic construct
LMTRANL

SEQ ID NO: 191159 - protein, 7 aa, synthetic construct
NMNEARR

SEQ ID NO: 191160 - protein, 7 aa, synthetic construct
NMTNPRM

SEQ ID NO: 191161 - protein, 7 aa, synthetic construct
NMKRPGD

SEQ ID NO: 191162 - protein, 7 aa, synthetic construct
NMKTFRD

SEQ ID NO: 191163 - protein, 7 aa, synthetic construct
EMTKARS

SEQ ID NO: 191164 - protein, 7 aa, synthetic construct
MMTRASI

SEQ ID NO: 191165 - protein, 7 aa, synthetic construct
NRTLARD

SEQ ID NO: 191166 - protein, 7 aa, synthetic construct
VMRSARD

SEQ ID NO: 191167 - protein, 7 aa, synthetic construct
MMTRSKD

SEQ ID NO: 191168 - protein, 7 aa, synthetic construct
KMTHNRD

SEQ ID NO: 191169 - protein, 7 aa, synthetic construct
NMTRRDS

SEQ ID NO: 191170 - protein, 7 aa, synthetic construct
NPDRARQ

SEQ ID NO: 191171 - protein, 7 aa, synthetic construct
DMTRGRI

SEQ ID NO: 191172 - protein, 7 aa, synthetic construct
PMVKARD

SEQ ID NO: 191173 - protein, 7 aa, synthetic construct
NKNRAVD

SEQ ID NO: 191174 - protein, 7 aa, synthetic construct
TDTRARQ

SEQ ID NO: 191175 - protein, 7 aa, synthetic construct
KMDRLRD

SEQ ID NO: 191176 - protein, 7 aa, synthetic construct
AKTRATD

SEQ ID NO: 191177 - protein, 7 aa, synthetic construct
DMTRIRS

SEQ ID NO: 191178 - protein, 7 aa, synthetic construct
NMKRSID

SEQ ID NO: 191179 - protein, 7 aa, synthetic construct
VMRQARD

SEQ ID NO: 191180 - protein, 7 aa, synthetic construct
NMVRKTD

SEQ ID NO: 191181 - protein, 7 aa, synthetic construct
AMPRARE

SEQ ID NO: 191182 - protein, 7 aa, synthetic construct
NMLRTRD

SEQ ID NO: 191183 - protein, 7 aa, synthetic construct
NMGRERP

SEQ ID NO: 191184 - protein, 7 aa, synthetic construct
NDTKARV

SEQ ID NO: 191185 - protein, 7 aa, synthetic construct
NTVRNRD

SEQ ID NO: 191186 - protein, 7 aa, synthetic construct
METRARA

SEQ ID NO: 191187 - protein, 7 aa, synthetic construct
NKTRADT

SEQ ID NO: 191188 - protein, 7 aa, synthetic construct
NMKYMRD

SEQ ID NO: 191189 - protein, 7 aa, synthetic construct
ANTRIRD

SEQ ID NO: 191190 - protein, 7 aa, synthetic construct
MMTRERI

SEQ ID NO: 191191 - protein, 7 aa, synthetic construct
FVTKARD

SEQ ID NO: 191192 - protein, 7 aa, synthetic construct
LMTRASQ

SEQ ID NO: 191193 - protein, 7 aa, synthetic construct
TMTRPRE

SEQ ID NO: 191194 - protein, 7 aa, synthetic construct
NMTRQRD

SEQ ID NO: 191195 - protein, 7 aa, synthetic construct
NMKRASD

SEQ ID NO: 191196 - protein, 7 aa, synthetic construct
NQTRLRE

SEQ ID NO: 191197 - protein, 7 aa, synthetic construct
GQTRAKD

SEQ ID NO: 191198 - protein, 7 aa, synthetic construct
NMVRSKD

SEQ ID NO: 191199 - protein, 7 aa, synthetic construct
IQNRARD

SEQ ID NO: 191200 - protein, 7 aa, synthetic construct
NIKRAPD

SEQ ID NO: 191201 - protein, 7 aa, synthetic construct
NPIRAKD

SEQ ID NO: 191202 - protein, 7 aa, synthetic construct
LDTRARP

SEQ ID NO: 191203 - protein, 7 aa, synthetic construct
EMTNARK

SEQ ID NO: 191204 - protein, 7 aa, synthetic construct
GVTRGRD

SEQ ID NO: 191205 - protein, 7 aa, synthetic construct
IMTNARM

SEQ ID NO: 191206 - protein, 7 aa, synthetic construct
NKNRASD

SEQ ID NO: 191207 - protein, 7 aa, synthetic construct
MYTKARD

SEQ ID NO: 191208 - protein, 7 aa, synthetic construct
NDTRIRP

SEQ ID NO: 191209 - protein, 7 aa, synthetic construct
TMTRTRE

SEQ ID NO: 191210 - protein, 7 aa, synthetic construct
NKGFARD

SEQ ID NO: 191211 - protein, 7 aa, synthetic construct
IDTRARV

SEQ ID NO: 191212 - protein, 7 aa, synthetic construct
YMDRARA

SEQ ID NO: 191213 - protein, 7 aa, synthetic construct
RMTKAMD

SEQ ID NO: 191214 - protein, 7 aa, synthetic construct
KLTRERD

SEQ ID NO: 191215 - protein, 7 aa, synthetic construct
NLTRKQD

SEQ ID NO: 191216 - protein, 7 aa, synthetic construct
MATRGRD

SEQ ID NO: 191217 - protein, 7 aa, synthetic construct
TITRVRD

SEQ ID NO: 191218 - protein, 7 aa, synthetic construct
NMTRQKD

SEQ ID NO: 191219 - protein, 7 aa, synthetic construct
TMPRVRD

SEQ ID NO: 191220 - protein, 7 aa, synthetic construct
DMTRQRV

SEQ ID NO: 191221 - protein, 7 aa, synthetic construct
NQERARG

SEQ ID NO: 191222 - protein, 7 aa, synthetic construct
NISRMRD

SEQ ID NO: 191223 - protein, 7 aa, synthetic construct
NMKQYRD

SEQ ID NO: 191224 - protein, 7 aa, synthetic construct
TLTRIRD

SEQ ID NO: 191225 - protein, 7 aa, synthetic construct
NMPRERQ

SEQ ID NO: 191226 - protein, 7 aa, synthetic construct
TMTRVRD

SEQ ID NO: 191227 - protein, 7 aa, synthetic construct
ITTRMRD

SEQ ID NO: 191228 - protein, 7 aa, synthetic construct
NMERAPR

SEQ ID NO: 191229 - protein, 7 aa, synthetic construct
MHTKARD

SEQ ID NO: 191230 - protein, 7 aa, synthetic construct
TMTVKRD

SEQ ID NO: 191231 - protein, 7 aa, synthetic construct
IMTRMKD

SEQ ID NO: 191232 - protein, 7 aa, synthetic construct
NMGRQKD

SEQ ID NO: 191233 - protein, 7 aa, synthetic construct
QDTRARV

SEQ ID NO: 191234 - protein, 7 aa, synthetic construct
KMVRAMD

SEQ ID NO: 191235 - protein, 7 aa, synthetic construct
YITKARD

SEQ ID NO: 191236 - protein, 7 aa, synthetic construct
NMTRVKD

SEQ ID NO: 191237 - protein, 7 aa, synthetic construct
NLGRTRD

SEQ ID NO: 191238 - protein, 7 aa, synthetic construct
SATRTRD

SEQ ID NO: 191239 - protein, 7 aa, synthetic construct
MMTRGKD

SEQ ID NO: 191240 - protein, 7 aa, synthetic construct
NDTRARP

SEQ ID NO: 191241 - protein, 7 aa, synthetic construct
NMERARQ

SEQ ID NO: 191242 - protein, 7 aa, synthetic construct
NMQRNKD

SEQ ID NO: 191243 - protein, 7 aa, synthetic construct
NMVKYRD

SEQ ID NO: 191244 - protein, 7 aa, synthetic construct
NLRLARD

SEQ ID NO: 191245 - protein, 7 aa, synthetic construct
RMPIARD

SEQ ID NO: 191246 - protein, 7 aa, synthetic construct
DMPRARN

SEQ ID NO: 191247 - protein, 7 aa, synthetic construct
NMARGRD

SEQ ID NO: 191248 - protein, 7 aa, synthetic construct
ITTRGRD

SEQ ID NO: 191249 - protein, 7 aa, synthetic construct
LDTRARI

SEQ ID NO: 191250 - protein, 7 aa, synthetic construct
NMRQAKD

SEQ ID NO: 191251 - protein, 7 aa, synthetic construct
MMTRERS

SEQ ID NO: 191252 - protein, 7 aa, synthetic construct
KMTPPRD

SEQ ID NO: 191253 - protein, 7 aa, synthetic construct
NALRNRD

SEQ ID NO: 191254 - protein, 7 aa, synthetic construct
NTARIRD

SEQ ID NO: 191255 - protein, 7 aa, synthetic construct
NMTRDKQ

SEQ ID NO: 191256 - protein, 7 aa, synthetic construct
VQPRARD

SEQ ID NO: 191257 - protein, 7 aa, synthetic construct
NIERARM

SEQ ID NO: 191258 - protein, 7 aa, synthetic construct
NKTLPRD

SEQ ID NO: 191259 - protein, 7 aa, synthetic construct
SMTRSKD

SEQ ID NO: 191260 - protein, 7 aa, synthetic construct
IMTSARA

SEQ ID NO: 191261 - protein, 7 aa, synthetic construct
QMTRERL

SEQ ID NO: 191262 - protein, 7 aa, synthetic construct
SSTRARE

SEQ ID NO: 191263 - protein, 7 aa, synthetic construct
NIERARG

SEQ ID NO: 191264 - protein, 7 aa, synthetic construct
NMLHARA

SEQ ID NO: 191265 - protein, 7 aa, synthetic construct
NMHKPRD

SEQ ID NO: 191266 - protein, 7 aa, synthetic construct
EMTRALK

SEQ ID NO: 191267 - protein, 7 aa, synthetic construct
IPTRMRD

SEQ ID NO: 191268 - protein, 7 aa, synthetic construct
YMTRAKE

SEQ ID NO: 191269 - protein, 7 aa, synthetic construct
NMTGRKD

SEQ ID NO: 191270 - protein, 7 aa, synthetic construct
DMPRARQ

SEQ ID NO: 191271 - protein, 7 aa, synthetic construct
AMIKARD

SEQ ID NO: 191272 - protein, 7 aa, synthetic construct
TMTRERM

SEQ ID NO: 191273 - protein, 7 aa, synthetic construct
MMTNARA

SEQ ID NO: 191274 - protein, 7 aa, synthetic construct
IMQRAKD

SEQ ID NO: 191275 - protein, 7 aa, synthetic construct
LQTRQRD

SEQ ID NO: 191276 - protein, 7 aa, synthetic construct
NVTRMRE

SEQ ID NO: 191277 - protein, 7 aa, synthetic construct
YMTPKRD

SEQ ID NO: 191278 - protein, 7 aa, synthetic construct
TMTRERV

SEQ ID NO: 191279 - protein, 7 aa, synthetic construct
RTTQARD

SEQ ID NO: 191280 - protein, 7 aa, synthetic construct
NKTRAEN

SEQ ID NO: 191281 - protein, 7 aa, synthetic construct
NMKRQGD

SEQ ID NO: 191282 - protein, 7 aa, synthetic construct
RMTVQRD

SEQ ID NO: 191283 - protein, 7 aa, synthetic construct
NMDRVRT

SEQ ID NO: 191284 - protein, 7 aa, synthetic construct
NTVRTRD

SEQ ID NO: 191285 - protein, 7 aa, synthetic construct
NVTRKMD

SEQ ID NO: 191286 - protein, 7 aa, synthetic construct
NPTHARG

SEQ ID NO: 191287 - protein, 7 aa, synthetic construct
NMPRMRE

SEQ ID NO: 191288 - protein, 7 aa, synthetic construct
NKTRERD

SEQ ID NO: 191289 - protein, 7 aa, synthetic construct
NMLRSRE

SEQ ID NO: 191290 - protein, 7 aa, synthetic construct
HLTKARD

SEQ ID NO: 191291 - protein, 7 aa, synthetic construct
SMTRKTD

SEQ ID NO: 191292 - protein, 7 aa, synthetic construct
NQMKARD

SEQ ID NO: 191293 - protein, 7 aa, synthetic construct
NFARAKD

SEQ ID NO: 191294 - protein, 7 aa, synthetic construct
KMTRPSD

SEQ ID NO: 191295 - protein, 7 aa, synthetic construct
NLTRERQ

SEQ ID NO: 191296 - protein, 7 aa, synthetic construct
RITPARD

SEQ ID NO: 191297 - protein, 7 aa, synthetic construct
TITRTRD

SEQ ID NO: 191298 - protein, 7 aa, synthetic construct
NDARARA

SEQ ID NO: 191299 - protein, 7 aa, synthetic construct
NFKPARD

SEQ ID NO: 191300 - protein, 7 aa, synthetic construct
NMKPYRD

SEQ ID NO: 191301 - protein, 7 aa, synthetic construct
YMTGARN

SEQ ID NO: 191302 - protein, 7 aa, synthetic construct
NMDRAKM

SEQ ID NO: 191303 - protein, 7 aa, synthetic construct
NAERARV

SEQ ID NO: 191304 - protein, 7 aa, synthetic construct
NDTRAKN

SEQ ID NO: 191305 - protein, 7 aa, synthetic construct
NITRIRD

SEQ ID NO: 191306 - protein, 7 aa, synthetic construct
LTARARD

SEQ ID NO: 191307 - protein, 7 aa, synthetic construct
QMTRERM

SEQ ID NO: 191308 - protein, 7 aa, synthetic construct
NMRTARE

SEQ ID NO: 191309 - protein, 7 aa, synthetic construct
AKTYARD

SEQ ID NO: 191310 - protein, 7 aa, synthetic construct
DPTRART

SEQ ID NO: 191311 - protein, 7 aa, synthetic construct
NIQRVRD

SEQ ID NO: 191312 - protein, 7 aa, synthetic construct
DTTRARS

SEQ ID NO: 191313 - protein, 7 aa, synthetic construct
NMQRSKD

SEQ ID NO: 191314 - protein, 7 aa, synthetic construct
NVLRQRD

SEQ ID NO: 191315 - protein, 7 aa, synthetic construct
NVTRQRD

SEQ ID NO: 191316 - protein, 7 aa, synthetic construct
NMIAKRD

SEQ ID NO: 191317 - protein, 7 aa, synthetic construct
YMGKARD

SEQ ID NO: 191318 - protein, 7 aa, synthetic construct
IQTRARD

SEQ ID NO: 191319 - protein, 7 aa, synthetic construct
SQTRARE

SEQ ID NO: 191320 - protein, 7 aa, synthetic construct
MPPRARD

SEQ ID NO: 191321 - protein, 7 aa, synthetic construct
KMGRAPD

SEQ ID NO: 191322 - protein, 7 aa, synthetic construct
VATRTRD

SEQ ID NO: 191323 - protein, 7 aa, synthetic construct
NMLNKRD

SEQ ID NO: 191324 - protein, 7 aa, synthetic construct
NTGRLRD

SEQ ID NO: 191325 - protein, 7 aa, synthetic construct
QMTRAAN

SEQ ID NO: 191326 - protein, 7 aa, synthetic construct
QMTSKRD

SEQ ID NO: 191327 - protein, 7 aa, synthetic construct
KMTRIMD

SEQ ID NO: 191328 - protein, 7 aa, synthetic construct
AMTRAAL

SEQ ID NO: 191329 - protein, 7 aa, synthetic construct
VPTRAKD

SEQ ID NO: 191330 - protein, 7 aa, synthetic construct
LMSRVRD

SEQ ID NO: 191331 - protein, 7 aa, synthetic construct
NMKRAIE

SEQ ID NO: 191332 - protein, 7 aa, synthetic construct
NMSRAKD

SEQ ID NO: 191333 - protein, 7 aa, synthetic construct
NTSRVRD

SEQ ID NO: 191334 - protein, 7 aa, synthetic construct
NDTRIRI

SEQ ID NO: 191335 - protein, 7 aa, synthetic construct
LPARARD

SEQ ID NO: 191336 - protein, 7 aa, synthetic construct
LMTNARN

SEQ ID NO: 191337 - protein, 7 aa, synthetic construct
NVTRERQ

SEQ ID NO: 191338 - protein, 7 aa, synthetic construct
NMERPRM

SEQ ID NO: 191339 - protein, 7 aa, synthetic construct
NFTKQRD

SEQ ID NO: 191340 - protein, 7 aa, synthetic construct
NIPRLRD

SEQ ID NO: 191341 - protein, 7 aa, synthetic construct
NVTHARS

SEQ ID NO: 191342 - protein, 7 aa, synthetic construct
NMIRSKD

SEQ ID NO: 191343 - protein, 7 aa, synthetic construct
GETRARV

SEQ ID NO: 191344 - protein, 7 aa, synthetic construct
NMLRAKE

SEQ ID NO: 191345 - protein, 7 aa, synthetic construct
NKTRPTD

SEQ ID NO: 191346 - protein, 7 aa, synthetic construct
QMTRARE

SEQ ID NO: 191347 - protein, 7 aa, synthetic construct
TNTRLRD

SEQ ID NO: 191348 - protein, 7 aa, synthetic construct
NMTHNRA

SEQ ID NO: 191349 - protein, 7 aa, synthetic construct
NMRVARD

SEQ ID NO: 191350 - protein, 7 aa, synthetic construct
DMMRARA

SEQ ID NO: 191351 - protein, 7 aa, synthetic construct
NLTRTRD

SEQ ID NO: 191352 - protein, 7 aa, synthetic construct
DMTRGRP

SEQ ID NO: 191353 - protein, 7 aa, synthetic construct
QDTRARA

SEQ ID NO: 191354 - protein, 7 aa, synthetic construct
NPTEARK

SEQ ID NO: 191355 - protein, 7 aa, synthetic construct
NMGLKRD

SEQ ID NO: 191356 - protein, 7 aa, synthetic construct
NMVRAHG

SEQ ID NO: 191357 - protein, 7 aa, synthetic construct
GMTKMRD

SEQ ID NO: 191358 - protein, 7 aa, synthetic construct
NMAPRRD

SEQ ID NO: 191359 - protein, 7 aa, synthetic construct
NMKRSLD

SEQ ID NO: 191360 - protein, 7 aa, synthetic construct
AMTRERP

SEQ ID NO: 191361 - protein, 7 aa, synthetic construct
NMTRVRD

SEQ ID NO: 191362 - protein, 7 aa, synthetic construct
NDTRGRM

SEQ ID NO: 191363 - protein, 7 aa, synthetic construct
MMKRAMD

SEQ ID NO: 191364 - protein, 7 aa, synthetic construct
LMMRAKD

SEQ ID NO: 191365 - protein, 7 aa, synthetic construct
RPTNARD

SEQ ID NO: 191366 - protein, 7 aa, synthetic construct
LQTRAKD

SEQ ID NO: 191367 - protein, 7 aa, synthetic construct
QVTRLRD

SEQ ID NO: 191368 - protein, 7 aa, synthetic construct
LQTRLRD

SEQ ID NO: 191369 - protein, 7 aa, synthetic construct
NKPRALD

SEQ ID NO: 191370 - protein, 7 aa, synthetic construct
HMTKQRD

SEQ ID NO: 191371 - protein, 7 aa, synthetic construct
NPPRLRD

SEQ ID NO: 191372 - protein, 7 aa, synthetic construct
SMMRPRD

SEQ ID NO: 191373 - protein, 7 aa, synthetic construct
TMTRADR

SEQ ID NO: 191374 - protein, 7 aa, synthetic construct
NMTRVRE

SEQ ID NO: 191375 - protein, 7 aa, synthetic construct
GVTRMRD

SEQ ID NO: 191376 - protein, 7 aa, synthetic construct
NLRMARD

SEQ ID NO: 191377 - protein, 7 aa, synthetic construct
NIKRASD

SEQ ID NO: 191378 - protein, 7 aa, synthetic construct
NDTRMRT

SEQ ID NO: 191379 - protein, 7 aa, synthetic construct
IMTNKRD

SEQ ID NO: 191380 - protein, 7 aa, synthetic construct
NLGRLRD

SEQ ID NO: 191381 - protein, 7 aa, synthetic construct
NTVRVRD

SEQ ID NO: 191382 - protein, 7 aa, synthetic construct
PMTRATH

SEQ ID NO: 191383 - protein, 7 aa, synthetic construct
NVTPKRD

SEQ ID NO: 191384 - protein, 7 aa, synthetic construct
NMNRPRE

SEQ ID NO: 191385 - protein, 7 aa, synthetic construct
NPMRIRD

SEQ ID NO: 191386 - protein, 7 aa, synthetic construct
NLTRVRE

SEQ ID NO: 191387 - protein, 7 aa, synthetic construct
AMTRVRE

SEQ ID NO: 191388 - protein, 7 aa, synthetic construct
NMRVQRD

SEQ ID NO: 191389 - protein, 7 aa, synthetic construct
NDLRARA

SEQ ID NO: 191390 - protein, 7 aa, synthetic construct
SLTRIRD

SEQ ID NO: 191391 - protein, 7 aa, synthetic construct
NKQRAMD

SEQ ID NO: 191392 - protein, 7 aa, synthetic construct
QMTRAGG

SEQ ID NO: 191393 - protein, 7 aa, synthetic construct
PVTKARD

SEQ ID NO: 191394 - protein, 7 aa, synthetic construct
HMIKARD

SEQ ID NO: 191395 - protein, 7 aa, synthetic construct
NIGRVRD

SEQ ID NO: 191396 - protein, 7 aa, synthetic construct
SMRGARD

SEQ ID NO: 191397 - protein, 7 aa, synthetic construct
METRARS

SEQ ID NO: 191398 - protein, 7 aa, synthetic construct
NMVKMRD

SEQ ID NO: 191399 - protein, 7 aa, synthetic construct
NKHPARD

SEQ ID NO: 191400 - protein, 7 aa, synthetic construct
NVRIARD

SEQ ID NO: 191401 - protein, 7 aa, synthetic construct
NTTEARK

SEQ ID NO: 191402 - protein, 7 aa, synthetic construct
NTLRMRD

SEQ ID NO: 191403 - protein, 7 aa, synthetic construct
RMTTPRD

SEQ ID NO: 191404 - protein, 7 aa, synthetic construct
HMKIARD

SEQ ID NO: 191405 - protein, 7 aa, synthetic construct
NYTKTRD

SEQ ID NO: 191406 - protein, 7 aa, synthetic construct
KMIRAQD

SEQ ID NO: 191407 - protein, 7 aa, synthetic construct
VKTRAMD

SEQ ID NO: 191408 - protein, 7 aa, synthetic construct
NAMRPRD

SEQ ID NO: 191409 - protein, 7 aa, synthetic construct
PMDRART

SEQ ID NO: 191410 - protein, 7 aa, synthetic construct
IMPRIRD

SEQ ID NO: 191411 - protein, 7 aa, synthetic construct
NMKRMTD

SEQ ID NO: 191412 - protein, 7 aa, synthetic construct
GMTKFRD

SEQ ID NO: 191413 - protein, 7 aa, synthetic construct
SMSRVRD

SEQ ID NO: 191414 - protein, 7 aa, synthetic construct
PMTRLRE

SEQ ID NO: 191415 - protein, 7 aa, synthetic construct
WMNKARD

SEQ ID NO: 191416 - protein, 7 aa, synthetic construct
NMQRIKD

SEQ ID NO: 191417 - protein, 7 aa, synthetic construct
KMTRASD

SEQ ID NO: 191418 - protein, 7 aa, synthetic construct
MMTRASL

SEQ ID NO: 191419 - protein, 7 aa, synthetic construct
QMTGARN

SEQ ID NO: 191420 - protein, 7 aa, synthetic construct
NLTRPRE

SEQ ID NO: 191421 - protein, 7 aa, synthetic construct
NMGRVRD

SEQ ID NO: 191422 - protein, 7 aa, synthetic construct
YMTKLRD

SEQ ID NO: 191423 - protein, 7 aa, synthetic construct
NVTRVKD

SEQ ID NO: 191424 - protein, 7 aa, synthetic construct
AMKRATD

SEQ ID NO: 191425 - protein, 7 aa, synthetic construct
MMPRTRD

SEQ ID NO: 191426 - protein, 7 aa, synthetic construct
NKTRPSD

SEQ ID NO: 191427 - protein, 7 aa, synthetic construct
NMKRSPD

SEQ ID NO: 191428 - protein, 7 aa, synthetic construct
PMTRADK

SEQ ID NO: 191429 - protein, 7 aa, synthetic construct
NDLRARI

SEQ ID NO: 191430 - protein, 7 aa, synthetic construct
KMTKAFD

SEQ ID NO: 191431 - protein, 7 aa, synthetic construct
NMTHIRS

SEQ ID NO: 191432 - protein, 7 aa, synthetic construct
NMTRKEI

SEQ ID NO: 191433 - protein, 7 aa, synthetic construct
NARGARD

SEQ ID NO: 191434 - protein, 7 aa, synthetic construct
NETRNRA

SEQ ID NO: 191435 - protein, 7 aa, synthetic construct
TMTNARA

SEQ ID NO: 191436 - protein, 7 aa, synthetic construct
AMTRPKD

SEQ ID NO: 191437 - protein, 7 aa, synthetic construct
KMGRAMD

SEQ ID NO: 191438 - protein, 7 aa, synthetic construct
TMTRDRG

SEQ ID NO: 191439 - protein, 7 aa, synthetic construct
NLLRARE

SEQ ID NO: 191440 - protein, 7 aa, synthetic construct
NVSRAKD

SEQ ID NO: 191441 - protein, 7 aa, synthetic construct
NMIRAKD

SEQ ID NO: 191442 - protein, 7 aa, synthetic construct
VRTSARD

SEQ ID NO: 191443 - protein, 7 aa, synthetic construct
LPNRHSS

SEQ ID NO: 191444 - protein, 7 aa, synthetic construct
RPRVDTS

SEQ ID NO: 191445 - protein, 7 aa, synthetic construct
KPNRDKD

SEQ ID NO: 191446 - protein, 7 aa, synthetic construct
RPGRQDS

SEQ ID NO: 191447 - protein, 7 aa, synthetic construct
RPNVDNR

SEQ ID NO: 191448 - protein, 7 aa, synthetic construct
RLNRDTV

SEQ ID NO: 191449 - protein, 7 aa, synthetic construct
QKNRDTN

SEQ ID NO: 191450 - protein, 7 aa, synthetic construct
RVQRDSS

SEQ ID NO: 191451 - protein, 7 aa, synthetic construct
RPERGAS

SEQ ID NO: 191452 - protein, 7 aa, synthetic construct
RPNFSTA

SEQ ID NO: 191453 - protein, 7 aa, synthetic construct
RPQRDPN

SEQ ID NO: 191454 - protein, 7 aa, synthetic construct
RPDRGTQ

SEQ ID NO: 191455 - protein, 7 aa, synthetic construct
VPKRDTV

SEQ ID NO: 191456 - protein, 7 aa, synthetic construct
IGNRDTK

SEQ ID NO: 191457 - protein, 7 aa, synthetic construct
YPSRDRS

SEQ ID NO: 191458 - protein, 7 aa, synthetic construct
YPNRDKA

SEQ ID NO: 191459 - protein, 7 aa, synthetic construct
RTNIDTR

SEQ ID NO: 191460 - protein, 7 aa, synthetic construct
RPARELS

SEQ ID NO: 191461 - protein, 7 aa, synthetic construct
KPNRDIF

SEQ ID NO: 191462 - protein, 7 aa, synthetic construct
RMNPDTR

SEQ ID NO: 191463 - protein, 7 aa, synthetic construct
RMNRDGV

SEQ ID NO: 191464 - protein, 7 aa, synthetic construct
RPERDRT

SEQ ID NO: 191465 - protein, 7 aa, synthetic construct
RPVRDHV

SEQ ID NO: 191466 - protein, 7 aa, synthetic construct
RGKQDTS

SEQ ID NO: 191467 - protein, 7 aa, synthetic construct
RVIRDTG

SEQ ID NO: 191468 - protein, 7 aa, synthetic construct
RINPHTS

SEQ ID NO: 191469 - protein, 7 aa, synthetic construct
RANRDGS

SEQ ID NO: 191470 - protein, 7 aa, synthetic construct
RPQRDQG

SEQ ID NO: 191471 - protein, 7 aa, synthetic construct
RPSRDMS

SEQ ID NO: 191472 - protein, 7 aa, synthetic construct
RAQRDTI

SEQ ID NO: 191473 - protein, 7 aa, synthetic construct
KINRDTA

SEQ ID NO: 191474 - protein, 7 aa, synthetic construct
RPSRDGF

SEQ ID NO: 191475 - protein, 7 aa, synthetic construct
RPARDLT

SEQ ID NO: 191476 - protein, 7 aa, synthetic construct
RPNRENL

SEQ ID NO: 191477 - protein, 7 aa, synthetic construct
RATRDTP

SEQ ID NO: 191478 - protein, 7 aa, synthetic construct
RPTREMS

SEQ ID NO: 191479 - protein, 7 aa, synthetic construct
RPSRDTG

SEQ ID NO: 191480 - protein, 7 aa, synthetic construct
RDTRTTS

SEQ ID NO: 191481 - protein, 7 aa, synthetic construct
LINRDKS

SEQ ID NO: 191482 - protein, 7 aa, synthetic construct
KPSRDMS

SEQ ID NO: 191483 - protein, 7 aa, synthetic construct
RINRETP

SEQ ID NO: 191484 - protein, 7 aa, synthetic construct
RLSRDTV

SEQ ID NO: 191485 - protein, 7 aa, synthetic construct
RAGRDMS

SEQ ID NO: 191486 - protein, 7 aa, synthetic construct
RDKRDVS

SEQ ID NO: 191487 - protein, 7 aa, synthetic construct
RPNRIDG

SEQ ID NO: 191488 - protein, 7 aa, synthetic construct
KPNRDAN

SEQ ID NO: 191489 - protein, 7 aa, synthetic construct
RPIHMTS

SEQ ID NO: 191490 - protein, 7 aa, synthetic construct
RGTRDGS

SEQ ID NO: 191491 - protein, 7 aa, synthetic construct
RPARDTY

SEQ ID NO: 191492 - protein, 7 aa, synthetic construct
DNNRKTS

SEQ ID NO: 191493 - protein, 7 aa, synthetic construct
RTDRNTS

SEQ ID NO: 191494 - protein, 7 aa, synthetic construct
YPKRDQS

SEQ ID NO: 191495 - protein, 7 aa, synthetic construct
MPKRDTY

SEQ ID NO: 191496 - protein, 7 aa, synthetic construct
RPTRDVT

SEQ ID NO: 191497 - protein, 7 aa, synthetic construct
PPKRDTQ

SEQ ID NO: 191498 - protein, 7 aa, synthetic construct
RPTHDRS

SEQ ID NO: 191499 - protein, 7 aa, synthetic construct
RQVRDNS

SEQ ID NO: 191500 - protein, 7 aa, synthetic construct
RVTRETS

SEQ ID NO: 191501 - protein, 7 aa, synthetic construct
ARPRDTS

SEQ ID NO: 191502 - protein, 7 aa, synthetic construct
RPYKDQS

SEQ ID NO: 191503 - protein, 7 aa, synthetic construct
TKFRDTS

SEQ ID NO: 191504 - protein, 7 aa, synthetic construct
WPNKPTS

SEQ ID NO: 191505 - protein, 7 aa, synthetic construct
MPNRIHS

SEQ ID NO: 191506 - protein, 7 aa, synthetic construct
RPTRDVN

SEQ ID NO: 191507 - protein, 7 aa, synthetic construct
LPHRDTK

SEQ ID NO: 191508 - protein, 7 aa, synthetic construct
RPERHQS

SEQ ID NO: 191509 - protein, 7 aa, synthetic construct
FKNRDTN

SEQ ID NO: 191510 - protein, 7 aa, synthetic construct
KFNRDTP

SEQ ID NO: 191511 - protein, 7 aa, synthetic construct
RMARDMS

SEQ ID NO: 191512 - protein, 7 aa, synthetic construct
RPVRDVN

SEQ ID NO: 191513 - protein, 7 aa, synthetic construct
GKSRDTS

SEQ ID NO: 191514 - protein, 7 aa, synthetic construct
RPDRPTS

SEQ ID NO: 191515 - protein, 7 aa, synthetic construct
RGVRDNS

SEQ ID NO: 191516 - protein, 7 aa, synthetic construct
KPNRDMF

SEQ ID NO: 191517 - protein, 7 aa, synthetic construct
RMARDNS

SEQ ID NO: 191518 - protein, 7 aa, synthetic construct
AKNRDPS

SEQ ID NO: 191519 - protein, 7 aa, synthetic construct
RPERHMS

SEQ ID NO: 191520 - protein, 7 aa, synthetic construct
RQTRDNS

SEQ ID NO: 191521 - protein, 7 aa, synthetic construct
RPQREAS

SEQ ID NO: 191522 - protein, 7 aa, synthetic construct
RPDRDPR

SEQ ID NO: 191523 - protein, 7 aa, synthetic construct
KPNRDVY

SEQ ID NO: 191524 - protein, 7 aa, synthetic construct
KPNRDMG

SEQ ID NO: 191525 - protein, 7 aa, synthetic construct
REKRDFS

SEQ ID NO: 191526 - protein, 7 aa, synthetic construct
KPNREPS

SEQ ID NO: 191527 - protein, 7 aa, synthetic construct
QNKRDTS

SEQ ID NO: 191528 - protein, 7 aa, synthetic construct
RQGRDGS

SEQ ID NO: 191529 - protein, 7 aa, synthetic construct
RTPRDVS

SEQ ID NO: 191530 - protein, 7 aa, synthetic construct
RPRDPTS

SEQ ID NO: 191531 - protein, 7 aa, synthetic construct
RPVRQES

SEQ ID NO: 191532 - protein, 7 aa, synthetic construct
RPHRDTP

SEQ ID NO: 191533 - protein, 7 aa, synthetic construct
RPRSDTG

SEQ ID NO: 191534 - protein, 7 aa, synthetic construct
RPQRDNA

SEQ ID NO: 191535 - protein, 7 aa, synthetic construct
RASKDTS

SEQ ID NO: 191536 - protein, 7 aa, synthetic construct
AKSRDTS

SEQ ID NO: 191537 - protein, 7 aa, synthetic construct
KINRDTI

SEQ ID NO: 191538 - protein, 7 aa, synthetic construct
MPKRDFS

SEQ ID NO: 191539 - protein, 7 aa, synthetic construct
RVTRDTM

SEQ ID NO: 191540 - protein, 7 aa, synthetic construct
RPVRVTE

SEQ ID NO: 191541 - protein, 7 aa, synthetic construct
RPTRDMG

SEQ ID NO: 191542 - protein, 7 aa, synthetic construct
RPARDAQ

SEQ ID NO: 191543 - protein, 7 aa, synthetic construct
RPTRDTI

SEQ ID NO: 191544 - protein, 7 aa, synthetic construct
RPGRDNF

SEQ ID NO: 191545 - protein, 7 aa, synthetic construct
PPKRDTM

SEQ ID NO: 191546 - protein, 7 aa, synthetic construct
RPARDVH

SEQ ID NO: 191547 - protein, 7 aa, synthetic construct
RPKHETS

SEQ ID NO: 191548 - protein, 7 aa, synthetic construct
RDHRLTS

SEQ ID NO: 191549 - protein, 7 aa, synthetic construct
RMSRDVS

SEQ ID NO: 191550 - protein, 7 aa, synthetic construct
RPERPTY

SEQ ID NO: 191551 - protein, 7 aa, synthetic construct
RNPRDAS

SEQ ID NO: 191552 - protein, 7 aa, synthetic construct
RTNRDTG

SEQ ID NO: 191553 - protein, 7 aa, synthetic construct
RVNRQES

SEQ ID NO: 191554 - protein, 7 aa, synthetic construct
RQARDSS

SEQ ID NO: 191555 - protein, 7 aa, synthetic construct
MRNRDTV

SEQ ID NO: 191556 - protein, 7 aa, synthetic construct
RPNRDMS

SEQ ID NO: 191557 - protein, 7 aa, synthetic construct
RTNRLES

SEQ ID NO: 191558 - protein, 7 aa, synthetic construct
SKNRDNS

SEQ ID NO: 191559 - protein, 7 aa, synthetic construct
RKDRDTF

SEQ ID NO: 191560 - protein, 7 aa, synthetic construct
RANRDGA

SEQ ID NO: 191561 - protein, 7 aa, synthetic construct
KQARDTS

SEQ ID NO: 191562 - protein, 7 aa, synthetic construct
RPGRDIN

SEQ ID NO: 191563 - protein, 7 aa, synthetic construct
RPTRDMQ

SEQ ID NO: 191564 - protein, 7 aa, synthetic construct
KPQRDTL

SEQ ID NO: 191565 - protein, 7 aa, synthetic construct
KPNRDTF

SEQ ID NO: 191566 - protein, 7 aa, synthetic construct
RANREIS

SEQ ID NO: 191567 - protein, 7 aa, synthetic construct
RPTRDLS

SEQ ID NO: 191568 - protein, 7 aa, synthetic construct
RDNRTGS

SEQ ID NO: 191569 - protein, 7 aa, synthetic construct
KPHKDTS

SEQ ID NO: 191570 - protein, 7 aa, synthetic construct
RPNYKDS

SEQ ID NO: 191571 - protein, 7 aa, synthetic construct
RSNRLTE

SEQ ID NO: 191572 - protein, 7 aa, synthetic construct
KANRDTQ

SEQ ID NO: 191573 - protein, 7 aa, synthetic construct
RPHNITS

SEQ ID NO: 191574 - protein, 7 aa, synthetic construct
YKNRDTV

SEQ ID NO: 191575 - protein, 7 aa, synthetic construct
RSPRDTL

SEQ ID NO: 191576 - protein, 7 aa, synthetic construct
RQNRDSV

SEQ ID NO: 191577 - protein, 7 aa, synthetic construct
LKMRDTS

SEQ ID NO: 191578 - protein, 7 aa, synthetic construct
RATRDTI

SEQ ID NO: 191579 - protein, 7 aa, synthetic construct
GFNRDTK

SEQ ID NO: 191580 - protein, 7 aa, synthetic construct
ISNRDTK

SEQ ID NO: 191581 - protein, 7 aa, synthetic construct
KFNRDNS

SEQ ID NO: 191582 - protein, 7 aa, synthetic construct
RINRDNI

SEQ ID NO: 191583 - protein, 7 aa, synthetic construct
RPNRGDV

SEQ ID NO: 191584 - protein, 7 aa, synthetic construct
RPQRDMM

SEQ ID NO: 191585 - protein, 7 aa, synthetic construct
RASRDTA

SEQ ID NO: 191586 - protein, 7 aa, synthetic construct
IKQRDTS

SEQ ID NO: 191587 - protein, 7 aa, synthetic construct
KPMRDTS

SEQ ID NO: 191588 - protein, 7 aa, synthetic construct
RAKFDTS

SEQ ID NO: 191589 - protein, 7 aa, synthetic construct
RPNRNDG

SEQ ID NO: 191590 - protein, 7 aa, synthetic construct
RINRETM

SEQ ID NO: 191591 - protein, 7 aa, synthetic construct
RPTRTES

SEQ ID NO: 191592 - protein, 7 aa, synthetic construct
RPNRDAM

SEQ ID NO: 191593 - protein, 7 aa, synthetic construct
RSLRDTG

SEQ ID NO: 191594 - protein, 7 aa, synthetic construct
MSKRDTS

SEQ ID NO: 191595 - protein, 7 aa, synthetic construct
RGNKDTF

SEQ ID NO: 191596 - protein, 7 aa, synthetic construct
KPNRDIT

SEQ ID NO: 191597 - protein, 7 aa, synthetic construct
RPVRDNF

SEQ ID NO: 191598 - protein, 7 aa, synthetic construct
RAARDPS

SEQ ID NO: 191599 - protein, 7 aa, synthetic construct
KPIRDHS

SEQ ID NO: 191600 - protein, 7 aa, synthetic construct
RSPRDVS

SEQ ID NO: 191601 - protein, 7 aa, synthetic construct
RTERMTS

SEQ ID NO: 191602 - protein, 7 aa, synthetic construct
RDGRQTS

SEQ ID NO: 191603 - protein, 7 aa, synthetic construct
RPRNDTM

SEQ ID NO: 191604 - protein, 7 aa, synthetic construct
RPVRETT

SEQ ID NO: 191605 - protein, 7 aa, synthetic construct
RTNRVES

SEQ ID NO: 191606 - protein, 7 aa, synthetic construct
RPERQSS

SEQ ID NO: 191607 - protein, 7 aa, synthetic construct
RPRVDMS

SEQ ID NO: 191608 - protein, 7 aa, synthetic construct
KPFRDVS

SEQ ID NO: 191609 - protein, 7 aa, synthetic construct
RQNRDIS

SEQ ID NO: 191610 - protein, 7 aa, synthetic construct
RVNRDGG

SEQ ID NO: 191611 - protein, 7 aa, synthetic construct
RPSRDNG

SEQ ID NO: 191612 - protein, 7 aa, synthetic construct
RPRVDVS

SEQ ID NO: 191613 - protein, 7 aa, synthetic construct
RPERMSS

SEQ ID NO: 191614 - protein, 7 aa, synthetic construct
GMNRDKS

SEQ ID NO: 191615 - protein, 7 aa, synthetic construct
YPNRDKQ

SEQ ID NO: 191616 - protein, 7 aa, synthetic construct
YPVRDRS

SEQ ID NO: 191617 - protein, 7 aa, synthetic construct
RPQRDVN

SEQ ID NO: 191618 - protein, 7 aa, synthetic construct
RPIHTTS

SEQ ID NO: 191619 - protein, 7 aa, synthetic construct
KKNYDTS

SEQ ID NO: 191620 - protein, 7 aa, synthetic construct
KPTRDYS

SEQ ID NO: 191621 - protein, 7 aa, synthetic construct
SKNRDQS

SEQ ID NO: 191622 - protein, 7 aa, synthetic construct
GINRDKS

SEQ ID NO: 191623 - protein, 7 aa, synthetic construct
KMNRDAS

SEQ ID NO: 191624 - protein, 7 aa, synthetic construct
KPNRDMM

SEQ ID NO: 191625 - protein, 7 aa, synthetic construct
RGARDTP

SEQ ID NO: 191626 - protein, 7 aa, synthetic construct
RGNRVES

SEQ ID NO: 191627 - protein, 7 aa, synthetic construct
RKDRDTT

SEQ ID NO: 191628 - protein, 7 aa, synthetic construct
RPMRDNL

SEQ ID NO: 191629 - protein, 7 aa, synthetic construct
RENRIAS

SEQ ID NO: 191630 - protein, 7 aa, synthetic construct
RPQRDLT

SEQ ID NO: 191631 - protein, 7 aa, synthetic construct
RGDRNTS

SEQ ID NO: 191632 - protein, 7 aa, synthetic construct
RPHAMTS

SEQ ID NO: 191633 - protein, 7 aa, synthetic construct
RANREGS

SEQ ID NO: 191634 - protein, 7 aa, synthetic construct
RQPRDTT

SEQ ID NO: 191635 - protein, 7 aa, synthetic construct
RPRIDGS

SEQ ID NO: 191636 - protein, 7 aa, synthetic construct
RPARDIV

SEQ ID NO: 191637 - protein, 7 aa, synthetic construct
QKNRDTF

SEQ ID NO: 191638 - protein, 7 aa, synthetic construct
HPKRDMS

SEQ ID NO: 191639 - protein, 7 aa, synthetic construct
KLIRDTS

SEQ ID NO: 191640 - protein, 7 aa, synthetic construct
ITNRDTR

SEQ ID NO: 191641 - protein, 7 aa, synthetic construct
KPARDTM

SEQ ID NO: 191642 - protein, 7 aa, synthetic construct
EPNRATK

SEQ ID NO: 191643 - protein, 7 aa, synthetic construct
RIDRQTS

SEQ ID NO: 191644 - protein, 7 aa, synthetic construct
NPKRDTS

SEQ ID NO: 191645 - protein, 7 aa, synthetic construct
RPTREPS

SEQ ID NO: 191646 - protein, 7 aa, synthetic construct
IPNRETR

SEQ ID NO: 191647 - protein, 7 aa, synthetic construct
RANRDAP

SEQ ID NO: 191648 - protein, 7 aa, synthetic construct
RPERGTY

SEQ ID NO: 191649 - protein, 7 aa, synthetic construct
RANRDSP

SEQ ID NO: 191650 - protein, 7 aa, synthetic construct
NKGRDTS

SEQ ID NO: 191651 - protein, 7 aa, synthetic construct
RPNRLDA

SEQ ID NO: 191652 - protein, 7 aa, synthetic construct
RANREFS

SEQ ID NO: 191653 - protein, 7 aa, synthetic construct
RTNIDTK

SEQ ID NO: 191654 - protein, 7 aa, synthetic construct
RLPRDTI

SEQ ID NO: 191655 - protein, 7 aa, synthetic construct
RTNKDYS

SEQ ID NO: 191656 - protein, 7 aa, synthetic construct
VKARDTS

SEQ ID NO: 191657 - protein, 7 aa, synthetic construct
RPGRTDS

SEQ ID NO: 191658 - protein, 7 aa, synthetic construct
QPKRDSS

SEQ ID NO: 191659 - protein, 7 aa, synthetic construct
RPDRATS

SEQ ID NO: 191660 - protein, 7 aa, synthetic construct
RPVRDNI

SEQ ID NO: 191661 - protein, 7 aa, synthetic construct
RPARDAS

SEQ ID NO: 191662 - protein, 7 aa, synthetic construct
DPNRIRS

SEQ ID NO: 191663 - protein, 7 aa, synthetic construct
GRNKDTS

SEQ ID NO: 191664 - protein, 7 aa, synthetic construct
IRVRDTS

SEQ ID NO: 191665 - protein, 7 aa, synthetic construct
RPSRDAM

SEQ ID NO: 191666 - protein, 7 aa, synthetic construct
RVTRDTG

SEQ ID NO: 191667 - protein, 7 aa, synthetic construct
RGNRDVS

SEQ ID NO: 191668 - protein, 7 aa, synthetic construct
RPFKDVS

SEQ ID NO: 191669 - protein, 7 aa, synthetic construct
KPNRDIN

SEQ ID NO: 191670 - protein, 7 aa, synthetic construct
RANRDSV

SEQ ID NO: 191671 - protein, 7 aa, synthetic construct
RPIRDTM

SEQ ID NO: 191672 - protein, 7 aa, synthetic construct
RPSRDGV

SEQ ID NO: 191673 - protein, 7 aa, synthetic construct
RANRETM

SEQ ID NO: 191674 - protein, 7 aa, synthetic construct
VPRRDMS

SEQ ID NO: 191675 - protein, 7 aa, synthetic construct
RMNKDTS

SEQ ID NO: 191676 - protein, 7 aa, synthetic construct
RPTRETV

SEQ ID NO: 191677 - protein, 7 aa, synthetic construct
RPQRDTQ

SEQ ID NO: 191678 - protein, 7 aa, synthetic construct
RPERHTT

SEQ ID NO: 191679 - protein, 7 aa, synthetic construct
RPNQDSR

SEQ ID NO: 191680 - protein, 7 aa, synthetic construct
DPNRSKS

SEQ ID NO: 191681 - protein, 7 aa, synthetic construct
KPNRPDS

SEQ ID NO: 191682 - protein, 7 aa, synthetic construct
RKNEPTS

SEQ ID NO: 191683 - protein, 7 aa, synthetic construct
RMDRTTS

SEQ ID NO: 191684 - protein, 7 aa, synthetic construct
RQKGDTS

SEQ ID NO: 191685 - protein, 7 aa, synthetic construct
RPTRDFG

SEQ ID NO: 191686 - protein, 7 aa, synthetic construct
KPMRDLS

SEQ ID NO: 191687 - protein, 7 aa, synthetic construct
KMLRDTS

SEQ ID NO: 191688 - protein, 7 aa, synthetic construct
RPRTDTV

SEQ ID NO: 191689 - protein, 7 aa, synthetic construct
RSARDTT

SEQ ID NO: 191690 - protein, 7 aa, synthetic construct
RPNRMET

SEQ ID NO: 191691 - protein, 7 aa, synthetic construct
RTNRDGI

SEQ ID NO: 191692 - protein, 7 aa, synthetic construct
RSNRETT

SEQ ID NO: 191693 - protein, 7 aa, synthetic construct
RAVRDIS

SEQ ID NO: 191694 - protein, 7 aa, synthetic construct
RPHKETS

SEQ ID NO: 191695 - protein, 7 aa, synthetic construct
RPVRDAT

SEQ ID NO: 191696 - protein, 7 aa, synthetic construct
KENRPTS

SEQ ID NO: 191697 - protein, 7 aa, synthetic construct
KNNRDTF

SEQ ID NO: 191698 - protein, 7 aa, synthetic construct
RPAHQTS

SEQ ID NO: 191699 - protein, 7 aa, synthetic construct
RTQRDTT

SEQ ID NO: 191700 - protein, 7 aa, synthetic construct
RPARDII

SEQ ID NO: 191701 - protein, 7 aa, synthetic construct
KPNRGDS

SEQ ID NO: 191702 - protein, 7 aa, synthetic construct
YVKRDTS

SEQ ID NO: 191703 - protein, 7 aa, synthetic construct
RPARDDR

SEQ ID NO: 191704 - protein, 7 aa, synthetic construct
VLNRDKS

SEQ ID NO: 191705 - protein, 7 aa, synthetic construct
GTNRDKS

SEQ ID NO: 191706 - protein, 7 aa, synthetic construct
RPHKDIS

SEQ ID NO: 191707 - protein, 7 aa, synthetic construct
TKMRDTS

SEQ ID NO: 191708 - protein, 7 aa, synthetic construct
RPARDEK

SEQ ID NO: 191709 - protein, 7 aa, synthetic construct
RPLRDAG

SEQ ID NO: 191710 - protein, 7 aa, synthetic construct
RPNRDNM

SEQ ID NO: 191711 - protein, 7 aa, synthetic construct
RPMRETL

SEQ ID NO: 191712 - protein, 7 aa, synthetic construct
RGARDTI

SEQ ID NO: 191713 - protein, 7 aa, synthetic construct
RITRDTG

SEQ ID NO: 191714 - protein, 7 aa, synthetic construct
RPHADRS

SEQ ID NO: 191715 - protein, 7 aa, synthetic construct
RENRMIS

SEQ ID NO: 191716 - protein, 7 aa, synthetic construct
RANKDTF

SEQ ID NO: 191717 - protein, 7 aa, synthetic construct
RNARDNS

SEQ ID NO: 191718 - protein, 7 aa, synthetic construct
KPNRDPF

SEQ ID NO: 191719 - protein, 7 aa, synthetic construct
RIPRETS

SEQ ID NO: 191720 - protein, 7 aa, synthetic construct
LPRRDTN

SEQ ID NO: 191721 - protein, 7 aa, synthetic construct
RANMDTR

SEQ ID NO: 191722 - protein, 7 aa, synthetic construct
RPARETI

SEQ ID NO: 191723 - protein, 7 aa, synthetic construct
RPKHDTL

SEQ ID NO: 191724 - protein, 7 aa, synthetic construct
RPMRDAL

SEQ ID NO: 191725 - protein, 7 aa, synthetic construct
RPVRDPQ

SEQ ID NO: 191726 - protein, 7 aa, synthetic construct
EKNRPTS

SEQ ID NO: 191727 - protein, 7 aa, synthetic construct
RPIRDNI

SEQ ID NO: 191728 - protein, 7 aa, synthetic construct
IIKRDTS

SEQ ID NO: 191729 - protein, 7 aa, synthetic construct
RPNRTGD

SEQ ID NO: 191730 - protein, 7 aa, synthetic construct
KPVRDTM

SEQ ID NO: 191731 - protein, 7 aa, synthetic construct
RINRVES

SEQ ID NO: 191732 - protein, 7 aa, synthetic construct
APHRSTS

SEQ ID NO: 191733 - protein, 7 aa, synthetic construct
KLNRDVS

SEQ ID NO: 191734 - protein, 7 aa, synthetic construct
RPNERAS

SEQ ID NO: 191735 - protein, 7 aa, synthetic construct
IKNRDPS

SEQ ID NO: 191736 - protein, 7 aa, synthetic construct
RQNRENS

SEQ ID NO: 191737 - protein, 7 aa, synthetic construct
RPQRDIA

SEQ ID NO: 191738 - protein, 7 aa, synthetic construct
RMGRDTP

SEQ ID NO: 191739 - protein, 7 aa, synthetic construct
RPNARES

SEQ ID NO: 191740 - protein, 7 aa, synthetic construct
RPNREAM

SEQ ID NO: 191741 - protein, 7 aa, synthetic construct
RSNREAS

SEQ ID NO: 191742 - protein, 7 aa, synthetic construct
HPERKTS

SEQ ID NO: 191743 - protein, 7 aa, synthetic construct
NKARDTS

SEQ ID NO: 191744 - protein, 7 aa, synthetic construct
SKNRDTS

SEQ ID NO: 191745 - protein, 7 aa, synthetic construct
LIKRDTS

SEQ ID NO: 191746 - protein, 7 aa, synthetic construct
RANRDQA

SEQ ID NO: 191747 - protein, 7 aa, synthetic construct
RPSRDVM

SEQ ID NO: 191748 - protein, 7 aa, synthetic construct
QPNRDKQ

SEQ ID NO: 191749 - protein, 7 aa, synthetic construct
RMPRDMS

SEQ ID NO: 191750 - protein, 7 aa, synthetic construct
RVNRDTA

SEQ ID NO: 191751 - protein, 7 aa, synthetic construct
RPSRETM

SEQ ID NO: 191752 - protein, 7 aa, synthetic construct
RDSRTTS

SEQ ID NO: 191753 - protein, 7 aa, synthetic construct
SKGRDTS

SEQ ID NO: 191754 - protein, 7 aa, synthetic construct
AKNRDNS

SEQ ID NO: 191755 - protein, 7 aa, synthetic construct
GPDRRTS

SEQ ID NO: 191756 - protein, 7 aa, synthetic construct
RATRDVS

SEQ ID NO: 191757 - protein, 7 aa, synthetic construct
FPKRDTV

SEQ ID NO: 191758 - protein, 7 aa, synthetic construct
RQTRDIS

SEQ ID NO: 191759 - protein, 7 aa, synthetic construct
QVNRDKS

SEQ ID NO: 191760 - protein, 7 aa, synthetic construct
RPQRADS

SEQ ID NO: 191761 - protein, 7 aa, synthetic construct
RAQRDTT

SEQ ID NO: 191762 - protein, 7 aa, synthetic construct
FPKRDTS

SEQ ID NO: 191763 - protein, 7 aa, synthetic construct
RINRDTV

SEQ ID NO: 191764 - protein, 7 aa, synthetic construct
RPPRDTY

SEQ ID NO: 191765 - protein, 7 aa, synthetic construct
RYNKETS

SEQ ID NO: 191766 - protein, 7 aa, synthetic construct
RPTRDTS

SEQ ID NO: 191767 - protein, 7 aa, synthetic construct
RDGRPTS

SEQ ID NO: 191768 - protein, 7 aa, synthetic construct
GPHRATS

SEQ ID NO: 191769 - protein, 7 aa, synthetic construct
RPVHDTR

SEQ ID NO: 191770 - protein, 7 aa, synthetic construct
GRNRDTV

SEQ ID NO: 191771 - protein, 7 aa, synthetic construct
RPVRDTV

SEQ ID NO: 191772 - protein, 7 aa, synthetic construct
DPKRDRS

SEQ ID NO: 191773 - protein, 7 aa, synthetic construct
RADRATS

SEQ ID NO: 191774 - protein, 7 aa, synthetic construct
VPHRPTS

SEQ ID NO: 191775 - protein, 7 aa, synthetic construct
IPKRDSS

SEQ ID NO: 191776 - protein, 7 aa, synthetic construct
RISRDTV

SEQ ID NO: 191777 - protein, 7 aa, synthetic construct
RPSRDMN

SEQ ID NO: 191778 - protein, 7 aa, synthetic construct
RTNRDQV

SEQ ID NO: 191779 - protein, 7 aa, synthetic construct
KGNRDTV

SEQ ID NO: 191780 - protein, 7 aa, synthetic construct
RPERPTI

SEQ ID NO: 191781 - protein, 7 aa, synthetic construct
KPDRDTR

SEQ ID NO: 191782 - protein, 7 aa, synthetic construct
RQNRDQV

SEQ ID NO: 191783 - protein, 7 aa, synthetic construct
RPNRDPM

SEQ ID NO: 191784 - protein, 7 aa, synthetic construct
RSNREVS

SEQ ID NO: 191785 - protein, 7 aa, synthetic construct
RQNRDMV

SEQ ID NO: 191786 - protein, 7 aa, synthetic construct
RVNREAS

SEQ ID NO: 191787 - protein, 7 aa, synthetic construct
RPGRDTV

SEQ ID NO: 191788 - protein, 7 aa, synthetic construct
RPRMDGS

SEQ ID NO: 191789 - protein, 7 aa, synthetic construct
RQRTDTS

SEQ ID NO: 191790 - protein, 7 aa, synthetic construct
RINKDFS

SEQ ID NO: 191791 - protein, 7 aa, synthetic construct
YPHRITS

SEQ ID NO: 191792 - protein, 7 aa, synthetic construct
KSGRDTS

SEQ ID NO: 191793 - protein, 7 aa, synthetic construct
VKNRDFS

SEQ ID NO: 191794 - protein, 7 aa, synthetic construct
DPNRFKS

SEQ ID NO: 191795 - protein, 7 aa, synthetic construct
WPTRDKS

SEQ ID NO: 191796 - protein, 7 aa, synthetic construct
NPKRDSS

SEQ ID NO: 191797 - protein, 7 aa, synthetic construct
RVSRDVS

SEQ ID NO: 191798 - protein, 7 aa, synthetic construct
APRRDTG

SEQ ID NO: 191799 - protein, 7 aa, synthetic construct
RPNRDAL

SEQ ID NO: 191800 - protein, 7 aa, synthetic construct
RPSRDLV

SEQ ID NO: 191801 - protein, 7 aa, synthetic construct
KTNRDTA

SEQ ID NO: 191802 - protein, 7 aa, synthetic construct
RPDRHTV

SEQ ID NO: 191803 - protein, 7 aa, synthetic construct
QKNRDLS

SEQ ID NO: 191804 - protein, 7 aa, synthetic construct
KQNRDLS

SEQ ID NO: 191805 - protein, 7 aa, synthetic construct
IKNRDTQ

SEQ ID NO: 191806 - protein, 7 aa, synthetic construct
RDARGTS

SEQ ID NO: 191807 - protein, 7 aa, synthetic construct
QKGRDTS

SEQ ID NO: 191808 - protein, 7 aa, synthetic construct
TKNRDTS

SEQ ID NO: 191809 - protein, 7 aa, synthetic construct
RPIRGDS

SEQ ID NO: 191810 - protein, 7 aa, synthetic construct
RVARDMS

SEQ ID NO: 191811 - protein, 7 aa, synthetic construct
RPNRVES

SEQ ID NO: 191812 - protein, 7 aa, synthetic construct
RNIRDTV

SEQ ID NO: 191813 - protein, 7 aa, synthetic construct
RSNRETA

SEQ ID NO: 191814 - protein, 7 aa, synthetic construct
VPKRDIS

SEQ ID NO: 191815 - protein, 7 aa, synthetic construct
RQNRETM

SEQ ID NO: 191816 - protein, 7 aa, synthetic construct
RPDRHTP

SEQ ID NO: 191817 - protein, 7 aa, synthetic construct
RPVRDNM

SEQ ID NO: 191818 - protein, 7 aa, synthetic construct
RTERPTS

SEQ ID NO: 191819 - protein, 7 aa, synthetic construct
RENRFTG

SEQ ID NO: 191820 - protein, 7 aa, synthetic construct
KPNRDEK

SEQ ID NO: 191821 - protein, 7 aa, synthetic construct
RSNRVES

SEQ ID NO: 191822 - protein, 7 aa, synthetic construct
RAARDTI

SEQ ID NO: 191823 - protein, 7 aa, synthetic construct
TLNRDRS

SEQ ID NO: 191824 - protein, 7 aa, synthetic construct
RANRDSI

SEQ ID NO: 191825 - protein, 7 aa, synthetic construct
RPVRETF

SEQ ID NO: 191826 - protein, 7 aa, synthetic construct
PLKRDTS

SEQ ID NO: 191827 - protein, 7 aa, synthetic construct
RANRDVL

SEQ ID NO: 191828 - protein, 7 aa, synthetic construct
RLNRDAV

SEQ ID NO: 191829 - protein, 7 aa, synthetic construct
RGARDTS

SEQ ID NO: 191830 - protein, 7 aa, synthetic construct
RPAHATS

SEQ ID NO: 191831 - protein, 7 aa, synthetic construct
RTQRDLS

SEQ ID NO: 191832 - protein, 7 aa, synthetic construct
RENRDAK

SEQ ID NO: 191833 - protein, 7 aa, synthetic construct
RVNRDNP

SEQ ID NO: 191834 - protein, 7 aa, synthetic construct
RDTRSTS

SEQ ID NO: 191835 - protein, 7 aa, synthetic construct
PPKRDTF

SEQ ID NO: 191836 - protein, 7 aa, synthetic construct
RPQRDTI

SEQ ID NO: 191837 - protein, 7 aa, synthetic construct
RANRDAV

SEQ ID NO: 191838 - protein, 7 aa, synthetic construct
RQNRELS

SEQ ID NO: 191839 - protein, 7 aa, synthetic construct
VPHRATS

SEQ ID NO: 191840 - protein, 7 aa, synthetic construct
FKNRDAS

SEQ ID NO: 191841 - protein, 7 aa, synthetic construct
RPARDPI

SEQ ID NO: 191842 - protein, 7 aa, synthetic construct
RPTRDIA

SEQ ID NO: 191843 - protein, 7 aa, synthetic construct
RMDRATS

SEQ ID NO: 191844 - protein, 7 aa, synthetic construct
RPHAITS

SEQ ID NO: 191845 - protein, 7 aa, synthetic construct
RFKTDTS

SEQ ID NO: 191846 - protein, 7 aa, synthetic construct
RPQRDVV

SEQ ID NO: 191847 - protein, 7 aa, synthetic construct
KTNRDTI

SEQ ID NO: 191848 - protein, 7 aa, synthetic construct
QMNRDKS

SEQ ID NO: 191849 - protein, 7 aa, synthetic construct
RPSRDVF

SEQ ID NO: 191850 - protein, 7 aa, synthetic construct
YPNRDSK

SEQ ID NO: 191851 - protein, 7 aa, synthetic construct
RPHKDLS

SEQ ID NO: 191852 - protein, 7 aa, synthetic construct
RPARLTE

SEQ ID NO: 191853 - protein, 7 aa, synthetic construct
RLPRETS

SEQ ID NO: 191854 - protein, 7 aa, synthetic construct
RPNRMES

SEQ ID NO: 191855 - protein, 7 aa, synthetic construct
RPGRDTA

SEQ ID NO: 191856 - protein, 7 aa, synthetic construct
RPNRDVQ

SEQ ID NO: 191857 - protein, 7 aa, synthetic construct
RPGRDGQ

SEQ ID NO: 191858 - protein, 7 aa, synthetic construct
PKNRDTG

SEQ ID NO: 191859 - protein, 7 aa, synthetic construct
QKARDTS

SEQ ID NO: 191860 - protein, 7 aa, synthetic construct
RVERDKS

SEQ ID NO: 191861 - protein, 7 aa, synthetic construct
RSDRPTS

SEQ ID NO: 191862 - protein, 7 aa, synthetic construct
KFARDTS

SEQ ID NO: 191863 - protein, 7 aa, synthetic construct
RGNKDTI

SEQ ID NO: 191864 - protein, 7 aa, synthetic construct
RSPRDTQ

SEQ ID NO: 191865 - protein, 7 aa, synthetic construct
RPVRDQT

SEQ ID NO: 191866 - protein, 7 aa, synthetic construct
RASRDQS

SEQ ID NO: 191867 - protein, 7 aa, synthetic construct
RKQNDTS

SEQ ID NO: 191868 - protein, 7 aa, synthetic construct
RPTRDNV

SEQ ID NO: 191869 - protein, 7 aa, synthetic construct
RANRDQP

SEQ ID NO: 191870 - protein, 7 aa, synthetic construct
RSQRDTV

SEQ ID NO: 191871 - protein, 7 aa, synthetic construct
GPKRDAS

SEQ ID NO: 191872 - protein, 7 aa, synthetic construct
PKNRDTF

SEQ ID NO: 191873 - protein, 7 aa, synthetic construct
VKQRDTS

SEQ ID NO: 191874 - protein, 7 aa, synthetic construct
KPRQDTS

SEQ ID NO: 191875 - protein, 7 aa, synthetic construct
RALRDTV

SEQ ID NO: 191876 - protein, 7 aa, synthetic construct
RPVRPTE

SEQ ID NO: 191877 - protein, 7 aa, synthetic construct
MPKRDTM

SEQ ID NO: 191878 - protein, 7 aa, synthetic construct
RPSRDTA

SEQ ID NO: 191879 - protein, 7 aa, synthetic construct
RPERVSS

SEQ ID NO: 191880 - protein, 7 aa, synthetic construct
RPHSATS

SEQ ID NO: 191881 - protein, 7 aa, synthetic construct
QQKRDTS

SEQ ID NO: 191882 - protein, 7 aa, synthetic construct
RPRSDGS

SEQ ID NO: 191883 - protein, 7 aa, synthetic construct
RVGRDNS

SEQ ID NO: 191884 - protein, 7 aa, synthetic construct
KMNRDTT

SEQ ID NO: 191885 - protein, 7 aa, synthetic construct
RPNHPTN

SEQ ID NO: 191886 - protein, 7 aa, synthetic construct
PKNRDTL

SEQ ID NO: 191887 - protein, 7 aa, synthetic construct
MPNRRDS

SEQ ID NO: 191888 - protein, 7 aa, synthetic construct
RSMKDTS

SEQ ID NO: 191889 - protein, 7 aa, synthetic construct
RGSRDTP

SEQ ID NO: 191890 - protein, 7 aa, synthetic construct
RPNSRDS

SEQ ID NO: 191891 - protein, 7 aa, synthetic construct
FLNRDTK

SEQ ID NO: 191892 - protein, 7 aa, synthetic construct
RPTRETS

SEQ ID NO: 191893 - protein, 7 aa, synthetic construct
LTNRDTR

SEQ ID NO: 191894 - protein, 7 aa, synthetic construct
RPNVRTD

SEQ ID NO: 191895 - protein, 7 aa, synthetic construct
VPKRDTT

SEQ ID NO: 191896 - protein, 7 aa, synthetic construct
RAGRDTV

SEQ ID NO: 191897 - protein, 7 aa, synthetic construct
RPNRPDP

SEQ ID NO: 191898 - protein, 7 aa, synthetic construct
RQSRDTA

SEQ ID NO: 191899 - protein, 7 aa, synthetic construct
RPRVDAS

SEQ ID NO: 191900 - protein, 7 aa, synthetic construct
RNNKDTL

SEQ ID NO: 191901 - protein, 7 aa, synthetic construct
DPNRQTK

SEQ ID NO: 191902 - protein, 7 aa, synthetic construct
MVNRDKS

SEQ ID NO: 191903 - protein, 7 aa, synthetic construct
RTNRDPP

SEQ ID NO: 191904 - protein, 7 aa, synthetic construct
RANRDMS

SEQ ID NO: 191905 - protein, 7 aa, synthetic construct
RMNKDTF

SEQ ID NO: 191906 - protein, 7 aa, synthetic construct
RPARDNS

SEQ ID NO: 191907 - protein, 7 aa, synthetic construct
RQVRDTV

SEQ ID NO: 191908 - protein, 7 aa, synthetic construct
RENREKS

SEQ ID NO: 191909 - protein, 7 aa, synthetic construct
KQNRDAS

SEQ ID NO: 191910 - protein, 7 aa, synthetic construct
RPNREVI

SEQ ID NO: 191911 - protein, 7 aa, synthetic construct
TSKRDTS

SEQ ID NO: 191912 - protein, 7 aa, synthetic construct
NKNRDAS

SEQ ID NO: 191913 - protein, 7 aa, synthetic construct
RLMRETS

SEQ ID NO: 191914 - protein, 7 aa, synthetic construct
RANREPS

SEQ ID NO: 191915 - protein, 7 aa, synthetic construct
RPARSDS

SEQ ID NO: 191916 - protein, 7 aa, synthetic construct
RNPRDTI

SEQ ID NO: 191917 - protein, 7 aa, synthetic construct
RGNRDGG

SEQ ID NO: 191918 - protein, 7 aa, synthetic construct
NSKRDTS

SEQ ID NO: 191919 - protein, 7 aa, synthetic construct
RNNRENS

SEQ ID NO: 191920 - protein, 7 aa, synthetic construct
IKNRDTS

SEQ ID NO: 191921 - protein, 7 aa, synthetic construct
RPNRVDG

SEQ ID NO: 191922 - protein, 7 aa, synthetic construct
RSNKDTN

SEQ ID NO: 191923 - protein, 7 aa, synthetic construct
KPTRDTT

SEQ ID NO: 191924 - protein, 7 aa, synthetic construct
RIERITS

SEQ ID NO: 191925 - protein, 7 aa, synthetic construct
KPNRDSI

SEQ ID NO: 191926 - protein, 7 aa, synthetic construct
KPNRDHT

SEQ ID NO: 191927 - protein, 7 aa, synthetic construct
RMNKDTT

SEQ ID NO: 191928 - protein, 7 aa, synthetic construct
RPNRELV

SEQ ID NO: 191929 - protein, 7 aa, synthetic construct
YKQRDTS

SEQ ID NO: 191930 - protein, 7 aa, synthetic construct
DPNRATK

SEQ ID NO: 191931 - protein, 7 aa, synthetic construct
RKDRDTI

SEQ ID NO: 191932 - protein, 7 aa, synthetic construct
RVNRDAG

SEQ ID NO: 191933 - protein, 7 aa, synthetic construct
RSKQDTS

SEQ ID NO: 191934 - protein, 7 aa, synthetic construct
RPGRDTI

SEQ ID NO: 191935 - protein, 7 aa, synthetic construct
RMARDQS

SEQ ID NO: 191936 - protein, 7 aa, synthetic construct
RVERQTS

SEQ ID NO: 191937 - protein, 7 aa, synthetic construct
RANREMS

SEQ ID NO: 191938 - protein, 7 aa, synthetic construct
MKMRDTS

SEQ ID NO: 191939 - protein, 7 aa, synthetic construct
HPARDRS

SEQ ID NO: 191940 - protein, 7 aa, synthetic construct
KPNRDSG

SEQ ID NO: 191941 - protein, 7 aa, synthetic construct
RQNRIES

SEQ ID NO: 191942 - protein, 7 aa, synthetic construct
RPQRDAQ

SEQ ID NO: 191943 - protein, 7 aa, synthetic construct
MLNRDKS

SEQ ID NO: 191944 - protein, 7 aa, synthetic construct
PPRRDTT

SEQ ID NO: 191945 - protein, 7 aa, synthetic construct
KPGRDTM

SEQ ID NO: 191946 - protein, 7 aa, synthetic construct
YPTRHTS

SEQ ID NO: 191947 - protein, 7 aa, synthetic construct
QKNRDTM

SEQ ID NO: 191948 - protein, 7 aa, synthetic construct
RSTRDMS

SEQ ID NO: 191949 - protein, 7 aa, synthetic construct
YPVRHTS

SEQ ID NO: 191950 - protein, 7 aa, synthetic construct
RPQRDLV

SEQ ID NO: 191951 - protein, 7 aa, synthetic construct
RPMRTES

SEQ ID NO: 191952 - protein, 7 aa, synthetic construct
RVTRDAS

SEQ ID NO: 191953 - protein, 7 aa, synthetic construct
GPVRHTS

SEQ ID NO: 191954 - protein, 7 aa, synthetic construct
MKTRDTS

SEQ ID NO: 191955 - protein, 7 aa, synthetic construct
QRNKDTS

SEQ ID NO: 191956 - protein, 7 aa, synthetic construct
RATRDTM

SEQ ID NO: 191957 - protein, 7 aa, synthetic construct
QKNRDTQ

SEQ ID NO: 191958 - protein, 7 aa, synthetic construct
YPNRKDS

SEQ ID NO: 191959 - protein, 7 aa, synthetic construct
SKNRDTF

SEQ ID NO: 191960 - protein, 7 aa, synthetic construct
RPAHDTR

SEQ ID NO: 191961 - protein, 7 aa, synthetic construct
KPNRETY

SEQ ID NO: 191962 - protein, 7 aa, synthetic construct
RADRQTS

SEQ ID NO: 191963 - protein, 7 aa, synthetic construct
RIDRDKS

SEQ ID NO: 191964 - protein, 7 aa, synthetic construct
RAPRDIS

SEQ ID NO: 191965 - protein, 7 aa, synthetic construct
MPKRDTS

SEQ ID NO: 191966 - protein, 7 aa, synthetic construct
RPERQHS

SEQ ID NO: 191967 - protein, 7 aa, synthetic construct
AKNRDTI

SEQ ID NO: 191968 - protein, 7 aa, synthetic construct
RPNRVDV

SEQ ID NO: 191969 - protein, 7 aa, synthetic construct
RNNRETL

SEQ ID NO: 191970 - protein, 7 aa, synthetic construct
RTNPDTR

SEQ ID NO: 191971 - protein, 7 aa, synthetic construct
KQNRDTT

SEQ ID NO: 191972 - protein, 7 aa, synthetic construct
SKNRDIS

SEQ ID NO: 191973 - protein, 7 aa, synthetic construct
RPRTDTL

SEQ ID NO: 191974 - protein, 7 aa, synthetic construct
RVNRETV

SEQ ID NO: 191975 - protein, 7 aa, synthetic construct
NKNRDTI

SEQ ID NO: 191976 - protein, 7 aa, synthetic construct
GKNRDTV

SEQ ID NO: 191977 - protein, 7 aa, synthetic construct
RPTRDSM

SEQ ID NO: 191978 - protein, 7 aa, synthetic construct
KPTRDHS

SEQ ID NO: 191979 - protein, 7 aa, synthetic construct
KLNRDTL

SEQ ID NO: 191980 - protein, 7 aa, synthetic construct
RVNRDVG

SEQ ID NO: 191981 - protein, 7 aa, synthetic construct
RFNKDTA

SEQ ID NO: 191982 - protein, 7 aa, synthetic construct
RPHKDPS

SEQ ID NO: 191983 - protein, 7 aa, synthetic construct
RPQRTTE

SEQ ID NO: 191984 - protein, 7 aa, synthetic construct
RINREVS

SEQ ID NO: 191985 - protein, 7 aa, synthetic construct
RPNREST

SEQ ID NO: 191986 - protein, 7 aa, synthetic construct
RPERSTM

SEQ ID NO: 191987 - protein, 7 aa, synthetic construct
RVNPYTS

SEQ ID NO: 191988 - protein, 7 aa, synthetic construct
RPNRDVT

SEQ ID NO: 191989 - protein, 7 aa, synthetic construct
RPSRDLT

SEQ ID NO: 191990 - protein, 7 aa, synthetic construct
LKLRDTS

SEQ ID NO: 191991 - protein, 7 aa, synthetic construct
RMNRDTI

SEQ ID NO: 191992 - protein, 7 aa, synthetic construct
KPTRDTN

SEQ ID NO: 191993 - protein, 7 aa, synthetic construct
EPNRLTK

SEQ ID NO: 191994 - protein, 7 aa, synthetic construct
RANRETN

SEQ ID NO: 191995 - protein, 7 aa, synthetic construct
RPARTDS

SEQ ID NO: 191996 - protein, 7 aa, synthetic construct
SKNRDTV

SEQ ID NO: 191997 - protein, 7 aa, synthetic construct
RPSRELS

SEQ ID NO: 191998 - protein, 7 aa, synthetic construct
RADRMTS

SEQ ID NO: 191999 - protein, 7 aa, synthetic construct
RPGRGES

SEQ ID NO: 192000 - protein, 7 aa, synthetic construct
RPGRDGN

SEQ ID NO: 192001 - protein, 7 aa, synthetic construct
RNVRDTV

SEQ ID NO: 192002 - protein, 7 aa, synthetic construct
RPSKDTQ

SEQ ID NO: 192003 - protein, 7 aa, synthetic construct
RPNPDPR

SEQ ID NO: 192004 - protein, 7 aa, synthetic construct
RPHVMTS

SEQ ID NO: 192005 - protein, 7 aa, synthetic construct
RGPRDMS

SEQ ID NO: 192006 - protein, 7 aa, synthetic construct
RPARATE

SEQ ID NO: 192007 - protein, 7 aa, synthetic construct
RPNHDTR

SEQ ID NO: 192008 - protein, 7 aa, synthetic construct
RPPRVTE

SEQ ID NO: 192009 - protein, 7 aa, synthetic construct
RTNTDTR

SEQ ID NO: 192010 - protein, 7 aa, synthetic construct
MPHRITS

SEQ ID NO: 192011 - protein, 7 aa, synthetic construct
KSTRDTS

SEQ ID NO: 192012 - protein, 7 aa, synthetic construct
KMMRDTS

SEQ ID NO: 192013 - protein, 7 aa, synthetic construct
RPVRDQV

SEQ ID NO: 192014 - protein, 7 aa, synthetic construct
RLQKDTS

SEQ ID NO: 192015 - protein, 7 aa, synthetic construct
RPQRTES

SEQ ID NO: 192016 - protein, 7 aa, synthetic construct
RVVRDMS

SEQ ID NO: 192017 - protein, 7 aa, synthetic construct
RLDRTTS

SEQ ID NO: 192018 - protein, 7 aa, synthetic construct
RGNRDNP

SEQ ID NO: 192019 - protein, 7 aa, synthetic construct
VMNRDKS

SEQ ID NO: 192020 - protein, 7 aa, synthetic construct
YKSRDTS

SEQ ID NO: 192021 - protein, 7 aa, synthetic construct
LPNRDRN

SEQ ID NO: 192022 - protein, 7 aa, synthetic construct
QKLRDTS

SEQ ID NO: 192023 - protein, 7 aa, synthetic construct
RSSRDTI

SEQ ID NO: 192024 - protein, 7 aa, synthetic construct
IPRRDQS

SEQ ID NO: 192025 - protein, 7 aa, synthetic construct
RANRETI

SEQ ID NO: 192026 - protein, 7 aa, synthetic construct
RAARDSS

SEQ ID NO: 192027 - protein, 7 aa, synthetic construct
RTNRDNA

SEQ ID NO: 192028 - protein, 7 aa, synthetic construct
RPERISS

SEQ ID NO: 192029 - protein, 7 aa, synthetic construct
RPDRGTV

SEQ ID NO: 192030 - protein, 7 aa, synthetic construct
RPFATTS

SEQ ID NO: 192031 - protein, 7 aa, synthetic construct
RPERPYS

SEQ ID NO: 192032 - protein, 7 aa, synthetic construct
RVNRDPV

SEQ ID NO: 192033 - protein, 7 aa, synthetic construct
RSARDTL

SEQ ID NO: 192034 - protein, 7 aa, synthetic construct
RSPRDTV

SEQ ID NO: 192035 - protein, 7 aa, synthetic construct
RANRDQI

SEQ ID NO: 192036 - protein, 7 aa, synthetic construct
RPTRETL

SEQ ID NO: 192037 - protein, 7 aa, synthetic construct
RINRDSV

SEQ ID NO: 192038 - protein, 7 aa, synthetic construct
FGKRDTS

SEQ ID NO: 192039 - protein, 7 aa, synthetic construct
RPSHSTS

SEQ ID NO: 192040 - protein, 7 aa, synthetic construct
RTTRDTA

SEQ ID NO: 192041 - protein, 7 aa, synthetic construct
RPRGDTL

SEQ ID NO: 192042 - protein, 7 aa, synthetic construct
KFNRDTA

SEQ ID NO: 192043 - protein, 7 aa, synthetic construct
TKGRDTS

SEQ ID NO: 192044 - protein, 7 aa, synthetic construct
RKERDTT

SEQ ID NO: 192045 - protein, 7 aa, synthetic construct
RPQRDVT

SEQ ID NO: 192046 - protein, 7 aa, synthetic construct
QKPRDTS

SEQ ID NO: 192047 - protein, 7 aa, synthetic construct
PKSRDTS

SEQ ID NO: 192048 - protein, 7 aa, synthetic construct
MPGRDKS

SEQ ID NO: 192049 - protein, 7 aa, synthetic construct
KIMRDTS

SEQ ID NO: 192050 - protein, 7 aa, synthetic construct
RPLRDAT

SEQ ID NO: 192051 - protein, 7 aa, synthetic construct
RPERTYS

SEQ ID NO: 192052 - protein, 7 aa, synthetic construct
RPMRQTD

SEQ ID NO: 192053 - protein, 7 aa, synthetic construct
RPVRDSG

SEQ ID NO: 192054 - protein, 7 aa, synthetic construct
RPLRQDS

SEQ ID NO: 192055 - protein, 7 aa, synthetic construct
IPKRDIS

SEQ ID NO: 192056 - protein, 7 aa, synthetic construct
RPTRVTE

SEQ ID NO: 192057 - protein, 7 aa, synthetic construct
RPFKDNS

SEQ ID NO: 192058 - protein, 7 aa, synthetic construct
MPRRDIS

SEQ ID NO: 192059 - protein, 7 aa, synthetic construct
KPNRDLS

SEQ ID NO: 192060 - protein, 7 aa, synthetic construct
RPRVDLS

SEQ ID NO: 192061 - protein, 7 aa, synthetic construct
RPERGTT

SEQ ID NO: 192062 - protein, 7 aa, synthetic construct
AKNRDTV

SEQ ID NO: 192063 - protein, 7 aa, synthetic construct
KVTRDTS

SEQ ID NO: 192064 - protein, 7 aa, synthetic construct
DPNRITK

SEQ ID NO: 192065 - protein, 7 aa, synthetic construct
KPGRDYS

SEQ ID NO: 192066 - protein, 7 aa, synthetic construct
MPHRDTK

SEQ ID NO: 192067 - protein, 7 aa, synthetic construct
IANRDTR

SEQ ID NO: 192068 - protein, 7 aa, synthetic construct
RPGRMTE

SEQ ID NO: 192069 - protein, 7 aa, synthetic construct
RGNRDGV

SEQ ID NO: 192070 - protein, 7 aa, synthetic construct
RPHMSTS

SEQ ID NO: 192071 - protein, 7 aa, synthetic construct
RENVRTS

SEQ ID NO: 192072 - protein, 7 aa, synthetic construct
AKNRDVS

SEQ ID NO: 192073 - protein, 7 aa, synthetic construct
RAVRDTN

SEQ ID NO: 192074 - protein, 7 aa, synthetic construct
RQSKDTS

SEQ ID NO: 192075 - protein, 7 aa, synthetic construct
RPRIDTG

SEQ ID NO: 192076 - protein, 7 aa, synthetic construct
RPTRETF

SEQ ID NO: 192077 - protein, 7 aa, synthetic construct
RPQRDTL

SEQ ID NO: 192078 - protein, 7 aa, synthetic construct
RDNRKDS

SEQ ID NO: 192079 - protein, 7 aa, synthetic construct
RPIRDNN

SEQ ID NO: 192080 - protein, 7 aa, synthetic construct
RPNMDPR

SEQ ID NO: 192081 - protein, 7 aa, synthetic construct
RMNKDTQ

SEQ ID NO: 192082 - protein, 7 aa, synthetic construct
SKNRDTL

SEQ ID NO: 192083 - protein, 7 aa, synthetic construct
MKNRDTI

SEQ ID NO: 192084 - protein, 7 aa, synthetic construct
PRNRDTP

SEQ ID NO: 192085 - protein, 7 aa, synthetic construct
RESRPTS

SEQ ID NO: 192086 - protein, 7 aa, synthetic construct
RVDRVTS

SEQ ID NO: 192087 - protein, 7 aa, synthetic construct
RLNRGES

SEQ ID NO: 192088 - protein, 7 aa, synthetic construct
KLARDTS

SEQ ID NO: 192089 - protein, 7 aa, synthetic construct
KSNRDLS

SEQ ID NO: 192090 - protein, 7 aa, synthetic construct
KPQRDTS

SEQ ID NO: 192091 - protein, 7 aa, synthetic construct
IPKRDTQ

SEQ ID NO: 192092 - protein, 7 aa, synthetic construct
FKNRDTS

SEQ ID NO: 192093 - protein, 7 aa, synthetic construct
RTNRDNP

SEQ ID NO: 192094 - protein, 7 aa, synthetic construct
RVSRDLS

SEQ ID NO: 192095 - protein, 7 aa, synthetic construct
RPMRQTE

SEQ ID NO: 192096 - protein, 7 aa, synthetic construct
RPARDIS

SEQ ID NO: 192097 - protein, 7 aa, synthetic construct
RPLRTDS

SEQ ID NO: 192098 - protein, 7 aa, synthetic construct
RVIRDGS

SEQ ID NO: 192099 - protein, 7 aa, synthetic construct
RQNRDLG

SEQ ID NO: 192100 - protein, 7 aa, synthetic construct
NRNKDTS

SEQ ID NO: 192101 - protein, 7 aa, synthetic construct
KPIRDSS

SEQ ID NO: 192102 - protein, 7 aa, synthetic construct
RPKGDTY

SEQ ID NO: 192103 - protein, 7 aa, synthetic construct
KPNRDYI

SEQ ID NO: 192104 - protein, 7 aa, synthetic construct
RINRELS

SEQ ID NO: 192105 - protein, 7 aa, synthetic construct
RPRGDAS

SEQ ID NO: 192106 - protein, 7 aa, synthetic construct
RPNRDIT

SEQ ID NO: 192107 - protein, 7 aa, synthetic construct
RANKDPS

SEQ ID NO: 192108 - protein, 7 aa, synthetic construct
KPNRDTH

SEQ ID NO: 192109 - protein, 7 aa, synthetic construct
KPLRDTF

SEQ ID NO: 192110 - protein, 7 aa, synthetic construct
RKDRDPS

SEQ ID NO: 192111 - protein, 7 aa, synthetic construct
RPTRELS

SEQ ID NO: 192112 - protein, 7 aa, synthetic construct
RPNRDAA

SEQ ID NO: 192113 - protein, 7 aa, synthetic construct
FPLRDKS

SEQ ID NO: 192114 - protein, 7 aa, synthetic construct
NPKRDIS

SEQ ID NO: 192115 - protein, 7 aa, synthetic construct
RPTRDTL

SEQ ID NO: 192116 - protein, 7 aa, synthetic construct
RPNRVVE

SEQ ID NO: 192117 - protein, 7 aa, synthetic construct
LPNRDKY

SEQ ID NO: 192118 - protein, 7 aa, synthetic construct
VKGRDTS

SEQ ID NO: 192119 - protein, 7 aa, synthetic construct
HPNRINS

SEQ ID NO: 192120 - protein, 7 aa, synthetic construct
VPKRDTG

SEQ ID NO: 192121 - protein, 7 aa, synthetic construct
EKNRGTS

SEQ ID NO: 192122 - protein, 7 aa, synthetic construct
GPKRDTY

SEQ ID NO: 192123 - protein, 7 aa, synthetic construct
RQDRHTS

SEQ ID NO: 192124 - protein, 7 aa, synthetic construct
QKNRDSS

SEQ ID NO: 192125 - protein, 7 aa, synthetic construct
RVNRQTE

SEQ ID NO: 192126 - protein, 7 aa, synthetic construct
IKNRDSS

SEQ ID NO: 192127 - protein, 7 aa, synthetic construct
RPRGDLS

SEQ ID NO: 192128 - protein, 7 aa, synthetic construct
RAERNTS

SEQ ID NO: 192129 - protein, 7 aa, synthetic construct
RTNMDTK

SEQ ID NO: 192130 - protein, 7 aa, synthetic construct
MRNRDTG

SEQ ID NO: 192131 - protein, 7 aa, synthetic construct
RPRDDTR

SEQ ID NO: 192132 - protein, 7 aa, synthetic construct
NPGRDRS

SEQ ID NO: 192133 - protein, 7 aa, synthetic construct
KPNRDQV

SEQ ID NO: 192134 - protein, 7 aa, synthetic construct
RPIRGES

SEQ ID NO: 192135 - protein, 7 aa, synthetic construct
VHNRPTS

SEQ ID NO: 192136 - protein, 7 aa, synthetic construct
RPVRVTD

SEQ ID NO: 192137 - protein, 7 aa, synthetic construct
RPSRGTE

SEQ ID NO: 192138 - protein, 7 aa, synthetic construct
GPKRDTL

SEQ ID NO: 192139 - protein, 7 aa, synthetic construct
RPQRDNV

SEQ ID NO: 192140 - protein, 7 aa, synthetic construct
SFKRDTS

SEQ ID NO: 192141 - protein, 7 aa, synthetic construct
KPFRDTA

SEQ ID NO: 192142 - protein, 7 aa, synthetic construct
RFNKDTL

SEQ ID NO: 192143 - protein, 7 aa, synthetic construct
RPNRLEV

SEQ ID NO: 192144 - protein, 7 aa, synthetic construct
RAVRDAS

SEQ ID NO: 192145 - protein, 7 aa, synthetic construct
RPNRQET

SEQ ID NO: 192146 - protein, 7 aa, synthetic construct
RANRDMI

SEQ ID NO: 192147 - protein, 7 aa, synthetic construct
RATRDNS

SEQ ID NO: 192148 - protein, 7 aa, synthetic construct
REKRETS

SEQ ID NO: 192149 - protein, 7 aa, synthetic construct
SKNRDTM

SEQ ID NO: 192150 - protein, 7 aa, synthetic construct
RPPRPTD

SEQ ID NO: 192151 - protein, 7 aa, synthetic construct
KPSRDLS

SEQ ID NO: 192152 - protein, 7 aa, synthetic construct
RPNRQVE

SEQ ID NO: 192153 - protein, 7 aa, synthetic construct
RGMKDTS

SEQ ID NO: 192154 - protein, 7 aa, synthetic construct
RIPRDTT

SEQ ID NO: 192155 - protein, 7 aa, synthetic construct
KPHRDTI

SEQ ID NO: 192156 - protein, 7 aa, synthetic construct
KNNRDAS

SEQ ID NO: 192157 - protein, 7 aa, synthetic construct
YKPRDTS

SEQ ID NO: 192158 - protein, 7 aa, synthetic construct
KPNRETF

SEQ ID NO: 192159 - protein, 7 aa, synthetic construct
RDARHTS

SEQ ID NO: 192160 - protein, 7 aa, synthetic construct
RPRSDTL

SEQ ID NO: 192161 - protein, 7 aa, synthetic construct
RPNREFT

SEQ ID NO: 192162 - protein, 7 aa, synthetic construct
RPVRDAF

SEQ ID NO: 192163 - protein, 7 aa, synthetic construct
KPSRDTG

SEQ ID NO: 192164 - protein, 7 aa, synthetic construct
RSQRETS

SEQ ID NO: 192165 - protein, 7 aa, synthetic construct
RPIRNES

SEQ ID NO: 192166 - protein, 7 aa, synthetic construct
RQNRDPI

SEQ ID NO: 192167 - protein, 7 aa, synthetic construct
RPSNDTR

SEQ ID NO: 192168 - protein, 7 aa, synthetic construct
MPRRDTG

SEQ ID NO: 192169 - protein, 7 aa, synthetic construct
KQNRDSS

SEQ ID NO: 192170 - protein, 7 aa, synthetic construct
RPQKDTY

SEQ ID NO: 192171 - protein, 7 aa, synthetic construct
RPNRAEI

SEQ ID NO: 192172 - protein, 7 aa, synthetic construct
IFNRDTK

SEQ ID NO: 192173 - protein, 7 aa, synthetic construct
RANRDNS

SEQ ID NO: 192174 - protein, 7 aa, synthetic construct
RPARDQN

SEQ ID NO: 192175 - protein, 7 aa, synthetic construct
GKNRDAS

SEQ ID NO: 192176 - protein, 7 aa, synthetic construct
RPERDNK

SEQ ID NO: 192177 - protein, 7 aa, synthetic construct
PPNRDKY

SEQ ID NO: 192178 - protein, 7 aa, synthetic construct
RDNKYTS

SEQ ID NO: 192179 - protein, 7 aa, synthetic construct
RETRMTS

SEQ ID NO: 192180 - protein, 7 aa, synthetic construct
RPNRPEI

SEQ ID NO: 192181 - protein, 7 aa, synthetic construct
FPKRDLS

SEQ ID NO: 192182 - protein, 7 aa, synthetic construct
RVMRDNS

SEQ ID NO: 192183 - protein, 7 aa, synthetic construct
RMNRELS

SEQ ID NO: 192184 - protein, 7 aa, synthetic construct
RPLRDNV

SEQ ID NO: 192185 - protein, 7 aa, synthetic construct
IKNRDLS

SEQ ID NO: 192186 - protein, 7 aa, synthetic construct
VPSRHTS

SEQ ID NO: 192187 - protein, 7 aa, synthetic construct
DRNRTTS

SEQ ID NO: 192188 - protein, 7 aa, synthetic construct
RVNRDMA

SEQ ID NO: 192189 - protein, 7 aa, synthetic construct
RQNREPS

SEQ ID NO: 192190 - protein, 7 aa, synthetic construct
RVTRDGS

SEQ ID NO: 192191 - protein, 7 aa, synthetic construct
RVGRDTV

SEQ ID NO: 192192 - protein, 7 aa, synthetic construct
RPPRDPQ

SEQ ID NO: 192193 - protein, 7 aa, synthetic construct
RPSREQS

SEQ ID NO: 192194 - protein, 7 aa, synthetic construct
RINKDTY

SEQ ID NO: 192195 - protein, 7 aa, synthetic construct
YPNRDLK

SEQ ID NO: 192196 - protein, 7 aa, synthetic construct
RHNVGTS

SEQ ID NO: 192197 - protein, 7 aa, synthetic construct
FPKRDNS

SEQ ID NO: 192198 - protein, 7 aa, synthetic construct
RPIRDDR

SEQ ID NO: 192199 - protein, 7 aa, synthetic construct
RANRDIV

SEQ ID NO: 192200 - protein, 7 aa, synthetic construct
KMNRDQS

SEQ ID NO: 192201 - protein, 7 aa, synthetic construct
RTPRDMS

SEQ ID NO: 192202 - protein, 7 aa, synthetic construct
KPNRDAS

SEQ ID NO: 192203 - protein, 7 aa, synthetic construct
RAGRDTM

SEQ ID NO: 192204 - protein, 7 aa, synthetic construct
RPQRDVQ

SEQ ID NO: 192205 - protein, 7 aa, synthetic construct
RDNRETK

SEQ ID NO: 192206 - protein, 7 aa, synthetic construct
RMNKDTY

SEQ ID NO: 192207 - protein, 7 aa, synthetic construct
NPMRDKS

SEQ ID NO: 192208 - protein, 7 aa, synthetic construct
RGNKDTQ

SEQ ID NO: 192209 - protein, 7 aa, synthetic construct
RPTRDML

SEQ ID NO: 192210 - protein, 7 aa, synthetic construct
RLDRDKS

SEQ ID NO: 192211 - protein, 7 aa, synthetic construct
IPRRDSS

SEQ ID NO: 192212 - protein, 7 aa, synthetic construct
IKNRDFS

SEQ ID NO: 192213 - protein, 7 aa, synthetic construct
RPDRITQ

SEQ ID NO: 192214 - protein, 7 aa, synthetic construct
KPNRDTT

SEQ ID NO: 192215 - protein, 7 aa, synthetic construct
RPMRDAQ

SEQ ID NO: 192216 - protein, 7 aa, synthetic construct
MPKRDPS

SEQ ID NO: 192217 - protein, 7 aa, synthetic construct
FANRDTR

SEQ ID NO: 192218 - protein, 7 aa, synthetic construct
RSNRDVA

SEQ ID NO: 192219 - protein, 7 aa, synthetic construct
RPGRDVT

SEQ ID NO: 192220 - protein, 7 aa, synthetic construct
RPNRDNT

SEQ ID NO: 192221 - protein, 7 aa, synthetic construct
RSTRDTI

SEQ ID NO: 192222 - protein, 7 aa, synthetic construct
RPLRMTE

SEQ ID NO: 192223 - protein, 7 aa, synthetic construct
FKNRDNS

SEQ ID NO: 192224 - protein, 7 aa, synthetic construct
IKNRDYS

SEQ ID NO: 192225 - protein, 7 aa, synthetic construct
RPLRDAA

SEQ ID NO: 192226 - protein, 7 aa, synthetic construct
RPRQETS

SEQ ID NO: 192227 - protein, 7 aa, synthetic construct
RPNRENM

SEQ ID NO: 192228 - protein, 7 aa, synthetic construct
RPNRQDI

SEQ ID NO: 192229 - protein, 7 aa, synthetic construct
RPHNVTS

SEQ ID NO: 192230 - protein, 7 aa, synthetic construct
RPVRDNQ

SEQ ID NO: 192231 - protein, 7 aa, synthetic construct
VPRRDTS

SEQ ID NO: 192232 - protein, 7 aa, synthetic construct
RPAREPS

SEQ ID NO: 192233 - protein, 7 aa, synthetic construct
RPQRDQV

SEQ ID NO: 192234 - protein, 7 aa, synthetic construct
RMNRGES

SEQ ID NO: 192235 - protein, 7 aa, synthetic construct
FKSRDTS

SEQ ID NO: 192236 - protein, 7 aa, synthetic construct
RPNRPDV

SEQ ID NO: 192237 - protein, 7 aa, synthetic construct
ITNRDKS

SEQ ID NO: 192238 - protein, 7 aa, synthetic construct
RPNRPGE

SEQ ID NO: 192239 - protein, 7 aa, synthetic construct
RPVRDER

SEQ ID NO: 192240 - protein, 7 aa, synthetic construct
RTNRDGG

SEQ ID NO: 192241 - protein, 7 aa, synthetic construct
RPARDQL

SEQ ID NO: 192242 - protein, 7 aa, synthetic construct
LKNRDSS

SEQ ID NO: 192243 - protein, 7 aa, synthetic construct
MPNRHTN

SEQ ID NO: 192244 - protein, 7 aa, synthetic construct
APHRATS

SEQ ID NO: 192245 - protein, 7 aa, synthetic construct
RVQRDTI

SEQ ID NO: 192246 - protein, 7 aa, synthetic construct
RGDRGTS

SEQ ID NO: 192247 - protein, 7 aa, synthetic construct
RADRDTR

SEQ ID NO: 192248 - protein, 7 aa, synthetic construct
KVNRDQS

SEQ ID NO: 192249 - protein, 7 aa, synthetic construct
FKNRDTM

SEQ ID NO: 192250 - protein, 7 aa, synthetic construct
RPKYDMS

SEQ ID NO: 192251 - protein, 7 aa, synthetic construct
KPHRDLS

SEQ ID NO: 192252 - protein, 7 aa, synthetic construct
TRVRDTS

SEQ ID NO: 192253 - protein, 7 aa, synthetic construct
RADRTTS

SEQ ID NO: 192254 - protein, 7 aa, synthetic construct
RPARDSN

SEQ ID NO: 192255 - protein, 7 aa, synthetic construct
RIPRDTQ

SEQ ID NO: 192256 - protein, 7 aa, synthetic construct
RLNKDTY

SEQ ID NO: 192257 - protein, 7 aa, synthetic construct
RVERATS

SEQ ID NO: 192258 - protein, 7 aa, synthetic construct
QPNRDKY

SEQ ID NO: 192259 - protein, 7 aa, synthetic construct
RVNRDLS

SEQ ID NO: 192260 - protein, 7 aa, synthetic construct
VPRRDTT

SEQ ID NO: 192261 - protein, 7 aa, synthetic construct
RDKRDQS

SEQ ID NO: 192262 - protein, 7 aa, synthetic construct
RPTRDGQ

SEQ ID NO: 192263 - protein, 7 aa, synthetic construct
IPKRDTM

SEQ ID NO: 192264 - protein, 7 aa, synthetic construct
KPMRDNS

SEQ ID NO: 192265 - protein, 7 aa, synthetic construct
RDKRDTT

SEQ ID NO: 192266 - protein, 7 aa, synthetic construct
RELRQTS

SEQ ID NO: 192267 - protein, 7 aa, synthetic construct
RPQRDST

SEQ ID NO: 192268 - protein, 7 aa, synthetic construct
RPSRDMG

SEQ ID NO: 192269 - protein, 7 aa, synthetic construct
KPNRDTY

SEQ ID NO: 192270 - protein, 7 aa, synthetic construct
RPDRRDS

SEQ ID NO: 192271 - protein, 7 aa, synthetic construct
RQGKDTS

SEQ ID NO: 192272 - protein, 7 aa, synthetic construct
RPLRETA

SEQ ID NO: 192273 - protein, 7 aa, synthetic construct
KSQRDTS

SEQ ID NO: 192274 - protein, 7 aa, synthetic construct
RPNKETY

SEQ ID NO: 192275 - protein, 7 aa, synthetic construct
PRVRDTS

SEQ ID NO: 192276 - protein, 7 aa, synthetic construct
RVVRDQS

SEQ ID NO: 192277 - protein, 7 aa, synthetic construct
RPNMRDS

SEQ ID NO: 192278 - protein, 7 aa, synthetic construct
RPKHDTV

SEQ ID NO: 192279 - protein, 7 aa, synthetic construct
RMKMDTS

SEQ ID NO: 192280 - protein, 7 aa, synthetic construct
MPKRDTI

SEQ ID NO: 192281 - protein, 7 aa, synthetic construct
RGIRDTG

SEQ ID NO: 192282 - protein, 7 aa, synthetic construct
LPHRDKS

SEQ ID NO: 192283 - protein, 7 aa, synthetic construct
RPQRDHV

SEQ ID NO: 192284 - protein, 7 aa, synthetic construct
KPNRDFV

SEQ ID NO: 192285 - protein, 7 aa, synthetic construct
KPLRDPS

SEQ ID NO: 192286 - protein, 7 aa, synthetic construct
RENRVTN

SEQ ID NO: 192287 - protein, 7 aa, synthetic construct
NKPRDTS

SEQ ID NO: 192288 - protein, 7 aa, synthetic construct
RVPRDTI

SEQ ID NO: 192289 - protein, 7 aa, synthetic construct
RPKYDVS

SEQ ID NO: 192290 - protein, 7 aa, synthetic construct
RPRQDTL

SEQ ID NO: 192291 - protein, 7 aa, synthetic construct
RPQRDLG

SEQ ID NO: 192292 - protein, 7 aa, synthetic construct
RPSKDYS

SEQ ID NO: 192293 - protein, 7 aa, synthetic construct
RPDRPIS

SEQ ID NO: 192294 - protein, 7 aa, synthetic construct
RPSRDMQ

SEQ ID NO: 192295 - protein, 7 aa, synthetic construct
RMNKDTI

SEQ ID NO: 192296 - protein, 7 aa, synthetic construct
APDRRTS

SEQ ID NO: 192297 - protein, 7 aa, synthetic construct
RPMRATE

SEQ ID NO: 192298 - protein, 7 aa, synthetic construct
RPDRLSS

SEQ ID NO: 192299 - protein, 7 aa, synthetic construct
RAQRDTG

SEQ ID NO: 192300 - protein, 7 aa, synthetic construct
APHRNTS

SEQ ID NO: 192301 - protein, 7 aa, synthetic construct
RTNRETP

SEQ ID NO: 192302 - protein, 7 aa, synthetic construct
RPGRPDS

SEQ ID NO: 192303 - protein, 7 aa, synthetic construct
MKNRDMS

SEQ ID NO: 192304 - protein, 7 aa, synthetic construct
KTNRDMS

SEQ ID NO: 192305 - protein, 7 aa, synthetic construct
FPKRDPS

SEQ ID NO: 192306 - protein, 7 aa, synthetic construct
RTNRDVV

SEQ ID NO: 192307 - protein, 7 aa, synthetic construct
MKNRDLS

SEQ ID NO: 192308 - protein, 7 aa, synthetic construct
KPQRDHS

SEQ ID NO: 192309 - protein, 7 aa, synthetic construct
RLNRDTI

SEQ ID NO: 192310 - protein, 7 aa, synthetic construct
SKNRDTA

SEQ ID NO: 192311 - protein, 7 aa, synthetic construct
KPHRDTG

SEQ ID NO: 192312 - protein, 7 aa, synthetic construct
RVSRDTG

SEQ ID NO: 192313 - protein, 7 aa, synthetic construct
NPSRDKS

SEQ ID NO: 192314 - protein, 7 aa, synthetic construct
RALRDTG

SEQ ID NO: 192315 - protein, 7 aa, synthetic construct
RNTRDVS

SEQ ID NO: 192316 - protein, 7 aa, synthetic construct
RVPRDTS

SEQ ID NO: 192317 - protein, 7 aa, synthetic construct
RPQRDTA

SEQ ID NO: 192318 - protein, 7 aa, synthetic construct
KPSRDYS

SEQ ID NO: 192319 - protein, 7 aa, synthetic construct
RPARDPF

SEQ ID NO: 192320 - protein, 7 aa, synthetic construct
RVNRDQG

SEQ ID NO: 192321 - protein, 7 aa, synthetic construct
LPRRETS

SEQ ID NO: 192322 - protein, 7 aa, synthetic construct
QPKRDTL

SEQ ID NO: 192323 - protein, 7 aa, synthetic construct
RTVRDTT

SEQ ID NO: 192324 - protein, 7 aa, synthetic construct
KPNKDTY

SEQ ID NO: 192325 - protein, 7 aa, synthetic construct
RPQRDPL

SEQ ID NO: 192326 - protein, 7 aa, synthetic construct
RSVRDNS

SEQ ID NO: 192327 - protein, 7 aa, synthetic construct
RPNRGTE

SEQ ID NO: 192328 - protein, 7 aa, synthetic construct
RTTRDTP

SEQ ID NO: 192329 - protein, 7 aa, synthetic construct
RVNREMS

SEQ ID NO: 192330 - protein, 7 aa, synthetic construct
KVQRDTS

SEQ ID NO: 192331 - protein, 7 aa, synthetic construct
RTDRGTS

SEQ ID NO: 192332 - protein, 7 aa, synthetic construct
RPSKDTY

SEQ ID NO: 192333 - protein, 7 aa, synthetic construct
MIKRDTS

SEQ ID NO: 192334 - protein, 7 aa, synthetic construct
RQNRQDS

SEQ ID NO: 192335 - protein, 7 aa, synthetic construct
RPNRVGE

SEQ ID NO: 192336 - protein, 7 aa, synthetic construct
DKNRDTR

SEQ ID NO: 192337 - protein, 7 aa, synthetic construct
RQGRDTV

SEQ ID NO: 192338 - protein, 7 aa, synthetic construct
IPNRPHS

SEQ ID NO: 192339 - protein, 7 aa, synthetic construct
RVPRDTL

SEQ ID NO: 192340 - protein, 7 aa, synthetic construct
KANRDAS

SEQ ID NO: 192341 - protein, 7 aa, synthetic construct
GPNRKDS

SEQ ID NO: 192342 - protein, 7 aa, synthetic construct
KPFRDTS

SEQ ID NO: 192343 - protein, 7 aa, synthetic construct
RPLRADS

SEQ ID NO: 192344 - protein, 7 aa, synthetic construct
RPGRITE

SEQ ID NO: 192345 - protein, 7 aa, synthetic construct
RPNVHTY

SEQ ID NO: 192346 - protein, 7 aa, synthetic construct
KPNRDNP

SEQ ID NO: 192347 - protein, 7 aa, synthetic construct
RPSRDGL

SEQ ID NO: 192348 - protein, 7 aa, synthetic construct
RMGRDTV

SEQ ID NO: 192349 - protein, 7 aa, synthetic construct
AAKRDTS

SEQ ID NO: 192350 - protein, 7 aa, synthetic construct
RSNKDTI

SEQ ID NO: 192351 - protein, 7 aa, synthetic construct
RAARDTS

SEQ ID NO: 192352 - protein, 7 aa, synthetic construct
RPNARDS

SEQ ID NO: 192353 - protein, 7 aa, synthetic construct
KPNREQS

SEQ ID NO: 192354 - protein, 7 aa, synthetic construct
TANRDKS

SEQ ID NO: 192355 - protein, 7 aa, synthetic construct
RNNRELS

SEQ ID NO: 192356 - protein, 7 aa, synthetic construct
RPQRVTD

SEQ ID NO: 192357 - protein, 7 aa, synthetic construct
RPPRGTD

SEQ ID NO: 192358 - protein, 7 aa, synthetic construct
RPRTDTG

SEQ ID NO: 192359 - protein, 7 aa, synthetic construct
RPHATTS

SEQ ID NO: 192360 - protein, 7 aa, synthetic construct
RPNRIDS

SEQ ID NO: 192361 - protein, 7 aa, synthetic construct
RVERTTS

SEQ ID NO: 192362 - protein, 7 aa, synthetic construct
REQRTTS

SEQ ID NO: 192363 - protein, 7 aa, synthetic construct
RPNDDRR

SEQ ID NO: 192364 - protein, 7 aa, synthetic construct
KINRDTL

SEQ ID NO: 192365 - protein, 7 aa, synthetic construct
RPARDAA

SEQ ID NO: 192366 - protein, 7 aa, synthetic construct
RPIRDAT

SEQ ID NO: 192367 - protein, 7 aa, synthetic construct
NKNRDTQ

SEQ ID NO: 192368 - protein, 7 aa, synthetic construct
KPSRETS

SEQ ID NO: 192369 - protein, 7 aa, synthetic construct
RQVRDTA

SEQ ID NO: 192370 - protein, 7 aa, synthetic construct
RPSKDSS

SEQ ID NO: 192371 - protein, 7 aa, synthetic construct
IPHRDKS

SEQ ID NO: 192372 - protein, 7 aa, synthetic construct
RLDRDTK

SEQ ID NO: 192373 - protein, 7 aa, synthetic construct
HPKRDLS

SEQ ID NO: 192374 - protein, 7 aa, synthetic construct
RPTRDIV

SEQ ID NO: 192375 - protein, 7 aa, synthetic construct
RPRMDNS

SEQ ID NO: 192376 - protein, 7 aa, synthetic construct
FPGRDKS

SEQ ID NO: 192377 - protein, 7 aa, synthetic construct
FPNRDKG

SEQ ID NO: 192378 - protein, 7 aa, synthetic construct
RPARDML

SEQ ID NO: 192379 - protein, 7 aa, synthetic construct
RPERHTV

SEQ ID NO: 192380 - protein, 7 aa, synthetic construct
RHNVLTS

SEQ ID NO: 192381 - protein, 7 aa, synthetic construct
RPARDVF

SEQ ID NO: 192382 - protein, 7 aa, synthetic construct
RITRDTP

SEQ ID NO: 192383 - protein, 7 aa, synthetic construct
KVMRDTS

SEQ ID NO: 192384 - protein, 7 aa, synthetic construct
RPGRELS

SEQ ID NO: 192385 - protein, 7 aa, synthetic construct
MPRRDTT

SEQ ID NO: 192386 - protein, 7 aa, synthetic construct
RSPRDIS

SEQ ID NO: 192387 - protein, 7 aa, synthetic construct
FPKRDHS

SEQ ID NO: 192388 - protein, 7 aa, synthetic construct
VQKRDTS

SEQ ID NO: 192389 - protein, 7 aa, synthetic construct
RSARDGS

SEQ ID NO: 192390 - protein, 7 aa, synthetic construct
FPKRDQS

SEQ ID NO: 192391 - protein, 7 aa, synthetic construct
KQNRDPS

SEQ ID NO: 192392 - protein, 7 aa, synthetic construct
RIDRDTK

SEQ ID NO: 192393 - protein, 7 aa, synthetic construct
RPPRDLQ

SEQ ID NO: 192394 - protein, 7 aa, synthetic construct
RVPRDVS

SEQ ID NO: 192395 - protein, 7 aa, synthetic construct
RPNRDIG

SEQ ID NO: 192396 - protein, 7 aa, synthetic construct
VKNRDTA

SEQ ID NO: 192397 - protein, 7 aa, synthetic construct
RANRETS

SEQ ID NO: 192398 - protein, 7 aa, synthetic construct
TPNRDRM

SEQ ID NO: 192399 - protein, 7 aa, synthetic construct
KPNRMDS

SEQ ID NO: 192400 - protein, 7 aa, synthetic construct
RPARPTD

SEQ ID NO: 192401 - protein, 7 aa, synthetic construct
RSTRDQS

SEQ ID NO: 192402 - protein, 7 aa, synthetic construct
RPHSSTS

SEQ ID NO: 192403 - protein, 7 aa, synthetic construct
RINRDQV

SEQ ID NO: 192404 - protein, 7 aa, synthetic construct
MPRRDVS

SEQ ID NO: 192405 - protein, 7 aa, synthetic construct
RPTRDAS

SEQ ID NO: 192406 - protein, 7 aa, synthetic construct
RPNRDVF

SEQ ID NO: 192407 - protein, 7 aa, synthetic construct
KMNRDTA

SEQ ID NO: 192408 - protein, 7 aa, synthetic construct
RPGRETM

SEQ ID NO: 192409 - protein, 7 aa, synthetic construct
RPQRMTE

SEQ ID NO: 192410 - protein, 7 aa, synthetic construct
EPIRKTS

SEQ ID NO: 192411 - protein, 7 aa, synthetic construct
YKNRDTA

SEQ ID NO: 192412 - protein, 7 aa, synthetic construct
EPKRATS

SEQ ID NO: 192413 - protein, 7 aa, synthetic construct
MKNRDFS

SEQ ID NO: 192414 - protein, 7 aa, synthetic construct
RENKYTS

SEQ ID NO: 192415 - protein, 7 aa, synthetic construct
RPRTDAS

SEQ ID NO: 192416 - protein, 7 aa, synthetic construct
RNARDTL

SEQ ID NO: 192417 - protein, 7 aa, synthetic construct
RKERDTS

SEQ ID NO: 192418 - protein, 7 aa, synthetic construct
YKNRETS

SEQ ID NO: 192419 - protein, 7 aa, synthetic construct
RPGRDLS

SEQ ID NO: 192420 - protein, 7 aa, synthetic construct
RPLRDIG

SEQ ID NO: 192421 - protein, 7 aa, synthetic construct
FPRRDTV

SEQ ID NO: 192422 - protein, 7 aa, synthetic construct
RPARDPN

SEQ ID NO: 192423 - protein, 7 aa, synthetic construct
RPSREPS

SEQ ID NO: 192424 - protein, 7 aa, synthetic construct
RPVHSTS

SEQ ID NO: 192425 - protein, 7 aa, synthetic construct
RNQKDTS

SEQ ID NO: 192426 - protein, 7 aa, synthetic construct
RVDRDKS

SEQ ID NO: 192427 - protein, 7 aa, synthetic construct
RPNKDPQ

SEQ ID NO: 192428 - protein, 7 aa, synthetic construct
RPHSTTS

SEQ ID NO: 192429 - protein, 7 aa, synthetic construct
RPGRDAN

SEQ ID NO: 192430 - protein, 7 aa, synthetic construct
RPNRDTG

SEQ ID NO: 192431 - protein, 7 aa, synthetic construct
NPNRERS

SEQ ID NO: 192432 - protein, 7 aa, synthetic construct
KSNRDVS

SEQ ID NO: 192433 - protein, 7 aa, synthetic construct
RGPRDAS

SEQ ID NO: 192434 - protein, 7 aa, synthetic construct
RPERPIS

SEQ ID NO: 192435 - protein, 7 aa, synthetic construct
TKNRDPS

SEQ ID NO: 192436 - protein, 7 aa, synthetic construct
RPHNPTS

SEQ ID NO: 192437 - protein, 7 aa, synthetic construct
KPNRATE

SEQ ID NO: 192438 - protein, 7 aa, synthetic construct
RMNRDQS

SEQ ID NO: 192439 - protein, 7 aa, synthetic construct
RPHKDNS

SEQ ID NO: 192440 - protein, 7 aa, synthetic construct
RMNREMS

SEQ ID NO: 192441 - protein, 7 aa, synthetic construct
KQNRDIS

SEQ ID NO: 192442 - protein, 7 aa, synthetic construct
RPNRIES

SEQ ID NO: 192443 - protein, 7 aa, synthetic construct
RAQRDSS

SEQ ID NO: 192444 - protein, 7 aa, synthetic construct
VPTRHTS

SEQ ID NO: 192445 - protein, 7 aa, synthetic construct
SQKRDTS

SEQ ID NO: 192446 - protein, 7 aa, synthetic construct
RPHANTS

SEQ ID NO: 192447 - protein, 7 aa, synthetic construct
RPARDTS

SEQ ID NO: 192448 - protein, 7 aa, synthetic construct
RPGRMDS

SEQ ID NO: 192449 - protein, 7 aa, synthetic construct
RPLRDLG

SEQ ID NO: 192450 - protein, 7 aa, synthetic construct
SKNRDTN

SEQ ID NO: 192451 - protein, 7 aa, synthetic construct
RPQRDTM

SEQ ID NO: 192452 - protein, 7 aa, synthetic construct
RPARGDS

SEQ ID NO: 192453 - protein, 7 aa, synthetic construct
RIPRDTS

SEQ ID NO: 192454 - protein, 7 aa, synthetic construct
RPVRDQL

SEQ ID NO: 192455 - protein, 7 aa, synthetic construct
RMKLDTS

SEQ ID NO: 192456 - protein, 7 aa, synthetic construct
RPGRDIT

SEQ ID NO: 192457 - protein, 7 aa, synthetic construct
LKNRDTN

SEQ ID NO: 192458 - protein, 7 aa, synthetic construct
AKNRDTL

SEQ ID NO: 192459 - protein, 7 aa, synthetic construct
LPNRRTE

SEQ ID NO: 192460 - protein, 7 aa, synthetic construct
RPDRQTQ

SEQ ID NO: 192461 - protein, 7 aa, synthetic construct
RENRPTN

SEQ ID NO: 192462 - protein, 7 aa, synthetic construct
IKARDTS

SEQ ID NO: 192463 - protein, 7 aa, synthetic construct
RPNRIPE

SEQ ID NO: 192464 - protein, 7 aa, synthetic construct
RMPRDVS

SEQ ID NO: 192465 - protein, 7 aa, synthetic construct
QPHRVTS

SEQ ID NO: 192466 - protein, 7 aa, synthetic construct
KINRDTY

SEQ ID NO: 192467 - protein, 7 aa, synthetic construct
KQNRDTA

SEQ ID NO: 192468 - protein, 7 aa, synthetic construct
RPNKFDS

SEQ ID NO: 192469 - protein, 7 aa, synthetic construct
KGSRDTS

SEQ ID NO: 192470 - protein, 7 aa, synthetic construct
RPARDTQ

SEQ ID NO: 192471 - protein, 7 aa, synthetic construct
RPVRDTS

SEQ ID NO: 192472 - protein, 7 aa, synthetic construct
YGKRDTS

SEQ ID NO: 192473 - protein, 7 aa, synthetic construct
RPERILS

SEQ ID NO: 192474 - protein, 7 aa, synthetic construct
VTKRDTS

SEQ ID NO: 192475 - protein, 7 aa, synthetic construct
KNNRDTY

SEQ ID NO: 192476 - protein, 7 aa, synthetic construct
IPRRDPS

SEQ ID NO: 192477 - protein, 7 aa, synthetic construct
RPKFDVS

SEQ ID NO: 192478 - protein, 7 aa, synthetic construct
KPVRDTL

SEQ ID NO: 192479 - protein, 7 aa, synthetic construct
RLVRETS

SEQ ID NO: 192480 - protein, 7 aa, synthetic construct
NPNRKDS

SEQ ID NO: 192481 - protein, 7 aa, synthetic construct
YPSRDKS

SEQ ID NO: 192482 - protein, 7 aa, synthetic construct
RMNRMTE

SEQ ID NO: 192483 - protein, 7 aa, synthetic construct
RPTRDMT

SEQ ID NO: 192484 - protein, 7 aa, synthetic construct
KQNRDTM

SEQ ID NO: 192485 - protein, 7 aa, synthetic construct
NQKRDTS

SEQ ID NO: 192486 - protein, 7 aa, synthetic construct
GPSRDKS

SEQ ID NO: 192487 - protein, 7 aa, synthetic construct
RPERPMS

SEQ ID NO: 192488 - protein, 7 aa, synthetic construct
RPDRDQR

SEQ ID NO: 192489 - protein, 7 aa, synthetic construct
RGVRDTG

SEQ ID NO: 192490 - protein, 7 aa, synthetic construct
QRNRDTV

SEQ ID NO: 192491 - protein, 7 aa, synthetic construct
RADRSTS

SEQ ID NO: 192492 - protein, 7 aa, synthetic construct
RLPRDTQ

SEQ ID NO: 192493 - protein, 7 aa, synthetic construct
GGNRDTK

SEQ ID NO: 192494 - protein, 7 aa, synthetic construct
RPNRIEV

SEQ ID NO: 192495 - protein, 7 aa, synthetic construct
RPRQDSS

SEQ ID NO: 192496 - protein, 7 aa, synthetic construct
RVTRDVS

SEQ ID NO: 192497 - protein, 7 aa, synthetic construct
RPIRDNV

SEQ ID NO: 192498 - protein, 7 aa, synthetic construct
RANRDTV

SEQ ID NO: 192499 - protein, 7 aa, synthetic construct
RPQRDVG

SEQ ID NO: 192500 - protein, 7 aa, synthetic construct
RPTRDAV

SEQ ID NO: 192501 - protein, 7 aa, synthetic construct
RPNREPS

SEQ ID NO: 192502 - protein, 7 aa, synthetic construct
RPNRVET

SEQ ID NO: 192503 - protein, 7 aa, synthetic construct
TKQRDTS

SEQ ID NO: 192504 - protein, 7 aa, synthetic construct
LKNRDPS

SEQ ID NO: 192505 - protein, 7 aa, synthetic construct
VKNRDIS

SEQ ID NO: 192506 - protein, 7 aa, synthetic construct
RPERSTT

SEQ ID NO: 192507 - protein, 7 aa, synthetic construct
IPGRDKS

SEQ ID NO: 192508 - protein, 7 aa, synthetic construct
GPHRNTS

SEQ ID NO: 192509 - protein, 7 aa, synthetic construct
RSPRDTT

SEQ ID NO: 192510 - protein, 7 aa, synthetic construct
RPNRVEA

SEQ ID NO: 192511 - protein, 7 aa, synthetic construct
RIGRETS

SEQ ID NO: 192512 - protein, 7 aa, synthetic construct
RPRVDQS

SEQ ID NO: 192513 - protein, 7 aa, synthetic construct
KPNRDPT

SEQ ID NO: 192514 - protein, 7 aa, synthetic construct
APKRDAS

SEQ ID NO: 192515 - protein, 7 aa, synthetic construct
RVRQDTS

SEQ ID NO: 192516 - protein, 7 aa, synthetic construct
LPKRDTT

SEQ ID NO: 192517 - protein, 7 aa, synthetic construct
RPNRESI

SEQ ID NO: 192518 - protein, 7 aa, synthetic construct
RLNPYTS

SEQ ID NO: 192519 - protein, 7 aa, synthetic construct
APNRKDS

SEQ ID NO: 192520 - protein, 7 aa, synthetic construct
RMNRETL

SEQ ID NO: 192521 - protein, 7 aa, synthetic construct
RAGRDTT

SEQ ID NO: 192522 - protein, 7 aa, synthetic construct
RLNRETG

SEQ ID NO: 192523 - protein, 7 aa, synthetic construct
RPDRDSR

SEQ ID NO: 192524 - protein, 7 aa, synthetic construct
QPKRDTY

SEQ ID NO: 192525 - protein, 7 aa, synthetic construct
KPNRNES

SEQ ID NO: 192526 - protein, 7 aa, synthetic construct
RPHGNTS

SEQ ID NO: 192527 - protein, 7 aa, synthetic construct
RPTRDAG

SEQ ID NO: 192528 - protein, 7 aa, synthetic construct
RPSRDSS

SEQ ID NO: 192529 - protein, 7 aa, synthetic construct
RPVRDSN

SEQ ID NO: 192530 - protein, 7 aa, synthetic construct
QKNRDFS

SEQ ID NO: 192531 - protein, 7 aa, synthetic construct
IPNRDRQ

SEQ ID NO: 192532 - protein, 7 aa, synthetic construct
RPTRDVM

SEQ ID NO: 192533 - protein, 7 aa, synthetic construct
RPRDTTS

SEQ ID NO: 192534 - protein, 7 aa, synthetic construct
RPERPNS

SEQ ID NO: 192535 - protein, 7 aa, synthetic construct
RLNRDVS

SEQ ID NO: 192536 - protein, 7 aa, synthetic construct
RGNRDQG

SEQ ID NO: 192537 - protein, 7 aa, synthetic construct
KPNRLTD

SEQ ID NO: 192538 - protein, 7 aa, synthetic construct
FPKRDTM

SEQ ID NO: 192539 - protein, 7 aa, synthetic construct
RPARDIQ

SEQ ID NO: 192540 - protein, 7 aa, synthetic construct
RVNRENS

SEQ ID NO: 192541 - protein, 7 aa, synthetic construct
KPNRDGS

SEQ ID NO: 192542 - protein, 7 aa, synthetic construct
RLNRDVV

SEQ ID NO: 192543 - protein, 7 aa, synthetic construct
RPLKDTY

SEQ ID NO: 192544 - protein, 7 aa, synthetic construct
KVNRDTV

SEQ ID NO: 192545 - protein, 7 aa, synthetic construct
RPARETQ

SEQ ID NO: 192546 - protein, 7 aa, synthetic construct
MTKRDTS

SEQ ID NO: 192547 - protein, 7 aa, synthetic construct
KPNRDPP

SEQ ID NO: 192548 - protein, 7 aa, synthetic construct
RPQRGTD

SEQ ID NO: 192549 - protein, 7 aa, synthetic construct
RPNRSEA

SEQ ID NO: 192550 - protein, 7 aa, synthetic construct
RPVRDNY

SEQ ID NO: 192551 - protein, 7 aa, synthetic construct
RSGRDTA

SEQ ID NO: 192552 - protein, 7 aa, synthetic construct
KPNRDTG

SEQ ID NO: 192553 - protein, 7 aa, synthetic construct
RGFKDTS

SEQ ID NO: 192554 - protein, 7 aa, synthetic construct
AKNRDTM

SEQ ID NO: 192555 - protein, 7 aa, synthetic construct
RPNPHNS

SEQ ID NO: 192556 - protein, 7 aa, synthetic construct
RPLRDNN

SEQ ID NO: 192557 - protein, 7 aa, synthetic construct
RPLRQES

SEQ ID NO: 192558 - protein, 7 aa, synthetic construct
LNNRDTK

SEQ ID NO: 192559 - protein, 7 aa, synthetic construct
RQVRDTN

SEQ ID NO: 192560 - protein, 7 aa, synthetic construct
RNVRDLS

SEQ ID NO: 192561 - protein, 7 aa, synthetic construct
RTNRETL

SEQ ID NO: 192562 - protein, 7 aa, synthetic construct
RTNRETG

SEQ ID NO: 192563 - protein, 7 aa, synthetic construct
RPGRDSM

SEQ ID NO: 192564 - protein, 7 aa, synthetic construct
RPNRVQE

SEQ ID NO: 192565 - protein, 7 aa, synthetic construct
RPHSITS

SEQ ID NO: 192566 - protein, 7 aa, synthetic construct
RPTRDLG

SEQ ID NO: 192567 - protein, 7 aa, synthetic construct
RAARDLS

SEQ ID NO: 192568 - protein, 7 aa, synthetic construct
FPSRDKS

SEQ ID NO: 192569 - protein, 7 aa, synthetic construct
MKNRDPS

SEQ ID NO: 192570 - protein, 7 aa, synthetic construct
APFRDKS

SEQ ID NO: 192571 - protein, 7 aa, synthetic construct
RPSRDQN

SEQ ID NO: 192572 - protein, 7 aa, synthetic construct
RQPRDVS

SEQ ID NO: 192573 - protein, 7 aa, synthetic construct
LKNRDQS

SEQ ID NO: 192574 - protein, 7 aa, synthetic construct
HPNRDRV

SEQ ID NO: 192575 - protein, 7 aa, synthetic construct
RPVRDSL

SEQ ID NO: 192576 - protein, 7 aa, synthetic construct
KMNRDTY

SEQ ID NO: 192577 - protein, 7 aa, synthetic construct
RTQRDVS

SEQ ID NO: 192578 - protein, 7 aa, synthetic construct
RQVRDTG

SEQ ID NO: 192579 - protein, 7 aa, synthetic construct
RPDRIHS

SEQ ID NO: 192580 - protein, 7 aa, synthetic construct
RTQRDIS

SEQ ID NO: 192581 - protein, 7 aa, synthetic construct
REARVTS

SEQ ID NO: 192582 - protein, 7 aa, synthetic construct
KANRDTN

SEQ ID NO: 192583 - protein, 7 aa, synthetic construct
RSNKDTY

SEQ ID NO: 192584 - protein, 7 aa, synthetic construct
RPDRHTG

SEQ ID NO: 192585 - protein, 7 aa, synthetic construct
RGNRDGI

SEQ ID NO: 192586 - protein, 7 aa, synthetic construct
RPARDTV

SEQ ID NO: 192587 - protein, 7 aa, synthetic construct
RINRITE

SEQ ID NO: 192588 - protein, 7 aa, synthetic construct
KSNRDTP

SEQ ID NO: 192589 - protein, 7 aa, synthetic construct
RADRPTS

SEQ ID NO: 192590 - protein, 7 aa, synthetic construct
RNVRDNS

SEQ ID NO: 192591 - protein, 7 aa, synthetic construct
RLNRETT

SEQ ID NO: 192592 - protein, 7 aa, synthetic construct
REVRGTS

SEQ ID NO: 192593 - protein, 7 aa, synthetic construct
RQNRDTS

SEQ ID NO: 192594 - protein, 7 aa, synthetic construct
RDGRTTS

SEQ ID NO: 192595 - protein, 7 aa, synthetic construct
RVGRDTM

SEQ ID NO: 192596 - protein, 7 aa, synthetic construct
PKNRDGS

SEQ ID NO: 192597 - protein, 7 aa, synthetic construct
RATRDTG

SEQ ID NO: 192598 - protein, 7 aa, synthetic construct
RPARLTD

SEQ ID NO: 192599 - protein, 7 aa, synthetic construct
VPKRDYS

SEQ ID NO: 192600 - protein, 7 aa, synthetic construct
VRVRDTS

SEQ ID NO: 192601 - protein, 7 aa, synthetic construct
RPNRDVM

SEQ ID NO: 192602 - protein, 7 aa, synthetic construct
KGNRDTS

SEQ ID NO: 192603 - protein, 7 aa, synthetic construct
RNNREVS

SEQ ID NO: 192604 - protein, 7 aa, synthetic construct
RQNKDTT

SEQ ID NO: 192605 - protein, 7 aa, synthetic construct
KPNRQDS

SEQ ID NO: 192606 - protein, 7 aa, synthetic construct
VPKRDTF

SEQ ID NO: 192607 - protein, 7 aa, synthetic construct
KPHRDTS

SEQ ID NO: 192608 - protein, 7 aa, synthetic construct
KPNRETS

SEQ ID NO: 192609 - protein, 7 aa, synthetic construct
RNVRDTT

SEQ ID NO: 192610 - protein, 7 aa, synthetic construct
RPAREQS

SEQ ID NO: 192611 - protein, 7 aa, synthetic construct
RKERDTF

SEQ ID NO: 192612 - protein, 7 aa, synthetic construct
RPARDAV

SEQ ID NO: 192613 - protein, 7 aa, synthetic construct
RTTRDQS

SEQ ID NO: 192614 - protein, 7 aa, synthetic construct
RPHVSTS

SEQ ID NO: 192615 - protein, 7 aa, synthetic construct
RPERMLS

SEQ ID NO: 192616 - protein, 7 aa, synthetic construct
RPERNQS

SEQ ID NO: 192617 - protein, 7 aa, synthetic construct
RSPRDTM

SEQ ID NO: 192618 - protein, 7 aa, synthetic construct
NKNRDLS

SEQ ID NO: 192619 - protein, 7 aa, synthetic construct
RHNKDTV

SEQ ID NO: 192620 - protein, 7 aa, synthetic construct
RMNRDTV

SEQ ID NO: 192621 - protein, 7 aa, synthetic construct
APKRDTM

SEQ ID NO: 192622 - protein, 7 aa, synthetic construct
FPKRDTG

SEQ ID NO: 192623 - protein, 7 aa, synthetic construct
RPHGMTS

SEQ ID NO: 192624 - protein, 7 aa, synthetic construct
RPMRDDK

SEQ ID NO: 192625 - protein, 7 aa, synthetic construct
RQTRDTV

SEQ ID NO: 192626 - protein, 7 aa, synthetic construct
YKNRDQS

SEQ ID NO: 192627 - protein, 7 aa, synthetic construct
RPTHSTS

SEQ ID NO: 192628 - protein, 7 aa, synthetic construct
RQARDTV

SEQ ID NO: 192629 - protein, 7 aa, synthetic construct
RLERSTS

SEQ ID NO: 192630 - protein, 7 aa, synthetic construct
RANKDTQ

SEQ ID NO: 192631 - protein, 7 aa, synthetic construct
SKSRDTS

SEQ ID NO: 192632 - protein, 7 aa, synthetic construct
RPRSDTI

SEQ ID NO: 192633 - protein, 7 aa, synthetic construct
RPGRETT

SEQ ID NO: 192634 - protein, 7 aa, synthetic construct
RVNRDLA

SEQ ID NO: 192635 - protein, 7 aa, synthetic construct
YANRDTK

SEQ ID NO: 192636 - protein, 7 aa, synthetic construct
RTNRDAV

SEQ ID NO: 192637 - protein, 7 aa, synthetic construct
KPMRDHS

SEQ ID NO: 192638 - protein, 7 aa, synthetic construct
KVNRDPS

SEQ ID NO: 192639 - protein, 7 aa, synthetic construct
REARDTK

SEQ ID NO: 192640 - protein, 7 aa, synthetic construct
RMNRDSV

SEQ ID NO: 192641 - protein, 7 aa, synthetic construct
RSDRDRS

SEQ ID NO: 192642 - protein, 7 aa, synthetic construct
RKDRDIS

SEQ ID NO: 192643 - protein, 7 aa, synthetic construct
RPTHATS

SEQ ID NO: 192644 - protein, 7 aa, synthetic construct
EPVRKTS

SEQ ID NO: 192645 - protein, 7 aa, synthetic construct
IPNRDKQ

SEQ ID NO: 192646 - protein, 7 aa, synthetic construct
PRNRDTV

SEQ ID NO: 192647 - protein, 7 aa, synthetic construct
RLNKDTL

SEQ ID NO: 192648 - protein, 7 aa, synthetic construct
VPHRVTS

SEQ ID NO: 192649 - protein, 7 aa, synthetic construct
RMNREGS

SEQ ID NO: 192650 - protein, 7 aa, synthetic construct
RPTRVES

SEQ ID NO: 192651 - protein, 7 aa, synthetic construct
RPSRDSV

SEQ ID NO: 192652 - protein, 7 aa, synthetic construct
RPNRAGE

SEQ ID NO: 192653 - protein, 7 aa, synthetic construct
RPNRGDT

SEQ ID NO: 192654 - protein, 7 aa, synthetic construct
RPNVRES

SEQ ID NO: 192655 - protein, 7 aa, synthetic construct
RQDRPTS

SEQ ID NO: 192656 - protein, 7 aa, synthetic construct
RPHSMTS

SEQ ID NO: 192657 - protein, 7 aa, synthetic construct
RPNREIT

SEQ ID NO: 192658 - protein, 7 aa, synthetic construct
RASRDMS

SEQ ID NO: 192659 - protein, 7 aa, synthetic construct
RGTRDMS

SEQ ID NO: 192660 - protein, 7 aa, synthetic construct
RPERATT

SEQ ID NO: 192661 - protein, 7 aa, synthetic construct
PVNRDKS

SEQ ID NO: 192662 - protein, 7 aa, synthetic construct
RQPRDTQ

SEQ ID NO: 192663 - protein, 7 aa, synthetic construct
RINRDVS

SEQ ID NO: 192664 - protein, 7 aa, synthetic construct
RENPRTS

SEQ ID NO: 192665 - protein, 7 aa, synthetic construct
RPQRDLA

SEQ ID NO: 192666 - protein, 7 aa, synthetic construct
RPERLHS

SEQ ID NO: 192667 - protein, 7 aa, synthetic construct
RPPHSTS

SEQ ID NO: 192668 - protein, 7 aa, synthetic construct
KPARDYS

SEQ ID NO: 192669 - protein, 7 aa, synthetic construct
RPSRDVT

SEQ ID NO: 192670 - protein, 7 aa, synthetic construct
IPFRDKS

SEQ ID NO: 192671 - protein, 7 aa, synthetic construct
QKNRDIS

SEQ ID NO: 192672 - protein, 7 aa, synthetic construct
RLPRDTA

SEQ ID NO: 192673 - protein, 7 aa, synthetic construct
RPRIETS

SEQ ID NO: 192674 - protein, 7 aa, synthetic construct
KPQRDFS

SEQ ID NO: 192675 - protein, 7 aa, synthetic construct
VRNKDTS

SEQ ID NO: 192676 - protein, 7 aa, synthetic construct
RESRATS

SEQ ID NO: 192677 - protein, 7 aa, synthetic construct
RNLRDTG

SEQ ID NO: 192678 - protein, 7 aa, synthetic construct
RTIRDTG

SEQ ID NO: 192679 - protein, 7 aa, synthetic construct
KPNRDRD

SEQ ID NO: 192680 - protein, 7 aa, synthetic construct
KPNREYS

SEQ ID NO: 192681 - protein, 7 aa, synthetic construct
KVNRDTM

SEQ ID NO: 192682 - protein, 7 aa, synthetic construct
RLNREQS

SEQ ID NO: 192683 - protein, 7 aa, synthetic construct
RANRDIA

SEQ ID NO: 192684 - protein, 7 aa, synthetic construct
RPRESTS

SEQ ID NO: 192685 - protein, 7 aa, synthetic construct
RVNRGTE

SEQ ID NO: 192686 - protein, 7 aa, synthetic construct
SLKRDTS

SEQ ID NO: 192687 - protein, 7 aa, synthetic construct
RTPRDSS

SEQ ID NO: 192688 - protein, 7 aa, synthetic construct
RVMRDTV

SEQ ID NO: 192689 - protein, 7 aa, synthetic construct
RPSKDHS

SEQ ID NO: 192690 - protein, 7 aa, synthetic construct
GPNYKTS

SEQ ID NO: 192691 - protein, 7 aa, synthetic construct
QKNRDTG

SEQ ID NO: 192692 - protein, 7 aa, synthetic construct
RPDRITT

SEQ ID NO: 192693 - protein, 7 aa, synthetic construct
RAARDTT

SEQ ID NO: 192694 - protein, 7 aa, synthetic construct
IPNRDKH

SEQ ID NO: 192695 - protein, 7 aa, synthetic construct
RVNKDTL

SEQ ID NO: 192696 - protein, 7 aa, synthetic construct
LPKRDTY

SEQ ID NO: 192697 - protein, 7 aa, synthetic construct
RPRTDMS

SEQ ID NO: 192698 - protein, 7 aa, synthetic construct
KQPRDTS

SEQ ID NO: 192699 - protein, 7 aa, synthetic construct
MRNRDTA

SEQ ID NO: 192700 - protein, 7 aa, synthetic construct
RPSHDTR

SEQ ID NO: 192701 - protein, 7 aa, synthetic construct
RSSRDTP

SEQ ID NO: 192702 - protein, 7 aa, synthetic construct
HPNRISS

SEQ ID NO: 192703 - protein, 7 aa, synthetic construct
APKRDTA

SEQ ID NO: 192704 - protein, 7 aa, synthetic construct
RQNRGDS

SEQ ID NO: 192705 - protein, 7 aa, synthetic construct
RPSREIS

SEQ ID NO: 192706 - protein, 7 aa, synthetic construct
RMNRLES

SEQ ID NO: 192707 - protein, 7 aa, synthetic construct
RVNRELS

SEQ ID NO: 192708 - protein, 7 aa, synthetic construct
RPERDMR

SEQ ID NO: 192709 - protein, 7 aa, synthetic construct
RHNVQTS

SEQ ID NO: 192710 - protein, 7 aa, synthetic construct
IKNRDTY

SEQ ID NO: 192711 - protein, 7 aa, synthetic construct
RPIRESS

SEQ ID NO: 192712 - protein, 7 aa, synthetic construct
RKNVDTL

SEQ ID NO: 192713 - protein, 7 aa, synthetic construct
RPSRDTM

SEQ ID NO: 192714 - protein, 7 aa, synthetic construct
RPARDNY

SEQ ID NO: 192715 - protein, 7 aa, synthetic construct
RPNMDSR

SEQ ID NO: 192716 - protein, 7 aa, synthetic construct
RPERSAS

SEQ ID NO: 192717 - protein, 7 aa, synthetic construct
LKSRDTS

SEQ ID NO: 192718 - protein, 7 aa, synthetic construct
KGPRDTS

SEQ ID NO: 192719 - protein, 7 aa, synthetic construct
RGNREMS

SEQ ID NO: 192720 - protein, 7 aa, synthetic construct
RVVRDTV

SEQ ID NO: 192721 - protein, 7 aa, synthetic construct
RPARDIN

SEQ ID NO: 192722 - protein, 7 aa, synthetic construct
KQSRDTS

SEQ ID NO: 192723 - protein, 7 aa, synthetic construct
RESRVTS

SEQ ID NO: 192724 - protein, 7 aa, synthetic construct
MPGRHTS

SEQ ID NO: 192725 - protein, 7 aa, synthetic construct
YKARDTS

SEQ ID NO: 192726 - protein, 7 aa, synthetic construct
KPSRDTT

SEQ ID NO: 192727 - protein, 7 aa, synthetic construct
KQNRDGS

SEQ ID NO: 192728 - protein, 7 aa, synthetic construct
RTSRETS

SEQ ID NO: 192729 - protein, 7 aa, synthetic construct
RPNRENV

SEQ ID NO: 192730 - protein, 7 aa, synthetic construct
QPGRHTS

SEQ ID NO: 192731 - protein, 7 aa, synthetic construct
RENKPTS

SEQ ID NO: 192732 - protein, 7 aa, synthetic construct
RQNRETP

SEQ ID NO: 192733 - protein, 7 aa, synthetic construct
RTQRDTS

SEQ ID NO: 192734 - protein, 7 aa, synthetic construct
IKNRDMS

SEQ ID NO: 192735 - protein, 7 aa, synthetic construct
RPNRQES

SEQ ID NO: 192736 - protein, 7 aa, synthetic construct
VSNRDKS

SEQ ID NO: 192737 - protein, 7 aa, synthetic construct
RQVRDGS

SEQ ID NO: 192738 - protein, 7 aa, synthetic construct
RPKGDTH

SEQ ID NO: 192739 - protein, 7 aa, synthetic construct
RVPRDTM

SEQ ID NO: 192740 - protein, 7 aa, synthetic construct
RPNRGEM

SEQ ID NO: 192741 - protein, 7 aa, synthetic construct
GPKRDTF

SEQ ID NO: 192742 - protein, 7 aa, synthetic construct
KVNRDAS

SEQ ID NO: 192743 - protein, 7 aa, synthetic construct
KNNRDTV

SEQ ID NO: 192744 - protein, 7 aa, synthetic construct
RPARDPL

SEQ ID NO: 192745 - protein, 7 aa, synthetic construct
RPSRDIA

SEQ ID NO: 192746 - protein, 7 aa, synthetic construct
RQARDTP

SEQ ID NO: 192747 - protein, 7 aa, synthetic construct
RPHQNTS

SEQ ID NO: 192748 - protein, 7 aa, synthetic construct
RPERPLS

SEQ ID NO: 192749 - protein, 7 aa, synthetic construct
AKQRDTS

SEQ ID NO: 192750 - protein, 7 aa, synthetic construct
RPARAES

SEQ ID NO: 192751 - protein, 7 aa, synthetic construct
RQARETS

SEQ ID NO: 192752 - protein, 7 aa, synthetic construct
RNTRDTT

SEQ ID NO: 192753 - protein, 7 aa, synthetic construct
RPTRDGM

SEQ ID NO: 192754 - protein, 7 aa, synthetic construct
RQSRDTI

SEQ ID NO: 192755 - protein, 7 aa, synthetic construct
IVNRDKS

SEQ ID NO: 192756 - protein, 7 aa, synthetic construct
RQSRDTS

SEQ ID NO: 192757 - protein, 7 aa, synthetic construct
RPVRDTN

SEQ ID NO: 192758 - protein, 7 aa, synthetic construct
RPTKDPS

SEQ ID NO: 192759 - protein, 7 aa, synthetic construct
RANRDTM

SEQ ID NO: 192760 - protein, 7 aa, synthetic construct
VPKRDTI

SEQ ID NO: 192761 - protein, 7 aa, synthetic construct
RPTRAES

SEQ ID NO: 192762 - protein, 7 aa, synthetic construct
RENRETK

SEQ ID NO: 192763 - protein, 7 aa, synthetic construct
RHNPPTS

SEQ ID NO: 192764 - protein, 7 aa, synthetic construct
RPARDLV

SEQ ID NO: 192765 - protein, 7 aa, synthetic construct
FPRRDTG

SEQ ID NO: 192766 - protein, 7 aa, synthetic construct
RPVRDQY

SEQ ID NO: 192767 - protein, 7 aa, synthetic construct
PRNRDGS

SEQ ID NO: 192768 - protein, 7 aa, synthetic construct
LPRKDTS

SEQ ID NO: 192769 - protein, 7 aa, synthetic construct
RPQRDLS

SEQ ID NO: 192770 - protein, 7 aa, synthetic construct
RMNREAS

SEQ ID NO: 192771 - protein, 7 aa, synthetic construct
KFNRETS

SEQ ID NO: 192772 - protein, 7 aa, synthetic construct
RMSKDTS

SEQ ID NO: 192773 - protein, 7 aa, synthetic construct
RPNRVDP

SEQ ID NO: 192774 - protein, 7 aa, synthetic construct
RLERDKS

SEQ ID NO: 192775 - protein, 7 aa, synthetic construct
RPLRDAS

SEQ ID NO: 192776 - protein, 7 aa, synthetic construct
TPRRETS

SEQ ID NO: 192777 - protein, 7 aa, synthetic construct
RPNRELL

SEQ ID NO: 192778 - protein, 7 aa, synthetic construct
RPVRVES

SEQ ID NO: 192779 - protein, 7 aa, synthetic construct
KNARDTS

SEQ ID NO: 192780 - protein, 7 aa, synthetic construct
KINRDTF

SEQ ID NO: 192781 - protein, 7 aa, synthetic construct
RPIREQS

SEQ ID NO: 192782 - protein, 7 aa, synthetic construct
RMPRDTM

SEQ ID NO: 192783 - protein, 7 aa, synthetic construct
RVPRDGS

SEQ ID NO: 192784 - protein, 7 aa, synthetic construct
RMNRDQI

SEQ ID NO: 192785 - protein, 7 aa, synthetic construct
LKQRDTS

SEQ ID NO: 192786 - protein, 7 aa, synthetic construct
RMNRDVA

SEQ ID NO: 192787 - protein, 7 aa, synthetic construct
FANRDTK

SEQ ID NO: 192788 - protein, 7 aa, synthetic construct
APTRHTS

SEQ ID NO: 192789 - protein, 7 aa, synthetic construct
RPNRESN

SEQ ID NO: 192790 - protein, 7 aa, synthetic construct
RPDRTSS

SEQ ID NO: 192791 - protein, 7 aa, synthetic construct
AKGRDTS

SEQ ID NO: 192792 - protein, 7 aa, synthetic construct
RVGRETS

SEQ ID NO: 192793 - protein, 7 aa, synthetic construct
RQNRQES

SEQ ID NO: 192794 - protein, 7 aa, synthetic construct
RPNMDNR

SEQ ID NO: 192795 - protein, 7 aa, synthetic construct
MPRRDTI

SEQ ID NO: 192796 - protein, 7 aa, synthetic construct
KPNRDSL

SEQ ID NO: 192797 - protein, 7 aa, synthetic construct
RPNRDVN

SEQ ID NO: 192798 - protein, 7 aa, synthetic construct
RPNRVEN

SEQ ID NO: 192799 - protein, 7 aa, synthetic construct
RPTRDIN

SEQ ID NO: 192800 - protein, 7 aa, synthetic construct
RPSRDNT

SEQ ID NO: 192801 - protein, 7 aa, synthetic construct
RANRDVI

SEQ ID NO: 192802 - protein, 7 aa, synthetic construct
RSERNTS

SEQ ID NO: 192803 - protein, 7 aa, synthetic construct
RPNRDST

SEQ ID NO: 192804 - protein, 7 aa, synthetic construct
RPQRQDS

SEQ ID NO: 192805 - protein, 7 aa, synthetic construct
RPVRVDS

SEQ ID NO: 192806 - protein, 7 aa, synthetic construct
RPQRETL

SEQ ID NO: 192807 - protein, 7 aa, synthetic construct
MRQRDTS

SEQ ID NO: 192808 - protein, 7 aa, synthetic construct
RPTRDDR

SEQ ID NO: 192809 - protein, 7 aa, synthetic construct
RPNRESA

SEQ ID NO: 192810 - protein, 7 aa, synthetic construct
IRNRDTV

SEQ ID NO: 192811 - protein, 7 aa, synthetic construct
RPDRDAR

SEQ ID NO: 192812 - protein, 7 aa, synthetic construct
PINRDKS

SEQ ID NO: 192813 - protein, 7 aa, synthetic construct
RPQRDPM

SEQ ID NO: 192814 - protein, 7 aa, synthetic construct
RSNRDGG

SEQ ID NO: 192815 - protein, 7 aa, synthetic construct
RSNKDTS

SEQ ID NO: 192816 - protein, 7 aa, synthetic construct
RPVRDMT

SEQ ID NO: 192817 - protein, 7 aa, synthetic construct
RPVRDIG

SEQ ID NO: 192818 - protein, 7 aa, synthetic construct
RPGRDSV

SEQ ID NO: 192819 - protein, 7 aa, synthetic construct
RTSRDVS

SEQ ID NO: 192820 - protein, 7 aa, synthetic construct
RPDRMLS

SEQ ID NO: 192821 - protein, 7 aa, synthetic construct
RPSRDDR

SEQ ID NO: 192822 - protein, 7 aa, synthetic construct
RPERMTT

SEQ ID NO: 192823 - protein, 7 aa, synthetic construct
RPLRDQA

SEQ ID NO: 192824 - protein, 7 aa, synthetic construct
KTNRDTF

SEQ ID NO: 192825 - protein, 7 aa, synthetic construct
RPARDNA

SEQ ID NO: 192826 - protein, 7 aa, synthetic construct
RNPRETS

SEQ ID NO: 192827 - protein, 7 aa, synthetic construct
RPERDRV

SEQ ID NO: 192828 - protein, 7 aa, synthetic construct
RSVRDTA

SEQ ID NO: 192829 - protein, 7 aa, synthetic construct
KPNRDII

SEQ ID NO: 192830 - protein, 7 aa, synthetic construct
RPPRDSM

SEQ ID NO: 192831 - protein, 7 aa, synthetic construct
RPMRTTE

SEQ ID NO: 192832 - protein, 7 aa, synthetic construct
RNPRDTM

SEQ ID NO: 192833 - protein, 7 aa, synthetic construct
FKNRDTA

SEQ ID NO: 192834 - protein, 7 aa, synthetic construct
RPTRDSL

SEQ ID NO: 192835 - protein, 7 aa, synthetic construct
RPNADPR

SEQ ID NO: 192836 - protein, 7 aa, synthetic construct
RPNKDYL

SEQ ID NO: 192837 - protein, 7 aa, synthetic construct
KANRDTF

SEQ ID NO: 192838 - protein, 7 aa, synthetic construct
RPVRDSM

SEQ ID NO: 192839 - protein, 7 aa, synthetic construct
RPSHITS

SEQ ID NO: 192840 - protein, 7 aa, synthetic construct
RPTRDIG

SEQ ID NO: 192841 - protein, 7 aa, synthetic construct
KPNRTDS

SEQ ID NO: 192842 - protein, 7 aa, synthetic construct
YPRKDTS

SEQ ID NO: 192843 - protein, 7 aa, synthetic construct
RPERHLS

SEQ ID NO: 192844 - protein, 7 aa, synthetic construct
RPERVNS

SEQ ID NO: 192845 - protein, 7 aa, synthetic construct
RTERVTS

SEQ ID NO: 192846 - protein, 7 aa, synthetic construct
RHNVITS

SEQ ID NO: 192847 - protein, 7 aa, synthetic construct
RPQRAES

SEQ ID NO: 192848 - protein, 7 aa, synthetic construct
KINRDAS

SEQ ID NO: 192849 - protein, 7 aa, synthetic construct
DPNRTRS

SEQ ID NO: 192850 - protein, 7 aa, synthetic construct
FPRRETS

SEQ ID NO: 192851 - protein, 7 aa, synthetic construct
RPFKDPS

SEQ ID NO: 192852 - protein, 7 aa, synthetic construct
KQNRDFS

SEQ ID NO: 192853 - protein, 7 aa, synthetic construct
RTQRDAS

SEQ ID NO: 192854 - protein, 7 aa, synthetic construct
RSNRDAV

SEQ ID NO: 192855 - protein, 7 aa, synthetic construct
APNRDKY

SEQ ID NO: 192856 - protein, 7 aa, synthetic construct
RPTRIDS

SEQ ID NO: 192857 - protein, 7 aa, synthetic construct
RPARETS

SEQ ID NO: 192858 - protein, 7 aa, synthetic construct
RFKSDTS

SEQ ID NO: 192859 - protein, 7 aa, synthetic construct
QPVRHTS

SEQ ID NO: 192860 - protein, 7 aa, synthetic construct
AKNRDTT

SEQ ID NO: 192861 - protein, 7 aa, synthetic construct
VPRRDNS

SEQ ID NO: 192862 - protein, 7 aa, synthetic construct
FPNRDKQ

SEQ ID NO: 192863 - protein, 7 aa, synthetic construct
VTNRDTR

SEQ ID NO: 192864 - protein, 7 aa, synthetic construct
RTARDTV

SEQ ID NO: 192865 - protein, 7 aa, synthetic construct
RADRDTK

SEQ ID NO: 192866 - protein, 7 aa, synthetic construct
RPDRGSS

SEQ ID NO: 192867 - protein, 7 aa, synthetic construct
RPNRGET

SEQ ID NO: 192868 - protein, 7 aa, synthetic construct
RMPRDPS

SEQ ID NO: 192869 - protein, 7 aa, synthetic construct
RATRDTV

SEQ ID NO: 192870 - protein, 7 aa, synthetic construct
RANIDTR

SEQ ID NO: 192871 - protein, 7 aa, synthetic construct
KSARDTS

SEQ ID NO: 192872 - protein, 7 aa, synthetic construct
VKNRDAS

SEQ ID NO: 192873 - protein, 7 aa, synthetic construct
RPNREPQ

SEQ ID NO: 192874 - protein, 7 aa, synthetic construct
RASRDLS

SEQ ID NO: 192875 - protein, 7 aa, synthetic construct
DPNRATR

SEQ ID NO: 192876 - protein, 7 aa, synthetic construct
FPKRDTH

SEQ ID NO: 192877 - protein, 7 aa, synthetic construct
RPQREYS

SEQ ID NO: 192878 - protein, 7 aa, synthetic construct
LPTRHTS

SEQ ID NO: 192879 - protein, 7 aa, synthetic construct
RPEKYTS

SEQ ID NO: 192880 - protein, 7 aa, synthetic construct
RPDRQQS

SEQ ID NO: 192881 - protein, 7 aa, synthetic construct
RPQRDNM

SEQ ID NO: 192882 - protein, 7 aa, synthetic construct
RLNKDPS

SEQ ID NO: 192883 - protein, 7 aa, synthetic construct
RTNRENS

SEQ ID NO: 192884 - protein, 7 aa, synthetic construct
LKNRDTA

SEQ ID NO: 192885 - protein, 7 aa, synthetic construct
TKNRDTY

SEQ ID NO: 192886 - protein, 7 aa, synthetic construct
FPVRDKS

SEQ ID NO: 192887 - protein, 7 aa, synthetic construct
RPNRDQF

SEQ ID NO: 192888 - protein, 7 aa, synthetic construct
KIGRDTS

SEQ ID NO: 192889 - protein, 7 aa, synthetic construct
RTPRDNS

SEQ ID NO: 192890 - protein, 7 aa, synthetic construct
LAKRDTS

SEQ ID NO: 192891 - protein, 7 aa, synthetic construct
RINRETT

SEQ ID NO: 192892 - protein, 7 aa, synthetic construct
IKNRDQS

SEQ ID NO: 192893 - protein, 7 aa, synthetic construct
RPARVES

SEQ ID NO: 192894 - protein, 7 aa, synthetic construct
LENRRTS

SEQ ID NO: 192895 - protein, 7 aa, synthetic construct
RPIRIES

SEQ ID NO: 192896 - protein, 7 aa, synthetic construct
PTKRDTS

SEQ ID NO: 192897 - protein, 7 aa, synthetic construct
RPVRDNN

SEQ ID NO: 192898 - protein, 7 aa, synthetic construct
YPKRETS

SEQ ID NO: 192899 - protein, 7 aa, synthetic construct
YKNRDTG

SEQ ID NO: 192900 - protein, 7 aa, synthetic construct
RMNRDGS

SEQ ID NO: 192901 - protein, 7 aa, synthetic construct
RPSRDMT

SEQ ID NO: 192902 - protein, 7 aa, synthetic construct
RGTRDTP

SEQ ID NO: 192903 - protein, 7 aa, synthetic construct
RPNREAF

SEQ ID NO: 192904 - protein, 7 aa, synthetic construct
NRTRDTS

SEQ ID NO: 192905 - protein, 7 aa, synthetic construct
RGNRETN

SEQ ID NO: 192906 - protein, 7 aa, synthetic construct
YPIRDKS

SEQ ID NO: 192907 - protein, 7 aa, synthetic construct
RPSRDPP

SEQ ID NO: 192908 - protein, 7 aa, synthetic construct
RPVRGDS

SEQ ID NO: 192909 - protein, 7 aa, synthetic construct
QANRDKS

SEQ ID NO: 192910 - protein, 7 aa, synthetic construct
RETRATS

SEQ ID NO: 192911 - protein, 7 aa, synthetic construct
RGNRDVT

SEQ ID NO: 192912 - protein, 7 aa, synthetic construct
RSNRDNP

SEQ ID NO: 192913 - protein, 7 aa, synthetic construct
EPKRVTS

SEQ ID NO: 192914 - protein, 7 aa, synthetic construct
RQNRVTE

SEQ ID NO: 192915 - protein, 7 aa, synthetic construct
RPNKPTD

SEQ ID NO: 192916 - protein, 7 aa, synthetic construct
RPGRGTE

SEQ ID NO: 192917 - protein, 7 aa, synthetic construct
RTDRDKS

SEQ ID NO: 192918 - protein, 7 aa, synthetic construct
RPKFDTT

SEQ ID NO: 192919 - protein, 7 aa, synthetic construct
RPDRVTM

SEQ ID NO: 192920 - protein, 7 aa, synthetic construct
QPHRATS

SEQ ID NO: 192921 - protein, 7 aa, synthetic construct
MPNRDRG

SEQ ID NO: 192922 - protein, 7 aa, synthetic construct
RPIRDDK

SEQ ID NO: 192923 - protein, 7 aa, synthetic construct
KMNRDIS

SEQ ID NO: 192924 - protein, 7 aa, synthetic construct
YKIRDTS

SEQ ID NO: 192925 - protein, 7 aa, synthetic construct
RPGRDPL

SEQ ID NO: 192926 - protein, 7 aa, synthetic construct
RPIRDNA

SEQ ID NO: 192927 - protein, 7 aa, synthetic construct
RTPRDTV

SEQ ID NO: 192928 - protein, 7 aa, synthetic construct
RMNRDGI

SEQ ID NO: 192929 - protein, 7 aa, synthetic construct
RPARDVN

SEQ ID NO: 192930 - protein, 7 aa, synthetic construct
EPNRITK

SEQ ID NO: 192931 - protein, 7 aa, synthetic construct
RPNKDPY

SEQ ID NO: 192932 - protein, 7 aa, synthetic construct
DPNRPTK

SEQ ID NO: 192933 - protein, 7 aa, synthetic construct
RPERATM

SEQ ID NO: 192934 - protein, 7 aa, synthetic construct
LHNRPTS

SEQ ID NO: 192935 - protein, 7 aa, synthetic construct
RPSRDFG

SEQ ID NO: 192936 - protein, 7 aa, synthetic construct
RSNRDVS

SEQ ID NO: 192937 - protein, 7 aa, synthetic construct
RDNRDSK

SEQ ID NO: 192938 - protein, 7 aa, synthetic construct
RPDRLTT

SEQ ID NO: 192939 - protein, 7 aa, synthetic construct
RMKSDTS

SEQ ID NO: 192940 - protein, 7 aa, synthetic construct
RPVRDVQ

SEQ ID NO: 192941 - protein, 7 aa, synthetic construct
RPHGGTS

SEQ ID NO: 192942 - protein, 7 aa, synthetic construct
IPRRDTA

SEQ ID NO: 192943 - protein, 7 aa, synthetic construct
SNKRDTS

SEQ ID NO: 192944 - protein, 7 aa, synthetic construct
RPQRMTD

SEQ ID NO: 192945 - protein, 7 aa, synthetic construct
RPERKDS

SEQ ID NO: 192946 - protein, 7 aa, synthetic construct
YPKRDNS

SEQ ID NO: 192947 - protein, 7 aa, synthetic construct
RPHGQTS

SEQ ID NO: 192948 - protein, 7 aa, synthetic construct
RPLHGTS

SEQ ID NO: 192949 - protein, 7 aa, synthetic construct
RPMRDIS

SEQ ID NO: 192950 - protein, 7 aa, synthetic construct
RMNVDTR

SEQ ID NO: 192951 - protein, 7 aa, synthetic construct
RTARDTA

SEQ ID NO: 192952 - protein, 7 aa, synthetic construct
RNPRDLS

SEQ ID NO: 192953 - protein, 7 aa, synthetic construct
RPDRNMS

SEQ ID NO: 192954 - protein, 7 aa, synthetic construct
KPNRNDS

SEQ ID NO: 192955 - protein, 7 aa, synthetic construct
RVPRDNS

SEQ ID NO: 192956 - protein, 7 aa, synthetic construct
RPNRDNV

SEQ ID NO: 192957 - protein, 7 aa, synthetic construct
RLNRDMG

SEQ ID NO: 192958 - protein, 7 aa, synthetic construct
FPKRDVS

SEQ ID NO: 192959 - protein, 7 aa, synthetic construct
RPDRQNS

SEQ ID NO: 192960 - protein, 7 aa, synthetic construct
RPNRPDA

SEQ ID NO: 192961 - protein, 7 aa, synthetic construct
RPSRETQ

SEQ ID NO: 192962 - protein, 7 aa, synthetic construct
RPGRDTN

SEQ ID NO: 192963 - protein, 7 aa, synthetic construct
RQKMDTS

SEQ ID NO: 192964 - protein, 7 aa, synthetic construct
RVNRDVS

SEQ ID NO: 192965 - protein, 7 aa, synthetic construct
RLNRTES

SEQ ID NO: 192966 - protein, 7 aa, synthetic construct
THNRTTS

SEQ ID NO: 192967 - protein, 7 aa, synthetic construct
RPNREAN

SEQ ID NO: 192968 - protein, 7 aa, synthetic construct
LKNRDNS

SEQ ID NO: 192969 - protein, 7 aa, synthetic construct
RIQRDTS

SEQ ID NO: 192970 - protein, 7 aa, synthetic construct
RVNRETT

SEQ ID NO: 192971 - protein, 7 aa, synthetic construct
NPKRDNS

SEQ ID NO: 192972 - protein, 7 aa, synthetic construct
RPNRDIS

SEQ ID NO: 192973 - protein, 7 aa, synthetic construct
RQNRDGG

SEQ ID NO: 192974 - protein, 7 aa, synthetic construct
RPHAHTS

SEQ ID NO: 192975 - protein, 7 aa, synthetic construct
RPNREFN

SEQ ID NO: 192976 - protein, 7 aa, synthetic construct
RPARDER

SEQ ID NO: 192977 - protein, 7 aa, synthetic construct
NTNRDKS

SEQ ID NO: 192978 - protein, 7 aa, synthetic construct
RMNREVS

SEQ ID NO: 192979 - protein, 7 aa, synthetic construct
YKNRDGS

SEQ ID NO: 192980 - protein, 7 aa, synthetic construct
RPARDNN

SEQ ID NO: 192981 - protein, 7 aa, synthetic construct
KPTRDTM

SEQ ID NO: 192982 - protein, 7 aa, synthetic construct
RTNHDTK

SEQ ID NO: 192983 - protein, 7 aa, synthetic construct
RTVRDVS

SEQ ID NO: 192984 - protein, 7 aa, synthetic construct
RRAPDTS

SEQ ID NO: 192985 - protein, 7 aa, synthetic construct
RMTRDTA

SEQ ID NO: 192986 - protein, 7 aa, synthetic construct
RENRTTS

SEQ ID NO: 192987 - protein, 7 aa, synthetic construct
APKRDTT

SEQ ID NO: 192988 - protein, 7 aa, synthetic construct
RINKDTF

SEQ ID NO: 192989 - protein, 7 aa, synthetic construct
RGNREGS

SEQ ID NO: 192990 - protein, 7 aa, synthetic construct
NPKRDLS

SEQ ID NO: 192991 - protein, 7 aa, synthetic construct
MMNRDKS

SEQ ID NO: 192992 - protein, 7 aa, synthetic construct
KPNRDYA

SEQ ID NO: 192993 - protein, 7 aa, synthetic construct
KTNRETS

SEQ ID NO: 192994 - protein, 7 aa, synthetic construct
RQNRETV

SEQ ID NO: 192995 - protein, 7 aa, synthetic construct
KPNRDHP

SEQ ID NO: 192996 - protein, 7 aa, synthetic construct
RTNREAS

SEQ ID NO: 192997 - protein, 7 aa, synthetic construct
IPRRDIS

SEQ ID NO: 192998 - protein, 7 aa, synthetic construct
RPERITQ

SEQ ID NO: 192999 - protein, 7 aa, synthetic construct
KSNRDTA

SEQ ID NO: 193000 - protein, 7 aa, synthetic construct
RRNDQTS

SEQ ID NO: 193001 - protein, 7 aa, synthetic construct
KPNRDIQ

SEQ ID NO: 193002 - protein, 7 aa, synthetic construct
RMNRETN

SEQ ID NO: 193003 - protein, 7 aa, synthetic construct
RPERLSS

SEQ ID NO: 193004 - protein, 7 aa, synthetic construct
YVNRDTK

SEQ ID NO: 193005 - protein, 7 aa, synthetic construct
RKERDFS

SEQ ID NO: 193006 - protein, 7 aa, synthetic construct
RPHGDKS

SEQ ID NO: 193007 - protein, 7 aa, synthetic construct
RPRQDTI

SEQ ID NO: 193008 - protein, 7 aa, synthetic construct
PKNRDIS

SEQ ID NO: 193009 - protein, 7 aa, synthetic construct
RPERMTM

SEQ ID NO: 193010 - protein, 7 aa, synthetic construct
RVDRSTS

SEQ ID NO: 193011 - protein, 7 aa, synthetic construct
RPDRLTS

SEQ ID NO: 193012 - protein, 7 aa, synthetic construct
RVSRDMS

SEQ ID NO: 193013 - protein, 7 aa, synthetic construct
RPERPQS

SEQ ID NO: 193014 - protein, 7 aa, synthetic construct
RPNKDPN

SEQ ID NO: 193015 - protein, 7 aa, synthetic construct
RTNKDPS

SEQ ID NO: 193016 - protein, 7 aa, synthetic construct
RPARDTT

SEQ ID NO: 193017 - protein, 7 aa, synthetic construct
RGNRETG

SEQ ID NO: 193018 - protein, 7 aa, synthetic construct
RLTRDTP

SEQ ID NO: 193019 - protein, 7 aa, synthetic construct
RPNMRTD

SEQ ID NO: 193020 - protein, 7 aa, synthetic construct
RPDRINS

SEQ ID NO: 193021 - protein, 7 aa, synthetic construct
RPQRETV

SEQ ID NO: 193022 - protein, 7 aa, synthetic construct
RPRGDTA

SEQ ID NO: 193023 - protein, 7 aa, synthetic construct
RPSRDVS

SEQ ID NO: 193024 - protein, 7 aa, synthetic construct
KPNRLTE

SEQ ID NO: 193025 - protein, 7 aa, synthetic construct
RGNRDVI

SEQ ID NO: 193026 - protein, 7 aa, synthetic construct
VPNRETR

SEQ ID NO: 193027 - protein, 7 aa, synthetic construct
KPHRDTA

SEQ ID NO: 193028 - protein, 7 aa, synthetic construct
RPARADS

SEQ ID NO: 193029 - protein, 7 aa, synthetic construct
RQNRLTE

SEQ ID NO: 193030 - protein, 7 aa, synthetic construct
PGKRDTS

SEQ ID NO: 193031 - protein, 7 aa, synthetic construct
RVIRETS

SEQ ID NO: 193032 - protein, 7 aa, synthetic construct
DKNRFTS

SEQ ID NO: 193033 - protein, 7 aa, synthetic construct
VGKRDTS

SEQ ID NO: 193034 - protein, 7 aa, synthetic construct
KPNRDQG

SEQ ID NO: 193035 - protein, 7 aa, synthetic construct
RPQRDTG

SEQ ID NO: 193036 - protein, 7 aa, synthetic construct
KTNRDTM

SEQ ID NO: 193037 - protein, 7 aa, synthetic construct
NFKRDTS

SEQ ID NO: 193038 - protein, 7 aa, synthetic construct
VPHRSTS

SEQ ID NO: 193039 - protein, 7 aa, synthetic construct
RSERSTS

SEQ ID NO: 193040 - protein, 7 aa, synthetic construct
RPERNTY

SEQ ID NO: 193041 - protein, 7 aa, synthetic construct
RPQRLES

SEQ ID NO: 193042 - protein, 7 aa, synthetic construct
RPNRQDA

SEQ ID NO: 193043 - protein, 7 aa, synthetic construct
NNKRDTS

SEQ ID NO: 193044 - protein, 7 aa, synthetic construct
KFNRDTV

SEQ ID NO: 193045 - protein, 7 aa, synthetic construct
REGRATS

SEQ ID NO: 193046 - protein, 7 aa, synthetic construct
NPARDRS

SEQ ID NO: 193047 - protein, 7 aa, synthetic construct
MPKRDTT

SEQ ID NO: 193048 - protein, 7 aa, synthetic construct
GKNRDFS

SEQ ID NO: 193049 - protein, 7 aa, synthetic construct
RKNPDYS

SEQ ID NO: 193050 - protein, 7 aa, synthetic construct
IINRDRS

SEQ ID NO: 193051 - protein, 7 aa, synthetic construct
KPERYTS

SEQ ID NO: 193052 - protein, 7 aa, synthetic construct
RANKDTY

SEQ ID NO: 193053 - protein, 7 aa, synthetic construct
RSARDTP

SEQ ID NO: 193054 - protein, 7 aa, synthetic construct
IPHRATS

SEQ ID NO: 193055 - protein, 7 aa, synthetic construct
KPNRDFT

SEQ ID NO: 193056 - protein, 7 aa, synthetic construct
RPNEDRR

SEQ ID NO: 193057 - protein, 7 aa, synthetic construct
RVERGTS

SEQ ID NO: 193058 - protein, 7 aa, synthetic construct
LKNRDTG

SEQ ID NO: 193059 - protein, 7 aa, synthetic construct
RPERIHS

SEQ ID NO: 193060 - protein, 7 aa, synthetic construct
RPARDSM

SEQ ID NO: 193061 - protein, 7 aa, synthetic construct
RGNKDTM

SEQ ID NO: 193062 - protein, 7 aa, synthetic construct
MKNRDTF

SEQ ID NO: 193063 - protein, 7 aa, synthetic construct
RANSDTR

SEQ ID NO: 193064 - protein, 7 aa, synthetic construct
RANKDTL

SEQ ID NO: 193065 - protein, 7 aa, synthetic construct
RVPRDTN

SEQ ID NO: 193066 - protein, 7 aa, synthetic construct
RPGRETS

SEQ ID NO: 193067 - protein, 7 aa, synthetic construct
RPERVTM

SEQ ID NO: 193068 - protein, 7 aa, synthetic construct
RPGRDST

SEQ ID NO: 193069 - protein, 7 aa, synthetic construct
RPDRNAS

SEQ ID NO: 193070 - protein, 7 aa, synthetic construct
RPMRTTD

SEQ ID NO: 193071 - protein, 7 aa, synthetic construct
RPIRDQN

SEQ ID NO: 193072 - protein, 7 aa, synthetic construct
RGNKDTV

SEQ ID NO: 193073 - protein, 7 aa, synthetic construct
RNNREGS

SEQ ID NO: 193074 - protein, 7 aa, synthetic construct
KPNRDHV

SEQ ID NO: 193075 - protein, 7 aa, synthetic construct
RAVRETS

SEQ ID NO: 193076 - protein, 7 aa, synthetic construct
RPNREIQ

SEQ ID NO: 193077 - protein, 7 aa, synthetic construct
RPTRADS

SEQ ID NO: 193078 - protein, 7 aa, synthetic construct
RDARDTK

SEQ ID NO: 193079 - protein, 7 aa, synthetic construct
RPSRDAA

SEQ ID NO: 193080 - protein, 7 aa, synthetic construct
RIPRDTI

SEQ ID NO: 193081 - protein, 7 aa, synthetic construct
KPNRDSA

SEQ ID NO: 193082 - protein, 7 aa, synthetic construct
RANVDTR

SEQ ID NO: 193083 - protein, 7 aa, synthetic construct
RSVRDTI

SEQ ID NO: 193084 - protein, 7 aa, synthetic construct
RVNRDSV

SEQ ID NO: 193085 - protein, 7 aa, synthetic construct
LQNRDKS

SEQ ID NO: 193086 - protein, 7 aa, synthetic construct
KLNRDGS

SEQ ID NO: 193087 - protein, 7 aa, synthetic construct
RTNNDTR

SEQ ID NO: 193088 - protein, 7 aa, synthetic construct
RPRSDTA

SEQ ID NO: 193089 - protein, 7 aa, synthetic construct
KPNRDFP

SEQ ID NO: 193090 - protein, 7 aa, synthetic construct
RPNRVDT

SEQ ID NO: 193091 - protein, 7 aa, synthetic construct
RPSRDQS

SEQ ID NO: 193092 - protein, 7 aa, synthetic construct
RAVRDTI

SEQ ID NO: 193093 - protein, 7 aa, synthetic construct
RNPRDTT

SEQ ID NO: 193094 - protein, 7 aa, synthetic construct
NVKRDTS

SEQ ID NO: 193095 - protein, 7 aa, synthetic construct
KPNRDLI

SEQ ID NO: 193096 - protein, 7 aa, synthetic construct
RIPRDTA

SEQ ID NO: 193097 - protein, 7 aa, synthetic construct
RPERIAS

SEQ ID NO: 193098 - protein, 7 aa, synthetic construct
FVNRDTR

SEQ ID NO: 193099 - protein, 7 aa, synthetic construct
KPFRDTG

SEQ ID NO: 193100 - protein, 7 aa, synthetic construct
RDKRDTM

SEQ ID NO: 193101 - protein, 7 aa, synthetic construct
RSNREQS

SEQ ID NO: 193102 - protein, 7 aa, synthetic construct
APGRDKS

SEQ ID NO: 193103 - protein, 7 aa, synthetic construct
VRPRDTS

SEQ ID NO: 193104 - protein, 7 aa, synthetic construct
RPGRTES

SEQ ID NO: 193105 - protein, 7 aa, synthetic construct
RPTRDGF

SEQ ID NO: 193106 - protein, 7 aa, synthetic construct
RQGRDTA

SEQ ID NO: 193107 - protein, 7 aa, synthetic construct
RAERDTR

SEQ ID NO: 193108 - protein, 7 aa, synthetic construct
RQNRDLA

SEQ ID NO: 193109 - protein, 7 aa, synthetic construct
RLDRMTS

SEQ ID NO: 193110 - protein, 7 aa, synthetic construct
KGNRETS

SEQ ID NO: 193111 - protein, 7 aa, synthetic construct
RPDRSTS

SEQ ID NO: 193112 - protein, 7 aa, synthetic construct
RQNKDPS

SEQ ID NO: 193113 - protein, 7 aa, synthetic construct
KPNRSDS

SEQ ID NO: 193114 - protein, 7 aa, synthetic construct
ATNRDKS

SEQ ID NO: 193115 - protein, 7 aa, synthetic construct
RVQRETS

SEQ ID NO: 193116 - protein, 7 aa, synthetic construct
KPNYATS

SEQ ID NO: 193117 - protein, 7 aa, synthetic construct
RPNREAL

SEQ ID NO: 193118 - protein, 7 aa, synthetic construct
RPQRLTE

SEQ ID NO: 193119 - protein, 7 aa, synthetic construct
RANPYTS

SEQ ID NO: 193120 - protein, 7 aa, synthetic construct
RMGRDTI

SEQ ID NO: 193121 - protein, 7 aa, synthetic construct
REGRQTS

SEQ ID NO: 193122 - protein, 7 aa, synthetic construct
RPNQRDS

SEQ ID NO: 193123 - protein, 7 aa, synthetic construct
RPTRGDS

SEQ ID NO: 193124 - protein, 7 aa, synthetic construct
RMGRDVS

SEQ ID NO: 193125 - protein, 7 aa, synthetic construct
RMARDVS

SEQ ID NO: 193126 - protein, 7 aa, synthetic construct
APKRDTV

SEQ ID NO: 193127 - protein, 7 aa, synthetic construct
RSVRDTT

SEQ ID NO: 193128 - protein, 7 aa, synthetic construct
RPARDLI

SEQ ID NO: 193129 - protein, 7 aa, synthetic construct
RPSRDPA

SEQ ID NO: 193130 - protein, 7 aa, synthetic construct
RPAKDTW

SEQ ID NO: 193131 - protein, 7 aa, synthetic construct
RTNRDQG

SEQ ID NO: 193132 - protein, 7 aa, synthetic construct
RPIRETA

SEQ ID NO: 193133 - protein, 7 aa, synthetic construct
SKARDTS

SEQ ID NO: 193134 - protein, 7 aa, synthetic construct
RVNRETL

SEQ ID NO: 193135 - protein, 7 aa, synthetic construct
RPRQDTN

SEQ ID NO: 193136 - protein, 7 aa, synthetic construct
KPNRDMV

SEQ ID NO: 193137 - protein, 7 aa, synthetic construct
RPARQES

SEQ ID NO: 193138 - protein, 7 aa, synthetic construct
RPERAIS

SEQ ID NO: 193139 - protein, 7 aa, synthetic construct
QKNRDTV

SEQ ID NO: 193140 - protein, 7 aa, synthetic construct
RGTRDVS

SEQ ID NO: 193141 - protein, 7 aa, synthetic construct
RTMRDTS

SEQ ID NO: 193142 - protein, 7 aa, synthetic construct
GPHRPTS

SEQ ID NO: 193143 - protein, 7 aa, synthetic construct
RQFKDTS

SEQ ID NO: 193144 - protein, 7 aa, synthetic construct
KANRDPS

SEQ ID NO: 193145 - protein, 7 aa, synthetic construct
RQNRETI

SEQ ID NO: 193146 - protein, 7 aa, synthetic construct
RPQRPDS

SEQ ID NO: 193147 - protein, 7 aa, synthetic construct
FPKRDTY

SEQ ID NO: 193148 - protein, 7 aa, synthetic construct
KMNRDTI

SEQ ID NO: 193149 - protein, 7 aa, synthetic construct
KPQRDPS

SEQ ID NO: 193150 - protein, 7 aa, synthetic construct
KPSRDTY

SEQ ID NO: 193151 - protein, 7 aa, synthetic construct
KPNRDYS

SEQ ID NO: 193152 - protein, 7 aa, synthetic construct
RPHSQTS

SEQ ID NO: 193153 - protein, 7 aa, synthetic construct
KPNRDTV

SEQ ID NO: 193154 - protein, 7 aa, synthetic construct
RPNRGDF

SEQ ID NO: 193155 - protein, 7 aa, synthetic construct
RPDRPTQ

SEQ ID NO: 193156 - protein, 7 aa, synthetic construct
QSNRDKS

SEQ ID NO: 193157 - protein, 7 aa, synthetic construct
RKQIDTS

SEQ ID NO: 193158 - protein, 7 aa, synthetic construct
RPDRVTQ

SEQ ID NO: 193159 - protein, 7 aa, synthetic construct
RPDRHTI

SEQ ID NO: 193160 - protein, 7 aa, synthetic construct
RPDRGAS

SEQ ID NO: 193161 - protein, 7 aa, synthetic construct
KPNRPTD

SEQ ID NO: 193162 - protein, 7 aa, synthetic construct
RPIRDVT

SEQ ID NO: 193163 - protein, 7 aa, synthetic construct
RVQRDTN

SEQ ID NO: 193164 - protein, 7 aa, synthetic construct
LPRRDPS

SEQ ID NO: 193165 - protein, 7 aa, synthetic construct
RSNRETG

SEQ ID NO: 193166 - protein, 7 aa, synthetic construct
KTTRDTS

SEQ ID NO: 193167 - protein, 7 aa, synthetic construct
RPARETY

SEQ ID NO: 193168 - protein, 7 aa, synthetic construct
RGDRDTK

SEQ ID NO: 193169 - protein, 7 aa, synthetic construct
RPVRDAQ

SEQ ID NO: 193170 - protein, 7 aa, synthetic construct
KPSRDIS

SEQ ID NO: 193171 - protein, 7 aa, synthetic construct
RLPRDTT

SEQ ID NO: 193172 - protein, 7 aa, synthetic construct
RPVRDPV

SEQ ID NO: 193173 - protein, 7 aa, synthetic construct
VKNRDTQ

SEQ ID NO: 193174 - protein, 7 aa, synthetic construct
REARDKS

SEQ ID NO: 193175 - protein, 7 aa, synthetic construct
RPARDNM

SEQ ID NO: 193176 - protein, 7 aa, synthetic construct
RLGRETS

SEQ ID NO: 193177 - protein, 7 aa, synthetic construct
RPTRIES

SEQ ID NO: 193178 - protein, 7 aa, synthetic construct
RTNRDGT

SEQ ID NO: 193179 - protein, 7 aa, synthetic construct
RINRETN

SEQ ID NO: 193180 - protein, 7 aa, synthetic construct
GPHRTTS

SEQ ID NO: 193181 - protein, 7 aa, synthetic construct
KAFRDTS

SEQ ID NO: 193182 - protein, 7 aa, synthetic construct
KANRDIS

SEQ ID NO: 193183 - protein, 7 aa, synthetic construct
RSNRETV

SEQ ID NO: 193184 - protein, 7 aa, synthetic construct
RPTRDHP

SEQ ID NO: 193185 - protein, 7 aa, synthetic construct
RPGRETN

SEQ ID NO: 193186 - protein, 7 aa, synthetic construct
RPRGDGS

SEQ ID NO: 193187 - protein, 7 aa, synthetic construct
RPNKYES

SEQ ID NO: 193188 - protein, 7 aa, synthetic construct
RSNRDTV

SEQ ID NO: 193189 - protein, 7 aa, synthetic construct
RANRDGM

SEQ ID NO: 193190 - protein, 7 aa, synthetic construct
RPERNNS

SEQ ID NO: 193191 - protein, 7 aa, synthetic construct
KPNRDSY

SEQ ID NO: 193192 - protein, 7 aa, synthetic construct
RPARVTD

SEQ ID NO: 193193 - protein, 7 aa, synthetic construct
VKLRDTS

SEQ ID NO: 193194 - protein, 7 aa, synthetic construct
RPHKDTF

SEQ ID NO: 193195 - protein, 7 aa, synthetic construct
RPHAATS

SEQ ID NO: 193196 - protein, 7 aa, synthetic construct
RPQREMS

SEQ ID NO: 193197 - protein, 7 aa, synthetic construct
GPHRLTS

SEQ ID NO: 193198 - protein, 7 aa, synthetic construct
RPLRVTE

SEQ ID NO: 193199 - protein, 7 aa, synthetic construct
RKPFDTS

SEQ ID NO: 193200 - protein, 7 aa, synthetic construct
RINRDMG

SEQ ID NO: 193201 - protein, 7 aa, synthetic construct
RPNRSDA

SEQ ID NO: 193202 - protein, 7 aa, synthetic construct
RPERGTF

SEQ ID NO: 193203 - protein, 7 aa, synthetic construct
RPQRDPS

SEQ ID NO: 193204 - protein, 7 aa, synthetic construct
RPGRDIV

SEQ ID NO: 193205 - protein, 7 aa, synthetic construct
RPNTDNR

SEQ ID NO: 193206 - protein, 7 aa, synthetic construct
RPARETF

SEQ ID NO: 193207 - protein, 7 aa, synthetic construct
RPHGITS

SEQ ID NO: 193208 - protein, 7 aa, synthetic construct
REARGTS

SEQ ID NO: 193209 - protein, 7 aa, synthetic construct
DGNRKTS

SEQ ID NO: 193210 - protein, 7 aa, synthetic construct
RPTKDTL

SEQ ID NO: 193211 - protein, 7 aa, synthetic construct
RELRNTS

SEQ ID NO: 193212 - protein, 7 aa, synthetic construct
RPYKETS

SEQ ID NO: 193213 - protein, 7 aa, synthetic construct
RPKYDGS

SEQ ID NO: 193214 - protein, 7 aa, synthetic construct
RPLRDVS

SEQ ID NO: 193215 - protein, 7 aa, synthetic construct
GPKRDQS

SEQ ID NO: 193216 - protein, 7 aa, synthetic construct
KANRDSS

SEQ ID NO: 193217 - protein, 7 aa, synthetic construct
RPIRDNS

SEQ ID NO: 193218 - protein, 7 aa, synthetic construct
RPLREMS

SEQ ID NO: 193219 - protein, 7 aa, synthetic construct
RTNRTES

SEQ ID NO: 193220 - protein, 7 aa, synthetic construct
RANKDYS

SEQ ID NO: 193221 - protein, 7 aa, synthetic construct
RELRSTS

SEQ ID NO: 193222 - protein, 7 aa, synthetic construct
IVKRDTS

SEQ ID NO: 193223 - protein, 7 aa, synthetic construct
RVPRETS

SEQ ID NO: 193224 - protein, 7 aa, synthetic construct
RPRDNTS

SEQ ID NO: 193225 - protein, 7 aa, synthetic construct
RGNRETA

SEQ ID NO: 193226 - protein, 7 aa, synthetic construct
RPNRDLS

SEQ ID NO: 193227 - protein, 7 aa, synthetic construct
RPRMDTG

SEQ ID NO: 193228 - protein, 7 aa, synthetic construct
FKNRDQS

SEQ ID NO: 193229 - protein, 7 aa, synthetic construct
RSNRENS

SEQ ID NO: 193230 - protein, 7 aa, synthetic construct
RPNYEKS

SEQ ID NO: 193231 - protein, 7 aa, synthetic construct
RPTREVS

SEQ ID NO: 193232 - protein, 7 aa, synthetic construct
FPKRDTI

SEQ ID NO: 193233 - protein, 7 aa, synthetic construct
RANRTTE

SEQ ID NO: 193234 - protein, 7 aa, synthetic construct
RPDRMTT

SEQ ID NO: 193235 - protein, 7 aa, synthetic construct
IPNRDKY

SEQ ID NO: 193236 - protein, 7 aa, synthetic construct
KPQRDQS

SEQ ID NO: 193237 - protein, 7 aa, synthetic construct
RPLRDNM

SEQ ID NO: 193238 - protein, 7 aa, synthetic construct
RANRDIP

SEQ ID NO: 193239 - protein, 7 aa, synthetic construct
RVGRDTS

SEQ ID NO: 193240 - protein, 7 aa, synthetic construct
RPNREQQ

SEQ ID NO: 193241 - protein, 7 aa, synthetic construct
RPTRDGY

SEQ ID NO: 193242 - protein, 7 aa, synthetic construct
RVQRDGS

SEQ ID NO: 193243 - protein, 7 aa, synthetic construct
RPRADTT

SEQ ID NO: 193244 - protein, 7 aa, synthetic construct
RANRDTT

SEQ ID NO: 193245 - protein, 7 aa, synthetic construct
RPAREMS

SEQ ID NO: 193246 - protein, 7 aa, synthetic construct
RPSRMES

SEQ ID NO: 193247 - protein, 7 aa, synthetic construct
RQLRETS

SEQ ID NO: 193248 - protein, 7 aa, synthetic construct
RPTRDNI

SEQ ID NO: 193249 - protein, 7 aa, synthetic construct
RVDRMTS

SEQ ID NO: 193250 - protein, 7 aa, synthetic construct
RQNRETS

SEQ ID NO: 193251 - protein, 7 aa, synthetic construct
DPNRGKS

SEQ ID NO: 193252 - protein, 7 aa, synthetic construct
RPPRDYM

SEQ ID NO: 193253 - protein, 7 aa, synthetic construct
IPRRDNS

SEQ ID NO: 193254 - protein, 7 aa, synthetic construct
RPQRDPT

SEQ ID NO: 193255 - protein, 7 aa, synthetic construct
RPVRDAI

SEQ ID NO: 193256 - protein, 7 aa, synthetic construct
MFKRDTS

SEQ ID NO: 193257 - protein, 7 aa, synthetic construct
KPNRDFN

SEQ ID NO: 193258 - protein, 7 aa, synthetic construct
RPNRDQA

SEQ ID NO: 193259 - protein, 7 aa, synthetic construct
VPRRDTV

SEQ ID NO: 193260 - protein, 7 aa, synthetic construct
NKMRDTS

SEQ ID NO: 193261 - protein, 7 aa, synthetic construct
RPHGVTS

SEQ ID NO: 193262 - protein, 7 aa, synthetic construct
RPARDPS

SEQ ID NO: 193263 - protein, 7 aa, synthetic construct
YPNRDKS

SEQ ID NO: 193264 - protein, 7 aa, synthetic construct
RTDRHTS

SEQ ID NO: 193265 - protein, 7 aa, synthetic construct
PANRDKS

SEQ ID NO: 193266 - protein, 7 aa, synthetic construct
RPERDAK

SEQ ID NO: 193267 - protein, 7 aa, synthetic construct
RTDRDTK

SEQ ID NO: 193268 - protein, 7 aa, synthetic construct
RVNRITE

SEQ ID NO: 193269 - protein, 7 aa, synthetic construct
RPIRDQI

SEQ ID NO: 193270 - protein, 7 aa, synthetic construct
RPSRDAN

SEQ ID NO: 193271 - protein, 7 aa, synthetic construct
RPNRNDV

SEQ ID NO: 193272 - protein, 7 aa, synthetic construct
RLNRDSV

SEQ ID NO: 193273 - protein, 7 aa, synthetic construct
KPNRDIL

SEQ ID NO: 193274 - protein, 7 aa, synthetic construct
VINRDKS

SEQ ID NO: 193275 - protein, 7 aa, synthetic construct
RPTKDYS

SEQ ID NO: 193276 - protein, 7 aa, synthetic construct
RPARDPT

SEQ ID NO: 193277 - protein, 7 aa, synthetic construct
MKNRDTA

SEQ ID NO: 193278 - protein, 7 aa, synthetic construct
DPNRIKS

SEQ ID NO: 193279 - protein, 7 aa, synthetic construct
RPAREVS

SEQ ID NO: 193280 - protein, 7 aa, synthetic construct
RPERITT

SEQ ID NO: 193281 - protein, 7 aa, synthetic construct
IPKRDTN

SEQ ID NO: 193282 - protein, 7 aa, synthetic construct
RPIRDSG

SEQ ID NO: 193283 - protein, 7 aa, synthetic construct
QLNRDTK

SEQ ID NO: 193284 - protein, 7 aa, synthetic construct
RAQRDIS

SEQ ID NO: 193285 - protein, 7 aa, synthetic construct
KPNKDWS

SEQ ID NO: 193286 - protein, 7 aa, synthetic construct
RDGRMTS

SEQ ID NO: 193287 - protein, 7 aa, synthetic construct
STNRDRS

SEQ ID NO: 193288 - protein, 7 aa, synthetic construct
RPSRTDS

SEQ ID NO: 193289 - protein, 7 aa, synthetic construct
RPRNDTT

SEQ ID NO: 193290 - protein, 7 aa, synthetic construct
RAPRDTN

SEQ ID NO: 193291 - protein, 7 aa, synthetic construct
DRNRVTS

SEQ ID NO: 193292 - protein, 7 aa, synthetic construct
RTPRDTM

SEQ ID NO: 193293 - protein, 7 aa, synthetic construct
QPKRDNS

SEQ ID NO: 193294 - protein, 7 aa, synthetic construct
RSSRDTG

SEQ ID NO: 193295 - protein, 7 aa, synthetic construct
RPVRDDR

SEQ ID NO: 193296 - protein, 7 aa, synthetic construct
HPIRDKS

SEQ ID NO: 193297 - protein, 7 aa, synthetic construct
RTQRDTI

SEQ ID NO: 193298 - protein, 7 aa, synthetic construct
RPGRDVN

SEQ ID NO: 193299 - protein, 7 aa, synthetic construct
LPHRVTS

SEQ ID NO: 193300 - protein, 7 aa, synthetic construct
RPSKDTL

SEQ ID NO: 193301 - protein, 7 aa, synthetic construct
REKRDTV

SEQ ID NO: 193302 - protein, 7 aa, synthetic construct
PKNRDTS

SEQ ID NO: 193303 - protein, 7 aa, synthetic construct
RPDRPTN

SEQ ID NO: 193304 - protein, 7 aa, synthetic construct
RPNIRTD

SEQ ID NO: 193305 - protein, 7 aa, synthetic construct
RPVRDPL

SEQ ID NO: 193306 - protein, 7 aa, synthetic construct
RPDRLTQ

SEQ ID NO: 193307 - protein, 7 aa, synthetic construct
RPTREIS

SEQ ID NO: 193308 - protein, 7 aa, synthetic construct
MKLRDTS

SEQ ID NO: 193309 - protein, 7 aa, synthetic construct
LPRRDLS

SEQ ID NO: 193310 - protein, 7 aa, synthetic construct
RPKFDMS

SEQ ID NO: 193311 - protein, 7 aa, synthetic construct
RPTRDTV

SEQ ID NO: 193312 - protein, 7 aa, synthetic construct
RSPRDSS

SEQ ID NO: 193313 - protein, 7 aa, synthetic construct
VPKRDTL

SEQ ID NO: 193314 - protein, 7 aa, synthetic construct
RTNRVTE

SEQ ID NO: 193315 - protein, 7 aa, synthetic construct
RPDRITL

SEQ ID NO: 193316 - protein, 7 aa, synthetic construct
RPAHTTS

SEQ ID NO: 193317 - protein, 7 aa, synthetic construct
RVNRLTE

SEQ ID NO: 193318 - protein, 7 aa, synthetic construct
RPTHQTS

SEQ ID NO: 193319 - protein, 7 aa, synthetic construct
YPNRETK

SEQ ID NO: 193320 - protein, 7 aa, synthetic construct
RPERPTN

SEQ ID NO: 193321 - protein, 7 aa, synthetic construct
GVKRDTS

SEQ ID NO: 193322 - protein, 7 aa, synthetic construct
EKNRVTS

SEQ ID NO: 193323 - protein, 7 aa, synthetic construct
RPVRQDS

SEQ ID NO: 193324 - protein, 7 aa, synthetic construct
VKNRDTI

SEQ ID NO: 193325 - protein, 7 aa, synthetic construct
RPGKDTY

SEQ ID NO: 193326 - protein, 7 aa, synthetic construct
RPMRDST

SEQ ID NO: 193327 - protein, 7 aa, synthetic construct
RPQRDVM

SEQ ID NO: 193328 - protein, 7 aa, synthetic construct
RTRPDTS

SEQ ID NO: 193329 - protein, 7 aa, synthetic construct
KPTRDTV

SEQ ID NO: 193330 - protein, 7 aa, synthetic construct
SMNRDKS

SEQ ID NO: 193331 - protein, 7 aa, synthetic construct
RVVRDTS

SEQ ID NO: 193332 - protein, 7 aa, synthetic construct
TKNRDNS

SEQ ID NO: 193333 - protein, 7 aa, synthetic construct
RPIRQTE

SEQ ID NO: 193334 - protein, 7 aa, synthetic construct
RINRDVV

SEQ ID NO: 193335 - protein, 7 aa, synthetic construct
KPNRDSS

SEQ ID NO: 193336 - protein, 7 aa, synthetic construct
KPHRDMS

SEQ ID NO: 193337 - protein, 7 aa, synthetic construct
RVNRDMG

SEQ ID NO: 193338 - protein, 7 aa, synthetic construct
RTNRETN

SEQ ID NO: 193339 - protein, 7 aa, synthetic construct
RLPRDSS

SEQ ID NO: 193340 - protein, 7 aa, synthetic construct
RAERSTS

SEQ ID NO: 193341 - protein, 7 aa, synthetic construct
RPLREVS

SEQ ID NO: 193342 - protein, 7 aa, synthetic construct
RPTRETY

SEQ ID NO: 193343 - protein, 7 aa, synthetic construct
RPSRETN

SEQ ID NO: 193344 - protein, 7 aa, synthetic construct
IPNRDKF

SEQ ID NO: 193345 - protein, 7 aa, synthetic construct
KPNRDIV

SEQ ID NO: 193346 - protein, 7 aa, synthetic construct
RHERITS

SEQ ID NO: 193347 - protein, 7 aa, synthetic construct
RPRADTV

SEQ ID NO: 193348 - protein, 7 aa, synthetic construct
KINRDTN

SEQ ID NO: 193349 - protein, 7 aa, synthetic construct
RPSRDNA

SEQ ID NO: 193350 - protein, 7 aa, synthetic construct
RPDHRTS

SEQ ID NO: 193351 - protein, 7 aa, synthetic construct
KPIRDTF

SEQ ID NO: 193352 - protein, 7 aa, synthetic construct
IPRKDTS

SEQ ID NO: 193353 - protein, 7 aa, synthetic construct
RPLRGTD

SEQ ID NO: 193354 - protein, 7 aa, synthetic construct
RASRDTV

SEQ ID NO: 193355 - protein, 7 aa, synthetic construct
RMQRDTA

SEQ ID NO: 193356 - protein, 7 aa, synthetic construct
RPFKDTL

SEQ ID NO: 193357 - protein, 7 aa, synthetic construct
LFKRDTS

SEQ ID NO: 193358 - protein, 7 aa, synthetic construct
RPNRETM

SEQ ID NO: 193359 - protein, 7 aa, synthetic construct
RPQRDLI

SEQ ID NO: 193360 - protein, 7 aa, synthetic construct
KNLRDTS

SEQ ID NO: 193361 - protein, 7 aa, synthetic construct
RMNNDTK

SEQ ID NO: 193362 - protein, 7 aa, synthetic construct
RPDRPSS

SEQ ID NO: 193363 - protein, 7 aa, synthetic construct
RGPRDTI

SEQ ID NO: 193364 - protein, 7 aa, synthetic construct
VTNRDKS

SEQ ID NO: 193365 - protein, 7 aa, synthetic construct
RGNRDNV

SEQ ID NO: 193366 - protein, 7 aa, synthetic construct
KTQRDTS

SEQ ID NO: 193367 - protein, 7 aa, synthetic construct
GKNRDGS

SEQ ID NO: 193368 - protein, 7 aa, synthetic construct
GKIRDTS

SEQ ID NO: 193369 - protein, 7 aa, synthetic construct
RMVRDTA

SEQ ID NO: 193370 - protein, 7 aa, synthetic construct
RMNRENS

SEQ ID NO: 193371 - protein, 7 aa, synthetic construct
RPARNDS

SEQ ID NO: 193372 - protein, 7 aa, synthetic construct
RPGREAS

SEQ ID NO: 193373 - protein, 7 aa, synthetic construct
RMQKDTS

SEQ ID NO: 193374 - protein, 7 aa, synthetic construct
APKRDNS

SEQ ID NO: 193375 - protein, 7 aa, synthetic construct
RTPRDTL

SEQ ID NO: 193376 - protein, 7 aa, synthetic construct
RGPRDSS

SEQ ID NO: 193377 - protein, 7 aa, synthetic construct
RPNRENA

SEQ ID NO: 193378 - protein, 7 aa, synthetic construct
RAARDNS

SEQ ID NO: 193379 - protein, 7 aa, synthetic construct
RSNRDLG

SEQ ID NO: 193380 - protein, 7 aa, synthetic construct
RPSRDPS

SEQ ID NO: 193381 - protein, 7 aa, synthetic construct
FPNRDKN

SEQ ID NO: 193382 - protein, 7 aa, synthetic construct
RPGRIDS

SEQ ID NO: 193383 - protein, 7 aa, synthetic construct
RQPRDNS

SEQ ID NO: 193384 - protein, 7 aa, synthetic construct
RVNRDAA

SEQ ID NO: 193385 - protein, 7 aa, synthetic construct
RVNRDGS

SEQ ID NO: 193386 - protein, 7 aa, synthetic construct
SKTRDTS

SEQ ID NO: 193387 - protein, 7 aa, synthetic construct
RMPRDTA

SEQ ID NO: 193388 - protein, 7 aa, synthetic construct
RPARDIA

SEQ ID NO: 193389 - protein, 7 aa, synthetic construct
VRNRDTP

SEQ ID NO: 193390 - protein, 7 aa, synthetic construct
RVMRETS

SEQ ID NO: 193391 - protein, 7 aa, synthetic construct
RKMPDTS

SEQ ID NO: 193392 - protein, 7 aa, synthetic construct
FANRDKS

SEQ ID NO: 193393 - protein, 7 aa, synthetic construct
RSKGDTS

SEQ ID NO: 193394 - protein, 7 aa, synthetic construct
QPKRDTI

SEQ ID NO: 193395 - protein, 7 aa, synthetic construct
EPKRNTS

SEQ ID NO: 193396 - protein, 7 aa, synthetic construct
RPARDNT

SEQ ID NO: 193397 - protein, 7 aa, synthetic construct
RPVRAES

SEQ ID NO: 193398 - protein, 7 aa, synthetic construct
RPHRDNP

SEQ ID NO: 193399 - protein, 7 aa, synthetic construct
RSNRDMA

SEQ ID NO: 193400 - protein, 7 aa, synthetic construct
SIKRDTS

SEQ ID NO: 193401 - protein, 7 aa, synthetic construct
RPERVQS

SEQ ID NO: 193402 - protein, 7 aa, synthetic construct
MRNRDTI

SEQ ID NO: 193403 - protein, 7 aa, synthetic construct
RQARDTS

SEQ ID NO: 193404 - protein, 7 aa, synthetic construct
LPNRHTN

SEQ ID NO: 193405 - protein, 7 aa, synthetic construct
KGNRDIS

SEQ ID NO: 193406 - protein, 7 aa, synthetic construct
MRNKDTS

SEQ ID NO: 193407 - protein, 7 aa, synthetic construct
RPNRGEF

SEQ ID NO: 193408 - protein, 7 aa, synthetic construct
RENRMVS

SEQ ID NO: 193409 - protein, 7 aa, synthetic construct
RSNRDVV

SEQ ID NO: 193410 - protein, 7 aa, synthetic construct
REPRHTS

SEQ ID NO: 193411 - protein, 7 aa, synthetic construct
RANRITE

SEQ ID NO: 193412 - protein, 7 aa, synthetic construct
RPDRDNR

SEQ ID NO: 193413 - protein, 7 aa, synthetic construct
RQTKDTS

SEQ ID NO: 193414 - protein, 7 aa, synthetic construct
RPNRDQM

SEQ ID NO: 193415 - protein, 7 aa, synthetic construct
KGNRDVS

SEQ ID NO: 193416 - protein, 7 aa, synthetic construct
RANRLTE

SEQ ID NO: 193417 - protein, 7 aa, synthetic construct
RPNIRES

SEQ ID NO: 193418 - protein, 7 aa, synthetic construct
FVNRDTK

SEQ ID NO: 193419 - protein, 7 aa, synthetic construct
RPMRGTD

SEQ ID NO: 193420 - protein, 7 aa, synthetic construct
RPLRIES

SEQ ID NO: 193421 - protein, 7 aa, synthetic construct
RMNREIS

SEQ ID NO: 193422 - protein, 7 aa, synthetic construct
RPTRETG

SEQ ID NO: 193423 - protein, 7 aa, synthetic construct
RVDRQTS

SEQ ID NO: 193424 - protein, 7 aa, synthetic construct
RSSRETS

SEQ ID NO: 193425 - protein, 7 aa, synthetic construct
RPQRDAT

SEQ ID NO: 193426 - protein, 7 aa, synthetic construct
RPNRTEL

SEQ ID NO: 193427 - protein, 7 aa, synthetic construct
KPNRDGQ

SEQ ID NO: 193428 - protein, 7 aa, synthetic construct
ILNRDKS

SEQ ID NO: 193429 - protein, 7 aa, synthetic construct
MINRDKS

SEQ ID NO: 193430 - protein, 7 aa, synthetic construct
KPNRDFS

SEQ ID NO: 193431 - protein, 7 aa, synthetic construct
RRNDVTS

SEQ ID NO: 193432 - protein, 7 aa, synthetic construct
KINRDTS

SEQ ID NO: 193433 - protein, 7 aa, synthetic construct
RMNRETG

SEQ ID NO: 193434 - protein, 7 aa, synthetic construct
RSLRETS

SEQ ID NO: 193435 - protein, 7 aa, synthetic construct
SKNRDTG

SEQ ID NO: 193436 - protein, 7 aa, synthetic construct
RPGRPTE

SEQ ID NO: 193437 - protein, 7 aa, synthetic construct
RPARDTF

SEQ ID NO: 193438 - protein, 7 aa, synthetic construct
RLNRDQI

SEQ ID NO: 193439 - protein, 7 aa, synthetic construct
RMARDGS

SEQ ID NO: 193440 - protein, 7 aa, synthetic construct
KPNRDAL

SEQ ID NO: 193441 - protein, 7 aa, synthetic construct
PPKRDTT

SEQ ID NO: 193442 - protein, 7 aa, synthetic construct
RINRETS

SEQ ID NO: 193443 - protein, 7 aa, synthetic construct
IFKRDTS

SEQ ID NO: 193444 - protein, 7 aa, synthetic construct
RPDRPTI

SEQ ID NO: 193445 - protein, 7 aa, synthetic construct
RFTKDTS

SEQ ID NO: 193446 - protein, 7 aa, synthetic construct
RMPRDSS

SEQ ID NO: 193447 - protein, 7 aa, synthetic construct
RVMRDTG

SEQ ID NO: 193448 - protein, 7 aa, synthetic construct
RPERGTS

SEQ ID NO: 193449 - protein, 7 aa, synthetic construct
RLLRDTP

SEQ ID NO: 193450 - protein, 7 aa, synthetic construct
RADRHTS

SEQ ID NO: 193451 - protein, 7 aa, synthetic construct
RPQRDIM

SEQ ID NO: 193452 - protein, 7 aa, synthetic construct
RPSRDNL

SEQ ID NO: 193453 - protein, 7 aa, synthetic construct
RTNNDTK

SEQ ID NO: 193454 - protein, 7 aa, synthetic construct
VFNRDTK

SEQ ID NO: 193455 - protein, 7 aa, synthetic construct
RPTHVTS

SEQ ID NO: 193456 - protein, 7 aa, synthetic construct
RKERDPS

SEQ ID NO: 193457 - protein, 7 aa, synthetic construct
RPPRLTD

SEQ ID NO: 193458 - protein, 7 aa, synthetic construct
RSNRDGA

SEQ ID NO: 193459 - protein, 7 aa, synthetic construct
LPNRERS

SEQ ID NO: 193460 - protein, 7 aa, synthetic construct
RPTRETQ

SEQ ID NO: 193461 - protein, 7 aa, synthetic construct
RPTRDNM

SEQ ID NO: 193462 - protein, 7 aa, synthetic construct
RSNKDTL

SEQ ID NO: 193463 - protein, 7 aa, synthetic construct
LPRRDMS

SEQ ID NO: 193464 - protein, 7 aa, synthetic construct
KPNRDNM

SEQ ID NO: 193465 - protein, 7 aa, synthetic construct
LKNRDTQ

SEQ ID NO: 193466 - protein, 7 aa, synthetic construct
KPTRDAS

SEQ ID NO: 193467 - protein, 7 aa, synthetic construct
FINRDTK

SEQ ID NO: 193468 - protein, 7 aa, synthetic construct
RKNIDTT

SEQ ID NO: 193469 - protein, 7 aa, synthetic construct
RPQRDLQ

SEQ ID NO: 193470 - protein, 7 aa, synthetic construct
RMKIDTS

SEQ ID NO: 193471 - protein, 7 aa, synthetic construct
RMARDTA

SEQ ID NO: 193472 - protein, 7 aa, synthetic construct
RANRDVM

SEQ ID NO: 193473 - protein, 7 aa, synthetic construct
IMNRDTK

SEQ ID NO: 193474 - protein, 7 aa, synthetic construct
VPNRHTG

SEQ ID NO: 193475 - protein, 7 aa, synthetic construct
KKNFDTS

SEQ ID NO: 193476 - protein, 7 aa, synthetic construct
RQNRDAA

SEQ ID NO: 193477 - protein, 7 aa, synthetic construct
RAERTTS

SEQ ID NO: 193478 - protein, 7 aa, synthetic construct
REGRLTS

SEQ ID NO: 193479 - protein, 7 aa, synthetic construct
RPIRETM

SEQ ID NO: 193480 - protein, 7 aa, synthetic construct
RPSRETS

SEQ ID NO: 193481 - protein, 7 aa, synthetic construct
RPIRGTD

SEQ ID NO: 193482 - protein, 7 aa, synthetic construct
RMERTTS

SEQ ID NO: 193483 - protein, 7 aa, synthetic construct
RPQRETS

SEQ ID NO: 193484 - protein, 7 aa, synthetic construct
APRRDTT

SEQ ID NO: 193485 - protein, 7 aa, synthetic construct
KMNRDTS

SEQ ID NO: 193486 - protein, 7 aa, synthetic construct
KPNRIES

SEQ ID NO: 193487 - protein, 7 aa, synthetic construct
RLNRDNI

SEQ ID NO: 193488 - protein, 7 aa, synthetic construct
RPVRMTE

SEQ ID NO: 193489 - protein, 7 aa, synthetic construct
RGTRDTS

SEQ ID NO: 193490 - protein, 7 aa, synthetic construct
RIQRDVS

SEQ ID NO: 193491 - protein, 7 aa, synthetic construct
RHNAITS

SEQ ID NO: 193492 - protein, 7 aa, synthetic construct
RPNREVQ

SEQ ID NO: 193493 - protein, 7 aa, synthetic construct
RPHDRTS

SEQ ID NO: 193494 - protein, 7 aa, synthetic construct
RINRDGS

SEQ ID NO: 193495 - protein, 7 aa, synthetic construct
RAARDIS

SEQ ID NO: 193496 - protein, 7 aa, synthetic construct
RPDRHVS

SEQ ID NO: 193497 - protein, 7 aa, synthetic construct
RPNREYG

SEQ ID NO: 193498 - protein, 7 aa, synthetic construct
RPNRSDG

SEQ ID NO: 193499 - protein, 7 aa, synthetic construct
KSNRDTS

SEQ ID NO: 193500 - protein, 7 aa, synthetic construct
IVNRDRS

SEQ ID NO: 193501 - protein, 7 aa, synthetic construct
RPQRDSM

SEQ ID NO: 193502 - protein, 7 aa, synthetic construct
RIARDNS

SEQ ID NO: 193503 - protein, 7 aa, synthetic construct
RENRVAS

SEQ ID NO: 193504 - protein, 7 aa, synthetic construct
RVARDTT

SEQ ID NO: 193505 - protein, 7 aa, synthetic construct
RPMRDNI

SEQ ID NO: 193506 - protein, 7 aa, synthetic construct
RINREMS

SEQ ID NO: 193507 - protein, 7 aa, synthetic construct
RKERDAS

SEQ ID NO: 193508 - protein, 7 aa, synthetic construct
RPDRRES

SEQ ID NO: 193509 - protein, 7 aa, synthetic construct
RPDRHQS

SEQ ID NO: 193510 - protein, 7 aa, synthetic construct
RHDRTTS

SEQ ID NO: 193511 - protein, 7 aa, synthetic construct
IPNRDRN

SEQ ID NO: 193512 - protein, 7 aa, synthetic construct
KIARDTS

SEQ ID NO: 193513 - protein, 7 aa, synthetic construct
RPQRDQQ

SEQ ID NO: 193514 - protein, 7 aa, synthetic construct
REKRDTI

SEQ ID NO: 193515 - protein, 7 aa, synthetic construct
ASNRDKS

SEQ ID NO: 193516 - protein, 7 aa, synthetic construct
RPARDKD

SEQ ID NO: 193517 - protein, 7 aa, synthetic construct
RPLRDNA

SEQ ID NO: 193518 - protein, 7 aa, synthetic construct
RPDRHIS

SEQ ID NO: 193519 - protein, 7 aa, synthetic construct
NMKRDTS

SEQ ID NO: 193520 - protein, 7 aa, synthetic construct
RPQRDIT

SEQ ID NO: 193521 - protein, 7 aa, synthetic construct
RPQREHS

SEQ ID NO: 193522 - protein, 7 aa, synthetic construct
RPLRDNT

SEQ ID NO: 193523 - protein, 7 aa, synthetic construct
HPNRATN

SEQ ID NO: 193524 - protein, 7 aa, synthetic construct
RRNDTTS

SEQ ID NO: 193525 - protein, 7 aa, synthetic construct
RQNREIS

SEQ ID NO: 193526 - protein, 7 aa, synthetic construct
RPNREMF

SEQ ID NO: 193527 - protein, 7 aa, synthetic construct
YPTRDTK

SEQ ID NO: 193528 - protein, 7 aa, synthetic construct
RPIREGS

SEQ ID NO: 193529 - protein, 7 aa, synthetic construct
RSNRDPP

SEQ ID NO: 193530 - protein, 7 aa, synthetic construct
GKNRDTL

SEQ ID NO: 193531 - protein, 7 aa, synthetic construct
RVNRDMV

SEQ ID NO: 193532 - protein, 7 aa, synthetic construct
KTSRDTS

SEQ ID NO: 193533 - protein, 7 aa, synthetic construct
RQGRDTS

SEQ ID NO: 193534 - protein, 7 aa, synthetic construct
RVNRDTT

SEQ ID NO: 193535 - protein, 7 aa, synthetic construct
RQARDMS

SEQ ID NO: 193536 - protein, 7 aa, synthetic construct
RPNRDDK

SEQ ID NO: 193537 - protein, 7 aa, synthetic construct
IPNRRTE

SEQ ID NO: 193538 - protein, 7 aa, synthetic construct
HPNRVTN

SEQ ID NO: 193539 - protein, 7 aa, synthetic construct
KDNRDTR

SEQ ID NO: 193540 - protein, 7 aa, synthetic construct
RPTRDMV

SEQ ID NO: 193541 - protein, 7 aa, synthetic construct
REKRDGS

SEQ ID NO: 193542 - protein, 7 aa, synthetic construct
RSNRDQI

SEQ ID NO: 193543 - protein, 7 aa, synthetic construct
RPARDPM

SEQ ID NO: 193544 - protein, 7 aa, synthetic construct
SVNRDKS

SEQ ID NO: 193545 - protein, 7 aa, synthetic construct
VKNRDTS

SEQ ID NO: 193546 - protein, 7 aa, synthetic construct
KINRDQS

SEQ ID NO: 193547 - protein, 7 aa, synthetic construct
RLPRDTS

SEQ ID NO: 193548 - protein, 7 aa, synthetic construct
RPFKDLS

SEQ ID NO: 193549 - protein, 7 aa, synthetic construct
RAKQDTS

SEQ ID NO: 193550 - protein, 7 aa, synthetic construct
RPMRDSV

SEQ ID NO: 193551 - protein, 7 aa, synthetic construct
KPHRDVS

SEQ ID NO: 193552 - protein, 7 aa, synthetic construct
RMVRDQS

SEQ ID NO: 193553 - protein, 7 aa, synthetic construct
RTSKDTS

SEQ ID NO: 193554 - protein, 7 aa, synthetic construct
MKNRDIS

SEQ ID NO: 193555 - protein, 7 aa, synthetic construct
RAQRDTL

SEQ ID NO: 193556 - protein, 7 aa, synthetic construct
RPNRESS

SEQ ID NO: 193557 - protein, 7 aa, synthetic construct
FPNRETK

SEQ ID NO: 193558 - protein, 7 aa, synthetic construct
RPNRELT

SEQ ID NO: 193559 - protein, 7 aa, synthetic construct
RPERMTL

SEQ ID NO: 193560 - protein, 7 aa, synthetic construct
RPNRDSV

SEQ ID NO: 193561 - protein, 7 aa, synthetic construct
RTPRDTS

SEQ ID NO: 193562 - protein, 7 aa, synthetic construct
RKERDTN

SEQ ID NO: 193563 - protein, 7 aa, synthetic construct
RELRMTS

SEQ ID NO: 193564 - protein, 7 aa, synthetic construct
AVNRDKS

SEQ ID NO: 193565 - protein, 7 aa, synthetic construct
RTNRETA

SEQ ID NO: 193566 - protein, 7 aa, synthetic construct
RPDRSTQ

SEQ ID NO: 193567 - protein, 7 aa, synthetic construct
RPHKDTM

SEQ ID NO: 193568 - protein, 7 aa, synthetic construct
KPNRDLL

SEQ ID NO: 193569 - protein, 7 aa, synthetic construct
RVARDTL

SEQ ID NO: 193570 - protein, 7 aa, synthetic construct
KPHRDTM

SEQ ID NO: 193571 - protein, 7 aa, synthetic construct
RTNRDGS

SEQ ID NO: 193572 - protein, 7 aa, synthetic construct
RPARDSG

SEQ ID NO: 193573 - protein, 7 aa, synthetic construct
VPKRDMS

SEQ ID NO: 193574 - protein, 7 aa, synthetic construct
RTARDTG

SEQ ID NO: 193575 - protein, 7 aa, synthetic construct
RPNRQDG

SEQ ID NO: 193576 - protein, 7 aa, synthetic construct
RAARDGS

SEQ ID NO: 193577 - protein, 7 aa, synthetic construct
RILRDTP

SEQ ID NO: 193578 - protein, 7 aa, synthetic construct
RETRPTS

SEQ ID NO: 193579 - protein, 7 aa, synthetic construct
KPQRDLS

SEQ ID NO: 193580 - protein, 7 aa, synthetic construct
KPIRDPS

SEQ ID NO: 193581 - protein, 7 aa, synthetic construct
RPNRENF

SEQ ID NO: 193582 - protein, 7 aa, synthetic construct
RPVRDIA

SEQ ID NO: 193583 - protein, 7 aa, synthetic construct
RDHRTTS

SEQ ID NO: 193584 - protein, 7 aa, synthetic construct
RRNEPTS

SEQ ID NO: 193585 - protein, 7 aa, synthetic construct
KPMRDTM

SEQ ID NO: 193586 - protein, 7 aa, synthetic construct
NPKRDVS

SEQ ID NO: 193587 - protein, 7 aa, synthetic construct
GKTRDTS

SEQ ID NO: 193588 - protein, 7 aa, synthetic construct
KVSRDTS

SEQ ID NO: 193589 - protein, 7 aa, synthetic construct
RQNRDAT

SEQ ID NO: 193590 - protein, 7 aa, synthetic construct
RPNRDFG

SEQ ID NO: 193591 - protein, 7 aa, synthetic construct
KPLRDTM

SEQ ID NO: 193592 - protein, 7 aa, synthetic construct
RPARDSV

SEQ ID NO: 193593 - protein, 7 aa, synthetic construct
QPTRDKS

SEQ ID NO: 193594 - protein, 7 aa, synthetic construct
RGNRLES

SEQ ID NO: 193595 - protein, 7 aa, synthetic construct
RPTRDLV

SEQ ID NO: 193596 - protein, 7 aa, synthetic construct
RMPRDQS

SEQ ID NO: 193597 - protein, 7 aa, synthetic construct
IANRDRS

SEQ ID NO: 193598 - protein, 7 aa, synthetic construct
RPTRDMM

SEQ ID NO: 193599 - protein, 7 aa, synthetic construct
RPNRHEP

SEQ ID NO: 193600 - protein, 7 aa, synthetic construct
WPKRDTG

SEQ ID NO: 193601 - protein, 7 aa, synthetic construct
PPRRDNS

SEQ ID NO: 193602 - protein, 7 aa, synthetic construct
RENRVIS

SEQ ID NO: 193603 - protein, 7 aa, synthetic construct
RVDRPTS

SEQ ID NO: 193604 - protein, 7 aa, synthetic construct
RAARDTP

SEQ ID NO: 193605 - protein, 7 aa, synthetic construct
RRNEQTS

SEQ ID NO: 193606 - protein, 7 aa, synthetic construct
RPERQTT

SEQ ID NO: 193607 - protein, 7 aa, synthetic construct
RAERDKS

SEQ ID NO: 193608 - protein, 7 aa, synthetic construct
YMKRDTS

SEQ ID NO: 193609 - protein, 7 aa, synthetic construct
RSERDKS

SEQ ID NO: 193610 - protein, 7 aa, synthetic construct
NPKRDPS

SEQ ID NO: 193611 - protein, 7 aa, synthetic construct
RPNRNEV

SEQ ID NO: 193612 - protein, 7 aa, synthetic construct
RVERVTS

SEQ ID NO: 193613 - protein, 7 aa, synthetic construct
RPRNDMS

SEQ ID NO: 193614 - protein, 7 aa, synthetic construct
RPNREQV

SEQ ID NO: 193615 - protein, 7 aa, synthetic construct
RVARETS

SEQ ID NO: 193616 - protein, 7 aa, synthetic construct
APRRDTM

SEQ ID NO: 193617 - protein, 7 aa, synthetic construct
RTDRVTS

SEQ ID NO: 193618 - protein, 7 aa, synthetic construct
RPHRDQP

SEQ ID NO: 193619 - protein, 7 aa, synthetic construct
RMPRDIS

SEQ ID NO: 193620 - protein, 7 aa, synthetic construct
IPKRDAS

SEQ ID NO: 193621 - protein, 7 aa, synthetic construct
KPERFTS

SEQ ID NO: 193622 - protein, 7 aa, synthetic construct
VKNRDQS

SEQ ID NO: 193623 - protein, 7 aa, synthetic construct
KMNRDPS

SEQ ID NO: 193624 - protein, 7 aa, synthetic construct
LPNRDHK

SEQ ID NO: 193625 - protein, 7 aa, synthetic construct
RPQRENS

SEQ ID NO: 193626 - protein, 7 aa, synthetic construct
YTNRDKS

SEQ ID NO: 193627 - protein, 7 aa, synthetic construct
RPNRDNI

SEQ ID NO: 193628 - protein, 7 aa, synthetic construct
RPGRDTG

SEQ ID NO: 193629 - protein, 7 aa, synthetic construct
RPNREIN

SEQ ID NO: 193630 - protein, 7 aa, synthetic construct
VPKRDPS

SEQ ID NO: 193631 - protein, 7 aa, synthetic construct
RPSRETF

SEQ ID NO: 193632 - protein, 7 aa, synthetic construct
RVNRDQA

SEQ ID NO: 193633 - protein, 7 aa, synthetic construct
RPSRDPG

SEQ ID NO: 193634 - protein, 7 aa, synthetic construct
RPNAHTQ

SEQ ID NO: 193635 - protein, 7 aa, synthetic construct
RPPRDDR

SEQ ID NO: 193636 - protein, 7 aa, synthetic construct
RPNRDQT

SEQ ID NO: 193637 - protein, 7 aa, synthetic construct
RPPRTTE

SEQ ID NO: 193638 - protein, 7 aa, synthetic construct
VKNRDTN

SEQ ID NO: 193639 - protein, 7 aa, synthetic construct
RLNREVS

SEQ ID NO: 193640 - protein, 7 aa, synthetic construct
KPQRDTT

SEQ ID NO: 193641 - protein, 7 aa, synthetic construct
RPKHDVS

SEQ ID NO: 193642 - protein, 7 aa, synthetic construct
RPARITE

SEQ ID NO: 193643 - protein, 7 aa, synthetic construct
QKNRDTL

SEQ ID NO: 193644 - protein, 7 aa, synthetic construct
GANRDKS

SEQ ID NO: 193645 - protein, 7 aa, synthetic construct
NPERKTS

SEQ ID NO: 193646 - protein, 7 aa, synthetic construct
RPERTTQ

SEQ ID NO: 193647 - protein, 7 aa, synthetic construct
RQGRDTL

SEQ ID NO: 193648 - protein, 7 aa, synthetic construct
LPRRDNS

SEQ ID NO: 193649 - protein, 7 aa, synthetic construct
EPNRGKS

SEQ ID NO: 193650 - protein, 7 aa, synthetic construct
RRNEVTS

SEQ ID NO: 193651 - protein, 7 aa, synthetic construct
PKTRDTS

SEQ ID NO: 193652 - protein, 7 aa, synthetic construct
RPSRDIG

SEQ ID NO: 193653 - protein, 7 aa, synthetic construct
RPNRDVS

SEQ ID NO: 193654 - protein, 7 aa, synthetic construct
RPDRTQS

SEQ ID NO: 193655 - protein, 7 aa, synthetic construct
RQQRDTI

SEQ ID NO: 193656 - protein, 7 aa, synthetic construct
TKNRDTI

SEQ ID NO: 193657 - protein, 7 aa, synthetic construct
RPPRDSF

SEQ ID NO: 193658 - protein, 7 aa, synthetic construct
RENRPTI

SEQ ID NO: 193659 - protein, 7 aa, synthetic construct
RPARPTE

SEQ ID NO: 193660 - protein, 7 aa, synthetic construct
FKNRETS

SEQ ID NO: 193661 - protein, 7 aa, synthetic construct
RTNMDTR

SEQ ID NO: 193662 - protein, 7 aa, synthetic construct
RPNPRTE

SEQ ID NO: 193663 - protein, 7 aa, synthetic construct
RVQRDAS

SEQ ID NO: 193664 - protein, 7 aa, synthetic construct
RNVRDGS

SEQ ID NO: 193665 - protein, 7 aa, synthetic construct
RAERHTS

SEQ ID NO: 193666 - protein, 7 aa, synthetic construct
RSNRDNV

SEQ ID NO: 193667 - protein, 7 aa, synthetic construct
RPLRDVA

SEQ ID NO: 193668 - protein, 7 aa, synthetic construct
HPKRETS

SEQ ID NO: 193669 - protein, 7 aa, synthetic construct
RGNRETM

SEQ ID NO: 193670 - protein, 7 aa, synthetic construct
RPQRDAS

SEQ ID NO: 193671 - protein, 7 aa, synthetic construct
KPGRDTT

SEQ ID NO: 193672 - protein, 7 aa, synthetic construct
RMNRDTG

SEQ ID NO: 193673 - protein, 7 aa, synthetic construct
PNKRDTS

SEQ ID NO: 193674 - protein, 7 aa, synthetic construct
RAARDQS

SEQ ID NO: 193675 - protein, 7 aa, synthetic construct
KANRDVS

SEQ ID NO: 193676 - protein, 7 aa, synthetic construct
RVSRDTV

SEQ ID NO: 193677 - protein, 7 aa, synthetic construct
FKNRDVS

SEQ ID NO: 193678 - protein, 7 aa, synthetic construct
RPARSES

SEQ ID NO: 193679 - protein, 7 aa, synthetic construct
RQARDAS

SEQ ID NO: 193680 - protein, 7 aa, synthetic construct
KPNRITD

SEQ ID NO: 193681 - protein, 7 aa, synthetic construct
RGNRETI

SEQ ID NO: 193682 - protein, 7 aa, synthetic construct
DPNRKTF

SEQ ID NO: 193683 - protein, 7 aa, synthetic construct
RANRDNI

SEQ ID NO: 193684 - protein, 7 aa, synthetic construct
RPVRPDS

SEQ ID NO: 193685 - protein, 7 aa, synthetic construct
LKNRDTY

SEQ ID NO: 193686 - protein, 7 aa, synthetic construct
RPDRVTY

SEQ ID NO: 193687 - protein, 7 aa, synthetic construct
SKNRDLS

SEQ ID NO: 193688 - protein, 7 aa, synthetic construct
RSDRDKS

SEQ ID NO: 193689 - protein, 7 aa, synthetic construct
APKRDQS

SEQ ID NO: 193690 - protein, 7 aa, synthetic construct
RGNKDPS

SEQ ID NO: 193691 - protein, 7 aa, synthetic construct
EPNRLKS

SEQ ID NO: 193692 - protein, 7 aa, synthetic construct
RMVRDNS

SEQ ID NO: 193693 - protein, 7 aa, synthetic construct
RPQRDSN

SEQ ID NO: 193694 - protein, 7 aa, synthetic construct
RPNRDAI

SEQ ID NO: 193695 - protein, 7 aa, synthetic construct
RPVRDVM

SEQ ID NO: 193696 - protein, 7 aa, synthetic construct
RPNRETA

SEQ ID NO: 193697 - protein, 7 aa, synthetic construct
RPNRDTM

SEQ ID NO: 193698 - protein, 7 aa, synthetic construct
KSNRDTV

SEQ ID NO: 193699 - protein, 7 aa, synthetic construct
RPNRDTV

SEQ ID NO: 193700 - protein, 7 aa, synthetic construct
RPQRGES

SEQ ID NO: 193701 - protein, 7 aa, synthetic construct
QPHRSTS

SEQ ID NO: 193702 - protein, 7 aa, synthetic construct
RPNRMGD

SEQ ID NO: 193703 - protein, 7 aa, synthetic construct
RPTRDVL

SEQ ID NO: 193704 - protein, 7 aa, synthetic construct
RPAHDRS

SEQ ID NO: 193705 - protein, 7 aa, synthetic construct
KSNRDAS

SEQ ID NO: 193706 - protein, 7 aa, synthetic construct
RPTRDAN

SEQ ID NO: 193707 - protein, 7 aa, synthetic construct
KVARDTS

SEQ ID NO: 193708 - protein, 7 aa, synthetic construct
RVNRDVV

SEQ ID NO: 193709 - protein, 7 aa, synthetic construct
KLNRDSS

SEQ ID NO: 193710 - protein, 7 aa, synthetic construct
KINRDPS

SEQ ID NO: 193711 - protein, 7 aa, synthetic construct
IPVRHTS

SEQ ID NO: 193712 - protein, 7 aa, synthetic construct
LRNKDTS

SEQ ID NO: 193713 - protein, 7 aa, synthetic construct
RMNQDTK

SEQ ID NO: 193714 - protein, 7 aa, synthetic construct
RQVRDAS

SEQ ID NO: 193715 - protein, 7 aa, synthetic construct
RPVRDLT

SEQ ID NO: 193716 - protein, 7 aa, synthetic construct
RPNREPT

SEQ ID NO: 193717 - protein, 7 aa, synthetic construct
RPTRDLA

SEQ ID NO: 193718 - protein, 7 aa, synthetic construct
TGNRDKS

SEQ ID NO: 193719 - protein, 7 aa, synthetic construct
LKIRDTS

SEQ ID NO: 193720 - protein, 7 aa, synthetic construct
QPTRHTS

SEQ ID NO: 193721 - protein, 7 aa, synthetic construct
RADRVTS

SEQ ID NO: 193722 - protein, 7 aa, synthetic construct
RPDRDTR

SEQ ID NO: 193723 - protein, 7 aa, synthetic construct
TPKRDPS

SEQ ID NO: 193724 - protein, 7 aa, synthetic construct
RVLRETS

SEQ ID NO: 193725 - protein, 7 aa, synthetic construct
RPIRDTI

SEQ ID NO: 193726 - protein, 7 aa, synthetic construct
KPNRDSQ

SEQ ID NO: 193727 - protein, 7 aa, synthetic construct
RSTRDTM

SEQ ID NO: 193728 - protein, 7 aa, synthetic construct
RNARDLS

SEQ ID NO: 193729 - protein, 7 aa, synthetic construct
RINRDTG

SEQ ID NO: 193730 - protein, 7 aa, synthetic construct
RPERNTQ

SEQ ID NO: 193731 - protein, 7 aa, synthetic construct
RGNKDGS

SEQ ID NO: 193732 - protein, 7 aa, synthetic construct
RASRDGS

SEQ ID NO: 193733 - protein, 7 aa, synthetic construct
RANRDVN

SEQ ID NO: 193734 - protein, 7 aa, synthetic construct
RSRPDTS

SEQ ID NO: 193735 - protein, 7 aa, synthetic construct
LPRRDTG

SEQ ID NO: 193736 - protein, 7 aa, synthetic construct
RPNRPET

SEQ ID NO: 193737 - protein, 7 aa, synthetic construct
RPKYDTG

SEQ ID NO: 193738 - protein, 7 aa, synthetic construct
RPPRDST

SEQ ID NO: 193739 - protein, 7 aa, synthetic construct
RPSRDQA

SEQ ID NO: 193740 - protein, 7 aa, synthetic construct
RHNPITS

SEQ ID NO: 193741 - protein, 7 aa, synthetic construct
RVNRDVT

SEQ ID NO: 193742 - protein, 7 aa, synthetic construct
RPIRDQM

SEQ ID NO: 193743 - protein, 7 aa, synthetic construct
RNNREIS

SEQ ID NO: 193744 - protein, 7 aa, synthetic construct
RPMRDVQ

SEQ ID NO: 193745 - protein, 7 aa, synthetic construct
RPRQDTF

SEQ ID NO: 193746 - protein, 7 aa, synthetic construct
RPNRQPE

SEQ ID NO: 193747 - protein, 7 aa, synthetic construct
RPGRGDS

SEQ ID NO: 193748 - protein, 7 aa, synthetic construct
RTNRETS

SEQ ID NO: 193749 - protein, 7 aa, synthetic construct
LFNRDTK

SEQ ID NO: 193750 - protein, 7 aa, synthetic construct
RAGRDGS

SEQ ID NO: 193751 - protein, 7 aa, synthetic construct
RPLRDEK

SEQ ID NO: 193752 - protein, 7 aa, synthetic construct
RTNRETV

SEQ ID NO: 193753 - protein, 7 aa, synthetic construct
RQNKDTV

SEQ ID NO: 193754 - protein, 7 aa, synthetic construct
RSNKDTF

SEQ ID NO: 193755 - protein, 7 aa, synthetic construct
RNSRDTV

SEQ ID NO: 193756 - protein, 7 aa, synthetic construct
DPNRPRS

SEQ ID NO: 193757 - protein, 7 aa, synthetic construct
RDSRDTK

SEQ ID NO: 193758 - protein, 7 aa, synthetic construct
PKNRDAS

SEQ ID NO: 193759 - protein, 7 aa, synthetic construct
RGVRDGS

SEQ ID NO: 193760 - protein, 7 aa, synthetic construct
RPSHNTS

SEQ ID NO: 193761 - protein, 7 aa, synthetic construct
RGPRDTS

SEQ ID NO: 193762 - protein, 7 aa, synthetic construct
RPNRDTA

SEQ ID NO: 193763 - protein, 7 aa, synthetic construct
RANLHTS

SEQ ID NO: 193764 - protein, 7 aa, synthetic construct
RPNREMS

SEQ ID NO: 193765 - protein, 7 aa, synthetic construct
RPQRDEK

SEQ ID NO: 193766 - protein, 7 aa, synthetic construct
RSVRDAS

SEQ ID NO: 193767 - protein, 7 aa, synthetic construct
KPDRHTS

SEQ ID NO: 193768 - protein, 7 aa, synthetic construct
KPARDPS

SEQ ID NO: 193769 - protein, 7 aa, synthetic construct
TKNRDFS

SEQ ID NO: 193770 - protein, 7 aa, synthetic construct
RPMRPTE

SEQ ID NO: 193771 - protein, 7 aa, synthetic construct
RPTKDTH

SEQ ID NO: 193772 - protein, 7 aa, synthetic construct
RMQRDTI

SEQ ID NO: 193773 - protein, 7 aa, synthetic construct
RPNRTDM

SEQ ID NO: 193774 - protein, 7 aa, synthetic construct
RQARDLS

SEQ ID NO: 193775 - protein, 7 aa, synthetic construct
YPKRDTS

SEQ ID NO: 193776 - protein, 7 aa, synthetic construct
VINRDRS

SEQ ID NO: 193777 - protein, 7 aa, synthetic construct
KPTRDTY

SEQ ID NO: 193778 - protein, 7 aa, synthetic construct
RKERDTA

SEQ ID NO: 193779 - protein, 7 aa, synthetic construct
RPTRLDS

SEQ ID NO: 193780 - protein, 7 aa, synthetic construct
RQARDTT

SEQ ID NO: 193781 - protein, 7 aa, synthetic construct
RPSRDAG

SEQ ID NO: 193782 - protein, 7 aa, synthetic construct
RPDRMTN

SEQ ID NO: 193783 - protein, 7 aa, synthetic construct
RTNRDLA

SEQ ID NO: 193784 - protein, 7 aa, synthetic construct
RQARDTL

SEQ ID NO: 193785 - protein, 7 aa, synthetic construct
RPNERGS

SEQ ID NO: 193786 - protein, 7 aa, synthetic construct
KINRDTT

SEQ ID NO: 193787 - protein, 7 aa, synthetic construct
RGARDTT

SEQ ID NO: 193788 - protein, 7 aa, synthetic construct
RDTRQTS

SEQ ID NO: 193789 - protein, 7 aa, synthetic construct
MKNRDTT

SEQ ID NO: 193790 - protein, 7 aa, synthetic construct
KPKYDTS

SEQ ID NO: 193791 - protein, 7 aa, synthetic construct
RPNKDNF

SEQ ID NO: 193792 - protein, 7 aa, synthetic construct
RVTRDTV

SEQ ID NO: 193793 - protein, 7 aa, synthetic construct
AKLRDTS

SEQ ID NO: 193794 - protein, 7 aa, synthetic construct
RPGRDAI

SEQ ID NO: 193795 - protein, 7 aa, synthetic construct
VPHRDKS

SEQ ID NO: 193796 - protein, 7 aa, synthetic construct
RPVRDNT

SEQ ID NO: 193797 - protein, 7 aa, synthetic construct
RPNKDDK

SEQ ID NO: 193798 - protein, 7 aa, synthetic construct
KGMRDTS

SEQ ID NO: 193799 - protein, 7 aa, synthetic construct
KPSRDTL

SEQ ID NO: 193800 - protein, 7 aa, synthetic construct
RPTRMES

SEQ ID NO: 193801 - protein, 7 aa, synthetic construct
KPNRDGF

SEQ ID NO: 193802 - protein, 7 aa, synthetic construct
RPNMETR

SEQ ID NO: 193803 - protein, 7 aa, synthetic construct
NKNRDTG

SEQ ID NO: 193804 - protein, 7 aa, synthetic construct
RSNREGS

SEQ ID NO: 193805 - protein, 7 aa, synthetic construct
EPKRMTS

SEQ ID NO: 193806 - protein, 7 aa, synthetic construct
KTNRDNS

SEQ ID NO: 193807 - protein, 7 aa, synthetic construct
RDKRDNS

SEQ ID NO: 193808 - protein, 7 aa, synthetic construct
RQARDTI

SEQ ID NO: 193809 - protein, 7 aa, synthetic construct
RLGRDTV

SEQ ID NO: 193810 - protein, 7 aa, synthetic construct
RPNVHNS

SEQ ID NO: 193811 - protein, 7 aa, synthetic construct
RFKQDTS

SEQ ID NO: 193812 - protein, 7 aa, synthetic construct
KPSRDAS

SEQ ID NO: 193813 - protein, 7 aa, synthetic construct
RPDRHPS

SEQ ID NO: 193814 - protein, 7 aa, synthetic construct
RTQRDTN

SEQ ID NO: 193815 - protein, 7 aa, synthetic construct
TQKRDTS

SEQ ID NO: 193816 - protein, 7 aa, synthetic construct
RPTRDAA

SEQ ID NO: 193817 - protein, 7 aa, synthetic construct
RPARENS

SEQ ID NO: 193818 - protein, 7 aa, synthetic construct
KQIRDTS

SEQ ID NO: 193819 - protein, 7 aa, synthetic construct
RPVRPTD

SEQ ID NO: 193820 - protein, 7 aa, synthetic construct
RPNPKTD

SEQ ID NO: 193821 - protein, 7 aa, synthetic construct
RPARQTE

SEQ ID NO: 193822 - protein, 7 aa, synthetic construct
RPPRDVY

SEQ ID NO: 193823 - protein, 7 aa, synthetic construct
LKNRDTL

SEQ ID NO: 193824 - protein, 7 aa, synthetic construct
RNTRDNS

SEQ ID NO: 193825 - protein, 7 aa, synthetic construct
REARSTS

SEQ ID NO: 193826 - protein, 7 aa, synthetic construct
RRDKDTS

SEQ ID NO: 193827 - protein, 7 aa, synthetic construct
RPNRETS

SEQ ID NO: 193828 - protein, 7 aa, synthetic construct
KGNRDTL

SEQ ID NO: 193829 - protein, 7 aa, synthetic construct
RPQRDNF

SEQ ID NO: 193830 - protein, 7 aa, synthetic construct
MKNRDAS

SEQ ID NO: 193831 - protein, 7 aa, synthetic construct
RPRNDTA

SEQ ID NO: 193832 - protein, 7 aa, synthetic construct
RPSRDTS

SEQ ID NO: 193833 - protein, 7 aa, synthetic construct
RPTRDDK

SEQ ID NO: 193834 - protein, 7 aa, synthetic construct
RRPVDTS

SEQ ID NO: 193835 - protein, 7 aa, synthetic construct
RPDRDRS

SEQ ID NO: 193836 - protein, 7 aa, synthetic construct
RQVRDLS

SEQ ID NO: 193837 - protein, 7 aa, synthetic construct
KNQRDTS

SEQ ID NO: 193838 - protein, 7 aa, synthetic construct
RNARDTV

SEQ ID NO: 193839 - protein, 7 aa, synthetic construct
LPRRDTT

SEQ ID NO: 193840 - protein, 7 aa, synthetic construct
RELRPTS

SEQ ID NO: 193841 - protein, 7 aa, synthetic construct
REIRTTS

SEQ ID NO: 193842 - protein, 7 aa, synthetic construct
GPDRKTS

SEQ ID NO: 193843 - protein, 7 aa, synthetic construct
GSKRDTS

SEQ ID NO: 193844 - protein, 7 aa, synthetic construct
RTERLTS

SEQ ID NO: 193845 - protein, 7 aa, synthetic construct
RPDRSSS

SEQ ID NO: 193846 - protein, 7 aa, synthetic construct
RDSRDKS

SEQ ID NO: 193847 - protein, 7 aa, synthetic construct
FVKRDTS

SEQ ID NO: 193848 - protein, 7 aa, synthetic construct
NKIRDTS

SEQ ID NO: 193849 - protein, 7 aa, synthetic construct
RTPRDTG

SEQ ID NO: 193850 - protein, 7 aa, synthetic construct
RPVRIDS

SEQ ID NO: 193851 - protein, 7 aa, synthetic construct
FPNREKS

SEQ ID NO: 193852 - protein, 7 aa, synthetic construct
KPLRDTY

SEQ ID NO: 193853 - protein, 7 aa, synthetic construct
KTGRDTS

SEQ ID NO: 193854 - protein, 7 aa, synthetic construct
RPRADAS

SEQ ID NO: 193855 - protein, 7 aa, synthetic construct
RANRDGI

SEQ ID NO: 193856 - protein, 7 aa, synthetic construct
RPSRDNF

SEQ ID NO: 193857 - protein, 7 aa, synthetic construct
FPARDKS

SEQ ID NO: 193858 - protein, 7 aa, synthetic construct
RTTRDTV

SEQ ID NO: 193859 - protein, 7 aa, synthetic construct
RPTRSES

SEQ ID NO: 193860 - protein, 7 aa, synthetic construct
RPNRQDS

SEQ ID NO: 193861 - protein, 7 aa, synthetic construct
RPSHTTS

SEQ ID NO: 193862 - protein, 7 aa, synthetic construct
KPNFSTS

SEQ ID NO: 193863 - protein, 7 aa, synthetic construct
RVARDGS

SEQ ID NO: 193864 - protein, 7 aa, synthetic construct
KLNRDNS

SEQ ID NO: 193865 - protein, 7 aa, synthetic construct
RLPRDLS

SEQ ID NO: 193866 - protein, 7 aa, synthetic construct
RQNRDGV

SEQ ID NO: 193867 - protein, 7 aa, synthetic construct
RHDRVTS

SEQ ID NO: 193868 - protein, 7 aa, synthetic construct
RPVRLES

SEQ ID NO: 193869 - protein, 7 aa, synthetic construct
KATRDTS

SEQ ID NO: 193870 - protein, 7 aa, synthetic construct
AINRDKS

SEQ ID NO: 193871 - protein, 7 aa, synthetic construct
RPQRDQN

SEQ ID NO: 193872 - protein, 7 aa, synthetic construct
RQNRDIV

SEQ ID NO: 193873 - protein, 7 aa, synthetic construct
RSGRDTI

SEQ ID NO: 193874 - protein, 7 aa, synthetic construct
ITNRDRS

SEQ ID NO: 193875 - protein, 7 aa, synthetic construct
RPNREPM

SEQ ID NO: 193876 - protein, 7 aa, synthetic construct
RPMRDNN

SEQ ID NO: 193877 - protein, 7 aa, synthetic construct
RPNRVEL

SEQ ID NO: 193878 - protein, 7 aa, synthetic construct
ISKRDTS

SEQ ID NO: 193879 - protein, 7 aa, synthetic construct
RPTRDNF

SEQ ID NO: 193880 - protein, 7 aa, synthetic construct
RPNREAV

SEQ ID NO: 193881 - protein, 7 aa, synthetic construct
RVNRLES

SEQ ID NO: 193882 - protein, 7 aa, synthetic construct
RPNRDSI

SEQ ID NO: 193883 - protein, 7 aa, synthetic construct
DPKRDTR

SEQ ID NO: 193884 - protein, 7 aa, synthetic construct
RKDRDAS

SEQ ID NO: 193885 - protein, 7 aa, synthetic construct
RTPRDAS

SEQ ID NO: 193886 - protein, 7 aa, synthetic construct
RPKHDTA

SEQ ID NO: 193887 - protein, 7 aa, synthetic construct
RVQRDTA

SEQ ID NO: 193888 - protein, 7 aa, synthetic construct
RPVRDNL

SEQ ID NO: 193889 - protein, 7 aa, synthetic construct
KPTRDNS

SEQ ID NO: 193890 - protein, 7 aa, synthetic construct
RGTRETS

SEQ ID NO: 193891 - protein, 7 aa, synthetic construct
RQNRDGN

SEQ ID NO: 193892 - protein, 7 aa, synthetic construct
NKNRDTS

SEQ ID NO: 193893 - protein, 7 aa, synthetic construct
IPNRRDS

SEQ ID NO: 193894 - protein, 7 aa, synthetic construct
DPNRQRS

SEQ ID NO: 193895 - protein, 7 aa, synthetic construct
LPNRHTG

SEQ ID NO: 193896 - protein, 7 aa, synthetic construct
KPNRQES

SEQ ID NO: 193897 - protein, 7 aa, synthetic construct
RPTRDQT

SEQ ID NO: 193898 - protein, 7 aa, synthetic construct
RENRLIS

SEQ ID NO: 193899 - protein, 7 aa, synthetic construct
RPERHTG

SEQ ID NO: 193900 - protein, 7 aa, synthetic construct
RSNADTR

SEQ ID NO: 193901 - protein, 7 aa, synthetic construct
RSNRDQV

SEQ ID NO: 193902 - protein, 7 aa, synthetic construct
RPGRDVL

SEQ ID NO: 193903 - protein, 7 aa, synthetic construct
KPNRTTD

SEQ ID NO: 193904 - protein, 7 aa, synthetic construct
MKNRDTN

SEQ ID NO: 193905 - protein, 7 aa, synthetic construct
RKGNDTS

SEQ ID NO: 193906 - protein, 7 aa, synthetic construct
PKNRDPS

SEQ ID NO: 193907 - protein, 7 aa, synthetic construct
RPQRDSA

SEQ ID NO: 193908 - protein, 7 aa, synthetic construct
RQSRDTV

SEQ ID NO: 193909 - protein, 7 aa, synthetic construct
RPRDSTS

SEQ ID NO: 193910 - protein, 7 aa, synthetic construct
RMNADTK

SEQ ID NO: 193911 - protein, 7 aa, synthetic construct
RPNRETV

SEQ ID NO: 193912 - protein, 7 aa, synthetic construct
TKSRDTS

SEQ ID NO: 193913 - protein, 7 aa, synthetic construct
RPNPRDS

SEQ ID NO: 193914 - protein, 7 aa, synthetic construct
RELRATS

SEQ ID NO: 193915 - protein, 7 aa, synthetic construct
LPHRATS

SEQ ID NO: 193916 - protein, 7 aa, synthetic construct
RMPRDTV

SEQ ID NO: 193917 - protein, 7 aa, synthetic construct
RPLHTTS

SEQ ID NO: 193918 - protein, 7 aa, synthetic construct
RPSRPDS

SEQ ID NO: 193919 - protein, 7 aa, synthetic construct
PKNRDTI

SEQ ID NO: 193920 - protein, 7 aa, synthetic construct
GKNRDTA

SEQ ID NO: 193921 - protein, 7 aa, synthetic construct
RPQRDSG

SEQ ID NO: 193922 - protein, 7 aa, synthetic construct
RPTHITS

SEQ ID NO: 193923 - protein, 7 aa, synthetic construct
QKNRDAS

SEQ ID NO: 193924 - protein, 7 aa, synthetic construct
RGNRIES

SEQ ID NO: 193925 - protein, 7 aa, synthetic construct
RATRDIS

SEQ ID NO: 193926 - protein, 7 aa, synthetic construct
KPNRDQS

SEQ ID NO: 193927 - protein, 7 aa, synthetic construct
RPTREAS

SEQ ID NO: 193928 - protein, 7 aa, synthetic construct
RPSRETG

SEQ ID NO: 193929 - protein, 7 aa, synthetic construct
RPTRDQG

SEQ ID NO: 193930 - protein, 7 aa, synthetic construct
KPNRDSF

SEQ ID NO: 193931 - protein, 7 aa, synthetic construct
RGARDGS

SEQ ID NO: 193932 - protein, 7 aa, synthetic construct
RPNRDQL

SEQ ID NO: 193933 - protein, 7 aa, synthetic construct
APHRPTS

SEQ ID NO: 193934 - protein, 7 aa, synthetic construct
RPERLTT

SEQ ID NO: 193935 - protein, 7 aa, synthetic construct
KIPRDTS

SEQ ID NO: 193936 - protein, 7 aa, synthetic construct
KPQRDSS

SEQ ID NO: 193937 - protein, 7 aa, synthetic construct
APKRDTN

SEQ ID NO: 193938 - protein, 7 aa, synthetic construct
RTNKDTT

SEQ ID NO: 193939 - protein, 7 aa, synthetic construct
APSRHTS

SEQ ID NO: 193940 - protein, 7 aa, synthetic construct
RFNKDTS

SEQ ID NO: 193941 - protein, 7 aa, synthetic construct
RPNRDVV

SEQ ID NO: 193942 - protein, 7 aa, synthetic construct
RPTKDTY

SEQ ID NO: 193943 - protein, 7 aa, synthetic construct
RPARDQY

SEQ ID NO: 193944 - protein, 7 aa, synthetic construct
KFNRDVS

SEQ ID NO: 193945 - protein, 7 aa, synthetic construct
VPHRITS

SEQ ID NO: 193946 - protein, 7 aa, synthetic construct
RVPRDTG

SEQ ID NO: 193947 - protein, 7 aa, synthetic construct
RLNREAS

SEQ ID NO: 193948 - protein, 7 aa, synthetic construct
RTPRDGS

SEQ ID NO: 193949 - protein, 7 aa, synthetic construct
RVNRETA

SEQ ID NO: 193950 - protein, 7 aa, synthetic construct
FPKRDTF

SEQ ID NO: 193951 - protein, 7 aa, synthetic construct
QPKRDAS

SEQ ID NO: 193952 - protein, 7 aa, synthetic construct
RVGRDTG

SEQ ID NO: 193953 - protein, 7 aa, synthetic construct
RPARDSF

SEQ ID NO: 193954 - protein, 7 aa, synthetic construct
RPDRDVR

SEQ ID NO: 193955 - protein, 7 aa, synthetic construct
RAVRDTL

SEQ ID NO: 193956 - protein, 7 aa, synthetic construct
RDKRDTL

SEQ ID NO: 193957 - protein, 7 aa, synthetic construct
WPNRKDS

SEQ ID NO: 193958 - protein, 7 aa, synthetic construct
RPQRDIG

SEQ ID NO: 193959 - protein, 7 aa, synthetic construct
KQNRDTN

SEQ ID NO: 193960 - protein, 7 aa, synthetic construct
RPERSGS

SEQ ID NO: 193961 - protein, 7 aa, synthetic construct
RQPRDTA

SEQ ID NO: 193962 - protein, 7 aa, synthetic construct
QPKRDFS

SEQ ID NO: 193963 - protein, 7 aa, synthetic construct
RALRDGS

SEQ ID NO: 193964 - protein, 7 aa, synthetic construct
RGNRDAV

SEQ ID NO: 193965 - protein, 7 aa, synthetic construct
KHPRDTS

SEQ ID NO: 193966 - protein, 7 aa, synthetic construct
RNTRDGS

SEQ ID NO: 193967 - protein, 7 aa, synthetic construct
RSPRDMS

SEQ ID NO: 193968 - protein, 7 aa, synthetic construct
RPERVIS

SEQ ID NO: 193969 - protein, 7 aa, synthetic construct
RINAHTS

SEQ ID NO: 193970 - protein, 7 aa, synthetic construct
TINRDKS

SEQ ID NO: 193971 - protein, 7 aa, synthetic construct
RKERDTV

SEQ ID NO: 193972 - protein, 7 aa, synthetic construct
AKTRDTS

SEQ ID NO: 193973 - protein, 7 aa, synthetic construct
RAVRDTS

SEQ ID NO: 193974 - protein, 7 aa, synthetic construct
REARPTS

SEQ ID NO: 193975 - protein, 7 aa, synthetic construct
RAGRDLS

SEQ ID NO: 193976 - protein, 7 aa, synthetic construct
RPMREVS

SEQ ID NO: 193977 - protein, 7 aa, synthetic construct
IPKRDTY

SEQ ID NO: 193978 - protein, 7 aa, synthetic construct
RGPRDTL

SEQ ID NO: 193979 - protein, 7 aa, synthetic construct
KQNRDTP

SEQ ID NO: 193980 - protein, 7 aa, synthetic construct
IPKRDTS

SEQ ID NO: 193981 - protein, 7 aa, synthetic construct
RPMRDLS

SEQ ID NO: 193982 - protein, 7 aa, synthetic construct
RGKNDTS

SEQ ID NO: 193983 - protein, 7 aa, synthetic construct
RAQRDAS

SEQ ID NO: 193984 - protein, 7 aa, synthetic construct
EPKRPTS

SEQ ID NO: 193985 - protein, 7 aa, synthetic construct
RVNKDTF

SEQ ID NO: 193986 - protein, 7 aa, synthetic construct
VQNRDTK

SEQ ID NO: 193987 - protein, 7 aa, synthetic construct
QVKRDTS

SEQ ID NO: 193988 - protein, 7 aa, synthetic construct
KPNRESS

SEQ ID NO: 193989 - protein, 7 aa, synthetic construct
VPRKDTS

SEQ ID NO: 193990 - protein, 7 aa, synthetic construct
RPSRDSG

SEQ ID NO: 193991 - protein, 7 aa, synthetic construct
RDKRDTN

SEQ ID NO: 193992 - protein, 7 aa, synthetic construct
MKQRDTS

SEQ ID NO: 193993 - protein, 7 aa, synthetic construct
YKLRDTS

SEQ ID NO: 193994 - protein, 7 aa, synthetic construct
KNTRDTS

SEQ ID NO: 193995 - protein, 7 aa, synthetic construct
NPKRDTI

SEQ ID NO: 193996 - protein, 7 aa, synthetic construct
IRNRETS

SEQ ID NO: 193997 - protein, 7 aa, synthetic construct
KGLRDTS

SEQ ID NO: 193998 - protein, 7 aa, synthetic construct
KPNRDDK

SEQ ID NO: 193999 - protein, 7 aa, synthetic construct
RPNREIS

SEQ ID NO: 194000 - protein, 7 aa, synthetic construct
RLARDTS

SEQ ID NO: 194001 - protein, 7 aa, synthetic construct
RPDRQHS

SEQ ID NO: 194002 - protein, 7 aa, synthetic construct
RTPRDTI

SEQ ID NO: 194003 - protein, 7 aa, synthetic construct
RPQRESS

SEQ ID NO: 194004 - protein, 7 aa, synthetic construct
KVNRDNS

SEQ ID NO: 194005 - protein, 7 aa, synthetic construct
RKNADTM

SEQ ID NO: 194006 - protein, 7 aa, synthetic construct
RPARDPA

SEQ ID NO: 194007 - protein, 7 aa, synthetic construct
TKNRDLS

SEQ ID NO: 194008 - protein, 7 aa, synthetic construct
RPTRDSI

SEQ ID NO: 194009 - protein, 7 aa, synthetic construct
RPHRDGV

SEQ ID NO: 194010 - protein, 7 aa, synthetic construct
KPNRDPY

SEQ ID NO: 194011 - protein, 7 aa, synthetic construct
RPIRDTA

SEQ ID NO: 194012 - protein, 7 aa, synthetic construct
RQNRTTE

SEQ ID NO: 194013 - protein, 7 aa, synthetic construct
HPNRIAS

SEQ ID NO: 194014 - protein, 7 aa, synthetic construct
RIERVTS

SEQ ID NO: 194015 - protein, 7 aa, synthetic construct
GPIRHTS

SEQ ID NO: 194016 - protein, 7 aa, synthetic construct
RPQKDPS

SEQ ID NO: 194017 - protein, 7 aa, synthetic construct
HPNRQTN

SEQ ID NO: 194018 - protein, 7 aa, synthetic construct
AKARDTS

SEQ ID NO: 194019 - protein, 7 aa, synthetic construct
RRNPDTV

SEQ ID NO: 194020 - protein, 7 aa, synthetic construct
RPTRDAL

SEQ ID NO: 194021 - protein, 7 aa, synthetic construct
RANRGES

SEQ ID NO: 194022 - protein, 7 aa, synthetic construct
KPFRDTT

SEQ ID NO: 194023 - protein, 7 aa, synthetic construct
FPKRDTN

SEQ ID NO: 194024 - protein, 7 aa, synthetic construct
RNNKDPS

SEQ ID NO: 194025 - protein, 7 aa, synthetic construct
RDARTTS

SEQ ID NO: 194026 - protein, 7 aa, synthetic construct
RMNRTTE

SEQ ID NO: 194027 - protein, 7 aa, synthetic construct
RPDRSNS

SEQ ID NO: 194028 - protein, 7 aa, synthetic construct
RVNRDMS

SEQ ID NO: 194029 - protein, 7 aa, synthetic construct
RPPRDLM

SEQ ID NO: 194030 - protein, 7 aa, synthetic construct
RPSKDPS

SEQ ID NO: 194031 - protein, 7 aa, synthetic construct
EPNRKGS

SEQ ID NO: 194032 - protein, 7 aa, synthetic construct
RPNREGY

SEQ ID NO: 194033 - protein, 7 aa, synthetic construct
RPTRDGV

SEQ ID NO: 194034 - protein, 7 aa, synthetic construct
RPPRDRE

SEQ ID NO: 194035 - protein, 7 aa, synthetic construct
RPDRLTV

SEQ ID NO: 194036 - protein, 7 aa, synthetic construct
KPNYDKS

SEQ ID NO: 194037 - protein, 7 aa, synthetic construct
YPKRDAS

SEQ ID NO: 194038 - protein, 7 aa, synthetic construct
RESRQTS

SEQ ID NO: 194039 - protein, 7 aa, synthetic construct
RVARDVS

SEQ ID NO: 194040 - protein, 7 aa, synthetic construct
IPNRDRL

SEQ ID NO: 194041 - protein, 7 aa, synthetic construct
PPKRDTG

SEQ ID NO: 194042 - protein, 7 aa, synthetic construct
RMSRDTI

SEQ ID NO: 194043 - protein, 7 aa, synthetic construct
RAKNDTS

SEQ ID NO: 194044 - protein, 7 aa, synthetic construct
RANRDTI

SEQ ID NO: 194045 - protein, 7 aa, synthetic construct
RPDRLIS

SEQ ID NO: 194046 - protein, 7 aa, synthetic construct
KPNRGES

SEQ ID NO: 194047 - protein, 7 aa, synthetic construct
RTNRDVS

SEQ ID NO: 194048 - protein, 7 aa, synthetic construct
RTDRPTS

SEQ ID NO: 194049 - protein, 7 aa, synthetic construct
RVMRDTA

SEQ ID NO: 194050 - protein, 7 aa, synthetic construct
RPNRDSM

SEQ ID NO: 194051 - protein, 7 aa, synthetic construct
RPDRTTQ

SEQ ID NO: 194052 - protein, 7 aa, synthetic construct
RPPRDRD

SEQ ID NO: 194053 - protein, 7 aa, synthetic construct
RQSRDTG

SEQ ID NO: 194054 - protein, 7 aa, synthetic construct
REIRPTS

SEQ ID NO: 194055 - protein, 7 aa, synthetic construct
RDARDKS

SEQ ID NO: 194056 - protein, 7 aa, synthetic construct
RLPRDAS

SEQ ID NO: 194057 - protein, 7 aa, synthetic construct
VPKRDFS

SEQ ID NO: 194058 - protein, 7 aa, synthetic construct
RPARDLQ

SEQ ID NO: 194059 - protein, 7 aa, synthetic construct
RGLRDTV

SEQ ID NO: 194060 - protein, 7 aa, synthetic construct
RPARDLS

SEQ ID NO: 194061 - protein, 7 aa, synthetic construct
RPERAVS

SEQ ID NO: 194062 - protein, 7 aa, synthetic construct
KPNRDLF

SEQ ID NO: 194063 - protein, 7 aa, synthetic construct
KENRQTS

SEQ ID NO: 194064 - protein, 7 aa, synthetic construct
RSDRDTR

SEQ ID NO: 194065 - protein, 7 aa, synthetic construct
RPQRDYV

SEQ ID NO: 194066 - protein, 7 aa, synthetic construct
RTPRDTN

SEQ ID NO: 194067 - protein, 7 aa, synthetic construct
RPNFTAS

SEQ ID NO: 194068 - protein, 7 aa, synthetic construct
RPNRLGD

SEQ ID NO: 194069 - protein, 7 aa, synthetic construct
RSNPDTR

SEQ ID NO: 194070 - protein, 7 aa, synthetic construct
RSNRDTA

SEQ ID NO: 194071 - protein, 7 aa, synthetic construct
RTDRATS

SEQ ID NO: 194072 - protein, 7 aa, synthetic construct
RVERPTS

SEQ ID NO: 194073 - protein, 7 aa, synthetic construct
IPHRSTS

SEQ ID NO: 194074 - protein, 7 aa, synthetic construct
PKNRDSS

SEQ ID NO: 194075 - protein, 7 aa, synthetic construct
LPNRDRA

SEQ ID NO: 194076 - protein, 7 aa, synthetic construct
RPNFATA

SEQ ID NO: 194077 - protein, 7 aa, synthetic construct
LPHRQTS

SEQ ID NO: 194078 - protein, 7 aa, synthetic construct
RIMRETS

SEQ ID NO: 194079 - protein, 7 aa, synthetic construct
NKQRDTS

SEQ ID NO: 194080 - protein, 7 aa, synthetic construct
RVNRETP

SEQ ID NO: 194081 - protein, 7 aa, synthetic construct
KPNRDGH

SEQ ID NO: 194082 - protein, 7 aa, synthetic construct
RSNRDLV

SEQ ID NO: 194083 - protein, 7 aa, synthetic construct
YKNRDMS

SEQ ID NO: 194084 - protein, 7 aa, synthetic construct
RVARDTM

SEQ ID NO: 194085 - protein, 7 aa, synthetic construct
VVNRDKS

SEQ ID NO: 194086 - protein, 7 aa, synthetic construct
RQNRDIG

SEQ ID NO: 194087 - protein, 7 aa, synthetic construct
KLMRDTS

SEQ ID NO: 194088 - protein, 7 aa, synthetic construct
RANRDMG

SEQ ID NO: 194089 - protein, 7 aa, synthetic construct
RPNPHTY

SEQ ID NO: 194090 - protein, 7 aa, synthetic construct
RPNRIDP

SEQ ID NO: 194091 - protein, 7 aa, synthetic construct
RPSRDQV

SEQ ID NO: 194092 - protein, 7 aa, synthetic construct
KINRDTV

SEQ ID NO: 194093 - protein, 7 aa, synthetic construct
RPDRSTN

SEQ ID NO: 194094 - protein, 7 aa, synthetic construct
KPNRPES

SEQ ID NO: 194095 - protein, 7 aa, synthetic construct
RAVRDNS

SEQ ID NO: 194096 - protein, 7 aa, synthetic construct
LPGRHTS

SEQ ID NO: 194097 - protein, 7 aa, synthetic construct
MKNRDTL

SEQ ID NO: 194098 - protein, 7 aa, synthetic construct
VPNRDRN

SEQ ID NO: 194099 - protein, 7 aa, synthetic construct
RPSRDIS

SEQ ID NO: 194100 - protein, 7 aa, synthetic construct
RPARTES

SEQ ID NO: 194101 - protein, 7 aa, synthetic construct
RPSRDTN

SEQ ID NO: 194102 - protein, 7 aa, synthetic construct
IPRRDTV

SEQ ID NO: 194103 - protein, 7 aa, synthetic construct
RPDRTHS

SEQ ID NO: 194104 - protein, 7 aa, synthetic construct
KPNRVTD

SEQ ID NO: 194105 - protein, 7 aa, synthetic construct
RPTRDMS

SEQ ID NO: 194106 - protein, 7 aa, synthetic construct
RANRIDS

SEQ ID NO: 194107 - protein, 7 aa, synthetic construct
RDNPKTS

SEQ ID NO: 194108 - protein, 7 aa, synthetic construct
LPNRDKF

SEQ ID NO: 194109 - protein, 7 aa, synthetic construct
RGNRDMI

SEQ ID NO: 194110 - protein, 7 aa, synthetic construct
RSPRDPS

SEQ ID NO: 194111 - protein, 7 aa, synthetic construct
EPNRVRS

SEQ ID NO: 194112 - protein, 7 aa, synthetic construct
RTFKDTS

SEQ ID NO: 194113 - protein, 7 aa, synthetic construct
RPVRDTY

SEQ ID NO: 194114 - protein, 7 aa, synthetic construct
KPGRDQS

SEQ ID NO: 194115 - protein, 7 aa, synthetic construct
RPIRELS

SEQ ID NO: 194116 - protein, 7 aa, synthetic construct
RPNRENT

SEQ ID NO: 194117 - protein, 7 aa, synthetic construct
RSNKDTM

SEQ ID NO: 194118 - protein, 7 aa, synthetic construct
RMQRDTG

SEQ ID NO: 194119 - protein, 7 aa, synthetic construct
RPARLES

SEQ ID NO: 194120 - protein, 7 aa, synthetic construct
RTNRDLG

SEQ ID NO: 194121 - protein, 7 aa, synthetic construct
RPQRIES

SEQ ID NO: 194122 - protein, 7 aa, synthetic construct
RPMRVTE

SEQ ID NO: 194123 - protein, 7 aa, synthetic construct
RPNREPN

SEQ ID NO: 194124 - protein, 7 aa, synthetic construct
KNSRDTS

SEQ ID NO: 194125 - protein, 7 aa, synthetic construct
FPKRDSS

SEQ ID NO: 194126 - protein, 7 aa, synthetic construct
VGNRDTR

SEQ ID NO: 194127 - protein, 7 aa, synthetic construct
RPIRDQS

SEQ ID NO: 194128 - protein, 7 aa, synthetic construct
KFNRDTS

SEQ ID NO: 194129 - protein, 7 aa, synthetic construct
RPQRDPF

SEQ ID NO: 194130 - protein, 7 aa, synthetic construct
KANRDLS

SEQ ID NO: 194131 - protein, 7 aa, synthetic construct
KPNRDIM

SEQ ID NO: 194132 - protein, 7 aa, synthetic construct
QVNRDTK

SEQ ID NO: 194133 - protein, 7 aa, synthetic construct
REVRSTS

SEQ ID NO: 194134 - protein, 7 aa, synthetic construct
RMSRDTG

SEQ ID NO: 194135 - protein, 7 aa, synthetic construct
RPQRDTS

SEQ ID NO: 194136 - protein, 7 aa, synthetic construct
KGVRDTS

SEQ ID NO: 194137 - protein, 7 aa, synthetic construct
RDTRGTS

SEQ ID NO: 194138 - protein, 7 aa, synthetic construct
RPSRDNV

SEQ ID NO: 194139 - protein, 7 aa, synthetic construct
RPVRMDS

SEQ ID NO: 194140 - protein, 7 aa, synthetic construct
IAKRDTS

SEQ ID NO: 194141 - protein, 7 aa, synthetic construct
RPERDLR

SEQ ID NO: 194142 - protein, 7 aa, synthetic construct
APKRDYS

SEQ ID NO: 194143 - protein, 7 aa, synthetic construct
RQNRETT

SEQ ID NO: 194144 - protein, 7 aa, synthetic construct
KPARDTH

SEQ ID NO: 194145 - protein, 7 aa, synthetic construct
NKSRDTS

SEQ ID NO: 194146 - protein, 7 aa, synthetic construct
LPNRDKH

SEQ ID NO: 194147 - protein, 7 aa, synthetic construct
KPTRDQS

SEQ ID NO: 194148 - protein, 7 aa, synthetic construct
RPERLIS

SEQ ID NO: 194149 - protein, 7 aa, synthetic construct
RPNRTDG

SEQ ID NO: 194150 - protein, 7 aa, synthetic construct
RSGRETS

SEQ ID NO: 194151 - protein, 7 aa, synthetic construct
RPSRDIV

SEQ ID NO: 194152 - protein, 7 aa, synthetic construct
YPNKDRS

SEQ ID NO: 194153 - protein, 7 aa, synthetic construct
RTNRDTI

SEQ ID NO: 194154 - protein, 7 aa, synthetic construct
KPNRDYL

SEQ ID NO: 194155 - protein, 7 aa, synthetic construct
RPLRDNS

SEQ ID NO: 194156 - protein, 7 aa, synthetic construct
RPNRQEL

SEQ ID NO: 194157 - protein, 7 aa, synthetic construct
RTQRDTV

SEQ ID NO: 194158 - protein, 7 aa, synthetic construct
RPERITM

SEQ ID NO: 194159 - protein, 7 aa, synthetic construct
RPHISTS

SEQ ID NO: 194160 - protein, 7 aa, synthetic construct
KPNKDHS

SEQ ID NO: 194161 - protein, 7 aa, synthetic construct
RFGKDTS

SEQ ID NO: 194162 - protein, 7 aa, synthetic construct
HPVRDRS

SEQ ID NO: 194163 - protein, 7 aa, synthetic construct
RPNRTEG

SEQ ID NO: 194164 - protein, 7 aa, synthetic construct
RPQRDVA

SEQ ID NO: 194165 - protein, 7 aa, synthetic construct
KPNRDFA

SEQ ID NO: 194166 - protein, 7 aa, synthetic construct
RPSRDQM

SEQ ID NO: 194167 - protein, 7 aa, synthetic construct
RTVRETS

SEQ ID NO: 194168 - protein, 7 aa, synthetic construct
RPPRDVQ

SEQ ID NO: 194169 - protein, 7 aa, synthetic construct
RQMKDTS

SEQ ID NO: 194170 - protein, 7 aa, synthetic construct
RPNRLVE

SEQ ID NO: 194171 - protein, 7 aa, synthetic construct
KPQRDTY

SEQ ID NO: 194172 - protein, 7 aa, synthetic construct
RPSRQDS

SEQ ID NO: 194173 - protein, 7 aa, synthetic construct
RDKRDPS

SEQ ID NO: 194174 - protein, 7 aa, synthetic construct
RSTRDNS

SEQ ID NO: 194175 - protein, 7 aa, synthetic construct
VPNRDRQ

SEQ ID NO: 194176 - protein, 7 aa, synthetic construct
LMNRDTK

SEQ ID NO: 194177 - protein, 7 aa, synthetic construct
RPNREVY

SEQ ID NO: 194178 - protein, 7 aa, synthetic construct
FSKRDTS

SEQ ID NO: 194179 - protein, 7 aa, synthetic construct
QKNRDGS

SEQ ID NO: 194180 - protein, 7 aa, synthetic construct
RPTRMTE

SEQ ID NO: 194181 - protein, 7 aa, synthetic construct
RPRQDGS

SEQ ID NO: 194182 - protein, 7 aa, synthetic construct
KTMRDTS

SEQ ID NO: 194183 - protein, 7 aa, synthetic construct
RQNRITE

SEQ ID NO: 194184 - protein, 7 aa, synthetic construct
RKIIDTS

SEQ ID NO: 194185 - protein, 7 aa, synthetic construct
RINRETG

SEQ ID NO: 194186 - protein, 7 aa, synthetic construct
RPRTDTI

SEQ ID NO: 194187 - protein, 7 aa, synthetic construct
RTNREQS

SEQ ID NO: 194188 - protein, 7 aa, synthetic construct
RPNREPA

SEQ ID NO: 194189 - protein, 7 aa, synthetic construct
QKMRDTS

SEQ ID NO: 194190 - protein, 7 aa, synthetic construct
QKNRDTS

SEQ ID NO: 194191 - protein, 7 aa, synthetic construct
FKTRDTS

SEQ ID NO: 194192 - protein, 7 aa, synthetic construct
RPQRDAF

SEQ ID NO: 194193 - protein, 7 aa, synthetic construct
RGNRDNI

SEQ ID NO: 194194 - protein, 7 aa, synthetic construct
RPTRDNL

SEQ ID NO: 194195 - protein, 7 aa, synthetic construct
RATRDQS

SEQ ID NO: 194196 - protein, 7 aa, synthetic construct
RGNRDTG

SEQ ID NO: 194197 - protein, 7 aa, synthetic construct
RLNRDVA

SEQ ID NO: 194198 - protein, 7 aa, synthetic construct
VPKRDTQ

SEQ ID NO: 194199 - protein, 7 aa, synthetic construct
RPDRASS

SEQ ID NO: 194200 - protein, 7 aa, synthetic construct
YANRDKS

SEQ ID NO: 194201 - protein, 7 aa, synthetic construct
QPKRDTQ

SEQ ID NO: 194202 - protein, 7 aa, synthetic construct
IPNRDRM

SEQ ID NO: 194203 - protein, 7 aa, synthetic construct
IPMRDKS

SEQ ID NO: 194204 - protein, 7 aa, synthetic construct
RPNREVV

SEQ ID NO: 194205 - protein, 7 aa, synthetic construct
RPNRPEV

SEQ ID NO: 194206 - protein, 7 aa, synthetic construct
RTNREMS

SEQ ID NO: 194207 - protein, 7 aa, synthetic construct
RAGRDVS

SEQ ID NO: 194208 - protein, 7 aa, synthetic construct
RGPRDTQ

SEQ ID NO: 194209 - protein, 7 aa, synthetic construct
MPTRHTS

SEQ ID NO: 194210 - protein, 7 aa, synthetic construct
RVTRDTP

SEQ ID NO: 194211 - protein, 7 aa, synthetic construct
RGNKDAS

SEQ ID NO: 194212 - protein, 7 aa, synthetic construct
RVQRDPS

SEQ ID NO: 194213 - protein, 7 aa, synthetic construct
RAVRDTM

SEQ ID NO: 194214 - protein, 7 aa, synthetic construct
RMQRETS

SEQ ID NO: 194215 - protein, 7 aa, synthetic construct
RQGRDTP

SEQ ID NO: 194216 - protein, 7 aa, synthetic construct
RANRETT

SEQ ID NO: 194217 - protein, 7 aa, synthetic construct
RPYKDTV

SEQ ID NO: 194218 - protein, 7 aa, synthetic construct
HPNRPSS

SEQ ID NO: 194219 - protein, 7 aa, synthetic construct
RPQRGTE

SEQ ID NO: 194220 - protein, 7 aa, synthetic construct
RDGRATS

SEQ ID NO: 194221 - protein, 7 aa, synthetic construct
KPSRDSS

SEQ ID NO: 194222 - protein, 7 aa, synthetic construct
RIERLTS

SEQ ID NO: 194223 - protein, 7 aa, synthetic construct
RQKNDTS

SEQ ID NO: 194224 - protein, 7 aa, synthetic construct
RAGRDTI

SEQ ID NO: 194225 - protein, 7 aa, synthetic construct
KPTRDMS

SEQ ID NO: 194226 - protein, 7 aa, synthetic construct
RTNRDVA

SEQ ID NO: 194227 - protein, 7 aa, synthetic construct
VPKRDHS

SEQ ID NO: 194228 - protein, 7 aa, synthetic construct
KNNRDSS

SEQ ID NO: 194229 - protein, 7 aa, synthetic construct
RKQMDTS

SEQ ID NO: 194230 - protein, 7 aa, synthetic construct
KPNRDML

SEQ ID NO: 194231 - protein, 7 aa, synthetic construct
RPNKIDS

SEQ ID NO: 194232 - protein, 7 aa, synthetic construct
TLNRHTS

SEQ ID NO: 194233 - protein, 7 aa, synthetic construct
RDNRHTG

SEQ ID NO: 194234 - protein, 7 aa, synthetic construct
RQNKDAS

SEQ ID NO: 194235 - protein, 7 aa, synthetic construct
RATRETS

SEQ ID NO: 194236 - protein, 7 aa, synthetic construct
RPTRDMN

SEQ ID NO: 194237 - protein, 7 aa, synthetic construct
MTNRDRS

SEQ ID NO: 194238 - protein, 7 aa, synthetic construct
RPNREPI

SEQ ID NO: 194239 - protein, 7 aa, synthetic construct
RVTRDTI

SEQ ID NO: 194240 - protein, 7 aa, synthetic construct
LPHRTTS

SEQ ID NO: 194241 - protein, 7 aa, synthetic construct
LANRDTR

SEQ ID NO: 194242 - protein, 7 aa, synthetic construct
RPRTETS

SEQ ID NO: 194243 - protein, 7 aa, synthetic construct
RPQRDQL

SEQ ID NO: 194244 - protein, 7 aa, synthetic construct
KPIRDTQ

SEQ ID NO: 194245 - protein, 7 aa, synthetic construct
RTTRDTI

SEQ ID NO: 194246 - protein, 7 aa, synthetic construct
RPTRTDS

SEQ ID NO: 194247 - protein, 7 aa, synthetic construct
RPHLSTS

SEQ ID NO: 194248 - protein, 7 aa, synthetic construct
RTTRDGS

SEQ ID NO: 194249 - protein, 7 aa, synthetic construct
RPFKDTQ

SEQ ID NO: 194250 - protein, 7 aa, synthetic construct
REVRDKS

SEQ ID NO: 194251 - protein, 7 aa, synthetic construct
KNNRDQS

SEQ ID NO: 194252 - protein, 7 aa, synthetic construct
RTERHTS

SEQ ID NO: 194253 - protein, 7 aa, synthetic construct
NPNRDRG

SEQ ID NO: 194254 - protein, 7 aa, synthetic construct
KMNRDVS

SEQ ID NO: 194255 - protein, 7 aa, synthetic construct
MPNRDRQ

SEQ ID NO: 194256 - protein, 7 aa, synthetic construct
RSNVDTR

SEQ ID NO: 194257 - protein, 7 aa, synthetic construct
RQNRDNV

SEQ ID NO: 194258 - protein, 7 aa, synthetic construct
RPNTRES

SEQ ID NO: 194259 - protein, 7 aa, synthetic construct
KPFRDAS

SEQ ID NO: 194260 - protein, 7 aa, synthetic construct
RQKADTS

SEQ ID NO: 194261 - protein, 7 aa, synthetic construct
IHNRPTS

SEQ ID NO: 194262 - protein, 7 aa, synthetic construct
RPNRIDV

SEQ ID NO: 194263 - protein, 7 aa, synthetic construct
RPQRPTE

SEQ ID NO: 194264 - protein, 7 aa, synthetic construct
RRQPDTS

SEQ ID NO: 194265 - protein, 7 aa, synthetic construct
MTNRDTR

SEQ ID NO: 194266 - protein, 7 aa, synthetic construct
FKQRDTS

SEQ ID NO: 194267 - protein, 7 aa, synthetic construct
RKERDVS

SEQ ID NO: 194268 - protein, 7 aa, synthetic construct
RTMRDTI

SEQ ID NO: 194269 - protein, 7 aa, synthetic construct
RVNRDNI

SEQ ID NO: 194270 - protein, 7 aa, synthetic construct
HPNKDRS

SEQ ID NO: 194271 - protein, 7 aa, synthetic construct
ALNRDKS

SEQ ID NO: 194272 - protein, 7 aa, synthetic construct
RPVRETY

SEQ ID NO: 194273 - protein, 7 aa, synthetic construct
KPNRFES

SEQ ID NO: 194274 - protein, 7 aa, synthetic construct
RPRVDTI

SEQ ID NO: 194275 - protein, 7 aa, synthetic construct
RPTRLTE

SEQ ID NO: 194276 - protein, 7 aa, synthetic construct
RGERTTS

SEQ ID NO: 194277 - protein, 7 aa, synthetic construct
VKSRDTS

SEQ ID NO: 194278 - protein, 7 aa, synthetic construct
HPNRTTN

SEQ ID NO: 194279 - protein, 7 aa, synthetic construct
RMARDTG

SEQ ID NO: 194280 - protein, 7 aa, synthetic construct
RPAHSTS

SEQ ID NO: 194281 - protein, 7 aa, synthetic construct
RPSRDVN

SEQ ID NO: 194282 - protein, 7 aa, synthetic construct
RDARQTS

SEQ ID NO: 194283 - protein, 7 aa, synthetic construct
RPVRITE

SEQ ID NO: 194284 - protein, 7 aa, synthetic construct
RNTRDTG

SEQ ID NO: 194285 - protein, 7 aa, synthetic construct
DKKRDTS

SEQ ID NO: 194286 - protein, 7 aa, synthetic construct
VPKRDAS

SEQ ID NO: 194287 - protein, 7 aa, synthetic construct
RTARDTS

SEQ ID NO: 194288 - protein, 7 aa, synthetic construct
RPNREQL

SEQ ID NO: 194289 - protein, 7 aa, synthetic construct
RPGRDPA

SEQ ID NO: 194290 - protein, 7 aa, synthetic construct
KGIRDTS

SEQ ID NO: 194291 - protein, 7 aa, synthetic construct
RMNRETS

SEQ ID NO: 194292 - protein, 7 aa, synthetic construct
RQNRDSI

SEQ ID NO: 194293 - protein, 7 aa, synthetic construct
RTNRDNI

SEQ ID NO: 194294 - protein, 7 aa, synthetic construct
QPSRHTS

SEQ ID NO: 194295 - protein, 7 aa, synthetic construct
FPKRDAS

SEQ ID NO: 194296 - protein, 7 aa, synthetic construct
KPNRADS

SEQ ID NO: 194297 - protein, 7 aa, synthetic construct
IGNRDTR

SEQ ID NO: 194298 - protein, 7 aa, synthetic construct
RPNLRDS

SEQ ID NO: 194299 - protein, 7 aa, synthetic construct
FTNRDKS

SEQ ID NO: 194300 - protein, 7 aa, synthetic construct
RVSRETS

SEQ ID NO: 194301 - protein, 7 aa, synthetic construct
RTPRETS

SEQ ID NO: 194302 - protein, 7 aa, synthetic construct
RPRDATS

SEQ ID NO: 194303 - protein, 7 aa, synthetic construct
RNLRDTV

SEQ ID NO: 194304 - protein, 7 aa, synthetic construct
RPNKDPF

SEQ ID NO: 194305 - protein, 7 aa, synthetic construct
RMNRETT

SEQ ID NO: 194306 - protein, 7 aa, synthetic construct
NRPRDTS

SEQ ID NO: 194307 - protein, 7 aa, synthetic construct
KPNRDQF

SEQ ID NO: 194308 - protein, 7 aa, synthetic construct
RPNPHTQ

SEQ ID NO: 194309 - protein, 7 aa, synthetic construct
SKFRDTS

SEQ ID NO: 194310 - protein, 7 aa, synthetic construct
KPNRDVT

SEQ ID NO: 194311 - protein, 7 aa, synthetic construct
RVQRDTM

SEQ ID NO: 194312 - protein, 7 aa, synthetic construct
APRRDVS

SEQ ID NO: 194313 - protein, 7 aa, synthetic construct
RLNQDTR

SEQ ID NO: 194314 - protein, 7 aa, synthetic construct
RGKLDTS

SEQ ID NO: 194315 - protein, 7 aa, synthetic construct
RPNRVGD

SEQ ID NO: 194316 - protein, 7 aa, synthetic construct
KPNRDSM

SEQ ID NO: 194317 - protein, 7 aa, synthetic construct
VRNRDTV

SEQ ID NO: 194318 - protein, 7 aa, synthetic construct
RPARDAY

SEQ ID NO: 194319 - protein, 7 aa, synthetic construct
MTNRDTK

SEQ ID NO: 194320 - protein, 7 aa, synthetic construct
DKNRSTS

SEQ ID NO: 194321 - protein, 7 aa, synthetic construct
RPVRETL

SEQ ID NO: 194322 - protein, 7 aa, synthetic construct
RPETRTS

SEQ ID NO: 194323 - protein, 7 aa, synthetic construct
RPGRDVF

SEQ ID NO: 194324 - protein, 7 aa, synthetic construct
RQNRDAI

SEQ ID NO: 194325 - protein, 7 aa, synthetic construct
RPHKDAS

SEQ ID NO: 194326 - protein, 7 aa, synthetic construct
RTGRDTV

SEQ ID NO: 194327 - protein, 7 aa, synthetic construct
RPARDQV

SEQ ID NO: 194328 - protein, 7 aa, synthetic construct
RPNKVTD

SEQ ID NO: 194329 - protein, 7 aa, synthetic construct
RANRDLA

SEQ ID NO: 194330 - protein, 7 aa, synthetic construct
RPRQDTG

SEQ ID NO: 194331 - protein, 7 aa, synthetic construct
RPERPSS

SEQ ID NO: 194332 - protein, 7 aa, synthetic construct
RSNRDTG

SEQ ID NO: 194333 - protein, 7 aa, synthetic construct
DLNRRTS

SEQ ID NO: 194334 - protein, 7 aa, synthetic construct
RPNRETT

SEQ ID NO: 194335 - protein, 7 aa, synthetic construct
APKRDSS

SEQ ID NO: 194336 - protein, 7 aa, synthetic construct
RPDRSAS

SEQ ID NO: 194337 - protein, 7 aa, synthetic construct
KPNRDTM

SEQ ID NO: 194338 - protein, 7 aa, synthetic construct
RPQREPS

SEQ ID NO: 194339 - protein, 7 aa, synthetic construct
KDNRHTS

SEQ ID NO: 194340 - protein, 7 aa, synthetic construct
VLNRDRS

SEQ ID NO: 194341 - protein, 7 aa, synthetic construct
MKNRDVS

SEQ ID NO: 194342 - protein, 7 aa, synthetic construct
RPREHTS

SEQ ID NO: 194343 - protein, 7 aa, synthetic construct
RPQRNDS

SEQ ID NO: 194344 - protein, 7 aa, synthetic construct
MPRRETS

SEQ ID NO: 194345 - protein, 7 aa, synthetic construct
RIPRDTL

SEQ ID NO: 194346 - protein, 7 aa, synthetic construct
RPTRDQQ

SEQ ID NO: 194347 - protein, 7 aa, synthetic construct
RINREIS

SEQ ID NO: 194348 - protein, 7 aa, synthetic construct
RPERLNS

SEQ ID NO: 194349 - protein, 7 aa, synthetic construct
RQNRDQG

SEQ ID NO: 194350 - protein, 7 aa, synthetic construct
RTVRDMS

SEQ ID NO: 194351 - protein, 7 aa, synthetic construct
RVNRETM

SEQ ID NO: 194352 - protein, 7 aa, synthetic construct
RPNREQT

SEQ ID NO: 194353 - protein, 7 aa, synthetic construct
RPLRDAV

SEQ ID NO: 194354 - protein, 7 aa, synthetic construct
RPPRDAY

SEQ ID NO: 194355 - protein, 7 aa, synthetic construct
RPSRDTL

SEQ ID NO: 194356 - protein, 7 aa, synthetic construct
DPNRVRS

SEQ ID NO: 194357 - protein, 7 aa, synthetic construct
RANRETL

SEQ ID NO: 194358 - protein, 7 aa, synthetic construct
RPRGDTI

SEQ ID NO: 194359 - protein, 7 aa, synthetic construct
LPNRHTQ

SEQ ID NO: 194360 - protein, 7 aa, synthetic construct
RTNVDTR

SEQ ID NO: 194361 - protein, 7 aa, synthetic construct
NKNRDTL

SEQ ID NO: 194362 - protein, 7 aa, synthetic construct
RQNRDVI

SEQ ID NO: 194363 - protein, 7 aa, synthetic construct
RDTRDKS

SEQ ID NO: 194364 - protein, 7 aa, synthetic construct
RPVRDVS

SEQ ID NO: 194365 - protein, 7 aa, synthetic construct
VPNRDKY

SEQ ID NO: 194366 - protein, 7 aa, synthetic construct
RHNVVTS

SEQ ID NO: 194367 - protein, 7 aa, synthetic construct
RPNRSGE

SEQ ID NO: 194368 - protein, 7 aa, synthetic construct
RPVRDAM

SEQ ID NO: 194369 - protein, 7 aa, synthetic construct
RKSNDTS

SEQ ID NO: 194370 - protein, 7 aa, synthetic construct
NPKRDTT

SEQ ID NO: 194371 - protein, 7 aa, synthetic construct
RPQRDLN

SEQ ID NO: 194372 - protein, 7 aa, synthetic construct
RPLHSTS

SEQ ID NO: 194373 - protein, 7 aa, synthetic construct
RQVRDSS

SEQ ID NO: 194374 - protein, 7 aa, synthetic construct
RQPRDIS

SEQ ID NO: 194375 - protein, 7 aa, synthetic construct
PPKRDNS

SEQ ID NO: 194376 - protein, 7 aa, synthetic construct
RPNRMDS

SEQ ID NO: 194377 - protein, 7 aa, synthetic construct
IKFRDTS

SEQ ID NO: 194378 - protein, 7 aa, synthetic construct
RPKHDNS

SEQ ID NO: 194379 - protein, 7 aa, synthetic construct
RPNRDVL

SEQ ID NO: 194380 - protein, 7 aa, synthetic construct
RPRMDTS

SEQ ID NO: 194381 - protein, 7 aa, synthetic construct
RDKRDTS

SEQ ID NO: 194382 - protein, 7 aa, synthetic construct
RPARDNL

SEQ ID NO: 194383 - protein, 7 aa, synthetic construct
RPVRDLS

SEQ ID NO: 194384 - protein, 7 aa, synthetic construct
KNNRDIS

SEQ ID NO: 194385 - protein, 7 aa, synthetic construct
RDPRHTS

SEQ ID NO: 194386 - protein, 7 aa, synthetic construct
MPRRDQS

SEQ ID NO: 194387 - protein, 7 aa, synthetic construct
RPSREVS

SEQ ID NO: 194388 - protein, 7 aa, synthetic construct
KINRDNS

SEQ ID NO: 194389 - protein, 7 aa, synthetic construct
RPNRDLM

SEQ ID NO: 194390 - protein, 7 aa, synthetic construct
KPMRDTL

SEQ ID NO: 194391 - protein, 7 aa, synthetic construct
KPIRDTT

SEQ ID NO: 194392 - protein, 7 aa, synthetic construct
RTGRDTG

SEQ ID NO: 194393 - protein, 7 aa, synthetic construct
RPGRDLQ

SEQ ID NO: 194394 - protein, 7 aa, synthetic construct
RVNRDTS

SEQ ID NO: 194395 - protein, 7 aa, synthetic construct
KPTRDTL

SEQ ID NO: 194396 - protein, 7 aa, synthetic construct
RPERSTL

SEQ ID NO: 194397 - protein, 7 aa, synthetic construct
RPNRETL

SEQ ID NO: 194398 - protein, 7 aa, synthetic construct
KPNRVTE

SEQ ID NO: 194399 - protein, 7 aa, synthetic construct
RPPRDNQ

SEQ ID NO: 194400 - protein, 7 aa, synthetic construct
APKRDVS

SEQ ID NO: 194401 - protein, 7 aa, synthetic construct
MGNRDTK

SEQ ID NO: 194402 - protein, 7 aa, synthetic construct
AKNRDTY

SEQ ID NO: 194403 - protein, 7 aa, synthetic construct
RSNRDIV

SEQ ID NO: 194404 - protein, 7 aa, synthetic construct
REGRMTS

SEQ ID NO: 194405 - protein, 7 aa, synthetic construct
RPIREAS

SEQ ID NO: 194406 - protein, 7 aa, synthetic construct
FQKRDTS

SEQ ID NO: 194407 - protein, 7 aa, synthetic construct
YPMRDKS

SEQ ID NO: 194408 - protein, 7 aa, synthetic construct
MPKRDSS

SEQ ID NO: 194409 - protein, 7 aa, synthetic construct
APHRVTS

SEQ ID NO: 194410 - protein, 7 aa, synthetic construct
RGTRDTA

SEQ ID NO: 194411 - protein, 7 aa, synthetic construct
IMNRDKS

SEQ ID NO: 194412 - protein, 7 aa, synthetic construct
QKIRDTS

SEQ ID NO: 194413 - protein, 7 aa, synthetic construct
MPRRDAS

SEQ ID NO: 194414 - protein, 7 aa, synthetic construct
RMERNTS

SEQ ID NO: 194415 - protein, 7 aa, synthetic construct
RPQRDML

SEQ ID NO: 194416 - protein, 7 aa, synthetic construct
RQTRDAS

SEQ ID NO: 194417 - protein, 7 aa, synthetic construct
IPTRHTS

SEQ ID NO: 194418 - protein, 7 aa, synthetic construct
VSKRDTS

SEQ ID NO: 194419 - protein, 7 aa, synthetic construct
RSKLDTS

SEQ ID NO: 194420 - protein, 7 aa, synthetic construct
TGKRDTS

SEQ ID NO: 194421 - protein, 7 aa, synthetic construct
RQNRETG

SEQ ID NO: 194422 - protein, 7 aa, synthetic construct
RTQRDTM

SEQ ID NO: 194423 - protein, 7 aa, synthetic construct
RPNQDAR

SEQ ID NO: 194424 - protein, 7 aa, synthetic construct
RPNKPDS

SEQ ID NO: 194425 - protein, 7 aa, synthetic construct
RPTRDMI

SEQ ID NO: 194426 - protein, 7 aa, synthetic construct
QPHRPTS

SEQ ID NO: 194427 - protein, 7 aa, synthetic construct
RQNRDLS

SEQ ID NO: 194428 - protein, 7 aa, synthetic construct
RPERSQS

SEQ ID NO: 194429 - protein, 7 aa, synthetic construct
RTDRSTS

SEQ ID NO: 194430 - protein, 7 aa, synthetic construct
RPSHQTS

SEQ ID NO: 194431 - protein, 7 aa, synthetic construct
KPNRDVL

SEQ ID NO: 194432 - protein, 7 aa, synthetic construct
RPNRLPE

SEQ ID NO: 194433 - protein, 7 aa, synthetic construct
YPKRDIS

SEQ ID NO: 194434 - protein, 7 aa, synthetic construct
RPHQTTS

SEQ ID NO: 194435 - protein, 7 aa, synthetic construct
VKFRDTS

SEQ ID NO: 194436 - protein, 7 aa, synthetic construct
RQARDVS

SEQ ID NO: 194437 - protein, 7 aa, synthetic construct
RPVREQS

SEQ ID NO: 194438 - protein, 7 aa, synthetic construct
TPHRTTS

SEQ ID NO: 194439 - protein, 7 aa, synthetic construct
PKARDTS

SEQ ID NO: 194440 - protein, 7 aa, synthetic construct
KPRNDTS

SEQ ID NO: 194441 - protein, 7 aa, synthetic construct
RPLRDNI

SEQ ID NO: 194442 - protein, 7 aa, synthetic construct
RPDRVTT

SEQ ID NO: 194443 - protein, 7 aa, synthetic construct
RQNRDII

SEQ ID NO: 194444 - protein, 7 aa, synthetic construct
LPKRDTH

SEQ ID NO: 194445 - protein, 7 aa, synthetic construct
RIDRMTS

SEQ ID NO: 194446 - protein, 7 aa, synthetic construct
RPNRVDM

SEQ ID NO: 194447 - protein, 7 aa, synthetic construct
LKARDTS

SEQ ID NO: 194448 - protein, 7 aa, synthetic construct
RLNADTR

SEQ ID NO: 194449 - protein, 7 aa, synthetic construct
IPKRDTL

SEQ ID NO: 194450 - protein, 7 aa, synthetic construct
RPAHNTS

SEQ ID NO: 194451 - protein, 7 aa, synthetic construct
IPNRHTQ

SEQ ID NO: 194452 - protein, 7 aa, synthetic construct
RPTRETA

SEQ ID NO: 194453 - protein, 7 aa, synthetic construct
RPPRDHS

SEQ ID NO: 194454 - protein, 7 aa, synthetic construct
KAPRDTS

SEQ ID NO: 194455 - protein, 7 aa, synthetic construct
FPNRDSK

SEQ ID NO: 194456 - protein, 7 aa, synthetic construct
LPRRDTA

SEQ ID NO: 194457 - protein, 7 aa, synthetic construct
LMNRDKS

SEQ ID NO: 194458 - protein, 7 aa, synthetic construct
KPNRPTE

SEQ ID NO: 194459 - protein, 7 aa, synthetic construct
RKERDTI

SEQ ID NO: 194460 - protein, 7 aa, synthetic construct
NPNRDRT

SEQ ID NO: 194461 - protein, 7 aa, synthetic construct
RASRDNS

SEQ ID NO: 194462 - protein, 7 aa, synthetic construct
RPVRDIN

SEQ ID NO: 194463 - protein, 7 aa, synthetic construct
RNVRDTI

SEQ ID NO: 194464 - protein, 7 aa, synthetic construct
KPTRDTQ

SEQ ID NO: 194465 - protein, 7 aa, synthetic construct
RTNRETI

SEQ ID NO: 194466 - protein, 7 aa, synthetic construct
KPNYTTS

SEQ ID NO: 194467 - protein, 7 aa, synthetic construct
RATRDTT

SEQ ID NO: 194468 - protein, 7 aa, synthetic construct
RINRTTE

SEQ ID NO: 194469 - protein, 7 aa, synthetic construct
RTNRDVT

SEQ ID NO: 194470 - protein, 7 aa, synthetic construct
KPNRDFL

SEQ ID NO: 194471 - protein, 7 aa, synthetic construct
RVQRDQS

SEQ ID NO: 194472 - protein, 7 aa, synthetic construct
QPNRDRN

SEQ ID NO: 194473 - protein, 7 aa, synthetic construct
RGARDTG

SEQ ID NO: 194474 - protein, 7 aa, synthetic construct
VNKRDTS

SEQ ID NO: 194475 - protein, 7 aa, synthetic construct
RPRTDGS

SEQ ID NO: 194476 - protein, 7 aa, synthetic construct
KPIRDTM

SEQ ID NO: 194477 - protein, 7 aa, synthetic construct
MRNRDVS

SEQ ID NO: 194478 - protein, 7 aa, synthetic construct
RPIRTDS

SEQ ID NO: 194479 - protein, 7 aa, synthetic construct
NPGRDKS

SEQ ID NO: 194480 - protein, 7 aa, synthetic construct
RPNKDAY

SEQ ID NO: 194481 - protein, 7 aa, synthetic construct
LKNRDIS

SEQ ID NO: 194482 - protein, 7 aa, synthetic construct
RQSRDTT

SEQ ID NO: 194483 - protein, 7 aa, synthetic construct
VPRRDTI

SEQ ID NO: 194484 - protein, 7 aa, synthetic construct
DPNRNKS

SEQ ID NO: 194485 - protein, 7 aa, synthetic construct
REARNTS

SEQ ID NO: 194486 - protein, 7 aa, synthetic construct
AKNRDLS

SEQ ID NO: 194487 - protein, 7 aa, synthetic construct
RGVRDTV

SEQ ID NO: 194488 - protein, 7 aa, synthetic construct
KQNRDTL

SEQ ID NO: 194489 - protein, 7 aa, synthetic construct
RLERMTS

SEQ ID NO: 194490 - protein, 7 aa, synthetic construct
KPNRDQT

SEQ ID NO: 194491 - protein, 7 aa, synthetic construct
RKDRDTN

SEQ ID NO: 194492 - protein, 7 aa, synthetic construct
RPARDQF

SEQ ID NO: 194493 - protein, 7 aa, synthetic construct
RQNRTDS

SEQ ID NO: 194494 - protein, 7 aa, synthetic construct
LANRDTK

SEQ ID NO: 194495 - protein, 7 aa, synthetic construct
LKNRDMS

SEQ ID NO: 194496 - protein, 7 aa, synthetic construct
NPNRDKM

SEQ ID NO: 194497 - protein, 7 aa, synthetic construct
RSTRDTA

SEQ ID NO: 194498 - protein, 7 aa, synthetic construct
RTPRDPS

SEQ ID NO: 194499 - protein, 7 aa, synthetic construct
YPNRERS

SEQ ID NO: 194500 - protein, 7 aa, synthetic construct
RNSRETS

SEQ ID NO: 194501 - protein, 7 aa, synthetic construct
RPTKDTF

SEQ ID NO: 194502 - protein, 7 aa, synthetic construct
RPRSDTT

SEQ ID NO: 194503 - protein, 7 aa, synthetic construct
RPVRDSS

SEQ ID NO: 194504 - protein, 7 aa, synthetic construct
KPNRDQA

SEQ ID NO: 194505 - protein, 7 aa, synthetic construct
RSARDVS

SEQ ID NO: 194506 - protein, 7 aa, synthetic construct
RTERATS

SEQ ID NO: 194507 - protein, 7 aa, synthetic construct
TPGRHTS

SEQ ID NO: 194508 - protein, 7 aa, synthetic construct
KPQRDTF

SEQ ID NO: 194509 - protein, 7 aa, synthetic construct
APRRDTI

SEQ ID NO: 194510 - protein, 7 aa, synthetic construct
RPSKDTH

SEQ ID NO: 194511 - protein, 7 aa, synthetic construct
RDGRSTS

SEQ ID NO: 194512 - protein, 7 aa, synthetic construct
GSNRDKS

SEQ ID NO: 194513 - protein, 7 aa, synthetic construct
RINRDAV

SEQ ID NO: 194514 - protein, 7 aa, synthetic construct
RSSKDTS

SEQ ID NO: 194515 - protein, 7 aa, synthetic construct
RPDRAYS

SEQ ID NO: 194516 - protein, 7 aa, synthetic construct
KPQRDTH

SEQ ID NO: 194517 - protein, 7 aa, synthetic construct
RQNKDYS

SEQ ID NO: 194518 - protein, 7 aa, synthetic construct
KSNRETS

SEQ ID NO: 194519 - protein, 7 aa, synthetic construct
KPQRDTQ

SEQ ID NO: 194520 - protein, 7 aa, synthetic construct
RPSRDMV

SEQ ID NO: 194521 - protein, 7 aa, synthetic construct
RSFKDTS

SEQ ID NO: 194522 - protein, 7 aa, synthetic construct
RGSRETS

SEQ ID NO: 194523 - protein, 7 aa, synthetic construct
IPRRDTI

SEQ ID NO: 194524 - protein, 7 aa, synthetic construct
RVSRDQS

SEQ ID NO: 194525 - protein, 7 aa, synthetic construct
RPDRVSS

SEQ ID NO: 194526 - protein, 7 aa, synthetic construct
RVTRDTT

SEQ ID NO: 194527 - protein, 7 aa, synthetic construct
RMMKDTS

SEQ ID NO: 194528 - protein, 7 aa, synthetic construct
LKNRDTF

SEQ ID NO: 194529 - protein, 7 aa, synthetic construct
YPTRDKS

SEQ ID NO: 194530 - protein, 7 aa, synthetic construct
RNARDTI

SEQ ID NO: 194531 - protein, 7 aa, synthetic construct
RKNDDTR

SEQ ID NO: 194532 - protein, 7 aa, synthetic construct
YKNRDLS

SEQ ID NO: 194533 - protein, 7 aa, synthetic construct
RPSRDNP

SEQ ID NO: 194534 - protein, 7 aa, synthetic construct
RPVRLTE

SEQ ID NO: 194535 - protein, 7 aa, synthetic construct
RVNRDTG

SEQ ID NO: 194536 - protein, 7 aa, synthetic construct
RLNREGS

SEQ ID NO: 194537 - protein, 7 aa, synthetic construct
RSDRHTS

SEQ ID NO: 194538 - protein, 7 aa, synthetic construct
RVLRDTG

SEQ ID NO: 194539 - protein, 7 aa, synthetic construct
RPNRDSA

SEQ ID NO: 194540 - protein, 7 aa, synthetic construct
RPRADVS

SEQ ID NO: 194541 - protein, 7 aa, synthetic construct
IRNRDTP

SEQ ID NO: 194542 - protein, 7 aa, synthetic construct
RLPRDNS

SEQ ID NO: 194543 - protein, 7 aa, synthetic construct
KPNRDVF

SEQ ID NO: 194544 - protein, 7 aa, synthetic construct
KPERHTS

SEQ ID NO: 194545 - protein, 7 aa, synthetic construct
RVARDQS

SEQ ID NO: 194546 - protein, 7 aa, synthetic construct
RPARDVI

SEQ ID NO: 194547 - protein, 7 aa, synthetic construct
RSARDTM

SEQ ID NO: 194548 - protein, 7 aa, synthetic construct
RPSRDNI

SEQ ID NO: 194549 - protein, 7 aa, synthetic construct
RVNRDGV

SEQ ID NO: 194550 - protein, 7 aa, synthetic construct
AKPRDTS

SEQ ID NO: 194551 - protein, 7 aa, synthetic construct
KPLRDIS

SEQ ID NO: 194552 - protein, 7 aa, synthetic construct
GFKRDTS

SEQ ID NO: 194553 - protein, 7 aa, synthetic construct
RTGRDTM

SEQ ID NO: 194554 - protein, 7 aa, synthetic construct
VPKRDTA

SEQ ID NO: 194555 - protein, 7 aa, synthetic construct
RAARDTA

SEQ ID NO: 194556 - protein, 7 aa, synthetic construct
RENKDRS

SEQ ID NO: 194557 - protein, 7 aa, synthetic construct
SLNRDKS

SEQ ID NO: 194558 - protein, 7 aa, synthetic construct
RPQRDNQ

SEQ ID NO: 194559 - protein, 7 aa, synthetic construct
RPARDMQ

SEQ ID NO: 194560 - protein, 7 aa, synthetic construct
IPIRDKS

SEQ ID NO: 194561 - protein, 7 aa, synthetic construct
RPTRDTA

SEQ ID NO: 194562 - protein, 7 aa, synthetic construct
VSNRDTR

SEQ ID NO: 194563 - protein, 7 aa, synthetic construct
VQNRDKS

SEQ ID NO: 194564 - protein, 7 aa, synthetic construct
FPNRDAK

SEQ ID NO: 194565 - protein, 7 aa, synthetic construct
RPVRGES

SEQ ID NO: 194566 - protein, 7 aa, synthetic construct
RSNIDTK

SEQ ID NO: 194567 - protein, 7 aa, synthetic construct
IPRRDTG

SEQ ID NO: 194568 - protein, 7 aa, synthetic construct
RPTRTTE

SEQ ID NO: 194569 - protein, 7 aa, synthetic construct
RDLRTTS

SEQ ID NO: 194570 - protein, 7 aa, synthetic construct
RPNRLDS

SEQ ID NO: 194571 - protein, 7 aa, synthetic construct
ASKRDTS

SEQ ID NO: 194572 - protein, 7 aa, synthetic construct
LKGRDTS

SEQ ID NO: 194573 - protein, 7 aa, synthetic construct
GPHRVTS

SEQ ID NO: 194574 - protein, 7 aa, synthetic construct
RDGRVTS

SEQ ID NO: 194575 - protein, 7 aa, synthetic construct
GKNRDTN

SEQ ID NO: 194576 - protein, 7 aa, synthetic construct
IKSRDTS

SEQ ID NO: 194577 - protein, 7 aa, synthetic construct
RQNRQTE

SEQ ID NO: 194578 - protein, 7 aa, synthetic construct
KSNRDMS

SEQ ID NO: 194579 - protein, 7 aa, synthetic construct
RPQRDPQ

SEQ ID NO: 194580 - protein, 7 aa, synthetic construct
RPPRDHM

SEQ ID NO: 194581 - protein, 7 aa, synthetic construct
KPNRDAQ

SEQ ID NO: 194582 - protein, 7 aa, synthetic construct
KPTRDTG

SEQ ID NO: 194583 - protein, 7 aa, synthetic construct
RLPRDIS

SEQ ID NO: 194584 - protein, 7 aa, synthetic construct
RSNREMS

SEQ ID NO: 194585 - protein, 7 aa, synthetic construct
RPNPYTQ

SEQ ID NO: 194586 - protein, 7 aa, synthetic construct
RVNRDNA

SEQ ID NO: 194587 - protein, 7 aa, synthetic construct
KAARDTS

SEQ ID NO: 194588 - protein, 7 aa, synthetic construct
RTVRDTG

SEQ ID NO: 194589 - protein, 7 aa, synthetic construct
RPRTDTT

SEQ ID NO: 194590 - protein, 7 aa, synthetic construct
RHERTTS

SEQ ID NO: 194591 - protein, 7 aa, synthetic construct
KPVRDTF

SEQ ID NO: 194592 - protein, 7 aa, synthetic construct
RVDRDRS

SEQ ID NO: 194593 - protein, 7 aa, synthetic construct
RPTRDVG

SEQ ID NO: 194594 - protein, 7 aa, synthetic construct
RPQRDVS

SEQ ID NO: 194595 - protein, 7 aa, synthetic construct
RPNRELM

SEQ ID NO: 194596 - protein, 7 aa, synthetic construct
RVNMDTR

SEQ ID NO: 194597 - protein, 7 aa, synthetic construct
RPERVTI

SEQ ID NO: 194598 - protein, 7 aa, synthetic construct
RQNRVES

SEQ ID NO: 194599 - protein, 7 aa, synthetic construct
FIKRDTS

SEQ ID NO: 194600 - protein, 7 aa, synthetic construct
KPQRDMS

SEQ ID NO: 194601 - protein, 7 aa, synthetic construct
AFKRDTS

SEQ ID NO: 194602 - protein, 7 aa, synthetic construct
RPLRDQN

SEQ ID NO: 194603 - protein, 7 aa, synthetic construct
RPTRDMA

SEQ ID NO: 194604 - protein, 7 aa, synthetic construct
RPARDMV

SEQ ID NO: 194605 - protein, 7 aa, synthetic construct
KNNRETS

SEQ ID NO: 194606 - protein, 7 aa, synthetic construct
RQPRDLS

SEQ ID NO: 194607 - protein, 7 aa, synthetic construct
RSNRETN

SEQ ID NO: 194608 - protein, 7 aa, synthetic construct
RPNRGEG

SEQ ID NO: 194609 - protein, 7 aa, synthetic construct
RPNKDDR

SEQ ID NO: 194610 - protein, 7 aa, synthetic construct
KPNRSTE

SEQ ID NO: 194611 - protein, 7 aa, synthetic construct
RMPRDLS

SEQ ID NO: 194612 - protein, 7 aa, synthetic construct
ISNRDTR

SEQ ID NO: 194613 - protein, 7 aa, synthetic construct
AKNRDTN

SEQ ID NO: 194614 - protein, 7 aa, synthetic construct
RLNRDLG

SEQ ID NO: 194615 - protein, 7 aa, synthetic construct
RPRQDNS

SEQ ID NO: 194616 - protein, 7 aa, synthetic construct
RPNRDLV

SEQ ID NO: 194617 - protein, 7 aa, synthetic construct
RPIRDTT

SEQ ID NO: 194618 - protein, 7 aa, synthetic construct
MKNRDQS

SEQ ID NO: 194619 - protein, 7 aa, synthetic construct
RVTRDQS

SEQ ID NO: 194620 - protein, 7 aa, synthetic construct
RPERSTS

SEQ ID NO: 194621 - protein, 7 aa, synthetic construct
RPRADTI

SEQ ID NO: 194622 - protein, 7 aa, synthetic construct
RPIRDTG

SEQ ID NO: 194623 - protein, 7 aa, synthetic construct
AKNRDTF

SEQ ID NO: 194624 - protein, 7 aa, synthetic construct
RQGRDTI

SEQ ID NO: 194625 - protein, 7 aa, synthetic construct
RPRSDLS

SEQ ID NO: 194626 - protein, 7 aa, synthetic construct
RVNRDVP

SEQ ID NO: 194627 - protein, 7 aa, synthetic construct
RPSHGTS

SEQ ID NO: 194628 - protein, 7 aa, synthetic construct
RPNRETQ

SEQ ID NO: 194629 - protein, 7 aa, synthetic construct
RVSRDNS

SEQ ID NO: 194630 - protein, 7 aa, synthetic construct
KLNRDQS

SEQ ID NO: 194631 - protein, 7 aa, synthetic construct
RVNRETS

SEQ ID NO: 194632 - protein, 7 aa, synthetic construct
RNPRDNS

SEQ ID NO: 194633 - protein, 7 aa, synthetic construct
RASRDTM

SEQ ID NO: 194634 - protein, 7 aa, synthetic construct
KQNRDTS

SEQ ID NO: 194635 - protein, 7 aa, synthetic construct
RPNRMLE

SEQ ID NO: 194636 - protein, 7 aa, synthetic construct
RPNRQEF

SEQ ID NO: 194637 - protein, 7 aa, synthetic construct
IKNRDTN

SEQ ID NO: 194638 - protein, 7 aa, synthetic construct
NPTRDKS

SEQ ID NO: 194639 - protein, 7 aa, synthetic construct
RVVRDSS

SEQ ID NO: 194640 - protein, 7 aa, synthetic construct
MRNRDTP

SEQ ID NO: 194641 - protein, 7 aa, synthetic construct
RLDRPTS

SEQ ID NO: 194642 - protein, 7 aa, synthetic construct
RADRGTS

SEQ ID NO: 194643 - protein, 7 aa, synthetic construct
RLNRETA

SEQ ID NO: 194644 - protein, 7 aa, synthetic construct
LNKRDTS

SEQ ID NO: 194645 - protein, 7 aa, synthetic construct
IPGRHTS

SEQ ID NO: 194646 - protein, 7 aa, synthetic construct
IPKRDHS

SEQ ID NO: 194647 - protein, 7 aa, synthetic construct
RPERHTP

SEQ ID NO: 194648 - protein, 7 aa, synthetic construct
RPRADTG

SEQ ID NO: 194649 - protein, 7 aa, synthetic construct
KVNRDTT

SEQ ID NO: 194650 - protein, 7 aa, synthetic construct
RVNRDAI

SEQ ID NO: 194651 - protein, 7 aa, synthetic construct
RTNRESS

SEQ ID NO: 194652 - protein, 7 aa, synthetic construct
RETRTTS

SEQ ID NO: 194653 - protein, 7 aa, synthetic construct
RGNRDPV

SEQ ID NO: 194654 - protein, 7 aa, synthetic construct
RENRTGS

SEQ ID NO: 194655 - protein, 7 aa, synthetic construct
RPDRPTM

SEQ ID NO: 194656 - protein, 7 aa, synthetic construct
RPNRQDL

SEQ ID NO: 194657 - protein, 7 aa, synthetic construct
KPTRDTA

SEQ ID NO: 194658 - protein, 7 aa, synthetic construct
VKNRDNS

SEQ ID NO: 194659 - protein, 7 aa, synthetic construct
VSNRDTK

SEQ ID NO: 194660 - protein, 7 aa, synthetic construct
RPQRDQI

SEQ ID NO: 194661 - protein, 7 aa, synthetic construct
RVNRDNS

SEQ ID NO: 194662 - protein, 7 aa, synthetic construct
RPMRDAV

SEQ ID NO: 194663 - protein, 7 aa, synthetic construct
FKMRDTS

SEQ ID NO: 194664 - protein, 7 aa, synthetic construct
RNNRETN

SEQ ID NO: 194665 - protein, 7 aa, synthetic construct
IPNRHTG

SEQ ID NO: 194666 - protein, 7 aa, synthetic construct
RPDRAHS

SEQ ID NO: 194667 - protein, 7 aa, synthetic construct
RAGRDTS

SEQ ID NO: 194668 - protein, 7 aa, synthetic construct
RPRGDNS

SEQ ID NO: 194669 - protein, 7 aa, synthetic construct
MPNRDRN

SEQ ID NO: 194670 - protein, 7 aa, synthetic construct
RPSRIES

SEQ ID NO: 194671 - protein, 7 aa, synthetic construct
KLNRDFS

SEQ ID NO: 194672 - protein, 7 aa, synthetic construct
RDNPRTS

SEQ ID NO: 194673 - protein, 7 aa, synthetic construct
IPNRHTN

SEQ ID NO: 194674 - protein, 7 aa, synthetic construct
GPKRDTQ

SEQ ID NO: 194675 - protein, 7 aa, synthetic construct
RVMRDVS

SEQ ID NO: 194676 - protein, 7 aa, synthetic construct
RIQRDNS

SEQ ID NO: 194677 - protein, 7 aa, synthetic construct
RFSKDTS

SEQ ID NO: 194678 - protein, 7 aa, synthetic construct
RPFKDSS

SEQ ID NO: 194679 - protein, 7 aa, synthetic construct
RPSRETA

SEQ ID NO: 194680 - protein, 7 aa, synthetic construct
IPRRDTS

SEQ ID NO: 194681 - protein, 7 aa, synthetic construct
RANTDTR

SEQ ID NO: 194682 - protein, 7 aa, synthetic construct
LPKRDPS

SEQ ID NO: 194683 - protein, 7 aa, synthetic construct
RTNRDVI

SEQ ID NO: 194684 - protein, 7 aa, synthetic construct
RPNRDPG

SEQ ID NO: 194685 - protein, 7 aa, synthetic construct
QPKRDQS

SEQ ID NO: 194686 - protein, 7 aa, synthetic construct
RPLRDMA

SEQ ID NO: 194687 - protein, 7 aa, synthetic construct
RPQRLDS

SEQ ID NO: 194688 - protein, 7 aa, synthetic construct
RPPRDSI

SEQ ID NO: 194689 - protein, 7 aa, synthetic construct
RPQRETI

SEQ ID NO: 194690 - protein, 7 aa, synthetic construct
RMNRDMA

SEQ ID NO: 194691 - protein, 7 aa, synthetic construct
KPNRMTD

SEQ ID NO: 194692 - protein, 7 aa, synthetic construct
RPNRDVI

SEQ ID NO: 194693 - protein, 7 aa, synthetic construct
YPNRITG

SEQ ID NO: 194694 - protein, 7 aa, synthetic construct
RVVRDTI

SEQ ID NO: 194695 - protein, 7 aa, synthetic construct
TPNRDRG

SEQ ID NO: 194696 - protein, 7 aa, synthetic construct
RPERFTG

SEQ ID NO: 194697 - protein, 7 aa, synthetic construct
RPNRTDI

SEQ ID NO: 194698 - protein, 7 aa, synthetic construct
QPGRDKS

SEQ ID NO: 194699 - protein, 7 aa, synthetic construct
RMNKDTV

SEQ ID NO: 194700 - protein, 7 aa, synthetic construct
RPTRQDS

SEQ ID NO: 194701 - protein, 7 aa, synthetic construct
RPMRLTE

SEQ ID NO: 194702 - protein, 7 aa, synthetic construct
KPNRVES

SEQ ID NO: 194703 - protein, 7 aa, synthetic construct
RPNRADA

SEQ ID NO: 194704 - protein, 7 aa, synthetic construct
RVNKDTT

SEQ ID NO: 194705 - protein, 7 aa, synthetic construct
IPKRDFS

SEQ ID NO: 194706 - protein, 7 aa, synthetic construct
RMNRDTA

SEQ ID NO: 194707 - protein, 7 aa, synthetic construct
RMNRDQA

SEQ ID NO: 194708 - protein, 7 aa, synthetic construct
RPARDTL

SEQ ID NO: 194709 - protein, 7 aa, synthetic construct
RSVRDSS

SEQ ID NO: 194710 - protein, 7 aa, synthetic construct
KPNRDNI

SEQ ID NO: 194711 - protein, 7 aa, synthetic construct
VRNRETS

SEQ ID NO: 194712 - protein, 7 aa, synthetic construct
RSNRDPV

SEQ ID NO: 194713 - protein, 7 aa, synthetic construct
TVNRDKS

SEQ ID NO: 194714 - protein, 7 aa, synthetic construct
QKNRDTI

SEQ ID NO: 194715 - protein, 7 aa, synthetic construct
RQNRDPV

SEQ ID NO: 194716 - protein, 7 aa, synthetic construct
RMNRDNI

SEQ ID NO: 194717 - protein, 7 aa, synthetic construct
KPGRDTL

SEQ ID NO: 194718 - protein, 7 aa, synthetic construct
RETRVTS

SEQ ID NO: 194719 - protein, 7 aa, synthetic construct
RPERHTS

SEQ ID NO: 194720 - protein, 7 aa, synthetic construct
RPSRETI

SEQ ID NO: 194721 - protein, 7 aa, synthetic construct
RTTRDLS

SEQ ID NO: 194722 - protein, 7 aa, synthetic construct
RAPRDTT

SEQ ID NO: 194723 - protein, 7 aa, synthetic construct
IKMRDTS

SEQ ID NO: 194724 - protein, 7 aa, synthetic construct
RPRQDQS

SEQ ID NO: 194725 - protein, 7 aa, synthetic construct
RPNKNDS

SEQ ID NO: 194726 - protein, 7 aa, synthetic construct
RMNRDVV

SEQ ID NO: 194727 - protein, 7 aa, synthetic construct
KPARDHS

SEQ ID NO: 194728 - protein, 7 aa, synthetic construct
RPERITI

SEQ ID NO: 194729 - protein, 7 aa, synthetic construct
KTNRDIS

SEQ ID NO: 194730 - protein, 7 aa, synthetic construct
SVKRDTS

SEQ ID NO: 194731 - protein, 7 aa, synthetic construct
VKNRDTV

SEQ ID NO: 194732 - protein, 7 aa, synthetic construct
RPGRDPS

SEQ ID NO: 194733 - protein, 7 aa, synthetic construct
FPNRDKA

SEQ ID NO: 194734 - protein, 7 aa, synthetic construct
RQPRETS

SEQ ID NO: 194735 - protein, 7 aa, synthetic construct
RPERSSS

SEQ ID NO: 194736 - protein, 7 aa, synthetic construct
RPNRQEM

SEQ ID NO: 194737 - protein, 7 aa, synthetic construct
RIGRDTV

SEQ ID NO: 194738 - protein, 7 aa, synthetic construct
RGNREIS

SEQ ID NO: 194739 - protein, 7 aa, synthetic construct
VPRRETS

SEQ ID NO: 194740 - protein, 7 aa, synthetic construct
RPNRENN

SEQ ID NO: 194741 - protein, 7 aa, synthetic construct
RPSRDAI

SEQ ID NO: 194742 - protein, 7 aa, synthetic construct
RPSRDLS

SEQ ID NO: 194743 - protein, 7 aa, synthetic construct
TFNRDTK

SEQ ID NO: 194744 - protein, 7 aa, synthetic construct
IPKRDYS

SEQ ID NO: 194745 - protein, 7 aa, synthetic construct
RTNRDTS

SEQ ID NO: 194746 - protein, 7 aa, synthetic construct
RSGRDTV

SEQ ID NO: 194747 - protein, 7 aa, synthetic construct
QKSRDTS

SEQ ID NO: 194748 - protein, 7 aa, synthetic construct
TMNRDKS

SEQ ID NO: 194749 - protein, 7 aa, synthetic construct
RAQRDNS

SEQ ID NO: 194750 - protein, 7 aa, synthetic construct
IPKRDTI

SEQ ID NO: 194751 - protein, 7 aa, synthetic construct
FKPRDTS

SEQ ID NO: 194752 - protein, 7 aa, synthetic construct
GKFRDTS

SEQ ID NO: 194753 - protein, 7 aa, synthetic construct
VMNRDTK

SEQ ID NO: 194754 - protein, 7 aa, synthetic construct
RVNRDVM

SEQ ID NO: 194755 - protein, 7 aa, synthetic construct
RANLDTR

SEQ ID NO: 194756 - protein, 7 aa, synthetic construct
RPVRGTD

SEQ ID NO: 194757 - protein, 7 aa, synthetic construct
RRNEMTS

SEQ ID NO: 194758 - protein, 7 aa, synthetic construct
RPNRDAS

SEQ ID NO: 194759 - protein, 7 aa, synthetic construct
RPSRDNM

SEQ ID NO: 194760 - protein, 7 aa, synthetic construct
RPRADGS

SEQ ID NO: 194761 - protein, 7 aa, synthetic construct
IPRRDVS

SEQ ID NO: 194762 - protein, 7 aa, synthetic construct
RPNRIEN

SEQ ID NO: 194763 - protein, 7 aa, synthetic construct
KAGRDTS

SEQ ID NO: 194764 - protein, 7 aa, synthetic construct
TRNKDTS

SEQ ID NO: 194765 - protein, 7 aa, synthetic construct
RPSRDVV

SEQ ID NO: 194766 - protein, 7 aa, synthetic construct
RPQRSDS

SEQ ID NO: 194767 - protein, 7 aa, synthetic construct
PPRRDTV

SEQ ID NO: 194768 - protein, 7 aa, synthetic construct
RPARDAF

SEQ ID NO: 194769 - protein, 7 aa, synthetic construct
YIKRDTS

SEQ ID NO: 194770 - protein, 7 aa, synthetic construct
KENRFTS

SEQ ID NO: 194771 - protein, 7 aa, synthetic construct
RPDRVTV

SEQ ID NO: 194772 - protein, 7 aa, synthetic construct
RANRDVG

SEQ ID NO: 194773 - protein, 7 aa, synthetic construct
RVQRDVS

SEQ ID NO: 194774 - protein, 7 aa, synthetic construct
NPKRDFS

SEQ ID NO: 194775 - protein, 7 aa, synthetic construct
TKNRDTQ

SEQ ID NO: 194776 - protein, 7 aa, synthetic construct
RPPRDYS

SEQ ID NO: 194777 - protein, 7 aa, synthetic construct
MGKRDTS

SEQ ID NO: 194778 - protein, 7 aa, synthetic construct
RINKDYS

SEQ ID NO: 194779 - protein, 7 aa, synthetic construct
RVNRDGM

SEQ ID NO: 194780 - protein, 7 aa, synthetic construct
RPERATF

SEQ ID NO: 194781 - protein, 7 aa, synthetic construct
KANRETS

SEQ ID NO: 194782 - protein, 7 aa, synthetic construct
RVNREGS

SEQ ID NO: 194783 - protein, 7 aa, synthetic construct
RAVRDLS

SEQ ID NO: 194784 - protein, 7 aa, synthetic construct
RPPRETQ

SEQ ID NO: 194785 - protein, 7 aa, synthetic construct
RMNADTR

SEQ ID NO: 194786 - protein, 7 aa, synthetic construct
RNTRDTV

SEQ ID NO: 194787 - protein, 7 aa, synthetic construct
RVNPDTR

SEQ ID NO: 194788 - protein, 7 aa, synthetic construct
KVNRDFS

SEQ ID NO: 194789 - protein, 7 aa, synthetic construct
RPERDRG

SEQ ID NO: 194790 - protein, 7 aa, synthetic construct
KPMRDPS

SEQ ID NO: 194791 - protein, 7 aa, synthetic construct
MPRRDNS

SEQ ID NO: 194792 - protein, 7 aa, synthetic construct
QPNRDKS

SEQ ID NO: 194793 - protein, 7 aa, synthetic construct
NKNRDQS

SEQ ID NO: 194794 - protein, 7 aa, synthetic construct
NPNRDKY

SEQ ID NO: 194795 - protein, 7 aa, synthetic construct
KQNRDNS

SEQ ID NO: 194796 - protein, 7 aa, synthetic construct
RINREQS

SEQ ID NO: 194797 - protein, 7 aa, synthetic construct
RPHKDTT

SEQ ID NO: 194798 - protein, 7 aa, synthetic construct
RPTRDIS

SEQ ID NO: 194799 - protein, 7 aa, synthetic construct
KPNRDLQ

SEQ ID NO: 194800 - protein, 7 aa, synthetic construct
RPDRDRA

SEQ ID NO: 194801 - protein, 7 aa, synthetic construct
KLNRDTF

SEQ ID NO: 194802 - protein, 7 aa, synthetic construct
RPRMDTV

SEQ ID NO: 194803 - protein, 7 aa, synthetic construct
RPNPMTY

SEQ ID NO: 194804 - protein, 7 aa, synthetic construct
EKNRITS

SEQ ID NO: 194805 - protein, 7 aa, synthetic construct
RPDRANS

SEQ ID NO: 194806 - protein, 7 aa, synthetic construct
QPKRDPS

SEQ ID NO: 194807 - protein, 7 aa, synthetic construct
LPFRDKS

SEQ ID NO: 194808 - protein, 7 aa, synthetic construct
AKNRDFS

SEQ ID NO: 194809 - protein, 7 aa, synthetic construct
RSGRDTP

SEQ ID NO: 194810 - protein, 7 aa, synthetic construct
GIKRDTS

SEQ ID NO: 194811 - protein, 7 aa, synthetic construct
RPNRTEV

SEQ ID NO: 194812 - protein, 7 aa, synthetic construct
KVNRDTQ

SEQ ID NO: 194813 - protein, 7 aa, synthetic construct
RMNPHTS

SEQ ID NO: 194814 - protein, 7 aa, synthetic construct
NPKRDTM

SEQ ID NO: 194815 - protein, 7 aa, synthetic construct
MPRRDPS

SEQ ID NO: 194816 - protein, 7 aa, synthetic construct
RPNQETR

SEQ ID NO: 194817 - protein, 7 aa, synthetic construct
RPDRPTT

SEQ ID NO: 194818 - protein, 7 aa, synthetic construct
IPKRDTT

SEQ ID NO: 194819 - protein, 7 aa, synthetic construct
RVERHTS

SEQ ID NO: 194820 - protein, 7 aa, synthetic construct
SKNRDVS

SEQ ID NO: 194821 - protein, 7 aa, synthetic construct
RQLRDTP

SEQ ID NO: 194822 - protein, 7 aa, synthetic construct
RKNQDTM

SEQ ID NO: 194823 - protein, 7 aa, synthetic construct
RPDRHGS

SEQ ID NO: 194824 - protein, 7 aa, synthetic construct
RINQDTR

SEQ ID NO: 194825 - protein, 7 aa, synthetic construct
QLNRDKS

SEQ ID NO: 194826 - protein, 7 aa, synthetic construct
RQKFDTS

SEQ ID NO: 194827 - protein, 7 aa, synthetic construct
KPRGDTS

SEQ ID NO: 194828 - protein, 7 aa, synthetic construct
QENRKTS

SEQ ID NO: 194829 - protein, 7 aa, synthetic construct
RPARETN

SEQ ID NO: 194830 - protein, 7 aa, synthetic construct
RQLRDTV

SEQ ID NO: 194831 - protein, 7 aa, synthetic construct
RALRDTP

SEQ ID NO: 194832 - protein, 7 aa, synthetic construct
RRNVDTP

SEQ ID NO: 194833 - protein, 7 aa, synthetic construct
RQTRDTA

SEQ ID NO: 194834 - protein, 7 aa, synthetic construct
RPARDIL

SEQ ID NO: 194835 - protein, 7 aa, synthetic construct
RIQRDTI

SEQ ID NO: 194836 - protein, 7 aa, synthetic construct
RASRDTT

SEQ ID NO: 194837 - protein, 7 aa, synthetic construct
QPKRDTV

SEQ ID NO: 194838 - protein, 7 aa, synthetic construct
RPERGMS

SEQ ID NO: 194839 - protein, 7 aa, synthetic construct
RENRLAS

SEQ ID NO: 194840 - protein, 7 aa, synthetic construct
VPKRDSS

SEQ ID NO: 194841 - protein, 7 aa, synthetic construct
RAPRDTS

SEQ ID NO: 194842 - protein, 7 aa, synthetic construct
APNRDKF

SEQ ID NO: 194843 - protein, 7 aa, synthetic construct
NPERRTS

SEQ ID NO: 194844 - protein, 7 aa, synthetic construct
GKNRDTS

SEQ ID NO: 194845 - protein, 7 aa, synthetic construct
VPHRLTS

SEQ ID NO: 194846 - protein, 7 aa, synthetic construct
RPSAHTS

SEQ ID NO: 194847 - protein, 7 aa, synthetic construct
RQNRDAG

SEQ ID NO: 194848 - protein, 7 aa, synthetic construct
RPERDPR

SEQ ID NO: 194849 - protein, 7 aa, synthetic construct
RANRDNV

SEQ ID NO: 194850 - protein, 7 aa, synthetic construct
RVPRDTQ

SEQ ID NO: 194851 - protein, 7 aa, synthetic construct
RPIRDNT

SEQ ID NO: 194852 - protein, 7 aa, synthetic construct
RENRTIS

SEQ ID NO: 194853 - protein, 7 aa, synthetic construct
RPNRGDI

SEQ ID NO: 194854 - protein, 7 aa, synthetic construct
RGTRDQS

SEQ ID NO: 194855 - protein, 7 aa, synthetic construct
RDNRETR

SEQ ID NO: 194856 - protein, 7 aa, synthetic construct
RPLRENS

SEQ ID NO: 194857 - protein, 7 aa, synthetic construct
RSVRDTG

SEQ ID NO: 194858 - protein, 7 aa, synthetic construct
RATRDTS

SEQ ID NO: 194859 - protein, 7 aa, synthetic construct
RPNQRES

SEQ ID NO: 194860 - protein, 7 aa, synthetic construct
KQQRDTS

SEQ ID NO: 194861 - protein, 7 aa, synthetic construct
KPMRDYS

SEQ ID NO: 194862 - protein, 7 aa, synthetic construct
YPHRLTS

SEQ ID NO: 194863 - protein, 7 aa, synthetic construct
RTARDNS

SEQ ID NO: 194864 - protein, 7 aa, synthetic construct
RPRTDNS

SEQ ID NO: 194865 - protein, 7 aa, synthetic construct
SPERRTS

SEQ ID NO: 194866 - protein, 7 aa, synthetic construct
RQVRDTT

SEQ ID NO: 194867 - protein, 7 aa, synthetic construct
RPGRDAT

SEQ ID NO: 194868 - protein, 7 aa, synthetic construct
RPVRDTI

SEQ ID NO: 194869 - protein, 7 aa, synthetic construct
MPRRDTM

SEQ ID NO: 194870 - protein, 7 aa, synthetic construct
RAQRETS

SEQ ID NO: 194871 - protein, 7 aa, synthetic construct
RPNKDIY

SEQ ID NO: 194872 - protein, 7 aa, synthetic construct
FKIRDTS

SEQ ID NO: 194873 - protein, 7 aa, synthetic construct
RNPRDTV

SEQ ID NO: 194874 - protein, 7 aa, synthetic construct
KPNRTTE

SEQ ID NO: 194875 - protein, 7 aa, synthetic construct
RIQRDTV

SEQ ID NO: 194876 - protein, 7 aa, synthetic construct
KPGRDTN

SEQ ID NO: 194877 - protein, 7 aa, synthetic construct
PKLRDTS

SEQ ID NO: 194878 - protein, 7 aa, synthetic construct
RGNRDVL

SEQ ID NO: 194879 - protein, 7 aa, synthetic construct
RPDRTPS

SEQ ID NO: 194880 - protein, 7 aa, synthetic construct
RPQHSTS

SEQ ID NO: 194881 - protein, 7 aa, synthetic construct
RPGRDQV

SEQ ID NO: 194882 - protein, 7 aa, synthetic construct
RPPRDYT

SEQ ID NO: 194883 - protein, 7 aa, synthetic construct
RPERVTY

SEQ ID NO: 194884 - protein, 7 aa, synthetic construct
RQNKDTI

SEQ ID NO: 194885 - protein, 7 aa, synthetic construct
KPNRDTA

SEQ ID NO: 194886 - protein, 7 aa, synthetic construct
KGNRDAS

SEQ ID NO: 194887 - protein, 7 aa, synthetic construct
RPQRVES

SEQ ID NO: 194888 - protein, 7 aa, synthetic construct
RPGRVDS

SEQ ID NO: 194889 - protein, 7 aa, synthetic construct
RIARDTV

SEQ ID NO: 194890 - protein, 7 aa, synthetic construct
YKVRDTS

SEQ ID NO: 194891 - protein, 7 aa, synthetic construct
KPNRDYT

SEQ ID NO: 194892 - protein, 7 aa, synthetic construct
REGRNTS

SEQ ID NO: 194893 - protein, 7 aa, synthetic construct
GPLRHTS

SEQ ID NO: 194894 - protein, 7 aa, synthetic construct
ARNKDTS

SEQ ID NO: 194895 - protein, 7 aa, synthetic construct
RNNRETV

SEQ ID NO: 194896 - protein, 7 aa, synthetic construct
MKGRDTS

SEQ ID NO: 194897 - protein, 7 aa, synthetic construct
RPQRIDS

SEQ ID NO: 194898 - protein, 7 aa, synthetic construct
RPRGDIS

SEQ ID NO: 194899 - protein, 7 aa, synthetic construct
RAVRDTA

SEQ ID NO: 194900 - protein, 7 aa, synthetic construct
RPLRDQM

SEQ ID NO: 194901 - protein, 7 aa, synthetic construct
RPQRDIQ

SEQ ID NO: 194902 - protein, 7 aa, synthetic construct
QPHRLTS

SEQ ID NO: 194903 - protein, 7 aa, synthetic construct
EPNKRTS

SEQ ID NO: 194904 - protein, 7 aa, synthetic construct
AGKRDTS

SEQ ID NO: 194905 - protein, 7 aa, synthetic construct
RVFKDTS

SEQ ID NO: 194906 - protein, 7 aa, synthetic construct
RSTRDVS

SEQ ID NO: 194907 - protein, 7 aa, synthetic construct
IQNRDTR

SEQ ID NO: 194908 - protein, 7 aa, synthetic construct
RLDRATS

SEQ ID NO: 194909 - protein, 7 aa, synthetic construct
RVNREVS

SEQ ID NO: 194910 - protein, 7 aa, synthetic construct
RMVRDTG

SEQ ID NO: 194911 - protein, 7 aa, synthetic construct
KPNRDPG

SEQ ID NO: 194912 - protein, 7 aa, synthetic construct
RVGRDTP

SEQ ID NO: 194913 - protein, 7 aa, synthetic construct
MRPRDTS

SEQ ID NO: 194914 - protein, 7 aa, synthetic construct
RNPRDTG

SEQ ID NO: 194915 - protein, 7 aa, synthetic construct
DPNRSTK

SEQ ID NO: 194916 - protein, 7 aa, synthetic construct
RTLRDTG

SEQ ID NO: 194917 - protein, 7 aa, synthetic construct
KNNRDTT

SEQ ID NO: 194918 - protein, 7 aa, synthetic construct
RPDRPTA

SEQ ID NO: 194919 - protein, 7 aa, synthetic construct
RSNRDGI

SEQ ID NO: 194920 - protein, 7 aa, synthetic construct
RGTRDTG

SEQ ID NO: 194921 - protein, 7 aa, synthetic construct
RPMRELS

SEQ ID NO: 194922 - protein, 7 aa, synthetic construct
RNTRDQS

SEQ ID NO: 194923 - protein, 7 aa, synthetic construct
RQARDPS

SEQ ID NO: 194924 - protein, 7 aa, synthetic construct
RPRADTM

SEQ ID NO: 194925 - protein, 7 aa, synthetic construct
RTSRDTV

SEQ ID NO: 194926 - protein, 7 aa, synthetic construct
HPLRDKS

SEQ ID NO: 194927 - protein, 7 aa, synthetic construct
RPRTDQS

SEQ ID NO: 194928 - protein, 7 aa, synthetic construct
IMKRDTS

SEQ ID NO: 194929 - protein, 7 aa, synthetic construct
RPNRDTF

SEQ ID NO: 194930 - protein, 7 aa, synthetic construct
RPTKDHS

SEQ ID NO: 194931 - protein, 7 aa, synthetic construct
RPARDSS

SEQ ID NO: 194932 - protein, 7 aa, synthetic construct
GTKRDTS

SEQ ID NO: 194933 - protein, 7 aa, synthetic construct
RPKNDTQ

SEQ ID NO: 194934 - protein, 7 aa, synthetic construct
RLDRQTS

SEQ ID NO: 194935 - protein, 7 aa, synthetic construct
YPNRDKI

SEQ ID NO: 194936 - protein, 7 aa, synthetic construct
FPNRETR

SEQ ID NO: 194937 - protein, 7 aa, synthetic construct
KLNRDAS

SEQ ID NO: 194938 - protein, 7 aa, synthetic construct
RPMRETV

SEQ ID NO: 194939 - protein, 7 aa, synthetic construct
RPLREQS

SEQ ID NO: 194940 - protein, 7 aa, synthetic construct
RPLRMES

SEQ ID NO: 194941 - protein, 7 aa, synthetic construct
RTERDTK

SEQ ID NO: 194942 - protein, 7 aa, synthetic construct
YPGRDKS

SEQ ID NO: 194943 - protein, 7 aa, synthetic construct
VTNRDRS

SEQ ID NO: 194944 - protein, 7 aa, synthetic construct
RGTRDTL

SEQ ID NO: 194945 - protein, 7 aa, synthetic construct
SKNRDMS

SEQ ID NO: 194946 - protein, 7 aa, synthetic construct
RVNRDSG
